United States Patent Application Publication US 2015/0232836 A1 - sequence listing, part 36

SEQ ID NO: 1398015 - DNA, 15 bp, Homo sapiens
acaattgacatttca

SEQ ID NO: 1398016 - DNA, 15 bp, Homo sapiens
gacaattgacatttc

SEQ ID NO: 1398017 - DNA, 15 bp, Homo sapiens
agacaattgacattt

SEQ ID NO: 1398018 - DNA, 15 bp, Homo sapiens
cagacaattgacatt

SEQ ID NO: 1398019 - DNA, 15 bp, Homo sapiens
tcagacaattgacat

SEQ ID NO: 1398020 - DNA, 15 bp, Homo sapiens
atcagacaattgaca

SEQ ID NO: 1398021 - DNA, 15 bp, Homo sapiens
aatcagacaattgac

SEQ ID NO: 1398022 - DNA, 15 bp, Homo sapiens
caatcagacaattga

SEQ ID NO: 1398023 - DNA, 15 bp, Homo sapiens
gcaatcagacaattg

SEQ ID NO: 1398024 - DNA, 15 bp, Homo sapiens
tgcaatcagacaatt

SEQ ID NO: 1398025 - DNA, 15 bp, Homo sapiens
ctgcaatcagacaat

SEQ ID NO: 1398026 - DNA, 15 bp, Homo sapiens
ctactgcaatcagac

SEQ ID NO: 1398027 - DNA, 15 bp, Homo sapiens
cctactgcaatcaga

SEQ ID NO: 1398028 - DNA, 15 bp, Homo sapiens
ccctactgcaatcag

SEQ ID NO: 1398029 - DNA, 15 bp, Homo sapiens
gccctactgcaatca

SEQ ID NO: 1398030 - DNA, 15 bp, Homo sapiens
tgccctactgcaatc

SEQ ID NO: 1398031 - DNA, 15 bp, Homo sapiens
gtgccctactgcaat

SEQ ID NO: 1398032 - DNA, 15 bp, Homo sapiens
ggtgccctactgcaa

SEQ ID NO: 1398033 - DNA, 15 bp, Homo sapiens
aggtgccctactgca

SEQ ID NO: 1398034 - DNA, 15 bp, Homo sapiens
caggtgccctactgc

SEQ ID NO: 1398035 - DNA, 15 bp, Homo sapiens
ccaggtgccctactg

SEQ ID NO: 1398036 - DNA, 15 bp, Homo sapiens
tccaggtgccctact

SEQ ID NO: 1398037 - DNA, 15 bp, Homo sapiens
ttccaggtgccctac

SEQ ID NO: 1398038 - DNA, 15 bp, Homo sapiens
cttccaggtgcccta

SEQ ID NO: 1398039 - DNA, 15 bp, Homo sapiens
acttccaggtgccct

SEQ ID NO: 1398040 - DNA, 15 bp, Homo sapiens
aacttccaggtgccc

SEQ ID NO: 1398041 - DNA, 15 bp, Homo sapiens
taacttccaggtgcc

SEQ ID NO: 1398042 - DNA, 15 bp, Homo sapiens
ataacttccaggtgc

SEQ ID NO: 1398043 - DNA, 15 bp, Homo sapiens
aataacttccaggtg

SEQ ID NO: 1398044 - DNA, 15 bp, Homo sapiens
gaataacttccaggt

SEQ ID NO: 1398045 - DNA, 15 bp, Homo sapiens
tgaataacttccagg

SEQ ID NO: 1398046 - DNA, 15 bp, Homo sapiens
ctgaataacttccag

SEQ ID NO: 1398047 - DNA, 15 bp, Homo sapiens
tctgaataacttcca

SEQ ID NO: 1398048 - DNA, 15 bp, Homo sapiens
atctgaataacttcc

SEQ ID NO: 1398049 - DNA, 15 bp, Homo sapiens
tatctgaataacttc

SEQ ID NO: 1398050 - DNA, 15 bp, Homo sapiens
ttatctgaataactt

SEQ ID NO: 1398051 - DNA, 15 bp, Homo sapiens
cttatctgaataact

SEQ ID NO: 1398052 - DNA, 15 bp, Homo sapiens
gcttatctgaataac

SEQ ID NO: 1398053 - DNA, 15 bp, Homo sapiens
tgcttatctgaataa

SEQ ID NO: 1398054 - DNA, 15 bp, Homo sapiens
ctgcttatctgaata

SEQ ID NO: 1398055 - DNA, 15 bp, Homo sapiens
tctgcttatctgaat

SEQ ID NO: 1398056 - DNA, 15 bp, Homo sapiens
ctctgcttatctgaa

SEQ ID NO: 1398057 - DNA, 15 bp, Homo sapiens
cctctgcttatctga

SEQ ID NO: 1398058 - DNA, 15 bp, Homo sapiens
gcctctgcttatctg

SEQ ID NO: 1398059 - DNA, 15 bp, Homo sapiens
cgcctctgcttatct

SEQ ID NO: 1398060 - DNA, 15 bp, Homo sapiens
acgcctctgcttatc

SEQ ID NO: 1398061 - DNA, 15 bp, Homo sapiens
aacgcctctgcttat

SEQ ID NO: 1398062 - DNA, 15 bp, Homo sapiens
aaacgcctctgctta

SEQ ID NO: 1398063 - DNA, 15 bp, Homo sapiens
aaaacgcctctgctt

SEQ ID NO: 1398064 - DNA, 15 bp, Homo sapiens
caaaacgcctctgct

SEQ ID NO: 1398065 - DNA, 15 bp, Homo sapiens
tcaaaacgcctctgc

SEQ ID NO: 1398066 - DNA, 15 bp, Homo sapiens
ttcaaaacgcctctg

SEQ ID NO: 1398067 - DNA, 15 bp, Homo sapiens
attcaaaacgcctct

SEQ ID NO: 1398068 - DNA, 15 bp, Homo sapiens
cattcaaaacgcctc

SEQ ID NO: 1398069 - DNA, 15 bp, Homo sapiens
acattcaaaacgcct

SEQ ID NO: 1398070 - DNA, 15 bp, Homo sapiens
aacattcaaaacgcc

SEQ ID NO: 1398071 - DNA, 15 bp, Homo sapiens
taacattcaaaacgc

SEQ ID NO: 1398072 - DNA, 15 bp, Homo sapiens
ttaacattcaaaacg

SEQ ID NO: 1398073 - DNA, 15 bp, Homo sapiens
attaacattcaaaac

SEQ ID NO: 1398074 - DNA, 15 bp, Homo sapiens
tcattaacattcaaa

SEQ ID NO: 1398075 - DNA, 15 bp, Homo sapiens
ttcattaacattcaa

SEQ ID NO: 1398076 - DNA, 15 bp, Homo sapiens
cttcattaacattca

SEQ ID NO: 1398077 - DNA, 15 bp, Homo sapiens
gcttcattaacattc

SEQ ID NO: 1398078 - DNA, 15 bp, Homo sapiens
ggcttcattaacatt

SEQ ID NO: 1398079 - DNA, 15 bp, Homo sapiens
aggcttcattaacat

SEQ ID NO: 1398080 - DNA, 15 bp, Homo sapiens
caggcttcattaaca

SEQ ID NO: 1398081 - DNA, 15 bp, Homo sapiens
acaggcttcattaac

SEQ ID NO: 1398082 - DNA, 15 bp, Homo sapiens
aacaggcttcattaa

SEQ ID NO: 1398083 - DNA, 15 bp, Homo sapiens
caacaggcttcatta

SEQ ID NO: 1398084 - DNA, 15 bp, Homo sapiens
ccaacaggcttcatt

SEQ ID NO: 1398085 - DNA, 15 bp, Homo sapiens
cccaacaggcttcat

SEQ ID NO: 1398086 - DNA, 15 bp, Homo sapiens
tcccaacaggcttca

SEQ ID NO: 1398087 - DNA, 15 bp, Homo sapiens
ctcccaacaggcttc

SEQ ID NO: 1398088 - DNA, 15 bp, Homo sapiens
gctcccaacaggctt

SEQ ID NO: 1398089 - DNA, 15 bp, Homo sapiens
ggctcccaacaggct

SEQ ID NO: 1398090 - DNA, 15 bp, Homo sapiens
cggctcccaacaggc

SEQ ID NO: 1398091 - DNA, 15 bp, Homo sapiens
acggctcccaacagg

SEQ ID NO: 1398092 - DNA, 15 bp, Homo sapiens
cacggctcccaacag

SEQ ID NO: 1398093 - DNA, 15 bp, Homo sapiens
tcacggctcccaaca

SEQ ID NO: 1398094 - DNA, 15 bp, Homo sapiens
gtcacggctcccaac

SEQ ID NO: 1398095 - DNA, 15 bp, Homo sapiens
ggtcacggctcccaa

SEQ ID NO: 1398096 - DNA, 15 bp, Homo sapiens
aggtcacggctccca

SEQ ID NO: 1398097 - DNA, 15 bp, Homo sapiens
aaggtcacggctccc

SEQ ID NO: 1398098 - DNA, 15 bp, Homo sapiens
gaaggtcacggctcc

SEQ ID NO: 1398099 - DNA, 15 bp, Homo sapiens
agaaggtcacggctc

SEQ ID NO: 1398100 - DNA, 15 bp, Homo sapiens
tagaaggtcacggct

SEQ ID NO: 1398101 - DNA, 15 bp, Homo sapiens
ttagaaggtcacggc

SEQ ID NO: 1398102 - DNA, 15 bp, Homo sapiens
cttagaaggtcacgg

SEQ ID NO: 1398103 - DNA, 15 bp, Homo sapiens
acttagaaggtcacg

SEQ ID NO: 1398104 - DNA, 15 bp, Homo sapiens
cacttagaaggtcac

SEQ ID NO: 1398105 - DNA, 15 bp, Homo sapiens
tcacttagaaggtca

SEQ ID NO: 1398106 - DNA, 15 bp, Homo sapiens
atcacttagaaggtc

SEQ ID NO: 1398107 - DNA, 15 bp, Homo sapiens
catcacttagaaggt

SEQ ID NO: 1398108 - DNA, 15 bp, Homo sapiens
ccatcacttagaagg

SEQ ID NO: 1398109 - DNA, 15 bp, Homo sapiens
accatcacttagaag

SEQ ID NO: 1398110 - DNA, 15 bp, Homo sapiens
caccatcacttagaa

SEQ ID NO: 1398111 - DNA, 15 bp, Homo sapiens
acaccatcacttaga

SEQ ID NO: 1398112 - DNA, 15 bp, Homo sapiens
aacaccatcacttag

SEQ ID NO: 1398113 - DNA, 15 bp, Homo sapiens
aaacaccatcactta

SEQ ID NO: 1398114 - DNA, 15 bp, Homo sapiens
gaaacaccatcactt

SEQ ID NO: 1398115 - DNA, 15 bp, Homo sapiens
tgaaacaccatcact

SEQ ID NO: 1398116 - DNA, 15 bp, Homo sapiens
ctgaaacaccatcac

SEQ ID NO: 1398117 - DNA, 15 bp, Homo sapiens
cctgaaacaccatca

SEQ ID NO: 1398118 - DNA, 15 bp, Homo sapiens
tcctgaaacaccatc

SEQ ID NO: 1398119 - DNA, 15 bp, Homo sapiens
ttcctgaaacaccat

SEQ ID NO: 1398120 - DNA, 15 bp, Homo sapiens
tttcctgaaacacca

SEQ ID NO: 1398121 - DNA, 15 bp, Homo sapiens
ttttcctgaaacacc

SEQ ID NO: 1398122 - DNA, 15 bp, Homo sapiens
cttttcctgaaacac

SEQ ID NO: 1398123 - DNA, 15 bp, Homo sapiens
ccttttcctgaaaca

SEQ ID NO: 1398124 - DNA, 15 bp, Homo sapiens
tccttttcctgaaac

SEQ ID NO: 1398125 - DNA, 15 bp, Homo sapiens
ttccttttcctgaaa

SEQ ID NO: 1398126 - DNA, 15 bp, Homo sapiens
cttccttttcctgaa

SEQ ID NO: 1398127 - DNA, 15 bp, Homo sapiens
tcttccttttcctga

SEQ ID NO: 1398128 - DNA, 15 bp, Homo sapiens
atcttccttttcctg

SEQ ID NO: 1398129 - DNA, 15 bp, Homo sapiens
gatcttccttttcct

SEQ ID NO: 1398130 - DNA, 15 bp, Homo sapiens
tgatcttccttttcc

SEQ ID NO: 1398131 - DNA, 15 bp, Homo sapiens
ctgatcttccttttc

SEQ ID NO: 1398132 - DNA, 15 bp, Homo sapiens
cctgatcttcctttt

SEQ ID NO: 1398133 - DNA, 15 bp, Homo sapiens
gcctgatcttccttt

SEQ ID NO: 1398134 - DNA, 15 bp, Homo sapiens
tgcctgatcttcctt

SEQ ID NO: 1398135 - DNA, 15 bp, Homo sapiens
ttgcctgatcttcct

SEQ ID NO: 1398136 - DNA, 15 bp, Homo sapiens
attgcctgatcttcc

SEQ ID NO: 1398137 - DNA, 15 bp, Homo sapiens
aattgcctgatcttc

SEQ ID NO: 1398138 - DNA, 15 bp, Homo sapiens
caattgcctgatctt

SEQ ID NO: 1398139 - DNA, 15 bp, Homo sapiens
tcaattgcctgatct

SEQ ID NO: 1398140 - DNA, 15 bp, Homo sapiens
ttcaattgcctgatc

SEQ ID NO: 1398141 - DNA, 15 bp, Homo sapiens
tttcaattgcctgat

SEQ ID NO: 1398142 - DNA, 15 bp, Homo sapiens
atttcaattgcctga

SEQ ID NO: 1398143 - DNA, 15 bp, Homo sapiens
catttcaattgcctg

SEQ ID NO: 1398144 - DNA, 15 bp, Homo sapiens
acatttcaattgcct

SEQ ID NO: 1398145 - DNA, 15 bp, Homo sapiens
gacatttcaattgcc

SEQ ID NO: 1398146 - DNA, 15 bp, Homo sapiens
cgacatttcaattgc

SEQ ID NO: 1398147 - DNA, 15 bp, Homo sapiens
acgacatttcaattg

SEQ ID NO: 1398148 - DNA, 15 bp, Homo sapiens
aacgacatttcaatt

SEQ ID NO: 1398149 - DNA, 15 bp, Homo sapiens
gaacgacatttcaat

SEQ ID NO: 1398150 - DNA, 15 bp, Homo sapiens
agaacgacatttcaa

SEQ ID NO: 1398151 - DNA, 15 bp, Homo sapiens
gagaacgacatttca

SEQ ID NO: 1398152 - DNA, 15 bp, Homo sapiens
agagaacgacatttc

SEQ ID NO: 1398153 - DNA, 15 bp, Homo sapiens
aagagaacgacattt

SEQ ID NO: 1398154 - DNA, 15 bp, Homo sapiens
aaagagaacgacatt

SEQ ID NO: 1398155 - DNA, 15 bp, Homo sapiens
aaaagagaacgacat

SEQ ID NO: 1398156 - DNA, 15 bp, Homo sapiens
aaaaagagaacgaca

SEQ ID NO: 1398157 - DNA, 15 bp, Homo sapiens
aaaaaagagaacgac

SEQ ID NO: 1398158 - DNA, 15 bp, Homo sapiens
aaaaaaagagaacga

SEQ ID NO: 1398159 - DNA, 15 bp, Homo sapiens
taaaaaaagagaacg

SEQ ID NO: 1398160 - DNA, 15 bp, Homo sapiens
gtaaaaaaagagaac

SEQ ID NO: 1398161 - DNA, 15 bp, Homo sapiens
agtaaaaaaagagaa

SEQ ID NO: 1398162 - DNA, 15 bp, Homo sapiens
tagtaaaaaaagaga

SEQ ID NO: 1398163 - DNA, 15 bp, Homo sapiens
ctagtaaaaaaagag

SEQ ID NO: 1398164 - DNA, 15 bp, Homo sapiens
actagtaaaaaaaga

SEQ ID NO: 1398165 - DNA, 15 bp, Homo sapiens
aactagtaaaaaaag

SEQ ID NO: 1398166 - DNA, 15 bp, Homo sapiens
gaactagtaaaaaaa

SEQ ID NO: 1398167 - DNA, 15 bp, Homo sapiens
tgaactagtaaaaaa

SEQ ID NO: 1398168 - DNA, 15 bp, Homo sapiens
ctgaactagtaaaaa

SEQ ID NO: 1398169 - DNA, 15 bp, Homo sapiens
actgaactagtaaaa

SEQ ID NO: 1398170 - DNA, 15 bp, Homo sapiens
aactgaactagtaaa

SEQ ID NO: 1398171 - DNA, 15 bp, Homo sapiens
caactgaactagtaa

SEQ ID NO: 1398172 - DNA, 15 bp, Homo sapiens
gcaactgaactagta

SEQ ID NO: 1398173 - DNA, 15 bp, Homo sapiens
agcaactgaactagt

SEQ ID NO: 1398174 - DNA, 15 bp, Homo sapiens
aagcaactgaactag

SEQ ID NO: 1398175 - DNA, 15 bp, Homo sapiens
aaagcaactgaacta

SEQ ID NO: 1398176 - DNA, 15 bp, Homo sapiens
aaaagcaactgaact

SEQ ID NO: 1398177 - DNA, 15 bp, Homo sapiens
aaaaagcaactgaac

SEQ ID NO: 1398178 - DNA, 15 bp, Homo sapiens
gaaaaagcaactgaa

SEQ ID NO: 1398179 - DNA, 15 bp, Homo sapiens
agaaaaagcaactga

SEQ ID NO: 1398180 - DNA, 15 bp, Homo sapiens
gagaaaaagcaactg

SEQ ID NO: 1398181 - DNA, 15 bp, Homo sapiens
tgagaaaaagcaact

SEQ ID NO: 1398182 - DNA, 15 bp, Homo sapiens
gtgagaaaaagcaac

SEQ ID NO: 1398183 - DNA, 15 bp, Homo sapiens
ggtgagaaaaagcaa

SEQ ID NO: 1398184 - DNA, 15 bp, Homo sapiens
tggtgagaaaaagca

SEQ ID NO: 1398185 - DNA, 15 bp, Homo sapiens
gtggtgagaaaaagc

SEQ ID NO: 1398186 - DNA, 15 bp, Homo sapiens
cgtggtgagaaaaag

SEQ ID NO: 1398187 - DNA, 15 bp, Homo sapiens
tcgtggtgagaaaaa

SEQ ID NO: 1398188 - DNA, 15 bp, Homo sapiens
ctcgtggtgagaaaa

SEQ ID NO: 1398189 - DNA, 15 bp, Homo sapiens
tctcgtggtgagaaa

SEQ ID NO: 1398190 - DNA, 15 bp, Homo sapiens
gtctcgtggtgagaa

SEQ ID NO: 1398191 - DNA, 15 bp, Homo sapiens
tgtctcgtggtgaga

SEQ ID NO: 1398192 - DNA, 15 bp, Homo sapiens
gtgtctcgtggtgag

SEQ ID NO: 1398193 - DNA, 15 bp, Homo sapiens
agtgtctcgtggtga

SEQ ID NO: 1398194 - DNA, 15 bp, Homo sapiens
gagtgtctcgtggtg

SEQ ID NO: 1398195 - DNA, 15 bp, Homo sapiens
tgagtgtctcgtggt

SEQ ID NO: 1398196 - DNA, 15 bp, Homo sapiens
atgagtgtctcgtgg

SEQ ID NO: 1398197 - DNA, 15 bp, Homo sapiens
aatgagtgtctcgtg

SEQ ID NO: 1398198 - DNA, 15 bp, Homo sapiens
caatgagtgtctcgt

SEQ ID NO: 1398199 - DNA, 15 bp, Homo sapiens
tcaatgagtgtctcg

SEQ ID NO: 1398200 - DNA, 15 bp, Homo sapiens
ttcaatgagtgtctc

SEQ ID NO: 1398201 - DNA, 15 bp, Homo sapiens
attcaatgagtgtct

SEQ ID NO: 1398202 - DNA, 15 bp, Homo sapiens
gattcaatgagtgtc

SEQ ID NO: 1398203 - DNA, 15 bp, Homo sapiens
ggattcaatgagtgt

SEQ ID NO: 1398204 - DNA, 15 bp, Homo sapiens
aggattcaatgagtg

SEQ ID NO: 1398205 - DNA, 15 bp, Homo sapiens
taggattcaatgagt

SEQ ID NO: 1398206 - DNA, 15 bp, Homo sapiens
ctaggattcaatgag

SEQ ID NO: 1398207 - DNA, 15 bp, Homo sapiens
cctaggattcaatga

SEQ ID NO: 1398208 - DNA, 15 bp, Homo sapiens
ccctaggattcaatg

SEQ ID NO: 1398209 - DNA, 15 bp, Homo sapiens
gccctaggattcaat

SEQ ID NO: 1398210 - DNA, 15 bp, Homo sapiens
tgccctaggattcaa

SEQ ID NO: 1398211 - DNA, 15 bp, Homo sapiens
atgccctaggattca

SEQ ID NO: 1398212 - DNA, 15 bp, Homo sapiens
aatgccctaggattc

SEQ ID NO: 1398213 - DNA, 15 bp, Homo sapiens
aaatgccctaggatt

SEQ ID NO: 1398214 - DNA, 15 bp, Homo sapiens
aaaatgccctaggat

SEQ ID NO: 1398215 - DNA, 15 bp, Homo sapiens
caaaatgccctagga

SEQ ID NO: 1398216 - DNA, 15 bp, Homo sapiens
tcaaaatgccctagg

SEQ ID NO: 1398217 - DNA, 15 bp, Homo sapiens
atcaaaatgccctag

SEQ ID NO: 1398218 - DNA, 15 bp, Homo sapiens
aatcaaaatgcccta

SEQ ID NO: 1398219 - DNA, 15 bp, Homo sapiens
taatcaaaatgccct

SEQ ID NO: 1398220 - DNA, 15 bp, Homo sapiens
ttaatcaaaatgccc

SEQ ID NO: 1398221 - DNA, 15 bp, Homo sapiens
tttaatcaaaatgcc

SEQ ID NO: 1398222 - DNA, 15 bp, Homo sapiens
ctttaatcaaaatgc

SEQ ID NO: 1398223 - DNA, 15 bp, Homo sapiens
tctttaatcaaaatg

SEQ ID NO: 1398224 - DNA, 15 bp, Homo sapiens
atctttaatcaaaat

SEQ ID NO: 1398225 - DNA, 15 bp, Homo sapiens
tatctttaatcaaaa

SEQ ID NO: 1398226 - DNA, 15 bp, Homo sapiens
atatctttaatcaaa

SEQ ID NO: 1398227 - DNA, 15 bp, Homo sapiens
catatctttaatcaa

SEQ ID NO: 1398228 - DNA, 15 bp, Homo sapiens
tcatatctttaatca

SEQ ID NO: 1398229 - DNA, 15 bp, Homo sapiens
gtcatatctttaatc

SEQ ID NO: 1398230 - DNA, 15 bp, Homo sapiens
ggtcatatctttaat

SEQ ID NO: 1398231 - DNA, 15 bp, Homo sapiens
tggtcatatctttaa

SEQ ID NO: 1398232 - DNA, 15 bp, Homo sapiens
atggtcatatcttta

SEQ ID NO: 1398233 - DNA, 15 bp, Homo sapiens
catggtcatatcttt

SEQ ID NO: 1398234 - DNA, 15 bp, Homo sapiens
acatggtcatatctt

SEQ ID NO: 1398235 - DNA, 15 bp, Homo sapiens
tacatggtcatatct

SEQ ID NO: 1398236 - DNA, 15 bp, Homo sapiens
atacatggtcatatc

SEQ ID NO: 1398237 - DNA, 15 bp, Homo sapiens
gatacatggtcatat

SEQ ID NO: 1398238 - DNA, 15 bp, Homo sapiens
agatacatggtcata

SEQ ID NO: 1398239 - DNA, 15 bp, Homo sapiens
gagatacatggtcat

SEQ ID NO: 1398240 - DNA, 15 bp, Homo sapiens
agagatacatggtca

SEQ ID NO: 1398241 - DNA, 15 bp, Homo sapiens
cagagatacatggtc

SEQ ID NO: 1398242 - DNA, 15 bp, Homo sapiens
gcagagatacatggt

SEQ ID NO: 1398243 - DNA, 15 bp, Homo sapiens
ggcagagatacatgg

SEQ ID NO: 1398244 - DNA, 15 bp, Homo sapiens
gggcagagatacatg

SEQ ID NO: 1398245 - DNA, 15 bp, Homo sapiens
agggcagagatacat

SEQ ID NO: 1398246 - DNA, 15 bp, Homo sapiens
gagggcagagataca

SEQ ID NO: 1398247 - DNA, 15 bp, Homo sapiens
agagggcagagatac

SEQ ID NO: 1398248 - DNA, 15 bp, Homo sapiens
cagagggcagagata

SEQ ID NO: 1398249 - DNA, 15 bp, Homo sapiens
ccagagggcagagat

SEQ ID NO: 1398250 - DNA, 15 bp, Homo sapiens
tccagagggcagaga

SEQ ID NO: 1398251 - DNA, 15 bp, Homo sapiens
gtccagagggcagag

SEQ ID NO: 1398252 - DNA, 15 bp, Homo sapiens
tgtccagagggcaga

SEQ ID NO: 1398253 - DNA, 15 bp, Homo sapiens
ctgtccagagggcag

SEQ ID NO: 1398254 - DNA, 15 bp, Homo sapiens
actgtccagagggca

SEQ ID NO: 1398255 - DNA, 15 bp, Homo sapiens
aactgtccagagggc

SEQ ID NO: 1398256 - DNA, 15 bp, Homo sapiens
aaactgtccagaggg

SEQ ID NO: 1398257 - DNA, 15 bp, Homo sapiens
aaaactgtccagagg

SEQ ID NO: 1398258 - DNA, 15 bp, Homo sapiens
taaaactgtccagag

SEQ ID NO: 1398259 - DNA, 15 bp, Homo sapiens
ctaaaactgtccaga

SEQ ID NO: 1398260 - DNA, 15 bp, Homo sapiens
tctaaaactgtccag

SEQ ID NO: 1398261 - DNA, 15 bp, Homo sapiens
gtctaaaactgtcca

SEQ ID NO: 1398262 - DNA, 15 bp, Homo sapiens
tgtctaaaactgtcc

SEQ ID NO: 1398263 - DNA, 15 bp, Homo sapiens
atgtctaaaactgtc

SEQ ID NO: 1398264 - DNA, 15 bp, Homo sapiens
gatgtctaaaactgt

SEQ ID NO: 1398265 - DNA, 15 bp, Homo sapiens
cgatgtctaaaactg

SEQ ID NO: 1398266 - DNA, 15 bp, Homo sapiens
tcgatgtctaaaact

SEQ ID NO: 1398267 - DNA, 15 bp, Homo sapiens
ctcgatgtctaaaac

SEQ ID NO: 1398268 - DNA, 15 bp, Homo sapiens
tctcgatgtctaaaa

SEQ ID NO: 1398269 - DNA, 15 bp, Homo sapiens
atctcgatgtctaaa

SEQ ID NO: 1398270 - DNA, 15 bp, Homo sapiens
tatctcgatgtctaa

SEQ ID NO: 1398271 - DNA, 15 bp, Homo sapiens
ttatctcgatgtcta

SEQ ID NO: 1398272 - DNA, 15 bp, Homo sapiens
tttatctcgatgtct

SEQ ID NO: 1398273 - DNA, 15 bp, Homo sapiens
atttatctcgatgtc

SEQ ID NO: 1398274 - DNA, 15 bp, Homo sapiens
tatttatctcgatgt

SEQ ID NO: 1398275 - DNA, 15 bp, Homo sapiens
ctatttatctcgatg

SEQ ID NO: 1398276 - DNA, 15 bp, Homo sapiens
cctatttatctcgat

SEQ ID NO: 1398277 - DNA, 15 bp, Homo sapiens
gcctatttatctcga

SEQ ID NO: 1398278 - DNA, 15 bp, Homo sapiens
agcctatttatctcg

SEQ ID NO: 1398279 - DNA, 15 bp, Homo sapiens
cagcctatttatctc

SEQ ID NO: 1398280 - DNA, 15 bp, Homo sapiens
acagcctatttatct

SEQ ID NO: 1398281 - DNA, 15 bp, Homo sapiens
aacagcctatttatc

SEQ ID NO: 1398282 - DNA, 15 bp, Homo sapiens
gaacagcctatttat

SEQ ID NO: 1398283 - DNA, 15 bp, Homo sapiens
ggaacagcctattta

SEQ ID NO: 1398284 - DNA, 15 bp, Homo sapiens
tggaacagcctattt

SEQ ID NO: 1398285 - DNA, 15 bp, Homo sapiens
ctggaacagcctatt

SEQ ID NO: 1398286 - DNA, 15 bp, Homo sapiens
cctggaacagcctat

SEQ ID NO: 1398287 - DNA, 15 bp, Homo sapiens
acctggaacagccta

SEQ ID NO: 1398288 - DNA, 15 bp, Homo sapiens
aacctggaacagcct

SEQ ID NO: 1398289 - DNA, 15 bp, Homo sapiens
aaacctggaacagcc

SEQ ID NO: 1398290 - DNA, 15 bp, Homo sapiens
aaaacctggaacagc

SEQ ID NO: 1398291 - DNA, 15 bp, Homo sapiens
gaaaacctggaacag

SEQ ID NO: 1398292 - DNA, 15 bp, Homo sapiens
agaaaacctggaaca

SEQ ID NO: 1398293 - DNA, 15 bp, Homo sapiens
aagaaaacctggaac

SEQ ID NO: 1398294 - DNA, 15 bp, Homo sapiens
caagaaaacctggaa

SEQ ID NO: 1398295 - DNA, 15 bp, Homo sapiens
ccaagaaaacctgga

SEQ ID NO: 1398296 - DNA, 15 bp, Homo sapiens
accaagaaaacctgg

SEQ ID NO: 1398297 - DNA, 15 bp, Homo sapiens
caccaagaaaacctg

SEQ ID NO: 1398298 - DNA, 15 bp, Homo sapiens
acaccaagaaaacct

SEQ ID NO: 1398299 - DNA, 15 bp, Homo sapiens
aacaccaagaaaacc

SEQ ID NO: 1398300 - DNA, 15 bp, Homo sapiens
caacaccaagaaaac

SEQ ID NO: 1398301 - DNA, 15 bp, Homo sapiens
gcaacaccaagaaaa

SEQ ID NO: 1398302 - DNA, 15 bp, Homo sapiens
agcaacaccaagaaa

SEQ ID NO: 1398303 - DNA, 15 bp, Homo sapiens
gagcaacaccaagaa

SEQ ID NO: 1398304 - DNA, 15 bp, Homo sapiens
tgagcaacaccaaga

SEQ ID NO: 1398305 - DNA, 15 bp, Homo sapiens
atgagcaacaccaag

SEQ ID NO: 1398306 - DNA, 15 bp, Homo sapiens
aatgagcaacaccaa

SEQ ID NO: 1398307 - DNA, 15 bp, Homo sapiens
gaatgagcaacacca

SEQ ID NO: 1398308 - DNA, 15 bp, Homo sapiens
tgaatgagcaacacc

SEQ ID NO: 1398309 - DNA, 15 bp, Homo sapiens
ctgaatgagcaacac

SEQ ID NO: 1398310 - DNA, 15 bp, Homo sapiens
tctgaatgagcaaca

SEQ ID NO: 1398311 - DNA, 15 bp, Homo sapiens
gtctgaatgagcaac

SEQ ID NO: 1398312 - DNA, 15 bp, Homo sapiens
agtctgaatgagcaa

SEQ ID NO: 1398313 - DNA, 15 bp, Homo sapiens
aagtctgaatgagca

SEQ ID NO: 1398314 - DNA, 15 bp, Homo sapiens
taagtctgaatgagc

SEQ ID NO: 1398315 - DNA, 15 bp, Homo sapiens
ttaagtctgaatgag

SEQ ID NO: 1398316 - DNA, 15 bp, Homo sapiens
gttaagtctgaatga

SEQ ID NO: 1398317 - DNA, 15 bp, Homo sapiens
agttaagtctgaatg

SEQ ID NO: 1398318 - DNA, 15 bp, Homo sapiens
aagttaagtctgaat

SEQ ID NO: 1398319 - DNA, 15 bp, Homo sapiens
aaagttaagtctgaa

SEQ ID NO: 1398320 - DNA, 15 bp, Homo sapiens
aaaagttaagtctga

SEQ ID NO: 1398321 - DNA, 15 bp, Homo sapiens
gaaaagttaagtctg

SEQ ID NO: 1398322 - DNA, 15 bp, Homo sapiens
tgaaaagttaagtct

SEQ ID NO: 1398323 - DNA, 15 bp, Homo sapiens
ctgaaaagttaagtc

SEQ ID NO: 1398324 - DNA, 15 bp, Homo sapiens
gctgaaaagttaagt

SEQ ID NO: 1398325 - DNA, 15 bp, Homo sapiens
tgctgaaaagttaag

SEQ ID NO: 1398326 - DNA, 15 bp, Homo sapiens
ctgctgaaaagttaa

SEQ ID NO: 1398327 - DNA, 15 bp, Homo sapiens
actgctgaaaagtta

SEQ ID NO: 1398328 - DNA, 15 bp, Homo sapiens
tactgctgaaaagtt

SEQ ID NO: 1398329 - DNA, 15 bp, Homo sapiens
ttactgctgaaaagt

SEQ ID NO: 1398330 - DNA, 15 bp, Homo sapiens
atttactgctgaaaa

SEQ ID NO: 1398331 - DNA, 15 bp, Homo sapiens
aatttactgctgaaa

SEQ ID NO: 1398332 - DNA, 15 bp, Homo sapiens
aaatttactgctgaa

SEQ ID NO: 1398333 - DNA, 15 bp, Homo sapiens
gaaatttactgctga

SEQ ID NO: 1398334 - DNA, 15 bp, Homo sapiens
ggaaatttactgctg

SEQ ID NO: 1398335 - DNA, 15 bp, Homo sapiens
gggaaatttactgct

SEQ ID NO: 1398336 - DNA, 15 bp, Homo sapiens
ggggaaatttactgc

SEQ ID NO: 1398337 - DNA, 15 bp, Homo sapiens
gggggaaatttactg

SEQ ID NO: 1398338 - DNA, 15 bp, Homo sapiens
agggggaaatttact

SEQ ID NO: 1398339 - DNA, 15 bp, Homo sapiens
tagggggaaatttac

SEQ ID NO: 1398340 - DNA, 15 bp, Homo sapiens
ttagggggaaattta

SEQ ID NO: 1398341 - DNA, 15 bp, Homo sapiens
cttagggggaaattt

SEQ ID NO: 1398342 - DNA, 15 bp, Homo sapiens
acttagggggaaatt

SEQ ID NO: 1398343 - DNA, 15 bp, Homo sapiens
gacttagggggaaat

SEQ ID NO: 1398344 - DNA, 15 bp, Homo sapiens
tgacttagggggaaa

SEQ ID NO: 1398345 - DNA, 15 bp, Homo sapiens
ttgacttagggggaa

SEQ ID NO: 1398346 - DNA, 15 bp, Homo sapiens
cttgacttaggggga

SEQ ID NO: 1398347 - DNA, 15 bp, Homo sapiens
acttgacttaggggg

SEQ ID NO: 1398348 - DNA, 15 bp, Homo sapiens
cacttgacttagggg

SEQ ID NO: 1398349 - DNA, 15 bp, Homo sapiens
tcacttgacttaggg

SEQ ID NO: 1398350 - DNA, 15 bp, Homo sapiens
ttcacttgacttagg

SEQ ID NO: 1398351 - DNA, 15 bp, Homo sapiens
tttcacttgacttag

SEQ ID NO: 1398352 - DNA, 15 bp, Homo sapiens
ttttcacttgactta

SEQ ID NO: 1398353 - DNA, 15 bp, Homo sapiens
gttttcacttgactt

SEQ ID NO: 1398354 - DNA, 15 bp, Homo sapiens
agttttcacttgact

SEQ ID NO: 1398355 - DNA, 15 bp, Homo sapiens
cagttttcacttgac

SEQ ID NO: 1398356 - DNA, 15 bp, Homo sapiens
gcagttttcacttga

SEQ ID NO: 1398357 - DNA, 15 bp, Homo sapiens
agcagttttcacttg

SEQ ID NO: 1398358 - DNA, 15 bp, Homo sapiens
cagcagttttcactt

SEQ ID NO: 1398359 - DNA, 15 bp, Homo sapiens
acagcagttttcact

SEQ ID NO: 1398360 - DNA, 15 bp, Homo sapiens
aacagcagttttcac

SEQ ID NO: 1398361 - DNA, 15 bp, Homo sapiens
aaacagcagttttca

SEQ ID NO: 1398362 - DNA, 15 bp, Homo sapiens
gaaacagcagttttc

SEQ ID NO: 1398363 - DNA, 15 bp, Homo sapiens
agaaacagcagtttt

SEQ ID NO: 1398364 - DNA, 15 bp, Homo sapiens
gagaaacagcagttt

SEQ ID NO: 1398365 - DNA, 15 bp, Homo sapiens
ggagaaacagcagtt

SEQ ID NO: 1398366 - DNA, 15 bp, Homo sapiens
aggagaaacagcagt

SEQ ID NO: 1398367 - DNA, 15 bp, Homo sapiens
aaggagaaacagcag

SEQ ID NO: 1398368 - DNA, 15 bp, Homo sapiens
gaaggagaaacagca

SEQ ID NO: 1398369 - DNA, 15 bp, Homo sapiens
agaaggagaaacagc

SEQ ID NO: 1398370 - DNA, 15 bp, Homo sapiens
tagaaggagaaacag

SEQ ID NO: 1398371 - DNA, 15 bp, Homo sapiens
atagaaggagaaaca

SEQ ID NO: 1398372 - DNA, 15 bp, Homo sapiens
tatagaaggagaaac

SEQ ID NO: 1398373 - DNA, 15 bp, Homo sapiens
atatagaaggagaaa

SEQ ID NO: 1398374 - DNA, 15 bp, Homo sapiens
aatatagaaggagaa

SEQ ID NO: 1398375 - DNA, 15 bp, Homo sapiens
caatatagaaggaga

SEQ ID NO: 1398376 - DNA, 15 bp, Homo sapiens
ccaatatagaaggag

SEQ ID NO: 1398377 - DNA, 15 bp, Homo sapiens
accaatatagaagga

SEQ ID NO: 1398378 - DNA, 15 bp, Homo sapiens
aaccaatatagaagg

SEQ ID NO: 1398379 - DNA, 15 bp, Homo sapiens
caaccaatatagaag

SEQ ID NO: 1398380 - DNA, 15 bp, Homo sapiens
ccaaccaatatagaa

SEQ ID NO: 1398381 - DNA, 15 bp, Homo sapiens
cccaaccaatataga

SEQ ID NO: 1398382 - DNA, 15 bp, Homo sapiens
acccaaccaatatag

SEQ ID NO: 1398383 - DNA, 15 bp, Homo sapiens
gacccaaccaatata

SEQ ID NO: 1398384 - DNA, 15 bp, Homo sapiens
agacccaaccaatat

SEQ ID NO: 1398385 - DNA, 15 bp, Homo sapiens
gagacccaaccaata

SEQ ID NO: 1398386 - DNA, 15 bp, Homo sapiens
ggagacccaaccaat

SEQ ID NO: 1398387 - DNA, 15 bp, Homo sapiens
tggagacccaaccaa

SEQ ID NO: 1398388 - DNA, 15 bp, Homo sapiens
ttggagacccaacca

SEQ ID NO: 1398389 - DNA, 15 bp, Homo sapiens
gttggagacccaacc

SEQ ID NO: 1398390 - DNA, 15 bp, Homo sapiens
agttggagacccaac

SEQ ID NO: 1398391 - DNA, 15 bp, Homo sapiens
tagttggagacccaa

SEQ ID NO: 1398392 - DNA, 15 bp, Homo sapiens
ttagttggagaccca

SEQ ID NO: 1398393 - DNA, 15 bp, Homo sapiens
tttagttggagaccc

SEQ ID NO: 1398394 - DNA, 15 bp, Homo sapiens
ttttagttggagacc

SEQ ID NO: 1398395 - DNA, 15 bp, Homo sapiens
tttttagttggagac

SEQ ID NO: 1398396 - DNA, 15 bp, Homo sapiens
ttttttagttggaga

SEQ ID NO: 1398397 - DNA, 15 bp, Homo sapiens
attttttagttggag

SEQ ID NO: 1398398 - DNA, 15 bp, Homo sapiens
tattttttagttgga

SEQ ID NO: 1398399 - DNA, 15 bp, Homo sapiens
atattttttagttgg

SEQ ID NO: 1398400 - DNA, 15 bp, Homo sapiens
aatattttttagttg

SEQ ID NO: 1398401 - DNA, 15 bp, Homo sapiens
caatattttttagtt

SEQ ID NO: 1398402 - DNA, 15 bp, Homo sapiens
tcaatattttttagt

SEQ ID NO: 1398403 - DNA, 15 bp, Homo sapiens
gtcaatattttttag

SEQ ID NO: 1398404 - DNA, 15 bp, Homo sapiens
agtcaatatttttta

SEQ ID NO: 1398405 - DNA, 15 bp, Homo sapiens
cagtcaatatttttt

SEQ ID NO: 1398406 - DNA, 15 bp, Homo sapiens
tcagtcaatattttt

SEQ ID NO: 1398407 - DNA, 15 bp, Homo sapiens
atcagtcaatatttt

SEQ ID NO: 1398408 - DNA, 15 bp, Homo sapiens
aatcagtcaatattt

SEQ ID NO: 1398409 - DNA, 15 bp, Homo sapiens
aaatcagtcaatatt

SEQ ID NO: 1398410 - DNA, 15 bp, Homo sapiens
aaaatcagtcaatat

SEQ ID NO: 1398411 - DNA, 15 bp, Homo sapiens
gaaaatcagtcaata

SEQ ID NO: 1398412 - DNA, 15 bp, Homo sapiens
tgaaaatcagtcaat

SEQ ID NO: 1398413 - DNA, 15 bp, Homo sapiens
ttgaaaatcagtcaa

SEQ ID NO: 1398414 - DNA, 15 bp, Homo sapiens
tttgaaaatcagtca

SEQ ID NO: 1398415 - DNA, 15 bp, Homo sapiens
gtttgaaaatcagtc

SEQ ID NO: 1398416 - DNA, 15 bp, Homo sapiens
tgtttgaaaatcagt

SEQ ID NO: 1398417 - DNA, 15 bp, Homo sapiens
atgtttgaaaatcag

SEQ ID NO: 1398418 - DNA, 15 bp, Homo sapiens
catgtttgaaaatca

SEQ ID NO: 1398419 - DNA, 15 bp, Homo sapiens
gcatgtttgaaaatc

SEQ ID NO: 1398420 - DNA, 15 bp, Homo sapiens
cgcatgtttgaaaat

SEQ ID NO: 1398421 - DNA, 15 bp, Homo sapiens
gcgcatgtttgaaaa

SEQ ID NO: 1398422 - DNA, 15 bp, Homo sapiens
tgcgcatgtttgaaa

SEQ ID NO: 1398423 - DNA, 15 bp, Homo sapiens
ctgcgcatgtttgaa

SEQ ID NO: 1398424 - DNA, 15 bp, Homo sapiens
tctgcgcatgtttga

SEQ ID NO: 1398425 - DNA, 15 bp, Homo sapiens
ttctgcgcatgtttg

SEQ ID NO: 1398426 - DNA, 15 bp, Homo sapiens
tttctgcgcatgttt

SEQ ID NO: 1398427 - DNA, 15 bp, Homo sapiens
atttctgcgcatgtt

SEQ ID NO: 1398428 - DNA, 15 bp, Homo sapiens
tatttctgcgcatgt

SEQ ID NO: 1398429 - DNA, 15 bp, Homo sapiens
gtatttctgcgcatg

SEQ ID NO: 1398430 - DNA, 15 bp, Homo sapiens
tgtatttctgcgcat

SEQ ID NO: 1398431 - DNA, 15 bp, Homo sapiens
ttgtatttctgcgca

SEQ ID NO: 1398432 - DNA, 15 bp, Homo sapiens
gttgtatttctgcgc

SEQ ID NO: 1398433 - DNA, 15 bp, Homo sapiens
agttgtatttctgcg

SEQ ID NO: 1398434 - DNA, 15 bp, Homo sapiens
cagttgtatttctgc

SEQ ID NO: 1398435 - DNA, 15 bp, Homo sapiens
tcagttgtatttctg

SEQ ID NO: 1398436 - DNA, 15 bp, Homo sapiens
ctcagttgtatttct

SEQ ID NO: 1398437 - DNA, 15 bp, Homo sapiens
gctcagttgtatttc

SEQ ID NO: 1398438 - DNA, 15 bp, Homo sapiens
tgctcagttgtattt

SEQ ID NO: 1398439 - DNA, 15 bp, Homo sapiens
atgctcagttgtatt

SEQ ID NO: 1398440 - DNA, 15 bp, Homo sapiens
gatgctcagttgtat

SEQ ID NO: 1398441 - DNA, 15 bp, Homo sapiens
ggatgctcagttgta

SEQ ID NO: 1398442 - DNA, 15 bp, Homo sapiens
gggatgctcagttgt

SEQ ID NO: 1398443 - DNA, 15 bp, Homo sapiens
tgggatgctcagttg

SEQ ID NO: 1398444 - DNA, 15 bp, Homo sapiens
ttgggatgctcagtt

SEQ ID NO: 1398445 - DNA, 15 bp, Homo sapiens
cttgggatgctcagt

SEQ ID NO: 1398446 - DNA, 15 bp, Homo sapiens
gcttgggatgctcag

SEQ ID NO: 1398447 - DNA, 15 bp, Homo sapiens
tgcttgggatgctca

SEQ ID NO: 1398448 - DNA, 15 bp, Homo sapiens
ttgcttgggatgctc

SEQ ID NO: 1398449 - DNA, 15 bp, Homo sapiens
cttgcttgggatgct

SEQ ID NO: 1398450 - DNA, 15 bp, Homo sapiens
acttgcttgggatgc

SEQ ID NO: 1398451 - DNA, 15 bp, Homo sapiens
gacttgcttgggatg

SEQ ID NO: 1398452 - DNA, 15 bp, Homo sapiens
agacttgcttgggat

SEQ ID NO: 1398453 - DNA, 15 bp, Homo sapiens
cagacttgcttggga

SEQ ID NO: 1398454 - DNA, 15 bp, Homo sapiens
gcagacttgcttggg

SEQ ID NO: 1398455 - DNA, 15 bp, Homo sapiens
tgcagacttgcttgg

SEQ ID NO: 1398456 - DNA, 15 bp, Homo sapiens
gtgcagacttgcttg

SEQ ID NO: 1398457 - DNA, 15 bp, Homo sapiens
ggtgcagacttgctt

SEQ ID NO: 1398458 - DNA, 15 bp, Homo sapiens
aggtgcagacttgct

SEQ ID NO: 1398459 - DNA, 15 bp, Homo sapiens
gaggtgcagacttgc

SEQ ID NO: 1398460 - DNA, 15 bp, Homo sapiens
ggaggtgcagacttg

SEQ ID NO: 1398461 - DNA, 15 bp, Homo sapiens
tggaggtgcagactt

SEQ ID NO: 1398462 - DNA, 15 bp, Homo sapiens
ctggaggtgcagact

SEQ ID NO: 1398463 - DNA, 15 bp, Homo sapiens
tctggaggtgcagac

SEQ ID NO: 1398464 - DNA, 15 bp, Homo sapiens
gtctggaggtgcaga

SEQ ID NO: 1398465 - DNA, 15 bp, Homo sapiens
tgtctggaggtgcag

SEQ ID NO: 1398466 - DNA, 15 bp, Homo sapiens
atgtctggaggtgca

SEQ ID NO: 1398467 - DNA, 15 bp, Homo sapiens
aatgtctggaggtgc

SEQ ID NO: 1398468 - DNA, 15 bp, Homo sapiens
aaatgtctggaggtg

SEQ ID NO: 1398469 - DNA, 15 bp, Homo sapiens
aaaatgtctggaggt

SEQ ID NO: 1398470 - DNA, 15 bp, Homo sapiens
aaaaatgtctggagg

SEQ ID NO: 1398471 - DNA, 15 bp, Homo sapiens
aaaaaatgtctggag

SEQ ID NO: 1398472 - DNA, 15 bp, Homo sapiens
taaaaaatgtctgga

SEQ ID NO: 1398473 - DNA, 15 bp, Homo sapiens
ttaaaaaatgtctgg

SEQ ID NO: 1398474 - DNA, 15 bp, Homo sapiens
tttaaaaaatgtctg

SEQ ID NO: 1398475 - DNA, 15 bp, Homo sapiens
ttttaaaaaatgtct

SEQ ID NO: 1398476 - DNA, 15 bp, Homo sapiens
tttttaaaaaatgtc

SEQ ID NO: 1398477 - DNA, 15 bp, Homo sapiens
tattttttaaaaaat

SEQ ID NO: 1398478 - DNA, 15 bp, Homo sapiens
atattttttaaaaaa

SEQ ID NO: 1398479 - DNA, 15 bp, Homo sapiens
gatattttttaaaaa

SEQ ID NO: 1398480 - DNA, 15 bp, Homo sapiens
agatattttttaaaa

SEQ ID NO: 1398481 - DNA, 15 bp, Homo sapiens
gagatattttttaaa

SEQ ID NO: 1398482 - DNA, 15 bp, Homo sapiens
ggagatattttttaa

SEQ ID NO: 1398483 - DNA, 15 bp, Homo sapiens
aggagatatttttta

SEQ ID NO: 1398484 - DNA, 15 bp, Homo sapiens
caggagatatttttt

SEQ ID NO: 1398485 - DNA, 15 bp, Homo sapiens
tcaggagatattttt

SEQ ID NO: 1398486 - DNA, 15 bp, Homo sapiens
atcaggagatatttt

SEQ ID NO: 1398487 - DNA, 15 bp, Homo sapiens
catcaggagatattt

SEQ ID NO: 1398488 - DNA, 15 bp, Homo sapiens
ccatcaggagatatt

SEQ ID NO: 1398489 - DNA, 15 bp, Homo sapiens
tccatcaggagatat

SEQ ID NO: 1398490 - DNA, 15 bp, Homo sapiens
ctccatcaggagata

SEQ ID NO: 1398491 - DNA, 15 bp, Homo sapiens
gctccatcaggagat

SEQ ID NO: 1398492 - DNA, 15 bp, Homo sapiens
agctccatcaggaga

SEQ ID NO: 1398493 - DNA, 15 bp, Homo sapiens
aagctccatcaggag

SEQ ID NO: 1398494 - DNA, 15 bp, Homo sapiens
aaagctccatcagga

SEQ ID NO: 1398495 - DNA, 15 bp, Homo sapiens
aaaagctccatcagg

SEQ ID NO: 1398496 - DNA, 15 bp, Homo sapiens
taaaagctccatcag

SEQ ID NO: 1398497 - DNA, 15 bp, Homo sapiens
ataaaagctccatca

SEQ ID NO: 1398498 - DNA, 15 bp, Homo sapiens
aataaaagctccatc

SEQ ID NO: 1398499 - DNA, 15 bp, Homo sapiens
aaataaaagctccat

SEQ ID NO: 1398500 - DNA, 15 bp, Homo sapiens
caaataaaagctcca

SEQ ID NO: 1398501 - DNA, 15 bp, Homo sapiens
ccaaataaaagctcc

SEQ ID NO: 1398502 - DNA, 15 bp, Homo sapiens
accaaataaaagctc

SEQ ID NO: 1398503 - DNA, 15 bp, Homo sapiens
aaccaaataaaagct

SEQ ID NO: 1398504 - DNA, 15 bp, Homo sapiens
taaccaaataaaagc

SEQ ID NO: 1398505 - DNA, 15 bp, Homo sapiens
ataaccaaataaaag

SEQ ID NO: 1398506 - DNA, 15 bp, Homo sapiens
cataaccaaataaaa

SEQ ID NO: 1398507 - DNA, 15 bp, Homo sapiens
tcataaccaaataaa

SEQ ID NO: 1398508 - DNA, 15 bp, Homo sapiens
ttcataaccaaataa

SEQ ID NO: 1398509 - DNA, 15 bp, Homo sapiens
cttcataaccaaata

SEQ ID NO: 1398510 - DNA, 15 bp, Homo sapiens
acttcataaccaaat

SEQ ID NO: 1398511 - DNA, 15 bp, Homo sapiens
cacttcataaccaaa

SEQ ID NO: 1398512 - DNA, 15 bp, Homo sapiens
tcacttcataaccaa

SEQ ID NO: 1398513 - DNA, 15 bp, Homo sapiens
ttcacttcataacca

SEQ ID NO: 1398514 - DNA, 15 bp, Homo sapiens
tttcacttcataacc

SEQ ID NO: 1398515 - DNA, 15 bp, Homo sapiens
ctttcacttcataac

SEQ ID NO: 1398516 - DNA, 15 bp, Homo sapiens
cctttcacttcataa

SEQ ID NO: 1398517 - DNA, 15 bp, Homo sapiens
ccctttcacttcata

SEQ ID NO: 1398518 - DNA, 15 bp, Homo sapiens
gccctttcacttcat

SEQ ID NO: 1398519 - DNA, 15 bp, Homo sapiens
agccctttcacttca

SEQ ID NO: 1398520 - DNA, 15 bp, Homo sapiens
aagccctttcacttc

SEQ ID NO: 1398521 - DNA, 15 bp, Homo sapiens
taagccctttcactt

SEQ ID NO: 1398522 - DNA, 15 bp, Homo sapiens
ctaagccctttcact

SEQ ID NO: 1398523 - DNA, 15 bp, Homo sapiens
gctaagccctttcac

SEQ ID NO: 1398524 - DNA, 15 bp, Homo sapiens
tgctaagccctttca

SEQ ID NO: 1398525 - DNA, 15 bp, Homo sapiens
ctgctaagccctttc

SEQ ID NO: 1398526 - DNA, 15 bp, Homo sapiens
gctgctaagcccttt

SEQ ID NO: 1398527 - DNA, 15 bp, Homo sapiens
agctgctaagccctt

SEQ ID NO: 1398528 - DNA, 15 bp, Homo sapiens
aagctgctaagccct

SEQ ID NO: 1398529 - DNA, 15 bp, Homo sapiens
gaagctgctaagccc

SEQ ID NO: 1398530 - DNA, 15 bp, Homo sapiens
tgaagctgctaagcc

SEQ ID NO: 1398531 - DNA, 15 bp, Homo sapiens
ctgaagctgctaagc

SEQ ID NO: 1398532 - DNA, 15 bp, Homo sapiens
tctgaagctgctaag

SEQ ID NO: 1398533 - DNA, 15 bp, Homo sapiens
gtctgaagctgctaa

SEQ ID NO: 1398534 - DNA, 15 bp, Homo sapiens
tgtctgaagctgcta

SEQ ID NO: 1398535 - DNA, 15 bp, Homo sapiens
gtgtctgaagctgct

SEQ ID NO: 1398536 - DNA, 15 bp, Homo sapiens
ggtgtctgaagctgc

SEQ ID NO: 1398537 - DNA, 15 bp, Homo sapiens
aggtgtctgaagctg

SEQ ID NO: 1398538 - DNA, 15 bp, Homo sapiens
gaggtgtctgaagct

SEQ ID NO: 1398539 - DNA, 15 bp, Homo sapiens
tgaggtgtctgaagc

SEQ ID NO: 1398540 - DNA, 15 bp, Homo sapiens
gtgaggtgtctgaag

SEQ ID NO: 1398541 - DNA, 15 bp, Homo sapiens
agtgaggtgtctgaa

SEQ ID NO: 1398542 - DNA, 15 bp, Homo sapiens
tagtgaggtgtctga

SEQ ID NO: 1398543 - DNA, 15 bp, Homo sapiens
gtagtgaggtgtctg

SEQ ID NO: 1398544 - DNA, 15 bp, Homo sapiens
tgtagtgaggtgtct

SEQ ID NO: 1398545 - DNA, 15 bp, Homo sapiens
atgtagtgaggtgtc

SEQ ID NO: 1398546 - DNA, 15 bp, Homo sapiens
aatgtagtgaggtgt

SEQ ID NO: 1398547 - DNA, 15 bp, Homo sapiens
caatgtagtgaggtg

SEQ ID NO: 1398548 - DNA, 15 bp, Homo sapiens
gcaatgtagtgaggt

SEQ ID NO: 1398549 - DNA, 15 bp, Homo sapiens
ggcaatgtagtgagg

SEQ ID NO: 1398550 - DNA, 15 bp, Homo sapiens
aggcaatgtagtgag

SEQ ID NO: 1398551 - DNA, 15 bp, Homo sapiens
caggcaatgtagtga

SEQ ID NO: 1398552 - DNA, 15 bp, Homo sapiens
gcaggcaatgtagtg

SEQ ID NO: 1398553 - DNA, 15 bp, Homo sapiens
agcaggcaatgtagt

SEQ ID NO: 1398554 - DNA, 15 bp, Homo sapiens
gagcaggcaatgtag

SEQ ID NO: 1398555 - DNA, 15 bp, Homo sapiens
ggagcaggcaatgta

SEQ ID NO: 1398556 - DNA, 15 bp, Homo sapiens
aggagcaggcaatgt

SEQ ID NO: 1398557 - DNA, 15 bp, Homo sapiens
aaggagcaggcaatg

SEQ ID NO: 1398558 - DNA, 15 bp, Homo sapiens
gaaggagcaggcaat

SEQ ID NO: 1398559 - DNA, 15 bp, Homo sapiens
ggaaggagcaggcaa

SEQ ID NO: 1398560 - DNA, 15 bp, Homo sapiens
aggaaggagcaggca

SEQ ID NO: 1398561 - DNA, 15 bp, Homo sapiens
aaggaaggagcaggc

SEQ ID NO: 1398562 - DNA, 15 bp, Homo sapiens
caaggaaggagcagg

SEQ ID NO: 1398563 - DNA, 15 bp, Homo sapiens
gcaaggaaggagcag

SEQ ID NO: 1398564 - DNA, 15 bp, Homo sapiens
tgcaaggaaggagca

SEQ ID NO: 1398565 - DNA, 15 bp, Homo sapiens
ctgcaaggaaggagc

SEQ ID NO: 1398566 - DNA, 15 bp, Homo sapiens
cctgcaaggaaggag

SEQ ID NO: 1398567 - DNA, 15 bp, Homo sapiens
acctgcaaggaagga

SEQ ID NO: 1398568 - DNA, 15 bp, Homo sapiens
tacctgcaaggaagg

SEQ ID NO: 1398569 - DNA, 15 bp, Homo sapiens
atacctgcaaggaag

SEQ ID NO: 1398570 - DNA, 15 bp, Homo sapiens
catacctgcaaggaa

SEQ ID NO: 1398571 - DNA, 15 bp, Homo sapiens
ccatacctgcaagga

SEQ ID NO: 1398572 - DNA, 15 bp, Homo sapiens
cccatacctgcaagg

SEQ ID NO: 1398573 - DNA, 15 bp, Homo sapiens
tcccatacctgcaag

SEQ ID NO: 1398574 - DNA, 15 bp, Homo sapiens
atcccatacctgcaa

SEQ ID NO: 1398575 - DNA, 15 bp, Homo sapiens
catcccatacctgca

SEQ ID NO: 1398576 - DNA, 15 bp, Homo sapiens
ccatcccatacctgc

SEQ ID NO: 1398577 - DNA, 15 bp, Homo sapiens
tccatcccatacctg

SEQ ID NO: 1398578 - DNA, 15 bp, Homo sapiens
ttccatcccatacct

SEQ ID NO: 1398579 - DNA, 15 bp, Homo sapiens
cttccatcccatacc

SEQ ID NO: 1398580 - DNA, 15 bp, Homo sapiens
ccttccatcccatac

SEQ ID NO: 1398581 - DNA, 15 bp, Homo sapiens
gccttccatcccata

SEQ ID NO: 1398582 - DNA, 15 bp, Homo sapiens
agccttccatcccat

SEQ ID NO: 1398583 - DNA, 15 bp, Homo sapiens
aagccttccatccca

SEQ ID NO: 1398584 - DNA, 15 bp, Homo sapiens
caagccttccatccc

SEQ ID NO: 1398585 - DNA, 15 bp, Homo sapiens
gcaagccttccatcc

SEQ ID NO: 1398586 - DNA, 15 bp, Homo sapiens
agcaagccttccatc

SEQ ID NO: 1398587 - DNA, 15 bp, Homo sapiens
cagcaagccttccat

SEQ ID NO: 1398588 - DNA, 15 bp, Homo sapiens
acagcaagccttcca

SEQ ID NO: 1398589 - DNA, 15 bp, Homo sapiens
cacagcaagccttcc

SEQ ID NO: 1398590 - DNA, 15 bp, Homo sapiens
ccacagcaagccttc

SEQ ID NO: 1398591 - DNA, 15 bp, Homo sapiens
cccacagcaagcctt

SEQ ID NO: 1398592 - DNA, 15 bp, Homo sapiens
ccccacagcaagcct

SEQ ID NO: 1398593 - DNA, 15 bp, Homo sapiens
cccccacagcaagcc

SEQ ID NO: 1398594 - DNA, 15 bp, Homo sapiens
tcccccacagcaagc

SEQ ID NO: 1398595 - DNA, 15 bp, Homo sapiens
ttcccccacagcaag

SEQ ID NO: 1398596 - DNA, 15 bp, Homo sapiens
cttcccccacagcaa

SEQ ID NO: 1398597 - DNA, 15 bp, Homo sapiens
ccttcccccacagca

SEQ ID NO: 1398598 - DNA, 15 bp, Homo sapiens
accttcccccacagc

SEQ ID NO: 1398599 - DNA, 15 bp, Homo sapiens
caccttcccccacag

SEQ ID NO: 1398600 - DNA, 15 bp, Homo sapiens
ccaccttcccccaca

SEQ ID NO: 1398601 - DNA, 15 bp, Homo sapiens
gccaccttcccccac

SEQ ID NO: 1398602 - DNA, 15 bp, Homo sapiens
agccaccttccccca

SEQ ID NO: 1398603 - DNA, 15 bp, Homo sapiens
aagccaccttccccc

SEQ ID NO: 1398604 - DNA, 15 bp, Homo sapiens
taagccaccttcccc

SEQ ID NO: 1398605 - DNA, 15 bp, Homo sapiens
ctaagccaccttccc

SEQ ID NO: 1398606 - DNA, 15 bp, Homo sapiens
actaagccaccttcc

SEQ ID NO: 1398607 - DNA, 15 bp, Homo sapiens
tactaagccaccttc

SEQ ID NO: 1398608 - DNA, 15 bp, Homo sapiens
ttactaagccacctt

SEQ ID NO: 1398609 - DNA, 15 bp, Homo sapiens
attactaagccacct

SEQ ID NO: 1398610 - DNA, 15 bp, Homo sapiens
cattactaagccacc

SEQ ID NO: 1398611 - DNA, 15 bp, Homo sapiens
tcattactaagccac

SEQ ID NO: 1398612 - DNA, 15 bp, Homo sapiens
ttcattactaagcca

SEQ ID NO: 1398613 - DNA, 15 bp, Homo sapiens
cttcattactaagcc

SEQ ID NO: 1398614 - DNA, 15 bp, Homo sapiens
ccttcattactaagc

SEQ ID NO: 1398615 - DNA, 15 bp, Homo sapiens
cccttcattactaag

SEQ ID NO: 1398616 - DNA, 15 bp, Homo sapiens
tcccttcattactaa

SEQ ID NO: 1398617 - DNA, 15 bp, Homo sapiens
ctcccttcattacta

SEQ ID NO: 1398618 - DNA, 15 bp, Homo sapiens
gctcccttcattact

SEQ ID NO: 1398619 - DNA, 15 bp, Homo sapiens
ggctcccttcattac

SEQ ID NO: 1398620 - DNA, 15 bp, Homo sapiens
gggctcccttcatta

SEQ ID NO: 1398621 - DNA, 15 bp, Homo sapiens
tgggctcccttcatt

SEQ ID NO: 1398622 - DNA, 15 bp, Homo sapiens
atgggctcccttcat

SEQ ID NO: 1398623 - DNA, 15 bp, Homo sapiens
gatgggctcccttca

SEQ ID NO: 1398624 - DNA, 15 bp, Homo sapiens
agatgggctcccttc

SEQ ID NO: 1398625 - DNA, 15 bp, Homo sapiens
gagatgggctccctt

SEQ ID NO: 1398626 - DNA, 15 bp, Homo sapiens
tgagatgggctccct

SEQ ID NO: 1398627 - DNA, 15 bp, Homo sapiens
ttgagatgggctccc

SEQ ID NO: 1398628 - DNA, 15 bp, Homo sapiens
gttgagatgggctcc

SEQ ID NO: 1398629 - DNA, 15 bp, Homo sapiens
agttgagatgggctc

SEQ ID NO: 1398630 - DNA, 15 bp, Homo sapiens
cagttgagatgggct

SEQ ID NO: 1398631 - DNA, 15 bp, Homo sapiens
ccagttgagatgggc

SEQ ID NO: 1398632 - DNA, 15 bp, Homo sapiens
cccagttgagatggg

SEQ ID NO: 1398633 - DNA, 15 bp, Homo sapiens
ccccagttgagatgg

SEQ ID NO: 1398634 - DNA, 15 bp, Homo sapiens
gccccagttgagatg

SEQ ID NO: 1398635 - DNA, 15 bp, Homo sapiens
agccccagttgagat

SEQ ID NO: 1398636 - DNA, 15 bp, Homo sapiens
gagccccagttgaga

SEQ ID NO: 1398637 - DNA, 15 bp, Homo sapiens
cgagccccagttgag

SEQ ID NO: 1398638 - DNA, 15 bp, Homo sapiens
acgagccccagttga

SEQ ID NO: 1398639 - DNA, 15 bp, Homo sapiens
cacgagccccagttg

SEQ ID NO: 1398640 - DNA, 15 bp, Homo sapiens
ccacgagccccagtt

SEQ ID NO: 1398641 - DNA, 15 bp, Homo sapiens
cccacgagccccagt

SEQ ID NO: 1398642 - DNA, 15 bp, Homo sapiens
tcccacgagccccag

SEQ ID NO: 1398643 - DNA, 15 bp, Homo sapiens
ctcccacgagcccca

SEQ ID NO: 1398644 - DNA, 15 bp, Homo sapiens
tctcccacgagcccc

SEQ ID NO: 1398645 - DNA, 15 bp, Homo sapiens
ctctcccacgagccc

SEQ ID NO: 1398646 - DNA, 15 bp, Homo sapiens
actctcccacgagcc

SEQ ID NO: 1398647 - DNA, 15 bp, Homo sapiens
tactctcccacgagc

SEQ ID NO: 1398648 - DNA, 15 bp, Homo sapiens
ttactctcccacgag

SEQ ID NO: 1398649 - DNA, 15 bp, Homo sapiens
tttactctcccacga

SEQ ID NO: 1398650 - DNA, 15 bp, Homo sapiens
atttactctcccacg

SEQ ID NO: 1398651 - DNA, 15 bp, Homo sapiens
aatttactctcccac

SEQ ID NO: 1398652 - DNA, 15 bp, Homo sapiens
taatttactctccca

SEQ ID NO: 1398653 - DNA, 15 bp, Homo sapiens
ctaatttactctccc

SEQ ID NO: 1398654 - DNA, 15 bp, Homo sapiens
cctaatttactctcc

SEQ ID NO: 1398655 - DNA, 15 bp, Homo sapiens
gcctaatttactctc

SEQ ID NO: 1398656 - DNA, 15 bp, Homo sapiens
ggcctaatttactct

SEQ ID NO: 1398657 - DNA, 15 bp, Homo sapiens
gggcctaatttactc

SEQ ID NO: 1398658 - DNA, 15 bp, Homo sapiens
agggcctaatttact

SEQ ID NO: 1398659 - DNA, 15 bp, Homo sapiens
gagggcctaatttac

SEQ ID NO: 1398660 - DNA, 15 bp, Homo sapiens
agagggcctaattta

SEQ ID NO: 1398661 - DNA, 15 bp, Homo sapiens
tagagggcctaattt

SEQ ID NO: 1398662 - DNA, 15 bp, Homo sapiens
ctagagggcctaatt

SEQ ID NO: 1398663 - DNA, 15 bp, Homo sapiens
cctagagggcctaat

SEQ ID NO: 1398664 - DNA, 15 bp, Homo sapiens
tcctagagggcctaa

SEQ ID NO: 1398665 - DNA, 15 bp, Homo sapiens
ttcctagagggccta

SEQ ID NO: 1398666 - DNA, 15 bp, Homo sapiens
tttcctagagggcct

SEQ ID NO: 1398667 - DNA, 15 bp, Homo sapiens
ttttcctagagggcc

SEQ ID NO: 1398668 - DNA, 15 bp, Homo sapiens
tttttcctagagggc

SEQ ID NO: 1398669 - DNA, 15 bp, Homo sapiens
ctttttcctagaggg

SEQ ID NO: 1398670 - DNA, 15 bp, Homo sapiens
actttttcctagagg

SEQ ID NO: 1398671 - DNA, 15 bp, Homo sapiens
aactttttcctagag

SEQ ID NO: 1398672 - DNA, 15 bp, Homo sapiens
gaactttttcctaga

SEQ ID NO: 1398673 - DNA, 15 bp, Homo sapiens
tgaactttttcctag

SEQ ID NO: 1398674 - DNA, 15 bp, Homo sapiens
ttgaactttttccta

SEQ ID NO: 1398675 - DNA, 15 bp, Homo sapiens
cttgaactttttcct

SEQ ID NO: 1398676 - DNA, 15 bp, Homo sapiens
ccttgaactttttcc

SEQ ID NO: 1398677 - DNA, 15 bp, Homo sapiens
cccttgaactttttc

SEQ ID NO: 1398678 - DNA, 15 bp, Homo sapiens
tcccttgaacttttt

SEQ ID NO: 1398679 - DNA, 15 bp, Homo sapiens
ctcccttgaactttt

SEQ ID NO: 1398680 - DNA, 15 bp, Homo sapiens
actcccttgaacttt

SEQ ID NO: 1398681 - DNA, 15 bp, Homo sapiens
gactcccttgaactt

SEQ ID NO: 1398682 - DNA, 15 bp, Homo sapiens
agactcccttgaact

SEQ ID NO: 1398683 - DNA, 15 bp, Homo sapiens
aagactcccttgaac

SEQ ID NO: 1398684 - DNA, 15 bp, Homo sapiens
aaagactcccttgaa

SEQ ID NO: 1398685 - DNA, 15 bp, Homo sapiens
caaagactcccttga

SEQ ID NO: 1398686 - DNA, 15 bp, Homo sapiens
acaaagactcccttg

SEQ ID NO: 1398687 - DNA, 15 bp, Homo sapiens
cacaaagactccctt

SEQ ID NO: 1398688 - DNA, 15 bp, Homo sapiens
tcacaaagactccct

SEQ ID NO: 1398689 - DNA, 15 bp, Homo sapiens
ttcacaaagactccc

SEQ ID NO: 1398690 - DNA, 15 bp, Homo sapiens
attcacaaagactcc

SEQ ID NO: 1398691 - DNA, 15 bp, Homo sapiens
aattcacaaagactc

SEQ ID NO: 1398692 - DNA, 15 bp, Homo sapiens
gaattcacaaagact

SEQ ID NO: 1398693 - DNA, 15 bp, Homo sapiens
agaattcacaaagac

SEQ ID NO: 1398694 - DNA, 15 bp, Homo sapiens
gagaattcacaaaga

SEQ ID NO: 1398695 - DNA, 15 bp, Homo sapiens
ggagaattcacaaag

SEQ ID NO: 1398696 - DNA, 15 bp, Homo sapiens
gggagaattcacaaa

SEQ ID NO: 1398697 - DNA, 15 bp, Homo sapiens
tgggagaattcacaa

SEQ ID NO: 1398698 - DNA, 15 bp, Homo sapiens
ttgggagaattcaca

SEQ ID NO: 1398699 - DNA, 15 bp, Homo sapiens
cttgggagaattcac

SEQ ID NO: 1398700 - DNA, 15 bp, Homo sapiens
ccttgggagaattca

SEQ ID NO: 1398701 - DNA, 15 bp, Homo sapiens
tccttgggagaattc

SEQ ID NO: 1398702 - DNA, 15 bp, Homo sapiens
atccttgggagaatt

SEQ ID NO: 1398703 - DNA, 15 bp, Homo sapiens
catccttgggagaat

SEQ ID NO: 1398704 - DNA, 15 bp, Homo sapiens
ccatccttgggagaa

SEQ ID NO: 1398705 - DNA, 15 bp, Homo sapiens
tccatccttgggaga

SEQ ID NO: 1398706 - DNA, 15 bp, Homo sapiens
ttccatccttgggag

SEQ ID NO: 1398707 - DNA, 15 bp, Homo sapiens
gttccatccttggga

SEQ ID NO: 1398708 - DNA, 15 bp, Homo sapiens
tgttccatccttggg

SEQ ID NO: 1398709 - DNA, 15 bp, Homo sapiens
atgttccatccttgg

SEQ ID NO: 1398710 - DNA, 15 bp, Homo sapiens
aatgttccatccttg

SEQ ID NO: 1398711 - DNA, 15 bp, Homo sapiens
gaatgttccatcctt

SEQ ID NO: 1398712 - DNA, 15 bp, Homo sapiens
agaatgttccatcct

SEQ ID NO: 1398713 - DNA, 15 bp, Homo sapiens
tagaatgttccatcc

SEQ ID NO: 1398714 - DNA, 15 bp, Homo sapiens
ctagaatgttccatc

SEQ ID NO: 1398715 - DNA, 15 bp, Homo sapiens
tctagaatgttccat

SEQ ID NO: 1398716 - DNA, 15 bp, Homo sapiens
atctagaatgttcca

SEQ ID NO: 1398717 - DNA, 15 bp, Homo sapiens
tatctagaatgttcc

SEQ ID NO: 1398718 - DNA, 15 bp, Homo sapiens
ctatctagaatgttc

SEQ ID NO: 1398719 - DNA, 15 bp, Homo sapiens
cctatctagaatgtt

SEQ ID NO: 1398720 - DNA, 15 bp, Homo sapiens
tcctatctagaatgt

SEQ ID NO: 1398721 - DNA, 15 bp, Homo sapiens
ctcctatctagaatg

SEQ ID NO: 1398722 - DNA, 15 bp, Homo sapiens
cctcctatctagaat

SEQ ID NO: 1398723 - DNA, 15 bp, Homo sapiens
ccctcctatctagaa

SEQ ID NO: 1398724 - DNA, 15 bp, Homo sapiens
tccctcctatctaga

SEQ ID NO: 1398725 - DNA, 15 bp, Homo sapiens
atccctcctatctag

SEQ ID NO: 1398726 - DNA, 15 bp, Homo sapiens
tatccctcctatcta

SEQ ID NO: 1398727 - DNA, 15 bp, Homo sapiens
ctatccctcctatct

SEQ ID NO: 1398728 - DNA, 15 bp, Homo sapiens
tctatccctcctatc

SEQ ID NO: 1398729 - DNA, 15 bp, Homo sapiens
ttctatccctcctat

SEQ ID NO: 1398730 - DNA, 15 bp, Homo sapiens
cttctatccctccta

SEQ ID NO: 1398731 - DNA, 15 bp, Homo sapiens
gcttctatccctcct

SEQ ID NO: 1398732 - DNA, 15 bp, Homo sapiens
tgcttctatccctcc

SEQ ID NO: 1398733 - DNA, 15 bp, Homo sapiens
ttgcttctatccctc

SEQ ID NO: 1398734 - DNA, 15 bp, Homo sapiens
tttgcttctatccct

SEQ ID NO: 1398735 - DNA, 15 bp, Homo sapiens
atttgcttctatccc

SEQ ID NO: 1398736 - DNA, 15 bp, Homo sapiens
gatttgcttctatcc

SEQ ID NO: 1398737 - DNA, 15 bp, Homo sapiens
tgatttgcttctatc

SEQ ID NO: 1398738 - DNA, 15 bp, Homo sapiens
atgatttgcttctat

SEQ ID NO: 1398739 - DNA, 15 bp, Homo sapiens
aatgatttgcttcta

SEQ ID NO: 1398740 - DNA, 15 bp, Homo sapiens
gaatgatttgcttct

SEQ ID NO: 1398741 - DNA, 15 bp, Homo sapiens
agaatgatttgcttc

SEQ ID NO: 1398742 - DNA, 15 bp, Homo sapiens
tagaatgatttgctt

SEQ ID NO: 1398743 - DNA, 15 bp, Homo sapiens
atagaatgatttgct

SEQ ID NO: 1398744 - DNA, 15 bp, Homo sapiens
tatagaatgatttgc

SEQ ID NO: 1398745 - DNA, 15 bp, Homo sapiens
gtatagaatgatttg

SEQ ID NO: 1398746 - DNA, 15 bp, Homo sapiens
cgtatagaatgattt

SEQ ID NO: 1398747 - DNA, 15 bp, Homo sapiens
acgtatagaatgatt

SEQ ID NO: 1398748 - DNA, 15 bp, Homo sapiens
aacgtatagaatgat

SEQ ID NO: 1398749 - DNA, 15 bp, Homo sapiens
caacgtatagaatga

SEQ ID NO: 1398750 - DNA, 15 bp, Homo sapiens
ccaacgtatagaatg

SEQ ID NO: 1398751 - DNA, 15 bp, Homo sapiens
tccaacgtatagaat

SEQ ID NO: 1398752 - DNA, 15 bp, Homo sapiens
ttccaacgtatagaa

SEQ ID NO: 1398753 - DNA, 15 bp, Homo sapiens
cttccaacgtataga

SEQ ID NO: 1398754 - DNA, 15 bp, Homo sapiens
gcttccaacgtatag

SEQ ID NO: 1398755 - DNA, 15 bp, Homo sapiens
tgcttccaacgtata

SEQ ID NO: 1398756 - DNA, 15 bp, Homo sapiens
atgcttccaacgtat

SEQ ID NO: 1398757 - DNA, 15 bp, Homo sapiens
aatgcttccaacgta

SEQ ID NO: 1398758 - DNA, 15 bp, Homo sapiens
caatgcttccaacgt

SEQ ID NO: 1398759 - DNA, 15 bp, Homo sapiens
ccaatgcttccaacg

SEQ ID NO: 1398760 - DNA, 15 bp, Homo sapiens
cccaatgcttccaac

SEQ ID NO: 1398761 - DNA, 15 bp, Homo sapiens
ccccaatgcttccaa

SEQ ID NO: 1398762 - DNA, 15 bp, Homo sapiens
gccccaatgcttcca

SEQ ID NO: 1398763 - DNA, 15 bp, Homo sapiens
agccccaatgcttcc

SEQ ID NO: 1398764 - DNA, 15 bp, Homo sapiens
aagccccaatgcttc

SEQ ID NO: 1398765 - DNA, 15 bp, Homo sapiens
gaagccccaatgctt

SEQ ID NO: 1398766 - DNA, 15 bp, Homo sapiens
cgaagccccaatgct

SEQ ID NO: 1398767 - DNA, 15 bp, Homo sapiens
acgaagccccaatgc

SEQ ID NO: 1398768 - DNA, 15 bp, Homo sapiens
tacgaagccccaatg

SEQ ID NO: 1398769 - DNA, 15 bp, Homo sapiens
atacgaagccccaat

SEQ ID NO: 1398770 - DNA, 15 bp, Homo sapiens
aatacgaagccccaa

SEQ ID NO: 1398771 - DNA, 15 bp, Homo sapiens
gaatacgaagcccca

SEQ ID NO: 1398772 - DNA, 15 bp, Homo sapiens
agaatacgaagcccc

SEQ ID NO: 1398773 - DNA, 15 bp, Homo sapiens
aagaatacgaagccc

SEQ ID NO: 1398774 - DNA, 15 bp, Homo sapiens
caagaatacgaagcc

SEQ ID NO: 1398775 - DNA, 15 bp, Homo sapiens
acaagaatacgaagc

SEQ ID NO: 1398776 - DNA, 15 bp, Homo sapiens
cacaagaatacgaag

SEQ ID NO: 1398777 - DNA, 15 bp, Homo sapiens
ccacaagaatacgaa

SEQ ID NO: 1398778 - DNA, 15 bp, Homo sapiens
tccacaagaatacga

SEQ ID NO: 1398779 - DNA, 15 bp, Homo sapiens
ttccacaagaatacg

SEQ ID NO: 1398780 - DNA, 15 bp, Homo sapiens
gttccacaagaatac

SEQ ID NO: 1398781 - DNA, 15 bp, Homo sapiens
ggttccacaagaata

SEQ ID NO: 1398782 - DNA, 15 bp, Homo sapiens
aggttccacaagaat

SEQ ID NO: 1398783 - DNA, 15 bp, Homo sapiens
aaggttccacaagaa

SEQ ID NO: 1398784 - DNA, 15 bp, Homo sapiens
caaggttccacaaga

SEQ ID NO: 1398785 - DNA, 15 bp, Homo sapiens
acaaggttccacaag

SEQ ID NO: 1398786 - DNA, 15 bp, Homo sapiens
aacaaggttccacaa

SEQ ID NO: 1398787 - DNA, 15 bp, Homo sapiens
caacaaggttccaca

SEQ ID NO: 1398788 - DNA, 15 bp, Homo sapiens
tcaacaaggttccac

SEQ ID NO: 1398789 - DNA, 15 bp, Homo sapiens
ctcaacaaggttcca

SEQ ID NO: 1398790 - DNA, 15 bp, Homo sapiens
tctcaacaaggttcc

SEQ ID NO: 1398791 - DNA, 15 bp, Homo sapiens
ttctcaacaaggttc

SEQ ID NO: 1398792 - DNA, 15 bp, Homo sapiens
cttctcaacaaggtt

SEQ ID NO: 1398793 - DNA, 15 bp, Homo sapiens
ccttctcaacaaggt

SEQ ID NO: 1398794 - DNA, 15 bp, Homo sapiens
cccttctcaacaagg

SEQ ID NO: 1398795 - DNA, 15 bp, Homo sapiens
gcccttctcaacaag

SEQ ID NO: 1398796 - DNA, 15 bp, Homo sapiens
tgcccttctcaacaa

SEQ ID NO: 1398797 - DNA, 15 bp, Homo sapiens
ctgcccttctcaaca

SEQ ID NO: 1398798 - DNA, 15 bp, Homo sapiens
cctgcccttctcaac

SEQ ID NO: 1398799 - DNA, 15 bp, Homo sapiens
acctgcccttctcaa

SEQ ID NO: 1398800 - DNA, 15 bp, Homo sapiens
cacctgcccttctca

SEQ ID NO: 1398801 - DNA, 15 bp, Homo sapiens
acacctgcccttctc

SEQ ID NO: 1398802 - DNA, 15 bp, Homo sapiens
gacacctgcccttct

SEQ ID NO: 1398803 - DNA, 15 bp, Homo sapiens
tgacacctgcccttc

SEQ ID NO: 1398804 - DNA, 15 bp, Homo sapiens
atgacacctgccctt

SEQ ID NO: 1398805 - DNA, 15 bp, Homo sapiens
gatgacacctgccct

SEQ ID NO: 1398806 - DNA, 15 bp, Homo sapiens
ggatgacacctgccc

SEQ ID NO: 1398807 - DNA, 15 bp, Homo sapiens
tggatgacacctgcc

SEQ ID NO: 1398808 - DNA, 15 bp, Homo sapiens
ctggatgacacctgc

SEQ ID NO: 1398809 - DNA, 15 bp, Homo sapiens
cctggatgacacctg

SEQ ID NO: 1398810 - DNA, 15 bp, Homo sapiens
tcctggatgacacct

SEQ ID NO: 1398811 - DNA, 15 bp, Homo sapiens
ttcctggatgacacc

SEQ ID NO: 1398812 - DNA, 15 bp, Homo sapiens
tttcctggatgacac

SEQ ID NO: 1398813 - DNA, 15 bp, Homo sapiens
ctttcctggatgaca

SEQ ID NO: 1398814 - DNA, 15 bp, Homo sapiens
tctttcctggatgac

SEQ ID NO: 1398815 - DNA, 15 bp, Homo sapiens
ttctttcctggatga

SEQ ID NO: 1398816 - DNA, 15 bp, Homo sapiens
cttctttcctggatg

SEQ ID NO: 1398817 - DNA, 15 bp, Homo sapiens
ccttctttcctggat

SEQ ID NO: 1398818 - DNA, 15 bp, Homo sapiens
cccttctttcctgga

SEQ ID NO: 1398819 - DNA, 15 bp, Homo sapiens
tcccttctttcctgg

SEQ ID NO: 1398820 - DNA, 15 bp, Homo sapiens
gtcccttctttcctg

SEQ ID NO: 1398821 - DNA, 15 bp, Homo sapiens
ggtcccttctttcct

SEQ ID NO: 1398822 - DNA, 15 bp, Homo sapiens
tggtcccttctttcc

SEQ ID NO: 1398823 - DNA, 15 bp, Homo sapiens
gtggtcccttctttc

SEQ ID NO: 1398824 - DNA, 15 bp, Homo sapiens
tgtggtcccttcttt

SEQ ID NO: 1398825 - DNA, 15 bp, Homo sapiens
ctgtggtcccttctt

SEQ ID NO: 1398826 - DNA, 15 bp, Homo sapiens
actgtggtcccttct

SEQ ID NO: 1398827 - DNA, 15 bp, Homo sapiens
tactgtggtcccttc

SEQ ID NO: 1398828 - DNA, 15 bp, Homo sapiens
gtactgtggtccctt

SEQ ID NO: 1398829 - DNA, 15 bp, Homo sapiens
agtactgtggtccct

SEQ ID NO: 1398830 - DNA, 15 bp, Homo sapiens
aagtactgtggtccc

SEQ ID NO: 1398831 - DNA, 15 bp, Homo sapiens
aaagtactgtggtcc

SEQ ID NO: 1398832 - DNA, 15 bp, Homo sapiens
caaagtactgtggtc

SEQ ID NO: 1398833 - DNA, 15 bp, Homo sapiens
gcaaagtactgtggt

SEQ ID NO: 1398834 - DNA, 15 bp, Homo sapiens
agcaaagtactgtgg

SEQ ID NO: 1398835 - DNA, 15 bp, Homo sapiens
cagcaaagtactgtg

SEQ ID NO: 1398836 - DNA, 15 bp, Homo sapiens
acagcaaagtactgt

SEQ ID NO: 1398837 - DNA, 15 bp, Homo sapiens
cacagcaaagtactg

SEQ ID NO: 1398838 - DNA, 15 bp, Homo sapiens
gcacagcaaagtact

SEQ ID NO: 1398839 - DNA, 15 bp, Homo sapiens
tgcacagcaaagtac

SEQ ID NO: 1398840 - DNA, 15 bp, Homo sapiens
ctgcacagcaaagta

SEQ ID NO: 1398841 - DNA, 15 bp, Homo sapiens
gctgcacagcaaagt

SEQ ID NO: 1398842 - DNA, 15 bp, Homo sapiens
tgctgcacagcaaag

SEQ ID NO: 1398843 - DNA, 15 bp, Homo sapiens
atgctgcacagcaaa

SEQ ID NO: 1398844 - DNA, 15 bp, Homo sapiens
catgctgcacagcaa

SEQ ID NO: 1398845 - DNA, 15 bp, Homo sapiens
ccatgctgcacagca

SEQ ID NO: 1398846 - DNA, 15 bp, Homo sapiens
cccatgctgcacagc

SEQ ID NO: 1398847 - DNA, 15 bp, Homo sapiens
ccccatgctgcacag

SEQ ID NO: 1398848 - DNA, 15 bp, Homo sapiens
tccccatgctgcaca

SEQ ID NO: 1398849 - DNA, 15 bp, Homo sapiens
ttccccatgctgcac

SEQ ID NO: 1398850 - DNA, 15 bp, Homo sapiens
tttccccatgctgca

SEQ ID NO: 1398851 - DNA, 15 bp, Homo sapiens
ttttccccatgctgc

SEQ ID NO: 1398852 - DNA, 15 bp, Homo sapiens
cttttccccatgctg

SEQ ID NO: 1398853 - DNA, 15 bp, Homo sapiens
ccttttccccatgct

SEQ ID NO: 1398854 - DNA, 15 bp, Homo sapiens
cccttttccccatgc

SEQ ID NO: 1398855 - DNA, 15 bp, Homo sapiens
tcccttttccccatg

SEQ ID NO: 1398856 - DNA, 15 bp, Homo sapiens
ctcccttttccccat

SEQ ID NO: 1398857 - DNA, 15 bp, Homo sapiens
gctcccttttcccca

SEQ ID NO: 1398858 - DNA, 15 bp, Homo sapiens
tgctcccttttcccc

SEQ ID NO: 1398859 - DNA, 15 bp, Homo sapiens
atgctcccttttccc

SEQ ID NO: 1398860 - DNA, 15 bp, Homo sapiens
aatgctcccttttcc

SEQ ID NO: 1398861 - DNA, 15 bp, Homo sapiens
aaatgctcccttttc

SEQ ID NO: 1398862 - DNA, 15 bp, Homo sapiens
taaatgctccctttt

SEQ ID NO: 1398863 - DNA, 15 bp, Homo sapiens
ataaatgctcccttt

SEQ ID NO: 1398864 - DNA, 15 bp, Homo sapiens
cataaatgctccctt

SEQ ID NO: 1398865 - DNA, 15 bp, Homo sapiens
ccataaatgctccct

SEQ ID NO: 1398866 - DNA, 15 bp, Homo sapiens
tccataaatgctccc

SEQ ID NO: 1398867 - DNA, 15 bp, Homo sapiens
gtccataaatgctcc

SEQ ID NO: 1398868 - DNA, 15 bp, Homo sapiens
tgtccataaatgctc

SEQ ID NO: 1398869 - DNA, 15 bp, Homo sapiens
atgtccataaatgct

SEQ ID NO: 1398870 - DNA, 15 bp, Homo sapiens
gatgtccataaatgc

SEQ ID NO: 1398871 - DNA, 15 bp, Homo sapiens
tgatgtccataaatg

SEQ ID NO: 1398872 - DNA, 15 bp, Homo sapiens
ttgatgtccataaat

SEQ ID NO: 1398873 - DNA, 15 bp, Homo sapiens
gttgatgtccataaa

SEQ ID NO: 1398874 - DNA, 15 bp, Homo sapiens
ggttgatgtccataa

SEQ ID NO: 1398875 - DNA, 15 bp, Homo sapiens
tggttgatgtccata

SEQ ID NO: 1398876 - DNA, 15 bp, Homo sapiens
ctggttgatgtccat

SEQ ID NO: 1398877 - DNA, 15 bp, Homo sapiens
cctggttgatgtcca

SEQ ID NO: 1398878 - DNA, 15 bp, Homo sapiens
tcctggttgatgtcc

SEQ ID NO: 1398879 - DNA, 15 bp, Homo sapiens
atcctggttgatgtc

SEQ ID NO: 1398880 - DNA, 15 bp, Homo sapiens
catcctggttgatgt

SEQ ID NO: 1398881 - DNA, 15 bp, Homo sapiens
tcatcctggttgatg

SEQ ID NO: 1398882 - DNA, 15 bp, Homo sapiens
ttcatcctggttgat

SEQ ID NO: 1398883 - DNA, 15 bp, Homo sapiens
cttcatcctggttga

SEQ ID NO: 1398884 - DNA, 15 bp, Homo sapiens
gcttcatcctggttg

SEQ ID NO: 1398885 - DNA, 15 bp, Homo sapiens
agcttcatcctggtt

SEQ ID NO: 1398886 - DNA, 15 bp, Homo sapiens
aagcttcatcctggt

SEQ ID NO: 1398887 - DNA, 15 bp, Homo sapiens
aaagcttcatcctgg

SEQ ID NO: 1398888 - DNA, 15 bp, Homo sapiens
gaaagcttcatcctg

SEQ ID NO: 1398889 - DNA, 15 bp, Homo sapiens
ggaaagcttcatcct

SEQ ID NO: 1398890 - DNA, 15 bp, Homo sapiens
aggaaagcttcatcc

SEQ ID NO: 1398891 - DNA, 15 bp, Homo sapiens
gaggaaagcttcatc

SEQ ID NO: 1398892 - DNA, 15 bp, Homo sapiens
ggaggaaagcttcat

SEQ ID NO: 1398893 - DNA, 15 bp, Homo sapiens
aggaggaaagcttca

SEQ ID NO: 1398894 - DNA, 15 bp, Homo sapiens
caggaggaaagcttc

SEQ ID NO: 1398895 - DNA, 15 bp, Homo sapiens
tcaggaggaaagctt

SEQ ID NO: 1398896 - DNA, 15 bp, Homo sapiens
atcaggaggaaagct

SEQ ID NO: 1398897 - DNA, 15 bp, Homo sapiens
aatcaggaggaaagc

SEQ ID NO: 1398898 - DNA, 15 bp, Homo sapiens
aaatcaggaggaaag

SEQ ID NO: 1398899 - DNA, 15 bp, Homo sapiens
aaaatcaggaggaaa

SEQ ID NO: 1398900 - DNA, 15 bp, Homo sapiens
gaaaatcaggaggaa

SEQ ID NO: 1398901 - DNA, 15 bp, Homo sapiens
tgaaaatcaggagga

SEQ ID NO: 1398902 - DNA, 15 bp, Homo sapiens
ctgaaaatcaggagg

SEQ ID NO: 1398903 - DNA, 15 bp, Homo sapiens
tctgaaaatcaggag

SEQ ID NO: 1398904 - DNA, 15 bp, Homo sapiens
ctctgaaaatcagga

SEQ ID NO: 1398905 - DNA, 15 bp, Homo sapiens
cctctgaaaatcagg

SEQ ID NO: 1398906 - DNA, 15 bp, Homo sapiens
gcctctgaaaatcag

SEQ ID NO: 1398907 - DNA, 15 bp, Homo sapiens
agcctctgaaaatca

SEQ ID NO: 1398908 - DNA, 15 bp, Homo sapiens
aagcctctgaaaatc

SEQ ID NO: 1398909 - DNA, 15 bp, Homo sapiens
gaagcctctgaaaat

SEQ ID NO: 1398910 - DNA, 15 bp, Homo sapiens
tgaagcctctgaaaa

SEQ ID NO: 1398911 - DNA, 15 bp, Homo sapiens
gtgaagcctctgaaa

SEQ ID NO: 1398912 - DNA, 15 bp, Homo sapiens
agtgaagcctctgaa

SEQ ID NO: 1398913 - DNA, 15 bp, Homo sapiens
aagtgaagcctctga

SEQ ID NO: 1398914 - DNA, 15 bp, Homo sapiens
aaagtgaagcctctg

SEQ ID NO: 1398915 - DNA, 15 bp, Homo sapiens
aaaagtgaagcctct

SEQ ID NO: 1398916 - DNA, 15 bp, Homo sapiens
caaaagtgaagcctc

SEQ ID NO: 1398917 - DNA, 15 bp, Homo sapiens
acaaaagtgaagcct

SEQ ID NO: 1398918 - DNA, 15 bp, Homo sapiens
cacaaaagtgaagcc

SEQ ID NO: 1398919 - DNA, 15 bp, Homo sapiens
gcacaaaagtgaagc

SEQ ID NO: 1398920 - DNA, 15 bp, Homo sapiens
agcacaaaagtgaag

SEQ ID NO: 1398921 - DNA, 15 bp, Homo sapiens
aagcacaaaagtgaa

SEQ ID NO: 1398922 - DNA, 15 bp, Homo sapiens
aaagcacaaaagtga

SEQ ID NO: 1398923 - DNA, 15 bp, Homo sapiens
aaaagcacaaaagtg

SEQ ID NO: 1398924 - DNA, 15 bp, Homo sapiens
aaaaagcacaaaagt

SEQ ID NO: 1398925 - DNA, 15 bp, Homo sapiens
taaaaagcacaaaag

SEQ ID NO: 1398926 - DNA, 15 bp, Homo sapiens
ataaaaagcacaaaa

SEQ ID NO: 1398927 - DNA, 15 bp, Homo sapiens
gataaaaagcacaaa

SEQ ID NO: 1398928 - DNA, 15 bp, Homo sapiens
ggataaaaagcacaa

SEQ ID NO: 1398929 - DNA, 15 bp, Homo sapiens
tggataaaaagcaca

SEQ ID NO: 1398930 - DNA, 15 bp, Homo sapiens
ttggataaaaagcac

SEQ ID NO: 1398931 - DNA, 15 bp, Homo sapiens
cttggataaaaagca

SEQ ID NO: 1398932 - DNA, 15 bp, Homo sapiens
acttggataaaaagc

SEQ ID NO: 1398933 - DNA, 15 bp, Homo sapiens
gacttggataaaaag

SEQ ID NO: 1398934 - DNA, 15 bp, Homo sapiens
tgacttggataaaaa

SEQ ID NO: 1398935 - DNA, 15 bp, Homo sapiens
ctgacttggataaaa

SEQ ID NO: 1398936 - DNA, 15 bp, Homo sapiens
cctgacttggataaa

SEQ ID NO: 1398937 - DNA, 15 bp, Homo sapiens
acctgacttggataa

SEQ ID NO: 1398938 - DNA, 15 bp, Homo sapiens
aacctgacttggata

SEQ ID NO: 1398939 - DNA, 15 bp, Homo sapiens
taacctgacttggat

SEQ ID NO: 1398940 - DNA, 15 bp, Homo sapiens
ctaacctgacttgga

SEQ ID NO: 1398941 - DNA, 15 bp, Homo sapiens
actaacctgacttgg

SEQ ID NO: 1398942 - DNA, 15 bp, Homo sapiens
cactaacctgacttg

SEQ ID NO: 1398943 - DNA, 15 bp, Homo sapiens
gcactaacctgactt

SEQ ID NO: 1398944 - DNA, 15 bp, Homo sapiens
ggcactaacctgact

SEQ ID NO: 1398945 - DNA, 15 bp, Homo sapiens
gggcactaacctgac

SEQ ID NO: 1398946 - DNA, 15 bp, Homo sapiens
tgggcactaacctga

SEQ ID NO: 1398947 - DNA, 15 bp, Homo sapiens
ttgggcactaacctg

SEQ ID NO: 1398948 - DNA, 15 bp, Homo sapiens
tttgggcactaacct

SEQ ID NO: 1398949 - DNA, 15 bp, Homo sapiens
ttttgggcactaacc

SEQ ID NO: 1398950 - DNA, 15 bp, Homo sapiens
gttttgggcactaac

SEQ ID NO: 1398951 - DNA, 15 bp, Homo sapiens
tgttttgggcactaa

SEQ ID NO: 1398952 - DNA, 15 bp, Homo sapiens
ttgttttgggcacta

SEQ ID NO: 1398953 - DNA, 15 bp, Homo sapiens
tttgttttgggcact

SEQ ID NO: 1398954 - DNA, 15 bp, Homo sapiens
ctttgttttgggcac

SEQ ID NO: 1398955 - DNA, 15 bp, Homo sapiens
gctttgttttgggca

SEQ ID NO: 1398956 - DNA, 15 bp, Homo sapiens
tgctttgttttgggc

SEQ ID NO: 1398957 - DNA, 15 bp, Homo sapiens
ttgctttgttttggg

SEQ ID NO: 1398958 - DNA, 15 bp, Homo sapiens
tttgctttgttttgg

SEQ ID NO: 1398959 - DNA, 15 bp, Homo sapiens
gtttgctttgttttg

SEQ ID NO: 1398960 - DNA, 15 bp, Homo sapiens
tgtttgctttgtttt

SEQ ID NO: 1398961 - DNA, 15 bp, Homo sapiens
ttgtttgctttgttt

SEQ ID NO: 1398962 - DNA, 15 bp, Homo sapiens
tttgtttgctttgtt

SEQ ID NO: 1398963 - DNA, 15 bp, Homo sapiens
atttgtttgctttgt

SEQ ID NO: 1398964 - DNA, 15 bp, Homo sapiens
tatttgtttgctttg

SEQ ID NO: 1398965 - DNA, 15 bp, Homo sapiens
ctttatttgtttgct

SEQ ID NO: 1398966 - DNA, 15 bp, Homo sapiens
cctttatttgtttgc

SEQ ID NO: 1398967 - DNA, 15 bp, Homo sapiens
gcctttatttgtttg

SEQ ID NO: 1398968 - DNA, 15 bp, Homo sapiens
ggcctttatttgttt

SEQ ID NO: 1398969 - DNA, 15 bp, Homo sapiens
aggcctttatttgtt

SEQ ID NO: 1398970 - DNA, 15 bp, Homo sapiens
aaggcctttatttgt

SEQ ID NO: 1398971 - DNA, 15 bp, Homo sapiens
aaaggcctttatttg

SEQ ID NO: 1398972 - DNA, 15 bp, Homo sapiens
aaaataaaggccttt

SEQ ID NO: 1398973 - DNA, 15 bp, Homo sapiens
taaaataaaggcctt

SEQ ID NO: 1398974 - DNA, 15 bp, Homo sapiens
ttaaaataaaggcct

SEQ ID NO: 1398975 - DNA, 15 bp, Homo sapiens
cttaaaataaaggcc

SEQ ID NO: 1398976 - DNA, 15 bp, Homo sapiens
gcttaaaataaaggc

SEQ ID NO: 1398977 - DNA, 15 bp, Homo sapiens
ggcttaaaataaagg

SEQ ID NO: 1398978 - DNA, 15 bp, Homo sapiens
tggcttaaaataaag

SEQ ID NO: 1398979 - DNA, 15 bp, Homo sapiens
ttggcttaaaataaa

SEQ ID NO: 1398980 - DNA, 15 bp, Homo sapiens
gttggcttaaaataa

SEQ ID NO: 1398981 - DNA, 15 bp, Homo sapiens
ggttggcttaaaata

SEQ ID NO: 1398982 - DNA, 15 bp, Homo sapiens
aggttggcttaaaat

SEQ ID NO: 1398983 - DNA, 15 bp, Homo sapiens
aaggttggcttaaaa

SEQ ID NO: 1398984 - DNA, 15 bp, Homo sapiens
caaggttggcttaaa

SEQ ID NO: 1398985 - DNA, 15 bp, Homo sapiens
acaaggttggcttaa

SEQ ID NO: 1398986 - DNA, 15 bp, Homo sapiens
tacaaggttggctta

SEQ ID NO: 1398987 - DNA, 15 bp, Homo sapiens
ttacaaggttggctt

SEQ ID NO: 1398988 - DNA, 15 bp, Homo sapiens
gttacaaggttggct

SEQ ID NO: 1398989 - DNA, 15 bp, Homo sapiens
tgttacaaggttggc

SEQ ID NO: 1398990 - DNA, 15 bp, Homo sapiens
atgttacaaggttgg

SEQ ID NO: 1398991 - DNA, 15 bp, Homo sapiens
gatgttacaaggttg

SEQ ID NO: 1398992 - DNA, 15 bp, Homo sapiens
agatgttacaaggtt

SEQ ID NO: 1398993 - DNA, 15 bp, Homo sapiens
gagatgttacaaggt

SEQ ID NO: 1398994 - DNA, 15 bp, Homo sapiens
ggagatgttacaagg

SEQ ID NO: 1398995 - DNA, 15 bp, Homo sapiens
tggagatgttacaag

SEQ ID NO: 1398996 - DNA, 15 bp, Homo sapiens
atggagatgttacaa

SEQ ID NO: 1398997 - DNA, 15 bp, Homo sapiens
aatggagatgttaca

SEQ ID NO: 1398998 - DNA, 15 bp, Homo sapiens
gaatggagatgttac

SEQ ID NO: 1398999 - DNA, 15 bp, Homo sapiens
tgaatggagatgtta

SEQ ID NO: 1399000 - DNA, 15 bp, Homo sapiens
atgaatggagatgtt

SEQ ID NO: 1399001 - DNA, 15 bp, Homo sapiens
aatgaatggagatgt

SEQ ID NO: 1399002 - DNA, 15 bp, Homo sapiens
gaatgaatggagatg

SEQ ID NO: 1399003 - DNA, 15 bp, Homo sapiens
agaatgaatggagat

SEQ ID NO: 1399004 - DNA, 15 bp, Homo sapiens
tagaatgaatggaga

SEQ ID NO: 1399005 - DNA, 15 bp, Homo sapiens
gtagaatgaatggag

SEQ ID NO: 1399006 - DNA, 15 bp, Homo sapiens
tgtagaatgaatgga

SEQ ID NO: 1399007 - DNA, 15 bp, Homo sapiens
ctgtagaatgaatgg

SEQ ID NO: 1399008 - DNA, 15 bp, Homo sapiens
gctgtagaatgaatg

SEQ ID NO: 1399009 - DNA, 15 bp, Homo sapiens
agctgtagaatgaat

SEQ ID NO: 1399010 - DNA, 15 bp, Homo sapiens
gagctgtagaatgaa

SEQ ID NO: 1399011 - DNA, 15 bp, Homo sapiens
tgagctgtagaatga

SEQ ID NO: 1399012 - DNA, 15 bp, Homo sapiens
ttgagctgtagaatg

SEQ ID NO: 1399013 - DNA, 15 bp, Homo sapiens
cttgagctgtagaat

SEQ ID NO: 1399014 - DNA, 15 bp, Homo sapiens
ccttgagctgtagaa

SEQ ID NO: 1399015 - DNA, 15 bp, Homo sapiens
accttgagctgtaga

SEQ ID NO: 1399016 - DNA, 15 bp, Homo sapiens
caccttgagctgtag

SEQ ID NO: 1399017 - DNA, 15 bp, Homo sapiens
tcaccttgagctgta

SEQ ID NO: 1399018 - DNA, 15 bp, Homo sapiens
ctcaccttgagctgt

SEQ ID NO: 1399019 - DNA, 15 bp, Homo sapiens
cctcaccttgagctg

SEQ ID NO: 1399020 - DNA, 15 bp, Homo sapiens
gcctcaccttgagct

SEQ ID NO: 1399021 - DNA, 15 bp, Homo sapiens
agcctcaccttgagc

SEQ ID NO: 1399022 - DNA, 15 bp, Homo sapiens
gagcctcaccttgag

SEQ ID NO: 1399023 - DNA, 15 bp, Homo sapiens
ggagcctcaccttga

SEQ ID NO: 1399024 - DNA, 15 bp, Homo sapiens
gggagcctcaccttg

SEQ ID NO: 1399025 - DNA, 15 bp, Homo sapiens
ggggagcctcacctt

SEQ ID NO: 1399026 - DNA, 15 bp, Homo sapiens
cggggagcctcacct

SEQ ID NO: 1399027 - DNA, 15 bp, Homo sapiens
tcggggagcctcacc

SEQ ID NO: 1399028 - DNA, 15 bp, Homo sapiens
ctcggggagcctcac

SEQ ID NO: 1399029 - DNA, 15 bp, Homo sapiens
cctcggggagcctca

SEQ ID NO: 1399030 - DNA, 15 bp, Homo sapiens
tcctcggggagcctc

SEQ ID NO: 1399031 - DNA, 15 bp, Homo sapiens
gtcctcggggagcct

SEQ ID NO: 1399032 - DNA, 15 bp, Homo sapiens
ggtcctcggggagcc

SEQ ID NO: 1399033 - DNA, 15 bp, Homo sapiens
gggtcctcggggagc

SEQ ID NO: 1399034 - DNA, 15 bp, Homo sapiens
ggggtcctcggggag

SEQ ID NO: 1399035 - DNA, 15 bp, Homo sapiens
tggggtcctcgggga

SEQ ID NO: 1399036 - DNA, 15 bp, Homo sapiens
gtggggtcctcgggg

SEQ ID NO: 1399037 - DNA, 15 bp, Homo sapiens
tgtggggtcctcggg

SEQ ID NO: 1399038 - DNA, 15 bp, Homo sapiens
atgtggggtcctcgg

SEQ ID NO: 1399039 - DNA, 15 bp, Homo sapiens
aatgtggggtcctcg

SEQ ID NO: 1399040 - DNA, 15 bp, Homo sapiens
aaatgtggggtcctc

SEQ ID NO: 1399041 - DNA, 15 bp, Homo sapiens
aaaatgtggggtcct

SEQ ID NO: 1399042 - DNA, 15 bp, Homo sapiens
taaaatgtggggtcc

SEQ ID NO: 1399043 - DNA, 15 bp, Homo sapiens
ctaaaatgtggggtc

SEQ ID NO: 1399044 - DNA, 15 bp, Homo sapiens
actaaaatgtggggt

SEQ ID NO: 1399045 - DNA, 15 bp, Homo sapiens
cactaaaatgtgggg

SEQ ID NO: 1399046 - DNA, 15 bp, Homo sapiens
acactaaaatgtggg

SEQ ID NO: 1399047 - DNA, 15 bp, Homo sapiens
cacactaaaatgtgg

SEQ ID NO: 1399048 - DNA, 15 bp, Homo sapiens
acacactaaaatgtg

SEQ ID NO: 1399049 - DNA, 15 bp, Homo sapiens
cacacactaaaatgt

SEQ ID NO: 1399050 - DNA, 15 bp, Homo sapiens
acacacactaaaatg

SEQ ID NO: 1399051 - DNA, 15 bp, Homo sapiens
cacacacactaaaat

SEQ ID NO: 1399052 - DNA, 15 bp, Homo sapiens
gcacacacactaaaa

SEQ ID NO: 1399053 - DNA, 15 bp, Homo sapiens
tgcacacacactaaa

SEQ ID NO: 1399054 - DNA, 15 bp, Homo sapiens
atgcacacacactaa

SEQ ID NO: 1399055 - DNA, 15 bp, Homo sapiens
gatgcacacacacta

SEQ ID NO: 1399056 - DNA, 15 bp, Homo sapiens
tgatgcacacacact

SEQ ID NO: 1399057 - DNA, 15 bp, Homo sapiens
gtgatgcacacacac

SEQ ID NO: 1399058 - DNA, 15 bp, Homo sapiens
ggtgatgcacacaca

SEQ ID NO: 1399059 - DNA, 15 bp, Homo sapiens
gggtgatgcacacac

SEQ ID NO: 1399060 - DNA, 15 bp, Homo sapiens
tgggtgatgcacaca

SEQ ID NO: 1399061 - DNA, 15 bp, Homo sapiens
ctgggtgatgcacac

SEQ ID NO: 1399062 - DNA, 15 bp, Homo sapiens
tctgggtgatgcaca

SEQ ID NO: 1399063 - DNA, 15 bp, Homo sapiens
ctctgggtgatgcac

SEQ ID NO: 1399064 - DNA, 15 bp, Homo sapiens
actctgggtgatgca

SEQ ID NO: 1399065 - DNA, 15 bp, Homo sapiens
tactctgggtgatgc

SEQ ID NO: 1399066 - DNA, 15 bp, Homo sapiens
gtactctgggtgatg

SEQ ID NO: 1399067 - DNA, 15 bp, Homo sapiens
tgtactctgggtgat

SEQ ID NO: 1399068 - DNA, 15 bp, Homo sapiens
ctgtactctgggtga

SEQ ID NO: 1399069 - DNA, 15 bp, Homo sapiens
tctgtactctgggtg

SEQ ID NO: 1399070 - DNA, 15 bp, Homo sapiens
gtctgtactctgggt

SEQ ID NO: 1399071 - DNA, 15 bp, Homo sapiens
agtctgtactctggg

SEQ ID NO: 1399072 - DNA, 15 bp, Homo sapiens
aagtctgtactctgg

SEQ ID NO: 1399073 - DNA, 15 bp, Homo sapiens
aaagtctgtactctg

SEQ ID NO: 1399074 - DNA, 15 bp, Homo sapiens
caaagtctgtactct

SEQ ID NO: 1399075 - DNA, 15 bp, Homo sapiens
tcaaagtctgtactc

SEQ ID NO: 1399076 - DNA, 15 bp, Homo sapiens
ctcaaagtctgtact

SEQ ID NO: 1399077 - DNA, 15 bp, Homo sapiens
gctcaaagtctgtac

SEQ ID NO: 1399078 - DNA, 15 bp, Homo sapiens
cgctcaaagtctgta

SEQ ID NO: 1399079 - DNA, 15 bp, Homo sapiens
tcgctcaaagtctgt

SEQ ID NO: 1399080 - DNA, 15 bp, Homo sapiens
atcgctcaaagtctg

SEQ ID NO: 1399081 - DNA, 15 bp, Homo sapiens
catcgctcaaagtct

SEQ ID NO: 1399082 - DNA, 15 bp, Homo sapiens
gcatcgctcaaagtc

SEQ ID NO: 1399083 - DNA, 15 bp, Homo sapiens
ggcatcgctcaaagt

SEQ ID NO: 1399084 - DNA, 15 bp, Homo sapiens
aggcatcgctcaaag

SEQ ID NO: 1399085 - DNA, 15 bp, Homo sapiens
caggcatcgctcaaa

SEQ ID NO: 1399086 - DNA, 15 bp, Homo sapiens
acaggcatcgctcaa

SEQ ID NO: 1399087 - DNA, 15 bp, Homo sapiens
aacaggcatcgctca

SEQ ID NO: 1399088 - DNA, 15 bp, Homo sapiens
taacaggcatcgctc

SEQ ID NO: 1399089 - DNA, 15 bp, Homo sapiens
ataacaggcatcgct

SEQ ID NO: 1399090 - DNA, 15 bp, Homo sapiens
gataacaggcatcgc

SEQ ID NO: 1399091 - DNA, 15 bp, Homo sapiens
agataacaggcatcg

SEQ ID NO: 1399092 - DNA, 15 bp, Homo sapiens
tagataacaggcatc

SEQ ID NO: 1399093 - DNA, 15 bp, Homo sapiens
ctagataacaggcat

SEQ ID NO: 1399094 - DNA, 15 bp, Homo sapiens
gctagataacaggca

SEQ ID NO: 1399095 - DNA, 15 bp, Homo sapiens
agctagataacaggc

SEQ ID NO: 1399096 - DNA, 15 bp, Homo sapiens
cagctagataacagg

SEQ ID NO: 1399097 - DNA, 15 bp, Homo sapiens
gcagctagataacag

SEQ ID NO: 1399098 - DNA, 15 bp, Homo sapiens
cgcagctagataaca

SEQ ID NO: 1399099 - DNA, 15 bp, Homo sapiens
gcgcagctagataac

SEQ ID NO: 1399100 - DNA, 15 bp, Homo sapiens
agcgcagctagataa

SEQ ID NO: 1399101 - DNA, 15 bp, Homo sapiens
cagcgcagctagata

SEQ ID NO: 1399102 - DNA, 15 bp, Homo sapiens
ccagcgcagctagat

SEQ ID NO: 1399103 - DNA, 15 bp, Homo sapiens
gccagcgcagctaga

SEQ ID NO: 1399104 - DNA, 15 bp, Homo sapiens
agccagcgcagctag

SEQ ID NO: 1399105 - DNA, 15 bp, Homo sapiens
gagccagcgcagcta

SEQ ID NO: 1399106 - DNA, 15 bp, Homo sapiens
tgagccagcgcagct

SEQ ID NO: 1399107 - DNA, 15 bp, Homo sapiens
atgagccagcgcagc

SEQ ID NO: 1399108 - DNA, 15 bp, Homo sapiens
catgagccagcgcag

SEQ ID NO: 1399109 - DNA, 15 bp, Homo sapiens
acatgagccagcgca

SEQ ID NO: 1399110 - DNA, 15 bp, Homo sapiens
aacatgagccagcgc

SEQ ID NO: 1399111 - DNA, 15 bp, Homo sapiens
gaacatgagccagcg

SEQ ID NO: 1399112 - DNA, 15 bp, Homo sapiens
tgaacatgagccagc

SEQ ID NO: 1399113 - DNA, 15 bp, Homo sapiens
ctgaacatgagccag

SEQ ID NO: 1399114 - DNA, 15 bp, Homo sapiens
gctgaacatgagcca

SEQ ID NO: 1399115 - DNA, 15 bp, Homo sapiens
tgctgaacatgagcc

SEQ ID NO: 1399116 - DNA, 15 bp, Homo sapiens
ctgctgaacatgagc

SEQ ID NO: 1399117 - DNA, 15 bp, Homo sapiens
actgctgaacatgag

SEQ ID NO: 1399118 - DNA, 15 bp, Homo sapiens
aactgctgaacatga

SEQ ID NO: 1399119 - DNA, 15 bp, Homo sapiens
caactgctgaacatg

SEQ ID NO: 1399120 - DNA, 15 bp, Homo sapiens
gcaactgctgaacat

SEQ ID NO: 1399121 - DNA, 15 bp, Homo sapiens
tgcaactgctgaaca

SEQ ID NO: 1399122 - DNA, 15 bp, Homo sapiens
ttgcaactgctgaac

SEQ ID NO: 1399123 - DNA, 15 bp, Homo sapiens
gttgcaactgctgaa

SEQ ID NO: 1399124 - DNA, 15 bp, Homo sapiens
tgttgcaactgctga

SEQ ID NO: 1399125 - DNA, 15 bp, Homo sapiens
ctgttgcaactgctg

SEQ ID NO: 1399126 - DNA, 15 bp, Homo sapiens
gctgttgcaactgct

SEQ ID NO: 1399127 - DNA, 15 bp, Homo sapiens
agctgttgcaactgc

SEQ ID NO: 1399128 - DNA, 15 bp, Homo sapiens
gagctgttgcaactg

SEQ ID NO: 1399129 - DNA, 15 bp, Homo sapiens
ggagctgttgcaact

SEQ ID NO: 1399130 - DNA, 15 bp, Homo sapiens
tggagctgttgcaac

SEQ ID NO: 1399131 - DNA, 15 bp, Homo sapiens
atggagctgttgcaa

SEQ ID NO: 1399132 - DNA, 15 bp, Homo sapiens
catggagctgttgca

SEQ ID NO: 1399133 - DNA, 15 bp, Homo sapiens
ccatggagctgttgc

SEQ ID NO: 1399134 - DNA, 15 bp, Homo sapiens
gccatggagctgttg

SEQ ID NO: 1399135 - DNA, 15 bp, Homo sapiens
agccatggagctgtt

SEQ ID NO: 1399136 - DNA, 15 bp, Homo sapiens
cagccatggagctgt

SEQ ID NO: 1399137 - DNA, 15 bp, Homo sapiens
gcagccatggagctg

SEQ ID NO: 1399138 - DNA, 15 bp, Homo sapiens
tgcagccatggagct

SEQ ID NO: 1399139 - DNA, 15 bp, Homo sapiens
ttgcagccatggagc

SEQ ID NO: 1399140 - DNA, 15 bp, Homo sapiens
attgcagccatggag

SEQ ID NO: 1399141 - DNA, 15 bp, Homo sapiens
cattgcagccatgga

SEQ ID NO: 1399142 - DNA, 15 bp, Homo sapiens
ccattgcagccatgg

SEQ ID NO: 1399143 - DNA, 15 bp, Homo sapiens
gccattgcagccatg

SEQ ID NO: 1399144 - DNA, 15 bp, Homo sapiens
agccattgcagccat

SEQ ID NO: 1399145 - DNA, 15 bp, Homo sapiens
gagccattgcagcca

SEQ ID NO: 1399146 - DNA, 15 bp, Homo sapiens
tgagccattgcagcc

SEQ ID NO: 1399147 - DNA, 15 bp, Homo sapiens
ttgagccattgcagc

SEQ ID NO: 1399148 - DNA, 15 bp, Homo sapiens
attgagccattgcag

SEQ ID NO: 1399149 - DNA, 15 bp, Homo sapiens
tattgagccattgca

SEQ ID NO: 1399150 - DNA, 15 bp, Homo sapiens
atattgagccattgc

SEQ ID NO: 1399151 - DNA, 15 bp, Homo sapiens
gatattgagccattg

SEQ ID NO: 1399152 - DNA, 15 bp, Homo sapiens
tgatattgagccatt

SEQ ID NO: 1399153 - DNA, 15 bp, Homo sapiens
ctgatattgagccat

SEQ ID NO: 1399154 - DNA, 15 bp, Homo sapiens
gctgatattgagcca

SEQ ID NO: 1399155 - DNA, 15 bp, Homo sapiens
tgctgatattgagcc

SEQ ID NO: 1399156 - DNA, 15 bp, Homo sapiens
ctgctgatattgagc

SEQ ID NO: 1399157 - DNA, 15 bp, Homo sapiens
actgctgatattgag

SEQ ID NO: 1399158 - DNA, 15 bp, Homo sapiens
aactgctgatattga

SEQ ID NO: 1399159 - DNA, 15 bp, Homo sapiens
gaactgctgatattg

SEQ ID NO: 1399160 - DNA, 15 bp, Homo sapiens
ggaactgctgatatt

SEQ ID NO: 1399161 - DNA, 15 bp, Homo sapiens
aggaactgctgatat

SEQ ID NO: 1399162 - DNA, 15 bp, Homo sapiens
aaggaactgctgata

SEQ ID NO: 1399163 - DNA, 15 bp, Homo sapiens
gaaggaactgctgat

SEQ ID NO: 1399164 - DNA, 15 bp, Homo sapiens
ggaaggaactgctga

SEQ ID NO: 1399165 - DNA, 15 bp, Homo sapiens
gggaaggaactgctg

SEQ ID NO: 1399166 - DNA, 15 bp, Homo sapiens
ggggaaggaactgct

SEQ ID NO: 1399167 - DNA, 15 bp, Homo sapiens
tggggaaggaactgc

SEQ ID NO: 1399168 - DNA, 15 bp, Homo sapiens
gtggggaaggaactg

SEQ ID NO: 1399169 - DNA, 15 bp, Homo sapiens
agtggggaaggaact

SEQ ID NO: 1399170 - DNA, 15 bp, Homo sapiens
gagtggggaaggaac

SEQ ID NO: 1399171 - DNA, 15 bp, Homo sapiens
tgagtggggaaggaa

SEQ ID NO: 1399172 - DNA, 15 bp, Homo sapiens
ttgagtggggaagga

SEQ ID NO: 1399173 - DNA, 15 bp, Homo sapiens
gttgagtggggaagg

SEQ ID NO: 1399174 - DNA, 15 bp, Homo sapiens
ggttgagtggggaag

SEQ ID NO: 1399175 - DNA, 15 bp, Homo sapiens
tggttgagtggggaa

SEQ ID NO: 1399176 - DNA, 15 bp, Homo sapiens
gtggttgagtgggga

SEQ ID NO: 1399177 - DNA, 15 bp, Homo sapiens
tgtggttgagtgggg

SEQ ID NO: 1399178 - DNA, 15 bp, Homo sapiens
ttgtggttgagtggg

SEQ ID NO: 1399179 - DNA, 15 bp, Homo sapiens
gttgtggttgagtgg

SEQ ID NO: 1399180 - DNA, 15 bp, Homo sapiens
agttgtggttgagtg

SEQ ID NO: 1399181 - DNA, 15 bp, Homo sapiens
aagttgtggttgagt

SEQ ID NO: 1399182 - DNA, 15 bp, Homo sapiens
gaagttgtggttgag

SEQ ID NO: 1399183 - DNA, 15 bp, Homo sapiens
tgaagttgtggttga

SEQ ID NO: 1399184 - DNA, 15 bp, Homo sapiens
ttgaagttgtggttg

SEQ ID NO: 1399185 - DNA, 15 bp, Homo sapiens
gttgaagttgtggtt

SEQ ID NO: 1399186 - DNA, 15 bp, Homo sapiens
tgttgaagttgtggt

SEQ ID NO: 1399187 - DNA, 15 bp, Homo sapiens
ctgttgaagttgtgg

SEQ ID NO: 1399188 - DNA, 15 bp, Homo sapiens
actgttgaagttgtg

SEQ ID NO: 1399189 - DNA, 15 bp, Homo sapiens
aactgttgaagttgt

SEQ ID NO: 1399190 - DNA, 15 bp, Homo sapiens
gaactgttgaagttg

SEQ ID NO: 1399191 - DNA, 15 bp, Homo sapiens
agaactgttgaagtt

SEQ ID NO: 1399192 - DNA, 15 bp, Homo sapiens
tagaactgttgaagt

SEQ ID NO: 1399193 - DNA, 15 bp, Homo sapiens
ttagaactgttgaag

SEQ ID NO: 1399194 - DNA, 15 bp, Homo sapiens
tttagaactgttgaa

SEQ ID NO: 1399195 - DNA, 15 bp, Homo sapiens
atttagaactgttga

SEQ ID NO: 1399196 - DNA, 15 bp, Homo sapiens
gatttagaactgttg

SEQ ID NO: 1399197 - DNA, 15 bp, Homo sapiens
agatttagaactgtt

SEQ ID NO: 1399198 - DNA, 15 bp, Homo sapiens
cagatttagaactgt

SEQ ID NO: 1399199 - DNA, 15 bp, Homo sapiens
acagatttagaactg

SEQ ID NO: 1399200 - DNA, 15 bp, Homo sapiens
aacagatttagaact

SEQ ID NO: 1399201 - DNA, 15 bp, Homo sapiens
aaacagatttagaac

SEQ ID NO: 1399202 - DNA, 15 bp, Homo sapiens
aaaacagatttagaa

SEQ ID NO: 1399203 - DNA, 15 bp, Homo sapiens
aaaaacagatttaga

SEQ ID NO: 1399204 - DNA, 15 bp, Homo sapiens
caaaaacagatttag

SEQ ID NO: 1399205 - DNA, 15 bp, Homo sapiens
ccaaaaacagattta

SEQ ID NO: 1399206 - DNA, 15 bp, Homo sapiens
gccaaaaacagattt

SEQ ID NO: 1399207 - DNA, 15 bp, Homo sapiens
ggccaaaaacagatt

SEQ ID NO: 1399208 - DNA, 15 bp, Homo sapiens
tggccaaaaacagat

SEQ ID NO: 1399209 - DNA, 15 bp, Homo sapiens
ttggccaaaaacaga

SEQ ID NO: 1399210 - DNA, 15 bp, Homo sapiens
cttggccaaaaacag

SEQ ID NO: 1399211 - DNA, 15 bp, Homo sapiens
acttggccaaaaaca

SEQ ID NO: 1399212 - DNA, 15 bp, Homo sapiens
gacttggccaaaaac

SEQ ID NO: 1399213 - DNA, 15 bp, Homo sapiens
agacttggccaaaaa

SEQ ID NO: 1399214 - DNA, 15 bp, Homo sapiens
aagacttggccaaaa

SEQ ID NO: 1399215 - DNA, 15 bp, Homo sapiens
gaagacttggccaaa

SEQ ID NO: 1399216 - DNA, 15 bp, Homo sapiens
tgaagacttggccaa

SEQ ID NO: 1399217 - DNA, 15 bp, Homo sapiens
ctgaagacttggcca

SEQ ID NO: 1399218 - DNA, 15 bp, Homo sapiens
cctgaagacttggcc

SEQ ID NO: 1399219 - DNA, 15 bp, Homo sapiens
tcctgaagacttggc

SEQ ID NO: 1399220 - DNA, 15 bp, Homo sapiens
atcctgaagacttgg

SEQ ID NO: 1399221 - DNA, 15 bp, Homo sapiens
tatcctgaagacttg

SEQ ID NO: 1399222 - DNA, 15 bp, Homo sapiens
atatcctgaagactt

SEQ ID NO: 1399223 - DNA, 15 bp, Homo sapiens
tatatcctgaagact

SEQ ID NO: 1399224 - DNA, 15 bp, Homo sapiens
ttatatcctgaagac

SEQ ID NO: 1399225 - DNA, 15 bp, Homo sapiens
gttatatcctgaaga

SEQ ID NO: 1399226 - DNA, 15 bp, Homo sapiens
agttatatcctgaag

SEQ ID NO: 1399227 - DNA, 15 bp, Homo sapiens
aagttatatcctgaa

SEQ ID NO: 1399228 - DNA, 15 bp, Homo sapiens
aaagttatatcctga

SEQ ID NO: 1399229 - DNA, 15 bp, Homo sapiens
caaagttatatcctg

SEQ ID NO: 1399230 - DNA, 15 bp, Homo sapiens
gcaaagttatatcct

SEQ ID NO: 1399231 - DNA, 15 bp, Homo sapiens
ggcaaagttatatcc

SEQ ID NO: 1399232 - DNA, 15 bp, Homo sapiens
tggcaaagttatatc

SEQ ID NO: 1399233 - DNA, 15 bp, Homo sapiens
ctggcaaagttatat

SEQ ID NO: 1399234 - DNA, 15 bp, Homo sapiens
gctggcaaagttata

SEQ ID NO: 1399235 - DNA, 15 bp, Homo sapiens
tgctggcaaagttat

SEQ ID NO: 1399236 - DNA, 15 bp, Homo sapiens
ttgctggcaaagtta

SEQ ID NO: 1399237 - DNA, 15 bp, Homo sapiens
attgctggcaaagtt

SEQ ID NO: 1399238 - DNA, 15 bp, Homo sapiens
tattgctggcaaagt

SEQ ID NO: 1399239 - DNA, 15 bp, Homo sapiens
atattgctggcaaag

SEQ ID NO: 1399240 - DNA, 15 bp, Homo sapiens
gatattgctggcaaa

SEQ ID NO: 1399241 - DNA, 15 bp, Homo sapiens
tgatattgctggcaa

SEQ ID NO: 1399242 - DNA, 15 bp, Homo sapiens
gtgatattgctggca

SEQ ID NO: 1399243 - DNA, 15 bp, Homo sapiens
ggtgatattgctggc

SEQ ID NO: 1399244 - DNA, 15 bp, Homo sapiens
aggtgatattgctgg

SEQ ID NO: 1399245 - DNA, 15 bp, Homo sapiens
aaggtgatattgctg

SEQ ID NO: 1399246 - DNA, 15 bp, Homo sapiens
caaggtgatattgct

SEQ ID NO: 1399247 - DNA, 15 bp, Homo sapiens
acaaggtgatattgc

SEQ ID NO: 1399248 - DNA, 15 bp, Homo sapiens
aacaaggtgatattg

SEQ ID NO: 1399249 - DNA, 15 bp, Homo sapiens
aaacaaggtgatatt

SEQ ID NO: 1399250 - DNA, 15 bp, Homo sapiens
taaacaaggtgatat

SEQ ID NO: 1399251 - DNA, 15 bp, Homo sapiens
ataaacaaggtgata

SEQ ID NO: 1399252 - DNA, 15 bp, Homo sapiens
aataaacaaggtgat

SEQ ID NO: 1399253 - DNA, 15 bp, Homo sapiens
taataaacaaggtga

SEQ ID NO: 1399254 - DNA, 15 bp, Homo sapiens
ttaataaacaaggtg

SEQ ID NO: 1399255 - DNA, 15 bp, Homo sapiens
cttaataaacaaggt

SEQ ID NO: 1399256 - DNA, 15 bp, Homo sapiens
gcttaataaacaagg

SEQ ID NO: 1399257 - DNA, 15 bp, Homo sapiens
ggcttaataaacaag

SEQ ID NO: 1399258 - DNA, 15 bp, Homo sapiens
gggcttaataaacaa

SEQ ID NO: 1399259 - DNA, 15 bp, Homo sapiens
agggcttaataaaca

SEQ ID NO: 1399260 - DNA, 15 bp, Homo sapiens
tagggcttaataaac

SEQ ID NO: 1399261 - DNA, 15 bp, Homo sapiens
atagggcttaataaa

SEQ ID NO: 1399262 - DNA, 15 bp, Homo sapiens
gatagggcttaataa

SEQ ID NO: 1399263 - DNA, 15 bp, Homo sapiens
agatagggcttaata

SEQ ID NO: 1399264 - DNA, 15 bp, Homo sapiens
aagatagggcttaat

SEQ ID NO: 1399265 - DNA, 15 bp, Homo sapiens
gaagatagggcttaa

SEQ ID NO: 1399266 - DNA, 15 bp, Homo sapiens
ggaagatagggctta

SEQ ID NO: 1399267 - DNA, 15 bp, Homo sapiens
tggaagatagggctt

SEQ ID NO: 1399268 - DNA, 15 bp, Homo sapiens
gtggaagatagggct

SEQ ID NO: 1399269 - DNA, 15 bp, Homo sapiens
ggtggaagatagggc

SEQ ID NO: 1399270 - DNA, 15 bp, Homo sapiens
tggtggaagataggg

SEQ ID NO: 1399271 - DNA, 15 bp, Homo sapiens
gtggtggaagatagg

SEQ ID NO: 1399272 - DNA, 15 bp, Homo sapiens
ggtggtggaagatag

SEQ ID NO: 1399273 - DNA, 15 bp, Homo sapiens
aggtggtggaagata

SEQ ID NO: 1399274 - DNA, 15 bp, Homo sapiens
caggtggtggaagat

SEQ ID NO: 1399275 - DNA, 15 bp, Homo sapiens
acaggtggtggaaga

SEQ ID NO: 1399276 - DNA, 15 bp, Homo sapiens
gacaggtggtggaag

SEQ ID NO: 1399277 - DNA, 15 bp, Homo sapiens
tgacaggtggtggaa

SEQ ID NO: 1399278 - DNA, 15 bp, Homo sapiens
ctgacaggtggtgga

SEQ ID NO: 1399279 - DNA, 15 bp, Homo sapiens
tctgacaggtggtgg

SEQ ID NO: 1399280 - DNA, 15 bp, Homo sapiens
ttctgacaggtggtg

SEQ ID NO: 1399281 - DNA, 15 bp, Homo sapiens
attctgacaggtggt

SEQ ID NO: 1399282 - DNA, 15 bp, Homo sapiens
gattctgacaggtgg

SEQ ID NO: 1399283 - DNA, 15 bp, Homo sapiens
agattctgacaggtg

SEQ ID NO: 1399284 - DNA, 15 bp, Homo sapiens
gagattctgacaggt

SEQ ID NO: 1399285 - DNA, 15 bp, Homo sapiens
agagattctgacagg

SEQ ID NO: 1399286 - DNA, 15 bp, Homo sapiens
cagagattctgacag

SEQ ID NO: 1399287 - DNA, 15 bp, Homo sapiens
ccagagattctgaca

SEQ ID NO: 1399288 - DNA, 15 bp, Homo sapiens
accagagattctgac

SEQ ID NO: 1399289 - DNA, 15 bp, Homo sapiens
aaccagagattctga

SEQ ID NO: 1399290 - DNA, 15 bp, Homo sapiens
aaaccagagattctg

SEQ ID NO: 1399291 - DNA, 15 bp, Homo sapiens
taaaccagagattct

SEQ ID NO: 1399292 - DNA, 15 bp, Homo sapiens
ataaaccagagattc

SEQ ID NO: 1399293 - DNA, 15 bp, Homo sapiens
gataaaccagagatt

SEQ ID NO: 1399294 - DNA, 15 bp, Homo sapiens
cgataaaccagagat

SEQ ID NO: 1399295 - DNA, 15 bp, Homo sapiens
tcgataaaccagaga

SEQ ID NO: 1399296 - DNA, 15 bp, Homo sapiens
ctcgataaaccagag

SEQ ID NO: 1399297 - DNA, 15 bp, Homo sapiens
tctcgataaaccaga

SEQ ID NO: 1399298 - DNA, 15 bp, Homo sapiens
gtctcgataaaccag

SEQ ID NO: 1399299 - DNA, 15 bp, Homo sapiens
ggtctcgataaacca

SEQ ID NO: 1399300 - DNA, 15 bp, Homo sapiens
tggtctcgataaacc

SEQ ID NO: 1399301 - DNA, 15 bp, Homo sapiens
gtggtctcgataaac

SEQ ID NO: 1399302 - DNA, 15 bp, Homo sapiens
agtggtctcgataaa

SEQ ID NO: 1399303 - DNA, 15 bp, Homo sapiens
cagtggtctcgataa

SEQ ID NO: 1399304 - DNA, 15 bp, Homo sapiens
acagtggtctcgata

SEQ ID NO: 1399305 - DNA, 15 bp, Homo sapiens
tacagtggtctcgat

SEQ ID NO: 1399306 - DNA, 15 bp, Homo sapiens
ttacagtggtctcga

SEQ ID NO: 1399307 - DNA, 15 bp, Homo sapiens
gttacagtggtctcg

SEQ ID NO: 1399308 - DNA, 15 bp, Homo sapiens
tgttacagtggtctc

SEQ ID NO: 1399309 - DNA, 15 bp, Homo sapiens
gtgttacagtggtct

SEQ ID NO: 1399310 - DNA, 15 bp, Homo sapiens
agtgttacagtggtc

SEQ ID NO: 1399311 - DNA, 15 bp, Homo sapiens
aagtgttacagtggt

SEQ ID NO: 1399312 - DNA, 15 bp, Homo sapiens
aaagtgttacagtgg

SEQ ID NO: 1399313 - DNA, 15 bp, Homo sapiens
taaagtgttacagtg

SEQ ID NO: 1399314 - DNA, 15 bp, Homo sapiens
ttaaagtgttacagt

SEQ ID NO: 1399315 - DNA, 15 bp, Homo sapiens
gttaaagtgttacag

SEQ ID NO: 1399316 - DNA, 15 bp, Homo sapiens
agttaaagtgttaca

SEQ ID NO: 1399317 - DNA, 15 bp, Homo sapiens
gagttaaagtgttac

SEQ ID NO: 1399318 - DNA, 15 bp, Homo sapiens
ggagttaaagtgtta

SEQ ID NO: 1399319 - DNA, 15 bp, Homo sapiens
aggagttaaagtgtt

SEQ ID NO: 1399320 - DNA, 15 bp, Homo sapiens
gaggagttaaagtgt

SEQ ID NO: 1399321 - DNA, 15 bp, Homo sapiens
agaggagttaaagtg

SEQ ID NO: 1399322 - DNA, 15 bp, Homo sapiens
aagaggagttaaagt

SEQ ID NO: 1399323 - DNA, 15 bp, Homo sapiens
aaagaggagttaaag

SEQ ID NO: 1399324 - DNA, 15 bp, Homo sapiens
taaagaggagttaaa

SEQ ID NO: 1399325 - DNA, 15 bp, Homo sapiens
ataaagaggagttaa

SEQ ID NO: 1399326 - DNA, 15 bp, Homo sapiens
cataaagaggagtta

SEQ ID NO: 1399327 - DNA, 15 bp, Homo sapiens
tcataaagaggagtt

SEQ ID NO: 1399328 - DNA, 15 bp, Homo sapiens
ttcataaagaggagt

SEQ ID NO: 1399329 - DNA, 15 bp, Homo sapiens
cttcataaagaggag

SEQ ID NO: 1399330 - DNA, 15 bp, Homo sapiens
acttcataaagagga

SEQ ID NO: 1399331 - DNA, 15 bp, Homo sapiens
aacttcataaagagg

SEQ ID NO: 1399332 - DNA, 15 bp, Homo sapiens
caacttcataaagag

SEQ ID NO: 1399333 - DNA, 15 bp, Homo sapiens
tcaacttcataaaga

SEQ ID NO: 1399334 - DNA, 15 bp, Homo sapiens
ctcaacttcataaag

SEQ ID NO: 1399335 - DNA, 15 bp, Homo sapiens
gctcaacttcataaa

SEQ ID NO: 1399336 - DNA, 15 bp, Homo sapiens
tgctcaacttcataa

SEQ ID NO: 1399337 - DNA, 15 bp, Homo sapiens
atgctcaacttcata

SEQ ID NO: 1399338 - DNA, 15 bp, Homo sapiens
aatgctcaacttcat

SEQ ID NO: 1399339 - DNA, 15 bp, Homo sapiens
taatgctcaacttca

SEQ ID NO: 1399340 - DNA, 15 bp, Homo sapiens
ataatgctcaacttc

SEQ ID NO: 1399341 - DNA, 15 bp, Homo sapiens
tataatgctcaactt

SEQ ID NO: 1399342 - DNA, 15 bp, Homo sapiens
ctataatgctcaact

SEQ ID NO: 1399343 - DNA, 15 bp, Homo sapiens
tctataatgctcaac

SEQ ID NO: 1399344 - DNA, 15 bp, Homo sapiens
gtctataatgctcaa

SEQ ID NO: 1399345 - DNA, 15 bp, Homo sapiens
tgtctataatgctca

SEQ ID NO: 1399346 - DNA, 15 bp, Homo sapiens
ctgtctataatgctc

SEQ ID NO: 1399347 - DNA, 15 bp, Homo sapiens
tctgtctataatgct

SEQ ID NO: 1399348 - DNA, 15 bp, Homo sapiens
atctgtctataatgc

SEQ ID NO: 1399349 - DNA, 15 bp, Homo sapiens
catctgtctataatg

SEQ ID NO: 1399350 - DNA, 15 bp, Homo sapiens
gcatctgtctataat

SEQ ID NO: 1399351 - DNA, 15 bp, Homo sapiens
agcatctgtctataa

SEQ ID NO: 1399352 - DNA, 15 bp, Homo sapiens
cagcatctgtctata

SEQ ID NO: 1399353 - DNA, 15 bp, Homo sapiens
acagcatctgtctat

SEQ ID NO: 1399354 - DNA, 15 bp, Homo sapiens
cacagcatctgtcta

SEQ ID NO: 1399355 - DNA, 15 bp, Homo sapiens
ccacagcatctgtct

SEQ ID NO: 1399356 - DNA, 15 bp, Homo sapiens
accacagcatctgtc

SEQ ID NO: 1399357 - DNA, 15 bp, Homo sapiens
aaccacagcatctgt

SEQ ID NO: 1399358 - DNA, 15 bp, Homo sapiens
aaaccacagcatctg

SEQ ID NO: 1399359 - DNA, 15 bp, Homo sapiens
caaaccacagcatct

SEQ ID NO: 1399360 - DNA, 15 bp, Homo sapiens
acaaaccacagcatc

SEQ ID NO: 1399361 - DNA, 15 bp, Homo sapiens
cacaaaccacagcat

SEQ ID NO: 1399362 - DNA, 15 bp, Homo sapiens
ccacaaaccacagca

SEQ ID NO: 1399363 - DNA, 15 bp, Homo sapiens
tccacaaaccacagc

SEQ ID NO: 1399364 - DNA, 15 bp, Homo sapiens
ctccacaaaccacag

SEQ ID NO: 1399365 - DNA, 15 bp, Homo sapiens
gctccacaaaccaca

SEQ ID NO: 1399366 - DNA, 15 bp, Homo sapiens
ggctccacaaaccac

SEQ ID NO: 1399367 - DNA, 15 bp, Homo sapiens
aggctccacaaacca

SEQ ID NO: 1399368 - DNA, 15 bp, Homo sapiens
aaggctccacaaacc

SEQ ID NO: 1399369 - DNA, 15 bp, Homo sapiens
caaggctccacaaac

SEQ ID NO: 1399370 - DNA, 15 bp, Homo sapiens
ccaaggctccacaaa

SEQ ID NO: 1399371 - DNA, 15 bp, Homo sapiens
accaaggctccacaa

SEQ ID NO: 1399372 - DNA, 15 bp, Homo sapiens
taccaaggctccaca

SEQ ID NO: 1399373 - DNA, 15 bp, Homo sapiens
ctaccaaggctccac

SEQ ID NO: 1399374 - DNA, 15 bp, Homo sapiens
actaccaaggctcca

SEQ ID NO: 1399375 - DNA, 15 bp, Homo sapiens
gactaccaaggctcc

SEQ ID NO: 1399376 - DNA, 15 bp, Homo sapiens
agactaccaaggctc

SEQ ID NO: 1399377 - DNA, 15 bp, Homo sapiens
gagactaccaaggct

SEQ ID NO: 1399378 - DNA, 15 bp, Homo sapiens
agagactaccaaggc

SEQ ID NO: 1399379 - DNA, 15 bp, Homo sapiens
cagagactaccaagg

SEQ ID NO: 1399380 - DNA, 15 bp, Homo sapiens
tcagagactaccaag

SEQ ID NO: 1399381 - DNA, 15 bp, Homo sapiens
atcagagactaccaa

SEQ ID NO: 1399382 - DNA, 15 bp, Homo sapiens
aatcagagactacca

SEQ ID NO: 1399383 - DNA, 15 bp, Homo sapiens
taatcagagactacc

SEQ ID NO: 1399384 - DNA, 15 bp, Homo sapiens
ataatcagagactac

SEQ ID NO: 1399385 - DNA, 15 bp, Homo sapiens
tataatcagagacta

SEQ ID NO: 1399386 - DNA, 15 bp, Homo sapiens
atataatcagagact

SEQ ID NO: 1399387 - DNA, 15 bp, Homo sapiens
tatataatcagagac

SEQ ID NO: 1399388 - DNA, 15 bp, Homo sapiens
atatataatcagaga

SEQ ID NO: 1399389 - DNA, 15 bp, Homo sapiens
catatataatcagag

SEQ ID NO: 1399390 - DNA, 15 bp, Homo sapiens
acatatataatcaga

SEQ ID NO: 1399391 - DNA, 15 bp, Homo sapiens
cacatatataatcag

SEQ ID NO: 1399392 - DNA, 15 bp, Homo sapiens
acacatatataatca

SEQ ID NO: 1399393 - DNA, 15 bp, Homo sapiens
gacacatatataatc

SEQ ID NO: 1399394 - DNA, 15 bp, Homo sapiens
agacacatatataat

SEQ ID NO: 1399395 - DNA, 15 bp, Homo sapiens
cagacacatatataa

SEQ ID NO: 1399396 - DNA, 15 bp, Homo sapiens
acagacacatatata

SEQ ID NO: 1399397 - DNA, 15 bp, Homo sapiens
cacagacacatatat

SEQ ID NO: 1399398 - DNA, 15 bp, Homo sapiens
acacagacacatata

SEQ ID NO: 1399399 - DNA, 15 bp, Homo sapiens
tacacagacacatat

SEQ ID NO: 1399400 - DNA, 15 bp, Homo sapiens
atacacagacacata

SEQ ID NO: 1399401 - DNA, 15 bp, Homo sapiens
catacacagacacat

SEQ ID NO: 1399402 - DNA, 15 bp, Homo sapiens
tacatacacagacac

SEQ ID NO: 1399403 - DNA, 15 bp, Homo sapiens
ctacatacacagaca

SEQ ID NO: 1399404 - DNA, 15 bp, Homo sapiens
tctacatacacagac

SEQ ID NO: 1399405 - DNA, 15 bp, Homo sapiens
atctacatacacaga

SEQ ID NO: 1399406 - DNA, 15 bp, Homo sapiens
tatctacatacacag

SEQ ID NO: 1399407 - DNA, 15 bp, Homo sapiens
ttgccacaaactcca

SEQ ID NO: 1399408 - DNA, 15 bp, Homo sapiens
cttgccacaaactcc

SEQ ID NO: 1399409 - DNA, 15 bp, Homo sapiens
tcttgccacaaactc

SEQ ID NO: 1399410 - DNA, 15 bp, Homo sapiens
ctcttgccacaaact

SEQ ID NO: 1399411 - DNA, 15 bp, Homo sapiens
cctcttgccacaaac

SEQ ID NO: 1399412 - DNA, 15 bp, Homo sapiens
tcctcttgccacaaa

SEQ ID NO: 1399413 - DNA, 15 bp, Homo sapiens
atcctcttgccacaa

SEQ ID NO: 1399414 - DNA, 15 bp, Homo sapiens
tatcctcttgccaca

SEQ ID NO: 1399415 - DNA, 15 bp, Homo sapiens
ctatcctcttgccac

SEQ ID NO: 1399416 - DNA, 15 bp, Homo sapiens
gctatcctcttgcca

SEQ ID NO: 1399417 - DNA, 15 bp, Homo sapiens
agctatcctcttgcc

SEQ ID NO: 1399418 - DNA, 15 bp, Homo sapiens
aagctatcctcttgc

SEQ ID NO: 1399419 - DNA, 15 bp, Homo sapiens
caagctatcctcttg

SEQ ID NO: 1399420 - DNA, 15 bp, Homo sapiens
tcaagctatcctctt

SEQ ID NO: 1399421 - DNA, 15 bp, Homo sapiens
ctcaagctatcctct

SEQ ID NO: 1399422 - DNA, 15 bp, Homo sapiens
gctcaagctatcctc

SEQ ID NO: 1399423 - DNA, 15 bp, Homo sapiens
ggctcaagctatcct

SEQ ID NO: 1399424 - DNA, 15 bp, Homo sapiens
gggctcaagctatcc

SEQ ID NO: 1399425 - DNA, 15 bp, Homo sapiens
tgggctcaagctatc

SEQ ID NO: 1399426 - DNA, 15 bp, Homo sapiens
atgggctcaagctat

SEQ ID NO: 1399427 - DNA, 15 bp, Homo sapiens
catgggctcaagcta

SEQ ID NO: 1399428 - DNA, 15 bp, Homo sapiens
tcatgggctcaagct

SEQ ID NO: 1399429 - DNA, 15 bp, Homo sapiens
gtcatgggctcaagc

SEQ ID NO: 1399430 - DNA, 15 bp, Homo sapiens
agtcatgggctcaag

SEQ ID NO: 1399431 - DNA, 15 bp, Homo sapiens
aagtcatgggctcaa

SEQ ID NO: 1399432 - DNA, 15 bp, Homo sapiens
gaagtcatgggctca

SEQ ID NO: 1399433 - DNA, 15 bp, Homo sapiens
cgaagtcatgggctc

SEQ ID NO: 1399434 - DNA, 15 bp, Homo sapiens
tcgaagtcatgggct

SEQ ID NO: 1399435 - DNA, 15 bp, Homo sapiens
ctcgaagtcatgggc

SEQ ID NO: 1399436 - DNA, 15 bp, Homo sapiens
tctcgaagtcatggg

SEQ ID NO: 1399437 - DNA, 15 bp, Homo sapiens
atctcgaagtcatgg

SEQ ID NO: 1399438 - DNA, 15 bp, Homo sapiens
gatctcgaagtcatg

SEQ ID NO: 1399439 - DNA, 15 bp, Homo sapiens
tgatctcgaagtcat

SEQ ID NO: 1399440 - DNA, 15 bp, Homo sapiens
ctgatctcgaagtca

SEQ ID NO: 1399441 - DNA, 15 bp, Homo sapiens
gctgatctcgaagtc

SEQ ID NO: 1399442 - DNA, 15 bp, Homo sapiens
agctgatctcgaagt

SEQ ID NO: 1399443 - DNA, 15 bp, Homo sapiens
aagctgatctcgaag

SEQ ID NO: 1399444 - DNA, 15 bp, Homo sapiens
caagctgatctcgaa

SEQ ID NO: 1399445 - DNA, 15 bp, Homo sapiens
ccaagctgatctcga

SEQ ID NO: 1399446 - DNA, 15 bp, Homo sapiens
cccaagctgatctcg

SEQ ID NO: 1399447 - DNA, 15 bp, Homo sapiens
gcccaagctgatctc

SEQ ID NO: 1399448 - DNA, 15 bp, Homo sapiens
tgcccaagctgatct

SEQ ID NO: 1399449 - DNA, 15 bp, Homo sapiens
ttgcccaagctgatc

SEQ ID NO: 1399450 - DNA, 15 bp, Homo sapiens
attgcccaagctgat

SEQ ID NO: 1399451 - DNA, 15 bp, Homo sapiens
tattgcccaagctga

SEQ ID NO: 1399452 - DNA, 15 bp, Homo sapiens
atattgcccaagctg

SEQ ID NO: 1399453 - DNA, 15 bp, Homo sapiens
tatattgcccaagct

SEQ ID NO: 1399454 - DNA, 15 bp, Homo sapiens
ttatattgcccaagc

SEQ ID NO: 1399455 - DNA, 15 bp, Homo sapiens
attatattgcccaag

SEQ ID NO: 1399456 - DNA, 15 bp, Homo sapiens
tattatattgcccaa

SEQ ID NO: 1399457 - DNA, 15 bp, Homo sapiens
ttattatattgccca

SEQ ID NO: 1399458 - DNA, 15 bp, Homo sapiens
cttattatattgccc

SEQ ID NO: 1399459 - DNA, 15 bp, Homo sapiens
tcttattatattgcc

SEQ ID NO: 1399460 - DNA, 15 bp, Homo sapiens
atcttattatattgc

SEQ ID NO: 1399461 - DNA, 15 bp, Homo sapiens
gatcttattatattg

SEQ ID NO: 1399462 - DNA, 15 bp, Homo sapiens
ggatcttattatatt

SEQ ID NO: 1399463 - DNA, 15 bp, Homo sapiens
aggatcttattatat

SEQ ID NO: 1399464 - DNA, 15 bp, Homo sapiens
aaggatcttattata

SEQ ID NO: 1399465 - DNA, 15 bp, Homo sapiens
aaaggatcttattat

SEQ ID NO: 1399466 - DNA, 15 bp, Homo sapiens
aaaaggatcttatta

SEQ ID NO: 1399467 - DNA, 15 bp, Homo sapiens
aaaaaggatcttatt

SEQ ID NO: 1399468 - DNA, 15 bp, Homo sapiens
gaaaaaggatcttat

SEQ ID NO: 1399469 - DNA, 15 bp, Homo sapiens
ggaaaaaggatctta

SEQ ID NO: 1399470 - DNA, 15 bp, Homo sapiens
tggaaaaaggatctt

SEQ ID NO: 1399471 - DNA, 15 bp, Homo sapiens
gtggaaaaaggatct

SEQ ID NO: 1399472 - DNA, 15 bp, Homo sapiens
tgtggaaaaaggatc

SEQ ID NO: 1399473 - DNA, 15 bp, Homo sapiens
ttgtggaaaaaggat

SEQ ID NO: 1399474 - DNA, 15 bp, Homo sapiens
tttgtggaaaaagga

SEQ ID NO: 1399475 - DNA, 15 bp, Homo sapiens
ttttgtggaaaaagg

SEQ ID NO: 1399476 - DNA, 15 bp, Homo sapiens
tttttgtggaaaaag

SEQ ID NO: 1399477 - DNA, 15 bp, Homo sapiens
ttttttgtggaaaaa

SEQ ID NO: 1399478 - DNA, 15 bp, Homo sapiens
attttttgtggaaaa

SEQ ID NO: 1399479 - DNA, 15 bp, Homo sapiens
tattttttgtggaaa

SEQ ID NO: 1399480 - DNA, 15 bp, Homo sapiens
gtattttttgtggaa

SEQ ID NO: 1399481 - DNA, 15 bp, Homo sapiens
tgtattttttgtgga

SEQ ID NO: 1399482 - DNA, 15 bp, Homo sapiens
ttgtattttttgtgg

SEQ ID NO: 1399483 - DNA, 15 bp, Homo sapiens
ctgcctggctaattt

SEQ ID NO: 1399484 - DNA, 15 bp, Homo sapiens
cctgcctggctaatt

SEQ ID NO: 1399485 - DNA, 15 bp, Homo sapiens
tcctgcctggctaat

SEQ ID NO: 1399486 - DNA, 15 bp, Homo sapiens
atcctgcctggctaa

SEQ ID NO: 1399487 - DNA, 15 bp, Homo sapiens
catcctgcctggcta

SEQ ID NO: 1399488 - DNA, 15 bp, Homo sapiens
acatcctgcctggct

SEQ ID NO: 1399489 - DNA, 15 bp, Homo sapiens
aacatcctgcctggc

SEQ ID NO: 1399490 - DNA, 15 bp, Homo sapiens
caacatcctgcctgg

SEQ ID NO: 1399491 - DNA, 15 bp, Homo sapiens
acaacatcctgcctg

SEQ ID NO: 1399492 - DNA, 15 bp, Homo sapiens
cacaacatcctgcct

SEQ ID NO: 1399493 - DNA, 15 bp, Homo sapiens
acacaacatcctgcc

SEQ ID NO: 1399494 - DNA, 15 bp, Homo sapiens
cacacaacatcctgc

SEQ ID NO: 1399495 - DNA, 15 bp, Homo sapiens
gcacacaacatcctg

SEQ ID NO: 1399496 - DNA, 15 bp, Homo sapiens
ggcacacaacatcct

SEQ ID NO: 1399497 - DNA, 15 bp, Homo sapiens
aggcacacaacatcc

SEQ ID NO: 1399498 - DNA, 15 bp, Homo sapiens
caggcacacaacatc

SEQ ID NO: 1399499 - DNA, 15 bp, Homo sapiens
acaggcacacaacat

SEQ ID NO: 1399500 - DNA, 15 bp, Homo sapiens
tacaggcacacaaca

SEQ ID NO: 1399501 - DNA, 15 bp, Homo sapiens
ctacaggcacacaac

SEQ ID NO: 1399502 - DNA, 15 bp, Homo sapiens
actacaggcacacaa

SEQ ID NO: 1399503 - DNA, 15 bp, Homo sapiens
gaatagctgggacta

SEQ ID NO: 1399504 - DNA, 15 bp, Homo sapiens
tgaatagctgggact

SEQ ID NO: 1399505 - DNA, 15 bp, Homo sapiens
ctgaatagctgggac

SEQ ID NO: 1399506 - DNA, 15 bp, Homo sapiens
ctcctgaatagctgg

SEQ ID NO: 1399507 - DNA, 15 bp, Homo sapiens
cctcctgaatagctg

SEQ ID NO: 1399508 - DNA, 15 bp, Homo sapiens
tacctcagcctcctg

SEQ ID NO: 1399509 - DNA, 15 bp, Homo sapiens
caatcctcctacctc

SEQ ID NO: 1399510 - DNA, 15 bp, Homo sapiens
gcaatcctcctacct

SEQ ID NO: 1399511 - DNA, 15 bp, Homo sapiens
agcaatcctcctacc

SEQ ID NO: 1399512 - DNA, 15 bp, Homo sapiens
aagcaatcctcctac

SEQ ID NO: 1399513 - DNA, 15 bp, Homo sapiens
caagcaatcctccta

SEQ ID NO: 1399514 - DNA, 15 bp, Homo sapiens
tctgggctcaagcaa

SEQ ID NO: 1399515 - DNA, 15 bp, Homo sapiens
ttctgggctcaagca

SEQ ID NO: 1399516 - DNA, 15 bp, Homo sapiens
ggaacttctgggctc

SEQ ID NO: 1399517 - DNA, 15 bp, Homo sapiens
tggaacttctgggct

SEQ ID NO: 1399518 - DNA, 15 bp, Homo sapiens
ctggaacttctgggc

SEQ ID NO: 1399519 - DNA, 15 bp, Homo sapiens
cctggaacttctggg

SEQ ID NO: 1399520 - DNA, 15 bp, Homo sapiens
gcctggaacttctgg

SEQ ID NO: 1399521 - DNA, 15 bp, Homo sapiens
agcctggaacttctg

SEQ ID NO: 1399522 - DNA, 15 bp, Homo sapiens
cagcctggaacttct

SEQ ID NO: 1399523 - DNA, 15 bp, Homo sapiens
gcagcctggaacttc

SEQ ID NO: 1399524 - DNA, 15 bp, Homo sapiens
tgcagcctggaactt

SEQ ID NO: 1399525 - DNA, 15 bp, Homo sapiens
ctgcagcctggaact

SEQ ID NO: 1399526 - DNA, 15 bp, Homo sapiens
actgcagcctggaac

SEQ ID NO: 1399527 - DNA, 15 bp, Homo sapiens
cactgcagcctggaa

SEQ ID NO: 1399528 - DNA, 15 bp, Homo sapiens
gtcatagctcactgc

SEQ ID NO: 1399529 - DNA, 15 bp, Homo sapiens
ggtcatagctcactg

SEQ ID NO: 1399530 - DNA, 15 bp, Homo sapiens
gggtcatagctcact

SEQ ID NO: 1399531 - DNA, 15 bp, Homo sapiens
tgggtcatagctcac

SEQ ID NO: 1399532 - DNA, 15 bp, Homo sapiens
ttgggtcatagctca

SEQ ID NO: 1399533 - DNA, 15 bp, Homo sapiens
tttgggtcatagctc

SEQ ID NO: 1399534 - DNA, 15 bp, Homo sapiens
gtttgggtcatagct

SEQ ID NO: 1399535 - DNA, 15 bp, Homo sapiens
ggtttgggtcatagc

SEQ ID NO: 1399536 - DNA, 15 bp, Homo sapiens
tggtttgggtcatag

SEQ ID NO: 1399537 - DNA, 15 bp, Homo sapiens
atggtttgggtcata

SEQ ID NO: 1399538 - DNA, 15 bp, Homo sapiens
aatggtttgggtcat

SEQ ID NO: 1399539 - DNA, 15 bp, Homo sapiens
caatggtttgggtca

SEQ ID NO: 1399540 - DNA, 15 bp, Homo sapiens
gcaatggtttgggtc

SEQ ID NO: 1399541 - DNA, 15 bp, Homo sapiens
tgcaatggtttgggt

SEQ ID NO: 1399542 - DNA, 15 bp, Homo sapiens
gtgcaatggtttggg

SEQ ID NO: 1399543 - DNA, 15 bp, Homo sapiens
agtgcaatggtttgg

SEQ ID NO: 1399544 - DNA, 15 bp, Homo sapiens
gagtgcaatggtttg

SEQ ID NO: 1399545 - DNA, 15 bp, Homo sapiens
ggagtgcaatggttt

SEQ ID NO: 1399546 - DNA, 15 bp, Homo sapiens
tggagtgcaatggtt

SEQ ID NO: 1399547 - DNA, 15 bp, Homo sapiens
actggagtgcaatgg

SEQ ID NO: 1399548 - DNA, 15 bp, Homo sapiens
gactggagtgcaatg

SEQ ID NO: 1399549 - DNA, 15 bp, Homo sapiens
agactggagtgcaat

SEQ ID NO: 1399550 - DNA, 15 bp, Homo sapiens
cagactggagtgcaa

SEQ ID NO: 1399551 - DNA, 15 bp, Homo sapiens
ttgtcacccagactg

SEQ ID NO: 1399552 - DNA, 15 bp, Homo sapiens
tttgtcacccagact

SEQ ID NO: 1399553 - DNA, 15 bp, Homo sapiens
ctttgtcacccagac

SEQ ID NO: 1399554 - DNA, 15 bp, Homo sapiens
gctttgtcacccaga

SEQ ID NO: 1399555 - DNA, 15 bp, Homo sapiens
tgctttgtcacccag

SEQ ID NO: 1399556 - DNA, 15 bp, Homo sapiens
ttgctttgtcaccca

SEQ ID NO: 1399557 - DNA, 15 bp, Homo sapiens
attgctttgtcaccc

SEQ ID NO: 1399558 - DNA, 15 bp, Homo sapiens
tattgctttgtcacc

SEQ ID NO: 1399559 - DNA, 15 bp, Homo sapiens
gtattgctttgtcac

SEQ ID NO: 1399560 - DNA, 15 bp, Homo sapiens
ggtattgctttgtca

SEQ ID NO: 1399561 - DNA, 15 bp, Homo sapiens
gggtattgctttgtc

SEQ ID NO: 1399562 - DNA, 15 bp, Homo sapiens
agggtattgctttgt

SEQ ID NO: 1399563 - DNA, 15 bp, Homo sapiens
cagggtattgctttg

SEQ ID NO: 1399564 - DNA, 15 bp, Homo sapiens
acagggtattgcttt

SEQ ID NO: 1399565 - DNA, 15 bp, Homo sapiens
gacagggtattgctt

SEQ ID NO: 1399566 - DNA, 15 bp, Homo sapiens
agacagggtattgct

SEQ ID NO: 1399567 - DNA, 15 bp, Homo sapiens
gagacagggtattgc

SEQ ID NO: 1399568 - DNA, 15 bp, Homo sapiens
agagacagggtattg

SEQ ID NO: 1399569 - DNA, 15 bp, Homo sapiens
tagagacagggtatt

SEQ ID NO: 1399570 - DNA, 15 bp, Homo sapiens
atagagacagggtat

SEQ ID NO: 1399571 - DNA, 15 bp, Homo sapiens
aatagagacagggta

SEQ ID NO: 1399572 - DNA, 15 bp, Homo sapiens
aaatagagacagggt

SEQ ID NO: 1399573 - DNA, 15 bp, Homo sapiens
aaaatagagacaggg

SEQ ID NO: 1399574 - DNA, 15 bp, Homo sapiens
aaaaatagagacagg

SEQ ID NO: 1399575 - DNA, 15 bp, Homo sapiens
aaaaaatagagacag

SEQ ID NO: 1399576 - DNA, 15 bp, Homo sapiens
aaaaaaatagagaca

SEQ ID NO: 1399577 - DNA, 15 bp, Homo sapiens
taaaaaaatagagac

SEQ ID NO: 1399578 - DNA, 15 bp, Homo sapiens
ataaaaaaatagaga

SEQ ID NO: 1399579 - DNA, 15 bp, Homo sapiens
aataaaaaaatagag

SEQ ID NO: 1399580 - DNA, 15 bp, Homo sapiens
taataaaaaaataga

SEQ ID NO: 1399581 - DNA, 15 bp, Homo sapiens
ataataaaaaaatag

SEQ ID NO: 1399582 - DNA, 15 bp, Homo sapiens
aataataaaaaaata

SEQ ID NO: 1399583 - DNA, 15 bp, Homo sapiens
aaataataaaaaaat

SEQ ID NO: 1399584 - DNA, 15 bp, Homo sapiens
aaaataataaaaaaa

SEQ ID NO: 1399585 - DNA, 15 bp, Homo sapiens
taaaataataaaaaa

SEQ ID NO: 1399586 - DNA, 15 bp, Homo sapiens
ataaaataataaaaa

SEQ ID NO: 1399587 - DNA, 15 bp, Homo sapiens
aataaaataataaaa

SEQ ID NO: 1399588 - DNA, 15 bp, Homo sapiens
aaataaaataataaa

SEQ ID NO: 1399589 - DNA, 15 bp, Homo sapiens
aaaataaaataataa

SEQ ID NO: 1399590 - DNA, 15 bp, Homo sapiens
taaaataaaataata

SEQ ID NO: 1399591 - DNA, 15 bp, Homo sapiens
ctaaaataaaataat

SEQ ID NO: 1399592 - DNA, 15 bp, Homo sapiens
gtctaaaataaaata

SEQ ID NO: 1399593 - DNA, 15 bp, Homo sapiens
tgtctaaaataaaat

SEQ ID NO: 1399594 - DNA, 15 bp, Homo sapiens
ctgtctaaaataaaa

SEQ ID NO: 1399595 - DNA, 15 bp, Homo sapiens
tctgtctaaaataaa

SEQ ID NO: 1399596 - DNA, 15 bp, Homo sapiens
ctctgtctaaaataa

SEQ ID NO: 1399597 - DNA, 15 bp, Homo sapiens
gctctgtctaaaata

SEQ ID NO: 1399598 - DNA, 15 bp, Homo sapiens
ggctctgtctaaaat

SEQ ID NO: 1399599 - DNA, 15 bp, Homo sapiens
aggctctgtctaaaa

SEQ ID NO: 1399600 - DNA, 15 bp, Homo sapiens
aaggctctgtctaaa

SEQ ID NO: 1399601 - DNA, 15 bp, Homo sapiens
taaggctctgtctaa

SEQ ID NO: 1399602 - DNA, 15 bp, Homo sapiens
gtaaggctctgtcta

SEQ ID NO: 1399603 - DNA, 15 bp, Homo sapiens
agtaaggctctgtct

SEQ ID NO: 1399604 - DNA, 15 bp, Homo sapiens
gagtaaggctctgtc

SEQ ID NO: 1399605 - DNA, 15 bp, Homo sapiens
agagtaaggctctgt

SEQ ID NO: 1399606 - DNA, 15 bp, Homo sapiens
gagagtaaggctctg

SEQ ID NO: 1399607 - DNA, 15 bp, Homo sapiens
tgagagtaaggctct

SEQ ID NO: 1399608 - DNA, 15 bp, Homo sapiens
gtgagagtaaggctc

SEQ ID NO: 1399609 - DNA, 15 bp, Homo sapiens
ggtgagagtaaggct

SEQ ID NO: 1399610 - DNA, 15 bp, Homo sapiens
gggtgagagtaaggc

SEQ ID NO: 1399611 - DNA, 15 bp, Homo sapiens
tgggtgagagtaagg

SEQ ID NO: 1399612 - DNA, 15 bp, Homo sapiens
ctgggtgagagtaag

SEQ ID NO: 1399613 - DNA, 15 bp, Homo sapiens
cctgggtgagagtaa

SEQ ID NO: 1399614 - DNA, 15 bp, Homo sapiens
gcctgggtgagagta

SEQ ID NO: 1399615 - DNA, 15 bp, Homo sapiens
accagcctgggtgag

SEQ ID NO: 1399616 - DNA, 15 bp, Homo sapiens
gcaccagcctgggtg

SEQ ID NO: 1399617 - DNA, 15 bp, Homo sapiens
tgcaccagcctgggt

SEQ ID NO: 1399618 - DNA, 15 bp, Homo sapiens
ctgcaccagcctggg

SEQ ID NO: 1399619 - DNA, 15 bp, Homo sapiens
gctgcaccagcctgg

SEQ ID NO: 1399620 - DNA, 15 bp, Homo sapiens
tgctgcaccagcctg

SEQ ID NO: 1399621 - DNA, 15 bp, Homo sapiens
atgctgcaccagcct

SEQ ID NO: 1399622 - DNA, 15 bp, Homo sapiens
aatgctgcaccagcc

SEQ ID NO: 1399623 - DNA, 15 bp, Homo sapiens
caatgctgcaccagc

SEQ ID NO: 1399624 - DNA, 15 bp, Homo sapiens
gcaatgctgcaccag

SEQ ID NO: 1399625 - DNA, 15 bp, Homo sapiens
tgcaatgctgcacca

SEQ ID NO: 1399626 - DNA, 15 bp, Homo sapiens
ttgcaatgctgcacc

SEQ ID NO: 1399627 - DNA, 15 bp, Homo sapiens
attgcaatgctgcac

SEQ ID NO: 1399628 - DNA, 15 bp, Homo sapiens
gattgcaatgctgca

SEQ ID NO: 1399629 - DNA, 15 bp, Homo sapiens
agattgcaatgctgc

SEQ ID NO: 1399630 - DNA, 15 bp, Homo sapiens
aagattgcaatgctg

SEQ ID NO: 1399631 - DNA, 15 bp, Homo sapiens
caagattgcaatgct

SEQ ID NO: 1399632 - DNA, 15 bp, Homo sapiens
ccaagattgcaatgc

SEQ ID NO: 1399633 - DNA, 15 bp, Homo sapiens
gccaagattgcaatg

SEQ ID NO: 1399634 - DNA, 15 bp, Homo sapiens
agccaagattgcaat

SEQ ID NO: 1399635 - DNA, 15 bp, Homo sapiens
gagccaagattgcaa

SEQ ID NO: 1399636 - DNA, 15 bp, Homo sapiens
cgggagacagaggtt

SEQ ID NO: 1399637 - DNA, 15 bp, Homo sapiens
ccgggagacagaggt

SEQ ID NO: 1399638 - DNA, 15 bp, Homo sapiens
cccgggagacagagg

SEQ ID NO: 1399639 - DNA, 15 bp, Homo sapiens
acccgggagacagag

SEQ ID NO: 1399640 - DNA, 15 bp, Homo sapiens
aacccgggagacaga

SEQ ID NO: 1399641 - DNA, 15 bp, Homo sapiens
gaacccgggagacag

SEQ ID NO: 1399642 - DNA, 15 bp, Homo sapiens
tgaacccgggagaca

SEQ ID NO: 1399643 - DNA, 15 bp, Homo sapiens
ttgaacccgggagac

SEQ ID NO: 1399644 - DNA, 15 bp, Homo sapiens
cttgaacccgggaga

SEQ ID NO: 1399645 - DNA, 15 bp, Homo sapiens
tgcttgaacccggga

SEQ ID NO: 1399646 - DNA, 15 bp, Homo sapiens
ttgcttgaacccggg

SEQ ID NO: 1399647 - DNA, 15 bp, Homo sapiens
attgcttgaacccgg

SEQ ID NO: 1399648 - DNA, 15 bp, Homo sapiens
gcacctgtaatccca

SEQ ID NO: 1399649 - DNA, 15 bp, Homo sapiens
ggcacctgtaatccc

SEQ ID NO: 1399650 - DNA, 15 bp, Homo sapiens
tgggcacctgtaatc

SEQ ID NO: 1399651 - DNA, 15 bp, Homo sapiens
gtgggcacctgtaat

SEQ ID NO: 1399652 - DNA, 15 bp, Homo sapiens
ggtgggcacctgtaa

SEQ ID NO: 1399653 - DNA, 15 bp, Homo sapiens
aatggtggtgggcac

SEQ ID NO: 1399654 - DNA, 15 bp, Homo sapiens
aaatggtggtgggca

SEQ ID NO: 1399655 - DNA, 15 bp, Homo sapiens
gaaatggtggtgggc

SEQ ID NO: 1399656 - DNA, 15 bp, Homo sapiens
ggaaatggtggtggg

SEQ ID NO: 1399657 - DNA, 15 bp, Homo sapiens
tggaaatggtggtgg

SEQ ID NO: 1399658 - DNA, 15 bp, Homo sapiens
ctggaaatggtggtg

SEQ ID NO: 1399659 - DNA, 15 bp, Homo sapiens
tctggaaatggtggt

SEQ ID NO: 1399660 - DNA, 15 bp, Homo sapiens
atctggaaatggtgg

SEQ ID NO: 1399661 - DNA, 15 bp, Homo sapiens
tatctggaaatggtg

SEQ ID NO: 1399662 - DNA, 15 bp, Homo sapiens
ttatctggaaatggt

SEQ ID NO: 1399663 - DNA, 15 bp, Homo sapiens
attatctggaaatgg

SEQ ID NO: 1399664 - DNA, 15 bp, Homo sapiens
aattatctggaaatg

SEQ ID NO: 1399665 - DNA, 15 bp, Homo sapiens
aaattatctggaaat

SEQ ID NO: 1399666 - DNA, 15 bp, Homo sapiens
aaaattatctggaaa

SEQ ID NO: 1399667 - DNA, 15 bp, Homo sapiens
aaaaattatctggaa

SEQ ID NO: 1399668 - DNA, 15 bp, Homo sapiens
caaaaattatctgga

SEQ ID NO: 1399669 - DNA, 15 bp, Homo sapiens
gcatttctactaaaa

SEQ ID NO: 1399670 - DNA, 15 bp, Homo sapiens
cgcatttctactaaa

SEQ ID NO: 1399671 - DNA, 15 bp, Homo sapiens
ccgcatttctactaa

SEQ ID NO: 1399672 - DNA, 15 bp, Homo sapiens
accgcatttctacta

SEQ ID NO: 1399673 - DNA, 15 bp, Homo sapiens
aaccgcatttctact

SEQ ID NO: 1399674 - DNA, 15 bp, Homo sapiens
aaaccgcatttctac

SEQ ID NO: 1399675 - DNA, 15 bp, Homo sapiens
gaaaccgcatttcta

SEQ ID NO: 1399676 - DNA, 15 bp, Homo sapiens
agaaaccgcatttct

SEQ ID NO: 1399677 - DNA, 15 bp, Homo sapiens
gagaaaccgcatttc

SEQ ID NO: 1399678 - DNA, 15 bp, Homo sapiens
ggagaaaccgcattt

SEQ ID NO: 1399679 - DNA, 15 bp, Homo sapiens
tggagaaaccgcatt

SEQ ID NO: 1399680 - DNA, 15 bp, Homo sapiens
atggagaaaccgcat

SEQ ID NO: 1399681 - DNA, 15 bp, Homo sapiens
catggagaaaccgca

SEQ ID NO: 1399682 - DNA, 15 bp, Homo sapiens
acatggagaaaccgc

SEQ ID NO: 1399683 - DNA, 15 bp, Homo sapiens
aacatggagaaaccg

SEQ ID NO: 1399684 - DNA, 15 bp, Homo sapiens
tgccaacatggagaa

SEQ ID NO: 1399685 - DNA, 15 bp, Homo sapiens
ttgccaacatggaga

SEQ ID NO: 1399686 - DNA, 15 bp, Homo sapiens
cttgccaacatggag

SEQ ID NO: 1399687 - DNA, 15 bp, Homo sapiens
tcttgccaacatgga

SEQ ID NO: 1399688 - DNA, 15 bp, Homo sapiens
gtcttgccaacatgg

SEQ ID NO: 1399689 - DNA, 15 bp, Homo sapiens
agtcttgccaacatg

SEQ ID NO: 1399690 - DNA, 15 bp, Homo sapiens
cagtcttgccaacat

SEQ ID NO: 1399691 - DNA, 15 bp, Homo sapiens
ccagtcttgccaaca

SEQ ID NO: 1399692 - DNA, 15 bp, Homo sapiens
accagtcttgccaac

SEQ ID NO: 1399693 - DNA, 15 bp, Homo sapiens
gaccagtcttgccaa

SEQ ID NO: 1399694 - DNA, 15 bp, Homo sapiens
agaccagtcttgcca

SEQ ID NO: 1399695 - DNA, 15 bp, Homo sapiens
aagaccagtcttgcc

SEQ ID NO: 1399696 - DNA, 15 bp, Homo sapiens
caagaccagtcttgc

SEQ ID NO: 1399697 - DNA, 15 bp, Homo sapiens
tcaagaccagtcttg

SEQ ID NO: 1399698 - DNA, 15 bp, Homo sapiens
ttcaagaccagtctt

SEQ ID NO: 1399699 - DNA, 15 bp, Homo sapiens
gttcaagaccagtct

SEQ ID NO: 1399700 - DNA, 15 bp, Homo sapiens
ggttcaagaccagtc

SEQ ID NO: 1399701 - DNA, 15 bp, Homo sapiens
gggttcaagaccagt

SEQ ID NO: 1399702 - DNA, 15 bp, Homo sapiens
tcaggggttcaagac

SEQ ID NO: 1399703 - DNA, 15 bp, Homo sapiens
gtcaggggttcaaga

SEQ ID NO: 1399704 - DNA, 15 bp, Homo sapiens
ggtcaggggttcaag

SEQ ID NO: 1399705 - DNA, 15 bp, Homo sapiens
aggtcaggggttcaa

SEQ ID NO: 1399706 - DNA, 15 bp, Homo sapiens
gaggtcaggggttca

SEQ ID NO: 1399707 - DNA, 15 bp, Homo sapiens
ttgaggtcaggggtt

SEQ ID NO: 1399708 - DNA, 15 bp, Homo sapiens
tttgaggtcaggggt

SEQ ID NO: 1399709 - DNA, 15 bp, Homo sapiens
atttgaggtcagggg

SEQ ID NO: 1399710 - DNA, 15 bp, Homo sapiens
catttgaggtcaggg

SEQ ID NO: 1399711 - DNA, 15 bp, Homo sapiens
tcatttgaggtcagg

SEQ ID NO: 1399712 - DNA, 15 bp, Homo sapiens
atcatttgaggtcag

SEQ ID NO: 1399713 - DNA, 15 bp, Homo sapiens
gatcatttgaggtca

SEQ ID NO: 1399714 - DNA, 15 bp, Homo sapiens
ggatcatttgaggtc

SEQ ID NO: 1399715 - DNA, 15 bp, Homo sapiens
tggatcatttgaggt

SEQ ID NO: 1399716 - DNA, 15 bp, Homo sapiens
gtggatcatttgagg

SEQ ID NO: 1399717 - DNA, 15 bp, Homo sapiens
ggtggatcatttgag

SEQ ID NO: 1399718 - DNA, 15 bp, Homo sapiens
gggtggatcatttga

SEQ ID NO: 1399719 - DNA, 15 bp, Homo sapiens
tgggtggatcatttg

SEQ ID NO: 1399720 - DNA, 15 bp, Homo sapiens
gtgggtggatcattt

SEQ ID NO: 1399721 - DNA, 15 bp, Homo sapiens
ggtgggtggatcatt

SEQ ID NO: 1399722 - DNA, 15 bp, Homo sapiens
aggtgggtggatcat

SEQ ID NO: 1399723 - DNA, 15 bp, Homo sapiens
caggtgggtggatca

SEQ ID NO: 1399724 - DNA, 15 bp, Homo sapiens
ccaggtgggtggatc

SEQ ID NO: 1399725 - DNA, 15 bp, Homo sapiens
cccaggtgggtggat

SEQ ID NO: 1399726 - DNA, 15 bp, Homo sapiens
gcccaggtgggtgga

SEQ ID NO: 1399727 - DNA, 15 bp, Homo sapiens
ggcccaggtgggtgg

SEQ ID NO: 1399728 - DNA, 15 bp, Homo sapiens
aggcccaggtgggtg

SEQ ID NO: 1399729 - DNA, 15 bp, Homo sapiens
gaggcccaggtgggt

SEQ ID NO: 1399730 - DNA, 15 bp, Homo sapiens
ggaggcccaggtggg

SEQ ID NO: 1399731 - DNA, 15 bp, Homo sapiens
gggaggcccaggtgg

SEQ ID NO: 1399732 - DNA, 15 bp, Homo sapiens
tgggaggcccaggtg

SEQ ID NO: 1399733 - DNA, 15 bp, Homo sapiens
ttgggaggcccaggt

SEQ ID NO: 1399734 - DNA, 15 bp, Homo sapiens
tctagcactttggga

SEQ ID NO: 1399735 - DNA, 15 bp, Homo sapiens
ttctagcactttggg

SEQ ID NO: 1399736 - DNA, 15 bp, Homo sapiens
attctagcactttgg

SEQ ID NO: 1399737 - DNA, 15 bp, Homo sapiens
aattctagcactttg

SEQ ID NO: 1399738 - DNA, 15 bp, Homo sapiens
taattctagcacttt

SEQ ID NO: 1399739 - DNA, 15 bp, Homo sapiens
gtaattctagcactt

SEQ ID NO: 1399740 - DNA, 15 bp, Homo sapiens
tgtaattctagcact

SEQ ID NO: 1399741 - DNA, 15 bp, Homo sapiens
ctgtaattctagcac

SEQ ID NO: 1399742 - DNA, 15 bp, Homo sapiens
cctgtaattctagca

SEQ ID NO: 1399743 - DNA, 15 bp, Homo sapiens
gcctgtaattctagc

SEQ ID NO: 1399744 - DNA, 15 bp, Homo sapiens
tgcctgtaattctag

SEQ ID NO: 1399745 - DNA, 15 bp, Homo sapiens
atgcctgtaattcta

SEQ ID NO: 1399746 - DNA, 15 bp, Homo sapiens
catgcctgtaattct

SEQ ID NO: 1399747 - DNA, 15 bp, Homo sapiens
tctgtggctcatgcc

SEQ ID NO: 1399748 - DNA, 15 bp, Homo sapiens
ctctgtggctcatgc

SEQ ID NO: 1399749 - DNA, 15 bp, Homo sapiens
gctctgtggctcatg

SEQ ID NO: 1399750 - DNA, 15 bp, Homo sapiens
ggctctgtggctcat

SEQ ID NO: 1399751 - DNA, 15 bp, Homo sapiens
aggctctgtggctca

SEQ ID NO: 1399752 - DNA, 15 bp, Homo sapiens
caggctctgtggctc

SEQ ID NO: 1399753 - DNA, 15 bp, Homo sapiens
ccaggctctgtggct

SEQ ID NO: 1399754 - DNA, 15 bp, Homo sapiens
gccaggctctgtggc

SEQ ID NO: 1399755 - DNA, 15 bp, Homo sapiens
ggccaggctctgtgg

SEQ ID NO: 1399756 - DNA, 15 bp, Homo sapiens
aggccaggctctgtg

SEQ ID NO: 1399757 - DNA, 15 bp, Homo sapiens
taggccaggctctgt

SEQ ID NO: 1399758 - DNA, 15 bp, Homo sapiens
ataggccaggctctg

SEQ ID NO: 1399759 - DNA, 15 bp, Homo sapiens
aataggccaggctct

SEQ ID NO: 1399760 - DNA, 15 bp, Homo sapiens
aaataggccaggctc

SEQ ID NO: 1399761 - DNA, 15 bp, Homo sapiens
taaataggccaggct

SEQ ID NO: 1399762 - DNA, 15 bp, Homo sapiens
ataaataggccaggc

SEQ ID NO: 1399763 - DNA, 15 bp, Homo sapiens
aataaataggccagg

SEQ ID NO: 1399764 - DNA, 15 bp, Homo sapiens
gaataaataggccag

SEQ ID NO: 1399765 - DNA, 15 bp, Homo sapiens
tgaataaataggcca

SEQ ID NO: 1399766 - DNA, 15 bp, Homo sapiens
atgaataaataggcc

SEQ ID NO: 1399767 - DNA, 15 bp, Homo sapiens
aatgaataaataggc

SEQ ID NO: 1399768 - DNA, 15 bp, Homo sapiens
aaatgaataaatagg

SEQ ID NO: 1399769 - DNA, 15 bp, Homo sapiens
taaatgaataaatag

SEQ ID NO: 1399770 - DNA, 15 bp, Homo sapiens
ataaatgaataaata

SEQ ID NO: 1399771 - DNA, 15 bp, Homo sapiens
aataaatgaataaat

SEQ ID NO: 1399772 - DNA, 15 bp, Homo sapiens
aaataaatgaataaa

SEQ ID NO: 1399773 - DNA, 15 bp, Homo sapiens
aaaataaatgaataa

SEQ ID NO: 1399774 - DNA, 15 bp, Homo sapiens
aaaaataaatgaata

SEQ ID NO: 1399775 - DNA, 15 bp, Homo sapiens
aaaaaataaatgaat

SEQ ID NO: 1399776 - DNA, 15 bp, Homo sapiens
taaaaaataaatgaa

SEQ ID NO: 1399777 - DNA, 15 bp, Homo sapiens
ttaaaaaataaatga

SEQ ID NO: 1399778 - DNA, 15 bp, Homo sapiens
cttaaaaaataaatg

SEQ ID NO: 1399779 - DNA, 15 bp, Homo sapiens
ccttaaaaaataaat

SEQ ID NO: 1399780 - DNA, 15 bp, Homo sapiens
tccttaaaaaataaa

SEQ ID NO: 1399781 - DNA, 15 bp, Homo sapiens
ctccttaaaaaataa

SEQ ID NO: 1399782 - DNA, 15 bp, Homo sapiens
cctccttaaaaaata

SEQ ID NO: 1399783 - DNA, 15 bp, Homo sapiens
ccctccttaaaaaat

SEQ ID NO: 1399784 - DNA, 15 bp, Homo sapiens
cccctccttaaaaaa

SEQ ID NO: 1399785 - DNA, 15 bp, Homo sapiens
ccccctccttaaaaa

SEQ ID NO: 1399786 - DNA, 15 bp, Homo sapiens
tccccctccttaaaa

SEQ ID NO: 1399787 - DNA, 15 bp, Homo sapiens
ttccccctccttaaa

SEQ ID NO: 1399788 - DNA, 15 bp, Homo sapiens
tttccccctccttaa

SEQ ID NO: 1399789 - DNA, 15 bp, Homo sapiens
ttttccccctcctta

SEQ ID NO: 1399790 - DNA, 15 bp, Homo sapiens
tttttccccctcctt

SEQ ID NO: 1399791 - DNA, 15 bp, Homo sapiens
ttttttccccctcct

SEQ ID NO: 1399792 - DNA, 15 bp, Homo sapiens
tttttttccccctcc

SEQ ID NO: 1399793 - DNA, 15 bp, Homo sapiens
ctttttttccccctc

SEQ ID NO: 1399794 - DNA, 15 bp, Homo sapiens
tctttttttccccct

SEQ ID NO: 1399795 - DNA, 15 bp, Homo sapiens
ctctttttttccccc

SEQ ID NO: 1399796 - DNA, 15 bp, Homo sapiens
tctctttttttcccc

SEQ ID NO: 1399797 - DNA, 15 bp, Homo sapiens
ctctctttttttccc

SEQ ID NO: 1399798 - DNA, 15 bp, Homo sapiens
tctctctttttttcc

SEQ ID NO: 1399799 - DNA, 15 bp, Homo sapiens
ctctctctttttttc

SEQ ID NO: 1399800 - DNA, 15 bp, Homo sapiens
ttctctctctttttt

SEQ ID NO: 1399801 - DNA, 15 bp, Homo sapiens
tttctctctcttttt

SEQ ID NO: 1399802 - DNA, 15 bp, Homo sapiens
ctttctctctctttt

SEQ ID NO: 1399803 - DNA, 15 bp, Homo sapiens
tctttctctctcttt

SEQ ID NO: 1399804 - DNA, 15 bp, Homo sapiens
atctttctctctctt

SEQ ID NO: 1399805 - DNA, 15 bp, Homo sapiens
catctttctctctct

SEQ ID NO: 1399806 - DNA, 15 bp, Homo sapiens
ccatctttctctctc

SEQ ID NO: 1399807 - DNA, 15 bp, Homo sapiens
cccatctttctctct

SEQ ID NO: 1399808 - DNA, 15 bp, Homo sapiens
gcccatctttctctc

SEQ ID NO: 1399809 - DNA, 15 bp, Homo sapiens
tgcccatctttctct

SEQ ID NO: 1399810 - DNA, 15 bp, Homo sapiens
ctgcccatctttctc

SEQ ID NO: 1399811 - DNA, 15 bp, Homo sapiens
tctgcccatctttct

SEQ ID NO: 1399812 - DNA, 15 bp, Homo sapiens
gtctgcccatctttc

SEQ ID NO: 1399813 - DNA, 15 bp, Homo sapiens
tgtctgcccatcttt

SEQ ID NO: 1399814 - DNA, 15 bp, Homo sapiens
ttgtctgcccatctt

SEQ ID NO: 1399815 - DNA, 15 bp, Homo sapiens
tttgtctgcccatct

SEQ ID NO: 1399816 - DNA, 15 bp, Homo sapiens
ttttgtctgcccatc

SEQ ID NO: 1399817 - DNA, 15 bp, Homo sapiens
gttttgtctgcccat

SEQ ID NO: 1399818 - DNA, 15 bp, Homo sapiens
tgttttgtctgccca

SEQ ID NO: 1399819 - DNA, 15 bp, Homo sapiens
ttgttttgtctgccc

SEQ ID NO: 1399820 - DNA, 15 bp, Homo sapiens
gttgttttgtctgcc

SEQ ID NO: 1399821 - DNA, 15 bp, Homo sapiens
tgttgttttgtctgc

SEQ ID NO: 1399822 - DNA, 15 bp, Homo sapiens
ctgttgttttgtctg

SEQ ID NO: 1399823 - DNA, 15 bp, Homo sapiens
tctgttgttttgtct

SEQ ID NO: 1399824 - DNA, 15 bp, Homo sapiens
atctgttgttttgtc

SEQ ID NO: 1399825 - DNA, 15 bp, Homo sapiens
catctgttgttttgt

SEQ ID NO: 1399826 - DNA, 15 bp, Homo sapiens
ccatctgttgttttg

SEQ ID NO: 1399827 - DNA, 15 bp, Homo sapiens
accatctgttgtttt

SEQ ID NO: 1399828 - DNA, 15 bp, Homo sapiens
gaccatctgttgttt

SEQ ID NO: 1399829 - DNA, 15 bp, Homo sapiens
agaccatctgttgtt

SEQ ID NO: 1399830 - DNA, 15 bp, Homo sapiens
aagaccatctgttgt

SEQ ID NO: 1399831 - DNA, 15 bp, Homo sapiens
aaagaccatctgttg

SEQ ID NO: 1399832 - DNA, 15 bp, Homo sapiens
gaaagaccatctgtt

SEQ ID NO: 1399833 - DNA, 15 bp, Homo sapiens
ggaaagaccatctgt

SEQ ID NO: 1399834 - DNA, 15 bp, Homo sapiens
tggaaagaccatctg

SEQ ID NO: 1399835 - DNA, 15 bp, Homo sapiens
ttggaaagaccatct

SEQ ID NO: 1399836 - DNA, 15 bp, Homo sapiens
tttggaaagaccatc

SEQ ID NO: 1399837 - DNA, 15 bp, Homo sapiens
atttggaaagaccat

SEQ ID NO: 1399838 - DNA, 15 bp, Homo sapiens
catttggaaagacca

SEQ ID NO: 1399839 - DNA, 15 bp, Homo sapiens
tcatttggaaagacc

SEQ ID NO: 1399840 - DNA, 15 bp, Homo sapiens
atcatttggaaagac

SEQ ID NO: 1399841 - DNA, 15 bp, Homo sapiens
gatcatttggaaaga

SEQ ID NO: 1399842 - DNA, 15 bp, Homo sapiens
agatcatttggaaag

SEQ ID NO: 1399843 - DNA, 15 bp, Homo sapiens
cagatcatttggaaa

SEQ ID NO: 1399844 - DNA, 15 bp, Homo sapiens
acagatcatttggaa

SEQ ID NO: 1399845 - DNA, 15 bp, Homo sapiens
aacagatcatttgga

SEQ ID NO: 1399846 - DNA, 15 bp, Homo sapiens
aaacagatcatttgg

SEQ ID NO: 1399847 - DNA, 15 bp, Homo sapiens
caaacagatcatttg

SEQ ID NO: 1399848 - DNA, 15 bp, Homo sapiens
acaaacagatcattt

SEQ ID NO: 1399849 - DNA, 15 bp, Homo sapiens
cacaaacagatcatt

SEQ ID NO: 1399850 - DNA, 15 bp, Homo sapiens
tcacaaacagatcat

SEQ ID NO: 1399851 - DNA, 15 bp, Homo sapiens
atcacaaacagatca

SEQ ID NO: 1399852 - DNA, 15 bp, Homo sapiens
aatcacaaacagatc

SEQ ID NO: 1399853 - DNA, 15 bp, Homo sapiens
gaatcacaaacagat

SEQ ID NO: 1399854 - DNA, 15 bp, Homo sapiens
agaatcacaaacaga

SEQ ID NO: 1399855 - DNA, 15 bp, Homo sapiens
cagaatcacaaacag

SEQ ID NO: 1399856 - DNA, 15 bp, Homo sapiens
acagaatcacaaaca

SEQ ID NO: 1399857 - DNA, 15 bp, Homo sapiens
cacagaatcacaaac

SEQ ID NO: 1399858 - DNA, 15 bp, Homo sapiens
gcacagaatcacaaa

SEQ ID NO: 1399859 - DNA, 15 bp, Homo sapiens
ggcacagaatcacaa

SEQ ID NO: 1399860 - DNA, 15 bp, Homo sapiens
tggcacagaatcaca

SEQ ID NO: 1399861 - DNA, 15 bp, Homo sapiens
ctggcacagaatcac

SEQ ID NO: 1399862 - DNA, 15 bp, Homo sapiens
cctggcacagaatca

SEQ ID NO: 1399863 - DNA, 15 bp, Homo sapiens
tcctggcacagaatc

SEQ ID NO: 1399864 - DNA, 15 bp, Homo sapiens
ctcctggcacagaat

SEQ ID NO: 1399865 - DNA, 15 bp, Homo sapiens
gctcctggcacagaa

SEQ ID NO: 1399866 - DNA, 15 bp, Homo sapiens
agctcctggcacaga

SEQ ID NO: 1399867 - DNA, 15 bp, Homo sapiens
cagctcctggcacag

SEQ ID NO: 1399868 - DNA, 15 bp, Homo sapiens
tcagctcctggcaca

SEQ ID NO: 1399869 - DNA, 15 bp, Homo sapiens
ctcagctcctggcac

SEQ ID NO: 1399870 - DNA, 15 bp, Homo sapiens
tctcagctcctggca

SEQ ID NO: 1399871 - DNA, 15 bp, Homo sapiens
ctctcagctcctggc

SEQ ID NO: 1399872 - DNA, 15 bp, Homo sapiens
tctctcagctcctgg

SEQ ID NO: 1399873 - DNA, 15 bp, Homo sapiens
gtctctcagctcctg

SEQ ID NO: 1399874 - DNA, 15 bp, Homo sapiens
agtctctcagctcct

SEQ ID NO: 1399875 - DNA, 15 bp, Homo sapiens
aagtctctcagctcc

SEQ ID NO: 1399876 - DNA, 15 bp, Homo sapiens
taagtctctcagctc

SEQ ID NO: 1399877 - DNA, 15 bp, Homo sapiens
ttaagtctctcagct

SEQ ID NO: 1399878 - DNA, 15 bp, Homo sapiens
tttaagtctctcagc

SEQ ID NO: 1399879 - DNA, 15 bp, Homo sapiens
ttttaagtctctcag

SEQ ID NO: 1399880 - DNA, 15 bp, Homo sapiens
tttttaagtctctca

SEQ ID NO: 1399881 - DNA, 15 bp, Homo sapiens
ctttttaagtctctc

SEQ ID NO: 1399882 - DNA, 15 bp, Homo sapiens
tctttttaagtctct

SEQ ID NO: 1399883 - DNA, 15 bp, Homo sapiens
gtctttttaagtctc

SEQ ID NO: 1399884 - DNA, 15 bp, Homo sapiens
tgtctttttaagtct

SEQ ID NO: 1399885 - DNA, 15 bp, Homo sapiens
ctgtctttttaagtc

SEQ ID NO: 1399886 - DNA, 15 bp, Homo sapiens
gctgtctttttaagt

SEQ ID NO: 1399887 - DNA, 15 bp, Homo sapiens
ggctgtctttttaag

SEQ ID NO: 1399888 - DNA, 15 bp, Homo sapiens
tggctgtctttttaa

SEQ ID NO: 1399889 - DNA, 15 bp, Homo sapiens
ctggctgtcttttta

SEQ ID NO: 1399890 - DNA, 15 bp, Homo sapiens
tctggctgtcttttt

SEQ ID NO: 1399891 - DNA, 15 bp, Homo sapiens
atctggctgtctttt

SEQ ID NO: 1399892 - DNA, 15 bp, Homo sapiens
gatctggctgtcttt

SEQ ID NO: 1399893 - DNA, 15 bp, Homo sapiens
agatctggctgtctt

SEQ ID NO: 1399894 - DNA, 15 bp, Homo sapiens
tagatctggctgtct

SEQ ID NO: 1399895 - DNA, 15 bp, Homo sapiens
ctagatctggctgtc

SEQ ID NO: 1399896 - DNA, 15 bp, Homo sapiens
actagatctggctgt

SEQ ID NO: 1399897 - DNA, 15 bp, Homo sapiens
gactagatctggctg

SEQ ID NO: 1399898 - DNA, 15 bp, Homo sapiens
ggactagatctggct

SEQ ID NO: 1399899 - DNA, 15 bp, Homo sapiens
aggactagatctggc

SEQ ID NO: 1399900 - DNA, 15 bp, Homo sapiens
aaggactagatctgg

SEQ ID NO: 1399901 - DNA, 15 bp, Homo sapiens
taaggactagatctg

SEQ ID NO: 1399902 - DNA, 15 bp, Homo sapiens
ttaaggactagatct

SEQ ID NO: 1399903 - DNA, 15 bp, Homo sapiens
attaaggactagatc

SEQ ID NO: 1399904 - DNA, 15 bp, Homo sapiens
aattaaggactagat

SEQ ID NO: 1399905 - DNA, 15 bp, Homo sapiens
aaattaaggactaga

SEQ ID NO: 1399906 - DNA, 15 bp, Homo sapiens
aaaattaaggactag

SEQ ID NO: 1399907 - DNA, 15 bp, Homo sapiens
taaaattaaggacta

SEQ ID NO: 1399908 - DNA, 15 bp, Homo sapiens
ttaaaattaaggact

SEQ ID NO: 1399909 - DNA, 15 bp, Homo sapiens
tttaaaattaaggac

SEQ ID NO: 1399910 - DNA, 15 bp, Homo sapiens
ctttaaaattaagga

SEQ ID NO: 1399911 - DNA, 15 bp, Homo sapiens
cctttaaaattaagg

SEQ ID NO: 1399912 - DNA, 15 bp, Homo sapiens
ccctttaaaattaag

SEQ ID NO: 1399913 - DNA, 15 bp, Homo sapiens
accctttaaaattaa

SEQ ID NO: 1399914 - DNA, 15 bp, Homo sapiens
aaccctttaaaatta

SEQ ID NO: 1399915 - DNA, 15 bp, Homo sapiens
aaaccctttaaaatt

SEQ ID NO: 1399916 - DNA, 15 bp, Homo sapiens
caaaccctttaaaat

SEQ ID NO: 1399917 - DNA, 15 bp, Homo sapiens
gcaaaccctttaaaa

SEQ ID NO: 1399918 - DNA, 15 bp, Homo sapiens
tgcaaaccctttaaa

SEQ ID NO: 1399919 - DNA, 15 bp, Homo sapiens
ttgcaaaccctttaa

SEQ ID NO: 1399920 - DNA, 15 bp, Homo sapiens
attgcaaacccttta

SEQ ID NO: 1399921 - DNA, 15 bp, Homo sapiens
aattgcaaacccttt

SEQ ID NO: 1399922 - DNA, 15 bp, Homo sapiens
taattgcaaaccctt

SEQ ID NO: 1399923 - DNA, 15 bp, Homo sapiens
ctaattgcaaaccct

SEQ ID NO: 1399924 - DNA, 15 bp, Homo sapiens
actaattgcaaaccc

SEQ ID NO: 1399925 - DNA, 15 bp, Homo sapiens
cactaattgcaaacc

SEQ ID NO: 1399926 - DNA, 15 bp, Homo sapiens
ccactaattgcaaac

SEQ ID NO: 1399927 - DNA, 15 bp, Homo sapiens
cccactaattgcaaa

SEQ ID NO: 1399928 - DNA, 15 bp, Homo sapiens
tcccactaattgcaa

SEQ ID NO: 1399929 - DNA, 15 bp, Homo sapiens
ctcccactaattgca

SEQ ID NO: 1399930 - DNA, 15 bp, Homo sapiens
tctcccactaattgc

SEQ ID NO: 1399931 - DNA, 15 bp, Homo sapiens
ctctcccactaattg

SEQ ID NO: 1399932 - DNA, 15 bp, Homo sapiens
cctctcccactaatt

SEQ ID NO: 1399933 - DNA, 15 bp, Homo sapiens
gcctctcccactaat

SEQ ID NO: 1399934 - DNA, 15 bp, Homo sapiens
tgcctctcccactaa

SEQ ID NO: 1399935 - DNA, 15 bp, Homo sapiens
ctgcctctcccacta

SEQ ID NO: 1399936 - DNA, 15 bp, Homo sapiens
gctgcctctcccact

SEQ ID NO: 1399937 - DNA, 15 bp, Homo sapiens
agctgcctctcccac

SEQ ID NO: 1399938 - DNA, 15 bp, Homo sapiens
cagctgcctctccca

SEQ ID NO: 1399939 - DNA, 15 bp, Homo sapiens
acagctgcctctccc

SEQ ID NO: 1399940 - DNA, 15 bp, Homo sapiens
aacagctgcctctcc

SEQ ID NO: 1399941 - DNA, 15 bp, Homo sapiens
gaacagctgcctctc

SEQ ID NO: 1399942 - DNA, 15 bp, Homo sapiens
tgaacagctgcctct

SEQ ID NO: 1399943 - DNA, 15 bp, Homo sapiens
ttgaacagctgcctc

SEQ ID NO: 1399944 - DNA, 15 bp, Homo sapiens
tttgaacagctgcct

SEQ ID NO: 1399945 - DNA, 15 bp, Homo sapiens
ttttgaacagctgcc

SEQ ID NO: 1399946 - DNA, 15 bp, Homo sapiens
attttgaacagctgc

SEQ ID NO: 1399947 - DNA, 15 bp, Homo sapiens
tattttgaacagctg

SEQ ID NO: 1399948 - DNA, 15 bp, Homo sapiens
ctattttgaacagct

SEQ ID NO: 1399949 - DNA, 15 bp, Homo sapiens
gctattttgaacagc

SEQ ID NO: 1399950 - DNA, 15 bp, Homo sapiens
agctattttgaacag

SEQ ID NO: 1399951 - DNA, 15 bp, Homo sapiens
gagctattttgaaca

SEQ ID NO: 1399952 - DNA, 15 bp, Homo sapiens
tgagctattttgaac

SEQ ID NO: 1399953 - DNA, 15 bp, Homo sapiens
ttgagctattttgaa

SEQ ID NO: 1399954 - DNA, 15 bp, Homo sapiens
tttgagctattttga

SEQ ID NO: 1399955 - DNA, 15 bp, Homo sapiens
ctttgagctattttg

SEQ ID NO: 1399956 - DNA, 15 bp, Homo sapiens
actttgagctatttt

SEQ ID NO: 1399957 - DNA, 15 bp, Homo sapiens
cactttgagctattt

SEQ ID NO: 1399958 - DNA, 15 bp, Homo sapiens
ccactttgagctatt

SEQ ID NO: 1399959 - DNA, 15 bp, Homo sapiens
gccactttgagctat

SEQ ID NO: 1399960 - DNA, 15 bp, Homo sapiens
ggccactttgagcta

SEQ ID NO: 1399961 - DNA, 15 bp, Homo sapiens
aggccactttgagct

SEQ ID NO: 1399962 - DNA, 15 bp, Homo sapiens
caggccactttgagc

SEQ ID NO: 1399963 - DNA, 15 bp, Homo sapiens
ccaggccactttgag

SEQ ID NO: 1399964 - DNA, 15 bp, Homo sapiens
gccaggccactttga

SEQ ID NO: 1399965 - DNA, 15 bp, Homo sapiens
tgccaggccactttg

SEQ ID NO: 1399966 - DNA, 15 bp, Homo sapiens
gtgccaggccacttt

SEQ ID NO: 1399967 - DNA, 15 bp, Homo sapiens
cgtgccaggccactt

SEQ ID NO: 1399968 - DNA, 15 bp, Homo sapiens
ccgtgccaggccact

SEQ ID NO: 1399969 - DNA, 15 bp, Homo sapiens
accgtgccaggccac

SEQ ID NO: 1399970 - DNA, 15 bp, Homo sapiens
caccgtgccaggcca

SEQ ID NO: 1399971 - DNA, 15 bp, Homo sapiens
ccaccgtgccaggcc

SEQ ID NO: 1399972 - DNA, 15 bp, Homo sapiens
gccaccgtgccaggc

SEQ ID NO: 1399973 - DNA, 15 bp, Homo sapiens
agccaccgtgccagg

SEQ ID NO: 1399974 - DNA, 15 bp, Homo sapiens
gagccaccgtgccag

SEQ ID NO: 1399975 - DNA, 15 bp, Homo sapiens
tgagccaccgtgcca

SEQ ID NO: 1399976 - DNA, 15 bp, Homo sapiens
gtgagccaccgtgcc

SEQ ID NO: 1399977 - DNA, 15 bp, Homo sapiens
tcctcagcctcccac

SEQ ID NO: 1399978 - DNA, 15 bp, Homo sapiens
acaatcctccctcct

SEQ ID NO: 1399979 - DNA, 15 bp, Homo sapiens
aacaatcctccctcc

SEQ ID NO: 1399980 - DNA, 15 bp, Homo sapiens
aaacaatcctccctc

SEQ ID NO: 1399981 - DNA, 15 bp, Homo sapiens
caaacaatcctccct

SEQ ID NO: 1399982 - DNA, 15 bp, Homo sapiens
actcaaacaatcctc

SEQ ID NO: 1399983 - DNA, 15 bp, Homo sapiens
tactcaaacaatcct

SEQ ID NO: 1399984 - DNA, 15 bp, Homo sapiens
gtactcaaacaatcc

SEQ ID NO: 1399985 - DNA, 15 bp, Homo sapiens
tgtactcaaacaatc

SEQ ID NO: 1399986 - DNA, 15 bp, Homo sapiens
gtgtactcaaacaat

SEQ ID NO: 1399987 - DNA, 15 bp, Homo sapiens
cgtgtactcaaacaa

SEQ ID NO: 1399988 - DNA, 15 bp, Homo sapiens
tcgtgtactcaaaca

SEQ ID NO: 1399989 - DNA, 15 bp, Homo sapiens
ctcgtgtactcaaac

SEQ ID NO: 1399990 - DNA, 15 bp, Homo sapiens
actcgtgtactcaaa

SEQ ID NO: 1399991 - DNA, 15 bp, Homo sapiens
aactcgtgtactcaa

SEQ ID NO: 1399992 - DNA, 15 bp, Homo sapiens
aaactcgtgtactca

SEQ ID NO: 1399993 - DNA, 15 bp, Homo sapiens
caaactcgtgtactc

SEQ ID NO: 1399994 - DNA, 15 bp, Homo sapiens
tcaaactcgtgtact

SEQ ID NO: 1399995 - DNA, 15 bp, Homo sapiens
ctcaaactcgtgtac

SEQ ID NO: 1399996 - DNA, 15 bp, Homo sapiens
tctcaaactcgtgta

SEQ ID NO: 1399997 - DNA, 15 bp, Homo sapiens
atctcaaactcgtgt

SEQ ID NO: 1399998 - DNA, 15 bp, Homo sapiens
catctcaaactcgtg

SEQ ID NO: 1399999 - DNA, 15 bp, Homo sapiens
tcatctcaaactcgt

SEQ ID NO: 1400000 - DNA, 15 bp, Homo sapiens
gtcatctcaaactcg

SEQ ID NO: 1400001 - DNA, 15 bp, Homo sapiens
agtcatctcaaactc

SEQ ID NO: 1400002 - DNA, 15 bp, Homo sapiens
cagtcatctcaaact

SEQ ID NO: 1400003 - DNA, 15 bp, Homo sapiens
acagtcatctcaaac

SEQ ID NO: 1400004 - DNA, 15 bp, Homo sapiens
cacagtcatctcaaa

SEQ ID NO: 1400005 - DNA, 15 bp, Homo sapiens
ccacagtcatctcaa

SEQ ID NO: 1400006 - DNA, 15 bp, Homo sapiens
cccacagtcatctca

SEQ ID NO: 1400007 - DNA, 15 bp, Homo sapiens
gcccacagtcatctc

SEQ ID NO: 1400008 - DNA, 15 bp, Homo sapiens
tgcccacagtcatct

SEQ ID NO: 1400009 - DNA, 15 bp, Homo sapiens
ttgcccacagtcatc

SEQ ID NO: 1400010 - DNA, 15 bp, Homo sapiens
gttgcccacagtcat

SEQ ID NO: 1400011 - DNA, 15 bp, Homo sapiens
tgttgcccacagtca

SEQ ID NO: 1400012 - DNA, 15 bp, Homo sapiens
gtgttgcccacagtc

SEQ ID NO: 1400013 - DNA, 15 bp, Homo sapiens
tgtgttgcccacagt

SEQ ID NO: 1400014 - DNA, 15 bp, Homo sapiens
ctgtgttgcccacag

SEQ ID NO: 1400015 - DNA, 15 bp, Homo sapiens
gctgtgttgcccaca

SEQ ID NO: 1400016 - DNA, 15 bp, Homo sapiens
tgctgtgttgcccac

SEQ ID NO: 1400017 - DNA, 15 bp, Homo sapiens
ttgctgtgttgccca

SEQ ID NO: 1400018 - DNA, 15 bp, Homo sapiens
cttgctgtgttgccc

SEQ ID NO: 1400019 - DNA, 15 bp, Homo sapiens
tcttgctgtgttgcc

SEQ ID NO: 1400020 - DNA, 15 bp, Homo sapiens
gtcttgctgtgttgc

SEQ ID NO: 1400021 - DNA, 15 bp, Homo sapiens
ggtcttgctgtgttg

SEQ ID NO: 1400022 - DNA, 15 bp, Homo sapiens
gggtcttgctgtgtt

SEQ ID NO: 1400023 - DNA, 15 bp, Homo sapiens
ggggtcttgctgtgt

SEQ ID NO: 1400024 - DNA, 15 bp, Homo sapiens
tggggtcttgctgtg

SEQ ID NO: 1400025 - DNA, 15 bp, Homo sapiens
atggggtcttgctgt

SEQ ID NO: 1400026 - DNA, 15 bp, Homo sapiens
gatggggtcttgctg

SEQ ID NO: 1400027 - DNA, 15 bp, Homo sapiens
catttttgtagagat

SEQ ID NO: 1400028 - DNA, 15 bp, Homo sapiens
acatttttgtagaga

SEQ ID NO: 1400029 - DNA, 15 bp, Homo sapiens
aacatttttgtagag

SEQ ID NO: 1400030 - DNA, 15 bp, Homo sapiens
aaacatttttgtaga

SEQ ID NO: 1400031 - DNA, 15 bp, Homo sapiens
taaacatttttgtag

SEQ ID NO: 1400032 - DNA, 15 bp, Homo sapiens
ttaaacatttttgta

SEQ ID NO: 1400033 - DNA, 15 bp, Homo sapiens
tttaaacatttttgt

SEQ ID NO: 1400034 - DNA, 15 bp, Homo sapiens
atttaaacatttttg

SEQ ID NO: 1400035 - DNA, 15 bp, Homo sapiens
tatttaaacattttt

SEQ ID NO: 1400036 - DNA, 15 bp, Homo sapiens
ttatttaaacatttt

SEQ ID NO: 1400037 - DNA, 15 bp, Homo sapiens
tttatttaaacattt

SEQ ID NO: 1400038 - DNA, 15 bp, Homo sapiens
atttatttaaacatt

SEQ ID NO: 1400039 - DNA, 15 bp, Homo sapiens
tatttatttaaacat

SEQ ID NO: 1400040 - DNA, 15 bp, Homo sapiens
ttatttatttaaaca

SEQ ID NO: 1400041 - DNA, 15 bp, Homo sapiens
tttatttatttaaac

SEQ ID NO: 1400042 - DNA, 15 bp, Homo sapiens
atttatttatttaaa

SEQ ID NO: 1400043 - DNA, 15 bp, Homo sapiens
tatttatttatttaa

SEQ ID NO: 1400044 - DNA, 15 bp, Homo sapiens
atatttatttattta

SEQ ID NO: 1400045 - DNA, 15 bp, Homo sapiens
aatatttatttattt

SEQ ID NO: 1400046 - DNA, 15 bp, Homo sapiens
taatatttatttatt

SEQ ID NO: 1400047 - DNA, 15 bp, Homo sapiens
ataatatttatttat

SEQ ID NO: 1400048 - DNA, 15 bp, Homo sapiens
aataatatttattta

SEQ ID NO: 1400049 - DNA, 15 bp, Homo sapiens
taataatatttattt

SEQ ID NO: 1400050 - DNA, 15 bp, Homo sapiens
ctaataatatttatt

SEQ ID NO: 1400051 - DNA, 15 bp, Homo sapiens
cctaataatatttat

SEQ ID NO: 1400052 - DNA, 15 bp, Homo sapiens
acctaataatattta

SEQ ID NO: 1400053 - DNA, 15 bp, Homo sapiens
aacctaataatattt

SEQ ID NO: 1400054 - DNA, 15 bp, Homo sapiens
caacctaataatatt

SEQ ID NO: 1400055 - DNA, 15 bp, Homo sapiens
acaacctaataatat

SEQ ID NO: 1400056 - DNA, 15 bp, Homo sapiens
aacaacctaataata

SEQ ID NO: 1400057 - DNA, 15 bp, Homo sapiens
caacaacctaataat

SEQ ID NO: 1400058 - DNA, 15 bp, Homo sapiens
gcaacaacctaataa

SEQ ID NO: 1400059 - DNA, 15 bp, Homo sapiens
tgcaacaacctaata

SEQ ID NO: 1400060 - DNA, 15 bp, Homo sapiens
ttgcaacaacctaat

SEQ ID NO: 1400061 - DNA, 15 bp, Homo sapiens
tttgcaacaacctaa

SEQ ID NO: 1400062 - DNA, 15 bp, Homo sapiens
ttttgcaacaaccta

SEQ ID NO: 1400063 - DNA, 15 bp, Homo sapiens
cttttgcaacaacct

SEQ ID NO: 1400064 - DNA, 15 bp, Homo sapiens
acttttgcaacaacc

SEQ ID NO: 1400065 - DNA, 15 bp, Homo sapiens
tacttttgcaacaac

SEQ ID NO: 1400066 - DNA, 15 bp, Homo sapiens
ttacttttgcaacaa

SEQ ID NO: 1400067 - DNA, 15 bp, Homo sapiens
attacttttgcaaca

SEQ ID NO: 1400068 - DNA, 15 bp, Homo sapiens
aattacttttgcaac

SEQ ID NO: 1400069 - DNA, 15 bp, Homo sapiens
caattacttttgcaa

SEQ ID NO: 1400070 - DNA, 15 bp, Homo sapiens
acaattacttttgca

SEQ ID NO: 1400071 - DNA, 15 bp, Homo sapiens
cacaattacttttgc

SEQ ID NO: 1400072 - DNA, 15 bp, Homo sapiens
ccacaattacttttg

SEQ ID NO: 1400073 - DNA, 15 bp, Homo sapiens
cccacaattactttt

SEQ ID NO: 1400074 - DNA, 15 bp, Homo sapiens
acccacaattacttt

SEQ ID NO: 1400075 - DNA, 15 bp, Homo sapiens
aacccacaattactt

SEQ ID NO: 1400076 - DNA, 15 bp, Homo sapiens
aaacccacaattact

SEQ ID NO: 1400077 - DNA, 15 bp, Homo sapiens
aaaacccacaattac

SEQ ID NO: 1400078 - DNA, 15 bp, Homo sapiens
caaaacccacaatta

SEQ ID NO: 1400079 - DNA, 15 bp, Homo sapiens
gcaaaacccacaatt

SEQ ID NO: 1400080 - DNA, 15 bp, Homo sapiens
ggcaaaacccacaat

SEQ ID NO: 1400081 - DNA, 15 bp, Homo sapiens
tggcaaaacccacaa

SEQ ID NO: 1400082 - DNA, 15 bp, Homo sapiens
atggcaaaacccaca

SEQ ID NO: 1400083 - DNA, 15 bp, Homo sapiens
aatggcaaaacccac

SEQ ID NO: 1400084 - DNA, 15 bp, Homo sapiens
taatggcaaaaccca

SEQ ID NO: 1400085 - DNA, 15 bp, Homo sapiens
gtaatggcaaaaccc

SEQ ID NO: 1400086 - DNA, 15 bp, Homo sapiens
agtaatggcaaaacc

SEQ ID NO: 1400087 - DNA, 15 bp, Homo sapiens
aagtaatggcaaaac

SEQ ID NO: 1400088 - DNA, 15 bp, Homo sapiens
aaagtaatggcaaaa

SEQ ID NO: 1400089 - DNA, 15 bp, Homo sapiens
caaagtaatggcaaa

SEQ ID NO: 1400090 - DNA, 15 bp, Homo sapiens
tcaaagtaatggcaa

SEQ ID NO: 1400091 - DNA, 15 bp, Homo sapiens
gtcaaagtaatggca

SEQ ID NO: 1400092 - DNA, 15 bp, Homo sapiens
tgtcaaagtaatggc

SEQ ID NO: 1400093 - DNA, 15 bp, Homo sapiens
ttgtcaaagtaatgg

SEQ ID NO: 1400094 - DNA, 15 bp, Homo sapiens
tttgtcaaagtaatg

SEQ ID NO: 1400095 - DNA, 15 bp, Homo sapiens
ttttgtcaaagtaat

SEQ ID NO: 1400096 - DNA, 15 bp, Homo sapiens
tttttgtcaaagtaa

SEQ ID NO: 1400097 - DNA, 15 bp, Homo sapiens
gtttttgtcaaagta

SEQ ID NO: 1400098 - DNA, 15 bp, Homo sapiens
cgtttttgtcaaagt

SEQ ID NO: 1400099 - DNA, 15 bp, Homo sapiens
tcgtttttgtcaaag

SEQ ID NO: 1400100 - DNA, 15 bp, Homo sapiens
gtcgtttttgtcaaa

SEQ ID NO: 1400101 - DNA, 15 bp, Homo sapiens
tgtcgtttttgtcaa

SEQ ID NO: 1400102 - DNA, 15 bp, Homo sapiens
ttgtcgtttttgtca

SEQ ID NO: 1400103 - DNA, 15 bp, Homo sapiens
attgtcgtttttgtc

SEQ ID NO: 1400104 - DNA, 15 bp, Homo sapiens
aattgtcgtttttgt

SEQ ID NO: 1400105 - DNA, 15 bp, Homo sapiens
taattgtcgtttttg

SEQ ID NO: 1400106 - DNA, 15 bp, Homo sapiens
gtaattgtcgttttt

SEQ ID NO: 1400107 - DNA, 15 bp, Homo sapiens
ggtaattgtcgtttt

SEQ ID NO: 1400108 - DNA, 15 bp, Homo sapiens
aggtaattgtcgttt

SEQ ID NO: 1400109 - DNA, 15 bp, Homo sapiens
aaggtaattgtcgtt

SEQ ID NO: 1400110 - DNA, 15 bp, Homo sapiens
aaaggtaattgtcgt

SEQ ID NO: 1400111 - DNA, 15 bp, Homo sapiens
caaaggtaattgtcg

SEQ ID NO: 1400112 - DNA, 15 bp, Homo sapiens
gcaaaggtaattgtc

SEQ ID NO: 1400113 - DNA, 15 bp, Homo sapiens
tgcaaaggtaattgt

SEQ ID NO: 1400114 - DNA, 15 bp, Homo sapiens
gtgcaaaggtaattg

SEQ ID NO: 1400115 - DNA, 15 bp, Homo sapiens
cgtgcaaaggtaatt

SEQ ID NO: 1400116 - DNA, 15 bp, Homo sapiens
tcgtgcaaaggtaat

SEQ ID NO: 1400117 - DNA, 15 bp, Homo sapiens
ttcgtgcaaaggtaa

SEQ ID NO: 1400118 - DNA, 15 bp, Homo sapiens
gttcgtgcaaaggta

SEQ ID NO: 1400119 - DNA, 15 bp, Homo sapiens
tgttcgtgcaaaggt

SEQ ID NO: 1400120 - DNA, 15 bp, Homo sapiens
gtgttcgtgcaaagg

SEQ ID NO: 1400121 - DNA, 15 bp, Homo sapiens
tgtgttcgtgcaaag

SEQ ID NO: 1400122 - DNA, 15 bp, Homo sapiens
ttgtgttcgtgcaaa

SEQ ID NO: 1400123 - DNA, 15 bp, Homo sapiens
attgtgttcgtgcaa

SEQ ID NO: 1400124 - DNA, 15 bp, Homo sapiens
tattgtgttcgtgca

SEQ ID NO: 1400125 - DNA, 15 bp, Homo sapiens
ttattgtgttcgtgc

SEQ ID NO: 1400126 - DNA, 15 bp, Homo sapiens
attattgtgttcgtg

SEQ ID NO: 1400127 - DNA, 15 bp, Homo sapiens
tattattgtgttcgt

SEQ ID NO: 1400128 - DNA, 15 bp, Homo sapiens
atattattgtgttcg

SEQ ID NO: 1400129 - DNA, 15 bp, Homo sapiens
gatattattgtgttc

SEQ ID NO: 1400130 - DNA, 15 bp, Homo sapiens
ggatattattgtgtt

SEQ ID NO: 1400131 - DNA, 15 bp, Homo sapiens
tggatattattgtgt

SEQ ID NO: 1400132 - DNA, 15 bp, Homo sapiens
ctggatattattgtg

SEQ ID NO: 1400133 - DNA, 15 bp, Homo sapiens
tctggatattattgt

SEQ ID NO: 1400134 - DNA, 15 bp, Homo sapiens
ttctggatattattg

SEQ ID NO: 1400135 - DNA, 15 bp, Homo sapiens
tttctggatattatt

SEQ ID NO: 1400136 - DNA, 15 bp, Homo sapiens
ctttctggatattat

SEQ ID NO: 1400137 - DNA, 15 bp, Homo sapiens
tctttctggatatta

SEQ ID NO: 1400138 - DNA, 15 bp, Homo sapiens
atctttctggatatt

SEQ ID NO: 1400139 - DNA, 15 bp, Homo sapiens
gatctttctggatat

SEQ ID NO: 1400140 - DNA, 15 bp, Homo sapiens
agatctttctggata

SEQ ID NO: 1400141 - DNA, 15 bp, Homo sapiens
aagatctttctggat

SEQ ID NO: 1400142 - DNA, 15 bp, Homo sapiens
gaagatctttctgga

SEQ ID NO: 1400143 - DNA, 15 bp, Homo sapiens
tgaagatctttctgg

SEQ ID NO: 1400144 - DNA, 15 bp, Homo sapiens
ttgaagatctttctg

SEQ ID NO: 1400145 - DNA, 15 bp, Homo sapiens
cttgaagatctttct

SEQ ID NO: 1400146 - DNA, 15 bp, Homo sapiens
ccttgaagatctttc

SEQ ID NO: 1400147 - DNA, 15 bp, Homo sapiens
gccttgaagatcttt

SEQ ID NO: 1400148 - DNA, 15 bp, Homo sapiens
tgccttgaagatctt

SEQ ID NO: 1400149 - DNA, 15 bp, Homo sapiens
atgccttgaagatct

SEQ ID NO: 1400150 - DNA, 15 bp, Homo sapiens
gatgccttgaagatc

SEQ ID NO: 1400151 - DNA, 15 bp, Homo sapiens
tgatgccttgaagat

SEQ ID NO: 1400152 - DNA, 15 bp, Homo sapiens
ttgatgccttgaaga

SEQ ID NO: 1400153 - DNA, 15 bp, Homo sapiens
tttgatgccttgaag

SEQ ID NO: 1400154 - DNA, 15 bp, Homo sapiens
gtttgatgccttgaa

SEQ ID NO: 1400155 - DNA, 15 bp, Homo sapiens
tgtttgatgccttga

SEQ ID NO: 1400156 - DNA, 15 bp, Homo sapiens
ttgtttgatgccttg

SEQ ID NO: 1400157 - DNA, 15 bp, Homo sapiens
tttgtttgatgcctt

SEQ ID NO: 1400158 - DNA, 15 bp, Homo sapiens
gtttgtttgatgcct

SEQ ID NO: 1400159 - DNA, 15 bp, Homo sapiens
tgtttgtttgatgcc

SEQ ID NO: 1400160 - DNA, 15 bp, Homo sapiens
ttgtttgtttgatgc

SEQ ID NO: 1400161 - DNA, 15 bp, Homo sapiens
tttgtttgtttgatg

SEQ ID NO: 1400162 - DNA, 15 bp, Homo sapiens
atttgtttgtttgat

SEQ ID NO: 1400163 - DNA, 15 bp, Homo sapiens
tatttgtttgtttga

SEQ ID NO: 1400164 - DNA, 15 bp, Homo sapiens
gtatttgtttgtttg

SEQ ID NO: 1400165 - DNA, 15 bp, Homo sapiens
tgtatttgtttgttt

SEQ ID NO: 1400166 - DNA, 15 bp, Homo sapiens
atgtatttgtttgtt

SEQ ID NO: 1400167 - DNA, 15 bp, Homo sapiens
gatgtatttgtttgt

SEQ ID NO: 1400168 - DNA, 15 bp, Homo sapiens
tgatgtatttgtttg

SEQ ID NO: 1400169 - DNA, 15 bp, Homo sapiens
atgatgtatttgttt

SEQ ID NO: 1400170 - DNA, 15 bp, Homo sapiens
tatgatgtatttgtt

SEQ ID NO: 1400171 - DNA, 15 bp, Homo sapiens
ttatgatgtatttgt

SEQ ID NO: 1400172 - DNA, 15 bp, Homo sapiens
cttatgatgtatttg

SEQ ID NO: 1400173 - DNA, 15 bp, Homo sapiens
acttatgatgtattt

SEQ ID NO: 1400174 - DNA, 15 bp, Homo sapiens
tacttatgatgtatt

SEQ ID NO: 1400175 - DNA, 15 bp, Homo sapiens
ttacttatgatgtat

SEQ ID NO: 1400176 - DNA, 15 bp, Homo sapiens
tttacttatgatgta

SEQ ID NO: 1400177 - DNA, 15 bp, Homo sapiens
atttacttatgatgt

SEQ ID NO: 1400178 - DNA, 15 bp, Homo sapiens
tatttacttatgatg

SEQ ID NO: 1400179 - DNA, 15 bp, Homo sapiens
gtatttacttatgat

SEQ ID NO: 1400180 - DNA, 15 bp, Homo sapiens
tgtatttacttatga

SEQ ID NO: 1400181 - DNA, 15 bp, Homo sapiens
ttgtatttacttatg

SEQ ID NO: 1400182 - DNA, 15 bp, Homo sapiens
cttgtatttacttat

SEQ ID NO: 1400183 - DNA, 15 bp, Homo sapiens
gcttgtatttactta

SEQ ID NO: 1400184 - DNA, 15 bp, Homo sapiens
agcttgtatttactt

SEQ ID NO: 1400185 - DNA, 15 bp, Homo sapiens
gagcttgtatttact

SEQ ID NO: 1400186 - DNA, 15 bp, Homo sapiens
tgagcttgtatttac

SEQ ID NO: 1400187 - DNA, 15 bp, Homo sapiens
ttgagcttgtattta

SEQ ID NO: 1400188 - DNA, 15 bp, Homo sapiens
tttgagcttgtattt

SEQ ID NO: 1400189 - DNA, 15 bp, Homo sapiens
ctttgagcttgtatt

SEQ ID NO: 1400190 - DNA, 15 bp, Homo sapiens
tctttgagcttgtat

SEQ ID NO: 1400191 - DNA, 15 bp, Homo sapiens
gtctttgagcttgta

SEQ ID NO: 1400192 - DNA, 15 bp, Homo sapiens
tgtctttgagcttgt

SEQ ID NO: 1400193 - DNA, 15 bp, Homo sapiens
atgtctttgagcttg

SEQ ID NO: 1400194 - DNA, 15 bp, Homo sapiens
catgtctttgagctt

SEQ ID NO: 1400195 - DNA, 15 bp, Homo sapiens
tcatgtctttgagct

SEQ ID NO: 1400196 - DNA, 15 bp, Homo sapiens
gtcatgtctttgagc

SEQ ID NO: 1400197 - DNA, 15 bp, Homo sapiens
agtcatgtctttgag

SEQ ID NO: 1400198 - DNA, 15 bp, Homo sapiens
aagtcatgtctttga

SEQ ID NO: 1400199 - DNA, 15 bp, Homo sapiens
taagtcatgtctttg

SEQ ID NO: 1400200 - DNA, 15 bp, Homo sapiens
ttaagtcatgtcttt

SEQ ID NO: 1400201 - DNA, 15 bp, Homo sapiens
cttaagtcatgtctt

SEQ ID NO: 1400202 - DNA, 15 bp, Homo sapiens
ccttaagtcatgtct

SEQ ID NO: 1400203 - DNA, 15 bp, Homo sapiens
accttaagtcatgtc

SEQ ID NO: 1400204 - DNA, 15 bp, Homo sapiens
taccttaagtcatgt

SEQ ID NO: 1400205 - DNA, 15 bp, Homo sapiens
ttaccttaagtcatg

SEQ ID NO: 1400206 - DNA, 15 bp, Homo sapiens
cttaccttaagtcat

SEQ ID NO: 1400207 - DNA, 15 bp, Homo sapiens
tcttaccttaagtca

SEQ ID NO: 1400208 - DNA, 15 bp, Homo sapiens
ctcttaccttaagtc

SEQ ID NO: 1400209 - DNA, 15 bp, Homo sapiens
tctcttaccttaagt

SEQ ID NO: 1400210 - DNA, 15 bp, Homo sapiens
ttctcttaccttaag

SEQ ID NO: 1400211 - DNA, 15 bp, Homo sapiens
cttctcttaccttaa

SEQ ID NO: 1400212 - DNA, 15 bp, Homo sapiens
acttctcttacctta

SEQ ID NO: 1400213 - DNA, 15 bp, Homo sapiens
tacttctcttacctt

SEQ ID NO: 1400214 - DNA, 15 bp, Homo sapiens
ttacttctcttacct

SEQ ID NO: 1400215 - DNA, 15 bp, Homo sapiens
tttacttctcttacc

SEQ ID NO: 1400216 - DNA, 15 bp, Homo sapiens
ctttacttctcttac

SEQ ID NO: 1400217 - DNA, 15 bp, Homo sapiens
gctttacttctctta

SEQ ID NO: 1400218 - DNA, 15 bp, Homo sapiens
tgctttacttctctt

SEQ ID NO: 1400219 - DNA, 15 bp, Homo sapiens
ttgctttacttctct

SEQ ID NO: 1400220 - DNA, 15 bp, Homo sapiens
tttgctttacttctc

SEQ ID NO: 1400221 - DNA, 15 bp, Homo sapiens
ctttgctttacttct

SEQ ID NO: 1400222 - DNA, 15 bp, Homo sapiens
actttgctttacttc

SEQ ID NO: 1400223 - DNA, 15 bp, Homo sapiens
cactttgctttactt

SEQ ID NO: 1400224 - DNA, 15 bp, Homo sapiens
gcactttgctttact

SEQ ID NO: 1400225 - DNA, 15 bp, Homo sapiens
tgcactttgctttac

SEQ ID NO: 1400226 - DNA, 15 bp, Homo sapiens
ttgcactttgcttta

SEQ ID NO: 1400227 - DNA, 15 bp, Homo sapiens
attgcactttgcttt

SEQ ID NO: 1400228 - DNA, 15 bp, Homo sapiens
cattgcactttgctt

SEQ ID NO: 1400229 - DNA, 15 bp, Homo sapiens
tcattgcactttgct

SEQ ID NO: 1400230 - DNA, 15 bp, Homo sapiens
gtcattgcactttgc

SEQ ID NO: 1400231 - DNA, 15 bp, Homo sapiens
tgtcattgcactttg

SEQ ID NO: 1400232 - DNA, 15 bp, Homo sapiens
ttgtcattgcacttt

SEQ ID NO: 1400233 - DNA, 15 bp, Homo sapiens
attgtcattgcactt

SEQ ID NO: 1400234 - DNA, 15 bp, Homo sapiens
tattgtcattgcact

SEQ ID NO: 1400235 - DNA, 15 bp, Homo sapiens
gtattgtcattgcac

SEQ ID NO: 1400236 - DNA, 15 bp, Homo sapiens
ggtattgtcattgca

SEQ ID NO: 1400237 - DNA, 15 bp, Homo sapiens
gggtattgtcattgc

SEQ ID NO: 1400238 - DNA, 15 bp, Homo sapiens
agggtattgtcattg

SEQ ID NO: 1400239 - DNA, 15 bp, Homo sapiens
cagggtattgtcatt

SEQ ID NO: 1400240 - DNA, 15 bp, Homo sapiens
ccagggtattgtcat

SEQ ID NO: 1400241 - DNA, 15 bp, Homo sapiens
tccagggtattgtca

SEQ ID NO: 1400242 - DNA, 15 bp, Homo sapiens
ctccagggtattgtc

SEQ ID NO: 1400243 - DNA, 15 bp, Homo sapiens
tctccagggtattgt

SEQ ID NO: 1400244 - DNA, 15 bp, Homo sapiens
ttctccagggtattg

SEQ ID NO: 1400245 - DNA, 15 bp, Homo sapiens
cttctccagggtatt

SEQ ID NO: 1400246 - DNA, 15 bp, Homo sapiens
ccttctccagggtat

SEQ ID NO: 1400247 - DNA, 15 bp, Homo sapiens
cccttctccagggta

SEQ ID NO: 1400248 - DNA, 15 bp, Homo sapiens
acccttctccagggt

SEQ ID NO: 1400249 - DNA, 15 bp, Homo sapiens
aacccttctccaggg

SEQ ID NO: 1400250 - DNA, 15 bp, Homo sapiens
taacccttctccagg

SEQ ID NO: 1400251 - DNA, 15 bp, Homo sapiens
ttaacccttctccag

SEQ ID NO: 1400252 - DNA, 15 bp, Homo sapiens
attaacccttctcca

SEQ ID NO: 1400253 - DNA, 15 bp, Homo sapiens
gattaacccttctcc

SEQ ID NO: 1400254 - DNA, 15 bp, Homo sapiens
ggattaacccttctc

SEQ ID NO: 1400255 - DNA, 15 bp, Homo sapiens
aggattaacccttct

SEQ ID NO: 1400256 - DNA, 15 bp, Homo sapiens
caggattaacccttc

SEQ ID NO: 1400257 - DNA, 15 bp, Homo sapiens
gcaggattaaccctt

SEQ ID NO: 1400258 - DNA, 15 bp, Homo sapiens
agcaggattaaccct

SEQ ID NO: 1400259 - DNA, 15 bp, Homo sapiens
aagcaggattaaccc

SEQ ID NO: 1400260 - DNA, 15 bp, Homo sapiens
caagcaggattaacc

SEQ ID NO: 1400261 - DNA, 15 bp, Homo sapiens
ccaagcaggattaac

SEQ ID NO: 1400262 - DNA, 15 bp, Homo sapiens
cccaagcaggattaa

SEQ ID NO: 1400263 - DNA, 15 bp, Homo sapiens
ccccaagcaggatta

SEQ ID NO: 1400264 - DNA, 15 bp, Homo sapiens
tccccaagcaggatt

SEQ ID NO: 1400265 - DNA, 15 bp, Homo sapiens
ttccccaagcaggat

SEQ ID NO: 1400266 - DNA, 15 bp, Homo sapiens
attccccaagcagga

SEQ ID NO: 1400267 - DNA, 15 bp, Homo sapiens
tattccccaagcagg

SEQ ID NO: 1400268 - DNA, 15 bp, Homo sapiens
atattccccaagcag

SEQ ID NO: 1400269 - DNA, 15 bp, Homo sapiens
catattccccaagca

SEQ ID NO: 1400270 - DNA, 15 bp, Homo sapiens
tcatattccccaagc

SEQ ID NO: 1400271 - DNA, 15 bp, Homo sapiens
ctcatattccccaag

SEQ ID NO: 1400272 - DNA, 15 bp, Homo sapiens
tctcatattccccaa

SEQ ID NO: 1400273 - DNA, 15 bp, Homo sapiens
ttctcatattcccca

SEQ ID NO: 1400274 - DNA, 15 bp, Homo sapiens
tttctcatattcccc

SEQ ID NO: 1400275 - DNA, 15 bp, Homo sapiens
ttttctcatattccc

SEQ ID NO: 1400276 - DNA, 15 bp, Homo sapiens
gttttctcatattcc

SEQ ID NO: 1400277 - DNA, 15 bp, Homo sapiens
agttttctcatattc

SEQ ID NO: 1400278 - DNA, 15 bp, Homo sapiens
aagttttctcatatt

SEQ ID NO: 1400279 - DNA, 15 bp, Homo sapiens
taagttttctcatat

SEQ ID NO: 1400280 - DNA, 15 bp, Homo sapiens
ttaagttttctcata

SEQ ID NO: 1400281 - DNA, 15 bp, Homo sapiens
tttaagttttctcat

SEQ ID NO: 1400282 - DNA, 15 bp, Homo sapiens
ctttaagttttctca

SEQ ID NO: 1400283 - DNA, 15 bp, Homo sapiens
cctttaagttttctc

SEQ ID NO: 1400284 - DNA, 15 bp, Homo sapiens
tcctttaagttttct

SEQ ID NO: 1400285 - DNA, 15 bp, Homo sapiens
ttcctttaagttttc

SEQ ID NO: 1400286 - DNA, 15 bp, Homo sapiens
cttcctttaagtttt

SEQ ID NO: 1400287 - DNA, 15 bp, Homo sapiens
tcttcctttaagttt

SEQ ID NO: 1400288 - DNA, 15 bp, Homo sapiens
ttcttcctttaagtt

SEQ ID NO: 1400289 - DNA, 15 bp, Homo sapiens
cttcttcctttaagt

SEQ ID NO: 1400290 - DNA, 15 bp, Homo sapiens
ccttcttcctttaag

SEQ ID NO: 1400291 - DNA, 15 bp, Homo sapiens
cccttcttcctttaa

SEQ ID NO: 1400292 - DNA, 15 bp, Homo sapiens
tcccttcttccttta

SEQ ID NO: 1400293 - DNA, 15 bp, Homo sapiens
ctcccttcttccttt

SEQ ID NO: 1400294 - DNA, 15 bp, Homo sapiens
gctcccttcttcctt

SEQ ID NO: 1400295 - DNA, 15 bp, Homo sapiens
agctcccttcttcct

SEQ ID NO: 1400296 - DNA, 15 bp, Homo sapiens
aagctcccttcttcc

SEQ ID NO: 1400297 - DNA, 15 bp, Homo sapiens
aaagctcccttcttc

SEQ ID NO: 1400298 - DNA, 15 bp, Homo sapiens
aaaagctcccttctt

SEQ ID NO: 1400299 - DNA, 15 bp, Homo sapiens
gaaaagctcccttct

SEQ ID NO: 1400300 - DNA, 15 bp, Homo sapiens
tgaaaagctcccttc

SEQ ID NO: 1400301 - DNA, 15 bp, Homo sapiens
ctgaaaagctccctt

SEQ ID NO: 1400302 - DNA, 15 bp, Homo sapiens
gctgaaaagctccct

SEQ ID NO: 1400303 - DNA, 15 bp, Homo sapiens
agctgaaaagctccc

SEQ ID NO: 1400304 - DNA, 15 bp, Homo sapiens
cagctgaaaagctcc

SEQ ID NO: 1400305 - DNA, 15 bp, Homo sapiens
acagctgaaaagctc

SEQ ID NO: 1400306 - DNA, 15 bp, Homo sapiens
cacagctgaaaagct

SEQ ID NO: 1400307 - DNA, 15 bp, Homo sapiens
tcacagctgaaaagc

SEQ ID NO: 1400308 - DNA, 15 bp, Homo sapiens
atcacagctgaaaag

SEQ ID NO: 1400309 - DNA, 15 bp, Homo sapiens
aatcacagctgaaaa

SEQ ID NO: 1400310 - DNA, 15 bp, Homo sapiens
gaatcacagctgaaa

SEQ ID NO: 1400311 - DNA, 15 bp, Homo sapiens
agaatcacagctgaa

SEQ ID NO: 1400312 - DNA, 15 bp, Homo sapiens
tagaatcacagctga

SEQ ID NO: 1400313 - DNA, 15 bp, Homo sapiens
ttagaatcacagctg

SEQ ID NO: 1400314 - DNA, 15 bp, Homo sapiens
tttagaatcacagct

SEQ ID NO: 1400315 - DNA, 15 bp, Homo sapiens
gtttagaatcacagc

SEQ ID NO: 1400316 - DNA, 15 bp, Homo sapiens
tgtttagaatcacag

SEQ ID NO: 1400317 - DNA, 15 bp, Homo sapiens
atgtttagaatcaca

SEQ ID NO: 1400318 - DNA, 15 bp, Homo sapiens
catgtttagaatcac

SEQ ID NO: 1400319 - DNA, 15 bp, Homo sapiens
ccatgtttagaatca

SEQ ID NO: 1400320 - DNA, 15 bp, Homo sapiens
cccatgtttagaatc

SEQ ID NO: 1400321 - DNA, 15 bp, Homo sapiens
gcccatgtttagaat

SEQ ID NO: 1400322 - DNA, 15 bp, Homo sapiens
tgcccatgtttagaa

SEQ ID NO: 1400323 - DNA, 15 bp, Homo sapiens
ctgcccatgtttaga

SEQ ID NO: 1400324 - DNA, 15 bp, Homo sapiens
cctgcccatgtttag

SEQ ID NO: 1400325 - DNA, 15 bp, Homo sapiens
tcctgcccatgttta

SEQ ID NO: 1400326 - DNA, 15 bp, Homo sapiens
atcctgcccatgttt

SEQ ID NO: 1400327 - DNA, 15 bp, Homo sapiens
aatcctgcccatgtt

SEQ ID NO: 1400328 - DNA, 15 bp, Homo sapiens
aaatcctgcccatgt

SEQ ID NO: 1400329 - DNA, 15 bp, Homo sapiens
gaaatcctgcccatg

SEQ ID NO: 1400330 - DNA, 15 bp, Homo sapiens
tgaaatcctgcccat

SEQ ID NO: 1400331 - DNA, 15 bp, Homo sapiens
ttgaaatcctgccca

SEQ ID NO: 1400332 - DNA, 15 bp, Homo sapiens
attgaaatcctgccc

SEQ ID NO: 1400333 - DNA, 15 bp, Homo sapiens
tattgaaatcctgcc

SEQ ID NO: 1400334 - DNA, 15 bp, Homo sapiens
ctattgaaatcctgc

SEQ ID NO: 1400335 - DNA, 15 bp, Homo sapiens
tctattgaaatcctg

SEQ ID NO: 1400336 - DNA, 15 bp, Homo sapiens
atctattgaaatcct

SEQ ID NO: 1400337 - DNA, 15 bp, Homo sapiens
tatctattgaaatcc

SEQ ID NO: 1400338 - DNA, 15 bp, Homo sapiens
ttatctattgaaatc

SEQ ID NO: 1400339 - DNA, 15 bp, Homo sapiens
gttatctattgaaat

SEQ ID NO: 1400340 - DNA, 15 bp, Homo sapiens
agttatctattgaaa

SEQ ID NO: 1400341 - DNA, 15 bp, Homo sapiens
cagttatctattgaa

SEQ ID NO: 1400342 - DNA, 15 bp, Homo sapiens
acagttatctattga

SEQ ID NO: 1400343 - DNA, 15 bp, Homo sapiens
aacagttatctattg

SEQ ID NO: 1400344 - DNA, 15 bp, Homo sapiens
caacagttatctatt

SEQ ID NO: 1400345 - DNA, 15 bp, Homo sapiens
ccaacagttatctat

SEQ ID NO: 1400346 - DNA, 15 bp, Homo sapiens
tccaacagttatcta

SEQ ID NO: 1400347 - DNA, 15 bp, Homo sapiens
ctccaacagttatct

SEQ ID NO: 1400348 - DNA, 15 bp, Homo sapiens
cctccaacagttatc

SEQ ID NO: 1400349 - DNA, 15 bp, Homo sapiens
gcctccaacagttat

SEQ ID NO: 1400350 - DNA, 15 bp, Homo sapiens
ggcctccaacagtta

SEQ ID NO: 1400351 - DNA, 15 bp, Homo sapiens
tggcctccaacagtt

SEQ ID NO: 1400352 - DNA, 15 bp, Homo sapiens
ctggcctccaacagt

SEQ ID NO: 1400353 - DNA, 15 bp, Homo sapiens
tctggcctccaacag

SEQ ID NO: 1400354 - DNA, 15 bp, Homo sapiens
ctctggcctccaaca

SEQ ID NO: 1400355 - DNA, 15 bp, Homo sapiens
cctctggcctccaac

SEQ ID NO: 1400356 - DNA, 15 bp, Homo sapiens
gcctctggcctccaa

SEQ ID NO: 1400357 - DNA, 15 bp, Homo sapiens
tgcctctggcctcca

SEQ ID NO: 1400358 - DNA, 15 bp, Homo sapiens
ctgcctctggcctcc

SEQ ID NO: 1400359 - DNA, 15 bp, Homo sapiens
gctgcctctggcctc

SEQ ID NO: 1400360 - DNA, 15 bp, Homo sapiens
tgctgcctctggcct

SEQ ID NO: 1400361 - DNA, 15 bp, Homo sapiens
atgctgcctctggcc

SEQ ID NO: 1400362 - DNA, 15 bp, Homo sapiens
aatgctgcctctggc

SEQ ID NO: 1400363 - DNA, 15 bp, Homo sapiens
aaatgctgcctctgg

SEQ ID NO: 1400364 - DNA, 15 bp, Homo sapiens
aaaatgctgcctctg

SEQ ID NO: 1400365 - DNA, 15 bp, Homo sapiens
taaaatgctgcctct

SEQ ID NO: 1400366 - DNA, 15 bp, Homo sapiens
gtaaaatgctgcctc

SEQ ID NO: 1400367 - DNA, 15 bp, Homo sapiens
agtaaaatgctgcct

SEQ ID NO: 1400368 - DNA, 15 bp, Homo sapiens
aagtaaaatgctgcc

SEQ ID NO: 1400369 - DNA, 15 bp, Homo sapiens
caagtaaaatgctgc

SEQ ID NO: 1400370 - DNA, 15 bp, Homo sapiens
tcaagtaaaatgctg

SEQ ID NO: 1400371 - DNA, 15 bp, Homo sapiens
atcaagtaaaatgct

SEQ ID NO: 1400372 - DNA, 15 bp, Homo sapiens
tatcaagtaaaatgc

SEQ ID NO: 1400373 - DNA, 15 bp, Homo sapiens
atatcaagtaaaatg

SEQ ID NO: 1400374 - DNA, 15 bp, Homo sapiens
aatatcaagtaaaat

SEQ ID NO: 1400375 - DNA, 15 bp, Homo sapiens
aaatatcaagtaaaa

SEQ ID NO: 1400376 - DNA, 15 bp, Homo sapiens
caaatatcaagtaaa

SEQ ID NO: 1400377 - DNA, 15 bp, Homo sapiens
acaaatatcaagtaa

SEQ ID NO: 1400378 - DNA, 15 bp, Homo sapiens
cacaaatatcaagta

SEQ ID NO: 1400379 - DNA, 15 bp, Homo sapiens
acacaaatatcaagt

SEQ ID NO: 1400380 - DNA, 15 bp, Homo sapiens
gacacaaatatcaag

SEQ ID NO: 1400381 - DNA, 15 bp, Homo sapiens
tgacacaaatatcaa

SEQ ID NO: 1400382 - DNA, 15 bp, Homo sapiens
gtgacacaaatatca

SEQ ID NO: 1400383 - DNA, 15 bp, Homo sapiens
ggtgacacaaatatc

SEQ ID NO: 1400384 - DNA, 15 bp, Homo sapiens
tggtgacacaaatat

SEQ ID NO: 1400385 - DNA, 15 bp, Homo sapiens
ctggtgacacaaata

SEQ ID NO: 1400386 - DNA, 15 bp, Homo sapiens
tctggtgacacaaat

SEQ ID NO: 1400387 - DNA, 15 bp, Homo sapiens
ttctggtgacacaaa

SEQ ID NO: 1400388 - DNA, 15 bp, Homo sapiens
gttctggtgacacaa

SEQ ID NO: 1400389 - DNA, 15 bp, Homo sapiens
ggttctggtgacaca

SEQ ID NO: 1400390 - DNA, 15 bp, Homo sapiens
aggttctggtgacac

SEQ ID NO: 1400391 - DNA, 15 bp, Homo sapiens
taggttctggtgaca

SEQ ID NO: 1400392 - DNA, 15 bp, Homo sapiens
ttaggttctggtgac

SEQ ID NO: 1400393 - DNA, 15 bp, Homo sapiens
tttaggttctggtga

SEQ ID NO: 1400394 - DNA, 15 bp, Homo sapiens
ttttaggttctggtg

SEQ ID NO: 1400395 - DNA, 15 bp, Homo sapiens
cttttaggttctggt

SEQ ID NO: 1400396 - DNA, 15 bp, Homo sapiens
acttttaggttctgg

SEQ ID NO: 1400397 - DNA, 15 bp, Homo sapiens
cacttttaggttctg

SEQ ID NO: 1400398 - DNA, 15 bp, Homo sapiens
acacttttaggttct

SEQ ID NO: 1400399 - DNA, 15 bp, Homo sapiens
gacacttttaggttc

SEQ ID NO: 1400400 - DNA, 15 bp, Homo sapiens
agacacttttaggtt

SEQ ID NO: 1400401 - DNA, 15 bp, Homo sapiens
gagacacttttaggt

SEQ ID NO: 1400402 - DNA, 15 bp, Homo sapiens
tgagacacttttagg

SEQ ID NO: 1400403 - DNA, 15 bp, Homo sapiens
ttgagacacttttag

SEQ ID NO: 1400404 - DNA, 15 bp, Homo sapiens
tttgagacactttta

SEQ ID NO: 1400405 - DNA, 15 bp, Homo sapiens
gtttgagacactttt

SEQ ID NO: 1400406 - DNA, 15 bp, Homo sapiens
tgtttgagacacttt

SEQ ID NO: 1400407 - DNA, 15 bp, Homo sapiens
gtgtttgagacactt

SEQ ID NO: 1400408 - DNA, 15 bp, Homo sapiens
tgtgtttgagacact

SEQ ID NO: 1400409 - DNA, 15 bp, Homo sapiens
ttgtgtttgagacac

SEQ ID NO: 1400410 - DNA, 15 bp, Homo sapiens
attgtgtttgagaca

SEQ ID NO: 1400411 - DNA, 15 bp, Homo sapiens
aattgtgtttgagac

SEQ ID NO: 1400412 - DNA, 15 bp, Homo sapiens
taattgtgtttgaga

SEQ ID NO: 1400413 - DNA, 15 bp, Homo sapiens
ataattgtgtttgag

SEQ ID NO: 1400414 - DNA, 15 bp, Homo sapiens
tataattgtgtttga

SEQ ID NO: 1400415 - DNA, 15 bp, Homo sapiens
ctataattgtgtttg

SEQ ID NO: 1400416 - DNA, 15 bp, Homo sapiens
actataattgtgttt

SEQ ID NO: 1400417 - DNA, 15 bp, Homo sapiens
cactataattgtgtt

SEQ ID NO: 1400418 - DNA, 15 bp, Homo sapiens
ccactataattgtgt

SEQ ID NO: 1400419 - DNA, 15 bp, Homo sapiens
accactataattgtg

SEQ ID NO: 1400420 - DNA, 15 bp, Homo sapiens
aaccactataattgt

SEQ ID NO: 1400421 - DNA, 15 bp, Homo sapiens
aaaccactataattg

SEQ ID NO: 1400422 - DNA, 15 bp, Homo sapiens
taaaccactataatt

SEQ ID NO: 1400423 - DNA, 15 bp, Homo sapiens
ataaaccactataat

SEQ ID NO: 1400424 - DNA, 15 bp, Homo sapiens
cataaaccactataa

SEQ ID NO: 1400425 - DNA, 15 bp, Homo sapiens
acataaaccactata

SEQ ID NO: 1400426 - DNA, 15 bp, Homo sapiens
aacataaaccactat

SEQ ID NO: 1400427 - DNA, 15 bp, Homo sapiens
taacataaaccacta

SEQ ID NO: 1400428 - DNA, 15 bp, Homo sapiens
gtaacataaaccact

SEQ ID NO: 1400429 - DNA, 15 bp, Homo sapiens
agtaacataaaccac

SEQ ID NO: 1400430 - DNA, 15 bp, Homo sapiens
aagtaacataaacca

SEQ ID NO: 1400431 - DNA, 15 bp, Homo sapiens
taagtaacataaacc

SEQ ID NO: 1400432 - DNA, 15 bp, Homo sapiens
ctaagtaacataaac

SEQ ID NO: 1400433 - DNA, 15 bp, Homo sapiens
actaagtaacataaa

SEQ ID NO: 1400434 - DNA, 15 bp, Homo sapiens
cactaagtaacataa

SEQ ID NO: 1400435 - DNA, 15 bp, Homo sapiens
tcactaagtaacata

SEQ ID NO: 1400436 - DNA, 15 bp, Homo sapiens
ttcactaagtaacat

SEQ ID NO: 1400437 - DNA, 15 bp, Homo sapiens
tttcactaagtaaca

SEQ ID NO: 1400438 - DNA, 15 bp, Homo sapiens
ctttcactaagtaac

SEQ ID NO: 1400439 - DNA, 15 bp, Homo sapiens
tctttcactaagtaa

SEQ ID NO: 1400440 - DNA, 15 bp, Homo sapiens
ctctttcactaagta

SEQ ID NO: 1400441 - DNA, 15 bp, Homo sapiens
actctttcactaagt

SEQ ID NO: 1400442 - DNA, 15 bp, Homo sapiens
tactctttcactaag

SEQ ID NO: 1400443 - DNA, 15 bp, Homo sapiens
ctactctttcactaa

SEQ ID NO: 1400444 - DNA, 15 bp, Homo sapiens
cctactctttcacta

SEQ ID NO: 1400445 - DNA, 15 bp, Homo sapiens
tcctactctttcact

SEQ ID NO: 1400446 - DNA, 15 bp, Homo sapiens
ttcctactctttcac

SEQ ID NO: 1400447 - DNA, 15 bp, Homo sapiens
attcctactctttca

SEQ ID NO: 1400448 - DNA, 15 bp, Homo sapiens
gattcctactctttc

SEQ ID NO: 1400449 - DNA, 15 bp, Homo sapiens
tgattcctactcttt

SEQ ID NO: 1400450 - DNA, 15 bp, Homo sapiens
ctgattcctactctt

SEQ ID NO: 1400451 - DNA, 15 bp, Homo sapiens
cctgattcctactct

SEQ ID NO: 1400452 - DNA, 15 bp, Homo sapiens
ccctgattcctactc

SEQ ID NO: 1400453 - DNA, 15 bp, Homo sapiens
cccctgattcctact

SEQ ID NO: 1400454 - DNA, 15 bp, Homo sapiens
tcccctgattcctac

SEQ ID NO: 1400455 - DNA, 15 bp, Homo sapiens
atcccctgattccta

SEQ ID NO: 1400456 - DNA, 15 bp, Homo sapiens
aatcccctgattcct

SEQ ID NO: 1400457 - DNA, 15 bp, Homo sapiens
aaatcccctgattcc

SEQ ID NO: 1400458 - DNA, 15 bp, Homo sapiens
gaaatcccctgattc

SEQ ID NO: 1400459 - DNA, 15 bp, Homo sapiens
ggaaatcccctgatt

SEQ ID NO: 1400460 - DNA, 15 bp, Homo sapiens
tggaaatcccctgat

SEQ ID NO: 1400461 - DNA, 15 bp, Homo sapiens
ctggaaatcccctga

SEQ ID NO: 1400462 - DNA, 15 bp, Homo sapiens
cctggaaatcccctg

SEQ ID NO: 1400463 - DNA, 15 bp, Homo sapiens
ccctggaaatcccct

SEQ ID NO: 1400464 - DNA, 15 bp, Homo sapiens
tccctggaaatcccc

SEQ ID NO: 1400465 - DNA, 15 bp, Homo sapiens
gtccctggaaatccc

SEQ ID NO: 1400466 - DNA, 15 bp, Homo sapiens
agtccctggaaatcc

SEQ ID NO: 1400467 - DNA, 15 bp, Homo sapiens
aagtccctggaaatc

SEQ ID NO: 1400468 - DNA, 15 bp, Homo sapiens
gaagtccctggaaat

SEQ ID NO: 1400469 - DNA, 15 bp, Homo sapiens
agaagtccctggaaa

SEQ ID NO: 1400470 - DNA, 15 bp, Homo sapiens
cagaagtccctggaa

SEQ ID NO: 1400471 - DNA, 15 bp, Homo sapiens
gcagaagtccctgga

SEQ ID NO: 1400472 - DNA, 15 bp, Homo sapiens
tgcagaagtccctgg

SEQ ID NO: 1400473 - DNA, 15 bp, Homo sapiens
ctgcagaagtccctg

SEQ ID NO: 1400474 - DNA, 15 bp, Homo sapiens
tctgcagaagtccct

SEQ ID NO: 1400475 - DNA, 15 bp, Homo sapiens
ctctgcagaagtccc

SEQ ID NO: 1400476 - DNA, 15 bp, Homo sapiens
cctctgcagaagtcc

SEQ ID NO: 1400477 - DNA, 15 bp, Homo sapiens
ccctctgcagaagtc

SEQ ID NO: 1400478 - DNA, 15 bp, Homo sapiens
tccctctgcagaagt

SEQ ID NO: 1400479 - DNA, 15 bp, Homo sapiens
ctccctctgcagaag

SEQ ID NO: 1400480 - DNA, 15 bp, Homo sapiens
actccctctgcagaa

SEQ ID NO: 1400481 - DNA, 15 bp, Homo sapiens
cactccctctgcaga

SEQ ID NO: 1400482 - DNA, 15 bp, Homo sapiens
gcactccctctgcag

SEQ ID NO: 1400483 - DNA, 15 bp, Homo sapiens
agcactccctctgca

SEQ ID NO: 1400484 - DNA, 15 bp, Homo sapiens
gagcactccctctgc

SEQ ID NO: 1400485 - DNA, 15 bp, Homo sapiens
ggagcactccctctg

SEQ ID NO: 1400486 - DNA, 15 bp, Homo sapiens
gggagcactccctct

SEQ ID NO: 1400487 - DNA, 15 bp, Homo sapiens
agggagcactccctc

SEQ ID NO: 1400488 - DNA, 15 bp, Homo sapiens
cagggagcactccct

SEQ ID NO: 1400489 - DNA, 15 bp, Homo sapiens
tcagggagcactccc

SEQ ID NO: 1400490 - DNA, 15 bp, Homo sapiens
ctcagggagcactcc

SEQ ID NO: 1400491 - DNA, 15 bp, Homo sapiens
actcagggagcactc

SEQ ID NO: 1400492 - DNA, 15 bp, Homo sapiens
cactcagggagcact

SEQ ID NO: 1400493 - DNA, 15 bp, Homo sapiens
gcactcagggagcac

SEQ ID NO: 1400494 - DNA, 15 bp, Homo sapiens
agcactcagggagca

SEQ ID NO: 1400495 - DNA, 15 bp, Homo sapiens
cagcactcagggagc

SEQ ID NO: 1400496 - DNA, 15 bp, Homo sapiens
tcagcactcagggag

SEQ ID NO: 1400497 - DNA, 15 bp, Homo sapiens
atcagcactcaggga

SEQ ID NO: 1400498 - DNA, 15 bp, Homo sapiens
tatcagcactcaggg

SEQ ID NO: 1400499 - DNA, 15 bp, Homo sapiens
atatcagcactcagg

SEQ ID NO: 1400500 - DNA, 15 bp, Homo sapiens
aatatcagcactcag

SEQ ID NO: 1400501 - DNA, 15 bp, Homo sapiens
taatatcagcactca

SEQ ID NO: 1400502 - DNA, 15 bp, Homo sapiens
ttaatatcagcactc

SEQ ID NO: 1400503 - DNA, 15 bp, Homo sapiens
attaatatcagcact

SEQ ID NO: 1400504 - DNA, 15 bp, Homo sapiens
cattaatatcagcac

SEQ ID NO: 1400505 - DNA, 15 bp, Homo sapiens
ccattaatatcagca

SEQ ID NO: 1400506 - DNA, 15 bp, Homo sapiens
tccattaatatcagc

SEQ ID NO: 1400507 - DNA, 15 bp, Homo sapiens
ttccattaatatcag

SEQ ID NO: 1400508 - DNA, 15 bp, Homo sapiens
gttccattaatatca

SEQ ID NO: 1400509 - DNA, 15 bp, Homo sapiens
agttccattaatatc

SEQ ID NO: 1400510 - DNA, 15 bp, Homo sapiens
gagttccattaatat

SEQ ID NO: 1400511 - DNA, 15 bp, Homo sapiens
tgagttccattaata

SEQ ID NO: 1400512 - DNA, 15 bp, Homo sapiens
ctgagttccattaat

SEQ ID NO: 1400513 - DNA, 15 bp, Homo sapiens
gctgagttccattaa

SEQ ID NO: 1400514 - DNA, 15 bp, Homo sapiens
agctgagttccatta

SEQ ID NO: 1400515 - DNA, 15 bp, Homo sapiens
gagctgagttccatt

SEQ ID NO: 1400516 - DNA, 15 bp, Homo sapiens
agagctgagttccat

SEQ ID NO: 1400517 - DNA, 15 bp, Homo sapiens
tagagctgagttcca

SEQ ID NO: 1400518 - DNA, 15 bp, Homo sapiens
ttagagctgagttcc

SEQ ID NO: 1400519 - DNA, 15 bp, Homo sapiens
cttagagctgagttc

SEQ ID NO: 1400520 - DNA, 15 bp, Homo sapiens
ccttagagctgagtt

SEQ ID NO: 1400521 - DNA, 15 bp, Homo sapiens
cccttagagctgagt

SEQ ID NO: 1400522 - DNA, 15 bp, Homo sapiens
gcccttagagctgag

SEQ ID NO: 1400523 - DNA, 15 bp, Homo sapiens
agcccttagagctga

SEQ ID NO: 1400524 - DNA, 15 bp, Homo sapiens
gagcccttagagctg

SEQ ID NO: 1400525 - DNA, 15 bp, Homo sapiens
ggagcccttagagct

SEQ ID NO: 1400526 - DNA, 15 bp, Homo sapiens
gggagcccttagagc

SEQ ID NO: 1400527 - DNA, 15 bp, Homo sapiens
tgggagcccttagag

SEQ ID NO: 1400528 - DNA, 15 bp, Homo sapiens
ctgggagcccttaga

SEQ ID NO: 1400529 - DNA, 15 bp, Homo sapiens
cctgggagcccttag

SEQ ID NO: 1400530 - DNA, 15 bp, Homo sapiens
gcctgggagccctta

SEQ ID NO: 1400531 - DNA, 15 bp, Homo sapiens
agcctgggagccctt

SEQ ID NO: 1400532 - DNA, 15 bp, Homo sapiens
gagcctgggagccct

SEQ ID NO: 1400533 - DNA, 15 bp, Homo sapiens
agagcctgggagccc

SEQ ID NO: 1400534 - DNA, 15 bp, Homo sapiens
cagagcctgggagcc

SEQ ID NO: 1400535 - DNA, 15 bp, Homo sapiens
acagagcctgggagc

SEQ ID NO: 1400536 - DNA, 15 bp, Homo sapiens
cacagagcctgggag

SEQ ID NO: 1400537 - DNA, 15 bp, Homo sapiens
gcacagagcctggga

SEQ ID NO: 1400538 - DNA, 15 bp, Homo sapiens
ggcacagagcctggg

SEQ ID NO: 1400539 - DNA, 15 bp, Homo sapiens
aggcacagagcctgg

SEQ ID NO: 1400540 - DNA, 15 bp, Homo sapiens
aaggcacagagcctg

SEQ ID NO: 1400541 - DNA, 15 bp, Homo sapiens
aaaggcacagagcct

SEQ ID NO: 1400542 - DNA, 15 bp, Homo sapiens
gaaaggcacagagcc

SEQ ID NO: 1400543 - DNA, 15 bp, Homo sapiens
agaaaggcacagagc

SEQ ID NO: 1400544 - DNA, 15 bp, Homo sapiens
tagaaaggcacagag

SEQ ID NO: 1400545 - DNA, 15 bp, Homo sapiens
atagaaaggcacaga

SEQ ID NO: 1400546 - DNA, 15 bp, Homo sapiens
aatagaaaggcacag

SEQ ID NO: 1400547 - DNA, 15 bp, Homo sapiens
aaatagaaaggcaca

SEQ ID NO: 1400548 - DNA, 15 bp, Homo sapiens
gaaatagaaaggcac

SEQ ID NO: 1400549 - DNA, 15 bp, Homo sapiens
tgaaatagaaaggca

SEQ ID NO: 1400550 - DNA, 15 bp, Homo sapiens
ttgaaatagaaaggc

SEQ ID NO: 1400551 - DNA, 15 bp, Homo sapiens
gttgaaatagaaagg

SEQ ID NO: 1400552 - DNA, 15 bp, Homo sapiens
tgttgaaatagaaag

SEQ ID NO: 1400553 - DNA, 15 bp, Homo sapiens
atgttgaaatagaaa

SEQ ID NO: 1400554 - DNA, 15 bp, Homo sapiens
aatgttgaaatagaa

SEQ ID NO: 1400555 - DNA, 15 bp, Homo sapiens
gaatgttgaaataga

SEQ ID NO: 1400556 - DNA, 15 bp, Homo sapiens
ggaatgttgaaatag

SEQ ID NO: 1400557 - DNA, 15 bp, Homo sapiens
tggaatgttgaaata

SEQ ID NO: 1400558 - DNA, 15 bp, Homo sapiens
ttggaatgttgaaat

SEQ ID NO: 1400559 - DNA, 15 bp, Homo sapiens
tttggaatgttgaaa

SEQ ID NO: 1400560 - DNA, 15 bp, Homo sapiens
atttggaatgttgaa

SEQ ID NO: 1400561 - DNA, 15 bp, Homo sapiens
aatttggaatgttga

SEQ ID NO: 1400562 - DNA, 15 bp, Homo sapiens
gaatttggaatgttg

SEQ ID NO: 1400563 - DNA, 15 bp, Homo sapiens
ggaatttggaatgtt

SEQ ID NO: 1400564 - DNA, 15 bp, Homo sapiens
aggaatttggaatgt

SEQ ID NO: 1400565 - DNA, 15 bp, Homo sapiens
caggaatttggaatg

SEQ ID NO: 1400566 - DNA, 15 bp, Homo sapiens
tcaggaatttggaat

SEQ ID NO: 1400567 - DNA, 15 bp, Homo sapiens
gtcaggaatttggaa

SEQ ID NO: 1400568 - DNA, 15 bp, Homo sapiens
tgtcaggaatttgga

SEQ ID NO: 1400569 - DNA, 15 bp, Homo sapiens
ctgtcaggaatttgg

SEQ ID NO: 1400570 - DNA, 15 bp, Homo sapiens
tctgtcaggaatttg

SEQ ID NO: 1400571 - DNA, 15 bp, Homo sapiens
ctctgtcaggaattt

SEQ ID NO: 1400572 - DNA, 15 bp, Homo sapiens
tctctgtcaggaatt

SEQ ID NO: 1400573 - DNA, 15 bp, Homo sapiens
ctctctgtcaggaat

SEQ ID NO: 1400574 - DNA, 15 bp, Homo sapiens
tctctctgtcaggaa

SEQ ID NO: 1400575 - DNA, 15 bp, Homo sapiens
gtctctctgtcagga

SEQ ID NO: 1400576 - DNA, 15 bp, Homo sapiens
agtctctctgtcagg

SEQ ID NO: 1400577 - DNA, 15 bp, Homo sapiens
gagtctctctgtcag

SEQ ID NO: 1400578 - DNA, 15 bp, Homo sapiens
agagtctctctgtca

SEQ ID NO: 1400579 - DNA, 15 bp, Homo sapiens
cagagtctctctgtc

SEQ ID NO: 1400580 - DNA, 15 bp, Homo sapiens
tcagagtctctctgt

SEQ ID NO: 1400581 - DNA, 15 bp, Homo sapiens
ctcagagtctctctg

SEQ ID NO: 1400582 - DNA, 15 bp, Homo sapiens
actcagagtctctct

SEQ ID NO: 1400583 - DNA, 15 bp, Homo sapiens
tactcagagtctctc

SEQ ID NO: 1400584 - DNA, 15 bp, Homo sapiens
ttactcagagtctct

SEQ ID NO: 1400585 - DNA, 15 bp, Homo sapiens
cttactcagagtctc

SEQ ID NO: 1400586 - DNA, 15 bp, Homo sapiens
gcttactcagagtct

SEQ ID NO: 1400587 - DNA, 15 bp, Homo sapiens
agcttactcagagtc

SEQ ID NO: 1400588 - DNA, 15 bp, Homo sapiens
tagcttactcagagt

SEQ ID NO: 1400589 - DNA, 15 bp, Homo sapiens
ctagcttactcagag

SEQ ID NO: 1400590 - DNA, 15 bp, Homo sapiens
actagcttactcaga

SEQ ID NO: 1400591 - DNA, 15 bp, Homo sapiens
aactagcttactcag

SEQ ID NO: 1400592 - DNA, 15 bp, Homo sapiens
gaactagcttactca

SEQ ID NO: 1400593 - DNA, 15 bp, Homo sapiens
tgaactagcttactc

SEQ ID NO: 1400594 - DNA, 15 bp, Homo sapiens
gtgaactagcttact

SEQ ID NO: 1400595 - DNA, 15 bp, Homo sapiens
tgtgaactagcttac

SEQ ID NO: 1400596 - DNA, 15 bp, Homo sapiens
atgtgaactagctta

SEQ ID NO: 1400597 - DNA, 15 bp, Homo sapiens
aatgtgaactagctt

SEQ ID NO: 1400598 - DNA, 15 bp, Homo sapiens
taatgtgaactagct

SEQ ID NO: 1400599 - DNA, 15 bp, Homo sapiens
ctaatgtgaactagc

SEQ ID NO: 1400600 - DNA, 15 bp, Homo sapiens
actaatgtgaactag

SEQ ID NO: 1400601 - DNA, 15 bp, Homo sapiens
cactaatgtgaacta

SEQ ID NO: 1400602 - DNA, 15 bp, Homo sapiens
acactaatgtgaact

SEQ ID NO: 1400603 - DNA, 15 bp, Homo sapiens
aacactaatgtgaac

SEQ ID NO: 1400604 - DNA, 15 bp, Homo sapiens
aaacactaatgtgaa

SEQ ID NO: 1400605 - DNA, 15 bp, Homo sapiens
caaacactaatgtga

SEQ ID NO: 1400606 - DNA, 15 bp, Homo sapiens
gcaaacactaatgtg

SEQ ID NO: 1400607 - DNA, 15 bp, Homo sapiens
ggcaaacactaatgt

SEQ ID NO: 1400608 - DNA, 15 bp, Homo sapiens
gggcaaacactaatg

SEQ ID NO: 1400609 - DNA, 15 bp, Homo sapiens
agggcaaacactaat

SEQ ID NO: 1400610 - DNA, 15 bp, Homo sapiens
cagggcaaacactaa

SEQ ID NO: 1400611 - DNA, 15 bp, Homo sapiens
tcagggcaaacacta

SEQ ID NO: 1400612 - DNA, 15 bp, Homo sapiens
ctcagggcaaacact

SEQ ID NO: 1400613 - DNA, 15 bp, Homo sapiens
actcagggcaaacac

SEQ ID NO: 1400614 - DNA, 15 bp, Homo sapiens
aactcagggcaaaca

SEQ ID NO: 1400615 - DNA, 15 bp, Homo sapiens
aaactcagggcaaac

SEQ ID NO: 1400616 - DNA, 15 bp, Homo sapiens
taaactcagggcaaa

SEQ ID NO: 1400617 - DNA, 15 bp, Homo sapiens
ttaaactcagggcaa

SEQ ID NO: 1400618 - DNA, 15 bp, Homo sapiens
attaaactcagggca

SEQ ID NO: 1400619 - DNA, 15 bp, Homo sapiens
tattaaactcagggc

SEQ ID NO: 1400620 - DNA, 15 bp, Homo sapiens
ttattaaactcaggg

SEQ ID NO: 1400621 - DNA, 15 bp, Homo sapiens
gttattaaactcagg

SEQ ID NO: 1400622 - DNA, 15 bp, Homo sapiens
cgttattaaactcag

SEQ ID NO: 1400623 - DNA, 15 bp, Homo sapiens
gcgttattaaactca

SEQ ID NO: 1400624 - DNA, 15 bp, Homo sapiens
ggcgttattaaactc

SEQ ID NO: 1400625 - DNA, 15 bp, Homo sapiens
gggcgttattaaact

SEQ ID NO: 1400626 - DNA, 15 bp, Homo sapiens
cgggcgttattaaac

SEQ ID NO: 1400627 - DNA, 15 bp, Homo sapiens
gcgggcgttattaaa

SEQ ID NO: 1400628 - DNA, 15 bp, Homo sapiens
ggcgggcgttattaa

SEQ ID NO: 1400629 - DNA, 15 bp, Homo sapiens
tggcgggcgttatta

SEQ ID NO: 1400630 - DNA, 15 bp, Homo sapiens
ctggcgggcgttatt

SEQ ID NO: 1400631 - DNA, 15 bp, Homo sapiens
cctggcgggcgttat

SEQ ID NO: 1400632 - DNA, 15 bp, Homo sapiens
gcctggcgggcgtta

SEQ ID NO: 1400633 - DNA, 15 bp, Homo sapiens
tgcctggcgggcgtt

SEQ ID NO: 1400634 - DNA, 15 bp, Homo sapiens
gtgcctggcgggcgt

SEQ ID NO: 1400635 - DNA, 15 bp, Homo sapiens
tgtgcctggcgggcg

SEQ ID NO: 1400636 - DNA, 15 bp, Homo sapiens
ctgtgcctggcgggc

SEQ ID NO: 1400637 - DNA, 15 bp, Homo sapiens
actgtgcctggcggg

SEQ ID NO: 1400638 - DNA, 15 bp, Homo sapiens
cactgtgcctggcgg

SEQ ID NO: 1400639 - DNA, 15 bp, Homo sapiens
ctgagccactgtgcc

SEQ ID NO: 1400640 - DNA, 15 bp, Homo sapiens
cctgagccactgtgc

SEQ ID NO: 1400641 - DNA, 15 bp, Homo sapiens
gcctgagccactgtg

SEQ ID NO: 1400642 - DNA, 15 bp, Homo sapiens
ggcctgagccactgt

SEQ ID NO: 1400643 - DNA, 15 bp, Homo sapiens
aggcctgagccactg

SEQ ID NO: 1400644 - DNA, 15 bp, Homo sapiens
caggcctgagccact

SEQ ID NO: 1400645 - DNA, 15 bp, Homo sapiens
acttggcctcccaaa

SEQ ID NO: 1400646 - DNA, 15 bp, Homo sapiens
gacttggcctcccaa

SEQ ID NO: 1400647 - DNA, 15 bp, Homo sapiens
tgacttggcctccca

SEQ ID NO: 1400648 - DNA, 15 bp, Homo sapiens
ctgacttggcctccc

SEQ ID NO: 1400649 - DNA, 15 bp, Homo sapiens
cctgacttggcctcc

SEQ ID NO: 1400650 - DNA, 15 bp, Homo sapiens
acctgacttggcctc

SEQ ID NO: 1400651 - DNA, 15 bp, Homo sapiens
cacctgacttggcct

SEQ ID NO: 1400652 - DNA, 15 bp, Homo sapiens
ccacctgacttggcc

SEQ ID NO: 1400653 - DNA, 15 bp, Homo sapiens
tccacctgacttggc

SEQ ID NO: 1400654 - DNA, 15 bp, Homo sapiens
atccacctgacttgg

SEQ ID NO: 1400655 - DNA, 15 bp, Homo sapiens
gatccacctgacttg

SEQ ID NO: 1400656 - DNA, 15 bp, Homo sapiens
tgatccacctgactt

SEQ ID NO: 1400657 - DNA, 15 bp, Homo sapiens
gtgatccacctgact

SEQ ID NO: 1400658 - DNA, 15 bp, Homo sapiens
cgtgatccacctgac

SEQ ID NO: 1400659 - DNA, 15 bp, Homo sapiens
tcgtgatccacctga

SEQ ID NO: 1400660 - DNA, 15 bp, Homo sapiens
atcttgaactcctga

SEQ ID NO: 1400661 - DNA, 15 bp, Homo sapiens
gatcttgaactcctg

SEQ ID NO: 1400662 - DNA, 15 bp, Homo sapiens
tgatcttgaactcct

SEQ ID NO: 1400663 - DNA, 15 bp, Homo sapiens
ctgatcttgaactcc

SEQ ID NO: 1400664 - DNA, 15 bp, Homo sapiens
gctgatcttgaactc

SEQ ID NO: 1400665 - DNA, 15 bp, Homo sapiens
ggctgatcttgaact

SEQ ID NO: 1400666 - DNA, 15 bp, Homo sapiens
aggctgatcttgaac

SEQ ID NO: 1400667 - DNA, 15 bp, Homo sapiens
caggctgatcttgaa

SEQ ID NO: 1400668 - DNA, 15 bp, Homo sapiens
ccaggctgatcttga

SEQ ID NO: 1400669 - DNA, 15 bp, Homo sapiens
gccaggctgatcttg

SEQ ID NO: 1400670 - DNA, 15 bp, Homo sapiens
ggccaggctgatctt

SEQ ID NO: 1400671 - DNA, 15 bp, Homo sapiens
cttggccaggctgat

SEQ ID NO: 1400672 - DNA, 15 bp, Homo sapiens
tcttggccaggctga

SEQ ID NO: 1400673 - DNA, 15 bp, Homo sapiens
gggggtttcaccatc

SEQ ID NO: 1400674 - DNA, 15 bp, Homo sapiens
cgggggtttcaccat

SEQ ID NO: 1400675 - DNA, 15 bp, Homo sapiens
acgggggtttcacca

SEQ ID NO: 1400676 - DNA, 15 bp, Homo sapiens
gacgggggtttcacc

SEQ ID NO: 1400677 - DNA, 15 bp, Homo sapiens
tcaccaccacgcccg

SEQ ID NO: 1400678 - DNA, 15 bp, Homo sapiens
ctcaccaccacgccc

SEQ ID NO: 1400679 - DNA, 15 bp, Homo sapiens
gctcaccaccacgcc

SEQ ID NO: 1400680 - DNA, 15 bp, Homo sapiens
cgctcaccaccacgc

SEQ ID NO: 1400681 - DNA, 15 bp, Homo sapiens
gcgctcaccaccacg

SEQ ID NO: 1400682 - DNA, 15 bp, Homo sapiens
ggcgctcaccaccac

SEQ ID NO: 1400683 - DNA, 15 bp, Homo sapiens
aggcgctcaccacca

SEQ ID NO: 1400684 - DNA, 15 bp, Homo sapiens
caggcgctcaccacc

SEQ ID NO: 1400685 - DNA, 15 bp, Homo sapiens
acaggcgctcaccac

SEQ ID NO: 1400686 - DNA, 15 bp, Homo sapiens
tacaggcgctcacca

SEQ ID NO: 1400687 - DNA, 15 bp, Homo sapiens
ttacaggcgctcacc

SEQ ID NO: 1400688 - DNA, 15 bp, Homo sapiens
attacaggcgctcac

SEQ ID NO: 1400689 - DNA, 15 bp, Homo sapiens
gattacaggcgctca

SEQ ID NO: 1400690 - DNA, 15 bp, Homo sapiens
ggattacaggcgctc

SEQ ID NO: 1400691 - DNA, 15 bp, Homo sapiens
tggattacaggcgct

SEQ ID NO: 1400692 - DNA, 15 bp, Homo sapiens
ttggattacaggcgc

SEQ ID NO: 1400693 - DNA, 15 bp, Homo sapiens
cttggattacaggcg

SEQ ID NO: 1400694 - DNA, 15 bp, Homo sapiens
gcttggattacaggc

SEQ ID NO: 1400695 - DNA, 15 bp, Homo sapiens
agcttggattacagg

SEQ ID NO: 1400696 - DNA, 15 bp, Homo sapiens
tagcttggattacag

SEQ ID NO: 1400697 - DNA, 15 bp, Homo sapiens
gtagcttggattaca

SEQ ID NO: 1400698 - DNA, 15 bp, Homo sapiens
agtagcttggattac

SEQ ID NO: 1400699 - DNA, 15 bp, Homo sapiens
gagtagcttggatta

SEQ ID NO: 1400700 - DNA, 15 bp, Homo sapiens
cgagtagcttggatt

SEQ ID NO: 1400701 - DNA, 15 bp, Homo sapiens
ccgagtagcttggat

SEQ ID NO: 1400702 - DNA, 15 bp, Homo sapiens
cccgagtagcttgga

SEQ ID NO: 1400703 - DNA, 15 bp, Homo sapiens
tcccgagtagcttgg

SEQ ID NO: 1400704 - DNA, 15 bp, Homo sapiens
ctcccgagtagcttg

SEQ ID NO: 1400705 - DNA, 15 bp, Homo sapiens
cctcccgagtagctt

SEQ ID NO: 1400706 - DNA, 15 bp, Homo sapiens
tgcctcccgagtagc

SEQ ID NO: 1400707 - DNA, 15 bp, Homo sapiens
ctgcctcccgagtag

SEQ ID NO: 1400708 - DNA, 15 bp, Homo sapiens
tctgcctcccgagta

SEQ ID NO: 1400709 - DNA, 15 bp, Homo sapiens
ctctgcctcccgagt

SEQ ID NO: 1400710 - DNA, 15 bp, Homo sapiens
cctctgcctcccgag

SEQ ID NO: 1400711 - DNA, 15 bp, Homo sapiens
catctcagctcactg

SEQ ID NO: 1400712 - DNA, 15 bp, Homo sapiens
ccatctcagctcact

SEQ ID NO: 1400713 - DNA, 15 bp, Homo sapiens
gccatctcagctcac

SEQ ID NO: 1400714 - DNA, 15 bp, Homo sapiens
cgccatctcagctca

SEQ ID NO: 1400715 - DNA, 15 bp, Homo sapiens
gcgccatctcagctc

SEQ ID NO: 1400716 - DNA, 15 bp, Homo sapiens
ggcgccatctcagct

SEQ ID NO: 1400717 - DNA, 15 bp, Homo sapiens
tggcgccatctcagc

SEQ ID NO: 1400718 - DNA, 15 bp, Homo sapiens
gtggcgccatctcag

SEQ ID NO: 1400719 - DNA, 15 bp, Homo sapiens
agtggcgccatctca

SEQ ID NO: 1400720 - DNA, 15 bp, Homo sapiens
acagtggcgccatct

SEQ ID NO: 1400721 - DNA, 15 bp, Homo sapiens
tacagtggcgccatc

SEQ ID NO: 1400722 - DNA, 15 bp, Homo sapiens
gtacagtggcgccat

SEQ ID NO: 1400723 - DNA, 15 bp, Homo sapiens
agtacagtggcgcca

SEQ ID NO: 1400724 - DNA, 15 bp, Homo sapiens
gagtacagtggcgcc

SEQ ID NO: 1400725 - DNA, 15 bp, Homo sapiens
gccaggctggagtac

SEQ ID NO: 1400726 - DNA, 15 bp, Homo sapiens
tgccaggctggagta

SEQ ID NO: 1400727 - DNA, 15 bp, Homo sapiens
ctgccaggctggagt

SEQ ID NO: 1400728 - DNA, 15 bp, Homo sapiens
tctgccaggctggag

SEQ ID NO: 1400729 - DNA, 15 bp, Homo sapiens
ttctgccaggctgga

SEQ ID NO: 1400730 - DNA, 15 bp, Homo sapiens
attctgccaggctgg

SEQ ID NO: 1400731 - DNA, 15 bp, Homo sapiens
cattctgccaggctg

SEQ ID NO: 1400732 - DNA, 15 bp, Homo sapiens
tcattctgccaggct

SEQ ID NO: 1400733 - DNA, 15 bp, Homo sapiens
ctcattctgccaggc

SEQ ID NO: 1400734 - DNA, 15 bp, Homo sapiens
tctcattctgccagg

SEQ ID NO: 1400735 - DNA, 15 bp, Homo sapiens
gtctcattctgccag

SEQ ID NO: 1400736 - DNA, 15 bp, Homo sapiens
agtctcattctgcca

SEQ ID NO: 1400737 - DNA, 15 bp, Homo sapiens
gagtctcattctgcc

SEQ ID NO: 1400738 - DNA, 15 bp, Homo sapiens
ggagtctcattctgc

SEQ ID NO: 1400739 - DNA, 15 bp, Homo sapiens
attttgagacggagt

SEQ ID NO: 1400740 - DNA, 15 bp, Homo sapiens
tattttgagacggag

SEQ ID NO: 1400741 - DNA, 15 bp, Homo sapiens
ttattttgagacgga

SEQ ID NO: 1400742 - DNA, 15 bp, Homo sapiens
tttattttgagacgg

SEQ ID NO: 1400743 - DNA, 15 bp, Homo sapiens
atttattttgagacg

SEQ ID NO: 1400744 - DNA, 15 bp, Homo sapiens
tatttattttgagac

SEQ ID NO: 1400745 - DNA, 15 bp, Homo sapiens
ttatttattttgaga

SEQ ID NO: 1400746 - DNA, 15 bp, Homo sapiens
tttatttattttgag

SEQ ID NO: 1400747 - DNA, 15 bp, Homo sapiens
atttatttattttga

SEQ ID NO: 1400748 - DNA, 15 bp, Homo sapiens
tatttatttattttg

SEQ ID NO: 1400749 - DNA, 15 bp, Homo sapiens
ttgtttatttattta

SEQ ID NO: 1400750 - DNA, 15 bp, Homo sapiens
tttgtttatttattt

SEQ ID NO: 1400751 - DNA, 15 bp, Homo sapiens
ttttgtttatttatt

SEQ ID NO: 1400752 - DNA, 15 bp, Homo sapiens
tttttgtttatttat

SEQ ID NO: 1400753 - DNA, 15 bp, Homo sapiens
ttttttgtttattta

SEQ ID NO: 1400754 - DNA, 15 bp, Homo sapiens
attttttgtttattt

SEQ ID NO: 1400755 - DNA, 15 bp, Homo sapiens
tattttttgtttatt

SEQ ID NO: 1400756 - DNA, 15 bp, Homo sapiens
ttattttttgtttat

SEQ ID NO: 1400757 - DNA, 15 bp, Homo sapiens
tttattttttgttta

SEQ ID NO: 1400758 - DNA, 15 bp, Homo sapiens
atttattttttgttt

SEQ ID NO: 1400759 - DNA, 15 bp, Homo sapiens
tatttattttttgtt

SEQ ID NO: 1400760 - DNA, 15 bp, Homo sapiens
ttatttattttttgt

SEQ ID NO: 1400761 - DNA, 15 bp, Homo sapiens
attatttattttttg

SEQ ID NO: 1400762 - DNA, 15 bp, Homo sapiens
gattatttatttttt

SEQ ID NO: 1400763 - DNA, 15 bp, Homo sapiens
tgattatttattttt

SEQ ID NO: 1400764 - DNA, 15 bp, Homo sapiens
ttgattatttatttt

SEQ ID NO: 1400765 - DNA, 15 bp, Homo sapiens
tttgattatttattt

SEQ ID NO: 1400766 - DNA, 15 bp, Homo sapiens
ctttgattatttatt

SEQ ID NO: 1400767 - DNA, 15 bp, Homo sapiens
cctttgattatttat

SEQ ID NO: 1400768 - DNA, 15 bp, Homo sapiens
gcctttgattattta

SEQ ID NO: 1400769 - DNA, 15 bp, Homo sapiens
ggcctttgattattt

SEQ ID NO: 1400770 - DNA, 15 bp, Homo sapiens
tggcctttgattatt

SEQ ID NO: 1400771 - DNA, 15 bp, Homo sapiens
ctggcctttgattat

SEQ ID NO: 1400772 - DNA, 15 bp, Homo sapiens
cctggcctttgatta

SEQ ID NO: 1400773 - DNA, 15 bp, Homo sapiens
tcctggcctttgatt

SEQ ID NO: 1400774 - DNA, 15 bp, Homo sapiens
ctcctggcctttgat

SEQ ID NO: 1400775 - DNA, 15 bp, Homo sapiens
cctcctggcctttga

SEQ ID NO: 1400776 - DNA, 15 bp, Homo sapiens
tcctcctggcctttg

SEQ ID NO: 1400777 - DNA, 15 bp, Homo sapiens
gtcctcctggccttt

SEQ ID NO: 1400778 - DNA, 15 bp, Homo sapiens
tgtcctcctggcctt

SEQ ID NO: 1400779 - DNA, 15 bp, Homo sapiens
ctgtcctcctggcct

SEQ ID NO: 1400780 - DNA, 15 bp, Homo sapiens
cctgtcctcctggcc

SEQ ID NO: 1400781 - DNA, 15 bp, Homo sapiens
tcctgtcctcctggc

SEQ ID NO: 1400782 - DNA, 15 bp, Homo sapiens
atcctgtcctcctgg

SEQ ID NO: 1400783 - DNA, 15 bp, Homo sapiens
gatcctgtcctcctg

SEQ ID NO: 1400784 - DNA, 15 bp, Homo sapiens
tgatcctgtcctcct

SEQ ID NO: 1400785 - DNA, 15 bp, Homo sapiens
atgatcctgtcctcc

SEQ ID NO: 1400786 - DNA, 15 bp, Homo sapiens
tatgatcctgtcctc

SEQ ID NO: 1400787 - DNA, 15 bp, Homo sapiens
atatgatcctgtcct

SEQ ID NO: 1400788 - DNA, 15 bp, Homo sapiens
tatatgatcctgtcc

SEQ ID NO: 1400789 - DNA, 15 bp, Homo sapiens
ttatatgatcctgtc

SEQ ID NO: 1400790 - DNA, 15 bp, Homo sapiens
attatatgatcctgt

SEQ ID NO: 1400791 - DNA, 15 bp, Homo sapiens
tattatatgatcctg

SEQ ID NO: 1400792 - DNA, 15 bp, Homo sapiens
gtattatatgatcct

SEQ ID NO: 1400793 - DNA, 15 bp, Homo sapiens
tgtattatatgatcc

SEQ ID NO: 1400794 - DNA, 15 bp, Homo sapiens
ctgtattatatgatc

SEQ ID NO: 1400795 - DNA, 15 bp, Homo sapiens
tctgtattatatgat

SEQ ID NO: 1400796 - DNA, 15 bp, Homo sapiens
atctgtattatatga

SEQ ID NO: 1400797 - DNA, 15 bp, Homo sapiens
catctgtattatatg

SEQ ID NO: 1400798 - DNA, 15 bp, Homo sapiens
acatctgtattatat

SEQ ID NO: 1400799 - DNA, 15 bp, Homo sapiens
cacatctgtattata

SEQ ID NO: 1400800 - DNA, 15 bp, Homo sapiens
ccacatctgtattat

SEQ ID NO: 1400801 - DNA, 15 bp, Homo sapiens
gccacatctgtatta

SEQ ID NO: 1400802 - DNA, 15 bp, Homo sapiens
agccacatctgtatt

SEQ ID NO: 1400803 - DNA, 15 bp, Homo sapiens
cagccacatctgtat

SEQ ID NO: 1400804 - DNA, 15 bp, Homo sapiens
tcagccacatctgta

SEQ ID NO: 1400805 - DNA, 15 bp, Homo sapiens
ttcagccacatctgt

SEQ ID NO: 1400806 - DNA, 15 bp, Homo sapiens
cttcagccacatctg

SEQ ID NO: 1400807 - DNA, 15 bp, Homo sapiens
ccttcagccacatct

SEQ ID NO: 1400808 - DNA, 15 bp, Homo sapiens
cccttcagccacatc

SEQ ID NO: 1400809 - DNA, 15 bp, Homo sapiens
tcccttcagccacat

SEQ ID NO: 1400810 - DNA, 15 bp, Homo sapiens
gtcccttcagccaca

SEQ ID NO: 1400811 - DNA, 15 bp, Homo sapiens
ggtcccttcagccac

SEQ ID NO: 1400812 - DNA, 15 bp, Homo sapiens
gggtcccttcagcca

SEQ ID NO: 1400813 - DNA, 15 bp, Homo sapiens
tgggtcccttcagcc

SEQ ID NO: 1400814 - DNA, 15 bp, Homo sapiens
atgggtcccttcagc

SEQ ID NO: 1400815 - DNA, 15 bp, Homo sapiens
aatgggtcccttcag

SEQ ID NO: 1400816 - DNA, 15 bp, Homo sapiens
aaatgggtcccttca

SEQ ID NO: 1400817 - DNA, 15 bp, Homo sapiens
gaaatgggtcccttc

SEQ ID NO: 1400818 - DNA, 15 bp, Homo sapiens
tgaaatgggtccctt

SEQ ID NO: 1400819 - DNA, 15 bp, Homo sapiens
ctgaaatgggtccct

SEQ ID NO: 1400820 - DNA, 15 bp, Homo sapiens
actgaaatgggtccc

SEQ ID NO: 1400821 - DNA, 15 bp, Homo sapiens
cactgaaatgggtcc

SEQ ID NO: 1400822 - DNA, 15 bp, Homo sapiens
acactgaaatgggtc

SEQ ID NO: 1400823 - DNA, 15 bp, Homo sapiens
gacactgaaatgggt

SEQ ID NO: 1400824 - DNA, 15 bp, Homo sapiens
agacactgaaatggg

SEQ ID NO: 1400825 - DNA, 15 bp, Homo sapiens
cagacactgaaatgg

SEQ ID NO: 1400826 - DNA, 15 bp, Homo sapiens
tcagacactgaaatg

SEQ ID NO: 1400827 - DNA, 15 bp, Homo sapiens
atcagacactgaaat

SEQ ID NO: 1400828 - DNA, 15 bp, Homo sapiens
aatcagacactgaaa

SEQ ID NO: 1400829 - DNA, 15 bp, Homo sapiens
caatcagacactgaa

SEQ ID NO: 1400830 - DNA, 15 bp, Homo sapiens
gcaatcagacactga

SEQ ID NO: 1400831 - DNA, 15 bp, Homo sapiens
tgcaatcagacactg

SEQ ID NO: 1400832 - DNA, 15 bp, Homo sapiens
ctgcaatcagacact

SEQ ID NO: 1400833 - DNA, 15 bp, Homo sapiens
cctgcaatcagacac

SEQ ID NO: 1400834 - DNA, 15 bp, Homo sapiens
ccctgcaatcagaca

SEQ ID NO: 1400835 - DNA, 15 bp, Homo sapiens
tccctgcaatcagac

SEQ ID NO: 1400836 - DNA, 15 bp, Homo sapiens
ctccctgcaatcaga

SEQ ID NO: 1400837 - DNA, 15 bp, Homo sapiens
cctccctgcaatcag

SEQ ID NO: 1400838 - DNA, 15 bp, Homo sapiens
tcctccctgcaatca

SEQ ID NO: 1400839 - DNA, 15 bp, Homo sapiens
ctcctccctgcaatc

SEQ ID NO: 1400840 - DNA, 15 bp, Homo sapiens
cctcctccctgcaat

SEQ ID NO: 1400841 - DNA, 15 bp, Homo sapiens
ccctcctccctgcaa

SEQ ID NO: 1400842 - DNA, 15 bp, Homo sapiens
cccctcctccctgca

SEQ ID NO: 1400843 - DNA, 15 bp, Homo sapiens
tcccctcctccctgc

SEQ ID NO: 1400844 - DNA, 15 bp, Homo sapiens
ttcccctcctccctg

SEQ ID NO: 1400845 - DNA, 15 bp, Homo sapiens
tttcccctcctccct

SEQ ID NO: 1400846 - DNA, 15 bp, Homo sapiens
gtttcccctcctccc

SEQ ID NO: 1400847 - DNA, 15 bp, Homo sapiens
agtttcccctcctcc

SEQ ID NO: 1400848 - DNA, 15 bp, Homo sapiens
gagtttcccctcctc

SEQ ID NO: 1400849 - DNA, 15 bp, Homo sapiens
ggagtttcccctcct

SEQ ID NO: 1400850 - DNA, 15 bp, Homo sapiens
gggagtttcccctcc

SEQ ID NO: 1400851 - DNA, 15 bp, Homo sapiens
tgggagtttcccctc

SEQ ID NO: 1400852 - DNA, 15 bp, Homo sapiens
ctgggagtttcccct

SEQ ID NO: 1400853 - DNA, 15 bp, Homo sapiens
cctgggagtttcccc

SEQ ID NO: 1400854 - DNA, 15 bp, Homo sapiens
tcctgggagtttccc

SEQ ID NO: 1400855 - DNA, 15 bp, Homo sapiens
ttcctgggagtttcc

SEQ ID NO: 1400856 - DNA, 15 bp, Homo sapiens
tttcctgggagtttc

SEQ ID NO: 1400857 - DNA, 15 bp, Homo sapiens
ttttcctgggagttt

SEQ ID NO: 1400858 - DNA, 15 bp, Homo sapiens
cttttcctgggagtt

SEQ ID NO: 1400859 - DNA, 15 bp, Homo sapiens
tcttttcctgggagt

SEQ ID NO: 1400860 - DNA, 15 bp, Homo sapiens
ctcttttcctgggag

SEQ ID NO: 1400861 - DNA, 15 bp, Homo sapiens
cctcttttcctggga

SEQ ID NO: 1400862 - DNA, 15 bp, Homo sapiens
tcctcttttcctggg

SEQ ID NO: 1400863 - DNA, 15 bp, Homo sapiens
gtcctcttttcctgg

SEQ ID NO: 1400864 - DNA, 15 bp, Homo sapiens
ggtcctcttttcctg

SEQ ID NO: 1400865 - DNA, 15 bp, Homo sapiens
aggtcctcttttcct

SEQ ID NO: 1400866 - DNA, 15 bp, Homo sapiens
caggtcctcttttcc

SEQ ID NO: 1400867 - DNA, 15 bp, Homo sapiens
acaggtcctcttttc

SEQ ID NO: 1400868 - DNA, 15 bp, Homo sapiens
cacaggtcctctttt

SEQ ID NO: 1400869 - DNA, 15 bp, Homo sapiens
tcacaggtcctcttt

SEQ ID NO: 1400870 - DNA, 15 bp, Homo sapiens
ctcacaggtcctctt

SEQ ID NO: 1400871 - DNA, 15 bp, Homo sapiens
gctcacaggtcctct

SEQ ID NO: 1400872 - DNA, 15 bp, Homo sapiens
agctcacaggtcctc

SEQ ID NO: 1400873 - DNA, 15 bp, Homo sapiens
tagctcacaggtcct

SEQ ID NO: 1400874 - DNA, 15 bp, Homo sapiens
ctagctcacaggtcc

SEQ ID NO: 1400875 - DNA, 15 bp, Homo sapiens
cctagctcacaggtc

SEQ ID NO: 1400876 - DNA, 15 bp, Homo sapiens
gcctagctcacaggt

SEQ ID NO: 1400877 - DNA, 15 bp, Homo sapiens
tgcctagctcacagg

SEQ ID NO: 1400878 - DNA, 15 bp, Homo sapiens
ctgcctagctcacag

SEQ ID NO: 1400879 - DNA, 15 bp, Homo sapiens
cctgcctagctcaca

SEQ ID NO: 1400880 - DNA, 15 bp, Homo sapiens
acctgcctagctcac

SEQ ID NO: 1400881 - DNA, 15 bp, Homo sapiens
tacctgcctagctca

SEQ ID NO: 1400882 - DNA, 15 bp, Homo sapiens
gtacctgcctagctc

SEQ ID NO: 1400883 - DNA, 15 bp, Homo sapiens
tgtacctgcctagct

SEQ ID NO: 1400884 - DNA, 15 bp, Homo sapiens
gtgtacctgcctagc

SEQ ID NO: 1400885 - DNA, 15 bp, Homo sapiens
tgtgtacctgcctag

SEQ ID NO: 1400886 - DNA, 15 bp, Homo sapiens
ttgtgtacctgccta

SEQ ID NO: 1400887 - DNA, 15 bp, Homo sapiens
attgtgtacctgcct

SEQ ID NO: 1400888 - DNA, 15 bp, Homo sapiens
tattgtgtacctgcc

SEQ ID NO: 1400889 - DNA, 15 bp, Homo sapiens
gtattgtgtacctgc

SEQ ID NO: 1400890 - DNA, 15 bp, Homo sapiens
cgtattgtgtacctg

SEQ ID NO: 1400891 - DNA, 15 bp, Homo sapiens
acgtattgtgtacct

SEQ ID NO: 1400892 - DNA, 15 bp, Homo sapiens
cacgtattgtgtacc

SEQ ID NO: 1400893 - DNA, 15 bp, Homo sapiens
acacgtattgtgtac

SEQ ID NO: 1400894 - DNA, 15 bp, Homo sapiens
cacacgtattgtgta

SEQ ID NO: 1400895 - DNA, 15 bp, Homo sapiens
tcacacgtattgtgt

SEQ ID NO: 1400896 - DNA, 15 bp, Homo sapiens
ttcacacgtattgtg

SEQ ID NO: 1400897 - DNA, 15 bp, Homo sapiens
attcacacgtattgt

SEQ ID NO: 1400898 - DNA, 15 bp, Homo sapiens
cattcacacgtattg

SEQ ID NO: 1400899 - DNA, 15 bp, Homo sapiens
tcattcacacgtatt

SEQ ID NO: 1400900 - DNA, 15 bp, Homo sapiens
ttcattcacacgtat

SEQ ID NO: 1400901 - DNA, 15 bp, Homo sapiens
tttcattcacacgta

SEQ ID NO: 1400902 - DNA, 15 bp, Homo sapiens
atttcattcacacgt

SEQ ID NO: 1400903 - DNA, 15 bp, Homo sapiens
catttcattcacacg

SEQ ID NO: 1400904 - DNA, 15 bp, Homo sapiens
gcatttcattcacac

SEQ ID NO: 1400905 - DNA, 15 bp, Homo sapiens
tgcatttcattcaca

SEQ ID NO: 1400906 - DNA, 15 bp, Homo sapiens
ttgcatttcattcac

SEQ ID NO: 1400907 - DNA, 15 bp, Homo sapiens
cttgcatttcattca

SEQ ID NO: 1400908 - DNA, 15 bp, Homo sapiens
gcttgcatttcattc

SEQ ID NO: 1400909 - DNA, 15 bp, Homo sapiens
tgcttgcatttcatt

SEQ ID NO: 1400910 - DNA, 15 bp, Homo sapiens
ctgcttgcatttcat

SEQ ID NO: 1400911 - DNA, 15 bp, Homo sapiens
actgcttgcatttca

SEQ ID NO: 1400912 - DNA, 15 bp, Homo sapiens
cactgcttgcatttc

SEQ ID NO: 1400913 - DNA, 15 bp, Homo sapiens
tcactgcttgcattt

SEQ ID NO: 1400914 - DNA, 15 bp, Homo sapiens
atcactgcttgcatt

SEQ ID NO: 1400915 - DNA, 15 bp, Homo sapiens
tatcactgcttgcat

SEQ ID NO: 1400916 - DNA, 15 bp, Homo sapiens
gtatcactgcttgca

SEQ ID NO: 1400917 - DNA, 15 bp, Homo sapiens
cgtatcactgcttgc

SEQ ID NO: 1400918 - DNA, 15 bp, Homo sapiens
ccgtatcactgcttg

SEQ ID NO: 1400919 - DNA, 15 bp, Homo sapiens
cccgtatcactgctt

SEQ ID NO: 1400920 - DNA, 15 bp, Homo sapiens
ccccgtatcactgct

SEQ ID NO: 1400921 - DNA, 15 bp, Homo sapiens
gccccgtatcactgc

SEQ ID NO: 1400922 - DNA, 15 bp, Homo sapiens
tgccccgtatcactg

SEQ ID NO: 1400923 - DNA, 15 bp, Homo sapiens
ctgccccgtatcact

SEQ ID NO: 1400924 - DNA, 15 bp, Homo sapiens
cctgccccgtatcac

SEQ ID NO: 1400925 - DNA, 15 bp, Homo sapiens
ccctgccccgtatca

SEQ ID NO: 1400926 - DNA, 15 bp, Homo sapiens
tccctgccccgtatc

SEQ ID NO: 1400927 - DNA, 15 bp, Homo sapiens
ctccctgccccgtat

SEQ ID NO: 1400928 - DNA, 15 bp, Homo sapiens
cctccctgccccgta

SEQ ID NO: 1400929 - DNA, 15 bp, Homo sapiens
acctccctgccccgt

SEQ ID NO: 1400930 - DNA, 15 bp, Homo sapiens
aacctccctgccccg

SEQ ID NO: 1400931 - DNA, 15 bp, Homo sapiens
gaacctccctgcccc

SEQ ID NO: 1400932 - DNA, 15 bp, Homo sapiens
agaacctccctgccc

SEQ ID NO: 1400933 - DNA, 15 bp, Homo sapiens
aagaacctccctgcc

SEQ ID NO: 1400934 - DNA, 15 bp, Homo sapiens
gaagaacctccctgc

SEQ ID NO: 1400935 - DNA, 15 bp, Homo sapiens
tgaagaacctccctg

SEQ ID NO: 1400936 - DNA, 15 bp, Homo sapiens
ctgaagaacctccct

SEQ ID NO: 1400937 - DNA, 15 bp, Homo sapiens
cctgaagaacctccc

SEQ ID NO: 1400938 - DNA, 15 bp, Homo sapiens
gcctgaagaacctcc

SEQ ID NO: 1400939 - DNA, 15 bp, Homo sapiens
tgcctgaagaacctc

SEQ ID NO: 1400940 - DNA, 15 bp, Homo sapiens
ttgcctgaagaacct

SEQ ID NO: 1400941 - DNA, 15 bp, Homo sapiens
tttgcctgaagaacc

SEQ ID NO: 1400942 - DNA, 15 bp, Homo sapiens
ttttgcctgaagaac

SEQ ID NO: 1400943 - DNA, 15 bp, Homo sapiens
gttttgcctgaagaa

SEQ ID NO: 1400944 - DNA, 15 bp, Homo sapiens
cgttttgcctgaaga

SEQ ID NO: 1400945 - DNA, 15 bp, Homo sapiens
tcgttttgcctgaag

SEQ ID NO: 1400946 - DNA, 15 bp, Homo sapiens
ttcgttttgcctgaa

SEQ ID NO: 1400947 - DNA, 15 bp, Homo sapiens
gttcgttttgcctga

SEQ ID NO: 1400948 - DNA, 15 bp, Homo sapiens
tgttcgttttgcctg

SEQ ID NO: 1400949 - DNA, 15 bp, Homo sapiens
ctgttcgttttgcct

SEQ ID NO: 1400950 - DNA, 15 bp, Homo sapiens
gctgttcgttttgcc

SEQ ID NO: 1400951 - DNA, 15 bp, Homo sapiens
cgctgttcgttttgc

SEQ ID NO: 1400952 - DNA, 15 bp, Homo sapiens
acgctgttcgttttg

SEQ ID NO: 1400953 - DNA, 15 bp, Homo sapiens
cacgctgttcgtttt

SEQ ID NO: 1400954 - DNA, 15 bp, Homo sapiens
tcacgctgttcgttt

SEQ ID NO: 1400955 - DNA, 15 bp, Homo sapiens
ttcacgctgttcgtt

SEQ ID NO: 1400956 - DNA, 15 bp, Homo sapiens
tttcacgctgttcgt

SEQ ID NO: 1400957 - DNA, 15 bp, Homo sapiens
ctttcacgctgttcg

SEQ ID NO: 1400958 - DNA, 15 bp, Homo sapiens
gctttcacgctgttc

SEQ ID NO: 1400959 - DNA, 15 bp, Homo sapiens
tgctttcacgctgtt

SEQ ID NO: 1400960 - DNA, 15 bp, Homo sapiens
ctgctttcacgctgt

SEQ ID NO: 1400961 - DNA, 15 bp, Homo sapiens
tctgctttcacgctg

SEQ ID NO: 1400962 - DNA, 15 bp, Homo sapiens
ttctgctttcacgct

SEQ ID NO: 1400963 - DNA, 15 bp, Homo sapiens
tttctgctttcacgc

SEQ ID NO: 1400964 - DNA, 15 bp, Homo sapiens
ctttctgctttcacg

SEQ ID NO: 1400965 - DNA, 15 bp, Homo sapiens
cctttctgctttcac

SEQ ID NO: 1400966 - DNA, 15 bp, Homo sapiens
gcctttctgctttca

SEQ ID NO: 1400967 - DNA, 15 bp, Homo sapiens
tgcctttctgctttc

SEQ ID NO: 1400968 - DNA, 15 bp, Homo sapiens
atgcctttctgcttt

SEQ ID NO: 1400969 - DNA, 15 bp, Homo sapiens
tatgcctttctgctt

SEQ ID NO: 1400970 - DNA, 15 bp, Homo sapiens
ctatgcctttctgct

SEQ ID NO: 1400971 - DNA, 15 bp, Homo sapiens
cctatgcctttctgc

SEQ ID NO: 1400972 - DNA, 15 bp, Homo sapiens
ccctatgcctttctg

SEQ ID NO: 1400973 - DNA, 15 bp, Homo sapiens
gccctatgcctttct

SEQ ID NO: 1400974 - DNA, 15 bp, Homo sapiens
agccctatgcctttc

SEQ ID NO: 1400975 - DNA, 15 bp, Homo sapiens
cagccctatgccttt

SEQ ID NO: 1400976 - DNA, 15 bp, Homo sapiens
tcagccctatgcctt

SEQ ID NO: 1400977 - DNA, 15 bp, Homo sapiens
ttcagccctatgcct

SEQ ID NO: 1400978 - DNA, 15 bp, Homo sapiens
cttcagccctatgcc

SEQ ID NO: 1400979 - DNA, 15 bp, Homo sapiens
ccttcagccctatgc

SEQ ID NO: 1400980 - DNA, 15 bp, Homo sapiens
gccttcagccctatg

SEQ ID NO: 1400981 - DNA, 15 bp, Homo sapiens
agccttcagccctat

SEQ ID NO: 1400982 - DNA, 15 bp, Homo sapiens
aagccttcagcccta

SEQ ID NO: 1400983 - DNA, 15 bp, Homo sapiens
caagccttcagccct

SEQ ID NO: 1400984 - DNA, 15 bp, Homo sapiens
tcaagccttcagccc

SEQ ID NO: 1400985 - DNA, 15 bp, Homo sapiens
atcaagccttcagcc

SEQ ID NO: 1400986 - DNA, 15 bp, Homo sapiens
aatcaagccttcagc

SEQ ID NO: 1400987 - DNA, 15 bp, Homo sapiens
taatcaagccttcag

SEQ ID NO: 1400988 - DNA, 15 bp, Homo sapiens
ttaatcaagccttca

SEQ ID NO: 1400989 - DNA, 15 bp, Homo sapiens
attaatcaagccttc

SEQ ID NO: 1400990 - DNA, 15 bp, Homo sapiens
tattaatcaagcctt

SEQ ID NO: 1400991 - DNA, 15 bp, Homo sapiens
ttattaatcaagcct

SEQ ID NO: 1400992 - DNA, 15 bp, Homo sapiens
attattaatcaagcc

SEQ ID NO: 1400993 - DNA, 15 bp, Homo sapiens
aattattaatcaagc

SEQ ID NO: 1400994 - DNA, 15 bp, Homo sapiens
taattattaatcaag

SEQ ID NO: 1400995 - DNA, 15 bp, Homo sapiens
ataattattaatcaa

SEQ ID NO: 1400996 - DNA, 15 bp, Homo sapiens
tataattattaatca

SEQ ID NO: 1400997 - DNA, 15 bp, Homo sapiens
ctataattattaatc

SEQ ID NO: 1400998 - DNA, 15 bp, Homo sapiens
tctataattattaat

SEQ ID NO: 1400999 - DNA, 15 bp, Homo sapiens
ttctataattattaa

SEQ ID NO: 1401000 - DNA, 15 bp, Homo sapiens
attctataattatta

SEQ ID NO: 1401001 - DNA, 15 bp, Homo sapiens
aattctataattatt

SEQ ID NO: 1401002 - DNA, 15 bp, Homo sapiens
taattctataattat

SEQ ID NO: 1401003 - DNA, 15 bp, Homo sapiens
ataattctataatta

SEQ ID NO: 1401004 - DNA, 15 bp, Homo sapiens
cataattctataatt

SEQ ID NO: 1401005 - DNA, 15 bp, Homo sapiens
ccataattctataat

SEQ ID NO: 1401006 - DNA, 15 bp, Homo sapiens
accataattctataa

SEQ ID NO: 1401007 - DNA, 15 bp, Homo sapiens
caccataattctata

SEQ ID NO: 1401008 - DNA, 15 bp, Homo sapiens
acaccataattctat

SEQ ID NO: 1401009 - DNA, 15 bp, Homo sapiens
cacaccataattcta

SEQ ID NO: 1401010 - DNA, 15 bp, Homo sapiens
tcacaccataattct

SEQ ID NO: 1401011 - DNA, 15 bp, Homo sapiens
ctcacaccataattc

SEQ ID NO: 1401012 - DNA, 15 bp, Homo sapiens
cctcacaccataatt

SEQ ID NO: 1401013 - DNA, 15 bp, Homo sapiens
gcctcacaccataat

SEQ ID NO: 1401014 - DNA, 15 bp, Homo sapiens
agcctcacaccataa

SEQ ID NO: 1401015 - DNA, 15 bp, Homo sapiens
cagcctcacaccata

SEQ ID NO: 1401016 - DNA, 15 bp, Homo sapiens
ccagcctcacaccat

SEQ ID NO: 1401017 - DNA, 15 bp, Homo sapiens
cccagcctcacacca

SEQ ID NO: 1401018 - DNA, 15 bp, Homo sapiens
acccagcctcacacc

SEQ ID NO: 1401019 - DNA, 15 bp, Homo sapiens
cacccagcctcacac

SEQ ID NO: 1401020 - DNA, 15 bp, Homo sapiens
gcacccagcctcaca

SEQ ID NO: 1401021 - DNA, 15 bp, Homo sapiens
cgcacccagcctcac

SEQ ID NO: 1401022 - DNA, 15 bp, Homo sapiens
ccgcacccagcctca

SEQ ID NO: 1401023 - DNA, 15 bp, Homo sapiens
accgcacccagcctc

SEQ ID NO: 1401024 - DNA, 15 bp, Homo sapiens
taccgcacccagcct

SEQ ID NO: 1401025 - DNA, 15 bp, Homo sapiens
ctaccgcacccagcc

SEQ ID NO: 1401026 - DNA, 15 bp, Homo sapiens
actaccgcacccagc

SEQ ID NO: 1401027 - DNA, 15 bp, Homo sapiens
aactaccgcacccag

SEQ ID NO: 1401028 - DNA, 15 bp, Homo sapiens
gaactaccgcaccca

SEQ ID NO: 1401029 - DNA, 15 bp, Homo sapiens
tgaactaccgcaccc

SEQ ID NO: 1401030 - DNA, 15 bp, Homo sapiens
ttgaactaccgcacc

SEQ ID NO: 1401031 - DNA, 15 bp, Homo sapiens
cttgaactaccgcac

SEQ ID NO: 1401032 - DNA, 15 bp, Homo sapiens
gcttgaactaccgca

SEQ ID NO: 1401033 - DNA, 15 bp, Homo sapiens
ggcttgaactaccgc

SEQ ID NO: 1401034 - DNA, 15 bp, Homo sapiens
aggcttgaactaccg

SEQ ID NO: 1401035 - DNA, 15 bp, Homo sapiens
caggcttgaactacc

SEQ ID NO: 1401036 - DNA, 15 bp, Homo sapiens
acaggcttgaactac

SEQ ID NO: 1401037 - DNA, 15 bp, Homo sapiens
tacaggcttgaacta

SEQ ID NO: 1401038 - DNA, 15 bp, Homo sapiens
ttacaggcttgaact

SEQ ID NO: 1401039 - DNA, 15 bp, Homo sapiens
attacaggcttgaac

SEQ ID NO: 1401040 - DNA, 15 bp, Homo sapiens
gattacaggcttgaa

SEQ ID NO: 1401041 - DNA, 15 bp, Homo sapiens
aacctcaggtgatcc

SEQ ID NO: 1401042 - DNA, 15 bp, Homo sapiens
caacctcaggtgatc

SEQ ID NO: 1401043 - DNA, 15 bp, Homo sapiens
ccaacctcaggtgat

SEQ ID NO: 1401044 - DNA, 15 bp, Homo sapiens
cccaacctcaggtga

SEQ ID NO: 1401045 - DNA, 15 bp, Homo sapiens
tcccaacctcaggtg

SEQ ID NO: 1401046 - DNA, 15 bp, Homo sapiens
ctcccaacctcaggt

SEQ ID NO: 1401047 - DNA, 15 bp, Homo sapiens
actcccaacctcagg

SEQ ID NO: 1401048 - DNA, 15 bp, Homo sapiens
aactcccaacctcag

SEQ ID NO: 1401049 - DNA, 15 bp, Homo sapiens
gaactcccaacctca

SEQ ID NO: 1401050 - DNA, 15 bp, Homo sapiens
tgaactcccaacctc

SEQ ID NO: 1401051 - DNA, 15 bp, Homo sapiens
ttgaactcccaacct

SEQ ID NO: 1401052 - DNA, 15 bp, Homo sapiens
cttgaactcccaacc

SEQ ID NO: 1401053 - DNA, 15 bp, Homo sapiens
tcttgaactcccaac

SEQ ID NO: 1401054 - DNA, 15 bp, Homo sapiens
gtcttgaactcccaa

SEQ ID NO: 1401055 - DNA, 15 bp, Homo sapiens
ggtcttgaactccca

SEQ ID NO: 1401056 - DNA, 15 bp, Homo sapiens
tggtcttgaactccc

SEQ ID NO: 1401057 - DNA, 15 bp, Homo sapiens
agagatggggtttct

SEQ ID NO: 1401058 - DNA, 15 bp, Homo sapiens
gtgccaccacgcccg

SEQ ID NO: 1401059 - DNA, 15 bp, Homo sapiens
cgggattacaggcat

SEQ ID NO: 1401060 - DNA, 15 bp, Homo sapiens
ccgggattacaggca

SEQ ID NO: 1401061 - DNA, 15 bp, Homo sapiens
agccgggattacagg

SEQ ID NO: 1401062 - DNA, 15 bp, Homo sapiens
tagccgggattacag

SEQ ID NO: 1401063 - DNA, 15 bp, Homo sapiens
gtagccgggattaca

SEQ ID NO: 1401064 - DNA, 15 bp, Homo sapiens
agtagccgggattac

SEQ ID NO: 1401065 - DNA, 15 bp, Homo sapiens
gagtagccgggatta

SEQ ID NO: 1401066 - DNA, 15 bp, Homo sapiens
cgagtagccgggatt

SEQ ID NO: 1401067 - DNA, 15 bp, Homo sapiens
ccgagtagccgggat

SEQ ID NO: 1401068 - DNA, 15 bp, Homo sapiens
cccgagtagccggga

SEQ ID NO: 1401069 - DNA, 15 bp, Homo sapiens
tcccgagtagccggg

SEQ ID NO: 1401070 - DNA, 15 bp, Homo sapiens
ctcccgagtagccgg

SEQ ID NO: 1401071 - DNA, 15 bp, Homo sapiens
cctcccgagtagccg

SEQ ID NO: 1401072 - DNA, 15 bp, Homo sapiens
gcctcccgagtagcc

SEQ ID NO: 1401073 - DNA, 15 bp, Homo sapiens
tttctcctgcctcag

SEQ ID NO: 1401074 - DNA, 15 bp, Homo sapiens
gtttctcctgcctca

SEQ ID NO: 1401075 - DNA, 15 bp, Homo sapiens
ggtttctcctgcctc

SEQ ID NO: 1401076 - DNA, 15 bp, Homo sapiens
gggtttctcctgcct

SEQ ID NO: 1401077 - DNA, 15 bp, Homo sapiens
agggtttctcctgcc

SEQ ID NO: 1401078 - DNA, 15 bp, Homo sapiens
aagggtttctcctgc

SEQ ID NO: 1401079 - DNA, 15 bp, Homo sapiens
caagggtttctcctg

SEQ ID NO: 1401080 - DNA, 15 bp, Homo sapiens
tcaagggtttctcct

SEQ ID NO: 1401081 - DNA, 15 bp, Homo sapiens
ttcaagggtttctcc

SEQ ID NO: 1401082 - DNA, 15 bp, Homo sapiens
gttcaagggtttctc

SEQ ID NO: 1401083 - DNA, 15 bp, Homo sapiens
ggttcaagggtttct

SEQ ID NO: 1401084 - DNA, 15 bp, Homo sapiens
gggttcaagggtttc

SEQ ID NO: 1401085 - DNA, 15 bp, Homo sapiens
ggggttcaagggttt

SEQ ID NO: 1401086 - DNA, 15 bp, Homo sapiens
tggggttcaagggtt

SEQ ID NO: 1401087 - DNA, 15 bp, Homo sapiens
ctggggttcaagggt

SEQ ID NO: 1401088 - DNA, 15 bp, Homo sapiens
cctggggttcaaggg

SEQ ID NO: 1401089 - DNA, 15 bp, Homo sapiens
tcctggggttcaagg

SEQ ID NO: 1401090 - DNA, 15 bp, Homo sapiens
ctcctggggttcaag

SEQ ID NO: 1401091 - DNA, 15 bp, Homo sapiens
cctcctggggttcaa

SEQ ID NO: 1401092 - DNA, 15 bp, Homo sapiens
acctcctggggttca

SEQ ID NO: 1401093 - DNA, 15 bp, Homo sapiens
cacctcctggggttc

SEQ ID NO: 1401094 - DNA, 15 bp, Homo sapiens
ccacctcctggggtt

SEQ ID NO: 1401095 - DNA, 15 bp, Homo sapiens
atcttggctcactac

SEQ ID NO: 1401096 - DNA, 15 bp, Homo sapiens
aatcttggctcacta

SEQ ID NO: 1401097 - DNA, 15 bp, Homo sapiens
tagagtttcgctctt

SEQ ID NO: 1401098 - DNA, 15 bp, Homo sapiens
ctagagtttcgctct

SEQ ID NO: 1401099 - DNA, 15 bp, Homo sapiens
gctagagtttcgctc

SEQ ID NO: 1401100 - DNA, 15 bp, Homo sapiens
agctagagtttcgct

SEQ ID NO: 1401101 - DNA, 15 bp, Homo sapiens
tagctagagtttcgc

SEQ ID NO: 1401102 - DNA, 15 bp, Homo sapiens
ttagctagagtttcg

SEQ ID NO: 1401103 - DNA, 15 bp, Homo sapiens
tttagctagagtttc

SEQ ID NO: 1401104 - DNA, 15 bp, Homo sapiens
ttttagctagagttt

SEQ ID NO: 1401105 - DNA, 15 bp, Homo sapiens
tttttagctagagtt

SEQ ID NO: 1401106 - DNA, 15 bp, Homo sapiens
ttttttagctagagt

SEQ ID NO: 1401107 - DNA, 15 bp, Homo sapiens
tttttttagctagag

SEQ ID NO: 1401108 - DNA, 15 bp, Homo sapiens
ttttttttagctaga

SEQ ID NO: 1401109 - DNA, 15 bp, Homo sapiens
tttttttttagctag

SEQ ID NO: 1401110 - DNA, 15 bp, Homo sapiens
ttttttttttagcta

SEQ ID NO: 1401111 - DNA, 15 bp, Homo sapiens
tctttgtcttttttt

SEQ ID NO: 1401112 - DNA, 15 bp, Homo sapiens
ttctttgtctttttt

SEQ ID NO: 1401113 - DNA, 15 bp, Homo sapiens
tttctttgtcttttt

SEQ ID NO: 1401114 - DNA, 15 bp, Homo sapiens
ttttctttgtctttt

SEQ ID NO: 1401115 - DNA, 15 bp, Homo sapiens
tttttctttgtcttt

SEQ ID NO: 1401116 - DNA, 15 bp, Homo sapiens
ctttttctttgtctt

SEQ ID NO: 1401117 - DNA, 15 bp, Homo sapiens
tctttttctttgtct

SEQ ID NO: 1401118 - DNA, 15 bp, Homo sapiens
ttctttttctttgtc

SEQ ID NO: 1401119 - DNA, 15 bp, Homo sapiens
tttctttttctttgt

SEQ ID NO: 1401120 - DNA, 15 bp, Homo sapiens
ttttctttttctttg

SEQ ID NO: 1401121 - DNA, 15 bp, Homo sapiens
attcttttttttttc

SEQ ID NO: 1401122 - DNA, 15 bp, Homo sapiens
caaaattcttttttt

SEQ ID NO: 1401123 - DNA, 15 bp, Homo sapiens
ccaaaattctttttt

SEQ ID NO: 1401124 - DNA, 15 bp, Homo sapiens
accaaaattcttttt

SEQ ID NO: 1401125 - DNA, 15 bp, Homo sapiens
caccaaaattctttt

SEQ ID NO: 1401126 - DNA, 15 bp, Homo sapiens
acaccaaaattcttt

SEQ ID NO: 1401127 - DNA, 15 bp, Homo sapiens
cacaccaaaattctt

SEQ ID NO: 1401128 - DNA, 15 bp, Homo sapiens
gcacaccaaaattct

SEQ ID NO: 1401129 - DNA, 15 bp, Homo sapiens
agcacaccaaaattc

SEQ ID NO: 1401130 - DNA, 15 bp, Homo sapiens
tagcacaccaaaatt

SEQ ID NO: 1401131 - DNA, 15 bp, Homo sapiens
ctagcacaccaaaat

SEQ ID NO: 1401132 - DNA, 15 bp, Homo sapiens
tctagcacaccaaaa

SEQ ID NO: 1401133 - DNA, 15 bp, Homo sapiens
ttctagcacaccaaa

SEQ ID NO: 1401134 - DNA, 15 bp, Homo sapiens
gttctagcacaccaa

SEQ ID NO: 1401135 - DNA, 15 bp, Homo sapiens
agttctagcacacca

SEQ ID NO: 1401136 - DNA, 15 bp, Homo sapiens
tagttctagcacacc

SEQ ID NO: 1401137 - DNA, 15 bp, Homo sapiens
ttagttctagcacac

SEQ ID NO: 1401138 - DNA, 15 bp, Homo sapiens
tttagttctagcaca

SEQ ID NO: 1401139 - DNA, 15 bp, Homo sapiens
ttttagttctagcac

SEQ ID NO: 1401140 - DNA, 15 bp, Homo sapiens
cttttagttctagca

SEQ ID NO: 1401141 - DNA, 15 bp, Homo sapiens
ccttttagttctagc

SEQ ID NO: 1401142 - DNA, 15 bp, Homo sapiens
cccttttagttctag

SEQ ID NO: 1401143 - DNA, 15 bp, Homo sapiens
gcccttttagttcta

SEQ ID NO: 1401144 - DNA, 15 bp, Homo sapiens
agcccttttagttct

SEQ ID NO: 1401145 - DNA, 15 bp, Homo sapiens
gagcccttttagttc

SEQ ID NO: 1401146 - DNA, 15 bp, Homo sapiens
agagcccttttagtt

SEQ ID NO: 1401147 - DNA, 15 bp, Homo sapiens
aagagcccttttagt

SEQ ID NO: 1401148 - DNA, 15 bp, Homo sapiens
caagagcccttttag

SEQ ID NO: 1401149 - DNA, 15 bp, Homo sapiens
acaagagccctttta

SEQ ID NO: 1401150 - DNA, 15 bp, Homo sapiens
aacaagagccctttt

SEQ ID NO: 1401151 - DNA, 15 bp, Homo sapiens
aaacaagagcccttt

SEQ ID NO: 1401152 - DNA, 15 bp, Homo sapiens
aaaacaagagccctt

SEQ ID NO: 1401153 - DNA, 15 bp, Homo sapiens
aaaaacaagagccct

SEQ ID NO: 1401154 - DNA, 15 bp, Homo sapiens
aaaaaacaagagccc

SEQ ID NO: 1401155 - DNA, 15 bp, Homo sapiens
caaaaaacaagagcc

SEQ ID NO: 1401156 - DNA, 15 bp, Homo sapiens
acaaaaaacaagagc

SEQ ID NO: 1401157 - DNA, 15 bp, Homo sapiens
aaaacaaaaaacaag

SEQ ID NO: 1401158 - DNA, 15 bp, Homo sapiens
aaaaacaaaaaacaa

SEQ ID NO: 1401159 - DNA, 15 bp, Homo sapiens
gaaaaacaaaaaaca

SEQ ID NO: 1401160 - DNA, 15 bp, Homo sapiens
agaaaaacaaaaaac

SEQ ID NO: 1401161 - DNA, 15 bp, Homo sapiens
aagaaaaacaaaaaa

SEQ ID NO: 1401162 - DNA, 15 bp, Homo sapiens
gaagaaaaacaaaaa

SEQ ID NO: 1401163 - DNA, 15 bp, Homo sapiens
agaagaaaaacaaaa

SEQ ID NO: 1401164 - DNA, 15 bp, Homo sapiens
aagaagaaaaacaaa

SEQ ID NO: 1401165 - DNA, 15 bp, Homo sapiens
aaagaagaaaaacaa

SEQ ID NO: 1401166 - DNA, 15 bp, Homo sapiens
caaagaagaaaaaca

SEQ ID NO: 1401167 - DNA, 15 bp, Homo sapiens
acaaagaagaaaaac

SEQ ID NO: 1401168 - DNA, 15 bp, Homo sapiens
cacaaagaagaaaaa

SEQ ID NO: 1401169 - DNA, 15 bp, Homo sapiens
atcacaaagaagaaa

SEQ ID NO: 1401170 - DNA, 15 bp, Homo sapiens
catcacaaagaagaa

SEQ ID NO: 1401171 - DNA, 15 bp, Homo sapiens
ccatcacaaagaaga

SEQ ID NO: 1401172 - DNA, 15 bp, Homo sapiens
tccatcacaaagaag

SEQ ID NO: 1401173 - DNA, 15 bp, Homo sapiens
ctccatcacaaagaa

SEQ ID NO: 1401174 - DNA, 15 bp, Homo sapiens
actccatcacaaaga

SEQ ID NO: 1401175 - DNA, 15 bp, Homo sapiens
aactccatcacaaag

SEQ ID NO: 1401176 - DNA, 15 bp, Homo sapiens
aaactccatcacaaa

SEQ ID NO: 1401177 - DNA, 15 bp, Homo sapiens
gaaactccatcacaa

SEQ ID NO: 1401178 - DNA, 15 bp, Homo sapiens
cgaaactccatcaca

SEQ ID NO: 1401179 - DNA, 15 bp, Homo sapiens
gcgaaactccatcac

SEQ ID NO: 1401180 - DNA, 15 bp, Homo sapiens
agcgaaactccatca

SEQ ID NO: 1401181 - DNA, 15 bp, Homo sapiens
aggcaacaagagcga

SEQ ID NO: 1401182 - DNA, 15 bp, Homo sapiens
taggcaacaagagcg

SEQ ID NO: 1401183 - DNA, 15 bp, Homo sapiens
ctaggcaacaagagc

SEQ ID NO: 1401184 - DNA, 15 bp, Homo sapiens
gactccagcctaggc

SEQ ID NO: 1401185 - DNA, 15 bp, Homo sapiens
ggactccagcctagg

SEQ ID NO: 1401186 - DNA, 15 bp, Homo sapiens
tggactccagcctag

SEQ ID NO: 1401187 - DNA, 15 bp, Homo sapiens
ttggactccagccta

SEQ ID NO: 1401188 - DNA, 15 bp, Homo sapiens
attggactccagcct

SEQ ID NO: 1401189 - DNA, 15 bp, Homo sapiens
cattggactccagcc

SEQ ID NO: 1401190 - DNA, 15 bp, Homo sapiens
ccattggactccagc

SEQ ID NO: 1401191 - DNA, 15 bp, Homo sapiens
gccattggactccag

SEQ ID NO: 1401192 - DNA, 15 bp, Homo sapiens
tgccattggactcca

SEQ ID NO: 1401193 - DNA, 15 bp, Homo sapiens
atgccattggactcc

SEQ ID NO: 1401194 - DNA, 15 bp, Homo sapiens
catgccattggactc

SEQ ID NO: 1401195 - DNA, 15 bp, Homo sapiens
tcatgccattggact

SEQ ID NO: 1401196 - DNA, 15 bp, Homo sapiens
atcatgccattggac

SEQ ID NO: 1401197 - DNA, 15 bp, Homo sapiens
gatcatgccattgga

SEQ ID NO: 1401198 - DNA, 15 bp, Homo sapiens
agatcatgccattgg

SEQ ID NO: 1401199 - DNA, 15 bp, Homo sapiens
tgagatcatgccatt

SEQ ID NO: 1401200 - DNA, 15 bp, Homo sapiens
ctgagatcatgccat

SEQ ID NO: 1401201 - DNA, 15 bp, Homo sapiens
gtacctgtaatccca

SEQ ID NO: 1401202 - DNA, 15 bp, Homo sapiens
tgtacctgtaatccc

SEQ ID NO: 1401203 - DNA, 15 bp, Homo sapiens
gtgtacctgtaatcc

SEQ ID NO: 1401204 - DNA, 15 bp, Homo sapiens
tgtgtacctgtaatc

SEQ ID NO: 1401205 - DNA, 15 bp, Homo sapiens
gtgtgtacctgtaat

SEQ ID NO: 1401206 - DNA, 15 bp, Homo sapiens
ggtgtgtacctgtaa

SEQ ID NO: 1401207 - DNA, 15 bp, Homo sapiens
tggtgtgtacctgta

SEQ ID NO: 1401208 - DNA, 15 bp, Homo sapiens
gtggtgtgtacctgt

SEQ ID NO: 1401209 - DNA, 15 bp, Homo sapiens
ggtggtgtgtacctg

SEQ ID NO: 1401210 - DNA, 15 bp, Homo sapiens
tggtggtgtgtacct

SEQ ID NO: 1401211 - DNA, 15 bp, Homo sapiens
atggtggtgtgtacc

SEQ ID NO: 1401212 - DNA, 15 bp, Homo sapiens
catggtggtgtgtac

SEQ ID NO: 1401213 - DNA, 15 bp, Homo sapiens
gcatggtggtgtgta

SEQ ID NO: 1401214 - DNA, 15 bp, Homo sapiens
ggcatggtggtgtgt

SEQ ID NO: 1401215 - DNA, 15 bp, Homo sapiens
cgggcatggtggtgt

SEQ ID NO: 1401216 - DNA, 15 bp, Homo sapiens
tatacaaaattagcc

SEQ ID NO: 1401217 - DNA, 15 bp, Homo sapiens
atatacaaaattagc

SEQ ID NO: 1401218 - DNA, 15 bp, Homo sapiens
aatatacaaaattag

SEQ ID NO: 1401219 - DNA, 15 bp, Homo sapiens
aaatatacaaaatta

SEQ ID NO: 1401220 - DNA, 15 bp, Homo sapiens
taaatatacaaaatt

SEQ ID NO: 1401221 - DNA, 15 bp, Homo sapiens
ataaatatacaaaat

SEQ ID NO: 1401222 - DNA, 15 bp, Homo sapiens
tataaatatacaaaa

SEQ ID NO: 1401223 - DNA, 15 bp, Homo sapiens
ttataaatatacaaa

SEQ ID NO: 1401224 - DNA, 15 bp, Homo sapiens
attataaatatacaa

SEQ ID NO: 1401225 - DNA, 15 bp, Homo sapiens
tattataaatataca

SEQ ID NO: 1401226 - DNA, 15 bp, Homo sapiens
ctattataaatatac

SEQ ID NO: 1401227 - DNA, 15 bp, Homo sapiens
tctattataaatata

SEQ ID NO: 1401228 - DNA, 15 bp, Homo sapiens
ctctattataaatat

SEQ ID NO: 1401229 - DNA, 15 bp, Homo sapiens
tctctattataaata

SEQ ID NO: 1401230 - DNA, 15 bp, Homo sapiens
gtctctattataaat

SEQ ID NO: 1401231 - DNA, 15 bp, Homo sapiens
tgtctctattataaa

SEQ ID NO: 1401232 - DNA, 15 bp, Homo sapiens
ctgtctctattataa

SEQ ID NO: 1401233 - DNA, 15 bp, Homo sapiens
cctgtctctattata

SEQ ID NO: 1401234 - DNA, 15 bp, Homo sapiens
ccctgtctctattat

SEQ ID NO: 1401235 - DNA, 15 bp, Homo sapiens
aaaccctgtctctat

SEQ ID NO: 1401236 - DNA, 15 bp, Homo sapiens
aagatcagcctggcc

SEQ ID NO: 1401237 - DNA, 15 bp, Homo sapiens
caagatcagcctggc

SEQ ID NO: 1401238 - DNA, 15 bp, Homo sapiens
tcaagatcagcctgg

SEQ ID NO: 1401239 - DNA, 15 bp, Homo sapiens
ttcaagatcagcctg

SEQ ID NO: 1401240 - DNA, 15 bp, Homo sapiens
gttcaagatcagcct

SEQ ID NO: 1401241 - DNA, 15 bp, Homo sapiens
agttcaagatcagcc

SEQ ID NO: 1401242 - DNA, 15 bp, Homo sapiens
gagttcaagatcagc

SEQ ID NO: 1401243 - DNA, 15 bp, Homo sapiens
ggagttcaagatcag

SEQ ID NO: 1401244 - DNA, 15 bp, Homo sapiens
aggagttcaagatca

SEQ ID NO: 1401245 - DNA, 15 bp, Homo sapiens
caggagttcaagatc

SEQ ID NO: 1401246 - DNA, 15 bp, Homo sapiens
tcaggagttcaagat

SEQ ID NO: 1401247 - DNA, 15 bp, Homo sapiens
agtcaggagttcaag

SEQ ID NO: 1401248 - DNA, 15 bp, Homo sapiens
aagtcaggagttcaa

SEQ ID NO: 1401249 - DNA, 15 bp, Homo sapiens
gaagtcaggagttca

SEQ ID NO: 1401250 - DNA, 15 bp, Homo sapiens
aacctgaagtcagga

SEQ ID NO: 1401251 - DNA, 15 bp, Homo sapiens
caacctgaagtcagg

SEQ ID NO: 1401252 - DNA, 15 bp, Homo sapiens
tcaacctgaagtcag

SEQ ID NO: 1401253 - DNA, 15 bp, Homo sapiens
atcaacctgaagtca

SEQ ID NO: 1401254 - DNA, 15 bp, Homo sapiens
gatcaacctgaagtc

SEQ ID NO: 1401255 - DNA, 15 bp, Homo sapiens
tgatcaacctgaagt

SEQ ID NO: 1401256 - DNA, 15 bp, Homo sapiens
ctgatcaacctgaag

SEQ ID NO: 1401257 - DNA, 15 bp, Homo sapiens
gctgatcaacctgaa

SEQ ID NO: 1401258 - DNA, 15 bp, Homo sapiens
ggctgatcaacctga

SEQ ID NO: 1401259 - DNA, 15 bp, Homo sapiens
aggctgatcaacctg

SEQ ID NO: 1401260 - DNA, 15 bp, Homo sapiens
caggctgatcaacct

SEQ ID NO: 1401261 - DNA, 15 bp, Homo sapiens
acaggctgatcaacc

SEQ ID NO: 1401262 - DNA, 15 bp, Homo sapiens
gacaggctgatcaac

SEQ ID NO: 1401263 - DNA, 15 bp, Homo sapiens
agacaggctgatcaa

SEQ ID NO: 1401264 - DNA, 15 bp, Homo sapiens
aagacaggctgatca

SEQ ID NO: 1401265 - DNA, 15 bp, Homo sapiens
caagacaggctgatc

SEQ ID NO: 1401266 - DNA, 15 bp, Homo sapiens
ccaagacaggctgat

SEQ ID NO: 1401267 - DNA, 15 bp, Homo sapiens
gccaagacaggctga

SEQ ID NO: 1401268 - DNA, 15 bp, Homo sapiens
ggccaagacaggctg

SEQ ID NO: 1401269 - DNA, 15 bp, Homo sapiens
aggccaagacaggct

SEQ ID NO: 1401270 - DNA, 15 bp, Homo sapiens
gaggccaagacaggc

SEQ ID NO: 1401271 - DNA, 15 bp, Homo sapiens
ggaggccaagacagg

SEQ ID NO: 1401272 - DNA, 15 bp, Homo sapiens
gggaggccaagacag

SEQ ID NO: 1401273 - DNA, 15 bp, Homo sapiens
tgggaggccaagaca

SEQ ID NO: 1401274 - DNA, 15 bp, Homo sapiens
ttgggaggccaagac

SEQ ID NO: 1401275 - DNA, 15 bp, Homo sapiens
tttgggaggccaaga

SEQ ID NO: 1401276 - DNA, 15 bp, Homo sapiens
tgggtgtggtggcgc

SEQ ID NO: 1401277 - DNA, 15 bp, Homo sapiens
gaaattagctgggtg

SEQ ID NO: 1401278 - DNA, 15 bp, Homo sapiens
cgaaattagctgggt

SEQ ID NO: 1401279 - DNA, 15 bp, Homo sapiens
acgaaattagctggg

SEQ ID NO: 1401280 - DNA, 15 bp, Homo sapiens
cacgaaattagctgg

SEQ ID NO: 1401281 - DNA, 15 bp, Homo sapiens
acacgaaattagctg

SEQ ID NO: 1401282 - DNA, 15 bp, Homo sapiens
aacacgaaattagct

SEQ ID NO: 1401283 - DNA, 15 bp, Homo sapiens
aaacacgaaattagc

SEQ ID NO: 1401284 - DNA, 15 bp, Homo sapiens
aaaacacgaaattag

SEQ ID NO: 1401285 - DNA, 15 bp, Homo sapiens
aaaaacacgaaatta

SEQ ID NO: 1401286 - DNA, 15 bp, Homo sapiens
taaaaacacgaaatt

SEQ ID NO: 1401287 - DNA, 15 bp, Homo sapiens
ctaaaaacacgaaat

SEQ ID NO: 1401288 - DNA, 15 bp, Homo sapiens
actaaaaacacgaaa

SEQ ID NO: 1401289 - DNA, 15 bp, Homo sapiens
tactaaaaacacgaa

SEQ ID NO: 1401290 - DNA, 15 bp, Homo sapiens
ctactaaaaacacga

SEQ ID NO: 1401291 - DNA, 15 bp, Homo sapiens
tctactaaaaacacg

SEQ ID NO: 1401292 - DNA, 15 bp, Homo sapiens
agaccaacatggaga

SEQ ID NO: 1401293 - DNA, 15 bp, Homo sapiens
aagaccaacatggag

SEQ ID NO: 1401294 - DNA, 15 bp, Homo sapiens
caagaccaacatgga

SEQ ID NO: 1401295 - DNA, 15 bp, Homo sapiens
gcaagaccaacatgg

SEQ ID NO: 1401296 - DNA, 15 bp, Homo sapiens
agcaagaccaacatg

SEQ ID NO: 1401297 - DNA, 15 bp, Homo sapiens
cagcaagaccaacat

SEQ ID NO: 1401298 - DNA, 15 bp, Homo sapiens
ccagcaagaccaaca

SEQ ID NO: 1401299 - DNA, 15 bp, Homo sapiens
accagcaagaccaac

SEQ ID NO: 1401300 - DNA, 15 bp, Homo sapiens
gaccagcaagaccaa

SEQ ID NO: 1401301 - DNA, 15 bp, Homo sapiens
agaccagcaagacca

SEQ ID NO: 1401302 - DNA, 15 bp, Homo sapiens
gagaccagcaagacc

SEQ ID NO: 1401303 - DNA, 15 bp, Homo sapiens
tgagaccagcaagac

SEQ ID NO: 1401304 - DNA, 15 bp, Homo sapiens
ttgagaccagcaaga

SEQ ID NO: 1401305 - DNA, 15 bp, Homo sapiens
tttgagaccagcaag

SEQ ID NO: 1401306 - DNA, 15 bp, Homo sapiens
gtttgagaccagcaa

SEQ ID NO: 1401307 - DNA, 15 bp, Homo sapiens
agtttgagaccagca

SEQ ID NO: 1401308 - DNA, 15 bp, Homo sapiens
tcgggagtttgagac

SEQ ID NO: 1401309 - DNA, 15 bp, Homo sapiens
gtcgggagtttgaga

SEQ ID NO: 1401310 - DNA, 15 bp, Homo sapiens
ggtcgggagtttgag

SEQ ID NO: 1401311 - DNA, 15 bp, Homo sapiens
aggtcgggagtttga

SEQ ID NO: 1401312 - DNA, 15 bp, Homo sapiens
gaggtcgggagtttg

SEQ ID NO: 1401313 - DNA, 15 bp, Homo sapiens
tgaggtcgggagttt

SEQ ID NO: 1401314 - DNA, 15 bp, Homo sapiens
aatcacctgaggtcg

SEQ ID NO: 1401315 - DNA, 15 bp, Homo sapiens
gaatcacctgaggtc

SEQ ID NO: 1401316 - DNA, 15 bp, Homo sapiens
cgaatcacctgaggt

SEQ ID NO: 1401317 - DNA, 15 bp, Homo sapiens
gcgaatcacctgagg

SEQ ID NO: 1401318 - DNA, 15 bp, Homo sapiens
ggcgaatcacctgag

SEQ ID NO: 1401319 - DNA, 15 bp, Homo sapiens
gggcgaatcacctga

SEQ ID NO: 1401320 - DNA, 15 bp, Homo sapiens
cgggcgaatcacctg

SEQ ID NO: 1401321 - DNA, 15 bp, Homo sapiens
gcgggcgaatcacct

SEQ ID NO: 1401322 - DNA, 15 bp, Homo sapiens
ggcgggcgaatcacc

SEQ ID NO: 1401323 - DNA, 15 bp, Homo sapiens
aggcgggcgaatcac

SEQ ID NO: 1401324 - DNA, 15 bp, Homo sapiens
gaggcgggcgaatca

SEQ ID NO: 1401325 - DNA, 15 bp, Homo sapiens
tgaggcgggcgaatc

SEQ ID NO: 1401326 - DNA, 15 bp, Homo sapiens
ctgaggcgggcgaat

SEQ ID NO: 1401327 - DNA, 15 bp, Homo sapiens
gctgaggcgggcgaa

SEQ ID NO: 1401328 - DNA, 15 bp, Homo sapiens
ggctgaggcgggcga

SEQ ID NO: 1401329 - DNA, 15 bp, Homo sapiens
taggaggctgaggcg

SEQ ID NO: 1401330 - DNA, 15 bp, Homo sapiens
tttaggaggctgagg

SEQ ID NO: 1401331 - DNA, 15 bp, Homo sapiens
ctttaggaggctgag

SEQ ID NO: 1401332 - DNA, 15 bp, Homo sapiens
actttaggaggctga

SEQ ID NO: 1401333 - DNA, 15 bp, Homo sapiens
cactttaggaggctg

SEQ ID NO: 1401334 - DNA, 15 bp, Homo sapiens
gcactttaggaggct

SEQ ID NO: 1401335 - DNA, 15 bp, Homo sapiens
cagcactttaggagg

SEQ ID NO: 1401336 - DNA, 15 bp, Homo sapiens
ccagcactttaggag

SEQ ID NO: 1401337 - DNA, 15 bp, Homo sapiens
tgcagtggctcacac

SEQ ID NO: 1401338 - DNA, 15 bp, Homo sapiens
gtgcagtggctcaca

SEQ ID NO: 1401339 - DNA, 15 bp, Homo sapiens
agccaggtgcagtgg

SEQ ID NO: 1401340 - DNA, 15 bp, Homo sapiens
aagccaggtgcagtg

SEQ ID NO: 1401341 - DNA, 15 bp, Homo sapiens
taagccaggtgcagt

SEQ ID NO: 1401342 - DNA, 15 bp, Homo sapiens
ctaagccaggtgcag

SEQ ID NO: 1401343 - DNA, 15 bp, Homo sapiens
cctaagccaggtgca

SEQ ID NO: 1401344 - DNA, 15 bp, Homo sapiens
tcctaagccaggtgc

SEQ ID NO: 1401345 - DNA, 15 bp, Homo sapiens
gtcctaagccaggtg

SEQ ID NO: 1401346 - DNA, 15 bp, Homo sapiens
ggtcctaagccaggt

SEQ ID NO: 1401347 - DNA, 15 bp, Homo sapiens
aggtcctaagccagg

SEQ ID NO: 1401348 - DNA, 15 bp, Homo sapiens
caggtcctaagccag

SEQ ID NO: 1401349 - DNA, 15 bp, Homo sapiens
tcaggtcctaagcca

SEQ ID NO: 1401350 - DNA, 15 bp, Homo sapiens
gtcaggtcctaagcc

SEQ ID NO: 1401351 - DNA, 15 bp, Homo sapiens
agtcaggtcctaagc

SEQ ID NO: 1401352 - DNA, 15 bp, Homo sapiens
gagtcaggtcctaag

SEQ ID NO: 1401353 - DNA, 15 bp, Homo sapiens
agagtcaggtcctaa

SEQ ID NO: 1401354 - DNA, 15 bp, Homo sapiens
aagagtcaggtccta

SEQ ID NO: 1401355 - DNA, 15 bp, Homo sapiens
taagagtcaggtcct

SEQ ID NO: 1401356 - DNA, 15 bp, Homo sapiens
ataagagtcaggtcc

SEQ ID NO: 1401357 - DNA, 15 bp, Homo sapiens
gataagagtcaggtc

SEQ ID NO: 1401358 - DNA, 15 bp, Homo sapiens
agataagagtcaggt

SEQ ID NO: 1401359 - DNA, 15 bp, Homo sapiens
cagataagagtcagg

SEQ ID NO: 1401360 - DNA, 15 bp, Homo sapiens
gcagataagagtcag

SEQ ID NO: 1401361 - DNA, 15 bp, Homo sapiens
agcagataagagtca

SEQ ID NO: 1401362 - DNA, 15 bp, Homo sapiens
tagcagataagagtc

SEQ ID NO: 1401363 - DNA, 15 bp, Homo sapiens
atagcagataagagt

SEQ ID NO: 1401364 - DNA, 15 bp, Homo sapiens
catagcagataagag

SEQ ID NO: 1401365 - DNA, 15 bp, Homo sapiens
gcatagcagataaga

SEQ ID NO: 1401366 - DNA, 15 bp, Homo sapiens
agcatagcagataag

SEQ ID NO: 1401367 - DNA, 15 bp, Homo sapiens
cagcatagcagataa

SEQ ID NO: 1401368 - DNA, 15 bp, Homo sapiens
gcagcatagcagata

SEQ ID NO: 1401369 - DNA, 15 bp, Homo sapiens
tgcagcatagcagat

SEQ ID NO: 1401370 - DNA, 15 bp, Homo sapiens
atgcagcatagcaga

SEQ ID NO: 1401371 - DNA, 15 bp, Homo sapiens
catgcagcatagcag

SEQ ID NO: 1401372 - DNA, 15 bp, Homo sapiens
ccatgcagcatagca

SEQ ID NO: 1401373 - DNA, 15 bp, Homo sapiens
accatgcagcatagc

SEQ ID NO: 1401374 - DNA, 15 bp, Homo sapiens
gaccatgcagcatag

SEQ ID NO: 1401375 - DNA, 15 bp, Homo sapiens
tgaccatgcagcata

SEQ ID NO: 1401376 - DNA, 15 bp, Homo sapiens
ctgaccatgcagcat

SEQ ID NO: 1401377 - DNA, 15 bp, Homo sapiens
gctgaccatgcagca

SEQ ID NO: 1401378 - DNA, 15 bp, Homo sapiens
agctgaccatgcagc

SEQ ID NO: 1401379 - DNA, 15 bp, Homo sapiens
cagctgaccatgcag

SEQ ID NO: 1401380 - DNA, 15 bp, Homo sapiens
ccagctgaccatgca

SEQ ID NO: 1401381 - DNA, 15 bp, Homo sapiens
tccagctgaccatgc

SEQ ID NO: 1401382 - DNA, 15 bp, Homo sapiens
ctccagctgaccatg

SEQ ID NO: 1401383 - DNA, 15 bp, Homo sapiens
tctccagctgaccat

SEQ ID NO: 1401384 - DNA, 15 bp, Homo sapiens
ctctccagctgacca

SEQ ID NO: 1401385 - DNA, 15 bp, Homo sapiens
actctccagctgacc

SEQ ID NO: 1401386 - DNA, 15 bp, Homo sapiens
tactctccagctgac

SEQ ID NO: 1401387 - DNA, 15 bp, Homo sapiens
atactctccagctga

SEQ ID NO: 1401388 - DNA, 15 bp, Homo sapiens
gatactctccagctg

SEQ ID NO: 1401389 - DNA, 15 bp, Homo sapiens
agatactctccagct

SEQ ID NO: 1401390 - DNA, 15 bp, Homo sapiens
aagatactctccagc

SEQ ID NO: 1401391 - DNA, 15 bp, Homo sapiens
gaagatactctccag

SEQ ID NO: 1401392 - DNA, 15 bp, Homo sapiens
ggaagatactctcca

SEQ ID NO: 1401393 - DNA, 15 bp, Homo sapiens
tggaagatactctcc

SEQ ID NO: 1401394 - DNA, 15 bp, Homo sapiens
ttggaagatactctc

SEQ ID NO: 1401395 - DNA, 15 bp, Homo sapiens
gttggaagatactct

SEQ ID NO: 1401396 - DNA, 15 bp, Homo sapiens
tgttggaagatactc

SEQ ID NO: 1401397 - DNA, 15 bp, Homo sapiens
ttgttggaagatact

SEQ ID NO: 1401398 - DNA, 15 bp, Homo sapiens
tttgttggaagatac

SEQ ID NO: 1401399 - DNA, 15 bp, Homo sapiens
ttttgttggaagata

SEQ ID NO: 1401400 - DNA, 15 bp, Homo sapiens
tttttgttggaagat

SEQ ID NO: 1401401 - DNA, 15 bp, Homo sapiens
ttttttgttggaaga

SEQ ID NO: 1401402 - DNA, 15 bp, Homo sapiens
gttttttgttggaag

SEQ ID NO: 1401403 - DNA, 15 bp, Homo sapiens
tgttttttgttggaa

SEQ ID NO: 1401404 - DNA, 15 bp, Homo sapiens
gtgttttttgttgga

SEQ ID NO: 1401405 - DNA, 15 bp, Homo sapiens
agtgttttttgttgg

SEQ ID NO: 1401406 - DNA, 15 bp, Homo sapiens
aagtgttttttgttg

SEQ ID NO: 1401407 - DNA, 15 bp, Homo sapiens
aaagtgttttttgtt

SEQ ID NO: 1401408 - DNA, 15 bp, Homo sapiens
taaagtgttttttgt

SEQ ID NO: 1401409 - DNA, 15 bp, Homo sapiens
ttaaagtgttttttg

SEQ ID NO: 1401410 - DNA, 15 bp, Homo sapiens
attaaagtgtttttt

SEQ ID NO: 1401411 - DNA, 15 bp, Homo sapiens
cattaaagtgttttt

SEQ ID NO: 1401412 - DNA, 15 bp, Homo sapiens
gcattaaagtgtttt

SEQ ID NO: 1401413 - DNA, 15 bp, Homo sapiens
tgcattaaagtgttt

SEQ ID NO: 1401414 - DNA, 15 bp, Homo sapiens
ttgcattaaagtgtt

SEQ ID NO: 1401415 - DNA, 15 bp, Homo sapiens
tttgcattaaagtgt

SEQ ID NO: 1401416 - DNA, 15 bp, Homo sapiens
atttgcattaaagtg

SEQ ID NO: 1401417 - DNA, 15 bp, Homo sapiens
aatttgcattaaagt

SEQ ID NO: 1401418 - DNA, 15 bp, Homo sapiens
gaatttgcattaaag

SEQ ID NO: 1401419 - DNA, 15 bp, Homo sapiens
tgaatttgcattaaa

SEQ ID NO: 1401420 - DNA, 15 bp, Homo sapiens
gtgaatttgcattaa

SEQ ID NO: 1401421 - DNA, 15 bp, Homo sapiens
agtgaatttgcatta

SEQ ID NO: 1401422 - DNA, 15 bp, Homo sapiens
tagtgaatttgcatt

SEQ ID NO: 1401423 - DNA, 15 bp, Homo sapiens
ttagtgaatttgcat

SEQ ID NO: 1401424 - DNA, 15 bp, Homo sapiens
tttagtgaatttgca

SEQ ID NO: 1401425 - DNA, 15 bp, Homo sapiens
ctttagtgaatttgc

SEQ ID NO: 1401426 - DNA, 15 bp, Homo sapiens
actttagtgaatttg

SEQ ID NO: 1401427 - DNA, 15 bp, Homo sapiens
aactttagtgaattt

SEQ ID NO: 1401428 - DNA, 15 bp, Homo sapiens
taactttagtgaatt

SEQ ID NO: 1401429 - DNA, 15 bp, Homo sapiens
ctaactttagtgaat

SEQ ID NO: 1401430 - DNA, 15 bp, Homo sapiens
tctaactttagtgaa

SEQ ID NO: 1401431 - DNA, 15 bp, Homo sapiens
ttctaactttagtga

SEQ ID NO: 1401432 - DNA, 15 bp, Homo sapiens
attctaactttagtg

SEQ ID NO: 1401433 - DNA, 15 bp, Homo sapiens
aattctaactttagt

SEQ ID NO: 1401434 - DNA, 15 bp, Homo sapiens
taattctaactttag

SEQ ID NO: 1401435 - DNA, 15 bp, Homo sapiens
ataattctaacttta

SEQ ID NO: 1401436 - DNA, 15 bp, Homo sapiens
cataattctaacttt

SEQ ID NO: 1401437 - DNA, 15 bp, Homo sapiens
acataattctaactt

SEQ ID NO: 1401438 - DNA, 15 bp, Homo sapiens
aacataattctaact

SEQ ID NO: 1401439 - DNA, 15 bp, Homo sapiens
gaacataattctaac

SEQ ID NO: 1401440 - DNA, 15 bp, Homo sapiens
agaacataattctaa

SEQ ID NO: 1401441 - DNA, 15 bp, Homo sapiens
gagaacataattcta

SEQ ID NO: 1401442 - DNA, 15 bp, Homo sapiens
agagaacataattct

SEQ ID NO: 1401443 - DNA, 15 bp, Homo sapiens
tagagaacataattc

SEQ ID NO: 1401444 - DNA, 15 bp, Homo sapiens
atagagaacataatt

SEQ ID NO: 1401445 - DNA, 15 bp, Homo sapiens
aatagagaacataat

SEQ ID NO: 1401446 - DNA, 15 bp, Homo sapiens
aaatagagaacataa

SEQ ID NO: 1401447 - DNA, 15 bp, Homo sapiens
caaatagagaacata

SEQ ID NO: 1401448 - DNA, 15 bp, Homo sapiens
gcaaatagagaacat

SEQ ID NO: 1401449 - DNA, 15 bp, Homo sapiens
tgcaaatagagaaca

SEQ ID NO: 1401450 - DNA, 15 bp, Homo sapiens
ctgcaaatagagaac

SEQ ID NO: 1401451 - DNA, 15 bp, Homo sapiens
tctgcaaatagagaa

SEQ ID NO: 1401452 - DNA, 15 bp, Homo sapiens
atctgcaaatagaga

SEQ ID NO: 1401453 - DNA, 15 bp, Homo sapiens
catctgcaaatagag

SEQ ID NO: 1401454 - DNA, 15 bp, Homo sapiens
tcatctgcaaataga

SEQ ID NO: 1401455 - DNA, 15 bp, Homo sapiens
ctcatctgcaaatag

SEQ ID NO: 1401456 - DNA, 15 bp, Homo sapiens
atcctcatctgcaaa

SEQ ID NO: 1401457 - DNA, 15 bp, Homo sapiens
catcctcatctgcaa

SEQ ID NO: 1401458 - DNA, 15 bp, Homo sapiens
gcatcctcatctgca

SEQ ID NO: 1401459 - DNA, 15 bp, Homo sapiens
agcatcctcatctgc

SEQ ID NO: 1401460 - DNA, 15 bp, Homo sapiens
cagcatcctcatctg

SEQ ID NO: 1401461 - DNA, 15 bp, Homo sapiens
tcagcatcctcatct

SEQ ID NO: 1401462 - DNA, 15 bp, Homo sapiens
ctcagcatcctcatc

SEQ ID NO: 1401463 - DNA, 15 bp, Homo sapiens
cctcagcatcctcat

SEQ ID NO: 1401464 - DNA, 15 bp, Homo sapiens
acctcagcatcctca

SEQ ID NO: 1401465 - DNA, 15 bp, Homo sapiens
aacctcagcatcctc

SEQ ID NO: 1401466 - DNA, 15 bp, Homo sapiens
gaacctcagcatcct

SEQ ID NO: 1401467 - DNA, 15 bp, Homo sapiens
tgaacctcagcatcc

SEQ ID NO: 1401468 - DNA, 15 bp, Homo sapiens
ttgaacctcagcatc

SEQ ID NO: 1401469 - DNA, 15 bp, Homo sapiens
tttgaacctcagcat

SEQ ID NO: 1401470 - DNA, 15 bp, Homo sapiens
ctttgaacctcagca

SEQ ID NO: 1401471 - DNA, 15 bp, Homo sapiens
tctttgaacctcagc

SEQ ID NO: 1401472 - DNA, 15 bp, Homo sapiens
ctctttgaacctcag

SEQ ID NO: 1401473 - DNA, 15 bp, Homo sapiens
cctctttgaacctca

SEQ ID NO: 1401474 - DNA, 15 bp, Homo sapiens
acctctttgaacctc

SEQ ID NO: 1401475 - DNA, 15 bp, Homo sapiens
aacctctttgaacct

SEQ ID NO: 1401476 - DNA, 15 bp, Homo sapiens
taacctctttgaacc

SEQ ID NO: 1401477 - DNA, 15 bp, Homo sapiens
ttaacctctttgaac

SEQ ID NO: 1401478 - DNA, 15 bp, Homo sapiens
cttaacctctttgaa

SEQ ID NO: 1401479 - DNA, 15 bp, Homo sapiens
ccttaacctctttga

SEQ ID NO: 1401480 - DNA, 15 bp, Homo sapiens
tccttaacctctttg

SEQ ID NO: 1401481 - DNA, 15 bp, Homo sapiens
ctccttaacctcttt

SEQ ID NO: 1401482 - DNA, 15 bp, Homo sapiens
gctccttaacctctt

SEQ ID NO: 1401483 - DNA, 15 bp, Homo sapiens
agctccttaacctct

SEQ ID NO: 1401484 - DNA, 15 bp, Homo sapiens
tagctccttaacctc

SEQ ID NO: 1401485 - DNA, 15 bp, Homo sapiens
ctagctccttaacct

SEQ ID NO: 1401486 - DNA, 15 bp, Homo sapiens
gctagctccttaacc

SEQ ID NO: 1401487 - DNA, 15 bp, Homo sapiens
ggctagctccttaac

SEQ ID NO: 1401488 - DNA, 15 bp, Homo sapiens
gggctagctccttaa

SEQ ID NO: 1401489 - DNA, 15 bp, Homo sapiens
tgggctagctcctta

SEQ ID NO: 1401490 - DNA, 15 bp, Homo sapiens
ttgggctagctcctt

SEQ ID NO: 1401491 - DNA, 15 bp, Homo sapiens
cttgggctagctcct

SEQ ID NO: 1401492 - DNA, 15 bp, Homo sapiens
ccttgggctagctcc

SEQ ID NO: 1401493 - DNA, 15 bp, Homo sapiens
accttgggctagctc

SEQ ID NO: 1401494 - DNA, 15 bp, Homo sapiens
aaccttgggctagct

SEQ ID NO: 1401495 - DNA, 15 bp, Homo sapiens
caaccttgggctagc

SEQ ID NO: 1401496 - DNA, 15 bp, Homo sapiens
gcaaccttgggctag

SEQ ID NO: 1401497 - DNA, 15 bp, Homo sapiens
tgcaaccttgggcta

SEQ ID NO: 1401498 - DNA, 15 bp, Homo sapiens
gtgcaaccttgggct

SEQ ID NO: 1401499 - DNA, 15 bp, Homo sapiens
tgtgcaaccttgggc

SEQ ID NO: 1401500 - DNA, 15 bp, Homo sapiens
ctgtgcaaccttggg

SEQ ID NO: 1401501 - DNA, 15 bp, Homo sapiens
gctgtgcaaccttgg

SEQ ID NO: 1401502 - DNA, 15 bp, Homo sapiens
agctgtgcaaccttg

SEQ ID NO: 1401503 - DNA, 15 bp, Homo sapiens
aagctgtgcaacctt

SEQ ID NO: 1401504 - DNA, 15 bp, Homo sapiens
gaagctgtgcaacct

SEQ ID NO: 1401505 - DNA, 15 bp, Homo sapiens
agaagctgtgcaacc

SEQ ID NO: 1401506 - DNA, 15 bp, Homo sapiens
aagaagctgtgcaac

SEQ ID NO: 1401507 - DNA, 15 bp, Homo sapiens
gaagaagctgtgcaa

SEQ ID NO: 1401508 - DNA, 15 bp, Homo sapiens
agaagaagctgtgca

SEQ ID NO: 1401509 - DNA, 15 bp, Homo sapiens
cagaagaagctgtgc

SEQ ID NO: 1401510 - DNA, 15 bp, Homo sapiens
acagaagaagctgtg

SEQ ID NO: 1401511 - DNA, 15 bp, Homo sapiens
cacagaagaagctgt

SEQ ID NO: 1401512 - DNA, 15 bp, Homo sapiens
acacagaagaagctg

SEQ ID NO: 1401513 - DNA, 15 bp, Homo sapiens
gacacagaagaagct

SEQ ID NO: 1401514 - DNA, 15 bp, Homo sapiens
tgacacagaagaagc

SEQ ID NO: 1401515 - DNA, 15 bp, Homo sapiens
ctgacacagaagaag

SEQ ID NO: 1401516 - DNA, 15 bp, Homo sapiens
tctgacacagaagaa

SEQ ID NO: 1401517 - DNA, 15 bp, Homo sapiens
ctctgacacagaaga

SEQ ID NO: 1401518 - DNA, 15 bp, Homo sapiens
gctctgacacagaag

SEQ ID NO: 1401519 - DNA, 15 bp, Homo sapiens
ggctctgacacagaa

SEQ ID NO: 1401520 - DNA, 15 bp, Homo sapiens
tggctctgacacaga

SEQ ID NO: 1401521 - DNA, 15 bp, Homo sapiens
ctggctctgacacag

SEQ ID NO: 1401522 - DNA, 15 bp, Homo sapiens
cctggctctgacaca

SEQ ID NO: 1401523 - DNA, 15 bp, Homo sapiens
tcctggctctgacac

SEQ ID NO: 1401524 - DNA, 15 bp, Homo sapiens
atcctggctctgaca

SEQ ID NO: 1401525 - DNA, 15 bp, Homo sapiens
catcctggctctgac

SEQ ID NO: 1401526 - DNA, 15 bp, Homo sapiens
acatcctggctctga

SEQ ID NO: 1401527 - DNA, 15 bp, Homo sapiens
gacatcctggctctg

SEQ ID NO: 1401528 - DNA, 15 bp, Homo sapiens
agacatcctggctct

SEQ ID NO: 1401529 - DNA, 15 bp, Homo sapiens
gagacatcctggctc

SEQ ID NO: 1401530 - DNA, 15 bp, Homo sapiens
cgagacatcctggct

SEQ ID NO: 1401531 - DNA, 15 bp, Homo sapiens
gcgagacatcctggc

SEQ ID NO: 1401532 - DNA, 15 bp, Homo sapiens
ggcgagacatcctgg

SEQ ID NO: 1401533 - DNA, 15 bp, Homo sapiens
aggcgagacatcctg

SEQ ID NO: 1401534 - DNA, 15 bp, Homo sapiens
gaggcgagacatcct

SEQ ID NO: 1401535 - DNA, 15 bp, Homo sapiens
tgaggcgagacatcc

SEQ ID NO: 1401536 - DNA, 15 bp, Homo sapiens
ctgaggcgagacatc

SEQ ID NO: 1401537 - DNA, 15 bp, Homo sapiens
gctgaggcgagacat

SEQ ID NO: 1401538 - DNA, 15 bp, Homo sapiens
agctgaggcgagaca

SEQ ID NO: 1401539 - DNA, 15 bp, Homo sapiens
gagctgaggcgagac

SEQ ID NO: 1401540 - DNA, 15 bp, Homo sapiens
ggagctgaggcgaga

SEQ ID NO: 1401541 - DNA, 15 bp, Homo sapiens
gggagctgaggcgag

SEQ ID NO: 1401542 - DNA, 15 bp, Homo sapiens
ggggagctgaggcga

SEQ ID NO: 1401543 - DNA, 15 bp, Homo sapiens
aggggagctgaggcg

SEQ ID NO: 1401544 - DNA, 15 bp, Homo sapiens
gaggggagctgaggc

SEQ ID NO: 1401545 - DNA, 15 bp, Homo sapiens
tgaggggagctgagg

SEQ ID NO: 1401546 - DNA, 15 bp, Homo sapiens
ctgaggggagctgag

SEQ ID NO: 1401547 - DNA, 15 bp, Homo sapiens
gctgaggggagctga

SEQ ID NO: 1401548 - DNA, 15 bp, Homo sapiens
agctgaggggagctg

SEQ ID NO: 1401549 - DNA, 15 bp, Homo sapiens
gagctgaggggagct

SEQ ID NO: 1401550 - DNA, 15 bp, Homo sapiens
agagctgaggggagc

SEQ ID NO: 1401551 - DNA, 15 bp, Homo sapiens
gagagctgaggggag

SEQ ID NO: 1401552 - DNA, 15 bp, Homo sapiens
tgagagctgagggga

SEQ ID NO: 1401553 - DNA, 15 bp, Homo sapiens
ttgagagctgagggg

SEQ ID NO: 1401554 - DNA, 15 bp, Homo sapiens
attgagagctgaggg

SEQ ID NO: 1401555 - DNA, 15 bp, Homo sapiens
aattgagagctgagg

SEQ ID NO: 1401556 - DNA, 15 bp, Homo sapiens
aaattgagagctgag

SEQ ID NO: 1401557 - DNA, 15 bp, Homo sapiens
taaattgagagctga

SEQ ID NO: 1401558 - DNA, 15 bp, Homo sapiens
ttaaattgagagctg

SEQ ID NO: 1401559 - DNA, 15 bp, Homo sapiens
attaaattgagagct

SEQ ID NO: 1401560 - DNA, 15 bp, Homo sapiens
cattaaattgagagc

SEQ ID NO: 1401561 - DNA, 15 bp, Homo sapiens
gcattaaattgagag

SEQ ID NO: 1401562 - DNA, 15 bp, Homo sapiens
tgcattaaattgaga

SEQ ID NO: 1401563 - DNA, 15 bp, Homo sapiens
ttgcattaaattgag

SEQ ID NO: 1401564 - DNA, 15 bp, Homo sapiens
attgcattaaattga

SEQ ID NO: 1401565 - DNA, 15 bp, Homo sapiens
aattgcattaaattg

SEQ ID NO: 1401566 - DNA, 15 bp, Homo sapiens
caattgcattaaatt

SEQ ID NO: 1401567 - DNA, 15 bp, Homo sapiens
gcaattgcattaaat

SEQ ID NO: 1401568 - DNA, 15 bp, Homo sapiens
agcaattgcattaaa

SEQ ID NO: 1401569 - DNA, 15 bp, Homo sapiens
aagcaattgcattaa

SEQ ID NO: 1401570 - DNA, 15 bp, Homo sapiens
gaagcaattgcatta

SEQ ID NO: 1401571 - DNA, 15 bp, Homo sapiens
agaagcaattgcatt

SEQ ID NO: 1401572 - DNA, 15 bp, Homo sapiens
tagaagcaattgcat

SEQ ID NO: 1401573 - DNA, 15 bp, Homo sapiens
atagaagcaattgca

SEQ ID NO: 1401574 - DNA, 15 bp, Homo sapiens
gatagaagcaattgc

SEQ ID NO: 1401575 - DNA, 15 bp, Homo sapiens
tgatagaagcaattg

SEQ ID NO: 1401576 - DNA, 15 bp, Homo sapiens
ttgatagaagcaatt

SEQ ID NO: 1401577 - DNA, 15 bp, Homo sapiens
gttgatagaagcaat

SEQ ID NO: 1401578 - DNA, 15 bp, Homo sapiens
agttgatagaagcaa

SEQ ID NO: 1401579 - DNA, 15 bp, Homo sapiens
cagttgatagaagca

SEQ ID NO: 1401580 - DNA, 15 bp, Homo sapiens
gcagttgatagaagc

SEQ ID NO: 1401581 - DNA, 15 bp, Homo sapiens
agcagttgatagaag

SEQ ID NO: 1401582 - DNA, 15 bp, Homo sapiens
cagcagttgatagaa

SEQ ID NO: 1401583 - DNA, 15 bp, Homo sapiens
acagcagttgataga

SEQ ID NO: 1401584 - DNA, 15 bp, Homo sapiens
cacagcagttgatag

SEQ ID NO: 1401585 - DNA, 15 bp, Homo sapiens
tcacagcagttgata

SEQ ID NO: 1401586 - DNA, 15 bp, Homo sapiens
atcacagcagttgat

SEQ ID NO: 1401587 - DNA, 15 bp, Homo sapiens
catcacagcagttga

SEQ ID NO: 1401588 - DNA, 15 bp, Homo sapiens
ccatcacagcagttg

SEQ ID NO: 1401589 - DNA, 15 bp, Homo sapiens
accatcacagcagtt

SEQ ID NO: 1401590 - DNA, 15 bp, Homo sapiens
gaccatcacagcagt

SEQ ID NO: 1401591 - DNA, 15 bp, Homo sapiens
tgaccatcacagcag

SEQ ID NO: 1401592 - DNA, 15 bp, Homo sapiens
ttgaccatcacagca

SEQ ID NO: 1401593 - DNA, 15 bp, Homo sapiens
cttgaccatcacagc

SEQ ID NO: 1401594 - DNA, 15 bp, Homo sapiens
ccttgaccatcacag

SEQ ID NO: 1401595 - DNA, 15 bp, Homo sapiens
cccttgaccatcaca

SEQ ID NO: 1401596 - DNA, 15 bp, Homo sapiens
tcccttgaccatcac

SEQ ID NO: 1401597 - DNA, 15 bp, Homo sapiens
ctcccttgaccatca

SEQ ID NO: 1401598 - DNA, 15 bp, Homo sapiens
cctcccttgaccatc

SEQ ID NO: 1401599 - DNA, 15 bp, Homo sapiens
tcctcccttgaccat

SEQ ID NO: 1401600 - DNA, 15 bp, Homo sapiens
ctcctcccttgacca

SEQ ID NO: 1401601 - DNA, 15 bp, Homo sapiens
tctcctcccttgacc

SEQ ID NO: 1401602 - DNA, 15 bp, Homo sapiens
ctctcctcccttgac

SEQ ID NO: 1401603 - DNA, 15 bp, Homo sapiens
tctctcctcccttga

SEQ ID NO: 1401604 - DNA, 15 bp, Homo sapiens
ttctctcctcccttg

SEQ ID NO: 1401605 - DNA, 15 bp, Homo sapiens
attctctcctccctt

SEQ ID NO: 1401606 - DNA, 15 bp, Homo sapiens
cattctctcctccct

SEQ ID NO: 1401607 - DNA, 15 bp, Homo sapiens
acattctctcctccc

SEQ ID NO: 1401608 - DNA, 15 bp, Homo sapiens
cacattctctcctcc

SEQ ID NO: 1401609 - DNA, 15 bp, Homo sapiens
acacattctctcctc

SEQ ID NO: 1401610 - DNA, 15 bp, Homo sapiens
tacacattctctcct

SEQ ID NO: 1401611 - DNA, 15 bp, Homo sapiens
ctacacattctctcc

SEQ ID NO: 1401612 - DNA, 15 bp, Homo sapiens
cctacacattctctc

SEQ ID NO: 1401613 - DNA, 15 bp, Homo sapiens
tcctacacattctct

SEQ ID NO: 1401614 - DNA, 15 bp, Homo sapiens
ttcctacacattctc

SEQ ID NO: 1401615 - DNA, 15 bp, Homo sapiens
cttcctacacattct

SEQ ID NO: 1401616 - DNA, 15 bp, Homo sapiens
ccttcctacacattc

SEQ ID NO: 1401617 - DNA, 15 bp, Homo sapiens
tccttcctacacatt

SEQ ID NO: 1401618 - DNA, 15 bp, Homo sapiens
ttccttcctacacat

SEQ ID NO: 1401619 - DNA, 15 bp, Homo sapiens
cttccttcctacaca

SEQ ID NO: 1401620 - DNA, 15 bp, Homo sapiens
tcttccttcctacac

SEQ ID NO: 1401621 - DNA, 15 bp, Homo sapiens
ctcttccttcctaca

SEQ ID NO: 1401622 - DNA, 15 bp, Homo sapiens
cctcttccttcctac

SEQ ID NO: 1401623 - DNA, 15 bp, Homo sapiens
tcctcttccttccta

SEQ ID NO: 1401624 - DNA, 15 bp, Homo sapiens
ctcctcttccttcct

SEQ ID NO: 1401625 - DNA, 15 bp, Homo sapiens
cctcctcttccttcc

SEQ ID NO: 1401626 - DNA, 15 bp, Homo sapiens
tcctcctcttccttc

SEQ ID NO: 1401627 - DNA, 15 bp, Homo sapiens
atcctcctcttcctt

SEQ ID NO: 1401628 - DNA, 15 bp, Homo sapiens
tatcctcctcttcct

SEQ ID NO: 1401629 - DNA, 15 bp, Homo sapiens
ttatcctcctcttcc

SEQ ID NO: 1401630 - DNA, 15 bp, Homo sapiens
gttatcctcctcttc

SEQ ID NO: 1401631 - DNA, 15 bp, Homo sapiens
tgttatcctcctctt

SEQ ID NO: 1401632 - DNA, 15 bp, Homo sapiens
ctgttatcctcctct

SEQ ID NO: 1401633 - DNA, 15 bp, Homo sapiens
gctgttatcctcctc

SEQ ID NO: 1401634 - DNA, 15 bp, Homo sapiens
agctgttatcctcct

SEQ ID NO: 1401635 - DNA, 15 bp, Homo sapiens
gagctgttatcctcc

SEQ ID NO: 1401636 - DNA, 15 bp, Homo sapiens
agagctgttatcctc

SEQ ID NO: 1401637 - DNA, 15 bp, Homo sapiens
tagagctgttatcct

SEQ ID NO: 1401638 - DNA, 15 bp, Homo sapiens
ctagagctgttatcc

SEQ ID NO: 1401639 - DNA, 15 bp, Homo sapiens
tctagagctgttatc

SEQ ID NO: 1401640 - DNA, 15 bp, Homo sapiens
atctagagctgttat

SEQ ID NO: 1401641 - DNA, 15 bp, Homo sapiens
aatctagagctgtta

SEQ ID NO: 1401642 - DNA, 15 bp, Homo sapiens
gaatctagagctgtt

SEQ ID NO: 1401643 - DNA, 15 bp, Homo sapiens
tgaatctagagctgt

SEQ ID NO: 1401644 - DNA, 15 bp, Homo sapiens
ttgaatctagagctg

SEQ ID NO: 1401645 - DNA, 15 bp, Homo sapiens
gttgaatctagagct

SEQ ID NO: 1401646 - DNA, 15 bp, Homo sapiens
cgttgaatctagagc

SEQ ID NO: 1401647 - DNA, 15 bp, Homo sapiens
gcgttgaatctagag

SEQ ID NO: 1401648 - DNA, 15 bp, Homo sapiens
tgcgttgaatctaga

SEQ ID NO: 1401649 - DNA, 15 bp, Homo sapiens
ttgcgttgaatctag

SEQ ID NO: 1401650 - DNA, 15 bp, Homo sapiens
tttgcgttgaatcta

SEQ ID NO: 1401651 - DNA, 15 bp, Homo sapiens
ctttgcgttgaatct

SEQ ID NO: 1401652 - DNA, 15 bp, Homo sapiens
actttgcgttgaatc

SEQ ID NO: 1401653 - DNA, 15 bp, Homo sapiens
aactttgcgttgaat

SEQ ID NO: 1401654 - DNA, 15 bp, Homo sapiens
taactttgcgttgaa

SEQ ID NO: 1401655 - DNA, 15 bp, Homo sapiens
ttaactttgcgttga

SEQ ID NO: 1401656 - DNA, 15 bp, Homo sapiens
cttaactttgcgttg

SEQ ID NO: 1401657 - DNA, 15 bp, Homo sapiens
acttaactttgcgtt

SEQ ID NO: 1401658 - DNA, 15 bp, Homo sapiens
tacttaactttgcgt

SEQ ID NO: 1401659 - DNA, 15 bp, Homo sapiens
ttacttaactttgcg

SEQ ID NO: 1401660 - DNA, 15 bp, Homo sapiens
tttacttaactttgc

SEQ ID NO: 1401661 - DNA, 15 bp, Homo sapiens
ttttacttaactttg

SEQ ID NO: 1401662 - DNA, 15 bp, Homo sapiens
attttacttaacttt

SEQ ID NO: 1401663 - DNA, 15 bp, Homo sapiens
cattttacttaactt

SEQ ID NO: 1401664 - DNA, 15 bp, Homo sapiens
tcattttacttaact

SEQ ID NO: 1401665 - DNA, 15 bp, Homo sapiens
gtcattttacttaac

SEQ ID NO: 1401666 - DNA, 15 bp, Homo sapiens
agtcattttacttaa

SEQ ID NO: 1401667 - DNA, 15 bp, Homo sapiens
tagtcattttactta

SEQ ID NO: 1401668 - DNA, 15 bp, Homo sapiens
ttagtcattttactt

SEQ ID NO: 1401669 - DNA, 15 bp, Homo sapiens
attagtcattttact

SEQ ID NO: 1401670 - DNA, 15 bp, Homo sapiens
tattagtcattttac

SEQ ID NO: 1401671 - DNA, 15 bp, Homo sapiens
ttattagtcatttta

SEQ ID NO: 1401672 - DNA, 15 bp, Homo sapiens
tcttattagtcattt

SEQ ID NO: 1401673 - DNA, 15 bp, Homo sapiens
atcttattagtcatt

SEQ ID NO: 1401674 - DNA, 15 bp, Homo sapiens
tatcttattagtcat

SEQ ID NO: 1401675 - DNA, 15 bp, Homo sapiens
atatcttattagtca

SEQ ID NO: 1401676 - DNA, 15 bp, Homo sapiens
aatatcttattagtc

SEQ ID NO: 1401677 - DNA, 15 bp, Homo sapiens
caatatcttattagt

SEQ ID NO: 1401678 - DNA, 15 bp, Homo sapiens
tcaatatcttattag

SEQ ID NO: 1401679 - DNA, 15 bp, Homo sapiens
gtcaatatcttatta

SEQ ID NO: 1401680 - DNA, 15 bp, Homo sapiens
cgtcaatatcttatt

SEQ ID NO: 1401681 - DNA, 15 bp, Homo sapiens
acgtcaatatcttat

SEQ ID NO: 1401682 - DNA, 15 bp, Homo sapiens
aacgtcaatatctta

SEQ ID NO: 1401683 - DNA, 15 bp, Homo sapiens
aaacgtcaatatctt

SEQ ID NO: 1401684 - DNA, 15 bp, Homo sapiens
caaacgtcaatatct

SEQ ID NO: 1401685 - DNA, 15 bp, Homo sapiens
ccaaacgtcaatatc

SEQ ID NO: 1401686 - DNA, 15 bp, Homo sapiens
cccaaacgtcaatat

SEQ ID NO: 1401687 - DNA, 15 bp, Homo sapiens
tcccaaacgtcaata

SEQ ID NO: 1401688 - DNA, 15 bp, Homo sapiens
ctcccaaacgtcaat

SEQ ID NO: 1401689 - DNA, 15 bp, Homo sapiens
cctcccaaacgtcaa

SEQ ID NO: 1401690 - DNA, 15 bp, Homo sapiens
gcctcccaaacgtca

SEQ ID NO: 1401691 - DNA, 15 bp, Homo sapiens
ggcctcccaaacgtc

SEQ ID NO: 1401692 - DNA, 15 bp, Homo sapiens
cggcctcccaaacgt

SEQ ID NO: 1401693 - DNA, 15 bp, Homo sapiens
tcggcctcccaaacg

SEQ ID NO: 1401694 - DNA, 15 bp, Homo sapiens
cgtgatctgcccgcc

SEQ ID NO: 1401695 - DNA, 15 bp, Homo sapiens
tcgtgatctgcccgc

SEQ ID NO: 1401696 - DNA, 15 bp, Homo sapiens
ctcgtgatctgcccg

SEQ ID NO: 1401697 - DNA, 15 bp, Homo sapiens
cctcgtgatctgccc

SEQ ID NO: 1401698 - DNA, 15 bp, Homo sapiens
gggtctcgatctcct

SEQ ID NO: 1401699 - DNA, 15 bp, Homo sapiens
agggtctcgatctcc

SEQ ID NO: 1401700 - DNA, 15 bp, Homo sapiens
gagggtctcgatctc

SEQ ID NO: 1401701 - DNA, 15 bp, Homo sapiens
ggagggtctcgatct

SEQ ID NO: 1401702 - DNA, 15 bp, Homo sapiens
aggagggtctcgatc

SEQ ID NO: 1401703 - DNA, 15 bp, Homo sapiens
caggagggtctcgat

SEQ ID NO: 1401704 - DNA, 15 bp, Homo sapiens
ccaggagggtctcga

SEQ ID NO: 1401705 - DNA, 15 bp, Homo sapiens
gccaggagggtctcg

SEQ ID NO: 1401706 - DNA, 15 bp, Homo sapiens
agccaggagggtctc

SEQ ID NO: 1401707 - DNA, 15 bp, Homo sapiens
tagccaggagggtct

SEQ ID NO: 1401708 - DNA, 15 bp, Homo sapiens
ttagccaggagggtc

SEQ ID NO: 1401709 - DNA, 15 bp, Homo sapiens
attagccaggagggt

SEQ ID NO: 1401710 - DNA, 15 bp, Homo sapiens
tattagccaggaggg

SEQ ID NO: 1401711 - DNA, 15 bp, Homo sapiens
gtattagccaggagg

SEQ ID NO: 1401712 - DNA, 15 bp, Homo sapiens
cgtattagccaggag

SEQ ID NO: 1401713 - DNA, 15 bp, Homo sapiens
atttcaccgtattag

SEQ ID NO: 1401714 - DNA, 15 bp, Homo sapiens
gatttcaccgtatta

SEQ ID NO: 1401715 - DNA, 15 bp, Homo sapiens
ggatttcaccgtatt

SEQ ID NO: 1401716 - DNA, 15 bp, Homo sapiens
gggatttcaccgtat

SEQ ID NO: 1401717 - DNA, 15 bp, Homo sapiens
cgggatttcaccgta

SEQ ID NO: 1401718 - DNA, 15 bp, Homo sapiens
tgttttgtattttta

SEQ ID NO: 1401719 - DNA, 15 bp, Homo sapiens
ttgttttgtattttt

SEQ ID NO: 1401720 - DNA, 15 bp, Homo sapiens
tttgttttgtatttt

SEQ ID NO: 1401721 - DNA, 15 bp, Homo sapiens
gtttgttttgtattt

SEQ ID NO: 1401722 - DNA, 15 bp, Homo sapiens
tgtttgttttgtatt

SEQ ID NO: 1401723 - DNA, 15 bp, Homo sapiens
ttgtttgttttgtat

SEQ ID NO: 1401724 - DNA, 15 bp, Homo sapiens
tttgtttgttttgta

SEQ ID NO: 1401725 - DNA, 15 bp, Homo sapiens
aggtttttgtttgtt

SEQ ID NO: 1401726 - DNA, 15 bp, Homo sapiens
taggtttttgtttgt

SEQ ID NO: 1401727 - DNA, 15 bp, Homo sapiens
ctaggtttttgtttg

SEQ ID NO: 1401728 - DNA, 15 bp, Homo sapiens
gctaggtttttgttt

SEQ ID NO: 1401729 - DNA, 15 bp, Homo sapiens
ggctaggtttttgtt

SEQ ID NO: 1401730 - DNA, 15 bp, Homo sapiens
cggctaggtttttgt

SEQ ID NO: 1401731 - DNA, 15 bp, Homo sapiens
ccggctaggtttttg

SEQ ID NO: 1401732 - DNA, 15 bp, Homo sapiens
cccggctaggttttt

SEQ ID NO: 1401733 - DNA, 15 bp, Homo sapiens
gcccggctaggtttt

SEQ ID NO: 1401734 - DNA, 15 bp, Homo sapiens
cgcccggctaggttt

SEQ ID NO: 1401735 - DNA, 15 bp, Homo sapiens
acgcccggctaggtt

SEQ ID NO: 1401736 - DNA, 15 bp, Homo sapiens
cacgcccggctaggt

SEQ ID NO: 1401737 - DNA, 15 bp, Homo sapiens
ccacgcccggctagg

SEQ ID NO: 1401738 - DNA, 15 bp, Homo sapiens
ctacaggcacctgcc

SEQ ID NO: 1401739 - DNA, 15 bp, Homo sapiens
actacaggcacctgc

SEQ ID NO: 1401740 - DNA, 15 bp, Homo sapiens
tactacaggcacctg

SEQ ID NO: 1401741 - DNA, 15 bp, Homo sapiens
gtactacaggcacct

SEQ ID NO: 1401742 - DNA, 15 bp, Homo sapiens
ggtactacaggcacc

SEQ ID NO: 1401743 - DNA, 15 bp, Homo sapiens
tggtactacaggcac

SEQ ID NO: 1401744 - DNA, 15 bp, Homo sapiens
ctggtactacaggca

SEQ ID NO: 1401745 - DNA, 15 bp, Homo sapiens
gctggtactacaggc

SEQ ID NO: 1401746 - DNA, 15 bp, Homo sapiens
agctggtactacagg

SEQ ID NO: 1401747 - DNA, 15 bp, Homo sapiens
tagctggtactacag

SEQ ID NO: 1401748 - DNA, 15 bp, Homo sapiens
gtagctggtactaca

SEQ ID NO: 1401749 - DNA, 15 bp, Homo sapiens
agtagctggtactac

SEQ ID NO: 1401750 - DNA, 15 bp, Homo sapiens
gagtagctggtacta

SEQ ID NO: 1401751 - DNA, 15 bp, Homo sapiens
cgagtagctggtact

SEQ ID NO: 1401752 - DNA, 15 bp, Homo sapiens
ccgagtagctggtac

SEQ ID NO: 1401753 - DNA, 15 bp, Homo sapiens
cccgagtagctggta

SEQ ID NO: 1401754 - DNA, 15 bp, Homo sapiens
tcccgagtagctggt

SEQ ID NO: 1401755 - DNA, 15 bp, Homo sapiens
tctcagcctcccgag

SEQ ID NO: 1401756 - DNA, 15 bp, Homo sapiens
gtctcagcctcccga

SEQ ID NO: 1401757 - DNA, 15 bp, Homo sapiens
cattctcctgtctca

SEQ ID NO: 1401758 - DNA, 15 bp, Homo sapiens
ccattctcctgtctc

SEQ ID NO: 1401759 - DNA, 15 bp, Homo sapiens
gccattctcctgtct

SEQ ID NO: 1401760 - DNA, 15 bp, Homo sapiens
cgccattctcctgtc

SEQ ID NO: 1401761 - DNA, 15 bp, Homo sapiens
acgccattctcctgt

SEQ ID NO: 1401762 - DNA, 15 bp, Homo sapiens
aggttcacgccattc

SEQ ID NO: 1401763 - DNA, 15 bp, Homo sapiens
caggttcacgccatt

SEQ ID NO: 1401764 - DNA, 15 bp, Homo sapiens
tgatctctgctcact

SEQ ID NO: 1401765 - DNA, 15 bp, Homo sapiens
gtgatctctgctcac

SEQ ID NO: 1401766 - DNA, 15 bp, Homo sapiens
ggtgatctctgctca

SEQ ID NO: 1401767 - DNA, 15 bp, Homo sapiens
gggtgatctctgctc

SEQ ID NO: 1401768 - DNA, 15 bp, Homo sapiens
ggggtgatctctgct

SEQ ID NO: 1401769 - DNA, 15 bp, Homo sapiens
tggggtgatctctgc

SEQ ID NO: 1401770 - DNA, 15 bp, Homo sapiens
gtggggtgatctctg

SEQ ID NO: 1401771 - DNA, 15 bp, Homo sapiens
agtggggtgatctct

SEQ ID NO: 1401772 - DNA, 15 bp, Homo sapiens
cagtggggtgatctc

SEQ ID NO: 1401773 - DNA, 15 bp, Homo sapiens
gcagtggggtgatct

SEQ ID NO: 1401774 - DNA, 15 bp, Homo sapiens
tgcagtggggtgatc

SEQ ID NO: 1401775 - DNA, 15 bp, Homo sapiens
gtgcagtggggtgat

SEQ ID NO: 1401776 - DNA, 15 bp, Homo sapiens
agtgcagtggggtga

SEQ ID NO: 1401777 - DNA, 15 bp, Homo sapiens
gagtgcagtggggtg

SEQ ID NO: 1401778 - DNA, 15 bp, Homo sapiens
ggagtgcagtggggt

SEQ ID NO: 1401779 - DNA, 15 bp, Homo sapiens
ctcgcccaggctgga

SEQ ID NO: 1401780 - DNA, 15 bp, Homo sapiens
tctcgcccaggctgg

SEQ ID NO: 1401781 - DNA, 15 bp, Homo sapiens
ctctcgcccaggctg

SEQ ID NO: 1401782 - DNA, 15 bp, Homo sapiens
tctctcgcccaggct

SEQ ID NO: 1401783 - DNA, 15 bp, Homo sapiens
ctctctcgcccaggc

SEQ ID NO: 1401784 - DNA, 15 bp, Homo sapiens
gctctctcgcccagg

SEQ ID NO: 1401785 - DNA, 15 bp, Homo sapiens
cgctctctcgcccag

SEQ ID NO: 1401786 - DNA, 15 bp, Homo sapiens
tcgctctctcgccca

SEQ ID NO: 1401787 - DNA, 15 bp, Homo sapiens
ctcgctctctcgccc

SEQ ID NO: 1401788 - DNA, 15 bp, Homo sapiens
tctcgctctctcgcc

SEQ ID NO: 1401789 - DNA, 15 bp, Homo sapiens
gtctcgctctctcgc

SEQ ID NO: 1401790 - DNA, 15 bp, Homo sapiens
agtctcgctctctcg

SEQ ID NO: 1401791 - DNA, 15 bp, Homo sapiens
gagtctcgctctctc

SEQ ID NO: 1401792 - DNA, 15 bp, Homo sapiens
ggagtctcgctctct

SEQ ID NO: 1401793 - DNA, 15 bp, Homo sapiens
tggagtctcgctctc

SEQ ID NO: 1401794 - DNA, 15 bp, Homo sapiens
atatctttttttttt

SEQ ID NO: 1401795 - DNA, 15 bp, Homo sapiens
gatatcttttttttt

SEQ ID NO: 1401796 - DNA, 15 bp, Homo sapiens
tgatatctttttttt

SEQ ID NO: 1401797 - DNA, 15 bp, Homo sapiens
ttgatatcttttttt

SEQ ID NO: 1401798 - DNA, 15 bp, Homo sapiens
gttgatatctttttt

SEQ ID NO: 1401799 - DNA, 15 bp, Homo sapiens
cgttgatatcttttt

SEQ ID NO: 1401800 - DNA, 15 bp, Homo sapiens
acgttgatatctttt

SEQ ID NO: 1401801 - DNA, 15 bp, Homo sapiens
aacgttgatatcttt

SEQ ID NO: 1401802 - DNA, 15 bp, Homo sapiens
caacgttgatatctt

SEQ ID NO: 1401803 - DNA, 15 bp, Homo sapiens
tcaacgttgatatct

SEQ ID NO: 1401804 - DNA, 15 bp, Homo sapiens
atcaacgttgatatc

SEQ ID NO: 1401805 - DNA, 15 bp, Homo sapiens
catcaacgttgatat

SEQ ID NO: 1401806 - DNA, 15 bp, Homo sapiens
tcatcaacgttgata

SEQ ID NO: 1401807 - DNA, 15 bp, Homo sapiens
ctcatcaacgttgat

SEQ ID NO: 1401808 - DNA, 15 bp, Homo sapiens
cctcatcaacgttga

SEQ ID NO: 1401809 - DNA, 15 bp, Homo sapiens
tcctcatcaacgttg

SEQ ID NO: 1401810 - DNA, 15 bp, Homo sapiens
ctcctcatcaacgtt

SEQ ID NO: 1401811 - DNA, 15 bp, Homo sapiens
cctcctcatcaacgt

SEQ ID NO: 1401812 - DNA, 15 bp, Homo sapiens
acctcctcatcaacg

SEQ ID NO: 1401813 - DNA, 15 bp, Homo sapiens
gacctcctcatcaac

SEQ ID NO: 1401814 - DNA, 15 bp, Homo sapiens
ggacctcctcatcaa

SEQ ID NO: 1401815 - DNA, 15 bp, Homo sapiens
gggacctcctcatca

SEQ ID NO: 1401816 - DNA, 15 bp, Homo sapiens
agggacctcctcatc

SEQ ID NO: 1401817 - DNA, 15 bp, Homo sapiens
cagggacctcctcat

SEQ ID NO: 1401818 - DNA, 15 bp, Homo sapiens
ccagggacctcctca

SEQ ID NO: 1401819 - DNA, 15 bp, Homo sapiens
accagggacctcctc

SEQ ID NO: 1401820 - DNA, 15 bp, Homo sapiens
taccagggacctcct

SEQ ID NO: 1401821 - DNA, 15 bp, Homo sapiens
ctaccagggacctcc

SEQ ID NO: 1401822 - DNA, 15 bp, Homo sapiens
gctaccagggacctc

SEQ ID NO: 1401823 - DNA, 15 bp, Homo sapiens
ggctaccagggacct

SEQ ID NO: 1401824 - DNA, 15 bp, Homo sapiens
gggctaccagggacc

SEQ ID NO: 1401825 - DNA, 15 bp, Homo sapiens
agggctaccagggac

SEQ ID NO: 1401826 - DNA, 15 bp, Homo sapiens
aagggctaccaggga

SEQ ID NO: 1401827 - DNA, 15 bp, Homo sapiens
gaagggctaccaggg

SEQ ID NO: 1401828 - DNA, 15 bp, Homo sapiens
tgaagggctaccagg

SEQ ID NO: 1401829 - DNA, 15 bp, Homo sapiens
ttgaagggctaccag

SEQ ID NO: 1401830 - DNA, 15 bp, Homo sapiens
cttgaagggctacca

SEQ ID NO: 1401831 - DNA, 15 bp, Homo sapiens
tcttgaagggctacc

SEQ ID NO: 1401832 - DNA, 15 bp, Homo sapiens
ctcttgaagggctac

SEQ ID NO: 1401833 - DNA, 15 bp, Homo sapiens
gctcttgaagggcta

SEQ ID NO: 1401834 - DNA, 15 bp, Homo sapiens
agctcttgaagggct

SEQ ID NO: 1401835 - DNA, 15 bp, Homo sapiens
gagctcttgaagggc

SEQ ID NO: 1401836 - DNA, 15 bp, Homo sapiens
agagctcttgaaggg

SEQ ID NO: 1401837 - DNA, 15 bp, Homo sapiens
cagagctcttgaagg

SEQ ID NO: 1401838 - DNA, 15 bp, Homo sapiens
acagagctcttgaag

SEQ ID NO: 1401839 - DNA, 15 bp, Homo sapiens
gacagagctcttgaa

SEQ ID NO: 1401840 - DNA, 15 bp, Homo sapiens
ggacagagctcttga

SEQ ID NO: 1401841 - DNA, 15 bp, Homo sapiens
aggacagagctcttg

SEQ ID NO: 1401842 - DNA, 15 bp, Homo sapiens
taggacagagctctt

SEQ ID NO: 1401843 - DNA, 15 bp, Homo sapiens
ataggacagagctct

SEQ ID NO: 1401844 - DNA, 15 bp, Homo sapiens
cataggacagagctc

SEQ ID NO: 1401845 - DNA, 15 bp, Homo sapiens
tcataggacagagct

SEQ ID NO: 1401846 - DNA, 15 bp, Homo sapiens
ttcataggacagagc

SEQ ID NO: 1401847 - DNA, 15 bp, Homo sapiens
gttcataggacagag

SEQ ID NO: 1401848 - DNA, 15 bp, Homo sapiens
tgttcataggacaga

SEQ ID NO: 1401849 - DNA, 15 bp, Homo sapiens
ttgttcataggacag

SEQ ID NO: 1401850 - DNA, 15 bp, Homo sapiens
cttgttcataggaca

SEQ ID NO: 1401851 - DNA, 15 bp, Homo sapiens
tcttgttcataggac

SEQ ID NO: 1401852 - DNA, 15 bp, Homo sapiens
ctcttgttcatagga

SEQ ID NO: 1401853 - DNA, 15 bp, Homo sapiens
tctcttgttcatagg

SEQ ID NO: 1401854 - DNA, 15 bp, Homo sapiens
ctctcttgttcatag

SEQ ID NO: 1401855 - DNA, 15 bp, Homo sapiens
cctctcttgttcata

SEQ ID NO: 1401856 - DNA, 15 bp, Homo sapiens
ccctctcttgttcat

SEQ ID NO: 1401857 - DNA, 15 bp, Homo sapiens
gccctctcttgttca

SEQ ID NO: 1401858 - DNA, 15 bp, Homo sapiens
tgccctctcttgttc

SEQ ID NO: 1401859 - DNA, 15 bp, Homo sapiens
ctgccctctcttgtt

SEQ ID NO: 1401860 - DNA, 15 bp, Homo sapiens
tctgccctctcttgt

SEQ ID NO: 1401861 - DNA, 15 bp, Homo sapiens
ttctgccctctcttg

SEQ ID NO: 1401862 - DNA, 15 bp, Homo sapiens
tttctgccctctctt

SEQ ID NO: 1401863 - DNA, 15 bp, Homo sapiens
gtttctgccctctct

SEQ ID NO: 1401864 - DNA, 15 bp, Homo sapiens
ggtttctgccctctc

SEQ ID NO: 1401865 - DNA, 15 bp, Homo sapiens
tggtttctgccctct

SEQ ID NO: 1401866 - DNA, 15 bp, Homo sapiens
gtggtttctgccctc

SEQ ID NO: 1401867 - DNA, 15 bp, Homo sapiens
ggtggtttctgccct

SEQ ID NO: 1401868 - DNA, 15 bp, Homo sapiens
aggtggtttctgccc

SEQ ID NO: 1401869 - DNA, 15 bp, Homo sapiens
aaggtggtttctgcc

SEQ ID NO: 1401870 - DNA, 15 bp, Homo sapiens
caaggtggtttctgc

SEQ ID NO: 1401871 - DNA, 15 bp, Homo sapiens
tcaaggtggtttctg

SEQ ID NO: 1401872 - DNA, 15 bp, Homo sapiens
atcaaggtggtttct

SEQ ID NO: 1401873 - DNA, 15 bp, Homo sapiens
catcaaggtggtttc

SEQ ID NO: 1401874 - DNA, 15 bp, Homo sapiens
ccatcaaggtggttt

SEQ ID NO: 1401875 - DNA, 15 bp, Homo sapiens
tccatcaaggtggtt

SEQ ID NO: 1401876 - DNA, 15 bp, Homo sapiens
ctccatcaaggtggt

SEQ ID NO: 1401877 - DNA, 15 bp, Homo sapiens
gctccatcaaggtgg

SEQ ID NO: 1401878 - DNA, 15 bp, Homo sapiens
tgctccatcaaggtg

SEQ ID NO: 1401879 - DNA, 15 bp, Homo sapiens
ttgctccatcaaggt

SEQ ID NO: 1401880 - DNA, 15 bp, Homo sapiens
cttgctccatcaagg

SEQ ID NO: 1401881 - DNA, 15 bp, Homo sapiens
acttgctccatcaag

SEQ ID NO: 1401882 - DNA, 15 bp, Homo sapiens
cacttgctccatcaa

SEQ ID NO: 1401883 - DNA, 15 bp, Homo sapiens
ccacttgctccatca

SEQ ID NO: 1401884 - DNA, 15 bp, Homo sapiens
cccacttgctccatc

SEQ ID NO: 1401885 - DNA, 15 bp, Homo sapiens
ccccacttgctccat

SEQ ID NO: 1401886 - DNA, 15 bp, Homo sapiens
tccccacttgctcca

SEQ ID NO: 1401887 - DNA, 15 bp, Homo sapiens
atccccacttgctcc

SEQ ID NO: 1401888 - DNA, 15 bp, Homo sapiens
catccccacttgctc

SEQ ID NO: 1401889 - DNA, 15 bp, Homo sapiens
tcatccccacttgct

SEQ ID NO: 1401890 - DNA, 15 bp, Homo sapiens
ctcatccccacttgc

SEQ ID NO: 1401891 - DNA, 15 bp, Homo sapiens
cctcatccccacttg

SEQ ID NO: 1401892 - DNA, 15 bp, Homo sapiens
tcctcatccccactt

SEQ ID NO: 1401893 - DNA, 15 bp, Homo sapiens
gtcctcatccccact

SEQ ID NO: 1401894 - DNA, 15 bp, Homo sapiens
tgtcctcatccccac

SEQ ID NO: 1401895 - DNA, 15 bp, Homo sapiens
atgtcctcatcccca

SEQ ID NO: 1401896 - DNA, 15 bp, Homo sapiens
catgtcctcatcccc

SEQ ID NO: 1401897 - DNA, 15 bp, Homo sapiens
ccatgtcctcatccc

SEQ ID NO: 1401898 - DNA, 15 bp, Homo sapiens
cccatgtcctcatcc

SEQ ID NO: 1401899 - DNA, 15 bp, Homo sapiens
ccccatgtcctcatc

SEQ ID NO: 1401900 - DNA, 15 bp, Homo sapiens
gccccatgtcctcat

SEQ ID NO: 1401901 - DNA, 15 bp, Homo sapiens
tgccccatgtcctca

SEQ ID NO: 1401902 - DNA, 15 bp, Homo sapiens
ttgccccatgtcctc

SEQ ID NO: 1401903 - DNA, 15 bp, Homo sapiens
attgccccatgtcct

SEQ ID NO: 1401904 - DNA, 15 bp, Homo sapiens
cattgccccatgtcc

SEQ ID NO: 1401905 - DNA, 15 bp, Homo sapiens
tcattgccccatgtc

SEQ ID NO: 1401906 - DNA, 15 bp, Homo sapiens
ttcattgccccatgt

SEQ ID NO: 1401907 - DNA, 15 bp, Homo sapiens
attcattgccccatg

SEQ ID NO: 1401908 - DNA, 15 bp, Homo sapiens
cattcattgccccat

SEQ ID NO: 1401909 - DNA, 15 bp, Homo sapiens
acattcattgcccca

SEQ ID NO: 1401910 - DNA, 15 bp, Homo sapiens
cacattcattgcccc

SEQ ID NO: 1401911 - DNA, 15 bp, Homo sapiens
tcacattcattgccc

SEQ ID NO: 1401912 - DNA, 15 bp, Homo sapiens
ttcacattcattgcc

SEQ ID NO: 1401913 - DNA, 15 bp, Homo sapiens
cttcacattcattgc

SEQ ID NO: 1401914 - DNA, 15 bp, Homo sapiens
acttcacattcattg

SEQ ID NO: 1401915 - DNA, 15 bp, Homo sapiens
cacttcacattcatt

SEQ ID NO: 1401916 - DNA, 15 bp, Homo sapiens
tcacttcacattcat

SEQ ID NO: 1401917 - DNA, 15 bp, Homo sapiens
atcacttcacattca

SEQ ID NO: 1401918 - DNA, 15 bp, Homo sapiens
catcacttcacattc

SEQ ID NO: 1401919 - DNA, 15 bp, Homo sapiens
ccatcacttcacatt

SEQ ID NO: 1401920 - DNA, 15 bp, Homo sapiens
cccatcacttcacat

SEQ ID NO: 1401921 - DNA, 15 bp, Homo sapiens
ccccatcacttcaca

SEQ ID NO: 1401922 - DNA, 15 bp, Homo sapiens
cccccatcacttcac

SEQ ID NO: 1401923 - DNA, 15 bp, Homo sapiens
acccccatcacttca

SEQ ID NO: 1401924 - DNA, 15 bp, Homo sapiens
tacccccatcacttc

SEQ ID NO: 1401925 - DNA, 15 bp, Homo sapiens
ttacccccatcactt

SEQ ID NO: 1401926 - DNA, 15 bp, Homo sapiens
gttacccccatcact

SEQ ID NO: 1401927 - DNA, 15 bp, Homo sapiens
agttacccccatcac

SEQ ID NO: 1401928 - DNA, 15 bp, Homo sapiens
aagttacccccatca

SEQ ID NO: 1401929 - DNA, 15 bp, Homo sapiens
caagttacccccatc

SEQ ID NO: 1401930 - DNA, 15 bp, Homo sapiens
tcaagttacccccat

SEQ ID NO: 1401931 - DNA, 15 bp, Homo sapiens
ctcaagttaccccca

SEQ ID NO: 1401932 - DNA, 15 bp, Homo sapiens
cctcaagttaccccc

SEQ ID NO: 1401933 - DNA, 15 bp, Homo sapiens
tcctcaagttacccc

SEQ ID NO: 1401934 - DNA, 15 bp, Homo sapiens
ttcctcaagttaccc

SEQ ID NO: 1401935 - DNA, 15 bp, Homo sapiens
tttcctcaagttacc

SEQ ID NO: 1401936 - DNA, 15 bp, Homo sapiens
atttcctcaagttac

SEQ ID NO: 1401937 - DNA, 15 bp, Homo sapiens
tatttcctcaagtta

SEQ ID NO: 1401938 - DNA, 15 bp, Homo sapiens
ctatttcctcaagtt

SEQ ID NO: 1401939 - DNA, 15 bp, Homo sapiens
gctatttcctcaagt

SEQ ID NO: 1401940 - DNA, 15 bp, Homo sapiens
tgctatttcctcaag

SEQ ID NO: 1401941 - DNA, 15 bp, Homo sapiens
ttgctatttcctcaa

SEQ ID NO: 1401942 - DNA, 15 bp, Homo sapiens
cttgctatttcctca

SEQ ID NO: 1401943 - DNA, 15 bp, Homo sapiens
ccttgctatttcctc

SEQ ID NO: 1401944 - DNA, 15 bp, Homo sapiens
accttgctatttcct

SEQ ID NO: 1401945 - DNA, 15 bp, Homo sapiens
gaccttgctatttcc

SEQ ID NO: 1401946 - DNA, 15 bp, Homo sapiens
tgaccttgctatttc

SEQ ID NO: 1401947 - DNA, 15 bp, Homo sapiens
ctgaccttgctattt

SEQ ID NO: 1401948 - DNA, 15 bp, Homo sapiens
actgaccttgctatt

SEQ ID NO: 1401949 - DNA, 15 bp, Homo sapiens
tactgaccttgctat

SEQ ID NO: 1401950 - DNA, 15 bp, Homo sapiens
atactgaccttgcta

SEQ ID NO: 1401951 - DNA, 15 bp, Homo sapiens
tatactgaccttgct

SEQ ID NO: 1401952 - DNA, 15 bp, Homo sapiens
ctatactgaccttgc

SEQ ID NO: 1401953 - DNA, 15 bp, Homo sapiens
cctatactgaccttg

SEQ ID NO: 1401954 - DNA, 15 bp, Homo sapiens
tcctatactgacctt

SEQ ID NO: 1401955 - DNA, 15 bp, Homo sapiens
ctcctatactgacct

SEQ ID NO: 1401956 - DNA, 15 bp, Homo sapiens
tctcctatactgacc

SEQ ID NO: 1401957 - DNA, 15 bp, Homo sapiens
ctctcctatactgac

SEQ ID NO: 1401958 - DNA, 15 bp, Homo sapiens
tctctcctatactga

SEQ ID NO: 1401959 - DNA, 15 bp, Homo sapiens
ctctctcctatactg

SEQ ID NO: 1401960 - DNA, 15 bp, Homo sapiens
cctctctcctatact

SEQ ID NO: 1401961 - DNA, 15 bp, Homo sapiens
tcctctctcctatac

SEQ ID NO: 1401962 - DNA, 15 bp, Homo sapiens
ttcctctctcctata

SEQ ID NO: 1401963 - DNA, 15 bp, Homo sapiens
cttcctctctcctat

SEQ ID NO: 1401964 - DNA, 15 bp, Homo sapiens
ccttcctctctccta

SEQ ID NO: 1401965 - DNA, 15 bp, Homo sapiens
tccttcctctctcct

SEQ ID NO: 1401966 - DNA, 15 bp, Homo sapiens
atccttcctctctcc

SEQ ID NO: 1401967 - DNA, 15 bp, Homo sapiens
gatccttcctctctc

SEQ ID NO: 1401968 - DNA, 15 bp, Homo sapiens
agatccttcctctct

SEQ ID NO: 1401969 - DNA, 15 bp, Homo sapiens
aagatccttcctctc

SEQ ID NO: 1401970 - DNA, 15 bp, Homo sapiens
gaagatccttcctct

SEQ ID NO: 1401971 - DNA, 15 bp, Homo sapiens
tgaagatccttcctc

SEQ ID NO: 1401972 - DNA, 15 bp, Homo sapiens
ttgaagatccttcct

SEQ ID NO: 1401973 - DNA, 15 bp, Homo sapiens
cttgaagatccttcc

SEQ ID NO: 1401974 - DNA, 15 bp, Homo sapiens
acttgaagatccttc

SEQ ID NO: 1401975 - DNA, 15 bp, Homo sapiens
gacttgaagatcctt

SEQ ID NO: 1401976 - DNA, 15 bp, Homo sapiens
tgacttgaagatcct

SEQ ID NO: 1401977 - DNA, 15 bp, Homo sapiens
ctgacttgaagatcc

SEQ ID NO: 1401978 - DNA, 15 bp, Homo sapiens
tctgacttgaagatc

SEQ ID NO: 1401979 - DNA, 15 bp, Homo sapiens
ttctgacttgaagat

SEQ ID NO: 1401980 - DNA, 15 bp, Homo sapiens
tttctgacttgaaga

SEQ ID NO: 1401981 - DNA, 15 bp, Homo sapiens
ctttctgacttgaag

SEQ ID NO: 1401982 - DNA, 15 bp, Homo sapiens
tctttctgacttgaa

SEQ ID NO: 1401983 - DNA, 15 bp, Homo sapiens
ttctttctgacttga

SEQ ID NO: 1401984 - DNA, 15 bp, Homo sapiens
cttctttctgacttg

SEQ ID NO: 1401985 - DNA, 15 bp, Homo sapiens
tcttctttctgactt

SEQ ID NO: 1401986 - DNA, 15 bp, Homo sapiens
ctcttctttctgact

SEQ ID NO: 1401987 - DNA, 15 bp, Homo sapiens
tctcttctttctgac

SEQ ID NO: 1401988 - DNA, 15 bp, Homo sapiens
gttctcttctttctg

SEQ ID NO: 1401989 - DNA, 15 bp, Homo sapiens
tgttctcttctttct

SEQ ID NO: 1401990 - DNA, 15 bp, Homo sapiens
ttgttctcttctttc

SEQ ID NO: 1401991 - DNA, 15 bp, Homo sapiens
cttgttctcttcttt

SEQ ID NO: 1401992 - DNA, 15 bp, Homo sapiens
acttgttctcttctt

SEQ ID NO: 1401993 - DNA, 15 bp, Homo sapiens
cacttgttctcttct

SEQ ID NO: 1401994 - DNA, 15 bp, Homo sapiens
ccacttgttctcttc

SEQ ID NO: 1401995 - DNA, 15 bp, Homo sapiens
tccacttgttctctt

SEQ ID NO: 1401996 - DNA, 15 bp, Homo sapiens
ctccacttgttctct

SEQ ID NO: 1401997 - DNA, 15 bp, Homo sapiens
tctccacttgttctc

SEQ ID NO: 1401998 - DNA, 15 bp, Homo sapiens
ttctccacttgttct

SEQ ID NO: 1401999 - DNA, 15 bp, Homo sapiens
cttctccacttgttc

SEQ ID NO: 1402000 - DNA, 15 bp, Homo sapiens
ccttctccacttgtt

SEQ ID NO: 1402001 - DNA, 15 bp, Homo sapiens
accttctccacttgt

SEQ ID NO: 1402002 - DNA, 15 bp, Homo sapiens
gaccttctccacttg

SEQ ID NO: 1402003 - DNA, 15 bp, Homo sapiens
tgaccttctccactt

SEQ ID NO: 1402004 - DNA, 15 bp, Homo sapiens
ctgaccttctccact

SEQ ID NO: 1402005 - DNA, 15 bp, Homo sapiens
cctgaccttctccac

SEQ ID NO: 1402006 - DNA, 15 bp, Homo sapiens
tcctgaccttctcca

SEQ ID NO: 1402007 - DNA, 15 bp, Homo sapiens
ttcctgaccttctcc

SEQ ID NO: 1402008 - DNA, 15 bp, Homo sapiens
cttcctgaccttctc

SEQ ID NO: 1402009 - DNA, 15 bp, Homo sapiens
ccttcctgaccttct

SEQ ID NO: 1402010 - DNA, 15 bp, Homo sapiens
tccttcctgaccttc

SEQ ID NO: 1402011 - DNA, 15 bp, Homo sapiens
ctccttcctgacctt

SEQ ID NO: 1402012 - DNA, 15 bp, Homo sapiens
tctccttcctgacct

SEQ ID NO: 1402013 - DNA, 15 bp, Homo sapiens
ttctccttcctgacc

SEQ ID NO: 1402014 - DNA, 15 bp, Homo sapiens
cttctccttcctgac

SEQ ID NO: 1402015 - DNA, 15 bp, Homo sapiens
tcttctccttcctga

SEQ ID NO: 1402016 - DNA, 15 bp, Homo sapiens
ctcttctccttcctg

SEQ ID NO: 1402017 - DNA, 15 bp, Homo sapiens
tctcttctccttcct

SEQ ID NO: 1402018 - DNA, 15 bp, Homo sapiens
ttctcttctccttcc

SEQ ID NO: 1402019 - DNA, 15 bp, Homo sapiens
attctcttctccttc

SEQ ID NO: 1402020 - DNA, 15 bp, Homo sapiens
aattctcttctcctt

SEQ ID NO: 1402021 - DNA, 15 bp, Homo sapiens
caattctcttctcct

SEQ ID NO: 1402022 - DNA, 15 bp, Homo sapiens
tcaattctcttctcc

SEQ ID NO: 1402023 - DNA, 15 bp, Homo sapiens
ctcaattctcttctc

SEQ ID NO: 1402024 - DNA, 15 bp, Homo sapiens
tctcaattctcttct

SEQ ID NO: 1402025 - DNA, 15 bp, Homo sapiens
ttctcaattctcttc

SEQ ID NO: 1402026 - DNA, 15 bp, Homo sapiens
gttctcaattctctt

SEQ ID NO: 1402027 - DNA, 15 bp, Homo sapiens
tgttctcaattctct

SEQ ID NO: 1402028 - DNA, 15 bp, Homo sapiens
gtgttctcaattctc

SEQ ID NO: 1402029 - DNA, 15 bp, Homo sapiens
agtgttctcaattct

SEQ ID NO: 1402030 - DNA, 15 bp, Homo sapiens
gagtgttctcaattc

SEQ ID NO: 1402031 - DNA, 15 bp, Homo sapiens
tgagtgttctcaatt

SEQ ID NO: 1402032 - DNA, 15 bp, Homo sapiens
ttgagtgttctcaat

SEQ ID NO: 1402033 - DNA, 15 bp, Homo sapiens
tttgagtgttctcaa

SEQ ID NO: 1402034 - DNA, 15 bp, Homo sapiens
ctttgagtgttctca

SEQ ID NO: 1402035 - DNA, 15 bp, Homo sapiens
tctttgagtgttctc

SEQ ID NO: 1402036 - DNA, 15 bp, Homo sapiens
ctctttgagtgttct

SEQ ID NO: 1402037 - DNA, 15 bp, Homo sapiens
cctctttgagtgttc

SEQ ID NO: 1402038 - DNA, 15 bp, Homo sapiens
ccctctttgagtgtt

SEQ ID NO: 1402039 - DNA, 15 bp, Homo sapiens
cccctctttgagtgt

SEQ ID NO: 1402040 - DNA, 15 bp, Homo sapiens
tcccctctttgagtg

SEQ ID NO: 1402041 - DNA, 15 bp, Homo sapiens
ctcccctctttgagt

SEQ ID NO: 1402042 - DNA, 15 bp, Homo sapiens
tctcccctctttgag

SEQ ID NO: 1402043 - DNA, 15 bp, Homo sapiens
ctctcccctctttga

SEQ ID NO: 1402044 - DNA, 15 bp, Homo sapiens
cctctcccctctttg

SEQ ID NO: 1402045 - DNA, 15 bp, Homo sapiens
gcctctcccctcttt

SEQ ID NO: 1402046 - DNA, 15 bp, Homo sapiens
cgcctctcccctctt

SEQ ID NO: 1402047 - DNA, 15 bp, Homo sapiens
ccgcctctcccctct

SEQ ID NO: 1402048 - DNA, 15 bp, Homo sapiens
cccgcctctcccctc

SEQ ID NO: 1402049 - DNA, 15 bp, Homo sapiens
tcccgcctctcccct

SEQ ID NO: 1402050 - DNA, 15 bp, Homo sapiens
atcccgcctctcccc

SEQ ID NO: 1402051 - DNA, 15 bp, Homo sapiens
gatcccgcctctccc

SEQ ID NO: 1402052 - DNA, 15 bp, Homo sapiens
tgatcccgcctctcc

SEQ ID NO: 1402053 - DNA, 15 bp, Homo sapiens
ttgatcccgcctctc

SEQ ID NO: 1402054 - DNA, 15 bp, Homo sapiens
cttgatcccgcctct

SEQ ID NO: 1402055 - DNA, 15 bp, Homo sapiens
tcttgatcccgcctc

SEQ ID NO: 1402056 - DNA, 15 bp, Homo sapiens
ctcttgatcccgcct

SEQ ID NO: 1402057 - DNA, 15 bp, Homo sapiens
gctcttgatcccgcc

SEQ ID NO: 1402058 - DNA, 15 bp, Homo sapiens
tgctcttgatcccgc

SEQ ID NO: 1402059 - DNA, 15 bp, Homo sapiens
gtgctcttgatcccg

SEQ ID NO: 1402060 - DNA, 15 bp, Homo sapiens
agtgctcttgatccc

SEQ ID NO: 1402061 - DNA, 15 bp, Homo sapiens
aagtgctcttgatcc

SEQ ID NO: 1402062 - DNA, 15 bp, Homo sapiens
gaagtgctcttgatc

SEQ ID NO: 1402063 - DNA, 15 bp, Homo sapiens
ggaagtgctcttgat

SEQ ID NO: 1402064 - DNA, 15 bp, Homo sapiens
tggaagtgctcttga

SEQ ID NO: 1402065 - DNA, 15 bp, Homo sapiens
atggaagtgctcttg

SEQ ID NO: 1402066 - DNA, 15 bp, Homo sapiens
catggaagtgctctt

SEQ ID NO: 1402067 - DNA, 15 bp, Homo sapiens
gcatggaagtgctct

SEQ ID NO: 1402068 - DNA, 15 bp, Homo sapiens
tgcatggaagtgctc

SEQ ID NO: 1402069 - DNA, 15 bp, Homo sapiens
atgcatggaagtgct

SEQ ID NO: 1402070 - DNA, 15 bp, Homo sapiens
aatgcatggaagtgc

SEQ ID NO: 1402071 - DNA, 15 bp, Homo sapiens
gaatgcatggaagtg

SEQ ID NO: 1402072 - DNA, 15 bp, Homo sapiens
tgaatgcatggaagt

SEQ ID NO: 1402073 - DNA, 15 bp, Homo sapiens
atgaatgcatggaag

SEQ ID NO: 1402074 - DNA, 15 bp, Homo sapiens
aatgaatgcatggaa

SEQ ID NO: 1402075 - DNA, 15 bp, Homo sapiens
taatgaatgcatgga

SEQ ID NO: 1402076 - DNA, 15 bp, Homo sapiens
ataatgaatgcatgg

SEQ ID NO: 1402077 - DNA, 15 bp, Homo sapiens
aataatgaatgcatg

SEQ ID NO: 1402078 - DNA, 15 bp, Homo sapiens
aaataatgaatgcat

SEQ ID NO: 1402079 - DNA, 15 bp, Homo sapiens
taaataatgaatgca

SEQ ID NO: 1402080 - DNA, 15 bp, Homo sapiens
ataaataatgaatgc

SEQ ID NO: 1402081 - DNA, 15 bp, Homo sapiens
aataaataatgaatg

SEQ ID NO: 1402082 - DNA, 15 bp, Homo sapiens
caataaataatgaat

SEQ ID NO: 1402083 - DNA, 15 bp, Homo sapiens
tcaataaataatgaa

SEQ ID NO: 1402084 - DNA, 15 bp, Homo sapiens
ctcaataaataatga

SEQ ID NO: 1402085 - DNA, 15 bp, Homo sapiens
gctcaataaataatg

SEQ ID NO: 1402086 - DNA, 15 bp, Homo sapiens
tgctcaataaataat

SEQ ID NO: 1402087 - DNA, 15 bp, Homo sapiens
atgctcaataaataa

SEQ ID NO: 1402088 - DNA, 15 bp, Homo sapiens
gatgctcaataaata

SEQ ID NO: 1402089 - DNA, 15 bp, Homo sapiens
agatgctcaataaat

SEQ ID NO: 1402090 - DNA, 15 bp, Homo sapiens
tagatgctcaataaa

SEQ ID NO: 1402091 - DNA, 15 bp, Homo sapiens
atagatgctcaataa

SEQ ID NO: 1402092 - DNA, 15 bp, Homo sapiens
aatagatgctcaata

SEQ ID NO: 1402093 - DNA, 15 bp, Homo sapiens
taatagatgctcaat

SEQ ID NO: 1402094 - DNA, 15 bp, Homo sapiens
ataatagatgctcaa

SEQ ID NO: 1402095 - DNA, 15 bp, Homo sapiens
cataatagatgctca

SEQ ID NO: 1402096 - DNA, 15 bp, Homo sapiens
acataatagatgctc

SEQ ID NO: 1402097 - DNA, 15 bp, Homo sapiens
gacataatagatgct

SEQ ID NO: 1402098 - DNA, 15 bp, Homo sapiens
tgacataatagatgc

SEQ ID NO: 1402099 - DNA, 15 bp, Homo sapiens
ctgacataatagatg

SEQ ID NO: 1402100 - DNA, 15 bp, Homo sapiens
gctgacataatagat

SEQ ID NO: 1402101 - DNA, 15 bp, Homo sapiens
tgctgacataataga

SEQ ID NO: 1402102 - DNA, 15 bp, Homo sapiens
atgctgacataatag

SEQ ID NO: 1402103 - DNA, 15 bp, Homo sapiens
catgctgacataata

SEQ ID NO: 1402104 - DNA, 15 bp, Homo sapiens
acatgctgacataat

SEQ ID NO: 1402105 - DNA, 15 bp, Homo sapiens
aacatgctgacataa

SEQ ID NO: 1402106 - DNA, 15 bp, Homo sapiens
caacatgctgacata

SEQ ID NO: 1402107 - DNA, 15 bp, Homo sapiens
tcaacatgctgacat

SEQ ID NO: 1402108 - DNA, 15 bp, Homo sapiens
gtcaacatgctgaca

SEQ ID NO: 1402109 - DNA, 15 bp, Homo sapiens
agtcaacatgctgac

SEQ ID NO: 1402110 - DNA, 15 bp, Homo sapiens
cagtcaacatgctga

SEQ ID NO: 1402111 - DNA, 15 bp, Homo sapiens
ccagtcaacatgctg

SEQ ID NO: 1402112 - DNA, 15 bp, Homo sapiens
cccagtcaacatgct

SEQ ID NO: 1402113 - DNA, 15 bp, Homo sapiens
ccccagtcaacatgc

SEQ ID NO: 1402114 - DNA, 15 bp, Homo sapiens
tccccagtcaacatg

SEQ ID NO: 1402115 - DNA, 15 bp, Homo sapiens
ctccccagtcaacat

SEQ ID NO: 1402116 - DNA, 15 bp, Homo sapiens
actccccagtcaaca

SEQ ID NO: 1402117 - DNA, 15 bp, Homo sapiens
gactccccagtcaac

SEQ ID NO: 1402118 - DNA, 15 bp, Homo sapiens
tgactccccagtcaa

SEQ ID NO: 1402119 - DNA, 15 bp, Homo sapiens
ttgactccccagtca

SEQ ID NO: 1402120 - DNA, 15 bp, Homo sapiens
cttgactccccagtc

SEQ ID NO: 1402121 - DNA, 15 bp, Homo sapiens
ccttgactccccagt

SEQ ID NO: 1402122 - DNA, 15 bp, Homo sapiens
cccttgactccccag

SEQ ID NO: 1402123 - DNA, 15 bp, Homo sapiens
tcccttgactcccca

SEQ ID NO: 1402124 - DNA, 15 bp, Homo sapiens
ctcccttgactcccc

SEQ ID NO: 1402125 - DNA, 15 bp, Homo sapiens
gctcccttgactccc

SEQ ID NO: 1402126 - DNA, 15 bp, Homo sapiens
ggctcccttgactcc

SEQ ID NO: 1402127 - DNA, 15 bp, Homo sapiens
aggctcccttgactc

SEQ ID NO: 1402128 - DNA, 15 bp, Homo sapiens
caggctcccttgact

SEQ ID NO: 1402129 - DNA, 15 bp, Homo sapiens
ccaggctcccttgac

SEQ ID NO: 1402130 - DNA, 15 bp, Homo sapiens
tccaggctcccttga

SEQ ID NO: 1402131 - DNA, 15 bp, Homo sapiens
ttccaggctcccttg

SEQ ID NO: 1402132 - DNA, 15 bp, Homo sapiens
gttccaggctccctt

SEQ ID NO: 1402133 - DNA, 15 bp, Homo sapiens
tgttccaggctccct

SEQ ID NO: 1402134 - DNA, 15 bp, Homo sapiens
ctgttccaggctccc

SEQ ID NO: 1402135 - DNA, 15 bp, Homo sapiens
tctgttccaggctcc

SEQ ID NO: 1402136 - DNA, 15 bp, Homo sapiens
ctctgttccaggctc

SEQ ID NO: 1402137 - DNA, 15 bp, Homo sapiens
tctctgttccaggct

SEQ ID NO: 1402138 - DNA, 15 bp, Homo sapiens
ttctctgttccaggc

SEQ ID NO: 1402139 - DNA, 15 bp, Homo sapiens
cttctctgttccagg

SEQ ID NO: 1402140 - DNA, 15 bp, Homo sapiens
tcttctctgttccag

SEQ ID NO: 1402141 - DNA, 15 bp, Homo sapiens
gtcttctctgttcca

SEQ ID NO: 1402142 - DNA, 15 bp, Homo sapiens
tgtcttctctgttcc

SEQ ID NO: 1402143 - DNA, 15 bp, Homo sapiens
gtgtcttctctgttc

SEQ ID NO: 1402144 - DNA, 15 bp, Homo sapiens
ggtgtcttctctgtt

SEQ ID NO: 1402145 - DNA, 15 bp, Homo sapiens
aggtgtcttctctgt

SEQ ID NO: 1402146 - DNA, 15 bp, Homo sapiens
gaggtgtcttctctg

SEQ ID NO: 1402147 - DNA, 15 bp, Homo sapiens
agaggtgtcttctct

SEQ ID NO: 1402148 - DNA, 15 bp, Homo sapiens
aagaggtgtcttctc

SEQ ID NO: 1402149 - DNA, 15 bp, Homo sapiens
gaagaggtgtcttct

SEQ ID NO: 1402150 - DNA, 15 bp, Homo sapiens
ggaagaggtgtcttc

SEQ ID NO: 1402151 - DNA, 15 bp, Homo sapiens
aggaagaggtgtctt

SEQ ID NO: 1402152 - DNA, 15 bp, Homo sapiens
caggaagaggtgtct

SEQ ID NO: 1402153 - DNA, 15 bp, Homo sapiens
ccaggaagaggtgtc

SEQ ID NO: 1402154 - DNA, 15 bp, Homo sapiens
tccaggaagaggtgt

SEQ ID NO: 1402155 - DNA, 15 bp, Homo sapiens
ttccaggaagaggtg

SEQ ID NO: 1402156 - DNA, 15 bp, Homo sapiens
gttccaggaagaggt

SEQ ID NO: 1402157 - DNA, 15 bp, Homo sapiens
agttccaggaagagg

SEQ ID NO: 1402158 - DNA, 15 bp, Homo sapiens
tagttccaggaagag

SEQ ID NO: 1402159 - DNA, 15 bp, Homo sapiens
ttagttccaggaaga

SEQ ID NO: 1402160 - DNA, 15 bp, Homo sapiens
gttagttccaggaag

SEQ ID NO: 1402161 - DNA, 15 bp, Homo sapiens
tgttagttccaggaa

SEQ ID NO: 1402162 - DNA, 15 bp, Homo sapiens
ctgttagttccagga

SEQ ID NO: 1402163 - DNA, 15 bp, Homo sapiens
actgttagttccagg

SEQ ID NO: 1402164 - DNA, 15 bp, Homo sapiens
tactgttagttccag

SEQ ID NO: 1402165 - DNA, 15 bp, Homo sapiens
atactgttagttcca

SEQ ID NO: 1402166 - DNA, 15 bp, Homo sapiens
tatactgttagttcc

SEQ ID NO: 1402167 - DNA, 15 bp, Homo sapiens
ttatactgttagttc

SEQ ID NO: 1402168 - DNA, 15 bp, Homo sapiens
tttatactgttagtt

SEQ ID NO: 1402169 - DNA, 15 bp, Homo sapiens
ctttatactgttagt

SEQ ID NO: 1402170 - DNA, 15 bp, Homo sapiens
tctttatactgttag

SEQ ID NO: 1402171 - DNA, 15 bp, Homo sapiens
ctctttatactgtta

SEQ ID NO: 1402172 - DNA, 15 bp, Homo sapiens
tctctttatactgtt

SEQ ID NO: 1402173 - DNA, 15 bp, Homo sapiens
ttctctttatactgt

SEQ ID NO: 1402174 - DNA, 15 bp, Homo sapiens
tttctctttatactg

SEQ ID NO: 1402175 - DNA, 15 bp, Homo sapiens
ctttctctttatact

SEQ ID NO: 1402176 - DNA, 15 bp, Homo sapiens
tctttctctttatac

SEQ ID NO: 1402177 - DNA, 15 bp, Homo sapiens
atctttctctttata

SEQ ID NO: 1402178 - DNA, 15 bp, Homo sapiens
tatctttctctttat

SEQ ID NO: 1402179 - DNA, 15 bp, Homo sapiens
ctatctttctcttta

SEQ ID NO: 1402180 - DNA, 15 bp, Homo sapiens
tctatctttctcttt

SEQ ID NO: 1402181 - DNA, 15 bp, Homo sapiens
atctatctttctctt

SEQ ID NO: 1402182 - DNA, 15 bp, Homo sapiens
catctatctttctct

SEQ ID NO: 1402183 - DNA, 15 bp, Homo sapiens
tcatctatctttctc

SEQ ID NO: 1402184 - DNA, 15 bp, Homo sapiens
ctcatctatctttct

SEQ ID NO: 1402185 - DNA, 15 bp, Homo sapiens
tctcatctatctttc

SEQ ID NO: 1402186 - DNA, 15 bp, Homo sapiens
ttctcatctatcttt

SEQ ID NO: 1402187 - DNA, 15 bp, Homo sapiens
tttctcatctatctt

SEQ ID NO: 1402188 - DNA, 15 bp, Homo sapiens
gtttctcatctatct

SEQ ID NO: 1402189 - DNA, 15 bp, Homo sapiens
ggtttctcatctatc

SEQ ID NO: 1402190 - DNA, 15 bp, Homo sapiens
gggtttctcatctat

SEQ ID NO: 1402191 - DNA, 15 bp, Homo sapiens
agggtttctcatcta

SEQ ID NO: 1402192 - DNA, 15 bp, Homo sapiens
tagggtttctcatct

SEQ ID NO: 1402193 - DNA, 15 bp, Homo sapiens
atagggtttctcatc

SEQ ID NO: 1402194 - DNA, 15 bp, Homo sapiens
tatagggtttctcat

SEQ ID NO: 1402195 - DNA, 15 bp, Homo sapiens
ttatagggtttctca

SEQ ID NO: 1402196 - DNA, 15 bp, Homo sapiens
tttatagggtttctc

SEQ ID NO: 1402197 - DNA, 15 bp, Homo sapiens
gtttatagggtttct

SEQ ID NO: 1402198 - DNA, 15 bp, Homo sapiens
tgtttatagggtttc

SEQ ID NO: 1402199 - DNA, 15 bp, Homo sapiens
ctgtttatagggttt

SEQ ID NO: 1402200 - DNA, 15 bp, Homo sapiens
tctgtttatagggtt

SEQ ID NO: 1402201 - DNA, 15 bp, Homo sapiens
ctctgtttatagggt

SEQ ID NO: 1402202 - DNA, 15 bp, Homo sapiens
gctctgtttataggg

SEQ ID NO: 1402203 - DNA, 15 bp, Homo sapiens
agctctgtttatagg

SEQ ID NO: 1402204 - DNA, 15 bp, Homo sapiens
cagctctgtttatag

SEQ ID NO: 1402205 - DNA, 15 bp, Homo sapiens
ccagctctgtttata

SEQ ID NO: 1402206 - DNA, 15 bp, Homo sapiens
tccagctctgtttat

SEQ ID NO: 1402207 - DNA, 15 bp, Homo sapiens
atccagctctgttta

SEQ ID NO: 1402208 - DNA, 15 bp, Homo sapiens
tatccagctctgttt

SEQ ID NO: 1402209 - DNA, 15 bp, Homo sapiens
atatccagctctgtt

SEQ ID NO: 1402210 - DNA, 15 bp, Homo sapiens
catatccagctctgt

SEQ ID NO: 1402211 - DNA, 15 bp, Homo sapiens
ccatatccagctctg

SEQ ID NO: 1402212 - DNA, 15 bp, Homo sapiens
accatatccagctct

SEQ ID NO: 1402213 - DNA, 15 bp, Homo sapiens
caccatatccagctc

SEQ ID NO: 1402214 - DNA, 15 bp, Homo sapiens
ccaccatatccagct

SEQ ID NO: 1402215 - DNA, 15 bp, Homo sapiens
gccaccatatccagc

SEQ ID NO: 1402216 - DNA, 15 bp, Homo sapiens
tgccaccatatccag

SEQ ID NO: 1402217 - DNA, 15 bp, Homo sapiens
gtgccaccatatcca

SEQ ID NO: 1402218 - DNA, 15 bp, Homo sapiens
tgtgccaccatatcc

SEQ ID NO: 1402219 - DNA, 15 bp, Homo sapiens
gtgtgccaccatatc

SEQ ID NO: 1402220 - DNA, 15 bp, Homo sapiens
tgtgtgccaccatat

SEQ ID NO: 1402221 - DNA, 15 bp, Homo sapiens
gtgtgtgccaccata

SEQ ID NO: 1402222 - DNA, 15 bp, Homo sapiens
ggtgtgtgccaccat

SEQ ID NO: 1402223 - DNA, 15 bp, Homo sapiens
aggtgtgtgccacca

SEQ ID NO: 1402224 - DNA, 15 bp, Homo sapiens
caggtgtgtgccacc

SEQ ID NO: 1402225 - DNA, 15 bp, Homo sapiens
acaggtgtgtgccac

SEQ ID NO: 1402226 - DNA, 15 bp, Homo sapiens
tacaggtgtgtgcca

SEQ ID NO: 1402227 - DNA, 15 bp, Homo sapiens
ttacaggtgtgtgcc

SEQ ID NO: 1402228 - DNA, 15 bp, Homo sapiens
attacaggtgtgtgc

SEQ ID NO: 1402229 - DNA, 15 bp, Homo sapiens
gattacaggtgtgtg

SEQ ID NO: 1402230 - DNA, 15 bp, Homo sapiens
ggattacaggtgtgt

SEQ ID NO: 1402231 - DNA, 15 bp, Homo sapiens
tagtagctgggatta

SEQ ID NO: 1402232 - DNA, 15 bp, Homo sapiens
ctagtagctgggatt

SEQ ID NO: 1402233 - DNA, 15 bp, Homo sapiens
cctagtagctgggat

SEQ ID NO: 1402234 - DNA, 15 bp, Homo sapiens
ccctagtagctggga

SEQ ID NO: 1402235 - DNA, 15 bp, Homo sapiens
tccctagtagctggg

SEQ ID NO: 1402236 - DNA, 15 bp, Homo sapiens
ctccctagtagctgg

SEQ ID NO: 1402237 - DNA, 15 bp, Homo sapiens
cctccctagtagctg

SEQ ID NO: 1402238 - DNA, 15 bp, Homo sapiens
ccctccctagtagct

SEQ ID NO: 1402239 - DNA, 15 bp, Homo sapiens
accctccctagtagc

SEQ ID NO: 1402240 - DNA, 15 bp, Homo sapiens
caccctccctagtag

SEQ ID NO: 1402241 - DNA, 15 bp, Homo sapiens
tcaccctccctagta

SEQ ID NO: 1402242 - DNA, 15 bp, Homo sapiens
ctcaccctccctagt

SEQ ID NO: 1402243 - DNA, 15 bp, Homo sapiens
cctcaccctccctag

SEQ ID NO: 1402244 - DNA, 15 bp, Homo sapiens
gcctcaccctcccta

SEQ ID NO: 1402245 - DNA, 15 bp, Homo sapiens
agcctcaccctccct

SEQ ID NO: 1402246 - DNA, 15 bp, Homo sapiens
cagcctcaccctccc

SEQ ID NO: 1402247 - DNA, 15 bp, Homo sapiens
ccagcctcaccctcc

SEQ ID NO: 1402248 - DNA, 15 bp, Homo sapiens
gccagcctcaccctc

SEQ ID NO: 1402249 - DNA, 15 bp, Homo sapiens
cgccagcctcaccct

SEQ ID NO: 1402250 - DNA, 15 bp, Homo sapiens
ccgccagcctcaccc

SEQ ID NO: 1402251 - DNA, 15 bp, Homo sapiens
tccgccagcctcacc

SEQ ID NO: 1402252 - DNA, 15 bp, Homo sapiens
atccgccagcctcac

SEQ ID NO: 1402253 - DNA, 15 bp, Homo sapiens
catccgccagcctca

SEQ ID NO: 1402254 - DNA, 15 bp, Homo sapiens
gcatccgccagcctc

SEQ ID NO: 1402255 - DNA, 15 bp, Homo sapiens
ggcatccgccagcct

SEQ ID NO: 1402256 - DNA, 15 bp, Homo sapiens
aggcatccgccagcc

SEQ ID NO: 1402257 - DNA, 15 bp, Homo sapiens
aaggcatccgccagc

SEQ ID NO: 1402258 - DNA, 15 bp, Homo sapiens
caaggcatccgccag

SEQ ID NO: 1402259 - DNA, 15 bp, Homo sapiens
tcaaggcatccgcca

SEQ ID NO: 1402260 - DNA, 15 bp, Homo sapiens
ctcaaggcatccgcc

SEQ ID NO: 1402261 - DNA, 15 bp, Homo sapiens
gctcaaggcatccgc

SEQ ID NO: 1402262 - DNA, 15 bp, Homo sapiens
ggctcaaggcatccg

SEQ ID NO: 1402263 - DNA, 15 bp, Homo sapiens
gggctcaaggcatcc

SEQ ID NO: 1402264 - DNA, 15 bp, Homo sapiens
tgggctcaaggcatc

SEQ ID NO: 1402265 - DNA, 15 bp, Homo sapiens
ctgggctcaaggcat

SEQ ID NO: 1402266 - DNA, 15 bp, Homo sapiens
cctgggctcaaggca

SEQ ID NO: 1402267 - DNA, 15 bp, Homo sapiens
ccctgggctcaaggc

SEQ ID NO: 1402268 - DNA, 15 bp, Homo sapiens
cccctgggctcaagg

SEQ ID NO: 1402269 - DNA, 15 bp, Homo sapiens
acccctgggctcaag

SEQ ID NO: 1402270 - DNA, 15 bp, Homo sapiens
aacccctgggctcaa

SEQ ID NO: 1402271 - DNA, 15 bp, Homo sapiens
gaacccctgggctca

SEQ ID NO: 1402272 - DNA, 15 bp, Homo sapiens
tgaacccctgggctc

SEQ ID NO: 1402273 - DNA, 15 bp, Homo sapiens
ttgaacccctgggct

SEQ ID NO: 1402274 - DNA, 15 bp, Homo sapiens
tttgaacccctgggc

SEQ ID NO: 1402275 - DNA, 15 bp, Homo sapiens
ctttgaacccctggg

SEQ ID NO: 1402276 - DNA, 15 bp, Homo sapiens
gctttgaacccctgg

SEQ ID NO: 1402277 - DNA, 15 bp, Homo sapiens
agctttgaacccctg

SEQ ID NO: 1402278 - DNA, 15 bp, Homo sapiens
cagctttgaacccct

SEQ ID NO: 1402279 - DNA, 15 bp, Homo sapiens
gcagctttgaacccc

SEQ ID NO: 1402280 - DNA, 15 bp, Homo sapiens
tgcagctttgaaccc

SEQ ID NO: 1402281 - DNA, 15 bp, Homo sapiens
ctgcagctttgaacc

SEQ ID NO: 1402282 - DNA, 15 bp, Homo sapiens
actgcagctttgaac

SEQ ID NO: 1402283 - DNA, 15 bp, Homo sapiens
cactgcagctttgaa

SEQ ID NO: 1402284 - DNA, 15 bp, Homo sapiens
tcactgcagctttga

SEQ ID NO: 1402285 - DNA, 15 bp, Homo sapiens
ctcactgcagctttg

SEQ ID NO: 1402286 - DNA, 15 bp, Homo sapiens
gctcactgcagcttt

SEQ ID NO: 1402287 - DNA, 15 bp, Homo sapiens
agctcactgcagctt

SEQ ID NO: 1402288 - DNA, 15 bp, Homo sapiens
tagctcactgcagct

SEQ ID NO: 1402289 - DNA, 15 bp, Homo sapiens
tggtcatagctcact

SEQ ID NO: 1402290 - DNA, 15 bp, Homo sapiens
gtggtcatagctcac

SEQ ID NO: 1402291 - DNA, 15 bp, Homo sapiens
tgtggtcatagctca

SEQ ID NO: 1402292 - DNA, 15 bp, Homo sapiens
gtgtggtcatagctc

SEQ ID NO: 1402293 - DNA, 15 bp, Homo sapiens
ggtgtggtcatagct

SEQ ID NO: 1402294 - DNA, 15 bp, Homo sapiens
tggtgtggtcatagc

SEQ ID NO: 1402295 - DNA, 15 bp, Homo sapiens
gtggtgtggtcatag

SEQ ID NO: 1402296 - DNA, 15 bp, Homo sapiens
agtggtgtggtcata

SEQ ID NO: 1402297 - DNA, 15 bp, Homo sapiens
cagtggtgtggtcat

SEQ ID NO: 1402298 - DNA, 15 bp, Homo sapiens
gcagtggtgtggtca

SEQ ID NO: 1402299 - DNA, 15 bp, Homo sapiens
tgcagtggtgtggtc

SEQ ID NO: 1402300 - DNA, 15 bp, Homo sapiens
gtgcagtggtgtggt

SEQ ID NO: 1402301 - DNA, 15 bp, Homo sapiens
agtgcagtggtgtgg

SEQ ID NO: 1402302 - DNA, 15 bp, Homo sapiens
agagtgcagtggtgt

SEQ ID NO: 1402303 - DNA, 15 bp, Homo sapiens
aagagtgcagtggtg

SEQ ID NO: 1402304 - DNA, 15 bp, Homo sapiens
caagagtgcagtggt

SEQ ID NO: 1402305 - DNA, 15 bp, Homo sapiens
gcaagagtgcagtgg

SEQ ID NO: 1402306 - DNA, 15 bp, Homo sapiens
ggcaagagtgcagtg

SEQ ID NO: 1402307 - DNA, 15 bp, Homo sapiens
aggcaagagtgcagt

SEQ ID NO: 1402308 - DNA, 15 bp, Homo sapiens
caggcaagagtgcag

SEQ ID NO: 1402309 - DNA, 15 bp, Homo sapiens
ccaggcaagagtgca

SEQ ID NO: 1402310 - DNA, 15 bp, Homo sapiens
cccaggcaagagtgc

SEQ ID NO: 1402311 - DNA, 15 bp, Homo sapiens
acccaggcaagagtg

SEQ ID NO: 1402312 - DNA, 15 bp, Homo sapiens
cacccaggcaagagt

SEQ ID NO: 1402313 - DNA, 15 bp, Homo sapiens
tcacccaggcaagag

SEQ ID NO: 1402314 - DNA, 15 bp, Homo sapiens
gtcacccaggcaaga

SEQ ID NO: 1402315 - DNA, 15 bp, Homo sapiens
tgtcacccaggcaag

SEQ ID NO: 1402316 - DNA, 15 bp, Homo sapiens
ctgtcacccaggcaa

SEQ ID NO: 1402317 - DNA, 15 bp, Homo sapiens
tctgtcacccaggca

SEQ ID NO: 1402318 - DNA, 15 bp, Homo sapiens
cctctctctgtcacc

SEQ ID NO: 1402319 - DNA, 15 bp, Homo sapiens
acctctctctgtcac

SEQ ID NO: 1402320 - DNA, 15 bp, Homo sapiens
cacctctctctgtca

SEQ ID NO: 1402321 - DNA, 15 bp, Homo sapiens
gcacctctctctgtc

SEQ ID NO: 1402322 - DNA, 15 bp, Homo sapiens
ggcacctctctctgt

SEQ ID NO: 1402323 - DNA, 15 bp, Homo sapiens
tggcacctctctctg

SEQ ID NO: 1402324 - DNA, 15 bp, Homo sapiens
ttggcacctctctct

SEQ ID NO: 1402325 - DNA, 15 bp, Homo sapiens
tttggcacctctctc

SEQ ID NO: 1402326 - DNA, 15 bp, Homo sapiens
gtttggcacctctct

SEQ ID NO: 1402327 - DNA, 15 bp, Homo sapiens
ggtttggcacctctc

SEQ ID NO: 1402328 - DNA, 15 bp, Homo sapiens
gggtttggcacctct

SEQ ID NO: 1402329 - DNA, 15 bp, Homo sapiens
agggtttggcacctc

SEQ ID NO: 1402330 - DNA, 15 bp, Homo sapiens
cagggtttggcacct

SEQ ID NO: 1402331 - DNA, 15 bp, Homo sapiens
acagggtttggcacc

SEQ ID NO: 1402332 - DNA, 15 bp, Homo sapiens
gacagggtttggcac

SEQ ID NO: 1402333 - DNA, 15 bp, Homo sapiens
agacagggtttggca

SEQ ID NO: 1402334 - DNA, 15 bp, Homo sapiens
gagacagggtttggc

SEQ ID NO: 1402335 - DNA, 15 bp, Homo sapiens
agagacagggtttgg

SEQ ID NO: 1402336 - DNA, 15 bp, Homo sapiens
tagagacagggtttg

SEQ ID NO: 1402337 - DNA, 15 bp, Homo sapiens
ctatttttagtagag

SEQ ID NO: 1402338 - DNA, 15 bp, Homo sapiens
tctatttttagtaga

SEQ ID NO: 1402339 - DNA, 15 bp, Homo sapiens
ttctatttttagtag

SEQ ID NO: 1402340 - DNA, 15 bp, Homo sapiens
tttctatttttagta

SEQ ID NO: 1402341 - DNA, 15 bp, Homo sapiens
ttttctatttttagt

SEQ ID NO: 1402342 - DNA, 15 bp, Homo sapiens
tttttctatttttag

SEQ ID NO: 1402343 - DNA, 15 bp, Homo sapiens
atttttctattttta

SEQ ID NO: 1402344 - DNA, 15 bp, Homo sapiens
aatttttctattttt

SEQ ID NO: 1402345 - DNA, 15 bp, Homo sapiens
taatttttctatttt

SEQ ID NO: 1402346 - DNA, 15 bp, Homo sapiens
ctaatttttctattt

SEQ ID NO: 1402347 - DNA, 15 bp, Homo sapiens
gctaatttttctatt

SEQ ID NO: 1402348 - DNA, 15 bp, Homo sapiens
ggctaatttttctat

SEQ ID NO: 1402349 - DNA, 15 bp, Homo sapiens
tggctaatttttcta

SEQ ID NO: 1402350 - DNA, 15 bp, Homo sapiens
tcacccctggctaat

SEQ ID NO: 1402351 - DNA, 15 bp, Homo sapiens
atcacccctggctaa

SEQ ID NO: 1402352 - DNA, 15 bp, Homo sapiens
catcacccctggcta

SEQ ID NO: 1402353 - DNA, 15 bp, Homo sapiens
ccatcacccctggct

SEQ ID NO: 1402354 - DNA, 15 bp, Homo sapiens
accatcacccctggc

SEQ ID NO: 1402355 - DNA, 15 bp, Homo sapiens
caccatcacccctgg

SEQ ID NO: 1402356 - DNA, 15 bp, Homo sapiens
gcaccatcacccctg

SEQ ID NO: 1402357 - DNA, 15 bp, Homo sapiens
cgcaccatcacccct

SEQ ID NO: 1402358 - DNA, 15 bp, Homo sapiens
gcgcaccatcacccc

SEQ ID NO: 1402359 - DNA, 15 bp, Homo sapiens
tgcgcaccatcaccc

SEQ ID NO: 1402360 - DNA, 15 bp, Homo sapiens
gtgcgcaccatcacc

SEQ ID NO: 1402361 - DNA, 15 bp, Homo sapiens
ggtgcgcaccatcac

SEQ ID NO: 1402362 - DNA, 15 bp, Homo sapiens
aggtgcgcaccatca

SEQ ID NO: 1402363 - DNA, 15 bp, Homo sapiens
caggtgcgcaccatc

SEQ ID NO: 1402364 - DNA, 15 bp, Homo sapiens
acaggtgcgcaccat

SEQ ID NO: 1402365 - DNA, 15 bp, Homo sapiens
acctgaatagctggg

SEQ ID NO: 1402366 - DNA, 15 bp, Homo sapiens
cacctgaatagctgg

SEQ ID NO: 1402367 - DNA, 15 bp, Homo sapiens
ccacctgaatagctg

SEQ ID NO: 1402368 - DNA, 15 bp, Homo sapiens
accacctgaatagct

SEQ ID NO: 1402369 - DNA, 15 bp, Homo sapiens
aaccacctgaatagc

SEQ ID NO: 1402370 - DNA, 15 bp, Homo sapiens
taaccacctgaatag

SEQ ID NO: 1402371 - DNA, 15 bp, Homo sapiens
ctaaccacctgaata

SEQ ID NO: 1402372 - DNA, 15 bp, Homo sapiens
cctaaccacctgaat

SEQ ID NO: 1402373 - DNA, 15 bp, Homo sapiens
acctaaccacctgaa

SEQ ID NO: 1402374 - DNA, 15 bp, Homo sapiens
cacctaaccacctga

SEQ ID NO: 1402375 - DNA, 15 bp, Homo sapiens
ccacctaaccacctg

SEQ ID NO: 1402376 - DNA, 15 bp, Homo sapiens
tccacctaaccacct

SEQ ID NO: 1402377 - DNA, 15 bp, Homo sapiens
ttccacctaaccacc

SEQ ID NO: 1402378 - DNA, 15 bp, Homo sapiens
cttccacctaaccac

SEQ ID NO: 1402379 - DNA, 15 bp, Homo sapiens
ccttccacctaacca

SEQ ID NO: 1402380 - DNA, 15 bp, Homo sapiens
tccttccacctaacc

SEQ ID NO: 1402381 - DNA, 15 bp, Homo sapiens
atccttccacctaac

SEQ ID NO: 1402382 - DNA, 15 bp, Homo sapiens
gatccttccacctaa

SEQ ID NO: 1402383 - DNA, 15 bp, Homo sapiens
agatccttccaccta

SEQ ID NO: 1402384 - DNA, 15 bp, Homo sapiens
gagatccttccacct

SEQ ID NO: 1402385 - DNA, 15 bp, Homo sapiens
agagatccttccacc

SEQ ID NO: 1402386 - DNA, 15 bp, Homo sapiens
tcaattttcttatct

SEQ ID NO: 1402387 - DNA, 15 bp, Homo sapiens
ctcaattttcttatc

SEQ ID NO: 1402388 - DNA, 15 bp, Homo sapiens
cctcaattttcttat

SEQ ID NO: 1402389 - DNA, 15 bp, Homo sapiens
gcctcaattttctta

SEQ ID NO: 1402390 - DNA, 15 bp, Homo sapiens
ggcctcaattttctt

SEQ ID NO: 1402391 - DNA, 15 bp, Homo sapiens
tggcctcaattttct

SEQ ID NO: 1402392 - DNA, 15 bp, Homo sapiens
ttggcctcaattttc

SEQ ID NO: 1402393 - DNA, 15 bp, Homo sapiens
tttggcctcaatttt

SEQ ID NO: 1402394 - DNA, 15 bp, Homo sapiens
ctttggcctcaattt

SEQ ID NO: 1402395 - DNA, 15 bp, Homo sapiens
cctttggcctcaatt

SEQ ID NO: 1402396 - DNA, 15 bp, Homo sapiens
tcctttggcctcaat

SEQ ID NO: 1402397 - DNA, 15 bp, Homo sapiens
atcctttggcctcaa

SEQ ID NO: 1402398 - DNA, 15 bp, Homo sapiens
gatcctttggcctca

SEQ ID NO: 1402399 - DNA, 15 bp, Homo sapiens
tgatcctttggcctc

SEQ ID NO: 1402400 - DNA, 15 bp, Homo sapiens
ttgatcctttggcct

SEQ ID NO: 1402401 - DNA, 15 bp, Homo sapiens
cttgatcctttggcc

SEQ ID NO: 1402402 - DNA, 15 bp, Homo sapiens
tcttgatcctttggc

SEQ ID NO: 1402403 - DNA, 15 bp, Homo sapiens
gtcttgatcctttgg

SEQ ID NO: 1402404 - DNA, 15 bp, Homo sapiens
tgtcttgatcctttg

SEQ ID NO: 1402405 - DNA, 15 bp, Homo sapiens
gtgtcttgatccttt

SEQ ID NO: 1402406 - DNA, 15 bp, Homo sapiens
agtgtcttgatcctt

SEQ ID NO: 1402407 - DNA, 15 bp, Homo sapiens
aagtgtcttgatcct

SEQ ID NO: 1402408 - DNA, 15 bp, Homo sapiens
caagtgtcttgatcc

SEQ ID NO: 1402409 - DNA, 15 bp, Homo sapiens
ccaagtgtcttgatc

SEQ ID NO: 1402410 - DNA, 15 bp, Homo sapiens
gccaagtgtcttgat

SEQ ID NO: 1402411 - DNA, 15 bp, Homo sapiens
ggccaagtgtcttga

SEQ ID NO: 1402412 - DNA, 15 bp, Homo sapiens
tggccaagtgtcttg

SEQ ID NO: 1402413 - DNA, 15 bp, Homo sapiens
ttggccaagtgtctt

SEQ ID NO: 1402414 - DNA, 15 bp, Homo sapiens
gttggccaagtgtct

SEQ ID NO: 1402415 - DNA, 15 bp, Homo sapiens
cgttggccaagtgtc

SEQ ID NO: 1402416 - DNA, 15 bp, Homo sapiens
gcgttggccaagtgt

SEQ ID NO: 1402417 - DNA, 15 bp, Homo sapiens
tgcgttggccaagtg

SEQ ID NO: 1402418 - DNA, 15 bp, Homo sapiens
ctgcgttggccaagt

SEQ ID NO: 1402419 - DNA, 15 bp, Homo sapiens
gctgcgttggccaag

SEQ ID NO: 1402420 - DNA, 15 bp, Homo sapiens
tgctgcgttggccaa

SEQ ID NO: 1402421 - DNA, 15 bp, Homo sapiens
ctgctgcgttggcca

SEQ ID NO: 1402422 - DNA, 15 bp, Homo sapiens
tctgctgcgttggcc

SEQ ID NO: 1402423 - DNA, 15 bp, Homo sapiens
ctctgctgcgttggc

SEQ ID NO: 1402424 - DNA, 15 bp, Homo sapiens
actctgctgcgttgg

SEQ ID NO: 1402425 - DNA, 15 bp, Homo sapiens
cactctgctgcgttg

SEQ ID NO: 1402426 - DNA, 15 bp, Homo sapiens
gcactctgctgcgtt

SEQ ID NO: 1402427 - DNA, 15 bp, Homo sapiens
ggcactctgctgcgt

SEQ ID NO: 1402428 - DNA, 15 bp, Homo sapiens
tggcactctgctgcg

SEQ ID NO: 1402429 - DNA, 15 bp, Homo sapiens
atggcactctgctgc

SEQ ID NO: 1402430 - DNA, 15 bp, Homo sapiens
tatggcactctgctg

SEQ ID NO: 1402431 - DNA, 15 bp, Homo sapiens
ctatggcactctgct

SEQ ID NO: 1402432 - DNA, 15 bp, Homo sapiens
actatggcactctgc

SEQ ID NO: 1402433 - DNA, 15 bp, Homo sapiens
cactatggcactctg

SEQ ID NO: 1402434 - DNA, 15 bp, Homo sapiens
ccactatggcactct

SEQ ID NO: 1402435 - DNA, 15 bp, Homo sapiens
accactatggcactc

SEQ ID NO: 1402436 - DNA, 15 bp, Homo sapiens
caccactatggcact

SEQ ID NO: 1402437 - DNA, 15 bp, Homo sapiens
ccaccactatggcac

SEQ ID NO: 1402438 - DNA, 15 bp, Homo sapiens
tccaccactatggca

SEQ ID NO: 1402439 - DNA, 15 bp, Homo sapiens
ttccaccactatggc

SEQ ID NO: 1402440 - DNA, 15 bp, Homo sapiens
attccaccactatgg

SEQ ID NO: 1402441 - DNA, 15 bp, Homo sapiens
aattccaccactatg

SEQ ID NO: 1402442 - DNA, 15 bp, Homo sapiens
aaattccaccactat

SEQ ID NO: 1402443 - DNA, 15 bp, Homo sapiens
caaattccaccacta

SEQ ID NO: 1402444 - DNA, 15 bp, Homo sapiens
acaaattccaccact

SEQ ID NO: 1402445 - DNA, 15 bp, Homo sapiens
cacaaattccaccac

SEQ ID NO: 1402446 - DNA, 15 bp, Homo sapiens
gcacaaattccacca

SEQ ID NO: 1402447 - DNA, 15 bp, Homo sapiens
ggcacaaattccacc

SEQ ID NO: 1402448 - DNA, 15 bp, Homo sapiens
aggcacaaattccac

SEQ ID NO: 1402449 - DNA, 15 bp, Homo sapiens
gaggcacaaattcca

SEQ ID NO: 1402450 - DNA, 15 bp, Homo sapiens
ggaggcacaaattcc

SEQ ID NO: 1402451 - DNA, 15 bp, Homo sapiens
aggaggcacaaattc

SEQ ID NO: 1402452 - DNA, 15 bp, Homo sapiens
aaggaggcacaaatt

SEQ ID NO: 1402453 - DNA, 15 bp, Homo sapiens
gaaggaggcacaaat

SEQ ID NO: 1402454 - DNA, 15 bp, Homo sapiens
agaaggaggcacaaa

SEQ ID NO: 1402455 - DNA, 15 bp, Homo sapiens
cagaaggaggcacaa

SEQ ID NO: 1402456 - DNA, 15 bp, Homo sapiens
acagaaggaggcaca

SEQ ID NO: 1402457 - DNA, 15 bp, Homo sapiens
tacagaaggaggcac

SEQ ID NO: 1402458 - DNA, 15 bp, Homo sapiens
atacagaaggaggca

SEQ ID NO: 1402459 - DNA, 15 bp, Homo sapiens
tatacagaaggaggc

SEQ ID NO: 1402460 - DNA, 15 bp, Homo sapiens
atatacagaaggagg

SEQ ID NO: 1402461 - DNA, 15 bp, Homo sapiens
aatatacagaaggag

SEQ ID NO: 1402462 - DNA, 15 bp, Homo sapiens
aaatatacagaagga

SEQ ID NO: 1402463 - DNA, 15 bp, Homo sapiens
aaaatatacagaagg

SEQ ID NO: 1402464 - DNA, 15 bp, Homo sapiens
caaaatatacagaag

SEQ ID NO: 1402465 - DNA, 15 bp, Homo sapiens
cacaaaatatacaga

SEQ ID NO: 1402466 - DNA, 15 bp, Homo sapiens
tcacaaaatatacag

SEQ ID NO: 1402467 - DNA, 15 bp, Homo sapiens
ttcacaaaatataca

SEQ ID NO: 1402468 - DNA, 15 bp, Homo sapiens
tttcacaaaatatac

SEQ ID NO: 1402469 - DNA, 15 bp, Homo sapiens
ttttcacaaaatata

SEQ ID NO: 1402470 - DNA, 15 bp, Homo sapiens
cttttcacaaaatat

SEQ ID NO: 1402471 - DNA, 15 bp, Homo sapiens
acttttcacaaaata

SEQ ID NO: 1402472 - DNA, 15 bp, Homo sapiens
tacttttcacaaaat

SEQ ID NO: 1402473 - DNA, 15 bp, Homo sapiens
atacttttcacaaaa

SEQ ID NO: 1402474 - DNA, 15 bp, Homo sapiens
gatacttttcacaaa

SEQ ID NO: 1402475 - DNA, 15 bp, Homo sapiens
tgatacttttcacaa

SEQ ID NO: 1402476 - DNA, 15 bp, Homo sapiens
ctgatacttttcaca

SEQ ID NO: 1402477 - DNA, 15 bp, Homo sapiens
actgatacttttcac

SEQ ID NO: 1402478 - DNA, 15 bp, Homo sapiens
cactgatacttttca

SEQ ID NO: 1402479 - DNA, 15 bp, Homo sapiens
tcactgatacttttc

SEQ ID NO: 1402480 - DNA, 15 bp, Homo sapiens
ttcactgatactttt

SEQ ID NO: 1402481 - DNA, 15 bp, Homo sapiens
tttcactgatacttt

SEQ ID NO: 1402482 - DNA, 15 bp, Homo sapiens
atttcactgatactt

SEQ ID NO: 1402483 - DNA, 15 bp, Homo sapiens
aatttcactgatact

SEQ ID NO: 1402484 - DNA, 15 bp, Homo sapiens
gaatttcactgatac

SEQ ID NO: 1402485 - DNA, 15 bp, Homo sapiens
agaatttcactgata

SEQ ID NO: 1402486 - DNA, 15 bp, Homo sapiens
aagaatttcactgat

SEQ ID NO: 1402487 - DNA, 15 bp, Homo sapiens
aaagaatttcactga

SEQ ID NO: 1402488 - DNA, 15 bp, Homo sapiens
aaaagaatttcactg

SEQ ID NO: 1402489 - DNA, 15 bp, Homo sapiens
aaaaagaatttcact

SEQ ID NO: 1402490 - DNA, 15 bp, Homo sapiens
aaaaaagaatttcac

SEQ ID NO: 1402491 - DNA, 15 bp, Homo sapiens
aaaaaaagaatttca

SEQ ID NO: 1402492 - DNA, 15 bp, Homo sapiens
tgactcaaaaaaaaa

SEQ ID NO: 1402493 - DNA, 15 bp, Homo sapiens
ctgactcaaaaaaaa

SEQ ID NO: 1402494 - DNA, 15 bp, Homo sapiens
tctgactcaaaaaaa

SEQ ID NO: 1402495 - DNA, 15 bp, Homo sapiens
ctctgactcaaaaaa

SEQ ID NO: 1402496 - DNA, 15 bp, Homo sapiens
actctgactcaaaaa

SEQ ID NO: 1402497 - DNA, 15 bp, Homo sapiens
gactctgactcaaaa

SEQ ID NO: 1402498 - DNA, 15 bp, Homo sapiens
agactctgactcaaa

SEQ ID NO: 1402499 - DNA, 15 bp, Homo sapiens
aagactctgactcaa

SEQ ID NO: 1402500 - DNA, 15 bp, Homo sapiens
caagactctgactca

SEQ ID NO: 1402501 - DNA, 15 bp, Homo sapiens
gcaagactctgactc

SEQ ID NO: 1402502 - DNA, 15 bp, Homo sapiens
agcaagactctgact

SEQ ID NO: 1402503 - DNA, 15 bp, Homo sapiens
gagcaagactctgac

SEQ ID NO: 1402504 - DNA, 15 bp, Homo sapiens
agagcaagactctga

SEQ ID NO: 1402505 - DNA, 15 bp, Homo sapiens
cgcacgcctgtagtc

SEQ ID NO: 1402506 - DNA, 15 bp, Homo sapiens
tgggcgtggtggcgc

SEQ ID NO: 1402507 - DNA, 15 bp, Homo sapiens
cggtctctactaaaa

SEQ ID NO: 1402508 - DNA, 15 bp, Homo sapiens
ccggtctctactaaa

SEQ ID NO: 1402509 - DNA, 15 bp, Homo sapiens
cccggtctctactaa

SEQ ID NO: 1402510 - DNA, 15 bp, Homo sapiens
ccccggtctctacta

SEQ ID NO: 1402511 - DNA, 15 bp, Homo sapiens
accccggtctctact

SEQ ID NO: 1402512 - DNA, 15 bp, Homo sapiens
aaccccggtctctac

SEQ ID NO: 1402513 - DNA, 15 bp, Homo sapiens
aaaccccggtctcta

SEQ ID NO: 1402514 - DNA, 15 bp, Homo sapiens
aaaaccccggtctct

SEQ ID NO: 1402515 - DNA, 15 bp, Homo sapiens
taaaaccccggtctc

SEQ ID NO: 1402516 - DNA, 15 bp, Homo sapiens
gtaaaaccccggtct

SEQ ID NO: 1402517 - DNA, 15 bp, Homo sapiens
ggtaaaaccccggtc

SEQ ID NO: 1402518 - DNA, 15 bp, Homo sapiens
tggtaaaaccccggt

SEQ ID NO: 1402519 - DNA, 15 bp, Homo sapiens
atggtaaaaccccgg

SEQ ID NO: 1402520 - DNA, 15 bp, Homo sapiens
tatggtaaaaccccg

SEQ ID NO: 1402521 - DNA, 15 bp, Homo sapiens
atatggtaaaacccc

SEQ ID NO: 1402522 - DNA, 15 bp, Homo sapiens
aatatggtaaaaccc

SEQ ID NO: 1402523 - DNA, 15 bp, Homo sapiens
caatatggtaaaacc

SEQ ID NO: 1402524 - DNA, 15 bp, Homo sapiens
ccaatatggtaaaac

SEQ ID NO: 1402525 - DNA, 15 bp, Homo sapiens
gccaatatggtaaaa

SEQ ID NO: 1402526 - DNA, 15 bp, Homo sapiens
ggccaatatggtaaa

SEQ ID NO: 1402527 - DNA, 15 bp, Homo sapiens
tggccaatatggtaa

SEQ ID NO: 1402528 - DNA, 15 bp, Homo sapiens
ctggccaatatggta

SEQ ID NO: 1402529 - DNA, 15 bp, Homo sapiens
aatcacaaggtcagg

SEQ ID NO: 1402530 - DNA, 15 bp, Homo sapiens
aaatcacaaggtcag

SEQ ID NO: 1402531 - DNA, 15 bp, Homo sapiens
caaatcacaaggtca

SEQ ID NO: 1402532 - DNA, 15 bp, Homo sapiens
gcaaatcacaaggtc

SEQ ID NO: 1402533 - DNA, 15 bp, Homo sapiens
ggcaaatcacaaggt

SEQ ID NO: 1402534 - DNA, 15 bp, Homo sapiens
gggcaaatcacaagg

SEQ ID NO: 1402535 - DNA, 15 bp, Homo sapiens
tgggcaaatcacaag

SEQ ID NO: 1402536 - DNA, 15 bp, Homo sapiens
gtgggcaaatcacaa

SEQ ID NO: 1402537 - DNA, 15 bp, Homo sapiens
ggtgggcaaatcaca

SEQ ID NO: 1402538 - DNA, 15 bp, Homo sapiens
aggtgggcaaatcac

SEQ ID NO: 1402539 - DNA, 15 bp, Homo sapiens
gaggtgggcaaatca

SEQ ID NO: 1402540 - DNA, 15 bp, Homo sapiens
agaggtgggcaaatc

SEQ ID NO: 1402541 - DNA, 15 bp, Homo sapiens
tagaggtgggcaaat

SEQ ID NO: 1402542 - DNA, 15 bp, Homo sapiens
atagaggtgggcaaa

SEQ ID NO: 1402543 - DNA, 15 bp, Homo sapiens
gatagaggtgggcaa

SEQ ID NO: 1402544 - DNA, 15 bp, Homo sapiens
agatagaggtgggca

SEQ ID NO: 1402545 - DNA, 15 bp, Homo sapiens
gagatagaggtgggc

SEQ ID NO: 1402546 - DNA, 15 bp, Homo sapiens
ggagatagaggtggg

SEQ ID NO: 1402547 - DNA, 15 bp, Homo sapiens
gggagatagaggtgg

SEQ ID NO: 1402548 - DNA, 15 bp, Homo sapiens
tgggagatagaggtg

SEQ ID NO: 1402549 - DNA, 15 bp, Homo sapiens
ttgggagatagaggt

SEQ ID NO: 1402550 - DNA, 15 bp, Homo sapiens
tttgggagatagagg

SEQ ID NO: 1402551 - DNA, 15 bp, Homo sapiens
ctttgggagatagag

SEQ ID NO: 1402552 - DNA, 15 bp, Homo sapiens
actttgggagataga

SEQ ID NO: 1402553 - DNA, 15 bp, Homo sapiens
cactttgggagatag

SEQ ID NO: 1402554 - DNA, 15 bp, Homo sapiens
gcactttgggagata

SEQ ID NO: 1402555 - DNA, 15 bp, Homo sapiens
agcactttgggagat

SEQ ID NO: 1402556 - DNA, 15 bp, Homo sapiens
cgcggtggctcacac

SEQ ID NO: 1402557 - DNA, 15 bp, Homo sapiens
actgggcgcggtggc

SEQ ID NO: 1402558 - DNA, 15 bp, Homo sapiens
tactgggcgcggtgg

SEQ ID NO: 1402559 - DNA, 15 bp, Homo sapiens
ttactgggcgcggtg

SEQ ID NO: 1402560 - DNA, 15 bp, Homo sapiens
cttactgggcgcggt

SEQ ID NO: 1402561 - DNA, 15 bp, Homo sapiens
acttactgggcgcgg

SEQ ID NO: 1402562 - DNA, 15 bp, Homo sapiens
tacttactgggcgcg

SEQ ID NO: 1402563 - DNA, 15 bp, Homo sapiens
atacttactgggcgc

SEQ ID NO: 1402564 - DNA, 15 bp, Homo sapiens
gatacttactgggcg

SEQ ID NO: 1402565 - DNA, 15 bp, Homo sapiens
tgatacttactgggc

SEQ ID NO: 1402566 - DNA, 15 bp, Homo sapiens
ctgatacttactggg

SEQ ID NO: 1402567 - DNA, 15 bp, Homo sapiens
actgatacttactgg

SEQ ID NO: 1402568 - DNA, 15 bp, Homo sapiens
cactgatacttactg

SEQ ID NO: 1402569 - DNA, 15 bp, Homo sapiens
tcactgatacttact

SEQ ID NO: 1402570 - DNA, 15 bp, Homo sapiens
ttcactgatacttac

SEQ ID NO: 1402571 - DNA, 15 bp, Homo sapiens
tttcactgatactta

SEQ ID NO: 1402572 - DNA, 15 bp, Homo sapiens
tagaatttcactgat

SEQ ID NO: 1402573 - DNA, 15 bp, Homo sapiens
ttagaatttcactga

SEQ ID NO: 1402574 - DNA, 15 bp, Homo sapiens
gttagaatttcactg

SEQ ID NO: 1402575 - DNA, 15 bp, Homo sapiens
tgttagaatttcact

SEQ ID NO: 1402576 - DNA, 15 bp, Homo sapiens
atgttagaatttcac

SEQ ID NO: 1402577 - DNA, 15 bp, Homo sapiens
tatgttagaatttca

SEQ ID NO: 1402578 - DNA, 15 bp, Homo sapiens
atatgttagaatttc

SEQ ID NO: 1402579 - DNA, 15 bp, Homo sapiens
tatatgttagaattt

SEQ ID NO: 1402580 - DNA, 15 bp, Homo sapiens
atatatgttagaatt

SEQ ID NO: 1402581 - DNA, 15 bp, Homo sapiens
gatatatgttagaat

SEQ ID NO: 1402582 - DNA, 15 bp, Homo sapiens
agatatatgttagaa

SEQ ID NO: 1402583 - DNA, 15 bp, Homo sapiens
cagatatatgttaga

SEQ ID NO: 1402584 - DNA, 15 bp, Homo sapiens
tcagatatatgttag

SEQ ID NO: 1402585 - DNA, 15 bp, Homo sapiens
ttcagatatatgtta

SEQ ID NO: 1402586 - DNA, 15 bp, Homo sapiens
gttcagatatatgtt

SEQ ID NO: 1402587 - DNA, 15 bp, Homo sapiens
tgttcagatatatgt

SEQ ID NO: 1402588 - DNA, 15 bp, Homo sapiens
ctgttcagatatatg

SEQ ID NO: 1402589 - DNA, 15 bp, Homo sapiens
actgttcagatatat

SEQ ID NO: 1402590 - DNA, 15 bp, Homo sapiens
tactgttcagatata

SEQ ID NO: 1402591 - DNA, 15 bp, Homo sapiens
ttactgttcagatat

SEQ ID NO: 1402592 - DNA, 15 bp, Homo sapiens
tttactgttcagata

SEQ ID NO: 1402593 - DNA, 15 bp, Homo sapiens
ttttactgttcagat

SEQ ID NO: 1402594 - DNA, 15 bp, Homo sapiens
attttactgttcaga

SEQ ID NO: 1402595 - DNA, 15 bp, Homo sapiens
tattttactgttcag

SEQ ID NO: 1402596 - DNA, 15 bp, Homo sapiens
gtattttactgttca

SEQ ID NO: 1402597 - DNA, 15 bp, Homo sapiens
ggtattttactgttc

SEQ ID NO: 1402598 - DNA, 15 bp, Homo sapiens
tggtattttactgtt

SEQ ID NO: 1402599 - DNA, 15 bp, Homo sapiens
gtggtattttactgt

SEQ ID NO: 1402600 - DNA, 15 bp, Homo sapiens
ggtggtattttactg

SEQ ID NO: 1402601 - DNA, 15 bp, Homo sapiens
tggtggtattttact

SEQ ID NO: 1402602 - DNA, 15 bp, Homo sapiens
ttggtggtattttac

SEQ ID NO: 1402603 - DNA, 15 bp, Homo sapiens
attggtggtatttta

SEQ ID NO: 1402604 - DNA, 15 bp, Homo sapiens
tattggtggtatttt

SEQ ID NO: 1402605 - DNA, 15 bp, Homo sapiens
ctattggtggtattt

SEQ ID NO: 1402606 - DNA, 15 bp, Homo sapiens
cctattggtggtatt

SEQ ID NO: 1402607 - DNA, 15 bp, Homo sapiens
gcctattggtggtat

SEQ ID NO: 1402608 - DNA, 15 bp, Homo sapiens
agcctattggtggta

SEQ ID NO: 1402609 - DNA, 15 bp, Homo sapiens
cagcctattggtggt

SEQ ID NO: 1402610 - DNA, 15 bp, Homo sapiens
tcagcctattggtgg

SEQ ID NO: 1402611 - DNA, 15 bp, Homo sapiens
ttcagcctattggtg

SEQ ID NO: 1402612 - DNA, 15 bp, Homo sapiens
tttcagcctattggt

SEQ ID NO: 1402613 - DNA, 15 bp, Homo sapiens
ctttcagcctattgg

SEQ ID NO: 1402614 - DNA, 15 bp, Homo sapiens
tctttcagcctattg

SEQ ID NO: 1402615 - DNA, 15 bp, Homo sapiens
gtctttcagcctatt

SEQ ID NO: 1402616 - DNA, 15 bp, Homo sapiens
agtctttcagcctat

SEQ ID NO: 1402617 - DNA, 15 bp, Homo sapiens
aagtctttcagccta

SEQ ID NO: 1402618 - DNA, 15 bp, Homo sapiens
gaagtctttcagcct

SEQ ID NO: 1402619 - DNA, 15 bp, Homo sapiens
tgaagtctttcagcc

SEQ ID NO: 1402620 - DNA, 15 bp, Homo sapiens
atgaagtctttcagc

SEQ ID NO: 1402621 - DNA, 15 bp, Homo sapiens
catgaagtctttcag

SEQ ID NO: 1402622 - DNA, 15 bp, Homo sapiens
ccatgaagtctttca

SEQ ID NO: 1402623 - DNA, 15 bp, Homo sapiens
cccatgaagtctttc

SEQ ID NO: 1402624 - DNA, 15 bp, Homo sapiens
tcccatgaagtcttt

SEQ ID NO: 1402625 - DNA, 15 bp, Homo sapiens
ctcccatgaagtctt

SEQ ID NO: 1402626 - DNA, 15 bp, Homo sapiens
cctcccatgaagtct

SEQ ID NO: 1402627 - DNA, 15 bp, Homo sapiens
acctcccatgaagtc

SEQ ID NO: 1402628 - DNA, 15 bp, Homo sapiens
tacctcccatgaagt

SEQ ID NO: 1402629 - DNA, 15 bp, Homo sapiens
ttacctcccatgaag

SEQ ID NO: 1402630 - DNA, 15 bp, Homo sapiens
tttacctcccatgaa

SEQ ID NO: 1402631 - DNA, 15 bp, Homo sapiens
atttacctcccatga

SEQ ID NO: 1402632 - DNA, 15 bp, Homo sapiens
tatttacctcccatg

SEQ ID NO: 1402633 - DNA, 15 bp, Homo sapiens
atatttacctcccat

SEQ ID NO: 1402634 - DNA, 15 bp, Homo sapiens
aatatttacctccca

SEQ ID NO: 1402635 - DNA, 15 bp, Homo sapiens
gaatatttacctccc

SEQ ID NO: 1402636 - DNA, 15 bp, Homo sapiens
tgaatatttacctcc

SEQ ID NO: 1402637 - DNA, 15 bp, Homo sapiens
ttgaatatttacctc

SEQ ID NO: 1402638 - DNA, 15 bp, Homo sapiens
attgaatatttacct

SEQ ID NO: 1402639 - DNA, 15 bp, Homo sapiens
tattgaatatttacc

SEQ ID NO: 1402640 - DNA, 15 bp, Homo sapiens
ttattgaatatttac

SEQ ID NO: 1402641 - DNA, 15 bp, Homo sapiens
tttattgaatattta

SEQ ID NO: 1402642 - DNA, 15 bp, Homo sapiens
tgtttattgaatatt

SEQ ID NO: 1402643 - DNA, 15 bp, Homo sapiens
ctgtttattgaatat

SEQ ID NO: 1402644 - DNA, 15 bp, Homo sapiens
cctgtttattgaata

SEQ ID NO: 1402645 - DNA, 15 bp, Homo sapiens
acctgtttattgaat

SEQ ID NO: 1402646 - DNA, 15 bp, Homo sapiens
cacctgtttattgaa

SEQ ID NO: 1402647 - DNA, 15 bp, Homo sapiens
tcacctgtttattga

SEQ ID NO: 1402648 - DNA, 15 bp, Homo sapiens
ttcacctgtttattg

SEQ ID NO: 1402649 - DNA, 15 bp, Homo sapiens
tttcacctgtttatt

SEQ ID NO: 1402650 - DNA, 15 bp, Homo sapiens
ttttcacctgtttat

SEQ ID NO: 1402651 - DNA, 15 bp, Homo sapiens
tttttcacctgttta

SEQ ID NO: 1402652 - DNA, 15 bp, Homo sapiens
ttttttcacctgttt

SEQ ID NO: 1402653 - DNA, 15 bp, Homo sapiens
cttttttcacctgtt

SEQ ID NO: 1402654 - DNA, 15 bp, Homo sapiens
tcttttttcacctgt

SEQ ID NO: 1402655 - DNA, 15 bp, Homo sapiens
ttcttttttcacctg

SEQ ID NO: 1402656 - DNA, 15 bp, Homo sapiens
tttcttttttcacct

SEQ ID NO: 1402657 - DNA, 15 bp, Homo sapiens
atttcttttttcacc

SEQ ID NO: 1402658 - DNA, 15 bp, Homo sapiens
tatttcttttttcac

SEQ ID NO: 1402659 - DNA, 15 bp, Homo sapiens
gtatttcttttttca

SEQ ID NO: 1402660 - DNA, 15 bp, Homo sapiens
tgtatttcttttttc

SEQ ID NO: 1402661 - DNA, 15 bp, Homo sapiens
ttgtatttctttttt

SEQ ID NO: 1402662 - DNA, 15 bp, Homo sapiens
tttgtatttcttttt

SEQ ID NO: 1402663 - DNA, 15 bp, Homo sapiens
atttgtatttctttt

SEQ ID NO: 1402664 - DNA, 15 bp, Homo sapiens
catttgtatttcttt

SEQ ID NO: 1402665 - DNA, 15 bp, Homo sapiens
ccatttgtatttctt

SEQ ID NO: 1402666 - DNA, 15 bp, Homo sapiens
tccatttgtatttct

SEQ ID NO: 1402667 - DNA, 15 bp, Homo sapiens
ctccatttgtatttc

SEQ ID NO: 1402668 - DNA, 15 bp, Homo sapiens
gctccatttgtattt

SEQ ID NO: 1402669 - DNA, 15 bp, Homo sapiens
agctccatttgtatt

SEQ ID NO: 1402670 - DNA, 15 bp, Homo sapiens
aagctccatttgtat

SEQ ID NO: 1402671 - DNA, 15 bp, Homo sapiens
caagctccatttgta

SEQ ID NO: 1402672 - DNA, 15 bp, Homo sapiens
gcaagctccatttgt

SEQ ID NO: 1402673 - DNA, 15 bp, Homo sapiens
agcaagctccatttg

SEQ ID NO: 1402674 - DNA, 15 bp, Homo sapiens
aagcaagctccattt

SEQ ID NO: 1402675 - DNA, 15 bp, Homo sapiens
taagcaagctccatt

SEQ ID NO: 1402676 - DNA, 15 bp, Homo sapiens
ctaagcaagctccat

SEQ ID NO: 1402677 - DNA, 15 bp, Homo sapiens
tctaagcaagctcca

SEQ ID NO: 1402678 - DNA, 15 bp, Homo sapiens
atctaagcaagctcc

SEQ ID NO: 1402679 - DNA, 15 bp, Homo sapiens
aatctaagcaagctc

SEQ ID NO: 1402680 - DNA, 15 bp, Homo sapiens
taatctaagcaagct

SEQ ID NO: 1402681 - DNA, 15 bp, Homo sapiens
ataatctaagcaagc

SEQ ID NO: 1402682 - DNA, 15 bp, Homo sapiens
aataatctaagcaag

SEQ ID NO: 1402683 - DNA, 15 bp, Homo sapiens
aaataatctaagcaa

SEQ ID NO: 1402684 - DNA, 15 bp, Homo sapiens
aaaataatctaagca

SEQ ID NO: 1402685 - DNA, 15 bp, Homo sapiens
aaaaataatctaagc

SEQ ID NO: 1402686 - DNA, 15 bp, Homo sapiens
gaaaaataatctaag

SEQ ID NO: 1402687 - DNA, 15 bp, Homo sapiens
agaaaaataatctaa

SEQ ID NO: 1402688 - DNA, 15 bp, Homo sapiens
tagaaaaataatcta

SEQ ID NO: 1402689 - DNA, 15 bp, Homo sapiens
ttagaaaaataatct

SEQ ID NO: 1402690 - DNA, 15 bp, Homo sapiens
attagaaaaataatc

SEQ ID NO: 1402691 - DNA, 15 bp, Homo sapiens
aattagaaaaataat

SEQ ID NO: 1402692 - DNA, 15 bp, Homo sapiens
caattagaaaaataa

SEQ ID NO: 1402693 - DNA, 15 bp, Homo sapiens
gcaattagaaaaata

SEQ ID NO: 1402694 - DNA, 15 bp, Homo sapiens
agcaattagaaaaat

SEQ ID NO: 1402695 - DNA, 15 bp, Homo sapiens
tagcaattagaaaaa

SEQ ID NO: 1402696 - DNA, 15 bp, Homo sapiens
atagcaattagaaaa

SEQ ID NO: 1402697 - DNA, 15 bp, Homo sapiens
catagcaattagaaa

SEQ ID NO: 1402698 - DNA, 15 bp, Homo sapiens
acatagcaattagaa

SEQ ID NO: 1402699 - DNA, 15 bp, Homo sapiens
gacatagcaattaga

SEQ ID NO: 1402700 - DNA, 15 bp, Homo sapiens
agacatagcaattag

SEQ ID NO: 1402701 - DNA, 15 bp, Homo sapiens
tagacatagcaatta

SEQ ID NO: 1402702 - DNA, 15 bp, Homo sapiens
ttagacatagcaatt

SEQ ID NO: 1402703 - DNA, 15 bp, Homo sapiens
gttagacatagcaat

SEQ ID NO: 1402704 - DNA, 15 bp, Homo sapiens
agttagacatagcaa

SEQ ID NO: 1402705 - DNA, 15 bp, Homo sapiens
aagttagacatagca

SEQ ID NO: 1402706 - DNA, 15 bp, Homo sapiens
caagttagacatagc

SEQ ID NO: 1402707 - DNA, 15 bp, Homo sapiens
ccaagttagacatag

SEQ ID NO: 1402708 - DNA, 15 bp, Homo sapiens
cccaagttagacata

SEQ ID NO: 1402709 - DNA, 15 bp, Homo sapiens
tcccaagttagacat

SEQ ID NO: 1402710 - DNA, 15 bp, Homo sapiens
ttcccaagttagaca

SEQ ID NO: 1402711 - DNA, 15 bp, Homo sapiens
cttcccaagttagac

SEQ ID NO: 1402712 - DNA, 15 bp, Homo sapiens
acttcccaagttaga

SEQ ID NO: 1402713 - DNA, 15 bp, Homo sapiens
cacttcccaagttag

SEQ ID NO: 1402714 - DNA, 15 bp, Homo sapiens
tcacttcccaagtta

SEQ ID NO: 1402715 - DNA, 15 bp, Homo sapiens
ctcacttcccaagtt

SEQ ID NO: 1402716 - DNA, 15 bp, Homo sapiens
cctcacttcccaagt

SEQ ID NO: 1402717 - DNA, 15 bp, Homo sapiens
tcctcacttcccaag

SEQ ID NO: 1402718 - DNA, 15 bp, Homo sapiens
ttcctcacttcccaa

SEQ ID NO: 1402719 - DNA, 15 bp, Homo sapiens
gttcctcacttccca

SEQ ID NO: 1402720 - DNA, 15 bp, Homo sapiens
agttcctcacttccc

SEQ ID NO: 1402721 - DNA, 15 bp, Homo sapiens
cagttcctcacttcc

SEQ ID NO: 1402722 - DNA, 15 bp, Homo sapiens
acagttcctcacttc

SEQ ID NO: 1402723 - DNA, 15 bp, Homo sapiens
aacagttcctcactt

SEQ ID NO: 1402724 - DNA, 15 bp, Homo sapiens
aaacagttcctcact

SEQ ID NO: 1402725 - DNA, 15 bp, Homo sapiens
aaaacagttcctcac

SEQ ID NO: 1402726 - DNA, 15 bp, Homo sapiens
aaaaacagttcctca

SEQ ID NO: 1402727 - DNA, 15 bp, Homo sapiens
caaaaacagttcctc

SEQ ID NO: 1402728 - DNA, 15 bp, Homo sapiens
ccaaaaacagttcct

SEQ ID NO: 1402729 - DNA, 15 bp, Homo sapiens
accaaaaacagttcc

SEQ ID NO: 1402730 - DNA, 15 bp, Homo sapiens
gaccaaaaacagttc

SEQ ID NO: 1402731 - DNA, 15 bp, Homo sapiens
tgaccaaaaacagtt

SEQ ID NO: 1402732 - DNA, 15 bp, Homo sapiens
ctgaccaaaaacagt

SEQ ID NO: 1402733 - DNA, 15 bp, Homo sapiens
gctgaccaaaaacag

SEQ ID NO: 1402734 - DNA, 15 bp, Homo sapiens
tgctgaccaaaaaca

SEQ ID NO: 1402735 - DNA, 15 bp, Homo sapiens
atgctgaccaaaaac

SEQ ID NO: 1402736 - DNA, 15 bp, Homo sapiens
tatgctgaccaaaaa

SEQ ID NO: 1402737 - DNA, 15 bp, Homo sapiens
ttatgctgaccaaaa

SEQ ID NO: 1402738 - DNA, 15 bp, Homo sapiens
attatgctgaccaaa

SEQ ID NO: 1402739 - DNA, 15 bp, Homo sapiens
aattatgctgaccaa

SEQ ID NO: 1402740 - DNA, 15 bp, Homo sapiens
aaattatgctgacca

SEQ ID NO: 1402741 - DNA, 15 bp, Homo sapiens
taaattatgctgacc

SEQ ID NO: 1402742 - DNA, 15 bp, Homo sapiens
gtaaattatgctgac

SEQ ID NO: 1402743 - DNA, 15 bp, Homo sapiens
ggtaaattatgctga

SEQ ID NO: 1402744 - DNA, 15 bp, Homo sapiens
tggtaaattatgctg

SEQ ID NO: 1402745 - DNA, 15 bp, Homo sapiens
atggtaaattatgct

SEQ ID NO: 1402746 - DNA, 15 bp, Homo sapiens
gatggtaaattatgc

SEQ ID NO: 1402747 - DNA, 15 bp, Homo sapiens
tgatggtaaattatg

SEQ ID NO: 1402748 - DNA, 15 bp, Homo sapiens
ctgatggtaaattat

SEQ ID NO: 1402749 - DNA, 15 bp, Homo sapiens
tctgatggtaaatta

SEQ ID NO: 1402750 - DNA, 15 bp, Homo sapiens
ttctgatggtaaatt

SEQ ID NO: 1402751 - DNA, 15 bp, Homo sapiens
attctgatggtaaat

SEQ ID NO: 1402752 - DNA, 15 bp, Homo sapiens
aattctgatggtaaa

SEQ ID NO: 1402753 - DNA, 15 bp, Homo sapiens
aaattctgatggtaa

SEQ ID NO: 1402754 - DNA, 15 bp, Homo sapiens
taaattctgatggta

SEQ ID NO: 1402755 - DNA, 15 bp, Homo sapiens
ctaaattctgatggt

SEQ ID NO: 1402756 - DNA, 15 bp, Homo sapiens
gctaaattctgatgg

SEQ ID NO: 1402757 - DNA, 15 bp, Homo sapiens
agctaaattctgatg

SEQ ID NO: 1402758 - DNA, 15 bp, Homo sapiens
tagctaaattctgat

SEQ ID NO: 1402759 - DNA, 15 bp, Homo sapiens
atagctaaattctga

SEQ ID NO: 1402760 - DNA, 15 bp, Homo sapiens
aatagctaaattctg

SEQ ID NO: 1402761 - DNA, 15 bp, Homo sapiens
aaatagctaaattct

SEQ ID NO: 1402762 - DNA, 15 bp, Homo sapiens
taaatagctaaattc

SEQ ID NO: 1402763 - DNA, 15 bp, Homo sapiens
gtaaatagctaaatt

SEQ ID NO: 1402764 - DNA, 15 bp, Homo sapiens
agtaaatagctaaat

SEQ ID NO: 1402765 - DNA, 15 bp, Homo sapiens
tagtaaatagctaaa

SEQ ID NO: 1402766 - DNA, 15 bp, Homo sapiens
ttagtaaatagctaa

SEQ ID NO: 1402767 - DNA, 15 bp, Homo sapiens
attagtaaatagcta

SEQ ID NO: 1402768 - DNA, 15 bp, Homo sapiens
cattagtaaatagct

SEQ ID NO: 1402769 - DNA, 15 bp, Homo sapiens
tcattagtaaatagc

SEQ ID NO: 1402770 - DNA, 15 bp, Homo sapiens
ttcattagtaaatag

SEQ ID NO: 1402771 - DNA, 15 bp, Homo sapiens
tttcattagtaaata

SEQ ID NO: 1402772 - DNA, 15 bp, Homo sapiens
ttttcattagtaaat

SEQ ID NO: 1402773 - DNA, 15 bp, Homo sapiens
cttttcattagtaaa

SEQ ID NO: 1402774 - DNA, 15 bp, Homo sapiens
tcttttcattagtaa

SEQ ID NO: 1402775 - DNA, 15 bp, Homo sapiens
ttcttttcattagta

SEQ ID NO: 1402776 - DNA, 15 bp, Homo sapiens
tttcttttcattagt

SEQ ID NO: 1402777 - DNA, 15 bp, Homo sapiens
atttcttttcattag

SEQ ID NO: 1402778 - DNA, 15 bp, Homo sapiens
tatttcttttcatta

SEQ ID NO: 1402779 - DNA, 15 bp, Homo sapiens
gtatttcttttcatt

SEQ ID NO: 1402780 - DNA, 15 bp, Homo sapiens
agtatttcttttcat

SEQ ID NO: 1402781 - DNA, 15 bp, Homo sapiens
tagtatttcttttca

SEQ ID NO: 1402782 - DNA, 15 bp, Homo sapiens
ttagtatttcttttc

SEQ ID NO: 1402783 - DNA, 15 bp, Homo sapiens
attagtatttctttt

SEQ ID NO: 1402784 - DNA, 15 bp, Homo sapiens
gattagtatttcttt

SEQ ID NO: 1402785 - DNA, 15 bp, Homo sapiens
agattagtatttctt

SEQ ID NO: 1402786 - DNA, 15 bp, Homo sapiens
tagattagtatttct

SEQ ID NO: 1402787 - DNA, 15 bp, Homo sapiens
ctagattagtatttc

SEQ ID NO: 1402788 - DNA, 15 bp, Homo sapiens
cctagattagtattt

SEQ ID NO: 1402789 - DNA, 15 bp, Homo sapiens
acctagattagtatt

SEQ ID NO: 1402790 - DNA, 15 bp, Homo sapiens
aacctagattagtat

SEQ ID NO: 1402791 - DNA, 15 bp, Homo sapiens
aaacctagattagta

SEQ ID NO: 1402792 - DNA, 15 bp, Homo sapiens
caaacctagattagt

SEQ ID NO: 1402793 - DNA, 15 bp, Homo sapiens
acaaacctagattag

SEQ ID NO: 1402794 - DNA, 15 bp, Homo sapiens
aacaaacctagatta

SEQ ID NO: 1402795 - DNA, 15 bp, Homo sapiens
aaacaaacctagatt

SEQ ID NO: 1402796 - DNA, 15 bp, Homo sapiens
aaaacaaacctagat

SEQ ID NO: 1402797 - DNA, 15 bp, Homo sapiens
taaaacaaacctaga

SEQ ID NO: 1402798 - DNA, 15 bp, Homo sapiens
ctaaaacaaacctag

SEQ ID NO: 1402799 - DNA, 15 bp, Homo sapiens
tctaaaacaaaccta

SEQ ID NO: 1402800 - DNA, 15 bp, Homo sapiens
atctaaaacaaacct

SEQ ID NO: 1402801 - DNA, 15 bp, Homo sapiens
aatctaaaacaaacc

SEQ ID NO: 1402802 - DNA, 15 bp, Homo sapiens
taatctaaaacaaac

SEQ ID NO: 1402803 - DNA, 15 bp, Homo sapiens
ttaatctaaaacaaa

SEQ ID NO: 1402804 - DNA, 15 bp, Homo sapiens
cttaatctaaaacaa

SEQ ID NO: 1402805 - DNA, 15 bp, Homo sapiens
ccttaatctaaaaca

SEQ ID NO: 1402806 - DNA, 15 bp, Homo sapiens
tccttaatctaaaac

SEQ ID NO: 1402807 - DNA, 15 bp, Homo sapiens
gtccttaatctaaaa

SEQ ID NO: 1402808 - DNA, 15 bp, Homo sapiens
tgtccttaatctaaa

SEQ ID NO: 1402809 - DNA, 15 bp, Homo sapiens
ctgtccttaatctaa

SEQ ID NO: 1402810 - DNA, 15 bp, Homo sapiens
actgtccttaatcta

SEQ ID NO: 1402811 - DNA, 15 bp, Homo sapiens
gactgtccttaatct

SEQ ID NO: 1402812 - DNA, 15 bp, Homo sapiens
tgactgtccttaatc

SEQ ID NO: 1402813 - DNA, 15 bp, Homo sapiens
atgactgtccttaat

SEQ ID NO: 1402814 - DNA, 15 bp, Homo sapiens
catgactgtccttaa

SEQ ID NO: 1402815 - DNA, 15 bp, Homo sapiens
tcatgactgtcctta

SEQ ID NO: 1402816 - DNA, 15 bp, Homo sapiens
gtcatgactgtcctt

SEQ ID NO: 1402817 - DNA, 15 bp, Homo sapiens
ggtcatgactgtcct

SEQ ID NO: 1402818 - DNA, 15 bp, Homo sapiens
aggtcatgactgtcc

SEQ ID NO: 1402819 - DNA, 15 bp, Homo sapiens
taggtcatgactgtc

SEQ ID NO: 1402820 - DNA, 15 bp, Homo sapiens
ttaggtcatgactgt

SEQ ID NO: 1402821 - DNA, 15 bp, Homo sapiens
tttaggtcatgactg

SEQ ID NO: 1402822 - DNA, 15 bp, Homo sapiens
atttaggtcatgact

SEQ ID NO: 1402823 - DNA, 15 bp, Homo sapiens
catttaggtcatgac

SEQ ID NO: 1402824 - DNA, 15 bp, Homo sapiens
acatttaggtcatga

SEQ ID NO: 1402825 - DNA, 15 bp, Homo sapiens
gacatttaggtcatg

SEQ ID NO: 1402826 - DNA, 15 bp, Homo sapiens
tgacatttaggtcat

SEQ ID NO: 1402827 - DNA, 15 bp, Homo sapiens
atgacatttaggtca

SEQ ID NO: 1402828 - DNA, 15 bp, Homo sapiens
aatgacatttaggtc

SEQ ID NO: 1402829 - DNA, 15 bp, Homo sapiens
aaatgacatttaggt

SEQ ID NO: 1402830 - DNA, 15 bp, Homo sapiens
taaatgacatttagg

SEQ ID NO: 1402831 - DNA, 15 bp, Homo sapiens
ttaaatgacatttag

SEQ ID NO: 1402832 - DNA, 15 bp, Homo sapiens
tttaaatgacattta

SEQ ID NO: 1402833 - DNA, 15 bp, Homo sapiens
gtttaaatgacattt

SEQ ID NO: 1402834 - DNA, 15 bp, Homo sapiens
ggtttaaatgacatt

SEQ ID NO: 1402835 - DNA, 15 bp, Homo sapiens
tggtttaaatgacat

SEQ ID NO: 1402836 - DNA, 15 bp, Homo sapiens
ctggtttaaatgaca

SEQ ID NO: 1402837 - DNA, 15 bp, Homo sapiens
tctggtttaaatgac

SEQ ID NO: 1402838 - DNA, 15 bp, Homo sapiens
ctctggtttaaatga

SEQ ID NO: 1402839 - DNA, 15 bp, Homo sapiens
actctggtttaaatg

SEQ ID NO: 1402840 - DNA, 15 bp, Homo sapiens
cactctggtttaaat

SEQ ID NO: 1402841 - DNA, 15 bp, Homo sapiens
gcactctggtttaaa

SEQ ID NO: 1402842 - DNA, 15 bp, Homo sapiens
tgcactctggtttaa

SEQ ID NO: 1402843 - DNA, 15 bp, Homo sapiens
atgcactctggttta

SEQ ID NO: 1402844 - DNA, 15 bp, Homo sapiens
aatgcactctggttt

SEQ ID NO: 1402845 - DNA, 15 bp, Homo sapiens
caatgcactctggtt

SEQ ID NO: 1402846 - DNA, 15 bp, Homo sapiens
acaatgcactctggt

SEQ ID NO: 1402847 - DNA, 15 bp, Homo sapiens
cacaatgcactctgg

SEQ ID NO: 1402848 - DNA, 15 bp, Homo sapiens
ccacaatgcactctg

SEQ ID NO: 1402849 - DNA, 15 bp, Homo sapiens
gccacaatgcactct

SEQ ID NO: 1402850 - DNA, 15 bp, Homo sapiens
agccacaatgcactc

SEQ ID NO: 1402851 - DNA, 15 bp, Homo sapiens
aagccacaatgcact

SEQ ID NO: 1402852 - DNA, 15 bp, Homo sapiens
caagccacaatgcac

SEQ ID NO: 1402853 - DNA, 15 bp, Homo sapiens
tcaagccacaatgca

SEQ ID NO: 1402854 - DNA, 15 bp, Homo sapiens
atcaagccacaatgc

SEQ ID NO: 1402855 - DNA, 15 bp, Homo sapiens
gatcaagccacaatg

SEQ ID NO: 1402856 - DNA, 15 bp, Homo sapiens
tgatcaagccacaat

SEQ ID NO: 1402857 - DNA, 15 bp, Homo sapiens
ctgatcaagccacaa

SEQ ID NO: 1402858 - DNA, 15 bp, Homo sapiens
actgatcaagccaca

SEQ ID NO: 1402859 - DNA, 15 bp, Homo sapiens
cactgatcaagccac

SEQ ID NO: 1402860 - DNA, 15 bp, Homo sapiens
ccactgatcaagcca

SEQ ID NO: 1402861 - DNA, 15 bp, Homo sapiens
accactgatcaagcc

SEQ ID NO: 1402862 - DNA, 15 bp, Homo sapiens
gaccactgatcaagc

SEQ ID NO: 1402863 - DNA, 15 bp, Homo sapiens
tgaccactgatcaag

SEQ ID NO: 1402864 - DNA, 15 bp, Homo sapiens
atgaccactgatcaa

SEQ ID NO: 1402865 - DNA, 15 bp, Homo sapiens
aatgaccactgatca

SEQ ID NO: 1402866 - DNA, 15 bp, Homo sapiens
aaatgaccactgatc

SEQ ID NO: 1402867 - DNA, 15 bp, Homo sapiens
gaaatgaccactgat

SEQ ID NO: 1402868 - DNA, 15 bp, Homo sapiens
agaaatgaccactga

SEQ ID NO: 1402869 - DNA, 15 bp, Homo sapiens
cagaaatgaccactg

SEQ ID NO: 1402870 - DNA, 15 bp, Homo sapiens
acagaaatgaccact

SEQ ID NO: 1402871 - DNA, 15 bp, Homo sapiens
gacagaaatgaccac

SEQ ID NO: 1402872 - DNA, 15 bp, Homo sapiens
agacagaaatgacca

SEQ ID NO: 1402873 - DNA, 15 bp, Homo sapiens
gagacagaaatgacc

SEQ ID NO: 1402874 - DNA, 15 bp, Homo sapiens
agagacagaaatgac

SEQ ID NO: 1402875 - DNA, 15 bp, Homo sapiens
tagagacagaaatga

SEQ ID NO: 1402876 - DNA, 15 bp, Homo sapiens
ctagagacagaaatg

SEQ ID NO: 1402877 - DNA, 15 bp, Homo sapiens
aaacaacgtttatac

SEQ ID NO: 1402878 - DNA, 15 bp, Homo sapiens
aaaacaacgtttata

SEQ ID NO: 1402879 - DNA, 15 bp, Homo sapiens
caaaacaacgtttat

SEQ ID NO: 1402880 - DNA, 15 bp, Homo sapiens
tcaaaacaacgttta

SEQ ID NO: 1402881 - DNA, 15 bp, Homo sapiens
ttcaaaacaacgttt

SEQ ID NO: 1402882 - DNA, 15 bp, Homo sapiens
tttcaaaacaacgtt

SEQ ID NO: 1402883 - DNA, 15 bp, Homo sapiens
ctttcaaaacaacgt

SEQ ID NO: 1402884 - DNA, 15 bp, Homo sapiens
tctttcaaaacaacg

SEQ ID NO: 1402885 - DNA, 15 bp, Homo sapiens
ttctttcaaaacaac

SEQ ID NO: 1402886 - DNA, 15 bp, Homo sapiens
tttctttcaaaacaa

SEQ ID NO: 1402887 - DNA, 15 bp, Homo sapiens
ctttctttcaaaaca

SEQ ID NO: 1402888 - DNA, 15 bp, Homo sapiens
actttctttcaaaac

SEQ ID NO: 1402889 - DNA, 15 bp, Homo sapiens
cactttctttcaaaa

SEQ ID NO: 1402890 - DNA, 15 bp, Homo sapiens
ccactttctttcaaa

SEQ ID NO: 1402891 - DNA, 15 bp, Homo sapiens
cccactttctttcaa

SEQ ID NO: 1402892 - DNA, 15 bp, Homo sapiens
ccccactttctttca

SEQ ID NO: 1402893 - DNA, 15 bp, Homo sapiens
gccccactttctttc

SEQ ID NO: 1402894 - DNA, 15 bp, Homo sapiens
agccccactttcttt

SEQ ID NO: 1402895 - DNA, 15 bp, Homo sapiens
cagccccactttctt

SEQ ID NO: 1402896 - DNA, 15 bp, Homo sapiens
tcagccccactttct

SEQ ID NO: 1402897 - DNA, 15 bp, Homo sapiens
ttcagccccactttc

SEQ ID NO: 1402898 - DNA, 15 bp, Homo sapiens
attcagccccacttt

SEQ ID NO: 1402899 - DNA, 15 bp, Homo sapiens
tattcagccccactt

SEQ ID NO: 1402900 - DNA, 15 bp, Homo sapiens
ttattcagccccact

SEQ ID NO: 1402901 - DNA, 15 bp, Homo sapiens
attattcagccccac

SEQ ID NO: 1402902 - DNA, 15 bp, Homo sapiens
aattattcagcccca

SEQ ID NO: 1402903 - DNA, 15 bp, Homo sapiens
aaattattcagcccc

SEQ ID NO: 1402904 - DNA, 15 bp, Homo sapiens
ctaaattattcagcc

SEQ ID NO: 1402905 - DNA, 15 bp, Homo sapiens
tctaaattattcagc

SEQ ID NO: 1402906 - DNA, 15 bp, Homo sapiens
ttctaaattattcag

SEQ ID NO: 1402907 - DNA, 15 bp, Homo sapiens
tttctaaattattca

SEQ ID NO: 1402908 - DNA, 15 bp, Homo sapiens
ctttctaaattattc

SEQ ID NO: 1402909 - DNA, 15 bp, Homo sapiens
cctttctaaattatt

SEQ ID NO: 1402910 - DNA, 15 bp, Homo sapiens
tcctttctaaattat

SEQ ID NO: 1402911 - DNA, 15 bp, Homo sapiens
ctcctttctaaatta

SEQ ID NO: 1402912 - DNA, 15 bp, Homo sapiens
actcctttctaaatt

SEQ ID NO: 1402913 - DNA, 15 bp, Homo sapiens
cactcctttctaaat

SEQ ID NO: 1402914 - DNA, 15 bp, Homo sapiens
gcactcctttctaaa

SEQ ID NO: 1402915 - DNA, 15 bp, Homo sapiens
tgcactcctttctaa

SEQ ID NO: 1402916 - DNA, 15 bp, Homo sapiens
atgcactcctttcta

SEQ ID NO: 1402917 - DNA, 15 bp, Homo sapiens
tatgcactcctttct

SEQ ID NO: 1402918 - DNA, 15 bp, Homo sapiens
ctatgcactcctttc

SEQ ID NO: 1402919 - DNA, 15 bp, Homo sapiens
tctatgcactccttt

SEQ ID NO: 1402920 - DNA, 15 bp, Homo sapiens
ctctatgcactcctt

SEQ ID NO: 1402921 - DNA, 15 bp, Homo sapiens
tctctatgcactcct

SEQ ID NO: 1402922 - DNA, 15 bp, Homo sapiens
ttctctatgcactcc

SEQ ID NO: 1402923 - DNA, 15 bp, Homo sapiens
tttctctatgcactc

SEQ ID NO: 1402924 - DNA, 15 bp, Homo sapiens
ttttctctatgcact

SEQ ID NO: 1402925 - DNA, 15 bp, Homo sapiens
attttctctatgcac

SEQ ID NO: 1402926 - DNA, 15 bp, Homo sapiens
tattttctctatgca

SEQ ID NO: 1402927 - DNA, 15 bp, Homo sapiens
ttattttctctatgc

SEQ ID NO: 1402928 - DNA, 15 bp, Homo sapiens
cttattttctctatg

SEQ ID NO: 1402929 - DNA, 15 bp, Homo sapiens
acttattttctctat

SEQ ID NO: 1402930 - DNA, 15 bp, Homo sapiens
aacttattttctcta

SEQ ID NO: 1402931 - DNA, 15 bp, Homo sapiens
aaacttattttctct

SEQ ID NO: 1402932 - DNA, 15 bp, Homo sapiens
taaacttattttctc

SEQ ID NO: 1402933 - DNA, 15 bp, Homo sapiens
gtaaacttattttct

SEQ ID NO: 1402934 - DNA, 15 bp, Homo sapiens
agtaaacttattttc

SEQ ID NO: 1402935 - DNA, 15 bp, Homo sapiens
tagtaaacttatttt

SEQ ID NO: 1402936 - DNA, 15 bp, Homo sapiens
atagtaaacttattt

SEQ ID NO: 1402937 - DNA, 15 bp, Homo sapiens
aatagtaaacttatt

SEQ ID NO: 1402938 - DNA, 15 bp, Homo sapiens
taatagtaaacttat

SEQ ID NO: 1402939 - DNA, 15 bp, Homo sapiens
ttaatagtaaactta

SEQ ID NO: 1402940 - DNA, 15 bp, Homo sapiens
tttaatagtaaactt

SEQ ID NO: 1402941 - DNA, 15 bp, Homo sapiens
ttttaatagtaaact

SEQ ID NO: 1402942 - DNA, 15 bp, Homo sapiens
attttaatagtaaac

SEQ ID NO: 1402943 - DNA, 15 bp, Homo sapiens
tattttaatagtaaa

SEQ ID NO: 1402944 - DNA, 15 bp, Homo sapiens
ctattttaatagtaa

SEQ ID NO: 1402945 - DNA, 15 bp, Homo sapiens
gctattttaatagta

SEQ ID NO: 1402946 - DNA, 15 bp, Homo sapiens
agctattttaatagt

SEQ ID NO: 1402947 - DNA, 15 bp, Homo sapiens
aagctattttaatag

SEQ ID NO: 1402948 - DNA, 15 bp, Homo sapiens
aaagctattttaata

SEQ ID NO: 1402949 - DNA, 15 bp, Homo sapiens
taaagctattttaat

SEQ ID NO: 1402950 - DNA, 15 bp, Homo sapiens
ttaaagctattttaa

SEQ ID NO: 1402951 - DNA, 15 bp, Homo sapiens
gttaaagctatttta

SEQ ID NO: 1402952 - DNA, 15 bp, Homo sapiens
tgttaaagctatttt

SEQ ID NO: 1402953 - DNA, 15 bp, Homo sapiens
ctgttaaagctattt

SEQ ID NO: 1402954 - DNA, 15 bp, Homo sapiens
cctgttaaagctatt

SEQ ID NO: 1402955 - DNA, 15 bp, Homo sapiens
gcctgttaaagctat

SEQ ID NO: 1402956 - DNA, 15 bp, Homo sapiens
ggcctgttaaagcta

SEQ ID NO: 1402957 - DNA, 15 bp, Homo sapiens
cggcctgttaaagct

SEQ ID NO: 1402958 - DNA, 15 bp, Homo sapiens
ccggcctgttaaagc

SEQ ID NO: 1402959 - DNA, 15 bp, Homo sapiens
cccggcctgttaaag

SEQ ID NO: 1402960 - DNA, 15 bp, Homo sapiens
gcccggcctgttaaa

SEQ ID NO: 1402961 - DNA, 15 bp, Homo sapiens
tgcccggcctgttaa

SEQ ID NO: 1402962 - DNA, 15 bp, Homo sapiens
gtgcccggcctgtta

SEQ ID NO: 1402963 - DNA, 15 bp, Homo sapiens
cgtgcccggcctgtt

SEQ ID NO: 1402964 - DNA, 15 bp, Homo sapiens
ccgtgcccggcctgt

SEQ ID NO: 1402965 - DNA, 15 bp, Homo sapiens
gccaccgtgcccggc

SEQ ID NO: 1402966 - DNA, 15 bp, Homo sapiens
agccaccgtgcccgg

SEQ ID NO: 1402967 - DNA, 15 bp, Homo sapiens
gagccaccgtgcccg

SEQ ID NO: 1402968 - DNA, 15 bp, Homo sapiens
tgagccaccgtgccc

SEQ ID NO: 1402969 - DNA, 15 bp, Homo sapiens
ccagcctcccaaagt

SEQ ID NO: 1402970 - DNA, 15 bp, Homo sapiens
cccagcctcccaaag

SEQ ID NO: 1402971 - DNA, 15 bp, Homo sapiens
ccccagcctcccaaa

SEQ ID NO: 1402972 - DNA, 15 bp, Homo sapiens
accccagcctcccaa

SEQ ID NO: 1402973 - DNA, 15 bp, Homo sapiens
caccccagcctccca

SEQ ID NO: 1402974 - DNA, 15 bp, Homo sapiens
ccaccccagcctccc

SEQ ID NO: 1402975 - DNA, 15 bp, Homo sapiens
cccaccccagcctcc

SEQ ID NO: 1402976 - DNA, 15 bp, Homo sapiens
gcccaccccagcctc

SEQ ID NO: 1402977 - DNA, 15 bp, Homo sapiens
tgcccaccccagcct

SEQ ID NO: 1402978 - DNA, 15 bp, Homo sapiens
ctgcccaccccagcc

SEQ ID NO: 1402979 - DNA, 15 bp, Homo sapiens
tctgcccaccccagc

SEQ ID NO: 1402980 - DNA, 15 bp, Homo sapiens
atctgcccaccccag

SEQ ID NO: 1402981 - DNA, 15 bp, Homo sapiens
gatctgcccacccca

SEQ ID NO: 1402982 - DNA, 15 bp, Homo sapiens
tgatctgcccacccc

SEQ ID NO: 1402983 - DNA, 15 bp, Homo sapiens
ttgatctgcccaccc

SEQ ID NO: 1402984 - DNA, 15 bp, Homo sapiens
tttgatctgcccacc

SEQ ID NO: 1402985 - DNA, 15 bp, Homo sapiens
ttttgatctgcccac

SEQ ID NO: 1402986 - DNA, 15 bp, Homo sapiens
cttttgatctgccca

SEQ ID NO: 1402987 - DNA, 15 bp, Homo sapiens
ccttttgatctgccc

SEQ ID NO: 1402988 - DNA, 15 bp, Homo sapiens
accttttgatctgcc

SEQ ID NO: 1402989 - DNA, 15 bp, Homo sapiens
gaccttttgatctgc

SEQ ID NO: 1402990 - DNA, 15 bp, Homo sapiens
tgaccttttgatctg

SEQ ID NO: 1402991 - DNA, 15 bp, Homo sapiens
ctgaccttttgatct

SEQ ID NO: 1402992 - DNA, 15 bp, Homo sapiens
aaactcctgaccttt

SEQ ID NO: 1402993 - DNA, 15 bp, Homo sapiens
cagtagagacagggt

SEQ ID NO: 1402994 - DNA, 15 bp, Homo sapiens
tcagtagagacaggg

SEQ ID NO: 1402995 - DNA, 15 bp, Homo sapiens
ttcagtagagacagg

SEQ ID NO: 1402996 - DNA, 15 bp, Homo sapiens
tttcagtagagacag

SEQ ID NO: 1402997 - DNA, 15 bp, Homo sapiens
ttttcagtagagaca

SEQ ID NO: 1402998 - DNA, 15 bp, Homo sapiens
aacgcctggctaatt

SEQ ID NO: 1402999 - DNA, 15 bp, Homo sapiens
caacgcctggctaat

SEQ ID NO: 1403000 - DNA, 15 bp, Homo sapiens
acaacgcctggctaa

SEQ ID NO: 1403001 - DNA, 15 bp, Homo sapiens
tacaacgcctggcta

SEQ ID NO: 1403002 - DNA, 15 bp, Homo sapiens
gtacaacgcctggct

SEQ ID NO: 1403003 - DNA, 15 bp, Homo sapiens
ggtacaacgcctggc

SEQ ID NO: 1403004 - DNA, 15 bp, Homo sapiens
cggtacaacgcctgg

SEQ ID NO: 1403005 - DNA, 15 bp, Homo sapiens
ccggtacaacgcctg

SEQ ID NO: 1403006 - DNA, 15 bp, Homo sapiens
cccggtacaacgcct

SEQ ID NO: 1403007 - DNA, 15 bp, Homo sapiens
gcccggtacaacgcc

SEQ ID NO: 1403008 - DNA, 15 bp, Homo sapiens
tgcccggtacaacgc

SEQ ID NO: 1403009 - DNA, 15 bp, Homo sapiens
gtgcccggtacaacg

SEQ ID NO: 1403010 - DNA, 15 bp, Homo sapiens
ggtgcccggtacaac

SEQ ID NO: 1403011 - DNA, 15 bp, Homo sapiens
aggtgcccggtacaa

SEQ ID NO: 1403012 - DNA, 15 bp, Homo sapiens
caggtgcccggtaca

SEQ ID NO: 1403013 - DNA, 15 bp, Homo sapiens
acaggtgcccggtac

SEQ ID NO: 1403014 - DNA, 15 bp, Homo sapiens
tacaggtgcccggta

SEQ ID NO: 1403015 - DNA, 15 bp, Homo sapiens
ctacaggtgcccggt

SEQ ID NO: 1403016 - DNA, 15 bp, Homo sapiens
actacaggtgcccgg

SEQ ID NO: 1403017 - DNA, 15 bp, Homo sapiens
acctcccaagtagct

SEQ ID NO: 1403018 - DNA, 15 bp, Homo sapiens
aacctcccaagtagc

SEQ ID NO: 1403019 - DNA, 15 bp, Homo sapiens
caacctcccaagtag

SEQ ID NO: 1403020 - DNA, 15 bp, Homo sapiens
tcaacctcccaagta

SEQ ID NO: 1403021 - DNA, 15 bp, Homo sapiens
ctcaacctcccaagt

SEQ ID NO: 1403022 - DNA, 15 bp, Homo sapiens
cctcaacctcccaag

SEQ ID NO: 1403023 - DNA, 15 bp, Homo sapiens
ttgaagtgattctcc

SEQ ID NO: 1403024 - DNA, 15 bp, Homo sapiens
gttgaagtgattctc

SEQ ID NO: 1403025 - DNA, 15 bp, Homo sapiens
ggttgaagtgattct

SEQ ID NO: 1403026 - DNA, 15 bp, Homo sapiens
gggttgaagtgattc

SEQ ID NO: 1403027 - DNA, 15 bp, Homo sapiens
cgggttgaagtgatt

SEQ ID NO: 1403028 - DNA, 15 bp, Homo sapiens
ccgggttgaagtgat

SEQ ID NO: 1403029 - DNA, 15 bp, Homo sapiens
cccgggttgaagtga

SEQ ID NO: 1403030 - DNA, 15 bp, Homo sapiens
tcccgggttgaagtg

SEQ ID NO: 1403031 - DNA, 15 bp, Homo sapiens
ctcccgggttgaagt

SEQ ID NO: 1403032 - DNA, 15 bp, Homo sapiens
cctcccgggttgaag

SEQ ID NO: 1403033 - DNA, 15 bp, Homo sapiens
acctcccgggttgaa

SEQ ID NO: 1403034 - DNA, 15 bp, Homo sapiens
tgtttttttttgttt

SEQ ID NO: 1403035 - DNA, 15 bp, Homo sapiens
ttgtttttttttgtt

SEQ ID NO: 1403036 - DNA, 15 bp, Homo sapiens
ttttgtttttttttg

SEQ ID NO: 1403037 - DNA, 15 bp, Homo sapiens
gttttttttttttgt

SEQ ID NO: 1403038 - DNA, 15 bp, Homo sapiens
agttttttttttttg

SEQ ID NO: 1403039 - DNA, 15 bp, Homo sapiens
aagtttttttttttt

SEQ ID NO: 1403040 - DNA, 15 bp, Homo sapiens
aaagttttttttttt

SEQ ID NO: 1403041 - DNA, 15 bp, Homo sapiens
taaagtttttttttt

SEQ ID NO: 1403042 - DNA, 15 bp, Homo sapiens
ttaaagttttttttt

SEQ ID NO: 1403043 - DNA, 15 bp, Homo sapiens
gttaaagtttttttt

SEQ ID NO: 1403044 - DNA, 15 bp, Homo sapiens
tgttaaagttttttt

SEQ ID NO: 1403045 - DNA, 15 bp, Homo sapiens
ctgttaaagtttttt

SEQ ID NO: 1403046 - DNA, 15 bp, Homo sapiens
gctgttaaagttttt

SEQ ID NO: 1403047 - DNA, 15 bp, Homo sapiens
tgctgttaaagtttt

SEQ ID NO: 1403048 - DNA, 15 bp, Homo sapiens
ttgctgttaaagttt

SEQ ID NO: 1403049 - DNA, 15 bp, Homo sapiens
tttgctgttaaagtt

SEQ ID NO: 1403050 - DNA, 15 bp, Homo sapiens
ctttgctgttaaagt

SEQ ID NO: 1403051 - DNA, 15 bp, Homo sapiens
gctttgctgttaaag

SEQ ID NO: 1403052 - DNA, 15 bp, Homo sapiens
ggctttgctgttaaa

SEQ ID NO: 1403053 - DNA, 15 bp, Homo sapiens
aggctttgctgttaa

SEQ ID NO: 1403054 - DNA, 15 bp, Homo sapiens
gaggctttgctgtta

SEQ ID NO: 1403055 - DNA, 15 bp, Homo sapiens
agaggctttgctgtt

SEQ ID NO: 1403056 - DNA, 15 bp, Homo sapiens
aagaggctttgctgt

SEQ ID NO: 1403057 - DNA, 15 bp, Homo sapiens
gaagaggctttgctg

SEQ ID NO: 1403058 - DNA, 15 bp, Homo sapiens
ggaagaggctttgct

SEQ ID NO: 1403059 - DNA, 15 bp, Homo sapiens
aggaagaggctttgc

SEQ ID NO: 1403060 - DNA, 15 bp, Homo sapiens
aaggaagaggctttg

SEQ ID NO: 1403061 - DNA, 15 bp, Homo sapiens
aaaggaagaggcttt

SEQ ID NO: 1403062 - DNA, 15 bp, Homo sapiens
taaaggaagaggctt

SEQ ID NO: 1403063 - DNA, 15 bp, Homo sapiens
ttaaaggaagaggct

SEQ ID NO: 1403064 - DNA, 15 bp, Homo sapiens
tttaaaggaagaggc

SEQ ID NO: 1403065 - DNA, 15 bp, Homo sapiens
ttttaaaggaagagg

SEQ ID NO: 1403066 - DNA, 15 bp, Homo sapiens
attttaaaggaagag

SEQ ID NO: 1403067 - DNA, 15 bp, Homo sapiens
aattttaaaggaaga

SEQ ID NO: 1403068 - DNA, 15 bp, Homo sapiens
taattttaaaggaag

SEQ ID NO: 1403069 - DNA, 15 bp, Homo sapiens
ataattttaaaggaa

SEQ ID NO: 1403070 - DNA, 15 bp, Homo sapiens
attcataattttaaa

SEQ ID NO: 1403071 - DNA, 15 bp, Homo sapiens
aattcataattttaa

SEQ ID NO: 1403072 - DNA, 15 bp, Homo sapiens
aaattcataatttta

SEQ ID NO: 1403073 - DNA, 15 bp, Homo sapiens
aaaattcataatttt

SEQ ID NO: 1403074 - DNA, 15 bp, Homo sapiens
aaaaattcataattt

SEQ ID NO: 1403075 - DNA, 15 bp, Homo sapiens
gaaaaaaattcataa

SEQ ID NO: 1403076 - DNA, 15 bp, Homo sapiens
agaaaaaaattcata

SEQ ID NO: 1403077 - DNA, 15 bp, Homo sapiens
aagaaaaaaattcat

SEQ ID NO: 1403078 - DNA, 15 bp, Homo sapiens
taagaaaaaaattca

SEQ ID NO: 1403079 - DNA, 15 bp, Homo sapiens
ataagaaaaaaattc

SEQ ID NO: 1403080 - DNA, 15 bp, Homo sapiens
cataagaaaaaaatt

SEQ ID NO: 1403081 - DNA, 15 bp, Homo sapiens
ccataagaaaaaaat

SEQ ID NO: 1403082 - DNA, 15 bp, Homo sapiens
tccataagaaaaaaa

SEQ ID NO: 1403083 - DNA, 15 bp, Homo sapiens
ttccataagaaaaaa

SEQ ID NO: 1403084 - DNA, 15 bp, Homo sapiens
cttccataagaaaaa

SEQ ID NO: 1403085 - DNA, 15 bp, Homo sapiens
acttccataagaaaa

SEQ ID NO: 1403086 - DNA, 15 bp, Homo sapiens
aacttccataagaaa

SEQ ID NO: 1403087 - DNA, 15 bp, Homo sapiens
caacttccataagaa

SEQ ID NO: 1403088 - DNA, 15 bp, Homo sapiens
ccaacttccataaga

SEQ ID NO: 1403089 - DNA, 15 bp, Homo sapiens
tccaacttccataag

SEQ ID NO: 1403090 - DNA, 15 bp, Homo sapiens
gtccaacttccataa

SEQ ID NO: 1403091 - DNA, 15 bp, Homo sapiens
agtccaacttccata

SEQ ID NO: 1403092 - DNA, 15 bp, Homo sapiens
gagtccaacttccat

SEQ ID NO: 1403093 - DNA, 15 bp, Homo sapiens
agagtccaacttcca

SEQ ID NO: 1403094 - DNA, 15 bp, Homo sapiens
aagagtccaacttcc

SEQ ID NO: 1403095 - DNA, 15 bp, Homo sapiens
aaagagtccaacttc

SEQ ID NO: 1403096 - DNA, 15 bp, Homo sapiens
gaaagagtccaactt

SEQ ID NO: 1403097 - DNA, 15 bp, Homo sapiens
tgaaagagtccaact

SEQ ID NO: 1403098 - DNA, 15 bp, Homo sapiens
atgaaagagtccaac

SEQ ID NO: 1403099 - DNA, 15 bp, Homo sapiens
aatgaaagagtccaa

SEQ ID NO: 1403100 - DNA, 15 bp, Homo sapiens
taatgaaagagtcca

SEQ ID NO: 1403101 - DNA, 15 bp, Homo sapiens
ataatgaaagagtcc

SEQ ID NO: 1403102 - DNA, 15 bp, Homo sapiens
aataatgaaagagtc

SEQ ID NO: 1403103 - DNA, 15 bp, Homo sapiens
taataatgaaagagt

SEQ ID NO: 1403104 - DNA, 15 bp, Homo sapiens
ttaataatgaaagag

SEQ ID NO: 1403105 - DNA, 15 bp, Homo sapiens
cttaataatgaaaga

SEQ ID NO: 1403106 - DNA, 15 bp, Homo sapiens
acttaataatgaaag

SEQ ID NO: 1403107 - DNA, 15 bp, Homo sapiens
gacttaataatgaaa

SEQ ID NO: 1403108 - DNA, 15 bp, Homo sapiens
agacttaataatgaa

SEQ ID NO: 1403109 - DNA, 15 bp, Homo sapiens
tagacttaataatga

SEQ ID NO: 1403110 - DNA, 15 bp, Homo sapiens
gtagacttaataatg

SEQ ID NO: 1403111 - DNA, 15 bp, Homo sapiens
tgtagacttaataat

SEQ ID NO: 1403112 - DNA, 15 bp, Homo sapiens
atgtagacttaataa

SEQ ID NO: 1403113 - DNA, 15 bp, Homo sapiens
aatgtagacttaata

SEQ ID NO: 1403114 - DNA, 15 bp, Homo sapiens
gaatgtagacttaat

SEQ ID NO: 1403115 - DNA, 15 bp, Homo sapiens
tgaatgtagacttaa

SEQ ID NO: 1403116 - DNA, 15 bp, Homo sapiens
ttgaatgtagactta

SEQ ID NO: 1403117 - DNA, 15 bp, Homo sapiens
attgaatgtagactt

SEQ ID NO: 1403118 - DNA, 15 bp, Homo sapiens
gattgaatgtagact

SEQ ID NO: 1403119 - DNA, 15 bp, Homo sapiens
tgattgaatgtagac

SEQ ID NO: 1403120 - DNA, 15 bp, Homo sapiens
gtgattgaatgtaga

SEQ ID NO: 1403121 - DNA, 15 bp, Homo sapiens
agtgattgaatgtag

SEQ ID NO: 1403122 - DNA, 15 bp, Homo sapiens
tagtgattgaatgta

SEQ ID NO: 1403123 - DNA, 15 bp, Homo sapiens
atagtgattgaatgt

SEQ ID NO: 1403124 - DNA, 15 bp, Homo sapiens
catagtgattgaatg

SEQ ID NO: 1403125 - DNA, 15 bp, Homo sapiens
acatagtgattgaat

SEQ ID NO: 1403126 - DNA, 15 bp, Homo sapiens
aacatagtgattgaa

SEQ ID NO: 1403127 - DNA, 15 bp, Homo sapiens
taacatagtgattga

SEQ ID NO: 1403128 - DNA, 15 bp, Homo sapiens
ctaacatagtgattg

SEQ ID NO: 1403129 - DNA, 15 bp, Homo sapiens
actaacatagtgatt

SEQ ID NO: 1403130 - DNA, 15 bp, Homo sapiens
tactaacatagtgat

SEQ ID NO: 1403131 - DNA, 15 bp, Homo sapiens
ttactaacatagtga

SEQ ID NO: 1403132 - DNA, 15 bp, Homo sapiens
tttactaacatagtg

SEQ ID NO: 1403133 - DNA, 15 bp, Homo sapiens
ttttactaacatagt

SEQ ID NO: 1403134 - DNA, 15 bp, Homo sapiens
tttttactaacatag

SEQ ID NO: 1403135 - DNA, 15 bp, Homo sapiens
atttttactaacata

SEQ ID NO: 1403136 - DNA, 15 bp, Homo sapiens
catttttactaacat

SEQ ID NO: 1403137 - DNA, 15 bp, Homo sapiens
acatttttactaaca

SEQ ID NO: 1403138 - DNA, 15 bp, Homo sapiens
aacatttttactaac

SEQ ID NO: 1403139 - DNA, 15 bp, Homo sapiens
caacatttttactaa

SEQ ID NO: 1403140 - DNA, 15 bp, Homo sapiens
acaacatttttacta

SEQ ID NO: 1403141 - DNA, 15 bp, Homo sapiens
aacaacatttttact

SEQ ID NO: 1403142 - DNA, 15 bp, Homo sapiens
gaacaacatttttac

SEQ ID NO: 1403143 - DNA, 15 bp, Homo sapiens
agaacaacattttta

SEQ ID NO: 1403144 - DNA, 15 bp, Homo sapiens
tagaacaacattttt

SEQ ID NO: 1403145 - DNA, 15 bp, Homo sapiens
ctagaacaacatttt

SEQ ID NO: 1403146 - DNA, 15 bp, Homo sapiens
actagaacaacattt

SEQ ID NO: 1403147 - DNA, 15 bp, Homo sapiens
aactagaacaacatt

SEQ ID NO: 1403148 - DNA, 15 bp, Homo sapiens
caactagaacaacat

SEQ ID NO: 1403149 - DNA, 15 bp, Homo sapiens
gcaactagaacaaca

SEQ ID NO: 1403150 - DNA, 15 bp, Homo sapiens
ggcaactagaacaac

SEQ ID NO: 1403151 - DNA, 15 bp, Homo sapiens
cggcaactagaacaa

SEQ ID NO: 1403152 - DNA, 15 bp, Homo sapiens
tcggcaactagaaca

SEQ ID NO: 1403153 - DNA, 15 bp, Homo sapiens
ttcggcaactagaac

SEQ ID NO: 1403154 - DNA, 15 bp, Homo sapiens
attcggcaactagaa

SEQ ID NO: 1403155 - DNA, 15 bp, Homo sapiens
cattcggcaactaga

SEQ ID NO: 1403156 - DNA, 15 bp, Homo sapiens
gcattcggcaactag

SEQ ID NO: 1403157 - DNA, 15 bp, Homo sapiens
tgcattcggcaacta

SEQ ID NO: 1403158 - DNA, 15 bp, Homo sapiens
ttgcattcggcaact

SEQ ID NO: 1403159 - DNA, 15 bp, Homo sapiens
attgcattcggcaac

SEQ ID NO: 1403160 - DNA, 15 bp, Homo sapiens
tattgcattcggcaa

SEQ ID NO: 1403161 - DNA, 15 bp, Homo sapiens
ttattgcattcggca

SEQ ID NO: 1403162 - DNA, 15 bp, Homo sapiens
tttattgcattcggc

SEQ ID NO: 1403163 - DNA, 15 bp, Homo sapiens
gtttattgcattcgg

SEQ ID NO: 1403164 - DNA, 15 bp, Homo sapiens
ggtttattgcattcg

SEQ ID NO: 1403165 - DNA, 15 bp, Homo sapiens
tggtttattgcattc

SEQ ID NO: 1403166 - DNA, 15 bp, Homo sapiens
ctggtttattgcatt

SEQ ID NO: 1403167 - DNA, 15 bp, Homo sapiens
gctggtttattgcat

SEQ ID NO: 1403168 - DNA, 15 bp, Homo sapiens
agctggtttattgca

SEQ ID NO: 1403169 - DNA, 15 bp, Homo sapiens
gagctggtttattgc

SEQ ID NO: 1403170 - DNA, 15 bp, Homo sapiens
tgagctggtttattg

SEQ ID NO: 1403171 - DNA, 15 bp, Homo sapiens
ctgagctggtttatt

SEQ ID NO: 1403172 - DNA, 15 bp, Homo sapiens
tctgagctggtttat

SEQ ID NO: 1403173 - DNA, 15 bp, Homo sapiens
gtctgagctggttta

SEQ ID NO: 1403174 - DNA, 15 bp, Homo sapiens
agtctgagctggttt

SEQ ID NO: 1403175 - DNA, 15 bp, Homo sapiens
aagtctgagctggtt

SEQ ID NO: 1403176 - DNA, 15 bp, Homo sapiens
taagtctgagctggt

SEQ ID NO: 1403177 - DNA, 15 bp, Homo sapiens
ctaagtctgagctgg

SEQ ID NO: 1403178 - DNA, 15 bp, Homo sapiens
actaagtctgagctg

SEQ ID NO: 1403179 - DNA, 15 bp, Homo sapiens
cactaagtctgagct

SEQ ID NO: 1403180 - DNA, 15 bp, Homo sapiens
ccactaagtctgagc

SEQ ID NO: 1403181 - DNA, 15 bp, Homo sapiens
gccactaagtctgag

SEQ ID NO: 1403182 - DNA, 15 bp, Homo sapiens
ggccactaagtctga

SEQ ID NO: 1403183 - DNA, 15 bp, Homo sapiens
aggccactaagtctg

SEQ ID NO: 1403184 - DNA, 15 bp, Homo sapiens
taggccactaagtct

SEQ ID NO: 1403185 - DNA, 15 bp, Homo sapiens
ttaggccactaagtc

SEQ ID NO: 1403186 - DNA, 15 bp, Homo sapiens
tttaggccactaagt

SEQ ID NO: 1403187 - DNA, 15 bp, Homo sapiens
ctttaggccactaag

SEQ ID NO: 1403188 - DNA, 15 bp, Homo sapiens
gctttaggccactaa

SEQ ID NO: 1403189 - DNA, 15 bp, Homo sapiens
tgctttaggccacta

SEQ ID NO: 1403190 - DNA, 15 bp, Homo sapiens
ctgctttaggccact

SEQ ID NO: 1403191 - DNA, 15 bp, Homo sapiens
gctgctttaggccac

SEQ ID NO: 1403192 - DNA, 15 bp, Homo sapiens
tgctgctttaggcca

SEQ ID NO: 1403193 - DNA, 15 bp, Homo sapiens
ttgctgctttaggcc

SEQ ID NO: 1403194 - DNA, 15 bp, Homo sapiens
attgctgctttaggc

SEQ ID NO: 1403195 - DNA, 15 bp, Homo sapiens
gattgctgctttagg

SEQ ID NO: 1403196 - DNA, 15 bp, Homo sapiens
tgattgctgctttag

SEQ ID NO: 1403197 - DNA, 15 bp, Homo sapiens
atgattgctgcttta

SEQ ID NO: 1403198 - DNA, 15 bp, Homo sapiens
aatgattgctgcttt

SEQ ID NO: 1403199 - DNA, 15 bp, Homo sapiens
aaatgattgctgctt

SEQ ID NO: 1403200 - DNA, 15 bp, Homo sapiens
caaatgattgctgct

SEQ ID NO: 1403201 - DNA, 15 bp, Homo sapiens
tcaaatgattgctgc

SEQ ID NO: 1403202 - DNA, 15 bp, Homo sapiens
gtcaaatgattgctg

SEQ ID NO: 1403203 - DNA, 15 bp, Homo sapiens
agtcaaatgattgct

SEQ ID NO: 1403204 - DNA, 15 bp, Homo sapiens
tagtcaaatgattgc

SEQ ID NO: 1403205 - DNA, 15 bp, Homo sapiens
atagtcaaatgattg

SEQ ID NO: 1403206 - DNA, 15 bp, Homo sapiens
catagtcaaatgatt

SEQ ID NO: 1403207 - DNA, 15 bp, Homo sapiens
acatagtcaaatgat

SEQ ID NO: 1403208 - DNA, 15 bp, Homo sapiens
aacatagtcaaatga

SEQ ID NO: 1403209 - DNA, 15 bp, Homo sapiens
gaacatagtcaaatg

SEQ ID NO: 1403210 - DNA, 15 bp, Homo sapiens
cgaacatagtcaaat

SEQ ID NO: 1403211 - DNA, 15 bp, Homo sapiens
tcgaacatagtcaaa

SEQ ID NO: 1403212 - DNA, 15 bp, Homo sapiens
ttcgaacatagtcaa

SEQ ID NO: 1403213 - DNA, 15 bp, Homo sapiens
cttcgaacatagtca

SEQ ID NO: 1403214 - DNA, 15 bp, Homo sapiens
tcttcgaacatagtc

SEQ ID NO: 1403215 - DNA, 15 bp, Homo sapiens
atcttcgaacatagt

SEQ ID NO: 1403216 - DNA, 15 bp, Homo sapiens
catcttcgaacatag

SEQ ID NO: 1403217 - DNA, 15 bp, Homo sapiens
gcatcttcgaacata

SEQ ID NO: 1403218 - DNA, 15 bp, Homo sapiens
ggcatcttcgaacat

SEQ ID NO: 1403219 - DNA, 15 bp, Homo sapiens
cggcatcttcgaaca

SEQ ID NO: 1403220 - DNA, 15 bp, Homo sapiens
acggcatcttcgaac

SEQ ID NO: 1403221 - DNA, 15 bp, Homo sapiens
cacggcatcttcgaa

SEQ ID NO: 1403222 - DNA, 15 bp, Homo sapiens
ccacggcatcttcga

SEQ ID NO: 1403223 - DNA, 15 bp, Homo sapiens
cccacggcatcttcg

SEQ ID NO: 1403224 - DNA, 15 bp, Homo sapiens
gcccacggcatcttc

SEQ ID NO: 1403225 - DNA, 15 bp, Homo sapiens
tgcccacggcatctt

SEQ ID NO: 1403226 - DNA, 15 bp, Homo sapiens
ctgcccacggcatct

SEQ ID NO: 1403227 - DNA, 15 bp, Homo sapiens
cctgcccacggcatc

SEQ ID NO: 1403228 - DNA, 15 bp, Homo sapiens
tcctgcccacggcat

SEQ ID NO: 1403229 - DNA, 15 bp, Homo sapiens
ttcctgcccacggca

SEQ ID NO: 1403230 - DNA, 15 bp, Homo sapiens
attcctgcccacggc

SEQ ID NO: 1403231 - DNA, 15 bp, Homo sapiens
aattcctgcccacgg

SEQ ID NO: 1403232 - DNA, 15 bp, Homo sapiens
aaattcctgcccacg

SEQ ID NO: 1403233 - DNA, 15 bp, Homo sapiens
taaattcctgcccac

SEQ ID NO: 1403234 - DNA, 15 bp, Homo sapiens
ctaaattcctgccca

SEQ ID NO: 1403235 - DNA, 15 bp, Homo sapiens
tctaaattcctgccc

SEQ ID NO: 1403236 - DNA, 15 bp, Homo sapiens
atctaaattcctgcc

SEQ ID NO: 1403237 - DNA, 15 bp, Homo sapiens
tatctaaattcctgc

SEQ ID NO: 1403238 - DNA, 15 bp, Homo sapiens
ttatctaaattcctg

SEQ ID NO: 1403239 - DNA, 15 bp, Homo sapiens
gttatctaaattcct

SEQ ID NO: 1403240 - DNA, 15 bp, Homo sapiens
tgttatctaaattcc

SEQ ID NO: 1403241 - DNA, 15 bp, Homo sapiens
ctgttatctaaattc

SEQ ID NO: 1403242 - DNA, 15 bp, Homo sapiens
gctgttatctaaatt

SEQ ID NO: 1403243 - DNA, 15 bp, Homo sapiens
tgctgttatctaaat

SEQ ID NO: 1403244 - DNA, 15 bp, Homo sapiens
ctgctgttatctaaa

SEQ ID NO: 1403245 - DNA, 15 bp, Homo sapiens
cctgctgttatctaa

SEQ ID NO: 1403246 - DNA, 15 bp, Homo sapiens
ccctgctgttatcta

SEQ ID NO: 1403247 - DNA, 15 bp, Homo sapiens
tccctgctgttatct

SEQ ID NO: 1403248 - DNA, 15 bp, Homo sapiens
atccctgctgttatc

SEQ ID NO: 1403249 - DNA, 15 bp, Homo sapiens
catccctgctgttat

SEQ ID NO: 1403250 - DNA, 15 bp, Homo sapiens
ccatccctgctgtta

SEQ ID NO: 1403251 - DNA, 15 bp, Homo sapiens
gccatccctgctgtt

SEQ ID NO: 1403252 - DNA, 15 bp, Homo sapiens
agccatccctgctgt

SEQ ID NO: 1403253 - DNA, 15 bp, Homo sapiens
aagccatccctgctg

SEQ ID NO: 1403254 - DNA, 15 bp, Homo sapiens
caagccatccctgct

SEQ ID NO: 1403255 - DNA, 15 bp, Homo sapiens
acaagccatccctgc

SEQ ID NO: 1403256 - DNA, 15 bp, Homo sapiens
gacaagccatccctg

SEQ ID NO: 1403257 - DNA, 15 bp, Homo sapiens
agacaagccatccct

SEQ ID NO: 1403258 - DNA, 15 bp, Homo sapiens
aagacaagccatccc

SEQ ID NO: 1403259 - DNA, 15 bp, Homo sapiens
aaagacaagccatcc

SEQ ID NO: 1403260 - DNA, 15 bp, Homo sapiens
caaagacaagccatc

SEQ ID NO: 1403261 - DNA, 15 bp, Homo sapiens
gcaaagacaagccat

SEQ ID NO: 1403262 - DNA, 15 bp, Homo sapiens
agcaaagacaagcca

SEQ ID NO: 1403263 - DNA, 15 bp, Homo sapiens
gagcaaagacaagcc

SEQ ID NO: 1403264 - DNA, 15 bp, Homo sapiens
agagcaaagacaagc

SEQ ID NO: 1403265 - DNA, 15 bp, Homo sapiens
cagagcaaagacaag

SEQ ID NO: 1403266 - DNA, 15 bp, Homo sapiens
gcagagcaaagacaa

SEQ ID NO: 1403267 - DNA, 15 bp, Homo sapiens
cgcagagcaaagaca

SEQ ID NO: 1403268 - DNA, 15 bp, Homo sapiens
tcgcagagcaaagac

SEQ ID NO: 1403269 - DNA, 15 bp, Homo sapiens
atcgcagagcaaaga

SEQ ID NO: 1403270 - DNA, 15 bp, Homo sapiens
catcgcagagcaaag

SEQ ID NO: 1403271 - DNA, 15 bp, Homo sapiens
acatcgcagagcaaa

SEQ ID NO: 1403272 - DNA, 15 bp, Homo sapiens
gacatcgcagagcaa

SEQ ID NO: 1403273 - DNA, 15 bp, Homo sapiens
agacatcgcagagca

SEQ ID NO: 1403274 - DNA, 15 bp, Homo sapiens
cagacatcgcagagc

SEQ ID NO: 1403275 - DNA, 15 bp, Homo sapiens
tcagacatcgcagag

SEQ ID NO: 1403276 - DNA, 15 bp, Homo sapiens
ctcagacatcgcaga

SEQ ID NO: 1403277 - DNA, 15 bp, Homo sapiens
cctcagacatcgcag

SEQ ID NO: 1403278 - DNA, 15 bp, Homo sapiens
acctcagacatcgca

SEQ ID NO: 1403279 - DNA, 15 bp, Homo sapiens
gacctcagacatcgc

SEQ ID NO: 1403280 - DNA, 15 bp, Homo sapiens
agacctcagacatcg

SEQ ID NO: 1403281 - DNA, 15 bp, Homo sapiens
gagacctcagacatc

SEQ ID NO: 1403282 - DNA, 15 bp, Homo sapiens
tgagacctcagacat

SEQ ID NO: 1403283 - DNA, 15 bp, Homo sapiens
gtgagacctcagaca

SEQ ID NO: 1403284 - DNA, 15 bp, Homo sapiens
agtgagacctcagac

SEQ ID NO: 1403285 - DNA, 15 bp, Homo sapiens
cagtgagacctcaga

SEQ ID NO: 1403286 - DNA, 15 bp, Homo sapiens
tcagtgagacctcag

SEQ ID NO: 1403287 - DNA, 15 bp, Homo sapiens
ctcagtgagacctca

SEQ ID NO: 1403288 - DNA, 15 bp, Homo sapiens
tctcagtgagacctc

SEQ ID NO: 1403289 - DNA, 15 bp, Homo sapiens
ttctcagtgagacct

SEQ ID NO: 1403290 - DNA, 15 bp, Homo sapiens
tttctcagtgagacc

SEQ ID NO: 1403291 - DNA, 15 bp, Homo sapiens
ttttctcagtgagac

SEQ ID NO: 1403292 - DNA, 15 bp, Homo sapiens
gttttctcagtgaga

SEQ ID NO: 1403293 - DNA, 15 bp, Homo sapiens
agttttctcagtgag

SEQ ID NO: 1403294 - DNA, 15 bp, Homo sapiens
gagttttctcagtga

SEQ ID NO: 1403295 - DNA, 15 bp, Homo sapiens
tgagttttctcagtg

SEQ ID NO: 1403296 - DNA, 15 bp, Homo sapiens
ttgagttttctcagt

SEQ ID NO: 1403297 - DNA, 15 bp, Homo sapiens
cttgagttttctcag

SEQ ID NO: 1403298 - DNA, 15 bp, Homo sapiens
gcttgagttttctca

SEQ ID NO: 1403299 - DNA, 15 bp, Homo sapiens
cgcttgagttttctc

SEQ ID NO: 1403300 - DNA, 15 bp, Homo sapiens
ccgcttgagttttct

SEQ ID NO: 1403301 - DNA, 15 bp, Homo sapiens
gccgcttgagttttc

SEQ ID NO: 1403302 - DNA, 15 bp, Homo sapiens
agccgcttgagtttt

SEQ ID NO: 1403303 - DNA, 15 bp, Homo sapiens
cagccgcttgagttt

SEQ ID NO: 1403304 - DNA, 15 bp, Homo sapiens
ccagccgcttgagtt

SEQ ID NO: 1403305 - DNA, 15 bp, Homo sapiens
cccagccgcttgagt

SEQ ID NO: 1403306 - DNA, 15 bp, Homo sapiens
ccccagccgcttgag

SEQ ID NO: 1403307 - DNA, 15 bp, Homo sapiens
cccccagccgcttga

SEQ ID NO: 1403308 - DNA, 15 bp, Homo sapiens
acccccagccgcttg

SEQ ID NO: 1403309 - DNA, 15 bp, Homo sapiens
tacccccagccgctt

SEQ ID NO: 1403310 - DNA, 15 bp, Homo sapiens
ttacccccagccgct

SEQ ID NO: 1403311 - DNA, 15 bp, Homo sapiens
attacccccagccgc

SEQ ID NO: 1403312 - DNA, 15 bp, Homo sapiens
tattacccccagccg

SEQ ID NO: 1403313 - DNA, 15 bp, Homo sapiens
ttattacccccagcc

SEQ ID NO: 1403314 - DNA, 15 bp, Homo sapiens
attattacccccagc

SEQ ID NO: 1403315 - DNA, 15 bp, Homo sapiens
gattattacccccag

SEQ ID NO: 1403316 - DNA, 15 bp, Homo sapiens
tgattattaccccca

SEQ ID NO: 1403317 - DNA, 15 bp, Homo sapiens
atgattattaccccc

SEQ ID NO: 1403318 - DNA, 15 bp, Homo sapiens
gatgattattacccc

SEQ ID NO: 1403319 - DNA, 15 bp, Homo sapiens
agatgattattaccc

SEQ ID NO: 1403320 - DNA, 15 bp, Homo sapiens
cagatgattattacc

SEQ ID NO: 1403321 - DNA, 15 bp, Homo sapiens
ccagatgattattac

SEQ ID NO: 1403322 - DNA, 15 bp, Homo sapiens
tccagatgattatta

SEQ ID NO: 1403323 - DNA, 15 bp, Homo sapiens
ttccagatgattatt

SEQ ID NO: 1403324 - DNA, 15 bp, Homo sapiens
attccagatgattat

SEQ ID NO: 1403325 - DNA, 15 bp, Homo sapiens
aattccagatgatta

SEQ ID NO: 1403326 - DNA, 15 bp, Homo sapiens
aaattccagatgatt

SEQ ID NO: 1403327 - DNA, 15 bp, Homo sapiens
aaaattccagatgat

SEQ ID NO: 1403328 - DNA, 15 bp, Homo sapiens
gaaaattccagatga

SEQ ID NO: 1403329 - DNA, 15 bp, Homo sapiens
agaaaattccagatg

SEQ ID NO: 1403330 - DNA, 15 bp, Homo sapiens
aagaaaattccagat

SEQ ID NO: 1403331 - DNA, 15 bp, Homo sapiens
aaagaaaattccaga

SEQ ID NO: 1403332 - DNA, 15 bp, Homo sapiens
taaagaaaattccag

SEQ ID NO: 1403333 - DNA, 15 bp, Homo sapiens
gtaaagaaaattcca

SEQ ID NO: 1403334 - DNA, 15 bp, Homo sapiens
agtaaagaaaattcc

SEQ ID NO: 1403335 - DNA, 15 bp, Homo sapiens
gagtaaagaaaattc

SEQ ID NO: 1403336 - DNA, 15 bp, Homo sapiens
ggagtaaagaaaatt

SEQ ID NO: 1403337 - DNA, 15 bp, Homo sapiens
aggagtaaagaaaat

SEQ ID NO: 1403338 - DNA, 15 bp, Homo sapiens
caggagtaaagaaaa

SEQ ID NO: 1403339 - DNA, 15 bp, Homo sapiens
acaggagtaaagaaa

SEQ ID NO: 1403340 - DNA, 15 bp, Homo sapiens
tacaggagtaaagaa

SEQ ID NO: 1403341 - DNA, 15 bp, Homo sapiens
atacaggagtaaaga

SEQ ID NO: 1403342 - DNA, 15 bp, Homo sapiens
gatacaggagtaaag

SEQ ID NO: 1403343 - DNA, 15 bp, Homo sapiens
agatacaggagtaaa

SEQ ID NO: 1403344 - DNA, 15 bp, Homo sapiens
atcagatacaggagt

SEQ ID NO: 1403345 - DNA, 15 bp, Homo sapiens
catcagatacaggag

SEQ ID NO: 1403346 - DNA, 15 bp, Homo sapiens
acatcagatacagga

SEQ ID NO: 1403347 - DNA, 15 bp, Homo sapiens
gacatcagatacagg

SEQ ID NO: 1403348 - DNA, 15 bp, Homo sapiens
agacatcagatacag

SEQ ID NO: 1403349 - DNA, 15 bp, Homo sapiens
cagacatcagataca

SEQ ID NO: 1403350 - DNA, 15 bp, Homo sapiens
ccagacatcagatac

SEQ ID NO: 1403351 - DNA, 15 bp, Homo sapiens
cccagacatcagata

SEQ ID NO: 1403352 - DNA, 15 bp, Homo sapiens
gcccagacatcagat

SEQ ID NO: 1403353 - DNA, 15 bp, Homo sapiens
agcccagacatcaga

SEQ ID NO: 1403354 - DNA, 15 bp, Homo sapiens
cagcccagacatcag

SEQ ID NO: 1403355 - DNA, 15 bp, Homo sapiens
gcagcccagacatca

SEQ ID NO: 1403356 - DNA, 15 bp, Homo sapiens
cgcagcccagacatc

SEQ ID NO: 1403357 - DNA, 15 bp, Homo sapiens
tcgcagcccagacat

SEQ ID NO: 1403358 - DNA, 15 bp, Homo sapiens
atcgcagcccagaca

SEQ ID NO: 1403359 - DNA, 15 bp, Homo sapiens
catcgcagcccagac

SEQ ID NO: 1403360 - DNA, 15 bp, Homo sapiens
tcatcgcagcccaga

SEQ ID NO: 1403361 - DNA, 15 bp, Homo sapiens
gtcatcgcagcccag

SEQ ID NO: 1403362 - DNA, 15 bp, Homo sapiens
agtcatcgcagccca

SEQ ID NO: 1403363 - DNA, 15 bp, Homo sapiens
gagtcatcgcagccc

SEQ ID NO: 1403364 - DNA, 15 bp, Homo sapiens
tgagtcatcgcagcc

SEQ ID NO: 1403365 - DNA, 15 bp, Homo sapiens
ttgagtcatcgcagc

SEQ ID NO: 1403366 - DNA, 15 bp, Homo sapiens
tttgagtcatcgcag

SEQ ID NO: 1403367 - DNA, 15 bp, Homo sapiens
ctttgagtcatcgca

SEQ ID NO: 1403368 - DNA, 15 bp, Homo sapiens
cctttgagtcatcgc

SEQ ID NO: 1403369 - DNA, 15 bp, Homo sapiens
gcctttgagtcatcg

SEQ ID NO: 1403370 - DNA, 15 bp, Homo sapiens
agcctttgagtcatc

SEQ ID NO: 1403371 - DNA, 15 bp, Homo sapiens
cagcctttgagtcat

SEQ ID NO: 1403372 - DNA, 15 bp, Homo sapiens
tcagcctttgagtca

SEQ ID NO: 1403373 - DNA, 15 bp, Homo sapiens
atcagcctttgagtc

SEQ ID NO: 1403374 - DNA, 15 bp, Homo sapiens
aatcagcctttgagt

SEQ ID NO: 1403375 - DNA, 15 bp, Homo sapiens
aaatcagcctttgag

SEQ ID NO: 1403376 - DNA, 15 bp, Homo sapiens
gaaatcagcctttga

SEQ ID NO: 1403377 - DNA, 15 bp, Homo sapiens
tgaaatcagcctttg

SEQ ID NO: 1403378 - DNA, 15 bp, Homo sapiens
ctgaaatcagccttt

SEQ ID NO: 1403379 - DNA, 15 bp, Homo sapiens
gctgaaatcagcctt

SEQ ID NO: 1403380 - DNA, 15 bp, Homo sapiens
agctgaaatcagcct

SEQ ID NO: 1403381 - DNA, 15 bp, Homo sapiens
cagctgaaatcagcc

SEQ ID NO: 1403382 - DNA, 15 bp, Homo sapiens
tcagctgaaatcagc

SEQ ID NO: 1403383 - DNA, 15 bp, Homo sapiens
ctcagctgaaatcag

SEQ ID NO: 1403384 - DNA, 15 bp, Homo sapiens
tctcagctgaaatca

SEQ ID NO: 1403385 - DNA, 15 bp, Homo sapiens
gtctcagctgaaatc

SEQ ID NO: 1403386 - DNA, 15 bp, Homo sapiens
agtctcagctgaaat

SEQ ID NO: 1403387 - DNA, 15 bp, Homo sapiens
cagtctcagctgaaa

SEQ ID NO: 1403388 - DNA, 15 bp, Homo sapiens
acagtctcagctgaa

SEQ ID NO: 1403389 - DNA, 15 bp, Homo sapiens
tacagtctcagctga

SEQ ID NO: 1403390 - DNA, 15 bp, Homo sapiens
ctacagtctcagctg

SEQ ID NO: 1403391 - DNA, 15 bp, Homo sapiens
tctacagtctcagct

SEQ ID NO: 1403392 - DNA, 15 bp, Homo sapiens
gtctacagtctcagc

SEQ ID NO: 1403393 - DNA, 15 bp, Homo sapiens
ggtctacagtctcag

SEQ ID NO: 1403394 - DNA, 15 bp, Homo sapiens
tggtctacagtctca

SEQ ID NO: 1403395 - DNA, 15 bp, Homo sapiens
gtggtctacagtctc

SEQ ID NO: 1403396 - DNA, 15 bp, Homo sapiens
cgtggtctacagtct

SEQ ID NO: 1403397 - DNA, 15 bp, Homo sapiens
acgtggtctacagtc

SEQ ID NO: 1403398 - DNA, 15 bp, Homo sapiens
cacgtggtctacagt

SEQ ID NO: 1403399 - DNA, 15 bp, Homo sapiens
gcacgtggtctacag

SEQ ID NO: 1403400 - DNA, 15 bp, Homo sapiens
ggcacgtggtctaca

SEQ ID NO: 1403401 - DNA, 15 bp, Homo sapiens
aggcacgtggtctac

SEQ ID NO: 1403402 - DNA, 15 bp, Homo sapiens
taggcacgtggtcta

SEQ ID NO: 1403403 - DNA, 15 bp, Homo sapiens
gtaggcacgtggtct

SEQ ID NO: 1403404 - DNA, 15 bp, Homo sapiens
agtaggcacgtggtc

SEQ ID NO: 1403405 - DNA, 15 bp, Homo sapiens
aagtaggcacgtggt

SEQ ID NO: 1403406 - DNA, 15 bp, Homo sapiens
caagtaggcacgtgg

SEQ ID NO: 1403407 - DNA, 15 bp, Homo sapiens
acaagtaggcacgtg

SEQ ID NO: 1403408 - DNA, 15 bp, Homo sapiens
cacaagtaggcacgt

SEQ ID NO: 1403409 - DNA, 15 bp, Homo sapiens
ccacaagtaggcacg

SEQ ID NO: 1403410 - DNA, 15 bp, Homo sapiens
gccacaagtaggcac

SEQ ID NO: 1403411 - DNA, 15 bp, Homo sapiens
ggccacaagtaggca

SEQ ID NO: 1403412 - DNA, 15 bp, Homo sapiens
aggccacaagtaggc

SEQ ID NO: 1403413 - DNA, 15 bp, Homo sapiens
gaggccacaagtagg

SEQ ID NO: 1403414 - DNA, 15 bp, Homo sapiens
ggaggccacaagtag

SEQ ID NO: 1403415 - DNA, 15 bp, Homo sapiens
gggaggccacaagta

SEQ ID NO: 1403416 - DNA, 15 bp, Homo sapiens
ggggaggccacaagt

SEQ ID NO: 1403417 - DNA, 15 bp, Homo sapiens
aggggaggccacaag

SEQ ID NO: 1403418 - DNA, 15 bp, Homo sapiens
aaggggaggccacaa

SEQ ID NO: 1403419 - DNA, 15 bp, Homo sapiens
aaaggggaggccaca

SEQ ID NO: 1403420 - DNA, 15 bp, Homo sapiens
aaaaggggaggccac

SEQ ID NO: 1403421 - DNA, 15 bp, Homo sapiens
caaaaggggaggcca

SEQ ID NO: 1403422 - DNA, 15 bp, Homo sapiens
gcaaaaggggaggcc

SEQ ID NO: 1403423 - DNA, 15 bp, Homo sapiens
ggcaaaaggggaggc

SEQ ID NO: 1403424 - DNA, 15 bp, Homo sapiens
aggcaaaaggggagg

SEQ ID NO: 1403425 - DNA, 15 bp, Homo sapiens
aaggcaaaaggggag

SEQ ID NO: 1403426 - DNA, 15 bp, Homo sapiens
caaggcaaaagggga

SEQ ID NO: 1403427 - DNA, 15 bp, Homo sapiens
ccaaggcaaaagggg

SEQ ID NO: 1403428 - DNA, 15 bp, Homo sapiens
cccaaggcaaaaggg

SEQ ID NO: 1403429 - DNA, 15 bp, Homo sapiens
acccaaggcaaaagg

SEQ ID NO: 1403430 - DNA, 15 bp, Homo sapiens
aacccaaggcaaaag

SEQ ID NO: 1403431 - DNA, 15 bp, Homo sapiens
aaacccaaggcaaaa

SEQ ID NO: 1403432 - DNA, 15 bp, Homo sapiens
gaaacccaaggcaaa

SEQ ID NO: 1403433 - DNA, 15 bp, Homo sapiens
agaaacccaaggcaa

SEQ ID NO: 1403434 - DNA, 15 bp, Homo sapiens
gagaaacccaaggca

SEQ ID NO: 1403435 - DNA, 15 bp, Homo sapiens
tgagaaacccaaggc

SEQ ID NO: 1403436 - DNA, 15 bp, Homo sapiens
gtgagaaacccaagg

SEQ ID NO: 1403437 - DNA, 15 bp, Homo sapiens
tgtgagaaacccaag

SEQ ID NO: 1403438 - DNA, 15 bp, Homo sapiens
ctgtgagaaacccaa

SEQ ID NO: 1403439 - DNA, 15 bp, Homo sapiens
tctgtgagaaaccca

SEQ ID NO: 1403440 - DNA, 15 bp, Homo sapiens
ttctgtgagaaaccc

SEQ ID NO: 1403441 - DNA, 15 bp, Homo sapiens
attctgtgagaaacc

SEQ ID NO: 1403442 - DNA, 15 bp, Homo sapiens
cattctgtgagaaac

SEQ ID NO: 1403443 - DNA, 15 bp, Homo sapiens
acattctgtgagaaa

SEQ ID NO: 1403444 - DNA, 15 bp, Homo sapiens
cacattctgtgagaa

SEQ ID NO: 1403445 - DNA, 15 bp, Homo sapiens
ccacattctgtgaga

SEQ ID NO: 1403446 - DNA, 15 bp, Homo sapiens
gccacattctgtgag

SEQ ID NO: 1403447 - DNA, 15 bp, Homo sapiens
agccacattctgtga

SEQ ID NO: 1403448 - DNA, 15 bp, Homo sapiens
cagccacattctgtg

SEQ ID NO: 1403449 - DNA, 15 bp, Homo sapiens
ccagccacattctgt

SEQ ID NO: 1403450 - DNA, 15 bp, Homo sapiens
accagccacattctg

SEQ ID NO: 1403451 - DNA, 15 bp, Homo sapiens
aaccagccacattct

SEQ ID NO: 1403452 - DNA, 15 bp, Homo sapiens
gaaccagccacattc

SEQ ID NO: 1403453 - DNA, 15 bp, Homo sapiens
agaaccagccacatt

SEQ ID NO: 1403454 - DNA, 15 bp, Homo sapiens
cagaaccagccacat

SEQ ID NO: 1403455 - DNA, 15 bp, Homo sapiens
ccagaaccagccaca

SEQ ID NO: 1403456 - DNA, 15 bp, Homo sapiens
tccagaaccagccac

SEQ ID NO: 1403457 - DNA, 15 bp, Homo sapiens
ctccagaaccagcca

SEQ ID NO: 1403458 - DNA, 15 bp, Homo sapiens
tctccagaaccagcc

SEQ ID NO: 1403459 - DNA, 15 bp, Homo sapiens
ttctccagaaccagc

SEQ ID NO: 1403460 - DNA, 15 bp, Homo sapiens
attctccagaaccag

SEQ ID NO: 1403461 - DNA, 15 bp, Homo sapiens
cattctccagaacca

SEQ ID NO: 1403462 - DNA, 15 bp, Homo sapiens
tcattctccagaacc

SEQ ID NO: 1403463 - DNA, 15 bp, Homo sapiens
ctcattctccagaac

SEQ ID NO: 1403464 - DNA, 15 bp, Homo sapiens
tctcattctccagaa

SEQ ID NO: 1403465 - DNA, 15 bp, Homo sapiens
gtctcattctccaga

SEQ ID NO: 1403466 - DNA, 15 bp, Homo sapiens
agtctcattctccag

SEQ ID NO: 1403467 - DNA, 15 bp, Homo sapiens
aagtctcattctcca

SEQ ID NO: 1403468 - DNA, 15 bp, Homo sapiens
gaagtctcattctcc

SEQ ID NO: 1403469 - DNA, 15 bp, Homo sapiens
ggaagtctcattctc

SEQ ID NO: 1403470 - DNA, 15 bp, Homo sapiens
tggaagtctcattct

SEQ ID NO: 1403471 - DNA, 15 bp, Homo sapiens
ttggaagtctcattc

SEQ ID NO: 1403472 - DNA, 15 bp, Homo sapiens
attggaagtctcatt

SEQ ID NO: 1403473 - DNA, 15 bp, Homo sapiens
cattggaagtctcat

SEQ ID NO: 1403474 - DNA, 15 bp, Homo sapiens
tcattggaagtctca

SEQ ID NO: 1403475 - DNA, 15 bp, Homo sapiens
ttcattggaagtctc

SEQ ID NO: 1403476 - DNA, 15 bp, Homo sapiens
tttcattggaagtct

SEQ ID NO: 1403477 - DNA, 15 bp, Homo sapiens
atttcattggaagtc

SEQ ID NO: 1403478 - DNA, 15 bp, Homo sapiens
gatttcattggaagt

SEQ ID NO: 1403479 - DNA, 15 bp, Homo sapiens
tgatttcattggaag

SEQ ID NO: 1403480 - DNA, 15 bp, Homo sapiens
ctgatttcattggaa

SEQ ID NO: 1403481 - DNA, 15 bp, Homo sapiens
cctgatttcattgga

SEQ ID NO: 1403482 - DNA, 15 bp, Homo sapiens
acctgatttcattgg

SEQ ID NO: 1403483 - DNA, 15 bp, Homo sapiens
cacctgatttcattg

SEQ ID NO: 1403484 - DNA, 15 bp, Homo sapiens
ccacctgatttcatt

SEQ ID NO: 1403485 - DNA, 15 bp, Homo sapiens
tccacctgatttcat

SEQ ID NO: 1403486 - DNA, 15 bp, Homo sapiens
ttccacctgatttca

SEQ ID NO: 1403487 - DNA, 15 bp, Homo sapiens
tttccacctgatttc

SEQ ID NO: 1403488 - DNA, 15 bp, Homo sapiens
atttccacctgattt

SEQ ID NO: 1403489 - DNA, 15 bp, Homo sapiens
catttccacctgatt

SEQ ID NO: 1403490 - DNA, 15 bp, Homo sapiens
tcatttccacctgat

SEQ ID NO: 1403491 - DNA, 15 bp, Homo sapiens
gtcatttccacctga

SEQ ID NO: 1403492 - DNA, 15 bp, Homo sapiens
tgtcatttccacctg

SEQ ID NO: 1403493 - DNA, 15 bp, Homo sapiens
atgtcatttccacct

SEQ ID NO: 1403494 - DNA, 15 bp, Homo sapiens
gatgtcatttccacc

SEQ ID NO: 1403495 - DNA, 15 bp, Homo sapiens
agatgtcatttccac

SEQ ID NO: 1403496 - DNA, 15 bp, Homo sapiens
gagatgtcatttcca

SEQ ID NO: 1403497 - DNA, 15 bp, Homo sapiens
cgagatgtcatttcc

SEQ ID NO: 1403498 - DNA, 15 bp, Homo sapiens
gcgagatgtcatttc

SEQ ID NO: 1403499 - DNA, 15 bp, Homo sapiens
ggcgagatgtcattt

SEQ ID NO: 1403500 - DNA, 15 bp, Homo sapiens
cggcgagatgtcatt

SEQ ID NO: 1403501 - DNA, 15 bp, Homo sapiens
gcggcgagatgtcat

SEQ ID NO: 1403502 - DNA, 15 bp, Homo sapiens
agcggcgagatgtca

SEQ ID NO: 1403503 - DNA, 15 bp, Homo sapiens
aagcggcgagatgtc

SEQ ID NO: 1403504 - DNA, 15 bp, Homo sapiens
aaagcggcgagatgt

SEQ ID NO: 1403505 - DNA, 15 bp, Homo sapiens
gaaagcggcgagatg

SEQ ID NO: 1403506 - DNA, 15 bp, Homo sapiens
tgaaagcggcgagat

SEQ ID NO: 1403507 - DNA, 15 bp, Homo sapiens
ctgaaagcggcgaga

SEQ ID NO: 1403508 - DNA, 15 bp, Homo sapiens
gctgaaagcggcgag

SEQ ID NO: 1403509 - DNA, 15 bp, Homo sapiens
tgctgaaagcggcga

SEQ ID NO: 1403510 - DNA, 15 bp, Homo sapiens
atgctgaaagcggcg

SEQ ID NO: 1403511 - DNA, 15 bp, Homo sapiens
catgctgaaagcggc

SEQ ID NO: 1403512 - DNA, 15 bp, Homo sapiens
gcatgctgaaagcgg

SEQ ID NO: 1403513 - DNA, 15 bp, Homo sapiens
agcatgctgaaagcg

SEQ ID NO: 1403514 - DNA, 15 bp, Homo sapiens
gagcatgctgaaagc

SEQ ID NO: 1403515 - DNA, 15 bp, Homo sapiens
agagcatgctgaaag

SEQ ID NO: 1403516 - DNA, 15 bp, Homo sapiens
tagagcatgctgaaa

SEQ ID NO: 1403517 - DNA, 15 bp, Homo sapiens
atagagcatgctgaa

SEQ ID NO: 1403518 - DNA, 15 bp, Homo sapiens
aatagagcatgctga

SEQ ID NO: 1403519 - DNA, 15 bp, Homo sapiens
caatagagcatgctg

SEQ ID NO: 1403520 - DNA, 15 bp, Homo sapiens
ccaatagagcatgct

SEQ ID NO: 1403521 - DNA, 15 bp, Homo sapiens
accaatagagcatgc

SEQ ID NO: 1403522 - DNA, 15 bp, Homo sapiens
aaccaatagagcatg

SEQ ID NO: 1403523 - DNA, 15 bp, Homo sapiens
caaccaatagagcat

SEQ ID NO: 1403524 - DNA, 15 bp, Homo sapiens
ccaaccaatagagca

SEQ ID NO: 1403525 - DNA, 15 bp, Homo sapiens
tccaaccaatagagc

SEQ ID NO: 1403526 - DNA, 15 bp, Homo sapiens
ttccaaccaatagag

SEQ ID NO: 1403527 - DNA, 15 bp, Homo sapiens
gttccaaccaataga

SEQ ID NO: 1403528 - DNA, 15 bp, Homo sapiens
tgttccaaccaatag

SEQ ID NO: 1403529 - DNA, 15 bp, Homo sapiens
ctgttccaaccaata

SEQ ID NO: 1403530 - DNA, 15 bp, Homo sapiens
actgttccaaccaat

SEQ ID NO: 1403531 - DNA, 15 bp, Homo sapiens
aactgttccaaccaa

SEQ ID NO: 1403532 - DNA, 15 bp, Homo sapiens
taactgttccaacca

SEQ ID NO: 1403533 - DNA, 15 bp, Homo sapiens
ataactgttccaacc

SEQ ID NO: 1403534 - DNA, 15 bp, Homo sapiens
cataactgttccaac

SEQ ID NO: 1403535 - DNA, 15 bp, Homo sapiens
ccataactgttccaa

SEQ ID NO: 1403536 - DNA, 15 bp, Homo sapiens
tccataactgttcca

SEQ ID NO: 1403537 - DNA, 15 bp, Homo sapiens
gtccataactgttcc

SEQ ID NO: 1403538 - DNA, 15 bp, Homo sapiens
agtccataactgttc

SEQ ID NO: 1403539 - DNA, 15 bp, Homo sapiens
aagtccataactgtt

SEQ ID NO: 1403540 - DNA, 15 bp, Homo sapiens
taagtccataactgt

SEQ ID NO: 1403541 - DNA, 15 bp, Homo sapiens
ctaagtccataactg

SEQ ID NO: 1403542 - DNA, 15 bp, Homo sapiens
gctaagtccataact

SEQ ID NO: 1403543 - DNA, 15 bp, Homo sapiens
agctaagtccataac

SEQ ID NO: 1403544 - DNA, 15 bp, Homo sapiens
tagctaagtccataa

SEQ ID NO: 1403545 - DNA, 15 bp, Homo sapiens
ctagctaagtccata

SEQ ID NO: 1403546 - DNA, 15 bp, Homo sapiens
tctagctaagtccat

SEQ ID NO: 1403547 - DNA, 15 bp, Homo sapiens
atctagctaagtcca

SEQ ID NO: 1403548 - DNA, 15 bp, Homo sapiens
aatctagctaagtcc

SEQ ID NO: 1403549 - DNA, 15 bp, Homo sapiens
gaatctagctaagtc

SEQ ID NO: 1403550 - DNA, 15 bp, Homo sapiens
tgaatctagctaagt

SEQ ID NO: 1403551 - DNA, 15 bp, Homo sapiens
ttgaatctagctaag

SEQ ID NO: 1403552 - DNA, 15 bp, Homo sapiens
tttgaatctagctaa

SEQ ID NO: 1403553 - DNA, 15 bp, Homo sapiens
ctttgaatctagcta

SEQ ID NO: 1403554 - DNA, 15 bp, Homo sapiens
cctttgaatctagct

SEQ ID NO: 1403555 - DNA, 15 bp, Homo sapiens
tcctttgaatctagc

SEQ ID NO: 1403556 - DNA, 15 bp, Homo sapiens
ttcctttgaatctag

SEQ ID NO: 1403557 - DNA, 15 bp, Homo sapiens
cttcctttgaatcta

SEQ ID NO: 1403558 - DNA, 15 bp, Homo sapiens
ccttcctttgaatct

SEQ ID NO: 1403559 - DNA, 15 bp, Homo sapiens
cccttcctttgaatc

SEQ ID NO: 1403560 - DNA, 15 bp, Homo sapiens
tcccttcctttgaat

SEQ ID NO: 1403561 - DNA, 15 bp, Homo sapiens
ttcccttcctttgaa

SEQ ID NO: 1403562 - DNA, 15 bp, Homo sapiens
gttcccttcctttga

SEQ ID NO: 1403563 - DNA, 15 bp, Homo sapiens
tgttcccttcctttg

SEQ ID NO: 1403564 - DNA, 15 bp, Homo sapiens
ttgttcccttccttt

SEQ ID NO: 1403565 - DNA, 15 bp, Homo sapiens
tttgttcccttcctt

SEQ ID NO: 1403566 - DNA, 15 bp, Homo sapiens
ctttgttcccttcct

SEQ ID NO: 1403567 - DNA, 15 bp, Homo sapiens
tctttgttcccttcc

SEQ ID NO: 1403568 - DNA, 15 bp, Homo sapiens
gtctttgttcccttc

SEQ ID NO: 1403569 - DNA, 15 bp, Homo sapiens
ggtctttgttccctt

SEQ ID NO: 1403570 - DNA, 15 bp, Homo sapiens
gggtctttgttccct

SEQ ID NO: 1403571 - DNA, 15 bp, Homo sapiens
ggggtctttgttccc

SEQ ID NO: 1403572 - DNA, 15 bp, Homo sapiens
gggggtctttgttcc

SEQ ID NO: 1403573 - DNA, 15 bp, Homo sapiens
agggggtctttgttc

SEQ ID NO: 1403574 - DNA, 15 bp, Homo sapiens
gagggggtctttgtt

SEQ ID NO: 1403575 - DNA, 15 bp, Homo sapiens
ggagggggtctttgt

SEQ ID NO: 1403576 - DNA, 15 bp, Homo sapiens
aggagggggtctttg

SEQ ID NO: 1403577 - DNA, 15 bp, Homo sapiens
gaggagggggtcttt

SEQ ID NO: 1403578 - DNA, 15 bp, Homo sapiens
agaggagggggtctt

SEQ ID NO: 1403579 - DNA, 15 bp, Homo sapiens
gagaggagggggtct

SEQ ID NO: 1403580 - DNA, 15 bp, Homo sapiens
tgagaggagggggtc

SEQ ID NO: 1403581 - DNA, 15 bp, Homo sapiens
ctgagaggagggggt

SEQ ID NO: 1403582 - DNA, 15 bp, Homo sapiens
tctgagaggaggggg

SEQ ID NO: 1403583 - DNA, 15 bp, Homo sapiens
ctctgagaggagggg

SEQ ID NO: 1403584 - DNA, 15 bp, Homo sapiens
tctctgagaggaggg

SEQ ID NO: 1403585 - DNA, 15 bp, Homo sapiens
ctctctgagaggagg

SEQ ID NO: 1403586 - DNA, 15 bp, Homo sapiens
actctctgagaggag

SEQ ID NO: 1403587 - DNA, 15 bp, Homo sapiens
cactctctgagagga

SEQ ID NO: 1403588 - DNA, 15 bp, Homo sapiens
ccactctctgagagg

SEQ ID NO: 1403589 - DNA, 15 bp, Homo sapiens
cccactctctgagag

SEQ ID NO: 1403590 - DNA, 15 bp, Homo sapiens
ccccactctctgaga

SEQ ID NO: 1403591 - DNA, 15 bp, Homo sapiens
gccccactctctgag

SEQ ID NO: 1403592 - DNA, 15 bp, Homo sapiens
tgccccactctctga

SEQ ID NO: 1403593 - DNA, 15 bp, Homo sapiens
atgccccactctctg

SEQ ID NO: 1403594 - DNA, 15 bp, Homo sapiens
tatgccccactctct

SEQ ID NO: 1403595 - DNA, 15 bp, Homo sapiens
ttatgccccactctc

SEQ ID NO: 1403596 - DNA, 15 bp, Homo sapiens
attatgccccactct

SEQ ID NO: 1403597 - DNA, 15 bp, Homo sapiens
cattatgccccactc

SEQ ID NO: 1403598 - DNA, 15 bp, Homo sapiens
tcattatgccccact

SEQ ID NO: 1403599 - DNA, 15 bp, Homo sapiens
ctcattatgccccac

SEQ ID NO: 1403600 - DNA, 15 bp, Homo sapiens
tctcattatgcccca

SEQ ID NO: 1403601 - DNA, 15 bp, Homo sapiens
ctctcattatgcccc

SEQ ID NO: 1403602 - DNA, 15 bp, Homo sapiens
tctctcattatgccc

SEQ ID NO: 1403603 - DNA, 15 bp, Homo sapiens
ttctctcattatgcc

SEQ ID NO: 1403604 - DNA, 15 bp, Homo sapiens
attctctcattatgc

SEQ ID NO: 1403605 - DNA, 15 bp, Homo sapiens
aattctctcattatg

SEQ ID NO: 1403606 - DNA, 15 bp, Homo sapiens
aaattctctcattat

SEQ ID NO: 1403607 - DNA, 15 bp, Homo sapiens
taaattctctcatta

SEQ ID NO: 1403608 - DNA, 15 bp, Homo sapiens
ctaaattctctcatt

SEQ ID NO: 1403609 - DNA, 15 bp, Homo sapiens
cctaaattctctcat

SEQ ID NO: 1403610 - DNA, 15 bp, Homo sapiens
ccctaaattctctca

SEQ ID NO: 1403611 - DNA, 15 bp, Homo sapiens
gccctaaattctctc

SEQ ID NO: 1403612 - DNA, 15 bp, Homo sapiens
ggccctaaattctct

SEQ ID NO: 1403613 - DNA, 15 bp, Homo sapiens
tggccctaaattctc

SEQ ID NO: 1403614 - DNA, 15 bp, Homo sapiens
atggccctaaattct

SEQ ID NO: 1403615 - DNA, 15 bp, Homo sapiens
catggccctaaattc

SEQ ID NO: 1403616 - DNA, 15 bp, Homo sapiens
acatggccctaaatt

SEQ ID NO: 1403617 - DNA, 15 bp, Homo sapiens
aacatggccctaaat

SEQ ID NO: 1403618 - DNA, 15 bp, Homo sapiens
taacatggccctaaa

SEQ ID NO: 1403619 - DNA, 15 bp, Homo sapiens
ataacatggccctaa

SEQ ID NO: 1403620 - DNA, 15 bp, Homo sapiens
gataacatggcccta

SEQ ID NO: 1403621 - DNA, 15 bp, Homo sapiens
ggataacatggccct

SEQ ID NO: 1403622 - DNA, 15 bp, Homo sapiens
tggataacatggccc

SEQ ID NO: 1403623 - DNA, 15 bp, Homo sapiens
ttggataacatggcc

SEQ ID NO: 1403624 - DNA, 15 bp, Homo sapiens
gttggataacatggc

SEQ ID NO: 1403625 - DNA, 15 bp, Homo sapiens
ggttggataacatgg

SEQ ID NO: 1403626 - DNA, 15 bp, Homo sapiens
tggttggataacatg

SEQ ID NO: 1403627 - DNA, 15 bp, Homo sapiens
gtggttggataacat

SEQ ID NO: 1403628 - DNA, 15 bp, Homo sapiens
ggtggttggataaca

SEQ ID NO: 1403629 - DNA, 15 bp, Homo sapiens
tggtggttggataac

SEQ ID NO: 1403630 - DNA, 15 bp, Homo sapiens
gtggtggttggataa

SEQ ID NO: 1403631 - DNA, 15 bp, Homo sapiens
tgtggtggttggata

SEQ ID NO: 1403632 - DNA, 15 bp, Homo sapiens
ttgtggtggttggat

SEQ ID NO: 1403633 - DNA, 15 bp, Homo sapiens
tttgtggtggttgga

SEQ ID NO: 1403634 - DNA, 15 bp, Homo sapiens
atttgtggtggttgg

SEQ ID NO: 1403635 - DNA, 15 bp, Homo sapiens
catttgtggtggttg

SEQ ID NO: 1403636 - DNA, 15 bp, Homo sapiens
gcatttgtggtggtt

SEQ ID NO: 1403637 - DNA, 15 bp, Homo sapiens
ggcatttgtggtggt

SEQ ID NO: 1403638 - DNA, 15 bp, Homo sapiens
aggcatttgtggtgg

SEQ ID NO: 1403639 - DNA, 15 bp, Homo sapiens
aaggcatttgtggtg

SEQ ID NO: 1403640 - DNA, 15 bp, Homo sapiens
gaaggcatttgtggt

SEQ ID NO: 1403641 - DNA, 15 bp, Homo sapiens
agaaggcatttgtgg

SEQ ID NO: 1403642 - DNA, 15 bp, Homo sapiens
cagaaggcatttgtg

SEQ ID NO: 1403643 - DNA, 15 bp, Homo sapiens
tcagaaggcatttgt

SEQ ID NO: 1403644 - DNA, 15 bp, Homo sapiens
ttcagaaggcatttg

SEQ ID NO: 1403645 - DNA, 15 bp, Homo sapiens
attcagaaggcattt

SEQ ID NO: 1403646 - DNA, 15 bp, Homo sapiens
aattcagaaggcatt

SEQ ID NO: 1403647 - DNA, 15 bp, Homo sapiens
aaattcagaaggcat

SEQ ID NO: 1403648 - DNA, 15 bp, Homo sapiens
caaattcagaaggca

SEQ ID NO: 1403649 - DNA, 15 bp, Homo sapiens
tcaaattcagaaggc

SEQ ID NO: 1403650 - DNA, 15 bp, Homo sapiens
ctcaaattcagaagg

SEQ ID NO: 1403651 - DNA, 15 bp, Homo sapiens
cctcaaattcagaag

SEQ ID NO: 1403652 - DNA, 15 bp, Homo sapiens
acctcaaattcagaa

SEQ ID NO: 1403653 - DNA, 15 bp, Homo sapiens
aacctcaaattcaga

SEQ ID NO: 1403654 - DNA, 15 bp, Homo sapiens
gaacctcaaattcag

SEQ ID NO: 1403655 - DNA, 15 bp, Homo sapiens
agaacctcaaattca

SEQ ID NO: 1403656 - DNA, 15 bp, Homo sapiens
cagaacctcaaattc

SEQ ID NO: 1403657 - DNA, 15 bp, Homo sapiens
gcagaacctcaaatt

SEQ ID NO: 1403658 - DNA, 15 bp, Homo sapiens
ggcagaacctcaaat

SEQ ID NO: 1403659 - DNA, 15 bp, Homo sapiens
aggcagaacctcaaa

SEQ ID NO: 1403660 - DNA, 15 bp, Homo sapiens
gaggcagaacctcaa

SEQ ID NO: 1403661 - DNA, 15 bp, Homo sapiens
tgaggcagaacctca

SEQ ID NO: 1403662 - DNA, 15 bp, Homo sapiens
ttgaggcagaacctc

SEQ ID NO: 1403663 - DNA, 15 bp, Homo sapiens
tttgaggcagaacct

SEQ ID NO: 1403664 - DNA, 15 bp, Homo sapiens
ttttgaggcagaacc

SEQ ID NO: 1403665 - DNA, 15 bp, Homo sapiens
cttttgaggcagaac

SEQ ID NO: 1403666 - DNA, 15 bp, Homo sapiens
acttttgaggcagaa

SEQ ID NO: 1403667 - DNA, 15 bp, Homo sapiens
aacttttgaggcaga

SEQ ID NO: 1403668 - DNA, 15 bp, Homo sapiens
gaacttttgaggcag

SEQ ID NO: 1403669 - DNA, 15 bp, Homo sapiens
tgaacttttgaggca

SEQ ID NO: 1403670 - DNA, 15 bp, Homo sapiens
atgaacttttgaggc

SEQ ID NO: 1403671 - DNA, 15 bp, Homo sapiens
tatgaacttttgagg

SEQ ID NO: 1403672 - DNA, 15 bp, Homo sapiens
ctatgaacttttgag

SEQ ID NO: 1403673 - DNA, 15 bp, Homo sapiens
actatgaacttttga

SEQ ID NO: 1403674 - DNA, 15 bp, Homo sapiens
aactatgaacttttg

SEQ ID NO: 1403675 - DNA, 15 bp, Homo sapiens
gaactatgaactttt

SEQ ID NO: 1403676 - DNA, 15 bp, Homo sapiens
ggaactatgaacttt

SEQ ID NO: 1403677 - DNA, 15 bp, Homo sapiens
aggaactatgaactt

SEQ ID NO: 1403678 - DNA, 15 bp, Homo sapiens
aaggaactatgaact

SEQ ID NO: 1403679 - DNA, 15 bp, Homo sapiens
aaaggaactatgaac

SEQ ID NO: 1403680 - DNA, 15 bp, Homo sapiens
caaaggaactatgaa

SEQ ID NO: 1403681 - DNA, 15 bp, Homo sapiens
tcaaaggaactatga

SEQ ID NO: 1403682 - DNA, 15 bp, Homo sapiens
gtcaaaggaactatg

SEQ ID NO: 1403683 - DNA, 15 bp, Homo sapiens
agtcaaaggaactat

SEQ ID NO: 1403684 - DNA, 15 bp, Homo sapiens
cagtcaaaggaacta

SEQ ID NO: 1403685 - DNA, 15 bp, Homo sapiens
tcagtcaaaggaact

SEQ ID NO: 1403686 - DNA, 15 bp, Homo sapiens
ttcagtcaaaggaac

SEQ ID NO: 1403687 - DNA, 15 bp, Homo sapiens
cttcagtcaaaggaa

SEQ ID NO: 1403688 - DNA, 15 bp, Homo sapiens
ccttcagtcaaagga

SEQ ID NO: 1403689 - DNA, 15 bp, Homo sapiens
tccttcagtcaaagg

SEQ ID NO: 1403690 - DNA, 15 bp, Homo sapiens
gtccttcagtcaaag

SEQ ID NO: 1403691 - DNA, 15 bp, Homo sapiens
agtccttcagtcaaa

SEQ ID NO: 1403692 - DNA, 15 bp, Homo sapiens
aagtccttcagtcaa

SEQ ID NO: 1403693 - DNA, 15 bp, Homo sapiens
gaagtccttcagtca

SEQ ID NO: 1403694 - DNA, 15 bp, Homo sapiens
agaagtccttcagtc

SEQ ID NO: 1403695 - DNA, 15 bp, Homo sapiens
tagaagtccttcagt

SEQ ID NO: 1403696 - DNA, 15 bp, Homo sapiens
atagaagtccttcag

SEQ ID NO: 1403697 - DNA, 15 bp, Homo sapiens
tatagaagtccttca

SEQ ID NO: 1403698 - DNA, 15 bp, Homo sapiens
atatagaagtccttc

SEQ ID NO: 1403699 - DNA, 15 bp, Homo sapiens
tatatagaagtcctt

SEQ ID NO: 1403700 - DNA, 15 bp, Homo sapiens
atatatagaagtcct

SEQ ID NO: 1403701 - DNA, 15 bp, Homo sapiens
gatatatagaagtcc

SEQ ID NO: 1403702 - DNA, 15 bp, Homo sapiens
ggatatatagaagtc

SEQ ID NO: 1403703 - DNA, 15 bp, Homo sapiens
tggatatatagaagt

SEQ ID NO: 1403704 - DNA, 15 bp, Homo sapiens
ttggatatatagaag

SEQ ID NO: 1403705 - DNA, 15 bp, Homo sapiens
cttggatatatagaa

SEQ ID NO: 1403706 - DNA, 15 bp, Homo sapiens
gcttggatatataga

SEQ ID NO: 1403707 - DNA, 15 bp, Homo sapiens
tgcttggatatatag

SEQ ID NO: 1403708 - DNA, 15 bp, Homo sapiens
atgcttggatatata

SEQ ID NO: 1403709 - DNA, 15 bp, Homo sapiens
gatgcttggatatat

SEQ ID NO: 1403710 - DNA, 15 bp, Homo sapiens
cgatgcttggatata

SEQ ID NO: 1403711 - DNA, 15 bp, Homo sapiens
acgatgcttggatat

SEQ ID NO: 1403712 - DNA, 15 bp, Homo sapiens
gacgatgcttggata

SEQ ID NO: 1403713 - DNA, 15 bp, Homo sapiens
tgacgatgcttggat

SEQ ID NO: 1403714 - DNA, 15 bp, Homo sapiens
ctgacgatgcttgga

SEQ ID NO: 1403715 - DNA, 15 bp, Homo sapiens
gctgacgatgcttgg

SEQ ID NO: 1403716 - DNA, 15 bp, Homo sapiens
ggctgacgatgcttg

SEQ ID NO: 1403717 - DNA, 15 bp, Homo sapiens
gggctgacgatgctt

SEQ ID NO: 1403718 - DNA, 15 bp, Homo sapiens
ggggctgacgatgct

SEQ ID NO: 1403719 - DNA, 15 bp, Homo sapiens
tggggctgacgatgc

SEQ ID NO: 1403720 - DNA, 15 bp, Homo sapiens
ctggggctgacgatg

SEQ ID NO: 1403721 - DNA, 15 bp, Homo sapiens
cctggggctgacgat

SEQ ID NO: 1403722 - DNA, 15 bp, Homo sapiens
acctggggctgacga

SEQ ID NO: 1403723 - DNA, 15 bp, Homo sapiens
tacctggggctgacg

SEQ ID NO: 1403724 - DNA, 15 bp, Homo sapiens
atacctggggctgac

SEQ ID NO: 1403725 - DNA, 15 bp, Homo sapiens
tatacctggggctga

SEQ ID NO: 1403726 - DNA, 15 bp, Homo sapiens
atatacctggggctg

SEQ ID NO: 1403727 - DNA, 15 bp, Homo sapiens
aatatacctggggct

SEQ ID NO: 1403728 - DNA, 15 bp, Homo sapiens
caatatacctggggc

SEQ ID NO: 1403729 - DNA, 15 bp, Homo sapiens
acaatatacctgggg

SEQ ID NO: 1403730 - DNA, 15 bp, Homo sapiens
aacaatatacctggg

SEQ ID NO: 1403731 - DNA, 15 bp, Homo sapiens
gaacaatatacctgg

SEQ ID NO: 1403732 - DNA, 15 bp, Homo sapiens
ggaacaatatacctg

SEQ ID NO: 1403733 - DNA, 15 bp, Homo sapiens
tggaacaatatacct

SEQ ID NO: 1403734 - DNA, 15 bp, Homo sapiens
atggaacaatatacc

SEQ ID NO: 1403735 - DNA, 15 bp, Homo sapiens
catggaacaatatac

SEQ ID NO: 1403736 - DNA, 15 bp, Homo sapiens
acatggaacaatata

SEQ ID NO: 1403737 - DNA, 15 bp, Homo sapiens
tacatggaacaatat

SEQ ID NO: 1403738 - DNA, 15 bp, Homo sapiens
ttacatggaacaata

SEQ ID NO: 1403739 - DNA, 15 bp, Homo sapiens
cttacatggaacaat

SEQ ID NO: 1403740 - DNA, 15 bp, Homo sapiens
acttacatggaacaa

SEQ ID NO: 1403741 - DNA, 15 bp, Homo sapiens
aacacatccagggag

SEQ ID NO: 1403742 - DNA, 15 bp, Homo sapiens
aaacacatccaggga

SEQ ID NO: 1403743 - DNA, 15 bp, Homo sapiens
caaacacatccaggg

SEQ ID NO: 1403744 - DNA, 15 bp, Homo sapiens
ccaaacacatccagg

SEQ ID NO: 1403745 - DNA, 15 bp, Homo sapiens
accaaacacatccag

SEQ ID NO: 1403746 - DNA, 15 bp, Homo sapiens
aaccaaacacatcca

SEQ ID NO: 1403747 - DNA, 15 bp, Homo sapiens
caaccaaacacatcc

SEQ ID NO: 1403748 - DNA, 15 bp, Homo sapiens
acaaccaaacacatc

SEQ ID NO: 1403749 - DNA, 15 bp, Homo sapiens
aacaaccaaacacat

SEQ ID NO: 1403750 - DNA, 15 bp, Homo sapiens
aaacaaccaaacaca

SEQ ID NO: 1403751 - DNA, 15 bp, Homo sapiens
aaaacaaccaaacac

SEQ ID NO: 1403752 - DNA, 15 bp, Homo sapiens
taaaacaaccaaaca

SEQ ID NO: 1403753 - DNA, 15 bp, Homo sapiens
ctaaaacaaccaaac

SEQ ID NO: 1403754 - DNA, 15 bp, Homo sapiens
actaaaacaaccaaa

SEQ ID NO: 1403755 - DNA, 15 bp, Homo sapiens
cactaaaacaaccaa

SEQ ID NO: 1403756 - DNA, 15 bp, Homo sapiens
acactaaaacaacca

SEQ ID NO: 1403757 - DNA, 15 bp, Homo sapiens
aacactaaaacaacc

SEQ ID NO: 1403758 - DNA, 15 bp, Homo sapiens
gaacactaaaacaac

SEQ ID NO: 1403759 - DNA, 15 bp, Homo sapiens
ggaacactaaaacaa

SEQ ID NO: 1403760 - DNA, 15 bp, Homo sapiens
tggaacactaaaaca

SEQ ID NO: 1403761 - DNA, 15 bp, Homo sapiens
atggaacactaaaac

SEQ ID NO: 1403762 - DNA, 15 bp, Homo sapiens
aatggaacactaaaa

SEQ ID NO: 1403763 - DNA, 15 bp, Homo sapiens
aaatggaacactaaa

SEQ ID NO: 1403764 - DNA, 15 bp, Homo sapiens
gaaatggaacactaa

SEQ ID NO: 1403765 - DNA, 15 bp, Homo sapiens
tgaaatggaacacta

SEQ ID NO: 1403766 - DNA, 15 bp, Homo sapiens
ttgaaatggaacact

SEQ ID NO: 1403767 - DNA, 15 bp, Homo sapiens
attgaaatggaacac

SEQ ID NO: 1403768 - DNA, 15 bp, Homo sapiens
aattgaaatggaaca

SEQ ID NO: 1403769 - DNA, 15 bp, Homo sapiens
aaattgaaatggaac

SEQ ID NO: 1403770 - DNA, 15 bp, Homo sapiens
aaaattgaaatggaa

SEQ ID NO: 1403771 - DNA, 15 bp, Homo sapiens
caaaattgaaatgga

SEQ ID NO: 1403772 - DNA, 15 bp, Homo sapiens
tcaaaattgaaatgg

SEQ ID NO: 1403773 - DNA, 15 bp, Homo sapiens
atcaaaattgaaatg

SEQ ID NO: 1403774 - DNA, 15 bp, Homo sapiens
tatcaaaattgaaat

SEQ ID NO: 1403775 - DNA, 15 bp, Homo sapiens
gtatcaaaattgaaa

SEQ ID NO: 1403776 - DNA, 15 bp, Homo sapiens
tgtatcaaaattgaa

SEQ ID NO: 1403777 - DNA, 15 bp, Homo sapiens
gtgtatcaaaattga

SEQ ID NO: 1403778 - DNA, 15 bp, Homo sapiens
tgtgtatcaaaattg

SEQ ID NO: 1403779 - DNA, 15 bp, Homo sapiens
ctgtgtatcaaaatt

SEQ ID NO: 1403780 - DNA, 15 bp, Homo sapiens
tctgtgtatcaaaat

SEQ ID NO: 1403781 - DNA, 15 bp, Homo sapiens
ttctgtgtatcaaaa

SEQ ID NO: 1403782 - DNA, 15 bp, Homo sapiens
attctgtgtatcaaa

SEQ ID NO: 1403783 - DNA, 15 bp, Homo sapiens
aattctgtgtatcaa

SEQ ID NO: 1403784 - DNA, 15 bp, Homo sapiens
taattctgtgtatca

SEQ ID NO: 1403785 - DNA, 15 bp, Homo sapiens
ctaattctgtgtatc

SEQ ID NO: 1403786 - DNA, 15 bp, Homo sapiens
tctaattctgtgtat

SEQ ID NO: 1403787 - DNA, 15 bp, Homo sapiens
ttctaattctgtgta

SEQ ID NO: 1403788 - DNA, 15 bp, Homo sapiens
attctaattctgtgt

SEQ ID NO: 1403789 - DNA, 15 bp, Homo sapiens
tattctaattctgtg

SEQ ID NO: 1403790 - DNA, 15 bp, Homo sapiens
ctattctaattctgt

SEQ ID NO: 1403791 - DNA, 15 bp, Homo sapiens
gctattctaattctg

SEQ ID NO: 1403792 - DNA, 15 bp, Homo sapiens
tgctattctaattct

SEQ ID NO: 1403793 - DNA, 15 bp, Homo sapiens
atgctattctaattc

SEQ ID NO: 1403794 - DNA, 15 bp, Homo sapiens
gatgctattctaatt

SEQ ID NO: 1403795 - DNA, 15 bp, Homo sapiens
ggatgctattctaat

SEQ ID NO: 1403796 - DNA, 15 bp, Homo sapiens
tggatgctattctaa

SEQ ID NO: 1403797 - DNA, 15 bp, Homo sapiens
ctggatgctattcta

SEQ ID NO: 1403798 - DNA, 15 bp, Homo sapiens
tctggatgctattct

SEQ ID NO: 1403799 - DNA, 15 bp, Homo sapiens
atctggatgctattc

SEQ ID NO: 1403800 - DNA, 15 bp, Homo sapiens
catctggatgctatt

SEQ ID NO: 1403801 - DNA, 15 bp, Homo sapiens
acatctggatgctat

SEQ ID NO: 1403802 - DNA, 15 bp, Homo sapiens
cacatctggatgcta

SEQ ID NO: 1403803 - DNA, 15 bp, Homo sapiens
ccacatctggatgct

SEQ ID NO: 1403804 - DNA, 15 bp, Homo sapiens
cccacatctggatgc

SEQ ID NO: 1403805 - DNA, 15 bp, Homo sapiens
acccacatctggatg

SEQ ID NO: 1403806 - DNA, 15 bp, Homo sapiens
gacccacatctggat

SEQ ID NO: 1403807 - DNA, 15 bp, Homo sapiens
agacccacatctgga

SEQ ID NO: 1403808 - DNA, 15 bp, Homo sapiens
cagacccacatctgg

SEQ ID NO: 1403809 - DNA, 15 bp, Homo sapiens
acagacccacatctg

SEQ ID NO: 1403810 - DNA, 15 bp, Homo sapiens
aacagacccacatct

SEQ ID NO: 1403811 - DNA, 15 bp, Homo sapiens
taacagacccacatc

SEQ ID NO: 1403812 - DNA, 15 bp, Homo sapiens
gtaacagacccacat

SEQ ID NO: 1403813 - DNA, 15 bp, Homo sapiens
tgtaacagacccaca

SEQ ID NO: 1403814 - DNA, 15 bp, Homo sapiens
ctgtaacagacccac

SEQ ID NO: 1403815 - DNA, 15 bp, Homo sapiens
gctgtaacagaccca

SEQ ID NO: 1403816 - DNA, 15 bp, Homo sapiens
agctgtaacagaccc

SEQ ID NO: 1403817 - DNA, 15 bp, Homo sapiens
tagctgtaacagacc

SEQ ID NO: 1403818 - DNA, 15 bp, Homo sapiens
ctagctgtaacagac

SEQ ID NO: 1403819 - DNA, 15 bp, Homo sapiens
tctagctgtaacaga

SEQ ID NO: 1403820 - DNA, 15 bp, Homo sapiens
gtctagctgtaacag

SEQ ID NO: 1403821 - DNA, 15 bp, Homo sapiens
agtctagctgtaaca

SEQ ID NO: 1403822 - DNA, 15 bp, Homo sapiens
tagtctagctgtaac

SEQ ID NO: 1403823 - DNA, 15 bp, Homo sapiens
gtagtctagctgtaa

SEQ ID NO: 1403824 - DNA, 15 bp, Homo sapiens
agtagtctagctgta

SEQ ID NO: 1403825 - DNA, 15 bp, Homo sapiens
tagtagtctagctgt

SEQ ID NO: 1403826 - DNA, 15 bp, Homo sapiens
ctagtagtctagctg

SEQ ID NO: 1403827 - DNA, 15 bp, Homo sapiens
tctagtagtctagct

SEQ ID NO: 1403828 - DNA, 15 bp, Homo sapiens
atctagtagtctagc

SEQ ID NO: 1403829 - DNA, 15 bp, Homo sapiens
gatctagtagtctag

SEQ ID NO: 1403830 - DNA, 15 bp, Homo sapiens
ggatctagtagtcta

SEQ ID NO: 1403831 - DNA, 15 bp, Homo sapiens
aggatctagtagtct

SEQ ID NO: 1403832 - DNA, 15 bp, Homo sapiens
aaggatctagtagtc

SEQ ID NO: 1403833 - DNA, 15 bp, Homo sapiens
gaaggatctagtagt

SEQ ID NO: 1403834 - DNA, 15 bp, Homo sapiens
tgaaggatctagtag

SEQ ID NO: 1403835 - DNA, 15 bp, Homo sapiens
ttgaaggatctagta

SEQ ID NO: 1403836 - DNA, 15 bp, Homo sapiens
tttgaaggatctagt

SEQ ID NO: 1403837 - DNA, 15 bp, Homo sapiens
ttttgaaggatctag

SEQ ID NO: 1403838 - DNA, 15 bp, Homo sapiens
attttgaaggatcta

SEQ ID NO: 1403839 - DNA, 15 bp, Homo sapiens
gattttgaaggatct

SEQ ID NO: 1403840 - DNA, 15 bp, Homo sapiens
ggattttgaaggatc

SEQ ID NO: 1403841 - DNA, 15 bp, Homo sapiens
tggattttgaaggat

SEQ ID NO: 1403842 - DNA, 15 bp, Homo sapiens
ttggattttgaagga

SEQ ID NO: 1403843 - DNA, 15 bp, Homo sapiens
cttggattttgaagg

SEQ ID NO: 1403844 - DNA, 15 bp, Homo sapiens
acttggattttgaag

SEQ ID NO: 1403845 - DNA, 15 bp, Homo sapiens
tacttggattttgaa

SEQ ID NO: 1403846 - DNA, 15 bp, Homo sapiens
gtacttggattttga

SEQ ID NO: 1403847 - DNA, 15 bp, Homo sapiens
agtacttggattttg

SEQ ID NO: 1403848 - DNA, 15 bp, Homo sapiens
tagtacttggatttt

SEQ ID NO: 1403849 - DNA, 15 bp, Homo sapiens
ctagtacttggattt

SEQ ID NO: 1403850 - DNA, 15 bp, Homo sapiens
actagtacttggatt

SEQ ID NO: 1403851 - DNA, 15 bp, Homo sapiens
tactagtacttggat

SEQ ID NO: 1403852 - DNA, 15 bp, Homo sapiens
atactagtacttgga

SEQ ID NO: 1403853 - DNA, 15 bp, Homo sapiens
catactagtacttgg

SEQ ID NO: 1403854 - DNA, 15 bp, Homo sapiens
acatactagtacttg

SEQ ID NO: 1403855 - DNA, 15 bp, Homo sapiens
gacatactagtactt

SEQ ID NO: 1403856 - DNA, 15 bp, Homo sapiens
agacatactagtact

SEQ ID NO: 1403857 - DNA, 15 bp, Homo sapiens
tagacatactagtac

SEQ ID NO: 1403858 - DNA, 15 bp, Homo sapiens
atagacatactagta

SEQ ID NO: 1403859 - DNA, 15 bp, Homo sapiens
aatagacatactagt

SEQ ID NO: 1403860 - DNA, 15 bp, Homo sapiens
taatagacatactag

SEQ ID NO: 1403861 - DNA, 15 bp, Homo sapiens
ttaatagacatacta

SEQ ID NO: 1403862 - DNA, 15 bp, Homo sapiens
tttaatagacatact

SEQ ID NO: 1403863 - DNA, 15 bp, Homo sapiens
ttttaatagacatac

SEQ ID NO: 1403864 - DNA, 15 bp, Homo sapiens
attttaatagacata

SEQ ID NO: 1403865 - DNA, 15 bp, Homo sapiens
tattttaatagacat

SEQ ID NO: 1403866 - DNA, 15 bp, Homo sapiens
gtattttaatagaca

SEQ ID NO: 1403867 - DNA, 15 bp, Homo sapiens
ggtattttaatagac

SEQ ID NO: 1403868 - DNA, 15 bp, Homo sapiens
tggtattttaataga

SEQ ID NO: 1403869 - DNA, 15 bp, Homo sapiens
atggtattttaatag

SEQ ID NO: 1403870 - DNA, 15 bp, Homo sapiens
tatggtattttaata

SEQ ID NO: 1403871 - DNA, 15 bp, Homo sapiens
ttatggtattttaat

SEQ ID NO: 1403872 - DNA, 15 bp, Homo sapiens
cttatggtattttaa

SEQ ID NO: 1403873 - DNA, 15 bp, Homo sapiens
tcttatggtatttta

SEQ ID NO: 1403874 - DNA, 15 bp, Homo sapiens
atcttatggtatttt

SEQ ID NO: 1403875 - DNA, 15 bp, Homo sapiens
gatcttatggtattt

SEQ ID NO: 1403876 - DNA, 15 bp, Homo sapiens
tgatcttatggtatt

SEQ ID NO: 1403877 - DNA, 15 bp, Homo sapiens
gtgatcttatggtat

SEQ ID NO: 1403878 - DNA, 15 bp, Homo sapiens
tgtgatcttatggta

SEQ ID NO: 1403879 - DNA, 15 bp, Homo sapiens
atgtgatcttatggt

SEQ ID NO: 1403880 - DNA, 15 bp, Homo sapiens
aatgtgatcttatgg

SEQ ID NO: 1403881 - DNA, 15 bp, Homo sapiens
caatgtgatcttatg

SEQ ID NO: 1403882 - DNA, 15 bp, Homo sapiens
ccaatgtgatcttat

SEQ ID NO: 1403883 - DNA, 15 bp, Homo sapiens
gccaatgtgatctta

SEQ ID NO: 1403884 - DNA, 15 bp, Homo sapiens
agccaatgtgatctt

SEQ ID NO: 1403885 - DNA, 15 bp, Homo sapiens
tagccaatgtgatct

SEQ ID NO: 1403886 - DNA, 15 bp, Homo sapiens
ctagccaatgtgatc

SEQ ID NO: 1403887 - DNA, 15 bp, Homo sapiens
actagccaatgtgat

SEQ ID NO: 1403888 - DNA, 15 bp, Homo sapiens
aactagccaatgtga

SEQ ID NO: 1403889 - DNA, 15 bp, Homo sapiens
taactagccaatgtg

SEQ ID NO: 1403890 - DNA, 15 bp, Homo sapiens
gtaactagccaatgt

SEQ ID NO: 1403891 - DNA, 15 bp, Homo sapiens
tgtaactagccaatg

SEQ ID NO: 1403892 - DNA, 15 bp, Homo sapiens
ttgtaactagccaat

SEQ ID NO: 1403893 - DNA, 15 bp, Homo sapiens
attgtaactagccaa

SEQ ID NO: 1403894 - DNA, 15 bp, Homo sapiens
cattgtaactagcca

SEQ ID NO: 1403895 - DNA, 15 bp, Homo sapiens
ccattgtaactagcc

SEQ ID NO: 1403896 - DNA, 15 bp, Homo sapiens
accattgtaactagc

SEQ ID NO: 1403897 - DNA, 15 bp, Homo sapiens
aaccattgtaactag

SEQ ID NO: 1403898 - DNA, 15 bp, Homo sapiens
caaccattgtaacta

SEQ ID NO: 1403899 - DNA, 15 bp, Homo sapiens
ccaaccattgtaact

SEQ ID NO: 1403900 - DNA, 15 bp, Homo sapiens
accaaccattgtaac

SEQ ID NO: 1403901 - DNA, 15 bp, Homo sapiens
aaccaaccattgtaa

SEQ ID NO: 1403902 - DNA, 15 bp, Homo sapiens
aaaccaaccattgta

SEQ ID NO: 1403903 - DNA, 15 bp, Homo sapiens
caaaccaaccattgt

SEQ ID NO: 1403904 - DNA, 15 bp, Homo sapiens
acaaaccaaccattg

SEQ ID NO: 1403905 - DNA, 15 bp, Homo sapiens
cacaaaccaaccatt

SEQ ID NO: 1403906 - DNA, 15 bp, Homo sapiens
ccacaaaccaaccat

SEQ ID NO: 1403907 - DNA, 15 bp, Homo sapiens
cccacaaaccaacca

SEQ ID NO: 1403908 - DNA, 15 bp, Homo sapiens
acccacaaaccaacc

SEQ ID NO: 1403909 - DNA, 15 bp, Homo sapiens
aacccacaaaccaac

SEQ ID NO: 1403910 - DNA, 15 bp, Homo sapiens
taacccacaaaccaa

SEQ ID NO: 1403911 - DNA, 15 bp, Homo sapiens
gtaacccacaaacca

SEQ ID NO: 1403912 - DNA, 15 bp, Homo sapiens
agtaacccacaaacc

SEQ ID NO: 1403913 - DNA, 15 bp, Homo sapiens
aagtaacccacaaac

SEQ ID NO: 1403914 - DNA, 15 bp, Homo sapiens
taagtaacccacaaa

SEQ ID NO: 1403915 - DNA, 15 bp, Homo sapiens
ttaagtaacccacaa

SEQ ID NO: 1403916 - DNA, 15 bp, Homo sapiens
tttaagtaacccaca

SEQ ID NO: 1403917 - DNA, 15 bp, Homo sapiens
ttttaagtaacccac

SEQ ID NO: 1403918 - DNA, 15 bp, Homo sapiens
tttttaagtaaccca

SEQ ID NO: 1403919 - DNA, 15 bp, Homo sapiens
atttttaagtaaccc

SEQ ID NO: 1403920 - DNA, 15 bp, Homo sapiens
gatttttaagtaacc

SEQ ID NO: 1403921 - DNA, 15 bp, Homo sapiens
tgatttttaagtaac

SEQ ID NO: 1403922 - DNA, 15 bp, Homo sapiens
ttgatttttaagtaa

SEQ ID NO: 1403923 - DNA, 15 bp, Homo sapiens
gttgatttttaagta

SEQ ID NO: 1403924 - DNA, 15 bp, Homo sapiens
agttgatttttaagt

SEQ ID NO: 1403925 - DNA, 15 bp, Homo sapiens
tagttgatttttaag

SEQ ID NO: 1403926 - DNA, 15 bp, Homo sapiens
ttagttgatttttaa

SEQ ID NO: 1403927 - DNA, 15 bp, Homo sapiens
tttagttgattttta

SEQ ID NO: 1403928 - DNA, 15 bp, Homo sapiens
ttttagttgattttt

SEQ ID NO: 1403929 - DNA, 15 bp, Homo sapiens
attttagttgatttt

SEQ ID NO: 1403930 - DNA, 15 bp, Homo sapiens
aattttagttgattt

SEQ ID NO: 1403931 - DNA, 15 bp, Homo sapiens
gaattttagttgatt

SEQ ID NO: 1403932 - DNA, 15 bp, Homo sapiens
agaattttagttgat

SEQ ID NO: 1403933 - DNA, 15 bp, Homo sapiens
aagaattttagttga

SEQ ID NO: 1403934 - DNA, 15 bp, Homo sapiens
aaagaattttagttg

SEQ ID NO: 1403935 - DNA, 15 bp, Homo sapiens
aaaagaattttagtt

SEQ ID NO: 1403936 - DNA, 15 bp, Homo sapiens
aaaaagaattttagt

SEQ ID NO: 1403937 - DNA, 15 bp, Homo sapiens
aaaaaagaattttag

SEQ ID NO: 1403938 - DNA, 15 bp, Homo sapiens
aaaaaaagaatttta

SEQ ID NO: 1403939 - DNA, 15 bp, Homo sapiens
aaaaaaaagaatttt

SEQ ID NO: 1403940 - DNA, 15 bp, Homo sapiens
caaaaaaaaaaaaag

SEQ ID NO: 1403941 - DNA, 15 bp, Homo sapiens
aggcaacaagagcaa

SEQ ID NO: 1403942 - DNA, 15 bp, Homo sapiens
taggcaacaagagca

SEQ ID NO: 1403943 - DNA, 15 bp, Homo sapiens
ttccagcctaggcaa

SEQ ID NO: 1403944 - DNA, 15 bp, Homo sapiens
attccagcctaggca

SEQ ID NO: 1403945 - DNA, 15 bp, Homo sapiens
cattccagcctaggc

SEQ ID NO: 1403946 - DNA, 15 bp, Homo sapiens
gcattccagcctagg

SEQ ID NO: 1403947 - DNA, 15 bp, Homo sapiens
tgcattccagcctag

SEQ ID NO: 1403948 - DNA, 15 bp, Homo sapiens
ttgcattccagccta

SEQ ID NO: 1403949 - DNA, 15 bp, Homo sapiens
attgcattccagcct

SEQ ID NO: 1403950 - DNA, 15 bp, Homo sapiens
cattgcattccagcc

SEQ ID NO: 1403951 - DNA, 15 bp, Homo sapiens
tcattgcattccagc

SEQ ID NO: 1403952 - DNA, 15 bp, Homo sapiens
gtcattgcattccag

SEQ ID NO: 1403953 - DNA, 15 bp, Homo sapiens
tgtcattgcattcca

SEQ ID NO: 1403954 - DNA, 15 bp, Homo sapiens
gtgtcattgcattcc

SEQ ID NO: 1403955 - DNA, 15 bp, Homo sapiens
tgtgtcattgcattc

SEQ ID NO: 1403956 - DNA, 15 bp, Homo sapiens
ttgtgtcattgcatt

SEQ ID NO: 1403957 - DNA, 15 bp, Homo sapiens
attgtgtcattgcat

SEQ ID NO: 1403958 - DNA, 15 bp, Homo sapiens
agattgtgtcattgc

SEQ ID NO: 1403959 - DNA, 15 bp, Homo sapiens
aagattgtgtcattg

SEQ ID NO: 1403960 - DNA, 15 bp, Homo sapiens
caagattgtgtcatt

SEQ ID NO: 1403961 - DNA, 15 bp, Homo sapiens
ccaagattgtgtcat

SEQ ID NO: 1403962 - DNA, 15 bp, Homo sapiens
gccaagattgtgtca

SEQ ID NO: 1403963 - DNA, 15 bp, Homo sapiens
agccaagattgtgtc

SEQ ID NO: 1403964 - DNA, 15 bp, Homo sapiens
gagccaagattgtgt

SEQ ID NO: 1403965 - DNA, 15 bp, Homo sapiens
ggcagtgagccaaga

SEQ ID NO: 1403966 - DNA, 15 bp, Homo sapiens
tggcagtgagccaag

SEQ ID NO: 1403967 - DNA, 15 bp, Homo sapiens
gtggcagtgagccaa

SEQ ID NO: 1403968 - DNA, 15 bp, Homo sapiens
ggtggcagtgagcca

SEQ ID NO: 1403969 - DNA, 15 bp, Homo sapiens
aggcagaggtggcag

SEQ ID NO: 1403970 - DNA, 15 bp, Homo sapiens
gaggcagaggtggca

SEQ ID NO: 1403971 - DNA, 15 bp, Homo sapiens
ggaggcagaggtggc

SEQ ID NO: 1403972 - DNA, 15 bp, Homo sapiens
tgggaggcagaggtg

SEQ ID NO: 1403973 - DNA, 15 bp, Homo sapiens
ggaattgcttgaacc

SEQ ID NO: 1403974 - DNA, 15 bp, Homo sapiens
gggaattgcttgaac

SEQ ID NO: 1403975 - DNA, 15 bp, Homo sapiens
ggggaattgcttgaa

SEQ ID NO: 1403976 - DNA, 15 bp, Homo sapiens
aggggaattgcttga

SEQ ID NO: 1403977 - DNA, 15 bp, Homo sapiens
caggggaattgcttg

SEQ ID NO: 1403978 - DNA, 15 bp, Homo sapiens
gcaggggaattgctt

SEQ ID NO: 1403979 - DNA, 15 bp, Homo sapiens
ggcaggggaattgct

SEQ ID NO: 1403980 - DNA, 15 bp, Homo sapiens
aggcaggggaattgc

SEQ ID NO: 1403981 - DNA, 15 bp, Homo sapiens
aaggcaggggaattg

SEQ ID NO: 1403982 - DNA, 15 bp, Homo sapiens
taaggcaggggaatt

SEQ ID NO: 1403983 - DNA, 15 bp, Homo sapiens
ctaaggcaggggaat

SEQ ID NO: 1403984 - DNA, 15 bp, Homo sapiens
gctaaggcaggggaa

SEQ ID NO: 1403985 - DNA, 15 bp, Homo sapiens
ggctaaggcagggga

SEQ ID NO: 1403986 - DNA, 15 bp, Homo sapiens
aggctaaggcagggg

SEQ ID NO: 1403987 - DNA, 15 bp, Homo sapiens
gaggctaaggcaggg

SEQ ID NO: 1403988 - DNA, 15 bp, Homo sapiens
ccatggtggcacatg

SEQ ID NO: 1403989 - DNA, 15 bp, Homo sapiens
gccatggtggcacat

SEQ ID NO: 1403990 - DNA, 15 bp, Homo sapiens
ggccatggtggcaca

SEQ ID NO: 1403991 - DNA, 15 bp, Homo sapiens
tggccatggtggcac

SEQ ID NO: 1403992 - DNA, 15 bp, Homo sapiens
ctggccatggtggca

SEQ ID NO: 1403993 - DNA, 15 bp, Homo sapiens
gctggccatggtggc

SEQ ID NO: 1403994 - DNA, 15 bp, Homo sapiens
agctggccatggtgg

SEQ ID NO: 1403995 - DNA, 15 bp, Homo sapiens
tagctggccatggtg

SEQ ID NO: 1403996 - DNA, 15 bp, Homo sapiens
ttagctggccatggt

SEQ ID NO: 1403997 - DNA, 15 bp, Homo sapiens
attagctggccatgg

SEQ ID NO: 1403998 - DNA, 15 bp, Homo sapiens
aattagctggccatg

SEQ ID NO: 1403999 - DNA, 15 bp, Homo sapiens
gaattagctggccat

SEQ ID NO: 1404000 - DNA, 15 bp, Homo sapiens
agaattagctggcca

SEQ ID NO: 1404001 - DNA, 15 bp, Homo sapiens
cagaattagctggcc

SEQ ID NO: 1404002 - DNA, 15 bp, Homo sapiens
acagaattagctggc

SEQ ID NO: 1404003 - DNA, 15 bp, Homo sapiens
tacagaattagctgg

SEQ ID NO: 1404004 - DNA, 15 bp, Homo sapiens
atacagaattagctg

SEQ ID NO: 1404005 - DNA, 15 bp, Homo sapiens
aatacagaattagct

SEQ ID NO: 1404006 - DNA, 15 bp, Homo sapiens
aaatacagaattagc

SEQ ID NO: 1404007 - DNA, 15 bp, Homo sapiens
aaaatacagaattag

SEQ ID NO: 1404008 - DNA, 15 bp, Homo sapiens
aaaaatacagaatta

SEQ ID NO: 1404009 - DNA, 15 bp, Homo sapiens
taaaaatacagaatt

SEQ ID NO: 1404010 - DNA, 15 bp, Homo sapiens
ctaaaaatacagaat

SEQ ID NO: 1404011 - DNA, 15 bp, Homo sapiens
actaaaaatacagaa

SEQ ID NO: 1404012 - DNA, 15 bp, Homo sapiens
tactaaaaatacaga

SEQ ID NO: 1404013 - DNA, 15 bp, Homo sapiens
ctactaaaaatacag

SEQ ID NO: 1404014 - DNA, 15 bp, Homo sapiens
aaaacctcatctcta

SEQ ID NO: 1404015 - DNA, 15 bp, Homo sapiens
aaaaacctcatctct

SEQ ID NO: 1404016 - DNA, 15 bp, Homo sapiens
gaaaaacctcatctc

SEQ ID NO: 1404017 - DNA, 15 bp, Homo sapiens
ggaaaaacctcatct

SEQ ID NO: 1404018 - DNA, 15 bp, Homo sapiens
tggaaaaacctcatc

SEQ ID NO: 1404019 - DNA, 15 bp, Homo sapiens
atggaaaaacctcat

SEQ ID NO: 1404020 - DNA, 15 bp, Homo sapiens
catggaaaaacctca

SEQ ID NO: 1404021 - DNA, 15 bp, Homo sapiens
acatggaaaaacctc

SEQ ID NO: 1404022 - DNA, 15 bp, Homo sapiens
aacatggaaaaacct

SEQ ID NO: 1404023 - DNA, 15 bp, Homo sapiens
caacatggaaaaacc

SEQ ID NO: 1404024 - DNA, 15 bp, Homo sapiens
ccaacatggaaaaac

SEQ ID NO: 1404025 - DNA, 15 bp, Homo sapiens
accaacatggaaaaa

SEQ ID NO: 1404026 - DNA, 15 bp, Homo sapiens
gaccaacatggaaaa

SEQ ID NO: 1404027 - DNA, 15 bp, Homo sapiens
tgaccaacatggaaa

SEQ ID NO: 1404028 - DNA, 15 bp, Homo sapiens
ctgaccaacatggaa

SEQ ID NO: 1404029 - DNA, 15 bp, Homo sapiens
aggctcagtggctca

SEQ ID NO: 1404030 - DNA, 15 bp, Homo sapiens
caggctcagtggctc

SEQ ID NO: 1404031 - DNA, 15 bp, Homo sapiens
ccaggctcagtggct

SEQ ID NO: 1404032 - DNA, 15 bp, Homo sapiens
gccaggctcagtggc

SEQ ID NO: 1404033 - DNA, 15 bp, Homo sapiens
ggccaggctcagtgg

SEQ ID NO: 1404034 - DNA, 15 bp, Homo sapiens
tggccaggctcagtg

SEQ ID NO: 1404035 - DNA, 15 bp, Homo sapiens
ttggccaggctcagt

SEQ ID NO: 1404036 - DNA, 15 bp, Homo sapiens
tttggccaggctcag

SEQ ID NO: 1404037 - DNA, 15 bp, Homo sapiens
ttttggccaggctca

SEQ ID NO: 1404038 - DNA, 15 bp, Homo sapiens
attttggccaggctc

SEQ ID NO: 1404039 - DNA, 15 bp, Homo sapiens
aattttggccaggct

SEQ ID NO: 1404040 - DNA, 15 bp, Homo sapiens
gaattttggccaggc

SEQ ID NO: 1404041 - DNA, 15 bp, Homo sapiens
ggaattttggccagg

SEQ ID NO: 1404042 - DNA, 15 bp, Homo sapiens
gggaattttggccag

SEQ ID NO: 1404043 - DNA, 15 bp, Homo sapiens
tgggaattttggcca

SEQ ID NO: 1404044 - DNA, 15 bp, Homo sapiens
gtgggaattttggcc

SEQ ID NO: 1404045 - DNA, 15 bp, Homo sapiens
agtgggaattttggc

SEQ ID NO: 1404046 - DNA, 15 bp, Homo sapiens
aagtgggaattttgg

SEQ ID NO: 1404047 - DNA, 15 bp, Homo sapiens
aaagtgggaattttg

SEQ ID NO: 1404048 - DNA, 15 bp, Homo sapiens
gaaagtgggaatttt

SEQ ID NO: 1404049 - DNA, 15 bp, Homo sapiens
agaaagtgggaattt

SEQ ID NO: 1404050 - DNA, 15 bp, Homo sapiens
tagaaagtgggaatt

SEQ ID NO: 1404051 - DNA, 15 bp, Homo sapiens
ttagaaagtgggaat

SEQ ID NO: 1404052 - DNA, 15 bp, Homo sapiens
attagaaagtgggaa

SEQ ID NO: 1404053 - DNA, 15 bp, Homo sapiens
tattagaaagtggga

SEQ ID NO: 1404054 - DNA, 15 bp, Homo sapiens
gtattagaaagtggg

SEQ ID NO: 1404055 - DNA, 15 bp, Homo sapiens
agtattagaaagtgg

SEQ ID NO: 1404056 - DNA, 15 bp, Homo sapiens
gagtattagaaagtg

SEQ ID NO: 1404057 - DNA, 15 bp, Homo sapiens
ggagtattagaaagt

SEQ ID NO: 1404058 - DNA, 15 bp, Homo sapiens
aggagtattagaaag

SEQ ID NO: 1404059 - DNA, 15 bp, Homo sapiens
caggagtattagaaa

SEQ ID NO: 1404060 - DNA, 15 bp, Homo sapiens
acaggagtattagaa

SEQ ID NO: 1404061 - DNA, 15 bp, Homo sapiens
tacaggagtattaga

SEQ ID NO: 1404062 - DNA, 15 bp, Homo sapiens
ctacaggagtattag

SEQ ID NO: 1404063 - DNA, 15 bp, Homo sapiens
actacaggagtatta

SEQ ID NO: 1404064 - DNA, 15 bp, Homo sapiens
tactacaggagtatt

SEQ ID NO: 1404065 - DNA, 15 bp, Homo sapiens
ctactacaggagtat

SEQ ID NO: 1404066 - DNA, 15 bp, Homo sapiens
gctactacaggagta

SEQ ID NO: 1404067 - DNA, 15 bp, Homo sapiens
agctactacaggagt

SEQ ID NO: 1404068 - DNA, 15 bp, Homo sapiens
cagctactacaggag

SEQ ID NO: 1404069 - DNA, 15 bp, Homo sapiens
ccagctactacagga

SEQ ID NO: 1404070 - DNA, 15 bp, Homo sapiens
cccagctactacagg

SEQ ID NO: 1404071 - DNA, 15 bp, Homo sapiens
acccagctactacag

SEQ ID NO: 1404072 - DNA, 15 bp, Homo sapiens
tacccagctactaca

SEQ ID NO: 1404073 - DNA, 15 bp, Homo sapiens
gtacccagctactac

SEQ ID NO: 1404074 - DNA, 15 bp, Homo sapiens
cgtacccagctacta

SEQ ID NO: 1404075 - DNA, 15 bp, Homo sapiens
ccgtacccagctact

SEQ ID NO: 1404076 - DNA, 15 bp, Homo sapiens
accgtacccagctac

SEQ ID NO: 1404077 - DNA, 15 bp, Homo sapiens
caccgtacccagcta

SEQ ID NO: 1404078 - DNA, 15 bp, Homo sapiens
cccaccgtacccagc

SEQ ID NO: 1404079 - DNA, 15 bp, Homo sapiens
acccaccgtacccag

SEQ ID NO: 1404080 - DNA, 15 bp, Homo sapiens
gacccaccgtaccca

SEQ ID NO: 1404081 - DNA, 15 bp, Homo sapiens
tgacccaccgtaccc

SEQ ID NO: 1404082 - DNA, 15 bp, Homo sapiens
gtgacccaccgtacc

SEQ ID NO: 1404083 - DNA, 15 bp, Homo sapiens
tgtgacccaccgtac

SEQ ID NO: 1404084 - DNA, 15 bp, Homo sapiens
atgtgacccaccgta

SEQ ID NO: 1404085 - DNA, 15 bp, Homo sapiens
gatgtgacccaccgt

SEQ ID NO: 1404086 - DNA, 15 bp, Homo sapiens
agatgtgacccaccg

SEQ ID NO: 1404087 - DNA, 15 bp, Homo sapiens
cagatgtgacccacc

SEQ ID NO: 1404088 - DNA, 15 bp, Homo sapiens
acagatgtgacccac

SEQ ID NO: 1404089 - DNA, 15 bp, Homo sapiens
tacagatgtgaccca

SEQ ID NO: 1404090 - DNA, 15 bp, Homo sapiens
ttacagatgtgaccc

SEQ ID NO: 1404091 - DNA, 15 bp, Homo sapiens
attacagatgtgacc

SEQ ID NO: 1404092 - DNA, 15 bp, Homo sapiens
gattacagatgtgac

SEQ ID NO: 1404093 - DNA, 15 bp, Homo sapiens
cctccaaaagtgctg

SEQ ID NO: 1404094 - DNA, 15 bp, Homo sapiens
gcctccaaaagtgct

SEQ ID NO: 1404095 - DNA, 15 bp, Homo sapiens
agcctccaaaagtgc

SEQ ID NO: 1404096 - DNA, 15 bp, Homo sapiens
cagcctccaaaagtg

SEQ ID NO: 1404097 - DNA, 15 bp, Homo sapiens
tcagcctccaaaagt

SEQ ID NO: 1404098 - DNA, 15 bp, Homo sapiens
ctcagcctccaaaag

SEQ ID NO: 1404099 - DNA, 15 bp, Homo sapiens
cctcagcctccaaaa

SEQ ID NO: 1404100 - DNA, 15 bp, Homo sapiens
gcctcagcctccaaa

SEQ ID NO: 1404101 - DNA, 15 bp, Homo sapiens
agcctcagcctccaa

SEQ ID NO: 1404102 - DNA, 15 bp, Homo sapiens
cagcctcagcctcca

SEQ ID NO: 1404103 - DNA, 15 bp, Homo sapiens
cctccagcctcagcc

SEQ ID NO: 1404104 - DNA, 15 bp, Homo sapiens
cgatcctccagcctc

SEQ ID NO: 1404105 - DNA, 15 bp, Homo sapiens
gcgatcctccagcct

SEQ ID NO: 1404106 - DNA, 15 bp, Homo sapiens
agcgatcctccagcc

SEQ ID NO: 1404107 - DNA, 15 bp, Homo sapiens
aagcgatcctccagc

SEQ ID NO: 1404108 - DNA, 15 bp, Homo sapiens
caagcgatcctccag

SEQ ID NO: 1404109 - DNA, 15 bp, Homo sapiens
tcaagcgatcctcca

SEQ ID NO: 1404110 - DNA, 15 bp, Homo sapiens
aggctcaagcgatcc

SEQ ID NO: 1404111 - DNA, 15 bp, Homo sapiens
taggctcaagcgatc

SEQ ID NO: 1404112 - DNA, 15 bp, Homo sapiens
ctaggctcaagcgat

SEQ ID NO: 1404113 - DNA, 15 bp, Homo sapiens
cctaggctcaagcga

SEQ ID NO: 1404114 - DNA, 15 bp, Homo sapiens
tcctaggctcaagcg

SEQ ID NO: 1404115 - DNA, 15 bp, Homo sapiens
ctcctaggctcaagc

SEQ ID NO: 1404116 - DNA, 15 bp, Homo sapiens
gaactcctaggctca

SEQ ID NO: 1404117 - DNA, 15 bp, Homo sapiens
cgaactcctaggctc

SEQ ID NO: 1404118 - DNA, 15 bp, Homo sapiens
tcgaactcctaggct

SEQ ID NO: 1404119 - DNA, 15 bp, Homo sapiens
ctcgaactcctaggc

SEQ ID NO: 1404120 - DNA, 15 bp, Homo sapiens
tctcgaactcctagg

SEQ ID NO: 1404121 - DNA, 15 bp, Homo sapiens
cttgcccaggctggt

SEQ ID NO: 1404122 - DNA, 15 bp, Homo sapiens
atcttgcccaggctg

SEQ ID NO: 1404123 - DNA, 15 bp, Homo sapiens
catcttgcccaggct

SEQ ID NO: 1404124 - DNA, 15 bp, Homo sapiens
ccatcttgcccaggc

SEQ ID NO: 1404125 - DNA, 15 bp, Homo sapiens
gccatcttgcccagg

SEQ ID NO: 1404126 - DNA, 15 bp, Homo sapiens
ggccatcttgcccag

SEQ ID NO: 1404127 - DNA, 15 bp, Homo sapiens
tggccatcttgccca

SEQ ID NO: 1404128 - DNA, 15 bp, Homo sapiens
ctggccatcttgccc

SEQ ID NO: 1404129 - DNA, 15 bp, Homo sapiens
tctggccatcttgcc

SEQ ID NO: 1404130 - DNA, 15 bp, Homo sapiens
gtctggccatcttgc

SEQ ID NO: 1404131 - DNA, 15 bp, Homo sapiens
cgtctggccatcttg

SEQ ID NO: 1404132 - DNA, 15 bp, Homo sapiens
gcgtctggccatctt

SEQ ID NO: 1404133 - DNA, 15 bp, Homo sapiens
ggcgtctggccatct

SEQ ID NO: 1404134 - DNA, 15 bp, Homo sapiens
tggcgtctggccatc

SEQ ID NO: 1404135 - DNA, 15 bp, Homo sapiens
atggcgtctggccat

SEQ ID NO: 1404136 - DNA, 15 bp, Homo sapiens
gatggcgtctggcca

SEQ ID NO: 1404137 - DNA, 15 bp, Homo sapiens
agatggcgtctggcc

SEQ ID NO: 1404138 - DNA, 15 bp, Homo sapiens
gagatggcgtctggc

SEQ ID NO: 1404139 - DNA, 15 bp, Homo sapiens
agagatggcgtctgg

SEQ ID NO: 1404140 - DNA, 15 bp, Homo sapiens
tagagatggcgtctg

SEQ ID NO: 1404141 - DNA, 15 bp, Homo sapiens
ttagagatggcgtct

SEQ ID NO: 1404142 - DNA, 15 bp, Homo sapiens
attagagatggcgtc

SEQ ID NO: 1404143 - DNA, 15 bp, Homo sapiens
aattagagatggcgt

SEQ ID NO: 1404144 - DNA, 15 bp, Homo sapiens
aaattagagatggcg

SEQ ID NO: 1404145 - DNA, 15 bp, Homo sapiens
taaattagagatggc

SEQ ID NO: 1404146 - DNA, 15 bp, Homo sapiens
ttaaattagagatgg

SEQ ID NO: 1404147 - DNA, 15 bp, Homo sapiens
tttaaattagagatg

SEQ ID NO: 1404148 - DNA, 15 bp, Homo sapiens
ttttaaattagagat

SEQ ID NO: 1404149 - DNA, 15 bp, Homo sapiens
tttttaaattagaga

SEQ ID NO: 1404150 - DNA, 15 bp, Homo sapiens
ttttttaaattagag

SEQ ID NO: 1404151 - DNA, 15 bp, Homo sapiens
tttttttaaattaga

SEQ ID NO: 1404152 - DNA, 15 bp, Homo sapiens
ttttttttaaattag

SEQ ID NO: 1404153 - DNA, 15 bp, Homo sapiens
cttttttttaaatta

SEQ ID NO: 1404154 - DNA, 15 bp, Homo sapiens
tcttttttttaaatt

SEQ ID NO: 1404155 - DNA, 15 bp, Homo sapiens
ttcttttttttaaat

SEQ ID NO: 1404156 - DNA, 15 bp, Homo sapiens
tttttctttttttta

SEQ ID NO: 1404157 - DNA, 15 bp, Homo sapiens
cttgttttttctttt

SEQ ID NO: 1404158 - DNA, 15 bp, Homo sapiens
tcttgttttttcttt

SEQ ID NO: 1404159 - DNA, 15 bp, Homo sapiens
gtcttgttttttctt

SEQ ID NO: 1404160 - DNA, 15 bp, Homo sapiens
agtcttgttttttct

SEQ ID NO: 1404161 - DNA, 15 bp, Homo sapiens
gagtcttgttttttc

SEQ ID NO: 1404162 - DNA, 15 bp, Homo sapiens
ggagtcttgtttttt

SEQ ID NO: 1404163 - DNA, 15 bp, Homo sapiens
aggagtcttgttttt

SEQ ID NO: 1404164 - DNA, 15 bp, Homo sapiens
taggagtcttgtttt

SEQ ID NO: 1404165 - DNA, 15 bp, Homo sapiens
ataggagtcttgttt

SEQ ID NO: 1404166 - DNA, 15 bp, Homo sapiens
tataggagtcttgtt

SEQ ID NO: 1404167 - DNA, 15 bp, Homo sapiens
ctataggagtcttgt

SEQ ID NO: 1404168 - DNA, 15 bp, Homo sapiens
actataggagtcttg

SEQ ID NO: 1404169 - DNA, 15 bp, Homo sapiens
cactataggagtctt

SEQ ID NO: 1404170 - DNA, 15 bp, Homo sapiens
ccactataggagtct

SEQ ID NO: 1404171 - DNA, 15 bp, Homo sapiens
accactataggagtc

SEQ ID NO: 1404172 - DNA, 15 bp, Homo sapiens
caccactataggagt

SEQ ID NO: 1404173 - DNA, 15 bp, Homo sapiens
tcaccactataggag

SEQ ID NO: 1404174 - DNA, 15 bp, Homo sapiens
ttcaccactatagga

SEQ ID NO: 1404175 - DNA, 15 bp, Homo sapiens
cttcaccactatagg

SEQ ID NO: 1404176 - DNA, 15 bp, Homo sapiens
tcttcaccactatag

SEQ ID NO: 1404177 - DNA, 15 bp, Homo sapiens
ttcttcaccactata

SEQ ID NO: 1404178 - DNA, 15 bp, Homo sapiens
gttcttcaccactat

SEQ ID NO: 1404179 - DNA, 15 bp, Homo sapiens
tgttcttcaccacta

SEQ ID NO: 1404180 - DNA, 15 bp, Homo sapiens
ctgttcttcaccact

SEQ ID NO: 1404181 - DNA, 15 bp, Homo sapiens
tctgttcttcaccac

SEQ ID NO: 1404182 - DNA, 15 bp, Homo sapiens
gtctgttcttcacca

SEQ ID NO: 1404183 - DNA, 15 bp, Homo sapiens
tgtctgttcttcacc

SEQ ID NO: 1404184 - DNA, 15 bp, Homo sapiens
atgtctgttcttcac

SEQ ID NO: 1404185 - DNA, 15 bp, Homo sapiens
aatgtctgttcttca

SEQ ID NO: 1404186 - DNA, 15 bp, Homo sapiens
gaatgtctgttcttc

SEQ ID NO: 1404187 - DNA, 15 bp, Homo sapiens
ggaatgtctgttctt

SEQ ID NO: 1404188 - DNA, 15 bp, Homo sapiens
cggaatgtctgttct

SEQ ID NO: 1404189 - DNA, 15 bp, Homo sapiens
tcggaatgtctgttc

SEQ ID NO: 1404190 - DNA, 15 bp, Homo sapiens
ttcggaatgtctgtt

SEQ ID NO: 1404191 - DNA, 15 bp, Homo sapiens
tttcggaatgtctgt

SEQ ID NO: 1404192 - DNA, 15 bp, Homo sapiens
ttttcggaatgtctg

SEQ ID NO: 1404193 - DNA, 15 bp, Homo sapiens
gttttcggaatgtct

SEQ ID NO: 1404194 - DNA, 15 bp, Homo sapiens
tgttttcggaatgtc

SEQ ID NO: 1404195 - DNA, 15 bp, Homo sapiens
ctgttttcggaatgt

SEQ ID NO: 1404196 - DNA, 15 bp, Homo sapiens
tctgttttcggaatg

SEQ ID NO: 1404197 - DNA, 15 bp, Homo sapiens
gtctgttttcggaat

SEQ ID NO: 1404198 - DNA, 15 bp, Homo sapiens
agtctgttttcggaa

SEQ ID NO: 1404199 - DNA, 15 bp, Homo sapiens
cagtctgttttcgga

SEQ ID NO: 1404200 - DNA, 15 bp, Homo sapiens
acagtctgttttcgg

SEQ ID NO: 1404201 - DNA, 15 bp, Homo sapiens
cacagtctgttttcg

SEQ ID NO: 1404202 - DNA, 15 bp, Homo sapiens
gcacagtctgttttc

SEQ ID NO: 1404203 - DNA, 15 bp, Homo sapiens
cgcacagtctgtttt

SEQ ID NO: 1404204 - DNA, 15 bp, Homo sapiens
acgcacagtctgttt

SEQ ID NO: 1404205 - DNA, 15 bp, Homo sapiens
aacgcacagtctgtt

SEQ ID NO: 1404206 - DNA, 15 bp, Homo sapiens
taacgcacagtctgt

SEQ ID NO: 1404207 - DNA, 15 bp, Homo sapiens
ataacgcacagtctg

SEQ ID NO: 1404208 - DNA, 15 bp, Homo sapiens
cataacgcacagtct

SEQ ID NO: 1404209 - DNA, 15 bp, Homo sapiens
tcataacgcacagtc

SEQ ID NO: 1404210 - DNA, 15 bp, Homo sapiens
atcataacgcacagt

SEQ ID NO: 1404211 - DNA, 15 bp, Homo sapiens
aatcataacgcacag

SEQ ID NO: 1404212 - DNA, 15 bp, Homo sapiens
gaatcataacgcaca

SEQ ID NO: 1404213 - DNA, 15 bp, Homo sapiens
ggaatcataacgcac

SEQ ID NO: 1404214 - DNA, 15 bp, Homo sapiens
tggaatcataacgca

SEQ ID NO: 1404215 - DNA, 15 bp, Homo sapiens
ctggaatcataacgc

SEQ ID NO: 1404216 - DNA, 15 bp, Homo sapiens
gctggaatcataacg

SEQ ID NO: 1404217 - DNA, 15 bp, Homo sapiens
agctggaatcataac

SEQ ID NO: 1404218 - DNA, 15 bp, Homo sapiens
gagctggaatcataa

SEQ ID NO: 1404219 - DNA, 15 bp, Homo sapiens
ggagctggaatcata

SEQ ID NO: 1404220 - DNA, 15 bp, Homo sapiens
tggagctggaatcat

SEQ ID NO: 1404221 - DNA, 15 bp, Homo sapiens
atggagctggaatca

SEQ ID NO: 1404222 - DNA, 15 bp, Homo sapiens
catggagctggaatc

SEQ ID NO: 1404223 - DNA, 15 bp, Homo sapiens
gcatggagctggaat

SEQ ID NO: 1404224 - DNA, 15 bp, Homo sapiens
ggcatggagctggaa

SEQ ID NO: 1404225 - DNA, 15 bp, Homo sapiens
aggcatggagctgga

SEQ ID NO: 1404226 - DNA, 15 bp, Homo sapiens
aaggcatggagctgg

SEQ ID NO: 1404227 - DNA, 15 bp, Homo sapiens
aaaggcatggagctg

SEQ ID NO: 1404228 - DNA, 15 bp, Homo sapiens
taaaggcatggagct

SEQ ID NO: 1404229 - DNA, 15 bp, Homo sapiens
gtaaaggcatggagc

SEQ ID NO: 1404230 - DNA, 15 bp, Homo sapiens
agtaaaggcatggag

SEQ ID NO: 1404231 - DNA, 15 bp, Homo sapiens
tagtaaaggcatgga

SEQ ID NO: 1404232 - DNA, 15 bp, Homo sapiens
gtagtaaaggcatgg

SEQ ID NO: 1404233 - DNA, 15 bp, Homo sapiens
ggtagtaaaggcatg

SEQ ID NO: 1404234 - DNA, 15 bp, Homo sapiens
aggtagtaaaggcat

SEQ ID NO: 1404235 - DNA, 15 bp, Homo sapiens
caggtagtaaaggca

SEQ ID NO: 1404236 - DNA, 15 bp, Homo sapiens
acaggtagtaaaggc

SEQ ID NO: 1404237 - DNA, 15 bp, Homo sapiens
cacaggtagtaaagg

SEQ ID NO: 1404238 - DNA, 15 bp, Homo sapiens
acacaggtagtaaag

SEQ ID NO: 1404239 - DNA, 15 bp, Homo sapiens
aacacaggtagtaaa

SEQ ID NO: 1404240 - DNA, 15 bp, Homo sapiens
caacacaggtagtaa

SEQ ID NO: 1404241 - DNA, 15 bp, Homo sapiens
acaacacaggtagta

SEQ ID NO: 1404242 - DNA, 15 bp, Homo sapiens
cacaacacaggtagt

SEQ ID NO: 1404243 - DNA, 15 bp, Homo sapiens
tcacaacacaggtag

SEQ ID NO: 1404244 - DNA, 15 bp, Homo sapiens
gtcacaacacaggta

SEQ ID NO: 1404245 - DNA, 15 bp, Homo sapiens
agtcacaacacaggt

SEQ ID NO: 1404246 - DNA, 15 bp, Homo sapiens
aagtcacaacacagg

SEQ ID NO: 1404247 - DNA, 15 bp, Homo sapiens
aaagtcacaacacag

SEQ ID NO: 1404248 - DNA, 15 bp, Homo sapiens
caaagtcacaacaca

SEQ ID NO: 1404249 - DNA, 15 bp, Homo sapiens
ccaaagtcacaacac

SEQ ID NO: 1404250 - DNA, 15 bp, Homo sapiens
tccaaagtcacaaca

SEQ ID NO: 1404251 - DNA, 15 bp, Homo sapiens
atccaaagtcacaac

SEQ ID NO: 1404252 - DNA, 15 bp, Homo sapiens
tatccaaagtcacaa

SEQ ID NO: 1404253 - DNA, 15 bp, Homo sapiens
ttatccaaagtcaca

SEQ ID NO: 1404254 - DNA, 15 bp, Homo sapiens
tttatccaaagtcac

SEQ ID NO: 1404255 - DNA, 15 bp, Homo sapiens
atttatccaaagtca

SEQ ID NO: 1404256 - DNA, 15 bp, Homo sapiens
gatttatccaaagtc

SEQ ID NO: 1404257 - DNA, 15 bp, Homo sapiens
tgatttatccaaagt

SEQ ID NO: 1404258 - DNA, 15 bp, Homo sapiens
gtgatttatccaaag

SEQ ID NO: 1404259 - DNA, 15 bp, Homo sapiens
agtgatttatccaaa

SEQ ID NO: 1404260 - DNA, 15 bp, Homo sapiens
aagtgatttatccaa

SEQ ID NO: 1404261 - DNA, 15 bp, Homo sapiens
taagtgatttatcca

SEQ ID NO: 1404262 - DNA, 15 bp, Homo sapiens
ttaagtgatttatcc

SEQ ID NO: 1404263 - DNA, 15 bp, Homo sapiens
tttaagtgatttatc

SEQ ID NO: 1404264 - DNA, 15 bp, Homo sapiens
ttttaagtgatttat

SEQ ID NO: 1404265 - DNA, 15 bp, Homo sapiens
tttttaagtgattta

SEQ ID NO: 1404266 - DNA, 15 bp, Homo sapiens
atttttaagtgattt

SEQ ID NO: 1404267 - DNA, 15 bp, Homo sapiens
gatttttaagtgatt

SEQ ID NO: 1404268 - DNA, 15 bp, Homo sapiens
agatttttaagtgat

SEQ ID NO: 1404269 - DNA, 15 bp, Homo sapiens
aagatttttaagtga

SEQ ID NO: 1404270 - DNA, 15 bp, Homo sapiens
aaagatttttaagtg

SEQ ID NO: 1404271 - DNA, 15 bp, Homo sapiens
aaaagatttttaagt

SEQ ID NO: 1404272 - DNA, 15 bp, Homo sapiens
aaaaagatttttaag

SEQ ID NO: 1404273 - DNA, 15 bp, Homo sapiens
aaaaaagatttttaa

SEQ ID NO: 1404274 - DNA, 15 bp, Homo sapiens
aaaaaaaaagatttt

SEQ ID NO: 1404275 - DNA, 15 bp, Homo sapiens
aaaaaaaaaagattt

SEQ ID NO: 1404276 - DNA, 15 bp, Homo sapiens
gcagagcaagactcc

SEQ ID NO: 1404277 - DNA, 15 bp, Homo sapiens
ggcagagcaagactc

SEQ ID NO: 1404278 - DNA, 15 bp, Homo sapiens
cggcagagcaagact

SEQ ID NO: 1404279 - DNA, 15 bp, Homo sapiens
gcggcagagcaagac

SEQ ID NO: 1404280 - DNA, 15 bp, Homo sapiens
ggcggcagagcaaga

SEQ ID NO: 1404281 - DNA, 15 bp, Homo sapiens
gggcggcagagcaag

SEQ ID NO: 1404282 - DNA, 15 bp, Homo sapiens
tgggcggcagagcaa

SEQ ID NO: 1404283 - DNA, 15 bp, Homo sapiens
ctgggcggcagagca

SEQ ID NO: 1404284 - DNA, 15 bp, Homo sapiens
cctgggcggcagagc

SEQ ID NO: 1404285 - DNA, 15 bp, Homo sapiens
cagtcccagctactt

SEQ ID NO: 1404286 - DNA, 15 bp, Homo sapiens
tgtagtggcgggcac

SEQ ID NO: 1404287 - DNA, 15 bp, Homo sapiens
gtgtagtggcgggca

SEQ ID NO: 1404288 - DNA, 15 bp, Homo sapiens
acaggagatcgagac

SEQ ID NO: 1404289 - DNA, 15 bp, Homo sapiens
gacaggagatcgaga

SEQ ID NO: 1404290 - DNA, 15 bp, Homo sapiens
ggacaggagatcgag

SEQ ID NO: 1404291 - DNA, 15 bp, Homo sapiens
aggacaggagatcga

SEQ ID NO: 1404292 - DNA, 15 bp, Homo sapiens
gaggacaggagatcg

SEQ ID NO: 1404293 - DNA, 15 bp, Homo sapiens
cgaggacaggagatc

SEQ ID NO: 1404294 - DNA, 15 bp, Homo sapiens
acgaggacaggagat

SEQ ID NO: 1404295 - DNA, 15 bp, Homo sapiens
cacgaggacaggaga

SEQ ID NO: 1404296 - DNA, 15 bp, Homo sapiens
tcacgaggacaggag

SEQ ID NO: 1404297 - DNA, 15 bp, Homo sapiens
atcacgaggacagga

SEQ ID NO: 1404298 - DNA, 15 bp, Homo sapiens
gatcacgaggacagg

SEQ ID NO: 1404299 - DNA, 15 bp, Homo sapiens
ggatcacgaggacag

SEQ ID NO: 1404300 - DNA, 15 bp, Homo sapiens
tggatcacgaggaca

SEQ ID NO: 1404301 - DNA, 15 bp, Homo sapiens
gtggatcacgaggac

SEQ ID NO: 1404302 - DNA, 15 bp, Homo sapiens
ggtggatcacgagga

SEQ ID NO: 1404303 - DNA, 15 bp, Homo sapiens
agaggctgaggcggg

SEQ ID NO: 1404304 - DNA, 15 bp, Homo sapiens
gagaggctgaggcgg

SEQ ID NO: 1404305 - DNA, 15 bp, Homo sapiens
tgagaggctgaggcg

SEQ ID NO: 1404306 - DNA, 15 bp, Homo sapiens
acactttgagaggct

SEQ ID NO: 1404307 - DNA, 15 bp, Homo sapiens
aacactttgagaggc

SEQ ID NO: 1404308 - DNA, 15 bp, Homo sapiens
caacactttgagagg

SEQ ID NO: 1404309 - DNA, 15 bp, Homo sapiens
ccaacactttgagag

SEQ ID NO: 1404310 - DNA, 15 bp, Homo sapiens
cccaacactttgaga

SEQ ID NO: 1404311 - DNA, 15 bp, Homo sapiens
tcccaacactttgag

SEQ ID NO: 1404312 - DNA, 15 bp, Homo sapiens
atcccaacactttga

SEQ ID NO: 1404313 - DNA, 15 bp, Homo sapiens
tggccgggtgcggtg

SEQ ID NO: 1404314 - DNA, 15 bp, Homo sapiens
ttggccgggtgcggt

SEQ ID NO: 1404315 - DNA, 15 bp, Homo sapiens
tttggccgggtgcgg

SEQ ID NO: 1404316 - DNA, 15 bp, Homo sapiens
atttggccgggtgcg

SEQ ID NO: 1404317 - DNA, 15 bp, Homo sapiens
gatttggccgggtgc

SEQ ID NO: 1404318 - DNA, 15 bp, Homo sapiens
tgatttggccgggtg

SEQ ID NO: 1404319 - DNA, 15 bp, Homo sapiens
gtgatttggccgggt

SEQ ID NO: 1404320 - DNA, 15 bp, Homo sapiens
agtgatttggccggg

SEQ ID NO: 1404321 - DNA, 15 bp, Homo sapiens
aagtgatttggccgg

SEQ ID NO: 1404322 - DNA, 15 bp, Homo sapiens
taagtgatttggccg

SEQ ID NO: 1404323 - DNA, 15 bp, Homo sapiens
ttaagtgatttggcc

SEQ ID NO: 1404324 - DNA, 15 bp, Homo sapiens
tttaagtgatttggc

SEQ ID NO: 1404325 - DNA, 15 bp, Homo sapiens
ttttaagtgatttgg

SEQ ID NO: 1404326 - DNA, 15 bp, Homo sapiens
attttaagtgatttg

SEQ ID NO: 1404327 - DNA, 15 bp, Homo sapiens
aattttaagtgattt

SEQ ID NO: 1404328 - DNA, 15 bp, Homo sapiens
gaattttaagtgatt

SEQ ID NO: 1404329 - DNA, 15 bp, Homo sapiens
agaattttaagtgat

SEQ ID NO: 1404330 - DNA, 15 bp, Homo sapiens
cagaattttaagtga

SEQ ID NO: 1404331 - DNA, 15 bp, Homo sapiens
acagaattttaagtg

SEQ ID NO: 1404332 - DNA, 15 bp, Homo sapiens
cacagaattttaagt

SEQ ID NO: 1404333 - DNA, 15 bp, Homo sapiens
gcacagaattttaag

SEQ ID NO: 1404334 - DNA, 15 bp, Homo sapiens
ggcacagaattttaa

SEQ ID NO: 1404335 - DNA, 15 bp, Homo sapiens
aggcacagaatttta

SEQ ID NO: 1404336 - DNA, 15 bp, Homo sapiens
gaggcacagaatttt

SEQ ID NO: 1404337 - DNA, 15 bp, Homo sapiens
tgaggcacagaattt

SEQ ID NO: 1404338 - DNA, 15 bp, Homo sapiens
ctgaggcacagaatt

SEQ ID NO: 1404339 - DNA, 15 bp, Homo sapiens
actgaggcacagaat

SEQ ID NO: 1404340 - DNA, 15 bp, Homo sapiens
aactgaggcacagaa

SEQ ID NO: 1404341 - DNA, 15 bp, Homo sapiens
gaaactgaggcacag

SEQ ID NO: 1404342 - DNA, 15 bp, Homo sapiens
agaaactgaggcaca

SEQ ID NO: 1404343 - DNA, 15 bp, Homo sapiens
gagaaactgaggcac

SEQ ID NO: 1404344 - DNA, 15 bp, Homo sapiens
ggagaaactgaggca

SEQ ID NO: 1404345 - DNA, 15 bp, Homo sapiens
aggagaaactgaggc

SEQ ID NO: 1404346 - DNA, 15 bp, Homo sapiens
gaggagaaactgagg

SEQ ID NO: 1404347 - DNA, 15 bp, Homo sapiens
agaggagaaactgag

SEQ ID NO: 1404348 - DNA, 15 bp, Homo sapiens
cagaggagaaactga

SEQ ID NO: 1404349 - DNA, 15 bp, Homo sapiens
acagaggagaaactg

SEQ ID NO: 1404350 - DNA, 15 bp, Homo sapiens
tacagaggagaaact

SEQ ID NO: 1404351 - DNA, 15 bp, Homo sapiens
ttacagaggagaaac

SEQ ID NO: 1404352 - DNA, 15 bp, Homo sapiens
tttacagaggagaaa

SEQ ID NO: 1404353 - DNA, 15 bp, Homo sapiens
ctttacagaggagaa

SEQ ID NO: 1404354 - DNA, 15 bp, Homo sapiens
actttacagaggaga

SEQ ID NO: 1404355 - DNA, 15 bp, Homo sapiens
cactttacagaggag

SEQ ID NO: 1404356 - DNA, 15 bp, Homo sapiens
ccactttacagagga

SEQ ID NO: 1404357 - DNA, 15 bp, Homo sapiens
cccactttacagagg

SEQ ID NO: 1404358 - DNA, 15 bp, Homo sapiens
tcccactttacagag

SEQ ID NO: 1404359 - DNA, 15 bp, Homo sapiens
atcccactttacaga

SEQ ID NO: 1404360 - DNA, 15 bp, Homo sapiens
tatcccactttacag

SEQ ID NO: 1404361 - DNA, 15 bp, Homo sapiens
ttatcccactttaca

SEQ ID NO: 1404362 - DNA, 15 bp, Homo sapiens
tttatcccactttac

SEQ ID NO: 1404363 - DNA, 15 bp, Homo sapiens
ttttatcccacttta

SEQ ID NO: 1404364 - DNA, 15 bp, Homo sapiens
tttttatcccacttt

SEQ ID NO: 1404365 - DNA, 15 bp, Homo sapiens
atttttatcccactt

SEQ ID NO: 1404366 - DNA, 15 bp, Homo sapiens
tatttttatcccact

SEQ ID NO: 1404367 - DNA, 15 bp, Homo sapiens
ctatttttatcccac

SEQ ID NO: 1404368 - DNA, 15 bp, Homo sapiens
actatttttatccca

SEQ ID NO: 1404369 - DNA, 15 bp, Homo sapiens
tactatttttatccc

SEQ ID NO: 1404370 - DNA, 15 bp, Homo sapiens
gtactatttttatcc

SEQ ID NO: 1404371 - DNA, 15 bp, Homo sapiens
ggtactatttttatc

SEQ ID NO: 1404372 - DNA, 15 bp, Homo sapiens
aggtactatttttat

SEQ ID NO: 1404373 - DNA, 15 bp, Homo sapiens
taggtactattttta

SEQ ID NO: 1404374 - DNA, 15 bp, Homo sapiens
ataggtactattttt

SEQ ID NO: 1404375 - DNA, 15 bp, Homo sapiens
gataggtactatttt

SEQ ID NO: 1404376 - DNA, 15 bp, Homo sapiens
agataggtactattt

SEQ ID NO: 1404377 - DNA, 15 bp, Homo sapiens
cagataggtactatt

SEQ ID NO: 1404378 - DNA, 15 bp, Homo sapiens
tcagataggtactat

SEQ ID NO: 1404379 - DNA, 15 bp, Homo sapiens
atcagataggtacta

SEQ ID NO: 1404380 - DNA, 15 bp, Homo sapiens
tatcagataggtact

SEQ ID NO: 1404381 - DNA, 15 bp, Homo sapiens
ctatcagataggtac

SEQ ID NO: 1404382 - DNA, 15 bp, Homo sapiens
cctatcagataggta

SEQ ID NO: 1404383 - DNA, 15 bp, Homo sapiens
ccctatcagataggt

SEQ ID NO: 1404384 - DNA, 15 bp, Homo sapiens
accctatcagatagg

SEQ ID NO: 1404385 - DNA, 15 bp, Homo sapiens
aaccctatcagatag

SEQ ID NO: 1404386 - DNA, 15 bp, Homo sapiens
caaccctatcagata

SEQ ID NO: 1404387 - DNA, 15 bp, Homo sapiens
acaaccctatcagat

SEQ ID NO: 1404388 - DNA, 15 bp, Homo sapiens
aacaaccctatcaga

SEQ ID NO: 1404389 - DNA, 15 bp, Homo sapiens
taacaaccctatcag

SEQ ID NO: 1404390 - DNA, 15 bp, Homo sapiens
ttgtaacaaccctat

SEQ ID NO: 1404391 - DNA, 15 bp, Homo sapiens
attgtaacaacccta

SEQ ID NO: 1404392 - DNA, 15 bp, Homo sapiens
aattgtaacaaccct

SEQ ID NO: 1404393 - DNA, 15 bp, Homo sapiens
taattgtaacaaccc

SEQ ID NO: 1404394 - DNA, 15 bp, Homo sapiens
ataattgtaacaacc

SEQ ID NO: 1404395 - DNA, 15 bp, Homo sapiens
cataattgtaacaac

SEQ ID NO: 1404396 - DNA, 15 bp, Homo sapiens
tcataattgtaacaa

SEQ ID NO: 1404397 - DNA, 15 bp, Homo sapiens
ttcataattgtaaca

SEQ ID NO: 1404398 - DNA, 15 bp, Homo sapiens
tttcataattgtaac

SEQ ID NO: 1404399 - DNA, 15 bp, Homo sapiens
atttcataattgtaa

SEQ ID NO: 1404400 - DNA, 15 bp, Homo sapiens
catttcataattgta

SEQ ID NO: 1404401 - DNA, 15 bp, Homo sapiens
tcatttcataattgt

SEQ ID NO: 1404402 - DNA, 15 bp, Homo sapiens
ctcatttcataattg

SEQ ID NO: 1404403 - DNA, 15 bp, Homo sapiens
gctcatttcataatt

SEQ ID NO: 1404404 - DNA, 15 bp, Homo sapiens
tgctcatttcataat

SEQ ID NO: 1404405 - DNA, 15 bp, Homo sapiens
ttgctcatttcataa

SEQ ID NO: 1404406 - DNA, 15 bp, Homo sapiens
tttgctcatttcata

SEQ ID NO: 1404407 - DNA, 15 bp, Homo sapiens
atttgctcatttcat

SEQ ID NO: 1404408 - DNA, 15 bp, Homo sapiens
tatttgctcatttca

SEQ ID NO: 1404409 - DNA, 15 bp, Homo sapiens
ttatttgctcatttc

SEQ ID NO: 1404410 - DNA, 15 bp, Homo sapiens
cttatttgctcattt

SEQ ID NO: 1404411 - DNA, 15 bp, Homo sapiens
acttatttgctcatt

SEQ ID NO: 1404412 - DNA, 15 bp, Homo sapiens
tacttatttgctcat

SEQ ID NO: 1404413 - DNA, 15 bp, Homo sapiens
atacttatttgctca

SEQ ID NO: 1404414 - DNA, 15 bp, Homo sapiens
catacttatttgctc

SEQ ID NO: 1404415 - DNA, 15 bp, Homo sapiens
acatacttatttgct

SEQ ID NO: 1404416 - DNA, 15 bp, Homo sapiens
gacatacttatttgc

SEQ ID NO: 1404417 - DNA, 15 bp, Homo sapiens
tgacatacttatttg

SEQ ID NO: 1404418 - DNA, 15 bp, Homo sapiens
ttgacatacttattt

SEQ ID NO: 1404419 - DNA, 15 bp, Homo sapiens
cttgacatacttatt

SEQ ID NO: 1404420 - DNA, 15 bp, Homo sapiens
acttgacatacttat

SEQ ID NO: 1404421 - DNA, 15 bp, Homo sapiens
cacttgacatactta

SEQ ID NO: 1404422 - DNA, 15 bp, Homo sapiens
acacttgacatactt

SEQ ID NO: 1404423 - DNA, 15 bp, Homo sapiens
aacacttgacatact

SEQ ID NO: 1404424 - DNA, 15 bp, Homo sapiens
aaacacttgacatac

SEQ ID NO: 1404425 - DNA, 15 bp, Homo sapiens
taaacacttgacata

SEQ ID NO: 1404426 - DNA, 15 bp, Homo sapiens
ttaaacacttgacat

SEQ ID NO: 1404427 - DNA, 15 bp, Homo sapiens
tttaaacacttgaca

SEQ ID NO: 1404428 - DNA, 15 bp, Homo sapiens
ttttaaacacttgac

SEQ ID NO: 1404429 - DNA, 15 bp, Homo sapiens
gttttaaacacttga

SEQ ID NO: 1404430 - DNA, 15 bp, Homo sapiens
tgttttaaacacttg

SEQ ID NO: 1404431 - DNA, 15 bp, Homo sapiens
ctgttttaaacactt

SEQ ID NO: 1404432 - DNA, 15 bp, Homo sapiens
gctgttttaaacact

SEQ ID NO: 1404433 - DNA, 15 bp, Homo sapiens
cgctgttttaaacac

SEQ ID NO: 1404434 - DNA, 15 bp, Homo sapiens
gcgctgttttaaaca

SEQ ID NO: 1404435 - DNA, 15 bp, Homo sapiens
ggcgctgttttaaac

SEQ ID NO: 1404436 - DNA, 15 bp, Homo sapiens
aggcgctgttttaaa

SEQ ID NO: 1404437 - DNA, 15 bp, Homo sapiens
caggcgctgttttaa

SEQ ID NO: 1404438 - DNA, 15 bp, Homo sapiens
ccaggcgctgtttta

SEQ ID NO: 1404439 - DNA, 15 bp, Homo sapiens
gccaggcgctgtttt

SEQ ID NO: 1404440 - DNA, 15 bp, Homo sapiens
agccaggcgctgttt

SEQ ID NO: 1404441 - DNA, 15 bp, Homo sapiens
aagccaggcgctgtt

SEQ ID NO: 1404442 - DNA, 15 bp, Homo sapiens
gaagccaggcgctgt

SEQ ID NO: 1404443 - DNA, 15 bp, Homo sapiens
agaagccaggcgctg

SEQ ID NO: 1404444 - DNA, 15 bp, Homo sapiens
aagaagccaggcgct

SEQ ID NO: 1404445 - DNA, 15 bp, Homo sapiens
caagaagccaggcgc

SEQ ID NO: 1404446 - DNA, 15 bp, Homo sapiens
acaagaagccaggcg

SEQ ID NO: 1404447 - DNA, 15 bp, Homo sapiens
tacaagaagccaggc

SEQ ID NO: 1404448 - DNA, 15 bp, Homo sapiens
ttacaagaagccagg

SEQ ID NO: 1404449 - DNA, 15 bp, Homo sapiens
tttacaagaagccag

SEQ ID NO: 1404450 - DNA, 15 bp, Homo sapiens
ttttacaagaagcca

SEQ ID NO: 1404451 - DNA, 15 bp, Homo sapiens
tttttacaagaagcc

SEQ ID NO: 1404452 - DNA, 15 bp, Homo sapiens
ctttttacaagaagc

SEQ ID NO: 1404453 - DNA, 15 bp, Homo sapiens
actttttacaagaag

SEQ ID NO: 1404454 - DNA, 15 bp, Homo sapiens
cactttttacaagaa

SEQ ID NO: 1404455 - DNA, 15 bp, Homo sapiens
gcactttttacaaga

SEQ ID NO: 1404456 - DNA, 15 bp, Homo sapiens
agcactttttacaag

SEQ ID NO: 1404457 - DNA, 15 bp, Homo sapiens
tagcactttttacaa

SEQ ID NO: 1404458 - DNA, 15 bp, Homo sapiens
atagcactttttaca

SEQ ID NO: 1404459 - DNA, 15 bp, Homo sapiens
tatagcactttttac

SEQ ID NO: 1404460 - DNA, 15 bp, Homo sapiens
atatagcacttttta

SEQ ID NO: 1404461 - DNA, 15 bp, Homo sapiens
tatatagcacttttt

SEQ ID NO: 1404462 - DNA, 15 bp, Homo sapiens
ttatatagcactttt

SEQ ID NO: 1404463 - DNA, 15 bp, Homo sapiens
tttatatagcacttt

SEQ ID NO: 1404464 - DNA, 15 bp, Homo sapiens
atttatatagcactt

SEQ ID NO: 1404465 - DNA, 15 bp, Homo sapiens
gatttatatagcact

SEQ ID NO: 1404466 - DNA, 15 bp, Homo sapiens
tgatttatatagcac

SEQ ID NO: 1404467 - DNA, 15 bp, Homo sapiens
atgatttatatagca

SEQ ID NO: 1404468 - DNA, 15 bp, Homo sapiens
tatgatttatatagc

SEQ ID NO: 1404469 - DNA, 15 bp, Homo sapiens
ctatgatttatatag

SEQ ID NO: 1404470 - DNA, 15 bp, Homo sapiens
gctatgatttatata

SEQ ID NO: 1404471 - DNA, 15 bp, Homo sapiens
agctatgatttatat

SEQ ID NO: 1404472 - DNA, 15 bp, Homo sapiens
tagctatgatttata

SEQ ID NO: 1404473 - DNA, 15 bp, Homo sapiens
atagctatgatttat

SEQ ID NO: 1404474 - DNA, 15 bp, Homo sapiens
tatagctatgattta

SEQ ID NO: 1404475 - DNA, 15 bp, Homo sapiens
ttatagctatgattt

SEQ ID NO: 1404476 - DNA, 15 bp, Homo sapiens
attatagctatgatt

SEQ ID NO: 1404477 - DNA, 15 bp, Homo sapiens
gattatagctatgat

SEQ ID NO: 1404478 - DNA, 15 bp, Homo sapiens
tgattatagctatga

SEQ ID NO: 1404479 - DNA, 15 bp, Homo sapiens
atgattatagctatg

SEQ ID NO: 1404480 - DNA, 15 bp, Homo sapiens
aatgattatagctat

SEQ ID NO: 1404481 - DNA, 15 bp, Homo sapiens
taatgattatagcta

SEQ ID NO: 1404482 - DNA, 15 bp, Homo sapiens
gtaatgattatagct

SEQ ID NO: 1404483 - DNA, 15 bp, Homo sapiens
agtaatgattatagc

SEQ ID NO: 1404484 - DNA, 15 bp, Homo sapiens
aagtaatgattatag

SEQ ID NO: 1404485 - DNA, 15 bp, Homo sapiens
taagtaatgattata

SEQ ID NO: 1404486 - DNA, 15 bp, Homo sapiens
ataagtaatgattat

SEQ ID NO: 1404487 - DNA, 15 bp, Homo sapiens
aataagtaatgatta

SEQ ID NO: 1404488 - DNA, 15 bp, Homo sapiens
aaataagtaatgatt

SEQ ID NO: 1404489 - DNA, 15 bp, Homo sapiens
gaaataagtaatgat

SEQ ID NO: 1404490 - DNA, 15 bp, Homo sapiens
cgaaataagtaatga

SEQ ID NO: 1404491 - DNA, 15 bp, Homo sapiens
tcgaaataagtaatg

SEQ ID NO: 1404492 - DNA, 15 bp, Homo sapiens
gtcgaaataagtaat

SEQ ID NO: 1404493 - DNA, 15 bp, Homo sapiens
agtcgaaataagtaa

SEQ ID NO: 1404494 - DNA, 15 bp, Homo sapiens
cagtcgaaataagta

SEQ ID NO: 1404495 - DNA, 15 bp, Homo sapiens
gcagtcgaaataagt

SEQ ID NO: 1404496 - DNA, 15 bp, Homo sapiens
agcagtcgaaataag

SEQ ID NO: 1404497 - DNA, 15 bp, Homo sapiens
gagcagtcgaaataa

SEQ ID NO: 1404498 - DNA, 15 bp, Homo sapiens
agagcagtcgaaata

SEQ ID NO: 1404499 - DNA, 15 bp, Homo sapiens
aagagcagtcgaaat

SEQ ID NO: 1404500 - DNA, 15 bp, Homo sapiens
aaagagcagtcgaaa

SEQ ID NO: 1404501 - DNA, 15 bp, Homo sapiens
taaagagcagtcgaa

SEQ ID NO: 1404502 - DNA, 15 bp, Homo sapiens
ttaaagagcagtcga

SEQ ID NO: 1404503 - DNA, 15 bp, Homo sapiens
gttaaagagcagtcg

SEQ ID NO: 1404504 - DNA, 15 bp, Homo sapiens
ggttaaagagcagtc

SEQ ID NO: 1404505 - DNA, 15 bp, Homo sapiens
tggttaaagagcagt

SEQ ID NO: 1404506 - DNA, 15 bp, Homo sapiens
ttggttaaagagcag

SEQ ID NO: 1404507 - DNA, 15 bp, Homo sapiens
cttggttaaagagca

SEQ ID NO: 1404508 - DNA, 15 bp, Homo sapiens
ccttggttaaagagc

SEQ ID NO: 1404509 - DNA, 15 bp, Homo sapiens
accttggttaaagag

SEQ ID NO: 1404510 - DNA, 15 bp, Homo sapiens
aaccttggttaaaga

SEQ ID NO: 1404511 - DNA, 15 bp, Homo sapiens
gaaccttggttaaag

SEQ ID NO: 1404512 - DNA, 15 bp, Homo sapiens
agaaccttggttaaa

SEQ ID NO: 1404513 - DNA, 15 bp, Homo sapiens
aagaaccttggttaa

SEQ ID NO: 1404514 - DNA, 15 bp, Homo sapiens
taagaaccttggtta

SEQ ID NO: 1404515 - DNA, 15 bp, Homo sapiens
ataagaaccttggtt

SEQ ID NO: 1404516 - DNA, 15 bp, Homo sapiens
aataagaaccttggt

SEQ ID NO: 1404517 - DNA, 15 bp, Homo sapiens
aaataagaaccttgg

SEQ ID NO: 1404518 - DNA, 15 bp, Homo sapiens
aaaataagaaccttg

SEQ ID NO: 1404519 - DNA, 15 bp, Homo sapiens
aaaaataagaacctt

SEQ ID NO: 1404520 - DNA, 15 bp, Homo sapiens
gaaaaataagaacct

SEQ ID NO: 1404521 - DNA, 15 bp, Homo sapiens
tgaaaaataagaacc

SEQ ID NO: 1404522 - DNA, 15 bp, Homo sapiens
atgaaaaataagaac

SEQ ID NO: 1404523 - DNA, 15 bp, Homo sapiens
gatgaaaaataagaa

SEQ ID NO: 1404524 - DNA, 15 bp, Homo sapiens
agatgaaaaataaga

SEQ ID NO: 1404525 - DNA, 15 bp, Homo sapiens
aagatgaaaaataag

SEQ ID NO: 1404526 - DNA, 15 bp, Homo sapiens
aaagatgaaaaataa

SEQ ID NO: 1404527 - DNA, 15 bp, Homo sapiens
aaaagatgaaaaata

SEQ ID NO: 1404528 - DNA, 15 bp, Homo sapiens
aaaaagatgaaaaat

SEQ ID NO: 1404529 - DNA, 15 bp, Homo sapiens
gaaaaagatgaaaaa

SEQ ID NO: 1404530 - DNA, 15 bp, Homo sapiens
agaaaaagatgaaaa

SEQ ID NO: 1404531 - DNA, 15 bp, Homo sapiens
aagaaaaagatgaaa

SEQ ID NO: 1404532 - DNA, 15 bp, Homo sapiens
aaagaaaaagatgaa

SEQ ID NO: 1404533 - DNA, 15 bp, Homo sapiens
aaaagaaaaagatga

SEQ ID NO: 1404534 - DNA, 15 bp, Homo sapiens
caaaagaaaaagatg

SEQ ID NO: 1404535 - DNA, 15 bp, Homo sapiens
acaaaagaaaaagat

SEQ ID NO: 1404536 - DNA, 15 bp, Homo sapiens
aacaaaagaaaaaga

SEQ ID NO: 1404537 - DNA, 15 bp, Homo sapiens
aaacaaaagaaaaag

SEQ ID NO: 1404538 - DNA, 15 bp, Homo sapiens
caaaacaaaagaaaa

SEQ ID NO: 1404539 - DNA, 15 bp, Homo sapiens
tcaaaacaaaagaaa

SEQ ID NO: 1404540 - DNA, 15 bp, Homo sapiens
ttcaaaacaaaagaa

SEQ ID NO: 1404541 - DNA, 15 bp, Homo sapiens
attcaaaacaaaaga

SEQ ID NO: 1404542 - DNA, 15 bp, Homo sapiens
tattcaaaacaaaag

SEQ ID NO: 1404543 - DNA, 15 bp, Homo sapiens
atattcaaaacaaaa

SEQ ID NO: 1404544 - DNA, 15 bp, Homo sapiens
gatattcaaaacaaa

SEQ ID NO: 1404545 - DNA, 15 bp, Homo sapiens
tgatattcaaaacaa

SEQ ID NO: 1404546 - DNA, 15 bp, Homo sapiens
gtgatattcaaaaca

SEQ ID NO: 1404547 - DNA, 15 bp, Homo sapiens
agtgatattcaaaac

SEQ ID NO: 1404548 - DNA, 15 bp, Homo sapiens
aagtgatattcaaaa

SEQ ID NO: 1404549 - DNA, 15 bp, Homo sapiens
taagtgatattcaaa

SEQ ID NO: 1404550 - DNA, 15 bp, Homo sapiens
ctaagtgatattcaa

SEQ ID NO: 1404551 - DNA, 15 bp, Homo sapiens
actaagtgatattca

SEQ ID NO: 1404552 - DNA, 15 bp, Homo sapiens
cactaagtgatattc

SEQ ID NO: 1404553 - DNA, 15 bp, Homo sapiens
acactaagtgatatt

SEQ ID NO: 1404554 - DNA, 15 bp, Homo sapiens
aacactaagtgatat

SEQ ID NO: 1404555 - DNA, 15 bp, Homo sapiens
aaacactaagtgata

SEQ ID NO: 1404556 - DNA, 15 bp, Homo sapiens
aaaacactaagtgat

SEQ ID NO: 1404557 - DNA, 15 bp, Homo sapiens
gaaaacactaagtga

SEQ ID NO: 1404558 - DNA, 15 bp, Homo sapiens
tgaaaacactaagtg

SEQ ID NO: 1404559 - DNA, 15 bp, Homo sapiens
gtgaaaacactaagt

SEQ ID NO: 1404560 - DNA, 15 bp, Homo sapiens
ggtgaaaacactaag

SEQ ID NO: 1404561 - DNA, 15 bp, Homo sapiens
aggtgaaaacactaa

SEQ ID NO: 1404562 - DNA, 15 bp, Homo sapiens
aaggtgaaaacacta

SEQ ID NO: 1404563 - DNA, 15 bp, Homo sapiens
aaaggtgaaaacact

SEQ ID NO: 1404564 - DNA, 15 bp, Homo sapiens
aaaaggtgaaaacac

SEQ ID NO: 1404565 - DNA, 15 bp, Homo sapiens
taaaaggtgaaaaca

SEQ ID NO: 1404566 - DNA, 15 bp, Homo sapiens
gtaaaaggtgaaaac

SEQ ID NO: 1404567 - DNA, 15 bp, Homo sapiens
agtaaaaggtgaaaa

SEQ ID NO: 1404568 - DNA, 15 bp, Homo sapiens
gagtaaaaggtgaaa

SEQ ID NO: 1404569 - DNA, 15 bp, Homo sapiens
agagtaaaaggtgaa

SEQ ID NO: 1404570 - DNA, 15 bp, Homo sapiens
aagagtaaaaggtga

SEQ ID NO: 1404571 - DNA, 15 bp, Homo sapiens
aaagagtaaaaggtg

SEQ ID NO: 1404572 - DNA, 15 bp, Homo sapiens
aaaagagtaaaaggt

SEQ ID NO: 1404573 - DNA, 15 bp, Homo sapiens
aaaaagagtaaaagg

SEQ ID NO: 1404574 - DNA, 15 bp, Homo sapiens
taaaaagagtaaaag

SEQ ID NO: 1404575 - DNA, 15 bp, Homo sapiens
ctaaaaagagtaaaa

SEQ ID NO: 1404576 - DNA, 15 bp, Homo sapiens
cctaaaaagagtaaa

SEQ ID NO: 1404577 - DNA, 15 bp, Homo sapiens
tcctaaaaagagtaa

SEQ ID NO: 1404578 - DNA, 15 bp, Homo sapiens
gtcctaaaaagagta

SEQ ID NO: 1404579 - DNA, 15 bp, Homo sapiens
ggtcctaaaaagagt

SEQ ID NO: 1404580 - DNA, 15 bp, Homo sapiens
aggtcctaaaaagag

SEQ ID NO: 1404581 - DNA, 15 bp, Homo sapiens
taggtcctaaaaaga

SEQ ID NO: 1404582 - DNA, 15 bp, Homo sapiens
ctaggtcctaaaaag

SEQ ID NO: 1404583 - DNA, 15 bp, Homo sapiens
tctaggtcctaaaaa

SEQ ID NO: 1404584 - DNA, 15 bp, Homo sapiens
ctctaggtcctaaaa

SEQ ID NO: 1404585 - DNA, 15 bp, Homo sapiens
gctctaggtcctaaa

SEQ ID NO: 1404586 - DNA, 15 bp, Homo sapiens
ggctctaggtcctaa

SEQ ID NO: 1404587 - DNA, 15 bp, Homo sapiens
tggctctaggtccta

SEQ ID NO: 1404588 - DNA, 15 bp, Homo sapiens
atggctctaggtcct

SEQ ID NO: 1404589 - DNA, 15 bp, Homo sapiens
gatggctctaggtcc

SEQ ID NO: 1404590 - DNA, 15 bp, Homo sapiens
ggatggctctaggtc

SEQ ID NO: 1404591 - DNA, 15 bp, Homo sapiens
aggatggctctaggt

SEQ ID NO: 1404592 - DNA, 15 bp, Homo sapiens
taggatggctctagg

SEQ ID NO: 1404593 - DNA, 15 bp, Homo sapiens
ctaggatggctctag

SEQ ID NO: 1404594 - DNA, 15 bp, Homo sapiens
cctaggatggctcta

SEQ ID NO: 1404595 - DNA, 15 bp, Homo sapiens
acctaggatggctct

SEQ ID NO: 1404596 - DNA, 15 bp, Homo sapiens
cacctaggatggctc

SEQ ID NO: 1404597 - DNA, 15 bp, Homo sapiens
tcacctaggatggct

SEQ ID NO: 1404598 - DNA, 15 bp, Homo sapiens
ttcacctaggatggc

SEQ ID NO: 1404599 - DNA, 15 bp, Homo sapiens
tttcacctaggatgg

SEQ ID NO: 1404600 - DNA, 15 bp, Homo sapiens
atttcacctaggatg

SEQ ID NO: 1404601 - DNA, 15 bp, Homo sapiens
tatttcacctaggat

SEQ ID NO: 1404602 - DNA, 15 bp, Homo sapiens
gtatttcacctagga

SEQ ID NO: 1404603 - DNA, 15 bp, Homo sapiens
cgtatttcacctagg

SEQ ID NO: 1404604 - DNA, 15 bp, Homo sapiens
acgtatttcacctag

SEQ ID NO: 1404605 - DNA, 15 bp, Homo sapiens
tacgtatttcaccta

SEQ ID NO: 1404606 - DNA, 15 bp, Homo sapiens
atacgtatttcacct

SEQ ID NO: 1404607 - DNA, 15 bp, Homo sapiens
catacgtatttcacc

SEQ ID NO: 1404608 - DNA, 15 bp, Homo sapiens
ccatacgtatttcac

SEQ ID NO: 1404609 - DNA, 15 bp, Homo sapiens
tccatacgtatttca

SEQ ID NO: 1404610 - DNA, 15 bp, Homo sapiens
ctccatacgtatttc

SEQ ID NO: 1404611 - DNA, 15 bp, Homo sapiens
tctccatacgtattt

SEQ ID NO: 1404612 - DNA, 15 bp, Homo sapiens
atctccatacgtatt

SEQ ID NO: 1404613 - DNA, 15 bp, Homo sapiens
tatctccatacgtat

SEQ ID NO: 1404614 - DNA, 15 bp, Homo sapiens
atatctccatacgta

SEQ ID NO: 1404615 - DNA, 15 bp, Homo sapiens
aatatctccatacgt

SEQ ID NO: 1404616 - DNA, 15 bp, Homo sapiens
aaatatctccatacg

SEQ ID NO: 1404617 - DNA, 15 bp, Homo sapiens
caaatatctccatac

SEQ ID NO: 1404618 - DNA, 15 bp, Homo sapiens
tcaaatatctccata

SEQ ID NO: 1404619 - DNA, 15 bp, Homo sapiens
atcaaatatctccat

SEQ ID NO: 1404620 - DNA, 15 bp, Homo sapiens
gatcaaatatctcca

SEQ ID NO: 1404621 - DNA, 15 bp, Homo sapiens
tgatcaaatatctcc

SEQ ID NO: 1404622 - DNA, 15 bp, Homo sapiens
ctgatcaaatatctc

SEQ ID NO: 1404623 - DNA, 15 bp, Homo sapiens
cctgatcaaatatct

SEQ ID NO: 1404624 - DNA, 15 bp, Homo sapiens
acctgatcaaatatc

SEQ ID NO: 1404625 - DNA, 15 bp, Homo sapiens
gacctgatcaaatat

SEQ ID NO: 1404626 - DNA, 15 bp, Homo sapiens
tgacctgatcaaata

SEQ ID NO: 1404627 - DNA, 15 bp, Homo sapiens
gtgacctgatcaaat

SEQ ID NO: 1404628 - DNA, 15 bp, Homo sapiens
ggtgacctgatcaaa

SEQ ID NO: 1404629 - DNA, 15 bp, Homo sapiens
tggtgacctgatcaa

SEQ ID NO: 1404630 - DNA, 15 bp, Homo sapiens
gtggtgacctgatca

SEQ ID NO: 1404631 - DNA, 15 bp, Homo sapiens
ggtggtgacctgatc

SEQ ID NO: 1404632 - DNA, 15 bp, Homo sapiens
gggtggtgacctgat

SEQ ID NO: 1404633 - DNA, 15 bp, Homo sapiens
tgggtggtgacctga

SEQ ID NO: 1404634 - DNA, 15 bp, Homo sapiens
ctgggtggtgacctg

SEQ ID NO: 1404635 - DNA, 15 bp, Homo sapiens
gctgggtggtgacct

SEQ ID NO: 1404636 - DNA, 15 bp, Homo sapiens
agctgggtggtgacc

SEQ ID NO: 1404637 - DNA, 15 bp, Homo sapiens
gagctgggtggtgac

SEQ ID NO: 1404638 - DNA, 15 bp, Homo sapiens
agagctgggtggtga

SEQ ID NO: 1404639 - DNA, 15 bp, Homo sapiens
gagagctgggtggtg

SEQ ID NO: 1404640 - DNA, 15 bp, Homo sapiens
ggagagctgggtggt

SEQ ID NO: 1404641 - DNA, 15 bp, Homo sapiens
aggagagctgggtgg

SEQ ID NO: 1404642 - DNA, 15 bp, Homo sapiens
caggagagctgggtg

SEQ ID NO: 1404643 - DNA, 15 bp, Homo sapiens
tcaggagagctgggt

SEQ ID NO: 1404644 - DNA, 15 bp, Homo sapiens
gtcaggagagctggg

SEQ ID NO: 1404645 - DNA, 15 bp, Homo sapiens
ggtcaggagagctgg

SEQ ID NO: 1404646 - DNA, 15 bp, Homo sapiens
aggtcaggagagctg

SEQ ID NO: 1404647 - DNA, 15 bp, Homo sapiens
gaggtcaggagagct

SEQ ID NO: 1404648 - DNA, 15 bp, Homo sapiens
ggaggtcaggagagc

SEQ ID NO: 1404649 - DNA, 15 bp, Homo sapiens
gggaggtcaggagag

SEQ ID NO: 1404650 - DNA, 15 bp, Homo sapiens
agggaggtcaggaga

SEQ ID NO: 1404651 - DNA, 15 bp, Homo sapiens
aagggaggtcaggag

SEQ ID NO: 1404652 - DNA, 15 bp, Homo sapiens
gaagggaggtcagga

SEQ ID NO: 1404653 - DNA, 15 bp, Homo sapiens
agaagggaggtcagg

SEQ ID NO: 1404654 - DNA, 15 bp, Homo sapiens
gagaagggaggtcag

SEQ ID NO: 1404655 - DNA, 15 bp, Homo sapiens
agagaagggaggtca

SEQ ID NO: 1404656 - DNA, 15 bp, Homo sapiens
gagagaagggaggtc

SEQ ID NO: 1404657 - DNA, 15 bp, Homo sapiens
ggagagaagggaggt

SEQ ID NO: 1404658 - DNA, 15 bp, Homo sapiens
aggagagaagggagg

SEQ ID NO: 1404659 - DNA, 15 bp, Homo sapiens
aaggagagaagggag

SEQ ID NO: 1404660 - DNA, 15 bp, Homo sapiens
taaggagagaaggga

SEQ ID NO: 1404661 - DNA, 15 bp, Homo sapiens
ttaaggagagaaggg

SEQ ID NO: 1404662 - DNA, 15 bp, Homo sapiens
tttaaggagagaagg

SEQ ID NO: 1404663 - DNA, 15 bp, Homo sapiens
atttaaggagagaag

SEQ ID NO: 1404664 - DNA, 15 bp, Homo sapiens
aatttaaggagagaa

SEQ ID NO: 1404665 - DNA, 15 bp, Homo sapiens
taatttaaggagaga

SEQ ID NO: 1404666 - DNA, 15 bp, Homo sapiens
ttaatttaaggagag

SEQ ID NO: 1404667 - DNA, 15 bp, Homo sapiens
gttaatttaaggaga

SEQ ID NO: 1404668 - DNA, 15 bp, Homo sapiens
tgttaatttaaggag

SEQ ID NO: 1404669 - DNA, 15 bp, Homo sapiens
atgttaatttaagga

SEQ ID NO: 1404670 - DNA, 15 bp, Homo sapiens
catgttaatttaagg

SEQ ID NO: 1404671 - DNA, 15 bp, Homo sapiens
gcatgttaatttaag

SEQ ID NO: 1404672 - DNA, 15 bp, Homo sapiens
ggcatgttaatttaa

SEQ ID NO: 1404673 - DNA, 15 bp, Homo sapiens
tggcatgttaattta

SEQ ID NO: 1404674 - DNA, 15 bp, Homo sapiens
ttggcatgttaattt

SEQ ID NO: 1404675 - DNA, 15 bp, Homo sapiens
tttggcatgttaatt

SEQ ID NO: 1404676 - DNA, 15 bp, Homo sapiens
atttggcatgttaat

SEQ ID NO: 1404677 - DNA, 15 bp, Homo sapiens
gatttggcatgttaa

SEQ ID NO: 1404678 - DNA, 15 bp, Homo sapiens
tgatttggcatgtta

SEQ ID NO: 1404679 - DNA, 15 bp, Homo sapiens
gtgatttggcatgtt

SEQ ID NO: 1404680 - DNA, 15 bp, Homo sapiens
tgtgatttggcatgt

SEQ ID NO: 1404681 - DNA, 15 bp, Homo sapiens
ctgtgatttggcatg

SEQ ID NO: 1404682 - DNA, 15 bp, Homo sapiens
gctgtgatttggcat

SEQ ID NO: 1404683 - DNA, 15 bp, Homo sapiens
tgctgtgatttggca

SEQ ID NO: 1404684 - DNA, 15 bp, Homo sapiens
atgctgtgatttggc

SEQ ID NO: 1404685 - DNA, 15 bp, Homo sapiens
gatgctgtgatttgg

SEQ ID NO: 1404686 - DNA, 15 bp, Homo sapiens
tgatgctgtgatttg

SEQ ID NO: 1404687 - DNA, 15 bp, Homo sapiens
gtgatgctgtgattt

SEQ ID NO: 1404688 - DNA, 15 bp, Homo sapiens
agtgatgctgtgatt

SEQ ID NO: 1404689 - DNA, 15 bp, Homo sapiens
cagtgatgctgtgat

SEQ ID NO: 1404690 - DNA, 15 bp, Homo sapiens
tcagtgatgctgtga

SEQ ID NO: 1404691 - DNA, 15 bp, Homo sapiens
gtcagtgatgctgtg

SEQ ID NO: 1404692 - DNA, 15 bp, Homo sapiens
agtcagtgatgctgt

SEQ ID NO: 1404693 - DNA, 15 bp, Homo sapiens
gagtcagtgatgctg

SEQ ID NO: 1404694 - DNA, 15 bp, Homo sapiens
ggagtcagtgatgct

SEQ ID NO: 1404695 - DNA, 15 bp, Homo sapiens
aggagtcagtgatgc

SEQ ID NO: 1404696 - DNA, 15 bp, Homo sapiens
aaggagtcagtgatg

SEQ ID NO: 1404697 - DNA, 15 bp, Homo sapiens
gaaggagtcagtgat

SEQ ID NO: 1404698 - DNA, 15 bp, Homo sapiens
ggaaggagtcagtga

SEQ ID NO: 1404699 - DNA, 15 bp, Homo sapiens
gggaaggagtcagtg

SEQ ID NO: 1404700 - DNA, 15 bp, Homo sapiens
agggaaggagtcagt

SEQ ID NO: 1404701 - DNA, 15 bp, Homo sapiens
gagggaaggagtcag

SEQ ID NO: 1404702 - DNA, 15 bp, Homo sapiens
ggagggaaggagtca

SEQ ID NO: 1404703 - DNA, 15 bp, Homo sapiens
gggagggaaggagtc

SEQ ID NO: 1404704 - DNA, 15 bp, Homo sapiens
cgggagggaaggagt

SEQ ID NO: 1404705 - DNA, 15 bp, Homo sapiens
tcgggagggaaggag

SEQ ID NO: 1404706 - DNA, 15 bp, Homo sapiens
atcgggagggaagga

SEQ ID NO: 1404707 - DNA, 15 bp, Homo sapiens
tatcgggagggaagg

SEQ ID NO: 1404708 - DNA, 15 bp, Homo sapiens
atatcgggagggaag

SEQ ID NO: 1404709 - DNA, 15 bp, Homo sapiens
catatcgggagggaa

SEQ ID NO: 1404710 - DNA, 15 bp, Homo sapiens
tcatatcgggaggga

SEQ ID NO: 1404711 - DNA, 15 bp, Homo sapiens
atcatatcgggaggg

SEQ ID NO: 1404712 - DNA, 15 bp, Homo sapiens
tatcatatcgggagg

SEQ ID NO: 1404713 - DNA, 15 bp, Homo sapiens
ttatcatatcgggag

SEQ ID NO: 1404714 - DNA, 15 bp, Homo sapiens
cttatcatatcggga

SEQ ID NO: 1404715 - DNA, 15 bp, Homo sapiens
tcttatcatatcggg

SEQ ID NO: 1404716 - DNA, 15 bp, Homo sapiens
ctcttatcatatcgg

SEQ ID NO: 1404717 - DNA, 15 bp, Homo sapiens
actcttatcatatcg

SEQ ID NO: 1404718 - DNA, 15 bp, Homo sapiens
cactcttatcatatc

SEQ ID NO: 1404719 - DNA, 15 bp, Homo sapiens
acactcttatcatat

SEQ ID NO: 1404720 - DNA, 15 bp, Homo sapiens
cacactcttatcata

SEQ ID NO: 1404721 - DNA, 15 bp, Homo sapiens
gcacactcttatcat

SEQ ID NO: 1404722 - DNA, 15 bp, Homo sapiens
tgcacactcttatca

SEQ ID NO: 1404723 - DNA, 15 bp, Homo sapiens
atgcacactcttatc

SEQ ID NO: 1404724 - DNA, 15 bp, Homo sapiens
aatgcacactcttat

SEQ ID NO: 1404725 - DNA, 15 bp, Homo sapiens
caatgcacactctta

SEQ ID NO: 1404726 - DNA, 15 bp, Homo sapiens
tcaatgcacactctt

SEQ ID NO: 1404727 - DNA, 15 bp, Homo sapiens
ttcaatgcacactct

SEQ ID NO: 1404728 - DNA, 15 bp, Homo sapiens
tttcaatgcacactc

SEQ ID NO: 1404729 - DNA, 15 bp, Homo sapiens
atttcaatgcacact

SEQ ID NO: 1404730 - DNA, 15 bp, Homo sapiens
catttcaatgcacac

SEQ ID NO: 1404731 - DNA, 15 bp, Homo sapiens
gcatttcaatgcaca

SEQ ID NO: 1404732 - DNA, 15 bp, Homo sapiens
tgcatttcaatgcac

SEQ ID NO: 1404733 - DNA, 15 bp, Homo sapiens
atgcatttcaatgca

SEQ ID NO: 1404734 - DNA, 15 bp, Homo sapiens
catgcatttcaatgc

SEQ ID NO: 1404735 - DNA, 15 bp, Homo sapiens
acatgcatttcaatg

SEQ ID NO: 1404736 - DNA, 15 bp, Homo sapiens
tacatgcatttcaat

SEQ ID NO: 1404737 - DNA, 15 bp, Homo sapiens
atacatgcatttcaa

SEQ ID NO: 1404738 - DNA, 15 bp, Homo sapiens
aatacatgcatttca

SEQ ID NO: 1404739 - DNA, 15 bp, Homo sapiens
aaatacatgcatttc

SEQ ID NO: 1404740 - DNA, 15 bp, Homo sapiens
aaaatacatgcattt

SEQ ID NO: 1404741 - DNA, 15 bp, Homo sapiens
taaaatacatgcatt

SEQ ID NO: 1404742 - DNA, 15 bp, Homo sapiens
gtaaaatacatgcat

SEQ ID NO: 1404743 - DNA, 15 bp, Homo sapiens
agtaaaatacatgca

SEQ ID NO: 1404744 - DNA, 15 bp, Homo sapiens
aagtaaaatacatgc

SEQ ID NO: 1404745 - DNA, 15 bp, Homo sapiens
taagtaaaatacatg

SEQ ID NO: 1404746 - DNA, 15 bp, Homo sapiens
ctaagtaaaatacat

SEQ ID NO: 1404747 - DNA, 15 bp, Homo sapiens
gctaagtaaaataca

SEQ ID NO: 1404748 - DNA, 15 bp, Homo sapiens
tgctaagtaaaatac

SEQ ID NO: 1404749 - DNA, 15 bp, Homo sapiens
ctgctaagtaaaata

SEQ ID NO: 1404750 - DNA, 15 bp, Homo sapiens
cctgctaagtaaaat

SEQ ID NO: 1404751 - DNA, 15 bp, Homo sapiens
ccctgctaagtaaaa

SEQ ID NO: 1404752 - DNA, 15 bp, Homo sapiens
tccctgctaagtaaa

SEQ ID NO: 1404753 - DNA, 15 bp, Homo sapiens
ttccctgctaagtaa

SEQ ID NO: 1404754 - DNA, 15 bp, Homo sapiens
tttccctgctaagta

SEQ ID NO: 1404755 - DNA, 15 bp, Homo sapiens
ctttccctgctaagt

SEQ ID NO: 1404756 - DNA, 15 bp, Homo sapiens
gctttccctgctaag

SEQ ID NO: 1404757 - DNA, 15 bp, Homo sapiens
agctttccctgctaa

SEQ ID NO: 1404758 - DNA, 15 bp, Homo sapiens
cagctttccctgcta

SEQ ID NO: 1404759 - DNA, 15 bp, Homo sapiens
tcagctttccctgct

SEQ ID NO: 1404760 - DNA, 15 bp, Homo sapiens
atcagctttccctgc

SEQ ID NO: 1404761 - DNA, 15 bp, Homo sapiens
aatcagctttccctg

SEQ ID NO: 1404762 - DNA, 15 bp, Homo sapiens
taatcagctttccct

SEQ ID NO: 1404763 - DNA, 15 bp, Homo sapiens
ctaatcagctttccc

SEQ ID NO: 1404764 - DNA, 15 bp, Homo sapiens
actaatcagctttcc

SEQ ID NO: 1404765 - DNA, 15 bp, Homo sapiens
cactaatcagctttc

SEQ ID NO: 1404766 - DNA, 15 bp, Homo sapiens
tcactaatcagcttt

SEQ ID NO: 1404767 - DNA, 15 bp, Homo sapiens
atcactaatcagctt

SEQ ID NO: 1404768 - DNA, 15 bp, Homo sapiens
aatcactaatcagct

SEQ ID NO: 1404769 - DNA, 15 bp, Homo sapiens
taatcactaatcagc

SEQ ID NO: 1404770 - DNA, 15 bp, Homo sapiens
ataatcactaatcag

SEQ ID NO: 1404771 - DNA, 15 bp, Homo sapiens
gataatcactaatca

SEQ ID NO: 1404772 - DNA, 15 bp, Homo sapiens
tgataatcactaatc

SEQ ID NO: 1404773 - DNA, 15 bp, Homo sapiens
gtgataatcactaat

SEQ ID NO: 1404774 - DNA, 15 bp, Homo sapiens
tgtgataatcactaa

SEQ ID NO: 1404775 - DNA, 15 bp, Homo sapiens
gtgtgataatcacta

SEQ ID NO: 1404776 - DNA, 15 bp, Homo sapiens
agtgtgataatcact

SEQ ID NO: 1404777 - DNA, 15 bp, Homo sapiens
aagtgtgataatcac

SEQ ID NO: 1404778 - DNA, 15 bp, Homo sapiens
taagtgtgataatca

SEQ ID NO: 1404779 - DNA, 15 bp, Homo sapiens
ttaagtgtgataatc

SEQ ID NO: 1404780 - DNA, 15 bp, Homo sapiens
gttaagtgtgataat

SEQ ID NO: 1404781 - DNA, 15 bp, Homo sapiens
ggttaagtgtgataa

SEQ ID NO: 1404782 - DNA, 15 bp, Homo sapiens
gggttaagtgtgata

SEQ ID NO: 1404783 - DNA, 15 bp, Homo sapiens
ggggttaagtgtgat

SEQ ID NO: 1404784 - DNA, 15 bp, Homo sapiens
aggggttaagtgtga

SEQ ID NO: 1404785 - DNA, 15 bp, Homo sapiens
taggggttaagtgtg

SEQ ID NO: 1404786 - DNA, 15 bp, Homo sapiens
ctaggggttaagtgt

SEQ ID NO: 1404787 - DNA, 15 bp, Homo sapiens
actaggggttaagtg

SEQ ID NO: 1404788 - DNA, 15 bp, Homo sapiens
cactaggggttaagt

SEQ ID NO: 1404789 - DNA, 15 bp, Homo sapiens
tcactaggggttaag

SEQ ID NO: 1404790 - DNA, 15 bp, Homo sapiens
ttcactaggggttaa

SEQ ID NO: 1404791 - DNA, 15 bp, Homo sapiens
attcactaggggtta

SEQ ID NO: 1404792 - DNA, 15 bp, Homo sapiens
gattcactaggggtt

SEQ ID NO: 1404793 - DNA, 15 bp, Homo sapiens
agattcactaggggt

SEQ ID NO: 1404794 - DNA, 15 bp, Homo sapiens
cagattcactagggg

SEQ ID NO: 1404795 - DNA, 15 bp, Homo sapiens
tcagattcactaggg

SEQ ID NO: 1404796 - DNA, 15 bp, Homo sapiens
atcagattcactagg

SEQ ID NO: 1404797 - DNA, 15 bp, Homo sapiens
catcagattcactag

SEQ ID NO: 1404798 - DNA, 15 bp, Homo sapiens
ccatcagattcacta

SEQ ID NO: 1404799 - DNA, 15 bp, Homo sapiens
tccatcagattcact

SEQ ID NO: 1404800 - DNA, 15 bp, Homo sapiens
atccatcagattcac

SEQ ID NO: 1404801 - DNA, 15 bp, Homo sapiens
aatccatcagattca

SEQ ID NO: 1404802 - DNA, 15 bp, Homo sapiens
taatccatcagattc

SEQ ID NO: 1404803 - DNA, 15 bp, Homo sapiens
ttaatccatcagatt

SEQ ID NO: 1404804 - DNA, 15 bp, Homo sapiens
gttaatccatcagat

SEQ ID NO: 1404805 - DNA, 15 bp, Homo sapiens
ggttaatccatcaga

SEQ ID NO: 1404806 - DNA, 15 bp, Homo sapiens
aggttaatccatcag

SEQ ID NO: 1404807 - DNA, 15 bp, Homo sapiens
caggttaatccatca

SEQ ID NO: 1404808 - DNA, 15 bp, Homo sapiens
gcaggttaatccatc

SEQ ID NO: 1404809 - DNA, 15 bp, Homo sapiens
agcaggttaatccat

SEQ ID NO: 1404810 - DNA, 15 bp, Homo sapiens
aagcaggttaatcca

SEQ ID NO: 1404811 - DNA, 15 bp, Homo sapiens
aaagcaggttaatcc

SEQ ID NO: 1404812 - DNA, 15 bp, Homo sapiens
gaaagcaggttaatc

SEQ ID NO: 1404813 - DNA, 15 bp, Homo sapiens
ggaaagcaggttaat

SEQ ID NO: 1404814 - DNA, 15 bp, Homo sapiens
tggaaagcaggttaa

SEQ ID NO: 1404815 - DNA, 15 bp, Homo sapiens
ctggaaagcaggtta

SEQ ID NO: 1404816 - DNA, 15 bp, Homo sapiens
cctggaaagcaggtt

SEQ ID NO: 1404817 - DNA, 15 bp, Homo sapiens
tcctggaaagcaggt

SEQ ID NO: 1404818 - DNA, 15 bp, Homo sapiens
gtcctggaaagcagg

SEQ ID NO: 1404819 - DNA, 15 bp, Homo sapiens
tgtcctggaaagcag

SEQ ID NO: 1404820 - DNA, 15 bp, Homo sapiens
gtgtcctggaaagca

SEQ ID NO: 1404821 - DNA, 15 bp, Homo sapiens
agtgtcctggaaagc

SEQ ID NO: 1404822 - DNA, 15 bp, Homo sapiens
tagtgtcctggaaag

SEQ ID NO: 1404823 - DNA, 15 bp, Homo sapiens
ttagtgtcctggaaa

SEQ ID NO: 1404824 - DNA, 15 bp, Homo sapiens
cttagtgtcctggaa

SEQ ID NO: 1404825 - DNA, 15 bp, Homo sapiens
ccttagtgtcctgga

SEQ ID NO: 1404826 - DNA, 15 bp, Homo sapiens
tccttagtgtcctgg

SEQ ID NO: 1404827 - DNA, 15 bp, Homo sapiens
ttccttagtgtcctg

SEQ ID NO: 1404828 - DNA, 15 bp, Homo sapiens
tttccttagtgtcct

SEQ ID NO: 1404829 - DNA, 15 bp, Homo sapiens
atttccttagtgtcc

SEQ ID NO: 1404830 - DNA, 15 bp, Homo sapiens
catttccttagtgtc

SEQ ID NO: 1404831 - DNA, 15 bp, Homo sapiens
ccatttccttagtgt

SEQ ID NO: 1404832 - DNA, 15 bp, Homo sapiens
cccatttccttagtg

SEQ ID NO: 1404833 - DNA, 15 bp, Homo sapiens
acccatttccttagt

SEQ ID NO: 1404834 - DNA, 15 bp, Homo sapiens
aacccatttccttag

SEQ ID NO: 1404835 - DNA, 15 bp, Homo sapiens
aaacccatttcctta

SEQ ID NO: 1404836 - DNA, 15 bp, Homo sapiens
taaacccatttcctt

SEQ ID NO: 1404837 - DNA, 15 bp, Homo sapiens
ttaaacccatttcct

SEQ ID NO: 1404838 - DNA, 15 bp, Homo sapiens
cttaaacccatttcc

SEQ ID NO: 1404839 - DNA, 15 bp, Homo sapiens
tcttaaacccatttc

SEQ ID NO: 1404840 - DNA, 15 bp, Homo sapiens
atcttaaacccattt

SEQ ID NO: 1404841 - DNA, 15 bp, Homo sapiens
tatcttaaacccatt

SEQ ID NO: 1404842 - DNA, 15 bp, Homo sapiens
ttatcttaaacccat

SEQ ID NO: 1404843 - DNA, 15 bp, Homo sapiens
cttatcttaaaccca

SEQ ID NO: 1404844 - DNA, 15 bp, Homo sapiens
tcttatcttaaaccc

SEQ ID NO: 1404845 - DNA, 15 bp, Homo sapiens
ttcttatcttaaacc

SEQ ID NO: 1404846 - DNA, 15 bp, Homo sapiens
tttcttatcttaaac

SEQ ID NO: 1404847 - DNA, 15 bp, Homo sapiens
atttcttatcttaaa

SEQ ID NO: 1404848 - DNA, 15 bp, Homo sapiens
tatttcttatcttaa

SEQ ID NO: 1404849 - DNA, 15 bp, Homo sapiens
atatttcttatctta

SEQ ID NO: 1404850 - DNA, 15 bp, Homo sapiens
gatatttcttatctt

SEQ ID NO: 1404851 - DNA, 15 bp, Homo sapiens
agatatttcttatct

SEQ ID NO: 1404852 - DNA, 15 bp, Homo sapiens
cagatatttcttatc

SEQ ID NO: 1404853 - DNA, 15 bp, Homo sapiens
ccagatatttcttat

SEQ ID NO: 1404854 - DNA, 15 bp, Homo sapiens
gccagatatttctta

SEQ ID NO: 1404855 - DNA, 15 bp, Homo sapiens
agccagatatttctt

SEQ ID NO: 1404856 - DNA, 15 bp, Homo sapiens
cagccagatatttct

SEQ ID NO: 1404857 - DNA, 15 bp, Homo sapiens
ccagccagatatttc

SEQ ID NO: 1404858 - DNA, 15 bp, Homo sapiens
cccagccagatattt

SEQ ID NO: 1404859 - DNA, 15 bp, Homo sapiens
acccagccagatatt

SEQ ID NO: 1404860 - DNA, 15 bp, Homo sapiens
cacccagccagatat

SEQ ID NO: 1404861 - DNA, 15 bp, Homo sapiens
gcacccagccagata

SEQ ID NO: 1404862 - DNA, 15 bp, Homo sapiens
aagccaccgcaccca

SEQ ID NO: 1404863 - DNA, 15 bp, Homo sapiens
aaagccaccgcaccc

SEQ ID NO: 1404864 - DNA, 15 bp, Homo sapiens
taaagccaccgcacc

SEQ ID NO: 1404865 - DNA, 15 bp, Homo sapiens
gtaaagccaccgcac

SEQ ID NO: 1404866 - DNA, 15 bp, Homo sapiens
cgtaaagccaccgca

SEQ ID NO: 1404867 - DNA, 15 bp, Homo sapiens
gcgtaaagccaccgc

SEQ ID NO: 1404868 - DNA, 15 bp, Homo sapiens
ggcgtaaagccaccg

SEQ ID NO: 1404869 - DNA, 15 bp, Homo sapiens
aggcgtaaagccacc

SEQ ID NO: 1404870 - DNA, 15 bp, Homo sapiens
caggcgtaaagccac

SEQ ID NO: 1404871 - DNA, 15 bp, Homo sapiens
acaggcgtaaagcca

SEQ ID NO: 1404872 - DNA, 15 bp, Homo sapiens
tacaggcgtaaagcc

SEQ ID NO: 1404873 - DNA, 15 bp, Homo sapiens
ttacaggcgtaaagc

SEQ ID NO: 1404874 - DNA, 15 bp, Homo sapiens
attacaggcgtaaag

SEQ ID NO: 1404875 - DNA, 15 bp, Homo sapiens
gattacaggcgtaaa

SEQ ID NO: 1404876 - DNA, 15 bp, Homo sapiens
acctgacctcgtgat

SEQ ID NO: 1404877 - DNA, 15 bp, Homo sapiens
cacctgacctcgtga

SEQ ID NO: 1404878 - DNA, 15 bp, Homo sapiens
tcacctgacctcgtg

SEQ ID NO: 1404879 - DNA, 15 bp, Homo sapiens
atcacctgacctcgt

SEQ ID NO: 1404880 - DNA, 15 bp, Homo sapiens
aatcacctgacctcg

SEQ ID NO: 1404881 - DNA, 15 bp, Homo sapiens
caatcacctgacctc

SEQ ID NO: 1404882 - DNA, 15 bp, Homo sapiens
tcaatcacctgacct

SEQ ID NO: 1404883 - DNA, 15 bp, Homo sapiens
ctcaatcacctgacc

SEQ ID NO: 1404884 - DNA, 15 bp, Homo sapiens
tctcaatcacctgac

SEQ ID NO: 1404885 - DNA, 15 bp, Homo sapiens
atctcaatcacctga

SEQ ID NO: 1404886 - DNA, 15 bp, Homo sapiens
gatctcaatcacctg

SEQ ID NO: 1404887 - DNA, 15 bp, Homo sapiens
tgatctcaatcacct

SEQ ID NO: 1404888 - DNA, 15 bp, Homo sapiens
atgatctcaatcacc

SEQ ID NO: 1404889 - DNA, 15 bp, Homo sapiens
gatgatctcaatcac

SEQ ID NO: 1404890 - DNA, 15 bp, Homo sapiens
ggatgatctcaatca

SEQ ID NO: 1404891 - DNA, 15 bp, Homo sapiens
aggatgatctcaatc

SEQ ID NO: 1404892 - DNA, 15 bp, Homo sapiens
caggatgatctcaat

SEQ ID NO: 1404893 - DNA, 15 bp, Homo sapiens
ccaggatgatctcaa

SEQ ID NO: 1404894 - DNA, 15 bp, Homo sapiens
gccaggatgatctca

SEQ ID NO: 1404895 - DNA, 15 bp, Homo sapiens
agccaggatgatctc

SEQ ID NO: 1404896 - DNA, 15 bp, Homo sapiens
tagccaggatgatct

SEQ ID NO: 1404897 - DNA, 15 bp, Homo sapiens
ttagccaggatgatc

SEQ ID NO: 1404898 - DNA, 15 bp, Homo sapiens
gttagccaggatgat

SEQ ID NO: 1404899 - DNA, 15 bp, Homo sapiens
tgttagccaggatga

SEQ ID NO: 1404900 - DNA, 15 bp, Homo sapiens
tcgtgttagccagga

SEQ ID NO: 1404901 - DNA, 15 bp, Homo sapiens
atcgtgttagccagg

SEQ ID NO: 1404902 - DNA, 15 bp, Homo sapiens
catcgtgttagccag

SEQ ID NO: 1404903 - DNA, 15 bp, Homo sapiens
tcatcgtgttagcca

SEQ ID NO: 1404904 - DNA, 15 bp, Homo sapiens
ttcatcgtgttagcc

SEQ ID NO: 1404905 - DNA, 15 bp, Homo sapiens
tttcatcgtgttagc

SEQ ID NO: 1404906 - DNA, 15 bp, Homo sapiens
gtttcatcgtgttag

SEQ ID NO: 1404907 - DNA, 15 bp, Homo sapiens
ggtttcatcgtgtta

SEQ ID NO: 1404908 - DNA, 15 bp, Homo sapiens
gggtttcatcgtgtt

SEQ ID NO: 1404909 - DNA, 15 bp, Homo sapiens
ggggtttcatcgtgt

SEQ ID NO: 1404910 - DNA, 15 bp, Homo sapiens
gggggtttcatcgtg

SEQ ID NO: 1404911 - DNA, 15 bp, Homo sapiens
agggggtttcatcgt

SEQ ID NO: 1404912 - DNA, 15 bp, Homo sapiens
gagggggtttcatcg

SEQ ID NO: 1404913 - DNA, 15 bp, Homo sapiens
agagggggtttcatc

SEQ ID NO: 1404914 - DNA, 15 bp, Homo sapiens
aagagggggtttcat

SEQ ID NO: 1404915 - DNA, 15 bp, Homo sapiens
aaagagggggtttca

SEQ ID NO: 1404916 - DNA, 15 bp, Homo sapiens
taaagagggggtttc

SEQ ID NO: 1404917 - DNA, 15 bp, Homo sapiens
gtaaagagggggttt

SEQ ID NO: 1404918 - DNA, 15 bp, Homo sapiens
agtaaagagggggtt

SEQ ID NO: 1404919 - DNA, 15 bp, Homo sapiens
tagtaaagagggggt

SEQ ID NO: 1404920 - DNA, 15 bp, Homo sapiens
ttagtaaagaggggg

SEQ ID NO: 1404921 - DNA, 15 bp, Homo sapiens
tttagtaaagagggg

SEQ ID NO: 1404922 - DNA, 15 bp, Homo sapiens
ttttagtaaagaggg

SEQ ID NO: 1404923 - DNA, 15 bp, Homo sapiens
tttttagtaaagagg

SEQ ID NO: 1404924 - DNA, 15 bp, Homo sapiens
atttttagtaaagag

SEQ ID NO: 1404925 - DNA, 15 bp, Homo sapiens
acccggctaattttt

SEQ ID NO: 1404926 - DNA, 15 bp, Homo sapiens
cacccggctaatttt

SEQ ID NO: 1404927 - DNA, 15 bp, Homo sapiens
acacccggctaattt

SEQ ID NO: 1404928 - DNA, 15 bp, Homo sapiens
cacacccggctaatt

SEQ ID NO: 1404929 - DNA, 15 bp, Homo sapiens
ccacacccggctaat

SEQ ID NO: 1404930 - DNA, 15 bp, Homo sapiens
accacacccggctaa

SEQ ID NO: 1404931 - DNA, 15 bp, Homo sapiens
caccacacccggcta

SEQ ID NO: 1404932 - DNA, 15 bp, Homo sapiens
cgccaccacacccgg

SEQ ID NO: 1404933 - DNA, 15 bp, Homo sapiens
cccgccaccacaccc

SEQ ID NO: 1404934 - DNA, 15 bp, Homo sapiens
cgcccgccaccacac

SEQ ID NO: 1404935 - DNA, 15 bp, Homo sapiens
gcgcccgccaccaca

SEQ ID NO: 1404936 - DNA, 15 bp, Homo sapiens
ccaggcgcccgccac

SEQ ID NO: 1404937 - DNA, 15 bp, Homo sapiens
tccaggcgcccgcca

SEQ ID NO: 1404938 - DNA, 15 bp, Homo sapiens
ctccaggcgcccgcc

SEQ ID NO: 1404939 - DNA, 15 bp, Homo sapiens
actccaggcgcccgc

SEQ ID NO: 1404940 - DNA, 15 bp, Homo sapiens
gactccaggcgcccg

SEQ ID NO: 1404941 - DNA, 15 bp, Homo sapiens
ggactccaggcgccc

SEQ ID NO: 1404942 - DNA, 15 bp, Homo sapiens
gggactccaggcgcc

SEQ ID NO: 1404943 - DNA, 15 bp, Homo sapiens
tgggactccaggcgc

SEQ ID NO: 1404944 - DNA, 15 bp, Homo sapiens
ctgggactccaggcg

SEQ ID NO: 1404945 - DNA, 15 bp, Homo sapiens
gctgggactccaggc

SEQ ID NO: 1404946 - DNA, 15 bp, Homo sapiens
agctgggactccagg

SEQ ID NO: 1404947 - DNA, 15 bp, Homo sapiens
tagctgggactccag

SEQ ID NO: 1404948 - DNA, 15 bp, Homo sapiens
gtagctgggactcca

SEQ ID NO: 1404949 - DNA, 15 bp, Homo sapiens
agtagctgggactcc

SEQ ID NO: 1404950 - DNA, 15 bp, Homo sapiens
gagtagctgggactc

SEQ ID NO: 1404951 - DNA, 15 bp, Homo sapiens
cattctcttgcctca

SEQ ID NO: 1404952 - DNA, 15 bp, Homo sapiens
ccattctcttgcctc

SEQ ID NO: 1404953 - DNA, 15 bp, Homo sapiens
accattctcttgcct

SEQ ID NO: 1404954 - DNA, 15 bp, Homo sapiens
caccattctcttgcc

SEQ ID NO: 1404955 - DNA, 15 bp, Homo sapiens
acaccattctcttgc

SEQ ID NO: 1404956 - DNA, 15 bp, Homo sapiens
cacaccattctcttg

SEQ ID NO: 1404957 - DNA, 15 bp, Homo sapiens
tcacaccattctctt

SEQ ID NO: 1404958 - DNA, 15 bp, Homo sapiens
ttcacaccattctct

SEQ ID NO: 1404959 - DNA, 15 bp, Homo sapiens
gggcacaatctcagc

SEQ ID NO: 1404960 - DNA, 15 bp, Homo sapiens
tgggcacaatctcag

SEQ ID NO: 1404961 - DNA, 15 bp, Homo sapiens
gtgggcacaatctca

SEQ ID NO: 1404962 - DNA, 15 bp, Homo sapiens
ggtgggcacaatctc

SEQ ID NO: 1404963 - DNA, 15 bp, Homo sapiens
cggtgggcacaatct

SEQ ID NO: 1404964 - DNA, 15 bp, Homo sapiens
gcggtgggcacaatc

SEQ ID NO: 1404965 - DNA, 15 bp, Homo sapiens
tgcggtgggcacaat

SEQ ID NO: 1404966 - DNA, 15 bp, Homo sapiens
atgcggtgggcacaa

SEQ ID NO: 1404967 - DNA, 15 bp, Homo sapiens
aatgcggtgggcaca

SEQ ID NO: 1404968 - DNA, 15 bp, Homo sapiens
gaatgcggtgggcac

SEQ ID NO: 1404969 - DNA, 15 bp, Homo sapiens
ggaatgcggtgggca

SEQ ID NO: 1404970 - DNA, 15 bp, Homo sapiens
tggaatgcggtgggc

SEQ ID NO: 1404971 - DNA, 15 bp, Homo sapiens
ctggaatgcggtggg

SEQ ID NO: 1404972 - DNA, 15 bp, Homo sapiens
gctggaatgcggtgg

SEQ ID NO: 1404973 - DNA, 15 bp, Homo sapiens
ggctggaatgcggtg

SEQ ID NO: 1404974 - DNA, 15 bp, Homo sapiens
aggctggaatgcggt

SEQ ID NO: 1404975 - DNA, 15 bp, Homo sapiens
caggctggaatgcgg

SEQ ID NO: 1404976 - DNA, 15 bp, Homo sapiens
ccaggctggaatgcg

SEQ ID NO: 1404977 - DNA, 15 bp, Homo sapiens
tgcccaggctggaat

SEQ ID NO: 1404978 - DNA, 15 bp, Homo sapiens
tagtctcactctgtt

SEQ ID NO: 1404979 - DNA, 15 bp, Homo sapiens
gtagtctcactctgt

SEQ ID NO: 1404980 - DNA, 15 bp, Homo sapiens
tgtagtctcactctg

SEQ ID NO: 1404981 - DNA, 15 bp, Homo sapiens
atgtagtctcactct

SEQ ID NO: 1404982 - DNA, 15 bp, Homo sapiens
gatgtagtctcactc

SEQ ID NO: 1404983 - DNA, 15 bp, Homo sapiens
agatgtagtctcact

SEQ ID NO: 1404984 - DNA, 15 bp, Homo sapiens
gagatgtagtctcac

SEQ ID NO: 1404985 - DNA, 15 bp, Homo sapiens
tgagatgtagtctca

SEQ ID NO: 1404986 - DNA, 15 bp, Homo sapiens
ttgagatgtagtctc

SEQ ID NO: 1404987 - DNA, 15 bp, Homo sapiens
tttgagatgtagtct

SEQ ID NO: 1404988 - DNA, 15 bp, Homo sapiens
ttttgagatgtagtc

SEQ ID NO: 1404989 - DNA, 15 bp, Homo sapiens
tttttgagatgtagt

SEQ ID NO: 1404990 - DNA, 15 bp, Homo sapiens
ttttttgagatgtag

SEQ ID NO: 1404991 - DNA, 15 bp, Homo sapiens
tttttttgagatgta

SEQ ID NO: 1404992 - DNA, 15 bp, Homo sapiens
ttttttttgagatgt

SEQ ID NO: 1404993 - DNA, 15 bp, Homo sapiens
cttactttttttttt

SEQ ID NO: 1404994 - DNA, 15 bp, Homo sapiens
tcttacttttttttt

SEQ ID NO: 1404995 - DNA, 15 bp, Homo sapiens
ttcttactttttttt

SEQ ID NO: 1404996 - DNA, 15 bp, Homo sapiens
tttcttacttttttt

SEQ ID NO: 1404997 - DNA, 15 bp, Homo sapiens
atttcttactttttt

SEQ ID NO: 1404998 - DNA, 15 bp, Homo sapiens
catttcttacttttt

SEQ ID NO: 1404999 - DNA, 15 bp, Homo sapiens
acatttcttactttt

SEQ ID NO: 1405000 - DNA, 15 bp, Homo sapiens
gacatttcttacttt

SEQ ID NO: 1405001 - DNA, 15 bp, Homo sapiens
ggacatttcttactt

SEQ ID NO: 1405002 - DNA, 15 bp, Homo sapiens
tggacatttcttact

SEQ ID NO: 1405003 - DNA, 15 bp, Homo sapiens
atggacatttcttac

SEQ ID NO: 1405004 - DNA, 15 bp, Homo sapiens
catggacatttctta

SEQ ID NO: 1405005 - DNA, 15 bp, Homo sapiens
tcatggacatttctt

SEQ ID NO: 1405006 - DNA, 15 bp, Homo sapiens
ttcatggacatttct

SEQ ID NO: 1405007 - DNA, 15 bp, Homo sapiens
tttcatggacatttc

SEQ ID NO: 1405008 - DNA, 15 bp, Homo sapiens
ctttcatggacattt

SEQ ID NO: 1405009 - DNA, 15 bp, Homo sapiens
cctttcatggacatt

SEQ ID NO: 1405010 - DNA, 15 bp, Homo sapiens
ccctttcatggacat

SEQ ID NO: 1405011 - DNA, 15 bp, Homo sapiens
tccctttcatggaca

SEQ ID NO: 1405012 - DNA, 15 bp, Homo sapiens
ctccctttcatggac

SEQ ID NO: 1405013 - DNA, 15 bp, Homo sapiens
tctccctttcatgga

SEQ ID NO: 1405014 - DNA, 15 bp, Homo sapiens
gtctccctttcatgg

SEQ ID NO: 1405015 - DNA, 15 bp, Homo sapiens
ggtctccctttcatg

SEQ ID NO: 1405016 - DNA, 15 bp, Homo sapiens
gggtctccctttcat

SEQ ID NO: 1405017 - DNA, 15 bp, Homo sapiens
agggtctccctttca

SEQ ID NO: 1405018 - DNA, 15 bp, Homo sapiens
cagggtctccctttc

SEQ ID NO: 1405019 - DNA, 15 bp, Homo sapiens
ccagggtctcccttt

SEQ ID NO: 1405020 - DNA, 15 bp, Homo sapiens
cccagggtctccctt

SEQ ID NO: 1405021 - DNA, 15 bp, Homo sapiens
ccccagggtctccct

SEQ ID NO: 1405022 - DNA, 15 bp, Homo sapiens
cccccagggtctccc

SEQ ID NO: 1405023 - DNA, 15 bp, Homo sapiens
tcccccagggtctcc

SEQ ID NO: 1405024 - DNA, 15 bp, Homo sapiens
ttcccccagggtctc

SEQ ID NO: 1405025 - DNA, 15 bp, Homo sapiens
tttcccccagggtct

SEQ ID NO: 1405026 - DNA, 15 bp, Homo sapiens
ctttcccccagggtc

SEQ ID NO: 1405027 - DNA, 15 bp, Homo sapiens
cctttcccccagggt

SEQ ID NO: 1405028 - DNA, 15 bp, Homo sapiens
tcctttcccccaggg

SEQ ID NO: 1405029 - DNA, 15 bp, Homo sapiens
ttcctttcccccagg

SEQ ID NO: 1405030 - DNA, 15 bp, Homo sapiens
gttcctttcccccag

SEQ ID NO: 1405031 - DNA, 15 bp, Homo sapiens
tgttcctttccccca

SEQ ID NO: 1405032 - DNA, 15 bp, Homo sapiens
ttgttcctttccccc

SEQ ID NO: 1405033 - DNA, 15 bp, Homo sapiens
attgttcctttcccc

SEQ ID NO: 1405034 - DNA, 15 bp, Homo sapiens
tattgttcctttccc

SEQ ID NO: 1405035 - DNA, 15 bp, Homo sapiens
ttattgttcctttcc

SEQ ID NO: 1405036 - DNA, 15 bp, Homo sapiens
gttattgttcctttc

SEQ ID NO: 1405037 - DNA, 15 bp, Homo sapiens
agttattgttccttt

SEQ ID NO: 1405038 - DNA, 15 bp, Homo sapiens
cagttattgttcctt

SEQ ID NO: 1405039 - DNA, 15 bp, Homo sapiens
gcagttattgttcct

SEQ ID NO: 1405040 - DNA, 15 bp, Homo sapiens
tgcagttattgttcc

SEQ ID NO: 1405041 - DNA, 15 bp, Homo sapiens
ctgcagttattgttc

SEQ ID NO: 1405042 - DNA, 15 bp, Homo sapiens
gctgcagttattgtt

SEQ ID NO: 1405043 - DNA, 15 bp, Homo sapiens
agctgcagttattgt

SEQ ID NO: 1405044 - DNA, 15 bp, Homo sapiens
gagctgcagttattg

SEQ ID NO: 1405045 - DNA, 15 bp, Homo sapiens
agagctgcagttatt

SEQ ID NO: 1405046 - DNA, 15 bp, Homo sapiens
cagagctgcagttat

SEQ ID NO: 1405047 - DNA, 15 bp, Homo sapiens
tcagagctgcagtta

SEQ ID NO: 1405048 - DNA, 15 bp, Homo sapiens
ctcagagctgcagtt

SEQ ID NO: 1405049 - DNA, 15 bp, Homo sapiens
cctcagagctgcagt

SEQ ID NO: 1405050 - DNA, 15 bp, Homo sapiens
tcctcagagctgcag

SEQ ID NO: 1405051 - DNA, 15 bp, Homo sapiens
atcctcagagctgca

SEQ ID NO: 1405052 - DNA, 15 bp, Homo sapiens
gatcctcagagctgc

SEQ ID NO: 1405053 - DNA, 15 bp, Homo sapiens
agatcctcagagctg

SEQ ID NO: 1405054 - DNA, 15 bp, Homo sapiens
cagatcctcagagct

SEQ ID NO: 1405055 - DNA, 15 bp, Homo sapiens
ccagatcctcagagc

SEQ ID NO: 1405056 - DNA, 15 bp, Homo sapiens
gccagatcctcagag

SEQ ID NO: 1405057 - DNA, 15 bp, Homo sapiens
tgccagatcctcaga

SEQ ID NO: 1405058 - DNA, 15 bp, Homo sapiens
gtgccagatcctcag

SEQ ID NO: 1405059 - DNA, 15 bp, Homo sapiens
ggtgccagatcctca

SEQ ID NO: 1405060 - DNA, 15 bp, Homo sapiens
tggtgccagatcctc

SEQ ID NO: 1405061 - DNA, 15 bp, Homo sapiens
ctggtgccagatcct

SEQ ID NO: 1405062 - DNA, 15 bp, Homo sapiens
gctggtgccagatcc

SEQ ID NO: 1405063 - DNA, 15 bp, Homo sapiens
tgctggtgccagatc

SEQ ID NO: 1405064 - DNA, 15 bp, Homo sapiens
ctgctggtgccagat

SEQ ID NO: 1405065 - DNA, 15 bp, Homo sapiens
gctgctggtgccaga

SEQ ID NO: 1405066 - DNA, 15 bp, Homo sapiens
tgctgctggtgccag

SEQ ID NO: 1405067 - DNA, 15 bp, Homo sapiens
gtgctgctggtgcca

SEQ ID NO: 1405068 - DNA, 15 bp, Homo sapiens
ggtgctgctggtgcc

SEQ ID NO: 1405069 - DNA, 15 bp, Homo sapiens
tggtgctgctggtgc

SEQ ID NO: 1405070 - DNA, 15 bp, Homo sapiens
ctggtgctgctggtg

SEQ ID NO: 1405071 - DNA, 15 bp, Homo sapiens
gctggtgctgctggt

SEQ ID NO: 1405072 - DNA, 15 bp, Homo sapiens
tgctggtgctgctgg

SEQ ID NO: 1405073 - DNA, 15 bp, Homo sapiens
gtgctggtgctgctg

SEQ ID NO: 1405074 - DNA, 15 bp, Homo sapiens
tgtgctggtgctgct

SEQ ID NO: 1405075 - DNA, 15 bp, Homo sapiens
ctgtgctggtgctgc

SEQ ID NO: 1405076 - DNA, 15 bp, Homo sapiens
tctgtgctggtgctg

SEQ ID NO: 1405077 - DNA, 15 bp, Homo sapiens
ctctgtgctggtgct

SEQ ID NO: 1405078 - DNA, 15 bp, Homo sapiens
cctctgtgctggtgc

SEQ ID NO: 1405079 - DNA, 15 bp, Homo sapiens
ccctctgtgctggtg

SEQ ID NO: 1405080 - DNA, 15 bp, Homo sapiens
tccctctgtgctggt

SEQ ID NO: 1405081 - DNA, 15 bp, Homo sapiens
atccctctgtgctgg

SEQ ID NO: 1405082 - DNA, 15 bp, Homo sapiens
catccctctgtgctg

SEQ ID NO: 1405083 - DNA, 15 bp, Homo sapiens
gcatccctctgtgct

SEQ ID NO: 1405084 - DNA, 15 bp, Homo sapiens
agcatccctctgtgc

SEQ ID NO: 1405085 - DNA, 15 bp, Homo sapiens
cagcatccctctgtg

SEQ ID NO: 1405086 - DNA, 15 bp, Homo sapiens
acagcatccctctgt

SEQ ID NO: 1405087 - DNA, 15 bp, Homo sapiens
tacagcatccctctg

SEQ ID NO: 1405088 - DNA, 15 bp, Homo sapiens
gtacagcatccctct

SEQ ID NO: 1405089 - DNA, 15 bp, Homo sapiens
tgtacagcatccctc

SEQ ID NO: 1405090 - DNA, 15 bp, Homo sapiens
ttgtacagcatccct

SEQ ID NO: 1405091 - DNA, 15 bp, Homo sapiens
gttgtacagcatccc

SEQ ID NO: 1405092 - DNA, 15 bp, Homo sapiens
ggttgtacagcatcc

SEQ ID NO: 1405093 - DNA, 15 bp, Homo sapiens
tggttgtacagcatc

SEQ ID NO: 1405094 - DNA, 15 bp, Homo sapiens
atggttgtacagcat

SEQ ID NO: 1405095 - DNA, 15 bp, Homo sapiens
aatggttgtacagca

SEQ ID NO: 1405096 - DNA, 15 bp, Homo sapiens
taatggttgtacagc

SEQ ID NO: 1405097 - DNA, 15 bp, Homo sapiens
ataatggttgtacag

SEQ ID NO: 1405098 - DNA, 15 bp, Homo sapiens
aataatggttgtaca

SEQ ID NO: 1405099 - DNA, 15 bp, Homo sapiens
caataatggttgtac

SEQ ID NO: 1405100 - DNA, 15 bp, Homo sapiens
tcaataatggttgta

SEQ ID NO: 1405101 - DNA, 15 bp, Homo sapiens
atcaataatggttgt

SEQ ID NO: 1405102 - DNA, 15 bp, Homo sapiens
aatcaataatggttg

SEQ ID NO: 1405103 - DNA, 15 bp, Homo sapiens
aaatcaataatggtt

SEQ ID NO: 1405104 - DNA, 15 bp, Homo sapiens
aaaatcaataatggt

SEQ ID NO: 1405105 - DNA, 15 bp, Homo sapiens
taaaatcaataatgg

SEQ ID NO: 1405106 - DNA, 15 bp, Homo sapiens
ttaaaatcaataatg

SEQ ID NO: 1405107 - DNA, 15 bp, Homo sapiens
gttaaaatcaataat

SEQ ID NO: 1405108 - DNA, 15 bp, Homo sapiens
agttaaaatcaataa

SEQ ID NO: 1405109 - DNA, 15 bp, Homo sapiens
aagttaaaatcaata

SEQ ID NO: 1405110 - DNA, 15 bp, Homo sapiens
aaagttaaaatcaat

SEQ ID NO: 1405111 - DNA, 15 bp, Homo sapiens
taaagttaaaatcaa

SEQ ID NO: 1405112 - DNA, 15 bp, Homo sapiens
gtaaagttaaaatca

SEQ ID NO: 1405113 - DNA, 15 bp, Homo sapiens
tgtaaagttaaaatc

SEQ ID NO: 1405114 - DNA, 15 bp, Homo sapiens
ttgtaaagttaaaat

SEQ ID NO: 1405115 - DNA, 15 bp, Homo sapiens
gttgtaaagttaaaa

SEQ ID NO: 1405116 - DNA, 15 bp, Homo sapiens
tgttgtaaagttaaa

SEQ ID NO: 1405117 - DNA, 15 bp, Homo sapiens
ctgttgtaaagttaa

SEQ ID NO: 1405118 - DNA, 15 bp, Homo sapiens
actgttgtaaagtta

SEQ ID NO: 1405119 - DNA, 15 bp, Homo sapiens
aactgttgtaaagtt

SEQ ID NO: 1405120 - DNA, 15 bp, Homo sapiens
gaactgttgtaaagt

SEQ ID NO: 1405121 - DNA, 15 bp, Homo sapiens
agaactgttgtaaag

SEQ ID NO: 1405122 - DNA, 15 bp, Homo sapiens
aagaactgttgtaaa

SEQ ID NO: 1405123 - DNA, 15 bp, Homo sapiens
gaagaactgttgtaa

SEQ ID NO: 1405124 - DNA, 15 bp, Homo sapiens
tgaagaactgttgta

SEQ ID NO: 1405125 - DNA, 15 bp, Homo sapiens
ttgaagaactgttgt

SEQ ID NO: 1405126 - DNA, 15 bp, Homo sapiens
tttgaagaactgttg

SEQ ID NO: 1405127 - DNA, 15 bp, Homo sapiens
ctttgaagaactgtt

SEQ ID NO: 1405128 - DNA, 15 bp, Homo sapiens
cctttgaagaactgt

SEQ ID NO: 1405129 - DNA, 15 bp, Homo sapiens
tcctttgaagaactg

SEQ ID NO: 1405130 - DNA, 15 bp, Homo sapiens
ctcctttgaagaact

SEQ ID NO: 1405131 - DNA, 15 bp, Homo sapiens
tctcctttgaagaac

SEQ ID NO: 1405132 - DNA, 15 bp, Homo sapiens
ctctcctttgaagaa

SEQ ID NO: 1405133 - DNA, 15 bp, Homo sapiens
tctctcctttgaaga

SEQ ID NO: 1405134 - DNA, 15 bp, Homo sapiens
ctctctcctttgaag

SEQ ID NO: 1405135 - DNA, 15 bp, Homo sapiens
tctctctcctttgaa

SEQ ID NO: 1405136 - DNA, 15 bp, Homo sapiens
ctctctctcctttga

SEQ ID NO: 1405137 - DNA, 15 bp, Homo sapiens
actctctctcctttg

SEQ ID NO: 1405138 - DNA, 15 bp, Homo sapiens
aactctctctccttt

SEQ ID NO: 1405139 - DNA, 15 bp, Homo sapiens
gaactctctctcctt

SEQ ID NO: 1405140 - DNA, 15 bp, Homo sapiens
ggaactctctctcct

SEQ ID NO: 1405141 - DNA, 15 bp, Homo sapiens
gggaactctctctcc

SEQ ID NO: 1405142 - DNA, 15 bp, Homo sapiens
agggaactctctctc

SEQ ID NO: 1405143 - DNA, 15 bp, Homo sapiens
cagggaactctctct

SEQ ID NO: 1405144 - DNA, 15 bp, Homo sapiens
acagggaactctctc

SEQ ID NO: 1405145 - DNA, 15 bp, Homo sapiens
aacagggaactctct

SEQ ID NO: 1405146 - DNA, 15 bp, Homo sapiens
aaacagggaactctc

SEQ ID NO: 1405147 - DNA, 15 bp, Homo sapiens
aaaacagggaactct

SEQ ID NO: 1405148 - DNA, 15 bp, Homo sapiens
taaaacagggaactc

SEQ ID NO: 1405149 - DNA, 15 bp, Homo sapiens
gtaaaacagggaact

SEQ ID NO: 1405150 - DNA, 15 bp, Homo sapiens
agtaaaacagggaac

SEQ ID NO: 1405151 - DNA, 15 bp, Homo sapiens
cagtaaaacagggaa

SEQ ID NO: 1405152 - DNA, 15 bp, Homo sapiens
tcagtaaaacaggga

SEQ ID NO: 1405153 - DNA, 15 bp, Homo sapiens
ttcagtaaaacaggg

SEQ ID NO: 1405154 - DNA, 15 bp, Homo sapiens
cttcagtaaaacagg

SEQ ID NO: 1405155 - DNA, 15 bp, Homo sapiens
tcttcagtaaaacag

SEQ ID NO: 1405156 - DNA, 15 bp, Homo sapiens
ctcttcagtaaaaca

SEQ ID NO: 1405157 - DNA, 15 bp, Homo sapiens
tctcttcagtaaaac

SEQ ID NO: 1405158 - DNA, 15 bp, Homo sapiens
ttctcttcagtaaaa

SEQ ID NO: 1405159 - DNA, 15 bp, Homo sapiens
tttctcttcagtaaa

SEQ ID NO: 1405160 - DNA, 15 bp, Homo sapiens
ctttctcttcagtaa

SEQ ID NO: 1405161 - DNA, 15 bp, Homo sapiens
gctttctcttcagta

SEQ ID NO: 1405162 - DNA, 15 bp, Homo sapiens
ggctttctcttcagt

SEQ ID NO: 1405163 - DNA, 15 bp, Homo sapiens
gggctttctcttcag

SEQ ID NO: 1405164 - DNA, 15 bp, Homo sapiens
tgggctttctcttca

SEQ ID NO: 1405165 - DNA, 15 bp, Homo sapiens
atgggctttctcttc

SEQ ID NO: 1405166 - DNA, 15 bp, Homo sapiens
aatgggctttctctt

SEQ ID NO: 1405167 - DNA, 15 bp, Homo sapiens
aaatgggctttctct

SEQ ID NO: 1405168 - DNA, 15 bp, Homo sapiens
caaatgggctttctc

SEQ ID NO: 1405169 - DNA, 15 bp, Homo sapiens
ccaaatgggctttct

SEQ ID NO: 1405170 - DNA, 15 bp, Homo sapiens
accaaatgggctttc

SEQ ID NO: 1405171 - DNA, 15 bp, Homo sapiens
taccaaatgggcttt

SEQ ID NO: 1405172 - DNA, 15 bp, Homo sapiens
ctaccaaatgggctt

SEQ ID NO: 1405173 - DNA, 15 bp, Homo sapiens
actaccaaatgggct

SEQ ID NO: 1405174 - DNA, 15 bp, Homo sapiens
cactaccaaatgggc

SEQ ID NO: 1405175 - DNA, 15 bp, Homo sapiens
tcactaccaaatggg

SEQ ID NO: 1405176 - DNA, 15 bp, Homo sapiens
ttcactaccaaatgg

SEQ ID NO: 1405177 - DNA, 15 bp, Homo sapiens
tttcactaccaaatg

SEQ ID NO: 1405178 - DNA, 15 bp, Homo sapiens
atttcactaccaaat

SEQ ID NO: 1405179 - DNA, 15 bp, Homo sapiens
tatttcactaccaaa

SEQ ID NO: 1405180 - DNA, 15 bp, Homo sapiens
gtatttcactaccaa

SEQ ID NO: 1405181 - DNA, 15 bp, Homo sapiens
ggtatttcactacca

SEQ ID NO: 1405182 - DNA, 15 bp, Homo sapiens
tggtatttcactacc

SEQ ID NO: 1405183 - DNA, 15 bp, Homo sapiens
atggtatttcactac

SEQ ID NO: 1405184 - DNA, 15 bp, Homo sapiens
aatggtatttcacta

SEQ ID NO: 1405185 - DNA, 15 bp, Homo sapiens
gaatggtatttcact

SEQ ID NO: 1405186 - DNA, 15 bp, Homo sapiens
ggaatggtatttcac

SEQ ID NO: 1405187 - DNA, 15 bp, Homo sapiens
gggaatggtatttca

SEQ ID NO: 1405188 - DNA, 15 bp, Homo sapiens
tgggaatggtatttc

SEQ ID NO: 1405189 - DNA, 15 bp, Homo sapiens
ttgggaatggtattt

SEQ ID NO: 1405190 - DNA, 15 bp, Homo sapiens
tttgggaatggtatt

SEQ ID NO: 1405191 - DNA, 15 bp, Homo sapiens
ctttgggaatggtat

SEQ ID NO: 1405192 - DNA, 15 bp, Homo sapiens
tctttgggaatggta

SEQ ID NO: 1405193 - DNA, 15 bp, Homo sapiens
gtctttgggaatggt

SEQ ID NO: 1405194 - DNA, 15 bp, Homo sapiens
tgtctttgggaatgg

SEQ ID NO: 1405195 - DNA, 15 bp, Homo sapiens
ttgtctttgggaatg

SEQ ID NO: 1405196 - DNA, 15 bp, Homo sapiens
tttgtctttgggaat

SEQ ID NO: 1405197 - DNA, 15 bp, Homo sapiens
atttgtctttgggaa

SEQ ID NO: 1405198 - DNA, 15 bp, Homo sapiens
tatttgtctttggga

SEQ ID NO: 1405199 - DNA, 15 bp, Homo sapiens
ctatttgtctttggg

SEQ ID NO: 1405200 - DNA, 15 bp, Homo sapiens
gctatttgtctttgg

SEQ ID NO: 1405201 - DNA, 15 bp, Homo sapiens
agctatttgtctttg

SEQ ID NO: 1405202 - DNA, 15 bp, Homo sapiens
tagctatttgtcttt

SEQ ID NO: 1405203 - DNA, 15 bp, Homo sapiens
ttagctatttgtctt

SEQ ID NO: 1405204 - DNA, 15 bp, Homo sapiens
attagctatttgtct

SEQ ID NO: 1405205 - DNA, 15 bp, Homo sapiens
tattagctatttgtc

SEQ ID NO: 1405206 - DNA, 15 bp, Homo sapiens
ttattagctatttgt

SEQ ID NO: 1405207 - DNA, 15 bp, Homo sapiens
tttattagctatttg

SEQ ID NO: 1405208 - DNA, 15 bp, Homo sapiens
atttattagctattt

SEQ ID NO: 1405209 - DNA, 15 bp, Homo sapiens
catttattagctatt

SEQ ID NO: 1405210 - DNA, 15 bp, Homo sapiens
acatttattagctat

SEQ ID NO: 1405211 - DNA, 15 bp, Homo sapiens
gacatttattagcta

SEQ ID NO: 1405212 - DNA, 15 bp, Homo sapiens
tgacatttattagct

SEQ ID NO: 1405213 - DNA, 15 bp, Homo sapiens
ctgacatttattagc

SEQ ID NO: 1405214 - DNA, 15 bp, Homo sapiens
cctgacatttattag

SEQ ID NO: 1405215 - DNA, 15 bp, Homo sapiens
gcctgacatttatta

SEQ ID NO: 1405216 - DNA, 15 bp, Homo sapiens
tgcctgacatttatt

SEQ ID NO: 1405217 - DNA, 15 bp, Homo sapiens
ctgcctgacatttat

SEQ ID NO: 1405218 - DNA, 15 bp, Homo sapiens
cctgcctgacattta

SEQ ID NO: 1405219 - DNA, 15 bp, Homo sapiens
ccctgcctgacattt

SEQ ID NO: 1405220 - DNA, 15 bp, Homo sapiens
accctgcctgacatt

SEQ ID NO: 1405221 - DNA, 15 bp, Homo sapiens
aaccctgcctgacat

SEQ ID NO: 1405222 - DNA, 15 bp, Homo sapiens
aaaccctgcctgaca

SEQ ID NO: 1405223 - DNA, 15 bp, Homo sapiens
aaaaccctgcctgac

SEQ ID NO: 1405224 - DNA, 15 bp, Homo sapiens
caaaaccctgcctga

SEQ ID NO: 1405225 - DNA, 15 bp, Homo sapiens
gcaaaaccctgcctg

SEQ ID NO: 1405226 - DNA, 15 bp, Homo sapiens
tgcaaaaccctgcct

SEQ ID NO: 1405227 - DNA, 15 bp, Homo sapiens
gtgcaaaaccctgcc

SEQ ID NO: 1405228 - DNA, 15 bp, Homo sapiens
ggtgcaaaaccctgc

SEQ ID NO: 1405229 - DNA, 15 bp, Homo sapiens
gggtgcaaaaccctg

SEQ ID NO: 1405230 - DNA, 15 bp, Homo sapiens
tgggtgcaaaaccct

SEQ ID NO: 1405231 - DNA, 15 bp, Homo sapiens
ctgggtgcaaaaccc

SEQ ID NO: 1405232 - DNA, 15 bp, Homo sapiens
cctgggtgcaaaacc

SEQ ID NO: 1405233 - DNA, 15 bp, Homo sapiens
gcctgggtgcaaaac

SEQ ID NO: 1405234 - DNA, 15 bp, Homo sapiens
ggcctgggtgcaaaa

SEQ ID NO: 1405235 - DNA, 15 bp, Homo sapiens
gggcctgggtgcaaa

SEQ ID NO: 1405236 - DNA, 15 bp, Homo sapiens
tgggcctgggtgcaa

SEQ ID NO: 1405237 - DNA, 15 bp, Homo sapiens
atgggcctgggtgca

SEQ ID NO: 1405238 - DNA, 15 bp, Homo sapiens
gatgggcctgggtgc

SEQ ID NO: 1405239 - DNA, 15 bp, Homo sapiens
ggatgggcctgggtg

SEQ ID NO: 1405240 - DNA, 15 bp, Homo sapiens
tggatgggcctgggt

SEQ ID NO: 1405241 - DNA, 15 bp, Homo sapiens
ctggatgggcctggg

SEQ ID NO: 1405242 - DNA, 15 bp, Homo sapiens
gctggatgggcctgg

SEQ ID NO: 1405243 - DNA, 15 bp, Homo sapiens
agctggatgggcctg

SEQ ID NO: 1405244 - DNA, 15 bp, Homo sapiens
gagctggatgggcct

SEQ ID NO: 1405245 - DNA, 15 bp, Homo sapiens
ggagctggatgggcc

SEQ ID NO: 1405246 - DNA, 15 bp, Homo sapiens
gggagctggatgggc

SEQ ID NO: 1405247 - DNA, 15 bp, Homo sapiens
cgggagctggatggg

SEQ ID NO: 1405248 - DNA, 15 bp, Homo sapiens
acgggagctggatgg

SEQ ID NO: 1405249 - DNA, 15 bp, Homo sapiens
gacgggagctggatg

SEQ ID NO: 1405250 - DNA, 15 bp, Homo sapiens
agacgggagctggat

SEQ ID NO: 1405251 - DNA, 15 bp, Homo sapiens
gagacgggagctgga

SEQ ID NO: 1405252 - DNA, 15 bp, Homo sapiens
agagacgggagctgg

SEQ ID NO: 1405253 - DNA, 15 bp, Homo sapiens
tagagacgggagctg

SEQ ID NO: 1405254 - DNA, 15 bp, Homo sapiens
gtagagacgggagct

SEQ ID NO: 1405255 - DNA, 15 bp, Homo sapiens
agtagagacgggagc

SEQ ID NO: 1405256 - DNA, 15 bp, Homo sapiens
cagtagagacgggag

SEQ ID NO: 1405257 - DNA, 15 bp, Homo sapiens
acagtagagacggga

SEQ ID NO: 1405258 - DNA, 15 bp, Homo sapiens
gacagtagagacggg

SEQ ID NO: 1405259 - DNA, 15 bp, Homo sapiens
ggacagtagagacgg

SEQ ID NO: 1405260 - DNA, 15 bp, Homo sapiens
aggacagtagagacg

SEQ ID NO: 1405261 - DNA, 15 bp, Homo sapiens
aaggacagtagagac

SEQ ID NO: 1405262 - DNA, 15 bp, Homo sapiens
aaaggacagtagaga

SEQ ID NO: 1405263 - DNA, 15 bp, Homo sapiens
gaaaggacagtagag

SEQ ID NO: 1405264 - DNA, 15 bp, Homo sapiens
ggaaaggacagtaga

SEQ ID NO: 1405265 - DNA, 15 bp, Homo sapiens
gggaaaggacagtag

SEQ ID NO: 1405266 - DNA, 15 bp, Homo sapiens
ggggaaaggacagta

SEQ ID NO: 1405267 - DNA, 15 bp, Homo sapiens
gggggaaaggacagt

SEQ ID NO: 1405268 - DNA, 15 bp, Homo sapiens
tgggggaaaggacag

SEQ ID NO: 1405269 - DNA, 15 bp, Homo sapiens
gtgggggaaaggaca

SEQ ID NO: 1405270 - DNA, 15 bp, Homo sapiens
tgtgggggaaaggac

SEQ ID NO: 1405271 - DNA, 15 bp, Homo sapiens
gtgtgggggaaagga

SEQ ID NO: 1405272 - DNA, 15 bp, Homo sapiens
ggtgtgggggaaagg

SEQ ID NO: 1405273 - DNA, 15 bp, Homo sapiens
tggtgtgggggaaag

SEQ ID NO: 1405274 - DNA, 15 bp, Homo sapiens
gtggtgtgggggaaa

SEQ ID NO: 1405275 - DNA, 15 bp, Homo sapiens
tgtggtgtgggggaa

SEQ ID NO: 1405276 - DNA, 15 bp, Homo sapiens
gtgtggtgtggggga

SEQ ID NO: 1405277 - DNA, 15 bp, Homo sapiens
agtgtggtgtggggg

SEQ ID NO: 1405278 - DNA, 15 bp, Homo sapiens
cagtgtggtgtgggg

SEQ ID NO: 1405279 - DNA, 15 bp, Homo sapiens
tcagtgtggtgtggg

SEQ ID NO: 1405280 - DNA, 15 bp, Homo sapiens
atcagtgtggtgtgg

SEQ ID NO: 1405281 - DNA, 15 bp, Homo sapiens
tatcagtgtggtgtg

SEQ ID NO: 1405282 - DNA, 15 bp, Homo sapiens
gtatcagtgtggtgt

SEQ ID NO: 1405283 - DNA, 15 bp, Homo sapiens
tgtatcagtgtggtg

SEQ ID NO: 1405284 - DNA, 15 bp, Homo sapiens
ctgtatcagtgtggt

SEQ ID NO: 1405285 - DNA, 15 bp, Homo sapiens
tctgtatcagtgtgg

SEQ ID NO: 1405286 - DNA, 15 bp, Homo sapiens
ctctgtatcagtgtg

SEQ ID NO: 1405287 - DNA, 15 bp, Homo sapiens
cctctgtatcagtgt

SEQ ID NO: 1405288 - DNA, 15 bp, Homo sapiens
tcctctgtatcagtg

SEQ ID NO: 1405289 - DNA, 15 bp, Homo sapiens
ttcctctgtatcagt

SEQ ID NO: 1405290 - DNA, 15 bp, Homo sapiens
attcctctgtatcag

SEQ ID NO: 1405291 - DNA, 15 bp, Homo sapiens
cattcctctgtatca

SEQ ID NO: 1405292 - DNA, 15 bp, Homo sapiens
acattcctctgtatc

SEQ ID NO: 1405293 - DNA, 15 bp, Homo sapiens
cacattcctctgtat

SEQ ID NO: 1405294 - DNA, 15 bp, Homo sapiens
acacattcctctgta

SEQ ID NO: 1405295 - DNA, 15 bp, Homo sapiens
gacacattcctctgt

SEQ ID NO: 1405296 - DNA, 15 bp, Homo sapiens
agacacattcctctg

SEQ ID NO: 1405297 - DNA, 15 bp, Homo sapiens
cagacacattcctct

SEQ ID NO: 1405298 - DNA, 15 bp, Homo sapiens
ccagacacattcctc

SEQ ID NO: 1405299 - DNA, 15 bp, Homo sapiens
accagacacattcct

SEQ ID NO: 1405300 - DNA, 15 bp, Homo sapiens
aaccagacacattcc

SEQ ID NO: 1405301 - DNA, 15 bp, Homo sapiens
caaccagacacattc

SEQ ID NO: 1405302 - DNA, 15 bp, Homo sapiens
ccaaccagacacatt

SEQ ID NO: 1405303 - DNA, 15 bp, Homo sapiens
cccaaccagacacat

SEQ ID NO: 1405304 - DNA, 15 bp, Homo sapiens
ccccaaccagacaca

SEQ ID NO: 1405305 - DNA, 15 bp, Homo sapiens
tccccaaccagacac

SEQ ID NO: 1405306 - DNA, 15 bp, Homo sapiens
ttccccaaccagaca

SEQ ID NO: 1405307 - DNA, 15 bp, Homo sapiens
cttccccaaccagac

SEQ ID NO: 1405308 - DNA, 15 bp, Homo sapiens
acttccccaaccaga

SEQ ID NO: 1405309 - DNA, 15 bp, Homo sapiens
cacttccccaaccag

SEQ ID NO: 1405310 - DNA, 15 bp, Homo sapiens
ccacttccccaacca

SEQ ID NO: 1405311 - DNA, 15 bp, Homo sapiens
tccacttccccaacc

SEQ ID NO: 1405312 - DNA, 15 bp, Homo sapiens
ttccacttccccaac

SEQ ID NO: 1405313 - DNA, 15 bp, Homo sapiens
cttccacttccccaa

SEQ ID NO: 1405314 - DNA, 15 bp, Homo sapiens
acttccacttcccca

SEQ ID NO: 1405315 - DNA, 15 bp, Homo sapiens
cacttccacttcccc

SEQ ID NO: 1405316 - DNA, 15 bp, Homo sapiens
acacttccacttccc

SEQ ID NO: 1405317 - DNA, 15 bp, Homo sapiens
gaacacttccacttc

SEQ ID NO: 1405318 - DNA, 15 bp, Homo sapiens
ggaacacttccactt

SEQ ID NO: 1405319 - DNA, 15 bp, Homo sapiens
gggaacacttccact

SEQ ID NO: 1405320 - DNA, 15 bp, Homo sapiens
tgggaacacttccac

SEQ ID NO: 1405321 - DNA, 15 bp, Homo sapiens
ttgggaacacttcca

SEQ ID NO: 1405322 - DNA, 15 bp, Homo sapiens
cttgggaacacttcc

SEQ ID NO: 1405323 - DNA, 15 bp, Homo sapiens
acttgggaacacttc

SEQ ID NO: 1405324 - DNA, 15 bp, Homo sapiens
cacttgggaacactt

SEQ ID NO: 1405325 - DNA, 15 bp, Homo sapiens
ccacttgggaacact

SEQ ID NO: 1405326 - DNA, 15 bp, Homo sapiens
cccacttgggaacac

SEQ ID NO: 1405327 - DNA, 15 bp, Homo sapiens
ccccacttgggaaca

SEQ ID NO: 1405328 - DNA, 15 bp, Homo sapiens
tccccacttgggaac

SEQ ID NO: 1405329 - DNA, 15 bp, Homo sapiens
ctccccacttgggaa

SEQ ID NO: 1405330 - DNA, 15 bp, Homo sapiens
cctccccacttggga

SEQ ID NO: 1405331 - DNA, 15 bp, Homo sapiens
acctccccacttggg

SEQ ID NO: 1405332 - DNA, 15 bp, Homo sapiens
gacctccccacttgg

SEQ ID NO: 1405333 - DNA, 15 bp, Homo sapiens
tgacctccccacttg

SEQ ID NO: 1405334 - DNA, 15 bp, Homo sapiens
atgacctccccactt

SEQ ID NO: 1405335 - DNA, 15 bp, Homo sapiens
gatgacctccccact

SEQ ID NO: 1405336 - DNA, 15 bp, Homo sapiens
agatgacctccccac

SEQ ID NO: 1405337 - DNA, 15 bp, Homo sapiens
cagatgacctcccca

SEQ ID NO: 1405338 - DNA, 15 bp, Homo sapiens
tcagatgacctcccc

SEQ ID NO: 1405339 - DNA, 15 bp, Homo sapiens
atcagatgacctccc

SEQ ID NO: 1405340 - DNA, 15 bp, Homo sapiens
catcagatgacctcc

SEQ ID NO: 1405341 - DNA, 15 bp, Homo sapiens
gcatcagatgacctc

SEQ ID NO: 1405342 - DNA, 15 bp, Homo sapiens
tgcatcagatgacct

SEQ ID NO: 1405343 - DNA, 15 bp, Homo sapiens
gtgcatcagatgacc

SEQ ID NO: 1405344 - DNA, 15 bp, Homo sapiens
tgtgcatcagatgac

SEQ ID NO: 1405345 - DNA, 15 bp, Homo sapiens
ttgtgcatcagatga

SEQ ID NO: 1405346 - DNA, 15 bp, Homo sapiens
tttgtgcatcagatg

SEQ ID NO: 1405347 - DNA, 15 bp, Homo sapiens
atttgtgcatcagat

SEQ ID NO: 1405348 - DNA, 15 bp, Homo sapiens
aatttgtgcatcaga

SEQ ID NO: 1405349 - DNA, 15 bp, Homo sapiens
aaatttgtgcatcag

SEQ ID NO: 1405350 - DNA, 15 bp, Homo sapiens
caaatttgtgcatca

SEQ ID NO: 1405351 - DNA, 15 bp, Homo sapiens
ccaaatttgtgcatc

SEQ ID NO: 1405352 - DNA, 15 bp, Homo sapiens
accaaatttgtgcat

SEQ ID NO: 1405353 - DNA, 15 bp, Homo sapiens
gaccaaatttgtgca

SEQ ID NO: 1405354 - DNA, 15 bp, Homo sapiens
agaccaaatttgtgc

SEQ ID NO: 1405355 - DNA, 15 bp, Homo sapiens
cagaccaaatttgtg

SEQ ID NO: 1405356 - DNA, 15 bp, Homo sapiens
acagaccaaatttgt

SEQ ID NO: 1405357 - DNA, 15 bp, Homo sapiens
aacagaccaaatttg

SEQ ID NO: 1405358 - DNA, 15 bp, Homo sapiens
aaacagaccaaattt

SEQ ID NO: 1405359 - DNA, 15 bp, Homo sapiens
aaaacagaccaaatt

SEQ ID NO: 1405360 - DNA, 15 bp, Homo sapiens
caaaacagaccaaat

SEQ ID NO: 1405361 - DNA, 15 bp, Homo sapiens
acaaaacagaccaaa

SEQ ID NO: 1405362 - DNA, 15 bp, Homo sapiens
cacaaaacagaccaa

SEQ ID NO: 1405363 - DNA, 15 bp, Homo sapiens
ccacaaaacagacca

SEQ ID NO: 1405364 - DNA, 15 bp, Homo sapiens
cccacaaaacagacc

SEQ ID NO: 1405365 - DNA, 15 bp, Homo sapiens
acccacaaaacagac

SEQ ID NO: 1405366 - DNA, 15 bp, Homo sapiens
aacccacaaaacaga

SEQ ID NO: 1405367 - DNA, 15 bp, Homo sapiens
aaacccacaaaacag

SEQ ID NO: 1405368 - DNA, 15 bp, Homo sapiens
aaaacccacaaaaca

SEQ ID NO: 1405369 - DNA, 15 bp, Homo sapiens
gaaaacccacaaaac

SEQ ID NO: 1405370 - DNA, 15 bp, Homo sapiens
agaaaacccacaaaa

SEQ ID NO: 1405371 - DNA, 15 bp, Homo sapiens
aagaaaacccacaaa

SEQ ID NO: 1405372 - DNA, 15 bp, Homo sapiens
caagaaaacccacaa

SEQ ID NO: 1405373 - DNA, 15 bp, Homo sapiens
acaagaaaacccaca

SEQ ID NO: 1405374 - DNA, 15 bp, Homo sapiens
aacaagaaaacccac

SEQ ID NO: 1405375 - DNA, 15 bp, Homo sapiens
aaacaagaaaaccca

SEQ ID NO: 1405376 - DNA, 15 bp, Homo sapiens
aaaacaagaaaaccc

SEQ ID NO: 1405377 - DNA, 15 bp, Homo sapiens
taaaacaagaaaacc

SEQ ID NO: 1405378 - DNA, 15 bp, Homo sapiens
ctaaaacaagaaaac

SEQ ID NO: 1405379 - DNA, 15 bp, Homo sapiens
actaaaacaagaaaa

SEQ ID NO: 1405380 - DNA, 15 bp, Homo sapiens
aactaaaacaagaaa

SEQ ID NO: 1405381 - DNA, 15 bp, Homo sapiens
aaactaaaacaagaa

SEQ ID NO: 1405382 - DNA, 15 bp, Homo sapiens
aaaactaaaacaaga

SEQ ID NO: 1405383 - DNA, 15 bp, Homo sapiens
taaaactaaaacaag

SEQ ID NO: 1405384 - DNA, 15 bp, Homo sapiens
ctaaaactaaaacaa

SEQ ID NO: 1405385 - DNA, 15 bp, Homo sapiens
actaaaactaaaaca

SEQ ID NO: 1405386 - DNA, 15 bp, Homo sapiens
aactaaaactaaaac

SEQ ID NO: 1405387 - DNA, 15 bp, Homo sapiens
aaactaaaactaaaa

SEQ ID NO: 1405388 - DNA, 15 bp, Homo sapiens
aaaactaaaactaaa

SEQ ID NO: 1405389 - DNA, 15 bp, Homo sapiens
aaaaactaaaactaa

SEQ ID NO: 1405390 - DNA, 15 bp, Homo sapiens
caaaaactaaaacta

SEQ ID NO: 1405391 - DNA, 15 bp, Homo sapiens
acaaaaactaaaact

SEQ ID NO: 1405392 - DNA, 15 bp, Homo sapiens
tacaaaaactaaaac

SEQ ID NO: 1405393 - DNA, 15 bp, Homo sapiens
ctctacaaaaactaa

SEQ ID NO: 1405394 - DNA, 15 bp, Homo sapiens
gctctacaaaaacta

SEQ ID NO: 1405395 - DNA, 15 bp, Homo sapiens
agctctacaaaaact

SEQ ID NO: 1405396 - DNA, 15 bp, Homo sapiens
gagctctacaaaaac

SEQ ID NO: 1405397 - DNA, 15 bp, Homo sapiens
tgagctctacaaaaa

SEQ ID NO: 1405398 - DNA, 15 bp, Homo sapiens
ctgagctctacaaaa

SEQ ID NO: 1405399 - DNA, 15 bp, Homo sapiens
tctgagctctacaaa

SEQ ID NO: 1405400 - DNA, 15 bp, Homo sapiens
gtctgagctctacaa

SEQ ID NO: 1405401 - DNA, 15 bp, Homo sapiens
ggtctgagctctaca

SEQ ID NO: 1405402 - DNA, 15 bp, Homo sapiens
aggtctgagctctac

SEQ ID NO: 1405403 - DNA, 15 bp, Homo sapiens
caggtctgagctcta

SEQ ID NO: 1405404 - DNA, 15 bp, Homo sapiens
acaggtctgagctct

SEQ ID NO: 1405405 - DNA, 15 bp, Homo sapiens
aacaggtctgagctc

SEQ ID NO: 1405406 - DNA, 15 bp, Homo sapiens
gaacaggtctgagct

SEQ ID NO: 1405407 - DNA, 15 bp, Homo sapiens
agaacaggtctgagc

SEQ ID NO: 1405408 - DNA, 15 bp, Homo sapiens
aagaacaggtctgag

SEQ ID NO: 1405409 - DNA, 15 bp, Homo sapiens
ctaagaacaggtctg

SEQ ID NO: 1405410 - DNA, 15 bp, Homo sapiens
cctaagaacaggtct

SEQ ID NO: 1405411 - DNA, 15 bp, Homo sapiens
gcctaagaacaggtc

SEQ ID NO: 1405412 - DNA, 15 bp, Homo sapiens
tgcctaagaacaggt

SEQ ID NO: 1405413 - DNA, 15 bp, Homo sapiens
ctgcctaagaacagg

SEQ ID NO: 1405414 - DNA, 15 bp, Homo sapiens
gctgcctaagaacag

SEQ ID NO: 1405415 - DNA, 15 bp, Homo sapiens
agctgcctaagaaca

SEQ ID NO: 1405416 - DNA, 15 bp, Homo sapiens
aagctgcctaagaac

SEQ ID NO: 1405417 - DNA, 15 bp, Homo sapiens
aaagctgcctaagaa

SEQ ID NO: 1405418 - DNA, 15 bp, Homo sapiens
taaagctgcctaaga

SEQ ID NO: 1405419 - DNA, 15 bp, Homo sapiens
ttaaagctgcctaag

SEQ ID NO: 1405420 - DNA, 15 bp, Homo sapiens
gttaaagctgcctaa

SEQ ID NO: 1405421 - DNA, 15 bp, Homo sapiens
tgttaaagctgccta

SEQ ID NO: 1405422 - DNA, 15 bp, Homo sapiens
ttgttaaagctgcct

SEQ ID NO: 1405423 - DNA, 15 bp, Homo sapiens
attgttaaagctgcc

SEQ ID NO: 1405424 - DNA, 15 bp, Homo sapiens
gattgttaaagctgc

SEQ ID NO: 1405425 - DNA, 15 bp, Homo sapiens
tgattgttaaagctg

SEQ ID NO: 1405426 - DNA, 15 bp, Homo sapiens
ttgattgttaaagct

SEQ ID NO: 1405427 - DNA, 15 bp, Homo sapiens
gttgattgttaaagc

SEQ ID NO: 1405428 - DNA, 15 bp, Homo sapiens
agttgattgttaaag

SEQ ID NO: 1405429 - DNA, 15 bp, Homo sapiens
cagttgattgttaaa

SEQ ID NO: 1405430 - DNA, 15 bp, Homo sapiens
acagttgattgttaa

SEQ ID NO: 1405431 - DNA, 15 bp, Homo sapiens
cacagttgattgtta

SEQ ID NO: 1405432 - DNA, 15 bp, Homo sapiens
gcacagttgattgtt

SEQ ID NO: 1405433 - DNA, 15 bp, Homo sapiens
tgcacagttgattgt

SEQ ID NO: 1405434 - DNA, 15 bp, Homo sapiens
gtgcacagttgattg

SEQ ID NO: 1405435 - DNA, 15 bp, Homo sapiens
agtgcacagttgatt

SEQ ID NO: 1405436 - DNA, 15 bp, Homo sapiens
gagtgcacagttgat

SEQ ID NO: 1405437 - DNA, 15 bp, Homo sapiens
tgagtgcacagttga

SEQ ID NO: 1405438 - DNA, 15 bp, Homo sapiens
ctgagtgcacagttg

SEQ ID NO: 1405439 - DNA, 15 bp, Homo sapiens
actgagtgcacagtt

SEQ ID NO: 1405440 - DNA, 15 bp, Homo sapiens
tactgagtgcacagt

SEQ ID NO: 1405441 - DNA, 15 bp, Homo sapiens
ttactgagtgcacag

SEQ ID NO: 1405442 - DNA, 15 bp, Homo sapiens
attactgagtgcaca

SEQ ID NO: 1405443 - DNA, 15 bp, Homo sapiens
aattactgagtgcac

SEQ ID NO: 1405444 - DNA, 15 bp, Homo sapiens
caattactgagtgca

SEQ ID NO: 1405445 - DNA, 15 bp, Homo sapiens
tcaattactgagtgc

SEQ ID NO: 1405446 - DNA, 15 bp, Homo sapiens
gtcaattactgagtg

SEQ ID NO: 1405447 - DNA, 15 bp, Homo sapiens
tgtcaattactgagt

SEQ ID NO: 1405448 - DNA, 15 bp, Homo sapiens
ttgtcaattactgag

SEQ ID NO: 1405449 - DNA, 15 bp, Homo sapiens
tttgtcaattactga

SEQ ID NO: 1405450 - DNA, 15 bp, Homo sapiens
atttgtcaattactg

SEQ ID NO: 1405451 - DNA, 15 bp, Homo sapiens
gatttgtcaattact

SEQ ID NO: 1405452 - DNA, 15 bp, Homo sapiens
tgatttgtcaattac

SEQ ID NO: 1405453 - DNA, 15 bp, Homo sapiens
atgatttgtcaatta

SEQ ID NO: 1405454 - DNA, 15 bp, Homo sapiens
catgatttgtcaatt

SEQ ID NO: 1405455 - DNA, 15 bp, Homo sapiens
acatgatttgtcaat

SEQ ID NO: 1405456 - DNA, 15 bp, Homo sapiens
aacatgatttgtcaa

SEQ ID NO: 1405457 - DNA, 15 bp, Homo sapiens
aaacatgatttgtca

SEQ ID NO: 1405458 - DNA, 15 bp, Homo sapiens
caaacatgatttgtc

SEQ ID NO: 1405459 - DNA, 15 bp, Homo sapiens
acaaacatgatttgt

SEQ ID NO: 1405460 - DNA, 15 bp, Homo sapiens
aacaaacatgatttg

SEQ ID NO: 1405461 - DNA, 15 bp, Homo sapiens
taacaaacatgattt

SEQ ID NO: 1405462 - DNA, 15 bp, Homo sapiens
gtaacaaacatgatt

SEQ ID NO: 1405463 - DNA, 15 bp, Homo sapiens
agtaacaaacatgat

SEQ ID NO: 1405464 - DNA, 15 bp, Homo sapiens
aagtaacaaacatga

SEQ ID NO: 1405465 - DNA, 15 bp, Homo sapiens
aaagtaacaaacatg

SEQ ID NO: 1405466 - DNA, 15 bp, Homo sapiens
aaaagtaacaaacat

SEQ ID NO: 1405467 - DNA, 15 bp, Homo sapiens
taaaagtaacaaaca

SEQ ID NO: 1405468 - DNA, 15 bp, Homo sapiens
ttaaaagtaacaaac

SEQ ID NO: 1405469 - DNA, 15 bp, Homo sapiens
attaaaagtaacaaa

SEQ ID NO: 1405470 - DNA, 15 bp, Homo sapiens
aattaaaagtaacaa

SEQ ID NO: 1405471 - DNA, 15 bp, Homo sapiens
aaattaaaagtaaca

SEQ ID NO: 1405472 - DNA, 15 bp, Homo sapiens
taaattaaaagtaac

SEQ ID NO: 1405473 - DNA, 15 bp, Homo sapiens
ctaaattaaaagtaa

SEQ ID NO: 1405474 - DNA, 15 bp, Homo sapiens
tctaaattaaaagta

SEQ ID NO: 1405475 - DNA, 15 bp, Homo sapiens
ctctaaattaaaagt

SEQ ID NO: 1405476 - DNA, 15 bp, Homo sapiens
cctctaaattaaaag

SEQ ID NO: 1405477 - DNA, 15 bp, Homo sapiens
ccctctaaattaaaa

SEQ ID NO: 1405478 - DNA, 15 bp, Homo sapiens
tccctctaaattaaa

SEQ ID NO: 1405479 - DNA, 15 bp, Homo sapiens
ttccctctaaattaa

SEQ ID NO: 1405480 - DNA, 15 bp, Homo sapiens
attccctctaaatta

SEQ ID NO: 1405481 - DNA, 15 bp, Homo sapiens
aattccctctaaatt

SEQ ID NO: 1405482 - DNA, 15 bp, Homo sapiens
taattccctctaaat

SEQ ID NO: 1405483 - DNA, 15 bp, Homo sapiens
ctaattccctctaaa

SEQ ID NO: 1405484 - DNA, 15 bp, Homo sapiens
cctaattccctctaa

SEQ ID NO: 1405485 - DNA, 15 bp, Homo sapiens
acctaattccctcta

SEQ ID NO: 1405486 - DNA, 15 bp, Homo sapiens
aacctaattccctct

SEQ ID NO: 1405487 - DNA, 15 bp, Homo sapiens
aaacctaattccctc

SEQ ID NO: 1405488 - DNA, 15 bp, Homo sapiens
caaacctaattccct

SEQ ID NO: 1405489 - DNA, 15 bp, Homo sapiens
acaaacctaattccc

SEQ ID NO: 1405490 - DNA, 15 bp, Homo sapiens
aacaaacctaattcc

SEQ ID NO: 1405491 - DNA, 15 bp, Homo sapiens
taacaaacctaattc

SEQ ID NO: 1405492 - DNA, 15 bp, Homo sapiens
ttaacaaacctaatt

SEQ ID NO: 1405493 - DNA, 15 bp, Homo sapiens
cttaacaaacctaat

SEQ ID NO: 1405494 - DNA, 15 bp, Homo sapiens
gcttaacaaacctaa

SEQ ID NO: 1405495 - DNA, 15 bp, Homo sapiens
agcttaacaaaccta

SEQ ID NO: 1405496 - DNA, 15 bp, Homo sapiens
gagcttaacaaacct

SEQ ID NO: 1405497 - DNA, 15 bp, Homo sapiens
agagcttaacaaacc

SEQ ID NO: 1405498 - DNA, 15 bp, Homo sapiens
aagagcttaacaaac

SEQ ID NO: 1405499 - DNA, 15 bp, Homo sapiens
caagagcttaacaaa

SEQ ID NO: 1405500 - DNA, 15 bp, Homo sapiens
gcaagagcttaacaa

SEQ ID NO: 1405501 - DNA, 15 bp, Homo sapiens
agcaagagcttaaca

SEQ ID NO: 1405502 - DNA, 15 bp, Homo sapiens
gagcaagagcttaac

SEQ ID NO: 1405503 - DNA, 15 bp, Homo sapiens
ggagcaagagcttaa

SEQ ID NO: 1405504 - DNA, 15 bp, Homo sapiens
aggagcaagagctta

SEQ ID NO: 1405505 - DNA, 15 bp, Homo sapiens
aaggagcaagagctt

SEQ ID NO: 1405506 - DNA, 15 bp, Homo sapiens
gaaggagcaagagct

SEQ ID NO: 1405507 - DNA, 15 bp, Homo sapiens
agaaggagcaagagc

SEQ ID NO: 1405508 - DNA, 15 bp, Homo sapiens
aagaaggagcaagag

SEQ ID NO: 1405509 - DNA, 15 bp, Homo sapiens
aaagaaggagcaaga

SEQ ID NO: 1405510 - DNA, 15 bp, Homo sapiens
taaagaaggagcaag

SEQ ID NO: 1405511 - DNA, 15 bp, Homo sapiens
ctaaagaaggagcaa

SEQ ID NO: 1405512 - DNA, 15 bp, Homo sapiens
tctaaagaaggagca

SEQ ID NO: 1405513 - DNA, 15 bp, Homo sapiens
ctctaaagaaggagc

SEQ ID NO: 1405514 - DNA, 15 bp, Homo sapiens
tctctaaagaaggag

SEQ ID NO: 1405515 - DNA, 15 bp, Homo sapiens
atctctaaagaagga

SEQ ID NO: 1405516 - DNA, 15 bp, Homo sapiens
catctctaaagaagg

SEQ ID NO: 1405517 - DNA, 15 bp, Homo sapiens
ccatctctaaagaag

SEQ ID NO: 1405518 - DNA, 15 bp, Homo sapiens
cccatctctaaagaa

SEQ ID NO: 1405519 - DNA, 15 bp, Homo sapiens
ccccatctctaaaga

SEQ ID NO: 1405520 - DNA, 15 bp, Homo sapiens
accccatctctaaag

SEQ ID NO: 1405521 - DNA, 15 bp, Homo sapiens
tagaccccatctcta

SEQ ID NO: 1405522 - DNA, 15 bp, Homo sapiens
ctagaccccatctct

SEQ ID NO: 1405523 - DNA, 15 bp, Homo sapiens
gctagaccccatctc

SEQ ID NO: 1405524 - DNA, 15 bp, Homo sapiens
agctagaccccatct

SEQ ID NO: 1405525 - DNA, 15 bp, Homo sapiens
gagctagaccccatc

SEQ ID NO: 1405526 - DNA, 15 bp, Homo sapiens
agagctagaccccat

SEQ ID NO: 1405527 - DNA, 15 bp, Homo sapiens
cagagctagacccca

SEQ ID NO: 1405528 - DNA, 15 bp, Homo sapiens
acagagctagacccc

SEQ ID NO: 1405529 - DNA, 15 bp, Homo sapiens
gacagagctagaccc

SEQ ID NO: 1405530 - DNA, 15 bp, Homo sapiens
tgacagagctagacc

SEQ ID NO: 1405531 - DNA, 15 bp, Homo sapiens
gtgacagagctagac

SEQ ID NO: 1405532 - DNA, 15 bp, Homo sapiens
ggtgacagagctaga

SEQ ID NO: 1405533 - DNA, 15 bp, Homo sapiens
gggtgacagagctag

SEQ ID NO: 1405534 - DNA, 15 bp, Homo sapiens
tgggtgacagagcta

SEQ ID NO: 1405535 - DNA, 15 bp, Homo sapiens
ctgggtgacagagct

SEQ ID NO: 1405536 - DNA, 15 bp, Homo sapiens
taccactgcgctcca

SEQ ID NO: 1405537 - DNA, 15 bp, Homo sapiens
ataccactgcgctcc

SEQ ID NO: 1405538 - DNA, 15 bp, Homo sapiens
cataccactgcgctc

SEQ ID NO: 1405539 - DNA, 15 bp, Homo sapiens
tcataccactgcgct

SEQ ID NO: 1405540 - DNA, 15 bp, Homo sapiens
atcataccactgcgc

SEQ ID NO: 1405541 - DNA, 15 bp, Homo sapiens
gatcataccactgcg

SEQ ID NO: 1405542 - DNA, 15 bp, Homo sapiens
tgatcataccactgc

SEQ ID NO: 1405543 - DNA, 15 bp, Homo sapiens
gtgatcataccactg

SEQ ID NO: 1405544 - DNA, 15 bp, Homo sapiens
tgtgatcataccact

SEQ ID NO: 1405545 - DNA, 15 bp, Homo sapiens
gctgtgatcatacca

SEQ ID NO: 1405546 - DNA, 15 bp, Homo sapiens
agctgtgatcatacc

SEQ ID NO: 1405547 - DNA, 15 bp, Homo sapiens
gagctgtgatcatac

SEQ ID NO: 1405548 - DNA, 15 bp, Homo sapiens
tgagctgtgatcata

SEQ ID NO: 1405549 - DNA, 15 bp, Homo sapiens
cagattgagactgca

SEQ ID NO: 1405550 - DNA, 15 bp, Homo sapiens
gcagattgagactgc

SEQ ID NO: 1405551 - DNA, 15 bp, Homo sapiens
agcagattgagactg

SEQ ID NO: 1405552 - DNA, 15 bp, Homo sapiens
gagcagattgagact

SEQ ID NO: 1405553 - DNA, 15 bp, Homo sapiens
tgagcagattgagac

SEQ ID NO: 1405554 - DNA, 15 bp, Homo sapiens
ttgagcagattgaga

SEQ ID NO: 1405555 - DNA, 15 bp, Homo sapiens
cttgagcagattgag

SEQ ID NO: 1405556 - DNA, 15 bp, Homo sapiens
acttgagcagattga

SEQ ID NO: 1405557 - DNA, 15 bp, Homo sapiens
cacttgagcagattg

SEQ ID NO: 1405558 - DNA, 15 bp, Homo sapiens
tcacttgagcagatt

SEQ ID NO: 1405559 - DNA, 15 bp, Homo sapiens
atcacttgagcagat

SEQ ID NO: 1405560 - DNA, 15 bp, Homo sapiens
gatcacttgagcaga

SEQ ID NO: 1405561 - DNA, 15 bp, Homo sapiens
ggatcacttgagcag

SEQ ID NO: 1405562 - DNA, 15 bp, Homo sapiens
atggaggctgaggca

SEQ ID NO: 1405563 - DNA, 15 bp, Homo sapiens
catggaggctgaggc

SEQ ID NO: 1405564 - DNA, 15 bp, Homo sapiens
ccatggaggctgagg

SEQ ID NO: 1405565 - DNA, 15 bp, Homo sapiens
cccatggaggctgag

SEQ ID NO: 1405566 - DNA, 15 bp, Homo sapiens
tcccatggaggctga

SEQ ID NO: 1405567 - DNA, 15 bp, Homo sapiens
gtcccatggaggctg

SEQ ID NO: 1405568 - DNA, 15 bp, Homo sapiens
agtcccatggaggct

SEQ ID NO: 1405569 - DNA, 15 bp, Homo sapiens
tagtcccatggaggc

SEQ ID NO: 1405570 - DNA, 15 bp, Homo sapiens
gtagtcccatggagg

SEQ ID NO: 1405571 - DNA, 15 bp, Homo sapiens
tgtagtcccatggag

SEQ ID NO: 1405572 - DNA, 15 bp, Homo sapiens
ttgtagtcccatgga

SEQ ID NO: 1405573 - DNA, 15 bp, Homo sapiens
cttgtagtcccatgg

SEQ ID NO: 1405574 - DNA, 15 bp, Homo sapiens
gcttgtagtcccatg

SEQ ID NO: 1405575 - DNA, 15 bp, Homo sapiens
tgcttgtagtcccat

SEQ ID NO: 1405576 - DNA, 15 bp, Homo sapiens
ccatgcttgtagtcc

SEQ ID NO: 1405577 - DNA, 15 bp, Homo sapiens
cccatgcttgtagtc

SEQ ID NO: 1405578 - DNA, 15 bp, Homo sapiens
gcccatgcttgtagt

SEQ ID NO: 1405579 - DNA, 15 bp, Homo sapiens
ggcccatgcttgtag

SEQ ID NO: 1405580 - DNA, 15 bp, Homo sapiens
tggcccatgcttgta

SEQ ID NO: 1405581 - DNA, 15 bp, Homo sapiens
gtggcccatgcttgt

SEQ ID NO: 1405582 - DNA, 15 bp, Homo sapiens
ggtggcccatgcttg

SEQ ID NO: 1405583 - DNA, 15 bp, Homo sapiens
tggtggcccatgctt

SEQ ID NO: 1405584 - DNA, 15 bp, Homo sapiens
atggtggcccatgct

SEQ ID NO: 1405585 - DNA, 15 bp, Homo sapiens
catggtggcccatgc

SEQ ID NO: 1405586 - DNA, 15 bp, Homo sapiens
gcatggtggcccatg

SEQ ID NO: 1405587 - DNA, 15 bp, Homo sapiens
agcatggtggcccat

SEQ ID NO: 1405588 - DNA, 15 bp, Homo sapiens
tagcatggtggccca

SEQ ID NO: 1405589 - DNA, 15 bp, Homo sapiens
ctagcatggtggccc

SEQ ID NO: 1405590 - DNA, 15 bp, Homo sapiens
cctagcatggtggcc

SEQ ID NO: 1405591 - DNA, 15 bp, Homo sapiens
gcctagcatggtggc

SEQ ID NO: 1405592 - DNA, 15 bp, Homo sapiens
agcctagcatggtgg

SEQ ID NO: 1405593 - DNA, 15 bp, Homo sapiens
tagcctagcatggtg

SEQ ID NO: 1405594 - DNA, 15 bp, Homo sapiens
ttagcctagcatggt

SEQ ID NO: 1405595 - DNA, 15 bp, Homo sapiens
attagcctagcatgg

SEQ ID NO: 1405596 - DNA, 15 bp, Homo sapiens
aattagcctagcatg

SEQ ID NO: 1405597 - DNA, 15 bp, Homo sapiens
aaattagcctagcat

SEQ ID NO: 1405598 - DNA, 15 bp, Homo sapiens
aaaattagcctagca

SEQ ID NO: 1405599 - DNA, 15 bp, Homo sapiens
taaaattagcctagc

SEQ ID NO: 1405600 - DNA, 15 bp, Homo sapiens
ttaaaattagcctag

SEQ ID NO: 1405601 - DNA, 15 bp, Homo sapiens
tttaaaattagccta

SEQ ID NO: 1405602 - DNA, 15 bp, Homo sapiens
ttttaaaattagcct

SEQ ID NO: 1405603 - DNA, 15 bp, Homo sapiens
tttttaaaattagcc

SEQ ID NO: 1405604 - DNA, 15 bp, Homo sapiens
ttttttaaaattagc

SEQ ID NO: 1405605 - DNA, 15 bp, Homo sapiens
tttttttaaaattag

SEQ ID NO: 1405606 - DNA, 15 bp, Homo sapiens
atttttttaaaatta

SEQ ID NO: 1405607 - DNA, 15 bp, Homo sapiens
aatttttttaaaatt

SEQ ID NO: 1405608 - DNA, 15 bp, Homo sapiens
aaatttttttaaaat

SEQ ID NO: 1405609 - DNA, 15 bp, Homo sapiens
aaaatttttttaaaa

SEQ ID NO: 1405610 - DNA, 15 bp, Homo sapiens
aaaaatttttttaaa

SEQ ID NO: 1405611 - DNA, 15 bp, Homo sapiens
aaaaaatttttttaa

SEQ ID NO: 1405612 - DNA, 15 bp, Homo sapiens
aaaaaaattttttta

SEQ ID NO: 1405613 - DNA, 15 bp, Homo sapiens
caaaaaaattttttt

SEQ ID NO: 1405614 - DNA, 15 bp, Homo sapiens
acaaaaaaatttttt

SEQ ID NO: 1405615 - DNA, 15 bp, Homo sapiens
tacaaaaaaattttt

SEQ ID NO: 1405616 - DNA, 15 bp, Homo sapiens
ctacaaaaaaatttt

SEQ ID NO: 1405617 - DNA, 15 bp, Homo sapiens
cctctacaaaaaaat

SEQ ID NO: 1405618 - DNA, 15 bp, Homo sapiens
gcctctacaaaaaaa

SEQ ID NO: 1405619 - DNA, 15 bp, Homo sapiens
tgcctctacaaaaaa

SEQ ID NO: 1405620 - DNA, 15 bp, Homo sapiens
ttgcctctacaaaaa

SEQ ID NO: 1405621 - DNA, 15 bp, Homo sapiens
cttgcctctacaaaa

SEQ ID NO: 1405622 - DNA, 15 bp, Homo sapiens
ccttgcctctacaaa

SEQ ID NO: 1405623 - DNA, 15 bp, Homo sapiens
accttgcctctacaa

SEQ ID NO: 1405624 - DNA, 15 bp, Homo sapiens
gaccttgcctctaca

SEQ ID NO: 1405625 - DNA, 15 bp, Homo sapiens
agaccttgcctctac

SEQ ID NO: 1405626 - DNA, 15 bp, Homo sapiens
gagaccttgcctcta

SEQ ID NO: 1405627 - DNA, 15 bp, Homo sapiens
tgagaccttgcctct

SEQ ID NO: 1405628 - DNA, 15 bp, Homo sapiens
gtgagaccttgcctc

SEQ ID NO: 1405629 - DNA, 15 bp, Homo sapiens
cgtgagaccttgcct

SEQ ID NO: 1405630 - DNA, 15 bp, Homo sapiens
ccgtgagaccttgcc

SEQ ID NO: 1405631 - DNA, 15 bp, Homo sapiens
accgtgagaccttgc

SEQ ID NO: 1405632 - DNA, 15 bp, Homo sapiens
caccgtgagaccttg

SEQ ID NO: 1405633 - DNA, 15 bp, Homo sapiens
acaccgtgagacctt

SEQ ID NO: 1405634 - DNA, 15 bp, Homo sapiens
aacaccgtgagacct

SEQ ID NO: 1405635 - DNA, 15 bp, Homo sapiens
caacaccgtgagacc

SEQ ID NO: 1405636 - DNA, 15 bp, Homo sapiens
gcaacaccgtgagac

SEQ ID NO: 1405637 - DNA, 15 bp, Homo sapiens
ggcaacaccgtgaga

SEQ ID NO: 1405638 - DNA, 15 bp, Homo sapiens
gggcaacaccgtgag

SEQ ID NO: 1405639 - DNA, 15 bp, Homo sapiens
tgggcaacaccgtga

SEQ ID NO: 1405640 - DNA, 15 bp, Homo sapiens
ctgggcaacaccgtg

SEQ ID NO: 1405641 - DNA, 15 bp, Homo sapiens
cctgggcaacaccgt

SEQ ID NO: 1405642 - DNA, 15 bp, Homo sapiens
gcctgggcaacaccg

SEQ ID NO: 1405643 - DNA, 15 bp, Homo sapiens
agcctgggcaacacc

SEQ ID NO: 1405644 - DNA, 15 bp, Homo sapiens
gcttgagctcaggag

SEQ ID NO: 1405645 - DNA, 15 bp, Homo sapiens
tgcttgagctcagga

SEQ ID NO: 1405646 - DNA, 15 bp, Homo sapiens
ttgcttgagctcagg

SEQ ID NO: 1405647 - DNA, 15 bp, Homo sapiens
attgcttgagctcag

SEQ ID NO: 1405648 - DNA, 15 bp, Homo sapiens
gattgcttgagctca

SEQ ID NO: 1405649 - DNA, 15 bp, Homo sapiens
ggattgcttgagctc

SEQ ID NO: 1405650 - DNA, 15 bp, Homo sapiens
gggattgcttgagct

SEQ ID NO: 1405651 - DNA, 15 bp, Homo sapiens
agggattgcttgagc

SEQ ID NO: 1405652 - DNA, 15 bp, Homo sapiens
gagggattgcttgag

SEQ ID NO: 1405653 - DNA, 15 bp, Homo sapiens
agagggattgcttga

SEQ ID NO: 1405654 - DNA, 15 bp, Homo sapiens
aagagggattgcttg

SEQ ID NO: 1405655 - DNA, 15 bp, Homo sapiens
gaagagggattgctt

SEQ ID NO: 1405656 - DNA, 15 bp, Homo sapiens
ggaagagggattgct

SEQ ID NO: 1405657 - DNA, 15 bp, Homo sapiens
tggaagagggattgc

SEQ ID NO: 1405658 - DNA, 15 bp, Homo sapiens
gtggaagagggattg

SEQ ID NO: 1405659 - DNA, 15 bp, Homo sapiens
ggtggaagagggatt

SEQ ID NO: 1405660 - DNA, 15 bp, Homo sapiens
aggtggaagagggat

SEQ ID NO: 1405661 - DNA, 15 bp, Homo sapiens
aaggtggaagaggga

SEQ ID NO: 1405662 - DNA, 15 bp, Homo sapiens
caaggtggaagaggg

SEQ ID NO: 1405663 - DNA, 15 bp, Homo sapiens
ccaaggtggaagagg

SEQ ID NO: 1405664 - DNA, 15 bp, Homo sapiens
gccaaggtggaagag

SEQ ID NO: 1405665 - DNA, 15 bp, Homo sapiens
ggccaaggtggaaga

SEQ ID NO: 1405666 - DNA, 15 bp, Homo sapiens
aggccaaggtggaag

SEQ ID NO: 1405667 - DNA, 15 bp, Homo sapiens
gaggccaaggtggaa

SEQ ID NO: 1405668 - DNA, 15 bp, Homo sapiens
agaggccaaggtgga

SEQ ID NO: 1405669 - DNA, 15 bp, Homo sapiens
gagaggccaaggtgg

SEQ ID NO: 1405670 - DNA, 15 bp, Homo sapiens
tgagaggccaaggtg

SEQ ID NO: 1405671 - DNA, 15 bp, Homo sapiens
ttgagaggccaaggt

SEQ ID NO: 1405672 - DNA, 15 bp, Homo sapiens
tagcactttgagagg

SEQ ID NO: 1405673 - DNA, 15 bp, Homo sapiens
ctagcactttgagag

SEQ ID NO: 1405674 - DNA, 15 bp, Homo sapiens
tctagcactttgaga

SEQ ID NO: 1405675 - DNA, 15 bp, Homo sapiens
ttctagcactttgag

SEQ ID NO: 1405676 - DNA, 15 bp, Homo sapiens
attctagcactttga

SEQ ID NO: 1405677 - DNA, 15 bp, Homo sapiens
ataattctagcactt

SEQ ID NO: 1405678 - DNA, 15 bp, Homo sapiens
tataattctagcact

SEQ ID NO: 1405679 - DNA, 15 bp, Homo sapiens
ctataattctagcac

SEQ ID NO: 1405680 - DNA, 15 bp, Homo sapiens
cctataattctagca

SEQ ID NO: 1405681 - DNA, 15 bp, Homo sapiens
gcctataattctagc

SEQ ID NO: 1405682 - DNA, 15 bp, Homo sapiens
tgcctataattctag

SEQ ID NO: 1405683 - DNA, 15 bp, Homo sapiens
atgcctataattcta

SEQ ID NO: 1405684 - DNA, 15 bp, Homo sapiens
catgcctataattct

SEQ ID NO: 1405685 - DNA, 15 bp, Homo sapiens
tcatgcctataattc

SEQ ID NO: 1405686 - DNA, 15 bp, Homo sapiens
ctcatgcctataatt

SEQ ID NO: 1405687 - DNA, 15 bp, Homo sapiens
aaaggccaggcatgg

SEQ ID NO: 1405688 - DNA, 15 bp, Homo sapiens
taaaggccaggcatg

SEQ ID NO: 1405689 - DNA, 15 bp, Homo sapiens
gtaaaggccaggcat

SEQ ID NO: 1405690 - DNA, 15 bp, Homo sapiens
agtaaaggccaggca

SEQ ID NO: 1405691 - DNA, 15 bp, Homo sapiens
aagtaaaggccaggc

SEQ ID NO: 1405692 - DNA, 15 bp, Homo sapiens
gaagtaaaggccagg

SEQ ID NO: 1405693 - DNA, 15 bp, Homo sapiens
agaagtaaaggccag

SEQ ID NO: 1405694 - DNA, 15 bp, Homo sapiens
aagaagtaaaggcca

SEQ ID NO: 1405695 - DNA, 15 bp, Homo sapiens
aaagaagtaaaggcc

SEQ ID NO: 1405696 - DNA, 15 bp, Homo sapiens
gaaagaagtaaaggc

SEQ ID NO: 1405697 - DNA, 15 bp, Homo sapiens
tgaaagaagtaaagg

SEQ ID NO: 1405698 - DNA, 15 bp, Homo sapiens
atgaaagaagtaaag

SEQ ID NO: 1405699 - DNA, 15 bp, Homo sapiens
tatgaaagaagtaaa

SEQ ID NO: 1405700 - DNA, 15 bp, Homo sapiens
atatgaaagaagtaa

SEQ ID NO: 1405701 - DNA, 15 bp, Homo sapiens
tatatgaaagaagta

SEQ ID NO: 1405702 - DNA, 15 bp, Homo sapiens
atatatgaaagaagt

SEQ ID NO: 1405703 - DNA, 15 bp, Homo sapiens
aatatatgaaagaag

SEQ ID NO: 1405704 - DNA, 15 bp, Homo sapiens
gaatatatgaaagaa

SEQ ID NO: 1405705 - DNA, 15 bp, Homo sapiens
tgaatatatgaaaga

SEQ ID NO: 1405706 - DNA, 15 bp, Homo sapiens
ttgaatatatgaaag

SEQ ID NO: 1405707 - DNA, 15 bp, Homo sapiens
tttgaatatatgaaa

SEQ ID NO: 1405708 - DNA, 15 bp, Homo sapiens
atttgaatatatgaa

SEQ ID NO: 1405709 - DNA, 15 bp, Homo sapiens
aatttgaatatatga

SEQ ID NO: 1405710 - DNA, 15 bp, Homo sapiens
aaatttgaatatatg

SEQ ID NO: 1405711 - DNA, 15 bp, Homo sapiens
aaaatttgaatatat

SEQ ID NO: 1405712 - DNA, 15 bp, Homo sapiens
caaaatttgaatata

SEQ ID NO: 1405713 - DNA, 15 bp, Homo sapiens
acaaaatttgaatat

SEQ ID NO: 1405714 - DNA, 15 bp, Homo sapiens
gacaaaatttgaata

SEQ ID NO: 1405715 - DNA, 15 bp, Homo sapiens
tgacaaaatttgaat

SEQ ID NO: 1405716 - DNA, 15 bp, Homo sapiens
atgacaaaatttgaa

SEQ ID NO: 1405717 - DNA, 15 bp, Homo sapiens
tatgacaaaatttga

SEQ ID NO: 1405718 - DNA, 15 bp, Homo sapiens
atatgacaaaatttg

SEQ ID NO: 1405719 - DNA, 15 bp, Homo sapiens
aatatgacaaaattt

SEQ ID NO: 1405720 - DNA, 15 bp, Homo sapiens
taatatgacaaaatt

SEQ ID NO: 1405721 - DNA, 15 bp, Homo sapiens
ctaatatgacaaaat

SEQ ID NO: 1405722 - DNA, 15 bp, Homo sapiens
actaatatgacaaaa

SEQ ID NO: 1405723 - DNA, 15 bp, Homo sapiens
tactaatatgacaaa

SEQ ID NO: 1405724 - DNA, 15 bp, Homo sapiens
ctactaatatgacaa

SEQ ID NO: 1405725 - DNA, 15 bp, Homo sapiens
cctactaatatgaca

SEQ ID NO: 1405726 - DNA, 15 bp, Homo sapiens
ccctactaatatgac

SEQ ID NO: 1405727 - DNA, 15 bp, Homo sapiens
tccctactaatatga

SEQ ID NO: 1405728 - DNA, 15 bp, Homo sapiens
ttccctactaatatg

SEQ ID NO: 1405729 - DNA, 15 bp, Homo sapiens
gttccctactaatat

SEQ ID NO: 1405730 - DNA, 15 bp, Homo sapiens
agttccctactaata

SEQ ID NO: 1405731 - DNA, 15 bp, Homo sapiens
tagttccctactaat

SEQ ID NO: 1405732 - DNA, 15 bp, Homo sapiens
atagttccctactaa

SEQ ID NO: 1405733 - DNA, 15 bp, Homo sapiens
tatagttccctacta

SEQ ID NO: 1405734 - DNA, 15 bp, Homo sapiens
ttatagttccctact

SEQ ID NO: 1405735 - DNA, 15 bp, Homo sapiens
gttatagttccctac

SEQ ID NO: 1405736 - DNA, 15 bp, Homo sapiens
agttatagttcccta

SEQ ID NO: 1405737 - DNA, 15 bp, Homo sapiens
gagttatagttccct

SEQ ID NO: 1405738 - DNA, 15 bp, Homo sapiens
tgagttatagttccc

SEQ ID NO: 1405739 - DNA, 15 bp, Homo sapiens
ttgagttatagttcc

SEQ ID NO: 1405740 - DNA, 15 bp, Homo sapiens
cttgagttatagttc

SEQ ID NO: 1405741 - DNA, 15 bp, Homo sapiens
acttgagttatagtt

SEQ ID NO: 1405742 - DNA, 15 bp, Homo sapiens
aacttgagttatagt

SEQ ID NO: 1405743 - DNA, 15 bp, Homo sapiens
aaacttgagttatag

SEQ ID NO: 1405744 - DNA, 15 bp, Homo sapiens
aaaacttgagttata

SEQ ID NO: 1405745 - DNA, 15 bp, Homo sapiens
gaaaacttgagttat

SEQ ID NO: 1405746 - DNA, 15 bp, Homo sapiens
agaaaacttgagtta

SEQ ID NO: 1405747 - DNA, 15 bp, Homo sapiens
taagaaaacttgagt

SEQ ID NO: 1405748 - DNA, 15 bp, Homo sapiens
ataagaaaacttgag

SEQ ID NO: 1405749 - DNA, 15 bp, Homo sapiens
tataagaaaacttga

SEQ ID NO: 1405750 - DNA, 15 bp, Homo sapiens
ctataagaaaacttg

SEQ ID NO: 1405751 - DNA, 15 bp, Homo sapiens
aatctataagaaaac

SEQ ID NO: 1405752 - DNA, 15 bp, Homo sapiens
caatctataagaaaa

SEQ ID NO: 1405753 - DNA, 15 bp, Homo sapiens
tcaatctataagaaa

SEQ ID NO: 1405754 - DNA, 15 bp, Homo sapiens
atcaatctataagaa

SEQ ID NO: 1405755 - DNA, 15 bp, Homo sapiens
catcaatctataaga

SEQ ID NO: 1405756 - DNA, 15 bp, Homo sapiens
acatcaatctataag

SEQ ID NO: 1405757 - DNA, 15 bp, Homo sapiens
aacatcaatctataa

SEQ ID NO: 1405758 - DNA, 15 bp, Homo sapiens
gaacatcaatctata

SEQ ID NO: 1405759 - DNA, 15 bp, Homo sapiens
tgaacatcaatctat

SEQ ID NO: 1405760 - DNA, 15 bp, Homo sapiens
atgaacatcaatcta

SEQ ID NO: 1405761 - DNA, 15 bp, Homo sapiens
aatgaacatcaatct

SEQ ID NO: 1405762 - DNA, 15 bp, Homo sapiens
aaatgaacatcaatc

SEQ ID NO: 1405763 - DNA, 15 bp, Homo sapiens
aaaatgaacatcaat

SEQ ID NO: 1405764 - DNA, 15 bp, Homo sapiens
aaaaatgaacatcaa

SEQ ID NO: 1405765 - DNA, 15 bp, Homo sapiens
taaaaatgaacatca

SEQ ID NO: 1405766 - DNA, 15 bp, Homo sapiens
gtaaaaatgaacatc

SEQ ID NO: 1405767 - DNA, 15 bp, Homo sapiens
tgtaaaaatgaacat

SEQ ID NO: 1405768 - DNA, 15 bp, Homo sapiens
ttgtaaaaatgaaca

SEQ ID NO: 1405769 - DNA, 15 bp, Homo sapiens
cttgtaaaaatgaac

SEQ ID NO: 1405770 - DNA, 15 bp, Homo sapiens
gcttgtaaaaatgaa

SEQ ID NO: 1405771 - DNA, 15 bp, Homo sapiens
agcttgtaaaaatga

SEQ ID NO: 1405772 - DNA, 15 bp, Homo sapiens
aagcttgtaaaaatg

SEQ ID NO: 1405773 - DNA, 15 bp, Homo sapiens
caagcttgtaaaaat

SEQ ID NO: 1405774 - DNA, 15 bp, Homo sapiens
tcaagcttgtaaaaa

SEQ ID NO: 1405775 - DNA, 15 bp, Homo sapiens
atcaagcttgtaaaa

SEQ ID NO: 1405776 - DNA, 15 bp, Homo sapiens
gatcaagcttgtaaa

SEQ ID NO: 1405777 - DNA, 15 bp, Homo sapiens
cgatcaagcttgtaa

SEQ ID NO: 1405778 - DNA, 15 bp, Homo sapiens
acgatcaagcttgta

SEQ ID NO: 1405779 - DNA, 15 bp, Homo sapiens
gacgatcaagcttgt

SEQ ID NO: 1405780 - DNA, 15 bp, Homo sapiens
tgacgatcaagcttg

SEQ ID NO: 1405781 - DNA, 15 bp, Homo sapiens
atgacgatcaagctt

SEQ ID NO: 1405782 - DNA, 15 bp, Homo sapiens
aatgacgatcaagct

SEQ ID NO: 1405783 - DNA, 15 bp, Homo sapiens
caatgacgatcaagc

SEQ ID NO: 1405784 - DNA, 15 bp, Homo sapiens
ccaatgacgatcaag

SEQ ID NO: 1405785 - DNA, 15 bp, Homo sapiens
accaatgacgatcaa

SEQ ID NO: 1405786 - DNA, 15 bp, Homo sapiens
aaccaatgacgatca

SEQ ID NO: 1405787 - DNA, 15 bp, Homo sapiens
aaaccaatgacgatc

SEQ ID NO: 1405788 - DNA, 15 bp, Homo sapiens
aaaaccaatgacgat

SEQ ID NO: 1405789 - DNA, 15 bp, Homo sapiens
aaaaaccaatgacga

SEQ ID NO: 1405790 - DNA, 15 bp, Homo sapiens
taaaaaccaatgacg

SEQ ID NO: 1405791 - DNA, 15 bp, Homo sapiens
ttaaaaaccaatgac

SEQ ID NO: 1405792 - DNA, 15 bp, Homo sapiens
attaaaaaccaatga

SEQ ID NO: 1405793 - DNA, 15 bp, Homo sapiens
aattaaaaaccaatg

SEQ ID NO: 1405794 - DNA, 15 bp, Homo sapiens
aaattaaaaaccaat

SEQ ID NO: 1405795 - DNA, 15 bp, Homo sapiens
aaaattaaaaaccaa

SEQ ID NO: 1405796 - DNA, 15 bp, Homo sapiens
taaaattaaaaacca

SEQ ID NO: 1405797 - DNA, 15 bp, Homo sapiens
ttaaaattaaaaacc

SEQ ID NO: 1405798 - DNA, 15 bp, Homo sapiens
tttaaaattaaaaac

SEQ ID NO: 1405799 - DNA, 15 bp, Homo sapiens
ctttaaaattaaaaa

SEQ ID NO: 1405800 - DNA, 15 bp, Homo sapiens
gctttaaaattaaaa

SEQ ID NO: 1405801 - DNA, 15 bp, Homo sapiens
tgctttaaaattaaa

SEQ ID NO: 1405802 - DNA, 15 bp, Homo sapiens
ttgctttaaaattaa

SEQ ID NO: 1405803 - DNA, 15 bp, Homo sapiens
tttgctttaaaatta

SEQ ID NO: 1405804 - DNA, 15 bp, Homo sapiens
atttgctttaaaatt

SEQ ID NO: 1405805 - DNA, 15 bp, Homo sapiens
gatttgctttaaaat

SEQ ID NO: 1405806 - DNA, 15 bp, Homo sapiens
ggatttgctttaaaa

SEQ ID NO: 1405807 - DNA, 15 bp, Homo sapiens
aggatttgctttaaa

SEQ ID NO: 1405808 - DNA, 15 bp, Homo sapiens
caggatttgctttaa

SEQ ID NO: 1405809 - DNA, 15 bp, Homo sapiens
acaggatttgcttta

SEQ ID NO: 1405810 - DNA, 15 bp, Homo sapiens
aacaggatttgcttt

SEQ ID NO: 1405811 - DNA, 15 bp, Homo sapiens
taacaggatttgctt

SEQ ID NO: 1405812 - DNA, 15 bp, Homo sapiens
ataacaggatttgct

SEQ ID NO: 1405813 - DNA, 15 bp, Homo sapiens
tataacaggatttgc

SEQ ID NO: 1405814 - DNA, 15 bp, Homo sapiens
atataacaggatttg

SEQ ID NO: 1405815 - DNA, 15 bp, Homo sapiens
catataacaggattt

SEQ ID NO: 1405816 - DNA, 15 bp, Homo sapiens
acatataacaggatt

SEQ ID NO: 1405817 - DNA, 15 bp, Homo sapiens
tacatataacaggat

SEQ ID NO: 1405818 - DNA, 15 bp, Homo sapiens
ttacatataacagga

SEQ ID NO: 1405819 - DNA, 15 bp, Homo sapiens
attacatataacagg

SEQ ID NO: 1405820 - DNA, 15 bp, Homo sapiens
aattacatataacag

SEQ ID NO: 1405821 - DNA, 15 bp, Homo sapiens
caattacatataaca

SEQ ID NO: 1405822 - DNA, 15 bp, Homo sapiens
tcaattacatataac

SEQ ID NO: 1405823 - DNA, 15 bp, Homo sapiens
ttcaattacatataa

SEQ ID NO: 1405824 - DNA, 15 bp, Homo sapiens
gttcaattacatata

SEQ ID NO: 1405825 - DNA, 15 bp, Homo sapiens
tgttcaattacatat

SEQ ID NO: 1405826 - DNA, 15 bp, Homo sapiens
atgttcaattacata

SEQ ID NO: 1405827 - DNA, 15 bp, Homo sapiens
aatgttcaattacat

SEQ ID NO: 1405828 - DNA, 15 bp, Homo sapiens
taatgttcaattaca

SEQ ID NO: 1405829 - DNA, 15 bp, Homo sapiens
gtaatgttcaattac

SEQ ID NO: 1405830 - DNA, 15 bp, Homo sapiens
tgtaatgttcaatta

SEQ ID NO: 1405831 - DNA, 15 bp, Homo sapiens
ctgtaatgttcaatt

SEQ ID NO: 1405832 - DNA, 15 bp, Homo sapiens
actgtaatgttcaat

SEQ ID NO: 1405833 - DNA, 15 bp, Homo sapiens
tactgtaatgttcaa

SEQ ID NO: 1405834 - DNA, 15 bp, Homo sapiens
ttactgtaatgttca

SEQ ID NO: 1405835 - DNA, 15 bp, Homo sapiens
attactgtaatgttc

SEQ ID NO: 1405836 - DNA, 15 bp, Homo sapiens
aattactgtaatgtt

SEQ ID NO: 1405837 - DNA, 15 bp, Homo sapiens
taattactgtaatgt

SEQ ID NO: 1405838 - DNA, 15 bp, Homo sapiens
ataattactgtaatg

SEQ ID NO: 1405839 - DNA, 15 bp, Homo sapiens
tataattactgtaat

SEQ ID NO: 1405840 - DNA, 15 bp, Homo sapiens
ctataattactgtaa

SEQ ID NO: 1405841 - DNA, 15 bp, Homo sapiens
actataattactgta

SEQ ID NO: 1405842 - DNA, 15 bp, Homo sapiens
tactataattactgt

SEQ ID NO: 1405843 - DNA, 15 bp, Homo sapiens
ttactataattactg

SEQ ID NO: 1405844 - DNA, 15 bp, Homo sapiens
attactataattact

SEQ ID NO: 1405845 - DNA, 15 bp, Homo sapiens
aattactataattac

SEQ ID NO: 1405846 - DNA, 15 bp, Homo sapiens
aaattactataatta

SEQ ID NO: 1405847 - DNA, 15 bp, Homo sapiens
caaattactataatt

SEQ ID NO: 1405848 - DNA, 15 bp, Homo sapiens
acaaattactataat

SEQ ID NO: 1405849 - DNA, 15 bp, Homo sapiens
aacaaattactataa

SEQ ID NO: 1405850 - DNA, 15 bp, Homo sapiens
aaacaaattactata

SEQ ID NO: 1405851 - DNA, 15 bp, Homo sapiens
gaaacaaattactat

SEQ ID NO: 1405852 - DNA, 15 bp, Homo sapiens
tgaaacaaattacta

SEQ ID NO: 1405853 - DNA, 15 bp, Homo sapiens
ctgaaacaaattact

SEQ ID NO: 1405854 - DNA, 15 bp, Homo sapiens
tctgaaacaaattac

SEQ ID NO: 1405855 - DNA, 15 bp, Homo sapiens
atctgaaacaaatta

SEQ ID NO: 1405856 - DNA, 15 bp, Homo sapiens
aatctgaaacaaatt

SEQ ID NO: 1405857 - DNA, 15 bp, Homo sapiens
caatctgaaacaaat

SEQ ID NO: 1405858 - DNA, 15 bp, Homo sapiens
ccaatctgaaacaaa

SEQ ID NO: 1405859 - DNA, 15 bp, Homo sapiens
cccaatctgaaacaa

SEQ ID NO: 1405860 - DNA, 15 bp, Homo sapiens
gcccaatctgaaaca

SEQ ID NO: 1405861 - DNA, 15 bp, Homo sapiens
tgcccaatctgaaac

SEQ ID NO: 1405862 - DNA, 15 bp, Homo sapiens
gtgcccaatctgaaa

SEQ ID NO: 1405863 - DNA, 15 bp, Homo sapiens
agtgcccaatctgaa

SEQ ID NO: 1405864 - DNA, 15 bp, Homo sapiens
gagtgcccaatctga

SEQ ID NO: 1405865 - DNA, 15 bp, Homo sapiens
tgagtgcccaatctg

SEQ ID NO: 1405866 - DNA, 15 bp, Homo sapiens
ttgagtgcccaatct

SEQ ID NO: 1405867 - DNA, 15 bp, Homo sapiens
cttgagtgcccaatc

SEQ ID NO: 1405868 - DNA, 15 bp, Homo sapiens
acttgagtgcccaat

SEQ ID NO: 1405869 - DNA, 15 bp, Homo sapiens
cacttgagtgcccaa

SEQ ID NO: 1405870 - DNA, 15 bp, Homo sapiens
acacttgagtgccca

SEQ ID NO: 1405871 - DNA, 15 bp, Homo sapiens
aacacttgagtgccc

SEQ ID NO: 1405872 - DNA, 15 bp, Homo sapiens
taacacttgagtgcc

SEQ ID NO: 1405873 - DNA, 15 bp, Homo sapiens
ttaacacttgagtgc

SEQ ID NO: 1405874 - DNA, 15 bp, Homo sapiens
attaacacttgagtg

SEQ ID NO: 1405875 - DNA, 15 bp, Homo sapiens
tattaacacttgagt

SEQ ID NO: 1405876 - DNA, 15 bp, Homo sapiens
atattaacacttgag

SEQ ID NO: 1405877 - DNA, 15 bp, Homo sapiens
aatattaacacttga

SEQ ID NO: 1405878 - DNA, 15 bp, Homo sapiens
aaatattaacacttg

SEQ ID NO: 1405879 - DNA, 15 bp, Homo sapiens
aaaatattaacactt

SEQ ID NO: 1405880 - DNA, 15 bp, Homo sapiens
caaaatattaacact

SEQ ID NO: 1405881 - DNA, 15 bp, Homo sapiens
acaaaatattaacac

SEQ ID NO: 1405882 - DNA, 15 bp, Homo sapiens
gacaaaatattaaca

SEQ ID NO: 1405883 - DNA, 15 bp, Homo sapiens
agacaaaatattaac

SEQ ID NO: 1405884 - DNA, 15 bp, Homo sapiens
gagacaaaatattaa

SEQ ID NO: 1405885 - DNA, 15 bp, Homo sapiens
agagacaaaatatta

SEQ ID NO: 1405886 - DNA, 15 bp, Homo sapiens
aagagacaaaatatt

SEQ ID NO: 1405887 - DNA, 15 bp, Homo sapiens
aaagagacaaaatat

SEQ ID NO: 1405888 - DNA, 15 bp, Homo sapiens
taaagagacaaaata

SEQ ID NO: 1405889 - DNA, 15 bp, Homo sapiens
ctaaagagacaaaat

SEQ ID NO: 1405890 - DNA, 15 bp, Homo sapiens
cctaaagagacaaaa

SEQ ID NO: 1405891 - DNA, 15 bp, Homo sapiens
tcctaaagagacaaa

SEQ ID NO: 1405892 - DNA, 15 bp, Homo sapiens
ttcctaaagagacaa

SEQ ID NO: 1405893 - DNA, 15 bp, Homo sapiens
tttcctaaagagaca

SEQ ID NO: 1405894 - DNA, 15 bp, Homo sapiens
atttcctaaagagac

SEQ ID NO: 1405895 - DNA, 15 bp, Homo sapiens
gatttcctaaagaga

SEQ ID NO: 1405896 - DNA, 15 bp, Homo sapiens
tgatttcctaaagag

SEQ ID NO: 1405897 - DNA, 15 bp, Homo sapiens
ttgatttcctaaaga

SEQ ID NO: 1405898 - DNA, 15 bp, Homo sapiens
tttgatttcctaaag

SEQ ID NO: 1405899 - DNA, 15 bp, Homo sapiens
ttttgatttcctaaa

SEQ ID NO: 1405900 - DNA, 15 bp, Homo sapiens
gttttgatttcctaa

SEQ ID NO: 1405901 - DNA, 15 bp, Homo sapiens
agttttgatttccta

SEQ ID NO: 1405902 - DNA, 15 bp, Homo sapiens
tagttttgatttcct

SEQ ID NO: 1405903 - DNA, 15 bp, Homo sapiens
ctagttttgatttcc

SEQ ID NO: 1405904 - DNA, 15 bp, Homo sapiens
tctagttttgatttc

SEQ ID NO: 1405905 - DNA, 15 bp, Homo sapiens
atctagttttgattt

SEQ ID NO: 1405906 - DNA, 15 bp, Homo sapiens
aatctagttttgatt

SEQ ID NO: 1405907 - DNA, 15 bp, Homo sapiens
aaatctagttttgat

SEQ ID NO: 1405908 - DNA, 15 bp, Homo sapiens
taaatctagttttga

SEQ ID NO: 1405909 - DNA, 15 bp, Homo sapiens
ataaatctagttttg

SEQ ID NO: 1405910 - DNA, 15 bp, Homo sapiens
tataaatctagtttt

SEQ ID NO: 1405911 - DNA, 15 bp, Homo sapiens
atataaatctagttt

SEQ ID NO: 1405912 - DNA, 15 bp, Homo sapiens
tatataaatctagtt

SEQ ID NO: 1405913 - DNA, 15 bp, Homo sapiens
atatataaatctagt

SEQ ID NO: 1405914 - DNA, 15 bp, Homo sapiens
tatatataaatctag

SEQ ID NO: 1405915 - DNA, 15 bp, Homo sapiens
ctatatataaatcta

SEQ ID NO: 1405916 - DNA, 15 bp, Homo sapiens
tctatatataaatct

SEQ ID NO: 1405917 - DNA, 15 bp, Homo sapiens
gtctatatataaatc

SEQ ID NO: 1405918 - DNA, 15 bp, Homo sapiens
agtctatatataaat

SEQ ID NO: 1405919 - DNA, 15 bp, Homo sapiens
aagtctatatataaa

SEQ ID NO: 1405920 - DNA, 15 bp, Homo sapiens
gaagtctatatataa

SEQ ID NO: 1405921 - DNA, 15 bp, Homo sapiens
agaagtctatatata

SEQ ID NO: 1405922 - DNA, 15 bp, Homo sapiens
aagaagtctatatat

SEQ ID NO: 1405923 - DNA, 15 bp, Homo sapiens
taagaagtctatata

SEQ ID NO: 1405924 - DNA, 15 bp, Homo sapiens
ataagaagtctatat

SEQ ID NO: 1405925 - DNA, 15 bp, Homo sapiens
aataagaagtctata

SEQ ID NO: 1405926 - DNA, 15 bp, Homo sapiens
caataagaagtctat

SEQ ID NO: 1405927 - DNA, 15 bp, Homo sapiens
gcaataagaagtcta

SEQ ID NO: 1405928 - DNA, 15 bp, Homo sapiens
tgcaataagaagtct

SEQ ID NO: 1405929 - DNA, 15 bp, Homo sapiens
ttgcaataagaagtc

SEQ ID NO: 1405930 - DNA, 15 bp, Homo sapiens
cttgcaataagaagt

SEQ ID NO: 1405931 - DNA, 15 bp, Homo sapiens
acttgcaataagaag

SEQ ID NO: 1405932 - DNA, 15 bp, Homo sapiens
tacttgcaataagaa

SEQ ID NO: 1405933 - DNA, 15 bp, Homo sapiens
atacttgcaataaga

SEQ ID NO: 1405934 - DNA, 15 bp, Homo sapiens
gatacttgcaataag

SEQ ID NO: 1405935 - DNA, 15 bp, Homo sapiens
agatacttgcaataa

SEQ ID NO: 1405936 - DNA, 15 bp, Homo sapiens
tagatacttgcaata

SEQ ID NO: 1405937 - DNA, 15 bp, Homo sapiens
ctagatacttgcaat

SEQ ID NO: 1405938 - DNA, 15 bp, Homo sapiens
actagatacttgcaa

SEQ ID NO: 1405939 - DNA, 15 bp, Homo sapiens
gactagatacttgca

SEQ ID NO: 1405940 - DNA, 15 bp, Homo sapiens
agactagatacttgc

SEQ ID NO: 1405941 - DNA, 15 bp, Homo sapiens
aagactagatacttg

SEQ ID NO: 1405942 - DNA, 15 bp, Homo sapiens
taagactagatactt

SEQ ID NO: 1405943 - DNA, 15 bp, Homo sapiens
ttaagactagatact

SEQ ID NO: 1405944 - DNA, 15 bp, Homo sapiens
tttaagactagatac

SEQ ID NO: 1405945 - DNA, 15 bp, Homo sapiens
atttaagactagata

SEQ ID NO: 1405946 - DNA, 15 bp, Homo sapiens
gatttaagactagat

SEQ ID NO: 1405947 - DNA, 15 bp, Homo sapiens
agatttaagactaga

SEQ ID NO: 1405948 - DNA, 15 bp, Homo sapiens
aagatttaagactag

SEQ ID NO: 1405949 - DNA, 15 bp, Homo sapiens
taagatttaagacta

SEQ ID NO: 1405950 - DNA, 15 bp, Homo sapiens
gtaagatttaagact

SEQ ID NO: 1405951 - DNA, 15 bp, Homo sapiens
tgtaagatttaagac

SEQ ID NO: 1405952 - DNA, 15 bp, Homo sapiens
ttgtaagatttaaga

SEQ ID NO: 1405953 - DNA, 15 bp, Homo sapiens
tttgtaagatttaag

SEQ ID NO: 1405954 - DNA, 15 bp, Homo sapiens
ctttgtaagatttaa

SEQ ID NO: 1405955 - DNA, 15 bp, Homo sapiens
cctttgtaagattta

SEQ ID NO: 1405956 - DNA, 15 bp, Homo sapiens
acctttgtaagattt

SEQ ID NO: 1405957 - DNA, 15 bp, Homo sapiens
tacctttgtaagatt

SEQ ID NO: 1405958 - DNA, 15 bp, Homo sapiens
gtacctttgtaagat

SEQ ID NO: 1405959 - DNA, 15 bp, Homo sapiens
agtacctttgtaaga

SEQ ID NO: 1405960 - DNA, 15 bp, Homo sapiens
tagtacctttgtaag

SEQ ID NO: 1405961 - DNA, 15 bp, Homo sapiens
atagtacctttgtaa

SEQ ID NO: 1405962 - DNA, 15 bp, Homo sapiens
aatagtacctttgta

SEQ ID NO: 1405963 - DNA, 15 bp, Homo sapiens
aaatagtacctttgt

SEQ ID NO: 1405964 - DNA, 15 bp, Homo sapiens
caaatagtacctttg

SEQ ID NO: 1405965 - DNA, 15 bp, Homo sapiens
ccaaatagtaccttt

SEQ ID NO: 1405966 - DNA, 15 bp, Homo sapiens
tccaaatagtacctt

SEQ ID NO: 1405967 - DNA, 15 bp, Homo sapiens
gtccaaatagtacct

SEQ ID NO: 1405968 - DNA, 15 bp, Homo sapiens
agtccaaatagtacc

SEQ ID NO: 1405969 - DNA, 15 bp, Homo sapiens
aagtccaaatagtac

SEQ ID NO: 1405970 - DNA, 15 bp, Homo sapiens
taagtccaaatagta

SEQ ID NO: 1405971 - DNA, 15 bp, Homo sapiens
ttaagtccaaatagt

SEQ ID NO: 1405972 - DNA, 15 bp, Homo sapiens
tttaagtccaaatag

SEQ ID NO: 1405973 - DNA, 15 bp, Homo sapiens
ttttaagtccaaata

SEQ ID NO: 1405974 - DNA, 15 bp, Homo sapiens
gttttaagtccaaat

SEQ ID NO: 1405975 - DNA, 15 bp, Homo sapiens
agttttaagtccaaa

SEQ ID NO: 1405976 - DNA, 15 bp, Homo sapiens
tagttttaagtccaa

SEQ ID NO: 1405977 - DNA, 15 bp, Homo sapiens
atagttttaagtcca

SEQ ID NO: 1405978 - DNA, 15 bp, Homo sapiens
catagttttaagtcc

SEQ ID NO: 1405979 - DNA, 15 bp, Homo sapiens
tcatagttttaagtc

SEQ ID NO: 1405980 - DNA, 15 bp, Homo sapiens
ttcatagttttaagt

SEQ ID NO: 1405981 - DNA, 15 bp, Homo sapiens
tttcatagttttaag

SEQ ID NO: 1405982 - DNA, 15 bp, Homo sapiens
atttcatagttttaa

SEQ ID NO: 1405983 - DNA, 15 bp, Homo sapiens
aatttcatagtttta

SEQ ID NO: 1405984 - DNA, 15 bp, Homo sapiens
caatttcatagtttt

SEQ ID NO: 1405985 - DNA, 15 bp, Homo sapiens
acaatttcatagttt

SEQ ID NO: 1405986 - DNA, 15 bp, Homo sapiens
cacaatttcatagtt

SEQ ID NO: 1405987 - DNA, 15 bp, Homo sapiens
acacaatttcatagt

SEQ ID NO: 1405988 - DNA, 15 bp, Homo sapiens
cacacaatttcatag

SEQ ID NO: 1405989 - DNA, 15 bp, Homo sapiens
gcacacaatttcata

SEQ ID NO: 1405990 - DNA, 15 bp, Homo sapiens
agcacacaatttcat

SEQ ID NO: 1405991 - DNA, 15 bp, Homo sapiens
aagcacacaatttca

SEQ ID NO: 1405992 - DNA, 15 bp, Homo sapiens
taagcacacaatttc

SEQ ID NO: 1405993 - DNA, 15 bp, Homo sapiens
gtaagcacacaattt

SEQ ID NO: 1405994 - DNA, 15 bp, Homo sapiens
agtaagcacacaatt

SEQ ID NO: 1405995 - DNA, 15 bp, Homo sapiens
tagtaagcacacaat

SEQ ID NO: 1405996 - DNA, 15 bp, Homo sapiens
atagtaagcacacaa

SEQ ID NO: 1405997 - DNA, 15 bp, Homo sapiens
tatagtaagcacaca

SEQ ID NO: 1405998 - DNA, 15 bp, Homo sapiens
atatagtaagcacac

SEQ ID NO: 1405999 - DNA, 15 bp, Homo sapiens
tatatagtaagcaca

SEQ ID NO: 1406000 - DNA, 15 bp, Homo sapiens
ttatatagtaagcac

SEQ ID NO: 1406001 - DNA, 15 bp, Homo sapiens
cttatatagtaagca

SEQ ID NO: 1406002 - DNA, 15 bp, Homo sapiens
acttatatagtaagc

SEQ ID NO: 1406003 - DNA, 15 bp, Homo sapiens
cacttatatagtaag

SEQ ID NO: 1406004 - DNA, 15 bp, Homo sapiens
acacttatatagtaa

SEQ ID NO: 1406005 - DNA, 15 bp, Homo sapiens
tacacttatatagta

SEQ ID NO: 1406006 - DNA, 15 bp, Homo sapiens
gtacacttatatagt

SEQ ID NO: 1406007 - DNA, 15 bp, Homo sapiens
agtacacttatatag

SEQ ID NO: 1406008 - DNA, 15 bp, Homo sapiens
aagtacacttatata

SEQ ID NO: 1406009 - DNA, 15 bp, Homo sapiens
taagtacacttatat

SEQ ID NO: 1406010 - DNA, 15 bp, Homo sapiens
ataagtacacttata

SEQ ID NO: 1406011 - DNA, 15 bp, Homo sapiens
aataagtacacttat

SEQ ID NO: 1406012 - DNA, 15 bp, Homo sapiens
aaataagtacactta

SEQ ID NO: 1406013 - DNA, 15 bp, Homo sapiens
aaaataagtacactt

SEQ ID NO: 1406014 - DNA, 15 bp, Homo sapiens
caaaataagtacact

SEQ ID NO: 1406015 - DNA, 15 bp, Homo sapiens
tcaaaataagtacac

SEQ ID NO: 1406016 - DNA, 15 bp, Homo sapiens
ctcaaaataagtaca

SEQ ID NO: 1406017 - DNA, 15 bp, Homo sapiens
actcaaaataagtac

SEQ ID NO: 1406018 - DNA, 15 bp, Homo sapiens
aactcaaaataagta

SEQ ID NO: 1406019 - DNA, 15 bp, Homo sapiens
taactcaaaataagt

SEQ ID NO: 1406020 - DNA, 15 bp, Homo sapiens
ataactcaaaataag

SEQ ID NO: 1406021 - DNA, 15 bp, Homo sapiens
cataactcaaaataa

SEQ ID NO: 1406022 - DNA, 15 bp, Homo sapiens
acataactcaaaata

SEQ ID NO: 1406023 - DNA, 15 bp, Homo sapiens
aacataactcaaaat

SEQ ID NO: 1406024 - DNA, 15 bp, Homo sapiens
aaacataactcaaaa

SEQ ID NO: 1406025 - DNA, 15 bp, Homo sapiens
aaaacataactcaaa

SEQ ID NO: 1406026 - DNA, 15 bp, Homo sapiens
taaaacataactcaa

SEQ ID NO: 1406027 - DNA, 15 bp, Homo sapiens
ttaaaacataactca

SEQ ID NO: 1406028 - DNA, 15 bp, Homo sapiens
tttaaaacataactc

SEQ ID NO: 1406029 - DNA, 15 bp, Homo sapiens
gtttaaaacataact

SEQ ID NO: 1406030 - DNA, 15 bp, Homo sapiens
agtttaaaacataac

SEQ ID NO: 1406031 - DNA, 15 bp, Homo sapiens
aagtttaaaacataa

SEQ ID NO: 1406032 - DNA, 15 bp, Homo sapiens
caagtttaaaacata

SEQ ID NO: 1406033 - DNA, 15 bp, Homo sapiens
tcaagtttaaaacat

SEQ ID NO: 1406034 - DNA, 15 bp, Homo sapiens
ttcaagtttaaaaca

SEQ ID NO: 1406035 - DNA, 15 bp, Homo sapiens
tttcaagtttaaaac

SEQ ID NO: 1406036 - DNA, 15 bp, Homo sapiens
atttcaagtttaaaa

SEQ ID NO: 1406037 - DNA, 15 bp, Homo sapiens
aatttcaagtttaaa

SEQ ID NO: 1406038 - DNA, 15 bp, Homo sapiens
gaatttcaagtttaa

SEQ ID NO: 1406039 - DNA, 15 bp, Homo sapiens
ggaatttcaagttta

SEQ ID NO: 1406040 - DNA, 15 bp, Homo sapiens
tggaatttcaagttt

SEQ ID NO: 1406041 - DNA, 15 bp, Homo sapiens
atggaatttcaagtt

SEQ ID NO: 1406042 - DNA, 15 bp, Homo sapiens
aatggaatttcaagt

SEQ ID NO: 1406043 - DNA, 15 bp, Homo sapiens
gaatggaatttcaag

SEQ ID NO: 1406044 - DNA, 15 bp, Homo sapiens
agaatggaatttcaa

SEQ ID NO: 1406045 - DNA, 15 bp, Homo sapiens
aagaatggaatttca

SEQ ID NO: 1406046 - DNA, 15 bp, Homo sapiens
taagaatggaatttc

SEQ ID NO: 1406047 - DNA, 15 bp, Homo sapiens
ttaagaatggaattt

SEQ ID NO: 1406048 - DNA, 15 bp, Homo sapiens
attaagaatggaatt

SEQ ID NO: 1406049 - DNA, 15 bp, Homo sapiens
cattaagaatggaat

SEQ ID NO: 1406050 - DNA, 15 bp, Homo sapiens
acattaagaatggaa

SEQ ID NO: 1406051 - DNA, 15 bp, Homo sapiens
gacattaagaatgga

SEQ ID NO: 1406052 - DNA, 15 bp, Homo sapiens
agacattaagaatgg

SEQ ID NO: 1406053 - DNA, 15 bp, Homo sapiens
tagacattaagaatg

SEQ ID NO: 1406054 - DNA, 15 bp, Homo sapiens
ctagacattaagaat

SEQ ID NO: 1406055 - DNA, 15 bp, Homo sapiens
tctagacattaagaa

SEQ ID NO: 1406056 - DNA, 15 bp, Homo sapiens
ctctagacattaaga

SEQ ID NO: 1406057 - DNA, 15 bp, Homo sapiens
actctagacattaag

SEQ ID NO: 1406058 - DNA, 15 bp, Homo sapiens
tactctagacattaa

SEQ ID NO: 1406059 - DNA, 15 bp, Homo sapiens
ttactctagacatta

SEQ ID NO: 1406060 - DNA, 15 bp, Homo sapiens
attactctagacatt

SEQ ID NO: 1406061 - DNA, 15 bp, Homo sapiens
aattactctagacat

SEQ ID NO: 1406062 - DNA, 15 bp, Homo sapiens
taattactctagaca

SEQ ID NO: 1406063 - DNA, 15 bp, Homo sapiens
ataattactctagac

SEQ ID NO: 1406064 - DNA, 15 bp, Homo sapiens
cataattactctaga

SEQ ID NO: 1406065 - DNA, 15 bp, Homo sapiens
tcataattactctag

SEQ ID NO: 1406066 - DNA, 15 bp, Homo sapiens
ttcataattactcta

SEQ ID NO: 1406067 - DNA, 15 bp, Homo sapiens
attcataattactct

SEQ ID NO: 1406068 - DNA, 15 bp, Homo sapiens
cattcataattactc

SEQ ID NO: 1406069 - DNA, 15 bp, Homo sapiens
ccattcataattact

SEQ ID NO: 1406070 - DNA, 15 bp, Homo sapiens
accattcataattac

SEQ ID NO: 1406071 - DNA, 15 bp, Homo sapiens
aaccattcataatta

SEQ ID NO: 1406072 - DNA, 15 bp, Homo sapiens
taaccattcataatt

SEQ ID NO: 1406073 - DNA, 15 bp, Homo sapiens
ttaaccattcataat

SEQ ID NO: 1406074 - DNA, 15 bp, Homo sapiens
tttaaccattcataa

SEQ ID NO: 1406075 - DNA, 15 bp, Homo sapiens
atttaaccattcata

SEQ ID NO: 1406076 - DNA, 15 bp, Homo sapiens
aatttaaccattcat

SEQ ID NO: 1406077 - DNA, 15 bp, Homo sapiens
taatttaaccattca

SEQ ID NO: 1406078 - DNA, 15 bp, Homo sapiens
ataatttaaccattc

SEQ ID NO: 1406079 - DNA, 15 bp, Homo sapiens
cataatttaaccatt

SEQ ID NO: 1406080 - DNA, 15 bp, Homo sapiens
tcataatttaaccat

SEQ ID NO: 1406081 - DNA, 15 bp, Homo sapiens
ttcataatttaacca

SEQ ID NO: 1406082 - DNA, 15 bp, Homo sapiens
attcataatttaacc

SEQ ID NO: 1406083 - DNA, 15 bp, Homo sapiens
cattcataatttaac

SEQ ID NO: 1406084 - DNA, 15 bp, Homo sapiens
tcattcataatttaa

SEQ ID NO: 1406085 - DNA, 15 bp, Homo sapiens
gtcattcataattta

SEQ ID NO: 1406086 - DNA, 15 bp, Homo sapiens
agtcattcataattt

SEQ ID NO: 1406087 - DNA, 15 bp, Homo sapiens
gagtcattcataatt

SEQ ID NO: 1406088 - DNA, 15 bp, Homo sapiens
agagtcattcataat

SEQ ID NO: 1406089 - DNA, 15 bp, Homo sapiens
tagagtcattcataa

SEQ ID NO: 1406090 - DNA, 15 bp, Homo sapiens
ttagagtcattcata

SEQ ID NO: 1406091 - DNA, 15 bp, Homo sapiens
attagagtcattcat

SEQ ID NO: 1406092 - DNA, 15 bp, Homo sapiens
tattagagtcattca

SEQ ID NO: 1406093 - DNA, 15 bp, Homo sapiens
ctattagagtcattc

SEQ ID NO: 1406094 - DNA, 15 bp, Homo sapiens
actattagagtcatt

SEQ ID NO: 1406095 - DNA, 15 bp, Homo sapiens
aactattagagtcat

SEQ ID NO: 1406096 - DNA, 15 bp, Homo sapiens
aaactattagagtca

SEQ ID NO: 1406097 - DNA, 15 bp, Homo sapiens
taaactattagagtc

SEQ ID NO: 1406098 - DNA, 15 bp, Homo sapiens
ttaaactattagagt

SEQ ID NO: 1406099 - DNA, 15 bp, Homo sapiens
tttaaactattagag

SEQ ID NO: 1406100 - DNA, 15 bp, Homo sapiens
ctttaaactattaga

SEQ ID NO: 1406101 - DNA, 15 bp, Homo sapiens
gctttaaactattag

SEQ ID NO: 1406102 - DNA, 15 bp, Homo sapiens
agctttaaactatta

SEQ ID NO: 1406103 - DNA, 15 bp, Homo sapiens
tagctttaaactatt

SEQ ID NO: 1406104 - DNA, 15 bp, Homo sapiens
gtagctttaaactat

SEQ ID NO: 1406105 - DNA, 15 bp, Homo sapiens
tgtagctttaaacta

SEQ ID NO: 1406106 - DNA, 15 bp, Homo sapiens
ctgtagctttaaact

SEQ ID NO: 1406107 - DNA, 15 bp, Homo sapiens
actgtagctttaaac

SEQ ID NO: 1406108 - DNA, 15 bp, Homo sapiens
tactgtagctttaaa

SEQ ID NO: 1406109 - DNA, 15 bp, Homo sapiens
atactgtagctttaa

SEQ ID NO: 1406110 - DNA, 15 bp, Homo sapiens
aatactgtagcttta

SEQ ID NO: 1406111 - DNA, 15 bp, Homo sapiens
aaatactgtagcttt

SEQ ID NO: 1406112 - DNA, 15 bp, Homo sapiens
taaatactgtagctt

SEQ ID NO: 1406113 - DNA, 15 bp, Homo sapiens
ataaatactgtagct

SEQ ID NO: 1406114 - DNA, 15 bp, Homo sapiens
aataaatactgtagc

SEQ ID NO: 1406115 - DNA, 15 bp, Homo sapiens
aaataaatactgtag

SEQ ID NO: 1406116 - DNA, 15 bp, Homo sapiens
taaataaatactgta

SEQ ID NO: 1406117 - DNA, 15 bp, Homo sapiens
ataaataaatactgt

SEQ ID NO: 1406118 - DNA, 15 bp, Homo sapiens
aataaataaatactg

SEQ ID NO: 1406119 - DNA, 15 bp, Homo sapiens
aaataaataaatact

SEQ ID NO: 1406120 - DNA, 15 bp, Homo sapiens
taaataaataaatac

SEQ ID NO: 1406121 - DNA, 15 bp, Homo sapiens
attaaataaataaat

SEQ ID NO: 1406122 - DNA, 15 bp, Homo sapiens
taaattaaataaata

SEQ ID NO: 1406123 - DNA, 15 bp, Homo sapiens
ataaattaaataaat

SEQ ID NO: 1406124 - DNA, 15 bp, Homo sapiens
aataaattaaataaa

SEQ ID NO: 1406125 - DNA, 15 bp, Homo sapiens
aaaaataaattaaat

SEQ ID NO: 1406126 - DNA, 15 bp, Homo sapiens
aaaaaataaattaaa

SEQ ID NO: 1406127 - DNA, 15 bp, Homo sapiens
caaaaaataaattaa

SEQ ID NO: 1406128 - DNA, 15 bp, Homo sapiens
tcaaaaaataaatta

SEQ ID NO: 1406129 - DNA, 15 bp, Homo sapiens
ctcaaaaaataaatt

SEQ ID NO: 1406130 - DNA, 15 bp, Homo sapiens
cgacaagagcgaaac

SEQ ID NO: 1406131 - DNA, 15 bp, Homo sapiens
gcgacaagagcgaaa

SEQ ID NO: 1406132 - DNA, 15 bp, Homo sapiens
ggcgacaagagcgaa

SEQ ID NO: 1406133 - DNA, 15 bp, Homo sapiens
tgccactacactcca

SEQ ID NO: 1406134 - DNA, 15 bp, Homo sapiens
gtgccactacactcc

SEQ ID NO: 1406135 - DNA, 15 bp, Homo sapiens
ggtgccactacactc

SEQ ID NO: 1406136 - DNA, 15 bp, Homo sapiens
tggtgccactacact

SEQ ID NO: 1406137 - DNA, 15 bp, Homo sapiens
atggtgccactacac

SEQ ID NO: 1406138 - DNA, 15 bp, Homo sapiens
gatggtgccactaca

SEQ ID NO: 1406139 - DNA, 15 bp, Homo sapiens
agatggtgccactac

SEQ ID NO: 1406140 - DNA, 15 bp, Homo sapiens
aagatggtgccacta

SEQ ID NO: 1406141 - DNA, 15 bp, Homo sapiens
caagatggtgccact

SEQ ID NO: 1406142 - DNA, 15 bp, Homo sapiens
ccaagatggtgccac

SEQ ID NO: 1406143 - DNA, 15 bp, Homo sapiens
accaagatggtgcca

SEQ ID NO: 1406144 - DNA, 15 bp, Homo sapiens
aaccaagatggtgcc

SEQ ID NO: 1406145 - DNA, 15 bp, Homo sapiens
gaaccaagatggtgc

SEQ ID NO: 1406146 - DNA, 15 bp, Homo sapiens
tgaaccaagatggtg

SEQ ID NO: 1406147 - DNA, 15 bp, Homo sapiens
gtgaaccaagatggt

SEQ ID NO: 1406148 - DNA, 15 bp, Homo sapiens
agtgaaccaagatgg

SEQ ID NO: 1406149 - DNA, 15 bp, Homo sapiens
cagtgaaccaagatg

SEQ ID NO: 1406150 - DNA, 15 bp, Homo sapiens
ttgcagtgaaccaag

SEQ ID NO: 1406151 - DNA, 15 bp, Homo sapiens
gttgcagtgaaccaa

SEQ ID NO: 1406152 - DNA, 15 bp, Homo sapiens
ggttgcagtgaacca

SEQ ID NO: 1406153 - DNA, 15 bp, Homo sapiens
agaggttgcagtgaa

SEQ ID NO: 1406154 - DNA, 15 bp, Homo sapiens
cgaggcagaggttgc

SEQ ID NO: 1406155 - DNA, 15 bp, Homo sapiens
gcgaggcagaggttg

SEQ ID NO: 1406156 - DNA, 15 bp, Homo sapiens
cgcgaggcagaggtt

SEQ ID NO: 1406157 - DNA, 15 bp, Homo sapiens
ccgcgaggcagaggt

SEQ ID NO: 1406158 - DNA, 15 bp, Homo sapiens
cccgcgaggcagagg

SEQ ID NO: 1406159 - DNA, 15 bp, Homo sapiens
acccgcgaggcagag

SEQ ID NO: 1406160 - DNA, 15 bp, Homo sapiens
aacccgcgaggcaga

SEQ ID NO: 1406161 - DNA, 15 bp, Homo sapiens
gaacccgcgaggcag

SEQ ID NO: 1406162 - DNA, 15 bp, Homo sapiens
tgaacccgcgaggca

SEQ ID NO: 1406163 - DNA, 15 bp, Homo sapiens
ttgaacccgcgaggc

SEQ ID NO: 1406164 - DNA, 15 bp, Homo sapiens
cttgaacccgcgagg

SEQ ID NO: 1406165 - DNA, 15 bp, Homo sapiens
acttgaacccgcgag

SEQ ID NO: 1406166 - DNA, 15 bp, Homo sapiens
cacttgaacccgcga

SEQ ID NO: 1406167 - DNA, 15 bp, Homo sapiens
tcacttgaacccgcg

SEQ ID NO: 1406168 - DNA, 15 bp, Homo sapiens
atcacttgaacccgc

SEQ ID NO: 1406169 - DNA, 15 bp, Homo sapiens
ccacttgggaggctg

SEQ ID NO: 1406170 - DNA, 15 bp, Homo sapiens
gccacttgggaggct

SEQ ID NO: 1406171 - DNA, 15 bp, Homo sapiens
agccacttgggaggc

SEQ ID NO: 1406172 - DNA, 15 bp, Homo sapiens
cagccacttgggagg

SEQ ID NO: 1406173 - DNA, 15 bp, Homo sapiens
ccagccacttgggag

SEQ ID NO: 1406174 - DNA, 15 bp, Homo sapiens
cccagccacttggga

SEQ ID NO: 1406175 - DNA, 15 bp, Homo sapiens
tcccagccacttggg

SEQ ID NO: 1406176 - DNA, 15 bp, Homo sapiens
atcccagccacttgg

SEQ ID NO: 1406177 - DNA, 15 bp, Homo sapiens
aatcccagccacttg

SEQ ID NO: 1406178 - DNA, 15 bp, Homo sapiens
taatcccagccactt

SEQ ID NO: 1406179 - DNA, 15 bp, Homo sapiens
gtaatcccagccact

SEQ ID NO: 1406180 - DNA, 15 bp, Homo sapiens
tgtaatcccagccac

SEQ ID NO: 1406181 - DNA, 15 bp, Homo sapiens
ctgtaatcccagcca

SEQ ID NO: 1406182 - DNA, 15 bp, Homo sapiens
cctgtaatcccagcc

SEQ ID NO: 1406183 - DNA, 15 bp, Homo sapiens
aatacacctgtaatc

SEQ ID NO: 1406184 - DNA, 15 bp, Homo sapiens
aaatacacctgtaat

SEQ ID NO: 1406185 - DNA, 15 bp, Homo sapiens
gaaatacacctgtaa

SEQ ID NO: 1406186 - DNA, 15 bp, Homo sapiens
tgaaatacacctgta

SEQ ID NO: 1406187 - DNA, 15 bp, Homo sapiens
gtgaaatacacctgt

SEQ ID NO: 1406188 - DNA, 15 bp, Homo sapiens
ggtgaaatacacctg

SEQ ID NO: 1406189 - DNA, 15 bp, Homo sapiens
tggtgaaatacacct

SEQ ID NO: 1406190 - DNA, 15 bp, Homo sapiens
atggtgaaatacacc

SEQ ID NO: 1406191 - DNA, 15 bp, Homo sapiens
catggtgaaatacac

SEQ ID NO: 1406192 - DNA, 15 bp, Homo sapiens
gcatggtgaaataca

SEQ ID NO: 1406193 - DNA, 15 bp, Homo sapiens
ggcatggtgaaatac

SEQ ID NO: 1406194 - DNA, 15 bp, Homo sapiens
aggcatggtgaaata

SEQ ID NO: 1406195 - DNA, 15 bp, Homo sapiens
caggcatggtgaaat

SEQ ID NO: 1406196 - DNA, 15 bp, Homo sapiens
ccaggcatggtgaaa

SEQ ID NO: 1406197 - DNA, 15 bp, Homo sapiens
gccaggcatggtgaa

SEQ ID NO: 1406198 - DNA, 15 bp, Homo sapiens
agccaggcatggtga

SEQ ID NO: 1406199 - DNA, 15 bp, Homo sapiens
gcctgtctctactaa

SEQ ID NO: 1406200 - DNA, 15 bp, Homo sapiens
agcctgtctctacta

SEQ ID NO: 1406201 - DNA, 15 bp, Homo sapiens
aagcctgtctctact

SEQ ID NO: 1406202 - DNA, 15 bp, Homo sapiens
aaagcctgtctctac

SEQ ID NO: 1406203 - DNA, 15 bp, Homo sapiens
aaaagcctgtctcta

SEQ ID NO: 1406204 - DNA, 15 bp, Homo sapiens
caaaagcctgtctct

SEQ ID NO: 1406205 - DNA, 15 bp, Homo sapiens
gcaaaagcctgtctc

SEQ ID NO: 1406206 - DNA, 15 bp, Homo sapiens
ggcaaaagcctgtct

SEQ ID NO: 1406207 - DNA, 15 bp, Homo sapiens
tggcaaaagcctgtc

SEQ ID NO: 1406208 - DNA, 15 bp, Homo sapiens
atggcaaaagcctgt

SEQ ID NO: 1406209 - DNA, 15 bp, Homo sapiens
catggcaaaagcctg

SEQ ID NO: 1406210 - DNA, 15 bp, Homo sapiens
acatggcaaaagcct

SEQ ID NO: 1406211 - DNA, 15 bp, Homo sapiens
aacatggcaaaagcc

SEQ ID NO: 1406212 - DNA, 15 bp, Homo sapiens
taacatggcaaaagc

SEQ ID NO: 1406213 - DNA, 15 bp, Homo sapiens
ctaacatggcaaaag

SEQ ID NO: 1406214 - DNA, 15 bp, Homo sapiens
gctaacatggcaaaa

SEQ ID NO: 1406215 - DNA, 15 bp, Homo sapiens
ggctaacatggcaaa

SEQ ID NO: 1406216 - DNA, 15 bp, Homo sapiens
aggctaacatggcaa

SEQ ID NO: 1406217 - DNA, 15 bp, Homo sapiens
caggctaacatggca

SEQ ID NO: 1406218 - DNA, 15 bp, Homo sapiens
ccaggctaacatggc

SEQ ID NO: 1406219 - DNA, 15 bp, Homo sapiens
gccaggctaacatgg

SEQ ID NO: 1406220 - DNA, 15 bp, Homo sapiens
agccaggctaacatg

SEQ ID NO: 1406221 - DNA, 15 bp, Homo sapiens
cagccaggctaacat

SEQ ID NO: 1406222 - DNA, 15 bp, Homo sapiens
ccagccaggctaaca

SEQ ID NO: 1406223 - DNA, 15 bp, Homo sapiens
accagccaggctaac

SEQ ID NO: 1406224 - DNA, 15 bp, Homo sapiens
gaccagccaggctaa

SEQ ID NO: 1406225 - DNA, 15 bp, Homo sapiens
agaccagccaggcta

SEQ ID NO: 1406226 - DNA, 15 bp, Homo sapiens
gagaccagccaggct

SEQ ID NO: 1406227 - DNA, 15 bp, Homo sapiens
cgagaccagccaggc

SEQ ID NO: 1406228 - DNA, 15 bp, Homo sapiens
tcgagaccagccagg

SEQ ID NO: 1406229 - DNA, 15 bp, Homo sapiens
ttcgagaccagccag

SEQ ID NO: 1406230 - DNA, 15 bp, Homo sapiens
gttcgagaccagcca

SEQ ID NO: 1406231 - DNA, 15 bp, Homo sapiens
gtcacctgaggtcag

SEQ ID NO: 1406232 - DNA, 15 bp, Homo sapiens
ggtcacctgaggtca

SEQ ID NO: 1406233 - DNA, 15 bp, Homo sapiens
aggtcacctgaggtc

SEQ ID NO: 1406234 - DNA, 15 bp, Homo sapiens
taggtcacctgaggt

SEQ ID NO: 1406235 - DNA, 15 bp, Homo sapiens
gtaggtcacctgagg

SEQ ID NO: 1406236 - DNA, 15 bp, Homo sapiens
ggtaggtcacctgag

SEQ ID NO: 1406237 - DNA, 15 bp, Homo sapiens
gggtaggtcacctga

SEQ ID NO: 1406238 - DNA, 15 bp, Homo sapiens
agggtaggtcacctg

SEQ ID NO: 1406239 - DNA, 15 bp, Homo sapiens
gagggtaggtcacct

SEQ ID NO: 1406240 - DNA, 15 bp, Homo sapiens
ggagggtaggtcacc

SEQ ID NO: 1406241 - DNA, 15 bp, Homo sapiens
aggagggtaggtcac

SEQ ID NO: 1406242 - DNA, 15 bp, Homo sapiens
gaggagggtaggtca

SEQ ID NO: 1406243 - DNA, 15 bp, Homo sapiens
tgaggagggtaggtc

SEQ ID NO: 1406244 - DNA, 15 bp, Homo sapiens
ctgaggagggtaggt

SEQ ID NO: 1406245 - DNA, 15 bp, Homo sapiens
gctgaggagggtagg

SEQ ID NO: 1406246 - DNA, 15 bp, Homo sapiens
ggctgaggagggtag

SEQ ID NO: 1406247 - DNA, 15 bp, Homo sapiens
aggctgaggagggta

SEQ ID NO: 1406248 - DNA, 15 bp, Homo sapiens
gaggctgaggagggt

SEQ ID NO: 1406249 - DNA, 15 bp, Homo sapiens
tccttgggaggctga

SEQ ID NO: 1406250 - DNA, 15 bp, Homo sapiens
atccttgggaggctg

SEQ ID NO: 1406251 - DNA, 15 bp, Homo sapiens
aatccttgggaggct

SEQ ID NO: 1406252 - DNA, 15 bp, Homo sapiens
taatccttgggaggc

SEQ ID NO: 1406253 - DNA, 15 bp, Homo sapiens
gtaatccttgggagg

SEQ ID NO: 1406254 - DNA, 15 bp, Homo sapiens
tgtaatccttgggag

SEQ ID NO: 1406255 - DNA, 15 bp, Homo sapiens
ttgtaatccttggga

SEQ ID NO: 1406256 - DNA, 15 bp, Homo sapiens
cttgtaatccttggg

SEQ ID NO: 1406257 - DNA, 15 bp, Homo sapiens
gcttgtaatccttgg

SEQ ID NO: 1406258 - DNA, 15 bp, Homo sapiens
tgcttgtaatccttg

SEQ ID NO: 1406259 - DNA, 15 bp, Homo sapiens
atgcttgtaatcctt

SEQ ID NO: 1406260 - DNA, 15 bp, Homo sapiens
gtaggccaggtgtgg

SEQ ID NO: 1406261 - DNA, 15 bp, Homo sapiens
tgtaggccaggtgtg

SEQ ID NO: 1406262 - DNA, 15 bp, Homo sapiens
ctgtaggccaggtgt

SEQ ID NO: 1406263 - DNA, 15 bp, Homo sapiens
actgtaggccaggtg

SEQ ID NO: 1406264 - DNA, 15 bp, Homo sapiens
tactgtaggccaggt

SEQ ID NO: 1406265 - DNA, 15 bp, Homo sapiens
atactgtaggccagg

SEQ ID NO: 1406266 - DNA, 15 bp, Homo sapiens
aatactgtaggccag

SEQ ID NO: 1406267 - DNA, 15 bp, Homo sapiens
aaatactgtaggcca

SEQ ID NO: 1406268 - DNA, 15 bp, Homo sapiens
aaaatactgtaggcc

SEQ ID NO: 1406269 - DNA, 15 bp, Homo sapiens
taaaatactgtaggc

SEQ ID NO: 1406270 - DNA, 15 bp, Homo sapiens
ttaaaatactgtagg

SEQ ID NO: 1406271 - DNA, 15 bp, Homo sapiens
attaaaatactgtag

SEQ ID NO: 1406272 - DNA, 15 bp, Homo sapiens
cattaaaatactgta

SEQ ID NO: 1406273 - DNA, 15 bp, Homo sapiens
acattaaaatactgt

SEQ ID NO: 1406274 - DNA, 15 bp, Homo sapiens
cacattaaaatactg

SEQ ID NO: 1406275 - DNA, 15 bp, Homo sapiens
ccacattaaaatact

SEQ ID NO: 1406276 - DNA, 15 bp, Homo sapiens
tccacattaaaatac

SEQ ID NO: 1406277 - DNA, 15 bp, Homo sapiens
gtccacattaaaata

SEQ ID NO: 1406278 - DNA, 15 bp, Homo sapiens
agtccacattaaaat

SEQ ID NO: 1406279 - DNA, 15 bp, Homo sapiens
gagtccacattaaaa

SEQ ID NO: 1406280 - DNA, 15 bp, Homo sapiens
agagtccacattaaa

SEQ ID NO: 1406281 - DNA, 15 bp, Homo sapiens
gagagtccacattaa

SEQ ID NO: 1406282 - DNA, 15 bp, Homo sapiens
agagagtccacatta

SEQ ID NO: 1406283 - DNA, 15 bp, Homo sapiens
cagagagtccacatt

SEQ ID NO: 1406284 - DNA, 15 bp, Homo sapiens
acagagagtccacat

SEQ ID NO: 1406285 - DNA, 15 bp, Homo sapiens
gacagagagtccaca

SEQ ID NO: 1406286 - DNA, 15 bp, Homo sapiens
tgacagagagtccac

SEQ ID NO: 1406287 - DNA, 15 bp, Homo sapiens
atgacagagagtcca

SEQ ID NO: 1406288 - DNA, 15 bp, Homo sapiens
gatgacagagagtcc

SEQ ID NO: 1406289 - DNA, 15 bp, Homo sapiens
ggatgacagagagtc

SEQ ID NO: 1406290 - DNA, 15 bp, Homo sapiens
tggatgacagagagt

SEQ ID NO: 1406291 - DNA, 15 bp, Homo sapiens
atggatgacagagag

SEQ ID NO: 1406292 - DNA, 15 bp, Homo sapiens
aatggatgacagaga

SEQ ID NO: 1406293 - DNA, 15 bp, Homo sapiens
taatggatgacagag

SEQ ID NO: 1406294 - DNA, 15 bp, Homo sapiens
ataatggatgacaga

SEQ ID NO: 1406295 - DNA, 15 bp, Homo sapiens
cataatggatgacag

SEQ ID NO: 1406296 - DNA, 15 bp, Homo sapiens
gcataatggatgaca

SEQ ID NO: 1406297 - DNA, 15 bp, Homo sapiens
agcataatggatgac

SEQ ID NO: 1406298 - DNA, 15 bp, Homo sapiens
cagcataatggatga

SEQ ID NO: 1406299 - DNA, 15 bp, Homo sapiens
acagcataatggatg

SEQ ID NO: 1406300 - DNA, 15 bp, Homo sapiens
aacagcataatggat

SEQ ID NO: 1406301 - DNA, 15 bp, Homo sapiens
aaacagcataatgga

SEQ ID NO: 1406302 - DNA, 15 bp, Homo sapiens
taaacagcataatgg

SEQ ID NO: 1406303 - DNA, 15 bp, Homo sapiens
ataaacagcataatg

SEQ ID NO: 1406304 - DNA, 15 bp, Homo sapiens
gataaacagcataat

SEQ ID NO: 1406305 - DNA, 15 bp, Homo sapiens
ggataaacagcataa

SEQ ID NO: 1406306 - DNA, 15 bp, Homo sapiens
aggataaacagcata

SEQ ID NO: 1406307 - DNA, 15 bp, Homo sapiens
caggataaacagcat

SEQ ID NO: 1406308 - DNA, 15 bp, Homo sapiens
acaggataaacagca

SEQ ID NO: 1406309 - DNA, 15 bp, Homo sapiens
cacaggataaacagc

SEQ ID NO: 1406310 - DNA, 15 bp, Homo sapiens
ccacaggataaacag

SEQ ID NO: 1406311 - DNA, 15 bp, Homo sapiens
accacaggataaaca

SEQ ID NO: 1406312 - DNA, 15 bp, Homo sapiens
caccacaggataaac

SEQ ID NO: 1406313 - DNA, 15 bp, Homo sapiens
tcaccacaggataaa

SEQ ID NO: 1406314 - DNA, 15 bp, Homo sapiens
ttcaccacaggataa

SEQ ID NO: 1406315 - DNA, 15 bp, Homo sapiens
tttcaccacaggata

SEQ ID NO: 1406316 - DNA, 15 bp, Homo sapiens
ttttcaccacaggat

SEQ ID NO: 1406317 - DNA, 15 bp, Homo sapiens
attttcaccacagga

SEQ ID NO: 1406318 - DNA, 15 bp, Homo sapiens
aattttcaccacagg

SEQ ID NO: 1406319 - DNA, 15 bp, Homo sapiens
aaattttcaccacag

SEQ ID NO: 1406320 - DNA, 15 bp, Homo sapiens
aaaattttcaccaca

SEQ ID NO: 1406321 - DNA, 15 bp, Homo sapiens
taaaattttcaccac

SEQ ID NO: 1406322 - DNA, 15 bp, Homo sapiens
ataaaattttcacca

SEQ ID NO: 1406323 - DNA, 15 bp, Homo sapiens
cataaaattttcacc

SEQ ID NO: 1406324 - DNA, 15 bp, Homo sapiens
tcataaaattttcac

SEQ ID NO: 1406325 - DNA, 15 bp, Homo sapiens
ttcataaaattttca

SEQ ID NO: 1406326 - DNA, 15 bp, Homo sapiens
cttcataaaattttc

SEQ ID NO: 1406327 - DNA, 15 bp, Homo sapiens
tcttcataaaatttt

SEQ ID NO: 1406328 - DNA, 15 bp, Homo sapiens
atcttcataaaattt

SEQ ID NO: 1406329 - DNA, 15 bp, Homo sapiens
aatcttcataaaatt

SEQ ID NO: 1406330 - DNA, 15 bp, Homo sapiens
caatcttcataaaat

SEQ ID NO: 1406331 - DNA, 15 bp, Homo sapiens
tcaatcttcataaaa

SEQ ID NO: 1406332 - DNA, 15 bp, Homo sapiens
ttcaatcttcataaa

SEQ ID NO: 1406333 - DNA, 15 bp, Homo sapiens
attcaatcttcataa

SEQ ID NO: 1406334 - DNA, 15 bp, Homo sapiens
cattcaatcttcata

SEQ ID NO: 1406335 - DNA, 15 bp, Homo sapiens
acattcaatcttcat

SEQ ID NO: 1406336 - DNA, 15 bp, Homo sapiens
aacattcaatcttca

SEQ ID NO: 1406337 - DNA, 15 bp, Homo sapiens
aaacattcaatcttc

SEQ ID NO: 1406338 - DNA, 15 bp, Homo sapiens
aaaacattcaatctt

SEQ ID NO: 1406339 - DNA, 15 bp, Homo sapiens
aaaaacattcaatct

SEQ ID NO: 1406340 - DNA, 15 bp, Homo sapiens
gaaaaacattcaatc

SEQ ID NO: 1406341 - DNA, 15 bp, Homo sapiens
agaaaaacattcaat

SEQ ID NO: 1406342 - DNA, 15 bp, Homo sapiens
gagaaaaacattcaa

SEQ ID NO: 1406343 - DNA, 15 bp, Homo sapiens
agagaaaaacattca

SEQ ID NO: 1406344 - DNA, 15 bp, Homo sapiens
tagagaaaaacattc

SEQ ID NO: 1406345 - DNA, 15 bp, Homo sapiens
ctagagaaaaacatt

SEQ ID NO: 1406346 - DNA, 15 bp, Homo sapiens
gctagagaaaaacat

SEQ ID NO: 1406347 - DNA, 15 bp, Homo sapiens
cgctagagaaaaaca

SEQ ID NO: 1406348 - DNA, 15 bp, Homo sapiens
acgctagagaaaaac

SEQ ID NO: 1406349 - DNA, 15 bp, Homo sapiens
cacgctagagaaaaa

SEQ ID NO: 1406350 - DNA, 15 bp, Homo sapiens
tcacgctagagaaaa

SEQ ID NO: 1406351 - DNA, 15 bp, Homo sapiens
ttcacgctagagaaa

SEQ ID NO: 1406352 - DNA, 15 bp, Homo sapiens
attcacgctagagaa

SEQ ID NO: 1406353 - DNA, 15 bp, Homo sapiens
aattcacgctagaga

SEQ ID NO: 1406354 - DNA, 15 bp, Homo sapiens
caattcacgctagag

SEQ ID NO: 1406355 - DNA, 15 bp, Homo sapiens
gcaattcacgctaga

SEQ ID NO: 1406356 - DNA, 15 bp, Homo sapiens
agcaattcacgctag

SEQ ID NO: 1406357 - DNA, 15 bp, Homo sapiens
aagcaattcacgcta

SEQ ID NO: 1406358 - DNA, 15 bp, Homo sapiens
aaagcaattcacgct

SEQ ID NO: 1406359 - DNA, 15 bp, Homo sapiens
gaaagcaattcacgc

SEQ ID NO: 1406360 - DNA, 15 bp, Homo sapiens
agaaagcaattcacg

SEQ ID NO: 1406361 - DNA, 15 bp, Homo sapiens
gagaaagcaattcac

SEQ ID NO: 1406362 - DNA, 15 bp, Homo sapiens
agagaaagcaattca

SEQ ID NO: 1406363 - DNA, 15 bp, Homo sapiens
aagagaaagcaattc

SEQ ID NO: 1406364 - DNA, 15 bp, Homo sapiens
taagagaaagcaatt

SEQ ID NO: 1406365 - DNA, 15 bp, Homo sapiens
gtaagagaaagcaat

SEQ ID NO: 1406366 - DNA, 15 bp, Homo sapiens
agtaagagaaagcaa

SEQ ID NO: 1406367 - DNA, 15 bp, Homo sapiens
aagtaagagaaagca

SEQ ID NO: 1406368 - DNA, 15 bp, Homo sapiens
aaagtaagagaaagc

SEQ ID NO: 1406369 - DNA, 15 bp, Homo sapiens
aaaagtaagagaaag

SEQ ID NO: 1406370 - DNA, 15 bp, Homo sapiens
gaaaagtaagagaaa

SEQ ID NO: 1406371 - DNA, 15 bp, Homo sapiens
agaaaagtaagagaa

SEQ ID NO: 1406372 - DNA, 15 bp, Homo sapiens
gagaaaagtaagaga

SEQ ID NO: 1406373 - DNA, 15 bp, Homo sapiens
tgagaaaagtaagag

SEQ ID NO: 1406374 - DNA, 15 bp, Homo sapiens
atgagaaaagtaaga

SEQ ID NO: 1406375 - DNA, 15 bp, Homo sapiens
aatgagaaaagtaag

SEQ ID NO: 1406376 - DNA, 15 bp, Homo sapiens
aaatgagaaaagtaa

SEQ ID NO: 1406377 - DNA, 15 bp, Homo sapiens
aaaatgagaaaagta

SEQ ID NO: 1406378 - DNA, 15 bp, Homo sapiens
aaaaatgagaaaagt

SEQ ID NO: 1406379 - DNA, 15 bp, Homo sapiens
aaaaaatgagaaaag

SEQ ID NO: 1406380 - DNA, 15 bp, Homo sapiens
aaaaaaatgagaaaa

SEQ ID NO: 1406381 - DNA, 15 bp, Homo sapiens
gaaaaaaatgagaaa

SEQ ID NO: 1406382 - DNA, 15 bp, Homo sapiens
ggaaaaaaatgagaa

SEQ ID NO: 1406383 - DNA, 15 bp, Homo sapiens
aaggaaaaaaatgag

SEQ ID NO: 1406384 - DNA, 15 bp, Homo sapiens
gaaggaaaaaaatga

SEQ ID NO: 1406385 - DNA, 15 bp, Homo sapiens
ggaaggaaaaaaatg

SEQ ID NO: 1406386 - DNA, 15 bp, Homo sapiens
aggaaggaaaaaaat

SEQ ID NO: 1406387 - DNA, 15 bp, Homo sapiens
ttaggaaggaaaaaa

SEQ ID NO: 1406388 - DNA, 15 bp, Homo sapiens
attaggaaggaaaaa

SEQ ID NO: 1406389 - DNA, 15 bp, Homo sapiens
gattaggaaggaaaa

SEQ ID NO: 1406390 - DNA, 15 bp, Homo sapiens
agattaggaaggaaa

SEQ ID NO: 1406391 - DNA, 15 bp, Homo sapiens
tagattaggaaggaa

SEQ ID NO: 1406392 - DNA, 15 bp, Homo sapiens
gtagattaggaagga

SEQ ID NO: 1406393 - DNA, 15 bp, Homo sapiens
agtagattaggaagg

SEQ ID NO: 1406394 - DNA, 15 bp, Homo sapiens
aagtagattaggaag

SEQ ID NO: 1406395 - DNA, 15 bp, Homo sapiens
caagtagattaggaa

SEQ ID NO: 1406396 - DNA, 15 bp, Homo sapiens
gcaagtagattagga

SEQ ID NO: 1406397 - DNA, 15 bp, Homo sapiens
tgcaagtagattagg

SEQ ID NO: 1406398 - DNA, 15 bp, Homo sapiens
ctgcaagtagattag

SEQ ID NO: 1406399 - DNA, 15 bp, Homo sapiens
tctgcaagtagatta

SEQ ID NO: 1406400 - DNA, 15 bp, Homo sapiens
atctgcaagtagatt

SEQ ID NO: 1406401 - DNA, 15 bp, Homo sapiens
tatctgcaagtagat

SEQ ID NO: 1406402 - DNA, 15 bp, Homo sapiens
gtatctgcaagtaga

SEQ ID NO: 1406403 - DNA, 15 bp, Homo sapiens
agtatctgcaagtag

SEQ ID NO: 1406404 - DNA, 15 bp, Homo sapiens
aagtatctgcaagta

SEQ ID NO: 1406405 - DNA, 15 bp, Homo sapiens
gaagtatctgcaagt

SEQ ID NO: 1406406 - DNA, 15 bp, Homo sapiens
tgaagtatctgcaag

SEQ ID NO: 1406407 - DNA, 15 bp, Homo sapiens
ctgaagtatctgcaa

SEQ ID NO: 1406408 - DNA, 15 bp, Homo sapiens
tctgaagtatctgca

SEQ ID NO: 1406409 - DNA, 15 bp, Homo sapiens
atctgaagtatctgc

SEQ ID NO: 1406410 - DNA, 15 bp, Homo sapiens
aatctgaagtatctg

SEQ ID NO: 1406411 - DNA, 15 bp, Homo sapiens
taatctgaagtatct

SEQ ID NO: 1406412 - DNA, 15 bp, Homo sapiens
ataatctgaagtatc

SEQ ID NO: 1406413 - DNA, 15 bp, Homo sapiens
aataatctgaagtat

SEQ ID NO: 1406414 - DNA, 15 bp, Homo sapiens
aaataatctgaagta

SEQ ID NO: 1406415 - DNA, 15 bp, Homo sapiens
aaaataatctgaagt

SEQ ID NO: 1406416 - DNA, 15 bp, Homo sapiens
aaaaataatctgaag

SEQ ID NO: 1406417 - DNA, 15 bp, Homo sapiens
taaaaataatctgaa

SEQ ID NO: 1406418 - DNA, 15 bp, Homo sapiens
ctaaaaataatctga

SEQ ID NO: 1406419 - DNA, 15 bp, Homo sapiens
tctaaaaataatctg

SEQ ID NO: 1406420 - DNA, 15 bp, Homo sapiens
ttctaaaaataatct

SEQ ID NO: 1406421 - DNA, 15 bp, Homo sapiens
gttctaaaaataatc

SEQ ID NO: 1406422 - DNA, 15 bp, Homo sapiens
cgttctaaaaataat

SEQ ID NO: 1406423 - DNA, 15 bp, Homo sapiens
acgttctaaaaataa

SEQ ID NO: 1406424 - DNA, 15 bp, Homo sapiens
cacgttctaaaaata

SEQ ID NO: 1406425 - DNA, 15 bp, Homo sapiens
ccacgttctaaaaat

SEQ ID NO: 1406426 - DNA, 15 bp, Homo sapiens
accacgttctaaaaa

SEQ ID NO: 1406427 - DNA, 15 bp, Homo sapiens
taccacgttctaaaa

SEQ ID NO: 1406428 - DNA, 15 bp, Homo sapiens
ataccacgttctaaa

SEQ ID NO: 1406429 - DNA, 15 bp, Homo sapiens
cataccacgttctaa

SEQ ID NO: 1406430 - DNA, 15 bp, Homo sapiens
ccataccacgttcta

SEQ ID NO: 1406431 - DNA, 15 bp, Homo sapiens
accataccacgttct

SEQ ID NO: 1406432 - DNA, 15 bp, Homo sapiens
caccataccacgttc

SEQ ID NO: 1406433 - DNA, 15 bp, Homo sapiens
tcaccataccacgtt

SEQ ID NO: 1406434 - DNA, 15 bp, Homo sapiens
ctcaccataccacgt

SEQ ID NO: 1406435 - DNA, 15 bp, Homo sapiens
tctcaccataccacg

SEQ ID NO: 1406436 - DNA, 15 bp, Homo sapiens
ttctcaccataccac

SEQ ID NO: 1406437 - DNA, 15 bp, Homo sapiens
gttctcaccatacca

SEQ ID NO: 1406438 - DNA, 15 bp, Homo sapiens
tgttctcaccatacc

SEQ ID NO: 1406439 - DNA, 15 bp, Homo sapiens
ttgttctcaccatac

SEQ ID NO: 1406440 - DNA, 15 bp, Homo sapiens
tttgttctcaccata

SEQ ID NO: 1406441 - DNA, 15 bp, Homo sapiens
atttgttctcaccat

SEQ ID NO: 1406442 - DNA, 15 bp, Homo sapiens
tatttgttctcacca

SEQ ID NO: 1406443 - DNA, 15 bp, Homo sapiens
tttatttgttctcac

SEQ ID NO: 1406444 - DNA, 15 bp, Homo sapiens
atttatttgttctca

SEQ ID NO: 1406445 - DNA, 15 bp, Homo sapiens
aatttatttgttctc

SEQ ID NO: 1406446 - DNA, 15 bp, Homo sapiens
caatttatttgttct

SEQ ID NO: 1406447 - DNA, 15 bp, Homo sapiens
ccaatttatttgttc

SEQ ID NO: 1406448 - DNA, 15 bp, Homo sapiens
cccaatttatttgtt

SEQ ID NO: 1406449 - DNA, 15 bp, Homo sapiens
ccccaatttatttgt

SEQ ID NO: 1406450 - DNA, 15 bp, Homo sapiens
accccaatttatttg

SEQ ID NO: 1406451 - DNA, 15 bp, Homo sapiens
aaccccaatttattt

SEQ ID NO: 1406452 - DNA, 15 bp, Homo sapiens
aaaccccaatttatt

SEQ ID NO: 1406453 - DNA, 15 bp, Homo sapiens
gaaaccccaatttat

SEQ ID NO: 1406454 - DNA, 15 bp, Homo sapiens
ggaaaccccaattta

SEQ ID NO: 1406455 - DNA, 15 bp, Homo sapiens
tggaaaccccaattt

SEQ ID NO: 1406456 - DNA, 15 bp, Homo sapiens
ttggaaaccccaatt

SEQ ID NO: 1406457 - DNA, 15 bp, Homo sapiens
tttggaaaccccaat

SEQ ID NO: 1406458 - DNA, 15 bp, Homo sapiens
atttggaaaccccaa

SEQ ID NO: 1406459 - DNA, 15 bp, Homo sapiens
gatttggaaacccca

SEQ ID NO: 1406460 - DNA, 15 bp, Homo sapiens
agatttggaaacccc

SEQ ID NO: 1406461 - DNA, 15 bp, Homo sapiens
aagatttggaaaccc

SEQ ID NO: 1406462 - DNA, 15 bp, Homo sapiens
taagatttggaaacc

SEQ ID NO: 1406463 - DNA, 15 bp, Homo sapiens
ttaagatttggaaac

SEQ ID NO: 1406464 - DNA, 15 bp, Homo sapiens
attaagatttggaaa

SEQ ID NO: 1406465 - DNA, 15 bp, Homo sapiens
tattaagatttggaa

SEQ ID NO: 1406466 - DNA, 15 bp, Homo sapiens
ttattaagatttgga

SEQ ID NO: 1406467 - DNA, 15 bp, Homo sapiens
tttattaagatttgg

SEQ ID NO: 1406468 - DNA, 15 bp, Homo sapiens
atttattaagatttg

SEQ ID NO: 1406469 - DNA, 15 bp, Homo sapiens
aatttattaagattt

SEQ ID NO: 1406470 - DNA, 15 bp, Homo sapiens
taatttattaagatt

SEQ ID NO: 1406471 - DNA, 15 bp, Homo sapiens
ataatttattaagat

SEQ ID NO: 1406472 - DNA, 15 bp, Homo sapiens
cataatttattaaga

SEQ ID NO: 1406473 - DNA, 15 bp, Homo sapiens
acataatttattaag

SEQ ID NO: 1406474 - DNA, 15 bp, Homo sapiens
cacataatttattaa

SEQ ID NO: 1406475 - DNA, 15 bp, Homo sapiens
ccacataatttatta

SEQ ID NO: 1406476 - DNA, 15 bp, Homo sapiens
gccacataatttatt

SEQ ID NO: 1406477 - DNA, 15 bp, Homo sapiens
ggccacataatttat

SEQ ID NO: 1406478 - DNA, 15 bp, Homo sapiens
gggccacataattta

SEQ ID NO: 1406479 - DNA, 15 bp, Homo sapiens
agggccacataattt

SEQ ID NO: 1406480 - DNA, 15 bp, Homo sapiens
gagggccacataatt

SEQ ID NO: 1406481 - DNA, 15 bp, Homo sapiens
tgagggccacataat

SEQ ID NO: 1406482 - DNA, 15 bp, Homo sapiens
ctgagggccacataa

SEQ ID NO: 1406483 - DNA, 15 bp, Homo sapiens
actgagggccacata

SEQ ID NO: 1406484 - DNA, 15 bp, Homo sapiens
cactgagggccacat

SEQ ID NO: 1406485 - DNA, 15 bp, Homo sapiens
ccactgagggccaca

SEQ ID NO: 1406486 - DNA, 15 bp, Homo sapiens
cccactgagggccac

SEQ ID NO: 1406487 - DNA, 15 bp, Homo sapiens
tcccactgagggcca

SEQ ID NO: 1406488 - DNA, 15 bp, Homo sapiens
atcccactgagggcc

SEQ ID NO: 1406489 - DNA, 15 bp, Homo sapiens
aatcccactgagggc

SEQ ID NO: 1406490 - DNA, 15 bp, Homo sapiens
taatcccactgaggg

SEQ ID NO: 1406491 - DNA, 15 bp, Homo sapiens
ctaatcccactgagg

SEQ ID NO: 1406492 - DNA, 15 bp, Homo sapiens
gctaatcccactgag

SEQ ID NO: 1406493 - DNA, 15 bp, Homo sapiens
tgctaatcccactga

SEQ ID NO: 1406494 - DNA, 15 bp, Homo sapiens
ctgctaatcccactg

SEQ ID NO: 1406495 - DNA, 15 bp, Homo sapiens
cctgctaatcccact

SEQ ID NO: 1406496 - DNA, 15 bp, Homo sapiens
ccctgctaatcccac

SEQ ID NO: 1406497 - DNA, 15 bp, Homo sapiens
accctgctaatccca

SEQ ID NO: 1406498 - DNA, 15 bp, Homo sapiens
aaccctgctaatccc

SEQ ID NO: 1406499 - DNA, 15 bp, Homo sapiens
caaccctgctaatcc

SEQ ID NO: 1406500 - DNA, 15 bp, Homo sapiens
acaaccctgctaatc

SEQ ID NO: 1406501 - DNA, 15 bp, Homo sapiens
tacaaccctgctaat

SEQ ID NO: 1406502 - DNA, 15 bp, Homo sapiens
atacaaccctgctaa

SEQ ID NO: 1406503 - DNA, 15 bp, Homo sapiens
aatacaaccctgcta

SEQ ID NO: 1406504 - DNA, 15 bp, Homo sapiens
caatacaaccctgct

SEQ ID NO: 1406505 - DNA, 15 bp, Homo sapiens
tcaatacaaccctgc

SEQ ID NO: 1406506 - DNA, 15 bp, Homo sapiens
ttcaatacaaccctg

SEQ ID NO: 1406507 - DNA, 15 bp, Homo sapiens
tttcaatacaaccct

SEQ ID NO: 1406508 - DNA, 15 bp, Homo sapiens
ttttcaatacaaccc

SEQ ID NO: 1406509 - DNA, 15 bp, Homo sapiens
gttttcaatacaacc

SEQ ID NO: 1406510 - DNA, 15 bp, Homo sapiens
tgttttcaatacaac

SEQ ID NO: 1406511 - DNA, 15 bp, Homo sapiens
gtgttttcaatacaa

SEQ ID NO: 1406512 - DNA, 15 bp, Homo sapiens
ggtgttttcaataca

SEQ ID NO: 1406513 - DNA, 15 bp, Homo sapiens
tggtgttttcaatac

SEQ ID NO: 1406514 - DNA, 15 bp, Homo sapiens
ttggtgttttcaata

SEQ ID NO: 1406515 - DNA, 15 bp, Homo sapiens
attggtgttttcaat

SEQ ID NO: 1406516 - DNA, 15 bp, Homo sapiens
tattggtgttttcaa

SEQ ID NO: 1406517 - DNA, 15 bp, Homo sapiens
ctattggtgttttca

SEQ ID NO: 1406518 - DNA, 15 bp, Homo sapiens
tctattggtgttttc

SEQ ID NO: 1406519 - DNA, 15 bp, Homo sapiens
ttctattggtgtttt

SEQ ID NO: 1406520 - DNA, 15 bp, Homo sapiens
tttctattggtgttt

SEQ ID NO: 1406521 - DNA, 15 bp, Homo sapiens
gtttctattggtgtt

SEQ ID NO: 1406522 - DNA, 15 bp, Homo sapiens
tgtttctattggtgt

SEQ ID NO: 1406523 - DNA, 15 bp, Homo sapiens
ttgtttctattggtg

SEQ ID NO: 1406524 - DNA, 15 bp, Homo sapiens
tttgtttctattggt

SEQ ID NO: 1406525 - DNA, 15 bp, Homo sapiens
ttttgtttctattgg

SEQ ID NO: 1406526 - DNA, 15 bp, Homo sapiens
attttgtttctattg

SEQ ID NO: 1406527 - DNA, 15 bp, Homo sapiens
tattttgtttctatt

SEQ ID NO: 1406528 - DNA, 15 bp, Homo sapiens
ctattttgtttctat

SEQ ID NO: 1406529 - DNA, 15 bp, Homo sapiens
actattttgtttcta

SEQ ID NO: 1406530 - DNA, 15 bp, Homo sapiens
aactattttgtttct

SEQ ID NO: 1406531 - DNA, 15 bp, Homo sapiens
gaactattttgtttc

SEQ ID NO: 1406532 - DNA, 15 bp, Homo sapiens
agaactattttgttt

SEQ ID NO: 1406533 - DNA, 15 bp, Homo sapiens
aagaactattttgtt

SEQ ID NO: 1406534 - DNA, 15 bp, Homo sapiens
aaagaactattttgt

SEQ ID NO: 1406535 - DNA, 15 bp, Homo sapiens
aaaagaactattttg

SEQ ID NO: 1406536 - DNA, 15 bp, Homo sapiens
taaaagaactatttt

SEQ ID NO: 1406537 - DNA, 15 bp, Homo sapiens
ataaaagaactattt

SEQ ID NO: 1406538 - DNA, 15 bp, Homo sapiens
cataaaagaactatt

SEQ ID NO: 1406539 - DNA, 15 bp, Homo sapiens
gcataaaagaactat

SEQ ID NO: 1406540 - DNA, 15 bp, Homo sapiens
cgcataaaagaacta

SEQ ID NO: 1406541 - DNA, 15 bp, Homo sapiens
gcgcataaaagaact

SEQ ID NO: 1406542 - DNA, 15 bp, Homo sapiens
agcgcataaaagaac

SEQ ID NO: 1406543 - DNA, 15 bp, Homo sapiens
aagcgcataaaagaa

SEQ ID NO: 1406544 - DNA, 15 bp, Homo sapiens
aaagcgcataaaaga

SEQ ID NO: 1406545 - DNA, 15 bp, Homo sapiens
taaagcgcataaaag

SEQ ID NO: 1406546 - DNA, 15 bp, Homo sapiens
ttaaagcgcataaaa

SEQ ID NO: 1406547 - DNA, 15 bp, Homo sapiens
tttaaagcgcataaa

SEQ ID NO: 1406548 - DNA, 15 bp, Homo sapiens
atttaaagcgcataa

SEQ ID NO: 1406549 - DNA, 15 bp, Homo sapiens
tatttaaagcgcata

SEQ ID NO: 1406550 - DNA, 15 bp, Homo sapiens
ttatttaaagcgcat

SEQ ID NO: 1406551 - DNA, 15 bp, Homo sapiens
tttatttaaagcgca

SEQ ID NO: 1406552 - DNA, 15 bp, Homo sapiens
ttttatttaaagcgc

SEQ ID NO: 1406553 - DNA, 15 bp, Homo sapiens
tttttatttaaagcg

SEQ ID NO: 1406554 - DNA, 15 bp, Homo sapiens
atttttatttaaagc

SEQ ID NO: 1406555 - DNA, 15 bp, Homo sapiens
aatttttatttaaag

SEQ ID NO: 1406556 - DNA, 15 bp, Homo sapiens
gaaatttttatttaa

SEQ ID NO: 1406557 - DNA, 15 bp, Homo sapiens
agaaatttttattta

SEQ ID NO: 1406558 - DNA, 15 bp, Homo sapiens
aagaaatttttattt

SEQ ID NO: 1406559 - DNA, 15 bp, Homo sapiens
aaagaaatttttatt

SEQ ID NO: 1406560 - DNA, 15 bp, Homo sapiens
aaaagaaatttttat

SEQ ID NO: 1406561 - DNA, 15 bp, Homo sapiens
gaaaagaaattttta

SEQ ID NO: 1406562 - DNA, 15 bp, Homo sapiens
tgaaaagaaattttt

SEQ ID NO: 1406563 - DNA, 15 bp, Homo sapiens
ctgaaaagaaatttt

SEQ ID NO: 1406564 - DNA, 15 bp, Homo sapiens
cctgaaaagaaattt

SEQ ID NO: 1406565 - DNA, 15 bp, Homo sapiens
gcctgaaaagaaatt

SEQ ID NO: 1406566 - DNA, 15 bp, Homo sapiens
ggcctgaaaagaaat

SEQ ID NO: 1406567 - DNA, 15 bp, Homo sapiens
tggcctgaaaagaaa

SEQ ID NO: 1406568 - DNA, 15 bp, Homo sapiens
ctggcctgaaaagaa

SEQ ID NO: 1406569 - DNA, 15 bp, Homo sapiens
cctggcctgaaaaga

SEQ ID NO: 1406570 - DNA, 15 bp, Homo sapiens
gcctggcctgaaaag

SEQ ID NO: 1406571 - DNA, 15 bp, Homo sapiens
cgcctggcctgaaaa

SEQ ID NO: 1406572 - DNA, 15 bp, Homo sapiens
gcgcctggcctgaaa

SEQ ID NO: 1406573 - DNA, 15 bp, Homo sapiens
tgcgcctggcctgaa

SEQ ID NO: 1406574 - DNA, 15 bp, Homo sapiens
ctgcgcctggcctga

SEQ ID NO: 1406575 - DNA, 15 bp, Homo sapiens
actgcgcctggcctg

SEQ ID NO: 1406576 - DNA, 15 bp, Homo sapiens
cactgcgcctggcct

SEQ ID NO: 1406577 - DNA, 15 bp, Homo sapiens
gggtgctgggattac

SEQ ID NO: 1406578 - DNA, 15 bp, Homo sapiens
agggtgctgggatta

SEQ ID NO: 1406579 - DNA, 15 bp, Homo sapiens
cagggtgctgggatt

SEQ ID NO: 1406580 - DNA, 15 bp, Homo sapiens
ccagggtgctgggat

SEQ ID NO: 1406581 - DNA, 15 bp, Homo sapiens
cccagggtgctggga

SEQ ID NO: 1406582 - DNA, 15 bp, Homo sapiens
tcccagggtgctggg

SEQ ID NO: 1406583 - DNA, 15 bp, Homo sapiens
ctcccagggtgctgg

SEQ ID NO: 1406584 - DNA, 15 bp, Homo sapiens
cctcccagggtgctg

SEQ ID NO: 1406585 - DNA, 15 bp, Homo sapiens
gcctcccagggtgct

SEQ ID NO: 1406586 - DNA, 15 bp, Homo sapiens
agcctcccagggtgc

SEQ ID NO: 1406587 - DNA, 15 bp, Homo sapiens
cagcctcccagggtg

SEQ ID NO: 1406588 - DNA, 15 bp, Homo sapiens
tcagcctcccagggt

SEQ ID NO: 1406589 - DNA, 15 bp, Homo sapiens
ctcagcctcccaggg

SEQ ID NO: 1406590 - DNA, 15 bp, Homo sapiens
gatctgcctgcctca

SEQ ID NO: 1406591 - DNA, 15 bp, Homo sapiens
gaggtgatctgcctg

SEQ ID NO: 1406592 - DNA, 15 bp, Homo sapiens
tgaggtgatctgcct

SEQ ID NO: 1406593 - DNA, 15 bp, Homo sapiens
ctgaggtgatctgcc

SEQ ID NO: 1406594 - DNA, 15 bp, Homo sapiens
cctgaggtgatctgc

SEQ ID NO: 1406595 - DNA, 15 bp, Homo sapiens
acctgaggtgatctg

SEQ ID NO: 1406596 - DNA, 15 bp, Homo sapiens
gacctgaggtgatct

SEQ ID NO: 1406597 - DNA, 15 bp, Homo sapiens
cctgacctgaggtga

SEQ ID NO: 1406598 - DNA, 15 bp, Homo sapiens
tcctgacctgaggtg

SEQ ID NO: 1406599 - DNA, 15 bp, Homo sapiens
ctcctgacctgaggt

SEQ ID NO: 1406600 - DNA, 15 bp, Homo sapiens
actcctgacctgagg

SEQ ID NO: 1406601 - DNA, 15 bp, Homo sapiens
aactcctgacctgag

SEQ ID NO: 1406602 - DNA, 15 bp, Homo sapiens
aaactcctgacctga

SEQ ID NO: 1406603 - DNA, 15 bp, Homo sapiens
taaactcctgacctg

SEQ ID NO: 1406604 - DNA, 15 bp, Homo sapiens
tgtcttaaactcctg

SEQ ID NO: 1406605 - DNA, 15 bp, Homo sapiens
ttgtcttaaactcct

SEQ ID NO: 1406606 - DNA, 15 bp, Homo sapiens
cttgtcttaaactcc

SEQ ID NO: 1406607 - DNA, 15 bp, Homo sapiens
gcttgtcttaaactc

SEQ ID NO: 1406608 - DNA, 15 bp, Homo sapiens
ggcttgtcttaaact

SEQ ID NO: 1406609 - DNA, 15 bp, Homo sapiens
aggcttgtcttaaac

SEQ ID NO: 1406610 - DNA, 15 bp, Homo sapiens
caggcttgtcttaaa

SEQ ID NO: 1406611 - DNA, 15 bp, Homo sapiens
ccaggcttgtcttaa

SEQ ID NO: 1406612 - DNA, 15 bp, Homo sapiens
gccaggcttgtctta

SEQ ID NO: 1406613 - DNA, 15 bp, Homo sapiens
ggccaggcttgtctt

SEQ ID NO: 1406614 - DNA, 15 bp, Homo sapiens
tggccaggcttgtct

SEQ ID NO: 1406615 - DNA, 15 bp, Homo sapiens
ttggccaggcttgtc

SEQ ID NO: 1406616 - DNA, 15 bp, Homo sapiens
gttggccaggcttgt

SEQ ID NO: 1406617 - DNA, 15 bp, Homo sapiens
tgttggccaggcttg

SEQ ID NO: 1406618 - DNA, 15 bp, Homo sapiens
atgttggccaggctt

SEQ ID NO: 1406619 - DNA, 15 bp, Homo sapiens
cttcaccatgttggc

SEQ ID NO: 1406620 - DNA, 15 bp, Homo sapiens
gcttcaccatgttgg

SEQ ID NO: 1406621 - DNA, 15 bp, Homo sapiens
cgcttcaccatgttg

SEQ ID NO: 1406622 - DNA, 15 bp, Homo sapiens
gcgcttcaccatgtt

SEQ ID NO: 1406623 - DNA, 15 bp, Homo sapiens
ggcgcttcaccatgt

SEQ ID NO: 1406624 - DNA, 15 bp, Homo sapiens
cggcgcttcaccatg

SEQ ID NO: 1406625 - DNA, 15 bp, Homo sapiens
acggcgcttcaccat

SEQ ID NO: 1406626 - DNA, 15 bp, Homo sapiens
gacggcgcttcacca

SEQ ID NO: 1406627 - DNA, 15 bp, Homo sapiens
agacggcgcttcacc

SEQ ID NO: 1406628 - DNA, 15 bp, Homo sapiens
gagacggcgcttcac

SEQ ID NO: 1406629 - DNA, 15 bp, Homo sapiens
agagacggcgcttca

SEQ ID NO: 1406630 - DNA, 15 bp, Homo sapiens
tagagacggcgcttc

SEQ ID NO: 1406631 - DNA, 15 bp, Homo sapiens
gtagagacggcgctt

SEQ ID NO: 1406632 - DNA, 15 bp, Homo sapiens
agtagagacggcgct

SEQ ID NO: 1406633 - DNA, 15 bp, Homo sapiens
tagtagagacggcgc

SEQ ID NO: 1406634 - DNA, 15 bp, Homo sapiens
tacccggctaatttt

SEQ ID NO: 1406635 - DNA, 15 bp, Homo sapiens
atacccggctaattt

SEQ ID NO: 1406636 - DNA, 15 bp, Homo sapiens
catacccggctaatt

SEQ ID NO: 1406637 - DNA, 15 bp, Homo sapiens
tcatacccggctaat

SEQ ID NO: 1406638 - DNA, 15 bp, Homo sapiens
atcatacccggctaa

SEQ ID NO: 1406639 - DNA, 15 bp, Homo sapiens
catcatacccggcta

SEQ ID NO: 1406640 - DNA, 15 bp, Homo sapiens
ccatcatacccggct

SEQ ID NO: 1406641 - DNA, 15 bp, Homo sapiens
gccatcatacccggc

SEQ ID NO: 1406642 - DNA, 15 bp, Homo sapiens
cgccatcatacccgg

SEQ ID NO: 1406643 - DNA, 15 bp, Homo sapiens
gcgccatcatacccg

SEQ ID NO: 1406644 - DNA, 15 bp, Homo sapiens
tgcgccatcataccc

SEQ ID NO: 1406645 - DNA, 15 bp, Homo sapiens
atgcgccatcatacc

SEQ ID NO: 1406646 - DNA, 15 bp, Homo sapiens
catgcgccatcatac

SEQ ID NO: 1406647 - DNA, 15 bp, Homo sapiens
gcatgcgccatcata

SEQ ID NO: 1406648 - DNA, 15 bp, Homo sapiens
ggcatgcgccatcat

SEQ ID NO: 1406649 - DNA, 15 bp, Homo sapiens
aggcatgcgccatca

SEQ ID NO: 1406650 - DNA, 15 bp, Homo sapiens
caggcatgcgccatc

SEQ ID NO: 1406651 - DNA, 15 bp, Homo sapiens
acaggcatgcgccat

SEQ ID NO: 1406652 - DNA, 15 bp, Homo sapiens
atcctgtgatctagt

SEQ ID NO: 1406653 - DNA, 15 bp, Homo sapiens
tatcctgtgatctag

SEQ ID NO: 1406654 - DNA, 15 bp, Homo sapiens
ttatcctgtgatcta

SEQ ID NO: 1406655 - DNA, 15 bp, Homo sapiens
cttatcctgtgatct

SEQ ID NO: 1406656 - DNA, 15 bp, Homo sapiens
ccttatcctgtgatc

SEQ ID NO: 1406657 - DNA, 15 bp, Homo sapiens
cccttatcctgtgat

SEQ ID NO: 1406658 - DNA, 15 bp, Homo sapiens
tcccttatcctgtga

SEQ ID NO: 1406659 - DNA, 15 bp, Homo sapiens
ttcccttatcctgtg

SEQ ID NO: 1406660 - DNA, 15 bp, Homo sapiens
cttcccttatcctgt

SEQ ID NO: 1406661 - DNA, 15 bp, Homo sapiens
acttcccttatcctg

SEQ ID NO: 1406662 - DNA, 15 bp, Homo sapiens
tacttcccttatcct

SEQ ID NO: 1406663 - DNA, 15 bp, Homo sapiens
ctacttcccttatcc

SEQ ID NO: 1406664 - DNA, 15 bp, Homo sapiens
tctacttcccttatc

SEQ ID NO: 1406665 - DNA, 15 bp, Homo sapiens
atctacttcccttat

SEQ ID NO: 1406666 - DNA, 15 bp, Homo sapiens
aatctacttccctta

SEQ ID NO: 1406667 - DNA, 15 bp, Homo sapiens
gaatctacttccctt

SEQ ID NO: 1406668 - DNA, 15 bp, Homo sapiens
ggaatctacttccct

SEQ ID NO: 1406669 - DNA, 15 bp, Homo sapiens
tggaatctacttccc

SEQ ID NO: 1406670 - DNA, 15 bp, Homo sapiens
atggaatctacttcc

SEQ ID NO: 1406671 - DNA, 15 bp, Homo sapiens
aatggaatctacttc

SEQ ID NO: 1406672 - DNA, 15 bp, Homo sapiens
gaatggaatctactt

SEQ ID NO: 1406673 - DNA, 15 bp, Homo sapiens
tgaatggaatctact

SEQ ID NO: 1406674 - DNA, 15 bp, Homo sapiens
atgaatggaatctac

SEQ ID NO: 1406675 - DNA, 15 bp, Homo sapiens
tatgaatggaatcta

SEQ ID NO: 1406676 - DNA, 15 bp, Homo sapiens
ctatgaatggaatct

SEQ ID NO: 1406677 - DNA, 15 bp, Homo sapiens
tctatgaatggaatc

SEQ ID NO: 1406678 - DNA, 15 bp, Homo sapiens
ctctatgaatggaat

SEQ ID NO: 1406679 - DNA, 15 bp, Homo sapiens
gctctatgaatggaa

SEQ ID NO: 1406680 - DNA, 15 bp, Homo sapiens
tgctctatgaatgga

SEQ ID NO: 1406681 - DNA, 15 bp, Homo sapiens
ctgctctatgaatgg

SEQ ID NO: 1406682 - DNA, 15 bp, Homo sapiens
tctgctctatgaatg

SEQ ID NO: 1406683 - DNA, 15 bp, Homo sapiens
atctgctctatgaat

SEQ ID NO: 1406684 - DNA, 15 bp, Homo sapiens
tatctgctctatgaa

SEQ ID NO: 1406685 - DNA, 15 bp, Homo sapiens
ttatctgctctatga

SEQ ID NO: 1406686 - DNA, 15 bp, Homo sapiens
attatctgctctatg

SEQ ID NO: 1406687 - DNA, 15 bp, Homo sapiens
cattatctgctctat

SEQ ID NO: 1406688 - DNA, 15 bp, Homo sapiens
ccattatctgctcta

SEQ ID NO: 1406689 - DNA, 15 bp, Homo sapiens
gccattatctgctct

SEQ ID NO: 1406690 - DNA, 15 bp, Homo sapiens
tgccattatctgctc

SEQ ID NO: 1406691 - DNA, 15 bp, Homo sapiens
gtgccattatctgct

SEQ ID NO: 1406692 - DNA, 15 bp, Homo sapiens
tgtgccattatctgc

SEQ ID NO: 1406693 - DNA, 15 bp, Homo sapiens
ctgtgccattatctg

SEQ ID NO: 1406694 - DNA, 15 bp, Homo sapiens
tctgtgccattatct

SEQ ID NO: 1406695 - DNA, 15 bp, Homo sapiens
atctgtgccattatc

SEQ ID NO: 1406696 - DNA, 15 bp, Homo sapiens
catctgtgccattat

SEQ ID NO: 1406697 - DNA, 15 bp, Homo sapiens
acatctgtgccatta

SEQ ID NO: 1406698 - DNA, 15 bp, Homo sapiens
gacatctgtgccatt

SEQ ID NO: 1406699 - DNA, 15 bp, Homo sapiens
ggacatctgtgccat

SEQ ID NO: 1406700 - DNA, 15 bp, Homo sapiens
tggacatctgtgcca

SEQ ID NO: 1406701 - DNA, 15 bp, Homo sapiens
ctggacatctgtgcc

SEQ ID NO: 1406702 - DNA, 15 bp, Homo sapiens
gctggacatctgtgc

SEQ ID NO: 1406703 - DNA, 15 bp, Homo sapiens
tgctggacatctgtg

SEQ ID NO: 1406704 - DNA, 15 bp, Homo sapiens
ttgctggacatctgt

SEQ ID NO: 1406705 - DNA, 15 bp, Homo sapiens
gttgctggacatctg

SEQ ID NO: 1406706 - DNA, 15 bp, Homo sapiens
agttgctggacatct

SEQ ID NO: 1406707 - DNA, 15 bp, Homo sapiens
tagttgctggacatc

SEQ ID NO: 1406708 - DNA, 15 bp, Homo sapiens
atagttgctggacat

SEQ ID NO: 1406709 - DNA, 15 bp, Homo sapiens
aatagttgctggaca

SEQ ID NO: 1406710 - DNA, 15 bp, Homo sapiens
aaatagttgctggac

SEQ ID NO: 1406711 - DNA, 15 bp, Homo sapiens
aaaatagttgctgga

SEQ ID NO: 1406712 - DNA, 15 bp, Homo sapiens
gaaaatagttgctgg

SEQ ID NO: 1406713 - DNA, 15 bp, Homo sapiens
agaaaatagttgctg

SEQ ID NO: 1406714 - DNA, 15 bp, Homo sapiens
aagaaaatagttgct

SEQ ID NO: 1406715 - DNA, 15 bp, Homo sapiens
gaagaaaatagttgc

SEQ ID NO: 1406716 - DNA, 15 bp, Homo sapiens
tgaagaaaatagttg

SEQ ID NO: 1406717 - DNA, 15 bp, Homo sapiens
gtgaagaaaatagtt

SEQ ID NO: 1406718 - DNA, 15 bp, Homo sapiens
agtgaagaaaatagt

SEQ ID NO: 1406719 - DNA, 15 bp, Homo sapiens
aagtgaagaaaatag

SEQ ID NO: 1406720 - DNA, 15 bp, Homo sapiens
aaagtgaagaaaata

SEQ ID NO: 1406721 - DNA, 15 bp, Homo sapiens
taaagtgaagaaaat

SEQ ID NO: 1406722 - DNA, 15 bp, Homo sapiens
ttaaagtgaagaaaa

SEQ ID NO: 1406723 - DNA, 15 bp, Homo sapiens
attaaagtgaagaaa

SEQ ID NO: 1406724 - DNA, 15 bp, Homo sapiens
tattaaagtgaagaa

SEQ ID NO: 1406725 - DNA, 15 bp, Homo sapiens
atattaaagtgaaga

SEQ ID NO: 1406726 - DNA, 15 bp, Homo sapiens
catattaaagtgaag

SEQ ID NO: 1406727 - DNA, 15 bp, Homo sapiens
gcatattaaagtgaa

SEQ ID NO: 1406728 - DNA, 15 bp, Homo sapiens
agcatattaaagtga

SEQ ID NO: 1406729 - DNA, 15 bp, Homo sapiens
gagcatattaaagtg

SEQ ID NO: 1406730 - DNA, 15 bp, Homo sapiens
tgagcatattaaagt

SEQ ID NO: 1406731 - DNA, 15 bp, Homo sapiens
ctgagcatattaaag

SEQ ID NO: 1406732 - DNA, 15 bp, Homo sapiens
cctgagcatattaaa

SEQ ID NO: 1406733 - DNA, 15 bp, Homo sapiens
gcctgagcatattaa

SEQ ID NO: 1406734 - DNA, 15 bp, Homo sapiens
agcctgagcatatta

SEQ ID NO: 1406735 - DNA, 15 bp, Homo sapiens
gagcctgagcatatt

SEQ ID NO: 1406736 - DNA, 15 bp, Homo sapiens
tgagcctgagcatat

SEQ ID NO: 1406737 - DNA, 15 bp, Homo sapiens
gtgagcctgagcata

SEQ ID NO: 1406738 - DNA, 15 bp, Homo sapiens
agtgagcctgagcat

SEQ ID NO: 1406739 - DNA, 15 bp, Homo sapiens
tagtgagcctgagca

SEQ ID NO: 1406740 - DNA, 15 bp, Homo sapiens
gtagtgagcctgagc

SEQ ID NO: 1406741 - DNA, 15 bp, Homo sapiens
agtagtgagcctgag

SEQ ID NO: 1406742 - DNA, 15 bp, Homo sapiens
cagtagtgagcctga

SEQ ID NO: 1406743 - DNA, 15 bp, Homo sapiens
tcagtagtgagcctg

SEQ ID NO: 1406744 - DNA, 15 bp, Homo sapiens
atcagtagtgagcct

SEQ ID NO: 1406745 - DNA, 15 bp, Homo sapiens
aatcagtagtgagcc

SEQ ID NO: 1406746 - DNA, 15 bp, Homo sapiens
aaatcagtagtgagc

SEQ ID NO: 1406747 - DNA, 15 bp, Homo sapiens
aaaatcagtagtgag

SEQ ID NO: 1406748 - DNA, 15 bp, Homo sapiens
caaaatcagtagtga

SEQ ID NO: 1406749 - DNA, 15 bp, Homo sapiens
ccaaaatcagtagtg

SEQ ID NO: 1406750 - DNA, 15 bp, Homo sapiens
accaaaatcagtagt

SEQ ID NO: 1406751 - DNA, 15 bp, Homo sapiens
aaccaaaatcagtag

SEQ ID NO: 1406752 - DNA, 15 bp, Homo sapiens
aaaccaaaatcagta

SEQ ID NO: 1406753 - DNA, 15 bp, Homo sapiens
taaaccaaaatcagt

SEQ ID NO: 1406754 - DNA, 15 bp, Homo sapiens
ttaaaccaaaatcag

SEQ ID NO: 1406755 - DNA, 15 bp, Homo sapiens
attaaaccaaaatca

SEQ ID NO: 1406756 - DNA, 15 bp, Homo sapiens
aattaaaccaaaatc

SEQ ID NO: 1406757 - DNA, 15 bp, Homo sapiens
gaattaaaccaaaat

SEQ ID NO: 1406758 - DNA, 15 bp, Homo sapiens
tgaattaaaccaaaa

SEQ ID NO: 1406759 - DNA, 15 bp, Homo sapiens
ctgaattaaaccaaa

SEQ ID NO: 1406760 - DNA, 15 bp, Homo sapiens
cctgaattaaaccaa

SEQ ID NO: 1406761 - DNA, 15 bp, Homo sapiens
gcctgaattaaacca

SEQ ID NO: 1406762 - DNA, 15 bp, Homo sapiens
ggcctgaattaaacc

SEQ ID NO: 1406763 - DNA, 15 bp, Homo sapiens
tggcctgaattaaac

SEQ ID NO: 1406764 - DNA, 15 bp, Homo sapiens
ctggcctgaattaaa

SEQ ID NO: 1406765 - DNA, 15 bp, Homo sapiens
actggcctgaattaa

SEQ ID NO: 1406766 - DNA, 15 bp, Homo sapiens
cactggcctgaatta

SEQ ID NO: 1406767 - DNA, 15 bp, Homo sapiens
acactggcctgaatt

SEQ ID NO: 1406768 - DNA, 15 bp, Homo sapiens
aacactggcctgaat

SEQ ID NO: 1406769 - DNA, 15 bp, Homo sapiens
taacactggcctgaa

SEQ ID NO: 1406770 - DNA, 15 bp, Homo sapiens
ttaacactggcctga

SEQ ID NO: 1406771 - DNA, 15 bp, Homo sapiens
attaacactggcctg

SEQ ID NO: 1406772 - DNA, 15 bp, Homo sapiens
tattaacactggcct

SEQ ID NO: 1406773 - DNA, 15 bp, Homo sapiens
atattaacactggcc

SEQ ID NO: 1406774 - DNA, 15 bp, Homo sapiens
catattaacactggc

SEQ ID NO: 1406775 - DNA, 15 bp, Homo sapiens
tcatattaacactgg

SEQ ID NO: 1406776 - DNA, 15 bp, Homo sapiens
gtcatattaacactg

SEQ ID NO: 1406777 - DNA, 15 bp, Homo sapiens
ggtcatattaacact

SEQ ID NO: 1406778 - DNA, 15 bp, Homo sapiens
aggtcatattaacac

SEQ ID NO: 1406779 - DNA, 15 bp, Homo sapiens
caggtcatattaaca

SEQ ID NO: 1406780 - DNA, 15 bp, Homo sapiens
ccaggtcatattaac

SEQ ID NO: 1406781 - DNA, 15 bp, Homo sapiens
accaggtcatattaa

SEQ ID NO: 1406782 - DNA, 15 bp, Homo sapiens
aaccaggtcatatta

SEQ ID NO: 1406783 - DNA, 15 bp, Homo sapiens
aaaccaggtcatatt

SEQ ID NO: 1406784 - DNA, 15 bp, Homo sapiens
aaaaccaggtcatat

SEQ ID NO: 1406785 - DNA, 15 bp, Homo sapiens
aaaaaccaggtcata

SEQ ID NO: 1406786 - DNA, 15 bp, Homo sapiens
gaaaaaccaggtcat

SEQ ID NO: 1406787 - DNA, 15 bp, Homo sapiens
ggaaaaaccaggtca

SEQ ID NO: 1406788 - DNA, 15 bp, Homo sapiens
tggaaaaaccaggtc

SEQ ID NO: 1406789 - DNA, 15 bp, Homo sapiens
ctggaaaaaccaggt

SEQ ID NO: 1406790 - DNA, 15 bp, Homo sapiens
tctggaaaaaccagg

SEQ ID NO: 1406791 - DNA, 15 bp, Homo sapiens
ttctggaaaaaccag

SEQ ID NO: 1406792 - DNA, 15 bp, Homo sapiens
attctggaaaaacca

SEQ ID NO: 1406793 - DNA, 15 bp, Homo sapiens
cattctggaaaaacc

SEQ ID NO: 1406794 - DNA, 15 bp, Homo sapiens
gcattctggaaaaac

SEQ ID NO: 1406795 - DNA, 15 bp, Homo sapiens
tgcattctggaaaaa

SEQ ID NO: 1406796 - DNA, 15 bp, Homo sapiens
atgcattctggaaaa

SEQ ID NO: 1406797 - DNA, 15 bp, Homo sapiens
tatgcattctggaaa

SEQ ID NO: 1406798 - DNA, 15 bp, Homo sapiens
gtatgcattctggaa

SEQ ID NO: 1406799 - DNA, 15 bp, Homo sapiens
agtatgcattctgga

SEQ ID NO: 1406800 - DNA, 15 bp, Homo sapiens
gagtatgcattctgg

SEQ ID NO: 1406801 - DNA, 15 bp, Homo sapiens
agagtatgcattctg

SEQ ID NO: 1406802 - DNA, 15 bp, Homo sapiens
cagagtatgcattct

SEQ ID NO: 1406803 - DNA, 15 bp, Homo sapiens
tcagagtatgcattc

SEQ ID NO: 1406804 - DNA, 15 bp, Homo sapiens
atcagagtatgcatt

SEQ ID NO: 1406805 - DNA, 15 bp, Homo sapiens
aatcagagtatgcat

SEQ ID NO: 1406806 - DNA, 15 bp, Homo sapiens
aaatcagagtatgca

SEQ ID NO: 1406807 - DNA, 15 bp, Homo sapiens
caaatcagagtatgc

SEQ ID NO: 1406808 - DNA, 15 bp, Homo sapiens
ccaaatcagagtatg

SEQ ID NO: 1406809 - DNA, 15 bp, Homo sapiens
accaaatcagagtat

SEQ ID NO: 1406810 - DNA, 15 bp, Homo sapiens
caccaaatcagagta

SEQ ID NO: 1406811 - DNA, 15 bp, Homo sapiens
tcaccaaatcagagt

SEQ ID NO: 1406812 - DNA, 15 bp, Homo sapiens
ttcaccaaatcagag

SEQ ID NO: 1406813 - DNA, 15 bp, Homo sapiens
cttcaccaaatcaga

SEQ ID NO: 1406814 - DNA, 15 bp, Homo sapiens
ccttcaccaaatcag

SEQ ID NO: 1406815 - DNA, 15 bp, Homo sapiens
cccttcaccaaatca

SEQ ID NO: 1406816 - DNA, 15 bp, Homo sapiens
gcccttcaccaaatc

SEQ ID NO: 1406817 - DNA, 15 bp, Homo sapiens
ggcccttcaccaaat

SEQ ID NO: 1406818 - DNA, 15 bp, Homo sapiens
tggcccttcaccaaa

SEQ ID NO: 1406819 - DNA, 15 bp, Homo sapiens
ctggcccttcaccaa

SEQ ID NO: 1406820 - DNA, 15 bp, Homo sapiens
cctggcccttcacca

SEQ ID NO: 1406821 - DNA, 15 bp, Homo sapiens
tcctggcccttcacc

SEQ ID NO: 1406822 - DNA, 15 bp, Homo sapiens
ctcctggcccttcac

SEQ ID NO: 1406823 - DNA, 15 bp, Homo sapiens
cctcctggcccttca

SEQ ID NO: 1406824 - DNA, 15 bp, Homo sapiens
acctcctggcccttc

SEQ ID NO: 1406825 - DNA, 15 bp, Homo sapiens
cacctcctggccctt

SEQ ID NO: 1406826 - DNA, 15 bp, Homo sapiens
tcacctcctggccct

SEQ ID NO: 1406827 - DNA, 15 bp, Homo sapiens
atcacctcctggccc

SEQ ID NO: 1406828 - DNA, 15 bp, Homo sapiens
aatcacctcctggcc

SEQ ID NO: 1406829 - DNA, 15 bp, Homo sapiens
gaatcacctcctggc

SEQ ID NO: 1406830 - DNA, 15 bp, Homo sapiens
tgaatcacctcctgg

SEQ ID NO: 1406831 - DNA, 15 bp, Homo sapiens
gtgaatcacctcctg

SEQ ID NO: 1406832 - DNA, 15 bp, Homo sapiens
tgtgaatcacctcct

SEQ ID NO: 1406833 - DNA, 15 bp, Homo sapiens
ctgtgaatcacctcc

SEQ ID NO: 1406834 - DNA, 15 bp, Homo sapiens
tctgtgaatcacctc

SEQ ID NO: 1406835 - DNA, 15 bp, Homo sapiens
atctgtgaatcacct

SEQ ID NO: 1406836 - DNA, 15 bp, Homo sapiens
catctgtgaatcacc

SEQ ID NO: 1406837 - DNA, 15 bp, Homo sapiens
acatctgtgaatcac

SEQ ID NO: 1406838 - DNA, 15 bp, Homo sapiens
aacatctgtgaatca

SEQ ID NO: 1406839 - DNA, 15 bp, Homo sapiens
caacatctgtgaatc

SEQ ID NO: 1406840 - DNA, 15 bp, Homo sapiens
ccaacatctgtgaat

SEQ ID NO: 1406841 - DNA, 15 bp, Homo sapiens
tccaacatctgtgaa

SEQ ID NO: 1406842 - DNA, 15 bp, Homo sapiens
ctccaacatctgtga

SEQ ID NO: 1406843 - DNA, 15 bp, Homo sapiens
tctccaacatctgtg

SEQ ID NO: 1406844 - DNA, 15 bp, Homo sapiens
atctccaacatctgt

SEQ ID NO: 1406845 - DNA, 15 bp, Homo sapiens
tatctccaacatctg

SEQ ID NO: 1406846 - DNA, 15 bp, Homo sapiens
ctatctccaacatct

SEQ ID NO: 1406847 - DNA, 15 bp, Homo sapiens
cctatctccaacatc

SEQ ID NO: 1406848 - DNA, 15 bp, Homo sapiens
gcctatctccaacat

SEQ ID NO: 1406849 - DNA, 15 bp, Homo sapiens
ggcctatctccaaca

SEQ ID NO: 1406850 - DNA, 15 bp, Homo sapiens
tggcctatctccaac

SEQ ID NO: 1406851 - DNA, 15 bp, Homo sapiens
atggcctatctccaa

SEQ ID NO: 1406852 - DNA, 15 bp, Homo sapiens
gatggcctatctcca

SEQ ID NO: 1406853 - DNA, 15 bp, Homo sapiens
ggatggcctatctcc

SEQ ID NO: 1406854 - DNA, 15 bp, Homo sapiens
gggatggcctatctc

SEQ ID NO: 1406855 - DNA, 15 bp, Homo sapiens
tgggatggcctatct

SEQ ID NO: 1406856 - DNA, 15 bp, Homo sapiens
ctgggatggcctatc

SEQ ID NO: 1406857 - DNA, 15 bp, Homo sapiens
gctgggatggcctat

SEQ ID NO: 1406858 - DNA, 15 bp, Homo sapiens
ggctgggatggccta

SEQ ID NO: 1406859 - DNA, 15 bp, Homo sapiens
aggctgggatggcct

SEQ ID NO: 1406860 - DNA, 15 bp, Homo sapiens
caggctgggatggcc

SEQ ID NO: 1406861 - DNA, 15 bp, Homo sapiens
ccaggctgggatggc

SEQ ID NO: 1406862 - DNA, 15 bp, Homo sapiens
cccaggctgggatgg

SEQ ID NO: 1406863 - DNA, 15 bp, Homo sapiens
tcccaggctgggatg

SEQ ID NO: 1406864 - DNA, 15 bp, Homo sapiens
atcccaggctgggat

SEQ ID NO: 1406865 - DNA, 15 bp, Homo sapiens
aatcccaggctggga

SEQ ID NO: 1406866 - DNA, 15 bp, Homo sapiens
taatcccaggctggg

SEQ ID NO: 1406867 - DNA, 15 bp, Homo sapiens
gtaatcccaggctgg

SEQ ID NO: 1406868 - DNA, 15 bp, Homo sapiens
agtaatcccaggctg

SEQ ID NO: 1406869 - DNA, 15 bp, Homo sapiens
aagtaatcccaggct

SEQ ID NO: 1406870 - DNA, 15 bp, Homo sapiens
taagtaatcccaggc

SEQ ID NO: 1406871 - DNA, 15 bp, Homo sapiens
ataagtaatcccagg

SEQ ID NO: 1406872 - DNA, 15 bp, Homo sapiens
aataagtaatcccag

SEQ ID NO: 1406873 - DNA, 15 bp, Homo sapiens
aaataagtaatccca

SEQ ID NO: 1406874 - DNA, 15 bp, Homo sapiens
caaataagtaatccc

SEQ ID NO: 1406875 - DNA, 15 bp, Homo sapiens
acaaataagtaatcc

SEQ ID NO: 1406876 - DNA, 15 bp, Homo sapiens
tacaaataagtaatc

SEQ ID NO: 1406877 - DNA, 15 bp, Homo sapiens
gtacaaataagtaat

SEQ ID NO: 1406878 - DNA, 15 bp, Homo sapiens
agtacaaataagtaa

SEQ ID NO: 1406879 - DNA, 15 bp, Homo sapiens
tagtacaaataagta

SEQ ID NO: 1406880 - DNA, 15 bp, Homo sapiens
ttagtacaaataagt

SEQ ID NO: 1406881 - DNA, 15 bp, Homo sapiens
attagtacaaataag

SEQ ID NO: 1406882 - DNA, 15 bp, Homo sapiens
tattagtacaaataa

SEQ ID NO: 1406883 - DNA, 15 bp, Homo sapiens
ttattagtacaaata

SEQ ID NO: 1406884 - DNA, 15 bp, Homo sapiens
tttattagtacaaat

SEQ ID NO: 1406885 - DNA, 15 bp, Homo sapiens
atttattagtacaaa

SEQ ID NO: 1406886 - DNA, 15 bp, Homo sapiens
gatttattagtacaa

SEQ ID NO: 1406887 - DNA, 15 bp, Homo sapiens
agatttattagtaca

SEQ ID NO: 1406888 - DNA, 15 bp, Homo sapiens
cagatttattagtac

SEQ ID NO: 1406889 - DNA, 15 bp, Homo sapiens
tcagatttattagta

SEQ ID NO: 1406890 - DNA, 15 bp, Homo sapiens
gtcagatttattagt

SEQ ID NO: 1406891 - DNA, 15 bp, Homo sapiens
ggtcagatttattag

SEQ ID NO: 1406892 - DNA, 15 bp, Homo sapiens
tggtcagatttatta

SEQ ID NO: 1406893 - DNA, 15 bp, Homo sapiens
ctggtcagatttatt

SEQ ID NO: 1406894 - DNA, 15 bp, Homo sapiens
tctggtcagatttat

SEQ ID NO: 1406895 - DNA, 15 bp, Homo sapiens
ctctggtcagattta

SEQ ID NO: 1406896 - DNA, 15 bp, Homo sapiens
actctggtcagattt

SEQ ID NO: 1406897 - DNA, 15 bp, Homo sapiens
aactctggtcagatt

SEQ ID NO: 1406898 - DNA, 15 bp, Homo sapiens
taactctggtcagat

SEQ ID NO: 1406899 - DNA, 15 bp, Homo sapiens
ttaactctggtcaga

SEQ ID NO: 1406900 - DNA, 15 bp, Homo sapiens
attaactctggtcag

SEQ ID NO: 1406901 - DNA, 15 bp, Homo sapiens
aattaactctggtca

SEQ ID NO: 1406902 - DNA, 15 bp, Homo sapiens
caattaactctggtc

SEQ ID NO: 1406903 - DNA, 15 bp, Homo sapiens
tcaattaactctggt

SEQ ID NO: 1406904 - DNA, 15 bp, Homo sapiens
ctcaattaactctgg

SEQ ID NO: 1406905 - DNA, 15 bp, Homo sapiens
cctcaattaactctg

SEQ ID NO: 1406906 - DNA, 15 bp, Homo sapiens
ccctcaattaactct

SEQ ID NO: 1406907 - DNA, 15 bp, Homo sapiens
accctcaattaactc

SEQ ID NO: 1406908 - DNA, 15 bp, Homo sapiens
aaccctcaattaact

SEQ ID NO: 1406909 - DNA, 15 bp, Homo sapiens
aaaccctcaattaac

SEQ ID NO: 1406910 - DNA, 15 bp, Homo sapiens
taaaccctcaattaa

SEQ ID NO: 1406911 - DNA, 15 bp, Homo sapiens
ttaaaccctcaatta

SEQ ID NO: 1406912 - DNA, 15 bp, Homo sapiens
tttaaaccctcaatt

SEQ ID NO: 1406913 - DNA, 15 bp, Homo sapiens
ctttaaaccctcaat

SEQ ID NO: 1406914 - DNA, 15 bp, Homo sapiens
gctttaaaccctcaa

SEQ ID NO: 1406915 - DNA, 15 bp, Homo sapiens
tgctttaaaccctca

SEQ ID NO: 1406916 - DNA, 15 bp, Homo sapiens
ttgctttaaaccctc

SEQ ID NO: 1406917 - DNA, 15 bp, Homo sapiens
tttgctttaaaccct

SEQ ID NO: 1406918 - DNA, 15 bp, Homo sapiens
ttttgctttaaaccc

SEQ ID NO: 1406919 - DNA, 15 bp, Homo sapiens
gttttgctttaaacc

SEQ ID NO: 1406920 - DNA, 15 bp, Homo sapiens
tgttttgctttaaac

SEQ ID NO: 1406921 - DNA, 15 bp, Homo sapiens
ctgttttgctttaaa

SEQ ID NO: 1406922 - DNA, 15 bp, Homo sapiens
gctgttttgctttaa

SEQ ID NO: 1406923 - DNA, 15 bp, Homo sapiens
tgctgttttgcttta

SEQ ID NO: 1406924 - DNA, 15 bp, Homo sapiens
atgctgttttgcttt

SEQ ID NO: 1406925 - DNA, 15 bp, Homo sapiens
tatgctgttttgctt

SEQ ID NO: 1406926 - DNA, 15 bp, Homo sapiens
atatgctgttttgct

SEQ ID NO: 1406927 - DNA, 15 bp, Homo sapiens
gatatgctgttttgc

SEQ ID NO: 1406928 - DNA, 15 bp, Homo sapiens
agatatgctgttttg

SEQ ID NO: 1406929 - DNA, 15 bp, Homo sapiens
cagatatgctgtttt

SEQ ID NO: 1406930 - DNA, 15 bp, Homo sapiens
acagatatgctgttt

SEQ ID NO: 1406931 - DNA, 15 bp, Homo sapiens
gacagatatgctgtt

SEQ ID NO: 1406932 - DNA, 15 bp, Homo sapiens
agacagatatgctgt

SEQ ID NO: 1406933 - DNA, 15 bp, Homo sapiens
tagacagatatgctg

SEQ ID NO: 1406934 - DNA, 15 bp, Homo sapiens
gtagacagatatgct

SEQ ID NO: 1406935 - DNA, 15 bp, Homo sapiens
agtagacagatatgc

SEQ ID NO: 1406936 - DNA, 15 bp, Homo sapiens
aagtagacagatatg

SEQ ID NO: 1406937 - DNA, 15 bp, Homo sapiens
aaagtagacagatat

SEQ ID NO: 1406938 - DNA, 15 bp, Homo sapiens
caaagtagacagata

SEQ ID NO: 1406939 - DNA, 15 bp, Homo sapiens
gcaaagtagacagat

SEQ ID NO: 1406940 - DNA, 15 bp, Homo sapiens
agcaaagtagacaga

SEQ ID NO: 1406941 - DNA, 15 bp, Homo sapiens
gagcaaagtagacag

SEQ ID NO: 1406942 - DNA, 15 bp, Homo sapiens
tgagcaaagtagaca

SEQ ID NO: 1406943 - DNA, 15 bp, Homo sapiens
ttgagcaaagtagac

SEQ ID NO: 1406944 - DNA, 15 bp, Homo sapiens
tttgagcaaagtaga

SEQ ID NO: 1406945 - DNA, 15 bp, Homo sapiens
atttgagcaaagtag

SEQ ID NO: 1406946 - DNA, 15 bp, Homo sapiens
tatttgagcaaagta

SEQ ID NO: 1406947 - DNA, 15 bp, Homo sapiens
atatttgagcaaagt

SEQ ID NO: 1406948 - DNA, 15 bp, Homo sapiens
aatatttgagcaaag

SEQ ID NO: 1406949 - DNA, 15 bp, Homo sapiens
aaatatttgagcaaa

SEQ ID NO: 1406950 - DNA, 15 bp, Homo sapiens
aaaatatttgagcaa

SEQ ID NO: 1406951 - DNA, 15 bp, Homo sapiens
taaaatatttgagca

SEQ ID NO: 1406952 - DNA, 15 bp, Homo sapiens
gtaaaatatttgagc

SEQ ID NO: 1406953 - DNA, 15 bp, Homo sapiens
tgtaaaatatttgag

SEQ ID NO: 1406954 - DNA, 15 bp, Homo sapiens
ttgtaaaatatttga

SEQ ID NO: 1406955 - DNA, 15 bp, Homo sapiens
tttgtaaaatatttg

SEQ ID NO: 1406956 - DNA, 15 bp, Homo sapiens
atttgtaaaatattt

SEQ ID NO: 1406957 - DNA, 15 bp, Homo sapiens
tatttgtaaaatatt

SEQ ID NO: 1406958 - DNA, 15 bp, Homo sapiens
gtatttgtaaaatat

SEQ ID NO: 1406959 - DNA, 15 bp, Homo sapiens
tgtatttgtaaaata

SEQ ID NO: 1406960 - DNA, 15 bp, Homo sapiens
ttgtatttgtaaaat

SEQ ID NO: 1406961 - DNA, 15 bp, Homo sapiens
gttgtatttgtaaaa

SEQ ID NO: 1406962 - DNA, 15 bp, Homo sapiens
tgttgtatttgtaaa

SEQ ID NO: 1406963 - DNA, 15 bp, Homo sapiens
ctgttgtatttgtaa

SEQ ID NO: 1406964 - DNA, 15 bp, Homo sapiens
tctgttgtatttgta

SEQ ID NO: 1406965 - DNA, 15 bp, Homo sapiens
atctgttgtatttgt

SEQ ID NO: 1406966 - DNA, 15 bp, Homo sapiens
aatctgttgtatttg

SEQ ID NO: 1406967 - DNA, 15 bp, Homo sapiens
taatctgttgtattt

SEQ ID NO: 1406968 - DNA, 15 bp, Homo sapiens
ataatctgttgtatt

SEQ ID NO: 1406969 - DNA, 15 bp, Homo sapiens
cataatctgttgtat

SEQ ID NO: 1406970 - DNA, 15 bp, Homo sapiens
tcataatctgttgta

SEQ ID NO: 1406971 - DNA, 15 bp, Homo sapiens
ctcataatctgttgt

SEQ ID NO: 1406972 - DNA, 15 bp, Homo sapiens
tctcataatctgttg

SEQ ID NO: 1406973 - DNA, 15 bp, Homo sapiens
ctctcataatctgtt

SEQ ID NO: 1406974 - DNA, 15 bp, Homo sapiens
actctcataatctgt

SEQ ID NO: 1406975 - DNA, 15 bp, Homo sapiens
cactctcataatctg

SEQ ID NO: 1406976 - DNA, 15 bp, Homo sapiens
ccactctcataatct

SEQ ID NO: 1406977 - DNA, 15 bp, Homo sapiens
cccactctcataatc

SEQ ID NO: 1406978 - DNA, 15 bp, Homo sapiens
acccactctcataat

SEQ ID NO: 1406979 - DNA, 15 bp, Homo sapiens
tacccactctcataa

SEQ ID NO: 1406980 - DNA, 15 bp, Homo sapiens
ttacccactctcata

SEQ ID NO: 1406981 - DNA, 15 bp, Homo sapiens
attacccactctcat

SEQ ID NO: 1406982 - DNA, 15 bp, Homo sapiens
tattacccactctca

SEQ ID NO: 1406983 - DNA, 15 bp, Homo sapiens
ttattacccactctc

SEQ ID NO: 1406984 - DNA, 15 bp, Homo sapiens
attattacccactct

SEQ ID NO: 1406985 - DNA, 15 bp, Homo sapiens
tattattacccactc

SEQ ID NO: 1406986 - DNA, 15 bp, Homo sapiens
atattattacccact

SEQ ID NO: 1406987 - DNA, 15 bp, Homo sapiens
gatattattacccac

SEQ ID NO: 1406988 - DNA, 15 bp, Homo sapiens
agatattattaccca

SEQ ID NO: 1406989 - DNA, 15 bp, Homo sapiens
cagatattattaccc

SEQ ID NO: 1406990 - DNA, 15 bp, Homo sapiens
ccagatattattacc

SEQ ID NO: 1406991 - DNA, 15 bp, Homo sapiens
tccagatattattac

SEQ ID NO: 1406992 - DNA, 15 bp, Homo sapiens
ttccagatattatta

SEQ ID NO: 1406993 - DNA, 15 bp, Homo sapiens
attccagatattatt

SEQ ID NO: 1406994 - DNA, 15 bp, Homo sapiens
tattccagatattat

SEQ ID NO: 1406995 - DNA, 15 bp, Homo sapiens
ttattccagatatta

SEQ ID NO: 1406996 - DNA, 15 bp, Homo sapiens
attattccagatatt

SEQ ID NO: 1406997 - DNA, 15 bp, Homo sapiens
aattattccagatat

SEQ ID NO: 1406998 - DNA, 15 bp, Homo sapiens
caattattccagata

SEQ ID NO: 1406999 - DNA, 15 bp, Homo sapiens
acaattattccagat

SEQ ID NO: 1407000 - DNA, 15 bp, Homo sapiens
aacaattattccaga

SEQ ID NO: 1407001 - DNA, 15 bp, Homo sapiens
aaacaattattccag

SEQ ID NO: 1407002 - DNA, 15 bp, Homo sapiens
aaaacaattattcca

SEQ ID NO: 1407003 - DNA, 15 bp, Homo sapiens
aaaaacaattattcc

SEQ ID NO: 1407004 - DNA, 15 bp, Homo sapiens
aaaaaacaattattc

SEQ ID NO: 1407005 - DNA, 15 bp, Homo sapiens
aaaaaaacaattatt

SEQ ID NO: 1407006 - DNA, 15 bp, Homo sapiens
caaaaaaacaattat

SEQ ID NO: 1407007 - DNA, 15 bp, Homo sapiens
acaaaaaaacaatta

SEQ ID NO: 1407008 - DNA, 15 bp, Homo sapiens
aacaaaaaaacaatt

SEQ ID NO: 1407009 - DNA, 15 bp, Homo sapiens
aaaacaaaaaaacaa

SEQ ID NO: 1407010 - DNA, 15 bp, Homo sapiens
caaaacaaaaaaaca

SEQ ID NO: 1407011 - DNA, 15 bp, Homo sapiens
acaaaacaaaaaaac

SEQ ID NO: 1407012 - DNA, 15 bp, Homo sapiens
cacaaaacaaaaaaa

SEQ ID NO: 1407013 - DNA, 15 bp, Homo sapiens
ccacaaaacaaaaaa

SEQ ID NO: 1407014 - DNA, 15 bp, Homo sapiens
accacaaaacaaaaa

SEQ ID NO: 1407015 - DNA, 15 bp, Homo sapiens
aaccacaaaacaaaa

SEQ ID NO: 1407016 - DNA, 15 bp, Homo sapiens
aaaccacaaaacaaa

SEQ ID NO: 1407017 - DNA, 15 bp, Homo sapiens
aaaaccacaaaacaa

SEQ ID NO: 1407018 - DNA, 15 bp, Homo sapiens
aaaaaccacaaaaca

SEQ ID NO: 1407019 - DNA, 15 bp, Homo sapiens
aaaaaaccacaaaac

SEQ ID NO: 1407020 - DNA, 15 bp, Homo sapiens
aaaaaaaccacaaaa

SEQ ID NO: 1407021 - DNA, 15 bp, Homo sapiens
aaaaaaaaccacaaa

SEQ ID NO: 1407022 - DNA, 15 bp, Homo sapiens
aaaaaaaaaccacaa

SEQ ID NO: 1407023 - DNA, 15 bp, Homo sapiens
aaaaaaaaaaccaca

SEQ ID NO: 1407024 - DNA, 15 bp, Homo sapiens
aaaaaaaaaaaccac

SEQ ID NO: 1407025 - DNA, 15 bp, Homo sapiens
ccagactccatctca

SEQ ID NO: 1407026 - DNA, 15 bp, Homo sapiens
gccagactccatctc

SEQ ID NO: 1407027 - DNA, 15 bp, Homo sapiens
agccagactccatct

SEQ ID NO: 1407028 - DNA, 15 bp, Homo sapiens
cagccagactccatc

SEQ ID NO: 1407029 - DNA, 15 bp, Homo sapiens
acagccagactccat

SEQ ID NO: 1407030 - DNA, 15 bp, Homo sapiens
tacagccagactcca

SEQ ID NO: 1407031 - DNA, 15 bp, Homo sapiens
ctacagccagactcc

SEQ ID NO: 1407032 - DNA, 15 bp, Homo sapiens
gctacagccagactc

SEQ ID NO: 1407033 - DNA, 15 bp, Homo sapiens
ggctacagccagact

SEQ ID NO: 1407034 - DNA, 15 bp, Homo sapiens
gggctacagccagac

SEQ ID NO: 1407035 - DNA, 15 bp, Homo sapiens
tgggctacagccaga

SEQ ID NO: 1407036 - DNA, 15 bp, Homo sapiens
ctgggctacagccag

SEQ ID NO: 1407037 - DNA, 15 bp, Homo sapiens
cctgggctacagcca

SEQ ID NO: 1407038 - DNA, 15 bp, Homo sapiens
gcctgggctacagcc

SEQ ID NO: 1407039 - DNA, 15 bp, Homo sapiens
agcctgggctacagc

SEQ ID NO: 1407040 - DNA, 15 bp, Homo sapiens
cagcctgggctacag

SEQ ID NO: 1407041 - DNA, 15 bp, Homo sapiens
ccagcctgggctaca

SEQ ID NO: 1407042 - DNA, 15 bp, Homo sapiens
tccagcctgggctac

SEQ ID NO: 1407043 - DNA, 15 bp, Homo sapiens
ctccagcctgggcta

SEQ ID NO: 1407044 - DNA, 15 bp, Homo sapiens
actccagcctgggct

SEQ ID NO: 1407045 - DNA, 15 bp, Homo sapiens
ctgtaccactgcact

SEQ ID NO: 1407046 - DNA, 15 bp, Homo sapiens
actgtaccactgcac

SEQ ID NO: 1407047 - DNA, 15 bp, Homo sapiens
gactgtaccactgca

SEQ ID NO: 1407048 - DNA, 15 bp, Homo sapiens
agactgtaccactgc

SEQ ID NO: 1407049 - DNA, 15 bp, Homo sapiens
gagactgtaccactg

SEQ ID NO: 1407050 - DNA, 15 bp, Homo sapiens
cgagactgtaccact

SEQ ID NO: 1407051 - DNA, 15 bp, Homo sapiens
ccgagactgtaccac

SEQ ID NO: 1407052 - DNA, 15 bp, Homo sapiens
gccgagactgtacca

SEQ ID NO: 1407053 - DNA, 15 bp, Homo sapiens
agccgagactgtacc

SEQ ID NO: 1407054 - DNA, 15 bp, Homo sapiens
gagccgagactgtac

SEQ ID NO: 1407055 - DNA, 15 bp, Homo sapiens
tgagccgagactgta

SEQ ID NO: 1407056 - DNA, 15 bp, Homo sapiens
gtgagccgagactgt

SEQ ID NO: 1407057 - DNA, 15 bp, Homo sapiens
agtgagccgagactg

SEQ ID NO: 1407058 - DNA, 15 bp, Homo sapiens
cagtgagccgagact

SEQ ID NO: 1407059 - DNA, 15 bp, Homo sapiens
gcagtgagccgagac

SEQ ID NO: 1407060 - DNA, 15 bp, Homo sapiens
gtgcagtgagccgag

SEQ ID NO: 1407061 - DNA, 15 bp, Homo sapiens
ggtgcagtgagccga

SEQ ID NO: 1407062 - DNA, 15 bp, Homo sapiens
aggtgcagtgagccg

SEQ ID NO: 1407063 - DNA, 15 bp, Homo sapiens
gaggtgcagtgagcc

SEQ ID NO: 1407064 - DNA, 15 bp, Homo sapiens
agaggtgcagtgagc

SEQ ID NO: 1407065 - DNA, 15 bp, Homo sapiens
cagaggtgcagtgag

SEQ ID NO: 1407066 - DNA, 15 bp, Homo sapiens
gcagaggtgcagtga

SEQ ID NO: 1407067 - DNA, 15 bp, Homo sapiens
ggcagaggtgcagtg

SEQ ID NO: 1407068 - DNA, 15 bp, Homo sapiens
aggcagaggtgcagt

SEQ ID NO: 1407069 - DNA, 15 bp, Homo sapiens
gaggcagaggtgcag

SEQ ID NO: 1407070 - DNA, 15 bp, Homo sapiens
agaggcagaggtgca

SEQ ID NO: 1407071 - DNA, 15 bp, Homo sapiens
aagaggcagaggtgc

SEQ ID NO: 1407072 - DNA, 15 bp, Homo sapiens
caagaggcagaggtg

SEQ ID NO: 1407073 - DNA, 15 bp, Homo sapiens
ccaagaggcagaggt

SEQ ID NO: 1407074 - DNA, 15 bp, Homo sapiens
tccaagaggcagagg

SEQ ID NO: 1407075 - DNA, 15 bp, Homo sapiens
atccaagaggcagag

SEQ ID NO: 1407076 - DNA, 15 bp, Homo sapiens
aatccaagaggcaga

SEQ ID NO: 1407077 - DNA, 15 bp, Homo sapiens
gaatccaagaggcag

SEQ ID NO: 1407078 - DNA, 15 bp, Homo sapiens
tgaatccaagaggca

SEQ ID NO: 1407079 - DNA, 15 bp, Homo sapiens
ttgaatccaagaggc

SEQ ID NO: 1407080 - DNA, 15 bp, Homo sapiens
cttgaatccaagagg

SEQ ID NO: 1407081 - DNA, 15 bp, Homo sapiens
gcttgaatccaagag

SEQ ID NO: 1407082 - DNA, 15 bp, Homo sapiens
cgcttgaatccaaga

SEQ ID NO: 1407083 - DNA, 15 bp, Homo sapiens
tcgcttgaatccaag

SEQ ID NO: 1407084 - DNA, 15 bp, Homo sapiens
atcgcttgaatccaa

SEQ ID NO: 1407085 - DNA, 15 bp, Homo sapiens
aatcgcttgaatcca

SEQ ID NO: 1407086 - DNA, 15 bp, Homo sapiens
gaatcgcttgaatcc

SEQ ID NO: 1407087 - DNA, 15 bp, Homo sapiens
agaatcgcttgaatc

SEQ ID NO: 1407088 - DNA, 15 bp, Homo sapiens
gagaatcgcttgaat

SEQ ID NO: 1407089 - DNA, 15 bp, Homo sapiens
gcgggagaatcgctt

SEQ ID NO: 1407090 - DNA, 15 bp, Homo sapiens
ggcgggagaatcgct

SEQ ID NO: 1407091 - DNA, 15 bp, Homo sapiens
aggcgggagaatcgc

SEQ ID NO: 1407092 - DNA, 15 bp, Homo sapiens
aggctgaggcgggag

SEQ ID NO: 1407093 - DNA, 15 bp, Homo sapiens
gaggctgaggcggga

SEQ ID NO: 1407094 - DNA, 15 bp, Homo sapiens
cgggaggctgaggcg

SEQ ID NO: 1407095 - DNA, 15 bp, Homo sapiens
gtggtggtgggcacc

SEQ ID NO: 1407096 - DNA, 15 bp, Homo sapiens
tgtggtggtgggcac

SEQ ID NO: 1407097 - DNA, 15 bp, Homo sapiens
gtgtggtggtgggca

SEQ ID NO: 1407098 - DNA, 15 bp, Homo sapiens
taaaaataaaaaatt

SEQ ID NO: 1407099 - DNA, 15 bp, Homo sapiens
ctaaaaataaaaaat

SEQ ID NO: 1407100 - DNA, 15 bp, Homo sapiens
gctgtctctactaaa

SEQ ID NO: 1407101 - DNA, 15 bp, Homo sapiens
cgctgtctctactaa

SEQ ID NO: 1407102 - DNA, 15 bp, Homo sapiens
acgctgtctctacta

SEQ ID NO: 1407103 - DNA, 15 bp, Homo sapiens
aacgctgtctctact

SEQ ID NO: 1407104 - DNA, 15 bp, Homo sapiens
aaacgctgtctctac

SEQ ID NO: 1407105 - DNA, 15 bp, Homo sapiens
gaaacgctgtctcta

SEQ ID NO: 1407106 - DNA, 15 bp, Homo sapiens
tgaaacgctgtctct

SEQ ID NO: 1407107 - DNA, 15 bp, Homo sapiens
gtgaaacgctgtctc

SEQ ID NO: 1407108 - DNA, 15 bp, Homo sapiens
ggtgaaacgctgtct

SEQ ID NO: 1407109 - DNA, 15 bp, Homo sapiens
tggtgaaacgctgtc

SEQ ID NO: 1407110 - DNA, 15 bp, Homo sapiens
atggtgaaacgctgt

SEQ ID NO: 1407111 - DNA, 15 bp, Homo sapiens
catggtgaaacgctg

SEQ ID NO: 1407112 - DNA, 15 bp, Homo sapiens
acatggtgaaacgct

SEQ ID NO: 1407113 - DNA, 15 bp, Homo sapiens
aacatggtgaaacgc

SEQ ID NO: 1407114 - DNA, 15 bp, Homo sapiens
caacatggtgaaacg

SEQ ID NO: 1407115 - DNA, 15 bp, Homo sapiens
acctggccaacatgg

SEQ ID NO: 1407116 - DNA, 15 bp, Homo sapiens
aacctggccaacatg

SEQ ID NO: 1407117 - DNA, 15 bp, Homo sapiens
caacctggccaacat

SEQ ID NO: 1407118 - DNA, 15 bp, Homo sapiens
ccaacctggccaaca

SEQ ID NO: 1407119 - DNA, 15 bp, Homo sapiens
accaacctggccaac

SEQ ID NO: 1407120 - DNA, 15 bp, Homo sapiens
gaccaacctggccaa

SEQ ID NO: 1407121 - DNA, 15 bp, Homo sapiens
agaccaacctggcca

SEQ ID NO: 1407122 - DNA, 15 bp, Homo sapiens
cagaccaacctggcc

SEQ ID NO: 1407123 - DNA, 15 bp, Homo sapiens
ccagaccaacctggc

SEQ ID NO: 1407124 - DNA, 15 bp, Homo sapiens
tccagaccaacctgg

SEQ ID NO: 1407125 - DNA, 15 bp, Homo sapiens
ttccagaccaacctg

SEQ ID NO: 1407126 - DNA, 15 bp, Homo sapiens
gttccagaccaacct

SEQ ID NO: 1407127 - DNA, 15 bp, Homo sapiens
agttccagaccaacc

SEQ ID NO: 1407128 - DNA, 15 bp, Homo sapiens
gagttccagaccaac

SEQ ID NO: 1407129 - DNA, 15 bp, Homo sapiens
ggagttccagaccaa

SEQ ID NO: 1407130 - DNA, 15 bp, Homo sapiens
caggccaggcatggt

SEQ ID NO: 1407131 - DNA, 15 bp, Homo sapiens
ccaggccaggcatgg

SEQ ID NO: 1407132 - DNA, 15 bp, Homo sapiens
tccaggccaggcatg

SEQ ID NO: 1407133 - DNA, 15 bp, Homo sapiens
ttccaggccaggcat

SEQ ID NO: 1407134 - DNA, 15 bp, Homo sapiens
attccaggccaggca

SEQ ID NO: 1407135 - DNA, 15 bp, Homo sapiens
tattccaggccaggc

SEQ ID NO: 1407136 - DNA, 15 bp, Homo sapiens
ttattccaggccagg

SEQ ID NO: 1407137 - DNA, 15 bp, Homo sapiens
attattccaggccag

SEQ ID NO: 1407138 - DNA, 15 bp, Homo sapiens
aattattccaggcca

SEQ ID NO: 1407139 - DNA, 15 bp, Homo sapiens
caattattccaggcc

SEQ ID NO: 1407140 - DNA, 15 bp, Homo sapiens
acaattattccaggc

SEQ ID NO: 1407141 - DNA, 15 bp, Homo sapiens
aacaattattccagg

SEQ ID NO: 1407142 - DNA, 15 bp, Homo sapiens
taacaattattccag

SEQ ID NO: 1407143 - DNA, 15 bp, Homo sapiens
ttaacaattattcca

SEQ ID NO: 1407144 - DNA, 15 bp, Homo sapiens
attaacaattattcc

SEQ ID NO: 1407145 - DNA, 15 bp, Homo sapiens
tattaacaattattc

SEQ ID NO: 1407146 - DNA, 15 bp, Homo sapiens
ttattaacaattatt

SEQ ID NO: 1407147 - DNA, 15 bp, Homo sapiens
attattaacaattat

SEQ ID NO: 1407148 - DNA, 15 bp, Homo sapiens
aattattaacaatta

SEQ ID NO: 1407149 - DNA, 15 bp, Homo sapiens
taattattaacaatt

SEQ ID NO: 1407150 - DNA, 15 bp, Homo sapiens
ataattattaacaat

SEQ ID NO: 1407151 - DNA, 15 bp, Homo sapiens
aataattattaacaa

SEQ ID NO: 1407152 - DNA, 15 bp, Homo sapiens
taataattattaaca

SEQ ID NO: 1407153 - DNA, 15 bp, Homo sapiens
gtaataattattaac

SEQ ID NO: 1407154 - DNA, 15 bp, Homo sapiens
tgtaataattattaa

SEQ ID NO: 1407155 - DNA, 15 bp, Homo sapiens
atgtaataattatta

SEQ ID NO: 1407156 - DNA, 15 bp, Homo sapiens
aatgtaataattatt

SEQ ID NO: 1407157 - DNA, 15 bp, Homo sapiens
caatgtaataattat

SEQ ID NO: 1407158 - DNA, 15 bp, Homo sapiens
tcaatgtaataatta

SEQ ID NO: 1407159 - DNA, 15 bp, Homo sapiens
atcaatgtaataatt

SEQ ID NO: 1407160 - DNA, 15 bp, Homo sapiens
catcaatgtaataat

SEQ ID NO: 1407161 - DNA, 15 bp, Homo sapiens
ccatcaatgtaataa

SEQ ID NO: 1407162 - DNA, 15 bp, Homo sapiens
gccatcaatgtaata

SEQ ID NO: 1407163 - DNA, 15 bp, Homo sapiens
tgccatcaatgtaat

SEQ ID NO: 1407164 - DNA, 15 bp, Homo sapiens
atgccatcaatgtaa

SEQ ID NO: 1407165 - DNA, 15 bp, Homo sapiens
aatgccatcaatgta

SEQ ID NO: 1407166 - DNA, 15 bp, Homo sapiens
aaatgccatcaatgt

SEQ ID NO: 1407167 - DNA, 15 bp, Homo sapiens
aaaatgccatcaatg

SEQ ID NO: 1407168 - DNA, 15 bp, Homo sapiens
taaaatgccatcaat

SEQ ID NO: 1407169 - DNA, 15 bp, Homo sapiens
ataaaatgccatcaa

SEQ ID NO: 1407170 - DNA, 15 bp, Homo sapiens
aataaaatgccatca

SEQ ID NO: 1407171 - DNA, 15 bp, Homo sapiens
caataaaatgccatc

SEQ ID NO: 1407172 - DNA, 15 bp, Homo sapiens
gcaataaaatgccat

SEQ ID NO: 1407173 - DNA, 15 bp, Homo sapiens
agcaataaaatgcca

SEQ ID NO: 1407174 - DNA, 15 bp, Homo sapiens
cagcaataaaatgcc

SEQ ID NO: 1407175 - DNA, 15 bp, Homo sapiens
tcagcaataaaatgc

SEQ ID NO: 1407176 - DNA, 15 bp, Homo sapiens
ctcagcaataaaatg

SEQ ID NO: 1407177 - DNA, 15 bp, Homo sapiens
gctcagcaataaaat

SEQ ID NO: 1407178 - DNA, 15 bp, Homo sapiens
tgctcagcaataaaa

SEQ ID NO: 1407179 - DNA, 15 bp, Homo sapiens
ttgctcagcaataaa

SEQ ID NO: 1407180 - DNA, 15 bp, Homo sapiens
cttgctcagcaataa

SEQ ID NO: 1407181 - DNA, 15 bp, Homo sapiens
tcttgctcagcaata

SEQ ID NO: 1407182 - DNA, 15 bp, Homo sapiens
ttcttgctcagcaat

SEQ ID NO: 1407183 - DNA, 15 bp, Homo sapiens
cttcttgctcagcaa

SEQ ID NO: 1407184 - DNA, 15 bp, Homo sapiens
tcttcttgctcagca

SEQ ID NO: 1407185 - DNA, 15 bp, Homo sapiens
ttcttcttgctcagc

SEQ ID NO: 1407186 - DNA, 15 bp, Homo sapiens
attcttcttgctcag

SEQ ID NO: 1407187 - DNA, 15 bp, Homo sapiens
gattcttcttgctca

SEQ ID NO: 1407188 - DNA, 15 bp, Homo sapiens
agattcttcttgctc

SEQ ID NO: 1407189 - DNA, 15 bp, Homo sapiens
tagattcttcttgct

SEQ ID NO: 1407190 - DNA, 15 bp, Homo sapiens
ttagattcttcttgc

SEQ ID NO: 1407191 - DNA, 15 bp, Homo sapiens
gttagattcttcttg

SEQ ID NO: 1407192 - DNA, 15 bp, Homo sapiens
tgttagattcttctt

SEQ ID NO: 1407193 - DNA, 15 bp, Homo sapiens
atgttagattcttct

SEQ ID NO: 1407194 - DNA, 15 bp, Homo sapiens
catgttagattcttc

SEQ ID NO: 1407195 - DNA, 15 bp, Homo sapiens
tcatgttagattctt

SEQ ID NO: 1407196 - DNA, 15 bp, Homo sapiens
atcatgttagattct

SEQ ID NO: 1407197 - DNA, 15 bp, Homo sapiens
catcatgttagattc

SEQ ID NO: 1407198 - DNA, 15 bp, Homo sapiens
tcatcatgttagatt

SEQ ID NO: 1407199 - DNA, 15 bp, Homo sapiens
ttcatcatgttagat

SEQ ID NO: 1407200 - DNA, 15 bp, Homo sapiens
attcatcatgttaga

SEQ ID NO: 1407201 - DNA, 15 bp, Homo sapiens
cattcatcatgttag

SEQ ID NO: 1407202 - DNA, 15 bp, Homo sapiens
ccattcatcatgtta

SEQ ID NO: 1407203 - DNA, 15 bp, Homo sapiens
cccattcatcatgtt

SEQ ID NO: 1407204 - DNA, 15 bp, Homo sapiens
acccattcatcatgt

SEQ ID NO: 1407205 - DNA, 15 bp, Homo sapiens
aacccattcatcatg

SEQ ID NO: 1407206 - DNA, 15 bp, Homo sapiens
taacccattcatcat

SEQ ID NO: 1407207 - DNA, 15 bp, Homo sapiens
ataacccattcatca

SEQ ID NO: 1407208 - DNA, 15 bp, Homo sapiens
tataacccattcatc

SEQ ID NO: 1407209 - DNA, 15 bp, Homo sapiens
ctataacccattcat

SEQ ID NO: 1407210 - DNA, 15 bp, Homo sapiens
gctataacccattca

SEQ ID NO: 1407211 - DNA, 15 bp, Homo sapiens
tgctataacccattc

SEQ ID NO: 1407212 - DNA, 15 bp, Homo sapiens
atgctataacccatt

SEQ ID NO: 1407213 - DNA, 15 bp, Homo sapiens
gatgctataacccat

SEQ ID NO: 1407214 - DNA, 15 bp, Homo sapiens
tgatgctataaccca

SEQ ID NO: 1407215 - DNA, 15 bp, Homo sapiens
ctgatgctataaccc

SEQ ID NO: 1407216 - DNA, 15 bp, Homo sapiens
cctgatgctataacc

SEQ ID NO: 1407217 - DNA, 15 bp, Homo sapiens
acctgatgctataac

SEQ ID NO: 1407218 - DNA, 15 bp, Homo sapiens
aacctgatgctataa

SEQ ID NO: 1407219 - DNA, 15 bp, Homo sapiens
aaacctgatgctata

SEQ ID NO: 1407220 - DNA, 15 bp, Homo sapiens
caaacctgatgctat

SEQ ID NO: 1407221 - DNA, 15 bp, Homo sapiens
gcaaacctgatgcta

SEQ ID NO: 1407222 - DNA, 15 bp, Homo sapiens
agcaaacctgatgct

SEQ ID NO: 1407223 - DNA, 15 bp, Homo sapiens
aagcaaacctgatgc

SEQ ID NO: 1407224 - DNA, 15 bp, Homo sapiens
aaagcaaacctgatg

SEQ ID NO: 1407225 - DNA, 15 bp, Homo sapiens
caaagcaaacctgat

SEQ ID NO: 1407226 - DNA, 15 bp, Homo sapiens
acaaagcaaacctga

SEQ ID NO: 1407227 - DNA, 15 bp, Homo sapiens
aacaaagcaaacctg

SEQ ID NO: 1407228 - DNA, 15 bp, Homo sapiens
aaacaaagcaaacct

SEQ ID NO: 1407229 - DNA, 15 bp, Homo sapiens
aaaacaaagcaaacc

SEQ ID NO: 1407230 - DNA, 15 bp, Homo sapiens
aaaaacaaagcaaac

SEQ ID NO: 1407231 - DNA, 15 bp, Homo sapiens
aaaaaacaaagcaaa

SEQ ID NO: 1407232 - DNA, 15 bp, Homo sapiens
aaaaaaacaaagcaa

SEQ ID NO: 1407233 - DNA, 15 bp, Homo sapiens
caaaaaaacaaagca

SEQ ID NO: 1407234 - DNA, 15 bp, Homo sapiens
acaaaaaaacaaagc

SEQ ID NO: 1407235 - DNA, 15 bp, Homo sapiens
aacaaaaaaacaaag

SEQ ID NO: 1407236 - DNA, 15 bp, Homo sapiens
aaacaaaaaaacaaa

SEQ ID NO: 1407237 - DNA, 15 bp, Homo sapiens
aaaaacaaaaaaaca

SEQ ID NO: 1407238 - DNA, 15 bp, Homo sapiens
aaaaaacaaaaaaac

SEQ ID NO: 1407239 - DNA, 15 bp, Homo sapiens
ggaaaaaaacaaaaa

SEQ ID NO: 1407240 - DNA, 15 bp, Homo sapiens
aggaaaaaaacaaaa

SEQ ID NO: 1407241 - DNA, 15 bp, Homo sapiens
gaggaaaaaaacaaa

SEQ ID NO: 1407242 - DNA, 15 bp, Homo sapiens
agaggaaaaaaacaa

SEQ ID NO: 1407243 - DNA, 15 bp, Homo sapiens
aagaggaaaaaaaca

SEQ ID NO: 1407244 - DNA, 15 bp, Homo sapiens
aaagaggaaaaaaac

SEQ ID NO: 1407245 - DNA, 15 bp, Homo sapiens
gaaagaggaaaaaaa

SEQ ID NO: 1407246 - DNA, 15 bp, Homo sapiens
agaaagaggaaaaaa

SEQ ID NO: 1407247 - DNA, 15 bp, Homo sapiens
aagaaagaggaaaaa

SEQ ID NO: 1407248 - DNA, 15 bp, Homo sapiens
caagaaagaggaaaa

SEQ ID NO: 1407249 - DNA, 15 bp, Homo sapiens
tcaagaaagaggaaa

SEQ ID NO: 1407250 - DNA, 15 bp, Homo sapiens
atcaagaaagaggaa

SEQ ID NO: 1407251 - DNA, 15 bp, Homo sapiens
catcaagaaagagga

SEQ ID NO: 1407252 - DNA, 15 bp, Homo sapiens
ccatcaagaaagagg

SEQ ID NO: 1407253 - DNA, 15 bp, Homo sapiens
accatcaagaaagag

SEQ ID NO: 1407254 - DNA, 15 bp, Homo sapiens
caccatcaagaaaga

SEQ ID NO: 1407255 - DNA, 15 bp, Homo sapiens
tcaccatcaagaaag

SEQ ID NO: 1407256 - DNA, 15 bp, Homo sapiens
atcaccatcaagaaa

SEQ ID NO: 1407257 - DNA, 15 bp, Homo sapiens
aatcaccatcaagaa

SEQ ID NO: 1407258 - DNA, 15 bp, Homo sapiens
aaatcaccatcaaga

SEQ ID NO: 1407259 - DNA, 15 bp, Homo sapiens
gaaatcaccatcaag

SEQ ID NO: 1407260 - DNA, 15 bp, Homo sapiens
agaaatcaccatcaa

SEQ ID NO: 1407261 - DNA, 15 bp, Homo sapiens
cagaaatcaccatca

SEQ ID NO: 1407262 - DNA, 15 bp, Homo sapiens
acagaaatcaccatc

SEQ ID NO: 1407263 - DNA, 15 bp, Homo sapiens
cacagaaatcaccat

SEQ ID NO: 1407264 - DNA, 15 bp, Homo sapiens
acacagaaatcacca

SEQ ID NO: 1407265 - DNA, 15 bp, Homo sapiens
aacacagaaatcacc

SEQ ID NO: 1407266 - DNA, 15 bp, Homo sapiens
aaacacagaaatcac

SEQ ID NO: 1407267 - DNA, 15 bp, Homo sapiens
caaacacagaaatca

SEQ ID NO: 1407268 - DNA, 15 bp, Homo sapiens
acaaacacagaaatc

SEQ ID NO: 1407269 - DNA, 15 bp, Homo sapiens
cacaaacacagaaat

SEQ ID NO: 1407270 - DNA, 15 bp, Homo sapiens
acacaaacacagaaa

SEQ ID NO: 1407271 - DNA, 15 bp, Homo sapiens
cacacaaacacagaa

SEQ ID NO: 1407272 - DNA, 15 bp, Homo sapiens
acacacaaacacaga

SEQ ID NO: 1407273 - DNA, 15 bp, Homo sapiens
tacacacaaacacag

SEQ ID NO: 1407274 - DNA, 15 bp, Homo sapiens
gcatacacacaaaca

SEQ ID NO: 1407275 - DNA, 15 bp, Homo sapiens
cgcatacacacaaac

SEQ ID NO: 1407276 - DNA, 15 bp, Homo sapiens
acgcatacacacaaa

SEQ ID NO: 1407277 - DNA, 15 bp, Homo sapiens
gacgcatacacacaa

SEQ ID NO: 1407278 - DNA, 15 bp, Homo sapiens
cgacgcatacacaca

SEQ ID NO: 1407279 - DNA, 15 bp, Homo sapiens
ccgacgcatacacac

SEQ ID NO: 1407280 - DNA, 15 bp, Homo sapiens
gccgacgcatacaca

SEQ ID NO: 1407281 - DNA, 15 bp, Homo sapiens
agccgacgcatacac

SEQ ID NO: 1407282 - DNA, 15 bp, Homo sapiens
aagccgacgcataca

SEQ ID NO: 1407283 - DNA, 15 bp, Homo sapiens
gaagccgacgcatac

SEQ ID NO: 1407284 - DNA, 15 bp, Homo sapiens
tgaagccgacgcata

SEQ ID NO: 1407285 - DNA, 15 bp, Homo sapiens
ctgaagccgacgcat

SEQ ID NO: 1407286 - DNA, 15 bp, Homo sapiens
tctgaagccgacgca

SEQ ID NO: 1407287 - DNA, 15 bp, Homo sapiens
ctctgaagccgacgc

SEQ ID NO: 1407288 - DNA, 15 bp, Homo sapiens
gctctgaagccgacg

SEQ ID NO: 1407289 - DNA, 15 bp, Homo sapiens
ggctctgaagccgac

SEQ ID NO: 1407290 - DNA, 15 bp, Homo sapiens
tggctctgaagccga

SEQ ID NO: 1407291 - DNA, 15 bp, Homo sapiens
atggctctgaagccg

SEQ ID NO: 1407292 - DNA, 15 bp, Homo sapiens
aatggctctgaagcc

SEQ ID NO: 1407293 - DNA, 15 bp, Homo sapiens
gaatggctctgaagc

SEQ ID NO: 1407294 - DNA, 15 bp, Homo sapiens
agaatggctctgaag

SEQ ID NO: 1407295 - DNA, 15 bp, Homo sapiens
aagaatggctctgaa

SEQ ID NO: 1407296 - DNA, 15 bp, Homo sapiens
aaagaatggctctga

SEQ ID NO: 1407297 - DNA, 15 bp, Homo sapiens
taaagaatggctctg

SEQ ID NO: 1407298 - DNA, 15 bp, Homo sapiens
ataaagaatggctct

SEQ ID NO: 1407299 - DNA, 15 bp, Homo sapiens
gataaagaatggctc

SEQ ID NO: 1407300 - DNA, 15 bp, Homo sapiens
tgataaagaatggct

SEQ ID NO: 1407301 - DNA, 15 bp, Homo sapiens
atgataaagaatggc

SEQ ID NO: 1407302 - DNA, 15 bp, Homo sapiens
aatgataaagaatgg

SEQ ID NO: 1407303 - DNA, 15 bp, Homo sapiens
gaatgataaagaatg

SEQ ID NO: 1407304 - DNA, 15 bp, Homo sapiens
agaatgataaagaat

SEQ ID NO: 1407305 - DNA, 15 bp, Homo sapiens
aagaatgataaagaa

SEQ ID NO: 1407306 - DNA, 15 bp, Homo sapiens
gaagaatgataaaga

SEQ ID NO: 1407307 - DNA, 15 bp, Homo sapiens
ggaagaatgataaag

SEQ ID NO: 1407308 - DNA, 15 bp, Homo sapiens
aggaagaatgataaa

SEQ ID NO: 1407309 - DNA, 15 bp, Homo sapiens
aaggaagaatgataa

SEQ ID NO: 1407310 - DNA, 15 bp, Homo sapiens
aaaggaagaatgata

SEQ ID NO: 1407311 - DNA, 15 bp, Homo sapiens
aaaaggaagaatgat

SEQ ID NO: 1407312 - DNA, 15 bp, Homo sapiens
gaaaaggaagaatga

SEQ ID NO: 1407313 - DNA, 15 bp, Homo sapiens
ggaaaaggaagaatg

SEQ ID NO: 1407314 - DNA, 15 bp, Homo sapiens
aggaaaaggaagaat

SEQ ID NO: 1407315 - DNA, 15 bp, Homo sapiens
taggaaaaggaagaa

SEQ ID NO: 1407316 - DNA, 15 bp, Homo sapiens
ctaggaaaaggaaga

SEQ ID NO: 1407317 - DNA, 15 bp, Homo sapiens
cctaggaaaaggaag

SEQ ID NO: 1407318 - DNA, 15 bp, Homo sapiens
ccctaggaaaaggaa

SEQ ID NO: 1407319 - DNA, 15 bp, Homo sapiens
gccctaggaaaagga

SEQ ID NO: 1407320 - DNA, 15 bp, Homo sapiens
tgccctaggaaaagg

SEQ ID NO: 1407321 - DNA, 15 bp, Homo sapiens
atgccctaggaaaag

SEQ ID NO: 1407322 - DNA, 15 bp, Homo sapiens
tatgccctaggaaaa

SEQ ID NO: 1407323 - DNA, 15 bp, Homo sapiens
atatgccctaggaaa

SEQ ID NO: 1407324 - DNA, 15 bp, Homo sapiens
catatgccctaggaa

SEQ ID NO: 1407325 - DNA, 15 bp, Homo sapiens
gcatatgccctagga

SEQ ID NO: 1407326 - DNA, 15 bp, Homo sapiens
cgcatatgccctagg

SEQ ID NO: 1407327 - DNA, 15 bp, Homo sapiens
ccgcatatgccctag

SEQ ID NO: 1407328 - DNA, 15 bp, Homo sapiens
gccgcatatgcccta

SEQ ID NO: 1407329 - DNA, 15 bp, Homo sapiens
ggccgcatatgccct

SEQ ID NO: 1407330 - DNA, 15 bp, Homo sapiens
tggccgcatatgccc

SEQ ID NO: 1407331 - DNA, 15 bp, Homo sapiens
ctggccgcatatgcc

SEQ ID NO: 1407332 - DNA, 15 bp, Homo sapiens
gctggccgcatatgc

SEQ ID NO: 1407333 - DNA, 15 bp, Homo sapiens
tgctggccgcatatg

SEQ ID NO: 1407334 - DNA, 15 bp, Homo sapiens
ttgctggccgcatat

SEQ ID NO: 1407335 - DNA, 15 bp, Homo sapiens
tttgctggccgcata

SEQ ID NO: 1407336 - DNA, 15 bp, Homo sapiens
ctttgctggccgcat

SEQ ID NO: 1407337 - DNA, 15 bp, Homo sapiens
tctttgctggccgca

SEQ ID NO: 1407338 - DNA, 15 bp, Homo sapiens
ttctttgctggccgc

SEQ ID NO: 1407339 - DNA, 15 bp, Homo sapiens
attctttgctggccg

SEQ ID NO: 1407340 - DNA, 15 bp, Homo sapiens
gattctttgctggcc

SEQ ID NO: 1407341 - DNA, 15 bp, Homo sapiens
tgattctttgctggc

SEQ ID NO: 1407342 - DNA, 15 bp, Homo sapiens
gtgattctttgctgg

SEQ ID NO: 1407343 - DNA, 15 bp, Homo sapiens
tgtgattctttgctg

SEQ ID NO: 1407344 - DNA, 15 bp, Homo sapiens
atgtgattctttgct

SEQ ID NO: 1407345 - DNA, 15 bp, Homo sapiens
catgtgattctttgc

SEQ ID NO: 1407346 - DNA, 15 bp, Homo sapiens
gcatgtgattctttg

SEQ ID NO: 1407347 - DNA, 15 bp, Homo sapiens
ggcatgtgattcttt

SEQ ID NO: 1407348 - DNA, 15 bp, Homo sapiens
tggcatgtgattctt

SEQ ID NO: 1407349 - DNA, 15 bp, Homo sapiens
gtggcatgtgattct

SEQ ID NO: 1407350 - DNA, 15 bp, Homo sapiens
agtggcatgtgattc

SEQ ID NO: 1407351 - DNA, 15 bp, Homo sapiens
aagtggcatgtgatt

SEQ ID NO: 1407352 - DNA, 15 bp, Homo sapiens
aaagtggcatgtgat

SEQ ID NO: 1407353 - DNA, 15 bp, Homo sapiens
caaagtggcatgtga

SEQ ID NO: 1407354 - DNA, 15 bp, Homo sapiens
ccaaagtggcatgtg

SEQ ID NO: 1407355 - DNA, 15 bp, Homo sapiens
accaaagtggcatgt

SEQ ID NO: 1407356 - DNA, 15 bp, Homo sapiens
caccaaagtggcatg

SEQ ID NO: 1407357 - DNA, 15 bp, Homo sapiens
acaccaaagtggcat

SEQ ID NO: 1407358 - DNA, 15 bp, Homo sapiens
aacaccaaagtggca

SEQ ID NO: 1407359 - DNA, 15 bp, Homo sapiens
aaacaccaaagtggc

SEQ ID NO: 1407360 - DNA, 15 bp, Homo sapiens
gaaacaccaaagtgg

SEQ ID NO: 1407361 - DNA, 15 bp, Homo sapiens
tgaaacaccaaagtg

SEQ ID NO: 1407362 - DNA, 15 bp, Homo sapiens
atgaaacaccaaagt

SEQ ID NO: 1407363 - DNA, 15 bp, Homo sapiens
tatgaaacaccaaag

SEQ ID NO: 1407364 - DNA, 15 bp, Homo sapiens
ttatgaaacaccaaa

SEQ ID NO: 1407365 - DNA, 15 bp, Homo sapiens
attatgaaacaccaa

SEQ ID NO: 1407366 - DNA, 15 bp, Homo sapiens
gattatgaaacacca

SEQ ID NO: 1407367 - DNA, 15 bp, Homo sapiens
agattatgaaacacc

SEQ ID NO: 1407368 - DNA, 15 bp, Homo sapiens
gagattatgaaacac

SEQ ID NO: 1407369 - DNA, 15 bp, Homo sapiens
ggagattatgaaaca

SEQ ID NO: 1407370 - DNA, 15 bp, Homo sapiens
aggagattatgaaac

SEQ ID NO: 1407371 - DNA, 15 bp, Homo sapiens
caggagattatgaaa

SEQ ID NO: 1407372 - DNA, 15 bp, Homo sapiens
ccaggagattatgaa

SEQ ID NO: 1407373 - DNA, 15 bp, Homo sapiens
cccaggagattatga

SEQ ID NO: 1407374 - DNA, 15 bp, Homo sapiens
tcccaggagattatg

SEQ ID NO: 1407375 - DNA, 15 bp, Homo sapiens
ctcccaggagattat

SEQ ID NO: 1407376 - DNA, 15 bp, Homo sapiens
tctcccaggagatta

SEQ ID NO: 1407377 - DNA, 15 bp, Homo sapiens
ctctcccaggagatt

SEQ ID NO: 1407378 - DNA, 15 bp, Homo sapiens
tctctcccaggagat

SEQ ID NO: 1407379 - DNA, 15 bp, Homo sapiens
atctctcccaggaga

SEQ ID NO: 1407380 - DNA, 15 bp, Homo sapiens
aatctctcccaggag

SEQ ID NO: 1407381 - DNA, 15 bp, Homo sapiens
caatctctcccagga

SEQ ID NO: 1407382 - DNA, 15 bp, Homo sapiens
tcaatctctcccagg

SEQ ID NO: 1407383 - DNA, 15 bp, Homo sapiens
gtcaatctctcccag

SEQ ID NO: 1407384 - DNA, 15 bp, Homo sapiens
ggtcaatctctccca

SEQ ID NO: 1407385 - DNA, 15 bp, Homo sapiens
tggtcaatctctccc

SEQ ID NO: 1407386 - DNA, 15 bp, Homo sapiens
ctggtcaatctctcc

SEQ ID NO: 1407387 - DNA, 15 bp, Homo sapiens
gctggtcaatctctc

SEQ ID NO: 1407388 - DNA, 15 bp, Homo sapiens
tgctggtcaatctct

SEQ ID NO: 1407389 - DNA, 15 bp, Homo sapiens
ctgctggtcaatctc

SEQ ID NO: 1407390 - DNA, 15 bp, Homo sapiens
actgctggtcaatct

SEQ ID NO: 1407391 - DNA, 15 bp, Homo sapiens
tactgctggtcaatc

SEQ ID NO: 1407392 - DNA, 15 bp, Homo sapiens
atactgctggtcaat

SEQ ID NO: 1407393 - DNA, 15 bp, Homo sapiens
tatactgctggtcaa

SEQ ID NO: 1407394 - DNA, 15 bp, Homo sapiens
ctatactgctggtca

SEQ ID NO: 1407395 - DNA, 15 bp, Homo sapiens
gctatactgctggtc

SEQ ID NO: 1407396 - DNA, 15 bp, Homo sapiens
ggctatactgctggt

SEQ ID NO: 1407397 - DNA, 15 bp, Homo sapiens
cggctatactgctgg

SEQ ID NO: 1407398 - DNA, 15 bp, Homo sapiens
gcggctatactgctg

SEQ ID NO: 1407399 - DNA, 15 bp, Homo sapiens
agcggctatactgct

SEQ ID NO: 1407400 - DNA, 15 bp, Homo sapiens
aagcggctatactgc

SEQ ID NO: 1407401 - DNA, 15 bp, Homo sapiens
gaagcggctatactg

SEQ ID NO: 1407402 - DNA, 15 bp, Homo sapiens
ggaagcggctatact

SEQ ID NO: 1407403 - DNA, 15 bp, Homo sapiens
aggaagcggctatac

SEQ ID NO: 1407404 - DNA, 15 bp, Homo sapiens
caggaagcggctata

SEQ ID NO: 1407405 - DNA, 15 bp, Homo sapiens
gcaggaagcggctat

SEQ ID NO: 1407406 - DNA, 15 bp, Homo sapiens
tgcaggaagcggcta

SEQ ID NO: 1407407 - DNA, 15 bp, Homo sapiens
ttgcaggaagcggct

SEQ ID NO: 1407408 - DNA, 15 bp, Homo sapiens
cttgcaggaagcggc

SEQ ID NO: 1407409 - DNA, 15 bp, Homo sapiens
tcttgcaggaagcgg

SEQ ID NO: 1407410 - DNA, 15 bp, Homo sapiens
ctcttgcaggaagcg

SEQ ID NO: 1407411 - DNA, 15 bp, Homo sapiens
actcttgcaggaagc

SEQ ID NO: 1407412 - DNA, 15 bp, Homo sapiens
gactcttgcaggaag

SEQ ID NO: 1407413 - DNA, 15 bp, Homo sapiens
cgactcttgcaggaa

SEQ ID NO: 1407414 - DNA, 15 bp, Homo sapiens
tcgactcttgcagga

SEQ ID NO: 1407415 - DNA, 15 bp, Homo sapiens
ttcgactcttgcagg

SEQ ID NO: 1407416 - DNA, 15 bp, Homo sapiens
attcgactcttgcag

SEQ ID NO: 1407417 - DNA, 15 bp, Homo sapiens
cattcgactcttgca

SEQ ID NO: 1407418 - DNA, 15 bp, Homo sapiens
acattcgactcttgc

SEQ ID NO: 1407419 - DNA, 15 bp, Homo sapiens
aacattcgactcttg

SEQ ID NO: 1407420 - DNA, 15 bp, Homo sapiens
gaacattcgactctt

SEQ ID NO: 1407421 - DNA, 15 bp, Homo sapiens
agaacattcgactct

SEQ ID NO: 1407422 - DNA, 15 bp, Homo sapiens
gagaacattcgactc

SEQ ID NO: 1407423 - DNA, 15 bp, Homo sapiens
agagaacattcgact

SEQ ID NO: 1407424 - DNA, 15 bp, Homo sapiens
tagagaacattcgac

SEQ ID NO: 1407425 - DNA, 15 bp, Homo sapiens
atagagaacattcga

SEQ ID NO: 1407426 - DNA, 15 bp, Homo sapiens
gatagagaacattcg

SEQ ID NO: 1407427 - DNA, 15 bp, Homo sapiens
tgatagagaacattc

SEQ ID NO: 1407428 - DNA, 15 bp, Homo sapiens
ctgatagagaacatt

SEQ ID NO: 1407429 - DNA, 15 bp, Homo sapiens
gctgatagagaacat

SEQ ID NO: 1407430 - DNA, 15 bp, Homo sapiens
tgctgatagagaaca

SEQ ID NO: 1407431 - DNA, 15 bp, Homo sapiens
gtgctgatagagaac

SEQ ID NO: 1407432 - DNA, 15 bp, Homo sapiens
tgtgctgatagagaa

SEQ ID NO: 1407433 - DNA, 15 bp, Homo sapiens
ttgtgctgatagaga

SEQ ID NO: 1407434 - DNA, 15 bp, Homo sapiens
attgtgctgatagag

SEQ ID NO: 1407435 - DNA, 15 bp, Homo sapiens
gattgtgctgataga

SEQ ID NO: 1407436 - DNA, 15 bp, Homo sapiens
agattgtgctgatag

SEQ ID NO: 1407437 - DNA, 15 bp, Homo sapiens
tagattgtgctgata

SEQ ID NO: 1407438 - DNA, 15 bp, Homo sapiens
gtagattgtgctgat

SEQ ID NO: 1407439 - DNA, 15 bp, Homo sapiens
cgtagattgtgctga

SEQ ID NO: 1407440 - DNA, 15 bp, Homo sapiens
tcgtagattgtgctg

SEQ ID NO: 1407441 - DNA, 15 bp, Homo sapiens
ttcgtagattgtgct

SEQ ID NO: 1407442 - DNA, 15 bp, Homo sapiens
cttcgtagattgtgc

SEQ ID NO: 1407443 - DNA, 15 bp, Homo sapiens
tcttcgtagattgtg

SEQ ID NO: 1407444 - DNA, 15 bp, Homo sapiens
ttcttcgtagattgt

SEQ ID NO: 1407445 - DNA, 15 bp, Homo sapiens
attcttcgtagattg

SEQ ID NO: 1407446 - DNA, 15 bp, Homo sapiens
gattcttcgtagatt

SEQ ID NO: 1407447 - DNA, 15 bp, Homo sapiens
tgattcttcgtagat

SEQ ID NO: 1407448 - DNA, 15 bp, Homo sapiens
ttgattcttcgtaga

SEQ ID NO: 1407449 - DNA, 15 bp, Homo sapiens
cttgattcttcgtag

SEQ ID NO: 1407450 - DNA, 15 bp, Homo sapiens
gcttgattcttcgta

SEQ ID NO: 1407451 - DNA, 15 bp, Homo sapiens
tgcttgattcttcgt

SEQ ID NO: 1407452 - DNA, 15 bp, Homo sapiens
ctgcttgattcttcg

SEQ ID NO: 1407453 - DNA, 15 bp, Homo sapiens
actgcttgattcttc

SEQ ID NO: 1407454 - DNA, 15 bp, Homo sapiens
aactgcttgattctt

SEQ ID NO: 1407455 - DNA, 15 bp, Homo sapiens
aaactgcttgattct

SEQ ID NO: 1407456 - DNA, 15 bp, Homo sapiens
gaaactgcttgattc

SEQ ID NO: 1407457 - DNA, 15 bp, Homo sapiens
agaaactgcttgatt

SEQ ID NO: 1407458 - DNA, 15 bp, Homo sapiens
aagaaactgcttgat

SEQ ID NO: 1407459 - DNA, 15 bp, Homo sapiens
gaagaaactgcttga

SEQ ID NO: 1407460 - DNA, 15 bp, Homo sapiens
tgaagaaactgcttg

SEQ ID NO: 1407461 - DNA, 15 bp, Homo sapiens
ctgaagaaactgctt

SEQ ID NO: 1407462 - DNA, 15 bp, Homo sapiens
cctgaagaaactgct

SEQ ID NO: 1407463 - DNA, 15 bp, Homo sapiens
acctgaagaaactgc

SEQ ID NO: 1407464 - DNA, 15 bp, Homo sapiens
tacctgaagaaactg

SEQ ID NO: 1407465 - DNA, 15 bp, Homo sapiens
atacctgaagaaact

SEQ ID NO: 1407466 - DNA, 15 bp, Homo sapiens
catacctgaagaaac

SEQ ID NO: 1407467 - DNA, 15 bp, Homo sapiens
tcatacctgaagaaa

SEQ ID NO: 1407468 - DNA, 15 bp, Homo sapiens
atcatacctgaagaa

SEQ ID NO: 1407469 - DNA, 15 bp, Homo sapiens
catcatacctgaaga

SEQ ID NO: 1407470 - DNA, 15 bp, Homo sapiens
tcatcatacctgaag

SEQ ID NO: 1407471 - DNA, 15 bp, Homo sapiens
ctcatcatacctgaa

SEQ ID NO: 1407472 - DNA, 15 bp, Homo sapiens
tctcatcatacctga

SEQ ID NO: 1407473 - DNA, 15 bp, Homo sapiens
ttctcatcatacctg

SEQ ID NO: 1407474 - DNA, 15 bp, Homo sapiens
tttctcatcatacct

SEQ ID NO: 1407475 - DNA, 15 bp, Homo sapiens
gtttctcatcatacc

SEQ ID NO: 1407476 - DNA, 15 bp, Homo sapiens
agtttctcatcatac

SEQ ID NO: 1407477 - DNA, 15 bp, Homo sapiens
cagtttctcatcata

SEQ ID NO: 1407478 - DNA, 15 bp, Homo sapiens
tcagtttctcatcat

SEQ ID NO: 1407479 - DNA, 15 bp, Homo sapiens
ctcagtttctcatca

SEQ ID NO: 1407480 - DNA, 15 bp, Homo sapiens
cctcagtttctcatc

SEQ ID NO: 1407481 - DNA, 15 bp, Homo sapiens
tcctcagtttctcat

SEQ ID NO: 1407482 - DNA, 15 bp, Homo sapiens
gtcctcagtttctca

SEQ ID NO: 1407483 - DNA, 15 bp, Homo sapiens
tgtcctcagtttctc

SEQ ID NO: 1407484 - DNA, 15 bp, Homo sapiens
ttgtcctcagtttct

SEQ ID NO: 1407485 - DNA, 15 bp, Homo sapiens
cttgtcctcagtttc

SEQ ID NO: 1407486 - DNA, 15 bp, Homo sapiens
ccttgtcctcagttt

SEQ ID NO: 1407487 - DNA, 15 bp, Homo sapiens
tccttgtcctcagtt

SEQ ID NO: 1407488 - DNA, 15 bp, Homo sapiens
ctccttgtcctcagt

SEQ ID NO: 1407489 - DNA, 15 bp, Homo sapiens
tctccttgtcctcag

SEQ ID NO: 1407490 - DNA, 15 bp, Homo sapiens
ttctccttgtcctca

SEQ ID NO: 1407491 - DNA, 15 bp, Homo sapiens
tttctccttgtcctc

SEQ ID NO: 1407492 - DNA, 15 bp, Homo sapiens
gtttctccttgtcct

SEQ ID NO: 1407493 - DNA, 15 bp, Homo sapiens
tgtttctccttgtcc

SEQ ID NO: 1407494 - DNA, 15 bp, Homo sapiens
ctgtttctccttgtc

SEQ ID NO: 1407495 - DNA, 15 bp, Homo sapiens
cctgtttctccttgt

SEQ ID NO: 1407496 - DNA, 15 bp, Homo sapiens
tcctgtttctccttg

SEQ ID NO: 1407497 - DNA, 15 bp, Homo sapiens
gtcctgtttctcctt

SEQ ID NO: 1407498 - DNA, 15 bp, Homo sapiens
ggtcctgtttctcct

SEQ ID NO: 1407499 - DNA, 15 bp, Homo sapiens
gggtcctgtttctcc

SEQ ID NO: 1407500 - DNA, 15 bp, Homo sapiens
cgggtcctgtttctc

SEQ ID NO: 1407501 - DNA, 15 bp, Homo sapiens
gcgggtcctgtttct

SEQ ID NO: 1407502 - DNA, 15 bp, Homo sapiens
tgcgggtcctgtttc

SEQ ID NO: 1407503 - DNA, 15 bp, Homo sapiens
ctgcgggtcctgttt

SEQ ID NO: 1407504 - DNA, 15 bp, Homo sapiens
tctgcgggtcctgtt

SEQ ID NO: 1407505 - DNA, 15 bp, Homo sapiens
ctctgcgggtcctgt

SEQ ID NO: 1407506 - DNA, 15 bp, Homo sapiens
actctgcgggtcctg

SEQ ID NO: 1407507 - DNA, 15 bp, Homo sapiens
gactctgcgggtcct

SEQ ID NO: 1407508 - DNA, 15 bp, Homo sapiens
cgactctgcgggtcc

SEQ ID NO: 1407509 - DNA, 15 bp, Homo sapiens
ccgactctgcgggtc

SEQ ID NO: 1407510 - DNA, 15 bp, Homo sapiens
cccgactctgcgggt

SEQ ID NO: 1407511 - DNA, 15 bp, Homo sapiens
acccgactctgcggg

SEQ ID NO: 1407512 - DNA, 15 bp, Homo sapiens
cacccgactctgcgg

SEQ ID NO: 1407513 - DNA, 15 bp, Homo sapiens
acacccgactctgcg

SEQ ID NO: 1407514 - DNA, 15 bp, Homo sapiens
aacacccgactctgc

SEQ ID NO: 1407515 - DNA, 15 bp, Homo sapiens
taacacccgactctg

SEQ ID NO: 1407516 - DNA, 15 bp, Homo sapiens
ctaacacccgactct

SEQ ID NO: 1407517 - DNA, 15 bp, Homo sapiens
actaacacccgactc

SEQ ID NO: 1407518 - DNA, 15 bp, Homo sapiens
cactaacacccgact

SEQ ID NO: 1407519 - DNA, 15 bp, Homo sapiens
acactaacacccgac

SEQ ID NO: 1407520 - DNA, 15 bp, Homo sapiens
aacactaacacccga

SEQ ID NO: 1407521 - DNA, 15 bp, Homo sapiens
gaacactaacacccg

SEQ ID NO: 1407522 - DNA, 15 bp, Homo sapiens
agaacactaacaccc

SEQ ID NO: 1407523 - DNA, 15 bp, Homo sapiens
aagaacactaacacc

SEQ ID NO: 1407524 - DNA, 15 bp, Homo sapiens
aaagaacactaacac

SEQ ID NO: 1407525 - DNA, 15 bp, Homo sapiens
gaaagaacactaaca

SEQ ID NO: 1407526 - DNA, 15 bp, Homo sapiens
ggaaagaacactaac

SEQ ID NO: 1407527 - DNA, 15 bp, Homo sapiens
aggaaagaacactaa

SEQ ID NO: 1407528 - DNA, 15 bp, Homo sapiens
caggaaagaacacta

SEQ ID NO: 1407529 - DNA, 15 bp, Homo sapiens
ccaggaaagaacact

SEQ ID NO: 1407530 - DNA, 15 bp, Homo sapiens
tccaggaaagaacac

SEQ ID NO: 1407531 - DNA, 15 bp, Homo sapiens
ttccaggaaagaaca

SEQ ID NO: 1407532 - DNA, 15 bp, Homo sapiens
cttccaggaaagaac

SEQ ID NO: 1407533 - DNA, 15 bp, Homo sapiens
gcttccaggaaagaa

SEQ ID NO: 1407534 - DNA, 15 bp, Homo sapiens
tgcttccaggaaaga

SEQ ID NO: 1407535 - DNA, 15 bp, Homo sapiens
atgcttccaggaaag

SEQ ID NO: 1407536 - DNA, 15 bp, Homo sapiens
gatgcttccaggaaa

SEQ ID NO: 1407537 - DNA, 15 bp, Homo sapiens
agatgcttccaggaa

SEQ ID NO: 1407538 - DNA, 15 bp, Homo sapiens
gagatgcttccagga

SEQ ID NO: 1407539 - DNA, 15 bp, Homo sapiens
agagatgcttccagg

SEQ ID NO: 1407540 - DNA, 15 bp, Homo sapiens
aagagatgcttccag

SEQ ID NO: 1407541 - DNA, 15 bp, Homo sapiens
aaagagatgcttcca

SEQ ID NO: 1407542 - DNA, 15 bp, Homo sapiens
aaaagagatgcttcc

SEQ ID NO: 1407543 - DNA, 15 bp, Homo sapiens
gaaaagagatgcttc

SEQ ID NO: 1407544 - DNA, 15 bp, Homo sapiens
agaaaagagatgctt

SEQ ID NO: 1407545 - DNA, 15 bp, Homo sapiens
gagaaaagagatgct

SEQ ID NO: 1407546 - DNA, 15 bp, Homo sapiens
tgagaaaagagatgc

SEQ ID NO: 1407547 - DNA, 15 bp, Homo sapiens
atgagaaaagagatg

SEQ ID NO: 1407548 - DNA, 15 bp, Homo sapiens
aatgagaaaagagat

SEQ ID NO: 1407549 - DNA, 15 bp, Homo sapiens
aaatgagaaaagaga

SEQ ID NO: 1407550 - DNA, 15 bp, Homo sapiens
caaatgagaaaagag

SEQ ID NO: 1407551 - DNA, 15 bp, Homo sapiens
ccaaatgagaaaaga

SEQ ID NO: 1407552 - DNA, 15 bp, Homo sapiens
gccaaatgagaaaag

SEQ ID NO: 1407553 - DNA, 15 bp, Homo sapiens
agccaaatgagaaaa

SEQ ID NO: 1407554 - DNA, 15 bp, Homo sapiens
tagccaaatgagaaa

SEQ ID NO: 1407555 - DNA, 15 bp, Homo sapiens
ttagccaaatgagaa

SEQ ID NO: 1407556 - DNA, 15 bp, Homo sapiens
cttagccaaatgaga

SEQ ID NO: 1407557 - DNA, 15 bp, Homo sapiens
acttagccaaatgag

SEQ ID NO: 1407558 - DNA, 15 bp, Homo sapiens
tacttagccaaatga

SEQ ID NO: 1407559 - DNA, 15 bp, Homo sapiens
ttacttagccaaatg

SEQ ID NO: 1407560 - DNA, 15 bp, Homo sapiens
gttacttagccaaat

SEQ ID NO: 1407561 - DNA, 15 bp, Homo sapiens
cgttacttagccaaa

SEQ ID NO: 1407562 - DNA, 15 bp, Homo sapiens
tcgttacttagccaa

SEQ ID NO: 1407563 - DNA, 15 bp, Homo sapiens
ctcgttacttagcca

SEQ ID NO: 1407564 - DNA, 15 bp, Homo sapiens
tctcgttacttagcc

SEQ ID NO: 1407565 - DNA, 15 bp, Homo sapiens
ttctcgttacttagc

SEQ ID NO: 1407566 - DNA, 15 bp, Homo sapiens
attctcgttacttag

SEQ ID NO: 1407567 - DNA, 15 bp, Homo sapiens
gattctcgttactta

SEQ ID NO: 1407568 - DNA, 15 bp, Homo sapiens
agattctcgttactt

SEQ ID NO: 1407569 - DNA, 15 bp, Homo sapiens
tagattctcgttact

SEQ ID NO: 1407570 - DNA, 15 bp, Homo sapiens
atagattctcgttac

SEQ ID NO: 1407571 - DNA, 15 bp, Homo sapiens
gatagattctcgtta

SEQ ID NO: 1407572 - DNA, 15 bp, Homo sapiens
agatagattctcgtt

SEQ ID NO: 1407573 - DNA, 15 bp, Homo sapiens
aagatagattctcgt

SEQ ID NO: 1407574 - DNA, 15 bp, Homo sapiens
caagatagattctcg

SEQ ID NO: 1407575 - DNA, 15 bp, Homo sapiens
acaagatagattctc

SEQ ID NO: 1407576 - DNA, 15 bp, Homo sapiens
tacaagatagattct

SEQ ID NO: 1407577 - DNA, 15 bp, Homo sapiens
atacaagatagattc

SEQ ID NO: 1407578 - DNA, 15 bp, Homo sapiens
aatacaagatagatt

SEQ ID NO: 1407579 - DNA, 15 bp, Homo sapiens
aaatacaagatagat

SEQ ID NO: 1407580 - DNA, 15 bp, Homo sapiens
aaaatacaagataga

SEQ ID NO: 1407581 - DNA, 15 bp, Homo sapiens
gaaaatacaagatag

SEQ ID NO: 1407582 - DNA, 15 bp, Homo sapiens
tgaaaatacaagata

SEQ ID NO: 1407583 - DNA, 15 bp, Homo sapiens
ttgaaaatacaagat

SEQ ID NO: 1407584 - DNA, 15 bp, Homo sapiens
gattgaaaatacaag

SEQ ID NO: 1407585 - DNA, 15 bp, Homo sapiens
tgattgaaaatacaa

SEQ ID NO: 1407586 - DNA, 15 bp, Homo sapiens
gtgattgaaaataca

SEQ ID NO: 1407587 - DNA, 15 bp, Homo sapiens
tgtgattgaaaatac

SEQ ID NO: 1407588 - DNA, 15 bp, Homo sapiens
ctgtgattgaaaata

SEQ ID NO: 1407589 - DNA, 15 bp, Homo sapiens
cctgtgattgaaaat

SEQ ID NO: 1407590 - DNA, 15 bp, Homo sapiens
tcctgtgattgaaaa

SEQ ID NO: 1407591 - DNA, 15 bp, Homo sapiens
ctcctgtgattgaaa

SEQ ID NO: 1407592 - DNA, 15 bp, Homo sapiens
tctcctgtgattgaa

SEQ ID NO: 1407593 - DNA, 15 bp, Homo sapiens
ttctcctgtgattga

SEQ ID NO: 1407594 - DNA, 15 bp, Homo sapiens
cttctcctgtgattg

SEQ ID NO: 1407595 - DNA, 15 bp, Homo sapiens
acttctcctgtgatt

SEQ ID NO: 1407596 - DNA, 15 bp, Homo sapiens
tacttctcctgtgat

SEQ ID NO: 1407597 - DNA, 15 bp, Homo sapiens
ttacttctcctgtga

SEQ ID NO: 1407598 - DNA, 15 bp, Homo sapiens
attacttctcctgtg

SEQ ID NO: 1407599 - DNA, 15 bp, Homo sapiens
aattacttctcctgt

SEQ ID NO: 1407600 - DNA, 15 bp, Homo sapiens
taattacttctcctg

SEQ ID NO: 1407601 - DNA, 15 bp, Homo sapiens
ctaattacttctcct

SEQ ID NO: 1407602 - DNA, 15 bp, Homo sapiens
gctaattacttctcc

SEQ ID NO: 1407603 - DNA, 15 bp, Homo sapiens
ggctaattacttctc

SEQ ID NO: 1407604 - DNA, 15 bp, Homo sapiens
gggctaattacttct

SEQ ID NO: 1407605 - DNA, 15 bp, Homo sapiens
agggctaattacttc

SEQ ID NO: 1407606 - DNA, 15 bp, Homo sapiens
aagggctaattactt

SEQ ID NO: 1407607 - DNA, 15 bp, Homo sapiens
aaagggctaattact

SEQ ID NO: 1407608 - DNA, 15 bp, Homo sapiens
gaaagggctaattac

SEQ ID NO: 1407609 - DNA, 15 bp, Homo sapiens
agaaagggctaatta

SEQ ID NO: 1407610 - DNA, 15 bp, Homo sapiens
gagaaagggctaatt

SEQ ID NO: 1407611 - DNA, 15 bp, Homo sapiens
tgagaaagggctaat

SEQ ID NO: 1407612 - DNA, 15 bp, Homo sapiens
ttgagaaagggctaa

SEQ ID NO: 1407613 - DNA, 15 bp, Homo sapiens
tttgagaaagggcta

SEQ ID NO: 1407614 - DNA, 15 bp, Homo sapiens
ctttgagaaagggct

SEQ ID NO: 1407615 - DNA, 15 bp, Homo sapiens
gctttgagaaagggc

SEQ ID NO: 1407616 - DNA, 15 bp, Homo sapiens
agctttgagaaaggg

SEQ ID NO: 1407617 - DNA, 15 bp, Homo sapiens
gagctttgagaaagg

SEQ ID NO: 1407618 - DNA, 15 bp, Homo sapiens
agagctttgagaaag

SEQ ID NO: 1407619 - DNA, 15 bp, Homo sapiens
cagagctttgagaaa

SEQ ID NO: 1407620 - DNA, 15 bp, Homo sapiens
acagagctttgagaa

SEQ ID NO: 1407621 - DNA, 15 bp, Homo sapiens
tacagagctttgaga

SEQ ID NO: 1407622 - DNA, 15 bp, Homo sapiens
atacagagctttgag

SEQ ID NO: 1407623 - DNA, 15 bp, Homo sapiens
tatacagagctttga

SEQ ID NO: 1407624 - DNA, 15 bp, Homo sapiens
gtatacagagctttg

SEQ ID NO: 1407625 - DNA, 15 bp, Homo sapiens
agtatacagagcttt

SEQ ID NO: 1407626 - DNA, 15 bp, Homo sapiens
aagtatacagagctt

SEQ ID NO: 1407627 - DNA, 15 bp, Homo sapiens
taagtatacagagct

SEQ ID NO: 1407628 - DNA, 15 bp, Homo sapiens
gtaagtatacagagc

SEQ ID NO: 1407629 - DNA, 15 bp, Homo sapiens
ggtaagtatacagag

SEQ ID NO: 1407630 - DNA, 15 bp, Homo sapiens
gggtaagtatacaga

SEQ ID NO: 1407631 - DNA, 15 bp, Homo sapiens
cgggtaagtatacag

SEQ ID NO: 1407632 - DNA, 15 bp, Homo sapiens
acgggtaagtataca

SEQ ID NO: 1407633 - DNA, 15 bp, Homo sapiens
cacgggtaagtatac

SEQ ID NO: 1407634 - DNA, 15 bp, Homo sapiens
tcacgggtaagtata

SEQ ID NO: 1407635 - DNA, 15 bp, Homo sapiens
ctcacgggtaagtat

SEQ ID NO: 1407636 - DNA, 15 bp, Homo sapiens
aactccttgacctga

SEQ ID NO: 1407637 - DNA, 15 bp, Homo sapiens
aaactccttgacctg

SEQ ID NO: 1407638 - DNA, 15 bp, Homo sapiens
aaaactccttgacct

SEQ ID NO: 1407639 - DNA, 15 bp, Homo sapiens
aaaaactccttgacc

SEQ ID NO: 1407640 - DNA, 15 bp, Homo sapiens
aaaaaactccttgac

SEQ ID NO: 1407641 - DNA, 15 bp, Homo sapiens
gaaaaaactccttga

SEQ ID NO: 1407642 - DNA, 15 bp, Homo sapiens
agaaaaaactccttg

SEQ ID NO: 1407643 - DNA, 15 bp, Homo sapiens
aagaaaaaactcctt

SEQ ID NO: 1407644 - DNA, 15 bp, Homo sapiens
gaagaaaaaactcct

SEQ ID NO: 1407645 - DNA, 15 bp, Homo sapiens
ggaagaaaaaactcc

SEQ ID NO: 1407646 - DNA, 15 bp, Homo sapiens
aggaagaaaaaactc

SEQ ID NO: 1407647 - DNA, 15 bp, Homo sapiens
aaggaagaaaaaact

SEQ ID NO: 1407648 - DNA, 15 bp, Homo sapiens
gaaggaagaaaaaac

SEQ ID NO: 1407649 - DNA, 15 bp, Homo sapiens
cgaaggaagaaaaaa

SEQ ID NO: 1407650 - DNA, 15 bp, Homo sapiens
gcgaaggaagaaaaa

SEQ ID NO: 1407651 - DNA, 15 bp, Homo sapiens
tgcgaaggaagaaaa

SEQ ID NO: 1407652 - DNA, 15 bp, Homo sapiens
ctgcgaaggaagaaa

SEQ ID NO: 1407653 - DNA, 15 bp, Homo sapiens
tctgcgaaggaagaa

SEQ ID NO: 1407654 - DNA, 15 bp, Homo sapiens
gtctgcgaaggaaga

SEQ ID NO: 1407655 - DNA, 15 bp, Homo sapiens
tgtctgcgaaggaag

SEQ ID NO: 1407656 - DNA, 15 bp, Homo sapiens
atgtctgcgaaggaa

SEQ ID NO: 1407657 - DNA, 15 bp, Homo sapiens
catgtctgcgaagga

SEQ ID NO: 1407658 - DNA, 15 bp, Homo sapiens
gcatgtctgcgaagg

SEQ ID NO: 1407659 - DNA, 15 bp, Homo sapiens
tgcatgtctgcgaag

SEQ ID NO: 1407660 - DNA, 15 bp, Homo sapiens
ttgcatgtctgcgaa

SEQ ID NO: 1407661 - DNA, 15 bp, Homo sapiens
cttgcatgtctgcga

SEQ ID NO: 1407662 - DNA, 15 bp, Homo sapiens
tcttgcatgtctgcg

SEQ ID NO: 1407663 - DNA, 15 bp, Homo sapiens
atcttgcatgtctgc

SEQ ID NO: 1407664 - DNA, 15 bp, Homo sapiens
gatcttgcatgtctg

SEQ ID NO: 1407665 - DNA, 15 bp, Homo sapiens
agatcttgcatgtct

SEQ ID NO: 1407666 - DNA, 15 bp, Homo sapiens
cagatcttgcatgtc

SEQ ID NO: 1407667 - DNA, 15 bp, Homo sapiens
tcagatcttgcatgt

SEQ ID NO: 1407668 - DNA, 15 bp, Homo sapiens
ttcagatcttgcatg

SEQ ID NO: 1407669 - DNA, 15 bp, Homo sapiens
attcagatcttgcat

SEQ ID NO: 1407670 - DNA, 15 bp, Homo sapiens
cattcagatcttgca

SEQ ID NO: 1407671 - DNA, 15 bp, Homo sapiens
ccattcagatcttgc

SEQ ID NO: 1407672 - DNA, 15 bp, Homo sapiens
tccattcagatcttg

SEQ ID NO: 1407673 - DNA, 15 bp, Homo sapiens
ttccattcagatctt

SEQ ID NO: 1407674 - DNA, 15 bp, Homo sapiens
tttccattcagatct

SEQ ID NO: 1407675 - DNA, 15 bp, Homo sapiens
gtttccattcagatc

SEQ ID NO: 1407676 - DNA, 15 bp, Homo sapiens
tgtttccattcagat

SEQ ID NO: 1407677 - DNA, 15 bp, Homo sapiens
ttgtttccattcaga

SEQ ID NO: 1407678 - DNA, 15 bp, Homo sapiens
gttgtttccattcag

SEQ ID NO: 1407679 - DNA, 15 bp, Homo sapiens
ggttgtttccattca

SEQ ID NO: 1407680 - DNA, 15 bp, Homo sapiens
tggttgtttccattc

SEQ ID NO: 1407681 - DNA, 15 bp, Homo sapiens
ctggttgtttccatt

SEQ ID NO: 1407682 - DNA, 15 bp, Homo sapiens
actggttgtttccat

SEQ ID NO: 1407683 - DNA, 15 bp, Homo sapiens
gactggttgtttcca

SEQ ID NO: 1407684 - DNA, 15 bp, Homo sapiens
tgactggttgtttcc

SEQ ID NO: 1407685 - DNA, 15 bp, Homo sapiens
ctgactggttgtttc

SEQ ID NO: 1407686 - DNA, 15 bp, Homo sapiens
actgactggttgttt

SEQ ID NO: 1407687 - DNA, 15 bp, Homo sapiens
cactgactggttgtt

SEQ ID NO: 1407688 - DNA, 15 bp, Homo sapiens
tcactgactggttgt

SEQ ID NO: 1407689 - DNA, 15 bp, Homo sapiens
gtcactgactggttg

SEQ ID NO: 1407690 - DNA, 15 bp, Homo sapiens
ggtcactgactggtt

SEQ ID NO: 1407691 - DNA, 15 bp, Homo sapiens
tggtcactgactggt

SEQ ID NO: 1407692 - DNA, 15 bp, Homo sapiens
ctggtcactgactgg

SEQ ID NO: 1407693 - DNA, 15 bp, Homo sapiens
cctggtcactgactg

SEQ ID NO: 1407694 - DNA, 15 bp, Homo sapiens
gcctggtcactgact

SEQ ID NO: 1407695 - DNA, 15 bp, Homo sapiens
tgcctggtcactgac

SEQ ID NO: 1407696 - DNA, 15 bp, Homo sapiens
ctgcctggtcactga

SEQ ID NO: 1407697 - DNA, 15 bp, Homo sapiens
tctgcctggtcactg

SEQ ID NO: 1407698 - DNA, 15 bp, Homo sapiens
ttctgcctggtcact

SEQ ID NO: 1407699 - DNA, 15 bp, Homo sapiens
cttctgcctggtcac

SEQ ID NO: 1407700 - DNA, 15 bp, Homo sapiens
tcttctgcctggtca

SEQ ID NO: 1407701 - DNA, 15 bp, Homo sapiens
atcttctgcctggtc

SEQ ID NO: 1407702 - DNA, 15 bp, Homo sapiens
catcttctgcctggt

SEQ ID NO: 1407703 - DNA, 15 bp, Homo sapiens
gcatcttctgcctgg

SEQ ID NO: 1407704 - DNA, 15 bp, Homo sapiens
tgcatcttctgcctg

SEQ ID NO: 1407705 - DNA, 15 bp, Homo sapiens
ctgcatcttctgcct

SEQ ID NO: 1407706 - DNA, 15 bp, Homo sapiens
gctgcatcttctgcc

SEQ ID NO: 1407707 - DNA, 15 bp, Homo sapiens
tgctgcatcttctgc

SEQ ID NO: 1407708 - DNA, 15 bp, Homo sapiens
ctgctgcatcttctg

SEQ ID NO: 1407709 - DNA, 15 bp, Homo sapiens
gctgctgcatcttct

SEQ ID NO: 1407710 - DNA, 15 bp, Homo sapiens
agctgctgcatcttc

SEQ ID NO: 1407711 - DNA, 15 bp, Homo sapiens
cagctgctgcatctt

SEQ ID NO: 1407712 - DNA, 15 bp, Homo sapiens
ccagctgctgcatct

SEQ ID NO: 1407713 - DNA, 15 bp, Homo sapiens
tccagctgctgcatc

SEQ ID NO: 1407714 - DNA, 15 bp, Homo sapiens
ttccagctgctgcat

SEQ ID NO: 1407715 - DNA, 15 bp, Homo sapiens
gttccagctgctgca

SEQ ID NO: 1407716 - DNA, 15 bp, Homo sapiens
tgttccagctgctgc

SEQ ID NO: 1407717 - DNA, 15 bp, Homo sapiens
ctgttccagctgctg

SEQ ID NO: 1407718 - DNA, 15 bp, Homo sapiens
tctgttccagctgct

SEQ ID NO: 1407719 - DNA, 15 bp, Homo sapiens
atctgttccagctgc

SEQ ID NO: 1407720 - DNA, 15 bp, Homo sapiens
catctgttccagctg

SEQ ID NO: 1407721 - DNA, 15 bp, Homo sapiens
gcatctgttccagct

SEQ ID NO: 1407722 - DNA, 15 bp, Homo sapiens
agcatctgttccagc

SEQ ID NO: 1407723 - DNA, 15 bp, Homo sapiens
gagcatctgttccag

SEQ ID NO: 1407724 - DNA, 15 bp, Homo sapiens
tgagcatctgttcca

SEQ ID NO: 1407725 - DNA, 15 bp, Homo sapiens
gtgagcatctgttcc

SEQ ID NO: 1407726 - DNA, 15 bp, Homo sapiens
agtgagcatctgttc

SEQ ID NO: 1407727 - DNA, 15 bp, Homo sapiens
cagtgagcatctgtt

SEQ ID NO: 1407728 - DNA, 15 bp, Homo sapiens
gcagtgagcatctgt

SEQ ID NO: 1407729 - DNA, 15 bp, Homo sapiens
cgcagtgagcatctg

SEQ ID NO: 1407730 - DNA, 15 bp, Homo sapiens
gcgcagtgagcatct

SEQ ID NO: 1407731 - DNA, 15 bp, Homo sapiens
agcgcagtgagcatc

SEQ ID NO: 1407732 - DNA, 15 bp, Homo sapiens
cagcgcagtgagcat

SEQ ID NO: 1407733 - DNA, 15 bp, Homo sapiens
ccagcgcagtgagca

SEQ ID NO: 1407734 - DNA, 15 bp, Homo sapiens
tccagcgcagtgagc

SEQ ID NO: 1407735 - DNA, 15 bp, Homo sapiens
gtccagcgcagtgag

SEQ ID NO: 1407736 - DNA, 15 bp, Homo sapiens
ggtccagcgcagtga

SEQ ID NO: 1407737 - DNA, 15 bp, Homo sapiens
tggtccagcgcagtg

SEQ ID NO: 1407738 - DNA, 15 bp, Homo sapiens
ctggtccagcgcagt

SEQ ID NO: 1407739 - DNA, 15 bp, Homo sapiens
tctggtccagcgcag

SEQ ID NO: 1407740 - DNA, 15 bp, Homo sapiens
atctggtccagcgca

SEQ ID NO: 1407741 - DNA, 15 bp, Homo sapiens
catctggtccagcgc

SEQ ID NO: 1407742 - DNA, 15 bp, Homo sapiens
gcatctggtccagcg

SEQ ID NO: 1407743 - DNA, 15 bp, Homo sapiens
cgcatctggtccagc

SEQ ID NO: 1407744 - DNA, 15 bp, Homo sapiens
ccgcatctggtccag

SEQ ID NO: 1407745 - DNA, 15 bp, Homo sapiens
tccgcatctggtcca

SEQ ID NO: 1407746 - DNA, 15 bp, Homo sapiens
ctccgcatctggtcc

SEQ ID NO: 1407747 - DNA, 15 bp, Homo sapiens
tctccgcatctggtc

SEQ ID NO: 1407748 - DNA, 15 bp, Homo sapiens
ctctccgcatctggt

SEQ ID NO: 1407749 - DNA, 15 bp, Homo sapiens
actctccgcatctgg

SEQ ID NO: 1407750 - DNA, 15 bp, Homo sapiens
tactctccgcatctg

SEQ ID NO: 1407751 - DNA, 15 bp, Homo sapiens
ttactctccgcatct

SEQ ID NO: 1407752 - DNA, 15 bp, Homo sapiens
cttactctccgcatc

SEQ ID NO: 1407753 - DNA, 15 bp, Homo sapiens
ccttactctccgcat

SEQ ID NO: 1407754 - DNA, 15 bp, Homo sapiens
cccttactctccgca

SEQ ID NO: 1407755 - DNA, 15 bp, Homo sapiens
gcccttactctccgc

SEQ ID NO: 1407756 - DNA, 15 bp, Homo sapiens
tgcccttactctccg

SEQ ID NO: 1407757 - DNA, 15 bp, Homo sapiens
atgcccttactctcc

SEQ ID NO: 1407758 - DNA, 15 bp, Homo sapiens
tatgcccttactctc

SEQ ID NO: 1407759 - DNA, 15 bp, Homo sapiens
ctatgcccttactct

SEQ ID NO: 1407760 - DNA, 15 bp, Homo sapiens
cctatgcccttactc

SEQ ID NO: 1407761 - DNA, 15 bp, Homo sapiens
acctatgcccttact

SEQ ID NO: 1407762 - DNA, 15 bp, Homo sapiens
gacctatgcccttac

SEQ ID NO: 1407763 - DNA, 15 bp, Homo sapiens
cgacctatgccctta

SEQ ID NO: 1407764 - DNA, 15 bp, Homo sapiens
ccgacctatgccctt

SEQ ID NO: 1407765 - DNA, 15 bp, Homo sapiens
tccgacctatgccct

SEQ ID NO: 1407766 - DNA, 15 bp, Homo sapiens
gtccgacctatgccc

SEQ ID NO: 1407767 - DNA, 15 bp, Homo sapiens
ggtccgacctatgcc

SEQ ID NO: 1407768 - DNA, 15 bp, Homo sapiens
tggtccgacctatgc

SEQ ID NO: 1407769 - DNA, 15 bp, Homo sapiens
gtggtccgacctatg

SEQ ID NO: 1407770 - DNA, 15 bp, Homo sapiens
agtggtccgacctat

SEQ ID NO: 1407771 - DNA, 15 bp, Homo sapiens
aagtggtccgaccta

SEQ ID NO: 1407772 - DNA, 15 bp, Homo sapiens
gaagtggtccgacct

SEQ ID NO: 1407773 - DNA, 15 bp, Homo sapiens
ggaagtggtccgacc

SEQ ID NO: 1407774 - DNA, 15 bp, Homo sapiens
gggaagtggtccgac

SEQ ID NO: 1407775 - DNA, 15 bp, Homo sapiens
ggggaagtggtccga

SEQ ID NO: 1407776 - DNA, 15 bp, Homo sapiens
gggggaagtggtccg

SEQ ID NO: 1407777 - DNA, 15 bp, Homo sapiens
tgggggaagtggtcc

SEQ ID NO: 1407778 - DNA, 15 bp, Homo sapiens
atgggggaagtggtc

SEQ ID NO: 1407779 - DNA, 15 bp, Homo sapiens
catgggggaagtggt

SEQ ID NO: 1407780 - DNA, 15 bp, Homo sapiens
acatgggggaagtgg

SEQ ID NO: 1407781 - DNA, 15 bp, Homo sapiens
cacatgggggaagtg

SEQ ID NO: 1407782 - DNA, 15 bp, Homo sapiens
acacatgggggaagt

SEQ ID NO: 1407783 - DNA, 15 bp, Homo sapiens
gacacatgggggaag

SEQ ID NO: 1407784 - DNA, 15 bp, Homo sapiens
agacacatgggggaa

SEQ ID NO: 1407785 - DNA, 15 bp, Homo sapiens
gagacacatggggga

SEQ ID NO: 1407786 - DNA, 15 bp, Homo sapiens
cgagacacatggggg

SEQ ID NO: 1407787 - DNA, 15 bp, Homo sapiens
gcgagacacatgggg

SEQ ID NO: 1407788 - DNA, 15 bp, Homo sapiens
agcgagacacatggg

SEQ ID NO: 1407789 - DNA, 15 bp, Homo sapiens
gagcgagacacatgg

SEQ ID NO: 1407790 - DNA, 15 bp, Homo sapiens
tgagcgagacacatg

SEQ ID NO: 1407791 - DNA, 15 bp, Homo sapiens
gtgagcgagacacat

SEQ ID NO: 1407792 - DNA, 15 bp, Homo sapiens
agtgagcgagacaca

SEQ ID NO: 1407793 - DNA, 15 bp, Homo sapiens
aagtgagcgagacac

SEQ ID NO: 1407794 - DNA, 15 bp, Homo sapiens
caagtgagcgagaca

SEQ ID NO: 1407795 - DNA, 15 bp, Homo sapiens
gcaagtgagcgagac

SEQ ID NO: 1407796 - DNA, 15 bp, Homo sapiens
cgcaagtgagcgaga

SEQ ID NO: 1407797 - DNA, 15 bp, Homo sapiens
ccgcaagtgagcgag

SEQ ID NO: 1407798 - DNA, 15 bp, Homo sapiens
cccgcaagtgagcga

SEQ ID NO: 1407799 - DNA, 15 bp, Homo sapiens
tcccgcaagtgagcg

SEQ ID NO: 1407800 - DNA, 15 bp, Homo sapiens
atcccgcaagtgagc

SEQ ID NO: 1407801 - DNA, 15 bp, Homo sapiens
aatcccgcaagtgag

SEQ ID NO: 1407802 - DNA, 15 bp, Homo sapiens
aaatcccgcaagtga

SEQ ID NO: 1407803 - DNA, 15 bp, Homo sapiens
gaaatcccgcaagtg

SEQ ID NO: 1407804 - DNA, 15 bp, Homo sapiens
tgaaatcccgcaagt

SEQ ID NO: 1407805 - DNA, 15 bp, Homo sapiens
ctgaaatcccgcaag

SEQ ID NO: 1407806 - DNA, 15 bp, Homo sapiens
gctgaaatcccgcaa

SEQ ID NO: 1407807 - DNA, 15 bp, Homo sapiens
cgctgaaatcccgca

SEQ ID NO: 1407808 - DNA, 15 bp, Homo sapiens
acgctgaaatcccgc

SEQ ID NO: 1407809 - DNA, 15 bp, Homo sapiens
gacgctgaaatcccg

SEQ ID NO: 1407810 - DNA, 15 bp, Homo sapiens
agacgctgaaatccc

SEQ ID NO: 1407811 - DNA, 15 bp, Homo sapiens
aagacgctgaaatcc

SEQ ID NO: 1407812 - DNA, 15 bp, Homo sapiens
caagacgctgaaatc

SEQ ID NO: 1407813 - DNA, 15 bp, Homo sapiens
acaagacgctgaaat

SEQ ID NO: 1407814 - DNA, 15 bp, Homo sapiens
cacaagacgctgaaa

SEQ ID NO: 1407815 - DNA, 15 bp, Homo sapiens
ccacaagacgctgaa

SEQ ID NO: 1407816 - DNA, 15 bp, Homo sapiens
gccacaagacgctga

SEQ ID NO: 1407817 - DNA, 15 bp, Homo sapiens
tgccacaagacgctg

SEQ ID NO: 1407818 - DNA, 15 bp, Homo sapiens
ctgccacaagacgct

SEQ ID NO: 1407819 - DNA, 15 bp, Homo sapiens
tctgccacaagacgc

SEQ ID NO: 1407820 - DNA, 15 bp, Homo sapiens
ttctgccacaagacg

SEQ ID NO: 1407821 - DNA, 15 bp, Homo sapiens
gttctgccacaagac

SEQ ID NO: 1407822 - DNA, 15 bp, Homo sapiens
agttctgccacaaga

SEQ ID NO: 1407823 - DNA, 15 bp, Homo sapiens
aagttctgccacaag

SEQ ID NO: 1407824 - DNA, 15 bp, Homo sapiens
caagttctgccacaa

SEQ ID NO: 1407825 - DNA, 15 bp, Homo sapiens
gcaagttctgccaca

SEQ ID NO: 1407826 - DNA, 15 bp, Homo sapiens
agcaagttctgccac

SEQ ID NO: 1407827 - DNA, 15 bp, Homo sapiens
aagcaagttctgcca

SEQ ID NO: 1407828 - DNA, 15 bp, Homo sapiens
caagcaagttctgcc

SEQ ID NO: 1407829 - DNA, 15 bp, Homo sapiens
ccaagcaagttctgc

SEQ ID NO: 1407830 - DNA, 15 bp, Homo sapiens
accaagcaagttctg

SEQ ID NO: 1407831 - DNA, 15 bp, Homo sapiens
aaccaagcaagttct

SEQ ID NO: 1407832 - DNA, 15 bp, Homo sapiens
aaaccaagcaagttc

SEQ ID NO: 1407833 - DNA, 15 bp, Homo sapiens
gaaaccaagcaagtt

SEQ ID NO: 1407834 - DNA, 15 bp, Homo sapiens
agaaaccaagcaagt

SEQ ID NO: 1407835 - DNA, 15 bp, Homo sapiens
tagaaaccaagcaag

SEQ ID NO: 1407836 - DNA, 15 bp, Homo sapiens
ttagaaaccaagcaa

SEQ ID NO: 1407837 - DNA, 15 bp, Homo sapiens
cttagaaaccaagca

SEQ ID NO: 1407838 - DNA, 15 bp, Homo sapiens
tcttagaaaccaagc

SEQ ID NO: 1407839 - DNA, 15 bp, Homo sapiens
ttcttagaaaccaag

SEQ ID NO: 1407840 - DNA, 15 bp, Homo sapiens
cttcttagaaaccaa

SEQ ID NO: 1407841 - DNA, 15 bp, Homo sapiens
acttcttagaaacca

SEQ ID NO: 1407842 - DNA, 15 bp, Homo sapiens
aacttcttagaaacc

SEQ ID NO: 1407843 - DNA, 15 bp, Homo sapiens
gaacttcttagaaac

SEQ ID NO: 1407844 - DNA, 15 bp, Homo sapiens
ggaacttcttagaaa

SEQ ID NO: 1407845 - DNA, 15 bp, Homo sapiens
aggaacttcttagaa

SEQ ID NO: 1407846 - DNA, 15 bp, Homo sapiens
caggaacttcttaga

SEQ ID NO: 1407847 - DNA, 15 bp, Homo sapiens
gcaggaacttcttag

SEQ ID NO: 1407848 - DNA, 15 bp, Homo sapiens
agcaggaacttctta

SEQ ID NO: 1407849 - DNA, 15 bp, Homo sapiens
gagcaggaacttctt

SEQ ID NO: 1407850 - DNA, 15 bp, Homo sapiens
agagcaggaacttct

SEQ ID NO: 1407851 - DNA, 15 bp, Homo sapiens
cagagcaggaacttc

SEQ ID NO: 1407852 - DNA, 15 bp, Homo sapiens
ccagagcaggaactt

SEQ ID NO: 1407853 - DNA, 15 bp, Homo sapiens
tccagagcaggaact

SEQ ID NO: 1407854 - DNA, 15 bp, Homo sapiens
ctccagagcaggaac

SEQ ID NO: 1407855 - DNA, 15 bp, Homo sapiens
actccagagcaggaa

SEQ ID NO: 1407856 - DNA, 15 bp, Homo sapiens
aactccagagcagga

SEQ ID NO: 1407857 - DNA, 15 bp, Homo sapiens
caactccagagcagg

SEQ ID NO: 1407858 - DNA, 15 bp, Homo sapiens
ccattcccacatctc

SEQ ID NO: 1407859 - DNA, 15 bp, Homo sapiens
cccattcccacatct

SEQ ID NO: 1407860 - DNA, 15 bp, Homo sapiens
ccccattcccacatc

SEQ ID NO: 1407861 - DNA, 15 bp, Homo sapiens
cccccattcccacat

SEQ ID NO: 1407862 - DNA, 15 bp, Homo sapiens
gcccccattcccaca

SEQ ID NO: 1407863 - DNA, 15 bp, Homo sapiens
ggcccccattcccac

SEQ ID NO: 1407864 - DNA, 15 bp, Homo sapiens
cggcccccattccca

SEQ ID NO: 1407865 - DNA, 15 bp, Homo sapiens
tcggcccccattccc

SEQ ID NO: 1407866 - DNA, 15 bp, Homo sapiens
ctcggcccccattcc

SEQ ID NO: 1407867 - DNA, 15 bp, Homo sapiens
gctcggcccccattc

SEQ ID NO: 1407868 - DNA, 15 bp, Homo sapiens
ggctcggcccccatt

SEQ ID NO: 1407869 - DNA, 15 bp, Homo sapiens
tggctcggcccccat

SEQ ID NO: 1407870 - DNA, 15 bp, Homo sapiens
ttggctcggccccca

SEQ ID NO: 1407871 - DNA, 15 bp, Homo sapiens
attggctcggccccc

SEQ ID NO: 1407872 - DNA, 15 bp, Homo sapiens
aattggctcggcccc

SEQ ID NO: 1407873 - DNA, 15 bp, Homo sapiens
caattggctcggccc

SEQ ID NO: 1407874 - DNA, 15 bp, Homo sapiens
acaattggctcggcc

SEQ ID NO: 1407875 - DNA, 15 bp, Homo sapiens
cacaattggctcggc

SEQ ID NO: 1407876 - DNA, 15 bp, Homo sapiens
tcacaattggctcgg

SEQ ID NO: 1407877 - DNA, 15 bp, Homo sapiens
atcacaattggctcg

SEQ ID NO: 1407878 - DNA, 15 bp, Homo sapiens
catcacaattggctc

SEQ ID NO: 1407879 - DNA, 15 bp, Homo sapiens
acatcacaattggct

SEQ ID NO: 1407880 - DNA, 15 bp, Homo sapiens
tacatcacaattggc

SEQ ID NO: 1407881 - DNA, 15 bp, Homo sapiens
ttacatcacaattgg

SEQ ID NO: 1407882 - DNA, 15 bp, Homo sapiens
cttacatcacaattg

SEQ ID NO: 1407883 - DNA, 15 bp, Homo sapiens
acttacatcacaatt

SEQ ID NO: 1407884 - DNA, 15 bp, Homo sapiens
aacttacatcacaat

SEQ ID NO: 1407885 - DNA, 15 bp, Homo sapiens
aaacttacatcacaa

SEQ ID NO: 1407886 - DNA, 15 bp, Homo sapiens
aaaacttacatcaca

SEQ ID NO: 1407887 - DNA, 15 bp, Homo sapiens
caaaacttacatcac

SEQ ID NO: 1407888 - DNA, 15 bp, Homo sapiens
acaaaacttacatca

SEQ ID NO: 1407889 - DNA, 15 bp, Homo sapiens
aacaaaacttacatc

SEQ ID NO: 1407890 - DNA, 15 bp, Homo sapiens
caacaaaacttacat

SEQ ID NO: 1407891 - DNA, 15 bp, Homo sapiens
ccaacaaaacttaca

SEQ ID NO: 1407892 - DNA, 15 bp, Homo sapiens
cccaacaaaacttac

SEQ ID NO: 1407893 - DNA, 15 bp, Homo sapiens
ccccaacaaaactta

SEQ ID NO: 1407894 - DNA, 15 bp, Homo sapiens
tccccaacaaaactt

SEQ ID NO: 1407895 - DNA, 15 bp, Homo sapiens
atccccaacaaaact

SEQ ID NO: 1407896 - DNA, 15 bp, Homo sapiens
catccccaacaaaac

SEQ ID NO: 1407897 - DNA, 15 bp, Homo sapiens
tcatccccaacaaaa

SEQ ID NO: 1407898 - DNA, 15 bp, Homo sapiens
ttcatccccaacaaa

SEQ ID NO: 1407899 - DNA, 15 bp, Homo sapiens
tttcatccccaacaa

SEQ ID NO: 1407900 - DNA, 15 bp, Homo sapiens
ctttcatccccaaca

SEQ ID NO: 1407901 - DNA, 15 bp, Homo sapiens
tctttcatccccaac

SEQ ID NO: 1407902 - DNA, 15 bp, Homo sapiens
gtctttcatccccaa

SEQ ID NO: 1407903 - DNA, 15 bp, Homo sapiens
tgtctttcatcccca

SEQ ID NO: 1407904 - DNA, 15 bp, Homo sapiens
ttgtctttcatcccc

SEQ ID NO: 1407905 - DNA, 15 bp, Homo sapiens
gttgtctttcatccc

SEQ ID NO: 1407906 - DNA, 15 bp, Homo sapiens
agttgtctttcatcc

SEQ ID NO: 1407907 - DNA, 15 bp, Homo sapiens
cagttgtctttcatc

SEQ ID NO: 1407908 - DNA, 15 bp, Homo sapiens
ccagttgtctttcat

SEQ ID NO: 1407909 - DNA, 15 bp, Homo sapiens
cccagttgtctttca

SEQ ID NO: 1407910 - DNA, 15 bp, Homo sapiens
ccccagttgtctttc

SEQ ID NO: 1407911 - DNA, 15 bp, Homo sapiens
accccagttgtcttt

SEQ ID NO: 1407912 - DNA, 15 bp, Homo sapiens
caccccagttgtctt

SEQ ID NO: 1407913 - DNA, 15 bp, Homo sapiens
acaccccagttgtct

SEQ ID NO: 1407914 - DNA, 15 bp, Homo sapiens
aacaccccagttgtc

SEQ ID NO: 1407915 - DNA, 15 bp, Homo sapiens
aaacaccccagttgt

SEQ ID NO: 1407916 - DNA, 15 bp, Homo sapiens
aaaacaccccagttg

SEQ ID NO: 1407917 - DNA, 15 bp, Homo sapiens
gaaaacaccccagtt

SEQ ID NO: 1407918 - DNA, 15 bp, Homo sapiens
ggaaaacaccccagt

SEQ ID NO: 1407919 - DNA, 15 bp, Homo sapiens
aggaaaacaccccag

SEQ ID NO: 1407920 - DNA, 15 bp, Homo sapiens
aaggaaaacacccca

SEQ ID NO: 1407921 - DNA, 15 bp, Homo sapiens
caaggaaaacacccc

SEQ ID NO: 1407922 - DNA, 15 bp, Homo sapiens
tcaaggaaaacaccc

SEQ ID NO: 1407923 - DNA, 15 bp, Homo sapiens
ctcaaggaaaacacc

SEQ ID NO: 1407924 - DNA, 15 bp, Homo sapiens
cctcaaggaaaacac

SEQ ID NO: 1407925 - DNA, 15 bp, Homo sapiens
tccctcaaggaaaac

SEQ ID NO: 1407926 - DNA, 15 bp, Homo sapiens
ctccctcaaggaaaa

SEQ ID NO: 1407927 - DNA, 15 bp, Homo sapiens
tctccctcaaggaaa

SEQ ID NO: 1407928 - DNA, 15 bp, Homo sapiens
ctctccctcaaggaa

SEQ ID NO: 1407929 - DNA, 15 bp, Homo sapiens
tctctccctcaagga

SEQ ID NO: 1407930 - DNA, 15 bp, Homo sapiens
ctctctccctcaagg

SEQ ID NO: 1407931 - DNA, 15 bp, Homo sapiens
cctctctccctcaag

SEQ ID NO: 1407932 - DNA, 15 bp, Homo sapiens
ccctctctccctcaa

SEQ ID NO: 1407933 - DNA, 15 bp, Homo sapiens
cccctctctccctca

SEQ ID NO: 1407934 - DNA, 15 bp, Homo sapiens
acccctctctccctc

SEQ ID NO: 1407935 - DNA, 15 bp, Homo sapiens
tacccctctctccct

SEQ ID NO: 1407936 - DNA, 15 bp, Homo sapiens
ttacccctctctccc

SEQ ID NO: 1407937 - DNA, 15 bp, Homo sapiens
tttacccctctctcc

SEQ ID NO: 1407938 - DNA, 15 bp, Homo sapiens
ctttacccctctctc

SEQ ID NO: 1407939 - DNA, 15 bp, Homo sapiens
tctttacccctctct

SEQ ID NO: 1407940 - DNA, 15 bp, Homo sapiens
atctttacccctctc

SEQ ID NO: 1407941 - DNA, 15 bp, Homo sapiens
gatctttacccctct

SEQ ID NO: 1407942 - DNA, 15 bp, Homo sapiens
ggatctttacccctc

SEQ ID NO: 1407943 - DNA, 15 bp, Homo sapiens
aggatctttacccct

SEQ ID NO: 1407944 - DNA, 15 bp, Homo sapiens
aaggatctttacccc

SEQ ID NO: 1407945 - DNA, 15 bp, Homo sapiens
gaaggatctttaccc

SEQ ID NO: 1407946 - DNA, 15 bp, Homo sapiens
agaaggatctttacc

SEQ ID NO: 1407947 - DNA, 15 bp, Homo sapiens
aagaaggatctttac

SEQ ID NO: 1407948 - DNA, 15 bp, Homo sapiens
taagaaggatcttta

SEQ ID NO: 1407949 - DNA, 15 bp, Homo sapiens
ttaagaaggatcttt

SEQ ID NO: 1407950 - DNA, 15 bp, Homo sapiens
attaagaaggatctt

SEQ ID NO: 1407951 - DNA, 15 bp, Homo sapiens
gattaagaaggatct

SEQ ID NO: 1407952 - DNA, 15 bp, Homo sapiens
ggattaagaaggatc

SEQ ID NO: 1407953 - DNA, 15 bp, Homo sapiens
gggattaagaaggat

SEQ ID NO: 1407954 - DNA, 15 bp, Homo sapiens
ggggattaagaagga

SEQ ID NO: 1407955 - DNA, 15 bp, Homo sapiens
tggggattaagaagg

SEQ ID NO: 1407956 - DNA, 15 bp, Homo sapiens
ctggggattaagaag

SEQ ID NO: 1407957 - DNA, 15 bp, Homo sapiens
tctggggattaagaa

SEQ ID NO: 1407958 - DNA, 15 bp, Homo sapiens
ttctggggattaaga

SEQ ID NO: 1407959 - DNA, 15 bp, Homo sapiens
attctggggattaag

SEQ ID NO: 1407960 - DNA, 15 bp, Homo sapiens
aattctggggattaa

SEQ ID NO: 1407961 - DNA, 15 bp, Homo sapiens
taattctggggatta

SEQ ID NO: 1407962 - DNA, 15 bp, Homo sapiens
ctaattctggggatt

SEQ ID NO: 1407963 - DNA, 15 bp, Homo sapiens
tctaattctggggat

SEQ ID NO: 1407964 - DNA, 15 bp, Homo sapiens
ttctaattctgggga

SEQ ID NO: 1407965 - DNA, 15 bp, Homo sapiens
tttctaattctgggg

SEQ ID NO: 1407966 - DNA, 15 bp, Homo sapiens
gtttctaattctggg

SEQ ID NO: 1407967 - DNA, 15 bp, Homo sapiens
tgtttctaattctgg

SEQ ID NO: 1407968 - DNA, 15 bp, Homo sapiens
atgtttctaattctg

SEQ ID NO: 1407969 - DNA, 15 bp, Homo sapiens
gatgtttctaattct

SEQ ID NO: 1407970 - DNA, 15 bp, Homo sapiens
tgatgtttctaattc

SEQ ID NO: 1407971 - DNA, 15 bp, Homo sapiens
ttgatgtttctaatt

SEQ ID NO: 1407972 - DNA, 15 bp, Homo sapiens
gttgatgtttctaat

SEQ ID NO: 1407973 - DNA, 15 bp, Homo sapiens
ggttgatgtttctaa

SEQ ID NO: 1407974 - DNA, 15 bp, Homo sapiens
aggttgatgtttcta

SEQ ID NO: 1407975 - DNA, 15 bp, Homo sapiens
caggttgatgtttct

SEQ ID NO: 1407976 - DNA, 15 bp, Homo sapiens
acaggttgatgtttc

SEQ ID NO: 1407977 - DNA, 15 bp, Homo sapiens
aacaggttgatgttt

SEQ ID NO: 1407978 - DNA, 15 bp, Homo sapiens
gaacaggttgatgtt

SEQ ID NO: 1407979 - DNA, 15 bp, Homo sapiens
agaacaggttgatgt

SEQ ID NO: 1407980 - DNA, 15 bp, Homo sapiens
aagaacaggttgatg

SEQ ID NO: 1407981 - DNA, 15 bp, Homo sapiens
aaagaacaggttgat

SEQ ID NO: 1407982 - DNA, 15 bp, Homo sapiens
gaaagaacaggttga

SEQ ID NO: 1407983 - DNA, 15 bp, Homo sapiens
tgaaagaacaggttg

SEQ ID NO: 1407984 - DNA, 15 bp, Homo sapiens
ctgaaagaacaggtt

SEQ ID NO: 1407985 - DNA, 15 bp, Homo sapiens
gctgaaagaacaggt

SEQ ID NO: 1407986 - DNA, 15 bp, Homo sapiens
agctgaaagaacagg

SEQ ID NO: 1407987 - DNA, 15 bp, Homo sapiens
tacagctgaaagaac

SEQ ID NO: 1407988 - DNA, 15 bp, Homo sapiens
ctacagctgaaagaa

SEQ ID NO: 1407989 - DNA, 15 bp, Homo sapiens
actacagctgaaaga

SEQ ID NO: 1407990 - DNA, 15 bp, Homo sapiens
aactacagctgaaag

SEQ ID NO: 1407991 - DNA, 15 bp, Homo sapiens
taactacagctgaaa

SEQ ID NO: 1407992 - DNA, 15 bp, Homo sapiens
ataactacagctgaa

SEQ ID NO: 1407993 - DNA, 15 bp, Homo sapiens
aataactacagctga

SEQ ID NO: 1407994 - DNA, 15 bp, Homo sapiens
gaataactacagctg

SEQ ID NO: 1407995 - DNA, 15 bp, Homo sapiens
ggaataactacagct

SEQ ID NO: 1407996 - DNA, 15 bp, Homo sapiens
tggaataactacagc

SEQ ID NO: 1407997 - DNA, 15 bp, Homo sapiens
ttggaataactacag

SEQ ID NO: 1407998 - DNA, 15 bp, Homo sapiens
tttggaataactaca

SEQ ID NO: 1407999 - DNA, 15 bp, Homo sapiens
ttttggaataactac

SEQ ID NO: 1408000 - DNA, 15 bp, Homo sapiens
tttttggaataacta

SEQ ID NO: 1408001 - DNA, 15 bp, Homo sapiens
ctttttggaataact

SEQ ID NO: 1408002 - DNA, 15 bp, Homo sapiens
actttttggaataac

SEQ ID NO: 1408003 - DNA, 15 bp, Homo sapiens
gactttttggaataa

SEQ ID NO: 1408004 - DNA, 15 bp, Homo sapiens
tgactttttggaata

SEQ ID NO: 1408005 - DNA, 15 bp, Homo sapiens
gtgactttttggaat

SEQ ID NO: 1408006 - DNA, 15 bp, Homo sapiens
agtgactttttggaa

SEQ ID NO: 1408007 - DNA, 15 bp, Homo sapiens
aagtgactttttgga

SEQ ID NO: 1408008 - DNA, 15 bp, Homo sapiens
gaagtgactttttgg

SEQ ID NO: 1408009 - DNA, 15 bp, Homo sapiens
tgaagtgactttttg

SEQ ID NO: 1408010 - DNA, 15 bp, Homo sapiens
ctgaagtgacttttt

SEQ ID NO: 1408011 - DNA, 15 bp, Homo sapiens
cctgaagtgactttt

SEQ ID NO: 1408012 - DNA, 15 bp, Homo sapiens
gcctgaagtgacttt

SEQ ID NO: 1408013 - DNA, 15 bp, Homo sapiens
ggcctgaagtgactt

SEQ ID NO: 1408014 - DNA, 15 bp, Homo sapiens
tggcctgaagtgact

SEQ ID NO: 1408015 - DNA, 15 bp, Homo sapiens
ttggcctgaagtgac

SEQ ID NO: 1408016 - DNA, 15 bp, Homo sapiens
tttggcctgaagtga

SEQ ID NO: 1408017 - DNA, 15 bp, Homo sapiens
ctttggcctgaagtg

SEQ ID NO: 1408018 - DNA, 15 bp, Homo sapiens
actttggcctgaagt

SEQ ID NO: 1408019 - DNA, 15 bp, Homo sapiens
cactttggcctgaag

SEQ ID NO: 1408020 - DNA, 15 bp, Homo sapiens
tcactttggcctgaa

SEQ ID NO: 1408021 - DNA, 15 bp, Homo sapiens
gtcactttggcctga

SEQ ID NO: 1408022 - DNA, 15 bp, Homo sapiens
tgtcactttggcctg

SEQ ID NO: 1408023 - DNA, 15 bp, Homo sapiens
atgtcactttggcct

SEQ ID NO: 1408024 - DNA, 15 bp, Homo sapiens
catgtcactttggcc

SEQ ID NO: 1408025 - DNA, 15 bp, Homo sapiens
tcatgtcactttggc

SEQ ID NO: 1408026 - DNA, 15 bp, Homo sapiens
ttcatgtcactttgg

SEQ ID NO: 1408027 - DNA, 15 bp, Homo sapiens
gttcatgtcactttg

SEQ ID NO: 1408028 - DNA, 15 bp, Homo sapiens
tgttcatgtcacttt

SEQ ID NO: 1408029 - DNA, 15 bp, Homo sapiens
ctgttcatgtcactt

SEQ ID NO: 1408030 - DNA, 15 bp, Homo sapiens
tctgttcatgtcact

SEQ ID NO: 1408031 - DNA, 15 bp, Homo sapiens
ttctgttcatgtcac

SEQ ID NO: 1408032 - DNA, 15 bp, Homo sapiens
cttctgttcatgtca

SEQ ID NO: 1408033 - DNA, 15 bp, Homo sapiens
acttctgttcatgtc

SEQ ID NO: 1408034 - DNA, 15 bp, Homo sapiens
aacttctgttcatgt

SEQ ID NO: 1408035 - DNA, 15 bp, Homo sapiens
gaacttctgttcatg

SEQ ID NO: 1408036 - DNA, 15 bp, Homo sapiens
ggaacttctgttcat

SEQ ID NO: 1408037 - DNA, 15 bp, Homo sapiens
tggaacttctgttca

SEQ ID NO: 1408038 - DNA, 15 bp, Homo sapiens
atggaacttctgttc

SEQ ID NO: 1408039 - DNA, 15 bp, Homo sapiens
catggaacttctgtt

SEQ ID NO: 1408040 - DNA, 15 bp, Homo sapiens
acatggaacttctgt

SEQ ID NO: 1408041 - DNA, 15 bp, Homo sapiens
cacatggaacttctg

SEQ ID NO: 1408042 - DNA, 15 bp, Homo sapiens
gcacatggaacttct

SEQ ID NO: 1408043 - DNA, 15 bp, Homo sapiens
ggcacatggaacttc

SEQ ID NO: 1408044 - DNA, 15 bp, Homo sapiens
tggcacatggaactt

SEQ ID NO: 1408045 - DNA, 15 bp, Homo sapiens
atggcacatggaact

SEQ ID NO: 1408046 - DNA, 15 bp, Homo sapiens
catggcacatggaac

SEQ ID NO: 1408047 - DNA, 15 bp, Homo sapiens
ccatggcacatggaa

SEQ ID NO: 1408048 - DNA, 15 bp, Homo sapiens
tccatggcacatgga

SEQ ID NO: 1408049 - DNA, 15 bp, Homo sapiens
ctccatggcacatgg

SEQ ID NO: 1408050 - DNA, 15 bp, Homo sapiens
gctccatggcacatg

SEQ ID NO: 1408051 - DNA, 15 bp, Homo sapiens
agctccatggcacat

SEQ ID NO: 1408052 - DNA, 15 bp, Homo sapiens
gagctccatggcaca

SEQ ID NO: 1408053 - DNA, 15 bp, Homo sapiens
agagctccatggcac

SEQ ID NO: 1408054 - DNA, 15 bp, Homo sapiens
gagagctccatggca

SEQ ID NO: 1408055 - DNA, 15 bp, Homo sapiens
agagagctccatggc

SEQ ID NO: 1408056 - DNA, 15 bp, Homo sapiens
cagagagctccatgg

SEQ ID NO: 1408057 - DNA, 15 bp, Homo sapiens
ccagagagctccatg

SEQ ID NO: 1408058 - DNA, 15 bp, Homo sapiens
gccagagagctccat

SEQ ID NO: 1408059 - DNA, 15 bp, Homo sapiens
agccagagagctcca

SEQ ID NO: 1408060 - DNA, 15 bp, Homo sapiens
aagccagagagctcc

SEQ ID NO: 1408061 - DNA, 15 bp, Homo sapiens
caagccagagagctc

SEQ ID NO: 1408062 - DNA, 15 bp, Homo sapiens
ccaagccagagagct

SEQ ID NO: 1408063 - DNA, 15 bp, Homo sapiens
tccaagccagagagc

SEQ ID NO: 1408064 - DNA, 15 bp, Homo sapiens
ttccaagccagagag

SEQ ID NO: 1408065 - DNA, 15 bp, Homo sapiens
gttccaagccagaga

SEQ ID NO: 1408066 - DNA, 15 bp, Homo sapiens
tgttccaagccagag

SEQ ID NO: 1408067 - DNA, 15 bp, Homo sapiens
atgttccaagccaga

SEQ ID NO: 1408068 - DNA, 15 bp, Homo sapiens
aatgttccaagccag

SEQ ID NO: 1408069 - DNA, 15 bp, Homo sapiens
aaatgttccaagcca

SEQ ID NO: 1408070 - DNA, 15 bp, Homo sapiens
gaaatgttccaagcc

SEQ ID NO: 1408071 - DNA, 15 bp, Homo sapiens
ggaaatgttccaagc

SEQ ID NO: 1408072 - DNA, 15 bp, Homo sapiens
cggaaatgttccaag

SEQ ID NO: 1408073 - DNA, 15 bp, Homo sapiens
acggaaatgttccaa

SEQ ID NO: 1408074 - DNA, 15 bp, Homo sapiens
cacggaaatgttcca

SEQ ID NO: 1408075 - DNA, 15 bp, Homo sapiens
tcacggaaatgttcc

SEQ ID NO: 1408076 - DNA, 15 bp, Homo sapiens
ttcacggaaatgttc

SEQ ID NO: 1408077 - DNA, 15 bp, Homo sapiens
attcacggaaatgtt

SEQ ID NO: 1408078 - DNA, 15 bp, Homo sapiens
tattcacggaaatgt

SEQ ID NO: 1408079 - DNA, 15 bp, Homo sapiens
atattcacggaaatg

SEQ ID NO: 1408080 - DNA, 15 bp, Homo sapiens
gatattcacggaaat

SEQ ID NO: 1408081 - DNA, 15 bp, Homo sapiens
agatattcacggaaa

SEQ ID NO: 1408082 - DNA, 15 bp, Homo sapiens
cagatattcacggaa

SEQ ID NO: 1408083 - DNA, 15 bp, Homo sapiens
ccagatattcacgga

SEQ ID NO: 1408084 - DNA, 15 bp, Homo sapiens
cccagatattcacgg

SEQ ID NO: 1408085 - DNA, 15 bp, Homo sapiens
tcccagatattcacg

SEQ ID NO: 1408086 - DNA, 15 bp, Homo sapiens
ctcccagatattcac

SEQ ID NO: 1408087 - DNA, 15 bp, Homo sapiens
aactcccagatattc

SEQ ID NO: 1408088 - DNA, 15 bp, Homo sapiens
caactcccagatatt

SEQ ID NO: 1408089 - DNA, 15 bp, Homo sapiens
ccaactcccagatat

SEQ ID NO: 1408090 - DNA, 15 bp, Homo sapiens
gccaactcccagata

SEQ ID NO: 1408091 - DNA, 15 bp, Homo sapiens
agccaactcccagat

SEQ ID NO: 1408092 - DNA, 15 bp, Homo sapiens
gagccaactcccaga

SEQ ID NO: 1408093 - DNA, 15 bp, Homo sapiens
ggagccaactcccag

SEQ ID NO: 1408094 - DNA, 15 bp, Homo sapiens
aggagccaactccca

SEQ ID NO: 1408095 - DNA, 15 bp, Homo sapiens
gaggagccaactccc

SEQ ID NO: 1408096 - DNA, 15 bp, Homo sapiens
ggaggagccaactcc

SEQ ID NO: 1408097 - DNA, 15 bp, Homo sapiens
aggaggagccaactc

SEQ ID NO: 1408098 - DNA, 15 bp, Homo sapiens
aaggaggagccaact

SEQ ID NO: 1408099 - DNA, 15 bp, Homo sapiens
taaggaggagccaac

SEQ ID NO: 1408100 - DNA, 15 bp, Homo sapiens
ttaaggaggagccaa

SEQ ID NO: 1408101 - DNA, 15 bp, Homo sapiens
cttaaggaggagcca

SEQ ID NO: 1408102 - DNA, 15 bp, Homo sapiens
ccttaaggaggagcc

SEQ ID NO: 1408103 - DNA, 15 bp, Homo sapiens
tccttaaggaggagc

SEQ ID NO: 1408104 - DNA, 15 bp, Homo sapiens
ctccttaaggaggag

SEQ ID NO: 1408105 - DNA, 15 bp, Homo sapiens
tctccttaaggagga

SEQ ID NO: 1408106 - DNA, 15 bp, Homo sapiens
ttctccttaaggagg

SEQ ID NO: 1408107 - DNA, 15 bp, Homo sapiens
cttctccttaaggag

SEQ ID NO: 1408108 - DNA, 15 bp, Homo sapiens
acttctccttaagga

SEQ ID NO: 1408109 - DNA, 15 bp, Homo sapiens
cacttctccttaagg

SEQ ID NO: 1408110 - DNA, 15 bp, Homo sapiens
ccacttctccttaag

SEQ ID NO: 1408111 - DNA, 15 bp, Homo sapiens
tccacttctccttaa

SEQ ID NO: 1408112 - DNA, 15 bp, Homo sapiens
ttccacttctcctta

SEQ ID NO: 1408113 - DNA, 15 bp, Homo sapiens
tttccacttctcctt

SEQ ID NO: 1408114 - DNA, 15 bp, Homo sapiens
ctttccacttctcct

SEQ ID NO: 1408115 - DNA, 15 bp, Homo sapiens
actttccacttctcc

SEQ ID NO: 1408116 - DNA, 15 bp, Homo sapiens
gactttccacttctc

SEQ ID NO: 1408117 - DNA, 15 bp, Homo sapiens
ggactttccacttct

SEQ ID NO: 1408118 - DNA, 15 bp, Homo sapiens
gggactttccacttc

SEQ ID NO: 1408119 - DNA, 15 bp, Homo sapiens
agggactttccactt

SEQ ID NO: 1408120 - DNA, 15 bp, Homo sapiens
aagggactttccact

SEQ ID NO: 1408121 - DNA, 15 bp, Homo sapiens
caagggactttccac

SEQ ID NO: 1408122 - DNA, 15 bp, Homo sapiens
gcaagggactttcca

SEQ ID NO: 1408123 - DNA, 15 bp, Homo sapiens
agcaagggactttcc

SEQ ID NO: 1408124 - DNA, 15 bp, Homo sapiens
cagcaagggactttc

SEQ ID NO: 1408125 - DNA, 15 bp, Homo sapiens
tcagcaagggacttt

SEQ ID NO: 1408126 - DNA, 15 bp, Homo sapiens
ctcagcaagggactt

SEQ ID NO: 1408127 - DNA, 15 bp, Homo sapiens
actcagcaagggact

SEQ ID NO: 1408128 - DNA, 15 bp, Homo sapiens
aactcagcaagggac

SEQ ID NO: 1408129 - DNA, 15 bp, Homo sapiens
caactcagcaaggga

SEQ ID NO: 1408130 - DNA, 15 bp, Homo sapiens
acaactcagcaaggg

SEQ ID NO: 1408131 - DNA, 15 bp, Homo sapiens
aacaactcagcaagg

SEQ ID NO: 1408132 - DNA, 15 bp, Homo sapiens
gaacaactcagcaag

SEQ ID NO: 1408133 - DNA, 15 bp, Homo sapiens
agaacaactcagcaa

SEQ ID NO: 1408134 - DNA, 15 bp, Homo sapiens
gagaacaactcagca

SEQ ID NO: 1408135 - DNA, 15 bp, Homo sapiens
ggagaacaactcagc

SEQ ID NO: 1408136 - DNA, 15 bp, Homo sapiens
tggagaacaactcag

SEQ ID NO: 1408137 - DNA, 15 bp, Homo sapiens
gtggagaacaactca

SEQ ID NO: 1408138 - DNA, 15 bp, Homo sapiens
tgtggagaacaactc

SEQ ID NO: 1408139 - DNA, 15 bp, Homo sapiens
gtgtggagaacaact

SEQ ID NO: 1408140 - DNA, 15 bp, Homo sapiens
ggtgtggagaacaac

SEQ ID NO: 1408141 - DNA, 15 bp, Homo sapiens
gggtgtggagaacaa

SEQ ID NO: 1408142 - DNA, 15 bp, Homo sapiens
tgggtgtggagaaca

SEQ ID NO: 1408143 - DNA, 15 bp, Homo sapiens
atgggtgtggagaac

SEQ ID NO: 1408144 - DNA, 15 bp, Homo sapiens
catgggtgtggagaa

SEQ ID NO: 1408145 - DNA, 15 bp, Homo sapiens
acatgggtgtggaga

SEQ ID NO: 1408146 - DNA, 15 bp, Homo sapiens
cacatgggtgtggag

SEQ ID NO: 1408147 - DNA, 15 bp, Homo sapiens
ccacatgggtgtgga

SEQ ID NO: 1408148 - DNA, 15 bp, Homo sapiens
accacatgggtgtgg

SEQ ID NO: 1408149 - DNA, 15 bp, Homo sapiens
taccacatgggtgtg

SEQ ID NO: 1408150 - DNA, 15 bp, Homo sapiens
ataccacatgggtgt

SEQ ID NO: 1408151 - DNA, 15 bp, Homo sapiens
tataccacatgggtg

SEQ ID NO: 1408152 - DNA, 15 bp, Homo sapiens
ttataccacatgggt

SEQ ID NO: 1408153 - DNA, 15 bp, Homo sapiens
tttataccacatggg

SEQ ID NO: 1408154 - DNA, 15 bp, Homo sapiens
ctttataccacatgg

SEQ ID NO: 1408155 - DNA, 15 bp, Homo sapiens
gctttataccacatg

SEQ ID NO: 1408156 - DNA, 15 bp, Homo sapiens
tgctttataccacat

SEQ ID NO: 1408157 - DNA, 15 bp, Homo sapiens
ctgctttataccaca

SEQ ID NO: 1408158 - DNA, 15 bp, Homo sapiens
gctgctttataccac

SEQ ID NO: 1408159 - DNA, 15 bp, Homo sapiens
agctgctttatacca

SEQ ID NO: 1408160 - DNA, 15 bp, Homo sapiens
aagctgctttatacc

SEQ ID NO: 1408161 - DNA, 15 bp, Homo sapiens
aaagctgctttatac

SEQ ID NO: 1408162 - DNA, 15 bp, Homo sapiens
gaaagctgctttata

SEQ ID NO: 1408163 - DNA, 15 bp, Homo sapiens
ggaaagctgctttat

SEQ ID NO: 1408164 - DNA, 15 bp, Homo sapiens
tggaaagctgcttta

SEQ ID NO: 1408165 - DNA, 15 bp, Homo sapiens
gtggaaagctgcttt

SEQ ID NO: 1408166 - DNA, 15 bp, Homo sapiens
ggtggaaagctgctt

SEQ ID NO: 1408167 - DNA, 15 bp, Homo sapiens
aggtggaaagctgct

SEQ ID NO: 1408168 - DNA, 15 bp, Homo sapiens
aaggtggaaagctgc

SEQ ID NO: 1408169 - DNA, 15 bp, Homo sapiens
caaggtggaaagctg

SEQ ID NO: 1408170 - DNA, 15 bp, Homo sapiens
gcaaggtggaaagct

SEQ ID NO: 1408171 - DNA, 15 bp, Homo sapiens
ggcaaggtggaaagc

SEQ ID NO: 1408172 - DNA, 15 bp, Homo sapiens
aggcaaggtggaaag

SEQ ID NO: 1408173 - DNA, 15 bp, Homo sapiens
caggcaaggtggaaa

SEQ ID NO: 1408174 - DNA, 15 bp, Homo sapiens
ccaggcaaggtggaa

SEQ ID NO: 1408175 - DNA, 15 bp, Homo sapiens
cccaggcaaggtgga

SEQ ID NO: 1408176 - DNA, 15 bp, Homo sapiens
ccccaggcaaggtgg

SEQ ID NO: 1408177 - DNA, 15 bp, Homo sapiens
gccccaggcaaggtg

SEQ ID NO: 1408178 - DNA, 15 bp, Homo sapiens
agccccaggcaaggt

SEQ ID NO: 1408179 - DNA, 15 bp, Homo sapiens
aagccccaggcaagg

SEQ ID NO: 1408180 - DNA, 15 bp, Homo sapiens
aaagccccaggcaag

SEQ ID NO: 1408181 - DNA, 15 bp, Homo sapiens
gaaagccccaggcaa

SEQ ID NO: 1408182 - DNA, 15 bp, Homo sapiens
ggaaagccccaggca

SEQ ID NO: 1408183 - DNA, 15 bp, Homo sapiens
tggaaagccccaggc

SEQ ID NO: 1408184 - DNA, 15 bp, Homo sapiens
ttggaaagccccagg

SEQ ID NO: 1408185 - DNA, 15 bp, Homo sapiens
tttggaaagccccag

SEQ ID NO: 1408186 - DNA, 15 bp, Homo sapiens
atttggaaagcccca

SEQ ID NO: 1408187 - DNA, 15 bp, Homo sapiens
aatttggaaagcccc

SEQ ID NO: 1408188 - DNA, 15 bp, Homo sapiens
gaatttggaaagccc

SEQ ID NO: 1408189 - DNA, 15 bp, Homo sapiens
ggaatttggaaagcc

SEQ ID NO: 1408190 - DNA, 15 bp, Homo sapiens
gggaatttggaaagc

SEQ ID NO: 1408191 - DNA, 15 bp, Homo sapiens
ggggaatttggaaag

SEQ ID NO: 1408192 - DNA, 15 bp, Homo sapiens
tggggaatttggaaa

SEQ ID NO: 1408193 - DNA, 15 bp, Homo sapiens
atggggaatttggaa

SEQ ID NO: 1408194 - DNA, 15 bp, Homo sapiens
gatggggaatttgga

SEQ ID NO: 1408195 - DNA, 15 bp, Homo sapiens
ggatggggaatttgg

SEQ ID NO: 1408196 - DNA, 15 bp, Homo sapiens
tggatggggaatttg

SEQ ID NO: 1408197 - DNA, 15 bp, Homo sapiens
ctggatggggaattt

SEQ ID NO: 1408198 - DNA, 15 bp, Homo sapiens
gctggatggggaatt

SEQ ID NO: 1408199 - DNA, 15 bp, Homo sapiens
agctggatggggaat

SEQ ID NO: 1408200 - DNA, 15 bp, Homo sapiens
gagctggatggggaa

SEQ ID NO: 1408201 - DNA, 15 bp, Homo sapiens
ggagctggatgggga

SEQ ID NO: 1408202 - DNA, 15 bp, Homo sapiens
aggagctggatgggg

SEQ ID NO: 1408203 - DNA, 15 bp, Homo sapiens
caggagctggatggg

SEQ ID NO: 1408204 - DNA, 15 bp, Homo sapiens
gcaggagctggatgg

SEQ ID NO: 1408205 - DNA, 15 bp, Homo sapiens
cgcaggagctggatg

SEQ ID NO: 1408206 - DNA, 15 bp, Homo sapiens
ccgcaggagctggat

SEQ ID NO: 1408207 - DNA, 15 bp, Homo sapiens
gccgcaggagctgga

SEQ ID NO: 1408208 - DNA, 15 bp, Homo sapiens
agccgcaggagctgg

SEQ ID NO: 1408209 - DNA, 15 bp, Homo sapiens
cagccgcaggagctg

SEQ ID NO: 1408210 - DNA, 15 bp, Homo sapiens
tcagccgcaggagct

SEQ ID NO: 1408211 - DNA, 15 bp, Homo sapiens
gtcagccgcaggagc

SEQ ID NO: 1408212 - DNA, 15 bp, Homo sapiens
ggtcagccgcaggag

SEQ ID NO: 1408213 - DNA, 15 bp, Homo sapiens
gggtcagccgcagga

SEQ ID NO: 1408214 - DNA, 15 bp, Homo sapiens
agggtcagccgcagg

SEQ ID NO: 1408215 - DNA, 15 bp, Homo sapiens
cagggtcagccgcag

SEQ ID NO: 1408216 - DNA, 15 bp, Homo sapiens
gcagggtcagccgca

SEQ ID NO: 1408217 - DNA, 15 bp, Homo sapiens
agcagggtcagccgc

SEQ ID NO: 1408218 - DNA, 15 bp, Homo sapiens
aagcagggtcagccg

SEQ ID NO: 1408219 - DNA, 15 bp, Homo sapiens
caagcagggtcagcc

SEQ ID NO: 1408220 - DNA, 15 bp, Homo sapiens
ccaagcagggtcagc

SEQ ID NO: 1408221 - DNA, 15 bp, Homo sapiens
gccaagcagggtcag

SEQ ID NO: 1408222 - DNA, 15 bp, Homo sapiens
agccaagcagggtca

SEQ ID NO: 1408223 - DNA, 15 bp, Homo sapiens
gagccaagcagggtc

SEQ ID NO: 1408224 - DNA, 15 bp, Homo sapiens
ggagccaagcagggt

SEQ ID NO: 1408225 - DNA, 15 bp, Homo sapiens
tggagccaagcaggg

SEQ ID NO: 1408226 - DNA, 15 bp, Homo sapiens
atggagccaagcagg

SEQ ID NO: 1408227 - DNA, 15 bp, Homo sapiens
aatggagccaagcag

SEQ ID NO: 1408228 - DNA, 15 bp, Homo sapiens
aaatggagccaagca

SEQ ID NO: 1408229 - DNA, 15 bp, Homo sapiens
aaaatggagccaagc

SEQ ID NO: 1408230 - DNA, 15 bp, Homo sapiens
aaaaatggagccaag

SEQ ID NO: 1408231 - DNA, 15 bp, Homo sapiens
taaaaatggagccaa

SEQ ID NO: 1408232 - DNA, 15 bp, Homo sapiens
ctaaaaatggagcca

SEQ ID NO: 1408233 - DNA, 15 bp, Homo sapiens
actaaaaatggagcc

SEQ ID NO: 1408234 - DNA, 15 bp, Homo sapiens
cactaaaaatggagc

SEQ ID NO: 1408235 - DNA, 15 bp, Homo sapiens
gcactaaaaatggag

SEQ ID NO: 1408236 - DNA, 15 bp, Homo sapiens
ggcactaaaaatgga

SEQ ID NO: 1408237 - DNA, 15 bp, Homo sapiens
gggcactaaaaatgg

SEQ ID NO: 1408238 - DNA, 15 bp, Homo sapiens
agggcactaaaaatg

SEQ ID NO: 1408239 - DNA, 15 bp, Homo sapiens
cagggcactaaaaat

SEQ ID NO: 1408240 - DNA, 15 bp, Homo sapiens
acagggcactaaaaa

SEQ ID NO: 1408241 - DNA, 15 bp, Homo sapiens
aacagggcactaaaa

SEQ ID NO: 1408242 - DNA, 15 bp, Homo sapiens
aaacagggcactaaa

SEQ ID NO: 1408243 - DNA, 15 bp, Homo sapiens
aaaacagggcactaa

SEQ ID NO: 1408244 - DNA, 15 bp, Homo sapiens
aaaaacagggcacta

SEQ ID NO: 1408245 - DNA, 15 bp, Homo sapiens
gaaaaacagggcact

SEQ ID NO: 1408246 - DNA, 15 bp, Homo sapiens
agaaaaacagggcac

SEQ ID NO: 1408247 - DNA, 15 bp, Homo sapiens
gagaaaaacagggca

SEQ ID NO: 1408248 - DNA, 15 bp, Homo sapiens
agagaaaaacagggc

SEQ ID NO: 1408249 - DNA, 15 bp, Homo sapiens
gagagaaaaacaggg

SEQ ID NO: 1408250 - DNA, 15 bp, Homo sapiens
ggagagaaaaacagg

SEQ ID NO: 1408251 - DNA, 15 bp, Homo sapiens
gggagagaaaaacag

SEQ ID NO: 1408252 - DNA, 15 bp, Homo sapiens
tgggagagaaaaaca

SEQ ID NO: 1408253 - DNA, 15 bp, Homo sapiens
gtgggagagaaaaac

SEQ ID NO: 1408254 - DNA, 15 bp, Homo sapiens
agtgggagagaaaaa

SEQ ID NO: 1408255 - DNA, 15 bp, Homo sapiens
cagtgggagagaaaa

SEQ ID NO: 1408256 - DNA, 15 bp, Homo sapiens
tcagtgggagagaaa

SEQ ID NO: 1408257 - DNA, 15 bp, Homo sapiens
ctcagtgggagagaa

SEQ ID NO: 1408258 - DNA, 15 bp, Homo sapiens
cctcagtgggagaga

SEQ ID NO: 1408259 - DNA, 15 bp, Homo sapiens
acctcagtgggagag

SEQ ID NO: 1408260 - DNA, 15 bp, Homo sapiens
cacctcagtgggaga

SEQ ID NO: 1408261 - DNA, 15 bp, Homo sapiens
ccacctcagtgggag

SEQ ID NO: 1408262 - DNA, 15 bp, Homo sapiens
cccacctcagtggga

SEQ ID NO: 1408263 - DNA, 15 bp, Homo sapiens
tcccacctcagtggg

SEQ ID NO: 1408264 - DNA, 15 bp, Homo sapiens
atcccacctcagtgg

SEQ ID NO: 1408265 - DNA, 15 bp, Homo sapiens
tatcccacctcagtg

SEQ ID NO: 1408266 - DNA, 15 bp, Homo sapiens
ctatcccacctcagt

SEQ ID NO: 1408267 - DNA, 15 bp, Homo sapiens
tctatcccacctcag

SEQ ID NO: 1408268 - DNA, 15 bp, Homo sapiens
ctctatcccacctca

SEQ ID NO: 1408269 - DNA, 15 bp, Homo sapiens
cctctatcccacctc

SEQ ID NO: 1408270 - DNA, 15 bp, Homo sapiens
ccctctatcccacct

SEQ ID NO: 1408271 - DNA, 15 bp, Homo sapiens
accctctatcccacc

SEQ ID NO: 1408272 - DNA, 15 bp, Homo sapiens
caccctctatcccac

SEQ ID NO: 1408273 - DNA, 15 bp, Homo sapiens
acaccctctatccca

SEQ ID NO: 1408274 - DNA, 15 bp, Homo sapiens
tacaccctctatccc

SEQ ID NO: 1408275 - DNA, 15 bp, Homo sapiens
ttacaccctctatcc

SEQ ID NO: 1408276 - DNA, 15 bp, Homo sapiens
tttacaccctctatc

SEQ ID NO: 1408277 - DNA, 15 bp, Homo sapiens
ttttacaccctctat

SEQ ID NO: 1408278 - DNA, 15 bp, Homo sapiens
cttttacaccctcta

SEQ ID NO: 1408279 - DNA, 15 bp, Homo sapiens
gcttttacaccctct

SEQ ID NO: 1408280 - DNA, 15 bp, Homo sapiens
tgcttttacaccctc

SEQ ID NO: 1408281 - DNA, 15 bp, Homo sapiens
ttgcttttacaccct

SEQ ID NO: 1408282 - DNA, 15 bp, Homo sapiens
gttgcttttacaccc

SEQ ID NO: 1408283 - DNA, 15 bp, Homo sapiens
tgttgcttttacacc

SEQ ID NO: 1408284 - DNA, 15 bp, Homo sapiens
ctgttgcttttacac

SEQ ID NO: 1408285 - DNA, 15 bp, Homo sapiens
tctgttgcttttaca

SEQ ID NO: 1408286 - DNA, 15 bp, Homo sapiens
atctgttgcttttac

SEQ ID NO: 1408287 - DNA, 15 bp, Homo sapiens
aatctgttgctttta

SEQ ID NO: 1408288 - DNA, 15 bp, Homo sapiens
aaatctgttgctttt

SEQ ID NO: 1408289 - DNA, 15 bp, Homo sapiens
caaatctgttgcttt

SEQ ID NO: 1408290 - DNA, 15 bp, Homo sapiens
tcaaatctgttgctt

SEQ ID NO: 1408291 - DNA, 15 bp, Homo sapiens
ctcaaatctgttgct

SEQ ID NO: 1408292 - DNA, 15 bp, Homo sapiens
actcaaatctgttgc

SEQ ID NO: 1408293 - DNA, 15 bp, Homo sapiens
aactcaaatctgttg

SEQ ID NO: 1408294 - DNA, 15 bp, Homo sapiens
taactcaaatctgtt

SEQ ID NO: 1408295 - DNA, 15 bp, Homo sapiens
ttaactcaaatctgt

SEQ ID NO: 1408296 - DNA, 15 bp, Homo sapiens
tttaactcaaatctg

SEQ ID NO: 1408297 - DNA, 15 bp, Homo sapiens
gtttaactcaaatct

SEQ ID NO: 1408298 - DNA, 15 bp, Homo sapiens
agtttaactcaaatc

SEQ ID NO: 1408299 - DNA, 15 bp, Homo sapiens
aagtttaactcaaat

SEQ ID NO: 1408300 - DNA, 15 bp, Homo sapiens
aaagtttaactcaaa

SEQ ID NO: 1408301 - DNA, 15 bp, Homo sapiens
taaagtttaactcaa

SEQ ID NO: 1408302 - DNA, 15 bp, Homo sapiens
ttaaagtttaactca

SEQ ID NO: 1408303 - DNA, 15 bp, Homo sapiens
tttaaagtttaactc

SEQ ID NO: 1408304 - DNA, 15 bp, Homo sapiens
ttttaaagtttaact

SEQ ID NO: 1408305 - DNA, 15 bp, Homo sapiens
attttaaagtttaac

SEQ ID NO: 1408306 - DNA, 15 bp, Homo sapiens
tattttaaagtttaa

SEQ ID NO: 1408307 - DNA, 15 bp, Homo sapiens
ttattttaaagttta

SEQ ID NO: 1408308 - DNA, 15 bp, Homo sapiens
tttattttaaagttt

SEQ ID NO: 1408309 - DNA, 15 bp, Homo sapiens
atttattttaaagtt

SEQ ID NO: 1408310 - DNA, 15 bp, Homo sapiens
catttattttaaagt

SEQ ID NO: 1408311 - DNA, 15 bp, Homo sapiens
tcatttattttaaag

SEQ ID NO: 1408312 - DNA, 15 bp, Homo sapiens
gtcatttattttaaa

SEQ ID NO: 1408313 - DNA, 15 bp, Homo sapiens
ggtcatttattttaa

SEQ ID NO: 1408314 - DNA, 15 bp, Homo sapiens
tggtcatttatttta

SEQ ID NO: 1408315 - DNA, 15 bp, Homo sapiens
gtggtcatttatttt

SEQ ID NO: 1408316 - DNA, 15 bp, Homo sapiens
ggtggtcatttattt

SEQ ID NO: 1408317 - DNA, 15 bp, Homo sapiens
aggtggtcatttatt

SEQ ID NO: 1408318 - DNA, 15 bp, Homo sapiens
aaggtggtcatttat

SEQ ID NO: 1408319 - DNA, 15 bp, Homo sapiens
caaggtggtcattta

SEQ ID NO: 1408320 - DNA, 15 bp, Homo sapiens
gcaaggtggtcattt

SEQ ID NO: 1408321 - DNA, 15 bp, Homo sapiens
tgcaaggtggtcatt

SEQ ID NO: 1408322 - DNA, 15 bp, Homo sapiens
atgcaaggtggtcat

SEQ ID NO: 1408323 - DNA, 15 bp, Homo sapiens
aatgcaaggtggtca

SEQ ID NO: 1408324 - DNA, 15 bp, Homo sapiens
taatgcaaggtggtc

SEQ ID NO: 1408325 - DNA, 15 bp, Homo sapiens
ctaatgcaaggtggt

SEQ ID NO: 1408326 - DNA, 15 bp, Homo sapiens
gctaatgcaaggtgg

SEQ ID NO: 1408327 - DNA, 15 bp, Homo sapiens
agctaatgcaaggtg

SEQ ID NO: 1408328 - DNA, 15 bp, Homo sapiens
aagctaatgcaaggt

SEQ ID NO: 1408329 - DNA, 15 bp, Homo sapiens
caagctaatgcaagg

SEQ ID NO: 1408330 - DNA, 15 bp, Homo sapiens
gcaagctaatgcaag

SEQ ID NO: 1408331 - DNA, 15 bp, Homo sapiens
agcaagctaatgcaa

SEQ ID NO: 1408332 - DNA, 15 bp, Homo sapiens
aagcaagctaatgca

SEQ ID NO: 1408333 - DNA, 15 bp, Homo sapiens
taagcaagctaatgc

SEQ ID NO: 1408334 - DNA, 15 bp, Homo sapiens
ctaagcaagctaatg

SEQ ID NO: 1408335 - DNA, 15 bp, Homo sapiens
cctaagcaagctaat

SEQ ID NO: 1408336 - DNA, 15 bp, Homo sapiens
tcctaagcaagctaa

SEQ ID NO: 1408337 - DNA, 15 bp, Homo sapiens
ttcctaagcaagcta

SEQ ID NO: 1408338 - DNA, 15 bp, Homo sapiens
tttcctaagcaagct

SEQ ID NO: 1408339 - DNA, 15 bp, Homo sapiens
ttttcctaagcaagc

SEQ ID NO: 1408340 - DNA, 15 bp, Homo sapiens
cttttcctaagcaag

SEQ ID NO: 1408341 - DNA, 15 bp, Homo sapiens
tcttttcctaagcaa

SEQ ID NO: 1408342 - DNA, 15 bp, Homo sapiens
ctcttttcctaagca

SEQ ID NO: 1408343 - DNA, 15 bp, Homo sapiens
actcttttcctaagc

SEQ ID NO: 1408344 - DNA, 15 bp, Homo sapiens
tactcttttcctaag

SEQ ID NO: 1408345 - DNA, 15 bp, Homo sapiens
gtactcttttcctaa

SEQ ID NO: 1408346 - DNA, 15 bp, Homo sapiens
tgtactcttttccta

SEQ ID NO: 1408347 - DNA, 15 bp, Homo sapiens
atgtactcttttcct

SEQ ID NO: 1408348 - DNA, 15 bp, Homo sapiens
tatgtactcttttcc

SEQ ID NO: 1408349 - DNA, 15 bp, Homo sapiens
ttatgtactcttttc

SEQ ID NO: 1408350 - DNA, 15 bp, Homo sapiens
tttatgtactctttt

SEQ ID NO: 1408351 - DNA, 15 bp, Homo sapiens
ttttatgtactcttt

SEQ ID NO: 1408352 - DNA, 15 bp, Homo sapiens
attttatgtactctt

SEQ ID NO: 1408353 - DNA, 15 bp, Homo sapiens
tattttatgtactct

SEQ ID NO: 1408354 - DNA, 15 bp, Homo sapiens
ttattttatgtactc

SEQ ID NO: 1408355 - DNA, 15 bp, Homo sapiens
tttattttatgtact

SEQ ID NO: 1408356 - DNA, 15 bp, Homo sapiens
ttttattttatgtac

SEQ ID NO: 1408357 - DNA, 15 bp, Homo sapiens
attttattttatgta

SEQ ID NO: 1408358 - DNA, 15 bp, Homo sapiens
cattttattttatgt

SEQ ID NO: 1408359 - DNA, 15 bp, Homo sapiens
tcattttattttatg

SEQ ID NO: 1408360 - DNA, 15 bp, Homo sapiens
ttcattttattttat

SEQ ID NO: 1408361 - DNA, 15 bp, Homo sapiens
gttcattttatttta

SEQ ID NO: 1408362 - DNA, 15 bp, Homo sapiens
tgttcattttatttt

SEQ ID NO: 1408363 - DNA, 15 bp, Homo sapiens
ttgttcattttattt

SEQ ID NO: 1408364 - DNA, 15 bp, Homo sapiens
tttgttcattttatt

SEQ ID NO: 1408365 - DNA, 15 bp, Homo sapiens
gtttgttcattttat

SEQ ID NO: 1408366 - DNA, 15 bp, Homo sapiens
tgtttgttcatttta

SEQ ID NO: 1408367 - DNA, 15 bp, Homo sapiens
ttgtttgttcatttt

SEQ ID NO: 1408368 - DNA, 15 bp, Homo sapiens
tttgtttgttcattt

SEQ ID NO: 1408369 - DNA, 15 bp, Homo sapiens
ttttgtttgttcatt

SEQ ID NO: 1408370 - DNA, 15 bp, Homo sapiens
tttttgtttgttcat

SEQ ID NO: 1408371 - DNA, 15 bp, Homo sapiens
gtttttgtttgttca

SEQ ID NO: 1408372 - DNA, 15 bp, Homo sapiens
ggtttttgtttgttc

SEQ ID NO: 1408373 - DNA, 15 bp, Homo sapiens
atgggtttttgtttg

SEQ ID NO: 1408374 - DNA, 15 bp, Homo sapiens
gatgggtttttgttt

SEQ ID NO: 1408375 - DNA, 15 bp, Homo sapiens
agatgggtttttgtt

SEQ ID NO: 1408376 - DNA, 15 bp, Homo sapiens
aagatgggtttttgt

SEQ ID NO: 1408377 - DNA, 15 bp, Homo sapiens
caagatgggtttttg

SEQ ID NO: 1408378 - DNA, 15 bp, Homo sapiens
acaagatgggttttt

SEQ ID NO: 1408379 - DNA, 15 bp, Homo sapiens
aacaagatgggtttt

SEQ ID NO: 1408380 - DNA, 15 bp, Homo sapiens
gaacaagatgggttt

SEQ ID NO: 1408381 - DNA, 15 bp, Homo sapiens
agaacaagatgggtt

SEQ ID NO: 1408382 - DNA, 15 bp, Homo sapiens
aagaacaagatgggt

SEQ ID NO: 1408383 - DNA, 15 bp, Homo sapiens
aaagaacaagatggg

SEQ ID NO: 1408384 - DNA, 15 bp, Homo sapiens
taaagaacaagatgg

SEQ ID NO: 1408385 - DNA, 15 bp, Homo sapiens
ataaagaacaagatg

SEQ ID NO: 1408386 - DNA, 15 bp, Homo sapiens
gataaagaacaagat

SEQ ID NO: 1408387 - DNA, 15 bp, Homo sapiens
ggataaagaacaaga

SEQ ID NO: 1408388 - DNA, 15 bp, Homo sapiens
gggataaagaacaag

SEQ ID NO: 1408389 - DNA, 15 bp, Homo sapiens
ggggataaagaacaa

SEQ ID NO: 1408390 - DNA, 15 bp, Homo sapiens
gggggataaagaaca

SEQ ID NO: 1408391 - DNA, 15 bp, Homo sapiens
agggggataaagaac

SEQ ID NO: 1408392 - DNA, 15 bp, Homo sapiens
aagggggataaagaa

SEQ ID NO: 1408393 - DNA, 15 bp, Homo sapiens
taagggggataaaga

SEQ ID NO: 1408394 - DNA, 15 bp, Homo sapiens
ataagggggataaag

SEQ ID NO: 1408395 - DNA, 15 bp, Homo sapiens
aataagggggataaa

SEQ ID NO: 1408396 - DNA, 15 bp, Homo sapiens
aaataagggggataa

SEQ ID NO: 1408397 - DNA, 15 bp, Homo sapiens
aaaataagggggata

SEQ ID NO: 1408398 - DNA, 15 bp, Homo sapiens
gaaaataagggggat

SEQ ID NO: 1408399 - DNA, 15 bp, Homo sapiens
agaaaataaggggga

SEQ ID NO: 1408400 - DNA, 15 bp, Homo sapiens
cagaaaataaggggg

SEQ ID NO: 1408401 - DNA, 15 bp, Homo sapiens
gcagaaaataagggg

SEQ ID NO: 1408402 - DNA, 15 bp, Homo sapiens
agcagaaaataaggg

SEQ ID NO: 1408403 - DNA, 15 bp, Homo sapiens
aagcagaaaataagg

SEQ ID NO: 1408404 - DNA, 15 bp, Homo sapiens
aaagcagaaaataag

SEQ ID NO: 1408405 - DNA, 15 bp, Homo sapiens
aaaagcagaaaataa

SEQ ID NO: 1408406 - DNA, 15 bp, Homo sapiens
tgaaaagcagaaaat

SEQ ID NO: 1408407 - DNA, 15 bp, Homo sapiens
atgaaaagcagaaaa

SEQ ID NO: 1408408 - DNA, 15 bp, Homo sapiens
aatgaaaagcagaaa

SEQ ID NO: 1408409 - DNA, 15 bp, Homo sapiens
caatgaaaagcagaa

SEQ ID NO: 1408410 - DNA, 15 bp, Homo sapiens
tcaatgaaaagcaga

SEQ ID NO: 1408411 - DNA, 15 bp, Homo sapiens
atcaatgaaaagcag

SEQ ID NO: 1408412 - DNA, 15 bp, Homo sapiens
aatcaatgaaaagca

SEQ ID NO: 1408413 - DNA, 15 bp, Homo sapiens
gaatcaatgaaaagc

SEQ ID NO: 1408414 - DNA, 15 bp, Homo sapiens
tgaatcaatgaaaag

SEQ ID NO: 1408415 - DNA, 15 bp, Homo sapiens
ctgaatcaatgaaaa

SEQ ID NO: 1408416 - DNA, 15 bp, Homo sapiens
tctgaatcaatgaaa

SEQ ID NO: 1408417 - DNA, 15 bp, Homo sapiens
atctgaatcaatgaa

SEQ ID NO: 1408418 - DNA, 15 bp, Homo sapiens
aatctgaatcaatga

SEQ ID NO: 1408419 - DNA, 15 bp, Homo sapiens
taatctgaatcaatg

SEQ ID NO: 1408420 - DNA, 15 bp, Homo sapiens
ataatctgaatcaat

SEQ ID NO: 1408421 - DNA, 15 bp, Homo sapiens
aataatctgaatcaa

SEQ ID NO: 1408422 - DNA, 15 bp, Homo sapiens
caataatctgaatca

SEQ ID NO: 1408423 - DNA, 15 bp, Homo sapiens
ccaataatctgaatc

SEQ ID NO: 1408424 - DNA, 15 bp, Homo sapiens
tccaataatctgaat

SEQ ID NO: 1408425 - DNA, 15 bp, Homo sapiens
atccaataatctgaa

SEQ ID NO: 1408426 - DNA, 15 bp, Homo sapiens
aatccaataatctga

SEQ ID NO: 1408427 - DNA, 15 bp, Homo sapiens
gaatccaataatctg

SEQ ID NO: 1408428 - DNA, 15 bp, Homo sapiens
agaatccaataatct

SEQ ID NO: 1408429 - DNA, 15 bp, Homo sapiens
aagaatccaataatc

SEQ ID NO: 1408430 - DNA, 15 bp, Homo sapiens
taagaatccaataat

SEQ ID NO: 1408431 - DNA, 15 bp, Homo sapiens
ataagaatccaataa

SEQ ID NO: 1408432 - DNA, 15 bp, Homo sapiens
aataagaatccaata

SEQ ID NO: 1408433 - DNA, 15 bp, Homo sapiens
caataagaatccaat

SEQ ID NO: 1408434 - DNA, 15 bp, Homo sapiens
acaataagaatccaa

SEQ ID NO: 1408435 - DNA, 15 bp, Homo sapiens
gacaataagaatcca

SEQ ID NO: 1408436 - DNA, 15 bp, Homo sapiens
tgacaataagaatcc

SEQ ID NO: 1408437 - DNA, 15 bp, Homo sapiens
ttgacaataagaatc

SEQ ID NO: 1408438 - DNA, 15 bp, Homo sapiens
cttgacaataagaat

SEQ ID NO: 1408439 - DNA, 15 bp, Homo sapiens
tcttgacaataagaa

SEQ ID NO: 1408440 - DNA, 15 bp, Homo sapiens
ttcttgacaataaga

SEQ ID NO: 1408441 - DNA, 15 bp, Homo sapiens
attcttgacaataag

SEQ ID NO: 1408442 - DNA, 15 bp, Homo sapiens
tattcttgacaataa

SEQ ID NO: 1408443 - DNA, 15 bp, Homo sapiens
ttattcttgacaata

SEQ ID NO: 1408444 - DNA, 15 bp, Homo sapiens
tttattcttgacaat

SEQ ID NO: 1408445 - DNA, 15 bp, Homo sapiens
gtttattcttgacaa

SEQ ID NO: 1408446 - DNA, 15 bp, Homo sapiens
agtttattcttgaca

SEQ ID NO: 1408447 - DNA, 15 bp, Homo sapiens
aagtttattcttgac

SEQ ID NO: 1408448 - DNA, 15 bp, Homo sapiens
aaagtttattcttga

SEQ ID NO: 1408449 - DNA, 15 bp, Homo sapiens
taaagtttattcttg

SEQ ID NO: 1408450 - DNA, 15 bp, Homo sapiens
ttaaagtttattctt

SEQ ID NO: 1408451 - DNA, 15 bp, Homo sapiens
tttaaagtttattct

SEQ ID NO: 1408452 - DNA, 15 bp, Homo sapiens
gtttaaagtttattc

SEQ ID NO: 1408453 - DNA, 15 bp, Homo sapiens
tgtttaaagtttatt

SEQ ID NO: 1408454 - DNA, 15 bp, Homo sapiens
ttgtttaaagtttat

SEQ ID NO: 1408455 - DNA, 15 bp, Homo sapiens
tttgtttaaagttta

SEQ ID NO: 1408456 - DNA, 15 bp, Homo sapiens
gtttgtttaaagttt

SEQ ID NO: 1408457 - DNA, 15 bp, Homo sapiens
tgtttgtttaaagtt

SEQ ID NO: 1408458 - DNA, 15 bp, Homo sapiens
ttgtttgtttaaagt

SEQ ID NO: 1408459 - DNA, 15 bp, Homo sapiens
tttgtttgtttaaag

SEQ ID NO: 1408460 - DNA, 15 bp, Homo sapiens
gtttgtttgtttaaa

SEQ ID NO: 1408461 - DNA, 15 bp, Homo sapiens
tgtttgtttgtttaa

SEQ ID NO: 1408462 - DNA, 15 bp, Homo sapiens
ttgtttgtttgttta

SEQ ID NO: 1408463 - DNA, 15 bp, Homo sapiens
cctttttttgtttgt

SEQ ID NO: 1408464 - DNA, 15 bp, Homo sapiens
acctttttttgtttg

SEQ ID NO: 1408465 - DNA, 15 bp, Homo sapiens
tacctttttttgttt

SEQ ID NO: 1408466 - DNA, 15 bp, Homo sapiens
ttacctttttttgtt

SEQ ID NO: 1408467 - DNA, 15 bp, Homo sapiens
tttacctttttttgt

SEQ ID NO: 1408468 - DNA, 15 bp, Homo sapiens
atttacctttttttg

SEQ ID NO: 1408469 - DNA, 15 bp, Homo sapiens
catttaccttttttt

SEQ ID NO: 1408470 - DNA, 15 bp, Homo sapiens
acatttacctttttt

SEQ ID NO: 1408471 - DNA, 15 bp, Homo sapiens
cacatttaccttttt

SEQ ID NO: 1408472 - DNA, 15 bp, Homo sapiens
tcacatttacctttt

SEQ ID NO: 1408473 - DNA, 15 bp, Homo sapiens
gtcacatttaccttt

SEQ ID NO: 1408474 - DNA, 15 bp, Homo sapiens
cgtcacatttacctt

SEQ ID NO: 1408475 - DNA, 15 bp, Homo sapiens
ccgtcacatttacct

SEQ ID NO: 1408476 - DNA, 15 bp, Homo sapiens
tccgtcacatttacc

SEQ ID NO: 1408477 - DNA, 15 bp, Homo sapiens
ttccgtcacatttac

SEQ ID NO: 1408478 - DNA, 15 bp, Homo sapiens
cttccgtcacattta

SEQ ID NO: 1408479 - DNA, 15 bp, Homo sapiens
ccttccgtcacattt

SEQ ID NO: 1408480 - DNA, 15 bp, Homo sapiens
gccttccgtcacatt

SEQ ID NO: 1408481 - DNA, 15 bp, Homo sapiens
agccttccgtcacat

SEQ ID NO: 1408482 - DNA, 15 bp, Homo sapiens
tagccttccgtcaca

SEQ ID NO: 1408483 - DNA, 15 bp, Homo sapiens
ctagccttccgtcac

SEQ ID NO: 1408484 - DNA, 15 bp, Homo sapiens
actagccttccgtca

SEQ ID NO: 1408485 - DNA, 15 bp, Homo sapiens
aactagccttccgtc

SEQ ID NO: 1408486 - DNA, 15 bp, Homo sapiens
aaactagccttccgt

SEQ ID NO: 1408487 - DNA, 15 bp, Homo sapiens
aaaactagccttccg

SEQ ID NO: 1408488 - DNA, 15 bp, Homo sapiens
gaaaactagccttcc

SEQ ID NO: 1408489 - DNA, 15 bp, Homo sapiens
tgaaaactagccttc

SEQ ID NO: 1408490 - DNA, 15 bp, Homo sapiens
ctgaaaactagcctt

SEQ ID NO: 1408491 - DNA, 15 bp, Homo sapiens
actgaaaactagcct

SEQ ID NO: 1408492 - DNA, 15 bp, Homo sapiens
gactgaaaactagcc

SEQ ID NO: 1408493 - DNA, 15 bp, Homo sapiens
tgactgaaaactagc

SEQ ID NO: 1408494 - DNA, 15 bp, Homo sapiens
atgactgaaaactag

SEQ ID NO: 1408495 - DNA, 15 bp, Homo sapiens
aatgactgaaaacta

SEQ ID NO: 1408496 - DNA, 15 bp, Homo sapiens
aaatgactgaaaact

SEQ ID NO: 1408497 - DNA, 15 bp, Homo sapiens
aaaatgactgaaaac

SEQ ID NO: 1408498 - DNA, 15 bp, Homo sapiens
aaaaatgactgaaaa

SEQ ID NO: 1408499 - DNA, 15 bp, Homo sapiens
taaaaatgactgaaa

SEQ ID NO: 1408500 - DNA, 15 bp, Homo sapiens
ttaaaaatgactgaa

SEQ ID NO: 1408501 - DNA, 15 bp, Homo sapiens
tttaaaaatgactga

SEQ ID NO: 1408502 - DNA, 15 bp, Homo sapiens
ttttaaaaatgactg

SEQ ID NO: 1408503 - DNA, 15 bp, Homo sapiens
tttttaaaaatgact

SEQ ID NO: 1408504 - DNA, 15 bp, Homo sapiens
atttttaaaaatgac

SEQ ID NO: 1408505 - DNA, 15 bp, Homo sapiens
aatttttaaaaatga

SEQ ID NO: 1408506 - DNA, 15 bp, Homo sapiens
caatttttaaaaatg

SEQ ID NO: 1408507 - DNA, 15 bp, Homo sapiens
tcacaatttttaaaa

SEQ ID NO: 1408508 - DNA, 15 bp, Homo sapiens
catcacaatttttaa

SEQ ID NO: 1408509 - DNA, 15 bp, Homo sapiens
gcatcacaattttta

SEQ ID NO: 1408510 - DNA, 15 bp, Homo sapiens
ggcatcacaattttt

SEQ ID NO: 1408511 - DNA, 15 bp, Homo sapiens
gggcatcacaatttt

SEQ ID NO: 1408512 - DNA, 15 bp, Homo sapiens
ggggcatcacaattt

SEQ ID NO: 1408513 - DNA, 15 bp, Homo sapiens
cggggcatcacaatt

SEQ ID NO: 1408514 - DNA, 15 bp, Homo sapiens
acggggcatcacaat

SEQ ID NO: 1408515 - DNA, 15 bp, Homo sapiens
aacggggcatcacaa

SEQ ID NO: 1408516 - DNA, 15 bp, Homo sapiens
gaacggggcatcaca

SEQ ID NO: 1408517 - DNA, 15 bp, Homo sapiens
agaacggggcatcac

SEQ ID NO: 1408518 - DNA, 15 bp, Homo sapiens
aagaacggggcatca

SEQ ID NO: 1408519 - DNA, 15 bp, Homo sapiens
aaagaacggggcatc

SEQ ID NO: 1408520 - DNA, 15 bp, Homo sapiens
aaaagaacggggcat

SEQ ID NO: 1408521 - DNA, 15 bp, Homo sapiens
aaaaagaacggggca

SEQ ID NO: 1408522 - DNA, 15 bp, Homo sapiens
gaaaaagaacggggc

SEQ ID NO: 1408523 - DNA, 15 bp, Homo sapiens
agaaaaagaacgggg

SEQ ID NO: 1408524 - DNA, 15 bp, Homo sapiens
aagaaaaagaacggg

SEQ ID NO: 1408525 - DNA, 15 bp, Homo sapiens
taagaaaaagaacgg

SEQ ID NO: 1408526 - DNA, 15 bp, Homo sapiens
gtaagaaaaagaacg

SEQ ID NO: 1408527 - DNA, 15 bp, Homo sapiens
tgtaagaaaaagaac

SEQ ID NO: 1408528 - DNA, 15 bp, Homo sapiens
atgtaagaaaaagaa

SEQ ID NO: 1408529 - DNA, 15 bp, Homo sapiens
aatgtaagaaaaaga

SEQ ID NO: 1408530 - DNA, 15 bp, Homo sapiens
aaatgtaagaaaaag

SEQ ID NO: 1408531 - DNA, 15 bp, Homo sapiens
caaatgtaagaaaaa

SEQ ID NO: 1408532 - DNA, 15 bp, Homo sapiens
acaaatgtaagaaaa

SEQ ID NO: 1408533 - DNA, 15 bp, Homo sapiens
gacaaatgtaagaaa

SEQ ID NO: 1408534 - DNA, 15 bp, Homo sapiens
ggacaaatgtaagaa

SEQ ID NO: 1408535 - DNA, 15 bp, Homo sapiens
gggacaaatgtaaga

SEQ ID NO: 1408536 - DNA, 15 bp, Homo sapiens
ggggacaaatgtaag

SEQ ID NO: 1408537 - DNA, 15 bp, Homo sapiens
aggggacaaatgtaa

SEQ ID NO: 1408538 - DNA, 15 bp, Homo sapiens
caggggacaaatgta

SEQ ID NO: 1408539 - DNA, 15 bp, Homo sapiens
tcaggggacaaatgt

SEQ ID NO: 1408540 - DNA, 15 bp, Homo sapiens
ttcaggggacaaatg

SEQ ID NO: 1408541 - DNA, 15 bp, Homo sapiens
gttcaggggacaaat

SEQ ID NO: 1408542 - DNA, 15 bp, Homo sapiens
tgttcaggggacaaa

SEQ ID NO: 1408543 - DNA, 15 bp, Homo sapiens
ttgttcaggggacaa

SEQ ID NO: 1408544 - DNA, 15 bp, Homo sapiens
attgttcaggggaca

SEQ ID NO: 1408545 - DNA, 15 bp, Homo sapiens
aattgttcaggggac

SEQ ID NO: 1408546 - DNA, 15 bp, Homo sapiens
gaattgttcagggga

SEQ ID NO: 1408547 - DNA, 15 bp, Homo sapiens
agaattgttcagggg

SEQ ID NO: 1408548 - DNA, 15 bp, Homo sapiens
aagaattgttcaggg

SEQ ID NO: 1408549 - DNA, 15 bp, Homo sapiens
gaagaattgttcagg

SEQ ID NO: 1408550 - DNA, 15 bp, Homo sapiens
ggaagaattgttcag

SEQ ID NO: 1408551 - DNA, 15 bp, Homo sapiens
aggaagaattgttca

SEQ ID NO: 1408552 - DNA, 15 bp, Homo sapiens
gaggaagaattgttc

SEQ ID NO: 1408553 - DNA, 15 bp, Homo sapiens
agaggaagaattgtt

SEQ ID NO: 1408554 - DNA, 15 bp, Homo sapiens
aagaggaagaattgt

SEQ ID NO: 1408555 - DNA, 15 bp, Homo sapiens
aaagaggaagaattg

SEQ ID NO: 1408556 - DNA, 15 bp, Homo sapiens
taaagaggaagaatt

SEQ ID NO: 1408557 - DNA, 15 bp, Homo sapiens
ttaaagaggaagaat

SEQ ID NO: 1408558 - DNA, 15 bp, Homo sapiens
tttaaagaggaagaa

SEQ ID NO: 1408559 - DNA, 15 bp, Homo sapiens
ttttaaagaggaaga

SEQ ID NO: 1408560 - DNA, 15 bp, Homo sapiens
attttaaagaggaag

SEQ ID NO: 1408561 - DNA, 15 bp, Homo sapiens
cattttaaagaggaa

SEQ ID NO: 1408562 - DNA, 15 bp, Homo sapiens
acattttaaagagga

SEQ ID NO: 1408563 - DNA, 15 bp, Homo sapiens
tacattttaaagagg

SEQ ID NO: 1408564 - DNA, 15 bp, Homo sapiens
ctacattttaaagag

SEQ ID NO: 1408565 - DNA, 15 bp, Homo sapiens
gctacattttaaaga

SEQ ID NO: 1408566 - DNA, 15 bp, Homo sapiens
tgctacattttaaag

SEQ ID NO: 1408567 - DNA, 15 bp, Homo sapiens
ctgctacattttaaa

SEQ ID NO: 1408568 - DNA, 15 bp, Homo sapiens
actgctacattttaa

SEQ ID NO: 1408569 - DNA, 15 bp, Homo sapiens
gactgctacatttta

SEQ ID NO: 1408570 - DNA, 15 bp, Homo sapiens
ggactgctacatttt

SEQ ID NO: 1408571 - DNA, 15 bp, Homo sapiens
aggactgctacattt

SEQ ID NO: 1408572 - DNA, 15 bp, Homo sapiens
taggactgctacatt

SEQ ID NO: 1408573 - DNA, 15 bp, Homo sapiens
ctaggactgctacat

SEQ ID NO: 1408574 - DNA, 15 bp, Homo sapiens
gctaggactgctaca

SEQ ID NO: 1408575 - DNA, 15 bp, Homo sapiens
agctaggactgctac

SEQ ID NO: 1408576 - DNA, 15 bp, Homo sapiens
cagctaggactgcta

SEQ ID NO: 1408577 - DNA, 15 bp, Homo sapiens
ccagctaggactgct

SEQ ID NO: 1408578 - DNA, 15 bp, Homo sapiens
cccagctaggactgc

SEQ ID NO: 1408579 - DNA, 15 bp, Homo sapiens
gcccagctaggactg

SEQ ID NO: 1408580 - DNA, 15 bp, Homo sapiens
cgcccagctaggact

SEQ ID NO: 1408581 - DNA, 15 bp, Homo sapiens
acgcccagctaggac

SEQ ID NO: 1408582 - DNA, 15 bp, Homo sapiens
cacgcccagctagga

SEQ ID NO: 1408583 - DNA, 15 bp, Homo sapiens
gcacgcccagctagg

SEQ ID NO: 1408584 - DNA, 15 bp, Homo sapiens
agcacgcccagctag

SEQ ID NO: 1408585 - DNA, 15 bp, Homo sapiens
cagcacgcccagcta

SEQ ID NO: 1408586 - DNA, 15 bp, Homo sapiens
ccagcacgcccagct

SEQ ID NO: 1408587 - DNA, 15 bp, Homo sapiens
gccagcacgcccagc

SEQ ID NO: 1408588 - DNA, 15 bp, Homo sapiens
agccagcacgcccag

SEQ ID NO: 1408589 - DNA, 15 bp, Homo sapiens
gagccagcacgccca

SEQ ID NO: 1408590 - DNA, 15 bp, Homo sapiens
tgagccagcacgccc

SEQ ID NO: 1408591 - DNA, 15 bp, Homo sapiens
gtgagccagcacgcc

SEQ ID NO: 1408592 - DNA, 15 bp, Homo sapiens
tgtgagccagcacgc

SEQ ID NO: 1408593 - DNA, 15 bp, Homo sapiens
gtgtgagccagcacg

SEQ ID NO: 1408594 - DNA, 15 bp, Homo sapiens
ggtgtgagccagcac

SEQ ID NO: 1408595 - DNA, 15 bp, Homo sapiens
gggtgtgagccagca

SEQ ID NO: 1408596 - DNA, 15 bp, Homo sapiens
ggggtgtgagccagc

SEQ ID NO: 1408597 - DNA, 15 bp, Homo sapiens
cggggtgtgagccag

SEQ ID NO: 1408598 - DNA, 15 bp, Homo sapiens
acggggtgtgagcca

SEQ ID NO: 1408599 - DNA, 15 bp, Homo sapiens
tacggggtgtgagcc

SEQ ID NO: 1408600 - DNA, 15 bp, Homo sapiens
gtacggggtgtgagc

SEQ ID NO: 1408601 - DNA, 15 bp, Homo sapiens
agtacggggtgtgag

SEQ ID NO: 1408602 - DNA, 15 bp, Homo sapiens
aagtacggggtgtga

SEQ ID NO: 1408603 - DNA, 15 bp, Homo sapiens
aaagtacggggtgtg

SEQ ID NO: 1408604 - DNA, 15 bp, Homo sapiens
caaagtacggggtgt

SEQ ID NO: 1408605 - DNA, 15 bp, Homo sapiens
ccaaagtacggggtg

SEQ ID NO: 1408606 - DNA, 15 bp, Homo sapiens
cccaaagtacggggt

SEQ ID NO: 1408607 - DNA, 15 bp, Homo sapiens
tcccaaagtacgggg

SEQ ID NO: 1408608 - DNA, 15 bp, Homo sapiens
atcccaaagtacggg

SEQ ID NO: 1408609 - DNA, 15 bp, Homo sapiens
catcccaaagtacgg

SEQ ID NO: 1408610 - DNA, 15 bp, Homo sapiens
gcatcccaaagtacg

SEQ ID NO: 1408611 - DNA, 15 bp, Homo sapiens
ggcatcccaaagtac

SEQ ID NO: 1408612 - DNA, 15 bp, Homo sapiens
tggcatcccaaagta

SEQ ID NO: 1408613 - DNA, 15 bp, Homo sapiens
ttggcatcccaaagt

SEQ ID NO: 1408614 - DNA, 15 bp, Homo sapiens
cttggcatcccaaag

SEQ ID NO: 1408615 - DNA, 15 bp, Homo sapiens
ccttggcatcccaaa

SEQ ID NO: 1408616 - DNA, 15 bp, Homo sapiens
gccttggcatcccaa

SEQ ID NO: 1408617 - DNA, 15 bp, Homo sapiens
tgccttggcatccca

SEQ ID NO: 1408618 - DNA, 15 bp, Homo sapiens
ctgccttggcatccc

SEQ ID NO: 1408619 - DNA, 15 bp, Homo sapiens
cctgccttggcatcc

SEQ ID NO: 1408620 - DNA, 15 bp, Homo sapiens
gcctgccttggcatc

SEQ ID NO: 1408621 - DNA, 15 bp, Homo sapiens
agcctgccttggcat

SEQ ID NO: 1408622 - DNA, 15 bp, Homo sapiens
cagcctgccttggca

SEQ ID NO: 1408623 - DNA, 15 bp, Homo sapiens
ccagcctgccttggc

SEQ ID NO: 1408624 - DNA, 15 bp, Homo sapiens
accagcctgccttgg

SEQ ID NO: 1408625 - DNA, 15 bp, Homo sapiens
gaccagcctgccttg

SEQ ID NO: 1408626 - DNA, 15 bp, Homo sapiens
tgaccagcctgcctt

SEQ ID NO: 1408627 - DNA, 15 bp, Homo sapiens
gtgaccagcctgcct

SEQ ID NO: 1408628 - DNA, 15 bp, Homo sapiens
agtgaccagcctgcc

SEQ ID NO: 1408629 - DNA, 15 bp, Homo sapiens
aagtgaccagcctgc

SEQ ID NO: 1408630 - DNA, 15 bp, Homo sapiens
caagtgaccagcctg

SEQ ID NO: 1408631 - DNA, 15 bp, Homo sapiens
tcaagtgaccagcct

SEQ ID NO: 1408632 - DNA, 15 bp, Homo sapiens
ctcaagtgaccagcc

SEQ ID NO: 1408633 - DNA, 15 bp, Homo sapiens
cctcaagtgaccagc

SEQ ID NO: 1408634 - DNA, 15 bp, Homo sapiens
acctcaagtgaccag

SEQ ID NO: 1408635 - DNA, 15 bp, Homo sapiens
gacctcaagtgacca

SEQ ID NO: 1408636 - DNA, 15 bp, Homo sapiens
tgacctcaagtgacc

SEQ ID NO: 1408637 - DNA, 15 bp, Homo sapiens
ctgacctcaagtgac

SEQ ID NO: 1408638 - DNA, 15 bp, Homo sapiens
ctttagtagagacgg

SEQ ID NO: 1408639 - DNA, 15 bp, Homo sapiens
tctttagtagagacg

SEQ ID NO: 1408640 - DNA, 15 bp, Homo sapiens
atttttgtatcttta

SEQ ID NO: 1408641 - DNA, 15 bp, Homo sapiens
aatttttgtatcttt

SEQ ID NO: 1408642 - DNA, 15 bp, Homo sapiens
taatttttgtatctt

SEQ ID NO: 1408643 - DNA, 15 bp, Homo sapiens
ctaatttttgtatct

SEQ ID NO: 1408644 - DNA, 15 bp, Homo sapiens
gctaatttttgtatc

SEQ ID NO: 1408645 - DNA, 15 bp, Homo sapiens
cgtgcaccaccacac

SEQ ID NO: 1408646 - DNA, 15 bp, Homo sapiens
gcgtgcaccaccaca

SEQ ID NO: 1408647 - DNA, 15 bp, Homo sapiens
acaggcgtgcaccac

SEQ ID NO: 1408648 - DNA, 15 bp, Homo sapiens
tacaggcgtgcacca

SEQ ID NO: 1408649 - DNA, 15 bp, Homo sapiens
ctacaggcgtgcacc

SEQ ID NO: 1408650 - DNA, 15 bp, Homo sapiens
actacaggcgtgcac

SEQ ID NO: 1408651 - DNA, 15 bp, Homo sapiens
gactacaggcgtgca

SEQ ID NO: 1408652 - DNA, 15 bp, Homo sapiens
actgggactacaggc

SEQ ID NO: 1408653 - DNA, 15 bp, Homo sapiens
aactgggactacagg

SEQ ID NO: 1408654 - DNA, 15 bp, Homo sapiens
cgattctcatgcctc

SEQ ID NO: 1408655 - DNA, 15 bp, Homo sapiens
tcaggttcaagcgat

SEQ ID NO: 1408656 - DNA, 15 bp, Homo sapiens
ctcaggttcaagcga

SEQ ID NO: 1408657 - DNA, 15 bp, Homo sapiens
tctcaggttcaagcg

SEQ ID NO: 1408658 - DNA, 15 bp, Homo sapiens
ctctcaggttcaagc

SEQ ID NO: 1408659 - DNA, 15 bp, Homo sapiens
cctctcaggttcaag

SEQ ID NO: 1408660 - DNA, 15 bp, Homo sapiens
acctctcaggttcaa

SEQ ID NO: 1408661 - DNA, 15 bp, Homo sapiens
cacctctcaggttca

SEQ ID NO: 1408662 - DNA, 15 bp, Homo sapiens
ccacctctcaggttc

SEQ ID NO: 1408663 - DNA, 15 bp, Homo sapiens
tccacctctcaggtt

SEQ ID NO: 1408664 - DNA, 15 bp, Homo sapiens
ctccacctctcaggt

SEQ ID NO: 1408665 - DNA, 15 bp, Homo sapiens
gctccacctctcagg

SEQ ID NO: 1408666 - DNA, 15 bp, Homo sapiens
agctccacctctcag

SEQ ID NO: 1408667 - DNA, 15 bp, Homo sapiens
aagctccacctctca

SEQ ID NO: 1408668 - DNA, 15 bp, Homo sapiens
caagctccacctctc

SEQ ID NO: 1408669 - DNA, 15 bp, Homo sapiens
gcaagctccacctct

SEQ ID NO: 1408670 - DNA, 15 bp, Homo sapiens
aaatcttggctcact

SEQ ID NO: 1408671 - DNA, 15 bp, Homo sapiens
aaaatcttggctcac

SEQ ID NO: 1408672 - DNA, 15 bp, Homo sapiens
caaaatcttggctca

SEQ ID NO: 1408673 - DNA, 15 bp, Homo sapiens
gcaaaatcttggctc

SEQ ID NO: 1408674 - DNA, 15 bp, Homo sapiens
ggcaaaatcttggct

SEQ ID NO: 1408675 - DNA, 15 bp, Homo sapiens
tggcaaaatcttggc

SEQ ID NO: 1408676 - DNA, 15 bp, Homo sapiens
gtggcaaaatcttgg

SEQ ID NO: 1408677 - DNA, 15 bp, Homo sapiens
agtggcaaaatcttg

SEQ ID NO: 1408678 - DNA, 15 bp, Homo sapiens
cagtggcaaaatctt

SEQ ID NO: 1408679 - DNA, 15 bp, Homo sapiens
gcagtggcaaaatct

SEQ ID NO: 1408680 - DNA, 15 bp, Homo sapiens
tgcagtggcaaaatc

SEQ ID NO: 1408681 - DNA, 15 bp, Homo sapiens
gtgcagtggcaaaat

SEQ ID NO: 1408682 - DNA, 15 bp, Homo sapiens
agtgcagtggcaaaa

SEQ ID NO: 1408683 - DNA, 15 bp, Homo sapiens
ttcactctgttgccc

SEQ ID NO: 1408684 - DNA, 15 bp, Homo sapiens
atttttttgagacag

SEQ ID NO: 1408685 - DNA, 15 bp, Homo sapiens
atttatttttttgag

SEQ ID NO: 1408686 - DNA, 15 bp, Homo sapiens
tatttatttttttga

SEQ ID NO: 1408687 - DNA, 15 bp, Homo sapiens
ttatttatttttttg

SEQ ID NO: 1408688 - DNA, 15 bp, Homo sapiens
attttatttattttt

SEQ ID NO: 1408689 - DNA, 15 bp, Homo sapiens
tattttatttatttt

SEQ ID NO: 1408690 - DNA, 15 bp, Homo sapiens
ttttattttatttat

SEQ ID NO: 1408691 - DNA, 15 bp, Homo sapiens
attttattttattta

SEQ ID NO: 1408692 - DNA, 15 bp, Homo sapiens
acattttattttatt

SEQ ID NO: 1408693 - DNA, 15 bp, Homo sapiens
tacattttattttat

SEQ ID NO: 1408694 - DNA, 15 bp, Homo sapiens
ctacattttatttta

SEQ ID NO: 1408695 - DNA, 15 bp, Homo sapiens
gctacattttatttt

SEQ ID NO: 1408696 - DNA, 15 bp, Homo sapiens
tgctacattttattt

SEQ ID NO: 1408697 - DNA, 15 bp, Homo sapiens
ctgctacattttatt

SEQ ID NO: 1408698 - DNA, 15 bp, Homo sapiens
actgctacattttat

SEQ ID NO: 1408699 - DNA, 15 bp, Homo sapiens
aaggactgctacatt

SEQ ID NO: 1408700 - DNA, 15 bp, Homo sapiens
aaaggactgctacat

SEQ ID NO: 1408701 - DNA, 15 bp, Homo sapiens
aaaaggactgctaca

SEQ ID NO: 1408702 - DNA, 15 bp, Homo sapiens
aaaaaggactgctac

SEQ ID NO: 1408703 - DNA, 15 bp, Homo sapiens
taaaaaggactgcta

SEQ ID NO: 1408704 - DNA, 15 bp, Homo sapiens
ttaaaaaggactgct

SEQ ID NO: 1408705 - DNA, 15 bp, Homo sapiens
tttaaaaaggactgc

SEQ ID NO: 1408706 - DNA, 15 bp, Homo sapiens
ttttaaaaaggactg

SEQ ID NO: 1408707 - DNA, 15 bp, Homo sapiens
tttttaaaaaggact

SEQ ID NO: 1408708 - DNA, 15 bp, Homo sapiens
atttttaaaaaggac

SEQ ID NO: 1408709 - DNA, 15 bp, Homo sapiens
cacatttttaaaaag

SEQ ID NO: 1408710 - DNA, 15 bp, Homo sapiens
ccacatttttaaaaa

SEQ ID NO: 1408711 - DNA, 15 bp, Homo sapiens
tccacatttttaaaa

SEQ ID NO: 1408712 - DNA, 15 bp, Homo sapiens
ttccacatttttaaa

SEQ ID NO: 1408713 - DNA, 15 bp, Homo sapiens
attccacatttttaa

SEQ ID NO: 1408714 - DNA, 15 bp, Homo sapiens
aattccacattttta

SEQ ID NO: 1408715 - DNA, 15 bp, Homo sapiens
aaattccacattttt

SEQ ID NO: 1408716 - DNA, 15 bp, Homo sapiens
aaaattccacatttt

SEQ ID NO: 1408717 - DNA, 15 bp, Homo sapiens
taaaattccacattt

SEQ ID NO: 1408718 - DNA, 15 bp, Homo sapiens
gtaaaattccacatt

SEQ ID NO: 1408719 - DNA, 15 bp, Homo sapiens
agtaaaattccacat

SEQ ID NO: 1408720 - DNA, 15 bp, Homo sapiens
aagtaaaattccaca

SEQ ID NO: 1408721 - DNA, 15 bp, Homo sapiens
caagtaaaattccac

SEQ ID NO: 1408722 - DNA, 15 bp, Homo sapiens
tcaagtaaaattcca

SEQ ID NO: 1408723 - DNA, 15 bp, Homo sapiens
gtcaagtaaaattcc

SEQ ID NO: 1408724 - DNA, 15 bp, Homo sapiens
tgtcaagtaaaattc

SEQ ID NO: 1408725 - DNA, 15 bp, Homo sapiens
ctgtcaagtaaaatt

SEQ ID NO: 1408726 - DNA, 15 bp, Homo sapiens
actgtcaagtaaaat

SEQ ID NO: 1408727 - DNA, 15 bp, Homo sapiens
tactgtcaagtaaaa

SEQ ID NO: 1408728 - DNA, 15 bp, Homo sapiens
ctactgtcaagtaaa

SEQ ID NO: 1408729 - DNA, 15 bp, Homo sapiens
tctactgtcaagtaa

SEQ ID NO: 1408730 - DNA, 15 bp, Homo sapiens
ctctactgtcaagta

SEQ ID NO: 1408731 - DNA, 15 bp, Homo sapiens
actctactgtcaagt

SEQ ID NO: 1408732 - DNA, 15 bp, Homo sapiens
cactctactgtcaag

SEQ ID NO: 1408733 - DNA, 15 bp, Homo sapiens
tcactctactgtcaa

SEQ ID NO: 1408734 - DNA, 15 bp, Homo sapiens
ttcactctactgtca

SEQ ID NO: 1408735 - DNA, 15 bp, Homo sapiens
cttcactctactgtc

SEQ ID NO: 1408736 - DNA, 15 bp, Homo sapiens
acttcactctactgt

SEQ ID NO: 1408737 - DNA, 15 bp, Homo sapiens
tacttcactctactg

SEQ ID NO: 1408738 - DNA, 15 bp, Homo sapiens
ctacttcactctact

SEQ ID NO: 1408739 - DNA, 15 bp, Homo sapiens
gctacttcactctac

SEQ ID NO: 1408740 - DNA, 15 bp, Homo sapiens
ggctacttcactcta

SEQ ID NO: 1408741 - DNA, 15 bp, Homo sapiens
aggctacttcactct

SEQ ID NO: 1408742 - DNA, 15 bp, Homo sapiens
caggctacttcactc

SEQ ID NO: 1408743 - DNA, 15 bp, Homo sapiens
acaggctacttcact

SEQ ID NO: 1408744 - DNA, 15 bp, Homo sapiens
tacaggctacttcac

SEQ ID NO: 1408745 - DNA, 15 bp, Homo sapiens
atacaggctacttca

SEQ ID NO: 1408746 - DNA, 15 bp, Homo sapiens
catacaggctacttc

SEQ ID NO: 1408747 - DNA, 15 bp, Homo sapiens
gcatacaggctactt

SEQ ID NO: 1408748 - DNA, 15 bp, Homo sapiens
tgcatacaggctact

SEQ ID NO: 1408749 - DNA, 15 bp, Homo sapiens
ttgcatacaggctac

SEQ ID NO: 1408750 - DNA, 15 bp, Homo sapiens
attgcatacaggcta

SEQ ID NO: 1408751 - DNA, 15 bp, Homo sapiens
cattgcatacaggct

SEQ ID NO: 1408752 - DNA, 15 bp, Homo sapiens
tcattgcatacaggc

SEQ ID NO: 1408753 - DNA, 15 bp, Homo sapiens
atcattgcatacagg

SEQ ID NO: 1408754 - DNA, 15 bp, Homo sapiens
tatcattgcatacag

SEQ ID NO: 1408755 - DNA, 15 bp, Homo sapiens
atatcattgcataca

SEQ ID NO: 1408756 - DNA, 15 bp, Homo sapiens
catatcattgcatac

SEQ ID NO: 1408757 - DNA, 15 bp, Homo sapiens
ccatatcattgcata

SEQ ID NO: 1408758 - DNA, 15 bp, Homo sapiens
cccatatcattgcat

SEQ ID NO: 1408759 - DNA, 15 bp, Homo sapiens
tcccatatcattgca

SEQ ID NO: 1408760 - DNA, 15 bp, Homo sapiens
ttcccatatcattgc

SEQ ID NO: 1408761 - DNA, 15 bp, Homo sapiens
tttcccatatcattg

SEQ ID NO: 1408762 - DNA, 15 bp, Homo sapiens
ttttcccatatcatt

SEQ ID NO: 1408763 - DNA, 15 bp, Homo sapiens
attttcccatatcat

SEQ ID NO: 1408764 - DNA, 15 bp, Homo sapiens
cattttcccatatca

SEQ ID NO: 1408765 - DNA, 15 bp, Homo sapiens
acattttcccatatc

SEQ ID NO: 1408766 - DNA, 15 bp, Homo sapiens
tacattttcccatat

SEQ ID NO: 1408767 - DNA, 15 bp, Homo sapiens
gtacattttcccata

SEQ ID NO: 1408768 - DNA, 15 bp, Homo sapiens
tgtacattttcccat

SEQ ID NO: 1408769 - DNA, 15 bp, Homo sapiens
atgtacattttccca

SEQ ID NO: 1408770 - DNA, 15 bp, Homo sapiens
catgtacattttccc

SEQ ID NO: 1408771 - DNA, 15 bp, Homo sapiens
tcatgtacattttcc

SEQ ID NO: 1408772 - DNA, 15 bp, Homo sapiens
gtcatgtacattttc

SEQ ID NO: 1408773 - DNA, 15 bp, Homo sapiens
tgtcatgtacatttt

SEQ ID NO: 1408774 - DNA, 15 bp, Homo sapiens
atgtcatgtacattt

SEQ ID NO: 1408775 - DNA, 15 bp, Homo sapiens
tatgtcatgtacatt

SEQ ID NO: 1408776 - DNA, 15 bp, Homo sapiens
atatgtcatgtacat

SEQ ID NO: 1408777 - DNA, 15 bp, Homo sapiens
aatatgtcatgtaca

SEQ ID NO: 1408778 - DNA, 15 bp, Homo sapiens
taatatgtcatgtac

SEQ ID NO: 1408779 - DNA, 15 bp, Homo sapiens
ttaatatgtcatgta

SEQ ID NO: 1408780 - DNA, 15 bp, Homo sapiens
cttaatatgtcatgt

SEQ ID NO: 1408781 - DNA, 15 bp, Homo sapiens
tcttaatatgtcatg

SEQ ID NO: 1408782 - DNA, 15 bp, Homo sapiens
ttcttaatatgtcat

SEQ ID NO: 1408783 - DNA, 15 bp, Homo sapiens
tttcttaatatgtca

SEQ ID NO: 1408784 - DNA, 15 bp, Homo sapiens
ttttcttaatatgtc

SEQ ID NO: 1408785 - DNA, 15 bp, Homo sapiens
tttttcttaatatgt

SEQ ID NO: 1408786 - DNA, 15 bp, Homo sapiens
ctttttcttaatatg

SEQ ID NO: 1408787 - DNA, 15 bp, Homo sapiens
gctttttcttaatat

SEQ ID NO: 1408788 - DNA, 15 bp, Homo sapiens
tgctttttcttaata

SEQ ID NO: 1408789 - DNA, 15 bp, Homo sapiens
ttgctttttcttaat

SEQ ID NO: 1408790 - DNA, 15 bp, Homo sapiens
tttgctttttcttaa

SEQ ID NO: 1408791 - DNA, 15 bp, Homo sapiens
ttttgctttttctta

SEQ ID NO: 1408792 - DNA, 15 bp, Homo sapiens
attttgctttttctt

SEQ ID NO: 1408793 - DNA, 15 bp, Homo sapiens
cattttgctttttct

SEQ ID NO: 1408794 - DNA, 15 bp, Homo sapiens
acattttgctttttc

SEQ ID NO: 1408795 - DNA, 15 bp, Homo sapiens
tacattttgcttttt

SEQ ID NO: 1408796 - DNA, 15 bp, Homo sapiens
ttacattttgctttt

SEQ ID NO: 1408797 - DNA, 15 bp, Homo sapiens
tttacattttgcttt

SEQ ID NO: 1408798 - DNA, 15 bp, Homo sapiens
ttttacattttgctt

SEQ ID NO: 1408799 - DNA, 15 bp, Homo sapiens
attttacattttgct

SEQ ID NO: 1408800 - DNA, 15 bp, Homo sapiens
tattttacattttgc

SEQ ID NO: 1408801 - DNA, 15 bp, Homo sapiens
ttattttacattttg

SEQ ID NO: 1408802 - DNA, 15 bp, Homo sapiens
attattttacatttt

SEQ ID NO: 1408803 - DNA, 15 bp, Homo sapiens
aattattttacattt

SEQ ID NO: 1408804 - DNA, 15 bp, Homo sapiens
aaattattttacatt

SEQ ID NO: 1408805 - DNA, 15 bp, Homo sapiens
caaattattttacat

SEQ ID NO: 1408806 - DNA, 15 bp, Homo sapiens
ttcaaattattttac

SEQ ID NO: 1408807 - DNA, 15 bp, Homo sapiens
attcaaattatttta

SEQ ID NO: 1408808 - DNA, 15 bp, Homo sapiens
tattcaaattatttt

SEQ ID NO: 1408809 - DNA, 15 bp, Homo sapiens
ctattcaaattattt

SEQ ID NO: 1408810 - DNA, 15 bp, Homo sapiens
actattcaaattatt

SEQ ID NO: 1408811 - DNA, 15 bp, Homo sapiens
tactattcaaattat

SEQ ID NO: 1408812 - DNA, 15 bp, Homo sapiens
atactattcaaatta

SEQ ID NO: 1408813 - DNA, 15 bp, Homo sapiens
aatactattcaaatt

SEQ ID NO: 1408814 - DNA, 15 bp, Homo sapiens
taatactattcaaat

SEQ ID NO: 1408815 - DNA, 15 bp, Homo sapiens
ataatactattcaaa

SEQ ID NO: 1408816 - DNA, 15 bp, Homo sapiens
aataatactattcaa

SEQ ID NO: 1408817 - DNA, 15 bp, Homo sapiens
taataatactattca

SEQ ID NO: 1408818 - DNA, 15 bp, Homo sapiens
ctaataatactattc

SEQ ID NO: 1408819 - DNA, 15 bp, Homo sapiens
actaataatactatt

SEQ ID NO: 1408820 - DNA, 15 bp, Homo sapiens
tactaataatactat

SEQ ID NO: 1408821 - DNA, 15 bp, Homo sapiens
atactaataatacta

SEQ ID NO: 1408822 - DNA, 15 bp, Homo sapiens
tatactaataatact

SEQ ID NO: 1408823 - DNA, 15 bp, Homo sapiens
atatactaataatac

SEQ ID NO: 1408824 - DNA, 15 bp, Homo sapiens
catatactaataata

SEQ ID NO: 1408825 - DNA, 15 bp, Homo sapiens
acatatactaataat

SEQ ID NO: 1408826 - DNA, 15 bp, Homo sapiens
cacatatactaataa

SEQ ID NO: 1408827 - DNA, 15 bp, Homo sapiens
acacatatactaata

SEQ ID NO: 1408828 - DNA, 15 bp, Homo sapiens
aacacatatactaat

SEQ ID NO: 1408829 - DNA, 15 bp, Homo sapiens
aaacacatatactaa

SEQ ID NO: 1408830 - DNA, 15 bp, Homo sapiens
aaaacacatatacta

SEQ ID NO: 1408831 - DNA, 15 bp, Homo sapiens
taaaacacatatact

SEQ ID NO: 1408832 - DNA, 15 bp, Homo sapiens
ttaaaacacatatac

SEQ ID NO: 1408833 - DNA, 15 bp, Homo sapiens
tttaaaacacatata

SEQ ID NO: 1408834 - DNA, 15 bp, Homo sapiens
ttttaaaacacatat

SEQ ID NO: 1408835 - DNA, 15 bp, Homo sapiens
tttttaaaacacata

SEQ ID NO: 1408836 - DNA, 15 bp, Homo sapiens
atttttaaaacacat

SEQ ID NO: 1408837 - DNA, 15 bp, Homo sapiens
tatttttaaaacaca

SEQ ID NO: 1408838 - DNA, 15 bp, Homo sapiens
gtatttttaaaacac

SEQ ID NO: 1408839 - DNA, 15 bp, Homo sapiens
tgtatttttaaaaca

SEQ ID NO: 1408840 - DNA, 15 bp, Homo sapiens
gtgtatttttaaaac

SEQ ID NO: 1408841 - DNA, 15 bp, Homo sapiens
agtgtatttttaaaa

SEQ ID NO: 1408842 - DNA, 15 bp, Homo sapiens
tagtgtatttttaaa

SEQ ID NO: 1408843 - DNA, 15 bp, Homo sapiens
atagtgtatttttaa

SEQ ID NO: 1408844 - DNA, 15 bp, Homo sapiens
tatagtgtattttta

SEQ ID NO: 1408845 - DNA, 15 bp, Homo sapiens
gtatagtgtattttt

SEQ ID NO: 1408846 - DNA, 15 bp, Homo sapiens
agtatagtgtatttt

SEQ ID NO: 1408847 - DNA, 15 bp, Homo sapiens
gagtatagtgtattt

SEQ ID NO: 1408848 - DNA, 15 bp, Homo sapiens
agagtatagtgtatt

SEQ ID NO: 1408849 - DNA, 15 bp, Homo sapiens
aagagtatagtgtat

SEQ ID NO: 1408850 - DNA, 15 bp, Homo sapiens
taagagtatagtgta

SEQ ID NO: 1408851 - DNA, 15 bp, Homo sapiens
ataagagtatagtgt

SEQ ID NO: 1408852 - DNA, 15 bp, Homo sapiens
cataagagtatagtg

SEQ ID NO: 1408853 - DNA, 15 bp, Homo sapiens
acataagagtatagt

SEQ ID NO: 1408854 - DNA, 15 bp, Homo sapiens
cacataagagtatag

SEQ ID NO: 1408855 - DNA, 15 bp, Homo sapiens
acacataagagtata

SEQ ID NO: 1408856 - DNA, 15 bp, Homo sapiens
tacacataagagtat

SEQ ID NO: 1408857 - DNA, 15 bp, Homo sapiens
atacacataagagta

SEQ ID NO: 1408858 - DNA, 15 bp, Homo sapiens
aatacacataagagt

SEQ ID NO: 1408859 - DNA, 15 bp, Homo sapiens
gaatacacataagag

SEQ ID NO: 1408860 - DNA, 15 bp, Homo sapiens
tgaatacacataaga

SEQ ID NO: 1408861 - DNA, 15 bp, Homo sapiens
atgaatacacataag

SEQ ID NO: 1408862 - DNA, 15 bp, Homo sapiens
tatgaatacacataa

SEQ ID NO: 1408863 - DNA, 15 bp, Homo sapiens
atatgaatacacata

SEQ ID NO: 1408864 - DNA, 15 bp, Homo sapiens
catatgaatacacat

SEQ ID NO: 1408865 - DNA, 15 bp, Homo sapiens
acatatgaatacaca

SEQ ID NO: 1408866 - DNA, 15 bp, Homo sapiens
tacatatgaatacac

SEQ ID NO: 1408867 - DNA, 15 bp, Homo sapiens
atacatatgaataca

SEQ ID NO: 1408868 - DNA, 15 bp, Homo sapiens
tatacatatgaatac

SEQ ID NO: 1408869 - DNA, 15 bp, Homo sapiens
atatacatatgaata

SEQ ID NO: 1408870 - DNA, 15 bp, Homo sapiens
aatatacatatgaat

SEQ ID NO: 1408871 - DNA, 15 bp, Homo sapiens
taatatacatatgaa

SEQ ID NO: 1408872 - DNA, 15 bp, Homo sapiens
ttaatatacatatga

SEQ ID NO: 1408873 - DNA, 15 bp, Homo sapiens
cttaatatacatatg

SEQ ID NO: 1408874 - DNA, 15 bp, Homo sapiens
tcttaatatacatat

SEQ ID NO: 1408875 - DNA, 15 bp, Homo sapiens
ttcttaatatacata

SEQ ID NO: 1408876 - DNA, 15 bp, Homo sapiens
tttcttaatatacat

SEQ ID NO: 1408877 - DNA, 15 bp, Homo sapiens
atttcttaatataca

SEQ ID NO: 1408878 - DNA, 15 bp, Homo sapiens
aatttcttaatatac

SEQ ID NO: 1408879 - DNA, 15 bp, Homo sapiens
gaatttcttaatata

SEQ ID NO: 1408880 - DNA, 15 bp, Homo sapiens
agaatttcttaatat

SEQ ID NO: 1408881 - DNA, 15 bp, Homo sapiens
cagaatttcttaata

SEQ ID NO: 1408882 - DNA, 15 bp, Homo sapiens
ccagaatttcttaat

SEQ ID NO: 1408883 - DNA, 15 bp, Homo sapiens
tccagaatttcttaa

SEQ ID NO: 1408884 - DNA, 15 bp, Homo sapiens
ctccagaatttctta

SEQ ID NO: 1408885 - DNA, 15 bp, Homo sapiens
cctccagaatttctt

SEQ ID NO: 1408886 - DNA, 15 bp, Homo sapiens
tcctccagaatttct

SEQ ID NO: 1408887 - DNA, 15 bp, Homo sapiens
ttcctccagaatttc

SEQ ID NO: 1408888 - DNA, 15 bp, Homo sapiens
attcctccagaattt

SEQ ID NO: 1408889 - DNA, 15 bp, Homo sapiens
tattcctccagaatt

SEQ ID NO: 1408890 - DNA, 15 bp, Homo sapiens
atattcctccagaat

SEQ ID NO: 1408891 - DNA, 15 bp, Homo sapiens
tatattcctccagaa

SEQ ID NO: 1408892 - DNA, 15 bp, Homo sapiens
gtatattcctccaga

SEQ ID NO: 1408893 - DNA, 15 bp, Homo sapiens
ggtatattcctccag

SEQ ID NO: 1408894 - DNA, 15 bp, Homo sapiens
tggtatattcctcca

SEQ ID NO: 1408895 - DNA, 15 bp, Homo sapiens
ctggtatattcctcc

SEQ ID NO: 1408896 - DNA, 15 bp, Homo sapiens
gctggtatattcctc

SEQ ID NO: 1408897 - DNA, 15 bp, Homo sapiens
tgctggtatattcct

SEQ ID NO: 1408898 - DNA, 15 bp, Homo sapiens
ctgctggtatattcc

SEQ ID NO: 1408899 - DNA, 15 bp, Homo sapiens
actgctggtatattc

SEQ ID NO: 1408900 - DNA, 15 bp, Homo sapiens
cactgctggtatatt

SEQ ID NO: 1408901 - DNA, 15 bp, Homo sapiens
gcactgctggtatat

SEQ ID NO: 1408902 - DNA, 15 bp, Homo sapiens
agcactgctggtata

SEQ ID NO: 1408903 - DNA, 15 bp, Homo sapiens
tagcactgctggtat

SEQ ID NO: 1408904 - DNA, 15 bp, Homo sapiens
atagcactgctggta

SEQ ID NO: 1408905 - DNA, 15 bp, Homo sapiens
catagcactgctggt

SEQ ID NO: 1408906 - DNA, 15 bp, Homo sapiens
acatagcactgctgg

SEQ ID NO: 1408907 - DNA, 15 bp, Homo sapiens
cacatagcactgctg

SEQ ID NO: 1408908 - DNA, 15 bp, Homo sapiens
acacatagcactgct

SEQ ID NO: 1408909 - DNA, 15 bp, Homo sapiens
tacacatagcactgc

SEQ ID NO: 1408910 - DNA, 15 bp, Homo sapiens
atacacatagcactg

SEQ ID NO: 1408911 - DNA, 15 bp, Homo sapiens
aatacacatagcact

SEQ ID NO: 1408912 - DNA, 15 bp, Homo sapiens
taatacacatagcac

SEQ ID NO: 1408913 - DNA, 15 bp, Homo sapiens
ctaatacacatagca

SEQ ID NO: 1408914 - DNA, 15 bp, Homo sapiens
actaatacacatagc

SEQ ID NO: 1408915 - DNA, 15 bp, Homo sapiens
cactaatacacatag

SEQ ID NO: 1408916 - DNA, 15 bp, Homo sapiens
gcactaatacacata

SEQ ID NO: 1408917 - DNA, 15 bp, Homo sapiens
agcactaatacacat

SEQ ID NO: 1408918 - DNA, 15 bp, Homo sapiens
cagcactaatacaca

SEQ ID NO: 1408919 - DNA, 15 bp, Homo sapiens
gcagcactaatacac

SEQ ID NO: 1408920 - DNA, 15 bp, Homo sapiens
agcagcactaataca

SEQ ID NO: 1408921 - DNA, 15 bp, Homo sapiens
cagcagcactaatac

SEQ ID NO: 1408922 - DNA, 15 bp, Homo sapiens
acagcagcactaata

SEQ ID NO: 1408923 - DNA, 15 bp, Homo sapiens
aacagcagcactaat

SEQ ID NO: 1408924 - DNA, 15 bp, Homo sapiens
caacagcagcactaa

SEQ ID NO: 1408925 - DNA, 15 bp, Homo sapiens
ccaacagcagcacta

SEQ ID NO: 1408926 - DNA, 15 bp, Homo sapiens
accaacagcagcact

SEQ ID NO: 1408927 - DNA, 15 bp, Homo sapiens
taccaacagcagcac

SEQ ID NO: 1408928 - DNA, 15 bp, Homo sapiens
ataccaacagcagca

SEQ ID NO: 1408929 - DNA, 15 bp, Homo sapiens
gataccaacagcagc

SEQ ID NO: 1408930 - DNA, 15 bp, Homo sapiens
ggataccaacagcag

SEQ ID NO: 1408931 - DNA, 15 bp, Homo sapiens
tggataccaacagca

SEQ ID NO: 1408932 - DNA, 15 bp, Homo sapiens
atggataccaacagc

SEQ ID NO: 1408933 - DNA, 15 bp, Homo sapiens
catggataccaacag

SEQ ID NO: 1408934 - DNA, 15 bp, Homo sapiens
ccatggataccaaca

SEQ ID NO: 1408935 - DNA, 15 bp, Homo sapiens
gccatggataccaac

SEQ ID NO: 1408936 - DNA, 15 bp, Homo sapiens
agccatggataccaa

SEQ ID NO: 1408937 - DNA, 15 bp, Homo sapiens
tagccatggatacca

SEQ ID NO: 1408938 - DNA, 15 bp, Homo sapiens
atagccatggatacc

SEQ ID NO: 1408939 - DNA, 15 bp, Homo sapiens
aatagccatggatac

SEQ ID NO: 1408940 - DNA, 15 bp, Homo sapiens
gaatagccatggata

SEQ ID NO: 1408941 - DNA, 15 bp, Homo sapiens
agaatagccatggat

SEQ ID NO: 1408942 - DNA, 15 bp, Homo sapiens
tagaatagccatgga

SEQ ID NO: 1408943 - DNA, 15 bp, Homo sapiens
ctagaatagccatgg

SEQ ID NO: 1408944 - DNA, 15 bp, Homo sapiens
tctagaatagccatg

SEQ ID NO: 1408945 - DNA, 15 bp, Homo sapiens
gtctagaatagccat

SEQ ID NO: 1408946 - DNA, 15 bp, Homo sapiens
agtctagaatagcca

SEQ ID NO: 1408947 - DNA, 15 bp, Homo sapiens
cagtctagaatagcc

SEQ ID NO: 1408948 - DNA, 15 bp, Homo sapiens
acagtctagaatagc

SEQ ID NO: 1408949 - DNA, 15 bp, Homo sapiens
gacagtctagaatag

SEQ ID NO: 1408950 - DNA, 15 bp, Homo sapiens
agacagtctagaata

SEQ ID NO: 1408951 - DNA, 15 bp, Homo sapiens
gagacagtctagaat

SEQ ID NO: 1408952 - DNA, 15 bp, Homo sapiens
agagacagtctagaa

SEQ ID NO: 1408953 - DNA, 15 bp, Homo sapiens
cagagacagtctaga

SEQ ID NO: 1408954 - DNA, 15 bp, Homo sapiens
acagagacagtctag

SEQ ID NO: 1408955 - DNA, 15 bp, Homo sapiens
cacagagacagtcta

SEQ ID NO: 1408956 - DNA, 15 bp, Homo sapiens
tcacagagacagtct

SEQ ID NO: 1408957 - DNA, 15 bp, Homo sapiens
atcacagagacagtc

SEQ ID NO: 1408958 - DNA, 15 bp, Homo sapiens
tatcacagagacagt

SEQ ID NO: 1408959 - DNA, 15 bp, Homo sapiens
atatcacagagacag

SEQ ID NO: 1408960 - DNA, 15 bp, Homo sapiens
aatatcacagagaca

SEQ ID NO: 1408961 - DNA, 15 bp, Homo sapiens
aaatatcacagagac

SEQ ID NO: 1408962 - DNA, 15 bp, Homo sapiens
caaatatcacagaga

SEQ ID NO: 1408963 - DNA, 15 bp, Homo sapiens
gcaaatatcacagag

SEQ ID NO: 1408964 - DNA, 15 bp, Homo sapiens
tgcaaatatcacaga

SEQ ID NO: 1408965 - DNA, 15 bp, Homo sapiens
atgcaaatatcacag

SEQ ID NO: 1408966 - DNA, 15 bp, Homo sapiens
aatgcaaatatcaca

SEQ ID NO: 1408967 - DNA, 15 bp, Homo sapiens
aaatgcaaatatcac

SEQ ID NO: 1408968 - DNA, 15 bp, Homo sapiens
aaaatgcaaatatca

SEQ ID NO: 1408969 - DNA, 15 bp, Homo sapiens
taaaatgcaaatatc

SEQ ID NO: 1408970 - DNA, 15 bp, Homo sapiens
ttaaaatgcaaatat

SEQ ID NO: 1408971 - DNA, 15 bp, Homo sapiens
tttaaaatgcaaata

SEQ ID NO: 1408972 - DNA, 15 bp, Homo sapiens
gtttaaaatgcaaat

SEQ ID NO: 1408973 - DNA, 15 bp, Homo sapiens
agtttaaaatgcaaa

SEQ ID NO: 1408974 - DNA, 15 bp, Homo sapiens
cagtttaaaatgcaa

SEQ ID NO: 1408975 - DNA, 15 bp, Homo sapiens
tcagtttaaaatgca

SEQ ID NO: 1408976 - DNA, 15 bp, Homo sapiens
ttcagtttaaaatgc

SEQ ID NO: 1408977 - DNA, 15 bp, Homo sapiens
attcagtttaaaatg

SEQ ID NO: 1408978 - DNA, 15 bp, Homo sapiens
tattcagtttaaaat

SEQ ID NO: 1408979 - DNA, 15 bp, Homo sapiens
atattcagtttaaaa

SEQ ID NO: 1408980 - DNA, 15 bp, Homo sapiens
tatattcagtttaaa

SEQ ID NO: 1408981 - DNA, 15 bp, Homo sapiens
atatattcagtttaa

SEQ ID NO: 1408982 - DNA, 15 bp, Homo sapiens
aatatattcagttta

SEQ ID NO: 1408983 - DNA, 15 bp, Homo sapiens
taatatattcagttt

SEQ ID NO: 1408984 - DNA, 15 bp, Homo sapiens
gtaatatattcagtt

SEQ ID NO: 1408985 - DNA, 15 bp, Homo sapiens
agtaatatattcagt

SEQ ID NO: 1408986 - DNA, 15 bp, Homo sapiens
aagtaatatattcag

SEQ ID NO: 1408987 - DNA, 15 bp, Homo sapiens
aaagtaatatattca

SEQ ID NO: 1408988 - DNA, 15 bp, Homo sapiens
aaaagtaatatattc

SEQ ID NO: 1408989 - DNA, 15 bp, Homo sapiens
taaaagtaatatatt

SEQ ID NO: 1408990 - DNA, 15 bp, Homo sapiens
ataaaagtaatatat

SEQ ID NO: 1408991 - DNA, 15 bp, Homo sapiens
tataaaagtaatata

SEQ ID NO: 1408992 - DNA, 15 bp, Homo sapiens
ttataaaagtaatat

SEQ ID NO: 1408993 - DNA, 15 bp, Homo sapiens
attataaaagtaata

SEQ ID NO: 1408994 - DNA, 15 bp, Homo sapiens
gattataaaagtaat

SEQ ID NO: 1408995 - DNA, 15 bp, Homo sapiens
tgattataaaagtaa

SEQ ID NO: 1408996 - DNA, 15 bp, Homo sapiens
ctgattataaaagta

SEQ ID NO: 1408997 - DNA, 15 bp, Homo sapiens
tctgattataaaagt

SEQ ID NO: 1408998 - DNA, 15 bp, Homo sapiens
ttctgattataaaag

SEQ ID NO: 1408999 - DNA, 15 bp, Homo sapiens
tttctgattataaaa

SEQ ID NO: 1409000 - DNA, 15 bp, Homo sapiens
atttttctgattata

SEQ ID NO: 1409001 - DNA, 15 bp, Homo sapiens
tatttttctgattat

SEQ ID NO: 1409002 - DNA, 15 bp, Homo sapiens
ctatttttctgatta

SEQ ID NO: 1409003 - DNA, 15 bp, Homo sapiens
actatttttctgatt

SEQ ID NO: 1409004 - DNA, 15 bp, Homo sapiens
tactatttttctgat

SEQ ID NO: 1409005 - DNA, 15 bp, Homo sapiens
atactatttttctga

SEQ ID NO: 1409006 - DNA, 15 bp, Homo sapiens
aatactatttttctg

SEQ ID NO: 1409007 - DNA, 15 bp, Homo sapiens
taatactatttttct

SEQ ID NO: 1409008 - DNA, 15 bp, Homo sapiens
ttaatactatttttc

SEQ ID NO: 1409009 - DNA, 15 bp, Homo sapiens
tttaatactattttt

SEQ ID NO: 1409010 - DNA, 15 bp, Homo sapiens
ttttaatactatttt

SEQ ID NO: 1409011 - DNA, 15 bp, Homo sapiens
tttttaatactattt

SEQ ID NO: 1409012 - DNA, 15 bp, Homo sapiens
atttttaatactatt

SEQ ID NO: 1409013 - DNA, 15 bp, Homo sapiens
catttttaatactat

SEQ ID NO: 1409014 - DNA, 15 bp, Homo sapiens
tcatttttaatacta

SEQ ID NO: 1409015 - DNA, 15 bp, Homo sapiens
ttcatttttaatact

SEQ ID NO: 1409016 - DNA, 15 bp, Homo sapiens
attcatttttaatac

SEQ ID NO: 1409017 - DNA, 15 bp, Homo sapiens
aattcatttttaata

SEQ ID NO: 1409018 - DNA, 15 bp, Homo sapiens
taattcatttttaat

SEQ ID NO: 1409019 - DNA, 15 bp, Homo sapiens
ataattcatttttaa

SEQ ID NO: 1409020 - DNA, 15 bp, Homo sapiens
tataattcattttta

SEQ ID NO: 1409021 - DNA, 15 bp, Homo sapiens
ttataattcattttt

SEQ ID NO: 1409022 - DNA, 15 bp, Homo sapiens
attataattcatttt

SEQ ID NO: 1409023 - DNA, 15 bp, Homo sapiens
aattataattcattt

SEQ ID NO: 1409024 - DNA, 15 bp, Homo sapiens
aaattataattcatt

SEQ ID NO: 1409025 - DNA, 15 bp, Homo sapiens
taaattataattcat

SEQ ID NO: 1409026 - DNA, 15 bp, Homo sapiens
ttaaattataattca

SEQ ID NO: 1409027 - DNA, 15 bp, Homo sapiens
attaaattataattc

SEQ ID NO: 1409028 - DNA, 15 bp, Homo sapiens
aattaaattataatt

SEQ ID NO: 1409029 - DNA, 15 bp, Homo sapiens
aaattaaattataat

SEQ ID NO: 1409030 - DNA, 15 bp, Homo sapiens
gaaattaaattataa

SEQ ID NO: 1409031 - DNA, 15 bp, Homo sapiens
agaaattaaattata

SEQ ID NO: 1409032 - DNA, 15 bp, Homo sapiens
aagaaattaaattat

SEQ ID NO: 1409033 - DNA, 15 bp, Homo sapiens
aaagaaattaaatta

SEQ ID NO: 1409034 - DNA, 15 bp, Homo sapiens
aaaagaaattaaatt

SEQ ID NO: 1409035 - DNA, 15 bp, Homo sapiens
aaaaagaaattaaat

SEQ ID NO: 1409036 - DNA, 15 bp, Homo sapiens
aaaaaagaaattaaa

SEQ ID NO: 1409037 - DNA, 15 bp, Homo sapiens
gaaaaaagaaattaa

SEQ ID NO: 1409038 - DNA, 15 bp, Homo sapiens
agaaaaaagaaatta

SEQ ID NO: 1409039 - DNA, 15 bp, Homo sapiens
aaagaaaaaagaaat

SEQ ID NO: 1409040 - DNA, 15 bp, Homo sapiens
cgactcaaaaaaaaa

SEQ ID NO: 1409041 - DNA, 15 bp, Homo sapiens
ccgactcaaaaaaaa

SEQ ID NO: 1409042 - DNA, 15 bp, Homo sapiens
tccgactcaaaaaaa

SEQ ID NO: 1409043 - DNA, 15 bp, Homo sapiens
ctccgactcaaaaaa

SEQ ID NO: 1409044 - DNA, 15 bp, Homo sapiens
actccgactcaaaaa

SEQ ID NO: 1409045 - DNA, 15 bp, Homo sapiens
gactccgactcaaaa

SEQ ID NO: 1409046 - DNA, 15 bp, Homo sapiens
gagactccgactcaa

SEQ ID NO: 1409047 - DNA, 15 bp, Homo sapiens
cgagactccgactca

SEQ ID NO: 1409048 - DNA, 15 bp, Homo sapiens
acgagactccgactc

SEQ ID NO: 1409049 - DNA, 15 bp, Homo sapiens
aacgagactccgact

SEQ ID NO: 1409050 - DNA, 15 bp, Homo sapiens
gaacgagactccgac

SEQ ID NO: 1409051 - DNA, 15 bp, Homo sapiens
agaacgagactccga

SEQ ID NO: 1409052 - DNA, 15 bp, Homo sapiens
tagaacgagactccg

SEQ ID NO: 1409053 - DNA, 15 bp, Homo sapiens
atagaacgagactcc

SEQ ID NO: 1409054 - DNA, 15 bp, Homo sapiens
gatagaacgagactc

SEQ ID NO: 1409055 - DNA, 15 bp, Homo sapiens
cgatagaacgagact

SEQ ID NO: 1409056 - DNA, 15 bp, Homo sapiens
ccgatagaacgagac

SEQ ID NO: 1409057 - DNA, 15 bp, Homo sapiens
tccgatagaacgaga

SEQ ID NO: 1409058 - DNA, 15 bp, Homo sapiens
atccgatagaacgag

SEQ ID NO: 1409059 - DNA, 15 bp, Homo sapiens
aatccgatagaacga

SEQ ID NO: 1409060 - DNA, 15 bp, Homo sapiens
caatccgatagaacg

SEQ ID NO: 1409061 - DNA, 15 bp, Homo sapiens
gcaatccgatagaac

SEQ ID NO: 1409062 - DNA, 15 bp, Homo sapiens
tgcaatccgatagaa

SEQ ID NO: 1409063 - DNA, 15 bp, Homo sapiens
ctgcaatccgataga

SEQ ID NO: 1409064 - DNA, 15 bp, Homo sapiens
actgcaatccgatag

SEQ ID NO: 1409065 - DNA, 15 bp, Homo sapiens
cactgcaatccgata

SEQ ID NO: 1409066 - DNA, 15 bp, Homo sapiens
ccactgcaatccgat

SEQ ID NO: 1409067 - DNA, 15 bp, Homo sapiens
accactgcaatccga

SEQ ID NO: 1409068 - DNA, 15 bp, Homo sapiens
caccactgcaatccg

SEQ ID NO: 1409069 - DNA, 15 bp, Homo sapiens
gcaccactgcaatcc

SEQ ID NO: 1409070 - DNA, 15 bp, Homo sapiens
cgcaccactgcaatc

SEQ ID NO: 1409071 - DNA, 15 bp, Homo sapiens
tcgcaccactgcaat

SEQ ID NO: 1409072 - DNA, 15 bp, Homo sapiens
atcgcaccactgcaa

SEQ ID NO: 1409073 - DNA, 15 bp, Homo sapiens
tgggaggctgagaca

SEQ ID NO: 1409074 - DNA, 15 bp, Homo sapiens
cgtcccagctacttg

SEQ ID NO: 1409075 - DNA, 15 bp, Homo sapiens
tcgtcccagctactt

SEQ ID NO: 1409076 - DNA, 15 bp, Homo sapiens
atcgtcccagctact

SEQ ID NO: 1409077 - DNA, 15 bp, Homo sapiens
tatcgtcccagctac

SEQ ID NO: 1409078 - DNA, 15 bp, Homo sapiens
ctatcgtcccagcta

SEQ ID NO: 1409079 - DNA, 15 bp, Homo sapiens
cctatcgtcccagct

SEQ ID NO: 1409080 - DNA, 15 bp, Homo sapiens
acctatcgtcccagc

SEQ ID NO: 1409081 - DNA, 15 bp, Homo sapiens
cacctatcgtcccag

SEQ ID NO: 1409082 - DNA, 15 bp, Homo sapiens
gcacctatcgtccca

SEQ ID NO: 1409083 - DNA, 15 bp, Homo sapiens
tgcacctatcgtccc

SEQ ID NO: 1409084 - DNA, 15 bp, Homo sapiens
atgcacctatcgtcc

SEQ ID NO: 1409085 - DNA, 15 bp, Homo sapiens
catgcacctatcgtc

SEQ ID NO: 1409086 - DNA, 15 bp, Homo sapiens
gcatgcacctatcgt

SEQ ID NO: 1409087 - DNA, 15 bp, Homo sapiens
ggcatgcacctatcg

SEQ ID NO: 1409088 - DNA, 15 bp, Homo sapiens
tggcatgcacctatc

SEQ ID NO: 1409089 - DNA, 15 bp, Homo sapiens
gtggcatgcacctat

SEQ ID NO: 1409090 - DNA, 15 bp, Homo sapiens
ggtggcatgcaccta

SEQ ID NO: 1409091 - DNA, 15 bp, Homo sapiens
aggcgtggtggcatg

SEQ ID NO: 1409092 - DNA, 15 bp, Homo sapiens
caggcgtggtggcat

SEQ ID NO: 1409093 - DNA, 15 bp, Homo sapiens
tgggtggatcacgag

SEQ ID NO: 1409094 - DNA, 15 bp, Homo sapiens
atgggtggatcacga

SEQ ID NO: 1409095 - DNA, 15 bp, Homo sapiens
gatgggtggatcacg

SEQ ID NO: 1409096 - DNA, 15 bp, Homo sapiens
agatgggtggatcac

SEQ ID NO: 1409097 - DNA, 15 bp, Homo sapiens
gagatgggtggatca

SEQ ID NO: 1409098 - DNA, 15 bp, Homo sapiens
cgagatgggtggatc

SEQ ID NO: 1409099 - DNA, 15 bp, Homo sapiens
ccgagatgggtggat

SEQ ID NO: 1409100 - DNA, 15 bp, Homo sapiens
gccgagatgggtgga

SEQ ID NO: 1409101 - DNA, 15 bp, Homo sapiens
ggccgagatgggtgg

SEQ ID NO: 1409102 - DNA, 15 bp, Homo sapiens
aggccgagatgggtg

SEQ ID NO: 1409103 - DNA, 15 bp, Homo sapiens
gaggccgagatgggt

SEQ ID NO: 1409104 - DNA, 15 bp, Homo sapiens
ggaggccgagatggg

SEQ ID NO: 1409105 - DNA, 15 bp, Homo sapiens
cggaggccgagatgg

SEQ ID NO: 1409106 - DNA, 15 bp, Homo sapiens
tcggaggccgagatg

SEQ ID NO: 1409107 - DNA, 15 bp, Homo sapiens
ttcggaggccgagat

SEQ ID NO: 1409108 - DNA, 15 bp, Homo sapiens
tttcggaggccgaga

SEQ ID NO: 1409109 - DNA, 15 bp, Homo sapiens
ctttcggaggccgag

SEQ ID NO: 1409110 - DNA, 15 bp, Homo sapiens
actttcggaggccga

SEQ ID NO: 1409111 - DNA, 15 bp, Homo sapiens
cactttcggaggccg

SEQ ID NO: 1409112 - DNA, 15 bp, Homo sapiens
gcactttcggaggcc

SEQ ID NO: 1409113 - DNA, 15 bp, Homo sapiens
agcactttcggaggc

SEQ ID NO: 1409114 - DNA, 15 bp, Homo sapiens
cagcactttcggagg

SEQ ID NO: 1409115 - DNA, 15 bp, Homo sapiens
ccagcactttcggag

SEQ ID NO: 1409116 - DNA, 15 bp, Homo sapiens
cccagcactttcgga

SEQ ID NO: 1409117 - DNA, 15 bp, Homo sapiens
tcccagcactttcgg

SEQ ID NO: 1409118 - DNA, 15 bp, Homo sapiens
atcccagcactttcg

SEQ ID NO: 1409119 - DNA, 15 bp, Homo sapiens
aatcccagcactttc

SEQ ID NO: 1409120 - DNA, 15 bp, Homo sapiens
cggctcatgcctgta

SEQ ID NO: 1409121 - DNA, 15 bp, Homo sapiens
gcggctcatgcctgt

SEQ ID NO: 1409122 - DNA, 15 bp, Homo sapiens
acagcggctcatgcc

SEQ ID NO: 1409123 - DNA, 15 bp, Homo sapiens
cacagcggctcatgc

SEQ ID NO: 1409124 - DNA, 15 bp, Homo sapiens
gcacagcggctcatg

SEQ ID NO: 1409125 - DNA, 15 bp, Homo sapiens
ggcacagcggctcat

SEQ ID NO: 1409126 - DNA, 15 bp, Homo sapiens
gggcacagcggctca

SEQ ID NO: 1409127 - DNA, 15 bp, Homo sapiens
tgggcacagcggctc

SEQ ID NO: 1409128 - DNA, 15 bp, Homo sapiens
ctgggcacagcggct

SEQ ID NO: 1409129 - DNA, 15 bp, Homo sapiens
tctgggcacagcggc

SEQ ID NO: 1409130 - DNA, 15 bp, Homo sapiens
gtctgggcacagcgg

SEQ ID NO: 1409131 - DNA, 15 bp, Homo sapiens
agtctgggcacagcg

SEQ ID NO: 1409132 - DNA, 15 bp, Homo sapiens
tagtctgggcacagc

SEQ ID NO: 1409133 - DNA, 15 bp, Homo sapiens
ctagtctgggcacag

SEQ ID NO: 1409134 - DNA, 15 bp, Homo sapiens
tctagtctgggcaca

SEQ ID NO: 1409135 - DNA, 15 bp, Homo sapiens
ttctagtctgggcac

SEQ ID NO: 1409136 - DNA, 15 bp, Homo sapiens
attctagtctgggca

SEQ ID NO: 1409137 - DNA, 15 bp, Homo sapiens
aattctagtctgggc

SEQ ID NO: 1409138 - DNA, 15 bp, Homo sapiens
gaattctagtctggg

SEQ ID NO: 1409139 - DNA, 15 bp, Homo sapiens
tgaattctagtctgg

SEQ ID NO: 1409140 - DNA, 15 bp, Homo sapiens
ttgaattctagtctg

SEQ ID NO: 1409141 - DNA, 15 bp, Homo sapiens
attgaattctagtct

SEQ ID NO: 1409142 - DNA, 15 bp, Homo sapiens
aattgaattctagtc

SEQ ID NO: 1409143 - DNA, 15 bp, Homo sapiens
aaattgaattctagt

SEQ ID NO: 1409144 - DNA, 15 bp, Homo sapiens
aaaattgaattctag

SEQ ID NO: 1409145 - DNA, 15 bp, Homo sapiens
aaaaattgaattcta

SEQ ID NO: 1409146 - DNA, 15 bp, Homo sapiens
caaaaattgaattct

SEQ ID NO: 1409147 - DNA, 15 bp, Homo sapiens
tcaaaaattgaattc

SEQ ID NO: 1409148 - DNA, 15 bp, Homo sapiens
ctcaaaaattgaatt

SEQ ID NO: 1409149 - DNA, 15 bp, Homo sapiens
tctcaaaaattgaat

SEQ ID NO: 1409150 - DNA, 15 bp, Homo sapiens
ttctcaaaaattgaa

SEQ ID NO: 1409151 - DNA, 15 bp, Homo sapiens
attctcaaaaattga

SEQ ID NO: 1409152 - DNA, 15 bp, Homo sapiens
aattctcaaaaattg

SEQ ID NO: 1409153 - DNA, 15 bp, Homo sapiens
gaattctcaaaaatt

SEQ ID NO: 1409154 - DNA, 15 bp, Homo sapiens
tgaattctcaaaaat

SEQ ID NO: 1409155 - DNA, 15 bp, Homo sapiens
atgaattctcaaaaa

SEQ ID NO: 1409156 - DNA, 15 bp, Homo sapiens
aatgaattctcaaaa

SEQ ID NO: 1409157 - DNA, 15 bp, Homo sapiens
caatgaattctcaaa

SEQ ID NO: 1409158 - DNA, 15 bp, Homo sapiens
tcaatgaattctcaa

SEQ ID NO: 1409159 - DNA, 15 bp, Homo sapiens
gtcaatgaattctca

SEQ ID NO: 1409160 - DNA, 15 bp, Homo sapiens
tgtcaatgaattctc

SEQ ID NO: 1409161 - DNA, 15 bp, Homo sapiens
ttgtcaatgaattct

SEQ ID NO: 1409162 - DNA, 15 bp, Homo sapiens
gttgtcaatgaattc

SEQ ID NO: 1409163 - DNA, 15 bp, Homo sapiens
agttgtcaatgaatt

SEQ ID NO: 1409164 - DNA, 15 bp, Homo sapiens
gagttgtcaatgaat

SEQ ID NO: 1409165 - DNA, 15 bp, Homo sapiens
agagttgtcaatgaa

SEQ ID NO: 1409166 - DNA, 15 bp, Homo sapiens
aagagttgtcaatga

SEQ ID NO: 1409167 - DNA, 15 bp, Homo sapiens
taagagttgtcaatg

SEQ ID NO: 1409168 - DNA, 15 bp, Homo sapiens
gtaagagttgtcaat

SEQ ID NO: 1409169 - DNA, 15 bp, Homo sapiens
agtaagagttgtcaa

SEQ ID NO: 1409170 - DNA, 15 bp, Homo sapiens
aagtaagagttgtca

SEQ ID NO: 1409171 - DNA, 15 bp, Homo sapiens
taagtaagagttgtc

SEQ ID NO: 1409172 - DNA, 15 bp, Homo sapiens
ttaagtaagagttgt

SEQ ID NO: 1409173 - DNA, 15 bp, Homo sapiens
tttaagtaagagttg

SEQ ID NO: 1409174 - DNA, 15 bp, Homo sapiens
ttttaagtaagagtt

SEQ ID NO: 1409175 - DNA, 15 bp, Homo sapiens
attttaagtaagagt

SEQ ID NO: 1409176 - DNA, 15 bp, Homo sapiens
tattttaagtaagag

SEQ ID NO: 1409177 - DNA, 15 bp, Homo sapiens
ttattttaagtaaga

SEQ ID NO: 1409178 - DNA, 15 bp, Homo sapiens
cttattttaagtaag

SEQ ID NO: 1409179 - DNA, 15 bp, Homo sapiens
ccttattttaagtaa

SEQ ID NO: 1409180 - DNA, 15 bp, Homo sapiens
accttattttaagta

SEQ ID NO: 1409181 - DNA, 15 bp, Homo sapiens
aaccttattttaagt

SEQ ID NO: 1409182 - DNA, 15 bp, Homo sapiens
caaccttattttaag

SEQ ID NO: 1409183 - DNA, 15 bp, Homo sapiens
gcaaccttattttaa

SEQ ID NO: 1409184 - DNA, 15 bp, Homo sapiens
agcaaccttatttta

SEQ ID NO: 1409185 - DNA, 15 bp, Homo sapiens
cagcaaccttatttt

SEQ ID NO: 1409186 - DNA, 15 bp, Homo sapiens
acagcaaccttattt

SEQ ID NO: 1409187 - DNA, 15 bp, Homo sapiens
tacagcaaccttatt

SEQ ID NO: 1409188 - DNA, 15 bp, Homo sapiens
agtacagcaacctta

SEQ ID NO: 1409189 - DNA, 15 bp, Homo sapiens
cagtacagcaacctt

SEQ ID NO: 1409190 - DNA, 15 bp, Homo sapiens
tcagtacagcaacct

SEQ ID NO: 1409191 - DNA, 15 bp, Homo sapiens
atcagtacagcaacc

SEQ ID NO: 1409192 - DNA, 15 bp, Homo sapiens
aaaaaaaatctggaa

SEQ ID NO: 1409193 - DNA, 15 bp, Homo sapiens
taaaaaaaatctgga

SEQ ID NO: 1409194 - DNA, 15 bp, Homo sapiens
ttaaaaaaaatctgg

SEQ ID NO: 1409195 - DNA, 15 bp, Homo sapiens
attaaaaaaaatctg

SEQ ID NO: 1409196 - DNA, 15 bp, Homo sapiens
gattaaaaaaaatct

SEQ ID NO: 1409197 - DNA, 15 bp, Homo sapiens
agattaaaaaaaatc

SEQ ID NO: 1409198 - DNA, 15 bp, Homo sapiens
gagattaaaaaaaat

SEQ ID NO: 1409199 - DNA, 15 bp, Homo sapiens
ggagattaaaaaaaa

SEQ ID NO: 1409200 - DNA, 15 bp, Homo sapiens
aggagattaaaaaaa

SEQ ID NO: 1409201 - DNA, 15 bp, Homo sapiens
taggagattaaaaaa

SEQ ID NO: 1409202 - DNA, 15 bp, Homo sapiens
gtaggagattaaaaa

SEQ ID NO: 1409203 - DNA, 15 bp, Homo sapiens
agtaggagattaaaa

SEQ ID NO: 1409204 - DNA, 15 bp, Homo sapiens
aagtaggagattaaa

SEQ ID NO: 1409205 - DNA, 15 bp, Homo sapiens
gaagtaggagattaa

SEQ ID NO: 1409206 - DNA, 15 bp, Homo sapiens
agaagtaggagatta

SEQ ID NO: 1409207 - DNA, 15 bp, Homo sapiens
cagaagtaggagatt

SEQ ID NO: 1409208 - DNA, 15 bp, Homo sapiens
gcagaagtaggagat

SEQ ID NO: 1409209 - DNA, 15 bp, Homo sapiens
agcagaagtaggaga

SEQ ID NO: 1409210 - DNA, 15 bp, Homo sapiens
tagcagaagtaggag

SEQ ID NO: 1409211 - DNA, 15 bp, Homo sapiens
atagcagaagtagga

SEQ ID NO: 1409212 - DNA, 15 bp, Homo sapiens
gatagcagaagtagg

SEQ ID NO: 1409213 - DNA, 15 bp, Homo sapiens
agatagcagaagtag

SEQ ID NO: 1409214 - DNA, 15 bp, Homo sapiens
aagatagcagaagta

SEQ ID NO: 1409215 - DNA, 15 bp, Homo sapiens
aaagatagcagaagt

SEQ ID NO: 1409216 - DNA, 15 bp, Homo sapiens
caaagatagcagaag

SEQ ID NO: 1409217 - DNA, 15 bp, Homo sapiens
tcaaagatagcagaa

SEQ ID NO: 1409218 - DNA, 15 bp, Homo sapiens
ctcaaagatagcaga

SEQ ID NO: 1409219 - DNA, 15 bp, Homo sapiens
gctcaaagatagcag

SEQ ID NO: 1409220 - DNA, 15 bp, Homo sapiens
tgctcaaagatagca

SEQ ID NO: 1409221 - DNA, 15 bp, Homo sapiens
ttgctcaaagatagc

SEQ ID NO: 1409222 - DNA, 15 bp, Homo sapiens
attgctcaaagatag

SEQ ID NO: 1409223 - DNA, 15 bp, Homo sapiens
gattgctcaaagata

SEQ ID NO: 1409224 - DNA, 15 bp, Homo sapiens
agattgctcaaagat

SEQ ID NO: 1409225 - DNA, 15 bp, Homo sapiens
cagattgctcaaaga

SEQ ID NO: 1409226 - DNA, 15 bp, Homo sapiens
ccagattgctcaaag

SEQ ID NO: 1409227 - DNA, 15 bp, Homo sapiens
cccagattgctcaaa

SEQ ID NO: 1409228 - DNA, 15 bp, Homo sapiens
gcccagattgctcaa

SEQ ID NO: 1409229 - DNA, 15 bp, Homo sapiens
tgcccagattgctca

SEQ ID NO: 1409230 - DNA, 15 bp, Homo sapiens
gtgcccagattgctc

SEQ ID NO: 1409231 - DNA, 15 bp, Homo sapiens
agtgcccagattgct

SEQ ID NO: 1409232 - DNA, 15 bp, Homo sapiens
aagtgcccagattgc

SEQ ID NO: 1409233 - DNA, 15 bp, Homo sapiens
aaagtgcccagattg

SEQ ID NO: 1409234 - DNA, 15 bp, Homo sapiens
aaaagtgcccagatt

SEQ ID NO: 1409235 - DNA, 15 bp, Homo sapiens
taaaagtgcccagat

SEQ ID NO: 1409236 - DNA, 15 bp, Homo sapiens
ttaaaagtgcccaga

SEQ ID NO: 1409237 - DNA, 15 bp, Homo sapiens
tttaaaagtgcccag

SEQ ID NO: 1409238 - DNA, 15 bp, Homo sapiens
ttttaaaagtgccca

SEQ ID NO: 1409239 - DNA, 15 bp, Homo sapiens
tttttaaaagtgccc

SEQ ID NO: 1409240 - DNA, 15 bp, Homo sapiens
atttttaaaagtgcc

SEQ ID NO: 1409241 - DNA, 15 bp, Homo sapiens
tatttttaaaagtgc

SEQ ID NO: 1409242 - DNA, 15 bp, Homo sapiens
ctatttttaaaagtg

SEQ ID NO: 1409243 - DNA, 15 bp, Homo sapiens
tctatttttaaaagt

SEQ ID NO: 1409244 - DNA, 15 bp, Homo sapiens
ctctatttttaaaag

SEQ ID NO: 1409245 - DNA, 15 bp, Homo sapiens
ttctctatttttaaa

SEQ ID NO: 1409246 - DNA, 15 bp, Homo sapiens
tttctctatttttaa

SEQ ID NO: 1409247 - DNA, 15 bp, Homo sapiens
atttctctattttta

SEQ ID NO: 1409248 - DNA, 15 bp, Homo sapiens
catttctctattttt

SEQ ID NO: 1409249 - DNA, 15 bp, Homo sapiens
tcatttctctatttt

SEQ ID NO: 1409250 - DNA, 15 bp, Homo sapiens
ctcatttctctattt

SEQ ID NO: 1409251 - DNA, 15 bp, Homo sapiens
actcatttctctatt

SEQ ID NO: 1409252 - DNA, 15 bp, Homo sapiens
cactcatttctctat

SEQ ID NO: 1409253 - DNA, 15 bp, Homo sapiens
tcactcatttctcta

SEQ ID NO: 1409254 - DNA, 15 bp, Homo sapiens
ttcactcatttctct

SEQ ID NO: 1409255 - DNA, 15 bp, Homo sapiens
attcactcatttctc

SEQ ID NO: 1409256 - DNA, 15 bp, Homo sapiens
cattcactcatttct

SEQ ID NO: 1409257 - DNA, 15 bp, Homo sapiens
acattcactcatttc

SEQ ID NO: 1409258 - DNA, 15 bp, Homo sapiens
cacattcactcattt

SEQ ID NO: 1409259 - DNA, 15 bp, Homo sapiens
ccacattcactcatt

SEQ ID NO: 1409260 - DNA, 15 bp, Homo sapiens
cccacattcactcat

SEQ ID NO: 1409261 - DNA, 15 bp, Homo sapiens
acccacattcactca

SEQ ID NO: 1409262 - DNA, 15 bp, Homo sapiens
cacccacattcactc

SEQ ID NO: 1409263 - DNA, 15 bp, Homo sapiens
tcacccacattcact

SEQ ID NO: 1409264 - DNA, 15 bp, Homo sapiens
atcacccacattcac

SEQ ID NO: 1409265 - DNA, 15 bp, Homo sapiens
gatcacccacattca

SEQ ID NO: 1409266 - DNA, 15 bp, Homo sapiens
agatcacccacattc

SEQ ID NO: 1409267 - DNA, 15 bp, Homo sapiens
cagatcacccacatt

SEQ ID NO: 1409268 - DNA, 15 bp, Homo sapiens
gcagatcacccacat

SEQ ID NO: 1409269 - DNA, 15 bp, Homo sapiens
agcagatcacccaca

SEQ ID NO: 1409270 - DNA, 15 bp, Homo sapiens
aagcagatcacccac

SEQ ID NO: 1409271 - DNA, 15 bp, Homo sapiens
aaagcagatcaccca

SEQ ID NO: 1409272 - DNA, 15 bp, Homo sapiens
aaaagcagatcaccc

SEQ ID NO: 1409273 - DNA, 15 bp, Homo sapiens
taaaagcagatcacc

SEQ ID NO: 1409274 - DNA, 15 bp, Homo sapiens
ataaaagcagatcac

SEQ ID NO: 1409275 - DNA, 15 bp, Homo sapiens
gataaaagcagatca

SEQ ID NO: 1409276 - DNA, 15 bp, Homo sapiens
agataaaagcagatc

SEQ ID NO: 1409277 - DNA, 15 bp, Homo sapiens
tagataaaagcagat

SEQ ID NO: 1409278 - DNA, 15 bp, Homo sapiens
ttagataaaagcaga

SEQ ID NO: 1409279 - DNA, 15 bp, Homo sapiens
tttagataaaagcag

SEQ ID NO: 1409280 - DNA, 15 bp, Homo sapiens
atttagataaaagca

SEQ ID NO: 1409281 - DNA, 15 bp, Homo sapiens
catttagataaaagc

SEQ ID NO: 1409282 - DNA, 15 bp, Homo sapiens
gcatttagataaaag

SEQ ID NO: 1409283 - DNA, 15 bp, Homo sapiens
tgcatttagataaaa

SEQ ID NO: 1409284 - DNA, 15 bp, Homo sapiens
ttgcatttagataaa

SEQ ID NO: 1409285 - DNA, 15 bp, Homo sapiens
tttgcatttagataa

SEQ ID NO: 1409286 - DNA, 15 bp, Homo sapiens
atttgcatttagata

SEQ ID NO: 1409287 - DNA, 15 bp, Homo sapiens
tatttgcatttagat

SEQ ID NO: 1409288 - DNA, 15 bp, Homo sapiens
ttatttgcatttaga

SEQ ID NO: 1409289 - DNA, 15 bp, Homo sapiens
cttatttgcatttag

SEQ ID NO: 1409290 - DNA, 15 bp, Homo sapiens
ccttatttgcattta

SEQ ID NO: 1409291 - DNA, 15 bp, Homo sapiens
tccttatttgcattt

SEQ ID NO: 1409292 - DNA, 15 bp, Homo sapiens
atccttatttgcatt

SEQ ID NO: 1409293 - DNA, 15 bp, Homo sapiens
catccttatttgcat

SEQ ID NO: 1409294 - DNA, 15 bp, Homo sapiens
acatccttatttgca

SEQ ID NO: 1409295 - DNA, 15 bp, Homo sapiens
cacatccttatttgc

SEQ ID NO: 1409296 - DNA, 15 bp, Homo sapiens
acacatccttatttg

SEQ ID NO: 1409297 - DNA, 15 bp, Homo sapiens
aacacatccttattt

SEQ ID NO: 1409298 - DNA, 15 bp, Homo sapiens
gaacacatccttatt

SEQ ID NO: 1409299 - DNA, 15 bp, Homo sapiens
agaacacatccttat

SEQ ID NO: 1409300 - DNA, 15 bp, Homo sapiens
gagaacacatcctta

SEQ ID NO: 1409301 - DNA, 15 bp, Homo sapiens
agagaacacatcctt

SEQ ID NO: 1409302 - DNA, 15 bp, Homo sapiens
cagagaacacatcct

SEQ ID NO: 1409303 - DNA, 15 bp, Homo sapiens
tcagagaacacatcc

SEQ ID NO: 1409304 - DNA, 15 bp, Homo sapiens
ctcagagaacacatc

SEQ ID NO: 1409305 - DNA, 15 bp, Homo sapiens
tctcagagaacacat

SEQ ID NO: 1409306 - DNA, 15 bp, Homo sapiens
gtctcagagaacaca

SEQ ID NO: 1409307 - DNA, 15 bp, Homo sapiens
ggtctcagagaacac

SEQ ID NO: 1409308 - DNA, 15 bp, Homo sapiens
gggtctcagagaaca

SEQ ID NO: 1409309 - DNA, 15 bp, Homo sapiens
tgggtctcagagaac

SEQ ID NO: 1409310 - DNA, 15 bp, Homo sapiens
atgggtctcagagaa

SEQ ID NO: 1409311 - DNA, 15 bp, Homo sapiens
catgggtctcagaga

SEQ ID NO: 1409312 - DNA, 15 bp, Homo sapiens
tcatgggtctcagag

SEQ ID NO: 1409313 - DNA, 15 bp, Homo sapiens
atcatgggtctcaga

SEQ ID NO: 1409314 - DNA, 15 bp, Homo sapiens
gatcatgggtctcag

SEQ ID NO: 1409315 - DNA, 15 bp, Homo sapiens
tgatcatgggtctca

SEQ ID NO: 1409316 - DNA, 15 bp, Homo sapiens
ctgatcatgggtctc

SEQ ID NO: 1409317 - DNA, 15 bp, Homo sapiens
cctgatcatgggtct

SEQ ID NO: 1409318 - DNA, 15 bp, Homo sapiens
ccctgatcatgggtc

SEQ ID NO: 1409319 - DNA, 15 bp, Homo sapiens
cccctgatcatgggt

SEQ ID NO: 1409320 - DNA, 15 bp, Homo sapiens
tcccctgatcatggg

SEQ ID NO: 1409321 - DNA, 15 bp, Homo sapiens
atcccctgatcatgg

SEQ ID NO: 1409322 - DNA, 15 bp, Homo sapiens
catcccctgatcatg

SEQ ID NO: 1409323 - DNA, 15 bp, Homo sapiens
acatcccctgatcat

SEQ ID NO: 1409324 - DNA, 15 bp, Homo sapiens
cacatcccctgatca

SEQ ID NO: 1409325 - DNA, 15 bp, Homo sapiens
ccacatcccctgatc

SEQ ID NO: 1409326 - DNA, 15 bp, Homo sapiens
gccacatcccctgat

SEQ ID NO: 1409327 - DNA, 15 bp, Homo sapiens
cgccacatcccctga

SEQ ID NO: 1409328 - DNA, 15 bp, Homo sapiens
ccgccacatcccctg

SEQ ID NO: 1409329 - DNA, 15 bp, Homo sapiens
cccgccacatcccct

SEQ ID NO: 1409330 - DNA, 15 bp, Homo sapiens
ccccgccacatcccc

SEQ ID NO: 1409331 - DNA, 15 bp, Homo sapiens
cccccgccacatccc

SEQ ID NO: 1409332 - DNA, 15 bp, Homo sapiens
ccccccgccacatcc

SEQ ID NO: 1409333 - DNA, 15 bp, Homo sapiens
accccccgccacatc

SEQ ID NO: 1409334 - DNA, 15 bp, Homo sapiens
caccccccgccacat

SEQ ID NO: 1409335 - DNA, 15 bp, Homo sapiens
ccaccccccgccaca

SEQ ID NO: 1409336 - DNA, 15 bp, Homo sapiens
gccaccccccgccac

SEQ ID NO: 1409337 - DNA, 15 bp, Homo sapiens
agccaccccccgcca

SEQ ID NO: 1409338 - DNA, 15 bp, Homo sapiens
tagccaccccccgcc

SEQ ID NO: 1409339 - DNA, 15 bp, Homo sapiens
ctagccaccccccgc

SEQ ID NO: 1409340 - DNA, 15 bp, Homo sapiens
tctagccaccccccg

SEQ ID NO: 1409341 - DNA, 15 bp, Homo sapiens
ctctagccacccccc

SEQ ID NO: 1409342 - DNA, 15 bp, Homo sapiens
cctctagccaccccc

SEQ ID NO: 1409343 - DNA, 15 bp, Homo sapiens
ccctctagccacccc

SEQ ID NO: 1409344 - DNA, 15 bp, Homo sapiens
tccctctagccaccc

SEQ ID NO: 1409345 - DNA, 15 bp, Homo sapiens
ctccctctagccacc

SEQ ID NO: 1409346 - DNA, 15 bp, Homo sapiens
tctccctctagccac

SEQ ID NO: 1409347 - DNA, 15 bp, Homo sapiens
ttctccctctagcca

SEQ ID NO: 1409348 - DNA, 15 bp, Homo sapiens
tttctccctctagcc

SEQ ID NO: 1409349 - DNA, 15 bp, Homo sapiens
ttttctccctctagc

SEQ ID NO: 1409350 - DNA, 15 bp, Homo sapiens
tttttctccctctag

SEQ ID NO: 1409351 - DNA, 15 bp, Homo sapiens
ctttttctccctcta

SEQ ID NO: 1409352 - DNA, 15 bp, Homo sapiens
cctttttctccctct

SEQ ID NO: 1409353 - DNA, 15 bp, Homo sapiens
tcctttttctccctc

SEQ ID NO: 1409354 - DNA, 15 bp, Homo sapiens
ttcctttttctccct

SEQ ID NO: 1409355 - DNA, 15 bp, Homo sapiens
tttcctttttctccc

SEQ ID NO: 1409356 - DNA, 15 bp, Homo sapiens
atttcctttttctcc

SEQ ID NO: 1409357 - DNA, 15 bp, Homo sapiens
catttcctttttctc

SEQ ID NO: 1409358 - DNA, 15 bp, Homo sapiens
acatttcctttttct

SEQ ID NO: 1409359 - DNA, 15 bp, Homo sapiens
gacatttcctttttc

SEQ ID NO: 1409360 - DNA, 15 bp, Homo sapiens
agacatttccttttt

SEQ ID NO: 1409361 - DNA, 15 bp, Homo sapiens
aagacatttcctttt

SEQ ID NO: 1409362 - DNA, 15 bp, Homo sapiens
caagacatttccttt

SEQ ID NO: 1409363 - DNA, 15 bp, Homo sapiens
acaagacatttcctt

SEQ ID NO: 1409364 - DNA, 15 bp, Homo sapiens
cacaagacatttcct

SEQ ID NO: 1409365 - DNA, 15 bp, Homo sapiens
acacaagacatttcc

SEQ ID NO: 1409366 - DNA, 15 bp, Homo sapiens
aacacaagacatttc

SEQ ID NO: 1409367 - DNA, 15 bp, Homo sapiens
caacacaagacattt

SEQ ID NO: 1409368 - DNA, 15 bp, Homo sapiens
acaacacaagacatt

SEQ ID NO: 1409369 - DNA, 15 bp, Homo sapiens
aacaacacaagacat

SEQ ID NO: 1409370 - DNA, 15 bp, Homo sapiens
aaacaacacaagaca

SEQ ID NO: 1409371 - DNA, 15 bp, Homo sapiens
aaaacaacacaagac

SEQ ID NO: 1409372 - DNA, 15 bp, Homo sapiens
caaaacaacacaaga

SEQ ID NO: 1409373 - DNA, 15 bp, Homo sapiens
acaaaacaacacaag

SEQ ID NO: 1409374 - DNA, 15 bp, Homo sapiens
aacaaaacaacacaa

SEQ ID NO: 1409375 - DNA, 15 bp, Homo sapiens
gaacaaaacaacaca

SEQ ID NO: 1409376 - DNA, 15 bp, Homo sapiens
ggaacaaaacaacac

SEQ ID NO: 1409377 - DNA, 15 bp, Homo sapiens
gggaacaaaacaaca

SEQ ID NO: 1409378 - DNA, 15 bp, Homo sapiens
ggggaacaaaacaac

SEQ ID NO: 1409379 - DNA, 15 bp, Homo sapiens
aggggaacaaaacaa

SEQ ID NO: 1409380 - DNA, 15 bp, Homo sapiens
caggggaacaaaaca

SEQ ID NO: 1409381 - DNA, 15 bp, Homo sapiens
gcaggggaacaaaac

SEQ ID NO: 1409382 - DNA, 15 bp, Homo sapiens
ggcaggggaacaaaa

SEQ ID NO: 1409383 - DNA, 15 bp, Homo sapiens
gggcaggggaacaaa

SEQ ID NO: 1409384 - DNA, 15 bp, Homo sapiens
agggcaggggaacaa

SEQ ID NO: 1409385 - DNA, 15 bp, Homo sapiens
gagggcaggggaaca

SEQ ID NO: 1409386 - DNA, 15 bp, Homo sapiens
ggagggcaggggaac

SEQ ID NO: 1409387 - DNA, 15 bp, Homo sapiens
aggagggcaggggaa

SEQ ID NO: 1409388 - DNA, 15 bp, Homo sapiens
aaggagggcagggga

SEQ ID NO: 1409389 - DNA, 15 bp, Homo sapiens
aaaggagggcagggg

SEQ ID NO: 1409390 - DNA, 15 bp, Homo sapiens
gaaaggagggcaggg

SEQ ID NO: 1409391 - DNA, 15 bp, Homo sapiens
agaaaggagggcagg

SEQ ID NO: 1409392 - DNA, 15 bp, Homo sapiens
gagaaaggagggcag

SEQ ID NO: 1409393 - DNA, 15 bp, Homo sapiens
tgagaaaggagggca

SEQ ID NO: 1409394 - DNA, 15 bp, Homo sapiens
ctgagaaaggagggc

SEQ ID NO: 1409395 - DNA, 15 bp, Homo sapiens
gctgagaaaggaggg

SEQ ID NO: 1409396 - DNA, 15 bp, Homo sapiens
tgctgagaaaggagg

SEQ ID NO: 1409397 - DNA, 15 bp, Homo sapiens
ctgctgagaaaggag

SEQ ID NO: 1409398 - DNA, 15 bp, Homo sapiens
gctgctgagaaagga

SEQ ID NO: 1409399 - DNA, 15 bp, Homo sapiens
agctgctgagaaagg

SEQ ID NO: 1409400 - DNA, 15 bp, Homo sapiens
aagctgctgagaaag

SEQ ID NO: 1409401 - DNA, 15 bp, Homo sapiens
aaagctgctgagaaa

SEQ ID NO: 1409402 - DNA, 15 bp, Homo sapiens
aaaagctgctgagaa

SEQ ID NO: 1409403 - DNA, 15 bp, Homo sapiens
aaaaagctgctgaga

SEQ ID NO: 1409404 - DNA, 15 bp, Homo sapiens
caaaaagctgctgag

SEQ ID NO: 1409405 - DNA, 15 bp, Homo sapiens
acaaaaagctgctga

SEQ ID NO: 1409406 - DNA, 15 bp, Homo sapiens
aacaaaaagctgctg

SEQ ID NO: 1409407 - DNA, 15 bp, Homo sapiens
taacaaaaagctgct

SEQ ID NO: 1409408 - DNA, 15 bp, Homo sapiens
ataacaaaaagctgc

SEQ ID NO: 1409409 - DNA, 15 bp, Homo sapiens
aataacaaaaagctg

SEQ ID NO: 1409410 - DNA, 15 bp, Homo sapiens
caataacaaaaagct

SEQ ID NO: 1409411 - DNA, 15 bp, Homo sapiens
acaataacaaaaagc

SEQ ID NO: 1409412 - DNA, 15 bp, Homo sapiens
aacaataacaaaaag

SEQ ID NO: 1409413 - DNA, 15 bp, Homo sapiens
caacaataacaaaaa

SEQ ID NO: 1409414 - DNA, 15 bp, Homo sapiens
acaacaataacaaaa

SEQ ID NO: 1409415 - DNA, 15 bp, Homo sapiens
aacaacaataacaaa

SEQ ID NO: 1409416 - DNA, 15 bp, Homo sapiens
caacaacaataacaa

SEQ ID NO: 1409417 - DNA, 15 bp, Homo sapiens
acaacaacaataaca

SEQ ID NO: 1409418 - DNA, 15 bp, Homo sapiens
aacaacaacaataac

SEQ ID NO: 1409419 - DNA, 15 bp, Homo sapiens
caacaacaacaataa

SEQ ID NO: 1409420 - DNA, 15 bp, Homo sapiens
gaacaacaacaacaa

SEQ ID NO: 1409421 - DNA, 15 bp, Homo sapiens
agaacaacaacaaca

SEQ ID NO: 1409422 - DNA, 15 bp, Homo sapiens
aagaacaacaacaac

SEQ ID NO: 1409423 - DNA, 15 bp, Homo sapiens
taagaacaacaacaa

SEQ ID NO: 1409424 - DNA, 15 bp, Homo sapiens
ctaagaacaacaaca

SEQ ID NO: 1409425 - DNA, 15 bp, Homo sapiens
tctaagaacaacaac

SEQ ID NO: 1409426 - DNA, 15 bp, Homo sapiens
gtctaagaacaacaa

SEQ ID NO: 1409427 - DNA, 15 bp, Homo sapiens
tgtctaagaacaaca

SEQ ID NO: 1409428 - DNA, 15 bp, Homo sapiens
ttgtctaagaacaac

SEQ ID NO: 1409429 - DNA, 15 bp, Homo sapiens
cttgtctaagaacaa

SEQ ID NO: 1409430 - DNA, 15 bp, Homo sapiens
acttgtctaagaaca

SEQ ID NO: 1409431 - DNA, 15 bp, Homo sapiens
cacttgtctaagaac

SEQ ID NO: 1409432 - DNA, 15 bp, Homo sapiens
gcacttgtctaagaa

SEQ ID NO: 1409433 - DNA, 15 bp, Homo sapiens
ggcacttgtctaaga

SEQ ID NO: 1409434 - DNA, 15 bp, Homo sapiens
aggcacttgtctaag

SEQ ID NO: 1409435 - DNA, 15 bp, Homo sapiens
gaggcacttgtctaa

SEQ ID NO: 1409436 - DNA, 15 bp, Homo sapiens
ggaggcacttgtcta

SEQ ID NO: 1409437 - DNA, 15 bp, Homo sapiens
aggaggcacttgtct

SEQ ID NO: 1409438 - DNA, 15 bp, Homo sapiens
caggaggcacttgtc

SEQ ID NO: 1409439 - DNA, 15 bp, Homo sapiens
ccaggaggcacttgt

SEQ ID NO: 1409440 - DNA, 15 bp, Homo sapiens
accaggaggcacttg

SEQ ID NO: 1409441 - DNA, 15 bp, Homo sapiens
caccaggaggcactt

SEQ ID NO: 1409442 - DNA, 15 bp, Homo sapiens
gcaccaggaggcact

SEQ ID NO: 1409443 - DNA, 15 bp, Homo sapiens
ggcaccaggaggcac

SEQ ID NO: 1409444 - DNA, 15 bp, Homo sapiens
aggcaccaggaggca

SEQ ID NO: 1409445 - DNA, 15 bp, Homo sapiens
caggcaccaggaggc

SEQ ID NO: 1409446 - DNA, 15 bp, Homo sapiens
gcaggcaccaggagg

SEQ ID NO: 1409447 - DNA, 15 bp, Homo sapiens
cgcaggcaccaggag

SEQ ID NO: 1409448 - DNA, 15 bp, Homo sapiens
ccgcaggcaccagga

SEQ ID NO: 1409449 - DNA, 15 bp, Homo sapiens
gccgcaggcaccagg

SEQ ID NO: 1409450 - DNA, 15 bp, Homo sapiens
tgccgcaggcaccag

SEQ ID NO: 1409451 - DNA, 15 bp, Homo sapiens
atgccgcaggcacca

SEQ ID NO: 1409452 - DNA, 15 bp, Homo sapiens
gatgccgcaggcacc

SEQ ID NO: 1409453 - DNA, 15 bp, Homo sapiens
ggatgccgcaggcac

SEQ ID NO: 1409454 - DNA, 15 bp, Homo sapiens
aggatgccgcaggca

SEQ ID NO: 1409455 - DNA, 15 bp, Homo sapiens
aaggatgccgcaggc

SEQ ID NO: 1409456 - DNA, 15 bp, Homo sapiens
gaaggatgccgcagg

SEQ ID NO: 1409457 - DNA, 15 bp, Homo sapiens
agaaggatgccgcag

SEQ ID NO: 1409458 - DNA, 15 bp, Homo sapiens
cagaaggatgccgca

SEQ ID NO: 1409459 - DNA, 15 bp, Homo sapiens
gcagaaggatgccgc

SEQ ID NO: 1409460 - DNA, 15 bp, Homo sapiens
ggcagaaggatgccg

SEQ ID NO: 1409461 - DNA, 15 bp, Homo sapiens
aggcagaaggatgcc

SEQ ID NO: 1409462 - DNA, 15 bp, Homo sapiens
caggcagaaggatgc

SEQ ID NO: 1409463 - DNA, 15 bp, Homo sapiens
acaggcagaaggatg

SEQ ID NO: 1409464 - DNA, 15 bp, Homo sapiens
aacaggcagaaggat

SEQ ID NO: 1409465 - DNA, 15 bp, Homo sapiens
aaacaggcagaagga

SEQ ID NO: 1409466 - DNA, 15 bp, Homo sapiens
gaaacaggcagaagg

SEQ ID NO: 1409467 - DNA, 15 bp, Homo sapiens
agaaacaggcagaag

SEQ ID NO: 1409468 - DNA, 15 bp, Homo sapiens
cagaaacaggcagaa

SEQ ID NO: 1409469 - DNA, 15 bp, Homo sapiens
acagaaacaggcaga

SEQ ID NO: 1409470 - DNA, 15 bp, Homo sapiens
tacagaaacaggcag

SEQ ID NO: 1409471 - DNA, 15 bp, Homo sapiens
ttacagaaacaggca

SEQ ID NO: 1409472 - DNA, 15 bp, Homo sapiens
cttacagaaacaggc

SEQ ID NO: 1409473 - DNA, 15 bp, Homo sapiens
gcttacagaaacagg

SEQ ID NO: 1409474 - DNA, 15 bp, Homo sapiens
tgcttacagaaacag

SEQ ID NO: 1409475 - DNA, 15 bp, Homo sapiens
ttgcttacagaaaca

SEQ ID NO: 1409476 - DNA, 15 bp, Homo sapiens
tttgcttacagaaac

SEQ ID NO: 1409477 - DNA, 15 bp, Homo sapiens
atttgcttacagaaa

SEQ ID NO: 1409478 - DNA, 15 bp, Homo sapiens
catttgcttacagaa

SEQ ID NO: 1409479 - DNA, 15 bp, Homo sapiens
gcatttgcttacaga

SEQ ID NO: 1409480 - DNA, 15 bp, Homo sapiens
ggcatttgcttacag

SEQ ID NO: 1409481 - DNA, 15 bp, Homo sapiens
tggcatttgcttaca

SEQ ID NO: 1409482 - DNA, 15 bp, Homo sapiens
gtggcatttgcttac

SEQ ID NO: 1409483 - DNA, 15 bp, Homo sapiens
tgtggcatttgctta

SEQ ID NO: 1409484 - DNA, 15 bp, Homo sapiens
ctgtggcatttgctt

SEQ ID NO: 1409485 - DNA, 15 bp, Homo sapiens
cctgtggcatttgct

SEQ ID NO: 1409486 - DNA, 15 bp, Homo sapiens
gcctgtggcatttgc

SEQ ID NO: 1409487 - DNA, 15 bp, Homo sapiens
ggcctgtggcatttg

SEQ ID NO: 1409488 - DNA, 15 bp, Homo sapiens
tggcctgtggcattt

SEQ ID NO: 1409489 - DNA, 15 bp, Homo sapiens
gtggcctgtggcatt

SEQ ID NO: 1409490 - DNA, 15 bp, Homo sapiens
ggtggcctgtggcat

SEQ ID NO: 1409491 - DNA, 15 bp, Homo sapiens
aggtggcctgtggca

SEQ ID NO: 1409492 - DNA, 15 bp, Homo sapiens
taggtggcctgtggc

SEQ ID NO: 1409493 - DNA, 15 bp, Homo sapiens
ataggtggcctgtgg

SEQ ID NO: 1409494 - DNA, 15 bp, Homo sapiens
tataggtggcctgtg

SEQ ID NO: 1409495 - DNA, 15 bp, Homo sapiens
ctataggtggcctgt

SEQ ID NO: 1409496 - DNA, 15 bp, Homo sapiens
gctataggtggcctg

SEQ ID NO: 1409497 - DNA, 15 bp, Homo sapiens
agctataggtggcct

SEQ ID NO: 1409498 - DNA, 15 bp, Homo sapiens
tagctataggtggcc

SEQ ID NO: 1409499 - DNA, 15 bp, Homo sapiens
gtagctataggtggc

SEQ ID NO: 1409500 - DNA, 15 bp, Homo sapiens
tgtagctataggtgg

SEQ ID NO: 1409501 - DNA, 15 bp, Homo sapiens
atgtagctataggtg

SEQ ID NO: 1409502 - DNA, 15 bp, Homo sapiens
tatgtagctataggt

SEQ ID NO: 1409503 - DNA, 15 bp, Homo sapiens
gtatgtagctatagg

SEQ ID NO: 1409504 - DNA, 15 bp, Homo sapiens
agtatgtagctatag

SEQ ID NO: 1409505 - DNA, 15 bp, Homo sapiens
gagtatgtagctata

SEQ ID NO: 1409506 - DNA, 15 bp, Homo sapiens
ggagtatgtagctat

SEQ ID NO: 1409507 - DNA, 15 bp, Homo sapiens
aggagtatgtagcta

SEQ ID NO: 1409508 - DNA, 15 bp, Homo sapiens
caggagtatgtagct

SEQ ID NO: 1409509 - DNA, 15 bp, Homo sapiens
ccaggagtatgtagc

SEQ ID NO: 1409510 - DNA, 15 bp, Homo sapiens
gccaggagtatgtag

SEQ ID NO: 1409511 - DNA, 15 bp, Homo sapiens
tgccaggagtatgta

SEQ ID NO: 1409512 - DNA, 15 bp, Homo sapiens
atgccaggagtatgt

SEQ ID NO: 1409513 - DNA, 15 bp, Homo sapiens
aatgccaggagtatg

SEQ ID NO: 1409514 - DNA, 15 bp, Homo sapiens
caatgccaggagtat

SEQ ID NO: 1409515 - DNA, 15 bp, Homo sapiens
gcaatgccaggagta

SEQ ID NO: 1409516 - DNA, 15 bp, Homo sapiens
tgcaatgccaggagt

SEQ ID NO: 1409517 - DNA, 15 bp, Homo sapiens
gtgcaatgccaggag

SEQ ID NO: 1409518 - DNA, 15 bp, Homo sapiens
agtgcaatgccagga

SEQ ID NO: 1409519 - DNA, 15 bp, Homo sapiens
aagtgcaatgccagg

SEQ ID NO: 1409520 - DNA, 15 bp, Homo sapiens
aaagtgcaatgccag

SEQ ID NO: 1409521 - DNA, 15 bp, Homo sapiens
aaaagtgcaatgcca

SEQ ID NO: 1409522 - DNA, 15 bp, Homo sapiens
aaaaagtgcaatgcc

SEQ ID NO: 1409523 - DNA, 15 bp, Homo sapiens
taaaaagtgcaatgc

SEQ ID NO: 1409524 - DNA, 15 bp, Homo sapiens
ttaaaaagtgcaatg

SEQ ID NO: 1409525 - DNA, 15 bp, Homo sapiens
gttaaaaagtgcaat

SEQ ID NO: 1409526 - DNA, 15 bp, Homo sapiens
ggttaaaaagtgcaa

SEQ ID NO: 1409527 - DNA, 15 bp, Homo sapiens
aggttaaaaagtgca

SEQ ID NO: 1409528 - DNA, 15 bp, Homo sapiens
aaggttaaaaagtgc

SEQ ID NO: 1409529 - DNA, 15 bp, Homo sapiens
caaggttaaaaagtg

SEQ ID NO: 1409530 - DNA, 15 bp, Homo sapiens
gcaaggttaaaaagt

SEQ ID NO: 1409531 - DNA, 15 bp, Homo sapiens
agcaaggttaaaaag

SEQ ID NO: 1409532 - DNA, 15 bp, Homo sapiens
cagcaaggttaaaaa

SEQ ID NO: 1409533 - DNA, 15 bp, Homo sapiens
tcagcaaggttaaaa

SEQ ID NO: 1409534 - DNA, 15 bp, Homo sapiens
gtcagcaaggttaaa

SEQ ID NO: 1409535 - DNA, 15 bp, Homo sapiens
tgtcagcaaggttaa

SEQ ID NO: 1409536 - DNA, 15 bp, Homo sapiens
atgtcagcaaggtta

SEQ ID NO: 1409537 - DNA, 15 bp, Homo sapiens
gatgtcagcaaggtt

SEQ ID NO: 1409538 - DNA, 15 bp, Homo sapiens
ggatgtcagcaaggt

SEQ ID NO: 1409539 - DNA, 15 bp, Homo sapiens
tggatgtcagcaagg

SEQ ID NO: 1409540 - DNA, 15 bp, Homo sapiens
ttggatgtcagcaag

SEQ ID NO: 1409541 - DNA, 15 bp, Homo sapiens
tttggatgtcagcaa

SEQ ID NO: 1409542 - DNA, 15 bp, Homo sapiens
atttggatgtcagca

SEQ ID NO: 1409543 - DNA, 15 bp, Homo sapiens
tatttggatgtcagc

SEQ ID NO: 1409544 - DNA, 15 bp, Homo sapiens
ctatttggatgtcag

SEQ ID NO: 1409545 - DNA, 15 bp, Homo sapiens
tctatttggatgtca

SEQ ID NO: 1409546 - DNA, 15 bp, Homo sapiens
ttctatttggatgtc

SEQ ID NO: 1409547 - DNA, 15 bp, Homo sapiens
cttctatttggatgt

SEQ ID NO: 1409548 - DNA, 15 bp, Homo sapiens
tcttctatttggatg

SEQ ID NO: 1409549 - DNA, 15 bp, Homo sapiens
atcttctatttggat

SEQ ID NO: 1409550 - DNA, 15 bp, Homo sapiens
tatcttctatttgga

SEQ ID NO: 1409551 - DNA, 15 bp, Homo sapiens
ctatcttctatttgg

SEQ ID NO: 1409552 - DNA, 15 bp, Homo sapiens
cctatcttctatttg

SEQ ID NO: 1409553 - DNA, 15 bp, Homo sapiens
tcctatcttctattt

SEQ ID NO: 1409554 - DNA, 15 bp, Homo sapiens
gtcctatcttctatt

SEQ ID NO: 1409555 - DNA, 15 bp, Homo sapiens
agtcctatcttctat

SEQ ID NO: 1409556 - DNA, 15 bp, Homo sapiens
tagtcctatcttcta

SEQ ID NO: 1409557 - DNA, 15 bp, Homo sapiens
atagtcctatcttct

SEQ ID NO: 1409558 - DNA, 15 bp, Homo sapiens
gatagtcctatcttc

SEQ ID NO: 1409559 - DNA, 15 bp, Homo sapiens
agatagtcctatctt

SEQ ID NO: 1409560 - DNA, 15 bp, Homo sapiens
tagatagtcctatct

SEQ ID NO: 1409561 - DNA, 15 bp, Homo sapiens
ttagatagtcctatc

SEQ ID NO: 1409562 - DNA, 15 bp, Homo sapiens
cttagatagtcctat

SEQ ID NO: 1409563 - DNA, 15 bp, Homo sapiens
gcttagatagtccta

SEQ ID NO: 1409564 - DNA, 15 bp, Homo sapiens
ggcttagatagtcct

SEQ ID NO: 1409565 - DNA, 15 bp, Homo sapiens
gggcttagatagtcc

SEQ ID NO: 1409566 - DNA, 15 bp, Homo sapiens
agggcttagatagtc

SEQ ID NO: 1409567 - DNA, 15 bp, Homo sapiens
tagggcttagatagt

SEQ ID NO: 1409568 - DNA, 15 bp, Homo sapiens
ctagggcttagatag

SEQ ID NO: 1409569 - DNA, 15 bp, Homo sapiens
cctagggcttagata

SEQ ID NO: 1409570 - DNA, 15 bp, Homo sapiens
acctagggcttagat

SEQ ID NO: 1409571 - DNA, 15 bp, Homo sapiens
aacctagggcttaga

SEQ ID NO: 1409572 - DNA, 15 bp, Homo sapiens
aaacctagggcttag

SEQ ID NO: 1409573 - DNA, 15 bp, Homo sapiens
gaaacctagggctta

SEQ ID NO: 1409574 - DNA, 15 bp, Homo sapiens
agaaacctagggctt

SEQ ID NO: 1409575 - DNA, 15 bp, Homo sapiens
aagaaacctagggct

SEQ ID NO: 1409576 - DNA, 15 bp, Homo sapiens
aaagaaacctagggc

SEQ ID NO: 1409577 - DNA, 15 bp, Homo sapiens
aaaagaaacctaggg

SEQ ID NO: 1409578 - DNA, 15 bp, Homo sapiens
aaaaagaaacctagg

SEQ ID NO: 1409579 - DNA, 15 bp, Homo sapiens
taaaaagaaacctag

SEQ ID NO: 1409580 - DNA, 15 bp, Homo sapiens
ttaaaaagaaaccta

SEQ ID NO: 1409581 - DNA, 15 bp, Homo sapiens
tttaaaaagaaacct

SEQ ID NO: 1409582 - DNA, 15 bp, Homo sapiens
atttaaaaagaaacc

SEQ ID NO: 1409583 - DNA, 15 bp, Homo sapiens
aatttaaaaagaaac

SEQ ID NO: 1409584 - DNA, 15 bp, Homo sapiens
taatttaaaaagaaa

SEQ ID NO: 1409585 - DNA, 15 bp, Homo sapiens
ttaatttaaaaagaa

SEQ ID NO: 1409586 - DNA, 15 bp, Homo sapiens
cttaatttaaaaaga

SEQ ID NO: 1409587 - DNA, 15 bp, Homo sapiens
tcttaatttaaaaag

SEQ ID NO: 1409588 - DNA, 15 bp, Homo sapiens
ttcttaatttaaaaa

SEQ ID NO: 1409589 - DNA, 15 bp, Homo sapiens
tttcttaatttaaaa

SEQ ID NO: 1409590 - DNA, 15 bp, Homo sapiens
atttcttaatttaaa

SEQ ID NO: 1409591 - DNA, 15 bp, Homo sapiens
tatttcttaatttaa

SEQ ID NO: 1409592 - DNA, 15 bp, Homo sapiens
ttatttcttaattta

SEQ ID NO: 1409593 - DNA, 15 bp, Homo sapiens
attatttcttaattt

SEQ ID NO: 1409594 - DNA, 15 bp, Homo sapiens
tattatttcttaatt

SEQ ID NO: 1409595 - DNA, 15 bp, Homo sapiens
ttattatttcttaat

SEQ ID NO: 1409596 - DNA, 15 bp, Homo sapiens
gttattatttcttaa

SEQ ID NO: 1409597 - DNA, 15 bp, Homo sapiens
tgttattatttctta

SEQ ID NO: 1409598 - DNA, 15 bp, Homo sapiens
ttgttattatttctt

SEQ ID NO: 1409599 - DNA, 15 bp, Homo sapiens
attgttattatttct

SEQ ID NO: 1409600 - DNA, 15 bp, Homo sapiens
aattgttattatttc

SEQ ID NO: 1409601 - DNA, 15 bp, Homo sapiens
taattgttattattt

SEQ ID NO: 1409602 - DNA, 15 bp, Homo sapiens
ttaattgttattatt

SEQ ID NO: 1409603 - DNA, 15 bp, Homo sapiens
tttaattgttattat

SEQ ID NO: 1409604 - DNA, 15 bp, Homo sapiens
ctttaattgttatta

SEQ ID NO: 1409605 - DNA, 15 bp, Homo sapiens
cctttaattgttatt

SEQ ID NO: 1409606 - DNA, 15 bp, Homo sapiens
ccctttaattgttat

SEQ ID NO: 1409607 - DNA, 15 bp, Homo sapiens
gccctttaattgtta

SEQ ID NO: 1409608 - DNA, 15 bp, Homo sapiens
tgccctttaattgtt

SEQ ID NO: 1409609 - DNA, 15 bp, Homo sapiens
ttgccctttaattgt

SEQ ID NO: 1409610 - DNA, 15 bp, Homo sapiens
tttgccctttaattg

SEQ ID NO: 1409611 - DNA, 15 bp, Homo sapiens
ttttgccctttaatt

SEQ ID NO: 1409612 - DNA, 15 bp, Homo sapiens
tttttgccctttaat

SEQ ID NO: 1409613 - DNA, 15 bp, Homo sapiens
ttttttgccctttaa

SEQ ID NO: 1409614 - DNA, 15 bp, Homo sapiens
gttttttgcccttta

SEQ ID NO: 1409615 - DNA, 15 bp, Homo sapiens
tgttttttgcccttt

SEQ ID NO: 1409616 - DNA, 15 bp, Homo sapiens
gtgttttttgccctt

SEQ ID NO: 1409617 - DNA, 15 bp, Homo sapiens
agtgttttttgccct

SEQ ID NO: 1409618 - DNA, 15 bp, Homo sapiens
cagtgttttttgccc

SEQ ID NO: 1409619 - DNA, 15 bp, Homo sapiens
acagtgttttttgcc

SEQ ID NO: 1409620 - DNA, 15 bp, Homo sapiens
tacagtgttttttgc

SEQ ID NO: 1409621 - DNA, 15 bp, Homo sapiens
atacagtgttttttg

SEQ ID NO: 1409622 - DNA, 15 bp, Homo sapiens
gatacagtgtttttt

SEQ ID NO: 1409623 - DNA, 15 bp, Homo sapiens
tgatacagtgttttt

SEQ ID NO: 1409624 - DNA, 15 bp, Homo sapiens
ctgatacagtgtttt

SEQ ID NO: 1409625 - DNA, 15 bp, Homo sapiens
gctgatacagtgttt

SEQ ID NO: 1409626 - DNA, 15 bp, Homo sapiens
tgctgatacagtgtt

SEQ ID NO: 1409627 - DNA, 15 bp, Homo sapiens
atgctgatacagtgt

SEQ ID NO: 1409628 - DNA, 15 bp, Homo sapiens
tatgctgatacagtg

SEQ ID NO: 1409629 - DNA, 15 bp, Homo sapiens
ctatgctgatacagt

SEQ ID NO: 1409630 - DNA, 15 bp, Homo sapiens
gctatgctgatacag

SEQ ID NO: 1409631 - DNA, 15 bp, Homo sapiens
ggctatgctgataca

SEQ ID NO: 1409632 - DNA, 15 bp, Homo sapiens
aggctatgctgatac

SEQ ID NO: 1409633 - DNA, 15 bp, Homo sapiens
aaggctatgctgata

SEQ ID NO: 1409634 - DNA, 15 bp, Homo sapiens
aaaggctatgctgat

SEQ ID NO: 1409635 - DNA, 15 bp, Homo sapiens
gaaaggctatgctga

SEQ ID NO: 1409636 - DNA, 15 bp, Homo sapiens
agaaaggctatgctg

SEQ ID NO: 1409637 - DNA, 15 bp, Homo sapiens
cagaaaggctatgct

SEQ ID NO: 1409638 - DNA, 15 bp, Homo sapiens
acagaaaggctatgc

SEQ ID NO: 1409639 - DNA, 15 bp, Homo sapiens
tacagaaaggctatg

SEQ ID NO: 1409640 - DNA, 15 bp, Homo sapiens
atacagaaaggctat

SEQ ID NO: 1409641 - DNA, 15 bp, Homo sapiens
aatacagaaaggcta

SEQ ID NO: 1409642 - DNA, 15 bp, Homo sapiens
aaatacagaaaggct

SEQ ID NO: 1409643 - DNA, 15 bp, Homo sapiens
taaatacagaaaggc

SEQ ID NO: 1409644 - DNA, 15 bp, Homo sapiens
ttaaatacagaaagg

SEQ ID NO: 1409645 - DNA, 15 bp, Homo sapiens
cttaaatacagaaag

SEQ ID NO: 1409646 - DNA, 15 bp, Homo sapiens
tcttaaatacagaaa

SEQ ID NO: 1409647 - DNA, 15 bp, Homo sapiens
ttcttaaatacagaa

SEQ ID NO: 1409648 - DNA, 15 bp, Homo sapiens
tttcttaaatacaga

SEQ ID NO: 1409649 - DNA, 15 bp, Homo sapiens
gtttcttaaatacag

SEQ ID NO: 1409650 - DNA, 15 bp, Homo sapiens
agtttcttaaataca

SEQ ID NO: 1409651 - DNA, 15 bp, Homo sapiens
aagtttcttaaatac

SEQ ID NO: 1409652 - DNA, 15 bp, Homo sapiens
taagtttcttaaata

SEQ ID NO: 1409653 - DNA, 15 bp, Homo sapiens
ttaagtttcttaaat

SEQ ID NO: 1409654 - DNA, 15 bp, Homo sapiens
cttaagtttcttaaa

SEQ ID NO: 1409655 - DNA, 15 bp, Homo sapiens
gcttaagtttcttaa

SEQ ID NO: 1409656 - DNA, 15 bp, Homo sapiens
tgcttaagtttctta

SEQ ID NO: 1409657 - DNA, 15 bp, Homo sapiens
ctgcttaagtttctt

SEQ ID NO: 1409658 - DNA, 15 bp, Homo sapiens
gctgcttaagtttct

SEQ ID NO: 1409659 - DNA, 15 bp, Homo sapiens
ggctgcttaagtttc

SEQ ID NO: 1409660 - DNA, 15 bp, Homo sapiens
cggctgcttaagttt

SEQ ID NO: 1409661 - DNA, 15 bp, Homo sapiens
ccggctgcttaagtt

SEQ ID NO: 1409662 - DNA, 15 bp, Homo sapiens
cccggctgcttaagt

SEQ ID NO: 1409663 - DNA, 15 bp, Homo sapiens
gcccggctgcttaag

SEQ ID NO: 1409664 - DNA, 15 bp, Homo sapiens
tgcccggctgcttaa

SEQ ID NO: 1409665 - DNA, 15 bp, Homo sapiens
atgcccggctgctta

SEQ ID NO: 1409666 - DNA, 15 bp, Homo sapiens
catgcccggctgctt

SEQ ID NO: 1409667 - DNA, 15 bp, Homo sapiens
ccatgcccggctgct

SEQ ID NO: 1409668 - DNA, 15 bp, Homo sapiens
accatgcccggctgc

SEQ ID NO: 1409669 - DNA, 15 bp, Homo sapiens
caccatgcccggctg

SEQ ID NO: 1409670 - DNA, 15 bp, Homo sapiens
tccgcctcggcctcc

SEQ ID NO: 1409671 - DNA, 15 bp, Homo sapiens
atccgcctcggcctc

SEQ ID NO: 1409672 - DNA, 15 bp, Homo sapiens
gatccgcctcggcct

SEQ ID NO: 1409673 - DNA, 15 bp, Homo sapiens
tgatccgcctcggcc

SEQ ID NO: 1409674 - DNA, 15 bp, Homo sapiens
atgatccgcctcggc

SEQ ID NO: 1409675 - DNA, 15 bp, Homo sapiens
tatgatccgcctcgg

SEQ ID NO: 1409676 - DNA, 15 bp, Homo sapiens
ttatgatccgcctcg

SEQ ID NO: 1409677 - DNA, 15 bp, Homo sapiens
cttatgatccgcctc

SEQ ID NO: 1409678 - DNA, 15 bp, Homo sapiens
ccttatgatccgcct

SEQ ID NO: 1409679 - DNA, 15 bp, Homo sapiens
accttatgatccgcc

SEQ ID NO: 1409680 - DNA, 15 bp, Homo sapiens
gaccttatgatccgc

SEQ ID NO: 1409681 - DNA, 15 bp, Homo sapiens
tgaccttatgatccg

SEQ ID NO: 1409682 - DNA, 15 bp, Homo sapiens
ctgaccttatgatcc

SEQ ID NO: 1409683 - DNA, 15 bp, Homo sapiens
cctgaccttatgatc

SEQ ID NO: 1409684 - DNA, 15 bp, Homo sapiens
tcctgaccttatgat

SEQ ID NO: 1409685 - DNA, 15 bp, Homo sapiens
ctcctgaccttatga

SEQ ID NO: 1409686 - DNA, 15 bp, Homo sapiens
tctcctgaccttatg

SEQ ID NO: 1409687 - DNA, 15 bp, Homo sapiens
atctcctgaccttat

SEQ ID NO: 1409688 - DNA, 15 bp, Homo sapiens
atggtcttgatctcc

SEQ ID NO: 1409689 - DNA, 15 bp, Homo sapiens
gatggtcttgatctc

SEQ ID NO: 1409690 - DNA, 15 bp, Homo sapiens
ggatggtcttgatct

SEQ ID NO: 1409691 - DNA, 15 bp, Homo sapiens
aggatggtcttgatc

SEQ ID NO: 1409692 - DNA, 15 bp, Homo sapiens
caggatggtcttgat

SEQ ID NO: 1409693 - DNA, 15 bp, Homo sapiens
ccaggatggtcttga

SEQ ID NO: 1409694 - DNA, 15 bp, Homo sapiens
gccaggatggtcttg

SEQ ID NO: 1409695 - DNA, 15 bp, Homo sapiens
agccaggatggtctt

SEQ ID NO: 1409696 - DNA, 15 bp, Homo sapiens
cgcccaccaccacac

SEQ ID NO: 1409697 - DNA, 15 bp, Homo sapiens
gcgcccaccaccaca

SEQ ID NO: 1409698 - DNA, 15 bp, Homo sapiens
gcctctcaggttcaa

SEQ ID NO: 1409699 - DNA, 15 bp, Homo sapiens
cgcctctcaggttca

SEQ ID NO: 1409700 - DNA, 15 bp, Homo sapiens
ccgcctctcaggttc

SEQ ID NO: 1409701 - DNA, 15 bp, Homo sapiens
tccgcctctcaggtt

SEQ ID NO: 1409702 - DNA, 15 bp, Homo sapiens
ctccgcctctcaggt

SEQ ID NO: 1409703 - DNA, 15 bp, Homo sapiens
cctccgcctctcagg

SEQ ID NO: 1409704 - DNA, 15 bp, Homo sapiens
acctccgcctctcag

SEQ ID NO: 1409705 - DNA, 15 bp, Homo sapiens
aacctccgcctctca

SEQ ID NO: 1409706 - DNA, 15 bp, Homo sapiens
caacctccgcctctc

SEQ ID NO: 1409707 - DNA, 15 bp, Homo sapiens
gcaacctccgcctct

SEQ ID NO: 1409708 - DNA, 15 bp, Homo sapiens
gtggtgcaattttgg

SEQ ID NO: 1409709 - DNA, 15 bp, Homo sapiens
agtggtgcaattttg

SEQ ID NO: 1409710 - DNA, 15 bp, Homo sapiens
cagtggtgcaatttt

SEQ ID NO: 1409711 - DNA, 15 bp, Homo sapiens
gcagtggtgcaattt

SEQ ID NO: 1409712 - DNA, 15 bp, Homo sapiens
tgcagtggtgcaatt

SEQ ID NO: 1409713 - DNA, 15 bp, Homo sapiens
tgtgcagtggtgcaa

SEQ ID NO: 1409714 - DNA, 15 bp, Homo sapiens
gtgtgcagtggtgca

SEQ ID NO: 1409715 - DNA, 15 bp, Homo sapiens
agtgtgcagtggtgc

SEQ ID NO: 1409716 - DNA, 15 bp, Homo sapiens
cagtgtgcagtggtg

SEQ ID NO: 1409717 - DNA, 15 bp, Homo sapiens
gcagtgtgcagtggt

SEQ ID NO: 1409718 - DNA, 15 bp, Homo sapiens
tgcagtgtgcagtgg

SEQ ID NO: 1409719 - DNA, 15 bp, Homo sapiens
gtgcagtgtgcagtg

SEQ ID NO: 1409720 - DNA, 15 bp, Homo sapiens
agtgcagtgtgcagt

SEQ ID NO: 1409721 - DNA, 15 bp, Homo sapiens
gagtgcagtgtgcag

SEQ ID NO: 1409722 - DNA, 15 bp, Homo sapiens
ggagtgcagtgtgca

SEQ ID NO: 1409723 - DNA, 15 bp, Homo sapiens
atggagtgcagtgtg

SEQ ID NO: 1409724 - DNA, 15 bp, Homo sapiens
gatggagtgcagtgt

SEQ ID NO: 1409725 - DNA, 15 bp, Homo sapiens
cgcccaggatggagt

SEQ ID NO: 1409726 - DNA, 15 bp, Homo sapiens
tcgcccaggatggag

SEQ ID NO: 1409727 - DNA, 15 bp, Homo sapiens
gtcgcccaggatgga

SEQ ID NO: 1409728 - DNA, 15 bp, Homo sapiens
tgtcgcccaggatgg

SEQ ID NO: 1409729 - DNA, 15 bp, Homo sapiens
ctgtcgcccaggatg

SEQ ID NO: 1409730 - DNA, 15 bp, Homo sapiens
actgtcgcccaggat

SEQ ID NO: 1409731 - DNA, 15 bp, Homo sapiens
gactgtcgcccagga

SEQ ID NO: 1409732 - DNA, 15 bp, Homo sapiens
agactgtcgcccagg

SEQ ID NO: 1409733 - DNA, 15 bp, Homo sapiens
cagactgtcgcccag

SEQ ID NO: 1409734 - DNA, 15 bp, Homo sapiens
tcagactgtcgccca

SEQ ID NO: 1409735 - DNA, 15 bp, Homo sapiens
ctcagactgtcgccc

SEQ ID NO: 1409736 - DNA, 15 bp, Homo sapiens
tctcagactgtcgcc

SEQ ID NO: 1409737 - DNA, 15 bp, Homo sapiens
gtctcagactgtcgc

SEQ ID NO: 1409738 - DNA, 15 bp, Homo sapiens
agtctcagactgtcg

SEQ ID NO: 1409739 - DNA, 15 bp, Homo sapiens
gagtctcagactgtc

SEQ ID NO: 1409740 - DNA, 15 bp, Homo sapiens
agagtctcagactgt

SEQ ID NO: 1409741 - DNA, 15 bp, Homo sapiens
cagagtctcagactg

SEQ ID NO: 1409742 - DNA, 15 bp, Homo sapiens
acagagtctcagact

SEQ ID NO: 1409743 - DNA, 15 bp, Homo sapiens
gacagagtctcagac

SEQ ID NO: 1409744 - DNA, 15 bp, Homo sapiens
agacagagtctcaga

SEQ ID NO: 1409745 - DNA, 15 bp, Homo sapiens
gagacagagtctcag

SEQ ID NO: 1409746 - DNA, 15 bp, Homo sapiens
agtttcttttttttt

SEQ ID NO: 1409747 - DNA, 15 bp, Homo sapiens
aagtttctttttttt

SEQ ID NO: 1409748 - DNA, 15 bp, Homo sapiens
gaagtttcttttttt

SEQ ID NO: 1409749 - DNA, 15 bp, Homo sapiens
tgaagtttctttttt

SEQ ID NO: 1409750 - DNA, 15 bp, Homo sapiens
ctgaagtttcttttt

SEQ ID NO: 1409751 - DNA, 15 bp, Homo sapiens
actgaagtttctttt

SEQ ID NO: 1409752 - DNA, 15 bp, Homo sapiens
aactgaagtttcttt

SEQ ID NO: 1409753 - DNA, 15 bp, Homo sapiens
taactgaagtttctt

SEQ ID NO: 1409754 - DNA, 15 bp, Homo sapiens
ttaactgaagtttct

SEQ ID NO: 1409755 - DNA, 15 bp, Homo sapiens
gttaactgaagtttc

SEQ ID NO: 1409756 - DNA, 15 bp, Homo sapiens
tgttaactgaagttt

SEQ ID NO: 1409757 - DNA, 15 bp, Homo sapiens
ctgttaactgaagtt

SEQ ID NO: 1409758 - DNA, 15 bp, Homo sapiens
gctgttaactgaagt

SEQ ID NO: 1409759 - DNA, 15 bp, Homo sapiens
ggctgttaactgaag

SEQ ID NO: 1409760 - DNA, 15 bp, Homo sapiens
aggctgttaactgaa

SEQ ID NO: 1409761 - DNA, 15 bp, Homo sapiens
gaggctgttaactga

SEQ ID NO: 1409762 - DNA, 15 bp, Homo sapiens
ggaggctgttaactg

SEQ ID NO: 1409763 - DNA, 15 bp, Homo sapiens
aggaggctgttaact

SEQ ID NO: 1409764 - DNA, 15 bp, Homo sapiens
aaggaggctgttaac

SEQ ID NO: 1409765 - DNA, 15 bp, Homo sapiens
caaggaggctgttaa

SEQ ID NO: 1409766 - DNA, 15 bp, Homo sapiens
ccaaggaggctgtta

SEQ ID NO: 1409767 - DNA, 15 bp, Homo sapiens
accaaggaggctgtt

SEQ ID NO: 1409768 - DNA, 15 bp, Homo sapiens
caccaaggaggctgt

SEQ ID NO: 1409769 - DNA, 15 bp, Homo sapiens
gcaccaaggaggctg

SEQ ID NO: 1409770 - DNA, 15 bp, Homo sapiens
agcaccaaggaggct

SEQ ID NO: 1409771 - DNA, 15 bp, Homo sapiens
aagcaccaaggaggc

SEQ ID NO: 1409772 - DNA, 15 bp, Homo sapiens
aaagcaccaaggagg

SEQ ID NO: 1409773 - DNA, 15 bp, Homo sapiens
taaagcaccaaggag

SEQ ID NO: 1409774 - DNA, 15 bp, Homo sapiens
ttaaagcaccaagga

SEQ ID NO: 1409775 - DNA, 15 bp, Homo sapiens
cttaaagcaccaagg

SEQ ID NO: 1409776 - DNA, 15 bp, Homo sapiens
gcttaaagcaccaag

SEQ ID NO: 1409777 - DNA, 15 bp, Homo sapiens
tgcttaaagcaccaa

SEQ ID NO: 1409778 - DNA, 15 bp, Homo sapiens
atgcttaaagcacca

SEQ ID NO: 1409779 - DNA, 15 bp, Homo sapiens
aatgcttaaagcacc

SEQ ID NO: 1409780 - DNA, 15 bp, Homo sapiens
gaatgcttaaagcac

SEQ ID NO: 1409781 - DNA, 15 bp, Homo sapiens
tgaatgcttaaagca

SEQ ID NO: 1409782 - DNA, 15 bp, Homo sapiens
ctgaatgcttaaagc

SEQ ID NO: 1409783 - DNA, 15 bp, Homo sapiens
gctgaatgcttaaag

SEQ ID NO: 1409784 - DNA, 15 bp, Homo sapiens
agctgaatgcttaaa

SEQ ID NO: 1409785 - DNA, 15 bp, Homo sapiens
aagctgaatgcttaa

SEQ ID NO: 1409786 - DNA, 15 bp, Homo sapiens
gaagctgaatgctta

SEQ ID NO: 1409787 - DNA, 15 bp, Homo sapiens
ggaagctgaatgctt

SEQ ID NO: 1409788 - DNA, 15 bp, Homo sapiens
aggaagctgaatgct

SEQ ID NO: 1409789 - DNA, 15 bp, Homo sapiens
aaggaagctgaatgc

SEQ ID NO: 1409790 - DNA, 15 bp, Homo sapiens
gaaggaagctgaatg

SEQ ID NO: 1409791 - DNA, 15 bp, Homo sapiens
tgaaggaagctgaat

SEQ ID NO: 1409792 - DNA, 15 bp, Homo sapiens
ctgaaggaagctgaa

SEQ ID NO: 1409793 - DNA, 15 bp, Homo sapiens
cctgaaggaagctga

SEQ ID NO: 1409794 - DNA, 15 bp, Homo sapiens
gcctgaaggaagctg

SEQ ID NO: 1409795 - DNA, 15 bp, Homo sapiens
agcctgaaggaagct

SEQ ID NO: 1409796 - DNA, 15 bp, Homo sapiens
cagcctgaaggaagc

SEQ ID NO: 1409797 - DNA, 15 bp, Homo sapiens
ccagcctgaaggaag

SEQ ID NO: 1409798 - DNA, 15 bp, Homo sapiens
accagcctgaaggaa

SEQ ID NO: 1409799 - DNA, 15 bp, Homo sapiens
taccagcctgaagga

SEQ ID NO: 1409800 - DNA, 15 bp, Homo sapiens
ttaccagcctgaagg

SEQ ID NO: 1409801 - DNA, 15 bp, Homo sapiens
attaccagcctgaag

SEQ ID NO: 1409802 - DNA, 15 bp, Homo sapiens
aattaccagcctgaa

SEQ ID NO: 1409803 - DNA, 15 bp, Homo sapiens
aaattaccagcctga

SEQ ID NO: 1409804 - DNA, 15 bp, Homo sapiens
taaattaccagcctg

SEQ ID NO: 1409805 - DNA, 15 bp, Homo sapiens
ataaattaccagcct

SEQ ID NO: 1409806 - DNA, 15 bp, Homo sapiens
tataaattaccagcc

SEQ ID NO: 1409807 - DNA, 15 bp, Homo sapiens
atataaattaccagc

SEQ ID NO: 1409808 - DNA, 15 bp, Homo sapiens
tatataaattaccag

SEQ ID NO: 1409809 - DNA, 15 bp, Homo sapiens
ttatataaattacca

SEQ ID NO: 1409810 - DNA, 15 bp, Homo sapiens
attatataaattacc

SEQ ID NO: 1409811 - DNA, 15 bp, Homo sapiens
gattatataaattac

SEQ ID NO: 1409812 - DNA, 15 bp, Homo sapiens
ggattatataaatta

SEQ ID NO: 1409813 - DNA, 15 bp, Homo sapiens
gggattatataaatt

SEQ ID NO: 1409814 - DNA, 15 bp, Homo sapiens
agggattatataaat

SEQ ID NO: 1409815 - DNA, 15 bp, Homo sapiens
cagggattatataaa

SEQ ID NO: 1409816 - DNA, 15 bp, Homo sapiens
tcagggattatataa

SEQ ID NO: 1409817 - DNA, 15 bp, Homo sapiens
ttcagggattatata

SEQ ID NO: 1409818 - DNA, 15 bp, Homo sapiens
tttcagggattatat

SEQ ID NO: 1409819 - DNA, 15 bp, Homo sapiens
gtttcagggattata

SEQ ID NO: 1409820 - DNA, 15 bp, Homo sapiens
cgtttcagggattat

SEQ ID NO: 1409821 - DNA, 15 bp, Homo sapiens
ccgtttcagggatta

SEQ ID NO: 1409822 - DNA, 15 bp, Homo sapiens
cccgtttcagggatt

SEQ ID NO: 1409823 - DNA, 15 bp, Homo sapiens
gcccgtttcagggat

SEQ ID NO: 1409824 - DNA, 15 bp, Homo sapiens
agcccgtttcaggga

SEQ ID NO: 1409825 - DNA, 15 bp, Homo sapiens
aagcccgtttcaggg

SEQ ID NO: 1409826 - DNA, 15 bp, Homo sapiens
gaagcccgtttcagg

SEQ ID NO: 1409827 - DNA, 15 bp, Homo sapiens
tgaagcccgtttcag

SEQ ID NO: 1409828 - DNA, 15 bp, Homo sapiens
ctgaagcccgtttca

SEQ ID NO: 1409829 - DNA, 15 bp, Homo sapiens
cctgaagcccgtttc

SEQ ID NO: 1409830 - DNA, 15 bp, Homo sapiens
acctgaagcccgttt

SEQ ID NO: 1409831 - DNA, 15 bp, Homo sapiens
gacctgaagcccgtt

SEQ ID NO: 1409832 - DNA, 15 bp, Homo sapiens
tgacctgaagcccgt

SEQ ID NO: 1409833 - DNA, 15 bp, Homo sapiens
ttgacctgaagcccg

SEQ ID NO: 1409834 - DNA, 15 bp, Homo sapiens
tttgacctgaagccc

SEQ ID NO: 1409835 - DNA, 15 bp, Homo sapiens
gtttgacctgaagcc

SEQ ID NO: 1409836 - DNA, 15 bp, Homo sapiens
ggtttgacctgaagc

SEQ ID NO: 1409837 - DNA, 15 bp, Homo sapiens
gggtttgacctgaag

SEQ ID NO: 1409838 - DNA, 15 bp, Homo sapiens
agggtttgacctgaa

SEQ ID NO: 1409839 - DNA, 15 bp, Homo sapiens
aagggtttgacctga

SEQ ID NO: 1409840 - DNA, 15 bp, Homo sapiens
taagggtttgacctg

SEQ ID NO: 1409841 - DNA, 15 bp, Homo sapiens
ttaagggtttgacct

SEQ ID NO: 1409842 - DNA, 15 bp, Homo sapiens
cttaagggtttgacc

SEQ ID NO: 1409843 - DNA, 15 bp, Homo sapiens
tcttaagggtttgac

SEQ ID NO: 1409844 - DNA, 15 bp, Homo sapiens
gtcttaagggtttga

SEQ ID NO: 1409845 - DNA, 15 bp, Homo sapiens
tgtcttaagggtttg

SEQ ID NO: 1409846 - DNA, 15 bp, Homo sapiens
atgtcttaagggttt

SEQ ID NO: 1409847 - DNA, 15 bp, Homo sapiens
gatgtcttaagggtt

SEQ ID NO: 1409848 - DNA, 15 bp, Homo sapiens
agatgtcttaagggt

SEQ ID NO: 1409849 - DNA, 15 bp, Homo sapiens
cagatgtcttaaggg

SEQ ID NO: 1409850 - DNA, 15 bp, Homo sapiens
tcagatgtcttaagg

SEQ ID NO: 1409851 - DNA, 15 bp, Homo sapiens
ttcagatgtcttaag

SEQ ID NO: 1409852 - DNA, 15 bp, Homo sapiens
cttcagatgtcttaa

SEQ ID NO: 1409853 - DNA, 15 bp, Homo sapiens
gcttcagatgtctta

SEQ ID NO: 1409854 - DNA, 15 bp, Homo sapiens
agcttcagatgtctt

SEQ ID NO: 1409855 - DNA, 15 bp, Homo sapiens
cagcttcagatgtct

SEQ ID NO: 1409856 - DNA, 15 bp, Homo sapiens
gcagcttcagatgtc

SEQ ID NO: 1409857 - DNA, 15 bp, Homo sapiens
tgcagcttcagatgt

SEQ ID NO: 1409858 - DNA, 15 bp, Homo sapiens
ttgcagcttcagatg

SEQ ID NO: 1409859 - DNA, 15 bp, Homo sapiens
gttgcagcttcagat

SEQ ID NO: 1409860 - DNA, 15 bp, Homo sapiens
ggttgcagcttcaga

SEQ ID NO: 1409861 - DNA, 15 bp, Homo sapiens
aggttgcagcttcag

SEQ ID NO: 1409862 - DNA, 15 bp, Homo sapiens
caggttgcagcttca

SEQ ID NO: 1409863 - DNA, 15 bp, Homo sapiens
ccaggttgcagcttc

SEQ ID NO: 1409864 - DNA, 15 bp, Homo sapiens
gccaggttgcagctt

SEQ ID NO: 1409865 - DNA, 15 bp, Homo sapiens
ggccaggttgcagct

SEQ ID NO: 1409866 - DNA, 15 bp, Homo sapiens
aggccaggttgcagc

SEQ ID NO: 1409867 - DNA, 15 bp, Homo sapiens
aaggccaggttgcag

SEQ ID NO: 1409868 - DNA, 15 bp, Homo sapiens
aaaggccaggttgca

SEQ ID NO: 1409869 - DNA, 15 bp, Homo sapiens
caaaggccaggttgc

SEQ ID NO: 1409870 - DNA, 15 bp, Homo sapiens
ccaaaggccaggttg

SEQ ID NO: 1409871 - DNA, 15 bp, Homo sapiens
accaaaggccaggtt

SEQ ID NO: 1409872 - DNA, 15 bp, Homo sapiens
caccaaaggccaggt

SEQ ID NO: 1409873 - DNA, 15 bp, Homo sapiens
acaccaaaggccagg

SEQ ID NO: 1409874 - DNA, 15 bp, Homo sapiens
aacaccaaaggccag

SEQ ID NO: 1409875 - DNA, 15 bp, Homo sapiens
caacaccaaaggcca

SEQ ID NO: 1409876 - DNA, 15 bp, Homo sapiens
tcaacaccaaaggcc

SEQ ID NO: 1409877 - DNA, 15 bp, Homo sapiens
ttcaacaccaaaggc

SEQ ID NO: 1409878 - DNA, 15 bp, Homo sapiens
tttcaacaccaaagg

SEQ ID NO: 1409879 - DNA, 15 bp, Homo sapiens
atttcaacaccaaag

SEQ ID NO: 1409880 - DNA, 15 bp, Homo sapiens
tatttcaacaccaaa

SEQ ID NO: 1409881 - DNA, 15 bp, Homo sapiens
ctatttcaacaccaa

SEQ ID NO: 1409882 - DNA, 15 bp, Homo sapiens
cctatttcaacacca

SEQ ID NO: 1409883 - DNA, 15 bp, Homo sapiens
tcctatttcaacacc

SEQ ID NO: 1409884 - DNA, 15 bp, Homo sapiens
ttcctatttcaacac

SEQ ID NO: 1409885 - DNA, 15 bp, Homo sapiens
cttcctatttcaaca

SEQ ID NO: 1409886 - DNA, 15 bp, Homo sapiens
ccttcctatttcaac

SEQ ID NO: 1409887 - DNA, 15 bp, Homo sapiens
accttcctatttcaa

SEQ ID NO: 1409888 - DNA, 15 bp, Homo sapiens
aaccttcctatttca

SEQ ID NO: 1409889 - DNA, 15 bp, Homo sapiens
aaaccttcctatttc

SEQ ID NO: 1409890 - DNA, 15 bp, Homo sapiens
taaaccttcctattt

SEQ ID NO: 1409891 - DNA, 15 bp, Homo sapiens
ttaaaccttcctatt

SEQ ID NO: 1409892 - DNA, 15 bp, Homo sapiens
cttaaaccttcctat

SEQ ID NO: 1409893 - DNA, 15 bp, Homo sapiens
ccttaaaccttccta

SEQ ID NO: 1409894 - DNA, 15 bp, Homo sapiens
tccttaaaccttcct

SEQ ID NO: 1409895 - DNA, 15 bp, Homo sapiens
ctccttaaaccttcc

SEQ ID NO: 1409896 - DNA, 15 bp, Homo sapiens
tctccttaaaccttc

SEQ ID NO: 1409897 - DNA, 15 bp, Homo sapiens
ttctccttaaacctt

SEQ ID NO: 1409898 - DNA, 15 bp, Homo sapiens
attctccttaaacct

SEQ ID NO: 1409899 - DNA, 15 bp, Homo sapiens
gattctccttaaacc

SEQ ID NO: 1409900 - DNA, 15 bp, Homo sapiens
agattctccttaaac

SEQ ID NO: 1409901 - DNA, 15 bp, Homo sapiens
tagattctccttaaa

SEQ ID NO: 1409902 - DNA, 15 bp, Homo sapiens
ttagattctccttaa

SEQ ID NO: 1409903 - DNA, 15 bp, Homo sapiens
cttagattctcctta

SEQ ID NO: 1409904 - DNA, 15 bp, Homo sapiens
gcttagattctcctt

SEQ ID NO: 1409905 - DNA, 15 bp, Homo sapiens
tgcttagattctcct

SEQ ID NO: 1409906 - DNA, 15 bp, Homo sapiens
atgcttagattctcc

SEQ ID NO: 1409907 - DNA, 15 bp, Homo sapiens
aatgcttagattctc

SEQ ID NO: 1409908 - DNA, 15 bp, Homo sapiens
aaatgcttagattct

SEQ ID NO: 1409909 - DNA, 15 bp, Homo sapiens
aaaatgcttagattc

SEQ ID NO: 1409910 - DNA, 15 bp, Homo sapiens
taaaatgcttagatt

SEQ ID NO: 1409911 - DNA, 15 bp, Homo sapiens
ctaaaatgcttagat

SEQ ID NO: 1409912 - DNA, 15 bp, Homo sapiens
tctaaaatgcttaga

SEQ ID NO: 1409913 - DNA, 15 bp, Homo sapiens
gtctaaaatgcttag

SEQ ID NO: 1409914 - DNA, 15 bp, Homo sapiens
agtctaaaatgctta

SEQ ID NO: 1409915 - DNA, 15 bp, Homo sapiens
aagtctaaaatgctt

SEQ ID NO: 1409916 - DNA, 15 bp, Homo sapiens
aaagtctaaaatgct

SEQ ID NO: 1409917 - DNA, 15 bp, Homo sapiens
aaaagtctaaaatgc

SEQ ID NO: 1409918 - DNA, 15 bp, Homo sapiens
aaaaagtctaaaatg

SEQ ID NO: 1409919 - DNA, 15 bp, Homo sapiens
aaaaaagtctaaaat

SEQ ID NO: 1409920 - DNA, 15 bp, Homo sapiens
aaaaaaagtctaaaa

SEQ ID NO: 1409921 - DNA, 15 bp, Homo sapiens
aaaaaaaagtctaaa

SEQ ID NO: 1409922 - DNA, 15 bp, Homo sapiens
taaaaaaaagtctaa

SEQ ID NO: 1409923 - DNA, 15 bp, Homo sapiens
ataaaaaaaagtcta

SEQ ID NO: 1409924 - DNA, 15 bp, Homo sapiens
tataaaaaaaagtct

SEQ ID NO: 1409925 - DNA, 15 bp, Homo sapiens
ttataaaaaaaagtc

SEQ ID NO: 1409926 - DNA, 15 bp, Homo sapiens
tttataaaaaaaagt

SEQ ID NO: 1409927 - DNA, 15 bp, Homo sapiens
atttataaaaaaaag

SEQ ID NO: 1409928 - DNA, 15 bp, Homo sapiens
tatttataaaaaaaa

SEQ ID NO: 1409929 - DNA, 15 bp, Homo sapiens
ctatttataaaaaaa

SEQ ID NO: 1409930 - DNA, 15 bp, Homo sapiens
tctatttataaaaaa

SEQ ID NO: 1409931 - DNA, 15 bp, Homo sapiens
gtctatttataaaaa

SEQ ID NO: 1409932 - DNA, 15 bp, Homo sapiens
agtctatttataaaa

SEQ ID NO: 1409933 - DNA, 15 bp, Homo sapiens
aagtctatttataaa

SEQ ID NO: 1409934 - DNA, 15 bp, Homo sapiens
taagtctatttataa

SEQ ID NO: 1409935 - DNA, 15 bp, Homo sapiens
ataagtctatttata

SEQ ID NO: 1409936 - DNA, 15 bp, Homo sapiens
aataagtctatttat

SEQ ID NO: 1409937 - DNA, 15 bp, Homo sapiens
aaataagtctattta

SEQ ID NO: 1409938 - DNA, 15 bp, Homo sapiens
aaaataagtctattt

SEQ ID NO: 1409939 - DNA, 15 bp, Homo sapiens
gaaaataagtctatt

SEQ ID NO: 1409940 - DNA, 15 bp, Homo sapiens
ggaaaataagtctat

SEQ ID NO: 1409941 - DNA, 15 bp, Homo sapiens
aggaaaataagtcta

SEQ ID NO: 1409942 - DNA, 15 bp, Homo sapiens
aaggaaaataagtct

SEQ ID NO: 1409943 - DNA, 15 bp, Homo sapiens
aaaggaaaataagtc

SEQ ID NO: 1409944 - DNA, 15 bp, Homo sapiens
caaaggaaaataagt

SEQ ID NO: 1409945 - DNA, 15 bp, Homo sapiens
acaaaggaaaataag

SEQ ID NO: 1409946 - DNA, 15 bp, Homo sapiens
tacaaaggaaaataa

SEQ ID NO: 1409947 - DNA, 15 bp, Homo sapiens
ttacaaaggaaaata

SEQ ID NO: 1409948 - DNA, 15 bp, Homo sapiens
attacaaaggaaaat

SEQ ID NO: 1409949 - DNA, 15 bp, Homo sapiens
cattacaaaggaaaa

SEQ ID NO: 1409950 - DNA, 15 bp, Homo sapiens
acattacaaaggaaa

SEQ ID NO: 1409951 - DNA, 15 bp, Homo sapiens
tacattacaaaggaa

SEQ ID NO: 1409952 - DNA, 15 bp, Homo sapiens
atacattacaaagga

SEQ ID NO: 1409953 - DNA, 15 bp, Homo sapiens
aatacattacaaagg

SEQ ID NO: 1409954 - DNA, 15 bp, Homo sapiens
caatacattacaaag

SEQ ID NO: 1409955 - DNA, 15 bp, Homo sapiens
ccaatacattacaaa

SEQ ID NO: 1409956 - DNA, 15 bp, Homo sapiens
gccaatacattacaa

SEQ ID NO: 1409957 - DNA, 15 bp, Homo sapiens
ggccaatacattaca

SEQ ID NO: 1409958 - DNA, 15 bp, Homo sapiens
aggccaatacattac

SEQ ID NO: 1409959 - DNA, 15 bp, Homo sapiens
aaggccaatacatta

SEQ ID NO: 1409960 - DNA, 15 bp, Homo sapiens
aaaggccaatacatt

SEQ ID NO: 1409961 - DNA, 15 bp, Homo sapiens
aaaaggccaatacat

SEQ ID NO: 1409962 - DNA, 15 bp, Homo sapiens
taaaaggccaataca

SEQ ID NO: 1409963 - DNA, 15 bp, Homo sapiens
ctaaaaggccaatac

SEQ ID NO: 1409964 - DNA, 15 bp, Homo sapiens
actaaaaggccaata

SEQ ID NO: 1409965 - DNA, 15 bp, Homo sapiens
cactaaaaggccaat

SEQ ID NO: 1409966 - DNA, 15 bp, Homo sapiens
tcactaaaaggccaa

SEQ ID NO: 1409967 - DNA, 15 bp, Homo sapiens
ctcactaaaaggcca

SEQ ID NO: 1409968 - DNA, 15 bp, Homo sapiens
actcactaaaaggcc

SEQ ID NO: 1409969 - DNA, 15 bp, Homo sapiens
tactcactaaaaggc

SEQ ID NO: 1409970 - DNA, 15 bp, Homo sapiens
ttactcactaaaagg

SEQ ID NO: 1409971 - DNA, 15 bp, Homo sapiens
cttactcactaaaag

SEQ ID NO: 1409972 - DNA, 15 bp, Homo sapiens
ccttactcactaaaa

SEQ ID NO: 1409973 - DNA, 15 bp, Homo sapiens
gccttactcactaaa

SEQ ID NO: 1409974 - DNA, 15 bp, Homo sapiens
agccttactcactaa

SEQ ID NO: 1409975 - DNA, 15 bp, Homo sapiens
cagccttactcacta

SEQ ID NO: 1409976 - DNA, 15 bp, Homo sapiens
ccagccttactcact

SEQ ID NO: 1409977 - DNA, 15 bp, Homo sapiens
cccagccttactcac

SEQ ID NO: 1409978 - DNA, 15 bp, Homo sapiens
gcccagccttactca

SEQ ID NO: 1409979 - DNA, 15 bp, Homo sapiens
tgcccagccttactc

SEQ ID NO: 1409980 - DNA, 15 bp, Homo sapiens
ctgcccagccttact

SEQ ID NO: 1409981 - DNA, 15 bp, Homo sapiens
tctgcccagccttac

SEQ ID NO: 1409982 - DNA, 15 bp, Homo sapiens
ctctgcccagcctta

SEQ ID NO: 1409983 - DNA, 15 bp, Homo sapiens
cctctgcccagcctt

SEQ ID NO: 1409984 - DNA, 15 bp, Homo sapiens
ccctctgcccagcct

SEQ ID NO: 1409985 - DNA, 15 bp, Homo sapiens
accctctgcccagcc

SEQ ID NO: 1409986 - DNA, 15 bp, Homo sapiens
caccctctgcccagc

SEQ ID NO: 1409987 - DNA, 15 bp, Homo sapiens
gcaccctctgcccag

SEQ ID NO: 1409988 - DNA, 15 bp, Homo sapiens
agcaccctctgccca

SEQ ID NO: 1409989 - DNA, 15 bp, Homo sapiens
aagcaccctctgccc

SEQ ID NO: 1409990 - DNA, 15 bp, Homo sapiens
taagcaccctctgcc

SEQ ID NO: 1409991 - DNA, 15 bp, Homo sapiens
gtaagcaccctctgc

SEQ ID NO: 1409992 - DNA, 15 bp, Homo sapiens
tgtaagcaccctctg

SEQ ID NO: 1409993 - DNA, 15 bp, Homo sapiens
ttgtaagcaccctct

SEQ ID NO: 1409994 - DNA, 15 bp, Homo sapiens
gttgtaagcaccctc

SEQ ID NO: 1409995 - DNA, 15 bp, Homo sapiens
ggttgtaagcaccct

SEQ ID NO: 1409996 - DNA, 15 bp, Homo sapiens
aggttgtaagcaccc

SEQ ID NO: 1409997 - DNA, 15 bp, Homo sapiens
aaggttgtaagcacc

SEQ ID NO: 1409998 - DNA, 15 bp, Homo sapiens
caaggttgtaagcac

SEQ ID NO: 1409999 - DNA, 15 bp, Homo sapiens
tcaaggttgtaagca

SEQ ID NO: 1410000 - DNA, 15 bp, Homo sapiens
gtcaaggttgtaagc

SEQ ID NO: 1410001 - DNA, 15 bp, Homo sapiens
agtcaaggttgtaag

SEQ ID NO: 1410002 - DNA, 15 bp, Homo sapiens
gagtcaaggttgtaa

SEQ ID NO: 1410003 - DNA, 15 bp, Homo sapiens
ggagtcaaggttgta

SEQ ID NO: 1410004 - DNA, 15 bp, Homo sapiens
gggagtcaaggttgt

SEQ ID NO: 1410005 - DNA, 15 bp, Homo sapiens
agggagtcaaggttg

SEQ ID NO: 1410006 - DNA, 15 bp, Homo sapiens
aagggagtcaaggtt

SEQ ID NO: 1410007 - DNA, 15 bp, Homo sapiens
aaagggagtcaaggt

SEQ ID NO: 1410008 - DNA, 15 bp, Homo sapiens
gaaagggagtcaagg

SEQ ID NO: 1410009 - DNA, 15 bp, Homo sapiens
agaaagggagtcaag

SEQ ID NO: 1410010 - DNA, 15 bp, Homo sapiens
gagaaagggagtcaa

SEQ ID NO: 1410011 - DNA, 15 bp, Homo sapiens
ggagaaagggagtca

SEQ ID NO: 1410012 - DNA, 15 bp, Homo sapiens
gggagaaagggagtc

SEQ ID NO: 1410013 - DNA, 15 bp, Homo sapiens
agggagaaagggagt

SEQ ID NO: 1410014 - DNA, 15 bp, Homo sapiens
cagggagaaagggag

SEQ ID NO: 1410015 - DNA, 15 bp, Homo sapiens
ccagggagaaaggga

SEQ ID NO: 1410016 - DNA, 15 bp, Homo sapiens
tccagggagaaaggg

SEQ ID NO: 1410017 - DNA, 15 bp, Homo sapiens
gtccagggagaaagg

SEQ ID NO: 1410018 - DNA, 15 bp, Homo sapiens
agtccagggagaaag

SEQ ID NO: 1410019 - DNA, 15 bp, Homo sapiens
aagtccagggagaaa

SEQ ID NO: 1410020 - DNA, 15 bp, Homo sapiens
caagtccagggagaa

SEQ ID NO: 1410021 - DNA, 15 bp, Homo sapiens
tcaagtccagggaga

SEQ ID NO: 1410022 - DNA, 15 bp, Homo sapiens
atcaagtccagggag

SEQ ID NO: 1410023 - DNA, 15 bp, Homo sapiens
gatcaagtccaggga

SEQ ID NO: 1410024 - DNA, 15 bp, Homo sapiens
agatcaagtccaggg

SEQ ID NO: 1410025 - DNA, 15 bp, Homo sapiens
cagatcaagtccagg

SEQ ID NO: 1410026 - DNA, 15 bp, Homo sapiens
gcagatcaagtccag

SEQ ID NO: 1410027 - DNA, 15 bp, Homo sapiens
agcagatcaagtcca

SEQ ID NO: 1410028 - DNA, 15 bp, Homo sapiens
cagcagatcaagtcc

SEQ ID NO: 1410029 - DNA, 15 bp, Homo sapiens
acagcagatcaagtc

SEQ ID NO: 1410030 - DNA, 15 bp, Homo sapiens
aacagcagatcaagt

SEQ ID NO: 1410031 - DNA, 15 bp, Homo sapiens
aaacagcagatcaag

SEQ ID NO: 1410032 - DNA, 15 bp, Homo sapiens
gaaacagcagatcaa

SEQ ID NO: 1410033 - DNA, 15 bp, Homo sapiens
tgaaacagcagatca

SEQ ID NO: 1410034 - DNA, 15 bp, Homo sapiens
ctgaaacagcagatc

SEQ ID NO: 1410035 - DNA, 15 bp, Homo sapiens
tctgaaacagcagat

SEQ ID NO: 1410036 - DNA, 15 bp, Homo sapiens
ctctgaaacagcaga

SEQ ID NO: 1410037 - DNA, 15 bp, Homo sapiens
cctctgaaacagcag

SEQ ID NO: 1410038 - DNA, 15 bp, Homo sapiens
gcctctgaaacagca

SEQ ID NO: 1410039 - DNA, 15 bp, Homo sapiens
agcctctgaaacagc

SEQ ID NO: 1410040 - DNA, 15 bp, Homo sapiens
tagcctctgaaacag

SEQ ID NO: 1410041 - DNA, 15 bp, Homo sapiens
ctagcctctgaaaca

SEQ ID NO: 1410042 - DNA, 15 bp, Homo sapiens
cctagcctctgaaac

SEQ ID NO: 1410043 - DNA, 15 bp, Homo sapiens
acctagcctctgaaa

SEQ ID NO: 1410044 - DNA, 15 bp, Homo sapiens
aacctagcctctgaa

SEQ ID NO: 1410045 - DNA, 15 bp, Homo sapiens
caacctagcctctga

SEQ ID NO: 1410046 - DNA, 15 bp, Homo sapiens
acaacctagcctctg

SEQ ID NO: 1410047 - DNA, 15 bp, Homo sapiens
aacaacctagcctct

SEQ ID NO: 1410048 - DNA, 15 bp, Homo sapiens
aaacaacctagcctc

SEQ ID NO: 1410049 - DNA, 15 bp, Homo sapiens
gaaacaacctagcct

SEQ ID NO: 1410050 - DNA, 15 bp, Homo sapiens
agaaacaacctagcc

SEQ ID NO: 1410051 - DNA, 15 bp, Homo sapiens
cagaaacaacctagc

SEQ ID NO: 1410052 - DNA, 15 bp, Homo sapiens
acagaaacaacctag

SEQ ID NO: 1410053 - DNA, 15 bp, Homo sapiens
cacagaaacaaccta

SEQ ID NO: 1410054 - DNA, 15 bp, Homo sapiens
ccacagaaacaacct

SEQ ID NO: 1410055 - DNA, 15 bp, Homo sapiens
cccacagaaacaacc

SEQ ID NO: 1410056 - DNA, 15 bp, Homo sapiens
acccacagaaacaac

SEQ ID NO: 1410057 - DNA, 15 bp, Homo sapiens
cacccacagaaacaa

SEQ ID NO: 1410058 - DNA, 15 bp, Homo sapiens
gcacccacagaaaca

SEQ ID NO: 1410059 - DNA, 15 bp, Homo sapiens
ggcacccacagaaac

SEQ ID NO: 1410060 - DNA, 15 bp, Homo sapiens
aggcacccacagaaa

SEQ ID NO: 1410061 - DNA, 15 bp, Homo sapiens
aaggcacccacagaa

SEQ ID NO: 1410062 - DNA, 15 bp, Homo sapiens
taaggcacccacaga

SEQ ID NO: 1410063 - DNA, 15 bp, Homo sapiens
ataaggcacccacag

SEQ ID NO: 1410064 - DNA, 15 bp, Homo sapiens
gataaggcacccaca

SEQ ID NO: 1410065 - DNA, 15 bp, Homo sapiens
tgataaggcacccac

SEQ ID NO: 1410066 - DNA, 15 bp, Homo sapiens
ctgataaggcaccca

SEQ ID NO: 1410067 - DNA, 15 bp, Homo sapiens
cctgataaggcaccc

SEQ ID NO: 1410068 - DNA, 15 bp, Homo sapiens
ccctgataaggcacc

SEQ ID NO: 1410069 - DNA, 15 bp, Homo sapiens
gccctgataaggcac

SEQ ID NO: 1410070 - DNA, 15 bp, Homo sapiens
agccctgataaggca

SEQ ID NO: 1410071 - DNA, 15 bp, Homo sapiens
cagccctgataaggc

SEQ ID NO: 1410072 - DNA, 15 bp, Homo sapiens
ccagccctgataagg

SEQ ID NO: 1410073 - DNA, 15 bp, Homo sapiens
cccagccctgataag

SEQ ID NO: 1410074 - DNA, 15 bp, Homo sapiens
tcccagccctgataa

SEQ ID NO: 1410075 - DNA, 15 bp, Homo sapiens
atcccagccctgata

SEQ ID NO: 1410076 - DNA, 15 bp, Homo sapiens
tatcccagccctgat

SEQ ID NO: 1410077 - DNA, 15 bp, Homo sapiens
gtatcccagccctga

SEQ ID NO: 1410078 - DNA, 15 bp, Homo sapiens
agtatcccagccctg

SEQ ID NO: 1410079 - DNA, 15 bp, Homo sapiens
aagtatcccagccct

SEQ ID NO: 1410080 - DNA, 15 bp, Homo sapiens
gaagtatcccagccc

SEQ ID NO: 1410081 - DNA, 15 bp, Homo sapiens
agaagtatcccagcc

SEQ ID NO: 1410082 - DNA, 15 bp, Homo sapiens
cagaagtatcccagc

SEQ ID NO: 1410083 - DNA, 15 bp, Homo sapiens
tcagaagtatcccag

SEQ ID NO: 1410084 - DNA, 15 bp, Homo sapiens
atcagaagtatccca

SEQ ID NO: 1410085 - DNA, 15 bp, Homo sapiens
aatcagaagtatccc

SEQ ID NO: 1410086 - DNA, 15 bp, Homo sapiens
gaatcagaagtatcc

SEQ ID NO: 1410087 - DNA, 15 bp, Homo sapiens
agaatcagaagtatc

SEQ ID NO: 1410088 - DNA, 15 bp, Homo sapiens
cagaatcagaagtat

SEQ ID NO: 1410089 - DNA, 15 bp, Homo sapiens
ccagaatcagaagta

SEQ ID NO: 1410090 - DNA, 15 bp, Homo sapiens
gccagaatcagaagt

SEQ ID NO: 1410091 - DNA, 15 bp, Homo sapiens
agccagaatcagaag

SEQ ID NO: 1410092 - DNA, 15 bp, Homo sapiens
aagccagaatcagaa

SEQ ID NO: 1410093 - DNA, 15 bp, Homo sapiens
gaagccagaatcaga

SEQ ID NO: 1410094 - DNA, 15 bp, Homo sapiens
ggaagccagaatcag

SEQ ID NO: 1410095 - DNA, 15 bp, Homo sapiens
aggaagccagaatca

SEQ ID NO: 1410096 - DNA, 15 bp, Homo sapiens
aaggaagccagaatc

SEQ ID NO: 1410097 - DNA, 15 bp, Homo sapiens
gaaggaagccagaat

SEQ ID NO: 1410098 - DNA, 15 bp, Homo sapiens
ggaaggaagccagaa

SEQ ID NO: 1410099 - DNA, 15 bp, Homo sapiens
aggaaggaagccaga

SEQ ID NO: 1410100 - DNA, 15 bp, Homo sapiens
caggaaggaagccag

SEQ ID NO: 1410101 - DNA, 15 bp, Homo sapiens
gcaggaaggaagcca

SEQ ID NO: 1410102 - DNA, 15 bp, Homo sapiens
ggcaggaaggaagcc

SEQ ID NO: 1410103 - DNA, 15 bp, Homo sapiens
gggcaggaaggaagc

SEQ ID NO: 1410104 - DNA, 15 bp, Homo sapiens
ggggcaggaaggaag

SEQ ID NO: 1410105 - DNA, 15 bp, Homo sapiens
tggggcaggaaggaa

SEQ ID NO: 1410106 - DNA, 15 bp, Homo sapiens
gtggggcaggaagga

SEQ ID NO: 1410107 - DNA, 15 bp, Homo sapiens
ggtggggcaggaagg

SEQ ID NO: 1410108 - DNA, 15 bp, Homo sapiens
gggtggggcaggaag

SEQ ID NO: 1410109 - DNA, 15 bp, Homo sapiens
agggtggggcaggaa

SEQ ID NO: 1410110 - DNA, 15 bp, Homo sapiens
gagggtggggcagga

SEQ ID NO: 1410111 - DNA, 15 bp, Homo sapiens
ggagggtggggcagg

SEQ ID NO: 1410112 - DNA, 15 bp, Homo sapiens
gggagggtggggcag

SEQ ID NO: 1410113 - DNA, 15 bp, Homo sapiens
cgggagggtggggca

SEQ ID NO: 1410114 - DNA, 15 bp, Homo sapiens
tcgggagggtggggc

SEQ ID NO: 1410115 - DNA, 15 bp, Homo sapiens
gtcgggagggtgggg

SEQ ID NO: 1410116 - DNA, 15 bp, Homo sapiens
ggtcgggagggtggg

SEQ ID NO: 1410117 - DNA, 15 bp, Homo sapiens
gggtcgggagggtgg

SEQ ID NO: 1410118 - DNA, 15 bp, Homo sapiens
ggggtcgggagggtg

SEQ ID NO: 1410119 - DNA, 15 bp, Homo sapiens
tggggtcgggagggt

SEQ ID NO: 1410120 - DNA, 15 bp, Homo sapiens
ctggggtcgggaggg

SEQ ID NO: 1410121 - DNA, 15 bp, Homo sapiens
actggggtcgggagg

SEQ ID NO: 1410122 - DNA, 15 bp, Homo sapiens
gactggggtcgggag

SEQ ID NO: 1410123 - DNA, 15 bp, Homo sapiens
ggactggggtcggga

SEQ ID NO: 1410124 - DNA, 15 bp, Homo sapiens
gggactggggtcggg

SEQ ID NO: 1410125 - DNA, 15 bp, Homo sapiens
ggggactggggtcgg

SEQ ID NO: 1410126 - DNA, 15 bp, Homo sapiens
gggggactggggtcg

SEQ ID NO: 1410127 - DNA, 15 bp, Homo sapiens
agggggactggggtc

SEQ ID NO: 1410128 - DNA, 15 bp, Homo sapiens
cagggggactggggt

SEQ ID NO: 1410129 - DNA, 15 bp, Homo sapiens
tcagggggactgggg

SEQ ID NO: 1410130 - DNA, 15 bp, Homo sapiens
atcagggggactggg

SEQ ID NO: 1410131 - DNA, 15 bp, Homo sapiens
gatcagggggactgg

SEQ ID NO: 1410132 - DNA, 15 bp, Homo sapiens
ggatcagggggactg

SEQ ID NO: 1410133 - DNA, 15 bp, Homo sapiens
aggatcagggggact

SEQ ID NO: 1410134 - DNA, 15 bp, Homo sapiens
caggatcagggggac

SEQ ID NO: 1410135 - DNA, 15 bp, Homo sapiens
gcaggatcaggggga

SEQ ID NO: 1410136 - DNA, 15 bp, Homo sapiens
agcaggatcaggggg

SEQ ID NO: 1410137 - DNA, 15 bp, Homo sapiens
tagcaggatcagggg

SEQ ID NO: 1410138 - DNA, 15 bp, Homo sapiens
ctagcaggatcaggg

SEQ ID NO: 1410139 - DNA, 15 bp, Homo sapiens
tctagcaggatcagg

SEQ ID NO: 1410140 - DNA, 15 bp, Homo sapiens
ctctagcaggatcag

SEQ ID NO: 1410141 - DNA, 15 bp, Homo sapiens
cctctagcaggatca

SEQ ID NO: 1410142 - DNA, 15 bp, Homo sapiens
gcctctagcaggatc

SEQ ID NO: 1410143 - DNA, 15 bp, Homo sapiens
tgcctctagcaggat

SEQ ID NO: 1410144 - DNA, 15 bp, Homo sapiens
atgcctctagcagga

SEQ ID NO: 1410145 - DNA, 15 bp, Homo sapiens
catgcctctagcagg

SEQ ID NO: 1410146 - DNA, 15 bp, Homo sapiens
acatgcctctagcag

SEQ ID NO: 1410147 - DNA, 15 bp, Homo sapiens
gacatgcctctagca

SEQ ID NO: 1410148 - DNA, 15 bp, Homo sapiens
agacatgcctctagc

SEQ ID NO: 1410149 - DNA, 15 bp, Homo sapiens
gagacatgcctctag

SEQ ID NO: 1410150 - DNA, 15 bp, Homo sapiens
ggagacatgcctcta

SEQ ID NO: 1410151 - DNA, 15 bp, Homo sapiens
aggagacatgcctct

SEQ ID NO: 1410152 - DNA, 15 bp, Homo sapiens
aaggagacatgcctc

SEQ ID NO: 1410153 - DNA, 15 bp, Homo sapiens
caaggagacatgcct

SEQ ID NO: 1410154 - DNA, 15 bp, Homo sapiens
gcaaggagacatgcc

SEQ ID NO: 1410155 - DNA, 15 bp, Homo sapiens
cgcaaggagacatgc

SEQ ID NO: 1410156 - DNA, 15 bp, Homo sapiens
acgcaaggagacatg

SEQ ID NO: 1410157 - DNA, 15 bp, Homo sapiens
cacgcaaggagacat

SEQ ID NO: 1410158 - DNA, 15 bp, Homo sapiens
acacgcaaggagaca

SEQ ID NO: 1410159 - DNA, 15 bp, Homo sapiens
gacacgcaaggagac

SEQ ID NO: 1410160 - DNA, 15 bp, Homo sapiens
agacacgcaaggaga

SEQ ID NO: 1410161 - DNA, 15 bp, Homo sapiens
tagacacgcaaggag

SEQ ID NO: 1410162 - DNA, 15 bp, Homo sapiens
ttagacacgcaagga

SEQ ID NO: 1410163 - DNA, 15 bp, Homo sapiens
tttagacacgcaagg

SEQ ID NO: 1410164 - DNA, 15 bp, Homo sapiens
ctttagacacgcaag

SEQ ID NO: 1410165 - DNA, 15 bp, Homo sapiens
cctttagacacgcaa

SEQ ID NO: 1410166 - DNA, 15 bp, Homo sapiens
acctttagacacgca

SEQ ID NO: 1410167 - DNA, 15 bp, Homo sapiens
gacctttagacacgc

SEQ ID NO: 1410168 - DNA, 15 bp, Homo sapiens
ggacctttagacacg

SEQ ID NO: 1410169 - DNA, 15 bp, Homo sapiens
gggacctttagacac

SEQ ID NO: 1410170 - DNA, 15 bp, Homo sapiens
agggacctttagaca

SEQ ID NO: 1410171 - DNA, 15 bp, Homo sapiens
gagggacctttagac

SEQ ID NO: 1410172 - DNA, 15 bp, Homo sapiens
tgagggacctttaga

SEQ ID NO: 1410173 - DNA, 15 bp, Homo sapiens
atgagggacctttag

SEQ ID NO: 1410174 - DNA, 15 bp, Homo sapiens
gatgagggaccttta

SEQ ID NO: 1410175 - DNA, 15 bp, Homo sapiens
ggatgagggaccttt

SEQ ID NO: 1410176 - DNA, 15 bp, Homo sapiens
aggatgagggacctt

SEQ ID NO: 1410177 - DNA, 15 bp, Homo sapiens
caggatgagggacct

SEQ ID NO: 1410178 - DNA, 15 bp, Homo sapiens
acaggatgagggacc

SEQ ID NO: 1410179 - DNA, 15 bp, Homo sapiens
aacaggatgagggac

SEQ ID NO: 1410180 - DNA, 15 bp, Homo sapiens
aaacaggatgaggga

SEQ ID NO: 1410181 - DNA, 15 bp, Homo sapiens
caaacaggatgaggg

SEQ ID NO: 1410182 - DNA, 15 bp, Homo sapiens
acaaacaggatgagg

SEQ ID NO: 1410183 - DNA, 15 bp, Homo sapiens
aacaaacaggatgag

SEQ ID NO: 1410184 - DNA, 15 bp, Homo sapiens
aaacaaacaggatga

SEQ ID NO: 1410185 - DNA, 15 bp, Homo sapiens
aaaacaaacaggatg

SEQ ID NO: 1410186 - DNA, 15 bp, Homo sapiens
taaaacaaacaggat

SEQ ID NO: 1410187 - DNA, 15 bp, Homo sapiens
ctaaaacaaacagga

SEQ ID NO: 1410188 - DNA, 15 bp, Homo sapiens
cctaaaacaaacagg

SEQ ID NO: 1410189 - DNA, 15 bp, Homo sapiens
tcctaaaacaaacag

SEQ ID NO: 1410190 - DNA, 15 bp, Homo sapiens
ttcctaaaacaaaca

SEQ ID NO: 1410191 - DNA, 15 bp, Homo sapiens
attcctaaaacaaac

SEQ ID NO: 1410192 - DNA, 15 bp, Homo sapiens
gattcctaaaacaaa

SEQ ID NO: 1410193 - DNA, 15 bp, Homo sapiens
ggattcctaaaacaa

SEQ ID NO: 1410194 - DNA, 15 bp, Homo sapiens
aggattcctaaaaca

SEQ ID NO: 1410195 - DNA, 15 bp, Homo sapiens
caggattcctaaaac

SEQ ID NO: 1410196 - DNA, 15 bp, Homo sapiens
ccaggattcctaaaa

SEQ ID NO: 1410197 - DNA, 15 bp, Homo sapiens
accaggattcctaaa

SEQ ID NO: 1410198 - DNA, 15 bp, Homo sapiens
gaccaggattcctaa

SEQ ID NO: 1410199 - DNA, 15 bp, Homo sapiens
agaccaggattccta

SEQ ID NO: 1410200 - DNA, 15 bp, Homo sapiens
gagaccaggattcct

SEQ ID NO: 1410201 - DNA, 15 bp, Homo sapiens
tgagaccaggattcc

SEQ ID NO: 1410202 - DNA, 15 bp, Homo sapiens
ctgagaccaggattc

SEQ ID NO: 1410203 - DNA, 15 bp, Homo sapiens
cctgagaccaggatt

SEQ ID NO: 1410204 - DNA, 15 bp, Homo sapiens
tcctgagaccaggat

SEQ ID NO: 1410205 - DNA, 15 bp, Homo sapiens
gtcctgagaccagga

SEQ ID NO: 1410206 - DNA, 15 bp, Homo sapiens
ggtcctgagaccagg

SEQ ID NO: 1410207 - DNA, 15 bp, Homo sapiens
aggtcctgagaccag

SEQ ID NO: 1410208 - DNA, 15 bp, Homo sapiens
gaggtcctgagacca

SEQ ID NO: 1410209 - DNA, 15 bp, Homo sapiens
tgaggtcctgagacc

SEQ ID NO: 1410210 - DNA, 15 bp, Homo sapiens
atgaggtcctgagac

SEQ ID NO: 1410211 - DNA, 15 bp, Homo sapiens
catgaggtcctgaga

SEQ ID NO: 1410212 - DNA, 15 bp, Homo sapiens
ccatgaggtcctgag

SEQ ID NO: 1410213 - DNA, 15 bp, Homo sapiens
tccatgaggtcctga

SEQ ID NO: 1410214 - DNA, 15 bp, Homo sapiens
ttccatgaggtcctg

SEQ ID NO: 1410215 - DNA, 15 bp, Homo sapiens
cttccatgaggtcct

SEQ ID NO: 1410216 - DNA, 15 bp, Homo sapiens
tcttccatgaggtcc

SEQ ID NO: 1410217 - DNA, 15 bp, Homo sapiens
ttcttccatgaggtc

SEQ ID NO: 1410218 - DNA, 15 bp, Homo sapiens
cttcttccatgaggt

SEQ ID NO: 1410219 - DNA, 15 bp, Homo sapiens
tcttcttccatgagg

SEQ ID NO: 1410220 - DNA, 15 bp, Homo sapiens
ctcttcttccatgag

SEQ ID NO: 1410221 - DNA, 15 bp, Homo sapiens
cctcttcttccatga

SEQ ID NO: 1410222 - DNA, 15 bp, Homo sapiens
ccctcttcttccatg

SEQ ID NO: 1410223 - DNA, 15 bp, Homo sapiens
cccctcttcttccat

SEQ ID NO: 1410224 - DNA, 15 bp, Homo sapiens
ccccctcttcttcca

SEQ ID NO: 1410225 - DNA, 15 bp, Homo sapiens
tccccctcttcttcc

SEQ ID NO: 1410226 - DNA, 15 bp, Homo sapiens
ctccccctcttcttc

SEQ ID NO: 1410227 - DNA, 15 bp, Homo sapiens
tctccccctcttctt

SEQ ID NO: 1410228 - DNA, 15 bp, Homo sapiens
ctctccccctcttct

SEQ ID NO: 1410229 - DNA, 15 bp, Homo sapiens
tctctccccctcttc

SEQ ID NO: 1410230 - DNA, 15 bp, Homo sapiens
ctctctccccctctt

SEQ ID NO: 1410231 - DNA, 15 bp, Homo sapiens
actctctccccctct

SEQ ID NO: 1410232 - DNA, 15 bp, Homo sapiens
aactctctccccctc

SEQ ID NO: 1410233 - DNA, 15 bp, Homo sapiens
taactctctccccct

SEQ ID NO: 1410234 - DNA, 15 bp, Homo sapiens
gtaactctctccccc

SEQ ID NO: 1410235 - DNA, 15 bp, Homo sapiens
tgtaactctctcccc

SEQ ID NO: 1410236 - DNA, 15 bp, Homo sapiens
ctgtaactctctccc

SEQ ID NO: 1410237 - DNA, 15 bp, Homo sapiens
cctgtaactctctcc

SEQ ID NO: 1410238 - DNA, 15 bp, Homo sapiens
acctgtaactctctc

SEQ ID NO: 1410239 - DNA, 15 bp, Homo sapiens
aacctgtaactctct

SEQ ID NO: 1410240 - DNA, 15 bp, Homo sapiens
caacctgtaactctc

SEQ ID NO: 1410241 - DNA, 15 bp, Homo sapiens
ccaacctgtaactct

SEQ ID NO: 1410242 - DNA, 15 bp, Homo sapiens
tccaacctgtaactc

SEQ ID NO: 1410243 - DNA, 15 bp, Homo sapiens
gtccaacctgtaact

SEQ ID NO: 1410244 - DNA, 15 bp, Homo sapiens
tgtccaacctgtaac

SEQ ID NO: 1410245 - DNA, 15 bp, Homo sapiens
atgtccaacctgtaa

SEQ ID NO: 1410246 - DNA, 15 bp, Homo sapiens
catgtccaacctgta

SEQ ID NO: 1410247 - DNA, 15 bp, Homo sapiens
tcatgtccaacctgt

SEQ ID NO: 1410248 - DNA, 15 bp, Homo sapiens
atcatgtccaacctg

SEQ ID NO: 1410249 - DNA, 15 bp, Homo sapiens
catcatgtccaacct

SEQ ID NO: 1410250 - DNA, 15 bp, Homo sapiens
gcatcatgtccaacc

SEQ ID NO: 1410251 - DNA, 15 bp, Homo sapiens
tgcatcatgtccaac

SEQ ID NO: 1410252 - DNA, 15 bp, Homo sapiens
gtgcatcatgtccaa

SEQ ID NO: 1410253 - DNA, 15 bp, Homo sapiens
tgtgcatcatgtcca

SEQ ID NO: 1410254 - DNA, 15 bp, Homo sapiens
gtgtgcatcatgtcc

SEQ ID NO: 1410255 - DNA, 15 bp, Homo sapiens
agtgtgcatcatgtc

SEQ ID NO: 1410256 - DNA, 15 bp, Homo sapiens
tagtgtgcatcatgt

SEQ ID NO: 1410257 - DNA, 15 bp, Homo sapiens
atagtgtgcatcatg

SEQ ID NO: 1410258 - DNA, 15 bp, Homo sapiens
catagtgtgcatcat

SEQ ID NO: 1410259 - DNA, 15 bp, Homo sapiens
ccatagtgtgcatca

SEQ ID NO: 1410260 - DNA, 15 bp, Homo sapiens
cccatagtgtgcatc

SEQ ID NO: 1410261 - DNA, 15 bp, Homo sapiens
ccccatagtgtgcat

SEQ ID NO: 1410262 - DNA, 15 bp, Homo sapiens
gccccatagtgtgca

SEQ ID NO: 1410263 - DNA, 15 bp, Homo sapiens
ggccccatagtgtgc

SEQ ID NO: 1410264 - DNA, 15 bp, Homo sapiens
gggccccatagtgtg

SEQ ID NO: 1410265 - DNA, 15 bp, Homo sapiens
ggggccccatagtgt

SEQ ID NO: 1410266 - DNA, 15 bp, Homo sapiens
tggggccccatagtg

SEQ ID NO: 1410267 - DNA, 15 bp, Homo sapiens
ctggggccccatagt

SEQ ID NO: 1410268 - DNA, 15 bp, Homo sapiens
gctggggccccatag

SEQ ID NO: 1410269 - DNA, 15 bp, Homo sapiens
cgctggggccccata

SEQ ID NO: 1410270 - DNA, 15 bp, Homo sapiens
tcgctggggccccat

SEQ ID NO: 1410271 - DNA, 15 bp, Homo sapiens
gtcgctggggcccca

SEQ ID NO: 1410272 - DNA, 15 bp, Homo sapiens
cgtcgctggggcccc

SEQ ID NO: 1410273 - DNA, 15 bp, Homo sapiens
acgtcgctggggccc

SEQ ID NO: 1410274 - DNA, 15 bp, Homo sapiens
cacgtcgctggggcc

SEQ ID NO: 1410275 - DNA, 15 bp, Homo sapiens
acacgtcgctggggc

SEQ ID NO: 1410276 - DNA, 15 bp, Homo sapiens
gacacgtcgctgggg

SEQ ID NO: 1410277 - DNA, 15 bp, Homo sapiens
agacacgtcgctggg

SEQ ID NO: 1410278 - DNA, 15 bp, Homo sapiens
cagacacgtcgctgg

SEQ ID NO: 1410279 - DNA, 15 bp, Homo sapiens
ccagacacgtcgctg

SEQ ID NO: 1410280 - DNA, 15 bp, Homo sapiens
accagacacgtcgct

SEQ ID NO: 1410281 - DNA, 15 bp, Homo sapiens
aaccagacacgtcgc

SEQ ID NO: 1410282 - DNA, 15 bp, Homo sapiens
caaccagacacgtcg

SEQ ID NO: 1410283 - DNA, 15 bp, Homo sapiens
tcaaccagacacgtc

SEQ ID NO: 1410284 - DNA, 15 bp, Homo sapiens
ctcaaccagacacgt

SEQ ID NO: 1410285 - DNA, 15 bp, Homo sapiens
gctcaaccagacacg

SEQ ID NO: 1410286 - DNA, 15 bp, Homo sapiens
agctcaaccagacac

SEQ ID NO: 1410287 - DNA, 15 bp, Homo sapiens
gagctcaaccagaca

SEQ ID NO: 1410288 - DNA, 15 bp, Homo sapiens
tgagctcaaccagac

SEQ ID NO: 1410289 - DNA, 15 bp, Homo sapiens
ctgagctcaaccaga

SEQ ID NO: 1410290 - DNA, 15 bp, Homo sapiens
cctgagctcaaccag

SEQ ID NO: 1410291 - DNA, 15 bp, Homo sapiens
ccctgagctcaacca

SEQ ID NO: 1410292 - DNA, 15 bp, Homo sapiens
tccctgagctcaacc

SEQ ID NO: 1410293 - DNA, 15 bp, Homo sapiens
ttccctgagctcaac

SEQ ID NO: 1410294 - DNA, 15 bp, Homo sapiens
attccctgagctcaa

SEQ ID NO: 1410295 - DNA, 15 bp, Homo sapiens
tattccctgagctca

SEQ ID NO: 1410296 - DNA, 15 bp, Homo sapiens
atattccctgagctc

SEQ ID NO: 1410297 - DNA, 15 bp, Homo sapiens
catattccctgagct

SEQ ID NO: 1410298 - DNA, 15 bp, Homo sapiens
ccatattccctgagc

SEQ ID NO: 1410299 - DNA, 15 bp, Homo sapiens
accatattccctgag

SEQ ID NO: 1410300 - DNA, 15 bp, Homo sapiens
aaccatattccctga

SEQ ID NO: 1410301 - DNA, 15 bp, Homo sapiens
gaaccatattccctg

SEQ ID NO: 1410302 - DNA, 15 bp, Homo sapiens
agaaccatattccct

SEQ ID NO: 1410303 - DNA, 15 bp, Homo sapiens
aagaaccatattccc

SEQ ID NO: 1410304 - DNA, 15 bp, Homo sapiens
taagaaccatattcc

SEQ ID NO: 1410305 - DNA, 15 bp, Homo sapiens
ctaagaaccatattc

SEQ ID NO: 1410306 - DNA, 15 bp, Homo sapiens
gctaagaaccatatt

SEQ ID NO: 1410307 - DNA, 15 bp, Homo sapiens
ggctaagaaccatat

SEQ ID NO: 1410308 - DNA, 15 bp, Homo sapiens
tggctaagaaccata

SEQ ID NO: 1410309 - DNA, 15 bp, Homo sapiens
ctggctaagaaccat

SEQ ID NO: 1410310 - DNA, 15 bp, Homo sapiens
actggctaagaacca

SEQ ID NO: 1410311 - DNA, 15 bp, Homo sapiens
aactggctaagaacc

SEQ ID NO: 1410312 - DNA, 15 bp, Homo sapiens
aaactggctaagaac

SEQ ID NO: 1410313 - DNA, 15 bp, Homo sapiens
gaaactggctaagaa

SEQ ID NO: 1410314 - DNA, 15 bp, Homo sapiens
agaaactggctaaga

SEQ ID NO: 1410315 - DNA, 15 bp, Homo sapiens
aagaaactggctaag

SEQ ID NO: 1410316 - DNA, 15 bp, Homo sapiens
caagaaactggctaa

SEQ ID NO: 1410317 - DNA, 15 bp, Homo sapiens
ccaagaaactggcta

SEQ ID NO: 1410318 - DNA, 15 bp, Homo sapiens
accaagaaactggct

SEQ ID NO: 1410319 - DNA, 15 bp, Homo sapiens
caccaagaaactggc

SEQ ID NO: 1410320 - DNA, 15 bp, Homo sapiens
tcaccaagaaactgg

SEQ ID NO: 1410321 - DNA, 15 bp, Homo sapiens
atcaccaagaaactg

SEQ ID NO: 1410322 - DNA, 15 bp, Homo sapiens
tatcaccaagaaact

SEQ ID NO: 1410323 - DNA, 15 bp, Homo sapiens
atatcaccaagaaac

SEQ ID NO: 1410324 - DNA, 15 bp, Homo sapiens
gatatcaccaagaaa

SEQ ID NO: 1410325 - DNA, 15 bp, Homo sapiens
ggatatcaccaagaa

SEQ ID NO: 1410326 - DNA, 15 bp, Homo sapiens
tggatatcaccaaga

SEQ ID NO: 1410327 - DNA, 15 bp, Homo sapiens
ctggatatcaccaag

SEQ ID NO: 1410328 - DNA, 15 bp, Homo sapiens
actggatatcaccaa

SEQ ID NO: 1410329 - DNA, 15 bp, Homo sapiens
cactggatatcacca

SEQ ID NO: 1410330 - DNA, 15 bp, Homo sapiens
ccactggatatcacc

SEQ ID NO: 1410331 - DNA, 15 bp, Homo sapiens
gccactggatatcac

SEQ ID NO: 1410332 - DNA, 15 bp, Homo sapiens
tgccactggatatca

SEQ ID NO: 1410333 - DNA, 15 bp, Homo sapiens
gtgccactggatatc

SEQ ID NO: 1410334 - DNA, 15 bp, Homo sapiens
agtgccactggatat

SEQ ID NO: 1410335 - DNA, 15 bp, Homo sapiens
aagtgccactggata

SEQ ID NO: 1410336 - DNA, 15 bp, Homo sapiens
caagtgccactggat

SEQ ID NO: 1410337 - DNA, 15 bp, Homo sapiens
acaagtgccactgga

SEQ ID NO: 1410338 - DNA, 15 bp, Homo sapiens
tacaagtgccactgg

SEQ ID NO: 1410339 - DNA, 15 bp, Homo sapiens
ttacaagtgccactg

SEQ ID NO: 1410340 - DNA, 15 bp, Homo sapiens
attacaagtgccact

SEQ ID NO: 1410341 - DNA, 15 bp, Homo sapiens
cattacaagtgccac

SEQ ID NO: 1410342 - DNA, 15 bp, Homo sapiens
ccattacaagtgcca

SEQ ID NO: 1410343 - DNA, 15 bp, Homo sapiens
gccattacaagtgcc

SEQ ID NO: 1410344 - DNA, 15 bp, Homo sapiens
cgccattacaagtgc

SEQ ID NO: 1410345 - DNA, 15 bp, Homo sapiens
acgccattacaagtg

SEQ ID NO: 1410346 - DNA, 15 bp, Homo sapiens
gacgccattacaagt

SEQ ID NO: 1410347 - DNA, 15 bp, Homo sapiens
agacgccattacaag

SEQ ID NO: 1410348 - DNA, 15 bp, Homo sapiens
aagacgccattacaa

SEQ ID NO: 1410349 - DNA, 15 bp, Homo sapiens
gaagacgccattaca

SEQ ID NO: 1410350 - DNA, 15 bp, Homo sapiens
tgaagacgccattac

SEQ ID NO: 1410351 - DNA, 15 bp, Homo sapiens
atgaagacgccatta

SEQ ID NO: 1410352 - DNA, 15 bp, Homo sapiens
aatgaagacgccatt

SEQ ID NO: 1410353 - DNA, 15 bp, Homo sapiens
gaatgaagacgccat

SEQ ID NO: 1410354 - DNA, 15 bp, Homo sapiens
tgaatgaagacgcca

SEQ ID NO: 1410355 - DNA, 15 bp, Homo sapiens
ctgaatgaagacgcc

SEQ ID NO: 1410356 - DNA, 15 bp, Homo sapiens
actgaatgaagacgc

SEQ ID NO: 1410357 - DNA, 15 bp, Homo sapiens
aactgaatgaagacg

SEQ ID NO: 1410358 - DNA, 15 bp, Homo sapiens
gaactgaatgaagac

SEQ ID NO: 1410359 - DNA, 15 bp, Homo sapiens
tgaactgaatgaaga

SEQ ID NO: 1410360 - DNA, 15 bp, Homo sapiens
atgaactgaatgaag

SEQ ID NO: 1410361 - DNA, 15 bp, Homo sapiens
catgaactgaatgaa

SEQ ID NO: 1410362 - DNA, 15 bp, Homo sapiens
gcatgaactgaatga

SEQ ID NO: 1410363 - DNA, 15 bp, Homo sapiens
tgcatgaactgaatg

SEQ ID NO: 1410364 - DNA, 15 bp, Homo sapiens
ctgcatgaactgaat

SEQ ID NO: 1410365 - DNA, 15 bp, Homo sapiens
cctgcatgaactgaa

SEQ ID NO: 1410366 - DNA, 15 bp, Homo sapiens
ccctgcatgaactga

SEQ ID NO: 1410367 - DNA, 15 bp, Homo sapiens
gccctgcatgaactg

SEQ ID NO: 1410368 - DNA, 15 bp, Homo sapiens
tgccctgcatgaact

SEQ ID NO: 1410369 - DNA, 15 bp, Homo sapiens
ttgccctgcatgaac

SEQ ID NO: 1410370 - DNA, 15 bp, Homo sapiens
tttgccctgcatgaa

SEQ ID NO: 1410371 - DNA, 15 bp, Homo sapiens
ctttgccctgcatga

SEQ ID NO: 1410372 - DNA, 15 bp, Homo sapiens
cctttgccctgcatg

SEQ ID NO: 1410373 - DNA, 15 bp, Homo sapiens
gcctttgccctgcat

SEQ ID NO: 1410374 - DNA, 15 bp, Homo sapiens
agcctttgccctgca

SEQ ID NO: 1410375 - DNA, 15 bp, Homo sapiens
aagcctttgccctgc

SEQ ID NO: 1410376 - DNA, 15 bp, Homo sapiens
taagcctttgccctg

SEQ ID NO: 1410377 - DNA, 15 bp, Homo sapiens
gtaagcctttgccct

SEQ ID NO: 1410378 - DNA, 15 bp, Homo sapiens
agtaagcctttgccc

SEQ ID NO: 1410379 - DNA, 15 bp, Homo sapiens
cagtaagcctttgcc

SEQ ID NO: 1410380 - DNA, 15 bp, Homo sapiens
tcagtaagcctttgc

SEQ ID NO: 1410381 - DNA, 15 bp, Homo sapiens
atcagtaagcctttg

SEQ ID NO: 1410382 - DNA, 15 bp, Homo sapiens
tatcagtaagccttt

SEQ ID NO: 1410383 - DNA, 15 bp, Homo sapiens
ttatcagtaagcctt

SEQ ID NO: 1410384 - DNA, 15 bp, Homo sapiens
tttatcagtaagcct

SEQ ID NO: 1410385 - DNA, 15 bp, Homo sapiens
gtttatcagtaagcc

SEQ ID NO: 1410386 - DNA, 15 bp, Homo sapiens
agtttatcagtaagc

SEQ ID NO: 1410387 - DNA, 15 bp, Homo sapiens
aagtttatcagtaag

SEQ ID NO: 1410388 - DNA, 15 bp, Homo sapiens
caagtttatcagtaa

SEQ ID NO: 1410389 - DNA, 15 bp, Homo sapiens
tcaagtttatcagta

SEQ ID NO: 1410390 - DNA, 15 bp, Homo sapiens
ctcaagtttatcagt

SEQ ID NO: 1410391 - DNA, 15 bp, Homo sapiens
actcaagtttatcag

SEQ ID NO: 1410392 - DNA, 15 bp, Homo sapiens
gactcaagtttatca

SEQ ID NO: 1410393 - DNA, 15 bp, Homo sapiens
agactcaagtttatc

SEQ ID NO: 1410394 - DNA, 15 bp, Homo sapiens
cagactcaagtttat

SEQ ID NO: 1410395 - DNA, 15 bp, Homo sapiens
gcagactcaagttta

SEQ ID NO: 1410396 - DNA, 15 bp, Homo sapiens
ggcagactcaagttt

SEQ ID NO: 1410397 - DNA, 15 bp, Homo sapiens
gggcagactcaagtt

SEQ ID NO: 1410398 - DNA, 15 bp, Homo sapiens
agggcagactcaagt

SEQ ID NO: 1410399 - DNA, 15 bp, Homo sapiens
gagggcagactcaag

SEQ ID NO: 1410400 - DNA, 15 bp, Homo sapiens
cgagggcagactcaa

SEQ ID NO: 1410401 - DNA, 15 bp, Homo sapiens
acgagggcagactca

SEQ ID NO: 1410402 - DNA, 15 bp, Homo sapiens
tacgagggcagactc

SEQ ID NO: 1410403 - DNA, 15 bp, Homo sapiens
atacgagggcagact

SEQ ID NO: 1410404 - DNA, 15 bp, Homo sapiens
catacgagggcagac

SEQ ID NO: 1410405 - DNA, 15 bp, Homo sapiens
tcatacgagggcaga

SEQ ID NO: 1410406 - DNA, 15 bp, Homo sapiens
ctcatacgagggcag

SEQ ID NO: 1410407 - DNA, 15 bp, Homo sapiens
cctcatacgagggca

SEQ ID NO: 1410408 - DNA, 15 bp, Homo sapiens
ccctcatacgagggc

SEQ ID NO: 1410409 - DNA, 15 bp, Homo sapiens
accctcatacgaggg

SEQ ID NO: 1410410 - DNA, 15 bp, Homo sapiens
caccctcatacgagg

SEQ ID NO: 1410411 - DNA, 15 bp, Homo sapiens
acaccctcatacgag

SEQ ID NO: 1410412 - DNA, 15 bp, Homo sapiens
tacaccctcatacga

SEQ ID NO: 1410413 - DNA, 15 bp, Homo sapiens
atacaccctcatacg

SEQ ID NO: 1410414 - DNA, 15 bp, Homo sapiens
tatacaccctcatac

SEQ ID NO: 1410415 - DNA, 15 bp, Homo sapiens
gtatacaccctcata

SEQ ID NO: 1410416 - DNA, 15 bp, Homo sapiens
ggtatacaccctcat

SEQ ID NO: 1410417 - DNA, 15 bp, Homo sapiens
aggtatacaccctca

SEQ ID NO: 1410418 - DNA, 15 bp, Homo sapiens
caggtatacaccctc

SEQ ID NO: 1410419 - DNA, 15 bp, Homo sapiens
ccaggtatacaccct

SEQ ID NO: 1410420 - DNA, 15 bp, Homo sapiens
gccaggtatacaccc

SEQ ID NO: 1410421 - DNA, 15 bp, Homo sapiens
ggccaggtatacacc

SEQ ID NO: 1410422 - DNA, 15 bp, Homo sapiens
aggccaggtatacac

SEQ ID NO: 1410423 - DNA, 15 bp, Homo sapiens
gaggccaggtataca

SEQ ID NO: 1410424 - DNA, 15 bp, Homo sapiens
ggaggccaggtatac

SEQ ID NO: 1410425 - DNA, 15 bp, Homo sapiens
gggaggccaggtata

SEQ ID NO: 1410426 - DNA, 15 bp, Homo sapiens
agggaggccaggtat

SEQ ID NO: 1410427 - DNA, 15 bp, Homo sapiens
gagggaggccaggta

SEQ ID NO: 1410428 - DNA, 15 bp, Homo sapiens
agagggaggccaggt

SEQ ID NO: 1410429 - DNA, 15 bp, Homo sapiens
cagagggaggccagg

SEQ ID NO: 1410430 - DNA, 15 bp, Homo sapiens
tcagagggaggccag

SEQ ID NO: 1410431 - DNA, 15 bp, Homo sapiens
ctcagagggaggcca

SEQ ID NO: 1410432 - DNA, 15 bp, Homo sapiens
cctcagagggaggcc

SEQ ID NO: 1410433 - DNA, 15 bp, Homo sapiens
gcctcagagggaggc

SEQ ID NO: 1410434 - DNA, 15 bp, Homo sapiens
agcctcagagggagg

SEQ ID NO: 1410435 - DNA, 15 bp, Homo sapiens
cagcctcagagggag

SEQ ID NO: 1410436 - DNA, 15 bp, Homo sapiens
ccagcctcagaggga

SEQ ID NO: 1410437 - DNA, 15 bp, Homo sapiens
accagcctcagaggg

SEQ ID NO: 1410438 - DNA, 15 bp, Homo sapiens
caccagcctcagagg

SEQ ID NO: 1410439 - DNA, 15 bp, Homo sapiens
tcaccagcctcagag

SEQ ID NO: 1410440 - DNA, 15 bp, Homo sapiens
gtcaccagcctcaga

SEQ ID NO: 1410441 - DNA, 15 bp, Homo sapiens
agtcaccagcctcag

SEQ ID NO: 1410442 - DNA, 15 bp, Homo sapiens
gagtcaccagcctca

SEQ ID NO: 1410443 - DNA, 15 bp, Homo sapiens
ggagtcaccagcctc

SEQ ID NO: 1410444 - DNA, 15 bp, Homo sapiens
aggagtcaccagcct

SEQ ID NO: 1410445 - DNA, 15 bp, Homo sapiens
gaggagtcaccagcc

SEQ ID NO: 1410446 - DNA, 15 bp, Homo sapiens
ggaggagtcaccagc

SEQ ID NO: 1410447 - DNA, 15 bp, Homo sapiens
gggaggagtcaccag

SEQ ID NO: 1410448 - DNA, 15 bp, Homo sapiens
agggaggagtcacca

SEQ ID NO: 1410449 - DNA, 15 bp, Homo sapiens
cagggaggagtcacc

SEQ ID NO: 1410450 - DNA, 15 bp, Homo sapiens
gcagggaggagtcac

SEQ ID NO: 1410451 - DNA, 15 bp, Homo sapiens
agcagggaggagtca

SEQ ID NO: 1410452 - DNA, 15 bp, Homo sapiens
cagcagggaggagtc

SEQ ID NO: 1410453 - DNA, 15 bp, Homo sapiens
ccagcagggaggagt

SEQ ID NO: 1410454 - DNA, 15 bp, Homo sapiens
cccagcagggaggag

SEQ ID NO: 1410455 - DNA, 15 bp, Homo sapiens
ccccagcagggagga

SEQ ID NO: 1410456 - DNA, 15 bp, Homo sapiens
gccccagcagggagg

SEQ ID NO: 1410457 - DNA, 15 bp, Homo sapiens
ggccccagcagggag

SEQ ID NO: 1410458 - DNA, 15 bp, Homo sapiens
gggccccagcaggga

SEQ ID NO: 1410459 - DNA, 15 bp, Homo sapiens
ggggccccagcaggg

SEQ ID NO: 1410460 - DNA, 15 bp, Homo sapiens
tggggccccagcagg

SEQ ID NO: 1410461 - DNA, 15 bp, Homo sapiens
gtggggccccagcag

SEQ ID NO: 1410462 - DNA, 15 bp, Homo sapiens
tgtggggccccagca

SEQ ID NO: 1410463 - DNA, 15 bp, Homo sapiens
ctgtggggccccagc

SEQ ID NO: 1410464 - DNA, 15 bp, Homo sapiens
cctgtggggccccag

SEQ ID NO: 1410465 - DNA, 15 bp, Homo sapiens
acctgtggggcccca

SEQ ID NO: 1410466 - DNA, 15 bp, Homo sapiens
cacctgtggggcccc

SEQ ID NO: 1410467 - DNA, 15 bp, Homo sapiens
tcacctgtggggccc

SEQ ID NO: 1410468 - DNA, 15 bp, Homo sapiens
ctcacctgtggggcc

SEQ ID NO: 1410469 - DNA, 15 bp, Homo sapiens
cctcacctgtggggc

SEQ ID NO: 1410470 - DNA, 15 bp, Homo sapiens
gcctcacctgtgggg

SEQ ID NO: 1410471 - DNA, 15 bp, Homo sapiens
tgcctcacctgtggg

SEQ ID NO: 1410472 - DNA, 15 bp, Homo sapiens
ctgcctcacctgtgg

SEQ ID NO: 1410473 - DNA, 15 bp, Homo sapiens
tctgcctcacctgtg

SEQ ID NO: 1410474 - DNA, 15 bp, Homo sapiens
ttctgcctcacctgt

SEQ ID NO: 1410475 - DNA, 15 bp, Homo sapiens
gttctgcctcacctg

SEQ ID NO: 1410476 - DNA, 15 bp, Homo sapiens
tgttctgcctcacct

SEQ ID NO: 1410477 - DNA, 15 bp, Homo sapiens
ctgttctgcctcacc

SEQ ID NO: 1410478 - DNA, 15 bp, Homo sapiens
gctgttctgcctcac

SEQ ID NO: 1410479 - DNA, 15 bp, Homo sapiens
agctgttctgcctca

SEQ ID NO: 1410480 - DNA, 15 bp, Homo sapiens
tagctgttctgcctc

SEQ ID NO: 1410481 - DNA, 15 bp, Homo sapiens
ctagctgttctgcct

SEQ ID NO: 1410482 - DNA, 15 bp, Homo sapiens
tctagctgttctgcc

SEQ ID NO: 1410483 - DNA, 15 bp, Homo sapiens
ctctagctgttctgc

SEQ ID NO: 1410484 - DNA, 15 bp, Homo sapiens
cctctagctgttctg

SEQ ID NO: 1410485 - DNA, 15 bp, Homo sapiens
ccctctagctgttct

SEQ ID NO: 1410486 - DNA, 15 bp, Homo sapiens
gccctctagctgttc

SEQ ID NO: 1410487 - DNA, 15 bp, Homo sapiens
ggccctctagctgtt

SEQ ID NO: 1410488 - DNA, 15 bp, Homo sapiens
aggccctctagctgt

SEQ ID NO: 1410489 - DNA, 15 bp, Homo sapiens
gaggccctctagctg

SEQ ID NO: 1410490 - DNA, 15 bp, Homo sapiens
ggaggccctctagct

SEQ ID NO: 1410491 - DNA, 15 bp, Homo sapiens
gggaggccctctagc

SEQ ID NO: 1410492 - DNA, 15 bp, Homo sapiens
ggggaggccctctag

SEQ ID NO: 1410493 - DNA, 15 bp, Homo sapiens
cggggaggccctcta

SEQ ID NO: 1410494 - DNA, 15 bp, Homo sapiens
gcggggaggccctct

SEQ ID NO: 1410495 - DNA, 15 bp, Homo sapiens
ggcggggaggccctc

SEQ ID NO: 1410496 - DNA, 15 bp, Homo sapiens
aggcggggaggccct

SEQ ID NO: 1410497 - DNA, 15 bp, Homo sapiens
caggcggggaggccc

SEQ ID NO: 1410498 - DNA, 15 bp, Homo sapiens
gcaggcggggaggcc

SEQ ID NO: 1410499 - DNA, 15 bp, Homo sapiens
ggcaggcggggaggc

SEQ ID NO: 1410500 - DNA, 15 bp, Homo sapiens
gggcaggcggggagg

SEQ ID NO: 1410501 - DNA, 15 bp, Homo sapiens
cgggcaggcggggag

SEQ ID NO: 1410502 - DNA, 15 bp, Homo sapiens
gcgggcaggcgggga

SEQ ID NO: 1410503 - DNA, 15 bp, Homo sapiens
ggcgggcaggcgggg

SEQ ID NO: 1410504 - DNA, 15 bp, Homo sapiens
aggcgggcaggcggg

SEQ ID NO: 1410505 - DNA, 15 bp, Homo sapiens
aaggcgggcaggcgg

SEQ ID NO: 1410506 - DNA, 15 bp, Homo sapiens
caaggcgggcaggcg

SEQ ID NO: 1410507 - DNA, 15 bp, Homo sapiens
ccaaggcgggcaggc

SEQ ID NO: 1410508 - DNA, 15 bp, Homo sapiens
gccaaggcgggcagg

SEQ ID NO: 1410509 - DNA, 15 bp, Homo sapiens
agccaaggcgggcag

SEQ ID NO: 1410510 - DNA, 15 bp, Homo sapiens
cagccaaggcgggca

SEQ ID NO: 1410511 - DNA, 15 bp, Homo sapiens
ccagccaaggcgggc

SEQ ID NO: 1410512 - DNA, 15 bp, Homo sapiens
gccagccaaggcggg

SEQ ID NO: 1410513 - DNA, 15 bp, Homo sapiens
agccagccaaggcgg

SEQ ID NO: 1410514 - DNA, 15 bp, Homo sapiens
tagccagccaaggcg

SEQ ID NO: 1410515 - DNA, 15 bp, Homo sapiens
ctagccagccaaggc

SEQ ID NO: 1410516 - DNA, 15 bp, Homo sapiens
gctagccagccaagg

SEQ ID NO: 1410517 - DNA, 15 bp, Homo sapiens
agctagccagccaag

SEQ ID NO: 1410518 - DNA, 15 bp, Homo sapiens
gagctagccagccaa

SEQ ID NO: 1410519 - DNA, 15 bp, Homo sapiens
cgagctagccagcca

SEQ ID NO: 1410520 - DNA, 15 bp, Homo sapiens
gcgagctagccagcc

SEQ ID NO: 1410521 - DNA, 15 bp, Homo sapiens
ggcgagctagccagc

SEQ ID NO: 1410522 - DNA, 15 bp, Homo sapiens
aggcgagctagccag

SEQ ID NO: 1410523 - DNA, 15 bp, Homo sapiens
gaggcgagctagcca

SEQ ID NO: 1410524 - DNA, 15 bp, Homo sapiens
agaggcgagctagcc

SEQ ID NO: 1410525 - DNA, 15 bp, Homo sapiens
gagaggcgagctagc

SEQ ID NO: 1410526 - DNA, 15 bp, Homo sapiens
ggagaggcgagctag

SEQ ID NO: 1410527 - DNA, 15 bp, Homo sapiens
aggagaggcgagcta

SEQ ID NO: 1410528 - DNA, 15 bp, Homo sapiens
caggagaggcgagct

SEQ ID NO: 1410529 - DNA, 15 bp, Homo sapiens
acaggagaggcgagc

SEQ ID NO: 1410530 - DNA, 15 bp, Homo sapiens
cacaggagaggcgag

SEQ ID NO: 1410531 - DNA, 15 bp, Homo sapiens
gcacaggagaggcga

SEQ ID NO: 1410532 - DNA, 15 bp, Homo sapiens
cgcacaggagaggcg

SEQ ID NO: 1410533 - DNA, 15 bp, Homo sapiens
acgcacaggagaggc

SEQ ID NO: 1410534 - DNA, 15 bp, Homo sapiens
tacgcacaggagagg

SEQ ID NO: 1410535 - DNA, 15 bp, Homo sapiens
atacgcacaggagag

SEQ ID NO: 1410536 - DNA, 15 bp, Homo sapiens
catacgcacaggaga

SEQ ID NO: 1410537 - DNA, 15 bp, Homo sapiens
ccatacgcacaggag

SEQ ID NO: 1410538 - DNA, 15 bp, Homo sapiens
cccatacgcacagga

SEQ ID NO: 1410539 - DNA, 15 bp, Homo sapiens
tcccatacgcacagg

SEQ ID NO: 1410540 - DNA, 15 bp, Homo sapiens
ttcccatacgcacag

SEQ ID NO: 1410541 - DNA, 15 bp, Homo sapiens
gttcccatacgcaca

SEQ ID NO: 1410542 - DNA, 15 bp, Homo sapiens
tgttcccatacgcac

SEQ ID NO: 1410543 - DNA, 15 bp, Homo sapiens
gtgttcccatacgca

SEQ ID NO: 1410544 - DNA, 15 bp, Homo sapiens
ggtgttcccatacgc

SEQ ID NO: 1410545 - DNA, 15 bp, Homo sapiens
aggtgttcccatacg

SEQ ID NO: 1410546 - DNA, 15 bp, Homo sapiens
taggtgttcccatac

SEQ ID NO: 1410547 - DNA, 15 bp, Homo sapiens
ctaggtgttcccata

SEQ ID NO: 1410548 - DNA, 15 bp, Homo sapiens
gctaggtgttcccat

SEQ ID NO: 1410549 - DNA, 15 bp, Homo sapiens
tgctaggtgttccca

SEQ ID NO: 1410550 - DNA, 15 bp, Homo sapiens
gtgctaggtgttccc

SEQ ID NO: 1410551 - DNA, 15 bp, Homo sapiens
cgtgctaggtgttcc

SEQ ID NO: 1410552 - DNA, 15 bp, Homo sapiens
acgtgctaggtgttc

SEQ ID NO: 1410553 - DNA, 15 bp, Homo sapiens
cacgtgctaggtgtt

SEQ ID NO: 1410554 - DNA, 15 bp, Homo sapiens
gcacgtgctaggtgt

SEQ ID NO: 1410555 - DNA, 15 bp, Homo sapiens
agcacgtgctaggtg

SEQ ID NO: 1410556 - DNA, 15 bp, Homo sapiens
cagcacgtgctaggt

SEQ ID NO: 1410557 - DNA, 15 bp, Homo sapiens
ccagcacgtgctagg

SEQ ID NO: 1410558 - DNA, 15 bp, Homo sapiens
tccagcacgtgctag

SEQ ID NO: 1410559 - DNA, 15 bp, Homo sapiens
atccagcacgtgcta

SEQ ID NO: 1410560 - DNA, 15 bp, Homo sapiens
catccagcacgtgct

SEQ ID NO: 1410561 - DNA, 15 bp, Homo sapiens
ccatccagcacgtgc

SEQ ID NO: 1410562 - DNA, 15 bp, Homo sapiens
cccatccagcacgtg

SEQ ID NO: 1410563 - DNA, 15 bp, Homo sapiens
gcccatccagcacgt

SEQ ID NO: 1410564 - DNA, 15 bp, Homo sapiens
agcccatccagcacg

SEQ ID NO: 1410565 - DNA, 15 bp, Homo sapiens
cagcccatccagcac

SEQ ID NO: 1410566 - DNA, 15 bp, Homo sapiens
gcagcccatccagca

SEQ ID NO: 1410567 - DNA, 15 bp, Homo sapiens
ggcagcccatccagc

SEQ ID NO: 1410568 - DNA, 15 bp, Homo sapiens
aggcagcccatccag

SEQ ID NO: 1410569 - DNA, 15 bp, Homo sapiens
gaggcagcccatcca

SEQ ID NO: 1410570 - DNA, 15 bp, Homo sapiens
agaggcagcccatcc

SEQ ID NO: 1410571 - DNA, 15 bp, Homo sapiens
cagaggcagcccatc

SEQ ID NO: 1410572 - DNA, 15 bp, Homo sapiens
tcagaggcagcccat

SEQ ID NO: 1410573 - DNA, 15 bp, Homo sapiens
gtcagaggcagccca

SEQ ID NO: 1410574 - DNA, 15 bp, Homo sapiens
agtcagaggcagccc

SEQ ID NO: 1410575 - DNA, 15 bp, Homo sapiens
gagtcagaggcagcc

SEQ ID NO: 1410576 - DNA, 15 bp, Homo sapiens
tgagtcagaggcagc

SEQ ID NO: 1410577 - DNA, 15 bp, Homo sapiens
ctgagtcagaggcag

SEQ ID NO: 1410578 - DNA, 15 bp, Homo sapiens
tctgagtcagaggca

SEQ ID NO: 1410579 - DNA, 15 bp, Homo sapiens
ctctgagtcagaggc

SEQ ID NO: 1410580 - DNA, 15 bp, Homo sapiens
cctctgagtcagagg

SEQ ID NO: 1410581 - DNA, 15 bp, Homo sapiens
gcctctgagtcagag

SEQ ID NO: 1410582 - DNA, 15 bp, Homo sapiens
tgcctctgagtcaga

SEQ ID NO: 1410583 - DNA, 15 bp, Homo sapiens
atgcctctgagtcag

SEQ ID NO: 1410584 - DNA, 15 bp, Homo sapiens
catgcctctgagtca

SEQ ID NO: 1410585 - DNA, 15 bp, Homo sapiens
ccatgcctctgagtc

SEQ ID NO: 1410586 - DNA, 15 bp, Homo sapiens
gccatgcctctgagt

SEQ ID NO: 1410587 - DNA, 15 bp, Homo sapiens
ggccatgcctctgag

SEQ ID NO: 1410588 - DNA, 15 bp, Homo sapiens
cggccatgcctctga

SEQ ID NO: 1410589 - DNA, 15 bp, Homo sapiens
ccggccatgcctctg

SEQ ID NO: 1410590 - DNA, 15 bp, Homo sapiens
tccggccatgcctct

SEQ ID NO: 1410591 - DNA, 15 bp, Homo sapiens
atccggccatgcctc

SEQ ID NO: 1410592 - DNA, 15 bp, Homo sapiens
aatccggccatgcct

SEQ ID NO: 1410593 - DNA, 15 bp, Homo sapiens
aaatccggccatgcc

SEQ ID NO: 1410594 - DNA, 15 bp, Homo sapiens
caaatccggccatgc

SEQ ID NO: 1410595 - DNA, 15 bp, Homo sapiens
ccaaatccggccatg

SEQ ID NO: 1410596 - DNA, 15 bp, Homo sapiens
gccaaatccggccat

SEQ ID NO: 1410597 - DNA, 15 bp, Homo sapiens
tgccaaatccggcca

SEQ ID NO: 1410598 - DNA, 15 bp, Homo sapiens
ttgccaaatccggcc

SEQ ID NO: 1410599 - DNA, 15 bp, Homo sapiens
gttgccaaatccggc

SEQ ID NO: 1410600 - DNA, 15 bp, Homo sapiens
agttgccaaatccgg

SEQ ID NO: 1410601 - DNA, 15 bp, Homo sapiens
gagttgccaaatccg

SEQ ID NO: 1410602 - DNA, 15 bp, Homo sapiens
tgagttgccaaatcc

SEQ ID NO: 1410603 - DNA, 15 bp, Homo sapiens
ttgagttgccaaatc

SEQ ID NO: 1410604 - DNA, 15 bp, Homo sapiens
tttgagttgccaaat

SEQ ID NO: 1410605 - DNA, 15 bp, Homo sapiens
ttttgagttgccaaa

SEQ ID NO: 1410606 - DNA, 15 bp, Homo sapiens
gttttgagttgccaa

SEQ ID NO: 1410607 - DNA, 15 bp, Homo sapiens
ggttttgagttgcca

SEQ ID NO: 1410608 - DNA, 15 bp, Homo sapiens
tggttttgagttgcc

SEQ ID NO: 1410609 - DNA, 15 bp, Homo sapiens
gtggttttgagttgc

SEQ ID NO: 1410610 - DNA, 15 bp, Homo sapiens
ggtggttttgagttg

SEQ ID NO: 1410611 - DNA, 15 bp, Homo sapiens
aggtggttttgagtt

SEQ ID NO: 1410612 - DNA, 15 bp, Homo sapiens
aaggtggttttgagt

SEQ ID NO: 1410613 - DNA, 15 bp, Homo sapiens
caaggtggttttgag

SEQ ID NO: 1410614 - DNA, 15 bp, Homo sapiens
gcaaggtggttttga

SEQ ID NO: 1410615 - DNA, 15 bp, Homo sapiens
ggcaaggtggttttg

SEQ ID NO: 1410616 - DNA, 15 bp, Homo sapiens
aggcaaggtggtttt

SEQ ID NO: 1410617 - DNA, 15 bp, Homo sapiens
gaggcaaggtggttt

SEQ ID NO: 1410618 - DNA, 15 bp, Homo sapiens
tgaggcaaggtggtt

SEQ ID NO: 1410619 - DNA, 15 bp, Homo sapiens
ctgaggcaaggtggt

SEQ ID NO: 1410620 - DNA, 15 bp, Homo sapiens
gctgaggcaaggtgg

SEQ ID NO: 1410621 - DNA, 15 bp, Homo sapiens
agctgaggcaaggtg

SEQ ID NO: 1410622 - DNA, 15 bp, Homo sapiens
cagctgaggcaaggt

SEQ ID NO: 1410623 - DNA, 15 bp, Homo sapiens
tcagctgaggcaagg

SEQ ID NO: 1410624 - DNA, 15 bp, Homo sapiens
atcagctgaggcaag

SEQ ID NO: 1410625 - DNA, 15 bp, Homo sapiens
gatcagctgaggcaa

SEQ ID NO: 1410626 - DNA, 15 bp, Homo sapiens
tgatcagctgaggca

SEQ ID NO: 1410627 - DNA, 15 bp, Homo sapiens
ctgatcagctgaggc

SEQ ID NO: 1410628 - DNA, 15 bp, Homo sapiens
tctgatcagctgagg

SEQ ID NO: 1410629 - DNA, 15 bp, Homo sapiens
ctctgatcagctgag

SEQ ID NO: 1410630 - DNA, 15 bp, Homo sapiens
actctgatcagctga

SEQ ID NO: 1410631 - DNA, 15 bp, Homo sapiens
aactctgatcagctg

SEQ ID NO: 1410632 - DNA, 15 bp, Homo sapiens
aaactctgatcagct

SEQ ID NO: 1410633 - DNA, 15 bp, Homo sapiens
gaaactctgatcagc

SEQ ID NO: 1410634 - DNA, 15 bp, Homo sapiens
agaaactctgatcag

SEQ ID NO: 1410635 - DNA, 15 bp, Homo sapiens
cagaaactctgatca

SEQ ID NO: 1410636 - DNA, 15 bp, Homo sapiens
acagaaactctgatc

SEQ ID NO: 1410637 - DNA, 15 bp, Homo sapiens
cacagaaactctgat

SEQ ID NO: 1410638 - DNA, 15 bp, Homo sapiens
ccacagaaactctga

SEQ ID NO: 1410639 - DNA, 15 bp, Homo sapiens
tccacagaaactctg

SEQ ID NO: 1410640 - DNA, 15 bp, Homo sapiens
ttccacagaaactct

SEQ ID NO: 1410641 - DNA, 15 bp, Homo sapiens
attccacagaaactc

SEQ ID NO: 1410642 - DNA, 15 bp, Homo sapiens
aattccacagaaact

SEQ ID NO: 1410643 - DNA, 15 bp, Homo sapiens
gaattccacagaaac

SEQ ID NO: 1410644 - DNA, 15 bp, Homo sapiens
agaattccacagaaa

SEQ ID NO: 1410645 - DNA, 15 bp, Homo sapiens
cagaattccacagaa

SEQ ID NO: 1410646 - DNA, 15 bp, Homo sapiens
acagaattccacaga

SEQ ID NO: 1410647 - DNA, 15 bp, Homo sapiens
aacagaattccacag

SEQ ID NO: 1410648 - DNA, 15 bp, Homo sapiens
aaacagaattccaca

SEQ ID NO: 1410649 - DNA, 15 bp, Homo sapiens
caaacagaattccac

SEQ ID NO: 1410650 - DNA, 15 bp, Homo sapiens
acaaacagaattcca

SEQ ID NO: 1410651 - DNA, 15 bp, Homo sapiens
aacaaacagaattcc

SEQ ID NO: 1410652 - DNA, 15 bp, Homo sapiens
taacaaacagaattc

SEQ ID NO: 1410653 - DNA, 15 bp, Homo sapiens
ttaacaaacagaatt

SEQ ID NO: 1410654 - DNA, 15 bp, Homo sapiens
tttaacaaacagaat

SEQ ID NO: 1410655 - DNA, 15 bp, Homo sapiens
atttaacaaacagaa

SEQ ID NO: 1410656 - DNA, 15 bp, Homo sapiens
gatttaacaaacaga

SEQ ID NO: 1410657 - DNA, 15 bp, Homo sapiens
tgatttaacaaacag

SEQ ID NO: 1410658 - DNA, 15 bp, Homo sapiens
ttgatttaacaaaca

SEQ ID NO: 1410659 - DNA, 15 bp, Homo sapiens
tttgatttaacaaac

SEQ ID NO: 1410660 - DNA, 15 bp, Homo sapiens
atttgatttaacaaa

SEQ ID NO: 1410661 - DNA, 15 bp, Homo sapiens
aatttgatttaacaa

SEQ ID NO: 1410662 - DNA, 15 bp, Homo sapiens
taatttgatttaaca

SEQ ID NO: 1410663 - DNA, 15 bp, Homo sapiens
ctaatttgatttaac

SEQ ID NO: 1410664 - DNA, 15 bp, Homo sapiens
gctaatttgatttaa

SEQ ID NO: 1410665 - DNA, 15 bp, Homo sapiens
agctaatttgattta

SEQ ID NO: 1410666 - DNA, 15 bp, Homo sapiens
cagctaatttgattt

SEQ ID NO: 1410667 - DNA, 15 bp, Homo sapiens
ccagctaatttgatt

SEQ ID NO: 1410668 - DNA, 15 bp, Homo sapiens
accagctaatttgat

SEQ ID NO: 1410669 - DNA, 15 bp, Homo sapiens
gaccagctaatttga

SEQ ID NO: 1410670 - DNA, 15 bp, Homo sapiens
agaccagctaatttg

SEQ ID NO: 1410671 - DNA, 15 bp, Homo sapiens
gagaccagctaattt

SEQ ID NO: 1410672 - DNA, 15 bp, Homo sapiens
agagaccagctaatt

SEQ ID NO: 1410673 - DNA, 15 bp, Homo sapiens
cagagaccagctaat

SEQ ID NO: 1410674 - DNA, 15 bp, Homo sapiens
tcagagaccagctaa

SEQ ID NO: 1410675 - DNA, 15 bp, Homo sapiens
ttcagagaccagcta

SEQ ID NO: 1410676 - DNA, 15 bp, Homo sapiens
attcagagaccagct

SEQ ID NO: 1410677 - DNA, 15 bp, Homo sapiens
aattcagagaccagc

SEQ ID NO: 1410678 - DNA, 15 bp, Homo sapiens
taattcagagaccag

SEQ ID NO: 1410679 - DNA, 15 bp, Homo sapiens
ttaattcagagacca

SEQ ID NO: 1410680 - DNA, 15 bp, Homo sapiens
cttaattcagagacc

SEQ ID NO: 1410681 - DNA, 15 bp, Homo sapiens
ccttaattcagagac

SEQ ID NO: 1410682 - DNA, 15 bp, Homo sapiens
cccttaattcagaga

SEQ ID NO: 1410683 - DNA, 15 bp, Homo sapiens
ccccttaattcagag

SEQ ID NO: 1410684 - DNA, 15 bp, Homo sapiens
cccccttaattcaga

SEQ ID NO: 1410685 - DNA, 15 bp, Homo sapiens
tcccccttaattcag

SEQ ID NO: 1410686 - DNA, 15 bp, Homo sapiens
ctcccccttaattca

SEQ ID NO: 1410687 - DNA, 15 bp, Homo sapiens
tctcccccttaattc

SEQ ID NO: 1410688 - DNA, 15 bp, Homo sapiens
gtctcccccttaatt

SEQ ID NO: 1410689 - DNA, 15 bp, Homo sapiens
cgtctcccccttaat

SEQ ID NO: 1410690 - DNA, 15 bp, Homo sapiens
tcgtctcccccttaa

SEQ ID NO: 1410691 - DNA, 15 bp, Homo sapiens
gtcgtctccccctta

SEQ ID NO: 1410692 - DNA, 15 bp, Homo sapiens
ggtcgtctccccctt

SEQ ID NO: 1410693 - DNA, 15 bp, Homo sapiens
aggtcgtctccccct

SEQ ID NO: 1410694 - DNA, 15 bp, Homo sapiens
aaggtcgtctccccc

SEQ ID NO: 1410695 - DNA, 15 bp, Homo sapiens
gaaggtcgtctcccc

SEQ ID NO: 1410696 - DNA, 15 bp, Homo sapiens
agaaggtcgtctccc

SEQ ID NO: 1410697 - DNA, 15 bp, Homo sapiens
gagaaggtcgtctcc

SEQ ID NO: 1410698 - DNA, 15 bp, Homo sapiens
agagaaggtcgtctc

SEQ ID NO: 1410699 - DNA, 15 bp, Homo sapiens
tagagaaggtcgtct

SEQ ID NO: 1410700 - DNA, 15 bp, Homo sapiens
ttagagaaggtcgtc

SEQ ID NO: 1410701 - DNA, 15 bp, Homo sapiens
cttagagaaggtcgt

SEQ ID NO: 1410702 - DNA, 15 bp, Homo sapiens
tcttagagaaggtcg

SEQ ID NO: 1410703 - DNA, 15 bp, Homo sapiens
atcttagagaaggtc

SEQ ID NO: 1410704 - DNA, 15 bp, Homo sapiens
catcttagagaaggt

SEQ ID NO: 1410705 - DNA, 15 bp, Homo sapiens
tcatcttagagaagg

SEQ ID NO: 1410706 - DNA, 15 bp, Homo sapiens
ttcatcttagagaag

SEQ ID NO: 1410707 - DNA, 15 bp, Homo sapiens
gttcatcttagagaa

SEQ ID NO: 1410708 - DNA, 15 bp, Homo sapiens
tgttcatcttagaga

SEQ ID NO: 1410709 - DNA, 15 bp, Homo sapiens
ctgttcatcttagag

SEQ ID NO: 1410710 - DNA, 15 bp, Homo sapiens
cctgttcatcttaga

SEQ ID NO: 1410711 - DNA, 15 bp, Homo sapiens
ccctgttcatcttag

SEQ ID NO: 1410712 - DNA, 15 bp, Homo sapiens
accctgttcatctta

SEQ ID NO: 1410713 - DNA, 15 bp, Homo sapiens
aaccctgttcatctt

SEQ ID NO: 1410714 - DNA, 15 bp, Homo sapiens
gaaccctgttcatct

SEQ ID NO: 1410715 - DNA, 15 bp, Homo sapiens
cgaaccctgttcatc

SEQ ID NO: 1410716 - DNA, 15 bp, Homo sapiens
gcgaaccctgttcat

SEQ ID NO: 1410717 - DNA, 15 bp, Homo sapiens
ggcgaaccctgttca

SEQ ID NO: 1410718 - DNA, 15 bp, Homo sapiens
gggcgaaccctgttc

SEQ ID NO: 1410719 - DNA, 15 bp, Homo sapiens
ggggcgaaccctgtt

SEQ ID NO: 1410720 - DNA, 15 bp, Homo sapiens
tggggcgaaccctgt

SEQ ID NO: 1410721 - DNA, 15 bp, Homo sapiens
ctggggcgaaccctg

SEQ ID NO: 1410722 - DNA, 15 bp, Homo sapiens
actggggcgaaccct

SEQ ID NO: 1410723 - DNA, 15 bp, Homo sapiens
gactggggcgaaccc

SEQ ID NO: 1410724 - DNA, 15 bp, Homo sapiens
ggactggggcgaacc

SEQ ID NO: 1410725 - DNA, 15 bp, Homo sapiens
aggactggggcgaac

SEQ ID NO: 1410726 - DNA, 15 bp, Homo sapiens
gaggactggggcgaa

SEQ ID NO: 1410727 - DNA, 15 bp, Homo sapiens
ggaggactggggcga

SEQ ID NO: 1410728 - DNA, 15 bp, Homo sapiens
aggaggactggggcg

SEQ ID NO: 1410729 - DNA, 15 bp, Homo sapiens
caggaggactggggc

SEQ ID NO: 1410730 - DNA, 15 bp, Homo sapiens
gcaggaggactgggg

SEQ ID NO: 1410731 - DNA, 15 bp, Homo sapiens
ggcaggaggactggg

SEQ ID NO: 1410732 - DNA, 15 bp, Homo sapiens
aggcaggaggactgg

SEQ ID NO: 1410733 - DNA, 15 bp, Homo sapiens
caggcaggaggactg

SEQ ID NO: 1410734 - DNA, 15 bp, Homo sapiens
ccaggcaggaggact

SEQ ID NO: 1410735 - DNA, 15 bp, Homo sapiens
tccaggcaggaggac

SEQ ID NO: 1410736 - DNA, 15 bp, Homo sapiens
ctccaggcaggagga

SEQ ID NO: 1410737 - DNA, 15 bp, Homo sapiens
tctccaggcaggagg

SEQ ID NO: 1410738 - DNA, 15 bp, Homo sapiens
gtctccaggcaggag

SEQ ID NO: 1410739 - DNA, 15 bp, Homo sapiens
tgtctccaggcagga

SEQ ID NO: 1410740 - DNA, 15 bp, Homo sapiens
ctgtctccaggcagg

SEQ ID NO: 1410741 - DNA, 15 bp, Homo sapiens
actgtctccaggcag

SEQ ID NO: 1410742 - DNA, 15 bp, Homo sapiens
aactgtctccaggca

SEQ ID NO: 1410743 - DNA, 15 bp, Homo sapiens
caactgtctccaggc

SEQ ID NO: 1410744 - DNA, 15 bp, Homo sapiens
tcaactgtctccagg

SEQ ID NO: 1410745 - DNA, 15 bp, Homo sapiens
atcaactgtctccag

SEQ ID NO: 1410746 - DNA, 15 bp, Homo sapiens
catcaactgtctcca

SEQ ID NO: 1410747 - DNA, 15 bp, Homo sapiens
acatcaactgtctcc

SEQ ID NO: 1410748 - DNA, 15 bp, Homo sapiens
cacatcaactgtctc

SEQ ID NO: 1410749 - DNA, 15 bp, Homo sapiens
acacatcaactgtct

SEQ ID NO: 1410750 - DNA, 15 bp, Homo sapiens
gacacatcaactgtc

SEQ ID NO: 1410751 - DNA, 15 bp, Homo sapiens
tgacacatcaactgt

SEQ ID NO: 1410752 - DNA, 15 bp, Homo sapiens
atgacacatcaactg

SEQ ID NO: 1410753 - DNA, 15 bp, Homo sapiens
catgacacatcaact

SEQ ID NO: 1410754 - DNA, 15 bp, Homo sapiens
gcatgacacatcaac

SEQ ID NO: 1410755 - DNA, 15 bp, Homo sapiens
tgcatgacacatcaa

SEQ ID NO: 1410756 - DNA, 15 bp, Homo sapiens
ctgcatgacacatca

SEQ ID NO: 1410757 - DNA, 15 bp, Homo sapiens
tctgcatgacacatc

SEQ ID NO: 1410758 - DNA, 15 bp, Homo sapiens
ctctgcatgacacat

SEQ ID NO: 1410759 - DNA, 15 bp, Homo sapiens
gctctgcatgacaca

SEQ ID NO: 1410760 - DNA, 15 bp, Homo sapiens
agctctgcatgacac

SEQ ID NO: 1410761 - DNA, 15 bp, Homo sapiens
gagctctgcatgaca

SEQ ID NO: 1410762 - DNA, 15 bp, Homo sapiens
agagctctgcatgac

SEQ ID NO: 1410763 - DNA, 15 bp, Homo sapiens
aagagctctgcatga

SEQ ID NO: 1410764 - DNA, 15 bp, Homo sapiens
taagagctctgcatg

SEQ ID NO: 1410765 - DNA, 15 bp, Homo sapiens
gtaagagctctgcat

SEQ ID NO: 1410766 - DNA, 15 bp, Homo sapiens
agtaagagctctgca

SEQ ID NO: 1410767 - DNA, 15 bp, Homo sapiens
aagtaagagctctgc

SEQ ID NO: 1410768 - DNA, 15 bp, Homo sapiens
gaagtaagagctctg

SEQ ID NO: 1410769 - DNA, 15 bp, Homo sapiens
agaagtaagagctct

SEQ ID NO: 1410770 - DNA, 15 bp, Homo sapiens
gagaagtaagagctc

SEQ ID NO: 1410771 - DNA, 15 bp, Homo sapiens
ggagaagtaagagct

SEQ ID NO: 1410772 - DNA, 15 bp, Homo sapiens
tggagaagtaagagc

SEQ ID NO: 1410773 - DNA, 15 bp, Homo sapiens
ctggagaagtaagag

SEQ ID NO: 1410774 - DNA, 15 bp, Homo sapiens
gctggagaagtaaga

SEQ ID NO: 1410775 - DNA, 15 bp, Homo sapiens
tgctggagaagtaag

SEQ ID NO: 1410776 - DNA, 15 bp, Homo sapiens
ttgctggagaagtaa

SEQ ID NO: 1410777 - DNA, 15 bp, Homo sapiens
gttgctggagaagta

SEQ ID NO: 1410778 - DNA, 15 bp, Homo sapiens
tgttgctggagaagt

SEQ ID NO: 1410779 - DNA, 15 bp, Homo sapiens
gtgttgctggagaag

SEQ ID NO: 1410780 - DNA, 15 bp, Homo sapiens
agtgttgctggagaa

SEQ ID NO: 1410781 - DNA, 15 bp, Homo sapiens
gagtgttgctggaga

SEQ ID NO: 1410782 - DNA, 15 bp, Homo sapiens
agagtgttgctggag

SEQ ID NO: 1410783 - DNA, 15 bp, Homo sapiens
aagagtgttgctgga

SEQ ID NO: 1410784 - DNA, 15 bp, Homo sapiens
gaagagtgttgctgg

SEQ ID NO: 1410785 - DNA, 15 bp, Homo sapiens
tgaagagtgttgctg

SEQ ID NO: 1410786 - DNA, 15 bp, Homo sapiens
ctgaagagtgttgct

SEQ ID NO: 1410787 - DNA, 15 bp, Homo sapiens
actgaagagtgttgc

SEQ ID NO: 1410788 - DNA, 15 bp, Homo sapiens
tactgaagagtgttg

SEQ ID NO: 1410789 - DNA, 15 bp, Homo sapiens
gtactgaagagtgtt

SEQ ID NO: 1410790 - DNA, 15 bp, Homo sapiens
tgtactgaagagtgt

SEQ ID NO: 1410791 - DNA, 15 bp, Homo sapiens
tatgtactgaagagt

SEQ ID NO: 1410792 - DNA, 15 bp, Homo sapiens
ttatgtactgaagag

SEQ ID NO: 1410793 - DNA, 15 bp, Homo sapiens
attatgtactgaaga

SEQ ID NO: 1410794 - DNA, 15 bp, Homo sapiens
tattatgtactgaag

SEQ ID NO: 1410795 - DNA, 15 bp, Homo sapiens
ttattatgtactgaa

SEQ ID NO: 1410796 - DNA, 15 bp, Homo sapiens
cttattatgtactga

SEQ ID NO: 1410797 - DNA, 15 bp, Homo sapiens
gcttattatgtactg

SEQ ID NO: 1410798 - DNA, 15 bp, Homo sapiens
agcttattatgtact

SEQ ID NO: 1410799 - DNA, 15 bp, Homo sapiens
aagcttattatgtac

SEQ ID NO: 1410800 - DNA, 15 bp, Homo sapiens
taagcttattatgta

SEQ ID NO: 1410801 - DNA, 15 bp, Homo sapiens
ttaagcttattatgt

SEQ ID NO: 1410802 - DNA, 15 bp, Homo sapiens
gttaagcttattatg

SEQ ID NO: 1410803 - DNA, 15 bp, Homo sapiens
agttaagcttattat

SEQ ID NO: 1410804 - DNA, 15 bp, Homo sapiens
cagttaagcttatta

SEQ ID NO: 1410805 - DNA, 15 bp, Homo sapiens
tcagttaagcttatt

SEQ ID NO: 1410806 - DNA, 15 bp, Homo sapiens
atcagttaagcttat

SEQ ID NO: 1410807 - DNA, 15 bp, Homo sapiens
tatcagttaagctta

SEQ ID NO: 1410808 - DNA, 15 bp, Homo sapiens
ttatcagttaagctt

SEQ ID NO: 1410809 - DNA, 15 bp, Homo sapiens
tttatcagttaagct

SEQ ID NO: 1410810 - DNA, 15 bp, Homo sapiens
gtttatcagttaagc

SEQ ID NO: 1410811 - DNA, 15 bp, Homo sapiens
tgtttatcagttaag

SEQ ID NO: 1410812 - DNA, 15 bp, Homo sapiens
ctgtttatcagttaa

SEQ ID NO: 1410813 - DNA, 15 bp, Homo sapiens
tctgtttatcagtta

SEQ ID NO: 1410814 - DNA, 15 bp, Homo sapiens
ttctgtttatcagtt

SEQ ID NO: 1410815 - DNA, 15 bp, Homo sapiens
attctgtttatcagt

SEQ ID NO: 1410816 - DNA, 15 bp, Homo sapiens
tattctgtttatcag

SEQ ID NO: 1410817 - DNA, 15 bp, Homo sapiens
atattctgtttatca

SEQ ID NO: 1410818 - DNA, 15 bp, Homo sapiens
aatattctgtttatc

SEQ ID NO: 1410819 - DNA, 15 bp, Homo sapiens
aaatattctgtttat

SEQ ID NO: 1410820 - DNA, 15 bp, Homo sapiens
taaatattctgttta

SEQ ID NO: 1410821 - DNA, 15 bp, Homo sapiens
ctaaatattctgttt

SEQ ID NO: 1410822 - DNA, 15 bp, Homo sapiens
tctaaatattctgtt

SEQ ID NO: 1410823 - DNA, 15 bp, Homo sapiens
ttctaaatattctgt

SEQ ID NO: 1410824 - DNA, 15 bp, Homo sapiens
tttctaaatattctg

SEQ ID NO: 1410825 - DNA, 15 bp, Homo sapiens
ctttctaaatattct

SEQ ID NO: 1410826 - DNA, 15 bp, Homo sapiens
cctttctaaatattc

SEQ ID NO: 1410827 - DNA, 15 bp, Homo sapiens
acctttctaaatatt

SEQ ID NO: 1410828 - DNA, 15 bp, Homo sapiens
cacctttctaaatat

SEQ ID NO: 1410829 - DNA, 15 bp, Homo sapiens
tcacctttctaaata

SEQ ID NO: 1410830 - DNA, 15 bp, Homo sapiens
ctcacctttctaaat

SEQ ID NO: 1410831 - DNA, 15 bp, Homo sapiens
tctcacctttctaaa

SEQ ID NO: 1410832 - DNA, 15 bp, Homo sapiens
gtctcacctttctaa

SEQ ID NO: 1410833 - DNA, 15 bp, Homo sapiens
agtctcacctttcta

SEQ ID NO: 1410834 - DNA, 15 bp, Homo sapiens
aagtctcacctttct

SEQ ID NO: 1410835 - DNA, 15 bp, Homo sapiens
caagtctcacctttc

SEQ ID NO: 1410836 - DNA, 15 bp, Homo sapiens
ccaagtctcaccttt

SEQ ID NO: 1410837 - DNA, 15 bp, Homo sapiens
cccaagtctcacctt

SEQ ID NO: 1410838 - DNA, 15 bp, Homo sapiens
gcccaagtctcacct

SEQ ID NO: 1410839 - DNA, 15 bp, Homo sapiens
agcccaagtctcacc

SEQ ID NO: 1410840 - DNA, 15 bp, Homo sapiens
aagcccaagtctcac

SEQ ID NO: 1410841 - DNA, 15 bp, Homo sapiens
taagcccaagtctca

SEQ ID NO: 1410842 - DNA, 15 bp, Homo sapiens
gtaagcccaagtctc

SEQ ID NO: 1410843 - DNA, 15 bp, Homo sapiens
ggtaagcccaagtct

SEQ ID NO: 1410844 - DNA, 15 bp, Homo sapiens
tggtaagcccaagtc

SEQ ID NO: 1410845 - DNA, 15 bp, Homo sapiens
atggtaagcccaagt

SEQ ID NO: 1410846 - DNA, 15 bp, Homo sapiens
aatggtaagcccaag

SEQ ID NO: 1410847 - DNA, 15 bp, Homo sapiens
caatggtaagcccaa

SEQ ID NO: 1410848 - DNA, 15 bp, Homo sapiens
ccaatggtaagccca

SEQ ID NO: 1410849 - DNA, 15 bp, Homo sapiens
cccaatggtaagccc

SEQ ID NO: 1410850 - DNA, 15 bp, Homo sapiens
acccaatggtaagcc

SEQ ID NO: 1410851 - DNA, 15 bp, Homo sapiens
aacccaatggtaagc

SEQ ID NO: 1410852 - DNA, 15 bp, Homo sapiens
aaacccaatggtaag

SEQ ID NO: 1410853 - DNA, 15 bp, Homo sapiens
taaacccaatggtaa

SEQ ID NO: 1410854 - DNA, 15 bp, Homo sapiens
ttaaacccaatggta

SEQ ID NO: 1410855 - DNA, 15 bp, Homo sapiens
tttaaacccaatggt

SEQ ID NO: 1410856 - DNA, 15 bp, Homo sapiens
atttaaacccaatgg

SEQ ID NO: 1410857 - DNA, 15 bp, Homo sapiens
gatttaaacccaatg

SEQ ID NO: 1410858 - DNA, 15 bp, Homo sapiens
tgatttaaacccaat

SEQ ID NO: 1410859 - DNA, 15 bp, Homo sapiens
atgatttaaacccaa

SEQ ID NO: 1410860 - DNA, 15 bp, Homo sapiens
tatgatttaaaccca

SEQ ID NO: 1410861 - DNA, 15 bp, Homo sapiens
ctatgatttaaaccc

SEQ ID NO: 1410862 - DNA, 15 bp, Homo sapiens
cctatgatttaaacc

SEQ ID NO: 1410863 - DNA, 15 bp, Homo sapiens
ccctatgatttaaac

SEQ ID NO: 1410864 - DNA, 15 bp, Homo sapiens
tccctatgatttaaa

SEQ ID NO: 1410865 - DNA, 15 bp, Homo sapiens
gtccctatgatttaa

SEQ ID NO: 1410866 - DNA, 15 bp, Homo sapiens
ggtccctatgattta

SEQ ID NO: 1410867 - DNA, 15 bp, Homo sapiens
aggtccctatgattt

SEQ ID NO: 1410868 - DNA, 15 bp, Homo sapiens
taggtccctatgatt

SEQ ID NO: 1410869 - DNA, 15 bp, Homo sapiens
ctaggtccctatgat

SEQ ID NO: 1410870 - DNA, 15 bp, Homo sapiens
cctaggtccctatga

SEQ ID NO: 1410871 - DNA, 15 bp, Homo sapiens
ccctaggtccctatg

SEQ ID NO: 1410872 - DNA, 15 bp, Homo sapiens
gccctaggtccctat

SEQ ID NO: 1410873 - DNA, 15 bp, Homo sapiens
cgccctaggtcccta

SEQ ID NO: 1410874 - DNA, 15 bp, Homo sapiens
tcgccctaggtccct

SEQ ID NO: 1410875 - DNA, 15 bp, Homo sapiens
ctcgccctaggtccc

SEQ ID NO: 1410876 - DNA, 15 bp, Homo sapiens
cctcgccctaggtcc

SEQ ID NO: 1410877 - DNA, 15 bp, Homo sapiens
ccctcgccctaggtc

SEQ ID NO: 1410878 - DNA, 15 bp, Homo sapiens
accctcgccctaggt

SEQ ID NO: 1410879 - DNA, 15 bp, Homo sapiens
aaccctcgccctagg

SEQ ID NO: 1410880 - DNA, 15 bp, Homo sapiens
gaaccctcgccctag

SEQ ID NO: 1410881 - DNA, 15 bp, Homo sapiens
tgaaccctcgcccta

SEQ ID NO: 1410882 - DNA, 15 bp, Homo sapiens
ctgaaccctcgccct

SEQ ID NO: 1410883 - DNA, 15 bp, Homo sapiens
cctgaaccctcgccc

SEQ ID NO: 1410884 - DNA, 15 bp, Homo sapiens
ccctgaaccctcgcc

SEQ ID NO: 1410885 - DNA, 15 bp, Homo sapiens
gccctgaaccctcgc

SEQ ID NO: 1410886 - DNA, 15 bp, Homo sapiens
agccctgaaccctcg

SEQ ID NO: 1410887 - DNA, 15 bp, Homo sapiens
aagccctgaaccctc

SEQ ID NO: 1410888 - DNA, 15 bp, Homo sapiens
gaagccctgaaccct

SEQ ID NO: 1410889 - DNA, 15 bp, Homo sapiens
agaagccctgaaccc

SEQ ID NO: 1410890 - DNA, 15 bp, Homo sapiens
gagaagccctgaacc

SEQ ID NO: 1410891 - DNA, 15 bp, Homo sapiens
agagaagccctgaac

SEQ ID NO: 1410892 - DNA, 15 bp, Homo sapiens
cagagaagccctgaa

SEQ ID NO: 1410893 - DNA, 15 bp, Homo sapiens
ccagagaagccctga

SEQ ID NO: 1410894 - DNA, 15 bp, Homo sapiens
tccagagaagccctg

SEQ ID NO: 1410895 - DNA, 15 bp, Homo sapiens
ctccagagaagccct

SEQ ID NO: 1410896 - DNA, 15 bp, Homo sapiens
gctccagagaagccc

SEQ ID NO: 1410897 - DNA, 15 bp, Homo sapiens
tgctccagagaagcc

SEQ ID NO: 1410898 - DNA, 15 bp, Homo sapiens
ctgctccagagaagc

SEQ ID NO: 1410899 - DNA, 15 bp, Homo sapiens
tctgctccagagaag

SEQ ID NO: 1410900 - DNA, 15 bp, Homo sapiens
atctgctccagagaa

SEQ ID NO: 1410901 - DNA, 15 bp, Homo sapiens
tatctgctccagaga

SEQ ID NO: 1410902 - DNA, 15 bp, Homo sapiens
atatctgctccagag

SEQ ID NO: 1410903 - DNA, 15 bp, Homo sapiens
aatatctgctccaga

SEQ ID NO: 1410904 - DNA, 15 bp, Homo sapiens
caatatctgctccag

SEQ ID NO: 1410905 - DNA, 15 bp, Homo sapiens
acaatatctgctcca

SEQ ID NO: 1410906 - DNA, 15 bp, Homo sapiens
gacaatatctgctcc

SEQ ID NO: 1410907 - DNA, 15 bp, Homo sapiens
tgacaatatctgctc

SEQ ID NO: 1410908 - DNA, 15 bp, Homo sapiens
ttgacaatatctgct

SEQ ID NO: 1410909 - DNA, 15 bp, Homo sapiens
cttgacaatatctgc

SEQ ID NO: 1410910 - DNA, 15 bp, Homo sapiens
acttgacaatatctg

SEQ ID NO: 1410911 - DNA, 15 bp, Homo sapiens
aacttgacaatatct

SEQ ID NO: 1410912 - DNA, 15 bp, Homo sapiens
gaacttgacaatatc

SEQ ID NO: 1410913 - DNA, 15 bp, Homo sapiens
tgaacttgacaatat

SEQ ID NO: 1410914 - DNA, 15 bp, Homo sapiens
atgaacttgacaata

SEQ ID NO: 1410915 - DNA, 15 bp, Homo sapiens
catgaacttgacaat

SEQ ID NO: 1410916 - DNA, 15 bp, Homo sapiens
ccatgaacttgacaa

SEQ ID NO: 1410917 - DNA, 15 bp, Homo sapiens
gccatgaacttgaca

SEQ ID NO: 1410918 - DNA, 15 bp, Homo sapiens
ggccatgaacttgac

SEQ ID NO: 1410919 - DNA, 15 bp, Homo sapiens
aggccatgaacttga

SEQ ID NO: 1410920 - DNA, 15 bp, Homo sapiens
aaggccatgaacttg

SEQ ID NO: 1410921 - DNA, 15 bp, Homo sapiens
taaggccatgaactt

SEQ ID NO: 1410922 - DNA, 15 bp, Homo sapiens
ctaaggccatgaact

SEQ ID NO: 1410923 - DNA, 15 bp, Homo sapiens
cctaaggccatgaac

SEQ ID NO: 1410924 - DNA, 15 bp, Homo sapiens
acctaaggccatgaa

SEQ ID NO: 1410925 - DNA, 15 bp, Homo sapiens
tacctaaggccatga

SEQ ID NO: 1410926 - DNA, 15 bp, Homo sapiens
ctacctaaggccatg

SEQ ID NO: 1410927 - DNA, 15 bp, Homo sapiens
gctacctaaggccat

SEQ ID NO: 1410928 - DNA, 15 bp, Homo sapiens
tgctacctaaggcca

SEQ ID NO: 1410929 - DNA, 15 bp, Homo sapiens
atgctacctaaggcc

SEQ ID NO: 1410930 - DNA, 15 bp, Homo sapiens
catgctacctaaggc

SEQ ID NO: 1410931 - DNA, 15 bp, Homo sapiens
acatgctacctaagg

SEQ ID NO: 1410932 - DNA, 15 bp, Homo sapiens
tacatgctacctaag

SEQ ID NO: 1410933 - DNA, 15 bp, Homo sapiens
atacatgctacctaa

SEQ ID NO: 1410934 - DNA, 15 bp, Homo sapiens
gatacatgctaccta

SEQ ID NO: 1410935 - DNA, 15 bp, Homo sapiens
agatacatgctacct

SEQ ID NO: 1410936 - DNA, 15 bp, Homo sapiens
cagatacatgctacc

SEQ ID NO: 1410937 - DNA, 15 bp, Homo sapiens
ccagatacatgctac

SEQ ID NO: 1410938 - DNA, 15 bp, Homo sapiens
accagatacatgcta

SEQ ID NO: 1410939 - DNA, 15 bp, Homo sapiens
tataccaaaaaaaaa

SEQ ID NO: 1410940 - DNA, 15 bp, Homo sapiens
atataccaaaaaaaa

SEQ ID NO: 1410941 - DNA, 15 bp, Homo sapiens
aatataccaaaaaaa

SEQ ID NO: 1410942 - DNA, 15 bp, Homo sapiens
caatataccaaaaaa

SEQ ID NO: 1410943 - DNA, 15 bp, Homo sapiens
gcaatataccaaaaa

SEQ ID NO: 1410944 - DNA, 15 bp, Homo sapiens
agcaatataccaaaa

SEQ ID NO: 1410945 - DNA, 15 bp, Homo sapiens
cagcaatataccaaa

SEQ ID NO: 1410946 - DNA, 15 bp, Homo sapiens
acagcaatataccaa

SEQ ID NO: 1410947 - DNA, 15 bp, Homo sapiens
tacagcaatatacca

SEQ ID NO: 1410948 - DNA, 15 bp, Homo sapiens
atacagcaatatacc

SEQ ID NO: 1410949 - DNA, 15 bp, Homo sapiens
gatacagcaatatac

SEQ ID NO: 1410950 - DNA, 15 bp, Homo sapiens
agatacagcaatata

SEQ ID NO: 1410951 - DNA, 15 bp, Homo sapiens
tagatacagcaatat

SEQ ID NO: 1410952 - DNA, 15 bp, Homo sapiens
gtagatacagcaata

SEQ ID NO: 1410953 - DNA, 15 bp, Homo sapiens
agtagatacagcaat

SEQ ID NO: 1410954 - DNA, 15 bp, Homo sapiens
aagtagatacagcaa

SEQ ID NO: 1410955 - DNA, 15 bp, Homo sapiens
aaagtagatacagca

SEQ ID NO: 1410956 - DNA, 15 bp, Homo sapiens
taaagtagatacagc

SEQ ID NO: 1410957 - DNA, 15 bp, Homo sapiens
ttaaagtagatacag

SEQ ID NO: 1410958 - DNA, 15 bp, Homo sapiens
gttaaagtagataca

SEQ ID NO: 1410959 - DNA, 15 bp, Homo sapiens
agttaaagtagatac

SEQ ID NO: 1410960 - DNA, 15 bp, Homo sapiens
aagttaaagtagata

SEQ ID NO: 1410961 - DNA, 15 bp, Homo sapiens
gaagttaaagtagat

SEQ ID NO: 1410962 - DNA, 15 bp, Homo sapiens
ggaagttaaagtaga

SEQ ID NO: 1410963 - DNA, 15 bp, Homo sapiens
tggaagttaaagtag

SEQ ID NO: 1410964 - DNA, 15 bp, Homo sapiens
ctggaagttaaagta

SEQ ID NO: 1410965 - DNA, 15 bp, Homo sapiens
tctggaagttaaagt

SEQ ID NO: 1410966 - DNA, 15 bp, Homo sapiens
ttctggaagttaaag

SEQ ID NO: 1410967 - DNA, 15 bp, Homo sapiens
tttctggaagttaaa

SEQ ID NO: 1410968 - DNA, 15 bp, Homo sapiens
atttctggaagttaa

SEQ ID NO: 1410969 - DNA, 15 bp, Homo sapiens
tatttctggaagtta

SEQ ID NO: 1410970 - DNA, 15 bp, Homo sapiens
ttatttctggaagtt

SEQ ID NO: 1410971 - DNA, 15 bp, Homo sapiens
tttatttctggaagt

SEQ ID NO: 1410972 - DNA, 15 bp, Homo sapiens
gtttatttctggaag

SEQ ID NO: 1410973 - DNA, 15 bp, Homo sapiens
cgtttatttctggaa

SEQ ID NO: 1410974 - DNA, 15 bp, Homo sapiens
acgtttatttctgga

SEQ ID NO: 1410975 - DNA, 15 bp, Homo sapiens
aacgtttatttctgg

SEQ ID NO: 1410976 - DNA, 15 bp, Homo sapiens
taacgtttatttctg

SEQ ID NO: 1410977 - DNA, 15 bp, Homo sapiens
ataacgtttatttct

SEQ ID NO: 1410978 - DNA, 15 bp, Homo sapiens
tataacgtttatttc

SEQ ID NO: 1410979 - DNA, 15 bp, Homo sapiens
atataacgtttattt

SEQ ID NO: 1410980 - DNA, 15 bp, Homo sapiens
tatataacgtttatt

SEQ ID NO: 1410981 - DNA, 15 bp, Homo sapiens
ctatataacgtttat

SEQ ID NO: 1410982 - DNA, 15 bp, Homo sapiens
cctatataacgttta

SEQ ID NO: 1410983 - DNA, 15 bp, Homo sapiens
tcctatataacgttt

SEQ ID NO: 1410984 - DNA, 15 bp, Homo sapiens
ttcctatataacgtt

SEQ ID NO: 1410985 - DNA, 15 bp, Homo sapiens
gttcctatataacgt

SEQ ID NO: 1410986 - DNA, 15 bp, Homo sapiens
ggttcctatataacg

SEQ ID NO: 1410987 - DNA, 15 bp, Homo sapiens
cggttcctatataac

SEQ ID NO: 1410988 - DNA, 15 bp, Homo sapiens
acggttcctatataa

SEQ ID NO: 1410989 - DNA, 15 bp, Homo sapiens
gacggttcctatata

SEQ ID NO: 1410990 - DNA, 15 bp, Homo sapiens
agacggttcctatat

SEQ ID NO: 1410991 - DNA, 15 bp, Homo sapiens
cagacggttcctata

SEQ ID NO: 1410992 - DNA, 15 bp, Homo sapiens
tcagacggttcctat

SEQ ID NO: 1410993 - DNA, 15 bp, Homo sapiens
atcagacggttccta

SEQ ID NO: 1410994 - DNA, 15 bp, Homo sapiens
tatcagacggttcct

SEQ ID NO: 1410995 - DNA, 15 bp, Homo sapiens
ctatcagacggttcc

SEQ ID NO: 1410996 - DNA, 15 bp, Homo sapiens
gctatcagacggttc

SEQ ID NO: 1410997 - DNA, 15 bp, Homo sapiens
tgctatcagacggtt

SEQ ID NO: 1410998 - DNA, 15 bp, Homo sapiens
atgctatcagacggt

SEQ ID NO: 1410999 - DNA, 15 bp, Homo sapiens
catgctatcagacgg

SEQ ID NO: 1411000 - DNA, 15 bp, Homo sapiens
ccatgctatcagacg

SEQ ID NO: 1411001 - DNA, 15 bp, Homo sapiens
gccatgctatcagac

SEQ ID NO: 1411002 - DNA, 15 bp, Homo sapiens
tgccatgctatcaga

SEQ ID NO: 1411003 - DNA, 15 bp, Homo sapiens
ctgccatgctatcag

SEQ ID NO: 1411004 - DNA, 15 bp, Homo sapiens
gctgccatgctatca

SEQ ID NO: 1411005 - DNA, 15 bp, Homo sapiens
agctgccatgctatc

SEQ ID NO: 1411006 - DNA, 15 bp, Homo sapiens
gagctgccatgctat

SEQ ID NO: 1411007 - DNA, 15 bp, Homo sapiens
agagctgccatgcta

SEQ ID NO: 1411008 - DNA, 15 bp, Homo sapiens
cagagctgccatgct

SEQ ID NO: 1411009 - DNA, 15 bp, Homo sapiens
acagagctgccatgc

SEQ ID NO: 1411010 - DNA, 15 bp, Homo sapiens
aacagagctgccatg

SEQ ID NO: 1411011 - DNA, 15 bp, Homo sapiens
aaacagagctgccat

SEQ ID NO: 1411012 - DNA, 15 bp, Homo sapiens
caaacagagctgcca

SEQ ID NO: 1411013 - DNA, 15 bp, Homo sapiens
ccaaacagagctgcc

SEQ ID NO: 1411014 - DNA, 15 bp, Homo sapiens
gccaaacagagctgc

SEQ ID NO: 1411015 - DNA, 15 bp, Homo sapiens
agccaaacagagctg

SEQ ID NO: 1411016 - DNA, 15 bp, Homo sapiens
cagccaaacagagct

SEQ ID NO: 1411017 - DNA, 15 bp, Homo sapiens
ccagccaaacagagc

SEQ ID NO: 1411018 - DNA, 15 bp, Homo sapiens
accagccaaacagag

SEQ ID NO: 1411019 - DNA, 15 bp, Homo sapiens
caccagccaaacaga

SEQ ID NO: 1411020 - DNA, 15 bp, Homo sapiens
ccaccagccaaacag

SEQ ID NO: 1411021 - DNA, 15 bp, Homo sapiens
tccaccagccaaaca

SEQ ID NO: 1411022 - DNA, 15 bp, Homo sapiens
ctccaccagccaaac

SEQ ID NO: 1411023 - DNA, 15 bp, Homo sapiens
cctccaccagccaaa

SEQ ID NO: 1411024 - DNA, 15 bp, Homo sapiens
gcctccaccagccaa

SEQ ID NO: 1411025 - DNA, 15 bp, Homo sapiens
agcctccaccagcca

SEQ ID NO: 1411026 - DNA, 15 bp, Homo sapiens
aagcctccaccagcc

SEQ ID NO: 1411027 - DNA, 15 bp, Homo sapiens
gaagcctccaccagc

SEQ ID NO: 1411028 - DNA, 15 bp, Homo sapiens
ggaagcctccaccag

SEQ ID NO: 1411029 - DNA, 15 bp, Homo sapiens
aggaagcctccacca

SEQ ID NO: 1411030 - DNA, 15 bp, Homo sapiens
aaggaagcctccacc

SEQ ID NO: 1411031 - DNA, 15 bp, Homo sapiens
aaaggaagcctccac

SEQ ID NO: 1411032 - DNA, 15 bp, Homo sapiens
aaaaggaagcctcca

SEQ ID NO: 1411033 - DNA, 15 bp, Homo sapiens
gaaaaggaagcctcc

SEQ ID NO: 1411034 - DNA, 15 bp, Homo sapiens
ggaaaaggaagcctc

SEQ ID NO: 1411035 - DNA, 15 bp, Homo sapiens
gggaaaaggaagcct

SEQ ID NO: 1411036 - DNA, 15 bp, Homo sapiens
ggggaaaaggaagcc

SEQ ID NO: 1411037 - DNA, 15 bp, Homo sapiens
aggggaaaaggaagc

SEQ ID NO: 1411038 - DNA, 15 bp, Homo sapiens
caggggaaaaggaag

SEQ ID NO: 1411039 - DNA, 15 bp, Homo sapiens
gcaggggaaaaggaa

SEQ ID NO: 1411040 - DNA, 15 bp, Homo sapiens
tgcaggggaaaagga

SEQ ID NO: 1411041 - DNA, 15 bp, Homo sapiens
atgcaggggaaaagg

SEQ ID NO: 1411042 - DNA, 15 bp, Homo sapiens
tatgcaggggaaaag

SEQ ID NO: 1411043 - DNA, 15 bp, Homo sapiens
ttatgcaggggaaaa

SEQ ID NO: 1411044 - DNA, 15 bp, Homo sapiens
cttatgcaggggaaa

SEQ ID NO: 1411045 - DNA, 15 bp, Homo sapiens
acttatgcaggggaa

SEQ ID NO: 1411046 - DNA, 15 bp, Homo sapiens
aacttatgcagggga

SEQ ID NO: 1411047 - DNA, 15 bp, Homo sapiens
gaacttatgcagggg

SEQ ID NO: 1411048 - DNA, 15 bp, Homo sapiens
agaacttatgcaggg

SEQ ID NO: 1411049 - DNA, 15 bp, Homo sapiens
cagaacttatgcagg

SEQ ID NO: 1411050 - DNA, 15 bp, Homo sapiens
tcagaacttatgcag

SEQ ID NO: 1411051 - DNA, 15 bp, Homo sapiens
ctcagaacttatgca

SEQ ID NO: 1411052 - DNA, 15 bp, Homo sapiens
cctcagaacttatgc

SEQ ID NO: 1411053 - DNA, 15 bp, Homo sapiens
ccctcagaacttatg

SEQ ID NO: 1411054 - DNA, 15 bp, Homo sapiens
cccctcagaacttat

SEQ ID NO: 1411055 - DNA, 15 bp, Homo sapiens
ccccctcagaactta

SEQ ID NO: 1411056 - DNA, 15 bp, Homo sapiens
gccccctcagaactt

SEQ ID NO: 1411057 - DNA, 15 bp, Homo sapiens
ggccccctcagaact

SEQ ID NO: 1411058 - DNA, 15 bp, Homo sapiens
aggccccctcagaac

SEQ ID NO: 1411059 - DNA, 15 bp, Homo sapiens
gaggccccctcagaa

SEQ ID NO: 1411060 - DNA, 15 bp, Homo sapiens
tgaggccccctcaga

SEQ ID NO: 1411061 - DNA, 15 bp, Homo sapiens
gtgaggccccctcag

SEQ ID NO: 1411062 - DNA, 15 bp, Homo sapiens
tgtgaggccccctca

SEQ ID NO: 1411063 - DNA, 15 bp, Homo sapiens
gtgtgaggccccctc

SEQ ID NO: 1411064 - DNA, 15 bp, Homo sapiens
tgtgtgaggccccct

SEQ ID NO: 1411065 - DNA, 15 bp, Homo sapiens
gtgtgtgaggccccc

SEQ ID NO: 1411066 - DNA, 15 bp, Homo sapiens
tgtgtgtgaggcccc

SEQ ID NO: 1411067 - DNA, 15 bp, Homo sapiens
ctgtgtgtgaggccc

SEQ ID NO: 1411068 - DNA, 15 bp, Homo sapiens
cctgtgtgtgaggcc

SEQ ID NO: 1411069 - DNA, 15 bp, Homo sapiens
acctgtgtgtgaggc

SEQ ID NO: 1411070 - DNA, 15 bp, Homo sapiens
cacctgtgtgtgagg

SEQ ID NO: 1411071 - DNA, 15 bp, Homo sapiens
ccacctgtgtgtgag

SEQ ID NO: 1411072 - DNA, 15 bp, Homo sapiens
cccacctgtgtgtga

SEQ ID NO: 1411073 - DNA, 15 bp, Homo sapiens
ccccacctgtgtgtg

SEQ ID NO: 1411074 - DNA, 15 bp, Homo sapiens
gccccacctgtgtgt

SEQ ID NO: 1411075 - DNA, 15 bp, Homo sapiens
ggccccacctgtgtg

SEQ ID NO: 1411076 - DNA, 15 bp, Homo sapiens
aggccccacctgtgt

SEQ ID NO: 1411077 - DNA, 15 bp, Homo sapiens
caggccccacctgtg

SEQ ID NO: 1411078 - DNA, 15 bp, Homo sapiens
ccaggccccacctgt

SEQ ID NO: 1411079 - DNA, 15 bp, Homo sapiens
cccaggccccacctg

SEQ ID NO: 1411080 - DNA, 15 bp, Homo sapiens
tcccaggccccacct

SEQ ID NO: 1411081 - DNA, 15 bp, Homo sapiens
atcccaggccccacc

SEQ ID NO: 1411082 - DNA, 15 bp, Homo sapiens
tatcccaggccccac

SEQ ID NO: 1411083 - DNA, 15 bp, Homo sapiens
ttatcccaggcccca

SEQ ID NO: 1411084 - DNA, 15 bp, Homo sapiens
cttatcccaggcccc

SEQ ID NO: 1411085 - DNA, 15 bp, Homo sapiens
ccttatcccaggccc

SEQ ID NO: 1411086 - DNA, 15 bp, Homo sapiens
cccttatcccaggcc

SEQ ID NO: 1411087 - DNA, 15 bp, Homo sapiens
gcccttatcccaggc

SEQ ID NO: 1411088 - DNA, 15 bp, Homo sapiens
ggcccttatcccagg

SEQ ID NO: 1411089 - DNA, 15 bp, Homo sapiens
cggcccttatcccag

SEQ ID NO: 1411090 - DNA, 15 bp, Homo sapiens
ccggcccttatccca

SEQ ID NO: 1411091 - DNA, 15 bp, Homo sapiens
tccggcccttatccc

SEQ ID NO: 1411092 - DNA, 15 bp, Homo sapiens
ttccggcccttatcc

SEQ ID NO: 1411093 - DNA, 15 bp, Homo sapiens
tttccggcccttatc

SEQ ID NO: 1411094 - DNA, 15 bp, Homo sapiens
ctttccggcccttat

SEQ ID NO: 1411095 - DNA, 15 bp, Homo sapiens
cctttccggccctta

SEQ ID NO: 1411096 - DNA, 15 bp, Homo sapiens
ccctttccggccctt

SEQ ID NO: 1411097 - DNA, 15 bp, Homo sapiens
accctttccggccct

SEQ ID NO: 1411098 - DNA, 15 bp, Homo sapiens
gaccctttccggccc

SEQ ID NO: 1411099 - DNA, 15 bp, Homo sapiens
agaccctttccggcc

SEQ ID NO: 1411100 - DNA, 15 bp, Homo sapiens
aagaccctttccggc

SEQ ID NO: 1411101 - DNA, 15 bp, Homo sapiens
caagaccctttccgg

SEQ ID NO: 1411102 - DNA, 15 bp, Homo sapiens
tcaagaccctttccg

SEQ ID NO: 1411103 - DNA, 15 bp, Homo sapiens
ctcaagaccctttcc

SEQ ID NO: 1411104 - DNA, 15 bp, Homo sapiens
tctcaagaccctttc

SEQ ID NO: 1411105 - DNA, 15 bp, Homo sapiens
ctctcaagacccttt

SEQ ID NO: 1411106 - DNA, 15 bp, Homo sapiens
cctctcaagaccctt

SEQ ID NO: 1411107 - DNA, 15 bp, Homo sapiens
tcctctcaagaccct

SEQ ID NO: 1411108 - DNA, 15 bp, Homo sapiens
ctcctctcaagaccc

SEQ ID NO: 1411109 - DNA, 15 bp, Homo sapiens
cctcctctcaagacc

SEQ ID NO: 1411110 - DNA, 15 bp, Homo sapiens
acctcctctcaagac

SEQ ID NO: 1411111 - DNA, 15 bp, Homo sapiens
cacctcctctcaaga

SEQ ID NO: 1411112 - DNA, 15 bp, Homo sapiens
ccacctcctctcaag

SEQ ID NO: 1411113 - DNA, 15 bp, Homo sapiens
accacctcctctcaa

SEQ ID NO: 1411114 - DNA, 15 bp, Homo sapiens
aaccacctcctctca

SEQ ID NO: 1411115 - DNA, 15 bp, Homo sapiens
caaccacctcctctc

SEQ ID NO: 1411116 - DNA, 15 bp, Homo sapiens
gcaaccacctcctct

SEQ ID NO: 1411117 - DNA, 15 bp, Homo sapiens
ggcaaccacctcctc

SEQ ID NO: 1411118 - DNA, 15 bp, Homo sapiens
aggcaaccacctcct

SEQ ID NO: 1411119 - DNA, 15 bp, Homo sapiens
aaggcaaccacctcc

SEQ ID NO: 1411120 - DNA, 15 bp, Homo sapiens
taaggcaaccacctc

SEQ ID NO: 1411121 - DNA, 15 bp, Homo sapiens
ttaaggcaaccacct

SEQ ID NO: 1411122 - DNA, 15 bp, Homo sapiens
attaaggcaaccacc

SEQ ID NO: 1411123 - DNA, 15 bp, Homo sapiens
gattaaggcaaccac

SEQ ID NO: 1411124 - DNA, 15 bp, Homo sapiens
ggattaaggcaacca

SEQ ID NO: 1411125 - DNA, 15 bp, Homo sapiens
gggattaaggcaacc

SEQ ID NO: 1411126 - DNA, 15 bp, Homo sapiens
ggggattaaggcaac

SEQ ID NO: 1411127 - DNA, 15 bp, Homo sapiens
gggggattaaggcaa

SEQ ID NO: 1411128 - DNA, 15 bp, Homo sapiens
ggggggattaaggca

SEQ ID NO: 1411129 - DNA, 15 bp, Homo sapiens
gggggggattaaggc

SEQ ID NO: 1411130 - DNA, 15 bp, Homo sapiens
cgggggggattaagg

SEQ ID NO: 1411131 - DNA, 15 bp, Homo sapiens
gcgggggggattaag

SEQ ID NO: 1411132 - DNA, 15 bp, Homo sapiens
ggcgggggggattaa

SEQ ID NO: 1411133 - DNA, 15 bp, Homo sapiens
tggcgggggggatta

SEQ ID NO: 1411134 - DNA, 15 bp, Homo sapiens
ttggcgggggggatt

SEQ ID NO: 1411135 - DNA, 15 bp, Homo sapiens
gttggcgggggggat

SEQ ID NO: 1411136 - DNA, 15 bp, Homo sapiens
ggttggcggggggga

SEQ ID NO: 1411137 - DNA, 15 bp, Homo sapiens
gggttggcggggggg

SEQ ID NO: 1411138 - DNA, 15 bp, Homo sapiens
ggggttggcgggggg

SEQ ID NO: 1411139 - DNA, 15 bp, Homo sapiens
gggggttggcggggg

SEQ ID NO: 1411140 - DNA, 15 bp, Homo sapiens
agggggttggcgggg

SEQ ID NO: 1411141 - DNA, 15 bp, Homo sapiens
aagggggttggcggg

SEQ ID NO: 1411142 - DNA, 15 bp, Homo sapiens
taagggggttggcgg

SEQ ID NO: 1411143 - DNA, 15 bp, Homo sapiens
ataagggggttggcg

SEQ ID NO: 1411144 - DNA, 15 bp, Homo sapiens
cataagggggttggc

SEQ ID NO: 1411145 - DNA, 15 bp, Homo sapiens
acataagggggttgg

SEQ ID NO: 1411146 - DNA, 15 bp, Homo sapiens
aacataagggggttg

SEQ ID NO: 1411147 - DNA, 15 bp, Homo sapiens
taacataagggggtt

SEQ ID NO: 1411148 - DNA, 15 bp, Homo sapiens
ctaacataagggggt

SEQ ID NO: 1411149 - DNA, 15 bp, Homo sapiens
gctaacataaggggg

SEQ ID NO: 1411150 - DNA, 15 bp, Homo sapiens
ggctaacataagggg

SEQ ID NO: 1411151 - DNA, 15 bp, Homo sapiens
tggctaacataaggg

SEQ ID NO: 1411152 - DNA, 15 bp, Homo sapiens
gtggctaacataagg

SEQ ID NO: 1411153 - DNA, 15 bp, Homo sapiens
ggtggctaacataag

SEQ ID NO: 1411154 - DNA, 15 bp, Homo sapiens
tggtggctaacataa

SEQ ID NO: 1411155 - DNA, 15 bp, Homo sapiens
ctggtggctaacata

SEQ ID NO: 1411156 - DNA, 15 bp, Homo sapiens
gctggtggctaacat

SEQ ID NO: 1411157 - DNA, 15 bp, Homo sapiens
ggctggtggctaaca

SEQ ID NO: 1411158 - DNA, 15 bp, Homo sapiens
gggctggtggctaac

SEQ ID NO: 1411159 - DNA, 15 bp, Homo sapiens
cgggctggtggctaa

SEQ ID NO: 1411160 - DNA, 15 bp, Homo sapiens
ccgggctggtggcta

SEQ ID NO: 1411161 - DNA, 15 bp, Homo sapiens
tccgggctggtggct

SEQ ID NO: 1411162 - DNA, 15 bp, Homo sapiens
ctccgggctggtggc

SEQ ID NO: 1411163 - DNA, 15 bp, Homo sapiens
cctccgggctggtgg

SEQ ID NO: 1411164 - DNA, 15 bp, Homo sapiens
acctccgggctggtg

SEQ ID NO: 1411165 - DNA, 15 bp, Homo sapiens
tacctccgggctggt

SEQ ID NO: 1411166 - DNA, 15 bp, Homo sapiens
ttacctccgggctgg

SEQ ID NO: 1411167 - DNA, 15 bp, Homo sapiens
cttacctccgggctg

SEQ ID NO: 1411168 - DNA, 15 bp, Homo sapiens
ccttacctccgggct

SEQ ID NO: 1411169 - DNA, 15 bp, Homo sapiens
cccttacctccgggc

SEQ ID NO: 1411170 - DNA, 15 bp, Homo sapiens
ccccttacctccggg

SEQ ID NO: 1411171 - DNA, 15 bp, Homo sapiens
accccttacctccgg

SEQ ID NO: 1411172 - DNA, 15 bp, Homo sapiens
caccccttacctccg

SEQ ID NO: 1411173 - DNA, 15 bp, Homo sapiens
gcaccccttacctcc

SEQ ID NO: 1411174 - DNA, 15 bp, Homo sapiens
ggcaccccttacctc

SEQ ID NO: 1411175 - DNA, 15 bp, Homo sapiens
aggcaccccttacct

SEQ ID NO: 1411176 - DNA, 15 bp, Homo sapiens
caggcaccccttacc

SEQ ID NO: 1411177 - DNA, 15 bp, Homo sapiens
ccaggcaccccttac

SEQ ID NO: 1411178 - DNA, 15 bp, Homo sapiens
tccaggcacccctta

SEQ ID NO: 1411179 - DNA, 15 bp, Homo sapiens
ctccaggcacccctt

SEQ ID NO: 1411180 - DNA, 15 bp, Homo sapiens
cctccaggcacccct

SEQ ID NO: 1411181 - DNA, 15 bp, Homo sapiens
tcctccaggcacccc

SEQ ID NO: 1411182 - DNA, 15 bp, Homo sapiens
ctcctccaggcaccc

SEQ ID NO: 1411183 - DNA, 15 bp, Homo sapiens
gctcctccaggcacc

SEQ ID NO: 1411184 - DNA, 15 bp, Homo sapiens
tgctcctccaggcac

SEQ ID NO: 1411185 - DNA, 15 bp, Homo sapiens
ctgctcctccaggca

SEQ ID NO: 1411186 - DNA, 15 bp, Homo sapiens
cctgctcctccaggc

SEQ ID NO: 1411187 - DNA, 15 bp, Homo sapiens
tcctgctcctccagg

SEQ ID NO: 1411188 - DNA, 15 bp, Homo sapiens
ctcctgctcctccag

SEQ ID NO: 1411189 - DNA, 15 bp, Homo sapiens
cctcctgctcctcca

SEQ ID NO: 1411190 - DNA, 15 bp, Homo sapiens
acctcctgctcctcc

SEQ ID NO: 1411191 - DNA, 15 bp, Homo sapiens
gacctcctgctcctc

SEQ ID NO: 1411192 - DNA, 15 bp, Homo sapiens
tgacctcctgctcct

SEQ ID NO: 1411193 - DNA, 15 bp, Homo sapiens
ttgacctcctgctcc

SEQ ID NO: 1411194 - DNA, 15 bp, Homo sapiens
attgacctcctgctc

SEQ ID NO: 1411195 - DNA, 15 bp, Homo sapiens
tattgacctcctgct

SEQ ID NO: 1411196 - DNA, 15 bp, Homo sapiens
ctattgacctcctgc

SEQ ID NO: 1411197 - DNA, 15 bp, Homo sapiens
actattgacctcctg

SEQ ID NO: 1411198 - DNA, 15 bp, Homo sapiens
gactattgacctcct

SEQ ID NO: 1411199 - DNA, 15 bp, Homo sapiens
ggactattgacctcc

SEQ ID NO: 1411200 - DNA, 15 bp, Homo sapiens
tggactattgacctc

SEQ ID NO: 1411201 - DNA, 15 bp, Homo sapiens
ttggactattgacct

SEQ ID NO: 1411202 - DNA, 15 bp, Homo sapiens
gttggactattgacc

SEQ ID NO: 1411203 - DNA, 15 bp, Homo sapiens
cgttggactattgac

SEQ ID NO: 1411204 - DNA, 15 bp, Homo sapiens
ccgttggactattga

SEQ ID NO: 1411205 - DNA, 15 bp, Homo sapiens
gccgttggactattg

SEQ ID NO: 1411206 - DNA, 15 bp, Homo sapiens
tgccgttggactatt

SEQ ID NO: 1411207 - DNA, 15 bp, Homo sapiens
ctgccgttggactat

SEQ ID NO: 1411208 - DNA, 15 bp, Homo sapiens
tctgccgttggacta

SEQ ID NO: 1411209 - DNA, 15 bp, Homo sapiens
ttctgccgttggact

SEQ ID NO: 1411210 - DNA, 15 bp, Homo sapiens
tttctgccgttggac

SEQ ID NO: 1411211 - DNA, 15 bp, Homo sapiens
ctttctgccgttgga

SEQ ID NO: 1411212 - DNA, 15 bp, Homo sapiens
cctttctgccgttgg

SEQ ID NO: 1411213 - DNA, 15 bp, Homo sapiens
acctttctgccgttg

SEQ ID NO: 1411214 - DNA, 15 bp, Homo sapiens
cacctttctgccgtt

SEQ ID NO: 1411215 - DNA, 15 bp, Homo sapiens
acacctttctgccgt

SEQ ID NO: 1411216 - DNA, 15 bp, Homo sapiens
gacacctttctgccg

SEQ ID NO: 1411217 - DNA, 15 bp, Homo sapiens
tgacacctttctgcc

SEQ ID NO: 1411218 - DNA, 15 bp, Homo sapiens
ctgacacctttctgc

SEQ ID NO: 1411219 - DNA, 15 bp, Homo sapiens
tctgacacctttctg

SEQ ID NO: 1411220 - DNA, 15 bp, Homo sapiens
ctctgacacctttct

SEQ ID NO: 1411221 - DNA, 15 bp, Homo sapiens
actctgacacctttc

SEQ ID NO: 1411222 - DNA, 15 bp, Homo sapiens
cactctgacaccttt

SEQ ID NO: 1411223 - DNA, 15 bp, Homo sapiens
ccactctgacacctt

SEQ ID NO: 1411224 - DNA, 15 bp, Homo sapiens
tccactctgacacct

SEQ ID NO: 1411225 - DNA, 15 bp, Homo sapiens
ctccactctgacacc

SEQ ID NO: 1411226 - DNA, 15 bp, Homo sapiens
cctccactctgacac

SEQ ID NO: 1411227 - DNA, 15 bp, Homo sapiens
gcctccactctgaca

SEQ ID NO: 1411228 - DNA, 15 bp, Homo sapiens
ggcctccactctgac

SEQ ID NO: 1411229 - DNA, 15 bp, Homo sapiens
aggcctccactctga

SEQ ID NO: 1411230 - DNA, 15 bp, Homo sapiens
gaggcctccactctg

SEQ ID NO: 1411231 - DNA, 15 bp, Homo sapiens
ggaggcctccactct

SEQ ID NO: 1411232 - DNA, 15 bp, Homo sapiens
gggaggcctccactc

SEQ ID NO: 1411233 - DNA, 15 bp, Homo sapiens
agggaggcctccact

SEQ ID NO: 1411234 - DNA, 15 bp, Homo sapiens
gagggaggcctccac

SEQ ID NO: 1411235 - DNA, 15 bp, Homo sapiens
ggagggaggcctcca

SEQ ID NO: 1411236 - DNA, 15 bp, Homo sapiens
gggagggaggcctcc

SEQ ID NO: 1411237 - DNA, 15 bp, Homo sapiens
ggggagggaggcctc

SEQ ID NO: 1411238 - DNA, 15 bp, Homo sapiens
cggggagggaggcct

SEQ ID NO: 1411239 - DNA, 15 bp, Homo sapiens
ccggggagggaggcc

SEQ ID NO: 1411240 - DNA, 15 bp, Homo sapiens
gccggggagggaggc

SEQ ID NO: 1411241 - DNA, 15 bp, Homo sapiens
ggccggggagggagg

SEQ ID NO: 1411242 - DNA, 15 bp, Homo sapiens
gggccggggagggag

SEQ ID NO: 1411243 - DNA, 15 bp, Homo sapiens
ggggccggggaggga

SEQ ID NO: 1411244 - DNA, 15 bp, Homo sapiens
gggggccggggaggg

SEQ ID NO: 1411245 - DNA, 15 bp, Homo sapiens
agggggccggggagg

SEQ ID NO: 1411246 - DNA, 15 bp, Homo sapiens
gagggggccggggag

SEQ ID NO: 1411247 - DNA, 15 bp, Homo sapiens
ggagggggccgggga

SEQ ID NO: 1411248 - DNA, 15 bp, Homo sapiens
aggagggggccgggg

SEQ ID NO: 1411249 - DNA, 15 bp, Homo sapiens
taggagggggccggg

SEQ ID NO: 1411250 - DNA, 15 bp, Homo sapiens
gtaggagggggccgg

SEQ ID NO: 1411251 - DNA, 15 bp, Homo sapiens
ggtaggagggggccg

SEQ ID NO: 1411252 - DNA, 15 bp, Homo sapiens
gggtaggagggggcc

SEQ ID NO: 1411253 - DNA, 15 bp, Homo sapiens
ggggtaggagggggc

SEQ ID NO: 1411254 - DNA, 15 bp, Homo sapiens
gggggtaggaggggg

SEQ ID NO: 1411255 - DNA, 15 bp, Homo sapiens
ggggggtaggagggg

SEQ ID NO: 1411256 - DNA, 15 bp, Homo sapiens
tggggggtaggaggg

SEQ ID NO: 1411257 - DNA, 15 bp, Homo sapiens
ctggggggtaggagg

SEQ ID NO: 1411258 - DNA, 15 bp, Homo sapiens
tctggggggtaggag

SEQ ID NO: 1411259 - DNA, 15 bp, Homo sapiens
ctctggggggtagga

SEQ ID NO: 1411260 - DNA, 15 bp, Homo sapiens
gctctggggggtagg

SEQ ID NO: 1411261 - DNA, 15 bp, Homo sapiens
cgctctggggggtag

SEQ ID NO: 1411262 - DNA, 15 bp, Homo sapiens
ccgctctggggggta

SEQ ID NO: 1411263 - DNA, 15 bp, Homo sapiens
gccgctctggggggt

SEQ ID NO: 1411264 - DNA, 15 bp, Homo sapiens
ggccgctctgggggg

SEQ ID NO: 1411265 - DNA, 15 bp, Homo sapiens
aggccgctctggggg

SEQ ID NO: 1411266 - DNA, 15 bp, Homo sapiens
gaggccgctctgggg

SEQ ID NO: 1411267 - DNA, 15 bp, Homo sapiens
cgaggccgctctggg

SEQ ID NO: 1411268 - DNA, 15 bp, Homo sapiens
acgaggccgctctgg

SEQ ID NO: 1411269 - DNA, 15 bp, Homo sapiens
gacgaggccgctctg

SEQ ID NO: 1411270 - DNA, 15 bp, Homo sapiens
ggacgaggccgctct

SEQ ID NO: 1411271 - DNA, 15 bp, Homo sapiens
aggacgaggccgctc

SEQ ID NO: 1411272 - DNA, 15 bp, Homo sapiens
caggacgaggccgct

SEQ ID NO: 1411273 - DNA, 15 bp, Homo sapiens
acaggacgaggccgc

SEQ ID NO: 1411274 - DNA, 15 bp, Homo sapiens
gacaggacgaggccg

SEQ ID NO: 1411275 - DNA, 15 bp, Homo sapiens
agacaggacgaggcc

SEQ ID NO: 1411276 - DNA, 15 bp, Homo sapiens
cagacaggacgaggc

SEQ ID NO: 1411277 - DNA, 15 bp, Homo sapiens
ccagacaggacgagg

SEQ ID NO: 1411278 - DNA, 15 bp, Homo sapiens
cccagacaggacgag

SEQ ID NO: 1411279 - DNA, 15 bp, Homo sapiens
ccccagacaggacga

SEQ ID NO: 1411280 - DNA, 15 bp, Homo sapiens
accccagacaggacg

SEQ ID NO: 1411281 - DNA, 15 bp, Homo sapiens
gaccccagacaggac

SEQ ID NO: 1411282 - DNA, 15 bp, Homo sapiens
tgaccccagacagga

SEQ ID NO: 1411283 - DNA, 15 bp, Homo sapiens
ctgaccccagacagg

SEQ ID NO: 1411284 - DNA, 15 bp, Homo sapiens
tctgaccccagacag

SEQ ID NO: 1411285 - DNA, 15 bp, Homo sapiens
atctgaccccagaca

SEQ ID NO: 1411286 - DNA, 15 bp, Homo sapiens
tatctgaccccagac

SEQ ID NO: 1411287 - DNA, 15 bp, Homo sapiens
ttatctgaccccaga

SEQ ID NO: 1411288 - DNA, 15 bp, Homo sapiens
cttatctgaccccag

SEQ ID NO: 1411289 - DNA, 15 bp, Homo sapiens
gcttatctgacccca

SEQ ID NO: 1411290 - DNA, 15 bp, Homo sapiens
ggcttatctgacccc

SEQ ID NO: 1411291 - DNA, 15 bp, Homo sapiens
tggcttatctgaccc

SEQ ID NO: 1411292 - DNA, 15 bp, Homo sapiens
gtggcttatctgacc

SEQ ID NO: 1411293 - DNA, 15 bp, Homo sapiens
ggtggcttatctgac

SEQ ID NO: 1411294 - DNA, 15 bp, Homo sapiens
aggtggcttatctga

SEQ ID NO: 1411295 - DNA, 15 bp, Homo sapiens
taggtggcttatctg

SEQ ID NO: 1411296 - DNA, 15 bp, Homo sapiens
ttaggtggcttatct

SEQ ID NO: 1411297 - DNA, 15 bp, Homo sapiens
cttaggtggcttatc

SEQ ID NO: 1411298 - DNA, 15 bp, Homo sapiens
gcttaggtggcttat

SEQ ID NO: 1411299 - DNA, 15 bp, Homo sapiens
cgcttaggtggctta

SEQ ID NO: 1411300 - DNA, 15 bp, Homo sapiens
ccgcttaggtggctt

SEQ ID NO: 1411301 - DNA, 15 bp, Homo sapiens
cccgcttaggtggct

SEQ ID NO: 1411302 - DNA, 15 bp, Homo sapiens
ccccgcttaggtggc

SEQ ID NO: 1411303 - DNA, 15 bp, Homo sapiens
accccgcttaggtgg

SEQ ID NO: 1411304 - DNA, 15 bp, Homo sapiens
caccccgcttaggtg

SEQ ID NO: 1411305 - DNA, 15 bp, Homo sapiens
ccaccccgcttaggt

SEQ ID NO: 1411306 - DNA, 15 bp, Homo sapiens
cccaccccgcttagg

SEQ ID NO: 1411307 - DNA, 15 bp, Homo sapiens
ccccaccccgcttag

SEQ ID NO: 1411308 - DNA, 15 bp, Homo sapiens
cccccaccccgctta

SEQ ID NO: 1411309 - DNA, 15 bp, Homo sapiens
ccccccaccccgctt

SEQ ID NO: 1411310 - DNA, 15 bp, Homo sapiens
accccccaccccgct

SEQ ID NO: 1411311 - DNA, 15 bp, Homo sapiens
taccccccaccccgc

SEQ ID NO: 1411312 - DNA, 15 bp, Homo sapiens
ctaccccccaccccg

SEQ ID NO: 1411313 - DNA, 15 bp, Homo sapiens
tctaccccccacccc

SEQ ID NO: 1411314 - DNA, 15 bp, Homo sapiens
atctaccccccaccc

SEQ ID NO: 1411315 - DNA, 15 bp, Homo sapiens
tatctaccccccacc

SEQ ID NO: 1411316 - DNA, 15 bp, Homo sapiens
gtatctaccccccac

SEQ ID NO: 1411317 - DNA, 15 bp, Homo sapiens
agtatctacccccca

SEQ ID NO: 1411318 - DNA, 15 bp, Homo sapiens
gagtatctacccccc

SEQ ID NO: 1411319 - DNA, 15 bp, Homo sapiens
ggagtatctaccccc

SEQ ID NO: 1411320 - DNA, 15 bp, Homo sapiens
gggagtatctacccc

SEQ ID NO: 1411321 - DNA, 15 bp, Homo sapiens
tgggagtatctaccc

SEQ ID NO: 1411322 - DNA, 15 bp, Homo sapiens
gtgggagtatctacc

SEQ ID NO: 1411323 - DNA, 15 bp, Homo sapiens
ggtgggagtatctac

SEQ ID NO: 1411324 - DNA, 15 bp, Homo sapiens
cggtgggagtatcta

SEQ ID NO: 1411325 - DNA, 15 bp, Homo sapiens
gcggtgggagtatct

SEQ ID NO: 1411326 - DNA, 15 bp, Homo sapiens
tgcggtgggagtatc

SEQ ID NO: 1411327 - DNA, 15 bp, Homo sapiens
gtgcggtgggagtat

SEQ ID NO: 1411328 - DNA, 15 bp, Homo sapiens
ggtgcggtgggagta

SEQ ID NO: 1411329 - DNA, 15 bp, Homo sapiens
tggtgcggtgggagt

SEQ ID NO: 1411330 - DNA, 15 bp, Homo sapiens
ttggtgcggtgggag

SEQ ID NO: 1411331 - DNA, 15 bp, Homo sapiens
cttggtgcggtggga

SEQ ID NO: 1411332 - DNA, 15 bp, Homo sapiens
ccttggtgcggtggg

SEQ ID NO: 1411333 - DNA, 15 bp, Homo sapiens
gccttggtgcggtgg

SEQ ID NO: 1411334 - DNA, 15 bp, Homo sapiens
ggccttggtgcggtg

SEQ ID NO: 1411335 - DNA, 15 bp, Homo sapiens
aggccttggtgcggt

SEQ ID NO: 1411336 - DNA, 15 bp, Homo sapiens
gaggccttggtgcgg

SEQ ID NO: 1411337 - DNA, 15 bp, Homo sapiens
ggaggccttggtgcg

SEQ ID NO: 1411338 - DNA, 15 bp, Homo sapiens
gggaggccttggtgc

SEQ ID NO: 1411339 - DNA, 15 bp, Homo sapiens
ggggaggccttggtg

SEQ ID NO: 1411340 - DNA, 15 bp, Homo sapiens
aggggaggccttggt

SEQ ID NO: 1411341 - DNA, 15 bp, Homo sapiens
aaggggaggccttgg

SEQ ID NO: 1411342 - DNA, 15 bp, Homo sapiens
gaaggggaggccttg

SEQ ID NO: 1411343 - DNA, 15 bp, Homo sapiens
ggaaggggaggcctt

SEQ ID NO: 1411344 - DNA, 15 bp, Homo sapiens
tggaaggggaggcct

SEQ ID NO: 1411345 - DNA, 15 bp, Homo sapiens
gtggaaggggaggcc

SEQ ID NO: 1411346 - DNA, 15 bp, Homo sapiens
tgtggaaggggaggc

SEQ ID NO: 1411347 - DNA, 15 bp, Homo sapiens
ctgtggaaggggagg

SEQ ID NO: 1411348 - DNA, 15 bp, Homo sapiens
actgtggaaggggag

SEQ ID NO: 1411349 - DNA, 15 bp, Homo sapiens
aactgtggaagggga

SEQ ID NO: 1411350 - DNA, 15 bp, Homo sapiens
ccaactgtggaaggg

SEQ ID NO: 1411351 - DNA, 15 bp, Homo sapiens
gccaactgtggaagg

SEQ ID NO: 1411352 - DNA, 15 bp, Homo sapiens
agccaactgtggaag

SEQ ID NO: 1411353 - DNA, 15 bp, Homo sapiens
gagccaactgtggaa

SEQ ID NO: 1411354 - DNA, 15 bp, Homo sapiens
ggagccaactgtgga

SEQ ID NO: 1411355 - DNA, 15 bp, Homo sapiens
aggagccaactgtgg

SEQ ID NO: 1411356 - DNA, 15 bp, Homo sapiens
aaggagccaactgtg

SEQ ID NO: 1411357 - DNA, 15 bp, Homo sapiens
aaaggagccaactgt

SEQ ID NO: 1411358 - DNA, 15 bp, Homo sapiens
taaaggagccaactg

SEQ ID NO: 1411359 - DNA, 15 bp, Homo sapiens
ataaaggagccaact

SEQ ID NO: 1411360 - DNA, 15 bp, Homo sapiens
gataaaggagccaac

SEQ ID NO: 1411361 - DNA, 15 bp, Homo sapiens
gtgataaaggagcca

SEQ ID NO: 1411362 - DNA, 15 bp, Homo sapiens
agtgataaaggagcc

SEQ ID NO: 1411363 - DNA, 15 bp, Homo sapiens
aagtgataaaggagc

SEQ ID NO: 1411364 - DNA, 15 bp, Homo sapiens
aaagtgataaaggag

SEQ ID NO: 1411365 - DNA, 15 bp, Homo sapiens
gaaagtgataaagga

SEQ ID NO: 1411366 - DNA, 15 bp, Homo sapiens
ggaaagtgataaagg

SEQ ID NO: 1411367 - DNA, 15 bp, Homo sapiens
gggaaagtgataaag

SEQ ID NO: 1411368 - DNA, 15 bp, Homo sapiens
agggaaagtgataaa

SEQ ID NO: 1411369 - DNA, 15 bp, Homo sapiens
aagggaaagtgataa

SEQ ID NO: 1411370 - DNA, 15 bp, Homo sapiens
gaagggaaagtgata

SEQ ID NO: 1411371 - DNA, 15 bp, Homo sapiens
tgaagggaaagtgat

SEQ ID NO: 1411372 - DNA, 15 bp, Homo sapiens
ctgaagggaaagtga

SEQ ID NO: 1411373 - DNA, 15 bp, Homo sapiens
actgaagggaaagtg

SEQ ID NO: 1411374 - DNA, 15 bp, Homo sapiens
aactgaagggaaagt

SEQ ID NO: 1411375 - DNA, 15 bp, Homo sapiens
gaactgaagggaaag

SEQ ID NO: 1411376 - DNA, 15 bp, Homo sapiens
tgaactgaagggaaa

SEQ ID NO: 1411377 - DNA, 15 bp, Homo sapiens
gtgaactgaagggaa

SEQ ID NO: 1411378 - DNA, 15 bp, Homo sapiens
ggtgaactgaaggga

SEQ ID NO: 1411379 - DNA, 15 bp, Homo sapiens
gggtgaactgaaggg

SEQ ID NO: 1411380 - DNA, 15 bp, Homo sapiens
tgggtgaactgaagg

SEQ ID NO: 1411381 - DNA, 15 bp, Homo sapiens
ctgggtgaactgaag

SEQ ID NO: 1411382 - DNA, 15 bp, Homo sapiens
gctgggtgaactgaa

SEQ ID NO: 1411383 - DNA, 15 bp, Homo sapiens
cgctgggtgaactga

SEQ ID NO: 1411384 - DNA, 15 bp, Homo sapiens
ccgctgggtgaactg

SEQ ID NO: 1411385 - DNA, 15 bp, Homo sapiens
cccgctgggtgaact

SEQ ID NO: 1411386 - DNA, 15 bp, Homo sapiens
ccccgctgggtgaac

SEQ ID NO: 1411387 - DNA, 15 bp, Homo sapiens
tccccgctgggtgaa

SEQ ID NO: 1411388 - DNA, 15 bp, Homo sapiens
gtccccgctgggtga

SEQ ID NO: 1411389 - DNA, 15 bp, Homo sapiens
tgtccccgctgggtg

SEQ ID NO: 1411390 - DNA, 15 bp, Homo sapiens
ttgtccccgctgggt

SEQ ID NO: 1411391 - DNA, 15 bp, Homo sapiens
gttgtccccgctggg

SEQ ID NO: 1411392 - DNA, 15 bp, Homo sapiens
tgttgtccccgctgg

SEQ ID NO: 1411393 - DNA, 15 bp, Homo sapiens
gtgttgtccccgctg

SEQ ID NO: 1411394 - DNA, 15 bp, Homo sapiens
cgtgttgtccccgct

SEQ ID NO: 1411395 - DNA, 15 bp, Homo sapiens
gcgtgttgtccccgc

SEQ ID NO: 1411396 - DNA, 15 bp, Homo sapiens
tgcgtgttgtccccg

SEQ ID NO: 1411397 - DNA, 15 bp, Homo sapiens
ctgcgtgttgtcccc

SEQ ID NO: 1411398 - DNA, 15 bp, Homo sapiens
tctgcgtgttgtccc

SEQ ID NO: 1411399 - DNA, 15 bp, Homo sapiens
gtctgcgtgttgtcc

SEQ ID NO: 1411400 - DNA, 15 bp, Homo sapiens
tgtctgcgtgttgtc

SEQ ID NO: 1411401 - DNA, 15 bp, Homo sapiens
gtgtctgcgtgttgt

SEQ ID NO: 1411402 - DNA, 15 bp, Homo sapiens
ggtgtctgcgtgttg

SEQ ID NO: 1411403 - DNA, 15 bp, Homo sapiens
gggtgtctgcgtgtt

SEQ ID NO: 1411404 - DNA, 15 bp, Homo sapiens
cgggtgtctgcgtgt

SEQ ID NO: 1411405 - DNA, 15 bp, Homo sapiens
ccgggtgtctgcgtg

SEQ ID NO: 1411406 - DNA, 15 bp, Homo sapiens
accgggtgtctgcgt

SEQ ID NO: 1411407 - DNA, 15 bp, Homo sapiens
caccgggtgtctgcg

SEQ ID NO: 1411408 - DNA, 15 bp, Homo sapiens
ccaccgggtgtctgc

SEQ ID NO: 1411409 - DNA, 15 bp, Homo sapiens
accaccgggtgtctg

SEQ ID NO: 1411410 - DNA, 15 bp, Homo sapiens
caccaccgggtgtct

SEQ ID NO: 1411411 - DNA, 15 bp, Homo sapiens
ccaccaccgggtgtc

SEQ ID NO: 1411412 - DNA, 15 bp, Homo sapiens
gccaccaccgggtgt

SEQ ID NO: 1411413 - DNA, 15 bp, Homo sapiens
agccaccaccgggtg

SEQ ID NO: 1411414 - DNA, 15 bp, Homo sapiens
cagccaccaccgggt

SEQ ID NO: 1411415 - DNA, 15 bp, Homo sapiens
gcagccaccaccggg

SEQ ID NO: 1411416 - DNA, 15 bp, Homo sapiens
tgcagccaccaccgg

SEQ ID NO: 1411417 - DNA, 15 bp, Homo sapiens
ctgcagccaccaccg

SEQ ID NO: 1411418 - DNA, 15 bp, Homo sapiens
cctgcagccaccacc

SEQ ID NO: 1411419 - DNA, 15 bp, Homo sapiens
ccctgcagccaccac

SEQ ID NO: 1411420 - DNA, 15 bp, Homo sapiens
gccctgcagccacca

SEQ ID NO: 1411421 - DNA, 15 bp, Homo sapiens
ggccctgcagccacc

SEQ ID NO: 1411422 - DNA, 15 bp, Homo sapiens
gggccctgcagccac

SEQ ID NO: 1411423 - DNA, 15 bp, Homo sapiens
ggggccctgcagcca

SEQ ID NO: 1411424 - DNA, 15 bp, Homo sapiens
gggggccctgcagcc

SEQ ID NO: 1411425 - DNA, 15 bp, Homo sapiens
cgggggccctgcagc

SEQ ID NO: 1411426 - DNA, 15 bp, Homo sapiens
ccgggggccctgcag

SEQ ID NO: 1411427 - DNA, 15 bp, Homo sapiens
gccgggggccctgca

SEQ ID NO: 1411428 - DNA, 15 bp, Homo sapiens
tgccgggggccctgc

SEQ ID NO: 1411429 - DNA, 15 bp, Homo sapiens
ctgccgggggccctg

SEQ ID NO: 1411430 - DNA, 15 bp, Homo sapiens
gctgccgggggccct

SEQ ID NO: 1411431 - DNA, 15 bp, Homo sapiens
ggctgccgggggccc

SEQ ID NO: 1411432 - DNA, 15 bp, Homo sapiens
tggctgccgggggcc

SEQ ID NO: 1411433 - DNA, 15 bp, Homo sapiens
ctggctgccgggggc

SEQ ID NO: 1411434 - DNA, 15 bp, Homo sapiens
gctggctgccggggg

SEQ ID NO: 1411435 - DNA, 15 bp, Homo sapiens
cgctggctgccgggg

SEQ ID NO: 1411436 - DNA, 15 bp, Homo sapiens
ccgctggctgccggg

SEQ ID NO: 1411437 - DNA, 15 bp, Homo sapiens
accgctggctgccgg

SEQ ID NO: 1411438 - DNA, 15 bp, Homo sapiens
caccgctggctgccg

SEQ ID NO: 1411439 - DNA, 15 bp, Homo sapiens
tcaccgctggctgcc

SEQ ID NO: 1411440 - DNA, 15 bp, Homo sapiens
atcaccgctggctgc

SEQ ID NO: 1411441 - DNA, 15 bp, Homo sapiens
tatcaccgctggctg

SEQ ID NO: 1411442 - DNA, 15 bp, Homo sapiens
ttatcaccgctggct

SEQ ID NO: 1411443 - DNA, 15 bp, Homo sapiens
attatcaccgctggc

SEQ ID NO: 1411444 - DNA, 15 bp, Homo sapiens
cattatcaccgctgg

SEQ ID NO: 1411445 - DNA, 15 bp, Homo sapiens
gcattatcaccgctg

SEQ ID NO: 1411446 - DNA, 15 bp, Homo sapiens
tgcattatcaccgct

SEQ ID NO: 1411447 - DNA, 15 bp, Homo sapiens
ctgcattatcaccgc

SEQ ID NO: 1411448 - DNA, 15 bp, Homo sapiens
cctgcattatcaccg

SEQ ID NO: 1411449 - DNA, 15 bp, Homo sapiens
ccctgcattatcacc

SEQ ID NO: 1411450 - DNA, 15 bp, Homo sapiens
tccctgcattatcac

SEQ ID NO: 1411451 - DNA, 15 bp, Homo sapiens
ttccctgcattatca

SEQ ID NO: 1411452 - DNA, 15 bp, Homo sapiens
tttccctgcattatc

SEQ ID NO: 1411453 - DNA, 15 bp, Homo sapiens
ctttccctgcattat

SEQ ID NO: 1411454 - DNA, 15 bp, Homo sapiens
cctttccctgcatta

SEQ ID NO: 1411455 - DNA, 15 bp, Homo sapiens
gcctttccctgcatt

SEQ ID NO: 1411456 - DNA, 15 bp, Homo sapiens
cgcctttccctgcat

SEQ ID NO: 1411457 - DNA, 15 bp, Homo sapiens
gcgcctttccctgca

SEQ ID NO: 1411458 - DNA, 15 bp, Homo sapiens
ggcgcctttccctgc

SEQ ID NO: 1411459 - DNA, 15 bp, Homo sapiens
gggcgcctttccctg

SEQ ID NO: 1411460 - DNA, 15 bp, Homo sapiens
ggggcgcctttccct

SEQ ID NO: 1411461 - DNA, 15 bp, Homo sapiens
tggggcgcctttccc

SEQ ID NO: 1411462 - DNA, 15 bp, Homo sapiens
ttggggcgcctttcc

SEQ ID NO: 1411463 - DNA, 15 bp, Homo sapiens
gttggggcgcctttc

SEQ ID NO: 1411464 - DNA, 15 bp, Homo sapiens
ggttggggcgccttt

SEQ ID NO: 1411465 - DNA, 15 bp, Homo sapiens
aggttggggcgcctt

SEQ ID NO: 1411466 - DNA, 15 bp, Homo sapiens
gaggttggggcgcct

SEQ ID NO: 1411467 - DNA, 15 bp, Homo sapiens
tgaggttggggcgcc

SEQ ID NO: 1411468 - DNA, 15 bp, Homo sapiens
ctgaggttggggcgc

SEQ ID NO: 1411469 - DNA, 15 bp, Homo sapiens
gctgaggttggggcg

SEQ ID NO: 1411470 - DNA, 15 bp, Homo sapiens
agctgaggttggggc

SEQ ID NO: 1411471 - DNA, 15 bp, Homo sapiens
tagctgaggttgggg

SEQ ID NO: 1411472 - DNA, 15 bp, Homo sapiens
gtagctgaggttggg

SEQ ID NO: 1411473 - DNA, 15 bp, Homo sapiens
cgtagctgaggttgg

SEQ ID NO: 1411474 - DNA, 15 bp, Homo sapiens
gcgtagctgaggttg

SEQ ID NO: 1411475 - DNA, 15 bp, Homo sapiens
cgcgtagctgaggtt

SEQ ID NO: 1411476 - DNA, 15 bp, Homo sapiens
ccgcgtagctgaggt

SEQ ID NO: 1411477 - DNA, 15 bp, Homo sapiens
cccgcgtagctgagg

SEQ ID NO: 1411478 - DNA, 15 bp, Homo sapiens
gcccgcgtagctgag

SEQ ID NO: 1411479 - DNA, 15 bp, Homo sapiens
cgcccgcgtagctga

SEQ ID NO: 1411480 - DNA, 15 bp, Homo sapiens
gcgcccgcgtagctg

SEQ ID NO: 1411481 - DNA, 15 bp, Homo sapiens
ggcgcccgcgtagct

SEQ ID NO: 1411482 - DNA, 15 bp, Homo sapiens
gggcgcccgcgtagc

SEQ ID NO: 1411483 - DNA, 15 bp, Homo sapiens
tgggcgcccgcgtag

SEQ ID NO: 1411484 - DNA, 15 bp, Homo sapiens
gtgggcgcccgcgta

SEQ ID NO: 1411485 - DNA, 15 bp, Homo sapiens
tgtgggcgcccgcgt

SEQ ID NO: 1411486 - DNA, 15 bp, Homo sapiens
ctgtgggcgcccgcg

SEQ ID NO: 1411487 - DNA, 15 bp, Homo sapiens
cctgtgggcgcccgc

SEQ ID NO: 1411488 - DNA, 15 bp, Homo sapiens
ccctgtgggcgcccg

SEQ ID NO: 1411489 - DNA, 15 bp, Homo sapiens
gccctgtgggcgccc

SEQ ID NO: 1411490 - DNA, 15 bp, Homo sapiens
agccctgtgggcgcc

SEQ ID NO: 1411491 - DNA, 15 bp, Homo sapiens
aagccctgtgggcgc

SEQ ID NO: 1411492 - DNA, 15 bp, Homo sapiens
gaagccctgtgggcg

SEQ ID NO: 1411493 - DNA, 15 bp, Homo sapiens
agaagccctgtgggc

SEQ ID NO: 1411494 - DNA, 15 bp, Homo sapiens
gagaagccctgtggg

SEQ ID NO: 1411495 - DNA, 15 bp, Homo sapiens
ggagaagccctgtgg

SEQ ID NO: 1411496 - DNA, 15 bp, Homo sapiens
gggagaagccctgtg

SEQ ID NO: 1411497 - DNA, 15 bp, Homo sapiens
ggggagaagccctgt

SEQ ID NO: 1411498 - DNA, 15 bp, Homo sapiens
tggggagaagccctg

SEQ ID NO: 1411499 - DNA, 15 bp, Homo sapiens
gtggggagaagccct

SEQ ID NO: 1411500 - DNA, 15 bp, Homo sapiens
ggtggggagaagccc

SEQ ID NO: 1411501 - DNA, 15 bp, Homo sapiens
gggtggggagaagcc

SEQ ID NO: 1411502 - DNA, 15 bp, Homo sapiens
aggggtggggagaag

SEQ ID NO: 1411503 - DNA, 15 bp, Homo sapiens
taggggtggggagaa

SEQ ID NO: 1411504 - DNA, 15 bp, Homo sapiens
gtaggggtggggaga

SEQ ID NO: 1411505 - DNA, 15 bp, Homo sapiens
tgtaggggtggggag

SEQ ID NO: 1411506 - DNA, 15 bp, Homo sapiens
gtgtaggggtgggga

SEQ ID NO: 1411507 - DNA, 15 bp, Homo sapiens
cgtgtaggggtgggg

SEQ ID NO: 1411508 - DNA, 15 bp, Homo sapiens
acgtgtaggggtggg

SEQ ID NO: 1411509 - DNA, 15 bp, Homo sapiens
cacgtgtaggggtgg

SEQ ID NO: 1411510 - DNA, 15 bp, Homo sapiens
gcacgtgtaggggtg

SEQ ID NO: 1411511 - DNA, 15 bp, Homo sapiens
ggcacgtgtaggggt

SEQ ID NO: 1411512 - DNA, 15 bp, Homo sapiens
gggcacgtgtagggg

SEQ ID NO: 1411513 - DNA, 15 bp, Homo sapiens
ggggcacgtgtaggg

SEQ ID NO: 1411514 - DNA, 15 bp, Homo sapiens
tggggcacgtgtagg

SEQ ID NO: 1411515 - DNA, 15 bp, Homo sapiens
ctggggcacgtgtag

SEQ ID NO: 1411516 - DNA, 15 bp, Homo sapiens
gctggggcacgtgta

SEQ ID NO: 1411517 - DNA, 15 bp, Homo sapiens
cgctggggcacgtgt

SEQ ID NO: 1411518 - DNA, 15 bp, Homo sapiens
gcgctggggcacgtg

SEQ ID NO: 1411519 - DNA, 15 bp, Homo sapiens
ggcgctggggcacgt

SEQ ID NO: 1411520 - DNA, 15 bp, Homo sapiens
gggcgctggggcacg

SEQ ID NO: 1411521 - DNA, 15 bp, Homo sapiens
agggcgctggggcac

SEQ ID NO: 1411522 - DNA, 15 bp, Homo sapiens
cagggcgctggggca

SEQ ID NO: 1411523 - DNA, 15 bp, Homo sapiens
ccagggcgctggggc

SEQ ID NO: 1411524 - DNA, 15 bp, Homo sapiens
tccagggcgctgggg

SEQ ID NO: 1411525 - DNA, 15 bp, Homo sapiens
ctccagggcgctggg

SEQ ID NO: 1411526 - DNA, 15 bp, Homo sapiens
tctccagggcgctgg

SEQ ID NO: 1411527 - DNA, 15 bp, Homo sapiens
gtctccagggcgctg

SEQ ID NO: 1411528 - DNA, 15 bp, Homo sapiens
ggtctccagggcgct

SEQ ID NO: 1411529 - DNA, 15 bp, Homo sapiens
cggtctccagggcgc

SEQ ID NO: 1411530 - DNA, 15 bp, Homo sapiens
gcggtctccagggcg

SEQ ID NO: 1411531 - DNA, 15 bp, Homo sapiens
cgcggtctccagggc

SEQ ID NO: 1411532 - DNA, 15 bp, Homo sapiens
gcgcggtctccaggg

SEQ ID NO: 1411533 - DNA, 15 bp, Homo sapiens
ggcgcggtctccagg

SEQ ID NO: 1411534 - DNA, 15 bp, Homo sapiens
aggcgcggtctccag

SEQ ID NO: 1411535 - DNA, 15 bp, Homo sapiens
caggcgcggtctcca

SEQ ID NO: 1411536 - DNA, 15 bp, Homo sapiens
ccaggcgcggtctcc

SEQ ID NO: 1411537 - DNA, 15 bp, Homo sapiens
cccaggcgcggtctc

SEQ ID NO: 1411538 - DNA, 15 bp, Homo sapiens
tcccaggcgcggtct

SEQ ID NO: 1411539 - DNA, 15 bp, Homo sapiens
ctcccaggcgcggtc

SEQ ID NO: 1411540 - DNA, 15 bp, Homo sapiens
gctcccaggcgcggt

SEQ ID NO: 1411541 - DNA, 15 bp, Homo sapiens
agctcccaggcgcgg

SEQ ID NO: 1411542 - DNA, 15 bp, Homo sapiens
tagctcccaggcgcg

SEQ ID NO: 1411543 - DNA, 15 bp, Homo sapiens
gtagctcccaggcgc

SEQ ID NO: 1411544 - DNA, 15 bp, Homo sapiens
cgtagctcccaggcg

SEQ ID NO: 1411545 - DNA, 15 bp, Homo sapiens
tcgtagctcccaggc

SEQ ID NO: 1411546 - DNA, 15 bp, Homo sapiens
ctcgtagctcccagg

SEQ ID NO: 1411547 - DNA, 15 bp, Homo sapiens
gctcgtagctcccag

SEQ ID NO: 1411548 - DNA, 15 bp, Homo sapiens
cgctcgtagctccca

SEQ ID NO: 1411549 - DNA, 15 bp, Homo sapiens
tcgctcgtagctccc

SEQ ID NO: 1411550 - DNA, 15 bp, Homo sapiens
ctcgctcgtagctcc

SEQ ID NO: 1411551 - DNA, 15 bp, Homo sapiens
gctcgctcgtagctc

SEQ ID NO: 1411552 - DNA, 15 bp, Homo sapiens
tgctcgctcgtagct

SEQ ID NO: 1411553 - DNA, 15 bp, Homo sapiens
gtgctcgctcgtagc

SEQ ID NO: 1411554 - DNA, 15 bp, Homo sapiens
ggtgctcgctcgtag

SEQ ID NO: 1411555 - DNA, 15 bp, Homo sapiens
aggtgctcgctcgta

SEQ ID NO: 1411556 - DNA, 15 bp, Homo sapiens
aaggtgctcgctcgt

SEQ ID NO: 1411557 - DNA, 15 bp, Homo sapiens
gaaggtgctcgctcg

SEQ ID NO: 1411558 - DNA, 15 bp, Homo sapiens
ggaaggtgctcgctc

SEQ ID NO: 1411559 - DNA, 15 bp, Homo sapiens
gggaaggtgctcgct

SEQ ID NO: 1411560 - DNA, 15 bp, Homo sapiens
agggaaggtgctcgc

SEQ ID NO: 1411561 - DNA, 15 bp, Homo sapiens
gagggaaggtgctcg

SEQ ID NO: 1411562 - DNA, 15 bp, Homo sapiens
cgagggaaggtgctc

SEQ ID NO: 1411563 - DNA, 15 bp, Homo sapiens
gcgagggaaggtgct

SEQ ID NO: 1411564 - DNA, 15 bp, Homo sapiens
tgcgagggaaggtgc

SEQ ID NO: 1411565 - DNA, 15 bp, Homo sapiens
ctgcgagggaaggtg

SEQ ID NO: 1411566 - DNA, 15 bp, Homo sapiens
tctgcgagggaaggt

SEQ ID NO: 1411567 - DNA, 15 bp, Homo sapiens
ctctgcgagggaagg

SEQ ID NO: 1411568 - DNA, 15 bp, Homo sapiens
tctctgcgagggaag

SEQ ID NO: 1411569 - DNA, 15 bp, Homo sapiens
atctctgcgagggaa

SEQ ID NO: 1411570 - DNA, 15 bp, Homo sapiens
catctctgcgaggga

SEQ ID NO: 1411571 - DNA, 15 bp, Homo sapiens
ccatctctgcgaggg

SEQ ID NO: 1411572 - DNA, 15 bp, Homo sapiens
tccatctctgcgagg

SEQ ID NO: 1411573 - DNA, 15 bp, Homo sapiens
atccatctctgcgag

SEQ ID NO: 1411574 - DNA, 15 bp, Homo sapiens
gatccatctctgcga

SEQ ID NO: 1411575 - DNA, 15 bp, Homo sapiens
tgatccatctctgcg

SEQ ID NO: 1411576 - DNA, 15 bp, Homo sapiens
ctgatccatctctgc

SEQ ID NO: 1411577 - DNA, 15 bp, Homo sapiens
tctgatccatctctg

SEQ ID NO: 1411578 - DNA, 15 bp, Homo sapiens
atctgatccatctct

SEQ ID NO: 1411579 - DNA, 15 bp, Homo sapiens
aatctgatccatctc

SEQ ID NO: 1411580 - DNA, 15 bp, Homo sapiens
taatctgatccatct

SEQ ID NO: 1411581 - DNA, 15 bp, Homo sapiens
ctaatctgatccatc

SEQ ID NO: 1411582 - DNA, 15 bp, Homo sapiens
gctaatctgatccat

SEQ ID NO: 1411583 - DNA, 15 bp, Homo sapiens
ggctaatctgatcca

SEQ ID NO: 1411584 - DNA, 15 bp, Homo sapiens
gggctaatctgatcc

SEQ ID NO: 1411585 - DNA, 15 bp, Homo sapiens
ggggctaatctgatc

SEQ ID NO: 1411586 - DNA, 15 bp, Homo sapiens
gggggctaatctgat

SEQ ID NO: 1411587 - DNA, 15 bp, Homo sapiens
agggggctaatctga

SEQ ID NO: 1411588 - DNA, 15 bp, Homo sapiens
cagggggctaatctg

SEQ ID NO: 1411589 - DNA, 15 bp, Homo sapiens
ccagggggctaatct

SEQ ID NO: 1411590 - DNA, 15 bp, Homo sapiens
cccagggggctaatc

SEQ ID NO: 1411591 - DNA, 15 bp, Homo sapiens
ccccagggggctaat

SEQ ID NO: 1411592 - DNA, 15 bp, Homo sapiens
gccccagggggctaa

SEQ ID NO: 1411593 - DNA, 15 bp, Homo sapiens
cgccccagggggcta

SEQ ID NO: 1411594 - DNA, 15 bp, Homo sapiens
ccgccccagggggct

SEQ ID NO: 1411595 - DNA, 15 bp, Homo sapiens
accgccccagggggc

SEQ ID NO: 1411596 - DNA, 15 bp, Homo sapiens
caccgccccaggggg

SEQ ID NO: 1411597 - DNA, 15 bp, Homo sapiens
ccaccgccccagggg

SEQ ID NO: 1411598 - DNA, 15 bp, Homo sapiens
gccaccgccccaggg

SEQ ID NO: 1411599 - DNA, 15 bp, Homo sapiens
tgccaccgccccagg

SEQ ID NO: 1411600 - DNA, 15 bp, Homo sapiens
gtgccaccgccccag

SEQ ID NO: 1411601 - DNA, 15 bp, Homo sapiens
ggtgccaccgcccca

SEQ ID NO: 1411602 - DNA, 15 bp, Homo sapiens
aggtgccaccgcccc

SEQ ID NO: 1411603 - DNA, 15 bp, Homo sapiens
caggtgccaccgccc

SEQ ID NO: 1411604 - DNA, 15 bp, Homo sapiens
gcaggtgccaccgcc

SEQ ID NO: 1411605 - DNA, 15 bp, Homo sapiens
ggcaggtgccaccgc

SEQ ID NO: 1411606 - DNA, 15 bp, Homo sapiens
gggcaggtgccaccg

SEQ ID NO: 1411607 - DNA, 15 bp, Homo sapiens
cgggcaggtgccacc

SEQ ID NO: 1411608 - DNA, 15 bp, Homo sapiens
acgggcaggtgccac

SEQ ID NO: 1411609 - DNA, 15 bp, Homo sapiens
gacgggcaggtgcca

SEQ ID NO: 1411610 - DNA, 15 bp, Homo sapiens
ggacgggcaggtgcc

SEQ ID NO: 1411611 - DNA, 15 bp, Homo sapiens
gggacgggcaggtgc

SEQ ID NO: 1411612 - DNA, 15 bp, Homo sapiens
ggggacgggcaggtg

SEQ ID NO: 1411613 - DNA, 15 bp, Homo sapiens
aggggacgggcaggt

SEQ ID NO: 1411614 - DNA, 15 bp, Homo sapiens
gaggggacgggcagg

SEQ ID NO: 1411615 - DNA, 15 bp, Homo sapiens
ggaggggacgggcag

SEQ ID NO: 1411616 - DNA, 15 bp, Homo sapiens
gggaggggacgggca

SEQ ID NO: 1411617 - DNA, 15 bp, Homo sapiens
ggggaggggacgggc

SEQ ID NO: 1411618 - DNA, 15 bp, Homo sapiens
aggggaggggacggg

SEQ ID NO: 1411619 - DNA, 15 bp, Homo sapiens
gaggggaggggacgg

SEQ ID NO: 1411620 - DNA, 15 bp, Homo sapiens
ggaggggaggggacg

SEQ ID NO: 1411621 - DNA, 15 bp, Homo sapiens
aggaggggaggggac

SEQ ID NO: 1411622 - DNA, 15 bp, Homo sapiens
gaggaggggagggga

SEQ ID NO: 1411623 - DNA, 15 bp, Homo sapiens
agaggaggggagggg

SEQ ID NO: 1411624 - DNA, 15 bp, Homo sapiens
gagaggaggggaggg

SEQ ID NO: 1411625 - DNA, 15 bp, Homo sapiens
agagaggaggggagg

SEQ ID NO: 1411626 - DNA, 15 bp, Homo sapiens
aagagaggaggggag

SEQ ID NO: 1411627 - DNA, 15 bp, Homo sapiens
gaagagaggagggga

SEQ ID NO: 1411628 - DNA, 15 bp, Homo sapiens
agaagagaggagggg

SEQ ID NO: 1411629 - DNA, 15 bp, Homo sapiens
gagaagagaggaggg

SEQ ID NO: 1411630 - DNA, 15 bp, Homo sapiens
ggagaagagaggagg

SEQ ID NO: 1411631 - DNA, 15 bp, Homo sapiens
gggagaagagaggag

SEQ ID NO: 1411632 - DNA, 15 bp, Homo sapiens
tgggagaagagagga

SEQ ID NO: 1411633 - DNA, 15 bp, Homo sapiens
gtgggagaagagagg

SEQ ID NO: 1411634 - DNA, 15 bp, Homo sapiens
ggtgggagaagagag

SEQ ID NO: 1411635 - DNA, 15 bp, Homo sapiens
gggtgggagaagaga

SEQ ID NO: 1411636 - DNA, 15 bp, Homo sapiens
ggggtgggagaagag

SEQ ID NO: 1411637 - DNA, 15 bp, Homo sapiens
gggggtgggagaaga

SEQ ID NO: 1411638 - DNA, 15 bp, Homo sapiens
cgggggtgggagaag

SEQ ID NO: 1411639 - DNA, 15 bp, Homo sapiens
gcgggggtgggagaa

SEQ ID NO: 1411640 - DNA, 15 bp, Homo sapiens
ggcgggggtgggaga

SEQ ID NO: 1411641 - DNA, 15 bp, Homo sapiens
gaaggcgggggtggg

SEQ ID NO: 1411642 - DNA, 15 bp, Homo sapiens
ggaaggcgggggtgg

SEQ ID NO: 1411643 - DNA, 15 bp, Homo sapiens
gggaaggcgggggtg

SEQ ID NO: 1411644 - DNA, 15 bp, Homo sapiens
ggggaaggcgggggt

SEQ ID NO: 1411645 - DNA, 15 bp, Homo sapiens
gggggaaggcggggg

SEQ ID NO: 1411646 - DNA, 15 bp, Homo sapiens
agggggaaggcgggg

SEQ ID NO: 1411647 - DNA, 15 bp, Homo sapiens
cagggggaaggcggg

SEQ ID NO: 1411648 - DNA, 15 bp, Homo sapiens
gcagggggaaggcgg

SEQ ID NO: 1411649 - DNA, 15 bp, Homo sapiens
agcagggggaaggcg

SEQ ID NO: 1411650 - DNA, 15 bp, Homo sapiens
gagcagggggaaggc

SEQ ID NO: 1411651 - DNA, 15 bp, Homo sapiens
agagcagggggaagg

SEQ ID NO: 1411652 - DNA, 15 bp, Homo sapiens
cagagcagggggaag

SEQ ID NO: 1411653 - DNA, 15 bp, Homo sapiens
ccagagcagggggaa

SEQ ID NO: 1411654 - DNA, 15 bp, Homo sapiens
cccagagcaggggga

SEQ ID NO: 1411655 - DNA, 15 bp, Homo sapiens
gcccagagcaggggg

SEQ ID NO: 1411656 - DNA, 15 bp, Homo sapiens
ggcccagagcagggg

SEQ ID NO: 1411657 - DNA, 15 bp, Homo sapiens
gggcccagagcaggg

SEQ ID NO: 1411658 - DNA, 15 bp, Homo sapiens
ggggcccagagcagg

SEQ ID NO: 1411659 - DNA, 15 bp, Homo sapiens
gggggcccagagcag

SEQ ID NO: 1411660 - DNA, 15 bp, Homo sapiens
agggggcccagagca

SEQ ID NO: 1411661 - DNA, 15 bp, Homo sapiens
cagggggcccagagc

SEQ ID NO: 1411662 - DNA, 15 bp, Homo sapiens
gcagggggcccagag

SEQ ID NO: 1411663 - DNA, 15 bp, Homo sapiens
tgcagggggcccaga

SEQ ID NO: 1411664 - DNA, 15 bp, Homo sapiens
gtgcagggggcccag

SEQ ID NO: 1411665 - DNA, 15 bp, Homo sapiens
ggtgcagggggccca

SEQ ID NO: 1411666 - DNA, 15 bp, Homo sapiens
aggtgcagggggccc

SEQ ID NO: 1411667 - DNA, 15 bp, Homo sapiens
gaggtgcagggggcc

SEQ ID NO: 1411668 - DNA, 15 bp, Homo sapiens
ggaggtgcagggggc

SEQ ID NO: 1411669 - DNA, 15 bp, Homo sapiens
gggaggtgcaggggg

SEQ ID NO: 1411670 - DNA, 15 bp, Homo sapiens
agggaggtgcagggg

SEQ ID NO: 1411671 - DNA, 15 bp, Homo sapiens
gagggaggtgcaggg

SEQ ID NO: 1411672 - DNA, 15 bp, Homo sapiens
agagggaggtgcagg

SEQ ID NO: 1411673 - DNA, 15 bp, Homo sapiens
aagagggaggtgcag

SEQ ID NO: 1411674 - DNA, 15 bp, Homo sapiens
caagagggaggtgca

SEQ ID NO: 1411675 - DNA, 15 bp, Homo sapiens
ccaagagggaggtgc

SEQ ID NO: 1411676 - DNA, 15 bp, Homo sapiens
cccaagagggaggtg

SEQ ID NO: 1411677 - DNA, 15 bp, Homo sapiens
ccccaagagggaggt

SEQ ID NO: 1411678 - DNA, 15 bp, Homo sapiens
gccccaagagggagg

SEQ ID NO: 1411679 - DNA, 15 bp, Homo sapiens
ggccccaagagggag

SEQ ID NO: 1411680 - DNA, 15 bp, Homo sapiens
gggccccaagaggga

SEQ ID NO: 1411681 - DNA, 15 bp, Homo sapiens
tgggccccaagaggg

SEQ ID NO: 1411682 - DNA, 15 bp, Homo sapiens
gtgggccccaagagg

SEQ ID NO: 1411683 - DNA, 15 bp, Homo sapiens
cgtgggccccaagag

SEQ ID NO: 1411684 - DNA, 15 bp, Homo sapiens
gcgtgggccccaaga

SEQ ID NO: 1411685 - DNA, 15 bp, Homo sapiens
cgcgtgggccccaag

SEQ ID NO: 1411686 - DNA, 15 bp, Homo sapiens
gcgcgtgggccccaa

SEQ ID NO: 1411687 - DNA, 15 bp, Homo sapiens
ggcgcgtgggcccca

SEQ ID NO: 1411688 - DNA, 15 bp, Homo sapiens
cggcgcgtgggcccc

SEQ ID NO: 1411689 - DNA, 15 bp, Homo sapiens
gcggcgcgtgggccc

SEQ ID NO: 1411690 - DNA, 15 bp, Homo sapiens
ggcggcgcgtgggcc

SEQ ID NO: 1411691 - DNA, 15 bp, Homo sapiens
gggcggcgcgtgggc

SEQ ID NO: 1411692 - DNA, 15 bp, Homo sapiens
ggggcggcgcgtggg

SEQ ID NO: 1411693 - DNA, 15 bp, Homo sapiens
aggggcggcgcgtgg

SEQ ID NO: 1411694 - DNA, 15 bp, Homo sapiens
gaggggcggcgcgtg

SEQ ID NO: 1411695 - DNA, 15 bp, Homo sapiens
agaggggcggcgcgt

SEQ ID NO: 1411696 - DNA, 15 bp, Homo sapiens
gagaggggcggcgcg

SEQ ID NO: 1411697 - DNA, 15 bp, Homo sapiens
ggagaggggcggcgc

SEQ ID NO: 1411698 - DNA, 15 bp, Homo sapiens
gggagaggggcggcg

SEQ ID NO: 1411699 - DNA, 15 bp, Homo sapiens
agggagaggggcggc

SEQ ID NO: 1411700 - DNA, 15 bp, Homo sapiens
gagggagaggggcgg

SEQ ID NO: 1411701 - DNA, 15 bp, Homo sapiens
cgagggagaggggcg

SEQ ID NO: 1411702 - DNA, 15 bp, Homo sapiens
gcgagggagaggggc

SEQ ID NO: 1411703 - DNA, 15 bp, Homo sapiens
agcgagggagagggg

SEQ ID NO: 1411704 - DNA, 15 bp, Homo sapiens
aagcgagggagaggg

SEQ ID NO: 1411705 - DNA, 15 bp, Homo sapiens
caagcgagggagagg

SEQ ID NO: 1411706 - DNA, 15 bp, Homo sapiens
tcaagcgagggagag

SEQ ID NO: 1411707 - DNA, 15 bp, Homo sapiens
ctcaagcgagggaga

SEQ ID NO: 1411708 - DNA, 15 bp, Homo sapiens
gctcaagcgagggag

SEQ ID NO: 1411709 - DNA, 15 bp, Homo sapiens
agctcaagcgaggga

SEQ ID NO: 1411710 - DNA, 15 bp, Homo sapiens
gagctcaagcgaggg

SEQ ID NO: 1411711 - DNA, 15 bp, Homo sapiens
agagctcaagcgagg

SEQ ID NO: 1411712 - DNA, 15 bp, Homo sapiens
cagagctcaagcgag

SEQ ID NO: 1411713 - DNA, 15 bp, Homo sapiens
tcagagctcaagcga

SEQ ID NO: 1411714 - DNA, 15 bp, Homo sapiens
ctcagagctcaagcg

SEQ ID NO: 1411715 - DNA, 15 bp, Homo sapiens
gctcagagctcaagc

SEQ ID NO: 1411716 - DNA, 15 bp, Homo sapiens
agctcagagctcaag

SEQ ID NO: 1411717 - DNA, 15 bp, Homo sapiens
gagctcagagctcaa

SEQ ID NO: 1411718 - DNA, 15 bp, Homo sapiens
tgagctcagagctca

SEQ ID NO: 1411719 - DNA, 15 bp, Homo sapiens
ctgagctcagagctc

SEQ ID NO: 1411720 - DNA, 15 bp, Homo sapiens
tctgagctcagagct

SEQ ID NO: 1411721 - DNA, 15 bp, Homo sapiens
ttctgagctcagagc

SEQ ID NO: 1411722 - DNA, 15 bp, Homo sapiens
cttctgagctcagag

SEQ ID NO: 1411723 - DNA, 15 bp, Homo sapiens
ccttctgagctcaga

SEQ ID NO: 1411724 - DNA, 15 bp, Homo sapiens
tccttctgagctcag

SEQ ID NO: 1411725 - DNA, 15 bp, Homo sapiens
ttccttctgagctca

SEQ ID NO: 1411726 - DNA, 15 bp, Homo sapiens
gttccttctgagctc

SEQ ID NO: 1411727 - DNA, 15 bp, Homo sapiens
ggttccttctgagct

SEQ ID NO: 1411728 - DNA, 15 bp, Homo sapiens
aggttccttctgagc

SEQ ID NO: 1411729 - DNA, 15 bp, Homo sapiens
caggttccttctgag

SEQ ID NO: 1411730 - DNA, 15 bp, Homo sapiens
gcaggttccttctga

SEQ ID NO: 1411731 - DNA, 15 bp, Homo sapiens
ggcaggttccttctg

SEQ ID NO: 1411732 - DNA, 15 bp, Homo sapiens
gggcaggttccttct

SEQ ID NO: 1411733 - DNA, 15 bp, Homo sapiens
cgggcaggttccttc

SEQ ID NO: 1411734 - DNA, 15 bp, Homo sapiens
gcgggcaggttcctt

SEQ ID NO: 1411735 - DNA, 15 bp, Homo sapiens
tgcgggcaggttcct

SEQ ID NO: 1411736 - DNA, 15 bp, Homo sapiens
ttgcgggcaggttcc

SEQ ID NO: 1411737 - DNA, 15 bp, Homo sapiens
tttgcgggcaggttc

SEQ ID NO: 1411738 - DNA, 15 bp, Homo sapiens
gtttgcgggcaggtt

SEQ ID NO: 1411739 - DNA, 15 bp, Homo sapiens
ggtttgcgggcaggt

SEQ ID NO: 1411740 - DNA, 15 bp, Homo sapiens
aggtttgcgggcagg

SEQ ID NO: 1411741 - DNA, 15 bp, Homo sapiens
caggtttgcgggcag

SEQ ID NO: 1411742 - DNA, 15 bp, Homo sapiens
ccaggtttgcgggca

SEQ ID NO: 1411743 - DNA, 15 bp, Homo sapiens
gccaggtttgcgggc

SEQ ID NO: 1411744 - DNA, 15 bp, Homo sapiens
agccaggtttgcggg

SEQ ID NO: 1411745 - DNA, 15 bp, Homo sapiens
gagccaggtttgcgg

SEQ ID NO: 1411746 - DNA, 15 bp, Homo sapiens
ggagccaggtttgcg

SEQ ID NO: 1411747 - DNA, 15 bp, Homo sapiens
gggagccaggtttgc

SEQ ID NO: 1411748 - DNA, 15 bp, Homo sapiens
tgggagccaggtttg

SEQ ID NO: 1411749 - DNA, 15 bp, Homo sapiens
ctgggagccaggttt

SEQ ID NO: 1411750 - DNA, 15 bp, Homo sapiens
gctgggagccaggtt

SEQ ID NO: 1411751 - DNA, 15 bp, Homo sapiens
ggctgggagccaggt

SEQ ID NO: 1411752 - DNA, 15 bp, Homo sapiens
gggctgggagccagg

SEQ ID NO: 1411753 - DNA, 15 bp, Homo sapiens
ggggctgggagccag

SEQ ID NO: 1411754 - DNA, 15 bp, Homo sapiens
cggggctgggagcca

SEQ ID NO: 1411755 - DNA, 15 bp, Homo sapiens
gcggggctgggagcc

SEQ ID NO: 1411756 - DNA, 15 bp, Homo sapiens
ggcggggctgggagc

SEQ ID NO: 1411757 - DNA, 15 bp, Homo sapiens
tgggcggggctggga

SEQ ID NO: 1411758 - DNA, 15 bp, Homo sapiens
ctgggcggggctggg

SEQ ID NO: 1411759 - DNA, 15 bp, Homo sapiens
cctgggcggggctgg

SEQ ID NO: 1411760 - DNA, 15 bp, Homo sapiens
ccctgggcggggctg

SEQ ID NO: 1411761 - DNA, 15 bp, Homo sapiens
tccctgggcggggct

SEQ ID NO: 1411762 - DNA, 15 bp, Homo sapiens
ctccctgggcggggc

SEQ ID NO: 1411763 - DNA, 15 bp, Homo sapiens
cgctccctgggcggg

SEQ ID NO: 1411764 - DNA, 15 bp, Homo sapiens
gcgctccctgggcgg

SEQ ID NO: 1411765 - DNA, 15 bp, Homo sapiens
cgcgctccctgggcg

SEQ ID NO: 1411766 - DNA, 15 bp, Homo sapiens
gcgcgctccctgggc

SEQ ID NO: 1411767 - DNA, 15 bp, Homo sapiens
cgcgcgctccctggg

SEQ ID NO: 1411768 - DNA, 15 bp, Homo sapiens
acgcgcgctccctgg

SEQ ID NO: 1411769 - DNA, 15 bp, Homo sapiens
gacgcgcgctccctg

SEQ ID NO: 1411770 - DNA, 15 bp, Homo sapiens
ggacgcgcgctccct

SEQ ID NO: 1411771 - DNA, 15 bp, Homo sapiens
gggacgcgcgctccc

SEQ ID NO: 1411772 - DNA, 15 bp, Homo sapiens
agggacgcgcgctcc

SEQ ID NO: 1411773 - DNA, 15 bp, Homo sapiens
cagggacgcgcgctc

SEQ ID NO: 1411774 - DNA, 15 bp, Homo sapiens
tcagggacgcgcgct

SEQ ID NO: 1411775 - DNA, 15 bp, Homo sapiens
ctcagggacgcgcgc

SEQ ID NO: 1411776 - DNA, 15 bp, Homo sapiens
gctcagggacgcgcg

SEQ ID NO: 1411777 - DNA, 15 bp, Homo sapiens
ggctcagggacgcgc

SEQ ID NO: 1411778 - DNA, 15 bp, Homo sapiens
gggctcagggacgcg

SEQ ID NO: 1411779 - DNA, 15 bp, Homo sapiens
tgggctcagggacgc

SEQ ID NO: 1411780 - DNA, 15 bp, Homo sapiens
ttgggctcagggacg

SEQ ID NO: 1411781 - DNA, 15 bp, Homo sapiens
cttgggctcagggac

SEQ ID NO: 1411782 - DNA, 15 bp, Homo sapiens
ccttgggctcaggga

SEQ ID NO: 1411783 - DNA, 15 bp, Homo sapiens
cccttgggctcaggg

SEQ ID NO: 1411784 - DNA, 15 bp, Homo sapiens
gcccttgggctcagg

SEQ ID NO: 1411785 - DNA, 15 bp, Homo sapiens
ggcccttgggctcag

SEQ ID NO: 1411786 - DNA, 15 bp, Homo sapiens
gggcccttgggctca

SEQ ID NO: 1411787 - DNA, 15 bp, Homo sapiens
ggggcccttgggctc

SEQ ID NO: 1411788 - DNA, 15 bp, Homo sapiens
tggggcccttgggct

SEQ ID NO: 1411789 - DNA, 15 bp, Homo sapiens
ctggggcccttgggc

SEQ ID NO: 1411790 - DNA, 15 bp, Homo sapiens
gctggggcccttggg

SEQ ID NO: 1411791 - DNA, 15 bp, Homo sapiens
cgctggggcccttgg

SEQ ID NO: 1411792 - DNA, 15 bp, Homo sapiens
tcgctggggcccttg

SEQ ID NO: 1411793 - DNA, 15 bp, Homo sapiens
gtcgctggggccctt

SEQ ID NO: 1411794 - DNA, 15 bp, Homo sapiens
tgtcgctggggccct

SEQ ID NO: 1411795 - DNA, 15 bp, Homo sapiens
ctgtcgctggggccc

SEQ ID NO: 1411796 - DNA, 15 bp, Homo sapiens
gctgtcgctggggcc

SEQ ID NO: 1411797 - DNA, 15 bp, Homo sapiens
tgctgtcgctggggc

SEQ ID NO: 1411798 - DNA, 15 bp, Homo sapiens
ctgctgtcgctgggg

SEQ ID NO: 1411799 - DNA, 15 bp, Homo sapiens
cctgctgtcgctggg

SEQ ID NO: 1411800 - DNA, 15 bp, Homo sapiens
ccctgctgtcgctgg

SEQ ID NO: 1411801 - DNA, 15 bp, Homo sapiens
tccctgctgtcgctg

SEQ ID NO: 1411802 - DNA, 15 bp, Homo sapiens
gtccctgctgtcgct

SEQ ID NO: 1411803 - DNA, 15 bp, Homo sapiens
agtccctgctgtcgc

SEQ ID NO: 1411804 - DNA, 15 bp, Homo sapiens
cagtccctgctgtcg

SEQ ID NO: 1411805 - DNA, 15 bp, Homo sapiens
ccagtccctgctgtc

SEQ ID NO: 1411806 - DNA, 15 bp, Homo sapiens
gccagtccctgctgt

SEQ ID NO: 1411807 - DNA, 15 bp, Homo sapiens
agccagtccctgctg

SEQ ID NO: 1411808 - DNA, 15 bp, Homo sapiens
cagccagtccctgct

SEQ ID NO: 1411809 - DNA, 15 bp, Homo sapiens
gcagccagtccctgc

SEQ ID NO: 1411810 - DNA, 15 bp, Homo sapiens
tgcagccagtccctg

SEQ ID NO: 1411811 - DNA, 15 bp, Homo sapiens
ctgcagccagtccct

SEQ ID NO: 1411812 - DNA, 15 bp, Homo sapiens
gctgcagccagtccc

SEQ ID NO: 1411813 - DNA, 15 bp, Homo sapiens
ggctgcagccagtcc

SEQ ID NO: 1411814 - DNA, 15 bp, Homo sapiens
cggctgcagccagtc

SEQ ID NO: 1411815 - DNA, 15 bp, Homo sapiens
ccggctgcagccagt

SEQ ID NO: 1411816 - DNA, 15 bp, Homo sapiens
gccggctgcagccag

SEQ ID NO: 1411817 - DNA, 15 bp, Homo sapiens
tgccggctgcagcca

SEQ ID NO: 1411818 - DNA, 15 bp, Homo sapiens
ctgccggctgcagcc

SEQ ID NO: 1411819 - DNA, 15 bp, Homo sapiens
actgccggctgcagc

SEQ ID NO: 1411820 - DNA, 15 bp, Homo sapiens
cactgccggctgcag

SEQ ID NO: 1411821 - DNA, 15 bp, Homo sapiens
gcactgccggctgca

SEQ ID NO: 1411822 - DNA, 15 bp, Homo sapiens
cgcactgccggctgc

SEQ ID NO: 1411823 - DNA, 15 bp, Homo sapiens
ccgcactgccggctg

SEQ ID NO: 1411824 - DNA, 15 bp, Homo sapiens
cccgcactgccggct

SEQ ID NO: 1411825 - DNA, 15 bp, Homo sapiens
ccccgcactgccggc

SEQ ID NO: 1411826 - DNA, 15 bp, Homo sapiens
cccccgcactgccgg

SEQ ID NO: 1411827 - DNA, 15 bp, Homo sapiens
acccccgcactgccg

SEQ ID NO: 1411828 - DNA, 15 bp, Homo sapiens
gacccccgcactgcc

SEQ ID NO: 1411829 - DNA, 15 bp, Homo sapiens
ggacccccgcactgc

SEQ ID NO: 1411830 - DNA, 15 bp, Homo sapiens
tggacccccgcactg

SEQ ID NO: 1411831 - DNA, 15 bp, Homo sapiens
ctggacccccgcact

SEQ ID NO: 1411832 - DNA, 15 bp, Homo sapiens
gctggacccccgcac

SEQ ID NO: 1411833 - DNA, 15 bp, Homo sapiens
ggctggacccccgca

SEQ ID NO: 1411834 - DNA, 15 bp, Homo sapiens
cggctggacccccgc

SEQ ID NO: 1411835 - DNA, 15 bp, Homo sapiens
ccggctggacccccg

SEQ ID NO: 1411836 - DNA, 15 bp, Homo sapiens
cccggctggaccccc

SEQ ID NO: 1411837 - DNA, 15 bp, Homo sapiens
ccccggctggacccc

SEQ ID NO: 1411838 - DNA, 15 bp, Homo sapiens
gccccggctggaccc

SEQ ID NO: 1411839 - DNA, 15 bp, Homo sapiens
cgccccggctggacc

SEQ ID NO: 1411840 - DNA, 15 bp, Homo sapiens
tcgccccggctggac

SEQ ID NO: 1411841 - DNA, 15 bp, Homo sapiens
ctcgccccggctgga

SEQ ID NO: 1411842 - DNA, 15 bp, Homo sapiens
gctcgccccggctgg

SEQ ID NO: 1411843 - DNA, 15 bp, Homo sapiens
ggctcgccccggctg

SEQ ID NO: 1411844 - DNA, 15 bp, Homo sapiens
cggctcgccccggct

SEQ ID NO: 1411845 - DNA, 15 bp, Homo sapiens
ccggctcgccccggc

SEQ ID NO: 1411846 - DNA, 15 bp, Homo sapiens
accggctcgccccgg

SEQ ID NO: 1411847 - DNA, 15 bp, Homo sapiens
gaccggctcgccccg

SEQ ID NO: 1411848 - DNA, 15 bp, Homo sapiens
ggaccggctcgcccc

SEQ ID NO: 1411849 - DNA, 15 bp, Homo sapiens
gggaccggctcgccc

SEQ ID NO: 1411850 - DNA, 15 bp, Homo sapiens
cgggaccggctcgcc

SEQ ID NO: 1411851 - DNA, 15 bp, Homo sapiens
gcgggaccggctcgc

SEQ ID NO: 1411852 - DNA, 15 bp, Homo sapiens
agcgggaccggctcg

SEQ ID NO: 1411853 - DNA, 15 bp, Homo sapiens
aagcgggaccggctc

SEQ ID NO: 1411854 - DNA, 15 bp, Homo sapiens
caagcgggaccggct

SEQ ID NO: 1411855 - DNA, 15 bp, Homo sapiens
gcaagcgggaccggc

SEQ ID NO: 1411856 - DNA, 15 bp, Homo sapiens
agcaagcgggaccgg

SEQ ID NO: 1411857 - DNA, 15 bp, Homo sapiens
cagcaagcgggaccg

SEQ ID NO: 1411858 - DNA, 15 bp, Homo sapiens
gcagcaagcgggacc

SEQ ID NO: 1411859 - DNA, 15 bp, Homo sapiens
tgcagcaagcgggac

SEQ ID NO: 1411860 - DNA, 15 bp, Homo sapiens
gtgcagcaagcggga

SEQ ID NO: 1411861 - DNA, 15 bp, Homo sapiens
ggtgcagcaagcggg

SEQ ID NO: 1411862 - DNA, 15 bp, Homo sapiens
aggtgcagcaagcgg

SEQ ID NO: 1411863 - DNA, 15 bp, Homo sapiens
gaggtgcagcaagcg

SEQ ID NO: 1411864 - DNA, 15 bp, Homo sapiens
ggaggtgcagcaagc

SEQ ID NO: 1411865 - DNA, 15 bp, Homo sapiens
cggaggtgcagcaag

SEQ ID NO: 1411866 - DNA, 15 bp, Homo sapiens
gcggaggtgcagcaa

SEQ ID NO: 1411867 - DNA, 15 bp, Homo sapiens
ggcggaggtgcagca

SEQ ID NO: 1411868 - DNA, 15 bp, Homo sapiens
aggcggaggtgcagc

SEQ ID NO: 1411869 - DNA, 15 bp, Homo sapiens
gaggcggaggtgcag

SEQ ID NO: 1411870 - DNA, 15 bp, Homo sapiens
cgaggcggaggtgca

SEQ ID NO: 1411871 - DNA, 15 bp, Homo sapiens
gcgaggcggaggtgc

SEQ ID NO: 1411872 - DNA, 15 bp, Homo sapiens
tgcgaggcggaggtg

SEQ ID NO: 1411873 - DNA, 15 bp, Homo sapiens
gtgcgaggcggaggt

SEQ ID NO: 1411874 - DNA, 15 bp, Homo sapiens
tgtgcgaggcggagg

SEQ ID NO: 1411875 - DNA, 15 bp, Homo sapiens
ctgtgcgaggcggag

SEQ ID NO: 1411876 - DNA, 15 bp, Homo sapiens
actgtgcgaggcgga

SEQ ID NO: 1411877 - DNA, 15 bp, Homo sapiens
gactgtgcgaggcgg

SEQ ID NO: 1411878 - DNA, 15 bp, Homo sapiens
cgactgtgcgaggcg

SEQ ID NO: 1411879 - DNA, 15 bp, Homo sapiens
gcgactgtgcgaggc

SEQ ID NO: 1411880 - DNA, 15 bp, Homo sapiens
ggcgactgtgcgagg

SEQ ID NO: 1411881 - DNA, 15 bp, Homo sapiens
cggcgactgtgcgag

SEQ ID NO: 1411882 - DNA, 15 bp, Homo sapiens
ccggcgactgtgcga

SEQ ID NO: 1411883 - DNA, 15 bp, Homo sapiens
gccggcgactgtgcg

SEQ ID NO: 1411884 - DNA, 15 bp, Homo sapiens
tgccggcgactgtgc

SEQ ID NO: 1411885 - DNA, 15 bp, Homo sapiens
ctgccggcgactgtg

SEQ ID NO: 1411886 - DNA, 15 bp, Homo sapiens
gctgccggcgactgt

SEQ ID NO: 1411887 - DNA, 15 bp, Homo sapiens
ggctgccggcgactg

SEQ ID NO: 1411888 - DNA, 15 bp, Homo sapiens
tggctgccggcgact

SEQ ID NO: 1411889 - DNA, 15 bp, Homo sapiens
ctggctgccggcgac

SEQ ID NO: 1411890 - DNA, 15 bp, Homo sapiens
gctggctgccggcga

SEQ ID NO: 1411891 - DNA, 15 bp, Homo sapiens
agctggctgccggcg

SEQ ID NO: 1411892 - DNA, 15 bp, Homo sapiens
cagctggctgccggc

SEQ ID NO: 1411893 - DNA, 15 bp, Homo sapiens
tcagctggctgccgg

SEQ ID NO: 1411894 - DNA, 15 bp, Homo sapiens
ttcagctggctgccg

SEQ ID NO: 1411895 - DNA, 15 bp, Homo sapiens
tttcagctggctgcc

SEQ ID NO: 1411896 - DNA, 15 bp, Homo sapiens
ttttcagctggctgc

SEQ ID NO: 1411897 - DNA, 15 bp, Homo sapiens
gttttcagctggctg

SEQ ID NO: 1411898 - DNA, 15 bp, Homo sapiens
tgttttcagctggct

SEQ ID NO: 1411899 - DNA, 15 bp, Homo sapiens
ctgttttcagctggc

SEQ ID NO: 1411900 - DNA, 15 bp, Homo sapiens
gctgttttcagctgg

SEQ ID NO: 1411901 - DNA, 15 bp, Homo sapiens
cgctgttttcagctg

SEQ ID NO: 1411902 - DNA, 15 bp, Homo sapiens
gcgctgttttcagct

SEQ ID NO: 1411903 - DNA, 15 bp, Homo sapiens
tgcgctgttttcagc

SEQ ID NO: 1411904 - DNA, 15 bp, Homo sapiens
ctgcgctgttttcag

SEQ ID NO: 1411905 - DNA, 15 bp, Homo sapiens
gctgcgctgttttca

SEQ ID NO: 1411906 - DNA, 15 bp, Homo sapiens
ggctgcgctgttttc

SEQ ID NO: 1411907 - DNA, 15 bp, Homo sapiens
cggctgcgctgtttt

SEQ ID NO: 1411908 - DNA, 15 bp, Homo sapiens
gcggctgcgctgttt

SEQ ID NO: 1411909 - DNA, 15 bp, Homo sapiens
cgcggctgcgctgtt

SEQ ID NO: 1411910 - DNA, 15 bp, Homo sapiens
acgcggctgcgctgt

SEQ ID NO: 1411911 - DNA, 15 bp, Homo sapiens
cacgcggctgcgctg

SEQ ID NO: 1411912 - DNA, 15 bp, Homo sapiens
ccacgcggctgcgct

SEQ ID NO: 1411913 - DNA, 15 bp, Homo sapiens
accacgcggctgcgc

SEQ ID NO: 1411914 - DNA, 15 bp, Homo sapiens
caccacgcggctgcg

SEQ ID NO: 1411915 - DNA, 15 bp, Homo sapiens
gcaccacgcggctgc

SEQ ID NO: 1411916 - DNA, 15 bp, Homo sapiens
ggcaccacgcggctg

SEQ ID NO: 1411917 - DNA, 15 bp, Homo sapiens
tggcaccacgcggct

SEQ ID NO: 1411918 - DNA, 15 bp, Homo sapiens
gtggcaccacgcggc

SEQ ID NO: 1411919 - DNA, 15 bp, Homo sapiens
ggtggcaccacgcgg

SEQ ID NO: 1411920 - DNA, 15 bp, Homo sapiens
aggtggcaccacgcg

SEQ ID NO: 1411921 - DNA, 15 bp, Homo sapiens
caggtggcaccacgc

SEQ ID NO: 1411922 - DNA, 15 bp, Homo sapiens
gcaggtggcaccacg

SEQ ID NO: 1411923 - DNA, 15 bp, Homo sapiens
agcaggtggcaccac

SEQ ID NO: 1411924 - DNA, 15 bp, Homo sapiens
cagcaggtggcacca

SEQ ID NO: 1411925 - DNA, 15 bp, Homo sapiens
ccagcaggtggcacc

SEQ ID NO: 1411926 - DNA, 15 bp, Homo sapiens
accagcaggtggcac

SEQ ID NO: 1411927 - DNA, 15 bp, Homo sapiens
gaccagcaggtggca

SEQ ID NO: 1411928 - DNA, 15 bp, Homo sapiens
agaccagcaggtggc

SEQ ID NO: 1411929 - DNA, 15 bp, Homo sapiens
gagaccagcaggtgg

SEQ ID NO: 1411930 - DNA, 15 bp, Homo sapiens
agagaccagcaggtg

SEQ ID NO: 1411931 - DNA, 15 bp, Homo sapiens
cagagaccagcaggt

SEQ ID NO: 1411932 - DNA, 15 bp, Homo sapiens
ccagagaccagcagg

SEQ ID NO: 1411933 - DNA, 15 bp, Homo sapiens
cccagagaccagcag

SEQ ID NO: 1411934 - DNA, 15 bp, Homo sapiens
tcccagagaccagca

SEQ ID NO: 1411935 - DNA, 15 bp, Homo sapiens
ttcccagagaccagc

SEQ ID NO: 1411936 - DNA, 15 bp, Homo sapiens
cttcccagagaccag

SEQ ID NO: 1411937 - DNA, 15 bp, Homo sapiens
ccttcccagagacca

SEQ ID NO: 1411938 - DNA, 15 bp, Homo sapiens
tccttcccagagacc

SEQ ID NO: 1411939 - DNA, 15 bp, Homo sapiens
ctccttcccagagac

SEQ ID NO: 1411940 - DNA, 15 bp, Homo sapiens
cctccttcccagaga

SEQ ID NO: 1411941 - DNA, 15 bp, Homo sapiens
tcctccttcccagag

SEQ ID NO: 1411942 - DNA, 15 bp, Homo sapiens
ctcctccttcccaga

SEQ ID NO: 1411943 - DNA, 15 bp, Homo sapiens
cctcctccttcccag

SEQ ID NO: 1411944 - DNA, 15 bp, Homo sapiens
tcctcctccttccca

SEQ ID NO: 1411945 - DNA, 15 bp, Homo sapiens
atcctcctccttccc

SEQ ID NO: 1411946 - DNA, 15 bp, Homo sapiens
catcctcctccttcc

SEQ ID NO: 1411947 - DNA, 15 bp, Homo sapiens
ccatcctcctccttc

SEQ ID NO: 1411948 - DNA, 15 bp, Homo sapiens
cccatcctcctcctt

SEQ ID NO: 1411949 - DNA, 15 bp, Homo sapiens
tcccatcctcctcct

SEQ ID NO: 1411950 - DNA, 15 bp, Homo sapiens
gtcccatcctcctcc

SEQ ID NO: 1411951 - DNA, 15 bp, Homo sapiens
cgtcccatcctcctc

SEQ ID NO: 1411952 - DNA, 15 bp, Homo sapiens
ccgtcccatcctcct

SEQ ID NO: 1411953 - DNA, 15 bp, Homo sapiens
accgtcccatcctcc

SEQ ID NO: 1411954 - DNA, 15 bp, Homo sapiens
aaccgtcccatcctc

SEQ ID NO: 1411955 - DNA, 15 bp, Homo sapiens
caaccgtcccatcct

SEQ ID NO: 1411956 - DNA, 15 bp, Homo sapiens
acaaccgtcccatcc

SEQ ID NO: 1411957 - DNA, 15 bp, Homo sapiens
aacaaccgtcccatc

SEQ ID NO: 1411958 - DNA, 15 bp, Homo sapiens
caacaaccgtcccat

SEQ ID NO: 1411959 - DNA, 15 bp, Homo sapiens
gcaacaaccgtccca

SEQ ID NO: 1411960 - DNA, 15 bp, Homo sapiens
cgcaacaaccgtccc

SEQ ID NO: 1411961 - DNA, 15 bp, Homo sapiens
ccgcaacaaccgtcc

SEQ ID NO: 1411962 - DNA, 15 bp, Homo sapiens
gccgcaacaaccgtc

SEQ ID NO: 1411963 - DNA, 15 bp, Homo sapiens
agccgcaacaaccgt

SEQ ID NO: 1411964 - DNA, 15 bp, Homo sapiens
gagccgcaacaaccg

SEQ ID NO: 1411965 - DNA, 15 bp, Homo sapiens
agagccgcaacaacc

SEQ ID NO: 1411966 - DNA, 15 bp, Homo sapiens
cagagccgcaacaac

SEQ ID NO: 1411967 - DNA, 15 bp, Homo sapiens
ccagagccgcaacaa

SEQ ID NO: 1411968 - DNA, 15 bp, Homo sapiens
cccagagccgcaaca

SEQ ID NO: 1411969 - DNA, 15 bp, Homo sapiens
tcccagagccgcaac

SEQ ID NO: 1411970 - DNA, 15 bp, Homo sapiens
gtcccagagccgcaa

SEQ ID NO: 1411971 - DNA, 15 bp, Homo sapiens
agtcccagagccgca

SEQ ID NO: 1411972 - DNA, 15 bp, Homo sapiens
cagtcccagagccgc

SEQ ID NO: 1411973 - DNA, 15 bp, Homo sapiens
gcagtcccagagccg

SEQ ID NO: 1411974 - DNA, 15 bp, Homo sapiens
ggcagtcccagagcc

SEQ ID NO: 1411975 - DNA, 15 bp, Homo sapiens
gggcagtcccagagc

SEQ ID NO: 1411976 - DNA, 15 bp, Homo sapiens
ggggcagtcccagag

SEQ ID NO: 1411977 - DNA, 15 bp, Homo sapiens
aggggcagtcccaga

SEQ ID NO: 1411978 - DNA, 15 bp, Homo sapiens
caggggcagtcccag

SEQ ID NO: 1411979 - DNA, 15 bp, Homo sapiens
ccaggggcagtccca

SEQ ID NO: 1411980 - DNA, 15 bp, Homo sapiens
gccaggggcagtccc

SEQ ID NO: 1411981 - DNA, 15 bp, Homo sapiens
ggccaggggcagtcc

SEQ ID NO: 1411982 - DNA, 15 bp, Homo sapiens
gggccaggggcagtc

SEQ ID NO: 1411983 - DNA, 15 bp, Homo sapiens
ggggccaggggcagt

SEQ ID NO: 1411984 - DNA, 15 bp, Homo sapiens
cggggccaggggcag

SEQ ID NO: 1411985 - DNA, 15 bp, Homo sapiens
tcggggccaggggca

SEQ ID NO: 1411986 - DNA, 15 bp, Homo sapiens
ctcggggccaggggc

SEQ ID NO: 1411987 - DNA, 15 bp, Homo sapiens
cctcggggccagggg

SEQ ID NO: 1411988 - DNA, 15 bp, Homo sapiens
ccctcggggccaggg

SEQ ID NO: 1411989 - DNA, 15 bp, Homo sapiens
accctcggggccagg

SEQ ID NO: 1411990 - DNA, 15 bp, Homo sapiens
aaccctcggggccag

SEQ ID NO: 1411991 - DNA, 15 bp, Homo sapiens
caaccctcggggcca

SEQ ID NO: 1411992 - DNA, 15 bp, Homo sapiens
tcaaccctcggggcc

SEQ ID NO: 1411993 - DNA, 15 bp, Homo sapiens
ctcaaccctcggggc

SEQ ID NO: 1411994 - DNA, 15 bp, Homo sapiens
tctcaaccctcgggg

SEQ ID NO: 1411995 - DNA, 15 bp, Homo sapiens
ttctcaaccctcggg

SEQ ID NO: 1411996 - DNA, 15 bp, Homo sapiens
cttctcaaccctcgg

SEQ ID NO: 1411997 - DNA, 15 bp, Homo sapiens
gcttctcaaccctcg

SEQ ID NO: 1411998 - DNA, 15 bp, Homo sapiens
tgcttctcaaccctc

SEQ ID NO: 1411999 - DNA, 15 bp, Homo sapiens
atgcttctcaaccct

SEQ ID NO: 1412000 - DNA, 15 bp, Homo sapiens
gatgcttctcaaccc

SEQ ID NO: 1412001 - DNA, 15 bp, Homo sapiens
agatgcttctcaacc

SEQ ID NO: 1412002 - DNA, 15 bp, Homo sapiens
aagatgcttctcaac

SEQ ID NO: 1412003 - DNA, 15 bp, Homo sapiens
caagatgcttctcaa

SEQ ID NO: 1412004 - DNA, 15 bp, Homo sapiens
ccaagatgcttctca

SEQ ID NO: 1412005 - DNA, 15 bp, Homo sapiens
gccaagatgcttctc

SEQ ID NO: 1412006 - DNA, 15 bp, Homo sapiens
cgccaagatgcttct

SEQ ID NO: 1412007 - DNA, 15 bp, Homo sapiens
gcgccaagatgcttc

SEQ ID NO: 1412008 - DNA, 15 bp, Homo sapiens
ggcgccaagatgctt

SEQ ID NO: 1412009 - DNA, 15 bp, Homo sapiens
cggcgccaagatgct

SEQ ID NO: 1412010 - DNA, 15 bp, Homo sapiens
ccggcgccaagatgc

SEQ ID NO: 1412011 - DNA, 15 bp, Homo sapiens
cccggcgccaagatg

SEQ ID NO: 1412012 - DNA, 15 bp, Homo sapiens
gcccggcgccaagat

SEQ ID NO: 1412013 - DNA, 15 bp, Homo sapiens
ggcccggcgccaaga

SEQ ID NO: 1412014 - DNA, 15 bp, Homo sapiens
gggcccggcgccaag

SEQ ID NO: 1412015 - DNA, 15 bp, Homo sapiens
agggcccggcgccaa

SEQ ID NO: 1412016 - DNA, 15 bp, Homo sapiens
gagggcccggcgcca

SEQ ID NO: 1412017 - DNA, 15 bp, Homo sapiens
tgagggcccggcgcc

SEQ ID NO: 1412018 - DNA, 15 bp, Homo sapiens
ctgagggcccggcgc

SEQ ID NO: 1412019 - DNA, 15 bp, Homo sapiens
gctgagggcccggcg

SEQ ID NO: 1412020 - DNA, 15 bp, Homo sapiens
ggctgagggcccggc

SEQ ID NO: 1412021 - DNA, 15 bp, Homo sapiens
cggctgagggcccgg

SEQ ID NO: 1412022 - DNA, 15 bp, Homo sapiens
gcggctgagggcccg

SEQ ID NO: 1412023 - DNA, 15 bp, Homo sapiens
ggcggctgagggccc

SEQ ID NO: 1412024 - DNA, 15 bp, Homo sapiens
tggcggctgagggcc

SEQ ID NO: 1412025 - DNA, 15 bp, Homo sapiens
ctggcggctgagggc

SEQ ID NO: 1412026 - DNA, 15 bp, Homo sapiens
gctggcggctgaggg

SEQ ID NO: 1412027 - DNA, 15 bp, Homo sapiens
agctggcggctgagg

SEQ ID NO: 1412028 - DNA, 15 bp, Homo sapiens
aagctggcggctgag

SEQ ID NO: 1412029 - DNA, 15 bp, Homo sapiens
gaagctggcggctga

SEQ ID NO: 1412030 - DNA, 15 bp, Homo sapiens
cgaagctggcggctg

SEQ ID NO: 1412031 - DNA, 15 bp, Homo sapiens
tcgaagctggcggct

SEQ ID NO: 1412032 - DNA, 15 bp, Homo sapiens
ctcgaagctggcggc

SEQ ID NO: 1412033 - DNA, 15 bp, Homo sapiens
cctcgaagctggcgg

SEQ ID NO: 1412034 - DNA, 15 bp, Homo sapiens
gcctcgaagctggcg

SEQ ID NO: 1412035 - DNA, 15 bp, Homo sapiens
agcctcgaagctggc

SEQ ID NO: 1412036 - DNA, 15 bp, Homo sapiens
cagcctcgaagctgg

SEQ ID NO: 1412037 - DNA, 15 bp, Homo sapiens
gcagcctcgaagctg

SEQ ID NO: 1412038 - DNA, 15 bp, Homo sapiens
agcagcctcgaagct

SEQ ID NO: 1412039 - DNA, 15 bp, Homo sapiens
cagcagcctcgaagc

SEQ ID NO: 1412040 - DNA, 15 bp, Homo sapiens
ccagcagcctcgaag

SEQ ID NO: 1412041 - DNA, 15 bp, Homo sapiens
cccagcagcctcgaa

SEQ ID NO: 1412042 - DNA, 15 bp, Homo sapiens
tcccagcagcctcga

SEQ ID NO: 1412043 - DNA, 15 bp, Homo sapiens
ctcccagcagcctcg

SEQ ID NO: 1412044 - DNA, 15 bp, Homo sapiens
gctcccagcagcctc

SEQ ID NO: 1412045 - DNA, 15 bp, Homo sapiens
tgctcccagcagcct

SEQ ID NO: 1412046 - DNA, 15 bp, Homo sapiens
ctgctcccagcagcc

SEQ ID NO: 1412047 - DNA, 15 bp, Homo sapiens
gctgctcccagcagc

SEQ ID NO: 1412048 - DNA, 15 bp, Homo sapiens
tgctgctcccagcag

SEQ ID NO: 1412049 - DNA, 15 bp, Homo sapiens
ctgctgctcccagca

SEQ ID NO: 1412050 - DNA, 15 bp, Homo sapiens
gctgctgctcccagc

SEQ ID NO: 1412051 - DNA, 15 bp, Homo sapiens
agctgctgctcccag

SEQ ID NO: 1412052 - DNA, 15 bp, Homo sapiens
cagctgctgctccca

SEQ ID NO: 1412053 - DNA, 15 bp, Homo sapiens
gcagctgctgctccc

SEQ ID NO: 1412054 - DNA, 15 bp, Homo sapiens
agcagctgctgctcc

SEQ ID NO: 1412055 - DNA, 15 bp, Homo sapiens
tagcagctgctgctc

SEQ ID NO: 1412056 - DNA, 15 bp, Homo sapiens
ttagcagctgctgct

SEQ ID NO: 1412057 - DNA, 15 bp, Homo sapiens
cttagcagctgctgc

SEQ ID NO: 1412058 - DNA, 15 bp, Homo sapiens
ccttagcagctgctg

SEQ ID NO: 1412059 - DNA, 15 bp, Homo sapiens
tccttagcagctgct

SEQ ID NO: 1412060 - DNA, 15 bp, Homo sapiens
ctccttagcagctgc

SEQ ID NO: 1412061 - DNA, 15 bp, Homo sapiens
tctccttagcagctg

SEQ ID NO: 1412062 - DNA, 15 bp, Homo sapiens
ttctccttagcagct

SEQ ID NO: 1412063 - DNA, 15 bp, Homo sapiens
cttctccttagcagc

SEQ ID NO: 1412064 - DNA, 15 bp, Homo sapiens
gcttctccttagcag

SEQ ID NO: 1412065 - DNA, 15 bp, Homo sapiens
ggcttctccttagca

SEQ ID NO: 1412066 - DNA, 15 bp, Homo sapiens
aggcttctccttagc

SEQ ID NO: 1412067 - DNA, 15 bp, Homo sapiens
caggcttctccttag

SEQ ID NO: 1412068 - DNA, 15 bp, Homo sapiens
ccaggcttctcctta

SEQ ID NO: 1412069 - DNA, 15 bp, Homo sapiens
cccaggcttctcctt

SEQ ID NO: 1412070 - DNA, 15 bp, Homo sapiens
acccaggcttctcct

SEQ ID NO: 1412071 - DNA, 15 bp, Homo sapiens
gacccaggcttctcc

SEQ ID NO: 1412072 - DNA, 15 bp, Homo sapiens
tgacccaggcttctc

SEQ ID NO: 1412073 - DNA, 15 bp, Homo sapiens
ctgacccaggcttct

SEQ ID NO: 1412074 - DNA, 15 bp, Homo sapiens
tctgacccaggcttc

SEQ ID NO: 1412075 - DNA, 15 bp, Homo sapiens
ctctgacccaggctt

SEQ ID NO: 1412076 - DNA, 15 bp, Homo sapiens
actctgacccaggct

SEQ ID NO: 1412077 - DNA, 15 bp, Homo sapiens
aactctgacccaggc

SEQ ID NO: 1412078 - DNA, 15 bp, Homo sapiens
gaactctgacccagg

SEQ ID NO: 1412079 - DNA, 15 bp, Homo sapiens
agaactctgacccag

SEQ ID NO: 1412080 - DNA, 15 bp, Homo sapiens
cagaactctgaccca

SEQ ID NO: 1412081 - DNA, 15 bp, Homo sapiens
gcagaactctgaccc

SEQ ID NO: 1412082 - DNA, 15 bp, Homo sapiens
ggcagaactctgacc

SEQ ID NO: 1412083 - DNA, 15 bp, Homo sapiens
gggcagaactctgac

SEQ ID NO: 1412084 - DNA, 15 bp, Homo sapiens
tgggcagaactctga

SEQ ID NO: 1412085 - DNA, 15 bp, Homo sapiens
gtgggcagaactctg

SEQ ID NO: 1412086 - DNA, 15 bp, Homo sapiens
ggtgggcagaactct

SEQ ID NO: 1412087 - DNA, 15 bp, Homo sapiens
gggtgggcagaactc

SEQ ID NO: 1412088 - DNA, 15 bp, Homo sapiens
cgggtgggcagaact

SEQ ID NO: 1412089 - DNA, 15 bp, Homo sapiens
gcgggtgggcagaac

SEQ ID NO: 1412090 - DNA, 15 bp, Homo sapiens
cgcgggtgggcagaa

SEQ ID NO: 1412091 - DNA, 15 bp, Homo sapiens
gcgcgggtgggcaga

SEQ ID NO: 1412092 - DNA, 15 bp, Homo sapiens
ggcgcgggtgggcag

SEQ ID NO: 1412093 - DNA, 15 bp, Homo sapiens
gggcgcgggtgggca

SEQ ID NO: 1412094 - DNA, 15 bp, Homo sapiens
tgggcgcgggtgggc

SEQ ID NO: 1412095 - DNA, 15 bp, Homo sapiens
atgggcgcgggtggg

SEQ ID NO: 1412096 - DNA, 15 bp, Homo sapiens
gatgggcgcgggtgg

SEQ ID NO: 1412097 - DNA, 15 bp, Homo sapiens
agatgggcgcgggtg

SEQ ID NO: 1412098 - DNA, 15 bp, Homo sapiens
gagatgggcgcgggt

SEQ ID NO: 1412099 - DNA, 15 bp, Homo sapiens
ggagatgggcgcggg

SEQ ID NO: 1412100 - DNA, 15 bp, Homo sapiens
tggagatgggcgcgg

SEQ ID NO: 1412101 - DNA, 15 bp, Homo sapiens
atggagatgggcgcg

SEQ ID NO: 1412102 - DNA, 15 bp, Homo sapiens
gatggagatgggcgc

SEQ ID NO: 1412103 - DNA, 15 bp, Homo sapiens
tgatggagatgggcg

SEQ ID NO: 1412104 - DNA, 15 bp, Homo sapiens
atgatggagatgggc

SEQ ID NO: 1412105 - DNA, 15 bp, Homo sapiens
aatgatggagatggg

SEQ ID NO: 1412106 - DNA, 15 bp, Homo sapiens
aaatgatggagatgg

SEQ ID NO: 1412107 - DNA, 15 bp, Homo sapiens
gaaatgatggagatg

SEQ ID NO: 1412108 - DNA, 15 bp, Homo sapiens
ggaaatgatggagat

SEQ ID NO: 1412109 - DNA, 15 bp, Homo sapiens
gggaaatgatggaga

SEQ ID NO: 1412110 - DNA, 15 bp, Homo sapiens
ggggaaatgatggag

SEQ ID NO: 1412111 - DNA, 15 bp, Homo sapiens
tggggaaatgatgga

SEQ ID NO: 1412112 - DNA, 15 bp, Homo sapiens
ttggggaaatgatgg

SEQ ID NO: 1412113 - DNA, 15 bp, Homo sapiens
tttggggaaatgatg

SEQ ID NO: 1412114 - DNA, 15 bp, Homo sapiens
gtttggggaaatgat

SEQ ID NO: 1412115 - DNA, 15 bp, Homo sapiens
ggtttggggaaatga

SEQ ID NO: 1412116 - DNA, 15 bp, Homo sapiens
gaggtttggggaaat

SEQ ID NO: 1412117 - DNA, 15 bp, Homo sapiens
cgaggtttggggaaa

SEQ ID NO: 1412118 - DNA, 15 bp, Homo sapiens
tcgaggtttggggaa

SEQ ID NO: 1412119 - DNA, 15 bp, Homo sapiens
ctcgaggtttgggga

SEQ ID NO: 1412120 - DNA, 15 bp, Homo sapiens
actcgaggtttgggg

SEQ ID NO: 1412121 - DNA, 15 bp, Homo sapiens
gactcgaggtttggg

SEQ ID NO: 1412122 - DNA, 15 bp, Homo sapiens
ggactcgaggtttgg

SEQ ID NO: 1412123 - DNA, 15 bp, Homo sapiens
gggactcgaggtttg

SEQ ID NO: 1412124 - DNA, 15 bp, Homo sapiens
ggggactcgaggttt

SEQ ID NO: 1412125 - DNA, 15 bp, Homo sapiens
aggggactcgaggtt

SEQ ID NO: 1412126 - DNA, 15 bp, Homo sapiens
caggggactcgaggt

SEQ ID NO: 1412127 - DNA, 15 bp, Homo sapiens
gcaggggactcgagg

SEQ ID NO: 1412128 - DNA, 15 bp, Homo sapiens
agcaggggactcgag

SEQ ID NO: 1412129 - DNA, 15 bp, Homo sapiens
aagcaggggactcga

SEQ ID NO: 1412130 - DNA, 15 bp, Homo sapiens
aaagcaggggactcg

SEQ ID NO: 1412131 - DNA, 15 bp, Homo sapiens
gcccaccggggtctg

SEQ ID NO: 1412132 - DNA, 15 bp, Homo sapiens
ggcccaccggggtct

SEQ ID NO: 1412133 - DNA, 15 bp, Homo sapiens
gggcccaccggggtc

SEQ ID NO: 1412134 - DNA, 15 bp, Homo sapiens
agggcccaccggggt

SEQ ID NO: 1412135 - DNA, 15 bp, Homo sapiens
cagggcccaccgggg

SEQ ID NO: 1412136 - DNA, 15 bp, Homo sapiens
ccagggcccaccggg

SEQ ID NO: 1412137 - DNA, 15 bp, Homo sapiens
accagggcccaccgg

SEQ ID NO: 1412138 - DNA, 15 bp, Homo sapiens
caccagggcccaccg

SEQ ID NO: 1412139 - DNA, 15 bp, Homo sapiens
ccaccagggcccacc

SEQ ID NO: 1412140 - DNA, 15 bp, Homo sapiens
cccaccagggcccac

SEQ ID NO: 1412141 - DNA, 15 bp, Homo sapiens
gcccaccagggccca

SEQ ID NO: 1412142 - DNA, 15 bp, Homo sapiens
cgcccaccagggccc

SEQ ID NO: 1412143 - DNA, 15 bp, Homo sapiens
ccgcccaccagggcc

SEQ ID NO: 1412144 - DNA, 15 bp, Homo sapiens
gccgcccaccagggc

SEQ ID NO: 1412145 - DNA, 15 bp, Homo sapiens
agccgcccaccaggg

SEQ ID NO: 1412146 - DNA, 15 bp, Homo sapiens
cagccgcccaccagg

SEQ ID NO: 1412147 - DNA, 15 bp, Homo sapiens
ccagccgcccaccag

SEQ ID NO: 1412148 - DNA, 15 bp, Homo sapiens
gccagccgcccacca

SEQ ID NO: 1412149 - DNA, 15 bp, Homo sapiens
tgccagccgcccacc

SEQ ID NO: 1412150 - DNA, 15 bp, Homo sapiens
ctgccagccgcccac

SEQ ID NO: 1412151 - DNA, 15 bp, Homo sapiens
gctgccagccgccca

SEQ ID NO: 1412152 - DNA, 15 bp, Homo sapiens
agctgccagccgccc

SEQ ID NO: 1412153 - DNA, 15 bp, Homo sapiens
cagctgccagccgcc

SEQ ID NO: 1412154 - DNA, 15 bp, Homo sapiens
ccagctgccagccgc

SEQ ID NO: 1412155 - DNA, 15 bp, Homo sapiens
cccagctgccagccg

SEQ ID NO: 1412156 - DNA, 15 bp, Homo sapiens
gcccagctgccagcc

SEQ ID NO: 1412157 - DNA, 15 bp, Homo sapiens
ggcccagctgccagc

SEQ ID NO: 1412158 - DNA, 15 bp, Homo sapiens
gggcccagctgccag

SEQ ID NO: 1412159 - DNA, 15 bp, Homo sapiens
ggggcccagctgcca

SEQ ID NO: 1412160 - DNA, 15 bp, Homo sapiens
aggggcccagctgcc

SEQ ID NO: 1412161 - DNA, 15 bp, Homo sapiens
gaggggcccagctgc

SEQ ID NO: 1412162 - DNA, 15 bp, Homo sapiens
tgaggggcccagctg

SEQ ID NO: 1412163 - DNA, 15 bp, Homo sapiens
gtgaggggcccagct

SEQ ID NO: 1412164 - DNA, 15 bp, Homo sapiens
ggtgaggggcccagc

SEQ ID NO: 1412165 - DNA, 15 bp, Homo sapiens
gggtgaggggcccag

SEQ ID NO: 1412166 - DNA, 15 bp, Homo sapiens
agggtgaggggccca

SEQ ID NO: 1412167 - DNA, 15 bp, Homo sapiens
cagggtgaggggccc

SEQ ID NO: 1412168 - DNA, 15 bp, Homo sapiens
acagggtgaggggcc

SEQ ID NO: 1412169 - DNA, 15 bp, Homo sapiens
aacagggtgaggggc

SEQ ID NO: 1412170 - DNA, 15 bp, Homo sapiens
caacagggtgagggg

SEQ ID NO: 1412171 - DNA, 15 bp, Homo sapiens
tcaacagggtgaggg

SEQ ID NO: 1412172 - DNA, 15 bp, Homo sapiens
ttcaacagggtgagg

SEQ ID NO: 1412173 - DNA, 15 bp, Homo sapiens
gttcaacagggtgag

SEQ ID NO: 1412174 - DNA, 15 bp, Homo sapiens
agttcaacagggtga

SEQ ID NO: 1412175 - DNA, 15 bp, Homo sapiens
cagttcaacagggtg

SEQ ID NO: 1412176 - DNA, 15 bp, Homo sapiens
ccagttcaacagggt

SEQ ID NO: 1412177 - DNA, 15 bp, Homo sapiens
cccagttcaacaggg

SEQ ID NO: 1412178 - DNA, 15 bp, Homo sapiens
tcccagttcaacagg

SEQ ID NO: 1412179 - DNA, 15 bp, Homo sapiens
gtcccagttcaacag

SEQ ID NO: 1412180 - DNA, 15 bp, Homo sapiens
ggtcccagttcaaca

SEQ ID NO: 1412181 - DNA, 15 bp, Homo sapiens
tggtcccagttcaac

SEQ ID NO: 1412182 - DNA, 15 bp, Homo sapiens
ctggtcccagttcaa

SEQ ID NO: 1412183 - DNA, 15 bp, Homo sapiens
cctggtcccagttca

SEQ ID NO: 1412184 - DNA, 15 bp, Homo sapiens
tcctggtcccagttc

SEQ ID NO: 1412185 - DNA, 15 bp, Homo sapiens
gtcctggtcccagtt

SEQ ID NO: 1412186 - DNA, 15 bp, Homo sapiens
tgtcctggtcccagt

SEQ ID NO: 1412187 - DNA, 15 bp, Homo sapiens
gtgtcctggtcccag

SEQ ID NO: 1412188 - DNA, 15 bp, Homo sapiens
cgtgtcctggtccca

SEQ ID NO: 1412189 - DNA, 15 bp, Homo sapiens
ccgtgtcctggtccc

SEQ ID NO: 1412190 - DNA, 15 bp, Homo sapiens
tccgtgtcctggtcc

SEQ ID NO: 1412191 - DNA, 15 bp, Homo sapiens
gtccgtgtcctggtc

SEQ ID NO: 1412192 - DNA, 15 bp, Homo sapiens
tgtccgtgtcctggt

SEQ ID NO: 1412193 - DNA, 15 bp, Homo sapiens
ctgtccgtgtcctgg

SEQ ID NO: 1412194 - DNA, 15 bp, Homo sapiens
cctgtccgtgtcctg

SEQ ID NO: 1412195 - DNA, 15 bp, Homo sapiens
gcctgtccgtgtcct

SEQ ID NO: 1412196 - DNA, 15 bp, Homo sapiens
ggcctgtccgtgtcc

SEQ ID NO: 1412197 - DNA, 15 bp, Homo sapiens
tggcctgtccgtgtc

SEQ ID NO: 1412198 - DNA, 15 bp, Homo sapiens
gtggcctgtccgtgt

SEQ ID NO: 1412199 - DNA, 15 bp, Homo sapiens
agtggcctgtccgtg

SEQ ID NO: 1412200 - DNA, 15 bp, Homo sapiens
cagtggcctgtccgt

SEQ ID NO: 1412201 - DNA, 15 bp, Homo sapiens
acagtggcctgtccg

SEQ ID NO: 1412202 - DNA, 15 bp, Homo sapiens
tacagtggcctgtcc

SEQ ID NO: 1412203 - DNA, 15 bp, Homo sapiens
ctacagtggcctgtc

SEQ ID NO: 1412204 - DNA, 15 bp, Homo sapiens
actacagtggcctgt

SEQ ID NO: 1412205 - DNA, 15 bp, Homo sapiens
gactacagtggcctg

SEQ ID NO: 1412206 - DNA, 15 bp, Homo sapiens
ggactacagtggcct

SEQ ID NO: 1412207 - DNA, 15 bp, Homo sapiens
aggactacagtggcc

SEQ ID NO: 1412208 - DNA, 15 bp, Homo sapiens
gaggactacagtggc

SEQ ID NO: 1412209 - DNA, 15 bp, Homo sapiens
ggaggactacagtgg

SEQ ID NO: 1412210 - DNA, 15 bp, Homo sapiens
tggaggactacagtg

SEQ ID NO: 1412211 - DNA, 15 bp, Homo sapiens
ctggaggactacagt

SEQ ID NO: 1412212 - DNA, 15 bp, Homo sapiens
cctggaggactacag

SEQ ID NO: 1412213 - DNA, 15 bp, Homo sapiens
acctggaggactaca

SEQ ID NO: 1412214 - DNA, 15 bp, Homo sapiens
cacctggaggactac

SEQ ID NO: 1412215 - DNA, 15 bp, Homo sapiens
ccacctggaggacta

SEQ ID NO: 1412216 - DNA, 15 bp, Homo sapiens
gccacctggaggact

SEQ ID NO: 1412217 - DNA, 15 bp, Homo sapiens
agccacctggaggac

SEQ ID NO: 1412218 - DNA, 15 bp, Homo sapiens
cagccacctggagga

SEQ ID NO: 1412219 - DNA, 15 bp, Homo sapiens
gcagccacctggagg

SEQ ID NO: 1412220 - DNA, 15 bp, Homo sapiens
agcagccacctggag

SEQ ID NO: 1412221 - DNA, 15 bp, Homo sapiens
cagcagccacctgga

SEQ ID NO: 1412222 - DNA, 15 bp, Homo sapiens
gcagcagccacctgg

SEQ ID NO: 1412223 - DNA, 15 bp, Homo sapiens
agcagcagccacctg

SEQ ID NO: 1412224 - DNA, 15 bp, Homo sapiens
cagcagcagccacct

SEQ ID NO: 1412225 - DNA, 15 bp, Homo sapiens
acagcagcagccacc

SEQ ID NO: 1412226 - DNA, 15 bp, Homo sapiens
aacagcagcagccac

SEQ ID NO: 1412227 - DNA, 15 bp, Homo sapiens
caacagcagcagcca

SEQ ID NO: 1412228 - DNA, 15 bp, Homo sapiens
acaacagcagcagcc

SEQ ID NO: 1412229 - DNA, 15 bp, Homo sapiens
aacaacagcagcagc

SEQ ID NO: 1412230 - DNA, 15 bp, Homo sapiens
caacaacagcagcag

SEQ ID NO: 1412231 - DNA, 15 bp, Homo sapiens
tcaacaacagcagca

SEQ ID NO: 1412232 - DNA, 15 bp, Homo sapiens
ttcaacaacagcagc

SEQ ID NO: 1412233 - DNA, 15 bp, Homo sapiens
gttcaacaacagcag

SEQ ID NO: 1412234 - DNA, 15 bp, Homo sapiens
tgttcaacaacagca

SEQ ID NO: 1412235 - DNA, 15 bp, Homo sapiens
ctgttcaacaacagc

SEQ ID NO: 1412236 - DNA, 15 bp, Homo sapiens
actgttcaacaacag

SEQ ID NO: 1412237 - DNA, 15 bp, Homo sapiens
aactgttcaacaaca

SEQ ID NO: 1412238 - DNA, 15 bp, Homo sapiens
aaactgttcaacaac

SEQ ID NO: 1412239 - DNA, 15 bp, Homo sapiens
gaaactgttcaacaa

SEQ ID NO: 1412240 - DNA, 15 bp, Homo sapiens
agaaactgttcaaca

SEQ ID NO: 1412241 - DNA, 15 bp, Homo sapiens
cagaaactgttcaac

SEQ ID NO: 1412242 - DNA, 15 bp, Homo sapiens
gcagaaactgttcaa

SEQ ID NO: 1412243 - DNA, 15 bp, Homo sapiens
cgcagaaactgttca

SEQ ID NO: 1412244 - DNA, 15 bp, Homo sapiens
gcgcagaaactgttc

SEQ ID NO: 1412245 - DNA, 15 bp, Homo sapiens
ggcgcagaaactgtt

SEQ ID NO: 1412246 - DNA, 15 bp, Homo sapiens
tggcgcagaaactgt

SEQ ID NO: 1412247 - DNA, 15 bp, Homo sapiens
ctggcgcagaaactg

SEQ ID NO: 1412248 - DNA, 15 bp, Homo sapiens
cctggcgcagaaact

SEQ ID NO: 1412249 - DNA, 15 bp, Homo sapiens
tcctggcgcagaaac

SEQ ID NO: 1412250 - DNA, 15 bp, Homo sapiens
ttcctggcgcagaaa

SEQ ID NO: 1412251 - DNA, 15 bp, Homo sapiens
gttcctggcgcagaa

SEQ ID NO: 1412252 - DNA, 15 bp, Homo sapiens
tgttcctggcgcaga

SEQ ID NO: 1412253 - DNA, 15 bp, Homo sapiens
gtgttcctggcgcag

SEQ ID NO: 1412254 - DNA, 15 bp, Homo sapiens
cgtgttcctggcgca

SEQ ID NO: 1412255 - DNA, 15 bp, Homo sapiens
tcgtgttcctggcgc

SEQ ID NO: 1412256 - DNA, 15 bp, Homo sapiens
ctcgtgttcctggcg

SEQ ID NO: 1412257 - DNA, 15 bp, Homo sapiens
cctcgtgttcctggc

SEQ ID NO: 1412258 - DNA, 15 bp, Homo sapiens
acctcgtgttcctgg

SEQ ID NO: 1412259 - DNA, 15 bp, Homo sapiens
aacctcgtgttcctg

SEQ ID NO: 1412260 - DNA, 15 bp, Homo sapiens
gaacctcgtgttcct

SEQ ID NO: 1412261 - DNA, 15 bp, Homo sapiens
agaacctcgtgttcc

SEQ ID NO: 1412262 - DNA, 15 bp, Homo sapiens
gagaacctcgtgttc

SEQ ID NO: 1412263 - DNA, 15 bp, Homo sapiens
ggagaacctcgtgtt

SEQ ID NO: 1412264 - DNA, 15 bp, Homo sapiens
aggagaacctcgtgt

SEQ ID NO: 1412265 - DNA, 15 bp, Homo sapiens
aaggagaacctcgtg

SEQ ID NO: 1412266 - DNA, 15 bp, Homo sapiens
caaggagaacctcgt

SEQ ID NO: 1412267 - DNA, 15 bp, Homo sapiens
ccaaggagaacctcg

SEQ ID NO: 1412268 - DNA, 15 bp, Homo sapiens
accaaggagaacctc

SEQ ID NO: 1412269 - DNA, 15 bp, Homo sapiens
gaccaaggagaacct

SEQ ID NO: 1412270 - DNA, 15 bp, Homo sapiens
tgaccaaggagaacc

SEQ ID NO: 1412271 - DNA, 15 bp, Homo sapiens
ctgaccaaggagaac

SEQ ID NO: 1412272 - DNA, 15 bp, Homo sapiens
cctgaccaaggagaa

SEQ ID NO: 1412273 - DNA, 15 bp, Homo sapiens
gcctgaccaaggaga

SEQ ID NO: 1412274 - DNA, 15 bp, Homo sapiens
ggcctgaccaaggag

SEQ ID NO: 1412275 - DNA, 15 bp, Homo sapiens
gggcctgaccaagga

SEQ ID NO: 1412276 - DNA, 15 bp, Homo sapiens
ggggcctgaccaagg

SEQ ID NO: 1412277 - DNA, 15 bp, Homo sapiens
cggggcctgaccaag

SEQ ID NO: 1412278 - DNA, 15 bp, Homo sapiens
ccggggcctgaccaa

SEQ ID NO: 1412279 - DNA, 15 bp, Homo sapiens
accggggcctgacca

SEQ ID NO: 1412280 - DNA, 15 bp, Homo sapiens
aaccggggcctgacc

SEQ ID NO: 1412281 - DNA, 15 bp, Homo sapiens
caaccggggcctgac

SEQ ID NO: 1412282 - DNA, 15 bp, Homo sapiens
gcaaccggggcctga

SEQ ID NO: 1412283 - DNA, 15 bp, Homo sapiens
agcaaccggggcctg

SEQ ID NO: 1412284 - DNA, 15 bp, Homo sapiens
gagcaaccggggcct

SEQ ID NO: 1412285 - DNA, 15 bp, Homo sapiens
agagcaaccggggcc

SEQ ID NO: 1412286 - DNA, 15 bp, Homo sapiens
cagagcaaccggggc

SEQ ID NO: 1412287 - DNA, 15 bp, Homo sapiens
gcagagcaaccgggg

SEQ ID NO: 1412288 - DNA, 15 bp, Homo sapiens
tgcagagcaaccggg

SEQ ID NO: 1412289 - DNA, 15 bp, Homo sapiens
gtgcagagcaaccgg

SEQ ID NO: 1412290 - DNA, 15 bp, Homo sapiens
agtgcagagcaaccg

SEQ ID NO: 1412291 - DNA, 15 bp, Homo sapiens
aagtgcagagcaacc

SEQ ID NO: 1412292 - DNA, 15 bp, Homo sapiens
gaagtgcagagcaac

SEQ ID NO: 1412293 - DNA, 15 bp, Homo sapiens
cgaagtgcagagcaa

SEQ ID NO: 1412294 - DNA, 15 bp, Homo sapiens
ccgaagtgcagagca

SEQ ID NO: 1412295 - DNA, 15 bp, Homo sapiens
gccgaagtgcagagc

SEQ ID NO: 1412296 - DNA, 15 bp, Homo sapiens
ggccgaagtgcagag

SEQ ID NO: 1412297 - DNA, 15 bp, Homo sapiens
aggccgaagtgcaga

SEQ ID NO: 1412298 - DNA, 15 bp, Homo sapiens
tgaaagtgtattgct

SEQ ID NO: 1412299 - DNA, 15 bp, Homo sapiens
ctgaaagtgtattgc

SEQ ID NO: 1412300 - DNA, 15 bp, Homo sapiens
cctgaaagtgtattg

SEQ ID NO: 1412301 - DNA, 15 bp, Homo sapiens
tcctgaaagtgtatt

SEQ ID NO: 1412302 - DNA, 15 bp, Homo sapiens
ctcctgaaagtgtat

SEQ ID NO: 1412303 - DNA, 15 bp, Homo sapiens
tctcctgaaagtgta

SEQ ID NO: 1412304 - DNA, 15 bp, Homo sapiens
ttctcctgaaagtgt

SEQ ID NO: 1412305 - DNA, 15 bp, Homo sapiens
tttctcctgaaagtg

SEQ ID NO: 1412306 - DNA, 15 bp, Homo sapiens
ctttctcctgaaagt

SEQ ID NO: 1412307 - DNA, 15 bp, Homo sapiens
actttctcctgaaag

SEQ ID NO: 1412308 - DNA, 15 bp, Homo sapiens
cactttctcctgaaa

SEQ ID NO: 1412309 - DNA, 15 bp, Homo sapiens
ccactttctcctgaa

SEQ ID NO: 1412310 - DNA, 15 bp, Homo sapiens
accactttctcctga

SEQ ID NO: 1412311 - DNA, 15 bp, Homo sapiens
caccactttctcctg

SEQ ID NO: 1412312 - DNA, 15 bp, Homo sapiens
acaccactttctcct

SEQ ID NO: 1412313 - DNA, 15 bp, Homo sapiens
cacaccactttctcc

SEQ ID NO: 1412314 - DNA, 15 bp, Homo sapiens
tcacaccactttctc

SEQ ID NO: 1412315 - DNA, 15 bp, Homo sapiens
atcacaccactttct

SEQ ID NO: 1412316 - DNA, 15 bp, Homo sapiens
tatcacaccactttc

SEQ ID NO: 1412317 - DNA, 15 bp, Homo sapiens
ctatcacaccacttt

SEQ ID NO: 1412318 - DNA, 15 bp, Homo sapiens
actatcacaccactt

SEQ ID NO: 1412319 - DNA, 15 bp, Homo sapiens
gactatcacaccact

SEQ ID NO: 1412320 - DNA, 15 bp, Homo sapiens
agactatcacaccac

SEQ ID NO: 1412321 - DNA, 15 bp, Homo sapiens
gagactatcacacca

SEQ ID NO: 1412322 - DNA, 15 bp, Homo sapiens
agagactatcacacc

SEQ ID NO: 1412323 - DNA, 15 bp, Homo sapiens
gagagactatcacac

SEQ ID NO: 1412324 - DNA, 15 bp, Homo sapiens
tgagagactatcaca

SEQ ID NO: 1412325 - DNA, 15 bp, Homo sapiens
gtgagagactatcac

SEQ ID NO: 1412326 - DNA, 15 bp, Homo sapiens
tgtgagagactatca

SEQ ID NO: 1412327 - DNA, 15 bp, Homo sapiens
ttgtgagagactatc

SEQ ID NO: 1412328 - DNA, 15 bp, Homo sapiens
attgtgagagactat

SEQ ID NO: 1412329 - DNA, 15 bp, Homo sapiens
cattgtgagagacta

SEQ ID NO: 1412330 - DNA, 15 bp, Homo sapiens
gcattgtgagagact

SEQ ID NO: 1412331 - DNA, 15 bp, Homo sapiens
agcattgtgagagac

SEQ ID NO: 1412332 - DNA, 15 bp, Homo sapiens
cagcattgtgagaga

SEQ ID NO: 1412333 - DNA, 15 bp, Homo sapiens
ccagcattgtgagag

SEQ ID NO: 1412334 - DNA, 15 bp, Homo sapiens
cccagcattgtgaga

SEQ ID NO: 1412335 - DNA, 15 bp, Homo sapiens
gcccagcattgtgag

SEQ ID NO: 1412336 - DNA, 15 bp, Homo sapiens
tgcccagcattgtga

SEQ ID NO: 1412337 - DNA, 15 bp, Homo sapiens
ctgcccagcattgtg

SEQ ID NO: 1412338 - DNA, 15 bp, Homo sapiens
actgcccagcattgt

SEQ ID NO: 1412339 - DNA, 15 bp, Homo sapiens
cactgcccagcattg

SEQ ID NO: 1412340 - DNA, 15 bp, Homo sapiens
ccactgcccagcatt

SEQ ID NO: 1412341 - DNA, 15 bp, Homo sapiens
gccactgcccagcat

SEQ ID NO: 1412342 - DNA, 15 bp, Homo sapiens
tgccactgcccagca

SEQ ID NO: 1412343 - DNA, 15 bp, Homo sapiens
ctgccactgcccagc

SEQ ID NO: 1412344 - DNA, 15 bp, Homo sapiens
actgccactgcccag

SEQ ID NO: 1412345 - DNA, 15 bp, Homo sapiens
cactgccactgccca

SEQ ID NO: 1412346 - DNA, 15 bp, Homo sapiens
tcactgccactgccc

SEQ ID NO: 1412347 - DNA, 15 bp, Homo sapiens
ctcactgccactgcc

SEQ ID NO: 1412348 - DNA, 15 bp, Homo sapiens
gctcactgccactgc

SEQ ID NO: 1412349 - DNA, 15 bp, Homo sapiens
ggctcactgccactg

SEQ ID NO: 1412350 - DNA, 15 bp, Homo sapiens
aggctcactgccact

SEQ ID NO: 1412351 - DNA, 15 bp, Homo sapiens
gaggctcactgccac

SEQ ID NO: 1412352 - DNA, 15 bp, Homo sapiens
tgaggctcactgcca

SEQ ID NO: 1412353 - DNA, 15 bp, Homo sapiens
ctgaggctcactgcc

SEQ ID NO: 1412354 - DNA, 15 bp, Homo sapiens
gctgaggctcactgc

SEQ ID NO: 1412355 - DNA, 15 bp, Homo sapiens
agctgaggctcactg

SEQ ID NO: 1412356 - DNA, 15 bp, Homo sapiens
gagctgaggctcact

SEQ ID NO: 1412357 - DNA, 15 bp, Homo sapiens
agagctgaggctcac

SEQ ID NO: 1412358 - DNA, 15 bp, Homo sapiens
gagagctgaggctca

SEQ ID NO: 1412359 - DNA, 15 bp, Homo sapiens
ggagagctgaggctc

SEQ ID NO: 1412360 - DNA, 15 bp, Homo sapiens
cggagagctgaggct

SEQ ID NO: 1412361 - DNA, 15 bp, Homo sapiens
ccggagagctgaggc

SEQ ID NO: 1412362 - DNA, 15 bp, Homo sapiens
gccggagagctgagg

SEQ ID NO: 1412363 - DNA, 15 bp, Homo sapiens
tgccggagagctgag

SEQ ID NO: 1412364 - DNA, 15 bp, Homo sapiens
ctgccggagagctga

SEQ ID NO: 1412365 - DNA, 15 bp, Homo sapiens
gctgccggagagctg

SEQ ID NO: 1412366 - DNA, 15 bp, Homo sapiens
ggctgccggagagct

SEQ ID NO: 1412367 - DNA, 15 bp, Homo sapiens
tggctgccggagagc

SEQ ID NO: 1412368 - DNA, 15 bp, Homo sapiens
gtggctgccggagag

SEQ ID NO: 1412369 - DNA, 15 bp, Homo sapiens
tgtggctgccggaga

SEQ ID NO: 1412370 - DNA, 15 bp, Homo sapiens
gtgtggctgccggag

SEQ ID NO: 1412371 - DNA, 15 bp, Homo sapiens
ggtgtggctgccgga

SEQ ID NO: 1412372 - DNA, 15 bp, Homo sapiens
tggtgtggctgccgg

SEQ ID NO: 1412373 - DNA, 15 bp, Homo sapiens
atggtgtggctgccg

SEQ ID NO: 1412374 - DNA, 15 bp, Homo sapiens
gatggtgtggctgcc

SEQ ID NO: 1412375 - DNA, 15 bp, Homo sapiens
ggatggtgtggctgc

SEQ ID NO: 1412376 - DNA, 15 bp, Homo sapiens
gggatggtgtggctg

SEQ ID NO: 1412377 - DNA, 15 bp, Homo sapiens
ggggatggtgtggct

SEQ ID NO: 1412378 - DNA, 15 bp, Homo sapiens
tggggatggtgtggc

SEQ ID NO: 1412379 - DNA, 15 bp, Homo sapiens
ctggggatggtgtgg

SEQ ID NO: 1412380 - DNA, 15 bp, Homo sapiens
cctggggatggtgtg

SEQ ID NO: 1412381 - DNA, 15 bp, Homo sapiens
ccctggggatggtgt

SEQ ID NO: 1412382 - DNA, 15 bp, Homo sapiens
accctggggatggtg

SEQ ID NO: 1412383 - DNA, 15 bp, Homo sapiens
taccctggggatggt

SEQ ID NO: 1412384 - DNA, 15 bp, Homo sapiens
ttaccctggggatgg

SEQ ID NO: 1412385 - DNA, 15 bp, Homo sapiens
tttaccctggggatg

SEQ ID NO: 1412386 - DNA, 15 bp, Homo sapiens
ctttaccctggggat

SEQ ID NO: 1412387 - DNA, 15 bp, Homo sapiens
tctttaccctgggga

SEQ ID NO: 1412388 - DNA, 15 bp, Homo sapiens
ttctttaccctgggg

SEQ ID NO: 1412389 - DNA, 15 bp, Homo sapiens
gttctttaccctggg

SEQ ID NO: 1412390 - DNA, 15 bp, Homo sapiens
cgttctttaccctgg

SEQ ID NO: 1412391 - DNA, 15 bp, Homo sapiens
ccgttctttaccctg

SEQ ID NO: 1412392 - DNA, 15 bp, Homo sapiens
tccgttctttaccct

SEQ ID NO: 1412393 - DNA, 15 bp, Homo sapiens
atccgttctttaccc

SEQ ID NO: 1412394 - DNA, 15 bp, Homo sapiens
tatccgttctttacc

SEQ ID NO: 1412395 - DNA, 15 bp, Homo sapiens
gtatccgttctttac

SEQ ID NO: 1412396 - DNA, 15 bp, Homo sapiens
agtatccgttcttta

SEQ ID NO: 1412397 - DNA, 15 bp, Homo sapiens
gagtatccgttcttt

SEQ ID NO: 1412398 - DNA, 15 bp, Homo sapiens
cgagtatccgttctt

SEQ ID NO: 1412399 - DNA, 15 bp, Homo sapiens
ccgagtatccgttct

SEQ ID NO: 1412400 - DNA, 15 bp, Homo sapiens
gccgagtatccgttc

SEQ ID NO: 1412401 - DNA, 15 bp, Homo sapiens
agccgagtatccgtt

SEQ ID NO: 1412402 - DNA, 15 bp, Homo sapiens
cagccgagtatccgt

SEQ ID NO: 1412403 - DNA, 15 bp, Homo sapiens
ccagccgagtatccg

SEQ ID NO: 1412404 - DNA, 15 bp, Homo sapiens
cccagccgagtatcc

SEQ ID NO: 1412405 - DNA, 15 bp, Homo sapiens
acccagccgagtatc

SEQ ID NO: 1412406 - DNA, 15 bp, Homo sapiens
cacccagccgagtat

SEQ ID NO: 1412407 - DNA, 15 bp, Homo sapiens
acacccagccgagta

SEQ ID NO: 1412408 - DNA, 15 bp, Homo sapiens
cacacccagccgagt

SEQ ID NO: 1412409 - DNA, 15 bp, Homo sapiens
ataggcgtgagccac

SEQ ID NO: 1412410 - DNA, 15 bp, Homo sapiens
gataggcgtgagcca

SEQ ID NO: 1412411 - DNA, 15 bp, Homo sapiens
tgataggcgtgagcc

SEQ ID NO: 1412412 - DNA, 15 bp, Homo sapiens
ttgataggcgtgagc

SEQ ID NO: 1412413 - DNA, 15 bp, Homo sapiens
gttgataggcgtgag

SEQ ID NO: 1412414 - DNA, 15 bp, Homo sapiens
agttgataggcgtga

SEQ ID NO: 1412415 - DNA, 15 bp, Homo sapiens
gagttgataggcgtg

SEQ ID NO: 1412416 - DNA, 15 bp, Homo sapiens
tgagttgataggcgt

SEQ ID NO: 1412417 - DNA, 15 bp, Homo sapiens
ctgagttgataggcg

SEQ ID NO: 1412418 - DNA, 15 bp, Homo sapiens
gctgagttgataggc

SEQ ID NO: 1412419 - DNA, 15 bp, Homo sapiens
tgctgagttgatagg

SEQ ID NO: 1412420 - DNA, 15 bp, Homo sapiens
gtgctgagttgatag

SEQ ID NO: 1412421 - DNA, 15 bp, Homo sapiens
agtgctgagttgata

SEQ ID NO: 1412422 - DNA, 15 bp, Homo sapiens
aagtgctgagttgat

SEQ ID NO: 1412423 - DNA, 15 bp, Homo sapiens
aaagtgctgagttga

SEQ ID NO: 1412424 - DNA, 15 bp, Homo sapiens
caaagtgctgagttg

SEQ ID NO: 1412425 - DNA, 15 bp, Homo sapiens
ccaaagtgctgagtt

SEQ ID NO: 1412426 - DNA, 15 bp, Homo sapiens
ttcccacctcagcct

SEQ ID NO: 1412427 - DNA, 15 bp, Homo sapiens
cttcccacctcagcc

SEQ ID NO: 1412428 - DNA, 15 bp, Homo sapiens
tcttcccacctcagc

SEQ ID NO: 1412429 - DNA, 15 bp, Homo sapiens
gtcttcccacctcag

SEQ ID NO: 1412430 - DNA, 15 bp, Homo sapiens
agtcttcccacctca

SEQ ID NO: 1412431 - DNA, 15 bp, Homo sapiens
cagtcttcccacctc

SEQ ID NO: 1412432 - DNA, 15 bp, Homo sapiens
gcagtcttcccacct

SEQ ID NO: 1412433 - DNA, 15 bp, Homo sapiens
tgcagtcttcccacc

SEQ ID NO: 1412434 - DNA, 15 bp, Homo sapiens
atgcagtcttcccac

SEQ ID NO: 1412435 - DNA, 15 bp, Homo sapiens
catgcagtcttccca

SEQ ID NO: 1412436 - DNA, 15 bp, Homo sapiens
tcatgcagtcttccc

SEQ ID NO: 1412437 - DNA, 15 bp, Homo sapiens
ctcatgcagtcttcc

SEQ ID NO: 1412438 - DNA, 15 bp, Homo sapiens
actcatgcagtcttc

SEQ ID NO: 1412439 - DNA, 15 bp, Homo sapiens
gactcatgcagtctt

SEQ ID NO: 1412440 - DNA, 15 bp, Homo sapiens
ggactcatgcagtct

SEQ ID NO: 1412441 - DNA, 15 bp, Homo sapiens
tggactcatgcagtc

SEQ ID NO: 1412442 - DNA, 15 bp, Homo sapiens
ctggactcatgcagt

SEQ ID NO: 1412443 - DNA, 15 bp, Homo sapiens
cctggactcatgcag

SEQ ID NO: 1412444 - DNA, 15 bp, Homo sapiens
tcctggactcatgca

SEQ ID NO: 1412445 - DNA, 15 bp, Homo sapiens
ctcctggactcatgc

SEQ ID NO: 1412446 - DNA, 15 bp, Homo sapiens
actcctggactcatg

SEQ ID NO: 1412447 - DNA, 15 bp, Homo sapiens
aactcctggactcat

SEQ ID NO: 1412448 - DNA, 15 bp, Homo sapiens
cgaactcctggactc

SEQ ID NO: 1412449 - DNA, 15 bp, Homo sapiens
tcgaactcctggact

SEQ ID NO: 1412450 - DNA, 15 bp, Homo sapiens
ctcgaactcctggac

SEQ ID NO: 1412451 - DNA, 15 bp, Homo sapiens
tctcgaactcctgga

SEQ ID NO: 1412452 - DNA, 15 bp, Homo sapiens
gttcaccgtgttgcc

SEQ ID NO: 1412453 - DNA, 15 bp, Homo sapiens
agttcaccgtgttgc

SEQ ID NO: 1412454 - DNA, 15 bp, Homo sapiens
tagttcaccgtgttg

SEQ ID NO: 1412455 - DNA, 15 bp, Homo sapiens
ctagttcaccgtgtt

SEQ ID NO: 1412456 - DNA, 15 bp, Homo sapiens
cctagttcaccgtgt

SEQ ID NO: 1412457 - DNA, 15 bp, Homo sapiens
ccctagttcaccgtg

SEQ ID NO: 1412458 - DNA, 15 bp, Homo sapiens
cccctagttcaccgt

SEQ ID NO: 1412459 - DNA, 15 bp, Homo sapiens
tcccctagttcaccg

SEQ ID NO: 1412460 - DNA, 15 bp, Homo sapiens
gtcccctagttcacc

SEQ ID NO: 1412461 - DNA, 15 bp, Homo sapiens
tgtcccctagttcac

SEQ ID NO: 1412462 - DNA, 15 bp, Homo sapiens
ttgtcccctagttca

SEQ ID NO: 1412463 - DNA, 15 bp, Homo sapiens
cttgtcccctagttc

SEQ ID NO: 1412464 - DNA, 15 bp, Homo sapiens
tcttgtcccctagtt

SEQ ID NO: 1412465 - DNA, 15 bp, Homo sapiens
gtcttgtcccctagt

SEQ ID NO: 1412466 - DNA, 15 bp, Homo sapiens
tgtcttgtcccctag

SEQ ID NO: 1412467 - DNA, 15 bp, Homo sapiens
atgtcttgtccccta

SEQ ID NO: 1412468 - DNA, 15 bp, Homo sapiens
tatgtcttgtcccct

SEQ ID NO: 1412469 - DNA, 15 bp, Homo sapiens
ctatgtcttgtcccc

SEQ ID NO: 1412470 - DNA, 15 bp, Homo sapiens
gctatgtcttgtccc

SEQ ID NO: 1412471 - DNA, 15 bp, Homo sapiens
agctatgtcttgtcc

SEQ ID NO: 1412472 - DNA, 15 bp, Homo sapiens
cagctatgtcttgtc

SEQ ID NO: 1412473 - DNA, 15 bp, Homo sapiens
ccagctatgtcttgt

SEQ ID NO: 1412474 - DNA, 15 bp, Homo sapiens
tccagctatgtcttg

SEQ ID NO: 1412475 - DNA, 15 bp, Homo sapiens
atccagctatgtctt

SEQ ID NO: 1412476 - DNA, 15 bp, Homo sapiens
catccagctatgtct

SEQ ID NO: 1412477 - DNA, 15 bp, Homo sapiens
gcatccagctatgtc

SEQ ID NO: 1412478 - DNA, 15 bp, Homo sapiens
tgcatccagctatgt

SEQ ID NO: 1412479 - DNA, 15 bp, Homo sapiens
ttgcatccagctatg

SEQ ID NO: 1412480 - DNA, 15 bp, Homo sapiens
cttgcatccagctat

SEQ ID NO: 1412481 - DNA, 15 bp, Homo sapiens
ccttgcatccagcta

SEQ ID NO: 1412482 - DNA, 15 bp, Homo sapiens
tccttgcatccagct

SEQ ID NO: 1412483 - DNA, 15 bp, Homo sapiens
gtccttgcatccagc

SEQ ID NO: 1412484 - DNA, 15 bp, Homo sapiens
tgtccttgcatccag

SEQ ID NO: 1412485 - DNA, 15 bp, Homo sapiens
ttgtccttgcatcca

SEQ ID NO: 1412486 - DNA, 15 bp, Homo sapiens
tttgtccttgcatcc

SEQ ID NO: 1412487 - DNA, 15 bp, Homo sapiens
ctttgtccttgcatc

SEQ ID NO: 1412488 - DNA, 15 bp, Homo sapiens
gctttgtccttgcat

SEQ ID NO: 1412489 - DNA, 15 bp, Homo sapiens
cgctttgtccttgca

SEQ ID NO: 1412490 - DNA, 15 bp, Homo sapiens
ccgctttgtccttgc

SEQ ID NO: 1412491 - DNA, 15 bp, Homo sapiens
cccgctttgtccttg

SEQ ID NO: 1412492 - DNA, 15 bp, Homo sapiens
ccccgctttgtcctt

SEQ ID NO: 1412493 - DNA, 15 bp, Homo sapiens
cccccgctttgtcct

SEQ ID NO: 1412494 - DNA, 15 bp, Homo sapiens
ccccccgctttgtcc

SEQ ID NO: 1412495 - DNA, 15 bp, Homo sapiens
accccccgctttgtc

SEQ ID NO: 1412496 - DNA, 15 bp, Homo sapiens
caccccccgctttgt

SEQ ID NO: 1412497 - DNA, 15 bp, Homo sapiens
gcaccccccgctttg

SEQ ID NO: 1412498 - DNA, 15 bp, Homo sapiens
tgcaccccccgcttt

SEQ ID NO: 1412499 - DNA, 15 bp, Homo sapiens
ctgcaccccccgctt

SEQ ID NO: 1412500 - DNA, 15 bp, Homo sapiens
cctgcaccccccgct

SEQ ID NO: 1412501 - DNA, 15 bp, Homo sapiens
acctgcaccccccgc

SEQ ID NO: 1412502 - DNA, 15 bp, Homo sapiens
gacctgcaccccccg

SEQ ID NO: 1412503 - DNA, 15 bp, Homo sapiens
ggacctgcacccccc

SEQ ID NO: 1412504 - DNA, 15 bp, Homo sapiens
gggacctgcaccccc

SEQ ID NO: 1412505 - DNA, 15 bp, Homo sapiens
ggggacctgcacccc

SEQ ID NO: 1412506 - DNA, 15 bp, Homo sapiens
gggggacctgcaccc

SEQ ID NO: 1412507 - DNA, 15 bp, Homo sapiens
tgggggacctgcacc

SEQ ID NO: 1412508 - DNA, 15 bp, Homo sapiens
gtgggggacctgcac

SEQ ID NO: 1412509 - DNA, 15 bp, Homo sapiens
tgtgggggacctgca

SEQ ID NO: 1412510 - DNA, 15 bp, Homo sapiens
gtgtgggggacctgc

SEQ ID NO: 1412511 - DNA, 15 bp, Homo sapiens
ggtgtgggggacctg

SEQ ID NO: 1412512 - DNA, 15 bp, Homo sapiens
aggtgtgggggacct

SEQ ID NO: 1412513 - DNA, 15 bp, Homo sapiens
taggtgtgggggacc

SEQ ID NO: 1412514 - DNA, 15 bp, Homo sapiens
ttaggtgtgggggac

SEQ ID NO: 1412515 - DNA, 15 bp, Homo sapiens
cttaggtgtggggga

SEQ ID NO: 1412516 - DNA, 15 bp, Homo sapiens
gcttaggtgtggggg

SEQ ID NO: 1412517 - DNA, 15 bp, Homo sapiens
agcttaggtgtgggg

SEQ ID NO: 1412518 - DNA, 15 bp, Homo sapiens
aagcttaggtgtggg

SEQ ID NO: 1412519 - DNA, 15 bp, Homo sapiens
caagcttaggtgtgg

SEQ ID NO: 1412520 - DNA, 15 bp, Homo sapiens
ccaagcttaggtgtg

SEQ ID NO: 1412521 - DNA, 15 bp, Homo sapiens
cccaagcttaggtgt

SEQ ID NO: 1412522 - DNA, 15 bp, Homo sapiens
gcccaagcttaggtg

SEQ ID NO: 1412523 - DNA, 15 bp, Homo sapiens
tgcccaagcttaggt

SEQ ID NO: 1412524 - DNA, 15 bp, Homo sapiens
ctgcccaagcttagg

SEQ ID NO: 1412525 - DNA, 15 bp, Homo sapiens
cctgcccaagcttag

SEQ ID NO: 1412526 - DNA, 15 bp, Homo sapiens
ccctgcccaagctta

SEQ ID NO: 1412527 - DNA, 15 bp, Homo sapiens
cccctgcccaagctt

SEQ ID NO: 1412528 - DNA, 15 bp, Homo sapiens
tcccctgcccaagct

SEQ ID NO: 1412529 - DNA, 15 bp, Homo sapiens
ttcccctgcccaagc

SEQ ID NO: 1412530 - DNA, 15 bp, Homo sapiens
cttcccctgcccaag

SEQ ID NO: 1412531 - DNA, 15 bp, Homo sapiens
ccttcccctgcccaa

SEQ ID NO: 1412532 - DNA, 15 bp, Homo sapiens
cccttcccctgccca

SEQ ID NO: 1412533 - DNA, 15 bp, Homo sapiens
tcccttcccctgccc

SEQ ID NO: 1412534 - DNA, 15 bp, Homo sapiens
ctcccttcccctgcc

SEQ ID NO: 1412535 - DNA, 15 bp, Homo sapiens
tctcccttcccctgc

SEQ ID NO: 1412536 - DNA, 15 bp, Homo sapiens
ctctcccttcccctg

SEQ ID NO: 1412537 - DNA, 15 bp, Homo sapiens
cctctcccttcccct

SEQ ID NO: 1412538 - DNA, 15 bp, Homo sapiens
gcctctcccttcccc

SEQ ID NO: 1412539 - DNA, 15 bp, Homo sapiens
tgcctctcccttccc

SEQ ID NO: 1412540 - DNA, 15 bp, Homo sapiens
gtgcctctcccttcc

SEQ ID NO: 1412541 - DNA, 15 bp, Homo sapiens
tgtgcctctcccttc

SEQ ID NO: 1412542 - DNA, 15 bp, Homo sapiens
ttgtgcctctccctt

SEQ ID NO: 1412543 - DNA, 15 bp, Homo sapiens
attgtgcctctccct

SEQ ID NO: 1412544 - DNA, 15 bp, Homo sapiens
aattgtgcctctccc

SEQ ID NO: 1412545 - DNA, 15 bp, Homo sapiens
taattgtgcctctcc

SEQ ID NO: 1412546 - DNA, 15 bp, Homo sapiens
gtaattgtgcctctc

SEQ ID NO: 1412547 - DNA, 15 bp, Homo sapiens
agtaattgtgcctct

SEQ ID NO: 1412548 - DNA, 15 bp, Homo sapiens
aagtaattgtgcctc

SEQ ID NO: 1412549 - DNA, 15 bp, Homo sapiens
caagtaattgtgcct

SEQ ID NO: 1412550 - DNA, 15 bp, Homo sapiens
gcaagtaattgtgcc

SEQ ID NO: 1412551 - DNA, 15 bp, Homo sapiens
cgcaagtaattgtgc

SEQ ID NO: 1412552 - DNA, 15 bp, Homo sapiens
ccgcaagtaattgtg

SEQ ID NO: 1412553 - DNA, 15 bp, Homo sapiens
cccgcaagtaattgt

SEQ ID NO: 1412554 - DNA, 15 bp, Homo sapiens
acccgcaagtaattg

SEQ ID NO: 1412555 - DNA, 15 bp, Homo sapiens
cacccgcaagtaatt

SEQ ID NO: 1412556 - DNA, 15 bp, Homo sapiens
acacccgcaagtaat

SEQ ID NO: 1412557 - DNA, 15 bp, Homo sapiens
aacacccgcaagtaa

SEQ ID NO: 1412558 - DNA, 15 bp, Homo sapiens
gaacacccgcaagta

SEQ ID NO: 1412559 - DNA, 15 bp, Homo sapiens
agaacacccgcaagt

SEQ ID NO: 1412560 - DNA, 15 bp, Homo sapiens
gagaacacccgcaag

SEQ ID NO: 1412561 - DNA, 15 bp, Homo sapiens
tgagaacacccgcaa

SEQ ID NO: 1412562 - DNA, 15 bp, Homo sapiens
atgagaacacccgca

SEQ ID NO: 1412563 - DNA, 15 bp, Homo sapiens
aatgagaacacccgc

SEQ ID NO: 1412564 - DNA, 15 bp, Homo sapiens
aaatgagaacacccg

SEQ ID NO: 1412565 - DNA, 15 bp, Homo sapiens
aaaatgagaacaccc

SEQ ID NO: 1412566 - DNA, 15 bp, Homo sapiens
aaaaatgagaacacc

SEQ ID NO: 1412567 - DNA, 15 bp, Homo sapiens
taaaaatgagaacac

SEQ ID NO: 1412568 - DNA, 15 bp, Homo sapiens
ttaaaaatgagaaca

SEQ ID NO: 1412569 - DNA, 15 bp, Homo sapiens
cttaaaaatgagaac

SEQ ID NO: 1412570 - DNA, 15 bp, Homo sapiens
gcttaaaaatgagaa

SEQ ID NO: 1412571 - DNA, 15 bp, Homo sapiens
tgcttaaaaatgaga

SEQ ID NO: 1412572 - DNA, 15 bp, Homo sapiens
ctgcttaaaaatgag

SEQ ID NO: 1412573 - DNA, 15 bp, Homo sapiens
tctgcttaaaaatga

SEQ ID NO: 1412574 - DNA, 15 bp, Homo sapiens
ctctgcttaaaaatg

SEQ ID NO: 1412575 - DNA, 15 bp, Homo sapiens
tctctgcttaaaaat

SEQ ID NO: 1412576 - DNA, 15 bp, Homo sapiens
gtctctgcttaaaaa

SEQ ID NO: 1412577 - DNA, 15 bp, Homo sapiens
agtctctgcttaaaa

SEQ ID NO: 1412578 - DNA, 15 bp, Homo sapiens
aagtctctgcttaaa

SEQ ID NO: 1412579 - DNA, 15 bp, Homo sapiens
caagtctctgcttaa

SEQ ID NO: 1412580 - DNA, 15 bp, Homo sapiens
ccaagtctctgctta

SEQ ID NO: 1412581 - DNA, 15 bp, Homo sapiens
gccaagtctctgctt

SEQ ID NO: 1412582 - DNA, 15 bp, Homo sapiens
ggccaagtctctgct

SEQ ID NO: 1412583 - DNA, 15 bp, Homo sapiens
aggccaagtctctgc

SEQ ID NO: 1412584 - DNA, 15 bp, Homo sapiens
caggccaagtctctg

SEQ ID NO: 1412585 - DNA, 15 bp, Homo sapiens
gcaggccaagtctct

SEQ ID NO: 1412586 - DNA, 15 bp, Homo sapiens
agcaggccaagtctc

SEQ ID NO: 1412587 - DNA, 15 bp, Homo sapiens
cagcaggccaagtct

SEQ ID NO: 1412588 - DNA, 15 bp, Homo sapiens
gcagcaggccaagtc

SEQ ID NO: 1412589 - DNA, 15 bp, Homo sapiens
agcagcaggccaagt

SEQ ID NO: 1412590 - DNA, 15 bp, Homo sapiens
gagcagcaggccaag

SEQ ID NO: 1412591 - DNA, 15 bp, Homo sapiens
tgagcagcaggccaa

SEQ ID NO: 1412592 - DNA, 15 bp, Homo sapiens
gtgagcagcaggcca

SEQ ID NO: 1412593 - DNA, 15 bp, Homo sapiens
agtgagcagcaggcc

SEQ ID NO: 1412594 - DNA, 15 bp, Homo sapiens
cagtgagcagcaggc

SEQ ID NO: 1412595 - DNA, 15 bp, Homo sapiens
tcagtgagcagcagg

SEQ ID NO: 1412596 - DNA, 15 bp, Homo sapiens
atcagtgagcagcag

SEQ ID NO: 1412597 - DNA, 15 bp, Homo sapiens
catcagtgagcagca

SEQ ID NO: 1412598 - DNA, 15 bp, Homo sapiens
tcatcagtgagcagc

SEQ ID NO: 1412599 - DNA, 15 bp, Homo sapiens
atcatcagtgagcag

SEQ ID NO: 1412600 - DNA, 15 bp, Homo sapiens
catcatcagtgagca

SEQ ID NO: 1412601 - DNA, 15 bp, Homo sapiens
ccatcatcagtgagc

SEQ ID NO: 1412602 - DNA, 15 bp, Homo sapiens
accatcatcagtgag

SEQ ID NO: 1412603 - DNA, 15 bp, Homo sapiens
caccatcatcagtga

SEQ ID NO: 1412604 - DNA, 15 bp, Homo sapiens
ccaccatcatcagtg

SEQ ID NO: 1412605 - DNA, 15 bp, Homo sapiens
gccaccatcatcagt

SEQ ID NO: 1412606 - DNA, 15 bp, Homo sapiens
ggccaccatcatcag

SEQ ID NO: 1412607 - DNA, 15 bp, Homo sapiens
aggccaccatcatca

SEQ ID NO: 1412608 - DNA, 15 bp, Homo sapiens
aaggccaccatcatc

SEQ ID NO: 1412609 - DNA, 15 bp, Homo sapiens
gaaggccaccatcat

SEQ ID NO: 1412610 - DNA, 15 bp, Homo sapiens
tgaaggccaccatca

SEQ ID NO: 1412611 - DNA, 15 bp, Homo sapiens
gtgaaggccaccatc

SEQ ID NO: 1412612 - DNA, 15 bp, Homo sapiens
ggtgaaggccaccat

SEQ ID NO: 1412613 - DNA, 15 bp, Homo sapiens
aggtgaaggccacca

SEQ ID NO: 1412614 - DNA, 15 bp, Homo sapiens
caggtgaaggccacc

SEQ ID NO: 1412615 - DNA, 15 bp, Homo sapiens
ccaggtgaaggccac

SEQ ID NO: 1412616 - DNA, 15 bp, Homo sapiens
cccaggtgaaggcca

SEQ ID NO: 1412617 - DNA, 15 bp, Homo sapiens
ccccaggtgaaggcc

SEQ ID NO: 1412618 - DNA, 15 bp, Homo sapiens
cccccaggtgaaggc

SEQ ID NO: 1412619 - DNA, 15 bp, Homo sapiens
ccccccaggtgaagg

SEQ ID NO: 1412620 - DNA, 15 bp, Homo sapiens
cccccccaggtgaag

SEQ ID NO: 1412621 - DNA, 15 bp, Homo sapiens
tcccccccaggtgaa

SEQ ID NO: 1412622 - DNA, 15 bp, Homo sapiens
atcccccccaggtga

SEQ ID NO: 1412623 - DNA, 15 bp, Homo sapiens
aatcccccccaggtg

SEQ ID NO: 1412624 - DNA, 15 bp, Homo sapiens
gaatcccccccaggt

SEQ ID NO: 1412625 - DNA, 15 bp, Homo sapiens
tgaatcccccccagg

SEQ ID NO: 1412626 - DNA, 15 bp, Homo sapiens
atgaatcccccccag

SEQ ID NO: 1412627 - DNA, 15 bp, Homo sapiens
catgaatccccccca

SEQ ID NO: 1412628 - DNA, 15 bp, Homo sapiens
acatgaatccccccc

SEQ ID NO: 1412629 - DNA, 15 bp, Homo sapiens
cacatgaatcccccc

SEQ ID NO: 1412630 - DNA, 15 bp, Homo sapiens
gcacatgaatccccc

SEQ ID NO: 1412631 - DNA, 15 bp, Homo sapiens
tgcacatgaatcccc

SEQ ID NO: 1412632 - DNA, 15 bp, Homo sapiens
gtgcacatgaatccc

SEQ ID NO: 1412633 - DNA, 15 bp, Homo sapiens
cgtgcacatgaatcc

SEQ ID NO: 1412634 - DNA, 15 bp, Homo sapiens
acgtgcacatgaatc

SEQ ID NO: 1412635 - DNA, 15 bp, Homo sapiens
aacgtgcacatgaat

SEQ ID NO: 1412636 - DNA, 15 bp, Homo sapiens
gaacgtgcacatgaa

SEQ ID NO: 1412637 - DNA, 15 bp, Homo sapiens
tgaacgtgcacatga

SEQ ID NO: 1412638 - DNA, 15 bp, Homo sapiens
ctgaacgtgcacatg

SEQ ID NO: 1412639 - DNA, 15 bp, Homo sapiens
gctgaacgtgcacat

SEQ ID NO: 1412640 - DNA, 15 bp, Homo sapiens
agctgaacgtgcaca

SEQ ID NO: 1412641 - DNA, 15 bp, Homo sapiens
aagctgaacgtgcac

SEQ ID NO: 1412642 - DNA, 15 bp, Homo sapiens
gaagctgaacgtgca

SEQ ID NO: 1412643 - DNA, 15 bp, Homo sapiens
ggaagctgaacgtgc

SEQ ID NO: 1412644 - DNA, 15 bp, Homo sapiens
gggaagctgaacgtg

SEQ ID NO: 1412645 - DNA, 15 bp, Homo sapiens
cgggaagctgaacgt

SEQ ID NO: 1412646 - DNA, 15 bp, Homo sapiens
gcgggaagctgaacg

SEQ ID NO: 1412647 - DNA, 15 bp, Homo sapiens
ggcgggaagctgaac

SEQ ID NO: 1412648 - DNA, 15 bp, Homo sapiens
gggcgggaagctgaa

SEQ ID NO: 1412649 - DNA, 15 bp, Homo sapiens
tgggcgggaagctga

SEQ ID NO: 1412650 - DNA, 15 bp, Homo sapiens
gtgggcgggaagctg

SEQ ID NO: 1412651 - DNA, 15 bp, Homo sapiens
ggtgggcgggaagct

SEQ ID NO: 1412652 - DNA, 15 bp, Homo sapiens
tggtgggcgggaagc

SEQ ID NO: 1412653 - DNA, 15 bp, Homo sapiens
ctggtgggcgggaag

SEQ ID NO: 1412654 - DNA, 15 bp, Homo sapiens
gctggtgggcgggaa

SEQ ID NO: 1412655 - DNA, 15 bp, Homo sapiens
tgctggtgggcggga

SEQ ID NO: 1412656 - DNA, 15 bp, Homo sapiens
ctgctggtgggcggg

SEQ ID NO: 1412657 - DNA, 15 bp, Homo sapiens
cctgctggtgggcgg

SEQ ID NO: 1412658 - DNA, 15 bp, Homo sapiens
gcctgctggtgggcg

SEQ ID NO: 1412659 - DNA, 15 bp, Homo sapiens
cgcctgctggtgggc

SEQ ID NO: 1412660 - DNA, 15 bp, Homo sapiens
acgcctgctggtggg

SEQ ID NO: 1412661 - DNA, 15 bp, Homo sapiens
tacgcctgctggtgg

SEQ ID NO: 1412662 - DNA, 15 bp, Homo sapiens
gtacgcctgctggtg

SEQ ID NO: 1412663 - DNA, 15 bp, Homo sapiens
cgtacgcctgctggt

SEQ ID NO: 1412664 - DNA, 15 bp, Homo sapiens
ccgtacgcctgctgg

SEQ ID NO: 1412665 - DNA, 15 bp, Homo sapiens
accgtacgcctgctg

SEQ ID NO: 1412666 - DNA, 15 bp, Homo sapiens
caccgtacgcctgct

SEQ ID NO: 1412667 - DNA, 15 bp, Homo sapiens
ccaccgtacgcctgc

SEQ ID NO: 1412668 - DNA, 15 bp, Homo sapiens
gccaccgtacgcctg

SEQ ID NO: 1412669 - DNA, 15 bp, Homo sapiens
agccaccgtacgcct

SEQ ID NO: 1412670 - DNA, 15 bp, Homo sapiens
cagccaccgtacgcc

SEQ ID NO: 1412671 - DNA, 15 bp, Homo sapiens
gcagccaccgtacgc

SEQ ID NO: 1412672 - DNA, 15 bp, Homo sapiens
tgcagccaccgtacg

SEQ ID NO: 1412673 - DNA, 15 bp, Homo sapiens
ttgcagccaccgtac

SEQ ID NO: 1412674 - DNA, 15 bp, Homo sapiens
tttgcagccaccgta

SEQ ID NO: 1412675 - DNA, 15 bp, Homo sapiens
gtttgcagccaccgt

SEQ ID NO: 1412676 - DNA, 15 bp, Homo sapiens
agtttgcagccaccg

SEQ ID NO: 1412677 - DNA, 15 bp, Homo sapiens
ggcagctaaagatgg

SEQ ID NO: 1412678 - DNA, 15 bp, Homo sapiens
gcagctaaagatggc

SEQ ID NO: 1412679 - DNA, 15 bp, Homo sapiens
cagctaaagatggct

SEQ ID NO: 1412680 - DNA, 15 bp, Homo sapiens
agctaaagatggctc

SEQ ID NO: 1412681 - DNA, 15 bp, Homo sapiens
gctaaagatggctca

SEQ ID NO: 1412682 - DNA, 15 bp, Homo sapiens
ctaaagatggctcag

SEQ ID NO: 1412683 - DNA, 15 bp, Homo sapiens
taaagatggctcagg

SEQ ID NO: 1412684 - DNA, 15 bp, Homo sapiens
aaagatggctcaggc

SEQ ID NO: 1412685 - DNA, 15 bp, Homo sapiens
aagatggctcaggca

SEQ ID NO: 1412686 - DNA, 15 bp, Homo sapiens
agatggctcaggcaa

SEQ ID NO: 1412687 - DNA, 15 bp, Homo sapiens
gatggctcaggcaaa

SEQ ID NO: 1412688 - DNA, 15 bp, Homo sapiens
atggctcaggcaaac

SEQ ID NO: 1412689 - DNA, 15 bp, Homo sapiens
tggctcaggcaaaca

SEQ ID NO: 1412690 - DNA, 15 bp, Homo sapiens
ggctcaggcaaacaa

SEQ ID NO: 1412691 - DNA, 15 bp, Homo sapiens
gctcaggcaaacaaa

SEQ ID NO: 1412692 - DNA, 15 bp, Homo sapiens
ctcaggcaaacaaag

SEQ ID NO: 1412693 - DNA, 15 bp, Homo sapiens
tcaggcaaacaaagg

SEQ ID NO: 1412694 - DNA, 15 bp, Homo sapiens
caggcaaacaaaggg

SEQ ID NO: 1412695 - DNA, 15 bp, Homo sapiens
aggcaaacaaagggc

SEQ ID NO: 1412696 - DNA, 15 bp, Homo sapiens
ggcaaacaaagggcc

SEQ ID NO: 1412697 - DNA, 15 bp, Homo sapiens
gcaaacaaagggcca

SEQ ID NO: 1412698 - DNA, 15 bp, Homo sapiens
caaacaaagggccag

SEQ ID NO: 1412699 - DNA, 15 bp, Homo sapiens
aaacaaagggccagg

SEQ ID NO: 1412700 - DNA, 15 bp, Homo sapiens
aacaaagggccaggg

SEQ ID NO: 1412701 - DNA, 15 bp, Homo sapiens
acaaagggccagggg

SEQ ID NO: 1412702 - DNA, 15 bp, Homo sapiens
caaagggccagggga

SEQ ID NO: 1412703 - DNA, 15 bp, Homo sapiens
aaagggccaggggat

SEQ ID NO: 1412704 - DNA, 15 bp, Homo sapiens
aagggccaggggata

SEQ ID NO: 1412705 - DNA, 15 bp, Homo sapiens
agggccaggggatat

SEQ ID NO: 1412706 - DNA, 15 bp, Homo sapiens
gggccaggggatatg

SEQ ID NO: 1412707 - DNA, 15 bp, Homo sapiens
ggccaggggatatgt

SEQ ID NO: 1412708 - DNA, 15 bp, Homo sapiens
gccaggggatatgtt

SEQ ID NO: 1412709 - DNA, 15 bp, Homo sapiens
ccaggggatatgttc

SEQ ID NO: 1412710 - DNA, 15 bp, Homo sapiens
caggggatatgttca

SEQ ID NO: 1412711 - DNA, 15 bp, Homo sapiens
aggggatatgttcat

SEQ ID NO: 1412712 - DNA, 15 bp, Homo sapiens
ggggatatgttcatg

SEQ ID NO: 1412713 - DNA, 15 bp, Homo sapiens
gggatatgttcatgg

SEQ ID NO: 1412714 - DNA, 15 bp, Homo sapiens
ggatatgttcatggg

SEQ ID NO: 1412715 - DNA, 15 bp, Homo sapiens
gatatgttcatggga

SEQ ID NO: 1412716 - DNA, 15 bp, Homo sapiens
atatgttcatgggat

SEQ ID NO: 1412717 - DNA, 15 bp, Homo sapiens
tatgttcatgggatg

SEQ ID NO: 1412718 - DNA, 15 bp, Homo sapiens
atgttcatgggatga

SEQ ID NO: 1412719 - DNA, 15 bp, Homo sapiens
tgttcatgggatgat

SEQ ID NO: 1412720 - DNA, 15 bp, Homo sapiens
gttcatgggatgatg

SEQ ID NO: 1412721 - DNA, 15 bp, Homo sapiens
ttcatgggatgatgt

SEQ ID NO: 1412722 - DNA, 15 bp, Homo sapiens
tcatgggatgatgtg

SEQ ID NO: 1412723 - DNA, 15 bp, Homo sapiens
catgggatgatgtgt

SEQ ID NO: 1412724 - DNA, 15 bp, Homo sapiens
atgggatgatgtgtc

SEQ ID NO: 1412725 - DNA, 15 bp, Homo sapiens
tgggatgatgtgtct

SEQ ID NO: 1412726 - DNA, 15 bp, Homo sapiens
gggatgatgtgtctc

SEQ ID NO: 1412727 - DNA, 15 bp, Homo sapiens
ggatgatgtgtctct

SEQ ID NO: 1412728 - DNA, 15 bp, Homo sapiens
gatgatgtgtctctc

SEQ ID NO: 1412729 - DNA, 15 bp, Homo sapiens
atgatgtgtctctcg

SEQ ID NO: 1412730 - DNA, 15 bp, Homo sapiens
tgatgtgtctctcgt

SEQ ID NO: 1412731 - DNA, 15 bp, Homo sapiens
gatgtgtctctcgtt

SEQ ID NO: 1412732 - DNA, 15 bp, Homo sapiens
atgtgtctctcgttg

SEQ ID NO: 1412733 - DNA, 15 bp, Homo sapiens
tgtgtctctcgttgt

SEQ ID NO: 1412734 - DNA, 15 bp, Homo sapiens
gtgtctctcgttgtc

SEQ ID NO: 1412735 - DNA, 15 bp, Homo sapiens
tgtctctcgttgtct

SEQ ID NO: 1412736 - DNA, 15 bp, Homo sapiens
gtctctcgttgtctg

SEQ ID NO: 1412737 - DNA, 15 bp, Homo sapiens
tctctcgttgtctgc

SEQ ID NO: 1412738 - DNA, 15 bp, Homo sapiens
ctctcgttgtctgct

SEQ ID NO: 1412739 - DNA, 15 bp, Homo sapiens
tctcgttgtctgctt

SEQ ID NO: 1412740 - DNA, 15 bp, Homo sapiens
ctcgttgtctgctta

SEQ ID NO: 1412741 - DNA, 15 bp, Homo sapiens
tcgttgtctgcttaa

SEQ ID NO: 1412742 - DNA, 15 bp, Homo sapiens
cgttgtctgcttaac

SEQ ID NO: 1412743 - DNA, 15 bp, Homo sapiens
gttgtctgcttaaca

SEQ ID NO: 1412744 - DNA, 15 bp, Homo sapiens
ttgtctgcttaacac

SEQ ID NO: 1412745 - DNA, 15 bp, Homo sapiens
tgtctgcttaacaca

SEQ ID NO: 1412746 - DNA, 15 bp, Homo sapiens
gtctgcttaacacaa

SEQ ID NO: 1412747 - DNA, 15 bp, Homo sapiens
tctgcttaacacaag

SEQ ID NO: 1412748 - DNA, 15 bp, Homo sapiens
ctgcttaacacaagg

SEQ ID NO: 1412749 - DNA, 15 bp, Homo sapiens
tgcttaacacaaggt

SEQ ID NO: 1412750 - DNA, 15 bp, Homo sapiens
gcttaacacaaggtg

SEQ ID NO: 1412751 - DNA, 15 bp, Homo sapiens
cttaacacaaggtga

SEQ ID NO: 1412752 - DNA, 15 bp, Homo sapiens
ttaacacaaggtgag

SEQ ID NO: 1412753 - DNA, 15 bp, Homo sapiens
taacacaaggtgagt

SEQ ID NO: 1412754 - DNA, 15 bp, Homo sapiens
aacacaaggtgagtc

SEQ ID NO: 1412755 - DNA, 15 bp, Homo sapiens
acacaaggtgagtct

SEQ ID NO: 1412756 - DNA, 15 bp, Homo sapiens
cacaaggtgagtctc

SEQ ID NO: 1412757 - DNA, 15 bp, Homo sapiens
acaaggtgagtctct

SEQ ID NO: 1412758 - DNA, 15 bp, Homo sapiens
caaggtgagtctctc

SEQ ID NO: 1412759 - DNA, 15 bp, Homo sapiens
aaggtgagtctctcc

SEQ ID NO: 1412760 - DNA, 15 bp, Homo sapiens
aggtgagtctctccc

SEQ ID NO: 1412761 - DNA, 15 bp, Homo sapiens
ggtgagtctctccct

SEQ ID NO: 1412762 - DNA, 15 bp, Homo sapiens
gtgagtctctccctc

SEQ ID NO: 1412763 - DNA, 15 bp, Homo sapiens
tgagtctctccctcc

SEQ ID NO: 1412764 - DNA, 15 bp, Homo sapiens
gagtctctccctccc

SEQ ID NO: 1412765 - DNA, 15 bp, Homo sapiens
agtctctccctccct

SEQ ID NO: 1412766 - DNA, 15 bp, Homo sapiens
gtctctccctccctc

SEQ ID NO: 1412767 - DNA, 15 bp, Homo sapiens
tctctccctccctct

SEQ ID NO: 1412768 - DNA, 15 bp, Homo sapiens
ctctccctccctctc

SEQ ID NO: 1412769 - DNA, 15 bp, Homo sapiens
tctccctccctctct

SEQ ID NO: 1412770 - DNA, 15 bp, Homo sapiens
ctccctccctctctc

SEQ ID NO: 1412771 - DNA, 15 bp, Homo sapiens
tccctccctctctct

SEQ ID NO: 1412772 - DNA, 15 bp, Homo sapiens
ccctccctctctctc

SEQ ID NO: 1412773 - DNA, 15 bp, Homo sapiens
cctccctctctctct

SEQ ID NO: 1412774 - DNA, 15 bp, Homo sapiens
ctccctctctctctc

SEQ ID NO: 1412775 - DNA, 15 bp, Homo sapiens
ccctctctctctctt

SEQ ID NO: 1412776 - DNA, 15 bp, Homo sapiens
ctctctctttttctc

SEQ ID NO: 1412777 - DNA, 15 bp, Homo sapiens
tctctctttttctct

SEQ ID NO: 1412778 - DNA, 15 bp, Homo sapiens
ctctctttttctctg

SEQ ID NO: 1412779 - DNA, 15 bp, Homo sapiens
tctctttttctctgt

SEQ ID NO: 1412780 - DNA, 15 bp, Homo sapiens
ctctttttctctgtg

SEQ ID NO: 1412781 - DNA, 15 bp, Homo sapiens
tctttttctctgtgt

SEQ ID NO: 1412782 - DNA, 15 bp, Homo sapiens
ctttttctctgtgtg

SEQ ID NO: 1412783 - DNA, 15 bp, Homo sapiens
tttttctctgtgtgt

SEQ ID NO: 1412784 - DNA, 15 bp, Homo sapiens
tttctctgtgtgtgt

SEQ ID NO: 1412785 - DNA, 15 bp, Homo sapiens
ttctctgtgtgtgtt

SEQ ID NO: 1412786 - DNA, 15 bp, Homo sapiens
tctctgtgtgtgttt

SEQ ID NO: 1412787 - DNA, 15 bp, Homo sapiens
ctctgtgtgtgtttg

SEQ ID NO: 1412788 - DNA, 15 bp, Homo sapiens
tctgtgtgtgtttgt

SEQ ID NO: 1412789 - DNA, 15 bp, Homo sapiens
ctgtgtgtgtttgtg

SEQ ID NO: 1412790 - DNA, 15 bp, Homo sapiens
gtgtgtttgtgtgtg

SEQ ID NO: 1412791 - DNA, 15 bp, Homo sapiens
tgtttgtgtgtgtgc

SEQ ID NO: 1412792 - DNA, 15 bp, Homo sapiens
gtttgtgtgtgtgca

SEQ ID NO: 1412793 - DNA, 15 bp, Homo sapiens
tttgtgtgtgtgcat

SEQ ID NO: 1412794 - DNA, 15 bp, Homo sapiens
ttgtgtgtgtgcatg

SEQ ID NO: 1412795 - DNA, 15 bp, Homo sapiens
tgtgtgtgtgcatgt

SEQ ID NO: 1412796 - DNA, 15 bp, Homo sapiens
gtgtgtgtgcatgtg

SEQ ID NO: 1412797 - DNA, 15 bp, Homo sapiens
gtgtgtgcatgtgtg

SEQ ID NO: 1412798 - DNA, 15 bp, Homo sapiens
tgtgtgcatgtgtgc

SEQ ID NO: 1412799 - DNA, 15 bp, Homo sapiens
gtgtgcatgtgtgca

SEQ ID NO: 1412800 - DNA, 15 bp, Homo sapiens
tgtgcatgtgtgcaa

SEQ ID NO: 1412801 - DNA, 15 bp, Homo sapiens
gtgcatgtgtgcaaa

SEQ ID NO: 1412802 - DNA, 15 bp, Homo sapiens
tgcatgtgtgcaaat

SEQ ID NO: 1412803 - DNA, 15 bp, Homo sapiens
gcatgtgtgcaaatg

SEQ ID NO: 1412804 - DNA, 15 bp, Homo sapiens
catgtgtgcaaatgt

SEQ ID NO: 1412805 - DNA, 15 bp, Homo sapiens
atgtgtgcaaatgta

SEQ ID NO: 1412806 - DNA, 15 bp, Homo sapiens
tgtgtgcaaatgtaa

SEQ ID NO: 1412807 - DNA, 15 bp, Homo sapiens
gtgtgcaaatgtaat

SEQ ID NO: 1412808 - DNA, 15 bp, Homo sapiens
tgtgcaaatgtaata

SEQ ID NO: 1412809 - DNA, 15 bp, Homo sapiens
gtgcaaatgtaatat

SEQ ID NO: 1412810 - DNA, 15 bp, Homo sapiens
tgcaaatgtaatata

SEQ ID NO: 1412811 - DNA, 15 bp, Homo sapiens
gcaaatgtaatatac

SEQ ID NO: 1412812 - DNA, 15 bp, Homo sapiens
caaatgtaatatacc

SEQ ID NO: 1412813 - DNA, 15 bp, Homo sapiens
aaatgtaatataccc

SEQ ID NO: 1412814 - DNA, 15 bp, Homo sapiens
aatgtaatataccca

SEQ ID NO: 1412815 - DNA, 15 bp, Homo sapiens
atgtaatatacccaa

SEQ ID NO: 1412816 - DNA, 15 bp, Homo sapiens
tgtaatatacccaat

SEQ ID NO: 1412817 - DNA, 15 bp, Homo sapiens
gtaatatacccaata

SEQ ID NO: 1412818 - DNA, 15 bp, Homo sapiens
taatatacccaatag

SEQ ID NO: 1412819 - DNA, 15 bp, Homo sapiens
aatatacccaatagt

SEQ ID NO: 1412820 - DNA, 15 bp, Homo sapiens
atatacccaatagtc

SEQ ID NO: 1412821 - DNA, 15 bp, Homo sapiens
tatacccaatagtca

SEQ ID NO: 1412822 - DNA, 15 bp, Homo sapiens
atacccaatagtcaa

SEQ ID NO: 1412823 - DNA, 15 bp, Homo sapiens
tacccaatagtcaaa

SEQ ID NO: 1412824 - DNA, 15 bp, Homo sapiens
acccaatagtcaaac

SEQ ID NO: 1412825 - DNA, 15 bp, Homo sapiens
cccaatagtcaaaca

SEQ ID NO: 1412826 - DNA, 15 bp, Homo sapiens
ccaatagtcaaacat

SEQ ID NO: 1412827 - DNA, 15 bp, Homo sapiens
caatagtcaaacatg

SEQ ID NO: 1412828 - DNA, 15 bp, Homo sapiens
aatagtcaaacatgt

SEQ ID NO: 1412829 - DNA, 15 bp, Homo sapiens
atagtcaaacatgtg

SEQ ID NO: 1412830 - DNA, 15 bp, Homo sapiens
tagtcaaacatgtgc

SEQ ID NO: 1412831 - DNA, 15 bp, Homo sapiens
agtcaaacatgtgcc

SEQ ID NO: 1412832 - DNA, 15 bp, Homo sapiens
gtcaaacatgtgccc

SEQ ID NO: 1412833 - DNA, 15 bp, Homo sapiens
tcaaacatgtgcccc

SEQ ID NO: 1412834 - DNA, 15 bp, Homo sapiens
caaacatgtgcccca

SEQ ID NO: 1412835 - DNA, 15 bp, Homo sapiens
aaacatgtgccccag

SEQ ID NO: 1412836 - DNA, 15 bp, Homo sapiens
aacatgtgccccagg

SEQ ID NO: 1412837 - DNA, 15 bp, Homo sapiens
acatgtgccccagga

SEQ ID NO: 1412838 - DNA, 15 bp, Homo sapiens
catgtgccccaggag

SEQ ID NO: 1412839 - DNA, 15 bp, Homo sapiens
atgtgccccaggaga

SEQ ID NO: 1412840 - DNA, 15 bp, Homo sapiens
tgtgccccaggagag

SEQ ID NO: 1412841 - DNA, 15 bp, Homo sapiens
gtgccccaggagagg

SEQ ID NO: 1412842 - DNA, 15 bp, Homo sapiens
tgccccaggagaggg

SEQ ID NO: 1412843 - DNA, 15 bp, Homo sapiens
gccccaggagagggg

SEQ ID NO: 1412844 - DNA, 15 bp, Homo sapiens
ccccaggagaggggt

SEQ ID NO: 1412845 - DNA, 15 bp, Homo sapiens
cccaggagaggggta

SEQ ID NO: 1412846 - DNA, 15 bp, Homo sapiens
ccaggagaggggtag

SEQ ID NO: 1412847 - DNA, 15 bp, Homo sapiens
caggagaggggtaga

SEQ ID NO: 1412848 - DNA, 15 bp, Homo sapiens
aggagaggggtagag

SEQ ID NO: 1412849 - DNA, 15 bp, Homo sapiens
ggagaggggtagagg

SEQ ID NO: 1412850 - DNA, 15 bp, Homo sapiens
gagaggggtagagga

SEQ ID NO: 1412851 - DNA, 15 bp, Homo sapiens
agaggggtagaggaa

SEQ ID NO: 1412852 - DNA, 15 bp, Homo sapiens
gaggggtagaggaag

SEQ ID NO: 1412853 - DNA, 15 bp, Homo sapiens
aggggtagaggaaga

SEQ ID NO: 1412854 - DNA, 15 bp, Homo sapiens
ggggtagaggaagaa

SEQ ID NO: 1412855 - DNA, 15 bp, Homo sapiens
gggtagaggaagaaa

SEQ ID NO: 1412856 - DNA, 15 bp, Homo sapiens
ggtagaggaagaaag

SEQ ID NO: 1412857 - DNA, 15 bp, Homo sapiens
gtagaggaagaaaga

SEQ ID NO: 1412858 - DNA, 15 bp, Homo sapiens
tagaggaagaaagag

SEQ ID NO: 1412859 - DNA, 15 bp, Homo sapiens
agaggaagaaagaga

SEQ ID NO: 1412860 - DNA, 15 bp, Homo sapiens
gaggaagaaagagaa

SEQ ID NO: 1412861 - DNA, 15 bp, Homo sapiens
aggaagaaagagaat

SEQ ID NO: 1412862 - DNA, 15 bp, Homo sapiens
ggaagaaagagaatg

SEQ ID NO: 1412863 - DNA, 15 bp, Homo sapiens
gaagaaagagaatga

SEQ ID NO: 1412864 - DNA, 15 bp, Homo sapiens
aagaaagagaatgag

SEQ ID NO: 1412865 - DNA, 15 bp, Homo sapiens
agaaagagaatgaga

SEQ ID NO: 1412866 - DNA, 15 bp, Homo sapiens
gaaagagaatgagag

SEQ ID NO: 1412867 - DNA, 15 bp, Homo sapiens
aaagagaatgagaga

SEQ ID NO: 1412868 - DNA, 15 bp, Homo sapiens
aagagaatgagagag

SEQ ID NO: 1412869 - DNA, 15 bp, Homo sapiens
agagaatgagagagt

SEQ ID NO: 1412870 - DNA, 15 bp, Homo sapiens
gagaatgagagagta

SEQ ID NO: 1412871 - DNA, 15 bp, Homo sapiens
agaatgagagagtaa

SEQ ID NO: 1412872 - DNA, 15 bp, Homo sapiens
gaatgagagagtaag

SEQ ID NO: 1412873 - DNA, 15 bp, Homo sapiens
aatgagagagtaaga

SEQ ID NO: 1412874 - DNA, 15 bp, Homo sapiens
atgagagagtaagaa

SEQ ID NO: 1412875 - DNA, 15 bp, Homo sapiens
tgagagagtaagaag

SEQ ID NO: 1412876 - DNA, 15 bp, Homo sapiens
gagagagtaagaagg

SEQ ID NO: 1412877 - DNA, 15 bp, Homo sapiens
agagagtaagaagga

SEQ ID NO: 1412878 - DNA, 15 bp, Homo sapiens
gagagtaagaaggag

SEQ ID NO: 1412879 - DNA, 15 bp, Homo sapiens
agagtaagaaggagg

SEQ ID NO: 1412880 - DNA, 15 bp, Homo sapiens
gagtaagaaggagga

SEQ ID NO: 1412881 - DNA, 15 bp, Homo sapiens
agtaagaaggaggaa

SEQ ID NO: 1412882 - DNA, 15 bp, Homo sapiens
gtaagaaggaggaat

SEQ ID NO: 1412883 - DNA, 15 bp, Homo sapiens
taagaaggaggaata

SEQ ID NO: 1412884 - DNA, 15 bp, Homo sapiens
aagaaggaggaatag

SEQ ID NO: 1412885 - DNA, 15 bp, Homo sapiens
agaaggaggaataga

SEQ ID NO: 1412886 - DNA, 15 bp, Homo sapiens
gaaggaggaatagac

SEQ ID NO: 1412887 - DNA, 15 bp, Homo sapiens
aaggaggaatagaca

SEQ ID NO: 1412888 - DNA, 15 bp, Homo sapiens
aggaggaatagacac

SEQ ID NO: 1412889 - DNA, 15 bp, Homo sapiens
ggaggaatagacaca

SEQ ID NO: 1412890 - DNA, 15 bp, Homo sapiens
gaggaatagacacag

SEQ ID NO: 1412891 - DNA, 15 bp, Homo sapiens
aggaatagacacaga

SEQ ID NO: 1412892 - DNA, 15 bp, Homo sapiens
ggaatagacacagaa

SEQ ID NO: 1412893 - DNA, 15 bp, Homo sapiens
gaatagacacagaaa

SEQ ID NO: 1412894 - DNA, 15 bp, Homo sapiens
aatagacacagaaaa

SEQ ID NO: 1412895 - DNA, 15 bp, Homo sapiens
atagacacagaaaat

SEQ ID NO: 1412896 - DNA, 15 bp, Homo sapiens
tagacacagaaaatg

SEQ ID NO: 1412897 - DNA, 15 bp, Homo sapiens
agacacagaaaatga

SEQ ID NO: 1412898 - DNA, 15 bp, Homo sapiens
gacacagaaaatgag

SEQ ID NO: 1412899 - DNA, 15 bp, Homo sapiens
acacagaaaatgaga

SEQ ID NO: 1412900 - DNA, 15 bp, Homo sapiens
cacagaaaatgagag

SEQ ID NO: 1412901 - DNA, 15 bp, Homo sapiens
acagaaaatgagaga

SEQ ID NO: 1412902 - DNA, 15 bp, Homo sapiens
cagaaaatgagagag

SEQ ID NO: 1412903 - DNA, 15 bp, Homo sapiens
agaaaatgagagaga

SEQ ID NO: 1412904 - DNA, 15 bp, Homo sapiens
gaaaatgagagagaa

SEQ ID NO: 1412905 - DNA, 15 bp, Homo sapiens
aaaatgagagagaag

SEQ ID NO: 1412906 - DNA, 15 bp, Homo sapiens
aaatgagagagaagg

SEQ ID NO: 1412907 - DNA, 15 bp, Homo sapiens
aatgagagagaaggg

SEQ ID NO: 1412908 - DNA, 15 bp, Homo sapiens
atgagagagaagggg

SEQ ID NO: 1412909 - DNA, 15 bp, Homo sapiens
tgagagagaaggggg

SEQ ID NO: 1412910 - DNA, 15 bp, Homo sapiens
gagagagaagggggg

SEQ ID NO: 1412911 - DNA, 15 bp, Homo sapiens
agagagaagggggga

SEQ ID NO: 1412912 - DNA, 15 bp, Homo sapiens
gagagaaggggggaa

SEQ ID NO: 1412913 - DNA, 15 bp, Homo sapiens
agagaaggggggaaa

SEQ ID NO: 1412914 - DNA, 15 bp, Homo sapiens
gagaaggggggaaag

SEQ ID NO: 1412915 - DNA, 15 bp, Homo sapiens
agaaggggggaaaga

SEQ ID NO: 1412916 - DNA, 15 bp, Homo sapiens
gaaggggggaaagaa

SEQ ID NO: 1412917 - DNA, 15 bp, Homo sapiens
aaggggggaaagaaa

SEQ ID NO: 1412918 - DNA, 15 bp, Homo sapiens
aggggggaaagaaaa

SEQ ID NO: 1412919 - DNA, 15 bp, Homo sapiens
ggggggaaagaaaaa

SEQ ID NO: 1412920 - DNA, 15 bp, Homo sapiens
gggggaaagaaaaag

SEQ ID NO: 1412921 - DNA, 15 bp, Homo sapiens
ggggaaagaaaaaga

SEQ ID NO: 1412922 - DNA, 15 bp, Homo sapiens
gggaaagaaaaagaa

SEQ ID NO: 1412923 - DNA, 15 bp, Homo sapiens
ggaaagaaaaagaag

SEQ ID NO: 1412924 - DNA, 15 bp, Homo sapiens
gaaagaaaaagaaga

SEQ ID NO: 1412925 - DNA, 15 bp, Homo sapiens
gaaaaagaagaaagg

SEQ ID NO: 1412926 - DNA, 15 bp, Homo sapiens
aaaaagaagaaagga

SEQ ID NO: 1412927 - DNA, 15 bp, Homo sapiens
aaaagaagaaaggag

SEQ ID NO: 1412928 - DNA, 15 bp, Homo sapiens
aaagaagaaaggagc

SEQ ID NO: 1412929 - DNA, 15 bp, Homo sapiens
aagaagaaaggagcc

SEQ ID NO: 1412930 - DNA, 15 bp, Homo sapiens
agaagaaaggagcca

SEQ ID NO: 1412931 - DNA, 15 bp, Homo sapiens
gaagaaaggagccag

SEQ ID NO: 1412932 - DNA, 15 bp, Homo sapiens
aagaaaggagccaga

SEQ ID NO: 1412933 - DNA, 15 bp, Homo sapiens
agaaaggagccagag

SEQ ID NO: 1412934 - DNA, 15 bp, Homo sapiens
gaaaggagccagagg

SEQ ID NO: 1412935 - DNA, 15 bp, Homo sapiens
aaaggagccagagga

SEQ ID NO: 1412936 - DNA, 15 bp, Homo sapiens
aaggagccagaggag

SEQ ID NO: 1412937 - DNA, 15 bp, Homo sapiens
aggagccagaggaga

SEQ ID NO: 1412938 - DNA, 15 bp, Homo sapiens
ggagccagaggagag

SEQ ID NO: 1412939 - DNA, 15 bp, Homo sapiens
gagccagaggagaga

SEQ ID NO: 1412940 - DNA, 15 bp, Homo sapiens
agccagaggagagaa

SEQ ID NO: 1412941 - DNA, 15 bp, Homo sapiens
gccagaggagagaag

SEQ ID NO: 1412942 - DNA, 15 bp, Homo sapiens
ccagaggagagaagc

SEQ ID NO: 1412943 - DNA, 15 bp, Homo sapiens
cagaggagagaagct

SEQ ID NO: 1412944 - DNA, 15 bp, Homo sapiens
agaggagagaagctg

SEQ ID NO: 1412945 - DNA, 15 bp, Homo sapiens
gaggagagaagctgg

SEQ ID NO: 1412946 - DNA, 15 bp, Homo sapiens
aggagagaagctggt

SEQ ID NO: 1412947 - DNA, 15 bp, Homo sapiens
ggagagaagctggtt

SEQ ID NO: 1412948 - DNA, 15 bp, Homo sapiens
gagagaagctggtta

SEQ ID NO: 1412949 - DNA, 15 bp, Homo sapiens
agagaagctggttag

SEQ ID NO: 1412950 - DNA, 15 bp, Homo sapiens
gagaagctggttagc

SEQ ID NO: 1412951 - DNA, 15 bp, Homo sapiens
agaagctggttagca

SEQ ID NO: 1412952 - DNA, 15 bp, Homo sapiens
gaagctggttagcat

SEQ ID NO: 1412953 - DNA, 15 bp, Homo sapiens
aagctggttagcatt

SEQ ID NO: 1412954 - DNA, 15 bp, Homo sapiens
agctggttagcattg

SEQ ID NO: 1412955 - DNA, 15 bp, Homo sapiens
gctggttagcattga

SEQ ID NO: 1412956 - DNA, 15 bp, Homo sapiens
ctggttagcattgaa

SEQ ID NO: 1412957 - DNA, 15 bp, Homo sapiens
tggttagcattgaat

SEQ ID NO: 1412958 - DNA, 15 bp, Homo sapiens
ggttagcattgaatg

SEQ ID NO: 1412959 - DNA, 15 bp, Homo sapiens
gttagcattgaatgg

SEQ ID NO: 1412960 - DNA, 15 bp, Homo sapiens
ttagcattgaatgga

SEQ ID NO: 1412961 - DNA, 15 bp, Homo sapiens
tagcattgaatggag

SEQ ID NO: 1412962 - DNA, 15 bp, Homo sapiens
agcattgaatggagc

SEQ ID NO: 1412963 - DNA, 15 bp, Homo sapiens
gcattgaatggagca

SEQ ID NO: 1412964 - DNA, 15 bp, Homo sapiens
cattgaatggagcaa

SEQ ID NO: 1412965 - DNA, 15 bp, Homo sapiens
attgaatggagcaat

SEQ ID NO: 1412966 - DNA, 15 bp, Homo sapiens
ttgaatggagcaatc

SEQ ID NO: 1412967 - DNA, 15 bp, Homo sapiens
tgaatggagcaatct

SEQ ID NO: 1412968 - DNA, 15 bp, Homo sapiens
gaatggagcaatctg

SEQ ID NO: 1412969 - DNA, 15 bp, Homo sapiens
aatggagcaatctgt

SEQ ID NO: 1412970 - DNA, 15 bp, Homo sapiens
atggagcaatctgtg

SEQ ID NO: 1412971 - DNA, 15 bp, Homo sapiens
tggagcaatctgtgt

SEQ ID NO: 1412972 - DNA, 15 bp, Homo sapiens
ggagcaatctgtgtc

SEQ ID NO: 1412973 - DNA, 15 bp, Homo sapiens
gagcaatctgtgtca

SEQ ID NO: 1412974 - DNA, 15 bp, Homo sapiens
agcaatctgtgtcat

SEQ ID NO: 1412975 - DNA, 15 bp, Homo sapiens
gcaatctgtgtcatc

SEQ ID NO: 1412976 - DNA, 15 bp, Homo sapiens
caatctgtgtcatcg

SEQ ID NO: 1412977 - DNA, 15 bp, Homo sapiens
aatctgtgtcatcgt

SEQ ID NO: 1412978 - DNA, 15 bp, Homo sapiens
atctgtgtcatcgta

SEQ ID NO: 1412979 - DNA, 15 bp, Homo sapiens
tctgtgtcatcgtac

SEQ ID NO: 1412980 - DNA, 15 bp, Homo sapiens
ctgtgtcatcgtact

SEQ ID NO: 1412981 - DNA, 15 bp, Homo sapiens
tgtgtcatcgtactt

SEQ ID NO: 1412982 - DNA, 15 bp, Homo sapiens
gtgtcatcgtacttg

SEQ ID NO: 1412983 - DNA, 15 bp, Homo sapiens
tgtcatcgtacttgg

SEQ ID NO: 1412984 - DNA, 15 bp, Homo sapiens
gtcatcgtacttggg

SEQ ID NO: 1412985 - DNA, 15 bp, Homo sapiens
tcatcgtacttggga

SEQ ID NO: 1412986 - DNA, 15 bp, Homo sapiens
catcgtacttgggaa

SEQ ID NO: 1412987 - DNA, 15 bp, Homo sapiens
atcgtacttgggaaa

SEQ ID NO: 1412988 - DNA, 15 bp, Homo sapiens
tcgtacttgggaaac

SEQ ID NO: 1412989 - DNA, 15 bp, Homo sapiens
cgtacttgggaaacc

SEQ ID NO: 1412990 - DNA, 15 bp, Homo sapiens
gtacttgggaaaccc

SEQ ID NO: 1412991 - DNA, 15 bp, Homo sapiens
tacttgggaaaccca

SEQ ID NO: 1412992 - DNA, 15 bp, Homo sapiens
acttgggaaacccaa

SEQ ID NO: 1412993 - DNA, 15 bp, Homo sapiens
cttgggaaacccaag

SEQ ID NO: 1412994 - DNA, 15 bp, Homo sapiens
ttgggaaacccaagg

SEQ ID NO: 1412995 - DNA, 15 bp, Homo sapiens
tgggaaacccaagga

SEQ ID NO: 1412996 - DNA, 15 bp, Homo sapiens
gggaaacccaaggat

SEQ ID NO: 1412997 - DNA, 15 bp, Homo sapiens
ggaaacccaaggatg

SEQ ID NO: 1412998 - DNA, 15 bp, Homo sapiens
gaaacccaaggatgg

SEQ ID NO: 1412999 - DNA, 15 bp, Homo sapiens
aaacccaaggatgga

SEQ ID NO: 1413000 - DNA, 15 bp, Homo sapiens
aacccaaggatggat

SEQ ID NO: 1413001 - DNA, 15 bp, Homo sapiens
acccaaggatggatt

SEQ ID NO: 1413002 - DNA, 15 bp, Homo sapiens
cccaaggatggattc

SEQ ID NO: 1413003 - DNA, 15 bp, Homo sapiens
ccaaggatggattct

SEQ ID NO: 1413004 - DNA, 15 bp, Homo sapiens
caaggatggattctt

SEQ ID NO: 1413005 - DNA, 15 bp, Homo sapiens
aaggatggattcttg

SEQ ID NO: 1413006 - DNA, 15 bp, Homo sapiens
aggatggattcttgg

SEQ ID NO: 1413007 - DNA, 15 bp, Homo sapiens
ggatggattcttggc

SEQ ID NO: 1413008 - DNA, 15 bp, Homo sapiens
gatggattcttggca

SEQ ID NO: 1413009 - DNA, 15 bp, Homo sapiens
atggattcttggcaa

SEQ ID NO: 1413010 - DNA, 15 bp, Homo sapiens
tggattcttggcaag

SEQ ID NO: 1413011 - DNA, 15 bp, Homo sapiens
ggattcttggcaagt

SEQ ID NO: 1413012 - DNA, 15 bp, Homo sapiens
gattcttggcaagtc

SEQ ID NO: 1413013 - DNA, 15 bp, Homo sapiens
attcttggcaagtcg

SEQ ID NO: 1413014 - DNA, 15 bp, Homo sapiens
ttcttggcaagtcga

SEQ ID NO: 1413015 - DNA, 15 bp, Homo sapiens
tcttggcaagtcgac

SEQ ID NO: 1413016 - DNA, 15 bp, Homo sapiens
cttggcaagtcgact

SEQ ID NO: 1413017 - DNA, 15 bp, Homo sapiens
ttggcaagtcgactc

SEQ ID NO: 1413018 - DNA, 15 bp, Homo sapiens
tggcaagtcgactct

SEQ ID NO: 1413019 - DNA, 15 bp, Homo sapiens
ggcaagtcgactctt

SEQ ID NO: 1413020 - DNA, 15 bp, Homo sapiens
gcaagtcgactcttg

SEQ ID NO: 1413021 - DNA, 15 bp, Homo sapiens
caagtcgactcttgg

SEQ ID NO: 1413022 - DNA, 15 bp, Homo sapiens
aagtcgactcttgga

SEQ ID NO: 1413023 - DNA, 15 bp, Homo sapiens
agtcgactcttggag

SEQ ID NO: 1413024 - DNA, 15 bp, Homo sapiens
gtcgactcttggagc

SEQ ID NO: 1413025 - DNA, 15 bp, Homo sapiens
tcgactcttggagct

SEQ ID NO: 1413026 - DNA, 15 bp, Homo sapiens
cgactcttggagctt

SEQ ID NO: 1413027 - DNA, 15 bp, Homo sapiens
gactcttggagcttt

SEQ ID NO: 1413028 - DNA, 15 bp, Homo sapiens
actcttggagctttc

SEQ ID NO: 1413029 - DNA, 15 bp, Homo sapiens
ctcttggagctttcc

SEQ ID NO: 1413030 - DNA, 15 bp, Homo sapiens
tcttggagctttccc

SEQ ID NO: 1413031 - DNA, 15 bp, Homo sapiens
cttggagctttccct

SEQ ID NO: 1413032 - DNA, 15 bp, Homo sapiens
ttggagctttccctg

SEQ ID NO: 1413033 - DNA, 15 bp, Homo sapiens
tggagctttccctgt

SEQ ID NO: 1413034 - DNA, 15 bp, Homo sapiens
ggagctttccctgtg

SEQ ID NO: 1413035 - DNA, 15 bp, Homo sapiens
gagctttccctgtgc

SEQ ID NO: 1413036 - DNA, 15 bp, Homo sapiens
agctttccctgtgct

SEQ ID NO: 1413037 - DNA, 15 bp, Homo sapiens
gctttccctgtgctt

SEQ ID NO: 1413038 - DNA, 15 bp, Homo sapiens
ctttccctgtgcttg

SEQ ID NO: 1413039 - DNA, 15 bp, Homo sapiens
tttccctgtgcttgg

SEQ ID NO: 1413040 - DNA, 15 bp, Homo sapiens
ttccctgtgcttggt

SEQ ID NO: 1413041 - DNA, 15 bp, Homo sapiens
tccctgtgcttggtc

SEQ ID NO: 1413042 - DNA, 15 bp, Homo sapiens
ccctgtgcttggtcc

SEQ ID NO: 1413043 - DNA, 15 bp, Homo sapiens
cctgtgcttggtcct

SEQ ID NO: 1413044 - DNA, 15 bp, Homo sapiens
ctgtgcttggtcctg

SEQ ID NO: 1413045 - DNA, 15 bp, Homo sapiens
tgtgcttggtcctgt

SEQ ID NO: 1413046 - DNA, 15 bp, Homo sapiens
gtgcttggtcctgtg

SEQ ID NO: 1413047 - DNA, 15 bp, Homo sapiens
tgcttggtcctgtgc

SEQ ID NO: 1413048 - DNA, 15 bp, Homo sapiens
gcttggtcctgtgct

SEQ ID NO: 1413049 - DNA, 15 bp, Homo sapiens
cttggtcctgtgctc

SEQ ID NO: 1413050 - DNA, 15 bp, Homo sapiens
ttggtcctgtgctca

SEQ ID NO: 1413051 - DNA, 15 bp, Homo sapiens
tggtcctgtgctcag

SEQ ID NO: 1413052 - DNA, 15 bp, Homo sapiens
ggtcctgtgctcaga

SEQ ID NO: 1413053 - DNA, 15 bp, Homo sapiens
gtcctgtgctcagac

SEQ ID NO: 1413054 - DNA, 15 bp, Homo sapiens
tcctgtgctcagaca

SEQ ID NO: 1413055 - DNA, 15 bp, Homo sapiens
cctgtgctcagacat

SEQ ID NO: 1413056 - DNA, 15 bp, Homo sapiens
ctgtgctcagacatg

SEQ ID NO: 1413057 - DNA, 15 bp, Homo sapiens
tgtgctcagacatgg

SEQ ID NO: 1413058 - DNA, 15 bp, Homo sapiens
gtgctcagacatggg

SEQ ID NO: 1413059 - DNA, 15 bp, Homo sapiens
tgctcagacatggga

SEQ ID NO: 1413060 - DNA, 15 bp, Homo sapiens
gctcagacatgggaa

SEQ ID NO: 1413061 - DNA, 15 bp, Homo sapiens
ctcagacatgggaaa

SEQ ID NO: 1413062 - DNA, 15 bp, Homo sapiens
tcagacatgggaaaa

SEQ ID NO: 1413063 - DNA, 15 bp, Homo sapiens
cagacatgggaaaat

SEQ ID NO: 1413064 - DNA, 15 bp, Homo sapiens
agacatgggaaaatt

SEQ ID NO: 1413065 - DNA, 15 bp, Homo sapiens
gacatgggaaaatta

SEQ ID NO: 1413066 - DNA, 15 bp, Homo sapiens
acatgggaaaattag

SEQ ID NO: 1413067 - DNA, 15 bp, Homo sapiens
catgggaaaattaga

SEQ ID NO: 1413068 - DNA, 15 bp, Homo sapiens
atgggaaaattagag

SEQ ID NO: 1413069 - DNA, 15 bp, Homo sapiens
tgggaaaattagagg

SEQ ID NO: 1413070 - DNA, 15 bp, Homo sapiens
gggaaaattagagga

SEQ ID NO: 1413071 - DNA, 15 bp, Homo sapiens
ggaaaattagaggag

SEQ ID NO: 1413072 - DNA, 15 bp, Homo sapiens
gaaaattagaggagt

SEQ ID NO: 1413073 - DNA, 15 bp, Homo sapiens
aaaattagaggagtg

SEQ ID NO: 1413074 - DNA, 15 bp, Homo sapiens
aaattagaggagtgt

SEQ ID NO: 1413075 - DNA, 15 bp, Homo sapiens
aattagaggagtgtc

SEQ ID NO: 1413076 - DNA, 15 bp, Homo sapiens
attagaggagtgtca

SEQ ID NO: 1413077 - DNA, 15 bp, Homo sapiens
ttagaggagtgtcat

SEQ ID NO: 1413078 - DNA, 15 bp, Homo sapiens
tagaggagtgtcatc

SEQ ID NO: 1413079 - DNA, 15 bp, Homo sapiens
agaggagtgtcatct

SEQ ID NO: 1413080 - DNA, 15 bp, Homo sapiens
gaggagtgtcatctg

SEQ ID NO: 1413081 - DNA, 15 bp, Homo sapiens
aggagtgtcatctgt

SEQ ID NO: 1413082 - DNA, 15 bp, Homo sapiens
ggagtgtcatctgtg

SEQ ID NO: 1413083 - DNA, 15 bp, Homo sapiens
gagtgtcatctgtgc

SEQ ID NO: 1413084 - DNA, 15 bp, Homo sapiens
agtgtcatctgtgca

SEQ ID NO: 1413085 - DNA, 15 bp, Homo sapiens
gtgtcatctgtgcaa

SEQ ID NO: 1413086 - DNA, 15 bp, Homo sapiens
tgtcatctgtgcaat

SEQ ID NO: 1413087 - DNA, 15 bp, Homo sapiens
gtcatctgtgcaatc

SEQ ID NO: 1413088 - DNA, 15 bp, Homo sapiens
tcatctgtgcaatca

SEQ ID NO: 1413089 - DNA, 15 bp, Homo sapiens
catctgtgcaatcac

SEQ ID NO: 1413090 - DNA, 15 bp, Homo sapiens
atctgtgcaatcact

SEQ ID NO: 1413091 - DNA, 15 bp, Homo sapiens
tctgtgcaatcactg

SEQ ID NO: 1413092 - DNA, 15 bp, Homo sapiens
ctgtgcaatcactga

SEQ ID NO: 1413093 - DNA, 15 bp, Homo sapiens
tgtgcaatcactgaa

SEQ ID NO: 1413094 - DNA, 15 bp, Homo sapiens
gtgcaatcactgaat

SEQ ID NO: 1413095 - DNA, 15 bp, Homo sapiens
tgcaatcactgaatt

SEQ ID NO: 1413096 - DNA, 15 bp, Homo sapiens
gcaatcactgaattc

SEQ ID NO: 1413097 - DNA, 15 bp, Homo sapiens
caatcactgaattca

SEQ ID NO: 1413098 - DNA, 15 bp, Homo sapiens
aatcactgaattcat

SEQ ID NO: 1413099 - DNA, 15 bp, Homo sapiens
atcactgaattcata

SEQ ID NO: 1413100 - DNA, 15 bp, Homo sapiens
tcactgaattcataa

SEQ ID NO: 1413101 - DNA, 15 bp, Homo sapiens
cactgaattcataat

SEQ ID NO: 1413102 - DNA, 15 bp, Homo sapiens
actgaattcataatc

SEQ ID NO: 1413103 - DNA, 15 bp, Homo sapiens
ctgaattcataatct

SEQ ID NO: 1413104 - DNA, 15 bp, Homo sapiens
tgaattcataatctt

SEQ ID NO: 1413105 - DNA, 15 bp, Homo sapiens
gaattcataatcttg

SEQ ID NO: 1413106 - DNA, 15 bp, Homo sapiens
aattcataatcttgg

SEQ ID NO: 1413107 - DNA, 15 bp, Homo sapiens
attcataatcttggt

SEQ ID NO: 1413108 - DNA, 15 bp, Homo sapiens
ttcataatcttggtg

SEQ ID NO: 1413109 - DNA, 15 bp, Homo sapiens
tcataatcttggtga

SEQ ID NO: 1413110 - DNA, 15 bp, Homo sapiens
cataatcttggtgag

SEQ ID NO: 1413111 - DNA, 15 bp, Homo sapiens
ataatcttggtgagg

SEQ ID NO: 1413112 - DNA, 15 bp, Homo sapiens
taatcttggtgagga

SEQ ID NO: 1413113 - DNA, 15 bp, Homo sapiens
aatcttggtgaggaa

SEQ ID NO: 1413114 - DNA, 15 bp, Homo sapiens
atcttggtgaggaaa

SEQ ID NO: 1413115 - DNA, 15 bp, Homo sapiens
tcttggtgaggaaag

SEQ ID NO: 1413116 - DNA, 15 bp, Homo sapiens
cttggtgaggaaagg

SEQ ID NO: 1413117 - DNA, 15 bp, Homo sapiens
ttggtgaggaaagga

SEQ ID NO: 1413118 - DNA, 15 bp, Homo sapiens
tggtgaggaaaggag

SEQ ID NO: 1413119 - DNA, 15 bp, Homo sapiens
ggtgaggaaaggaga

SEQ ID NO: 1413120 - DNA, 15 bp, Homo sapiens
gtgaggaaaggagac

SEQ ID NO: 1413121 - DNA, 15 bp, Homo sapiens
tgaggaaaggagact

SEQ ID NO: 1413122 - DNA, 15 bp, Homo sapiens
gaggaaaggagacta

SEQ ID NO: 1413123 - DNA, 15 bp, Homo sapiens
aggaaaggagactac

SEQ ID NO: 1413124 - DNA, 15 bp, Homo sapiens
ggaaaggagactaca

SEQ ID NO: 1413125 - DNA, 15 bp, Homo sapiens
gaaaggagactacac

SEQ ID NO: 1413126 - DNA, 15 bp, Homo sapiens
aaaggagactacaca

SEQ ID NO: 1413127 - DNA, 15 bp, Homo sapiens
aaggagactacacac

SEQ ID NO: 1413128 - DNA, 15 bp, Homo sapiens
aggagactacacaca

SEQ ID NO: 1413129 - DNA, 15 bp, Homo sapiens
ggagactacacacag

SEQ ID NO: 1413130 - DNA, 15 bp, Homo sapiens
gagactacacacagg

SEQ ID NO: 1413131 - DNA, 15 bp, Homo sapiens
agactacacacaggg

SEQ ID NO: 1413132 - DNA, 15 bp, Homo sapiens
gactacacacaggga

SEQ ID NO: 1413133 - DNA, 15 bp, Homo sapiens
actacacacagggaa

SEQ ID NO: 1413134 - DNA, 15 bp, Homo sapiens
ctacacacagggaat

SEQ ID NO: 1413135 - DNA, 15 bp, Homo sapiens
tacacacagggaata

SEQ ID NO: 1413136 - DNA, 15 bp, Homo sapiens
acacacagggaataa

SEQ ID NO: 1413137 - DNA, 15 bp, Homo sapiens
cacacagggaataat

SEQ ID NO: 1413138 - DNA, 15 bp, Homo sapiens
acacagggaataatg

SEQ ID NO: 1413139 - DNA, 15 bp, Homo sapiens
cacagggaataatgc

SEQ ID NO: 1413140 - DNA, 15 bp, Homo sapiens
acagggaataatgct

SEQ ID NO: 1413141 - DNA, 15 bp, Homo sapiens
cagggaataatgcta

SEQ ID NO: 1413142 - DNA, 15 bp, Homo sapiens
agggaataatgctaa

SEQ ID NO: 1413143 - DNA, 15 bp, Homo sapiens
gggaataatgctaag

SEQ ID NO: 1413144 - DNA, 15 bp, Homo sapiens
ggaataatgctaagt

SEQ ID NO: 1413145 - DNA, 15 bp, Homo sapiens
gaataatgctaagta

SEQ ID NO: 1413146 - DNA, 15 bp, Homo sapiens
aataatgctaagtat

SEQ ID NO: 1413147 - DNA, 15 bp, Homo sapiens
ataatgctaagtatt

SEQ ID NO: 1413148 - DNA, 15 bp, Homo sapiens
taatgctaagtatta

SEQ ID NO: 1413149 - DNA, 15 bp, Homo sapiens
aatgctaagtattac

SEQ ID NO: 1413150 - DNA, 15 bp, Homo sapiens
atgctaagtattaca

SEQ ID NO: 1413151 - DNA, 15 bp, Homo sapiens
tgctaagtattacag

SEQ ID NO: 1413152 - DNA, 15 bp, Homo sapiens
gctaagtattacaga

SEQ ID NO: 1413153 - DNA, 15 bp, Homo sapiens
ctaagtattacagat

SEQ ID NO: 1413154 - DNA, 15 bp, Homo sapiens
taagtattacagatt

SEQ ID NO: 1413155 - DNA, 15 bp, Homo sapiens
aagtattacagattt

SEQ ID NO: 1413156 - DNA, 15 bp, Homo sapiens
agtattacagatttc

SEQ ID NO: 1413157 - DNA, 15 bp, Homo sapiens
gtattacagatttca

SEQ ID NO: 1413158 - DNA, 15 bp, Homo sapiens
tattacagatttcag

SEQ ID NO: 1413159 - DNA, 15 bp, Homo sapiens
attacagatttcagg

SEQ ID NO: 1413160 - DNA, 15 bp, Homo sapiens
ttacagatttcaggg

SEQ ID NO: 1413161 - DNA, 15 bp, Homo sapiens
tacagatttcagggc

SEQ ID NO: 1413162 - DNA, 15 bp, Homo sapiens
acagatttcagggca

SEQ ID NO: 1413163 - DNA, 15 bp, Homo sapiens
cagatttcagggcag

SEQ ID NO: 1413164 - DNA, 15 bp, Homo sapiens
agatttcagggcaga

SEQ ID NO: 1413165 - DNA, 15 bp, Homo sapiens
gatttcagggcagaa

SEQ ID NO: 1413166 - DNA, 15 bp, Homo sapiens
atttcagggcagaaa

SEQ ID NO: 1413167 - DNA, 15 bp, Homo sapiens
tttcagggcagaaag

SEQ ID NO: 1413168 - DNA, 15 bp, Homo sapiens
ttcagggcagaaaga

SEQ ID NO: 1413169 - DNA, 15 bp, Homo sapiens
tcagggcagaaagag

SEQ ID NO: 1413170 - DNA, 15 bp, Homo sapiens
cagggcagaaagaga

SEQ ID NO: 1413171 - DNA, 15 bp, Homo sapiens
agggcagaaagagat

SEQ ID NO: 1413172 - DNA, 15 bp, Homo sapiens
gggcagaaagagatc

SEQ ID NO: 1413173 - DNA, 15 bp, Homo sapiens
ggcagaaagagatca

SEQ ID NO: 1413174 - DNA, 15 bp, Homo sapiens
gcagaaagagatcaa

SEQ ID NO: 1413175 - DNA, 15 bp, Homo sapiens
cagaaagagatcaag

SEQ ID NO: 1413176 - DNA, 15 bp, Homo sapiens
agaaagagatcaagg

SEQ ID NO: 1413177 - DNA, 15 bp, Homo sapiens
gaaagagatcaaggt

SEQ ID NO: 1413178 - DNA, 15 bp, Homo sapiens
aaagagatcaaggtg

SEQ ID NO: 1413179 - DNA, 15 bp, Homo sapiens
aagagatcaaggtgg

SEQ ID NO: 1413180 - DNA, 15 bp, Homo sapiens
agagatcaaggtggg

SEQ ID NO: 1413181 - DNA, 15 bp, Homo sapiens
gagatcaaggtgggc

SEQ ID NO: 1413182 - DNA, 15 bp, Homo sapiens
agatcaaggtgggct

SEQ ID NO: 1413183 - DNA, 15 bp, Homo sapiens
gatcaaggtgggctg

SEQ ID NO: 1413184 - DNA, 15 bp, Homo sapiens
atcaaggtgggctgc

SEQ ID NO: 1413185 - DNA, 15 bp, Homo sapiens
tcaaggtgggctgca

SEQ ID NO: 1413186 - DNA, 15 bp, Homo sapiens
caaggtgggctgcaa

SEQ ID NO: 1413187 - DNA, 15 bp, Homo sapiens
aaggtgggctgcaat

SEQ ID NO: 1413188 - DNA, 15 bp, Homo sapiens
aggtgggctgcaata

SEQ ID NO: 1413189 - DNA, 15 bp, Homo sapiens
ggtgggctgcaatat

SEQ ID NO: 1413190 - DNA, 15 bp, Homo sapiens
gtgggctgcaatatt

SEQ ID NO: 1413191 - DNA, 15 bp, Homo sapiens
tgggctgcaatattc

SEQ ID NO: 1413192 - DNA, 15 bp, Homo sapiens
gggctgcaatattca

SEQ ID NO: 1413193 - DNA, 15 bp, Homo sapiens
ggctgcaatattcag

SEQ ID NO: 1413194 - DNA, 15 bp, Homo sapiens
gctgcaatattcaga

SEQ ID NO: 1413195 - DNA, 15 bp, Homo sapiens
ctgcaatattcagaa

SEQ ID NO: 1413196 - DNA, 15 bp, Homo sapiens
tgcaatattcagaaa

SEQ ID NO: 1413197 - DNA, 15 bp, Homo sapiens
gcaatattcagaaaa

SEQ ID NO: 1413198 - DNA, 15 bp, Homo sapiens
caatattcagaaaag

SEQ ID NO: 1413199 - DNA, 15 bp, Homo sapiens
aatattcagaaaagt

SEQ ID NO: 1413200 - DNA, 15 bp, Homo sapiens
atattcagaaaagtc

SEQ ID NO: 1413201 - DNA, 15 bp, Homo sapiens
tattcagaaaagtct

SEQ ID NO: 1413202 - DNA, 15 bp, Homo sapiens
attcagaaaagtctt

SEQ ID NO: 1413203 - DNA, 15 bp, Homo sapiens
ttcagaaaagtcttc

SEQ ID NO: 1413204 - DNA, 15 bp, Homo sapiens
tcagaaaagtcttcc

SEQ ID NO: 1413205 - DNA, 15 bp, Homo sapiens
cagaaaagtcttcct

SEQ ID NO: 1413206 - DNA, 15 bp, Homo sapiens
agaaaagtcttcctg

SEQ ID NO: 1413207 - DNA, 15 bp, Homo sapiens
gaaaagtcttcctgg

SEQ ID NO: 1413208 - DNA, 15 bp, Homo sapiens
aaaagtcttcctgga

SEQ ID NO: 1413209 - DNA, 15 bp, Homo sapiens
aaagtcttcctggaa

SEQ ID NO: 1413210 - DNA, 15 bp, Homo sapiens
aagtcttcctggaaa

SEQ ID NO: 1413211 - DNA, 15 bp, Homo sapiens
agtcttcctggaaaa

SEQ ID NO: 1413212 - DNA, 15 bp, Homo sapiens
gtcttcctggaaaag

SEQ ID NO: 1413213 - DNA, 15 bp, Homo sapiens
tcttcctggaaaagt

SEQ ID NO: 1413214 - DNA, 15 bp, Homo sapiens
cttcctggaaaagtt

SEQ ID NO: 1413215 - DNA, 15 bp, Homo sapiens
ttcctggaaaagttg

SEQ ID NO: 1413216 - DNA, 15 bp, Homo sapiens
tcctggaaaagttga

SEQ ID NO: 1413217 - DNA, 15 bp, Homo sapiens
cctggaaaagttgaa

SEQ ID NO: 1413218 - DNA, 15 bp, Homo sapiens
ctggaaaagttgaat

SEQ ID NO: 1413219 - DNA, 15 bp, Homo sapiens
tggaaaagttgaata

SEQ ID NO: 1413220 - DNA, 15 bp, Homo sapiens
ggaaaagttgaatac

SEQ ID NO: 1413221 - DNA, 15 bp, Homo sapiens
gaaaagttgaatact

SEQ ID NO: 1413222 - DNA, 15 bp, Homo sapiens
aaaagttgaatactt

SEQ ID NO: 1413223 - DNA, 15 bp, Homo sapiens
aaagttgaatactta

SEQ ID NO: 1413224 - DNA, 15 bp, Homo sapiens
aagttgaatacttag

SEQ ID NO: 1413225 - DNA, 15 bp, Homo sapiens
agttgaatacttaga

SEQ ID NO: 1413226 - DNA, 15 bp, Homo sapiens
gttgaatacttagaa

SEQ ID NO: 1413227 - DNA, 15 bp, Homo sapiens
ttgaatacttagaaa

SEQ ID NO: 1413228 - DNA, 15 bp, Homo sapiens
tgaatacttagaaag

SEQ ID NO: 1413229 - DNA, 15 bp, Homo sapiens
gaatacttagaaagc

SEQ ID NO: 1413230 - DNA, 15 bp, Homo sapiens
aatacttagaaagca

SEQ ID NO: 1413231 - DNA, 15 bp, Homo sapiens
atacttagaaagcag

SEQ ID NO: 1413232 - DNA, 15 bp, Homo sapiens
tacttagaaagcagc

SEQ ID NO: 1413233 - DNA, 15 bp, Homo sapiens
acttagaaagcagct

SEQ ID NO: 1413234 - DNA, 15 bp, Homo sapiens
cttagaaagcagctc

SEQ ID NO: 1413235 - DNA, 15 bp, Homo sapiens
ttagaaagcagctcc

SEQ ID NO: 1413236 - DNA, 15 bp, Homo sapiens
tagaaagcagctcct

SEQ ID NO: 1413237 - DNA, 15 bp, Homo sapiens
agaaagcagctccta

SEQ ID NO: 1413238 - DNA, 15 bp, Homo sapiens
gaaagcagctcctag

SEQ ID NO: 1413239 - DNA, 15 bp, Homo sapiens
aaagcagctcctaga

SEQ ID NO: 1413240 - DNA, 15 bp, Homo sapiens
aagcagctcctagaa

SEQ ID NO: 1413241 - DNA, 15 bp, Homo sapiens
agcagctcctagaag

SEQ ID NO: 1413242 - DNA, 15 bp, Homo sapiens
gcagctcctagaagt

SEQ ID NO: 1413243 - DNA, 15 bp, Homo sapiens
cagctcctagaagta

SEQ ID NO: 1413244 - DNA, 15 bp, Homo sapiens
agctcctagaagtag

SEQ ID NO: 1413245 - DNA, 15 bp, Homo sapiens
gctcctagaagtaga

SEQ ID NO: 1413246 - DNA, 15 bp, Homo sapiens
ctcctagaagtagac

SEQ ID NO: 1413247 - DNA, 15 bp, Homo sapiens
tcctagaagtagact

SEQ ID NO: 1413248 - DNA, 15 bp, Homo sapiens
cctagaagtagactc

SEQ ID NO: 1413249 - DNA, 15 bp, Homo sapiens
ctagaagtagactct

SEQ ID NO: 1413250 - DNA, 15 bp, Homo sapiens
tagaagtagactctg

SEQ ID NO: 1413251 - DNA, 15 bp, Homo sapiens
agaagtagactctgc

SEQ ID NO: 1413252 - DNA, 15 bp, Homo sapiens
gaagtagactctgct

SEQ ID NO: 1413253 - DNA, 15 bp, Homo sapiens
aagtagactctgctg

SEQ ID NO: 1413254 - DNA, 15 bp, Homo sapiens
agtagactctgctga

SEQ ID NO: 1413255 - DNA, 15 bp, Homo sapiens
gtagactctgctgag

SEQ ID NO: 1413256 - DNA, 15 bp, Homo sapiens
tagactctgctgaga

SEQ ID NO: 1413257 - DNA, 15 bp, Homo sapiens
agactctgctgagat

SEQ ID NO: 1413258 - DNA, 15 bp, Homo sapiens
gactctgctgagatg

SEQ ID NO: 1413259 - DNA, 15 bp, Homo sapiens
actctgctgagatgg

SEQ ID NO: 1413260 - DNA, 15 bp, Homo sapiens
ctctgctgagatgga

SEQ ID NO: 1413261 - DNA, 15 bp, Homo sapiens
tctgctgagatggac

SEQ ID NO: 1413262 - DNA, 15 bp, Homo sapiens
ctgctgagatggacg

SEQ ID NO: 1413263 - DNA, 15 bp, Homo sapiens
tgctgagatggacgg

SEQ ID NO: 1413264 - DNA, 15 bp, Homo sapiens
gctgagatggacgga

SEQ ID NO: 1413265 - DNA, 15 bp, Homo sapiens
ctgagatggacggag

SEQ ID NO: 1413266 - DNA, 15 bp, Homo sapiens
tgagatggacggagt

SEQ ID NO: 1413267 - DNA, 15 bp, Homo sapiens
gagatggacggagtc

SEQ ID NO: 1413268 - DNA, 15 bp, Homo sapiens
agatggacggagtcc

SEQ ID NO: 1413269 - DNA, 15 bp, Homo sapiens
gatggacggagtcct

SEQ ID NO: 1413270 - DNA, 15 bp, Homo sapiens
atggacggagtcctt

SEQ ID NO: 1413271 - DNA, 15 bp, Homo sapiens
tggacggagtccttt

SEQ ID NO: 1413272 - DNA, 15 bp, Homo sapiens
ggacggagtcctttg

SEQ ID NO: 1413273 - DNA, 15 bp, Homo sapiens
gacggagtcctttgt

SEQ ID NO: 1413274 - DNA, 15 bp, Homo sapiens
acggagtcctttgta

SEQ ID NO: 1413275 - DNA, 15 bp, Homo sapiens
cggagtcctttgtag

SEQ ID NO: 1413276 - DNA, 15 bp, Homo sapiens
ggagtcctttgtagg

SEQ ID NO: 1413277 - DNA, 15 bp, Homo sapiens
gagtcctttgtaggt

SEQ ID NO: 1413278 - DNA, 15 bp, Homo sapiens
agtcctttgtaggtc

SEQ ID NO: 1413279 - DNA, 15 bp, Homo sapiens
gtcctttgtaggtcc

SEQ ID NO: 1413280 - DNA, 15 bp, Homo sapiens
tcctttgtaggtccc

SEQ ID NO: 1413281 - DNA, 15 bp, Homo sapiens
cctttgtaggtccca

SEQ ID NO: 1413282 - DNA, 15 bp, Homo sapiens
ctttgtaggtcccaa

SEQ ID NO: 1413283 - DNA, 15 bp, Homo sapiens
tttgtaggtcccaac

SEQ ID NO: 1413284 - DNA, 15 bp, Homo sapiens
ttgtaggtcccaact

SEQ ID NO: 1413285 - DNA, 15 bp, Homo sapiens
tgtaggtcccaactg

SEQ ID NO: 1413286 - DNA, 15 bp, Homo sapiens
gtaggtcccaactgg

SEQ ID NO: 1413287 - DNA, 15 bp, Homo sapiens
taggtcccaactggg

SEQ ID NO: 1413288 - DNA, 15 bp, Homo sapiens
aggtcccaactgggt

SEQ ID NO: 1413289 - DNA, 15 bp, Homo sapiens
ggtcccaactgggtg

SEQ ID NO: 1413290 - DNA, 15 bp, Homo sapiens
gtcccaactgggtgt

SEQ ID NO: 1413291 - DNA, 15 bp, Homo sapiens
tcccaactgggtgtg

SEQ ID NO: 1413292 - DNA, 15 bp, Homo sapiens
cccaactgggtgtgt

SEQ ID NO: 1413293 - DNA, 15 bp, Homo sapiens
ccaactgggtgtgtg

SEQ ID NO: 1413294 - DNA, 15 bp, Homo sapiens
caactgggtgtgtgt

SEQ ID NO: 1413295 - DNA, 15 bp, Homo sapiens
aactgggtgtgtgtg

SEQ ID NO: 1413296 - DNA, 15 bp, Homo sapiens
actgggtgtgtgtgt

SEQ ID NO: 1413297 - DNA, 15 bp, Homo sapiens
ctgggtgtgtgtgtg

SEQ ID NO: 1413298 - DNA, 15 bp, Homo sapiens
tgggtgtgtgtgtgg

SEQ ID NO: 1413299 - DNA, 15 bp, Homo sapiens
gggtgtgtgtgtggg

SEQ ID NO: 1413300 - DNA, 15 bp, Homo sapiens
ggtgtgtgtgtgggg

SEQ ID NO: 1413301 - DNA, 15 bp, Homo sapiens
gtgtgtgtgtggggt

SEQ ID NO: 1413302 - DNA, 15 bp, Homo sapiens
tgtgtgtgtggggtc

SEQ ID NO: 1413303 - DNA, 15 bp, Homo sapiens
gtgtgtgtggggtct

SEQ ID NO: 1413304 - DNA, 15 bp, Homo sapiens
tgtgtgtggggtctg

SEQ ID NO: 1413305 - DNA, 15 bp, Homo sapiens
gtgtgtggggtctgt

SEQ ID NO: 1413306 - DNA, 15 bp, Homo sapiens
tgtgtggggtctgtc

SEQ ID NO: 1413307 - DNA, 15 bp, Homo sapiens
gtgtggggtctgtct

SEQ ID NO: 1413308 - DNA, 15 bp, Homo sapiens
tgtggggtctgtctc

SEQ ID NO: 1413309 - DNA, 15 bp, Homo sapiens
gtggggtctgtctct

SEQ ID NO: 1413310 - DNA, 15 bp, Homo sapiens
tggggtctgtctctc

SEQ ID NO: 1413311 - DNA, 15 bp, Homo sapiens
ggggtctgtctctcc

SEQ ID NO: 1413312 - DNA, 15 bp, Homo sapiens
gggtctgtctctcca

SEQ ID NO: 1413313 - DNA, 15 bp, Homo sapiens
ggtctgtctctccat

SEQ ID NO: 1413314 - DNA, 15 bp, Homo sapiens
gtctgtctctccatg

SEQ ID NO: 1413315 - DNA, 15 bp, Homo sapiens
tctgtctctccatgg

SEQ ID NO: 1413316 - DNA, 15 bp, Homo sapiens
ctgtctctccatggc

SEQ ID NO: 1413317 - DNA, 15 bp, Homo sapiens
tgtctctccatggct

SEQ ID NO: 1413318 - DNA, 15 bp, Homo sapiens
gtctctccatggctg

SEQ ID NO: 1413319 - DNA, 15 bp, Homo sapiens
tctctccatggctga

SEQ ID NO: 1413320 - DNA, 15 bp, Homo sapiens
ctctccatggctgac

SEQ ID NO: 1413321 - DNA, 15 bp, Homo sapiens
tctccatggctgaca

SEQ ID NO: 1413322 - DNA, 15 bp, Homo sapiens
ctccatggctgacag

SEQ ID NO: 1413323 - DNA, 15 bp, Homo sapiens
tccatggctgacagt

SEQ ID NO: 1413324 - DNA, 15 bp, Homo sapiens
ccatggctgacagtg

SEQ ID NO: 1413325 - DNA, 15 bp, Homo sapiens
catggctgacagtgc

SEQ ID NO: 1413326 - DNA, 15 bp, Homo sapiens
atggctgacagtgca

SEQ ID NO: 1413327 - DNA, 15 bp, Homo sapiens
tggctgacagtgcac

SEQ ID NO: 1413328 - DNA, 15 bp, Homo sapiens
ggctgacagtgcaca

SEQ ID NO: 1413329 - DNA, 15 bp, Homo sapiens
gctgacagtgcacat

SEQ ID NO: 1413330 - DNA, 15 bp, Homo sapiens
ctgacagtgcacatg

SEQ ID NO: 1413331 - DNA, 15 bp, Homo sapiens
tgacagtgcacatgt

SEQ ID NO: 1413332 - DNA, 15 bp, Homo sapiens
gacagtgcacatgtg

SEQ ID NO: 1413333 - DNA, 15 bp, Homo sapiens
acagtgcacatgtgg

SEQ ID NO: 1413334 - DNA, 15 bp, Homo sapiens
cagtgcacatgtgga

SEQ ID NO: 1413335 - DNA, 15 bp, Homo sapiens
agtgcacatgtggat

SEQ ID NO: 1413336 - DNA, 15 bp, Homo sapiens
gtgcacatgtggatt

SEQ ID NO: 1413337 - DNA, 15 bp, Homo sapiens
tgcacatgtggattc

SEQ ID NO: 1413338 - DNA, 15 bp, Homo sapiens
gcacatgtggattcc

SEQ ID NO: 1413339 - DNA, 15 bp, Homo sapiens
cacatgtggattcca

SEQ ID NO: 1413340 - DNA, 15 bp, Homo sapiens
acatgtggattccag

SEQ ID NO: 1413341 - DNA, 15 bp, Homo sapiens
catgtggattccagg

SEQ ID NO: 1413342 - DNA, 15 bp, Homo sapiens
atgtggattccaggg

SEQ ID NO: 1413343 - DNA, 15 bp, Homo sapiens
tgtggattccagggc

SEQ ID NO: 1413344 - DNA, 15 bp, Homo sapiens
gtggattccagggct

SEQ ID NO: 1413345 - DNA, 15 bp, Homo sapiens
tggattccagggctc

SEQ ID NO: 1413346 - DNA, 15 bp, Homo sapiens
ggattccagggctca

SEQ ID NO: 1413347 - DNA, 15 bp, Homo sapiens
gattccagggctcag

SEQ ID NO: 1413348 - DNA, 15 bp, Homo sapiens
attccagggctcagg

SEQ ID NO: 1413349 - DNA, 15 bp, Homo sapiens
ttccagggctcagga

SEQ ID NO: 1413350 - DNA, 15 bp, Homo sapiens
tccagggctcaggat

SEQ ID NO: 1413351 - DNA, 15 bp, Homo sapiens
ccagggctcaggatg

SEQ ID NO: 1413352 - DNA, 15 bp, Homo sapiens
cagggctcaggatgc

SEQ ID NO: 1413353 - DNA, 15 bp, Homo sapiens
agggctcaggatgct

SEQ ID NO: 1413354 - DNA, 15 bp, Homo sapiens
gggctcaggatgctg

SEQ ID NO: 1413355 - DNA, 15 bp, Homo sapiens
ggctcaggatgctgt

SEQ ID NO: 1413356 - DNA, 15 bp, Homo sapiens
gctcaggatgctgtt

SEQ ID NO: 1413357 - DNA, 15 bp, Homo sapiens
ctcaggatgctgttg

SEQ ID NO: 1413358 - DNA, 15 bp, Homo sapiens
tcaggatgctgttgc

SEQ ID NO: 1413359 - DNA, 15 bp, Homo sapiens
caggatgctgttgct

SEQ ID NO: 1413360 - DNA, 15 bp, Homo sapiens
aggatgctgttgctg

SEQ ID NO: 1413361 - DNA, 15 bp, Homo sapiens
ggatgctgttgctgg

SEQ ID NO: 1413362 - DNA, 15 bp, Homo sapiens
gatgctgttgctggg

SEQ ID NO: 1413363 - DNA, 15 bp, Homo sapiens
atgctgttgctggga

SEQ ID NO: 1413364 - DNA, 15 bp, Homo sapiens
tgctgttgctgggag

SEQ ID NO: 1413365 - DNA, 15 bp, Homo sapiens
gctgttgctgggagc

SEQ ID NO: 1413366 - DNA, 15 bp, Homo sapiens
ctgttgctgggagct

SEQ ID NO: 1413367 - DNA, 15 bp, Homo sapiens
tgttgctgggagctg

SEQ ID NO: 1413368 - DNA, 15 bp, Homo sapiens
gttgctgggagctgt

SEQ ID NO: 1413369 - DNA, 15 bp, Homo sapiens
ttgctgggagctgtt

SEQ ID NO: 1413370 - DNA, 15 bp, Homo sapiens
tgctgggagctgttc

SEQ ID NO: 1413371 - DNA, 15 bp, Homo sapiens
gctgggagctgttct

SEQ ID NO: 1413372 - DNA, 15 bp, Homo sapiens
ctgggagctgttcta

SEQ ID NO: 1413373 - DNA, 15 bp, Homo sapiens
tgggagctgttctac

SEQ ID NO: 1413374 - DNA, 15 bp, Homo sapiens
gggagctgttctact

SEQ ID NO: 1413375 - DNA, 15 bp, Homo sapiens
ggagctgttctactg

SEQ ID NO: 1413376 - DNA, 15 bp, Homo sapiens
gagctgttctactgc

SEQ ID NO: 1413377 - DNA, 15 bp, Homo sapiens
agctgttctactgct

SEQ ID NO: 1413378 - DNA, 15 bp, Homo sapiens
gctgttctactgcta

SEQ ID NO: 1413379 - DNA, 15 bp, Homo sapiens
ctgttctactgctat

SEQ ID NO: 1413380 - DNA, 15 bp, Homo sapiens
tgttctactgctatt

SEQ ID NO: 1413381 - DNA, 15 bp, Homo sapiens
gttctactgctatta

SEQ ID NO: 1413382 - DNA, 15 bp, Homo sapiens
ttctactgctattag

SEQ ID NO: 1413383 - DNA, 15 bp, Homo sapiens
tctactgctattagc

SEQ ID NO: 1413384 - DNA, 15 bp, Homo sapiens
ctactgctattagct

SEQ ID NO: 1413385 - DNA, 15 bp, Homo sapiens
tactgctattagctc

SEQ ID NO: 1413386 - DNA, 15 bp, Homo sapiens
actgctattagctct

SEQ ID NO: 1413387 - DNA, 15 bp, Homo sapiens
ctgctattagctctg

SEQ ID NO: 1413388 - DNA, 15 bp, Homo sapiens
tgctattagctctgc

SEQ ID NO: 1413389 - DNA, 15 bp, Homo sapiens
gctattagctctgcc

SEQ ID NO: 1413390 - DNA, 15 bp, Homo sapiens
ctattagctctgccc

SEQ ID NO: 1413391 - DNA, 15 bp, Homo sapiens
tattagctctgcccg

SEQ ID NO: 1413392 - DNA, 15 bp, Homo sapiens
attagctctgcccgg

SEQ ID NO: 1413393 - DNA, 15 bp, Homo sapiens
ttagctctgcccggt

SEQ ID NO: 1413394 - DNA, 15 bp, Homo sapiens
tagctctgcccggtc

SEQ ID NO: 1413395 - DNA, 15 bp, Homo sapiens
agctctgcccggtca

SEQ ID NO: 1413396 - DNA, 15 bp, Homo sapiens
gctctgcccggtcat

SEQ ID NO: 1413397 - DNA, 15 bp, Homo sapiens
ctctgcccggtcatg

SEQ ID NO: 1413398 - DNA, 15 bp, Homo sapiens
tctgcccggtcatga

SEQ ID NO: 1413399 - DNA, 15 bp, Homo sapiens
ctgcccggtcatgac

SEQ ID NO: 1413400 - DNA, 15 bp, Homo sapiens
tgcccggtcatgacc

SEQ ID NO: 1413401 - DNA, 15 bp, Homo sapiens
gcccggtcatgacca

SEQ ID NO: 1413402 - DNA, 15 bp, Homo sapiens
cccggtcatgaccag

SEQ ID NO: 1413403 - DNA, 15 bp, Homo sapiens
ccggtcatgaccagg

SEQ ID NO: 1413404 - DNA, 15 bp, Homo sapiens
cggtcatgaccagga

SEQ ID NO: 1413405 - DNA, 15 bp, Homo sapiens
ggtcatgaccaggaa

SEQ ID NO: 1413406 - DNA, 15 bp, Homo sapiens
gtcatgaccaggaaa

SEQ ID NO: 1413407 - DNA, 15 bp, Homo sapiens
tcatgaccaggaaac

SEQ ID NO: 1413408 - DNA, 15 bp, Homo sapiens
catgaccaggaaacc

SEQ ID NO: 1413409 - DNA, 15 bp, Homo sapiens
atgaccaggaaacca

SEQ ID NO: 1413410 - DNA, 15 bp, Homo sapiens
tgaccaggaaaccac

SEQ ID NO: 1413411 - DNA, 15 bp, Homo sapiens
gaccaggaaaccacg

SEQ ID NO: 1413412 - DNA, 15 bp, Homo sapiens
accaggaaaccacga

SEQ ID NO: 1413413 - DNA, 15 bp, Homo sapiens
ccaggaaaccacgac

SEQ ID NO: 1413414 - DNA, 15 bp, Homo sapiens
caggaaaccacgact

SEQ ID NO: 1413415 - DNA, 15 bp, Homo sapiens
aggaaaccacgactc

SEQ ID NO: 1413416 - DNA, 15 bp, Homo sapiens
ggaaaccacgactca

SEQ ID NO: 1413417 - DNA, 15 bp, Homo sapiens
gaaaccacgactcaa

SEQ ID NO: 1413418 - DNA, 15 bp, Homo sapiens
aaaccacgactcaag

SEQ ID NO: 1413419 - DNA, 15 bp, Homo sapiens
aaccacgactcaagg

SEQ ID NO: 1413420 - DNA, 15 bp, Homo sapiens
accacgactcaaggg

SEQ ID NO: 1413421 - DNA, 15 bp, Homo sapiens
ccacgactcaagggc

SEQ ID NO: 1413422 - DNA, 15 bp, Homo sapiens
cacgactcaagggcc

SEQ ID NO: 1413423 - DNA, 15 bp, Homo sapiens
acgactcaagggccc

SEQ ID NO: 1413424 - DNA, 15 bp, Homo sapiens
cgactcaagggcccg

SEQ ID NO: 1413425 - DNA, 15 bp, Homo sapiens
gactcaagggcccgg

SEQ ID NO: 1413426 - DNA, 15 bp, Homo sapiens
actcaagggcccgga

SEQ ID NO: 1413427 - DNA, 15 bp, Homo sapiens
ctcaagggcccggag

SEQ ID NO: 1413428 - DNA, 15 bp, Homo sapiens
tcaagggcccggagt

SEQ ID NO: 1413429 - DNA, 15 bp, Homo sapiens
caagggcccggagtc

SEQ ID NO: 1413430 - DNA, 15 bp, Homo sapiens
aagggcccggagtcc

SEQ ID NO: 1413431 - DNA, 15 bp, Homo sapiens
agggcccggagtcct

SEQ ID NO: 1413432 - DNA, 15 bp, Homo sapiens
gggcccggagtcctg

SEQ ID NO: 1413433 - DNA, 15 bp, Homo sapiens
ggcccggagtcctgc

SEQ ID NO: 1413434 - DNA, 15 bp, Homo sapiens
gcccggagtcctgct

SEQ ID NO: 1413435 - DNA, 15 bp, Homo sapiens
cccggagtcctgctt

SEQ ID NO: 1413436 - DNA, 15 bp, Homo sapiens
ccggagtcctgcttc

SEQ ID NO: 1413437 - DNA, 15 bp, Homo sapiens
cggagtcctgcttcc

SEQ ID NO: 1413438 - DNA, 15 bp, Homo sapiens
ggagtcctgcttccc

SEQ ID NO: 1413439 - DNA, 15 bp, Homo sapiens
gagtcctgcttcccc

SEQ ID NO: 1413440 - DNA, 15 bp, Homo sapiens
agtcctgcttcccct

SEQ ID NO: 1413441 - DNA, 15 bp, Homo sapiens
gtcctgcttcccctg

SEQ ID NO: 1413442 - DNA, 15 bp, Homo sapiens
tcctgcttcccctgc

SEQ ID NO: 1413443 - DNA, 15 bp, Homo sapiens
cctgcttcccctgcc

SEQ ID NO: 1413444 - DNA, 15 bp, Homo sapiens
ctgcttcccctgccc

SEQ ID NO: 1413445 - DNA, 15 bp, Homo sapiens
tgcttcccctgccca

SEQ ID NO: 1413446 - DNA, 15 bp, Homo sapiens
gcttcccctgcccaa

SEQ ID NO: 1413447 - DNA, 15 bp, Homo sapiens
cttcccctgcccaag

SEQ ID NO: 1413448 - DNA, 15 bp, Homo sapiens
ttcccctgcccaagg

SEQ ID NO: 1413449 - DNA, 15 bp, Homo sapiens
tcccctgcccaaggg

SEQ ID NO: 1413450 - DNA, 15 bp, Homo sapiens
cccctgcccaagggg

SEQ ID NO: 1413451 - DNA, 15 bp, Homo sapiens
ccctgcccaaggggg

SEQ ID NO: 1413452 - DNA, 15 bp, Homo sapiens
cctgcccaagggggc

SEQ ID NO: 1413453 - DNA, 15 bp, Homo sapiens
ctgcccaagggggcc

SEQ ID NO: 1413454 - DNA, 15 bp, Homo sapiens
tgcccaagggggcct

SEQ ID NO: 1413455 - DNA, 15 bp, Homo sapiens
gcccaagggggcctg

SEQ ID NO: 1413456 - DNA, 15 bp, Homo sapiens
cccaagggggcctgc

SEQ ID NO: 1413457 - DNA, 15 bp, Homo sapiens
ccaagggggcctgca

SEQ ID NO: 1413458 - DNA, 15 bp, Homo sapiens
caagggggcctgcac

SEQ ID NO: 1413459 - DNA, 15 bp, Homo sapiens
aagggggcctgcaca

SEQ ID NO: 1413460 - DNA, 15 bp, Homo sapiens
agggggcctgcacag

SEQ ID NO: 1413461 - DNA, 15 bp, Homo sapiens
gggggcctgcacagg

SEQ ID NO: 1413462 - DNA, 15 bp, Homo sapiens
ggggcctgcacaggt

SEQ ID NO: 1413463 - DNA, 15 bp, Homo sapiens
gggcctgcacaggtt

SEQ ID NO: 1413464 - DNA, 15 bp, Homo sapiens
ggcctgcacaggttg

SEQ ID NO: 1413465 - DNA, 15 bp, Homo sapiens
gcctgcacaggttgg

SEQ ID NO: 1413466 - DNA, 15 bp, Homo sapiens
cctgcacaggttgga

SEQ ID NO: 1413467 - DNA, 15 bp, Homo sapiens
ctgcacaggttggat

SEQ ID NO: 1413468 - DNA, 15 bp, Homo sapiens
tgcacaggttggatg

SEQ ID NO: 1413469 - DNA, 15 bp, Homo sapiens
gcacaggttggatgg

SEQ ID NO: 1413470 - DNA, 15 bp, Homo sapiens
cacaggttggatggc

SEQ ID NO: 1413471 - DNA, 15 bp, Homo sapiens
acaggttggatggcg

SEQ ID NO: 1413472 - DNA, 15 bp, Homo sapiens
aggttggatggcggg

SEQ ID NO: 1413473 - DNA, 15 bp, Homo sapiens
ggttggatggcgggc

SEQ ID NO: 1413474 - DNA, 15 bp, Homo sapiens
gttggatggcgggca

SEQ ID NO: 1413475 - DNA, 15 bp, Homo sapiens
ttggatggcgggcat

SEQ ID NO: 1413476 - DNA, 15 bp, Homo sapiens
tggatggcgggcatc

SEQ ID NO: 1413477 - DNA, 15 bp, Homo sapiens
ggatggcgggcatcc

SEQ ID NO: 1413478 - DNA, 15 bp, Homo sapiens
gatggcgggcatccc

SEQ ID NO: 1413479 - DNA, 15 bp, Homo sapiens
atggcgggcatccca

SEQ ID NO: 1413480 - DNA, 15 bp, Homo sapiens
tggcgggcatcccag

SEQ ID NO: 1413481 - DNA, 15 bp, Homo sapiens
ggcgggcatcccagg

SEQ ID NO: 1413482 - DNA, 15 bp, Homo sapiens
gcgggcatcccaggg

SEQ ID NO: 1413483 - DNA, 15 bp, Homo sapiens
cgggcatcccagggc

SEQ ID NO: 1413484 - DNA, 15 bp, Homo sapiens
gggcatcccagggca

SEQ ID NO: 1413485 - DNA, 15 bp, Homo sapiens
ggcatcccagggcat

SEQ ID NO: 1413486 - DNA, 15 bp, Homo sapiens
gcatcccagggcatc

SEQ ID NO: 1413487 - DNA, 15 bp, Homo sapiens
catcccagggcatcc

SEQ ID NO: 1413488 - DNA, 15 bp, Homo sapiens
atcccagggcatccg

SEQ ID NO: 1413489 - DNA, 15 bp, Homo sapiens
tcccagggcatccgg

SEQ ID NO: 1413490 - DNA, 15 bp, Homo sapiens
cccagggcatccggg

SEQ ID NO: 1413491 - DNA, 15 bp, Homo sapiens
ccagggcatccgggc

SEQ ID NO: 1413492 - DNA, 15 bp, Homo sapiens
cagggcatccgggcc

SEQ ID NO: 1413493 - DNA, 15 bp, Homo sapiens
agggcatccgggcca

SEQ ID NO: 1413494 - DNA, 15 bp, Homo sapiens
gggcatccgggccat

SEQ ID NO: 1413495 - DNA, 15 bp, Homo sapiens
ggcatccgggccata

SEQ ID NO: 1413496 - DNA, 15 bp, Homo sapiens
gcatccgggccataa

SEQ ID NO: 1413497 - DNA, 15 bp, Homo sapiens
catccgggccataat

SEQ ID NO: 1413498 - DNA, 15 bp, Homo sapiens
atccgggccataatg

SEQ ID NO: 1413499 - DNA, 15 bp, Homo sapiens
tccgggccataatgg

SEQ ID NO: 1413500 - DNA, 15 bp, Homo sapiens
ccgggccataatggg

SEQ ID NO: 1413501 - DNA, 15 bp, Homo sapiens
cgggccataatgggg

SEQ ID NO: 1413502 - DNA, 15 bp, Homo sapiens
gggccataatggggc

SEQ ID NO: 1413503 - DNA, 15 bp, Homo sapiens
ggccataatggggcc

SEQ ID NO: 1413504 - DNA, 15 bp, Homo sapiens
gccataatggggccc

SEQ ID NO: 1413505 - DNA, 15 bp, Homo sapiens
ccataatggggcccc

SEQ ID NO: 1413506 - DNA, 15 bp, Homo sapiens
cataatggggcccca

SEQ ID NO: 1413507 - DNA, 15 bp, Homo sapiens
ataatggggccccag

SEQ ID NO: 1413508 - DNA, 15 bp, Homo sapiens
taatggggccccagg

SEQ ID NO: 1413509 - DNA, 15 bp, Homo sapiens
aatggggccccaggc

SEQ ID NO: 1413510 - DNA, 15 bp, Homo sapiens
atggggccccaggcc

SEQ ID NO: 1413511 - DNA, 15 bp, Homo sapiens
tggggccccaggccg

SEQ ID NO: 1413512 - DNA, 15 bp, Homo sapiens
ggggccccaggccgt

SEQ ID NO: 1413513 - DNA, 15 bp, Homo sapiens
gggccccaggccgtg

SEQ ID NO: 1413514 - DNA, 15 bp, Homo sapiens
ggccccaggccgtga

SEQ ID NO: 1413515 - DNA, 15 bp, Homo sapiens
gccccaggccgtgat

SEQ ID NO: 1413516 - DNA, 15 bp, Homo sapiens
ccccaggccgtgatg

SEQ ID NO: 1413517 - DNA, 15 bp, Homo sapiens
cccaggccgtgatgg

SEQ ID NO: 1413518 - DNA, 15 bp, Homo sapiens
ccaggccgtgatggc

SEQ ID NO: 1413519 - DNA, 15 bp, Homo sapiens
aggccgtgatggcag

SEQ ID NO: 1413520 - DNA, 15 bp, Homo sapiens
gccgtgatggcagag

SEQ ID NO: 1413521 - DNA, 15 bp, Homo sapiens
ccgtgatggcagaga

SEQ ID NO: 1413522 - DNA, 15 bp, Homo sapiens
cgtgatggcagagat

SEQ ID NO: 1413523 - DNA, 15 bp, Homo sapiens
gtgatggcagagatg

SEQ ID NO: 1413524 - DNA, 15 bp, Homo sapiens
tgatggcagagatgg

SEQ ID NO: 1413525 - DNA, 15 bp, Homo sapiens
gatggcagagatggc

SEQ ID NO: 1413526 - DNA, 15 bp, Homo sapiens
atggcagagatggca

SEQ ID NO: 1413527 - DNA, 15 bp, Homo sapiens
tggcagagatggcac

SEQ ID NO: 1413528 - DNA, 15 bp, Homo sapiens
ggcagagatggcacc

SEQ ID NO: 1413529 - DNA, 15 bp, Homo sapiens
gcagagatggcaccc

SEQ ID NO: 1413530 - DNA, 15 bp, Homo sapiens
cagagatggcacccc

SEQ ID NO: 1413531 - DNA, 15 bp, Homo sapiens
agagatggcacccct

SEQ ID NO: 1413532 - DNA, 15 bp, Homo sapiens
gagatggcacccctg

SEQ ID NO: 1413533 - DNA, 15 bp, Homo sapiens
agatggcacccctgg

SEQ ID NO: 1413534 - DNA, 15 bp, Homo sapiens
gatggcacccctggt

SEQ ID NO: 1413535 - DNA, 15 bp, Homo sapiens
atggcacccctggtg

SEQ ID NO: 1413536 - DNA, 15 bp, Homo sapiens
tggcacccctggtga

SEQ ID NO: 1413537 - DNA, 15 bp, Homo sapiens
ggcacccctggtgag

SEQ ID NO: 1413538 - DNA, 15 bp, Homo sapiens
gcacccctggtgaga

SEQ ID NO: 1413539 - DNA, 15 bp, Homo sapiens
cacccctggtgagaa

SEQ ID NO: 1413540 - DNA, 15 bp, Homo sapiens
acccctggtgagaag

SEQ ID NO: 1413541 - DNA, 15 bp, Homo sapiens
cccctggtgagaagg

SEQ ID NO: 1413542 - DNA, 15 bp, Homo sapiens
ccctggtgagaaggg

SEQ ID NO: 1413543 - DNA, 15 bp, Homo sapiens
cctggtgagaagggt

SEQ ID NO: 1413544 - DNA, 15 bp, Homo sapiens
ctggtgagaagggtg

SEQ ID NO: 1413545 - DNA, 15 bp, Homo sapiens
tggtgagaagggtga

SEQ ID NO: 1413546 - DNA, 15 bp, Homo sapiens
ggtgagaagggtgag

SEQ ID NO: 1413547 - DNA, 15 bp, Homo sapiens
gtgagaagggtgaga

SEQ ID NO: 1413548 - DNA, 15 bp, Homo sapiens
tgagaagggtgagaa

SEQ ID NO: 1413549 - DNA, 15 bp, Homo sapiens
gagaagggtgagaaa

SEQ ID NO: 1413550 - DNA, 15 bp, Homo sapiens
agaagggtgagaaag

SEQ ID NO: 1413551 - DNA, 15 bp, Homo sapiens
gaagggtgagaaagg

SEQ ID NO: 1413552 - DNA, 15 bp, Homo sapiens
aagggtgagaaagga

SEQ ID NO: 1413553 - DNA, 15 bp, Homo sapiens
agggtgagaaaggag

SEQ ID NO: 1413554 - DNA, 15 bp, Homo sapiens
gggtgagaaaggaga

SEQ ID NO: 1413555 - DNA, 15 bp, Homo sapiens
ggtgagaaaggagat

SEQ ID NO: 1413556 - DNA, 15 bp, Homo sapiens
gtgagaaaggagatc

SEQ ID NO: 1413557 - DNA, 15 bp, Homo sapiens
tgagaaaggagatcc

SEQ ID NO: 1413558 - DNA, 15 bp, Homo sapiens
gagaaaggagatcca

SEQ ID NO: 1413559 - DNA, 15 bp, Homo sapiens
agaaaggagatccag

SEQ ID NO: 1413560 - DNA, 15 bp, Homo sapiens
gaaaggagatccagg

SEQ ID NO: 1413561 - DNA, 15 bp, Homo sapiens
aaaggagatccaggt

SEQ ID NO: 1413562 - DNA, 15 bp, Homo sapiens
aaggagatccaggta

SEQ ID NO: 1413563 - DNA, 15 bp, Homo sapiens
aggagatccaggtaa

SEQ ID NO: 1413564 - DNA, 15 bp, Homo sapiens
ggagatccaggtaag

SEQ ID NO: 1413565 - DNA, 15 bp, Homo sapiens
gagatccaggtaaga

SEQ ID NO: 1413566 - DNA, 15 bp, Homo sapiens
agatccaggtaagaa

SEQ ID NO: 1413567 - DNA, 15 bp, Homo sapiens
gatccaggtaagaat

SEQ ID NO: 1413568 - DNA, 15 bp, Homo sapiens
atccaggtaagaatg

SEQ ID NO: 1413569 - DNA, 15 bp, Homo sapiens
tccaggtaagaatgt

SEQ ID NO: 1413570 - DNA, 15 bp, Homo sapiens
ccaggtaagaatgtt

SEQ ID NO: 1413571 - DNA, 15 bp, Homo sapiens
caggtaagaatgttt

SEQ ID NO: 1413572 - DNA, 15 bp, Homo sapiens
aggtaagaatgtttc

SEQ ID NO: 1413573 - DNA, 15 bp, Homo sapiens
ggtaagaatgtttct

SEQ ID NO: 1413574 - DNA, 15 bp, Homo sapiens
gtaagaatgtttctg

SEQ ID NO: 1413575 - DNA, 15 bp, Homo sapiens
taagaatgtttctgg

SEQ ID NO: 1413576 - DNA, 15 bp, Homo sapiens
aagaatgtttctggc

SEQ ID NO: 1413577 - DNA, 15 bp, Homo sapiens
agaatgtttctggcc

SEQ ID NO: 1413578 - DNA, 15 bp, Homo sapiens
gaatgtttctggcct

SEQ ID NO: 1413579 - DNA, 15 bp, Homo sapiens
aatgtttctggcctc

SEQ ID NO: 1413580 - DNA, 15 bp, Homo sapiens
atgtttctggcctct

SEQ ID NO: 1413581 - DNA, 15 bp, Homo sapiens
tgtttctggcctctt

SEQ ID NO: 1413582 - DNA, 15 bp, Homo sapiens
gtttctggcctcttt

SEQ ID NO: 1413583 - DNA, 15 bp, Homo sapiens
tttctggcctctttc

SEQ ID NO: 1413584 - DNA, 15 bp, Homo sapiens
ttctggcctctttca

SEQ ID NO: 1413585 - DNA, 15 bp, Homo sapiens
tctggcctctttcat

SEQ ID NO: 1413586 - DNA, 15 bp, Homo sapiens
ctggcctctttcatc

SEQ ID NO: 1413587 - DNA, 15 bp, Homo sapiens
tggcctctttcatca

SEQ ID NO: 1413588 - DNA, 15 bp, Homo sapiens
ggcctctttcatcac

SEQ ID NO: 1413589 - DNA, 15 bp, Homo sapiens
gcctctttcatcaca

SEQ ID NO: 1413590 - DNA, 15 bp, Homo sapiens
cctctttcatcacag

SEQ ID NO: 1413591 - DNA, 15 bp, Homo sapiens
ctctttcatcacaga

SEQ ID NO: 1413592 - DNA, 15 bp, Homo sapiens
tctttcatcacagac

SEQ ID NO: 1413593 - DNA, 15 bp, Homo sapiens
ctttcatcacagacc

SEQ ID NO: 1413594 - DNA, 15 bp, Homo sapiens
tttcatcacagacct

SEQ ID NO: 1413595 - DNA, 15 bp, Homo sapiens
ttcatcacagacctc

SEQ ID NO: 1413596 - DNA, 15 bp, Homo sapiens
tcatcacagacctcc

SEQ ID NO: 1413597 - DNA, 15 bp, Homo sapiens
catcacagacctcct

SEQ ID NO: 1413598 - DNA, 15 bp, Homo sapiens
atcacagacctccta

SEQ ID NO: 1413599 - DNA, 15 bp, Homo sapiens
tcacagacctcctac

SEQ ID NO: 1413600 - DNA, 15 bp, Homo sapiens
cacagacctcctaca

SEQ ID NO: 1413601 - DNA, 15 bp, Homo sapiens
acagacctcctacac

SEQ ID NO: 1413602 - DNA, 15 bp, Homo sapiens
cagacctcctacact

SEQ ID NO: 1413603 - DNA, 15 bp, Homo sapiens
agacctcctacactg

SEQ ID NO: 1413604 - DNA, 15 bp, Homo sapiens
gacctcctacactga

SEQ ID NO: 1413605 - DNA, 15 bp, Homo sapiens
acctcctacactgat

SEQ ID NO: 1413606 - DNA, 15 bp, Homo sapiens
cctcctacactgata

SEQ ID NO: 1413607 - DNA, 15 bp, Homo sapiens
ctcctacactgatat

SEQ ID NO: 1413608 - DNA, 15 bp, Homo sapiens
tcctacactgatata

SEQ ID NO: 1413609 - DNA, 15 bp, Homo sapiens
cctacactgatataa

SEQ ID NO: 1413610 - DNA, 15 bp, Homo sapiens
ctacactgatataaa

SEQ ID NO: 1413611 - DNA, 15 bp, Homo sapiens
tacactgatataaac

SEQ ID NO: 1413612 - DNA, 15 bp, Homo sapiens
acactgatataaact

SEQ ID NO: 1413613 - DNA, 15 bp, Homo sapiens
cactgatataaacta

SEQ ID NO: 1413614 - DNA, 15 bp, Homo sapiens
actgatataaactat

SEQ ID NO: 1413615 - DNA, 15 bp, Homo sapiens
ctgatataaactata

SEQ ID NO: 1413616 - DNA, 15 bp, Homo sapiens
tgatataaactatat

SEQ ID NO: 1413617 - DNA, 15 bp, Homo sapiens
gatataaactatatg

SEQ ID NO: 1413618 - DNA, 15 bp, Homo sapiens
atataaactatatga

SEQ ID NO: 1413619 - DNA, 15 bp, Homo sapiens
tataaactatatgaa

SEQ ID NO: 1413620 - DNA, 15 bp, Homo sapiens
ataaactatatgaag

SEQ ID NO: 1413621 - DNA, 15 bp, Homo sapiens
taaactatatgaagg

SEQ ID NO: 1413622 - DNA, 15 bp, Homo sapiens
aaactatatgaaggc

SEQ ID NO: 1413623 - DNA, 15 bp, Homo sapiens
aactatatgaaggca

SEQ ID NO: 1413624 - DNA, 15 bp, Homo sapiens
actatatgaaggcat

SEQ ID NO: 1413625 - DNA, 15 bp, Homo sapiens
ctatatgaaggcatt

SEQ ID NO: 1413626 - DNA, 15 bp, Homo sapiens
tatatgaaggcattc

SEQ ID NO: 1413627 - DNA, 15 bp, Homo sapiens
atatgaaggcattca

SEQ ID NO: 1413628 - DNA, 15 bp, Homo sapiens
tatgaaggcattcat

SEQ ID NO: 1413629 - DNA, 15 bp, Homo sapiens
atgaaggcattcatt

SEQ ID NO: 1413630 - DNA, 15 bp, Homo sapiens
tgaaggcattcatta

SEQ ID NO: 1413631 - DNA, 15 bp, Homo sapiens
gaaggcattcattat

SEQ ID NO: 1413632 - DNA, 15 bp, Homo sapiens
aaggcattcattatt

SEQ ID NO: 1413633 - DNA, 15 bp, Homo sapiens
aggcattcattatta

SEQ ID NO: 1413634 - DNA, 15 bp, Homo sapiens
ggcattcattattaa

SEQ ID NO: 1413635 - DNA, 15 bp, Homo sapiens
gcattcattattaac

SEQ ID NO: 1413636 - DNA, 15 bp, Homo sapiens
cattcattattaact

SEQ ID NO: 1413637 - DNA, 15 bp, Homo sapiens
attcattattaacta

SEQ ID NO: 1413638 - DNA, 15 bp, Homo sapiens
ttcattattaactaa

SEQ ID NO: 1413639 - DNA, 15 bp, Homo sapiens
tcattattaactaag

SEQ ID NO: 1413640 - DNA, 15 bp, Homo sapiens
cattattaactaagg

SEQ ID NO: 1413641 - DNA, 15 bp, Homo sapiens
attattaactaaggc

SEQ ID NO: 1413642 - DNA, 15 bp, Homo sapiens
ttattaactaaggcc

SEQ ID NO: 1413643 - DNA, 15 bp, Homo sapiens
tattaactaaggcct

SEQ ID NO: 1413644 - DNA, 15 bp, Homo sapiens
attaactaaggccta

SEQ ID NO: 1413645 - DNA, 15 bp, Homo sapiens
ttaactaaggcctag

SEQ ID NO: 1413646 - DNA, 15 bp, Homo sapiens
taactaaggcctaga

SEQ ID NO: 1413647 - DNA, 15 bp, Homo sapiens
aactaaggcctagac

SEQ ID NO: 1413648 - DNA, 15 bp, Homo sapiens
actaaggcctagaca

SEQ ID NO: 1413649 - DNA, 15 bp, Homo sapiens
ctaaggcctagacac

SEQ ID NO: 1413650 - DNA, 15 bp, Homo sapiens
taaggcctagacaca

SEQ ID NO: 1413651 - DNA, 15 bp, Homo sapiens
aaggcctagacacag

SEQ ID NO: 1413652 - DNA, 15 bp, Homo sapiens
aggcctagacacagg

SEQ ID NO: 1413653 - DNA, 15 bp, Homo sapiens
ggcctagacacaggg

SEQ ID NO: 1413654 - DNA, 15 bp, Homo sapiens
gcctagacacaggga

SEQ ID NO: 1413655 - DNA, 15 bp, Homo sapiens
cctagacacagggag

SEQ ID NO: 1413656 - DNA, 15 bp, Homo sapiens
ctagacacagggaga

SEQ ID NO: 1413657 - DNA, 15 bp, Homo sapiens
tagacacagggagaa

SEQ ID NO: 1413658 - DNA, 15 bp, Homo sapiens
agacacagggagaaa

SEQ ID NO: 1413659 - DNA, 15 bp, Homo sapiens
gacacagggagaaag

SEQ ID NO: 1413660 - DNA, 15 bp, Homo sapiens
acacagggagaaagc

SEQ ID NO: 1413661 - DNA, 15 bp, Homo sapiens
cacagggagaaagca

SEQ ID NO: 1413662 - DNA, 15 bp, Homo sapiens
acagggagaaagcaa

SEQ ID NO: 1413663 - DNA, 15 bp, Homo sapiens
cagggagaaagcaaa

SEQ ID NO: 1413664 - DNA, 15 bp, Homo sapiens
agggagaaagcaaag

SEQ ID NO: 1413665 - DNA, 15 bp, Homo sapiens
gggagaaagcaaagc

SEQ ID NO: 1413666 - DNA, 15 bp, Homo sapiens
ggagaaagcaaagct

SEQ ID NO: 1413667 - DNA, 15 bp, Homo sapiens
gagaaagcaaagctt

SEQ ID NO: 1413668 - DNA, 15 bp, Homo sapiens
agaaagcaaagcttt

SEQ ID NO: 1413669 - DNA, 15 bp, Homo sapiens
gaaagcaaagctttt

SEQ ID NO: 1413670 - DNA, 15 bp, Homo sapiens
aaagcaaagcttttt

SEQ ID NO: 1413671 - DNA, 15 bp, Homo sapiens
aagcaaagctttttt

SEQ ID NO: 1413672 - DNA, 15 bp, Homo sapiens
agcaaagctttttta

SEQ ID NO: 1413673 - DNA, 15 bp, Homo sapiens
gcaaagcttttttat

SEQ ID NO: 1413674 - DNA, 15 bp, Homo sapiens
caaagcttttttatg

SEQ ID NO: 1413675 - DNA, 15 bp, Homo sapiens
aaagcttttttatgt

SEQ ID NO: 1413676 - DNA, 15 bp, Homo sapiens
aagcttttttatgtt

SEQ ID NO: 1413677 - DNA, 15 bp, Homo sapiens
agcttttttatgtta

SEQ ID NO: 1413678 - DNA, 15 bp, Homo sapiens
gcttttttatgttaa

SEQ ID NO: 1413679 - DNA, 15 bp, Homo sapiens
cttttttatgttaac

SEQ ID NO: 1413680 - DNA, 15 bp, Homo sapiens
ttttttatgttaacc

SEQ ID NO: 1413681 - DNA, 15 bp, Homo sapiens
tttttatgttaacca

SEQ ID NO: 1413682 - DNA, 15 bp, Homo sapiens
ttttatgttaaccat

SEQ ID NO: 1413683 - DNA, 15 bp, Homo sapiens
tttatgttaaccata

SEQ ID NO: 1413684 - DNA, 15 bp, Homo sapiens
ttatgttaaccataa

SEQ ID NO: 1413685 - DNA, 15 bp, Homo sapiens
tatgttaaccataag

SEQ ID NO: 1413686 - DNA, 15 bp, Homo sapiens
atgttaaccataagc

SEQ ID NO: 1413687 - DNA, 15 bp, Homo sapiens
tgttaaccataagca

SEQ ID NO: 1413688 - DNA, 15 bp, Homo sapiens
gttaaccataagcaa

SEQ ID NO: 1413689 - DNA, 15 bp, Homo sapiens
ttaaccataagcaac

SEQ ID NO: 1413690 - DNA, 15 bp, Homo sapiens
taaccataagcaacc

SEQ ID NO: 1413691 - DNA, 15 bp, Homo sapiens
aaccataagcaacct

SEQ ID NO: 1413692 - DNA, 15 bp, Homo sapiens
accataagcaacctg

SEQ ID NO: 1413693 - DNA, 15 bp, Homo sapiens
ccataagcaacctga

SEQ ID NO: 1413694 - DNA, 15 bp, Homo sapiens
cataagcaacctgaa

SEQ ID NO: 1413695 - DNA, 15 bp, Homo sapiens
ataagcaacctgaag

SEQ ID NO: 1413696 - DNA, 15 bp, Homo sapiens
taagcaacctgaagt

SEQ ID NO: 1413697 - DNA, 15 bp, Homo sapiens
aagcaacctgaagtg

SEQ ID NO: 1413698 - DNA, 15 bp, Homo sapiens
agcaacctgaagtga

SEQ ID NO: 1413699 - DNA, 15 bp, Homo sapiens
gcaacctgaagtgat

SEQ ID NO: 1413700 - DNA, 15 bp, Homo sapiens
caacctgaagtgatt

SEQ ID NO: 1413701 - DNA, 15 bp, Homo sapiens
aacctgaagtgattt

SEQ ID NO: 1413702 - DNA, 15 bp, Homo sapiens
acctgaagtgatttg

SEQ ID NO: 1413703 - DNA, 15 bp, Homo sapiens
cctgaagtgatttgg

SEQ ID NO: 1413704 - DNA, 15 bp, Homo sapiens
ctgaagtgatttggg

SEQ ID NO: 1413705 - DNA, 15 bp, Homo sapiens
tgaagtgatttgggg

SEQ ID NO: 1413706 - DNA, 15 bp, Homo sapiens
gaagtgatttggggt

SEQ ID NO: 1413707 - DNA, 15 bp, Homo sapiens
aagtgatttggggtt

SEQ ID NO: 1413708 - DNA, 15 bp, Homo sapiens
agtgatttggggttg

SEQ ID NO: 1413709 - DNA, 15 bp, Homo sapiens
gtgatttggggttgg

SEQ ID NO: 1413710 - DNA, 15 bp, Homo sapiens
tgatttggggttggt

SEQ ID NO: 1413711 - DNA, 15 bp, Homo sapiens
gatttggggttggtc

SEQ ID NO: 1413712 - DNA, 15 bp, Homo sapiens
atttggggttggtct

SEQ ID NO: 1413713 - DNA, 15 bp, Homo sapiens
tttggggttggtctt

SEQ ID NO: 1413714 - DNA, 15 bp, Homo sapiens
ttggggttggtcttc

SEQ ID NO: 1413715 - DNA, 15 bp, Homo sapiens
tggggttggtcttcc

SEQ ID NO: 1413716 - DNA, 15 bp, Homo sapiens
ggggttggtcttcca

SEQ ID NO: 1413717 - DNA, 15 bp, Homo sapiens
gggttggtcttccaa

SEQ ID NO: 1413718 - DNA, 15 bp, Homo sapiens
ggttggtcttccaag

SEQ ID NO: 1413719 - DNA, 15 bp, Homo sapiens
gttggtcttccaagg

SEQ ID NO: 1413720 - DNA, 15 bp, Homo sapiens
ttggtcttccaagga

SEQ ID NO: 1413721 - DNA, 15 bp, Homo sapiens
tggtcttccaaggat

SEQ ID NO: 1413722 - DNA, 15 bp, Homo sapiens
ggtcttccaaggatg

SEQ ID NO: 1413723 - DNA, 15 bp, Homo sapiens
gtcttccaaggatga

SEQ ID NO: 1413724 - DNA, 15 bp, Homo sapiens
tcttccaaggatgag

SEQ ID NO: 1413725 - DNA, 15 bp, Homo sapiens
cttccaaggatgagt

SEQ ID NO: 1413726 - DNA, 15 bp, Homo sapiens
ttccaaggatgagtg

SEQ ID NO: 1413727 - DNA, 15 bp, Homo sapiens
tccaaggatgagtgt

SEQ ID NO: 1413728 - DNA, 15 bp, Homo sapiens
ccaaggatgagtgta

SEQ ID NO: 1413729 - DNA, 15 bp, Homo sapiens
caaggatgagtgtag

SEQ ID NO: 1413730 - DNA, 15 bp, Homo sapiens
aaggatgagtgtaga

SEQ ID NO: 1413731 - DNA, 15 bp, Homo sapiens
aggatgagtgtagat

SEQ ID NO: 1413732 - DNA, 15 bp, Homo sapiens
ggatgagtgtagatg

SEQ ID NO: 1413733 - DNA, 15 bp, Homo sapiens
gatgagtgtagatgg

SEQ ID NO: 1413734 - DNA, 15 bp, Homo sapiens
atgagtgtagatggt

SEQ ID NO: 1413735 - DNA, 15 bp, Homo sapiens
tgagtgtagatggtg

SEQ ID NO: 1413736 - DNA, 15 bp, Homo sapiens
gagtgtagatggtgc

SEQ ID NO: 1413737 - DNA, 15 bp, Homo sapiens
agtgtagatggtgcc

SEQ ID NO: 1413738 - DNA, 15 bp, Homo sapiens
gtgtagatggtgcct

SEQ ID NO: 1413739 - DNA, 15 bp, Homo sapiens
tgtagatggtgcctc

SEQ ID NO: 1413740 - DNA, 15 bp, Homo sapiens
gtagatggtgcctct

SEQ ID NO: 1413741 - DNA, 15 bp, Homo sapiens
tagatggtgcctcta

SEQ ID NO: 1413742 - DNA, 15 bp, Homo sapiens
agatggtgcctctat

SEQ ID NO: 1413743 - DNA, 15 bp, Homo sapiens
gatggtgcctctata

SEQ ID NO: 1413744 - DNA, 15 bp, Homo sapiens
atggtgcctctataa

SEQ ID NO: 1413745 - DNA, 15 bp, Homo sapiens
tggtgcctctataac

SEQ ID NO: 1413746 - DNA, 15 bp, Homo sapiens
ggtgcctctataacc

SEQ ID NO: 1413747 - DNA, 15 bp, Homo sapiens
gtgcctctataacca

SEQ ID NO: 1413748 - DNA, 15 bp, Homo sapiens
tgcctctataaccaa

SEQ ID NO: 1413749 - DNA, 15 bp, Homo sapiens
gcctctataaccaag

SEQ ID NO: 1413750 - DNA, 15 bp, Homo sapiens
cctctataaccaaga

SEQ ID NO: 1413751 - DNA, 15 bp, Homo sapiens
ctctataaccaagac

SEQ ID NO: 1413752 - DNA, 15 bp, Homo sapiens
tctataaccaagact

SEQ ID NO: 1413753 - DNA, 15 bp, Homo sapiens
ctataaccaagactt

SEQ ID NO: 1413754 - DNA, 15 bp, Homo sapiens
tataaccaagacttt

SEQ ID NO: 1413755 - DNA, 15 bp, Homo sapiens
ataaccaagactttg

SEQ ID NO: 1413756 - DNA, 15 bp, Homo sapiens
taaccaagactttgg

SEQ ID NO: 1413757 - DNA, 15 bp, Homo sapiens
aaccaagactttggc

SEQ ID NO: 1413758 - DNA, 15 bp, Homo sapiens
accaagactttggct

SEQ ID NO: 1413759 - DNA, 15 bp, Homo sapiens
ccaagactttggctt

SEQ ID NO: 1413760 - DNA, 15 bp, Homo sapiens
caagactttggcttt

SEQ ID NO: 1413761 - DNA, 15 bp, Homo sapiens
aagactttggctttg

SEQ ID NO: 1413762 - DNA, 15 bp, Homo sapiens
agactttggctttgc

SEQ ID NO: 1413763 - DNA, 15 bp, Homo sapiens
gactttggctttgct

SEQ ID NO: 1413764 - DNA, 15 bp, Homo sapiens
actttggctttgctg

SEQ ID NO: 1413765 - DNA, 15 bp, Homo sapiens
ctttggctttgctgc

SEQ ID NO: 1413766 - DNA, 15 bp, Homo sapiens
tttggctttgctgca

SEQ ID NO: 1413767 - DNA, 15 bp, Homo sapiens
ttggctttgctgcat

SEQ ID NO: 1413768 - DNA, 15 bp, Homo sapiens
tggctttgctgcatc

SEQ ID NO: 1413769 - DNA, 15 bp, Homo sapiens
ggctttgctgcatct

SEQ ID NO: 1413770 - DNA, 15 bp, Homo sapiens
gctttgctgcatctg

SEQ ID NO: 1413771 - DNA, 15 bp, Homo sapiens
ctttgctgcatctgc

SEQ ID NO: 1413772 - DNA, 15 bp, Homo sapiens
tttgctgcatctgca

SEQ ID NO: 1413773 - DNA, 15 bp, Homo sapiens
ttgctgcatctgcag

SEQ ID NO: 1413774 - DNA, 15 bp, Homo sapiens
tgctgcatctgcagc

SEQ ID NO: 1413775 - DNA, 15 bp, Homo sapiens
gctgcatctgcagct

SEQ ID NO: 1413776 - DNA, 15 bp, Homo sapiens
ctgcatctgcagctc

SEQ ID NO: 1413777 - DNA, 15 bp, Homo sapiens
tgcatctgcagctcc

SEQ ID NO: 1413778 - DNA, 15 bp, Homo sapiens
gcatctgcagctcct

SEQ ID NO: 1413779 - DNA, 15 bp, Homo sapiens
catctgcagctcctt

SEQ ID NO: 1413780 - DNA, 15 bp, Homo sapiens
atctgcagctccttt

SEQ ID NO: 1413781 - DNA, 15 bp, Homo sapiens
tctgcagctcctttt

SEQ ID NO: 1413782 - DNA, 15 bp, Homo sapiens
ctgcagctccttttc

SEQ ID NO: 1413783 - DNA, 15 bp, Homo sapiens
tgcagctccttttcc

SEQ ID NO: 1413784 - DNA, 15 bp, Homo sapiens
gcagctccttttcca

SEQ ID NO: 1413785 - DNA, 15 bp, Homo sapiens
cagctccttttccat

SEQ ID NO: 1413786 - DNA, 15 bp, Homo sapiens
agctccttttccatc

SEQ ID NO: 1413787 - DNA, 15 bp, Homo sapiens
gctccttttccatcc

SEQ ID NO: 1413788 - DNA, 15 bp, Homo sapiens
ctccttttccatccc

SEQ ID NO: 1413789 - DNA, 15 bp, Homo sapiens
tccttttccatcccc

SEQ ID NO: 1413790 - DNA, 15 bp, Homo sapiens
ccttttccatcccct

SEQ ID NO: 1413791 - DNA, 15 bp, Homo sapiens
cttttccatcccctt

SEQ ID NO: 1413792 - DNA, 15 bp, Homo sapiens
ttttccatccccttt

SEQ ID NO: 1413793 - DNA, 15 bp, Homo sapiens
tttccatcccctttc

SEQ ID NO: 1413794 - DNA, 15 bp, Homo sapiens
ttccatcccctttcc

SEQ ID NO: 1413795 - DNA, 15 bp, Homo sapiens
tccatcccctttccc

SEQ ID NO: 1413796 - DNA, 15 bp, Homo sapiens
ccatcccctttccca

SEQ ID NO: 1413797 - DNA, 15 bp, Homo sapiens
catcccctttcccat

SEQ ID NO: 1413798 - DNA, 15 bp, Homo sapiens
atcccctttcccatc

SEQ ID NO: 1413799 - DNA, 15 bp, Homo sapiens
tcccctttcccatct

SEQ ID NO: 1413800 - DNA, 15 bp, Homo sapiens
cccctttcccatctt

SEQ ID NO: 1413801 - DNA, 15 bp, Homo sapiens
ccctttcccatcttc

SEQ ID NO: 1413802 - DNA, 15 bp, Homo sapiens
cctttcccatcttca

SEQ ID NO: 1413803 - DNA, 15 bp, Homo sapiens
ctttcccatcttcac

SEQ ID NO: 1413804 - DNA, 15 bp, Homo sapiens
tttcccatcttcacc

SEQ ID NO: 1413805 - DNA, 15 bp, Homo sapiens
ttcccatcttcaccc

SEQ ID NO: 1413806 - DNA, 15 bp, Homo sapiens
tcccatcttcaccct

SEQ ID NO: 1413807 - DNA, 15 bp, Homo sapiens
cccatcttcaccctc

SEQ ID NO: 1413808 - DNA, 15 bp, Homo sapiens
ccatcttcaccctca

SEQ ID NO: 1413809 - DNA, 15 bp, Homo sapiens
catcttcaccctcat

SEQ ID NO: 1413810 - DNA, 15 bp, Homo sapiens
atcttcaccctcatc

SEQ ID NO: 1413811 - DNA, 15 bp, Homo sapiens
tcttcaccctcatcc

SEQ ID NO: 1413812 - DNA, 15 bp, Homo sapiens
cttcaccctcatccc

SEQ ID NO: 1413813 - DNA, 15 bp, Homo sapiens
ttcaccctcatccct

SEQ ID NO: 1413814 - DNA, 15 bp, Homo sapiens
tcaccctcatcccta

SEQ ID NO: 1413815 - DNA, 15 bp, Homo sapiens
caccctcatccctat

SEQ ID NO: 1413816 - DNA, 15 bp, Homo sapiens
accctcatccctatt

SEQ ID NO: 1413817 - DNA, 15 bp, Homo sapiens
ccctcatccctattc

SEQ ID NO: 1413818 - DNA, 15 bp, Homo sapiens
cctcatccctattcc

SEQ ID NO: 1413819 - DNA, 15 bp, Homo sapiens
ctcatccctattccc

SEQ ID NO: 1413820 - DNA, 15 bp, Homo sapiens
tcatccctattccca

SEQ ID NO: 1413821 - DNA, 15 bp, Homo sapiens
catccctattcccag

SEQ ID NO: 1413822 - DNA, 15 bp, Homo sapiens
atccctattcccagt

SEQ ID NO: 1413823 - DNA, 15 bp, Homo sapiens
tccctattcccagta

SEQ ID NO: 1413824 - DNA, 15 bp, Homo sapiens
ccctattcccagtac

SEQ ID NO: 1413825 - DNA, 15 bp, Homo sapiens
cctattcccagtaca

SEQ ID NO: 1413826 - DNA, 15 bp, Homo sapiens
ctattcccagtacat

SEQ ID NO: 1413827 - DNA, 15 bp, Homo sapiens
tattcccagtacatt

SEQ ID NO: 1413828 - DNA, 15 bp, Homo sapiens
attcccagtacattc

SEQ ID NO: 1413829 - DNA, 15 bp, Homo sapiens
ttcccagtacattca

SEQ ID NO: 1413830 - DNA, 15 bp, Homo sapiens
tcccagtacattcat

SEQ ID NO: 1413831 - DNA, 15 bp, Homo sapiens
cccagtacattcata

SEQ ID NO: 1413832 - DNA, 15 bp, Homo sapiens
ccagtacattcatat

SEQ ID NO: 1413833 - DNA, 15 bp, Homo sapiens
cagtacattcatatt

SEQ ID NO: 1413834 - DNA, 15 bp, Homo sapiens
agtacattcatattc

SEQ ID NO: 1413835 - DNA, 15 bp, Homo sapiens
gtacattcatattct

SEQ ID NO: 1413836 - DNA, 15 bp, Homo sapiens
tacattcatattctg

SEQ ID NO: 1413837 - DNA, 15 bp, Homo sapiens
acattcatattctga

SEQ ID NO: 1413838 - DNA, 15 bp, Homo sapiens
cattcatattctgat

SEQ ID NO: 1413839 - DNA, 15 bp, Homo sapiens
attcatattctgatt

SEQ ID NO: 1413840 - DNA, 15 bp, Homo sapiens
ttcatattctgattc

SEQ ID NO: 1413841 - DNA, 15 bp, Homo sapiens
tcatattctgattcc

SEQ ID NO: 1413842 - DNA, 15 bp, Homo sapiens
catattctgattcct

SEQ ID NO: 1413843 - DNA, 15 bp, Homo sapiens
atattctgattcctc

SEQ ID NO: 1413844 - DNA, 15 bp, Homo sapiens
tattctgattcctct

SEQ ID NO: 1413845 - DNA, 15 bp, Homo sapiens
attctgattcctctt

SEQ ID NO: 1413846 - DNA, 15 bp, Homo sapiens
ttctgattcctcttt

SEQ ID NO: 1413847 - DNA, 15 bp, Homo sapiens
tctgattcctctttc

SEQ ID NO: 1413848 - DNA, 15 bp, Homo sapiens
ctgattcctctttct

SEQ ID NO: 1413849 - DNA, 15 bp, Homo sapiens
tgattcctctttctg

SEQ ID NO: 1413850 - DNA, 15 bp, Homo sapiens
gattcctctttctgt

SEQ ID NO: 1413851 - DNA, 15 bp, Homo sapiens
attcctctttctgtc

SEQ ID NO: 1413852 - DNA, 15 bp, Homo sapiens
ttcctctttctgtct

SEQ ID NO: 1413853 - DNA, 15 bp, Homo sapiens
tcctctttctgtctg

SEQ ID NO: 1413854 - DNA, 15 bp, Homo sapiens
cctctttctgtctgc

SEQ ID NO: 1413855 - DNA, 15 bp, Homo sapiens
ctctttctgtctgct

SEQ ID NO: 1413856 - DNA, 15 bp, Homo sapiens
tctttctgtctgctt

SEQ ID NO: 1413857 - DNA, 15 bp, Homo sapiens
ctttctgtctgctta

SEQ ID NO: 1413858 - DNA, 15 bp, Homo sapiens
tttctgtctgcttaa

SEQ ID NO: 1413859 - DNA, 15 bp, Homo sapiens
ttctgtctgcttaac

SEQ ID NO: 1413860 - DNA, 15 bp, Homo sapiens
tctgtctgcttaact

SEQ ID NO: 1413861 - DNA, 15 bp, Homo sapiens
ctgtctgcttaactt

SEQ ID NO: 1413862 - DNA, 15 bp, Homo sapiens
tgtctgcttaacttc

SEQ ID NO: 1413863 - DNA, 15 bp, Homo sapiens
gtctgcttaacttcc

SEQ ID NO: 1413864 - DNA, 15 bp, Homo sapiens
tctgcttaacttcca

SEQ ID NO: 1413865 - DNA, 15 bp, Homo sapiens
ctgcttaacttccat

SEQ ID NO: 1413866 - DNA, 15 bp, Homo sapiens
tgcttaacttccatt

SEQ ID NO: 1413867 - DNA, 15 bp, Homo sapiens
gcttaacttccattt

SEQ ID NO: 1413868 - DNA, 15 bp, Homo sapiens
cttaacttccatttc

SEQ ID NO: 1413869 - DNA, 15 bp, Homo sapiens
ttaacttccatttca

SEQ ID NO: 1413870 - DNA, 15 bp, Homo sapiens
taacttccatttcac

SEQ ID NO: 1413871 - DNA, 15 bp, Homo sapiens
aacttccatttcacc

SEQ ID NO: 1413872 - DNA, 15 bp, Homo sapiens
acttccatttcaccc

SEQ ID NO: 1413873 - DNA, 15 bp, Homo sapiens
cttccatttcaccca

SEQ ID NO: 1413874 - DNA, 15 bp, Homo sapiens
ttccatttcacccag

SEQ ID NO: 1413875 - DNA, 15 bp, Homo sapiens
tccatttcacccagt

SEQ ID NO: 1413876 - DNA, 15 bp, Homo sapiens
ccatttcacccagtg

SEQ ID NO: 1413877 - DNA, 15 bp, Homo sapiens
catttcacccagtgg

SEQ ID NO: 1413878 - DNA, 15 bp, Homo sapiens
atttcacccagtggc

SEQ ID NO: 1413879 - DNA, 15 bp, Homo sapiens
tttcacccagtggca

SEQ ID NO: 1413880 - DNA, 15 bp, Homo sapiens
ttcacccagtggcat

SEQ ID NO: 1413881 - DNA, 15 bp, Homo sapiens
tcacccagtggcatt

SEQ ID NO: 1413882 - DNA, 15 bp, Homo sapiens
cacccagtggcattc

SEQ ID NO: 1413883 - DNA, 15 bp, Homo sapiens
acccagtggcattca

SEQ ID NO: 1413884 - DNA, 15 bp, Homo sapiens
cccagtggcattcaa

SEQ ID NO: 1413885 - DNA, 15 bp, Homo sapiens
ccagtggcattcaac

SEQ ID NO: 1413886 - DNA, 15 bp, Homo sapiens
cagtggcattcaacc

SEQ ID NO: 1413887 - DNA, 15 bp, Homo sapiens
agtggcattcaacca

SEQ ID NO: 1413888 - DNA, 15 bp, Homo sapiens
gtggcattcaaccac

SEQ ID NO: 1413889 - DNA, 15 bp, Homo sapiens
tggcattcaaccaca

SEQ ID NO: 1413890 - DNA, 15 bp, Homo sapiens
ggcattcaaccacat

SEQ ID NO: 1413891 - DNA, 15 bp, Homo sapiens
gcattcaaccacatt

SEQ ID NO: 1413892 - DNA, 15 bp, Homo sapiens
cattcaaccacattt

SEQ ID NO: 1413893 - DNA, 15 bp, Homo sapiens
attcaaccacattta

SEQ ID NO: 1413894 - DNA, 15 bp, Homo sapiens
ttcaaccacatttac

SEQ ID NO: 1413895 - DNA, 15 bp, Homo sapiens
tcaaccacatttact

SEQ ID NO: 1413896 - DNA, 15 bp, Homo sapiens
caaccacatttactg

SEQ ID NO: 1413897 - DNA, 15 bp, Homo sapiens
aaccacatttactgc

SEQ ID NO: 1413898 - DNA, 15 bp, Homo sapiens
accacatttactgca

SEQ ID NO: 1413899 - DNA, 15 bp, Homo sapiens
ccacatttactgcac

SEQ ID NO: 1413900 - DNA, 15 bp, Homo sapiens
cacatttactgcaca

SEQ ID NO: 1413901 - DNA, 15 bp, Homo sapiens
acatttactgcacac

SEQ ID NO: 1413902 - DNA, 15 bp, Homo sapiens
catttactgcacacc

SEQ ID NO: 1413903 - DNA, 15 bp, Homo sapiens
atttactgcacaccc

SEQ ID NO: 1413904 - DNA, 15 bp, Homo sapiens
tttactgcacacccc

SEQ ID NO: 1413905 - DNA, 15 bp, Homo sapiens
ttactgcacaccccc

SEQ ID NO: 1413906 - DNA, 15 bp, Homo sapiens
tactgcacaccccct

SEQ ID NO: 1413907 - DNA, 15 bp, Homo sapiens
actgcacaccccctg

SEQ ID NO: 1413908 - DNA, 15 bp, Homo sapiens
ctgcacaccccctga

SEQ ID NO: 1413909 - DNA, 15 bp, Homo sapiens
tgcacaccccctgaa

SEQ ID NO: 1413910 - DNA, 15 bp, Homo sapiens
gcacaccccctgaaa

SEQ ID NO: 1413911 - DNA, 15 bp, Homo sapiens
cacaccccctgaaag

SEQ ID NO: 1413912 - DNA, 15 bp, Homo sapiens
acaccccctgaaagg

SEQ ID NO: 1413913 - DNA, 15 bp, Homo sapiens
caccccctgaaaggc

SEQ ID NO: 1413914 - DNA, 15 bp, Homo sapiens
accccctgaaaggct

SEQ ID NO: 1413915 - DNA, 15 bp, Homo sapiens
ccccctgaaaggctc

SEQ ID NO: 1413916 - DNA, 15 bp, Homo sapiens
cccctgaaaggctca

SEQ ID NO: 1413917 - DNA, 15 bp, Homo sapiens
ccctgaaaggctcag

SEQ ID NO: 1413918 - DNA, 15 bp, Homo sapiens
cctgaaaggctcagt

SEQ ID NO: 1413919 - DNA, 15 bp, Homo sapiens
ctgaaaggctcagtc

SEQ ID NO: 1413920 - DNA, 15 bp, Homo sapiens
tgaaaggctcagtcc

SEQ ID NO: 1413921 - DNA, 15 bp, Homo sapiens
gaaaggctcagtcct

SEQ ID NO: 1413922 - DNA, 15 bp, Homo sapiens
aaaggctcagtcctg

SEQ ID NO: 1413923 - DNA, 15 bp, Homo sapiens
aaggctcagtcctgc

SEQ ID NO: 1413924 - DNA, 15 bp, Homo sapiens
aggctcagtcctgcc

SEQ ID NO: 1413925 - DNA, 15 bp, Homo sapiens
ggctcagtcctgcct

SEQ ID NO: 1413926 - DNA, 15 bp, Homo sapiens
gctcagtcctgcctt

SEQ ID NO: 1413927 - DNA, 15 bp, Homo sapiens
ctcagtcctgccttt

SEQ ID NO: 1413928 - DNA, 15 bp, Homo sapiens
tcagtcctgcctttg

SEQ ID NO: 1413929 - DNA, 15 bp, Homo sapiens
cagtcctgcctttgg

SEQ ID NO: 1413930 - DNA, 15 bp, Homo sapiens
agtcctgcctttggg

SEQ ID NO: 1413931 - DNA, 15 bp, Homo sapiens
gtcctgcctttgggg

SEQ ID NO: 1413932 - DNA, 15 bp, Homo sapiens
tcctgcctttgggga

SEQ ID NO: 1413933 - DNA, 15 bp, Homo sapiens
cctgcctttggggaa

SEQ ID NO: 1413934 - DNA, 15 bp, Homo sapiens
ctgcctttggggaac

SEQ ID NO: 1413935 - DNA, 15 bp, Homo sapiens
tgcctttggggaact

SEQ ID NO: 1413936 - DNA, 15 bp, Homo sapiens
gcctttggggaactc

SEQ ID NO: 1413937 - DNA, 15 bp, Homo sapiens
cctttggggaactct

SEQ ID NO: 1413938 - DNA, 15 bp, Homo sapiens
ctttggggaactctt

SEQ ID NO: 1413939 - DNA, 15 bp, Homo sapiens
tttggggaactcttg

SEQ ID NO: 1413940 - DNA, 15 bp, Homo sapiens
ttggggaactcttga

SEQ ID NO: 1413941 - DNA, 15 bp, Homo sapiens
tggggaactcttgat

SEQ ID NO: 1413942 - DNA, 15 bp, Homo sapiens
ggggaactcttgatc

SEQ ID NO: 1413943 - DNA, 15 bp, Homo sapiens
gggaactcttgatct

SEQ ID NO: 1413944 - DNA, 15 bp, Homo sapiens
ggaactcttgatcta

SEQ ID NO: 1413945 - DNA, 15 bp, Homo sapiens
gaactcttgatctag

SEQ ID NO: 1413946 - DNA, 15 bp, Homo sapiens
aactcttgatctagg

SEQ ID NO: 1413947 - DNA, 15 bp, Homo sapiens
actcttgatctaggt

SEQ ID NO: 1413948 - DNA, 15 bp, Homo sapiens
ctcttgatctaggta

SEQ ID NO: 1413949 - DNA, 15 bp, Homo sapiens
tcttgatctaggtaa

SEQ ID NO: 1413950 - DNA, 15 bp, Homo sapiens
cttgatctaggtaag

SEQ ID NO: 1413951 - DNA, 15 bp, Homo sapiens
ttgatctaggtaaga

SEQ ID NO: 1413952 - DNA, 15 bp, Homo sapiens
tgatctaggtaagat

SEQ ID NO: 1413953 - DNA, 15 bp, Homo sapiens
gatctaggtaagatg

SEQ ID NO: 1413954 - DNA, 15 bp, Homo sapiens
atctaggtaagatgt

SEQ ID NO: 1413955 - DNA, 15 bp, Homo sapiens
tctaggtaagatgtc

SEQ ID NO: 1413956 - DNA, 15 bp, Homo sapiens
ctaggtaagatgtct

SEQ ID NO: 1413957 - DNA, 15 bp, Homo sapiens
taggtaagatgtcta

SEQ ID NO: 1413958 - DNA, 15 bp, Homo sapiens
aggtaagatgtctaa

SEQ ID NO: 1413959 - DNA, 15 bp, Homo sapiens
ggtaagatgtctaat

SEQ ID NO: 1413960 - DNA, 15 bp, Homo sapiens
gtaagatgtctaatg

SEQ ID NO: 1413961 - DNA, 15 bp, Homo sapiens
taagatgtctaatgt

SEQ ID NO: 1413962 - DNA, 15 bp, Homo sapiens
aagatgtctaatgtg

SEQ ID NO: 1413963 - DNA, 15 bp, Homo sapiens
agatgtctaatgtgc

SEQ ID NO: 1413964 - DNA, 15 bp, Homo sapiens
gatgtctaatgtgca

SEQ ID NO: 1413965 - DNA, 15 bp, Homo sapiens
atgtctaatgtgcaa

SEQ ID NO: 1413966 - DNA, 15 bp, Homo sapiens
tgtctaatgtgcaag

SEQ ID NO: 1413967 - DNA, 15 bp, Homo sapiens
gtctaatgtgcaagg

SEQ ID NO: 1413968 - DNA, 15 bp, Homo sapiens
tctaatgtgcaaggc

SEQ ID NO: 1413969 - DNA, 15 bp, Homo sapiens
ctaatgtgcaaggct

SEQ ID NO: 1413970 - DNA, 15 bp, Homo sapiens
taatgtgcaaggctc

SEQ ID NO: 1413971 - DNA, 15 bp, Homo sapiens
aatgtgcaaggctct

SEQ ID NO: 1413972 - DNA, 15 bp, Homo sapiens
atgtgcaaggctctg

SEQ ID NO: 1413973 - DNA, 15 bp, Homo sapiens
tgtgcaaggctctgt

SEQ ID NO: 1413974 - DNA, 15 bp, Homo sapiens
gtgcaaggctctgtt

SEQ ID NO: 1413975 - DNA, 15 bp, Homo sapiens
tgcaaggctctgttg

SEQ ID NO: 1413976 - DNA, 15 bp, Homo sapiens
gcaaggctctgttgg

SEQ ID NO: 1413977 - DNA, 15 bp, Homo sapiens
caaggctctgttggt

SEQ ID NO: 1413978 - DNA, 15 bp, Homo sapiens
aaggctctgttggtg

SEQ ID NO: 1413979 - DNA, 15 bp, Homo sapiens
aggctctgttggtgg

SEQ ID NO: 1413980 - DNA, 15 bp, Homo sapiens
ggctctgttggtggt

SEQ ID NO: 1413981 - DNA, 15 bp, Homo sapiens
gctctgttggtggtt

SEQ ID NO: 1413982 - DNA, 15 bp, Homo sapiens
ctctgttggtggtta

SEQ ID NO: 1413983 - DNA, 15 bp, Homo sapiens
tctgttggtggttac

SEQ ID NO: 1413984 - DNA, 15 bp, Homo sapiens
ctgttggtggttact

SEQ ID NO: 1413985 - DNA, 15 bp, Homo sapiens
tgttggtggttacta

SEQ ID NO: 1413986 - DNA, 15 bp, Homo sapiens
gttggtggttactac

SEQ ID NO: 1413987 - DNA, 15 bp, Homo sapiens
ttggtggttactaca

SEQ ID NO: 1413988 - DNA, 15 bp, Homo sapiens
tggtggttactacaa

SEQ ID NO: 1413989 - DNA, 15 bp, Homo sapiens
ggtggttactacaag

SEQ ID NO: 1413990 - DNA, 15 bp, Homo sapiens
gtggttactacaaga

SEQ ID NO: 1413991 - DNA, 15 bp, Homo sapiens
tggttactacaagaa

SEQ ID NO: 1413992 - DNA, 15 bp, Homo sapiens
ggttactacaagaaa

SEQ ID NO: 1413993 - DNA, 15 bp, Homo sapiens
gttactacaagaaag

SEQ ID NO: 1413994 - DNA, 15 bp, Homo sapiens
ttactacaagaaagt

SEQ ID NO: 1413995 - DNA, 15 bp, Homo sapiens
tactacaagaaagtc

SEQ ID NO: 1413996 - DNA, 15 bp, Homo sapiens
actacaagaaagtct

SEQ ID NO: 1413997 - DNA, 15 bp, Homo sapiens
ctacaagaaagtcta

SEQ ID NO: 1413998 - DNA, 15 bp, Homo sapiens
tacaagaaagtctac

SEQ ID NO: 1413999 - DNA, 15 bp, Homo sapiens
acaagaaagtctact

SEQ ID NO: 1414000 - DNA, 15 bp, Homo sapiens
caagaaagtctactc

SEQ ID NO: 1414001 - DNA, 15 bp, Homo sapiens
aagaaagtctactct

SEQ ID NO: 1414002 - DNA, 15 bp, Homo sapiens
agaaagtctactcta

SEQ ID NO: 1414003 - DNA, 15 bp, Homo sapiens
gaaagtctactctaa

SEQ ID NO: 1414004 - DNA, 15 bp, Homo sapiens
aaagtctactctaaa

SEQ ID NO: 1414005 - DNA, 15 bp, Homo sapiens
aagtctactctaaaa

SEQ ID NO: 1414006 - DNA, 15 bp, Homo sapiens
agtctactctaaaaa

SEQ ID NO: 1414007 - DNA, 15 bp, Homo sapiens
gtctactctaaaaat

SEQ ID NO: 1414008 - DNA, 15 bp, Homo sapiens
tctactctaaaaatg

SEQ ID NO: 1414009 - DNA, 15 bp, Homo sapiens
ctactctaaaaatgt

SEQ ID NO: 1414010 - DNA, 15 bp, Homo sapiens
tactctaaaaatgtc

SEQ ID NO: 1414011 - DNA, 15 bp, Homo sapiens
actctaaaaatgtca

SEQ ID NO: 1414012 - DNA, 15 bp, Homo sapiens
ctctaaaaatgtcaa

SEQ ID NO: 1414013 - DNA, 15 bp, Homo sapiens
tctaaaaatgtcaaa

SEQ ID NO: 1414014 - DNA, 15 bp, Homo sapiens
ctaaaaatgtcaaac

SEQ ID NO: 1414015 - DNA, 15 bp, Homo sapiens
taaaaatgtcaaact

SEQ ID NO: 1414016 - DNA, 15 bp, Homo sapiens
aaaaatgtcaaactg

SEQ ID NO: 1414017 - DNA, 15 bp, Homo sapiens
aaaatgtcaaactga

SEQ ID NO: 1414018 - DNA, 15 bp, Homo sapiens
aaatgtcaaactgaa

SEQ ID NO: 1414019 - DNA, 15 bp, Homo sapiens
aatgtcaaactgaat

SEQ ID NO: 1414020 - DNA, 15 bp, Homo sapiens
atgtcaaactgaatg

SEQ ID NO: 1414021 - DNA, 15 bp, Homo sapiens
tgtcaaactgaatgt

SEQ ID NO: 1414022 - DNA, 15 bp, Homo sapiens
gtcaaactgaatgtg

SEQ ID NO: 1414023 - DNA, 15 bp, Homo sapiens
tcaaactgaatgtga

SEQ ID NO: 1414024 - DNA, 15 bp, Homo sapiens
caaactgaatgtgaa

SEQ ID NO: 1414025 - DNA, 15 bp, Homo sapiens
aaactgaatgtgaac

SEQ ID NO: 1414026 - DNA, 15 bp, Homo sapiens
aactgaatgtgaaca

SEQ ID NO: 1414027 - DNA, 15 bp, Homo sapiens
actgaatgtgaacaa

SEQ ID NO: 1414028 - DNA, 15 bp, Homo sapiens
ctgaatgtgaacaag

SEQ ID NO: 1414029 - DNA, 15 bp, Homo sapiens
tgaatgtgaacaagt

SEQ ID NO: 1414030 - DNA, 15 bp, Homo sapiens
gaatgtgaacaagta

SEQ ID NO: 1414031 - DNA, 15 bp, Homo sapiens
aatgtgaacaagtat

SEQ ID NO: 1414032 - DNA, 15 bp, Homo sapiens
atgtgaacaagtatt

SEQ ID NO: 1414033 - DNA, 15 bp, Homo sapiens
tgtgaacaagtattc

SEQ ID NO: 1414034 - DNA, 15 bp, Homo sapiens
gtgaacaagtattca

SEQ ID NO: 1414035 - DNA, 15 bp, Homo sapiens
tgaacaagtattcaa

SEQ ID NO: 1414036 - DNA, 15 bp, Homo sapiens
gaacaagtattcaaa

SEQ ID NO: 1414037 - DNA, 15 bp, Homo sapiens
aacaagtattcaaag

SEQ ID NO: 1414038 - DNA, 15 bp, Homo sapiens
acaagtattcaaagt

SEQ ID NO: 1414039 - DNA, 15 bp, Homo sapiens
caagtattcaaagta

SEQ ID NO: 1414040 - DNA, 15 bp, Homo sapiens
aagtattcaaagtat

SEQ ID NO: 1414041 - DNA, 15 bp, Homo sapiens
agtattcaaagtatg

SEQ ID NO: 1414042 - DNA, 15 bp, Homo sapiens
gtattcaaagtatgg

SEQ ID NO: 1414043 - DNA, 15 bp, Homo sapiens
tattcaaagtatgga

SEQ ID NO: 1414044 - DNA, 15 bp, Homo sapiens
attcaaagtatggag

SEQ ID NO: 1414045 - DNA, 15 bp, Homo sapiens
ttcaaagtatggagc

SEQ ID NO: 1414046 - DNA, 15 bp, Homo sapiens
tcaaagtatggagca

SEQ ID NO: 1414047 - DNA, 15 bp, Homo sapiens
caaagtatggagcat

SEQ ID NO: 1414048 - DNA, 15 bp, Homo sapiens
aaagtatggagcata

SEQ ID NO: 1414049 - DNA, 15 bp, Homo sapiens
aagtatggagcatag

SEQ ID NO: 1414050 - DNA, 15 bp, Homo sapiens
agtatggagcataga

SEQ ID NO: 1414051 - DNA, 15 bp, Homo sapiens
gtatggagcatagag

SEQ ID NO: 1414052 - DNA, 15 bp, Homo sapiens
tatggagcatagaga

SEQ ID NO: 1414053 - DNA, 15 bp, Homo sapiens
atggagcatagagaa

SEQ ID NO: 1414054 - DNA, 15 bp, Homo sapiens
tggagcatagagaaa

SEQ ID NO: 1414055 - DNA, 15 bp, Homo sapiens
ggagcatagagaaaa

SEQ ID NO: 1414056 - DNA, 15 bp, Homo sapiens
gagcatagagaaaat

SEQ ID NO: 1414057 - DNA, 15 bp, Homo sapiens
agcatagagaaaata

SEQ ID NO: 1414058 - DNA, 15 bp, Homo sapiens
gcatagagaaaatat

SEQ ID NO: 1414059 - DNA, 15 bp, Homo sapiens
catagagaaaatata

SEQ ID NO: 1414060 - DNA, 15 bp, Homo sapiens
atagagaaaatatac

SEQ ID NO: 1414061 - DNA, 15 bp, Homo sapiens
tagagaaaatatact

SEQ ID NO: 1414062 - DNA, 15 bp, Homo sapiens
agagaaaatatactc

SEQ ID NO: 1414063 - DNA, 15 bp, Homo sapiens
gagaaaatatactca

SEQ ID NO: 1414064 - DNA, 15 bp, Homo sapiens
agaaaatatactcac

SEQ ID NO: 1414065 - DNA, 15 bp, Homo sapiens
gaaaatatactcacc

SEQ ID NO: 1414066 - DNA, 15 bp, Homo sapiens
aaaatatactcaccg

SEQ ID NO: 1414067 - DNA, 15 bp, Homo sapiens
aaatatactcaccgt

SEQ ID NO: 1414068 - DNA, 15 bp, Homo sapiens
aatatactcaccgtg

SEQ ID NO: 1414069 - DNA, 15 bp, Homo sapiens
atatactcaccgtgg

SEQ ID NO: 1414070 - DNA, 15 bp, Homo sapiens
tatactcaccgtgga

SEQ ID NO: 1414071 - DNA, 15 bp, Homo sapiens
atactcaccgtggac

SEQ ID NO: 1414072 - DNA, 15 bp, Homo sapiens
tactcaccgtggacc

SEQ ID NO: 1414073 - DNA, 15 bp, Homo sapiens
actcaccgtggacct

SEQ ID NO: 1414074 - DNA, 15 bp, Homo sapiens
ctcaccgtggacctg

SEQ ID NO: 1414075 - DNA, 15 bp, Homo sapiens
tcaccgtggacctga

SEQ ID NO: 1414076 - DNA, 15 bp, Homo sapiens
caccgtggacctgat

SEQ ID NO: 1414077 - DNA, 15 bp, Homo sapiens
accgtggacctgatg

SEQ ID NO: 1414078 - DNA, 15 bp, Homo sapiens
ccgtggacctgatga

SEQ ID NO: 1414079 - DNA, 15 bp, Homo sapiens
cgtggacctgatgaa

SEQ ID NO: 1414080 - DNA, 15 bp, Homo sapiens
gtggacctgatgaag

SEQ ID NO: 1414081 - DNA, 15 bp, Homo sapiens
tggacctgatgaaga

SEQ ID NO: 1414082 - DNA, 15 bp, Homo sapiens
ggacctgatgaagaa

SEQ ID NO: 1414083 - DNA, 15 bp, Homo sapiens
gacctgatgaagaat

SEQ ID NO: 1414084 - DNA, 15 bp, Homo sapiens
acctgatgaagaatg

SEQ ID NO: 1414085 - DNA, 15 bp, Homo sapiens
cctgatgaagaatga

SEQ ID NO: 1414086 - DNA, 15 bp, Homo sapiens
ctgatgaagaatgaa

SEQ ID NO: 1414087 - DNA, 15 bp, Homo sapiens
tgatgaagaatgaag

SEQ ID NO: 1414088 - DNA, 15 bp, Homo sapiens
gatgaagaatgaagg

SEQ ID NO: 1414089 - DNA, 15 bp, Homo sapiens
atgaagaatgaaggc

SEQ ID NO: 1414090 - DNA, 15 bp, Homo sapiens
tgaagaatgaaggct

SEQ ID NO: 1414091 - DNA, 15 bp, Homo sapiens
gaagaatgaaggctt

SEQ ID NO: 1414092 - DNA, 15 bp, Homo sapiens
aagaatgaaggcttc

SEQ ID NO: 1414093 - DNA, 15 bp, Homo sapiens
agaatgaaggcttca

SEQ ID NO: 1414094 - DNA, 15 bp, Homo sapiens
gaatgaaggcttcaa

SEQ ID NO: 1414095 - DNA, 15 bp, Homo sapiens
aatgaaggcttcaag

SEQ ID NO: 1414096 - DNA, 15 bp, Homo sapiens
atgaaggcttcaagg

SEQ ID NO: 1414097 - DNA, 15 bp, Homo sapiens
tgaaggcttcaagga

SEQ ID NO: 1414098 - DNA, 15 bp, Homo sapiens
gaaggcttcaaggag

SEQ ID NO: 1414099 - DNA, 15 bp, Homo sapiens
aaggcttcaaggagg

SEQ ID NO: 1414100 - DNA, 15 bp, Homo sapiens
aggcttcaaggagga

SEQ ID NO: 1414101 - DNA, 15 bp, Homo sapiens
ggcttcaaggaggag

SEQ ID NO: 1414102 - DNA, 15 bp, Homo sapiens
gcttcaaggaggagg

SEQ ID NO: 1414103 - DNA, 15 bp, Homo sapiens
cttcaaggaggaggc

SEQ ID NO: 1414104 - DNA, 15 bp, Homo sapiens
ttcaaggaggaggca

SEQ ID NO: 1414105 - DNA, 15 bp, Homo sapiens
tcaaggaggaggcag

SEQ ID NO: 1414106 - DNA, 15 bp, Homo sapiens
caaggaggaggcaga

SEQ ID NO: 1414107 - DNA, 15 bp, Homo sapiens
aaggaggaggcagag

SEQ ID NO: 1414108 - DNA, 15 bp, Homo sapiens
aggaggaggcagagc

SEQ ID NO: 1414109 - DNA, 15 bp, Homo sapiens
ggaggaggcagagct

SEQ ID NO: 1414110 - DNA, 15 bp, Homo sapiens
gaggaggcagagctt

SEQ ID NO: 1414111 - DNA, 15 bp, Homo sapiens
aggaggcagagcttc

SEQ ID NO: 1414112 - DNA, 15 bp, Homo sapiens
ggaggcagagcttca

SEQ ID NO: 1414113 - DNA, 15 bp, Homo sapiens
gaggcagagcttcag

SEQ ID NO: 1414114 - DNA, 15 bp, Homo sapiens
aggcagagcttcagc

SEQ ID NO: 1414115 - DNA, 15 bp, Homo sapiens
ggcagagcttcagct

SEQ ID NO: 1414116 - DNA, 15 bp, Homo sapiens
gcagagcttcagcta

SEQ ID NO: 1414117 - DNA, 15 bp, Homo sapiens
cagagcttcagctag

SEQ ID NO: 1414118 - DNA, 15 bp, Homo sapiens
agagcttcagctagg

SEQ ID NO: 1414119 - DNA, 15 bp, Homo sapiens
gagcttcagctaggc

SEQ ID NO: 1414120 - DNA, 15 bp, Homo sapiens
agcttcagctaggcc

SEQ ID NO: 1414121 - DNA, 15 bp, Homo sapiens
gcttcagctaggcct

SEQ ID NO: 1414122 - DNA, 15 bp, Homo sapiens
cttcagctaggcctt

SEQ ID NO: 1414123 - DNA, 15 bp, Homo sapiens
ttcagctaggccttg

SEQ ID NO: 1414124 - DNA, 15 bp, Homo sapiens
tcagctaggccttga

SEQ ID NO: 1414125 - DNA, 15 bp, Homo sapiens
cagctaggccttgaa

SEQ ID NO: 1414126 - DNA, 15 bp, Homo sapiens
agctaggccttgaat

SEQ ID NO: 1414127 - DNA, 15 bp, Homo sapiens
gctaggccttgaatg

SEQ ID NO: 1414128 - DNA, 15 bp, Homo sapiens
ctaggccttgaatga

SEQ ID NO: 1414129 - DNA, 15 bp, Homo sapiens
taggccttgaatgat

SEQ ID NO: 1414130 - DNA, 15 bp, Homo sapiens
aggccttgaatgatg

SEQ ID NO: 1414131 - DNA, 15 bp, Homo sapiens
ggccttgaatgatgg

SEQ ID NO: 1414132 - DNA, 15 bp, Homo sapiens
gccttgaatgatggg

SEQ ID NO: 1414133 - DNA, 15 bp, Homo sapiens
ccttgaatgatgggt

SEQ ID NO: 1414134 - DNA, 15 bp, Homo sapiens
cttgaatgatgggta

SEQ ID NO: 1414135 - DNA, 15 bp, Homo sapiens
ttgaatgatgggtag

SEQ ID NO: 1414136 - DNA, 15 bp, Homo sapiens
tgaatgatgggtagg

SEQ ID NO: 1414137 - DNA, 15 bp, Homo sapiens
gaatgatgggtaggc

SEQ ID NO: 1414138 - DNA, 15 bp, Homo sapiens
aatgatgggtaggca

SEQ ID NO: 1414139 - DNA, 15 bp, Homo sapiens
atgatgggtaggcag

SEQ ID NO: 1414140 - DNA, 15 bp, Homo sapiens
tgatgggtaggcaga

SEQ ID NO: 1414141 - DNA, 15 bp, Homo sapiens
gatgggtaggcagaa

SEQ ID NO: 1414142 - DNA, 15 bp, Homo sapiens
atgggtaggcagaat

SEQ ID NO: 1414143 - DNA, 15 bp, Homo sapiens
tgggtaggcagaata

SEQ ID NO: 1414144 - DNA, 15 bp, Homo sapiens
gggtaggcagaatag

SEQ ID NO: 1414145 - DNA, 15 bp, Homo sapiens
ggtaggcagaataga

SEQ ID NO: 1414146 - DNA, 15 bp, Homo sapiens
gtaggcagaatagag

SEQ ID NO: 1414147 - DNA, 15 bp, Homo sapiens
taggcagaatagagg

SEQ ID NO: 1414148 - DNA, 15 bp, Homo sapiens
aggcagaatagagga

SEQ ID NO: 1414149 - DNA, 15 bp, Homo sapiens
ggcagaatagaggag

SEQ ID NO: 1414150 - DNA, 15 bp, Homo sapiens
gcagaatagaggagg

SEQ ID NO: 1414151 - DNA, 15 bp, Homo sapiens
cagaatagaggagga

SEQ ID NO: 1414152 - DNA, 15 bp, Homo sapiens
agaatagaggaggag

SEQ ID NO: 1414153 - DNA, 15 bp, Homo sapiens
gaatagaggaggaga

SEQ ID NO: 1414154 - DNA, 15 bp, Homo sapiens
aatagaggaggagag

SEQ ID NO: 1414155 - DNA, 15 bp, Homo sapiens
atagaggaggagaga

SEQ ID NO: 1414156 - DNA, 15 bp, Homo sapiens
tagaggaggagagac

SEQ ID NO: 1414157 - DNA, 15 bp, Homo sapiens
agaggaggagagaca

SEQ ID NO: 1414158 - DNA, 15 bp, Homo sapiens
gaggaggagagacat

SEQ ID NO: 1414159 - DNA, 15 bp, Homo sapiens
aggaggagagacatc

SEQ ID NO: 1414160 - DNA, 15 bp, Homo sapiens
ggaggagagacatcc

SEQ ID NO: 1414161 - DNA, 15 bp, Homo sapiens
gaggagagacatcct

SEQ ID NO: 1414162 - DNA, 15 bp, Homo sapiens
aggagagacatccta

SEQ ID NO: 1414163 - DNA, 15 bp, Homo sapiens
ggagagacatcctag

SEQ ID NO: 1414164 - DNA, 15 bp, Homo sapiens
gagagacatcctaga

SEQ ID NO: 1414165 - DNA, 15 bp, Homo sapiens
agagacatcctagat

SEQ ID NO: 1414166 - DNA, 15 bp, Homo sapiens
gagacatcctagatg

SEQ ID NO: 1414167 - DNA, 15 bp, Homo sapiens
agacatcctagatgg

SEQ ID NO: 1414168 - DNA, 15 bp, Homo sapiens
gacatcctagatgga

SEQ ID NO: 1414169 - DNA, 15 bp, Homo sapiens
acatcctagatggag

SEQ ID NO: 1414170 - DNA, 15 bp, Homo sapiens
catcctagatggagg

SEQ ID NO: 1414171 - DNA, 15 bp, Homo sapiens
atcctagatggaggg

SEQ ID NO: 1414172 - DNA, 15 bp, Homo sapiens
tcctagatggagggg

SEQ ID NO: 1414173 - DNA, 15 bp, Homo sapiens
cctagatggaggggg

SEQ ID NO: 1414174 - DNA, 15 bp, Homo sapiens
ctagatggagggggt

SEQ ID NO: 1414175 - DNA, 15 bp, Homo sapiens
tagatggagggggta

SEQ ID NO: 1414176 - DNA, 15 bp, Homo sapiens
agatggagggggtag

SEQ ID NO: 1414177 - DNA, 15 bp, Homo sapiens
gatggagggggtaga

SEQ ID NO: 1414178 - DNA, 15 bp, Homo sapiens
atggagggggtagaa

SEQ ID NO: 1414179 - DNA, 15 bp, Homo sapiens
tggagggggtagaat

SEQ ID NO: 1414180 - DNA, 15 bp, Homo sapiens
ggagggggtagaatt

SEQ ID NO: 1414181 - DNA, 15 bp, Homo sapiens
gagggggtagaattg

SEQ ID NO: 1414182 - DNA, 15 bp, Homo sapiens
agggggtagaattgc

SEQ ID NO: 1414183 - DNA, 15 bp, Homo sapiens
gggggtagaattgca

SEQ ID NO: 1414184 - DNA, 15 bp, Homo sapiens
ggggtagaattgcaa

SEQ ID NO: 1414185 - DNA, 15 bp, Homo sapiens
gggtagaattgcaaa

SEQ ID NO: 1414186 - DNA, 15 bp, Homo sapiens
ggtagaattgcaaaa

SEQ ID NO: 1414187 - DNA, 15 bp, Homo sapiens
gtagaattgcaaaac

SEQ ID NO: 1414188 - DNA, 15 bp, Homo sapiens
tagaattgcaaaacc

SEQ ID NO: 1414189 - DNA, 15 bp, Homo sapiens
agaattgcaaaacca

SEQ ID NO: 1414190 - DNA, 15 bp, Homo sapiens
gaattgcaaaaccag

SEQ ID NO: 1414191 - DNA, 15 bp, Homo sapiens
aattgcaaaaccagg

SEQ ID NO: 1414192 - DNA, 15 bp, Homo sapiens
attgcaaaaccaggg

SEQ ID NO: 1414193 - DNA, 15 bp, Homo sapiens
ttgcaaaaccagggt

SEQ ID NO: 1414194 - DNA, 15 bp, Homo sapiens
tgcaaaaccagggtt

SEQ ID NO: 1414195 - DNA, 15 bp, Homo sapiens
gcaaaaccagggttg

SEQ ID NO: 1414196 - DNA, 15 bp, Homo sapiens
caaaaccagggttga

SEQ ID NO: 1414197 - DNA, 15 bp, Homo sapiens
aaaaccagggttgat

SEQ ID NO: 1414198 - DNA, 15 bp, Homo sapiens
aaaccagggttgatg

SEQ ID NO: 1414199 - DNA, 15 bp, Homo sapiens
aaccagggttgatgg

SEQ ID NO: 1414200 - DNA, 15 bp, Homo sapiens
accagggttgatggt

SEQ ID NO: 1414201 - DNA, 15 bp, Homo sapiens
ccagggttgatggtg

SEQ ID NO: 1414202 - DNA, 15 bp, Homo sapiens
cagggttgatggtgc

SEQ ID NO: 1414203 - DNA, 15 bp, Homo sapiens
agggttgatggtgcc

SEQ ID NO: 1414204 - DNA, 15 bp, Homo sapiens
gggttgatggtgcca

SEQ ID NO: 1414205 - DNA, 15 bp, Homo sapiens
ggttgatggtgccag

SEQ ID NO: 1414206 - DNA, 15 bp, Homo sapiens
gttgatggtgccagc

SEQ ID NO: 1414207 - DNA, 15 bp, Homo sapiens
ttgatggtgccagca

SEQ ID NO: 1414208 - DNA, 15 bp, Homo sapiens
tgatggtgccagcac

SEQ ID NO: 1414209 - DNA, 15 bp, Homo sapiens
gatggtgccagcaca

SEQ ID NO: 1414210 - DNA, 15 bp, Homo sapiens
atggtgccagcacat

SEQ ID NO: 1414211 - DNA, 15 bp, Homo sapiens
tggtgccagcacata

SEQ ID NO: 1414212 - DNA, 15 bp, Homo sapiens
ggtgccagcacataa

SEQ ID NO: 1414213 - DNA, 15 bp, Homo sapiens
gtgccagcacataaa

SEQ ID NO: 1414214 - DNA, 15 bp, Homo sapiens
tgccagcacataaag

SEQ ID NO: 1414215 - DNA, 15 bp, Homo sapiens
gccagcacataaagg

SEQ ID NO: 1414216 - DNA, 15 bp, Homo sapiens
ccagcacataaaggg

SEQ ID NO: 1414217 - DNA, 15 bp, Homo sapiens
cagcacataaagggc

SEQ ID NO: 1414218 - DNA, 15 bp, Homo sapiens
agcacataaagggct

SEQ ID NO: 1414219 - DNA, 15 bp, Homo sapiens
gcacataaagggctg

SEQ ID NO: 1414220 - DNA, 15 bp, Homo sapiens
cacataaagggctgg

SEQ ID NO: 1414221 - DNA, 15 bp, Homo sapiens
acataaagggctggc

SEQ ID NO: 1414222 - DNA, 15 bp, Homo sapiens
cataaagggctggca

SEQ ID NO: 1414223 - DNA, 15 bp, Homo sapiens
ataaagggctggcag

SEQ ID NO: 1414224 - DNA, 15 bp, Homo sapiens
taaagggctggcagg

SEQ ID NO: 1414225 - DNA, 15 bp, Homo sapiens
aaagggctggcaggg

SEQ ID NO: 1414226 - DNA, 15 bp, Homo sapiens
aagggctggcagggt

SEQ ID NO: 1414227 - DNA, 15 bp, Homo sapiens
agggctggcagggtg

SEQ ID NO: 1414228 - DNA, 15 bp, Homo sapiens
gggctggcagggtgg

SEQ ID NO: 1414229 - DNA, 15 bp, Homo sapiens
ggctggcagggtgga

SEQ ID NO: 1414230 - DNA, 15 bp, Homo sapiens
gctggcagggtggag

SEQ ID NO: 1414231 - DNA, 15 bp, Homo sapiens
ctggcagggtggagg

SEQ ID NO: 1414232 - DNA, 15 bp, Homo sapiens
tggcagggtggaggg

SEQ ID NO: 1414233 - DNA, 15 bp, Homo sapiens
ggcagggtggagggt

SEQ ID NO: 1414234 - DNA, 15 bp, Homo sapiens
gcagggtggagggtc

SEQ ID NO: 1414235 - DNA, 15 bp, Homo sapiens
cagggtggagggtct

SEQ ID NO: 1414236 - DNA, 15 bp, Homo sapiens
agggtggagggtcta

SEQ ID NO: 1414237 - DNA, 15 bp, Homo sapiens
gggtggagggtctat

SEQ ID NO: 1414238 - DNA, 15 bp, Homo sapiens
ggtggagggtctatg

SEQ ID NO: 1414239 - DNA, 15 bp, Homo sapiens
gtggagggtctatga

SEQ ID NO: 1414240 - DNA, 15 bp, Homo sapiens
tggagggtctatgat

SEQ ID NO: 1414241 - DNA, 15 bp, Homo sapiens
ggagggtctatgata

SEQ ID NO: 1414242 - DNA, 15 bp, Homo sapiens
gagggtctatgatag

SEQ ID NO: 1414243 - DNA, 15 bp, Homo sapiens
agggtctatgataga

SEQ ID NO: 1414244 - DNA, 15 bp, Homo sapiens
gggtctatgatagag

SEQ ID NO: 1414245 - DNA, 15 bp, Homo sapiens
ggtctatgatagaga

SEQ ID NO: 1414246 - DNA, 15 bp, Homo sapiens
gtctatgatagagac

SEQ ID NO: 1414247 - DNA, 15 bp, Homo sapiens
tctatgatagagacc

SEQ ID NO: 1414248 - DNA, 15 bp, Homo sapiens
ctatgatagagacct

SEQ ID NO: 1414249 - DNA, 15 bp, Homo sapiens
tatgatagagaccta

SEQ ID NO: 1414250 - DNA, 15 bp, Homo sapiens
atgatagagacctat

SEQ ID NO: 1414251 - DNA, 15 bp, Homo sapiens
tgatagagacctata

SEQ ID NO: 1414252 - DNA, 15 bp, Homo sapiens
gatagagacctatag

SEQ ID NO: 1414253 - DNA, 15 bp, Homo sapiens
atagagacctatagg

SEQ ID NO: 1414254 - DNA, 15 bp, Homo sapiens
tagagacctatagga

SEQ ID NO: 1414255 - DNA, 15 bp, Homo sapiens
agagacctataggag

SEQ ID NO: 1414256 - DNA, 15 bp, Homo sapiens
gagacctataggaga

SEQ ID NO: 1414257 - DNA, 15 bp, Homo sapiens
agacctataggagat

SEQ ID NO: 1414258 - DNA, 15 bp, Homo sapiens
gacctataggagata

SEQ ID NO: 1414259 - DNA, 15 bp, Homo sapiens
acctataggagataa

SEQ ID NO: 1414260 - DNA, 15 bp, Homo sapiens
cctataggagataaa

SEQ ID NO: 1414261 - DNA, 15 bp, Homo sapiens
ctataggagataaag

SEQ ID NO: 1414262 - DNA, 15 bp, Homo sapiens
tataggagataaaga

SEQ ID NO: 1414263 - DNA, 15 bp, Homo sapiens
ataggagataaagat

SEQ ID NO: 1414264 - DNA, 15 bp, Homo sapiens
taggagataaagata

SEQ ID NO: 1414265 - DNA, 15 bp, Homo sapiens
aggagataaagatag

SEQ ID NO: 1414266 - DNA, 15 bp, Homo sapiens
ggagataaagataga

SEQ ID NO: 1414267 - DNA, 15 bp, Homo sapiens
gagataaagatagag

SEQ ID NO: 1414268 - DNA, 15 bp, Homo sapiens
agataaagatagagt

SEQ ID NO: 1414269 - DNA, 15 bp, Homo sapiens
gataaagatagagtt

SEQ ID NO: 1414270 - DNA, 15 bp, Homo sapiens
ataaagatagagttg

SEQ ID NO: 1414271 - DNA, 15 bp, Homo sapiens
taaagatagagttga

SEQ ID NO: 1414272 - DNA, 15 bp, Homo sapiens
aaagatagagttgaa

SEQ ID NO: 1414273 - DNA, 15 bp, Homo sapiens
aagatagagttgaaa

SEQ ID NO: 1414274 - DNA, 15 bp, Homo sapiens
agatagagttgaaat

SEQ ID NO: 1414275 - DNA, 15 bp, Homo sapiens
gatagagttgaaatt

SEQ ID NO: 1414276 - DNA, 15 bp, Homo sapiens
atagagttgaaatta

SEQ ID NO: 1414277 - DNA, 15 bp, Homo sapiens
tagagttgaaattat

SEQ ID NO: 1414278 - DNA, 15 bp, Homo sapiens
agagttgaaattatg

SEQ ID NO: 1414279 - DNA, 15 bp, Homo sapiens
gagttgaaattatgg

SEQ ID NO: 1414280 - DNA, 15 bp, Homo sapiens
agttgaaattatggg

SEQ ID NO: 1414281 - DNA, 15 bp, Homo sapiens
gttgaaattatggga

SEQ ID NO: 1414282 - DNA, 15 bp, Homo sapiens
ttgaaattatgggag

SEQ ID NO: 1414283 - DNA, 15 bp, Homo sapiens
tgaaattatgggagc

SEQ ID NO: 1414284 - DNA, 15 bp, Homo sapiens
gaaattatgggagcc

SEQ ID NO: 1414285 - DNA, 15 bp, Homo sapiens
aaattatgggagcct

SEQ ID NO: 1414286 - DNA, 15 bp, Homo sapiens
aattatgggagcctc

SEQ ID NO: 1414287 - DNA, 15 bp, Homo sapiens
attatgggagcctcc

SEQ ID NO: 1414288 - DNA, 15 bp, Homo sapiens
ttatgggagcctcca

SEQ ID NO: 1414289 - DNA, 15 bp, Homo sapiens
tatgggagcctccat

SEQ ID NO: 1414290 - DNA, 15 bp, Homo sapiens
atgggagcctccatg

SEQ ID NO: 1414291 - DNA, 15 bp, Homo sapiens
tgggagcctccatgt

SEQ ID NO: 1414292 - DNA, 15 bp, Homo sapiens
gggagcctccatgtc

SEQ ID NO: 1414293 - DNA, 15 bp, Homo sapiens
ggagcctccatgtct

SEQ ID NO: 1414294 - DNA, 15 bp, Homo sapiens
gagcctccatgtctg

SEQ ID NO: 1414295 - DNA, 15 bp, Homo sapiens
agcctccatgtctgt

SEQ ID NO: 1414296 - DNA, 15 bp, Homo sapiens
gcctccatgtctgtg

SEQ ID NO: 1414297 - DNA, 15 bp, Homo sapiens
cctccatgtctgtgg

SEQ ID NO: 1414298 - DNA, 15 bp, Homo sapiens
ctccatgtctgtggg

SEQ ID NO: 1414299 - DNA, 15 bp, Homo sapiens
tccatgtctgtggga

SEQ ID NO: 1414300 - DNA, 15 bp, Homo sapiens
ccatgtctgtgggag

SEQ ID NO: 1414301 - DNA, 15 bp, Homo sapiens
catgtctgtgggaga

SEQ ID NO: 1414302 - DNA, 15 bp, Homo sapiens
atgtctgtgggagat

SEQ ID NO: 1414303 - DNA, 15 bp, Homo sapiens
tgtctgtgggagata

SEQ ID NO: 1414304 - DNA, 15 bp, Homo sapiens
gtctgtgggagatat

SEQ ID NO: 1414305 - DNA, 15 bp, Homo sapiens
tctgtgggagatata

SEQ ID NO: 1414306 - DNA, 15 bp, Homo sapiens
ctgtgggagatatag

SEQ ID NO: 1414307 - DNA, 15 bp, Homo sapiens
tgtgggagatataga

SEQ ID NO: 1414308 - DNA, 15 bp, Homo sapiens
gtgggagatatagaa

SEQ ID NO: 1414309 - DNA, 15 bp, Homo sapiens
tgggagatatagaag

SEQ ID NO: 1414310 - DNA, 15 bp, Homo sapiens
gggagatatagaagg

SEQ ID NO: 1414311 - DNA, 15 bp, Homo sapiens
ggagatatagaagga

SEQ ID NO: 1414312 - DNA, 15 bp, Homo sapiens
gagatatagaaggag

SEQ ID NO: 1414313 - DNA, 15 bp, Homo sapiens
agatatagaaggagg

SEQ ID NO: 1414314 - DNA, 15 bp, Homo sapiens
gatatagaaggagga

SEQ ID NO: 1414315 - DNA, 15 bp, Homo sapiens
atatagaaggaggag

SEQ ID NO: 1414316 - DNA, 15 bp, Homo sapiens
tatagaaggaggagg

SEQ ID NO: 1414317 - DNA, 15 bp, Homo sapiens
atagaaggaggaggt

SEQ ID NO: 1414318 - DNA, 15 bp, Homo sapiens
tagaaggaggaggta

SEQ ID NO: 1414319 - DNA, 15 bp, Homo sapiens
agaaggaggaggtaa

SEQ ID NO: 1414320 - DNA, 15 bp, Homo sapiens
gaaggaggaggtaac

SEQ ID NO: 1414321 - DNA, 15 bp, Homo sapiens
aaggaggaggtaaca

SEQ ID NO: 1414322 - DNA, 15 bp, Homo sapiens
aggaggaggtaacac

SEQ ID NO: 1414323 - DNA, 15 bp, Homo sapiens
ggaggaggtaacacc

SEQ ID NO: 1414324 - DNA, 15 bp, Homo sapiens
gaggaggtaacacct

SEQ ID NO: 1414325 - DNA, 15 bp, Homo sapiens
aggaggtaacacctc

SEQ ID NO: 1414326 - DNA, 15 bp, Homo sapiens
ggaggtaacacctct

SEQ ID NO: 1414327 - DNA, 15 bp, Homo sapiens
gaggtaacacctctc

SEQ ID NO: 1414328 - DNA, 15 bp, Homo sapiens
aggtaacacctctct

SEQ ID NO: 1414329 - DNA, 15 bp, Homo sapiens
ggtaacacctctctc

SEQ ID NO: 1414330 - DNA, 15 bp, Homo sapiens
gtaacacctctctcc

SEQ ID NO: 1414331 - DNA, 15 bp, Homo sapiens
taacacctctctcct

SEQ ID NO: 1414332 - DNA, 15 bp, Homo sapiens
aacacctctctcctt

SEQ ID NO: 1414333 - DNA, 15 bp, Homo sapiens
acacctctctccttt

SEQ ID NO: 1414334 - DNA, 15 bp, Homo sapiens
cacctctctcctttt

SEQ ID NO: 1414335 - DNA, 15 bp, Homo sapiens
acctctctccttttg

SEQ ID NO: 1414336 - DNA, 15 bp, Homo sapiens
cctctctccttttgg

SEQ ID NO: 1414337 - DNA, 15 bp, Homo sapiens
ctctctccttttggg

SEQ ID NO: 1414338 - DNA, 15 bp, Homo sapiens
tctctccttttggga

SEQ ID NO: 1414339 - DNA, 15 bp, Homo sapiens
ctctccttttgggag

SEQ ID NO: 1414340 - DNA, 15 bp, Homo sapiens
tctccttttgggagc

SEQ ID NO: 1414341 - DNA, 15 bp, Homo sapiens
ctccttttgggagct

SEQ ID NO: 1414342 - DNA, 15 bp, Homo sapiens
tccttttgggagctc

SEQ ID NO: 1414343 - DNA, 15 bp, Homo sapiens
ccttttgggagctct

SEQ ID NO: 1414344 - DNA, 15 bp, Homo sapiens
cttttgggagctctt

SEQ ID NO: 1414345 - DNA, 15 bp, Homo sapiens
ttttgggagctctta

SEQ ID NO: 1414346 - DNA, 15 bp, Homo sapiens
tttgggagctcttat

SEQ ID NO: 1414347 - DNA, 15 bp, Homo sapiens
ttgggagctcttatt

SEQ ID NO: 1414348 - DNA, 15 bp, Homo sapiens
tgggagctcttattg

SEQ ID NO: 1414349 - DNA, 15 bp, Homo sapiens
gggagctcttattgg

SEQ ID NO: 1414350 - DNA, 15 bp, Homo sapiens
ggagctcttattggt

SEQ ID NO: 1414351 - DNA, 15 bp, Homo sapiens
gagctcttattggtt

SEQ ID NO: 1414352 - DNA, 15 bp, Homo sapiens
agctcttattggttt

SEQ ID NO: 1414353 - DNA, 15 bp, Homo sapiens
gctcttattggtttc

SEQ ID NO: 1414354 - DNA, 15 bp, Homo sapiens
ctcttattggtttct

SEQ ID NO: 1414355 - DNA, 15 bp, Homo sapiens
tcttattggtttctt

SEQ ID NO: 1414356 - DNA, 15 bp, Homo sapiens
cttattggtttcttg

SEQ ID NO: 1414357 - DNA, 15 bp, Homo sapiens
ttattggtttcttga

SEQ ID NO: 1414358 - DNA, 15 bp, Homo sapiens
tattggtttcttgat

SEQ ID NO: 1414359 - DNA, 15 bp, Homo sapiens
attggtttcttgatc

SEQ ID NO: 1414360 - DNA, 15 bp, Homo sapiens
ttggtttcttgatct

SEQ ID NO: 1414361 - DNA, 15 bp, Homo sapiens
tggtttcttgatcta

SEQ ID NO: 1414362 - DNA, 15 bp, Homo sapiens
ggtttcttgatctat

SEQ ID NO: 1414363 - DNA, 15 bp, Homo sapiens
gtttcttgatctata

SEQ ID NO: 1414364 - DNA, 15 bp, Homo sapiens
tttcttgatctataa

SEQ ID NO: 1414365 - DNA, 15 bp, Homo sapiens
ttcttgatctataag

SEQ ID NO: 1414366 - DNA, 15 bp, Homo sapiens
tcttgatctataagt

SEQ ID NO: 1414367 - DNA, 15 bp, Homo sapiens
cttgatctataagtc

SEQ ID NO: 1414368 - DNA, 15 bp, Homo sapiens
ttgatctataagtca

SEQ ID NO: 1414369 - DNA, 15 bp, Homo sapiens
tgatctataagtcaa

SEQ ID NO: 1414370 - DNA, 15 bp, Homo sapiens
gatctataagtcaag

SEQ ID NO: 1414371 - DNA, 15 bp, Homo sapiens
atctataagtcaaga

SEQ ID NO: 1414372 - DNA, 15 bp, Homo sapiens
tctataagtcaagaa

SEQ ID NO: 1414373 - DNA, 15 bp, Homo sapiens
ctataagtcaagaag

SEQ ID NO: 1414374 - DNA, 15 bp, Homo sapiens
tataagtcaagaagg

SEQ ID NO: 1414375 - DNA, 15 bp, Homo sapiens
ataagtcaagaaggt

SEQ ID NO: 1414376 - DNA, 15 bp, Homo sapiens
taagtcaagaaggtt

SEQ ID NO: 1414377 - DNA, 15 bp, Homo sapiens
aagtcaagaaggttg

SEQ ID NO: 1414378 - DNA, 15 bp, Homo sapiens
agtcaagaaggttgt

SEQ ID NO: 1414379 - DNA, 15 bp, Homo sapiens
gtcaagaaggttgtg

SEQ ID NO: 1414380 - DNA, 15 bp, Homo sapiens
tcaagaaggttgtga

SEQ ID NO: 1414381 - DNA, 15 bp, Homo sapiens
caagaaggttgtgag

SEQ ID NO: 1414382 - DNA, 15 bp, Homo sapiens
aagaaggttgtgagt

SEQ ID NO: 1414383 - DNA, 15 bp, Homo sapiens
agaaggttgtgagtg

SEQ ID NO: 1414384 - DNA, 15 bp, Homo sapiens
gaaggttgtgagtgg

SEQ ID NO: 1414385 - DNA, 15 bp, Homo sapiens
aaggttgtgagtggg

SEQ ID NO: 1414386 - DNA, 15 bp, Homo sapiens
aggttgtgagtggga

SEQ ID NO: 1414387 - DNA, 15 bp, Homo sapiens
ggttgtgagtgggag

SEQ ID NO: 1414388 - DNA, 15 bp, Homo sapiens
gttgtgagtgggagc

SEQ ID NO: 1414389 - DNA, 15 bp, Homo sapiens
ttgtgagtgggagcc

SEQ ID NO: 1414390 - DNA, 15 bp, Homo sapiens
tgtgagtgggagcca

SEQ ID NO: 1414391 - DNA, 15 bp, Homo sapiens
gtgagtgggagccac

SEQ ID NO: 1414392 - DNA, 15 bp, Homo sapiens
tgagtgggagccaca

SEQ ID NO: 1414393 - DNA, 15 bp, Homo sapiens
gagtgggagccacag

SEQ ID NO: 1414394 - DNA, 15 bp, Homo sapiens
agtgggagccacagg

SEQ ID NO: 1414395 - DNA, 15 bp, Homo sapiens
gtgggagccacaggg

SEQ ID NO: 1414396 - DNA, 15 bp, Homo sapiens
tgggagccacaggga

SEQ ID NO: 1414397 - DNA, 15 bp, Homo sapiens
gggagccacagggat

SEQ ID NO: 1414398 - DNA, 15 bp, Homo sapiens
ggagccacagggatg

SEQ ID NO: 1414399 - DNA, 15 bp, Homo sapiens
gagccacagggatgg

SEQ ID NO: 1414400 - DNA, 15 bp, Homo sapiens
agccacagggatggt

SEQ ID NO: 1414401 - DNA, 15 bp, Homo sapiens
gccacagggatggta

SEQ ID NO: 1414402 - DNA, 15 bp, Homo sapiens
ccacagggatggtaa

SEQ ID NO: 1414403 - DNA, 15 bp, Homo sapiens
cacagggatggtaat

SEQ ID NO: 1414404 - DNA, 15 bp, Homo sapiens
acagggatggtaatt

SEQ ID NO: 1414405 - DNA, 15 bp, Homo sapiens
cagggatggtaattt

SEQ ID NO: 1414406 - DNA, 15 bp, Homo sapiens
agggatggtaattta

SEQ ID NO: 1414407 - DNA, 15 bp, Homo sapiens
gggatggtaatttag

SEQ ID NO: 1414408 - DNA, 15 bp, Homo sapiens
ggatggtaatttagg

SEQ ID NO: 1414409 - DNA, 15 bp, Homo sapiens
gatggtaatttaggc

SEQ ID NO: 1414410 - DNA, 15 bp, Homo sapiens
atggtaatttaggct

SEQ ID NO: 1414411 - DNA, 15 bp, Homo sapiens
tggtaatttaggctg

SEQ ID NO: 1414412 - DNA, 15 bp, Homo sapiens
ggtaatttaggctgt

SEQ ID NO: 1414413 - DNA, 15 bp, Homo sapiens
gtaatttaggctgta

SEQ ID NO: 1414414 - DNA, 15 bp, Homo sapiens
taatttaggctgtaa

SEQ ID NO: 1414415 - DNA, 15 bp, Homo sapiens
aatttaggctgtaac

SEQ ID NO: 1414416 - DNA, 15 bp, Homo sapiens
atttaggctgtaacc

SEQ ID NO: 1414417 - DNA, 15 bp, Homo sapiens
tttaggctgtaacca

SEQ ID NO: 1414418 - DNA, 15 bp, Homo sapiens
ttaggctgtaaccaa

SEQ ID NO: 1414419 - DNA, 15 bp, Homo sapiens
taggctgtaaccaac

SEQ ID NO: 1414420 - DNA, 15 bp, Homo sapiens
aggctgtaaccaacc

SEQ ID NO: 1414421 - DNA, 15 bp, Homo sapiens
ggctgtaaccaacct

SEQ ID NO: 1414422 - DNA, 15 bp, Homo sapiens
gctgtaaccaaccta

SEQ ID NO: 1414423 - DNA, 15 bp, Homo sapiens
tggcaccagatagat

SEQ ID NO: 1414424 - DNA, 15 bp, Homo sapiens
ggcaccagatagata

SEQ ID NO: 1414425 - DNA, 15 bp, Homo sapiens
gcaccagatagataa

SEQ ID NO: 1414426 - DNA, 15 bp, Homo sapiens
caccagatagataaa

SEQ ID NO: 1414427 - DNA, 15 bp, Homo sapiens
accagatagataaaa

SEQ ID NO: 1414428 - DNA, 15 bp, Homo sapiens
ccagatagataaaac

SEQ ID NO: 1414429 - DNA, 15 bp, Homo sapiens
cagatagataaaacc

SEQ ID NO: 1414430 - DNA, 15 bp, Homo sapiens
agatagataaaaccc

SEQ ID NO: 1414431 - DNA, 15 bp, Homo sapiens
gatagataaaaccca

SEQ ID NO: 1414432 - DNA, 15 bp, Homo sapiens
atagataaaacccat

SEQ ID NO: 1414433 - DNA, 15 bp, Homo sapiens
tagataaaacccata

SEQ ID NO: 1414434 - DNA, 15 bp, Homo sapiens
agataaaacccatac

SEQ ID NO: 1414435 - DNA, 15 bp, Homo sapiens
gataaaacccatact

SEQ ID NO: 1414436 - DNA, 15 bp, Homo sapiens
ataaaacccatactc

SEQ ID NO: 1414437 - DNA, 15 bp, Homo sapiens
taaaacccatactct

SEQ ID NO: 1414438 - DNA, 15 bp, Homo sapiens
aaaacccatactcta

SEQ ID NO: 1414439 - DNA, 15 bp, Homo sapiens
aaacccatactctat

SEQ ID NO: 1414440 - DNA, 15 bp, Homo sapiens
aacccatactctatt

SEQ ID NO: 1414441 - DNA, 15 bp, Homo sapiens
acccatactctattt

SEQ ID NO: 1414442 - DNA, 15 bp, Homo sapiens
cccatactctatttt

SEQ ID NO: 1414443 - DNA, 15 bp, Homo sapiens
ccatactctatttta

SEQ ID NO: 1414444 - DNA, 15 bp, Homo sapiens
catactctattttac

SEQ ID NO: 1414445 - DNA, 15 bp, Homo sapiens
atactctattttaca

SEQ ID NO: 1414446 - DNA, 15 bp, Homo sapiens
tactctattttacac

SEQ ID NO: 1414447 - DNA, 15 bp, Homo sapiens
actctattttacact

SEQ ID NO: 1414448 - DNA, 15 bp, Homo sapiens
ctctattttacactc

SEQ ID NO: 1414449 - DNA, 15 bp, Homo sapiens
tctattttacactca

SEQ ID NO: 1414450 - DNA, 15 bp, Homo sapiens
ctattttacactcat

SEQ ID NO: 1414451 - DNA, 15 bp, Homo sapiens
tattttacactcatt

SEQ ID NO: 1414452 - DNA, 15 bp, Homo sapiens
attttacactcattc

SEQ ID NO: 1414453 - DNA, 15 bp, Homo sapiens
ttttacactcattca

SEQ ID NO: 1414454 - DNA, 15 bp, Homo sapiens
tttacactcattcaa

SEQ ID NO: 1414455 - DNA, 15 bp, Homo sapiens
ttacactcattcaaa

SEQ ID NO: 1414456 - DNA, 15 bp, Homo sapiens
tacactcattcaaat

SEQ ID NO: 1414457 - DNA, 15 bp, Homo sapiens
acactcattcaaatc

SEQ ID NO: 1414458 - DNA, 15 bp, Homo sapiens
cactcattcaaatca

SEQ ID NO: 1414459 - DNA, 15 bp, Homo sapiens
actcattcaaatcat

SEQ ID NO: 1414460 - DNA, 15 bp, Homo sapiens
ctcattcaaatcatt

SEQ ID NO: 1414461 - DNA, 15 bp, Homo sapiens
tcattcaaatcattg

SEQ ID NO: 1414462 - DNA, 15 bp, Homo sapiens
cattcaaatcattgt

SEQ ID NO: 1414463 - DNA, 15 bp, Homo sapiens
attcaaatcattgta

SEQ ID NO: 1414464 - DNA, 15 bp, Homo sapiens
ttcaaatcattgtat

SEQ ID NO: 1414465 - DNA, 15 bp, Homo sapiens
tcaaatcattgtatt

SEQ ID NO: 1414466 - DNA, 15 bp, Homo sapiens
caaatcattgtattt

SEQ ID NO: 1414467 - DNA, 15 bp, Homo sapiens
aaatcattgtatttc

SEQ ID NO: 1414468 - DNA, 15 bp, Homo sapiens
aatcattgtatttcc

SEQ ID NO: 1414469 - DNA, 15 bp, Homo sapiens
atcattgtatttccc

SEQ ID NO: 1414470 - DNA, 15 bp, Homo sapiens
tcattgtatttcccc

SEQ ID NO: 1414471 - DNA, 15 bp, Homo sapiens
cattgtatttccccc

SEQ ID NO: 1414472 - DNA, 15 bp, Homo sapiens
attgtatttccccca

SEQ ID NO: 1414473 - DNA, 15 bp, Homo sapiens
ttgtatttcccccac

SEQ ID NO: 1414474 - DNA, 15 bp, Homo sapiens
tgtatttcccccacc

SEQ ID NO: 1414475 - DNA, 15 bp, Homo sapiens
gtatttcccccaccg

SEQ ID NO: 1414476 - DNA, 15 bp, Homo sapiens
tatttcccccaccgg

SEQ ID NO: 1414477 - DNA, 15 bp, Homo sapiens
atttcccccaccggt

SEQ ID NO: 1414478 - DNA, 15 bp, Homo sapiens
tttcccccaccggtg

SEQ ID NO: 1414479 - DNA, 15 bp, Homo sapiens
ttcccccaccggtga

SEQ ID NO: 1414480 - DNA, 15 bp, Homo sapiens
tcccccaccggtgaa

SEQ ID NO: 1414481 - DNA, 15 bp, Homo sapiens
cccccaccggtgaat

SEQ ID NO: 1414482 - DNA, 15 bp, Homo sapiens
ccccaccggtgaata

SEQ ID NO: 1414483 - DNA, 15 bp, Homo sapiens
cccaccggtgaatat

SEQ ID NO: 1414484 - DNA, 15 bp, Homo sapiens
ccaccggtgaatata

SEQ ID NO: 1414485 - DNA, 15 bp, Homo sapiens
caccggtgaatatat

SEQ ID NO: 1414486 - DNA, 15 bp, Homo sapiens
accggtgaatatatt

SEQ ID NO: 1414487 - DNA, 15 bp, Homo sapiens
ccggtgaatatatta

SEQ ID NO: 1414488 - DNA, 15 bp, Homo sapiens
cggtgaatatattac

SEQ ID NO: 1414489 - DNA, 15 bp, Homo sapiens
ggtgaatatattacc

SEQ ID NO: 1414490 - DNA, 15 bp, Homo sapiens
gtgaatatattacca

SEQ ID NO: 1414491 - DNA, 15 bp, Homo sapiens
tgaatatattaccaa

SEQ ID NO: 1414492 - DNA, 15 bp, Homo sapiens
gaatatattaccaaa

SEQ ID NO: 1414493 - DNA, 15 bp, Homo sapiens
aatatattaccaaag

SEQ ID NO: 1414494 - DNA, 15 bp, Homo sapiens
atatattaccaaagt

SEQ ID NO: 1414495 - DNA, 15 bp, Homo sapiens
tatattaccaaagtt

SEQ ID NO: 1414496 - DNA, 15 bp, Homo sapiens
atattaccaaagttg

SEQ ID NO: 1414497 - DNA, 15 bp, Homo sapiens
tattaccaaagttgg

SEQ ID NO: 1414498 - DNA, 15 bp, Homo sapiens
attaccaaagttggt

SEQ ID NO: 1414499 - DNA, 15 bp, Homo sapiens
ttaccaaagttggtt

SEQ ID NO: 1414500 - DNA, 15 bp, Homo sapiens
taccaaagttggttg

SEQ ID NO: 1414501 - DNA, 15 bp, Homo sapiens
accaaagttggttga

SEQ ID NO: 1414502 - DNA, 15 bp, Homo sapiens
ccaaagttggttgag

SEQ ID NO: 1414503 - DNA, 15 bp, Homo sapiens
caaagttggttgagt

SEQ ID NO: 1414504 - DNA, 15 bp, Homo sapiens
aaagttggttgagtt

SEQ ID NO: 1414505 - DNA, 15 bp, Homo sapiens
aagttggttgagttt

SEQ ID NO: 1414506 - DNA, 15 bp, Homo sapiens
agttggttgagtttc

SEQ ID NO: 1414507 - DNA, 15 bp, Homo sapiens
gttggttgagtttca

SEQ ID NO: 1414508 - DNA, 15 bp, Homo sapiens
ttggttgagtttcat

SEQ ID NO: 1414509 - DNA, 15 bp, Homo sapiens
tggttgagtttcata

SEQ ID NO: 1414510 - DNA, 15 bp, Homo sapiens
ggttgagtttcataa

SEQ ID NO: 1414511 - DNA, 15 bp, Homo sapiens
gttgagtttcataat

SEQ ID NO: 1414512 - DNA, 15 bp, Homo sapiens
ttgagtttcataatg

SEQ ID NO: 1414513 - DNA, 15 bp, Homo sapiens
tgagtttcataatgc

SEQ ID NO: 1414514 - DNA, 15 bp, Homo sapiens
gagtttcataatgca

SEQ ID NO: 1414515 - DNA, 15 bp, Homo sapiens
agtttcataatgcaa

SEQ ID NO: 1414516 - DNA, 15 bp, Homo sapiens
gtttcataatgcaaa

SEQ ID NO: 1414517 - DNA, 15 bp, Homo sapiens
tttcataatgcaaac

SEQ ID NO: 1414518 - DNA, 15 bp, Homo sapiens
ttcataatgcaaacc

SEQ ID NO: 1414519 - DNA, 15 bp, Homo sapiens
tcataatgcaaaccc

SEQ ID NO: 1414520 - DNA, 15 bp, Homo sapiens
cataatgcaaaccca

SEQ ID NO: 1414521 - DNA, 15 bp, Homo sapiens
ataatgcaaacccaa

SEQ ID NO: 1414522 - DNA, 15 bp, Homo sapiens
taatgcaaacccaaa

SEQ ID NO: 1414523 - DNA, 15 bp, Homo sapiens
aatgcaaacccaaag

SEQ ID NO: 1414524 - DNA, 15 bp, Homo sapiens
atgcaaacccaaagg

SEQ ID NO: 1414525 - DNA, 15 bp, Homo sapiens
tgcaaacccaaaggg

SEQ ID NO: 1414526 - DNA, 15 bp, Homo sapiens
gcaaacccaaaggga

SEQ ID NO: 1414527 - DNA, 15 bp, Homo sapiens
caaacccaaagggaa

SEQ ID NO: 1414528 - DNA, 15 bp, Homo sapiens
aaacccaaagggaaa

SEQ ID NO: 1414529 - DNA, 15 bp, Homo sapiens
aacccaaagggaaaa

SEQ ID NO: 1414530 - DNA, 15 bp, Homo sapiens
acccaaagggaaaat

SEQ ID NO: 1414531 - DNA, 15 bp, Homo sapiens
cccaaagggaaaatt

SEQ ID NO: 1414532 - DNA, 15 bp, Homo sapiens
ccaaagggaaaatta

SEQ ID NO: 1414533 - DNA, 15 bp, Homo sapiens
caaagggaaaattat

SEQ ID NO: 1414534 - DNA, 15 bp, Homo sapiens
aaagggaaaattatc

SEQ ID NO: 1414535 - DNA, 15 bp, Homo sapiens
aagggaaaattatct

SEQ ID NO: 1414536 - DNA, 15 bp, Homo sapiens
agggaaaattatctt

SEQ ID NO: 1414537 - DNA, 15 bp, Homo sapiens
gggaaaattatcttg

SEQ ID NO: 1414538 - DNA, 15 bp, Homo sapiens
ggaaaattatcttga

SEQ ID NO: 1414539 - DNA, 15 bp, Homo sapiens
gaaaattatcttgaa

SEQ ID NO: 1414540 - DNA, 15 bp, Homo sapiens
aaaattatcttgaat

SEQ ID NO: 1414541 - DNA, 15 bp, Homo sapiens
aaattatcttgaata

SEQ ID NO: 1414542 - DNA, 15 bp, Homo sapiens
aattatcttgaataa

SEQ ID NO: 1414543 - DNA, 15 bp, Homo sapiens
attatcttgaataat

SEQ ID NO: 1414544 - DNA, 15 bp, Homo sapiens
ttatcttgaataatc

SEQ ID NO: 1414545 - DNA, 15 bp, Homo sapiens
tatcttgaataatca

SEQ ID NO: 1414546 - DNA, 15 bp, Homo sapiens
atcttgaataatcat

SEQ ID NO: 1414547 - DNA, 15 bp, Homo sapiens
tcttgaataatcata

SEQ ID NO: 1414548 - DNA, 15 bp, Homo sapiens
cttgaataatcatat

SEQ ID NO: 1414549 - DNA, 15 bp, Homo sapiens
ttgaataatcatatg

SEQ ID NO: 1414550 - DNA, 15 bp, Homo sapiens
tgaataatcatatga

SEQ ID NO: 1414551 - DNA, 15 bp, Homo sapiens
gaataatcatatgac

SEQ ID NO: 1414552 - DNA, 15 bp, Homo sapiens
aataatcatatgaca

SEQ ID NO: 1414553 - DNA, 15 bp, Homo sapiens
ataatcatatgacaa

SEQ ID NO: 1414554 - DNA, 15 bp, Homo sapiens
taatcatatgacaat

SEQ ID NO: 1414555 - DNA, 15 bp, Homo sapiens
aatcatatgacaata

SEQ ID NO: 1414556 - DNA, 15 bp, Homo sapiens
atcatatgacaatat

SEQ ID NO: 1414557 - DNA, 15 bp, Homo sapiens
tcatatgacaatatg

SEQ ID NO: 1414558 - DNA, 15 bp, Homo sapiens
catatgacaatatgt

SEQ ID NO: 1414559 - DNA, 15 bp, Homo sapiens
atatgacaatatgtg

SEQ ID NO: 1414560 - DNA, 15 bp, Homo sapiens
tatgacaatatgtgg

SEQ ID NO: 1414561 - DNA, 15 bp, Homo sapiens
atgacaatatgtgga

SEQ ID NO: 1414562 - DNA, 15 bp, Homo sapiens
tgacaatatgtggaa

SEQ ID NO: 1414563 - DNA, 15 bp, Homo sapiens
gacaatatgtggaaa

SEQ ID NO: 1414564 - DNA, 15 bp, Homo sapiens
acaatatgtggaaag

SEQ ID NO: 1414565 - DNA, 15 bp, Homo sapiens
caatatgtggaaagt

SEQ ID NO: 1414566 - DNA, 15 bp, Homo sapiens
aatatgtggaaagtt

SEQ ID NO: 1414567 - DNA, 15 bp, Homo sapiens
atatgtggaaagttt

SEQ ID NO: 1414568 - DNA, 15 bp, Homo sapiens
tatgtggaaagttta

SEQ ID NO: 1414569 - DNA, 15 bp, Homo sapiens
atgtggaaagtttag

SEQ ID NO: 1414570 - DNA, 15 bp, Homo sapiens
tgtggaaagtttagg

SEQ ID NO: 1414571 - DNA, 15 bp, Homo sapiens
gtggaaagtttaggg

SEQ ID NO: 1414572 - DNA, 15 bp, Homo sapiens
tggaaagtttagggg

SEQ ID NO: 1414573 - DNA, 15 bp, Homo sapiens
ggaaagtttaggggc

SEQ ID NO: 1414574 - DNA, 15 bp, Homo sapiens
gaaagtttaggggct

SEQ ID NO: 1414575 - DNA, 15 bp, Homo sapiens
aaagtttaggggctg

SEQ ID NO: 1414576 - DNA, 15 bp, Homo sapiens
aagtttaggggctgt

SEQ ID NO: 1414577 - DNA, 15 bp, Homo sapiens
agtttaggggctgtg

SEQ ID NO: 1414578 - DNA, 15 bp, Homo sapiens
gtttaggggctgtgt

SEQ ID NO: 1414579 - DNA, 15 bp, Homo sapiens
tttaggggctgtgta

SEQ ID NO: 1414580 - DNA, 15 bp, Homo sapiens
ttaggggctgtgtac

SEQ ID NO: 1414581 - DNA, 15 bp, Homo sapiens
taggggctgtgtacg

SEQ ID NO: 1414582 - DNA, 15 bp, Homo sapiens
aggggctgtgtacgc

SEQ ID NO: 1414583 - DNA, 15 bp, Homo sapiens
ggggctgtgtacgcc

SEQ ID NO: 1414584 - DNA, 15 bp, Homo sapiens
gggctgtgtacgcca

SEQ ID NO: 1414585 - DNA, 15 bp, Homo sapiens
ggctgtgtacgccac

SEQ ID NO: 1414586 - DNA, 15 bp, Homo sapiens
gctgtgtacgccacc

SEQ ID NO: 1414587 - DNA, 15 bp, Homo sapiens
ctgtgtacgccacct

SEQ ID NO: 1414588 - DNA, 15 bp, Homo sapiens
tgtgtacgccacctc

SEQ ID NO: 1414589 - DNA, 15 bp, Homo sapiens
gtgtacgccacctca

SEQ ID NO: 1414590 - DNA, 15 bp, Homo sapiens
tgtacgccacctcat

SEQ ID NO: 1414591 - DNA, 15 bp, Homo sapiens
gtacgccacctcatg

SEQ ID NO: 1414592 - DNA, 15 bp, Homo sapiens
tacgccacctcatgg

SEQ ID NO: 1414593 - DNA, 15 bp, Homo sapiens
acgccacctcatggt

SEQ ID NO: 1414594 - DNA, 15 bp, Homo sapiens
cgccacctcatggtt

SEQ ID NO: 1414595 - DNA, 15 bp, Homo sapiens
gccacctcatggttt

SEQ ID NO: 1414596 - DNA, 15 bp, Homo sapiens
ccacctcatggtttt

SEQ ID NO: 1414597 - DNA, 15 bp, Homo sapiens
cacctcatggttttg

SEQ ID NO: 1414598 - DNA, 15 bp, Homo sapiens
acctcatggttttga

SEQ ID NO: 1414599 - DNA, 15 bp, Homo sapiens
cctcatggttttgaa

SEQ ID NO: 1414600 - DNA, 15 bp, Homo sapiens
ctcatggttttgaac

SEQ ID NO: 1414601 - DNA, 15 bp, Homo sapiens
tcatggttttgaact

SEQ ID NO: 1414602 - DNA, 15 bp, Homo sapiens
catggttttgaactg

SEQ ID NO: 1414603 - DNA, 15 bp, Homo sapiens
tggttttgaactgtg

SEQ ID NO: 1414604 - DNA, 15 bp, Homo sapiens
ggttttgaactgtgt

SEQ ID NO: 1414605 - DNA, 15 bp, Homo sapiens
gttttgaactgtgtg

SEQ ID NO: 1414606 - DNA, 15 bp, Homo sapiens
ttttgaactgtgtgg

SEQ ID NO: 1414607 - DNA, 15 bp, Homo sapiens
tttgaactgtgtggt

SEQ ID NO: 1414608 - DNA, 15 bp, Homo sapiens
ttgaactgtgtggtt

SEQ ID NO: 1414609 - DNA, 15 bp, Homo sapiens
tgaactgtgtggtta

SEQ ID NO: 1414610 - DNA, 15 bp, Homo sapiens
gaactgtgtggttaa

SEQ ID NO: 1414611 - DNA, 15 bp, Homo sapiens
aactgtgtggttaaa

SEQ ID NO: 1414612 - DNA, 15 bp, Homo sapiens
actgtgtggttaaag

SEQ ID NO: 1414613 - DNA, 15 bp, Homo sapiens
ctgtgtggttaaaga

SEQ ID NO: 1414614 - DNA, 15 bp, Homo sapiens
tgtgtggttaaagac

SEQ ID NO: 1414615 - DNA, 15 bp, Homo sapiens
gtgtggttaaagacg

SEQ ID NO: 1414616 - DNA, 15 bp, Homo sapiens
tgtggttaaagacgt

SEQ ID NO: 1414617 - DNA, 15 bp, Homo sapiens
gtggttaaagacgtt

SEQ ID NO: 1414618 - DNA, 15 bp, Homo sapiens
tggttaaagacgttg

SEQ ID NO: 1414619 - DNA, 15 bp, Homo sapiens
ggttaaagacgttga

SEQ ID NO: 1414620 - DNA, 15 bp, Homo sapiens
gttaaagacgttgag

SEQ ID NO: 1414621 - DNA, 15 bp, Homo sapiens
ttaaagacgttgaga

SEQ ID NO: 1414622 - DNA, 15 bp, Homo sapiens
taaagacgttgagag

SEQ ID NO: 1414623 - DNA, 15 bp, Homo sapiens
aaagacgttgagagt

SEQ ID NO: 1414624 - DNA, 15 bp, Homo sapiens
aagacgttgagagtt

SEQ ID NO: 1414625 - DNA, 15 bp, Homo sapiens
agacgttgagagttg

SEQ ID NO: 1414626 - DNA, 15 bp, Homo sapiens
gacgttgagagttga

SEQ ID NO: 1414627 - DNA, 15 bp, Homo sapiens
acgttgagagttgac

SEQ ID NO: 1414628 - DNA, 15 bp, Homo sapiens
cgttgagagttgaca

SEQ ID NO: 1414629 - DNA, 15 bp, Homo sapiens
gttgagagttgacag

SEQ ID NO: 1414630 - DNA, 15 bp, Homo sapiens
ttgagagttgacaga

SEQ ID NO: 1414631 - DNA, 15 bp, Homo sapiens
tgagagttgacagat

SEQ ID NO: 1414632 - DNA, 15 bp, Homo sapiens
gagagttgacagatt

SEQ ID NO: 1414633 - DNA, 15 bp, Homo sapiens
agagttgacagatta

SEQ ID NO: 1414634 - DNA, 15 bp, Homo sapiens
gagttgacagattag

SEQ ID NO: 1414635 - DNA, 15 bp, Homo sapiens
agttgacagattagt

SEQ ID NO: 1414636 - DNA, 15 bp, Homo sapiens
gttgacagattagtc

SEQ ID NO: 1414637 - DNA, 15 bp, Homo sapiens
ttgacagattagtca

SEQ ID NO: 1414638 - DNA, 15 bp, Homo sapiens
tgacagattagtcag

SEQ ID NO: 1414639 - DNA, 15 bp, Homo sapiens
gacagattagtcagg

SEQ ID NO: 1414640 - DNA, 15 bp, Homo sapiens
acagattagtcaggg

SEQ ID NO: 1414641 - DNA, 15 bp, Homo sapiens
cagattagtcaggga

SEQ ID NO: 1414642 - DNA, 15 bp, Homo sapiens
agattagtcagggat

SEQ ID NO: 1414643 - DNA, 15 bp, Homo sapiens
gattagtcagggatt

SEQ ID NO: 1414644 - DNA, 15 bp, Homo sapiens
attagtcagggattt

SEQ ID NO: 1414645 - DNA, 15 bp, Homo sapiens
ttagtcagggatttt

SEQ ID NO: 1414646 - DNA, 15 bp, Homo sapiens
tagtcagggattttt

SEQ ID NO: 1414647 - DNA, 15 bp, Homo sapiens
agtcagggatttttc

SEQ ID NO: 1414648 - DNA, 15 bp, Homo sapiens
gtcagggatttttca

SEQ ID NO: 1414649 - DNA, 15 bp, Homo sapiens
tcagggatttttcaa

SEQ ID NO: 1414650 - DNA, 15 bp, Homo sapiens
cagggatttttcaag

SEQ ID NO: 1414651 - DNA, 15 bp, Homo sapiens
agggatttttcaaga

SEQ ID NO: 1414652 - DNA, 15 bp, Homo sapiens
gggatttttcaagag

SEQ ID NO: 1414653 - DNA, 15 bp, Homo sapiens
ggatttttcaagagt

SEQ ID NO: 1414654 - DNA, 15 bp, Homo sapiens
gatttttcaagagta

SEQ ID NO: 1414655 - DNA, 15 bp, Homo sapiens
atttttcaagagtat

SEQ ID NO: 1414656 - DNA, 15 bp, Homo sapiens
tttttcaagagtatt

SEQ ID NO: 1414657 - DNA, 15 bp, Homo sapiens
ttttcaagagtatta

SEQ ID NO: 1414658 - DNA, 15 bp, Homo sapiens
tttcaagagtattaa

SEQ ID NO: 1414659 - DNA, 15 bp, Homo sapiens
ttcaagagtattaat

SEQ ID NO: 1414660 - DNA, 15 bp, Homo sapiens
tcaagagtattaatt

SEQ ID NO: 1414661 - DNA, 15 bp, Homo sapiens
caagagtattaatta

SEQ ID NO: 1414662 - DNA, 15 bp, Homo sapiens
aagagtattaattac

SEQ ID NO: 1414663 - DNA, 15 bp, Homo sapiens
agagtattaattaca

SEQ ID NO: 1414664 - DNA, 15 bp, Homo sapiens
gagtattaattacaa

SEQ ID NO: 1414665 - DNA, 15 bp, Homo sapiens
agtattaattacaaa

SEQ ID NO: 1414666 - DNA, 15 bp, Homo sapiens
gtattaattacaaac

SEQ ID NO: 1414667 - DNA, 15 bp, Homo sapiens
tattaattacaaact

SEQ ID NO: 1414668 - DNA, 15 bp, Homo sapiens
attaattacaaactt

SEQ ID NO: 1414669 - DNA, 15 bp, Homo sapiens
ttaattacaaacttt

SEQ ID NO: 1414670 - DNA, 15 bp, Homo sapiens
taattacaaactttg

SEQ ID NO: 1414671 - DNA, 15 bp, Homo sapiens
aattacaaactttga

SEQ ID NO: 1414672 - DNA, 15 bp, Homo sapiens
attacaaactttgaa

SEQ ID NO: 1414673 - DNA, 15 bp, Homo sapiens
ttacaaactttgaaa

SEQ ID NO: 1414674 - DNA, 15 bp, Homo sapiens
tacaaactttgaaat

SEQ ID NO: 1414675 - DNA, 15 bp, Homo sapiens
acaaactttgaaatc

SEQ ID NO: 1414676 - DNA, 15 bp, Homo sapiens
caaactttgaaatct

SEQ ID NO: 1414677 - DNA, 15 bp, Homo sapiens
aaactttgaaatctt

SEQ ID NO: 1414678 - DNA, 15 bp, Homo sapiens
aactttgaaatcttg

SEQ ID NO: 1414679 - DNA, 15 bp, Homo sapiens
actttgaaatcttgg

SEQ ID NO: 1414680 - DNA, 15 bp, Homo sapiens
ctttgaaatcttggt

SEQ ID NO: 1414681 - DNA, 15 bp, Homo sapiens
tttgaaatcttggtc

SEQ ID NO: 1414682 - DNA, 15 bp, Homo sapiens
ttgaaatcttggtca

SEQ ID NO: 1414683 - DNA, 15 bp, Homo sapiens
tgaaatcttggtcag

SEQ ID NO: 1414684 - DNA, 15 bp, Homo sapiens
gaaatcttggtcagt

SEQ ID NO: 1414685 - DNA, 15 bp, Homo sapiens
aaatcttggtcagtg

SEQ ID NO: 1414686 - DNA, 15 bp, Homo sapiens
aatcttggtcagtga

SEQ ID NO: 1414687 - DNA, 15 bp, Homo sapiens
atcttggtcagtgaa

SEQ ID NO: 1414688 - DNA, 15 bp, Homo sapiens
tcttggtcagtgaaa

SEQ ID NO: 1414689 - DNA, 15 bp, Homo sapiens
cttggtcagtgaaag

SEQ ID NO: 1414690 - DNA, 15 bp, Homo sapiens
ttggtcagtgaaagt

SEQ ID NO: 1414691 - DNA, 15 bp, Homo sapiens
tggtcagtgaaagtt

SEQ ID NO: 1414692 - DNA, 15 bp, Homo sapiens
ggtcagtgaaagttc

SEQ ID NO: 1414693 - DNA, 15 bp, Homo sapiens
gtcagtgaaagttca

SEQ ID NO: 1414694 - DNA, 15 bp, Homo sapiens
tcagtgaaagttcat

SEQ ID NO: 1414695 - DNA, 15 bp, Homo sapiens
cagtgaaagttcatt

SEQ ID NO: 1414696 - DNA, 15 bp, Homo sapiens
agtgaaagttcattt

SEQ ID NO: 1414697 - DNA, 15 bp, Homo sapiens
gtgaaagttcatttt

SEQ ID NO: 1414698 - DNA, 15 bp, Homo sapiens
tgaaagttcatttta

SEQ ID NO: 1414699 - DNA, 15 bp, Homo sapiens
gaaagttcattttag

SEQ ID NO: 1414700 - DNA, 15 bp, Homo sapiens
aaagttcattttagt

SEQ ID NO: 1414701 - DNA, 15 bp, Homo sapiens
aagttcattttagtg

SEQ ID NO: 1414702 - DNA, 15 bp, Homo sapiens
agttcattttagtgc

SEQ ID NO: 1414703 - DNA, 15 bp, Homo sapiens
gttcattttagtgca

SEQ ID NO: 1414704 - DNA, 15 bp, Homo sapiens
ttcattttagtgcat

SEQ ID NO: 1414705 - DNA, 15 bp, Homo sapiens
tcattttagtgcatc

SEQ ID NO: 1414706 - DNA, 15 bp, Homo sapiens
cattttagtgcatct

SEQ ID NO: 1414707 - DNA, 15 bp, Homo sapiens
attttagtgcatctt

SEQ ID NO: 1414708 - DNA, 15 bp, Homo sapiens
ttttagtgcatcttg

SEQ ID NO: 1414709 - DNA, 15 bp, Homo sapiens
tttagtgcatcttgc

SEQ ID NO: 1414710 - DNA, 15 bp, Homo sapiens
ttagtgcatcttgca

SEQ ID NO: 1414711 - DNA, 15 bp, Homo sapiens
tagtgcatcttgcaa

SEQ ID NO: 1414712 - DNA, 15 bp, Homo sapiens
agtgcatcttgcaaa

SEQ ID NO: 1414713 - DNA, 15 bp, Homo sapiens
gtgcatcttgcaaat

SEQ ID NO: 1414714 - DNA, 15 bp, Homo sapiens
tgcatcttgcaaata

SEQ ID NO: 1414715 - DNA, 15 bp, Homo sapiens
gcatcttgcaaatac

SEQ ID NO: 1414716 - DNA, 15 bp, Homo sapiens
catcttgcaaatacg

SEQ ID NO: 1414717 - DNA, 15 bp, Homo sapiens
atcttgcaaatacga

SEQ ID NO: 1414718 - DNA, 15 bp, Homo sapiens
tcttgcaaatacgat

SEQ ID NO: 1414719 - DNA, 15 bp, Homo sapiens
cttgcaaatacgatc

SEQ ID NO: 1414720 - DNA, 15 bp, Homo sapiens
ttgcaaatacgatca

SEQ ID NO: 1414721 - DNA, 15 bp, Homo sapiens
tgcaaatacgatcaa

SEQ ID NO: 1414722 - DNA, 15 bp, Homo sapiens
gcaaatacgatcaaa

SEQ ID NO: 1414723 - DNA, 15 bp, Homo sapiens
caaatacgatcaaag

SEQ ID NO: 1414724 - DNA, 15 bp, Homo sapiens
aaatacgatcaaagg

SEQ ID NO: 1414725 - DNA, 15 bp, Homo sapiens
aatacgatcaaaggt

SEQ ID NO: 1414726 - DNA, 15 bp, Homo sapiens
atacgatcaaaggtc

SEQ ID NO: 1414727 - DNA, 15 bp, Homo sapiens
tacgatcaaaggtct

SEQ ID NO: 1414728 - DNA, 15 bp, Homo sapiens
acgatcaaaggtctt

SEQ ID NO: 1414729 - DNA, 15 bp, Homo sapiens
cgatcaaaggtcttt

SEQ ID NO: 1414730 - DNA, 15 bp, Homo sapiens
gatcaaaggtctttt

SEQ ID NO: 1414731 - DNA, 15 bp, Homo sapiens
atcaaaggtcttttc

SEQ ID NO: 1414732 - DNA, 15 bp, Homo sapiens
tcaaaggtcttttca

SEQ ID NO: 1414733 - DNA, 15 bp, Homo sapiens
caaaggtcttttcag

SEQ ID NO: 1414734 - DNA, 15 bp, Homo sapiens
aaaggtcttttcagt

SEQ ID NO: 1414735 - DNA, 15 bp, Homo sapiens
aaggtcttttcagta

SEQ ID NO: 1414736 - DNA, 15 bp, Homo sapiens
aggtcttttcagtac

SEQ ID NO: 1414737 - DNA, 15 bp, Homo sapiens
ggtcttttcagtact

SEQ ID NO: 1414738 - DNA, 15 bp, Homo sapiens
gtcttttcagtactg

SEQ ID NO: 1414739 - DNA, 15 bp, Homo sapiens
tcttttcagtactga

SEQ ID NO: 1414740 - DNA, 15 bp, Homo sapiens
cttttcagtactgat

SEQ ID NO: 1414741 - DNA, 15 bp, Homo sapiens
ttttcagtactgatt

SEQ ID NO: 1414742 - DNA, 15 bp, Homo sapiens
tttcagtactgattt

SEQ ID NO: 1414743 - DNA, 15 bp, Homo sapiens
ttcagtactgatttg

SEQ ID NO: 1414744 - DNA, 15 bp, Homo sapiens
tcagtactgatttga

SEQ ID NO: 1414745 - DNA, 15 bp, Homo sapiens
cagtactgatttgat

SEQ ID NO: 1414746 - DNA, 15 bp, Homo sapiens
agtactgatttgatg

SEQ ID NO: 1414747 - DNA, 15 bp, Homo sapiens
gtactgatttgatga

SEQ ID NO: 1414748 - DNA, 15 bp, Homo sapiens
tactgatttgatgat

SEQ ID NO: 1414749 - DNA, 15 bp, Homo sapiens
actgatttgatgatg

SEQ ID NO: 1414750 - DNA, 15 bp, Homo sapiens
ctgatttgatgatgc

SEQ ID NO: 1414751 - DNA, 15 bp, Homo sapiens
tgatttgatgatgct

SEQ ID NO: 1414752 - DNA, 15 bp, Homo sapiens
gatttgatgatgctt

SEQ ID NO: 1414753 - DNA, 15 bp, Homo sapiens
atttgatgatgctta

SEQ ID NO: 1414754 - DNA, 15 bp, Homo sapiens
tttgatgatgcttaa

SEQ ID NO: 1414755 - DNA, 15 bp, Homo sapiens
ttgatgatgcttaac

SEQ ID NO: 1414756 - DNA, 15 bp, Homo sapiens
tgatgatgcttaacc

SEQ ID NO: 1414757 - DNA, 15 bp, Homo sapiens
gatgatgcttaacca

SEQ ID NO: 1414758 - DNA, 15 bp, Homo sapiens
atgatgcttaaccac

SEQ ID NO: 1414759 - DNA, 15 bp, Homo sapiens
tgatgcttaaccaca

SEQ ID NO: 1414760 - DNA, 15 bp, Homo sapiens
gatgcttaaccacag

SEQ ID NO: 1414761 - DNA, 15 bp, Homo sapiens
atgcttaaccacagt

SEQ ID NO: 1414762 - DNA, 15 bp, Homo sapiens
tgcttaaccacagtg

SEQ ID NO: 1414763 - DNA, 15 bp, Homo sapiens
gcttaaccacagtgt

SEQ ID NO: 1414764 - DNA, 15 bp, Homo sapiens
cttaaccacagtgtg

SEQ ID NO: 1414765 - DNA, 15 bp, Homo sapiens
ttaaccacagtgtgt

SEQ ID NO: 1414766 - DNA, 15 bp, Homo sapiens
taaccacagtgtgtg

SEQ ID NO: 1414767 - DNA, 15 bp, Homo sapiens
aaccacagtgtgtga

SEQ ID NO: 1414768 - DNA, 15 bp, Homo sapiens
accacagtgtgtgaa

SEQ ID NO: 1414769 - DNA, 15 bp, Homo sapiens
ccacagtgtgtgaag

SEQ ID NO: 1414770 - DNA, 15 bp, Homo sapiens
cacagtgtgtgaaga

SEQ ID NO: 1414771 - DNA, 15 bp, Homo sapiens
acagtgtgtgaagaa

SEQ ID NO: 1414772 - DNA, 15 bp, Homo sapiens
cagtgtgtgaagaat

SEQ ID NO: 1414773 - DNA, 15 bp, Homo sapiens
agtgtgtgaagaatg

SEQ ID NO: 1414774 - DNA, 15 bp, Homo sapiens
gtgtgtgaagaatga

SEQ ID NO: 1414775 - DNA, 15 bp, Homo sapiens
tgtgtgaagaatgaa

SEQ ID NO: 1414776 - DNA, 15 bp, Homo sapiens
gtgtgaagaatgaag

SEQ ID NO: 1414777 - DNA, 15 bp, Homo sapiens
tgtgaagaatgaagt

SEQ ID NO: 1414778 - DNA, 15 bp, Homo sapiens
gtgaagaatgaagtt

SEQ ID NO: 1414779 - DNA, 15 bp, Homo sapiens
tgaagaatgaagttt

SEQ ID NO: 1414780 - DNA, 15 bp, Homo sapiens
gaagaatgaagtttt

SEQ ID NO: 1414781 - DNA, 15 bp, Homo sapiens
aagaatgaagttttt

SEQ ID NO: 1414782 - DNA, 15 bp, Homo sapiens
agaatgaagtttttc

SEQ ID NO: 1414783 - DNA, 15 bp, Homo sapiens
gaatgaagtttttca

SEQ ID NO: 1414784 - DNA, 15 bp, Homo sapiens
aatgaagtttttcat

SEQ ID NO: 1414785 - DNA, 15 bp, Homo sapiens
atgaagtttttcatt

SEQ ID NO: 1414786 - DNA, 15 bp, Homo sapiens
tgaagtttttcatta

SEQ ID NO: 1414787 - DNA, 15 bp, Homo sapiens
gaagtttttcattag

SEQ ID NO: 1414788 - DNA, 15 bp, Homo sapiens
aagtttttcattaga

SEQ ID NO: 1414789 - DNA, 15 bp, Homo sapiens
agtttttcattagaa

SEQ ID NO: 1414790 - DNA, 15 bp, Homo sapiens
gtttttcattagaaa

SEQ ID NO: 1414791 - DNA, 15 bp, Homo sapiens
tttttcattagaaat

SEQ ID NO: 1414792 - DNA, 15 bp, Homo sapiens
ttttcattagaaatt

SEQ ID NO: 1414793 - DNA, 15 bp, Homo sapiens
tttcattagaaatta

SEQ ID NO: 1414794 - DNA, 15 bp, Homo sapiens
ttcattagaaattac

SEQ ID NO: 1414795 - DNA, 15 bp, Homo sapiens
tcattagaaattact

SEQ ID NO: 1414796 - DNA, 15 bp, Homo sapiens
cattagaaattactg

SEQ ID NO: 1414797 - DNA, 15 bp, Homo sapiens
attagaaattactgg

SEQ ID NO: 1414798 - DNA, 15 bp, Homo sapiens
ttagaaattactggt

SEQ ID NO: 1414799 - DNA, 15 bp, Homo sapiens
tagaaattactggtg

SEQ ID NO: 1414800 - DNA, 15 bp, Homo sapiens
agaaattactggtgt

SEQ ID NO: 1414801 - DNA, 15 bp, Homo sapiens
gaaattactggtgta

SEQ ID NO: 1414802 - DNA, 15 bp, Homo sapiens
aaattactggtgtaa

SEQ ID NO: 1414803 - DNA, 15 bp, Homo sapiens
aattactggtgtaat

SEQ ID NO: 1414804 - DNA, 15 bp, Homo sapiens
attactggtgtaata

SEQ ID NO: 1414805 - DNA, 15 bp, Homo sapiens
ttactggtgtaatag

SEQ ID NO: 1414806 - DNA, 15 bp, Homo sapiens
tactggtgtaataga

SEQ ID NO: 1414807 - DNA, 15 bp, Homo sapiens
actggtgtaatagag

SEQ ID NO: 1414808 - DNA, 15 bp, Homo sapiens
ctggtgtaatagagc

SEQ ID NO: 1414809 - DNA, 15 bp, Homo sapiens
tggtgtaatagagca

SEQ ID NO: 1414810 - DNA, 15 bp, Homo sapiens
ggtgtaatagagcac

SEQ ID NO: 1414811 - DNA, 15 bp, Homo sapiens
gtgtaatagagcaca

SEQ ID NO: 1414812 - DNA, 15 bp, Homo sapiens
tgtaatagagcacat

SEQ ID NO: 1414813 - DNA, 15 bp, Homo sapiens
gtaatagagcacatt

SEQ ID NO: 1414814 - DNA, 15 bp, Homo sapiens
taatagagcacattt

SEQ ID NO: 1414815 - DNA, 15 bp, Homo sapiens
aatagagcacatttt

SEQ ID NO: 1414816 - DNA, 15 bp, Homo sapiens
atagagcacattttc

SEQ ID NO: 1414817 - DNA, 15 bp, Homo sapiens
tagagcacattttca

SEQ ID NO: 1414818 - DNA, 15 bp, Homo sapiens
agagcacattttcag

SEQ ID NO: 1414819 - DNA, 15 bp, Homo sapiens
gagcacattttcagg

SEQ ID NO: 1414820 - DNA, 15 bp, Homo sapiens
agcacattttcaggg

SEQ ID NO: 1414821 - DNA, 15 bp, Homo sapiens
gcacattttcaggga

SEQ ID NO: 1414822 - DNA, 15 bp, Homo sapiens
cacattttcagggaa

SEQ ID NO: 1414823 - DNA, 15 bp, Homo sapiens
acattttcagggaag

SEQ ID NO: 1414824 - DNA, 15 bp, Homo sapiens
cattttcagggaaga

SEQ ID NO: 1414825 - DNA, 15 bp, Homo sapiens
attttcagggaagat

SEQ ID NO: 1414826 - DNA, 15 bp, Homo sapiens
ttttcagggaagatg

SEQ ID NO: 1414827 - DNA, 15 bp, Homo sapiens
tttcagggaagatgt

SEQ ID NO: 1414828 - DNA, 15 bp, Homo sapiens
ttcagggaagatgta

SEQ ID NO: 1414829 - DNA, 15 bp, Homo sapiens
tcagggaagatgtat

SEQ ID NO: 1414830 - DNA, 15 bp, Homo sapiens
cagggaagatgtatt

SEQ ID NO: 1414831 - DNA, 15 bp, Homo sapiens
agggaagatgtattg

SEQ ID NO: 1414832 - DNA, 15 bp, Homo sapiens
gggaagatgtattgt

SEQ ID NO: 1414833 - DNA, 15 bp, Homo sapiens
ggaagatgtattgtt

SEQ ID NO: 1414834 - DNA, 15 bp, Homo sapiens
gaagatgtattgttg

SEQ ID NO: 1414835 - DNA, 15 bp, Homo sapiens
aagatgtattgttgg

SEQ ID NO: 1414836 - DNA, 15 bp, Homo sapiens
agatgtattgttgga

SEQ ID NO: 1414837 - DNA, 15 bp, Homo sapiens
gatgtattgttggac

SEQ ID NO: 1414838 - DNA, 15 bp, Homo sapiens
atgtattgttggact

SEQ ID NO: 1414839 - DNA, 15 bp, Homo sapiens
tgtattgttggacta

SEQ ID NO: 1414840 - DNA, 15 bp, Homo sapiens
gtattgttggactat

SEQ ID NO: 1414841 - DNA, 15 bp, Homo sapiens
tattgttggactatt

SEQ ID NO: 1414842 - DNA, 15 bp, Homo sapiens
attgttggactatta

SEQ ID NO: 1414843 - DNA, 15 bp, Homo sapiens
ttgttggactattac

SEQ ID NO: 1414844 - DNA, 15 bp, Homo sapiens
tgttggactattaca

SEQ ID NO: 1414845 - DNA, 15 bp, Homo sapiens
gttggactattacaa

SEQ ID NO: 1414846 - DNA, 15 bp, Homo sapiens
ttggactattacaat

SEQ ID NO: 1414847 - DNA, 15 bp, Homo sapiens
tggactattacaatt

SEQ ID NO: 1414848 - DNA, 15 bp, Homo sapiens
ggactattacaattc

SEQ ID NO: 1414849 - DNA, 15 bp, Homo sapiens
gactattacaattca

SEQ ID NO: 1414850 - DNA, 15 bp, Homo sapiens
actattacaattcat

SEQ ID NO: 1414851 - DNA, 15 bp, Homo sapiens
ctattacaattcatg

SEQ ID NO: 1414852 - DNA, 15 bp, Homo sapiens
tattacaattcatgc

SEQ ID NO: 1414853 - DNA, 15 bp, Homo sapiens
attacaattcatgct

SEQ ID NO: 1414854 - DNA, 15 bp, Homo sapiens
ttacaattcatgctc

SEQ ID NO: 1414855 - DNA, 15 bp, Homo sapiens
tacaattcatgctct

SEQ ID NO: 1414856 - DNA, 15 bp, Homo sapiens
acaattcatgctctt

SEQ ID NO: 1414857 - DNA, 15 bp, Homo sapiens
caattcatgctcttc

SEQ ID NO: 1414858 - DNA, 15 bp, Homo sapiens
aattcatgctcttcc

SEQ ID NO: 1414859 - DNA, 15 bp, Homo sapiens
attcatgctcttccc

SEQ ID NO: 1414860 - DNA, 15 bp, Homo sapiens
ttcatgctcttcccc

SEQ ID NO: 1414861 - DNA, 15 bp, Homo sapiens
tcatgctcttccccc

SEQ ID NO: 1414862 - DNA, 15 bp, Homo sapiens
catgctcttccccca

SEQ ID NO: 1414863 - DNA, 15 bp, Homo sapiens
atgctcttcccccac

SEQ ID NO: 1414864 - DNA, 15 bp, Homo sapiens
tgctcttcccccacc

SEQ ID NO: 1414865 - DNA, 15 bp, Homo sapiens
gctcttcccccacca

SEQ ID NO: 1414866 - DNA, 15 bp, Homo sapiens
ctcttcccccaccat

SEQ ID NO: 1414867 - DNA, 15 bp, Homo sapiens
tcttcccccaccata

SEQ ID NO: 1414868 - DNA, 15 bp, Homo sapiens
cttcccccaccatat

SEQ ID NO: 1414869 - DNA, 15 bp, Homo sapiens
ttcccccaccatatc

SEQ ID NO: 1414870 - DNA, 15 bp, Homo sapiens
tcccccaccatatcc

SEQ ID NO: 1414871 - DNA, 15 bp, Homo sapiens
cccccaccatatccc

SEQ ID NO: 1414872 - DNA, 15 bp, Homo sapiens
ccccaccatatccct

SEQ ID NO: 1414873 - DNA, 15 bp, Homo sapiens
cccaccatatcccta

SEQ ID NO: 1414874 - DNA, 15 bp, Homo sapiens
ccaccatatccctac

SEQ ID NO: 1414875 - DNA, 15 bp, Homo sapiens
caccatatccctacc

SEQ ID NO: 1414876 - DNA, 15 bp, Homo sapiens
accatatccctaccc

SEQ ID NO: 1414877 - DNA, 15 bp, Homo sapiens
catatccctaccctc

SEQ ID NO: 1414878 - DNA, 15 bp, Homo sapiens
atatccctaccctct

SEQ ID NO: 1414879 - DNA, 15 bp, Homo sapiens
tatccctaccctcta

SEQ ID NO: 1414880 - DNA, 15 bp, Homo sapiens
atccctaccctctat

SEQ ID NO: 1414881 - DNA, 15 bp, Homo sapiens
tccctaccctctata

SEQ ID NO: 1414882 - DNA, 15 bp, Homo sapiens
ccctaccctctatat

SEQ ID NO: 1414883 - DNA, 15 bp, Homo sapiens
cctaccctctatatt

SEQ ID NO: 1414884 - DNA, 15 bp, Homo sapiens
ctaccctctatattc

SEQ ID NO: 1414885 - DNA, 15 bp, Homo sapiens
taccctctatattcc

SEQ ID NO: 1414886 - DNA, 15 bp, Homo sapiens
accctctatattccc

SEQ ID NO: 1414887 - DNA, 15 bp, Homo sapiens
ccctctatattcccc

SEQ ID NO: 1414888 - DNA, 15 bp, Homo sapiens
cctctatattcccca

SEQ ID NO: 1414889 - DNA, 15 bp, Homo sapiens
ctctatattccccat

SEQ ID NO: 1414890 - DNA, 15 bp, Homo sapiens
tctatattccccatc

SEQ ID NO: 1414891 - DNA, 15 bp, Homo sapiens
ctatattccccatcc

SEQ ID NO: 1414892 - DNA, 15 bp, Homo sapiens
tatattccccatccc

SEQ ID NO: 1414893 - DNA, 15 bp, Homo sapiens
atattccccatcccc

SEQ ID NO: 1414894 - DNA, 15 bp, Homo sapiens
tattccccatcccct

SEQ ID NO: 1414895 - DNA, 15 bp, Homo sapiens
attccccatccccta

SEQ ID NO: 1414896 - DNA, 15 bp, Homo sapiens
ttccccatcccctat

SEQ ID NO: 1414897 - DNA, 15 bp, Homo sapiens
tccccatcccctatt

SEQ ID NO: 1414898 - DNA, 15 bp, Homo sapiens
ccccatcccctattt

SEQ ID NO: 1414899 - DNA, 15 bp, Homo sapiens
cccatcccctatttc

SEQ ID NO: 1414900 - DNA, 15 bp, Homo sapiens
ccatcccctatttcc

SEQ ID NO: 1414901 - DNA, 15 bp, Homo sapiens
catcccctatttcct

SEQ ID NO: 1414902 - DNA, 15 bp, Homo sapiens
atcccctatttcctc

SEQ ID NO: 1414903 - DNA, 15 bp, Homo sapiens
tcccctatttcctcc

SEQ ID NO: 1414904 - DNA, 15 bp, Homo sapiens
cccctatttcctcca

SEQ ID NO: 1414905 - DNA, 15 bp, Homo sapiens
ccctatttcctccac

SEQ ID NO: 1414906 - DNA, 15 bp, Homo sapiens
cctatttcctccacc

SEQ ID NO: 1414907 - DNA, 15 bp, Homo sapiens
ctatttcctccacct

SEQ ID NO: 1414908 - DNA, 15 bp, Homo sapiens
tatttcctccacctt

SEQ ID NO: 1414909 - DNA, 15 bp, Homo sapiens
atttcctccaccttc

SEQ ID NO: 1414910 - DNA, 15 bp, Homo sapiens
tttcctccaccttcc

SEQ ID NO: 1414911 - DNA, 15 bp, Homo sapiens
ttcctccaccttcct

SEQ ID NO: 1414912 - DNA, 15 bp, Homo sapiens
tcctccaccttcctc

SEQ ID NO: 1414913 - DNA, 15 bp, Homo sapiens
cctccaccttcctcc

SEQ ID NO: 1414914 - DNA, 15 bp, Homo sapiens
ctccaccttcctcct

SEQ ID NO: 1414915 - DNA, 15 bp, Homo sapiens
tccaccttcctcctt

SEQ ID NO: 1414916 - DNA, 15 bp, Homo sapiens
ccaccttcctccttg

SEQ ID NO: 1414917 - DNA, 15 bp, Homo sapiens
caccttcctccttgg

SEQ ID NO: 1414918 - DNA, 15 bp, Homo sapiens
accttcctccttggg

SEQ ID NO: 1414919 - DNA, 15 bp, Homo sapiens
ccttcctccttggga

SEQ ID NO: 1414920 - DNA, 15 bp, Homo sapiens
cttcctccttgggac

SEQ ID NO: 1414921 - DNA, 15 bp, Homo sapiens
ttcctccttgggacc

SEQ ID NO: 1414922 - DNA, 15 bp, Homo sapiens
tcctccttgggacct

SEQ ID NO: 1414923 - DNA, 15 bp, Homo sapiens
cctccttgggacctc

SEQ ID NO: 1414924 - DNA, 15 bp, Homo sapiens
ctccttgggacctca

SEQ ID NO: 1414925 - DNA, 15 bp, Homo sapiens
tccttgggacctcac

SEQ ID NO: 1414926 - DNA, 15 bp, Homo sapiens
ccttgggacctcact

SEQ ID NO: 1414927 - DNA, 15 bp, Homo sapiens
cttgggacctcactg

SEQ ID NO: 1414928 - DNA, 15 bp, Homo sapiens
ttgggacctcactga

SEQ ID NO: 1414929 - DNA, 15 bp, Homo sapiens
tgggacctcactgaa

SEQ ID NO: 1414930 - DNA, 15 bp, Homo sapiens
gggacctcactgaaa

SEQ ID NO: 1414931 - DNA, 15 bp, Homo sapiens
ggacctcactgaaaa

SEQ ID NO: 1414932 - DNA, 15 bp, Homo sapiens
gacctcactgaaaac

SEQ ID NO: 1414933 - DNA, 15 bp, Homo sapiens
acctcactgaaaacc

SEQ ID NO: 1414934 - DNA, 15 bp, Homo sapiens
cctcactgaaaacct

SEQ ID NO: 1414935 - DNA, 15 bp, Homo sapiens
ctcactgaaaacctg

SEQ ID NO: 1414936 - DNA, 15 bp, Homo sapiens
tcactgaaaacctga

SEQ ID NO: 1414937 - DNA, 15 bp, Homo sapiens
cactgaaaacctgaa

SEQ ID NO: 1414938 - DNA, 15 bp, Homo sapiens
actgaaaacctgaaa

SEQ ID NO: 1414939 - DNA, 15 bp, Homo sapiens
ctgaaaacctgaaat

SEQ ID NO: 1414940 - DNA, 15 bp, Homo sapiens
tgaaaacctgaaatg

SEQ ID NO: 1414941 - DNA, 15 bp, Homo sapiens
gaaaacctgaaatgc

SEQ ID NO: 1414942 - DNA, 15 bp, Homo sapiens
aaaacctgaaatgct

SEQ ID NO: 1414943 - DNA, 15 bp, Homo sapiens
aaacctgaaatgctc

SEQ ID NO: 1414944 - DNA, 15 bp, Homo sapiens
aacctgaaatgctct

SEQ ID NO: 1414945 - DNA, 15 bp, Homo sapiens
acctgaaatgctctg

SEQ ID NO: 1414946 - DNA, 15 bp, Homo sapiens
cctgaaatgctctga

SEQ ID NO: 1414947 - DNA, 15 bp, Homo sapiens
ctgaaatgctctgaa

SEQ ID NO: 1414948 - DNA, 15 bp, Homo sapiens
tgaaatgctctgaaa

SEQ ID NO: 1414949 - DNA, 15 bp, Homo sapiens
gaaatgctctgaaaa

SEQ ID NO: 1414950 - DNA, 15 bp, Homo sapiens
aaatgctctgaaaac

SEQ ID NO: 1414951 - DNA, 15 bp, Homo sapiens
aatgctctgaaaacc

SEQ ID NO: 1414952 - DNA, 15 bp, Homo sapiens
atgctctgaaaacct

SEQ ID NO: 1414953 - DNA, 15 bp, Homo sapiens
tgctctgaaaacctg

SEQ ID NO: 1414954 - DNA, 15 bp, Homo sapiens
gctctgaaaacctga

SEQ ID NO: 1414955 - DNA, 15 bp, Homo sapiens
ctctgaaaacctgaa

SEQ ID NO: 1414956 - DNA, 15 bp, Homo sapiens
tctgaaaacctgaaa

SEQ ID NO: 1414957 - DNA, 15 bp, Homo sapiens
gaaaacctgaaatgg

SEQ ID NO: 1414958 - DNA, 15 bp, Homo sapiens
aaaacctgaaatggc

SEQ ID NO: 1414959 - DNA, 15 bp, Homo sapiens
aaacctgaaatggcg

SEQ ID NO: 1414960 - DNA, 15 bp, Homo sapiens
aacctgaaatggcgt

SEQ ID NO: 1414961 - DNA, 15 bp, Homo sapiens
acctgaaatggcgtt

SEQ ID NO: 1414962 - DNA, 15 bp, Homo sapiens
cctgaaatggcgttt

SEQ ID NO: 1414963 - DNA, 15 bp, Homo sapiens
ctgaaatggcgtttt

SEQ ID NO: 1414964 - DNA, 15 bp, Homo sapiens
tgaaatggcgttttg

SEQ ID NO: 1414965 - DNA, 15 bp, Homo sapiens
aaatggcgttttgga

SEQ ID NO: 1414966 - DNA, 15 bp, Homo sapiens
aatggcgttttggac

SEQ ID NO: 1414967 - DNA, 15 bp, Homo sapiens
atggcgttttggact

SEQ ID NO: 1414968 - DNA, 15 bp, Homo sapiens
tggcgttttggactg

SEQ ID NO: 1414969 - DNA, 15 bp, Homo sapiens
ggcgttttggactgc

SEQ ID NO: 1414970 - DNA, 15 bp, Homo sapiens
gcgttttggactgct

SEQ ID NO: 1414971 - DNA, 15 bp, Homo sapiens
cgttttggactgctg

SEQ ID NO: 1414972 - DNA, 15 bp, Homo sapiens
gttttggactgctgc

SEQ ID NO: 1414973 - DNA, 15 bp, Homo sapiens
ttttggactgctgca

SEQ ID NO: 1414974 - DNA, 15 bp, Homo sapiens
tttggactgctgcaa

SEQ ID NO: 1414975 - DNA, 15 bp, Homo sapiens
ttggactgctgcaag

SEQ ID NO: 1414976 - DNA, 15 bp, Homo sapiens
tggactgctgcaagg

SEQ ID NO: 1414977 - DNA, 15 bp, Homo sapiens
ggactgctgcaaggg

SEQ ID NO: 1414978 - DNA, 15 bp, Homo sapiens
gactgctgcaaggga

SEQ ID NO: 1414979 - DNA, 15 bp, Homo sapiens
actgctgcaagggaa

SEQ ID NO: 1414980 - DNA, 15 bp, Homo sapiens
ctgctgcaagggaaa

SEQ ID NO: 1414981 - DNA, 15 bp, Homo sapiens
tgctgcaagggaaac

SEQ ID NO: 1414982 - DNA, 15 bp, Homo sapiens
gctgcaagggaaact

SEQ ID NO: 1414983 - DNA, 15 bp, Homo sapiens
ctgcaagggaaactg

SEQ ID NO: 1414984 - DNA, 15 bp, Homo sapiens
tgcaagggaaactgt

SEQ ID NO: 1414985 - DNA, 15 bp, Homo sapiens
gcaagggaaactgtg

SEQ ID NO: 1414986 - DNA, 15 bp, Homo sapiens
caagggaaactgtga

SEQ ID NO: 1414987 - DNA, 15 bp, Homo sapiens
aagggaaactgtgat

SEQ ID NO: 1414988 - DNA, 15 bp, Homo sapiens
agggaaactgtgatc

SEQ ID NO: 1414989 - DNA, 15 bp, Homo sapiens
gggaaactgtgatct

SEQ ID NO: 1414990 - DNA, 15 bp, Homo sapiens
ggaaactgtgatctt

SEQ ID NO: 1414991 - DNA, 15 bp, Homo sapiens
gaaactgtgatctta

SEQ ID NO: 1414992 - DNA, 15 bp, Homo sapiens
aaactgtgatcttaa

SEQ ID NO: 1414993 - DNA, 15 bp, Homo sapiens
aactgtgatcttaac

SEQ ID NO: 1414994 - DNA, 15 bp, Homo sapiens
actgtgatcttaaca

SEQ ID NO: 1414995 - DNA, 15 bp, Homo sapiens
ctgtgatcttaacaa

SEQ ID NO: 1414996 - DNA, 15 bp, Homo sapiens
tgtgatcttaacaac

SEQ ID NO: 1414997 - DNA, 15 bp, Homo sapiens
gtgatcttaacaaca

SEQ ID NO: 1414998 - DNA, 15 bp, Homo sapiens
tgatcttaacaacat

SEQ ID NO: 1414999 - DNA, 15 bp, Homo sapiens
gatcttaacaacatc

SEQ ID NO: 1415000 - DNA, 15 bp, Homo sapiens
atcttaacaacatca

SEQ ID NO: 1415001 - DNA, 15 bp, Homo sapiens
tcttaacaacatcag

SEQ ID NO: 1415002 - DNA, 15 bp, Homo sapiens
cttaacaacatcagt

SEQ ID NO: 1415003 - DNA, 15 bp, Homo sapiens
ttaacaacatcagtg

SEQ ID NO: 1415004 - DNA, 15 bp, Homo sapiens
taacaacatcagtgc

SEQ ID NO: 1415005 - DNA, 15 bp, Homo sapiens
aacaacatcagtgcg

SEQ ID NO: 1415006 - DNA, 15 bp, Homo sapiens
acaacatcagtgcgg

SEQ ID NO: 1415007 - DNA, 15 bp, Homo sapiens
caacatcagtgcggc

SEQ ID NO: 1415008 - DNA, 15 bp, Homo sapiens
aacatcagtgcggct

SEQ ID NO: 1415009 - DNA, 15 bp, Homo sapiens
acatcagtgcggctc

SEQ ID NO: 1415010 - DNA, 15 bp, Homo sapiens
catcagtgcggctca

SEQ ID NO: 1415011 - DNA, 15 bp, Homo sapiens
atcagtgcggctcag

SEQ ID NO: 1415012 - DNA, 15 bp, Homo sapiens
tcagtgcggctcaga

SEQ ID NO: 1415013 - DNA, 15 bp, Homo sapiens
cagtgcggctcagac

SEQ ID NO: 1415014 - DNA, 15 bp, Homo sapiens
agtgcggctcagaca

SEQ ID NO: 1415015 - DNA, 15 bp, Homo sapiens
gtgcggctcagacat

SEQ ID NO: 1415016 - DNA, 15 bp, Homo sapiens
tgcggctcagacatg

SEQ ID NO: 1415017 - DNA, 15 bp, Homo sapiens
gcggctcagacatga

SEQ ID NO: 1415018 - DNA, 15 bp, Homo sapiens
cggctcagacatgac

SEQ ID NO: 1415019 - DNA, 15 bp, Homo sapiens
ggctcagacatgacc

SEQ ID NO: 1415020 - DNA, 15 bp, Homo sapiens
gctcagacatgacca

SEQ ID NO: 1415021 - DNA, 15 bp, Homo sapiens
ctcagacatgaccac

SEQ ID NO: 1415022 - DNA, 15 bp, Homo sapiens
tcagacatgaccacc

SEQ ID NO: 1415023 - DNA, 15 bp, Homo sapiens
cagacatgaccacca

SEQ ID NO: 1415024 - DNA, 15 bp, Homo sapiens
agacatgaccaccat

SEQ ID NO: 1415025 - DNA, 15 bp, Homo sapiens
gacatgaccaccatg

SEQ ID NO: 1415026 - DNA, 15 bp, Homo sapiens
acatgaccaccatgt

SEQ ID NO: 1415027 - DNA, 15 bp, Homo sapiens
catgaccaccatgtg

SEQ ID NO: 1415028 - DNA, 15 bp, Homo sapiens
atgaccaccatgtga

SEQ ID NO: 1415029 - DNA, 15 bp, Homo sapiens
tgaccaccatgtgag

SEQ ID NO: 1415030 - DNA, 15 bp, Homo sapiens
gaccaccatgtgagg

SEQ ID NO: 1415031 - DNA, 15 bp, Homo sapiens
accaccatgtgaggg

SEQ ID NO: 1415032 - DNA, 15 bp, Homo sapiens
ccaccatgtgagggc

SEQ ID NO: 1415033 - DNA, 15 bp, Homo sapiens
caccatgtgagggca

SEQ ID NO: 1415034 - DNA, 15 bp, Homo sapiens
accatgtgagggcaa

SEQ ID NO: 1415035 - DNA, 15 bp, Homo sapiens
ccatgtgagggcaaa

SEQ ID NO: 1415036 - DNA, 15 bp, Homo sapiens
catgtgagggcaaag

SEQ ID NO: 1415037 - DNA, 15 bp, Homo sapiens
atgtgagggcaaagg

SEQ ID NO: 1415038 - DNA, 15 bp, Homo sapiens
tgtgagggcaaaggt

SEQ ID NO: 1415039 - DNA, 15 bp, Homo sapiens
gtgagggcaaaggtg

SEQ ID NO: 1415040 - DNA, 15 bp, Homo sapiens
tgagggcaaaggtgg

SEQ ID NO: 1415041 - DNA, 15 bp, Homo sapiens
gagggcaaaggtggg

SEQ ID NO: 1415042 - DNA, 15 bp, Homo sapiens
agggcaaaggtgggg

SEQ ID NO: 1415043 - DNA, 15 bp, Homo sapiens
gggcaaaggtggggc

SEQ ID NO: 1415044 - DNA, 15 bp, Homo sapiens
ggcaaaggtggggct

SEQ ID NO: 1415045 - DNA, 15 bp, Homo sapiens
gcaaaggtggggctg

SEQ ID NO: 1415046 - DNA, 15 bp, Homo sapiens
caaaggtggggctgg

SEQ ID NO: 1415047 - DNA, 15 bp, Homo sapiens
aaaggtggggctggt

SEQ ID NO: 1415048 - DNA, 15 bp, Homo sapiens
aaggtggggctggtg

SEQ ID NO: 1415049 - DNA, 15 bp, Homo sapiens
aggtggggctggtgt

SEQ ID NO: 1415050 - DNA, 15 bp, Homo sapiens
ggtggggctggtgta

SEQ ID NO: 1415051 - DNA, 15 bp, Homo sapiens
gtggggctggtgtaa

SEQ ID NO: 1415052 - DNA, 15 bp, Homo sapiens
tggggctggtgtaag

SEQ ID NO: 1415053 - DNA, 15 bp, Homo sapiens
ggggctggtgtaagt

SEQ ID NO: 1415054 - DNA, 15 bp, Homo sapiens
gggctggtgtaagtg

SEQ ID NO: 1415055 - DNA, 15 bp, Homo sapiens
ggctggtgtaagtga

SEQ ID NO: 1415056 - DNA, 15 bp, Homo sapiens
gctggtgtaagtgat

SEQ ID NO: 1415057 - DNA, 15 bp, Homo sapiens
ctggtgtaagtgatg

SEQ ID NO: 1415058 - DNA, 15 bp, Homo sapiens
tggtgtaagtgatgt

SEQ ID NO: 1415059 - DNA, 15 bp, Homo sapiens
ggtgtaagtgatgtt

SEQ ID NO: 1415060 - DNA, 15 bp, Homo sapiens
gtgtaagtgatgttg

SEQ ID NO: 1415061 - DNA, 15 bp, Homo sapiens
tgtaagtgatgttgt

SEQ ID NO: 1415062 - DNA, 15 bp, Homo sapiens
gtaagtgatgttgtt

SEQ ID NO: 1415063 - DNA, 15 bp, Homo sapiens
taagtgatgttgtta

SEQ ID NO: 1415064 - DNA, 15 bp, Homo sapiens
aagtgatgttgttaa

SEQ ID NO: 1415065 - DNA, 15 bp, Homo sapiens
agtgatgttgttaaa

SEQ ID NO: 1415066 - DNA, 15 bp, Homo sapiens
gtgatgttgttaaac

SEQ ID NO: 1415067 - DNA, 15 bp, Homo sapiens
tgatgttgttaaacc

SEQ ID NO: 1415068 - DNA, 15 bp, Homo sapiens
gatgttgttaaacct

SEQ ID NO: 1415069 - DNA, 15 bp, Homo sapiens
atgttgttaaacctg

SEQ ID NO: 1415070 - DNA, 15 bp, Homo sapiens
tgttgttaaacctgt

SEQ ID NO: 1415071 - DNA, 15 bp, Homo sapiens
gttgttaaacctgta

SEQ ID NO: 1415072 - DNA, 15 bp, Homo sapiens
ttgttaaacctgtaa

SEQ ID NO: 1415073 - DNA, 15 bp, Homo sapiens
tgttaaacctgtaaa

SEQ ID NO: 1415074 - DNA, 15 bp, Homo sapiens
gttaaacctgtaaaa

SEQ ID NO: 1415075 - DNA, 15 bp, Homo sapiens
ttaaacctgtaaaaa

SEQ ID NO: 1415076 - DNA, 15 bp, Homo sapiens
taaacctgtaaaaat

SEQ ID NO: 1415077 - DNA, 15 bp, Homo sapiens
aaacctgtaaaaata

SEQ ID NO: 1415078 - DNA, 15 bp, Homo sapiens
aacctgtaaaaataa

SEQ ID NO: 1415079 - DNA, 15 bp, Homo sapiens
acctgtaaaaataaa

SEQ ID NO: 1415080 - DNA, 15 bp, Homo sapiens
cctgtaaaaataaac

SEQ ID NO: 1415081 - DNA, 15 bp, Homo sapiens
ctgtaaaaataaacc

SEQ ID NO: 1415082 - DNA, 15 bp, Homo sapiens
tgtaaaaataaacca

SEQ ID NO: 1415083 - DNA, 15 bp, Homo sapiens
gtaaaaataaaccat

SEQ ID NO: 1415084 - DNA, 15 bp, Homo sapiens
taaaaataaaccatg

SEQ ID NO: 1415085 - DNA, 15 bp, Homo sapiens
aaaaataaaccatga

SEQ ID NO: 1415086 - DNA, 15 bp, Homo sapiens
aaaataaaccatgaa

SEQ ID NO: 1415087 - DNA, 15 bp, Homo sapiens
aaataaaccatgaaa

SEQ ID NO: 1415088 - DNA, 15 bp, Homo sapiens
aataaaccatgaaaa

SEQ ID NO: 1415089 - DNA, 15 bp, Homo sapiens
ataaaccatgaaaac

SEQ ID NO: 1415090 - DNA, 15 bp, Homo sapiens
taaaccatgaaaacc

SEQ ID NO: 1415091 - DNA, 15 bp, Homo sapiens
aaaccatgaaaacct

SEQ ID NO: 1415092 - DNA, 15 bp, Homo sapiens
aaccatgaaaacctg

SEQ ID NO: 1415093 - DNA, 15 bp, Homo sapiens
accatgaaaacctgg

SEQ ID NO: 1415094 - DNA, 15 bp, Homo sapiens
ccatgaaaacctggg

SEQ ID NO: 1415095 - DNA, 15 bp, Homo sapiens
catgaaaacctgggg

SEQ ID NO: 1415096 - DNA, 15 bp, Homo sapiens
atgaaaacctgggga

SEQ ID NO: 1415097 - DNA, 15 bp, Homo sapiens
tgaaaacctggggat

SEQ ID NO: 1415098 - DNA, 15 bp, Homo sapiens
gaaaacctggggatt

SEQ ID NO: 1415099 - DNA, 15 bp, Homo sapiens
aaaacctggggattt

SEQ ID NO: 1415100 - DNA, 15 bp, Homo sapiens
aaacctggggattta

SEQ ID NO: 1415101 - DNA, 15 bp, Homo sapiens
aacctggggatttac

SEQ ID NO: 1415102 - DNA, 15 bp, Homo sapiens
acctggggatttact

SEQ ID NO: 1415103 - DNA, 15 bp, Homo sapiens
cctggggatttactg

SEQ ID NO: 1415104 - DNA, 15 bp, Homo sapiens
ctggggatttactgt

SEQ ID NO: 1415105 - DNA, 15 bp, Homo sapiens
tggggatttactgtg

SEQ ID NO: 1415106 - DNA, 15 bp, Homo sapiens
ggggatttactgtga

SEQ ID NO: 1415107 - DNA, 15 bp, Homo sapiens
gggatttactgtgat

SEQ ID NO: 1415108 - DNA, 15 bp, Homo sapiens
ggatttactgtgatt

SEQ ID NO: 1415109 - DNA, 15 bp, Homo sapiens
gatttactgtgattt

SEQ ID NO: 1415110 - DNA, 15 bp, Homo sapiens
atttactgtgatttg

SEQ ID NO: 1415111 - DNA, 15 bp, Homo sapiens
tttactgtgatttgg

SEQ ID NO: 1415112 - DNA, 15 bp, Homo sapiens
ttactgtgatttggg

SEQ ID NO: 1415113 - DNA, 15 bp, Homo sapiens
tactgtgatttgggg

SEQ ID NO: 1415114 - DNA, 15 bp, Homo sapiens
actgtgatttgggga

SEQ ID NO: 1415115 - DNA, 15 bp, Homo sapiens
ctgtgatttggggag

SEQ ID NO: 1415116 - DNA, 15 bp, Homo sapiens
tgtgatttggggagt

SEQ ID NO: 1415117 - DNA, 15 bp, Homo sapiens
gtgatttggggagtg

SEQ ID NO: 1415118 - DNA, 15 bp, Homo sapiens
tgatttggggagtga

SEQ ID NO: 1415119 - DNA, 15 bp, Homo sapiens
gatttggggagtgaa

SEQ ID NO: 1415120 - DNA, 15 bp, Homo sapiens
atttggggagtgaaa

SEQ ID NO: 1415121 - DNA, 15 bp, Homo sapiens
tttggggagtgaaac

SEQ ID NO: 1415122 - DNA, 15 bp, Homo sapiens
ttggggagtgaaaca

SEQ ID NO: 1415123 - DNA, 15 bp, Homo sapiens
tggggagtgaaacaa

SEQ ID NO: 1415124 - DNA, 15 bp, Homo sapiens
ggggagtgaaacaaa

SEQ ID NO: 1415125 - DNA, 15 bp, Homo sapiens
gggagtgaaacaaat

SEQ ID NO: 1415126 - DNA, 15 bp, Homo sapiens
ggagtgaaacaaatt

SEQ ID NO: 1415127 - DNA, 15 bp, Homo sapiens
gagtgaaacaaattt

SEQ ID NO: 1415128 - DNA, 15 bp, Homo sapiens
agtgaaacaaattta

SEQ ID NO: 1415129 - DNA, 15 bp, Homo sapiens
gtgaaacaaatttac

SEQ ID NO: 1415130 - DNA, 15 bp, Homo sapiens
tgaaacaaatttacc

SEQ ID NO: 1415131 - DNA, 15 bp, Homo sapiens
gaaacaaatttacca

SEQ ID NO: 1415132 - DNA, 15 bp, Homo sapiens
aaacaaatttaccac

SEQ ID NO: 1415133 - DNA, 15 bp, Homo sapiens
aacaaatttaccact

SEQ ID NO: 1415134 - DNA, 15 bp, Homo sapiens
acaaatttaccactg

SEQ ID NO: 1415135 - DNA, 15 bp, Homo sapiens
caaatttaccactgg

SEQ ID NO: 1415136 - DNA, 15 bp, Homo sapiens
aaatttaccactggc

SEQ ID NO: 1415137 - DNA, 15 bp, Homo sapiens
aatttaccactggcc

SEQ ID NO: 1415138 - DNA, 15 bp, Homo sapiens
atttaccactggccg

SEQ ID NO: 1415139 - DNA, 15 bp, Homo sapiens
tttaccactggccga

SEQ ID NO: 1415140 - DNA, 15 bp, Homo sapiens
ttaccactggccgaa

SEQ ID NO: 1415141 - DNA, 15 bp, Homo sapiens
taccactggccgaaa

SEQ ID NO: 1415142 - DNA, 15 bp, Homo sapiens
accactggccgaaaa

SEQ ID NO: 1415143 - DNA, 15 bp, Homo sapiens
ccactggccgaaaac

SEQ ID NO: 1415144 - DNA, 15 bp, Homo sapiens
cactggccgaaaact

SEQ ID NO: 1415145 - DNA, 15 bp, Homo sapiens
actggccgaaaactt

SEQ ID NO: 1415146 - DNA, 15 bp, Homo sapiens
ctggccgaaaacttg

SEQ ID NO: 1415147 - DNA, 15 bp, Homo sapiens
tggccgaaaacttga

SEQ ID NO: 1415148 - DNA, 15 bp, Homo sapiens
ggccgaaaacttgaa

SEQ ID NO: 1415149 - DNA, 15 bp, Homo sapiens
gccgaaaacttgaaa

SEQ ID NO: 1415150 - DNA, 15 bp, Homo sapiens
ccgaaaacttgaaaa

SEQ ID NO: 1415151 - DNA, 15 bp, Homo sapiens
cgaaaacttgaaaaa

SEQ ID NO: 1415152 - DNA, 15 bp, Homo sapiens
gaaaacttgaaaaat

SEQ ID NO: 1415153 - DNA, 15 bp, Homo sapiens
aaaacttgaaaaatg

SEQ ID NO: 1415154 - DNA, 15 bp, Homo sapiens
aaacttgaaaaatgg

SEQ ID NO: 1415155 - DNA, 15 bp, Homo sapiens
aacttgaaaaatgga

SEQ ID NO: 1415156 - DNA, 15 bp, Homo sapiens
acttgaaaaatggag

SEQ ID NO: 1415157 - DNA, 15 bp, Homo sapiens
cttgaaaaatggagt

SEQ ID NO: 1415158 - DNA, 15 bp, Homo sapiens
ttgaaaaatggagta

SEQ ID NO: 1415159 - DNA, 15 bp, Homo sapiens
tgaaaaatggagtac

SEQ ID NO: 1415160 - DNA, 15 bp, Homo sapiens
gaaaaatggagtaca

SEQ ID NO: 1415161 - DNA, 15 bp, Homo sapiens
aaaaatggagtacaa

SEQ ID NO: 1415162 - DNA, 15 bp, Homo sapiens
aaaatggagtacaat

SEQ ID NO: 1415163 - DNA, 15 bp, Homo sapiens
aaatggagtacaatg

SEQ ID NO: 1415164 - DNA, 15 bp, Homo sapiens
aatggagtacaatgt

SEQ ID NO: 1415165 - DNA, 15 bp, Homo sapiens
atggagtacaatgtg

SEQ ID NO: 1415166 - DNA, 15 bp, Homo sapiens
tggagtacaatgtgt

SEQ ID NO: 1415167 - DNA, 15 bp, Homo sapiens
ggagtacaatgtgta

SEQ ID NO: 1415168 - DNA, 15 bp, Homo sapiens
gagtacaatgtgtag

SEQ ID NO: 1415169 - DNA, 15 bp, Homo sapiens
agtacaatgtgtaga

SEQ ID NO: 1415170 - DNA, 15 bp, Homo sapiens
gtacaatgtgtagat

SEQ ID NO: 1415171 - DNA, 15 bp, Homo sapiens
tacaatgtgtagatc

SEQ ID NO: 1415172 - DNA, 15 bp, Homo sapiens
acaatgtgtagatca

SEQ ID NO: 1415173 - DNA, 15 bp, Homo sapiens
caatgtgtagatcag

SEQ ID NO: 1415174 - DNA, 15 bp, Homo sapiens
aatgtgtagatcaga

SEQ ID NO: 1415175 - DNA, 15 bp, Homo sapiens
atgtgtagatcagaa

SEQ ID NO: 1415176 - DNA, 15 bp, Homo sapiens
tgtgtagatcagaag

SEQ ID NO: 1415177 - DNA, 15 bp, Homo sapiens
gtgtagatcagaaga

SEQ ID NO: 1415178 - DNA, 15 bp, Homo sapiens
tgtagatcagaagaa

SEQ ID NO: 1415179 - DNA, 15 bp, Homo sapiens
gtagatcagaagaaa

SEQ ID NO: 1415180 - DNA, 15 bp, Homo sapiens
tagatcagaagaaaa

SEQ ID NO: 1415181 - DNA, 15 bp, Homo sapiens
agatcagaagaaaag

SEQ ID NO: 1415182 - DNA, 15 bp, Homo sapiens
gatcagaagaaaaga

SEQ ID NO: 1415183 - DNA, 15 bp, Homo sapiens
atcagaagaaaagaa

SEQ ID NO: 1415184 - DNA, 15 bp, Homo sapiens
tcagaagaaaagaaa

SEQ ID NO: 1415185 - DNA, 15 bp, Homo sapiens
cagaagaaaagaaag

SEQ ID NO: 1415186 - DNA, 15 bp, Homo sapiens
agaagaaaagaaagc

SEQ ID NO: 1415187 - DNA, 15 bp, Homo sapiens
gaagaaaagaaagcc

SEQ ID NO: 1415188 - DNA, 15 bp, Homo sapiens
aagaaaagaaagccg

SEQ ID NO: 1415189 - DNA, 15 bp, Homo sapiens
agaaaagaaagccgt

SEQ ID NO: 1415190 - DNA, 15 bp, Homo sapiens
gaaaagaaagccgtc

SEQ ID NO: 1415191 - DNA, 15 bp, Homo sapiens
aaaagaaagccgtcc

SEQ ID NO: 1415192 - DNA, 15 bp, Homo sapiens
aaagaaagccgtccc

SEQ ID NO: 1415193 - DNA, 15 bp, Homo sapiens
aagaaagccgtccct

SEQ ID NO: 1415194 - DNA, 15 bp, Homo sapiens
agaaagccgtccctc

SEQ ID NO: 1415195 - DNA, 15 bp, Homo sapiens
gaaagccgtccctct

SEQ ID NO: 1415196 - DNA, 15 bp, Homo sapiens
aaagccgtccctctg

SEQ ID NO: 1415197 - DNA, 15 bp, Homo sapiens
aagccgtccctctgc

SEQ ID NO: 1415198 - DNA, 15 bp, Homo sapiens
agccgtccctctgcc

SEQ ID NO: 1415199 - DNA, 15 bp, Homo sapiens
gccgtccctctgccc

SEQ ID NO: 1415200 - DNA, 15 bp, Homo sapiens
ccgtccctctgccct

SEQ ID NO: 1415201 - DNA, 15 bp, Homo sapiens
cgtccctctgccctt

SEQ ID NO: 1415202 - DNA, 15 bp, Homo sapiens
gtccctctgcccttg

SEQ ID NO: 1415203 - DNA, 15 bp, Homo sapiens
tccctctgcccttgt

SEQ ID NO: 1415204 - DNA, 15 bp, Homo sapiens
ccctctgcccttgtg

SEQ ID NO: 1415205 - DNA, 15 bp, Homo sapiens
cctctgcccttgtgt

SEQ ID NO: 1415206 - DNA, 15 bp, Homo sapiens
ctctgcccttgtgta

SEQ ID NO: 1415207 - DNA, 15 bp, Homo sapiens
tctgcccttgtgtag

SEQ ID NO: 1415208 - DNA, 15 bp, Homo sapiens
ctgcccttgtgtagt

SEQ ID NO: 1415209 - DNA, 15 bp, Homo sapiens
tgcccttgtgtagtt

SEQ ID NO: 1415210 - DNA, 15 bp, Homo sapiens
gcccttgtgtagttt

SEQ ID NO: 1415211 - DNA, 15 bp, Homo sapiens
cccttgtgtagtttt

SEQ ID NO: 1415212 - DNA, 15 bp, Homo sapiens
ccttgtgtagtttta

SEQ ID NO: 1415213 - DNA, 15 bp, Homo sapiens
cttgtgtagttttag

SEQ ID NO: 1415214 - DNA, 15 bp, Homo sapiens
ttgtgtagttttaga

SEQ ID NO: 1415215 - DNA, 15 bp, Homo sapiens
tgtgtagttttagaa

SEQ ID NO: 1415216 - DNA, 15 bp, Homo sapiens
gtgtagttttagaaa

SEQ ID NO: 1415217 - DNA, 15 bp, Homo sapiens
tgtagttttagaaaa

SEQ ID NO: 1415218 - DNA, 15 bp, Homo sapiens
gtagttttagaaaaa

SEQ ID NO: 1415219 - DNA, 15 bp, Homo sapiens
tagttttagaaaaac

SEQ ID NO: 1415220 - DNA, 15 bp, Homo sapiens
agttttagaaaaaca

SEQ ID NO: 1415221 - DNA, 15 bp, Homo sapiens
gttttagaaaaacaa

SEQ ID NO: 1415222 - DNA, 15 bp, Homo sapiens
ttttagaaaaacaat

SEQ ID NO: 1415223 - DNA, 15 bp, Homo sapiens
tttagaaaaacaatc

SEQ ID NO: 1415224 - DNA, 15 bp, Homo sapiens
ttagaaaaacaatct

SEQ ID NO: 1415225 - DNA, 15 bp, Homo sapiens
tagaaaaacaatctt

SEQ ID NO: 1415226 - DNA, 15 bp, Homo sapiens
agaaaaacaatctta

SEQ ID NO: 1415227 - DNA, 15 bp, Homo sapiens
gaaaaacaatcttat

SEQ ID NO: 1415228 - DNA, 15 bp, Homo sapiens
aaaaacaatcttatt

SEQ ID NO: 1415229 - DNA, 15 bp, Homo sapiens
aaaacaatcttatta

SEQ ID NO: 1415230 - DNA, 15 bp, Homo sapiens
aaacaatcttattag

SEQ ID NO: 1415231 - DNA, 15 bp, Homo sapiens
aacaatcttattagt

SEQ ID NO: 1415232 - DNA, 15 bp, Homo sapiens
acaatcttattagtt

SEQ ID NO: 1415233 - DNA, 15 bp, Homo sapiens
caatcttattagttt

SEQ ID NO: 1415234 - DNA, 15 bp, Homo sapiens
aatcttattagtttg

SEQ ID NO: 1415235 - DNA, 15 bp, Homo sapiens
atcttattagtttgg

SEQ ID NO: 1415236 - DNA, 15 bp, Homo sapiens
tcttattagtttggt

SEQ ID NO: 1415237 - DNA, 15 bp, Homo sapiens
cttattagtttggta

SEQ ID NO: 1415238 - DNA, 15 bp, Homo sapiens
ttattagtttggtag

SEQ ID NO: 1415239 - DNA, 15 bp, Homo sapiens
tattagtttggtagc

SEQ ID NO: 1415240 - DNA, 15 bp, Homo sapiens
attagtttggtagct

SEQ ID NO: 1415241 - DNA, 15 bp, Homo sapiens
ttagtttggtagctt

SEQ ID NO: 1415242 - DNA, 15 bp, Homo sapiens
tagtttggtagcttt

SEQ ID NO: 1415243 - DNA, 15 bp, Homo sapiens
agtttggtagctttt

SEQ ID NO: 1415244 - DNA, 15 bp, Homo sapiens
gtttggtagcttttt

SEQ ID NO: 1415245 - DNA, 15 bp, Homo sapiens
tttggtagctttttt

SEQ ID NO: 1415246 - DNA, 15 bp, Homo sapiens
ttggtagcttttttt

SEQ ID NO: 1415247 - DNA, 15 bp, Homo sapiens
tggtagctttttttc

SEQ ID NO: 1415248 - DNA, 15 bp, Homo sapiens
ggtagctttttttcc

SEQ ID NO: 1415249 - DNA, 15 bp, Homo sapiens
gtagctttttttcct

SEQ ID NO: 1415250 - DNA, 15 bp, Homo sapiens
tagctttttttcctg

SEQ ID NO: 1415251 - DNA, 15 bp, Homo sapiens
agctttttttcctga

SEQ ID NO: 1415252 - DNA, 15 bp, Homo sapiens
gctttttttcctgaa

SEQ ID NO: 1415253 - DNA, 15 bp, Homo sapiens
ctttttttcctgaaa

SEQ ID NO: 1415254 - DNA, 15 bp, Homo sapiens
tttttttcctgaaaa

SEQ ID NO: 1415255 - DNA, 15 bp, Homo sapiens
ttttttcctgaaaat

SEQ ID NO: 1415256 - DNA, 15 bp, Homo sapiens
tttttcctgaaaata

SEQ ID NO: 1415257 - DNA, 15 bp, Homo sapiens
ttttcctgaaaataa

SEQ ID NO: 1415258 - DNA, 15 bp, Homo sapiens
tttcctgaaaataaa

SEQ ID NO: 1415259 - DNA, 15 bp, Homo sapiens
ttcctgaaaataaaa

SEQ ID NO: 1415260 - DNA, 15 bp, Homo sapiens
tcctgaaaataaaaa

SEQ ID NO: 1415261 - DNA, 15 bp, Homo sapiens
cctgaaaataaaaaa

SEQ ID NO: 1415262 - DNA, 15 bp, Homo sapiens
ctgaaaataaaaaaa

SEQ ID NO: 1415263 - DNA, 15 bp, Homo sapiens
tgaaaataaaaaaaa

SEQ ID NO: 1415264 - DNA, 15 bp, Homo sapiens
gaaaataaaaaaaaa

SEQ ID NO: 1415265 - DNA, 15 bp, Homo sapiens
aataaaaaaaaaaat

SEQ ID NO: 1415266 - DNA, 15 bp, Homo sapiens
ataaaaaaaaaaata

SEQ ID NO: 1415267 - DNA, 15 bp, Homo sapiens
taaaaaaaaaaatac

SEQ ID NO: 1415268 - DNA, 15 bp, Homo sapiens
aaaaaaaaatacatt

SEQ ID NO: 1415269 - DNA, 15 bp, Homo sapiens
aaaaaaaatacattg

SEQ ID NO: 1415270 - DNA, 15 bp, Homo sapiens
aaaaaaatacattgg

SEQ ID NO: 1415271 - DNA, 15 bp, Homo sapiens
aaaaaatacattggc

SEQ ID NO: 1415272 - DNA, 15 bp, Homo sapiens
aaaaatacattggca

SEQ ID NO: 1415273 - DNA, 15 bp, Homo sapiens
aaaatacattggcac

SEQ ID NO: 1415274 - DNA, 15 bp, Homo sapiens
aaatacattggcacc

SEQ ID NO: 1415275 - DNA, 15 bp, Homo sapiens
aatacattggcacct

SEQ ID NO: 1415276 - DNA, 15 bp, Homo sapiens
atacattggcaccta

SEQ ID NO: 1415277 - DNA, 15 bp, Homo sapiens
tacattggcacctaa

SEQ ID NO: 1415278 - DNA, 15 bp, Homo sapiens
acattggcacctaag

SEQ ID NO: 1415279 - DNA, 15 bp, Homo sapiens
cattggcacctaagc

SEQ ID NO: 1415280 - DNA, 15 bp, Homo sapiens
attggcacctaagcc

SEQ ID NO: 1415281 - DNA, 15 bp, Homo sapiens
ttggcacctaagcca

SEQ ID NO: 1415282 - DNA, 15 bp, Homo sapiens
tggcacctaagccat

SEQ ID NO: 1415283 - DNA, 15 bp, Homo sapiens
ggcacctaagccatg

SEQ ID NO: 1415284 - DNA, 15 bp, Homo sapiens
gcacctaagccatgg

SEQ ID NO: 1415285 - DNA, 15 bp, Homo sapiens
cacctaagccatgga

SEQ ID NO: 1415286 - DNA, 15 bp, Homo sapiens
acctaagccatggaa

SEQ ID NO: 1415287 - DNA, 15 bp, Homo sapiens
cctaagccatggaaa

SEQ ID NO: 1415288 - DNA, 15 bp, Homo sapiens
ctaagccatggaaaa

SEQ ID NO: 1415289 - DNA, 15 bp, Homo sapiens
taagccatggaaaat

SEQ ID NO: 1415290 - DNA, 15 bp, Homo sapiens
aagccatggaaaatg

SEQ ID NO: 1415291 - DNA, 15 bp, Homo sapiens
agccatggaaaatga

SEQ ID NO: 1415292 - DNA, 15 bp, Homo sapiens
gccatggaaaatgaa

SEQ ID NO: 1415293 - DNA, 15 bp, Homo sapiens
ccatggaaaatgaaa

SEQ ID NO: 1415294 - DNA, 15 bp, Homo sapiens
catggaaaatgaaat

SEQ ID NO: 1415295 - DNA, 15 bp, Homo sapiens
atggaaaatgaaata

SEQ ID NO: 1415296 - DNA, 15 bp, Homo sapiens
tggaaaatgaaataa

SEQ ID NO: 1415297 - DNA, 15 bp, Homo sapiens
ggaaaatgaaataaa

SEQ ID NO: 1415298 - DNA, 15 bp, Homo sapiens
gaaaatgaaataaaa

SEQ ID NO: 1415299 - DNA, 15 bp, Homo sapiens
aaaatgaaataaaaa

SEQ ID NO: 1415300 - DNA, 15 bp, Homo sapiens
aaatgaaataaaaat

SEQ ID NO: 1415301 - DNA, 15 bp, Homo sapiens
aatgaaataaaaata

SEQ ID NO: 1415302 - DNA, 15 bp, Homo sapiens
atgaaataaaaatac

SEQ ID NO: 1415303 - DNA, 15 bp, Homo sapiens
tgaaataaaaataca

SEQ ID NO: 1415304 - DNA, 15 bp, Homo sapiens
gaaataaaaatacac

SEQ ID NO: 1415305 - DNA, 15 bp, Homo sapiens
aaataaaaatacacc

SEQ ID NO: 1415306 - DNA, 15 bp, Homo sapiens
aataaaaatacacca

SEQ ID NO: 1415307 - DNA, 15 bp, Homo sapiens
ataaaaatacaccag

SEQ ID NO: 1415308 - DNA, 15 bp, Homo sapiens
taaaaatacaccagt

SEQ ID NO: 1415309 - DNA, 15 bp, Homo sapiens
aaaaatacaccagtg

SEQ ID NO: 1415310 - DNA, 15 bp, Homo sapiens
aaaatacaccagtgc

SEQ ID NO: 1415311 - DNA, 15 bp, Homo sapiens
aaatacaccagtgca

SEQ ID NO: 1415312 - DNA, 15 bp, Homo sapiens
aatacaccagtgcag

SEQ ID NO: 1415313 - DNA, 15 bp, Homo sapiens
atacaccagtgcagc

SEQ ID NO: 1415314 - DNA, 15 bp, Homo sapiens
tacaccagtgcagct

SEQ ID NO: 1415315 - DNA, 15 bp, Homo sapiens
acaccagtgcagctt

SEQ ID NO: 1415316 - DNA, 15 bp, Homo sapiens
caccagtgcagcttc

SEQ ID NO: 1415317 - DNA, 15 bp, Homo sapiens
accagtgcagcttcc

SEQ ID NO: 1415318 - DNA, 15 bp, Homo sapiens
ccagtgcagcttcca

SEQ ID NO: 1415319 - DNA, 15 bp, Homo sapiens
cagtgcagcttccaa

SEQ ID NO: 1415320 - DNA, 15 bp, Homo sapiens
agtgcagcttccaaa

SEQ ID NO: 1415321 - DNA, 15 bp, Homo sapiens
gtgcagcttccaaaa

SEQ ID NO: 1415322 - DNA, 15 bp, Homo sapiens
tgcagcttccaaaac

SEQ ID NO: 1415323 - DNA, 15 bp, Homo sapiens
gcagcttccaaaaca

SEQ ID NO: 1415324 - DNA, 15 bp, Homo sapiens
cagcttccaaaacac

SEQ ID NO: 1415325 - DNA, 15 bp, Homo sapiens
agcttccaaaacact

SEQ ID NO: 1415326 - DNA, 15 bp, Homo sapiens
gcttccaaaacactg

SEQ ID NO: 1415327 - DNA, 15 bp, Homo sapiens
cttccaaaacactga

SEQ ID NO: 1415328 - DNA, 15 bp, Homo sapiens
ttccaaaacactgac

SEQ ID NO: 1415329 - DNA, 15 bp, Homo sapiens
tccaaaacactgact

SEQ ID NO: 1415330 - DNA, 15 bp, Homo sapiens
ccaaaacactgactt

SEQ ID NO: 1415331 - DNA, 15 bp, Homo sapiens
caaaacactgacttg

SEQ ID NO: 1415332 - DNA, 15 bp, Homo sapiens
aaaacactgacttgc

SEQ ID NO: 1415333 - DNA, 15 bp, Homo sapiens
aaacactgacttgca

SEQ ID NO: 1415334 - DNA, 15 bp, Homo sapiens
aacactgacttgcat

SEQ ID NO: 1415335 - DNA, 15 bp, Homo sapiens
acactgacttgcatc

SEQ ID NO: 1415336 - DNA, 15 bp, Homo sapiens
cactgacttgcatct

SEQ ID NO: 1415337 - DNA, 15 bp, Homo sapiens
actgacttgcatctc

SEQ ID NO: 1415338 - DNA, 15 bp, Homo sapiens
ctgacttgcatctcc

SEQ ID NO: 1415339 - DNA, 15 bp, Homo sapiens
tgacttgcatctccc

SEQ ID NO: 1415340 - DNA, 15 bp, Homo sapiens
gacttgcatctccct

SEQ ID NO: 1415341 - DNA, 15 bp, Homo sapiens
acttgcatctccctc

SEQ ID NO: 1415342 - DNA, 15 bp, Homo sapiens
cttgcatctccctct

SEQ ID NO: 1415343 - DNA, 15 bp, Homo sapiens
ttgcatctccctctc

SEQ ID NO: 1415344 - DNA, 15 bp, Homo sapiens
tgcatctccctctcc

SEQ ID NO: 1415345 - DNA, 15 bp, Homo sapiens
gcatctccctctcct

SEQ ID NO: 1415346 - DNA, 15 bp, Homo sapiens
catctccctctccta

SEQ ID NO: 1415347 - DNA, 15 bp, Homo sapiens
atctccctctcctat

SEQ ID NO: 1415348 - DNA, 15 bp, Homo sapiens
tctccctctcctatc

SEQ ID NO: 1415349 - DNA, 15 bp, Homo sapiens
ctccctctcctatcc

SEQ ID NO: 1415350 - DNA, 15 bp, Homo sapiens
tccctctcctatccg

SEQ ID NO: 1415351 - DNA, 15 bp, Homo sapiens
ccctctcctatccgc

SEQ ID NO: 1415352 - DNA, 15 bp, Homo sapiens
cctctcctatccgcc

SEQ ID NO: 1415353 - DNA, 15 bp, Homo sapiens
ctctcctatccgccg

SEQ ID NO: 1415354 - DNA, 15 bp, Homo sapiens
tctcctatccgccgg

SEQ ID NO: 1415355 - DNA, 15 bp, Homo sapiens
ctcctatccgccggg

SEQ ID NO: 1415356 - DNA, 15 bp, Homo sapiens
tcctatccgccggga

SEQ ID NO: 1415357 - DNA, 15 bp, Homo sapiens
cctatccgccgggaa

SEQ ID NO: 1415358 - DNA, 15 bp, Homo sapiens
ctatccgccgggaat

SEQ ID NO: 1415359 - DNA, 15 bp, Homo sapiens
tatccgccgggaatg

SEQ ID NO: 1415360 - DNA, 15 bp, Homo sapiens
atccgccgggaatgt

SEQ ID NO: 1415361 - DNA, 15 bp, Homo sapiens
tccgccgggaatgtc

SEQ ID NO: 1415362 - DNA, 15 bp, Homo sapiens
ccgccgggaatgtct

SEQ ID NO: 1415363 - DNA, 15 bp, Homo sapiens
cgccgggaatgtctt

SEQ ID NO: 1415364 - DNA, 15 bp, Homo sapiens
gccgggaatgtctta

SEQ ID NO: 1415365 - DNA, 15 bp, Homo sapiens
ccgggaatgtcttat

SEQ ID NO: 1415366 - DNA, 15 bp, Homo sapiens
cgggaatgtcttatc

SEQ ID NO: 1415367 - DNA, 15 bp, Homo sapiens
gggaatgtcttatcc

SEQ ID NO: 1415368 - DNA, 15 bp, Homo sapiens
ggaatgtcttatccc

SEQ ID NO: 1415369 - DNA, 15 bp, Homo sapiens
gaatgtcttatccct

SEQ ID NO: 1415370 - DNA, 15 bp, Homo sapiens
aatgtcttatccctg

SEQ ID NO: 1415371 - DNA, 15 bp, Homo sapiens
atgtcttatccctgc

SEQ ID NO: 1415372 - DNA, 15 bp, Homo sapiens
tgtcttatccctgcc

SEQ ID NO: 1415373 - DNA, 15 bp, Homo sapiens
gtcttatccctgcct

SEQ ID NO: 1415374 - DNA, 15 bp, Homo sapiens
tcttatccctgcctt

SEQ ID NO: 1415375 - DNA, 15 bp, Homo sapiens
cttatccctgccttc

SEQ ID NO: 1415376 - DNA, 15 bp, Homo sapiens
ttatccctgccttcc

SEQ ID NO: 1415377 - DNA, 15 bp, Homo sapiens
tatccctgccttcca

SEQ ID NO: 1415378 - DNA, 15 bp, Homo sapiens
atccctgccttccag

SEQ ID NO: 1415379 - DNA, 15 bp, Homo sapiens
tccctgccttccagt

SEQ ID NO: 1415380 - DNA, 15 bp, Homo sapiens
ccctgccttccagtg

SEQ ID NO: 1415381 - DNA, 15 bp, Homo sapiens
cctgccttccagtgg

SEQ ID NO: 1415382 - DNA, 15 bp, Homo sapiens
ctgccttccagtggc

SEQ ID NO: 1415383 - DNA, 15 bp, Homo sapiens
tgccttccagtggct

SEQ ID NO: 1415384 - DNA, 15 bp, Homo sapiens
gccttccagtggctg

SEQ ID NO: 1415385 - DNA, 15 bp, Homo sapiens
ccttccagtggctgc

SEQ ID NO: 1415386 - DNA, 15 bp, Homo sapiens
cttccagtggctgcc

SEQ ID NO: 1415387 - DNA, 15 bp, Homo sapiens
ttccagtggctgcca

SEQ ID NO: 1415388 - DNA, 15 bp, Homo sapiens
tccagtggctgccag

SEQ ID NO: 1415389 - DNA, 15 bp, Homo sapiens
ccagtggctgccaga

SEQ ID NO: 1415390 - DNA, 15 bp, Homo sapiens
cagtggctgccagaa

SEQ ID NO: 1415391 - DNA, 15 bp, Homo sapiens
agtggctgccagaac

SEQ ID NO: 1415392 - DNA, 15 bp, Homo sapiens
gtggctgccagaacc

SEQ ID NO: 1415393 - DNA, 15 bp, Homo sapiens
tggctgccagaacca

SEQ ID NO: 1415394 - DNA, 15 bp, Homo sapiens
ggctgccagaaccaa

SEQ ID NO: 1415395 - DNA, 15 bp, Homo sapiens
gctgccagaaccaag

SEQ ID NO: 1415396 - DNA, 15 bp, Homo sapiens
ctgccagaaccaagg

SEQ ID NO: 1415397 - DNA, 15 bp, Homo sapiens
tgccagaaccaaggg

SEQ ID NO: 1415398 - DNA, 15 bp, Homo sapiens
gccagaaccaagggc

SEQ ID NO: 1415399 - DNA, 15 bp, Homo sapiens
ccagaaccaagggca

SEQ ID NO: 1415400 - DNA, 15 bp, Homo sapiens
cagaaccaagggcat

SEQ ID NO: 1415401 - DNA, 15 bp, Homo sapiens
agaaccaagggcatc

SEQ ID NO: 1415402 - DNA, 15 bp, Homo sapiens
gaaccaagggcatcc

SEQ ID NO: 1415403 - DNA, 15 bp, Homo sapiens
aaccaagggcatccg

SEQ ID NO: 1415404 - DNA, 15 bp, Homo sapiens
accaagggcatccgc

SEQ ID NO: 1415405 - DNA, 15 bp, Homo sapiens
ccaagggcatccgcg

SEQ ID NO: 1415406 - DNA, 15 bp, Homo sapiens
caagggcatccgcgg

SEQ ID NO: 1415407 - DNA, 15 bp, Homo sapiens
aagggcatccgcggc

SEQ ID NO: 1415408 - DNA, 15 bp, Homo sapiens
agggcatccgcggcg

SEQ ID NO: 1415409 - DNA, 15 bp, Homo sapiens
gggcatccgcggcgt

SEQ ID NO: 1415410 - DNA, 15 bp, Homo sapiens
ggcatccgcggcgtt

SEQ ID NO: 1415411 - DNA, 15 bp, Homo sapiens
gcatccgcggcgttc

SEQ ID NO: 1415412 - DNA, 15 bp, Homo sapiens
catccgcggcgttcc

SEQ ID NO: 1415413 - DNA, 15 bp, Homo sapiens
atccgcggcgttcct

SEQ ID NO: 1415414 - DNA, 15 bp, Homo sapiens
tccgcggcgttcctt

SEQ ID NO: 1415415 - DNA, 15 bp, Homo sapiens
ccgcggcgttccttg

SEQ ID NO: 1415416 - DNA, 15 bp, Homo sapiens
cgcggcgttccttgg

SEQ ID NO: 1415417 - DNA, 15 bp, Homo sapiens
gcggcgttccttggc

SEQ ID NO: 1415418 - DNA, 15 bp, Homo sapiens
cggcgttccttggca

SEQ ID NO: 1415419 - DNA, 15 bp, Homo sapiens
ggcgttccttggcat

SEQ ID NO: 1415420 - DNA, 15 bp, Homo sapiens
gcgttccttggcatt

SEQ ID NO: 1415421 - DNA, 15 bp, Homo sapiens
cgttccttggcattg

SEQ ID NO: 1415422 - DNA, 15 bp, Homo sapiens
gttccttggcattgg

SEQ ID NO: 1415423 - DNA, 15 bp, Homo sapiens
ttccttggcattggc

SEQ ID NO: 1415424 - DNA, 15 bp, Homo sapiens
tccttggcattggcg

SEQ ID NO: 1415425 - DNA, 15 bp, Homo sapiens
ccttggcattggcgt

SEQ ID NO: 1415426 - DNA, 15 bp, Homo sapiens
cttggcattggcgtt

SEQ ID NO: 1415427 - DNA, 15 bp, Homo sapiens
ttggcattggcgtta

SEQ ID NO: 1415428 - DNA, 15 bp, Homo sapiens
tggcattggcgttaa

SEQ ID NO: 1415429 - DNA, 15 bp, Homo sapiens
ggcattggcgttaac

SEQ ID NO: 1415430 - DNA, 15 bp, Homo sapiens
gcattggcgttaaca

SEQ ID NO: 1415431 - DNA, 15 bp, Homo sapiens
cattggcgttaacag

SEQ ID NO: 1415432 - DNA, 15 bp, Homo sapiens
attggcgttaacagc

SEQ ID NO: 1415433 - DNA, 15 bp, Homo sapiens
ttggcgttaacagca

SEQ ID NO: 1415434 - DNA, 15 bp, Homo sapiens
tggcgttaacagcag

SEQ ID NO: 1415435 - DNA, 15 bp, Homo sapiens
ggcgttaacagcaga

SEQ ID NO: 1415436 - DNA, 15 bp, Homo sapiens
gcgttaacagcagat

SEQ ID NO: 1415437 - DNA, 15 bp, Homo sapiens
cgttaacagcagatg

SEQ ID NO: 1415438 - DNA, 15 bp, Homo sapiens
gttaacagcagatgg

SEQ ID NO: 1415439 - DNA, 15 bp, Homo sapiens
ttaacagcagatgga

SEQ ID NO: 1415440 - DNA, 15 bp, Homo sapiens
taacagcagatggat

SEQ ID NO: 1415441 - DNA, 15 bp, Homo sapiens
aacagcagatggatt

SEQ ID NO: 1415442 - DNA, 15 bp, Homo sapiens
acagcagatggattt

SEQ ID NO: 1415443 - DNA, 15 bp, Homo sapiens
cagcagatggatttt

SEQ ID NO: 1415444 - DNA, 15 bp, Homo sapiens
agcagatggattttc

SEQ ID NO: 1415445 - DNA, 15 bp, Homo sapiens
gcagatggattttcc

SEQ ID NO: 1415446 - DNA, 15 bp, Homo sapiens
cagatggattttccg

SEQ ID NO: 1415447 - DNA, 15 bp, Homo sapiens
agatggattttccgc

SEQ ID NO: 1415448 - DNA, 15 bp, Homo sapiens
gatggattttccgca

SEQ ID NO: 1415449 - DNA, 15 bp, Homo sapiens
atggattttccgcag

SEQ ID NO: 1415450 - DNA, 15 bp, Homo sapiens
tggattttccgcagc

SEQ ID NO: 1415451 - DNA, 15 bp, Homo sapiens
ggattttccgcagcg

SEQ ID NO: 1415452 - DNA, 15 bp, Homo sapiens
gattttccgcagcgg

SEQ ID NO: 1415453 - DNA, 15 bp, Homo sapiens
attttccgcagcggc

SEQ ID NO: 1415454 - DNA, 15 bp, Homo sapiens
ttttccgcagcggcc

SEQ ID NO: 1415455 - DNA, 15 bp, Homo sapiens
tttccgcagcggcca

SEQ ID NO: 1415456 - DNA, 15 bp, Homo sapiens
ttccgcagcggccag

SEQ ID NO: 1415457 - DNA, 15 bp, Homo sapiens
tccgcagcggccagg

SEQ ID NO: 1415458 - DNA, 15 bp, Homo sapiens
ccgcagcggccaggc

SEQ ID NO: 1415459 - DNA, 15 bp, Homo sapiens
cgcagcggccaggcg

SEQ ID NO: 1415460 - DNA, 15 bp, Homo sapiens
gcagcggccaggcgg

SEQ ID NO: 1415461 - DNA, 15 bp, Homo sapiens
cagcggccaggcgga

SEQ ID NO: 1415462 - DNA, 15 bp, Homo sapiens
agcggccaggcggaa

SEQ ID NO: 1415463 - DNA, 15 bp, Homo sapiens
gcggccaggcggaag

SEQ ID NO: 1415464 - DNA, 15 bp, Homo sapiens
cggccaggcggaaga

SEQ ID NO: 1415465 - DNA, 15 bp, Homo sapiens
ggccaggcggaagat

SEQ ID NO: 1415466 - DNA, 15 bp, Homo sapiens
gccaggcggaagatg

SEQ ID NO: 1415467 - DNA, 15 bp, Homo sapiens
ccaggcggaagatgc

SEQ ID NO: 1415468 - DNA, 15 bp, Homo sapiens
caggcggaagatgcc

SEQ ID NO: 1415469 - DNA, 15 bp, Homo sapiens
aggcggaagatgcct

SEQ ID NO: 1415470 - DNA, 15 bp, Homo sapiens
ggcggaagatgccta

SEQ ID NO: 1415471 - DNA, 15 bp, Homo sapiens
gcggaagatgcctag

SEQ ID NO: 1415472 - DNA, 15 bp, Homo sapiens
cggaagatgcctagc

SEQ ID NO: 1415473 - DNA, 15 bp, Homo sapiens
ggaagatgcctagca

SEQ ID NO: 1415474 - DNA, 15 bp, Homo sapiens
gaagatgcctagcat

SEQ ID NO: 1415475 - DNA, 15 bp, Homo sapiens
aagatgcctagcatt

SEQ ID NO: 1415476 - DNA, 15 bp, Homo sapiens
agatgcctagcattg

SEQ ID NO: 1415477 - DNA, 15 bp, Homo sapiens
gatgcctagcattgg

SEQ ID NO: 1415478 - DNA, 15 bp, Homo sapiens
atgcctagcattggt

SEQ ID NO: 1415479 - DNA, 15 bp, Homo sapiens
tgcctagcattggtc

SEQ ID NO: 1415480 - DNA, 15 bp, Homo sapiens
gcctagcattggtcc

SEQ ID NO: 1415481 - DNA, 15 bp, Homo sapiens
cctagcattggtccg

SEQ ID NO: 1415482 - DNA, 15 bp, Homo sapiens
ctagcattggtccgc

SEQ ID NO: 1415483 - DNA, 15 bp, Homo sapiens
tagcattggtccgcc

SEQ ID NO: 1415484 - DNA, 15 bp, Homo sapiens
agcattggtccgccg

SEQ ID NO: 1415485 - DNA, 15 bp, Homo sapiens
gcattggtccgccgt

SEQ ID NO: 1415486 - DNA, 15 bp, Homo sapiens
cattggtccgccgtc

SEQ ID NO: 1415487 - DNA, 15 bp, Homo sapiens
attggtccgccgtct

SEQ ID NO: 1415488 - DNA, 15 bp, Homo sapiens
ttggtccgccgtctc

SEQ ID NO: 1415489 - DNA, 15 bp, Homo sapiens
tggtccgccgtctca

SEQ ID NO: 1415490 - DNA, 15 bp, Homo sapiens
ggtccgccgtctcac

SEQ ID NO: 1415491 - DNA, 15 bp, Homo sapiens
gtccgccgtctcact

SEQ ID NO: 1415492 - DNA, 15 bp, Homo sapiens
tccgccgtctcactg

SEQ ID NO: 1415493 - DNA, 15 bp, Homo sapiens
ccgccgtctcactgt

SEQ ID NO: 1415494 - DNA, 15 bp, Homo sapiens
cgccgtctcactgta

SEQ ID NO: 1415495 - DNA, 15 bp, Homo sapiens
gccgtctcactgtac

SEQ ID NO: 1415496 - DNA, 15 bp, Homo sapiens
ccgtctcactgtact

SEQ ID NO: 1415497 - DNA, 15 bp, Homo sapiens
cgtctcactgtactg

SEQ ID NO: 1415498 - DNA, 15 bp, Homo sapiens
gtctcactgtactga

SEQ ID NO: 1415499 - DNA, 15 bp, Homo sapiens
tctcactgtactgaa

SEQ ID NO: 1415500 - DNA, 15 bp, Homo sapiens
ctcactgtactgaat

SEQ ID NO: 1415501 - DNA, 15 bp, Homo sapiens
tcactgtactgaatt

SEQ ID NO: 1415502 - DNA, 15 bp, Homo sapiens
cactgtactgaattt

SEQ ID NO: 1415503 - DNA, 15 bp, Homo sapiens
actgtactgaatttc

SEQ ID NO: 1415504 - DNA, 15 bp, Homo sapiens
ctgtactgaatttca

SEQ ID NO: 1415505 - DNA, 15 bp, Homo sapiens
tgtactgaatttcaa

SEQ ID NO: 1415506 - DNA, 15 bp, Homo sapiens
gtactgaatttcaag

SEQ ID NO: 1415507 - DNA, 15 bp, Homo sapiens
tactgaatttcaaga

SEQ ID NO: 1415508 - DNA, 15 bp, Homo sapiens
actgaatttcaagaa

SEQ ID NO: 1415509 - DNA, 15 bp, Homo sapiens
ctgaatttcaagaat

SEQ ID NO: 1415510 - DNA, 15 bp, Homo sapiens
tgaatttcaagaatc

SEQ ID NO: 1415511 - DNA, 15 bp, Homo sapiens
gaatttcaagaatca

SEQ ID NO: 1415512 - DNA, 15 bp, Homo sapiens
aatttcaagaatcat

SEQ ID NO: 1415513 - DNA, 15 bp, Homo sapiens
atttcaagaatcatg

SEQ ID NO: 1415514 - DNA, 15 bp, Homo sapiens
tttcaagaatcatgg

SEQ ID NO: 1415515 - DNA, 15 bp, Homo sapiens
ttcaagaatcatggc

SEQ ID NO: 1415516 - DNA, 15 bp, Homo sapiens
tcaagaatcatggcc

SEQ ID NO: 1415517 - DNA, 15 bp, Homo sapiens
caagaatcatggcct

SEQ ID NO: 1415518 - DNA, 15 bp, Homo sapiens
aagaatcatggccta

SEQ ID NO: 1415519 - DNA, 15 bp, Homo sapiens
agaatcatggcctac

SEQ ID NO: 1415520 - DNA, 15 bp, Homo sapiens
gaatcatggcctact

SEQ ID NO: 1415521 - DNA, 15 bp, Homo sapiens
aatcatggcctactg

SEQ ID NO: 1415522 - DNA, 15 bp, Homo sapiens
atcatggcctactgc

SEQ ID NO: 1415523 - DNA, 15 bp, Homo sapiens
tcatggcctactgcc

SEQ ID NO: 1415524 - DNA, 15 bp, Homo sapiens
catggcctactgcca

SEQ ID NO: 1415525 - DNA, 15 bp, Homo sapiens
atggcctactgccag

SEQ ID NO: 1415526 - DNA, 15 bp, Homo sapiens
tggcctactgccagc

SEQ ID NO: 1415527 - DNA, 15 bp, Homo sapiens
ggcctactgccagcc

SEQ ID NO: 1415528 - DNA, 15 bp, Homo sapiens
gcctactgccagcca

SEQ ID NO: 1415529 - DNA, 15 bp, Homo sapiens
cctactgccagccag

SEQ ID NO: 1415530 - DNA, 15 bp, Homo sapiens
ctactgccagccagg

SEQ ID NO: 1415531 - DNA, 15 bp, Homo sapiens
tactgccagccaggt

SEQ ID NO: 1415532 - DNA, 15 bp, Homo sapiens
actgccagccaggtc

SEQ ID NO: 1415533 - DNA, 15 bp, Homo sapiens
ctgccagccaggtca

SEQ ID NO: 1415534 - DNA, 15 bp, Homo sapiens
tgccagccaggtcag

SEQ ID NO: 1415535 - DNA, 15 bp, Homo sapiens
gccagccaggtcagg

SEQ ID NO: 1415536 - DNA, 15 bp, Homo sapiens
ccagccaggtcagga

SEQ ID NO: 1415537 - DNA, 15 bp, Homo sapiens
cagccaggtcaggac

SEQ ID NO: 1415538 - DNA, 15 bp, Homo sapiens
agccaggtcaggacc

SEQ ID NO: 1415539 - DNA, 15 bp, Homo sapiens
gccaggtcaggaccg

SEQ ID NO: 1415540 - DNA, 15 bp, Homo sapiens
ccaggtcaggaccga

SEQ ID NO: 1415541 - DNA, 15 bp, Homo sapiens
caggtcaggaccgaa

SEQ ID NO: 1415542 - DNA, 15 bp, Homo sapiens
aggtcaggaccgaag

SEQ ID NO: 1415543 - DNA, 15 bp, Homo sapiens
ggtcaggaccgaagg

SEQ ID NO: 1415544 - DNA, 15 bp, Homo sapiens
gtcaggaccgaaggc

SEQ ID NO: 1415545 - DNA, 15 bp, Homo sapiens
tcaggaccgaaggcg

SEQ ID NO: 1415546 - DNA, 15 bp, Homo sapiens
caggaccgaaggcgc

SEQ ID NO: 1415547 - DNA, 15 bp, Homo sapiens
aggaccgaaggcgct

SEQ ID NO: 1415548 - DNA, 15 bp, Homo sapiens
ggaccgaaggcgcta

SEQ ID NO: 1415549 - DNA, 15 bp, Homo sapiens
gaccgaaggcgctag

SEQ ID NO: 1415550 - DNA, 15 bp, Homo sapiens
accgaaggcgctagt

SEQ ID NO: 1415551 - DNA, 15 bp, Homo sapiens
ccgaaggcgctagtc

SEQ ID NO: 1415552 - DNA, 15 bp, Homo sapiens
cgaaggcgctagtct

SEQ ID NO: 1415553 - DNA, 15 bp, Homo sapiens
gaaggcgctagtctg

SEQ ID NO: 1415554 - DNA, 15 bp, Homo sapiens
aaggcgctagtctgg

SEQ ID NO: 1415555 - DNA, 15 bp, Homo sapiens
aggcgctagtctggg

SEQ ID NO: 1415556 - DNA, 15 bp, Homo sapiens
ggcgctagtctgggg

SEQ ID NO: 1415557 - DNA, 15 bp, Homo sapiens
gcgctagtctgggga

SEQ ID NO: 1415558 - DNA, 15 bp, Homo sapiens
cgctagtctggggag

SEQ ID NO: 1415559 - DNA, 15 bp, Homo sapiens
gctagtctggggaga

SEQ ID NO: 1415560 - DNA, 15 bp, Homo sapiens
ctagtctggggagac

SEQ ID NO: 1415561 - DNA, 15 bp, Homo sapiens
tagtctggggagact

SEQ ID NO: 1415562 - DNA, 15 bp, Homo sapiens
agtctggggagactg

SEQ ID NO: 1415563 - DNA, 15 bp, Homo sapiens
gtctggggagactgg

SEQ ID NO: 1415564 - DNA, 15 bp, Homo sapiens
tctggggagactgga

SEQ ID NO: 1415565 - DNA, 15 bp, Homo sapiens
ctggggagactggag

SEQ ID NO: 1415566 - DNA, 15 bp, Homo sapiens
tggggagactggagc

SEQ ID NO: 1415567 - DNA, 15 bp, Homo sapiens
ggggagactggagca

SEQ ID NO: 1415568 - DNA, 15 bp, Homo sapiens
gggagactggagcag

SEQ ID NO: 1415569 - DNA, 15 bp, Homo sapiens
ggagactggagcagg

SEQ ID NO: 1415570 - DNA, 15 bp, Homo sapiens
gagactggagcaggt

SEQ ID NO: 1415571 - DNA, 15 bp, Homo sapiens
agactggagcaggtc

SEQ ID NO: 1415572 - DNA, 15 bp, Homo sapiens
gactggagcaggtct

SEQ ID NO: 1415573 - DNA, 15 bp, Homo sapiens
actggagcaggtctc

SEQ ID NO: 1415574 - DNA, 15 bp, Homo sapiens
ctggagcaggtctct

SEQ ID NO: 1415575 - DNA, 15 bp, Homo sapiens
tggagcaggtctcta

SEQ ID NO: 1415576 - DNA, 15 bp, Homo sapiens
ggagcaggtctctag

SEQ ID NO: 1415577 - DNA, 15 bp, Homo sapiens
gagcaggtctctagt

SEQ ID NO: 1415578 - DNA, 15 bp, Homo sapiens
agcaggtctctagtg

SEQ ID NO: 1415579 - DNA, 15 bp, Homo sapiens
gcaggtctctagtgg

SEQ ID NO: 1415580 - DNA, 15 bp, Homo sapiens
caggtctctagtggt

SEQ ID NO: 1415581 - DNA, 15 bp, Homo sapiens
aggtctctagtggtt

SEQ ID NO: 1415582 - DNA, 15 bp, Homo sapiens
ggtctctagtggttc

SEQ ID NO: 1415583 - DNA, 15 bp, Homo sapiens
gtctctagtggttca

SEQ ID NO: 1415584 - DNA, 15 bp, Homo sapiens
tctctagtggttcac

SEQ ID NO: 1415585 - DNA, 15 bp, Homo sapiens
ctctagtggttcacc

SEQ ID NO: 1415586 - DNA, 15 bp, Homo sapiens
tctagtggttcacct

SEQ ID NO: 1415587 - DNA, 15 bp, Homo sapiens
ctagtggttcacctg

SEQ ID NO: 1415588 - DNA, 15 bp, Homo sapiens
tagtggttcacctgt

SEQ ID NO: 1415589 - DNA, 15 bp, Homo sapiens
agtggttcacctgtt

SEQ ID NO: 1415590 - DNA, 15 bp, Homo sapiens
gtggttcacctgttc

SEQ ID NO: 1415591 - DNA, 15 bp, Homo sapiens
tggttcacctgttcg

SEQ ID NO: 1415592 - DNA, 15 bp, Homo sapiens
ggttcacctgttcgg

SEQ ID NO: 1415593 - DNA, 15 bp, Homo sapiens
gttcacctgttcgga

SEQ ID NO: 1415594 - DNA, 15 bp, Homo sapiens
ttcacctgttcggag

SEQ ID NO: 1415595 - DNA, 15 bp, Homo sapiens
tcacctgttcggagg

SEQ ID NO: 1415596 - DNA, 15 bp, Homo sapiens
cacctgttcggaggc

SEQ ID NO: 1415597 - DNA, 15 bp, Homo sapiens
acctgttcggaggct

SEQ ID NO: 1415598 - DNA, 15 bp, Homo sapiens
cctgttcggaggctc

SEQ ID NO: 1415599 - DNA, 15 bp, Homo sapiens
ctgttcggaggctct

SEQ ID NO: 1415600 - DNA, 15 bp, Homo sapiens
tgttcggaggctctt

SEQ ID NO: 1415601 - DNA, 15 bp, Homo sapiens
gttcggaggctcttc

SEQ ID NO: 1415602 - DNA, 15 bp, Homo sapiens
ttcggaggctcttcc

SEQ ID NO: 1415603 - DNA, 15 bp, Homo sapiens
tcggaggctcttcct

SEQ ID NO: 1415604 - DNA, 15 bp, Homo sapiens
cggaggctcttcctg

SEQ ID NO: 1415605 - DNA, 15 bp, Homo sapiens
ggaggctcttcctgt

SEQ ID NO: 1415606 - DNA, 15 bp, Homo sapiens
gaggctcttcctgtt

SEQ ID NO: 1415607 - DNA, 15 bp, Homo sapiens
aggctcttcctgttc

SEQ ID NO: 1415608 - DNA, 15 bp, Homo sapiens
ggctcttcctgttca

SEQ ID NO: 1415609 - DNA, 15 bp, Homo sapiens
gctcttcctgttcag

SEQ ID NO: 1415610 - DNA, 15 bp, Homo sapiens
ctcttcctgttcagt

SEQ ID NO: 1415611 - DNA, 15 bp, Homo sapiens
tcttcctgttcagtt

SEQ ID NO: 1415612 - DNA, 15 bp, Homo sapiens
cttcctgttcagttc

SEQ ID NO: 1415613 - DNA, 15 bp, Homo sapiens
ttcctgttcagttcc

SEQ ID NO: 1415614 - DNA, 15 bp, Homo sapiens
tcctgttcagttccc

SEQ ID NO: 1415615 - DNA, 15 bp, Homo sapiens
cctgttcagttccct

SEQ ID NO: 1415616 - DNA, 15 bp, Homo sapiens
ctgttcagttccctc

SEQ ID NO: 1415617 - DNA, 15 bp, Homo sapiens
tgttcagttccctct

SEQ ID NO: 1415618 - DNA, 15 bp, Homo sapiens
gttcagttccctctg

SEQ ID NO: 1415619 - DNA, 15 bp, Homo sapiens
ttcagttccctctgc

SEQ ID NO: 1415620 - DNA, 15 bp, Homo sapiens
tcagttccctctgcg

SEQ ID NO: 1415621 - DNA, 15 bp, Homo sapiens
cagttccctctgcgc

SEQ ID NO: 1415622 - DNA, 15 bp, Homo sapiens
agttccctctgcgcg

SEQ ID NO: 1415623 - DNA, 15 bp, Homo sapiens
gttccctctgcgcgc

SEQ ID NO: 1415624 - DNA, 15 bp, Homo sapiens
ttccctctgcgcgcc

SEQ ID NO: 1415625 - DNA, 15 bp, Homo sapiens
tccctctgcgcgcca

SEQ ID NO: 1415626 - DNA, 15 bp, Homo sapiens
ccctctgcgcgccag

SEQ ID NO: 1415627 - DNA, 15 bp, Homo sapiens
cctctgcgcgccaga

SEQ ID NO: 1415628 - DNA, 15 bp, Homo sapiens
ctctgcgcgccagag

SEQ ID NO: 1415629 - DNA, 15 bp, Homo sapiens
tctgcgcgccagagg

SEQ ID NO: 1415630 - DNA, 15 bp, Homo sapiens
ctgcgcgccagaggg

SEQ ID NO: 1415631 - DNA, 15 bp, Homo sapiens
tgcgcgccagagggt

SEQ ID NO: 1415632 - DNA, 15 bp, Homo sapiens
gcgcgccagagggtg

SEQ ID NO: 1415633 - DNA, 15 bp, Homo sapiens
cgcgccagagggtgg

SEQ ID NO: 1415634 - DNA, 15 bp, Homo sapiens
gcgccagagggtggc

SEQ ID NO: 1415635 - DNA, 15 bp, Homo sapiens
cgccagagggtggca

SEQ ID NO: 1415636 - DNA, 15 bp, Homo sapiens
gccagagggtggcac

SEQ ID NO: 1415637 - DNA, 15 bp, Homo sapiens
ccagagggtggcacc

SEQ ID NO: 1415638 - DNA, 15 bp, Homo sapiens
cagagggtggcaccc

SEQ ID NO: 1415639 - DNA, 15 bp, Homo sapiens
agagggtggcacccc

SEQ ID NO: 1415640 - DNA, 15 bp, Homo sapiens
gagggtggcacccca

SEQ ID NO: 1415641 - DNA, 15 bp, Homo sapiens
agggtggcaccccag

SEQ ID NO: 1415642 - DNA, 15 bp, Homo sapiens
gggtggcaccccagg

SEQ ID NO: 1415643 - DNA, 15 bp, Homo sapiens
ggtggcaccccaggc

SEQ ID NO: 1415644 - DNA, 15 bp, Homo sapiens
gtggcaccccaggca

SEQ ID NO: 1415645 - DNA, 15 bp, Homo sapiens
tggcaccccaggcac

SEQ ID NO: 1415646 - DNA, 15 bp, Homo sapiens
ggcaccccaggcact

SEQ ID NO: 1415647 - DNA, 15 bp, Homo sapiens
gcaccccaggcactc

SEQ ID NO: 1415648 - DNA, 15 bp, Homo sapiens
caccccaggcactcc

SEQ ID NO: 1415649 - DNA, 15 bp, Homo sapiens
accccaggcactcca

SEQ ID NO: 1415650 - DNA, 15 bp, Homo sapiens
ccccaggcactccag

SEQ ID NO: 1415651 - DNA, 15 bp, Homo sapiens
cccaggcactccaga

SEQ ID NO: 1415652 - DNA, 15 bp, Homo sapiens
ccaggcactccagag

SEQ ID NO: 1415653 - DNA, 15 bp, Homo sapiens
caggcactccagagg

SEQ ID NO: 1415654 - DNA, 15 bp, Homo sapiens
aggcactccagaggt

SEQ ID NO: 1415655 - DNA, 15 bp, Homo sapiens
ggcactccagaggtg

SEQ ID NO: 1415656 - DNA, 15 bp, Homo sapiens
gcactccagaggtgg

SEQ ID NO: 1415657 - DNA, 15 bp, Homo sapiens
cactccagaggtgga

SEQ ID NO: 1415658 - DNA, 15 bp, Homo sapiens
actccagaggtggag

SEQ ID NO: 1415659 - DNA, 15 bp, Homo sapiens
ctccagaggtggaga

SEQ ID NO: 1415660 - DNA, 15 bp, Homo sapiens
tccagaggtggagag

SEQ ID NO: 1415661 - DNA, 15 bp, Homo sapiens
ccagaggtggagagg

SEQ ID NO: 1415662 - DNA, 15 bp, Homo sapiens
cagaggtggagagga

SEQ ID NO: 1415663 - DNA, 15 bp, Homo sapiens
agaggtggagaggag

SEQ ID NO: 1415664 - DNA, 15 bp, Homo sapiens
gaggtggagaggagg

SEQ ID NO: 1415665 - DNA, 15 bp, Homo sapiens
aggtggagaggaggg

SEQ ID NO: 1415666 - DNA, 15 bp, Homo sapiens
ggtggagaggagggg

SEQ ID NO: 1415667 - DNA, 15 bp, Homo sapiens
gtggagaggagggga

SEQ ID NO: 1415668 - DNA, 15 bp, Homo sapiens
tggagaggaggggac

SEQ ID NO: 1415669 - DNA, 15 bp, Homo sapiens
ggagaggaggggacg

SEQ ID NO: 1415670 - DNA, 15 bp, Homo sapiens
gagaggaggggacga

SEQ ID NO: 1415671 - DNA, 15 bp, Homo sapiens
agaggaggggacgac

SEQ ID NO: 1415672 - DNA, 15 bp, Homo sapiens
gaggaggggacgaca

SEQ ID NO: 1415673 - DNA, 15 bp, Homo sapiens
aggaggggacgacag

SEQ ID NO: 1415674 - DNA, 15 bp, Homo sapiens
ggaggggacgacagg

SEQ ID NO: 1415675 - DNA, 15 bp, Homo sapiens
gaggggacgacaggg

SEQ ID NO: 1415676 - DNA, 15 bp, Homo sapiens
aggggacgacagggg

SEQ ID NO: 1415677 - DNA, 15 bp, Homo sapiens
ggggacgacagggga

SEQ ID NO: 1415678 - DNA, 15 bp, Homo sapiens
gggacgacaggggag

SEQ ID NO: 1415679 - DNA, 15 bp, Homo sapiens
ggacgacaggggagg

SEQ ID NO: 1415680 - DNA, 15 bp, Homo sapiens
gacgacaggggaggc

SEQ ID NO: 1415681 - DNA, 15 bp, Homo sapiens
acgacaggggaggca

SEQ ID NO: 1415682 - DNA, 15 bp, Homo sapiens
cgacaggggaggcaa

SEQ ID NO: 1415683 - DNA, 15 bp, Homo sapiens
gacaggggaggcaaa

SEQ ID NO: 1415684 - DNA, 15 bp, Homo sapiens
acaggggaggcaaag

SEQ ID NO: 1415685 - DNA, 15 bp, Homo sapiens
caggggaggcaaaga

SEQ ID NO: 1415686 - DNA, 15 bp, Homo sapiens
aggggaggcaaagag

SEQ ID NO: 1415687 - DNA, 15 bp, Homo sapiens
ggggaggcaaagaga

SEQ ID NO: 1415688 - DNA, 15 bp, Homo sapiens
gggaggcaaagagag

SEQ ID NO: 1415689 - DNA, 15 bp, Homo sapiens
ggaggcaaagagaga

SEQ ID NO: 1415690 - DNA, 15 bp, Homo sapiens
gaggcaaagagagag

SEQ ID NO: 1415691 - DNA, 15 bp, Homo sapiens
aggcaaagagagagg

SEQ ID NO: 1415692 - DNA, 15 bp, Homo sapiens
ggcaaagagagagga

SEQ ID NO: 1415693 - DNA, 15 bp, Homo sapiens
gcaaagagagaggag

SEQ ID NO: 1415694 - DNA, 15 bp, Homo sapiens
caaagagagaggagc

SEQ ID NO: 1415695 - DNA, 15 bp, Homo sapiens
aaagagagaggagcg

SEQ ID NO: 1415696 - DNA, 15 bp, Homo sapiens
aagagagaggagcgg

SEQ ID NO: 1415697 - DNA, 15 bp, Homo sapiens
agagagaggagcgga

SEQ ID NO: 1415698 - DNA, 15 bp, Homo sapiens
gagagaggagcggag

SEQ ID NO: 1415699 - DNA, 15 bp, Homo sapiens
agagaggagcggagg

SEQ ID NO: 1415700 - DNA, 15 bp, Homo sapiens
gagaggagcggaggg

SEQ ID NO: 1415701 - DNA, 15 bp, Homo sapiens
agaggagcggaggga

SEQ ID NO: 1415702 - DNA, 15 bp, Homo sapiens
gaggagcggagggaa

SEQ ID NO: 1415703 - DNA, 15 bp, Homo sapiens
aggagcggagggaag

SEQ ID NO: 1415704 - DNA, 15 bp, Homo sapiens
ggagcggagggaagg

SEQ ID NO: 1415705 - DNA, 15 bp, Homo sapiens
gagcggagggaagga

SEQ ID NO: 1415706 - DNA, 15 bp, Homo sapiens
agcggagggaaggac

SEQ ID NO: 1415707 - DNA, 15 bp, Homo sapiens
gcggagggaaggacc

SEQ ID NO: 1415708 - DNA, 15 bp, Homo sapiens
cggagggaaggacca

SEQ ID NO: 1415709 - DNA, 15 bp, Homo sapiens
ggagggaaggaccag

SEQ ID NO: 1415710 - DNA, 15 bp, Homo sapiens
gagggaaggaccagg

SEQ ID NO: 1415711 - DNA, 15 bp, Homo sapiens
agggaaggaccaggg

SEQ ID NO: 1415712 - DNA, 15 bp, Homo sapiens
gggaaggaccaggga

SEQ ID NO: 1415713 - DNA, 15 bp, Homo sapiens
ggaaggaccagggag

SEQ ID NO: 1415714 - DNA, 15 bp, Homo sapiens
gaaggaccagggagg

SEQ ID NO: 1415715 - DNA, 15 bp, Homo sapiens
aaggaccagggagga

SEQ ID NO: 1415716 - DNA, 15 bp, Homo sapiens
aggaccagggaggaa

SEQ ID NO: 1415717 - DNA, 15 bp, Homo sapiens
ggaccagggaggaag

SEQ ID NO: 1415718 - DNA, 15 bp, Homo sapiens
gaccagggaggaagg

SEQ ID NO: 1415719 - DNA, 15 bp, Homo sapiens
accagggaggaagga

SEQ ID NO: 1415720 - DNA, 15 bp, Homo sapiens
ccagggaggaaggac

SEQ ID NO: 1415721 - DNA, 15 bp, Homo sapiens
cagggaggaaggacc

SEQ ID NO: 1415722 - DNA, 15 bp, Homo sapiens
agggaggaaggacca

SEQ ID NO: 1415723 - DNA, 15 bp, Homo sapiens
gggaggaaggaccaa

SEQ ID NO: 1415724 - DNA, 15 bp, Homo sapiens
ggaggaaggaccaag

SEQ ID NO: 1415725 - DNA, 15 bp, Homo sapiens
gaggaaggaccaagg

SEQ ID NO: 1415726 - DNA, 15 bp, Homo sapiens
aggaaggaccaagga

SEQ ID NO: 1415727 - DNA, 15 bp, Homo sapiens
ggaaggaccaaggag

SEQ ID NO: 1415728 - DNA, 15 bp, Homo sapiens
gaaggaccaaggagg

SEQ ID NO: 1415729 - DNA, 15 bp, Homo sapiens
aaggaccaaggaggg

SEQ ID NO: 1415730 - DNA, 15 bp, Homo sapiens
aggaccaaggaggga

SEQ ID NO: 1415731 - DNA, 15 bp, Homo sapiens
ggaccaaggagggag

SEQ ID NO: 1415732 - DNA, 15 bp, Homo sapiens
gaccaaggagggagc

SEQ ID NO: 1415733 - DNA, 15 bp, Homo sapiens
accaaggagggagct

SEQ ID NO: 1415734 - DNA, 15 bp, Homo sapiens
ccaaggagggagctt

SEQ ID NO: 1415735 - DNA, 15 bp, Homo sapiens
caaggagggagcttt

SEQ ID NO: 1415736 - DNA, 15 bp, Homo sapiens
aaggagggagcttta

SEQ ID NO: 1415737 - DNA, 15 bp, Homo sapiens
aggagggagctttaa

SEQ ID NO: 1415738 - DNA, 15 bp, Homo sapiens
ggagggagctttaat

SEQ ID NO: 1415739 - DNA, 15 bp, Homo sapiens
gagggagctttaata

SEQ ID NO: 1415740 - DNA, 15 bp, Homo sapiens
agggagctttaataa

SEQ ID NO: 1415741 - DNA, 15 bp, Homo sapiens
gggagctttaataaa

SEQ ID NO: 1415742 - DNA, 15 bp, Homo sapiens
ggagctttaataaat

SEQ ID NO: 1415743 - DNA, 15 bp, Homo sapiens
gagctttaataaatt

SEQ ID NO: 1415744 - DNA, 15 bp, Homo sapiens
agctttaataaattc

SEQ ID NO: 1415745 - DNA, 15 bp, Homo sapiens
gctttaataaattct

SEQ ID NO: 1415746 - DNA, 15 bp, Homo sapiens
ctttaataaattctc

SEQ ID NO: 1415747 - DNA, 15 bp, Homo sapiens
tttaataaattctca

SEQ ID NO: 1415748 - DNA, 15 bp, Homo sapiens
ttaataaattctcag

SEQ ID NO: 1415749 - DNA, 15 bp, Homo sapiens
taataaattctcaga

SEQ ID NO: 1415750 - DNA, 15 bp, Homo sapiens
aataaattctcagac

SEQ ID NO: 1415751 - DNA, 15 bp, Homo sapiens
ataaattctcagacc

SEQ ID NO: 1415752 - DNA, 15 bp, Homo sapiens
taaattctcagacct

SEQ ID NO: 1415753 - DNA, 15 bp, Homo sapiens
aaattctcagacctt

SEQ ID NO: 1415754 - DNA, 15 bp, Homo sapiens
aattctcagaccttg

SEQ ID NO: 1415755 - DNA, 15 bp, Homo sapiens
attctcagaccttgg

SEQ ID NO: 1415756 - DNA, 15 bp, Homo sapiens
ttctcagaccttggt

SEQ ID NO: 1415757 - DNA, 15 bp, Homo sapiens
tctcagaccttggtc

SEQ ID NO: 1415758 - DNA, 15 bp, Homo sapiens
tcagaccttggtctc

SEQ ID NO: 1415759 - DNA, 15 bp, Homo sapiens
cagaccttggtctcg

SEQ ID NO: 1415760 - DNA, 15 bp, Homo sapiens
agaccttggtctcga

SEQ ID NO: 1415761 - DNA, 15 bp, Homo sapiens
gaccttggtctcgag

SEQ ID NO: 1415762 - DNA, 15 bp, Homo sapiens
accttggtctcgagt

SEQ ID NO: 1415763 - DNA, 15 bp, Homo sapiens
ccttggtctcgagtt

SEQ ID NO: 1415764 - DNA, 15 bp, Homo sapiens
cttggtctcgagttc

SEQ ID NO: 1415765 - DNA, 15 bp, Homo sapiens
ttggtctcgagttcc

SEQ ID NO: 1415766 - DNA, 15 bp, Homo sapiens
tggtctcgagttccc

SEQ ID NO: 1415767 - DNA, 15 bp, Homo sapiens
ggtctcgagttcccg

SEQ ID NO: 1415768 - DNA, 15 bp, Homo sapiens
gtctcgagttcccgg

SEQ ID NO: 1415769 - DNA, 15 bp, Homo sapiens
tctcgagttcccggc

SEQ ID NO: 1415770 - DNA, 15 bp, Homo sapiens
ctcgagttcccggct

SEQ ID NO: 1415771 - DNA, 15 bp, Homo sapiens
tcgagttcccggcta

SEQ ID NO: 1415772 - DNA, 15 bp, Homo sapiens
cgagttcccggctaa

SEQ ID NO: 1415773 - DNA, 15 bp, Homo sapiens
gagttcccggctaat

SEQ ID NO: 1415774 - DNA, 15 bp, Homo sapiens
agttcccggctaatt

SEQ ID NO: 1415775 - DNA, 15 bp, Homo sapiens
gttcccggctaattt

SEQ ID NO: 1415776 - DNA, 15 bp, Homo sapiens
ttcccggctaatttg

SEQ ID NO: 1415777 - DNA, 15 bp, Homo sapiens
tcccggctaatttgg

SEQ ID NO: 1415778 - DNA, 15 bp, Homo sapiens
cccggctaatttggg

SEQ ID NO: 1415779 - DNA, 15 bp, Homo sapiens
ccggctaatttgggg

SEQ ID NO: 1415780 - DNA, 15 bp, Homo sapiens
cggctaatttggggg

SEQ ID NO: 1415781 - DNA, 15 bp, Homo sapiens
ggctaatttgggggc

SEQ ID NO: 1415782 - DNA, 15 bp, Homo sapiens
gctaatttgggggca

SEQ ID NO: 1415783 - DNA, 15 bp, Homo sapiens
ctaatttgggggcaa

SEQ ID NO: 1415784 - DNA, 15 bp, Homo sapiens
taatttgggggcaaa

SEQ ID NO: 1415785 - DNA, 15 bp, Homo sapiens
aatttgggggcaaag

SEQ ID NO: 1415786 - DNA, 15 bp, Homo sapiens
atttgggggcaaagc

SEQ ID NO: 1415787 - DNA, 15 bp, Homo sapiens
tttgggggcaaagcc

SEQ ID NO: 1415788 - DNA, 15 bp, Homo sapiens
ttgggggcaaagccg

SEQ ID NO: 1415789 - DNA, 15 bp, Homo sapiens
tgggggcaaagccga

SEQ ID NO: 1415790 - DNA, 15 bp, Homo sapiens
gggggcaaagccgac

SEQ ID NO: 1415791 - DNA, 15 bp, Homo sapiens
ggggcaaagccgacc

SEQ ID NO: 1415792 - DNA, 15 bp, Homo sapiens
gggcaaagccgaccg

SEQ ID NO: 1415793 - DNA, 15 bp, Homo sapiens
ggcaaagccgaccga

SEQ ID NO: 1415794 - DNA, 15 bp, Homo sapiens
gcaaagccgaccgac

SEQ ID NO: 1415795 - DNA, 15 bp, Homo sapiens
caaagccgaccgacc

SEQ ID NO: 1415796 - DNA, 15 bp, Homo sapiens
aaagccgaccgaccc

SEQ ID NO: 1415797 - DNA, 15 bp, Homo sapiens
aagccgaccgacccc

SEQ ID NO: 1415798 - DNA, 15 bp, Homo sapiens
agccgaccgacccca

SEQ ID NO: 1415799 - DNA, 15 bp, Homo sapiens
gccgaccgaccccac

SEQ ID NO: 1415800 - DNA, 15 bp, Homo sapiens
ccgaccgaccccacg

SEQ ID NO: 1415801 - DNA, 15 bp, Homo sapiens
cgaccgaccccacgt

SEQ ID NO: 1415802 - DNA, 15 bp, Homo sapiens
gaccgaccccacgtc

SEQ ID NO: 1415803 - DNA, 15 bp, Homo sapiens
accgaccccacgtcc

SEQ ID NO: 1415804 - DNA, 15 bp, Homo sapiens
ccgaccccacgtcca

SEQ ID NO: 1415805 - DNA, 15 bp, Homo sapiens
cgaccccacgtccac

SEQ ID NO: 1415806 - DNA, 15 bp, Homo sapiens
gaccccacgtccacg

SEQ ID NO: 1415807 - DNA, 15 bp, Homo sapiens
accccacgtccacgc

SEQ ID NO: 1415808 - DNA, 15 bp, Homo sapiens
ccccacgtccacgcc

SEQ ID NO: 1415809 - DNA, 15 bp, Homo sapiens
cccacgtccacgccc

SEQ ID NO: 1415810 - DNA, 15 bp, Homo sapiens
ccacgtccacgccca

SEQ ID NO: 1415811 - DNA, 15 bp, Homo sapiens
cacgtccacgcccac

SEQ ID NO: 1415812 - DNA, 15 bp, Homo sapiens
acgtccacgcccacc

SEQ ID NO: 1415813 - DNA, 15 bp, Homo sapiens
cgtccacgcccaccc

SEQ ID NO: 1415814 - DNA, 15 bp, Homo sapiens
gtccacgcccacccc

SEQ ID NO: 1415815 - DNA, 15 bp, Homo sapiens
tccacgcccaccccc

SEQ ID NO: 1415816 - DNA, 15 bp, Homo sapiens
ccacgcccaccccct

SEQ ID NO: 1415817 - DNA, 15 bp, Homo sapiens
cacgcccaccccctt

SEQ ID NO: 1415818 - DNA, 15 bp, Homo sapiens
acgcccaccccctta

SEQ ID NO: 1415819 - DNA, 15 bp, Homo sapiens
cgcccacccccttac

SEQ ID NO: 1415820 - DNA, 15 bp, Homo sapiens
gcccacccccttacg

SEQ ID NO: 1415821 - DNA, 15 bp, Homo sapiens
cccacccccttacgg

SEQ ID NO: 1415822 - DNA, 15 bp, Homo sapiens
ccacccccttacggg

SEQ ID NO: 1415823 - DNA, 15 bp, Homo sapiens
cacccccttacggga

SEQ ID NO: 1415824 - DNA, 15 bp, Homo sapiens
acccccttacgggaa

SEQ ID NO: 1415825 - DNA, 15 bp, Homo sapiens
cccccttacgggaaa

SEQ ID NO: 1415826 - DNA, 15 bp, Homo sapiens
ccccttacgggaaaa

SEQ ID NO: 1415827 - DNA, 15 bp, Homo sapiens
cccttacgggaaaag

SEQ ID NO: 1415828 - DNA, 15 bp, Homo sapiens
ccttacgggaaaagc

SEQ ID NO: 1415829 - DNA, 15 bp, Homo sapiens
cttacgggaaaagcc

SEQ ID NO: 1415830 - DNA, 15 bp, Homo sapiens
ttacgggaaaagccg

SEQ ID NO: 1415831 - DNA, 15 bp, Homo sapiens
tacgggaaaagccgg

SEQ ID NO: 1415832 - DNA, 15 bp, Homo sapiens
acgggaaaagccggg

SEQ ID NO: 1415833 - DNA, 15 bp, Homo sapiens
cgggaaaagccgggg

SEQ ID NO: 1415834 - DNA, 15 bp, Homo sapiens
gggaaaagccggggt

SEQ ID NO: 1415835 - DNA, 15 bp, Homo sapiens
ggaaaagccggggtt

SEQ ID NO: 1415836 - DNA, 15 bp, Homo sapiens
gaaaagccggggttt

SEQ ID NO: 1415837 - DNA, 15 bp, Homo sapiens
aaaagccggggtttc

SEQ ID NO: 1415838 - DNA, 15 bp, Homo sapiens
aaagccggggtttcc

SEQ ID NO: 1415839 - DNA, 15 bp, Homo sapiens
aagccggggtttcca

SEQ ID NO: 1415840 - DNA, 15 bp, Homo sapiens
agccggggtttccac

SEQ ID NO: 1415841 - DNA, 15 bp, Homo sapiens
gccggggtttccact

SEQ ID NO: 1415842 - DNA, 15 bp, Homo sapiens
ccggggtttccactg

SEQ ID NO: 1415843 - DNA, 15 bp, Homo sapiens
cggggtttccactgg

SEQ ID NO: 1415844 - DNA, 15 bp, Homo sapiens
ggggtttccactggg

SEQ ID NO: 1415845 - DNA, 15 bp, Homo sapiens
gggtttccactgggc

SEQ ID NO: 1415846 - DNA, 15 bp, Homo sapiens
ggtttccactgggct

SEQ ID NO: 1415847 - DNA, 15 bp, Homo sapiens
gtttccactgggcta

SEQ ID NO: 1415848 - DNA, 15 bp, Homo sapiens
tttccactgggctag

SEQ ID NO: 1415849 - DNA, 15 bp, Homo sapiens
ttccactgggctagg

SEQ ID NO: 1415850 - DNA, 15 bp, Homo sapiens
tccactgggctaggt

SEQ ID NO: 1415851 - DNA, 15 bp, Homo sapiens
ccactgggctaggtg

SEQ ID NO: 1415852 - DNA, 15 bp, Homo sapiens
cactgggctaggtgt

SEQ ID NO: 1415853 - DNA, 15 bp, Homo sapiens
actgggctaggtgtc

SEQ ID NO: 1415854 - DNA, 15 bp, Homo sapiens
ctgggctaggtgtca

SEQ ID NO: 1415855 - DNA, 15 bp, Homo sapiens
tgggctaggtgtcag

SEQ ID NO: 1415856 - DNA, 15 bp, Homo sapiens
gggctaggtgtcaga

SEQ ID NO: 1415857 - DNA, 15 bp, Homo sapiens
ggctaggtgtcagag

SEQ ID NO: 1415858 - DNA, 15 bp, Homo sapiens
gctaggtgtcagagt

SEQ ID NO: 1415859 - DNA, 15 bp, Homo sapiens
ctaggtgtcagagtt

SEQ ID NO: 1415860 - DNA, 15 bp, Homo sapiens
taggtgtcagagttg

SEQ ID NO: 1415861 - DNA, 15 bp, Homo sapiens
aggtgtcagagttgg

SEQ ID NO: 1415862 - DNA, 15 bp, Homo sapiens
ggtgtcagagttggg

SEQ ID NO: 1415863 - DNA, 15 bp, Homo sapiens
gtgtcagagttggga

SEQ ID NO: 1415864 - DNA, 15 bp, Homo sapiens
tgtcagagttgggaa

SEQ ID NO: 1415865 - DNA, 15 bp, Homo sapiens
gtcagagttgggaat

SEQ ID NO: 1415866 - DNA, 15 bp, Homo sapiens
tcagagttgggaatg

SEQ ID NO: 1415867 - DNA, 15 bp, Homo sapiens
cagagttgggaatgt

SEQ ID NO: 1415868 - DNA, 15 bp, Homo sapiens
agagttgggaatgtc

SEQ ID NO: 1415869 - DNA, 15 bp, Homo sapiens
gagttgggaatgtct

SEQ ID NO: 1415870 - DNA, 15 bp, Homo sapiens
agttgggaatgtcta

SEQ ID NO: 1415871 - DNA, 15 bp, Homo sapiens
gttgggaatgtctaa

SEQ ID NO: 1415872 - DNA, 15 bp, Homo sapiens
ttgggaatgtctaaa

SEQ ID NO: 1415873 - DNA, 15 bp, Homo sapiens
tgggaatgtctaaaa

SEQ ID NO: 1415874 - DNA, 15 bp, Homo sapiens
gggaatgtctaaaac

SEQ ID NO: 1415875 - DNA, 15 bp, Homo sapiens
ggaatgtctaaaaca

SEQ ID NO: 1415876 - DNA, 15 bp, Homo sapiens
gaatgtctaaaacaa

SEQ ID NO: 1415877 - DNA, 15 bp, Homo sapiens
aatgtctaaaacaaa

SEQ ID NO: 1415878 - DNA, 15 bp, Homo sapiens
atgtctaaaacaaaa

SEQ ID NO: 1415879 - DNA, 15 bp, Homo sapiens
tgtctaaaacaaaaa

SEQ ID NO: 1415880 - DNA, 15 bp, Homo sapiens
gtctaaaacaaaaaa

SEQ ID NO: 1415881 - DNA, 15 bp, Homo sapiens
tctaaaacaaaaaag

SEQ ID NO: 1415882 - DNA, 15 bp, Homo sapiens
ctaaaacaaaaaagg

SEQ ID NO: 1415883 - DNA, 15 bp, Homo sapiens
taaaacaaaaaaggc

SEQ ID NO: 1415884 - DNA, 15 bp, Homo sapiens
aaaacaaaaaaggct

SEQ ID NO: 1415885 - DNA, 15 bp, Homo sapiens
aaacaaaaaaggctt

SEQ ID NO: 1415886 - DNA, 15 bp, Homo sapiens
aacaaaaaaggcttc

SEQ ID NO: 1415887 - DNA, 15 bp, Homo sapiens
acaaaaaaggcttcc

SEQ ID NO: 1415888 - DNA, 15 bp, Homo sapiens
caaaaaaggcttccg

SEQ ID NO: 1415889 - DNA, 15 bp, Homo sapiens
aaaaaaggcttccga

SEQ ID NO: 1415890 - DNA, 15 bp, Homo sapiens
aaaaaggcttccgag

SEQ ID NO: 1415891 - DNA, 15 bp, Homo sapiens
aaaaggcttccgagg

SEQ ID NO: 1415892 - DNA, 15 bp, Homo sapiens
aaaggcttccgaggg

SEQ ID NO: 1415893 - DNA, 15 bp, Homo sapiens
aaggcttccgagggt

SEQ ID NO: 1415894 - DNA, 15 bp, Homo sapiens
aggcttccgagggtt

SEQ ID NO: 1415895 - DNA, 15 bp, Homo sapiens
ggcttccgagggtta

SEQ ID NO: 1415896 - DNA, 15 bp, Homo sapiens
gcttccgagggttat

SEQ ID NO: 1415897 - DNA, 15 bp, Homo sapiens
cttccgagggttatt

SEQ ID NO: 1415898 - DNA, 15 bp, Homo sapiens
ttccgagggttattc

SEQ ID NO: 1415899 - DNA, 15 bp, Homo sapiens
tccgagggttattca

SEQ ID NO: 1415900 - DNA, 15 bp, Homo sapiens
ccgagggttattcat

SEQ ID NO: 1415901 - DNA, 15 bp, Homo sapiens
cgagggttattcatg

SEQ ID NO: 1415902 - DNA, 15 bp, Homo sapiens
gagggttattcatgg

SEQ ID NO: 1415903 - DNA, 15 bp, Homo sapiens
agggttattcatggc

SEQ ID NO: 1415904 - DNA, 15 bp, Homo sapiens
gggttattcatggcc

SEQ ID NO: 1415905 - DNA, 15 bp, Homo sapiens
ggttattcatggcca

SEQ ID NO: 1415906 - DNA, 15 bp, Homo sapiens
gttattcatggccaa

SEQ ID NO: 1415907 - DNA, 15 bp, Homo sapiens
ttattcatggccaac

SEQ ID NO: 1415908 - DNA, 15 bp, Homo sapiens
tattcatggccaaca

SEQ ID NO: 1415909 - DNA, 15 bp, Homo sapiens
attcatggccaacag

SEQ ID NO: 1415910 - DNA, 15 bp, Homo sapiens
ttcatggccaacagt

SEQ ID NO: 1415911 - DNA, 15 bp, Homo sapiens
tcatggccaacagtt

SEQ ID NO: 1415912 - DNA, 15 bp, Homo sapiens
catggccaacagttt

SEQ ID NO: 1415913 - DNA, 15 bp, Homo sapiens
atggccaacagtttc

SEQ ID NO: 1415914 - DNA, 15 bp, Homo sapiens
tggccaacagtttcc

SEQ ID NO: 1415915 - DNA, 15 bp, Homo sapiens
ggccaacagtttcca

SEQ ID NO: 1415916 - DNA, 15 bp, Homo sapiens
gccaacagtttccac

SEQ ID NO: 1415917 - DNA, 15 bp, Homo sapiens
ccaacagtttccaca

SEQ ID NO: 1415918 - DNA, 15 bp, Homo sapiens
caacagtttccacag

SEQ ID NO: 1415919 - DNA, 15 bp, Homo sapiens
aacagtttccacagg

SEQ ID NO: 1415920 - DNA, 15 bp, Homo sapiens
acagtttccacagga

SEQ ID NO: 1415921 - DNA, 15 bp, Homo sapiens
cagtttccacaggag

SEQ ID NO: 1415922 - DNA, 15 bp, Homo sapiens
agtttccacaggaga

SEQ ID NO: 1415923 - DNA, 15 bp, Homo sapiens
gtttccacaggagaa

SEQ ID NO: 1415924 - DNA, 15 bp, Homo sapiens
tttccacaggagaat

SEQ ID NO: 1415925 - DNA, 15 bp, Homo sapiens
ttccacaggagaatc

SEQ ID NO: 1415926 - DNA, 15 bp, Homo sapiens
tccacaggagaatcc

SEQ ID NO: 1415927 - DNA, 15 bp, Homo sapiens
ccacaggagaatcca

SEQ ID NO: 1415928 - DNA, 15 bp, Homo sapiens
cacaggagaatccaa

SEQ ID NO: 1415929 - DNA, 15 bp, Homo sapiens
acaggagaatccaaa

SEQ ID NO: 1415930 - DNA, 15 bp, Homo sapiens
caggagaatccaaag

SEQ ID NO: 1415931 - DNA, 15 bp, Homo sapiens
aggagaatccaaagg

SEQ ID NO: 1415932 - DNA, 15 bp, Homo sapiens
ggagaatccaaaggg

SEQ ID NO: 1415933 - DNA, 15 bp, Homo sapiens
gagaatccaaaggga

SEQ ID NO: 1415934 - DNA, 15 bp, Homo sapiens
agaatccaaagggaa

SEQ ID NO: 1415935 - DNA, 15 bp, Homo sapiens
gaatccaaagggaaa

SEQ ID NO: 1415936 - DNA, 15 bp, Homo sapiens
aatccaaagggaaac

SEQ ID NO: 1415937 - DNA, 15 bp, Homo sapiens
atccaaagggaaact

SEQ ID NO: 1415938 - DNA, 15 bp, Homo sapiens
tccaaagggaaacta

SEQ ID NO: 1415939 - DNA, 15 bp, Homo sapiens
ccaaagggaaactag

SEQ ID NO: 1415940 - DNA, 15 bp, Homo sapiens
caaagggaaactagt

SEQ ID NO: 1415941 - DNA, 15 bp, Homo sapiens
aaagggaaactagtt

SEQ ID NO: 1415942 - DNA, 15 bp, Homo sapiens
aagggaaactagttt

SEQ ID NO: 1415943 - DNA, 15 bp, Homo sapiens
agggaaactagtttc

SEQ ID NO: 1415944 - DNA, 15 bp, Homo sapiens
gggaaactagtttcc

SEQ ID NO: 1415945 - DNA, 15 bp, Homo sapiens
ggaaactagtttccg

SEQ ID NO: 1415946 - DNA, 15 bp, Homo sapiens
gaaactagtttccgg

SEQ ID NO: 1415947 - DNA, 15 bp, Homo sapiens
aaactagtttccggg

SEQ ID NO: 1415948 - DNA, 15 bp, Homo sapiens
aactagtttccgggg

SEQ ID NO: 1415949 - DNA, 15 bp, Homo sapiens
actagtttccggggc

SEQ ID NO: 1415950 - DNA, 15 bp, Homo sapiens
ctagtttccggggcc

SEQ ID NO: 1415951 - DNA, 15 bp, Homo sapiens
tagtttccggggccg

SEQ ID NO: 1415952 - DNA, 15 bp, Homo sapiens
agtttccggggccgc

SEQ ID NO: 1415953 - DNA, 15 bp, Homo sapiens
gtttccggggccgct

SEQ ID NO: 1415954 - DNA, 15 bp, Homo sapiens
tttccggggccgctg

SEQ ID NO: 1415955 - DNA, 15 bp, Homo sapiens
ttccggggccgctgt

SEQ ID NO: 1415956 - DNA, 15 bp, Homo sapiens
tccggggccgctgtg

SEQ ID NO: 1415957 - DNA, 15 bp, Homo sapiens
ccggggccgctgtgt

SEQ ID NO: 1415958 - DNA, 15 bp, Homo sapiens
cggggccgctgtgtg

SEQ ID NO: 1415959 - DNA, 15 bp, Homo sapiens
ggggccgctgtgtgt

SEQ ID NO: 1415960 - DNA, 15 bp, Homo sapiens
gggccgctgtgtgtg

SEQ ID NO: 1415961 - DNA, 15 bp, Homo sapiens
ggccgctgtgtgtgc

SEQ ID NO: 1415962 - DNA, 15 bp, Homo sapiens
gccgctgtgtgtgcg

SEQ ID NO: 1415963 - DNA, 15 bp, Homo sapiens
ccgctgtgtgtgcgg

SEQ ID NO: 1415964 - DNA, 15 bp, Homo sapiens
cgctgtgtgtgcggg

SEQ ID NO: 1415965 - DNA, 15 bp, Homo sapiens
gctgtgtgtgcgggt

SEQ ID NO: 1415966 - DNA, 15 bp, Homo sapiens
ctgtgtgtgcgggtg

SEQ ID NO: 1415967 - DNA, 15 bp, Homo sapiens
tgtgtgtgcgggtgc

SEQ ID NO: 1415968 - DNA, 15 bp, Homo sapiens
gtgtgtgcgggtgct

SEQ ID NO: 1415969 - DNA, 15 bp, Homo sapiens
tgtgtgcgggtgctt

SEQ ID NO: 1415970 - DNA, 15 bp, Homo sapiens
gtgtgcgggtgcttg

SEQ ID NO: 1415971 - DNA, 15 bp, Homo sapiens
tgtgcgggtgcttgg

SEQ ID NO: 1415972 - DNA, 15 bp, Homo sapiens
gtgcgggtgcttggt

SEQ ID NO: 1415973 - DNA, 15 bp, Homo sapiens
tgcgggtgcttggtg

SEQ ID NO: 1415974 - DNA, 15 bp, Homo sapiens
gcgggtgcttggtgg

SEQ ID NO: 1415975 - DNA, 15 bp, Homo sapiens
cgggtgcttggtggg

SEQ ID NO: 1415976 - DNA, 15 bp, Homo sapiens
gggtgcttggtgggc

SEQ ID NO: 1415977 - DNA, 15 bp, Homo sapiens
ggtgcttggtgggct

SEQ ID NO: 1415978 - DNA, 15 bp, Homo sapiens
tgcttggtgggctga

SEQ ID NO: 1415979 - DNA, 15 bp, Homo sapiens
gcttggtgggctgaa

SEQ ID NO: 1415980 - DNA, 15 bp, Homo sapiens
cttggtgggctgaaa

SEQ ID NO: 1415981 - DNA, 15 bp, Homo sapiens
ttggtgggctgaaag

SEQ ID NO: 1415982 - DNA, 15 bp, Homo sapiens
tggtgggctgaaagc

SEQ ID NO: 1415983 - DNA, 15 bp, Homo sapiens
ggtgggctgaaagct

SEQ ID NO: 1415984 - DNA, 15 bp, Homo sapiens
gtgggctgaaagctg

SEQ ID NO: 1415985 - DNA, 15 bp, Homo sapiens
tgggctgaaagctgc

SEQ ID NO: 1415986 - DNA, 15 bp, Homo sapiens
gggctgaaagctgct

SEQ ID NO: 1415987 - DNA, 15 bp, Homo sapiens
ggctgaaagctgctg

SEQ ID NO: 1415988 - DNA, 15 bp, Homo sapiens
gctgaaagctgctgt

SEQ ID NO: 1415989 - DNA, 15 bp, Homo sapiens
ctgaaagctgctgtc

SEQ ID NO: 1415990 - DNA, 15 bp, Homo sapiens
tgaaagctgctgtca

SEQ ID NO: 1415991 - DNA, 15 bp, Homo sapiens
gaaagctgctgtcac

SEQ ID NO: 1415992 - DNA, 15 bp, Homo sapiens
aaagctgctgtcact

SEQ ID NO: 1415993 - DNA, 15 bp, Homo sapiens
aagctgctgtcacta

SEQ ID NO: 1415994 - DNA, 15 bp, Homo sapiens
agctgctgtcactag

SEQ ID NO: 1415995 - DNA, 15 bp, Homo sapiens
gctgctgtcactaga

SEQ ID NO: 1415996 - DNA, 15 bp, Homo sapiens
ctgctgtcactagat

SEQ ID NO: 1415997 - DNA, 15 bp, Homo sapiens
tgctgtcactagatg

SEQ ID NO: 1415998 - DNA, 15 bp, Homo sapiens
gctgtcactagatgg

SEQ ID NO: 1415999 - DNA, 15 bp, Homo sapiens
ctgtcactagatggc

SEQ ID NO: 1416000 - DNA, 15 bp, Homo sapiens
tgtcactagatggct

SEQ ID NO: 1416001 - DNA, 15 bp, Homo sapiens
gtcactagatggctg

SEQ ID NO: 1416002 - DNA, 15 bp, Homo sapiens
tcactagatggctgt

SEQ ID NO: 1416003 - DNA, 15 bp, Homo sapiens
cactagatggctgta

SEQ ID NO: 1416004 - DNA, 15 bp, Homo sapiens
actagatggctgtaa

SEQ ID NO: 1416005 - DNA, 15 bp, Homo sapiens
ctagatggctgtaag

SEQ ID NO: 1416006 - DNA, 15 bp, Homo sapiens
tagatggctgtaagt

SEQ ID NO: 1416007 - DNA, 15 bp, Homo sapiens
agatggctgtaagtg

SEQ ID NO: 1416008 - DNA, 15 bp, Homo sapiens
gatggctgtaagtgt

SEQ ID NO: 1416009 - DNA, 15 bp, Homo sapiens
atggctgtaagtgtg

SEQ ID NO: 1416010 - DNA, 15 bp, Homo sapiens
tggctgtaagtgtgc

SEQ ID NO: 1416011 - DNA, 15 bp, Homo sapiens
ggctgtaagtgtgcc

SEQ ID NO: 1416012 - DNA, 15 bp, Homo sapiens
gctgtaagtgtgcca

SEQ ID NO: 1416013 - DNA, 15 bp, Homo sapiens
ctgtaagtgtgccaa

SEQ ID NO: 1416014 - DNA, 15 bp, Homo sapiens
tgtaagtgtgccaac

SEQ ID NO: 1416015 - DNA, 15 bp, Homo sapiens
gtaagtgtgccaaca

SEQ ID NO: 1416016 - DNA, 15 bp, Homo sapiens
taagtgtgccaacat

SEQ ID NO: 1416017 - DNA, 15 bp, Homo sapiens
aagtgtgccaacatc

SEQ ID NO: 1416018 - DNA, 15 bp, Homo sapiens
agtgtgccaacatct

SEQ ID NO: 1416019 - DNA, 15 bp, Homo sapiens
gtgtgccaacatctg

SEQ ID NO: 1416020 - DNA, 15 bp, Homo sapiens
tgtgccaacatctga

SEQ ID NO: 1416021 - DNA, 15 bp, Homo sapiens
gtgccaacatctgac

SEQ ID NO: 1416022 - DNA, 15 bp, Homo sapiens
tgccaacatctgacc

SEQ ID NO: 1416023 - DNA, 15 bp, Homo sapiens
gccaacatctgacct

SEQ ID NO: 1416024 - DNA, 15 bp, Homo sapiens
ccaacatctgacctg

SEQ ID NO: 1416025 - DNA, 15 bp, Homo sapiens
caacatctgacctgt

SEQ ID NO: 1416026 - DNA, 15 bp, Homo sapiens
aacatctgacctgtc

SEQ ID NO: 1416027 - DNA, 15 bp, Homo sapiens
acatctgacctgtcc

SEQ ID NO: 1416028 - DNA, 15 bp, Homo sapiens
catctgacctgtccc

SEQ ID NO: 1416029 - DNA, 15 bp, Homo sapiens
atctgacctgtccca

SEQ ID NO: 1416030 - DNA, 15 bp, Homo sapiens
tctgacctgtcccat

SEQ ID NO: 1416031 - DNA, 15 bp, Homo sapiens
ctgacctgtcccatt

SEQ ID NO: 1416032 - DNA, 15 bp, Homo sapiens
tgacctgtcccattg

SEQ ID NO: 1416033 - DNA, 15 bp, Homo sapiens
gacctgtcccattgt

SEQ ID NO: 1416034 - DNA, 15 bp, Homo sapiens
acctgtcccattgtg

SEQ ID NO: 1416035 - DNA, 15 bp, Homo sapiens
ctgtcccattgtgtt

SEQ ID NO: 1416036 - DNA, 15 bp, Homo sapiens
tgtcccattgtgttg

SEQ ID NO: 1416037 - DNA, 15 bp, Homo sapiens
gtcccattgtgttgt

SEQ ID NO: 1416038 - DNA, 15 bp, Homo sapiens
tcccattgtgttgtg

SEQ ID NO: 1416039 - DNA, 15 bp, Homo sapiens
cccattgtgttgtgt

SEQ ID NO: 1416040 - DNA, 15 bp, Homo sapiens
ccattgtgttgtgtt

SEQ ID NO: 1416041 - DNA, 15 bp, Homo sapiens
cattgtgttgtgttt

SEQ ID NO: 1416042 - DNA, 15 bp, Homo sapiens
attgtgttgtgtttt

SEQ ID NO: 1416043 - DNA, 15 bp, Homo sapiens
ttgtgttgtgttttg

SEQ ID NO: 1416044 - DNA, 15 bp, Homo sapiens
tgtgttgtgttttgc

SEQ ID NO: 1416045 - DNA, 15 bp, Homo sapiens
gtgttgtgttttgca

SEQ ID NO: 1416046 - DNA, 15 bp, Homo sapiens
tgttgtgttttgcag

SEQ ID NO: 1416047 - DNA, 15 bp, Homo sapiens
gttgtgttttgcagt

SEQ ID NO: 1416048 - DNA, 15 bp, Homo sapiens
ttgtgttttgcagtt

SEQ ID NO: 1416049 - DNA, 15 bp, Homo sapiens
tgtgttttgcagttg

SEQ ID NO: 1416050 - DNA, 15 bp, Homo sapiens
gtgttttgcagttgc

SEQ ID NO: 1416051 - DNA, 15 bp, Homo sapiens
tgttttgcagttgct

SEQ ID NO: 1416052 - DNA, 15 bp, Homo sapiens
gttttgcagttgctg

SEQ ID NO: 1416053 - DNA, 15 bp, Homo sapiens
ttttgcagttgctgg

SEQ ID NO: 1416054 - DNA, 15 bp, Homo sapiens
tttgcagttgctgga

SEQ ID NO: 1416055 - DNA, 15 bp, Homo sapiens
ttgcagttgctggat

SEQ ID NO: 1416056 - DNA, 15 bp, Homo sapiens
tgcagttgctggatt

SEQ ID NO: 1416057 - DNA, 15 bp, Homo sapiens
gcagttgctggattt

SEQ ID NO: 1416058 - DNA, 15 bp, Homo sapiens
cagttgctggatttg

SEQ ID NO: 1416059 - DNA, 15 bp, Homo sapiens
agttgctggatttgt

SEQ ID NO: 1416060 - DNA, 15 bp, Homo sapiens
gttgctggatttgtg

SEQ ID NO: 1416061 - DNA, 15 bp, Homo sapiens
ttgctggatttgtgc

SEQ ID NO: 1416062 - DNA, 15 bp, Homo sapiens
tgctggatttgtgcg

SEQ ID NO: 1416063 - DNA, 15 bp, Homo sapiens
gctggatttgtgcga

SEQ ID NO: 1416064 - DNA, 15 bp, Homo sapiens
ctggatttgtgcgac

SEQ ID NO: 1416065 - DNA, 15 bp, Homo sapiens
tggatttgtgcgact

SEQ ID NO: 1416066 - DNA, 15 bp, Homo sapiens
ggatttgtgcgactc

SEQ ID NO: 1416067 - DNA, 15 bp, Homo sapiens
gatttgtgcgactcg

SEQ ID NO: 1416068 - DNA, 15 bp, Homo sapiens
atttgtgcgactcgg

SEQ ID NO: 1416069 - DNA, 15 bp, Homo sapiens
tttgtgcgactcggt

SEQ ID NO: 1416070 - DNA, 15 bp, Homo sapiens
ttgtgcgactcggtg

SEQ ID NO: 1416071 - DNA, 15 bp, Homo sapiens
tgtgcgactcggtga

SEQ ID NO: 1416072 - DNA, 15 bp, Homo sapiens
gtgcgactcggtgaa

SEQ ID NO: 1416073 - DNA, 15 bp, Homo sapiens
tgcgactcggtgaag

SEQ ID NO: 1416074 - DNA, 15 bp, Homo sapiens
gcgactcggtgaagg

SEQ ID NO: 1416075 - DNA, 15 bp, Homo sapiens
cgactcggtgaagga

SEQ ID NO: 1416076 - DNA, 15 bp, Homo sapiens
gactcggtgaaggat

SEQ ID NO: 1416077 - DNA, 15 bp, Homo sapiens
actcggtgaaggatg

SEQ ID NO: 1416078 - DNA, 15 bp, Homo sapiens
ctcggtgaaggatga

SEQ ID NO: 1416079 - DNA, 15 bp, Homo sapiens
tcggtgaaggatgat

SEQ ID NO: 1416080 - DNA, 15 bp, Homo sapiens
cggtgaaggatgatg

SEQ ID NO: 1416081 - DNA, 15 bp, Homo sapiens
ggtgaaggatgatgc

SEQ ID NO: 1416082 - DNA, 15 bp, Homo sapiens
gtgaaggatgatgcc

SEQ ID NO: 1416083 - DNA, 15 bp, Homo sapiens
tgaaggatgatgccc

SEQ ID NO: 1416084 - DNA, 15 bp, Homo sapiens
gaaggatgatgcccg

SEQ ID NO: 1416085 - DNA, 15 bp, Homo sapiens
aaggatgatgcccgg

SEQ ID NO: 1416086 - DNA, 15 bp, Homo sapiens
aggatgatgcccgga

SEQ ID NO: 1416087 - DNA, 15 bp, Homo sapiens
ggatgatgcccggag

SEQ ID NO: 1416088 - DNA, 15 bp, Homo sapiens
gatgatgcccggagg

SEQ ID NO: 1416089 - DNA, 15 bp, Homo sapiens
atgatgcccggaggg

SEQ ID NO: 1416090 - DNA, 15 bp, Homo sapiens
tgatgcccggagggt

SEQ ID NO: 1416091 - DNA, 15 bp, Homo sapiens
gatgcccggagggtg

SEQ ID NO: 1416092 - DNA, 15 bp, Homo sapiens
atgcccggagggtga

SEQ ID NO: 1416093 - DNA, 15 bp, Homo sapiens
tgcccggagggtgat

SEQ ID NO: 1416094 - DNA, 15 bp, Homo sapiens
gcccggagggtgatc

SEQ ID NO: 1416095 - DNA, 15 bp, Homo sapiens
cccggagggtgatct

SEQ ID NO: 1416096 - DNA, 15 bp, Homo sapiens
ccggagggtgatctc

SEQ ID NO: 1416097 - DNA, 15 bp, Homo sapiens
cggagggtgatctcg

SEQ ID NO: 1416098 - DNA, 15 bp, Homo sapiens
ggagggtgatctcga

SEQ ID NO: 1416099 - DNA, 15 bp, Homo sapiens
gagggtgatctcgac

SEQ ID NO: 1416100 - DNA, 15 bp, Homo sapiens
agggtgatctcgacc

SEQ ID NO: 1416101 - DNA, 15 bp, Homo sapiens
gggtgatctcgacct

SEQ ID NO: 1416102 - DNA, 15 bp, Homo sapiens
ggtgatctcgacctt

SEQ ID NO: 1416103 - DNA, 15 bp, Homo sapiens
gtgatctcgaccttt

SEQ ID NO: 1416104 - DNA, 15 bp, Homo sapiens
tgatctcgaccttta

SEQ ID NO: 1416105 - DNA, 15 bp, Homo sapiens
gatctcgacctttaa

SEQ ID NO: 1416106 - DNA, 15 bp, Homo sapiens
atctcgacctttaac

SEQ ID NO: 1416107 - DNA, 15 bp, Homo sapiens
tctcgacctttaaca

SEQ ID NO: 1416108 - DNA, 15 bp, Homo sapiens
ctcgacctttaacat

SEQ ID NO: 1416109 - DNA, 15 bp, Homo sapiens
tcgacctttaacatt

SEQ ID NO: 1416110 - DNA, 15 bp, Homo sapiens
cgacctttaacattc

SEQ ID NO: 1416111 - DNA, 15 bp, Homo sapiens
gacctttaacattcc

SEQ ID NO: 1416112 - DNA, 15 bp, Homo sapiens
acctttaacattcca

SEQ ID NO: 1416113 - DNA, 15 bp, Homo sapiens
cctttaacattccac

SEQ ID NO: 1416114 - DNA, 15 bp, Homo sapiens
ctttaacattccaca

SEQ ID NO: 1416115 - DNA, 15 bp, Homo sapiens
tttaacattccacac

SEQ ID NO: 1416116 - DNA, 15 bp, Homo sapiens
ttaacattccacaca

SEQ ID NO: 1416117 - DNA, 15 bp, Homo sapiens
taacattccacacac

SEQ ID NO: 1416118 - DNA, 15 bp, Homo sapiens
aacattccacacacc

SEQ ID NO: 1416119 - DNA, 15 bp, Homo sapiens
acattccacacacct

SEQ ID NO: 1416120 - DNA, 15 bp, Homo sapiens
cattccacacaccta

SEQ ID NO: 1416121 - DNA, 15 bp, Homo sapiens
attccacacacctac

SEQ ID NO: 1416122 - DNA, 15 bp, Homo sapiens
ttccacacacctacc

SEQ ID NO: 1416123 - DNA, 15 bp, Homo sapiens
tccacacacctacct

SEQ ID NO: 1416124 - DNA, 15 bp, Homo sapiens
ccacacacctacctc

SEQ ID NO: 1416125 - DNA, 15 bp, Homo sapiens
cacacacctacctcc

SEQ ID NO: 1416126 - DNA, 15 bp, Homo sapiens
acacacctacctcca

SEQ ID NO: 1416127 - DNA, 15 bp, Homo sapiens
cacacctacctccac

SEQ ID NO: 1416128 - DNA, 15 bp, Homo sapiens
acacctacctccacg

SEQ ID NO: 1416129 - DNA, 15 bp, Homo sapiens
cacctacctccacgc

SEQ ID NO: 1416130 - DNA, 15 bp, Homo sapiens
acctacctccacgca

SEQ ID NO: 1416131 - DNA, 15 bp, Homo sapiens
cctacctccacgcac

SEQ ID NO: 1416132 - DNA, 15 bp, Homo sapiens
ctacctccacgcacc

SEQ ID NO: 1416133 - DNA, 15 bp, Homo sapiens
tacctccacgcacca

SEQ ID NO: 1416134 - DNA, 15 bp, Homo sapiens
acctccacgcaccaa

SEQ ID NO: 1416135 - DNA, 15 bp, Homo sapiens
cctccacgcaccaat

SEQ ID NO: 1416136 - DNA, 15 bp, Homo sapiens
ctccacgcaccaatc

SEQ ID NO: 1416137 - DNA, 15 bp, Homo sapiens
tccacgcaccaatcg

SEQ ID NO: 1416138 - DNA, 15 bp, Homo sapiens
ccacgcaccaatcgc

SEQ ID NO: 1416139 - DNA, 15 bp, Homo sapiens
cacgcaccaatcgcc

SEQ ID NO: 1416140 - DNA, 15 bp, Homo sapiens
acgcaccaatcgccg

SEQ ID NO: 1416141 - DNA, 15 bp, Homo sapiens
cgcaccaatcgccgg

SEQ ID NO: 1416142 - DNA, 15 bp, Homo sapiens
gcaccaatcgccgga

SEQ ID NO: 1416143 - DNA, 15 bp, Homo sapiens
caccaatcgccggaa

SEQ ID NO: 1416144 - DNA, 15 bp, Homo sapiens
accaatcgccggaat

SEQ ID NO: 1416145 - DNA, 15 bp, Homo sapiens
ccaatcgccggaatc

SEQ ID NO: 1416146 - DNA, 15 bp, Homo sapiens
caatcgccggaatct

SEQ ID NO: 1416147 - DNA, 15 bp, Homo sapiens
aatcgccggaatctc

SEQ ID NO: 1416148 - DNA, 15 bp, Homo sapiens
atcgccggaatctcc

SEQ ID NO: 1416149 - DNA, 15 bp, Homo sapiens
tcgccggaatctcca

SEQ ID NO: 1416150 - DNA, 15 bp, Homo sapiens
cgccggaatctccaa

SEQ ID NO: 1416151 - DNA, 15 bp, Homo sapiens
gccggaatctccaac

SEQ ID NO: 1416152 - DNA, 15 bp, Homo sapiens
ccggaatctccaacc

SEQ ID NO: 1416153 - DNA, 15 bp, Homo sapiens
cggaatctccaaccc

SEQ ID NO: 1416154 - DNA, 15 bp, Homo sapiens
ggaatctccaacccg

SEQ ID NO: 1416155 - DNA, 15 bp, Homo sapiens
gaatctccaacccgc

SEQ ID NO: 1416156 - DNA, 15 bp, Homo sapiens
aatctccaacccgcg

SEQ ID NO: 1416157 - DNA, 15 bp, Homo sapiens
atctccaacccgcgg

SEQ ID NO: 1416158 - DNA, 15 bp, Homo sapiens
tctccaacccgcggg

SEQ ID NO: 1416159 - DNA, 15 bp, Homo sapiens
ctccaacccgcgggc

SEQ ID NO: 1416160 - DNA, 15 bp, Homo sapiens
tccaacccgcgggcc

SEQ ID NO: 1416161 - DNA, 15 bp, Homo sapiens
ccaacccgcgggccg

SEQ ID NO: 1416162 - DNA, 15 bp, Homo sapiens
caacccgcgggccgc

SEQ ID NO: 1416163 - DNA, 15 bp, Homo sapiens
aacccgcgggccgcg

SEQ ID NO: 1416164 - DNA, 15 bp, Homo sapiens
acccgcgggccgcgt

SEQ ID NO: 1416165 - DNA, 15 bp, Homo sapiens
cccgcgggccgcgtg

SEQ ID NO: 1416166 - DNA, 15 bp, Homo sapiens
ccgcgggccgcgtgg

SEQ ID NO: 1416167 - DNA, 15 bp, Homo sapiens
cgcgggccgcgtggg

SEQ ID NO: 1416168 - DNA, 15 bp, Homo sapiens
gcgggccgcgtgggc

SEQ ID NO: 1416169 - DNA, 15 bp, Homo sapiens
cgggccgcgtgggct

SEQ ID NO: 1416170 - DNA, 15 bp, Homo sapiens
gggccgcgtgggctt

SEQ ID NO: 1416171 - DNA, 15 bp, Homo sapiens
ggccgcgtgggcttt

SEQ ID NO: 1416172 - DNA, 15 bp, Homo sapiens
gccgcgtgggctttc

SEQ ID NO: 1416173 - DNA, 15 bp, Homo sapiens
ccgcgtgggctttct

SEQ ID NO: 1416174 - DNA, 15 bp, Homo sapiens
cgcgtgggctttcta

SEQ ID NO: 1416175 - DNA, 15 bp, Homo sapiens
gcgtgggctttctac

SEQ ID NO: 1416176 - DNA, 15 bp, Homo sapiens
cgtgggctttctacc

SEQ ID NO: 1416177 - DNA, 15 bp, Homo sapiens
gtgggctttctaccc

SEQ ID NO: 1416178 - DNA, 15 bp, Homo sapiens
tgggctttctaccct

SEQ ID NO: 1416179 - DNA, 15 bp, Homo sapiens
gggctttctaccctg

SEQ ID NO: 1416180 - DNA, 15 bp, Homo sapiens
ggctttctaccctgc

SEQ ID NO: 1416181 - DNA, 15 bp, Homo sapiens
gctttctaccctgca

SEQ ID NO: 1416182 - DNA, 15 bp, Homo sapiens
ctttctaccctgcac

SEQ ID NO: 1416183 - DNA, 15 bp, Homo sapiens
tttctaccctgcacc

SEQ ID NO: 1416184 - DNA, 15 bp, Homo sapiens
ttctaccctgcaccg

SEQ ID NO: 1416185 - DNA, 15 bp, Homo sapiens
tctaccctgcaccgc

SEQ ID NO: 1416186 - DNA, 15 bp, Homo sapiens
ctaccctgcaccgct

SEQ ID NO: 1416187 - DNA, 15 bp, Homo sapiens
taccctgcaccgctg

SEQ ID NO: 1416188 - DNA, 15 bp, Homo sapiens
accctgcaccgctgc

SEQ ID NO: 1416189 - DNA, 15 bp, Homo sapiens
ccctgcaccgctgca

SEQ ID NO: 1416190 - DNA, 15 bp, Homo sapiens
cctgcaccgctgcag

SEQ ID NO: 1416191 - DNA, 15 bp, Homo sapiens
ctgcaccgctgcagc

SEQ ID NO: 1416192 - DNA, 15 bp, Homo sapiens
tgcaccgctgcagcc

SEQ ID NO: 1416193 - DNA, 15 bp, Homo sapiens
gcaccgctgcagccg

SEQ ID NO: 1416194 - DNA, 15 bp, Homo sapiens
caccgctgcagccgc

SEQ ID NO: 1416195 - DNA, 15 bp, Homo sapiens
accgctgcagccgcg

SEQ ID NO: 1416196 - DNA, 15 bp, Homo sapiens
ccgctgcagccgcgg

SEQ ID NO: 1416197 - DNA, 15 bp, Homo sapiens
cgctgcagccgcggc

SEQ ID NO: 1416198 - DNA, 15 bp, Homo sapiens
gctgcagccgcggcc

SEQ ID NO: 1416199 - DNA, 15 bp, Homo sapiens
ctgcagccgcggcca

SEQ ID NO: 1416200 - DNA, 15 bp, Homo sapiens
tgcagccgcggccac

SEQ ID NO: 1416201 - DNA, 15 bp, Homo sapiens
gcagccgcggccacg

SEQ ID NO: 1416202 - DNA, 15 bp, Homo sapiens
cagccgcggccacgg

SEQ ID NO: 1416203 - DNA, 15 bp, Homo sapiens
agccgcggccacggg

SEQ ID NO: 1416204 - DNA, 15 bp, Homo sapiens
gccgcggccacggga

SEQ ID NO: 1416205 - DNA, 15 bp, Homo sapiens
ccgcggccacgggaa

SEQ ID NO: 1416206 - DNA, 15 bp, Homo sapiens
cgcggccacgggaag

SEQ ID NO: 1416207 - DNA, 15 bp, Homo sapiens
gcggccacgggaaga

SEQ ID NO: 1416208 - DNA, 15 bp, Homo sapiens
cggccacgggaagag

SEQ ID NO: 1416209 - DNA, 15 bp, Homo sapiens
ggccacgggaagagg

SEQ ID NO: 1416210 - DNA, 15 bp, Homo sapiens
gccacgggaagaggc

SEQ ID NO: 1416211 - DNA, 15 bp, Homo sapiens
ccacgggaagaggcg

SEQ ID NO: 1416212 - DNA, 15 bp, Homo sapiens
cacgggaagaggcgc

SEQ ID NO: 1416213 - DNA, 15 bp, Homo sapiens
acgggaagaggcgcg

SEQ ID NO: 1416214 - DNA, 15 bp, Homo sapiens
cgggaagaggcgcgc

SEQ ID NO: 1416215 - DNA, 15 bp, Homo sapiens
gggaagaggcgcgct

SEQ ID NO: 1416216 - DNA, 15 bp, Homo sapiens
ggaagaggcgcgctc

SEQ ID NO: 1416217 - DNA, 15 bp, Homo sapiens
gaagaggcgcgctcc

SEQ ID NO: 1416218 - DNA, 15 bp, Homo sapiens
aagaggcgcgctccc

SEQ ID NO: 1416219 - DNA, 15 bp, Homo sapiens
agaggcgcgctcccg

SEQ ID NO: 1416220 - DNA, 15 bp, Homo sapiens
gaggcgcgctcccgg

SEQ ID NO: 1416221 - DNA, 15 bp, Homo sapiens
aggcgcgctcccggc

SEQ ID NO: 1416222 - DNA, 15 bp, Homo sapiens
ggcgcgctcccggcg

SEQ ID NO: 1416223 - DNA, 15 bp, Homo sapiens
gcgcgctcccggcgg

SEQ ID NO: 1416224 - DNA, 15 bp, Homo sapiens
cgcgctcccggcggc

SEQ ID NO: 1416225 - DNA, 15 bp, Homo sapiens
gcgctcccggcggcc

SEQ ID NO: 1416226 - DNA, 15 bp, Homo sapiens
cgctcccggcggccc

SEQ ID NO: 1416227 - DNA, 15 bp, Homo sapiens
gctcccggcggccca

SEQ ID NO: 1416228 - DNA, 15 bp, Homo sapiens
ctcccggcggcccaa

SEQ ID NO: 1416229 - DNA, 15 bp, Homo sapiens
tcccggcggcccaag

SEQ ID NO: 1416230 - DNA, 15 bp, Homo sapiens
cccggcggcccaagc

SEQ ID NO: 1416231 - DNA, 15 bp, Homo sapiens
ccggcggcccaagct

SEQ ID NO: 1416232 - DNA, 15 bp, Homo sapiens
cggcggcccaagctg

SEQ ID NO: 1416233 - DNA, 15 bp, Homo sapiens
ggcggcccaagctgg

SEQ ID NO: 1416234 - DNA, 15 bp, Homo sapiens
gcggcccaagctggg

SEQ ID NO: 1416235 - DNA, 15 bp, Homo sapiens
cggcccaagctggga

SEQ ID NO: 1416236 - DNA, 15 bp, Homo sapiens
ggcccaagctgggag

SEQ ID NO: 1416237 - DNA, 15 bp, Homo sapiens
gcccaagctgggagc

SEQ ID NO: 1416238 - DNA, 15 bp, Homo sapiens
cccaagctgggagcc

SEQ ID NO: 1416239 - DNA, 15 bp, Homo sapiens
ccaagctgggagcca

SEQ ID NO: 1416240 - DNA, 15 bp, Homo sapiens
caagctgggagccaa

SEQ ID NO: 1416241 - DNA, 15 bp, Homo sapiens
aagctgggagccaag

SEQ ID NO: 1416242 - DNA, 15 bp, Homo sapiens
agctgggagccaagc

SEQ ID NO: 1416243 - DNA, 15 bp, Homo sapiens
gctgggagccaagct

SEQ ID NO: 1416244 - DNA, 15 bp, Homo sapiens
ctgggagccaagctc

SEQ ID NO: 1416245 - DNA, 15 bp, Homo sapiens
tgggagccaagctct

SEQ ID NO: 1416246 - DNA, 15 bp, Homo sapiens
gggagccaagctcta

SEQ ID NO: 1416247 - DNA, 15 bp, Homo sapiens
ggagccaagctctaa

SEQ ID NO: 1416248 - DNA, 15 bp, Homo sapiens
gagccaagctctaac

SEQ ID NO: 1416249 - DNA, 15 bp, Homo sapiens
agccaagctctaacg

SEQ ID NO: 1416250 - DNA, 15 bp, Homo sapiens
gccaagctctaacgg

SEQ ID NO: 1416251 - DNA, 15 bp, Homo sapiens
ccaagctctaacggg

SEQ ID NO: 1416252 - DNA, 15 bp, Homo sapiens
caagctctaacgggt

SEQ ID NO: 1416253 - DNA, 15 bp, Homo sapiens
aagctctaacgggtg

SEQ ID NO: 1416254 - DNA, 15 bp, Homo sapiens
agctctaacgggtgt

SEQ ID NO: 1416255 - DNA, 15 bp, Homo sapiens
gctctaacgggtgtg

SEQ ID NO: 1416256 - DNA, 15 bp, Homo sapiens
ctctaacgggtgtgg

SEQ ID NO: 1416257 - DNA, 15 bp, Homo sapiens
tctaacgggtgtggc

SEQ ID NO: 1416258 - DNA, 15 bp, Homo sapiens
ctaacgggtgtggcg

SEQ ID NO: 1416259 - DNA, 15 bp, Homo sapiens
taacgggtgtggcgg

SEQ ID NO: 1416260 - DNA, 15 bp, Homo sapiens
aacgggtgtggcggg

SEQ ID NO: 1416261 - DNA, 15 bp, Homo sapiens
acgggtgtggcggga

SEQ ID NO: 1416262 - DNA, 15 bp, Homo sapiens
cgggtgtggcgggaa

SEQ ID NO: 1416263 - DNA, 15 bp, Homo sapiens
gggtgtggcgggaag

SEQ ID NO: 1416264 - DNA, 15 bp, Homo sapiens
ggtgtggcgggaagt

SEQ ID NO: 1416265 - DNA, 15 bp, Homo sapiens
gtgtggcgggaagtg

SEQ ID NO: 1416266 - DNA, 15 bp, Homo sapiens
tgtggcgggaagtgt

SEQ ID NO: 1416267 - DNA, 15 bp, Homo sapiens
gtggcgggaagtgtg

SEQ ID NO: 1416268 - DNA, 15 bp, Homo sapiens
tggcgggaagtgtgg

SEQ ID NO: 1416269 - DNA, 15 bp, Homo sapiens
ggcgggaagtgtggt

SEQ ID NO: 1416270 - DNA, 15 bp, Homo sapiens
gcgggaagtgtggtg

SEQ ID NO: 1416271 - DNA, 15 bp, Homo sapiens
cgggaagtgtggtgg

SEQ ID NO: 1416272 - DNA, 15 bp, Homo sapiens
gggaagtgtggtggc

SEQ ID NO: 1416273 - DNA, 15 bp, Homo sapiens
ggaagtgtggtggcc

SEQ ID NO: 1416274 - DNA, 15 bp, Homo sapiens
gaagtgtggtggccc

SEQ ID NO: 1416275 - DNA, 15 bp, Homo sapiens
aagtgtggtggcccg

SEQ ID NO: 1416276 - DNA, 15 bp, Homo sapiens
agtgtggtggcccgc

SEQ ID NO: 1416277 - DNA, 15 bp, Homo sapiens
gtgtggtggcccgcc

SEQ ID NO: 1416278 - DNA, 15 bp, Homo sapiens
tgtggtggcccgcca

SEQ ID NO: 1416279 - DNA, 15 bp, Homo sapiens
gtggtggcccgccag

SEQ ID NO: 1416280 - DNA, 15 bp, Homo sapiens
tggtggcccgccagc

SEQ ID NO: 1416281 - DNA, 15 bp, Homo sapiens
ggtggcccgccagca

SEQ ID NO: 1416282 - DNA, 15 bp, Homo sapiens
gtggcccgccagcag

SEQ ID NO: 1416283 - DNA, 15 bp, Homo sapiens
tggcccgccagcagc

SEQ ID NO: 1416284 - DNA, 15 bp, Homo sapiens
ggcccgccagcagct

SEQ ID NO: 1416285 - DNA, 15 bp, Homo sapiens
gcccgccagcagctg

SEQ ID NO: 1416286 - DNA, 15 bp, Homo sapiens
cccgccagcagctgc

SEQ ID NO: 1416287 - DNA, 15 bp, Homo sapiens
ccgccagcagctgcc

SEQ ID NO: 1416288 - DNA, 15 bp, Homo sapiens
cgccagcagctgcca

SEQ ID NO: 1416289 - DNA, 15 bp, Homo sapiens
gccagcagctgccac

SEQ ID NO: 1416290 - DNA, 15 bp, Homo sapiens
ccagcagctgccacg

SEQ ID NO: 1416291 - DNA, 15 bp, Homo sapiens
cagcagctgccacga

SEQ ID NO: 1416292 - DNA, 15 bp, Homo sapiens
agcagctgccacgac

SEQ ID NO: 1416293 - DNA, 15 bp, Homo sapiens
gcagctgccacgacg

SEQ ID NO: 1416294 - DNA, 15 bp, Homo sapiens
cagctgccacgacgc

SEQ ID NO: 1416295 - DNA, 15 bp, Homo sapiens
agctgccacgacgct

SEQ ID NO: 1416296 - DNA, 15 bp, Homo sapiens
gctgccacgacgctc

SEQ ID NO: 1416297 - DNA, 15 bp, Homo sapiens
ctgccacgacgctcg

SEQ ID NO: 1416298 - DNA, 15 bp, Homo sapiens
tgccacgacgctcgc

SEQ ID NO: 1416299 - DNA, 15 bp, Homo sapiens
gccacgacgctcgct

SEQ ID NO: 1416300 - DNA, 15 bp, Homo sapiens
ccacgacgctcgctc

SEQ ID NO: 1416301 - DNA, 15 bp, Homo sapiens
cacgacgctcgctcc

SEQ ID NO: 1416302 - DNA, 15 bp, Homo sapiens
acgacgctcgctcca

SEQ ID NO: 1416303 - DNA, 15 bp, Homo sapiens
cgacgctcgctccac

SEQ ID NO: 1416304 - DNA, 15 bp, Homo sapiens
gacgctcgctccacc

SEQ ID NO: 1416305 - DNA, 15 bp, Homo sapiens
acgctcgctccaccg

SEQ ID NO: 1416306 - DNA, 15 bp, Homo sapiens
cgctcgctccaccga

SEQ ID NO: 1416307 - DNA, 15 bp, Homo sapiens
gctcgctccaccgac

SEQ ID NO: 1416308 - DNA, 15 bp, Homo sapiens
ctcgctccaccgacg

SEQ ID NO: 1416309 - DNA, 15 bp, Homo sapiens
tcgctccaccgacgc

SEQ ID NO: 1416310 - DNA, 15 bp, Homo sapiens
cgctccaccgacgcc

SEQ ID NO: 1416311 - DNA, 15 bp, Homo sapiens
gctccaccgacgccc

SEQ ID NO: 1416312 - DNA, 15 bp, Homo sapiens
ctccaccgacgccca

SEQ ID NO: 1416313 - DNA, 15 bp, Homo sapiens
tccaccgacgcccag

SEQ ID NO: 1416314 - DNA, 15 bp, Homo sapiens
ccaccgacgcccaga

SEQ ID NO: 1416315 - DNA, 15 bp, Homo sapiens
caccgacgcccagag

SEQ ID NO: 1416316 - DNA, 15 bp, Homo sapiens
accgacgcccagagc

SEQ ID NO: 1416317 - DNA, 15 bp, Homo sapiens
ccgacgcccagagct

SEQ ID NO: 1416318 - DNA, 15 bp, Homo sapiens
cgacgcccagagctg

SEQ ID NO: 1416319 - DNA, 15 bp, Homo sapiens
gacgcccagagctgt

SEQ ID NO: 1416320 - DNA, 15 bp, Homo sapiens
acgcccagagctgtg

SEQ ID NO: 1416321 - DNA, 15 bp, Homo sapiens
cgcccagagctgtgg

SEQ ID NO: 1416322 - DNA, 15 bp, Homo sapiens
gcccagagctgtggc

SEQ ID NO: 1416323 - DNA, 15 bp, Homo sapiens
cccagagctgtggcc

SEQ ID NO: 1416324 - DNA, 15 bp, Homo sapiens
ccagagctgtggccg

SEQ ID NO: 1416325 - DNA, 15 bp, Homo sapiens
cagagctgtggccga

SEQ ID NO: 1416326 - DNA, 15 bp, Homo sapiens
agagctgtggccgag

SEQ ID NO: 1416327 - DNA, 15 bp, Homo sapiens
gagctgtggccgagg

SEQ ID NO: 1416328 - DNA, 15 bp, Homo sapiens
agctgtggccgaggc

SEQ ID NO: 1416329 - DNA, 15 bp, Homo sapiens
gctgtggccgaggcc

SEQ ID NO: 1416330 - DNA, 15 bp, Homo sapiens
ctgtggccgaggccg

SEQ ID NO: 1416331 - DNA, 15 bp, Homo sapiens
tgtggccgaggccgg

SEQ ID NO: 1416332 - DNA, 15 bp, Homo sapiens
gtggccgaggccggg

SEQ ID NO: 1416333 - DNA, 15 bp, Homo sapiens
tggccgaggccgggg

SEQ ID NO: 1416334 - DNA, 15 bp, Homo sapiens
ggccgaggccggggg

SEQ ID NO: 1416335 - DNA, 15 bp, Homo sapiens
gccgaggccgggggc

SEQ ID NO: 1416336 - DNA, 15 bp, Homo sapiens
ccgaggccgggggct

SEQ ID NO: 1416337 - DNA, 15 bp, Homo sapiens
cgaggccgggggctg

SEQ ID NO: 1416338 - DNA, 15 bp, Homo sapiens
gaggccgggggctgg

SEQ ID NO: 1416339 - DNA, 15 bp, Homo sapiens
aggccgggggctggc

SEQ ID NO: 1416340 - DNA, 15 bp, Homo sapiens
ggccgggggctggca

SEQ ID NO: 1416341 - DNA, 15 bp, Homo sapiens
gccgggggctggcac

SEQ ID NO: 1416342 - DNA, 15 bp, Homo sapiens
ccgggggctggcacc

SEQ ID NO: 1416343 - DNA, 15 bp, Homo sapiens
cgggggctggcaccc

SEQ ID NO: 1416344 - DNA, 15 bp, Homo sapiens
gggggctggcacccg

SEQ ID NO: 1416345 - DNA, 15 bp, Homo sapiens
ggggctggcacccgc

SEQ ID NO: 1416346 - DNA, 15 bp, Homo sapiens
gggctggcacccgct

SEQ ID NO: 1416347 - DNA, 15 bp, Homo sapiens
ggctggcacccgctg

SEQ ID NO: 1416348 - DNA, 15 bp, Homo sapiens
gctggcacccgctgg

SEQ ID NO: 1416349 - DNA, 15 bp, Homo sapiens
ctggcacccgctggg

SEQ ID NO: 1416350 - DNA, 15 bp, Homo sapiens
tggcacccgctgggc

SEQ ID NO: 1416351 - DNA, 15 bp, Homo sapiens
ggcacccgctgggcc

SEQ ID NO: 1416352 - DNA, 15 bp, Homo sapiens
gcacccgctgggccg

SEQ ID NO: 1416353 - DNA, 15 bp, Homo sapiens
cacccgctgggccgc

SEQ ID NO: 1416354 - DNA, 15 bp, Homo sapiens
acccgctgggccgcc

SEQ ID NO: 1416355 - DNA, 15 bp, Homo sapiens
cccgctgggccgcca

SEQ ID NO: 1416356 - DNA, 15 bp, Homo sapiens
ccgctgggccgccac

SEQ ID NO: 1416357 - DNA, 15 bp, Homo sapiens
cgctgggccgccact

SEQ ID NO: 1416358 - DNA, 15 bp, Homo sapiens
gctgggccgccactc

SEQ ID NO: 1416359 - DNA, 15 bp, Homo sapiens
ctgggccgccactct

SEQ ID NO: 1416360 - DNA, 15 bp, Homo sapiens
tgggccgccactctc

SEQ ID NO: 1416361 - DNA, 15 bp, Homo sapiens
gggccgccactctcg

SEQ ID NO: 1416362 - DNA, 15 bp, Homo sapiens
ggccgccactctcgg

SEQ ID NO: 1416363 - DNA, 15 bp, Homo sapiens
gccgccactctcggg

SEQ ID NO: 1416364 - DNA, 15 bp, Homo sapiens
ccgccactctcgggg

SEQ ID NO: 1416365 - DNA, 15 bp, Homo sapiens
cgccactctcgggga

SEQ ID NO: 1416366 - DNA, 15 bp, Homo sapiens
gccactctcggggat

SEQ ID NO: 1416367 - DNA, 15 bp, Homo sapiens
ccactctcggggatt

SEQ ID NO: 1416368 - DNA, 15 bp, Homo sapiens
cactctcggggattt

SEQ ID NO: 1416369 - DNA, 15 bp, Homo sapiens
actctcggggatttt

SEQ ID NO: 1416370 - DNA, 15 bp, Homo sapiens
ctctcggggattttg

SEQ ID NO: 1416371 - DNA, 15 bp, Homo sapiens
tctcggggattttgg

SEQ ID NO: 1416372 - DNA, 15 bp, Homo sapiens
ctcggggattttggt

SEQ ID NO: 1416373 - DNA, 15 bp, Homo sapiens
tcggggattttggtg

SEQ ID NO: 1416374 - DNA, 15 bp, Homo sapiens
cggggattttggtgg

SEQ ID NO: 1416375 - DNA, 15 bp, Homo sapiens
ggggattttggtggc

SEQ ID NO: 1416376 - DNA, 15 bp, Homo sapiens
gggattttggtggca

SEQ ID NO: 1416377 - DNA, 15 bp, Homo sapiens
ggattttggtggcaa

SEQ ID NO: 1416378 - DNA, 15 bp, Homo sapiens
gattttggtggcaaa

SEQ ID NO: 1416379 - DNA, 15 bp, Homo sapiens
attttggtggcaaag

SEQ ID NO: 1416380 - DNA, 15 bp, Homo sapiens
ttttggtggcaaagc

SEQ ID NO: 1416381 - DNA, 15 bp, Homo sapiens
tttggtggcaaagcg

SEQ ID NO: 1416382 - DNA, 15 bp, Homo sapiens
ttggtggcaaagcgg

SEQ ID NO: 1416383 - DNA, 15 bp, Homo sapiens
tggtggcaaagcgga

SEQ ID NO: 1416384 - DNA, 15 bp, Homo sapiens
ggtggcaaagcggag

SEQ ID NO: 1416385 - DNA, 15 bp, Homo sapiens
gtggcaaagcggagg

SEQ ID NO: 1416386 - DNA, 15 bp, Homo sapiens
tggcaaagcggaggt

SEQ ID NO: 1416387 - DNA, 15 bp, Homo sapiens
ggcaaagcggaggtc

SEQ ID NO: 1416388 - DNA, 15 bp, Homo sapiens
gcaaagcggaggtcc

SEQ ID NO: 1416389 - DNA, 15 bp, Homo sapiens
caaagcggaggtccc

SEQ ID NO: 1416390 - DNA, 15 bp, Homo sapiens
aaagcggaggtcccg

SEQ ID NO: 1416391 - DNA, 15 bp, Homo sapiens
aagcggaggtcccgc

SEQ ID NO: 1416392 - DNA, 15 bp, Homo sapiens
agcggaggtcccgcc

SEQ ID NO: 1416393 - DNA, 15 bp, Homo sapiens
gcggaggtcccgccg

SEQ ID NO: 1416394 - DNA, 15 bp, Homo sapiens
cggaggtcccgccga

SEQ ID NO: 1416395 - DNA, 15 bp, Homo sapiens
ggaggtcccgccgag

SEQ ID NO: 1416396 - DNA, 15 bp, Homo sapiens
gaggtcccgccgagg

SEQ ID NO: 1416397 - DNA, 15 bp, Homo sapiens
aggtcccgccgaggc

SEQ ID NO: 1416398 - DNA, 15 bp, Homo sapiens
ggtcccgccgaggct

SEQ ID NO: 1416399 - DNA, 15 bp, Homo sapiens
gtcccgccgaggctg

SEQ ID NO: 1416400 - DNA, 15 bp, Homo sapiens
tcccgccgaggctgg

SEQ ID NO: 1416401 - DNA, 15 bp, Homo sapiens
cccgccgaggctggc

SEQ ID NO: 1416402 - DNA, 15 bp, Homo sapiens
ccgccgaggctggcg

SEQ ID NO: 1416403 - DNA, 15 bp, Homo sapiens
tctgtcctttagaag

SEQ ID NO: 1416404 - DNA, 15 bp, Homo sapiens
ctgtcctttagaaga

SEQ ID NO: 1416405 - DNA, 15 bp, Homo sapiens
tgtcctttagaagag

SEQ ID NO: 1416406 - DNA, 15 bp, Homo sapiens
gtcctttagaagaga

SEQ ID NO: 1416407 - DNA, 15 bp, Homo sapiens
tcctttagaagagaa

SEQ ID NO: 1416408 - DNA, 15 bp, Homo sapiens
cctttagaagagaat

SEQ ID NO: 1416409 - DNA, 15 bp, Homo sapiens
ctttagaagagaata

SEQ ID NO: 1416410 - DNA, 15 bp, Homo sapiens
tttagaagagaatag

SEQ ID NO: 1416411 - DNA, 15 bp, Homo sapiens
ttagaagagaatagg

SEQ ID NO: 1416412 - DNA, 15 bp, Homo sapiens
tagaagagaataggt

SEQ ID NO: 1416413 - DNA, 15 bp, Homo sapiens
agaagagaataggtg

SEQ ID NO: 1416414 - DNA, 15 bp, Homo sapiens
gaagagaataggtga

SEQ ID NO: 1416415 - DNA, 15 bp, Homo sapiens
aagagaataggtgaa

SEQ ID NO: 1416416 - DNA, 15 bp, Homo sapiens
agagaataggtgaaa

SEQ ID NO: 1416417 - DNA, 15 bp, Homo sapiens
gagaataggtgaaaa

SEQ ID NO: 1416418 - DNA, 15 bp, Homo sapiens
agaataggtgaaaag

SEQ ID NO: 1416419 - DNA, 15 bp, Homo sapiens
gaataggtgaaaagt

SEQ ID NO: 1416420 - DNA, 15 bp, Homo sapiens
aataggtgaaaagtt

SEQ ID NO: 1416421 - DNA, 15 bp, Homo sapiens
ataggtgaaaagttt

SEQ ID NO: 1416422 - DNA, 15 bp, Homo sapiens
taggtgaaaagttta

SEQ ID NO: 1416423 - DNA, 15 bp, Homo sapiens
aggtgaaaagtttaa

SEQ ID NO: 1416424 - DNA, 15 bp, Homo sapiens
ggtgaaaagtttaat

SEQ ID NO: 1416425 - DNA, 15 bp, Homo sapiens
gtgaaaagtttaata

SEQ ID NO: 1416426 - DNA, 15 bp, Homo sapiens
tgaaaagtttaataa

SEQ ID NO: 1416427 - DNA, 15 bp, Homo sapiens
gaaaagtttaataaa

SEQ ID NO: 1416428 - DNA, 15 bp, Homo sapiens
aaaagtttaataaag

SEQ ID NO: 1416429 - DNA, 15 bp, Homo sapiens
aaagtttaataaaga

SEQ ID NO: 1416430 - DNA, 15 bp, Homo sapiens
aagtttaataaagaa

SEQ ID NO: 1416431 - DNA, 15 bp, Homo sapiens
agtttaataaagaaa

SEQ ID NO: 1416432 - DNA, 15 bp, Homo sapiens
gtttaataaagaaat

SEQ ID NO: 1416433 - DNA, 15 bp, Homo sapiens
tttaataaagaaatt

SEQ ID NO: 1416434 - DNA, 15 bp, Homo sapiens
ttaataaagaaatta

SEQ ID NO: 1416435 - DNA, 15 bp, Homo sapiens
taataaagaaattaa

SEQ ID NO: 1416436 - DNA, 15 bp, Homo sapiens
aataaagaaattaag

SEQ ID NO: 1416437 - DNA, 15 bp, Homo sapiens
ataaagaaattaagc

SEQ ID NO: 1416438 - DNA, 15 bp, Homo sapiens
taaagaaattaagcg

SEQ ID NO: 1416439 - DNA, 15 bp, Homo sapiens
aaagaaattaagcga

SEQ ID NO: 1416440 - DNA, 15 bp, Homo sapiens
aagaaattaagcgat

SEQ ID NO: 1416441 - DNA, 15 bp, Homo sapiens
agaaattaagcgatg

SEQ ID NO: 1416442 - DNA, 15 bp, Homo sapiens
gaaattaagcgatgt

SEQ ID NO: 1416443 - DNA, 15 bp, Homo sapiens
aaattaagcgatgtg

SEQ ID NO: 1416444 - DNA, 15 bp, Homo sapiens
aattaagcgatgtgg

SEQ ID NO: 1416445 - DNA, 15 bp, Homo sapiens
attaagcgatgtgga

SEQ ID NO: 1416446 - DNA, 15 bp, Homo sapiens
ttaagcgatgtggaa

SEQ ID NO: 1416447 - DNA, 15 bp, Homo sapiens
taagcgatgtggaag

SEQ ID NO: 1416448 - DNA, 15 bp, Homo sapiens
aagcgatgtggaagt

SEQ ID NO: 1416449 - DNA, 15 bp, Homo sapiens
agcgatgtggaagtc

SEQ ID NO: 1416450 - DNA, 15 bp, Homo sapiens
gcgatgtggaagtcg

SEQ ID NO: 1416451 - DNA, 15 bp, Homo sapiens
cgatgtggaagtcgt

SEQ ID NO: 1416452 - DNA, 15 bp, Homo sapiens
gatgtggaagtcgtt

SEQ ID NO: 1416453 - DNA, 15 bp, Homo sapiens
atgtggaagtcgttc

SEQ ID NO: 1416454 - DNA, 15 bp, Homo sapiens
tgtggaagtcgttcc

SEQ ID NO: 1416455 - DNA, 15 bp, Homo sapiens
gtggaagtcgttccc

SEQ ID NO: 1416456 - DNA, 15 bp, Homo sapiens
tggaagtcgttcccg

SEQ ID NO: 1416457 - DNA, 15 bp, Homo sapiens
ggaagtcgttcccgc

SEQ ID NO: 1416458 - DNA, 15 bp, Homo sapiens
gaagtcgttcccgct

SEQ ID NO: 1416459 - DNA, 15 bp, Homo sapiens
aagtcgttcccgctg

SEQ ID NO: 1416460 - DNA, 15 bp, Homo sapiens
agtcgttcccgctgc

SEQ ID NO: 1416461 - DNA, 15 bp, Homo sapiens
gtcgttcccgctgct

SEQ ID NO: 1416462 - DNA, 15 bp, Homo sapiens
tcgttcccgctgctt

SEQ ID NO: 1416463 - DNA, 15 bp, Homo sapiens
cgttcccgctgcttg

SEQ ID NO: 1416464 - DNA, 15 bp, Homo sapiens
gttcccgctgcttgc

SEQ ID NO: 1416465 - DNA, 15 bp, Homo sapiens
ttcccgctgcttgca

SEQ ID NO: 1416466 - DNA, 15 bp, Homo sapiens
tcccgctgcttgcag

SEQ ID NO: 1416467 - DNA, 15 bp, Homo sapiens
cccgctgcttgcaga

SEQ ID NO: 1416468 - DNA, 15 bp, Homo sapiens
ccgctgcttgcagag

SEQ ID NO: 1416469 - DNA, 15 bp, Homo sapiens
cgctgcttgcagagg

SEQ ID NO: 1416470 - DNA, 15 bp, Homo sapiens
gctgcttgcagaggg

SEQ ID NO: 1416471 - DNA, 15 bp, Homo sapiens
ctgcttgcagagggt

SEQ ID NO: 1416472 - DNA, 15 bp, Homo sapiens
tgcttgcagagggtg

SEQ ID NO: 1416473 - DNA, 15 bp, Homo sapiens
gcttgcagagggtgg

SEQ ID NO: 1416474 - DNA, 15 bp, Homo sapiens
cttgcagagggtggg

SEQ ID NO: 1416475 - DNA, 15 bp, Homo sapiens
ttgcagagggtgggg

SEQ ID NO: 1416476 - DNA, 15 bp, Homo sapiens
tgcagagggtgggga

SEQ ID NO: 1416477 - DNA, 15 bp, Homo sapiens
gcagagggtggggag

SEQ ID NO: 1416478 - DNA, 15 bp, Homo sapiens
cagagggtggggagg

SEQ ID NO: 1416479 - DNA, 15 bp, Homo sapiens
agagggtggggaggc

SEQ ID NO: 1416480 - DNA, 15 bp, Homo sapiens
gagggtggggaggcg

SEQ ID NO: 1416481 - DNA, 15 bp, Homo sapiens
agggtggggaggcgg

SEQ ID NO: 1416482 - DNA, 15 bp, Homo sapiens
gtggggaggcgggcc

SEQ ID NO: 1416483 - DNA, 15 bp, Homo sapiens
tggggaggcgggcct

SEQ ID NO: 1416484 - DNA, 15 bp, Homo sapiens
ggggaggcgggcctg

SEQ ID NO: 1416485 - DNA, 15 bp, Homo sapiens
gggaggcgggcctgg

SEQ ID NO: 1416486 - DNA, 15 bp, Homo sapiens
ggaggcgggcctggg

SEQ ID NO: 1416487 - DNA, 15 bp, Homo sapiens
gaggcgggcctgggc

SEQ ID NO: 1416488 - DNA, 15 bp, Homo sapiens
aggcgggcctgggca

SEQ ID NO: 1416489 - DNA, 15 bp, Homo sapiens
ggcgggcctgggcaa

SEQ ID NO: 1416490 - DNA, 15 bp, Homo sapiens
gcgggcctgggcaat

SEQ ID NO: 1416491 - DNA, 15 bp, Homo sapiens
cgggcctgggcaatt

SEQ ID NO: 1416492 - DNA, 15 bp, Homo sapiens
gggcctgggcaattt

SEQ ID NO: 1416493 - DNA, 15 bp, Homo sapiens
ggcctgggcaatttc

SEQ ID NO: 1416494 - DNA, 15 bp, Homo sapiens
gcctgggcaatttcg

SEQ ID NO: 1416495 - DNA, 15 bp, Homo sapiens
cctgggcaatttcgg

SEQ ID NO: 1416496 - DNA, 15 bp, Homo sapiens
ctgggcaatttcgga

SEQ ID NO: 1416497 - DNA, 15 bp, Homo sapiens
tgggcaatttcggaa

SEQ ID NO: 1416498 - DNA, 15 bp, Homo sapiens
gggcaatttcggaac

SEQ ID NO: 1416499 - DNA, 15 bp, Homo sapiens
ggcaatttcggaact

SEQ ID NO: 1416500 - DNA, 15 bp, Homo sapiens
gcaatttcggaacta

SEQ ID NO: 1416501 - DNA, 15 bp, Homo sapiens
caatttcggaactag

SEQ ID NO: 1416502 - DNA, 15 bp, Homo sapiens
aatttcggaactagg

SEQ ID NO: 1416503 - DNA, 15 bp, Homo sapiens
atttcggaactagga

SEQ ID NO: 1416504 - DNA, 15 bp, Homo sapiens
tttcggaactaggag

SEQ ID NO: 1416505 - DNA, 15 bp, Homo sapiens
ttcggaactaggaga

SEQ ID NO: 1416506 - DNA, 15 bp, Homo sapiens
tcggaactaggagag

SEQ ID NO: 1416507 - DNA, 15 bp, Homo sapiens
cggaactaggagaga

SEQ ID NO: 1416508 - DNA, 15 bp, Homo sapiens
ggaactaggagagac

SEQ ID NO: 1416509 - DNA, 15 bp, Homo sapiens
gaactaggagagacc

SEQ ID NO: 1416510 - DNA, 15 bp, Homo sapiens
aactaggagagacca

SEQ ID NO: 1416511 - DNA, 15 bp, Homo sapiens
actaggagagaccac

SEQ ID NO: 1416512 - DNA, 15 bp, Homo sapiens
ctaggagagaccacg

SEQ ID NO: 1416513 - DNA, 15 bp, Homo sapiens
taggagagaccacgt

SEQ ID NO: 1416514 - DNA, 15 bp, Homo sapiens
aggagagaccacgtc

SEQ ID NO: 1416515 - DNA, 15 bp, Homo sapiens
ggagagaccacgtcg

SEQ ID NO: 1416516 - DNA, 15 bp, Homo sapiens
gagagaccacgtcgg

SEQ ID NO: 1416517 - DNA, 15 bp, Homo sapiens
agagaccacgtcggc

SEQ ID NO: 1416518 - DNA, 15 bp, Homo sapiens
gagaccacgtcggca

SEQ ID NO: 1416519 - DNA, 15 bp, Homo sapiens
agaccacgtcggcaa

SEQ ID NO: 1416520 - DNA, 15 bp, Homo sapiens
gaccacgtcggcaaa

SEQ ID NO: 1416521 - DNA, 15 bp, Homo sapiens
accacgtcggcaaag

SEQ ID NO: 1416522 - DNA, 15 bp, Homo sapiens
ccacgtcggcaaagc

SEQ ID NO: 1416523 - DNA, 15 bp, Homo sapiens
cacgtcggcaaagcc

SEQ ID NO: 1416524 - DNA, 15 bp, Homo sapiens
acgtcggcaaagcct

SEQ ID NO: 1416525 - DNA, 15 bp, Homo sapiens
cgtcggcaaagcctg

SEQ ID NO: 1416526 - DNA, 15 bp, Homo sapiens
gtcggcaaagcctgt

SEQ ID NO: 1416527 - DNA, 15 bp, Homo sapiens
tcggcaaagcctgtg

SEQ ID NO: 1416528 - DNA, 15 bp, Homo sapiens
cggcaaagcctgtgg

SEQ ID NO: 1416529 - DNA, 15 bp, Homo sapiens
ggcaaagcctgtggt

SEQ ID NO: 1416530 - DNA, 15 bp, Homo sapiens
gcaaagcctgtggtc

SEQ ID NO: 1416531 - DNA, 15 bp, Homo sapiens
caaagcctgtggtcc

SEQ ID NO: 1416532 - DNA, 15 bp, Homo sapiens
aaagcctgtggtccc

SEQ ID NO: 1416533 - DNA, 15 bp, Homo sapiens
aagcctgtggtcccg

SEQ ID NO: 1416534 - DNA, 15 bp, Homo sapiens
agcctgtggtcccga

SEQ ID NO: 1416535 - DNA, 15 bp, Homo sapiens
gcctgtggtcccgaa

SEQ ID NO: 1416536 - DNA, 15 bp, Homo sapiens
cctgtggtcccgaac

SEQ ID NO: 1416537 - DNA, 15 bp, Homo sapiens
ctgtggtcccgaaca

SEQ ID NO: 1416538 - DNA, 15 bp, Homo sapiens
tgtggtcccgaacaa

SEQ ID NO: 1416539 - DNA, 15 bp, Homo sapiens
gtggtcccgaacaag

SEQ ID NO: 1416540 - DNA, 15 bp, Homo sapiens
tggtcccgaacaagg

SEQ ID NO: 1416541 - DNA, 15 bp, Homo sapiens
ggtcccgaacaaggg

SEQ ID NO: 1416542 - DNA, 15 bp, Homo sapiens
gtcccgaacaagggc

SEQ ID NO: 1416543 - DNA, 15 bp, Homo sapiens
tcccgaacaagggcc

SEQ ID NO: 1416544 - DNA, 15 bp, Homo sapiens
cccgaacaagggcca

SEQ ID NO: 1416545 - DNA, 15 bp, Homo sapiens
ccgaacaagggccat

SEQ ID NO: 1416546 - DNA, 15 bp, Homo sapiens
cgaacaagggccatg

SEQ ID NO: 1416547 - DNA, 15 bp, Homo sapiens
gaacaagggccatgg

SEQ ID NO: 1416548 - DNA, 15 bp, Homo sapiens
aacaagggccatgga

SEQ ID NO: 1416549 - DNA, 15 bp, Homo sapiens
acaagggccatggat

SEQ ID NO: 1416550 - DNA, 15 bp, Homo sapiens
caagggccatggatt

SEQ ID NO: 1416551 - DNA, 15 bp, Homo sapiens
aagggccatggattt

SEQ ID NO: 1416552 - DNA, 15 bp, Homo sapiens
agggccatggatttc

SEQ ID NO: 1416553 - DNA, 15 bp, Homo sapiens
gggccatggatttcc

SEQ ID NO: 1416554 - DNA, 15 bp, Homo sapiens
ggccatggatttccc

SEQ ID NO: 1416555 - DNA, 15 bp, Homo sapiens
gccatggatttccca

SEQ ID NO: 1416556 - DNA, 15 bp, Homo sapiens
ccatggatttcccat

SEQ ID NO: 1416557 - DNA, 15 bp, Homo sapiens
catggatttcccatt

SEQ ID NO: 1416558 - DNA, 15 bp, Homo sapiens
atggatttcccattt

SEQ ID NO: 1416559 - DNA, 15 bp, Homo sapiens
tggatttcccatttc

SEQ ID NO: 1416560 - DNA, 15 bp, Homo sapiens
ggatttcccatttct

SEQ ID NO: 1416561 - DNA, 15 bp, Homo sapiens
gatttcccatttctc

SEQ ID NO: 1416562 - DNA, 15 bp, Homo sapiens
atttcccatttctca

SEQ ID NO: 1416563 - DNA, 15 bp, Homo sapiens
tttcccatttctcag

SEQ ID NO: 1416564 - DNA, 15 bp, Homo sapiens
ttcccatttctcaga

SEQ ID NO: 1416565 - DNA, 15 bp, Homo sapiens
tcccatttctcagat

SEQ ID NO: 1416566 - DNA, 15 bp, Homo sapiens
cccatttctcagatc

SEQ ID NO: 1416567 - DNA, 15 bp, Homo sapiens
ccatttctcagatcc

SEQ ID NO: 1416568 - DNA, 15 bp, Homo sapiens
catttctcagatccc

SEQ ID NO: 1416569 - DNA, 15 bp, Homo sapiens
atttctcagatcccg

SEQ ID NO: 1416570 - DNA, 15 bp, Homo sapiens
tttctcagatcccgg

SEQ ID NO: 1416571 - DNA, 15 bp, Homo sapiens
ttctcagatcccggc

SEQ ID NO: 1416572 - DNA, 15 bp, Homo sapiens
tctcagatcccggct

SEQ ID NO: 1416573 - DNA, 15 bp, Homo sapiens
ctcagatcccggctg

SEQ ID NO: 1416574 - DNA, 15 bp, Homo sapiens
tcagatcccggctgc

SEQ ID NO: 1416575 - DNA, 15 bp, Homo sapiens
cagatcccggctgcc

SEQ ID NO: 1416576 - DNA, 15 bp, Homo sapiens
agatcccggctgccc

SEQ ID NO: 1416577 - DNA, 15 bp, Homo sapiens
gatcccggctgcccg

SEQ ID NO: 1416578 - DNA, 15 bp, Homo sapiens
atcccggctgcccga

SEQ ID NO: 1416579 - DNA, 15 bp, Homo sapiens
tcccggctgcccgac

SEQ ID NO: 1416580 - DNA, 15 bp, Homo sapiens
cccggctgcccgact

SEQ ID NO: 1416581 - DNA, 15 bp, Homo sapiens
ccggctgcccgactt

SEQ ID NO: 1416582 - DNA, 15 bp, Homo sapiens
cggctgcccgacttc

SEQ ID NO: 1416583 - DNA, 15 bp, Homo sapiens
ggctgcccgacttca

SEQ ID NO: 1416584 - DNA, 15 bp, Homo sapiens
gctgcccgacttcat

SEQ ID NO: 1416585 - DNA, 15 bp, Homo sapiens
ctgcccgacttcatt

SEQ ID NO: 1416586 - DNA, 15 bp, Homo sapiens
tgcccgacttcattc

SEQ ID NO: 1416587 - DNA, 15 bp, Homo sapiens
gcccgacttcattct

SEQ ID NO: 1416588 - DNA, 15 bp, Homo sapiens
cccgacttcattctt

SEQ ID NO: 1416589 - DNA, 15 bp, Homo sapiens
ccgacttcattcttg

SEQ ID NO: 1416590 - DNA, 15 bp, Homo sapiens
cgacttcattcttgt

SEQ ID NO: 1416591 - DNA, 15 bp, Homo sapiens
gacttcattcttgtt

SEQ ID NO: 1416592 - DNA, 15 bp, Homo sapiens
acttcattcttgttt

SEQ ID NO: 1416593 - DNA, 15 bp, Homo sapiens
cttcattcttgtttc

SEQ ID NO: 1416594 - DNA, 15 bp, Homo sapiens
ttcattcttgtttct

SEQ ID NO: 1416595 - DNA, 15 bp, Homo sapiens
tcattcttgtttctt

SEQ ID NO: 1416596 - DNA, 15 bp, Homo sapiens
cattcttgtttcttt

SEQ ID NO: 1416597 - DNA, 15 bp, Homo sapiens
attcttgtttctttc

SEQ ID NO: 1416598 - DNA, 15 bp, Homo sapiens
ttcttgtttctttca

SEQ ID NO: 1416599 - DNA, 15 bp, Homo sapiens
tcttgtttctttcag

SEQ ID NO: 1416600 - DNA, 15 bp, Homo sapiens
cttgtttctttcagc

SEQ ID NO: 1416601 - DNA, 15 bp, Homo sapiens
ttgtttctttcagca

SEQ ID NO: 1416602 - DNA, 15 bp, Homo sapiens
tgtttctttcagcac

SEQ ID NO: 1416603 - DNA, 15 bp, Homo sapiens
gtttctttcagcaca

SEQ ID NO: 1416604 - DNA, 15 bp, Homo sapiens
tttctttcagcacaa

SEQ ID NO: 1416605 - DNA, 15 bp, Homo sapiens
ttctttcagcacaag

SEQ ID NO: 1416606 - DNA, 15 bp, Homo sapiens
tctttcagcacaagc

SEQ ID NO: 1416607 - DNA, 15 bp, Homo sapiens
ctttcagcacaagcc

SEQ ID NO: 1416608 - DNA, 15 bp, Homo sapiens
tttcagcacaagcca

SEQ ID NO: 1416609 - DNA, 15 bp, Homo sapiens
ttcagcacaagccat

SEQ ID NO: 1416610 - DNA, 15 bp, Homo sapiens
tcagcacaagccatc

SEQ ID NO: 1416611 - DNA, 15 bp, Homo sapiens
cagcacaagccatcc

SEQ ID NO: 1416612 - DNA, 15 bp, Homo sapiens
agcacaagccatcct

SEQ ID NO: 1416613 - DNA, 15 bp, Homo sapiens
gcacaagccatcctc

SEQ ID NO: 1416614 - DNA, 15 bp, Homo sapiens
cacaagccatcctcc

SEQ ID NO: 1416615 - DNA, 15 bp, Homo sapiens
acaagccatcctccc

SEQ ID NO: 1416616 - DNA, 15 bp, Homo sapiens
caagccatcctccct

SEQ ID NO: 1416617 - DNA, 15 bp, Homo sapiens
aagccatcctccctt

SEQ ID NO: 1416618 - DNA, 15 bp, Homo sapiens
agccatcctcccttc

SEQ ID NO: 1416619 - DNA, 15 bp, Homo sapiens
gccatcctcccttct

SEQ ID NO: 1416620 - DNA, 15 bp, Homo sapiens
ccatcctcccttctc

SEQ ID NO: 1416621 - DNA, 15 bp, Homo sapiens
catcctcccttctcc

SEQ ID NO: 1416622 - DNA, 15 bp, Homo sapiens
atcctcccttctccc

SEQ ID NO: 1416623 - DNA, 15 bp, Homo sapiens
tcctcccttctccct

SEQ ID NO: 1416624 - DNA, 15 bp, Homo sapiens
cctcccttctccctc

SEQ ID NO: 1416625 - DNA, 15 bp, Homo sapiens
ctcccttctccctcc

SEQ ID NO: 1416626 - DNA, 15 bp, Homo sapiens
tcccttctccctccc

SEQ ID NO: 1416627 - DNA, 15 bp, Homo sapiens
cccttctccctccct

SEQ ID NO: 1416628 - DNA, 15 bp, Homo sapiens
ccttctccctccctc

SEQ ID NO: 1416629 - DNA, 15 bp, Homo sapiens
cttctccctccctcc

SEQ ID NO: 1416630 - DNA, 15 bp, Homo sapiens
ttctccctccctcca

SEQ ID NO: 1416631 - DNA, 15 bp, Homo sapiens
tctccctccctccac

SEQ ID NO: 1416632 - DNA, 15 bp, Homo sapiens
ctccctccctccacg

SEQ ID NO: 1416633 - DNA, 15 bp, Homo sapiens
tccctccctccacgt

SEQ ID NO: 1416634 - DNA, 15 bp, Homo sapiens
ccctccctccacgtc

SEQ ID NO: 1416635 - DNA, 15 bp, Homo sapiens
cctccctccacgtct

SEQ ID NO: 1416636 - DNA, 15 bp, Homo sapiens
ctccctccacgtctc

SEQ ID NO: 1416637 - DNA, 15 bp, Homo sapiens
tccctccacgtctct

SEQ ID NO: 1416638 - DNA, 15 bp, Homo sapiens
ccctccacgtctctt

SEQ ID NO: 1416639 - DNA, 15 bp, Homo sapiens
cctccacgtctcttg

SEQ ID NO: 1416640 - DNA, 15 bp, Homo sapiens
ctccacgtctcttgg

SEQ ID NO: 1416641 - DNA, 15 bp, Homo sapiens
tccacgtctcttggc

SEQ ID NO: 1416642 - DNA, 15 bp, Homo sapiens
ccacgtctcttggca

SEQ ID NO: 1416643 - DNA, 15 bp, Homo sapiens
cacgtctcttggcag

SEQ ID NO: 1416644 - DNA, 15 bp, Homo sapiens
acgtctcttggcaga

SEQ ID NO: 1416645 - DNA, 15 bp, Homo sapiens
cgtctcttggcagag

SEQ ID NO: 1416646 - DNA, 15 bp, Homo sapiens
gtctcttggcagaga

SEQ ID NO: 1416647 - DNA, 15 bp, Homo sapiens
tctcttggcagagac

SEQ ID NO: 1416648 - DNA, 15 bp, Homo sapiens
ctcttggcagagaca

SEQ ID NO: 1416649 - DNA, 15 bp, Homo sapiens
tcttggcagagacag

SEQ ID NO: 1416650 - DNA, 15 bp, Homo sapiens
cttggcagagacaga

SEQ ID NO: 1416651 - DNA, 15 bp, Homo sapiens
ttggcagagacagaa

SEQ ID NO: 1416652 - DNA, 15 bp, Homo sapiens
tggcagagacagaaa

SEQ ID NO: 1416653 - DNA, 15 bp, Homo sapiens
ggcagagacagaaag

SEQ ID NO: 1416654 - DNA, 15 bp, Homo sapiens
gcagagacagaaagg

SEQ ID NO: 1416655 - DNA, 15 bp, Homo sapiens
cagagacagaaaggg

SEQ ID NO: 1416656 - DNA, 15 bp, Homo sapiens
agagacagaaaggga

SEQ ID NO: 1416657 - DNA, 15 bp, Homo sapiens
gagacagaaagggac

SEQ ID NO: 1416658 - DNA, 15 bp, Homo sapiens
agacagaaagggaca

SEQ ID NO: 1416659 - DNA, 15 bp, Homo sapiens
gacagaaagggacac

SEQ ID NO: 1416660 - DNA, 15 bp, Homo sapiens
acagaaagggacacc

SEQ ID NO: 1416661 - DNA, 15 bp, Homo sapiens
cagaaagggacaccg

SEQ ID NO: 1416662 - DNA, 15 bp, Homo sapiens
agaaagggacaccgc

SEQ ID NO: 1416663 - DNA, 15 bp, Homo sapiens
gaaagggacaccgct

SEQ ID NO: 1416664 - DNA, 15 bp, Homo sapiens
aaagggacaccgctc

SEQ ID NO: 1416665 - DNA, 15 bp, Homo sapiens
aagggacaccgctct

SEQ ID NO: 1416666 - DNA, 15 bp, Homo sapiens
agggacaccgctctg

SEQ ID NO: 1416667 - DNA, 15 bp, Homo sapiens
gggacaccgctctgc

SEQ ID NO: 1416668 - DNA, 15 bp, Homo sapiens
ggacaccgctctgcc

SEQ ID NO: 1416669 - DNA, 15 bp, Homo sapiens
gacaccgctctgccc

SEQ ID NO: 1416670 - DNA, 15 bp, Homo sapiens
acaccgctctgcccg

SEQ ID NO: 1416671 - DNA, 15 bp, Homo sapiens
caccgctctgcccgc

SEQ ID NO: 1416672 - DNA, 15 bp, Homo sapiens
accgctctgcccgcg

SEQ ID NO: 1416673 - DNA, 15 bp, Homo sapiens
ccgctctgcccgcgt

SEQ ID NO: 1416674 - DNA, 15 bp, Homo sapiens
cgctctgcccgcgtc

SEQ ID NO: 1416675 - DNA, 15 bp, Homo sapiens
gctctgcccgcgtcc

SEQ ID NO: 1416676 - DNA, 15 bp, Homo sapiens
ctctgcccgcgtcca

SEQ ID NO: 1416677 - DNA, 15 bp, Homo sapiens
tctgcccgcgtccag

SEQ ID NO: 1416678 - DNA, 15 bp, Homo sapiens
ctgcccgcgtccagc

SEQ ID NO: 1416679 - DNA, 15 bp, Homo sapiens
tgcccgcgtccagcg

SEQ ID NO: 1416680 - DNA, 15 bp, Homo sapiens
gcccgcgtccagcgc

SEQ ID NO: 1416681 - DNA, 15 bp, Homo sapiens
cccgcgtccagcgcg

SEQ ID NO: 1416682 - DNA, 15 bp, Homo sapiens
ccgcgtccagcgcga

SEQ ID NO: 1416683 - DNA, 15 bp, Homo sapiens
cgcgtccagcgcgaa

SEQ ID NO: 1416684 - DNA, 15 bp, Homo sapiens
gcgtccagcgcgaag

SEQ ID NO: 1416685 - DNA, 15 bp, Homo sapiens
cgtccagcgcgaagg

SEQ ID NO: 1416686 - DNA, 15 bp, Homo sapiens
gtccagcgcgaagga

SEQ ID NO: 1416687 - DNA, 15 bp, Homo sapiens
tccagcgcgaaggag

SEQ ID NO: 1416688 - DNA, 15 bp, Homo sapiens
ccagcgcgaaggagg

SEQ ID NO: 1416689 - DNA, 15 bp, Homo sapiens
cagcgcgaaggaggt

SEQ ID NO: 1416690 - DNA, 15 bp, Homo sapiens
agcgcgaaggaggtg

SEQ ID NO: 1416691 - DNA, 15 bp, Homo sapiens
gcgcgaaggaggtga

SEQ ID NO: 1416692 - DNA, 15 bp, Homo sapiens
cgcgaaggaggtgac

SEQ ID NO: 1416693 - DNA, 15 bp, Homo sapiens
gcgaaggaggtgacc

SEQ ID NO: 1416694 - DNA, 15 bp, Homo sapiens
cgaaggaggtgacct

SEQ ID NO: 1416695 - DNA, 15 bp, Homo sapiens
gaaggaggtgaccta

SEQ ID NO: 1416696 - DNA, 15 bp, Homo sapiens
aaggaggtgacctaa

SEQ ID NO: 1416697 - DNA, 15 bp, Homo sapiens
aggaggtgacctaaa

SEQ ID NO: 1416698 - DNA, 15 bp, Homo sapiens
ggaggtgacctaaaa

SEQ ID NO: 1416699 - DNA, 15 bp, Homo sapiens
gaggtgacctaaaac

SEQ ID NO: 1416700 - DNA, 15 bp, Homo sapiens
aggtgacctaaaacc

SEQ ID NO: 1416701 - DNA, 15 bp, Homo sapiens
ggtgacctaaaaccc

SEQ ID NO: 1416702 - DNA, 15 bp, Homo sapiens
gtgacctaaaaccca

SEQ ID NO: 1416703 - DNA, 15 bp, Homo sapiens
tgacctaaaacccat

SEQ ID NO: 1416704 - DNA, 15 bp, Homo sapiens
gacctaaaacccatg

SEQ ID NO: 1416705 - DNA, 15 bp, Homo sapiens
acctaaaacccatgg

SEQ ID NO: 1416706 - DNA, 15 bp, Homo sapiens
cctaaaacccatggg

SEQ ID NO: 1416707 - DNA, 15 bp, Homo sapiens
ctaaaacccatgggc

SEQ ID NO: 1416708 - DNA, 15 bp, Homo sapiens
taaaacccatgggcc

SEQ ID NO: 1416709 - DNA, 15 bp, Homo sapiens
aaaacccatgggccc

SEQ ID NO: 1416710 - DNA, 15 bp, Homo sapiens
aaacccatgggccct

SEQ ID NO: 1416711 - DNA, 15 bp, Homo sapiens
aacccatgggccctt

SEQ ID NO: 1416712 - DNA, 15 bp, Homo sapiens
acccatgggcccttc

SEQ ID NO: 1416713 - DNA, 15 bp, Homo sapiens
cccatgggcccttct

SEQ ID NO: 1416714 - DNA, 15 bp, Homo sapiens
ccatgggcccttctc

SEQ ID NO: 1416715 - DNA, 15 bp, Homo sapiens
catgggcccttctca

SEQ ID NO: 1416716 - DNA, 15 bp, Homo sapiens
atgggcccttctcac

SEQ ID NO: 1416717 - DNA, 15 bp, Homo sapiens
tgggcccttctcaca

SEQ ID NO: 1416718 - DNA, 15 bp, Homo sapiens
gggcccttctcacac

SEQ ID NO: 1416719 - DNA, 15 bp, Homo sapiens
ggcccttctcacact

SEQ ID NO: 1416720 - DNA, 15 bp, Homo sapiens
gcccttctcacactg

SEQ ID NO: 1416721 - DNA, 15 bp, Homo sapiens
cccttctcacactgc

SEQ ID NO: 1416722 - DNA, 15 bp, Homo sapiens
ccttctcacactgcg

SEQ ID NO: 1416723 - DNA, 15 bp, Homo sapiens
cttctcacactgcgt

SEQ ID NO: 1416724 - DNA, 15 bp, Homo sapiens
ttctcacactgcgtt

SEQ ID NO: 1416725 - DNA, 15 bp, Homo sapiens
tctcacactgcgttc

SEQ ID NO: 1416726 - DNA, 15 bp, Homo sapiens
ctcacactgcgttct

SEQ ID NO: 1416727 - DNA, 15 bp, Homo sapiens
tcacactgcgttctc

SEQ ID NO: 1416728 - DNA, 15 bp, Homo sapiens
cacactgcgttctct

SEQ ID NO: 1416729 - DNA, 15 bp, Homo sapiens
acactgcgttctctg

SEQ ID NO: 1416730 - DNA, 15 bp, Homo sapiens
cactgcgttctctgc

SEQ ID NO: 1416731 - DNA, 15 bp, Homo sapiens
actgcgttctctgcg

SEQ ID NO: 1416732 - DNA, 15 bp, Homo sapiens
ctgcgttctctgcgc

SEQ ID NO: 1416733 - DNA, 15 bp, Homo sapiens
tgcgttctctgcgct

SEQ ID NO: 1416734 - DNA, 15 bp, Homo sapiens
gcgttctctgcgctc

SEQ ID NO: 1416735 - DNA, 15 bp, Homo sapiens
cgttctctgcgctcc

SEQ ID NO: 1416736 - DNA, 15 bp, Homo sapiens
gttctctgcgctccg

SEQ ID NO: 1416737 - DNA, 15 bp, Homo sapiens
ttctctgcgctccgg

SEQ ID NO: 1416738 - DNA, 15 bp, Homo sapiens
tctctgcgctccggc

SEQ ID NO: 1416739 - DNA, 15 bp, Homo sapiens
ctctgcgctccggcc

SEQ ID NO: 1416740 - DNA, 15 bp, Homo sapiens
tctgcgctccggccc

SEQ ID NO: 1416741 - DNA, 15 bp, Homo sapiens
ctgcgctccggccca

SEQ ID NO: 1416742 - DNA, 15 bp, Homo sapiens
tgcgctccggcccag

SEQ ID NO: 1416743 - DNA, 15 bp, Homo sapiens
gcgctccggcccagt

SEQ ID NO: 1416744 - DNA, 15 bp, Homo sapiens
cgctccggcccagtt

SEQ ID NO: 1416745 - DNA, 15 bp, Homo sapiens
gctccggcccagttc

SEQ ID NO: 1416746 - DNA, 15 bp, Homo sapiens
ctccggcccagttcc

SEQ ID NO: 1416747 - DNA, 15 bp, Homo sapiens
tccggcccagttccg

SEQ ID NO: 1416748 - DNA, 15 bp, Homo sapiens
ccggcccagttccgg

SEQ ID NO: 1416749 - DNA, 15 bp, Homo sapiens
cggcccagttccggg

SEQ ID NO: 1416750 - DNA, 15 bp, Homo sapiens
ggcccagttccggga

SEQ ID NO: 1416751 - DNA, 15 bp, Homo sapiens
gcccagttccgggag

SEQ ID NO: 1416752 - DNA, 15 bp, Homo sapiens
cccagttccgggagg

SEQ ID NO: 1416753 - DNA, 15 bp, Homo sapiens
ccagttccgggagga

SEQ ID NO: 1416754 - DNA, 15 bp, Homo sapiens
cagttccgggaggac

SEQ ID NO: 1416755 - DNA, 15 bp, Homo sapiens
agttccgggaggacc

SEQ ID NO: 1416756 - DNA, 15 bp, Homo sapiens
gttccgggaggacct

SEQ ID NO: 1416757 - DNA, 15 bp, Homo sapiens
ttccgggaggacctc

SEQ ID NO: 1416758 - DNA, 15 bp, Homo sapiens
tccgggaggacctcc

SEQ ID NO: 1416759 - DNA, 15 bp, Homo sapiens
ccgggaggacctccc

SEQ ID NO: 1416760 - DNA, 15 bp, Homo sapiens
cgggaggacctcccg

SEQ ID NO: 1416761 - DNA, 15 bp, Homo sapiens
gggaggacctcccga

SEQ ID NO: 1416762 - DNA, 15 bp, Homo sapiens
ggaggacctcccgac

SEQ ID NO: 1416763 - DNA, 15 bp, Homo sapiens
gaggacctcccgacg

SEQ ID NO: 1416764 - DNA, 15 bp, Homo sapiens
aggacctcccgacgg

SEQ ID NO: 1416765 - DNA, 15 bp, Homo sapiens
ggacctcccgacggc

SEQ ID NO: 1416766 - DNA, 15 bp, Homo sapiens
gacctcccgacggcg

SEQ ID NO: 1416767 - DNA, 15 bp, Homo sapiens
acctcccgacggcgc

SEQ ID NO: 1416768 - DNA, 15 bp, Homo sapiens
cctcccgacggcgcg

SEQ ID NO: 1416769 - DNA, 15 bp, Homo sapiens
ctcccgacggcgcgg

SEQ ID NO: 1416770 - DNA, 15 bp, Homo sapiens
tcccgacggcgcggg

SEQ ID NO: 1416771 - DNA, 15 bp, Homo sapiens
cccgacggcgcggga

SEQ ID NO: 1416772 - DNA, 15 bp, Homo sapiens
ccgacggcgcgggag

SEQ ID NO: 1416773 - DNA, 15 bp, Homo sapiens
cgacggcgcgggaga

SEQ ID NO: 1416774 - DNA, 15 bp, Homo sapiens
gacggcgcgggagaa

SEQ ID NO: 1416775 - DNA, 15 bp, Homo sapiens
acggcgcgggagaag

SEQ ID NO: 1416776 - DNA, 15 bp, Homo sapiens
cggcgcgggagaagg

SEQ ID NO: 1416777 - DNA, 15 bp, Homo sapiens
ggcgcgggagaaggc

SEQ ID NO: 1416778 - DNA, 15 bp, Homo sapiens
gcgcgggagaaggct

SEQ ID NO: 1416779 - DNA, 15 bp, Homo sapiens
cgcgggagaaggctg

SEQ ID NO: 1416780 - DNA, 15 bp, Homo sapiens
gcgggagaaggctgt

SEQ ID NO: 1416781 - DNA, 15 bp, Homo sapiens
cgggagaaggctgta

SEQ ID NO: 1416782 - DNA, 15 bp, Homo sapiens
gggagaaggctgtaa

SEQ ID NO: 1416783 - DNA, 15 bp, Homo sapiens
ggagaaggctgtaag

SEQ ID NO: 1416784 - DNA, 15 bp, Homo sapiens
gagaaggctgtaagg

SEQ ID NO: 1416785 - DNA, 15 bp, Homo sapiens
agaaggctgtaaggg

SEQ ID NO: 1416786 - DNA, 15 bp, Homo sapiens
gaaggctgtaagggc

SEQ ID NO: 1416787 - DNA, 15 bp, Homo sapiens
aaggctgtaagggct

SEQ ID NO: 1416788 - DNA, 15 bp, Homo sapiens
aggctgtaagggctc

SEQ ID NO: 1416789 - DNA, 15 bp, Homo sapiens
ggctgtaagggctct

SEQ ID NO: 1416790 - DNA, 15 bp, Homo sapiens
gctgtaagggctctt

SEQ ID NO: 1416791 - DNA, 15 bp, Homo sapiens
ctgtaagggctcttg

SEQ ID NO: 1416792 - DNA, 15 bp, Homo sapiens
tgtaagggctcttgg

SEQ ID NO: 1416793 - DNA, 15 bp, Homo sapiens
gtaagggctcttggc

SEQ ID NO: 1416794 - DNA, 15 bp, Homo sapiens
taagggctcttggcc

SEQ ID NO: 1416795 - DNA, 15 bp, Homo sapiens
aagggctcttggccc

SEQ ID NO: 1416796 - DNA, 15 bp, Homo sapiens
agggctcttggcccc

SEQ ID NO: 1416797 - DNA, 15 bp, Homo sapiens
gggctcttggccccc

SEQ ID NO: 1416798 - DNA, 15 bp, Homo sapiens
ggctcttggcccccg

SEQ ID NO: 1416799 - DNA, 15 bp, Homo sapiens
gctcttggcccccga

SEQ ID NO: 1416800 - DNA, 15 bp, Homo sapiens
ctcttggcccccgac

SEQ ID NO: 1416801 - DNA, 15 bp, Homo sapiens
tcttggcccccgacg

SEQ ID NO: 1416802 - DNA, 15 bp, Homo sapiens
cttggcccccgacgc

SEQ ID NO: 1416803 - DNA, 15 bp, Homo sapiens
ttggcccccgacgcg

SEQ ID NO: 1416804 - DNA, 15 bp, Homo sapiens
tggcccccgacgcgg

SEQ ID NO: 1416805 - DNA, 15 bp, Homo sapiens
ggcccccgacgcggc

SEQ ID NO: 1416806 - DNA, 15 bp, Homo sapiens
gcccccgacgcggcc

SEQ ID NO: 1416807 - DNA, 15 bp, Homo sapiens
cccccgacgcggcct

SEQ ID NO: 1416808 - DNA, 15 bp, Homo sapiens
ccccgacgcggcctg

SEQ ID NO: 1416809 - DNA, 15 bp, Homo sapiens
cccgacgcggcctgg

SEQ ID NO: 1416810 - DNA, 15 bp, Homo sapiens
ccgacgcggcctggg

SEQ ID NO: 1416811 - DNA, 15 bp, Homo sapiens
cgacgcggcctgggt

SEQ ID NO: 1416812 - DNA, 15 bp, Homo sapiens
gacgcggcctgggtc

SEQ ID NO: 1416813 - DNA, 15 bp, Homo sapiens
acgcggcctgggtct

SEQ ID NO: 1416814 - DNA, 15 bp, Homo sapiens
cgcggcctgggtctc

SEQ ID NO: 1416815 - DNA, 15 bp, Homo sapiens
gcggcctgggtctcg

SEQ ID NO: 1416816 - DNA, 15 bp, Homo sapiens
cggcctgggtctcgg

SEQ ID NO: 1416817 - DNA, 15 bp, Homo sapiens
ggcctgggtctcggg

SEQ ID NO: 1416818 - DNA, 15 bp, Homo sapiens
gcctgggtctcgggg

SEQ ID NO: 1416819 - DNA, 15 bp, Homo sapiens
cctgggtctcggggg

SEQ ID NO: 1416820 - DNA, 15 bp, Homo sapiens
ctgggtctcggggga

SEQ ID NO: 1416821 - DNA, 15 bp, Homo sapiens
tgggtctcgggggac

SEQ ID NO: 1416822 - DNA, 15 bp, Homo sapiens
gggtctcgggggacg

SEQ ID NO: 1416823 - DNA, 15 bp, Homo sapiens
ggtctcgggggacgc

SEQ ID NO: 1416824 - DNA, 15 bp, Homo sapiens
gtctcgggggacgca

SEQ ID NO: 1416825 - DNA, 15 bp, Homo sapiens
tctcgggggacgcat

SEQ ID NO: 1416826 - DNA, 15 bp, Homo sapiens
ctcgggggacgcatg

SEQ ID NO: 1416827 - DNA, 15 bp, Homo sapiens
tcgggggacgcatga

SEQ ID NO: 1416828 - DNA, 15 bp, Homo sapiens
cgggggacgcatgaa

SEQ ID NO: 1416829 - DNA, 15 bp, Homo sapiens
gggggacgcatgaac

SEQ ID NO: 1416830 - DNA, 15 bp, Homo sapiens
ggggacgcatgaacc

SEQ ID NO: 1416831 - DNA, 15 bp, Homo sapiens
gggacgcatgaaccc

SEQ ID NO: 1416832 - DNA, 15 bp, Homo sapiens
ggacgcatgaacccg

SEQ ID NO: 1416833 - DNA, 15 bp, Homo sapiens
gacgcatgaacccgc

SEQ ID NO: 1416834 - DNA, 15 bp, Homo sapiens
acgcatgaacccgcc

SEQ ID NO: 1416835 - DNA, 15 bp, Homo sapiens
cgcatgaacccgcca

SEQ ID NO: 1416836 - DNA, 15 bp, Homo sapiens
gcatgaacccgccac

SEQ ID NO: 1416837 - DNA, 15 bp, Homo sapiens
catgaacccgccacc

SEQ ID NO: 1416838 - DNA, 15 bp, Homo sapiens
atgaacccgccacct

SEQ ID NO: 1416839 - DNA, 15 bp, Homo sapiens
tgaacccgccacctc

SEQ ID NO: 1416840 - DNA, 15 bp, Homo sapiens
gaacccgccacctct

SEQ ID NO: 1416841 - DNA, 15 bp, Homo sapiens
aacccgccacctctg

SEQ ID NO: 1416842 - DNA, 15 bp, Homo sapiens
acccgccacctctgg

SEQ ID NO: 1416843 - DNA, 15 bp, Homo sapiens
cccgccacctctggc

SEQ ID NO: 1416844 - DNA, 15 bp, Homo sapiens
ccgccacctctggcc

SEQ ID NO: 1416845 - DNA, 15 bp, Homo sapiens
cgccacctctggccg

SEQ ID NO: 1416846 - DNA, 15 bp, Homo sapiens
gccacctctggccgg

SEQ ID NO: 1416847 - DNA, 15 bp, Homo sapiens
ccacctctggccggc

SEQ ID NO: 1416848 - DNA, 15 bp, Homo sapiens
cacctctggccggct

SEQ ID NO: 1416849 - DNA, 15 bp, Homo sapiens
acctctggccggctt

SEQ ID NO: 1416850 - DNA, 15 bp, Homo sapiens
cctctggccggcttc

SEQ ID NO: 1416851 - DNA, 15 bp, Homo sapiens
ctctggccggcttcc

SEQ ID NO: 1416852 - DNA, 15 bp, Homo sapiens
tctggccggcttcct

SEQ ID NO: 1416853 - DNA, 15 bp, Homo sapiens
ctggccggcttcctt

SEQ ID NO: 1416854 - DNA, 15 bp, Homo sapiens
tggccggcttccttt

SEQ ID NO: 1416855 - DNA, 15 bp, Homo sapiens
ggccggcttcctttt

SEQ ID NO: 1416856 - DNA, 15 bp, Homo sapiens
gccggcttcctttta

SEQ ID NO: 1416857 - DNA, 15 bp, Homo sapiens
ccggcttccttttag

SEQ ID NO: 1416858 - DNA, 15 bp, Homo sapiens
cggcttccttttagt

SEQ ID NO: 1416859 - DNA, 15 bp, Homo sapiens
ggcttccttttagtg

SEQ ID NO: 1416860 - DNA, 15 bp, Homo sapiens
gcttccttttagtgc

SEQ ID NO: 1416861 - DNA, 15 bp, Homo sapiens
cttccttttagtgcc

SEQ ID NO: 1416862 - DNA, 15 bp, Homo sapiens
ttccttttagtgccc

SEQ ID NO: 1416863 - DNA, 15 bp, Homo sapiens
tccttttagtgcccc

SEQ ID NO: 1416864 - DNA, 15 bp, Homo sapiens
ccttttagtgcccca

SEQ ID NO: 1416865 - DNA, 15 bp, Homo sapiens
cttttagtgccccaa

SEQ ID NO: 1416866 - DNA, 15 bp, Homo sapiens
ttttagtgccccaaa

SEQ ID NO: 1416867 - DNA, 15 bp, Homo sapiens
tttagtgccccaaat

SEQ ID NO: 1416868 - DNA, 15 bp, Homo sapiens
ttagtgccccaaata

SEQ ID NO: 1416869 - DNA, 15 bp, Homo sapiens
tagtgccccaaatag

SEQ ID NO: 1416870 - DNA, 15 bp, Homo sapiens
agtgccccaaatagc

SEQ ID NO: 1416871 - DNA, 15 bp, Homo sapiens
gtgccccaaatagca

SEQ ID NO: 1416872 - DNA, 15 bp, Homo sapiens
tgccccaaatagcag

SEQ ID NO: 1416873 - DNA, 15 bp, Homo sapiens
gccccaaatagcagc

SEQ ID NO: 1416874 - DNA, 15 bp, Homo sapiens
ccccaaatagcagcg

SEQ ID NO: 1416875 - DNA, 15 bp, Homo sapiens
cccaaatagcagcgc

SEQ ID NO: 1416876 - DNA, 15 bp, Homo sapiens
ccaaatagcagcgct

SEQ ID NO: 1416877 - DNA, 15 bp, Homo sapiens
caaatagcagcgctt

SEQ ID NO: 1416878 - DNA, 15 bp, Homo sapiens
aaatagcagcgctta

SEQ ID NO: 1416879 - DNA, 15 bp, Homo sapiens
aatagcagcgcttag

SEQ ID NO: 1416880 - DNA, 15 bp, Homo sapiens
atagcagcgcttagc

SEQ ID NO: 1416881 - DNA, 15 bp, Homo sapiens
tagcagcgcttagcc

SEQ ID NO: 1416882 - DNA, 15 bp, Homo sapiens
agcagcgcttagccc

SEQ ID NO: 1416883 - DNA, 15 bp, Homo sapiens
gcagcgcttagcccg

SEQ ID NO: 1416884 - DNA, 15 bp, Homo sapiens
cagcgcttagcccgt

SEQ ID NO: 1416885 - DNA, 15 bp, Homo sapiens
agcgcttagcccgtt

SEQ ID NO: 1416886 - DNA, 15 bp, Homo sapiens
gcgcttagcccgttg

SEQ ID NO: 1416887 - DNA, 15 bp, Homo sapiens
cgcttagcccgttgc

SEQ ID NO: 1416888 - DNA, 15 bp, Homo sapiens
gcttagcccgttgct

SEQ ID NO: 1416889 - DNA, 15 bp, Homo sapiens
cttagcccgttgctt

SEQ ID NO: 1416890 - DNA, 15 bp, Homo sapiens
ttagcccgttgcttc

SEQ ID NO: 1416891 - DNA, 15 bp, Homo sapiens
tagcccgttgcttcc

SEQ ID NO: 1416892 - DNA, 15 bp, Homo sapiens
agcccgttgcttccc

SEQ ID NO: 1416893 - DNA, 15 bp, Homo sapiens
gcccgttgcttcccc

SEQ ID NO: 1416894 - DNA, 15 bp, Homo sapiens
cccgttgcttccccc

SEQ ID NO: 1416895 - DNA, 15 bp, Homo sapiens
ccgttgcttcccccg

SEQ ID NO: 1416896 - DNA, 15 bp, Homo sapiens
cgttgcttcccccga

SEQ ID NO: 1416897 - DNA, 15 bp, Homo sapiens
gttgcttcccccgac

SEQ ID NO: 1416898 - DNA, 15 bp, Homo sapiens
ttgcttcccccgact

SEQ ID NO: 1416899 - DNA, 15 bp, Homo sapiens
tgcttcccccgactc

SEQ ID NO: 1416900 - DNA, 15 bp, Homo sapiens
gcttcccccgactct

SEQ ID NO: 1416901 - DNA, 15 bp, Homo sapiens
cttcccccgactctt

SEQ ID NO: 1416902 - DNA, 15 bp, Homo sapiens
ttcccccgactcttg

SEQ ID NO: 1416903 - DNA, 15 bp, Homo sapiens
tcccccgactcttgt

SEQ ID NO: 1416904 - DNA, 15 bp, Homo sapiens
cccccgactcttgtt

SEQ ID NO: 1416905 - DNA, 15 bp, Homo sapiens
ccccgactcttgttt

SEQ ID NO: 1416906 - DNA, 15 bp, Homo sapiens
cccgactcttgtttt

SEQ ID NO: 1416907 - DNA, 15 bp, Homo sapiens
ccgactcttgttttt

SEQ ID NO: 1416908 - DNA, 15 bp, Homo sapiens
cgactcttgtttttc

SEQ ID NO: 1416909 - DNA, 15 bp, Homo sapiens
gactcttgtttttca

SEQ ID NO: 1416910 - DNA, 15 bp, Homo sapiens
actcttgtttttcaa

SEQ ID NO: 1416911 - DNA, 15 bp, Homo sapiens
ctcttgtttttcaaa

SEQ ID NO: 1416912 - DNA, 15 bp, Homo sapiens
tcttgtttttcaaag

SEQ ID NO: 1416913 - DNA, 15 bp, Homo sapiens
cttgtttttcaaagt

SEQ ID NO: 1416914 - DNA, 15 bp, Homo sapiens
ttgtttttcaaagtg

SEQ ID NO: 1416915 - DNA, 15 bp, Homo sapiens
tgtttttcaaagtgt

SEQ ID NO: 1416916 - DNA, 15 bp, Homo sapiens
gtttttcaaagtgtt

SEQ ID NO: 1416917 - DNA, 15 bp, Homo sapiens
tttttcaaagtgttc

SEQ ID NO: 1416918 - DNA, 15 bp, Homo sapiens
ttttcaaagtgttca

SEQ ID NO: 1416919 - DNA, 15 bp, Homo sapiens
tttcaaagtgttcac

SEQ ID NO: 1416920 - DNA, 15 bp, Homo sapiens
ttcaaagtgttcaca

SEQ ID NO: 1416921 - DNA, 15 bp, Homo sapiens
tcaaagtgttcacag

SEQ ID NO: 1416922 - DNA, 15 bp, Homo sapiens
caaagtgttcacagg

SEQ ID NO: 1416923 - DNA, 15 bp, Homo sapiens
aaagtgttcacaggg

SEQ ID NO: 1416924 - DNA, 15 bp, Homo sapiens
aagtgttcacagggt

SEQ ID NO: 1416925 - DNA, 15 bp, Homo sapiens
agtgttcacagggtc

SEQ ID NO: 1416926 - DNA, 15 bp, Homo sapiens
gtgttcacagggtcg

SEQ ID NO: 1416927 - DNA, 15 bp, Homo sapiens
tgttcacagggtcgc

SEQ ID NO: 1416928 - DNA, 15 bp, Homo sapiens
gttcacagggtcgcg

SEQ ID NO: 1416929 - DNA, 15 bp, Homo sapiens
ttcacagggtcgcga

SEQ ID NO: 1416930 - DNA, 15 bp, Homo sapiens
tcacagggtcgcgag

SEQ ID NO: 1416931 - DNA, 15 bp, Homo sapiens
cacagggtcgcgaga

SEQ ID NO: 1416932 - DNA, 15 bp, Homo sapiens
acagggtcgcgagag

SEQ ID NO: 1416933 - DNA, 15 bp, Homo sapiens
cagggtcgcgagagc

SEQ ID NO: 1416934 - DNA, 15 bp, Homo sapiens
agggtcgcgagagcg

SEQ ID NO: 1416935 - DNA, 15 bp, Homo sapiens
gggtcgcgagagcga

SEQ ID NO: 1416936 - DNA, 15 bp, Homo sapiens
ggtcgcgagagcgag

SEQ ID NO: 1416937 - DNA, 15 bp, Homo sapiens
gtcgcgagagcgagc

SEQ ID NO: 1416938 - DNA, 15 bp, Homo sapiens
tcgcgagagcgagcg

SEQ ID NO: 1416939 - DNA, 15 bp, Homo sapiens
cgcgagagcgagcga

SEQ ID NO: 1416940 - DNA, 15 bp, Homo sapiens
gcgagagcgagcgac

SEQ ID NO: 1416941 - DNA, 15 bp, Homo sapiens
cgagagcgagcgacg

SEQ ID NO: 1416942 - DNA, 15 bp, Homo sapiens
gagagcgagcgacgc

SEQ ID NO: 1416943 - DNA, 15 bp, Homo sapiens
agagcgagcgacgcg

SEQ ID NO: 1416944 - DNA, 15 bp, Homo sapiens
gagcgagcgacgcgg

SEQ ID NO: 1416945 - DNA, 15 bp, Homo sapiens
agcgagcgacgcggg

SEQ ID NO: 1416946 - DNA, 15 bp, Homo sapiens
gcgagcgacgcgggg

SEQ ID NO: 1416947 - DNA, 15 bp, Homo sapiens
cgagcgacgcggggg

SEQ ID NO: 1416948 - DNA, 15 bp, Homo sapiens
gagcgacgcgggggc

SEQ ID NO: 1416949 - DNA, 15 bp, Homo sapiens
agcgacgcgggggcg

SEQ ID NO: 1416950 - DNA, 15 bp, Homo sapiens
gcgacgcgggggcgg

SEQ ID NO: 1416951 - DNA, 15 bp, Homo sapiens
cgacgcgggggcggc

SEQ ID NO: 1416952 - DNA, 15 bp, Homo sapiens
gacgcgggggcggcg

SEQ ID NO: 1416953 - DNA, 15 bp, Homo sapiens
acgcgggggcggcga

SEQ ID NO: 1416954 - DNA, 15 bp, Homo sapiens
cgcgggggcggcgag

SEQ ID NO: 1416955 - DNA, 15 bp, Homo sapiens
gcgggggcggcgagg

SEQ ID NO: 1416956 - DNA, 15 bp, Homo sapiens
cgggggcggcgaggc

SEQ ID NO: 1416957 - DNA, 15 bp, Homo sapiens
gggggcggcgaggct

SEQ ID NO: 1416958 - DNA, 15 bp, Homo sapiens
ggggcggcgaggctg

SEQ ID NO: 1416959 - DNA, 15 bp, Homo sapiens
gggcggcgaggctgc

SEQ ID NO: 1416960 - DNA, 15 bp, Homo sapiens
ggcggcgaggctgca

SEQ ID NO: 1416961 - DNA, 15 bp, Homo sapiens
gcggcgaggctgcaa

SEQ ID NO: 1416962 - DNA, 15 bp, Homo sapiens
cggcgaggctgcaag

SEQ ID NO: 1416963 - DNA, 15 bp, Homo sapiens
ggcgaggctgcaagg

SEQ ID NO: 1416964 - DNA, 15 bp, Homo sapiens
gcgaggctgcaaggc

SEQ ID NO: 1416965 - DNA, 15 bp, Homo sapiens
cgaggctgcaaggct

SEQ ID NO: 1416966 - DNA, 15 bp, Homo sapiens
gaggctgcaaggctg

SEQ ID NO: 1416967 - DNA, 15 bp, Homo sapiens
aggctgcaaggctgc

SEQ ID NO: 1416968 - DNA, 15 bp, Homo sapiens
ggctgcaaggctgca

SEQ ID NO: 1416969 - DNA, 15 bp, Homo sapiens
gctgcaaggctgcac

SEQ ID NO: 1416970 - DNA, 15 bp, Homo sapiens
ctgcaaggctgcaca

SEQ ID NO: 1416971 - DNA, 15 bp, Homo sapiens
tgcaaggctgcacag

SEQ ID NO: 1416972 - DNA, 15 bp, Homo sapiens
gcaaggctgcacagg

SEQ ID NO: 1416973 - DNA, 15 bp, Homo sapiens
caaggctgcacagga

SEQ ID NO: 1416974 - DNA, 15 bp, Homo sapiens
aaggctgcacaggaa

SEQ ID NO: 1416975 - DNA, 15 bp, Homo sapiens
aggctgcacaggaac

SEQ ID NO: 1416976 - DNA, 15 bp, Homo sapiens
ggctgcacaggaaca

SEQ ID NO: 1416977 - DNA, 15 bp, Homo sapiens
gctgcacaggaacag

SEQ ID NO: 1416978 - DNA, 15 bp, Homo sapiens
ctgcacaggaacaga

SEQ ID NO: 1416979 - DNA, 15 bp, Homo sapiens
tgcacaggaacagac

SEQ ID NO: 1416980 - DNA, 15 bp, Homo sapiens
gcacaggaacagacg

SEQ ID NO: 1416981 - DNA, 15 bp, Homo sapiens
cacaggaacagacga

SEQ ID NO: 1416982 - DNA, 15 bp, Homo sapiens
acaggaacagacgac

SEQ ID NO: 1416983 - DNA, 15 bp, Homo sapiens
caggaacagacgaca

SEQ ID NO: 1416984 - DNA, 15 bp, Homo sapiens
aggaacagacgacaa

SEQ ID NO: 1416985 - DNA, 15 bp, Homo sapiens
ggaacagacgacaag

SEQ ID NO: 1416986 - DNA, 15 bp, Homo sapiens
gaacagacgacaaga

SEQ ID NO: 1416987 - DNA, 15 bp, Homo sapiens
aacagacgacaagaa

SEQ ID NO: 1416988 - DNA, 15 bp, Homo sapiens
acagacgacaagaaa

SEQ ID NO: 1416989 - DNA, 15 bp, Homo sapiens
cagacgacaagaaat

SEQ ID NO: 1416990 - DNA, 15 bp, Homo sapiens
agacgacaagaaata

SEQ ID NO: 1416991 - DNA, 15 bp, Homo sapiens
gacgacaagaaatag

SEQ ID NO: 1416992 - DNA, 15 bp, Homo sapiens
acgacaagaaatagg

SEQ ID NO: 1416993 - DNA, 15 bp, Homo sapiens
cgacaagaaataggg

SEQ ID NO: 1416994 - DNA, 15 bp, Homo sapiens
gacaagaaatagggc

SEQ ID NO: 1416995 - DNA, 15 bp, Homo sapiens
acaagaaatagggct

SEQ ID NO: 1416996 - DNA, 15 bp, Homo sapiens
caagaaatagggctt

SEQ ID NO: 1416997 - DNA, 15 bp, Homo sapiens
aagaaatagggcttt

SEQ ID NO: 1416998 - DNA, 15 bp, Homo sapiens
agaaatagggctttc

SEQ ID NO: 1416999 - DNA, 15 bp, Homo sapiens
gaaatagggctttct

SEQ ID NO: 1417000 - DNA, 15 bp, Homo sapiens
aaatagggctttctt

SEQ ID NO: 1417001 - DNA, 15 bp, Homo sapiens
aatagggctttcttc

SEQ ID NO: 1417002 - DNA, 15 bp, Homo sapiens
atagggctttcttct

SEQ ID NO: 1417003 - DNA, 15 bp, Homo sapiens
tagggctttcttctg

SEQ ID NO: 1417004 - DNA, 15 bp, Homo sapiens
agggctttcttctgc

SEQ ID NO: 1417005 - DNA, 15 bp, Homo sapiens
gggctttcttctgcg

SEQ ID NO: 1417006 - DNA, 15 bp, Homo sapiens
ggctttcttctgcgt

SEQ ID NO: 1417007 - DNA, 15 bp, Homo sapiens
gctttcttctgcgtg

SEQ ID NO: 1417008 - DNA, 15 bp, Homo sapiens
ctttcttctgcgtgg

SEQ ID NO: 1417009 - DNA, 15 bp, Homo sapiens
tttcttctgcgtggt

SEQ ID NO: 1417010 - DNA, 15 bp, Homo sapiens
ttcttctgcgtggtt

SEQ ID NO: 1417011 - DNA, 15 bp, Homo sapiens
tcttctgcgtggttc

SEQ ID NO: 1417012 - DNA, 15 bp, Homo sapiens
cttctgcgtggttct

SEQ ID NO: 1417013 - DNA, 15 bp, Homo sapiens
ttctgcgtggttctt

SEQ ID NO: 1417014 - DNA, 15 bp, Homo sapiens
tctgcgtggttcttt

SEQ ID NO: 1417015 - DNA, 15 bp, Homo sapiens
ctgcgtggttctttt

SEQ ID NO: 1417016 - DNA, 15 bp, Homo sapiens
tgcgtggttcttttc

SEQ ID NO: 1417017 - DNA, 15 bp, Homo sapiens
gcgtggttcttttcc

SEQ ID NO: 1417018 - DNA, 15 bp, Homo sapiens
cgtggttcttttccg

SEQ ID NO: 1417019 - DNA, 15 bp, Homo sapiens
gtggttcttttccgg

SEQ ID NO: 1417020 - DNA, 15 bp, Homo sapiens
tggttcttttccggt

SEQ ID NO: 1417021 - DNA, 15 bp, Homo sapiens
ggttcttttccggtc

SEQ ID NO: 1417022 - DNA, 15 bp, Homo sapiens
gttcttttccggtcc

SEQ ID NO: 1417023 - DNA, 15 bp, Homo sapiens
ttcttttccggtccc

SEQ ID NO: 1417024 - DNA, 15 bp, Homo sapiens
tcttttccggtccct

SEQ ID NO: 1417025 - DNA, 15 bp, Homo sapiens
cttttccggtccctg

SEQ ID NO: 1417026 - DNA, 15 bp, Homo sapiens
ttttccggtccctgt

SEQ ID NO: 1417027 - DNA, 15 bp, Homo sapiens
tttccggtccctgtc

SEQ ID NO: 1417028 - DNA, 15 bp, Homo sapiens
ttccggtccctgtct

SEQ ID NO: 1417029 - DNA, 15 bp, Homo sapiens
tccggtccctgtctg

SEQ ID NO: 1417030 - DNA, 15 bp, Homo sapiens
ccggtccctgtctga

SEQ ID NO: 1417031 - DNA, 15 bp, Homo sapiens
cggtccctgtctgag

SEQ ID NO: 1417032 - DNA, 15 bp, Homo sapiens
ggtccctgtctgagt

SEQ ID NO: 1417033 - DNA, 15 bp, Homo sapiens
gtccctgtctgagtc

SEQ ID NO: 1417034 - DNA, 15 bp, Homo sapiens
tccctgtctgagtcg

SEQ ID NO: 1417035 - DNA, 15 bp, Homo sapiens
ccctgtctgagtcgc

SEQ ID NO: 1417036 - DNA, 15 bp, Homo sapiens
cctgtctgagtcgcc

SEQ ID NO: 1417037 - DNA, 15 bp, Homo sapiens
ctgtctgagtcgccc

SEQ ID NO: 1417038 - DNA, 15 bp, Homo sapiens
tgtctgagtcgcccg

SEQ ID NO: 1417039 - DNA, 15 bp, Homo sapiens
gtctgagtcgcccga

SEQ ID NO: 1417040 - DNA, 15 bp, Homo sapiens
tctgagtcgcccgac

SEQ ID NO: 1417041 - DNA, 15 bp, Homo sapiens
ctgagtcgcccgacc

SEQ ID NO: 1417042 - DNA, 15 bp, Homo sapiens
tgagtcgcccgaccc

SEQ ID NO: 1417043 - DNA, 15 bp, Homo sapiens
gagtcgcccgacccc

SEQ ID NO: 1417044 - DNA, 15 bp, Homo sapiens
agtcgcccgaccccg

SEQ ID NO: 1417045 - DNA, 15 bp, Homo sapiens
gtcgcccgaccccgc

SEQ ID NO: 1417046 - DNA, 15 bp, Homo sapiens
tcgcccgaccccgcg

SEQ ID NO: 1417047 - DNA, 15 bp, Homo sapiens
cgcccgaccccgcgg

SEQ ID NO: 1417048 - DNA, 15 bp, Homo sapiens
gcccgaccccgcggg

SEQ ID NO: 1417049 - DNA, 15 bp, Homo sapiens
cccgaccccgcgggg

SEQ ID NO: 1417050 - DNA, 15 bp, Homo sapiens
ccgaccccgcgggga

SEQ ID NO: 1417051 - DNA, 15 bp, Homo sapiens
cgaccccgcggggag

SEQ ID NO: 1417052 - DNA, 15 bp, Homo sapiens
gaccccgcggggagc

SEQ ID NO: 1417053 - DNA, 15 bp, Homo sapiens
accccgcggggagcg

SEQ ID NO: 1417054 - DNA, 15 bp, Homo sapiens
ccccgcggggagcgc

SEQ ID NO: 1417055 - DNA, 15 bp, Homo sapiens
cccgcggggagcgcg

SEQ ID NO: 1417056 - DNA, 15 bp, Homo sapiens
ccgcggggagcgcgg

SEQ ID NO: 1417057 - DNA, 15 bp, Homo sapiens
cgcggggagcgcgga

SEQ ID NO: 1417058 - DNA, 15 bp, Homo sapiens
gcggggagcgcggag

SEQ ID NO: 1417059 - DNA, 15 bp, Homo sapiens
cggggagcgcggagc

SEQ ID NO: 1417060 - DNA, 15 bp, Homo sapiens
ggggagcgcggagca

SEQ ID NO: 1417061 - DNA, 15 bp, Homo sapiens
gggagcgcggagcat

SEQ ID NO: 1417062 - DNA, 15 bp, Homo sapiens
ggagcgcggagcatt

SEQ ID NO: 1417063 - DNA, 15 bp, Homo sapiens
gagcgcggagcattg

SEQ ID NO: 1417064 - DNA, 15 bp, Homo sapiens
agcgcggagcattgc

SEQ ID NO: 1417065 - DNA, 15 bp, Homo sapiens
gcgcggagcattgcg

SEQ ID NO: 1417066 - DNA, 15 bp, Homo sapiens
cgcggagcattgcgg

SEQ ID NO: 1417067 - DNA, 15 bp, Homo sapiens
gcggagcattgcggc

SEQ ID NO: 1417068 - DNA, 15 bp, Homo sapiens
cggagcattgcggcg

SEQ ID NO: 1417069 - DNA, 15 bp, Homo sapiens
ggagcattgcggcgt

SEQ ID NO: 1417070 - DNA, 15 bp, Homo sapiens
gagcattgcggcgtg

SEQ ID NO: 1417071 - DNA, 15 bp, Homo sapiens
agcattgcggcgtgc

SEQ ID NO: 1417072 - DNA, 15 bp, Homo sapiens
gcattgcggcgtgcg

SEQ ID NO: 1417073 - DNA, 15 bp, Homo sapiens
cattgcggcgtgcgg

SEQ ID NO: 1417074 - DNA, 15 bp, Homo sapiens
attgcggcgtgcggc

SEQ ID NO: 1417075 - DNA, 15 bp, Homo sapiens
ttgcggcgtgcggcg

SEQ ID NO: 1417076 - DNA, 15 bp, Homo sapiens
tgcggcgtgcggcgg

SEQ ID NO: 1417077 - DNA, 15 bp, Homo sapiens
gcggcgtgcggcggg

SEQ ID NO: 1417078 - DNA, 15 bp, Homo sapiens
cggcgtgcggcgggc

SEQ ID NO: 1417079 - DNA, 15 bp, Homo sapiens
ggcgtgcggcgggct

SEQ ID NO: 1417080 - DNA, 15 bp, Homo sapiens
gcgtgcggcgggctt

SEQ ID NO: 1417081 - DNA, 15 bp, Homo sapiens
cgtgcggcgggcttc

SEQ ID NO: 1417082 - DNA, 15 bp, Homo sapiens
gtgcggcgggcttcg

SEQ ID NO: 1417083 - DNA, 15 bp, Homo sapiens
tgcggcgggcttcgg

SEQ ID NO: 1417084 - DNA, 15 bp, Homo sapiens
gcggcgggcttcggg

SEQ ID NO: 1417085 - DNA, 15 bp, Homo sapiens
cggcgggcttcgggc

SEQ ID NO: 1417086 - DNA, 15 bp, Homo sapiens
ggcgggcttcgggct

SEQ ID NO: 1417087 - DNA, 15 bp, Homo sapiens
gcgggcttcgggctc

SEQ ID NO: 1417088 - DNA, 15 bp, Homo sapiens
cgggcttcgggctct

SEQ ID NO: 1417089 - DNA, 15 bp, Homo sapiens
gggcttcgggctctc

SEQ ID NO: 1417090 - DNA, 15 bp, Homo sapiens
ggcttcgggctctca

SEQ ID NO: 1417091 - DNA, 15 bp, Homo sapiens
gcttcgggctctcag

SEQ ID NO: 1417092 - DNA, 15 bp, Homo sapiens
cttcgggctctcagc

SEQ ID NO: 1417093 - DNA, 15 bp, Homo sapiens
ttcgggctctcagcc

SEQ ID NO: 1417094 - DNA, 15 bp, Homo sapiens
tcgggctctcagccc

SEQ ID NO: 1417095 - DNA, 15 bp, Homo sapiens
cgggctctcagcccg

SEQ ID NO: 1417096 - DNA, 15 bp, Homo sapiens
gggctctcagcccgc

SEQ ID NO: 1417097 - DNA, 15 bp, Homo sapiens
ggctctcagcccgcg

SEQ ID NO: 1417098 - DNA, 15 bp, Homo sapiens
gctctcagcccgcgc

SEQ ID NO: 1417099 - DNA, 15 bp, Homo sapiens
ctctcagcccgcgca

SEQ ID NO: 1417100 - DNA, 15 bp, Homo sapiens
tctcagcccgcgcag

SEQ ID NO: 1417101 - DNA, 15 bp, Homo sapiens
ctcagcccgcgcagc

SEQ ID NO: 1417102 - DNA, 15 bp, Homo sapiens
tcagcccgcgcagca

SEQ ID NO: 1417103 - DNA, 15 bp, Homo sapiens
cagcccgcgcagcaa

SEQ ID NO: 1417104 - DNA, 15 bp, Homo sapiens
agcccgcgcagcaag

SEQ ID NO: 1417105 - DNA, 15 bp, Homo sapiens
gcccgcgcagcaagt

SEQ ID NO: 1417106 - DNA, 15 bp, Homo sapiens
cccgcgcagcaagtt

SEQ ID NO: 1417107 - DNA, 15 bp, Homo sapiens
ccgcgcagcaagttg

SEQ ID NO: 1417108 - DNA, 15 bp, Homo sapiens
cgcgcagcaagttgt

SEQ ID NO: 1417109 - DNA, 15 bp, Homo sapiens
gcgcagcaagttgtg

SEQ ID NO: 1417110 - DNA, 15 bp, Homo sapiens
cgcagcaagttgtgt

SEQ ID NO: 1417111 - DNA, 15 bp, Homo sapiens
gcagcaagttgtgtt

SEQ ID NO: 1417112 - DNA, 15 bp, Homo sapiens
cagcaagttgtgttg

SEQ ID NO: 1417113 - DNA, 15 bp, Homo sapiens
agcaagttgtgttgc

SEQ ID NO: 1417114 - DNA, 15 bp, Homo sapiens
gcaagttgtgttgct

SEQ ID NO: 1417115 - DNA, 15 bp, Homo sapiens
caagttgtgttgctt

SEQ ID NO: 1417116 - DNA, 15 bp, Homo sapiens
aagttgtgttgcttt

SEQ ID NO: 1417117 - DNA, 15 bp, Homo sapiens
agttgtgttgctttt

SEQ ID NO: 1417118 - DNA, 15 bp, Homo sapiens
gttgtgttgcttttc

SEQ ID NO: 1417119 - DNA, 15 bp, Homo sapiens
ttgtgttgcttttcc

SEQ ID NO: 1417120 - DNA, 15 bp, Homo sapiens
tgtgttgcttttccc

SEQ ID NO: 1417121 - DNA, 15 bp, Homo sapiens
gtgttgcttttcccc

SEQ ID NO: 1417122 - DNA, 15 bp, Homo sapiens
tgttgcttttccccg

SEQ ID NO: 1417123 - DNA, 15 bp, Homo sapiens
gttgcttttccccgg

SEQ ID NO: 1417124 - DNA, 15 bp, Homo sapiens
ttgcttttccccggg

SEQ ID NO: 1417125 - DNA, 15 bp, Homo sapiens
tgcttttccccgggt

SEQ ID NO: 1417126 - DNA, 15 bp, Homo sapiens
gcttttccccgggtg

SEQ ID NO: 1417127 - DNA, 15 bp, Homo sapiens
cttttccccgggtgc

SEQ ID NO: 1417128 - DNA, 15 bp, Homo sapiens
ttttccccgggtgcg

SEQ ID NO: 1417129 - DNA, 15 bp, Homo sapiens
tttccccgggtgcga

SEQ ID NO: 1417130 - DNA, 15 bp, Homo sapiens
ttccccgggtgcgac

SEQ ID NO: 1417131 - DNA, 15 bp, Homo sapiens
tccccgggtgcgacg

SEQ ID NO: 1417132 - DNA, 15 bp, Homo sapiens
ccccgggtgcgacgc

SEQ ID NO: 1417133 - DNA, 15 bp, Homo sapiens
cccgggtgcgacgcg

SEQ ID NO: 1417134 - DNA, 15 bp, Homo sapiens
ccgggtgcgacgcgg

SEQ ID NO: 1417135 - DNA, 15 bp, Homo sapiens
cgggtgcgacgcggg

SEQ ID NO: 1417136 - DNA, 15 bp, Homo sapiens
gggtgcgacgcggga

SEQ ID NO: 1417137 - DNA, 15 bp, Homo sapiens
ggtgcgacgcgggac

SEQ ID NO: 1417138 - DNA, 15 bp, Homo sapiens
gtgcgacgcgggacg

SEQ ID NO: 1417139 - DNA, 15 bp, Homo sapiens
tgcgacgcgggacgg

SEQ ID NO: 1417140 - DNA, 15 bp, Homo sapiens
gcgacgcgggacggc

SEQ ID NO: 1417141 - DNA, 15 bp, Homo sapiens
cgacgcgggacggcc

SEQ ID NO: 1417142 - DNA, 15 bp, Homo sapiens
gacgcgggacggccg

SEQ ID NO: 1417143 - DNA, 15 bp, Homo sapiens
acgcgggacggccgc

SEQ ID NO: 1417144 - DNA, 15 bp, Homo sapiens
cgcgggacggccgcg

SEQ ID NO: 1417145 - DNA, 15 bp, Homo sapiens
gcgggacggccgcga

SEQ ID NO: 1417146 - DNA, 15 bp, Homo sapiens
cgggacggccgcgaa

SEQ ID NO: 1417147 - DNA, 15 bp, Homo sapiens
gggacggccgcgaag

SEQ ID NO: 1417148 - DNA, 15 bp, Homo sapiens
ggacggccgcgaaga

SEQ ID NO: 1417149 - DNA, 15 bp, Homo sapiens
gacggccgcgaagag

SEQ ID NO: 1417150 - DNA, 15 bp, Homo sapiens
acggccgcgaagagc

SEQ ID NO: 1417151 - DNA, 15 bp, Homo sapiens
cggccgcgaagagca

SEQ ID NO: 1417152 - DNA, 15 bp, Homo sapiens
ggccgcgaagagcaa

SEQ ID NO: 1417153 - DNA, 15 bp, Homo sapiens
gccgcgaagagcaaa

SEQ ID NO: 1417154 - DNA, 15 bp, Homo sapiens
ccgcgaagagcaaag

SEQ ID NO: 1417155 - DNA, 15 bp, Homo sapiens
cgcgaagagcaaagt

SEQ ID NO: 1417156 - DNA, 15 bp, Homo sapiens
gcgaagagcaaagtt

SEQ ID NO: 1417157 - DNA, 15 bp, Homo sapiens
cgaagagcaaagttc

SEQ ID NO: 1417158 - DNA, 15 bp, Homo sapiens
gaagagcaaagttcg

SEQ ID NO: 1417159 - DNA, 15 bp, Homo sapiens
aagagcaaagttcgt

SEQ ID NO: 1417160 - DNA, 15 bp, Homo sapiens
agagcaaagttcgtc

SEQ ID NO: 1417161 - DNA, 15 bp, Homo sapiens
gagcaaagttcgtcc

SEQ ID NO: 1417162 - DNA, 15 bp, Homo sapiens
agcaaagttcgtccg

SEQ ID NO: 1417163 - DNA, 15 bp, Homo sapiens
gcaaagttcgtccgc

SEQ ID NO: 1417164 - DNA, 15 bp, Homo sapiens
caaagttcgtccgcg

SEQ ID NO: 1417165 - DNA, 15 bp, Homo sapiens
aaagttcgtccgcgg

SEQ ID NO: 1417166 - DNA, 15 bp, Homo sapiens
aagttcgtccgcggt

SEQ ID NO: 1417167 - DNA, 15 bp, Homo sapiens
agttcgtccgcggta

SEQ ID NO: 1417168 - DNA, 15 bp, Homo sapiens
gttcgtccgcggtag

SEQ ID NO: 1417169 - DNA, 15 bp, Homo sapiens
ttcgtccgcggtagg

SEQ ID NO: 1417170 - DNA, 15 bp, Homo sapiens
tcgtccgcggtagga

SEQ ID NO: 1417171 - DNA, 15 bp, Homo sapiens
cgtccgcggtaggaa

SEQ ID NO: 1417172 - DNA, 15 bp, Homo sapiens
gtccgcggtaggaac

SEQ ID NO: 1417173 - DNA, 15 bp, Homo sapiens
tccgcggtaggaact

SEQ ID NO: 1417174 - DNA, 15 bp, Homo sapiens
ccgcggtaggaactt

SEQ ID NO: 1417175 - DNA, 15 bp, Homo sapiens
cgcggtaggaacttc

SEQ ID NO: 1417176 - DNA, 15 bp, Homo sapiens
gcggtaggaacttcg

SEQ ID NO: 1417177 - DNA, 15 bp, Homo sapiens
cggtaggaacttcga

SEQ ID NO: 1417178 - DNA, 15 bp, Homo sapiens
ggtaggaacttcgag

SEQ ID NO: 1417179 - DNA, 15 bp, Homo sapiens
gtaggaacttcgagg

SEQ ID NO: 1417180 - DNA, 15 bp, Homo sapiens
taggaacttcgaggc

SEQ ID NO: 1417181 - DNA, 15 bp, Homo sapiens
aggaacttcgaggcc

SEQ ID NO: 1417182 - DNA, 15 bp, Homo sapiens
ggaacttcgaggccc

SEQ ID NO: 1417183 - DNA, 15 bp, Homo sapiens
gaacttcgaggcccg

SEQ ID NO: 1417184 - DNA, 15 bp, Homo sapiens
aacttcgaggcccgg

SEQ ID NO: 1417185 - DNA, 15 bp, Homo sapiens
acttcgaggcccggt

SEQ ID NO: 1417186 - DNA, 15 bp, Homo sapiens
cttcgaggcccggtt

SEQ ID NO: 1417187 - DNA, 15 bp, Homo sapiens
ttcgaggcccggtta

SEQ ID NO: 1417188 - DNA, 15 bp, Homo sapiens
tcgaggcccggttag

SEQ ID NO: 1417189 - DNA, 15 bp, Homo sapiens
cgaggcccggttagg

SEQ ID NO: 1417190 - DNA, 15 bp, Homo sapiens
gaggcccggttagga

SEQ ID NO: 1417191 - DNA, 15 bp, Homo sapiens
aggcccggttaggac

SEQ ID NO: 1417192 - DNA, 15 bp, Homo sapiens
ggcccggttaggacc

SEQ ID NO: 1417193 - DNA, 15 bp, Homo sapiens
gcccggttaggaccg

SEQ ID NO: 1417194 - DNA, 15 bp, Homo sapiens
cccggttaggaccga

SEQ ID NO: 1417195 - DNA, 15 bp, Homo sapiens
ccggttaggaccgat

SEQ ID NO: 1417196 - DNA, 15 bp, Homo sapiens
cggttaggaccgatc

SEQ ID NO: 1417197 - DNA, 15 bp, Homo sapiens
ggttaggaccgatct

SEQ ID NO: 1417198 - DNA, 15 bp, Homo sapiens
gttaggaccgatctc

SEQ ID NO: 1417199 - DNA, 15 bp, Homo sapiens
ttaggaccgatctcc

SEQ ID NO: 1417200 - DNA, 15 bp, Homo sapiens
taggaccgatctccg

SEQ ID NO: 1417201 - DNA, 15 bp, Homo sapiens
aggaccgatctccgg

SEQ ID NO: 1417202 - DNA, 15 bp, Homo sapiens
ggaccgatctccggc

SEQ ID NO: 1417203 - DNA, 15 bp, Homo sapiens
gaccgatctccggcc

SEQ ID NO: 1417204 - DNA, 15 bp, Homo sapiens
accgatctccggcct

SEQ ID NO: 1417205 - DNA, 15 bp, Homo sapiens
ccgatctccggcctc

SEQ ID NO: 1417206 - DNA, 15 bp, Homo sapiens
cgatctccggcctcc

SEQ ID NO: 1417207 - DNA, 15 bp, Homo sapiens
gatctccggcctccg

SEQ ID NO: 1417208 - DNA, 15 bp, Homo sapiens
atctccggcctccga

SEQ ID NO: 1417209 - DNA, 15 bp, Homo sapiens
tctccggcctccgag

SEQ ID NO: 1417210 - DNA, 15 bp, Homo sapiens
ctccggcctccgagt

SEQ ID NO: 1417211 - DNA, 15 bp, Homo sapiens
tccggcctccgagtc

SEQ ID NO: 1417212 - DNA, 15 bp, Homo sapiens
ccggcctccgagtct

SEQ ID NO: 1417213 - DNA, 15 bp, Homo sapiens
cggcctccgagtcta

SEQ ID NO: 1417214 - DNA, 15 bp, Homo sapiens
ggcctccgagtctac

SEQ ID NO: 1417215 - DNA, 15 bp, Homo sapiens
gcctccgagtctact

SEQ ID NO: 1417216 - DNA, 15 bp, Homo sapiens
cctccgagtctactt

SEQ ID NO: 1417217 - DNA, 15 bp, Homo sapiens
ctccgagtctactta

SEQ ID NO: 1417218 - DNA, 15 bp, Homo sapiens
tccgagtctacttag

SEQ ID NO: 1417219 - DNA, 15 bp, Homo sapiens
ccgagtctacttagc

SEQ ID NO: 1417220 - DNA, 15 bp, Homo sapiens
cgagtctacttagcc

SEQ ID NO: 1417221 - DNA, 15 bp, Homo sapiens
gagtctacttagccg

SEQ ID NO: 1417222 - DNA, 15 bp, Homo sapiens
agtctacttagccgt

SEQ ID NO: 1417223 - DNA, 15 bp, Homo sapiens
gtctacttagccgtg

SEQ ID NO: 1417224 - DNA, 15 bp, Homo sapiens
tctacttagccgtgt

SEQ ID NO: 1417225 - DNA, 15 bp, Homo sapiens
ctacttagccgtgtc

SEQ ID NO: 1417226 - DNA, 15 bp, Homo sapiens
tacttagccgtgtcc

SEQ ID NO: 1417227 - DNA, 15 bp, Homo sapiens
acttagccgtgtcca

SEQ ID NO: 1417228 - DNA, 15 bp, Homo sapiens
cttagccgtgtccac

SEQ ID NO: 1417229 - DNA, 15 bp, Homo sapiens
ttagccgtgtccacg

SEQ ID NO: 1417230 - DNA, 15 bp, Homo sapiens
tagccgtgtccacgc

SEQ ID NO: 1417231 - DNA, 15 bp, Homo sapiens
agccgtgtccacgct

SEQ ID NO: 1417232 - DNA, 15 bp, Homo sapiens
gccgtgtccacgctc

SEQ ID NO: 1417233 - DNA, 15 bp, Homo sapiens
ccgtgtccacgctcg

SEQ ID NO: 1417234 - DNA, 15 bp, Homo sapiens
cgtgtccacgctcgt

SEQ ID NO: 1417235 - DNA, 15 bp, Homo sapiens
gtgtccacgctcgtg

SEQ ID NO: 1417236 - DNA, 15 bp, Homo sapiens
tgtccacgctcgtgc

SEQ ID NO: 1417237 - DNA, 15 bp, Homo sapiens
gtccacgctcgtgcc

SEQ ID NO: 1417238 - DNA, 15 bp, Homo sapiens
tccacgctcgtgcct

SEQ ID NO: 1417239 - DNA, 15 bp, Homo sapiens
ccacgctcgtgcctt

SEQ ID NO: 1417240 - DNA, 15 bp, Homo sapiens
cacgctcgtgccttt

SEQ ID NO: 1417241 - DNA, 15 bp, Homo sapiens
acgctcgtgcctttt

SEQ ID NO: 1417242 - DNA, 15 bp, Homo sapiens
cgctcgtgccttttc

SEQ ID NO: 1417243 - DNA, 15 bp, Homo sapiens
gctcgtgccttttcc

SEQ ID NO: 1417244 - DNA, 15 bp, Homo sapiens
ctcgtgccttttccc

SEQ ID NO: 1417245 - DNA, 15 bp, Homo sapiens
tcgtgccttttccct

SEQ ID NO: 1417246 - DNA, 15 bp, Homo sapiens
cgtgccttttccctc

SEQ ID NO: 1417247 - DNA, 15 bp, Homo sapiens
gtgccttttccctct

SEQ ID NO: 1417248 - DNA, 15 bp, Homo sapiens
tgccttttccctctt

SEQ ID NO: 1417249 - DNA, 15 bp, Homo sapiens
gccttttccctcttg

SEQ ID NO: 1417250 - DNA, 15 bp, Homo sapiens
ccttttccctcttgc

SEQ ID NO: 1417251 - DNA, 15 bp, Homo sapiens
cttttccctcttgca

SEQ ID NO: 1417252 - DNA, 15 bp, Homo sapiens
ttttccctcttgcag

SEQ ID NO: 1417253 - DNA, 15 bp, Homo sapiens
tttccctcttgcagc

SEQ ID NO: 1417254 - DNA, 15 bp, Homo sapiens
ttccctcttgcagcg

SEQ ID NO: 1417255 - DNA, 15 bp, Homo sapiens
tccctcttgcagcga

SEQ ID NO: 1417256 - DNA, 15 bp, Homo sapiens
ccctcttgcagcgaa

SEQ ID NO: 1417257 - DNA, 15 bp, Homo sapiens
cctcttgcagcgaaa

SEQ ID NO: 1417258 - DNA, 15 bp, Homo sapiens
ctcttgcagcgaaat

SEQ ID NO: 1417259 - DNA, 15 bp, Homo sapiens
tcttgcagcgaaata

SEQ ID NO: 1417260 - DNA, 15 bp, Homo sapiens
cttgcagcgaaataa

SEQ ID NO: 1417261 - DNA, 15 bp, Homo sapiens
ttgcagcgaaataac

SEQ ID NO: 1417262 - DNA, 15 bp, Homo sapiens
tgcagcgaaataact

SEQ ID NO: 1417263 - DNA, 15 bp, Homo sapiens
gcagcgaaataactg

SEQ ID NO: 1417264 - DNA, 15 bp, Homo sapiens
cagcgaaataactgg

SEQ ID NO: 1417265 - DNA, 15 bp, Homo sapiens
agcgaaataactggg

SEQ ID NO: 1417266 - DNA, 15 bp, Homo sapiens
gcgaaataactgggc

SEQ ID NO: 1417267 - DNA, 15 bp, Homo sapiens
cgaaataactgggcg

SEQ ID NO: 1417268 - DNA, 15 bp, Homo sapiens
gaaataactgggcgg

SEQ ID NO: 1417269 - DNA, 15 bp, Homo sapiens
aaataactgggcggg

SEQ ID NO: 1417270 - DNA, 15 bp, Homo sapiens
aataactgggcgggg

SEQ ID NO: 1417271 - DNA, 15 bp, Homo sapiens
ataactgggcggggc

SEQ ID NO: 1417272 - DNA, 15 bp, Homo sapiens
taactgggcggggcc

SEQ ID NO: 1417273 - DNA, 15 bp, Homo sapiens
aactgggcggggccc

SEQ ID NO: 1417274 - DNA, 15 bp, Homo sapiens
actgggcggggcccg

SEQ ID NO: 1417275 - DNA, 15 bp, Homo sapiens
ctgggcggggcccga

SEQ ID NO: 1417276 - DNA, 15 bp, Homo sapiens
tgggcggggcccgac

SEQ ID NO: 1417277 - DNA, 15 bp, Homo sapiens
gggcggggcccgacg

SEQ ID NO: 1417278 - DNA, 15 bp, Homo sapiens
ggcggggcccgacgc

SEQ ID NO: 1417279 - DNA, 15 bp, Homo sapiens
gcggggcccgacgcg

SEQ ID NO: 1417280 - DNA, 15 bp, Homo sapiens
cggggcccgacgcgc

SEQ ID NO: 1417281 - DNA, 15 bp, Homo sapiens
ggggcccgacgcgcg

SEQ ID NO: 1417282 - DNA, 15 bp, Homo sapiens
gggcccgacgcgcgt

SEQ ID NO: 1417283 - DNA, 15 bp, Homo sapiens
ggcccgacgcgcgtc

SEQ ID NO: 1417284 - DNA, 15 bp, Homo sapiens
gcccgacgcgcgtcc

SEQ ID NO: 1417285 - DNA, 15 bp, Homo sapiens
cccgacgcgcgtcct

SEQ ID NO: 1417286 - DNA, 15 bp, Homo sapiens
ccgacgcgcgtcctc

SEQ ID NO: 1417287 - DNA, 15 bp, Homo sapiens
cgacgcgcgtcctcc

SEQ ID NO: 1417288 - DNA, 15 bp, Homo sapiens
gacgcgcgtcctcca

SEQ ID NO: 1417289 - DNA, 15 bp, Homo sapiens
acgcgcgtcctccag

SEQ ID NO: 1417290 - DNA, 15 bp, Homo sapiens
cgcgcgtcctccagc

SEQ ID NO: 1417291 - DNA, 15 bp, Homo sapiens
gcgcgtcctccagcg

SEQ ID NO: 1417292 - DNA, 15 bp, Homo sapiens
cgcgtcctccagcga

SEQ ID NO: 1417293 - DNA, 15 bp, Homo sapiens
gcgtcctccagcgac

SEQ ID NO: 1417294 - DNA, 15 bp, Homo sapiens
cgtcctccagcgact

SEQ ID NO: 1417295 - DNA, 15 bp, Homo sapiens
gtcctccagcgactc

SEQ ID NO: 1417296 - DNA, 15 bp, Homo sapiens
tcctccagcgactcc

SEQ ID NO: 1417297 - DNA, 15 bp, Homo sapiens
cctccagcgactccg

SEQ ID NO: 1417298 - DNA, 15 bp, Homo sapiens
ctccagcgactccgg

SEQ ID NO: 1417299 - DNA, 15 bp, Homo sapiens
tccagcgactccggg

SEQ ID NO: 1417300 - DNA, 15 bp, Homo sapiens
ccagcgactccggga

SEQ ID NO: 1417301 - DNA, 15 bp, Homo sapiens
cagcgactccgggaa

SEQ ID NO: 1417302 - DNA, 15 bp, Homo sapiens
agcgactccgggaac

SEQ ID NO: 1417303 - DNA, 15 bp, Homo sapiens
gcgactccgggaacc

SEQ ID NO: 1417304 - DNA, 15 bp, Homo sapiens
cgactccgggaaccc

SEQ ID NO: 1417305 - DNA, 15 bp, Homo sapiens
gactccgggaaccca

SEQ ID NO: 1417306 - DNA, 15 bp, Homo sapiens
actccgggaacccaa

SEQ ID NO: 1417307 - DNA, 15 bp, Homo sapiens
ctccgggaacccaag

SEQ ID NO: 1417308 - DNA, 15 bp, Homo sapiens
tccgggaacccaagg

SEQ ID NO: 1417309 - DNA, 15 bp, Homo sapiens
ccgggaacccaaggc

SEQ ID NO: 1417310 - DNA, 15 bp, Homo sapiens
cgggaacccaaggcc

SEQ ID NO: 1417311 - DNA, 15 bp, Homo sapiens
gggaacccaaggcct

SEQ ID NO: 1417312 - DNA, 15 bp, Homo sapiens
ggaacccaaggcctc

SEQ ID NO: 1417313 - DNA, 15 bp, Homo sapiens
gaacccaaggcctcc

SEQ ID NO: 1417314 - DNA, 15 bp, Homo sapiens
aacccaaggcctcct

SEQ ID NO: 1417315 - DNA, 15 bp, Homo sapiens
acccaaggcctcctt

SEQ ID NO: 1417316 - DNA, 15 bp, Homo sapiens
cccaaggcctccttc

SEQ ID NO: 1417317 - DNA, 15 bp, Homo sapiens
ccaaggcctccttca

SEQ ID NO: 1417318 - DNA, 15 bp, Homo sapiens
caaggcctccttcac

SEQ ID NO: 1417319 - DNA, 15 bp, Homo sapiens
aaggcctccttcacc

SEQ ID NO: 1417320 - DNA, 15 bp, Homo sapiens
aggcctccttcacct

SEQ ID NO: 1417321 - DNA, 15 bp, Homo sapiens
ggcctccttcacctc

SEQ ID NO: 1417322 - DNA, 15 bp, Homo sapiens
gcctccttcacctcg

SEQ ID NO: 1417323 - DNA, 15 bp, Homo sapiens
cctccttcacctcgc

SEQ ID NO: 1417324 - DNA, 15 bp, Homo sapiens
ctccttcacctcgct

SEQ ID NO: 1417325 - DNA, 15 bp, Homo sapiens
tccttcacctcgctc

SEQ ID NO: 1417326 - DNA, 15 bp, Homo sapiens
ccttcacctcgctca

SEQ ID NO: 1417327 - DNA, 15 bp, Homo sapiens
cttcacctcgctcaa

SEQ ID NO: 1417328 - DNA, 15 bp, Homo sapiens
ttcacctcgctcaaa

SEQ ID NO: 1417329 - DNA, 15 bp, Homo sapiens
tcacctcgctcaaaa

SEQ ID NO: 1417330 - DNA, 15 bp, Homo sapiens
cacctcgctcaaaat

SEQ ID NO: 1417331 - DNA, 15 bp, Homo sapiens
acctcgctcaaaatt

SEQ ID NO: 1417332 - DNA, 15 bp, Homo sapiens
cctcgctcaaaattc

SEQ ID NO: 1417333 - DNA, 15 bp, Homo sapiens
ctcgctcaaaattca

SEQ ID NO: 1417334 - DNA, 15 bp, Homo sapiens
tcgctcaaaattcac

SEQ ID NO: 1417335 - DNA, 15 bp, Homo sapiens
cgctcaaaattcacc

SEQ ID NO: 1417336 - DNA, 15 bp, Homo sapiens
gctcaaaattcaccc

SEQ ID NO: 1417337 - DNA, 15 bp, Homo sapiens
ctcaaaattcacccg

SEQ ID NO: 1417338 - DNA, 15 bp, Homo sapiens
tcaaaattcacccga

SEQ ID NO: 1417339 - DNA, 15 bp, Homo sapiens
caaaattcacccgaa

SEQ ID NO: 1417340 - DNA, 15 bp, Homo sapiens
aaaattcacccgaaa

SEQ ID NO: 1417341 - DNA, 15 bp, Homo sapiens
aaattcacccgaaaa

SEQ ID NO: 1417342 - DNA, 15 bp, Homo sapiens
aattcacccgaaaat

SEQ ID NO: 1417343 - DNA, 15 bp, Homo sapiens
attcacccgaaaatg

SEQ ID NO: 1417344 - DNA, 15 bp, Homo sapiens
ttcacccgaaaatgc

SEQ ID NO: 1417345 - DNA, 15 bp, Homo sapiens
tcacccgaaaatgcg

SEQ ID NO: 1417346 - DNA, 15 bp, Homo sapiens
cacccgaaaatgcgc

SEQ ID NO: 1417347 - DNA, 15 bp, Homo sapiens
acccgaaaatgcgct

SEQ ID NO: 1417348 - DNA, 15 bp, Homo sapiens
cccgaaaatgcgctg

SEQ ID NO: 1417349 - DNA, 15 bp, Homo sapiens
ccgaaaatgcgctga

SEQ ID NO: 1417350 - DNA, 15 bp, Homo sapiens
cgaaaatgcgctgag

SEQ ID NO: 1417351 - DNA, 15 bp, Homo sapiens
gaaaatgcgctgaga

SEQ ID NO: 1417352 - DNA, 15 bp, Homo sapiens
aaaatgcgctgagac

SEQ ID NO: 1417353 - DNA, 15 bp, Homo sapiens
aaatgcgctgagact

SEQ ID NO: 1417354 - DNA, 15 bp, Homo sapiens
aatgcgctgagactt

SEQ ID NO: 1417355 - DNA, 15 bp, Homo sapiens
atgcgctgagacttt

SEQ ID NO: 1417356 - DNA, 15 bp, Homo sapiens
tgcgctgagactttg

SEQ ID NO: 1417357 - DNA, 15 bp, Homo sapiens
gcgctgagactttgg

SEQ ID NO: 1417358 - DNA, 15 bp, Homo sapiens
cgctgagactttggc

SEQ ID NO: 1417359 - DNA, 15 bp, Homo sapiens
gctgagactttggca

SEQ ID NO: 1417360 - DNA, 15 bp, Homo sapiens
ctgagactttggcat

SEQ ID NO: 1417361 - DNA, 15 bp, Homo sapiens
tgagactttggcatg

SEQ ID NO: 1417362 - DNA, 15 bp, Homo sapiens
gagactttggcatgg

SEQ ID NO: 1417363 - DNA, 15 bp, Homo sapiens
agactttggcatggg

SEQ ID NO: 1417364 - DNA, 15 bp, Homo sapiens
gactttggcatgggg

SEQ ID NO: 1417365 - DNA, 15 bp, Homo sapiens
actttggcatggggc

SEQ ID NO: 1417366 - DNA, 15 bp, Homo sapiens
ctttggcatggggct

SEQ ID NO: 1417367 - DNA, 15 bp, Homo sapiens
tttggcatggggctg

SEQ ID NO: 1417368 - DNA, 15 bp, Homo sapiens
ttggcatggggctgc

SEQ ID NO: 1417369 - DNA, 15 bp, Homo sapiens
tggcatggggctgcg

SEQ ID NO: 1417370 - DNA, 15 bp, Homo sapiens
ggcatggggctgcgc

SEQ ID NO: 1417371 - DNA, 15 bp, Homo sapiens
gcatggggctgcgct

SEQ ID NO: 1417372 - DNA, 15 bp, Homo sapiens
catggggctgcgctg

SEQ ID NO: 1417373 - DNA, 15 bp, Homo sapiens
atggggctgcgctgt

SEQ ID NO: 1417374 - DNA, 15 bp, Homo sapiens
tggggctgcgctgtg

SEQ ID NO: 1417375 - DNA, 15 bp, Homo sapiens
ggggctgcgctgtgt

SEQ ID NO: 1417376 - DNA, 15 bp, Homo sapiens
gggctgcgctgtgtc

SEQ ID NO: 1417377 - DNA, 15 bp, Homo sapiens
ggctgcgctgtgtcc

SEQ ID NO: 1417378 - DNA, 15 bp, Homo sapiens
gctgcgctgtgtccc

SEQ ID NO: 1417379 - DNA, 15 bp, Homo sapiens
ctgcgctgtgtccca

SEQ ID NO: 1417380 - DNA, 15 bp, Homo sapiens
tgcgctgtgtcccac

SEQ ID NO: 1417381 - DNA, 15 bp, Homo sapiens
gcgctgtgtcccact

SEQ ID NO: 1417382 - DNA, 15 bp, Homo sapiens
cgctgtgtcccactg

SEQ ID NO: 1417383 - DNA, 15 bp, Homo sapiens
gctgtgtcccactga

SEQ ID NO: 1417384 - DNA, 15 bp, Homo sapiens
ctgtgtcccactgac

SEQ ID NO: 1417385 - DNA, 15 bp, Homo sapiens
tgtgtcccactgacg

SEQ ID NO: 1417386 - DNA, 15 bp, Homo sapiens
gtgtcccactgacgt

SEQ ID NO: 1417387 - DNA, 15 bp, Homo sapiens
tgtcccactgacgtt

SEQ ID NO: 1417388 - DNA, 15 bp, Homo sapiens
gtcccactgacgtta

SEQ ID NO: 1417389 - DNA, 15 bp, Homo sapiens
tcccactgacgttac

SEQ ID NO: 1417390 - DNA, 15 bp, Homo sapiens
cccactgacgttaca

SEQ ID NO: 1417391 - DNA, 15 bp, Homo sapiens
ccactgacgttacag

SEQ ID NO: 1417392 - DNA, 15 bp, Homo sapiens
cactgacgttacaga

SEQ ID NO: 1417393 - DNA, 15 bp, Homo sapiens
actgacgttacagaa

SEQ ID NO: 1417394 - DNA, 15 bp, Homo sapiens
ctgacgttacagaag

SEQ ID NO: 1417395 - DNA, 15 bp, Homo sapiens
tgacgttacagaagc

SEQ ID NO: 1417396 - DNA, 15 bp, Homo sapiens
gacgttacagaagcg

SEQ ID NO: 1417397 - DNA, 15 bp, Homo sapiens
acgttacagaagcgc

SEQ ID NO: 1417398 - DNA, 15 bp, Homo sapiens
cgttacagaagcgct

SEQ ID NO: 1417399 - DNA, 15 bp, Homo sapiens
gttacagaagcgctt

SEQ ID NO: 1417400 - DNA, 15 bp, Homo sapiens
ttacagaagcgctta

SEQ ID NO: 1417401 - DNA, 15 bp, Homo sapiens
tacagaagcgcttat

SEQ ID NO: 1417402 - DNA, 15 bp, Homo sapiens
acagaagcgcttatg

SEQ ID NO: 1417403 - DNA, 15 bp, Homo sapiens
cagaagcgcttatga

SEQ ID NO: 1417404 - DNA, 15 bp, Homo sapiens
agaagcgcttatgaa

SEQ ID NO: 1417405 - DNA, 15 bp, Homo sapiens
gaagcgcttatgaat

SEQ ID NO: 1417406 - DNA, 15 bp, Homo sapiens
aagcgcttatgaatt

SEQ ID NO: 1417407 - DNA, 15 bp, Homo sapiens
agcgcttatgaattt

SEQ ID NO: 1417408 - DNA, 15 bp, Homo sapiens
gcgcttatgaattta

SEQ ID NO: 1417409 - DNA, 15 bp, Homo sapiens
cgcttatgaatttaa

SEQ ID NO: 1417410 - DNA, 15 bp, Homo sapiens
gcttatgaatttaaa

SEQ ID NO: 1417411 - DNA, 15 bp, Homo sapiens
cttatgaatttaaaa

SEQ ID NO: 1417412 - DNA, 15 bp, Homo sapiens
ttatgaatttaaaaa

SEQ ID NO: 1417413 - DNA, 15 bp, Homo sapiens
tatgaatttaaaaac

SEQ ID NO: 1417414 - DNA, 15 bp, Homo sapiens
atgaatttaaaaact

SEQ ID NO: 1417415 - DNA, 15 bp, Homo sapiens
tgaatttaaaaactg

SEQ ID NO: 1417416 - DNA, 15 bp, Homo sapiens
gaatttaaaaactgc

SEQ ID NO: 1417417 - DNA, 15 bp, Homo sapiens
aatttaaaaactgct

SEQ ID NO: 1417418 - DNA, 15 bp, Homo sapiens
atttaaaaactgctc

SEQ ID NO: 1417419 - DNA, 15 bp, Homo sapiens
tttaaaaactgctcc

SEQ ID NO: 1417420 - DNA, 15 bp, Homo sapiens
ttaaaaactgctcca

SEQ ID NO: 1417421 - DNA, 15 bp, Homo sapiens
taaaaactgctccag

SEQ ID NO: 1417422 - DNA, 15 bp, Homo sapiens
aaaaactgctccagg

SEQ ID NO: 1417423 - DNA, 15 bp, Homo sapiens
aaaactgctccaggc

SEQ ID NO: 1417424 - DNA, 15 bp, Homo sapiens
aaactgctccaggcg

SEQ ID NO: 1417425 - DNA, 15 bp, Homo sapiens
aactgctccaggcgg

SEQ ID NO: 1417426 - DNA, 15 bp, Homo sapiens
actgctccaggcggc

SEQ ID NO: 1417427 - DNA, 15 bp, Homo sapiens
ctgctccaggcggcc

SEQ ID NO: 1417428 - DNA, 15 bp, Homo sapiens
tgctccaggcggccg

SEQ ID NO: 1417429 - DNA, 15 bp, Homo sapiens
gctccaggcggccgg

SEQ ID NO: 1417430 - DNA, 15 bp, Homo sapiens
ctccaggcggccgga

SEQ ID NO: 1417431 - DNA, 15 bp, Homo sapiens
tccaggcggccggac

SEQ ID NO: 1417432 - DNA, 15 bp, Homo sapiens
ccaggcggccggacg

SEQ ID NO: 1417433 - DNA, 15 bp, Homo sapiens
caggcggccggacgg

SEQ ID NO: 1417434 - DNA, 15 bp, Homo sapiens
aggcggccggacggc

SEQ ID NO: 1417435 - DNA, 15 bp, Homo sapiens
ggcggccggacggcg

SEQ ID NO: 1417436 - DNA, 15 bp, Homo sapiens
gcggccggacggcgg

SEQ ID NO: 1417437 - DNA, 15 bp, Homo sapiens
cggccggacggcggg

SEQ ID NO: 1417438 - DNA, 15 bp, Homo sapiens
ggccggacggcggga

SEQ ID NO: 1417439 - DNA, 15 bp, Homo sapiens
gccggacggcgggac

SEQ ID NO: 1417440 - DNA, 15 bp, Homo sapiens
ccggacggcgggaca

SEQ ID NO: 1417441 - DNA, 15 bp, Homo sapiens
cggacggcgggacaa

SEQ ID NO: 1417442 - DNA, 15 bp, Homo sapiens
ggacggcgggacaac

SEQ ID NO: 1417443 - DNA, 15 bp, Homo sapiens
gacggcgggacaacg

SEQ ID NO: 1417444 - DNA, 15 bp, Homo sapiens
acggcgggacaacgc

SEQ ID NO: 1417445 - DNA, 15 bp, Homo sapiens
cggcgggacaacgcc

SEQ ID NO: 1417446 - DNA, 15 bp, Homo sapiens
ggcgggacaacgcct

SEQ ID NO: 1417447 - DNA, 15 bp, Homo sapiens
gcgggacaacgcctc

SEQ ID NO: 1417448 - DNA, 15 bp, Homo sapiens
cgggacaacgcctcc

SEQ ID NO: 1417449 - DNA, 15 bp, Homo sapiens
gggacaacgcctcct

SEQ ID NO: 1417450 - DNA, 15 bp, Homo sapiens
ggacaacgcctcctc

SEQ ID NO: 1417451 - DNA, 15 bp, Homo sapiens
gacaacgcctcctca

SEQ ID NO: 1417452 - DNA, 15 bp, Homo sapiens
acaacgcctcctcac

SEQ ID NO: 1417453 - DNA, 15 bp, Homo sapiens
caacgcctcctcact

SEQ ID NO: 1417454 - DNA, 15 bp, Homo sapiens
aacgcctcctcactt

SEQ ID NO: 1417455 - DNA, 15 bp, Homo sapiens
acgcctcctcacttg

SEQ ID NO: 1417456 - DNA, 15 bp, Homo sapiens
cgcctcctcacttgc

SEQ ID NO: 1417457 - DNA, 15 bp, Homo sapiens
gcctcctcacttgct

SEQ ID NO: 1417458 - DNA, 15 bp, Homo sapiens
cctcctcacttgctc

SEQ ID NO: 1417459 - DNA, 15 bp, Homo sapiens
ctcctcacttgctcc

SEQ ID NO: 1417460 - DNA, 15 bp, Homo sapiens
tcctcacttgctcct

SEQ ID NO: 1417461 - DNA, 15 bp, Homo sapiens
cctcacttgctcctc

SEQ ID NO: 1417462 - DNA, 15 bp, Homo sapiens
ctcacttgctcctct

SEQ ID NO: 1417463 - DNA, 15 bp, Homo sapiens
tcacttgctcctcta

SEQ ID NO: 1417464 - DNA, 15 bp, Homo sapiens
cacttgctcctctac

SEQ ID NO: 1417465 - DNA, 15 bp, Homo sapiens
acttgctcctctacg

SEQ ID NO: 1417466 - DNA, 15 bp, Homo sapiens
cttgctcctctacgg

SEQ ID NO: 1417467 - DNA, 15 bp, Homo sapiens
ttgctcctctacggc

SEQ ID NO: 1417468 - DNA, 15 bp, Homo sapiens
tgctcctctacggca

SEQ ID NO: 1417469 - DNA, 15 bp, Homo sapiens
gctcctctacggcaa

SEQ ID NO: 1417470 - DNA, 15 bp, Homo sapiens
ctcctctacggcaag

SEQ ID NO: 1417471 - DNA, 15 bp, Homo sapiens
tcctctacggcaagg

SEQ ID NO: 1417472 - DNA, 15 bp, Homo sapiens
cctctacggcaaggc

SEQ ID NO: 1417473 - DNA, 15 bp, Homo sapiens
ctctacggcaaggcc

SEQ ID NO: 1417474 - DNA, 15 bp, Homo sapiens
tctacggcaaggccc

SEQ ID NO: 1417475 - DNA, 15 bp, Homo sapiens
ctacggcaaggcccc

SEQ ID NO: 1417476 - DNA, 15 bp, Homo sapiens
tacggcaaggcccct

SEQ ID NO: 1417477 - DNA, 15 bp, Homo sapiens
acggcaaggcccctt

SEQ ID NO: 1417478 - DNA, 15 bp, Homo sapiens
cggcaaggccccttc

SEQ ID NO: 1417479 - DNA, 15 bp, Homo sapiens
ggcaaggccccttcc

SEQ ID NO: 1417480 - DNA, 15 bp, Homo sapiens
gcaaggccccttcct

SEQ ID NO: 1417481 - DNA, 15 bp, Homo sapiens
caaggccccttcctt

SEQ ID NO: 1417482 - DNA, 15 bp, Homo sapiens
aaggccccttccttc

SEQ ID NO: 1417483 - DNA, 15 bp, Homo sapiens
aggccccttccttct

SEQ ID NO: 1417484 - DNA, 15 bp, Homo sapiens
ggccccttccttctc

SEQ ID NO: 1417485 - DNA, 15 bp, Homo sapiens
gccccttccttctcc

SEQ ID NO: 1417486 - DNA, 15 bp, Homo sapiens
ccccttccttctccc

SEQ ID NO: 1417487 - DNA, 15 bp, Homo sapiens
cccttccttctccct

SEQ ID NO: 1417488 - DNA, 15 bp, Homo sapiens
ccttccttctccctg

SEQ ID NO: 1417489 - DNA, 15 bp, Homo sapiens
cttccttctccctgc

SEQ ID NO: 1417490 - DNA, 15 bp, Homo sapiens
ttccttctccctgcc

SEQ ID NO: 1417491 - DNA, 15 bp, Homo sapiens
tccttctccctgccg

SEQ ID NO: 1417492 - DNA, 15 bp, Homo sapiens
ccttctccctgccgg

SEQ ID NO: 1417493 - DNA, 15 bp, Homo sapiens
cttctccctgccggc

SEQ ID NO: 1417494 - DNA, 15 bp, Homo sapiens
ttctccctgccggct

SEQ ID NO: 1417495 - DNA, 15 bp, Homo sapiens
tctccctgccggctg

SEQ ID NO: 1417496 - DNA, 15 bp, Homo sapiens
ctccctgccggctgc

SEQ ID NO: 1417497 - DNA, 15 bp, Homo sapiens
tccctgccggctgcg

SEQ ID NO: 1417498 - DNA, 15 bp, Homo sapiens
ccctgccggctgcgg

SEQ ID NO: 1417499 - DNA, 15 bp, Homo sapiens
cctgccggctgcggt

SEQ ID NO: 1417500 - DNA, 15 bp, Homo sapiens
ctgccggctgcggtg

SEQ ID NO: 1417501 - DNA, 15 bp, Homo sapiens
tgccggctgcggtgg

SEQ ID NO: 1417502 - DNA, 15 bp, Homo sapiens
gccggctgcggtggt

SEQ ID NO: 1417503 - DNA, 15 bp, Homo sapiens
ccggctgcggtggtg

SEQ ID NO: 1417504 - DNA, 15 bp, Homo sapiens
cggctgcggtggtgt

SEQ ID NO: 1417505 - DNA, 15 bp, Homo sapiens
ggctgcggtggtgtg

SEQ ID NO: 1417506 - DNA, 15 bp, Homo sapiens
gctgcggtggtgtgt

SEQ ID NO: 1417507 - DNA, 15 bp, Homo sapiens
ctgcggtggtgtgta

SEQ ID NO: 1417508 - DNA, 15 bp, Homo sapiens
tgcggtggtgtgtag

SEQ ID NO: 1417509 - DNA, 15 bp, Homo sapiens
gcggtggtgtgtagg

SEQ ID NO: 1417510 - DNA, 15 bp, Homo sapiens
cggtggtgtgtaggg

SEQ ID NO: 1417511 - DNA, 15 bp, Homo sapiens
ggtggtgtgtagggt

SEQ ID NO: 1417512 - DNA, 15 bp, Homo sapiens
gtggtgtgtagggtg

SEQ ID NO: 1417513 - DNA, 15 bp, Homo sapiens
tggtgtgtagggtgg

SEQ ID NO: 1417514 - DNA, 15 bp, Homo sapiens
ggtgtgtagggtggt

SEQ ID NO: 1417515 - DNA, 15 bp, Homo sapiens
gtgtgtagggtggtc

SEQ ID NO: 1417516 - DNA, 15 bp, Homo sapiens
tgtgtagggtggtcc

SEQ ID NO: 1417517 - DNA, 15 bp, Homo sapiens
gtgtagggtggtccc

SEQ ID NO: 1417518 - DNA, 15 bp, Homo sapiens
tgtagggtggtccct

SEQ ID NO: 1417519 - DNA, 15 bp, Homo sapiens
gtagggtggtccctt

SEQ ID NO: 1417520 - DNA, 15 bp, Homo sapiens
tagggtggtcccttt

SEQ ID NO: 1417521 - DNA, 15 bp, Homo sapiens
agggtggtcccttta

SEQ ID NO: 1417522 - DNA, 15 bp, Homo sapiens
gggtggtccctttac

SEQ ID NO: 1417523 - DNA, 15 bp, Homo sapiens
ggtggtccctttaca

SEQ ID NO: 1417524 - DNA, 15 bp, Homo sapiens
gtggtccctttacag

SEQ ID NO: 1417525 - DNA, 15 bp, Homo sapiens
tggtccctttacaga

SEQ ID NO: 1417526 - DNA, 15 bp, Homo sapiens
ggtccctttacagag

SEQ ID NO: 1417527 - DNA, 15 bp, Homo sapiens
gtccctttacagagt

SEQ ID NO: 1417528 - DNA, 15 bp, Homo sapiens
tccctttacagagtt

SEQ ID NO: 1417529 - DNA, 15 bp, Homo sapiens
ccctttacagagttt

SEQ ID NO: 1417530 - DNA, 15 bp, Homo sapiens
cctttacagagtttc

SEQ ID NO: 1417531 - DNA, 15 bp, Homo sapiens
ctttacagagtttcc

SEQ ID NO: 1417532 - DNA, 15 bp, Homo sapiens
tttacagagtttcct

SEQ ID NO: 1417533 - DNA, 15 bp, Homo sapiens
ttacagagtttcctt

SEQ ID NO: 1417534 - DNA, 15 bp, Homo sapiens
tacagagtttcctta

SEQ ID NO: 1417535 - DNA, 15 bp, Homo sapiens
acagagtttccttaa

SEQ ID NO: 1417536 - DNA, 15 bp, Homo sapiens
cagagtttccttaat

SEQ ID NO: 1417537 - DNA, 15 bp, Homo sapiens
agagtttccttaatc

SEQ ID NO: 1417538 - DNA, 15 bp, Homo sapiens
gagtttccttaatcc

SEQ ID NO: 1417539 - DNA, 15 bp, Homo sapiens
agtttccttaatcca

SEQ ID NO: 1417540 - DNA, 15 bp, Homo sapiens
gtttccttaatccat

SEQ ID NO: 1417541 - DNA, 15 bp, Homo sapiens
tttccttaatccatc

SEQ ID NO: 1417542 - DNA, 15 bp, Homo sapiens
ttccttaatccatct

SEQ ID NO: 1417543 - DNA, 15 bp, Homo sapiens
tccttaatccatcta

SEQ ID NO: 1417544 - DNA, 15 bp, Homo sapiens
ccttaatccatctag

SEQ ID NO: 1417545 - DNA, 15 bp, Homo sapiens
cttaatccatctagc

SEQ ID NO: 1417546 - DNA, 15 bp, Homo sapiens
ttaatccatctagcc

SEQ ID NO: 1417547 - DNA, 15 bp, Homo sapiens
taatccatctagcct

SEQ ID NO: 1417548 - DNA, 15 bp, Homo sapiens
aatccatctagcctg

SEQ ID NO: 1417549 - DNA, 15 bp, Homo sapiens
atccatctagcctga

SEQ ID NO: 1417550 - DNA, 15 bp, Homo sapiens
tccatctagcctgac

SEQ ID NO: 1417551 - DNA, 15 bp, Homo sapiens
ccatctagcctgacc

SEQ ID NO: 1417552 - DNA, 15 bp, Homo sapiens
catctagcctgacct

SEQ ID NO: 1417553 - DNA, 15 bp, Homo sapiens
atctagcctgacctc

SEQ ID NO: 1417554 - DNA, 15 bp, Homo sapiens
tctagcctgacctca

SEQ ID NO: 1417555 - DNA, 15 bp, Homo sapiens
ctagcctgacctcac

SEQ ID NO: 1417556 - DNA, 15 bp, Homo sapiens
tagcctgacctcacc

SEQ ID NO: 1417557 - DNA, 15 bp, Homo sapiens
agcctgacctcacct

SEQ ID NO: 1417558 - DNA, 15 bp, Homo sapiens
gcctgacctcacctg

SEQ ID NO: 1417559 - DNA, 15 bp, Homo sapiens
cctgacctcacctgc

SEQ ID NO: 1417560 - DNA, 15 bp, Homo sapiens
ctgacctcacctgcg

SEQ ID NO: 1417561 - DNA, 15 bp, Homo sapiens
tgacctcacctgcgg

SEQ ID NO: 1417562 - DNA, 15 bp, Homo sapiens
gacctcacctgcggg

SEQ ID NO: 1417563 - DNA, 15 bp, Homo sapiens
acctcacctgcggga

SEQ ID NO: 1417564 - DNA, 15 bp, Homo sapiens
cctcacctgcgggat

SEQ ID NO: 1417565 - DNA, 15 bp, Homo sapiens
ctcacctgcgggatg

SEQ ID NO: 1417566 - DNA, 15 bp, Homo sapiens
tcacctgcgggatgt

SEQ ID NO: 1417567 - DNA, 15 bp, Homo sapiens
cacctgcgggatgtt

SEQ ID NO: 1417568 - DNA, 15 bp, Homo sapiens
acctgcgggatgttc

SEQ ID NO: 1417569 - DNA, 15 bp, Homo sapiens
cctgcgggatgttcc

SEQ ID NO: 1417570 - DNA, 15 bp, Homo sapiens
ctgcgggatgttcca

SEQ ID NO: 1417571 - DNA, 15 bp, Homo sapiens
tgcgggatgttccat

SEQ ID NO: 1417572 - DNA, 15 bp, Homo sapiens
gcgggatgttccatt

SEQ ID NO: 1417573 - DNA, 15 bp, Homo sapiens
cgggatgttccattt

SEQ ID NO: 1417574 - DNA, 15 bp, Homo sapiens
gggatgttccatttc

SEQ ID NO: 1417575 - DNA, 15 bp, Homo sapiens
ggatgttccatttcc

SEQ ID NO: 1417576 - DNA, 15 bp, Homo sapiens
gatgttccatttccc

SEQ ID NO: 1417577 - DNA, 15 bp, Homo sapiens
atgttccatttcccg

SEQ ID NO: 1417578 - DNA, 15 bp, Homo sapiens
tgttccatttcccga

SEQ ID NO: 1417579 - DNA, 15 bp, Homo sapiens
gttccatttcccgat

SEQ ID NO: 1417580 - DNA, 15 bp, Homo sapiens
ttccatttcccgatc

SEQ ID NO: 1417581 - DNA, 15 bp, Homo sapiens
tccatttcccgatcc

SEQ ID NO: 1417582 - DNA, 15 bp, Homo sapiens
ccatttcccgatcca

SEQ ID NO: 1417583 - DNA, 15 bp, Homo sapiens
catttcccgatccac

SEQ ID NO: 1417584 - DNA, 15 bp, Homo sapiens
atttcccgatccacc

SEQ ID NO: 1417585 - DNA, 15 bp, Homo sapiens
tttcccgatccacct

SEQ ID NO: 1417586 - DNA, 15 bp, Homo sapiens
ttcccgatccacctc

SEQ ID NO: 1417587 - DNA, 15 bp, Homo sapiens
tcccgatccacctcc

SEQ ID NO: 1417588 - DNA, 15 bp, Homo sapiens
cccgatccacctccc

SEQ ID NO: 1417589 - DNA, 15 bp, Homo sapiens
ccgatccacctccca

SEQ ID NO: 1417590 - DNA, 15 bp, Homo sapiens
cgatccacctcccac

SEQ ID NO: 1417591 - DNA, 15 bp, Homo sapiens
gatccacctcccaca

SEQ ID NO: 1417592 - DNA, 15 bp, Homo sapiens
atccacctcccacac

SEQ ID NO: 1417593 - DNA, 15 bp, Homo sapiens
tccacctcccacacc

SEQ ID NO: 1417594 - DNA, 15 bp, Homo sapiens
ccacctcccacaccc

SEQ ID NO: 1417595 - DNA, 15 bp, Homo sapiens
cacctcccacacccc

SEQ ID NO: 1417596 - DNA, 15 bp, Homo sapiens
acctcccacaccccc

SEQ ID NO: 1417597 - DNA, 15 bp, Homo sapiens
cctcccacacccccg

SEQ ID NO: 1417598 - DNA, 15 bp, Homo sapiens
ctcccacacccccgc

SEQ ID NO: 1417599 - DNA, 15 bp, Homo sapiens
tcccacacccccgct

SEQ ID NO: 1417600 - DNA, 15 bp, Homo sapiens
cccacacccccgctg

SEQ ID NO: 1417601 - DNA, 15 bp, Homo sapiens
ccacacccccgctgc

SEQ ID NO: 1417602 - DNA, 15 bp, Homo sapiens
cacacccccgctgca

SEQ ID NO: 1417603 - DNA, 15 bp, Homo sapiens
acacccccgctgcag

SEQ ID NO: 1417604 - DNA, 15 bp, Homo sapiens
cacccccgctgcagt

SEQ ID NO: 1417605 - DNA, 15 bp, Homo sapiens
acccccgctgcagtt

SEQ ID NO: 1417606 - DNA, 15 bp, Homo sapiens
cccccgctgcagttg

SEQ ID NO: 1417607 - DNA, 15 bp, Homo sapiens
ccccgctgcagttgt

SEQ ID NO: 1417608 - DNA, 15 bp, Homo sapiens
cccgctgcagttgtc

SEQ ID NO: 1417609 - DNA, 15 bp, Homo sapiens
ccgctgcagttgtct

SEQ ID NO: 1417610 - DNA, 15 bp, Homo sapiens
cgctgcagttgtcta

SEQ ID NO: 1417611 - DNA, 15 bp, Homo sapiens
gctgcagttgtctag

SEQ ID NO: 1417612 - DNA, 15 bp, Homo sapiens
ctgcagttgtctaga

SEQ ID NO: 1417613 - DNA, 15 bp, Homo sapiens
tgcagttgtctagaa

SEQ ID NO: 1417614 - DNA, 15 bp, Homo sapiens
gcagttgtctagaag

SEQ ID NO: 1417615 - DNA, 15 bp, Homo sapiens
cagttgtctagaagc

SEQ ID NO: 1417616 - DNA, 15 bp, Homo sapiens
agttgtctagaagct

SEQ ID NO: 1417617 - DNA, 15 bp, Homo sapiens
gttgtctagaagctg

SEQ ID NO: 1417618 - DNA, 15 bp, Homo sapiens
ttgtctagaagctgg

SEQ ID NO: 1417619 - DNA, 15 bp, Homo sapiens
tgtctagaagctggg

SEQ ID NO: 1417620 - DNA, 15 bp, Homo sapiens
gtctagaagctgggg

SEQ ID NO: 1417621 - DNA, 15 bp, Homo sapiens
tctagaagctggggc

SEQ ID NO: 1417622 - DNA, 15 bp, Homo sapiens
ctagaagctggggct

SEQ ID NO: 1417623 - DNA, 15 bp, Homo sapiens
tagaagctggggctg

SEQ ID NO: 1417624 - DNA, 15 bp, Homo sapiens
agaagctggggctgg

SEQ ID NO: 1417625 - DNA, 15 bp, Homo sapiens
gaagctggggctggg

SEQ ID NO: 1417626 - DNA, 15 bp, Homo sapiens
aagctggggctgggg

SEQ ID NO: 1417627 - DNA, 15 bp, Homo sapiens
agctggggctgggga

SEQ ID NO: 1417628 - DNA, 15 bp, Homo sapiens
gctggggctggggaa

SEQ ID NO: 1417629 - DNA, 15 bp, Homo sapiens
ctggggctggggaac

SEQ ID NO: 1417630 - DNA, 15 bp, Homo sapiens
tggggctggggaact

SEQ ID NO: 1417631 - DNA, 15 bp, Homo sapiens
ggggctggggaactg

SEQ ID NO: 1417632 - DNA, 15 bp, Homo sapiens
gggctggggaactga

SEQ ID NO: 1417633 - DNA, 15 bp, Homo sapiens
ggctggggaactgag

SEQ ID NO: 1417634 - DNA, 15 bp, Homo sapiens
gctggggaactgagg

SEQ ID NO: 1417635 - DNA, 15 bp, Homo sapiens
ctggggaactgaggc

SEQ ID NO: 1417636 - DNA, 15 bp, Homo sapiens
tggggaactgaggcg

SEQ ID NO: 1417637 - DNA, 15 bp, Homo sapiens
ggggaactgaggcgc

SEQ ID NO: 1417638 - DNA, 15 bp, Homo sapiens
gggaactgaggcgcg

SEQ ID NO: 1417639 - DNA, 15 bp, Homo sapiens
ggaactgaggcgcgg

SEQ ID NO: 1417640 - DNA, 15 bp, Homo sapiens
gaactgaggcgcggg

SEQ ID NO: 1417641 - DNA, 15 bp, Homo sapiens
aactgaggcgcggga

SEQ ID NO: 1417642 - DNA, 15 bp, Homo sapiens
actgaggcgcgggag

SEQ ID NO: 1417643 - DNA, 15 bp, Homo sapiens
ctgaggcgcgggagg

SEQ ID NO: 1417644 - DNA, 15 bp, Homo sapiens
tgaggcgcgggagga

SEQ ID NO: 1417645 - DNA, 15 bp, Homo sapiens
gaggcgcgggaggag

SEQ ID NO: 1417646 - DNA, 15 bp, Homo sapiens
aggcgcgggaggagc

SEQ ID NO: 1417647 - DNA, 15 bp, Homo sapiens
ggcgcgggaggagca

SEQ ID NO: 1417648 - DNA, 15 bp, Homo sapiens
gcgcgggaggagcag

SEQ ID NO: 1417649 - DNA, 15 bp, Homo sapiens
cgcgggaggagcaga

SEQ ID NO: 1417650 - DNA, 15 bp, Homo sapiens
gcgggaggagcagac

SEQ ID NO: 1417651 - DNA, 15 bp, Homo sapiens
cgggaggagcagaca

SEQ ID NO: 1417652 - DNA, 15 bp, Homo sapiens
gggaggagcagacag

SEQ ID NO: 1417653 - DNA, 15 bp, Homo sapiens
ggaggagcagacagg

SEQ ID NO: 1417654 - DNA, 15 bp, Homo sapiens
gaggagcagacagga

SEQ ID NO: 1417655 - DNA, 15 bp, Homo sapiens
aggagcagacaggag

SEQ ID NO: 1417656 - DNA, 15 bp, Homo sapiens
ggagcagacaggagg

SEQ ID NO: 1417657 - DNA, 15 bp, Homo sapiens
gagcagacaggaggg

SEQ ID NO: 1417658 - DNA, 15 bp, Homo sapiens
agcagacaggagggc

SEQ ID NO: 1417659 - DNA, 15 bp, Homo sapiens
gcagacaggagggcc

SEQ ID NO: 1417660 - DNA, 15 bp, Homo sapiens
cagacaggagggccg

SEQ ID NO: 1417661 - DNA, 15 bp, Homo sapiens
agacaggagggccgg

SEQ ID NO: 1417662 - DNA, 15 bp, Homo sapiens
gacaggagggccggg

SEQ ID NO: 1417663 - DNA, 15 bp, Homo sapiens
acaggagggccgggg

SEQ ID NO: 1417664 - DNA, 15 bp, Homo sapiens
caggagggccggggt

SEQ ID NO: 1417665 - DNA, 15 bp, Homo sapiens
aggagggccggggtt

SEQ ID NO: 1417666 - DNA, 15 bp, Homo sapiens
ggagggccggggttg

SEQ ID NO: 1417667 - DNA, 15 bp, Homo sapiens
gagggccggggttgg

SEQ ID NO: 1417668 - DNA, 15 bp, Homo sapiens
agggccggggttggg

SEQ ID NO: 1417669 - DNA, 15 bp, Homo sapiens
gggccggggttgggg

SEQ ID NO: 1417670 - DNA, 15 bp, Homo sapiens
ggccggggttggggc

SEQ ID NO: 1417671 - DNA, 15 bp, Homo sapiens
gccggggttggggcg

SEQ ID NO: 1417672 - DNA, 15 bp, Homo sapiens
ccggggttggggcgc

SEQ ID NO: 1417673 - DNA, 15 bp, Homo sapiens
cggggttggggcgcc

SEQ ID NO: 1417674 - DNA, 15 bp, Homo sapiens
ggggttggggcgcca

SEQ ID NO: 1417675 - DNA, 15 bp, Homo sapiens
gggttggggcgccag

SEQ ID NO: 1417676 - DNA, 15 bp, Homo sapiens
ggttggggcgccagc

SEQ ID NO: 1417677 - DNA, 15 bp, Homo sapiens
gttggggcgccagcc

SEQ ID NO: 1417678 - DNA, 15 bp, Homo sapiens
ttggggcgccagcca

SEQ ID NO: 1417679 - DNA, 15 bp, Homo sapiens
tggggcgccagccac

SEQ ID NO: 1417680 - DNA, 15 bp, Homo sapiens
ggggcgccagccacg

SEQ ID NO: 1417681 - DNA, 15 bp, Homo sapiens
gggcgccagccacgc

SEQ ID NO: 1417682 - DNA, 15 bp, Homo sapiens
ggcgccagccacgcg

SEQ ID NO: 1417683 - DNA, 15 bp, Homo sapiens
gcgccagccacgcgt

SEQ ID NO: 1417684 - DNA, 15 bp, Homo sapiens
cgccagccacgcgtt

SEQ ID NO: 1417685 - DNA, 15 bp, Homo sapiens
gccagccacgcgttg

SEQ ID NO: 1417686 - DNA, 15 bp, Homo sapiens
ccagccacgcgttgg

SEQ ID NO: 1417687 - DNA, 15 bp, Homo sapiens
cagccacgcgttggg

SEQ ID NO: 1417688 - DNA, 15 bp, Homo sapiens
agccacgcgttggga

SEQ ID NO: 1417689 - DNA, 15 bp, Homo sapiens
gccacgcgttgggag

SEQ ID NO: 1417690 - DNA, 15 bp, Homo sapiens
ccacgcgttgggaga

SEQ ID NO: 1417691 - DNA, 15 bp, Homo sapiens
cacgcgttgggagag

SEQ ID NO: 1417692 - DNA, 15 bp, Homo sapiens
acgcgttgggagagc

SEQ ID NO: 1417693 - DNA, 15 bp, Homo sapiens
cgcgttgggagagca

SEQ ID NO: 1417694 - DNA, 15 bp, Homo sapiens
gcgttgggagagcag

SEQ ID NO: 1417695 - DNA, 15 bp, Homo sapiens
cgttgggagagcaga

SEQ ID NO: 1417696 - DNA, 15 bp, Homo sapiens
gttgggagagcagac

SEQ ID NO: 1417697 - DNA, 15 bp, Homo sapiens
ttgggagagcagacc

SEQ ID NO: 1417698 - DNA, 15 bp, Homo sapiens
tgggagagcagaccc

SEQ ID NO: 1417699 - DNA, 15 bp, Homo sapiens
gggagagcagacccg

SEQ ID NO: 1417700 - DNA, 15 bp, Homo sapiens
ggagagcagacccgg

SEQ ID NO: 1417701 - DNA, 15 bp, Homo sapiens
gagagcagacccggg

SEQ ID NO: 1417702 - DNA, 15 bp, Homo sapiens
agagcagacccgggt

SEQ ID NO: 1417703 - DNA, 15 bp, Homo sapiens
gagcagacccgggtg

SEQ ID NO: 1417704 - DNA, 15 bp, Homo sapiens
agcagacccgggtgc

SEQ ID NO: 1417705 - DNA, 15 bp, Homo sapiens
gcagacccgggtgca

SEQ ID NO: 1417706 - DNA, 15 bp, Homo sapiens
cagacccgggtgcag

SEQ ID NO: 1417707 - DNA, 15 bp, Homo sapiens
agacccgggtgcaga

SEQ ID NO: 1417708 - DNA, 15 bp, Homo sapiens
gacccgggtgcagac

SEQ ID NO: 1417709 - DNA, 15 bp, Homo sapiens
acccgggtgcagact

SEQ ID NO: 1417710 - DNA, 15 bp, Homo sapiens
cccgggtgcagactc

SEQ ID NO: 1417711 - DNA, 15 bp, Homo sapiens
ccgggtgcagactca

SEQ ID NO: 1417712 - DNA, 15 bp, Homo sapiens
cgggtgcagactcag

SEQ ID NO: 1417713 - DNA, 15 bp, Homo sapiens
gggtgcagactcaga

SEQ ID NO: 1417714 - DNA, 15 bp, Homo sapiens
ggtgcagactcagag

SEQ ID NO: 1417715 - DNA, 15 bp, Homo sapiens
gtgcagactcagagg

SEQ ID NO: 1417716 - DNA, 15 bp, Homo sapiens
tgcagactcagagga

SEQ ID NO: 1417717 - DNA, 15 bp, Homo sapiens
gcagactcagaggac

SEQ ID NO: 1417718 - DNA, 15 bp, Homo sapiens
cagactcagaggact

SEQ ID NO: 1417719 - DNA, 15 bp, Homo sapiens
agactcagaggactg

SEQ ID NO: 1417720 - DNA, 15 bp, Homo sapiens
gactcagaggactgg

SEQ ID NO: 1417721 - DNA, 15 bp, Homo sapiens
actcagaggactgga

SEQ ID NO: 1417722 - DNA, 15 bp, Homo sapiens
ctcagaggactggag

SEQ ID NO: 1417723 - DNA, 15 bp, Homo sapiens
tcagaggactggaga

SEQ ID NO: 1417724 - DNA, 15 bp, Homo sapiens
cagaggactggagag

SEQ ID NO: 1417725 - DNA, 15 bp, Homo sapiens
agaggactggagagg

SEQ ID NO: 1417726 - DNA, 15 bp, Homo sapiens
gaggactggagaggc

SEQ ID NO: 1417727 - DNA, 15 bp, Homo sapiens
aggactggagaggcg

SEQ ID NO: 1417728 - DNA, 15 bp, Homo sapiens
ggactggagaggcgg

SEQ ID NO: 1417729 - DNA, 15 bp, Homo sapiens
gactggagaggcggc

SEQ ID NO: 1417730 - DNA, 15 bp, Homo sapiens
actggagaggcggca

SEQ ID NO: 1417731 - DNA, 15 bp, Homo sapiens
ctggagaggcggcat

SEQ ID NO: 1417732 - DNA, 15 bp, Homo sapiens
tggagaggcggcatg

SEQ ID NO: 1417733 - DNA, 15 bp, Homo sapiens
ggagaggcggcatgg

SEQ ID NO: 1417734 - DNA, 15 bp, Homo sapiens
gagaggcggcatgga

SEQ ID NO: 1417735 - DNA, 15 bp, Homo sapiens
agaggcggcatggag

SEQ ID NO: 1417736 - DNA, 15 bp, Homo sapiens
gaggcggcatggagt

SEQ ID NO: 1417737 - DNA, 15 bp, Homo sapiens
aggcggcatggagtt

SEQ ID NO: 1417738 - DNA, 15 bp, Homo sapiens
ggcggcatggagttt

SEQ ID NO: 1417739 - DNA, 15 bp, Homo sapiens
gcggcatggagtttg

SEQ ID NO: 1417740 - DNA, 15 bp, Homo sapiens
cggcatggagtttgg

SEQ ID NO: 1417741 - DNA, 15 bp, Homo sapiens
ggcatggagtttggt

SEQ ID NO: 1417742 - DNA, 15 bp, Homo sapiens
gcatggagtttggtc

SEQ ID NO: 1417743 - DNA, 15 bp, Homo sapiens
catggagtttggtct

SEQ ID NO: 1417744 - DNA, 15 bp, Homo sapiens
atggagtttggtctc

SEQ ID NO: 1417745 - DNA, 15 bp, Homo sapiens
tggagtttggtctcc

SEQ ID NO: 1417746 - DNA, 15 bp, Homo sapiens
ggagtttggtctcct

SEQ ID NO: 1417747 - DNA, 15 bp, Homo sapiens
gagtttggtctcctg

SEQ ID NO: 1417748 - DNA, 15 bp, Homo sapiens
agtttggtctcctgg

SEQ ID NO: 1417749 - DNA, 15 bp, Homo sapiens
gtttggtctcctggg

SEQ ID NO: 1417750 - DNA, 15 bp, Homo sapiens
tttggtctcctggga

SEQ ID NO: 1417751 - DNA, 15 bp, Homo sapiens
ttggtctcctgggag

SEQ ID NO: 1417752 - DNA, 15 bp, Homo sapiens
tggtctcctgggagg

SEQ ID NO: 1417753 - DNA, 15 bp, Homo sapiens
ggtctcctgggaggt

SEQ ID NO: 1417754 - DNA, 15 bp, Homo sapiens
gtctcctgggaggta

SEQ ID NO: 1417755 - DNA, 15 bp, Homo sapiens
tctcctgggaggtag

SEQ ID NO: 1417756 - DNA, 15 bp, Homo sapiens
ctcctgggaggtaga

SEQ ID NO: 1417757 - DNA, 15 bp, Homo sapiens
tcctgggaggtagag

SEQ ID NO: 1417758 - DNA, 15 bp, Homo sapiens
cctgggaggtagagt

SEQ ID NO: 1417759 - DNA, 15 bp, Homo sapiens
ctgggaggtagagtg

SEQ ID NO: 1417760 - DNA, 15 bp, Homo sapiens
tgggaggtagagtga

SEQ ID NO: 1417761 - DNA, 15 bp, Homo sapiens
gggaggtagagtgag

SEQ ID NO: 1417762 - DNA, 15 bp, Homo sapiens
ggaggtagagtgagg

SEQ ID NO: 1417763 - DNA, 15 bp, Homo sapiens
gaggtagagtgaggt

SEQ ID NO: 1417764 - DNA, 15 bp, Homo sapiens
aggtagagtgaggtg

SEQ ID NO: 1417765 - DNA, 15 bp, Homo sapiens
ggtagagtgaggtgc

SEQ ID NO: 1417766 - DNA, 15 bp, Homo sapiens
gtagagtgaggtgct

SEQ ID NO: 1417767 - DNA, 15 bp, Homo sapiens
tagagtgaggtgctg

SEQ ID NO: 1417768 - DNA, 15 bp, Homo sapiens
agagtgaggtgctgc

SEQ ID NO: 1417769 - DNA, 15 bp, Homo sapiens
gagtgaggtgctgcg

SEQ ID NO: 1417770 - DNA, 15 bp, Homo sapiens
agtgaggtgctgcgg

SEQ ID NO: 1417771 - DNA, 15 bp, Homo sapiens
gtgaggtgctgcgga

SEQ ID NO: 1417772 - DNA, 15 bp, Homo sapiens
tgaggtgctgcggac

SEQ ID NO: 1417773 - DNA, 15 bp, Homo sapiens
gaggtgctgcggact

SEQ ID NO: 1417774 - DNA, 15 bp, Homo sapiens
aggtgctgcggactc

SEQ ID NO: 1417775 - DNA, 15 bp, Homo sapiens
ggtgctgcggactcc

SEQ ID NO: 1417776 - DNA, 15 bp, Homo sapiens
gtgctgcggactcca

SEQ ID NO: 1417777 - DNA, 15 bp, Homo sapiens
tgctgcggactccag

SEQ ID NO: 1417778 - DNA, 15 bp, Homo sapiens
gctgcggactccagg

SEQ ID NO: 1417779 - DNA, 15 bp, Homo sapiens
ctgcggactccaggg

SEQ ID NO: 1417780 - DNA, 15 bp, Homo sapiens
tgcggactccaggga

SEQ ID NO: 1417781 - DNA, 15 bp, Homo sapiens
gcggactccagggag

SEQ ID NO: 1417782 - DNA, 15 bp, Homo sapiens
cggactccagggagg

SEQ ID NO: 1417783 - DNA, 15 bp, Homo sapiens
ggactccagggagga

SEQ ID NO: 1417784 - DNA, 15 bp, Homo sapiens
gactccagggaggaa

SEQ ID NO: 1417785 - DNA, 15 bp, Homo sapiens
actccagggaggaaa

SEQ ID NO: 1417786 - DNA, 15 bp, Homo sapiens
ctccagggaggaaag

SEQ ID NO: 1417787 - DNA, 15 bp, Homo sapiens
tccagggaggaaagg

SEQ ID NO: 1417788 - DNA, 15 bp, Homo sapiens
ccagggaggaaaggg

SEQ ID NO: 1417789 - DNA, 15 bp, Homo sapiens
cagggaggaaaggga

SEQ ID NO: 1417790 - DNA, 15 bp, Homo sapiens
agggaggaaagggat

SEQ ID NO: 1417791 - DNA, 15 bp, Homo sapiens
gggaggaaagggatg

SEQ ID NO: 1417792 - DNA, 15 bp, Homo sapiens
ggaggaaagggatgg

SEQ ID NO: 1417793 - DNA, 15 bp, Homo sapiens
gaggaaagggatggg

SEQ ID NO: 1417794 - DNA, 15 bp, Homo sapiens
aggaaagggatgggt

SEQ ID NO: 1417795 - DNA, 15 bp, Homo sapiens
ggaaagggatgggtg

SEQ ID NO: 1417796 - DNA, 15 bp, Homo sapiens
gaaagggatgggtgg

SEQ ID NO: 1417797 - DNA, 15 bp, Homo sapiens
aaagggatgggtggg

SEQ ID NO: 1417798 - DNA, 15 bp, Homo sapiens
aagggatgggtgggg

SEQ ID NO: 1417799 - DNA, 15 bp, Homo sapiens
agggatgggtgggga

SEQ ID NO: 1417800 - DNA, 15 bp, Homo sapiens
gggatgggtggggag

SEQ ID NO: 1417801 - DNA, 15 bp, Homo sapiens
ggatgggtggggagg

SEQ ID NO: 1417802 - DNA, 15 bp, Homo sapiens
gatgggtggggaggc

SEQ ID NO: 1417803 - DNA, 15 bp, Homo sapiens
atgggtggggaggcg

SEQ ID NO: 1417804 - DNA, 15 bp, Homo sapiens
tgggtggggaggcgg

SEQ ID NO: 1417805 - DNA, 15 bp, Homo sapiens
ggtggggaggcggga

SEQ ID NO: 1417806 - DNA, 15 bp, Homo sapiens
gtggggaggcgggag

SEQ ID NO: 1417807 - DNA, 15 bp, Homo sapiens
tggggaggcgggagg

SEQ ID NO: 1417808 - DNA, 15 bp, Homo sapiens
ggggaggcgggaggg

SEQ ID NO: 1417809 - DNA, 15 bp, Homo sapiens
gggaggcgggagggg

SEQ ID NO: 1417810 - DNA, 15 bp, Homo sapiens
ggaggcgggagggga

SEQ ID NO: 1417811 - DNA, 15 bp, Homo sapiens
gaggcgggaggggag

SEQ ID NO: 1417812 - DNA, 15 bp, Homo sapiens
aggcgggaggggagg

SEQ ID NO: 1417813 - DNA, 15 bp, Homo sapiens
ggcgggaggggagga

SEQ ID NO: 1417814 - DNA, 15 bp, Homo sapiens
gcgggaggggaggag

SEQ ID NO: 1417815 - DNA, 15 bp, Homo sapiens
cgggaggggaggagg

SEQ ID NO: 1417816 - DNA, 15 bp, Homo sapiens
gggaggggaggaggg

SEQ ID NO: 1417817 - DNA, 15 bp, Homo sapiens
ggaggggaggaggga

SEQ ID NO: 1417818 - DNA, 15 bp, Homo sapiens
gaggggaggagggac

SEQ ID NO: 1417819 - DNA, 15 bp, Homo sapiens
aggggaggagggacg

SEQ ID NO: 1417820 - DNA, 15 bp, Homo sapiens
ggggaggagggacgg

SEQ ID NO: 1417821 - DNA, 15 bp, Homo sapiens
gggaggagggacggg

SEQ ID NO: 1417822 - DNA, 15 bp, Homo sapiens
ggaggagggacgggg

SEQ ID NO: 1417823 - DNA, 15 bp, Homo sapiens
gaggagggacggggt

SEQ ID NO: 1417824 - DNA, 15 bp, Homo sapiens
aggagggacggggta

SEQ ID NO: 1417825 - DNA, 15 bp, Homo sapiens
ggagggacggggtat

SEQ ID NO: 1417826 - DNA, 15 bp, Homo sapiens
gagggacggggtatt

SEQ ID NO: 1417827 - DNA, 15 bp, Homo sapiens
agggacggggtattt

SEQ ID NO: 1417828 - DNA, 15 bp, Homo sapiens
gggacggggtatttt

SEQ ID NO: 1417829 - DNA, 15 bp, Homo sapiens
ggacggggtattttg

SEQ ID NO: 1417830 - DNA, 15 bp, Homo sapiens
gacggggtattttgc

SEQ ID NO: 1417831 - DNA, 15 bp, Homo sapiens
acggggtattttgcg

SEQ ID NO: 1417832 - DNA, 15 bp, Homo sapiens
cggggtattttgcgc

SEQ ID NO: 1417833 - DNA, 15 bp, Homo sapiens
ggggtattttgcgct

SEQ ID NO: 1417834 - DNA, 15 bp, Homo sapiens
gggtattttgcgctc

SEQ ID NO: 1417835 - DNA, 15 bp, Homo sapiens
ggtattttgcgctcc

SEQ ID NO: 1417836 - DNA, 15 bp, Homo sapiens
gtattttgcgctccc

SEQ ID NO: 1417837 - DNA, 15 bp, Homo sapiens
tattttgcgctcccg

SEQ ID NO: 1417838 - DNA, 15 bp, Homo sapiens
attttgcgctcccgc

SEQ ID NO: 1417839 - DNA, 15 bp, Homo sapiens
ttttgcgctcccgca

SEQ ID NO: 1417840 - DNA, 15 bp, Homo sapiens
tttgcgctcccgcac

SEQ ID NO: 1417841 - DNA, 15 bp, Homo sapiens
ttgcgctcccgcacc

SEQ ID NO: 1417842 - DNA, 15 bp, Homo sapiens
tgcgctcccgcaccg

SEQ ID NO: 1417843 - DNA, 15 bp, Homo sapiens
gcgctcccgcaccgc

SEQ ID NO: 1417844 - DNA, 15 bp, Homo sapiens
cgctcccgcaccgcg

SEQ ID NO: 1417845 - DNA, 15 bp, Homo sapiens
gctcccgcaccgcgg

SEQ ID NO: 1417846 - DNA, 15 bp, Homo sapiens
ctcccgcaccgcggc

SEQ ID NO: 1417847 - DNA, 15 bp, Homo sapiens
tcccgcaccgcggcc

SEQ ID NO: 1417848 - DNA, 15 bp, Homo sapiens
cccgcaccgcggccc

SEQ ID NO: 1417849 - DNA, 15 bp, Homo sapiens
ccgcaccgcggcccg

SEQ ID NO: 1417850 - DNA, 15 bp, Homo sapiens
cgcaccgcggcccga

SEQ ID NO: 1417851 - DNA, 15 bp, Homo sapiens
gcaccgcggcccgaa

SEQ ID NO: 1417852 - DNA, 15 bp, Homo sapiens
caccgcggcccgaac

SEQ ID NO: 1417853 - DNA, 15 bp, Homo sapiens
accgcggcccgaact

SEQ ID NO: 1417854 - DNA, 15 bp, Homo sapiens
ccgcggcccgaactc

SEQ ID NO: 1417855 - DNA, 15 bp, Homo sapiens
cgcggcccgaactca

SEQ ID NO: 1417856 - DNA, 15 bp, Homo sapiens
gcggcccgaactcag

SEQ ID NO: 1417857 - DNA, 15 bp, Homo sapiens
cggcccgaactcagc

SEQ ID NO: 1417858 - DNA, 15 bp, Homo sapiens
ggcccgaactcagct

SEQ ID NO: 1417859 - DNA, 15 bp, Homo sapiens
gcccgaactcagctg

SEQ ID NO: 1417860 - DNA, 15 bp, Homo sapiens
cccgaactcagctgt

SEQ ID NO: 1417861 - DNA, 15 bp, Homo sapiens
ccgaactcagctgtt

SEQ ID NO: 1417862 - DNA, 15 bp, Homo sapiens
cgaactcagctgttc

SEQ ID NO: 1417863 - DNA, 15 bp, Homo sapiens
gaactcagctgttct

SEQ ID NO: 1417864 - DNA, 15 bp, Homo sapiens
aactcagctgttctg

SEQ ID NO: 1417865 - DNA, 15 bp, Homo sapiens
actcagctgttctgc

SEQ ID NO: 1417866 - DNA, 15 bp, Homo sapiens
ctcagctgttctgcc

SEQ ID NO: 1417867 - DNA, 15 bp, Homo sapiens
tcagctgttctgcct

SEQ ID NO: 1417868 - DNA, 15 bp, Homo sapiens
cagctgttctgcctt

SEQ ID NO: 1417869 - DNA, 15 bp, Homo sapiens
agctgttctgccttc

SEQ ID NO: 1417870 - DNA, 15 bp, Homo sapiens
gctgttctgccttca

SEQ ID NO: 1417871 - DNA, 15 bp, Homo sapiens
ctgttctgccttcac

SEQ ID NO: 1417872 - DNA, 15 bp, Homo sapiens
tgttctgccttcact

SEQ ID NO: 1417873 - DNA, 15 bp, Homo sapiens
gttctgccttcactg

SEQ ID NO: 1417874 - DNA, 15 bp, Homo sapiens
ttctgccttcactgg

SEQ ID NO: 1417875 - DNA, 15 bp, Homo sapiens
tctgccttcactggc

SEQ ID NO: 1417876 - DNA, 15 bp, Homo sapiens
ctgccttcactggcc

SEQ ID NO: 1417877 - DNA, 15 bp, Homo sapiens
tgccttcactggcct

SEQ ID NO: 1417878 - DNA, 15 bp, Homo sapiens
gccttcactggcctc

SEQ ID NO: 1417879 - DNA, 15 bp, Homo sapiens
ccttcactggcctca

SEQ ID NO: 1417880 - DNA, 15 bp, Homo sapiens
cttcactggcctcag

SEQ ID NO: 1417881 - DNA, 15 bp, Homo sapiens
ttcactggcctcagc

SEQ ID NO: 1417882 - DNA, 15 bp, Homo sapiens
tcactggcctcagcc

SEQ ID NO: 1417883 - DNA, 15 bp, Homo sapiens
cactggcctcagcca

SEQ ID NO: 1417884 - DNA, 15 bp, Homo sapiens
actggcctcagccag

SEQ ID NO: 1417885 - DNA, 15 bp, Homo sapiens
ctggcctcagccagt

SEQ ID NO: 1417886 - DNA, 15 bp, Homo sapiens
tggcctcagccagtc

SEQ ID NO: 1417887 - DNA, 15 bp, Homo sapiens
ggcctcagccagtcg

SEQ ID NO: 1417888 - DNA, 15 bp, Homo sapiens
gcctcagccagtcga

SEQ ID NO: 1417889 - DNA, 15 bp, Homo sapiens
cctcagccagtcgag

SEQ ID NO: 1417890 - DNA, 15 bp, Homo sapiens
ctcagccagtcgagg

SEQ ID NO: 1417891 - DNA, 15 bp, Homo sapiens
tcagccagtcgaggg

SEQ ID NO: 1417892 - DNA, 15 bp, Homo sapiens
cagccagtcgaggga

SEQ ID NO: 1417893 - DNA, 15 bp, Homo sapiens
agccagtcgagggag

SEQ ID NO: 1417894 - DNA, 15 bp, Homo sapiens
gccagtcgagggagc

SEQ ID NO: 1417895 - DNA, 15 bp, Homo sapiens
ccagtcgagggagct

SEQ ID NO: 1417896 - DNA, 15 bp, Homo sapiens
cagtcgagggagctc

SEQ ID NO: 1417897 - DNA, 15 bp, Homo sapiens
agtcgagggagctcc

SEQ ID NO: 1417898 - DNA, 15 bp, Homo sapiens
gtcgagggagctcct

SEQ ID NO: 1417899 - DNA, 15 bp, Homo sapiens
tcgagggagctccta

SEQ ID NO: 1417900 - DNA, 15 bp, Homo sapiens
cgagggagctcctac

SEQ ID NO: 1417901 - DNA, 15 bp, Homo sapiens
gagggagctcctacg

SEQ ID NO: 1417902 - DNA, 15 bp, Homo sapiens
agggagctcctacga

SEQ ID NO: 1417903 - DNA, 15 bp, Homo sapiens
gggagctcctacgag

SEQ ID NO: 1417904 - DNA, 15 bp, Homo sapiens
ggagctcctacgagg

SEQ ID NO: 1417905 - DNA, 15 bp, Homo sapiens
gagctcctacgaggt

SEQ ID NO: 1417906 - DNA, 15 bp, Homo sapiens
agctcctacgaggtt

SEQ ID NO: 1417907 - DNA, 15 bp, Homo sapiens
gctcctacgaggtta

SEQ ID NO: 1417908 - DNA, 15 bp, Homo sapiens
ctcctacgaggttat

SEQ ID NO: 1417909 - DNA, 15 bp, Homo sapiens
tcctacgaggttatc

SEQ ID NO: 1417910 - DNA, 15 bp, Homo sapiens
cctacgaggttatct

SEQ ID NO: 1417911 - DNA, 15 bp, Homo sapiens
ctacgaggttatctg

SEQ ID NO: 1417912 - DNA, 15 bp, Homo sapiens
tacgaggttatctgc

SEQ ID NO: 1417913 - DNA, 15 bp, Homo sapiens
acgaggttatctgcg

SEQ ID NO: 1417914 - DNA, 15 bp, Homo sapiens
cgaggttatctgcga

SEQ ID NO: 1417915 - DNA, 15 bp, Homo sapiens
gaggttatctgcgag

SEQ ID NO: 1417916 - DNA, 15 bp, Homo sapiens
aggttatctgcgagc

SEQ ID NO: 1417917 - DNA, 15 bp, Homo sapiens
ggttatctgcgagcc

SEQ ID NO: 1417918 - DNA, 15 bp, Homo sapiens
gttatctgcgagccc

SEQ ID NO: 1417919 - DNA, 15 bp, Homo sapiens
ttatctgcgagccca

SEQ ID NO: 1417920 - DNA, 15 bp, Homo sapiens
tatctgcgagcccag

SEQ ID NO: 1417921 - DNA, 15 bp, Homo sapiens
atctgcgagcccagc

SEQ ID NO: 1417922 - DNA, 15 bp, Homo sapiens
tctgcgagcccagca

SEQ ID NO: 1417923 - DNA, 15 bp, Homo sapiens
ctgcgagcccagcaa

SEQ ID NO: 1417924 - DNA, 15 bp, Homo sapiens
tgcgagcccagcaaa

SEQ ID NO: 1417925 - DNA, 15 bp, Homo sapiens
gcgagcccagcaaat

SEQ ID NO: 1417926 - DNA, 15 bp, Homo sapiens
cgagcccagcaaatc

SEQ ID NO: 1417927 - DNA, 15 bp, Homo sapiens
gagcccagcaaatct

SEQ ID NO: 1417928 - DNA, 15 bp, Homo sapiens
agcccagcaaatctt

SEQ ID NO: 1417929 - DNA, 15 bp, Homo sapiens
gcccagcaaatcttg

SEQ ID NO: 1417930 - DNA, 15 bp, Homo sapiens
cccagcaaatcttgg

SEQ ID NO: 1417931 - DNA, 15 bp, Homo sapiens
ccagcaaatcttggg

SEQ ID NO: 1417932 - DNA, 15 bp, Homo sapiens
cagcaaatcttgggg

SEQ ID NO: 1417933 - DNA, 15 bp, Homo sapiens
agcaaatcttggggg

SEQ ID NO: 1417934 - DNA, 15 bp, Homo sapiens
gcaaatcttgggggt

SEQ ID NO: 1417935 - DNA, 15 bp, Homo sapiens
caaatcttgggggtc

SEQ ID NO: 1417936 - DNA, 15 bp, Homo sapiens
aaatcttgggggtcc

SEQ ID NO: 1417937 - DNA, 15 bp, Homo sapiens
aatcttgggggtcct

SEQ ID NO: 1417938 - DNA, 15 bp, Homo sapiens
atcttgggggtccta

SEQ ID NO: 1417939 - DNA, 15 bp, Homo sapiens
tcttgggggtcctag

SEQ ID NO: 1417940 - DNA, 15 bp, Homo sapiens
cttgggggtcctagc

SEQ ID NO: 1417941 - DNA, 15 bp, Homo sapiens
ttgggggtcctagcc

SEQ ID NO: 1417942 - DNA, 15 bp, Homo sapiens
tgggggtcctagcca

SEQ ID NO: 1417943 - DNA, 15 bp, Homo sapiens
gggggtcctagccaa

SEQ ID NO: 1417944 - DNA, 15 bp, Homo sapiens
ggggtcctagccaaa

SEQ ID NO: 1417945 - DNA, 15 bp, Homo sapiens
gggtcctagccaaat

SEQ ID NO: 1417946 - DNA, 15 bp, Homo sapiens
ggtcctagccaaatg

SEQ ID NO: 1417947 - DNA, 15 bp, Homo sapiens
gtcctagccaaatgc

SEQ ID NO: 1417948 - DNA, 15 bp, Homo sapiens
tcctagccaaatgca

SEQ ID NO: 1417949 - DNA, 15 bp, Homo sapiens
cctagccaaatgcag

SEQ ID NO: 1417950 - DNA, 15 bp, Homo sapiens
ctagccaaatgcagt

SEQ ID NO: 1417951 - DNA, 15 bp, Homo sapiens
tagccaaatgcagtg

SEQ ID NO: 1417952 - DNA, 15 bp, Homo sapiens
agccaaatgcagtgc

SEQ ID NO: 1417953 - DNA, 15 bp, Homo sapiens
gccaaatgcagtgcg

SEQ ID NO: 1417954 - DNA, 15 bp, Homo sapiens
ccaaatgcagtgcgc

SEQ ID NO: 1417955 - DNA, 15 bp, Homo sapiens
caaatgcagtgcgca

SEQ ID NO: 1417956 - DNA, 15 bp, Homo sapiens
aaatgcagtgcgcaa

SEQ ID NO: 1417957 - DNA, 15 bp, Homo sapiens
aatgcagtgcgcaac

SEQ ID NO: 1417958 - DNA, 15 bp, Homo sapiens
atgcagtgcgcaacg

SEQ ID NO: 1417959 - DNA, 15 bp, Homo sapiens
tgcagtgcgcaacgt

SEQ ID NO: 1417960 - DNA, 15 bp, Homo sapiens
gcagtgcgcaacgtt

SEQ ID NO: 1417961 - DNA, 15 bp, Homo sapiens
cagtgcgcaacgttc

SEQ ID NO: 1417962 - DNA, 15 bp, Homo sapiens
agtgcgcaacgttct

SEQ ID NO: 1417963 - DNA, 15 bp, Homo sapiens
gtgcgcaacgttctc

SEQ ID NO: 1417964 - DNA, 15 bp, Homo sapiens
tgcgcaacgttctct

SEQ ID NO: 1417965 - DNA, 15 bp, Homo sapiens
gcgcaacgttctctc

SEQ ID NO: 1417966 - DNA, 15 bp, Homo sapiens
cgcaacgttctctct

SEQ ID NO: 1417967 - DNA, 15 bp, Homo sapiens
gcaacgttctctctc

SEQ ID NO: 1417968 - DNA, 15 bp, Homo sapiens
caacgttctctctca

SEQ ID NO: 1417969 - DNA, 15 bp, Homo sapiens
aacgttctctctcac

SEQ ID NO: 1417970 - DNA, 15 bp, Homo sapiens
acgttctctctcact

SEQ ID NO: 1417971 - DNA, 15 bp, Homo sapiens
cgttctctctcactt

SEQ ID NO: 1417972 - DNA, 15 bp, Homo sapiens
gttctctctcacttg

SEQ ID NO: 1417973 - DNA, 15 bp, Homo sapiens
ttctctctcacttgg

SEQ ID NO: 1417974 - DNA, 15 bp, Homo sapiens
tctctctcacttgga

SEQ ID NO: 1417975 - DNA, 15 bp, Homo sapiens
ctctctcacttggag

SEQ ID NO: 1417976 - DNA, 15 bp, Homo sapiens
tctctcacttggagg

SEQ ID NO: 1417977 - DNA, 15 bp, Homo sapiens
ctctcacttggaggc

SEQ ID NO: 1417978 - DNA, 15 bp, Homo sapiens
tctcacttggaggcc

SEQ ID NO: 1417979 - DNA, 15 bp, Homo sapiens
ctcacttggaggccg

SEQ ID NO: 1417980 - DNA, 15 bp, Homo sapiens
tcacttggaggccgc

SEQ ID NO: 1417981 - DNA, 15 bp, Homo sapiens
cacttggaggccgcc

SEQ ID NO: 1417982 - DNA, 15 bp, Homo sapiens
acttggaggccgcca

SEQ ID NO: 1417983 - DNA, 15 bp, Homo sapiens
cttggaggccgccat

SEQ ID NO: 1417984 - DNA, 15 bp, Homo sapiens
ttggaggccgccatt

SEQ ID NO: 1417985 - DNA, 15 bp, Homo sapiens
gaaatgacagacatc

SEQ ID NO: 1417986 - DNA, 15 bp, Homo sapiens
aaatgacagacatcc

SEQ ID NO: 1417987 - DNA, 15 bp, Homo sapiens
aatgacagacatccc

SEQ ID NO: 1417988 - DNA, 15 bp, Homo sapiens
atgacagacatccca

SEQ ID NO: 1417989 - DNA, 15 bp, Homo sapiens
tgacagacatcccag

SEQ ID NO: 1417990 - DNA, 15 bp, Homo sapiens
gacagacatcccagc

SEQ ID NO: 1417991 - DNA, 15 bp, Homo sapiens
acagacatcccagca

SEQ ID NO: 1417992 - DNA, 15 bp, Homo sapiens
cagacatcccagcag

SEQ ID NO: 1417993 - DNA, 15 bp, Homo sapiens
agacatcccagcagc

SEQ ID NO: 1417994 - DNA, 15 bp, Homo sapiens
gacatcccagcagct

SEQ ID NO: 1417995 - DNA, 15 bp, Homo sapiens
acatcccagcagcta

SEQ ID NO: 1417996 - DNA, 15 bp, Homo sapiens
catcccagcagctac

SEQ ID NO: 1417997 - DNA, 15 bp, Homo sapiens
atcccagcagctaca

SEQ ID NO: 1417998 - DNA, 15 bp, Homo sapiens
tcccagcagctacac

SEQ ID NO: 1417999 - DNA, 15 bp, Homo sapiens
cccagcagctacaca

SEQ ID NO: 1418000 - DNA, 15 bp, Homo sapiens
ccagcagctacacat

SEQ ID NO: 1418001 - DNA, 15 bp, Homo sapiens
cagcagctacacatg

SEQ ID NO: 1418002 - DNA, 15 bp, Homo sapiens
agcagctacacatgc

SEQ ID NO: 1418003 - DNA, 15 bp, Homo sapiens
gcagctacacatgct

SEQ ID NO: 1418004 - DNA, 15 bp, Homo sapiens
cagctacacatgctg

SEQ ID NO: 1418005 - DNA, 15 bp, Homo sapiens
agctacacatgctgg

SEQ ID NO: 1418006 - DNA, 15 bp, Homo sapiens
gctacacatgctggc

SEQ ID NO: 1418007 - DNA, 15 bp, Homo sapiens
ctacacatgctggct

SEQ ID NO: 1418008 - DNA, 15 bp, Homo sapiens
tacacatgctggctg

SEQ ID NO: 1418009 - DNA, 15 bp, Homo sapiens
acacatgctggctgc

SEQ ID NO: 1418010 - DNA, 15 bp, Homo sapiens
cacatgctggctgca

SEQ ID NO: 1418011 - DNA, 15 bp, Homo sapiens
acatgctggctgcac

SEQ ID NO: 1418012 - DNA, 15 bp, Homo sapiens
catgctggctgcacg

SEQ ID NO: 1418013 - DNA, 15 bp, Homo sapiens
atgctggctgcacgt

SEQ ID NO: 1418014 - DNA, 15 bp, Homo sapiens
tgctggctgcacgtc

SEQ ID NO: 1418015 - DNA, 15 bp, Homo sapiens
gctggctgcacgtct

SEQ ID NO: 1418016 - DNA, 15 bp, Homo sapiens
ctggctgcacgtctc

SEQ ID NO: 1418017 - DNA, 15 bp, Homo sapiens
tggctgcacgtctct

SEQ ID NO: 1418018 - DNA, 15 bp, Homo sapiens
ggctgcacgtctctt

SEQ ID NO: 1418019 - DNA, 15 bp, Homo sapiens
gctgcacgtctcttg

SEQ ID NO: 1418020 - DNA, 15 bp, Homo sapiens
ctgcacgtctcttgc

SEQ ID NO: 1418021 - DNA, 15 bp, Homo sapiens
tgcacgtctcttgcc

SEQ ID NO: 1418022 - DNA, 15 bp, Homo sapiens
gcacgtctcttgcca

SEQ ID NO: 1418023 - DNA, 15 bp, Homo sapiens
cacgtctcttgccaa

SEQ ID NO: 1418024 - DNA, 15 bp, Homo sapiens
acgtctcttgccaaa

SEQ ID NO: 1418025 - DNA, 15 bp, Homo sapiens
cgtctcttgccaaat

SEQ ID NO: 1418026 - DNA, 15 bp, Homo sapiens
gtctcttgccaaatg

SEQ ID NO: 1418027 - DNA, 15 bp, Homo sapiens
tctcttgccaaatgc

SEQ ID NO: 1418028 - DNA, 15 bp, Homo sapiens
ctcttgccaaatgcc

SEQ ID NO: 1418029 - DNA, 15 bp, Homo sapiens
tcttgccaaatgcca

SEQ ID NO: 1418030 - DNA, 15 bp, Homo sapiens
cttgccaaatgccag

SEQ ID NO: 1418031 - DNA, 15 bp, Homo sapiens
ttgccaaatgccagg

SEQ ID NO: 1418032 - DNA, 15 bp, Homo sapiens
tgccaaatgccagga

SEQ ID NO: 1418033 - DNA, 15 bp, Homo sapiens
gccaaatgccaggag

SEQ ID NO: 1418034 - DNA, 15 bp, Homo sapiens
ccaaatgccaggagg

SEQ ID NO: 1418035 - DNA, 15 bp, Homo sapiens
caaatgccaggaggt

SEQ ID NO: 1418036 - DNA, 15 bp, Homo sapiens
aaatgccaggaggta

SEQ ID NO: 1418037 - DNA, 15 bp, Homo sapiens
aatgccaggaggtaa

SEQ ID NO: 1418038 - DNA, 15 bp, Homo sapiens
atgccaggaggtaat

SEQ ID NO: 1418039 - DNA, 15 bp, Homo sapiens
tgccaggaggtaatt

SEQ ID NO: 1418040 - DNA, 15 bp, Homo sapiens
gccaggaggtaattt

SEQ ID NO: 1418041 - DNA, 15 bp, Homo sapiens
ccaggaggtaatttt

SEQ ID NO: 1418042 - DNA, 15 bp, Homo sapiens
caggaggtaattttt

SEQ ID NO: 1418043 - DNA, 15 bp, Homo sapiens
aggaggtaatttttt

SEQ ID NO: 1418044 - DNA, 15 bp, Homo sapiens
ggaggtaatttttta

SEQ ID NO: 1418045 - DNA, 15 bp, Homo sapiens
gaggtaattttttag

SEQ ID NO: 1418046 - DNA, 15 bp, Homo sapiens
aggtaattttttagg

SEQ ID NO: 1418047 - DNA, 15 bp, Homo sapiens
ggtaattttttaggg

SEQ ID NO: 1418048 - DNA, 15 bp, Homo sapiens
gtaattttttagggt

SEQ ID NO: 1418049 - DNA, 15 bp, Homo sapiens
taattttttagggtc

SEQ ID NO: 1418050 - DNA, 15 bp, Homo sapiens
aattttttagggtcc

SEQ ID NO: 1418051 - DNA, 15 bp, Homo sapiens
attttttagggtccc

SEQ ID NO: 1418052 - DNA, 15 bp, Homo sapiens
ttttttagggtccct

SEQ ID NO: 1418053 - DNA, 15 bp, Homo sapiens
tttttagggtccctc

SEQ ID NO: 1418054 - DNA, 15 bp, Homo sapiens
ttttagggtccctcc

SEQ ID NO: 1418055 - DNA, 15 bp, Homo sapiens
tttagggtccctcct

SEQ ID NO: 1418056 - DNA, 15 bp, Homo sapiens
ttagggtccctcctt

SEQ ID NO: 1418057 - DNA, 15 bp, Homo sapiens
tagggtccctcctta

SEQ ID NO: 1418058 - DNA, 15 bp, Homo sapiens
agggtccctccttag

SEQ ID NO: 1418059 - DNA, 15 bp, Homo sapiens
gggtccctccttagg

SEQ ID NO: 1418060 - DNA, 15 bp, Homo sapiens
ggtccctccttaggg

SEQ ID NO: 1418061 - DNA, 15 bp, Homo sapiens
gtccctccttaggga

SEQ ID NO: 1418062 - DNA, 15 bp, Homo sapiens
tccctccttagggaa

SEQ ID NO: 1418063 - DNA, 15 bp, Homo sapiens
ccctccttagggaaa

SEQ ID NO: 1418064 - DNA, 15 bp, Homo sapiens
cctccttagggaaag

SEQ ID NO: 1418065 - DNA, 15 bp, Homo sapiens
ctccttagggaaagg

SEQ ID NO: 1418066 - DNA, 15 bp, Homo sapiens
tccttagggaaaggg

SEQ ID NO: 1418067 - DNA, 15 bp, Homo sapiens
ccttagggaaagggg

SEQ ID NO: 1418068 - DNA, 15 bp, Homo sapiens
cttagggaaaggggc

SEQ ID NO: 1418069 - DNA, 15 bp, Homo sapiens
ttagggaaaggggct

SEQ ID NO: 1418070 - DNA, 15 bp, Homo sapiens
tagggaaaggggctg

SEQ ID NO: 1418071 - DNA, 15 bp, Homo sapiens
agggaaaggggctgg

SEQ ID NO: 1418072 - DNA, 15 bp, Homo sapiens
gggaaaggggctgga

SEQ ID NO: 1418073 - DNA, 15 bp, Homo sapiens
ggaaaggggctggaa

SEQ ID NO: 1418074 - DNA, 15 bp, Homo sapiens
gaaaggggctggaag

SEQ ID NO: 1418075 - DNA, 15 bp, Homo sapiens
aaaggggctggaagt

SEQ ID NO: 1418076 - DNA, 15 bp, Homo sapiens
aaggggctggaagtt

SEQ ID NO: 1418077 - DNA, 15 bp, Homo sapiens
aggggctggaagttt

SEQ ID NO: 1418078 - DNA, 15 bp, Homo sapiens
ggggctggaagtttt

SEQ ID NO: 1418079 - DNA, 15 bp, Homo sapiens
gggctggaagtttta

SEQ ID NO: 1418080 - DNA, 15 bp, Homo sapiens
ggctggaagttttat

SEQ ID NO: 1418081 - DNA, 15 bp, Homo sapiens
gctggaagttttatt

SEQ ID NO: 1418082 - DNA, 15 bp, Homo sapiens
ctggaagttttatta

SEQ ID NO: 1418083 - DNA, 15 bp, Homo sapiens
tggaagttttattat

SEQ ID NO: 1418084 - DNA, 15 bp, Homo sapiens
ggaagttttattatt

SEQ ID NO: 1418085 - DNA, 15 bp, Homo sapiens
gaagttttattattg

SEQ ID NO: 1418086 - DNA, 15 bp, Homo sapiens
aagttttattattgc

SEQ ID NO: 1418087 - DNA, 15 bp, Homo sapiens
agttttattattgct

SEQ ID NO: 1418088 - DNA, 15 bp, Homo sapiens
gttttattattgctg

SEQ ID NO: 1418089 - DNA, 15 bp, Homo sapiens
ttttattattgctgt

SEQ ID NO: 1418090 - DNA, 15 bp, Homo sapiens
tttattattgctgtt

SEQ ID NO: 1418091 - DNA, 15 bp, Homo sapiens
ttattattgctgtta

SEQ ID NO: 1418092 - DNA, 15 bp, Homo sapiens
tattattgctgttac

SEQ ID NO: 1418093 - DNA, 15 bp, Homo sapiens
attattgctgttact

SEQ ID NO: 1418094 - DNA, 15 bp, Homo sapiens
ttattgctgttacta

SEQ ID NO: 1418095 - DNA, 15 bp, Homo sapiens
tattgctgttactac

SEQ ID NO: 1418096 - DNA, 15 bp, Homo sapiens
attgctgttactact

SEQ ID NO: 1418097 - DNA, 15 bp, Homo sapiens
ttgctgttactactg

SEQ ID NO: 1418098 - DNA, 15 bp, Homo sapiens
tgctgttactactgc

SEQ ID NO: 1418099 - DNA, 15 bp, Homo sapiens
gctgttactactgct

SEQ ID NO: 1418100 - DNA, 15 bp, Homo sapiens
ctgttactactgctc

SEQ ID NO: 1418101 - DNA, 15 bp, Homo sapiens
tgttactactgctcg

SEQ ID NO: 1418102 - DNA, 15 bp, Homo sapiens
gttactactgctcgt

SEQ ID NO: 1418103 - DNA, 15 bp, Homo sapiens
ttactactgctcgtg

SEQ ID NO: 1418104 - DNA, 15 bp, Homo sapiens
tactactgctcgtga

SEQ ID NO: 1418105 - DNA, 15 bp, Homo sapiens
actactgctcgtgaa

SEQ ID NO: 1418106 - DNA, 15 bp, Homo sapiens
ctactgctcgtgaac

SEQ ID NO: 1418107 - DNA, 15 bp, Homo sapiens
tactgctcgtgaact

SEQ ID NO: 1418108 - DNA, 15 bp, Homo sapiens
actgctcgtgaactc

SEQ ID NO: 1418109 - DNA, 15 bp, Homo sapiens
ctgctcgtgaactca

SEQ ID NO: 1418110 - DNA, 15 bp, Homo sapiens
tgctcgtgaactcat

SEQ ID NO: 1418111 - DNA, 15 bp, Homo sapiens
gctcgtgaactcatt

SEQ ID NO: 1418112 - DNA, 15 bp, Homo sapiens
ctcgtgaactcattt

SEQ ID NO: 1418113 - DNA, 15 bp, Homo sapiens
tcgtgaactcatttc

SEQ ID NO: 1418114 - DNA, 15 bp, Homo sapiens
cgtgaactcatttca

SEQ ID NO: 1418115 - DNA, 15 bp, Homo sapiens
gtgaactcatttcag

SEQ ID NO: 1418116 - DNA, 15 bp, Homo sapiens
tgaactcatttcagc

SEQ ID NO: 1418117 - DNA, 15 bp, Homo sapiens
gaactcatttcagcc

SEQ ID NO: 1418118 - DNA, 15 bp, Homo sapiens
aactcatttcagcct

SEQ ID NO: 1418119 - DNA, 15 bp, Homo sapiens
actcatttcagcctt

SEQ ID NO: 1418120 - DNA, 15 bp, Homo sapiens
ctcatttcagcctta

SEQ ID NO: 1418121 - DNA, 15 bp, Homo sapiens
tcatttcagccttag

SEQ ID NO: 1418122 - DNA, 15 bp, Homo sapiens
catttcagccttaga

SEQ ID NO: 1418123 - DNA, 15 bp, Homo sapiens
atttcagccttagaa

SEQ ID NO: 1418124 - DNA, 15 bp, Homo sapiens
tttcagccttagaag

SEQ ID NO: 1418125 - DNA, 15 bp, Homo sapiens
ttcagccttagaagt

SEQ ID NO: 1418126 - DNA, 15 bp, Homo sapiens
tcagccttagaagtt

SEQ ID NO: 1418127 - DNA, 15 bp, Homo sapiens
cagccttagaagttc

SEQ ID NO: 1418128 - DNA, 15 bp, Homo sapiens
agccttagaagttct

SEQ ID NO: 1418129 - DNA, 15 bp, Homo sapiens
gccttagaagttctt

SEQ ID NO: 1418130 - DNA, 15 bp, Homo sapiens
ccttagaagttcttg

SEQ ID NO: 1418131 - DNA, 15 bp, Homo sapiens
cttagaagttcttgg

SEQ ID NO: 1418132 - DNA, 15 bp, Homo sapiens
ttagaagttcttggc

SEQ ID NO: 1418133 - DNA, 15 bp, Homo sapiens
tagaagttcttggct

SEQ ID NO: 1418134 - DNA, 15 bp, Homo sapiens
agaagttcttggctt

SEQ ID NO: 1418135 - DNA, 15 bp, Homo sapiens
gaagttcttggcttg

SEQ ID NO: 1418136 - DNA, 15 bp, Homo sapiens
aagttcttggcttgt

SEQ ID NO: 1418137 - DNA, 15 bp, Homo sapiens
agttcttggcttgta

SEQ ID NO: 1418138 - DNA, 15 bp, Homo sapiens
gttcttggcttgtag

SEQ ID NO: 1418139 - DNA, 15 bp, Homo sapiens
ttcttggcttgtagt

SEQ ID NO: 1418140 - DNA, 15 bp, Homo sapiens
tcttggcttgtagtt

SEQ ID NO: 1418141 - DNA, 15 bp, Homo sapiens
cttggcttgtagttt

SEQ ID NO: 1418142 - DNA, 15 bp, Homo sapiens
ttggcttgtagtttt

SEQ ID NO: 1418143 - DNA, 15 bp, Homo sapiens
tggcttgtagttttt

SEQ ID NO: 1418144 - DNA, 15 bp, Homo sapiens
ggcttgtagtttttg

SEQ ID NO: 1418145 - DNA, 15 bp, Homo sapiens
gcttgtagtttttgt

SEQ ID NO: 1418146 - DNA, 15 bp, Homo sapiens
cttgtagtttttgtt

SEQ ID NO: 1418147 - DNA, 15 bp, Homo sapiens
ttgtagtttttgttg

SEQ ID NO: 1418148 - DNA, 15 bp, Homo sapiens
tgtagtttttgttgt

SEQ ID NO: 1418149 - DNA, 15 bp, Homo sapiens
gtagtttttgttgta

SEQ ID NO: 1418150 - DNA, 15 bp, Homo sapiens
tagtttttgttgtac

SEQ ID NO: 1418151 - DNA, 15 bp, Homo sapiens
agtttttgttgtact

SEQ ID NO: 1418152 - DNA, 15 bp, Homo sapiens
gtttttgttgtactc

SEQ ID NO: 1418153 - DNA, 15 bp, Homo sapiens
tttttgttgtactca

SEQ ID NO: 1418154 - DNA, 15 bp, Homo sapiens
ttttgttgtactcat

SEQ ID NO: 1418155 - DNA, 15 bp, Homo sapiens
tttgttgtactcatg

SEQ ID NO: 1418156 - DNA, 15 bp, Homo sapiens
ttgttgtactcatga

SEQ ID NO: 1418157 - DNA, 15 bp, Homo sapiens
tgttgtactcatgaa

SEQ ID NO: 1418158 - DNA, 15 bp, Homo sapiens
gttgtactcatgaaa

SEQ ID NO: 1418159 - DNA, 15 bp, Homo sapiens
ttgtactcatgaaaa

SEQ ID NO: 1418160 - DNA, 15 bp, Homo sapiens
tgtactcatgaaaat

SEQ ID NO: 1418161 - DNA, 15 bp, Homo sapiens
gtactcatgaaaatg

SEQ ID NO: 1418162 - DNA, 15 bp, Homo sapiens
tactcatgaaaatgc

SEQ ID NO: 1418163 - DNA, 15 bp, Homo sapiens
actcatgaaaatgct

SEQ ID NO: 1418164 - DNA, 15 bp, Homo sapiens
ctcatgaaaatgctc

SEQ ID NO: 1418165 - DNA, 15 bp, Homo sapiens
tcatgaaaatgctcc

SEQ ID NO: 1418166 - DNA, 15 bp, Homo sapiens
catgaaaatgctccc

SEQ ID NO: 1418167 - DNA, 15 bp, Homo sapiens
atgaaaatgctcccc

SEQ ID NO: 1418168 - DNA, 15 bp, Homo sapiens
tgaaaatgctccccc

SEQ ID NO: 1418169 - DNA, 15 bp, Homo sapiens
gaaaatgctccccca

SEQ ID NO: 1418170 - DNA, 15 bp, Homo sapiens
aaaatgctcccccat

SEQ ID NO: 1418171 - DNA, 15 bp, Homo sapiens
aaatgctcccccata

SEQ ID NO: 1418172 - DNA, 15 bp, Homo sapiens
aatgctcccccatat

SEQ ID NO: 1418173 - DNA, 15 bp, Homo sapiens
atgctcccccatata

SEQ ID NO: 1418174 - DNA, 15 bp, Homo sapiens
tgctcccccatatat

SEQ ID NO: 1418175 - DNA, 15 bp, Homo sapiens
gctcccccatatata

SEQ ID NO: 1418176 - DNA, 15 bp, Homo sapiens
ctcccccatatatat

SEQ ID NO: 1418177 - DNA, 15 bp, Homo sapiens
tcccccatatatatg

SEQ ID NO: 1418178 - DNA, 15 bp, Homo sapiens
cccccatatatatga

SEQ ID NO: 1418179 - DNA, 15 bp, Homo sapiens
ccccatatatatgat

SEQ ID NO: 1418180 - DNA, 15 bp, Homo sapiens
cccatatatatgatc

SEQ ID NO: 1418181 - DNA, 15 bp, Homo sapiens
ccatatatatgatca

SEQ ID NO: 1418182 - DNA, 15 bp, Homo sapiens
catatatatgatcat

SEQ ID NO: 1418183 - DNA, 15 bp, Homo sapiens
atatatatgatcatt

SEQ ID NO: 1418184 - DNA, 15 bp, Homo sapiens
tatatatgatcattc

SEQ ID NO: 1418185 - DNA, 15 bp, Homo sapiens
atatatgatcattct

SEQ ID NO: 1418186 - DNA, 15 bp, Homo sapiens
tatatgatcattctc

SEQ ID NO: 1418187 - DNA, 15 bp, Homo sapiens
atatgatcattctcg

SEQ ID NO: 1418188 - DNA, 15 bp, Homo sapiens
tatgatcattctcgc

SEQ ID NO: 1418189 - DNA, 15 bp, Homo sapiens
atgatcattctcgct

SEQ ID NO: 1418190 - DNA, 15 bp, Homo sapiens
tgatcattctcgctt

SEQ ID NO: 1418191 - DNA, 15 bp, Homo sapiens
gatcattctcgctta

SEQ ID NO: 1418192 - DNA, 15 bp, Homo sapiens
atcattctcgcttac

SEQ ID NO: 1418193 - DNA, 15 bp, Homo sapiens
tcattctcgcttact

SEQ ID NO: 1418194 - DNA, 15 bp, Homo sapiens
cattctcgcttacta

SEQ ID NO: 1418195 - DNA, 15 bp, Homo sapiens
attctcgcttactat

SEQ ID NO: 1418196 - DNA, 15 bp, Homo sapiens
ttctcgcttactata

SEQ ID NO: 1418197 - DNA, 15 bp, Homo sapiens
tctcgcttactataa

SEQ ID NO: 1418198 - DNA, 15 bp, Homo sapiens
ctcgcttactataac

SEQ ID NO: 1418199 - DNA, 15 bp, Homo sapiens
tcgcttactataaca

SEQ ID NO: 1418200 - DNA, 15 bp, Homo sapiens
cgcttactataacat

SEQ ID NO: 1418201 - DNA, 15 bp, Homo sapiens
gcttactataacatc

SEQ ID NO: 1418202 - DNA, 15 bp, Homo sapiens
cttactataacatcc

SEQ ID NO: 1418203 - DNA, 15 bp, Homo sapiens
ttactataacatcct

SEQ ID NO: 1418204 - DNA, 15 bp, Homo sapiens
tactataacatcctt

SEQ ID NO: 1418205 - DNA, 15 bp, Homo sapiens
actataacatccttg

SEQ ID NO: 1418206 - DNA, 15 bp, Homo sapiens
ctataacatccttgc

SEQ ID NO: 1418207 - DNA, 15 bp, Homo sapiens
tataacatccttgct

SEQ ID NO: 1418208 - DNA, 15 bp, Homo sapiens
ataacatccttgctt

SEQ ID NO: 1418209 - DNA, 15 bp, Homo sapiens
taacatccttgctta

SEQ ID NO: 1418210 - DNA, 15 bp, Homo sapiens
aacatccttgcttac

SEQ ID NO: 1418211 - DNA, 15 bp, Homo sapiens
acatccttgcttact

SEQ ID NO: 1418212 - DNA, 15 bp, Homo sapiens
catccttgcttacta

SEQ ID NO: 1418213 - DNA, 15 bp, Homo sapiens
atccttgcttactaa

SEQ ID NO: 1418214 - DNA, 15 bp, Homo sapiens
tccttgcttactaaa

SEQ ID NO: 1418215 - DNA, 15 bp, Homo sapiens
ccttgcttactaaat

SEQ ID NO: 1418216 - DNA, 15 bp, Homo sapiens
cttgcttactaaatg

SEQ ID NO: 1418217 - DNA, 15 bp, Homo sapiens
ttgcttactaaatga

SEQ ID NO: 1418218 - DNA, 15 bp, Homo sapiens
tgcttactaaatgag

SEQ ID NO: 1418219 - DNA, 15 bp, Homo sapiens
gcttactaaatgagt

SEQ ID NO: 1418220 - DNA, 15 bp, Homo sapiens
cttactaaatgagtt

SEQ ID NO: 1418221 - DNA, 15 bp, Homo sapiens
ttactaaatgagtta

SEQ ID NO: 1418222 - DNA, 15 bp, Homo sapiens
tactaaatgagttaa

SEQ ID NO: 1418223 - DNA, 15 bp, Homo sapiens
actaaatgagttaac

SEQ ID NO: 1418224 - DNA, 15 bp, Homo sapiens
ctaaatgagttaaca

SEQ ID NO: 1418225 - DNA, 15 bp, Homo sapiens
taaatgagttaacag

SEQ ID NO: 1418226 - DNA, 15 bp, Homo sapiens
aaatgagttaacagg

SEQ ID NO: 1418227 - DNA, 15 bp, Homo sapiens
aatgagttaacaggg

SEQ ID NO: 1418228 - DNA, 15 bp, Homo sapiens
atgagttaacagggc

SEQ ID NO: 1418229 - DNA, 15 bp, Homo sapiens
tgagttaacagggct

SEQ ID NO: 1418230 - DNA, 15 bp, Homo sapiens
gagttaacagggctt

SEQ ID NO: 1418231 - DNA, 15 bp, Homo sapiens
agttaacagggcttt

SEQ ID NO: 1418232 - DNA, 15 bp, Homo sapiens
gttaacagggcttta

SEQ ID NO: 1418233 - DNA, 15 bp, Homo sapiens
ttaacagggctttat

SEQ ID NO: 1418234 - DNA, 15 bp, Homo sapiens
taacagggctttatg

SEQ ID NO: 1418235 - DNA, 15 bp, Homo sapiens
aacagggctttatgg

SEQ ID NO: 1418236 - DNA, 15 bp, Homo sapiens
acagggctttatggt

SEQ ID NO: 1418237 - DNA, 15 bp, Homo sapiens
cagggctttatggtg

SEQ ID NO: 1418238 - DNA, 15 bp, Homo sapiens
agggctttatggtgt

SEQ ID NO: 1418239 - DNA, 15 bp, Homo sapiens
gggctttatggtgtg

SEQ ID NO: 1418240 - DNA, 15 bp, Homo sapiens
ggctttatggtgtgt

SEQ ID NO: 1418241 - DNA, 15 bp, Homo sapiens
gctttatggtgtgta

SEQ ID NO: 1418242 - DNA, 15 bp, Homo sapiens
ctttatggtgtgtat

SEQ ID NO: 1418243 - DNA, 15 bp, Homo sapiens
tttatggtgtgtatc

SEQ ID NO: 1418244 - DNA, 15 bp, Homo sapiens
ttatggtgtgtatcg

SEQ ID NO: 1418245 - DNA, 15 bp, Homo sapiens
tatggtgtgtatcgt

SEQ ID NO: 1418246 - DNA, 15 bp, Homo sapiens
atggtgtgtatcgtg

SEQ ID NO: 1418247 - DNA, 15 bp, Homo sapiens
tggtgtgtatcgtga

SEQ ID NO: 1418248 - DNA, 15 bp, Homo sapiens
ggtgtgtatcgtgaa

SEQ ID NO: 1418249 - DNA, 15 bp, Homo sapiens
gtgtgtatcgtgaaa

SEQ ID NO: 1418250 - DNA, 15 bp, Homo sapiens
tgtgtatcgtgaaac

SEQ ID NO: 1418251 - DNA, 15 bp, Homo sapiens
gtgtatcgtgaaaca

SEQ ID NO: 1418252 - DNA, 15 bp, Homo sapiens
tgtatcgtgaaacac

SEQ ID NO: 1418253 - DNA, 15 bp, Homo sapiens
gtatcgtgaaacaca

SEQ ID NO: 1418254 - DNA, 15 bp, Homo sapiens
tatcgtgaaacacac

SEQ ID NO: 1418255 - DNA, 15 bp, Homo sapiens
atcgtgaaacacacg

SEQ ID NO: 1418256 - DNA, 15 bp, Homo sapiens
tcgtgaaacacacgt

SEQ ID NO: 1418257 - DNA, 15 bp, Homo sapiens
cgtgaaacacacgtg

SEQ ID NO: 1418258 - DNA, 15 bp, Homo sapiens
gtgaaacacacgtgc

SEQ ID NO: 1418259 - DNA, 15 bp, Homo sapiens
tgaaacacacgtgca

SEQ ID NO: 1418260 - DNA, 15 bp, Homo sapiens
gaaacacacgtgcat

SEQ ID NO: 1418261 - DNA, 15 bp, Homo sapiens
aaacacacgtgcatt

SEQ ID NO: 1418262 - DNA, 15 bp, Homo sapiens
aacacacgtgcatta

SEQ ID NO: 1418263 - DNA, 15 bp, Homo sapiens
acacacgtgcattaa

SEQ ID NO: 1418264 - DNA, 15 bp, Homo sapiens
cacacgtgcattaaa

SEQ ID NO: 1418265 - DNA, 15 bp, Homo sapiens
acacgtgcattaaag

SEQ ID NO: 1418266 - DNA, 15 bp, Homo sapiens
cacgtgcattaaaga

SEQ ID NO: 1418267 - DNA, 15 bp, Homo sapiens
acgtgcattaaagac

SEQ ID NO: 1418268 - DNA, 15 bp, Homo sapiens
cgtgcattaaagacc

SEQ ID NO: 1418269 - DNA, 15 bp, Homo sapiens
gtgcattaaagaccc

SEQ ID NO: 1418270 - DNA, 15 bp, Homo sapiens
tgcattaaagaccct

SEQ ID NO: 1418271 - DNA, 15 bp, Homo sapiens
gcattaaagaccctc

SEQ ID NO: 1418272 - DNA, 15 bp, Homo sapiens
cattaaagaccctct

SEQ ID NO: 1418273 - DNA, 15 bp, Homo sapiens
attaaagaccctctg

SEQ ID NO: 1418274 - DNA, 15 bp, Homo sapiens
ttaaagaccctctgg

SEQ ID NO: 1418275 - DNA, 15 bp, Homo sapiens
taaagaccctctgga

SEQ ID NO: 1418276 - DNA, 15 bp, Homo sapiens
aaagaccctctggaa

SEQ ID NO: 1418277 - DNA, 15 bp, Homo sapiens
aagaccctctggaag

SEQ ID NO: 1418278 - DNA, 15 bp, Homo sapiens
agaccctctggaagg

SEQ ID NO: 1418279 - DNA, 15 bp, Homo sapiens
gaccctctggaaggt

SEQ ID NO: 1418280 - DNA, 15 bp, Homo sapiens
accctctggaaggta

SEQ ID NO: 1418281 - DNA, 15 bp, Homo sapiens
ccctctggaaggtat

SEQ ID NO: 1418282 - DNA, 15 bp, Homo sapiens
cctctggaaggtatt

SEQ ID NO: 1418283 - DNA, 15 bp, Homo sapiens
ctctggaaggtatta

SEQ ID NO: 1418284 - DNA, 15 bp, Homo sapiens
tctggaaggtattag

SEQ ID NO: 1418285 - DNA, 15 bp, Homo sapiens
ctggaaggtattagc

SEQ ID NO: 1418286 - DNA, 15 bp, Homo sapiens
tggaaggtattagct

SEQ ID NO: 1418287 - DNA, 15 bp, Homo sapiens
ggaaggtattagctt

SEQ ID NO: 1418288 - DNA, 15 bp, Homo sapiens
gaaggtattagcttt

SEQ ID NO: 1418289 - DNA, 15 bp, Homo sapiens
aaggtattagctttt

SEQ ID NO: 1418290 - DNA, 15 bp, Homo sapiens
aggtattagcttttc

SEQ ID NO: 1418291 - DNA, 15 bp, Homo sapiens
ggtattagcttttca

SEQ ID NO: 1418292 - DNA, 15 bp, Homo sapiens
gtattagcttttcac

SEQ ID NO: 1418293 - DNA, 15 bp, Homo sapiens
tattagcttttcaca

SEQ ID NO: 1418294 - DNA, 15 bp, Homo sapiens
attagcttttcacac

SEQ ID NO: 1418295 - DNA, 15 bp, Homo sapiens
ttagcttttcacact

SEQ ID NO: 1418296 - DNA, 15 bp, Homo sapiens
tagcttttcacactt

SEQ ID NO: 1418297 - DNA, 15 bp, Homo sapiens
agcttttcacacttt

SEQ ID NO: 1418298 - DNA, 15 bp, Homo sapiens
gcttttcacactttc

SEQ ID NO: 1418299 - DNA, 15 bp, Homo sapiens
cttttcacactttca

SEQ ID NO: 1418300 - DNA, 15 bp, Homo sapiens
ttttcacactttcac

SEQ ID NO: 1418301 - DNA, 15 bp, Homo sapiens
tttcacactttcaca

SEQ ID NO: 1418302 - DNA, 15 bp, Homo sapiens
ttcacactttcacaa

SEQ ID NO: 1418303 - DNA, 15 bp, Homo sapiens
tcacactttcacaac

SEQ ID NO: 1418304 - DNA, 15 bp, Homo sapiens
cacactttcacaaca

SEQ ID NO: 1418305 - DNA, 15 bp, Homo sapiens
acactttcacaacaa

SEQ ID NO: 1418306 - DNA, 15 bp, Homo sapiens
cactttcacaacaaa

SEQ ID NO: 1418307 - DNA, 15 bp, Homo sapiens
actttcacaacaaaa

SEQ ID NO: 1418308 - DNA, 15 bp, Homo sapiens
ctttcacaacaaaag

SEQ ID NO: 1418309 - DNA, 15 bp, Homo sapiens
tttcacaacaaaagc

SEQ ID NO: 1418310 - DNA, 15 bp, Homo sapiens
ttcacaacaaaagct

SEQ ID NO: 1418311 - DNA, 15 bp, Homo sapiens
tcacaacaaaagctt

SEQ ID NO: 1418312 - DNA, 15 bp, Homo sapiens
cacaacaaaagcttc

SEQ ID NO: 1418313 - DNA, 15 bp, Homo sapiens
acaacaaaagcttca

SEQ ID NO: 1418314 - DNA, 15 bp, Homo sapiens
caacaaaagcttcac

SEQ ID NO: 1418315 - DNA, 15 bp, Homo sapiens
aacaaaagcttcaca

SEQ ID NO: 1418316 - DNA, 15 bp, Homo sapiens
acaaaagcttcacac

SEQ ID NO: 1418317 - DNA, 15 bp, Homo sapiens
caaaagcttcacact

SEQ ID NO: 1418318 - DNA, 15 bp, Homo sapiens
aaaagcttcacactt

SEQ ID NO: 1418319 - DNA, 15 bp, Homo sapiens
aaagcttcacacttg

SEQ ID NO: 1418320 - DNA, 15 bp, Homo sapiens
aagcttcacacttgt

SEQ ID NO: 1418321 - DNA, 15 bp, Homo sapiens
agcttcacacttgtg

SEQ ID NO: 1418322 - DNA, 15 bp, Homo sapiens
gcttcacacttgtgg

SEQ ID NO: 1418323 - DNA, 15 bp, Homo sapiens
cttcacacttgtggt

SEQ ID NO: 1418324 - DNA, 15 bp, Homo sapiens
ttcacacttgtggtt

SEQ ID NO: 1418325 - DNA, 15 bp, Homo sapiens
tcacacttgtggtta

SEQ ID NO: 1418326 - DNA, 15 bp, Homo sapiens
cacacttgtggttat

SEQ ID NO: 1418327 - DNA, 15 bp, Homo sapiens
acacttgtggttatt

SEQ ID NO: 1418328 - DNA, 15 bp, Homo sapiens
cacttgtggttatta

SEQ ID NO: 1418329 - DNA, 15 bp, Homo sapiens
acttgtggttattaa

SEQ ID NO: 1418330 - DNA, 15 bp, Homo sapiens
cttgtggttattaag

SEQ ID NO: 1418331 - DNA, 15 bp, Homo sapiens
ttgtggttattaagc

SEQ ID NO: 1418332 - DNA, 15 bp, Homo sapiens
tgtggttattaagct

SEQ ID NO: 1418333 - DNA, 15 bp, Homo sapiens
gtggttattaagcta

SEQ ID NO: 1418334 - DNA, 15 bp, Homo sapiens
tggttattaagctat

SEQ ID NO: 1418335 - DNA, 15 bp, Homo sapiens
ggttattaagctatt

SEQ ID NO: 1418336 - DNA, 15 bp, Homo sapiens
gttattaagctattt

SEQ ID NO: 1418337 - DNA, 15 bp, Homo sapiens
ttattaagctatttt

SEQ ID NO: 1418338 - DNA, 15 bp, Homo sapiens
tattaagctattttc

SEQ ID NO: 1418339 - DNA, 15 bp, Homo sapiens
attaagctattttct

SEQ ID NO: 1418340 - DNA, 15 bp, Homo sapiens
ttaagctattttctc

SEQ ID NO: 1418341 - DNA, 15 bp, Homo sapiens
taagctattttctct

SEQ ID NO: 1418342 - DNA, 15 bp, Homo sapiens
aagctattttctcta

SEQ ID NO: 1418343 - DNA, 15 bp, Homo sapiens
agctattttctctaa

SEQ ID NO: 1418344 - DNA, 15 bp, Homo sapiens
gctattttctctaac

SEQ ID NO: 1418345 - DNA, 15 bp, Homo sapiens
ctattttctctaacc

SEQ ID NO: 1418346 - DNA, 15 bp, Homo sapiens
tattttctctaacca

SEQ ID NO: 1418347 - DNA, 15 bp, Homo sapiens
attttctctaaccag

SEQ ID NO: 1418348 - DNA, 15 bp, Homo sapiens
ttttctctaaccagt

SEQ ID NO: 1418349 - DNA, 15 bp, Homo sapiens
tttctctaaccagtt

SEQ ID NO: 1418350 - DNA, 15 bp, Homo sapiens
ttctctaaccagttc

SEQ ID NO: 1418351 - DNA, 15 bp, Homo sapiens
tctctaaccagttcc

SEQ ID NO: 1418352 - DNA, 15 bp, Homo sapiens
ctctaaccagttccc

SEQ ID NO: 1418353 - DNA, 15 bp, Homo sapiens
tctaaccagttccct

SEQ ID NO: 1418354 - DNA, 15 bp, Homo sapiens
ctaaccagttccctt

SEQ ID NO: 1418355 - DNA, 15 bp, Homo sapiens
taaccagttcccttt

SEQ ID NO: 1418356 - DNA, 15 bp, Homo sapiens
aaccagttccctttc

SEQ ID NO: 1418357 - DNA, 15 bp, Homo sapiens
accagttccctttca

SEQ ID NO: 1418358 - DNA, 15 bp, Homo sapiens
ccagttccctttcaa

SEQ ID NO: 1418359 - DNA, 15 bp, Homo sapiens
agttccctttcaagc

SEQ ID NO: 1418360 - DNA, 15 bp, Homo sapiens
gttccctttcaagca

SEQ ID NO: 1418361 - DNA, 15 bp, Homo sapiens
ttccctttcaagcaa

SEQ ID NO: 1418362 - DNA, 15 bp, Homo sapiens
tccctttcaagcaaa

SEQ ID NO: 1418363 - DNA, 15 bp, Homo sapiens
ccctttcaagcaaaa

SEQ ID NO: 1418364 - DNA, 15 bp, Homo sapiens
cctttcaagcaaaat

SEQ ID NO: 1418365 - DNA, 15 bp, Homo sapiens
ctttcaagcaaaatg

SEQ ID NO: 1418366 - DNA, 15 bp, Homo sapiens
tttcaagcaaaatgc

SEQ ID NO: 1418367 - DNA, 15 bp, Homo sapiens
ttcaagcaaaatgca

SEQ ID NO: 1418368 - DNA, 15 bp, Homo sapiens
tcaagcaaaatgcat

SEQ ID NO: 1418369 - DNA, 15 bp, Homo sapiens
caagcaaaatgcata

SEQ ID NO: 1418370 - DNA, 15 bp, Homo sapiens
aagcaaaatgcatac

SEQ ID NO: 1418371 - DNA, 15 bp, Homo sapiens
agcaaaatgcataca

SEQ ID NO: 1418372 - DNA, 15 bp, Homo sapiens
gcaaaatgcatacat

SEQ ID NO: 1418373 - DNA, 15 bp, Homo sapiens
caaaatgcatacatt

SEQ ID NO: 1418374 - DNA, 15 bp, Homo sapiens
aaaatgcatacattg

SEQ ID NO: 1418375 - DNA, 15 bp, Homo sapiens
aaatgcatacattgg

SEQ ID NO: 1418376 - DNA, 15 bp, Homo sapiens
aatgcatacattggt

SEQ ID NO: 1418377 - DNA, 15 bp, Homo sapiens
atgcatacattggtc

SEQ ID NO: 1418378 - DNA, 15 bp, Homo sapiens
tgcatacattggtct

SEQ ID NO: 1418379 - DNA, 15 bp, Homo sapiens
gcatacattggtctc

SEQ ID NO: 1418380 - DNA, 15 bp, Homo sapiens
catacattggtctct

SEQ ID NO: 1418381 - DNA, 15 bp, Homo sapiens
atacattggtctctg

SEQ ID NO: 1418382 - DNA, 15 bp, Homo sapiens
tacattggtctctgt

SEQ ID NO: 1418383 - DNA, 15 bp, Homo sapiens
acattggtctctgta

SEQ ID NO: 1418384 - DNA, 15 bp, Homo sapiens
cattggtctctgtag

SEQ ID NO: 1418385 - DNA, 15 bp, Homo sapiens
attggtctctgtagg

SEQ ID NO: 1418386 - DNA, 15 bp, Homo sapiens
ttggtctctgtaggt

SEQ ID NO: 1418387 - DNA, 15 bp, Homo sapiens
tggtctctgtaggtg

SEQ ID NO: 1418388 - DNA, 15 bp, Homo sapiens
ggtctctgtaggtga

SEQ ID NO: 1418389 - DNA, 15 bp, Homo sapiens
gtctctgtaggtgat

SEQ ID NO: 1418390 - DNA, 15 bp, Homo sapiens
tctctgtaggtgatg

SEQ ID NO: 1418391 - DNA, 15 bp, Homo sapiens
ctctgtaggtgatgg

SEQ ID NO: 1418392 - DNA, 15 bp, Homo sapiens
tctgtaggtgatggg

SEQ ID NO: 1418393 - DNA, 15 bp, Homo sapiens
ctgtaggtgatgggt

SEQ ID NO: 1418394 - DNA, 15 bp, Homo sapiens
tgtaggtgatgggtt

SEQ ID NO: 1418395 - DNA, 15 bp, Homo sapiens
gtaggtgatgggtta

SEQ ID NO: 1418396 - DNA, 15 bp, Homo sapiens
taggtgatgggttaa

SEQ ID NO: 1418397 - DNA, 15 bp, Homo sapiens
aggtgatgggttaat

SEQ ID NO: 1418398 - DNA, 15 bp, Homo sapiens
ggtgatgggttaatg

SEQ ID NO: 1418399 - DNA, 15 bp, Homo sapiens
gtgatgggttaatgc

SEQ ID NO: 1418400 - DNA, 15 bp, Homo sapiens
tgatgggttaatgca

SEQ ID NO: 1418401 - DNA, 15 bp, Homo sapiens
gatgggttaatgcat

SEQ ID NO: 1418402 - DNA, 15 bp, Homo sapiens
atgggttaatgcatg

SEQ ID NO: 1418403 - DNA, 15 bp, Homo sapiens
tgggttaatgcatgg

SEQ ID NO: 1418404 - DNA, 15 bp, Homo sapiens
gggttaatgcatgga

SEQ ID NO: 1418405 - DNA, 15 bp, Homo sapiens
ggttaatgcatggaa

SEQ ID NO: 1418406 - DNA, 15 bp, Homo sapiens
gttaatgcatggaaa

SEQ ID NO: 1418407 - DNA, 15 bp, Homo sapiens
ttaatgcatggaaat

SEQ ID NO: 1418408 - DNA, 15 bp, Homo sapiens
taatgcatggaaata

SEQ ID NO: 1418409 - DNA, 15 bp, Homo sapiens
aatgcatggaaatag

SEQ ID NO: 1418410 - DNA, 15 bp, Homo sapiens
atgcatggaaatagt

SEQ ID NO: 1418411 - DNA, 15 bp, Homo sapiens
tgcatggaaatagtt

SEQ ID NO: 1418412 - DNA, 15 bp, Homo sapiens
gcatggaaatagttt

SEQ ID NO: 1418413 - DNA, 15 bp, Homo sapiens
catggaaatagtttc

SEQ ID NO: 1418414 - DNA, 15 bp, Homo sapiens
atggaaatagtttct

SEQ ID NO: 1418415 - DNA, 15 bp, Homo sapiens
tggaaatagtttctc

SEQ ID NO: 1418416 - DNA, 15 bp, Homo sapiens
ggaaatagtttctcc

SEQ ID NO: 1418417 - DNA, 15 bp, Homo sapiens
gaaatagtttctcct

SEQ ID NO: 1418418 - DNA, 15 bp, Homo sapiens
aaatagtttctcctt

SEQ ID NO: 1418419 - DNA, 15 bp, Homo sapiens
aatagtttctccttc

SEQ ID NO: 1418420 - DNA, 15 bp, Homo sapiens
atagtttctccttcc

SEQ ID NO: 1418421 - DNA, 15 bp, Homo sapiens
tagtttctccttccc

SEQ ID NO: 1418422 - DNA, 15 bp, Homo sapiens
agtttctccttccct

SEQ ID NO: 1418423 - DNA, 15 bp, Homo sapiens
gtttctccttccctg

SEQ ID NO: 1418424 - DNA, 15 bp, Homo sapiens
tttctccttccctgg

SEQ ID NO: 1418425 - DNA, 15 bp, Homo sapiens
ttctccttccctgga

SEQ ID NO: 1418426 - DNA, 15 bp, Homo sapiens
tctccttccctggaa

SEQ ID NO: 1418427 - DNA, 15 bp, Homo sapiens
ctccttccctggaac

SEQ ID NO: 1418428 - DNA, 15 bp, Homo sapiens
tccttccctggaact

SEQ ID NO: 1418429 - DNA, 15 bp, Homo sapiens
ccttccctggaactg

SEQ ID NO: 1418430 - DNA, 15 bp, Homo sapiens
cttccctggaactgg

SEQ ID NO: 1418431 - DNA, 15 bp, Homo sapiens
ttccctggaactggg

SEQ ID NO: 1418432 - DNA, 15 bp, Homo sapiens
tccctggaactggga

SEQ ID NO: 1418433 - DNA, 15 bp, Homo sapiens
ccctggaactgggaa

SEQ ID NO: 1418434 - DNA, 15 bp, Homo sapiens
cctggaactgggaat

SEQ ID NO: 1418435 - DNA, 15 bp, Homo sapiens
ctggaactgggaata

SEQ ID NO: 1418436 - DNA, 15 bp, Homo sapiens
tggaactgggaatag

SEQ ID NO: 1418437 - DNA, 15 bp, Homo sapiens
ggaactgggaatagt

SEQ ID NO: 1418438 - DNA, 15 bp, Homo sapiens
gaactgggaatagtg

SEQ ID NO: 1418439 - DNA, 15 bp, Homo sapiens
aactgggaatagtgg

SEQ ID NO: 1418440 - DNA, 15 bp, Homo sapiens
actgggaatagtggg

SEQ ID NO: 1418441 - DNA, 15 bp, Homo sapiens
ctgggaatagtgggt

SEQ ID NO: 1418442 - DNA, 15 bp, Homo sapiens
tgggaatagtgggtg

SEQ ID NO: 1418443 - DNA, 15 bp, Homo sapiens
gggaatagtgggtga

SEQ ID NO: 1418444 - DNA, 15 bp, Homo sapiens
ggaatagtgggtgag

SEQ ID NO: 1418445 - DNA, 15 bp, Homo sapiens
gaatagtgggtgaga

SEQ ID NO: 1418446 - DNA, 15 bp, Homo sapiens
aatagtgggtgagat

SEQ ID NO: 1418447 - DNA, 15 bp, Homo sapiens
atagtgggtgagata

SEQ ID NO: 1418448 - DNA, 15 bp, Homo sapiens
tagtgggtgagatag

SEQ ID NO: 1418449 - DNA, 15 bp, Homo sapiens
agtgggtgagatagt

SEQ ID NO: 1418450 - DNA, 15 bp, Homo sapiens
gtgggtgagatagtg

SEQ ID NO: 1418451 - DNA, 15 bp, Homo sapiens
tgggtgagatagtgt

SEQ ID NO: 1418452 - DNA, 15 bp, Homo sapiens
gggtgagatagtgta

SEQ ID NO: 1418453 - DNA, 15 bp, Homo sapiens
ggtgagatagtgtat

SEQ ID NO: 1418454 - DNA, 15 bp, Homo sapiens
gtgagatagtgtatt

SEQ ID NO: 1418455 - DNA, 15 bp, Homo sapiens
tgagatagtgtattt

SEQ ID NO: 1418456 - DNA, 15 bp, Homo sapiens
gagatagtgtatttt

SEQ ID NO: 1418457 - DNA, 15 bp, Homo sapiens
agatagtgtattttt

SEQ ID NO: 1418458 - DNA, 15 bp, Homo sapiens
gatagtgtatttttt

SEQ ID NO: 1418459 - DNA, 15 bp, Homo sapiens
atagtgtatttttta

SEQ ID NO: 1418460 - DNA, 15 bp, Homo sapiens
tagtgtattttttaa

SEQ ID NO: 1418461 - DNA, 15 bp, Homo sapiens
agtgtattttttaat

SEQ ID NO: 1418462 - DNA, 15 bp, Homo sapiens
gtgtattttttaatg

SEQ ID NO: 1418463 - DNA, 15 bp, Homo sapiens
tgtattttttaatgt

SEQ ID NO: 1418464 - DNA, 15 bp, Homo sapiens
gtattttttaatgta

SEQ ID NO: 1418465 - DNA, 15 bp, Homo sapiens
tattttttaatgtaa

SEQ ID NO: 1418466 - DNA, 15 bp, Homo sapiens
attttttaatgtaaa

SEQ ID NO: 1418467 - DNA, 15 bp, Homo sapiens
ttttttaatgtaaag

SEQ ID NO: 1418468 - DNA, 15 bp, Homo sapiens
tttttaatgtaaaga

SEQ ID NO: 1418469 - DNA, 15 bp, Homo sapiens
ttttaatgtaaagac

SEQ ID NO: 1418470 - DNA, 15 bp, Homo sapiens
tttaatgtaaagaca

SEQ ID NO: 1418471 - DNA, 15 bp, Homo sapiens
ttaatgtaaagacag

SEQ ID NO: 1418472 - DNA, 15 bp, Homo sapiens
taatgtaaagacagg

SEQ ID NO: 1418473 - DNA, 15 bp, Homo sapiens
aatgtaaagacaggc

SEQ ID NO: 1418474 - DNA, 15 bp, Homo sapiens
atgtaaagacaggca

SEQ ID NO: 1418475 - DNA, 15 bp, Homo sapiens
tgtaaagacaggcac

SEQ ID NO: 1418476 - DNA, 15 bp, Homo sapiens
gtaaagacaggcaca

SEQ ID NO: 1418477 - DNA, 15 bp, Homo sapiens
taaagacaggcacaa

SEQ ID NO: 1418478 - DNA, 15 bp, Homo sapiens
aaagacaggcacaaa

SEQ ID NO: 1418479 - DNA, 15 bp, Homo sapiens
aagacaggcacaaat

SEQ ID NO: 1418480 - DNA, 15 bp, Homo sapiens
agacaggcacaaatg

SEQ ID NO: 1418481 - DNA, 15 bp, Homo sapiens
gacaggcacaaatgc

SEQ ID NO: 1418482 - DNA, 15 bp, Homo sapiens
acaggcacaaatgct

SEQ ID NO: 1418483 - DNA, 15 bp, Homo sapiens
caggcacaaatgctt

SEQ ID NO: 1418484 - DNA, 15 bp, Homo sapiens
aggcacaaatgcttt

SEQ ID NO: 1418485 - DNA, 15 bp, Homo sapiens
ggcacaaatgctttt

SEQ ID NO: 1418486 - DNA, 15 bp, Homo sapiens
gcacaaatgcttttt

SEQ ID NO: 1418487 - DNA, 15 bp, Homo sapiens
cacaaatgctttttt

SEQ ID NO: 1418488 - DNA, 15 bp, Homo sapiens
acaaatgcttttttt

SEQ ID NO: 1418489 - DNA, 15 bp, Homo sapiens
caaatgctttttttg

SEQ ID NO: 1418490 - DNA, 15 bp, Homo sapiens
aaatgctttttttgt

SEQ ID NO: 1418491 - DNA, 15 bp, Homo sapiens
aatgctttttttgtt

SEQ ID NO: 1418492 - DNA, 15 bp, Homo sapiens
atgctttttttgttg

SEQ ID NO: 1418493 - DNA, 15 bp, Homo sapiens
tgctttttttgttga

SEQ ID NO: 1418494 - DNA, 15 bp, Homo sapiens
gctttttttgttgat

SEQ ID NO: 1418495 - DNA, 15 bp, Homo sapiens
ctttttttgttgata

SEQ ID NO: 1418496 - DNA, 15 bp, Homo sapiens
tttttttgttgataa

SEQ ID NO: 1418497 - DNA, 15 bp, Homo sapiens
ttttttgttgataaa

SEQ ID NO: 1418498 - DNA, 15 bp, Homo sapiens
tttttgttgataaat

SEQ ID NO: 1418499 - DNA, 15 bp, Homo sapiens
ttttgttgataaata

SEQ ID NO: 1418500 - DNA, 15 bp, Homo sapiens
tttgttgataaatac

SEQ ID NO: 1418501 - DNA, 15 bp, Homo sapiens
ttgttgataaatact

SEQ ID NO: 1418502 - DNA, 15 bp, Homo sapiens
tgttgataaatacta

SEQ ID NO: 1418503 - DNA, 15 bp, Homo sapiens
gttgataaatactat

SEQ ID NO: 1418504 - DNA, 15 bp, Homo sapiens
ttgataaatactatt

SEQ ID NO: 1418505 - DNA, 15 bp, Homo sapiens
tgataaatactattt

SEQ ID NO: 1418506 - DNA, 15 bp, Homo sapiens
gataaatactatttt

SEQ ID NO: 1418507 - DNA, 15 bp, Homo sapiens
ataaatactatttta

SEQ ID NO: 1418508 - DNA, 15 bp, Homo sapiens
taaatactattttac

SEQ ID NO: 1418509 - DNA, 15 bp, Homo sapiens
aaatactattttaca

SEQ ID NO: 1418510 - DNA, 15 bp, Homo sapiens
aatactattttacaa

SEQ ID NO: 1418511 - DNA, 15 bp, Homo sapiens
atactattttacaag

SEQ ID NO: 1418512 - DNA, 15 bp, Homo sapiens
tactattttacaagc

SEQ ID NO: 1418513 - DNA, 15 bp, Homo sapiens
actattttacaagct

SEQ ID NO: 1418514 - DNA, 15 bp, Homo sapiens
ctattttacaagcta

SEQ ID NO: 1418515 - DNA, 15 bp, Homo sapiens
tattttacaagctaa

SEQ ID NO: 1418516 - DNA, 15 bp, Homo sapiens
attttacaagctaat

SEQ ID NO: 1418517 - DNA, 15 bp, Homo sapiens
ttttacaagctaatt

SEQ ID NO: 1418518 - DNA, 15 bp, Homo sapiens
tttacaagctaatta

SEQ ID NO: 1418519 - DNA, 15 bp, Homo sapiens
ttacaagctaattat

SEQ ID NO: 1418520 - DNA, 15 bp, Homo sapiens
tacaagctaattata

SEQ ID NO: 1418521 - DNA, 15 bp, Homo sapiens
acaagctaattataa

SEQ ID NO: 1418522 - DNA, 15 bp, Homo sapiens
caagctaattataag

SEQ ID NO: 1418523 - DNA, 15 bp, Homo sapiens
aagctaattataagt

SEQ ID NO: 1418524 - DNA, 15 bp, Homo sapiens
agctaattataagtt

SEQ ID NO: 1418525 - DNA, 15 bp, Homo sapiens
gctaattataagtta

SEQ ID NO: 1418526 - DNA, 15 bp, Homo sapiens
ctaattataagttaa

SEQ ID NO: 1418527 - DNA, 15 bp, Homo sapiens
taattataagttaag

SEQ ID NO: 1418528 - DNA, 15 bp, Homo sapiens
aattataagttaagc

SEQ ID NO: 1418529 - DNA, 15 bp, Homo sapiens
attataagttaagca

SEQ ID NO: 1418530 - DNA, 15 bp, Homo sapiens
ttataagttaagcac

SEQ ID NO: 1418531 - DNA, 15 bp, Homo sapiens
tataagttaagcact

SEQ ID NO: 1418532 - DNA, 15 bp, Homo sapiens
ataagttaagcactg

SEQ ID NO: 1418533 - DNA, 15 bp, Homo sapiens
taagttaagcactgt

SEQ ID NO: 1418534 - DNA, 15 bp, Homo sapiens
aagttaagcactgtt

SEQ ID NO: 1418535 - DNA, 15 bp, Homo sapiens
agttaagcactgtta

SEQ ID NO: 1418536 - DNA, 15 bp, Homo sapiens
gttaagcactgttac

SEQ ID NO: 1418537 - DNA, 15 bp, Homo sapiens
ttaagcactgttact

SEQ ID NO: 1418538 - DNA, 15 bp, Homo sapiens
taagcactgttactt

SEQ ID NO: 1418539 - DNA, 15 bp, Homo sapiens
aagcactgttacttg

SEQ ID NO: 1418540 - DNA, 15 bp, Homo sapiens
agcactgttacttga

SEQ ID NO: 1418541 - DNA, 15 bp, Homo sapiens
gcactgttacttgag

SEQ ID NO: 1418542 - DNA, 15 bp, Homo sapiens
cactgttacttgaga

SEQ ID NO: 1418543 - DNA, 15 bp, Homo sapiens
actgttacttgagat

SEQ ID NO: 1418544 - DNA, 15 bp, Homo sapiens
ctgttacttgagatg

SEQ ID NO: 1418545 - DNA, 15 bp, Homo sapiens
tgttacttgagatga

SEQ ID NO: 1418546 - DNA, 15 bp, Homo sapiens
gttacttgagatgaa

SEQ ID NO: 1418547 - DNA, 15 bp, Homo sapiens
ttacttgagatgaaa

SEQ ID NO: 1418548 - DNA, 15 bp, Homo sapiens
tacttgagatgaaat

SEQ ID NO: 1418549 - DNA, 15 bp, Homo sapiens
acttgagatgaaata

SEQ ID NO: 1418550 - DNA, 15 bp, Homo sapiens
cttgagatgaaatat

SEQ ID NO: 1418551 - DNA, 15 bp, Homo sapiens
ttgagatgaaatata

SEQ ID NO: 1418552 - DNA, 15 bp, Homo sapiens
tgagatgaaatatac

SEQ ID NO: 1418553 - DNA, 15 bp, Homo sapiens
gagatgaaatataca

SEQ ID NO: 1418554 - DNA, 15 bp, Homo sapiens
agatgaaatatacag

SEQ ID NO: 1418555 - DNA, 15 bp, Homo sapiens
gatgaaatatacagg

SEQ ID NO: 1418556 - DNA, 15 bp, Homo sapiens
atgaaatatacaggg

SEQ ID NO: 1418557 - DNA, 15 bp, Homo sapiens
tgaaatatacagggc

SEQ ID NO: 1418558 - DNA, 15 bp, Homo sapiens
gaaatatacagggct

SEQ ID NO: 1418559 - DNA, 15 bp, Homo sapiens
aaatatacagggctt

SEQ ID NO: 1418560 - DNA, 15 bp, Homo sapiens
aatatacagggcttc

SEQ ID NO: 1418561 - DNA, 15 bp, Homo sapiens
atatacagggcttca

SEQ ID NO: 1418562 - DNA, 15 bp, Homo sapiens
tatacagggcttcaa

SEQ ID NO: 1418563 - DNA, 15 bp, Homo sapiens
atacagggcttcaaa

SEQ ID NO: 1418564 - DNA, 15 bp, Homo sapiens
tacagggcttcaaag

SEQ ID NO: 1418565 - DNA, 15 bp, Homo sapiens
acagggcttcaaaga

SEQ ID NO: 1418566 - DNA, 15 bp, Homo sapiens
cagggcttcaaagat

SEQ ID NO: 1418567 - DNA, 15 bp, Homo sapiens
agggcttcaaagatc

SEQ ID NO: 1418568 - DNA, 15 bp, Homo sapiens
gggcttcaaagatca

SEQ ID NO: 1418569 - DNA, 15 bp, Homo sapiens
ggcttcaaagatcat

SEQ ID NO: 1418570 - DNA, 15 bp, Homo sapiens
gcttcaaagatcata

SEQ ID NO: 1418571 - DNA, 15 bp, Homo sapiens
cttcaaagatcataa

SEQ ID NO: 1418572 - DNA, 15 bp, Homo sapiens
ttcaaagatcataat

SEQ ID NO: 1418573 - DNA, 15 bp, Homo sapiens
tcaaagatcataatc

SEQ ID NO: 1418574 - DNA, 15 bp, Homo sapiens
caaagatcataatct

SEQ ID NO: 1418575 - DNA, 15 bp, Homo sapiens
aaagatcataatcta

SEQ ID NO: 1418576 - DNA, 15 bp, Homo sapiens
aagatcataatctaa

SEQ ID NO: 1418577 - DNA, 15 bp, Homo sapiens
agatcataatctaaa

SEQ ID NO: 1418578 - DNA, 15 bp, Homo sapiens
gatcataatctaaat

SEQ ID NO: 1418579 - DNA, 15 bp, Homo sapiens
atcataatctaaata

SEQ ID NO: 1418580 - DNA, 15 bp, Homo sapiens
tcataatctaaataa

SEQ ID NO: 1418581 - DNA, 15 bp, Homo sapiens
cataatctaaataat

SEQ ID NO: 1418582 - DNA, 15 bp, Homo sapiens
ataatctaaataatt

SEQ ID NO: 1418583 - DNA, 15 bp, Homo sapiens
taatctaaataatta

SEQ ID NO: 1418584 - DNA, 15 bp, Homo sapiens
aatctaaataattat

SEQ ID NO: 1418585 - DNA, 15 bp, Homo sapiens
atctaaataattatg

SEQ ID NO: 1418586 - DNA, 15 bp, Homo sapiens
tctaaataattatgc

SEQ ID NO: 1418587 - DNA, 15 bp, Homo sapiens
ctaaataattatgca

SEQ ID NO: 1418588 - DNA, 15 bp, Homo sapiens
taaataattatgcac

SEQ ID NO: 1418589 - DNA, 15 bp, Homo sapiens
aaataattatgcaca

SEQ ID NO: 1418590 - DNA, 15 bp, Homo sapiens
aataattatgcacag

SEQ ID NO: 1418591 - DNA, 15 bp, Homo sapiens
ataattatgcacagc

SEQ ID NO: 1418592 - DNA, 15 bp, Homo sapiens
taattatgcacagct

SEQ ID NO: 1418593 - DNA, 15 bp, Homo sapiens
aattatgcacagcta

SEQ ID NO: 1418594 - DNA, 15 bp, Homo sapiens
attatgcacagctaa

SEQ ID NO: 1418595 - DNA, 15 bp, Homo sapiens
ttatgcacagctaat

SEQ ID NO: 1418596 - DNA, 15 bp, Homo sapiens
tatgcacagctaatg

SEQ ID NO: 1418597 - DNA, 15 bp, Homo sapiens
atgcacagctaatgg

SEQ ID NO: 1418598 - DNA, 15 bp, Homo sapiens
tgcacagctaatggt

SEQ ID NO: 1418599 - DNA, 15 bp, Homo sapiens
gcacagctaatggtt

SEQ ID NO: 1418600 - DNA, 15 bp, Homo sapiens
cacagctaatggtta

SEQ ID NO: 1418601 - DNA, 15 bp, Homo sapiens
acagctaatggttat

SEQ ID NO: 1418602 - DNA, 15 bp, Homo sapiens
cagctaatggttata

SEQ ID NO: 1418603 - DNA, 15 bp, Homo sapiens
agctaatggttatac

SEQ ID NO: 1418604 - DNA, 15 bp, Homo sapiens
gctaatggttatacc

SEQ ID NO: 1418605 - DNA, 15 bp, Homo sapiens
ctaatggttatacct

SEQ ID NO: 1418606 - DNA, 15 bp, Homo sapiens
taatggttatacctg

SEQ ID NO: 1418607 - DNA, 15 bp, Homo sapiens
aatggttatacctgt

SEQ ID NO: 1418608 - DNA, 15 bp, Homo sapiens
atggttatacctgtg

SEQ ID NO: 1418609 - DNA, 15 bp, Homo sapiens
tggttatacctgtga

SEQ ID NO: 1418610 - DNA, 15 bp, Homo sapiens
ggttatacctgtgaa

SEQ ID NO: 1418611 - DNA, 15 bp, Homo sapiens
gttatacctgtgaag

SEQ ID NO: 1418612 - DNA, 15 bp, Homo sapiens
ttatacctgtgaagt

SEQ ID NO: 1418613 - DNA, 15 bp, Homo sapiens
tatacctgtgaagta

SEQ ID NO: 1418614 - DNA, 15 bp, Homo sapiens
atacctgtgaagtaa

SEQ ID NO: 1418615 - DNA, 15 bp, Homo sapiens
tacctgtgaagtaaa

SEQ ID NO: 1418616 - DNA, 15 bp, Homo sapiens
acctgtgaagtaaag

SEQ ID NO: 1418617 - DNA, 15 bp, Homo sapiens
cctgtgaagtaaagt

SEQ ID NO: 1418618 - DNA, 15 bp, Homo sapiens
ctgtgaagtaaagta

SEQ ID NO: 1418619 - DNA, 15 bp, Homo sapiens
tgtgaagtaaagtag

SEQ ID NO: 1418620 - DNA, 15 bp, Homo sapiens
gtgaagtaaagtagt

SEQ ID NO: 1418621 - DNA, 15 bp, Homo sapiens
tgaagtaaagtagtg

SEQ ID NO: 1418622 - DNA, 15 bp, Homo sapiens
gaagtaaagtagtgg

SEQ ID NO: 1418623 - DNA, 15 bp, Homo sapiens
aagtaaagtagtgga

SEQ ID NO: 1418624 - DNA, 15 bp, Homo sapiens
agtaaagtagtggat

SEQ ID NO: 1418625 - DNA, 15 bp, Homo sapiens
gtaaagtagtggatc

SEQ ID NO: 1418626 - DNA, 15 bp, Homo sapiens
taaagtagtggatcc

SEQ ID NO: 1418627 - DNA, 15 bp, Homo sapiens
aaagtagtggatcct

SEQ ID NO: 1418628 - DNA, 15 bp, Homo sapiens
aagtagtggatcctg

SEQ ID NO: 1418629 - DNA, 15 bp, Homo sapiens
agtagtggatcctga

SEQ ID NO: 1418630 - DNA, 15 bp, Homo sapiens
gtagtggatcctgag

SEQ ID NO: 1418631 - DNA, 15 bp, Homo sapiens
tagtggatcctgagg

SEQ ID NO: 1418632 - DNA, 15 bp, Homo sapiens
agtggatcctgaggt

SEQ ID NO: 1418633 - DNA, 15 bp, Homo sapiens
gtggatcctgaggtg

SEQ ID NO: 1418634 - DNA, 15 bp, Homo sapiens
tggatcctgaggtgt

SEQ ID NO: 1418635 - DNA, 15 bp, Homo sapiens
ggatcctgaggtgta

SEQ ID NO: 1418636 - DNA, 15 bp, Homo sapiens
gatcctgaggtgtaa

SEQ ID NO: 1418637 - DNA, 15 bp, Homo sapiens
atcctgaggtgtaat

SEQ ID NO: 1418638 - DNA, 15 bp, Homo sapiens
tcctgaggtgtaatt

SEQ ID NO: 1418639 - DNA, 15 bp, Homo sapiens
cctgaggtgtaattt

SEQ ID NO: 1418640 - DNA, 15 bp, Homo sapiens
ctgaggtgtaatttt

SEQ ID NO: 1418641 - DNA, 15 bp, Homo sapiens
tgaggtgtaatttta

SEQ ID NO: 1418642 - DNA, 15 bp, Homo sapiens
gaggtgtaattttat

SEQ ID NO: 1418643 - DNA, 15 bp, Homo sapiens
aggtgtaattttata

SEQ ID NO: 1418644 - DNA, 15 bp, Homo sapiens
ggtgtaattttatag

SEQ ID NO: 1418645 - DNA, 15 bp, Homo sapiens
gtgtaattttatagt

SEQ ID NO: 1418646 - DNA, 15 bp, Homo sapiens
tgtaattttatagta

SEQ ID NO: 1418647 - DNA, 15 bp, Homo sapiens
gtaattttatagtat

SEQ ID NO: 1418648 - DNA, 15 bp, Homo sapiens
taattttatagtatt

SEQ ID NO: 1418649 - DNA, 15 bp, Homo sapiens
aattttatagtatta

SEQ ID NO: 1418650 - DNA, 15 bp, Homo sapiens
attttatagtattag

SEQ ID NO: 1418651 - DNA, 15 bp, Homo sapiens
ttttatagtattagc

SEQ ID NO: 1418652 - DNA, 15 bp, Homo sapiens
tttatagtattagct

SEQ ID NO: 1418653 - DNA, 15 bp, Homo sapiens
ttatagtattagctg

SEQ ID NO: 1418654 - DNA, 15 bp, Homo sapiens
tatagtattagctgc

SEQ ID NO: 1418655 - DNA, 15 bp, Homo sapiens
atagtattagctgca

SEQ ID NO: 1418656 - DNA, 15 bp, Homo sapiens
tagtattagctgcat

SEQ ID NO: 1418657 - DNA, 15 bp, Homo sapiens
agtattagctgcatt

SEQ ID NO: 1418658 - DNA, 15 bp, Homo sapiens
gtattagctgcattt

SEQ ID NO: 1418659 - DNA, 15 bp, Homo sapiens
tattagctgcatttc

SEQ ID NO: 1418660 - DNA, 15 bp, Homo sapiens
attagctgcatttca

SEQ ID NO: 1418661 - DNA, 15 bp, Homo sapiens
ttagctgcatttcag

SEQ ID NO: 1418662 - DNA, 15 bp, Homo sapiens
tagctgcatttcagt

SEQ ID NO: 1418663 - DNA, 15 bp, Homo sapiens
agctgcatttcagta

SEQ ID NO: 1418664 - DNA, 15 bp, Homo sapiens
gctgcatttcagtag

SEQ ID NO: 1418665 - DNA, 15 bp, Homo sapiens
ctgcatttcagtaga

SEQ ID NO: 1418666 - DNA, 15 bp, Homo sapiens
tgcatttcagtagat

SEQ ID NO: 1418667 - DNA, 15 bp, Homo sapiens
gcatttcagtagatg

SEQ ID NO: 1418668 - DNA, 15 bp, Homo sapiens
catttcagtagatgg

SEQ ID NO: 1418669 - DNA, 15 bp, Homo sapiens
atttcagtagatggt

SEQ ID NO: 1418670 - DNA, 15 bp, Homo sapiens
tttcagtagatggtg

SEQ ID NO: 1418671 - DNA, 15 bp, Homo sapiens
ttcagtagatggtgt

SEQ ID NO: 1418672 - DNA, 15 bp, Homo sapiens
tcagtagatggtgtg

SEQ ID NO: 1418673 - DNA, 15 bp, Homo sapiens
cagtagatggtgtga

SEQ ID NO: 1418674 - DNA, 15 bp, Homo sapiens
agtagatggtgtgat

SEQ ID NO: 1418675 - DNA, 15 bp, Homo sapiens
gtagatggtgtgatg

SEQ ID NO: 1418676 - DNA, 15 bp, Homo sapiens
tagatggtgtgatga

SEQ ID NO: 1418677 - DNA, 15 bp, Homo sapiens
agatggtgtgatgaa

SEQ ID NO: 1418678 - DNA, 15 bp, Homo sapiens
gatggtgtgatgaag

SEQ ID NO: 1418679 - DNA, 15 bp, Homo sapiens
atggtgtgatgaaga

SEQ ID NO: 1418680 - DNA, 15 bp, Homo sapiens
tggtgtgatgaagag

SEQ ID NO: 1418681 - DNA, 15 bp, Homo sapiens
ggtgtgatgaagagt

SEQ ID NO: 1418682 - DNA, 15 bp, Homo sapiens
gtgtgatgaagagtt

SEQ ID NO: 1418683 - DNA, 15 bp, Homo sapiens
tgtgatgaagagttt

SEQ ID NO: 1418684 - DNA, 15 bp, Homo sapiens
gtgatgaagagttta

SEQ ID NO: 1418685 - DNA, 15 bp, Homo sapiens
tgatgaagagtttaa

SEQ ID NO: 1418686 - DNA, 15 bp, Homo sapiens
gatgaagagtttaat

SEQ ID NO: 1418687 - DNA, 15 bp, Homo sapiens
atgaagagtttaatg

SEQ ID NO: 1418688 - DNA, 15 bp, Homo sapiens
tgaagagtttaatgc

SEQ ID NO: 1418689 - DNA, 15 bp, Homo sapiens
gaagagtttaatgca

SEQ ID NO: 1418690 - DNA, 15 bp, Homo sapiens
aagagtttaatgcat

SEQ ID NO: 1418691 - DNA, 15 bp, Homo sapiens
agagtttaatgcata

SEQ ID NO: 1418692 - DNA, 15 bp, Homo sapiens
gagtttaatgcatag

SEQ ID NO: 1418693 - DNA, 15 bp, Homo sapiens
agtttaatgcatagg

SEQ ID NO: 1418694 - DNA, 15 bp, Homo sapiens
gtttaatgcatagga

SEQ ID NO: 1418695 - DNA, 15 bp, Homo sapiens
tttaatgcataggat

SEQ ID NO: 1418696 - DNA, 15 bp, Homo sapiens
ttaatgcataggatt

SEQ ID NO: 1418697 - DNA, 15 bp, Homo sapiens
taatgcataggatta

SEQ ID NO: 1418698 - DNA, 15 bp, Homo sapiens
aatgcataggattaa

SEQ ID NO: 1418699 - DNA, 15 bp, Homo sapiens
atgcataggattaaa

SEQ ID NO: 1418700 - DNA, 15 bp, Homo sapiens
tgcataggattaaat

SEQ ID NO: 1418701 - DNA, 15 bp, Homo sapiens
gcataggattaaatg

SEQ ID NO: 1418702 - DNA, 15 bp, Homo sapiens
cataggattaaatga

SEQ ID NO: 1418703 - DNA, 15 bp, Homo sapiens
ataggattaaatgag

SEQ ID NO: 1418704 - DNA, 15 bp, Homo sapiens
taggattaaatgaga

SEQ ID NO: 1418705 - DNA, 15 bp, Homo sapiens
aggattaaatgagaa

SEQ ID NO: 1418706 - DNA, 15 bp, Homo sapiens
ggattaaatgagaag

SEQ ID NO: 1418707 - DNA, 15 bp, Homo sapiens
gattaaatgagaagt

SEQ ID NO: 1418708 - DNA, 15 bp, Homo sapiens
attaaatgagaagtt

SEQ ID NO: 1418709 - DNA, 15 bp, Homo sapiens
ttaaatgagaagtta

SEQ ID NO: 1418710 - DNA, 15 bp, Homo sapiens
taaatgagaagttac

SEQ ID NO: 1418711 - DNA, 15 bp, Homo sapiens
aaatgagaagttacg

SEQ ID NO: 1418712 - DNA, 15 bp, Homo sapiens
aatgagaagttacga

SEQ ID NO: 1418713 - DNA, 15 bp, Homo sapiens
atgagaagttacgag

SEQ ID NO: 1418714 - DNA, 15 bp, Homo sapiens
tgagaagttacgagg

SEQ ID NO: 1418715 - DNA, 15 bp, Homo sapiens
gagaagttacgagga

SEQ ID NO: 1418716 - DNA, 15 bp, Homo sapiens
agaagttacgaggag

SEQ ID NO: 1418717 - DNA, 15 bp, Homo sapiens
gaagttacgaggagt

SEQ ID NO: 1418718 - DNA, 15 bp, Homo sapiens
aagttacgaggagtt

SEQ ID NO: 1418719 - DNA, 15 bp, Homo sapiens
agttacgaggagttt

SEQ ID NO: 1418720 - DNA, 15 bp, Homo sapiens
gttacgaggagtttg

SEQ ID NO: 1418721 - DNA, 15 bp, Homo sapiens
ttacgaggagtttgt

SEQ ID NO: 1418722 - DNA, 15 bp, Homo sapiens
tacgaggagtttgtt

SEQ ID NO: 1418723 - DNA, 15 bp, Homo sapiens
acgaggagtttgttt

SEQ ID NO: 1418724 - DNA, 15 bp, Homo sapiens
cgaggagtttgttta

SEQ ID NO: 1418725 - DNA, 15 bp, Homo sapiens
gaggagtttgtttaa

SEQ ID NO: 1418726 - DNA, 15 bp, Homo sapiens
aggagtttgtttaaa

SEQ ID NO: 1418727 - DNA, 15 bp, Homo sapiens
ggagtttgtttaaag

SEQ ID NO: 1418728 - DNA, 15 bp, Homo sapiens
gagtttgtttaaagt

SEQ ID NO: 1418729 - DNA, 15 bp, Homo sapiens
agtttgtttaaagtt

SEQ ID NO: 1418730 - DNA, 15 bp, Homo sapiens
gtttgtttaaagtta

SEQ ID NO: 1418731 - DNA, 15 bp, Homo sapiens
tttgtttaaagttaa

SEQ ID NO: 1418732 - DNA, 15 bp, Homo sapiens
ttgtttaaagttaat

SEQ ID NO: 1418733 - DNA, 15 bp, Homo sapiens
tgtttaaagttaatg

SEQ ID NO: 1418734 - DNA, 15 bp, Homo sapiens
gtttaaagttaatgt

SEQ ID NO: 1418735 - DNA, 15 bp, Homo sapiens
tttaaagttaatgta

SEQ ID NO: 1418736 - DNA, 15 bp, Homo sapiens
ttaaagttaatgtac

SEQ ID NO: 1418737 - DNA, 15 bp, Homo sapiens
taaagttaatgtacc

SEQ ID NO: 1418738 - DNA, 15 bp, Homo sapiens
aaagttaatgtaccg

SEQ ID NO: 1418739 - DNA, 15 bp, Homo sapiens
aagttaatgtaccga

SEQ ID NO: 1418740 - DNA, 15 bp, Homo sapiens
agttaatgtaccgag

SEQ ID NO: 1418741 - DNA, 15 bp, Homo sapiens
gttaatgtaccgagg

SEQ ID NO: 1418742 - DNA, 15 bp, Homo sapiens
ttaatgtaccgaggt

SEQ ID NO: 1418743 - DNA, 15 bp, Homo sapiens
taatgtaccgaggta

SEQ ID NO: 1418744 - DNA, 15 bp, Homo sapiens
aatgtaccgaggtaa

SEQ ID NO: 1418745 - DNA, 15 bp, Homo sapiens
atgtaccgaggtaag

SEQ ID NO: 1418746 - DNA, 15 bp, Homo sapiens
tgtaccgaggtaagt

SEQ ID NO: 1418747 - DNA, 15 bp, Homo sapiens
gtaccgaggtaagtt

SEQ ID NO: 1418748 - DNA, 15 bp, Homo sapiens
taccgaggtaagttt

SEQ ID NO: 1418749 - DNA, 15 bp, Homo sapiens
accgaggtaagtttt

SEQ ID NO: 1418750 - DNA, 15 bp, Homo sapiens
ccgaggtaagttttc

SEQ ID NO: 1418751 - DNA, 15 bp, Homo sapiens
cgaggtaagttttca

SEQ ID NO: 1418752 - DNA, 15 bp, Homo sapiens
gaggtaagttttcag

SEQ ID NO: 1418753 - DNA, 15 bp, Homo sapiens
aggtaagttttcagt

SEQ ID NO: 1418754 - DNA, 15 bp, Homo sapiens
ggtaagttttcagtg

SEQ ID NO: 1418755 - DNA, 15 bp, Homo sapiens
gtaagttttcagtgt

SEQ ID NO: 1418756 - DNA, 15 bp, Homo sapiens
taagttttcagtgtt

SEQ ID NO: 1418757 - DNA, 15 bp, Homo sapiens
aagttttcagtgtta

SEQ ID NO: 1418758 - DNA, 15 bp, Homo sapiens
agttttcagtgttaa

SEQ ID NO: 1418759 - DNA, 15 bp, Homo sapiens
gttttcagtgttaag

SEQ ID NO: 1418760 - DNA, 15 bp, Homo sapiens
ttttcagtgttaagt

SEQ ID NO: 1418761 - DNA, 15 bp, Homo sapiens
tttcagtgttaagtt

SEQ ID NO: 1418762 - DNA, 15 bp, Homo sapiens
ttcagtgttaagttt

SEQ ID NO: 1418763 - DNA, 15 bp, Homo sapiens
tcagtgttaagtttt

SEQ ID NO: 1418764 - DNA, 15 bp, Homo sapiens
cagtgttaagttttt

SEQ ID NO: 1418765 - DNA, 15 bp, Homo sapiens
agtgttaagtttttg

SEQ ID NO: 1418766 - DNA, 15 bp, Homo sapiens
gtgttaagtttttgg

SEQ ID NO: 1418767 - DNA, 15 bp, Homo sapiens
tgttaagtttttggg

SEQ ID NO: 1418768 - DNA, 15 bp, Homo sapiens
gttaagtttttggga

SEQ ID NO: 1418769 - DNA, 15 bp, Homo sapiens
ttaagtttttgggag

SEQ ID NO: 1418770 - DNA, 15 bp, Homo sapiens
taagtttttgggaga

SEQ ID NO: 1418771 - DNA, 15 bp, Homo sapiens
aagtttttgggagat

SEQ ID NO: 1418772 - DNA, 15 bp, Homo sapiens
agtttttgggagatt

SEQ ID NO: 1418773 - DNA, 15 bp, Homo sapiens
gtttttgggagattt

SEQ ID NO: 1418774 - DNA, 15 bp, Homo sapiens
tttttgggagatttg

SEQ ID NO: 1418775 - DNA, 15 bp, Homo sapiens
ttttgggagatttgt

SEQ ID NO: 1418776 - DNA, 15 bp, Homo sapiens
tttgggagatttgtt

SEQ ID NO: 1418777 - DNA, 15 bp, Homo sapiens
ttgggagatttgttt

SEQ ID NO: 1418778 - DNA, 15 bp, Homo sapiens
tgggagatttgtttt

SEQ ID NO: 1418779 - DNA, 15 bp, Homo sapiens
gggagatttgttttg

SEQ ID NO: 1418780 - DNA, 15 bp, Homo sapiens
ggagatttgttttgg

SEQ ID NO: 1418781 - DNA, 15 bp, Homo sapiens
gagatttgttttggg

SEQ ID NO: 1418782 - DNA, 15 bp, Homo sapiens
agatttgttttggga

SEQ ID NO: 1418783 - DNA, 15 bp, Homo sapiens
gatttgttttgggag

SEQ ID NO: 1418784 - DNA, 15 bp, Homo sapiens
atttgttttgggaga

SEQ ID NO: 1418785 - DNA, 15 bp, Homo sapiens
tttgttttgggagag

SEQ ID NO: 1418786 - DNA, 15 bp, Homo sapiens
ttgttttgggagagg

SEQ ID NO: 1418787 - DNA, 15 bp, Homo sapiens
tgttttgggagagga

SEQ ID NO: 1418788 - DNA, 15 bp, Homo sapiens
gttttgggagaggat

SEQ ID NO: 1418789 - DNA, 15 bp, Homo sapiens
ttttgggagaggatg

SEQ ID NO: 1418790 - DNA, 15 bp, Homo sapiens
tttgggagaggatga

SEQ ID NO: 1418791 - DNA, 15 bp, Homo sapiens
ttgggagaggatgag

SEQ ID NO: 1418792 - DNA, 15 bp, Homo sapiens
tgggagaggatgagt

SEQ ID NO: 1418793 - DNA, 15 bp, Homo sapiens
gggagaggatgagtt

SEQ ID NO: 1418794 - DNA, 15 bp, Homo sapiens
ggagaggatgagttg

SEQ ID NO: 1418795 - DNA, 15 bp, Homo sapiens
gagaggatgagttgg

SEQ ID NO: 1418796 - DNA, 15 bp, Homo sapiens
agaggatgagttggg

SEQ ID NO: 1418797 - DNA, 15 bp, Homo sapiens
gaggatgagttgggg

SEQ ID NO: 1418798 - DNA, 15 bp, Homo sapiens
aggatgagttggggt

SEQ ID NO: 1418799 - DNA, 15 bp, Homo sapiens
ggatgagttggggtt

SEQ ID NO: 1418800 - DNA, 15 bp, Homo sapiens
gatgagttggggttg

SEQ ID NO: 1418801 - DNA, 15 bp, Homo sapiens
atgagttggggttgg

SEQ ID NO: 1418802 - DNA, 15 bp, Homo sapiens
tgagttggggttggg

SEQ ID NO: 1418803 - DNA, 15 bp, Homo sapiens
gagttggggttgggg

SEQ ID NO: 1418804 - DNA, 15 bp, Homo sapiens
agttggggttggggg

SEQ ID NO: 1418805 - DNA, 15 bp, Homo sapiens
gttggggttggggga

SEQ ID NO: 1418806 - DNA, 15 bp, Homo sapiens
ttggggttgggggag

SEQ ID NO: 1418807 - DNA, 15 bp, Homo sapiens
tggggttgggggagg

SEQ ID NO: 1418808 - DNA, 15 bp, Homo sapiens
ggggttgggggagga

SEQ ID NO: 1418809 - DNA, 15 bp, Homo sapiens
gggttgggggaggaa

SEQ ID NO: 1418810 - DNA, 15 bp, Homo sapiens
ggttgggggaggaaa

SEQ ID NO: 1418811 - DNA, 15 bp, Homo sapiens
gttgggggaggaaag

SEQ ID NO: 1418812 - DNA, 15 bp, Homo sapiens
ttgggggaggaaagg

SEQ ID NO: 1418813 - DNA, 15 bp, Homo sapiens
tgggggaggaaagga

SEQ ID NO: 1418814 - DNA, 15 bp, Homo sapiens
gggggaggaaaggac

SEQ ID NO: 1418815 - DNA, 15 bp, Homo sapiens
ggggaggaaaggact

SEQ ID NO: 1418816 - DNA, 15 bp, Homo sapiens
gggaggaaaggactt

SEQ ID NO: 1418817 - DNA, 15 bp, Homo sapiens
ggaggaaaggactta

SEQ ID NO: 1418818 - DNA, 15 bp, Homo sapiens
gaggaaaggacttag

SEQ ID NO: 1418819 - DNA, 15 bp, Homo sapiens
aggaaaggacttagc

SEQ ID NO: 1418820 - DNA, 15 bp, Homo sapiens
ggaaaggacttagcc

SEQ ID NO: 1418821 - DNA, 15 bp, Homo sapiens
gaaaggacttagcca

SEQ ID NO: 1418822 - DNA, 15 bp, Homo sapiens
aggacttagccagat

SEQ ID NO: 1418823 - DNA, 15 bp, Homo sapiens
ggacttagccagatg

SEQ ID NO: 1418824 - DNA, 15 bp, Homo sapiens
gacttagccagatgt

SEQ ID NO: 1418825 - DNA, 15 bp, Homo sapiens
acttagccagatgtg

SEQ ID NO: 1418826 - DNA, 15 bp, Homo sapiens
cttagccagatgtga

SEQ ID NO: 1418827 - DNA, 15 bp, Homo sapiens
ttagccagatgtgag

SEQ ID NO: 1418828 - DNA, 15 bp, Homo sapiens
tagccagatgtgagt

SEQ ID NO: 1418829 - DNA, 15 bp, Homo sapiens
agccagatgtgagtt

SEQ ID NO: 1418830 - DNA, 15 bp, Homo sapiens
gccagatgtgagttt

SEQ ID NO: 1418831 - DNA, 15 bp, Homo sapiens
ccagatgtgagtttc

SEQ ID NO: 1418832 - DNA, 15 bp, Homo sapiens
cagatgtgagtttct

SEQ ID NO: 1418833 - DNA, 15 bp, Homo sapiens
agatgtgagtttctt

SEQ ID NO: 1418834 - DNA, 15 bp, Homo sapiens
gatgtgagtttctta

SEQ ID NO: 1418835 - DNA, 15 bp, Homo sapiens
atgtgagtttcttaa

SEQ ID NO: 1418836 - DNA, 15 bp, Homo sapiens
tgtgagtttcttaaa

SEQ ID NO: 1418837 - DNA, 15 bp, Homo sapiens
gtgagtttcttaaat

SEQ ID NO: 1418838 - DNA, 15 bp, Homo sapiens
tgagtttcttaaatt

SEQ ID NO: 1418839 - DNA, 15 bp, Homo sapiens
gagtttcttaaattg

SEQ ID NO: 1418840 - DNA, 15 bp, Homo sapiens
agtttcttaaattga

SEQ ID NO: 1418841 - DNA, 15 bp, Homo sapiens
gtttcttaaattgaa

SEQ ID NO: 1418842 - DNA, 15 bp, Homo sapiens
tttcttaaattgaag

SEQ ID NO: 1418843 - DNA, 15 bp, Homo sapiens
ttcttaaattgaagc

SEQ ID NO: 1418844 - DNA, 15 bp, Homo sapiens
tcttaaattgaagca

SEQ ID NO: 1418845 - DNA, 15 bp, Homo sapiens
cttaaattgaagcat

SEQ ID NO: 1418846 - DNA, 15 bp, Homo sapiens
ttaaattgaagcata

SEQ ID NO: 1418847 - DNA, 15 bp, Homo sapiens
taaattgaagcataa

SEQ ID NO: 1418848 - DNA, 15 bp, Homo sapiens
aaattgaagcataaa

SEQ ID NO: 1418849 - DNA, 15 bp, Homo sapiens
aattgaagcataaaa

SEQ ID NO: 1418850 - DNA, 15 bp, Homo sapiens
attgaagcataaaat

SEQ ID NO: 1418851 - DNA, 15 bp, Homo sapiens
ttgaagcataaaatt

SEQ ID NO: 1418852 - DNA, 15 bp, Homo sapiens
tgaagcataaaattt

SEQ ID NO: 1418853 - DNA, 15 bp, Homo sapiens
gaagcataaaattta

SEQ ID NO: 1418854 - DNA, 15 bp, Homo sapiens
aagcataaaatttac

SEQ ID NO: 1418855 - DNA, 15 bp, Homo sapiens
agcataaaatttaca

SEQ ID NO: 1418856 - DNA, 15 bp, Homo sapiens
gcataaaatttacaa

SEQ ID NO: 1418857 - DNA, 15 bp, Homo sapiens
cataaaatttacaat

SEQ ID NO: 1418858 - DNA, 15 bp, Homo sapiens
ataaaatttacaatt

SEQ ID NO: 1418859 - DNA, 15 bp, Homo sapiens
taaaatttacaattt

SEQ ID NO: 1418860 - DNA, 15 bp, Homo sapiens
aaaatttacaattta

SEQ ID NO: 1418861 - DNA, 15 bp, Homo sapiens
aaatttacaatttat

SEQ ID NO: 1418862 - DNA, 15 bp, Homo sapiens
aatttacaatttatg

SEQ ID NO: 1418863 - DNA, 15 bp, Homo sapiens
atttacaatttatgt

SEQ ID NO: 1418864 - DNA, 15 bp, Homo sapiens
tttacaatttatgta

SEQ ID NO: 1418865 - DNA, 15 bp, Homo sapiens
ttacaatttatgtag

SEQ ID NO: 1418866 - DNA, 15 bp, Homo sapiens
tacaatttatgtagt

SEQ ID NO: 1418867 - DNA, 15 bp, Homo sapiens
acaatttatgtagtc

SEQ ID NO: 1418868 - DNA, 15 bp, Homo sapiens
caatttatgtagtcc

SEQ ID NO: 1418869 - DNA, 15 bp, Homo sapiens
aatttatgtagtcca

SEQ ID NO: 1418870 - DNA, 15 bp, Homo sapiens
atttatgtagtccat

SEQ ID NO: 1418871 - DNA, 15 bp, Homo sapiens
tttatgtagtccata

SEQ ID NO: 1418872 - DNA, 15 bp, Homo sapiens
ttatgtagtccataa

SEQ ID NO: 1418873 - DNA, 15 bp, Homo sapiens
tatgtagtccataat

SEQ ID NO: 1418874 - DNA, 15 bp, Homo sapiens
atgtagtccataatt

SEQ ID NO: 1418875 - DNA, 15 bp, Homo sapiens
tgtagtccataattt

SEQ ID NO: 1418876 - DNA, 15 bp, Homo sapiens
gtagtccataatttt

SEQ ID NO: 1418877 - DNA, 15 bp, Homo sapiens
agtccataattttct

SEQ ID NO: 1418878 - DNA, 15 bp, Homo sapiens
gtccataattttctc

SEQ ID NO: 1418879 - DNA, 15 bp, Homo sapiens
tccataattttctct

SEQ ID NO: 1418880 - DNA, 15 bp, Homo sapiens
ccataattttctctg

SEQ ID NO: 1418881 - DNA, 15 bp, Homo sapiens
cataattttctctgg

SEQ ID NO: 1418882 - DNA, 15 bp, Homo sapiens
ataattttctctgga

SEQ ID NO: 1418883 - DNA, 15 bp, Homo sapiens
taattttctctggac

SEQ ID NO: 1418884 - DNA, 15 bp, Homo sapiens
aattttctctggaca

SEQ ID NO: 1418885 - DNA, 15 bp, Homo sapiens
attttctctggacat

SEQ ID NO: 1418886 - DNA, 15 bp, Homo sapiens
ttttctctggacatt

SEQ ID NO: 1418887 - DNA, 15 bp, Homo sapiens
tttctctggacattc

SEQ ID NO: 1418888 - DNA, 15 bp, Homo sapiens
ttctctggacattct

SEQ ID NO: 1418889 - DNA, 15 bp, Homo sapiens
tctctggacattcta

SEQ ID NO: 1418890 - DNA, 15 bp, Homo sapiens
ctctggacattctac

SEQ ID NO: 1418891 - DNA, 15 bp, Homo sapiens
tctggacattctaca

SEQ ID NO: 1418892 - DNA, 15 bp, Homo sapiens
ctggacattctacag

SEQ ID NO: 1418893 - DNA, 15 bp, Homo sapiens
tggacattctacagt

SEQ ID NO: 1418894 - DNA, 15 bp, Homo sapiens
ggacattctacagtc

SEQ ID NO: 1418895 - DNA, 15 bp, Homo sapiens
gacattctacagtct

SEQ ID NO: 1418896 - DNA, 15 bp, Homo sapiens
acattctacagtctt

SEQ ID NO: 1418897 - DNA, 15 bp, Homo sapiens
cattctacagtctta

SEQ ID NO: 1418898 - DNA, 15 bp, Homo sapiens
attctacagtcttag

SEQ ID NO: 1418899 - DNA, 15 bp, Homo sapiens
ttctacagtcttagt

SEQ ID NO: 1418900 - DNA, 15 bp, Homo sapiens
tctacagtcttagtt

SEQ ID NO: 1418901 - DNA, 15 bp, Homo sapiens
ctacagtcttagttc

SEQ ID NO: 1418902 - DNA, 15 bp, Homo sapiens
tacagtcttagttca

SEQ ID NO: 1418903 - DNA, 15 bp, Homo sapiens
acagtcttagttcat

SEQ ID NO: 1418904 - DNA, 15 bp, Homo sapiens
cagtcttagttcatg

SEQ ID NO: 1418905 - DNA, 15 bp, Homo sapiens
agtcttagttcatgc

SEQ ID NO: 1418906 - DNA, 15 bp, Homo sapiens
gtcttagttcatgcc

SEQ ID NO: 1418907 - DNA, 15 bp, Homo sapiens
tcttagttcatgcct

SEQ ID NO: 1418908 - DNA, 15 bp, Homo sapiens
cttagttcatgcctg

SEQ ID NO: 1418909 - DNA, 15 bp, Homo sapiens
ttagttcatgcctga

SEQ ID NO: 1418910 - DNA, 15 bp, Homo sapiens
tagttcatgcctgaa

SEQ ID NO: 1418911 - DNA, 15 bp, Homo sapiens
agttcatgcctgaag

SEQ ID NO: 1418912 - DNA, 15 bp, Homo sapiens
gttcatgcctgaaga

SEQ ID NO: 1418913 - DNA, 15 bp, Homo sapiens
ttcatgcctgaagac

SEQ ID NO: 1418914 - DNA, 15 bp, Homo sapiens
tcatgcctgaagacc

SEQ ID NO: 1418915 - DNA, 15 bp, Homo sapiens
catgcctgaagacca

SEQ ID NO: 1418916 - DNA, 15 bp, Homo sapiens
atgcctgaagaccac

SEQ ID NO: 1418917 - DNA, 15 bp, Homo sapiens
tgcctgaagaccact

SEQ ID NO: 1418918 - DNA, 15 bp, Homo sapiens
gcctgaagaccactg

SEQ ID NO: 1418919 - DNA, 15 bp, Homo sapiens
cctgaagaccactga

SEQ ID NO: 1418920 - DNA, 15 bp, Homo sapiens
ctgaagaccactgaa

SEQ ID NO: 1418921 - DNA, 15 bp, Homo sapiens
tgaagaccactgaaa

SEQ ID NO: 1418922 - DNA, 15 bp, Homo sapiens
gaagaccactgaaat

SEQ ID NO: 1418923 - DNA, 15 bp, Homo sapiens
aagaccactgaaata

SEQ ID NO: 1418924 - DNA, 15 bp, Homo sapiens
agaccactgaaataa

SEQ ID NO: 1418925 - DNA, 15 bp, Homo sapiens
gaccactgaaataat

SEQ ID NO: 1418926 - DNA, 15 bp, Homo sapiens
accactgaaataatg

SEQ ID NO: 1418927 - DNA, 15 bp, Homo sapiens
ccactgaaataatgc

SEQ ID NO: 1418928 - DNA, 15 bp, Homo sapiens
cactgaaataatgct

SEQ ID NO: 1418929 - DNA, 15 bp, Homo sapiens
actgaaataatgctg

SEQ ID NO: 1418930 - DNA, 15 bp, Homo sapiens
ctgaaataatgctga

SEQ ID NO: 1418931 - DNA, 15 bp, Homo sapiens
tgaaataatgctgag

SEQ ID NO: 1418932 - DNA, 15 bp, Homo sapiens
gaaataatgctgagt

SEQ ID NO: 1418933 - DNA, 15 bp, Homo sapiens
aaataatgctgagtt

SEQ ID NO: 1418934 - DNA, 15 bp, Homo sapiens
aataatgctgagttg

SEQ ID NO: 1418935 - DNA, 15 bp, Homo sapiens
ataatgctgagttga

SEQ ID NO: 1418936 - DNA, 15 bp, Homo sapiens
taatgctgagttgat

SEQ ID NO: 1418937 - DNA, 15 bp, Homo sapiens
aatgctgagttgata

SEQ ID NO: 1418938 - DNA, 15 bp, Homo sapiens
atgctgagttgataa

SEQ ID NO: 1418939 - DNA, 15 bp, Homo sapiens
tgctgagttgataag

SEQ ID NO: 1418940 - DNA, 15 bp, Homo sapiens
gctgagttgataagt

SEQ ID NO: 1418941 - DNA, 15 bp, Homo sapiens
ctgagttgataagtg

SEQ ID NO: 1418942 - DNA, 15 bp, Homo sapiens
tgagttgataagtgg

SEQ ID NO: 1418943 - DNA, 15 bp, Homo sapiens
gagttgataagtggt

SEQ ID NO: 1418944 - DNA, 15 bp, Homo sapiens
agttgataagtggtt

SEQ ID NO: 1418945 - DNA, 15 bp, Homo sapiens
gttgataagtggttc

SEQ ID NO: 1418946 - DNA, 15 bp, Homo sapiens
ttgataagtggttct

SEQ ID NO: 1418947 - DNA, 15 bp, Homo sapiens
tgataagtggttctc

SEQ ID NO: 1418948 - DNA, 15 bp, Homo sapiens
gataagtggttctct

SEQ ID NO: 1418949 - DNA, 15 bp, Homo sapiens
ataagtggttctctt

SEQ ID NO: 1418950 - DNA, 15 bp, Homo sapiens
taagtggttctcttg

SEQ ID NO: 1418951 - DNA, 15 bp, Homo sapiens
aagtggttctcttga

SEQ ID NO: 1418952 - DNA, 15 bp, Homo sapiens
agtggttctcttgac

SEQ ID NO: 1418953 - DNA, 15 bp, Homo sapiens
gtggttctcttgact

SEQ ID NO: 1418954 - DNA, 15 bp, Homo sapiens
tggttctcttgactt

SEQ ID NO: 1418955 - DNA, 15 bp, Homo sapiens
ggttctcttgacttt

SEQ ID NO: 1418956 - DNA, 15 bp, Homo sapiens
gttctcttgactttg

SEQ ID NO: 1418957 - DNA, 15 bp, Homo sapiens
ttctcttgactttgt

SEQ ID NO: 1418958 - DNA, 15 bp, Homo sapiens
tctcttgactttgtt

SEQ ID NO: 1418959 - DNA, 15 bp, Homo sapiens
ctcttgactttgttt

SEQ ID NO: 1418960 - DNA, 15 bp, Homo sapiens
tcttgactttgttta

SEQ ID NO: 1418961 - DNA, 15 bp, Homo sapiens
cttgactttgtttag

SEQ ID NO: 1418962 - DNA, 15 bp, Homo sapiens
ttgactttgtttagt

SEQ ID NO: 1418963 - DNA, 15 bp, Homo sapiens
tgactttgtttagta

SEQ ID NO: 1418964 - DNA, 15 bp, Homo sapiens
gactttgtttagtat

SEQ ID NO: 1418965 - DNA, 15 bp, Homo sapiens
actttgtttagtatt

SEQ ID NO: 1418966 - DNA, 15 bp, Homo sapiens
ctttgtttagtattc

SEQ ID NO: 1418967 - DNA, 15 bp, Homo sapiens
tttgtttagtattct

SEQ ID NO: 1418968 - DNA, 15 bp, Homo sapiens
ttgtttagtattctt

SEQ ID NO: 1418969 - DNA, 15 bp, Homo sapiens
tgtttagtattcttt

SEQ ID NO: 1418970 - DNA, 15 bp, Homo sapiens
gtttagtattcttta

SEQ ID NO: 1418971 - DNA, 15 bp, Homo sapiens
tttagtattctttac

SEQ ID NO: 1418972 - DNA, 15 bp, Homo sapiens
ttagtattctttact

SEQ ID NO: 1418973 - DNA, 15 bp, Homo sapiens
tagtattctttactc

SEQ ID NO: 1418974 - DNA, 15 bp, Homo sapiens
agtattctttactca

SEQ ID NO: 1418975 - DNA, 15 bp, Homo sapiens
gtattctttactcaa

SEQ ID NO: 1418976 - DNA, 15 bp, Homo sapiens
tattctttactcaac

SEQ ID NO: 1418977 - DNA, 15 bp, Homo sapiens
attctttactcaacc

SEQ ID NO: 1418978 - DNA, 15 bp, Homo sapiens
ttctttactcaaccc

SEQ ID NO: 1418979 - DNA, 15 bp, Homo sapiens
tctttactcaaccct

SEQ ID NO: 1418980 - DNA, 15 bp, Homo sapiens
ctttactcaacccta

SEQ ID NO: 1418981 - DNA, 15 bp, Homo sapiens
tttactcaaccctat

SEQ ID NO: 1418982 - DNA, 15 bp, Homo sapiens
ttactcaaccctatc

SEQ ID NO: 1418983 - DNA, 15 bp, Homo sapiens
tactcaaccctatcc

SEQ ID NO: 1418984 - DNA, 15 bp, Homo sapiens
actcaaccctatcca

SEQ ID NO: 1418985 - DNA, 15 bp, Homo sapiens
ctcaaccctatccat

SEQ ID NO: 1418986 - DNA, 15 bp, Homo sapiens
tcaaccctatccatg

SEQ ID NO: 1418987 - DNA, 15 bp, Homo sapiens
caaccctatccatga

SEQ ID NO: 1418988 - DNA, 15 bp, Homo sapiens
aaccctatccatgaa

SEQ ID NO: 1418989 - DNA, 15 bp, Homo sapiens
accctatccatgaag

SEQ ID NO: 1418990 - DNA, 15 bp, Homo sapiens
ccctatccatgaagt

SEQ ID NO: 1418991 - DNA, 15 bp, Homo sapiens
cctatccatgaagtt

SEQ ID NO: 1418992 - DNA, 15 bp, Homo sapiens
ctatccatgaagttc

SEQ ID NO: 1418993 - DNA, 15 bp, Homo sapiens
tatccatgaagttct

SEQ ID NO: 1418994 - DNA, 15 bp, Homo sapiens
atccatgaagttctt

SEQ ID NO: 1418995 - DNA, 15 bp, Homo sapiens
tccatgaagttcttc

SEQ ID NO: 1418996 - DNA, 15 bp, Homo sapiens
ccatgaagttcttca

SEQ ID NO: 1418997 - DNA, 15 bp, Homo sapiens
catgaagttcttcaa

SEQ ID NO: 1418998 - DNA, 15 bp, Homo sapiens
atgaagttcttcaat

SEQ ID NO: 1418999 - DNA, 15 bp, Homo sapiens
tgaagttcttcaatg

SEQ ID NO: 1419000 - DNA, 15 bp, Homo sapiens
gaagttcttcaatga

SEQ ID NO: 1419001 - DNA, 15 bp, Homo sapiens
aagttcttcaatgaa

SEQ ID NO: 1419002 - DNA, 15 bp, Homo sapiens
agttcttcaatgaag

SEQ ID NO: 1419003 - DNA, 15 bp, Homo sapiens
gttcttcaatgaagc

SEQ ID NO: 1419004 - DNA, 15 bp, Homo sapiens
ttcttcaatgaagct

SEQ ID NO: 1419005 - DNA, 15 bp, Homo sapiens
tcttcaatgaagctt

SEQ ID NO: 1419006 - DNA, 15 bp, Homo sapiens
cttcaatgaagcttt

SEQ ID NO: 1419007 - DNA, 15 bp, Homo sapiens
ttcaatgaagctttt

SEQ ID NO: 1419008 - DNA, 15 bp, Homo sapiens
tcaatgaagcttttg

SEQ ID NO: 1419009 - DNA, 15 bp, Homo sapiens
caatgaagcttttga

SEQ ID NO: 1419010 - DNA, 15 bp, Homo sapiens
aatgaagcttttgat

SEQ ID NO: 1419011 - DNA, 15 bp, Homo sapiens
atgaagcttttgata

SEQ ID NO: 1419012 - DNA, 15 bp, Homo sapiens
tgaagcttttgataa

SEQ ID NO: 1419013 - DNA, 15 bp, Homo sapiens
gaagcttttgataat

SEQ ID NO: 1419014 - DNA, 15 bp, Homo sapiens
aagcttttgataatt

SEQ ID NO: 1419015 - DNA, 15 bp, Homo sapiens
agcttttgataattt

SEQ ID NO: 1419016 - DNA, 15 bp, Homo sapiens
gcttttgataattta

SEQ ID NO: 1419017 - DNA, 15 bp, Homo sapiens
cttttgataatttat

SEQ ID NO: 1419018 - DNA, 15 bp, Homo sapiens
ttttgataatttatt

SEQ ID NO: 1419019 - DNA, 15 bp, Homo sapiens
tttgataatttattg

SEQ ID NO: 1419020 - DNA, 15 bp, Homo sapiens
ttgataatttattgc

SEQ ID NO: 1419021 - DNA, 15 bp, Homo sapiens
tgataatttattgca

SEQ ID NO: 1419022 - DNA, 15 bp, Homo sapiens
gataatttattgcaa

SEQ ID NO: 1419023 - DNA, 15 bp, Homo sapiens
ataatttattgcaaa

SEQ ID NO: 1419024 - DNA, 15 bp, Homo sapiens
taatttattgcaaaa

SEQ ID NO: 1419025 - DNA, 15 bp, Homo sapiens
aatttattgcaaaat

SEQ ID NO: 1419026 - DNA, 15 bp, Homo sapiens
atttattgcaaaata

SEQ ID NO: 1419027 - DNA, 15 bp, Homo sapiens
tttattgcaaaatac

SEQ ID NO: 1419028 - DNA, 15 bp, Homo sapiens
ttattgcaaaataca

SEQ ID NO: 1419029 - DNA, 15 bp, Homo sapiens
tattgcaaaatacat

SEQ ID NO: 1419030 - DNA, 15 bp, Homo sapiens
attgcaaaatacatt

SEQ ID NO: 1419031 - DNA, 15 bp, Homo sapiens
ttgcaaaatacattt

SEQ ID NO: 1419032 - DNA, 15 bp, Homo sapiens
tgcaaaatacatttt

SEQ ID NO: 1419033 - DNA, 15 bp, Homo sapiens
gcaaaatacattttc

SEQ ID NO: 1419034 - DNA, 15 bp, Homo sapiens
caaaatacattttcc

SEQ ID NO: 1419035 - DNA, 15 bp, Homo sapiens
aaaatacattttcca

SEQ ID NO: 1419036 - DNA, 15 bp, Homo sapiens
aaatacattttccac

SEQ ID NO: 1419037 - DNA, 15 bp, Homo sapiens
aatacattttccaca

SEQ ID NO: 1419038 - DNA, 15 bp, Homo sapiens
atacattttccacaa

SEQ ID NO: 1419039 - DNA, 15 bp, Homo sapiens
tacattttccacaaa

SEQ ID NO: 1419040 - DNA, 15 bp, Homo sapiens
acattttccacaaag

SEQ ID NO: 1419041 - DNA, 15 bp, Homo sapiens
cattttccacaaaga

SEQ ID NO: 1419042 - DNA, 15 bp, Homo sapiens
attttccacaaagaa

SEQ ID NO: 1419043 - DNA, 15 bp, Homo sapiens
ttttccacaaagaag

SEQ ID NO: 1419044 - DNA, 15 bp, Homo sapiens
tttccacaaagaagt

SEQ ID NO: 1419045 - DNA, 15 bp, Homo sapiens
ttccacaaagaagtc

SEQ ID NO: 1419046 - DNA, 15 bp, Homo sapiens
tccacaaagaagtca

SEQ ID NO: 1419047 - DNA, 15 bp, Homo sapiens
ccacaaagaagtcat

SEQ ID NO: 1419048 - DNA, 15 bp, Homo sapiens
cacaaagaagtcatt

SEQ ID NO: 1419049 - DNA, 15 bp, Homo sapiens
acaaagaagtcatta

SEQ ID NO: 1419050 - DNA, 15 bp, Homo sapiens
caaagaagtcattat

SEQ ID NO: 1419051 - DNA, 15 bp, Homo sapiens
aaagaagtcattatg

SEQ ID NO: 1419052 - DNA, 15 bp, Homo sapiens
aagaagtcattatga

SEQ ID NO: 1419053 - DNA, 15 bp, Homo sapiens
agaagtcattatgat

SEQ ID NO: 1419054 - DNA, 15 bp, Homo sapiens
gaagtcattatgatt

SEQ ID NO: 1419055 - DNA, 15 bp, Homo sapiens
aagtcattatgattg

SEQ ID NO: 1419056 - DNA, 15 bp, Homo sapiens
agtcattatgattgg

SEQ ID NO: 1419057 - DNA, 15 bp, Homo sapiens
gtcattatgattggt

SEQ ID NO: 1419058 - DNA, 15 bp, Homo sapiens
tcattatgattggtt

SEQ ID NO: 1419059 - DNA, 15 bp, Homo sapiens
cattatgattggttt

SEQ ID NO: 1419060 - DNA, 15 bp, Homo sapiens
attatgattggtttg

SEQ ID NO: 1419061 - DNA, 15 bp, Homo sapiens
ttatgattggtttga

SEQ ID NO: 1419062 - DNA, 15 bp, Homo sapiens
tatgattggtttgaa

SEQ ID NO: 1419063 - DNA, 15 bp, Homo sapiens
atgattggtttgaac

SEQ ID NO: 1419064 - DNA, 15 bp, Homo sapiens
tgattggtttgaact

SEQ ID NO: 1419065 - DNA, 15 bp, Homo sapiens
gattggtttgaacta

SEQ ID NO: 1419066 - DNA, 15 bp, Homo sapiens
attggtttgaactag

SEQ ID NO: 1419067 - DNA, 15 bp, Homo sapiens
ttggtttgaactagt

SEQ ID NO: 1419068 - DNA, 15 bp, Homo sapiens
tggtttgaactagtg

SEQ ID NO: 1419069 - DNA, 15 bp, Homo sapiens
ggtttgaactagtgg

SEQ ID NO: 1419070 - DNA, 15 bp, Homo sapiens
gtttgaactagtgga

SEQ ID NO: 1419071 - DNA, 15 bp, Homo sapiens
tttgaactagtggaa

SEQ ID NO: 1419072 - DNA, 15 bp, Homo sapiens
ttgaactagtggaac

SEQ ID NO: 1419073 - DNA, 15 bp, Homo sapiens
tgaactagtggaaca

SEQ ID NO: 1419074 - DNA, 15 bp, Homo sapiens
gaactagtggaacac

SEQ ID NO: 1419075 - DNA, 15 bp, Homo sapiens
aactagtggaacaca

SEQ ID NO: 1419076 - DNA, 15 bp, Homo sapiens
actagtggaacacaa

SEQ ID NO: 1419077 - DNA, 15 bp, Homo sapiens
ctagtggaacacaaa

SEQ ID NO: 1419078 - DNA, 15 bp, Homo sapiens
tagtggaacacaaat

SEQ ID NO: 1419079 - DNA, 15 bp, Homo sapiens
agtggaacacaaatg

SEQ ID NO: 1419080 - DNA, 15 bp, Homo sapiens
gtggaacacaaatgt

SEQ ID NO: 1419081 - DNA, 15 bp, Homo sapiens
tggaacacaaatgtg

SEQ ID NO: 1419082 - DNA, 15 bp, Homo sapiens
ggaacacaaatgtga

SEQ ID NO: 1419083 - DNA, 15 bp, Homo sapiens
gaacacaaatgtgag

SEQ ID NO: 1419084 - DNA, 15 bp, Homo sapiens
aacacaaatgtgagg

SEQ ID NO: 1419085 - DNA, 15 bp, Homo sapiens
acacaaatgtgaggt

SEQ ID NO: 1419086 - DNA, 15 bp, Homo sapiens
cacaaatgtgaggtt

SEQ ID NO: 1419087 - DNA, 15 bp, Homo sapiens
acaaatgtgaggtta

SEQ ID NO: 1419088 - DNA, 15 bp, Homo sapiens
caaatgtgaggttat

SEQ ID NO: 1419089 - DNA, 15 bp, Homo sapiens
aaatgtgaggttata

SEQ ID NO: 1419090 - DNA, 15 bp, Homo sapiens
aatgtgaggttataa

SEQ ID NO: 1419091 - DNA, 15 bp, Homo sapiens
atgtgaggttataaa

SEQ ID NO: 1419092 - DNA, 15 bp, Homo sapiens
tgtgaggttataaag

SEQ ID NO: 1419093 - DNA, 15 bp, Homo sapiens
gtgaggttataaaga

SEQ ID NO: 1419094 - DNA, 15 bp, Homo sapiens
tgaggttataaagag

SEQ ID NO: 1419095 - DNA, 15 bp, Homo sapiens
gaggttataaagagg

SEQ ID NO: 1419096 - DNA, 15 bp, Homo sapiens
aggttataaagaggt

SEQ ID NO: 1419097 - DNA, 15 bp, Homo sapiens
ggttataaagaggtt

SEQ ID NO: 1419098 - DNA, 15 bp, Homo sapiens
gttataaagaggttc

SEQ ID NO: 1419099 - DNA, 15 bp, Homo sapiens
ttataaagaggttcg

SEQ ID NO: 1419100 - DNA, 15 bp, Homo sapiens
tataaagaggttcgc

SEQ ID NO: 1419101 - DNA, 15 bp, Homo sapiens
ataaagaggttcgcc

SEQ ID NO: 1419102 - DNA, 15 bp, Homo sapiens
taaagaggttcgcct

SEQ ID NO: 1419103 - DNA, 15 bp, Homo sapiens
aaagaggttcgcctt

SEQ ID NO: 1419104 - DNA, 15 bp, Homo sapiens
aagaggttcgcctta

SEQ ID NO: 1419105 - DNA, 15 bp, Homo sapiens
agaggttcgccttag

SEQ ID NO: 1419106 - DNA, 15 bp, Homo sapiens
gaggttcgccttagc

SEQ ID NO: 1419107 - DNA, 15 bp, Homo sapiens
aggttcgccttagcc

SEQ ID NO: 1419108 - DNA, 15 bp, Homo sapiens
ggttcgccttagcca

SEQ ID NO: 1419109 - DNA, 15 bp, Homo sapiens
gttcgccttagccag

SEQ ID NO: 1419110 - DNA, 15 bp, Homo sapiens
ttcgccttagccagg

SEQ ID NO: 1419111 - DNA, 15 bp, Homo sapiens
tcgccttagccaggg

SEQ ID NO: 1419112 - DNA, 15 bp, Homo sapiens
cgccttagccagggg

SEQ ID NO: 1419113 - DNA, 15 bp, Homo sapiens
gccttagccaggggc

SEQ ID NO: 1419114 - DNA, 15 bp, Homo sapiens
ccttagccaggggct

SEQ ID NO: 1419115 - DNA, 15 bp, Homo sapiens
cttagccaggggctc

SEQ ID NO: 1419116 - DNA, 15 bp, Homo sapiens
ttagccaggggctcc

SEQ ID NO: 1419117 - DNA, 15 bp, Homo sapiens
tagccaggggctcct

SEQ ID NO: 1419118 - DNA, 15 bp, Homo sapiens
agccaggggctcctt

SEQ ID NO: 1419119 - DNA, 15 bp, Homo sapiens
gccaggggctccttt

SEQ ID NO: 1419120 - DNA, 15 bp, Homo sapiens
ccaggggctccttta

SEQ ID NO: 1419121 - DNA, 15 bp, Homo sapiens
caggggctcctttag

SEQ ID NO: 1419122 - DNA, 15 bp, Homo sapiens
aggggctcctttagc

SEQ ID NO: 1419123 - DNA, 15 bp, Homo sapiens
ggggctcctttagct

SEQ ID NO: 1419124 - DNA, 15 bp, Homo sapiens
gggctcctttagctg

SEQ ID NO: 1419125 - DNA, 15 bp, Homo sapiens
ggctcctttagctgc

SEQ ID NO: 1419126 - DNA, 15 bp, Homo sapiens
gctcctttagctgca

SEQ ID NO: 1419127 - DNA, 15 bp, Homo sapiens
ctcctttagctgcaa

SEQ ID NO: 1419128 - DNA, 15 bp, Homo sapiens
tcctttagctgcaaa

SEQ ID NO: 1419129 - DNA, 15 bp, Homo sapiens
cctttagctgcaaag

SEQ ID NO: 1419130 - DNA, 15 bp, Homo sapiens
ctttagctgcaaagc

SEQ ID NO: 1419131 - DNA, 15 bp, Homo sapiens
tttagctgcaaagca

SEQ ID NO: 1419132 - DNA, 15 bp, Homo sapiens
ttagctgcaaagcag

SEQ ID NO: 1419133 - DNA, 15 bp, Homo sapiens
tagctgcaaagcagt

SEQ ID NO: 1419134 - DNA, 15 bp, Homo sapiens
agctgcaaagcagtt

SEQ ID NO: 1419135 - DNA, 15 bp, Homo sapiens
gctgcaaagcagttt

SEQ ID NO: 1419136 - DNA, 15 bp, Homo sapiens
ctgcaaagcagtttt

SEQ ID NO: 1419137 - DNA, 15 bp, Homo sapiens
tgcaaagcagttttt

SEQ ID NO: 1419138 - DNA, 15 bp, Homo sapiens
gcaaagcagtttttt

SEQ ID NO: 1419139 - DNA, 15 bp, Homo sapiens
caaagcagttttttg

SEQ ID NO: 1419140 - DNA, 15 bp, Homo sapiens
aaagcagttttttgc

SEQ ID NO: 1419141 - DNA, 15 bp, Homo sapiens
aagcagttttttgct

SEQ ID NO: 1419142 - DNA, 15 bp, Homo sapiens
agcagttttttgctc

SEQ ID NO: 1419143 - DNA, 15 bp, Homo sapiens
gcagttttttgctca

SEQ ID NO: 1419144 - DNA, 15 bp, Homo sapiens
cagttttttgctcag

SEQ ID NO: 1419145 - DNA, 15 bp, Homo sapiens
agttttttgctcagc

SEQ ID NO: 1419146 - DNA, 15 bp, Homo sapiens
gttttttgctcagca

SEQ ID NO: 1419147 - DNA, 15 bp, Homo sapiens
ttttttgctcagcaa

SEQ ID NO: 1419148 - DNA, 15 bp, Homo sapiens
tttttgctcagcaac

SEQ ID NO: 1419149 - DNA, 15 bp, Homo sapiens
ttttgctcagcaact

SEQ ID NO: 1419150 - DNA, 15 bp, Homo sapiens
tttgctcagcaactt

SEQ ID NO: 1419151 - DNA, 15 bp, Homo sapiens
ttgctcagcaacttg

SEQ ID NO: 1419152 - DNA, 15 bp, Homo sapiens
tgctcagcaacttgg

SEQ ID NO: 1419153 - DNA, 15 bp, Homo sapiens
gctcagcaacttggg

SEQ ID NO: 1419154 - DNA, 15 bp, Homo sapiens
ctcagcaacttgggg

SEQ ID NO: 1419155 - DNA, 15 bp, Homo sapiens
tcagcaacttggggt

SEQ ID NO: 1419156 - DNA, 15 bp, Homo sapiens
cagcaacttggggta

SEQ ID NO: 1419157 - DNA, 15 bp, Homo sapiens
agcaacttggggtag

SEQ ID NO: 1419158 - DNA, 15 bp, Homo sapiens
gcaacttggggtaga

SEQ ID NO: 1419159 - DNA, 15 bp, Homo sapiens
caacttggggtagag

SEQ ID NO: 1419160 - DNA, 15 bp, Homo sapiens
aacttggggtagaga

SEQ ID NO: 1419161 - DNA, 15 bp, Homo sapiens
acttggggtagagat

SEQ ID NO: 1419162 - DNA, 15 bp, Homo sapiens
cttggggtagagatc

SEQ ID NO: 1419163 - DNA, 15 bp, Homo sapiens
ttggggtagagatca

SEQ ID NO: 1419164 - DNA, 15 bp, Homo sapiens
tggggtagagatcag

SEQ ID NO: 1419165 - DNA, 15 bp, Homo sapiens
ggggtagagatcagt

SEQ ID NO: 1419166 - DNA, 15 bp, Homo sapiens
gggtagagatcagtg

SEQ ID NO: 1419167 - DNA, 15 bp, Homo sapiens
ggtagagatcagtgt

SEQ ID NO: 1419168 - DNA, 15 bp, Homo sapiens
gtagagatcagtgtg

SEQ ID NO: 1419169 - DNA, 15 bp, Homo sapiens
tagagatcagtgtgt

SEQ ID NO: 1419170 - DNA, 15 bp, Homo sapiens
agagatcagtgtgtc

SEQ ID NO: 1419171 - DNA, 15 bp, Homo sapiens
gagatcagtgtgtct

SEQ ID NO: 1419172 - DNA, 15 bp, Homo sapiens
agatcagtgtgtctt

SEQ ID NO: 1419173 - DNA, 15 bp, Homo sapiens
gatcagtgtgtcttg

SEQ ID NO: 1419174 - DNA, 15 bp, Homo sapiens
atcagtgtgtcttga

SEQ ID NO: 1419175 - DNA, 15 bp, Homo sapiens
tcagtgtgtcttgaa

SEQ ID NO: 1419176 - DNA, 15 bp, Homo sapiens
cagtgtgtcttgaag

SEQ ID NO: 1419177 - DNA, 15 bp, Homo sapiens
agtgtgtcttgaagt

SEQ ID NO: 1419178 - DNA, 15 bp, Homo sapiens
gtgtgtcttgaagtt

SEQ ID NO: 1419179 - DNA, 15 bp, Homo sapiens
tgtgtcttgaagttt

SEQ ID NO: 1419180 - DNA, 15 bp, Homo sapiens
gtgtcttgaagtttt

SEQ ID NO: 1419181 - DNA, 15 bp, Homo sapiens
tgtcttgaagttttg

SEQ ID NO: 1419182 - DNA, 15 bp, Homo sapiens
gtcttgaagttttgt

SEQ ID NO: 1419183 - DNA, 15 bp, Homo sapiens
tcttgaagttttgtt

SEQ ID NO: 1419184 - DNA, 15 bp, Homo sapiens
cttgaagttttgttt

SEQ ID NO: 1419185 - DNA, 15 bp, Homo sapiens
ttgaagttttgtttt

SEQ ID NO: 1419186 - DNA, 15 bp, Homo sapiens
tgaagttttgttttg

SEQ ID NO: 1419187 - DNA, 15 bp, Homo sapiens
gaagttttgttttgc

SEQ ID NO: 1419188 - DNA, 15 bp, Homo sapiens
aagttttgttttgca

SEQ ID NO: 1419189 - DNA, 15 bp, Homo sapiens
agttttgttttgcaa

SEQ ID NO: 1419190 - DNA, 15 bp, Homo sapiens
gttttgttttgcaaa

SEQ ID NO: 1419191 - DNA, 15 bp, Homo sapiens
ttttgttttgcaaaa

SEQ ID NO: 1419192 - DNA, 15 bp, Homo sapiens
tttgttttgcaaaac

SEQ ID NO: 1419193 - DNA, 15 bp, Homo sapiens
ttgttttgcaaaact

SEQ ID NO: 1419194 - DNA, 15 bp, Homo sapiens
tgttttgcaaaactt

SEQ ID NO: 1419195 - DNA, 15 bp, Homo sapiens
gttttgcaaaacttt

SEQ ID NO: 1419196 - DNA, 15 bp, Homo sapiens
ttttgcaaaactttg

SEQ ID NO: 1419197 - DNA, 15 bp, Homo sapiens
tttgcaaaactttgt

SEQ ID NO: 1419198 - DNA, 15 bp, Homo sapiens
ttgcaaaactttgtt

SEQ ID NO: 1419199 - DNA, 15 bp, Homo sapiens
tgcaaaactttgttc

SEQ ID NO: 1419200 - DNA, 15 bp, Homo sapiens
gcaaaactttgttct

SEQ ID NO: 1419201 - DNA, 15 bp, Homo sapiens
caaaactttgttcta

SEQ ID NO: 1419202 - DNA, 15 bp, Homo sapiens
aaaactttgttctaa

SEQ ID NO: 1419203 - DNA, 15 bp, Homo sapiens
aaactttgttctaat

SEQ ID NO: 1419204 - DNA, 15 bp, Homo sapiens
aactttgttctaatg

SEQ ID NO: 1419205 - DNA, 15 bp, Homo sapiens
actttgttctaatga

SEQ ID NO: 1419206 - DNA, 15 bp, Homo sapiens
ctttgttctaatgag

SEQ ID NO: 1419207 - DNA, 15 bp, Homo sapiens
tttgttctaatgaga

SEQ ID NO: 1419208 - DNA, 15 bp, Homo sapiens
ttgttctaatgagaa

SEQ ID NO: 1419209 - DNA, 15 bp, Homo sapiens
tgttctaatgagaaa

SEQ ID NO: 1419210 - DNA, 15 bp, Homo sapiens
gttctaatgagaaag

SEQ ID NO: 1419211 - DNA, 15 bp, Homo sapiens
ttctaatgagaaagt

SEQ ID NO: 1419212 - DNA, 15 bp, Homo sapiens
tctaatgagaaagtc

SEQ ID NO: 1419213 - DNA, 15 bp, Homo sapiens
ctaatgagaaagtca

SEQ ID NO: 1419214 - DNA, 15 bp, Homo sapiens
taatgagaaagtcaa

SEQ ID NO: 1419215 - DNA, 15 bp, Homo sapiens
aatgagaaagtcaag

SEQ ID NO: 1419216 - DNA, 15 bp, Homo sapiens
atgagaaagtcaagt

SEQ ID NO: 1419217 - DNA, 15 bp, Homo sapiens
tgagaaagtcaagtc

SEQ ID NO: 1419218 - DNA, 15 bp, Homo sapiens
gagaaagtcaagtct

SEQ ID NO: 1419219 - DNA, 15 bp, Homo sapiens
agaaagtcaagtctt

SEQ ID NO: 1419220 - DNA, 15 bp, Homo sapiens
gaaagtcaagtctta

SEQ ID NO: 1419221 - DNA, 15 bp, Homo sapiens
aaagtcaagtcttag

SEQ ID NO: 1419222 - DNA, 15 bp, Homo sapiens
aagtcaagtcttagg

SEQ ID NO: 1419223 - DNA, 15 bp, Homo sapiens
agtcaagtcttagga

SEQ ID NO: 1419224 - DNA, 15 bp, Homo sapiens
gtcaagtcttaggag

SEQ ID NO: 1419225 - DNA, 15 bp, Homo sapiens
tcaagtcttaggagg

SEQ ID NO: 1419226 - DNA, 15 bp, Homo sapiens
caagtcttaggagga

SEQ ID NO: 1419227 - DNA, 15 bp, Homo sapiens
aagtcttaggaggaa

SEQ ID NO: 1419228 - DNA, 15 bp, Homo sapiens
agtcttaggaggaat

SEQ ID NO: 1419229 - DNA, 15 bp, Homo sapiens
gtcttaggaggaatg

SEQ ID NO: 1419230 - DNA, 15 bp, Homo sapiens
tcttaggaggaatgt

SEQ ID NO: 1419231 - DNA, 15 bp, Homo sapiens
cttaggaggaatgta

SEQ ID NO: 1419232 - DNA, 15 bp, Homo sapiens
ttaggaggaatgtat

SEQ ID NO: 1419233 - DNA, 15 bp, Homo sapiens
taggaggaatgtata

SEQ ID NO: 1419234 - DNA, 15 bp, Homo sapiens
aggaggaatgtatag

SEQ ID NO: 1419235 - DNA, 15 bp, Homo sapiens
ggaggaatgtatagt

SEQ ID NO: 1419236 - DNA, 15 bp, Homo sapiens
gaggaatgtatagta

SEQ ID NO: 1419237 - DNA, 15 bp, Homo sapiens
aggaatgtatagtag

SEQ ID NO: 1419238 - DNA, 15 bp, Homo sapiens
ggaatgtatagtagt

SEQ ID NO: 1419239 - DNA, 15 bp, Homo sapiens
gaatgtatagtagtt

SEQ ID NO: 1419240 - DNA, 15 bp, Homo sapiens
aatgtatagtagttg

SEQ ID NO: 1419241 - DNA, 15 bp, Homo sapiens
atgtatagtagttga

SEQ ID NO: 1419242 - DNA, 15 bp, Homo sapiens
tgtatagtagttgag

SEQ ID NO: 1419243 - DNA, 15 bp, Homo sapiens
gtatagtagttgagt

SEQ ID NO: 1419244 - DNA, 15 bp, Homo sapiens
tatagtagttgagtg

SEQ ID NO: 1419245 - DNA, 15 bp, Homo sapiens
atagtagttgagtgt

SEQ ID NO: 1419246 - DNA, 15 bp, Homo sapiens
tagtagttgagtgtt

SEQ ID NO: 1419247 - DNA, 15 bp, Homo sapiens
agtagttgagtgttt

SEQ ID NO: 1419248 - DNA, 15 bp, Homo sapiens
gtagttgagtgtttg

SEQ ID NO: 1419249 - DNA, 15 bp, Homo sapiens
tagttgagtgtttgt

SEQ ID NO: 1419250 - DNA, 15 bp, Homo sapiens
agttgagtgtttgta

SEQ ID NO: 1419251 - DNA, 15 bp, Homo sapiens
gttgagtgtttgtat

SEQ ID NO: 1419252 - DNA, 15 bp, Homo sapiens
ttgagtgtttgtatt

SEQ ID NO: 1419253 - DNA, 15 bp, Homo sapiens
tgagtgtttgtatta

SEQ ID NO: 1419254 - DNA, 15 bp, Homo sapiens
gagtgtttgtattaa

SEQ ID NO: 1419255 - DNA, 15 bp, Homo sapiens
agtgtttgtattaac

SEQ ID NO: 1419256 - DNA, 15 bp, Homo sapiens
gtgtttgtattaaca

SEQ ID NO: 1419257 - DNA, 15 bp, Homo sapiens
tgtttgtattaacac

SEQ ID NO: 1419258 - DNA, 15 bp, Homo sapiens
gtttgtattaacact

SEQ ID NO: 1419259 - DNA, 15 bp, Homo sapiens
tttgtattaacactg

SEQ ID NO: 1419260 - DNA, 15 bp, Homo sapiens
ttgtattaacactgt

SEQ ID NO: 1419261 - DNA, 15 bp, Homo sapiens
tgtattaacactgtt

SEQ ID NO: 1419262 - DNA, 15 bp, Homo sapiens
gtattaacactgttt

SEQ ID NO: 1419263 - DNA, 15 bp, Homo sapiens
tattaacactgtttt

SEQ ID NO: 1419264 - DNA, 15 bp, Homo sapiens
attaacactgttttc

SEQ ID NO: 1419265 - DNA, 15 bp, Homo sapiens
ttaacactgttttca

SEQ ID NO: 1419266 - DNA, 15 bp, Homo sapiens
taacactgttttcat

SEQ ID NO: 1419267 - DNA, 15 bp, Homo sapiens
aacactgttttcata

SEQ ID NO: 1419268 - DNA, 15 bp, Homo sapiens
acactgttttcatat

SEQ ID NO: 1419269 - DNA, 15 bp, Homo sapiens
cactgttttcatatt

SEQ ID NO: 1419270 - DNA, 15 bp, Homo sapiens
actgttttcatattt

SEQ ID NO: 1419271 - DNA, 15 bp, Homo sapiens
ctgttttcatatttt

SEQ ID NO: 1419272 - DNA, 15 bp, Homo sapiens
tgttttcatattttc

SEQ ID NO: 1419273 - DNA, 15 bp, Homo sapiens
gttttcatattttcc

SEQ ID NO: 1419274 - DNA, 15 bp, Homo sapiens
ttttcatattttcct

SEQ ID NO: 1419275 - DNA, 15 bp, Homo sapiens
tttcatattttcctt

SEQ ID NO: 1419276 - DNA, 15 bp, Homo sapiens
ttcatattttccttt

SEQ ID NO: 1419277 - DNA, 15 bp, Homo sapiens
tcatattttcctttt

SEQ ID NO: 1419278 - DNA, 15 bp, Homo sapiens
catattttcctttta

SEQ ID NO: 1419279 - DNA, 15 bp, Homo sapiens
atattttccttttat

SEQ ID NO: 1419280 - DNA, 15 bp, Homo sapiens
attttccttttatgt

SEQ ID NO: 1419281 - DNA, 15 bp, Homo sapiens
ttttccttttatgtc

SEQ ID NO: 1419282 - DNA, 15 bp, Homo sapiens
tttccttttatgtct

SEQ ID NO: 1419283 - DNA, 15 bp, Homo sapiens
ttccttttatgtctc

SEQ ID NO: 1419284 - DNA, 15 bp, Homo sapiens
tccttttatgtctct

SEQ ID NO: 1419285 - DNA, 15 bp, Homo sapiens
ccttttatgtctctg

SEQ ID NO: 1419286 - DNA, 15 bp, Homo sapiens
cttttatgtctctga

SEQ ID NO: 1419287 - DNA, 15 bp, Homo sapiens
ttttatgtctctgat

SEQ ID NO: 1419288 - DNA, 15 bp, Homo sapiens
tttatgtctctgatt

SEQ ID NO: 1419289 - DNA, 15 bp, Homo sapiens
ttatgtctctgattt

SEQ ID NO: 1419290 - DNA, 15 bp, Homo sapiens
tatgtctctgatttt

SEQ ID NO: 1419291 - DNA, 15 bp, Homo sapiens
atgtctctgattttt

SEQ ID NO: 1419292 - DNA, 15 bp, Homo sapiens
tgtctctgatttttc

SEQ ID NO: 1419293 - DNA, 15 bp, Homo sapiens
gtctctgatttttct

SEQ ID NO: 1419294 - DNA, 15 bp, Homo sapiens
tctctgatttttctg

SEQ ID NO: 1419295 - DNA, 15 bp, Homo sapiens
ctctgatttttctga

SEQ ID NO: 1419296 - DNA, 15 bp, Homo sapiens
tctgatttttctgaa

SEQ ID NO: 1419297 - DNA, 15 bp, Homo sapiens
ctgatttttctgaag

SEQ ID NO: 1419298 - DNA, 15 bp, Homo sapiens
gatttttctgaagac

SEQ ID NO: 1419299 - DNA, 15 bp, Homo sapiens
atttttctgaagaca

SEQ ID NO: 1419300 - DNA, 15 bp, Homo sapiens
tttttctgaagacaa

SEQ ID NO: 1419301 - DNA, 15 bp, Homo sapiens
ttttctgaagacaag

SEQ ID NO: 1419302 - DNA, 15 bp, Homo sapiens
tttctgaagacaagt

SEQ ID NO: 1419303 - DNA, 15 bp, Homo sapiens
ttctgaagacaagtt

SEQ ID NO: 1419304 - DNA, 15 bp, Homo sapiens
tctgaagacaagttc

SEQ ID NO: 1419305 - DNA, 15 bp, Homo sapiens
ctgaagacaagttca

SEQ ID NO: 1419306 - DNA, 15 bp, Homo sapiens
tgaagacaagttcaa

SEQ ID NO: 1419307 - DNA, 15 bp, Homo sapiens
gaagacaagttcaag

SEQ ID NO: 1419308 - DNA, 15 bp, Homo sapiens
aagacaagttcaagg

SEQ ID NO: 1419309 - DNA, 15 bp, Homo sapiens
agacaagttcaagga

SEQ ID NO: 1419310 - DNA, 15 bp, Homo sapiens
gacaagttcaaggaa

SEQ ID NO: 1419311 - DNA, 15 bp, Homo sapiens
acaagttcaaggaat

SEQ ID NO: 1419312 - DNA, 15 bp, Homo sapiens
caagttcaaggaata

SEQ ID NO: 1419313 - DNA, 15 bp, Homo sapiens
aagttcaaggaatat

SEQ ID NO: 1419314 - DNA, 15 bp, Homo sapiens
agttcaaggaatata

SEQ ID NO: 1419315 - DNA, 15 bp, Homo sapiens
gttcaaggaatatat

SEQ ID NO: 1419316 - DNA, 15 bp, Homo sapiens
ttcaaggaatatatt

SEQ ID NO: 1419317 - DNA, 15 bp, Homo sapiens
tcaaggaatatattt

SEQ ID NO: 1419318 - DNA, 15 bp, Homo sapiens
caaggaatatatttc

SEQ ID NO: 1419319 - DNA, 15 bp, Homo sapiens
aaggaatatatttct

SEQ ID NO: 1419320 - DNA, 15 bp, Homo sapiens
aggaatatatttctc

SEQ ID NO: 1419321 - DNA, 15 bp, Homo sapiens
ggaatatatttctct

SEQ ID NO: 1419322 - DNA, 15 bp, Homo sapiens
gaatatatttctctg

SEQ ID NO: 1419323 - DNA, 15 bp, Homo sapiens
aatatatttctctgt

SEQ ID NO: 1419324 - DNA, 15 bp, Homo sapiens
atatatttctctgtg

SEQ ID NO: 1419325 - DNA, 15 bp, Homo sapiens
tatatttctctgtgg

SEQ ID NO: 1419326 - DNA, 15 bp, Homo sapiens
atatttctctgtggg

SEQ ID NO: 1419327 - DNA, 15 bp, Homo sapiens
tatttctctgtgggg

SEQ ID NO: 1419328 - DNA, 15 bp, Homo sapiens
atttctctgtggggc

SEQ ID NO: 1419329 - DNA, 15 bp, Homo sapiens
tttctctgtggggca

SEQ ID NO: 1419330 - DNA, 15 bp, Homo sapiens
ttctctgtggggcaa

SEQ ID NO: 1419331 - DNA, 15 bp, Homo sapiens
tctctgtggggcaac

SEQ ID NO: 1419332 - DNA, 15 bp, Homo sapiens
ctctgtggggcaaca

SEQ ID NO: 1419333 - DNA, 15 bp, Homo sapiens
tctgtggggcaacag

SEQ ID NO: 1419334 - DNA, 15 bp, Homo sapiens
ctgtggggcaacaga

SEQ ID NO: 1419335 - DNA, 15 bp, Homo sapiens
tgtggggcaacagat

SEQ ID NO: 1419336 - DNA, 15 bp, Homo sapiens
gtggggcaacagata

SEQ ID NO: 1419337 - DNA, 15 bp, Homo sapiens
tggggcaacagatac

SEQ ID NO: 1419338 - DNA, 15 bp, Homo sapiens
ggggcaacagataca

SEQ ID NO: 1419339 - DNA, 15 bp, Homo sapiens
gggcaacagatacag

SEQ ID NO: 1419340 - DNA, 15 bp, Homo sapiens
ggcaacagatacagt

SEQ ID NO: 1419341 - DNA, 15 bp, Homo sapiens
gcaacagatacagtt

SEQ ID NO: 1419342 - DNA, 15 bp, Homo sapiens
caacagatacagttt

SEQ ID NO: 1419343 - DNA, 15 bp, Homo sapiens
aacagatacagtttt

SEQ ID NO: 1419344 - DNA, 15 bp, Homo sapiens
acagatacagttttt

SEQ ID NO: 1419345 - DNA, 15 bp, Homo sapiens
cagatacagtttttt

SEQ ID NO: 1419346 - DNA, 15 bp, Homo sapiens
agatacagttttttc

SEQ ID NO: 1419347 - DNA, 15 bp, Homo sapiens
gatacagttttttca

SEQ ID NO: 1419348 - DNA, 15 bp, Homo sapiens
atacagttttttcac

SEQ ID NO: 1419349 - DNA, 15 bp, Homo sapiens
tacagttttttcact

SEQ ID NO: 1419350 - DNA, 15 bp, Homo sapiens
acagttttttcactt

SEQ ID NO: 1419351 - DNA, 15 bp, Homo sapiens
cagttttttcacttt

SEQ ID NO: 1419352 - DNA, 15 bp, Homo sapiens
agttttttcactttt

SEQ ID NO: 1419353 - DNA, 15 bp, Homo sapiens
gttttttcacttttc

SEQ ID NO: 1419354 - DNA, 15 bp, Homo sapiens
ttttttcacttttcc

SEQ ID NO: 1419355 - DNA, 15 bp, Homo sapiens
ttttcacttttcctc

SEQ ID NO: 1419356 - DNA, 15 bp, Homo sapiens
tttcacttttcctca

SEQ ID NO: 1419357 - DNA, 15 bp, Homo sapiens
ttcacttttcctcaa

SEQ ID NO: 1419358 - DNA, 15 bp, Homo sapiens
tcacttttcctcaat

SEQ ID NO: 1419359 - DNA, 15 bp, Homo sapiens
cacttttcctcaatt

SEQ ID NO: 1419360 - DNA, 15 bp, Homo sapiens
acttttcctcaattt

SEQ ID NO: 1419361 - DNA, 15 bp, Homo sapiens
cttttcctcaatttt

SEQ ID NO: 1419362 - DNA, 15 bp, Homo sapiens
ttttcctcaatttta

SEQ ID NO: 1419363 - DNA, 15 bp, Homo sapiens
tttcctcaattttag

SEQ ID NO: 1419364 - DNA, 15 bp, Homo sapiens
ttcctcaattttagt

SEQ ID NO: 1419365 - DNA, 15 bp, Homo sapiens
tcctcaattttagtc

SEQ ID NO: 1419366 - DNA, 15 bp, Homo sapiens
cctcaattttagtct

SEQ ID NO: 1419367 - DNA, 15 bp, Homo sapiens
ctcaattttagtctc

SEQ ID NO: 1419368 - DNA, 15 bp, Homo sapiens
tcaattttagtctcc

SEQ ID NO: 1419369 - DNA, 15 bp, Homo sapiens
caattttagtctcct

SEQ ID NO: 1419370 - DNA, 15 bp, Homo sapiens
aattttagtctcctt

SEQ ID NO: 1419371 - DNA, 15 bp, Homo sapiens
attttagtctcctta

SEQ ID NO: 1419372 - DNA, 15 bp, Homo sapiens
ttttagtctccttac

SEQ ID NO: 1419373 - DNA, 15 bp, Homo sapiens
tttagtctccttaca

SEQ ID NO: 1419374 - DNA, 15 bp, Homo sapiens
ttagtctccttacac

SEQ ID NO: 1419375 - DNA, 15 bp, Homo sapiens
tagtctccttacact

SEQ ID NO: 1419376 - DNA, 15 bp, Homo sapiens
agtctccttacactc

SEQ ID NO: 1419377 - DNA, 15 bp, Homo sapiens
gtctccttacactct

SEQ ID NO: 1419378 - DNA, 15 bp, Homo sapiens
tctccttacactctg

SEQ ID NO: 1419379 - DNA, 15 bp, Homo sapiens
ctccttacactctgg

SEQ ID NO: 1419380 - DNA, 15 bp, Homo sapiens
tccttacactctggg

SEQ ID NO: 1419381 - DNA, 15 bp, Homo sapiens
ccttacactctggga

SEQ ID NO: 1419382 - DNA, 15 bp, Homo sapiens
cttacactctgggag

SEQ ID NO: 1419383 - DNA, 15 bp, Homo sapiens
ttacactctgggagg

SEQ ID NO: 1419384 - DNA, 15 bp, Homo sapiens
tacactctgggagga

SEQ ID NO: 1419385 - DNA, 15 bp, Homo sapiens
acactctgggaggat

SEQ ID NO: 1419386 - DNA, 15 bp, Homo sapiens
cactctgggaggatt

SEQ ID NO: 1419387 - DNA, 15 bp, Homo sapiens
actctgggaggatta

SEQ ID NO: 1419388 - DNA, 15 bp, Homo sapiens
ctctgggaggattaa

SEQ ID NO: 1419389 - DNA, 15 bp, Homo sapiens
tctgggaggattaac

SEQ ID NO: 1419390 - DNA, 15 bp, Homo sapiens
ctgggaggattaact

SEQ ID NO: 1419391 - DNA, 15 bp, Homo sapiens
tgggaggattaactt

SEQ ID NO: 1419392 - DNA, 15 bp, Homo sapiens
gggaggattaacttg

SEQ ID NO: 1419393 - DNA, 15 bp, Homo sapiens
ggaggattaacttga

SEQ ID NO: 1419394 - DNA, 15 bp, Homo sapiens
gaggattaacttgac

SEQ ID NO: 1419395 - DNA, 15 bp, Homo sapiens
aggattaacttgaca

SEQ ID NO: 1419396 - DNA, 15 bp, Homo sapiens
ggattaacttgacaa

SEQ ID NO: 1419397 - DNA, 15 bp, Homo sapiens
gattaacttgacaaa

SEQ ID NO: 1419398 - DNA, 15 bp, Homo sapiens
attaacttgacaaat

SEQ ID NO: 1419399 - DNA, 15 bp, Homo sapiens
ttaacttgacaaatg

SEQ ID NO: 1419400 - DNA, 15 bp, Homo sapiens
taacttgacaaatga

SEQ ID NO: 1419401 - DNA, 15 bp, Homo sapiens
aacttgacaaatgat

SEQ ID NO: 1419402 - DNA, 15 bp, Homo sapiens
acttgacaaatgata

SEQ ID NO: 1419403 - DNA, 15 bp, Homo sapiens
cttgacaaatgatac

SEQ ID NO: 1419404 - DNA, 15 bp, Homo sapiens
ttgacaaatgatacc

SEQ ID NO: 1419405 - DNA, 15 bp, Homo sapiens
tgacaaatgatacct

SEQ ID NO: 1419406 - DNA, 15 bp, Homo sapiens
gacaaatgatacctt

SEQ ID NO: 1419407 - DNA, 15 bp, Homo sapiens
acaaatgatacctta

SEQ ID NO: 1419408 - DNA, 15 bp, Homo sapiens
caaatgataccttag

SEQ ID NO: 1419409 - DNA, 15 bp, Homo sapiens
aaatgataccttagt

SEQ ID NO: 1419410 - DNA, 15 bp, Homo sapiens
aatgataccttagtg

SEQ ID NO: 1419411 - DNA, 15 bp, Homo sapiens
atgataccttagtga

SEQ ID NO: 1419412 - DNA, 15 bp, Homo sapiens
tgataccttagtgaa

SEQ ID NO: 1419413 - DNA, 15 bp, Homo sapiens
gataccttagtgaat

SEQ ID NO: 1419414 - DNA, 15 bp, Homo sapiens
ataccttagtgaata

SEQ ID NO: 1419415 - DNA, 15 bp, Homo sapiens
taccttagtgaataa

SEQ ID NO: 1419416 - DNA, 15 bp, Homo sapiens
accttagtgaataac

SEQ ID NO: 1419417 - DNA, 15 bp, Homo sapiens
ccttagtgaataact

SEQ ID NO: 1419418 - DNA, 15 bp, Homo sapiens
cttagtgaataactg

SEQ ID NO: 1419419 - DNA, 15 bp, Homo sapiens
ttagtgaataactga

SEQ ID NO: 1419420 - DNA, 15 bp, Homo sapiens
tagtgaataactgat

SEQ ID NO: 1419421 - DNA, 15 bp, Homo sapiens
agtgaataactgatt

SEQ ID NO: 1419422 - DNA, 15 bp, Homo sapiens
gtgaataactgatta

SEQ ID NO: 1419423 - DNA, 15 bp, Homo sapiens
tgaataactgattat

SEQ ID NO: 1419424 - DNA, 15 bp, Homo sapiens
gaataactgattatt

SEQ ID NO: 1419425 - DNA, 15 bp, Homo sapiens
aataactgattattt

SEQ ID NO: 1419426 - DNA, 15 bp, Homo sapiens
ataactgattatttt

SEQ ID NO: 1419427 - DNA, 15 bp, Homo sapiens
taactgattattttt

SEQ ID NO: 1419428 - DNA, 15 bp, Homo sapiens
aactgattattttta

SEQ ID NO: 1419429 - DNA, 15 bp, Homo sapiens
actgattatttttat

SEQ ID NO: 1419430 - DNA, 15 bp, Homo sapiens
ctgattatttttatc

SEQ ID NO: 1419431 - DNA, 15 bp, Homo sapiens
tgattatttttatca

SEQ ID NO: 1419432 - DNA, 15 bp, Homo sapiens
gattatttttatcaa

SEQ ID NO: 1419433 - DNA, 15 bp, Homo sapiens
attatttttatcaaa

SEQ ID NO: 1419434 - DNA, 15 bp, Homo sapiens
ttatttttatcaaaa

SEQ ID NO: 1419435 - DNA, 15 bp, Homo sapiens
tatttttatcaaaat

SEQ ID NO: 1419436 - DNA, 15 bp, Homo sapiens
atttttatcaaaatc

SEQ ID NO: 1419437 - DNA, 15 bp, Homo sapiens
tttttatcaaaatca

SEQ ID NO: 1419438 - DNA, 15 bp, Homo sapiens
ttttatcaaaatcac

SEQ ID NO: 1419439 - DNA, 15 bp, Homo sapiens
tttatcaaaatcact

SEQ ID NO: 1419440 - DNA, 15 bp, Homo sapiens
ttatcaaaatcactc

SEQ ID NO: 1419441 - DNA, 15 bp, Homo sapiens
tatcaaaatcactca

SEQ ID NO: 1419442 - DNA, 15 bp, Homo sapiens
atcaaaatcactcac

SEQ ID NO: 1419443 - DNA, 15 bp, Homo sapiens
tcaaaatcactcaca

SEQ ID NO: 1419444 - DNA, 15 bp, Homo sapiens
caaaatcactcacat

SEQ ID NO: 1419445 - DNA, 15 bp, Homo sapiens
aaaatcactcacatg

SEQ ID NO: 1419446 - DNA, 15 bp, Homo sapiens
aaatcactcacatgt

SEQ ID NO: 1419447 - DNA, 15 bp, Homo sapiens
aatcactcacatgtg

SEQ ID NO: 1419448 - DNA, 15 bp, Homo sapiens
atcactcacatgtgt

SEQ ID NO: 1419449 - DNA, 15 bp, Homo sapiens
tcactcacatgtgtt

SEQ ID NO: 1419450 - DNA, 15 bp, Homo sapiens
cactcacatgtgttg

SEQ ID NO: 1419451 - DNA, 15 bp, Homo sapiens
actcacatgtgttgg

SEQ ID NO: 1419452 - DNA, 15 bp, Homo sapiens
ctcacatgtgttggt

SEQ ID NO: 1419453 - DNA, 15 bp, Homo sapiens
tcacatgtgttggtt

SEQ ID NO: 1419454 - DNA, 15 bp, Homo sapiens
cacatgtgttggttt

SEQ ID NO: 1419455 - DNA, 15 bp, Homo sapiens
acatgtgttggttta

SEQ ID NO: 1419456 - DNA, 15 bp, Homo sapiens
catgtgttggtttac

SEQ ID NO: 1419457 - DNA, 15 bp, Homo sapiens
atgtgttggtttact

SEQ ID NO: 1419458 - DNA, 15 bp, Homo sapiens
tgtgttggtttactg

SEQ ID NO: 1419459 - DNA, 15 bp, Homo sapiens
gtgttggtttactga

SEQ ID NO: 1419460 - DNA, 15 bp, Homo sapiens
tgttggtttactgag

SEQ ID NO: 1419461 - DNA, 15 bp, Homo sapiens
gttggtttactgagt

SEQ ID NO: 1419462 - DNA, 15 bp, Homo sapiens
ttggtttactgagtg

SEQ ID NO: 1419463 - DNA, 15 bp, Homo sapiens
tggtttactgagtgc

SEQ ID NO: 1419464 - DNA, 15 bp, Homo sapiens
ggtttactgagtgcc

SEQ ID NO: 1419465 - DNA, 15 bp, Homo sapiens
gtttactgagtgcct

SEQ ID NO: 1419466 - DNA, 15 bp, Homo sapiens
tttactgagtgcctt

SEQ ID NO: 1419467 - DNA, 15 bp, Homo sapiens
ttactgagtgccttt

SEQ ID NO: 1419468 - DNA, 15 bp, Homo sapiens
tactgagtgcctttt

SEQ ID NO: 1419469 - DNA, 15 bp, Homo sapiens
actgagtgccttttt

SEQ ID NO: 1419470 - DNA, 15 bp, Homo sapiens
ctgagtgcctttttg

SEQ ID NO: 1419471 - DNA, 15 bp, Homo sapiens
tgagtgcctttttgg

SEQ ID NO: 1419472 - DNA, 15 bp, Homo sapiens
gagtgcctttttgga

SEQ ID NO: 1419473 - DNA, 15 bp, Homo sapiens
agtgcctttttggat

SEQ ID NO: 1419474 - DNA, 15 bp, Homo sapiens
gtgcctttttggatg

SEQ ID NO: 1419475 - DNA, 15 bp, Homo sapiens
tgcctttttggatga

SEQ ID NO: 1419476 - DNA, 15 bp, Homo sapiens
gcctttttggatgag

SEQ ID NO: 1419477 - DNA, 15 bp, Homo sapiens
cctttttggatgagt

SEQ ID NO: 1419478 - DNA, 15 bp, Homo sapiens
ctttttggatgagtg

SEQ ID NO: 1419479 - DNA, 15 bp, Homo sapiens
tttttggatgagtgt

SEQ ID NO: 1419480 - DNA, 15 bp, Homo sapiens
ttttggatgagtgtt

SEQ ID NO: 1419481 - DNA, 15 bp, Homo sapiens
tttggatgagtgttt

SEQ ID NO: 1419482 - DNA, 15 bp, Homo sapiens
ttggatgagtgtttt

SEQ ID NO: 1419483 - DNA, 15 bp, Homo sapiens
tggatgagtgtttta

SEQ ID NO: 1419484 - DNA, 15 bp, Homo sapiens
ggatgagtgttttat

SEQ ID NO: 1419485 - DNA, 15 bp, Homo sapiens
gatgagtgttttatg

SEQ ID NO: 1419486 - DNA, 15 bp, Homo sapiens
atgagtgttttatgc

SEQ ID NO: 1419487 - DNA, 15 bp, Homo sapiens
tgagtgttttatgcc

SEQ ID NO: 1419488 - DNA, 15 bp, Homo sapiens
gagtgttttatgcca

SEQ ID NO: 1419489 - DNA, 15 bp, Homo sapiens
agtgttttatgccat

SEQ ID NO: 1419490 - DNA, 15 bp, Homo sapiens
gtgttttatgccata

SEQ ID NO: 1419491 - DNA, 15 bp, Homo sapiens
tgttttatgccatat

SEQ ID NO: 1419492 - DNA, 15 bp, Homo sapiens
gttttatgccatatg

SEQ ID NO: 1419493 - DNA, 15 bp, Homo sapiens
ttttatgccatatgt

SEQ ID NO: 1419494 - DNA, 15 bp, Homo sapiens
tttatgccatatgtg

SEQ ID NO: 1419495 - DNA, 15 bp, Homo sapiens
ttatgccatatgtgt

SEQ ID NO: 1419496 - DNA, 15 bp, Homo sapiens
tatgccatatgtgtt

SEQ ID NO: 1419497 - DNA, 15 bp, Homo sapiens
atgccatatgtgttt

SEQ ID NO: 1419498 - DNA, 15 bp, Homo sapiens
tgccatatgtgtttt

SEQ ID NO: 1419499 - DNA, 15 bp, Homo sapiens
gccatatgtgttttt

SEQ ID NO: 1419500 - DNA, 15 bp, Homo sapiens
ccatatgtgttttta

SEQ ID NO: 1419501 - DNA, 15 bp, Homo sapiens
catatgtgtttttaa

SEQ ID NO: 1419502 - DNA, 15 bp, Homo sapiens
atatgtgtttttaat

SEQ ID NO: 1419503 - DNA, 15 bp, Homo sapiens
tatgtgtttttaatg

SEQ ID NO: 1419504 - DNA, 15 bp, Homo sapiens
atgtgtttttaatgg

SEQ ID NO: 1419505 - DNA, 15 bp, Homo sapiens
tgtgtttttaatgga

SEQ ID NO: 1419506 - DNA, 15 bp, Homo sapiens
gtgtttttaatggaa

SEQ ID NO: 1419507 - DNA, 15 bp, Homo sapiens
tgtttttaatggaaa

SEQ ID NO: 1419508 - DNA, 15 bp, Homo sapiens
gtttttaatggaaat

SEQ ID NO: 1419509 - DNA, 15 bp, Homo sapiens
tttttaatggaaatt

SEQ ID NO: 1419510 - DNA, 15 bp, Homo sapiens
ttttaatggaaatta

SEQ ID NO: 1419511 - DNA, 15 bp, Homo sapiens
tttaatggaaattaa

SEQ ID NO: 1419512 - DNA, 15 bp, Homo sapiens
ttaatggaaattaaa

SEQ ID NO: 1419513 - DNA, 15 bp, Homo sapiens
taatggaaattaaag

SEQ ID NO: 1419514 - DNA, 15 bp, Homo sapiens
aatggaaattaaagt

SEQ ID NO: 1419515 - DNA, 15 bp, Homo sapiens
atggaaattaaagtg

SEQ ID NO: 1419516 - DNA, 15 bp, Homo sapiens
tggaaattaaagtgt

SEQ ID NO: 1419517 - DNA, 15 bp, Homo sapiens
ccttttgtgactttt

SEQ ID NO: 1419518 - DNA, 15 bp, Homo sapiens
cttttgtgactttta

SEQ ID NO: 1419519 - DNA, 15 bp, Homo sapiens
ttttgtgacttttaa

SEQ ID NO: 1419520 - DNA, 15 bp, Homo sapiens
tttgtgacttttaag

SEQ ID NO: 1419521 - DNA, 15 bp, Homo sapiens
ttgtgacttttaagt

SEQ ID NO: 1419522 - DNA, 15 bp, Homo sapiens
tgtgacttttaagtg

SEQ ID NO: 1419523 - DNA, 15 bp, Homo sapiens
gtgacttttaagtga

SEQ ID NO: 1419524 - DNA, 15 bp, Homo sapiens
tgacttttaagtgag

SEQ ID NO: 1419525 - DNA, 15 bp, Homo sapiens
gacttttaagtgaga

SEQ ID NO: 1419526 - DNA, 15 bp, Homo sapiens
acttttaagtgagaa

SEQ ID NO: 1419527 - DNA, 15 bp, Homo sapiens
cttttaagtgagaag

SEQ ID NO: 1419528 - DNA, 15 bp, Homo sapiens
ttttaagtgagaagc

SEQ ID NO: 1419529 - DNA, 15 bp, Homo sapiens
tttaagtgagaagct

SEQ ID NO: 1419530 - DNA, 15 bp, Homo sapiens
ttaagtgagaagctt

SEQ ID NO: 1419531 - DNA, 15 bp, Homo sapiens
taagtgagaagcttt

SEQ ID NO: 1419532 - DNA, 15 bp, Homo sapiens
aagtgagaagctttc

SEQ ID NO: 1419533 - DNA, 15 bp, Homo sapiens
agtgagaagctttca

SEQ ID NO: 1419534 - DNA, 15 bp, Homo sapiens
gtgagaagctttcat

SEQ ID NO: 1419535 - DNA, 15 bp, Homo sapiens
tgagaagctttcatt

SEQ ID NO: 1419536 - DNA, 15 bp, Homo sapiens
gagaagctttcatta

SEQ ID NO: 1419537 - DNA, 15 bp, Homo sapiens
agaagctttcattat

SEQ ID NO: 1419538 - DNA, 15 bp, Homo sapiens
gaagctttcattatg

SEQ ID NO: 1419539 - DNA, 15 bp, Homo sapiens
aagctttcattatgt

SEQ ID NO: 1419540 - DNA, 15 bp, Homo sapiens
agctttcattatgtc

SEQ ID NO: 1419541 - DNA, 15 bp, Homo sapiens
gctttcattatgtct

SEQ ID NO: 1419542 - DNA, 15 bp, Homo sapiens
ctttcattatgtctt

SEQ ID NO: 1419543 - DNA, 15 bp, Homo sapiens
tttcattatgtctta

SEQ ID NO: 1419544 - DNA, 15 bp, Homo sapiens
ttcattatgtcttag

SEQ ID NO: 1419545 - DNA, 15 bp, Homo sapiens
tcattatgtcttagc

SEQ ID NO: 1419546 - DNA, 15 bp, Homo sapiens
cattatgtcttagcc

SEQ ID NO: 1419547 - DNA, 15 bp, Homo sapiens
attatgtcttagccc

SEQ ID NO: 1419548 - DNA, 15 bp, Homo sapiens
ttatgtcttagccct

SEQ ID NO: 1419549 - DNA, 15 bp, Homo sapiens
tatgtcttagcccta

SEQ ID NO: 1419550 - DNA, 15 bp, Homo sapiens
atgtcttagccctac

SEQ ID NO: 1419551 - DNA, 15 bp, Homo sapiens
tgtcttagccctaca

SEQ ID NO: 1419552 - DNA, 15 bp, Homo sapiens
gtcttagccctacag

SEQ ID NO: 1419553 - DNA, 15 bp, Homo sapiens
tcttagccctacagt

SEQ ID NO: 1419554 - DNA, 15 bp, Homo sapiens
cttagccctacagtg

SEQ ID NO: 1419555 - DNA, 15 bp, Homo sapiens
ttagccctacagtgt

SEQ ID NO: 1419556 - DNA, 15 bp, Homo sapiens
tagccctacagtgtg

SEQ ID NO: 1419557 - DNA, 15 bp, Homo sapiens
agccctacagtgtgt

SEQ ID NO: 1419558 - DNA, 15 bp, Homo sapiens
gccctacagtgtgtt

SEQ ID NO: 1419559 - DNA, 15 bp, Homo sapiens
ccctacagtgtgtta

SEQ ID NO: 1419560 - DNA, 15 bp, Homo sapiens
cctacagtgtgttat

SEQ ID NO: 1419561 - DNA, 15 bp, Homo sapiens
ctacagtgtgttatc

SEQ ID NO: 1419562 - DNA, 15 bp, Homo sapiens
tacagtgtgttatca

SEQ ID NO: 1419563 - DNA, 15 bp, Homo sapiens
acagtgtgttatcaa

SEQ ID NO: 1419564 - DNA, 15 bp, Homo sapiens
cagtgtgttatcaat

SEQ ID NO: 1419565 - DNA, 15 bp, Homo sapiens
agtgtgttatcaata

SEQ ID NO: 1419566 - DNA, 15 bp, Homo sapiens
gtgtgttatcaataa

SEQ ID NO: 1419567 - DNA, 15 bp, Homo sapiens
tgtgttatcaataat

SEQ ID NO: 1419568 - DNA, 15 bp, Homo sapiens
gtgttatcaataatc

SEQ ID NO: 1419569 - DNA, 15 bp, Homo sapiens
tgttatcaataatca

SEQ ID NO: 1419570 - DNA, 15 bp, Homo sapiens
gttatcaataatcat

SEQ ID NO: 1419571 - DNA, 15 bp, Homo sapiens
ttatcaataatcata

SEQ ID NO: 1419572 - DNA, 15 bp, Homo sapiens
tatcaataatcatat

SEQ ID NO: 1419573 - DNA, 15 bp, Homo sapiens
atcaataatcatatc

SEQ ID NO: 1419574 - DNA, 15 bp, Homo sapiens
tcaataatcatatct

SEQ ID NO: 1419575 - DNA, 15 bp, Homo sapiens
caataatcatatctg

SEQ ID NO: 1419576 - DNA, 15 bp, Homo sapiens
aataatcatatctgt

SEQ ID NO: 1419577 - DNA, 15 bp, Homo sapiens
ataatcatatctgtg

SEQ ID NO: 1419578 - DNA, 15 bp, Homo sapiens
taatcatatctgtgt

SEQ ID NO: 1419579 - DNA, 15 bp, Homo sapiens
aatcatatctgtgtt

SEQ ID NO: 1419580 - DNA, 15 bp, Homo sapiens
atcatatctgtgtta

SEQ ID NO: 1419581 - DNA, 15 bp, Homo sapiens
tcatatctgtgttaa

SEQ ID NO: 1419582 - DNA, 15 bp, Homo sapiens
catatctgtgttaaa

SEQ ID NO: 1419583 - DNA, 15 bp, Homo sapiens
atatctgtgttaaat

SEQ ID NO: 1419584 - DNA, 15 bp, Homo sapiens
atctgtgttaaattg

SEQ ID NO: 1419585 - DNA, 15 bp, Homo sapiens
tctgtgttaaattgt

SEQ ID NO: 1419586 - DNA, 15 bp, Homo sapiens
ctgtgttaaattgta

SEQ ID NO: 1419587 - DNA, 15 bp, Homo sapiens
tgtgttaaattgtac

SEQ ID NO: 1419588 - DNA, 15 bp, Homo sapiens
gtgttaaattgtact

SEQ ID NO: 1419589 - DNA, 15 bp, Homo sapiens
tgttaaattgtactt

SEQ ID NO: 1419590 - DNA, 15 bp, Homo sapiens
gttaaattgtacttc

SEQ ID NO: 1419591 - DNA, 15 bp, Homo sapiens
ttaaattgtacttca

SEQ ID NO: 1419592 - DNA, 15 bp, Homo sapiens
taaattgtacttcac

SEQ ID NO: 1419593 - DNA, 15 bp, Homo sapiens
aaattgtacttcact

SEQ ID NO: 1419594 - DNA, 15 bp, Homo sapiens
aattgtacttcactt

SEQ ID NO: 1419595 - DNA, 15 bp, Homo sapiens
attgtacttcacttt

SEQ ID NO: 1419596 - DNA, 15 bp, Homo sapiens
ttgtacttcactttg

SEQ ID NO: 1419597 - DNA, 15 bp, Homo sapiens
tgtacttcactttgt

SEQ ID NO: 1419598 - DNA, 15 bp, Homo sapiens
gtacttcactttgta

SEQ ID NO: 1419599 - DNA, 15 bp, Homo sapiens
ttcactttgtatatc

SEQ ID NO: 1419600 - DNA, 15 bp, Homo sapiens
tcactttgtatatca

SEQ ID NO: 1419601 - DNA, 15 bp, Homo sapiens
cactttgtatatcac

SEQ ID NO: 1419602 - DNA, 15 bp, Homo sapiens
actttgtatatcacc

SEQ ID NO: 1419603 - DNA, 15 bp, Homo sapiens
ctttgtatatcacca

SEQ ID NO: 1419604 - DNA, 15 bp, Homo sapiens
tttgtatatcaccat

SEQ ID NO: 1419605 - DNA, 15 bp, Homo sapiens
ttgtatatcaccatt

SEQ ID NO: 1419606 - DNA, 15 bp, Homo sapiens
tgtatatcaccattg

SEQ ID NO: 1419607 - DNA, 15 bp, Homo sapiens
gtatatcaccattgt

SEQ ID NO: 1419608 - DNA, 15 bp, Homo sapiens
tatatcaccattgta

SEQ ID NO: 1419609 - DNA, 15 bp, Homo sapiens
atatcaccattgtaa

SEQ ID NO: 1419610 - DNA, 15 bp, Homo sapiens
tatcaccattgtaag

SEQ ID NO: 1419611 - DNA, 15 bp, Homo sapiens
atcaccattgtaagt

SEQ ID NO: 1419612 - DNA, 15 bp, Homo sapiens
tcaccattgtaagtt

SEQ ID NO: 1419613 - DNA, 15 bp, Homo sapiens
caccattgtaagttt

SEQ ID NO: 1419614 - DNA, 15 bp, Homo sapiens
accattgtaagtttt

SEQ ID NO: 1419615 - DNA, 15 bp, Homo sapiens
ccattgtaagtttta

SEQ ID NO: 1419616 - DNA, 15 bp, Homo sapiens
cattgtaagttttaa

SEQ ID NO: 1419617 - DNA, 15 bp, Homo sapiens
attgtaagttttaac

SEQ ID NO: 1419618 - DNA, 15 bp, Homo sapiens
ttgtaagttttaacc

SEQ ID NO: 1419619 - DNA, 15 bp, Homo sapiens
tgtaagttttaaccg

SEQ ID NO: 1419620 - DNA, 15 bp, Homo sapiens
gtaagttttaaccgt

SEQ ID NO: 1419621 - DNA, 15 bp, Homo sapiens
taagttttaaccgta

SEQ ID NO: 1419622 - DNA, 15 bp, Homo sapiens
aagttttaaccgtat

SEQ ID NO: 1419623 - DNA, 15 bp, Homo sapiens
agttttaaccgtata

SEQ ID NO: 1419624 - DNA, 15 bp, Homo sapiens
gttttaaccgtatac

SEQ ID NO: 1419625 - DNA, 15 bp, Homo sapiens
ttttaaccgtataca

SEQ ID NO: 1419626 - DNA, 15 bp, Homo sapiens
tttaaccgtatacat

SEQ ID NO: 1419627 - DNA, 15 bp, Homo sapiens
ttaaccgtatacatt

SEQ ID NO: 1419628 - DNA, 15 bp, Homo sapiens
taaccgtatacatta

SEQ ID NO: 1419629 - DNA, 15 bp, Homo sapiens
aaccgtatacattat

SEQ ID NO: 1419630 - DNA, 15 bp, Homo sapiens
accgtatacattata

SEQ ID NO: 1419631 - DNA, 15 bp, Homo sapiens
ccgtatacattatag

SEQ ID NO: 1419632 - DNA, 15 bp, Homo sapiens
cgtatacattatagg

SEQ ID NO: 1419633 - DNA, 15 bp, Homo sapiens
gtatacattataggc

SEQ ID NO: 1419634 - DNA, 15 bp, Homo sapiens
tatacattataggct

SEQ ID NO: 1419635 - DNA, 15 bp, Homo sapiens
atacattataggctt

SEQ ID NO: 1419636 - DNA, 15 bp, Homo sapiens
tacattataggcttt

SEQ ID NO: 1419637 - DNA, 15 bp, Homo sapiens
acattataggctttt

SEQ ID NO: 1419638 - DNA, 15 bp, Homo sapiens
cattataggcttttt

SEQ ID NO: 1419639 - DNA, 15 bp, Homo sapiens
attataggctttttc

SEQ ID NO: 1419640 - DNA, 15 bp, Homo sapiens
ttataggctttttcc

SEQ ID NO: 1419641 - DNA, 15 bp, Homo sapiens
tataggctttttcca

SEQ ID NO: 1419642 - DNA, 15 bp, Homo sapiens
ataggctttttccat

SEQ ID NO: 1419643 - DNA, 15 bp, Homo sapiens
taggctttttccatt

SEQ ID NO: 1419644 - DNA, 15 bp, Homo sapiens
aggctttttccattt

SEQ ID NO: 1419645 - DNA, 15 bp, Homo sapiens
ggctttttccatttt

SEQ ID NO: 1419646 - DNA, 15 bp, Homo sapiens
gctttttccattttt

SEQ ID NO: 1419647 - DNA, 15 bp, Homo sapiens
ctttttccattttta

SEQ ID NO: 1419648 - DNA, 15 bp, Homo sapiens
tttttccatttttat

SEQ ID NO: 1419649 - DNA, 15 bp, Homo sapiens
ttttccatttttatt

SEQ ID NO: 1419650 - DNA, 15 bp, Homo sapiens
tttccatttttattt

SEQ ID NO: 1419651 - DNA, 15 bp, Homo sapiens
ttccatttttatttt

SEQ ID NO: 1419652 - DNA, 15 bp, Homo sapiens
tccatttttatttta

SEQ ID NO: 1419653 - DNA, 15 bp, Homo sapiens
ccatttttattttaa

SEQ ID NO: 1419654 - DNA, 15 bp, Homo sapiens
catttttattttaaa

SEQ ID NO: 1419655 - DNA, 15 bp, Homo sapiens
atttttattttaaaa

SEQ ID NO: 1419656 - DNA, 15 bp, Homo sapiens
tttttattttaaaaa

SEQ ID NO: 1419657 - DNA, 15 bp, Homo sapiens
ttttattttaaaaac

SEQ ID NO: 1419658 - DNA, 15 bp, Homo sapiens
tttattttaaaaact

SEQ ID NO: 1419659 - DNA, 15 bp, Homo sapiens
ttattttaaaaactg

SEQ ID NO: 1419660 - DNA, 15 bp, Homo sapiens
tattttaaaaactgt

SEQ ID NO: 1419661 - DNA, 15 bp, Homo sapiens
attttaaaaactgtt

SEQ ID NO: 1419662 - DNA, 15 bp, Homo sapiens
ttttaaaaactgttt

SEQ ID NO: 1419663 - DNA, 15 bp, Homo sapiens
tttaaaaactgttta

SEQ ID NO: 1419664 - DNA, 15 bp, Homo sapiens
ttaaaaactgtttaa

SEQ ID NO: 1419665 - DNA, 15 bp, Homo sapiens
taaaaactgtttaag

SEQ ID NO: 1419666 - DNA, 15 bp, Homo sapiens
aaaaactgtttaagg

SEQ ID NO: 1419667 - DNA, 15 bp, Homo sapiens
aaaactgtttaaggt

SEQ ID NO: 1419668 - DNA, 15 bp, Homo sapiens
aaactgtttaaggtg

SEQ ID NO: 1419669 - DNA, 15 bp, Homo sapiens
aactgtttaaggtgt

SEQ ID NO: 1419670 - DNA, 15 bp, Homo sapiens
actgtttaaggtgta

SEQ ID NO: 1419671 - DNA, 15 bp, Homo sapiens
ctgtttaaggtgtag

SEQ ID NO: 1419672 - DNA, 15 bp, Homo sapiens
tgtttaaggtgtagc

SEQ ID NO: 1419673 - DNA, 15 bp, Homo sapiens
gtttaaggtgtagct

SEQ ID NO: 1419674 - DNA, 15 bp, Homo sapiens
tttaaggtgtagctt

SEQ ID NO: 1419675 - DNA, 15 bp, Homo sapiens
ttaaggtgtagcttt

SEQ ID NO: 1419676 - DNA, 15 bp, Homo sapiens
taaggtgtagctttt

SEQ ID NO: 1419677 - DNA, 15 bp, Homo sapiens
aaggtgtagcttttt

SEQ ID NO: 1419678 - DNA, 15 bp, Homo sapiens
aggtgtagcttttta

SEQ ID NO: 1419679 - DNA, 15 bp, Homo sapiens
ggtgtagctttttaa

SEQ ID NO: 1419680 - DNA, 15 bp, Homo sapiens
gtgtagctttttaag

SEQ ID NO: 1419681 - DNA, 15 bp, Homo sapiens
tgtagctttttaagg

SEQ ID NO: 1419682 - DNA, 15 bp, Homo sapiens
gtagctttttaagga

SEQ ID NO: 1419683 - DNA, 15 bp, Homo sapiens
tagctttttaaggat

SEQ ID NO: 1419684 - DNA, 15 bp, Homo sapiens
agctttttaaggatt

SEQ ID NO: 1419685 - DNA, 15 bp, Homo sapiens
gctttttaaggattc

SEQ ID NO: 1419686 - DNA, 15 bp, Homo sapiens
ctttttaaggattct

SEQ ID NO: 1419687 - DNA, 15 bp, Homo sapiens
tttttaaggattctg

SEQ ID NO: 1419688 - DNA, 15 bp, Homo sapiens
ttttaaggattctgt

SEQ ID NO: 1419689 - DNA, 15 bp, Homo sapiens
tttaaggattctgtt

SEQ ID NO: 1419690 - DNA, 15 bp, Homo sapiens
ttaaggattctgttt

SEQ ID NO: 1419691 - DNA, 15 bp, Homo sapiens
taaggattctgtttt

SEQ ID NO: 1419692 - DNA, 15 bp, Homo sapiens
aaggattctgttttt

SEQ ID NO: 1419693 - DNA, 15 bp, Homo sapiens
aggattctgtttttg

SEQ ID NO: 1419694 - DNA, 15 bp, Homo sapiens
ggattctgtttttgc

SEQ ID NO: 1419695 - DNA, 15 bp, Homo sapiens
gattctgtttttgct

SEQ ID NO: 1419696 - DNA, 15 bp, Homo sapiens
attctgtttttgctc

SEQ ID NO: 1419697 - DNA, 15 bp, Homo sapiens
ttctgtttttgctct

SEQ ID NO: 1419698 - DNA, 15 bp, Homo sapiens
tctgtttttgctctt

SEQ ID NO: 1419699 - DNA, 15 bp, Homo sapiens
ctgtttttgctctta

SEQ ID NO: 1419700 - DNA, 15 bp, Homo sapiens
tgtttttgctcttat

SEQ ID NO: 1419701 - DNA, 15 bp, Homo sapiens
gtttttgctcttatt

SEQ ID NO: 1419702 - DNA, 15 bp, Homo sapiens
tttttgctcttattt

SEQ ID NO: 1419703 - DNA, 15 bp, Homo sapiens
ttttgctcttatttt

SEQ ID NO: 1419704 - DNA, 15 bp, Homo sapiens
tttgctcttattttt

SEQ ID NO: 1419705 - DNA, 15 bp, Homo sapiens
ttgctcttatttttt

SEQ ID NO: 1419706 - DNA, 15 bp, Homo sapiens
tgctcttatttttta

SEQ ID NO: 1419707 - DNA, 15 bp, Homo sapiens
gctcttattttttac

SEQ ID NO: 1419708 - DNA, 15 bp, Homo sapiens
ctcttattttttacc

SEQ ID NO: 1419709 - DNA, 15 bp, Homo sapiens
tcttattttttacct

SEQ ID NO: 1419710 - DNA, 15 bp, Homo sapiens
cttattttttacctg

SEQ ID NO: 1419711 - DNA, 15 bp, Homo sapiens
ttattttttacctgt

SEQ ID NO: 1419712 - DNA, 15 bp, Homo sapiens
tattttttacctgtg

SEQ ID NO: 1419713 - DNA, 15 bp, Homo sapiens
attttttacctgtgt

SEQ ID NO: 1419714 - DNA, 15 bp, Homo sapiens
ttttttacctgtgtc

SEQ ID NO: 1419715 - DNA, 15 bp, Homo sapiens
tttttacctgtgtct

SEQ ID NO: 1419716 - DNA, 15 bp, Homo sapiens
ttttacctgtgtctt

SEQ ID NO: 1419717 - DNA, 15 bp, Homo sapiens
tttacctgtgtcttg

SEQ ID NO: 1419718 - DNA, 15 bp, Homo sapiens
ttacctgtgtcttgg

SEQ ID NO: 1419719 - DNA, 15 bp, Homo sapiens
tacctgtgtcttggt

SEQ ID NO: 1419720 - DNA, 15 bp, Homo sapiens
acctgtgtcttggtc

SEQ ID NO: 1419721 - DNA, 15 bp, Homo sapiens
cctgtgtcttggtct

SEQ ID NO: 1419722 - DNA, 15 bp, Homo sapiens
ctgtgtcttggtctt

SEQ ID NO: 1419723 - DNA, 15 bp, Homo sapiens
tgtgtcttggtcttt

SEQ ID NO: 1419724 - DNA, 15 bp, Homo sapiens
gtgtcttggtctttc

SEQ ID NO: 1419725 - DNA, 15 bp, Homo sapiens
tgtcttggtctttct

SEQ ID NO: 1419726 - DNA, 15 bp, Homo sapiens
gtcttggtctttctt

SEQ ID NO: 1419727 - DNA, 15 bp, Homo sapiens
tcttggtctttctta

SEQ ID NO: 1419728 - DNA, 15 bp, Homo sapiens
cttggtctttcttat

SEQ ID NO: 1419729 - DNA, 15 bp, Homo sapiens
ttggtctttcttatc

SEQ ID NO: 1419730 - DNA, 15 bp, Homo sapiens
tggtctttcttatca

SEQ ID NO: 1419731 - DNA, 15 bp, Homo sapiens
ggtctttcttatcat

SEQ ID NO: 1419732 - DNA, 15 bp, Homo sapiens
gtctttcttatcatg

SEQ ID NO: 1419733 - DNA, 15 bp, Homo sapiens
tctttcttatcatgg

SEQ ID NO: 1419734 - DNA, 15 bp, Homo sapiens
ctttcttatcatgga

SEQ ID NO: 1419735 - DNA, 15 bp, Homo sapiens
tttcttatcatggag

SEQ ID NO: 1419736 - DNA, 15 bp, Homo sapiens
ttcttatcatggagg

SEQ ID NO: 1419737 - DNA, 15 bp, Homo sapiens
tcttatcatggaggt

SEQ ID NO: 1419738 - DNA, 15 bp, Homo sapiens
cttatcatggaggtg

SEQ ID NO: 1419739 - DNA, 15 bp, Homo sapiens
ttatcatggaggtga

SEQ ID NO: 1419740 - DNA, 15 bp, Homo sapiens
tatcatggaggtgaa

SEQ ID NO: 1419741 - DNA, 15 bp, Homo sapiens
atcatggaggtgaaa

SEQ ID NO: 1419742 - DNA, 15 bp, Homo sapiens
tcatggaggtgaaaa

SEQ ID NO: 1419743 - DNA, 15 bp, Homo sapiens
catggaggtgaaaac

SEQ ID NO: 1419744 - DNA, 15 bp, Homo sapiens
atggaggtgaaaaca

SEQ ID NO: 1419745 - DNA, 15 bp, Homo sapiens
tggaggtgaaaacag

SEQ ID NO: 1419746 - DNA, 15 bp, Homo sapiens
ggaggtgaaaacagt

SEQ ID NO: 1419747 - DNA, 15 bp, Homo sapiens
gaggtgaaaacagta

SEQ ID NO: 1419748 - DNA, 15 bp, Homo sapiens
aggtgaaaacagtaa

SEQ ID NO: 1419749 - DNA, 15 bp, Homo sapiens
ggtgaaaacagtaat

SEQ ID NO: 1419750 - DNA, 15 bp, Homo sapiens
gtgaaaacagtaata

SEQ ID NO: 1419751 - DNA, 15 bp, Homo sapiens
tgaaaacagtaatac

SEQ ID NO: 1419752 - DNA, 15 bp, Homo sapiens
gaaaacagtaatact

SEQ ID NO: 1419753 - DNA, 15 bp, Homo sapiens
aaaacagtaatactg

SEQ ID NO: 1419754 - DNA, 15 bp, Homo sapiens
aaacagtaatactga

SEQ ID NO: 1419755 - DNA, 15 bp, Homo sapiens
aacagtaatactgaa

SEQ ID NO: 1419756 - DNA, 15 bp, Homo sapiens
acagtaatactgaag

SEQ ID NO: 1419757 - DNA, 15 bp, Homo sapiens
cagtaatactgaaga

SEQ ID NO: 1419758 - DNA, 15 bp, Homo sapiens
agtaatactgaagac

SEQ ID NO: 1419759 - DNA, 15 bp, Homo sapiens
gtaatactgaagacc

SEQ ID NO: 1419760 - DNA, 15 bp, Homo sapiens
taatactgaagacct

SEQ ID NO: 1419761 - DNA, 15 bp, Homo sapiens
aatactgaagacctt

SEQ ID NO: 1419762 - DNA, 15 bp, Homo sapiens
atactgaagacctta

SEQ ID NO: 1419763 - DNA, 15 bp, Homo sapiens
tactgaagaccttaa

SEQ ID NO: 1419764 - DNA, 15 bp, Homo sapiens
actgaagaccttaat

SEQ ID NO: 1419765 - DNA, 15 bp, Homo sapiens
ctgaagaccttaatg

SEQ ID NO: 1419766 - DNA, 15 bp, Homo sapiens
tgaagaccttaatgt

SEQ ID NO: 1419767 - DNA, 15 bp, Homo sapiens
gaagaccttaatgtg

SEQ ID NO: 1419768 - DNA, 15 bp, Homo sapiens
aagaccttaatgtga

SEQ ID NO: 1419769 - DNA, 15 bp, Homo sapiens
agaccttaatgtgag

SEQ ID NO: 1419770 - DNA, 15 bp, Homo sapiens
gaccttaatgtgagt

SEQ ID NO: 1419771 - DNA, 15 bp, Homo sapiens
accttaatgtgagtt

SEQ ID NO: 1419772 - DNA, 15 bp, Homo sapiens
ccttaatgtgagttt

SEQ ID NO: 1419773 - DNA, 15 bp, Homo sapiens
cttaatgtgagttta

SEQ ID NO: 1419774 - DNA, 15 bp, Homo sapiens
ttaatgtgagtttag

SEQ ID NO: 1419775 - DNA, 15 bp, Homo sapiens
taatgtgagtttagg

SEQ ID NO: 1419776 - DNA, 15 bp, Homo sapiens
aatgtgagtttagga

SEQ ID NO: 1419777 - DNA, 15 bp, Homo sapiens
atgtgagtttaggag

SEQ ID NO: 1419778 - DNA, 15 bp, Homo sapiens
tgtgagtttaggaga

SEQ ID NO: 1419779 - DNA, 15 bp, Homo sapiens
gtgagtttaggagaa

SEQ ID NO: 1419780 - DNA, 15 bp, Homo sapiens
tgagtttaggagaaa

SEQ ID NO: 1419781 - DNA, 15 bp, Homo sapiens
gagtttaggagaaaa

SEQ ID NO: 1419782 - DNA, 15 bp, Homo sapiens
agtttaggagaaaag

SEQ ID NO: 1419783 - DNA, 15 bp, Homo sapiens
gtttaggagaaaaga

SEQ ID NO: 1419784 - DNA, 15 bp, Homo sapiens
tttaggagaaaagat

SEQ ID NO: 1419785 - DNA, 15 bp, Homo sapiens
taggagaaaagatgt

SEQ ID NO: 1419786 - DNA, 15 bp, Homo sapiens
aggagaaaagatgtt

SEQ ID NO: 1419787 - DNA, 15 bp, Homo sapiens
ggagaaaagatgtta

SEQ ID NO: 1419788 - DNA, 15 bp, Homo sapiens
gagaaaagatgttaa

SEQ ID NO: 1419789 - DNA, 15 bp, Homo sapiens
agaaaagatgttaat

SEQ ID NO: 1419790 - DNA, 15 bp, Homo sapiens
gaaaagatgttaatc

SEQ ID NO: 1419791 - DNA, 15 bp, Homo sapiens
aaaagatgttaatca

SEQ ID NO: 1419792 - DNA, 15 bp, Homo sapiens
aaagatgttaatcac

SEQ ID NO: 1419793 - DNA, 15 bp, Homo sapiens
aagatgttaatcacc

SEQ ID NO: 1419794 - DNA, 15 bp, Homo sapiens
agatgttaatcacca

SEQ ID NO: 1419795 - DNA, 15 bp, Homo sapiens
gatgttaatcaccag

SEQ ID NO: 1419796 - DNA, 15 bp, Homo sapiens
atgttaatcaccagt

SEQ ID NO: 1419797 - DNA, 15 bp, Homo sapiens
tgttaatcaccagtt

SEQ ID NO: 1419798 - DNA, 15 bp, Homo sapiens
gttaatcaccagttt

SEQ ID NO: 1419799 - DNA, 15 bp, Homo sapiens
ttaatcaccagtttc

SEQ ID NO: 1419800 - DNA, 15 bp, Homo sapiens
taatcaccagtttcc

SEQ ID NO: 1419801 - DNA, 15 bp, Homo sapiens
aatcaccagtttcct

SEQ ID NO: 1419802 - DNA, 15 bp, Homo sapiens
atcaccagtttcctg

SEQ ID NO: 1419803 - DNA, 15 bp, Homo sapiens
tcaccagtttcctgc

SEQ ID NO: 1419804 - DNA, 15 bp, Homo sapiens
caccagtttcctgct

SEQ ID NO: 1419805 - DNA, 15 bp, Homo sapiens
accagtttcctgcta

SEQ ID NO: 1419806 - DNA, 15 bp, Homo sapiens
ccagtttcctgctac

SEQ ID NO: 1419807 - DNA, 15 bp, Homo sapiens
cagtttcctgctact

SEQ ID NO: 1419808 - DNA, 15 bp, Homo sapiens
agtttcctgctactg

SEQ ID NO: 1419809 - DNA, 15 bp, Homo sapiens
gtttcctgctactgg

SEQ ID NO: 1419810 - DNA, 15 bp, Homo sapiens
tttcctgctactggt

SEQ ID NO: 1419811 - DNA, 15 bp, Homo sapiens
ttcctgctactggtt

SEQ ID NO: 1419812 - DNA, 15 bp, Homo sapiens
tcctgctactggttt

SEQ ID NO: 1419813 - DNA, 15 bp, Homo sapiens
cctgctactggtttt

SEQ ID NO: 1419814 - DNA, 15 bp, Homo sapiens
ctgctactggtttta

SEQ ID NO: 1419815 - DNA, 15 bp, Homo sapiens
tgctactggttttaa

SEQ ID NO: 1419816 - DNA, 15 bp, Homo sapiens
gctactggttttaaa

SEQ ID NO: 1419817 - DNA, 15 bp, Homo sapiens
ctactggttttaaat

SEQ ID NO: 1419818 - DNA, 15 bp, Homo sapiens
tactggttttaaatt

SEQ ID NO: 1419819 - DNA, 15 bp, Homo sapiens
actggttttaaattt

SEQ ID NO: 1419820 - DNA, 15 bp, Homo sapiens
ctggttttaaatttc

SEQ ID NO: 1419821 - DNA, 15 bp, Homo sapiens
tggttttaaatttca

SEQ ID NO: 1419822 - DNA, 15 bp, Homo sapiens
ggttttaaatttcat

SEQ ID NO: 1419823 - DNA, 15 bp, Homo sapiens
gttttaaatttcata

SEQ ID NO: 1419824 - DNA, 15 bp, Homo sapiens
ttttaaatttcatag

SEQ ID NO: 1419825 - DNA, 15 bp, Homo sapiens
tttaaatttcataga

SEQ ID NO: 1419826 - DNA, 15 bp, Homo sapiens
ttaaatttcatagag

SEQ ID NO: 1419827 - DNA, 15 bp, Homo sapiens
taaatttcatagagg

SEQ ID NO: 1419828 - DNA, 15 bp, Homo sapiens
aaatttcatagagga

SEQ ID NO: 1419829 - DNA, 15 bp, Homo sapiens
aatttcatagaggaa

SEQ ID NO: 1419830 - DNA, 15 bp, Homo sapiens
atttcatagaggaag

SEQ ID NO: 1419831 - DNA, 15 bp, Homo sapiens
tttcatagaggaagc

SEQ ID NO: 1419832 - DNA, 15 bp, Homo sapiens
ttcatagaggaagcc

SEQ ID NO: 1419833 - DNA, 15 bp, Homo sapiens
tcatagaggaagcca

SEQ ID NO: 1419834 - DNA, 15 bp, Homo sapiens
catagaggaagccac

SEQ ID NO: 1419835 - DNA, 15 bp, Homo sapiens
atagaggaagccaca

SEQ ID NO: 1419836 - DNA, 15 bp, Homo sapiens
tagaggaagccacac

SEQ ID NO: 1419837 - DNA, 15 bp, Homo sapiens
agaggaagccacact

SEQ ID NO: 1419838 - DNA, 15 bp, Homo sapiens
gaggaagccacactt

SEQ ID NO: 1419839 - DNA, 15 bp, Homo sapiens
aggaagccacactta

SEQ ID NO: 1419840 - DNA, 15 bp, Homo sapiens
ggaagccacacttat

SEQ ID NO: 1419841 - DNA, 15 bp, Homo sapiens
gaagccacacttatt

SEQ ID NO: 1419842 - DNA, 15 bp, Homo sapiens
aagccacacttattt

SEQ ID NO: 1419843 - DNA, 15 bp, Homo sapiens
agccacacttatttt

SEQ ID NO: 1419844 - DNA, 15 bp, Homo sapiens
gccacacttattttg

SEQ ID NO: 1419845 - DNA, 15 bp, Homo sapiens
ccacacttattttgt

SEQ ID NO: 1419846 - DNA, 15 bp, Homo sapiens
cacacttattttgtc

SEQ ID NO: 1419847 - DNA, 15 bp, Homo sapiens
acacttattttgtca

SEQ ID NO: 1419848 - DNA, 15 bp, Homo sapiens
cacttattttgtcat

SEQ ID NO: 1419849 - DNA, 15 bp, Homo sapiens
acttattttgtcatc

SEQ ID NO: 1419850 - DNA, 15 bp, Homo sapiens
cttattttgtcatca

SEQ ID NO: 1419851 - DNA, 15 bp, Homo sapiens
ttattttgtcatcag

SEQ ID NO: 1419852 - DNA, 15 bp, Homo sapiens
tattttgtcatcaga

SEQ ID NO: 1419853 - DNA, 15 bp, Homo sapiens
attttgtcatcagaa

SEQ ID NO: 1419854 - DNA, 15 bp, Homo sapiens
ttttgtcatcagaaa

SEQ ID NO: 1419855 - DNA, 15 bp, Homo sapiens
tttgtcatcagaaat

SEQ ID NO: 1419856 - DNA, 15 bp, Homo sapiens
ttgtcatcagaaatt

SEQ ID NO: 1419857 - DNA, 15 bp, Homo sapiens
tgtcatcagaaattc

SEQ ID NO: 1419858 - DNA, 15 bp, Homo sapiens
gtcatcagaaattct

SEQ ID NO: 1419859 - DNA, 15 bp, Homo sapiens
tcatcagaaattctt

SEQ ID NO: 1419860 - DNA, 15 bp, Homo sapiens
catcagaaattctta

SEQ ID NO: 1419861 - DNA, 15 bp, Homo sapiens
atcagaaattcttat

SEQ ID NO: 1419862 - DNA, 15 bp, Homo sapiens
tcagaaattcttata

SEQ ID NO: 1419863 - DNA, 15 bp, Homo sapiens
cagaaattcttatat

SEQ ID NO: 1419864 - DNA, 15 bp, Homo sapiens
agaaattcttatatt

SEQ ID NO: 1419865 - DNA, 15 bp, Homo sapiens
gaaattcttatattt

SEQ ID NO: 1419866 - DNA, 15 bp, Homo sapiens
aaattcttatatttt

SEQ ID NO: 1419867 - DNA, 15 bp, Homo sapiens
aattcttatattttt

SEQ ID NO: 1419868 - DNA, 15 bp, Homo sapiens
attcttatatttttt

SEQ ID NO: 1419869 - DNA, 15 bp, Homo sapiens
ttcttatattttttg

SEQ ID NO: 1419870 - DNA, 15 bp, Homo sapiens
tcttatattttttgt

SEQ ID NO: 1419871 - DNA, 15 bp, Homo sapiens
cttatattttttgtt

SEQ ID NO: 1419872 - DNA, 15 bp, Homo sapiens
ttatattttttgttt

SEQ ID NO: 1419873 - DNA, 15 bp, Homo sapiens
tatattttttgttta

SEQ ID NO: 1419874 - DNA, 15 bp, Homo sapiens
atattttttgtttaa

SEQ ID NO: 1419875 - DNA, 15 bp, Homo sapiens
tattttttgtttaaa

SEQ ID NO: 1419876 - DNA, 15 bp, Homo sapiens
attttttgtttaaat

SEQ ID NO: 1419877 - DNA, 15 bp, Homo sapiens
ttttttgtttaaatt

SEQ ID NO: 1419878 - DNA, 15 bp, Homo sapiens
tttttgtttaaattc

SEQ ID NO: 1419879 - DNA, 15 bp, Homo sapiens
ttttgtttaaattct

SEQ ID NO: 1419880 - DNA, 15 bp, Homo sapiens
tttgtttaaattctc

SEQ ID NO: 1419881 - DNA, 15 bp, Homo sapiens
ttgtttaaattctca

SEQ ID NO: 1419882 - DNA, 15 bp, Homo sapiens
tgtttaaattctcat

SEQ ID NO: 1419883 - DNA, 15 bp, Homo sapiens
gtttaaattctcatc

SEQ ID NO: 1419884 - DNA, 15 bp, Homo sapiens
tttaaattctcatct

SEQ ID NO: 1419885 - DNA, 15 bp, Homo sapiens
ttaaattctcatctc

SEQ ID NO: 1419886 - DNA, 15 bp, Homo sapiens
taaattctcatctcc

SEQ ID NO: 1419887 - DNA, 15 bp, Homo sapiens
aaattctcatctccc

SEQ ID NO: 1419888 - DNA, 15 bp, Homo sapiens
aattctcatctccct

SEQ ID NO: 1419889 - DNA, 15 bp, Homo sapiens
attctcatctccctc

SEQ ID NO: 1419890 - DNA, 15 bp, Homo sapiens
ttctcatctccctcc

SEQ ID NO: 1419891 - DNA, 15 bp, Homo sapiens
tctcatctccctccc

SEQ ID NO: 1419892 - DNA, 15 bp, Homo sapiens
ctcatctccctcccc

SEQ ID NO: 1419893 - DNA, 15 bp, Homo sapiens
tcatctccctcccct

SEQ ID NO: 1419894 - DNA, 15 bp, Homo sapiens
catctccctcccctc

SEQ ID NO: 1419895 - DNA, 15 bp, Homo sapiens
atctccctcccctct

SEQ ID NO: 1419896 - DNA, 15 bp, Homo sapiens
tctccctcccctctt

SEQ ID NO: 1419897 - DNA, 15 bp, Homo sapiens
ctccctcccctcttg

SEQ ID NO: 1419898 - DNA, 15 bp, Homo sapiens
tccctcccctcttgc

SEQ ID NO: 1419899 - DNA, 15 bp, Homo sapiens
ccctcccctcttgcc

SEQ ID NO: 1419900 - DNA, 15 bp, Homo sapiens
cctcccctcttgccc

SEQ ID NO: 1419901 - DNA, 15 bp, Homo sapiens
ctcccctcttgccca

SEQ ID NO: 1419902 - DNA, 15 bp, Homo sapiens
tcccctcttgcccag

SEQ ID NO: 1419903 - DNA, 15 bp, Homo sapiens
cccctcttgcccaga

SEQ ID NO: 1419904 - DNA, 15 bp, Homo sapiens
ccctcttgcccagat

SEQ ID NO: 1419905 - DNA, 15 bp, Homo sapiens
cctcttgcccagatc

SEQ ID NO: 1419906 - DNA, 15 bp, Homo sapiens
ctcttgcccagatct

SEQ ID NO: 1419907 - DNA, 15 bp, Homo sapiens
tcttgcccagatctg

SEQ ID NO: 1419908 - DNA, 15 bp, Homo sapiens
cttgcccagatctgg

SEQ ID NO: 1419909 - DNA, 15 bp, Homo sapiens
ttgcccagatctggt

SEQ ID NO: 1419910 - DNA, 15 bp, Homo sapiens
tgcccagatctggtt

SEQ ID NO: 1419911 - DNA, 15 bp, Homo sapiens
gcccagatctggttt

SEQ ID NO: 1419912 - DNA, 15 bp, Homo sapiens
cccagatctggtttt

SEQ ID NO: 1419913 - DNA, 15 bp, Homo sapiens
ccagatctggttttt

SEQ ID NO: 1419914 - DNA, 15 bp, Homo sapiens
cagatctggtttttt

SEQ ID NO: 1419915 - DNA, 15 bp, Homo sapiens
agatctggttttttg

SEQ ID NO: 1419916 - DNA, 15 bp, Homo sapiens
gatctggttttttgg

SEQ ID NO: 1419917 - DNA, 15 bp, Homo sapiens
atctggttttttggc

SEQ ID NO: 1419918 - DNA, 15 bp, Homo sapiens
tctggttttttggct

SEQ ID NO: 1419919 - DNA, 15 bp, Homo sapiens
ctggttttttggcta

SEQ ID NO: 1419920 - DNA, 15 bp, Homo sapiens
tggttttttggctag

SEQ ID NO: 1419921 - DNA, 15 bp, Homo sapiens
ggttttttggctaga

SEQ ID NO: 1419922 - DNA, 15 bp, Homo sapiens
gttttttggctagaa

SEQ ID NO: 1419923 - DNA, 15 bp, Homo sapiens
ttttttggctagaaa

SEQ ID NO: 1419924 - DNA, 15 bp, Homo sapiens
tttttggctagaaac

SEQ ID NO: 1419925 - DNA, 15 bp, Homo sapiens
ttttggctagaaaca

SEQ ID NO: 1419926 - DNA, 15 bp, Homo sapiens
tttggctagaaacaa

SEQ ID NO: 1419927 - DNA, 15 bp, Homo sapiens
ttggctagaaacaac

SEQ ID NO: 1419928 - DNA, 15 bp, Homo sapiens
tggctagaaacaact

SEQ ID NO: 1419929 - DNA, 15 bp, Homo sapiens
ggctagaaacaactt

SEQ ID NO: 1419930 - DNA, 15 bp, Homo sapiens
gctagaaacaactta

SEQ ID NO: 1419931 - DNA, 15 bp, Homo sapiens
ctagaaacaacttac

SEQ ID NO: 1419932 - DNA, 15 bp, Homo sapiens
tagaaacaacttaca

SEQ ID NO: 1419933 - DNA, 15 bp, Homo sapiens
agaaacaacttacag

SEQ ID NO: 1419934 - DNA, 15 bp, Homo sapiens
gaaacaacttacagt

SEQ ID NO: 1419935 - DNA, 15 bp, Homo sapiens
aaacaacttacagta

SEQ ID NO: 1419936 - DNA, 15 bp, Homo sapiens
aacaacttacagtaa

SEQ ID NO: 1419937 - DNA, 15 bp, Homo sapiens
acaacttacagtaac

SEQ ID NO: 1419938 - DNA, 15 bp, Homo sapiens
caacttacagtaact

SEQ ID NO: 1419939 - DNA, 15 bp, Homo sapiens
aacttacagtaactt

SEQ ID NO: 1419940 - DNA, 15 bp, Homo sapiens
acttacagtaacttc

SEQ ID NO: 1419941 - DNA, 15 bp, Homo sapiens
cttacagtaacttca

SEQ ID NO: 1419942 - DNA, 15 bp, Homo sapiens
ttacagtaacttcaa

SEQ ID NO: 1419943 - DNA, 15 bp, Homo sapiens
tacagtaacttcaaa

SEQ ID NO: 1419944 - DNA, 15 bp, Homo sapiens
acagtaacttcaaat

SEQ ID NO: 1419945 - DNA, 15 bp, Homo sapiens
cagtaacttcaaatt

SEQ ID NO: 1419946 - DNA, 15 bp, Homo sapiens
agtaacttcaaatta

SEQ ID NO: 1419947 - DNA, 15 bp, Homo sapiens
gtaacttcaaattaa

SEQ ID NO: 1419948 - DNA, 15 bp, Homo sapiens
taacttcaaattaag

SEQ ID NO: 1419949 - DNA, 15 bp, Homo sapiens
aacttcaaattaagc

SEQ ID NO: 1419950 - DNA, 15 bp, Homo sapiens
acttcaaattaagca

SEQ ID NO: 1419951 - DNA, 15 bp, Homo sapiens
cttcaaattaagcat

SEQ ID NO: 1419952 - DNA, 15 bp, Homo sapiens
ttcaaattaagcatt

SEQ ID NO: 1419953 - DNA, 15 bp, Homo sapiens
tcaaattaagcattt

SEQ ID NO: 1419954 - DNA, 15 bp, Homo sapiens
caaattaagcatttt

SEQ ID NO: 1419955 - DNA, 15 bp, Homo sapiens
aaattaagcatttta

SEQ ID NO: 1419956 - DNA, 15 bp, Homo sapiens
aattaagcattttaa

SEQ ID NO: 1419957 - DNA, 15 bp, Homo sapiens
attaagcattttaat

SEQ ID NO: 1419958 - DNA, 15 bp, Homo sapiens
ttaagcattttaatt

SEQ ID NO: 1419959 - DNA, 15 bp, Homo sapiens
taagcattttaattc

SEQ ID NO: 1419960 - DNA, 15 bp, Homo sapiens
aagcattttaattct

SEQ ID NO: 1419961 - DNA, 15 bp, Homo sapiens
agcattttaattcta

SEQ ID NO: 1419962 - DNA, 15 bp, Homo sapiens
gcattttaattctaa

SEQ ID NO: 1419963 - DNA, 15 bp, Homo sapiens
cattttaattctaag

SEQ ID NO: 1419964 - DNA, 15 bp, Homo sapiens
attttaattctaagg

SEQ ID NO: 1419965 - DNA, 15 bp, Homo sapiens
ttttaattctaagga

SEQ ID NO: 1419966 - DNA, 15 bp, Homo sapiens
tttaattctaaggaa

SEQ ID NO: 1419967 - DNA, 15 bp, Homo sapiens
ttaattctaaggaat

SEQ ID NO: 1419968 - DNA, 15 bp, Homo sapiens
taattctaaggaatg

SEQ ID NO: 1419969 - DNA, 15 bp, Homo sapiens
aattctaaggaatgg

SEQ ID NO: 1419970 - DNA, 15 bp, Homo sapiens
attctaaggaatggt

SEQ ID NO: 1419971 - DNA, 15 bp, Homo sapiens
ttctaaggaatggtc

SEQ ID NO: 1419972 - DNA, 15 bp, Homo sapiens
tctaaggaatggtct

SEQ ID NO: 1419973 - DNA, 15 bp, Homo sapiens
ctaaggaatggtctt

SEQ ID NO: 1419974 - DNA, 15 bp, Homo sapiens
taaggaatggtctta

SEQ ID NO: 1419975 - DNA, 15 bp, Homo sapiens
aaggaatggtcttaa

SEQ ID NO: 1419976 - DNA, 15 bp, Homo sapiens
aggaatggtcttaag

SEQ ID NO: 1419977 - DNA, 15 bp, Homo sapiens
ggaatggtcttaagt

SEQ ID NO: 1419978 - DNA, 15 bp, Homo sapiens
gaatggtcttaagtg

SEQ ID NO: 1419979 - DNA, 15 bp, Homo sapiens
aatggtcttaagtga

SEQ ID NO: 1419980 - DNA, 15 bp, Homo sapiens
atggtcttaagtgaa

SEQ ID NO: 1419981 - DNA, 15 bp, Homo sapiens
tggtcttaagtgaac

SEQ ID NO: 1419982 - DNA, 15 bp, Homo sapiens
ggtcttaagtgaacc

SEQ ID NO: 1419983 - DNA, 15 bp, Homo sapiens
gtcttaagtgaacca

SEQ ID NO: 1419984 - DNA, 15 bp, Homo sapiens
tcttaagtgaaccaa

SEQ ID NO: 1419985 - DNA, 15 bp, Homo sapiens
cttaagtgaaccaat

SEQ ID NO: 1419986 - DNA, 15 bp, Homo sapiens
ttaagtgaaccaatg

SEQ ID NO: 1419987 - DNA, 15 bp, Homo sapiens
taagtgaaccaatgt

SEQ ID NO: 1419988 - DNA, 15 bp, Homo sapiens
aagtgaaccaatgta

SEQ ID NO: 1419989 - DNA, 15 bp, Homo sapiens
agtgaaccaatgtat

SEQ ID NO: 1419990 - DNA, 15 bp, Homo sapiens
gtgaaccaatgtata

SEQ ID NO: 1419991 - DNA, 15 bp, Homo sapiens
tgaaccaatgtatat

SEQ ID NO: 1419992 - DNA, 15 bp, Homo sapiens
gaaccaatgtatata

SEQ ID NO: 1419993 - DNA, 15 bp, Homo sapiens
aaccaatgtatatag

SEQ ID NO: 1419994 - DNA, 15 bp, Homo sapiens
accaatgtatataga

SEQ ID NO: 1419995 - DNA, 15 bp, Homo sapiens
ccaatgtatatagag

SEQ ID NO: 1419996 - DNA, 15 bp, Homo sapiens
caatgtatatagagt

SEQ ID NO: 1419997 - DNA, 15 bp, Homo sapiens
aatgtatatagagtt

SEQ ID NO: 1419998 - DNA, 15 bp, Homo sapiens
atgtatatagagttt

SEQ ID NO: 1419999 - DNA, 15 bp, Homo sapiens
tgtatatagagtttt

SEQ ID NO: 1420000 - DNA, 15 bp, Homo sapiens
gtatatagagtttta

SEQ ID NO: 1420001 - DNA, 15 bp, Homo sapiens
tatatagagttttat

SEQ ID NO: 1420002 - DNA, 15 bp, Homo sapiens
atatagagttttatc

SEQ ID NO: 1420003 - DNA, 15 bp, Homo sapiens
tatagagttttatct

SEQ ID NO: 1420004 - DNA, 15 bp, Homo sapiens
atagagttttatctt

SEQ ID NO: 1420005 - DNA, 15 bp, Homo sapiens
tagagttttatcttt

SEQ ID NO: 1420006 - DNA, 15 bp, Homo sapiens
agagttttatcttta

SEQ ID NO: 1420007 - DNA, 15 bp, Homo sapiens
gagttttatctttac

SEQ ID NO: 1420008 - DNA, 15 bp, Homo sapiens
agttttatctttact

SEQ ID NO: 1420009 - DNA, 15 bp, Homo sapiens
gttttatctttactt

SEQ ID NO: 1420010 - DNA, 15 bp, Homo sapiens
ttttatctttacttt

SEQ ID NO: 1420011 - DNA, 15 bp, Homo sapiens
tttatctttactttt

SEQ ID NO: 1420012 - DNA, 15 bp, Homo sapiens
ttatctttactttta

SEQ ID NO: 1420013 - DNA, 15 bp, Homo sapiens
tatctttacttttaa

SEQ ID NO: 1420014 - DNA, 15 bp, Homo sapiens
atctttacttttaaa

SEQ ID NO: 1420015 - DNA, 15 bp, Homo sapiens
tctttacttttaaaa

SEQ ID NO: 1420016 - DNA, 15 bp, Homo sapiens
ctttacttttaaaag

SEQ ID NO: 1420017 - DNA, 15 bp, Homo sapiens
tttacttttaaaagg

SEQ ID NO: 1420018 - DNA, 15 bp, Homo sapiens
ttacttttaaaaggt

SEQ ID NO: 1420019 - DNA, 15 bp, Homo sapiens
tacttttaaaaggtc

SEQ ID NO: 1420020 - DNA, 15 bp, Homo sapiens
acttttaaaaggtct

SEQ ID NO: 1420021 - DNA, 15 bp, Homo sapiens
cttttaaaaggtctc

SEQ ID NO: 1420022 - DNA, 15 bp, Homo sapiens
ttttaaaaggtctct

SEQ ID NO: 1420023 - DNA, 15 bp, Homo sapiens
tttaaaaggtctcta

SEQ ID NO: 1420024 - DNA, 15 bp, Homo sapiens
ttaaaaggtctctaa

SEQ ID NO: 1420025 - DNA, 15 bp, Homo sapiens
taaaaggtctctaaa

SEQ ID NO: 1420026 - DNA, 15 bp, Homo sapiens
aaaaggtctctaaag

SEQ ID NO: 1420027 - DNA, 15 bp, Homo sapiens
aaaggtctctaaagc

SEQ ID NO: 1420028 - DNA, 15 bp, Homo sapiens
aaggtctctaaagca

SEQ ID NO: 1420029 - DNA, 15 bp, Homo sapiens
aggtctctaaagcat

SEQ ID NO: 1420030 - DNA, 15 bp, Homo sapiens
ggtctctaaagcatt

SEQ ID NO: 1420031 - DNA, 15 bp, Homo sapiens
gtctctaaagcattt

SEQ ID NO: 1420032 - DNA, 15 bp, Homo sapiens
tctctaaagcatttt

SEQ ID NO: 1420033 - DNA, 15 bp, Homo sapiens
ctctaaagcattttt

SEQ ID NO: 1420034 - DNA, 15 bp, Homo sapiens
tctaaagcatttttc

SEQ ID NO: 1420035 - DNA, 15 bp, Homo sapiens
ctaaagcatttttct

SEQ ID NO: 1420036 - DNA, 15 bp, Homo sapiens
taaagcatttttctt

SEQ ID NO: 1420037 - DNA, 15 bp, Homo sapiens
aaagcatttttcttc

SEQ ID NO: 1420038 - DNA, 15 bp, Homo sapiens
aagcatttttcttct

SEQ ID NO: 1420039 - DNA, 15 bp, Homo sapiens
agcatttttcttctt

SEQ ID NO: 1420040 - DNA, 15 bp, Homo sapiens
gcatttttcttctta

SEQ ID NO: 1420041 - DNA, 15 bp, Homo sapiens
catttttcttcttat

SEQ ID NO: 1420042 - DNA, 15 bp, Homo sapiens
atttttcttcttatg

SEQ ID NO: 1420043 - DNA, 15 bp, Homo sapiens
tttttcttcttatgg

SEQ ID NO: 1420044 - DNA, 15 bp, Homo sapiens
ttttcttcttatggg

SEQ ID NO: 1420045 - DNA, 15 bp, Homo sapiens
tttcttcttatgggg

SEQ ID NO: 1420046 - DNA, 15 bp, Homo sapiens
ttcttcttatgggga

SEQ ID NO: 1420047 - DNA, 15 bp, Homo sapiens
tcttcttatggggaa

SEQ ID NO: 1420048 - DNA, 15 bp, Homo sapiens
cttcttatggggaaa

SEQ ID NO: 1420049 - DNA, 15 bp, Homo sapiens
ttcttatggggaaat

SEQ ID NO: 1420050 - DNA, 15 bp, Homo sapiens
tcttatggggaaata

SEQ ID NO: 1420051 - DNA, 15 bp, Homo sapiens
cttatggggaaataa

SEQ ID NO: 1420052 - DNA, 15 bp, Homo sapiens
ttatggggaaataaa

SEQ ID NO: 1420053 - DNA, 15 bp, Homo sapiens
tatggggaaataaat

SEQ ID NO: 1420054 - DNA, 15 bp, Homo sapiens
atggggaaataaatt

SEQ ID NO: 1420055 - DNA, 15 bp, Homo sapiens
tggggaaataaattg

SEQ ID NO: 1420056 - DNA, 15 bp, Homo sapiens
ggggaaataaattgg

SEQ ID NO: 1420057 - DNA, 15 bp, Homo sapiens
gggaaataaattggg

SEQ ID NO: 1420058 - DNA, 15 bp, Homo sapiens
ggaaataaattgggt

SEQ ID NO: 1420059 - DNA, 15 bp, Homo sapiens
gaaataaattgggta

SEQ ID NO: 1420060 - DNA, 15 bp, Homo sapiens
aaataaattgggtag

SEQ ID NO: 1420061 - DNA, 15 bp, Homo sapiens
aataaattgggtagt

SEQ ID NO: 1420062 - DNA, 15 bp, Homo sapiens
ataaattgggtagtt

SEQ ID NO: 1420063 - DNA, 15 bp, Homo sapiens
taaattgggtagttt

SEQ ID NO: 1420064 - DNA, 15 bp, Homo sapiens
aaattgggtagttta

SEQ ID NO: 1420065 - DNA, 15 bp, Homo sapiens
aattgggtagtttac

SEQ ID NO: 1420066 - DNA, 15 bp, Homo sapiens
attgggtagtttacc

SEQ ID NO: 1420067 - DNA, 15 bp, Homo sapiens
ttgggtagtttacct

SEQ ID NO: 1420068 - DNA, 15 bp, Homo sapiens
tgggtagtttacctc

SEQ ID NO: 1420069 - DNA, 15 bp, Homo sapiens
gggtagtttacctcg

SEQ ID NO: 1420070 - DNA, 15 bp, Homo sapiens
ggtagtttacctcgt

SEQ ID NO: 1420071 - DNA, 15 bp, Homo sapiens
gtagtttacctcgtc

SEQ ID NO: 1420072 - DNA, 15 bp, Homo sapiens
tagtttacctcgtca

SEQ ID NO: 1420073 - DNA, 15 bp, Homo sapiens
agtttacctcgtcag

SEQ ID NO: 1420074 - DNA, 15 bp, Homo sapiens
gtttacctcgtcagt

SEQ ID NO: 1420075 - DNA, 15 bp, Homo sapiens
tttacctcgtcagta

SEQ ID NO: 1420076 - DNA, 15 bp, Homo sapiens
ttacctcgtcagtag

SEQ ID NO: 1420077 - DNA, 15 bp, Homo sapiens
tacctcgtcagtaga

SEQ ID NO: 1420078 - DNA, 15 bp, Homo sapiens
acctcgtcagtagaa

SEQ ID NO: 1420079 - DNA, 15 bp, Homo sapiens
cctcgtcagtagaaa

SEQ ID NO: 1420080 - DNA, 15 bp, Homo sapiens
ctcgtcagtagaaaa

SEQ ID NO: 1420081 - DNA, 15 bp, Homo sapiens
tcgtcagtagaaaaa

SEQ ID NO: 1420082 - DNA, 15 bp, Homo sapiens
cgtcagtagaaaaaa

SEQ ID NO: 1420083 - DNA, 15 bp, Homo sapiens
gtcagtagaaaaaat

SEQ ID NO: 1420084 - DNA, 15 bp, Homo sapiens
tcagtagaaaaaata

SEQ ID NO: 1420085 - DNA, 15 bp, Homo sapiens
cagtagaaaaaatat

SEQ ID NO: 1420086 - DNA, 15 bp, Homo sapiens
agtagaaaaaatata

SEQ ID NO: 1420087 - DNA, 15 bp, Homo sapiens
gtagaaaaaatatag

SEQ ID NO: 1420088 - DNA, 15 bp, Homo sapiens
tagaaaaaatatagg

SEQ ID NO: 1420089 - DNA, 15 bp, Homo sapiens
agaaaaaatataggg

SEQ ID NO: 1420090 - DNA, 15 bp, Homo sapiens
gaaaaaatataggga

SEQ ID NO: 1420091 - DNA, 15 bp, Homo sapiens
aaaaaatatagggat

SEQ ID NO: 1420092 - DNA, 15 bp, Homo sapiens
aaaaatatagggatt

SEQ ID NO: 1420093 - DNA, 15 bp, Homo sapiens
aaaatatagggattt

SEQ ID NO: 1420094 - DNA, 15 bp, Homo sapiens
aaatatagggatttg

SEQ ID NO: 1420095 - DNA, 15 bp, Homo sapiens
aatatagggatttgt

SEQ ID NO: 1420096 - DNA, 15 bp, Homo sapiens
atatagggatttgtg

SEQ ID NO: 1420097 - DNA, 15 bp, Homo sapiens
tatagggatttgtgt

SEQ ID NO: 1420098 - DNA, 15 bp, Homo sapiens
atagggatttgtgtc

SEQ ID NO: 1420099 - DNA, 15 bp, Homo sapiens
tagggatttgtgtct

SEQ ID NO: 1420100 - DNA, 15 bp, Homo sapiens
agggatttgtgtctt

SEQ ID NO: 1420101 - DNA, 15 bp, Homo sapiens
gggatttgtgtcttt

SEQ ID NO: 1420102 - DNA, 15 bp, Homo sapiens
ggatttgtgtctttg

SEQ ID NO: 1420103 - DNA, 15 bp, Homo sapiens
gatttgtgtctttgc

SEQ ID NO: 1420104 - DNA, 15 bp, Homo sapiens
atttgtgtctttgca

SEQ ID NO: 1420105 - DNA, 15 bp, Homo sapiens
tttgtgtctttgcac

SEQ ID NO: 1420106 - DNA, 15 bp, Homo sapiens
ttgtgtctttgcact

SEQ ID NO: 1420107 - DNA, 15 bp, Homo sapiens
tgtgtctttgcacta

SEQ ID NO: 1420108 - DNA, 15 bp, Homo sapiens
gtgtctttgcactaa

SEQ ID NO: 1420109 - DNA, 15 bp, Homo sapiens
tgtctttgcactaaa

SEQ ID NO: 1420110 - DNA, 15 bp, Homo sapiens
gtctttgcactaaag

SEQ ID NO: 1420111 - DNA, 15 bp, Homo sapiens
tctttgcactaaagt

SEQ ID NO: 1420112 - DNA, 15 bp, Homo sapiens
ctttgcactaaagta

SEQ ID NO: 1420113 - DNA, 15 bp, Homo sapiens
tttgcactaaagtaa

SEQ ID NO: 1420114 - DNA, 15 bp, Homo sapiens
ttgcactaaagtaat

SEQ ID NO: 1420115 - DNA, 15 bp, Homo sapiens
tgcactaaagtaatt

SEQ ID NO: 1420116 - DNA, 15 bp, Homo sapiens
gcactaaagtaattt

SEQ ID NO: 1420117 - DNA, 15 bp, Homo sapiens
cactaaagtaatttc

SEQ ID NO: 1420118 - DNA, 15 bp, Homo sapiens
actaaagtaatttca

SEQ ID NO: 1420119 - DNA, 15 bp, Homo sapiens
ctaaagtaatttcag

SEQ ID NO: 1420120 - DNA, 15 bp, Homo sapiens
taaagtaatttcagg

SEQ ID NO: 1420121 - DNA, 15 bp, Homo sapiens
aaagtaatttcaggg

SEQ ID NO: 1420122 - DNA, 15 bp, Homo sapiens
aagtaatttcagggt

SEQ ID NO: 1420123 - DNA, 15 bp, Homo sapiens
agtaatttcagggtt

SEQ ID NO: 1420124 - DNA, 15 bp, Homo sapiens
gtaatttcagggttg

SEQ ID NO: 1420125 - DNA, 15 bp, Homo sapiens
taatttcagggttgg

SEQ ID NO: 1420126 - DNA, 15 bp, Homo sapiens
aatttcagggttggt

SEQ ID NO: 1420127 - DNA, 15 bp, Homo sapiens
atttcagggttggtc

SEQ ID NO: 1420128 - DNA, 15 bp, Homo sapiens
tttcagggttggtct

SEQ ID NO: 1420129 - DNA, 15 bp, Homo sapiens
ttcagggttggtctt

SEQ ID NO: 1420130 - DNA, 15 bp, Homo sapiens
tcagggttggtcttc

SEQ ID NO: 1420131 - DNA, 15 bp, Homo sapiens
cagggttggtcttct

SEQ ID NO: 1420132 - DNA, 15 bp, Homo sapiens
agggttggtcttctt

SEQ ID NO: 1420133 - DNA, 15 bp, Homo sapiens
gggttggtcttcttt

SEQ ID NO: 1420134 - DNA, 15 bp, Homo sapiens
ggttggtcttctttt

SEQ ID NO: 1420135 - DNA, 15 bp, Homo sapiens
gttggtcttctttta

SEQ ID NO: 1420136 - DNA, 15 bp, Homo sapiens
ttggtcttcttttag

SEQ ID NO: 1420137 - DNA, 15 bp, Homo sapiens
tggtcttcttttagc

SEQ ID NO: 1420138 - DNA, 15 bp, Homo sapiens
ggtcttcttttagct

SEQ ID NO: 1420139 - DNA, 15 bp, Homo sapiens
gtcttcttttagctg

SEQ ID NO: 1420140 - DNA, 15 bp, Homo sapiens
tcttcttttagctgt

SEQ ID NO: 1420141 - DNA, 15 bp, Homo sapiens
cttcttttagctgtc

SEQ ID NO: 1420142 - DNA, 15 bp, Homo sapiens
ttcttttagctgtcc

SEQ ID NO: 1420143 - DNA, 15 bp, Homo sapiens
tcttttagctgtcct

SEQ ID NO: 1420144 - DNA, 15 bp, Homo sapiens
cttttagctgtcctt

SEQ ID NO: 1420145 - DNA, 15 bp, Homo sapiens
ttttagctgtcctta

SEQ ID NO: 1420146 - DNA, 15 bp, Homo sapiens
tttagctgtccttag

SEQ ID NO: 1420147 - DNA, 15 bp, Homo sapiens
ttagctgtccttagt

SEQ ID NO: 1420148 - DNA, 15 bp, Homo sapiens
tagctgtccttagtt

SEQ ID NO: 1420149 - DNA, 15 bp, Homo sapiens
agctgtccttagttt

SEQ ID NO: 1420150 - DNA, 15 bp, Homo sapiens
gctgtccttagtttt

SEQ ID NO: 1420151 - DNA, 15 bp, Homo sapiens
ctgtccttagttttg

SEQ ID NO: 1420152 - DNA, 15 bp, Homo sapiens
tgtccttagttttgg

SEQ ID NO: 1420153 - DNA, 15 bp, Homo sapiens
gtccttagttttggg

SEQ ID NO: 1420154 - DNA, 15 bp, Homo sapiens
tccttagttttggga

SEQ ID NO: 1420155 - DNA, 15 bp, Homo sapiens
ccttagttttgggat

SEQ ID NO: 1420156 - DNA, 15 bp, Homo sapiens
cttagttttgggatt

SEQ ID NO: 1420157 - DNA, 15 bp, Homo sapiens
ttagttttgggatta

SEQ ID NO: 1420158 - DNA, 15 bp, Homo sapiens
tagttttgggattat

SEQ ID NO: 1420159 - DNA, 15 bp, Homo sapiens
agttttgggattatt

SEQ ID NO: 1420160 - DNA, 15 bp, Homo sapiens
gttttgggattattt

SEQ ID NO: 1420161 - DNA, 15 bp, Homo sapiens
ttttgggattatttt

SEQ ID NO: 1420162 - DNA, 15 bp, Homo sapiens
tttgggattattttt

SEQ ID NO: 1420163 - DNA, 15 bp, Homo sapiens
ttgggattatttttg

SEQ ID NO: 1420164 - DNA, 15 bp, Homo sapiens
tgggattatttttgt

SEQ ID NO: 1420165 - DNA, 15 bp, Homo sapiens
gggattatttttgtt

SEQ ID NO: 1420166 - DNA, 15 bp, Homo sapiens
ggattatttttgttt

SEQ ID NO: 1420167 - DNA, 15 bp, Homo sapiens
gattatttttgtttt

SEQ ID NO: 1420168 - DNA, 15 bp, Homo sapiens
attatttttgttttt

SEQ ID NO: 1420169 - DNA, 15 bp, Homo sapiens
ttatttttgtttttc

SEQ ID NO: 1420170 - DNA, 15 bp, Homo sapiens
tatttttgtttttca

SEQ ID NO: 1420171 - DNA, 15 bp, Homo sapiens
atttttgtttttcag

SEQ ID NO: 1420172 - DNA, 15 bp, Homo sapiens
tttttgtttttcaga

SEQ ID NO: 1420173 - DNA, 15 bp, Homo sapiens
ttttgtttttcagaa

SEQ ID NO: 1420174 - DNA, 15 bp, Homo sapiens
tttgtttttcagaat

SEQ ID NO: 1420175 - DNA, 15 bp, Homo sapiens
ttgtttttcagaata

SEQ ID NO: 1420176 - DNA, 15 bp, Homo sapiens
tgtttttcagaataa

SEQ ID NO: 1420177 - DNA, 15 bp, Homo sapiens
gtttttcagaataaa

SEQ ID NO: 1420178 - DNA, 15 bp, Homo sapiens
tttttcagaataaaa

SEQ ID NO: 1420179 - DNA, 15 bp, Homo sapiens
ttttcagaataaaat

SEQ ID NO: 1420180 - DNA, 15 bp, Homo sapiens
tttcagaataaaatg

SEQ ID NO: 1420181 - DNA, 15 bp, Homo sapiens
ttcagaataaaatgg

SEQ ID NO: 1420182 - DNA, 15 bp, Homo sapiens
tcagaataaaatggc

SEQ ID NO: 1420183 - DNA, 15 bp, Homo sapiens
cagaataaaatggca

SEQ ID NO: 1420184 - DNA, 15 bp, Homo sapiens
agaataaaatggcac

SEQ ID NO: 1420185 - DNA, 15 bp, Homo sapiens
gaataaaatggcaca

SEQ ID NO: 1420186 - DNA, 15 bp, Homo sapiens
aataaaatggcacag

SEQ ID NO: 1420187 - DNA, 15 bp, Homo sapiens
ataaaatggcacagg

SEQ ID NO: 1420188 - DNA, 15 bp, Homo sapiens
taaaatggcacaggt

SEQ ID NO: 1420189 - DNA, 15 bp, Homo sapiens
aaaatggcacaggtc

SEQ ID NO: 1420190 - DNA, 15 bp, Homo sapiens
aaatggcacaggtca

SEQ ID NO: 1420191 - DNA, 15 bp, Homo sapiens
aatggcacaggtcag

SEQ ID NO: 1420192 - DNA, 15 bp, Homo sapiens
atggcacaggtcaga

SEQ ID NO: 1420193 - DNA, 15 bp, Homo sapiens
tggcacaggtcagat

SEQ ID NO: 1420194 - DNA, 15 bp, Homo sapiens
ggcacaggtcagata

SEQ ID NO: 1420195 - DNA, 15 bp, Homo sapiens
gcacaggtcagatac

SEQ ID NO: 1420196 - DNA, 15 bp, Homo sapiens
cacaggtcagatact

SEQ ID NO: 1420197 - DNA, 15 bp, Homo sapiens
acaggtcagatactt

SEQ ID NO: 1420198 - DNA, 15 bp, Homo sapiens
caggtcagatacttt

SEQ ID NO: 1420199 - DNA, 15 bp, Homo sapiens
aggtcagatactttt

SEQ ID NO: 1420200 - DNA, 15 bp, Homo sapiens
ggtcagatactttta

SEQ ID NO: 1420201 - DNA, 15 bp, Homo sapiens
gtcagatacttttaa

SEQ ID NO: 1420202 - DNA, 15 bp, Homo sapiens
tcagatacttttaat

SEQ ID NO: 1420203 - DNA, 15 bp, Homo sapiens
cagatacttttaatc

SEQ ID NO: 1420204 - DNA, 15 bp, Homo sapiens
agatacttttaatcc

SEQ ID NO: 1420205 - DNA, 15 bp, Homo sapiens
gatacttttaatccc

SEQ ID NO: 1420206 - DNA, 15 bp, Homo sapiens
atacttttaatcccc

SEQ ID NO: 1420207 - DNA, 15 bp, Homo sapiens
tacttttaatcccct

SEQ ID NO: 1420208 - DNA, 15 bp, Homo sapiens
acttttaatcccctg

SEQ ID NO: 1420209 - DNA, 15 bp, Homo sapiens
cttttaatcccctga

SEQ ID NO: 1420210 - DNA, 15 bp, Homo sapiens
ttttaatcccctgaa

SEQ ID NO: 1420211 - DNA, 15 bp, Homo sapiens
tttaatcccctgaaa

SEQ ID NO: 1420212 - DNA, 15 bp, Homo sapiens
ttaatcccctgaaag

SEQ ID NO: 1420213 - DNA, 15 bp, Homo sapiens
taatcccctgaaagt

SEQ ID NO: 1420214 - DNA, 15 bp, Homo sapiens
aatcccctgaaagta

SEQ ID NO: 1420215 - DNA, 15 bp, Homo sapiens
atcccctgaaagtaa

SEQ ID NO: 1420216 - DNA, 15 bp, Homo sapiens
tcccctgaaagtaat

SEQ ID NO: 1420217 - DNA, 15 bp, Homo sapiens
cccctgaaagtaatc

SEQ ID NO: 1420218 - DNA, 15 bp, Homo sapiens
ccctgaaagtaatct

SEQ ID NO: 1420219 - DNA, 15 bp, Homo sapiens
cctgaaagtaatcta

SEQ ID NO: 1420220 - DNA, 15 bp, Homo sapiens
ctgaaagtaatctaa

SEQ ID NO: 1420221 - DNA, 15 bp, Homo sapiens
tgaaagtaatctaaa

SEQ ID NO: 1420222 - DNA, 15 bp, Homo sapiens
gaaagtaatctaaag

SEQ ID NO: 1420223 - DNA, 15 bp, Homo sapiens
aaagtaatctaaagc

SEQ ID NO: 1420224 - DNA, 15 bp, Homo sapiens
aagtaatctaaagct

SEQ ID NO: 1420225 - DNA, 15 bp, Homo sapiens
agtaatctaaagcta

SEQ ID NO: 1420226 - DNA, 15 bp, Homo sapiens
gtaatctaaagctat

SEQ ID NO: 1420227 - DNA, 15 bp, Homo sapiens
taatctaaagctata

SEQ ID NO: 1420228 - DNA, 15 bp, Homo sapiens
aatctaaagctatag

SEQ ID NO: 1420229 - DNA, 15 bp, Homo sapiens
atctaaagctataga

SEQ ID NO: 1420230 - DNA, 15 bp, Homo sapiens
tctaaagctatagaa

SEQ ID NO: 1420231 - DNA, 15 bp, Homo sapiens
ctaaagctatagaaa

SEQ ID NO: 1420232 - DNA, 15 bp, Homo sapiens
taaagctatagaaat

SEQ ID NO: 1420233 - DNA, 15 bp, Homo sapiens
aaagctatagaaatg

SEQ ID NO: 1420234 - DNA, 15 bp, Homo sapiens
aagctatagaaatgg

SEQ ID NO: 1420235 - DNA, 15 bp, Homo sapiens
agctatagaaatgga

SEQ ID NO: 1420236 - DNA, 15 bp, Homo sapiens
gctatagaaatggag

SEQ ID NO: 1420237 - DNA, 15 bp, Homo sapiens
ctatagaaatggagc

SEQ ID NO: 1420238 - DNA, 15 bp, Homo sapiens
tatagaaatggagct

SEQ ID NO: 1420239 - DNA, 15 bp, Homo sapiens
atagaaatggagctg

SEQ ID NO: 1420240 - DNA, 15 bp, Homo sapiens
tagaaatggagctgt

SEQ ID NO: 1420241 - DNA, 15 bp, Homo sapiens
agaaatggagctgtg

SEQ ID NO: 1420242 - DNA, 15 bp, Homo sapiens
gaaatggagctgtgg

SEQ ID NO: 1420243 - DNA, 15 bp, Homo sapiens
aaatggagctgtggc

SEQ ID NO: 1420244 - DNA, 15 bp, Homo sapiens
aatggagctgtggct

SEQ ID NO: 1420245 - DNA, 15 bp, Homo sapiens
atggagctgtggctg

SEQ ID NO: 1420246 - DNA, 15 bp, Homo sapiens
tggagctgtggctgt

SEQ ID NO: 1420247 - DNA, 15 bp, Homo sapiens
ggagctgtggctgtc

SEQ ID NO: 1420248 - DNA, 15 bp, Homo sapiens
gagctgtggctgtcg

SEQ ID NO: 1420249 - DNA, 15 bp, Homo sapiens
agctgtggctgtcgc

SEQ ID NO: 1420250 - DNA, 15 bp, Homo sapiens
gctgtggctgtcgca

SEQ ID NO: 1420251 - DNA, 15 bp, Homo sapiens
ctgtggctgtcgcag

SEQ ID NO: 1420252 - DNA, 15 bp, Homo sapiens
tgtggctgtcgcaga

SEQ ID NO: 1420253 - DNA, 15 bp, Homo sapiens
gtggctgtcgcagag

SEQ ID NO: 1420254 - DNA, 15 bp, Homo sapiens
tggctgtcgcagaga

SEQ ID NO: 1420255 - DNA, 15 bp, Homo sapiens
ggctgtcgcagagac

SEQ ID NO: 1420256 - DNA, 15 bp, Homo sapiens
gctgtcgcagagact

SEQ ID NO: 1420257 - DNA, 15 bp, Homo sapiens
ctgtcgcagagactt

SEQ ID NO: 1420258 - DNA, 15 bp, Homo sapiens
tgtcgcagagactta

SEQ ID NO: 1420259 - DNA, 15 bp, Homo sapiens
gtcgcagagacttac

SEQ ID NO: 1420260 - DNA, 15 bp, Homo sapiens
tcgcagagacttact

SEQ ID NO: 1420261 - DNA, 15 bp, Homo sapiens
cgcagagacttacta

SEQ ID NO: 1420262 - DNA, 15 bp, Homo sapiens
gcagagacttactag

SEQ ID NO: 1420263 - DNA, 15 bp, Homo sapiens
cagagacttactagg

SEQ ID NO: 1420264 - DNA, 15 bp, Homo sapiens
agagacttactagga

SEQ ID NO: 1420265 - DNA, 15 bp, Homo sapiens
gagacttactaggat

SEQ ID NO: 1420266 - DNA, 15 bp, Homo sapiens
agacttactaggatg

SEQ ID NO: 1420267 - DNA, 15 bp, Homo sapiens
gacttactaggatga

SEQ ID NO: 1420268 - DNA, 15 bp, Homo sapiens
acttactaggatgaa

SEQ ID NO: 1420269 - DNA, 15 bp, Homo sapiens
cttactaggatgaag

SEQ ID NO: 1420270 - DNA, 15 bp, Homo sapiens
ttactaggatgaagg

SEQ ID NO: 1420271 - DNA, 15 bp, Homo sapiens
tactaggatgaaggt

SEQ ID NO: 1420272 - DNA, 15 bp, Homo sapiens
actaggatgaaggtt

SEQ ID NO: 1420273 - DNA, 15 bp, Homo sapiens
ctaggatgaaggttg

SEQ ID NO: 1420274 - DNA, 15 bp, Homo sapiens
taggatgaaggttgg

SEQ ID NO: 1420275 - DNA, 15 bp, Homo sapiens
aggatgaaggttggt

SEQ ID NO: 1420276 - DNA, 15 bp, Homo sapiens
ggatgaaggttggtg

SEQ ID NO: 1420277 - DNA, 15 bp, Homo sapiens
gatgaaggttggtgt

SEQ ID NO: 1420278 - DNA, 15 bp, Homo sapiens
atgaaggttggtgta

SEQ ID NO: 1420279 - DNA, 15 bp, Homo sapiens
tgaaggttggtgtag

SEQ ID NO: 1420280 - DNA, 15 bp, Homo sapiens
gaaggttggtgtaga

SEQ ID NO: 1420281 - DNA, 15 bp, Homo sapiens
aaggttggtgtagaa

SEQ ID NO: 1420282 - DNA, 15 bp, Homo sapiens
aggttggtgtagaaa

SEQ ID NO: 1420283 - DNA, 15 bp, Homo sapiens
ggttggtgtagaaaa

SEQ ID NO: 1420284 - DNA, 15 bp, Homo sapiens
gttggtgtagaaaaa

SEQ ID NO: 1420285 - DNA, 15 bp, Homo sapiens
ttggtgtagaaaaac

SEQ ID NO: 1420286 - DNA, 15 bp, Homo sapiens
tggtgtagaaaaact

SEQ ID NO: 1420287 - DNA, 15 bp, Homo sapiens
ggtgtagaaaaacta

SEQ ID NO: 1420288 - DNA, 15 bp, Homo sapiens
gtgtagaaaaactaa

SEQ ID NO: 1420289 - DNA, 15 bp, Homo sapiens
tgtagaaaaactaag

SEQ ID NO: 1420290 - DNA, 15 bp, Homo sapiens
gtagaaaaactaagg

SEQ ID NO: 1420291 - DNA, 15 bp, Homo sapiens
tagaaaaactaagga

SEQ ID NO: 1420292 - DNA, 15 bp, Homo sapiens
agaaaaactaaggag

SEQ ID NO: 1420293 - DNA, 15 bp, Homo sapiens
gaaaaactaaggagt

SEQ ID NO: 1420294 - DNA, 15 bp, Homo sapiens
aaaaactaaggagta

SEQ ID NO: 1420295 - DNA, 15 bp, Homo sapiens
aaaactaaggagtag

SEQ ID NO: 1420296 - DNA, 15 bp, Homo sapiens
aaactaaggagtagt

SEQ ID NO: 1420297 - DNA, 15 bp, Homo sapiens
aactaaggagtagta

SEQ ID NO: 1420298 - DNA, 15 bp, Homo sapiens
actaaggagtagtag

SEQ ID NO: 1420299 - DNA, 15 bp, Homo sapiens
ctaaggagtagtagc

SEQ ID NO: 1420300 - DNA, 15 bp, Homo sapiens
taaggagtagtagca

SEQ ID NO: 1420301 - DNA, 15 bp, Homo sapiens
aaggagtagtagcag

SEQ ID NO: 1420302 - DNA, 15 bp, Homo sapiens
aggagtagtagcagt

SEQ ID NO: 1420303 - DNA, 15 bp, Homo sapiens
ggagtagtagcagta

SEQ ID NO: 1420304 - DNA, 15 bp, Homo sapiens
gagtagtagcagtat

SEQ ID NO: 1420305 - DNA, 15 bp, Homo sapiens
agtagtagcagtatt

SEQ ID NO: 1420306 - DNA, 15 bp, Homo sapiens
gtagtagcagtattc

SEQ ID NO: 1420307 - DNA, 15 bp, Homo sapiens
tagtagcagtattca

SEQ ID NO: 1420308 - DNA, 15 bp, Homo sapiens
agtagcagtattcag

SEQ ID NO: 1420309 - DNA, 15 bp, Homo sapiens
gtagcagtattcagt

SEQ ID NO: 1420310 - DNA, 15 bp, Homo sapiens
tagcagtattcagtg

SEQ ID NO: 1420311 - DNA, 15 bp, Homo sapiens
agcagtattcagtgt

SEQ ID NO: 1420312 - DNA, 15 bp, Homo sapiens
gcagtattcagtgtc

SEQ ID NO: 1420313 - DNA, 15 bp, Homo sapiens
cagtattcagtgtcc

SEQ ID NO: 1420314 - DNA, 15 bp, Homo sapiens
agtattcagtgtccc

SEQ ID NO: 1420315 - DNA, 15 bp, Homo sapiens
gtattcagtgtcccg

SEQ ID NO: 1420316 - DNA, 15 bp, Homo sapiens
tattcagtgtcccgt

SEQ ID NO: 1420317 - DNA, 15 bp, Homo sapiens
attcagtgtcccgtg

SEQ ID NO: 1420318 - DNA, 15 bp, Homo sapiens
ttcagtgtcccgtgt

SEQ ID NO: 1420319 - DNA, 15 bp, Homo sapiens
tcagtgtcccgtgtc

SEQ ID NO: 1420320 - DNA, 15 bp, Homo sapiens
cagtgtcccgtgtct

SEQ ID NO: 1420321 - DNA, 15 bp, Homo sapiens
agtgtcccgtgtctt

SEQ ID NO: 1420322 - DNA, 15 bp, Homo sapiens
gtgtcccgtgtcttt

SEQ ID NO: 1420323 - DNA, 15 bp, Homo sapiens
tgtcccgtgtctttc

SEQ ID NO: 1420324 - DNA, 15 bp, Homo sapiens
gtcccgtgtctttcc

SEQ ID NO: 1420325 - DNA, 15 bp, Homo sapiens
tcccgtgtctttccc

SEQ ID NO: 1420326 - DNA, 15 bp, Homo sapiens
cccgtgtctttcccc

SEQ ID NO: 1420327 - DNA, 15 bp, Homo sapiens
ccgtgtctttcccca

SEQ ID NO: 1420328 - DNA, 15 bp, Homo sapiens
cgtgtctttccccag

SEQ ID NO: 1420329 - DNA, 15 bp, Homo sapiens
gtgtctttccccaga

SEQ ID NO: 1420330 - DNA, 15 bp, Homo sapiens
tgtctttccccagaa

SEQ ID NO: 1420331 - DNA, 15 bp, Homo sapiens
gtctttccccagaag

SEQ ID NO: 1420332 - DNA, 15 bp, Homo sapiens
tctttccccagaaga

SEQ ID NO: 1420333 - DNA, 15 bp, Homo sapiens
ctttccccagaagaa

SEQ ID NO: 1420334 - DNA, 15 bp, Homo sapiens
tttccccagaagaac

SEQ ID NO: 1420335 - DNA, 15 bp, Homo sapiens
ttccccagaagaaca

SEQ ID NO: 1420336 - DNA, 15 bp, Homo sapiens
tccccagaagaacac

SEQ ID NO: 1420337 - DNA, 15 bp, Homo sapiens
ccccagaagaacact

SEQ ID NO: 1420338 - DNA, 15 bp, Homo sapiens
cccagaagaacactg

SEQ ID NO: 1420339 - DNA, 15 bp, Homo sapiens
ccagaagaacactgg

SEQ ID NO: 1420340 - DNA, 15 bp, Homo sapiens
cagaagaacactggc

SEQ ID NO: 1420341 - DNA, 15 bp, Homo sapiens
agaagaacactggca

SEQ ID NO: 1420342 - DNA, 15 bp, Homo sapiens
gaagaacactggcag

SEQ ID NO: 1420343 - DNA, 15 bp, Homo sapiens
aagaacactggcaga

SEQ ID NO: 1420344 - DNA, 15 bp, Homo sapiens
agaacactggcagaa

SEQ ID NO: 1420345 - DNA, 15 bp, Homo sapiens
gaacactggcagaac

SEQ ID NO: 1420346 - DNA, 15 bp, Homo sapiens
aacactggcagaaca

SEQ ID NO: 1420347 - DNA, 15 bp, Homo sapiens
acactggcagaacac

SEQ ID NO: 1420348 - DNA, 15 bp, Homo sapiens
cactggcagaacacc

SEQ ID NO: 1420349 - DNA, 15 bp, Homo sapiens
actggcagaacacca

SEQ ID NO: 1420350 - DNA, 15 bp, Homo sapiens
ctggcagaacaccag

SEQ ID NO: 1420351 - DNA, 15 bp, Homo sapiens
tggcagaacaccagg

SEQ ID NO: 1420352 - DNA, 15 bp, Homo sapiens
ggcagaacaccaggg

SEQ ID NO: 1420353 - DNA, 15 bp, Homo sapiens
gcagaacaccagggg

SEQ ID NO: 1420354 - DNA, 15 bp, Homo sapiens
cagaacaccaggggc

SEQ ID NO: 1420355 - DNA, 15 bp, Homo sapiens
agaacaccaggggca

SEQ ID NO: 1420356 - DNA, 15 bp, Homo sapiens
gaacaccaggggcag

SEQ ID NO: 1420357 - DNA, 15 bp, Homo sapiens
aacaccaggggcaga

SEQ ID NO: 1420358 - DNA, 15 bp, Homo sapiens
acaccaggggcagaa

SEQ ID NO: 1420359 - DNA, 15 bp, Homo sapiens
caccaggggcagaac

SEQ ID NO: 1420360 - DNA, 15 bp, Homo sapiens
accaggggcagaaca

SEQ ID NO: 1420361 - DNA, 15 bp, Homo sapiens
ccaggggcagaacac

SEQ ID NO: 1420362 - DNA, 15 bp, Homo sapiens
caggggcagaacact

SEQ ID NO: 1420363 - DNA, 15 bp, Homo sapiens
aggggcagaacactg

SEQ ID NO: 1420364 - DNA, 15 bp, Homo sapiens
ggggcagaacactgt

SEQ ID NO: 1420365 - DNA, 15 bp, Homo sapiens
gggcagaacactgtc

SEQ ID NO: 1420366 - DNA, 15 bp, Homo sapiens
ggcagaacactgtca

SEQ ID NO: 1420367 - DNA, 15 bp, Homo sapiens
gcagaacactgtcac

SEQ ID NO: 1420368 - DNA, 15 bp, Homo sapiens
cagaacactgtcaca

SEQ ID NO: 1420369 - DNA, 15 bp, Homo sapiens
agaacactgtcacac

SEQ ID NO: 1420370 - DNA, 15 bp, Homo sapiens
gaacactgtcacaca

SEQ ID NO: 1420371 - DNA, 15 bp, Homo sapiens
aacactgtcacacac

SEQ ID NO: 1420372 - DNA, 15 bp, Homo sapiens
acactgtcacacact

SEQ ID NO: 1420373 - DNA, 15 bp, Homo sapiens
cactgtcacacacta

SEQ ID NO: 1420374 - DNA, 15 bp, Homo sapiens
actgtcacacactat

SEQ ID NO: 1420375 - DNA, 15 bp, Homo sapiens
ctgtcacacactatt

SEQ ID NO: 1420376 - DNA, 15 bp, Homo sapiens
tgtcacacactattc

SEQ ID NO: 1420377 - DNA, 15 bp, Homo sapiens
gtcacacactattca

SEQ ID NO: 1420378 - DNA, 15 bp, Homo sapiens
tcacacactattcag

SEQ ID NO: 1420379 - DNA, 15 bp, Homo sapiens
cacacactattcaga

SEQ ID NO: 1420380 - DNA, 15 bp, Homo sapiens
acacactattcagag

SEQ ID NO: 1420381 - DNA, 15 bp, Homo sapiens
cacactattcagagc

SEQ ID NO: 1420382 - DNA, 15 bp, Homo sapiens
acactattcagagca

SEQ ID NO: 1420383 - DNA, 15 bp, Homo sapiens
cactattcagagcag

SEQ ID NO: 1420384 - DNA, 15 bp, Homo sapiens
actattcagagcagc

SEQ ID NO: 1420385 - DNA, 15 bp, Homo sapiens
ctattcagagcagcg

SEQ ID NO: 1420386 - DNA, 15 bp, Homo sapiens
tattcagagcagcga

SEQ ID NO: 1420387 - DNA, 15 bp, Homo sapiens
attcagagcagcgat

SEQ ID NO: 1420388 - DNA, 15 bp, Homo sapiens
ttcagagcagcgatt

SEQ ID NO: 1420389 - DNA, 15 bp, Homo sapiens
tcagagcagcgattt

SEQ ID NO: 1420390 - DNA, 15 bp, Homo sapiens
cagagcagcgatttc

SEQ ID NO: 1420391 - DNA, 15 bp, Homo sapiens
agagcagcgatttca

SEQ ID NO: 1420392 - DNA, 15 bp, Homo sapiens
gagcagcgatttcag

SEQ ID NO: 1420393 - DNA, 15 bp, Homo sapiens
agcagcgatttcagg

SEQ ID NO: 1420394 - DNA, 15 bp, Homo sapiens
gcagcgatttcagga

SEQ ID NO: 1420395 - DNA, 15 bp, Homo sapiens
cagcgatttcaggag

SEQ ID NO: 1420396 - DNA, 15 bp, Homo sapiens
agcgatttcaggagc

SEQ ID NO: 1420397 - DNA, 15 bp, Homo sapiens
gcgatttcaggagca

SEQ ID NO: 1420398 - DNA, 15 bp, Homo sapiens
cgatttcaggagcac

SEQ ID NO: 1420399 - DNA, 15 bp, Homo sapiens
gatttcaggagcaca

SEQ ID NO: 1420400 - DNA, 15 bp, Homo sapiens
atttcaggagcacac

SEQ ID NO: 1420401 - DNA, 15 bp, Homo sapiens
tttcaggagcacacc

SEQ ID NO: 1420402 - DNA, 15 bp, Homo sapiens
ttcaggagcacacca

SEQ ID NO: 1420403 - DNA, 15 bp, Homo sapiens
tcaggagcacaccaa

SEQ ID NO: 1420404 - DNA, 15 bp, Homo sapiens
caggagcacaccaag

SEQ ID NO: 1420405 - DNA, 15 bp, Homo sapiens
aggagcacaccaagg

SEQ ID NO: 1420406 - DNA, 15 bp, Homo sapiens
ggagcacaccaaggc

SEQ ID NO: 1420407 - DNA, 15 bp, Homo sapiens
gagcacaccaaggcg

SEQ ID NO: 1420408 - DNA, 15 bp, Homo sapiens
agcacaccaaggcgg

SEQ ID NO: 1420409 - DNA, 15 bp, Homo sapiens
gcacaccaaggcggg

SEQ ID NO: 1420410 - DNA, 15 bp, Homo sapiens
cacaccaaggcgggc

SEQ ID NO: 1420411 - DNA, 15 bp, Homo sapiens
acaccaaggcgggcc

SEQ ID NO: 1420412 - DNA, 15 bp, Homo sapiens
caccaaggcgggcca

SEQ ID NO: 1420413 - DNA, 15 bp, Homo sapiens
accaaggcgggccag

SEQ ID NO: 1420414 - DNA, 15 bp, Homo sapiens
ccaaggcgggccagg

SEQ ID NO: 1420415 - DNA, 15 bp, Homo sapiens
caaggcgggccaggt

SEQ ID NO: 1420416 - DNA, 15 bp, Homo sapiens
aaggcgggccaggtg

SEQ ID NO: 1420417 - DNA, 15 bp, Homo sapiens
aggcgggccaggtgg

SEQ ID NO: 1420418 - DNA, 15 bp, Homo sapiens
ggcgggccaggtggt

SEQ ID NO: 1420419 - DNA, 15 bp, Homo sapiens
gcgggccaggtggtc

SEQ ID NO: 1420420 - DNA, 15 bp, Homo sapiens
cgggccaggtggtca

SEQ ID NO: 1420421 - DNA, 15 bp, Homo sapiens
gggccaggtggtcaa

SEQ ID NO: 1420422 - DNA, 15 bp, Homo sapiens
ggccaggtggtcaag

SEQ ID NO: 1420423 - DNA, 15 bp, Homo sapiens
gccaggtggtcaagg

SEQ ID NO: 1420424 - DNA, 15 bp, Homo sapiens
ccaggtggtcaaggg

SEQ ID NO: 1420425 - DNA, 15 bp, Homo sapiens
caggtggtcaagggg

SEQ ID NO: 1420426 - DNA, 15 bp, Homo sapiens
aggtggtcaaggggc

SEQ ID NO: 1420427 - DNA, 15 bp, Homo sapiens
ggtggtcaaggggct

SEQ ID NO: 1420428 - DNA, 15 bp, Homo sapiens
gtggtcaaggggctt

SEQ ID NO: 1420429 - DNA, 15 bp, Homo sapiens
tggtcaaggggcttc

SEQ ID NO: 1420430 - DNA, 15 bp, Homo sapiens
ggtcaaggggcttcc

SEQ ID NO: 1420431 - DNA, 15 bp, Homo sapiens
gtcaaggggcttccc

SEQ ID NO: 1420432 - DNA, 15 bp, Homo sapiens
tcaaggggcttccca

SEQ ID NO: 1420433 - DNA, 15 bp, Homo sapiens
caaggggcttcccag

SEQ ID NO: 1420434 - DNA, 15 bp, Homo sapiens
aaggggcttcccagg

SEQ ID NO: 1420435 - DNA, 15 bp, Homo sapiens
aggggcttcccaggg

SEQ ID NO: 1420436 - DNA, 15 bp, Homo sapiens
ggggcttcccagggg

SEQ ID NO: 1420437 - DNA, 15 bp, Homo sapiens
gggcttcccagggga

SEQ ID NO: 1420438 - DNA, 15 bp, Homo sapiens
ggcttcccaggggat

SEQ ID NO: 1420439 - DNA, 15 bp, Homo sapiens
gcttcccaggggatg

SEQ ID NO: 1420440 - DNA, 15 bp, Homo sapiens
cttcccaggggatgt

SEQ ID NO: 1420441 - DNA, 15 bp, Homo sapiens
ttcccaggggatgtc

SEQ ID NO: 1420442 - DNA, 15 bp, Homo sapiens
tcccaggggatgtca

SEQ ID NO: 1420443 - DNA, 15 bp, Homo sapiens
cccaggggatgtcat

SEQ ID NO: 1420444 - DNA, 15 bp, Homo sapiens
ccaggggatgtcata

SEQ ID NO: 1420445 - DNA, 15 bp, Homo sapiens
caggggatgtcatac

SEQ ID NO: 1420446 - DNA, 15 bp, Homo sapiens
aggggatgtcataca

SEQ ID NO: 1420447 - DNA, 15 bp, Homo sapiens
ggggatgtcatacaa

SEQ ID NO: 1420448 - DNA, 15 bp, Homo sapiens
gggatgtcatacaag

SEQ ID NO: 1420449 - DNA, 15 bp, Homo sapiens
ggatgtcatacaagg

SEQ ID NO: 1420450 - DNA, 15 bp, Homo sapiens
gatgtcatacaaggc

SEQ ID NO: 1420451 - DNA, 15 bp, Homo sapiens
atgtcatacaaggca

SEQ ID NO: 1420452 - DNA, 15 bp, Homo sapiens
tgtcatacaaggcac

SEQ ID NO: 1420453 - DNA, 15 bp, Homo sapiens
gtcatacaaggcaca

SEQ ID NO: 1420454 - DNA, 15 bp, Homo sapiens
tcatacaaggcacat

SEQ ID NO: 1420455 - DNA, 15 bp, Homo sapiens
catacaaggcacatg

SEQ ID NO: 1420456 - DNA, 15 bp, Homo sapiens
atacaaggcacatgg

SEQ ID NO: 1420457 - DNA, 15 bp, Homo sapiens
tacaaggcacatgga

SEQ ID NO: 1420458 - DNA, 15 bp, Homo sapiens
acaaggcacatggaa

SEQ ID NO: 1420459 - DNA, 15 bp, Homo sapiens
caaggcacatggaaa

SEQ ID NO: 1420460 - DNA, 15 bp, Homo sapiens
aaggcacatggaaag

SEQ ID NO: 1420461 - DNA, 15 bp, Homo sapiens
aggcacatggaaaga

SEQ ID NO: 1420462 - DNA, 15 bp, Homo sapiens
ggcacatggaaagaa

SEQ ID NO: 1420463 - DNA, 15 bp, Homo sapiens
gcacatggaaagaac

SEQ ID NO: 1420464 - DNA, 15 bp, Homo sapiens
cacatggaaagaact

SEQ ID NO: 1420465 - DNA, 15 bp, Homo sapiens
acatggaaagaactg

SEQ ID NO: 1420466 - DNA, 15 bp, Homo sapiens
catggaaagaactgg

SEQ ID NO: 1420467 - DNA, 15 bp, Homo sapiens
atggaaagaactggt

SEQ ID NO: 1420468 - DNA, 15 bp, Homo sapiens
tggaaagaactggtt

SEQ ID NO: 1420469 - DNA, 15 bp, Homo sapiens
ggaaagaactggttt

SEQ ID NO: 1420470 - DNA, 15 bp, Homo sapiens
gaaagaactggttta

SEQ ID NO: 1420471 - DNA, 15 bp, Homo sapiens
aaagaactggtttag

SEQ ID NO: 1420472 - DNA, 15 bp, Homo sapiens
aagaactggtttagg

SEQ ID NO: 1420473 - DNA, 15 bp, Homo sapiens
agaactggtttagga

SEQ ID NO: 1420474 - DNA, 15 bp, Homo sapiens
gaactggtttaggac

SEQ ID NO: 1420475 - DNA, 15 bp, Homo sapiens
aactggtttaggacc

SEQ ID NO: 1420476 - DNA, 15 bp, Homo sapiens
actggtttaggacca

SEQ ID NO: 1420477 - DNA, 15 bp, Homo sapiens
ctggtttaggaccag

SEQ ID NO: 1420478 - DNA, 15 bp, Homo sapiens
tggtttaggaccagg

SEQ ID NO: 1420479 - DNA, 15 bp, Homo sapiens
ggtttaggaccaggt

SEQ ID NO: 1420480 - DNA, 15 bp, Homo sapiens
gtttaggaccaggtt

SEQ ID NO: 1420481 - DNA, 15 bp, Homo sapiens
tttaggaccaggttt

SEQ ID NO: 1420482 - DNA, 15 bp, Homo sapiens
ttaggaccaggtttg

SEQ ID NO: 1420483 - DNA, 15 bp, Homo sapiens
taggaccaggtttgg

SEQ ID NO: 1420484 - DNA, 15 bp, Homo sapiens
aggaccaggtttggc

SEQ ID NO: 1420485 - DNA, 15 bp, Homo sapiens
ggaccaggtttggca

SEQ ID NO: 1420486 - DNA, 15 bp, Homo sapiens
gaccaggtttggcac

SEQ ID NO: 1420487 - DNA, 15 bp, Homo sapiens
accaggtttggcaca

SEQ ID NO: 1420488 - DNA, 15 bp, Homo sapiens
ccaggtttggcacag

SEQ ID NO: 1420489 - DNA, 15 bp, Homo sapiens
caggtttggcacagg

SEQ ID NO: 1420490 - DNA, 15 bp, Homo sapiens
aggtttggcacaggt

SEQ ID NO: 1420491 - DNA, 15 bp, Homo sapiens
ggtttggcacaggtt

SEQ ID NO: 1420492 - DNA, 15 bp, Homo sapiens
gtttggcacaggttc

SEQ ID NO: 1420493 - DNA, 15 bp, Homo sapiens
tttggcacaggttca

SEQ ID NO: 1420494 - DNA, 15 bp, Homo sapiens
ttggcacaggttcac

SEQ ID NO: 1420495 - DNA, 15 bp, Homo sapiens
tggcacaggttcact

SEQ ID NO: 1420496 - DNA, 15 bp, Homo sapiens
ggcacaggttcactg

SEQ ID NO: 1420497 - DNA, 15 bp, Homo sapiens
gcacaggttcactga

SEQ ID NO: 1420498 - DNA, 15 bp, Homo sapiens
cacaggttcactgac

SEQ ID NO: 1420499 - DNA, 15 bp, Homo sapiens
acaggttcactgaca

SEQ ID NO: 1420500 - DNA, 15 bp, Homo sapiens
caggttcactgacaa

SEQ ID NO: 1420501 - DNA, 15 bp, Homo sapiens
aggttcactgacaaa

SEQ ID NO: 1420502 - DNA, 15 bp, Homo sapiens
ggttcactgacaaaa

SEQ ID NO: 1420503 - DNA, 15 bp, Homo sapiens
gttcactgacaaaaa

SEQ ID NO: 1420504 - DNA, 15 bp, Homo sapiens
ttcactgacaaaaag

SEQ ID NO: 1420505 - DNA, 15 bp, Homo sapiens
tcactgacaaaaagt

SEQ ID NO: 1420506 - DNA, 15 bp, Homo sapiens
cactgacaaaaagtg

SEQ ID NO: 1420507 - DNA, 15 bp, Homo sapiens
actgacaaaaagtgg

SEQ ID NO: 1420508 - DNA, 15 bp, Homo sapiens
ctgacaaaaagtggg

SEQ ID NO: 1420509 - DNA, 15 bp, Homo sapiens
tgacaaaaagtgggg

SEQ ID NO: 1420510 - DNA, 15 bp, Homo sapiens
gacaaaaagtggggt

SEQ ID NO: 1420511 - DNA, 15 bp, Homo sapiens
acaaaaagtggggtg

SEQ ID NO: 1420512 - DNA, 15 bp, Homo sapiens
caaaaagtggggtga

SEQ ID NO: 1420513 - DNA, 15 bp, Homo sapiens
aaaaagtggggtgat

SEQ ID NO: 1420514 - DNA, 15 bp, Homo sapiens
aaaagtggggtgatg

SEQ ID NO: 1420515 - DNA, 15 bp, Homo sapiens
aaagtggggtgatga

SEQ ID NO: 1420516 - DNA, 15 bp, Homo sapiens
aagtggggtgatgat

SEQ ID NO: 1420517 - DNA, 15 bp, Homo sapiens
agtggggtgatgatt

SEQ ID NO: 1420518 - DNA, 15 bp, Homo sapiens
gtggggtgatgattg

SEQ ID NO: 1420519 - DNA, 15 bp, Homo sapiens
tggggtgatgattga

SEQ ID NO: 1420520 - DNA, 15 bp, Homo sapiens
ggggtgatgattgag

SEQ ID NO: 1420521 - DNA, 15 bp, Homo sapiens
gggtgatgattgaga

SEQ ID NO: 1420522 - DNA, 15 bp, Homo sapiens
ggtgatgattgagag

SEQ ID NO: 1420523 - DNA, 15 bp, Homo sapiens
gtgatgattgagagg

SEQ ID NO: 1420524 - DNA, 15 bp, Homo sapiens
tgatgattgagaggg

SEQ ID NO: 1420525 - DNA, 15 bp, Homo sapiens
gatgattgagaggga

SEQ ID NO: 1420526 - DNA, 15 bp, Homo sapiens
atgattgagagggat

SEQ ID NO: 1420527 - DNA, 15 bp, Homo sapiens
tgattgagagggatc

SEQ ID NO: 1420528 - DNA, 15 bp, Homo sapiens
gattgagagggatca

SEQ ID NO: 1420529 - DNA, 15 bp, Homo sapiens
attgagagggatcat

SEQ ID NO: 1420530 - DNA, 15 bp, Homo sapiens
ttgagagggatcata

SEQ ID NO: 1420531 - DNA, 15 bp, Homo sapiens
tgagagggatcatag

SEQ ID NO: 1420532 - DNA, 15 bp, Homo sapiens
gagagggatcataga

SEQ ID NO: 1420533 - DNA, 15 bp, Homo sapiens
agagggatcatagat

SEQ ID NO: 1420534 - DNA, 15 bp, Homo sapiens
gagggatcatagatt

SEQ ID NO: 1420535 - DNA, 15 bp, Homo sapiens
agggatcatagattt

SEQ ID NO: 1420536 - DNA, 15 bp, Homo sapiens
gggatcatagatttc

SEQ ID NO: 1420537 - DNA, 15 bp, Homo sapiens
ggatcatagatttcc

SEQ ID NO: 1420538 - DNA, 15 bp, Homo sapiens
gatcatagatttcct

SEQ ID NO: 1420539 - DNA, 15 bp, Homo sapiens
atcatagatttcctt

SEQ ID NO: 1420540 - DNA, 15 bp, Homo sapiens
tcatagatttccttt

SEQ ID NO: 1420541 - DNA, 15 bp, Homo sapiens
catagatttccttta

SEQ ID NO: 1420542 - DNA, 15 bp, Homo sapiens
atagatttcctttat

SEQ ID NO: 1420543 - DNA, 15 bp, Homo sapiens
tagatttcctttata

SEQ ID NO: 1420544 - DNA, 15 bp, Homo sapiens
agatttcctttatag

SEQ ID NO: 1420545 - DNA, 15 bp, Homo sapiens
gatttcctttatagt

SEQ ID NO: 1420546 - DNA, 15 bp, Homo sapiens
atttcctttatagtc

SEQ ID NO: 1420547 - DNA, 15 bp, Homo sapiens
tttcctttatagtcc

SEQ ID NO: 1420548 - DNA, 15 bp, Homo sapiens
ttcctttatagtccc

SEQ ID NO: 1420549 - DNA, 15 bp, Homo sapiens
tcctttatagtccca

SEQ ID NO: 1420550 - DNA, 15 bp, Homo sapiens
cctttatagtcccag

SEQ ID NO: 1420551 - DNA, 15 bp, Homo sapiens
ctttatagtcccagg

SEQ ID NO: 1420552 - DNA, 15 bp, Homo sapiens
tttatagtcccaggg

SEQ ID NO: 1420553 - DNA, 15 bp, Homo sapiens
ttatagtcccagggg

SEQ ID NO: 1420554 - DNA, 15 bp, Homo sapiens
tatagtcccaggggc

SEQ ID NO: 1420555 - DNA, 15 bp, Homo sapiens
atagtcccaggggca

SEQ ID NO: 1420556 - DNA, 15 bp, Homo sapiens
tagtcccaggggcag

SEQ ID NO: 1420557 - DNA, 15 bp, Homo sapiens
agtcccaggggcaga

SEQ ID NO: 1420558 - DNA, 15 bp, Homo sapiens
gtcccaggggcagaa

SEQ ID NO: 1420559 - DNA, 15 bp, Homo sapiens
tcccaggggcagaat

SEQ ID NO: 1420560 - DNA, 15 bp, Homo sapiens
cccaggggcagaatc

SEQ ID NO: 1420561 - DNA, 15 bp, Homo sapiens
ccaggggcagaatca

SEQ ID NO: 1420562 - DNA, 15 bp, Homo sapiens
caggggcagaatcaa

SEQ ID NO: 1420563 - DNA, 15 bp, Homo sapiens
aggggcagaatcaag

SEQ ID NO: 1420564 - DNA, 15 bp, Homo sapiens
ggggcagaatcaaga

SEQ ID NO: 1420565 - DNA, 15 bp, Homo sapiens
gggcagaatcaagat

SEQ ID NO: 1420566 - DNA, 15 bp, Homo sapiens
ggcagaatcaagatt

SEQ ID NO: 1420567 - DNA, 15 bp, Homo sapiens
gcagaatcaagattg

SEQ ID NO: 1420568 - DNA, 15 bp, Homo sapiens
cagaatcaagattga

SEQ ID NO: 1420569 - DNA, 15 bp, Homo sapiens
agaatcaagattgaa

SEQ ID NO: 1420570 - DNA, 15 bp, Homo sapiens
gaatcaagattgaag

SEQ ID NO: 1420571 - DNA, 15 bp, Homo sapiens
aatcaagattgaagt

SEQ ID NO: 1420572 - DNA, 15 bp, Homo sapiens
atcaagattgaagtg

SEQ ID NO: 1420573 - DNA, 15 bp, Homo sapiens
tcaagattgaagtgg

SEQ ID NO: 1420574 - DNA, 15 bp, Homo sapiens
caagattgaagtggg

SEQ ID NO: 1420575 - DNA, 15 bp, Homo sapiens
aagattgaagtgggg

SEQ ID NO: 1420576 - DNA, 15 bp, Homo sapiens
agattgaagtggggc

SEQ ID NO: 1420577 - DNA, 15 bp, Homo sapiens
gattgaagtggggct

SEQ ID NO: 1420578 - DNA, 15 bp, Homo sapiens
attgaagtggggctt

SEQ ID NO: 1420579 - DNA, 15 bp, Homo sapiens
ttgaagtggggctta

SEQ ID NO: 1420580 - DNA, 15 bp, Homo sapiens
tgaagtggggcttag

SEQ ID NO: 1420581 - DNA, 15 bp, Homo sapiens
gaagtggggcttaga

SEQ ID NO: 1420582 - DNA, 15 bp, Homo sapiens
aagtggggcttagaa

SEQ ID NO: 1420583 - DNA, 15 bp, Homo sapiens
agtggggcttagaag

SEQ ID NO: 1420584 - DNA, 15 bp, Homo sapiens
gtggggcttagaagg

SEQ ID NO: 1420585 - DNA, 15 bp, Homo sapiens
tggggcttagaaggg

SEQ ID NO: 1420586 - DNA, 15 bp, Homo sapiens
ggggcttagaaggga

SEQ ID NO: 1420587 - DNA, 15 bp, Homo sapiens
gggcttagaagggaa

SEQ ID NO: 1420588 - DNA, 15 bp, Homo sapiens
ggcttagaagggaac

SEQ ID NO: 1420589 - DNA, 15 bp, Homo sapiens
gcttagaagggaaca

SEQ ID NO: 1420590 - DNA, 15 bp, Homo sapiens
cttagaagggaacat

SEQ ID NO: 1420591 - DNA, 15 bp, Homo sapiens
ttagaagggaacatt

SEQ ID NO: 1420592 - DNA, 15 bp, Homo sapiens
tagaagggaacattt

SEQ ID NO: 1420593 - DNA, 15 bp, Homo sapiens
agaagggaacatttc

SEQ ID NO: 1420594 - DNA, 15 bp, Homo sapiens
gaagggaacatttca

SEQ ID NO: 1420595 - DNA, 15 bp, Homo sapiens
aagggaacatttcaa

SEQ ID NO: 1420596 - DNA, 15 bp, Homo sapiens
agggaacatttcaat

SEQ ID NO: 1420597 - DNA, 15 bp, Homo sapiens
gggaacatttcaatt

SEQ ID NO: 1420598 - DNA, 15 bp, Homo sapiens
ggaacatttcaattc

SEQ ID NO: 1420599 - DNA, 15 bp, Homo sapiens
gaacatttcaattcc

SEQ ID NO: 1420600 - DNA, 15 bp, Homo sapiens
acatttcaattccct

SEQ ID NO: 1420601 - DNA, 15 bp, Homo sapiens
catttcaattcccta

SEQ ID NO: 1420602 - DNA, 15 bp, Homo sapiens
atttcaattccctac

SEQ ID NO: 1420603 - DNA, 15 bp, Homo sapiens
tttcaattccctacg

SEQ ID NO: 1420604 - DNA, 15 bp, Homo sapiens
ttcaattccctacga

SEQ ID NO: 1420605 - DNA, 15 bp, Homo sapiens
tcaattccctacgag

SEQ ID NO: 1420606 - DNA, 15 bp, Homo sapiens
caattccctacgagg

SEQ ID NO: 1420607 - DNA, 15 bp, Homo sapiens
aattccctacgagga

SEQ ID NO: 1420608 - DNA, 15 bp, Homo sapiens
attccctacgaggaa

SEQ ID NO: 1420609 - DNA, 15 bp, Homo sapiens
ttccctacgaggaat

SEQ ID NO: 1420610 - DNA, 15 bp, Homo sapiens
tccctacgaggaata

SEQ ID NO: 1420611 - DNA, 15 bp, Homo sapiens
ccctacgaggaatag

SEQ ID NO: 1420612 - DNA, 15 bp, Homo sapiens
cctacgaggaatagc

SEQ ID NO: 1420613 - DNA, 15 bp, Homo sapiens
ctacgaggaatagca

SEQ ID NO: 1420614 - DNA, 15 bp, Homo sapiens
tacgaggaatagcat

SEQ ID NO: 1420615 - DNA, 15 bp, Homo sapiens
acgaggaatagcatc

SEQ ID NO: 1420616 - DNA, 15 bp, Homo sapiens
cgaggaatagcatcg

SEQ ID NO: 1420617 - DNA, 15 bp, Homo sapiens
gaggaatagcatcgt

SEQ ID NO: 1420618 - DNA, 15 bp, Homo sapiens
aggaatagcatcgta

SEQ ID NO: 1420619 - DNA, 15 bp, Homo sapiens
ggaatagcatcgtag

SEQ ID NO: 1420620 - DNA, 15 bp, Homo sapiens
gaatagcatcgtagc

SEQ ID NO: 1420621 - DNA, 15 bp, Homo sapiens
aatagcatcgtagca

SEQ ID NO: 1420622 - DNA, 15 bp, Homo sapiens
atagcatcgtagcac

SEQ ID NO: 1420623 - DNA, 15 bp, Homo sapiens
tagcatcgtagcact

SEQ ID NO: 1420624 - DNA, 15 bp, Homo sapiens
agcatcgtagcactc

SEQ ID NO: 1420625 - DNA, 15 bp, Homo sapiens
gcatcgtagcactca

SEQ ID NO: 1420626 - DNA, 15 bp, Homo sapiens
catcgtagcactcag

SEQ ID NO: 1420627 - DNA, 15 bp, Homo sapiens
atcgtagcactcagt

SEQ ID NO: 1420628 - DNA, 15 bp, Homo sapiens
tcgtagcactcagtg

SEQ ID NO: 1420629 - DNA, 15 bp, Homo sapiens
cgtagcactcagtgt

SEQ ID NO: 1420630 - DNA, 15 bp, Homo sapiens
gtagcactcagtgtt

SEQ ID NO: 1420631 - DNA, 15 bp, Homo sapiens
tagcactcagtgttc

SEQ ID NO: 1420632 - DNA, 15 bp, Homo sapiens
agcactcagtgttct

SEQ ID NO: 1420633 - DNA, 15 bp, Homo sapiens
gcactcagtgttctt

SEQ ID NO: 1420634 - DNA, 15 bp, Homo sapiens
cactcagtgttcttc

SEQ ID NO: 1420635 - DNA, 15 bp, Homo sapiens
actcagtgttcttca

SEQ ID NO: 1420636 - DNA, 15 bp, Homo sapiens
ctcagtgttcttcag

SEQ ID NO: 1420637 - DNA, 15 bp, Homo sapiens
tcagtgttcttcagc

SEQ ID NO: 1420638 - DNA, 15 bp, Homo sapiens
cagtgttcttcagcg

SEQ ID NO: 1420639 - DNA, 15 bp, Homo sapiens
agtgttcttcagcga

SEQ ID NO: 1420640 - DNA, 15 bp, Homo sapiens
gtgttcttcagcgag

SEQ ID NO: 1420641 - DNA, 15 bp, Homo sapiens
tgttcttcagcgagg

SEQ ID NO: 1420642 - DNA, 15 bp, Homo sapiens
gttcttcagcgagga

SEQ ID NO: 1420643 - DNA, 15 bp, Homo sapiens
ttcttcagcgaggac

SEQ ID NO: 1420644 - DNA, 15 bp, Homo sapiens
tcttcagcgaggaca

SEQ ID NO: 1420645 - DNA, 15 bp, Homo sapiens
cttcagcgaggacag

SEQ ID NO: 1420646 - DNA, 15 bp, Homo sapiens
ttcagcgaggacagc

SEQ ID NO: 1420647 - DNA, 15 bp, Homo sapiens
tcagcgaggacagca

SEQ ID NO: 1420648 - DNA, 15 bp, Homo sapiens
cagcgaggacagcag

SEQ ID NO: 1420649 - DNA, 15 bp, Homo sapiens
agcgaggacagcagt

SEQ ID NO: 1420650 - DNA, 15 bp, Homo sapiens
gcgaggacagcagtg

SEQ ID NO: 1420651 - DNA, 15 bp, Homo sapiens
cgaggacagcagtgc

SEQ ID NO: 1420652 - DNA, 15 bp, Homo sapiens
gaggacagcagtgcc

SEQ ID NO: 1420653 - DNA, 15 bp, Homo sapiens
aggacagcagtgcct

SEQ ID NO: 1420654 - DNA, 15 bp, Homo sapiens
ggacagcagtgcctt

SEQ ID NO: 1420655 - DNA, 15 bp, Homo sapiens
gacagcagtgcctta

SEQ ID NO: 1420656 - DNA, 15 bp, Homo sapiens
acagcagtgccttag

SEQ ID NO: 1420657 - DNA, 15 bp, Homo sapiens
cagcagtgccttagg

SEQ ID NO: 1420658 - DNA, 15 bp, Homo sapiens
agcagtgccttagga

SEQ ID NO: 1420659 - DNA, 15 bp, Homo sapiens
gcagtgccttaggaa

SEQ ID NO: 1420660 - DNA, 15 bp, Homo sapiens
cagtgccttaggaaa

SEQ ID NO: 1420661 - DNA, 15 bp, Homo sapiens
agtgccttaggaaat

SEQ ID NO: 1420662 - DNA, 15 bp, Homo sapiens
gtgccttaggaaatg

SEQ ID NO: 1420663 - DNA, 15 bp, Homo sapiens
tgccttaggaaatgt

SEQ ID NO: 1420664 - DNA, 15 bp, Homo sapiens
gccttaggaaatgtg

SEQ ID NO: 1420665 - DNA, 15 bp, Homo sapiens
ccttaggaaatgtgc

SEQ ID NO: 1420666 - DNA, 15 bp, Homo sapiens
cttaggaaatgtgca

SEQ ID NO: 1420667 - DNA, 15 bp, Homo sapiens
ttaggaaatgtgcat

SEQ ID NO: 1420668 - DNA, 15 bp, Homo sapiens
taggaaatgtgcatc

SEQ ID NO: 1420669 - DNA, 15 bp, Homo sapiens
aggaaatgtgcatct

SEQ ID NO: 1420670 - DNA, 15 bp, Homo sapiens
ggaaatgtgcatctg

SEQ ID NO: 1420671 - DNA, 15 bp, Homo sapiens
gaaatgtgcatctgt

SEQ ID NO: 1420672 - DNA, 15 bp, Homo sapiens
aaatgtgcatctgtc

SEQ ID NO: 1420673 - DNA, 15 bp, Homo sapiens
aatgtgcatctgtcc

SEQ ID NO: 1420674 - DNA, 15 bp, Homo sapiens
atgtgcatctgtccc

SEQ ID NO: 1420675 - DNA, 15 bp, Homo sapiens
tgtgcatctgtccca

SEQ ID NO: 1420676 - DNA, 15 bp, Homo sapiens
gtgcatctgtcccag

SEQ ID NO: 1420677 - DNA, 15 bp, Homo sapiens
tgcatctgtcccagg

SEQ ID NO: 1420678 - DNA, 15 bp, Homo sapiens
gcatctgtcccagga

SEQ ID NO: 1420679 - DNA, 15 bp, Homo sapiens
catctgtcccaggaa

SEQ ID NO: 1420680 - DNA, 15 bp, Homo sapiens
atctgtcccaggaag

SEQ ID NO: 1420681 - DNA, 15 bp, Homo sapiens
tctgtcccaggaagc

SEQ ID NO: 1420682 - DNA, 15 bp, Homo sapiens
ctgtcccaggaagcg

SEQ ID NO: 1420683 - DNA, 15 bp, Homo sapiens
tgtcccaggaagcgg

SEQ ID NO: 1420684 - DNA, 15 bp, Homo sapiens
gtcccaggaagcggg

SEQ ID NO: 1420685 - DNA, 15 bp, Homo sapiens
tcccaggaagcgggc

SEQ ID NO: 1420686 - DNA, 15 bp, Homo sapiens
cccaggaagcgggca

SEQ ID NO: 1420687 - DNA, 15 bp, Homo sapiens
ccaggaagcgggcac

SEQ ID NO: 1420688 - DNA, 15 bp, Homo sapiens
caggaagcgggcaca

SEQ ID NO: 1420689 - DNA, 15 bp, Homo sapiens
aggaagcgggcacac

SEQ ID NO: 1420690 - DNA, 15 bp, Homo sapiens
ggaagcgggcacaca

SEQ ID NO: 1420691 - DNA, 15 bp, Homo sapiens
gaagcgggcacacag

SEQ ID NO: 1420692 - DNA, 15 bp, Homo sapiens
aagcgggcacacagg

SEQ ID NO: 1420693 - DNA, 15 bp, Homo sapiens
agcgggcacacaggc

SEQ ID NO: 1420694 - DNA, 15 bp, Homo sapiens
gcgggcacacaggct

SEQ ID NO: 1420695 - DNA, 15 bp, Homo sapiens
cgggcacacaggctg

SEQ ID NO: 1420696 - DNA, 15 bp, Homo sapiens
gggcacacaggctgg

SEQ ID NO: 1420697 - DNA, 15 bp, Homo sapiens
ggcacacaggctggg

SEQ ID NO: 1420698 - DNA, 15 bp, Homo sapiens
gcacacaggctggga

SEQ ID NO: 1420699 - DNA, 15 bp, Homo sapiens
cacacaggctgggag

SEQ ID NO: 1420700 - DNA, 15 bp, Homo sapiens
acacaggctgggagt

SEQ ID NO: 1420701 - DNA, 15 bp, Homo sapiens
cacaggctgggagtc

SEQ ID NO: 1420702 - DNA, 15 bp, Homo sapiens
acaggctgggagtct

SEQ ID NO: 1420703 - DNA, 15 bp, Homo sapiens
caggctgggagtctt

SEQ ID NO: 1420704 - DNA, 15 bp, Homo sapiens
aggctgggagtctta

SEQ ID NO: 1420705 - DNA, 15 bp, Homo sapiens
ggctgggagtcttag

SEQ ID NO: 1420706 - DNA, 15 bp, Homo sapiens
gctgggagtcttaga

SEQ ID NO: 1420707 - DNA, 15 bp, Homo sapiens
ctgggagtcttagag

SEQ ID NO: 1420708 - DNA, 15 bp, Homo sapiens
tgggagtcttagagg

SEQ ID NO: 1420709 - DNA, 15 bp, Homo sapiens
gggagtcttagaggg

SEQ ID NO: 1420710 - DNA, 15 bp, Homo sapiens
ggagtcttagagggc

SEQ ID NO: 1420711 - DNA, 15 bp, Homo sapiens
gagtcttagagggct

SEQ ID NO: 1420712 - DNA, 15 bp, Homo sapiens
agtcttagagggctc

SEQ ID NO: 1420713 - DNA, 15 bp, Homo sapiens
gtcttagagggctcc

SEQ ID NO: 1420714 - DNA, 15 bp, Homo sapiens
tcttagagggctcct

SEQ ID NO: 1420715 - DNA, 15 bp, Homo sapiens
cttagagggctcctg

SEQ ID NO: 1420716 - DNA, 15 bp, Homo sapiens
ttagagggctcctgc

SEQ ID NO: 1420717 - DNA, 15 bp, Homo sapiens
tagagggctcctgct

SEQ ID NO: 1420718 - DNA, 15 bp, Homo sapiens
agagggctcctgctc

SEQ ID NO: 1420719 - DNA, 15 bp, Homo sapiens
gagggctcctgctca

SEQ ID NO: 1420720 - DNA, 15 bp, Homo sapiens
agggctcctgctcag

SEQ ID NO: 1420721 - DNA, 15 bp, Homo sapiens
gggctcctgctcagg

SEQ ID NO: 1420722 - DNA, 15 bp, Homo sapiens
ggctcctgctcaggt

SEQ ID NO: 1420723 - DNA, 15 bp, Homo sapiens
gctcctgctcaggtc

SEQ ID NO: 1420724 - DNA, 15 bp, Homo sapiens
ctcctgctcaggtct

SEQ ID NO: 1420725 - DNA, 15 bp, Homo sapiens
tcctgctcaggtctc

SEQ ID NO: 1420726 - DNA, 15 bp, Homo sapiens
cctgctcaggtctcc

SEQ ID NO: 1420727 - DNA, 15 bp, Homo sapiens
ctgctcaggtctccc

SEQ ID NO: 1420728 - DNA, 15 bp, Homo sapiens
tgctcaggtctccca

SEQ ID NO: 1420729 - DNA, 15 bp, Homo sapiens
gctcaggtctcccac

SEQ ID NO: 1420730 - DNA, 15 bp, Homo sapiens
ctcaggtctcccaca

SEQ ID NO: 1420731 - DNA, 15 bp, Homo sapiens
tcaggtctcccacat

SEQ ID NO: 1420732 - DNA, 15 bp, Homo sapiens
caggtctcccacatg

SEQ ID NO: 1420733 - DNA, 15 bp, Homo sapiens
aggtctcccacatgg

SEQ ID NO: 1420734 - DNA, 15 bp, Homo sapiens
ggtctcccacatggt

SEQ ID NO: 1420735 - DNA, 15 bp, Homo sapiens
gtctcccacatggtg

SEQ ID NO: 1420736 - DNA, 15 bp, Homo sapiens
tctcccacatggtgc

SEQ ID NO: 1420737 - DNA, 15 bp, Homo sapiens
ctcccacatggtgca

SEQ ID NO: 1420738 - DNA, 15 bp, Homo sapiens
tcccacatggtgcaa

SEQ ID NO: 1420739 - DNA, 15 bp, Homo sapiens
cccacatggtgcaag

SEQ ID NO: 1420740 - DNA, 15 bp, Homo sapiens
ccacatggtgcaaga

SEQ ID NO: 1420741 - DNA, 15 bp, Homo sapiens
cacatggtgcaagat

SEQ ID NO: 1420742 - DNA, 15 bp, Homo sapiens
acatggtgcaagatg

SEQ ID NO: 1420743 - DNA, 15 bp, Homo sapiens
catggtgcaagatgc

SEQ ID NO: 1420744 - DNA, 15 bp, Homo sapiens
atggtgcaagatgct

SEQ ID NO: 1420745 - DNA, 15 bp, Homo sapiens
tggtgcaagatgctg

SEQ ID NO: 1420746 - DNA, 15 bp, Homo sapiens
ggtgcaagatgctgg

SEQ ID NO: 1420747 - DNA, 15 bp, Homo sapiens
gtgcaagatgctggg

SEQ ID NO: 1420748 - DNA, 15 bp, Homo sapiens
tgcaagatgctgggc

SEQ ID NO: 1420749 - DNA, 15 bp, Homo sapiens
gcaagatgctgggct

SEQ ID NO: 1420750 - DNA, 15 bp, Homo sapiens
caagatgctgggctt

SEQ ID NO: 1420751 - DNA, 15 bp, Homo sapiens
aagatgctgggcttc

SEQ ID NO: 1420752 - DNA, 15 bp, Homo sapiens
agatgctgggcttct

SEQ ID NO: 1420753 - DNA, 15 bp, Homo sapiens
gatgctgggcttctg

SEQ ID NO: 1420754 - DNA, 15 bp, Homo sapiens
atgctgggcttctgt

SEQ ID NO: 1420755 - DNA, 15 bp, Homo sapiens
tgctgggcttctgtc

SEQ ID NO: 1420756 - DNA, 15 bp, Homo sapiens
gctgggcttctgtcg

SEQ ID NO: 1420757 - DNA, 15 bp, Homo sapiens
ctgggcttctgtcgt

SEQ ID NO: 1420758 - DNA, 15 bp, Homo sapiens
tgggcttctgtcgtg

SEQ ID NO: 1420759 - DNA, 15 bp, Homo sapiens
gggcttctgtcgtga

SEQ ID NO: 1420760 - DNA, 15 bp, Homo sapiens
ggcttctgtcgtgac

SEQ ID NO: 1420761 - DNA, 15 bp, Homo sapiens
gcttctgtcgtgact

SEQ ID NO: 1420762 - DNA, 15 bp, Homo sapiens
cttctgtcgtgactc

SEQ ID NO: 1420763 - DNA, 15 bp, Homo sapiens
ttctgtcgtgactca

SEQ ID NO: 1420764 - DNA, 15 bp, Homo sapiens
tctgtcgtgactcag

SEQ ID NO: 1420765 - DNA, 15 bp, Homo sapiens
ctgtcgtgactcagc

SEQ ID NO: 1420766 - DNA, 15 bp, Homo sapiens
tgtcgtgactcagct

SEQ ID NO: 1420767 - DNA, 15 bp, Homo sapiens
gtcgtgactcagctg

SEQ ID NO: 1420768 - DNA, 15 bp, Homo sapiens
tcgtgactcagctgg

SEQ ID NO: 1420769 - DNA, 15 bp, Homo sapiens
cgtgactcagctggg

SEQ ID NO: 1420770 - DNA, 15 bp, Homo sapiens
gtgactcagctgggg

SEQ ID NO: 1420771 - DNA, 15 bp, Homo sapiens
tgactcagctgggga

SEQ ID NO: 1420772 - DNA, 15 bp, Homo sapiens
gactcagctggggat

SEQ ID NO: 1420773 - DNA, 15 bp, Homo sapiens
actcagctggggatg

SEQ ID NO: 1420774 - DNA, 15 bp, Homo sapiens
ctcagctggggatgt

SEQ ID NO: 1420775 - DNA, 15 bp, Homo sapiens
tcagctggggatgtc

SEQ ID NO: 1420776 - DNA, 15 bp, Homo sapiens
cagctggggatgtcc

SEQ ID NO: 1420777 - DNA, 15 bp, Homo sapiens
agctggggatgtcct

SEQ ID NO: 1420778 - DNA, 15 bp, Homo sapiens
gctggggatgtcctt

SEQ ID NO: 1420779 - DNA, 15 bp, Homo sapiens
ctggggatgtccttg

SEQ ID NO: 1420780 - DNA, 15 bp, Homo sapiens
tggggatgtccttga

SEQ ID NO: 1420781 - DNA, 15 bp, Homo sapiens
ggggatgtccttgag

SEQ ID NO: 1420782 - DNA, 15 bp, Homo sapiens
gggatgtccttgagt

SEQ ID NO: 1420783 - DNA, 15 bp, Homo sapiens
ggatgtccttgagta

SEQ ID NO: 1420784 - DNA, 15 bp, Homo sapiens
gatgtccttgagtat

SEQ ID NO: 1420785 - DNA, 15 bp, Homo sapiens
atgtccttgagtata

SEQ ID NO: 1420786 - DNA, 15 bp, Homo sapiens
tgtccttgagtatag

SEQ ID NO: 1420787 - DNA, 15 bp, Homo sapiens
gtccttgagtatagg

SEQ ID NO: 1420788 - DNA, 15 bp, Homo sapiens
tccttgagtataggg

SEQ ID NO: 1420789 - DNA, 15 bp, Homo sapiens
ccttgagtataggga

SEQ ID NO: 1420790 - DNA, 15 bp, Homo sapiens
cttgagtatagggat

SEQ ID NO: 1420791 - DNA, 15 bp, Homo sapiens
ttgagtatagggatc

SEQ ID NO: 1420792 - DNA, 15 bp, Homo sapiens
tgagtatagggatca

SEQ ID NO: 1420793 - DNA, 15 bp, Homo sapiens
gagtatagggatcac

SEQ ID NO: 1420794 - DNA, 15 bp, Homo sapiens
agtatagggatcaca

SEQ ID NO: 1420795 - DNA, 15 bp, Homo sapiens
gtatagggatcacag

SEQ ID NO: 1420796 - DNA, 15 bp, Homo sapiens
tatagggatcacagc

SEQ ID NO: 1420797 - DNA, 15 bp, Homo sapiens
atagggatcacagct

SEQ ID NO: 1420798 - DNA, 15 bp, Homo sapiens
tagggatcacagctc

SEQ ID NO: 1420799 - DNA, 15 bp, Homo sapiens
agggatcacagctca

SEQ ID NO: 1420800 - DNA, 15 bp, Homo sapiens
gggatcacagctcag

SEQ ID NO: 1420801 - DNA, 15 bp, Homo sapiens
ggatcacagctcagt

SEQ ID NO: 1420802 - DNA, 15 bp, Homo sapiens
gatcacagctcagtc

SEQ ID NO: 1420803 - DNA, 15 bp, Homo sapiens
atcacagctcagtct

SEQ ID NO: 1420804 - DNA, 15 bp, Homo sapiens
tcacagctcagtctg

SEQ ID NO: 1420805 - DNA, 15 bp, Homo sapiens
cacagctcagtctgg

SEQ ID NO: 1420806 - DNA, 15 bp, Homo sapiens
acagctcagtctggg

SEQ ID NO: 1420807 - DNA, 15 bp, Homo sapiens
cagctcagtctgggt

SEQ ID NO: 1420808 - DNA, 15 bp, Homo sapiens
agctcagtctgggtt

SEQ ID NO: 1420809 - DNA, 15 bp, Homo sapiens
gctcagtctgggttt

SEQ ID NO: 1420810 - DNA, 15 bp, Homo sapiens
ctcagtctgggtttg

SEQ ID NO: 1420811 - DNA, 15 bp, Homo sapiens
tcagtctgggtttgc

SEQ ID NO: 1420812 - DNA, 15 bp, Homo sapiens
cagtctgggtttgct

SEQ ID NO: 1420813 - DNA, 15 bp, Homo sapiens
agtctgggtttgctc

SEQ ID NO: 1420814 - DNA, 15 bp, Homo sapiens
gtctgggtttgctcc

SEQ ID NO: 1420815 - DNA, 15 bp, Homo sapiens
tctgggtttgctcct

SEQ ID NO: 1420816 - DNA, 15 bp, Homo sapiens
ctgggtttgctcctg

SEQ ID NO: 1420817 - DNA, 15 bp, Homo sapiens
tgggtttgctcctgg

SEQ ID NO: 1420818 - DNA, 15 bp, Homo sapiens
gggtttgctcctggc

SEQ ID NO: 1420819 - DNA, 15 bp, Homo sapiens
ggtttgctcctggct

SEQ ID NO: 1420820 - DNA, 15 bp, Homo sapiens
gtttgctcctggctt

SEQ ID NO: 1420821 - DNA, 15 bp, Homo sapiens
tttgctcctggcttg

SEQ ID NO: 1420822 - DNA, 15 bp, Homo sapiens
ttgctcctggcttgt

SEQ ID NO: 1420823 - DNA, 15 bp, Homo sapiens
tgctcctggcttgtc

SEQ ID NO: 1420824 - DNA, 15 bp, Homo sapiens
gctcctggcttgtcc

SEQ ID NO: 1420825 - DNA, 15 bp, Homo sapiens
ctcctggcttgtccc

SEQ ID NO: 1420826 - DNA, 15 bp, Homo sapiens
tcctggcttgtcccc

SEQ ID NO: 1420827 - DNA, 15 bp, Homo sapiens
cctggcttgtcccca

SEQ ID NO: 1420828 - DNA, 15 bp, Homo sapiens
ctggcttgtccccag

SEQ ID NO: 1420829 - DNA, 15 bp, Homo sapiens
tggcttgtccccagc

SEQ ID NO: 1420830 - DNA, 15 bp, Homo sapiens
ggcttgtccccagct

SEQ ID NO: 1420831 - DNA, 15 bp, Homo sapiens
gcttgtccccagctg

SEQ ID NO: 1420832 - DNA, 15 bp, Homo sapiens
cttgtccccagctgc

SEQ ID NO: 1420833 - DNA, 15 bp, Homo sapiens
ttgtccccagctgct

SEQ ID NO: 1420834 - DNA, 15 bp, Homo sapiens
tgtccccagctgcta

SEQ ID NO: 1420835 - DNA, 15 bp, Homo sapiens
gtccccagctgctag

SEQ ID NO: 1420836 - DNA, 15 bp, Homo sapiens
tccccagctgctagt

SEQ ID NO: 1420837 - DNA, 15 bp, Homo sapiens
ccccagctgctagta

SEQ ID NO: 1420838 - DNA, 15 bp, Homo sapiens
cccagctgctagtaa

SEQ ID NO: 1420839 - DNA, 15 bp, Homo sapiens
ccagctgctagtaaa

SEQ ID NO: 1420840 - DNA, 15 bp, Homo sapiens
cagctgctagtaaat

SEQ ID NO: 1420841 - DNA, 15 bp, Homo sapiens
agctgctagtaaata

SEQ ID NO: 1420842 - DNA, 15 bp, Homo sapiens
gctgctagtaaatat

SEQ ID NO: 1420843 - DNA, 15 bp, Homo sapiens
ctgctagtaaatatg

SEQ ID NO: 1420844 - DNA, 15 bp, Homo sapiens
tgctagtaaatatgt

SEQ ID NO: 1420845 - DNA, 15 bp, Homo sapiens
gctagtaaatatgtt

SEQ ID NO: 1420846 - DNA, 15 bp, Homo sapiens
ctagtaaatatgtta

SEQ ID NO: 1420847 - DNA, 15 bp, Homo sapiens
tagtaaatatgttaa

SEQ ID NO: 1420848 - DNA, 15 bp, Homo sapiens
agtaaatatgttaat

SEQ ID NO: 1420849 - DNA, 15 bp, Homo sapiens
gtaaatatgttaata

SEQ ID NO: 1420850 - DNA, 15 bp, Homo sapiens
taaatatgttaatat

SEQ ID NO: 1420851 - DNA, 15 bp, Homo sapiens
aaatatgttaatatg

SEQ ID NO: 1420852 - DNA, 15 bp, Homo sapiens
aatatgttaatatgt

SEQ ID NO: 1420853 - DNA, 15 bp, Homo sapiens
atatgttaatatgtg

SEQ ID NO: 1420854 - DNA, 15 bp, Homo sapiens
tatgttaatatgtgt

SEQ ID NO: 1420855 - DNA, 15 bp, Homo sapiens
atgttaatatgtgtg

SEQ ID NO: 1420856 - DNA, 15 bp, Homo sapiens
tgttaatatgtgtgt

SEQ ID NO: 1420857 - DNA, 15 bp, Homo sapiens
gttaatatgtgtgtc

SEQ ID NO: 1420858 - DNA, 15 bp, Homo sapiens
ttaatatgtgtgtcg

SEQ ID NO: 1420859 - DNA, 15 bp, Homo sapiens
taatatgtgtgtcgg

SEQ ID NO: 1420860 - DNA, 15 bp, Homo sapiens
aatatgtgtgtcggg

SEQ ID NO: 1420861 - DNA, 15 bp, Homo sapiens
atatgtgtgtcgggg

SEQ ID NO: 1420862 - DNA, 15 bp, Homo sapiens
tatgtgtgtcgggga

SEQ ID NO: 1420863 - DNA, 15 bp, Homo sapiens
atgtgtgtcggggac

SEQ ID NO: 1420864 - DNA, 15 bp, Homo sapiens
tgtgtgtcggggaca

SEQ ID NO: 1420865 - DNA, 15 bp, Homo sapiens
gtgtgtcggggacag

SEQ ID NO: 1420866 - DNA, 15 bp, Homo sapiens
tgtgtcggggacagc

SEQ ID NO: 1420867 - DNA, 15 bp, Homo sapiens
gtgtcggggacagct

SEQ ID NO: 1420868 - DNA, 15 bp, Homo sapiens
tgtcggggacagctc

SEQ ID NO: 1420869 - DNA, 15 bp, Homo sapiens
gtcggggacagctct

SEQ ID NO: 1420870 - DNA, 15 bp, Homo sapiens
tcggggacagctctg

SEQ ID NO: 1420871 - DNA, 15 bp, Homo sapiens
cggggacagctctgg

SEQ ID NO: 1420872 - DNA, 15 bp, Homo sapiens
ggggacagctctggt

SEQ ID NO: 1420873 - DNA, 15 bp, Homo sapiens
gggacagctctggtg

SEQ ID NO: 1420874 - DNA, 15 bp, Homo sapiens
ggacagctctggtga

SEQ ID NO: 1420875 - DNA, 15 bp, Homo sapiens
gacagctctggtgac

SEQ ID NO: 1420876 - DNA, 15 bp, Homo sapiens
acagctctggtgaca

SEQ ID NO: 1420877 - DNA, 15 bp, Homo sapiens
cagctctggtgacat

SEQ ID NO: 1420878 - DNA, 15 bp, Homo sapiens
agctctggtgacatg

SEQ ID NO: 1420879 - DNA, 15 bp, Homo sapiens
gctctggtgacatgg

SEQ ID NO: 1420880 - DNA, 15 bp, Homo sapiens
ctctggtgacatgga

SEQ ID NO: 1420881 - DNA, 15 bp, Homo sapiens
tctggtgacatggat

SEQ ID NO: 1420882 - DNA, 15 bp, Homo sapiens
ctggtgacatggata

SEQ ID NO: 1420883 - DNA, 15 bp, Homo sapiens
tggtgacatggataa

SEQ ID NO: 1420884 - DNA, 15 bp, Homo sapiens
ggtgacatggataat

SEQ ID NO: 1420885 - DNA, 15 bp, Homo sapiens
gtgacatggataatt

SEQ ID NO: 1420886 - DNA, 15 bp, Homo sapiens
tgacatggataatta

SEQ ID NO: 1420887 - DNA, 15 bp, Homo sapiens
gacatggataattag

SEQ ID NO: 1420888 - DNA, 15 bp, Homo sapiens
acatggataattagt

SEQ ID NO: 1420889 - DNA, 15 bp, Homo sapiens
catggataattagtt

SEQ ID NO: 1420890 - DNA, 15 bp, Homo sapiens
atggataattagttt

SEQ ID NO: 1420891 - DNA, 15 bp, Homo sapiens
tggataattagtttt

SEQ ID NO: 1420892 - DNA, 15 bp, Homo sapiens
ggataattagttttt

SEQ ID NO: 1420893 - DNA, 15 bp, Homo sapiens
gataattagtttttc

SEQ ID NO: 1420894 - DNA, 15 bp, Homo sapiens
ataattagtttttct

SEQ ID NO: 1420895 - DNA, 15 bp, Homo sapiens
taattagtttttctg

SEQ ID NO: 1420896 - DNA, 15 bp, Homo sapiens
aattagtttttctga

SEQ ID NO: 1420897 - DNA, 15 bp, Homo sapiens
attagtttttctgat

SEQ ID NO: 1420898 - DNA, 15 bp, Homo sapiens
ttagtttttctgatg

SEQ ID NO: 1420899 - DNA, 15 bp, Homo sapiens
tagtttttctgatgt

SEQ ID NO: 1420900 - DNA, 15 bp, Homo sapiens
agtttttctgatgtt

SEQ ID NO: 1420901 - DNA, 15 bp, Homo sapiens
gtttttctgatgttg

SEQ ID NO: 1420902 - DNA, 15 bp, Homo sapiens
tttttctgatgttga

SEQ ID NO: 1420903 - DNA, 15 bp, Homo sapiens
ttttctgatgttgaa

SEQ ID NO: 1420904 - DNA, 15 bp, Homo sapiens
tttctgatgttgaat

SEQ ID NO: 1420905 - DNA, 15 bp, Homo sapiens
ttctgatgttgaatg

SEQ ID NO: 1420906 - DNA, 15 bp, Homo sapiens
tctgatgttgaatga

SEQ ID NO: 1420907 - DNA, 15 bp, Homo sapiens
ctgatgttgaatgag

SEQ ID NO: 1420908 - DNA, 15 bp, Homo sapiens
tgatgttgaatgaga

SEQ ID NO: 1420909 - DNA, 15 bp, Homo sapiens
gatgttgaatgagaa

SEQ ID NO: 1420910 - DNA, 15 bp, Homo sapiens
atgttgaatgagaaa

SEQ ID NO: 1420911 - DNA, 15 bp, Homo sapiens
tgttgaatgagaaat

SEQ ID NO: 1420912 - DNA, 15 bp, Homo sapiens
gttgaatgagaaatg

SEQ ID NO: 1420913 - DNA, 15 bp, Homo sapiens
ttgaatgagaaatga

SEQ ID NO: 1420914 - DNA, 15 bp, Homo sapiens
tgaatgagaaatgag

SEQ ID NO: 1420915 - DNA, 15 bp, Homo sapiens
gaatgagaaatgagt

SEQ ID NO: 1420916 - DNA, 15 bp, Homo sapiens
aatgagaaatgagta

SEQ ID NO: 1420917 - DNA, 15 bp, Homo sapiens
atgagaaatgagtaa

SEQ ID NO: 1420918 - DNA, 15 bp, Homo sapiens
tgagaaatgagtaaa

SEQ ID NO: 1420919 - DNA, 15 bp, Homo sapiens
gagaaatgagtaaaa

SEQ ID NO: 1420920 - DNA, 15 bp, Homo sapiens
agaaatgagtaaaaa

SEQ ID NO: 1420921 - DNA, 15 bp, Homo sapiens
gaaatgagtaaaaag

SEQ ID NO: 1420922 - DNA, 15 bp, Homo sapiens
aaatgagtaaaaagg

SEQ ID NO: 1420923 - DNA, 15 bp, Homo sapiens
aatgagtaaaaaggc

SEQ ID NO: 1420924 - DNA, 15 bp, Homo sapiens
atgagtaaaaaggca

SEQ ID NO: 1420925 - DNA, 15 bp, Homo sapiens
tgagtaaaaaggcat

SEQ ID NO: 1420926 - DNA, 15 bp, Homo sapiens
gagtaaaaaggcata

SEQ ID NO: 1420927 - DNA, 15 bp, Homo sapiens
agtaaaaaggcataa

SEQ ID NO: 1420928 - DNA, 15 bp, Homo sapiens
gtaaaaaggcataac

SEQ ID NO: 1420929 - DNA, 15 bp, Homo sapiens
taaaaaggcataaca

SEQ ID NO: 1420930 - DNA, 15 bp, Homo sapiens
aaaaaggcataacac

SEQ ID NO: 1420931 - DNA, 15 bp, Homo sapiens
aaaaggcataacaca

SEQ ID NO: 1420932 - DNA, 15 bp, Homo sapiens
aaaggcataacacat

SEQ ID NO: 1420933 - DNA, 15 bp, Homo sapiens
aaggcataacacatt

SEQ ID NO: 1420934 - DNA, 15 bp, Homo sapiens
aggcataacacatta

SEQ ID NO: 1420935 - DNA, 15 bp, Homo sapiens
ggcataacacattaa

SEQ ID NO: 1420936 - DNA, 15 bp, Homo sapiens
gcataacacattaat

SEQ ID NO: 1420937 - DNA, 15 bp, Homo sapiens
cataacacattaatc

SEQ ID NO: 1420938 - DNA, 15 bp, Homo sapiens
ataacacattaatct

SEQ ID NO: 1420939 - DNA, 15 bp, Homo sapiens
taacacattaatctt

SEQ ID NO: 1420940 - DNA, 15 bp, Homo sapiens
aacacattaatctta

SEQ ID NO: 1420941 - DNA, 15 bp, Homo sapiens
acacattaatcttaa

SEQ ID NO: 1420942 - DNA, 15 bp, Homo sapiens
cacattaatcttaat

SEQ ID NO: 1420943 - DNA, 15 bp, Homo sapiens
acattaatcttaatg

SEQ ID NO: 1420944 - DNA, 15 bp, Homo sapiens
cattaatcttaatgt

SEQ ID NO: 1420945 - DNA, 15 bp, Homo sapiens
attaatcttaatgtc

SEQ ID NO: 1420946 - DNA, 15 bp, Homo sapiens
ttaatcttaatgtct

SEQ ID NO: 1420947 - DNA, 15 bp, Homo sapiens
taatcttaatgtctt

SEQ ID NO: 1420948 - DNA, 15 bp, Homo sapiens
aatcttaatgtcttt

SEQ ID NO: 1420949 - DNA, 15 bp, Homo sapiens
atcttaatgtcttta

SEQ ID NO: 1420950 - DNA, 15 bp, Homo sapiens
tcttaatgtctttag

SEQ ID NO: 1420951 - DNA, 15 bp, Homo sapiens
cttaatgtctttaga

SEQ ID NO: 1420952 - DNA, 15 bp, Homo sapiens
ttaatgtctttagac

SEQ ID NO: 1420953 - DNA, 15 bp, Homo sapiens
taatgtctttagact

SEQ ID NO: 1420954 - DNA, 15 bp, Homo sapiens
aatgtctttagactt

SEQ ID NO: 1420955 - DNA, 15 bp, Homo sapiens
atgtctttagacttg

SEQ ID NO: 1420956 - DNA, 15 bp, Homo sapiens
tgtctttagacttgt

SEQ ID NO: 1420957 - DNA, 15 bp, Homo sapiens
gtctttagacttgta

SEQ ID NO: 1420958 - DNA, 15 bp, Homo sapiens
tctttagacttgtat

SEQ ID NO: 1420959 - DNA, 15 bp, Homo sapiens
ctttagacttgtatt

SEQ ID NO: 1420960 - DNA, 15 bp, Homo sapiens
tttagacttgtattt

SEQ ID NO: 1420961 - DNA, 15 bp, Homo sapiens
ttagacttgtatttt

SEQ ID NO: 1420962 - DNA, 15 bp, Homo sapiens
tagacttgtattttt

SEQ ID NO: 1420963 - DNA, 15 bp, Homo sapiens
agacttgtattttta

SEQ ID NO: 1420964 - DNA, 15 bp, Homo sapiens
gacttgtatttttat

SEQ ID NO: 1420965 - DNA, 15 bp, Homo sapiens
acttgtatttttatt

SEQ ID NO: 1420966 - DNA, 15 bp, Homo sapiens
cttgtatttttatta

SEQ ID NO: 1420967 - DNA, 15 bp, Homo sapiens
ttgtatttttattat

SEQ ID NO: 1420968 - DNA, 15 bp, Homo sapiens
tgtatttttattata

SEQ ID NO: 1420969 - DNA, 15 bp, Homo sapiens
gtatttttattataa

SEQ ID NO: 1420970 - DNA, 15 bp, Homo sapiens
tatttttattataag

SEQ ID NO: 1420971 - DNA, 15 bp, Homo sapiens
atttttattataagg

SEQ ID NO: 1420972 - DNA, 15 bp, Homo sapiens
tttttattataaggg

SEQ ID NO: 1420973 - DNA, 15 bp, Homo sapiens
ttttattataaggga

SEQ ID NO: 1420974 - DNA, 15 bp, Homo sapiens
tttattataagggac

SEQ ID NO: 1420975 - DNA, 15 bp, Homo sapiens
ttattataagggaca

SEQ ID NO: 1420976 - DNA, 15 bp, Homo sapiens
tattataagggacag

SEQ ID NO: 1420977 - DNA, 15 bp, Homo sapiens
attataagggacaga

SEQ ID NO: 1420978 - DNA, 15 bp, Homo sapiens
ttataagggacagat

SEQ ID NO: 1420979 - DNA, 15 bp, Homo sapiens
tataagggacagata

SEQ ID NO: 1420980 - DNA, 15 bp, Homo sapiens
ataagggacagataa

SEQ ID NO: 1420981 - DNA, 15 bp, Homo sapiens
taagggacagataat

SEQ ID NO: 1420982 - DNA, 15 bp, Homo sapiens
aagggacagataata

SEQ ID NO: 1420983 - DNA, 15 bp, Homo sapiens
agggacagataatag

SEQ ID NO: 1420984 - DNA, 15 bp, Homo sapiens
gggacagataatagt

SEQ ID NO: 1420985 - DNA, 15 bp, Homo sapiens
ggacagataatagtg

SEQ ID NO: 1420986 - DNA, 15 bp, Homo sapiens
gacagataatagtga

SEQ ID NO: 1420987 - DNA, 15 bp, Homo sapiens
acagataatagtgaa

SEQ ID NO: 1420988 - DNA, 15 bp, Homo sapiens
cagataatagtgaat

SEQ ID NO: 1420989 - DNA, 15 bp, Homo sapiens
agataatagtgaatg

SEQ ID NO: 1420990 - DNA, 15 bp, Homo sapiens
gataatagtgaatga

SEQ ID NO: 1420991 - DNA, 15 bp, Homo sapiens
ataatagtgaatgag

SEQ ID NO: 1420992 - DNA, 15 bp, Homo sapiens
taatagtgaatgagg

SEQ ID NO: 1420993 - DNA, 15 bp, Homo sapiens
aatagtgaatgaggg

SEQ ID NO: 1420994 - DNA, 15 bp, Homo sapiens
atagtgaatgaggga

SEQ ID NO: 1420995 - DNA, 15 bp, Homo sapiens
tagtgaatgagggaa

SEQ ID NO: 1420996 - DNA, 15 bp, Homo sapiens
agtgaatgagggaaa

SEQ ID NO: 1420997 - DNA, 15 bp, Homo sapiens
gtgaatgagggaaaa

SEQ ID NO: 1420998 - DNA, 15 bp, Homo sapiens
tgaatgagggaaaaa

SEQ ID NO: 1420999 - DNA, 15 bp, Homo sapiens
gaatgagggaaaaaa

SEQ ID NO: 1421000 - DNA, 15 bp, Homo sapiens
aatgagggaaaaaat

SEQ ID NO: 1421001 - DNA, 15 bp, Homo sapiens
atgagggaaaaaatc

SEQ ID NO: 1421002 - DNA, 15 bp, Homo sapiens
tgagggaaaaaatct

SEQ ID NO: 1421003 - DNA, 15 bp, Homo sapiens
gagggaaaaaatctc

SEQ ID NO: 1421004 - DNA, 15 bp, Homo sapiens
agggaaaaaatctca

SEQ ID NO: 1421005 - DNA, 15 bp, Homo sapiens
gggaaaaaatctcat

SEQ ID NO: 1421006 - DNA, 15 bp, Homo sapiens
ggaaaaaatctcatg

SEQ ID NO: 1421007 - DNA, 15 bp, Homo sapiens
gaaaaaatctcatga

SEQ ID NO: 1421008 - DNA, 15 bp, Homo sapiens
aaaaaatctcatgaa

SEQ ID NO: 1421009 - DNA, 15 bp, Homo sapiens
aaaaatctcatgaac

SEQ ID NO: 1421010 - DNA, 15 bp, Homo sapiens
aaaatctcatgaaca

SEQ ID NO: 1421011 - DNA, 15 bp, Homo sapiens
aaatctcatgaacac

SEQ ID NO: 1421012 - DNA, 15 bp, Homo sapiens
aatctcatgaacact

SEQ ID NO: 1421013 - DNA, 15 bp, Homo sapiens
atctcatgaacacta

SEQ ID NO: 1421014 - DNA, 15 bp, Homo sapiens
tctcatgaacactag

SEQ ID NO: 1421015 - DNA, 15 bp, Homo sapiens
ctcatgaacactagt

SEQ ID NO: 1421016 - DNA, 15 bp, Homo sapiens
tcatgaacactagtt

SEQ ID NO: 1421017 - DNA, 15 bp, Homo sapiens
catgaacactagttt

SEQ ID NO: 1421018 - DNA, 15 bp, Homo sapiens
atgaacactagtttc

SEQ ID NO: 1421019 - DNA, 15 bp, Homo sapiens
tgaacactagtttcc

SEQ ID NO: 1421020 - DNA, 15 bp, Homo sapiens
gaacactagtttcca

SEQ ID NO: 1421021 - DNA, 15 bp, Homo sapiens
aacactagtttccag

SEQ ID NO: 1421022 - DNA, 15 bp, Homo sapiens
acactagtttccaga

SEQ ID NO: 1421023 - DNA, 15 bp, Homo sapiens
cactagtttccagac

SEQ ID NO: 1421024 - DNA, 15 bp, Homo sapiens
actagtttccagact

SEQ ID NO: 1421025 - DNA, 15 bp, Homo sapiens
ctagtttccagactt

SEQ ID NO: 1421026 - DNA, 15 bp, Homo sapiens
tagtttccagacttc

SEQ ID NO: 1421027 - DNA, 15 bp, Homo sapiens
agtttccagacttct

SEQ ID NO: 1421028 - DNA, 15 bp, Homo sapiens
gtttccagacttctg

SEQ ID NO: 1421029 - DNA, 15 bp, Homo sapiens
tttccagacttctgt

SEQ ID NO: 1421030 - DNA, 15 bp, Homo sapiens
ttccagacttctgtc

SEQ ID NO: 1421031 - DNA, 15 bp, Homo sapiens
tccagacttctgtcc

SEQ ID NO: 1421032 - DNA, 15 bp, Homo sapiens
ccagacttctgtcca

SEQ ID NO: 1421033 - DNA, 15 bp, Homo sapiens
cagacttctgtccaa

SEQ ID NO: 1421034 - DNA, 15 bp, Homo sapiens
agacttctgtccaac

SEQ ID NO: 1421035 - DNA, 15 bp, Homo sapiens
gacttctgtccaact

SEQ ID NO: 1421036 - DNA, 15 bp, Homo sapiens
acttctgtccaactt

SEQ ID NO: 1421037 - DNA, 15 bp, Homo sapiens
cttctgtccaacttc

SEQ ID NO: 1421038 - DNA, 15 bp, Homo sapiens
ttctgtccaacttca

SEQ ID NO: 1421039 - DNA, 15 bp, Homo sapiens
tctgtccaacttcac

SEQ ID NO: 1421040 - DNA, 15 bp, Homo sapiens
ctgtccaacttcaca

SEQ ID NO: 1421041 - DNA, 15 bp, Homo sapiens
tgtccaacttcacag

SEQ ID NO: 1421042 - DNA, 15 bp, Homo sapiens
gtccaacttcacagc

SEQ ID NO: 1421043 - DNA, 15 bp, Homo sapiens
tccaacttcacagcc

SEQ ID NO: 1421044 - DNA, 15 bp, Homo sapiens
ccaacttcacagcct

SEQ ID NO: 1421045 - DNA, 15 bp, Homo sapiens
caacttcacagcctt

SEQ ID NO: 1421046 - DNA, 15 bp, Homo sapiens
aacttcacagccttg

SEQ ID NO: 1421047 - DNA, 15 bp, Homo sapiens
acttcacagccttgg

SEQ ID NO: 1421048 - DNA, 15 bp, Homo sapiens
cttcacagccttggt

SEQ ID NO: 1421049 - DNA, 15 bp, Homo sapiens
ttcacagccttggtt

SEQ ID NO: 1421050 - DNA, 15 bp, Homo sapiens
tcacagccttggttt

SEQ ID NO: 1421051 - DNA, 15 bp, Homo sapiens
cacagccttggttta

SEQ ID NO: 1421052 - DNA, 15 bp, Homo sapiens
acagccttggtttac

SEQ ID NO: 1421053 - DNA, 15 bp, Homo sapiens
cagccttggtttact

SEQ ID NO: 1421054 - DNA, 15 bp, Homo sapiens
agccttggtttactg

SEQ ID NO: 1421055 - DNA, 15 bp, Homo sapiens
gccttggtttactgg

SEQ ID NO: 1421056 - DNA, 15 bp, Homo sapiens
ccttggtttactggc

SEQ ID NO: 1421057 - DNA, 15 bp, Homo sapiens
cttggtttactggca

SEQ ID NO: 1421058 - DNA, 15 bp, Homo sapiens
ttggtttactggcag

SEQ ID NO: 1421059 - DNA, 15 bp, Homo sapiens
tggtttactggcagt

SEQ ID NO: 1421060 - DNA, 15 bp, Homo sapiens
ggtttactggcagtt

SEQ ID NO: 1421061 - DNA, 15 bp, Homo sapiens
gtttactggcagttt

SEQ ID NO: 1421062 - DNA, 15 bp, Homo sapiens
tttactggcagtttc

SEQ ID NO: 1421063 - DNA, 15 bp, Homo sapiens
ttactggcagtttcc

SEQ ID NO: 1421064 - DNA, 15 bp, Homo sapiens
tactggcagtttcca

SEQ ID NO: 1421065 - DNA, 15 bp, Homo sapiens
actggcagtttccaa

SEQ ID NO: 1421066 - DNA, 15 bp, Homo sapiens
ctggcagtttccaaa

SEQ ID NO: 1421067 - DNA, 15 bp, Homo sapiens
tggcagtttccaaat

SEQ ID NO: 1421068 - DNA, 15 bp, Homo sapiens
ggcagtttccaaatg

SEQ ID NO: 1421069 - DNA, 15 bp, Homo sapiens
gcagtttccaaatgg

SEQ ID NO: 1421070 - DNA, 15 bp, Homo sapiens
cagtttccaaatggt

SEQ ID NO: 1421071 - DNA, 15 bp, Homo sapiens
agtttccaaatggtc

SEQ ID NO: 1421072 - DNA, 15 bp, Homo sapiens
gtttccaaatggtca

SEQ ID NO: 1421073 - DNA, 15 bp, Homo sapiens
tttccaaatggtcag

SEQ ID NO: 1421074 - DNA, 15 bp, Homo sapiens
ttccaaatggtcagg

SEQ ID NO: 1421075 - DNA, 15 bp, Homo sapiens
tccaaatggtcaggc

SEQ ID NO: 1421076 - DNA, 15 bp, Homo sapiens
ccaaatggtcaggct

SEQ ID NO: 1421077 - DNA, 15 bp, Homo sapiens
caaatggtcaggctg

SEQ ID NO: 1421078 - DNA, 15 bp, Homo sapiens
aaatggtcaggctgg

SEQ ID NO: 1421079 - DNA, 15 bp, Homo sapiens
aatggtcaggctgga

SEQ ID NO: 1421080 - DNA, 15 bp, Homo sapiens
atggtcaggctggaa

SEQ ID NO: 1421081 - DNA, 15 bp, Homo sapiens
tggtcaggctggaaa

SEQ ID NO: 1421082 - DNA, 15 bp, Homo sapiens
ggtcaggctggaaat

SEQ ID NO: 1421083 - DNA, 15 bp, Homo sapiens
gtcaggctggaaatt

SEQ ID NO: 1421084 - DNA, 15 bp, Homo sapiens
tcaggctggaaattg

SEQ ID NO: 1421085 - DNA, 15 bp, Homo sapiens
caggctggaaattga

SEQ ID NO: 1421086 - DNA, 15 bp, Homo sapiens
aggctggaaattgat

SEQ ID NO: 1421087 - DNA, 15 bp, Homo sapiens
ggctggaaattgatg

SEQ ID NO: 1421088 - DNA, 15 bp, Homo sapiens
gctggaaattgatga

SEQ ID NO: 1421089 - DNA, 15 bp, Homo sapiens
ctggaaattgatgaa

SEQ ID NO: 1421090 - DNA, 15 bp, Homo sapiens
tggaaattgatgaaa

SEQ ID NO: 1421091 - DNA, 15 bp, Homo sapiens
ggaaattgatgaaag

SEQ ID NO: 1421092 - DNA, 15 bp, Homo sapiens
gaaattgatgaaagc

SEQ ID NO: 1421093 - DNA, 15 bp, Homo sapiens
aaattgatgaaagct

SEQ ID NO: 1421094 - DNA, 15 bp, Homo sapiens
aattgatgaaagctg

SEQ ID NO: 1421095 - DNA, 15 bp, Homo sapiens
attgatgaaagctgt

SEQ ID NO: 1421096 - DNA, 15 bp, Homo sapiens
ttgatgaaagctgtt

SEQ ID NO: 1421097 - DNA, 15 bp, Homo sapiens
tgatgaaagctgttt

SEQ ID NO: 1421098 - DNA, 15 bp, Homo sapiens
gatgaaagctgtttc

SEQ ID NO: 1421099 - DNA, 15 bp, Homo sapiens
atgaaagctgtttct

SEQ ID NO: 1421100 - DNA, 15 bp, Homo sapiens
tgaaagctgtttctt

SEQ ID NO: 1421101 - DNA, 15 bp, Homo sapiens
gaaagctgtttcttt

SEQ ID NO: 1421102 - DNA, 15 bp, Homo sapiens
aaagctgtttctttt

SEQ ID NO: 1421103 - DNA, 15 bp, Homo sapiens
aagctgtttcttttg

SEQ ID NO: 1421104 - DNA, 15 bp, Homo sapiens
agctgtttcttttga

SEQ ID NO: 1421105 - DNA, 15 bp, Homo sapiens
gctgtttcttttgac

SEQ ID NO: 1421106 - DNA, 15 bp, Homo sapiens
ctgtttcttttgacc

SEQ ID NO: 1421107 - DNA, 15 bp, Homo sapiens
tgtttcttttgacca

SEQ ID NO: 1421108 - DNA, 15 bp, Homo sapiens
gtttcttttgaccat

SEQ ID NO: 1421109 - DNA, 15 bp, Homo sapiens
tttcttttgaccatg

SEQ ID NO: 1421110 - DNA, 15 bp, Homo sapiens
ttcttttgaccatgg

SEQ ID NO: 1421111 - DNA, 15 bp, Homo sapiens
tcttttgaccatggc

SEQ ID NO: 1421112 - DNA, 15 bp, Homo sapiens
cttttgaccatggct

SEQ ID NO: 1421113 - DNA, 15 bp, Homo sapiens
ttttgaccatggctc

SEQ ID NO: 1421114 - DNA, 15 bp, Homo sapiens
tttgaccatggctcc

SEQ ID NO: 1421115 - DNA, 15 bp, Homo sapiens
ttgaccatggctcca

SEQ ID NO: 1421116 - DNA, 15 bp, Homo sapiens
tgaccatggctccat

SEQ ID NO: 1421117 - DNA, 15 bp, Homo sapiens
gaccatggctccata

SEQ ID NO: 1421118 - DNA, 15 bp, Homo sapiens
accatggctccataa

SEQ ID NO: 1421119 - DNA, 15 bp, Homo sapiens
ccatggctccataaa

SEQ ID NO: 1421120 - DNA, 15 bp, Homo sapiens
catggctccataaag

SEQ ID NO: 1421121 - DNA, 15 bp, Homo sapiens
atggctccataaagg

SEQ ID NO: 1421122 - DNA, 15 bp, Homo sapiens
tggctccataaaggc

SEQ ID NO: 1421123 - DNA, 15 bp, Homo sapiens
ggctccataaaggca

SEQ ID NO: 1421124 - DNA, 15 bp, Homo sapiens
gctccataaaggcaa

SEQ ID NO: 1421125 - DNA, 15 bp, Homo sapiens
ctccataaaggcaat

SEQ ID NO: 1421126 - DNA, 15 bp, Homo sapiens
tccataaaggcaatg

SEQ ID NO: 1421127 - DNA, 15 bp, Homo sapiens
ccataaaggcaatgg

SEQ ID NO: 1421128 - DNA, 15 bp, Homo sapiens
cataaaggcaatggg

SEQ ID NO: 1421129 - DNA, 15 bp, Homo sapiens
ataaaggcaatgggc

SEQ ID NO: 1421130 - DNA, 15 bp, Homo sapiens
taaaggcaatgggca

SEQ ID NO: 1421131 - DNA, 15 bp, Homo sapiens
aaaggcaatgggcag

SEQ ID NO: 1421132 - DNA, 15 bp, Homo sapiens
aaggcaatgggcagt

SEQ ID NO: 1421133 - DNA, 15 bp, Homo sapiens
aggcaatgggcagtg

SEQ ID NO: 1421134 - DNA, 15 bp, Homo sapiens
ggcaatgggcagtgc

SEQ ID NO: 1421135 - DNA, 15 bp, Homo sapiens
gcaatgggcagtgca

SEQ ID NO: 1421136 - DNA, 15 bp, Homo sapiens
caatgggcagtgcac

SEQ ID NO: 1421137 - DNA, 15 bp, Homo sapiens
aatgggcagtgcacg

SEQ ID NO: 1421138 - DNA, 15 bp, Homo sapiens
atgggcagtgcacgt

SEQ ID NO: 1421139 - DNA, 15 bp, Homo sapiens
tgggcagtgcacgtt

SEQ ID NO: 1421140 - DNA, 15 bp, Homo sapiens
gggcagtgcacgttg

SEQ ID NO: 1421141 - DNA, 15 bp, Homo sapiens
ggcagtgcacgttga

SEQ ID NO: 1421142 - DNA, 15 bp, Homo sapiens
gcagtgcacgttgaa

SEQ ID NO: 1421143 - DNA, 15 bp, Homo sapiens
cagtgcacgttgaaa

SEQ ID NO: 1421144 - DNA, 15 bp, Homo sapiens
agtgcacgttgaaag

SEQ ID NO: 1421145 - DNA, 15 bp, Homo sapiens
gtgcacgttgaaaga

SEQ ID NO: 1421146 - DNA, 15 bp, Homo sapiens
tgcacgttgaaagag

SEQ ID NO: 1421147 - DNA, 15 bp, Homo sapiens
gcacgttgaaagagt

SEQ ID NO: 1421148 - DNA, 15 bp, Homo sapiens
cacgttgaaagagta

SEQ ID NO: 1421149 - DNA, 15 bp, Homo sapiens
acgttgaaagagtaa

SEQ ID NO: 1421150 - DNA, 15 bp, Homo sapiens
cgttgaaagagtaag

SEQ ID NO: 1421151 - DNA, 15 bp, Homo sapiens
gttgaaagagtaagt

SEQ ID NO: 1421152 - DNA, 15 bp, Homo sapiens
ttgaaagagtaagta

SEQ ID NO: 1421153 - DNA, 15 bp, Homo sapiens
tgaaagagtaagtat

SEQ ID NO: 1421154 - DNA, 15 bp, Homo sapiens
gaaagagtaagtatg

SEQ ID NO: 1421155 - DNA, 15 bp, Homo sapiens
aaagagtaagtatga

SEQ ID NO: 1421156 - DNA, 15 bp, Homo sapiens
aagagtaagtatgaa

SEQ ID NO: 1421157 - DNA, 15 bp, Homo sapiens
agagtaagtatgaaa

SEQ ID NO: 1421158 - DNA, 15 bp, Homo sapiens
gagtaagtatgaaaa

SEQ ID NO: 1421159 - DNA, 15 bp, Homo sapiens
agtaagtatgaaaac

SEQ ID NO: 1421160 - DNA, 15 bp, Homo sapiens
gtaagtatgaaaaca

SEQ ID NO: 1421161 - DNA, 15 bp, Homo sapiens
taagtatgaaaacac

SEQ ID NO: 1421162 - DNA, 15 bp, Homo sapiens
aagtatgaaaacact

SEQ ID NO: 1421163 - DNA, 15 bp, Homo sapiens
agtatgaaaacactg

SEQ ID NO: 1421164 - DNA, 15 bp, Homo sapiens
gtatgaaaacactgg

SEQ ID NO: 1421165 - DNA, 15 bp, Homo sapiens
tatgaaaacactggc

SEQ ID NO: 1421166 - DNA, 15 bp, Homo sapiens
atgaaaacactggcc

SEQ ID NO: 1421167 - DNA, 15 bp, Homo sapiens
tgaaaacactggcct

SEQ ID NO: 1421168 - DNA, 15 bp, Homo sapiens
gaaaacactggcctc

SEQ ID NO: 1421169 - DNA, 15 bp, Homo sapiens
aaaacactggcctca

SEQ ID NO: 1421170 - DNA, 15 bp, Homo sapiens
aaacactggcctcat

SEQ ID NO: 1421171 - DNA, 15 bp, Homo sapiens
aacactggcctcatc

SEQ ID NO: 1421172 - DNA, 15 bp, Homo sapiens
acactggcctcatct

SEQ ID NO: 1421173 - DNA, 15 bp, Homo sapiens
cactggcctcatctc

SEQ ID NO: 1421174 - DNA, 15 bp, Homo sapiens
actggcctcatctca

SEQ ID NO: 1421175 - DNA, 15 bp, Homo sapiens
ctggcctcatctcat

SEQ ID NO: 1421176 - DNA, 15 bp, Homo sapiens
tggcctcatctcata

SEQ ID NO: 1421177 - DNA, 15 bp, Homo sapiens
ggcctcatctcataa

SEQ ID NO: 1421178 - DNA, 15 bp, Homo sapiens
gcctcatctcataaa

SEQ ID NO: 1421179 - DNA, 15 bp, Homo sapiens
cctcatctcataaac

SEQ ID NO: 1421180 - DNA, 15 bp, Homo sapiens
ctcatctcataaact

SEQ ID NO: 1421181 - DNA, 15 bp, Homo sapiens
tcatctcataaactt

SEQ ID NO: 1421182 - DNA, 15 bp, Homo sapiens
catctcataaacttt

SEQ ID NO: 1421183 - DNA, 15 bp, Homo sapiens
atctcataaacttta

SEQ ID NO: 1421184 - DNA, 15 bp, Homo sapiens
tctcataaactttat

SEQ ID NO: 1421185 - DNA, 15 bp, Homo sapiens
ctcataaactttatt

SEQ ID NO: 1421186 - DNA, 15 bp, Homo sapiens
tcataaactttatta

SEQ ID NO: 1421187 - DNA, 15 bp, Homo sapiens
cataaactttattat

SEQ ID NO: 1421188 - DNA, 15 bp, Homo sapiens
ataaactttattatt

SEQ ID NO: 1421189 - DNA, 15 bp, Homo sapiens
taaactttattattg

SEQ ID NO: 1421190 - DNA, 15 bp, Homo sapiens
aaactttattattga

SEQ ID NO: 1421191 - DNA, 15 bp, Homo sapiens
aactttattattgat

SEQ ID NO: 1421192 - DNA, 15 bp, Homo sapiens
actttattattgata

SEQ ID NO: 1421193 - DNA, 15 bp, Homo sapiens
ctttattattgatag

SEQ ID NO: 1421194 - DNA, 15 bp, Homo sapiens
tttattattgatagt

SEQ ID NO: 1421195 - DNA, 15 bp, Homo sapiens
ttattattgatagta

SEQ ID NO: 1421196 - DNA, 15 bp, Homo sapiens
tattattgatagtat

SEQ ID NO: 1421197 - DNA, 15 bp, Homo sapiens
attattgatagtatt

SEQ ID NO: 1421198 - DNA, 15 bp, Homo sapiens
ttattgatagtattt

SEQ ID NO: 1421199 - DNA, 15 bp, Homo sapiens
tattgatagtatttt

SEQ ID NO: 1421200 - DNA, 15 bp, Homo sapiens
attgatagtatttta

SEQ ID NO: 1421201 - DNA, 15 bp, Homo sapiens
ttgatagtattttat

SEQ ID NO: 1421202 - DNA, 15 bp, Homo sapiens
tgatagtattttatc

SEQ ID NO: 1421203 - DNA, 15 bp, Homo sapiens
gatagtattttatcc

SEQ ID NO: 1421204 - DNA, 15 bp, Homo sapiens
atagtattttatcct

SEQ ID NO: 1421205 - DNA, 15 bp, Homo sapiens
tagtattttatccta

SEQ ID NO: 1421206 - DNA, 15 bp, Homo sapiens
agtattttatcctag

SEQ ID NO: 1421207 - DNA, 15 bp, Homo sapiens
gtattttatcctagc

SEQ ID NO: 1421208 - DNA, 15 bp, Homo sapiens
tattttatcctagca

SEQ ID NO: 1421209 - DNA, 15 bp, Homo sapiens
attttatcctagcag

SEQ ID NO: 1421210 - DNA, 15 bp, Homo sapiens
ttttatcctagcagc

SEQ ID NO: 1421211 - DNA, 15 bp, Homo sapiens
tttatcctagcagct

SEQ ID NO: 1421212 - DNA, 15 bp, Homo sapiens
ttatcctagcagctg

SEQ ID NO: 1421213 - DNA, 15 bp, Homo sapiens
tatcctagcagctgt

SEQ ID NO: 1421214 - DNA, 15 bp, Homo sapiens
atcctagcagctgtt

SEQ ID NO: 1421215 - DNA, 15 bp, Homo sapiens
tcctagcagctgttt

SEQ ID NO: 1421216 - DNA, 15 bp, Homo sapiens
cctagcagctgtttt

SEQ ID NO: 1421217 - DNA, 15 bp, Homo sapiens
ctagcagctgttttt

SEQ ID NO: 1421218 - DNA, 15 bp, Homo sapiens
tagcagctgtttttg

SEQ ID NO: 1421219 - DNA, 15 bp, Homo sapiens
agcagctgtttttga

SEQ ID NO: 1421220 - DNA, 15 bp, Homo sapiens
gcagctgtttttgaa

SEQ ID NO: 1421221 - DNA, 15 bp, Homo sapiens
cagctgtttttgaag

SEQ ID NO: 1421222 - DNA, 15 bp, Homo sapiens
agctgtttttgaagc

SEQ ID NO: 1421223 - DNA, 15 bp, Homo sapiens
gctgtttttgaagca

SEQ ID NO: 1421224 - DNA, 15 bp, Homo sapiens
ctgtttttgaagcac

SEQ ID NO: 1421225 - DNA, 15 bp, Homo sapiens
tgtttttgaagcact

SEQ ID NO: 1421226 - DNA, 15 bp, Homo sapiens
gtttttgaagcactg

SEQ ID NO: 1421227 - DNA, 15 bp, Homo sapiens
tttttgaagcactgt

SEQ ID NO: 1421228 - DNA, 15 bp, Homo sapiens
ttttgaagcactgtc

SEQ ID NO: 1421229 - DNA, 15 bp, Homo sapiens
tttgaagcactgtct

SEQ ID NO: 1421230 - DNA, 15 bp, Homo sapiens
ttgaagcactgtctt

SEQ ID NO: 1421231 - DNA, 15 bp, Homo sapiens
tgaagcactgtcttg

SEQ ID NO: 1421232 - DNA, 15 bp, Homo sapiens
gaagcactgtcttga

SEQ ID NO: 1421233 - DNA, 15 bp, Homo sapiens
aagcactgtcttgaa

SEQ ID NO: 1421234 - DNA, 15 bp, Homo sapiens
agcactgtcttgaat

SEQ ID NO: 1421235 - DNA, 15 bp, Homo sapiens
gcactgtcttgaatt

SEQ ID NO: 1421236 - DNA, 15 bp, Homo sapiens
cactgtcttgaattc

SEQ ID NO: 1421237 - DNA, 15 bp, Homo sapiens
actgtcttgaattca

SEQ ID NO: 1421238 - DNA, 15 bp, Homo sapiens
ctgtcttgaattcat

SEQ ID NO: 1421239 - DNA, 15 bp, Homo sapiens
tgtcttgaattcatg

SEQ ID NO: 1421240 - DNA, 15 bp, Homo sapiens
gtcttgaattcatgt

SEQ ID NO: 1421241 - DNA, 15 bp, Homo sapiens
tcttgaattcatgtg

SEQ ID NO: 1421242 - DNA, 15 bp, Homo sapiens
cttgaattcatgtga

SEQ ID NO: 1421243 - DNA, 15 bp, Homo sapiens
ttgaattcatgtgac

SEQ ID NO: 1421244 - DNA, 15 bp, Homo sapiens
tgaattcatgtgact

SEQ ID NO: 1421245 - DNA, 15 bp, Homo sapiens
gaattcatgtgactg

SEQ ID NO: 1421246 - DNA, 15 bp, Homo sapiens
aattcatgtgactgc

SEQ ID NO: 1421247 - DNA, 15 bp, Homo sapiens
attcatgtgactgcc

SEQ ID NO: 1421248 - DNA, 15 bp, Homo sapiens
ttcatgtgactgccc

SEQ ID NO: 1421249 - DNA, 15 bp, Homo sapiens
tcatgtgactgccca

SEQ ID NO: 1421250 - DNA, 15 bp, Homo sapiens
catgtgactgcccag

SEQ ID NO: 1421251 - DNA, 15 bp, Homo sapiens
atgtgactgcccagg

SEQ ID NO: 1421252 - DNA, 15 bp, Homo sapiens
tgtgactgcccaggc

SEQ ID NO: 1421253 - DNA, 15 bp, Homo sapiens
gtgactgcccaggct

SEQ ID NO: 1421254 - DNA, 15 bp, Homo sapiens
tgactgcccaggctt

SEQ ID NO: 1421255 - DNA, 15 bp, Homo sapiens
gactgcccaggcttt

SEQ ID NO: 1421256 - DNA, 15 bp, Homo sapiens
actgcccaggctttt

SEQ ID NO: 1421257 - DNA, 15 bp, Homo sapiens
ctgcccaggcttttg

SEQ ID NO: 1421258 - DNA, 15 bp, Homo sapiens
tgcccaggcttttga

SEQ ID NO: 1421259 - DNA, 15 bp, Homo sapiens
gcccaggcttttgac

SEQ ID NO: 1421260 - DNA, 15 bp, Homo sapiens
cccaggcttttgaca

SEQ ID NO: 1421261 - DNA, 15 bp, Homo sapiens
ccaggcttttgacac

SEQ ID NO: 1421262 - DNA, 15 bp, Homo sapiens
caggcttttgacaca

SEQ ID NO: 1421263 - DNA, 15 bp, Homo sapiens
aggcttttgacacaa

SEQ ID NO: 1421264 - DNA, 15 bp, Homo sapiens
ggcttttgacacaaa

SEQ ID NO: 1421265 - DNA, 15 bp, Homo sapiens
gcttttgacacaaat

SEQ ID NO: 1421266 - DNA, 15 bp, Homo sapiens
cttttgacacaaatg

SEQ ID NO: 1421267 - DNA, 15 bp, Homo sapiens
ttttgacacaaatgt

SEQ ID NO: 1421268 - DNA, 15 bp, Homo sapiens
tttgacacaaatgtg

SEQ ID NO: 1421269 - DNA, 15 bp, Homo sapiens
ttgacacaaatgtgt

SEQ ID NO: 1421270 - DNA, 15 bp, Homo sapiens
tgacacaaatgtgtt

SEQ ID NO: 1421271 - DNA, 15 bp, Homo sapiens
gacacaaatgtgttc

SEQ ID NO: 1421272 - DNA, 15 bp, Homo sapiens
acacaaatgtgttcc

SEQ ID NO: 1421273 - DNA, 15 bp, Homo sapiens
cacaaatgtgttcca

SEQ ID NO: 1421274 - DNA, 15 bp, Homo sapiens
acaaatgtgttccag

SEQ ID NO: 1421275 - DNA, 15 bp, Homo sapiens
caaatgtgttccagg

SEQ ID NO: 1421276 - DNA, 15 bp, Homo sapiens
aaatgtgttccaggg

SEQ ID NO: 1421277 - DNA, 15 bp, Homo sapiens
aatgtgttccaggga

SEQ ID NO: 1421278 - DNA, 15 bp, Homo sapiens
atgtgttccagggag

SEQ ID NO: 1421279 - DNA, 15 bp, Homo sapiens
tgtgttccagggaga

SEQ ID NO: 1421280 - DNA, 15 bp, Homo sapiens
gtgttccagggagac

SEQ ID NO: 1421281 - DNA, 15 bp, Homo sapiens
tgttccagggagaca

SEQ ID NO: 1421282 - DNA, 15 bp, Homo sapiens
gttccagggagacag

SEQ ID NO: 1421283 - DNA, 15 bp, Homo sapiens
ttccagggagacaga

SEQ ID NO: 1421284 - DNA, 15 bp, Homo sapiens
tccagggagacagat

SEQ ID NO: 1421285 - DNA, 15 bp, Homo sapiens
ccagggagacagatt

SEQ ID NO: 1421286 - DNA, 15 bp, Homo sapiens
cagggagacagattg

SEQ ID NO: 1421287 - DNA, 15 bp, Homo sapiens
agggagacagattga

SEQ ID NO: 1421288 - DNA, 15 bp, Homo sapiens
gggagacagattgag

SEQ ID NO: 1421289 - DNA, 15 bp, Homo sapiens
ggagacagattgagg

SEQ ID NO: 1421290 - DNA, 15 bp, Homo sapiens
gagacagattgagga

SEQ ID NO: 1421291 - DNA, 15 bp, Homo sapiens
agacagattgaggaa

SEQ ID NO: 1421292 - DNA, 15 bp, Homo sapiens
gacagattgaggaat

SEQ ID NO: 1421293 - DNA, 15 bp, Homo sapiens
acagattgaggaatc

SEQ ID NO: 1421294 - DNA, 15 bp, Homo sapiens
cagattgaggaatct

SEQ ID NO: 1421295 - DNA, 15 bp, Homo sapiens
agattgaggaatctt

SEQ ID NO: 1421296 - DNA, 15 bp, Homo sapiens
gattgaggaatcttt

SEQ ID NO: 1421297 - DNA, 15 bp, Homo sapiens
attgaggaatctttg

SEQ ID NO: 1421298 - DNA, 15 bp, Homo sapiens
ttgaggaatctttga

SEQ ID NO: 1421299 - DNA, 15 bp, Homo sapiens
tgaggaatctttgag

SEQ ID NO: 1421300 - DNA, 15 bp, Homo sapiens
gaggaatctttgagt

SEQ ID NO: 1421301 - DNA, 15 bp, Homo sapiens
aggaatctttgagta

SEQ ID NO: 1421302 - DNA, 15 bp, Homo sapiens
ggaatctttgagtac

SEQ ID NO: 1421303 - DNA, 15 bp, Homo sapiens
gaatctttgagtact

SEQ ID NO: 1421304 - DNA, 15 bp, Homo sapiens
aatctttgagtacta

SEQ ID NO: 1421305 - DNA, 15 bp, Homo sapiens
atctttgagtactaa

SEQ ID NO: 1421306 - DNA, 15 bp, Homo sapiens
tctttgagtactaat

SEQ ID NO: 1421307 - DNA, 15 bp, Homo sapiens
ctttgagtactaatg

SEQ ID NO: 1421308 - DNA, 15 bp, Homo sapiens
tttgagtactaatgc

SEQ ID NO: 1421309 - DNA, 15 bp, Homo sapiens
ttgagtactaatgct

SEQ ID NO: 1421310 - DNA, 15 bp, Homo sapiens
tgagtactaatgctg

SEQ ID NO: 1421311 - DNA, 15 bp, Homo sapiens
gagtactaatgctgt

SEQ ID NO: 1421312 - DNA, 15 bp, Homo sapiens
atttcctgactctgt

SEQ ID NO: 1421313 - DNA, 15 bp, Homo sapiens
tttcctgactctgtg

SEQ ID NO: 1421314 - DNA, 15 bp, Homo sapiens
ttcctgactctgtga

SEQ ID NO: 1421315 - DNA, 15 bp, Homo sapiens
tcctgactctgtgat

SEQ ID NO: 1421316 - DNA, 15 bp, Homo sapiens
cctgactctgtgatc

SEQ ID NO: 1421317 - DNA, 15 bp, Homo sapiens
ctgactctgtgatct

SEQ ID NO: 1421318 - DNA, 15 bp, Homo sapiens
tgactctgtgatctg

SEQ ID NO: 1421319 - DNA, 15 bp, Homo sapiens
gactctgtgatctgc

SEQ ID NO: 1421320 - DNA, 15 bp, Homo sapiens
actctgtgatctgcc

SEQ ID NO: 1421321 - DNA, 15 bp, Homo sapiens
ctctgtgatctgcct

SEQ ID NO: 1421322 - DNA, 15 bp, Homo sapiens
tctgtgatctgcctg

SEQ ID NO: 1421323 - DNA, 15 bp, Homo sapiens
ctgtgatctgcctgc

SEQ ID NO: 1421324 - DNA, 15 bp, Homo sapiens
tgtgatctgcctgcc

SEQ ID NO: 1421325 - DNA, 15 bp, Homo sapiens
aggtgtgagcctctg

SEQ ID NO: 1421326 - DNA, 15 bp, Homo sapiens
ggtgtgagcctctgc

SEQ ID NO: 1421327 - DNA, 15 bp, Homo sapiens
gtgtgagcctctgcg

SEQ ID NO: 1421328 - DNA, 15 bp, Homo sapiens
tgtgagcctctgcgc

SEQ ID NO: 1421329 - DNA, 15 bp, Homo sapiens
gtgagcctctgcgcc

SEQ ID NO: 1421330 - DNA, 15 bp, Homo sapiens
tgagcctctgcgcct

SEQ ID NO: 1421331 - DNA, 15 bp, Homo sapiens
gagcctctgcgcctg

SEQ ID NO: 1421332 - DNA, 15 bp, Homo sapiens
agcctctgcgcctgg

SEQ ID NO: 1421333 - DNA, 15 bp, Homo sapiens
gcctctgcgcctggc

SEQ ID NO: 1421334 - DNA, 15 bp, Homo sapiens
cctctgcgcctggcc

SEQ ID NO: 1421335 - DNA, 15 bp, Homo sapiens
ctctgcgcctggccg

SEQ ID NO: 1421336 - DNA, 15 bp, Homo sapiens
tctgcgcctggccgc

SEQ ID NO: 1421337 - DNA, 15 bp, Homo sapiens
ctgcgcctggccgca

SEQ ID NO: 1421338 - DNA, 15 bp, Homo sapiens
tgcgcctggccgcat

SEQ ID NO: 1421339 - DNA, 15 bp, Homo sapiens
gcgcctggccgcatg

SEQ ID NO: 1421340 - DNA, 15 bp, Homo sapiens
cgcctggccgcatgg

SEQ ID NO: 1421341 - DNA, 15 bp, Homo sapiens
gcctggccgcatggg

SEQ ID NO: 1421342 - DNA, 15 bp, Homo sapiens
cctggccgcatggga

SEQ ID NO: 1421343 - DNA, 15 bp, Homo sapiens
ctggccgcatgggag

SEQ ID NO: 1421344 - DNA, 15 bp, Homo sapiens
tggccgcatgggaga

SEQ ID NO: 1421345 - DNA, 15 bp, Homo sapiens
ggccgcatgggagac

SEQ ID NO: 1421346 - DNA, 15 bp, Homo sapiens
gccgcatgggagaca

SEQ ID NO: 1421347 - DNA, 15 bp, Homo sapiens
ccgcatgggagacat

SEQ ID NO: 1421348 - DNA, 15 bp, Homo sapiens
cgcatgggagacatt

SEQ ID NO: 1421349 - DNA, 15 bp, Homo sapiens
gcatgggagacattt

SEQ ID NO: 1421350 - DNA, 15 bp, Homo sapiens
catgggagacatttt

SEQ ID NO: 1421351 - DNA, 15 bp, Homo sapiens
atgggagacattttt

SEQ ID NO: 1421352 - DNA, 15 bp, Homo sapiens
tgggagacattttta

SEQ ID NO: 1421353 - DNA, 15 bp, Homo sapiens
gggagacatttttaa

SEQ ID NO: 1421354 - DNA, 15 bp, Homo sapiens
ggagacatttttaaa

SEQ ID NO: 1421355 - DNA, 15 bp, Homo sapiens
gagacatttttaaat

SEQ ID NO: 1421356 - DNA, 15 bp, Homo sapiens
agacatttttaaatg

SEQ ID NO: 1421357 - DNA, 15 bp, Homo sapiens
gacatttttaaatgt

SEQ ID NO: 1421358 - DNA, 15 bp, Homo sapiens
acatttttaaatgtg

SEQ ID NO: 1421359 - DNA, 15 bp, Homo sapiens
catttttaaatgtgt

SEQ ID NO: 1421360 - DNA, 15 bp, Homo sapiens
atttttaaatgtgta

SEQ ID NO: 1421361 - DNA, 15 bp, Homo sapiens
tttttaaatgtgtag

SEQ ID NO: 1421362 - DNA, 15 bp, Homo sapiens
ttttaaatgtgtaga

SEQ ID NO: 1421363 - DNA, 15 bp, Homo sapiens
tttaaatgtgtagac

SEQ ID NO: 1421364 - DNA, 15 bp, Homo sapiens
ttaaatgtgtagact

SEQ ID NO: 1421365 - DNA, 15 bp, Homo sapiens
taaatgtgtagactt

SEQ ID NO: 1421366 - DNA, 15 bp, Homo sapiens
aaatgtgtagacttt

SEQ ID NO: 1421367 - DNA, 15 bp, Homo sapiens
aatgtgtagactttg

SEQ ID NO: 1421368 - DNA, 15 bp, Homo sapiens
atgtgtagactttga

SEQ ID NO: 1421369 - DNA, 15 bp, Homo sapiens
tgtgtagactttgac

SEQ ID NO: 1421370 - DNA, 15 bp, Homo sapiens
gtgtagactttgact

SEQ ID NO: 1421371 - DNA, 15 bp, Homo sapiens
tgtagactttgactc

SEQ ID NO: 1421372 - DNA, 15 bp, Homo sapiens
gtagactttgactcc

SEQ ID NO: 1421373 - DNA, 15 bp, Homo sapiens
tagactttgactcca

SEQ ID NO: 1421374 - DNA, 15 bp, Homo sapiens
agactttgactccag

SEQ ID NO: 1421375 - DNA, 15 bp, Homo sapiens
gactttgactccagg

SEQ ID NO: 1421376 - DNA, 15 bp, Homo sapiens
actttgactccagga

SEQ ID NO: 1421377 - DNA, 15 bp, Homo sapiens
ctttgactccaggag

SEQ ID NO: 1421378 - DNA, 15 bp, Homo sapiens
tttgactccaggagt

SEQ ID NO: 1421379 - DNA, 15 bp, Homo sapiens
ttgactccaggagtt

SEQ ID NO: 1421380 - DNA, 15 bp, Homo sapiens
tgactccaggagtta

SEQ ID NO: 1421381 - DNA, 15 bp, Homo sapiens
gactccaggagttag

SEQ ID NO: 1421382 - DNA, 15 bp, Homo sapiens
actccaggagttagt

SEQ ID NO: 1421383 - DNA, 15 bp, Homo sapiens
ctccaggagttagta

SEQ ID NO: 1421384 - DNA, 15 bp, Homo sapiens
tccaggagttagtac

SEQ ID NO: 1421385 - DNA, 15 bp, Homo sapiens
ccaggagttagtacc

SEQ ID NO: 1421386 - DNA, 15 bp, Homo sapiens
caggagttagtacca

SEQ ID NO: 1421387 - DNA, 15 bp, Homo sapiens
aggagttagtaccat

SEQ ID NO: 1421388 - DNA, 15 bp, Homo sapiens
ggagttagtaccatt

SEQ ID NO: 1421389 - DNA, 15 bp, Homo sapiens
gagttagtaccattg

SEQ ID NO: 1421390 - DNA, 15 bp, Homo sapiens
agttagtaccattgg

SEQ ID NO: 1421391 - DNA, 15 bp, Homo sapiens
gttagtaccattggg

SEQ ID NO: 1421392 - DNA, 15 bp, Homo sapiens
ttagtaccattggga

SEQ ID NO: 1421393 - DNA, 15 bp, Homo sapiens
tagtaccattgggaa

SEQ ID NO: 1421394 - DNA, 15 bp, Homo sapiens
agtaccattgggaac

SEQ ID NO: 1421395 - DNA, 15 bp, Homo sapiens
gtaccattgggaaca

SEQ ID NO: 1421396 - DNA, 15 bp, Homo sapiens
taccattgggaacac

SEQ ID NO: 1421397 - DNA, 15 bp, Homo sapiens
accattgggaacacc

SEQ ID NO: 1421398 - DNA, 15 bp, Homo sapiens
ccattgggaacacct

SEQ ID NO: 1421399 - DNA, 15 bp, Homo sapiens
cattgggaacacctg

SEQ ID NO: 1421400 - DNA, 15 bp, Homo sapiens
attgggaacacctgt

SEQ ID NO: 1421401 - DNA, 15 bp, Homo sapiens
ttgggaacacctgtg

SEQ ID NO: 1421402 - DNA, 15 bp, Homo sapiens
tgggaacacctgtga

SEQ ID NO: 1421403 - DNA, 15 bp, Homo sapiens
gggaacacctgtgac

SEQ ID NO: 1421404 - DNA, 15 bp, Homo sapiens
ggaacacctgtgact

SEQ ID NO: 1421405 - DNA, 15 bp, Homo sapiens
gaacacctgtgactg

SEQ ID NO: 1421406 - DNA, 15 bp, Homo sapiens
aacacctgtgactgc

SEQ ID NO: 1421407 - DNA, 15 bp, Homo sapiens
acacctgtgactgct

SEQ ID NO: 1421408 - DNA, 15 bp, Homo sapiens
cacctgtgactgctt

SEQ ID NO: 1421409 - DNA, 15 bp, Homo sapiens
acctgtgactgcttc

SEQ ID NO: 1421410 - DNA, 15 bp, Homo sapiens
cctgtgactgcttcc

SEQ ID NO: 1421411 - DNA, 15 bp, Homo sapiens
ctgtgactgcttccg

SEQ ID NO: 1421412 - DNA, 15 bp, Homo sapiens
tgtgactgcttccgc

SEQ ID NO: 1421413 - DNA, 15 bp, Homo sapiens
gtgactgcttccgct

SEQ ID NO: 1421414 - DNA, 15 bp, Homo sapiens
tgactgcttccgcta

SEQ ID NO: 1421415 - DNA, 15 bp, Homo sapiens
gactgcttccgctaa

SEQ ID NO: 1421416 - DNA, 15 bp, Homo sapiens
actgcttccgctaaa

SEQ ID NO: 1421417 - DNA, 15 bp, Homo sapiens
ctgcttccgctaaag

SEQ ID NO: 1421418 - DNA, 15 bp, Homo sapiens
tgcttccgctaaagg

SEQ ID NO: 1421419 - DNA, 15 bp, Homo sapiens
gcttccgctaaaggg

SEQ ID NO: 1421420 - DNA, 15 bp, Homo sapiens
cttccgctaaagggt

SEQ ID NO: 1421421 - DNA, 15 bp, Homo sapiens
ttccgctaaagggta

SEQ ID NO: 1421422 - DNA, 15 bp, Homo sapiens
tccgctaaagggtac

SEQ ID NO: 1421423 - DNA, 15 bp, Homo sapiens
ccgctaaagggtaca

SEQ ID NO: 1421424 - DNA, 15 bp, Homo sapiens
cgctaaagggtacac

SEQ ID NO: 1421425 - DNA, 15 bp, Homo sapiens
gctaaagggtacact

SEQ ID NO: 1421426 - DNA, 15 bp, Homo sapiens
ctaaagggtacacta

SEQ ID NO: 1421427 - DNA, 15 bp, Homo sapiens
taaagggtacactag

SEQ ID NO: 1421428 - DNA, 15 bp, Homo sapiens
aaagggtacactagc

SEQ ID NO: 1421429 - DNA, 15 bp, Homo sapiens
aagggtacactagca

SEQ ID NO: 1421430 - DNA, 15 bp, Homo sapiens
agggtacactagcaa

SEQ ID NO: 1421431 - DNA, 15 bp, Homo sapiens
gggtacactagcaaa

SEQ ID NO: 1421432 - DNA, 15 bp, Homo sapiens
ggtacactagcaaat

SEQ ID NO: 1421433 - DNA, 15 bp, Homo sapiens
gtacactagcaaatg

SEQ ID NO: 1421434 - DNA, 15 bp, Homo sapiens
tacactagcaaatgt

SEQ ID NO: 1421435 - DNA, 15 bp, Homo sapiens
acactagcaaatgtg

SEQ ID NO: 1421436 - DNA, 15 bp, Homo sapiens
cactagcaaatgtgt

SEQ ID NO: 1421437 - DNA, 15 bp, Homo sapiens
actagcaaatgtgtg

SEQ ID NO: 1421438 - DNA, 15 bp, Homo sapiens
ctagcaaatgtgtga

SEQ ID NO: 1421439 - DNA, 15 bp, Homo sapiens
tagcaaatgtgtgat

SEQ ID NO: 1421440 - DNA, 15 bp, Homo sapiens
agcaaatgtgtgata

SEQ ID NO: 1421441 - DNA, 15 bp, Homo sapiens
gcaaatgtgtgatat

SEQ ID NO: 1421442 - DNA, 15 bp, Homo sapiens
caaatgtgtgatata

SEQ ID NO: 1421443 - DNA, 15 bp, Homo sapiens
aaatgtgtgatatag

SEQ ID NO: 1421444 - DNA, 15 bp, Homo sapiens
aatgtgtgatatagt

SEQ ID NO: 1421445 - DNA, 15 bp, Homo sapiens
atgtgtgatatagtg

SEQ ID NO: 1421446 - DNA, 15 bp, Homo sapiens
tgtgtgatatagtgt

SEQ ID NO: 1421447 - DNA, 15 bp, Homo sapiens
gtgtgatatagtgta

SEQ ID NO: 1421448 - DNA, 15 bp, Homo sapiens
tgtgatatagtgtat

SEQ ID NO: 1421449 - DNA, 15 bp, Homo sapiens
gtgatatagtgtatt

SEQ ID NO: 1421450 - DNA, 15 bp, Homo sapiens
tgatatagtgtattt

SEQ ID NO: 1421451 - DNA, 15 bp, Homo sapiens
gatatagtgtattta

SEQ ID NO: 1421452 - DNA, 15 bp, Homo sapiens
atatagtgtatttac

SEQ ID NO: 1421453 - DNA, 15 bp, Homo sapiens
tatagtgtatttact

SEQ ID NO: 1421454 - DNA, 15 bp, Homo sapiens
atagtgtatttactt

SEQ ID NO: 1421455 - DNA, 15 bp, Homo sapiens
tagtgtatttacttg

SEQ ID NO: 1421456 - DNA, 15 bp, Homo sapiens
agtgtatttacttgt

SEQ ID NO: 1421457 - DNA, 15 bp, Homo sapiens
gtgtatttacttgtt

SEQ ID NO: 1421458 - DNA, 15 bp, Homo sapiens
tgtatttacttgttc

SEQ ID NO: 1421459 - DNA, 15 bp, Homo sapiens
gtatttacttgttca

SEQ ID NO: 1421460 - DNA, 15 bp, Homo sapiens
tatttacttgttcac

SEQ ID NO: 1421461 - DNA, 15 bp, Homo sapiens
atttacttgttcaca

SEQ ID NO: 1421462 - DNA, 15 bp, Homo sapiens
tttacttgttcacag

SEQ ID NO: 1421463 - DNA, 15 bp, Homo sapiens
ttacttgttcacaga

SEQ ID NO: 1421464 - DNA, 15 bp, Homo sapiens
tacttgttcacagag

SEQ ID NO: 1421465 - DNA, 15 bp, Homo sapiens
acttgttcacagagt

SEQ ID NO: 1421466 - DNA, 15 bp, Homo sapiens
cttgttcacagagtt

SEQ ID NO: 1421467 - DNA, 15 bp, Homo sapiens
ttgttcacagagttt

SEQ ID NO: 1421468 - DNA, 15 bp, Homo sapiens
tgttcacagagtttt

SEQ ID NO: 1421469 - DNA, 15 bp, Homo sapiens
gttcacagagtttta

SEQ ID NO: 1421470 - DNA, 15 bp, Homo sapiens
ttcacagagttttaa

SEQ ID NO: 1421471 - DNA, 15 bp, Homo sapiens
tcacagagttttaaa

SEQ ID NO: 1421472 - DNA, 15 bp, Homo sapiens
cacagagttttaaac

SEQ ID NO: 1421473 - DNA, 15 bp, Homo sapiens
acagagttttaaaca

SEQ ID NO: 1421474 - DNA, 15 bp, Homo sapiens
cagagttttaaacac

SEQ ID NO: 1421475 - DNA, 15 bp, Homo sapiens
agagttttaaacacc

SEQ ID NO: 1421476 - DNA, 15 bp, Homo sapiens
gagttttaaacacct

SEQ ID NO: 1421477 - DNA, 15 bp, Homo sapiens
agttttaaacacctc

SEQ ID NO: 1421478 - DNA, 15 bp, Homo sapiens
gttttaaacacctca

SEQ ID NO: 1421479 - DNA, 15 bp, Homo sapiens
ttttaaacacctcat

SEQ ID NO: 1421480 - DNA, 15 bp, Homo sapiens
tttaaacacctcata

SEQ ID NO: 1421481 - DNA, 15 bp, Homo sapiens
ttaaacacctcatat

SEQ ID NO: 1421482 - DNA, 15 bp, Homo sapiens
taaacacctcatata

SEQ ID NO: 1421483 - DNA, 15 bp, Homo sapiens
aaacacctcatataa

SEQ ID NO: 1421484 - DNA, 15 bp, Homo sapiens
aacacctcatataaa

SEQ ID NO: 1421485 - DNA, 15 bp, Homo sapiens
acacctcatataaag

SEQ ID NO: 1421486 - DNA, 15 bp, Homo sapiens
cacctcatataaagg

SEQ ID NO: 1421487 - DNA, 15 bp, Homo sapiens
acctcatataaaggt

SEQ ID NO: 1421488 - DNA, 15 bp, Homo sapiens
cctcatataaaggta

SEQ ID NO: 1421489 - DNA, 15 bp, Homo sapiens
ctcatataaaggtat

SEQ ID NO: 1421490 - DNA, 15 bp, Homo sapiens
tcatataaaggtatt

SEQ ID NO: 1421491 - DNA, 15 bp, Homo sapiens
catataaaggtatta

SEQ ID NO: 1421492 - DNA, 15 bp, Homo sapiens
atataaaggtattaa

SEQ ID NO: 1421493 - DNA, 15 bp, Homo sapiens
tataaaggtattaat

SEQ ID NO: 1421494 - DNA, 15 bp, Homo sapiens
ataaaggtattaatt

SEQ ID NO: 1421495 - DNA, 15 bp, Homo sapiens
taaaggtattaattc

SEQ ID NO: 1421496 - DNA, 15 bp, Homo sapiens
aaaggtattaattca

SEQ ID NO: 1421497 - DNA, 15 bp, Homo sapiens
aaggtattaattcag

SEQ ID NO: 1421498 - DNA, 15 bp, Homo sapiens
aggtattaattcagt

SEQ ID NO: 1421499 - DNA, 15 bp, Homo sapiens
ggtattaattcagtt

SEQ ID NO: 1421500 - DNA, 15 bp, Homo sapiens
gtattaattcagttg

SEQ ID NO: 1421501 - DNA, 15 bp, Homo sapiens
tattaattcagttga

SEQ ID NO: 1421502 - DNA, 15 bp, Homo sapiens
attaattcagttgat

SEQ ID NO: 1421503 - DNA, 15 bp, Homo sapiens
ttaattcagttgatt

SEQ ID NO: 1421504 - DNA, 15 bp, Homo sapiens
taattcagttgattt

SEQ ID NO: 1421505 - DNA, 15 bp, Homo sapiens
aattcagttgattta

SEQ ID NO: 1421506 - DNA, 15 bp, Homo sapiens
attcagttgatttat

SEQ ID NO: 1421507 - DNA, 15 bp, Homo sapiens
ttcagttgatttatc

SEQ ID NO: 1421508 - DNA, 15 bp, Homo sapiens
tcagttgatttatcc

SEQ ID NO: 1421509 - DNA, 15 bp, Homo sapiens
cagttgatttatcca

SEQ ID NO: 1421510 - DNA, 15 bp, Homo sapiens
agttgatttatccaa

SEQ ID NO: 1421511 - DNA, 15 bp, Homo sapiens
gttgatttatccaaa

SEQ ID NO: 1421512 - DNA, 15 bp, Homo sapiens
ttgatttatccaaaa

SEQ ID NO: 1421513 - DNA, 15 bp, Homo sapiens
tgatttatccaaaag

SEQ ID NO: 1421514 - DNA, 15 bp, Homo sapiens
gatttatccaaaagg

SEQ ID NO: 1421515 - DNA, 15 bp, Homo sapiens
atttatccaaaagga

SEQ ID NO: 1421516 - DNA, 15 bp, Homo sapiens
tttatccaaaaggaa

SEQ ID NO: 1421517 - DNA, 15 bp, Homo sapiens
ttatccaaaaggaag

SEQ ID NO: 1421518 - DNA, 15 bp, Homo sapiens
tatccaaaaggaaga

SEQ ID NO: 1421519 - DNA, 15 bp, Homo sapiens
atccaaaaggaagac

SEQ ID NO: 1421520 - DNA, 15 bp, Homo sapiens
tccaaaaggaagaca

SEQ ID NO: 1421521 - DNA, 15 bp, Homo sapiens
ccaaaaggaagacac

SEQ ID NO: 1421522 - DNA, 15 bp, Homo sapiens
caaaaggaagacact

SEQ ID NO: 1421523 - DNA, 15 bp, Homo sapiens
aaaaggaagacacta

SEQ ID NO: 1421524 - DNA, 15 bp, Homo sapiens
aaaggaagacactaa

SEQ ID NO: 1421525 - DNA, 15 bp, Homo sapiens
aaggaagacactaat

SEQ ID NO: 1421526 - DNA, 15 bp, Homo sapiens
aggaagacactaatt

SEQ ID NO: 1421527 - DNA, 15 bp, Homo sapiens
ggaagacactaattc

SEQ ID NO: 1421528 - DNA, 15 bp, Homo sapiens
gaagacactaattct

SEQ ID NO: 1421529 - DNA, 15 bp, Homo sapiens
aagacactaattctt

SEQ ID NO: 1421530 - DNA, 15 bp, Homo sapiens
agacactaattctta

SEQ ID NO: 1421531 - DNA, 15 bp, Homo sapiens
gacactaattcttat

SEQ ID NO: 1421532 - DNA, 15 bp, Homo sapiens
acactaattcttatt

SEQ ID NO: 1421533 - DNA, 15 bp, Homo sapiens
cactaattcttattt

SEQ ID NO: 1421534 - DNA, 15 bp, Homo sapiens
actaattcttatttt

SEQ ID NO: 1421535 - DNA, 15 bp, Homo sapiens
ctaattcttattttg

SEQ ID NO: 1421536 - DNA, 15 bp, Homo sapiens
taattcttattttgt

SEQ ID NO: 1421537 - DNA, 15 bp, Homo sapiens
aattcttattttgtg

SEQ ID NO: 1421538 - DNA, 15 bp, Homo sapiens
attcttattttgtgg

SEQ ID NO: 1421539 - DNA, 15 bp, Homo sapiens
ttcttattttgtgga

SEQ ID NO: 1421540 - DNA, 15 bp, Homo sapiens
tcttattttgtggaa

SEQ ID NO: 1421541 - DNA, 15 bp, Homo sapiens
cttattttgtggaaa

SEQ ID NO: 1421542 - DNA, 15 bp, Homo sapiens
ttattttgtggaaaa

SEQ ID NO: 1421543 - DNA, 15 bp, Homo sapiens
tattttgtggaaaat

SEQ ID NO: 1421544 - DNA, 15 bp, Homo sapiens
attttgtggaaaatg

SEQ ID NO: 1421545 - DNA, 15 bp, Homo sapiens
ttttgtggaaaatgt

SEQ ID NO: 1421546 - DNA, 15 bp, Homo sapiens
tttgtggaaaatgtt

SEQ ID NO: 1421547 - DNA, 15 bp, Homo sapiens
ttgtggaaaatgtta

SEQ ID NO: 1421548 - DNA, 15 bp, Homo sapiens
tgtggaaaatgttat

SEQ ID NO: 1421549 - DNA, 15 bp, Homo sapiens
gtggaaaatgttata

SEQ ID NO: 1421550 - DNA, 15 bp, Homo sapiens
tggaaaatgttatag

SEQ ID NO: 1421551 - DNA, 15 bp, Homo sapiens
ggaaaatgttatagt

SEQ ID NO: 1421552 - DNA, 15 bp, Homo sapiens
gaaaatgttatagtt

SEQ ID NO: 1421553 - DNA, 15 bp, Homo sapiens
aaaatgttatagttg

SEQ ID NO: 1421554 - DNA, 15 bp, Homo sapiens
aaatgttatagttgt

SEQ ID NO: 1421555 - DNA, 15 bp, Homo sapiens
aatgttatagttgtt

SEQ ID NO: 1421556 - DNA, 15 bp, Homo sapiens
atgttatagttgtta

SEQ ID NO: 1421557 - DNA, 15 bp, Homo sapiens
tgttatagttgttaa

SEQ ID NO: 1421558 - DNA, 15 bp, Homo sapiens
gttatagttgttaat

SEQ ID NO: 1421559 - DNA, 15 bp, Homo sapiens
ttatagttgttaata

SEQ ID NO: 1421560 - DNA, 15 bp, Homo sapiens
tatagttgttaatat

SEQ ID NO: 1421561 - DNA, 15 bp, Homo sapiens
atagttgttaatatc

SEQ ID NO: 1421562 - DNA, 15 bp, Homo sapiens
tagttgttaatatca

SEQ ID NO: 1421563 - DNA, 15 bp, Homo sapiens
agttgttaatatcat

SEQ ID NO: 1421564 - DNA, 15 bp, Homo sapiens
gttgttaatatcatt

SEQ ID NO: 1421565 - DNA, 15 bp, Homo sapiens
ttgttaatatcattt

SEQ ID NO: 1421566 - DNA, 15 bp, Homo sapiens
tgttaatatcattta

SEQ ID NO: 1421567 - DNA, 15 bp, Homo sapiens
gttaatatcatttat

SEQ ID NO: 1421568 - DNA, 15 bp, Homo sapiens
ttaatatcatttatt

SEQ ID NO: 1421569 - DNA, 15 bp, Homo sapiens
taatatcatttattc

SEQ ID NO: 1421570 - DNA, 15 bp, Homo sapiens
aatatcatttattct

SEQ ID NO: 1421571 - DNA, 15 bp, Homo sapiens
atatcatttattctt

SEQ ID NO: 1421572 - DNA, 15 bp, Homo sapiens
tatcatttattctta

SEQ ID NO: 1421573 - DNA, 15 bp, Homo sapiens
atcatttattcttac

SEQ ID NO: 1421574 - DNA, 15 bp, Homo sapiens
tcatttattcttacc

SEQ ID NO: 1421575 - DNA, 15 bp, Homo sapiens
catttattcttaccc

SEQ ID NO: 1421576 - DNA, 15 bp, Homo sapiens
atttattcttacccc

SEQ ID NO: 1421577 - DNA, 15 bp, Homo sapiens
tttattcttacccct

SEQ ID NO: 1421578 - DNA, 15 bp, Homo sapiens
ttattcttacccctt

SEQ ID NO: 1421579 - DNA, 15 bp, Homo sapiens
tattcttaccccttc

SEQ ID NO: 1421580 - DNA, 15 bp, Homo sapiens
attcttaccccttct

SEQ ID NO: 1421581 - DNA, 15 bp, Homo sapiens
ttcttaccccttctc

SEQ ID NO: 1421582 - DNA, 15 bp, Homo sapiens
tcttaccccttctct

SEQ ID NO: 1421583 - DNA, 15 bp, Homo sapiens
cttaccccttctctt

SEQ ID NO: 1421584 - DNA, 15 bp, Homo sapiens
ttaccccttctcttt

SEQ ID NO: 1421585 - DNA, 15 bp, Homo sapiens
taccccttctctttt

SEQ ID NO: 1421586 - DNA, 15 bp, Homo sapiens
accccttctctttta

SEQ ID NO: 1421587 - DNA, 15 bp, Homo sapiens
ccccttctcttttag

SEQ ID NO: 1421588 - DNA, 15 bp, Homo sapiens
cccttctcttttagc

SEQ ID NO: 1421589 - DNA, 15 bp, Homo sapiens
ccttctcttttagct

SEQ ID NO: 1421590 - DNA, 15 bp, Homo sapiens
cttctcttttagctc

SEQ ID NO: 1421591 - DNA, 15 bp, Homo sapiens
ttctcttttagctct

SEQ ID NO: 1421592 - DNA, 15 bp, Homo sapiens
tctcttttagctctt

SEQ ID NO: 1421593 - DNA, 15 bp, Homo sapiens
ctcttttagctcttt

SEQ ID NO: 1421594 - DNA, 15 bp, Homo sapiens
tcttttagctctttt

SEQ ID NO: 1421595 - DNA, 15 bp, Homo sapiens
cttttagctcttttt

SEQ ID NO: 1421596 - DNA, 15 bp, Homo sapiens
ttttagctctttttt

SEQ ID NO: 1421597 - DNA, 15 bp, Homo sapiens
tttagctcttttttt

SEQ ID NO: 1421598 - DNA, 15 bp, Homo sapiens
ttagctctttttttt

SEQ ID NO: 1421599 - DNA, 15 bp, Homo sapiens
tagctcttttttttc

SEQ ID NO: 1421600 - DNA, 15 bp, Homo sapiens
agctcttttttttct

SEQ ID NO: 1421601 - DNA, 15 bp, Homo sapiens
gctcttttttttctg

SEQ ID NO: 1421602 - DNA, 15 bp, Homo sapiens
ctcttttttttctga

SEQ ID NO: 1421603 - DNA, 15 bp, Homo sapiens
tcttttttttctgaa

SEQ ID NO: 1421604 - DNA, 15 bp, Homo sapiens
cttttttttctgaac

SEQ ID NO: 1421605 - DNA, 15 bp, Homo sapiens
ttttttttctgaacg

SEQ ID NO: 1421606 - DNA, 15 bp, Homo sapiens
tttttttctgaacgt

SEQ ID NO: 1421607 - DNA, 15 bp, Homo sapiens
ttttttctgaacgtt

SEQ ID NO: 1421608 - DNA, 15 bp, Homo sapiens
tttttctgaacgttg

SEQ ID NO: 1421609 - DNA, 15 bp, Homo sapiens
ttttctgaacgttgt

SEQ ID NO: 1421610 - DNA, 15 bp, Homo sapiens
tttctgaacgttgtt

SEQ ID NO: 1421611 - DNA, 15 bp, Homo sapiens
ttctgaacgttgttg

SEQ ID NO: 1421612 - DNA, 15 bp, Homo sapiens
tctgaacgttgttgt

SEQ ID NO: 1421613 - DNA, 15 bp, Homo sapiens
ctgaacgttgttgtt

SEQ ID NO: 1421614 - DNA, 15 bp, Homo sapiens
tgaacgttgttgttt

SEQ ID NO: 1421615 - DNA, 15 bp, Homo sapiens
gaacgttgttgtttt

SEQ ID NO: 1421616 - DNA, 15 bp, Homo sapiens
aacgttgttgtttta

SEQ ID NO: 1421617 - DNA, 15 bp, Homo sapiens
acgttgttgttttat

SEQ ID NO: 1421618 - DNA, 15 bp, Homo sapiens
cgttgttgttttata

SEQ ID NO: 1421619 - DNA, 15 bp, Homo sapiens
gttgttgttttatat

SEQ ID NO: 1421620 - DNA, 15 bp, Homo sapiens
ttgttgttttatata

SEQ ID NO: 1421621 - DNA, 15 bp, Homo sapiens
tgttgttttatataa

SEQ ID NO: 1421622 - DNA, 15 bp, Homo sapiens
gttgttttatataag

SEQ ID NO: 1421623 - DNA, 15 bp, Homo sapiens
ttgttttatataagt

SEQ ID NO: 1421624 - DNA, 15 bp, Homo sapiens
tgttttatataagta

SEQ ID NO: 1421625 - DNA, 15 bp, Homo sapiens
gttttatataagtac

SEQ ID NO: 1421626 - DNA, 15 bp, Homo sapiens
ttttatataagtacc

SEQ ID NO: 1421627 - DNA, 15 bp, Homo sapiens
tttatataagtacct

SEQ ID NO: 1421628 - DNA, 15 bp, Homo sapiens
ttatataagtacctc

SEQ ID NO: 1421629 - DNA, 15 bp, Homo sapiens
tatataagtacctct

SEQ ID NO: 1421630 - DNA, 15 bp, Homo sapiens
atataagtacctctt

SEQ ID NO: 1421631 - DNA, 15 bp, Homo sapiens
tataagtacctctta

SEQ ID NO: 1421632 - DNA, 15 bp, Homo sapiens
ataagtacctcttaa

SEQ ID NO: 1421633 - DNA, 15 bp, Homo sapiens
taagtacctcttaaa

SEQ ID NO: 1421634 - DNA, 15 bp, Homo sapiens
aagtacctcttaaaa

SEQ ID NO: 1421635 - DNA, 15 bp, Homo sapiens
agtacctcttaaaag

SEQ ID NO: 1421636 - DNA, 15 bp, Homo sapiens
gtacctcttaaaagt

SEQ ID NO: 1421637 - DNA, 15 bp, Homo sapiens
tacctcttaaaagtt

SEQ ID NO: 1421638 - DNA, 15 bp, Homo sapiens
acctcttaaaagttt

SEQ ID NO: 1421639 - DNA, 15 bp, Homo sapiens
cctcttaaaagtttt

SEQ ID NO: 1421640 - DNA, 15 bp, Homo sapiens
ctcttaaaagttttt

SEQ ID NO: 1421641 - DNA, 15 bp, Homo sapiens
tcttaaaagtttttt

SEQ ID NO: 1421642 - DNA, 15 bp, Homo sapiens
cttaaaagttttttt

SEQ ID NO: 1421643 - DNA, 15 bp, Homo sapiens
ttaaaagtttttttt

SEQ ID NO: 1421644 - DNA, 15 bp, Homo sapiens
taaaagttttttttt

SEQ ID NO: 1421645 - DNA, 15 bp, Homo sapiens
aaaagttttttttta

SEQ ID NO: 1421646 - DNA, 15 bp, Homo sapiens
aaagtttttttttaa

SEQ ID NO: 1421647 - DNA, 15 bp, Homo sapiens
aagtttttttttaat

SEQ ID NO: 1421648 - DNA, 15 bp, Homo sapiens
agtttttttttaatc

SEQ ID NO: 1421649 - DNA, 15 bp, Homo sapiens
gtttttttttaatct

SEQ ID NO: 1421650 - DNA, 15 bp, Homo sapiens
tttttttttaatctg

SEQ ID NO: 1421651 - DNA, 15 bp, Homo sapiens
ttttttttaatctgt

SEQ ID NO: 1421652 - DNA, 15 bp, Homo sapiens
tttttttaatctgtt

SEQ ID NO: 1421653 - DNA, 15 bp, Homo sapiens
ttttttaatctgttt

SEQ ID NO: 1421654 - DNA, 15 bp, Homo sapiens
tttttaatctgtttt

SEQ ID NO: 1421655 - DNA, 15 bp, Homo sapiens
ttttaatctgttttc

SEQ ID NO: 1421656 - DNA, 15 bp, Homo sapiens
tttaatctgttttct

SEQ ID NO: 1421657 - DNA, 15 bp, Homo sapiens
ttaatctgttttcta

SEQ ID NO: 1421658 - DNA, 15 bp, Homo sapiens
taatctgttttctag

SEQ ID NO: 1421659 - DNA, 15 bp, Homo sapiens
aatctgttttctagg

SEQ ID NO: 1421660 - DNA, 15 bp, Homo sapiens
atctgttttctaggg

SEQ ID NO: 1421661 - DNA, 15 bp, Homo sapiens
tctgttttctagggg

SEQ ID NO: 1421662 - DNA, 15 bp, Homo sapiens
ctgttttctagggga

SEQ ID NO: 1421663 - DNA, 15 bp, Homo sapiens
tgttttctaggggag

SEQ ID NO: 1421664 - DNA, 15 bp, Homo sapiens
gttttctaggggagg

SEQ ID NO: 1421665 - DNA, 15 bp, Homo sapiens
ttttctaggggaggt

SEQ ID NO: 1421666 - DNA, 15 bp, Homo sapiens
tttctaggggaggtc

SEQ ID NO: 1421667 - DNA, 15 bp, Homo sapiens
ttctaggggaggtca

SEQ ID NO: 1421668 - DNA, 15 bp, Homo sapiens
tctaggggaggtcat

SEQ ID NO: 1421669 - DNA, 15 bp, Homo sapiens
ctaggggaggtcatg

SEQ ID NO: 1421670 - DNA, 15 bp, Homo sapiens
taggggaggtcatgc

SEQ ID NO: 1421671 - DNA, 15 bp, Homo sapiens
aggggaggtcatgct

SEQ ID NO: 1421672 - DNA, 15 bp, Homo sapiens
ggggaggtcatgctt

SEQ ID NO: 1421673 - DNA, 15 bp, Homo sapiens
gggaggtcatgcttg

SEQ ID NO: 1421674 - DNA, 15 bp, Homo sapiens
ggaggtcatgcttgg

SEQ ID NO: 1421675 - DNA, 15 bp, Homo sapiens
gaggtcatgcttggt

SEQ ID NO: 1421676 - DNA, 15 bp, Homo sapiens
aggtcatgcttggtt

SEQ ID NO: 1421677 - DNA, 15 bp, Homo sapiens
ggtcatgcttggtta

SEQ ID NO: 1421678 - DNA, 15 bp, Homo sapiens
gtcatgcttggttaa

SEQ ID NO: 1421679 - DNA, 15 bp, Homo sapiens
tcatgcttggttaat

SEQ ID NO: 1421680 - DNA, 15 bp, Homo sapiens
catgcttggttaatt

SEQ ID NO: 1421681 - DNA, 15 bp, Homo sapiens
atgcttggttaattg

SEQ ID NO: 1421682 - DNA, 15 bp, Homo sapiens
tgcttggttaattgt

SEQ ID NO: 1421683 - DNA, 15 bp, Homo sapiens
gcttggttaattgtt

SEQ ID NO: 1421684 - DNA, 15 bp, Homo sapiens
cttggttaattgttg

SEQ ID NO: 1421685 - DNA, 15 bp, Homo sapiens
ttggttaattgttgc

SEQ ID NO: 1421686 - DNA, 15 bp, Homo sapiens
tggttaattgttgct

SEQ ID NO: 1421687 - DNA, 15 bp, Homo sapiens
ggttaattgttgcta

SEQ ID NO: 1421688 - DNA, 15 bp, Homo sapiens
gttaattgttgctaa

SEQ ID NO: 1421689 - DNA, 15 bp, Homo sapiens
ttaattgttgctaag

SEQ ID NO: 1421690 - DNA, 15 bp, Homo sapiens
taattgttgctaagt

SEQ ID NO: 1421691 - DNA, 15 bp, Homo sapiens
aattgttgctaagta

SEQ ID NO: 1421692 - DNA, 15 bp, Homo sapiens
attgttgctaagtaa

SEQ ID NO: 1421693 - DNA, 15 bp, Homo sapiens
ttgttgctaagtaaa

SEQ ID NO: 1421694 - DNA, 15 bp, Homo sapiens
tgttgctaagtaaat

SEQ ID NO: 1421695 - DNA, 15 bp, Homo sapiens
gttgctaagtaaatg

SEQ ID NO: 1421696 - DNA, 15 bp, Homo sapiens
ttgctaagtaaatgg

SEQ ID NO: 1421697 - DNA, 15 bp, Homo sapiens
tgctaagtaaatgga

SEQ ID NO: 1421698 - DNA, 15 bp, Homo sapiens
gctaagtaaatggat

SEQ ID NO: 1421699 - DNA, 15 bp, Homo sapiens
ctaagtaaatggatt

SEQ ID NO: 1421700 - DNA, 15 bp, Homo sapiens
taagtaaatggattt

SEQ ID NO: 1421701 - DNA, 15 bp, Homo sapiens
aagtaaatggatttt

SEQ ID NO: 1421702 - DNA, 15 bp, Homo sapiens
agtaaatggatttta

SEQ ID NO: 1421703 - DNA, 15 bp, Homo sapiens
gtaaatggattttac

SEQ ID NO: 1421704 - DNA, 15 bp, Homo sapiens
taaatggattttacc

SEQ ID NO: 1421705 - DNA, 15 bp, Homo sapiens
aaatggattttacct

SEQ ID NO: 1421706 - DNA, 15 bp, Homo sapiens
aatggattttacctt

SEQ ID NO: 1421707 - DNA, 15 bp, Homo sapiens
atggattttaccttt

SEQ ID NO: 1421708 - DNA, 15 bp, Homo sapiens
tggattttacctttg

SEQ ID NO: 1421709 - DNA, 15 bp, Homo sapiens
ggattttacctttga

SEQ ID NO: 1421710 - DNA, 15 bp, Homo sapiens
gattttacctttgat

SEQ ID NO: 1421711 - DNA, 15 bp, Homo sapiens
attttacctttgatt

SEQ ID NO: 1421712 - DNA, 15 bp, Homo sapiens
ttttacctttgatta

SEQ ID NO: 1421713 - DNA, 15 bp, Homo sapiens
tttacctttgattat

SEQ ID NO: 1421714 - DNA, 15 bp, Homo sapiens
ttacctttgattatt

SEQ ID NO: 1421715 - DNA, 15 bp, Homo sapiens
tacctttgattatta

SEQ ID NO: 1421716 - DNA, 15 bp, Homo sapiens
acctttgattattat

SEQ ID NO: 1421717 - DNA, 15 bp, Homo sapiens
cctttgattattatt

SEQ ID NO: 1421718 - DNA, 15 bp, Homo sapiens
ctttgattattattt

SEQ ID NO: 1421719 - DNA, 15 bp, Homo sapiens
tttgattattatttt

SEQ ID NO: 1421720 - DNA, 15 bp, Homo sapiens
ttgattattattttt

SEQ ID NO: 1421721 - DNA, 15 bp, Homo sapiens
tgattattatttttc

SEQ ID NO: 1421722 - DNA, 15 bp, Homo sapiens
gattattatttttct

SEQ ID NO: 1421723 - DNA, 15 bp, Homo sapiens
attattatttttctg

SEQ ID NO: 1421724 - DNA, 15 bp, Homo sapiens
ttattatttttctgc

SEQ ID NO: 1421725 - DNA, 15 bp, Homo sapiens
tattatttttctgcc

SEQ ID NO: 1421726 - DNA, 15 bp, Homo sapiens
attatttttctgcct

SEQ ID NO: 1421727 - DNA, 15 bp, Homo sapiens
ttatttttctgcctt

SEQ ID NO: 1421728 - DNA, 15 bp, Homo sapiens
tatttttctgccttt

SEQ ID NO: 1421729 - DNA, 15 bp, Homo sapiens
atttttctgccttta

SEQ ID NO: 1421730 - DNA, 15 bp, Homo sapiens
tttttctgcctttat

SEQ ID NO: 1421731 - DNA, 15 bp, Homo sapiens
ttttctgcctttata

SEQ ID NO: 1421732 - DNA, 15 bp, Homo sapiens
tttctgcctttatac

SEQ ID NO: 1421733 - DNA, 15 bp, Homo sapiens
ttctgcctttataca

SEQ ID NO: 1421734 - DNA, 15 bp, Homo sapiens
tctgcctttatacaa

SEQ ID NO: 1421735 - DNA, 15 bp, Homo sapiens
ctgcctttatacaat

SEQ ID NO: 1421736 - DNA, 15 bp, Homo sapiens
tgcctttatacaatg

SEQ ID NO: 1421737 - DNA, 15 bp, Homo sapiens
gcctttatacaatgt

SEQ ID NO: 1421738 - DNA, 15 bp, Homo sapiens
cctttatacaatgtg

SEQ ID NO: 1421739 - DNA, 15 bp, Homo sapiens
ctttatacaatgtgt

SEQ ID NO: 1421740 - DNA, 15 bp, Homo sapiens
tttatacaatgtgtt

SEQ ID NO: 1421741 - DNA, 15 bp, Homo sapiens
ttatacaatgtgttt

SEQ ID NO: 1421742 - DNA, 15 bp, Homo sapiens
tatacaatgtgtttt

SEQ ID NO: 1421743 - DNA, 15 bp, Homo sapiens
atacaatgtgtttta

SEQ ID NO: 1421744 - DNA, 15 bp, Homo sapiens
tacaatgtgttttag

SEQ ID NO: 1421745 - DNA, 15 bp, Homo sapiens
acaatgtgttttagg

SEQ ID NO: 1421746 - DNA, 15 bp, Homo sapiens
caatgtgttttaggc

SEQ ID NO: 1421747 - DNA, 15 bp, Homo sapiens
aatgtgttttaggct

SEQ ID NO: 1421748 - DNA, 15 bp, Homo sapiens
atgtgttttaggctt

SEQ ID NO: 1421749 - DNA, 15 bp, Homo sapiens
tgtgttttaggcttc

SEQ ID NO: 1421750 - DNA, 15 bp, Homo sapiens
gtgttttaggcttct

SEQ ID NO: 1421751 - DNA, 15 bp, Homo sapiens
tgttttaggcttctt

SEQ ID NO: 1421752 - DNA, 15 bp, Homo sapiens
gttttaggcttcttt

SEQ ID NO: 1421753 - DNA, 15 bp, Homo sapiens
ttttaggcttctttt

SEQ ID NO: 1421754 - DNA, 15 bp, Homo sapiens
tttaggcttctttta

SEQ ID NO: 1421755 - DNA, 15 bp, Homo sapiens
ttaggcttcttttag

SEQ ID NO: 1421756 - DNA, 15 bp, Homo sapiens
taggcttcttttaga

SEQ ID NO: 1421757 - DNA, 15 bp, Homo sapiens
aggcttcttttagac

SEQ ID NO: 1421758 - DNA, 15 bp, Homo sapiens
ggcttcttttagaca

SEQ ID NO: 1421759 - DNA, 15 bp, Homo sapiens
gcttcttttagacaa

SEQ ID NO: 1421760 - DNA, 15 bp, Homo sapiens
cttcttttagacaaa

SEQ ID NO: 1421761 - DNA, 15 bp, Homo sapiens
ttcttttagacaaat

SEQ ID NO: 1421762 - DNA, 15 bp, Homo sapiens
tcttttagacaaata

SEQ ID NO: 1421763 - DNA, 15 bp, Homo sapiens
cttttagacaaatag

SEQ ID NO: 1421764 - DNA, 15 bp, Homo sapiens
ttttagacaaataga

SEQ ID NO: 1421765 - DNA, 15 bp, Homo sapiens
tttagacaaatagac

SEQ ID NO: 1421766 - DNA, 15 bp, Homo sapiens
ttagacaaatagaca

SEQ ID NO: 1421767 - DNA, 15 bp, Homo sapiens
tagacaaatagacat

SEQ ID NO: 1421768 - DNA, 15 bp, Homo sapiens
agacaaatagacatt

SEQ ID NO: 1421769 - DNA, 15 bp, Homo sapiens
gacaaatagacattt

SEQ ID NO: 1421770 - DNA, 15 bp, Homo sapiens
acaaatagacatttt

SEQ ID NO: 1421771 - DNA, 15 bp, Homo sapiens
caaatagacattttc

SEQ ID NO: 1421772 - DNA, 15 bp, Homo sapiens
aaatagacattttcc

SEQ ID NO: 1421773 - DNA, 15 bp, Homo sapiens
aatagacattttccc

SEQ ID NO: 1421774 - DNA, 15 bp, Homo sapiens
atagacattttccca

SEQ ID NO: 1421775 - DNA, 15 bp, Homo sapiens
tagacattttcccat

SEQ ID NO: 1421776 - DNA, 15 bp, Homo sapiens
agacattttcccatt

SEQ ID NO: 1421777 - DNA, 15 bp, Homo sapiens
gacattttcccatta

SEQ ID NO: 1421778 - DNA, 15 bp, Homo sapiens
acattttcccattac

SEQ ID NO: 1421779 - DNA, 15 bp, Homo sapiens
cattttcccattaca

SEQ ID NO: 1421780 - DNA, 15 bp, Homo sapiens
attttcccattacaa

SEQ ID NO: 1421781 - DNA, 15 bp, Homo sapiens
ttttcccattacaaa

SEQ ID NO: 1421782 - DNA, 15 bp, Homo sapiens
tttcccattacaaag

SEQ ID NO: 1421783 - DNA, 15 bp, Homo sapiens
ttcccattacaaagg

SEQ ID NO: 1421784 - DNA, 15 bp, Homo sapiens
tcccattacaaagga

SEQ ID NO: 1421785 - DNA, 15 bp, Homo sapiens
cccattacaaaggac

SEQ ID NO: 1421786 - DNA, 15 bp, Homo sapiens
ccattacaaaggaca

SEQ ID NO: 1421787 - DNA, 15 bp, Homo sapiens
cattacaaaggacac

SEQ ID NO: 1421788 - DNA, 15 bp, Homo sapiens
attacaaaggacact

SEQ ID NO: 1421789 - DNA, 15 bp, Homo sapiens
ttacaaaggacacta

SEQ ID NO: 1421790 - DNA, 15 bp, Homo sapiens
tacaaaggacactat

SEQ ID NO: 1421791 - DNA, 15 bp, Homo sapiens
acaaaggacactatc

SEQ ID NO: 1421792 - DNA, 15 bp, Homo sapiens
caaaggacactatca

SEQ ID NO: 1421793 - DNA, 15 bp, Homo sapiens
aaaggacactatcag

SEQ ID NO: 1421794 - DNA, 15 bp, Homo sapiens
aaggacactatcagt

SEQ ID NO: 1421795 - DNA, 15 bp, Homo sapiens
aggacactatcagtt

SEQ ID NO: 1421796 - DNA, 15 bp, Homo sapiens
ggacactatcagttc

SEQ ID NO: 1421797 - DNA, 15 bp, Homo sapiens
gacactatcagttct

SEQ ID NO: 1421798 - DNA, 15 bp, Homo sapiens
acactatcagttctt

SEQ ID NO: 1421799 - DNA, 15 bp, Homo sapiens
cactatcagttcttc

SEQ ID NO: 1421800 - DNA, 15 bp, Homo sapiens
actatcagttcttca

SEQ ID NO: 1421801 - DNA, 15 bp, Homo sapiens
ctatcagttcttcag

SEQ ID NO: 1421802 - DNA, 15 bp, Homo sapiens
tatcagttcttcagt

SEQ ID NO: 1421803 - DNA, 15 bp, Homo sapiens
atcagttcttcagta

SEQ ID NO: 1421804 - DNA, 15 bp, Homo sapiens
tcagttcttcagtat

SEQ ID NO: 1421805 - DNA, 15 bp, Homo sapiens
cagttcttcagtatg

SEQ ID NO: 1421806 - DNA, 15 bp, Homo sapiens
agttcttcagtatgg

SEQ ID NO: 1421807 - DNA, 15 bp, Homo sapiens
gttcttcagtatgga

SEQ ID NO: 1421808 - DNA, 15 bp, Homo sapiens
ttcttcagtatggaa

SEQ ID NO: 1421809 - DNA, 15 bp, Homo sapiens
tcttcagtatggaat

SEQ ID NO: 1421810 - DNA, 15 bp, Homo sapiens
cttcagtatggaatt

SEQ ID NO: 1421811 - DNA, 15 bp, Homo sapiens
ttcagtatggaattt

SEQ ID NO: 1421812 - DNA, 15 bp, Homo sapiens
tcagtatggaatttc

SEQ ID NO: 1421813 - DNA, 15 bp, Homo sapiens
cagtatggaatttct

SEQ ID NO: 1421814 - DNA, 15 bp, Homo sapiens
agtatggaatttctg

SEQ ID NO: 1421815 - DNA, 15 bp, Homo sapiens
gtatggaatttctgt

SEQ ID NO: 1421816 - DNA, 15 bp, Homo sapiens
tatggaatttctgta

SEQ ID NO: 1421817 - DNA, 15 bp, Homo sapiens
ggaatttctgtaaga

SEQ ID NO: 1421818 - DNA, 15 bp, Homo sapiens
gaatttctgtaagag

SEQ ID NO: 1421819 - DNA, 15 bp, Homo sapiens
aatttctgtaagagt

SEQ ID NO: 1421820 - DNA, 15 bp, Homo sapiens
atttctgtaagagtc

SEQ ID NO: 1421821 - DNA, 15 bp, Homo sapiens
tttctgtaagagtca

SEQ ID NO: 1421822 - DNA, 15 bp, Homo sapiens
ttctgtaagagtcaa

SEQ ID NO: 1421823 - DNA, 15 bp, Homo sapiens
tctgtaagagtcaag

SEQ ID NO: 1421824 - DNA, 15 bp, Homo sapiens
ctgtaagagtcaaga

SEQ ID NO: 1421825 - DNA, 15 bp, Homo sapiens
tgtaagagtcaagaa

SEQ ID NO: 1421826 - DNA, 15 bp, Homo sapiens
gtaagagtcaagaaa

SEQ ID NO: 1421827 - DNA, 15 bp, Homo sapiens
taagagtcaagaaaa

SEQ ID NO: 1421828 - DNA, 15 bp, Homo sapiens
aagagtcaagaaaac

SEQ ID NO: 1421829 - DNA, 15 bp, Homo sapiens
agagtcaagaaaaca

SEQ ID NO: 1421830 - DNA, 15 bp, Homo sapiens
gagtcaagaaaacac

SEQ ID NO: 1421831 - DNA, 15 bp, Homo sapiens
agtcaagaaaacaca

SEQ ID NO: 1421832 - DNA, 15 bp, Homo sapiens
gtcaagaaaacacac

SEQ ID NO: 1421833 - DNA, 15 bp, Homo sapiens
tcaagaaaacacaca

SEQ ID NO: 1421834 - DNA, 15 bp, Homo sapiens
caagaaaacacacat

SEQ ID NO: 1421835 - DNA, 15 bp, Homo sapiens
aagaaaacacacatc

SEQ ID NO: 1421836 - DNA, 15 bp, Homo sapiens
agaaaacacacatcg

SEQ ID NO: 1421837 - DNA, 15 bp, Homo sapiens
gaaaacacacatcgg

SEQ ID NO: 1421838 - DNA, 15 bp, Homo sapiens
aaaacacacatcgga

SEQ ID NO: 1421839 - DNA, 15 bp, Homo sapiens
aaacacacatcggat

SEQ ID NO: 1421840 - DNA, 15 bp, Homo sapiens
aacacacatcggatc

SEQ ID NO: 1421841 - DNA, 15 bp, Homo sapiens
acacacatcggatct

SEQ ID NO: 1421842 - DNA, 15 bp, Homo sapiens
cacacatcggatctt

SEQ ID NO: 1421843 - DNA, 15 bp, Homo sapiens
acacatcggatcttc

SEQ ID NO: 1421844 - DNA, 15 bp, Homo sapiens
cacatcggatcttcc

SEQ ID NO: 1421845 - DNA, 15 bp, Homo sapiens
acatcggatcttcct

SEQ ID NO: 1421846 - DNA, 15 bp, Homo sapiens
catcggatcttccta

SEQ ID NO: 1421847 - DNA, 15 bp, Homo sapiens
atcggatcttcctac

SEQ ID NO: 1421848 - DNA, 15 bp, Homo sapiens
tcggatcttcctacc

SEQ ID NO: 1421849 - DNA, 15 bp, Homo sapiens
cggatcttcctacct

SEQ ID NO: 1421850 - DNA, 15 bp, Homo sapiens
ggatcttcctacctt

SEQ ID NO: 1421851 - DNA, 15 bp, Homo sapiens
gatcttcctaccttt

SEQ ID NO: 1421852 - DNA, 15 bp, Homo sapiens
atcttcctacctttc

SEQ ID NO: 1421853 - DNA, 15 bp, Homo sapiens
tcttcctacctttct

SEQ ID NO: 1421854 - DNA, 15 bp, Homo sapiens
cttcctacctttctg

SEQ ID NO: 1421855 - DNA, 15 bp, Homo sapiens
ttcctacctttctgt

SEQ ID NO: 1421856 - DNA, 15 bp, Homo sapiens
tcctacctttctgtg

SEQ ID NO: 1421857 - DNA, 15 bp, Homo sapiens
cctacctttctgtgg

SEQ ID NO: 1421858 - DNA, 15 bp, Homo sapiens
ctacctttctgtggg

SEQ ID NO: 1421859 - DNA, 15 bp, Homo sapiens
tacctttctgtgggg

SEQ ID NO: 1421860 - DNA, 15 bp, Homo sapiens
acctttctgtggggg

SEQ ID NO: 1421861 - DNA, 15 bp, Homo sapiens
cctttctgtgggggt

SEQ ID NO: 1421862 - DNA, 15 bp, Homo sapiens
ctttctgtgggggtg

SEQ ID NO: 1421863 - DNA, 15 bp, Homo sapiens
tttctgtgggggtgt

SEQ ID NO: 1421864 - DNA, 15 bp, Homo sapiens
ttctgtgggggtgtt

SEQ ID NO: 1421865 - DNA, 15 bp, Homo sapiens
tctgtgggggtgttt

SEQ ID NO: 1421866 - DNA, 15 bp, Homo sapiens
ctgtgggggtgtttg

SEQ ID NO: 1421867 - DNA, 15 bp, Homo sapiens
tgtgggggtgtttga

SEQ ID NO: 1421868 - DNA, 15 bp, Homo sapiens
gtgggggtgtttgag

SEQ ID NO: 1421869 - DNA, 15 bp, Homo sapiens
tgggggtgtttgagg

SEQ ID NO: 1421870 - DNA, 15 bp, Homo sapiens
gggggtgtttgagga

SEQ ID NO: 1421871 - DNA, 15 bp, Homo sapiens
ggggtgtttgaggag

SEQ ID NO: 1421872 - DNA, 15 bp, Homo sapiens
gggtgtttgaggaga

SEQ ID NO: 1421873 - DNA, 15 bp, Homo sapiens
ggtgtttgaggagag

SEQ ID NO: 1421874 - DNA, 15 bp, Homo sapiens
gtgtttgaggagagt

SEQ ID NO: 1421875 - DNA, 15 bp, Homo sapiens
tgtttgaggagagtg

SEQ ID NO: 1421876 - DNA, 15 bp, Homo sapiens
gtttgaggagagtgc

SEQ ID NO: 1421877 - DNA, 15 bp, Homo sapiens
tttgaggagagtgct

SEQ ID NO: 1421878 - DNA, 15 bp, Homo sapiens
ttgaggagagtgctg

SEQ ID NO: 1421879 - DNA, 15 bp, Homo sapiens
tgaggagagtgctgt

SEQ ID NO: 1421880 - DNA, 15 bp, Homo sapiens
gaggagagtgctgta

SEQ ID NO: 1421881 - DNA, 15 bp, Homo sapiens
aggagagtgctgtag

SEQ ID NO: 1421882 - DNA, 15 bp, Homo sapiens
ggagagtgctgtagt

SEQ ID NO: 1421883 - DNA, 15 bp, Homo sapiens
gagagtgctgtagta

SEQ ID NO: 1421884 - DNA, 15 bp, Homo sapiens
agagtgctgtagtaa

SEQ ID NO: 1421885 - DNA, 15 bp, Homo sapiens
gagtgctgtagtaat

SEQ ID NO: 1421886 - DNA, 15 bp, Homo sapiens
agtgctgtagtaatg

SEQ ID NO: 1421887 - DNA, 15 bp, Homo sapiens
gtgctgtagtaatga

SEQ ID NO: 1421888 - DNA, 15 bp, Homo sapiens
tgctgtagtaatgat

SEQ ID NO: 1421889 - DNA, 15 bp, Homo sapiens
gctgtagtaatgatt

SEQ ID NO: 1421890 - DNA, 15 bp, Homo sapiens
ctgtagtaatgattc

SEQ ID NO: 1421891 - DNA, 15 bp, Homo sapiens
tgtagtaatgattct

SEQ ID NO: 1421892 - DNA, 15 bp, Homo sapiens
gtagtaatgattctg

SEQ ID NO: 1421893 - DNA, 15 bp, Homo sapiens
tagtaatgattctgt

SEQ ID NO: 1421894 - DNA, 15 bp, Homo sapiens
agtaatgattctgtt

SEQ ID NO: 1421895 - DNA, 15 bp, Homo sapiens
gtaatgattctgttg

SEQ ID NO: 1421896 - DNA, 15 bp, Homo sapiens
taatgattctgttgt

SEQ ID NO: 1421897 - DNA, 15 bp, Homo sapiens
aatgattctgttgta

SEQ ID NO: 1421898 - DNA, 15 bp, Homo sapiens
atgattctgttgtaa

SEQ ID NO: 1421899 - DNA, 15 bp, Homo sapiens
tgattctgttgtaaa

SEQ ID NO: 1421900 - DNA, 15 bp, Homo sapiens
gattctgttgtaaaa

SEQ ID NO: 1421901 - DNA, 15 bp, Homo sapiens
attctgttgtaaaat

SEQ ID NO: 1421902 - DNA, 15 bp, Homo sapiens
ttctgttgtaaaatg

SEQ ID NO: 1421903 - DNA, 15 bp, Homo sapiens
tctgttgtaaaatgg

SEQ ID NO: 1421904 - DNA, 15 bp, Homo sapiens
ctgttgtaaaatggg

SEQ ID NO: 1421905 - DNA, 15 bp, Homo sapiens
tgttgtaaaatggga

SEQ ID NO: 1421906 - DNA, 15 bp, Homo sapiens
gttgtaaaatgggaa

SEQ ID NO: 1421907 - DNA, 15 bp, Homo sapiens
ttgtaaaatgggaag

SEQ ID NO: 1421908 - DNA, 15 bp, Homo sapiens
tgtaaaatgggaagt

SEQ ID NO: 1421909 - DNA, 15 bp, Homo sapiens
gtaaaatgggaagtg

SEQ ID NO: 1421910 - DNA, 15 bp, Homo sapiens
taaaatgggaagtgt

SEQ ID NO: 1421911 - DNA, 15 bp, Homo sapiens
aaaatgggaagtgtg

SEQ ID NO: 1421912 - DNA, 15 bp, Homo sapiens
aaatgggaagtgtga

SEQ ID NO: 1421913 - DNA, 15 bp, Homo sapiens
aatgggaagtgtgac

SEQ ID NO: 1421914 - DNA, 15 bp, Homo sapiens
atgggaagtgtgaca

SEQ ID NO: 1421915 - DNA, 15 bp, Homo sapiens
tgggaagtgtgacat

SEQ ID NO: 1421916 - DNA, 15 bp, Homo sapiens
gggaagtgtgacatt

SEQ ID NO: 1421917 - DNA, 15 bp, Homo sapiens
ggaagtgtgacattg

SEQ ID NO: 1421918 - DNA, 15 bp, Homo sapiens
gaagtgtgacattga

SEQ ID NO: 1421919 - DNA, 15 bp, Homo sapiens
aagtgtgacattgat

SEQ ID NO: 1421920 - DNA, 15 bp, Homo sapiens
agtgtgacattgatg

SEQ ID NO: 1421921 - DNA, 15 bp, Homo sapiens
gtgtgacattgatgg

SEQ ID NO: 1421922 - DNA, 15 bp, Homo sapiens
tgtgacattgatgga

SEQ ID NO: 1421923 - DNA, 15 bp, Homo sapiens
gtgacattgatggac

SEQ ID NO: 1421924 - DNA, 15 bp, Homo sapiens
tgacattgatggact

SEQ ID NO: 1421925 - DNA, 15 bp, Homo sapiens
gacattgatggactt

SEQ ID NO: 1421926 - DNA, 15 bp, Homo sapiens
acattgatggactta

SEQ ID NO: 1421927 - DNA, 15 bp, Homo sapiens
cattgatggacttaa

SEQ ID NO: 1421928 - DNA, 15 bp, Homo sapiens
attgatggacttaag

SEQ ID NO: 1421929 - DNA, 15 bp, Homo sapiens
ttgatggacttaaga

SEQ ID NO: 1421930 - DNA, 15 bp, Homo sapiens
tgatggacttaagaa

SEQ ID NO: 1421931 - DNA, 15 bp, Homo sapiens
gatggacttaagaat

SEQ ID NO: 1421932 - DNA, 15 bp, Homo sapiens
atggacttaagaatt

SEQ ID NO: 1421933 - DNA, 15 bp, Homo sapiens
tggacttaagaattt

SEQ ID NO: 1421934 - DNA, 15 bp, Homo sapiens
ggacttaagaatttc

SEQ ID NO: 1421935 - DNA, 15 bp, Homo sapiens
gacttaagaatttct

SEQ ID NO: 1421936 - DNA, 15 bp, Homo sapiens
acttaagaatttctt

SEQ ID NO: 1421937 - DNA, 15 bp, Homo sapiens
cttaagaatttctta

SEQ ID NO: 1421938 - DNA, 15 bp, Homo sapiens
ttaagaatttcttaa

SEQ ID NO: 1421939 - DNA, 15 bp, Homo sapiens
taagaatttcttaaa

SEQ ID NO: 1421940 - DNA, 15 bp, Homo sapiens
aagaatttcttaaaa

SEQ ID NO: 1421941 - DNA, 15 bp, Homo sapiens
agaatttcttaaaat

SEQ ID NO: 1421942 - DNA, 15 bp, Homo sapiens
gaatttcttaaaata

SEQ ID NO: 1421943 - DNA, 15 bp, Homo sapiens
aatttcttaaaatac

SEQ ID NO: 1421944 - DNA, 15 bp, Homo sapiens
atttcttaaaatact

SEQ ID NO: 1421945 - DNA, 15 bp, Homo sapiens
tttcttaaaatactg

SEQ ID NO: 1421946 - DNA, 15 bp, Homo sapiens
ttcttaaaatactgt

SEQ ID NO: 1421947 - DNA, 15 bp, Homo sapiens
tcttaaaatactgtc

SEQ ID NO: 1421948 - DNA, 15 bp, Homo sapiens
cttaaaatactgtct

SEQ ID NO: 1421949 - DNA, 15 bp, Homo sapiens
ttaaaatactgtctt

SEQ ID NO: 1421950 - DNA, 15 bp, Homo sapiens
taaaatactgtctta

SEQ ID NO: 1421951 - DNA, 15 bp, Homo sapiens
aaaatactgtcttaa

SEQ ID NO: 1421952 - DNA, 15 bp, Homo sapiens
aaatactgtcttaag

SEQ ID NO: 1421953 - DNA, 15 bp, Homo sapiens
aatactgtcttaagc

SEQ ID NO: 1421954 - DNA, 15 bp, Homo sapiens
atactgtcttaagct

SEQ ID NO: 1421955 - DNA, 15 bp, Homo sapiens
tactgtcttaagctg

SEQ ID NO: 1421956 - DNA, 15 bp, Homo sapiens
actgtcttaagctgg

SEQ ID NO: 1421957 - DNA, 15 bp, Homo sapiens
ctgtcttaagctggc

SEQ ID NO: 1421958 - DNA, 15 bp, Homo sapiens
tgtcttaagctggca

SEQ ID NO: 1421959 - DNA, 15 bp, Homo sapiens
gtcttaagctggcaa

SEQ ID NO: 1421960 - DNA, 15 bp, Homo sapiens
tcttaagctggcaaa

SEQ ID NO: 1421961 - DNA, 15 bp, Homo sapiens
cttaagctggcaaaa

SEQ ID NO: 1421962 - DNA, 15 bp, Homo sapiens
ttaagctggcaaaac

SEQ ID NO: 1421963 - DNA, 15 bp, Homo sapiens
taagctggcaaaact

SEQ ID NO: 1421964 - DNA, 15 bp, Homo sapiens
aagctggcaaaactc

SEQ ID NO: 1421965 - DNA, 15 bp, Homo sapiens
agctggcaaaactcc

SEQ ID NO: 1421966 - DNA, 15 bp, Homo sapiens
gctggcaaaactcct

SEQ ID NO: 1421967 - DNA, 15 bp, Homo sapiens
ctggcaaaactcctg

SEQ ID NO: 1421968 - DNA, 15 bp, Homo sapiens
tggcaaaactcctgg

SEQ ID NO: 1421969 - DNA, 15 bp, Homo sapiens
ggcaaaactcctggc

SEQ ID NO: 1421970 - DNA, 15 bp, Homo sapiens
gcaaaactcctggca

SEQ ID NO: 1421971 - DNA, 15 bp, Homo sapiens
caaaactcctggcat

SEQ ID NO: 1421972 - DNA, 15 bp, Homo sapiens
aaaactcctggcatc

SEQ ID NO: 1421973 - DNA, 15 bp, Homo sapiens
aaactcctggcatcc

SEQ ID NO: 1421974 - DNA, 15 bp, Homo sapiens
aactcctggcatcct

SEQ ID NO: 1421975 - DNA, 15 bp, Homo sapiens
actcctggcatcctc

SEQ ID NO: 1421976 - DNA, 15 bp, Homo sapiens
ctcctggcatcctcc

SEQ ID NO: 1421977 - DNA, 15 bp, Homo sapiens
tcctggcatcctcca

SEQ ID NO: 1421978 - DNA, 15 bp, Homo sapiens
cctggcatcctccac

SEQ ID NO: 1421979 - DNA, 15 bp, Homo sapiens
ctggcatcctccacc

SEQ ID NO: 1421980 - DNA, 15 bp, Homo sapiens
tggcatcctccacct

SEQ ID NO: 1421981 - DNA, 15 bp, Homo sapiens
ggcatcctccacctg

SEQ ID NO: 1421982 - DNA, 15 bp, Homo sapiens
gcatcctccacctga

SEQ ID NO: 1421983 - DNA, 15 bp, Homo sapiens
catcctccacctgac

SEQ ID NO: 1421984 - DNA, 15 bp, Homo sapiens
atcctccacctgaca

SEQ ID NO: 1421985 - DNA, 15 bp, Homo sapiens
tcctccacctgacat

SEQ ID NO: 1421986 - DNA, 15 bp, Homo sapiens
cctccacctgacata

SEQ ID NO: 1421987 - DNA, 15 bp, Homo sapiens
ctccacctgacataa

SEQ ID NO: 1421988 - DNA, 15 bp, Homo sapiens
tccacctgacataaa

SEQ ID NO: 1421989 - DNA, 15 bp, Homo sapiens
ccacctgacataaac

SEQ ID NO: 1421990 - DNA, 15 bp, Homo sapiens
cacctgacataaacc

SEQ ID NO: 1421991 - DNA, 15 bp, Homo sapiens
acctgacataaacca

SEQ ID NO: 1421992 - DNA, 15 bp, Homo sapiens
cctgacataaaccag

SEQ ID NO: 1421993 - DNA, 15 bp, Homo sapiens
ctgacataaaccagt

SEQ ID NO: 1421994 - DNA, 15 bp, Homo sapiens
tgacataaaccagtt

SEQ ID NO: 1421995 - DNA, 15 bp, Homo sapiens
gacataaaccagttc

SEQ ID NO: 1421996 - DNA, 15 bp, Homo sapiens
acataaaccagttca

SEQ ID NO: 1421997 - DNA, 15 bp, Homo sapiens
cataaaccagttcac

SEQ ID NO: 1421998 - DNA, 15 bp, Homo sapiens
ataaaccagttcaca

SEQ ID NO: 1421999 - DNA, 15 bp, Homo sapiens
taaaccagttcacag

SEQ ID NO: 1422000 - DNA, 15 bp, Homo sapiens
aaaccagttcacaga

SEQ ID NO: 1422001 - DNA, 15 bp, Homo sapiens
aaccagttcacagaa

SEQ ID NO: 1422002 - DNA, 15 bp, Homo sapiens
accagttcacagaac

SEQ ID NO: 1422003 - DNA, 15 bp, Homo sapiens
ccagttcacagaaca

SEQ ID NO: 1422004 - DNA, 15 bp, Homo sapiens
cagttcacagaacat

SEQ ID NO: 1422005 - DNA, 15 bp, Homo sapiens
agttcacagaacatt

SEQ ID NO: 1422006 - DNA, 15 bp, Homo sapiens
gttcacagaacattc

SEQ ID NO: 1422007 - DNA, 15 bp, Homo sapiens
ttcacagaacattcc

SEQ ID NO: 1422008 - DNA, 15 bp, Homo sapiens
tcacagaacattcca

SEQ ID NO: 1422009 - DNA, 15 bp, Homo sapiens
cacagaacattccag

SEQ ID NO: 1422010 - DNA, 15 bp, Homo sapiens
acagaacattccagc

SEQ ID NO: 1422011 - DNA, 15 bp, Homo sapiens
cagaacattccagcc

SEQ ID NO: 1422012 - DNA, 15 bp, Homo sapiens
agaacattccagcct

SEQ ID NO: 1422013 - DNA, 15 bp, Homo sapiens
gaacattccagccta

SEQ ID NO: 1422014 - DNA, 15 bp, Homo sapiens
aacattccagcctag

SEQ ID NO: 1422015 - DNA, 15 bp, Homo sapiens
acattccagcctaga

SEQ ID NO: 1422016 - DNA, 15 bp, Homo sapiens
cattccagcctagat

SEQ ID NO: 1422017 - DNA, 15 bp, Homo sapiens
attccagcctagatc

SEQ ID NO: 1422018 - DNA, 15 bp, Homo sapiens
ttccagcctagatct

SEQ ID NO: 1422019 - DNA, 15 bp, Homo sapiens
tccagcctagatctg

SEQ ID NO: 1422020 - DNA, 15 bp, Homo sapiens
ccagcctagatctga

SEQ ID NO: 1422021 - DNA, 15 bp, Homo sapiens
cagcctagatctgaa

SEQ ID NO: 1422022 - DNA, 15 bp, Homo sapiens
agcctagatctgaaa

SEQ ID NO: 1422023 - DNA, 15 bp, Homo sapiens
gcctagatctgaaat

SEQ ID NO: 1422024 - DNA, 15 bp, Homo sapiens
cctagatctgaaatg

SEQ ID NO: 1422025 - DNA, 15 bp, Homo sapiens
ctagatctgaaatgg

SEQ ID NO: 1422026 - DNA, 15 bp, Homo sapiens
tagatctgaaatggt

SEQ ID NO: 1422027 - DNA, 15 bp, Homo sapiens
agatctgaaatggta

SEQ ID NO: 1422028 - DNA, 15 bp, Homo sapiens
gatctgaaatggtaa

SEQ ID NO: 1422029 - DNA, 15 bp, Homo sapiens
atctgaaatggtaat

SEQ ID NO: 1422030 - DNA, 15 bp, Homo sapiens
tctgaaatggtaatt

SEQ ID NO: 1422031 - DNA, 15 bp, Homo sapiens
ctgaaatggtaattt

SEQ ID NO: 1422032 - DNA, 15 bp, Homo sapiens
tgaaatggtaatttt

SEQ ID NO: 1422033 - DNA, 15 bp, Homo sapiens
gaaatggtaattttt

SEQ ID NO: 1422034 - DNA, 15 bp, Homo sapiens
aaatggtaatttttt

SEQ ID NO: 1422035 - DNA, 15 bp, Homo sapiens
aatggtaattttttt

SEQ ID NO: 1422036 - DNA, 15 bp, Homo sapiens
atggtaatttttttg

SEQ ID NO: 1422037 - DNA, 15 bp, Homo sapiens
tggtaatttttttgg

SEQ ID NO: 1422038 - DNA, 15 bp, Homo sapiens
gtaatttttttggaa

SEQ ID NO: 1422039 - DNA, 15 bp, Homo sapiens
taatttttttggaac

SEQ ID NO: 1422040 - DNA, 15 bp, Homo sapiens
aatttttttggaact

SEQ ID NO: 1422041 - DNA, 15 bp, Homo sapiens
atttttttggaactt

SEQ ID NO: 1422042 - DNA, 15 bp, Homo sapiens
tttttttggaacttt

SEQ ID NO: 1422043 - DNA, 15 bp, Homo sapiens
ttttttggaactttg

SEQ ID NO: 1422044 - DNA, 15 bp, Homo sapiens
tttttggaactttgg

SEQ ID NO: 1422045 - DNA, 15 bp, Homo sapiens
ttttggaactttggt

SEQ ID NO: 1422046 - DNA, 15 bp, Homo sapiens
tttggaactttggtt

SEQ ID NO: 1422047 - DNA, 15 bp, Homo sapiens
ttggaactttggttg

SEQ ID NO: 1422048 - DNA, 15 bp, Homo sapiens
tggaactttggttgg

SEQ ID NO: 1422049 - DNA, 15 bp, Homo sapiens
ggaactttggttggt

SEQ ID NO: 1422050 - DNA, 15 bp, Homo sapiens
gaactttggttggtt

SEQ ID NO: 1422051 - DNA, 15 bp, Homo sapiens
aactttggttggttt

SEQ ID NO: 1422052 - DNA, 15 bp, Homo sapiens
actttggttggtttt

SEQ ID NO: 1422053 - DNA, 15 bp, Homo sapiens
ctttggttggtttta

SEQ ID NO: 1422054 - DNA, 15 bp, Homo sapiens
tttggttggttttat

SEQ ID NO: 1422055 - DNA, 15 bp, Homo sapiens
ttggttggttttata

SEQ ID NO: 1422056 - DNA, 15 bp, Homo sapiens
tggttggttttataa

SEQ ID NO: 1422057 - DNA, 15 bp, Homo sapiens
ggttggttttataac

SEQ ID NO: 1422058 - DNA, 15 bp, Homo sapiens
gttggttttataact

SEQ ID NO: 1422059 - DNA, 15 bp, Homo sapiens
ttggttttataactt

SEQ ID NO: 1422060 - DNA, 15 bp, Homo sapiens
tggttttataacttg

SEQ ID NO: 1422061 - DNA, 15 bp, Homo sapiens
ggttttataacttgt

SEQ ID NO: 1422062 - DNA, 15 bp, Homo sapiens
gttttataacttgtc

SEQ ID NO: 1422063 - DNA, 15 bp, Homo sapiens
ttttataacttgtca

SEQ ID NO: 1422064 - DNA, 15 bp, Homo sapiens
tttataacttgtcac

SEQ ID NO: 1422065 - DNA, 15 bp, Homo sapiens
ttataacttgtcact

SEQ ID NO: 1422066 - DNA, 15 bp, Homo sapiens
tataacttgtcactg

SEQ ID NO: 1422067 - DNA, 15 bp, Homo sapiens
ataacttgtcactga

SEQ ID NO: 1422068 - DNA, 15 bp, Homo sapiens
taacttgtcactgaa

SEQ ID NO: 1422069 - DNA, 15 bp, Homo sapiens
aacttgtcactgaag

SEQ ID NO: 1422070 - DNA, 15 bp, Homo sapiens
acttgtcactgaagt

SEQ ID NO: 1422071 - DNA, 15 bp, Homo sapiens
cttgtcactgaagta

SEQ ID NO: 1422072 - DNA, 15 bp, Homo sapiens
ttgtcactgaagtaa

SEQ ID NO: 1422073 - DNA, 15 bp, Homo sapiens
tgtcactgaagtaac

SEQ ID NO: 1422074 - DNA, 15 bp, Homo sapiens
gtcactgaagtaacc

SEQ ID NO: 1422075 - DNA, 15 bp, Homo sapiens
tcactgaagtaacca

SEQ ID NO: 1422076 - DNA, 15 bp, Homo sapiens
cactgaagtaaccat

SEQ ID NO: 1422077 - DNA, 15 bp, Homo sapiens
actgaagtaaccatt

SEQ ID NO: 1422078 - DNA, 15 bp, Homo sapiens
ctgaagtaaccattc

SEQ ID NO: 1422079 - DNA, 15 bp, Homo sapiens
tgaagtaaccattcc

SEQ ID NO: 1422080 - DNA, 15 bp, Homo sapiens
gaagtaaccattccc

SEQ ID NO: 1422081 - DNA, 15 bp, Homo sapiens
aagtaaccattccct

SEQ ID NO: 1422082 - DNA, 15 bp, Homo sapiens
agtaaccattccctc

SEQ ID NO: 1422083 - DNA, 15 bp, Homo sapiens
gtaaccattccctcc

SEQ ID NO: 1422084 - DNA, 15 bp, Homo sapiens
taaccattccctcca

SEQ ID NO: 1422085 - DNA, 15 bp, Homo sapiens
aaccattccctccag

SEQ ID NO: 1422086 - DNA, 15 bp, Homo sapiens
accattccctccagt

SEQ ID NO: 1422087 - DNA, 15 bp, Homo sapiens
ccattccctccagtt

SEQ ID NO: 1422088 - DNA, 15 bp, Homo sapiens
cattccctccagttc

SEQ ID NO: 1422089 - DNA, 15 bp, Homo sapiens
attccctccagttcc

SEQ ID NO: 1422090 - DNA, 15 bp, Homo sapiens
ttccctccagttcct

SEQ ID NO: 1422091 - DNA, 15 bp, Homo sapiens
tccctccagttcctc

SEQ ID NO: 1422092 - DNA, 15 bp, Homo sapiens
ccctccagttcctct

SEQ ID NO: 1422093 - DNA, 15 bp, Homo sapiens
cctccagttcctctg

SEQ ID NO: 1422094 - DNA, 15 bp, Homo sapiens
ctccagttcctctgc

SEQ ID NO: 1422095 - DNA, 15 bp, Homo sapiens
tccagttcctctgcc

SEQ ID NO: 1422096 - DNA, 15 bp, Homo sapiens
ccagttcctctgcct

SEQ ID NO: 1422097 - DNA, 15 bp, Homo sapiens
cagttcctctgcctt

SEQ ID NO: 1422098 - DNA, 15 bp, Homo sapiens
agttcctctgccttg

SEQ ID NO: 1422099 - DNA, 15 bp, Homo sapiens
gttcctctgccttgg

SEQ ID NO: 1422100 - DNA, 15 bp, Homo sapiens
ttcctctgccttggt

SEQ ID NO: 1422101 - DNA, 15 bp, Homo sapiens
tcctctgccttggtt

SEQ ID NO: 1422102 - DNA, 15 bp, Homo sapiens
cctctgccttggttt

SEQ ID NO: 1422103 - DNA, 15 bp, Homo sapiens
ctctgccttggttta

SEQ ID NO: 1422104 - DNA, 15 bp, Homo sapiens
tctgccttggtttac

SEQ ID NO: 1422105 - DNA, 15 bp, Homo sapiens
ctgccttggtttacc

SEQ ID NO: 1422106 - DNA, 15 bp, Homo sapiens
tgccttggtttacct

SEQ ID NO: 1422107 - DNA, 15 bp, Homo sapiens
gccttggtttaccta

SEQ ID NO: 1422108 - DNA, 15 bp, Homo sapiens
ccttggtttacctaa

SEQ ID NO: 1422109 - DNA, 15 bp, Homo sapiens
cttggtttacctaaa

SEQ ID NO: 1422110 - DNA, 15 bp, Homo sapiens
ttggtttacctaaag

SEQ ID NO: 1422111 - DNA, 15 bp, Homo sapiens
tggtttacctaaagg

SEQ ID NO: 1422112 - DNA, 15 bp, Homo sapiens
ggtttacctaaaggg

SEQ ID NO: 1422113 - DNA, 15 bp, Homo sapiens
gtttacctaaaggga

SEQ ID NO: 1422114 - DNA, 15 bp, Homo sapiens
tttacctaaagggat

SEQ ID NO: 1422115 - DNA, 15 bp, Homo sapiens
ttacctaaagggatt

SEQ ID NO: 1422116 - DNA, 15 bp, Homo sapiens
tacctaaagggattt

SEQ ID NO: 1422117 - DNA, 15 bp, Homo sapiens
acctaaagggatttt

SEQ ID NO: 1422118 - DNA, 15 bp, Homo sapiens
cctaaagggattttg

SEQ ID NO: 1422119 - DNA, 15 bp, Homo sapiens
ctaaagggattttgg

SEQ ID NO: 1422120 - DNA, 15 bp, Homo sapiens
taaagggattttggt

SEQ ID NO: 1422121 - DNA, 15 bp, Homo sapiens
aaagggattttggtg

SEQ ID NO: 1422122 - DNA, 15 bp, Homo sapiens
aagggattttggtgt

SEQ ID NO: 1422123 - DNA, 15 bp, Homo sapiens
agggattttggtgtt

SEQ ID NO: 1422124 - DNA, 15 bp, Homo sapiens
gggattttggtgttc

SEQ ID NO: 1422125 - DNA, 15 bp, Homo sapiens
ggattttggtgttcc

SEQ ID NO: 1422126 - DNA, 15 bp, Homo sapiens
gattttggtgttcct

SEQ ID NO: 1422127 - DNA, 15 bp, Homo sapiens
attttggtgttcctg

SEQ ID NO: 1422128 - DNA, 15 bp, Homo sapiens
ttttggtgttcctgt

SEQ ID NO: 1422129 - DNA, 15 bp, Homo sapiens
tttggtgttcctgtg

SEQ ID NO: 1422130 - DNA, 15 bp, Homo sapiens
ttggtgttcctgtgt

SEQ ID NO: 1422131 - DNA, 15 bp, Homo sapiens
tggtgttcctgtgtg

SEQ ID NO: 1422132 - DNA, 15 bp, Homo sapiens
ggtgttcctgtgtgt

SEQ ID NO: 1422133 - DNA, 15 bp, Homo sapiens
gtgttcctgtgtgtg

SEQ ID NO: 1422134 - DNA, 15 bp, Homo sapiens
tgttcctgtgtgtga

SEQ ID NO: 1422135 - DNA, 15 bp, Homo sapiens
gttcctgtgtgtgac

SEQ ID NO: 1422136 - DNA, 15 bp, Homo sapiens
ttcctgtgtgtgact

SEQ ID NO: 1422137 - DNA, 15 bp, Homo sapiens
tcctgtgtgtgactg

SEQ ID NO: 1422138 - DNA, 15 bp, Homo sapiens
cctgtgtgtgactgg

SEQ ID NO: 1422139 - DNA, 15 bp, Homo sapiens
ctgtgtgtgactgga

SEQ ID NO: 1422140 - DNA, 15 bp, Homo sapiens
tgtgtgtgactggaa

SEQ ID NO: 1422141 - DNA, 15 bp, Homo sapiens
gtgtgtgactggaag

SEQ ID NO: 1422142 - DNA, 15 bp, Homo sapiens
tgtgtgactggaagt

SEQ ID NO: 1422143 - DNA, 15 bp, Homo sapiens
gtgtgactggaagtg

SEQ ID NO: 1422144 - DNA, 15 bp, Homo sapiens
tgtgactggaagtgg

SEQ ID NO: 1422145 - DNA, 15 bp, Homo sapiens
gtgactggaagtggc

SEQ ID NO: 1422146 - DNA, 15 bp, Homo sapiens
tgactggaagtggct

SEQ ID NO: 1422147 - DNA, 15 bp, Homo sapiens
gactggaagtggctg

SEQ ID NO: 1422148 - DNA, 15 bp, Homo sapiens
actggaagtggctgt

SEQ ID NO: 1422149 - DNA, 15 bp, Homo sapiens
ctggaagtggctgtc

SEQ ID NO: 1422150 - DNA, 15 bp, Homo sapiens
tggaagtggctgtct

SEQ ID NO: 1422151 - DNA, 15 bp, Homo sapiens
ggaagtggctgtctc

SEQ ID NO: 1422152 - DNA, 15 bp, Homo sapiens
gaagtggctgtctct

SEQ ID NO: 1422153 - DNA, 15 bp, Homo sapiens
aagtggctgtctcta

SEQ ID NO: 1422154 - DNA, 15 bp, Homo sapiens
agtggctgtctctat

SEQ ID NO: 1422155 - DNA, 15 bp, Homo sapiens
gtggctgtctctatt

SEQ ID NO: 1422156 - DNA, 15 bp, Homo sapiens
tggctgtctctattg

SEQ ID NO: 1422157 - DNA, 15 bp, Homo sapiens
ggctgtctctattga

SEQ ID NO: 1422158 - DNA, 15 bp, Homo sapiens
gctgtctctattgac

SEQ ID NO: 1422159 - DNA, 15 bp, Homo sapiens
ctgtctctattgact

SEQ ID NO: 1422160 - DNA, 15 bp, Homo sapiens
tgtctctattgacta

SEQ ID NO: 1422161 - DNA, 15 bp, Homo sapiens
gtctctattgactag

SEQ ID NO: 1422162 - DNA, 15 bp, Homo sapiens
tctctattgactagg

SEQ ID NO: 1422163 - DNA, 15 bp, Homo sapiens
ctctattgactagga

SEQ ID NO: 1422164 - DNA, 15 bp, Homo sapiens
tctattgactaggaa

SEQ ID NO: 1422165 - DNA, 15 bp, Homo sapiens
ctattgactaggaag

SEQ ID NO: 1422166 - DNA, 15 bp, Homo sapiens
tattgactaggaaga

SEQ ID NO: 1422167 - DNA, 15 bp, Homo sapiens
attgactaggaagaa

SEQ ID NO: 1422168 - DNA, 15 bp, Homo sapiens
ttgactaggaagaac

SEQ ID NO: 1422169 - DNA, 15 bp, Homo sapiens
tgactaggaagaact

SEQ ID NO: 1422170 - DNA, 15 bp, Homo sapiens
gactaggaagaactg

SEQ ID NO: 1422171 - DNA, 15 bp, Homo sapiens
actaggaagaactgg

SEQ ID NO: 1422172 - DNA, 15 bp, Homo sapiens
ctaggaagaactggt

SEQ ID NO: 1422173 - DNA, 15 bp, Homo sapiens
taggaagaactggtg

SEQ ID NO: 1422174 - DNA, 15 bp, Homo sapiens
aggaagaactggtga

SEQ ID NO: 1422175 - DNA, 15 bp, Homo sapiens
ggaagaactggtgag

SEQ ID NO: 1422176 - DNA, 15 bp, Homo sapiens
gaagaactggtgaga

SEQ ID NO: 1422177 - DNA, 15 bp, Homo sapiens
aagaactggtgagaa

SEQ ID NO: 1422178 - DNA, 15 bp, Homo sapiens
agaactggtgagaag

SEQ ID NO: 1422179 - DNA, 15 bp, Homo sapiens
gaactggtgagaagt

SEQ ID NO: 1422180 - DNA, 15 bp, Homo sapiens
aactggtgagaagtg

SEQ ID NO: 1422181 - DNA, 15 bp, Homo sapiens
actggtgagaagtgg

SEQ ID NO: 1422182 - DNA, 15 bp, Homo sapiens
ctggtgagaagtggg

SEQ ID NO: 1422183 - DNA, 15 bp, Homo sapiens
tggtgagaagtggga

SEQ ID NO: 1422184 - DNA, 15 bp, Homo sapiens
ggtgagaagtgggac

SEQ ID NO: 1422185 - DNA, 15 bp, Homo sapiens
gtgagaagtgggacc

SEQ ID NO: 1422186 - DNA, 15 bp, Homo sapiens
tgagaagtgggacca

SEQ ID NO: 1422187 - DNA, 15 bp, Homo sapiens
gagaagtgggaccac

SEQ ID NO: 1422188 - DNA, 15 bp, Homo sapiens
agaagtgggaccaca

SEQ ID NO: 1422189 - DNA, 15 bp, Homo sapiens
gaagtgggaccacag

SEQ ID NO: 1422190 - DNA, 15 bp, Homo sapiens
aagtgggaccacagt

SEQ ID NO: 1422191 - DNA, 15 bp, Homo sapiens
agtgggaccacagtg

SEQ ID NO: 1422192 - DNA, 15 bp, Homo sapiens
gtgggaccacagtgt

SEQ ID NO: 1422193 - DNA, 15 bp, Homo sapiens
tgggaccacagtgta

SEQ ID NO: 1422194 - DNA, 15 bp, Homo sapiens
gggaccacagtgtat

SEQ ID NO: 1422195 - DNA, 15 bp, Homo sapiens
ggaccacagtgtatt

SEQ ID NO: 1422196 - DNA, 15 bp, Homo sapiens
gaccacagtgtattc

SEQ ID NO: 1422197 - DNA, 15 bp, Homo sapiens
accacagtgtattca

SEQ ID NO: 1422198 - DNA, 15 bp, Homo sapiens
ccacagtgtattcag

SEQ ID NO: 1422199 - DNA, 15 bp, Homo sapiens
cacagtgtattcagg

SEQ ID NO: 1422200 - DNA, 15 bp, Homo sapiens
acagtgtattcagga

SEQ ID NO: 1422201 - DNA, 15 bp, Homo sapiens
cagtgtattcaggat

SEQ ID NO: 1422202 - DNA, 15 bp, Homo sapiens
agtgtattcaggatc

SEQ ID NO: 1422203 - DNA, 15 bp, Homo sapiens
gtgtattcaggatca

SEQ ID NO: 1422204 - DNA, 15 bp, Homo sapiens
tgtattcaggatcaa

SEQ ID NO: 1422205 - DNA, 15 bp, Homo sapiens
gtattcaggatcaaa

SEQ ID NO: 1422206 - DNA, 15 bp, Homo sapiens
tattcaggatcaaag

SEQ ID NO: 1422207 - DNA, 15 bp, Homo sapiens
attcaggatcaaagt

SEQ ID NO: 1422208 - DNA, 15 bp, Homo sapiens
ttcaggatcaaagtg

SEQ ID NO: 1422209 - DNA, 15 bp, Homo sapiens
tcaggatcaaagtgg

SEQ ID NO: 1422210 - DNA, 15 bp, Homo sapiens
caggatcaaagtggg

SEQ ID NO: 1422211 - DNA, 15 bp, Homo sapiens
aggatcaaagtgggg

SEQ ID NO: 1422212 - DNA, 15 bp, Homo sapiens
ggatcaaagtgggga

SEQ ID NO: 1422213 - DNA, 15 bp, Homo sapiens
gatcaaagtggggag

SEQ ID NO: 1422214 - DNA, 15 bp, Homo sapiens
atcaaagtggggagg

SEQ ID NO: 1422215 - DNA, 15 bp, Homo sapiens
tcaaagtggggagga

SEQ ID NO: 1422216 - DNA, 15 bp, Homo sapiens
caaagtggggaggac

SEQ ID NO: 1422217 - DNA, 15 bp, Homo sapiens
aaagtggggaggaca

SEQ ID NO: 1422218 - DNA, 15 bp, Homo sapiens
aagtggggaggacat

SEQ ID NO: 1422219 - DNA, 15 bp, Homo sapiens
agtggggaggacatg

SEQ ID NO: 1422220 - DNA, 15 bp, Homo sapiens
gtggggaggacatga

SEQ ID NO: 1422221 - DNA, 15 bp, Homo sapiens
tggggaggacatgag

SEQ ID NO: 1422222 - DNA, 15 bp, Homo sapiens
ggggaggacatgagt

SEQ ID NO: 1422223 - DNA, 15 bp, Homo sapiens
gggaggacatgagtc

SEQ ID NO: 1422224 - DNA, 15 bp, Homo sapiens
ggaggacatgagtcc

SEQ ID NO: 1422225 - DNA, 15 bp, Homo sapiens
gaggacatgagtccc

SEQ ID NO: 1422226 - DNA, 15 bp, Homo sapiens
aggacatgagtccct

SEQ ID NO: 1422227 - DNA, 15 bp, Homo sapiens
ggacatgagtccctt

SEQ ID NO: 1422228 - DNA, 15 bp, Homo sapiens
gacatgagtcccttt

SEQ ID NO: 1422229 - DNA, 15 bp, Homo sapiens
acatgagtcccttta

SEQ ID NO: 1422230 - DNA, 15 bp, Homo sapiens
catgagtccctttaa

SEQ ID NO: 1422231 - DNA, 15 bp, Homo sapiens
atgagtccctttaag

SEQ ID NO: 1422232 - DNA, 15 bp, Homo sapiens
tgagtccctttaaga

SEQ ID NO: 1422233 - DNA, 15 bp, Homo sapiens
gagtccctttaagag

SEQ ID NO: 1422234 - DNA, 15 bp, Homo sapiens
agtccctttaagagg

SEQ ID NO: 1422235 - DNA, 15 bp, Homo sapiens
gtccctttaagaggg

SEQ ID NO: 1422236 - DNA, 15 bp, Homo sapiens
tccctttaagagggt

SEQ ID NO: 1422237 - DNA, 15 bp, Homo sapiens
ccctttaagagggta

SEQ ID NO: 1422238 - DNA, 15 bp, Homo sapiens
cctttaagagggtag

SEQ ID NO: 1422239 - DNA, 15 bp, Homo sapiens
ctttaagagggtagg

SEQ ID NO: 1422240 - DNA, 15 bp, Homo sapiens
tttaagagggtaggt

SEQ ID NO: 1422241 - DNA, 15 bp, Homo sapiens
ttaagagggtaggtg

SEQ ID NO: 1422242 - DNA, 15 bp, Homo sapiens
taagagggtaggtga

SEQ ID NO: 1422243 - DNA, 15 bp, Homo sapiens
aagagggtaggtgaa

SEQ ID NO: 1422244 - DNA, 15 bp, Homo sapiens
agagggtaggtgaat

SEQ ID NO: 1422245 - DNA, 15 bp, Homo sapiens
gagggtaggtgaata

SEQ ID NO: 1422246 - DNA, 15 bp, Homo sapiens
agggtaggtgaatac

SEQ ID NO: 1422247 - DNA, 15 bp, Homo sapiens
gggtaggtgaataca

SEQ ID NO: 1422248 - DNA, 15 bp, Homo sapiens
ggtaggtgaatacac

SEQ ID NO: 1422249 - DNA, 15 bp, Homo sapiens
gtaggtgaatacact

SEQ ID NO: 1422250 - DNA, 15 bp, Homo sapiens
taggtgaatacactc

SEQ ID NO: 1422251 - DNA, 15 bp, Homo sapiens
aggtgaatacactca

SEQ ID NO: 1422252 - DNA, 15 bp, Homo sapiens
ggtgaatacactcaa

SEQ ID NO: 1422253 - DNA, 15 bp, Homo sapiens
gtgaatacactcaag

SEQ ID NO: 1422254 - DNA, 15 bp, Homo sapiens
tgaatacactcaagt

SEQ ID NO: 1422255 - DNA, 15 bp, Homo sapiens
gaatacactcaagtc

SEQ ID NO: 1422256 - DNA, 15 bp, Homo sapiens
aatacactcaagtcc

SEQ ID NO: 1422257 - DNA, 15 bp, Homo sapiens
atacactcaagtccc

SEQ ID NO: 1422258 - DNA, 15 bp, Homo sapiens
tacactcaagtcccg

SEQ ID NO: 1422259 - DNA, 15 bp, Homo sapiens
ttctgtgaactctgt

SEQ ID NO: 1422260 - DNA, 15 bp, Homo sapiens
tctgtgaactctgta

SEQ ID NO: 1422261 - DNA, 15 bp, Homo sapiens
ctgtgaactctgtaa

SEQ ID NO: 1422262 - DNA, 15 bp, Homo sapiens
tgtgaactctgtaac

SEQ ID NO: 1422263 - DNA, 15 bp, Homo sapiens
gtgaactctgtaact

SEQ ID NO: 1422264 - DNA, 15 bp, Homo sapiens
tgaactctgtaactc

SEQ ID NO: 1422265 - DNA, 15 bp, Homo sapiens
gaactctgtaactct

SEQ ID NO: 1422266 - DNA, 15 bp, Homo sapiens
aactctgtaactctt

SEQ ID NO: 1422267 - DNA, 15 bp, Homo sapiens
actctgtaactctta

SEQ ID NO: 1422268 - DNA, 15 bp, Homo sapiens
ctctgtaactcttaa

SEQ ID NO: 1422269 - DNA, 15 bp, Homo sapiens
tctgtaactcttaaa

SEQ ID NO: 1422270 - DNA, 15 bp, Homo sapiens
ctgtaactcttaaaa

SEQ ID NO: 1422271 - DNA, 15 bp, Homo sapiens
tgtaactcttaaaat

SEQ ID NO: 1422272 - DNA, 15 bp, Homo sapiens
gtaactcttaaaatt

SEQ ID NO: 1422273 - DNA, 15 bp, Homo sapiens
taactcttaaaattt

SEQ ID NO: 1422274 - DNA, 15 bp, Homo sapiens
aactcttaaaatttt

SEQ ID NO: 1422275 - DNA, 15 bp, Homo sapiens
actcttaaaattttt

SEQ ID NO: 1422276 - DNA, 15 bp, Homo sapiens
ctcttaaaatttttg

SEQ ID NO: 1422277 - DNA, 15 bp, Homo sapiens
tcttaaaatttttga

SEQ ID NO: 1422278 - DNA, 15 bp, Homo sapiens
cttaaaatttttgaa

SEQ ID NO: 1422279 - DNA, 15 bp, Homo sapiens
ttaaaatttttgaaa

SEQ ID NO: 1422280 - DNA, 15 bp, Homo sapiens
taaaatttttgaaaa

SEQ ID NO: 1422281 - DNA, 15 bp, Homo sapiens
aaaatttttgaaaac

SEQ ID NO: 1422282 - DNA, 15 bp, Homo sapiens
aaatttttgaaaact

SEQ ID NO: 1422283 - DNA, 15 bp, Homo sapiens
aatttttgaaaactc

SEQ ID NO: 1422284 - DNA, 15 bp, Homo sapiens
atttttgaaaactcc

SEQ ID NO: 1422285 - DNA, 15 bp, Homo sapiens
tttttgaaaactcca

SEQ ID NO: 1422286 - DNA, 15 bp, Homo sapiens
ttttgaaaactccat

SEQ ID NO: 1422287 - DNA, 15 bp, Homo sapiens
tttgaaaactccatc

SEQ ID NO: 1422288 - DNA, 15 bp, Homo sapiens
ttgaaaactccatcg

SEQ ID NO: 1422289 - DNA, 15 bp, Homo sapiens
tgaaaactccatcgt

SEQ ID NO: 1422290 - DNA, 15 bp, Homo sapiens
gaaaactccatcgtt

SEQ ID NO: 1422291 - DNA, 15 bp, Homo sapiens
aaaactccatcgtta

SEQ ID NO: 1422292 - DNA, 15 bp, Homo sapiens
aaactccatcgttaa

SEQ ID NO: 1422293 - DNA, 15 bp, Homo sapiens
aactccatcgttaaa

SEQ ID NO: 1422294 - DNA, 15 bp, Homo sapiens
actccatcgttaaac

SEQ ID NO: 1422295 - DNA, 15 bp, Homo sapiens
ctccatcgttaaaca

SEQ ID NO: 1422296 - DNA, 15 bp, Homo sapiens
tccatcgttaaacaa

SEQ ID NO: 1422297 - DNA, 15 bp, Homo sapiens
ccatcgttaaacaac

SEQ ID NO: 1422298 - DNA, 15 bp, Homo sapiens
catcgttaaacaact

SEQ ID NO: 1422299 - DNA, 15 bp, Homo sapiens
atcgttaaacaactt

SEQ ID NO: 1422300 - DNA, 15 bp, Homo sapiens
tcgttaaacaacttt

SEQ ID NO: 1422301 - DNA, 15 bp, Homo sapiens
cgttaaacaactttt

SEQ ID NO: 1422302 - DNA, 15 bp, Homo sapiens
gttaaacaactttta

SEQ ID NO: 1422303 - DNA, 15 bp, Homo sapiens
ttaaacaacttttaa

SEQ ID NO: 1422304 - DNA, 15 bp, Homo sapiens
taaacaacttttaaa

SEQ ID NO: 1422305 - DNA, 15 bp, Homo sapiens
aaacaacttttaaaa

SEQ ID NO: 1422306 - DNA, 15 bp, Homo sapiens
aacaacttttaaaag

SEQ ID NO: 1422307 - DNA, 15 bp, Homo sapiens
acaacttttaaaaga

SEQ ID NO: 1422308 - DNA, 15 bp, Homo sapiens
caacttttaaaagaa

SEQ ID NO: 1422309 - DNA, 15 bp, Homo sapiens
aacttttaaaagaaa

SEQ ID NO: 1422310 - DNA, 15 bp, Homo sapiens
acttttaaaagaaat

SEQ ID NO: 1422311 - DNA, 15 bp, Homo sapiens
cttttaaaagaaata

SEQ ID NO: 1422312 - DNA, 15 bp, Homo sapiens
ttttaaaagaaataa

SEQ ID NO: 1422313 - DNA, 15 bp, Homo sapiens
tttaaaagaaataac

SEQ ID NO: 1422314 - DNA, 15 bp, Homo sapiens
ttaaaagaaataact

SEQ ID NO: 1422315 - DNA, 15 bp, Homo sapiens
taaaagaaataacta

SEQ ID NO: 1422316 - DNA, 15 bp, Homo sapiens
aaaagaaataactaa

SEQ ID NO: 1422317 - DNA, 15 bp, Homo sapiens
aaagaaataactaaa

SEQ ID NO: 1422318 - DNA, 15 bp, Homo sapiens
aagaaataactaaat

SEQ ID NO: 1422319 - DNA, 15 bp, Homo sapiens
agaaataactaaatt

SEQ ID NO: 1422320 - DNA, 15 bp, Homo sapiens
gaaataactaaattt

SEQ ID NO: 1422321 - DNA, 15 bp, Homo sapiens
aaataactaaatttt

SEQ ID NO: 1422322 - DNA, 15 bp, Homo sapiens
aataactaaattttc

SEQ ID NO: 1422323 - DNA, 15 bp, Homo sapiens
ataactaaattttca

SEQ ID NO: 1422324 - DNA, 15 bp, Homo sapiens
taactaaattttcaa

SEQ ID NO: 1422325 - DNA, 15 bp, Homo sapiens
aactaaattttcaaa

SEQ ID NO: 1422326 - DNA, 15 bp, Homo sapiens
actaaattttcaaat

SEQ ID NO: 1422327 - DNA, 15 bp, Homo sapiens
ctaaattttcaaatg

SEQ ID NO: 1422328 - DNA, 15 bp, Homo sapiens
taaattttcaaatga

SEQ ID NO: 1422329 - DNA, 15 bp, Homo sapiens
aaattttcaaatgag

SEQ ID NO: 1422330 - DNA, 15 bp, Homo sapiens
aattttcaaatgagt

SEQ ID NO: 1422331 - DNA, 15 bp, Homo sapiens
attttcaaatgagta

SEQ ID NO: 1422332 - DNA, 15 bp, Homo sapiens
ttttcaaatgagtaa

SEQ ID NO: 1422333 - DNA, 15 bp, Homo sapiens
tttcaaatgagtaag

SEQ ID NO: 1422334 - DNA, 15 bp, Homo sapiens
ttcaaatgagtaagc

SEQ ID NO: 1422335 - DNA, 15 bp, Homo sapiens
tcaaatgagtaagca

SEQ ID NO: 1422336 - DNA, 15 bp, Homo sapiens
caaatgagtaagcag

SEQ ID NO: 1422337 - DNA, 15 bp, Homo sapiens
aaatgagtaagcagt

SEQ ID NO: 1422338 - DNA, 15 bp, Homo sapiens
aatgagtaagcagtg

SEQ ID NO: 1422339 - DNA, 15 bp, Homo sapiens
atgagtaagcagtgc

SEQ ID NO: 1422340 - DNA, 15 bp, Homo sapiens
tgagtaagcagtgcc

SEQ ID NO: 1422341 - DNA, 15 bp, Homo sapiens
gagtaagcagtgcca

SEQ ID NO: 1422342 - DNA, 15 bp, Homo sapiens
agtaagcagtgccac

SEQ ID NO: 1422343 - DNA, 15 bp, Homo sapiens
gtaagcagtgccacc

SEQ ID NO: 1422344 - DNA, 15 bp, Homo sapiens
taagcagtgccacca

SEQ ID NO: 1422345 - DNA, 15 bp, Homo sapiens
aagcagtgccaccaa

SEQ ID NO: 1422346 - DNA, 15 bp, Homo sapiens
agcagtgccaccaac

SEQ ID NO: 1422347 - DNA, 15 bp, Homo sapiens
gcagtgccaccaact

SEQ ID NO: 1422348 - DNA, 15 bp, Homo sapiens
cagtgccaccaacta

SEQ ID NO: 1422349 - DNA, 15 bp, Homo sapiens
agtgccaccaactag

SEQ ID NO: 1422350 - DNA, 15 bp, Homo sapiens
gtgccaccaactagt

SEQ ID NO: 1422351 - DNA, 15 bp, Homo sapiens
tgccaccaactagtg

SEQ ID NO: 1422352 - DNA, 15 bp, Homo sapiens
gccaccaactagtgt

SEQ ID NO: 1422353 - DNA, 15 bp, Homo sapiens
ccaccaactagtgtt

SEQ ID NO: 1422354 - DNA, 15 bp, Homo sapiens
caccaactagtgttt

SEQ ID NO: 1422355 - DNA, 15 bp, Homo sapiens
accaactagtgtttt

SEQ ID NO: 1422356 - DNA, 15 bp, Homo sapiens
ccaactagtgttttg

SEQ ID NO: 1422357 - DNA, 15 bp, Homo sapiens
caactagtgttttgc

SEQ ID NO: 1422358 - DNA, 15 bp, Homo sapiens
aactagtgttttgcc

SEQ ID NO: 1422359 - DNA, 15 bp, Homo sapiens
actagtgttttgccc

SEQ ID NO: 1422360 - DNA, 15 bp, Homo sapiens
ctagtgttttgcccg

SEQ ID NO: 1422361 - DNA, 15 bp, Homo sapiens
tagtgttttgcccga

SEQ ID NO: 1422362 - DNA, 15 bp, Homo sapiens
agtgttttgcccgat

SEQ ID NO: 1422363 - DNA, 15 bp, Homo sapiens
gtgttttgcccgata

SEQ ID NO: 1422364 - DNA, 15 bp, Homo sapiens
tgttttgcccgatag

SEQ ID NO: 1422365 - DNA, 15 bp, Homo sapiens
gttttgcccgataga

SEQ ID NO: 1422366 - DNA, 15 bp, Homo sapiens
ttttgcccgatagaa

SEQ ID NO: 1422367 - DNA, 15 bp, Homo sapiens
tttgcccgatagaag

SEQ ID NO: 1422368 - DNA, 15 bp, Homo sapiens
ttgcccgatagaaga

SEQ ID NO: 1422369 - DNA, 15 bp, Homo sapiens
tgcccgatagaagag

SEQ ID NO: 1422370 - DNA, 15 bp, Homo sapiens
gcccgatagaagagc

SEQ ID NO: 1422371 - DNA, 15 bp, Homo sapiens
cccgatagaagagcc

SEQ ID NO: 1422372 - DNA, 15 bp, Homo sapiens
ccgatagaagagcca

SEQ ID NO: 1422373 - DNA, 15 bp, Homo sapiens
cgatagaagagccag

SEQ ID NO: 1422374 - DNA, 15 bp, Homo sapiens
gatagaagagccagc

SEQ ID NO: 1422375 - DNA, 15 bp, Homo sapiens
atagaagagccagca

SEQ ID NO: 1422376 - DNA, 15 bp, Homo sapiens
tagaagagccagcat

SEQ ID NO: 1422377 - DNA, 15 bp, Homo sapiens
agaagagccagcatg

SEQ ID NO: 1422378 - DNA, 15 bp, Homo sapiens
gaagagccagcatgt

SEQ ID NO: 1422379 - DNA, 15 bp, Homo sapiens
aagagccagcatgtt

SEQ ID NO: 1422380 - DNA, 15 bp, Homo sapiens
agagccagcatgttc

SEQ ID NO: 1422381 - DNA, 15 bp, Homo sapiens
gagccagcatgttca

SEQ ID NO: 1422382 - DNA, 15 bp, Homo sapiens
agccagcatgttcac

SEQ ID NO: 1422383 - DNA, 15 bp, Homo sapiens
gccagcatgttcacg

SEQ ID NO: 1422384 - DNA, 15 bp, Homo sapiens
ccagcatgttcacgt

SEQ ID NO: 1422385 - DNA, 15 bp, Homo sapiens
cagcatgttcacgtt

SEQ ID NO: 1422386 - DNA, 15 bp, Homo sapiens
agcatgttcacgtta

SEQ ID NO: 1422387 - DNA, 15 bp, Homo sapiens
gcatgttcacgttat

SEQ ID NO: 1422388 - DNA, 15 bp, Homo sapiens
catgttcacgttatt

SEQ ID NO: 1422389 - DNA, 15 bp, Homo sapiens
atgttcacgttattt

SEQ ID NO: 1422390 - DNA, 15 bp, Homo sapiens
tgttcacgttattta

SEQ ID NO: 1422391 - DNA, 15 bp, Homo sapiens
gttcacgttatttaa

SEQ ID NO: 1422392 - DNA, 15 bp, Homo sapiens
ttcacgttatttaaa

SEQ ID NO: 1422393 - DNA, 15 bp, Homo sapiens
tcacgttatttaaat

SEQ ID NO: 1422394 - DNA, 15 bp, Homo sapiens
cacgttatttaaatt

SEQ ID NO: 1422395 - DNA, 15 bp, Homo sapiens
acgttatttaaatta

SEQ ID NO: 1422396 - DNA, 15 bp, Homo sapiens
cgttatttaaattag

SEQ ID NO: 1422397 - DNA, 15 bp, Homo sapiens
gttatttaaattagg

SEQ ID NO: 1422398 - DNA, 15 bp, Homo sapiens
ttatttaaattaggt

SEQ ID NO: 1422399 - DNA, 15 bp, Homo sapiens
tatttaaattaggtg

SEQ ID NO: 1422400 - DNA, 15 bp, Homo sapiens
atttaaattaggtgg

SEQ ID NO: 1422401 - DNA, 15 bp, Homo sapiens
tttaaattaggtgga

SEQ ID NO: 1422402 - DNA, 15 bp, Homo sapiens
ttaaattaggtggaa

SEQ ID NO: 1422403 - DNA, 15 bp, Homo sapiens
taaattaggtggaaa

SEQ ID NO: 1422404 - DNA, 15 bp, Homo sapiens
aaattaggtggaaaa

SEQ ID NO: 1422405 - DNA, 15 bp, Homo sapiens
aattaggtggaaaaa

SEQ ID NO: 1422406 - DNA, 15 bp, Homo sapiens
attaggtggaaaaat

SEQ ID NO: 1422407 - DNA, 15 bp, Homo sapiens
ttaggtggaaaaatc

SEQ ID NO: 1422408 - DNA, 15 bp, Homo sapiens
taggtggaaaaatct

SEQ ID NO: 1422409 - DNA, 15 bp, Homo sapiens
aggtggaaaaatcta

SEQ ID NO: 1422410 - DNA, 15 bp, Homo sapiens
ggtggaaaaatctaa

SEQ ID NO: 1422411 - DNA, 15 bp, Homo sapiens
gtggaaaaatctaaa

SEQ ID NO: 1422412 - DNA, 15 bp, Homo sapiens
tggaaaaatctaaac

SEQ ID NO: 1422413 - DNA, 15 bp, Homo sapiens
ggaaaaatctaaaca

SEQ ID NO: 1422414 - DNA, 15 bp, Homo sapiens
gaaaaatctaaacat

SEQ ID NO: 1422415 - DNA, 15 bp, Homo sapiens
aaaaatctaaacatt

SEQ ID NO: 1422416 - DNA, 15 bp, Homo sapiens
aaaatctaaacattt

SEQ ID NO: 1422417 - DNA, 15 bp, Homo sapiens
aaatctaaacatttt

SEQ ID NO: 1422418 - DNA, 15 bp, Homo sapiens
aatctaaacattttt

SEQ ID NO: 1422419 - DNA, 15 bp, Homo sapiens
atctaaacattttta

SEQ ID NO: 1422420 - DNA, 15 bp, Homo sapiens
tctaaacatttttat

SEQ ID NO: 1422421 - DNA, 15 bp, Homo sapiens
ctaaacatttttatc

SEQ ID NO: 1422422 - DNA, 15 bp, Homo sapiens
taaacatttttatct

SEQ ID NO: 1422423 - DNA, 15 bp, Homo sapiens
aaacatttttatctt

SEQ ID NO: 1422424 - DNA, 15 bp, Homo sapiens
aacatttttatcttc

SEQ ID NO: 1422425 - DNA, 15 bp, Homo sapiens
acatttttatcttca

SEQ ID NO: 1422426 - DNA, 15 bp, Homo sapiens
catttttatcttcat

SEQ ID NO: 1422427 - DNA, 15 bp, Homo sapiens
atttttatcttcata

SEQ ID NO: 1422428 - DNA, 15 bp, Homo sapiens
tttttatcttcataa

SEQ ID NO: 1422429 - DNA, 15 bp, Homo sapiens
ttttatcttcataat

SEQ ID NO: 1422430 - DNA, 15 bp, Homo sapiens
tttatcttcataatt

SEQ ID NO: 1422431 - DNA, 15 bp, Homo sapiens
ttatcttcataattt

SEQ ID NO: 1422432 - DNA, 15 bp, Homo sapiens
tatcttcataattta

SEQ ID NO: 1422433 - DNA, 15 bp, Homo sapiens
atcttcataatttaa

SEQ ID NO: 1422434 - DNA, 15 bp, Homo sapiens
tcttcataatttaaa

SEQ ID NO: 1422435 - DNA, 15 bp, Homo sapiens
cttcataatttaaaa

SEQ ID NO: 1422436 - DNA, 15 bp, Homo sapiens
ttcataatttaaaaa

SEQ ID NO: 1422437 - DNA, 15 bp, Homo sapiens
tcataatttaaaaaa

SEQ ID NO: 1422438 - DNA, 15 bp, Homo sapiens
cataatttaaaaaat

SEQ ID NO: 1422439 - DNA, 15 bp, Homo sapiens
ataatttaaaaaata

SEQ ID NO: 1422440 - DNA, 15 bp, Homo sapiens
taatttaaaaaatat

SEQ ID NO: 1422441 - DNA, 15 bp, Homo sapiens
atttaaaaaatatat

SEQ ID NO: 1422442 - DNA, 15 bp, Homo sapiens
ttaaaaaatatatat

SEQ ID NO: 1422443 - DNA, 15 bp, Homo sapiens
taaaaaatatatatg

SEQ ID NO: 1422444 - DNA, 15 bp, Homo sapiens
aaaaaatatatatgt

SEQ ID NO: 1422445 - DNA, 15 bp, Homo sapiens
aaaaatatatatgta

SEQ ID NO: 1422446 - DNA, 15 bp, Homo sapiens
aaaatatatatgtat

SEQ ID NO: 1422447 - DNA, 15 bp, Homo sapiens
aaatatatatgtata

SEQ ID NO: 1422448 - DNA, 15 bp, Homo sapiens
aatatatatgtatat

SEQ ID NO: 1422449 - DNA, 15 bp, Homo sapiens
tatatgtatatattg

SEQ ID NO: 1422450 - DNA, 15 bp, Homo sapiens
atatgtatatattgc

SEQ ID NO: 1422451 - DNA, 15 bp, Homo sapiens
tatgtatatattgca

SEQ ID NO: 1422452 - DNA, 15 bp, Homo sapiens
atgtatatattgcat

SEQ ID NO: 1422453 - DNA, 15 bp, Homo sapiens
tgtatatattgcata

SEQ ID NO: 1422454 - DNA, 15 bp, Homo sapiens
gtatatattgcatat

SEQ ID NO: 1422455 - DNA, 15 bp, Homo sapiens
tatatattgcatatt

SEQ ID NO: 1422456 - DNA, 15 bp, Homo sapiens
atatattgcatattc

SEQ ID NO: 1422457 - DNA, 15 bp, Homo sapiens
tatattgcatattca

SEQ ID NO: 1422458 - DNA, 15 bp, Homo sapiens
atattgcatattcac

SEQ ID NO: 1422459 - DNA, 15 bp, Homo sapiens
tattgcatattcact

SEQ ID NO: 1422460 - DNA, 15 bp, Homo sapiens
attgcatattcactt

SEQ ID NO: 1422461 - DNA, 15 bp, Homo sapiens
ttgcatattcacttt

SEQ ID NO: 1422462 - DNA, 15 bp, Homo sapiens
tgcatattcactttt

SEQ ID NO: 1422463 - DNA, 15 bp, Homo sapiens
gcatattcacttttt

SEQ ID NO: 1422464 - DNA, 15 bp, Homo sapiens
catattcactttttc

SEQ ID NO: 1422465 - DNA, 15 bp, Homo sapiens
atattcactttttcc

SEQ ID NO: 1422466 - DNA, 15 bp, Homo sapiens
tattcactttttcct

SEQ ID NO: 1422467 - DNA, 15 bp, Homo sapiens
attcactttttcctt

SEQ ID NO: 1422468 - DNA, 15 bp, Homo sapiens
ttcactttttccttt

SEQ ID NO: 1422469 - DNA, 15 bp, Homo sapiens
tcactttttccttta

SEQ ID NO: 1422470 - DNA, 15 bp, Homo sapiens
cactttttcctttag

SEQ ID NO: 1422471 - DNA, 15 bp, Homo sapiens
actttttcctttagg

SEQ ID NO: 1422472 - DNA, 15 bp, Homo sapiens
ctttttcctttaggt

SEQ ID NO: 1422473 - DNA, 15 bp, Homo sapiens
tttttcctttaggta

SEQ ID NO: 1422474 - DNA, 15 bp, Homo sapiens
ttttcctttaggtag

SEQ ID NO: 1422475 - DNA, 15 bp, Homo sapiens
tttcctttaggtaga

SEQ ID NO: 1422476 - DNA, 15 bp, Homo sapiens
ttcctttaggtagag

SEQ ID NO: 1422477 - DNA, 15 bp, Homo sapiens
tcctttaggtagaga

SEQ ID NO: 1422478 - DNA, 15 bp, Homo sapiens
cctttaggtagagat

SEQ ID NO: 1422479 - DNA, 15 bp, Homo sapiens
ctttaggtagagatg

SEQ ID NO: 1422480 - DNA, 15 bp, Homo sapiens
tttaggtagagatga

SEQ ID NO: 1422481 - DNA, 15 bp, Homo sapiens
ttaggtagagatgat

SEQ ID NO: 1422482 - DNA, 15 bp, Homo sapiens
taggtagagatgatt

SEQ ID NO: 1422483 - DNA, 15 bp, Homo sapiens
aggtagagatgattt

SEQ ID NO: 1422484 - DNA, 15 bp, Homo sapiens
ggtagagatgatttc

SEQ ID NO: 1422485 - DNA, 15 bp, Homo sapiens
gtagagatgatttca

SEQ ID NO: 1422486 - DNA, 15 bp, Homo sapiens
tagagatgatttcaa

SEQ ID NO: 1422487 - DNA, 15 bp, Homo sapiens
agagatgatttcaat

SEQ ID NO: 1422488 - DNA, 15 bp, Homo sapiens
gagatgatttcaatc

SEQ ID NO: 1422489 - DNA, 15 bp, Homo sapiens
agatgatttcaatcc

SEQ ID NO: 1422490 - DNA, 15 bp, Homo sapiens
gatgatttcaatcca

SEQ ID NO: 1422491 - DNA, 15 bp, Homo sapiens
atgatttcaatccaa

SEQ ID NO: 1422492 - DNA, 15 bp, Homo sapiens
tgatttcaatccaaa

SEQ ID NO: 1422493 - DNA, 15 bp, Homo sapiens
gatttcaatccaaat

SEQ ID NO: 1422494 - DNA, 15 bp, Homo sapiens
atttcaatccaaata

SEQ ID NO: 1422495 - DNA, 15 bp, Homo sapiens
tttcaatccaaatac

SEQ ID NO: 1422496 - DNA, 15 bp, Homo sapiens
ttcaatccaaatact

SEQ ID NO: 1422497 - DNA, 15 bp, Homo sapiens
tcaatccaaatactc

SEQ ID NO: 1422498 - DNA, 15 bp, Homo sapiens
caatccaaatactct

SEQ ID NO: 1422499 - DNA, 15 bp, Homo sapiens
aatccaaatactctt

SEQ ID NO: 1422500 - DNA, 15 bp, Homo sapiens
atccaaatactctta

SEQ ID NO: 1422501 - DNA, 15 bp, Homo sapiens
tccaaatactcttac

SEQ ID NO: 1422502 - DNA, 15 bp, Homo sapiens
ccaaatactcttact

SEQ ID NO: 1422503 - DNA, 15 bp, Homo sapiens
caaatactcttactt

SEQ ID NO: 1422504 - DNA, 15 bp, Homo sapiens
aaatactcttacttt

SEQ ID NO: 1422505 - DNA, 15 bp, Homo sapiens
aatactcttacttta

SEQ ID NO: 1422506 - DNA, 15 bp, Homo sapiens
atactcttactttaa

SEQ ID NO: 1422507 - DNA, 15 bp, Homo sapiens
tactcttactttaaa

SEQ ID NO: 1422508 - DNA, 15 bp, Homo sapiens
actcttactttaaaa

SEQ ID NO: 1422509 - DNA, 15 bp, Homo sapiens
ctcttactttaaaaa

SEQ ID NO: 1422510 - DNA, 15 bp, Homo sapiens
tcttactttaaaaaa

SEQ ID NO: 1422511 - DNA, 15 bp, Homo sapiens
cttactttaaaaaat

SEQ ID NO: 1422512 - DNA, 15 bp, Homo sapiens
ttactttaaaaaatt

SEQ ID NO: 1422513 - DNA, 15 bp, Homo sapiens
tactttaaaaaattt

SEQ ID NO: 1422514 - DNA, 15 bp, Homo sapiens
actttaaaaaatttc

SEQ ID NO: 1422515 - DNA, 15 bp, Homo sapiens
ctttaaaaaatttcc

SEQ ID NO: 1422516 - DNA, 15 bp, Homo sapiens
tttaaaaaatttcct

SEQ ID NO: 1422517 - DNA, 15 bp, Homo sapiens
ttaaaaaatttcctt

SEQ ID NO: 1422518 - DNA, 15 bp, Homo sapiens
taaaaaatttccttt

SEQ ID NO: 1422519 - DNA, 15 bp, Homo sapiens
aaaaaatttcctttc

SEQ ID NO: 1422520 - DNA, 15 bp, Homo sapiens
aaaaatttcctttcc

SEQ ID NO: 1422521 - DNA, 15 bp, Homo sapiens
aaaatttcctttccc

SEQ ID NO: 1422522 - DNA, 15 bp, Homo sapiens
aaatttcctttcccc

SEQ ID NO: 1422523 - DNA, 15 bp, Homo sapiens
aatttcctttcccca

SEQ ID NO: 1422524 - DNA, 15 bp, Homo sapiens
atttcctttccccaa

SEQ ID NO: 1422525 - DNA, 15 bp, Homo sapiens
tttcctttccccaag

SEQ ID NO: 1422526 - DNA, 15 bp, Homo sapiens
ttcctttccccaaga

SEQ ID NO: 1422527 - DNA, 15 bp, Homo sapiens
tcctttccccaagaa

SEQ ID NO: 1422528 - DNA, 15 bp, Homo sapiens
cctttccccaagaat

SEQ ID NO: 1422529 - DNA, 15 bp, Homo sapiens
ctttccccaagaatc

SEQ ID NO: 1422530 - DNA, 15 bp, Homo sapiens
tttccccaagaatct

SEQ ID NO: 1422531 - DNA, 15 bp, Homo sapiens
ttccccaagaatctc

SEQ ID NO: 1422532 - DNA, 15 bp, Homo sapiens
tccccaagaatctcc

SEQ ID NO: 1422533 - DNA, 15 bp, Homo sapiens
ccccaagaatctcct

SEQ ID NO: 1422534 - DNA, 15 bp, Homo sapiens
cccaagaatctcctt

SEQ ID NO: 1422535 - DNA, 15 bp, Homo sapiens
ccaagaatctccttg

SEQ ID NO: 1422536 - DNA, 15 bp, Homo sapiens
caagaatctccttgg

SEQ ID NO: 1422537 - DNA, 15 bp, Homo sapiens
aagaatctccttggg

SEQ ID NO: 1422538 - DNA, 15 bp, Homo sapiens
agaatctccttggga

SEQ ID NO: 1422539 - DNA, 15 bp, Homo sapiens
gaatctccttgggac

SEQ ID NO: 1422540 - DNA, 15 bp, Homo sapiens
aatctccttgggact

SEQ ID NO: 1422541 - DNA, 15 bp, Homo sapiens
atctccttgggactt

SEQ ID NO: 1422542 - DNA, 15 bp, Homo sapiens
tctccttgggacttt

SEQ ID NO: 1422543 - DNA, 15 bp, Homo sapiens
ctccttgggactttg

SEQ ID NO: 1422544 - DNA, 15 bp, Homo sapiens
tccttgggactttga

SEQ ID NO: 1422545 - DNA, 15 bp, Homo sapiens
ccttgggactttgac

SEQ ID NO: 1422546 - DNA, 15 bp, Homo sapiens
cttgggactttgact

SEQ ID NO: 1422547 - DNA, 15 bp, Homo sapiens
ttgggactttgactt

SEQ ID NO: 1422548 - DNA, 15 bp, Homo sapiens
tgggactttgactta

SEQ ID NO: 1422549 - DNA, 15 bp, Homo sapiens
gggactttgacttat

SEQ ID NO: 1422550 - DNA, 15 bp, Homo sapiens
ggactttgacttatt

SEQ ID NO: 1422551 - DNA, 15 bp, Homo sapiens
gactttgacttattt

SEQ ID NO: 1422552 - DNA, 15 bp, Homo sapiens
actttgacttatttt

SEQ ID NO: 1422553 - DNA, 15 bp, Homo sapiens
ctttgacttattttt

SEQ ID NO: 1422554 - DNA, 15 bp, Homo sapiens
tttgacttattttta

SEQ ID NO: 1422555 - DNA, 15 bp, Homo sapiens
ttgacttatttttaa

SEQ ID NO: 1422556 - DNA, 15 bp, Homo sapiens
tgacttatttttaaa

SEQ ID NO: 1422557 - DNA, 15 bp, Homo sapiens
gacttatttttaaag

SEQ ID NO: 1422558 - DNA, 15 bp, Homo sapiens
acttatttttaaagc

SEQ ID NO: 1422559 - DNA, 15 bp, Homo sapiens
cttatttttaaagct

SEQ ID NO: 1422560 - DNA, 15 bp, Homo sapiens
ttatttttaaagctg

SEQ ID NO: 1422561 - DNA, 15 bp, Homo sapiens
tatttttaaagctgt

SEQ ID NO: 1422562 - DNA, 15 bp, Homo sapiens
atttttaaagctgtg

SEQ ID NO: 1422563 - DNA, 15 bp, Homo sapiens
tttttaaagctgtgt

SEQ ID NO: 1422564 - DNA, 15 bp, Homo sapiens
ttttaaagctgtgtt

SEQ ID NO: 1422565 - DNA, 15 bp, Homo sapiens
tttaaagctgtgttg

SEQ ID NO: 1422566 - DNA, 15 bp, Homo sapiens
ttaaagctgtgttgg

SEQ ID NO: 1422567 - DNA, 15 bp, Homo sapiens
taaagctgtgttgga

SEQ ID NO: 1422568 - DNA, 15 bp, Homo sapiens
aaagctgtgttggag

SEQ ID NO: 1422569 - DNA, 15 bp, Homo sapiens
aagctgtgttggagc

SEQ ID NO: 1422570 - DNA, 15 bp, Homo sapiens
agctgtgttggagct

SEQ ID NO: 1422571 - DNA, 15 bp, Homo sapiens
gctgtgttggagctc

SEQ ID NO: 1422572 - DNA, 15 bp, Homo sapiens
ctgtgttggagctca

SEQ ID NO: 1422573 - DNA, 15 bp, Homo sapiens
tgtgttggagctcat

SEQ ID NO: 1422574 - DNA, 15 bp, Homo sapiens
gtgttggagctcatc

SEQ ID NO: 1422575 - DNA, 15 bp, Homo sapiens
tgttggagctcatct

SEQ ID NO: 1422576 - DNA, 15 bp, Homo sapiens
gttggagctcatctt

SEQ ID NO: 1422577 - DNA, 15 bp, Homo sapiens
ttggagctcatcttg

SEQ ID NO: 1422578 - DNA, 15 bp, Homo sapiens
tggagctcatcttgt

SEQ ID NO: 1422579 - DNA, 15 bp, Homo sapiens
ggagctcatcttgtt

SEQ ID NO: 1422580 - DNA, 15 bp, Homo sapiens
gagctcatcttgttc

SEQ ID NO: 1422581 - DNA, 15 bp, Homo sapiens
agctcatcttgttcc

SEQ ID NO: 1422582 - DNA, 15 bp, Homo sapiens
gctcatcttgttccc

SEQ ID NO: 1422583 - DNA, 15 bp, Homo sapiens
ctcatcttgttccct

SEQ ID NO: 1422584 - DNA, 15 bp, Homo sapiens
tcatcttgttccctg

SEQ ID NO: 1422585 - DNA, 15 bp, Homo sapiens
catcttgttccctga

SEQ ID NO: 1422586 - DNA, 15 bp, Homo sapiens
atcttgttccctgat

SEQ ID NO: 1422587 - DNA, 15 bp, Homo sapiens
tcttgttccctgatg

SEQ ID NO: 1422588 - DNA, 15 bp, Homo sapiens
cttgttccctgatgt

SEQ ID NO: 1422589 - DNA, 15 bp, Homo sapiens
ttgttccctgatgtg

SEQ ID NO: 1422590 - DNA, 15 bp, Homo sapiens
tgttccctgatgtgt

SEQ ID NO: 1422591 - DNA, 15 bp, Homo sapiens
gttccctgatgtgtc

SEQ ID NO: 1422592 - DNA, 15 bp, Homo sapiens
ttccctgatgtgtct

SEQ ID NO: 1422593 - DNA, 15 bp, Homo sapiens
tccctgatgtgtctc

SEQ ID NO: 1422594 - DNA, 15 bp, Homo sapiens
ccctgatgtgtctcg

SEQ ID NO: 1422595 - DNA, 15 bp, Homo sapiens
cctgatgtgtctcga

SEQ ID NO: 1422596 - DNA, 15 bp, Homo sapiens
ctgatgtgtctcgag

SEQ ID NO: 1422597 - DNA, 15 bp, Homo sapiens
tgatgtgtctcgagc

SEQ ID NO: 1422598 - DNA, 15 bp, Homo sapiens
gatgtgtctcgagcc

SEQ ID NO: 1422599 - DNA, 15 bp, Homo sapiens
atgtgtctcgagccc

SEQ ID NO: 1422600 - DNA, 15 bp, Homo sapiens
tgtgtctcgagccca

SEQ ID NO: 1422601 - DNA, 15 bp, Homo sapiens
gtgtctcgagcccat

SEQ ID NO: 1422602 - DNA, 15 bp, Homo sapiens
tgtctcgagcccatt

SEQ ID NO: 1422603 - DNA, 15 bp, Homo sapiens
gtctcgagcccattg

SEQ ID NO: 1422604 - DNA, 15 bp, Homo sapiens
tctcgagcccattgg

SEQ ID NO: 1422605 - DNA, 15 bp, Homo sapiens
ctcgagcccattggt

SEQ ID NO: 1422606 - DNA, 15 bp, Homo sapiens
tcgagcccattggta

SEQ ID NO: 1422607 - DNA, 15 bp, Homo sapiens
cgagcccattggtag

SEQ ID NO: 1422608 - DNA, 15 bp, Homo sapiens
gagcccattggtagg

SEQ ID NO: 1422609 - DNA, 15 bp, Homo sapiens
agcccattggtaggg

SEQ ID NO: 1422610 - DNA, 15 bp, Homo sapiens
gcccattggtagggt

SEQ ID NO: 1422611 - DNA, 15 bp, Homo sapiens
cccattggtagggtc

SEQ ID NO: 1422612 - DNA, 15 bp, Homo sapiens
ccattggtagggtca

SEQ ID NO: 1422613 - DNA, 15 bp, Homo sapiens
cattggtagggtcat

SEQ ID NO: 1422614 - DNA, 15 bp, Homo sapiens
attggtagggtcata

SEQ ID NO: 1422615 - DNA, 15 bp, Homo sapiens
ttggtagggtcatac

SEQ ID NO: 1422616 - DNA, 15 bp, Homo sapiens
tggtagggtcataca

SEQ ID NO: 1422617 - DNA, 15 bp, Homo sapiens
ggtagggtcatacaa

SEQ ID NO: 1422618 - DNA, 15 bp, Homo sapiens
gtagggtcatacaaa

SEQ ID NO: 1422619 - DNA, 15 bp, Homo sapiens
tagggtcatacaaag

SEQ ID NO: 1422620 - DNA, 15 bp, Homo sapiens
agggtcatacaaagc

SEQ ID NO: 1422621 - DNA, 15 bp, Homo sapiens
gggtcatacaaagcc

SEQ ID NO: 1422622 - DNA, 15 bp, Homo sapiens
ggtcatacaaagccc

SEQ ID NO: 1422623 - DNA, 15 bp, Homo sapiens
gtcatacaaagccca

SEQ ID NO: 1422624 - DNA, 15 bp, Homo sapiens
tcatacaaagcccac

SEQ ID NO: 1422625 - DNA, 15 bp, Homo sapiens
catacaaagcccacg

SEQ ID NO: 1422626 - DNA, 15 bp, Homo sapiens
atacaaagcccacgg

SEQ ID NO: 1422627 - DNA, 15 bp, Homo sapiens
tacaaagcccacggt

SEQ ID NO: 1422628 - DNA, 15 bp, Homo sapiens
acaaagcccacggtt

SEQ ID NO: 1422629 - DNA, 15 bp, Homo sapiens
caaagcccacggtta

SEQ ID NO: 1422630 - DNA, 15 bp, Homo sapiens
aaagcccacggttac

SEQ ID NO: 1422631 - DNA, 15 bp, Homo sapiens
aagcccacggttaca

SEQ ID NO: 1422632 - DNA, 15 bp, Homo sapiens
agcccacggttacaa

SEQ ID NO: 1422633 - DNA, 15 bp, Homo sapiens
gcccacggttacaag

SEQ ID NO: 1422634 - DNA, 15 bp, Homo sapiens
cccacggttacaagc

SEQ ID NO: 1422635 - DNA, 15 bp, Homo sapiens
ccacggttacaagca

SEQ ID NO: 1422636 - DNA, 15 bp, Homo sapiens
cacggttacaagcag

SEQ ID NO: 1422637 - DNA, 15 bp, Homo sapiens
acggttacaagcagt

SEQ ID NO: 1422638 - DNA, 15 bp, Homo sapiens
cggttacaagcagtg

SEQ ID NO: 1422639 - DNA, 15 bp, Homo sapiens
ggttacaagcagtgg

SEQ ID NO: 1422640 - DNA, 15 bp, Homo sapiens
gttacaagcagtggt

SEQ ID NO: 1422641 - DNA, 15 bp, Homo sapiens
ttacaagcagtggta

SEQ ID NO: 1422642 - DNA, 15 bp, Homo sapiens
tacaagcagtggtag

SEQ ID NO: 1422643 - DNA, 15 bp, Homo sapiens
acaagcagtggtagg

SEQ ID NO: 1422644 - DNA, 15 bp, Homo sapiens
caagcagtggtagga

SEQ ID NO: 1422645 - DNA, 15 bp, Homo sapiens
aagcagtggtaggat

SEQ ID NO: 1422646 - DNA, 15 bp, Homo sapiens
agcagtggtaggatt

SEQ ID NO: 1422647 - DNA, 15 bp, Homo sapiens
gcagtggtaggattg

SEQ ID NO: 1422648 - DNA, 15 bp, Homo sapiens
cagtggtaggattgc

SEQ ID NO: 1422649 - DNA, 15 bp, Homo sapiens
agtggtaggattgca

SEQ ID NO: 1422650 - DNA, 15 bp, Homo sapiens
gtggtaggattgcag

SEQ ID NO: 1422651 - DNA, 15 bp, Homo sapiens
tggtaggattgcagc

SEQ ID NO: 1422652 - DNA, 15 bp, Homo sapiens
ggtaggattgcagcc

SEQ ID NO: 1422653 - DNA, 15 bp, Homo sapiens
gtaggattgcagccg

SEQ ID NO: 1422654 - DNA, 15 bp, Homo sapiens
taggattgcagccgt

SEQ ID NO: 1422655 - DNA, 15 bp, Homo sapiens
aggattgcagccgtg

SEQ ID NO: 1422656 - DNA, 15 bp, Homo sapiens
ggattgcagccgtgg

SEQ ID NO: 1422657 - DNA, 15 bp, Homo sapiens
gattgcagccgtggg

SEQ ID NO: 1422658 - DNA, 15 bp, Homo sapiens
attgcagccgtgggc

SEQ ID NO: 1422659 - DNA, 15 bp, Homo sapiens
ttgcagccgtgggcc

SEQ ID NO: 1422660 - DNA, 15 bp, Homo sapiens
tgcagccgtgggcct

SEQ ID NO: 1422661 - DNA, 15 bp, Homo sapiens
gcagccgtgggcctg

SEQ ID NO: 1422662 - DNA, 15 bp, Homo sapiens
cagccgtgggcctgc

SEQ ID NO: 1422663 - DNA, 15 bp, Homo sapiens
agccgtgggcctgct

SEQ ID NO: 1422664 - DNA, 15 bp, Homo sapiens
gccgtgggcctgctg

SEQ ID NO: 1422665 - DNA, 15 bp, Homo sapiens
ccgtgggcctgctgg

SEQ ID NO: 1422666 - DNA, 15 bp, Homo sapiens
cgtgggcctgctgga

SEQ ID NO: 1422667 - DNA, 15 bp, Homo sapiens
gtgggcctgctggac

SEQ ID NO: 1422668 - DNA, 15 bp, Homo sapiens
tgggcctgctggaca

SEQ ID NO: 1422669 - DNA, 15 bp, Homo sapiens
gggcctgctggacac

SEQ ID NO: 1422670 - DNA, 15 bp, Homo sapiens
ggcctgctggacaca

SEQ ID NO: 1422671 - DNA, 15 bp, Homo sapiens
gcctgctggacacac

SEQ ID NO: 1422672 - DNA, 15 bp, Homo sapiens
cctgctggacacaca

SEQ ID NO: 1422673 - DNA, 15 bp, Homo sapiens
ctgctggacacacac

SEQ ID NO: 1422674 - DNA, 15 bp, Homo sapiens
tgctggacacacaca

SEQ ID NO: 1422675 - DNA, 15 bp, Homo sapiens
gctggacacacacat

SEQ ID NO: 1422676 - DNA, 15 bp, Homo sapiens
ctggacacacacata

SEQ ID NO: 1422677 - DNA, 15 bp, Homo sapiens
tggacacacacatac

SEQ ID NO: 1422678 - DNA, 15 bp, Homo sapiens
ggacacacacataca

SEQ ID NO: 1422679 - DNA, 15 bp, Homo sapiens
gacacacacatacac

SEQ ID NO: 1422680 - DNA, 15 bp, Homo sapiens
acacacacatacacc

SEQ ID NO: 1422681 - DNA, 15 bp, Homo sapiens
cacacacatacacca

SEQ ID NO: 1422682 - DNA, 15 bp, Homo sapiens
acacacatacaccaa

SEQ ID NO: 1422683 - DNA, 15 bp, Homo sapiens
cacacatacaccaaa

SEQ ID NO: 1422684 - DNA, 15 bp, Homo sapiens
acacatacaccaaag

SEQ ID NO: 1422685 - DNA, 15 bp, Homo sapiens
cacatacaccaaaga

SEQ ID NO: 1422686 - DNA, 15 bp, Homo sapiens
acatacaccaaagat

SEQ ID NO: 1422687 - DNA, 15 bp, Homo sapiens
catacaccaaagatg

SEQ ID NO: 1422688 - DNA, 15 bp, Homo sapiens
atacaccaaagatgt

SEQ ID NO: 1422689 - DNA, 15 bp, Homo sapiens
tacaccaaagatgta

SEQ ID NO: 1422690 - DNA, 15 bp, Homo sapiens
acaccaaagatgtat

SEQ ID NO: 1422691 - DNA, 15 bp, Homo sapiens
caccaaagatgtatt

SEQ ID NO: 1422692 - DNA, 15 bp, Homo sapiens
accaaagatgtattt

SEQ ID NO: 1422693 - DNA, 15 bp, Homo sapiens
ccaaagatgtatttg

SEQ ID NO: 1422694 - DNA, 15 bp, Homo sapiens
caaagatgtatttgg

SEQ ID NO: 1422695 - DNA, 15 bp, Homo sapiens
aaagatgtatttgga

SEQ ID NO: 1422696 - DNA, 15 bp, Homo sapiens
aagatgtatttggat

SEQ ID NO: 1422697 - DNA, 15 bp, Homo sapiens
agatgtatttggatc

SEQ ID NO: 1422698 - DNA, 15 bp, Homo sapiens
gatgtatttggatct

SEQ ID NO: 1422699 - DNA, 15 bp, Homo sapiens
atgtatttggatctg

SEQ ID NO: 1422700 - DNA, 15 bp, Homo sapiens
tgtatttggatctgg

SEQ ID NO: 1422701 - DNA, 15 bp, Homo sapiens
gtatttggatctggg

SEQ ID NO: 1422702 - DNA, 15 bp, Homo sapiens
tatttggatctgggc

SEQ ID NO: 1422703 - DNA, 15 bp, Homo sapiens
atttggatctgggca

SEQ ID NO: 1422704 - DNA, 15 bp, Homo sapiens
tttggatctgggcac

SEQ ID NO: 1422705 - DNA, 15 bp, Homo sapiens
ttggatctgggcacc

SEQ ID NO: 1422706 - DNA, 15 bp, Homo sapiens
tggatctgggcaccc

SEQ ID NO: 1422707 - DNA, 15 bp, Homo sapiens
ggatctgggcacccc

SEQ ID NO: 1422708 - DNA, 15 bp, Homo sapiens
gatctgggcaccccc

SEQ ID NO: 1422709 - DNA, 15 bp, Homo sapiens
atctgggcaccccct

SEQ ID NO: 1422710 - DNA, 15 bp, Homo sapiens
tctgggcaccccctc

SEQ ID NO: 1422711 - DNA, 15 bp, Homo sapiens
ctgggcaccccctcc

SEQ ID NO: 1422712 - DNA, 15 bp, Homo sapiens
tgggcaccccctccc

SEQ ID NO: 1422713 - DNA, 15 bp, Homo sapiens
gggcaccccctccca

SEQ ID NO: 1422714 - DNA, 15 bp, Homo sapiens
ggcaccccctcccag

SEQ ID NO: 1422715 - DNA, 15 bp, Homo sapiens
gcaccccctcccagg

SEQ ID NO: 1422716 - DNA, 15 bp, Homo sapiens
caccccctcccagga

SEQ ID NO: 1422717 - DNA, 15 bp, Homo sapiens
accccctcccaggat

SEQ ID NO: 1422718 - DNA, 15 bp, Homo sapiens
ccccctcccaggatc

SEQ ID NO: 1422719 - DNA, 15 bp, Homo sapiens
cccctcccaggatcc

SEQ ID NO: 1422720 - DNA, 15 bp, Homo sapiens
ccctcccaggatccc

SEQ ID NO: 1422721 - DNA, 15 bp, Homo sapiens
cctcccaggatccct

SEQ ID NO: 1422722 - DNA, 15 bp, Homo sapiens
ctcccaggatccctg

SEQ ID NO: 1422723 - DNA, 15 bp, Homo sapiens
tcccaggatccctgt

SEQ ID NO: 1422724 - DNA, 15 bp, Homo sapiens
cccaggatccctgta

SEQ ID NO: 1422725 - DNA, 15 bp, Homo sapiens
ccaggatccctgtac

SEQ ID NO: 1422726 - DNA, 15 bp, Homo sapiens
caggatccctgtact

SEQ ID NO: 1422727 - DNA, 15 bp, Homo sapiens
aggatccctgtactc

SEQ ID NO: 1422728 - DNA, 15 bp, Homo sapiens
ggatccctgtactca

SEQ ID NO: 1422729 - DNA, 15 bp, Homo sapiens
gatccctgtactcac

SEQ ID NO: 1422730 - DNA, 15 bp, Homo sapiens
atccctgtactcacg

SEQ ID NO: 1422731 - DNA, 15 bp, Homo sapiens
tccctgtactcacgt

SEQ ID NO: 1422732 - DNA, 15 bp, Homo sapiens
ccctgtactcacgtg

SEQ ID NO: 1422733 - DNA, 15 bp, Homo sapiens
cctgtactcacgtgc

SEQ ID NO: 1422734 - DNA, 15 bp, Homo sapiens
ctgtactcacgtgcc

SEQ ID NO: 1422735 - DNA, 15 bp, Homo sapiens
tgtactcacgtgcca

SEQ ID NO: 1422736 - DNA, 15 bp, Homo sapiens
gtactcacgtgccag

SEQ ID NO: 1422737 - DNA, 15 bp, Homo sapiens
tactcacgtgccagt

SEQ ID NO: 1422738 - DNA, 15 bp, Homo sapiens
actcacgtgccagtc

SEQ ID NO: 1422739 - DNA, 15 bp, Homo sapiens
ctcacgtgccagtct

SEQ ID NO: 1422740 - DNA, 15 bp, Homo sapiens
tcacgtgccagtctc

SEQ ID NO: 1422741 - DNA, 15 bp, Homo sapiens
cacgtgccagtctcc

SEQ ID NO: 1422742 - DNA, 15 bp, Homo sapiens
acgtgccagtctcct

SEQ ID NO: 1422743 - DNA, 15 bp, Homo sapiens
cgtgccagtctcctg

SEQ ID NO: 1422744 - DNA, 15 bp, Homo sapiens
gtgccagtctcctga

SEQ ID NO: 1422745 - DNA, 15 bp, Homo sapiens
tgccagtctcctgac

SEQ ID NO: 1422746 - DNA, 15 bp, Homo sapiens
gccagtctcctgact

SEQ ID NO: 1422747 - DNA, 15 bp, Homo sapiens
ccagtctcctgacta

SEQ ID NO: 1422748 - DNA, 15 bp, Homo sapiens
cagtctcctgactag

SEQ ID NO: 1422749 - DNA, 15 bp, Homo sapiens
agtctcctgactaga

SEQ ID NO: 1422750 - DNA, 15 bp, Homo sapiens
gtctcctgactagag

SEQ ID NO: 1422751 - DNA, 15 bp, Homo sapiens
tctcctgactagagc

SEQ ID NO: 1422752 - DNA, 15 bp, Homo sapiens
ctcctgactagagca

SEQ ID NO: 1422753 - DNA, 15 bp, Homo sapiens
tcctgactagagcac

SEQ ID NO: 1422754 - DNA, 15 bp, Homo sapiens
cctgactagagcact

SEQ ID NO: 1422755 - DNA, 15 bp, Homo sapiens
ctgactagagcactt

SEQ ID NO: 1422756 - DNA, 15 bp, Homo sapiens
tgactagagcacttt

SEQ ID NO: 1422757 - DNA, 15 bp, Homo sapiens
gactagagcacttta

SEQ ID NO: 1422758 - DNA, 15 bp, Homo sapiens
actagagcactttac

SEQ ID NO: 1422759 - DNA, 15 bp, Homo sapiens
ctagagcactttact

SEQ ID NO: 1422760 - DNA, 15 bp, Homo sapiens
tagagcactttactc

SEQ ID NO: 1422761 - DNA, 15 bp, Homo sapiens
agagcactttactct

SEQ ID NO: 1422762 - DNA, 15 bp, Homo sapiens
gagcactttactctg

SEQ ID NO: 1422763 - DNA, 15 bp, Homo sapiens
agcactttactctgt

SEQ ID NO: 1422764 - DNA, 15 bp, Homo sapiens
gcactttactctgtt

SEQ ID NO: 1422765 - DNA, 15 bp, Homo sapiens
cactttactctgttt

SEQ ID NO: 1422766 - DNA, 15 bp, Homo sapiens
actttactctgtttc

SEQ ID NO: 1422767 - DNA, 15 bp, Homo sapiens
ctttactctgtttcc

SEQ ID NO: 1422768 - DNA, 15 bp, Homo sapiens
tttactctgtttcct

SEQ ID NO: 1422769 - DNA, 15 bp, Homo sapiens
ttactctgtttcctc

SEQ ID NO: 1422770 - DNA, 15 bp, Homo sapiens
tactctgtttcctca

SEQ ID NO: 1422771 - DNA, 15 bp, Homo sapiens
actctgtttcctcag

SEQ ID NO: 1422772 - DNA, 15 bp, Homo sapiens
ctctgtttcctcagc

SEQ ID NO: 1422773 - DNA, 15 bp, Homo sapiens
tctgtttcctcagcc

SEQ ID NO: 1422774 - DNA, 15 bp, Homo sapiens
ctgtttcctcagccc

SEQ ID NO: 1422775 - DNA, 15 bp, Homo sapiens
tgtttcctcagccct

SEQ ID NO: 1422776 - DNA, 15 bp, Homo sapiens
gtttcctcagccctg

SEQ ID NO: 1422777 - DNA, 15 bp, Homo sapiens
tttcctcagccctgc

SEQ ID NO: 1422778 - DNA, 15 bp, Homo sapiens
ttcctcagccctgca

SEQ ID NO: 1422779 - DNA, 15 bp, Homo sapiens
tcctcagccctgcag

SEQ ID NO: 1422780 - DNA, 15 bp, Homo sapiens
cctcagccctgcagc

SEQ ID NO: 1422781 - DNA, 15 bp, Homo sapiens
ctcagccctgcagcc

SEQ ID NO: 1422782 - DNA, 15 bp, Homo sapiens
tcagccctgcagccc

SEQ ID NO: 1422783 - DNA, 15 bp, Homo sapiens
cagccctgcagcccc

SEQ ID NO: 1422784 - DNA, 15 bp, Homo sapiens
agccctgcagcccct

SEQ ID NO: 1422785 - DNA, 15 bp, Homo sapiens
gccctgcagcccctg

SEQ ID NO: 1422786 - DNA, 15 bp, Homo sapiens
ccctgcagcccctgg

SEQ ID NO: 1422787 - DNA, 15 bp, Homo sapiens
cctgcagcccctggg

SEQ ID NO: 1422788 - DNA, 15 bp, Homo sapiens
ctgcagcccctggga

SEQ ID NO: 1422789 - DNA, 15 bp, Homo sapiens
tgcagcccctgggag

SEQ ID NO: 1422790 - DNA, 15 bp, Homo sapiens
gcagcccctgggagc

SEQ ID NO: 1422791 - DNA, 15 bp, Homo sapiens
cagcccctgggagca

SEQ ID NO: 1422792 - DNA, 15 bp, Homo sapiens
agcccctgggagcac

SEQ ID NO: 1422793 - DNA, 15 bp, Homo sapiens
gcccctgggagcaca

SEQ ID NO: 1422794 - DNA, 15 bp, Homo sapiens
cccctgggagcacac

SEQ ID NO: 1422795 - DNA, 15 bp, Homo sapiens
ccctgggagcacaca

SEQ ID NO: 1422796 - DNA, 15 bp, Homo sapiens
cctgggagcacacac

SEQ ID NO: 1422797 - DNA, 15 bp, Homo sapiens
ctgggagcacacact

SEQ ID NO: 1422798 - DNA, 15 bp, Homo sapiens
tgggagcacacactg

SEQ ID NO: 1422799 - DNA, 15 bp, Homo sapiens
gggagcacacactgg

SEQ ID NO: 1422800 - DNA, 15 bp, Homo sapiens
ggagcacacactggg

SEQ ID NO: 1422801 - DNA, 15 bp, Homo sapiens
gagcacacactgggt

SEQ ID NO: 1422802 - DNA, 15 bp, Homo sapiens
agcacacactgggtg

SEQ ID NO: 1422803 - DNA, 15 bp, Homo sapiens
gcacacactgggtgc

SEQ ID NO: 1422804 - DNA, 15 bp, Homo sapiens
cacacactgggtgca

SEQ ID NO: 1422805 - DNA, 15 bp, Homo sapiens
acacactgggtgcag

SEQ ID NO: 1422806 - DNA, 15 bp, Homo sapiens
cacactgggtgcagc

SEQ ID NO: 1422807 - DNA, 15 bp, Homo sapiens
acactgggtgcagcc

SEQ ID NO: 1422808 - DNA, 15 bp, Homo sapiens
cactgggtgcagccc

SEQ ID NO: 1422809 - DNA, 15 bp, Homo sapiens
actgggtgcagccct

SEQ ID NO: 1422810 - DNA, 15 bp, Homo sapiens
ctgggtgcagccctg

SEQ ID NO: 1422811 - DNA, 15 bp, Homo sapiens
tgggtgcagccctgg

SEQ ID NO: 1422812 - DNA, 15 bp, Homo sapiens
gggtgcagccctggg

SEQ ID NO: 1422813 - DNA, 15 bp, Homo sapiens
ggtgcagccctgggc

SEQ ID NO: 1422814 - DNA, 15 bp, Homo sapiens
gtgcagccctgggcc

SEQ ID NO: 1422815 - DNA, 15 bp, Homo sapiens
tgcagccctgggcca

SEQ ID NO: 1422816 - DNA, 15 bp, Homo sapiens
gcagccctgggccag

SEQ ID NO: 1422817 - DNA, 15 bp, Homo sapiens
cagccctgggccagg

SEQ ID NO: 1422818 - DNA, 15 bp, Homo sapiens
agccctgggccaggc

SEQ ID NO: 1422819 - DNA, 15 bp, Homo sapiens
gccctgggccaggca

SEQ ID NO: 1422820 - DNA, 15 bp, Homo sapiens
ccctgggccaggcac

SEQ ID NO: 1422821 - DNA, 15 bp, Homo sapiens
cctgggccaggcacg

SEQ ID NO: 1422822 - DNA, 15 bp, Homo sapiens
ctgggccaggcacgg

SEQ ID NO: 1422823 - DNA, 15 bp, Homo sapiens
tgggccaggcacggg

SEQ ID NO: 1422824 - DNA, 15 bp, Homo sapiens
gggccaggcacggga

SEQ ID NO: 1422825 - DNA, 15 bp, Homo sapiens
ggccaggcacgggag

SEQ ID NO: 1422826 - DNA, 15 bp, Homo sapiens
gccaggcacgggagg

SEQ ID NO: 1422827 - DNA, 15 bp, Homo sapiens
ccaggcacgggaggc

SEQ ID NO: 1422828 - DNA, 15 bp, Homo sapiens
caggcacgggaggcc

SEQ ID NO: 1422829 - DNA, 15 bp, Homo sapiens
aggcacgggaggccc

SEQ ID NO: 1422830 - DNA, 15 bp, Homo sapiens
ggcacgggaggccct

SEQ ID NO: 1422831 - DNA, 15 bp, Homo sapiens
gcacgggaggccctg

SEQ ID NO: 1422832 - DNA, 15 bp, Homo sapiens
cacgggaggccctgc

SEQ ID NO: 1422833 - DNA, 15 bp, Homo sapiens
acgggaggccctgcc

SEQ ID NO: 1422834 - DNA, 15 bp, Homo sapiens
cgggaggccctgccc

SEQ ID NO: 1422835 - DNA, 15 bp, Homo sapiens
gggaggccctgccct

SEQ ID NO: 1422836 - DNA, 15 bp, Homo sapiens
ggaggccctgccctg

SEQ ID NO: 1422837 - DNA, 15 bp, Homo sapiens
gaggccctgccctgt

SEQ ID NO: 1422838 - DNA, 15 bp, Homo sapiens
aggccctgccctgtg

SEQ ID NO: 1422839 - DNA, 15 bp, Homo sapiens
ggccctgccctgtgc

SEQ ID NO: 1422840 - DNA, 15 bp, Homo sapiens
gccctgccctgtgct

SEQ ID NO: 1422841 - DNA, 15 bp, Homo sapiens
ccctgccctgtgctg

SEQ ID NO: 1422842 - DNA, 15 bp, Homo sapiens
cctgccctgtgctgc

SEQ ID NO: 1422843 - DNA, 15 bp, Homo sapiens
ctgccctgtgctgcc

SEQ ID NO: 1422844 - DNA, 15 bp, Homo sapiens
tgccctgtgctgccc

SEQ ID NO: 1422845 - DNA, 15 bp, Homo sapiens
gccctgtgctgccca

SEQ ID NO: 1422846 - DNA, 15 bp, Homo sapiens
ccctgtgctgcccag

SEQ ID NO: 1422847 - DNA, 15 bp, Homo sapiens
cctgtgctgcccagg

SEQ ID NO: 1422848 - DNA, 15 bp, Homo sapiens
ctgtgctgcccaggg

SEQ ID NO: 1422849 - DNA, 15 bp, Homo sapiens
tgtgctgcccagggg

SEQ ID NO: 1422850 - DNA, 15 bp, Homo sapiens
gtgctgcccaggggc

SEQ ID NO: 1422851 - DNA, 15 bp, Homo sapiens
tgctgcccaggggct

SEQ ID NO: 1422852 - DNA, 15 bp, Homo sapiens
gctgcccaggggctg

SEQ ID NO: 1422853 - DNA, 15 bp, Homo sapiens
ctgcccaggggctgt

SEQ ID NO: 1422854 - DNA, 15 bp, Homo sapiens
tgcccaggggctgtg

SEQ ID NO: 1422855 - DNA, 15 bp, Homo sapiens
gcccaggggctgtgt

SEQ ID NO: 1422856 - DNA, 15 bp, Homo sapiens
cccaggggctgtgtg

SEQ ID NO: 1422857 - DNA, 15 bp, Homo sapiens
ccaggggctgtgtgc

SEQ ID NO: 1422858 - DNA, 15 bp, Homo sapiens
caggggctgtgtgca

SEQ ID NO: 1422859 - DNA, 15 bp, Homo sapiens
aggggctgtgtgcac

SEQ ID NO: 1422860 - DNA, 15 bp, Homo sapiens
ggggctgtgtgcacc

SEQ ID NO: 1422861 - DNA, 15 bp, Homo sapiens
gggctgtgtgcacca

SEQ ID NO: 1422862 - DNA, 15 bp, Homo sapiens
ggctgtgtgcaccac

SEQ ID NO: 1422863 - DNA, 15 bp, Homo sapiens
gctgtgtgcaccaca

SEQ ID NO: 1422864 - DNA, 15 bp, Homo sapiens
ctgtgtgcaccacat

SEQ ID NO: 1422865 - DNA, 15 bp, Homo sapiens
tgtgtgcaccacatg

SEQ ID NO: 1422866 - DNA, 15 bp, Homo sapiens
gtgtgcaccacatga

SEQ ID NO: 1422867 - DNA, 15 bp, Homo sapiens
tgtgcaccacatgag

SEQ ID NO: 1422868 - DNA, 15 bp, Homo sapiens
gtgcaccacatgagc

SEQ ID NO: 1422869 - DNA, 15 bp, Homo sapiens
tgcaccacatgagca

SEQ ID NO: 1422870 - DNA, 15 bp, Homo sapiens
gcaccacatgagcac

SEQ ID NO: 1422871 - DNA, 15 bp, Homo sapiens
caccacatgagcaca

SEQ ID NO: 1422872 - DNA, 15 bp, Homo sapiens
accacatgagcacat

SEQ ID NO: 1422873 - DNA, 15 bp, Homo sapiens
ccacatgagcacatt

SEQ ID NO: 1422874 - DNA, 15 bp, Homo sapiens
cacatgagcacattt

SEQ ID NO: 1422875 - DNA, 15 bp, Homo sapiens
acatgagcacatttc

SEQ ID NO: 1422876 - DNA, 15 bp, Homo sapiens
catgagcacatttcc

SEQ ID NO: 1422877 - DNA, 15 bp, Homo sapiens
atgagcacatttccc

SEQ ID NO: 1422878 - DNA, 15 bp, Homo sapiens
tgagcacatttccct

SEQ ID NO: 1422879 - DNA, 15 bp, Homo sapiens
gagcacatttccctc

SEQ ID NO: 1422880 - DNA, 15 bp, Homo sapiens
agcacatttccctct

SEQ ID NO: 1422881 - DNA, 15 bp, Homo sapiens
gcacatttccctctg

SEQ ID NO: 1422882 - DNA, 15 bp, Homo sapiens
cacatttccctctgg

SEQ ID NO: 1422883 - DNA, 15 bp, Homo sapiens
acatttccctctggc

SEQ ID NO: 1422884 - DNA, 15 bp, Homo sapiens
catttccctctggcc

SEQ ID NO: 1422885 - DNA, 15 bp, Homo sapiens
atttccctctggcct

SEQ ID NO: 1422886 - DNA, 15 bp, Homo sapiens
ccctctggcctggcg

SEQ ID NO: 1422887 - DNA, 15 bp, Homo sapiens
cctctggcctggcgg

SEQ ID NO: 1422888 - DNA, 15 bp, Homo sapiens
ctctggcctggcggc

SEQ ID NO: 1422889 - DNA, 15 bp, Homo sapiens
tctggcctggcggcc

SEQ ID NO: 1422890 - DNA, 15 bp, Homo sapiens
ctggcctggcggcct

SEQ ID NO: 1422891 - DNA, 15 bp, Homo sapiens
tggcctggcggcctc

SEQ ID NO: 1422892 - DNA, 15 bp, Homo sapiens
ggcctggcggcctcc

SEQ ID NO: 1422893 - DNA, 15 bp, Homo sapiens
gcctggcggcctcca

SEQ ID NO: 1422894 - DNA, 15 bp, Homo sapiens
cctggcggcctccag

SEQ ID NO: 1422895 - DNA, 15 bp, Homo sapiens
ctggcggcctccagg

SEQ ID NO: 1422896 - DNA, 15 bp, Homo sapiens
tggcggcctccaggc

SEQ ID NO: 1422897 - DNA, 15 bp, Homo sapiens
ggcggcctccaggct

SEQ ID NO: 1422898 - DNA, 15 bp, Homo sapiens
gcggcctccaggctg

SEQ ID NO: 1422899 - DNA, 15 bp, Homo sapiens
cggcctccaggctgg

SEQ ID NO: 1422900 - DNA, 15 bp, Homo sapiens
ggcctccaggctggc

SEQ ID NO: 1422901 - DNA, 15 bp, Homo sapiens
gcctccaggctggct

SEQ ID NO: 1422902 - DNA, 15 bp, Homo sapiens
cctccaggctggctg

SEQ ID NO: 1422903 - DNA, 15 bp, Homo sapiens
ctccaggctggctgt

SEQ ID NO: 1422904 - DNA, 15 bp, Homo sapiens
tccaggctggctgtg

SEQ ID NO: 1422905 - DNA, 15 bp, Homo sapiens
ccaggctggctgtgg

SEQ ID NO: 1422906 - DNA, 15 bp, Homo sapiens
caggctggctgtgga

SEQ ID NO: 1422907 - DNA, 15 bp, Homo sapiens
aggctggctgtggaa

SEQ ID NO: 1422908 - DNA, 15 bp, Homo sapiens
ggctggctgtggaaa

SEQ ID NO: 1422909 - DNA, 15 bp, Homo sapiens
gctggctgtggaaac

SEQ ID NO: 1422910 - DNA, 15 bp, Homo sapiens
ctggctgtggaaaca

SEQ ID NO: 1422911 - DNA, 15 bp, Homo sapiens
tggctgtggaaacag

SEQ ID NO: 1422912 - DNA, 15 bp, Homo sapiens
ggctgtggaaacagt

SEQ ID NO: 1422913 - DNA, 15 bp, Homo sapiens
gctgtggaaacagtt

SEQ ID NO: 1422914 - DNA, 15 bp, Homo sapiens
ctgtggaaacagttc

SEQ ID NO: 1422915 - DNA, 15 bp, Homo sapiens
tgtggaaacagttcc

SEQ ID NO: 1422916 - DNA, 15 bp, Homo sapiens
gtggaaacagttcct

SEQ ID NO: 1422917 - DNA, 15 bp, Homo sapiens
tggaaacagttcctg

SEQ ID NO: 1422918 - DNA, 15 bp, Homo sapiens
ggaaacagttcctga

SEQ ID NO: 1422919 - DNA, 15 bp, Homo sapiens
gaaacagttcctgag

SEQ ID NO: 1422920 - DNA, 15 bp, Homo sapiens
aaacagttcctgagg

SEQ ID NO: 1422921 - DNA, 15 bp, Homo sapiens
aacagttcctgagga

SEQ ID NO: 1422922 - DNA, 15 bp, Homo sapiens
acagttcctgaggaa

SEQ ID NO: 1422923 - DNA, 15 bp, Homo sapiens
cagttcctgaggaaa

SEQ ID NO: 1422924 - DNA, 15 bp, Homo sapiens
agttcctgaggaaat

SEQ ID NO: 1422925 - DNA, 15 bp, Homo sapiens
gttcctgaggaaatt

SEQ ID NO: 1422926 - DNA, 15 bp, Homo sapiens
ttcctgaggaaatta

SEQ ID NO: 1422927 - DNA, 15 bp, Homo sapiens
tcctgaggaaattag

SEQ ID NO: 1422928 - DNA, 15 bp, Homo sapiens
cctgaggaaattaga

SEQ ID NO: 1422929 - DNA, 15 bp, Homo sapiens
ctgaggaaattagag

SEQ ID NO: 1422930 - DNA, 15 bp, Homo sapiens
tgaggaaattagaga

SEQ ID NO: 1422931 - DNA, 15 bp, Homo sapiens
gaggaaattagagat

SEQ ID NO: 1422932 - DNA, 15 bp, Homo sapiens
aggaaattagagatt

SEQ ID NO: 1422933 - DNA, 15 bp, Homo sapiens
ggaaattagagattc

SEQ ID NO: 1422934 - DNA, 15 bp, Homo sapiens
gaaattagagattct

SEQ ID NO: 1422935 - DNA, 15 bp, Homo sapiens
aaattagagattcta

SEQ ID NO: 1422936 - DNA, 15 bp, Homo sapiens
aattagagattctat

SEQ ID NO: 1422937 - DNA, 15 bp, Homo sapiens
attagagattctatg

SEQ ID NO: 1422938 - DNA, 15 bp, Homo sapiens
ttagagattctatga

SEQ ID NO: 1422939 - DNA, 15 bp, Homo sapiens
tagagattctatgaa

SEQ ID NO: 1422940 - DNA, 15 bp, Homo sapiens
agagattctatgaat

SEQ ID NO: 1422941 - DNA, 15 bp, Homo sapiens
gagattctatgaatt

SEQ ID NO: 1422942 - DNA, 15 bp, Homo sapiens
agattctatgaattg

SEQ ID NO: 1422943 - DNA, 15 bp, Homo sapiens
gattctatgaattgt

SEQ ID NO: 1422944 - DNA, 15 bp, Homo sapiens
attctatgaattgta

SEQ ID NO: 1422945 - DNA, 15 bp, Homo sapiens
ttctatgaattgtag

SEQ ID NO: 1422946 - DNA, 15 bp, Homo sapiens
tctatgaattgtagg

SEQ ID NO: 1422947 - DNA, 15 bp, Homo sapiens
ctatgaattgtagga

SEQ ID NO: 1422948 - DNA, 15 bp, Homo sapiens
tatgaattgtaggag

SEQ ID NO: 1422949 - DNA, 15 bp, Homo sapiens
atgaattgtaggagt

SEQ ID NO: 1422950 - DNA, 15 bp, Homo sapiens
tgaattgtaggagta

SEQ ID NO: 1422951 - DNA, 15 bp, Homo sapiens
gaattgtaggagtat

SEQ ID NO: 1422952 - DNA, 15 bp, Homo sapiens
aattgtaggagtatt

SEQ ID NO: 1422953 - DNA, 15 bp, Homo sapiens
attgtaggagtatta

SEQ ID NO: 1422954 - DNA, 15 bp, Homo sapiens
ttgtaggagtattaa

SEQ ID NO: 1422955 - DNA, 15 bp, Homo sapiens
tgtaggagtattaaa

SEQ ID NO: 1422956 - DNA, 15 bp, Homo sapiens
gtaggagtattaaag

SEQ ID NO: 1422957 - DNA, 15 bp, Homo sapiens
taggagtattaaaga

SEQ ID NO: 1422958 - DNA, 15 bp, Homo sapiens
aggagtattaaagac

SEQ ID NO: 1422959 - DNA, 15 bp, Homo sapiens
ggagtattaaagacc

SEQ ID NO: 1422960 - DNA, 15 bp, Homo sapiens
gagtattaaagacca

SEQ ID NO: 1422961 - DNA, 15 bp, Homo sapiens
agtattaaagaccag

SEQ ID NO: 1422962 - DNA, 15 bp, Homo sapiens
gtattaaagaccagg

SEQ ID NO: 1422963 - DNA, 15 bp, Homo sapiens
tattaaagaccaggc

SEQ ID NO: 1422964 - DNA, 15 bp, Homo sapiens
attaaagaccaggct

SEQ ID NO: 1422965 - DNA, 15 bp, Homo sapiens
ttaaagaccaggctg

SEQ ID NO: 1422966 - DNA, 15 bp, Homo sapiens
taaagaccaggctgt

SEQ ID NO: 1422967 - DNA, 15 bp, Homo sapiens
aaagaccaggctgtt

SEQ ID NO: 1422968 - DNA, 15 bp, Homo sapiens
aagaccaggctgttg

SEQ ID NO: 1422969 - DNA, 15 bp, Homo sapiens
agaccaggctgttgg

SEQ ID NO: 1422970 - DNA, 15 bp, Homo sapiens
gaccaggctgttggc

SEQ ID NO: 1422971 - DNA, 15 bp, Homo sapiens
accaggctgttggca

SEQ ID NO: 1422972 - DNA, 15 bp, Homo sapiens
ccaggctgttggcac

SEQ ID NO: 1422973 - DNA, 15 bp, Homo sapiens
caggctgttggcacc

SEQ ID NO: 1422974 - DNA, 15 bp, Homo sapiens
aggctgttggcacca

SEQ ID NO: 1422975 - DNA, 15 bp, Homo sapiens
ggctgttggcaccag

SEQ ID NO: 1422976 - DNA, 15 bp, Homo sapiens
gctgttggcaccaga

SEQ ID NO: 1422977 - DNA, 15 bp, Homo sapiens
ctgttggcaccagaa

SEQ ID NO: 1422978 - DNA, 15 bp, Homo sapiens
tgttggcaccagaac

SEQ ID NO: 1422979 - DNA, 15 bp, Homo sapiens
gttggcaccagaact

SEQ ID NO: 1422980 - DNA, 15 bp, Homo sapiens
ttggcaccagaactt

SEQ ID NO: 1422981 - DNA, 15 bp, Homo sapiens
tggcaccagaactta

SEQ ID NO: 1422982 - DNA, 15 bp, Homo sapiens
ggcaccagaacttaa

SEQ ID NO: 1422983 - DNA, 15 bp, Homo sapiens
gcaccagaacttaaa

SEQ ID NO: 1422984 - DNA, 15 bp, Homo sapiens
caccagaacttaaag

SEQ ID NO: 1422985 - DNA, 15 bp, Homo sapiens
accagaacttaaagc

SEQ ID NO: 1422986 - DNA, 15 bp, Homo sapiens
ccagaacttaaagcg

SEQ ID NO: 1422987 - DNA, 15 bp, Homo sapiens
cagaacttaaagcga

SEQ ID NO: 1422988 - DNA, 15 bp, Homo sapiens
agaacttaaagcgat

SEQ ID NO: 1422989 - DNA, 15 bp, Homo sapiens
gaacttaaagcgatg

SEQ ID NO: 1422990 - DNA, 15 bp, Homo sapiens
aacttaaagcgatga

SEQ ID NO: 1422991 - DNA, 15 bp, Homo sapiens
acttaaagcgatgac

SEQ ID NO: 1422992 - DNA, 15 bp, Homo sapiens
cttaaagcgatgact

SEQ ID NO: 1422993 - DNA, 15 bp, Homo sapiens
ttaaagcgatgactg

SEQ ID NO: 1422994 - DNA, 15 bp, Homo sapiens
taaagcgatgactgg

SEQ ID NO: 1422995 - DNA, 15 bp, Homo sapiens
aaagcgatgactgga

SEQ ID NO: 1422996 - DNA, 15 bp, Homo sapiens
aagcgatgactggat

SEQ ID NO: 1422997 - DNA, 15 bp, Homo sapiens
agcgatgactggatg

SEQ ID NO: 1422998 - DNA, 15 bp, Homo sapiens
gcgatgactggatgt

SEQ ID NO: 1422999 - DNA, 15 bp, Homo sapiens
cgatgactggatgtc

SEQ ID NO: 1423000 - DNA, 15 bp, Homo sapiens
gatgactggatgtct

SEQ ID NO: 1423001 - DNA, 15 bp, Homo sapiens
atgactggatgtctc

SEQ ID NO: 1423002 - DNA, 15 bp, Homo sapiens
tgactggatgtctct

SEQ ID NO: 1423003 - DNA, 15 bp, Homo sapiens
gactggatgtctctg

SEQ ID NO: 1423004 - DNA, 15 bp, Homo sapiens
actggatgtctctgt

SEQ ID NO: 1423005 - DNA, 15 bp, Homo sapiens
ctggatgtctctgta

SEQ ID NO: 1423006 - DNA, 15 bp, Homo sapiens
tggatgtctctgtac

SEQ ID NO: 1423007 - DNA, 15 bp, Homo sapiens
ggatgtctctgtact

SEQ ID NO: 1423008 - DNA, 15 bp, Homo sapiens
gatgtctctgtactg

SEQ ID NO: 1423009 - DNA, 15 bp, Homo sapiens
atgtctctgtactgt

SEQ ID NO: 1423010 - DNA, 15 bp, Homo sapiens
tgtctctgtactgta

SEQ ID NO: 1423011 - DNA, 15 bp, Homo sapiens
gtctctgtactgtat

SEQ ID NO: 1423012 - DNA, 15 bp, Homo sapiens
tctctgtactgtatg

SEQ ID NO: 1423013 - DNA, 15 bp, Homo sapiens
ctctgtactgtatgt

SEQ ID NO: 1423014 - DNA, 15 bp, Homo sapiens
tctgtactgtatgta

SEQ ID NO: 1423015 - DNA, 15 bp, Homo sapiens
ctgtactgtatgtat

SEQ ID NO: 1423016 - DNA, 15 bp, Homo sapiens
tgtactgtatgtatc

SEQ ID NO: 1423017 - DNA, 15 bp, Homo sapiens
gtactgtatgtatct

SEQ ID NO: 1423018 - DNA, 15 bp, Homo sapiens
tactgtatgtatctg

SEQ ID NO: 1423019 - DNA, 15 bp, Homo sapiens
actgtatgtatctgg

SEQ ID NO: 1423020 - DNA, 15 bp, Homo sapiens
ctgtatgtatctggt

SEQ ID NO: 1423021 - DNA, 15 bp, Homo sapiens
tgtatgtatctggtt

SEQ ID NO: 1423022 - DNA, 15 bp, Homo sapiens
gtatgtatctggtta

SEQ ID NO: 1423023 - DNA, 15 bp, Homo sapiens
tatgtatctggttat

SEQ ID NO: 1423024 - DNA, 15 bp, Homo sapiens
atgtatctggttatc

SEQ ID NO: 1423025 - DNA, 15 bp, Homo sapiens
tgtatctggttatca

SEQ ID NO: 1423026 - DNA, 15 bp, Homo sapiens
gtatctggttatcaa

SEQ ID NO: 1423027 - DNA, 15 bp, Homo sapiens
tatctggttatcaag

SEQ ID NO: 1423028 - DNA, 15 bp, Homo sapiens
atctggttatcaaga

SEQ ID NO: 1423029 - DNA, 15 bp, Homo sapiens
tctggttatcaagat

SEQ ID NO: 1423030 - DNA, 15 bp, Homo sapiens
ctggttatcaagatg

SEQ ID NO: 1423031 - DNA, 15 bp, Homo sapiens
tggttatcaagatgc

SEQ ID NO: 1423032 - DNA, 15 bp, Homo sapiens
ggttatcaagatgcc

SEQ ID NO: 1423033 - DNA, 15 bp, Homo sapiens
gttatcaagatgcct

SEQ ID NO: 1423034 - DNA, 15 bp, Homo sapiens
ttatcaagatgcctc

SEQ ID NO: 1423035 - DNA, 15 bp, Homo sapiens
tatcaagatgcctct

SEQ ID NO: 1423036 - DNA, 15 bp, Homo sapiens
atcaagatgcctctg

SEQ ID NO: 1423037 - DNA, 15 bp, Homo sapiens
tcaagatgcctctgt

SEQ ID NO: 1423038 - DNA, 15 bp, Homo sapiens
caagatgcctctgtg

SEQ ID NO: 1423039 - DNA, 15 bp, Homo sapiens
aagatgcctctgtgc

SEQ ID NO: 1423040 - DNA, 15 bp, Homo sapiens
agatgcctctgtgca

SEQ ID NO: 1423041 - DNA, 15 bp, Homo sapiens
gatgcctctgtgcag

SEQ ID NO: 1423042 - DNA, 15 bp, Homo sapiens
atgcctctgtgcaga

SEQ ID NO: 1423043 - DNA, 15 bp, Homo sapiens
tgcctctgtgcagaa

SEQ ID NO: 1423044 - DNA, 15 bp, Homo sapiens
gcctctgtgcagaaa

SEQ ID NO: 1423045 - DNA, 15 bp, Homo sapiens
cctctgtgcagaaag

SEQ ID NO: 1423046 - DNA, 15 bp, Homo sapiens
ctctgtgcagaaagt

SEQ ID NO: 1423047 - DNA, 15 bp, Homo sapiens
tctgtgcagaaagta

SEQ ID NO: 1423048 - DNA, 15 bp, Homo sapiens
ctgtgcagaaagtat

SEQ ID NO: 1423049 - DNA, 15 bp, Homo sapiens
tgtgcagaaagtatg

SEQ ID NO: 1423050 - DNA, 15 bp, Homo sapiens
gtgcagaaagtatgc

SEQ ID NO: 1423051 - DNA, 15 bp, Homo sapiens
tgcagaaagtatgcc

SEQ ID NO: 1423052 - DNA, 15 bp, Homo sapiens
gcagaaagtatgcct

SEQ ID NO: 1423053 - DNA, 15 bp, Homo sapiens
cagaaagtatgcctc

SEQ ID NO: 1423054 - DNA, 15 bp, Homo sapiens
agaaagtatgcctcc

SEQ ID NO: 1423055 - DNA, 15 bp, Homo sapiens
gaaagtatgcctccc

SEQ ID NO: 1423056 - DNA, 15 bp, Homo sapiens
aaagtatgcctcccg

SEQ ID NO: 1423057 - DNA, 15 bp, Homo sapiens
aagtatgcctcccgt

SEQ ID NO: 1423058 - DNA, 15 bp, Homo sapiens
agtatgcctcccgtg

SEQ ID NO: 1423059 - DNA, 15 bp, Homo sapiens
gtatgcctcccgtgg

SEQ ID NO: 1423060 - DNA, 15 bp, Homo sapiens
tatgcctcccgtggg

SEQ ID NO: 1423061 - DNA, 15 bp, Homo sapiens
atgcctcccgtgggt

SEQ ID NO: 1423062 - DNA, 15 bp, Homo sapiens
tgcctcccgtgggta

SEQ ID NO: 1423063 - DNA, 15 bp, Homo sapiens
gcctcccgtgggtat

SEQ ID NO: 1423064 - DNA, 15 bp, Homo sapiens
cctcccgtgggtata

SEQ ID NO: 1423065 - DNA, 15 bp, Homo sapiens
ctcccgtgggtatac

SEQ ID NO: 1423066 - DNA, 15 bp, Homo sapiens
tcccgtgggtatacg

SEQ ID NO: 1423067 - DNA, 15 bp, Homo sapiens
cccgtgggtatacgt

SEQ ID NO: 1423068 - DNA, 15 bp, Homo sapiens
ccgtgggtatacgtt

SEQ ID NO: 1423069 - DNA, 15 bp, Homo sapiens
cgtgggtatacgttt

SEQ ID NO: 1423070 - DNA, 15 bp, Homo sapiens
gtgggtatacgtttt

SEQ ID NO: 1423071 - DNA, 15 bp, Homo sapiens
tgggtatacgttttt

SEQ ID NO: 1423072 - DNA, 15 bp, Homo sapiens
gggtatacgttttta

SEQ ID NO: 1423073 - DNA, 15 bp, Homo sapiens
ggtatacgtttttac

SEQ ID NO: 1423074 - DNA, 15 bp, Homo sapiens
gtatacgtttttacc

SEQ ID NO: 1423075 - DNA, 15 bp, Homo sapiens
tatacgtttttacct

SEQ ID NO: 1423076 - DNA, 15 bp, Homo sapiens
atacgtttttacctt

SEQ ID NO: 1423077 - DNA, 15 bp, Homo sapiens
tacgtttttaccttt

SEQ ID NO: 1423078 - DNA, 15 bp, Homo sapiens
acgtttttacctttt

SEQ ID NO: 1423079 - DNA, 15 bp, Homo sapiens
cgtttttaccttttt

SEQ ID NO: 1423080 - DNA, 15 bp, Homo sapiens
gtttttacctttttt

SEQ ID NO: 1423081 - DNA, 15 bp, Homo sapiens
tttttacctttttta

SEQ ID NO: 1423082 - DNA, 15 bp, Homo sapiens
ttttaccttttttaa

SEQ ID NO: 1423083 - DNA, 15 bp, Homo sapiens
tttaccttttttaaa

SEQ ID NO: 1423084 - DNA, 15 bp, Homo sapiens
ttaccttttttaaaa

SEQ ID NO: 1423085 - DNA, 15 bp, Homo sapiens
taccttttttaaaaa

SEQ ID NO: 1423086 - DNA, 15 bp, Homo sapiens
accttttttaaaaaa

SEQ ID NO: 1423087 - DNA, 15 bp, Homo sapiens
ccttttttaaaaaac

SEQ ID NO: 1423088 - DNA, 15 bp, Homo sapiens
ttttttaaaaaacat

SEQ ID NO: 1423089 - DNA, 15 bp, Homo sapiens
tttttaaaaaacatt

SEQ ID NO: 1423090 - DNA, 15 bp, Homo sapiens
ttttaaaaaacattt

SEQ ID NO: 1423091 - DNA, 15 bp, Homo sapiens
tttaaaaaacatttt

SEQ ID NO: 1423092 - DNA, 15 bp, Homo sapiens
ttaaaaaacattttt

SEQ ID NO: 1423093 - DNA, 15 bp, Homo sapiens
taaaaaacatttttg

SEQ ID NO: 1423094 - DNA, 15 bp, Homo sapiens
aaaaaacatttttgt

SEQ ID NO: 1423095 - DNA, 15 bp, Homo sapiens
aaaaacatttttgta

SEQ ID NO: 1423096 - DNA, 15 bp, Homo sapiens
aaaacatttttgtag

SEQ ID NO: 1423097 - DNA, 15 bp, Homo sapiens
aaacatttttgtaga

SEQ ID NO: 1423098 - DNA, 15 bp, Homo sapiens
aacatttttgtagaa

SEQ ID NO: 1423099 - DNA, 15 bp, Homo sapiens
acatttttgtagaaa

SEQ ID NO: 1423100 - DNA, 15 bp, Homo sapiens
catttttgtagaaaa

SEQ ID NO: 1423101 - DNA, 15 bp, Homo sapiens
atttttgtagaaaaa

SEQ ID NO: 1423102 - DNA, 15 bp, Homo sapiens
tttttgtagaaaaaa

SEQ ID NO: 1423103 - DNA, 15 bp, Homo sapiens
ttttgtagaaaaaat

SEQ ID NO: 1423104 - DNA, 15 bp, Homo sapiens
tttgtagaaaaaata

SEQ ID NO: 1423105 - DNA, 15 bp, Homo sapiens
ttgtagaaaaaataa

SEQ ID NO: 1423106 - DNA, 15 bp, Homo sapiens
tgtagaaaaaataat

SEQ ID NO: 1423107 - DNA, 15 bp, Homo sapiens
gtagaaaaaataatt

SEQ ID NO: 1423108 - DNA, 15 bp, Homo sapiens
tagaaaaaataatta

SEQ ID NO: 1423109 - DNA, 15 bp, Homo sapiens
agaaaaaataattaa

SEQ ID NO: 1423110 - DNA, 15 bp, Homo sapiens
gaaaaaataattaaa

SEQ ID NO: 1423111 - DNA, 15 bp, Homo sapiens
aaaaaataattaaat

SEQ ID NO: 1423112 - DNA, 15 bp, Homo sapiens
aaaaataattaaatc

SEQ ID NO: 1423113 - DNA, 15 bp, Homo sapiens
aaaataattaaatcc

SEQ ID NO: 1423114 - DNA, 15 bp, Homo sapiens
aaataattaaatccc

SEQ ID NO: 1423115 - DNA, 15 bp, Homo sapiens
aataattaaatcccc

SEQ ID NO: 1423116 - DNA, 15 bp, Homo sapiens
ataattaaatcccct

SEQ ID NO: 1423117 - DNA, 15 bp, Homo sapiens
taattaaatcccctt

SEQ ID NO: 1423118 - DNA, 15 bp, Homo sapiens
aattaaatccccttt

SEQ ID NO: 1423119 - DNA, 15 bp, Homo sapiens
attaaatcccctttt

SEQ ID NO: 1423120 - DNA, 15 bp, Homo sapiens
ttaaatccccttttt

SEQ ID NO: 1423121 - DNA, 15 bp, Homo sapiens
taaatcccctttttg

SEQ ID NO: 1423122 - DNA, 15 bp, Homo sapiens
aaatcccctttttgg

SEQ ID NO: 1423123 - DNA, 15 bp, Homo sapiens
aatcccctttttgga

SEQ ID NO: 1423124 - DNA, 15 bp, Homo sapiens
atcccctttttggaa

SEQ ID NO: 1423125 - DNA, 15 bp, Homo sapiens
tcccctttttggaaa

SEQ ID NO: 1423126 - DNA, 15 bp, Homo sapiens
cccctttttggaaac

SEQ ID NO: 1423127 - DNA, 15 bp, Homo sapiens
ccctttttggaaact

SEQ ID NO: 1423128 - DNA, 15 bp, Homo sapiens
cctttttggaaactt

SEQ ID NO: 1423129 - DNA, 15 bp, Homo sapiens
ctttttggaaactta

SEQ ID NO: 1423130 - DNA, 15 bp, Homo sapiens
tttttggaaacttac

SEQ ID NO: 1423131 - DNA, 15 bp, Homo sapiens
ttttggaaacttact

SEQ ID NO: 1423132 - DNA, 15 bp, Homo sapiens
tttggaaacttactg

SEQ ID NO: 1423133 - DNA, 15 bp, Homo sapiens
ttggaaacttactgc

SEQ ID NO: 1423134 - DNA, 15 bp, Homo sapiens
tggaaacttactgca

SEQ ID NO: 1423135 - DNA, 15 bp, Homo sapiens
ggaaacttactgcag

SEQ ID NO: 1423136 - DNA, 15 bp, Homo sapiens
gaaacttactgcagg

SEQ ID NO: 1423137 - DNA, 15 bp, Homo sapiens
aaacttactgcaggt

SEQ ID NO: 1423138 - DNA, 15 bp, Homo sapiens
aacttactgcaggtt

SEQ ID NO: 1423139 - DNA, 15 bp, Homo sapiens
acttactgcaggttt

SEQ ID NO: 1423140 - DNA, 15 bp, Homo sapiens
cttactgcaggtttt

SEQ ID NO: 1423141 - DNA, 15 bp, Homo sapiens
ttactgcaggttttg

SEQ ID NO: 1423142 - DNA, 15 bp, Homo sapiens
tactgcaggttttgt

SEQ ID NO: 1423143 - DNA, 15 bp, Homo sapiens
actgcaggttttgtg

SEQ ID NO: 1423144 - DNA, 15 bp, Homo sapiens
ctgcaggttttgtgc

SEQ ID NO: 1423145 - DNA, 15 bp, Homo sapiens
tgcaggttttgtgcc

SEQ ID NO: 1423146 - DNA, 15 bp, Homo sapiens
gcaggttttgtgcct

SEQ ID NO: 1423147 - DNA, 15 bp, Homo sapiens
caggttttgtgcctt

SEQ ID NO: 1423148 - DNA, 15 bp, Homo sapiens
aggttttgtgccttg

SEQ ID NO: 1423149 - DNA, 15 bp, Homo sapiens
ggttttgtgccttga

SEQ ID NO: 1423150 - DNA, 15 bp, Homo sapiens
gttttgtgccttgac

SEQ ID NO: 1423151 - DNA, 15 bp, Homo sapiens
ttttgtgccttgaca

SEQ ID NO: 1423152 - DNA, 15 bp, Homo sapiens
tttgtgccttgacaa

SEQ ID NO: 1423153 - DNA, 15 bp, Homo sapiens
ttgtgccttgacaac

SEQ ID NO: 1423154 - DNA, 15 bp, Homo sapiens
tgtgccttgacaacc

SEQ ID NO: 1423155 - DNA, 15 bp, Homo sapiens
gtgccttgacaacct

SEQ ID NO: 1423156 - DNA, 15 bp, Homo sapiens
tgccttgacaacctc

SEQ ID NO: 1423157 - DNA, 15 bp, Homo sapiens
gccttgacaacctct

SEQ ID NO: 1423158 - DNA, 15 bp, Homo sapiens
ccttgacaacctctc

SEQ ID NO: 1423159 - DNA, 15 bp, Homo sapiens
cttgacaacctctcc

SEQ ID NO: 1423160 - DNA, 15 bp, Homo sapiens
ttgacaacctctccc

SEQ ID NO: 1423161 - DNA, 15 bp, Homo sapiens
tgacaacctctccct

SEQ ID NO: 1423162 - DNA, 15 bp, Homo sapiens
gacaacctctcccta

SEQ ID NO: 1423163 - DNA, 15 bp, Homo sapiens
acaacctctccctat

SEQ ID NO: 1423164 - DNA, 15 bp, Homo sapiens
caacctctccctatg

SEQ ID NO: 1423165 - DNA, 15 bp, Homo sapiens
aacctctccctatgt

SEQ ID NO: 1423166 - DNA, 15 bp, Homo sapiens
acctctccctatgtg

SEQ ID NO: 1423167 - DNA, 15 bp, Homo sapiens
cctctccctatgtga

SEQ ID NO: 1423168 - DNA, 15 bp, Homo sapiens
ctctccctatgtgag

SEQ ID NO: 1423169 - DNA, 15 bp, Homo sapiens
tctccctatgtgagg

SEQ ID NO: 1423170 - DNA, 15 bp, Homo sapiens
ctccctatgtgaggt

SEQ ID NO: 1423171 - DNA, 15 bp, Homo sapiens
tccctatgtgaggtt

SEQ ID NO: 1423172 - DNA, 15 bp, Homo sapiens
ccctatgtgaggttt

SEQ ID NO: 1423173 - DNA, 15 bp, Homo sapiens
cctatgtgaggtttg

SEQ ID NO: 1423174 - DNA, 15 bp, Homo sapiens
ctatgtgaggtttgt

SEQ ID NO: 1423175 - DNA, 15 bp, Homo sapiens
tatgtgaggtttgta

SEQ ID NO: 1423176 - DNA, 15 bp, Homo sapiens
atgtgaggtttgtaa

SEQ ID NO: 1423177 - DNA, 15 bp, Homo sapiens
tgtgaggtttgtaaa

SEQ ID NO: 1423178 - DNA, 15 bp, Homo sapiens
gtgaggtttgtaaaa

SEQ ID NO: 1423179 - DNA, 15 bp, Homo sapiens
tgaggtttgtaaaaa

SEQ ID NO: 1423180 - DNA, 15 bp, Homo sapiens
gaggtttgtaaaaag

SEQ ID NO: 1423181 - DNA, 15 bp, Homo sapiens
aggtttgtaaaaagt

SEQ ID NO: 1423182 - DNA, 15 bp, Homo sapiens
ggtttgtaaaaagtg

SEQ ID NO: 1423183 - DNA, 15 bp, Homo sapiens
gtttgtaaaaagtgt

SEQ ID NO: 1423184 - DNA, 15 bp, Homo sapiens
tttgtaaaaagtgtc

SEQ ID NO: 1423185 - DNA, 15 bp, Homo sapiens
ttgtaaaaagtgtcc

SEQ ID NO: 1423186 - DNA, 15 bp, Homo sapiens
tgtaaaaagtgtcct

SEQ ID NO: 1423187 - DNA, 15 bp, Homo sapiens
gtaaaaagtgtcctg

SEQ ID NO: 1423188 - DNA, 15 bp, Homo sapiens
taaaaagtgtcctgt

SEQ ID NO: 1423189 - DNA, 15 bp, Homo sapiens
aaaaagtgtcctgtg

SEQ ID NO: 1423190 - DNA, 15 bp, Homo sapiens
aaaagtgtcctgtga

SEQ ID NO: 1423191 - DNA, 15 bp, Homo sapiens
aaagtgtcctgtgac

SEQ ID NO: 1423192 - DNA, 15 bp, Homo sapiens
aagtgtcctgtgact

SEQ ID NO: 1423193 - DNA, 15 bp, Homo sapiens
agtgtcctgtgactt

SEQ ID NO: 1423194 - DNA, 15 bp, Homo sapiens
gtgtcctgtgactta

SEQ ID NO: 1423195 - DNA, 15 bp, Homo sapiens
tgtcctgtgacttaa

SEQ ID NO: 1423196 - DNA, 15 bp, Homo sapiens
gtcctgtgacttaac

SEQ ID NO: 1423197 - DNA, 15 bp, Homo sapiens
tcctgtgacttaaca

SEQ ID NO: 1423198 - DNA, 15 bp, Homo sapiens
cctgtgacttaacac

SEQ ID NO: 1423199 - DNA, 15 bp, Homo sapiens
ctgtgacttaacaca

SEQ ID NO: 1423200 - DNA, 15 bp, Homo sapiens
tgtgacttaacacag

SEQ ID NO: 1423201 - DNA, 15 bp, Homo sapiens
gtgacttaacacaga

SEQ ID NO: 1423202 - DNA, 15 bp, Homo sapiens
tgacttaacacagaa

SEQ ID NO: 1423203 - DNA, 15 bp, Homo sapiens
gacttaacacagaaa

SEQ ID NO: 1423204 - DNA, 15 bp, Homo sapiens
acttaacacagaaac

SEQ ID NO: 1423205 - DNA, 15 bp, Homo sapiens
cttaacacagaaacg

SEQ ID NO: 1423206 - DNA, 15 bp, Homo sapiens
ttaacacagaaacgc

SEQ ID NO: 1423207 - DNA, 15 bp, Homo sapiens
taacacagaaacgca

SEQ ID NO: 1423208 - DNA, 15 bp, Homo sapiens
aacacagaaacgcaa

SEQ ID NO: 1423209 - DNA, 15 bp, Homo sapiens
acacagaaacgcaat

SEQ ID NO: 1423210 - DNA, 15 bp, Homo sapiens
cacagaaacgcaata

SEQ ID NO: 1423211 - DNA, 15 bp, Homo sapiens
acagaaacgcaataa

SEQ ID NO: 1423212 - DNA, 15 bp, Homo sapiens
cagaaacgcaataaa

SEQ ID NO: 1423213 - DNA, 15 bp, Homo sapiens
agaaacgcaataaac

SEQ ID NO: 1423214 - DNA, 15 bp, Homo sapiens
gaaacgcaataaaca

SEQ ID NO: 1423215 - DNA, 15 bp, Homo sapiens
aaacgcaataaacac

SEQ ID NO: 1423216 - DNA, 15 bp, Homo sapiens
aacgcaataaacaca

SEQ ID NO: 1423217 - DNA, 15 bp, Homo sapiens
acgcaataaacacac

SEQ ID NO: 1423218 - DNA, 15 bp, Homo sapiens
cgcaataaacacaca

SEQ ID NO: 1423219 - DNA, 15 bp, Homo sapiens
gcaataaacacacac

SEQ ID NO: 1423220 - DNA, 15 bp, Homo sapiens
caataaacacacaca

SEQ ID NO: 1423221 - DNA, 15 bp, Homo sapiens
aataaacacacacaa

SEQ ID NO: 1423222 - DNA, 15 bp, Homo sapiens
ataaacacacacaaa

SEQ ID NO: 1423223 - DNA, 15 bp, Homo sapiens
taaacacacacaaaa

SEQ ID NO: 1423224 - DNA, 15 bp, Homo sapiens
aaacacacacaaaat

SEQ ID NO: 1423225 - DNA, 15 bp, Homo sapiens
aacacacacaaaata

SEQ ID NO: 1423226 - DNA, 15 bp, Homo sapiens
acacacacaaaatag

SEQ ID NO: 1423227 - DNA, 15 bp, Homo sapiens
cacacacaaaatagt

SEQ ID NO: 1423228 - DNA, 15 bp, Homo sapiens
acacacaaaatagtt

SEQ ID NO: 1423229 - DNA, 15 bp, Homo sapiens
cacacaaaatagttt

SEQ ID NO: 1423230 - DNA, 15 bp, Homo sapiens
acacaaaatagtttc

SEQ ID NO: 1423231 - DNA, 15 bp, Homo sapiens
cacaaaatagtttca

SEQ ID NO: 1423232 - DNA, 15 bp, Homo sapiens
acaaaatagtttcat

SEQ ID NO: 1423233 - DNA, 15 bp, Homo sapiens
caaaatagtttcatg

SEQ ID NO: 1423234 - DNA, 15 bp, Homo sapiens
aaaatagtttcatga

SEQ ID NO: 1423235 - DNA, 15 bp, Homo sapiens
aaatagtttcatgag

SEQ ID NO: 1423236 - DNA, 15 bp, Homo sapiens
aatagtttcatgagt

SEQ ID NO: 1423237 - DNA, 15 bp, Homo sapiens
atagtttcatgagtg

SEQ ID NO: 1423238 - DNA, 15 bp, Homo sapiens
tagtttcatgagtga

SEQ ID NO: 1423239 - DNA, 15 bp, Homo sapiens
agtttcatgagtgat

SEQ ID NO: 1423240 - DNA, 15 bp, Homo sapiens
gtttcatgagtgatt

SEQ ID NO: 1423241 - DNA, 15 bp, Homo sapiens
tttcatgagtgattc

SEQ ID NO: 1423242 - DNA, 15 bp, Homo sapiens
ttcatgagtgattct

SEQ ID NO: 1423243 - DNA, 15 bp, Homo sapiens
tcatgagtgattctt

SEQ ID NO: 1423244 - DNA, 15 bp, Homo sapiens
catgagtgattcttc

SEQ ID NO: 1423245 - DNA, 15 bp, Homo sapiens
atgagtgattcttca

SEQ ID NO: 1423246 - DNA, 15 bp, Homo sapiens
tgagtgattcttcag

SEQ ID NO: 1423247 - DNA, 15 bp, Homo sapiens
gagtgattcttcaga

SEQ ID NO: 1423248 - DNA, 15 bp, Homo sapiens
agtgattcttcagat

SEQ ID NO: 1423249 - DNA, 15 bp, Homo sapiens
gtgattcttcagatg

SEQ ID NO: 1423250 - DNA, 15 bp, Homo sapiens
tgattcttcagatgc

SEQ ID NO: 1423251 - DNA, 15 bp, Homo sapiens
gattcttcagatgcc

SEQ ID NO: 1423252 - DNA, 15 bp, Homo sapiens
attcttcagatgccc

SEQ ID NO: 1423253 - DNA, 15 bp, Homo sapiens
ttcttcagatgccct

SEQ ID NO: 1423254 - DNA, 15 bp, Homo sapiens
tcttcagatgccctt

SEQ ID NO: 1423255 - DNA, 15 bp, Homo sapiens
cttcagatgcccttc

SEQ ID NO: 1423256 - DNA, 15 bp, Homo sapiens
ttcagatgcccttcc

SEQ ID NO: 1423257 - DNA, 15 bp, Homo sapiens
tcagatgcccttccc

SEQ ID NO: 1423258 - DNA, 15 bp, Homo sapiens
cagatgcccttccca

SEQ ID NO: 1423259 - DNA, 15 bp, Homo sapiens
agatgcccttcccaa

SEQ ID NO: 1423260 - DNA, 15 bp, Homo sapiens
gatgcccttcccaac

SEQ ID NO: 1423261 - DNA, 15 bp, Homo sapiens
atgcccttcccaact

SEQ ID NO: 1423262 - DNA, 15 bp, Homo sapiens
tgcccttcccaactg

SEQ ID NO: 1423263 - DNA, 15 bp, Homo sapiens
gcccttcccaactgg

SEQ ID NO: 1423264 - DNA, 15 bp, Homo sapiens
cccttcccaactggt

SEQ ID NO: 1423265 - DNA, 15 bp, Homo sapiens
ccttcccaactggtt

SEQ ID NO: 1423266 - DNA, 15 bp, Homo sapiens
cttcccaactggtta

SEQ ID NO: 1423267 - DNA, 15 bp, Homo sapiens
ttcccaactggttag

SEQ ID NO: 1423268 - DNA, 15 bp, Homo sapiens
tcccaactggttagt

SEQ ID NO: 1423269 - DNA, 15 bp, Homo sapiens
cccaactggttagtt

SEQ ID NO: 1423270 - DNA, 15 bp, Homo sapiens
ccaactggttagttg

SEQ ID NO: 1423271 - DNA, 15 bp, Homo sapiens
caactggttagttga

SEQ ID NO: 1423272 - DNA, 15 bp, Homo sapiens
aactggttagttgat

SEQ ID NO: 1423273 - DNA, 15 bp, Homo sapiens
actggttagttgatc

SEQ ID NO: 1423274 - DNA, 15 bp, Homo sapiens
ctggttagttgatca

SEQ ID NO: 1423275 - DNA, 15 bp, Homo sapiens
tggttagttgatcaa

SEQ ID NO: 1423276 - DNA, 15 bp, Homo sapiens
ggttagttgatcaag

SEQ ID NO: 1423277 - DNA, 15 bp, Homo sapiens
gttagttgatcaaga

SEQ ID NO: 1423278 - DNA, 15 bp, Homo sapiens
ttagttgatcaagaa

SEQ ID NO: 1423279 - DNA, 15 bp, Homo sapiens
tagttgatcaagaat

SEQ ID NO: 1423280 - DNA, 15 bp, Homo sapiens
agttgatcaagaatt

SEQ ID NO: 1423281 - DNA, 15 bp, Homo sapiens
gttgatcaagaattt

SEQ ID NO: 1423282 - DNA, 15 bp, Homo sapiens
ttgatcaagaatttt

SEQ ID NO: 1423283 - DNA, 15 bp, Homo sapiens
tgatcaagaattttg

SEQ ID NO: 1423284 - DNA, 15 bp, Homo sapiens
gatcaagaattttgg

SEQ ID NO: 1423285 - DNA, 15 bp, Homo sapiens
atcaagaattttggg

SEQ ID NO: 1423286 - DNA, 15 bp, Homo sapiens
tcaagaattttgggg

SEQ ID NO: 1423287 - DNA, 15 bp, Homo sapiens
caagaattttggggg

SEQ ID NO: 1423288 - DNA, 15 bp, Homo sapiens
aagaattttgggggt

SEQ ID NO: 1423289 - DNA, 15 bp, Homo sapiens
agaattttgggggtg

SEQ ID NO: 1423290 - DNA, 15 bp, Homo sapiens
gaattttgggggtgg

SEQ ID NO: 1423291 - DNA, 15 bp, Homo sapiens
aattttgggggtggg

SEQ ID NO: 1423292 - DNA, 15 bp, Homo sapiens
attttgggggtgggg

SEQ ID NO: 1423293 - DNA, 15 bp, Homo sapiens
ttttgggggtggggg

SEQ ID NO: 1423294 - DNA, 15 bp, Homo sapiens
tttgggggtgggggt

SEQ ID NO: 1423295 - DNA, 15 bp, Homo sapiens
ttgggggtgggggtt

SEQ ID NO: 1423296 - DNA, 15 bp, Homo sapiens
tgggggtgggggttg

SEQ ID NO: 1423297 - DNA, 15 bp, Homo sapiens
gggggtgggggttgc

SEQ ID NO: 1423298 - DNA, 15 bp, Homo sapiens
ggggtgggggttgcg

SEQ ID NO: 1423299 - DNA, 15 bp, Homo sapiens
gggtgggggttgcgg

SEQ ID NO: 1423300 - DNA, 15 bp, Homo sapiens
ggtgggggttgcgga

SEQ ID NO: 1423301 - DNA, 15 bp, Homo sapiens
gtgggggttgcggag

SEQ ID NO: 1423302 - DNA, 15 bp, Homo sapiens
tgggggttgcggaga

SEQ ID NO: 1423303 - DNA, 15 bp, Homo sapiens
gggggttgcggagaa

SEQ ID NO: 1423304 - DNA, 15 bp, Homo sapiens
ggggttgcggagaaa

SEQ ID NO: 1423305 - DNA, 15 bp, Homo sapiens
gggttgcggagaaat

SEQ ID NO: 1423306 - DNA, 15 bp, Homo sapiens
ggttgcggagaaatc

SEQ ID NO: 1423307 - DNA, 15 bp, Homo sapiens
gttgcggagaaatca

SEQ ID NO: 1423308 - DNA, 15 bp, Homo sapiens
ttgcggagaaatcaa

SEQ ID NO: 1423309 - DNA, 15 bp, Homo sapiens
tgcggagaaatcaag

SEQ ID NO: 1423310 - DNA, 15 bp, Homo sapiens
gcggagaaatcaagt

SEQ ID NO: 1423311 - DNA, 15 bp, Homo sapiens
cggagaaatcaagtt

SEQ ID NO: 1423312 - DNA, 15 bp, Homo sapiens
ggagaaatcaagttt

SEQ ID NO: 1423313 - DNA, 15 bp, Homo sapiens
gagaaatcaagttta

SEQ ID NO: 1423314 - DNA, 15 bp, Homo sapiens
agaaatcaagtttaa

SEQ ID NO: 1423315 - DNA, 15 bp, Homo sapiens
gaaatcaagtttaaa

SEQ ID NO: 1423316 - DNA, 15 bp, Homo sapiens
aaatcaagtttaaaa

SEQ ID NO: 1423317 - DNA, 15 bp, Homo sapiens
aatcaagtttaaaat

SEQ ID NO: 1423318 - DNA, 15 bp, Homo sapiens
atcaagtttaaaatt

SEQ ID NO: 1423319 - DNA, 15 bp, Homo sapiens
tcaagtttaaaattc

SEQ ID NO: 1423320 - DNA, 15 bp, Homo sapiens
caagtttaaaattcc

SEQ ID NO: 1423321 - DNA, 15 bp, Homo sapiens
aagtttaaaattcct

SEQ ID NO: 1423322 - DNA, 15 bp, Homo sapiens
agtttaaaattcctt

SEQ ID NO: 1423323 - DNA, 15 bp, Homo sapiens
gtttaaaattccttc

SEQ ID NO: 1423324 - DNA, 15 bp, Homo sapiens
tttaaaattccttct

SEQ ID NO: 1423325 - DNA, 15 bp, Homo sapiens
ttaaaattccttctg

SEQ ID NO: 1423326 - DNA, 15 bp, Homo sapiens
taaaattccttctga

SEQ ID NO: 1423327 - DNA, 15 bp, Homo sapiens
aaaattccttctgat

SEQ ID NO: 1423328 - DNA, 15 bp, Homo sapiens
aaattccttctgatt

SEQ ID NO: 1423329 - DNA, 15 bp, Homo sapiens
aattccttctgatta

SEQ ID NO: 1423330 - DNA, 15 bp, Homo sapiens
attccttctgattaa

SEQ ID NO: 1423331 - DNA, 15 bp, Homo sapiens
ttccttctgattaaa

SEQ ID NO: 1423332 - DNA, 15 bp, Homo sapiens
tccttctgattaaaa

SEQ ID NO: 1423333 - DNA, 15 bp, Homo sapiens
ccttctgattaaaaa

SEQ ID NO: 1423334 - DNA, 15 bp, Homo sapiens
cttctgattaaaaaa

SEQ ID NO: 1423335 - DNA, 15 bp, Homo sapiens
ttctgattaaaaaaa

SEQ ID NO: 1423336 - DNA, 15 bp, Homo sapiens
tctgattaaaaaaat

SEQ ID NO: 1423337 - DNA, 15 bp, Homo sapiens
ctgattaaaaaaata

SEQ ID NO: 1423338 - DNA, 15 bp, Homo sapiens
tgattaaaaaaatat

SEQ ID NO: 1423339 - DNA, 15 bp, Homo sapiens
gattaaaaaaatata

SEQ ID NO: 1423340 - DNA, 15 bp, Homo sapiens
attaaaaaaatatag

SEQ ID NO: 1423341 - DNA, 15 bp, Homo sapiens
ttaaaaaaatatagt

SEQ ID NO: 1423342 - DNA, 15 bp, Homo sapiens
taaaaaaatatagtg

SEQ ID NO: 1423343 - DNA, 15 bp, Homo sapiens
aaaaaaatatagtgg

SEQ ID NO: 1423344 - DNA, 15 bp, Homo sapiens
aaaaaatatagtgga

SEQ ID NO: 1423345 - DNA, 15 bp, Homo sapiens
aaaaatatagtggaa

SEQ ID NO: 1423346 - DNA, 15 bp, Homo sapiens
aaaatatagtggaat

SEQ ID NO: 1423347 - DNA, 15 bp, Homo sapiens
aaatatagtggaata

SEQ ID NO: 1423348 - DNA, 15 bp, Homo sapiens
aatatagtggaatac

SEQ ID NO: 1423349 - DNA, 15 bp, Homo sapiens
atatagtggaataca

SEQ ID NO: 1423350 - DNA, 15 bp, Homo sapiens
tatagtggaatacaa

SEQ ID NO: 1423351 - DNA, 15 bp, Homo sapiens
atagtggaatacaat

SEQ ID NO: 1423352 - DNA, 15 bp, Homo sapiens
tagtggaatacaatt

SEQ ID NO: 1423353 - DNA, 15 bp, Homo sapiens
agtggaatacaattg

SEQ ID NO: 1423354 - DNA, 15 bp, Homo sapiens
gtggaatacaattgt

SEQ ID NO: 1423355 - DNA, 15 bp, Homo sapiens
tggaatacaattgtc

SEQ ID NO: 1423356 - DNA, 15 bp, Homo sapiens
ggaatacaattgtct

SEQ ID NO: 1423357 - DNA, 15 bp, Homo sapiens
gaatacaattgtctg

SEQ ID NO: 1423358 - DNA, 15 bp, Homo sapiens
aatacaattgtctgc

SEQ ID NO: 1423359 - DNA, 15 bp, Homo sapiens
atacaattgtctgcc

SEQ ID NO: 1423360 - DNA, 15 bp, Homo sapiens
tacaattgtctgccg

SEQ ID NO: 1423361 - DNA, 15 bp, Homo sapiens
acaattgtctgccgt

SEQ ID NO: 1423362 - DNA, 15 bp, Homo sapiens
caattgtctgccgtt

SEQ ID NO: 1423363 - DNA, 15 bp, Homo sapiens
aattgtctgccgttt

SEQ ID NO: 1423364 - DNA, 15 bp, Homo sapiens
attgtctgccgtttc

SEQ ID NO: 1423365 - DNA, 15 bp, Homo sapiens
ttgtctgccgtttcc

SEQ ID NO: 1423366 - DNA, 15 bp, Homo sapiens
tgtctgccgtttccc

SEQ ID NO: 1423367 - DNA, 15 bp, Homo sapiens
gtctgccgtttcccc

SEQ ID NO: 1423368 - DNA, 15 bp, Homo sapiens
tctgccgtttcccct

SEQ ID NO: 1423369 - DNA, 15 bp, Homo sapiens
ctgccgtttcccctt

SEQ ID NO: 1423370 - DNA, 15 bp, Homo sapiens
tgccgtttccccttc

SEQ ID NO: 1423371 - DNA, 15 bp, Homo sapiens
gccgtttccccttct

SEQ ID NO: 1423372 - DNA, 15 bp, Homo sapiens
ccgtttccccttctt

SEQ ID NO: 1423373 - DNA, 15 bp, Homo sapiens
cgtttccccttctta

SEQ ID NO: 1423374 - DNA, 15 bp, Homo sapiens
gtttccccttcttaa

SEQ ID NO: 1423375 - DNA, 15 bp, Homo sapiens
tttccccttcttaat

SEQ ID NO: 1423376 - DNA, 15 bp, Homo sapiens
ttccccttcttaatg

SEQ ID NO: 1423377 - DNA, 15 bp, Homo sapiens
tccccttcttaatgt

SEQ ID NO: 1423378 - DNA, 15 bp, Homo sapiens
ccccttcttaatgta

SEQ ID NO: 1423379 - DNA, 15 bp, Homo sapiens
cccttcttaatgtat

SEQ ID NO: 1423380 - DNA, 15 bp, Homo sapiens
ccttcttaatgtata

SEQ ID NO: 1423381 - DNA, 15 bp, Homo sapiens
cttcttaatgtatat

SEQ ID NO: 1423382 - DNA, 15 bp, Homo sapiens
ttcttaatgtatata

SEQ ID NO: 1423383 - DNA, 15 bp, Homo sapiens
tcttaatgtatatat

SEQ ID NO: 1423384 - DNA, 15 bp, Homo sapiens
cttaatgtatatatt

SEQ ID NO: 1423385 - DNA, 15 bp, Homo sapiens
ttaatgtatatattg

SEQ ID NO: 1423386 - DNA, 15 bp, Homo sapiens
taatgtatatattgt

SEQ ID NO: 1423387 - DNA, 15 bp, Homo sapiens
aatgtatatattgtg

SEQ ID NO: 1423388 - DNA, 15 bp, Homo sapiens
atgtatatattgtga

SEQ ID NO: 1423389 - DNA, 15 bp, Homo sapiens
tgtatatattgtgag

SEQ ID NO: 1423390 - DNA, 15 bp, Homo sapiens
gtatatattgtgagt

SEQ ID NO: 1423391 - DNA, 15 bp, Homo sapiens
tatatattgtgagta

SEQ ID NO: 1423392 - DNA, 15 bp, Homo sapiens
atatattgtgagtat

SEQ ID NO: 1423393 - DNA, 15 bp, Homo sapiens
tatattgtgagtatt

SEQ ID NO: 1423394 - DNA, 15 bp, Homo sapiens
atattgtgagtattt

SEQ ID NO: 1423395 - DNA, 15 bp, Homo sapiens
tattgtgagtattta

SEQ ID NO: 1423396 - DNA, 15 bp, Homo sapiens
attgtgagtatttat

SEQ ID NO: 1423397 - DNA, 15 bp, Homo sapiens
ttgtgagtatttatt

SEQ ID NO: 1423398 - DNA, 15 bp, Homo sapiens
tgtgagtatttatta

SEQ ID NO: 1423399 - DNA, 15 bp, Homo sapiens
gtgagtatttattag

SEQ ID NO: 1423400 - DNA, 15 bp, Homo sapiens
tgagtatttattaga

SEQ ID NO: 1423401 - DNA, 15 bp, Homo sapiens
gagtatttattagat

SEQ ID NO: 1423402 - DNA, 15 bp, Homo sapiens
agtatttattagatt

SEQ ID NO: 1423403 - DNA, 15 bp, Homo sapiens
gtatttattagattc

SEQ ID NO: 1423404 - DNA, 15 bp, Homo sapiens
tatttattagattcg

SEQ ID NO: 1423405 - DNA, 15 bp, Homo sapiens
atttattagattcgt

SEQ ID NO: 1423406 - DNA, 15 bp, Homo sapiens
tttattagattcgta

SEQ ID NO: 1423407 - DNA, 15 bp, Homo sapiens
ttattagattcgtag

SEQ ID NO: 1423408 - DNA, 15 bp, Homo sapiens
tattagattcgtagg

SEQ ID NO: 1423409 - DNA, 15 bp, Homo sapiens
attagattcgtaggt

SEQ ID NO: 1423410 - DNA, 15 bp, Homo sapiens
ttagattcgtaggtc

SEQ ID NO: 1423411 - DNA, 15 bp, Homo sapiens
tagattcgtaggtca

SEQ ID NO: 1423412 - DNA, 15 bp, Homo sapiens
agattcgtaggtcat

SEQ ID NO: 1423413 - DNA, 15 bp, Homo sapiens
gattcgtaggtcata

SEQ ID NO: 1423414 - DNA, 15 bp, Homo sapiens
attcgtaggtcatat

SEQ ID NO: 1423415 - DNA, 15 bp, Homo sapiens
ttcgtaggtcatatt

SEQ ID NO: 1423416 - DNA, 15 bp, Homo sapiens
tcgtaggtcatatta

SEQ ID NO: 1423417 - DNA, 15 bp, Homo sapiens
cgtaggtcatattac

SEQ ID NO: 1423418 - DNA, 15 bp, Homo sapiens
gtaggtcatattact

SEQ ID NO: 1423419 - DNA, 15 bp, Homo sapiens
taggtcatattactt

SEQ ID NO: 1423420 - DNA, 15 bp, Homo sapiens
aggtcatattactta

SEQ ID NO: 1423421 - DNA, 15 bp, Homo sapiens
ggtcatattacttat

SEQ ID NO: 1423422 - DNA, 15 bp, Homo sapiens
gtcatattacttatc

SEQ ID NO: 1423423 - DNA, 15 bp, Homo sapiens
tcatattacttatca

SEQ ID NO: 1423424 - DNA, 15 bp, Homo sapiens
catattacttatcaa

SEQ ID NO: 1423425 - DNA, 15 bp, Homo sapiens
atattacttatcaac

SEQ ID NO: 1423426 - DNA, 15 bp, Homo sapiens
tattacttatcaact

SEQ ID NO: 1423427 - DNA, 15 bp, Homo sapiens
attacttatcaactg

SEQ ID NO: 1423428 - DNA, 15 bp, Homo sapiens
ttacttatcaactga

SEQ ID NO: 1423429 - DNA, 15 bp, Homo sapiens
tacttatcaactgag

SEQ ID NO: 1423430 - DNA, 15 bp, Homo sapiens
acttatcaactgagc

SEQ ID NO: 1423431 - DNA, 15 bp, Homo sapiens
cttatcaactgagcc

SEQ ID NO: 1423432 - DNA, 15 bp, Homo sapiens
ttatcaactgagcca

SEQ ID NO: 1423433 - DNA, 15 bp, Homo sapiens
tatcaactgagccaa

SEQ ID NO: 1423434 - DNA, 15 bp, Homo sapiens
atcaactgagccaaa

SEQ ID NO: 1423435 - DNA, 15 bp, Homo sapiens
tcaactgagccaaat

SEQ ID NO: 1423436 - DNA, 15 bp, Homo sapiens
caactgagccaaatg

SEQ ID NO: 1423437 - DNA, 15 bp, Homo sapiens
aactgagccaaatgt

SEQ ID NO: 1423438 - DNA, 15 bp, Homo sapiens
actgagccaaatgtc

SEQ ID NO: 1423439 - DNA, 15 bp, Homo sapiens
ctgagccaaatgtct

SEQ ID NO: 1423440 - DNA, 15 bp, Homo sapiens
tgagccaaatgtctg

SEQ ID NO: 1423441 - DNA, 15 bp, Homo sapiens
gagccaaatgtctgt

SEQ ID NO: 1423442 - DNA, 15 bp, Homo sapiens
agccaaatgtctgtg

SEQ ID NO: 1423443 - DNA, 15 bp, Homo sapiens
gccaaatgtctgtgt

SEQ ID NO: 1423444 - DNA, 15 bp, Homo sapiens
ccaaatgtctgtgtg

SEQ ID NO: 1423445 - DNA, 15 bp, Homo sapiens
caaatgtctgtgtgc

SEQ ID NO: 1423446 - DNA, 15 bp, Homo sapiens
aaatgtctgtgtgca

SEQ ID NO: 1423447 - DNA, 15 bp, Homo sapiens
aatgtctgtgtgcaa

SEQ ID NO: 1423448 - DNA, 15 bp, Homo sapiens
atgtctgtgtgcaat

SEQ ID NO: 1423449 - DNA, 15 bp, Homo sapiens
tgtctgtgtgcaatt

SEQ ID NO: 1423450 - DNA, 15 bp, Homo sapiens
gtctgtgtgcaattg

SEQ ID NO: 1423451 - DNA, 15 bp, Homo sapiens
tctgtgtgcaattgt

SEQ ID NO: 1423452 - DNA, 15 bp, Homo sapiens
ctgtgtgcaattgtg

SEQ ID NO: 1423453 - DNA, 15 bp, Homo sapiens
tgtgtgcaattgtgt

SEQ ID NO: 1423454 - DNA, 15 bp, Homo sapiens
gtgtgcaattgtgtt

SEQ ID NO: 1423455 - DNA, 15 bp, Homo sapiens
tgtgcaattgtgttt

SEQ ID NO: 1423456 - DNA, 15 bp, Homo sapiens
gtgcaattgtgtttc

SEQ ID NO: 1423457 - DNA, 15 bp, Homo sapiens
tgcaattgtgtttcc

SEQ ID NO: 1423458 - DNA, 15 bp, Homo sapiens
gcaattgtgtttcct

SEQ ID NO: 1423459 - DNA, 15 bp, Homo sapiens
caattgtgtttcctt

SEQ ID NO: 1423460 - DNA, 15 bp, Homo sapiens
aattgtgtttccttt

SEQ ID NO: 1423461 - DNA, 15 bp, Homo sapiens
attgtgtttccttta

SEQ ID NO: 1423462 - DNA, 15 bp, Homo sapiens
ttgtgtttcctttac

SEQ ID NO: 1423463 - DNA, 15 bp, Homo sapiens
tgtgtttcctttacc

SEQ ID NO: 1423464 - DNA, 15 bp, Homo sapiens
gtgtttcctttacct

SEQ ID NO: 1423465 - DNA, 15 bp, Homo sapiens
tgtttcctttacctt

SEQ ID NO: 1423466 - DNA, 15 bp, Homo sapiens
gtttcctttaccttg

SEQ ID NO: 1423467 - DNA, 15 bp, Homo sapiens
tttcctttaccttgt

SEQ ID NO: 1423468 - DNA, 15 bp, Homo sapiens
ttcctttaccttgta

SEQ ID NO: 1423469 - DNA, 15 bp, Homo sapiens
tcctttaccttgtaa

SEQ ID NO: 1423470 - DNA, 15 bp, Homo sapiens
cctttaccttgtaaa

SEQ ID NO: 1423471 - DNA, 15 bp, Homo sapiens
ctttaccttgtaaaa

SEQ ID NO: 1423472 - DNA, 15 bp, Homo sapiens
tttaccttgtaaaat

SEQ ID NO: 1423473 - DNA, 15 bp, Homo sapiens
ttaccttgtaaaatt

SEQ ID NO: 1423474 - DNA, 15 bp, Homo sapiens
taccttgtaaaattt

SEQ ID NO: 1423475 - DNA, 15 bp, Homo sapiens
accttgtaaaatttt

SEQ ID NO: 1423476 - DNA, 15 bp, Homo sapiens
ccttgtaaaattttg

SEQ ID NO: 1423477 - DNA, 15 bp, Homo sapiens
cttgtaaaattttgt

SEQ ID NO: 1423478 - DNA, 15 bp, Homo sapiens
ttgtaaaattttgta

SEQ ID NO: 1423479 - DNA, 15 bp, Homo sapiens
tgtaaaattttgtac

SEQ ID NO: 1423480 - DNA, 15 bp, Homo sapiens
gtaaaattttgtaca

SEQ ID NO: 1423481 - DNA, 15 bp, Homo sapiens
taaaattttgtacag

SEQ ID NO: 1423482 - DNA, 15 bp, Homo sapiens
aaaattttgtacagc

SEQ ID NO: 1423483 - DNA, 15 bp, Homo sapiens
aaattttgtacagca

SEQ ID NO: 1423484 - DNA, 15 bp, Homo sapiens
aattttgtacagcat

SEQ ID NO: 1423485 - DNA, 15 bp, Homo sapiens
attttgtacagcata

SEQ ID NO: 1423486 - DNA, 15 bp, Homo sapiens
ttttgtacagcataa

SEQ ID NO: 1423487 - DNA, 15 bp, Homo sapiens
tttgtacagcataaa

SEQ ID NO: 1423488 - DNA, 15 bp, Homo sapiens
ttgtacagcataaat

SEQ ID NO: 1423489 - DNA, 15 bp, Homo sapiens
tgtacagcataaata

SEQ ID NO: 1423490 - DNA, 15 bp, Homo sapiens
gtacagcataaataa

SEQ ID NO: 1423491 - DNA, 15 bp, Homo sapiens
tacagcataaataag

SEQ ID NO: 1423492 - DNA, 15 bp, Homo sapiens
acagcataaataagt

SEQ ID NO: 1423493 - DNA, 15 bp, Homo sapiens
cagcataaataagta

SEQ ID NO: 1423494 - DNA, 15 bp, Homo sapiens
agcataaataagtaa

SEQ ID NO: 1423495 - DNA, 15 bp, Homo sapiens
gcataaataagtaaa

SEQ ID NO: 1423496 - DNA, 15 bp, Homo sapiens
cataaataagtaaaa

SEQ ID NO: 1423497 - DNA, 15 bp, Homo sapiens
ataaataagtaaaaa

SEQ ID NO: 1423498 - DNA, 15 bp, Homo sapiens
taaataagtaaaaaa

SEQ ID NO: 1423499 - DNA, 15 bp, Homo sapiens
aaataagtaaaaaaa

SEQ ID NO: 1423500 - DNA, 15 bp, Homo sapiens
aataagtaaaaaaat

SEQ ID NO: 1423501 - DNA, 15 bp, Homo sapiens
ataagtaaaaaaatc

SEQ ID NO: 1423502 - DNA, 15 bp, Homo sapiens
taagtaaaaaaatca

SEQ ID NO: 1423503 - DNA, 15 bp, Homo sapiens
aagtaaaaaaatcac

SEQ ID NO: 1423504 - DNA, 15 bp, Homo sapiens
agtaaaaaaatcact

SEQ ID NO: 1423505 - DNA, 15 bp, Homo sapiens
gtaaaaaaatcactg

SEQ ID NO: 1423506 - DNA, 15 bp, Homo sapiens
taaaaaaatcactgt

SEQ ID NO: 1423507 - DNA, 15 bp, Homo sapiens
aaaaaaatcactgtt

SEQ ID NO: 1423508 - DNA, 15 bp, Homo sapiens
aaaaaatcactgttt

SEQ ID NO: 1423509 - DNA, 15 bp, Homo sapiens
aaaaatcactgtttt

SEQ ID NO: 1423510 - DNA, 15 bp, Homo sapiens
aaaatcactgttttt

SEQ ID NO: 1423511 - DNA, 15 bp, Homo sapiens
aaatcactgtttttc

SEQ ID NO: 1423512 - DNA, 15 bp, Homo sapiens
aatcactgtttttct

SEQ ID NO: 1423513 - DNA, 15 bp, Homo sapiens
atcactgtttttctc

SEQ ID NO: 1423514 - DNA, 15 bp, Homo sapiens
tcactgtttttctca

SEQ ID NO: 1423515 - DNA, 15 bp, Homo sapiens
cactgtttttctcaa

SEQ ID NO: 1423516 - DNA, 15 bp, Homo sapiens
actgtttttctcaac

SEQ ID NO: 1423517 - DNA, 15 bp, Homo sapiens
ctgtttttctcaact

SEQ ID NO: 1423518 - DNA, 15 bp, Homo sapiens
tgtttttctcaactt

SEQ ID NO: 1423519 - DNA, 15 bp, Homo sapiens
gtttttctcaacttt

SEQ ID NO: 1423520 - DNA, 15 bp, Homo sapiens
tttttctcaactttt

SEQ ID NO: 1423521 - DNA, 15 bp, Homo sapiens
ttttctcaacttttt

SEQ ID NO: 1423522 - DNA, 15 bp, Homo sapiens
tttctcaactttttc

SEQ ID NO: 1423523 - DNA, 15 bp, Homo sapiens
ttctcaactttttca

SEQ ID NO: 1423524 - DNA, 15 bp, Homo sapiens
tctcaactttttcaa

SEQ ID NO: 1423525 - DNA, 15 bp, Homo sapiens
tcaactttttcaaaa

SEQ ID NO: 1423526 - DNA, 15 bp, Homo sapiens
caactttttcaaaat

SEQ ID NO: 1423527 - DNA, 15 bp, Homo sapiens
aactttttcaaaatc

SEQ ID NO: 1423528 - DNA, 15 bp, Homo sapiens
ctttttcaaaatcaa

SEQ ID NO: 1423529 - DNA, 15 bp, Homo sapiens
tttttcaaaatcaag

SEQ ID NO: 1423530 - DNA, 15 bp, Homo sapiens
ttttcaaaatcaagg

SEQ ID NO: 1423531 - DNA, 15 bp, Homo sapiens
tttcaaaatcaagga

SEQ ID NO: 1423532 - DNA, 15 bp, Homo sapiens
ttcaaaatcaaggat

SEQ ID NO: 1423533 - DNA, 15 bp, Homo sapiens
tcaaaatcaaggatt

SEQ ID NO: 1423534 - DNA, 15 bp, Homo sapiens
caaaatcaaggattg

SEQ ID NO: 1423535 - DNA, 15 bp, Homo sapiens
aaaatcaaggattgt

SEQ ID NO: 1423536 - DNA, 15 bp, Homo sapiens
aaatcaaggattgta

SEQ ID NO: 1423537 - DNA, 15 bp, Homo sapiens
aatcaaggattgtaa

SEQ ID NO: 1423538 - DNA, 15 bp, Homo sapiens
atcaaggattgtaaa

SEQ ID NO: 1423539 - DNA, 15 bp, Homo sapiens
tcaaggattgtaaat

SEQ ID NO: 1423540 - DNA, 15 bp, Homo sapiens
caaggattgtaaata

SEQ ID NO: 1423541 - DNA, 15 bp, Homo sapiens
aaggattgtaaatat

SEQ ID NO: 1423542 - DNA, 15 bp, Homo sapiens
aggattgtaaatatt

SEQ ID NO: 1423543 - DNA, 15 bp, Homo sapiens
ggattgtaaatattg

SEQ ID NO: 1423544 - DNA, 15 bp, Homo sapiens
gattgtaaatattgt

SEQ ID NO: 1423545 - DNA, 15 bp, Homo sapiens
attgtaaatattgta

SEQ ID NO: 1423546 - DNA, 15 bp, Homo sapiens
ttgtaaatattgtag

SEQ ID NO: 1423547 - DNA, 15 bp, Homo sapiens
tgtaaatattgtaga

SEQ ID NO: 1423548 - DNA, 15 bp, Homo sapiens
gtaaatattgtagat

SEQ ID NO: 1423549 - DNA, 15 bp, Homo sapiens
taaatattgtagatt

SEQ ID NO: 1423550 - DNA, 15 bp, Homo sapiens
aaatattgtagattc

SEQ ID NO: 1423551 - DNA, 15 bp, Homo sapiens
aatattgtagattct

SEQ ID NO: 1423552 - DNA, 15 bp, Homo sapiens
atattgtagattctt

SEQ ID NO: 1423553 - DNA, 15 bp, Homo sapiens
tattgtagattcttt

SEQ ID NO: 1423554 - DNA, 15 bp, Homo sapiens
attgtagattctttt

SEQ ID NO: 1423555 - DNA, 15 bp, Homo sapiens
ttgtagattcttttt

SEQ ID NO: 1423556 - DNA, 15 bp, Homo sapiens
tgtagattctttttc

SEQ ID NO: 1423557 - DNA, 15 bp, Homo sapiens
gtagattctttttct

SEQ ID NO: 1423558 - DNA, 15 bp, Homo sapiens
tagattctttttctg

SEQ ID NO: 1423559 - DNA, 15 bp, Homo sapiens
agattctttttctgt

SEQ ID NO: 1423560 - DNA, 15 bp, Homo sapiens
gattctttttctgtg

SEQ ID NO: 1423561 - DNA, 15 bp, Homo sapiens
attctttttctgtgt

SEQ ID NO: 1423562 - DNA, 15 bp, Homo sapiens
ttctttttctgtgtg

SEQ ID NO: 1423563 - DNA, 15 bp, Homo sapiens
tctttttctgtgtga

SEQ ID NO: 1423564 - DNA, 15 bp, Homo sapiens
ctttttctgtgtgat

SEQ ID NO: 1423565 - DNA, 15 bp, Homo sapiens
tttttctgtgtgatg

SEQ ID NO: 1423566 - DNA, 15 bp, Homo sapiens
ttttctgtgtgatgt

SEQ ID NO: 1423567 - DNA, 15 bp, Homo sapiens
tttctgtgtgatgtg

SEQ ID NO: 1423568 - DNA, 15 bp, Homo sapiens
ttctgtgtgatgtgt

SEQ ID NO: 1423569 - DNA, 15 bp, Homo sapiens
tctgtgtgatgtgtc

SEQ ID NO: 1423570 - DNA, 15 bp, Homo sapiens
ctgtgtgatgtgtcc

SEQ ID NO: 1423571 - DNA, 15 bp, Homo sapiens
tgtgtgatgtgtcct

SEQ ID NO: 1423572 - DNA, 15 bp, Homo sapiens
gtgtgatgtgtccta

SEQ ID NO: 1423573 - DNA, 15 bp, Homo sapiens
tgtgatgtgtcctac

SEQ ID NO: 1423574 - DNA, 15 bp, Homo sapiens
gtgatgtgtcctact

SEQ ID NO: 1423575 - DNA, 15 bp, Homo sapiens
tgatgtgtcctactg

SEQ ID NO: 1423576 - DNA, 15 bp, Homo sapiens
gatgtgtcctactgt

SEQ ID NO: 1423577 - DNA, 15 bp, Homo sapiens
atgtgtcctactgtt

SEQ ID NO: 1423578 - DNA, 15 bp, Homo sapiens
tgtgtcctactgttt

SEQ ID NO: 1423579 - DNA, 15 bp, Homo sapiens
gtgtcctactgtttc

SEQ ID NO: 1423580 - DNA, 15 bp, Homo sapiens
tgtcctactgtttca

SEQ ID NO: 1423581 - DNA, 15 bp, Homo sapiens
gtcctactgtttcat

SEQ ID NO: 1423582 - DNA, 15 bp, Homo sapiens
tcctactgtttcata

SEQ ID NO: 1423583 - DNA, 15 bp, Homo sapiens
cctactgtttcataa

SEQ ID NO: 1423584 - DNA, 15 bp, Homo sapiens
ctactgtttcataat

SEQ ID NO: 1423585 - DNA, 15 bp, Homo sapiens
tactgtttcataatg

SEQ ID NO: 1423586 - DNA, 15 bp, Homo sapiens
actgtttcataatgc

SEQ ID NO: 1423587 - DNA, 15 bp, Homo sapiens
ctgtttcataatgct

SEQ ID NO: 1423588 - DNA, 15 bp, Homo sapiens
tgtttcataatgctg

SEQ ID NO: 1423589 - DNA, 15 bp, Homo sapiens
gtttcataatgctgt

SEQ ID NO: 1423590 - DNA, 15 bp, Homo sapiens
tttcataatgctgta

SEQ ID NO: 1423591 - DNA, 15 bp, Homo sapiens
ttcataatgctgtaa

SEQ ID NO: 1423592 - DNA, 15 bp, Homo sapiens
tcataatgctgtaac

SEQ ID NO: 1423593 - DNA, 15 bp, Homo sapiens
cataatgctgtaact

SEQ ID NO: 1423594 - DNA, 15 bp, Homo sapiens
ataatgctgtaactt

SEQ ID NO: 1423595 - DNA, 15 bp, Homo sapiens
taatgctgtaacttg

SEQ ID NO: 1423596 - DNA, 15 bp, Homo sapiens
aatgctgtaacttgt

SEQ ID NO: 1423597 - DNA, 15 bp, Homo sapiens
atgctgtaacttgta

SEQ ID NO: 1423598 - DNA, 15 bp, Homo sapiens
tgctgtaacttgtag

SEQ ID NO: 1423599 - DNA, 15 bp, Homo sapiens
gctgtaacttgtaga

SEQ ID NO: 1423600 - DNA, 15 bp, Homo sapiens
ctgtaacttgtagaa

SEQ ID NO: 1423601 - DNA, 15 bp, Homo sapiens
tgtaacttgtagaaa

SEQ ID NO: 1423602 - DNA, 15 bp, Homo sapiens
gtaacttgtagaaat

SEQ ID NO: 1423603 - DNA, 15 bp, Homo sapiens
taacttgtagaaata

SEQ ID NO: 1423604 - DNA, 15 bp, Homo sapiens
aacttgtagaaatat

SEQ ID NO: 1423605 - DNA, 15 bp, Homo sapiens
acttgtagaaatatt

SEQ ID NO: 1423606 - DNA, 15 bp, Homo sapiens
cttgtagaaatattg

SEQ ID NO: 1423607 - DNA, 15 bp, Homo sapiens
ttgtagaaatattgt

SEQ ID NO: 1423608 - DNA, 15 bp, Homo sapiens
tgtagaaatattgta

SEQ ID NO: 1423609 - DNA, 15 bp, Homo sapiens
gtagaaatattgtat

SEQ ID NO: 1423610 - DNA, 15 bp, Homo sapiens
tagaaatattgtata

SEQ ID NO: 1423611 - DNA, 15 bp, Homo sapiens
agaaatattgtatat

SEQ ID NO: 1423612 - DNA, 15 bp, Homo sapiens
gaaatattgtatatt

SEQ ID NO: 1423613 - DNA, 15 bp, Homo sapiens
aaatattgtatattt

SEQ ID NO: 1423614 - DNA, 15 bp, Homo sapiens
aatattgtatattta

SEQ ID NO: 1423615 - DNA, 15 bp, Homo sapiens
atattgtatatttat

SEQ ID NO: 1423616 - DNA, 15 bp, Homo sapiens
tattgtatatttatt

SEQ ID NO: 1423617 - DNA, 15 bp, Homo sapiens
attgtatatttattt

SEQ ID NO: 1423618 - DNA, 15 bp, Homo sapiens
ttgtatatttatttt

SEQ ID NO: 1423619 - DNA, 15 bp, Homo sapiens
tgtatatttattttc

SEQ ID NO: 1423620 - DNA, 15 bp, Homo sapiens
gtatatttattttct

SEQ ID NO: 1423621 - DNA, 15 bp, Homo sapiens
tatatttattttctg

SEQ ID NO: 1423622 - DNA, 15 bp, Homo sapiens
atatttattttctgc

SEQ ID NO: 1423623 - DNA, 15 bp, Homo sapiens
tatttattttctgct

SEQ ID NO: 1423624 - DNA, 15 bp, Homo sapiens
atttattttctgctt

SEQ ID NO: 1423625 - DNA, 15 bp, Homo sapiens
tttattttctgctta

SEQ ID NO: 1423626 - DNA, 15 bp, Homo sapiens
ttattttctgcttat

SEQ ID NO: 1423627 - DNA, 15 bp, Homo sapiens
tattttctgcttatt

SEQ ID NO: 1423628 - DNA, 15 bp, Homo sapiens
attttctgcttattt

SEQ ID NO: 1423629 - DNA, 15 bp, Homo sapiens
ttttctgcttattta

SEQ ID NO: 1423630 - DNA, 15 bp, Homo sapiens
tttctgcttatttaa

SEQ ID NO: 1423631 - DNA, 15 bp, Homo sapiens
ttctgcttatttaat

SEQ ID NO: 1423632 - DNA, 15 bp, Homo sapiens
tctgcttatttaatg

SEQ ID NO: 1423633 - DNA, 15 bp, Homo sapiens
ctgcttatttaatgt

SEQ ID NO: 1423634 - DNA, 15 bp, Homo sapiens
tgcttatttaatgtc

SEQ ID NO: 1423635 - DNA, 15 bp, Homo sapiens
gcttatttaatgtct

SEQ ID NO: 1423636 - DNA, 15 bp, Homo sapiens
cttatttaatgtctt

SEQ ID NO: 1423637 - DNA, 15 bp, Homo sapiens
ttatttaatgtctta

SEQ ID NO: 1423638 - DNA, 15 bp, Homo sapiens
tatttaatgtcttaa

SEQ ID NO: 1423639 - DNA, 15 bp, Homo sapiens
atttaatgtcttaat

SEQ ID NO: 1423640 - DNA, 15 bp, Homo sapiens
tttaatgtcttaatt

SEQ ID NO: 1423641 - DNA, 15 bp, Homo sapiens
ttaatgtcttaattt

SEQ ID NO: 1423642 - DNA, 15 bp, Homo sapiens
taatgtcttaatttc

SEQ ID NO: 1423643 - DNA, 15 bp, Homo sapiens
aatgtcttaatttct

SEQ ID NO: 1423644 - DNA, 15 bp, Homo sapiens
atgtcttaatttctg

SEQ ID NO: 1423645 - DNA, 15 bp, Homo sapiens
tgtcttaatttctga

SEQ ID NO: 1423646 - DNA, 15 bp, Homo sapiens
gtcttaatttctgaa

SEQ ID NO: 1423647 - DNA, 15 bp, Homo sapiens
tcttaatttctgaaa

SEQ ID NO: 1423648 - DNA, 15 bp, Homo sapiens
cttaatttctgaaaa

SEQ ID NO: 1423649 - DNA, 15 bp, Homo sapiens
ttaatttctgaaaag

SEQ ID NO: 1423650 - DNA, 15 bp, Homo sapiens
taatttctgaaaagt

SEQ ID NO: 1423651 - DNA, 15 bp, Homo sapiens
aatttctgaaaagta

SEQ ID NO: 1423652 - DNA, 15 bp, Homo sapiens
atttctgaaaagtat

SEQ ID NO: 1423653 - DNA, 15 bp, Homo sapiens
tttctgaaaagtatt

SEQ ID NO: 1423654 - DNA, 15 bp, Homo sapiens
ttctgaaaagtatta

SEQ ID NO: 1423655 - DNA, 15 bp, Homo sapiens
tctgaaaagtattaa

SEQ ID NO: 1423656 - DNA, 15 bp, Homo sapiens
ctgaaaagtattaac

SEQ ID NO: 1423657 - DNA, 15 bp, Homo sapiens
tgaaaagtattaaca

SEQ ID NO: 1423658 - DNA, 15 bp, Homo sapiens
gaaaagtattaacat

SEQ ID NO: 1423659 - DNA, 15 bp, Homo sapiens
aaaagtattaacatc

SEQ ID NO: 1423660 - DNA, 15 bp, Homo sapiens
aaagtattaacatcc

SEQ ID NO: 1423661 - DNA, 15 bp, Homo sapiens
aagtattaacatccc

SEQ ID NO: 1423662 - DNA, 15 bp, Homo sapiens
agtattaacatccct

SEQ ID NO: 1423663 - DNA, 15 bp, Homo sapiens
gtattaacatccctg

SEQ ID NO: 1423664 - DNA, 15 bp, Homo sapiens
tattaacatccctgt

SEQ ID NO: 1423665 - DNA, 15 bp, Homo sapiens
attaacatccctgtc

SEQ ID NO: 1423666 - DNA, 15 bp, Homo sapiens
ttaacatccctgtct

SEQ ID NO: 1423667 - DNA, 15 bp, Homo sapiens
taacatccctgtctc

SEQ ID NO: 1423668 - DNA, 15 bp, Homo sapiens
aacatccctgtctcc

SEQ ID NO: 1423669 - DNA, 15 bp, Homo sapiens
acatccctgtctccc

SEQ ID NO: 1423670 - DNA, 15 bp, Homo sapiens
catccctgtctccca

SEQ ID NO: 1423671 - DNA, 15 bp, Homo sapiens
atccctgtctcccac

SEQ ID NO: 1423672 - DNA, 15 bp, Homo sapiens
tccctgtctcccact

SEQ ID NO: 1423673 - DNA, 15 bp, Homo sapiens
ccctgtctcccactc

SEQ ID NO: 1423674 - DNA, 15 bp, Homo sapiens
cctgtctcccactcc

SEQ ID NO: 1423675 - DNA, 15 bp, Homo sapiens
ctgtctcccactccc

SEQ ID NO: 1423676 - DNA, 15 bp, Homo sapiens
tgtctcccactcccc

SEQ ID NO: 1423677 - DNA, 15 bp, Homo sapiens
gtctcccactcccct

SEQ ID NO: 1423678 - DNA, 15 bp, Homo sapiens
tctcccactcccctg

SEQ ID NO: 1423679 - DNA, 15 bp, Homo sapiens
ctcccactcccctgc

SEQ ID NO: 1423680 - DNA, 15 bp, Homo sapiens
tcccactcccctgcc

SEQ ID NO: 1423681 - DNA, 15 bp, Homo sapiens
cccactcccctgccg

SEQ ID NO: 1423682 - DNA, 15 bp, Homo sapiens
ccactcccctgccgt

SEQ ID NO: 1423683 - DNA, 15 bp, Homo sapiens
cactcccctgccgtc

SEQ ID NO: 1423684 - DNA, 15 bp, Homo sapiens
actcccctgccgtcc

SEQ ID NO: 1423685 - DNA, 15 bp, Homo sapiens
ctcccctgccgtccc

SEQ ID NO: 1423686 - DNA, 15 bp, Homo sapiens
tcccctgccgtccca

SEQ ID NO: 1423687 - DNA, 15 bp, Homo sapiens
cccctgccgtcccat

SEQ ID NO: 1423688 - DNA, 15 bp, Homo sapiens
ccctgccgtcccatg

SEQ ID NO: 1423689 - DNA, 15 bp, Homo sapiens
tttagtcaacttgtt

SEQ ID NO: 1423690 - DNA, 15 bp, Homo sapiens
ttagtcaacttgttg

SEQ ID NO: 1423691 - DNA, 15 bp, Homo sapiens
tagtcaacttgttga

SEQ ID NO: 1423692 - DNA, 15 bp, Homo sapiens
agtcaacttgttgaa

SEQ ID NO: 1423693 - DNA, 15 bp, Homo sapiens
gtcaacttgttgaag

SEQ ID NO: 1423694 - DNA, 15 bp, Homo sapiens
tcaacttgttgaaga

SEQ ID NO: 1423695 - DNA, 15 bp, Homo sapiens
caacttgttgaagag

SEQ ID NO: 1423696 - DNA, 15 bp, Homo sapiens
aacttgttgaagagc

SEQ ID NO: 1423697 - DNA, 15 bp, Homo sapiens
acttgttgaagagct

SEQ ID NO: 1423698 - DNA, 15 bp, Homo sapiens
cttgttgaagagcta

SEQ ID NO: 1423699 - DNA, 15 bp, Homo sapiens
ttgttgaagagctat

SEQ ID NO: 1423700 - DNA, 15 bp, Homo sapiens
tgttgaagagctatt

SEQ ID NO: 1423701 - DNA, 15 bp, Homo sapiens
gttgaagagctattg

SEQ ID NO: 1423702 - DNA, 15 bp, Homo sapiens
ttgaagagctattga

SEQ ID NO: 1423703 - DNA, 15 bp, Homo sapiens
tgaagagctattgaa

SEQ ID NO: 1423704 - DNA, 15 bp, Homo sapiens
gaagagctattgaaa

SEQ ID NO: 1423705 - DNA, 15 bp, Homo sapiens
aagagctattgaaaa

SEQ ID NO: 1423706 - DNA, 15 bp, Homo sapiens
agagctattgaaaat

SEQ ID NO: 1423707 - DNA, 15 bp, Homo sapiens
gagctattgaaaatc

SEQ ID NO: 1423708 - DNA, 15 bp, Homo sapiens
agctattgaaaatca

SEQ ID NO: 1423709 - DNA, 15 bp, Homo sapiens
gctattgaaaatcat

SEQ ID NO: 1423710 - DNA, 15 bp, Homo sapiens
ctattgaaaatcatt

SEQ ID NO: 1423711 - DNA, 15 bp, Homo sapiens
tattgaaaatcattt

SEQ ID NO: 1423712 - DNA, 15 bp, Homo sapiens
attgaaaatcatttg

SEQ ID NO: 1423713 - DNA, 15 bp, Homo sapiens
ttgaaaatcatttgt

SEQ ID NO: 1423714 - DNA, 15 bp, Homo sapiens
tgaaaatcatttgtg

SEQ ID NO: 1423715 - DNA, 15 bp, Homo sapiens
gaaaatcatttgtgc

SEQ ID NO: 1423716 - DNA, 15 bp, Homo sapiens
aaaatcatttgtgct

SEQ ID NO: 1423717 - DNA, 15 bp, Homo sapiens
aaatcatttgtgctt

SEQ ID NO: 1423718 - DNA, 15 bp, Homo sapiens
aatcatttgtgcttt

SEQ ID NO: 1423719 - DNA, 15 bp, Homo sapiens
atcatttgtgctttt

SEQ ID NO: 1423720 - DNA, 15 bp, Homo sapiens
tcatttgtgcttttc

SEQ ID NO: 1423721 - DNA, 15 bp, Homo sapiens
catttgtgcttttca

SEQ ID NO: 1423722 - DNA, 15 bp, Homo sapiens
atttgtgcttttcag

SEQ ID NO: 1423723 - DNA, 15 bp, Homo sapiens
tttgtgcttttcagc

SEQ ID NO: 1423724 - DNA, 15 bp, Homo sapiens
ttgtgcttttcagct

SEQ ID NO: 1423725 - DNA, 15 bp, Homo sapiens
tgtgcttttcagctt

SEQ ID NO: 1423726 - DNA, 15 bp, Homo sapiens
gtgcttttcagcttg

SEQ ID NO: 1423727 - DNA, 15 bp, Homo sapiens
tgcttttcagcttga

SEQ ID NO: 1423728 - DNA, 15 bp, Homo sapiens
gcttttcagcttgac

SEQ ID NO: 1423729 - DNA, 15 bp, Homo sapiens
cttttcagcttgaca

SEQ ID NO: 1423730 - DNA, 15 bp, Homo sapiens
ttttcagcttgacac

SEQ ID NO: 1423731 - DNA, 15 bp, Homo sapiens
tttcagcttgacaca

SEQ ID NO: 1423732 - DNA, 15 bp, Homo sapiens
ttcagcttgacacag

SEQ ID NO: 1423733 - DNA, 15 bp, Homo sapiens
tcagcttgacacagg

SEQ ID NO: 1423734 - DNA, 15 bp, Homo sapiens
cagcttgacacaggt

SEQ ID NO: 1423735 - DNA, 15 bp, Homo sapiens
agcttgacacaggtt

SEQ ID NO: 1423736 - DNA, 15 bp, Homo sapiens
gcttgacacaggttt

SEQ ID NO: 1423737 - DNA, 15 bp, Homo sapiens
cttgacacaggtttg

SEQ ID NO: 1423738 - DNA, 15 bp, Homo sapiens
ttgacacaggtttgg

SEQ ID NO: 1423739 - DNA, 15 bp, Homo sapiens
tgacacaggtttgga

SEQ ID NO: 1423740 - DNA, 15 bp, Homo sapiens
gacacaggtttggag

SEQ ID NO: 1423741 - DNA, 15 bp, Homo sapiens
acacaggtttggagt

SEQ ID NO: 1423742 - DNA, 15 bp, Homo sapiens
cacaggtttggagtg

SEQ ID NO: 1423743 - DNA, 15 bp, Homo sapiens
acaggtttggagtgt

SEQ ID NO: 1423744 - DNA, 15 bp, Homo sapiens
caggtttggagtgta

SEQ ID NO: 1423745 - DNA, 15 bp, Homo sapiens
aggtttggagtgtaa

SEQ ID NO: 1423746 - DNA, 15 bp, Homo sapiens
ggtttggagtgtaag

SEQ ID NO: 1423747 - DNA, 15 bp, Homo sapiens
gtttggagtgtaagt

SEQ ID NO: 1423748 - DNA, 15 bp, Homo sapiens
tttggagtgtaagtg

SEQ ID NO: 1423749 - DNA, 15 bp, Homo sapiens
ttggagtgtaagtgt

SEQ ID NO: 1423750 - DNA, 15 bp, Homo sapiens
tggagtgtaagtgtt

SEQ ID NO: 1423751 - DNA, 15 bp, Homo sapiens
ggagtgtaagtgttg

SEQ ID NO: 1423752 - DNA, 15 bp, Homo sapiens
gagtgtaagtgttga

SEQ ID NO: 1423753 - DNA, 15 bp, Homo sapiens
agtgtaagtgttgaa

SEQ ID NO: 1423754 - DNA, 15 bp, Homo sapiens
gtgtaagtgttgaat

SEQ ID NO: 1423755 - DNA, 15 bp, Homo sapiens
tgtaagtgttgaata

SEQ ID NO: 1423756 - DNA, 15 bp, Homo sapiens
gtaagtgttgaatat

SEQ ID NO: 1423757 - DNA, 15 bp, Homo sapiens
taagtgttgaatatc

SEQ ID NO: 1423758 - DNA, 15 bp, Homo sapiens
aagtgttgaatatcc

SEQ ID NO: 1423759 - DNA, 15 bp, Homo sapiens
agtgttgaatatccc

SEQ ID NO: 1423760 - DNA, 15 bp, Homo sapiens
gtgttgaatatccca

SEQ ID NO: 1423761 - DNA, 15 bp, Homo sapiens
tgttgaatatcccaa

SEQ ID NO: 1423762 - DNA, 15 bp, Homo sapiens
gttgaatatcccaag

SEQ ID NO: 1423763 - DNA, 15 bp, Homo sapiens
ttgaatatcccaaga

SEQ ID NO: 1423764 - DNA, 15 bp, Homo sapiens
tgaatatcccaagaa

SEQ ID NO: 1423765 - DNA, 15 bp, Homo sapiens
gaatatcccaagaat

SEQ ID NO: 1423766 - DNA, 15 bp, Homo sapiens
aatatcccaagaatg

SEQ ID NO: 1423767 - DNA, 15 bp, Homo sapiens
atatcccaagaatga

SEQ ID NO: 1423768 - DNA, 15 bp, Homo sapiens
tatcccaagaatgac

SEQ ID NO: 1423769 - DNA, 15 bp, Homo sapiens
atcccaagaatgaca

SEQ ID NO: 1423770 - DNA, 15 bp, Homo sapiens
tcccaagaatgacac

SEQ ID NO: 1423771 - DNA, 15 bp, Homo sapiens
cccaagaatgacact

SEQ ID NO: 1423772 - DNA, 15 bp, Homo sapiens
ccaagaatgacactc

SEQ ID NO: 1423773 - DNA, 15 bp, Homo sapiens
caagaatgacactca

SEQ ID NO: 1423774 - DNA, 15 bp, Homo sapiens
aagaatgacactcaa

SEQ ID NO: 1423775 - DNA, 15 bp, Homo sapiens
agaatgacactcaag

SEQ ID NO: 1423776 - DNA, 15 bp, Homo sapiens
gaatgacactcaagt

SEQ ID NO: 1423777 - DNA, 15 bp, Homo sapiens
aatgacactcaagtg

SEQ ID NO: 1423778 - DNA, 15 bp, Homo sapiens
atgacactcaagtgc

SEQ ID NO: 1423779 - DNA, 15 bp, Homo sapiens
tgacactcaagtgct

SEQ ID NO: 1423780 - DNA, 15 bp, Homo sapiens
gacactcaagtgctg

SEQ ID NO: 1423781 - DNA, 15 bp, Homo sapiens
acactcaagtgctgt

SEQ ID NO: 1423782 - DNA, 15 bp, Homo sapiens
cactcaagtgctgtc

SEQ ID NO: 1423783 - DNA, 15 bp, Homo sapiens
actcaagtgctgtcc

SEQ ID NO: 1423784 - DNA, 15 bp, Homo sapiens
ctcaagtgctgtcca

SEQ ID NO: 1423785 - DNA, 15 bp, Homo sapiens
tcaagtgctgtccat

SEQ ID NO: 1423786 - DNA, 15 bp, Homo sapiens
caagtgctgtccatg

SEQ ID NO: 1423787 - DNA, 15 bp, Homo sapiens
aagtgctgtccatga

SEQ ID NO: 1423788 - DNA, 15 bp, Homo sapiens
agtgctgtccatgaa

SEQ ID NO: 1423789 - DNA, 15 bp, Homo sapiens
gtgctgtccatgaaa

SEQ ID NO: 1423790 - DNA, 15 bp, Homo sapiens
tgctgtccatgaaaa

SEQ ID NO: 1423791 - DNA, 15 bp, Homo sapiens
gctgtccatgaaaac

SEQ ID NO: 1423792 - DNA, 15 bp, Homo sapiens
ctgtccatgaaaact

SEQ ID NO: 1423793 - DNA, 15 bp, Homo sapiens
tgtccatgaaaactc

SEQ ID NO: 1423794 - DNA, 15 bp, Homo sapiens
gtccatgaaaactca

SEQ ID NO: 1423795 - DNA, 15 bp, Homo sapiens
tccatgaaaactcag

SEQ ID NO: 1423796 - DNA, 15 bp, Homo sapiens
ccatgaaaactcagg

SEQ ID NO: 1423797 - DNA, 15 bp, Homo sapiens
catgaaaactcagga

SEQ ID NO: 1423798 - DNA, 15 bp, Homo sapiens
atgaaaactcaggaa

SEQ ID NO: 1423799 - DNA, 15 bp, Homo sapiens
tgaaaactcaggaag

SEQ ID NO: 1423800 - DNA, 15 bp, Homo sapiens
gaaaactcaggaagt

SEQ ID NO: 1423801 - DNA, 15 bp, Homo sapiens
aaaactcaggaagtt

SEQ ID NO: 1423802 - DNA, 15 bp, Homo sapiens
aaactcaggaagttt

SEQ ID NO: 1423803 - DNA, 15 bp, Homo sapiens
aactcaggaagtttg

SEQ ID NO: 1423804 - DNA, 15 bp, Homo sapiens
actcaggaagtttgc

SEQ ID NO: 1423805 - DNA, 15 bp, Homo sapiens
ctcaggaagtttgca

SEQ ID NO: 1423806 - DNA, 15 bp, Homo sapiens
tcaggaagtttgcac

SEQ ID NO: 1423807 - DNA, 15 bp, Homo sapiens
caggaagtttgcaca

SEQ ID NO: 1423808 - DNA, 15 bp, Homo sapiens
aggaagtttgcacaa

SEQ ID NO: 1423809 - DNA, 15 bp, Homo sapiens
ggaagtttgcacaat

SEQ ID NO: 1423810 - DNA, 15 bp, Homo sapiens
gaagtttgcacaatt

SEQ ID NO: 1423811 - DNA, 15 bp, Homo sapiens
aagtttgcacaatta

SEQ ID NO: 1423812 - DNA, 15 bp, Homo sapiens
agtttgcacaattac

SEQ ID NO: 1423813 - DNA, 15 bp, Homo sapiens
gtttgcacaattact

SEQ ID NO: 1423814 - DNA, 15 bp, Homo sapiens
tttgcacaattactt

SEQ ID NO: 1423815 - DNA, 15 bp, Homo sapiens
ttgcacaattacttt

SEQ ID NO: 1423816 - DNA, 15 bp, Homo sapiens
tgcacaattactttc

SEQ ID NO: 1423817 - DNA, 15 bp, Homo sapiens
gcacaattactttct

SEQ ID NO: 1423818 - DNA, 15 bp, Homo sapiens
cacaattactttcta

SEQ ID NO: 1423819 - DNA, 15 bp, Homo sapiens
acaattactttctat

SEQ ID NO: 1423820 - DNA, 15 bp, Homo sapiens
caattactttctatg

SEQ ID NO: 1423821 - DNA, 15 bp, Homo sapiens
aattactttctatga

SEQ ID NO: 1423822 - DNA, 15 bp, Homo sapiens
attactttctatgac

SEQ ID NO: 1423823 - DNA, 15 bp, Homo sapiens
ttactttctatgacg

SEQ ID NO: 1423824 - DNA, 15 bp, Homo sapiens
tactttctatgacgt

SEQ ID NO: 1423825 - DNA, 15 bp, Homo sapiens
actttctatgacgtg

SEQ ID NO: 1423826 - DNA, 15 bp, Homo sapiens
ctttctatgacgtgg

SEQ ID NO: 1423827 - DNA, 15 bp, Homo sapiens
tttctatgacgtggt

SEQ ID NO: 1423828 - DNA, 15 bp, Homo sapiens
ttctatgacgtggtg

SEQ ID NO: 1423829 - DNA, 15 bp, Homo sapiens
tctatgacgtggtga

SEQ ID NO: 1423830 - DNA, 15 bp, Homo sapiens
ctatgacgtggtgat

SEQ ID NO: 1423831 - DNA, 15 bp, Homo sapiens
tatgacgtggtgata

SEQ ID NO: 1423832 - DNA, 15 bp, Homo sapiens
atgacgtggtgataa

SEQ ID NO: 1423833 - DNA, 15 bp, Homo sapiens
tgacgtggtgataag

SEQ ID NO: 1423834 - DNA, 15 bp, Homo sapiens
gacgtggtgataaga

SEQ ID NO: 1423835 - DNA, 15 bp, Homo sapiens
acgtggtgataagac

SEQ ID NO: 1423836 - DNA, 15 bp, Homo sapiens
cgtggtgataagacc

SEQ ID NO: 1423837 - DNA, 15 bp, Homo sapiens
gtggtgataagacct

SEQ ID NO: 1423838 - DNA, 15 bp, Homo sapiens
tggtgataagacctt

SEQ ID NO: 1423839 - DNA, 15 bp, Homo sapiens
ggtgataagaccttt

SEQ ID NO: 1423840 - DNA, 15 bp, Homo sapiens
gtgataagacctttt

SEQ ID NO: 1423841 - DNA, 15 bp, Homo sapiens
tgataagacctttta

SEQ ID NO: 1423842 - DNA, 15 bp, Homo sapiens
gataagaccttttag

SEQ ID NO: 1423843 - DNA, 15 bp, Homo sapiens
ataagaccttttagt

SEQ ID NO: 1423844 - DNA, 15 bp, Homo sapiens
taagaccttttagtc

SEQ ID NO: 1423845 - DNA, 15 bp, Homo sapiens
aagaccttttagtct

SEQ ID NO: 1423846 - DNA, 15 bp, Homo sapiens
agaccttttagtcta

SEQ ID NO: 1423847 - DNA, 15 bp, Homo sapiens
gaccttttagtctag

SEQ ID NO: 1423848 - DNA, 15 bp, Homo sapiens
accttttagtctagg

SEQ ID NO: 1423849 - DNA, 15 bp, Homo sapiens
ccttttagtctaggt

SEQ ID NO: 1423850 - DNA, 15 bp, Homo sapiens
cttttagtctaggtt

SEQ ID NO: 1423851 - DNA, 15 bp, Homo sapiens
ttttagtctaggtta

SEQ ID NO: 1423852 - DNA, 15 bp, Homo sapiens
tttagtctaggttaa

SEQ ID NO: 1423853 - DNA, 15 bp, Homo sapiens
ttagtctaggttaat

SEQ ID NO: 1423854 - DNA, 15 bp, Homo sapiens
tagtctaggttaatt

SEQ ID NO: 1423855 - DNA, 15 bp, Homo sapiens
agtctaggttaattt

SEQ ID NO: 1423856 - DNA, 15 bp, Homo sapiens
gtctaggttaatttt

SEQ ID NO: 1423857 - DNA, 15 bp, Homo sapiens
tctaggttaatttta

SEQ ID NO: 1423858 - DNA, 15 bp, Homo sapiens
ctaggttaattttag

SEQ ID NO: 1423859 - DNA, 15 bp, Homo sapiens
taggttaattttagt

SEQ ID NO: 1423860 - DNA, 15 bp, Homo sapiens
aggttaattttagtt

SEQ ID NO: 1423861 - DNA, 15 bp, Homo sapiens
ggttaattttagttc

SEQ ID NO: 1423862 - DNA, 15 bp, Homo sapiens
gttaattttagttct

SEQ ID NO: 1423863 - DNA, 15 bp, Homo sapiens
ttaattttagttctg

SEQ ID NO: 1423864 - DNA, 15 bp, Homo sapiens
taattttagttctgt

SEQ ID NO: 1423865 - DNA, 15 bp, Homo sapiens
aattttagttctgta

SEQ ID NO: 1423866 - DNA, 15 bp, Homo sapiens
attttagttctgtat

SEQ ID NO: 1423867 - DNA, 15 bp, Homo sapiens
ttttagttctgtatc

SEQ ID NO: 1423868 - DNA, 15 bp, Homo sapiens
tttagttctgtatct

SEQ ID NO: 1423869 - DNA, 15 bp, Homo sapiens
ttagttctgtatctg

SEQ ID NO: 1423870 - DNA, 15 bp, Homo sapiens
tagttctgtatctgt

SEQ ID NO: 1423871 - DNA, 15 bp, Homo sapiens
agttctgtatctgta

SEQ ID NO: 1423872 - DNA, 15 bp, Homo sapiens
gttctgtatctgtaa

SEQ ID NO: 1423873 - DNA, 15 bp, Homo sapiens
ttctgtatctgtaat

SEQ ID NO: 1423874 - DNA, 15 bp, Homo sapiens
tctgtatctgtaatc

SEQ ID NO: 1423875 - DNA, 15 bp, Homo sapiens
ctgtatctgtaatct

SEQ ID NO: 1423876 - DNA, 15 bp, Homo sapiens
tgtatctgtaatcta

SEQ ID NO: 1423877 - DNA, 15 bp, Homo sapiens
gtatctgtaatctat

SEQ ID NO: 1423878 - DNA, 15 bp, Homo sapiens
tatctgtaatctatt

SEQ ID NO: 1423879 - DNA, 15 bp, Homo sapiens
atctgtaatctattt

SEQ ID NO: 1423880 - DNA, 15 bp, Homo sapiens
tctgtaatctatttt

SEQ ID NO: 1423881 - DNA, 15 bp, Homo sapiens
ctgtaatctattttt

SEQ ID NO: 1423882 - DNA, 15 bp, Homo sapiens
tgtaatctattttta

SEQ ID NO: 1423883 - DNA, 15 bp, Homo sapiens
gtaatctatttttaa

SEQ ID NO: 1423884 - DNA, 15 bp, Homo sapiens
taatctatttttaaa

SEQ ID NO: 1423885 - DNA, 15 bp, Homo sapiens
aatctatttttaaaa

SEQ ID NO: 1423886 - DNA, 15 bp, Homo sapiens
atctatttttaaaaa

SEQ ID NO: 1423887 - DNA, 15 bp, Homo sapiens
tctatttttaaaaaa

SEQ ID NO: 1423888 - DNA, 15 bp, Homo sapiens
ctatttttaaaaaat

SEQ ID NO: 1423889 - DNA, 15 bp, Homo sapiens
tatttttaaaaaatt

SEQ ID NO: 1423890 - DNA, 15 bp, Homo sapiens
atttttaaaaaatta

SEQ ID NO: 1423891 - DNA, 15 bp, Homo sapiens
tttttaaaaaattac

SEQ ID NO: 1423892 - DNA, 15 bp, Homo sapiens
ttttaaaaaattact

SEQ ID NO: 1423893 - DNA, 15 bp, Homo sapiens
tttaaaaaattactc

SEQ ID NO: 1423894 - DNA, 15 bp, Homo sapiens
ttaaaaaattactcc

SEQ ID NO: 1423895 - DNA, 15 bp, Homo sapiens
taaaaaattactccc

SEQ ID NO: 1423896 - DNA, 15 bp, Homo sapiens
aaaaaattactccca

SEQ ID NO: 1423897 - DNA, 15 bp, Homo sapiens
aaaaattactcccac

SEQ ID NO: 1423898 - DNA, 15 bp, Homo sapiens
aaaattactcccact

SEQ ID NO: 1423899 - DNA, 15 bp, Homo sapiens
aaattactcccactg

SEQ ID NO: 1423900 - DNA, 15 bp, Homo sapiens
aattactcccactgg

SEQ ID NO: 1423901 - DNA, 15 bp, Homo sapiens
attactcccactggt

SEQ ID NO: 1423902 - DNA, 15 bp, Homo sapiens
ttactcccactggtc

SEQ ID NO: 1423903 - DNA, 15 bp, Homo sapiens
tactcccactggtct

SEQ ID NO: 1423904 - DNA, 15 bp, Homo sapiens
actcccactggtctc

SEQ ID NO: 1423905 - DNA, 15 bp, Homo sapiens
ctcccactggtctca

SEQ ID NO: 1423906 - DNA, 15 bp, Homo sapiens
tcccactggtctcac

SEQ ID NO: 1423907 - DNA, 15 bp, Homo sapiens
cccactggtctcaca

SEQ ID NO: 1423908 - DNA, 15 bp, Homo sapiens
ccactggtctcacac

SEQ ID NO: 1423909 - DNA, 15 bp, Homo sapiens
cactggtctcacacc

SEQ ID NO: 1423910 - DNA, 15 bp, Homo sapiens
actggtctcacacct

SEQ ID NO: 1423911 - DNA, 15 bp, Homo sapiens
ctggtctcacacctt

SEQ ID NO: 1423912 - DNA, 15 bp, Homo sapiens
tggtctcacacctta

SEQ ID NO: 1423913 - DNA, 15 bp, Homo sapiens
ggtctcacaccttat

SEQ ID NO: 1423914 - DNA, 15 bp, Homo sapiens
gtctcacaccttatt

SEQ ID NO: 1423915 - DNA, 15 bp, Homo sapiens
tctcacaccttattt

SEQ ID NO: 1423916 - DNA, 15 bp, Homo sapiens
ctcacaccttatttt

SEQ ID NO: 1423917 - DNA, 15 bp, Homo sapiens
tcacaccttatttta

SEQ ID NO: 1423918 - DNA, 15 bp, Homo sapiens
cacaccttattttat

SEQ ID NO: 1423919 - DNA, 15 bp, Homo sapiens
acaccttattttatc

SEQ ID NO: 1423920 - DNA, 15 bp, Homo sapiens
caccttattttatca

SEQ ID NO: 1423921 - DNA, 15 bp, Homo sapiens
accttattttatcaa

SEQ ID NO: 1423922 - DNA, 15 bp, Homo sapiens
ccttattttatcaat

SEQ ID NO: 1423923 - DNA, 15 bp, Homo sapiens
cttattttatcaatc

SEQ ID NO: 1423924 - DNA, 15 bp, Homo sapiens
ttattttatcaatcg

SEQ ID NO: 1423925 - DNA, 15 bp, Homo sapiens
tattttatcaatcgt

SEQ ID NO: 1423926 - DNA, 15 bp, Homo sapiens
attttatcaatcgta

SEQ ID NO: 1423927 - DNA, 15 bp, Homo sapiens
ttttatcaatcgtaa

SEQ ID NO: 1423928 - DNA, 15 bp, Homo sapiens
tttatcaatcgtaag

SEQ ID NO: 1423929 - DNA, 15 bp, Homo sapiens
ttatcaatcgtaagg

SEQ ID NO: 1423930 - DNA, 15 bp, Homo sapiens
tatcaatcgtaaggt

SEQ ID NO: 1423931 - DNA, 15 bp, Homo sapiens
atcaatcgtaaggtg

SEQ ID NO: 1423932 - DNA, 15 bp, Homo sapiens
tcaatcgtaaggtgc

SEQ ID NO: 1423933 - DNA, 15 bp, Homo sapiens
caatcgtaaggtgca

SEQ ID NO: 1423934 - DNA, 15 bp, Homo sapiens
aatcgtaaggtgcac

SEQ ID NO: 1423935 - DNA, 15 bp, Homo sapiens
atcgtaaggtgcaca

SEQ ID NO: 1423936 - DNA, 15 bp, Homo sapiens
tcgtaaggtgcacat

SEQ ID NO: 1423937 - DNA, 15 bp, Homo sapiens
cgtaaggtgcacatt

SEQ ID NO: 1423938 - DNA, 15 bp, Homo sapiens
gtaaggtgcacattt

SEQ ID NO: 1423939 - DNA, 15 bp, Homo sapiens
taaggtgcacatttt

SEQ ID NO: 1423940 - DNA, 15 bp, Homo sapiens
aaggtgcacattttt

SEQ ID NO: 1423941 - DNA, 15 bp, Homo sapiens
aggtgcacatttttc

SEQ ID NO: 1423942 - DNA, 15 bp, Homo sapiens
ggtgcacatttttca

SEQ ID NO: 1423943 - DNA, 15 bp, Homo sapiens
gtgcacatttttcac

SEQ ID NO: 1423944 - DNA, 15 bp, Homo sapiens
tgcacatttttcaca

SEQ ID NO: 1423945 - DNA, 15 bp, Homo sapiens
gcacatttttcacat

SEQ ID NO: 1423946 - DNA, 15 bp, Homo sapiens
cacatttttcacatc

SEQ ID NO: 1423947 - DNA, 15 bp, Homo sapiens
acatttttcacatct

SEQ ID NO: 1423948 - DNA, 15 bp, Homo sapiens
catttttcacatctt

SEQ ID NO: 1423949 - DNA, 15 bp, Homo sapiens
atttttcacatctta

SEQ ID NO: 1423950 - DNA, 15 bp, Homo sapiens
tttttcacatcttaa

SEQ ID NO: 1423951 - DNA, 15 bp, Homo sapiens
ttttcacatcttaac

SEQ ID NO: 1423952 - DNA, 15 bp, Homo sapiens
tttcacatcttaaca

SEQ ID NO: 1423953 - DNA, 15 bp, Homo sapiens
ttcacatcttaacat

SEQ ID NO: 1423954 - DNA, 15 bp, Homo sapiens
tcacatcttaacatc

SEQ ID NO: 1423955 - DNA, 15 bp, Homo sapiens
cacatcttaacatct

SEQ ID NO: 1423956 - DNA, 15 bp, Homo sapiens
acatcttaacatctc

SEQ ID NO: 1423957 - DNA, 15 bp, Homo sapiens
catcttaacatctct

SEQ ID NO: 1423958 - DNA, 15 bp, Homo sapiens
atcttaacatctctg

SEQ ID NO: 1423959 - DNA, 15 bp, Homo sapiens
tcttaacatctctga

SEQ ID NO: 1423960 - DNA, 15 bp, Homo sapiens
cttaacatctctgaa

SEQ ID NO: 1423961 - DNA, 15 bp, Homo sapiens
ttaacatctctgaaa

SEQ ID NO: 1423962 - DNA, 15 bp, Homo sapiens
taacatctctgaaat

SEQ ID NO: 1423963 - DNA, 15 bp, Homo sapiens
aacatctctgaaatt

SEQ ID NO: 1423964 - DNA, 15 bp, Homo sapiens
acatctctgaaattg

SEQ ID NO: 1423965 - DNA, 15 bp, Homo sapiens
catctctgaaattgg

SEQ ID NO: 1423966 - DNA, 15 bp, Homo sapiens
atctctgaaattggg

SEQ ID NO: 1423967 - DNA, 15 bp, Homo sapiens
tctctgaaattggga

SEQ ID NO: 1423968 - DNA, 15 bp, Homo sapiens
ctctgaaattgggaa

SEQ ID NO: 1423969 - DNA, 15 bp, Homo sapiens
tctgaaattgggaac

SEQ ID NO: 1423970 - DNA, 15 bp, Homo sapiens
ctgaaattgggaaca

SEQ ID NO: 1423971 - DNA, 15 bp, Homo sapiens
tgaaattgggaacat

SEQ ID NO: 1423972 - DNA, 15 bp, Homo sapiens
gaaattgggaacatt

SEQ ID NO: 1423973 - DNA, 15 bp, Homo sapiens
aaattgggaacattt

SEQ ID NO: 1423974 - DNA, 15 bp, Homo sapiens
aattgggaacatttt

SEQ ID NO: 1423975 - DNA, 15 bp, Homo sapiens
attgggaacatttta

SEQ ID NO: 1423976 - DNA, 15 bp, Homo sapiens
ttgggaacattttac

SEQ ID NO: 1423977 - DNA, 15 bp, Homo sapiens
tgggaacattttact

SEQ ID NO: 1423978 - DNA, 15 bp, Homo sapiens
gggaacattttacta

SEQ ID NO: 1423979 - DNA, 15 bp, Homo sapiens
ggaacattttactat

SEQ ID NO: 1423980 - DNA, 15 bp, Homo sapiens
gaacattttactatt

SEQ ID NO: 1423981 - DNA, 15 bp, Homo sapiens
aacattttactattg

SEQ ID NO: 1423982 - DNA, 15 bp, Homo sapiens
acattttactattga

SEQ ID NO: 1423983 - DNA, 15 bp, Homo sapiens
cattttactattgag

SEQ ID NO: 1423984 - DNA, 15 bp, Homo sapiens
attttactattgagg

SEQ ID NO: 1423985 - DNA, 15 bp, Homo sapiens
ttttactattgaggg

SEQ ID NO: 1423986 - DNA, 15 bp, Homo sapiens
tttactattgagggt

SEQ ID NO: 1423987 - DNA, 15 bp, Homo sapiens
ttactattgagggtg

SEQ ID NO: 1423988 - DNA, 15 bp, Homo sapiens
tactattgagggtgt

SEQ ID NO: 1423989 - DNA, 15 bp, Homo sapiens
actattgagggtgtg

SEQ ID NO: 1423990 - DNA, 15 bp, Homo sapiens
ctattgagggtgtgt

SEQ ID NO: 1423991 - DNA, 15 bp, Homo sapiens
tattgagggtgtgtc

SEQ ID NO: 1423992 - DNA, 15 bp, Homo sapiens
attgagggtgtgtca

SEQ ID NO: 1423993 - DNA, 15 bp, Homo sapiens
ttgagggtgtgtcat

SEQ ID NO: 1423994 - DNA, 15 bp, Homo sapiens
tgagggtgtgtcatt

SEQ ID NO: 1423995 - DNA, 15 bp, Homo sapiens
gagggtgtgtcattt

SEQ ID NO: 1423996 - DNA, 15 bp, Homo sapiens
agggtgtgtcatttg

SEQ ID NO: 1423997 - DNA, 15 bp, Homo sapiens
gggtgtgtcatttgt

SEQ ID NO: 1423998 - DNA, 15 bp, Homo sapiens
ggtgtgtcatttgtt

SEQ ID NO: 1423999 - DNA, 15 bp, Homo sapiens
gtgtgtcatttgttt

SEQ ID NO: 1424000 - DNA, 15 bp, Homo sapiens
tgtgtcatttgttta

SEQ ID NO: 1424001 - DNA, 15 bp, Homo sapiens
gtgtcatttgtttaa

SEQ ID NO: 1424002 - DNA, 15 bp, Homo sapiens
tgtcatttgtttaat

SEQ ID NO: 1424003 - DNA, 15 bp, Homo sapiens
gtcatttgtttaatt

SEQ ID NO: 1424004 - DNA, 15 bp, Homo sapiens
tcatttgtttaattt

SEQ ID NO: 1424005 - DNA, 15 bp, Homo sapiens
catttgtttaatttg

SEQ ID NO: 1424006 - DNA, 15 bp, Homo sapiens
atttgtttaatttgt

SEQ ID NO: 1424007 - DNA, 15 bp, Homo sapiens
tttgtttaatttgtg

SEQ ID NO: 1424008 - DNA, 15 bp, Homo sapiens
ttgtttaatttgtgt

SEQ ID NO: 1424009 - DNA, 15 bp, Homo sapiens
tgtttaatttgtgtg

SEQ ID NO: 1424010 - DNA, 15 bp, Homo sapiens
gtttaatttgtgtgc

SEQ ID NO: 1424011 - DNA, 15 bp, Homo sapiens
tttaatttgtgtgct

SEQ ID NO: 1424012 - DNA, 15 bp, Homo sapiens
ttaatttgtgtgctt

SEQ ID NO: 1424013 - DNA, 15 bp, Homo sapiens
taatttgtgtgcttt

SEQ ID NO: 1424014 - DNA, 15 bp, Homo sapiens
aatttgtgtgctttc

SEQ ID NO: 1424015 - DNA, 15 bp, Homo sapiens
atttgtgtgctttct

SEQ ID NO: 1424016 - DNA, 15 bp, Homo sapiens
tttgtgtgctttctt

SEQ ID NO: 1424017 - DNA, 15 bp, Homo sapiens
ttgtgtgctttcttt

SEQ ID NO: 1424018 - DNA, 15 bp, Homo sapiens
tgtgtgctttctttc

SEQ ID NO: 1424019 - DNA, 15 bp, Homo sapiens
gtgtgctttctttct

SEQ ID NO: 1424020 - DNA, 15 bp, Homo sapiens
tgtgctttctttctt

SEQ ID NO: 1424021 - DNA, 15 bp, Homo sapiens
gtgctttctttctta

SEQ ID NO: 1424022 - DNA, 15 bp, Homo sapiens
tgctttctttcttag

SEQ ID NO: 1424023 - DNA, 15 bp, Homo sapiens
gctttctttcttagt

SEQ ID NO: 1424024 - DNA, 15 bp, Homo sapiens
ctttctttcttagtg

SEQ ID NO: 1424025 - DNA, 15 bp, Homo sapiens
tttctttcttagtga

SEQ ID NO: 1424026 - DNA, 15 bp, Homo sapiens
ttctttcttagtgat

SEQ ID NO: 1424027 - DNA, 15 bp, Homo sapiens
tctttcttagtgata

SEQ ID NO: 1424028 - DNA, 15 bp, Homo sapiens
ctttcttagtgatac

SEQ ID NO: 1424029 - DNA, 15 bp, Homo sapiens
tttcttagtgataca

SEQ ID NO: 1424030 - DNA, 15 bp, Homo sapiens
ttcttagtgatacag

SEQ ID NO: 1424031 - DNA, 15 bp, Homo sapiens
tcttagtgatacaga

SEQ ID NO: 1424032 - DNA, 15 bp, Homo sapiens
cttagtgatacagaa

SEQ ID NO: 1424033 - DNA, 15 bp, Homo sapiens
ttagtgatacagaaa

SEQ ID NO: 1424034 - DNA, 15 bp, Homo sapiens
tagtgatacagaaaa

SEQ ID NO: 1424035 - DNA, 15 bp, Homo sapiens
agtgatacagaaaat

SEQ ID NO: 1424036 - DNA, 15 bp, Homo sapiens
gtgatacagaaaata

SEQ ID NO: 1424037 - DNA, 15 bp, Homo sapiens
tgatacagaaaataa

SEQ ID NO: 1424038 - DNA, 15 bp, Homo sapiens
gatacagaaaataat

SEQ ID NO: 1424039 - DNA, 15 bp, Homo sapiens
atacagaaaataata

SEQ ID NO: 1424040 - DNA, 15 bp, Homo sapiens
tacagaaaataatag

SEQ ID NO: 1424041 - DNA, 15 bp, Homo sapiens
acagaaaataatagt

SEQ ID NO: 1424042 - DNA, 15 bp, Homo sapiens
cagaaaataatagtg

SEQ ID NO: 1424043 - DNA, 15 bp, Homo sapiens
agaaaataatagtgc

SEQ ID NO: 1424044 - DNA, 15 bp, Homo sapiens
gaaaataatagtgca

SEQ ID NO: 1424045 - DNA, 15 bp, Homo sapiens
aaaataatagtgcaa

SEQ ID NO: 1424046 - DNA, 15 bp, Homo sapiens
aaataatagtgcaac

SEQ ID NO: 1424047 - DNA, 15 bp, Homo sapiens
aataatagtgcaact

SEQ ID NO: 1424048 - DNA, 15 bp, Homo sapiens
ataatagtgcaactt

SEQ ID NO: 1424049 - DNA, 15 bp, Homo sapiens
taatagtgcaactta

SEQ ID NO: 1424050 - DNA, 15 bp, Homo sapiens
aatagtgcaacttac

SEQ ID NO: 1424051 - DNA, 15 bp, Homo sapiens
atagtgcaacttaca

SEQ ID NO: 1424052 - DNA, 15 bp, Homo sapiens
tagtgcaacttacat

SEQ ID NO: 1424053 - DNA, 15 bp, Homo sapiens
agtgcaacttacatt

SEQ ID NO: 1424054 - DNA, 15 bp, Homo sapiens
gtgcaacttacattg

SEQ ID NO: 1424055 - DNA, 15 bp, Homo sapiens
tgcaacttacattgt

SEQ ID NO: 1424056 - DNA, 15 bp, Homo sapiens
gcaacttacattgtt

SEQ ID NO: 1424057 - DNA, 15 bp, Homo sapiens
caacttacattgttg

SEQ ID NO: 1424058 - DNA, 15 bp, Homo sapiens
aacttacattgttgg

SEQ ID NO: 1424059 - DNA, 15 bp, Homo sapiens
acttacattgttggt

SEQ ID NO: 1424060 - DNA, 15 bp, Homo sapiens
cttacattgttggtg

SEQ ID NO: 1424061 - DNA, 15 bp, Homo sapiens
ttacattgttggtgt

SEQ ID NO: 1424062 - DNA, 15 bp, Homo sapiens
tacattgttggtgtc

SEQ ID NO: 1424063 - DNA, 15 bp, Homo sapiens
acattgttggtgtct

SEQ ID NO: 1424064 - DNA, 15 bp, Homo sapiens
cattgttggtgtctt

SEQ ID NO: 1424065 - DNA, 15 bp, Homo sapiens
attgttggtgtctta

SEQ ID NO: 1424066 - DNA, 15 bp, Homo sapiens
ttgttggtgtcttag

SEQ ID NO: 1424067 - DNA, 15 bp, Homo sapiens
tgttggtgtcttagc

SEQ ID NO: 1424068 - DNA, 15 bp, Homo sapiens
gttggtgtcttagct

SEQ ID NO: 1424069 - DNA, 15 bp, Homo sapiens
ttggtgtcttagctt

SEQ ID NO: 1424070 - DNA, 15 bp, Homo sapiens
tggtgtcttagcttt

SEQ ID NO: 1424071 - DNA, 15 bp, Homo sapiens
ggtgtcttagcttta

SEQ ID NO: 1424072 - DNA, 15 bp, Homo sapiens
gtgtcttagctttag

SEQ ID NO: 1424073 - DNA, 15 bp, Homo sapiens
tgtcttagctttagt

SEQ ID NO: 1424074 - DNA, 15 bp, Homo sapiens
gtcttagctttagtg

SEQ ID NO: 1424075 - DNA, 15 bp, Homo sapiens
tcttagctttagtga

SEQ ID NO: 1424076 - DNA, 15 bp, Homo sapiens
cttagctttagtgaa

SEQ ID NO: 1424077 - DNA, 15 bp, Homo sapiens
ttagctttagtgaaa

SEQ ID NO: 1424078 - DNA, 15 bp, Homo sapiens
tagctttagtgaaat

SEQ ID NO: 1424079 - DNA, 15 bp, Homo sapiens
agctttagtgaaata

SEQ ID NO: 1424080 - DNA, 15 bp, Homo sapiens
gctttagtgaaatac

SEQ ID NO: 1424081 - DNA, 15 bp, Homo sapiens
ctttagtgaaataca

SEQ ID NO: 1424082 - DNA, 15 bp, Homo sapiens
tttagtgaaatacag

SEQ ID NO: 1424083 - DNA, 15 bp, Homo sapiens
ttagtgaaatacagt

SEQ ID NO: 1424084 - DNA, 15 bp, Homo sapiens
tagtgaaatacagta

SEQ ID NO: 1424085 - DNA, 15 bp, Homo sapiens
agtgaaatacagtat

SEQ ID NO: 1424086 - DNA, 15 bp, Homo sapiens
gtgaaatacagtatt

SEQ ID NO: 1424087 - DNA, 15 bp, Homo sapiens
tgaaatacagtattg

SEQ ID NO: 1424088 - DNA, 15 bp, Homo sapiens
gaaatacagtattga

SEQ ID NO: 1424089 - DNA, 15 bp, Homo sapiens
aaatacagtattgat

SEQ ID NO: 1424090 - DNA, 15 bp, Homo sapiens
aatacagtattgata

SEQ ID NO: 1424091 - DNA, 15 bp, Homo sapiens
atacagtattgatag

SEQ ID NO: 1424092 - DNA, 15 bp, Homo sapiens
tacagtattgatagg

SEQ ID NO: 1424093 - DNA, 15 bp, Homo sapiens
acagtattgataggc

SEQ ID NO: 1424094 - DNA, 15 bp, Homo sapiens
cagtattgataggca

SEQ ID NO: 1424095 - DNA, 15 bp, Homo sapiens
agtattgataggcaa

SEQ ID NO: 1424096 - DNA, 15 bp, Homo sapiens
gtattgataggcaaa

SEQ ID NO: 1424097 - DNA, 15 bp, Homo sapiens
tattgataggcaaat

SEQ ID NO: 1424098 - DNA, 15 bp, Homo sapiens
attgataggcaaatt

SEQ ID NO: 1424099 - DNA, 15 bp, Homo sapiens
ttgataggcaaattt

SEQ ID NO: 1424100 - DNA, 15 bp, Homo sapiens
tgataggcaaatttc

SEQ ID NO: 1424101 - DNA, 15 bp, Homo sapiens
gataggcaaatttct

SEQ ID NO: 1424102 - DNA, 15 bp, Homo sapiens
ataggcaaatttctt

SEQ ID NO: 1424103 - DNA, 15 bp, Homo sapiens
taggcaaatttctta

SEQ ID NO: 1424104 - DNA, 15 bp, Homo sapiens
aggcaaatttcttag

SEQ ID NO: 1424105 - DNA, 15 bp, Homo sapiens
ggcaaatttcttagt

SEQ ID NO: 1424106 - DNA, 15 bp, Homo sapiens
gcaaatttcttagtg

SEQ ID NO: 1424107 - DNA, 15 bp, Homo sapiens
caaatttcttagtgt

SEQ ID NO: 1424108 - DNA, 15 bp, Homo sapiens
aaatttcttagtgtt

SEQ ID NO: 1424109 - DNA, 15 bp, Homo sapiens
aatttcttagtgtta

SEQ ID NO: 1424110 - DNA, 15 bp, Homo sapiens
atttcttagtgttaa

SEQ ID NO: 1424111 - DNA, 15 bp, Homo sapiens
tttcttagtgttaag

SEQ ID NO: 1424112 - DNA, 15 bp, Homo sapiens
ttcttagtgttaagg

SEQ ID NO: 1424113 - DNA, 15 bp, Homo sapiens
tcttagtgttaaggt

SEQ ID NO: 1424114 - DNA, 15 bp, Homo sapiens
cttagtgttaaggta

SEQ ID NO: 1424115 - DNA, 15 bp, Homo sapiens
ttagtgttaaggtag

SEQ ID NO: 1424116 - DNA, 15 bp, Homo sapiens
tagtgttaaggtaga

SEQ ID NO: 1424117 - DNA, 15 bp, Homo sapiens
agtgttaaggtagaa

SEQ ID NO: 1424118 - DNA, 15 bp, Homo sapiens
gtgttaaggtagaaa

SEQ ID NO: 1424119 - DNA, 15 bp, Homo sapiens
tgttaaggtagaaaa

SEQ ID NO: 1424120 - DNA, 15 bp, Homo sapiens
gttaaggtagaaaac

SEQ ID NO: 1424121 - DNA, 15 bp, Homo sapiens
ttaaggtagaaaaca

SEQ ID NO: 1424122 - DNA, 15 bp, Homo sapiens
taaggtagaaaacaa

SEQ ID NO: 1424123 - DNA, 15 bp, Homo sapiens
aaggtagaaaacaag

SEQ ID NO: 1424124 - DNA, 15 bp, Homo sapiens
aggtagaaaacaagg

SEQ ID NO: 1424125 - DNA, 15 bp, Homo sapiens
ggtagaaaacaagga

SEQ ID NO: 1424126 - DNA, 15 bp, Homo sapiens
gtagaaaacaaggac

SEQ ID NO: 1424127 - DNA, 15 bp, Homo sapiens
tagaaaacaaggact

SEQ ID NO: 1424128 - DNA, 15 bp, Homo sapiens
agaaaacaaggactc

SEQ ID NO: 1424129 - DNA, 15 bp, Homo sapiens
gaaaacaaggactct

SEQ ID NO: 1424130 - DNA, 15 bp, Homo sapiens
aaaacaaggactcta

SEQ ID NO: 1424131 - DNA, 15 bp, Homo sapiens
aaacaaggactctaa

SEQ ID NO: 1424132 - DNA, 15 bp, Homo sapiens
aacaaggactctaaa

SEQ ID NO: 1424133 - DNA, 15 bp, Homo sapiens
acaaggactctaaat

SEQ ID NO: 1424134 - DNA, 15 bp, Homo sapiens
caaggactctaaata

SEQ ID NO: 1424135 - DNA, 15 bp, Homo sapiens
aaggactctaaataa

SEQ ID NO: 1424136 - DNA, 15 bp, Homo sapiens
aggactctaaataac

SEQ ID NO: 1424137 - DNA, 15 bp, Homo sapiens
ggactctaaataact

SEQ ID NO: 1424138 - DNA, 15 bp, Homo sapiens
gactctaaataactt

SEQ ID NO: 1424139 - DNA, 15 bp, Homo sapiens
actctaaataacttt

SEQ ID NO: 1424140 - DNA, 15 bp, Homo sapiens
ctctaaataactttg

SEQ ID NO: 1424141 - DNA, 15 bp, Homo sapiens
tctaaataactttga

SEQ ID NO: 1424142 - DNA, 15 bp, Homo sapiens
ctaaataactttgat

SEQ ID NO: 1424143 - DNA, 15 bp, Homo sapiens
taaataactttgatg

SEQ ID NO: 1424144 - DNA, 15 bp, Homo sapiens
aaataactttgatgg

SEQ ID NO: 1424145 - DNA, 15 bp, Homo sapiens
aataactttgatggt

SEQ ID NO: 1424146 - DNA, 15 bp, Homo sapiens
ataactttgatggtc

SEQ ID NO: 1424147 - DNA, 15 bp, Homo sapiens
taactttgatggtct

SEQ ID NO: 1424148 - DNA, 15 bp, Homo sapiens
aactttgatggtctg

SEQ ID NO: 1424149 - DNA, 15 bp, Homo sapiens
actttgatggtctgt

SEQ ID NO: 1424150 - DNA, 15 bp, Homo sapiens
ctttgatggtctgtg

SEQ ID NO: 1424151 - DNA, 15 bp, Homo sapiens
tttgatggtctgtgt

SEQ ID NO: 1424152 - DNA, 15 bp, Homo sapiens
ttgatggtctgtgta

SEQ ID NO: 1424153 - DNA, 15 bp, Homo sapiens
tgatggtctgtgtat

SEQ ID NO: 1424154 - DNA, 15 bp, Homo sapiens
gatggtctgtgtatt

SEQ ID NO: 1424155 - DNA, 15 bp, Homo sapiens
atggtctgtgtattt

SEQ ID NO: 1424156 - DNA, 15 bp, Homo sapiens
tggtctgtgtatttg

SEQ ID NO: 1424157 - DNA, 15 bp, Homo sapiens
ggtctgtgtatttgt

SEQ ID NO: 1424158 - DNA, 15 bp, Homo sapiens
gtctgtgtatttgtt

SEQ ID NO: 1424159 - DNA, 15 bp, Homo sapiens
tctgtgtatttgttt

SEQ ID NO: 1424160 - DNA, 15 bp, Homo sapiens
ctgtgtatttgtttt

SEQ ID NO: 1424161 - DNA, 15 bp, Homo sapiens
tgtgtatttgttttt

SEQ ID NO: 1424162 - DNA, 15 bp, Homo sapiens
gtgtatttgtttttg

SEQ ID NO: 1424163 - DNA, 15 bp, Homo sapiens
tgtatttgtttttgt

SEQ ID NO: 1424164 - DNA, 15 bp, Homo sapiens
gtatttgtttttgtt

SEQ ID NO: 1424165 - DNA, 15 bp, Homo sapiens
tatttgtttttgttt

SEQ ID NO: 1424166 - DNA, 15 bp, Homo sapiens
atttgtttttgtttc

SEQ ID NO: 1424167 - DNA, 15 bp, Homo sapiens
tttgtttttgtttcc

SEQ ID NO: 1424168 - DNA, 15 bp, Homo sapiens
ttgtttttgtttcct

SEQ ID NO: 1424169 - DNA, 15 bp, Homo sapiens
tgtttttgtttccta

SEQ ID NO: 1424170 - DNA, 15 bp, Homo sapiens
gtttttgtttcctag

SEQ ID NO: 1424171 - DNA, 15 bp, Homo sapiens
tttttgtttcctagg

SEQ ID NO: 1424172 - DNA, 15 bp, Homo sapiens
ttttgtttcctagga

SEQ ID NO: 1424173 - DNA, 15 bp, Homo sapiens
tttgtttcctaggag

SEQ ID NO: 1424174 - DNA, 15 bp, Homo sapiens
ttgtttcctaggagt

SEQ ID NO: 1424175 - DNA, 15 bp, Homo sapiens
tgtttcctaggagta

SEQ ID NO: 1424176 - DNA, 15 bp, Homo sapiens
gtttcctaggagtaa

SEQ ID NO: 1424177 - DNA, 15 bp, Homo sapiens
tttcctaggagtaaa

SEQ ID NO: 1424178 - DNA, 15 bp, Homo sapiens
ttcctaggagtaaaa

SEQ ID NO: 1424179 - DNA, 15 bp, Homo sapiens
tcctaggagtaaaat

SEQ ID NO: 1424180 - DNA, 15 bp, Homo sapiens
cctaggagtaaaatt

SEQ ID NO: 1424181 - DNA, 15 bp, Homo sapiens
ctaggagtaaaattt

SEQ ID NO: 1424182 - DNA, 15 bp, Homo sapiens
taggagtaaaatttc

SEQ ID NO: 1424183 - DNA, 15 bp, Homo sapiens
aggagtaaaatttcc

SEQ ID NO: 1424184 - DNA, 15 bp, Homo sapiens
ggagtaaaatttcca

SEQ ID NO: 1424185 - DNA, 15 bp, Homo sapiens
gagtaaaatttccag

SEQ ID NO: 1424186 - DNA, 15 bp, Homo sapiens
agtaaaatttccagt

SEQ ID NO: 1424187 - DNA, 15 bp, Homo sapiens
gtaaaatttccagtt

SEQ ID NO: 1424188 - DNA, 15 bp, Homo sapiens
taaaatttccagttg

SEQ ID NO: 1424189 - DNA, 15 bp, Homo sapiens
aaaatttccagttga

SEQ ID NO: 1424190 - DNA, 15 bp, Homo sapiens
aaatttccagttgat

SEQ ID NO: 1424191 - DNA, 15 bp, Homo sapiens
aatttccagttgatt

SEQ ID NO: 1424192 - DNA, 15 bp, Homo sapiens
atttccagttgattt

SEQ ID NO: 1424193 - DNA, 15 bp, Homo sapiens
tttccagttgatttt

SEQ ID NO: 1424194 - DNA, 15 bp, Homo sapiens
ttccagttgattttt

SEQ ID NO: 1424195 - DNA, 15 bp, Homo sapiens
tccagttgatttttt

SEQ ID NO: 1424196 - DNA, 15 bp, Homo sapiens
ccagttgatttttta

SEQ ID NO: 1424197 - DNA, 15 bp, Homo sapiens
cagttgattttttaa

SEQ ID NO: 1424198 - DNA, 15 bp, Homo sapiens
agttgattttttaaa

SEQ ID NO: 1424199 - DNA, 15 bp, Homo sapiens
gttgattttttaaaa

SEQ ID NO: 1424200 - DNA, 15 bp, Homo sapiens
ttgattttttaaaat

SEQ ID NO: 1424201 - DNA, 15 bp, Homo sapiens
tgattttttaaaatt

SEQ ID NO: 1424202 - DNA, 15 bp, Homo sapiens
gattttttaaaattt

SEQ ID NO: 1424203 - DNA, 15 bp, Homo sapiens
ttttttaaaatttga

SEQ ID NO: 1424204 - DNA, 15 bp, Homo sapiens
tttttaaaatttgat

SEQ ID NO: 1424205 - DNA, 15 bp, Homo sapiens
ttttaaaatttgatt

SEQ ID NO: 1424206 - DNA, 15 bp, Homo sapiens
tttaaaatttgattt

SEQ ID NO: 1424207 - DNA, 15 bp, Homo sapiens
ttaaaatttgatttt

SEQ ID NO: 1424208 - DNA, 15 bp, Homo sapiens
taaaatttgattttt

SEQ ID NO: 1424209 - DNA, 15 bp, Homo sapiens
aaaatttgattttta

SEQ ID NO: 1424210 - DNA, 15 bp, Homo sapiens
aaatttgatttttaa

SEQ ID NO: 1424211 - DNA, 15 bp, Homo sapiens
aatttgatttttaaa

SEQ ID NO: 1424212 - DNA, 15 bp, Homo sapiens
atttgatttttaaaa

SEQ ID NO: 1424213 - DNA, 15 bp, Homo sapiens
tttgatttttaaaaa

SEQ ID NO: 1424214 - DNA, 15 bp, Homo sapiens
ttgatttttaaaaaa

SEQ ID NO: 1424215 - DNA, 15 bp, Homo sapiens
tgatttttaaaaaaa

SEQ ID NO: 1424216 - DNA, 15 bp, Homo sapiens
gatttttaaaaaaaa

SEQ ID NO: 1424217 - DNA, 15 bp, Homo sapiens
atttttaaaaaaaat

SEQ ID NO: 1424218 - DNA, 15 bp, Homo sapiens
tttttaaaaaaaatc

SEQ ID NO: 1424219 - DNA, 15 bp, Homo sapiens
ttttaaaaaaaatca

SEQ ID NO: 1424220 - DNA, 15 bp, Homo sapiens
tttaaaaaaaatcac

SEQ ID NO: 1424221 - DNA, 15 bp, Homo sapiens
ttaaaaaaaatcaca

SEQ ID NO: 1424222 - DNA, 15 bp, Homo sapiens
taaaaaaaatcacag

SEQ ID NO: 1424223 - DNA, 15 bp, Homo sapiens
aaaaaaaatcacagg

SEQ ID NO: 1424224 - DNA, 15 bp, Homo sapiens
aaaaaaatcacaggt

SEQ ID NO: 1424225 - DNA, 15 bp, Homo sapiens
aaaaaatcacaggta

SEQ ID NO: 1424226 - DNA, 15 bp, Homo sapiens
aaaaatcacaggtaa

SEQ ID NO: 1424227 - DNA, 15 bp, Homo sapiens
aaaatcacaggtaac

SEQ ID NO: 1424228 - DNA, 15 bp, Homo sapiens
aaatcacaggtaacc

SEQ ID NO: 1424229 - DNA, 15 bp, Homo sapiens
aatcacaggtaacct

SEQ ID NO: 1424230 - DNA, 15 bp, Homo sapiens
atcacaggtaacctt

SEQ ID NO: 1424231 - DNA, 15 bp, Homo sapiens
tcacaggtaacctta

SEQ ID NO: 1424232 - DNA, 15 bp, Homo sapiens
cacaggtaaccttaa

SEQ ID NO: 1424233 - DNA, 15 bp, Homo sapiens
acaggtaaccttaat

SEQ ID NO: 1424234 - DNA, 15 bp, Homo sapiens
caggtaaccttaatg

SEQ ID NO: 1424235 - DNA, 15 bp, Homo sapiens
aggtaaccttaatgc

SEQ ID NO: 1424236 - DNA, 15 bp, Homo sapiens
ggtaaccttaatgca

SEQ ID NO: 1424237 - DNA, 15 bp, Homo sapiens
gtaaccttaatgcat

SEQ ID NO: 1424238 - DNA, 15 bp, Homo sapiens
taaccttaatgcatt

SEQ ID NO: 1424239 - DNA, 15 bp, Homo sapiens
aaccttaatgcattg

SEQ ID NO: 1424240 - DNA, 15 bp, Homo sapiens
accttaatgcattgt

SEQ ID NO: 1424241 - DNA, 15 bp, Homo sapiens
ccttaatgcattgtc

SEQ ID NO: 1424242 - DNA, 15 bp, Homo sapiens
cttaatgcattgtct

SEQ ID NO: 1424243 - DNA, 15 bp, Homo sapiens
ttaatgcattgtctt

SEQ ID NO: 1424244 - DNA, 15 bp, Homo sapiens
taatgcattgtctta

SEQ ID NO: 1424245 - DNA, 15 bp, Homo sapiens
aatgcattgtcttaa

SEQ ID NO: 1424246 - DNA, 15 bp, Homo sapiens
atgcattgtcttaac

SEQ ID NO: 1424247 - DNA, 15 bp, Homo sapiens
tgcattgtcttaaca

SEQ ID NO: 1424248 - DNA, 15 bp, Homo sapiens
gcattgtcttaacac

SEQ ID NO: 1424249 - DNA, 15 bp, Homo sapiens
cattgtcttaacaca

SEQ ID NO: 1424250 - DNA, 15 bp, Homo sapiens
attgtcttaacacaa

SEQ ID NO: 1424251 - DNA, 15 bp, Homo sapiens
ttgtcttaacacaac

SEQ ID NO: 1424252 - DNA, 15 bp, Homo sapiens
tgtcttaacacaaca

SEQ ID NO: 1424253 - DNA, 15 bp, Homo sapiens
gtcttaacacaacaa

SEQ ID NO: 1424254 - DNA, 15 bp, Homo sapiens
tcttaacacaacaaa

SEQ ID NO: 1424255 - DNA, 15 bp, Homo sapiens
cttaacacaacaaag

SEQ ID NO: 1424256 - DNA, 15 bp, Homo sapiens
ttaacacaacaaaga

SEQ ID NO: 1424257 - DNA, 15 bp, Homo sapiens
taacacaacaaagag

SEQ ID NO: 1424258 - DNA, 15 bp, Homo sapiens
aacacaacaaagagc

SEQ ID NO: 1424259 - DNA, 15 bp, Homo sapiens
acacaacaaagagca

SEQ ID NO: 1424260 - DNA, 15 bp, Homo sapiens
cacaacaaagagcat

SEQ ID NO: 1424261 - DNA, 15 bp, Homo sapiens
acaacaaagagcata

SEQ ID NO: 1424262 - DNA, 15 bp, Homo sapiens
caacaaagagcatac

SEQ ID NO: 1424263 - DNA, 15 bp, Homo sapiens
aacaaagagcataca

SEQ ID NO: 1424264 - DNA, 15 bp, Homo sapiens
acaaagagcatacat

SEQ ID NO: 1424265 - DNA, 15 bp, Homo sapiens
caaagagcatacata

SEQ ID NO: 1424266 - DNA, 15 bp, Homo sapiens
aaagagcatacatag

SEQ ID NO: 1424267 - DNA, 15 bp, Homo sapiens
aagagcatacatagg

SEQ ID NO: 1424268 - DNA, 15 bp, Homo sapiens
agagcatacataggg

SEQ ID NO: 1424269 - DNA, 15 bp, Homo sapiens
gagcatacatagggt

SEQ ID NO: 1424270 - DNA, 15 bp, Homo sapiens
agcatacatagggtt

SEQ ID NO: 1424271 - DNA, 15 bp, Homo sapiens
gcatacatagggttt

SEQ ID NO: 1424272 - DNA, 15 bp, Homo sapiens
catacatagggtttc

SEQ ID NO: 1424273 - DNA, 15 bp, Homo sapiens
atacatagggtttct

SEQ ID NO: 1424274 - DNA, 15 bp, Homo sapiens
tacatagggtttctc

SEQ ID NO: 1424275 - DNA, 15 bp, Homo sapiens
acatagggtttctct

SEQ ID NO: 1424276 - DNA, 15 bp, Homo sapiens
catagggtttctctt

SEQ ID NO: 1424277 - DNA, 15 bp, Homo sapiens
atagggtttctcttg

SEQ ID NO: 1424278 - DNA, 15 bp, Homo sapiens
tagggtttctcttgg

SEQ ID NO: 1424279 - DNA, 15 bp, Homo sapiens
agggtttctcttggt

SEQ ID NO: 1424280 - DNA, 15 bp, Homo sapiens
gggtttctcttggtt

SEQ ID NO: 1424281 - DNA, 15 bp, Homo sapiens
ggtttctcttggttt

SEQ ID NO: 1424282 - DNA, 15 bp, Homo sapiens
gtttctcttggtttc

SEQ ID NO: 1424283 - DNA, 15 bp, Homo sapiens
tttctcttggtttct

SEQ ID NO: 1424284 - DNA, 15 bp, Homo sapiens
ttctcttggtttctt

SEQ ID NO: 1424285 - DNA, 15 bp, Homo sapiens
tctcttggtttcttt

SEQ ID NO: 1424286 - DNA, 15 bp, Homo sapiens
ctcttggtttctttg

SEQ ID NO: 1424287 - DNA, 15 bp, Homo sapiens
tcttggtttctttga

SEQ ID NO: 1424288 - DNA, 15 bp, Homo sapiens
cttggtttctttgat

SEQ ID NO: 1424289 - DNA, 15 bp, Homo sapiens
ttggtttctttgatt

SEQ ID NO: 1424290 - DNA, 15 bp, Homo sapiens
tggtttctttgatta

SEQ ID NO: 1424291 - DNA, 15 bp, Homo sapiens
ggtttctttgattat

SEQ ID NO: 1424292 - DNA, 15 bp, Homo sapiens
gtttctttgattata

SEQ ID NO: 1424293 - DNA, 15 bp, Homo sapiens
tttctttgattataa

SEQ ID NO: 1424294 - DNA, 15 bp, Homo sapiens
ttctttgattataat

SEQ ID NO: 1424295 - DNA, 15 bp, Homo sapiens
tctttgattataatt

SEQ ID NO: 1424296 - DNA, 15 bp, Homo sapiens
ctttgattataattc

SEQ ID NO: 1424297 - DNA, 15 bp, Homo sapiens
tttgattataattca

SEQ ID NO: 1424298 - DNA, 15 bp, Homo sapiens
ttgattataattcat

SEQ ID NO: 1424299 - DNA, 15 bp, Homo sapiens
tgattataattcata

SEQ ID NO: 1424300 - DNA, 15 bp, Homo sapiens
gattataattcatac

SEQ ID NO: 1424301 - DNA, 15 bp, Homo sapiens
attataattcataca

SEQ ID NO: 1424302 - DNA, 15 bp, Homo sapiens
ttataattcatacat

SEQ ID NO: 1424303 - DNA, 15 bp, Homo sapiens
tataattcatacatt

SEQ ID NO: 1424304 - DNA, 15 bp, Homo sapiens
ataattcatacattt

SEQ ID NO: 1424305 - DNA, 15 bp, Homo sapiens
taattcatacatttt

SEQ ID NO: 1424306 - DNA, 15 bp, Homo sapiens
aattcatacattttt

SEQ ID NO: 1424307 - DNA, 15 bp, Homo sapiens
attcatacatttttc

SEQ ID NO: 1424308 - DNA, 15 bp, Homo sapiens
ttcatacatttttct

SEQ ID NO: 1424309 - DNA, 15 bp, Homo sapiens
tcatacatttttctc

SEQ ID NO: 1424310 - DNA, 15 bp, Homo sapiens
catacatttttctct

SEQ ID NO: 1424311 - DNA, 15 bp, Homo sapiens
atacatttttctcta

SEQ ID NO: 1424312 - DNA, 15 bp, Homo sapiens
tacatttttctctaa

SEQ ID NO: 1424313 - DNA, 15 bp, Homo sapiens
acatttttctctaac

SEQ ID NO: 1424314 - DNA, 15 bp, Homo sapiens
catttttctctaact

SEQ ID NO: 1424315 - DNA, 15 bp, Homo sapiens
atttttctctaactg

SEQ ID NO: 1424316 - DNA, 15 bp, Homo sapiens
tttttctctaactgc

SEQ ID NO: 1424317 - DNA, 15 bp, Homo sapiens
ttttctctaactgca

SEQ ID NO: 1424318 - DNA, 15 bp, Homo sapiens
tttctctaactgcaa

SEQ ID NO: 1424319 - DNA, 15 bp, Homo sapiens
ttctctaactgcaaa

SEQ ID NO: 1424320 - DNA, 15 bp, Homo sapiens
tctctaactgcaaac

SEQ ID NO: 1424321 - DNA, 15 bp, Homo sapiens
ctctaactgcaaaca

SEQ ID NO: 1424322 - DNA, 15 bp, Homo sapiens
tctaactgcaaacat

SEQ ID NO: 1424323 - DNA, 15 bp, Homo sapiens
ctaactgcaaacata

SEQ ID NO: 1424324 - DNA, 15 bp, Homo sapiens
taactgcaaacataa

SEQ ID NO: 1424325 - DNA, 15 bp, Homo sapiens
aactgcaaacataat

SEQ ID NO: 1424326 - DNA, 15 bp, Homo sapiens
actgcaaacataatg

SEQ ID NO: 1424327 - DNA, 15 bp, Homo sapiens
ctgcaaacataatgt

SEQ ID NO: 1424328 - DNA, 15 bp, Homo sapiens
tgcaaacataatgtt

SEQ ID NO: 1424329 - DNA, 15 bp, Homo sapiens
gcaaacataatgttt

SEQ ID NO: 1424330 - DNA, 15 bp, Homo sapiens
caaacataatgtttt

SEQ ID NO: 1424331 - DNA, 15 bp, Homo sapiens
aaacataatgttttc

SEQ ID NO: 1424332 - DNA, 15 bp, Homo sapiens
aacataatgttttcc

SEQ ID NO: 1424333 - DNA, 15 bp, Homo sapiens
acataatgttttccc

SEQ ID NO: 1424334 - DNA, 15 bp, Homo sapiens
cataatgttttccct

SEQ ID NO: 1424335 - DNA, 15 bp, Homo sapiens
ataatgttttccctt

SEQ ID NO: 1424336 - DNA, 15 bp, Homo sapiens
taatgttttcccttg

SEQ ID NO: 1424337 - DNA, 15 bp, Homo sapiens
aatgttttcccttgt

SEQ ID NO: 1424338 - DNA, 15 bp, Homo sapiens
atgttttcccttgta

SEQ ID NO: 1424339 - DNA, 15 bp, Homo sapiens
tgttttcccttgtat

SEQ ID NO: 1424340 - DNA, 15 bp, Homo sapiens
gttttcccttgtatt

SEQ ID NO: 1424341 - DNA, 15 bp, Homo sapiens
ttttcccttgtattt

SEQ ID NO: 1424342 - DNA, 15 bp, Homo sapiens
tttcccttgtatttt

SEQ ID NO: 1424343 - DNA, 15 bp, Homo sapiens
ttcccttgtatttta

SEQ ID NO: 1424344 - DNA, 15 bp, Homo sapiens
tcccttgtattttac

SEQ ID NO: 1424345 - DNA, 15 bp, Homo sapiens
cccttgtattttaca

SEQ ID NO: 1424346 - DNA, 15 bp, Homo sapiens
ccttgtattttacag

SEQ ID NO: 1424347 - DNA, 15 bp, Homo sapiens
cttgtattttacaga

SEQ ID NO: 1424348 - DNA, 15 bp, Homo sapiens
ttgtattttacagat

SEQ ID NO: 1424349 - DNA, 15 bp, Homo sapiens
tgtattttacagatg

SEQ ID NO: 1424350 - DNA, 15 bp, Homo sapiens
gtattttacagatgc

SEQ ID NO: 1424351 - DNA, 15 bp, Homo sapiens
tattttacagatgca

SEQ ID NO: 1424352 - DNA, 15 bp, Homo sapiens
attttacagatgcaa

SEQ ID NO: 1424353 - DNA, 15 bp, Homo sapiens
ttttacagatgcaaa

SEQ ID NO: 1424354 - DNA, 15 bp, Homo sapiens
tttacagatgcaaac

SEQ ID NO: 1424355 - DNA, 15 bp, Homo sapiens
ttacagatgcaaaca

SEQ ID NO: 1424356 - DNA, 15 bp, Homo sapiens
tacagatgcaaacag

SEQ ID NO: 1424357 - DNA, 15 bp, Homo sapiens
acagatgcaaacagc

SEQ ID NO: 1424358 - DNA, 15 bp, Homo sapiens
cagatgcaaacagct

SEQ ID NO: 1424359 - DNA, 15 bp, Homo sapiens
agatgcaaacagcta

SEQ ID NO: 1424360 - DNA, 15 bp, Homo sapiens
gatgcaaacagctat

SEQ ID NO: 1424361 - DNA, 15 bp, Homo sapiens
atgcaaacagctata

SEQ ID NO: 1424362 - DNA, 15 bp, Homo sapiens
tgcaaacagctataa

SEQ ID NO: 1424363 - DNA, 15 bp, Homo sapiens
gcaaacagctataat

SEQ ID NO: 1424364 - DNA, 15 bp, Homo sapiens
caaacagctataatt

SEQ ID NO: 1424365 - DNA, 15 bp, Homo sapiens
aaacagctataattt

SEQ ID NO: 1424366 - DNA, 15 bp, Homo sapiens
aacagctataatttt

SEQ ID NO: 1424367 - DNA, 15 bp, Homo sapiens
acagctataattttg

SEQ ID NO: 1424368 - DNA, 15 bp, Homo sapiens
cagctataattttgc

SEQ ID NO: 1424369 - DNA, 15 bp, Homo sapiens
agctataattttgca

SEQ ID NO: 1424370 - DNA, 15 bp, Homo sapiens
gctataattttgcaa

SEQ ID NO: 1424371 - DNA, 15 bp, Homo sapiens
ctataattttgcaaa

SEQ ID NO: 1424372 - DNA, 15 bp, Homo sapiens
tataattttgcaaaa

SEQ ID NO: 1424373 - DNA, 15 bp, Homo sapiens
ataattttgcaaaaa

SEQ ID NO: 1424374 - DNA, 15 bp, Homo sapiens
taattttgcaaaaaa

SEQ ID NO: 1424375 - DNA, 15 bp, Homo sapiens
aattttgcaaaaaag

SEQ ID NO: 1424376 - DNA, 15 bp, Homo sapiens
attttgcaaaaaagg

SEQ ID NO: 1424377 - DNA, 15 bp, Homo sapiens
ttttgcaaaaaagga

SEQ ID NO: 1424378 - DNA, 15 bp, Homo sapiens
tttgcaaaaaaggaa

SEQ ID NO: 1424379 - DNA, 15 bp, Homo sapiens
ttgcaaaaaaggaaa

SEQ ID NO: 1424380 - DNA, 15 bp, Homo sapiens
tgcaaaaaaggaaaa

SEQ ID NO: 1424381 - DNA, 15 bp, Homo sapiens
gcaaaaaaggaaaat

SEQ ID NO: 1424382 - DNA, 15 bp, Homo sapiens
caaaaaaggaaaata

SEQ ID NO: 1424383 - DNA, 15 bp, Homo sapiens
aaaaaaggaaaataa

SEQ ID NO: 1424384 - DNA, 15 bp, Homo sapiens
aaaaaggaaaataac

SEQ ID NO: 1424385 - DNA, 15 bp, Homo sapiens
aaaaggaaaataact

SEQ ID NO: 1424386 - DNA, 15 bp, Homo sapiens
aaaggaaaataactc

SEQ ID NO: 1424387 - DNA, 15 bp, Homo sapiens
aaggaaaataactct

SEQ ID NO: 1424388 - DNA, 15 bp, Homo sapiens
aggaaaataactctc

SEQ ID NO: 1424389 - DNA, 15 bp, Homo sapiens
ggaaaataactctcc

SEQ ID NO: 1424390 - DNA, 15 bp, Homo sapiens
gaaaataactctcct

SEQ ID NO: 1424391 - DNA, 15 bp, Homo sapiens
aaaataactctcctg

SEQ ID NO: 1424392 - DNA, 15 bp, Homo sapiens
aaataactctcctga

SEQ ID NO: 1424393 - DNA, 15 bp, Homo sapiens
aataactctcctgaa

SEQ ID NO: 1424394 - DNA, 15 bp, Homo sapiens
ataactctcctgaac

SEQ ID NO: 1424395 - DNA, 15 bp, Homo sapiens
taactctcctgaaca

SEQ ID NO: 1424396 - DNA, 15 bp, Homo sapiens
aactctcctgaacat

SEQ ID NO: 1424397 - DNA, 15 bp, Homo sapiens
actctcctgaacatc

SEQ ID NO: 1424398 - DNA, 15 bp, Homo sapiens
ctctcctgaacatct

SEQ ID NO: 1424399 - DNA, 15 bp, Homo sapiens
tctcctgaacatcta

SEQ ID NO: 1424400 - DNA, 15 bp, Homo sapiens
ctcctgaacatctaa

SEQ ID NO: 1424401 - DNA, 15 bp, Homo sapiens
tcctgaacatctaaa

SEQ ID NO: 1424402 - DNA, 15 bp, Homo sapiens
cctgaacatctaaaa

SEQ ID NO: 1424403 - DNA, 15 bp, Homo sapiens
ctgaacatctaaaag

SEQ ID NO: 1424404 - DNA, 15 bp, Homo sapiens
tgaacatctaaaaga

SEQ ID NO: 1424405 - DNA, 15 bp, Homo sapiens
gaacatctaaaagat

SEQ ID NO: 1424406 - DNA, 15 bp, Homo sapiens
aacatctaaaagatg

SEQ ID NO: 1424407 - DNA, 15 bp, Homo sapiens
acatctaaaagatga

SEQ ID NO: 1424408 - DNA, 15 bp, Homo sapiens
catctaaaagatgaa

SEQ ID NO: 1424409 - DNA, 15 bp, Homo sapiens
atctaaaagatgaag

SEQ ID NO: 1424410 - DNA, 15 bp, Homo sapiens
tctaaaagatgaagt

SEQ ID NO: 1424411 - DNA, 15 bp, Homo sapiens
ctaaaagatgaagtt

SEQ ID NO: 1424412 - DNA, 15 bp, Homo sapiens
taaaagatgaagttt

SEQ ID NO: 1424413 - DNA, 15 bp, Homo sapiens
aaaagatgaagtttc

SEQ ID NO: 1424414 - DNA, 15 bp, Homo sapiens
aaagatgaagtttct

SEQ ID NO: 1424415 - DNA, 15 bp, Homo sapiens
aagatgaagtttcta

SEQ ID NO: 1424416 - DNA, 15 bp, Homo sapiens
agatgaagtttctat

SEQ ID NO: 1424417 - DNA, 15 bp, Homo sapiens
gatgaagtttctatc

SEQ ID NO: 1424418 - DNA, 15 bp, Homo sapiens
atgaagtttctatca

SEQ ID NO: 1424419 - DNA, 15 bp, Homo sapiens
tgaagtttctatcat

SEQ ID NO: 1424420 - DNA, 15 bp, Homo sapiens
gaagtttctatcatc

SEQ ID NO: 1424421 - DNA, 15 bp, Homo sapiens
aagtttctatcatcc

SEQ ID NO: 1424422 - DNA, 15 bp, Homo sapiens
agtttctatcatcca

SEQ ID NO: 1424423 - DNA, 15 bp, Homo sapiens
gtttctatcatccaa

SEQ ID NO: 1424424 - DNA, 15 bp, Homo sapiens
tttctatcatccaaa

SEQ ID NO: 1424425 - DNA, 15 bp, Homo sapiens
ttctatcatccaaag

SEQ ID NO: 1424426 - DNA, 15 bp, Homo sapiens
tctatcatccaaagt

SEQ ID NO: 1424427 - DNA, 15 bp, Homo sapiens
ctatcatccaaagta

SEQ ID NO: 1424428 - DNA, 15 bp, Homo sapiens
tatcatccaaagtat

SEQ ID NO: 1424429 - DNA, 15 bp, Homo sapiens
atcatccaaagtatg

SEQ ID NO: 1424430 - DNA, 15 bp, Homo sapiens
tcatccaaagtatgg

SEQ ID NO: 1424431 - DNA, 15 bp, Homo sapiens
catccaaagtatggg

SEQ ID NO: 1424432 - DNA, 15 bp, Homo sapiens
atccaaagtatgggc

SEQ ID NO: 1424433 - DNA, 15 bp, Homo sapiens
tccaaagtatgggct

SEQ ID NO: 1424434 - DNA, 15 bp, Homo sapiens
ccaaagtatgggcta

SEQ ID NO: 1424435 - DNA, 15 bp, Homo sapiens
caaagtatgggctac

SEQ ID NO: 1424436 - DNA, 15 bp, Homo sapiens
aaagtatgggctaca

SEQ ID NO: 1424437 - DNA, 15 bp, Homo sapiens
aagtatgggctacag

SEQ ID NO: 1424438 - DNA, 15 bp, Homo sapiens
agtatgggctacaga

SEQ ID NO: 1424439 - DNA, 15 bp, Homo sapiens
gtatgggctacagaa

SEQ ID NO: 1424440 - DNA, 15 bp, Homo sapiens
tatgggctacagaaa

SEQ ID NO: 1424441 - DNA, 15 bp, Homo sapiens
atgggctacagaaac

SEQ ID NO: 1424442 - DNA, 15 bp, Homo sapiens
tgggctacagaaacc

SEQ ID NO: 1424443 - DNA, 15 bp, Homo sapiens
gggctacagaaaccg

SEQ ID NO: 1424444 - DNA, 15 bp, Homo sapiens
ggctacagaaaccgt

SEQ ID NO: 1424445 - DNA, 15 bp, Homo sapiens
gctacagaaaccgtg

SEQ ID NO: 1424446 - DNA, 15 bp, Homo sapiens
ctacagaaaccgtgc

SEQ ID NO: 1424447 - DNA, 15 bp, Homo sapiens
tacagaaaccgtgcc

SEQ ID NO: 1424448 - DNA, 15 bp, Homo sapiens
acagaaaccgtgcca

SEQ ID NO: 1424449 - DNA, 15 bp, Homo sapiens
cagaaaccgtgccaa

SEQ ID NO: 1424450 - DNA, 15 bp, Homo sapiens
agaaaccgtgccaaa

SEQ ID NO: 1424451 - DNA, 15 bp, Homo sapiens
gaaaccgtgccaaaa

SEQ ID NO: 1424452 - DNA, 15 bp, Homo sapiens
aaaccgtgccaaaag

SEQ ID NO: 1424453 - DNA, 15 bp, Homo sapiens
aaccgtgccaaaaga

SEQ ID NO: 1424454 - DNA, 15 bp, Homo sapiens
accgtgccaaaagac

SEQ ID NO: 1424455 - DNA, 15 bp, Homo sapiens
ccgtgccaaaagact

SEQ ID NO: 1424456 - DNA, 15 bp, Homo sapiens
cgtgccaaaagactt

SEQ ID NO: 1424457 - DNA, 15 bp, Homo sapiens
gtgccaaaagacttc

SEQ ID NO: 1424458 - DNA, 15 bp, Homo sapiens
tgccaaaagacttct

SEQ ID NO: 1424459 - DNA, 15 bp, Homo sapiens
gccaaaagacttcta

SEQ ID NO: 1424460 - DNA, 15 bp, Homo sapiens
ccaaaagacttctac

SEQ ID NO: 1424461 - DNA, 15 bp, Homo sapiens
caaaagacttctaca

SEQ ID NO: 1424462 - DNA, 15 bp, Homo sapiens
aaaagacttctacag

SEQ ID NO: 1424463 - DNA, 15 bp, Homo sapiens
aaagacttctacaga

SEQ ID NO: 1424464 - DNA, 15 bp, Homo sapiens
aagacttctacagag

SEQ ID NO: 1424465 - DNA, 15 bp, Homo sapiens
agacttctacagagt

SEQ ID NO: 1424466 - DNA, 15 bp, Homo sapiens
gacttctacagagtg

SEQ ID NO: 1424467 - DNA, 15 bp, Homo sapiens
acttctacagagtga

SEQ ID NO: 1424468 - DNA, 15 bp, Homo sapiens
cttctacagagtgaa

SEQ ID NO: 1424469 - DNA, 15 bp, Homo sapiens
ttctacagagtgaac

SEQ ID NO: 1424470 - DNA, 15 bp, Homo sapiens
tctacagagtgaacc

SEQ ID NO: 1424471 - DNA, 15 bp, Homo sapiens
ctacagagtgaaccc

SEQ ID NO: 1424472 - DNA, 15 bp, Homo sapiens
tacagagtgaacccg

SEQ ID NO: 1424473 - DNA, 15 bp, Homo sapiens
acagagtgaacccga

SEQ ID NO: 1424474 - DNA, 15 bp, Homo sapiens
cagagtgaacccgaa

SEQ ID NO: 1424475 - DNA, 15 bp, Homo sapiens
agagtgaacccgaaa

SEQ ID NO: 1424476 - DNA, 15 bp, Homo sapiens
gagtgaacccgaaaa

SEQ ID NO: 1424477 - DNA, 15 bp, Homo sapiens
agtgaacccgaaaat

SEQ ID NO: 1424478 - DNA, 15 bp, Homo sapiens
gtgaacccgaaaatc

SEQ ID NO: 1424479 - DNA, 15 bp, Homo sapiens
tgaacccgaaaatcc

SEQ ID NO: 1424480 - DNA, 15 bp, Homo sapiens
gaacccgaaaatcct

SEQ ID NO: 1424481 - DNA, 15 bp, Homo sapiens
aacccgaaaatcctt

SEQ ID NO: 1424482 - DNA, 15 bp, Homo sapiens
acccgaaaatccttc

SEQ ID NO: 1424483 - DNA, 15 bp, Homo sapiens
cccgaaaatccttcc

SEQ ID NO: 1424484 - DNA, 15 bp, Homo sapiens
ccgaaaatccttcct

SEQ ID NO: 1424485 - DNA, 15 bp, Homo sapiens
cgaaaatccttcctt

SEQ ID NO: 1424486 - DNA, 15 bp, Homo sapiens
gaaaatccttccttg

SEQ ID NO: 1424487 - DNA, 15 bp, Homo sapiens
aaaatccttccttgg

SEQ ID NO: 1424488 - DNA, 15 bp, Homo sapiens
aaatccttccttggt

SEQ ID NO: 1424489 - DNA, 15 bp, Homo sapiens
aatccttccttggta

SEQ ID NO: 1424490 - DNA, 15 bp, Homo sapiens
atccttccttggtaa

SEQ ID NO: 1424491 - DNA, 15 bp, Homo sapiens
tccttccttggtaaa

SEQ ID NO: 1424492 - DNA, 15 bp, Homo sapiens
ccttccttggtaaaa

SEQ ID NO: 1424493 - DNA, 15 bp, Homo sapiens
cttccttggtaaaac

SEQ ID NO: 1424494 - DNA, 15 bp, Homo sapiens
ttccttggtaaaacc

SEQ ID NO: 1424495 - DNA, 15 bp, Homo sapiens
tccttggtaaaacca

SEQ ID NO: 1424496 - DNA, 15 bp, Homo sapiens
ccttggtaaaaccat

SEQ ID NO: 1424497 - DNA, 15 bp, Homo sapiens
cttggtaaaaccatt

SEQ ID NO: 1424498 - DNA, 15 bp, Homo sapiens
ttggtaaaaccattt

SEQ ID NO: 1424499 - DNA, 15 bp, Homo sapiens
tggtaaaaccatttg

SEQ ID NO: 1424500 - DNA, 15 bp, Homo sapiens
ggtaaaaccatttgt

SEQ ID NO: 1424501 - DNA, 15 bp, Homo sapiens
gtaaaaccatttgtt

SEQ ID NO: 1424502 - DNA, 15 bp, Homo sapiens
taaaaccatttgttt

SEQ ID NO: 1424503 - DNA, 15 bp, Homo sapiens
aaaaccatttgtttt

SEQ ID NO: 1424504 - DNA, 15 bp, Homo sapiens
aaaccatttgttttc

SEQ ID NO: 1424505 - DNA, 15 bp, Homo sapiens
aaccatttgttttct

SEQ ID NO: 1424506 - DNA, 15 bp, Homo sapiens
accatttgttttctt

SEQ ID NO: 1424507 - DNA, 15 bp, Homo sapiens
ccatttgttttcttc

SEQ ID NO: 1424508 - DNA, 15 bp, Homo sapiens
catttgttttcttct

SEQ ID NO: 1424509 - DNA, 15 bp, Homo sapiens
atttgttttcttctt

SEQ ID NO: 1424510 - DNA, 15 bp, Homo sapiens
tttgttttcttcttc

SEQ ID NO: 1424511 - DNA, 15 bp, Homo sapiens
ttgttttcttcttct

SEQ ID NO: 1424512 - DNA, 15 bp, Homo sapiens
tgttttcttcttctt

SEQ ID NO: 1424513 - DNA, 15 bp, Homo sapiens
gttttcttcttcttc

SEQ ID NO: 1424514 - DNA, 15 bp, Homo sapiens
cttcttcttcttttc

SEQ ID NO: 1424515 - DNA, 15 bp, Homo sapiens
ttcttcttcttttct

SEQ ID NO: 1424516 - DNA, 15 bp, Homo sapiens
tcttcttcttttctt

SEQ ID NO: 1424517 - DNA, 15 bp, Homo sapiens
cttcttcttttcttt

SEQ ID NO: 1424518 - DNA, 15 bp, Homo sapiens
ttcttcttttctttt

SEQ ID NO: 1424519 - DNA, 15 bp, Homo sapiens
tcttcttttcttttt

SEQ ID NO: 1424520 - DNA, 15 bp, Homo sapiens
cttcttttctttttt

SEQ ID NO: 1424521 - DNA, 15 bp, Homo sapiens
tcttgctctgtggcc

SEQ ID NO: 1424522 - DNA, 15 bp, Homo sapiens
cttgctctgtggccc

SEQ ID NO: 1424523 - DNA, 15 bp, Homo sapiens
ttgctctgtggccca

SEQ ID NO: 1424524 - DNA, 15 bp, Homo sapiens
tgctctgtggcccag

SEQ ID NO: 1424525 - DNA, 15 bp, Homo sapiens
gctctgtggcccagg

SEQ ID NO: 1424526 - DNA, 15 bp, Homo sapiens
ctctgtggcccaggc

SEQ ID NO: 1424527 - DNA, 15 bp, Homo sapiens
tctgtggcccaggct

SEQ ID NO: 1424528 - DNA, 15 bp, Homo sapiens
tggcccaggctagaa

SEQ ID NO: 1424529 - DNA, 15 bp, Homo sapiens
ggcccaggctagaag

SEQ ID NO: 1424530 - DNA, 15 bp, Homo sapiens
gcccaggctagaagc

SEQ ID NO: 1424531 - DNA, 15 bp, Homo sapiens
cccaggctagaagca

SEQ ID NO: 1424532 - DNA, 15 bp, Homo sapiens
ccaggctagaagcag

SEQ ID NO: 1424533 - DNA, 15 bp, Homo sapiens
caggctagaagcagt

SEQ ID NO: 1424534 - DNA, 15 bp, Homo sapiens
aggctagaagcagtc

SEQ ID NO: 1424535 - DNA, 15 bp, Homo sapiens
ggctagaagcagtcc

SEQ ID NO: 1424536 - DNA, 15 bp, Homo sapiens
gctagaagcagtcct

SEQ ID NO: 1424537 - DNA, 15 bp, Homo sapiens
ctagaagcagtcctc

SEQ ID NO: 1424538 - DNA, 15 bp, Homo sapiens
tagaagcagtcctcc

SEQ ID NO: 1424539 - DNA, 15 bp, Homo sapiens
agaagcagtcctcct

SEQ ID NO: 1424540 - DNA, 15 bp, Homo sapiens
gaagcagtcctcctg

SEQ ID NO: 1424541 - DNA, 15 bp, Homo sapiens
aagcagtcctcctgc

SEQ ID NO: 1424542 - DNA, 15 bp, Homo sapiens
agcagtcctcctgcc

SEQ ID NO: 1424543 - DNA, 15 bp, Homo sapiens
gcagtcctcctgcct

SEQ ID NO: 1424544 - DNA, 15 bp, Homo sapiens
cagtcctcctgcctt

SEQ ID NO: 1424545 - DNA, 15 bp, Homo sapiens
agtcctcctgcctta

SEQ ID NO: 1424546 - DNA, 15 bp, Homo sapiens
gtcctcctgccttag

SEQ ID NO: 1424547 - DNA, 15 bp, Homo sapiens
tcctcctgccttagc

SEQ ID NO: 1424548 - DNA, 15 bp, Homo sapiens
cctcctgccttagcc

SEQ ID NO: 1424549 - DNA, 15 bp, Homo sapiens
ctcctgccttagccc

SEQ ID NO: 1424550 - DNA, 15 bp, Homo sapiens
tcctgccttagcccc

SEQ ID NO: 1424551 - DNA, 15 bp, Homo sapiens
cctgccttagccccc

SEQ ID NO: 1424552 - DNA, 15 bp, Homo sapiens
ctgccttagccccct

SEQ ID NO: 1424553 - DNA, 15 bp, Homo sapiens
tgccttagccccctt

SEQ ID NO: 1424554 - DNA, 15 bp, Homo sapiens
gccttagccccctta

SEQ ID NO: 1424555 - DNA, 15 bp, Homo sapiens
ccttagcccccttag

SEQ ID NO: 1424556 - DNA, 15 bp, Homo sapiens
cttagcccccttagt

SEQ ID NO: 1424557 - DNA, 15 bp, Homo sapiens
ttagcccccttagta

SEQ ID NO: 1424558 - DNA, 15 bp, Homo sapiens
tagcccccttagtag

SEQ ID NO: 1424559 - DNA, 15 bp, Homo sapiens
agcccccttagtagc

SEQ ID NO: 1424560 - DNA, 15 bp, Homo sapiens
gcccccttagtagct

SEQ ID NO: 1424561 - DNA, 15 bp, Homo sapiens
cccccttagtagctg

SEQ ID NO: 1424562 - DNA, 15 bp, Homo sapiens
ccccttagtagctgg

SEQ ID NO: 1424563 - DNA, 15 bp, Homo sapiens
cccttagtagctggg

SEQ ID NO: 1424564 - DNA, 15 bp, Homo sapiens
ccttagtagctggga

SEQ ID NO: 1424565 - DNA, 15 bp, Homo sapiens
cttagtagctgggat

SEQ ID NO: 1424566 - DNA, 15 bp, Homo sapiens
ttagtagctgggatt

SEQ ID NO: 1424567 - DNA, 15 bp, Homo sapiens
tagtagctgggatta

SEQ ID NO: 1424568 - DNA, 15 bp, Homo sapiens
attacaggcacgcgc

SEQ ID NO: 1424569 - DNA, 15 bp, Homo sapiens
ttacaggcacgcgcc

SEQ ID NO: 1424570 - DNA, 15 bp, Homo sapiens
tacaggcacgcgcca

SEQ ID NO: 1424571 - DNA, 15 bp, Homo sapiens
acaggcacgcgccac

SEQ ID NO: 1424572 - DNA, 15 bp, Homo sapiens
caggcacgcgccacc

SEQ ID NO: 1424573 - DNA, 15 bp, Homo sapiens
ggcacgcgccaccat

SEQ ID NO: 1424574 - DNA, 15 bp, Homo sapiens
gcacgcgccaccatg

SEQ ID NO: 1424575 - DNA, 15 bp, Homo sapiens
cacgcgccaccatgc

SEQ ID NO: 1424576 - DNA, 15 bp, Homo sapiens
acgcgccaccatgcc

SEQ ID NO: 1424577 - DNA, 15 bp, Homo sapiens
cgcgccaccatgcca

SEQ ID NO: 1424578 - DNA, 15 bp, Homo sapiens
gcgccaccatgccag

SEQ ID NO: 1424579 - DNA, 15 bp, Homo sapiens
cgccaccatgccagg

SEQ ID NO: 1424580 - DNA, 15 bp, Homo sapiens
gagacggggtttcat

SEQ ID NO: 1424581 - DNA, 15 bp, Homo sapiens
agacggggtttcatc

SEQ ID NO: 1424582 - DNA, 15 bp, Homo sapiens
gacggggtttcatca

SEQ ID NO: 1424583 - DNA, 15 bp, Homo sapiens
acggggtttcatcat

SEQ ID NO: 1424584 - DNA, 15 bp, Homo sapiens
cggggtttcatcatg

SEQ ID NO: 1424585 - DNA, 15 bp, Homo sapiens
gtctcgaactcctaa

SEQ ID NO: 1424586 - DNA, 15 bp, Homo sapiens
tctcgaactcctaac

SEQ ID NO: 1424587 - DNA, 15 bp, Homo sapiens
ctcgaactcctaacc

SEQ ID NO: 1424588 - DNA, 15 bp, Homo sapiens
tcgaactcctaacct

SEQ ID NO: 1424589 - DNA, 15 bp, Homo sapiens
cgaactcctaacctc

SEQ ID NO: 1424590 - DNA, 15 bp, Homo sapiens
gaactcctaacctca

SEQ ID NO: 1424591 - DNA, 15 bp, Homo sapiens
aacctcaggtgatcc

SEQ ID NO: 1424592 - DNA, 15 bp, Homo sapiens
ccacccacctcggct

SEQ ID NO: 1424593 - DNA, 15 bp, Homo sapiens
cacccacctcggctc

SEQ ID NO: 1424594 - DNA, 15 bp, Homo sapiens
acccacctcggctcc

SEQ ID NO: 1424595 - DNA, 15 bp, Homo sapiens
cccacctcggctccc

SEQ ID NO: 1424596 - DNA, 15 bp, Homo sapiens
ccacctcggctcccc

SEQ ID NO: 1424597 - DNA, 15 bp, Homo sapiens
cacctcggctcccca

SEQ ID NO: 1424598 - DNA, 15 bp, Homo sapiens
acctcggctccccaa

SEQ ID NO: 1424599 - DNA, 15 bp, Homo sapiens
cctcggctccccaaa

SEQ ID NO: 1424600 - DNA, 15 bp, Homo sapiens
ctcggctccccaaat

SEQ ID NO: 1424601 - DNA, 15 bp, Homo sapiens
tcggctccccaaatt

SEQ ID NO: 1424602 - DNA, 15 bp, Homo sapiens
cggctccccaaattg

SEQ ID NO: 1424603 - DNA, 15 bp, Homo sapiens
ggctccccaaattgc

SEQ ID NO: 1424604 - DNA, 15 bp, Homo sapiens
gctccccaaattgct

SEQ ID NO: 1424605 - DNA, 15 bp, Homo sapiens
ctccccaaattgctg

SEQ ID NO: 1424606 - DNA, 15 bp, Homo sapiens
tccccaaattgctgg

SEQ ID NO: 1424607 - DNA, 15 bp, Homo sapiens
ccccaaattgctggg

SEQ ID NO: 1424608 - DNA, 15 bp, Homo sapiens
cactgtgcccggccg

SEQ ID NO: 1424609 - DNA, 15 bp, Homo sapiens
actgtgcccggccgg

SEQ ID NO: 1424610 - DNA, 15 bp, Homo sapiens
ctgtgcccggccggt

SEQ ID NO: 1424611 - DNA, 15 bp, Homo sapiens
tgtgcccggccggta

SEQ ID NO: 1424612 - DNA, 15 bp, Homo sapiens
gtgcccggccggtaa

SEQ ID NO: 1424613 - DNA, 15 bp, Homo sapiens
tgcccggccggtaaa

SEQ ID NO: 1424614 - DNA, 15 bp, Homo sapiens
gcccggccggtaaaa

SEQ ID NO: 1424615 - DNA, 15 bp, Homo sapiens
cccggccggtaaaac

SEQ ID NO: 1424616 - DNA, 15 bp, Homo sapiens
ccggccggtaaaacc

SEQ ID NO: 1424617 - DNA, 15 bp, Homo sapiens
cggccggtaaaacca

SEQ ID NO: 1424618 - DNA, 15 bp, Homo sapiens
ggccggtaaaaccat

SEQ ID NO: 1424619 - DNA, 15 bp, Homo sapiens
gccggtaaaaccatt

SEQ ID NO: 1424620 - DNA, 15 bp, Homo sapiens
ccggtaaaaccattt

SEQ ID NO: 1424621 - DNA, 15 bp, Homo sapiens
cggtaaaaccatttt

SEQ ID NO: 1424622 - DNA, 15 bp, Homo sapiens
ggtaaaaccattttc

SEQ ID NO: 1424623 - DNA, 15 bp, Homo sapiens
gtaaaaccattttca

SEQ ID NO: 1424624 - DNA, 15 bp, Homo sapiens
taaaaccattttcat

SEQ ID NO: 1424625 - DNA, 15 bp, Homo sapiens
aaaaccattttcatt

SEQ ID NO: 1424626 - DNA, 15 bp, Homo sapiens
aaaccattttcattt

SEQ ID NO: 1424627 - DNA, 15 bp, Homo sapiens
aaccattttcattta

SEQ ID NO: 1424628 - DNA, 15 bp, Homo sapiens
accattttcatttat

SEQ ID NO: 1424629 - DNA, 15 bp, Homo sapiens
ccattttcatttatt

SEQ ID NO: 1424630 - DNA, 15 bp, Homo sapiens
cattttcatttattc

SEQ ID NO: 1424631 - DNA, 15 bp, Homo sapiens
attttcatttattct

SEQ ID NO: 1424632 - DNA, 15 bp, Homo sapiens
ttttcatttattctg

SEQ ID NO: 1424633 - DNA, 15 bp, Homo sapiens
tttcatttattctgg

SEQ ID NO: 1424634 - DNA, 15 bp, Homo sapiens
ttcatttattctggc

SEQ ID NO: 1424635 - DNA, 15 bp, Homo sapiens
tcatttattctggca

SEQ ID NO: 1424636 - DNA, 15 bp, Homo sapiens
catttattctggcaa

SEQ ID NO: 1424637 - DNA, 15 bp, Homo sapiens
atttattctggcaac

SEQ ID NO: 1424638 - DNA, 15 bp, Homo sapiens
tttattctggcaaca

SEQ ID NO: 1424639 - DNA, 15 bp, Homo sapiens
ttattctggcaacat

SEQ ID NO: 1424640 - DNA, 15 bp, Homo sapiens
tattctggcaacatc

SEQ ID NO: 1424641 - DNA, 15 bp, Homo sapiens
attctggcaacatct

SEQ ID NO: 1424642 - DNA, 15 bp, Homo sapiens
ttctggcaacatctc

SEQ ID NO: 1424643 - DNA, 15 bp, Homo sapiens
tctggcaacatctct

SEQ ID NO: 1424644 - DNA, 15 bp, Homo sapiens
ctggcaacatctctt

SEQ ID NO: 1424645 - DNA, 15 bp, Homo sapiens
tggcaacatctcttt

SEQ ID NO: 1424646 - DNA, 15 bp, Homo sapiens
ggcaacatctcttta

SEQ ID NO: 1424647 - DNA, 15 bp, Homo sapiens
gcaacatctctttat

SEQ ID NO: 1424648 - DNA, 15 bp, Homo sapiens
caacatctctttatt

SEQ ID NO: 1424649 - DNA, 15 bp, Homo sapiens
aacatctctttattg

SEQ ID NO: 1424650 - DNA, 15 bp, Homo sapiens
acatctctttattga

SEQ ID NO: 1424651 - DNA, 15 bp, Homo sapiens
catctctttattgag

SEQ ID NO: 1424652 - DNA, 15 bp, Homo sapiens
atctctttattgagc

SEQ ID NO: 1424653 - DNA, 15 bp, Homo sapiens
tctctttattgagca

SEQ ID NO: 1424654 - DNA, 15 bp, Homo sapiens
ctctttattgagcat

SEQ ID NO: 1424655 - DNA, 15 bp, Homo sapiens
tctttattgagcatt

SEQ ID NO: 1424656 - DNA, 15 bp, Homo sapiens
ctttattgagcattg

SEQ ID NO: 1424657 - DNA, 15 bp, Homo sapiens
tttattgagcattgt

SEQ ID NO: 1424658 - DNA, 15 bp, Homo sapiens
ttattgagcattgtg

SEQ ID NO: 1424659 - DNA, 15 bp, Homo sapiens
tattgagcattgtga

SEQ ID NO: 1424660 - DNA, 15 bp, Homo sapiens
attgagcattgtgaa

SEQ ID NO: 1424661 - DNA, 15 bp, Homo sapiens
ttgagcattgtgaat

SEQ ID NO: 1424662 - DNA, 15 bp, Homo sapiens
tgagcattgtgaata

SEQ ID NO: 1424663 - DNA, 15 bp, Homo sapiens
gagcattgtgaatat

SEQ ID NO: 1424664 - DNA, 15 bp, Homo sapiens
agcattgtgaatatg

SEQ ID NO: 1424665 - DNA, 15 bp, Homo sapiens
gcattgtgaatatgt

SEQ ID NO: 1424666 - DNA, 15 bp, Homo sapiens
cattgtgaatatgtt

SEQ ID NO: 1424667 - DNA, 15 bp, Homo sapiens
attgtgaatatgtta

SEQ ID NO: 1424668 - DNA, 15 bp, Homo sapiens
ttgtgaatatgttag

SEQ ID NO: 1424669 - DNA, 15 bp, Homo sapiens
tgtgaatatgttagt

SEQ ID NO: 1424670 - DNA, 15 bp, Homo sapiens
gtgaatatgttagtg

SEQ ID NO: 1424671 - DNA, 15 bp, Homo sapiens
tgaatatgttagtga

SEQ ID NO: 1424672 - DNA, 15 bp, Homo sapiens
gaatatgttagtgaa

SEQ ID NO: 1424673 - DNA, 15 bp, Homo sapiens
aatatgttagtgaat

SEQ ID NO: 1424674 - DNA, 15 bp, Homo sapiens
atatgttagtgaatg

SEQ ID NO: 1424675 - DNA, 15 bp, Homo sapiens
tatgttagtgaatgt

SEQ ID NO: 1424676 - DNA, 15 bp, Homo sapiens
atgttagtgaatgtg

SEQ ID NO: 1424677 - DNA, 15 bp, Homo sapiens
tgttagtgaatgtgc

SEQ ID NO: 1424678 - DNA, 15 bp, Homo sapiens
gttagtgaatgtgct

SEQ ID NO: 1424679 - DNA, 15 bp, Homo sapiens
ttagtgaatgtgcta

SEQ ID NO: 1424680 - DNA, 15 bp, Homo sapiens
tagtgaatgtgctag

SEQ ID NO: 1424681 - DNA, 15 bp, Homo sapiens
agtgaatgtgctaga

SEQ ID NO: 1424682 - DNA, 15 bp, Homo sapiens
gtgaatgtgctagat

SEQ ID NO: 1424683 - DNA, 15 bp, Homo sapiens
tgaatgtgctagatg

SEQ ID NO: 1424684 - DNA, 15 bp, Homo sapiens
gaatgtgctagatgc

SEQ ID NO: 1424685 - DNA, 15 bp, Homo sapiens
aatgtgctagatgct

SEQ ID NO: 1424686 - DNA, 15 bp, Homo sapiens
atgtgctagatgctc

SEQ ID NO: 1424687 - DNA, 15 bp, Homo sapiens
tgtgctagatgctca

SEQ ID NO: 1424688 - DNA, 15 bp, Homo sapiens
gtgctagatgctcat

SEQ ID NO: 1424689 - DNA, 15 bp, Homo sapiens
tgctagatgctcata

SEQ ID NO: 1424690 - DNA, 15 bp, Homo sapiens
gctagatgctcatag

SEQ ID NO: 1424691 - DNA, 15 bp, Homo sapiens
ctagatgctcataga

SEQ ID NO: 1424692 - DNA, 15 bp, Homo sapiens
tagatgctcatagat

SEQ ID NO: 1424693 - DNA, 15 bp, Homo sapiens
agatgctcatagatt

SEQ ID NO: 1424694 - DNA, 15 bp, Homo sapiens
gatgctcatagattt

SEQ ID NO: 1424695 - DNA, 15 bp, Homo sapiens
atgctcatagattta

SEQ ID NO: 1424696 - DNA, 15 bp, Homo sapiens
tgctcatagatttat

SEQ ID NO: 1424697 - DNA, 15 bp, Homo sapiens
gctcatagatttata

SEQ ID NO: 1424698 - DNA, 15 bp, Homo sapiens
ctcatagatttatat

SEQ ID NO: 1424699 - DNA, 15 bp, Homo sapiens
tcatagatttatata

SEQ ID NO: 1424700 - DNA, 15 bp, Homo sapiens
catagatttatataa

SEQ ID NO: 1424701 - DNA, 15 bp, Homo sapiens
atagatttatataaa

SEQ ID NO: 1424702 - DNA, 15 bp, Homo sapiens
tagatttatataaaa

SEQ ID NO: 1424703 - DNA, 15 bp, Homo sapiens
agatttatataaaaa

SEQ ID NO: 1424704 - DNA, 15 bp, Homo sapiens
gatttatataaaaag

SEQ ID NO: 1424705 - DNA, 15 bp, Homo sapiens
atttatataaaaagt

SEQ ID NO: 1424706 - DNA, 15 bp, Homo sapiens
tttatataaaaagtt

SEQ ID NO: 1424707 - DNA, 15 bp, Homo sapiens
ttatataaaaagtta

SEQ ID NO: 1424708 - DNA, 15 bp, Homo sapiens
tatataaaaagttag

SEQ ID NO: 1424709 - DNA, 15 bp, Homo sapiens
atataaaaagttagt

SEQ ID NO: 1424710 - DNA, 15 bp, Homo sapiens
tataaaaagttagtg

SEQ ID NO: 1424711 - DNA, 15 bp, Homo sapiens
ataaaaagttagtga

SEQ ID NO: 1424712 - DNA, 15 bp, Homo sapiens
taaaaagttagtgaa

SEQ ID NO: 1424713 - DNA, 15 bp, Homo sapiens
aaaaagttagtgaag

SEQ ID NO: 1424714 - DNA, 15 bp, Homo sapiens
aaaagttagtgaaga

SEQ ID NO: 1424715 - DNA, 15 bp, Homo sapiens
aaagttagtgaagaa

SEQ ID NO: 1424716 - DNA, 15 bp, Homo sapiens
aagttagtgaagaag

SEQ ID NO: 1424717 - DNA, 15 bp, Homo sapiens
agttagtgaagaagg

SEQ ID NO: 1424718 - DNA, 15 bp, Homo sapiens
gttagtgaagaagga

SEQ ID NO: 1424719 - DNA, 15 bp, Homo sapiens
ttagtgaagaaggaa

SEQ ID NO: 1424720 - DNA, 15 bp, Homo sapiens
tagtgaagaaggaaa

SEQ ID NO: 1424721 - DNA, 15 bp, Homo sapiens
agtgaagaaggaaag

SEQ ID NO: 1424722 - DNA, 15 bp, Homo sapiens
gtgaagaaggaaaga

SEQ ID NO: 1424723 - DNA, 15 bp, Homo sapiens
tgaagaaggaaagat

SEQ ID NO: 1424724 - DNA, 15 bp, Homo sapiens
gaagaaggaaagatg

SEQ ID NO: 1424725 - DNA, 15 bp, Homo sapiens
aagaaggaaagatgg

SEQ ID NO: 1424726 - DNA, 15 bp, Homo sapiens
agaaggaaagatggt

SEQ ID NO: 1424727 - DNA, 15 bp, Homo sapiens
gaaggaaagatggta

SEQ ID NO: 1424728 - DNA, 15 bp, Homo sapiens
aaggaaagatggtat

SEQ ID NO: 1424729 - DNA, 15 bp, Homo sapiens
aggaaagatggtata

SEQ ID NO: 1424730 - DNA, 15 bp, Homo sapiens
ggaaagatggtatat

SEQ ID NO: 1424731 - DNA, 15 bp, Homo sapiens
gaaagatggtatatt

SEQ ID NO: 1424732 - DNA, 15 bp, Homo sapiens
aaagatggtatatta

SEQ ID NO: 1424733 - DNA, 15 bp, Homo sapiens
aagatggtatattaa

SEQ ID NO: 1424734 - DNA, 15 bp, Homo sapiens
agatggtatattaag

SEQ ID NO: 1424735 - DNA, 15 bp, Homo sapiens
gatggtatattaagt

SEQ ID NO: 1424736 - DNA, 15 bp, Homo sapiens
atggtatattaagtg

SEQ ID NO: 1424737 - DNA, 15 bp, Homo sapiens
tggtatattaagtgg

SEQ ID NO: 1424738 - DNA, 15 bp, Homo sapiens
ggtatattaagtggt

SEQ ID NO: 1424739 - DNA, 15 bp, Homo sapiens
gtatattaagtggtt

SEQ ID NO: 1424740 - DNA, 15 bp, Homo sapiens
tatattaagtggtta

SEQ ID NO: 1424741 - DNA, 15 bp, Homo sapiens
atattaagtggttag

SEQ ID NO: 1424742 - DNA, 15 bp, Homo sapiens
tattaagtggttaga

SEQ ID NO: 1424743 - DNA, 15 bp, Homo sapiens
attaagtggttagac

SEQ ID NO: 1424744 - DNA, 15 bp, Homo sapiens
ttaagtggttagaca

SEQ ID NO: 1424745 - DNA, 15 bp, Homo sapiens
taagtggttagacaa

SEQ ID NO: 1424746 - DNA, 15 bp, Homo sapiens
aagtggttagacaag

SEQ ID NO: 1424747 - DNA, 15 bp, Homo sapiens
agtggttagacaagt

SEQ ID NO: 1424748 - DNA, 15 bp, Homo sapiens
gtggttagacaagtg

SEQ ID NO: 1424749 - DNA, 15 bp, Homo sapiens
tggttagacaagtgt

SEQ ID NO: 1424750 - DNA, 15 bp, Homo sapiens
ggttagacaagtgtt

SEQ ID NO: 1424751 - DNA, 15 bp, Homo sapiens
gttagacaagtgttc

SEQ ID NO: 1424752 - DNA, 15 bp, Homo sapiens
ttagacaagtgttct

SEQ ID NO: 1424753 - DNA, 15 bp, Homo sapiens
tagacaagtgttcta

SEQ ID NO: 1424754 - DNA, 15 bp, Homo sapiens
agacaagtgttctaa

SEQ ID NO: 1424755 - DNA, 15 bp, Homo sapiens
gacaagtgttctaat

SEQ ID NO: 1424756 - DNA, 15 bp, Homo sapiens
acaagtgttctaatc

SEQ ID NO: 1424757 - DNA, 15 bp, Homo sapiens
caagtgttctaatca

SEQ ID NO: 1424758 - DNA, 15 bp, Homo sapiens
aagtgttctaatcag

SEQ ID NO: 1424759 - DNA, 15 bp, Homo sapiens
agtgttctaatcagt

SEQ ID NO: 1424760 - DNA, 15 bp, Homo sapiens
gtgttctaatcagtt

SEQ ID NO: 1424761 - DNA, 15 bp, Homo sapiens
tgttctaatcagtta

SEQ ID NO: 1424762 - DNA, 15 bp, Homo sapiens
gttctaatcagttag

SEQ ID NO: 1424763 - DNA, 15 bp, Homo sapiens
ttctaatcagttaga

SEQ ID NO: 1424764 - DNA, 15 bp, Homo sapiens
tctaatcagttagag

SEQ ID NO: 1424765 - DNA, 15 bp, Homo sapiens
ctaatcagttagagt

SEQ ID NO: 1424766 - DNA, 15 bp, Homo sapiens
taatcagttagagtt

SEQ ID NO: 1424767 - DNA, 15 bp, Homo sapiens
aatcagttagagttc

SEQ ID NO: 1424768 - DNA, 15 bp, Homo sapiens
atcagttagagttca

SEQ ID NO: 1424769 - DNA, 15 bp, Homo sapiens
tcagttagagttcag

SEQ ID NO: 1424770 - DNA, 15 bp, Homo sapiens
cagttagagttcaga

SEQ ID NO: 1424771 - DNA, 15 bp, Homo sapiens
agttagagttcagag

SEQ ID NO: 1424772 - DNA, 15 bp, Homo sapiens
gttagagttcagaga

SEQ ID NO: 1424773 - DNA, 15 bp, Homo sapiens
ttagagttcagagaa

SEQ ID NO: 1424774 - DNA, 15 bp, Homo sapiens
tagagttcagagaag

SEQ ID NO: 1424775 - DNA, 15 bp, Homo sapiens
agagttcagagaagg

SEQ ID NO: 1424776 - DNA, 15 bp, Homo sapiens
gagttcagagaaggt

SEQ ID NO: 1424777 - DNA, 15 bp, Homo sapiens
agttcagagaaggtc

SEQ ID NO: 1424778 - DNA, 15 bp, Homo sapiens
gttcagagaaggtca

SEQ ID NO: 1424779 - DNA, 15 bp, Homo sapiens
ttcagagaaggtcag

SEQ ID NO: 1424780 - DNA, 15 bp, Homo sapiens
tcagagaaggtcagg

SEQ ID NO: 1424781 - DNA, 15 bp, Homo sapiens
cagagaaggtcaggg

SEQ ID NO: 1424782 - DNA, 15 bp, Homo sapiens
agagaaggtcagggt

SEQ ID NO: 1424783 - DNA, 15 bp, Homo sapiens
gagaaggtcagggta

SEQ ID NO: 1424784 - DNA, 15 bp, Homo sapiens
agaaggtcagggtac

SEQ ID NO: 1424785 - DNA, 15 bp, Homo sapiens
gaaggtcagggtacc

SEQ ID NO: 1424786 - DNA, 15 bp, Homo sapiens
aaggtcagggtacct

SEQ ID NO: 1424787 - DNA, 15 bp, Homo sapiens
aggtcagggtacctg

SEQ ID NO: 1424788 - DNA, 15 bp, Homo sapiens
ggtcagggtacctga

SEQ ID NO: 1424789 - DNA, 15 bp, Homo sapiens
gtcagggtacctgat

SEQ ID NO: 1424790 - DNA, 15 bp, Homo sapiens
tcagggtacctgata

SEQ ID NO: 1424791 - DNA, 15 bp, Homo sapiens
cagggtacctgatat

SEQ ID NO: 1424792 - DNA, 15 bp, Homo sapiens
agggtacctgatata

SEQ ID NO: 1424793 - DNA, 15 bp, Homo sapiens
gggtacctgatataa

SEQ ID NO: 1424794 - DNA, 15 bp, Homo sapiens
ggtacctgatataat

SEQ ID NO: 1424795 - DNA, 15 bp, Homo sapiens
gtacctgatataatc

SEQ ID NO: 1424796 - DNA, 15 bp, Homo sapiens
tacctgatataatca

SEQ ID NO: 1424797 - DNA, 15 bp, Homo sapiens
acctgatataatcaa

SEQ ID NO: 1424798 - DNA, 15 bp, Homo sapiens
cctgatataatcaag

SEQ ID NO: 1424799 - DNA, 15 bp, Homo sapiens
ctgatataatcaaga

SEQ ID NO: 1424800 - DNA, 15 bp, Homo sapiens
tgatataatcaagag

SEQ ID NO: 1424801 - DNA, 15 bp, Homo sapiens
gatataatcaagaga

SEQ ID NO: 1424802 - DNA, 15 bp, Homo sapiens
atataatcaagagag

SEQ ID NO: 1424803 - DNA, 15 bp, Homo sapiens
tataatcaagagaga

SEQ ID NO: 1424804 - DNA, 15 bp, Homo sapiens
ataatcaagagagag

SEQ ID NO: 1424805 - DNA, 15 bp, Homo sapiens
taatcaagagagaga

SEQ ID NO: 1424806 - DNA, 15 bp, Homo sapiens
aatcaagagagagac

SEQ ID NO: 1424807 - DNA, 15 bp, Homo sapiens
atcaagagagagacc

SEQ ID NO: 1424808 - DNA, 15 bp, Homo sapiens
tcaagagagagacct

SEQ ID NO: 1424809 - DNA, 15 bp, Homo sapiens
caagagagagacctt

SEQ ID NO: 1424810 - DNA, 15 bp, Homo sapiens
aagagagagacctta

SEQ ID NO: 1424811 - DNA, 15 bp, Homo sapiens
agagagagaccttac

SEQ ID NO: 1424812 - DNA, 15 bp, Homo sapiens
gagagagaccttaca

SEQ ID NO: 1424813 - DNA, 15 bp, Homo sapiens
agagagaccttacag

SEQ ID NO: 1424814 - DNA, 15 bp, Homo sapiens
gagagaccttacagc

SEQ ID NO: 1424815 - DNA, 15 bp, Homo sapiens
agagaccttacagcc

SEQ ID NO: 1424816 - DNA, 15 bp, Homo sapiens
gagaccttacagcca

SEQ ID NO: 1424817 - DNA, 15 bp, Homo sapiens
agaccttacagccag

SEQ ID NO: 1424818 - DNA, 15 bp, Homo sapiens
gaccttacagccagg

SEQ ID NO: 1424819 - DNA, 15 bp, Homo sapiens
accttacagccaggt

SEQ ID NO: 1424820 - DNA, 15 bp, Homo sapiens
ccttacagccaggtg

SEQ ID NO: 1424821 - DNA, 15 bp, Homo sapiens
cttacagccaggtga

SEQ ID NO: 1424822 - DNA, 15 bp, Homo sapiens
ttacagccaggtgag

SEQ ID NO: 1424823 - DNA, 15 bp, Homo sapiens
tacagccaggtgagg

SEQ ID NO: 1424824 - DNA, 15 bp, Homo sapiens
acagccaggtgaggt

SEQ ID NO: 1424825 - DNA, 15 bp, Homo sapiens
cagccaggtgaggtg

SEQ ID NO: 1424826 - DNA, 15 bp, Homo sapiens
agccaggtgaggtga

SEQ ID NO: 1424827 - DNA, 15 bp, Homo sapiens
gccaggtgaggtgaa

SEQ ID NO: 1424828 - DNA, 15 bp, Homo sapiens
ccaggtgaggtgaat

SEQ ID NO: 1424829 - DNA, 15 bp, Homo sapiens
caggtgaggtgaatg

SEQ ID NO: 1424830 - DNA, 15 bp, Homo sapiens
aggtgaggtgaatgt

SEQ ID NO: 1424831 - DNA, 15 bp, Homo sapiens
ggtgaggtgaatgta

SEQ ID NO: 1424832 - DNA, 15 bp, Homo sapiens
gtgaggtgaatgtac

SEQ ID NO: 1424833 - DNA, 15 bp, Homo sapiens
tgaggtgaatgtacc

SEQ ID NO: 1424834 - DNA, 15 bp, Homo sapiens
gaggtgaatgtacct

SEQ ID NO: 1424835 - DNA, 15 bp, Homo sapiens
aggtgaatgtaccta

SEQ ID NO: 1424836 - DNA, 15 bp, Homo sapiens
ggtgaatgtacctat

SEQ ID NO: 1424837 - DNA, 15 bp, Homo sapiens
gtgaatgtacctata

SEQ ID NO: 1424838 - DNA, 15 bp, Homo sapiens
tgaatgtacctataa

SEQ ID NO: 1424839 - DNA, 15 bp, Homo sapiens
gaatgtacctataat

SEQ ID NO: 1424840 - DNA, 15 bp, Homo sapiens
aatgtacctataatc

SEQ ID NO: 1424841 - DNA, 15 bp, Homo sapiens
atgtacctataatcc

SEQ ID NO: 1424842 - DNA, 15 bp, Homo sapiens
tgtacctataatccc

SEQ ID NO: 1424843 - DNA, 15 bp, Homo sapiens
cacagtaccagcatt

SEQ ID NO: 1424844 - DNA, 15 bp, Homo sapiens
acagtaccagcattc

SEQ ID NO: 1424845 - DNA, 15 bp, Homo sapiens
cagtaccagcattca

SEQ ID NO: 1424846 - DNA, 15 bp, Homo sapiens
agtaccagcattcat

SEQ ID NO: 1424847 - DNA, 15 bp, Homo sapiens
gtaccagcattcatt

SEQ ID NO: 1424848 - DNA, 15 bp, Homo sapiens
taccagcattcattt

SEQ ID NO: 1424849 - DNA, 15 bp, Homo sapiens
accagcattcatttt

SEQ ID NO: 1424850 - DNA, 15 bp, Homo sapiens
ccagcattcattttt

SEQ ID NO: 1424851 - DNA, 15 bp, Homo sapiens
cagcattcatttttc

SEQ ID NO: 1424852 - DNA, 15 bp, Homo sapiens
agcattcatttttca

SEQ ID NO: 1424853 - DNA, 15 bp, Homo sapiens
gcattcatttttcaa

SEQ ID NO: 1424854 - DNA, 15 bp, Homo sapiens
cattcatttttcaaa

SEQ ID NO: 1424855 - DNA, 15 bp, Homo sapiens
attcatttttcaaaa

SEQ ID NO: 1424856 - DNA, 15 bp, Homo sapiens
ttcatttttcaaaag

SEQ ID NO: 1424857 - DNA, 15 bp, Homo sapiens
tcatttttcaaaaga

SEQ ID NO: 1424858 - DNA, 15 bp, Homo sapiens
catttttcaaaagat

SEQ ID NO: 1424859 - DNA, 15 bp, Homo sapiens
atttttcaaaagata

SEQ ID NO: 1424860 - DNA, 15 bp, Homo sapiens
tttttcaaaagatat

SEQ ID NO: 1424861 - DNA, 15 bp, Homo sapiens
ttttcaaaagatata

SEQ ID NO: 1424862 - DNA, 15 bp, Homo sapiens
tttcaaaagatatag

SEQ ID NO: 1424863 - DNA, 15 bp, Homo sapiens
ttcaaaagatataga

SEQ ID NO: 1424864 - DNA, 15 bp, Homo sapiens
tcaaaagatatagag

SEQ ID NO: 1424865 - DNA, 15 bp, Homo sapiens
caaaagatatagagc

SEQ ID NO: 1424866 - DNA, 15 bp, Homo sapiens
aaaagatatagagct

SEQ ID NO: 1424867 - DNA, 15 bp, Homo sapiens
aaagatatagagcta

SEQ ID NO: 1424868 - DNA, 15 bp, Homo sapiens
aagatatagagctaa

SEQ ID NO: 1424869 - DNA, 15 bp, Homo sapiens
agatatagagctaaa

SEQ ID NO: 1424870 - DNA, 15 bp, Homo sapiens
gatatagagctaaaa

SEQ ID NO: 1424871 - DNA, 15 bp, Homo sapiens
atatagagctaaaaa

SEQ ID NO: 1424872 - DNA, 15 bp, Homo sapiens
tatagagctaaaaag

SEQ ID NO: 1424873 - DNA, 15 bp, Homo sapiens
atagagctaaaaagg

SEQ ID NO: 1424874 - DNA, 15 bp, Homo sapiens
tagagctaaaaagga

SEQ ID NO: 1424875 - DNA, 15 bp, Homo sapiens
agagctaaaaaggaa

SEQ ID NO: 1424876 - DNA, 15 bp, Homo sapiens
gagctaaaaaggaag

SEQ ID NO: 1424877 - DNA, 15 bp, Homo sapiens
agctaaaaaggaagg

SEQ ID NO: 1424878 - DNA, 15 bp, Homo sapiens
gctaaaaaggaagga

SEQ ID NO: 1424879 - DNA, 15 bp, Homo sapiens
ctaaaaaggaaggaa

SEQ ID NO: 1424880 - DNA, 15 bp, Homo sapiens
taaaaaggaaggaaa

SEQ ID NO: 1424881 - DNA, 15 bp, Homo sapiens
aaaaggaaggaaaaa

SEQ ID NO: 1424882 - DNA, 15 bp, Homo sapiens
aaaggaaggaaaaaa

SEQ ID NO: 1424883 - DNA, 15 bp, Homo sapiens
aaggaaggaaaaaaa

SEQ ID NO: 1424884 - DNA, 15 bp, Homo sapiens
ggaaggaaaaaaaaa

SEQ ID NO: 1424885 - DNA, 15 bp, Homo sapiens
gaaggaaaaaaaaag

SEQ ID NO: 1424886 - DNA, 15 bp, Homo sapiens
aggaaaaaaaaagta

SEQ ID NO: 1424887 - DNA, 15 bp, Homo sapiens
ggaaaaaaaaagtaa

SEQ ID NO: 1424888 - DNA, 15 bp, Homo sapiens
gaaaaaaaaagtaat

SEQ ID NO: 1424889 - DNA, 15 bp, Homo sapiens
aaaaaaaaagtaatg

SEQ ID NO: 1424890 - DNA, 15 bp, Homo sapiens
aaaaaaaagtaatgt

SEQ ID NO: 1424891 - DNA, 15 bp, Homo sapiens
aaaaaaagtaatgtt

SEQ ID NO: 1424892 - DNA, 15 bp, Homo sapiens
aaaaaagtaatgttg

SEQ ID NO: 1424893 - DNA, 15 bp, Homo sapiens
aaaaagtaatgttgg

SEQ ID NO: 1424894 - DNA, 15 bp, Homo sapiens
aaaagtaatgttggg

SEQ ID NO: 1424895 - DNA, 15 bp, Homo sapiens
aaagtaatgttgggc

SEQ ID NO: 1424896 - DNA, 15 bp, Homo sapiens
aagtaatgttgggct

SEQ ID NO: 1424897 - DNA, 15 bp, Homo sapiens
agtaatgttgggctt

SEQ ID NO: 1424898 - DNA, 15 bp, Homo sapiens
gtaatgttgggcttt

SEQ ID NO: 1424899 - DNA, 15 bp, Homo sapiens
taatgttgggctttt

SEQ ID NO: 1424900 - DNA, 15 bp, Homo sapiens
aatgttgggctttta

SEQ ID NO: 1424901 - DNA, 15 bp, Homo sapiens
atgttgggcttttaa

SEQ ID NO: 1424902 - DNA, 15 bp, Homo sapiens
tgttgggcttttaaa

SEQ ID NO: 1424903 - DNA, 15 bp, Homo sapiens
gttgggcttttaaat

SEQ ID NO: 1424904 - DNA, 15 bp, Homo sapiens
ttgggcttttaaata

SEQ ID NO: 1424905 - DNA, 15 bp, Homo sapiens
tgggcttttaaatac

SEQ ID NO: 1424906 - DNA, 15 bp, Homo sapiens
gggcttttaaatact

SEQ ID NO: 1424907 - DNA, 15 bp, Homo sapiens
ggcttttaaatactc

SEQ ID NO: 1424908 - DNA, 15 bp, Homo sapiens
gcttttaaatactcg

SEQ ID NO: 1424909 - DNA, 15 bp, Homo sapiens
cttttaaatactcgt

SEQ ID NO: 1424910 - DNA, 15 bp, Homo sapiens
ttttaaatactcgtt

SEQ ID NO: 1424911 - DNA, 15 bp, Homo sapiens
tttaaatactcgttc

SEQ ID NO: 1424912 - DNA, 15 bp, Homo sapiens
ttaaatactcgttcc

SEQ ID NO: 1424913 - DNA, 15 bp, Homo sapiens
taaatactcgttcct

SEQ ID NO: 1424914 - DNA, 15 bp, Homo sapiens
aaatactcgttccta

SEQ ID NO: 1424915 - DNA, 15 bp, Homo sapiens
aatactcgttcctat

SEQ ID NO: 1424916 - DNA, 15 bp, Homo sapiens
atactcgttcctata

SEQ ID NO: 1424917 - DNA, 15 bp, Homo sapiens
tactcgttcctatac

SEQ ID NO: 1424918 - DNA, 15 bp, Homo sapiens
actcgttcctatact

SEQ ID NO: 1424919 - DNA, 15 bp, Homo sapiens
ctcgttcctatacta

SEQ ID NO: 1424920 - DNA, 15 bp, Homo sapiens
tcgttcctatactaa

SEQ ID NO: 1424921 - DNA, 15 bp, Homo sapiens
cgttcctatactaaa

SEQ ID NO: 1424922 - DNA, 15 bp, Homo sapiens
gttcctatactaaat

SEQ ID NO: 1424923 - DNA, 15 bp, Homo sapiens
ttcctatactaaatg

SEQ ID NO: 1424924 - DNA, 15 bp, Homo sapiens
tcctatactaaatgt

SEQ ID NO: 1424925 - DNA, 15 bp, Homo sapiens
cctatactaaatgtt

SEQ ID NO: 1424926 - DNA, 15 bp, Homo sapiens
ctatactaaatgttc

SEQ ID NO: 1424927 - DNA, 15 bp, Homo sapiens
tatactaaatgttct

SEQ ID NO: 1424928 - DNA, 15 bp, Homo sapiens
atactaaatgttctt

SEQ ID NO: 1424929 - DNA, 15 bp, Homo sapiens
tactaaatgttctta

SEQ ID NO: 1424930 - DNA, 15 bp, Homo sapiens
actaaatgttcttag

SEQ ID NO: 1424931 - DNA, 15 bp, Homo sapiens
ctaaatgttcttagg

SEQ ID NO: 1424932 - DNA, 15 bp, Homo sapiens
taaatgttcttagga

SEQ ID NO: 1424933 - DNA, 15 bp, Homo sapiens
aaatgttcttaggag

SEQ ID NO: 1424934 - DNA, 15 bp, Homo sapiens
aatgttcttaggagt

SEQ ID NO: 1424935 - DNA, 15 bp, Homo sapiens
atgttcttaggagtg

SEQ ID NO: 1424936 - DNA, 15 bp, Homo sapiens
tgttcttaggagtgc

SEQ ID NO: 1424937 - DNA, 15 bp, Homo sapiens
gttcttaggagtgct

SEQ ID NO: 1424938 - DNA, 15 bp, Homo sapiens
ttcttaggagtgctg

SEQ ID NO: 1424939 - DNA, 15 bp, Homo sapiens
tcttaggagtgctgg

SEQ ID NO: 1424940 - DNA, 15 bp, Homo sapiens
cttaggagtgctggg

SEQ ID NO: 1424941 - DNA, 15 bp, Homo sapiens
ttaggagtgctgggg

SEQ ID NO: 1424942 - DNA, 15 bp, Homo sapiens
taggagtgctggggt

SEQ ID NO: 1424943 - DNA, 15 bp, Homo sapiens
aggagtgctggggtt

SEQ ID NO: 1424944 - DNA, 15 bp, Homo sapiens
ggagtgctggggttt

SEQ ID NO: 1424945 - DNA, 15 bp, Homo sapiens
gagtgctggggtttt

SEQ ID NO: 1424946 - DNA, 15 bp, Homo sapiens
agtgctggggtttta

SEQ ID NO: 1424947 - DNA, 15 bp, Homo sapiens
gtgctggggttttat

SEQ ID NO: 1424948 - DNA, 15 bp, Homo sapiens
tgctggggttttatt

SEQ ID NO: 1424949 - DNA, 15 bp, Homo sapiens
gctggggttttattg

SEQ ID NO: 1424950 - DNA, 15 bp, Homo sapiens
ctggggttttattgt

SEQ ID NO: 1424951 - DNA, 15 bp, Homo sapiens
tggggttttattgtc

SEQ ID NO: 1424952 - DNA, 15 bp, Homo sapiens
ggggttttattgtca

SEQ ID NO: 1424953 - DNA, 15 bp, Homo sapiens
gggttttattgtcat

SEQ ID NO: 1424954 - DNA, 15 bp, Homo sapiens
ggttttattgtcatc

SEQ ID NO: 1424955 - DNA, 15 bp, Homo sapiens
gttttattgtcatca

SEQ ID NO: 1424956 - DNA, 15 bp, Homo sapiens
ttttattgtcatcat

SEQ ID NO: 1424957 - DNA, 15 bp, Homo sapiens
tttattgtcatcatt

SEQ ID NO: 1424958 - DNA, 15 bp, Homo sapiens
ttattgtcatcattt

SEQ ID NO: 1424959 - DNA, 15 bp, Homo sapiens
tattgtcatcattta

SEQ ID NO: 1424960 - DNA, 15 bp, Homo sapiens
attgtcatcatttat

SEQ ID NO: 1424961 - DNA, 15 bp, Homo sapiens
ttgtcatcatttatc

SEQ ID NO: 1424962 - DNA, 15 bp, Homo sapiens
tgtcatcatttatcc

SEQ ID NO: 1424963 - DNA, 15 bp, Homo sapiens
gtcatcatttatcct

SEQ ID NO: 1424964 - DNA, 15 bp, Homo sapiens
tcatcatttatcctt

SEQ ID NO: 1424965 - DNA, 15 bp, Homo sapiens
catcatttatccttt

SEQ ID NO: 1424966 - DNA, 15 bp, Homo sapiens
atcatttatcctttt

SEQ ID NO: 1424967 - DNA, 15 bp, Homo sapiens
tcatttatccttttt

SEQ ID NO: 1424968 - DNA, 15 bp, Homo sapiens
catttatccttttta

SEQ ID NO: 1424969 - DNA, 15 bp, Homo sapiens
atttatcctttttaa

SEQ ID NO: 1424970 - DNA, 15 bp, Homo sapiens
tttatcctttttaaa

SEQ ID NO: 1424971 - DNA, 15 bp, Homo sapiens
ttatcctttttaaaa

SEQ ID NO: 1424972 - DNA, 15 bp, Homo sapiens
tatcctttttaaaaa

SEQ ID NO: 1424973 - DNA, 15 bp, Homo sapiens
atcctttttaaaaat

SEQ ID NO: 1424974 - DNA, 15 bp, Homo sapiens
ctttttaaaaatgtt

SEQ ID NO: 1424975 - DNA, 15 bp, Homo sapiens
tttttaaaaatgtta

SEQ ID NO: 1424976 - DNA, 15 bp, Homo sapiens
ttttaaaaatgttat

SEQ ID NO: 1424977 - DNA, 15 bp, Homo sapiens
tttaaaaatgttatt

SEQ ID NO: 1424978 - DNA, 15 bp, Homo sapiens
ttaaaaatgttattg

SEQ ID NO: 1424979 - DNA, 15 bp, Homo sapiens
taaaaatgttattgg

SEQ ID NO: 1424980 - DNA, 15 bp, Homo sapiens
aaaaatgttattggc

SEQ ID NO: 1424981 - DNA, 15 bp, Homo sapiens
aaaatgttattggcc

SEQ ID NO: 1424982 - DNA, 15 bp, Homo sapiens
aaatgttattggcca

SEQ ID NO: 1424983 - DNA, 15 bp, Homo sapiens
aatgttattggccag

SEQ ID NO: 1424984 - DNA, 15 bp, Homo sapiens
atgttattggccagg

SEQ ID NO: 1424985 - DNA, 15 bp, Homo sapiens
tgttattggccaggc

SEQ ID NO: 1424986 - DNA, 15 bp, Homo sapiens
gttattggccaggca

SEQ ID NO: 1424987 - DNA, 15 bp, Homo sapiens
ttattggccaggcac

SEQ ID NO: 1424988 - DNA, 15 bp, Homo sapiens
tattggccaggcacg

SEQ ID NO: 1424989 - DNA, 15 bp, Homo sapiens
attggccaggcacgg

SEQ ID NO: 1424990 - DNA, 15 bp, Homo sapiens
gtgagaccagcctgg

SEQ ID NO: 1424991 - DNA, 15 bp, Homo sapiens
acatggcgaaacctg

SEQ ID NO: 1424992 - DNA, 15 bp, Homo sapiens
catggcgaaacctgt

SEQ ID NO: 1424993 - DNA, 15 bp, Homo sapiens
atggcgaaacctgtc

SEQ ID NO: 1424994 - DNA, 15 bp, Homo sapiens
tggcgaaacctgtct

SEQ ID NO: 1424995 - DNA, 15 bp, Homo sapiens
ggcgaaacctgtctc

SEQ ID NO: 1424996 - DNA, 15 bp, Homo sapiens
gcgaaacctgtctct

SEQ ID NO: 1424997 - DNA, 15 bp, Homo sapiens
cgaaacctgtctcta

SEQ ID NO: 1424998 - DNA, 15 bp, Homo sapiens
gaaacctgtctctac

SEQ ID NO: 1424999 - DNA, 15 bp, Homo sapiens
aaaaattaactaggc

SEQ ID NO: 1425000 - DNA, 15 bp, Homo sapiens
aaaattaactaggcg

SEQ ID NO: 1425001 - DNA, 15 bp, Homo sapiens
aaattaactaggcgt

SEQ ID NO: 1425002 - DNA, 15 bp, Homo sapiens
aattaactaggcgtg

SEQ ID NO: 1425003 - DNA, 15 bp, Homo sapiens
attaactaggcgtgg

SEQ ID NO: 1425004 - DNA, 15 bp, Homo sapiens
ttaactaggcgtggt

SEQ ID NO: 1425005 - DNA, 15 bp, Homo sapiens
taactaggcgtggtg

SEQ ID NO: 1425006 - DNA, 15 bp, Homo sapiens
aactaggcgtggtgg

SEQ ID NO: 1425007 - DNA, 15 bp, Homo sapiens
actaggcgtggtggt

SEQ ID NO: 1425008 - DNA, 15 bp, Homo sapiens
ctaggcgtggtggtg

SEQ ID NO: 1425009 - DNA, 15 bp, Homo sapiens
taggcgtggtggtgt

SEQ ID NO: 1425010 - DNA, 15 bp, Homo sapiens
aggcgtggtggtgta

SEQ ID NO: 1425011 - DNA, 15 bp, Homo sapiens
ggcgtggtggtgtac

SEQ ID NO: 1425012 - DNA, 15 bp, Homo sapiens
gcgtggtggtgtacg

SEQ ID NO: 1425013 - DNA, 15 bp, Homo sapiens
cgtggtggtgtacgc

SEQ ID NO: 1425014 - DNA, 15 bp, Homo sapiens
gtggtggtgtacgcc

SEQ ID NO: 1425015 - DNA, 15 bp, Homo sapiens
tggtggtgtacgcct

SEQ ID NO: 1425016 - DNA, 15 bp, Homo sapiens
ggtggtgtacgcctg

SEQ ID NO: 1425017 - DNA, 15 bp, Homo sapiens
gtggtgtacgcctgt

SEQ ID NO: 1425018 - DNA, 15 bp, Homo sapiens
tggtgtacgcctgta

SEQ ID NO: 1425019 - DNA, 15 bp, Homo sapiens
ggtgtacgcctgtag

SEQ ID NO: 1425020 - DNA, 15 bp, Homo sapiens
gtgtacgcctgtagt

SEQ ID NO: 1425021 - DNA, 15 bp, Homo sapiens
tgtacgcctgtagtc

SEQ ID NO: 1425022 - DNA, 15 bp, Homo sapiens
gtacgcctgtagtcc

SEQ ID NO: 1425023 - DNA, 15 bp, Homo sapiens
tacgcctgtagtccc

SEQ ID NO: 1425024 - DNA, 15 bp, Homo sapiens
aggcaggagaatcaa

SEQ ID NO: 1425025 - DNA, 15 bp, Homo sapiens
ggcaggagaatcaac

SEQ ID NO: 1425026 - DNA, 15 bp, Homo sapiens
gcaggagaatcaact

SEQ ID NO: 1425027 - DNA, 15 bp, Homo sapiens
caggagaatcaactg

SEQ ID NO: 1425028 - DNA, 15 bp, Homo sapiens
aggagaatcaactga

SEQ ID NO: 1425029 - DNA, 15 bp, Homo sapiens
ggagaatcaactgaa

SEQ ID NO: 1425030 - DNA, 15 bp, Homo sapiens
gagaatcaactgaac

SEQ ID NO: 1425031 - DNA, 15 bp, Homo sapiens
agaatcaactgaacc

SEQ ID NO: 1425032 - DNA, 15 bp, Homo sapiens
gaatcaactgaacca

SEQ ID NO: 1425033 - DNA, 15 bp, Homo sapiens
aatcaactgaaccag

SEQ ID NO: 1425034 - DNA, 15 bp, Homo sapiens
atcaactgaaccagg

SEQ ID NO: 1425035 - DNA, 15 bp, Homo sapiens
tcaactgaaccaggg

SEQ ID NO: 1425036 - DNA, 15 bp, Homo sapiens
caactgaaccaggga

SEQ ID NO: 1425037 - DNA, 15 bp, Homo sapiens
aactgaaccagggag

SEQ ID NO: 1425038 - DNA, 15 bp, Homo sapiens
actgaaccagggagg

SEQ ID NO: 1425039 - DNA, 15 bp, Homo sapiens
ctgaaccagggaggt

SEQ ID NO: 1425040 - DNA, 15 bp, Homo sapiens
tggaggttgcagtgt

SEQ ID NO: 1425041 - DNA, 15 bp, Homo sapiens
ggaggttgcagtgtg

SEQ ID NO: 1425042 - DNA, 15 bp, Homo sapiens
gaggttgcagtgtgc

SEQ ID NO: 1425043 - DNA, 15 bp, Homo sapiens
aggttgcagtgtgcc

SEQ ID NO: 1425044 - DNA, 15 bp, Homo sapiens
ggttgcagtgtgccg

SEQ ID NO: 1425045 - DNA, 15 bp, Homo sapiens
gttgcagtgtgccga

SEQ ID NO: 1425046 - DNA, 15 bp, Homo sapiens
ttgcagtgtgccgag

SEQ ID NO: 1425047 - DNA, 15 bp, Homo sapiens
tgcagtgtgccgaga

SEQ ID NO: 1425048 - DNA, 15 bp, Homo sapiens
gcagtgtgccgagat

SEQ ID NO: 1425049 - DNA, 15 bp, Homo sapiens
cagtgtgccgagatc

SEQ ID NO: 1425050 - DNA, 15 bp, Homo sapiens
agtgtgccgagatca

SEQ ID NO: 1425051 - DNA, 15 bp, Homo sapiens
gtgtgccgagatcac

SEQ ID NO: 1425052 - DNA, 15 bp, Homo sapiens
tgtgccgagatcacg

SEQ ID NO: 1425053 - DNA, 15 bp, Homo sapiens
gtgccgagatcacgc

SEQ ID NO: 1425054 - DNA, 15 bp, Homo sapiens
tgccgagatcacgcc

SEQ ID NO: 1425055 - DNA, 15 bp, Homo sapiens
acgccactgcactct

SEQ ID NO: 1425056 - DNA, 15 bp, Homo sapiens
gcactctagcctggc

SEQ ID NO: 1425057 - DNA, 15 bp, Homo sapiens
cactctagcctggca

SEQ ID NO: 1425058 - DNA, 15 bp, Homo sapiens
actctagcctggcaa

SEQ ID NO: 1425059 - DNA, 15 bp, Homo sapiens
ctctagcctggcaac

SEQ ID NO: 1425060 - DNA, 15 bp, Homo sapiens
tctagcctggcaaca

SEQ ID NO: 1425061 - DNA, 15 bp, Homo sapiens
ctagcctggcaacag

SEQ ID NO: 1425062 - DNA, 15 bp, Homo sapiens
tagcctggcaacaga

SEQ ID NO: 1425063 - DNA, 15 bp, Homo sapiens
gcaacagagcaagat

SEQ ID NO: 1425064 - DNA, 15 bp, Homo sapiens
caacagagcaagatt

SEQ ID NO: 1425065 - DNA, 15 bp, Homo sapiens
aacagagcaagattc

SEQ ID NO: 1425066 - DNA, 15 bp, Homo sapiens
acagagcaagattct

SEQ ID NO: 1425067 - DNA, 15 bp, Homo sapiens
cagagcaagattctg

SEQ ID NO: 1425068 - DNA, 15 bp, Homo sapiens
agagcaagattctgt

SEQ ID NO: 1425069 - DNA, 15 bp, Homo sapiens
gagcaagattctgtc

SEQ ID NO: 1425070 - DNA, 15 bp, Homo sapiens
agcaagattctgtct

SEQ ID NO: 1425071 - DNA, 15 bp, Homo sapiens
gcaagattctgtctc

SEQ ID NO: 1425072 - DNA, 15 bp, Homo sapiens
caagattctgtctca

SEQ ID NO: 1425073 - DNA, 15 bp, Homo sapiens
aagattctgtctcaa

SEQ ID NO: 1425074 - DNA, 15 bp, Homo sapiens
gattctgtctcaaaa

SEQ ID NO: 1425075 - DNA, 15 bp, Homo sapiens
attctgtctcaaaaa

SEQ ID NO: 1425076 - DNA, 15 bp, Homo sapiens
ttctgtctcaaaaaa

SEQ ID NO: 1425077 - DNA, 15 bp, Homo sapiens
aaaaaaaaaaacata

SEQ ID NO: 1425078 - DNA, 15 bp, Homo sapiens
aaaaaaaaaacatat

SEQ ID NO: 1425079 - DNA, 15 bp, Homo sapiens
aaaaaaaaacatata

SEQ ID NO: 1425080 - DNA, 15 bp, Homo sapiens
aaaaaaaacatatat

SEQ ID NO: 1425081 - DNA, 15 bp, Homo sapiens
aaaaaaacatatata

SEQ ID NO: 1425082 - DNA, 15 bp, Homo sapiens
aaaaaacatatatac

SEQ ID NO: 1425083 - DNA, 15 bp, Homo sapiens
aaaaacatatataca

SEQ ID NO: 1425084 - DNA, 15 bp, Homo sapiens
aaaacatatatacac

SEQ ID NO: 1425085 - DNA, 15 bp, Homo sapiens
aaacatatatacaca

SEQ ID NO: 1425086 - DNA, 15 bp, Homo sapiens
aacatatatacacat

SEQ ID NO: 1425087 - DNA, 15 bp, Homo sapiens
acatatatacacata

SEQ ID NO: 1425088 - DNA, 15 bp, Homo sapiens
catatatacacatat

SEQ ID NO: 1425089 - DNA, 15 bp, Homo sapiens
atatatacacatata

SEQ ID NO: 1425090 - DNA, 15 bp, Homo sapiens
tatatacacatatat

SEQ ID NO: 1425091 - DNA, 15 bp, Homo sapiens
atatacacatatatc

SEQ ID NO: 1425092 - DNA, 15 bp, Homo sapiens
tatacacatatatcc

SEQ ID NO: 1425093 - DNA, 15 bp, Homo sapiens
atacacatatatccc

SEQ ID NO: 1425094 - DNA, 15 bp, Homo sapiens
tacacatatatccca

SEQ ID NO: 1425095 - DNA, 15 bp, Homo sapiens
acacatatatcccaa

SEQ ID NO: 1425096 - DNA, 15 bp, Homo sapiens
cacatatatcccaaa

SEQ ID NO: 1425097 - DNA, 15 bp, Homo sapiens
acatatatcccaaag

SEQ ID NO: 1425098 - DNA, 15 bp, Homo sapiens
catatatcccaaagt

SEQ ID NO: 1425099 - DNA, 15 bp, Homo sapiens
atatatcccaaagtg

SEQ ID NO: 1425100 - DNA, 15 bp, Homo sapiens
tatatcccaaagtgc

SEQ ID NO: 1425101 - DNA, 15 bp, Homo sapiens
atatcccaaagtgct

SEQ ID NO: 1425102 - DNA, 15 bp, Homo sapiens
tatcccaaagtgctg

SEQ ID NO: 1425103 - DNA, 15 bp, Homo sapiens
ctgggattacatata

SEQ ID NO: 1425104 - DNA, 15 bp, Homo sapiens
tgggattacatatat

SEQ ID NO: 1425105 - DNA, 15 bp, Homo sapiens
gggattacatatata

SEQ ID NO: 1425106 - DNA, 15 bp, Homo sapiens
ggattacatatatat

SEQ ID NO: 1425107 - DNA, 15 bp, Homo sapiens
gattacatatatata

SEQ ID NO: 1425108 - DNA, 15 bp, Homo sapiens
attacatatatatat

SEQ ID NO: 1425109 - DNA, 15 bp, Homo sapiens
ttacatatatatata

SEQ ID NO: 1425110 - DNA, 15 bp, Homo sapiens
atatatatatattat

SEQ ID NO: 1425111 - DNA, 15 bp, Homo sapiens
tatatatatattata

SEQ ID NO: 1425112 - DNA, 15 bp, Homo sapiens
attatatatatatat

SEQ ID NO: 1425113 - DNA, 15 bp, Homo sapiens
tatatatatatgtta

SEQ ID NO: 1425114 - DNA, 15 bp, Homo sapiens
tgttatatatatgtt

SEQ ID NO: 1425115 - DNA, 15 bp, Homo sapiens
gttatatatatgtta

SEQ ID NO: 1425116 - DNA, 15 bp, Homo sapiens
ttatatatatgttat

SEQ ID NO: 1425117 - DNA, 15 bp, Homo sapiens
atatatataacatat

SEQ ID NO: 1425118 - DNA, 15 bp, Homo sapiens
ttatatatatataat

SEQ ID NO: 1425119 - DNA, 15 bp, Homo sapiens
tataatatatatatg

SEQ ID NO: 1425120 - DNA, 15 bp, Homo sapiens
taatatatatatgtt

SEQ ID NO: 1425121 - DNA, 15 bp, Homo sapiens
aatatatatatgtta

SEQ ID NO: 1425122 - DNA, 15 bp, Homo sapiens
gttatatatatatat

SEQ ID NO: 1425123 - DNA, 15 bp, Homo sapiens
acacacatatatatg

SEQ ID NO: 1425124 - DNA, 15 bp, Homo sapiens
acacacacacaaatt

SEQ ID NO: 1425125 - DNA, 15 bp, Homo sapiens
cacacacacaaatta

SEQ ID NO: 1425126 - DNA, 15 bp, Homo sapiens
acacacacaaattag

SEQ ID NO: 1425127 - DNA, 15 bp, Homo sapiens
cacacacaaattagc

SEQ ID NO: 1425128 - DNA, 15 bp, Homo sapiens
acacacaaattagcc

SEQ ID NO: 1425129 - DNA, 15 bp, Homo sapiens
cacacaaattagcca

SEQ ID NO: 1425130 - DNA, 15 bp, Homo sapiens
acacaaattagccag

SEQ ID NO: 1425131 - DNA, 15 bp, Homo sapiens
cacaaattagccagg

SEQ ID NO: 1425132 - DNA, 15 bp, Homo sapiens
acaaattagccaggc

SEQ ID NO: 1425133 - DNA, 15 bp, Homo sapiens
caaattagccaggca

SEQ ID NO: 1425134 - DNA, 15 bp, Homo sapiens
tagccaggcatagtt

SEQ ID NO: 1425135 - DNA, 15 bp, Homo sapiens
caggcatagttgcac

SEQ ID NO: 1425136 - DNA, 15 bp, Homo sapiens
aggcatagttgcaca

SEQ ID NO: 1425137 - DNA, 15 bp, Homo sapiens
ggcatagttgcacac

SEQ ID NO: 1425138 - DNA, 15 bp, Homo sapiens
gcatagttgcacacg

SEQ ID NO: 1425139 - DNA, 15 bp, Homo sapiens
catagttgcacacgc

SEQ ID NO: 1425140 - DNA, 15 bp, Homo sapiens
atagttgcacacgct

SEQ ID NO: 1425141 - DNA, 15 bp, Homo sapiens
tagttgcacacgctt

SEQ ID NO: 1425142 - DNA, 15 bp, Homo sapiens
agttgcacacgcttg

SEQ ID NO: 1425143 - DNA, 15 bp, Homo sapiens
gttgcacacgcttgt

SEQ ID NO: 1425144 - DNA, 15 bp, Homo sapiens
ttgcacacgcttgta

SEQ ID NO: 1425145 - DNA, 15 bp, Homo sapiens
tgcacacgcttgtag

SEQ ID NO: 1425146 - DNA, 15 bp, Homo sapiens
gcacacgcttgtaga

SEQ ID NO: 1425147 - DNA, 15 bp, Homo sapiens
cacacgcttgtagac

SEQ ID NO: 1425148 - DNA, 15 bp, Homo sapiens
acacgcttgtagacc

SEQ ID NO: 1425149 - DNA, 15 bp, Homo sapiens
cacgcttgtagaccc

SEQ ID NO: 1425150 - DNA, 15 bp, Homo sapiens
acgcttgtagaccca

SEQ ID NO: 1425151 - DNA, 15 bp, Homo sapiens
cgcttgtagacccag

SEQ ID NO: 1425152 - DNA, 15 bp, Homo sapiens
gcttgtagacccagc

SEQ ID NO: 1425153 - DNA, 15 bp, Homo sapiens
cttgtagacccagct

SEQ ID NO: 1425154 - DNA, 15 bp, Homo sapiens
ttgtagacccagcta

SEQ ID NO: 1425155 - DNA, 15 bp, Homo sapiens
tgtagacccagctac

SEQ ID NO: 1425156 - DNA, 15 bp, Homo sapiens
gtagacccagctact

SEQ ID NO: 1425157 - DNA, 15 bp, Homo sapiens
tagacccagctactc

SEQ ID NO: 1425158 - DNA, 15 bp, Homo sapiens
agacccagctactca

SEQ ID NO: 1425159 - DNA, 15 bp, Homo sapiens
gagaatctcttgaac

SEQ ID NO: 1425160 - DNA, 15 bp, Homo sapiens
agaatctcttgaact

SEQ ID NO: 1425161 - DNA, 15 bp, Homo sapiens
gaatctcttgaactt

SEQ ID NO: 1425162 - DNA, 15 bp, Homo sapiens
aatctcttgaactta

SEQ ID NO: 1425163 - DNA, 15 bp, Homo sapiens
atctcttgaacttag

SEQ ID NO: 1425164 - DNA, 15 bp, Homo sapiens
tctcttgaacttagg

SEQ ID NO: 1425165 - DNA, 15 bp, Homo sapiens
ctcttgaacttagga

SEQ ID NO: 1425166 - DNA, 15 bp, Homo sapiens
tcttgaacttaggag

SEQ ID NO: 1425167 - DNA, 15 bp, Homo sapiens
cttgaacttaggagg

SEQ ID NO: 1425168 - DNA, 15 bp, Homo sapiens
ttgaacttaggaggc

SEQ ID NO: 1425169 - DNA, 15 bp, Homo sapiens
tgaacttaggaggcg

SEQ ID NO: 1425170 - DNA, 15 bp, Homo sapiens
gaacttaggaggcgg

SEQ ID NO: 1425171 - DNA, 15 bp, Homo sapiens
aacttaggaggcgga

SEQ ID NO: 1425172 - DNA, 15 bp, Homo sapiens
acttaggaggcggag

SEQ ID NO: 1425173 - DNA, 15 bp, Homo sapiens
cttaggaggcggagg

SEQ ID NO: 1425174 - DNA, 15 bp, Homo sapiens
ttaggaggcggaggt

SEQ ID NO: 1425175 - DNA, 15 bp, Homo sapiens
taggaggcggaggtt

SEQ ID NO: 1425176 - DNA, 15 bp, Homo sapiens
tgggtgacagagcag

SEQ ID NO: 1425177 - DNA, 15 bp, Homo sapiens
gggtgacagagcagg

SEQ ID NO: 1425178 - DNA, 15 bp, Homo sapiens
ggtgacagagcagga

SEQ ID NO: 1425179 - DNA, 15 bp, Homo sapiens
gtgacagagcaggac

SEQ ID NO: 1425180 - DNA, 15 bp, Homo sapiens
tgacagagcaggact

SEQ ID NO: 1425181 - DNA, 15 bp, Homo sapiens
gacagagcaggactc

SEQ ID NO: 1425182 - DNA, 15 bp, Homo sapiens
acagagcaggactct

SEQ ID NO: 1425183 - DNA, 15 bp, Homo sapiens
cagagcaggactctg

SEQ ID NO: 1425184 - DNA, 15 bp, Homo sapiens
agagcaggactctgt

SEQ ID NO: 1425185 - DNA, 15 bp, Homo sapiens
gagcaggactctgta

SEQ ID NO: 1425186 - DNA, 15 bp, Homo sapiens
agcaggactctgtac

SEQ ID NO: 1425187 - DNA, 15 bp, Homo sapiens
gcaggactctgtaca

SEQ ID NO: 1425188 - DNA, 15 bp, Homo sapiens
caggactctgtacac

SEQ ID NO: 1425189 - DNA, 15 bp, Homo sapiens
aggactctgtacacc

SEQ ID NO: 1425190 - DNA, 15 bp, Homo sapiens
ggactctgtacaccc

SEQ ID NO: 1425191 - DNA, 15 bp, Homo sapiens
gactctgtacacccc

SEQ ID NO: 1425192 - DNA, 15 bp, Homo sapiens
actctgtacaccccc

SEQ ID NO: 1425193 - DNA, 15 bp, Homo sapiens
ctctgtacacccccc

SEQ ID NO: 1425194 - DNA, 15 bp, Homo sapiens
tctgtacacccccca

SEQ ID NO: 1425195 - DNA, 15 bp, Homo sapiens
ctgtacaccccccaa

SEQ ID NO: 1425196 - DNA, 15 bp, Homo sapiens
tgtacaccccccaaa

SEQ ID NO: 1425197 - DNA, 15 bp, Homo sapiens
gtacaccccccaaaa

SEQ ID NO: 1425198 - DNA, 15 bp, Homo sapiens
tacaccccccaaaac

SEQ ID NO: 1425199 - DNA, 15 bp, Homo sapiens
acaccccccaaaaca

SEQ ID NO: 1425200 - DNA, 15 bp, Homo sapiens
caccccccaaaacaa

SEQ ID NO: 1425201 - DNA, 15 bp, Homo sapiens
accccccaaaacaaa

SEQ ID NO: 1425202 - DNA, 15 bp, Homo sapiens
ccccccaaaacaaaa

SEQ ID NO: 1425203 - DNA, 15 bp, Homo sapiens
cccccaaaacaaaaa

SEQ ID NO: 1425204 - DNA, 15 bp, Homo sapiens
ccccaaaacaaaaaa

SEQ ID NO: 1425205 - DNA, 15 bp, Homo sapiens
cccaaaacaaaaaaa

SEQ ID NO: 1425206 - DNA, 15 bp, Homo sapiens
ccaaaacaaaaaaaa

SEQ ID NO: 1425207 - DNA, 15 bp, Homo sapiens
acaaaaaaaaaagtt

SEQ ID NO: 1425208 - DNA, 15 bp, Homo sapiens
caaaaaaaaaagtta

SEQ ID NO: 1425209 - DNA, 15 bp, Homo sapiens
aaaaaaaaaagttat

SEQ ID NO: 1425210 - DNA, 15 bp, Homo sapiens
aaaaaaaaagttatc

SEQ ID NO: 1425211 - DNA, 15 bp, Homo sapiens
aaaaaaaagttatca

SEQ ID NO: 1425212 - DNA, 15 bp, Homo sapiens
aaaaaaagttatcag

SEQ ID NO: 1425213 - DNA, 15 bp, Homo sapiens
aaaaaagttatcaga

SEQ ID NO: 1425214 - DNA, 15 bp, Homo sapiens
aaaaagttatcagat

SEQ ID NO: 1425215 - DNA, 15 bp, Homo sapiens
aaaagttatcagatg

SEQ ID NO: 1425216 - DNA, 15 bp, Homo sapiens
aaagttatcagatgt

SEQ ID NO: 1425217 - DNA, 15 bp, Homo sapiens
aagttatcagatgtg

SEQ ID NO: 1425218 - DNA, 15 bp, Homo sapiens
agttatcagatgtga

SEQ ID NO: 1425219 - DNA, 15 bp, Homo sapiens
gttatcagatgtgat

SEQ ID NO: 1425220 - DNA, 15 bp, Homo sapiens
ttatcagatgtgatt

SEQ ID NO: 1425221 - DNA, 15 bp, Homo sapiens
tatcagatgtgattg

SEQ ID NO: 1425222 - DNA, 15 bp, Homo sapiens
atcagatgtgattgg

SEQ ID NO: 1425223 - DNA, 15 bp, Homo sapiens
tcagatgtgattgga

SEQ ID NO: 1425224 - DNA, 15 bp, Homo sapiens
cagatgtgattggaa

SEQ ID NO: 1425225 - DNA, 15 bp, Homo sapiens
agatgtgattggaat

SEQ ID NO: 1425226 - DNA, 15 bp, Homo sapiens
gatgtgattggaatg

SEQ ID NO: 1425227 - DNA, 15 bp, Homo sapiens
atgtgattggaatgt

SEQ ID NO: 1425228 - DNA, 15 bp, Homo sapiens
tgtgattggaatgta

SEQ ID NO: 1425229 - DNA, 15 bp, Homo sapiens
gtgattggaatgtat

SEQ ID NO: 1425230 - DNA, 15 bp, Homo sapiens
tgattggaatgtata

SEQ ID NO: 1425231 - DNA, 15 bp, Homo sapiens
gattggaatgtatat

SEQ ID NO: 1425232 - DNA, 15 bp, Homo sapiens
attggaatgtatatc

SEQ ID NO: 1425233 - DNA, 15 bp, Homo sapiens
ttggaatgtatatca

SEQ ID NO: 1425234 - DNA, 15 bp, Homo sapiens
tggaatgtatatcaa

SEQ ID NO: 1425235 - DNA, 15 bp, Homo sapiens
ggaatgtatatcaag

SEQ ID NO: 1425236 - DNA, 15 bp, Homo sapiens
gaatgtatatcaagt

SEQ ID NO: 1425237 - DNA, 15 bp, Homo sapiens
aatgtatatcaagta

SEQ ID NO: 1425238 - DNA, 15 bp, Homo sapiens
atgtatatcaagtat

SEQ ID NO: 1425239 - DNA, 15 bp, Homo sapiens
tgtatatcaagtatc

SEQ ID NO: 1425240 - DNA, 15 bp, Homo sapiens
gtatatcaagtatca

SEQ ID NO: 1425241 - DNA, 15 bp, Homo sapiens
tatatcaagtatcag

SEQ ID NO: 1425242 - DNA, 15 bp, Homo sapiens
atatcaagtatcagc

SEQ ID NO: 1425243 - DNA, 15 bp, Homo sapiens
tatcaagtatcagct

SEQ ID NO: 1425244 - DNA, 15 bp, Homo sapiens
atcaagtatcagctt

SEQ ID NO: 1425245 - DNA, 15 bp, Homo sapiens
tcaagtatcagcttc

SEQ ID NO: 1425246 - DNA, 15 bp, Homo sapiens
caagtatcagcttca

SEQ ID NO: 1425247 - DNA, 15 bp, Homo sapiens
aagtatcagcttcaa

SEQ ID NO: 1425248 - DNA, 15 bp, Homo sapiens
agtatcagcttcaaa

SEQ ID NO: 1425249 - DNA, 15 bp, Homo sapiens
gtatcagcttcaaaa

SEQ ID NO: 1425250 - DNA, 15 bp, Homo sapiens
tatcagcttcaaaat

SEQ ID NO: 1425251 - DNA, 15 bp, Homo sapiens
atcagcttcaaaata

SEQ ID NO: 1425252 - DNA, 15 bp, Homo sapiens
tcagcttcaaaatat

SEQ ID NO: 1425253 - DNA, 15 bp, Homo sapiens
cagcttcaaaatatg

SEQ ID NO: 1425254 - DNA, 15 bp, Homo sapiens
agcttcaaaatatgc

SEQ ID NO: 1425255 - DNA, 15 bp, Homo sapiens
gcttcaaaatatgct

SEQ ID NO: 1425256 - DNA, 15 bp, Homo sapiens
cttcaaaatatgcta

SEQ ID NO: 1425257 - DNA, 15 bp, Homo sapiens
ttcaaaatatgctat

SEQ ID NO: 1425258 - DNA, 15 bp, Homo sapiens
tcaaaatatgctata

SEQ ID NO: 1425259 - DNA, 15 bp, Homo sapiens
aaaatatgctatatt

SEQ ID NO: 1425260 - DNA, 15 bp, Homo sapiens
aaatatgctatatta

SEQ ID NO: 1425261 - DNA, 15 bp, Homo sapiens
aatatgctatattaa

SEQ ID NO: 1425262 - DNA, 15 bp, Homo sapiens
atatgctatattaat

SEQ ID NO: 1425263 - DNA, 15 bp, Homo sapiens
tatgctatattaata

SEQ ID NO: 1425264 - DNA, 15 bp, Homo sapiens
atgctatattaatac

SEQ ID NO: 1425265 - DNA, 15 bp, Homo sapiens
tgctatattaatact

SEQ ID NO: 1425266 - DNA, 15 bp, Homo sapiens
gctatattaatactt

SEQ ID NO: 1425267 - DNA, 15 bp, Homo sapiens
ctatattaatacttc

SEQ ID NO: 1425268 - DNA, 15 bp, Homo sapiens
tatattaatacttca

SEQ ID NO: 1425269 - DNA, 15 bp, Homo sapiens
atattaatacttcaa

SEQ ID NO: 1425270 - DNA, 15 bp, Homo sapiens
tattaatacttcaaa

SEQ ID NO: 1425271 - DNA, 15 bp, Homo sapiens
attaatacttcaaaa

SEQ ID NO: 1425272 - DNA, 15 bp, Homo sapiens
ttaatacttcaaaaa

SEQ ID NO: 1425273 - DNA, 15 bp, Homo sapiens
taatacttcaaaaat

SEQ ID NO: 1425274 - DNA, 15 bp, Homo sapiens
aatacttcaaaaatt

SEQ ID NO: 1425275 - DNA, 15 bp, Homo sapiens
atacttcaaaaatta

SEQ ID NO: 1425276 - DNA, 15 bp, Homo sapiens
tacttcaaaaattac

SEQ ID NO: 1425277 - DNA, 15 bp, Homo sapiens
acttcaaaaattaca

SEQ ID NO: 1425278 - DNA, 15 bp, Homo sapiens
cttcaaaaattacac

SEQ ID NO: 1425279 - DNA, 15 bp, Homo sapiens
ttcaaaaattacaca

SEQ ID NO: 1425280 - DNA, 15 bp, Homo sapiens
tcaaaaattacacaa

SEQ ID NO: 1425281 - DNA, 15 bp, Homo sapiens
caaaaattacacaaa

SEQ ID NO: 1425282 - DNA, 15 bp, Homo sapiens
aaaaattacacaaat

SEQ ID NO: 1425283 - DNA, 15 bp, Homo sapiens
aaaattacacaaata

SEQ ID NO: 1425284 - DNA, 15 bp, Homo sapiens
aaattacacaaataa

SEQ ID NO: 1425285 - DNA, 15 bp, Homo sapiens
aattacacaaataat

SEQ ID NO: 1425286 - DNA, 15 bp, Homo sapiens
attacacaaataata

SEQ ID NO: 1425287 - DNA, 15 bp, Homo sapiens
ttacacaaataatac

SEQ ID NO: 1425288 - DNA, 15 bp, Homo sapiens
tacacaaataataca

SEQ ID NO: 1425289 - DNA, 15 bp, Homo sapiens
acacaaataatacat

SEQ ID NO: 1425290 - DNA, 15 bp, Homo sapiens
cacaaataatacata

SEQ ID NO: 1425291 - DNA, 15 bp, Homo sapiens
acaaataatacataa

SEQ ID NO: 1425292 - DNA, 15 bp, Homo sapiens
caaataatacataat

SEQ ID NO: 1425293 - DNA, 15 bp, Homo sapiens
aaataatacataatc

SEQ ID NO: 1425294 - DNA, 15 bp, Homo sapiens
aataatacataatca

SEQ ID NO: 1425295 - DNA, 15 bp, Homo sapiens
ataatacataatcag

SEQ ID NO: 1425296 - DNA, 15 bp, Homo sapiens
taatacataatcagg

SEQ ID NO: 1425297 - DNA, 15 bp, Homo sapiens
aatacataatcaggt

SEQ ID NO: 1425298 - DNA, 15 bp, Homo sapiens
atacataatcaggtt

SEQ ID NO: 1425299 - DNA, 15 bp, Homo sapiens
tacataatcaggttt

SEQ ID NO: 1425300 - DNA, 15 bp, Homo sapiens
acataatcaggtttg

SEQ ID NO: 1425301 - DNA, 15 bp, Homo sapiens
cataatcaggtttga

SEQ ID NO: 1425302 - DNA, 15 bp, Homo sapiens
ataatcaggtttgaa

SEQ ID NO: 1425303 - DNA, 15 bp, Homo sapiens
taatcaggtttgaaa

SEQ ID NO: 1425304 - DNA, 15 bp, Homo sapiens
aatcaggtttgaaaa

SEQ ID NO: 1425305 - DNA, 15 bp, Homo sapiens
atcaggtttgaaaaa

SEQ ID NO: 1425306 - DNA, 15 bp, Homo sapiens
tcaggtttgaaaaat

SEQ ID NO: 1425307 - DNA, 15 bp, Homo sapiens
caggtttgaaaaatt

SEQ ID NO: 1425308 - DNA, 15 bp, Homo sapiens
aggtttgaaaaattt

SEQ ID NO: 1425309 - DNA, 15 bp, Homo sapiens
ggtttgaaaaattta

SEQ ID NO: 1425310 - DNA, 15 bp, Homo sapiens
gtttgaaaaatttaa

SEQ ID NO: 1425311 - DNA, 15 bp, Homo sapiens
tttgaaaaatttaag

SEQ ID NO: 1425312 - DNA, 15 bp, Homo sapiens
ttgaaaaatttaaga

SEQ ID NO: 1425313 - DNA, 15 bp, Homo sapiens
tgaaaaatttaagac

SEQ ID NO: 1425314 - DNA, 15 bp, Homo sapiens
gaaaaatttaagaca

SEQ ID NO: 1425315 - DNA, 15 bp, Homo sapiens
aaaaatttaagacaa

SEQ ID NO: 1425316 - DNA, 15 bp, Homo sapiens
aaaatttaagacaac

SEQ ID NO: 1425317 - DNA, 15 bp, Homo sapiens
aaatttaagacaaca

SEQ ID NO: 1425318 - DNA, 15 bp, Homo sapiens
aatttaagacaacag

SEQ ID NO: 1425319 - DNA, 15 bp, Homo sapiens
atttaagacaacaga

SEQ ID NO: 1425320 - DNA, 15 bp, Homo sapiens
tttaagacaacagaa

SEQ ID NO: 1425321 - DNA, 15 bp, Homo sapiens
ttaagacaacagaaa

SEQ ID NO: 1425322 - DNA, 15 bp, Homo sapiens
taagacaacagaaaa

SEQ ID NO: 1425323 - DNA, 15 bp, Homo sapiens
aagacaacagaaaaa

SEQ ID NO: 1425324 - DNA, 15 bp, Homo sapiens
agacaacagaaaaaa

SEQ ID NO: 1425325 - DNA, 15 bp, Homo sapiens
gacaacagaaaaaaa

SEQ ID NO: 1425326 - DNA, 15 bp, Homo sapiens
acaacagaaaaaaaa

SEQ ID NO: 1425327 - DNA, 15 bp, Homo sapiens
caacagaaaaaaaaa

SEQ ID NO: 1425328 - DNA, 15 bp, Homo sapiens
aacagaaaaaaaaat

SEQ ID NO: 1425329 - DNA, 15 bp, Homo sapiens
acagaaaaaaaaatt

SEQ ID NO: 1425330 - DNA, 15 bp, Homo sapiens
cagaaaaaaaaattc

SEQ ID NO: 1425331 - DNA, 15 bp, Homo sapiens
agaaaaaaaaattca

SEQ ID NO: 1425332 - DNA, 15 bp, Homo sapiens
gaaaaaaaaattcaa

SEQ ID NO: 1425333 - DNA, 15 bp, Homo sapiens
aaaaaaaattcaaat

SEQ ID NO: 1425334 - DNA, 15 bp, Homo sapiens
aaaaaaattcaaatc

SEQ ID NO: 1425335 - DNA, 15 bp, Homo sapiens
aaaaaattcaaatca

SEQ ID NO: 1425336 - DNA, 15 bp, Homo sapiens
aaaaattcaaatcac

SEQ ID NO: 1425337 - DNA, 15 bp, Homo sapiens
aaaattcaaatcaca

SEQ ID NO: 1425338 - DNA, 15 bp, Homo sapiens
aaattcaaatcacac

SEQ ID NO: 1425339 - DNA, 15 bp, Homo sapiens
aattcaaatcacaca

SEQ ID NO: 1425340 - DNA, 15 bp, Homo sapiens
attcaaatcacacat

SEQ ID NO: 1425341 - DNA, 15 bp, Homo sapiens
ttcaaatcacacata

SEQ ID NO: 1425342 - DNA, 15 bp, Homo sapiens
tcaaatcacacatat

SEQ ID NO: 1425343 - DNA, 15 bp, Homo sapiens
caaatcacacatatc

SEQ ID NO: 1425344 - DNA, 15 bp, Homo sapiens
aaatcacacatatcc

SEQ ID NO: 1425345 - DNA, 15 bp, Homo sapiens
aatcacacatatccc

SEQ ID NO: 1425346 - DNA, 15 bp, Homo sapiens
atcacacatatccca

SEQ ID NO: 1425347 - DNA, 15 bp, Homo sapiens
tcacacatatcccac

SEQ ID NO: 1425348 - DNA, 15 bp, Homo sapiens
cacacatatcccaca

SEQ ID NO: 1425349 - DNA, 15 bp, Homo sapiens
acacatatcccacac

SEQ ID NO: 1425350 - DNA, 15 bp, Homo sapiens
cacatatcccacaca

SEQ ID NO: 1425351 - DNA, 15 bp, Homo sapiens
acatatcccacacat

SEQ ID NO: 1425352 - DNA, 15 bp, Homo sapiens
catatcccacacatt

SEQ ID NO: 1425353 - DNA, 15 bp, Homo sapiens
atatcccacacattt

SEQ ID NO: 1425354 - DNA, 15 bp, Homo sapiens
tatcccacacatttt

SEQ ID NO: 1425355 - DNA, 15 bp, Homo sapiens
atcccacacatttta

SEQ ID NO: 1425356 - DNA, 15 bp, Homo sapiens
tcccacacattttat

SEQ ID NO: 1425357 - DNA, 15 bp, Homo sapiens
cccacacattttatt

SEQ ID NO: 1425358 - DNA, 15 bp, Homo sapiens
ccacacattttatta

SEQ ID NO: 1425359 - DNA, 15 bp, Homo sapiens
cacacattttattat

SEQ ID NO: 1425360 - DNA, 15 bp, Homo sapiens
acacattttattatt

SEQ ID NO: 1425361 - DNA, 15 bp, Homo sapiens
cacattttattatta

SEQ ID NO: 1425362 - DNA, 15 bp, Homo sapiens
acattttattattac

SEQ ID NO: 1425363 - DNA, 15 bp, Homo sapiens
cattttattattact

SEQ ID NO: 1425364 - DNA, 15 bp, Homo sapiens
attttattattacta

SEQ ID NO: 1425365 - DNA, 15 bp, Homo sapiens
ttttattattactac

SEQ ID NO: 1425366 - DNA, 15 bp, Homo sapiens
tttattattactact

SEQ ID NO: 1425367 - DNA, 15 bp, Homo sapiens
ttattattactacta

SEQ ID NO: 1425368 - DNA, 15 bp, Homo sapiens
tattattactactac

SEQ ID NO: 1425369 - DNA, 15 bp, Homo sapiens
attattactactact

SEQ ID NO: 1425370 - DNA, 15 bp, Homo sapiens
ttattactactacta

SEQ ID NO: 1425371 - DNA, 15 bp, Homo sapiens
tattactactactat

SEQ ID NO: 1425372 - DNA, 15 bp, Homo sapiens
attactactactatt

SEQ ID NO: 1425373 - DNA, 15 bp, Homo sapiens
ttactactactatta

SEQ ID NO: 1425374 - DNA, 15 bp, Homo sapiens
tactactactattat

SEQ ID NO: 1425375 - DNA, 15 bp, Homo sapiens
actactactattatt

SEQ ID NO: 1425376 - DNA, 15 bp, Homo sapiens
ctactactattattt

SEQ ID NO: 1425377 - DNA, 15 bp, Homo sapiens
tactactattatttt

SEQ ID NO: 1425378 - DNA, 15 bp, Homo sapiens
actactattattttg

SEQ ID NO: 1425379 - DNA, 15 bp, Homo sapiens
ctactattattttgt

SEQ ID NO: 1425380 - DNA, 15 bp, Homo sapiens
tactattattttgta

SEQ ID NO: 1425381 - DNA, 15 bp, Homo sapiens
actattattttgtag

SEQ ID NO: 1425382 - DNA, 15 bp, Homo sapiens
ctattattttgtaga

SEQ ID NO: 1425383 - DNA, 15 bp, Homo sapiens
tattattttgtagag

SEQ ID NO: 1425384 - DNA, 15 bp, Homo sapiens
attattttgtagaga

SEQ ID NO: 1425385 - DNA, 15 bp, Homo sapiens
ttattttgtagagac

SEQ ID NO: 1425386 - DNA, 15 bp, Homo sapiens
tattttgtagagact

SEQ ID NO: 1425387 - DNA, 15 bp, Homo sapiens
attttgtagagactg

SEQ ID NO: 1425388 - DNA, 15 bp, Homo sapiens
ttttgtagagactgg

SEQ ID NO: 1425389 - DNA, 15 bp, Homo sapiens
tttgtagagactggg

SEQ ID NO: 1425390 - DNA, 15 bp, Homo sapiens
ttgtagagactgggt

SEQ ID NO: 1425391 - DNA, 15 bp, Homo sapiens
tgtagagactgggtc

SEQ ID NO: 1425392 - DNA, 15 bp, Homo sapiens
gtagagactgggtct

SEQ ID NO: 1425393 - DNA, 15 bp, Homo sapiens
tagagactgggtctc

SEQ ID NO: 1425394 - DNA, 15 bp, Homo sapiens
agagactgggtctca

SEQ ID NO: 1425395 - DNA, 15 bp, Homo sapiens
gagactgggtctcac

SEQ ID NO: 1425396 - DNA, 15 bp, Homo sapiens
agactgggtctcact

SEQ ID NO: 1425397 - DNA, 15 bp, Homo sapiens
gactgggtctcactc

SEQ ID NO: 1425398 - DNA, 15 bp, Homo sapiens
actgggtctcactct

SEQ ID NO: 1425399 - DNA, 15 bp, Homo sapiens
ctgggtctcactctg

SEQ ID NO: 1425400 - DNA, 15 bp, Homo sapiens
tgggtctcactctgt

SEQ ID NO: 1425401 - DNA, 15 bp, Homo sapiens
tctcactctgttgct

SEQ ID NO: 1425402 - DNA, 15 bp, Homo sapiens
ctcactctgttgctt

SEQ ID NO: 1425403 - DNA, 15 bp, Homo sapiens
tcactctgttgctta

SEQ ID NO: 1425404 - DNA, 15 bp, Homo sapiens
cactctgttgcttat

SEQ ID NO: 1425405 - DNA, 15 bp, Homo sapiens
actctgttgcttatg

SEQ ID NO: 1425406 - DNA, 15 bp, Homo sapiens
ctctgttgcttatgc

SEQ ID NO: 1425407 - DNA, 15 bp, Homo sapiens
tctgttgcttatgct

SEQ ID NO: 1425408 - DNA, 15 bp, Homo sapiens
ctgttgcttatgctg

SEQ ID NO: 1425409 - DNA, 15 bp, Homo sapiens
tgttgcttatgctgg

SEQ ID NO: 1425410 - DNA, 15 bp, Homo sapiens
gttgcttatgctggt

SEQ ID NO: 1425411 - DNA, 15 bp, Homo sapiens
ttgcttatgctggtc

SEQ ID NO: 1425412 - DNA, 15 bp, Homo sapiens
tgcttatgctggtct

SEQ ID NO: 1425413 - DNA, 15 bp, Homo sapiens
gcttatgctggtctt

SEQ ID NO: 1425414 - DNA, 15 bp, Homo sapiens
cttatgctggtcttg

SEQ ID NO: 1425415 - DNA, 15 bp, Homo sapiens
ttatgctggtcttga

SEQ ID NO: 1425416 - DNA, 15 bp, Homo sapiens
tatgctggtcttgaa

SEQ ID NO: 1425417 - DNA, 15 bp, Homo sapiens
atgctggtcttgaac

SEQ ID NO: 1425418 - DNA, 15 bp, Homo sapiens
tgctggtcttgaact

SEQ ID NO: 1425419 - DNA, 15 bp, Homo sapiens
cctggcctcaagcag

SEQ ID NO: 1425420 - DNA, 15 bp, Homo sapiens
ctggcctcaagcagt

SEQ ID NO: 1425421 - DNA, 15 bp, Homo sapiens
tggcctcaagcagtc

SEQ ID NO: 1425422 - DNA, 15 bp, Homo sapiens
ggcctcaagcagtcc

SEQ ID NO: 1425423 - DNA, 15 bp, Homo sapiens
gcctcaagcagtcct

SEQ ID NO: 1425424 - DNA, 15 bp, Homo sapiens
cctcaagcagtcctg

SEQ ID NO: 1425425 - DNA, 15 bp, Homo sapiens
ctcaagcagtcctgc

SEQ ID NO: 1425426 - DNA, 15 bp, Homo sapiens
tcaagcagtcctgct

SEQ ID NO: 1425427 - DNA, 15 bp, Homo sapiens
caagcagtcctgctc

SEQ ID NO: 1425428 - DNA, 15 bp, Homo sapiens
aagcagtcctgctcc

SEQ ID NO: 1425429 - DNA, 15 bp, Homo sapiens
agcagtcctgctcca

SEQ ID NO: 1425430 - DNA, 15 bp, Homo sapiens
gcagtcctgctccag

SEQ ID NO: 1425431 - DNA, 15 bp, Homo sapiens
cagtcctgctccagc

SEQ ID NO: 1425432 - DNA, 15 bp, Homo sapiens
agtcctgctccagcc

SEQ ID NO: 1425433 - DNA, 15 bp, Homo sapiens
gtcctgctccagcct

SEQ ID NO: 1425434 - DNA, 15 bp, Homo sapiens
tcctgctccagcctc

SEQ ID NO: 1425435 - DNA, 15 bp, Homo sapiens
cctgctccagcctcc

SEQ ID NO: 1425436 - DNA, 15 bp, Homo sapiens
ctgctccagcctccc

SEQ ID NO: 1425437 - DNA, 15 bp, Homo sapiens
tgctccagcctccca

SEQ ID NO: 1425438 - DNA, 15 bp, Homo sapiens
gctccagcctcccaa

SEQ ID NO: 1425439 - DNA, 15 bp, Homo sapiens
ctccagcctcccaaa

SEQ ID NO: 1425440 - DNA, 15 bp, Homo sapiens
tccagcctcccaaag

SEQ ID NO: 1425441 - DNA, 15 bp, Homo sapiens
ccagcctcccaaagt

SEQ ID NO: 1425442 - DNA, 15 bp, Homo sapiens
ttataggcatgagct

SEQ ID NO: 1425443 - DNA, 15 bp, Homo sapiens
tataggcatgagcta

SEQ ID NO: 1425444 - DNA, 15 bp, Homo sapiens
ataggcatgagctac

SEQ ID NO: 1425445 - DNA, 15 bp, Homo sapiens
taggcatgagctacc

SEQ ID NO: 1425446 - DNA, 15 bp, Homo sapiens
aggcatgagctaccg

SEQ ID NO: 1425447 - DNA, 15 bp, Homo sapiens
ggcatgagctaccgc

SEQ ID NO: 1425448 - DNA, 15 bp, Homo sapiens
gcatgagctaccgct

SEQ ID NO: 1425449 - DNA, 15 bp, Homo sapiens
catgagctaccgctc

SEQ ID NO: 1425450 - DNA, 15 bp, Homo sapiens
atgagctaccgctcc

SEQ ID NO: 1425451 - DNA, 15 bp, Homo sapiens
tgagctaccgctccc

SEQ ID NO: 1425452 - DNA, 15 bp, Homo sapiens
gagctaccgctccca

SEQ ID NO: 1425453 - DNA, 15 bp, Homo sapiens
agctaccgctcccag

SEQ ID NO: 1425454 - DNA, 15 bp, Homo sapiens
gctaccgctcccagc

SEQ ID NO: 1425455 - DNA, 15 bp, Homo sapiens
ctaccgctcccagcc

SEQ ID NO: 1425456 - DNA, 15 bp, Homo sapiens
taccgctcccagccc

SEQ ID NO: 1425457 - DNA, 15 bp, Homo sapiens
accgctcccagcccc

SEQ ID NO: 1425458 - DNA, 15 bp, Homo sapiens
ccgctcccagcccca

SEQ ID NO: 1425459 - DNA, 15 bp, Homo sapiens
cgctcccagccccag

SEQ ID NO: 1425460 - DNA, 15 bp, Homo sapiens
ccagccccagacatt

SEQ ID NO: 1425461 - DNA, 15 bp, Homo sapiens
cagccccagacattt

SEQ ID NO: 1425462 - DNA, 15 bp, Homo sapiens
agccccagacatttt

SEQ ID NO: 1425463 - DNA, 15 bp, Homo sapiens
gccccagacatttta

SEQ ID NO: 1425464 - DNA, 15 bp, Homo sapiens
ccccagacattttag

SEQ ID NO: 1425465 - DNA, 15 bp, Homo sapiens
cccagacattttagt

SEQ ID NO: 1425466 - DNA, 15 bp, Homo sapiens
ccagacattttagtg

SEQ ID NO: 1425467 - DNA, 15 bp, Homo sapiens
cagacattttagtgt

SEQ ID NO: 1425468 - DNA, 15 bp, Homo sapiens
agacattttagtgtg

SEQ ID NO: 1425469 - DNA, 15 bp, Homo sapiens
gacattttagtgtgt

SEQ ID NO: 1425470 - DNA, 15 bp, Homo sapiens
acattttagtgtgta

SEQ ID NO: 1425471 - DNA, 15 bp, Homo sapiens
cattttagtgtgtaa

SEQ ID NO: 1425472 - DNA, 15 bp, Homo sapiens
attttagtgtgtaaa

SEQ ID NO: 1425473 - DNA, 15 bp, Homo sapiens
ttttagtgtgtaaat

SEQ ID NO: 1425474 - DNA, 15 bp, Homo sapiens
tttagtgtgtaaatt

SEQ ID NO: 1425475 - DNA, 15 bp, Homo sapiens
ttagtgtgtaaattc

SEQ ID NO: 1425476 - DNA, 15 bp, Homo sapiens
tagtgtgtaaattcc

SEQ ID NO: 1425477 - DNA, 15 bp, Homo sapiens
agtgtgtaaattcct

SEQ ID NO: 1425478 - DNA, 15 bp, Homo sapiens
gtgtgtaaattcctg

SEQ ID NO: 1425479 - DNA, 15 bp, Homo sapiens
tgtgtaaattcctgg

SEQ ID NO: 1425480 - DNA, 15 bp, Homo sapiens
gtgtaaattcctggg

SEQ ID NO: 1425481 - DNA, 15 bp, Homo sapiens
tgtaaattcctgggc

SEQ ID NO: 1425482 - DNA, 15 bp, Homo sapiens
gtaaattcctgggca

SEQ ID NO: 1425483 - DNA, 15 bp, Homo sapiens
taaattcctgggcat

SEQ ID NO: 1425484 - DNA, 15 bp, Homo sapiens
aaattcctgggcatt

SEQ ID NO: 1425485 - DNA, 15 bp, Homo sapiens
aattcctgggcattt

SEQ ID NO: 1425486 - DNA, 15 bp, Homo sapiens
attcctgggcatttt

SEQ ID NO: 1425487 - DNA, 15 bp, Homo sapiens
ttcctgggcattttt

SEQ ID NO: 1425488 - DNA, 15 bp, Homo sapiens
tcctgggcatttttt

SEQ ID NO: 1425489 - DNA, 15 bp, Homo sapiens
cctgggcattttttc

SEQ ID NO: 1425490 - DNA, 15 bp, Homo sapiens
ctgggcattttttcc

SEQ ID NO: 1425491 - DNA, 15 bp, Homo sapiens
tgggcattttttcca

SEQ ID NO: 1425492 - DNA, 15 bp, Homo sapiens
gggcattttttccag

SEQ ID NO: 1425493 - DNA, 15 bp, Homo sapiens
ggcattttttccagg

SEQ ID NO: 1425494 - DNA, 15 bp, Homo sapiens
gcattttttccaggc

SEQ ID NO: 1425495 - DNA, 15 bp, Homo sapiens
cattttttccaggca

SEQ ID NO: 1425496 - DNA, 15 bp, Homo sapiens
attttttccaggcat

SEQ ID NO: 1425497 - DNA, 15 bp, Homo sapiens
ttttttccaggcatc

SEQ ID NO: 1425498 - DNA, 15 bp, Homo sapiens
tttttccaggcatca

SEQ ID NO: 1425499 - DNA, 15 bp, Homo sapiens
ttttccaggcatcat

SEQ ID NO: 1425500 - DNA, 15 bp, Homo sapiens
tttccaggcatcata

SEQ ID NO: 1425501 - DNA, 15 bp, Homo sapiens
ttccaggcatcatac

SEQ ID NO: 1425502 - DNA, 15 bp, Homo sapiens
tccaggcatcataca

SEQ ID NO: 1425503 - DNA, 15 bp, Homo sapiens
ccaggcatcatacat

SEQ ID NO: 1425504 - DNA, 15 bp, Homo sapiens
caggcatcatacatg

SEQ ID NO: 1425505 - DNA, 15 bp, Homo sapiens
aggcatcatacatgt

SEQ ID NO: 1425506 - DNA, 15 bp, Homo sapiens
ggcatcatacatgtt

SEQ ID NO: 1425507 - DNA, 15 bp, Homo sapiens
gcatcatacatgtta

SEQ ID NO: 1425508 - DNA, 15 bp, Homo sapiens
catcatacatgttag

SEQ ID NO: 1425509 - DNA, 15 bp, Homo sapiens
tcatacatgttagct

SEQ ID NO: 1425510 - DNA, 15 bp, Homo sapiens
catacatgttagctg

SEQ ID NO: 1425511 - DNA, 15 bp, Homo sapiens
atacatgttagctga

SEQ ID NO: 1425512 - DNA, 15 bp, Homo sapiens
tacatgttagctgac

SEQ ID NO: 1425513 - DNA, 15 bp, Homo sapiens
acatgttagctgact

SEQ ID NO: 1425514 - DNA, 15 bp, Homo sapiens
catgttagctgactg

SEQ ID NO: 1425515 - DNA, 15 bp, Homo sapiens
atgttagctgactga

SEQ ID NO: 1425516 - DNA, 15 bp, Homo sapiens
tgttagctgactgat

SEQ ID NO: 1425517 - DNA, 15 bp, Homo sapiens
gttagctgactgatg

SEQ ID NO: 1425518 - DNA, 15 bp, Homo sapiens
ttagctgactgatga

SEQ ID NO: 1425519 - DNA, 15 bp, Homo sapiens
tagctgactgatgat

SEQ ID NO: 1425520 - DNA, 15 bp, Homo sapiens
agctgactgatgatg

SEQ ID NO: 1425521 - DNA, 15 bp, Homo sapiens
gctgactgatgatgg

SEQ ID NO: 1425522 - DNA, 15 bp, Homo sapiens
ctgactgatgatggt

SEQ ID NO: 1425523 - DNA, 15 bp, Homo sapiens
tgactgatgatggtc

SEQ ID NO: 1425524 - DNA, 15 bp, Homo sapiens
gactgatgatggtca

SEQ ID NO: 1425525 - DNA, 15 bp, Homo sapiens
actgatgatggtcaa

SEQ ID NO: 1425526 - DNA, 15 bp, Homo sapiens
ctgatgatggtcaat

SEQ ID NO: 1425527 - DNA, 15 bp, Homo sapiens
tgatgatggtcaatt

SEQ ID NO: 1425528 - DNA, 15 bp, Homo sapiens
gatgatggtcaattt

SEQ ID NO: 1425529 - DNA, 15 bp, Homo sapiens
atgatggtcaattta

SEQ ID NO: 1425530 - DNA, 15 bp, Homo sapiens
tgatggtcaatttat

SEQ ID NO: 1425531 - DNA, 15 bp, Homo sapiens
gatggtcaatttatt

SEQ ID NO: 1425532 - DNA, 15 bp, Homo sapiens
atggtcaatttattt

SEQ ID NO: 1425533 - DNA, 15 bp, Homo sapiens
tggtcaatttatttt

SEQ ID NO: 1425534 - DNA, 15 bp, Homo sapiens
ggtcaatttattttg

SEQ ID NO: 1425535 - DNA, 15 bp, Homo sapiens
gtcaatttattttgt

SEQ ID NO: 1425536 - DNA, 15 bp, Homo sapiens
tcaatttattttgtc

SEQ ID NO: 1425537 - DNA, 15 bp, Homo sapiens
caatttattttgtcc

SEQ ID NO: 1425538 - DNA, 15 bp, Homo sapiens
aatttattttgtcca

SEQ ID NO: 1425539 - DNA, 15 bp, Homo sapiens
atttattttgtccat

SEQ ID NO: 1425540 - DNA, 15 bp, Homo sapiens
tttattttgtccatg

SEQ ID NO: 1425541 - DNA, 15 bp, Homo sapiens
ttattttgtccatgg

SEQ ID NO: 1425542 - DNA, 15 bp, Homo sapiens
tattttgtccatggt

SEQ ID NO: 1425543 - DNA, 15 bp, Homo sapiens
attttgtccatggtg

SEQ ID NO: 1425544 - DNA, 15 bp, Homo sapiens
ttttgtccatggtgt

SEQ ID NO: 1425545 - DNA, 15 bp, Homo sapiens
tttgtccatggtgtc

SEQ ID NO: 1425546 - DNA, 15 bp, Homo sapiens
ttgtccatggtgtca

SEQ ID NO: 1425547 - DNA, 15 bp, Homo sapiens
tgtccatggtgtcaa

SEQ ID NO: 1425548 - DNA, 15 bp, Homo sapiens
gtccatggtgtcaag

SEQ ID NO: 1425549 - DNA, 15 bp, Homo sapiens
tccatggtgtcaagt

SEQ ID NO: 1425550 - DNA, 15 bp, Homo sapiens
ccatggtgtcaagtt

SEQ ID NO: 1425551 - DNA, 15 bp, Homo sapiens
catggtgtcaagttt

SEQ ID NO: 1425552 - DNA, 15 bp, Homo sapiens
atggtgtcaagtttc

SEQ ID NO: 1425553 - DNA, 15 bp, Homo sapiens
tggtgtcaagtttct

SEQ ID NO: 1425554 - DNA, 15 bp, Homo sapiens
ggtgtcaagtttctc

SEQ ID NO: 1425555 - DNA, 15 bp, Homo sapiens
gtgtcaagtttctct

SEQ ID NO: 1425556 - DNA, 15 bp, Homo sapiens
tgtcaagtttctctt

SEQ ID NO: 1425557 - DNA, 15 bp, Homo sapiens
gtcaagtttctcttc

SEQ ID NO: 1425558 - DNA, 15 bp, Homo sapiens
tcaagtttctcttca

SEQ ID NO: 1425559 - DNA, 15 bp, Homo sapiens
caagtttctcttcag

SEQ ID NO: 1425560 - DNA, 15 bp, Homo sapiens
aagtttctcttcagg

SEQ ID NO: 1425561 - DNA, 15 bp, Homo sapiens
agtttctcttcagga

SEQ ID NO: 1425562 - DNA, 15 bp, Homo sapiens
gtttctcttcaggag

SEQ ID NO: 1425563 - DNA, 15 bp, Homo sapiens
tttctcttcaggagg

SEQ ID NO: 1425564 - DNA, 15 bp, Homo sapiens
ttctcttcaggagga

SEQ ID NO: 1425565 - DNA, 15 bp, Homo sapiens
tctcttcaggaggaa

SEQ ID NO: 1425566 - DNA, 15 bp, Homo sapiens
ctcttcaggaggaaa

SEQ ID NO: 1425567 - DNA, 15 bp, Homo sapiens
tcttcaggaggaaaa

SEQ ID NO: 1425568 - DNA, 15 bp, Homo sapiens
cttcaggaggaaaag

SEQ ID NO: 1425569 - DNA, 15 bp, Homo sapiens
ttcaggaggaaaagc

SEQ ID NO: 1425570 - DNA, 15 bp, Homo sapiens
tcaggaggaaaagca

SEQ ID NO: 1425571 - DNA, 15 bp, Homo sapiens
caggaggaaaagcac

SEQ ID NO: 1425572 - DNA, 15 bp, Homo sapiens
aggaggaaaagcaca

SEQ ID NO: 1425573 - DNA, 15 bp, Homo sapiens
ggaggaaaagcacag

SEQ ID NO: 1425574 - DNA, 15 bp, Homo sapiens
gaggaaaagcacaga

SEQ ID NO: 1425575 - DNA, 15 bp, Homo sapiens
aggaaaagcacagaa

SEQ ID NO: 1425576 - DNA, 15 bp, Homo sapiens
ggaaaagcacagaac

SEQ ID NO: 1425577 - DNA, 15 bp, Homo sapiens
gaaaagcacagaact

SEQ ID NO: 1425578 - DNA, 15 bp, Homo sapiens
aaaagcacagaactg

SEQ ID NO: 1425579 - DNA, 15 bp, Homo sapiens
aaagcacagaactgg

SEQ ID NO: 1425580 - DNA, 15 bp, Homo sapiens
aagcacagaactggc

SEQ ID NO: 1425581 - DNA, 15 bp, Homo sapiens
agcacagaactggcc

SEQ ID NO: 1425582 - DNA, 15 bp, Homo sapiens
gcacagaactggcca

SEQ ID NO: 1425583 - DNA, 15 bp, Homo sapiens
cacagaactggccaa

SEQ ID NO: 1425584 - DNA, 15 bp, Homo sapiens
acagaactggccaac

SEQ ID NO: 1425585 - DNA, 15 bp, Homo sapiens
cagaactggccaaca

SEQ ID NO: 1425586 - DNA, 15 bp, Homo sapiens
agaactggccaacaa

SEQ ID NO: 1425587 - DNA, 15 bp, Homo sapiens
gaactggccaacaat

SEQ ID NO: 1425588 - DNA, 15 bp, Homo sapiens
aactggccaacaatt

SEQ ID NO: 1425589 - DNA, 15 bp, Homo sapiens
actggccaacaattg

SEQ ID NO: 1425590 - DNA, 15 bp, Homo sapiens
ctggccaacaattgc

SEQ ID NO: 1425591 - DNA, 15 bp, Homo sapiens
tggccaacaattgct

SEQ ID NO: 1425592 - DNA, 15 bp, Homo sapiens
ggccaacaattgctt

SEQ ID NO: 1425593 - DNA, 15 bp, Homo sapiens
gccaacaattgcttg

SEQ ID NO: 1425594 - DNA, 15 bp, Homo sapiens
ccaacaattgcttga

SEQ ID NO: 1425595 - DNA, 15 bp, Homo sapiens
caacaattgcttgac

SEQ ID NO: 1425596 - DNA, 15 bp, Homo sapiens
aacaattgcttgact

SEQ ID NO: 1425597 - DNA, 15 bp, Homo sapiens
acaattgcttgactg

SEQ ID NO: 1425598 - DNA, 15 bp, Homo sapiens
caattgcttgactgt

SEQ ID NO: 1425599 - DNA, 15 bp, Homo sapiens
aattgcttgactgtt

SEQ ID NO: 1425600 - DNA, 15 bp, Homo sapiens
attgcttgactgttc

SEQ ID NO: 1425601 - DNA, 15 bp, Homo sapiens
ttgcttgactgttct

SEQ ID NO: 1425602 - DNA, 15 bp, Homo sapiens
tgcttgactgttctt

SEQ ID NO: 1425603 - DNA, 15 bp, Homo sapiens
gcttgactgttcttt

SEQ ID NO: 1425604 - DNA, 15 bp, Homo sapiens
cttgactgttcttta

SEQ ID NO: 1425605 - DNA, 15 bp, Homo sapiens
ttgactgttctttac

SEQ ID NO: 1425606 - DNA, 15 bp, Homo sapiens
tgactgttctttacc

SEQ ID NO: 1425607 - DNA, 15 bp, Homo sapiens
gactgttctttacca

SEQ ID NO: 1425608 - DNA, 15 bp, Homo sapiens
actgttctttaccat

SEQ ID NO: 1425609 - DNA, 15 bp, Homo sapiens
ctgttctttaccata

SEQ ID NO: 1425610 - DNA, 15 bp, Homo sapiens
tgttctttaccatac

SEQ ID NO: 1425611 - DNA, 15 bp, Homo sapiens
gttctttaccatact

SEQ ID NO: 1425612 - DNA, 15 bp, Homo sapiens
ttctttaccatactg

SEQ ID NO: 1425613 - DNA, 15 bp, Homo sapiens
tctttaccatactgt

SEQ ID NO: 1425614 - DNA, 15 bp, Homo sapiens
ctttaccatactgtt

SEQ ID NO: 1425615 - DNA, 15 bp, Homo sapiens
tttaccatactgttt

SEQ ID NO: 1425616 - DNA, 15 bp, Homo sapiens
ttaccatactgttta

SEQ ID NO: 1425617 - DNA, 15 bp, Homo sapiens
taccatactgtttag

SEQ ID NO: 1425618 - DNA, 15 bp, Homo sapiens
accatactgtttagc

SEQ ID NO: 1425619 - DNA, 15 bp, Homo sapiens
ccatactgtttagca

SEQ ID NO: 1425620 - DNA, 15 bp, Homo sapiens
catactgtttagcag

SEQ ID NO: 1425621 - DNA, 15 bp, Homo sapiens
atactgtttagcagg

SEQ ID NO: 1425622 - DNA, 15 bp, Homo sapiens
tactgtttagcagga

SEQ ID NO: 1425623 - DNA, 15 bp, Homo sapiens
actgtttagcaggaa

SEQ ID NO: 1425624 - DNA, 15 bp, Homo sapiens
ctgtttagcaggaaa

SEQ ID NO: 1425625 - DNA, 15 bp, Homo sapiens
tgtttagcaggaaac

SEQ ID NO: 1425626 - DNA, 15 bp, Homo sapiens
gtttagcaggaaacc

SEQ ID NO: 1425627 - DNA, 15 bp, Homo sapiens
tttagcaggaaacca

SEQ ID NO: 1425628 - DNA, 15 bp, Homo sapiens
ttagcaggaaaccag

SEQ ID NO: 1425629 - DNA, 15 bp, Homo sapiens
tagcaggaaaccagt

SEQ ID NO: 1425630 - DNA, 15 bp, Homo sapiens
agcaggaaaccagtc

SEQ ID NO: 1425631 - DNA, 15 bp, Homo sapiens
gcaggaaaccagtct

SEQ ID NO: 1425632 - DNA, 15 bp, Homo sapiens
caggaaaccagtctc

SEQ ID NO: 1425633 - DNA, 15 bp, Homo sapiens
aggaaaccagtctca

SEQ ID NO: 1425634 - DNA, 15 bp, Homo sapiens
ggaaaccagtctcag

SEQ ID NO: 1425635 - DNA, 15 bp, Homo sapiens
gaaaccagtctcagt

SEQ ID NO: 1425636 - DNA, 15 bp, Homo sapiens
aaaccagtctcagtg

SEQ ID NO: 1425637 - DNA, 15 bp, Homo sapiens
aaccagtctcagtgt

SEQ ID NO: 1425638 - DNA, 15 bp, Homo sapiens
accagtctcagtgtc

SEQ ID NO: 1425639 - DNA, 15 bp, Homo sapiens
ccagtctcagtgtcc

SEQ ID NO: 1425640 - DNA, 15 bp, Homo sapiens
cagtctcagtgtcca

SEQ ID NO: 1425641 - DNA, 15 bp, Homo sapiens
agtctcagtgtccaa

SEQ ID NO: 1425642 - DNA, 15 bp, Homo sapiens
gtctcagtgtccaac

SEQ ID NO: 1425643 - DNA, 15 bp, Homo sapiens
tctcagtgtccaact

SEQ ID NO: 1425644 - DNA, 15 bp, Homo sapiens
ctcagtgtccaactc

SEQ ID NO: 1425645 - DNA, 15 bp, Homo sapiens
tcagtgtccaactct

SEQ ID NO: 1425646 - DNA, 15 bp, Homo sapiens
cagtgtccaactctc

SEQ ID NO: 1425647 - DNA, 15 bp, Homo sapiens
agtgtccaactctct

SEQ ID NO: 1425648 - DNA, 15 bp, Homo sapiens
gtgtccaactctcta

SEQ ID NO: 1425649 - DNA, 15 bp, Homo sapiens
tgtccaactctctaa

SEQ ID NO: 1425650 - DNA, 15 bp, Homo sapiens
tccaactctctaacc

SEQ ID NO: 1425651 - DNA, 15 bp, Homo sapiens
ccaactctctaacct

SEQ ID NO: 1425652 - DNA, 15 bp, Homo sapiens
caactctctaacctt

SEQ ID NO: 1425653 - DNA, 15 bp, Homo sapiens
aactctctaaccttg

SEQ ID NO: 1425654 - DNA, 15 bp, Homo sapiens
actctctaaccttgg

SEQ ID NO: 1425655 - DNA, 15 bp, Homo sapiens
ctctctaaccttgga

SEQ ID NO: 1425656 - DNA, 15 bp, Homo sapiens
tctctaaccttggaa

SEQ ID NO: 1425657 - DNA, 15 bp, Homo sapiens
ctctaaccttggaac

SEQ ID NO: 1425658 - DNA, 15 bp, Homo sapiens
tctaaccttggaact

SEQ ID NO: 1425659 - DNA, 15 bp, Homo sapiens
ctaaccttggaactg

SEQ ID NO: 1425660 - DNA, 15 bp, Homo sapiens
taaccttggaactgt

SEQ ID NO: 1425661 - DNA, 15 bp, Homo sapiens
aaccttggaactgtg

SEQ ID NO: 1425662 - DNA, 15 bp, Homo sapiens
accttggaactgtga

SEQ ID NO: 1425663 - DNA, 15 bp, Homo sapiens
ccttggaactgtgag

SEQ ID NO: 1425664 - DNA, 15 bp, Homo sapiens
cttggaactgtgaga

SEQ ID NO: 1425665 - DNA, 15 bp, Homo sapiens
ttggaactgtgagaa

SEQ ID NO: 1425666 - DNA, 15 bp, Homo sapiens
tggaactgtgagaac

SEQ ID NO: 1425667 - DNA, 15 bp, Homo sapiens
ggaactgtgagaact

SEQ ID NO: 1425668 - DNA, 15 bp, Homo sapiens
gaactgtgagaactc

SEQ ID NO: 1425669 - DNA, 15 bp, Homo sapiens
aactgtgagaactct

SEQ ID NO: 1425670 - DNA, 15 bp, Homo sapiens
actgtgagaactctg

SEQ ID NO: 1425671 - DNA, 15 bp, Homo sapiens
ctgtgagaactctga

SEQ ID NO: 1425672 - DNA, 15 bp, Homo sapiens
tgtgagaactctgag

SEQ ID NO: 1425673 - DNA, 15 bp, Homo sapiens
gtgagaactctgagg

SEQ ID NO: 1425674 - DNA, 15 bp, Homo sapiens
tgagaactctgagga

SEQ ID NO: 1425675 - DNA, 15 bp, Homo sapiens
gagaactctgaggac

SEQ ID NO: 1425676 - DNA, 15 bp, Homo sapiens
agaactctgaggaca

SEQ ID NO: 1425677 - DNA, 15 bp, Homo sapiens
gaactctgaggacaa

SEQ ID NO: 1425678 - DNA, 15 bp, Homo sapiens
aactctgaggacaaa

SEQ ID NO: 1425679 - DNA, 15 bp, Homo sapiens
actctgaggacaaag

SEQ ID NO: 1425680 - DNA, 15 bp, Homo sapiens
ctctgaggacaaagc

SEQ ID NO: 1425681 - DNA, 15 bp, Homo sapiens
tctgaggacaaagca

SEQ ID NO: 1425682 - DNA, 15 bp, Homo sapiens
ctgaggacaaagcag

SEQ ID NO: 1425683 - DNA, 15 bp, Homo sapiens
tgaggacaaagcagc

SEQ ID NO: 1425684 - DNA, 15 bp, Homo sapiens
gaggacaaagcagcg

SEQ ID NO: 1425685 - DNA, 15 bp, Homo sapiens
aggacaaagcagcgg

SEQ ID NO: 1425686 - DNA, 15 bp, Homo sapiens
ggacaaagcagcgga

SEQ ID NO: 1425687 - DNA, 15 bp, Homo sapiens
gacaaagcagcggat

SEQ ID NO: 1425688 - DNA, 15 bp, Homo sapiens
acaaagcagcggata

SEQ ID NO: 1425689 - DNA, 15 bp, Homo sapiens
caaagcagcggatac

SEQ ID NO: 1425690 - DNA, 15 bp, Homo sapiens
aaagcagcggataca

SEQ ID NO: 1425691 - DNA, 15 bp, Homo sapiens
aagcagcggatacaa

SEQ ID NO: 1425692 - DNA, 15 bp, Homo sapiens
agcagcggatacaac

SEQ ID NO: 1425693 - DNA, 15 bp, Homo sapiens
gcagcggatacaacc

SEQ ID NO: 1425694 - DNA, 15 bp, Homo sapiens
cagcggatacaacct

SEQ ID NO: 1425695 - DNA, 15 bp, Homo sapiens
agcggatacaacctc

SEQ ID NO: 1425696 - DNA, 15 bp, Homo sapiens
gcggatacaacctca

SEQ ID NO: 1425697 - DNA, 15 bp, Homo sapiens
cggatacaacctcaa

SEQ ID NO: 1425698 - DNA, 15 bp, Homo sapiens
ggatacaacctcaaa

SEQ ID NO: 1425699 - DNA, 15 bp, Homo sapiens
gatacaacctcaaaa

SEQ ID NO: 1425700 - DNA, 15 bp, Homo sapiens
atacaacctcaaaag

SEQ ID NO: 1425701 - DNA, 15 bp, Homo sapiens
tacaacctcaaaaga

SEQ ID NO: 1425702 - DNA, 15 bp, Homo sapiens
acaacctcaaaagac

SEQ ID NO: 1425703 - DNA, 15 bp, Homo sapiens
caacctcaaaagacg

SEQ ID NO: 1425704 - DNA, 15 bp, Homo sapiens
aacctcaaaagacgt

SEQ ID NO: 1425705 - DNA, 15 bp, Homo sapiens
acctcaaaagacgtc

SEQ ID NO: 1425706 - DNA, 15 bp, Homo sapiens
cctcaaaagacgtct

SEQ ID NO: 1425707 - DNA, 15 bp, Homo sapiens
ctcaaaagacgtctg

SEQ ID NO: 1425708 - DNA, 15 bp, Homo sapiens
tcaaaagacgtctgt

SEQ ID NO: 1425709 - DNA, 15 bp, Homo sapiens
caaaagacgtctgtc

SEQ ID NO: 1425710 - DNA, 15 bp, Homo sapiens
aaaagacgtctgtct

SEQ ID NO: 1425711 - DNA, 15 bp, Homo sapiens
aaagacgtctgtcta

SEQ ID NO: 1425712 - DNA, 15 bp, Homo sapiens
aagacgtctgtctac

SEQ ID NO: 1425713 - DNA, 15 bp, Homo sapiens
agacgtctgtctaca

SEQ ID NO: 1425714 - DNA, 15 bp, Homo sapiens
gacgtctgtctacat

SEQ ID NO: 1425715 - DNA, 15 bp, Homo sapiens
acgtctgtctacatt

SEQ ID NO: 1425716 - DNA, 15 bp, Homo sapiens
cgtctgtctacattg

SEQ ID NO: 1425717 - DNA, 15 bp, Homo sapiens
gtctgtctacattga

SEQ ID NO: 1425718 - DNA, 15 bp, Homo sapiens
tctgtctacattgaa

SEQ ID NO: 1425719 - DNA, 15 bp, Homo sapiens
ctgtctacattgaat

SEQ ID NO: 1425720 - DNA, 15 bp, Homo sapiens
tgtctacattgaatt

SEQ ID NO: 1425721 - DNA, 15 bp, Homo sapiens
gtctacattgaattg

SEQ ID NO: 1425722 - DNA, 15 bp, Homo sapiens
tctacattgaattgg

SEQ ID NO: 1425723 - DNA, 15 bp, Homo sapiens
ctacattgaattggg

SEQ ID NO: 1425724 - DNA, 15 bp, Homo sapiens
tacattgaattgggt

SEQ ID NO: 1425725 - DNA, 15 bp, Homo sapiens
acattgaattgggta

SEQ ID NO: 1425726 - DNA, 15 bp, Homo sapiens
cattgaattgggtaa

SEQ ID NO: 1425727 - DNA, 15 bp, Homo sapiens
attgaattgggtaag

SEQ ID NO: 1425728 - DNA, 15 bp, Homo sapiens
ttgaattgggtaagg

SEQ ID NO: 1425729 - DNA, 15 bp, Homo sapiens
tgaattgggtaaggg

SEQ ID NO: 1425730 - DNA, 15 bp, Homo sapiens
gaattgggtaagggt

SEQ ID NO: 1425731 - DNA, 15 bp, Homo sapiens
aattgggtaagggtc

SEQ ID NO: 1425732 - DNA, 15 bp, Homo sapiens
attgggtaagggtct

SEQ ID NO: 1425733 - DNA, 15 bp, Homo sapiens
ttgggtaagggtctc

SEQ ID NO: 1425734 - DNA, 15 bp, Homo sapiens
tgggtaagggtctca

SEQ ID NO: 1425735 - DNA, 15 bp, Homo sapiens
gggtaagggtctcag

SEQ ID NO: 1425736 - DNA, 15 bp, Homo sapiens
ggtaagggtctcagg

SEQ ID NO: 1425737 - DNA, 15 bp, Homo sapiens
gtaagggtctcaggt

SEQ ID NO: 1425738 - DNA, 15 bp, Homo sapiens
taagggtctcaggtt

SEQ ID NO: 1425739 - DNA, 15 bp, Homo sapiens
aagggtctcaggttt

SEQ ID NO: 1425740 - DNA, 15 bp, Homo sapiens
agggtctcaggtttt

SEQ ID NO: 1425741 - DNA, 15 bp, Homo sapiens
gggtctcaggttttt

SEQ ID NO: 1425742 - DNA, 15 bp, Homo sapiens
ggtctcaggtttttt

SEQ ID NO: 1425743 - DNA, 15 bp, Homo sapiens
gtctcaggtttttta

SEQ ID NO: 1425744 - DNA, 15 bp, Homo sapiens
tctcaggttttttaa

SEQ ID NO: 1425745 - DNA, 15 bp, Homo sapiens
ctcaggttttttaag

SEQ ID NO: 1425746 - DNA, 15 bp, Homo sapiens
tcaggttttttaagt

SEQ ID NO: 1425747 - DNA, 15 bp, Homo sapiens
caggttttttaagta

SEQ ID NO: 1425748 - DNA, 15 bp, Homo sapiens
aggttttttaagtat

SEQ ID NO: 1425749 - DNA, 15 bp, Homo sapiens
ggttttttaagtatt

SEQ ID NO: 1425750 - DNA, 15 bp, Homo sapiens
gttttttaagtattt

SEQ ID NO: 1425751 - DNA, 15 bp, Homo sapiens
ttttttaagtattta

SEQ ID NO: 1425752 - DNA, 15 bp, Homo sapiens
tttttaagtatttaa

SEQ ID NO: 1425753 - DNA, 15 bp, Homo sapiens
ttttaagtatttaat

SEQ ID NO: 1425754 - DNA, 15 bp, Homo sapiens
tttaagtatttaata

SEQ ID NO: 1425755 - DNA, 15 bp, Homo sapiens
ttaagtatttaataa

SEQ ID NO: 1425756 - DNA, 15 bp, Homo sapiens
taagtatttaataat

SEQ ID NO: 1425757 - DNA, 15 bp, Homo sapiens
aagtatttaataata

SEQ ID NO: 1425758 - DNA, 15 bp, Homo sapiens
agtatttaataataa

SEQ ID NO: 1425759 - DNA, 15 bp, Homo sapiens
gtatttaataataat

SEQ ID NO: 1425760 - DNA, 15 bp, Homo sapiens
tatttaataataatt

SEQ ID NO: 1425761 - DNA, 15 bp, Homo sapiens
atttaataataattg

SEQ ID NO: 1425762 - DNA, 15 bp, Homo sapiens
tttaataataattgc

SEQ ID NO: 1425763 - DNA, 15 bp, Homo sapiens
ttaataataattgct

SEQ ID NO: 1425764 - DNA, 15 bp, Homo sapiens
taataataattgctg

SEQ ID NO: 1425765 - DNA, 15 bp, Homo sapiens
aataataattgctgg

SEQ ID NO: 1425766 - DNA, 15 bp, Homo sapiens
ataataattgctgga

SEQ ID NO: 1425767 - DNA, 15 bp, Homo sapiens
taataattgctggat

SEQ ID NO: 1425768 - DNA, 15 bp, Homo sapiens
aataattgctggatt

SEQ ID NO: 1425769 - DNA, 15 bp, Homo sapiens
ataattgctggattc

SEQ ID NO: 1425770 - DNA, 15 bp, Homo sapiens
taattgctggattcc

SEQ ID NO: 1425771 - DNA, 15 bp, Homo sapiens
aattgctggattcct

SEQ ID NO: 1425772 - DNA, 15 bp, Homo sapiens
attgctggattcctt

SEQ ID NO: 1425773 - DNA, 15 bp, Homo sapiens
ttgctggattcctta

SEQ ID NO: 1425774 - DNA, 15 bp, Homo sapiens
tgctggattccttat

SEQ ID NO: 1425775 - DNA, 15 bp, Homo sapiens
gctggattccttatc

SEQ ID NO: 1425776 - DNA, 15 bp, Homo sapiens
ctggattccttatct

SEQ ID NO: 1425777 - DNA, 15 bp, Homo sapiens
tggattccttatctt

SEQ ID NO: 1425778 - DNA, 15 bp, Homo sapiens
ggattccttatctta

SEQ ID NO: 1425779 - DNA, 15 bp, Homo sapiens
gattccttatcttat

SEQ ID NO: 1425780 - DNA, 15 bp, Homo sapiens
attccttatcttata

SEQ ID NO: 1425781 - DNA, 15 bp, Homo sapiens
ttccttatcttatag

SEQ ID NO: 1425782 - DNA, 15 bp, Homo sapiens
tccttatcttatagt

SEQ ID NO: 1425783 - DNA, 15 bp, Homo sapiens
ccttatcttatagtt

SEQ ID NO: 1425784 - DNA, 15 bp, Homo sapiens
cttatcttatagttt

SEQ ID NO: 1425785 - DNA, 15 bp, Homo sapiens
ttatcttatagtttt

SEQ ID NO: 1425786 - DNA, 15 bp, Homo sapiens
tatcttatagttttg

SEQ ID NO: 1425787 - DNA, 15 bp, Homo sapiens
atcttatagttttgc

SEQ ID NO: 1425788 - DNA, 15 bp, Homo sapiens
tcttatagttttgcc

SEQ ID NO: 1425789 - DNA, 15 bp, Homo sapiens
cttatagttttgcca

SEQ ID NO: 1425790 - DNA, 15 bp, Homo sapiens
ttatagttttgccaa

SEQ ID NO: 1425791 - DNA, 15 bp, Homo sapiens
tatagttttgccaaa

SEQ ID NO: 1425792 - DNA, 15 bp, Homo sapiens
atagttttgccaaaa

SEQ ID NO: 1425793 - DNA, 15 bp, Homo sapiens
tagttttgccaaaaa

SEQ ID NO: 1425794 - DNA, 15 bp, Homo sapiens
agttttgccaaaaat

SEQ ID NO: 1425795 - DNA, 15 bp, Homo sapiens
gttttgccaaaaatc

SEQ ID NO: 1425796 - DNA, 15 bp, Homo sapiens
ttttgccaaaaatct

SEQ ID NO: 1425797 - DNA, 15 bp, Homo sapiens
tttgccaaaaatctt

SEQ ID NO: 1425798 - DNA, 15 bp, Homo sapiens
ttgccaaaaatcttg

SEQ ID NO: 1425799 - DNA, 15 bp, Homo sapiens
tgccaaaaatcttgg

SEQ ID NO: 1425800 - DNA, 15 bp, Homo sapiens
gccaaaaatcttggt

SEQ ID NO: 1425801 - DNA, 15 bp, Homo sapiens
ccaaaaatcttggtc

SEQ ID NO: 1425802 - DNA, 15 bp, Homo sapiens
caaaaatcttggtca

SEQ ID NO: 1425803 - DNA, 15 bp, Homo sapiens
aaaaatcttggtcat

SEQ ID NO: 1425804 - DNA, 15 bp, Homo sapiens
aaaatcttggtcata

SEQ ID NO: 1425805 - DNA, 15 bp, Homo sapiens
aaatcttggtcataa

SEQ ID NO: 1425806 - DNA, 15 bp, Homo sapiens
aatcttggtcataat

SEQ ID NO: 1425807 - DNA, 15 bp, Homo sapiens
atcttggtcataatt

SEQ ID NO: 1425808 - DNA, 15 bp, Homo sapiens
tcttggtcataattt

SEQ ID NO: 1425809 - DNA, 15 bp, Homo sapiens
cttggtcataatttg

SEQ ID NO: 1425810 - DNA, 15 bp, Homo sapiens
ttggtcataatttgt

SEQ ID NO: 1425811 - DNA, 15 bp, Homo sapiens
tggtcataatttgta

SEQ ID NO: 1425812 - DNA, 15 bp, Homo sapiens
ggtcataatttgtat

SEQ ID NO: 1425813 - DNA, 15 bp, Homo sapiens
gtcataatttgtatt

SEQ ID NO: 1425814 - DNA, 15 bp, Homo sapiens
tcataatttgtattt

SEQ ID NO: 1425815 - DNA, 15 bp, Homo sapiens
cataatttgtatttg

SEQ ID NO: 1425816 - DNA, 15 bp, Homo sapiens
ataatttgtatttgt

SEQ ID NO: 1425817 - DNA, 15 bp, Homo sapiens
taatttgtatttgtg

SEQ ID NO: 1425818 - DNA, 15 bp, Homo sapiens
aatttgtatttgtgg

SEQ ID NO: 1425819 - DNA, 15 bp, Homo sapiens
atttgtatttgtggt

SEQ ID NO: 1425820 - DNA, 15 bp, Homo sapiens
tttgtatttgtggta

SEQ ID NO: 1425821 - DNA, 15 bp, Homo sapiens
ttgtatttgtggtag

SEQ ID NO: 1425822 - DNA, 15 bp, Homo sapiens
tgtatttgtggtagg

SEQ ID NO: 1425823 - DNA, 15 bp, Homo sapiens
gtatttgtggtaggc

SEQ ID NO: 1425824 - DNA, 15 bp, Homo sapiens
tatttgtggtaggca

SEQ ID NO: 1425825 - DNA, 15 bp, Homo sapiens
atttgtggtaggcag

SEQ ID NO: 1425826 - DNA, 15 bp, Homo sapiens
tttgtggtaggcagc

SEQ ID NO: 1425827 - DNA, 15 bp, Homo sapiens
ttgtggtaggcagct

SEQ ID NO: 1425828 - DNA, 15 bp, Homo sapiens
tgtggtaggcagctt

SEQ ID NO: 1425829 - DNA, 15 bp, Homo sapiens
gtggtaggcagcttt

SEQ ID NO: 1425830 - DNA, 15 bp, Homo sapiens
tggtaggcagctttg

SEQ ID NO: 1425831 - DNA, 15 bp, Homo sapiens
ggtaggcagctttgg

SEQ ID NO: 1425832 - DNA, 15 bp, Homo sapiens
gtaggcagctttggg

SEQ ID NO: 1425833 - DNA, 15 bp, Homo sapiens
taggcagctttggga

SEQ ID NO: 1425834 - DNA, 15 bp, Homo sapiens
aggcagctttgggaa

SEQ ID NO: 1425835 - DNA, 15 bp, Homo sapiens
ggcagctttgggaag

SEQ ID NO: 1425836 - DNA, 15 bp, Homo sapiens
gcagctttgggaagt

SEQ ID NO: 1425837 - DNA, 15 bp, Homo sapiens
cagctttgggaagtg

SEQ ID NO: 1425838 - DNA, 15 bp, Homo sapiens
agctttgggaagtga

SEQ ID NO: 1425839 - DNA, 15 bp, Homo sapiens
gctttgggaagtgaa

SEQ ID NO: 1425840 - DNA, 15 bp, Homo sapiens
ctttgggaagtgaat

SEQ ID NO: 1425841 - DNA, 15 bp, Homo sapiens
tttgggaagtgaatt

SEQ ID NO: 1425842 - DNA, 15 bp, Homo sapiens
ttgggaagtgaattt

SEQ ID NO: 1425843 - DNA, 15 bp, Homo sapiens
tgggaagtgaatttt

SEQ ID NO: 1425844 - DNA, 15 bp, Homo sapiens
gggaagtgaatttta

SEQ ID NO: 1425845 - DNA, 15 bp, Homo sapiens
ggaagtgaattttat

SEQ ID NO: 1425846 - DNA, 15 bp, Homo sapiens
gaagtgaattttatg

SEQ ID NO: 1425847 - DNA, 15 bp, Homo sapiens
aagtgaattttatga

SEQ ID NO: 1425848 - DNA, 15 bp, Homo sapiens
agtgaattttatgag

SEQ ID NO: 1425849 - DNA, 15 bp, Homo sapiens
gtgaattttatgagc

SEQ ID NO: 1425850 - DNA, 15 bp, Homo sapiens
tgaattttatgagcc

SEQ ID NO: 1425851 - DNA, 15 bp, Homo sapiens
gaattttatgagccc

SEQ ID NO: 1425852 - DNA, 15 bp, Homo sapiens
aattttatgagccct

SEQ ID NO: 1425853 - DNA, 15 bp, Homo sapiens
attttatgagcccta

SEQ ID NO: 1425854 - DNA, 15 bp, Homo sapiens
ttttatgagccctat

SEQ ID NO: 1425855 - DNA, 15 bp, Homo sapiens
tttatgagccctatg

SEQ ID NO: 1425856 - DNA, 15 bp, Homo sapiens
ttatgagccctatgg

SEQ ID NO: 1425857 - DNA, 15 bp, Homo sapiens
tatgagccctatggt

SEQ ID NO: 1425858 - DNA, 15 bp, Homo sapiens
atgagccctatggtg

SEQ ID NO: 1425859 - DNA, 15 bp, Homo sapiens
tgagccctatggtga

SEQ ID NO: 1425860 - DNA, 15 bp, Homo sapiens
gagccctatggtgag

SEQ ID NO: 1425861 - DNA, 15 bp, Homo sapiens
agccctatggtgagt

SEQ ID NO: 1425862 - DNA, 15 bp, Homo sapiens
gccctatggtgagtt

SEQ ID NO: 1425863 - DNA, 15 bp, Homo sapiens
ccctatggtgagtta

SEQ ID NO: 1425864 - DNA, 15 bp, Homo sapiens
cctatggtgagttat

SEQ ID NO: 1425865 - DNA, 15 bp, Homo sapiens
ctatggtgagttata

SEQ ID NO: 1425866 - DNA, 15 bp, Homo sapiens
tatggtgagttataa

SEQ ID NO: 1425867 - DNA, 15 bp, Homo sapiens
atggtgagttataaa

SEQ ID NO: 1425868 - DNA, 15 bp, Homo sapiens
tggtgagttataaaa

SEQ ID NO: 1425869 - DNA, 15 bp, Homo sapiens
ggtgagttataaaaa

SEQ ID NO: 1425870 - DNA, 15 bp, Homo sapiens
gtgagttataaaaaa

SEQ ID NO: 1425871 - DNA, 15 bp, Homo sapiens
tgagttataaaaaat

SEQ ID NO: 1425872 - DNA, 15 bp, Homo sapiens
gagttataaaaaatg

SEQ ID NO: 1425873 - DNA, 15 bp, Homo sapiens
agttataaaaaatgt

SEQ ID NO: 1425874 - DNA, 15 bp, Homo sapiens
gttataaaaaatgta

SEQ ID NO: 1425875 - DNA, 15 bp, Homo sapiens
ttataaaaaatgtaa

SEQ ID NO: 1425876 - DNA, 15 bp, Homo sapiens
tataaaaaatgtaaa

SEQ ID NO: 1425877 - DNA, 15 bp, Homo sapiens
ataaaaaatgtaaaa

SEQ ID NO: 1425878 - DNA, 15 bp, Homo sapiens
taaaaaatgtaaaag

SEQ ID NO: 1425879 - DNA, 15 bp, Homo sapiens
aaaaaatgtaaaaga

SEQ ID NO: 1425880 - DNA, 15 bp, Homo sapiens
aaaaatgtaaaagac

SEQ ID NO: 1425881 - DNA, 15 bp, Homo sapiens
aaaatgtaaaagacg

SEQ ID NO: 1425882 - DNA, 15 bp, Homo sapiens
aaatgtaaaagacgc

SEQ ID NO: 1425883 - DNA, 15 bp, Homo sapiens
aatgtaaaagacgca

SEQ ID NO: 1425884 - DNA, 15 bp, Homo sapiens
atgtaaaagacgcag

SEQ ID NO: 1425885 - DNA, 15 bp, Homo sapiens
tgtaaaagacgcagt

SEQ ID NO: 1425886 - DNA, 15 bp, Homo sapiens
gtaaaagacgcagtt

SEQ ID NO: 1425887 - DNA, 15 bp, Homo sapiens
taaaagacgcagttc

SEQ ID NO: 1425888 - DNA, 15 bp, Homo sapiens
aaaagacgcagttcc

SEQ ID NO: 1425889 - DNA, 15 bp, Homo sapiens
aaagacgcagttccc

SEQ ID NO: 1425890 - DNA, 15 bp, Homo sapiens
aagacgcagttccca

SEQ ID NO: 1425891 - DNA, 15 bp, Homo sapiens
agacgcagttcccac

SEQ ID NO: 1425892 - DNA, 15 bp, Homo sapiens
gacgcagttcccacc

SEQ ID NO: 1425893 - DNA, 15 bp, Homo sapiens
acgcagttcccacct

SEQ ID NO: 1425894 - DNA, 15 bp, Homo sapiens
cgcagttcccacctt

SEQ ID NO: 1425895 - DNA, 15 bp, Homo sapiens
gcagttcccaccttg

SEQ ID NO: 1425896 - DNA, 15 bp, Homo sapiens
cagttcccaccttga

SEQ ID NO: 1425897 - DNA, 15 bp, Homo sapiens
agttcccaccttgaa

SEQ ID NO: 1425898 - DNA, 15 bp, Homo sapiens
gttcccaccttgaag

SEQ ID NO: 1425899 - DNA, 15 bp, Homo sapiens
ttcccaccttgaaga

SEQ ID NO: 1425900 - DNA, 15 bp, Homo sapiens
tcccaccttgaagaa

SEQ ID NO: 1425901 - DNA, 15 bp, Homo sapiens
cccaccttgaagaat

SEQ ID NO: 1425902 - DNA, 15 bp, Homo sapiens
ccaccttgaagaatc

SEQ ID NO: 1425903 - DNA, 15 bp, Homo sapiens
caccttgaagaatct

SEQ ID NO: 1425904 - DNA, 15 bp, Homo sapiens
accttgaagaatctt

SEQ ID NO: 1425905 - DNA, 15 bp, Homo sapiens
ccttgaagaatctta

SEQ ID NO: 1425906 - DNA, 15 bp, Homo sapiens
cttgaagaatcttac

SEQ ID NO: 1425907 - DNA, 15 bp, Homo sapiens
ttgaagaatcttact

SEQ ID NO: 1425908 - DNA, 15 bp, Homo sapiens
tgaagaatcttactt

SEQ ID NO: 1425909 - DNA, 15 bp, Homo sapiens
gaagaatcttacttt

SEQ ID NO: 1425910 - DNA, 15 bp, Homo sapiens
aagaatcttacttta

SEQ ID NO: 1425911 - DNA, 15 bp, Homo sapiens
agaatcttactttaa

SEQ ID NO: 1425912 - DNA, 15 bp, Homo sapiens
gaatcttactttaaa

SEQ ID NO: 1425913 - DNA, 15 bp, Homo sapiens
aatcttactttaaaa

SEQ ID NO: 1425914 - DNA, 15 bp, Homo sapiens
atcttactttaaaaa

SEQ ID NO: 1425915 - DNA, 15 bp, Homo sapiens
tcttactttaaaaag

SEQ ID NO: 1425916 - DNA, 15 bp, Homo sapiens
cttactttaaaaagg

SEQ ID NO: 1425917 - DNA, 15 bp, Homo sapiens
ttactttaaaaaggg

SEQ ID NO: 1425918 - DNA, 15 bp, Homo sapiens
tactttaaaaaggga

SEQ ID NO: 1425919 - DNA, 15 bp, Homo sapiens
actttaaaaagggag

SEQ ID NO: 1425920 - DNA, 15 bp, Homo sapiens
ctttaaaaagggagc

SEQ ID NO: 1425921 - DNA, 15 bp, Homo sapiens
tttaaaaagggagca

SEQ ID NO: 1425922 - DNA, 15 bp, Homo sapiens
ttaaaaagggagcaa

SEQ ID NO: 1425923 - DNA, 15 bp, Homo sapiens
taaaaagggagcaaa

SEQ ID NO: 1425924 - DNA, 15 bp, Homo sapiens
aaaaagggagcaaaa

SEQ ID NO: 1425925 - DNA, 15 bp, Homo sapiens
aaaagggagcaaaag

SEQ ID NO: 1425926 - DNA, 15 bp, Homo sapiens
aaagggagcaaaaga

SEQ ID NO: 1425927 - DNA, 15 bp, Homo sapiens
aagggagcaaaagag

SEQ ID NO: 1425928 - DNA, 15 bp, Homo sapiens
agggagcaaaagagg

SEQ ID NO: 1425929 - DNA, 15 bp, Homo sapiens
gggagcaaaagaggc

SEQ ID NO: 1425930 - DNA, 15 bp, Homo sapiens
ggagcaaaagaggcc

SEQ ID NO: 1425931 - DNA, 15 bp, Homo sapiens
gagcaaaagaggcca

SEQ ID NO: 1425932 - DNA, 15 bp, Homo sapiens
agcaaaagaggccag

SEQ ID NO: 1425933 - DNA, 15 bp, Homo sapiens
gcaaaagaggccagg

SEQ ID NO: 1425934 - DNA, 15 bp, Homo sapiens
caaaagaggccaggc

SEQ ID NO: 1425935 - DNA, 15 bp, Homo sapiens
aaaagaggccaggca

SEQ ID NO: 1425936 - DNA, 15 bp, Homo sapiens
aaagaggccaggcat

SEQ ID NO: 1425937 - DNA, 15 bp, Homo sapiens
aagaggccaggcatg

SEQ ID NO: 1425938 - DNA, 15 bp, Homo sapiens
gaggccaaagtgggt

SEQ ID NO: 1425939 - DNA, 15 bp, Homo sapiens
aggccaaagtgggtg

SEQ ID NO: 1425940 - DNA, 15 bp, Homo sapiens
ggccaaagtgggtgg

SEQ ID NO: 1425941 - DNA, 15 bp, Homo sapiens
gccaaagtgggtgga

SEQ ID NO: 1425942 - DNA, 15 bp, Homo sapiens
ccaaagtgggtggat

SEQ ID NO: 1425943 - DNA, 15 bp, Homo sapiens
caaagtgggtggatc

SEQ ID NO: 1425944 - DNA, 15 bp, Homo sapiens
aaagtgggtggatca

SEQ ID NO: 1425945 - DNA, 15 bp, Homo sapiens
aagtgggtggatcac

SEQ ID NO: 1425946 - DNA, 15 bp, Homo sapiens
agtgggtggatcacc

SEQ ID NO: 1425947 - DNA, 15 bp, Homo sapiens
aactagtgtttctta

SEQ ID NO: 1425948 - DNA, 15 bp, Homo sapiens
actagtgtttcttat

SEQ ID NO: 1425949 - DNA, 15 bp, Homo sapiens
ctagtgtttcttatt

SEQ ID NO: 1425950 - DNA, 15 bp, Homo sapiens
tagtgtttcttatta

SEQ ID NO: 1425951 - DNA, 15 bp, Homo sapiens
agtgtttcttattag

SEQ ID NO: 1425952 - DNA, 15 bp, Homo sapiens
gtgtttcttattagg

SEQ ID NO: 1425953 - DNA, 15 bp, Homo sapiens
tgtttcttattagga

SEQ ID NO: 1425954 - DNA, 15 bp, Homo sapiens
gtttcttattaggac

SEQ ID NO: 1425955 - DNA, 15 bp, Homo sapiens
tttcttattaggact

SEQ ID NO: 1425956 - DNA, 15 bp, Homo sapiens
ttcttattaggactc

SEQ ID NO: 1425957 - DNA, 15 bp, Homo sapiens
tcttattaggactct

SEQ ID NO: 1425958 - DNA, 15 bp, Homo sapiens
cttattaggactctg

SEQ ID NO: 1425959 - DNA, 15 bp, Homo sapiens
ttattaggactctgt

SEQ ID NO: 1425960 - DNA, 15 bp, Homo sapiens
tattaggactctgtc

SEQ ID NO: 1425961 - DNA, 15 bp, Homo sapiens
attaggactctgtct

SEQ ID NO: 1425962 - DNA, 15 bp, Homo sapiens
ttaggactctgtctt

SEQ ID NO: 1425963 - DNA, 15 bp, Homo sapiens
taggactctgtcttt

SEQ ID NO: 1425964 - DNA, 15 bp, Homo sapiens
aggactctgtctttt

SEQ ID NO: 1425965 - DNA, 15 bp, Homo sapiens
ggactctgtcttttc

SEQ ID NO: 1425966 - DNA, 15 bp, Homo sapiens
gactctgtcttttcc

SEQ ID NO: 1425967 - DNA, 15 bp, Homo sapiens
actctgtcttttccc

SEQ ID NO: 1425968 - DNA, 15 bp, Homo sapiens
ctctgtcttttccct

SEQ ID NO: 1425969 - DNA, 15 bp, Homo sapiens
tctgtcttttcccta

SEQ ID NO: 1425970 - DNA, 15 bp, Homo sapiens
ctgtcttttccctat

SEQ ID NO: 1425971 - DNA, 15 bp, Homo sapiens
tgtcttttccctata

SEQ ID NO: 1425972 - DNA, 15 bp, Homo sapiens
gtcttttccctatag

SEQ ID NO: 1425973 - DNA, 15 bp, Homo sapiens
tcttttccctatagt

SEQ ID NO: 1425974 - DNA, 15 bp, Homo sapiens
cttttccctatagtg

SEQ ID NO: 1425975 - DNA, 15 bp, Homo sapiens
ttttccctatagtgt

SEQ ID NO: 1425976 - DNA, 15 bp, Homo sapiens
tttccctatagtgtg

SEQ ID NO: 1425977 - DNA, 15 bp, Homo sapiens
ttccctatagtgtgg

SEQ ID NO: 1425978 - DNA, 15 bp, Homo sapiens
tccctatagtgtggg

SEQ ID NO: 1425979 - DNA, 15 bp, Homo sapiens
ccctatagtgtggga

SEQ ID NO: 1425980 - DNA, 15 bp, Homo sapiens
cctatagtgtgggag

SEQ ID NO: 1425981 - DNA, 15 bp, Homo sapiens
ctatagtgtgggaga

SEQ ID NO: 1425982 - DNA, 15 bp, Homo sapiens
tatagtgtgggagat

SEQ ID NO: 1425983 - DNA, 15 bp, Homo sapiens
atagtgtgggagatc

SEQ ID NO: 1425984 - DNA, 15 bp, Homo sapiens
tagtgtgggagatca

SEQ ID NO: 1425985 - DNA, 15 bp, Homo sapiens
agtgtgggagatcaa

SEQ ID NO: 1425986 - DNA, 15 bp, Homo sapiens
gtgtgggagatcaag

SEQ ID NO: 1425987 - DNA, 15 bp, Homo sapiens
tgtgggagatcaaga

SEQ ID NO: 1425988 - DNA, 15 bp, Homo sapiens
gtgggagatcaagaa

SEQ ID NO: 1425989 - DNA, 15 bp, Homo sapiens
tgggagatcaagaat

SEQ ID NO: 1425990 - DNA, 15 bp, Homo sapiens
gggagatcaagaatt

SEQ ID NO: 1425991 - DNA, 15 bp, Homo sapiens
ggagatcaagaattg

SEQ ID NO: 1425992 - DNA, 15 bp, Homo sapiens
gagatcaagaattgt

SEQ ID NO: 1425993 - DNA, 15 bp, Homo sapiens
agatcaagaattgtt

SEQ ID NO: 1425994 - DNA, 15 bp, Homo sapiens
gatcaagaattgtta

SEQ ID NO: 1425995 - DNA, 15 bp, Homo sapiens
atcaagaattgttac

SEQ ID NO: 1425996 - DNA, 15 bp, Homo sapiens
tcaagaattgttaca

SEQ ID NO: 1425997 - DNA, 15 bp, Homo sapiens
caagaattgttacaa

SEQ ID NO: 1425998 - DNA, 15 bp, Homo sapiens
aagaattgttacaaa

SEQ ID NO: 1425999 - DNA, 15 bp, Homo sapiens
agaattgttacaaat

SEQ ID NO: 1426000 - DNA, 15 bp, Homo sapiens
gaattgttacaaatc

SEQ ID NO: 1426001 - DNA, 15 bp, Homo sapiens
aattgttacaaatca

SEQ ID NO: 1426002 - DNA, 15 bp, Homo sapiens
attgttacaaatcac

SEQ ID NO: 1426003 - DNA, 15 bp, Homo sapiens
ttgttacaaatcacc

SEQ ID NO: 1426004 - DNA, 15 bp, Homo sapiens
tgttacaaatcaccc

SEQ ID NO: 1426005 - DNA, 15 bp, Homo sapiens
gttacaaatcacccc

SEQ ID NO: 1426006 - DNA, 15 bp, Homo sapiens
ttacaaatcacccct

SEQ ID NO: 1426007 - DNA, 15 bp, Homo sapiens
tacaaatcacccctc

SEQ ID NO: 1426008 - DNA, 15 bp, Homo sapiens
acaaatcacccctca

SEQ ID NO: 1426009 - DNA, 15 bp, Homo sapiens
caaatcacccctcaa

SEQ ID NO: 1426010 - DNA, 15 bp, Homo sapiens
aaatcacccctcaag

SEQ ID NO: 1426011 - DNA, 15 bp, Homo sapiens
aatcacccctcaagg

SEQ ID NO: 1426012 - DNA, 15 bp, Homo sapiens
atcacccctcaagga

SEQ ID NO: 1426013 - DNA, 15 bp, Homo sapiens
tcacccctcaaggaa

SEQ ID NO: 1426014 - DNA, 15 bp, Homo sapiens
cacccctcaaggaac

SEQ ID NO: 1426015 - DNA, 15 bp, Homo sapiens
acccctcaaggaacc

SEQ ID NO: 1426016 - DNA, 15 bp, Homo sapiens
cccctcaaggaacca

SEQ ID NO: 1426017 - DNA, 15 bp, Homo sapiens
ccctcaaggaaccag

SEQ ID NO: 1426018 - DNA, 15 bp, Homo sapiens
cctcaaggaaccagg

SEQ ID NO: 1426019 - DNA, 15 bp, Homo sapiens
ctcaaggaaccaggg

SEQ ID NO: 1426020 - DNA, 15 bp, Homo sapiens
tcaaggaaccaggga

SEQ ID NO: 1426021 - DNA, 15 bp, Homo sapiens
caaggaaccagggat

SEQ ID NO: 1426022 - DNA, 15 bp, Homo sapiens
aaggaaccagggatg

SEQ ID NO: 1426023 - DNA, 15 bp, Homo sapiens
aggaaccagggatga

SEQ ID NO: 1426024 - DNA, 15 bp, Homo sapiens
ggaaccagggatgaa

SEQ ID NO: 1426025 - DNA, 15 bp, Homo sapiens
gaaccagggatgaaa

SEQ ID NO: 1426026 - DNA, 15 bp, Homo sapiens
aaccagggatgaaat

SEQ ID NO: 1426027 - DNA, 15 bp, Homo sapiens
accagggatgaaatc

SEQ ID NO: 1426028 - DNA, 15 bp, Homo sapiens
ccagggatgaaatca

SEQ ID NO: 1426029 - DNA, 15 bp, Homo sapiens
cagggatgaaatcag

SEQ ID NO: 1426030 - DNA, 15 bp, Homo sapiens
agggatgaaatcagt

SEQ ID NO: 1426031 - DNA, 15 bp, Homo sapiens
gggatgaaatcagtt

SEQ ID NO: 1426032 - DNA, 15 bp, Homo sapiens
ggatgaaatcagttt

SEQ ID NO: 1426033 - DNA, 15 bp, Homo sapiens
gatgaaatcagtttg

SEQ ID NO: 1426034 - DNA, 15 bp, Homo sapiens
atgaaatcagtttgg

SEQ ID NO: 1426035 - DNA, 15 bp, Homo sapiens
tgaaatcagtttgga

SEQ ID NO: 1426036 - DNA, 15 bp, Homo sapiens
gaaatcagtttggat

SEQ ID NO: 1426037 - DNA, 15 bp, Homo sapiens
aaatcagtttggatt

SEQ ID NO: 1426038 - DNA, 15 bp, Homo sapiens
aatcagtttggattc

SEQ ID NO: 1426039 - DNA, 15 bp, Homo sapiens
atcagtttggattct

SEQ ID NO: 1426040 - DNA, 15 bp, Homo sapiens
tcagtttggattctg

SEQ ID NO: 1426041 - DNA, 15 bp, Homo sapiens
cagtttggattctgc

SEQ ID NO: 1426042 - DNA, 15 bp, Homo sapiens
agtttggattctgca

SEQ ID NO: 1426043 - DNA, 15 bp, Homo sapiens
gtttggattctgcaa

SEQ ID NO: 1426044 - DNA, 15 bp, Homo sapiens
tttggattctgcaaa

SEQ ID NO: 1426045 - DNA, 15 bp, Homo sapiens
ttggattctgcaaaa

SEQ ID NO: 1426046 - DNA, 15 bp, Homo sapiens
tggattctgcaaaaa

SEQ ID NO: 1426047 - DNA, 15 bp, Homo sapiens
ggattctgcaaaaaa

SEQ ID NO: 1426048 - DNA, 15 bp, Homo sapiens
gattctgcaaaaaag

SEQ ID NO: 1426049 - DNA, 15 bp, Homo sapiens
attctgcaaaaaagg

SEQ ID NO: 1426050 - DNA, 15 bp, Homo sapiens
ttctgcaaaaaaggg

SEQ ID NO: 1426051 - DNA, 15 bp, Homo sapiens
tctgcaaaaaagggt

SEQ ID NO: 1426052 - DNA, 15 bp, Homo sapiens
ctgcaaaaaagggta

SEQ ID NO: 1426053 - DNA, 15 bp, Homo sapiens
tgcaaaaaagggtaa

SEQ ID NO: 1426054 - DNA, 15 bp, Homo sapiens
gcaaaaaagggtaat

SEQ ID NO: 1426055 - DNA, 15 bp, Homo sapiens
caaaaaagggtaatg

SEQ ID NO: 1426056 - DNA, 15 bp, Homo sapiens
aaaaaagggtaatgg

SEQ ID NO: 1426057 - DNA, 15 bp, Homo sapiens
aaaaagggtaatggc

SEQ ID NO: 1426058 - DNA, 15 bp, Homo sapiens
aaaagggtaatggca

SEQ ID NO: 1426059 - DNA, 15 bp, Homo sapiens
aaagggtaatggcaa

SEQ ID NO: 1426060 - DNA, 15 bp, Homo sapiens
aagggtaatggcaaa

SEQ ID NO: 1426061 - DNA, 15 bp, Homo sapiens
agggtaatggcaaag

SEQ ID NO: 1426062 - DNA, 15 bp, Homo sapiens
gggtaatggcaaagt

SEQ ID NO: 1426063 - DNA, 15 bp, Homo sapiens
ggtaatggcaaagtt

SEQ ID NO: 1426064 - DNA, 15 bp, Homo sapiens
gtaatggcaaagttt

SEQ ID NO: 1426065 - DNA, 15 bp, Homo sapiens
taatggcaaagtttg

SEQ ID NO: 1426066 - DNA, 15 bp, Homo sapiens
aatggcaaagtttgc

SEQ ID NO: 1426067 - DNA, 15 bp, Homo sapiens
atggcaaagtttgcc

SEQ ID NO: 1426068 - DNA, 15 bp, Homo sapiens
tggcaaagtttgcca

SEQ ID NO: 1426069 - DNA, 15 bp, Homo sapiens
ggcaaagtttgccaa

SEQ ID NO: 1426070 - DNA, 15 bp, Homo sapiens
gcaaagtttgccaac

SEQ ID NO: 1426071 - DNA, 15 bp, Homo sapiens
caaagtttgccaact

SEQ ID NO: 1426072 - DNA, 15 bp, Homo sapiens
aaagtttgccaactt

SEQ ID NO: 1426073 - DNA, 15 bp, Homo sapiens
aagtttgccaactta

SEQ ID NO: 1426074 - DNA, 15 bp, Homo sapiens
agtttgccaacttaa

SEQ ID NO: 1426075 - DNA, 15 bp, Homo sapiens
gtttgccaacttaac

SEQ ID NO: 1426076 - DNA, 15 bp, Homo sapiens
tttgccaacttaaca

SEQ ID NO: 1426077 - DNA, 15 bp, Homo sapiens
ttgccaacttaacag

SEQ ID NO: 1426078 - DNA, 15 bp, Homo sapiens
tgccaacttaacagg

SEQ ID NO: 1426079 - DNA, 15 bp, Homo sapiens
gccaacttaacaggc

SEQ ID NO: 1426080 - DNA, 15 bp, Homo sapiens
ccaacttaacaggca

SEQ ID NO: 1426081 - DNA, 15 bp, Homo sapiens
caacttaacaggcac

SEQ ID NO: 1426082 - DNA, 15 bp, Homo sapiens
aacttaacaggcact

SEQ ID NO: 1426083 - DNA, 15 bp, Homo sapiens
acttaacaggcactg

SEQ ID NO: 1426084 - DNA, 15 bp, Homo sapiens
cttaacaggcactga

SEQ ID NO: 1426085 - DNA, 15 bp, Homo sapiens
ttaacaggcactgaa

SEQ ID NO: 1426086 - DNA, 15 bp, Homo sapiens
taacaggcactgaaa

SEQ ID NO: 1426087 - DNA, 15 bp, Homo sapiens
aacaggcactgaaaa

SEQ ID NO: 1426088 - DNA, 15 bp, Homo sapiens
acaggcactgaaaag

SEQ ID NO: 1426089 - DNA, 15 bp, Homo sapiens
caggcactgaaaaga

SEQ ID NO: 1426090 - DNA, 15 bp, Homo sapiens
aggcactgaaaagag

SEQ ID NO: 1426091 - DNA, 15 bp, Homo sapiens
ggcactgaaaagaga

SEQ ID NO: 1426092 - DNA, 15 bp, Homo sapiens
gcactgaaaagagag

SEQ ID NO: 1426093 - DNA, 15 bp, Homo sapiens
cactgaaaagagagt

SEQ ID NO: 1426094 - DNA, 15 bp, Homo sapiens
actgaaaagagagtg

SEQ ID NO: 1426095 - DNA, 15 bp, Homo sapiens
ctgaaaagagagtgg

SEQ ID NO: 1426096 - DNA, 15 bp, Homo sapiens
tgaaaagagagtggg

SEQ ID NO: 1426097 - DNA, 15 bp, Homo sapiens
gaaaagagagtgggt

SEQ ID NO: 1426098 - DNA, 15 bp, Homo sapiens
aaaagagagtgggta

SEQ ID NO: 1426099 - DNA, 15 bp, Homo sapiens
aaagagagtgggtag

SEQ ID NO: 1426100 - DNA, 15 bp, Homo sapiens
aagagagtgggtaga

SEQ ID NO: 1426101 - DNA, 15 bp, Homo sapiens
agagagtgggtagat

SEQ ID NO: 1426102 - DNA, 15 bp, Homo sapiens
gagagtgggtagata

SEQ ID NO: 1426103 - DNA, 15 bp, Homo sapiens
agagtgggtagatac

SEQ ID NO: 1426104 - DNA, 15 bp, Homo sapiens
gagtgggtagataca

SEQ ID NO: 1426105 - DNA, 15 bp, Homo sapiens
agtgggtagatacag

SEQ ID NO: 1426106 - DNA, 15 bp, Homo sapiens
gtgggtagatacagt

SEQ ID NO: 1426107 - DNA, 15 bp, Homo sapiens
tgggtagatacagta

SEQ ID NO: 1426108 - DNA, 15 bp, Homo sapiens
gggtagatacagtac

SEQ ID NO: 1426109 - DNA, 15 bp, Homo sapiens
ggtagatacagtact

SEQ ID NO: 1426110 - DNA, 15 bp, Homo sapiens
gtagatacagtactg

SEQ ID NO: 1426111 - DNA, 15 bp, Homo sapiens
tagatacagtactgt

SEQ ID NO: 1426112 - DNA, 15 bp, Homo sapiens
agatacagtactgta

SEQ ID NO: 1426113 - DNA, 15 bp, Homo sapiens
gatacagtactgtaa

SEQ ID NO: 1426114 - DNA, 15 bp, Homo sapiens
atacagtactgtaat

SEQ ID NO: 1426115 - DNA, 15 bp, Homo sapiens
tacagtactgtaatt

SEQ ID NO: 1426116 - DNA, 15 bp, Homo sapiens
acagtactgtaatta

SEQ ID NO: 1426117 - DNA, 15 bp, Homo sapiens
cagtactgtaattag

SEQ ID NO: 1426118 - DNA, 15 bp, Homo sapiens
agtactgtaattaga

SEQ ID NO: 1426119 - DNA, 15 bp, Homo sapiens
gtactgtaattagat

SEQ ID NO: 1426120 - DNA, 15 bp, Homo sapiens
tactgtaattagatt

SEQ ID NO: 1426121 - DNA, 15 bp, Homo sapiens
actgtaattagatta

SEQ ID NO: 1426122 - DNA, 15 bp, Homo sapiens
ctgtaattagattat

SEQ ID NO: 1426123 - DNA, 15 bp, Homo sapiens
tgtaattagattatt

SEQ ID NO: 1426124 - DNA, 15 bp, Homo sapiens
gtaattagattattc

SEQ ID NO: 1426125 - DNA, 15 bp, Homo sapiens
taattagattattct

SEQ ID NO: 1426126 - DNA, 15 bp, Homo sapiens
aattagattattctg

SEQ ID NO: 1426127 - DNA, 15 bp, Homo sapiens
attagattattctga

SEQ ID NO: 1426128 - DNA, 15 bp, Homo sapiens
ttagattattctgaa

SEQ ID NO: 1426129 - DNA, 15 bp, Homo sapiens
tagattattctgaag

SEQ ID NO: 1426130 - DNA, 15 bp, Homo sapiens
agattattctgaaga

SEQ ID NO: 1426131 - DNA, 15 bp, Homo sapiens
gattattctgaagac

SEQ ID NO: 1426132 - DNA, 15 bp, Homo sapiens
attattctgaagacc

SEQ ID NO: 1426133 - DNA, 15 bp, Homo sapiens
ttattctgaagacca

SEQ ID NO: 1426134 - DNA, 15 bp, Homo sapiens
tattctgaagaccat

SEQ ID NO: 1426135 - DNA, 15 bp, Homo sapiens
attctgaagaccatt

SEQ ID NO: 1426136 - DNA, 15 bp, Homo sapiens
ttctgaagaccattt

SEQ ID NO: 1426137 - DNA, 15 bp, Homo sapiens
tctgaagaccatttg

SEQ ID NO: 1426138 - DNA, 15 bp, Homo sapiens
ctgaagaccatttgg

SEQ ID NO: 1426139 - DNA, 15 bp, Homo sapiens
tgaagaccatttggg

SEQ ID NO: 1426140 - DNA, 15 bp, Homo sapiens
gaagaccatttggga

SEQ ID NO: 1426141 - DNA, 15 bp, Homo sapiens
aagaccatttgggac

SEQ ID NO: 1426142 - DNA, 15 bp, Homo sapiens
agaccatttgggacc

SEQ ID NO: 1426143 - DNA, 15 bp, Homo sapiens
gaccatttgggacct

SEQ ID NO: 1426144 - DNA, 15 bp, Homo sapiens
accatttgggacctt

SEQ ID NO: 1426145 - DNA, 15 bp, Homo sapiens
ccatttgggaccttt

SEQ ID NO: 1426146 - DNA, 15 bp, Homo sapiens
catttgggaccttta

SEQ ID NO: 1426147 - DNA, 15 bp, Homo sapiens
atttgggacctttac

SEQ ID NO: 1426148 - DNA, 15 bp, Homo sapiens
tttgggacctttaca

SEQ ID NO: 1426149 - DNA, 15 bp, Homo sapiens
ttgggacctttacaa

SEQ ID NO: 1426150 - DNA, 15 bp, Homo sapiens
tgggacctttacaac

SEQ ID NO: 1426151 - DNA, 15 bp, Homo sapiens
gggacctttacaacc

SEQ ID NO: 1426152 - DNA, 15 bp, Homo sapiens
ggacctttacaaccc

SEQ ID NO: 1426153 - DNA, 15 bp, Homo sapiens
gacctttacaaccca

SEQ ID NO: 1426154 - DNA, 15 bp, Homo sapiens
acctttacaacccac

SEQ ID NO: 1426155 - DNA, 15 bp, Homo sapiens
cctttacaacccaca

SEQ ID NO: 1426156 - DNA, 15 bp, Homo sapiens
ctttacaacccacaa

SEQ ID NO: 1426157 - DNA, 15 bp, Homo sapiens
tttacaacccacaaa

SEQ ID NO: 1426158 - DNA, 15 bp, Homo sapiens
ttacaacccacaaaa

SEQ ID NO: 1426159 - DNA, 15 bp, Homo sapiens
tacaacccacaaaat

SEQ ID NO: 1426160 - DNA, 15 bp, Homo sapiens
acaacccacaaaatc

SEQ ID NO: 1426161 - DNA, 15 bp, Homo sapiens
caacccacaaaatct

SEQ ID NO: 1426162 - DNA, 15 bp, Homo sapiens
aacccacaaaatctc

SEQ ID NO: 1426163 - DNA, 15 bp, Homo sapiens
acccacaaaatctct

SEQ ID NO: 1426164 - DNA, 15 bp, Homo sapiens
cccacaaaatctctt

SEQ ID NO: 1426165 - DNA, 15 bp, Homo sapiens
ccacaaaatctcttg

SEQ ID NO: 1426166 - DNA, 15 bp, Homo sapiens
cacaaaatctcttgg

SEQ ID NO: 1426167 - DNA, 15 bp, Homo sapiens
acaaaatctcttggc

SEQ ID NO: 1426168 - DNA, 15 bp, Homo sapiens
caaaatctcttggca

SEQ ID NO: 1426169 - DNA, 15 bp, Homo sapiens
aaaatctcttggcag

SEQ ID NO: 1426170 - DNA, 15 bp, Homo sapiens
aaatctcttggcaga

SEQ ID NO: 1426171 - DNA, 15 bp, Homo sapiens
aatctcttggcagag

SEQ ID NO: 1426172 - DNA, 15 bp, Homo sapiens
atctcttggcagagt

SEQ ID NO: 1426173 - DNA, 15 bp, Homo sapiens
tctcttggcagagtt

SEQ ID NO: 1426174 - DNA, 15 bp, Homo sapiens
ctcttggcagagtta

SEQ ID NO: 1426175 - DNA, 15 bp, Homo sapiens
tcttggcagagttag

SEQ ID NO: 1426176 - DNA, 15 bp, Homo sapiens
cttggcagagttaga

SEQ ID NO: 1426177 - DNA, 15 bp, Homo sapiens
ttggcagagttagag

SEQ ID NO: 1426178 - DNA, 15 bp, Homo sapiens
tggcagagttagagt

SEQ ID NO: 1426179 - DNA, 15 bp, Homo sapiens
ggcagagttagagta

SEQ ID NO: 1426180 - DNA, 15 bp, Homo sapiens
gcagagttagagtat

SEQ ID NO: 1426181 - DNA, 15 bp, Homo sapiens
cagagttagagtatc

SEQ ID NO: 1426182 - DNA, 15 bp, Homo sapiens
agagttagagtatca

SEQ ID NO: 1426183 - DNA, 15 bp, Homo sapiens
gagttagagtatcat

SEQ ID NO: 1426184 - DNA, 15 bp, Homo sapiens
agttagagtatcatt

SEQ ID NO: 1426185 - DNA, 15 bp, Homo sapiens
gttagagtatcattc

SEQ ID NO: 1426186 - DNA, 15 bp, Homo sapiens
ttagagtatcattct

SEQ ID NO: 1426187 - DNA, 15 bp, Homo sapiens
tagagtatcattctc

SEQ ID NO: 1426188 - DNA, 15 bp, Homo sapiens
agagtatcattctct

SEQ ID NO: 1426189 - DNA, 15 bp, Homo sapiens
gagtatcattctctg

SEQ ID NO: 1426190 - DNA, 15 bp, Homo sapiens
agtatcattctctgt

SEQ ID NO: 1426191 - DNA, 15 bp, Homo sapiens
gtatcattctctgtc

SEQ ID NO: 1426192 - DNA, 15 bp, Homo sapiens
tatcattctctgtca

SEQ ID NO: 1426193 - DNA, 15 bp, Homo sapiens
atcattctctgtcaa

SEQ ID NO: 1426194 - DNA, 15 bp, Homo sapiens
tcattctctgtcaaa

SEQ ID NO: 1426195 - DNA, 15 bp, Homo sapiens
cattctctgtcaaat

SEQ ID NO: 1426196 - DNA, 15 bp, Homo sapiens
attctctgtcaaatg

SEQ ID NO: 1426197 - DNA, 15 bp, Homo sapiens
ttctctgtcaaatgt

SEQ ID NO: 1426198 - DNA, 15 bp, Homo sapiens
tctctgtcaaatgtc

SEQ ID NO: 1426199 - DNA, 15 bp, Homo sapiens
ctctgtcaaatgtcg

SEQ ID NO: 1426200 - DNA, 15 bp, Homo sapiens
tctgtcaaatgtcgt

SEQ ID NO: 1426201 - DNA, 15 bp, Homo sapiens
ctgtcaaatgtcgtg

SEQ ID NO: 1426202 - DNA, 15 bp, Homo sapiens
tgtcaaatgtcgtgg

SEQ ID NO: 1426203 - DNA, 15 bp, Homo sapiens
gtcaaatgtcgtggt

SEQ ID NO: 1426204 - DNA, 15 bp, Homo sapiens
tcaaatgtcgtggta

SEQ ID NO: 1426205 - DNA, 15 bp, Homo sapiens
caaatgtcgtggtat

SEQ ID NO: 1426206 - DNA, 15 bp, Homo sapiens
aaatgtcgtggtatg

SEQ ID NO: 1426207 - DNA, 15 bp, Homo sapiens
aatgtcgtggtatgg

SEQ ID NO: 1426208 - DNA, 15 bp, Homo sapiens
atgtcgtggtatggt

SEQ ID NO: 1426209 - DNA, 15 bp, Homo sapiens
tgtcgtggtatggtc

SEQ ID NO: 1426210 - DNA, 15 bp, Homo sapiens
gtcgtggtatggtct

SEQ ID NO: 1426211 - DNA, 15 bp, Homo sapiens
tcgtggtatggtctg

SEQ ID NO: 1426212 - DNA, 15 bp, Homo sapiens
cgtggtatggtctga

SEQ ID NO: 1426213 - DNA, 15 bp, Homo sapiens
gtggtatggtctgat

SEQ ID NO: 1426214 - DNA, 15 bp, Homo sapiens
tggtatggtctgata

SEQ ID NO: 1426215 - DNA, 15 bp, Homo sapiens
ggtatggtctgatag

SEQ ID NO: 1426216 - DNA, 15 bp, Homo sapiens
gtatggtctgataga

SEQ ID NO: 1426217 - DNA, 15 bp, Homo sapiens
tatggtctgatagat

SEQ ID NO: 1426218 - DNA, 15 bp, Homo sapiens
atggtctgatagatt

SEQ ID NO: 1426219 - DNA, 15 bp, Homo sapiens
tggtctgatagattt

SEQ ID NO: 1426220 - DNA, 15 bp, Homo sapiens
ggtctgatagattta

SEQ ID NO: 1426221 - DNA, 15 bp, Homo sapiens
gtctgatagatttaa

SEQ ID NO: 1426222 - DNA, 15 bp, Homo sapiens
tctgatagatttaaa

SEQ ID NO: 1426223 - DNA, 15 bp, Homo sapiens
ctgatagatttaaat

SEQ ID NO: 1426224 - DNA, 15 bp, Homo sapiens
tgatagatttaaatg

SEQ ID NO: 1426225 - DNA, 15 bp, Homo sapiens
gatagatttaaatgg

SEQ ID NO: 1426226 - DNA, 15 bp, Homo sapiens
atagatttaaatggt

SEQ ID NO: 1426227 - DNA, 15 bp, Homo sapiens
tagatttaaatggta

SEQ ID NO: 1426228 - DNA, 15 bp, Homo sapiens
agatttaaatggtac

SEQ ID NO: 1426229 - DNA, 15 bp, Homo sapiens
gatttaaatggtact

SEQ ID NO: 1426230 - DNA, 15 bp, Homo sapiens
atttaaatggtacta

SEQ ID NO: 1426231 - DNA, 15 bp, Homo sapiens
tttaaatggtactag

SEQ ID NO: 1426232 - DNA, 15 bp, Homo sapiens
ttaaatggtactaga

SEQ ID NO: 1426233 - DNA, 15 bp, Homo sapiens
taaatggtactagac

SEQ ID NO: 1426234 - DNA, 15 bp, Homo sapiens
aaatggtactagact

SEQ ID NO: 1426235 - DNA, 15 bp, Homo sapiens
aatggtactagacta

SEQ ID NO: 1426236 - DNA, 15 bp, Homo sapiens
atggtactagactaa

SEQ ID NO: 1426237 - DNA, 15 bp, Homo sapiens
tggtactagactaat

SEQ ID NO: 1426238 - DNA, 15 bp, Homo sapiens
ggtactagactaatg

SEQ ID NO: 1426239 - DNA, 15 bp, Homo sapiens
gtactagactaatgt

SEQ ID NO: 1426240 - DNA, 15 bp, Homo sapiens
tactagactaatgta

SEQ ID NO: 1426241 - DNA, 15 bp, Homo sapiens
actagactaatgtac

SEQ ID NO: 1426242 - DNA, 15 bp, Homo sapiens
ctagactaatgtacc

SEQ ID NO: 1426243 - DNA, 15 bp, Homo sapiens
tagactaatgtacct

SEQ ID NO: 1426244 - DNA, 15 bp, Homo sapiens
agactaatgtaccta

SEQ ID NO: 1426245 - DNA, 15 bp, Homo sapiens
gactaatgtacctat

SEQ ID NO: 1426246 - DNA, 15 bp, Homo sapiens
actaatgtacctata

SEQ ID NO: 1426247 - DNA, 15 bp, Homo sapiens
ctaatgtacctataa

SEQ ID NO: 1426248 - DNA, 15 bp, Homo sapiens
taatgtacctataat

SEQ ID NO: 1426249 - DNA, 15 bp, Homo sapiens
aatgtacctataata

SEQ ID NO: 1426250 - DNA, 15 bp, Homo sapiens
atgtacctataataa

SEQ ID NO: 1426251 - DNA, 15 bp, Homo sapiens
tgtacctataataag

SEQ ID NO: 1426252 - DNA, 15 bp, Homo sapiens
gtacctataataaga

SEQ ID NO: 1426253 - DNA, 15 bp, Homo sapiens
tacctataataagac

SEQ ID NO: 1426254 - DNA, 15 bp, Homo sapiens
acctataataagacc

SEQ ID NO: 1426255 - DNA, 15 bp, Homo sapiens
cctataataagacct

SEQ ID NO: 1426256 - DNA, 15 bp, Homo sapiens
ctataataagacctt

SEQ ID NO: 1426257 - DNA, 15 bp, Homo sapiens
tataataagaccttc

SEQ ID NO: 1426258 - DNA, 15 bp, Homo sapiens
ataataagaccttct

SEQ ID NO: 1426259 - DNA, 15 bp, Homo sapiens
taataagaccttctg

SEQ ID NO: 1426260 - DNA, 15 bp, Homo sapiens
aataagaccttctgt

SEQ ID NO: 1426261 - DNA, 15 bp, Homo sapiens
ataagaccttctgta

SEQ ID NO: 1426262 - DNA, 15 bp, Homo sapiens
taagaccttctgtaa

SEQ ID NO: 1426263 - DNA, 15 bp, Homo sapiens
aagaccttctgtaac

SEQ ID NO: 1426264 - DNA, 15 bp, Homo sapiens
agaccttctgtaact

SEQ ID NO: 1426265 - DNA, 15 bp, Homo sapiens
gaccttctgtaactg

SEQ ID NO: 1426266 - DNA, 15 bp, Homo sapiens
accttctgtaactga

SEQ ID NO: 1426267 - DNA, 15 bp, Homo sapiens
ccttctgtaactgat

SEQ ID NO: 1426268 - DNA, 15 bp, Homo sapiens
cttctgtaactgatt

SEQ ID NO: 1426269 - DNA, 15 bp, Homo sapiens
ttctgtaactgattg

SEQ ID NO: 1426270 - DNA, 15 bp, Homo sapiens
tctgtaactgattgt

SEQ ID NO: 1426271 - DNA, 15 bp, Homo sapiens
ctgtaactgattgtt

SEQ ID NO: 1426272 - DNA, 15 bp, Homo sapiens
tgtaactgattgttg

SEQ ID NO: 1426273 - DNA, 15 bp, Homo sapiens
gtaactgattgttgc

SEQ ID NO: 1426274 - DNA, 15 bp, Homo sapiens
taactgattgttgcc

SEQ ID NO: 1426275 - DNA, 15 bp, Homo sapiens
aactgattgttgccc

SEQ ID NO: 1426276 - DNA, 15 bp, Homo sapiens
actgattgttgccct

SEQ ID NO: 1426277 - DNA, 15 bp, Homo sapiens
ctgattgttgccctt

SEQ ID NO: 1426278 - DNA, 15 bp, Homo sapiens
tgattgttgcccttt

SEQ ID NO: 1426279 - DNA, 15 bp, Homo sapiens
gattgttgccctttc

SEQ ID NO: 1426280 - DNA, 15 bp, Homo sapiens
attgttgccctttcg

SEQ ID NO: 1426281 - DNA, 15 bp, Homo sapiens
ttgttgccctttcgt

SEQ ID NO: 1426282 - DNA, 15 bp, Homo sapiens
tgttgccctttcgtt

SEQ ID NO: 1426283 - DNA, 15 bp, Homo sapiens
gttgccctttcgttt

SEQ ID NO: 1426284 - DNA, 15 bp, Homo sapiens
ttgccctttcgtttt

SEQ ID NO: 1426285 - DNA, 15 bp, Homo sapiens
tgccctttcgttttt

SEQ ID NO: 1426286 - DNA, 15 bp, Homo sapiens
gccctttcgtttttt

SEQ ID NO: 1426287 - DNA, 15 bp, Homo sapiens
ccctttcgttttttt

SEQ ID NO: 1426288 - DNA, 15 bp, Homo sapiens
cctttcgtttttttt

SEQ ID NO: 1426289 - DNA, 15 bp, Homo sapiens
ctttcgttttttttt

SEQ ID NO: 1426290 - DNA, 15 bp, Homo sapiens
tttcgtttttttttt

SEQ ID NO: 1426291 - DNA, 15 bp, Homo sapiens
ttcgttttttttttt

SEQ ID NO: 1426292 - DNA, 15 bp, Homo sapiens
tcgtttttttttttg

SEQ ID NO: 1426293 - DNA, 15 bp, Homo sapiens
cgtttttttttttgt

SEQ ID NO: 1426294 - DNA, 15 bp, Homo sapiens
gtttttttttttgtt

SEQ ID NO: 1426295 - DNA, 15 bp, Homo sapiens
tttgtttgttttttt

SEQ ID NO: 1426296 - DNA, 15 bp, Homo sapiens
ttgtttgtttttttt

SEQ ID NO: 1426297 - DNA, 15 bp, Homo sapiens
tgtttgttttttttt

SEQ ID NO: 1426298 - DNA, 15 bp, Homo sapiens
gtttgtttttttttg

SEQ ID NO: 1426299 - DNA, 15 bp, Homo sapiens
tttgtttttttttga

SEQ ID NO: 1426300 - DNA, 15 bp, Homo sapiens
ttgtttttttttgag

SEQ ID NO: 1426301 - DNA, 15 bp, Homo sapiens
tgtttttttttgaga

SEQ ID NO: 1426302 - DNA, 15 bp, Homo sapiens
ttgagatggggtctc

SEQ ID NO: 1426303 - DNA, 15 bp, Homo sapiens
tgagatggggtctca

SEQ ID NO: 1426304 - DNA, 15 bp, Homo sapiens
gagatggggtctcac

SEQ ID NO: 1426305 - DNA, 15 bp, Homo sapiens
gatggggtctcactc

SEQ ID NO: 1426306 - DNA, 15 bp, Homo sapiens
atggggtctcactct

SEQ ID NO: 1426307 - DNA, 15 bp, Homo sapiens
tggggtctcactctg

SEQ ID NO: 1426308 - DNA, 15 bp, Homo sapiens
gagtgcagtgatgca

SEQ ID NO: 1426309 - DNA, 15 bp, Homo sapiens
agtgcagtgatgcaa

SEQ ID NO: 1426310 - DNA, 15 bp, Homo sapiens
gtgcagtgatgcaat

SEQ ID NO: 1426311 - DNA, 15 bp, Homo sapiens
tgcagtgatgcaatc

SEQ ID NO: 1426312 - DNA, 15 bp, Homo sapiens
gcagtgatgcaatct

SEQ ID NO: 1426313 - DNA, 15 bp, Homo sapiens
cagtgatgcaatctt

SEQ ID NO: 1426314 - DNA, 15 bp, Homo sapiens
agtgatgcaatcttg

SEQ ID NO: 1426315 - DNA, 15 bp, Homo sapiens
gtgatgcaatcttgg

SEQ ID NO: 1426316 - DNA, 15 bp, Homo sapiens
tgatgcaatcttggc

SEQ ID NO: 1426317 - DNA, 15 bp, Homo sapiens
gatgcaatcttggct

SEQ ID NO: 1426318 - DNA, 15 bp, Homo sapiens
atgcaatcttggctc

SEQ ID NO: 1426319 - DNA, 15 bp, Homo sapiens
aacctccacctccaa

SEQ ID NO: 1426320 - DNA, 15 bp, Homo sapiens
acctccacctccaag

SEQ ID NO: 1426321 - DNA, 15 bp, Homo sapiens
cctccacctccaagg

SEQ ID NO: 1426322 - DNA, 15 bp, Homo sapiens
ctccacctccaaggc

SEQ ID NO: 1426323 - DNA, 15 bp, Homo sapiens
tccacctccaaggct

SEQ ID NO: 1426324 - DNA, 15 bp, Homo sapiens
ccacctccaaggctc

SEQ ID NO: 1426325 - DNA, 15 bp, Homo sapiens
cacctccaaggctca

SEQ ID NO: 1426326 - DNA, 15 bp, Homo sapiens
acctccaaggctcaa

SEQ ID NO: 1426327 - DNA, 15 bp, Homo sapiens
cctccaaggctcaag

SEQ ID NO: 1426328 - DNA, 15 bp, Homo sapiens
ctccaaggctcaagc

SEQ ID NO: 1426329 - DNA, 15 bp, Homo sapiens
tccaaggctcaagct

SEQ ID NO: 1426330 - DNA, 15 bp, Homo sapiens
ccaaggctcaagcta

SEQ ID NO: 1426331 - DNA, 15 bp, Homo sapiens
caaggctcaagctat

SEQ ID NO: 1426332 - DNA, 15 bp, Homo sapiens
aaggctcaagctatc

SEQ ID NO: 1426333 - DNA, 15 bp, Homo sapiens
aggctcaagctatcc

SEQ ID NO: 1426334 - DNA, 15 bp, Homo sapiens
ggctcaagctatcct

SEQ ID NO: 1426335 - DNA, 15 bp, Homo sapiens
gctcaagctatcctc

SEQ ID NO: 1426336 - DNA, 15 bp, Homo sapiens
ctcaagctatcctcc

SEQ ID NO: 1426337 - DNA, 15 bp, Homo sapiens
tcaagctatcctccc

SEQ ID NO: 1426338 - DNA, 15 bp, Homo sapiens
caagctatcctccca

SEQ ID NO: 1426339 - DNA, 15 bp, Homo sapiens
aagctatcctcccac

SEQ ID NO: 1426340 - DNA, 15 bp, Homo sapiens
agctatcctcccact

SEQ ID NO: 1426341 - DNA, 15 bp, Homo sapiens
gctatcctcccactt

SEQ ID NO: 1426342 - DNA, 15 bp, Homo sapiens
ctatcctcccacttc

SEQ ID NO: 1426343 - DNA, 15 bp, Homo sapiens
tatcctcccacttca

SEQ ID NO: 1426344 - DNA, 15 bp, Homo sapiens
atcctcccacttcag

SEQ ID NO: 1426345 - DNA, 15 bp, Homo sapiens
tcctcccacttcagc

SEQ ID NO: 1426346 - DNA, 15 bp, Homo sapiens
cctcccacttcagcc

SEQ ID NO: 1426347 - DNA, 15 bp, Homo sapiens
ccacttcagcctcct

SEQ ID NO: 1426348 - DNA, 15 bp, Homo sapiens
cacttcagcctcctg

SEQ ID NO: 1426349 - DNA, 15 bp, Homo sapiens
acttcagcctcctga

SEQ ID NO: 1426350 - DNA, 15 bp, Homo sapiens
gcgcatgccaccaca

SEQ ID NO: 1426351 - DNA, 15 bp, Homo sapiens
cgcatgccaccacac

SEQ ID NO: 1426352 - DNA, 15 bp, Homo sapiens
gcatgccaccacacc

SEQ ID NO: 1426353 - DNA, 15 bp, Homo sapiens
catgccaccacaccc

SEQ ID NO: 1426354 - DNA, 15 bp, Homo sapiens
atgccaccacacccg

SEQ ID NO: 1426355 - DNA, 15 bp, Homo sapiens
gccaccacacccggt

SEQ ID NO: 1426356 - DNA, 15 bp, Homo sapiens
ccaccacacccggtt

SEQ ID NO: 1426357 - DNA, 15 bp, Homo sapiens
caccacacccggtta

SEQ ID NO: 1426358 - DNA, 15 bp, Homo sapiens
accacacccggttaa

SEQ ID NO: 1426359 - DNA, 15 bp, Homo sapiens
ccacacccggttaat

SEQ ID NO: 1426360 - DNA, 15 bp, Homo sapiens
cacacccggttaatt

SEQ ID NO: 1426361 - DNA, 15 bp, Homo sapiens
acacccggttaattt

SEQ ID NO: 1426362 - DNA, 15 bp, Homo sapiens
cacccggttaatttt

SEQ ID NO: 1426363 - DNA, 15 bp, Homo sapiens
acccggttaattttt

SEQ ID NO: 1426364 - DNA, 15 bp, Homo sapiens
cccggttaatttttt

SEQ ID NO: 1426365 - DNA, 15 bp, Homo sapiens
ccggttaattttttg

SEQ ID NO: 1426366 - DNA, 15 bp, Homo sapiens
cggttaattttttgt

SEQ ID NO: 1426367 - DNA, 15 bp, Homo sapiens
ggttaattttttgtg

SEQ ID NO: 1426368 - DNA, 15 bp, Homo sapiens
gttaattttttgtgg

SEQ ID NO: 1426369 - DNA, 15 bp, Homo sapiens
ttaattttttgtggt

SEQ ID NO: 1426370 - DNA, 15 bp, Homo sapiens
taattttttgtggtt

SEQ ID NO: 1426371 - DNA, 15 bp, Homo sapiens
aattttttgtggttt

SEQ ID NO: 1426372 - DNA, 15 bp, Homo sapiens
attttttgtggtttt

SEQ ID NO: 1426373 - DNA, 15 bp, Homo sapiens
ttttttgtggtttta

SEQ ID NO: 1426374 - DNA, 15 bp, Homo sapiens
tttttgtggttttat

SEQ ID NO: 1426375 - DNA, 15 bp, Homo sapiens
ttttgtggttttata

SEQ ID NO: 1426376 - DNA, 15 bp, Homo sapiens
tttgtggttttatag

SEQ ID NO: 1426377 - DNA, 15 bp, Homo sapiens
ttgtggttttataga

SEQ ID NO: 1426378 - DNA, 15 bp, Homo sapiens
tgtggttttatagag

SEQ ID NO: 1426379 - DNA, 15 bp, Homo sapiens
gtggttttatagaga

SEQ ID NO: 1426380 - DNA, 15 bp, Homo sapiens
tggttttatagagat

SEQ ID NO: 1426381 - DNA, 15 bp, Homo sapiens
ggttttatagagatg

SEQ ID NO: 1426382 - DNA, 15 bp, Homo sapiens
gttttatagagatgg

SEQ ID NO: 1426383 - DNA, 15 bp, Homo sapiens
ttttatagagatggg

SEQ ID NO: 1426384 - DNA, 15 bp, Homo sapiens
tttatagagatgggg

SEQ ID NO: 1426385 - DNA, 15 bp, Homo sapiens
ttatagagatggggt

SEQ ID NO: 1426386 - DNA, 15 bp, Homo sapiens
tatagagatggggtt

SEQ ID NO: 1426387 - DNA, 15 bp, Homo sapiens
atagagatggggttt

SEQ ID NO: 1426388 - DNA, 15 bp, Homo sapiens
gtttcaccatgttac

SEQ ID NO: 1426389 - DNA, 15 bp, Homo sapiens
tttcaccatgttacc

SEQ ID NO: 1426390 - DNA, 15 bp, Homo sapiens
ttcaccatgttaccg

SEQ ID NO: 1426391 - DNA, 15 bp, Homo sapiens
tcaccatgttaccga

SEQ ID NO: 1426392 - DNA, 15 bp, Homo sapiens
caccatgttaccgag

SEQ ID NO: 1426393 - DNA, 15 bp, Homo sapiens
accatgttaccgagg

SEQ ID NO: 1426394 - DNA, 15 bp, Homo sapiens
ccatgttaccgaggc

SEQ ID NO: 1426395 - DNA, 15 bp, Homo sapiens
catgttaccgaggct

SEQ ID NO: 1426396 - DNA, 15 bp, Homo sapiens
atgttaccgaggctg

SEQ ID NO: 1426397 - DNA, 15 bp, Homo sapiens
tgttaccgaggctgg

SEQ ID NO: 1426398 - DNA, 15 bp, Homo sapiens
gttaccgaggctggt

SEQ ID NO: 1426399 - DNA, 15 bp, Homo sapiens
ttaccgaggctggtc

SEQ ID NO: 1426400 - DNA, 15 bp, Homo sapiens
taccgaggctggtct

SEQ ID NO: 1426401 - DNA, 15 bp, Homo sapiens
accgaggctggtctc

SEQ ID NO: 1426402 - DNA, 15 bp, Homo sapiens
ccgaggctggtctca

SEQ ID NO: 1426403 - DNA, 15 bp, Homo sapiens
cgaggctggtctcaa

SEQ ID NO: 1426404 - DNA, 15 bp, Homo sapiens
gaggctggtctcaaa

SEQ ID NO: 1426405 - DNA, 15 bp, Homo sapiens
ctcaaactcctggac

SEQ ID NO: 1426406 - DNA, 15 bp, Homo sapiens
tcaaactcctggact

SEQ ID NO: 1426407 - DNA, 15 bp, Homo sapiens
caaactcctggactc

SEQ ID NO: 1426408 - DNA, 15 bp, Homo sapiens
aaactcctggactca

SEQ ID NO: 1426409 - DNA, 15 bp, Homo sapiens
ctcctggactcaagc

SEQ ID NO: 1426410 - DNA, 15 bp, Homo sapiens
tcctggactcaagca

SEQ ID NO: 1426411 - DNA, 15 bp, Homo sapiens
cctggactcaagcag

SEQ ID NO: 1426412 - DNA, 15 bp, Homo sapiens
ctggactcaagcagt

SEQ ID NO: 1426413 - DNA, 15 bp, Homo sapiens
tggactcaagcagtc

SEQ ID NO: 1426414 - DNA, 15 bp, Homo sapiens
ggactcaagcagtct

SEQ ID NO: 1426415 - DNA, 15 bp, Homo sapiens
gactcaagcagtctg

SEQ ID NO: 1426416 - DNA, 15 bp, Homo sapiens
actcaagcagtctgc

SEQ ID NO: 1426417 - DNA, 15 bp, Homo sapiens
ctcaagcagtctgcc

SEQ ID NO: 1426418 - DNA, 15 bp, Homo sapiens
tcaagcagtctgccc

SEQ ID NO: 1426419 - DNA, 15 bp, Homo sapiens
caagcagtctgccca

SEQ ID NO: 1426420 - DNA, 15 bp, Homo sapiens
aagcagtctgcccac

SEQ ID NO: 1426421 - DNA, 15 bp, Homo sapiens
agcagtctgcccact

SEQ ID NO: 1426422 - DNA, 15 bp, Homo sapiens
gcagtctgcccactt

SEQ ID NO: 1426423 - DNA, 15 bp, Homo sapiens
cagtctgcccacttc

SEQ ID NO: 1426424 - DNA, 15 bp, Homo sapiens
agtctgcccacttca

SEQ ID NO: 1426425 - DNA, 15 bp, Homo sapiens
gtctgcccacttcag

SEQ ID NO: 1426426 - DNA, 15 bp, Homo sapiens
tctgcccacttcagc

SEQ ID NO: 1426427 - DNA, 15 bp, Homo sapiens
ctgcccacttcagcc

SEQ ID NO: 1426428 - DNA, 15 bp, Homo sapiens
tgcccacttcagcct

SEQ ID NO: 1426429 - DNA, 15 bp, Homo sapiens
gcccacttcagcctc

SEQ ID NO: 1426430 - DNA, 15 bp, Homo sapiens
tcccaaagtgctgca

SEQ ID NO: 1426431 - DNA, 15 bp, Homo sapiens
cccaaagtgctgcag

SEQ ID NO: 1426432 - DNA, 15 bp, Homo sapiens
ccaaagtgctgcagt

SEQ ID NO: 1426433 - DNA, 15 bp, Homo sapiens
caaagtgctgcagtt

SEQ ID NO: 1426434 - DNA, 15 bp, Homo sapiens
aaagtgctgcagtta

SEQ ID NO: 1426435 - DNA, 15 bp, Homo sapiens
aagtgctgcagttac

SEQ ID NO: 1426436 - DNA, 15 bp, Homo sapiens
agtgctgcagttaca

SEQ ID NO: 1426437 - DNA, 15 bp, Homo sapiens
gtgctgcagttacag

SEQ ID NO: 1426438 - DNA, 15 bp, Homo sapiens
tgctgcagttacagg

SEQ ID NO: 1426439 - DNA, 15 bp, Homo sapiens
gctgcagttacaggc

SEQ ID NO: 1426440 - DNA, 15 bp, Homo sapiens
ctgcagttacaggct

SEQ ID NO: 1426441 - DNA, 15 bp, Homo sapiens
tgcagttacaggctt

SEQ ID NO: 1426442 - DNA, 15 bp, Homo sapiens
gcagttacaggcttg

SEQ ID NO: 1426443 - DNA, 15 bp, Homo sapiens
cagttacaggcttga

SEQ ID NO: 1426444 - DNA, 15 bp, Homo sapiens
agttacaggcttgag

SEQ ID NO: 1426445 - DNA, 15 bp, Homo sapiens
gttacaggcttgagc

SEQ ID NO: 1426446 - DNA, 15 bp, Homo sapiens
ggcttgagccactgt

SEQ ID NO: 1426447 - DNA, 15 bp, Homo sapiens
gcttgagccactgtg

SEQ ID NO: 1426448 - DNA, 15 bp, Homo sapiens
cttgagccactgtgc

SEQ ID NO: 1426449 - DNA, 15 bp, Homo sapiens
ttgagccactgtgcc

SEQ ID NO: 1426450 - DNA, 15 bp, Homo sapiens
cactgtgcctggcct

SEQ ID NO: 1426451 - DNA, 15 bp, Homo sapiens
actgtgcctggcctg

SEQ ID NO: 1426452 - DNA, 15 bp, Homo sapiens
ctgtgcctggcctgc

SEQ ID NO: 1426453 - DNA, 15 bp, Homo sapiens
tgtgcctggcctgcc

SEQ ID NO: 1426454 - DNA, 15 bp, Homo sapiens
gtgcctggcctgccc

SEQ ID NO: 1426455 - DNA, 15 bp, Homo sapiens
tgcctggcctgccct

SEQ ID NO: 1426456 - DNA, 15 bp, Homo sapiens
gcctggcctgccctt

SEQ ID NO: 1426457 - DNA, 15 bp, Homo sapiens
cctggcctgcccttt

SEQ ID NO: 1426458 - DNA, 15 bp, Homo sapiens
ctggcctgcccttta

SEQ ID NO: 1426459 - DNA, 15 bp, Homo sapiens
tggcctgccctttac

SEQ ID NO: 1426460 - DNA, 15 bp, Homo sapiens
ggcctgccctttact

SEQ ID NO: 1426461 - DNA, 15 bp, Homo sapiens
gcctgccctttactt

SEQ ID NO: 1426462 - DNA, 15 bp, Homo sapiens
cctgccctttacttt

SEQ ID NO: 1426463 - DNA, 15 bp, Homo sapiens
ctgccctttactttt

SEQ ID NO: 1426464 - DNA, 15 bp, Homo sapiens
tgccctttactttta

SEQ ID NO: 1426465 - DNA, 15 bp, Homo sapiens
gccctttacttttaa

SEQ ID NO: 1426466 - DNA, 15 bp, Homo sapiens
ccctttacttttaat

SEQ ID NO: 1426467 - DNA, 15 bp, Homo sapiens
cctttacttttaatt

SEQ ID NO: 1426468 - DNA, 15 bp, Homo sapiens
ctttacttttaattg

SEQ ID NO: 1426469 - DNA, 15 bp, Homo sapiens
tttacttttaattgg

SEQ ID NO: 1426470 - DNA, 15 bp, Homo sapiens
ttacttttaattggt

SEQ ID NO: 1426471 - DNA, 15 bp, Homo sapiens
tacttttaattggtg

SEQ ID NO: 1426472 - DNA, 15 bp, Homo sapiens
acttttaattggtgt

SEQ ID NO: 1426473 - DNA, 15 bp, Homo sapiens
cttttaattggtgta

SEQ ID NO: 1426474 - DNA, 15 bp, Homo sapiens
ttttaattggtgtat

SEQ ID NO: 1426475 - DNA, 15 bp, Homo sapiens
tttaattggtgtatt

SEQ ID NO: 1426476 - DNA, 15 bp, Homo sapiens
ttaattggtgtattt

SEQ ID NO: 1426477 - DNA, 15 bp, Homo sapiens
taattggtgtatttg

SEQ ID NO: 1426478 - DNA, 15 bp, Homo sapiens
aattggtgtatttgt

SEQ ID NO: 1426479 - DNA, 15 bp, Homo sapiens
attggtgtatttgtg

SEQ ID NO: 1426480 - DNA, 15 bp, Homo sapiens
ttggtgtatttgtgt

SEQ ID NO: 1426481 - DNA, 15 bp, Homo sapiens
tggtgtatttgtgtt

SEQ ID NO: 1426482 - DNA, 15 bp, Homo sapiens
ggtgtatttgtgttt

SEQ ID NO: 1426483 - DNA, 15 bp, Homo sapiens
gtgtatttgtgtttc

SEQ ID NO: 1426484 - DNA, 15 bp, Homo sapiens
tgtatttgtgtttca

SEQ ID NO: 1426485 - DNA, 15 bp, Homo sapiens
gtatttgtgtttcat

SEQ ID NO: 1426486 - DNA, 15 bp, Homo sapiens
tatttgtgtttcatc

SEQ ID NO: 1426487 - DNA, 15 bp, Homo sapiens
atttgtgtttcatct

SEQ ID NO: 1426488 - DNA, 15 bp, Homo sapiens
tttgtgtttcatctt

SEQ ID NO: 1426489 - DNA, 15 bp, Homo sapiens
ttgtgtttcatcttt

SEQ ID NO: 1426490 - DNA, 15 bp, Homo sapiens
tgtgtttcatctttt

SEQ ID NO: 1426491 - DNA, 15 bp, Homo sapiens
gtgtttcatctttta

SEQ ID NO: 1426492 - DNA, 15 bp, Homo sapiens
tgtttcatcttttac

SEQ ID NO: 1426493 - DNA, 15 bp, Homo sapiens
gtttcatcttttacc

SEQ ID NO: 1426494 - DNA, 15 bp, Homo sapiens
tttcatcttttacct

SEQ ID NO: 1426495 - DNA, 15 bp, Homo sapiens
ttcatcttttaccta

SEQ ID NO: 1426496 - DNA, 15 bp, Homo sapiens
tcatcttttacctac

SEQ ID NO: 1426497 - DNA, 15 bp, Homo sapiens
catcttttacctact

SEQ ID NO: 1426498 - DNA, 15 bp, Homo sapiens
atcttttacctactg

SEQ ID NO: 1426499 - DNA, 15 bp, Homo sapiens
tcttttacctactgg

SEQ ID NO: 1426500 - DNA, 15 bp, Homo sapiens
cttttacctactggt

SEQ ID NO: 1426501 - DNA, 15 bp, Homo sapiens
ttttacctactggtt

SEQ ID NO: 1426502 - DNA, 15 bp, Homo sapiens
tttacctactggttt

SEQ ID NO: 1426503 - DNA, 15 bp, Homo sapiens
ttacctactggtttt

SEQ ID NO: 1426504 - DNA, 15 bp, Homo sapiens
tacctactggttttt

SEQ ID NO: 1426505 - DNA, 15 bp, Homo sapiens
acctactggttttta

SEQ ID NO: 1426506 - DNA, 15 bp, Homo sapiens
cctactggtttttaa

SEQ ID NO: 1426507 - DNA, 15 bp, Homo sapiens
ctactggtttttaaa

SEQ ID NO: 1426508 - DNA, 15 bp, Homo sapiens
tactggtttttaaat

SEQ ID NO: 1426509 - DNA, 15 bp, Homo sapiens
actggtttttaaata

SEQ ID NO: 1426510 - DNA, 15 bp, Homo sapiens
ctggtttttaaatat

SEQ ID NO: 1426511 - DNA, 15 bp, Homo sapiens
tggtttttaaatata

SEQ ID NO: 1426512 - DNA, 15 bp, Homo sapiens
ggtttttaaatatag

SEQ ID NO: 1426513 - DNA, 15 bp, Homo sapiens
gtttttaaatatagg

SEQ ID NO: 1426514 - DNA, 15 bp, Homo sapiens
tttttaaatataggg

SEQ ID NO: 1426515 - DNA, 15 bp, Homo sapiens
ttttaaatataggga

SEQ ID NO: 1426516 - DNA, 15 bp, Homo sapiens
tttaaatatagggag

SEQ ID NO: 1426517 - DNA, 15 bp, Homo sapiens
ttaaatatagggagt

SEQ ID NO: 1426518 - DNA, 15 bp, Homo sapiens
taaatatagggagtg

SEQ ID NO: 1426519 - DNA, 15 bp, Homo sapiens
aaatatagggagtgg

SEQ ID NO: 1426520 - DNA, 15 bp, Homo sapiens
aatatagggagtggt

SEQ ID NO: 1426521 - DNA, 15 bp, Homo sapiens
atatagggagtggta

SEQ ID NO: 1426522 - DNA, 15 bp, Homo sapiens
tatagggagtggtaa

SEQ ID NO: 1426523 - DNA, 15 bp, Homo sapiens
atagggagtggtaag

SEQ ID NO: 1426524 - DNA, 15 bp, Homo sapiens
tagggagtggtaagt

SEQ ID NO: 1426525 - DNA, 15 bp, Homo sapiens
agggagtggtaagtc

SEQ ID NO: 1426526 - DNA, 15 bp, Homo sapiens
gggagtggtaagtct

SEQ ID NO: 1426527 - DNA, 15 bp, Homo sapiens
ggagtggtaagtctg

SEQ ID NO: 1426528 - DNA, 15 bp, Homo sapiens
gagtggtaagtctgt

SEQ ID NO: 1426529 - DNA, 15 bp, Homo sapiens
agtggtaagtctgta

SEQ ID NO: 1426530 - DNA, 15 bp, Homo sapiens
gtggtaagtctgtag

SEQ ID NO: 1426531 - DNA, 15 bp, Homo sapiens
tggtaagtctgtaga

SEQ ID NO: 1426532 - DNA, 15 bp, Homo sapiens
ggtaagtctgtagat

SEQ ID NO: 1426533 - DNA, 15 bp, Homo sapiens
gtaagtctgtagata

SEQ ID NO: 1426534 - DNA, 15 bp, Homo sapiens
taagtctgtagatag

SEQ ID NO: 1426535 - DNA, 15 bp, Homo sapiens
aagtctgtagataga

SEQ ID NO: 1426536 - DNA, 15 bp, Homo sapiens
agtctgtagatagaa

SEQ ID NO: 1426537 - DNA, 15 bp, Homo sapiens
gtctgtagatagaac

SEQ ID NO: 1426538 - DNA, 15 bp, Homo sapiens
tctgtagatagaaca

SEQ ID NO: 1426539 - DNA, 15 bp, Homo sapiens
ctgtagatagaacag

SEQ ID NO: 1426540 - DNA, 15 bp, Homo sapiens
tgtagatagaacaga

SEQ ID NO: 1426541 - DNA, 15 bp, Homo sapiens
gtagatagaacagag

SEQ ID NO: 1426542 - DNA, 15 bp, Homo sapiens
tagatagaacagagt

SEQ ID NO: 1426543 - DNA, 15 bp, Homo sapiens
agatagaacagagta

SEQ ID NO: 1426544 - DNA, 15 bp, Homo sapiens
gatagaacagagtat

SEQ ID NO: 1426545 - DNA, 15 bp, Homo sapiens
atagaacagagtatt

SEQ ID NO: 1426546 - DNA, 15 bp, Homo sapiens
tagaacagagtatta

SEQ ID NO: 1426547 - DNA, 15 bp, Homo sapiens
agaacagagtattaa

SEQ ID NO: 1426548 - DNA, 15 bp, Homo sapiens
gaacagagtattaag

SEQ ID NO: 1426549 - DNA, 15 bp, Homo sapiens
aacagagtattaagt

SEQ ID NO: 1426550 - DNA, 15 bp, Homo sapiens
acagagtattaagta

SEQ ID NO: 1426551 - DNA, 15 bp, Homo sapiens
cagagtattaagtag

SEQ ID NO: 1426552 - DNA, 15 bp, Homo sapiens
agagtattaagtaga

SEQ ID NO: 1426553 - DNA, 15 bp, Homo sapiens
gagtattaagtagac

SEQ ID NO: 1426554 - DNA, 15 bp, Homo sapiens
agtattaagtagact

SEQ ID NO: 1426555 - DNA, 15 bp, Homo sapiens
gtattaagtagactt

SEQ ID NO: 1426556 - DNA, 15 bp, Homo sapiens
tattaagtagactta

SEQ ID NO: 1426557 - DNA, 15 bp, Homo sapiens
attaagtagacttaa

SEQ ID NO: 1426558 - DNA, 15 bp, Homo sapiens
taagtagacttaatg

SEQ ID NO: 1426559 - DNA, 15 bp, Homo sapiens
aagtagacttaatgg

SEQ ID NO: 1426560 - DNA, 15 bp, Homo sapiens
agtagacttaatggc

SEQ ID NO: 1426561 - DNA, 15 bp, Homo sapiens
gtagacttaatggcc

SEQ ID NO: 1426562 - DNA, 15 bp, Homo sapiens
tagacttaatggcca

SEQ ID NO: 1426563 - DNA, 15 bp, Homo sapiens
agacttaatggccag

SEQ ID NO: 1426564 - DNA, 15 bp, Homo sapiens
gacttaatggccagt

SEQ ID NO: 1426565 - DNA, 15 bp, Homo sapiens
acttaatggccagta

SEQ ID NO: 1426566 - DNA, 15 bp, Homo sapiens
cttaatggccagtaa

SEQ ID NO: 1426567 - DNA, 15 bp, Homo sapiens
ttaatggccagtaat

SEQ ID NO: 1426568 - DNA, 15 bp, Homo sapiens
taatggccagtaatc

SEQ ID NO: 1426569 - DNA, 15 bp, Homo sapiens
aatggccagtaatct

SEQ ID NO: 1426570 - DNA, 15 bp, Homo sapiens
atggccagtaatctt

SEQ ID NO: 1426571 - DNA, 15 bp, Homo sapiens
tggccagtaatcttt

SEQ ID NO: 1426572 - DNA, 15 bp, Homo sapiens
ggccagtaatcttta

SEQ ID NO: 1426573 - DNA, 15 bp, Homo sapiens
gccagtaatctttag

SEQ ID NO: 1426574 - DNA, 15 bp, Homo sapiens
ccagtaatctttaga

SEQ ID NO: 1426575 - DNA, 15 bp, Homo sapiens
cagtaatctttagag

SEQ ID NO: 1426576 - DNA, 15 bp, Homo sapiens
agtaatctttagagt

SEQ ID NO: 1426577 - DNA, 15 bp, Homo sapiens
gtaatctttagagta

SEQ ID NO: 1426578 - DNA, 15 bp, Homo sapiens
taatctttagagtac

SEQ ID NO: 1426579 - DNA, 15 bp, Homo sapiens
aatctttagagtaca

SEQ ID NO: 1426580 - DNA, 15 bp, Homo sapiens
atctttagagtacat

SEQ ID NO: 1426581 - DNA, 15 bp, Homo sapiens
tctttagagtacatc

SEQ ID NO: 1426582 - DNA, 15 bp, Homo sapiens
ctttagagtacatca

SEQ ID NO: 1426583 - DNA, 15 bp, Homo sapiens
tttagagtacatcag

SEQ ID NO: 1426584 - DNA, 15 bp, Homo sapiens
ttagagtacatcaga

SEQ ID NO: 1426585 - DNA, 15 bp, Homo sapiens
tagagtacatcagaa

SEQ ID NO: 1426586 - DNA, 15 bp, Homo sapiens
agagtacatcagaac

SEQ ID NO: 1426587 - DNA, 15 bp, Homo sapiens
gagtacatcagaacc

SEQ ID NO: 1426588 - DNA, 15 bp, Homo sapiens
agtacatcagaacca

SEQ ID NO: 1426589 - DNA, 15 bp, Homo sapiens
gtacatcagaaccag

SEQ ID NO: 1426590 - DNA, 15 bp, Homo sapiens
tacatcagaaccagt

SEQ ID NO: 1426591 - DNA, 15 bp, Homo sapiens
acatcagaaccagtt

SEQ ID NO: 1426592 - DNA, 15 bp, Homo sapiens
catcagaaccagttt

SEQ ID NO: 1426593 - DNA, 15 bp, Homo sapiens
atcagaaccagtttt

SEQ ID NO: 1426594 - DNA, 15 bp, Homo sapiens
tcagaaccagttttc

SEQ ID NO: 1426595 - DNA, 15 bp, Homo sapiens
cagaaccagttttct

SEQ ID NO: 1426596 - DNA, 15 bp, Homo sapiens
agaaccagttttctg

SEQ ID NO: 1426597 - DNA, 15 bp, Homo sapiens
gaaccagttttctga

SEQ ID NO: 1426598 - DNA, 15 bp, Homo sapiens
aaccagttttctgat

SEQ ID NO: 1426599 - DNA, 15 bp, Homo sapiens
accagttttctgatg

SEQ ID NO: 1426600 - DNA, 15 bp, Homo sapiens
ccagttttctgatgg

SEQ ID NO: 1426601 - DNA, 15 bp, Homo sapiens
cagttttctgatggc

SEQ ID NO: 1426602 - DNA, 15 bp, Homo sapiens
agttttctgatggcc

SEQ ID NO: 1426603 - DNA, 15 bp, Homo sapiens
gttttctgatggcca

SEQ ID NO: 1426604 - DNA, 15 bp, Homo sapiens
ttttctgatggccaa

SEQ ID NO: 1426605 - DNA, 15 bp, Homo sapiens
tttctgatggccaat

SEQ ID NO: 1426606 - DNA, 15 bp, Homo sapiens
ttctgatggccaatc

SEQ ID NO: 1426607 - DNA, 15 bp, Homo sapiens
tctgatggccaatct

SEQ ID NO: 1426608 - DNA, 15 bp, Homo sapiens
ctgatggccaatctg

SEQ ID NO: 1426609 - DNA, 15 bp, Homo sapiens
tgatggccaatctgc

SEQ ID NO: 1426610 - DNA, 15 bp, Homo sapiens
gatggccaatctgct

SEQ ID NO: 1426611 - DNA, 15 bp, Homo sapiens
atggccaatctgctt

SEQ ID NO: 1426612 - DNA, 15 bp, Homo sapiens
tggccaatctgcttt

SEQ ID NO: 1426613 - DNA, 15 bp, Homo sapiens
ggccaatctgctttt

SEQ ID NO: 1426614 - DNA, 15 bp, Homo sapiens
gccaatctgctttta

SEQ ID NO: 1426615 - DNA, 15 bp, Homo sapiens
ccaatctgcttttaa

SEQ ID NO: 1426616 - DNA, 15 bp, Homo sapiens
caatctgcttttaat

SEQ ID NO: 1426617 - DNA, 15 bp, Homo sapiens
aatctgcttttaatt

SEQ ID NO: 1426618 - DNA, 15 bp, Homo sapiens
atctgcttttaattc

SEQ ID NO: 1426619 - DNA, 15 bp, Homo sapiens
tctgcttttaattca

SEQ ID NO: 1426620 - DNA, 15 bp, Homo sapiens
ctgcttttaattcac

SEQ ID NO: 1426621 - DNA, 15 bp, Homo sapiens
tgcttttaattcact

SEQ ID NO: 1426622 - DNA, 15 bp, Homo sapiens
gcttttaattcactc

SEQ ID NO: 1426623 - DNA, 15 bp, Homo sapiens
cttttaattcactct

SEQ ID NO: 1426624 - DNA, 15 bp, Homo sapiens
ttttaattcactctt

SEQ ID NO: 1426625 - DNA, 15 bp, Homo sapiens
tttaattcactctta

SEQ ID NO: 1426626 - DNA, 15 bp, Homo sapiens
ttaattcactcttag

SEQ ID NO: 1426627 - DNA, 15 bp, Homo sapiens
taattcactcttaga

SEQ ID NO: 1426628 - DNA, 15 bp, Homo sapiens
aattcactcttagac

SEQ ID NO: 1426629 - DNA, 15 bp, Homo sapiens
attcactcttagacg

SEQ ID NO: 1426630 - DNA, 15 bp, Homo sapiens
ttcactcttagacgt

SEQ ID NO: 1426631 - DNA, 15 bp, Homo sapiens
tcactcttagacgtt

SEQ ID NO: 1426632 - DNA, 15 bp, Homo sapiens
cactcttagacgtta

SEQ ID NO: 1426633 - DNA, 15 bp, Homo sapiens
actcttagacgttag

SEQ ID NO: 1426634 - DNA, 15 bp, Homo sapiens
ctcttagacgttaga

SEQ ID NO: 1426635 - DNA, 15 bp, Homo sapiens
tcttagacgttagag

SEQ ID NO: 1426636 - DNA, 15 bp, Homo sapiens
cttagacgttagaga

SEQ ID NO: 1426637 - DNA, 15 bp, Homo sapiens
ttagacgttagagaa

SEQ ID NO: 1426638 - DNA, 15 bp, Homo sapiens
tagacgttagagaaa

SEQ ID NO: 1426639 - DNA, 15 bp, Homo sapiens
agacgttagagaaat

SEQ ID NO: 1426640 - DNA, 15 bp, Homo sapiens
gacgttagagaaata

SEQ ID NO: 1426641 - DNA, 15 bp, Homo sapiens
acgttagagaaatag

SEQ ID NO: 1426642 - DNA, 15 bp, Homo sapiens
cgttagagaaatagg

SEQ ID NO: 1426643 - DNA, 15 bp, Homo sapiens
gttagagaaataggt

SEQ ID NO: 1426644 - DNA, 15 bp, Homo sapiens
ttagagaaataggtg

SEQ ID NO: 1426645 - DNA, 15 bp, Homo sapiens
tagagaaataggtgt

SEQ ID NO: 1426646 - DNA, 15 bp, Homo sapiens
agagaaataggtgtg

SEQ ID NO: 1426647 - DNA, 15 bp, Homo sapiens
gagaaataggtgtgg

SEQ ID NO: 1426648 - DNA, 15 bp, Homo sapiens
agaaataggtgtggt

SEQ ID NO: 1426649 - DNA, 15 bp, Homo sapiens
gaaataggtgtggtt

SEQ ID NO: 1426650 - DNA, 15 bp, Homo sapiens
aaataggtgtggttt

SEQ ID NO: 1426651 - DNA, 15 bp, Homo sapiens
aataggtgtggtttc

SEQ ID NO: 1426652 - DNA, 15 bp, Homo sapiens
ataggtgtggtttct

SEQ ID NO: 1426653 - DNA, 15 bp, Homo sapiens
taggtgtggtttctg

SEQ ID NO: 1426654 - DNA, 15 bp, Homo sapiens
aggtgtggtttctgc

SEQ ID NO: 1426655 - DNA, 15 bp, Homo sapiens
ggtgtggtttctgca

SEQ ID NO: 1426656 - DNA, 15 bp, Homo sapiens
gtgtggtttctgcat

SEQ ID NO: 1426657 - DNA, 15 bp, Homo sapiens
tgtggtttctgcata

SEQ ID NO: 1426658 - DNA, 15 bp, Homo sapiens
gtggtttctgcatag

SEQ ID NO: 1426659 - DNA, 15 bp, Homo sapiens
tggtttctgcatagg

SEQ ID NO: 1426660 - DNA, 15 bp, Homo sapiens
ggtttctgcataggg

SEQ ID NO: 1426661 - DNA, 15 bp, Homo sapiens
gtttctgcataggga

SEQ ID NO: 1426662 - DNA, 15 bp, Homo sapiens
tttctgcatagggaa

SEQ ID NO: 1426663 - DNA, 15 bp, Homo sapiens
ttctgcatagggaaa

SEQ ID NO: 1426664 - DNA, 15 bp, Homo sapiens
tctgcatagggaaaa

SEQ ID NO: 1426665 - DNA, 15 bp, Homo sapiens
ctgcatagggaaaat

SEQ ID NO: 1426666 - DNA, 15 bp, Homo sapiens
tgcatagggaaaatt

SEQ ID NO: 1426667 - DNA, 15 bp, Homo sapiens
gcatagggaaaattc

SEQ ID NO: 1426668 - DNA, 15 bp, Homo sapiens
catagggaaaattct

SEQ ID NO: 1426669 - DNA, 15 bp, Homo sapiens
atagggaaaattctg

SEQ ID NO: 1426670 - DNA, 15 bp, Homo sapiens
tagggaaaattctga

SEQ ID NO: 1426671 - DNA, 15 bp, Homo sapiens
agggaaaattctgaa

SEQ ID NO: 1426672 - DNA, 15 bp, Homo sapiens
gggaaaattctgaaa

SEQ ID NO: 1426673 - DNA, 15 bp, Homo sapiens
ggaaaattctgaaat

SEQ ID NO: 1426674 - DNA, 15 bp, Homo sapiens
gaaaattctgaaatt

SEQ ID NO: 1426675 - DNA, 15 bp, Homo sapiens
aaaattctgaaatta

SEQ ID NO: 1426676 - DNA, 15 bp, Homo sapiens
aaattctgaaattaa

SEQ ID NO: 1426677 - DNA, 15 bp, Homo sapiens
aattctgaaattaaa

SEQ ID NO: 1426678 - DNA, 15 bp, Homo sapiens
attctgaaattaaaa

SEQ ID NO: 1426679 - DNA, 15 bp, Homo sapiens
ttctgaaattaaaaa

SEQ ID NO: 1426680 - DNA, 15 bp, Homo sapiens
tctgaaattaaaaat

SEQ ID NO: 1426681 - DNA, 15 bp, Homo sapiens
ctgaaattaaaaatt

SEQ ID NO: 1426682 - DNA, 15 bp, Homo sapiens
tgaaattaaaaattt

SEQ ID NO: 1426683 - DNA, 15 bp, Homo sapiens
gaaattaaaaattta

SEQ ID NO: 1426684 - DNA, 15 bp, Homo sapiens
aaattaaaaatttaa

SEQ ID NO: 1426685 - DNA, 15 bp, Homo sapiens
aattaaaaatttaat

SEQ ID NO: 1426686 - DNA, 15 bp, Homo sapiens
attaaaaatttaatg

SEQ ID NO: 1426687 - DNA, 15 bp, Homo sapiens
ttaaaaatttaatgg

SEQ ID NO: 1426688 - DNA, 15 bp, Homo sapiens
taaaaatttaatgga

SEQ ID NO: 1426689 - DNA, 15 bp, Homo sapiens
aaaaatttaatggat

SEQ ID NO: 1426690 - DNA, 15 bp, Homo sapiens
aaaatttaatggatc

SEQ ID NO: 1426691 - DNA, 15 bp, Homo sapiens
aaatttaatggatcc

SEQ ID NO: 1426692 - DNA, 15 bp, Homo sapiens
aatttaatggatcct

SEQ ID NO: 1426693 - DNA, 15 bp, Homo sapiens
atttaatggatccta

SEQ ID NO: 1426694 - DNA, 15 bp, Homo sapiens
tttaatggatcctaa

SEQ ID NO: 1426695 - DNA, 15 bp, Homo sapiens
ttaatggatcctaag

SEQ ID NO: 1426696 - DNA, 15 bp, Homo sapiens
taatggatcctaagt

SEQ ID NO: 1426697 - DNA, 15 bp, Homo sapiens
aatggatcctaagtg

SEQ ID NO: 1426698 - DNA, 15 bp, Homo sapiens
atggatcctaagtgg

SEQ ID NO: 1426699 - DNA, 15 bp, Homo sapiens
tggatcctaagtgga

SEQ ID NO: 1426700 - DNA, 15 bp, Homo sapiens
ggatcctaagtggaa

SEQ ID NO: 1426701 - DNA, 15 bp, Homo sapiens
gatcctaagtggaaa

SEQ ID NO: 1426702 - DNA, 15 bp, Homo sapiens
atcctaagtggaaat

SEQ ID NO: 1426703 - DNA, 15 bp, Homo sapiens
tcctaagtggaaata

SEQ ID NO: 1426704 - DNA, 15 bp, Homo sapiens
cctaagtggaaataa

SEQ ID NO: 1426705 - DNA, 15 bp, Homo sapiens
ctaagtggaaataat

SEQ ID NO: 1426706 - DNA, 15 bp, Homo sapiens
taagtggaaataatc

SEQ ID NO: 1426707 - DNA, 15 bp, Homo sapiens
aagtggaaataatct

SEQ ID NO: 1426708 - DNA, 15 bp, Homo sapiens
agtggaaataatcta

SEQ ID NO: 1426709 - DNA, 15 bp, Homo sapiens
gtggaaataatctag

SEQ ID NO: 1426710 - DNA, 15 bp, Homo sapiens
tggaaataatctagg

SEQ ID NO: 1426711 - DNA, 15 bp, Homo sapiens
ggaaataatctaggt

SEQ ID NO: 1426712 - DNA, 15 bp, Homo sapiens
gaaataatctaggta

SEQ ID NO: 1426713 - DNA, 15 bp, Homo sapiens
aaataatctaggtaa

SEQ ID NO: 1426714 - DNA, 15 bp, Homo sapiens
aataatctaggtaaa

SEQ ID NO: 1426715 - DNA, 15 bp, Homo sapiens
ataatctaggtaaat

SEQ ID NO: 1426716 - DNA, 15 bp, Homo sapiens
taatctaggtaaata

SEQ ID NO: 1426717 - DNA, 15 bp, Homo sapiens
aatctaggtaaatag

SEQ ID NO: 1426718 - DNA, 15 bp, Homo sapiens
atctaggtaaatagg

SEQ ID NO: 1426719 - DNA, 15 bp, Homo sapiens
tctaggtaaatagga

SEQ ID NO: 1426720 - DNA, 15 bp, Homo sapiens
ctaggtaaataggaa

SEQ ID NO: 1426721 - DNA, 15 bp, Homo sapiens
taggtaaataggaat

SEQ ID NO: 1426722 - DNA, 15 bp, Homo sapiens
aggtaaataggaatt

SEQ ID NO: 1426723 - DNA, 15 bp, Homo sapiens
ggtaaataggaatta

SEQ ID NO: 1426724 - DNA, 15 bp, Homo sapiens
gtaaataggaattaa

SEQ ID NO: 1426725 - DNA, 15 bp, Homo sapiens
taaataggaattaaa

SEQ ID NO: 1426726 - DNA, 15 bp, Homo sapiens
aaataggaattaaat

SEQ ID NO: 1426727 - DNA, 15 bp, Homo sapiens
aataggaattaaatg

SEQ ID NO: 1426728 - DNA, 15 bp, Homo sapiens
ataggaattaaatga

SEQ ID NO: 1426729 - DNA, 15 bp, Homo sapiens
taggaattaaatgaa

SEQ ID NO: 1426730 - DNA, 15 bp, Homo sapiens
aggaattaaatgaaa

SEQ ID NO: 1426731 - DNA, 15 bp, Homo sapiens
ggaattaaatgaaag

SEQ ID NO: 1426732 - DNA, 15 bp, Homo sapiens
gaattaaatgaaaga

SEQ ID NO: 1426733 - DNA, 15 bp, Homo sapiens
aattaaatgaaagag

SEQ ID NO: 1426734 - DNA, 15 bp, Homo sapiens
attaaatgaaagagt

SEQ ID NO: 1426735 - DNA, 15 bp, Homo sapiens
ttaaatgaaagagta

SEQ ID NO: 1426736 - DNA, 15 bp, Homo sapiens
taaatgaaagagtat

SEQ ID NO: 1426737 - DNA, 15 bp, Homo sapiens
aaatgaaagagtatg

SEQ ID NO: 1426738 - DNA, 15 bp, Homo sapiens
aatgaaagagtatga

SEQ ID NO: 1426739 - DNA, 15 bp, Homo sapiens
atgaaagagtatgag

SEQ ID NO: 1426740 - DNA, 15 bp, Homo sapiens
tgaaagagtatgagc

SEQ ID NO: 1426741 - DNA, 15 bp, Homo sapiens
gaaagagtatgagct

SEQ ID NO: 1426742 - DNA, 15 bp, Homo sapiens
aaagagtatgagcta

SEQ ID NO: 1426743 - DNA, 15 bp, Homo sapiens
aagagtatgagctac

SEQ ID NO: 1426744 - DNA, 15 bp, Homo sapiens
agagtatgagctaca

SEQ ID NO: 1426745 - DNA, 15 bp, Homo sapiens
gagtatgagctacat

SEQ ID NO: 1426746 - DNA, 15 bp, Homo sapiens
agtatgagctacatc

SEQ ID NO: 1426747 - DNA, 15 bp, Homo sapiens
gtatgagctacatct

SEQ ID NO: 1426748 - DNA, 15 bp, Homo sapiens
tatgagctacatctt

SEQ ID NO: 1426749 - DNA, 15 bp, Homo sapiens
atgagctacatcttc

SEQ ID NO: 1426750 - DNA, 15 bp, Homo sapiens
tgagctacatcttca

SEQ ID NO: 1426751 - DNA, 15 bp, Homo sapiens
gagctacatcttcag

SEQ ID NO: 1426752 - DNA, 15 bp, Homo sapiens
agctacatcttcagt

SEQ ID NO: 1426753 - DNA, 15 bp, Homo sapiens
gctacatcttcagta

SEQ ID NO: 1426754 - DNA, 15 bp, Homo sapiens
ctacatcttcagtat

SEQ ID NO: 1426755 - DNA, 15 bp, Homo sapiens
tacatcttcagtata

SEQ ID NO: 1426756 - DNA, 15 bp, Homo sapiens
acatcttcagtatac

SEQ ID NO: 1426757 - DNA, 15 bp, Homo sapiens
catcttcagtatact

SEQ ID NO: 1426758 - DNA, 15 bp, Homo sapiens
atcttcagtatactt

SEQ ID NO: 1426759 - DNA, 15 bp, Homo sapiens
tcttcagtatacttg

SEQ ID NO: 1426760 - DNA, 15 bp, Homo sapiens
cttcagtatacttgg

SEQ ID NO: 1426761 - DNA, 15 bp, Homo sapiens
ttcagtatacttggt

SEQ ID NO: 1426762 - DNA, 15 bp, Homo sapiens
tcagtatacttggta

SEQ ID NO: 1426763 - DNA, 15 bp, Homo sapiens
cagtatacttggtag

SEQ ID NO: 1426764 - DNA, 15 bp, Homo sapiens
agtatacttggtagt

SEQ ID NO: 1426765 - DNA, 15 bp, Homo sapiens
gtatacttggtagtt

SEQ ID NO: 1426766 - DNA, 15 bp, Homo sapiens
tatacttggtagttt

SEQ ID NO: 1426767 - DNA, 15 bp, Homo sapiens
atacttggtagttta

SEQ ID NO: 1426768 - DNA, 15 bp, Homo sapiens
tacttggtagtttat

SEQ ID NO: 1426769 - DNA, 15 bp, Homo sapiens
acttggtagtttatg

SEQ ID NO: 1426770 - DNA, 15 bp, Homo sapiens
cttggtagtttatga

SEQ ID NO: 1426771 - DNA, 15 bp, Homo sapiens
ttggtagtttatgag

SEQ ID NO: 1426772 - DNA, 15 bp, Homo sapiens
tggtagtttatgagg

SEQ ID NO: 1426773 - DNA, 15 bp, Homo sapiens
ggtagtttatgaggt

SEQ ID NO: 1426774 - DNA, 15 bp, Homo sapiens
gtagtttatgaggtt

SEQ ID NO: 1426775 - DNA, 15 bp, Homo sapiens
tagtttatgaggtta

SEQ ID NO: 1426776 - DNA, 15 bp, Homo sapiens
agtttatgaggttag

SEQ ID NO: 1426777 - DNA, 15 bp, Homo sapiens
gtttatgaggttagt

SEQ ID NO: 1426778 - DNA, 15 bp, Homo sapiens
tttatgaggttagtt

SEQ ID NO: 1426779 - DNA, 15 bp, Homo sapiens
ttatgaggttagttt

SEQ ID NO: 1426780 - DNA, 15 bp, Homo sapiens
tatgaggttagtttc

SEQ ID NO: 1426781 - DNA, 15 bp, Homo sapiens
atgaggttagtttct

SEQ ID NO: 1426782 - DNA, 15 bp, Homo sapiens
tgaggttagtttctc

SEQ ID NO: 1426783 - DNA, 15 bp, Homo sapiens
gaggttagtttctct

SEQ ID NO: 1426784 - DNA, 15 bp, Homo sapiens
aggttagtttctcta

SEQ ID NO: 1426785 - DNA, 15 bp, Homo sapiens
ggttagtttctctaa

SEQ ID NO: 1426786 - DNA, 15 bp, Homo sapiens
gttagtttctctaat

SEQ ID NO: 1426787 - DNA, 15 bp, Homo sapiens
ttagtttctctaata

SEQ ID NO: 1426788 - DNA, 15 bp, Homo sapiens
tagtttctctaatat

SEQ ID NO: 1426789 - DNA, 15 bp, Homo sapiens
agtttctctaatata

SEQ ID NO: 1426790 - DNA, 15 bp, Homo sapiens
gtttctctaatatag

SEQ ID NO: 1426791 - DNA, 15 bp, Homo sapiens
tttctctaatatagc

SEQ ID NO: 1426792 - DNA, 15 bp, Homo sapiens
ttctctaatatagcc

SEQ ID NO: 1426793 - DNA, 15 bp, Homo sapiens
tctctaatatagcca

SEQ ID NO: 1426794 - DNA, 15 bp, Homo sapiens
ctctaatatagccag

SEQ ID NO: 1426795 - DNA, 15 bp, Homo sapiens
tctaatatagccagt

SEQ ID NO: 1426796 - DNA, 15 bp, Homo sapiens
ctaatatagccagtt

SEQ ID NO: 1426797 - DNA, 15 bp, Homo sapiens
taatatagccagttg

SEQ ID NO: 1426798 - DNA, 15 bp, Homo sapiens
aatatagccagttgg

SEQ ID NO: 1426799 - DNA, 15 bp, Homo sapiens
atatagccagttggt

SEQ ID NO: 1426800 - DNA, 15 bp, Homo sapiens
tatagccagttggtt

SEQ ID NO: 1426801 - DNA, 15 bp, Homo sapiens
atagccagttggttg

SEQ ID NO: 1426802 - DNA, 15 bp, Homo sapiens
tagccagttggttga

SEQ ID NO: 1426803 - DNA, 15 bp, Homo sapiens
agccagttggttgat

SEQ ID NO: 1426804 - DNA, 15 bp, Homo sapiens
gccagttggttgatt

SEQ ID NO: 1426805 - DNA, 15 bp, Homo sapiens
ccagttggttgattt

SEQ ID NO: 1426806 - DNA, 15 bp, Homo sapiens
cagttggttgatttc

SEQ ID NO: 1426807 - DNA, 15 bp, Homo sapiens
agttggttgatttcc

SEQ ID NO: 1426808 - DNA, 15 bp, Homo sapiens
gttggttgatttcca

SEQ ID NO: 1426809 - DNA, 15 bp, Homo sapiens
ttggttgatttccac

SEQ ID NO: 1426810 - DNA, 15 bp, Homo sapiens
tggttgatttccacc

SEQ ID NO: 1426811 - DNA, 15 bp, Homo sapiens
ggttgatttccacct

SEQ ID NO: 1426812 - DNA, 15 bp, Homo sapiens
gttgatttccacctc

SEQ ID NO: 1426813 - DNA, 15 bp, Homo sapiens
ttgatttccacctcc

SEQ ID NO: 1426814 - DNA, 15 bp, Homo sapiens
tgatttccacctcca

SEQ ID NO: 1426815 - DNA, 15 bp, Homo sapiens
gatttccacctccaa

SEQ ID NO: 1426816 - DNA, 15 bp, Homo sapiens
atttccacctccaag

SEQ ID NO: 1426817 - DNA, 15 bp, Homo sapiens
tttccacctccaagg

SEQ ID NO: 1426818 - DNA, 15 bp, Homo sapiens
ttccacctccaaggt

SEQ ID NO: 1426819 - DNA, 15 bp, Homo sapiens
tccacctccaaggtg

SEQ ID NO: 1426820 - DNA, 15 bp, Homo sapiens
ccacctccaaggtgt

SEQ ID NO: 1426821 - DNA, 15 bp, Homo sapiens
cacctccaaggtgta

SEQ ID NO: 1426822 - DNA, 15 bp, Homo sapiens
acctccaaggtgtat

SEQ ID NO: 1426823 - DNA, 15 bp, Homo sapiens
cctccaaggtgtatg

SEQ ID NO: 1426824 - DNA, 15 bp, Homo sapiens
ctccaaggtgtatga

SEQ ID NO: 1426825 - DNA, 15 bp, Homo sapiens
tccaaggtgtatgaa

SEQ ID NO: 1426826 - DNA, 15 bp, Homo sapiens
ccaaggtgtatgaag

SEQ ID NO: 1426827 - DNA, 15 bp, Homo sapiens
caaggtgtatgaagt

SEQ ID NO: 1426828 - DNA, 15 bp, Homo sapiens
aaggtgtatgaagta

SEQ ID NO: 1426829 - DNA, 15 bp, Homo sapiens
aggtgtatgaagtat

SEQ ID NO: 1426830 - DNA, 15 bp, Homo sapiens
ggtgtatgaagtatg

SEQ ID NO: 1426831 - DNA, 15 bp, Homo sapiens
gtgtatgaagtatgt

SEQ ID NO: 1426832 - DNA, 15 bp, Homo sapiens
tgtatgaagtatgta

SEQ ID NO: 1426833 - DNA, 15 bp, Homo sapiens
gtatgaagtatgtat

SEQ ID NO: 1426834 - DNA, 15 bp, Homo sapiens
tatgaagtatgtatt

SEQ ID NO: 1426835 - DNA, 15 bp, Homo sapiens
atgaagtatgtattt

SEQ ID NO: 1426836 - DNA, 15 bp, Homo sapiens
tgaagtatgtatttt

SEQ ID NO: 1426837 - DNA, 15 bp, Homo sapiens
gaagtatgtattttt

SEQ ID NO: 1426838 - DNA, 15 bp, Homo sapiens
aagtatgtatttttt

SEQ ID NO: 1426839 - DNA, 15 bp, Homo sapiens
agtatgtattttttt

SEQ ID NO: 1426840 - DNA, 15 bp, Homo sapiens
gtatgtattttttta

SEQ ID NO: 1426841 - DNA, 15 bp, Homo sapiens
tatgtatttttttaa

SEQ ID NO: 1426842 - DNA, 15 bp, Homo sapiens
atgtatttttttaat

SEQ ID NO: 1426843 - DNA, 15 bp, Homo sapiens
tgtatttttttaatg

SEQ ID NO: 1426844 - DNA, 15 bp, Homo sapiens
gtatttttttaatga

SEQ ID NO: 1426845 - DNA, 15 bp, Homo sapiens
tatttttttaatgac

SEQ ID NO: 1426846 - DNA, 15 bp, Homo sapiens
atttttttaatgaca

SEQ ID NO: 1426847 - DNA, 15 bp, Homo sapiens
tttttttaatgacaa

SEQ ID NO: 1426848 - DNA, 15 bp, Homo sapiens
ttttttaatgacaat

SEQ ID NO: 1426849 - DNA, 15 bp, Homo sapiens
tttttaatgacaatt

SEQ ID NO: 1426850 - DNA, 15 bp, Homo sapiens
ttttaatgacaattc

SEQ ID NO: 1426851 - DNA, 15 bp, Homo sapiens
tttaatgacaattca

SEQ ID NO: 1426852 - DNA, 15 bp, Homo sapiens
ttaatgacaattcag

SEQ ID NO: 1426853 - DNA, 15 bp, Homo sapiens
taatgacaattcagt

SEQ ID NO: 1426854 - DNA, 15 bp, Homo sapiens
aatgacaattcagtt

SEQ ID NO: 1426855 - DNA, 15 bp, Homo sapiens
atgacaattcagttt

SEQ ID NO: 1426856 - DNA, 15 bp, Homo sapiens
tgacaattcagtttt

SEQ ID NO: 1426857 - DNA, 15 bp, Homo sapiens
gacaattcagttttt

SEQ ID NO: 1426858 - DNA, 15 bp, Homo sapiens
acaattcagtttttg

SEQ ID NO: 1426859 - DNA, 15 bp, Homo sapiens
caattcagtttttga

SEQ ID NO: 1426860 - DNA, 15 bp, Homo sapiens
aattcagtttttgag

SEQ ID NO: 1426861 - DNA, 15 bp, Homo sapiens
attcagtttttgagt

SEQ ID NO: 1426862 - DNA, 15 bp, Homo sapiens
ttcagtttttgagta

SEQ ID NO: 1426863 - DNA, 15 bp, Homo sapiens
tcagtttttgagtac

SEQ ID NO: 1426864 - DNA, 15 bp, Homo sapiens
cagtttttgagtacc

SEQ ID NO: 1426865 - DNA, 15 bp, Homo sapiens
agtttttgagtacct

SEQ ID NO: 1426866 - DNA, 15 bp, Homo sapiens
gtttttgagtacctt

SEQ ID NO: 1426867 - DNA, 15 bp, Homo sapiens
tttttgagtaccttg

SEQ ID NO: 1426868 - DNA, 15 bp, Homo sapiens
ttttgagtaccttgt

SEQ ID NO: 1426869 - DNA, 15 bp, Homo sapiens
tttgagtaccttgtt

SEQ ID NO: 1426870 - DNA, 15 bp, Homo sapiens
ttgagtaccttgtta

SEQ ID NO: 1426871 - DNA, 15 bp, Homo sapiens
tgagtaccttgttat

SEQ ID NO: 1426872 - DNA, 15 bp, Homo sapiens
gagtaccttgttatt

SEQ ID NO: 1426873 - DNA, 15 bp, Homo sapiens
agtaccttgttattt

SEQ ID NO: 1426874 - DNA, 15 bp, Homo sapiens
gtaccttgttatttt

SEQ ID NO: 1426875 - DNA, 15 bp, Homo sapiens
taccttgttattttt

SEQ ID NO: 1426876 - DNA, 15 bp, Homo sapiens
accttgttatttttg

SEQ ID NO: 1426877 - DNA, 15 bp, Homo sapiens
ccttgttatttttgt

SEQ ID NO: 1426878 - DNA, 15 bp, Homo sapiens
cttgttatttttgta

SEQ ID NO: 1426879 - DNA, 15 bp, Homo sapiens
ttgttatttttgtat

SEQ ID NO: 1426880 - DNA, 15 bp, Homo sapiens
tgttatttttgtata

SEQ ID NO: 1426881 - DNA, 15 bp, Homo sapiens
gttatttttgtatat

SEQ ID NO: 1426882 - DNA, 15 bp, Homo sapiens
ttatttttgtatatt

SEQ ID NO: 1426883 - DNA, 15 bp, Homo sapiens
tatttttgtatattt

SEQ ID NO: 1426884 - DNA, 15 bp, Homo sapiens
atttttgtatatttt

SEQ ID NO: 1426885 - DNA, 15 bp, Homo sapiens
tttttgtatattttc

SEQ ID NO: 1426886 - DNA, 15 bp, Homo sapiens
ttttgtatattttca

SEQ ID NO: 1426887 - DNA, 15 bp, Homo sapiens
tttgtatattttcag

SEQ ID NO: 1426888 - DNA, 15 bp, Homo sapiens
ttgtatattttcagc

SEQ ID NO: 1426889 - DNA, 15 bp, Homo sapiens
tgtatattttcagct

SEQ ID NO: 1426890 - DNA, 15 bp, Homo sapiens
gtatattttcagctg

SEQ ID NO: 1426891 - DNA, 15 bp, Homo sapiens
tatattttcagctgc

SEQ ID NO: 1426892 - DNA, 15 bp, Homo sapiens
atattttcagctgct

SEQ ID NO: 1426893 - DNA, 15 bp, Homo sapiens
tattttcagctgctt

SEQ ID NO: 1426894 - DNA, 15 bp, Homo sapiens
attttcagctgcttg

SEQ ID NO: 1426895 - DNA, 15 bp, Homo sapiens
ttttcagctgcttgt

SEQ ID NO: 1426896 - DNA, 15 bp, Homo sapiens
tttcagctgcttgtg

SEQ ID NO: 1426897 - DNA, 15 bp, Homo sapiens
ttcagctgcttgtga

SEQ ID NO: 1426898 - DNA, 15 bp, Homo sapiens
tcagctgcttgtgaa

SEQ ID NO: 1426899 - DNA, 15 bp, Homo sapiens
cagctgcttgtgaat

SEQ ID NO: 1426900 - DNA, 15 bp, Homo sapiens
agctgcttgtgaatt

SEQ ID NO: 1426901 - DNA, 15 bp, Homo sapiens
gctgcttgtgaattt

SEQ ID NO: 1426902 - DNA, 15 bp, Homo sapiens
ctgcttgtgaatttt

SEQ ID NO: 1426903 - DNA, 15 bp, Homo sapiens
tgcttgtgaattttc

SEQ ID NO: 1426904 - DNA, 15 bp, Homo sapiens
gcttgtgaattttct

SEQ ID NO: 1426905 - DNA, 15 bp, Homo sapiens
cttgtgaattttctg

SEQ ID NO: 1426906 - DNA, 15 bp, Homo sapiens
ttgtgaattttctga

SEQ ID NO: 1426907 - DNA, 15 bp, Homo sapiens
tgtgaattttctgag

SEQ ID NO: 1426908 - DNA, 15 bp, Homo sapiens
gtgaattttctgaga

SEQ ID NO: 1426909 - DNA, 15 bp, Homo sapiens
tgaattttctgagac

SEQ ID NO: 1426910 - DNA, 15 bp, Homo sapiens
gaattttctgagacg

SEQ ID NO: 1426911 - DNA, 15 bp, Homo sapiens
aattttctgagacgg

SEQ ID NO: 1426912 - DNA, 15 bp, Homo sapiens
attttctgagacgga

SEQ ID NO: 1426913 - DNA, 15 bp, Homo sapiens
ttttctgagacggat

SEQ ID NO: 1426914 - DNA, 15 bp, Homo sapiens
tttctgagacggatg

SEQ ID NO: 1426915 - DNA, 15 bp, Homo sapiens
ttctgagacggatgt

SEQ ID NO: 1426916 - DNA, 15 bp, Homo sapiens
tctgagacggatgta

SEQ ID NO: 1426917 - DNA, 15 bp, Homo sapiens
ctgagacggatgtaa

SEQ ID NO: 1426918 - DNA, 15 bp, Homo sapiens
tgagacggatgtaac

SEQ ID NO: 1426919 - DNA, 15 bp, Homo sapiens
gagacggatgtaaca

SEQ ID NO: 1426920 - DNA, 15 bp, Homo sapiens
agacggatgtaacaa

SEQ ID NO: 1426921 - DNA, 15 bp, Homo sapiens
gacggatgtaacaaa

SEQ ID NO: 1426922 - DNA, 15 bp, Homo sapiens
acggatgtaacaaat

SEQ ID NO: 1426923 - DNA, 15 bp, Homo sapiens
cggatgtaacaaata

SEQ ID NO: 1426924 - DNA, 15 bp, Homo sapiens
ggatgtaacaaatac

SEQ ID NO: 1426925 - DNA, 15 bp, Homo sapiens
gatgtaacaaatact

SEQ ID NO: 1426926 - DNA, 15 bp, Homo sapiens
atgtaacaaatactg

SEQ ID NO: 1426927 - DNA, 15 bp, Homo sapiens
tgtaacaaatactga

SEQ ID NO: 1426928 - DNA, 15 bp, Homo sapiens
gtaacaaatactgaa

SEQ ID NO: 1426929 - DNA, 15 bp, Homo sapiens
taacaaatactgaac

SEQ ID NO: 1426930 - DNA, 15 bp, Homo sapiens
aacaaatactgaaca

SEQ ID NO: 1426931 - DNA, 15 bp, Homo sapiens
acaaatactgaacat

SEQ ID NO: 1426932 - DNA, 15 bp, Homo sapiens
caaatactgaacatc

SEQ ID NO: 1426933 - DNA, 15 bp, Homo sapiens
aaatactgaacatca

SEQ ID NO: 1426934 - DNA, 15 bp, Homo sapiens
aatactgaacatcat

SEQ ID NO: 1426935 - DNA, 15 bp, Homo sapiens
atactgaacatcatc

SEQ ID NO: 1426936 - DNA, 15 bp, Homo sapiens
tactgaacatcatca

SEQ ID NO: 1426937 - DNA, 15 bp, Homo sapiens
actgaacatcatcaa

SEQ ID NO: 1426938 - DNA, 15 bp, Homo sapiens
ctgaacatcatcaac

SEQ ID NO: 1426939 - DNA, 15 bp, Homo sapiens
tgaacatcatcaacc

SEQ ID NO: 1426940 - DNA, 15 bp, Homo sapiens
gaacatcatcaaccc

SEQ ID NO: 1426941 - DNA, 15 bp, Homo sapiens
aacatcatcaaccca

SEQ ID NO: 1426942 - DNA, 15 bp, Homo sapiens
acatcatcaacccag

SEQ ID NO: 1426943 - DNA, 15 bp, Homo sapiens
catcatcaacccagt

SEQ ID NO: 1426944 - DNA, 15 bp, Homo sapiens
atcatcaacccagta

SEQ ID NO: 1426945 - DNA, 15 bp, Homo sapiens
tcatcaacccagtaa

SEQ ID NO: 1426946 - DNA, 15 bp, Homo sapiens
catcaacccagtaat

SEQ ID NO: 1426947 - DNA, 15 bp, Homo sapiens
atcaacccagtaata

SEQ ID NO: 1426948 - DNA, 15 bp, Homo sapiens
tcaacccagtaataa

SEQ ID NO: 1426949 - DNA, 15 bp, Homo sapiens
caacccagtaataat

SEQ ID NO: 1426950 - DNA, 15 bp, Homo sapiens
aacccagtaataatg

SEQ ID NO: 1426951 - DNA, 15 bp, Homo sapiens
acccagtaataatga

SEQ ID NO: 1426952 - DNA, 15 bp, Homo sapiens
cccagtaataatgat

SEQ ID NO: 1426953 - DNA, 15 bp, Homo sapiens
ccagtaataatgatt

SEQ ID NO: 1426954 - DNA, 15 bp, Homo sapiens
cagtaataatgattt

SEQ ID NO: 1426955 - DNA, 15 bp, Homo sapiens
agtaataatgatttg

SEQ ID NO: 1426956 - DNA, 15 bp, Homo sapiens
gtaataatgatttga

SEQ ID NO: 1426957 - DNA, 15 bp, Homo sapiens
taataatgatttgaa

SEQ ID NO: 1426958 - DNA, 15 bp, Homo sapiens
aataatgatttgaac

SEQ ID NO: 1426959 - DNA, 15 bp, Homo sapiens
ataatgatttgaaca

SEQ ID NO: 1426960 - DNA, 15 bp, Homo sapiens
taatgatttgaacac

SEQ ID NO: 1426961 - DNA, 15 bp, Homo sapiens
aatgatttgaacacc

SEQ ID NO: 1426962 - DNA, 15 bp, Homo sapiens
atgatttgaacacca

SEQ ID NO: 1426963 - DNA, 15 bp, Homo sapiens
tgatttgaacaccac

SEQ ID NO: 1426964 - DNA, 15 bp, Homo sapiens
gatttgaacaccact

SEQ ID NO: 1426965 - DNA, 15 bp, Homo sapiens
atttgaacaccactg

SEQ ID NO: 1426966 - DNA, 15 bp, Homo sapiens
tttgaacaccactga

SEQ ID NO: 1426967 - DNA, 15 bp, Homo sapiens
ttgaacaccactgag

SEQ ID NO: 1426968 - DNA, 15 bp, Homo sapiens
tgaacaccactgaga

SEQ ID NO: 1426969 - DNA, 15 bp, Homo sapiens
gaacaccactgagaa

SEQ ID NO: 1426970 - DNA, 15 bp, Homo sapiens
aacaccactgagaag

SEQ ID NO: 1426971 - DNA, 15 bp, Homo sapiens
acaccactgagaagc

SEQ ID NO: 1426972 - DNA, 15 bp, Homo sapiens
caccactgagaagcg

SEQ ID NO: 1426973 - DNA, 15 bp, Homo sapiens
accactgagaagcgt

SEQ ID NO: 1426974 - DNA, 15 bp, Homo sapiens
ccactgagaagcgtg

SEQ ID NO: 1426975 - DNA, 15 bp, Homo sapiens
cactgagaagcgtgc

SEQ ID NO: 1426976 - DNA, 15 bp, Homo sapiens
actgagaagcgtgca

SEQ ID NO: 1426977 - DNA, 15 bp, Homo sapiens
ctgagaagcgtgcag

SEQ ID NO: 1426978 - DNA, 15 bp, Homo sapiens
tgagaagcgtgcagc

SEQ ID NO: 1426979 - DNA, 15 bp, Homo sapiens
gagaagcgtgcagct

SEQ ID NO: 1426980 - DNA, 15 bp, Homo sapiens
agaagcgtgcagctg

SEQ ID NO: 1426981 - DNA, 15 bp, Homo sapiens
gaagcgtgcagctga

SEQ ID NO: 1426982 - DNA, 15 bp, Homo sapiens
aagcgtgcagctgag

SEQ ID NO: 1426983 - DNA, 15 bp, Homo sapiens
agcgtgcagctgaga

SEQ ID NO: 1426984 - DNA, 15 bp, Homo sapiens
gcgtgcagctgagag

SEQ ID NO: 1426985 - DNA, 15 bp, Homo sapiens
cgtgcagctgagagg

SEQ ID NO: 1426986 - DNA, 15 bp, Homo sapiens
gtgcagctgagaggc

SEQ ID NO: 1426987 - DNA, 15 bp, Homo sapiens
tgcagctgagaggca

SEQ ID NO: 1426988 - DNA, 15 bp, Homo sapiens
gcagctgagaggcat

SEQ ID NO: 1426989 - DNA, 15 bp, Homo sapiens
cagctgagaggcatc

SEQ ID NO: 1426990 - DNA, 15 bp, Homo sapiens
agctgagaggcatcc

SEQ ID NO: 1426991 - DNA, 15 bp, Homo sapiens
gctgagaggcatcca

SEQ ID NO: 1426992 - DNA, 15 bp, Homo sapiens
ctgagaggcatccag

SEQ ID NO: 1426993 - DNA, 15 bp, Homo sapiens
tgagaggcatccaga

SEQ ID NO: 1426994 - DNA, 15 bp, Homo sapiens
gagaggcatccagaa

SEQ ID NO: 1426995 - DNA, 15 bp, Homo sapiens
agaggcatccagaaa

SEQ ID NO: 1426996 - DNA, 15 bp, Homo sapiens
gaggcatccagaaaa

SEQ ID NO: 1426997 - DNA, 15 bp, Homo sapiens
aggcatccagaaaag

SEQ ID NO: 1426998 - DNA, 15 bp, Homo sapiens
ggcatccagaaaagt

SEQ ID NO: 1426999 - DNA, 15 bp, Homo sapiens
gcatccagaaaagta

SEQ ID NO: 1427000 - DNA, 15 bp, Homo sapiens
catccagaaaagtat

SEQ ID NO: 1427001 - DNA, 15 bp, Homo sapiens
atccagaaaagtatc

SEQ ID NO: 1427002 - DNA, 15 bp, Homo sapiens
tccagaaaagtatca

SEQ ID NO: 1427003 - DNA, 15 bp, Homo sapiens
ccagaaaagtatcag

SEQ ID NO: 1427004 - DNA, 15 bp, Homo sapiens
cagaaaagtatcagg

SEQ ID NO: 1427005 - DNA, 15 bp, Homo sapiens
agaaaagtatcaggg

SEQ ID NO: 1427006 - DNA, 15 bp, Homo sapiens
gaaaagtatcagggt

SEQ ID NO: 1427007 - DNA, 15 bp, Homo sapiens
aaaagtatcagggta

SEQ ID NO: 1427008 - DNA, 15 bp, Homo sapiens
aaagtatcagggtag

SEQ ID NO: 1427009 - DNA, 15 bp, Homo sapiens
aagtatcagggtagt

SEQ ID NO: 1427010 - DNA, 15 bp, Homo sapiens
agtatcagggtagtt

SEQ ID NO: 1427011 - DNA, 15 bp, Homo sapiens
gtatcagggtagttc

SEQ ID NO: 1427012 - DNA, 15 bp, Homo sapiens
tatcagggtagttct

SEQ ID NO: 1427013 - DNA, 15 bp, Homo sapiens
atcagggtagttctg

SEQ ID NO: 1427014 - DNA, 15 bp, Homo sapiens
tcagggtagttctgt

SEQ ID NO: 1427015 - DNA, 15 bp, Homo sapiens
cagggtagttctgtt

SEQ ID NO: 1427016 - DNA, 15 bp, Homo sapiens
agggtagttctgttt

SEQ ID NO: 1427017 - DNA, 15 bp, Homo sapiens
gggtagttctgtttc

SEQ ID NO: 1427018 - DNA, 15 bp, Homo sapiens
ggtagttctgtttca

SEQ ID NO: 1427019 - DNA, 15 bp, Homo sapiens
gtagttctgtttcaa

SEQ ID NO: 1427020 - DNA, 15 bp, Homo sapiens
agttctgtttcaaac

SEQ ID NO: 1427021 - DNA, 15 bp, Homo sapiens
gttctgtttcaaact

SEQ ID NO: 1427022 - DNA, 15 bp, Homo sapiens
ttctgtttcaaactt

SEQ ID NO: 1427023 - DNA, 15 bp, Homo sapiens
tctgtttcaaacttg

SEQ ID NO: 1427024 - DNA, 15 bp, Homo sapiens
ctgtttcaaacttgc

SEQ ID NO: 1427025 - DNA, 15 bp, Homo sapiens
tgtttcaaacttgca

SEQ ID NO: 1427026 - DNA, 15 bp, Homo sapiens
gtttcaaacttgcat

SEQ ID NO: 1427027 - DNA, 15 bp, Homo sapiens
tttcaaacttgcatg

SEQ ID NO: 1427028 - DNA, 15 bp, Homo sapiens
ttcaaacttgcatgt

SEQ ID NO: 1427029 - DNA, 15 bp, Homo sapiens
tcaaacttgcatgtg

SEQ ID NO: 1427030 - DNA, 15 bp, Homo sapiens
caaacttgcatgtgg

SEQ ID NO: 1427031 - DNA, 15 bp, Homo sapiens
aaacttgcatgtgga

SEQ ID NO: 1427032 - DNA, 15 bp, Homo sapiens
aacttgcatgtggag

SEQ ID NO: 1427033 - DNA, 15 bp, Homo sapiens
acttgcatgtggagc

SEQ ID NO: 1427034 - DNA, 15 bp, Homo sapiens
cttgcatgtggagcc

SEQ ID NO: 1427035 - DNA, 15 bp, Homo sapiens
ttgcatgtggagcca

SEQ ID NO: 1427036 - DNA, 15 bp, Homo sapiens
tgcatgtggagccat

SEQ ID NO: 1427037 - DNA, 15 bp, Homo sapiens
gcatgtggagccatg

SEQ ID NO: 1427038 - DNA, 15 bp, Homo sapiens
catgtggagccatgt

SEQ ID NO: 1427039 - DNA, 15 bp, Homo sapiens
atgtggagccatgtg

SEQ ID NO: 1427040 - DNA, 15 bp, Homo sapiens
tgtggagccatgtgg

SEQ ID NO: 1427041 - DNA, 15 bp, Homo sapiens
gtggagccatgtggc

SEQ ID NO: 1427042 - DNA, 15 bp, Homo sapiens
tggagccatgtggca

SEQ ID NO: 1427043 - DNA, 15 bp, Homo sapiens
ggagccatgtggcac

SEQ ID NO: 1427044 - DNA, 15 bp, Homo sapiens
gagccatgtggcaca

SEQ ID NO: 1427045 - DNA, 15 bp, Homo sapiens
agccatgtggcacaa

SEQ ID NO: 1427046 - DNA, 15 bp, Homo sapiens
gccatgtggcacaaa

SEQ ID NO: 1427047 - DNA, 15 bp, Homo sapiens
ccatgtggcacaaat

SEQ ID NO: 1427048 - DNA, 15 bp, Homo sapiens
catgtggcacaaata

SEQ ID NO: 1427049 - DNA, 15 bp, Homo sapiens
atgtggcacaaatac

SEQ ID NO: 1427050 - DNA, 15 bp, Homo sapiens
tgtggcacaaatact

SEQ ID NO: 1427051 - DNA, 15 bp, Homo sapiens
gtggcacaaatactc

SEQ ID NO: 1427052 - DNA, 15 bp, Homo sapiens
tggcacaaatactca

SEQ ID NO: 1427053 - DNA, 15 bp, Homo sapiens
ggcacaaatactcat

SEQ ID NO: 1427054 - DNA, 15 bp, Homo sapiens
gcacaaatactcatg

SEQ ID NO: 1427055 - DNA, 15 bp, Homo sapiens
cacaaatactcatgc

SEQ ID NO: 1427056 - DNA, 15 bp, Homo sapiens
acaaatactcatgcc

SEQ ID NO: 1427057 - DNA, 15 bp, Homo sapiens
caaatactcatgcca

SEQ ID NO: 1427058 - DNA, 15 bp, Homo sapiens
aaatactcatgccag

SEQ ID NO: 1427059 - DNA, 15 bp, Homo sapiens
aatactcatgccagc

SEQ ID NO: 1427060 - DNA, 15 bp, Homo sapiens
atactcatgccagct

SEQ ID NO: 1427061 - DNA, 15 bp, Homo sapiens
tactcatgccagctc

SEQ ID NO: 1427062 - DNA, 15 bp, Homo sapiens
actcatgccagctca

SEQ ID NO: 1427063 - DNA, 15 bp, Homo sapiens
ctcatgccagctcat

SEQ ID NO: 1427064 - DNA, 15 bp, Homo sapiens
tcatgccagctcatt

SEQ ID NO: 1427065 - DNA, 15 bp, Homo sapiens
catgccagctcatta

SEQ ID NO: 1427066 - DNA, 15 bp, Homo sapiens
atgccagctcattac

SEQ ID NO: 1427067 - DNA, 15 bp, Homo sapiens
tgccagctcattaca

SEQ ID NO: 1427068 - DNA, 15 bp, Homo sapiens
gccagctcattacag

SEQ ID NO: 1427069 - DNA, 15 bp, Homo sapiens
ccagctcattacagc

SEQ ID NO: 1427070 - DNA, 15 bp, Homo sapiens
cagctcattacagca

SEQ ID NO: 1427071 - DNA, 15 bp, Homo sapiens
agctcattacagcat

SEQ ID NO: 1427072 - DNA, 15 bp, Homo sapiens
gctcattacagcatg

SEQ ID NO: 1427073 - DNA, 15 bp, Homo sapiens
ctcattacagcatga

SEQ ID NO: 1427074 - DNA, 15 bp, Homo sapiens
tcattacagcatgag

SEQ ID NO: 1427075 - DNA, 15 bp, Homo sapiens
cattacagcatgaga

SEQ ID NO: 1427076 - DNA, 15 bp, Homo sapiens
attacagcatgagaa

SEQ ID NO: 1427077 - DNA, 15 bp, Homo sapiens
ttacagcatgagaac

SEQ ID NO: 1427078 - DNA, 15 bp, Homo sapiens
tacagcatgagaaca

SEQ ID NO: 1427079 - DNA, 15 bp, Homo sapiens
acagcatgagaacag

SEQ ID NO: 1427080 - DNA, 15 bp, Homo sapiens
cagcatgagaacagc

SEQ ID NO: 1427081 - DNA, 15 bp, Homo sapiens
agcatgagaacagca

SEQ ID NO: 1427082 - DNA, 15 bp, Homo sapiens
gcatgagaacagcag

SEQ ID NO: 1427083 - DNA, 15 bp, Homo sapiens
catgagaacagcagt

SEQ ID NO: 1427084 - DNA, 15 bp, Homo sapiens
atgagaacagcagtt

SEQ ID NO: 1427085 - DNA, 15 bp, Homo sapiens
tgagaacagcagttt

SEQ ID NO: 1427086 - DNA, 15 bp, Homo sapiens
gagaacagcagttta

SEQ ID NO: 1427087 - DNA, 15 bp, Homo sapiens
agaacagcagtttat

SEQ ID NO: 1427088 - DNA, 15 bp, Homo sapiens
gaacagcagtttatt

SEQ ID NO: 1427089 - DNA, 15 bp, Homo sapiens
aacagcagtttatta

SEQ ID NO: 1427090 - DNA, 15 bp, Homo sapiens
acagcagtttattac

SEQ ID NO: 1427091 - DNA, 15 bp, Homo sapiens
cagcagtttattact

SEQ ID NO: 1427092 - DNA, 15 bp, Homo sapiens
agcagtttattactc

SEQ ID NO: 1427093 - DNA, 15 bp, Homo sapiens
gcagtttattactca

SEQ ID NO: 1427094 - DNA, 15 bp, Homo sapiens
cagtttattactcac

SEQ ID NO: 1427095 - DNA, 15 bp, Homo sapiens
agtttattactcact

SEQ ID NO: 1427096 - DNA, 15 bp, Homo sapiens
gtttattactcacta

SEQ ID NO: 1427097 - DNA, 15 bp, Homo sapiens
tttattactcactaa

SEQ ID NO: 1427098 - DNA, 15 bp, Homo sapiens
ttattactcactaaa

SEQ ID NO: 1427099 - DNA, 15 bp, Homo sapiens
tattactcactaaag

SEQ ID NO: 1427100 - DNA, 15 bp, Homo sapiens
attactcactaaaga

SEQ ID NO: 1427101 - DNA, 15 bp, Homo sapiens
ttactcactaaagac

SEQ ID NO: 1427102 - DNA, 15 bp, Homo sapiens
tactcactaaagaca

SEQ ID NO: 1427103 - DNA, 15 bp, Homo sapiens
actcactaaagacag

SEQ ID NO: 1427104 - DNA, 15 bp, Homo sapiens
ctcactaaagacaga

SEQ ID NO: 1427105 - DNA, 15 bp, Homo sapiens
tcactaaagacagaa

SEQ ID NO: 1427106 - DNA, 15 bp, Homo sapiens
cactaaagacagaat

SEQ ID NO: 1427107 - DNA, 15 bp, Homo sapiens
actaaagacagaatg

SEQ ID NO: 1427108 - DNA, 15 bp, Homo sapiens
ctaaagacagaatga

SEQ ID NO: 1427109 - DNA, 15 bp, Homo sapiens
taaagacagaatgaa

SEQ ID NO: 1427110 - DNA, 15 bp, Homo sapiens
aaagacagaatgaat

SEQ ID NO: 1427111 - DNA, 15 bp, Homo sapiens
aagacagaatgaatg

SEQ ID NO: 1427112 - DNA, 15 bp, Homo sapiens
agacagaatgaatgt

SEQ ID NO: 1427113 - DNA, 15 bp, Homo sapiens
gacagaatgaatgta

SEQ ID NO: 1427114 - DNA, 15 bp, Homo sapiens
acagaatgaatgtag

SEQ ID NO: 1427115 - DNA, 15 bp, Homo sapiens
cagaatgaatgtaga

SEQ ID NO: 1427116 - DNA, 15 bp, Homo sapiens
agaatgaatgtagaa

SEQ ID NO: 1427117 - DNA, 15 bp, Homo sapiens
gaatgaatgtagaaa

SEQ ID NO: 1427118 - DNA, 15 bp, Homo sapiens
aatgaatgtagaaaa

SEQ ID NO: 1427119 - DNA, 15 bp, Homo sapiens
atgaatgtagaaaag

SEQ ID NO: 1427120 - DNA, 15 bp, Homo sapiens
tgaatgtagaaaagg

SEQ ID NO: 1427121 - DNA, 15 bp, Homo sapiens
gaatgtagaaaaggc

SEQ ID NO: 1427122 - DNA, 15 bp, Homo sapiens
aatgtagaaaaggct

SEQ ID NO: 1427123 - DNA, 15 bp, Homo sapiens
atgtagaaaaggctg

SEQ ID NO: 1427124 - DNA, 15 bp, Homo sapiens
tgtagaaaaggctga

SEQ ID NO: 1427125 - DNA, 15 bp, Homo sapiens
gtagaaaaggctgaa

SEQ ID NO: 1427126 - DNA, 15 bp, Homo sapiens
tagaaaaggctgaat

SEQ ID NO: 1427127 - DNA, 15 bp, Homo sapiens
agaaaaggctgaatt

SEQ ID NO: 1427128 - DNA, 15 bp, Homo sapiens
gaaaaggctgaattc

SEQ ID NO: 1427129 - DNA, 15 bp, Homo sapiens
aaaaggctgaattct

SEQ ID NO: 1427130 - DNA, 15 bp, Homo sapiens
aaaggctgaattctg

SEQ ID NO: 1427131 - DNA, 15 bp, Homo sapiens
aaggctgaattctgt

SEQ ID NO: 1427132 - DNA, 15 bp, Homo sapiens
aggctgaattctgta

SEQ ID NO: 1427133 - DNA, 15 bp, Homo sapiens
ggctgaattctgtaa

SEQ ID NO: 1427134 - DNA, 15 bp, Homo sapiens
gctgaattctgtaat

SEQ ID NO: 1427135 - DNA, 15 bp, Homo sapiens
ctgaattctgtaata

SEQ ID NO: 1427136 - DNA, 15 bp, Homo sapiens
tgaattctgtaataa

SEQ ID NO: 1427137 - DNA, 15 bp, Homo sapiens
gaattctgtaataaa

SEQ ID NO: 1427138 - DNA, 15 bp, Homo sapiens
aattctgtaataaaa

SEQ ID NO: 1427139 - DNA, 15 bp, Homo sapiens
attctgtaataaaag

SEQ ID NO: 1427140 - DNA, 15 bp, Homo sapiens
ttctgtaataaaagc

SEQ ID NO: 1427141 - DNA, 15 bp, Homo sapiens
tctgtaataaaagca

SEQ ID NO: 1427142 - DNA, 15 bp, Homo sapiens
ctgtaataaaagcaa

SEQ ID NO: 1427143 - DNA, 15 bp, Homo sapiens
tgtaataaaagcaaa

SEQ ID NO: 1427144 - DNA, 15 bp, Homo sapiens
gtaataaaagcaaac

SEQ ID NO: 1427145 - DNA, 15 bp, Homo sapiens
taataaaagcaaaca

SEQ ID NO: 1427146 - DNA, 15 bp, Homo sapiens
aataaaagcaaacag

SEQ ID NO: 1427147 - DNA, 15 bp, Homo sapiens
ataaaagcaaacagc

SEQ ID NO: 1427148 - DNA, 15 bp, Homo sapiens
taaaagcaaacagcc

SEQ ID NO: 1427149 - DNA, 15 bp, Homo sapiens
aaaagcaaacagcct

SEQ ID NO: 1427150 - DNA, 15 bp, Homo sapiens
aaagcaaacagcctg

SEQ ID NO: 1427151 - DNA, 15 bp, Homo sapiens
aagcaaacagcctgg

SEQ ID NO: 1427152 - DNA, 15 bp, Homo sapiens
agcaaacagcctggc

SEQ ID NO: 1427153 - DNA, 15 bp, Homo sapiens
gcaaacagcctggct

SEQ ID NO: 1427154 - DNA, 15 bp, Homo sapiens
caaacagcctggctt

SEQ ID NO: 1427155 - DNA, 15 bp, Homo sapiens
aaacagcctggctta

SEQ ID NO: 1427156 - DNA, 15 bp, Homo sapiens
aacagcctggcttag

SEQ ID NO: 1427157 - DNA, 15 bp, Homo sapiens
acagcctggcttagc

SEQ ID NO: 1427158 - DNA, 15 bp, Homo sapiens
cagcctggcttagca

SEQ ID NO: 1427159 - DNA, 15 bp, Homo sapiens
agcctggcttagcaa

SEQ ID NO: 1427160 - DNA, 15 bp, Homo sapiens
gcctggcttagcaag

SEQ ID NO: 1427161 - DNA, 15 bp, Homo sapiens
cctggcttagcaagg

SEQ ID NO: 1427162 - DNA, 15 bp, Homo sapiens
ctggcttagcaagga

SEQ ID NO: 1427163 - DNA, 15 bp, Homo sapiens
tggcttagcaaggag

SEQ ID NO: 1427164 - DNA, 15 bp, Homo sapiens
ggcttagcaaggagc

SEQ ID NO: 1427165 - DNA, 15 bp, Homo sapiens
gcttagcaaggagcc

SEQ ID NO: 1427166 - DNA, 15 bp, Homo sapiens
cttagcaaggagcca

SEQ ID NO: 1427167 - DNA, 15 bp, Homo sapiens
ttagcaaggagccaa

SEQ ID NO: 1427168 - DNA, 15 bp, Homo sapiens
tagcaaggagccaac

SEQ ID NO: 1427169 - DNA, 15 bp, Homo sapiens
agcaaggagccaaca

SEQ ID NO: 1427170 - DNA, 15 bp, Homo sapiens
gcaaggagccaacat

SEQ ID NO: 1427171 - DNA, 15 bp, Homo sapiens
caaggagccaacata

SEQ ID NO: 1427172 - DNA, 15 bp, Homo sapiens
aaggagccaacataa

SEQ ID NO: 1427173 - DNA, 15 bp, Homo sapiens
aggagccaacataac

SEQ ID NO: 1427174 - DNA, 15 bp, Homo sapiens
ggagccaacataaca

SEQ ID NO: 1427175 - DNA, 15 bp, Homo sapiens
gagccaacataacag

SEQ ID NO: 1427176 - DNA, 15 bp, Homo sapiens
agccaacataacaga

SEQ ID NO: 1427177 - DNA, 15 bp, Homo sapiens
gccaacataacagat

SEQ ID NO: 1427178 - DNA, 15 bp, Homo sapiens
ccaacataacagatg

SEQ ID NO: 1427179 - DNA, 15 bp, Homo sapiens
caacataacagatgg

SEQ ID NO: 1427180 - DNA, 15 bp, Homo sapiens
aacataacagatggg

SEQ ID NO: 1427181 - DNA, 15 bp, Homo sapiens
acataacagatgggc

SEQ ID NO: 1427182 - DNA, 15 bp, Homo sapiens
cataacagatgggct

SEQ ID NO: 1427183 - DNA, 15 bp, Homo sapiens
ataacagatgggctg

SEQ ID NO: 1427184 - DNA, 15 bp, Homo sapiens
taacagatgggctgg

SEQ ID NO: 1427185 - DNA, 15 bp, Homo sapiens
aacagatgggctgga

SEQ ID NO: 1427186 - DNA, 15 bp, Homo sapiens
acagatgggctggaa

SEQ ID NO: 1427187 - DNA, 15 bp, Homo sapiens
cagatgggctggaag

SEQ ID NO: 1427188 - DNA, 15 bp, Homo sapiens
agatgggctggaagt

SEQ ID NO: 1427189 - DNA, 15 bp, Homo sapiens
gatgggctggaagta

SEQ ID NO: 1427190 - DNA, 15 bp, Homo sapiens
atgggctggaagtaa

SEQ ID NO: 1427191 - DNA, 15 bp, Homo sapiens
tgggctggaagtaag

SEQ ID NO: 1427192 - DNA, 15 bp, Homo sapiens
gggctggaagtaagg

SEQ ID NO: 1427193 - DNA, 15 bp, Homo sapiens
ggctggaagtaagga

SEQ ID NO: 1427194 - DNA, 15 bp, Homo sapiens
gctggaagtaaggaa

SEQ ID NO: 1427195 - DNA, 15 bp, Homo sapiens
ctggaagtaaggaaa

SEQ ID NO: 1427196 - DNA, 15 bp, Homo sapiens
tggaagtaaggaaac

SEQ ID NO: 1427197 - DNA, 15 bp, Homo sapiens
ggaagtaaggaaaca

SEQ ID NO: 1427198 - DNA, 15 bp, Homo sapiens
gaagtaaggaaacat

SEQ ID NO: 1427199 - DNA, 15 bp, Homo sapiens
aagtaaggaaacatg

SEQ ID NO: 1427200 - DNA, 15 bp, Homo sapiens
agtaaggaaacatgt

SEQ ID NO: 1427201 - DNA, 15 bp, Homo sapiens
gtaaggaaacatgta

SEQ ID NO: 1427202 - DNA, 15 bp, Homo sapiens
taaggaaacatgtaa

SEQ ID NO: 1427203 - DNA, 15 bp, Homo sapiens
aaggaaacatgtaat

SEQ ID NO: 1427204 - DNA, 15 bp, Homo sapiens
aggaaacatgtaatg

SEQ ID NO: 1427205 - DNA, 15 bp, Homo sapiens
ggaaacatgtaatga

SEQ ID NO: 1427206 - DNA, 15 bp, Homo sapiens
gaaacatgtaatgat

SEQ ID NO: 1427207 - DNA, 15 bp, Homo sapiens
aaacatgtaatgata

SEQ ID NO: 1427208 - DNA, 15 bp, Homo sapiens
aacatgtaatgatag

SEQ ID NO: 1427209 - DNA, 15 bp, Homo sapiens
acatgtaatgatagg

SEQ ID NO: 1427210 - DNA, 15 bp, Homo sapiens
catgtaatgataggc

SEQ ID NO: 1427211 - DNA, 15 bp, Homo sapiens
atgtaatgataggcg

SEQ ID NO: 1427212 - DNA, 15 bp, Homo sapiens
tgtaatgataggcgg

SEQ ID NO: 1427213 - DNA, 15 bp, Homo sapiens
gtaatgataggcgga

SEQ ID NO: 1427214 - DNA, 15 bp, Homo sapiens
taatgataggcggac

SEQ ID NO: 1427215 - DNA, 15 bp, Homo sapiens
aatgataggcggact

SEQ ID NO: 1427216 - DNA, 15 bp, Homo sapiens
atgataggcggactc

SEQ ID NO: 1427217 - DNA, 15 bp, Homo sapiens
tgataggcggactcc

SEQ ID NO: 1427218 - DNA, 15 bp, Homo sapiens
gataggcggactccc

SEQ ID NO: 1427219 - DNA, 15 bp, Homo sapiens
ataggcggactccca

SEQ ID NO: 1427220 - DNA, 15 bp, Homo sapiens
taggcggactcccag

SEQ ID NO: 1427221 - DNA, 15 bp, Homo sapiens
aggcggactcccagc

SEQ ID NO: 1427222 - DNA, 15 bp, Homo sapiens
ggcggactcccagca

SEQ ID NO: 1427223 - DNA, 15 bp, Homo sapiens
gcggactcccagcac

SEQ ID NO: 1427224 - DNA, 15 bp, Homo sapiens
cggactcccagcaca

SEQ ID NO: 1427225 - DNA, 15 bp, Homo sapiens
ggactcccagcacag

SEQ ID NO: 1427226 - DNA, 15 bp, Homo sapiens
gactcccagcacaga

SEQ ID NO: 1427227 - DNA, 15 bp, Homo sapiens
actcccagcacagaa

SEQ ID NO: 1427228 - DNA, 15 bp, Homo sapiens
ctcccagcacagaaa

SEQ ID NO: 1427229 - DNA, 15 bp, Homo sapiens
tcccagcacagaaaa

SEQ ID NO: 1427230 - DNA, 15 bp, Homo sapiens
cccagcacagaaaaa

SEQ ID NO: 1427231 - DNA, 15 bp, Homo sapiens
ccagcacagaaaaaa

SEQ ID NO: 1427232 - DNA, 15 bp, Homo sapiens
cagcacagaaaaaaa

SEQ ID NO: 1427233 - DNA, 15 bp, Homo sapiens
agcacagaaaaaaag

SEQ ID NO: 1427234 - DNA, 15 bp, Homo sapiens
gcacagaaaaaaagg

SEQ ID NO: 1427235 - DNA, 15 bp, Homo sapiens
cacagaaaaaaaggt

SEQ ID NO: 1427236 - DNA, 15 bp, Homo sapiens
acagaaaaaaaggta

SEQ ID NO: 1427237 - DNA, 15 bp, Homo sapiens
cagaaaaaaaggtag

SEQ ID NO: 1427238 - DNA, 15 bp, Homo sapiens
agaaaaaaaggtaga

SEQ ID NO: 1427239 - DNA, 15 bp, Homo sapiens
gaaaaaaaggtagat

SEQ ID NO: 1427240 - DNA, 15 bp, Homo sapiens
aaaaaaaggtagatc

SEQ ID NO: 1427241 - DNA, 15 bp, Homo sapiens
aaaaaaggtagatct

SEQ ID NO: 1427242 - DNA, 15 bp, Homo sapiens
aaaaaggtagatctg

SEQ ID NO: 1427243 - DNA, 15 bp, Homo sapiens
aaaaggtagatctga

SEQ ID NO: 1427244 - DNA, 15 bp, Homo sapiens
aaaggtagatctgaa

SEQ ID NO: 1427245 - DNA, 15 bp, Homo sapiens
aaggtagatctgaat

SEQ ID NO: 1427246 - DNA, 15 bp, Homo sapiens
aggtagatctgaatg

SEQ ID NO: 1427247 - DNA, 15 bp, Homo sapiens
ggtagatctgaatgc

SEQ ID NO: 1427248 - DNA, 15 bp, Homo sapiens
gtagatctgaatgct

SEQ ID NO: 1427249 - DNA, 15 bp, Homo sapiens
tagatctgaatgctg

SEQ ID NO: 1427250 - DNA, 15 bp, Homo sapiens
agatctgaatgctga

SEQ ID NO: 1427251 - DNA, 15 bp, Homo sapiens
gatctgaatgctgat

SEQ ID NO: 1427252 - DNA, 15 bp, Homo sapiens
atctgaatgctgatc

SEQ ID NO: 1427253 - DNA, 15 bp, Homo sapiens
tctgaatgctgatcc

SEQ ID NO: 1427254 - DNA, 15 bp, Homo sapiens
ctgaatgctgatccc

SEQ ID NO: 1427255 - DNA, 15 bp, Homo sapiens
tgaatgctgatcccc

SEQ ID NO: 1427256 - DNA, 15 bp, Homo sapiens
gaatgctgatcccct

SEQ ID NO: 1427257 - DNA, 15 bp, Homo sapiens
aatgctgatcccctg

SEQ ID NO: 1427258 - DNA, 15 bp, Homo sapiens
atgctgatcccctgt

SEQ ID NO: 1427259 - DNA, 15 bp, Homo sapiens
tgctgatcccctgtg

SEQ ID NO: 1427260 - DNA, 15 bp, Homo sapiens
gctgatcccctgtgt

SEQ ID NO: 1427261 - DNA, 15 bp, Homo sapiens
ctgatcccctgtgtg

SEQ ID NO: 1427262 - DNA, 15 bp, Homo sapiens
tgatcccctgtgtga

SEQ ID NO: 1427263 - DNA, 15 bp, Homo sapiens
gatcccctgtgtgag

SEQ ID NO: 1427264 - DNA, 15 bp, Homo sapiens
atcccctgtgtgaga

SEQ ID NO: 1427265 - DNA, 15 bp, Homo sapiens
tcccctgtgtgagag

SEQ ID NO: 1427266 - DNA, 15 bp, Homo sapiens
cccctgtgtgagaga

SEQ ID NO: 1427267 - DNA, 15 bp, Homo sapiens
ccctgtgtgagagaa

SEQ ID NO: 1427268 - DNA, 15 bp, Homo sapiens
cctgtgtgagagaaa

SEQ ID NO: 1427269 - DNA, 15 bp, Homo sapiens
ctgtgtgagagaaaa

SEQ ID NO: 1427270 - DNA, 15 bp, Homo sapiens
tgtgtgagagaaaag

SEQ ID NO: 1427271 - DNA, 15 bp, Homo sapiens
gtgtgagagaaaaga

SEQ ID NO: 1427272 - DNA, 15 bp, Homo sapiens
tgtgagagaaaagaa

SEQ ID NO: 1427273 - DNA, 15 bp, Homo sapiens
gtgagagaaaagaat

SEQ ID NO: 1427274 - DNA, 15 bp, Homo sapiens
tgagagaaaagaatg

SEQ ID NO: 1427275 - DNA, 15 bp, Homo sapiens
gagagaaaagaatgg

SEQ ID NO: 1427276 - DNA, 15 bp, Homo sapiens
agagaaaagaatgga

SEQ ID NO: 1427277 - DNA, 15 bp, Homo sapiens
gagaaaagaatggaa

SEQ ID NO: 1427278 - DNA, 15 bp, Homo sapiens
agaaaagaatggaat

SEQ ID NO: 1427279 - DNA, 15 bp, Homo sapiens
gaaaagaatggaata

SEQ ID NO: 1427280 - DNA, 15 bp, Homo sapiens
aaaagaatggaataa

SEQ ID NO: 1427281 - DNA, 15 bp, Homo sapiens
aaagaatggaataag

SEQ ID NO: 1427282 - DNA, 15 bp, Homo sapiens
aagaatggaataagc

SEQ ID NO: 1427283 - DNA, 15 bp, Homo sapiens
agaatggaataagca

SEQ ID NO: 1427284 - DNA, 15 bp, Homo sapiens
gaatggaataagcag

SEQ ID NO: 1427285 - DNA, 15 bp, Homo sapiens
aatggaataagcaga

SEQ ID NO: 1427286 - DNA, 15 bp, Homo sapiens
atggaataagcagaa

SEQ ID NO: 1427287 - DNA, 15 bp, Homo sapiens
tggaataagcagaaa

SEQ ID NO: 1427288 - DNA, 15 bp, Homo sapiens
ggaataagcagaaac

SEQ ID NO: 1427289 - DNA, 15 bp, Homo sapiens
gaataagcagaaact

SEQ ID NO: 1427290 - DNA, 15 bp, Homo sapiens
aataagcagaaactg

SEQ ID NO: 1427291 - DNA, 15 bp, Homo sapiens
ataagcagaaactgc

SEQ ID NO: 1427292 - DNA, 15 bp, Homo sapiens
taagcagaaactgcc

SEQ ID NO: 1427293 - DNA, 15 bp, Homo sapiens
aagcagaaactgcca

SEQ ID NO: 1427294 - DNA, 15 bp, Homo sapiens
agcagaaactgccat

SEQ ID NO: 1427295 - DNA, 15 bp, Homo sapiens
gcagaaactgccatg

SEQ ID NO: 1427296 - DNA, 15 bp, Homo sapiens
cagaaactgccatgc

SEQ ID NO: 1427297 - DNA, 15 bp, Homo sapiens
agaaactgccatgct

SEQ ID NO: 1427298 - DNA, 15 bp, Homo sapiens
gaaactgccatgctc

SEQ ID NO: 1427299 - DNA, 15 bp, Homo sapiens
aaactgccatgctca

SEQ ID NO: 1427300 - DNA, 15 bp, Homo sapiens
aactgccatgctcag

SEQ ID NO: 1427301 - DNA, 15 bp, Homo sapiens
actgccatgctcaga

SEQ ID NO: 1427302 - DNA, 15 bp, Homo sapiens
ctgccatgctcagag

SEQ ID NO: 1427303 - DNA, 15 bp, Homo sapiens
tgccatgctcagaga

SEQ ID NO: 1427304 - DNA, 15 bp, Homo sapiens
gccatgctcagagaa

SEQ ID NO: 1427305 - DNA, 15 bp, Homo sapiens
ccatgctcagagaat

SEQ ID NO: 1427306 - DNA, 15 bp, Homo sapiens
catgctcagagaatc

SEQ ID NO: 1427307 - DNA, 15 bp, Homo sapiens
atgctcagagaatcc

SEQ ID NO: 1427308 - DNA, 15 bp, Homo sapiens
tgctcagagaatcct

SEQ ID NO: 1427309 - DNA, 15 bp, Homo sapiens
gctcagagaatccta

SEQ ID NO: 1427310 - DNA, 15 bp, Homo sapiens
ctcagagaatcctag

SEQ ID NO: 1427311 - DNA, 15 bp, Homo sapiens
tcagagaatcctaga

SEQ ID NO: 1427312 - DNA, 15 bp, Homo sapiens
cagagaatcctagag

SEQ ID NO: 1427313 - DNA, 15 bp, Homo sapiens
agagaatcctagaga

SEQ ID NO: 1427314 - DNA, 15 bp, Homo sapiens
gagaatcctagagat

SEQ ID NO: 1427315 - DNA, 15 bp, Homo sapiens
agaatcctagagata

SEQ ID NO: 1427316 - DNA, 15 bp, Homo sapiens
gaatcctagagatac

SEQ ID NO: 1427317 - DNA, 15 bp, Homo sapiens
aatcctagagatact

SEQ ID NO: 1427318 - DNA, 15 bp, Homo sapiens
atcctagagatactg

SEQ ID NO: 1427319 - DNA, 15 bp, Homo sapiens
tcctagagatactga

SEQ ID NO: 1427320 - DNA, 15 bp, Homo sapiens
cctagagatactgaa

SEQ ID NO: 1427321 - DNA, 15 bp, Homo sapiens
ctagagatactgaag

SEQ ID NO: 1427322 - DNA, 15 bp, Homo sapiens
tagagatactgaaga

SEQ ID NO: 1427323 - DNA, 15 bp, Homo sapiens
agagatactgaagat

SEQ ID NO: 1427324 - DNA, 15 bp, Homo sapiens
gagatactgaagatg

SEQ ID NO: 1427325 - DNA, 15 bp, Homo sapiens
agatactgaagatgt

SEQ ID NO: 1427326 - DNA, 15 bp, Homo sapiens
gatactgaagatgtt

SEQ ID NO: 1427327 - DNA, 15 bp, Homo sapiens
atactgaagatgttc

SEQ ID NO: 1427328 - DNA, 15 bp, Homo sapiens
tactgaagatgttcc

SEQ ID NO: 1427329 - DNA, 15 bp, Homo sapiens
actgaagatgttcct

SEQ ID NO: 1427330 - DNA, 15 bp, Homo sapiens
ctgaagatgttcctt

SEQ ID NO: 1427331 - DNA, 15 bp, Homo sapiens
tgaagatgttccttg

SEQ ID NO: 1427332 - DNA, 15 bp, Homo sapiens
gaagatgttccttgg

SEQ ID NO: 1427333 - DNA, 15 bp, Homo sapiens
aagatgttccttgga

SEQ ID NO: 1427334 - DNA, 15 bp, Homo sapiens
agatgttccttggat

SEQ ID NO: 1427335 - DNA, 15 bp, Homo sapiens
gatgttccttggata

SEQ ID NO: 1427336 - DNA, 15 bp, Homo sapiens
atgttccttggataa

SEQ ID NO: 1427337 - DNA, 15 bp, Homo sapiens
tgttccttggataac

SEQ ID NO: 1427338 - DNA, 15 bp, Homo sapiens
gttccttggataaca

SEQ ID NO: 1427339 - DNA, 15 bp, Homo sapiens
ttccttggataacac

SEQ ID NO: 1427340 - DNA, 15 bp, Homo sapiens
tccttggataacact

SEQ ID NO: 1427341 - DNA, 15 bp, Homo sapiens
ccttggataacacta

SEQ ID NO: 1427342 - DNA, 15 bp, Homo sapiens
cttggataacactaa

SEQ ID NO: 1427343 - DNA, 15 bp, Homo sapiens
ttggataacactaaa

SEQ ID NO: 1427344 - DNA, 15 bp, Homo sapiens
tggataacactaaat

SEQ ID NO: 1427345 - DNA, 15 bp, Homo sapiens
ggataacactaaata

SEQ ID NO: 1427346 - DNA, 15 bp, Homo sapiens
gataacactaaatag

SEQ ID NO: 1427347 - DNA, 15 bp, Homo sapiens
ataacactaaatagc

SEQ ID NO: 1427348 - DNA, 15 bp, Homo sapiens
taacactaaatagca

SEQ ID NO: 1427349 - DNA, 15 bp, Homo sapiens
aacactaaatagcag

SEQ ID NO: 1427350 - DNA, 15 bp, Homo sapiens
acactaaatagcagc

SEQ ID NO: 1427351 - DNA, 15 bp, Homo sapiens
cactaaatagcagca

SEQ ID NO: 1427352 - DNA, 15 bp, Homo sapiens
actaaatagcagcat

SEQ ID NO: 1427353 - DNA, 15 bp, Homo sapiens
ctaaatagcagcatt

SEQ ID NO: 1427354 - DNA, 15 bp, Homo sapiens
taaatagcagcattc

SEQ ID NO: 1427355 - DNA, 15 bp, Homo sapiens
aaatagcagcattca

SEQ ID NO: 1427356 - DNA, 15 bp, Homo sapiens
aatagcagcattcag

SEQ ID NO: 1427357 - DNA, 15 bp, Homo sapiens
atagcagcattcaga

SEQ ID NO: 1427358 - DNA, 15 bp, Homo sapiens
tagcagcattcagaa

SEQ ID NO: 1427359 - DNA, 15 bp, Homo sapiens
agcagcattcagaaa

SEQ ID NO: 1427360 - DNA, 15 bp, Homo sapiens
gcagcattcagaaag

SEQ ID NO: 1427361 - DNA, 15 bp, Homo sapiens
cagcattcagaaagt

SEQ ID NO: 1427362 - DNA, 15 bp, Homo sapiens
agcattcagaaagtt

SEQ ID NO: 1427363 - DNA, 15 bp, Homo sapiens
gcattcagaaagtta

SEQ ID NO: 1427364 - DNA, 15 bp, Homo sapiens
cattcagaaagttaa

SEQ ID NO: 1427365 - DNA, 15 bp, Homo sapiens
attcagaaagttaat

SEQ ID NO: 1427366 - DNA, 15 bp, Homo sapiens
ttcagaaagttaatg

SEQ ID NO: 1427367 - DNA, 15 bp, Homo sapiens
tcagaaagttaatga

SEQ ID NO: 1427368 - DNA, 15 bp, Homo sapiens
cagaaagttaatgag

SEQ ID NO: 1427369 - DNA, 15 bp, Homo sapiens
agaaagttaatgagt

SEQ ID NO: 1427370 - DNA, 15 bp, Homo sapiens
gaaagttaatgagtg

SEQ ID NO: 1427371 - DNA, 15 bp, Homo sapiens
aaagttaatgagtgg

SEQ ID NO: 1427372 - DNA, 15 bp, Homo sapiens
aagttaatgagtggt

SEQ ID NO: 1427373 - DNA, 15 bp, Homo sapiens
agttaatgagtggtt

SEQ ID NO: 1427374 - DNA, 15 bp, Homo sapiens
gttaatgagtggttt

SEQ ID NO: 1427375 - DNA, 15 bp, Homo sapiens
ttaatgagtggtttt

SEQ ID NO: 1427376 - DNA, 15 bp, Homo sapiens
taatgagtggttttc

SEQ ID NO: 1427377 - DNA, 15 bp, Homo sapiens
aatgagtggttttcc

SEQ ID NO: 1427378 - DNA, 15 bp, Homo sapiens
atgagtggttttcca

SEQ ID NO: 1427379 - DNA, 15 bp, Homo sapiens
tgagtggttttccag

SEQ ID NO: 1427380 - DNA, 15 bp, Homo sapiens
gagtggttttccaga

SEQ ID NO: 1427381 - DNA, 15 bp, Homo sapiens
agtggttttccagaa

SEQ ID NO: 1427382 - DNA, 15 bp, Homo sapiens
gtggttttccagaag

SEQ ID NO: 1427383 - DNA, 15 bp, Homo sapiens
tggttttccagaagt

SEQ ID NO: 1427384 - DNA, 15 bp, Homo sapiens
ggttttccagaagtg

SEQ ID NO: 1427385 - DNA, 15 bp, Homo sapiens
gttttccagaagtga

SEQ ID NO: 1427386 - DNA, 15 bp, Homo sapiens
ttttccagaagtgat

SEQ ID NO: 1427387 - DNA, 15 bp, Homo sapiens
tttccagaagtgatg

SEQ ID NO: 1427388 - DNA, 15 bp, Homo sapiens
ttccagaagtgatga

SEQ ID NO: 1427389 - DNA, 15 bp, Homo sapiens
tccagaagtgatgaa

SEQ ID NO: 1427390 - DNA, 15 bp, Homo sapiens
ccagaagtgatgaac

SEQ ID NO: 1427391 - DNA, 15 bp, Homo sapiens
cagaagtgatgaact

SEQ ID NO: 1427392 - DNA, 15 bp, Homo sapiens
agaagtgatgaactg

SEQ ID NO: 1427393 - DNA, 15 bp, Homo sapiens
gaagtgatgaactgt

SEQ ID NO: 1427394 - DNA, 15 bp, Homo sapiens
aagtgatgaactgtt

SEQ ID NO: 1427395 - DNA, 15 bp, Homo sapiens
agtgatgaactgtta

SEQ ID NO: 1427396 - DNA, 15 bp, Homo sapiens
gtgatgaactgttag

SEQ ID NO: 1427397 - DNA, 15 bp, Homo sapiens
tgatgaactgttagg

SEQ ID NO: 1427398 - DNA, 15 bp, Homo sapiens
gatgaactgttaggt

SEQ ID NO: 1427399 - DNA, 15 bp, Homo sapiens
atgaactgttaggtt

SEQ ID NO: 1427400 - DNA, 15 bp, Homo sapiens
tgaactgttaggttc

SEQ ID NO: 1427401 - DNA, 15 bp, Homo sapiens
gaactgttaggttct

SEQ ID NO: 1427402 - DNA, 15 bp, Homo sapiens
aactgttaggttctg

SEQ ID NO: 1427403 - DNA, 15 bp, Homo sapiens
actgttaggttctga

SEQ ID NO: 1427404 - DNA, 15 bp, Homo sapiens
ctgttaggttctgat

SEQ ID NO: 1427405 - DNA, 15 bp, Homo sapiens
tgttaggttctgatg

SEQ ID NO: 1427406 - DNA, 15 bp, Homo sapiens
gttaggttctgatga

SEQ ID NO: 1427407 - DNA, 15 bp, Homo sapiens
ttaggttctgatgac

SEQ ID NO: 1427408 - DNA, 15 bp, Homo sapiens
taggttctgatgact

SEQ ID NO: 1427409 - DNA, 15 bp, Homo sapiens
aggttctgatgactc

SEQ ID NO: 1427410 - DNA, 15 bp, Homo sapiens
ggttctgatgactca

SEQ ID NO: 1427411 - DNA, 15 bp, Homo sapiens
gttctgatgactcac

SEQ ID NO: 1427412 - DNA, 15 bp, Homo sapiens
ttctgatgactcaca

SEQ ID NO: 1427413 - DNA, 15 bp, Homo sapiens
tctgatgactcacat

SEQ ID NO: 1427414 - DNA, 15 bp, Homo sapiens
ctgatgactcacatg

SEQ ID NO: 1427415 - DNA, 15 bp, Homo sapiens
tgatgactcacatga

SEQ ID NO: 1427416 - DNA, 15 bp, Homo sapiens
gatgactcacatgat

SEQ ID NO: 1427417 - DNA, 15 bp, Homo sapiens
atgactcacatgatg

SEQ ID NO: 1427418 - DNA, 15 bp, Homo sapiens
tgactcacatgatgg

SEQ ID NO: 1427419 - DNA, 15 bp, Homo sapiens
gactcacatgatggg

SEQ ID NO: 1427420 - DNA, 15 bp, Homo sapiens
actcacatgatgggg

SEQ ID NO: 1427421 - DNA, 15 bp, Homo sapiens
ctcacatgatgggga

SEQ ID NO: 1427422 - DNA, 15 bp, Homo sapiens
tcacatgatggggag

SEQ ID NO: 1427423 - DNA, 15 bp, Homo sapiens
cacatgatggggagt

SEQ ID NO: 1427424 - DNA, 15 bp, Homo sapiens
acatgatggggagtc

SEQ ID NO: 1427425 - DNA, 15 bp, Homo sapiens
catgatggggagtct

SEQ ID NO: 1427426 - DNA, 15 bp, Homo sapiens
atgatggggagtctg

SEQ ID NO: 1427427 - DNA, 15 bp, Homo sapiens
tgatggggagtctga

SEQ ID NO: 1427428 - DNA, 15 bp, Homo sapiens
gatggggagtctgaa

SEQ ID NO: 1427429 - DNA, 15 bp, Homo sapiens
atggggagtctgaat

SEQ ID NO: 1427430 - DNA, 15 bp, Homo sapiens
tggggagtctgaatc

SEQ ID NO: 1427431 - DNA, 15 bp, Homo sapiens
ggggagtctgaatca

SEQ ID NO: 1427432 - DNA, 15 bp, Homo sapiens
gggagtctgaatcaa

SEQ ID NO: 1427433 - DNA, 15 bp, Homo sapiens
ggagtctgaatcaaa

SEQ ID NO: 1427434 - DNA, 15 bp, Homo sapiens
gagtctgaatcaaat

SEQ ID NO: 1427435 - DNA, 15 bp, Homo sapiens
agtctgaatcaaatg

SEQ ID NO: 1427436 - DNA, 15 bp, Homo sapiens
gtctgaatcaaatgc

SEQ ID NO: 1427437 - DNA, 15 bp, Homo sapiens
tctgaatcaaatgcc

SEQ ID NO: 1427438 - DNA, 15 bp, Homo sapiens
ctgaatcaaatgcca

SEQ ID NO: 1427439 - DNA, 15 bp, Homo sapiens
tgaatcaaatgccaa

SEQ ID NO: 1427440 - DNA, 15 bp, Homo sapiens
gaatcaaatgccaaa

SEQ ID NO: 1427441 - DNA, 15 bp, Homo sapiens
aatcaaatgccaaag

SEQ ID NO: 1427442 - DNA, 15 bp, Homo sapiens
atcaaatgccaaagt

SEQ ID NO: 1427443 - DNA, 15 bp, Homo sapiens
tcaaatgccaaagta

SEQ ID NO: 1427444 - DNA, 15 bp, Homo sapiens
caaatgccaaagtag

SEQ ID NO: 1427445 - DNA, 15 bp, Homo sapiens
aaatgccaaagtagc

SEQ ID NO: 1427446 - DNA, 15 bp, Homo sapiens
aatgccaaagtagct

SEQ ID NO: 1427447 - DNA, 15 bp, Homo sapiens
atgccaaagtagctg

SEQ ID NO: 1427448 - DNA, 15 bp, Homo sapiens
tgccaaagtagctga

SEQ ID NO: 1427449 - DNA, 15 bp, Homo sapiens
gccaaagtagctgat

SEQ ID NO: 1427450 - DNA, 15 bp, Homo sapiens
ccaaagtagctgatg

SEQ ID NO: 1427451 - DNA, 15 bp, Homo sapiens
caaagtagctgatgt

SEQ ID NO: 1427452 - DNA, 15 bp, Homo sapiens
aaagtagctgatgta

SEQ ID NO: 1427453 - DNA, 15 bp, Homo sapiens
aagtagctgatgtat

SEQ ID NO: 1427454 - DNA, 15 bp, Homo sapiens
agtagctgatgtatt

SEQ ID NO: 1427455 - DNA, 15 bp, Homo sapiens
gtagctgatgtattg

SEQ ID NO: 1427456 - DNA, 15 bp, Homo sapiens
tagctgatgtattgg

SEQ ID NO: 1427457 - DNA, 15 bp, Homo sapiens
agctgatgtattgga

SEQ ID NO: 1427458 - DNA, 15 bp, Homo sapiens
gctgatgtattggac

SEQ ID NO: 1427459 - DNA, 15 bp, Homo sapiens
ctgatgtattggacg

SEQ ID NO: 1427460 - DNA, 15 bp, Homo sapiens
tgatgtattggacgt

SEQ ID NO: 1427461 - DNA, 15 bp, Homo sapiens
gatgtattggacgtt

SEQ ID NO: 1427462 - DNA, 15 bp, Homo sapiens
atgtattggacgttc

SEQ ID NO: 1427463 - DNA, 15 bp, Homo sapiens
tgtattggacgttct

SEQ ID NO: 1427464 - DNA, 15 bp, Homo sapiens
gtattggacgttcta

SEQ ID NO: 1427465 - DNA, 15 bp, Homo sapiens
tattggacgttctaa

SEQ ID NO: 1427466 - DNA, 15 bp, Homo sapiens
attggacgttctaaa

SEQ ID NO: 1427467 - DNA, 15 bp, Homo sapiens
ttggacgttctaaat

SEQ ID NO: 1427468 - DNA, 15 bp, Homo sapiens
tggacgttctaaatg

SEQ ID NO: 1427469 - DNA, 15 bp, Homo sapiens
ggacgttctaaatga

SEQ ID NO: 1427470 - DNA, 15 bp, Homo sapiens
gacgttctaaatgag

SEQ ID NO: 1427471 - DNA, 15 bp, Homo sapiens
acgttctaaatgagg

SEQ ID NO: 1427472 - DNA, 15 bp, Homo sapiens
cgttctaaatgaggt

SEQ ID NO: 1427473 - DNA, 15 bp, Homo sapiens
gttctaaatgaggta

SEQ ID NO: 1427474 - DNA, 15 bp, Homo sapiens
ttctaaatgaggtag

SEQ ID NO: 1427475 - DNA, 15 bp, Homo sapiens
tctaaatgaggtaga

SEQ ID NO: 1427476 - DNA, 15 bp, Homo sapiens
ctaaatgaggtagat

SEQ ID NO: 1427477 - DNA, 15 bp, Homo sapiens
taaatgaggtagatg

SEQ ID NO: 1427478 - DNA, 15 bp, Homo sapiens
aaatgaggtagatga

SEQ ID NO: 1427479 - DNA, 15 bp, Homo sapiens
aatgaggtagatgaa

SEQ ID NO: 1427480 - DNA, 15 bp, Homo sapiens
atgaggtagatgaat

SEQ ID NO: 1427481 - DNA, 15 bp, Homo sapiens
tgaggtagatgaata

SEQ ID NO: 1427482 - DNA, 15 bp, Homo sapiens
gaggtagatgaatat

SEQ ID NO: 1427483 - DNA, 15 bp, Homo sapiens
aggtagatgaatatt

SEQ ID NO: 1427484 - DNA, 15 bp, Homo sapiens
ggtagatgaatattc

SEQ ID NO: 1427485 - DNA, 15 bp, Homo sapiens
gtagatgaatattct

SEQ ID NO: 1427486 - DNA, 15 bp, Homo sapiens
tagatgaatattctg

SEQ ID NO: 1427487 - DNA, 15 bp, Homo sapiens
agatgaatattctgg

SEQ ID NO: 1427488 - DNA, 15 bp, Homo sapiens
gatgaatattctggt

SEQ ID NO: 1427489 - DNA, 15 bp, Homo sapiens
atgaatattctggtt

SEQ ID NO: 1427490 - DNA, 15 bp, Homo sapiens
tgaatattctggttc

SEQ ID NO: 1427491 - DNA, 15 bp, Homo sapiens
gaatattctggttct

SEQ ID NO: 1427492 - DNA, 15 bp, Homo sapiens
aatattctggttctt

SEQ ID NO: 1427493 - DNA, 15 bp, Homo sapiens
atattctggttcttc

SEQ ID NO: 1427494 - DNA, 15 bp, Homo sapiens
tattctggttcttca

SEQ ID NO: 1427495 - DNA, 15 bp, Homo sapiens
attctggttcttcag

SEQ ID NO: 1427496 - DNA, 15 bp, Homo sapiens
ttctggttcttcaga

SEQ ID NO: 1427497 - DNA, 15 bp, Homo sapiens
tctggttcttcagag

SEQ ID NO: 1427498 - DNA, 15 bp, Homo sapiens
ctggttcttcagaga

SEQ ID NO: 1427499 - DNA, 15 bp, Homo sapiens
tggttcttcagagaa

SEQ ID NO: 1427500 - DNA, 15 bp, Homo sapiens
ggttcttcagagaaa

SEQ ID NO: 1427501 - DNA, 15 bp, Homo sapiens
gttcttcagagaaaa

SEQ ID NO: 1427502 - DNA, 15 bp, Homo sapiens
ttcttcagagaaaat

SEQ ID NO: 1427503 - DNA, 15 bp, Homo sapiens
tcttcagagaaaata

SEQ ID NO: 1427504 - DNA, 15 bp, Homo sapiens
cttcagagaaaatag

SEQ ID NO: 1427505 - DNA, 15 bp, Homo sapiens
ttcagagaaaataga

SEQ ID NO: 1427506 - DNA, 15 bp, Homo sapiens
tcagagaaaatagac

SEQ ID NO: 1427507 - DNA, 15 bp, Homo sapiens
cagagaaaatagact

SEQ ID NO: 1427508 - DNA, 15 bp, Homo sapiens
agagaaaatagactt

SEQ ID NO: 1427509 - DNA, 15 bp, Homo sapiens
gagaaaatagactta

SEQ ID NO: 1427510 - DNA, 15 bp, Homo sapiens
agaaaatagacttac

SEQ ID NO: 1427511 - DNA, 15 bp, Homo sapiens
gaaaatagacttact

SEQ ID NO: 1427512 - DNA, 15 bp, Homo sapiens
aaaatagacttactg

SEQ ID NO: 1427513 - DNA, 15 bp, Homo sapiens
aaatagacttactgg

SEQ ID NO: 1427514 - DNA, 15 bp, Homo sapiens
aatagacttactggc

SEQ ID NO: 1427515 - DNA, 15 bp, Homo sapiens
atagacttactggcc

SEQ ID NO: 1427516 - DNA, 15 bp, Homo sapiens
tagacttactggcca

SEQ ID NO: 1427517 - DNA, 15 bp, Homo sapiens
agacttactggccag

SEQ ID NO: 1427518 - DNA, 15 bp, Homo sapiens
gacttactggccagt

SEQ ID NO: 1427519 - DNA, 15 bp, Homo sapiens
acttactggccagtg

SEQ ID NO: 1427520 - DNA, 15 bp, Homo sapiens
cttactggccagtga

SEQ ID NO: 1427521 - DNA, 15 bp, Homo sapiens
ttactggccagtgat

SEQ ID NO: 1427522 - DNA, 15 bp, Homo sapiens
tactggccagtgatc

SEQ ID NO: 1427523 - DNA, 15 bp, Homo sapiens
actggccagtgatcc

SEQ ID NO: 1427524 - DNA, 15 bp, Homo sapiens
ctggccagtgatcct

SEQ ID NO: 1427525 - DNA, 15 bp, Homo sapiens
tggccagtgatcctc

SEQ ID NO: 1427526 - DNA, 15 bp, Homo sapiens
ggccagtgatcctca

SEQ ID NO: 1427527 - DNA, 15 bp, Homo sapiens
gccagtgatcctcat

SEQ ID NO: 1427528 - DNA, 15 bp, Homo sapiens
ccagtgatcctcatg

SEQ ID NO: 1427529 - DNA, 15 bp, Homo sapiens
cagtgatcctcatga

SEQ ID NO: 1427530 - DNA, 15 bp, Homo sapiens
agtgatcctcatgag

SEQ ID NO: 1427531 - DNA, 15 bp, Homo sapiens
gtgatcctcatgagg

SEQ ID NO: 1427532 - DNA, 15 bp, Homo sapiens
tgatcctcatgaggc

SEQ ID NO: 1427533 - DNA, 15 bp, Homo sapiens
gatcctcatgaggct

SEQ ID NO: 1427534 - DNA, 15 bp, Homo sapiens
atcctcatgaggctt

SEQ ID NO: 1427535 - DNA, 15 bp, Homo sapiens
tcctcatgaggcttt

SEQ ID NO: 1427536 - DNA, 15 bp, Homo sapiens
cctcatgaggcttta

SEQ ID NO: 1427537 - DNA, 15 bp, Homo sapiens
ctcatgaggctttaa

SEQ ID NO: 1427538 - DNA, 15 bp, Homo sapiens
tcatgaggctttaat

SEQ ID NO: 1427539 - DNA, 15 bp, Homo sapiens
catgaggctttaata

SEQ ID NO: 1427540 - DNA, 15 bp, Homo sapiens
atgaggctttaatat

SEQ ID NO: 1427541 - DNA, 15 bp, Homo sapiens
tgaggctttaatatg

SEQ ID NO: 1427542 - DNA, 15 bp, Homo sapiens
gaggctttaatatgt

SEQ ID NO: 1427543 - DNA, 15 bp, Homo sapiens
aggctttaatatgta

SEQ ID NO: 1427544 - DNA, 15 bp, Homo sapiens
ggctttaatatgtaa

SEQ ID NO: 1427545 - DNA, 15 bp, Homo sapiens
gctttaatatgtaaa

SEQ ID NO: 1427546 - DNA, 15 bp, Homo sapiens
ctttaatatgtaaaa

SEQ ID NO: 1427547 - DNA, 15 bp, Homo sapiens
tttaatatgtaaaag

SEQ ID NO: 1427548 - DNA, 15 bp, Homo sapiens
ttaatatgtaaaagt

SEQ ID NO: 1427549 - DNA, 15 bp, Homo sapiens
taatatgtaaaagtg

SEQ ID NO: 1427550 - DNA, 15 bp, Homo sapiens
aatatgtaaaagtga

SEQ ID NO: 1427551 - DNA, 15 bp, Homo sapiens
atatgtaaaagtgaa

SEQ ID NO: 1427552 - DNA, 15 bp, Homo sapiens
tatgtaaaagtgaaa

SEQ ID NO: 1427553 - DNA, 15 bp, Homo sapiens
atgtaaaagtgaaag

SEQ ID NO: 1427554 - DNA, 15 bp, Homo sapiens
tgtaaaagtgaaaga

SEQ ID NO: 1427555 - DNA, 15 bp, Homo sapiens
gtaaaagtgaaagag

SEQ ID NO: 1427556 - DNA, 15 bp, Homo sapiens
taaaagtgaaagagt

SEQ ID NO: 1427557 - DNA, 15 bp, Homo sapiens
aaaagtgaaagagtt

SEQ ID NO: 1427558 - DNA, 15 bp, Homo sapiens
aaagtgaaagagttc

SEQ ID NO: 1427559 - DNA, 15 bp, Homo sapiens
aagtgaaagagttca

SEQ ID NO: 1427560 - DNA, 15 bp, Homo sapiens
agtgaaagagttcac

SEQ ID NO: 1427561 - DNA, 15 bp, Homo sapiens
gtgaaagagttcact

SEQ ID NO: 1427562 - DNA, 15 bp, Homo sapiens
tgaaagagttcactc

SEQ ID NO: 1427563 - DNA, 15 bp, Homo sapiens
gaaagagttcactcc

SEQ ID NO: 1427564 - DNA, 15 bp, Homo sapiens
aaagagttcactcca

SEQ ID NO: 1427565 - DNA, 15 bp, Homo sapiens
aagagttcactccaa

SEQ ID NO: 1427566 - DNA, 15 bp, Homo sapiens
agagttcactccaaa

SEQ ID NO: 1427567 - DNA, 15 bp, Homo sapiens
gagttcactccaaat

SEQ ID NO: 1427568 - DNA, 15 bp, Homo sapiens
agttcactccaaatc

SEQ ID NO: 1427569 - DNA, 15 bp, Homo sapiens
gttcactccaaatca

SEQ ID NO: 1427570 - DNA, 15 bp, Homo sapiens
ttcactccaaatcag

SEQ ID NO: 1427571 - DNA, 15 bp, Homo sapiens
tcactccaaatcagt

SEQ ID NO: 1427572 - DNA, 15 bp, Homo sapiens
cactccaaatcagta

SEQ ID NO: 1427573 - DNA, 15 bp, Homo sapiens
actccaaatcagtag

SEQ ID NO: 1427574 - DNA, 15 bp, Homo sapiens
ctccaaatcagtaga

SEQ ID NO: 1427575 - DNA, 15 bp, Homo sapiens
tccaaatcagtagag

SEQ ID NO: 1427576 - DNA, 15 bp, Homo sapiens
ccaaatcagtagaga

SEQ ID NO: 1427577 - DNA, 15 bp, Homo sapiens
caaatcagtagagag

SEQ ID NO: 1427578 - DNA, 15 bp, Homo sapiens
aaatcagtagagagt

SEQ ID NO: 1427579 - DNA, 15 bp, Homo sapiens
aatcagtagagagta

SEQ ID NO: 1427580 - DNA, 15 bp, Homo sapiens
atcagtagagagtaa

SEQ ID NO: 1427581 - DNA, 15 bp, Homo sapiens
tcagtagagagtaat

SEQ ID NO: 1427582 - DNA, 15 bp, Homo sapiens
cagtagagagtaata

SEQ ID NO: 1427583 - DNA, 15 bp, Homo sapiens
agtagagagtaatat

SEQ ID NO: 1427584 - DNA, 15 bp, Homo sapiens
gtagagagtaatatt

SEQ ID NO: 1427585 - DNA, 15 bp, Homo sapiens
tagagagtaatattg

SEQ ID NO: 1427586 - DNA, 15 bp, Homo sapiens
agagagtaatattga

SEQ ID NO: 1427587 - DNA, 15 bp, Homo sapiens
gagagtaatattgaa

SEQ ID NO: 1427588 - DNA, 15 bp, Homo sapiens
agagtaatattgaag

SEQ ID NO: 1427589 - DNA, 15 bp, Homo sapiens
gagtaatattgaaga

SEQ ID NO: 1427590 - DNA, 15 bp, Homo sapiens
agtaatattgaagac

SEQ ID NO: 1427591 - DNA, 15 bp, Homo sapiens
gtaatattgaagaca

SEQ ID NO: 1427592 - DNA, 15 bp, Homo sapiens
taatattgaagacaa

SEQ ID NO: 1427593 - DNA, 15 bp, Homo sapiens
aatattgaagacaaa

SEQ ID NO: 1427594 - DNA, 15 bp, Homo sapiens
atattgaagacaaaa

SEQ ID NO: 1427595 - DNA, 15 bp, Homo sapiens
tattgaagacaaaat

SEQ ID NO: 1427596 - DNA, 15 bp, Homo sapiens
attgaagacaaaata

SEQ ID NO: 1427597 - DNA, 15 bp, Homo sapiens
ttgaagacaaaatat

SEQ ID NO: 1427598 - DNA, 15 bp, Homo sapiens
tgaagacaaaatatt

SEQ ID NO: 1427599 - DNA, 15 bp, Homo sapiens
gaagacaaaatattt

SEQ ID NO: 1427600 - DNA, 15 bp, Homo sapiens
aagacaaaatatttg

SEQ ID NO: 1427601 - DNA, 15 bp, Homo sapiens
agacaaaatatttgg

SEQ ID NO: 1427602 - DNA, 15 bp, Homo sapiens
gacaaaatatttggg

SEQ ID NO: 1427603 - DNA, 15 bp, Homo sapiens
acaaaatatttggga

SEQ ID NO: 1427604 - DNA, 15 bp, Homo sapiens
caaaatatttgggaa

SEQ ID NO: 1427605 - DNA, 15 bp, Homo sapiens
aaaatatttgggaaa

SEQ ID NO: 1427606 - DNA, 15 bp, Homo sapiens
aaatatttgggaaaa

SEQ ID NO: 1427607 - DNA, 15 bp, Homo sapiens
aatatttgggaaaac

SEQ ID NO: 1427608 - DNA, 15 bp, Homo sapiens
atatttgggaaaacc

SEQ ID NO: 1427609 - DNA, 15 bp, Homo sapiens
tatttgggaaaacct

SEQ ID NO: 1427610 - DNA, 15 bp, Homo sapiens
atttgggaaaaccta

SEQ ID NO: 1427611 - DNA, 15 bp, Homo sapiens
tttgggaaaacctat

SEQ ID NO: 1427612 - DNA, 15 bp, Homo sapiens
ttgggaaaacctatc

SEQ ID NO: 1427613 - DNA, 15 bp, Homo sapiens
tgggaaaacctatcg

SEQ ID NO: 1427614 - DNA, 15 bp, Homo sapiens
gggaaaacctatcgg

SEQ ID NO: 1427615 - DNA, 15 bp, Homo sapiens
ggaaaacctatcgga

SEQ ID NO: 1427616 - DNA, 15 bp, Homo sapiens
gaaaacctatcggaa

SEQ ID NO: 1427617 - DNA, 15 bp, Homo sapiens
aaaacctatcggaag

SEQ ID NO: 1427618 - DNA, 15 bp, Homo sapiens
aaacctatcggaaga

SEQ ID NO: 1427619 - DNA, 15 bp, Homo sapiens
aacctatcggaagaa

SEQ ID NO: 1427620 - DNA, 15 bp, Homo sapiens
acctatcggaagaag

SEQ ID NO: 1427621 - DNA, 15 bp, Homo sapiens
cctatcggaagaagg

SEQ ID NO: 1427622 - DNA, 15 bp, Homo sapiens
ctatcggaagaaggc

SEQ ID NO: 1427623 - DNA, 15 bp, Homo sapiens
tatcggaagaaggca

SEQ ID NO: 1427624 - DNA, 15 bp, Homo sapiens
atcggaagaaggcaa

SEQ ID NO: 1427625 - DNA, 15 bp, Homo sapiens
tcggaagaaggcaag

SEQ ID NO: 1427626 - DNA, 15 bp, Homo sapiens
cggaagaaggcaagc

SEQ ID NO: 1427627 - DNA, 15 bp, Homo sapiens
ggaagaaggcaagcc

SEQ ID NO: 1427628 - DNA, 15 bp, Homo sapiens
gaagaaggcaagcct

SEQ ID NO: 1427629 - DNA, 15 bp, Homo sapiens
aagaaggcaagcctc

SEQ ID NO: 1427630 - DNA, 15 bp, Homo sapiens
agaaggcaagcctcc

SEQ ID NO: 1427631 - DNA, 15 bp, Homo sapiens
gaaggcaagcctccc

SEQ ID NO: 1427632 - DNA, 15 bp, Homo sapiens
aaggcaagcctcccc

SEQ ID NO: 1427633 - DNA, 15 bp, Homo sapiens
aggcaagcctcccca

SEQ ID NO: 1427634 - DNA, 15 bp, Homo sapiens
ggcaagcctccccaa

SEQ ID NO: 1427635 - DNA, 15 bp, Homo sapiens
gcaagcctccccaac

SEQ ID NO: 1427636 - DNA, 15 bp, Homo sapiens
caagcctccccaact

SEQ ID NO: 1427637 - DNA, 15 bp, Homo sapiens
aagcctccccaactt

SEQ ID NO: 1427638 - DNA, 15 bp, Homo sapiens
agcctccccaactta

SEQ ID NO: 1427639 - DNA, 15 bp, Homo sapiens
gcctccccaacttaa

SEQ ID NO: 1427640 - DNA, 15 bp, Homo sapiens
cctccccaacttaag

SEQ ID NO: 1427641 - DNA, 15 bp, Homo sapiens
ctccccaacttaagc

SEQ ID NO: 1427642 - DNA, 15 bp, Homo sapiens
tccccaacttaagcc

SEQ ID NO: 1427643 - DNA, 15 bp, Homo sapiens
ccccaacttaagcca

SEQ ID NO: 1427644 - DNA, 15 bp, Homo sapiens
cccaacttaagccat

SEQ ID NO: 1427645 - DNA, 15 bp, Homo sapiens
ccaacttaagccatg

SEQ ID NO: 1427646 - DNA, 15 bp, Homo sapiens
caacttaagccatgt

SEQ ID NO: 1427647 - DNA, 15 bp, Homo sapiens
aacttaagccatgta

SEQ ID NO: 1427648 - DNA, 15 bp, Homo sapiens
acttaagccatgtaa

SEQ ID NO: 1427649 - DNA, 15 bp, Homo sapiens
cttaagccatgtaac

SEQ ID NO: 1427650 - DNA, 15 bp, Homo sapiens
ttaagccatgtaact

SEQ ID NO: 1427651 - DNA, 15 bp, Homo sapiens
taagccatgtaactg

SEQ ID NO: 1427652 - DNA, 15 bp, Homo sapiens
aagccatgtaactga

SEQ ID NO: 1427653 - DNA, 15 bp, Homo sapiens
agccatgtaactgaa

SEQ ID NO: 1427654 - DNA, 15 bp, Homo sapiens
gccatgtaactgaaa

SEQ ID NO: 1427655 - DNA, 15 bp, Homo sapiens
ccatgtaactgaaaa

SEQ ID NO: 1427656 - DNA, 15 bp, Homo sapiens
catgtaactgaaaat

SEQ ID NO: 1427657 - DNA, 15 bp, Homo sapiens
atgtaactgaaaatc

SEQ ID NO: 1427658 - DNA, 15 bp, Homo sapiens
tgtaactgaaaatct

SEQ ID NO: 1427659 - DNA, 15 bp, Homo sapiens
gtaactgaaaatcta

SEQ ID NO: 1427660 - DNA, 15 bp, Homo sapiens
taactgaaaatctaa

SEQ ID NO: 1427661 - DNA, 15 bp, Homo sapiens
aactgaaaatctaat

SEQ ID NO: 1427662 - DNA, 15 bp, Homo sapiens
actgaaaatctaatt

SEQ ID NO: 1427663 - DNA, 15 bp, Homo sapiens
tgaaaatctaattat

SEQ ID NO: 1427664 - DNA, 15 bp, Homo sapiens
gaaaatctaattata

SEQ ID NO: 1427665 - DNA, 15 bp, Homo sapiens
aaaatctaattatag

SEQ ID NO: 1427666 - DNA, 15 bp, Homo sapiens
aaatctaattatagg

SEQ ID NO: 1427667 - DNA, 15 bp, Homo sapiens
aatctaattatagga

SEQ ID NO: 1427668 - DNA, 15 bp, Homo sapiens
atctaattataggag

SEQ ID NO: 1427669 - DNA, 15 bp, Homo sapiens
tctaattataggagc

SEQ ID NO: 1427670 - DNA, 15 bp, Homo sapiens
ctaattataggagca

SEQ ID NO: 1427671 - DNA, 15 bp, Homo sapiens
taattataggagcat

SEQ ID NO: 1427672 - DNA, 15 bp, Homo sapiens
aattataggagcatt

SEQ ID NO: 1427673 - DNA, 15 bp, Homo sapiens
attataggagcattt

SEQ ID NO: 1427674 - DNA, 15 bp, Homo sapiens
ttataggagcatttg

SEQ ID NO: 1427675 - DNA, 15 bp, Homo sapiens
tataggagcatttgt

SEQ ID NO: 1427676 - DNA, 15 bp, Homo sapiens
ataggagcatttgtt

SEQ ID NO: 1427677 - DNA, 15 bp, Homo sapiens
taggagcatttgtta

SEQ ID NO: 1427678 - DNA, 15 bp, Homo sapiens
aggagcatttgttac

SEQ ID NO: 1427679 - DNA, 15 bp, Homo sapiens
ggagcatttgttact

SEQ ID NO: 1427680 - DNA, 15 bp, Homo sapiens
gagcatttgttactg

SEQ ID NO: 1427681 - DNA, 15 bp, Homo sapiens
agcatttgttactga

SEQ ID NO: 1427682 - DNA, 15 bp, Homo sapiens
gcatttgttactgag

SEQ ID NO: 1427683 - DNA, 15 bp, Homo sapiens
catttgttactgagc

SEQ ID NO: 1427684 - DNA, 15 bp, Homo sapiens
atttgttactgagcc

SEQ ID NO: 1427685 - DNA, 15 bp, Homo sapiens
ttgttactgagccac

SEQ ID NO: 1427686 - DNA, 15 bp, Homo sapiens
tgttactgagccaca

SEQ ID NO: 1427687 - DNA, 15 bp, Homo sapiens
gttactgagccacag

SEQ ID NO: 1427688 - DNA, 15 bp, Homo sapiens
ttactgagccacaga

SEQ ID NO: 1427689 - DNA, 15 bp, Homo sapiens
tactgagccacagat

SEQ ID NO: 1427690 - DNA, 15 bp, Homo sapiens
actgagccacagata

SEQ ID NO: 1427691 - DNA, 15 bp, Homo sapiens
ctgagccacagataa

SEQ ID NO: 1427692 - DNA, 15 bp, Homo sapiens
tgagccacagataat

SEQ ID NO: 1427693 - DNA, 15 bp, Homo sapiens
gagccacagataata

SEQ ID NO: 1427694 - DNA, 15 bp, Homo sapiens
agccacagataatac

SEQ ID NO: 1427695 - DNA, 15 bp, Homo sapiens
gccacagataataca

SEQ ID NO: 1427696 - DNA, 15 bp, Homo sapiens
ccacagataatacaa

SEQ ID NO: 1427697 - DNA, 15 bp, Homo sapiens
cacagataatacaag

SEQ ID NO: 1427698 - DNA, 15 bp, Homo sapiens
acagataatacaaga

SEQ ID NO: 1427699 - DNA, 15 bp, Homo sapiens
cagataatacaagag

SEQ ID NO: 1427700 - DNA, 15 bp, Homo sapiens
agataatacaagagc

SEQ ID NO: 1427701 - DNA, 15 bp, Homo sapiens
gataatacaagagcg

SEQ ID NO: 1427702 - DNA, 15 bp, Homo sapiens
ataatacaagagcgt

SEQ ID NO: 1427703 - DNA, 15 bp, Homo sapiens
taatacaagagcgtc

SEQ ID NO: 1427704 - DNA, 15 bp, Homo sapiens
aatacaagagcgtcc

SEQ ID NO: 1427705 - DNA, 15 bp, Homo sapiens
atacaagagcgtccc

SEQ ID NO: 1427706 - DNA, 15 bp, Homo sapiens
tacaagagcgtcccc

SEQ ID NO: 1427707 - DNA, 15 bp, Homo sapiens
acaagagcgtcccct

SEQ ID NO: 1427708 - DNA, 15 bp, Homo sapiens
caagagcgtcccctc

SEQ ID NO: 1427709 - DNA, 15 bp, Homo sapiens
aagagcgtcccctca

SEQ ID NO: 1427710 - DNA, 15 bp, Homo sapiens
agagcgtcccctcac

SEQ ID NO: 1427711 - DNA, 15 bp, Homo sapiens
gagcgtcccctcaca

SEQ ID NO: 1427712 - DNA, 15 bp, Homo sapiens
agcgtcccctcacaa

SEQ ID NO: 1427713 - DNA, 15 bp, Homo sapiens
gcgtcccctcacaaa

SEQ ID NO: 1427714 - DNA, 15 bp, Homo sapiens
cgtcccctcacaaat

SEQ ID NO: 1427715 - DNA, 15 bp, Homo sapiens
gtcccctcacaaata

SEQ ID NO: 1427716 - DNA, 15 bp, Homo sapiens
tcccctcacaaataa

SEQ ID NO: 1427717 - DNA, 15 bp, Homo sapiens
cccctcacaaataaa

SEQ ID NO: 1427718 - DNA, 15 bp, Homo sapiens
ccctcacaaataaat

SEQ ID NO: 1427719 - DNA, 15 bp, Homo sapiens
cctcacaaataaatt

SEQ ID NO: 1427720 - DNA, 15 bp, Homo sapiens
ctcacaaataaatta

SEQ ID NO: 1427721 - DNA, 15 bp, Homo sapiens
tcacaaataaattaa

SEQ ID NO: 1427722 - DNA, 15 bp, Homo sapiens
cacaaataaattaaa

SEQ ID NO: 1427723 - DNA, 15 bp, Homo sapiens
acaaataaattaaag

SEQ ID NO: 1427724 - DNA, 15 bp, Homo sapiens
caaataaattaaagc

SEQ ID NO: 1427725 - DNA, 15 bp, Homo sapiens
aaataaattaaagcg

SEQ ID NO: 1427726 - DNA, 15 bp, Homo sapiens
aataaattaaagcgt

SEQ ID NO: 1427727 - DNA, 15 bp, Homo sapiens
ataaattaaagcgta

SEQ ID NO: 1427728 - DNA, 15 bp, Homo sapiens
taaattaaagcgtaa

SEQ ID NO: 1427729 - DNA, 15 bp, Homo sapiens
aaattaaagcgtaaa

SEQ ID NO: 1427730 - DNA, 15 bp, Homo sapiens
aattaaagcgtaaaa

SEQ ID NO: 1427731 - DNA, 15 bp, Homo sapiens
attaaagcgtaaaag

SEQ ID NO: 1427732 - DNA, 15 bp, Homo sapiens
ttaaagcgtaaaagg

SEQ ID NO: 1427733 - DNA, 15 bp, Homo sapiens
taaagcgtaaaagga

SEQ ID NO: 1427734 - DNA, 15 bp, Homo sapiens
aaagcgtaaaaggag

SEQ ID NO: 1427735 - DNA, 15 bp, Homo sapiens
aagcgtaaaaggaga

SEQ ID NO: 1427736 - DNA, 15 bp, Homo sapiens
agcgtaaaaggagac

SEQ ID NO: 1427737 - DNA, 15 bp, Homo sapiens
gcgtaaaaggagacc

SEQ ID NO: 1427738 - DNA, 15 bp, Homo sapiens
cgtaaaaggagacct

SEQ ID NO: 1427739 - DNA, 15 bp, Homo sapiens
gtaaaaggagaccta

SEQ ID NO: 1427740 - DNA, 15 bp, Homo sapiens
taaaaggagacctac

SEQ ID NO: 1427741 - DNA, 15 bp, Homo sapiens
aaaaggagacctaca

SEQ ID NO: 1427742 - DNA, 15 bp, Homo sapiens
aaaggagacctacat

SEQ ID NO: 1427743 - DNA, 15 bp, Homo sapiens
aaggagacctacatc

SEQ ID NO: 1427744 - DNA, 15 bp, Homo sapiens
aggagacctacatca

SEQ ID NO: 1427745 - DNA, 15 bp, Homo sapiens
ggagacctacatcag

SEQ ID NO: 1427746 - DNA, 15 bp, Homo sapiens
gagacctacatcagg

SEQ ID NO: 1427747 - DNA, 15 bp, Homo sapiens
agacctacatcaggc

SEQ ID NO: 1427748 - DNA, 15 bp, Homo sapiens
gacctacatcaggcc

SEQ ID NO: 1427749 - DNA, 15 bp, Homo sapiens
acctacatcaggcct

SEQ ID NO: 1427750 - DNA, 15 bp, Homo sapiens
atggtcaagtgatga

SEQ ID NO: 1427751 - DNA, 15 bp, Homo sapiens
tggtcaagtgatgaa

SEQ ID NO: 1427752 - DNA, 15 bp, Homo sapiens
ggtcaagtgatgaat

SEQ ID NO: 1427753 - DNA, 15 bp, Homo sapiens
gtcaagtgatgaata

SEQ ID NO: 1427754 - DNA, 15 bp, Homo sapiens
tcaagtgatgaatat

SEQ ID NO: 1427755 - DNA, 15 bp, Homo sapiens
caagtgatgaatatt

SEQ ID NO: 1427756 - DNA, 15 bp, Homo sapiens
aagtgatgaatatta

SEQ ID NO: 1427757 - DNA, 15 bp, Homo sapiens
agtgatgaatattac

SEQ ID NO: 1427758 - DNA, 15 bp, Homo sapiens
gtgatgaatattact

SEQ ID NO: 1427759 - DNA, 15 bp, Homo sapiens
tgatgaatattacta

SEQ ID NO: 1427760 - DNA, 15 bp, Homo sapiens
gatgaatattactaa

SEQ ID NO: 1427761 - DNA, 15 bp, Homo sapiens
atgaatattactaat

SEQ ID NO: 1427762 - DNA, 15 bp, Homo sapiens
tgaatattactaata

SEQ ID NO: 1427763 - DNA, 15 bp, Homo sapiens
gaatattactaatag

SEQ ID NO: 1427764 - DNA, 15 bp, Homo sapiens
aatattactaatagt

SEQ ID NO: 1427765 - DNA, 15 bp, Homo sapiens
atattactaatagtg

SEQ ID NO: 1427766 - DNA, 15 bp, Homo sapiens
tattactaatagtgg

SEQ ID NO: 1427767 - DNA, 15 bp, Homo sapiens
attactaatagtggt

SEQ ID NO: 1427768 - DNA, 15 bp, Homo sapiens
ttactaatagtggtc

SEQ ID NO: 1427769 - DNA, 15 bp, Homo sapiens
tactaatagtggtca

SEQ ID NO: 1427770 - DNA, 15 bp, Homo sapiens
actaatagtggtcat

SEQ ID NO: 1427771 - DNA, 15 bp, Homo sapiens
ctaatagtggtcatg

SEQ ID NO: 1427772 - DNA, 15 bp, Homo sapiens
taatagtggtcatga

SEQ ID NO: 1427773 - DNA, 15 bp, Homo sapiens
aatagtggtcatgag

SEQ ID NO: 1427774 - DNA, 15 bp, Homo sapiens
atagtggtcatgaga

SEQ ID NO: 1427775 - DNA, 15 bp, Homo sapiens
tagtggtcatgagaa

SEQ ID NO: 1427776 - DNA, 15 bp, Homo sapiens
agtggtcatgagaat

SEQ ID NO: 1427777 - DNA, 15 bp, Homo sapiens
gtggtcatgagaata

SEQ ID NO: 1427778 - DNA, 15 bp, Homo sapiens
tggtcatgagaataa

SEQ ID NO: 1427779 - DNA, 15 bp, Homo sapiens
ggtcatgagaataaa

SEQ ID NO: 1427780 - DNA, 15 bp, Homo sapiens
gtcatgagaataaaa

SEQ ID NO: 1427781 - DNA, 15 bp, Homo sapiens
tcatgagaataaaac

SEQ ID NO: 1427782 - DNA, 15 bp, Homo sapiens
catgagaataaaaca

SEQ ID NO: 1427783 - DNA, 15 bp, Homo sapiens
atgagaataaaacaa

SEQ ID NO: 1427784 - DNA, 15 bp, Homo sapiens
tgagaataaaacaaa

SEQ ID NO: 1427785 - DNA, 15 bp, Homo sapiens
gagaataaaacaaaa

SEQ ID NO: 1427786 - DNA, 15 bp, Homo sapiens
agaataaaacaaaag

SEQ ID NO: 1427787 - DNA, 15 bp, Homo sapiens
gaataaaacaaaagg

SEQ ID NO: 1427788 - DNA, 15 bp, Homo sapiens
aataaaacaaaaggt

SEQ ID NO: 1427789 - DNA, 15 bp, Homo sapiens
ataaaacaaaaggtg

SEQ ID NO: 1427790 - DNA, 15 bp, Homo sapiens
taaaacaaaaggtga

SEQ ID NO: 1427791 - DNA, 15 bp, Homo sapiens
aaaacaaaaggtgat

SEQ ID NO: 1427792 - DNA, 15 bp, Homo sapiens
aaacaaaaggtgatt

SEQ ID NO: 1427793 - DNA, 15 bp, Homo sapiens
aacaaaaggtgattc

SEQ ID NO: 1427794 - DNA, 15 bp, Homo sapiens
acaaaaggtgattct

SEQ ID NO: 1427795 - DNA, 15 bp, Homo sapiens
caaaaggtgattcta

SEQ ID NO: 1427796 - DNA, 15 bp, Homo sapiens
aaaaggtgattctat

SEQ ID NO: 1427797 - DNA, 15 bp, Homo sapiens
aaaggtgattctatt

SEQ ID NO: 1427798 - DNA, 15 bp, Homo sapiens
aaggtgattctattc

SEQ ID NO: 1427799 - DNA, 15 bp, Homo sapiens
aggtgattctattca

SEQ ID NO: 1427800 - DNA, 15 bp, Homo sapiens
ggtgattctattcag

SEQ ID NO: 1427801 - DNA, 15 bp, Homo sapiens
gtgattctattcaga

SEQ ID NO: 1427802 - DNA, 15 bp, Homo sapiens
tgattctattcagaa

SEQ ID NO: 1427803 - DNA, 15 bp, Homo sapiens
gattctattcagaat

SEQ ID NO: 1427804 - DNA, 15 bp, Homo sapiens
attctattcagaatg

SEQ ID NO: 1427805 - DNA, 15 bp, Homo sapiens
ttctattcagaatga

SEQ ID NO: 1427806 - DNA, 15 bp, Homo sapiens
tctattcagaatgag

SEQ ID NO: 1427807 - DNA, 15 bp, Homo sapiens
agcagcagtataagc

SEQ ID NO: 1427808 - DNA, 15 bp, Homo sapiens
gcagcagtataagca

SEQ ID NO: 1427809 - DNA, 15 bp, Homo sapiens
cagcagtataagcaa

SEQ ID NO: 1427810 - DNA, 15 bp, Homo sapiens
agcagtataagcaat

SEQ ID NO: 1427811 - DNA, 15 bp, Homo sapiens
gcagtataagcaata

SEQ ID NO: 1427812 - DNA, 15 bp, Homo sapiens
cagtataagcaatat

SEQ ID NO: 1427813 - DNA, 15 bp, Homo sapiens
agtataagcaatatg

SEQ ID NO: 1427814 - DNA, 15 bp, Homo sapiens
gtataagcaatatgg

SEQ ID NO: 1427815 - DNA, 15 bp, Homo sapiens
tataagcaatatgga

SEQ ID NO: 1427816 - DNA, 15 bp, Homo sapiens
ataagcaatatggaa

SEQ ID NO: 1427817 - DNA, 15 bp, Homo sapiens
taagcaatatggaac

SEQ ID NO: 1427818 - DNA, 15 bp, Homo sapiens
aagcaatatggaact

SEQ ID NO: 1427819 - DNA, 15 bp, Homo sapiens
agcaatatggaactc

SEQ ID NO: 1427820 - DNA, 15 bp, Homo sapiens
gcaatatggaactcg

SEQ ID NO: 1427821 - DNA, 15 bp, Homo sapiens
caatatggaactcga

SEQ ID NO: 1427822 - DNA, 15 bp, Homo sapiens
aatatggaactcgaa

SEQ ID NO: 1427823 - DNA, 15 bp, Homo sapiens
atatggaactcgaat

SEQ ID NO: 1427824 - DNA, 15 bp, Homo sapiens
tatggaactcgaatt

SEQ ID NO: 1427825 - DNA, 15 bp, Homo sapiens
atggaactcgaatta

SEQ ID NO: 1427826 - DNA, 15 bp, Homo sapiens
tggaactcgaattaa

SEQ ID NO: 1427827 - DNA, 15 bp, Homo sapiens
ggaactcgaattaaa

SEQ ID NO: 1427828 - DNA, 15 bp, Homo sapiens
gaactcgaattaaat

SEQ ID NO: 1427829 - DNA, 15 bp, Homo sapiens
aactcgaattaaata

SEQ ID NO: 1427830 - DNA, 15 bp, Homo sapiens
actcgaattaaatat

SEQ ID NO: 1427831 - DNA, 15 bp, Homo sapiens
ctcgaattaaatatc

SEQ ID NO: 1427832 - DNA, 15 bp, Homo sapiens
tcgaattaaatatcc

SEQ ID NO: 1427833 - DNA, 15 bp, Homo sapiens
cgaattaaatatcca

SEQ ID NO: 1427834 - DNA, 15 bp, Homo sapiens
gaattaaatatccac

SEQ ID NO: 1427835 - DNA, 15 bp, Homo sapiens
aattaaatatccaca

SEQ ID NO: 1427836 - DNA, 15 bp, Homo sapiens
attaaatatccacaa

SEQ ID NO: 1427837 - DNA, 15 bp, Homo sapiens
ttaaatatccacaat

SEQ ID NO: 1427838 - DNA, 15 bp, Homo sapiens
taaatatccacaatt

SEQ ID NO: 1427839 - DNA, 15 bp, Homo sapiens
aaatatccacaattc

SEQ ID NO: 1427840 - DNA, 15 bp, Homo sapiens
atatccacaattcaa

SEQ ID NO: 1427841 - DNA, 15 bp, Homo sapiens
tatccacaattcaaa

SEQ ID NO: 1427842 - DNA, 15 bp, Homo sapiens
atccacaattcaaaa

SEQ ID NO: 1427843 - DNA, 15 bp, Homo sapiens
tccacaattcaaaag

SEQ ID NO: 1427844 - DNA, 15 bp, Homo sapiens
ccacaattcaaaagc

SEQ ID NO: 1427845 - DNA, 15 bp, Homo sapiens
cacaattcaaaagca

SEQ ID NO: 1427846 - DNA, 15 bp, Homo sapiens
acaattcaaaagcac

SEQ ID NO: 1427847 - DNA, 15 bp, Homo sapiens
caattcaaaagcacc

SEQ ID NO: 1427848 - DNA, 15 bp, Homo sapiens
aattcaaaagcacct

SEQ ID NO: 1427849 - DNA, 15 bp, Homo sapiens
attcaaaagcaccta

SEQ ID NO: 1427850 - DNA, 15 bp, Homo sapiens
ttcaaaagcacctaa

SEQ ID NO: 1427851 - DNA, 15 bp, Homo sapiens
tcaaaagcacctaaa

SEQ ID NO: 1427852 - DNA, 15 bp, Homo sapiens
caaaagcacctaaaa

SEQ ID NO: 1427853 - DNA, 15 bp, Homo sapiens
aaaagcacctaaaaa

SEQ ID NO: 1427854 - DNA, 15 bp, Homo sapiens
aaagcacctaaaaag

SEQ ID NO: 1427855 - DNA, 15 bp, Homo sapiens
aagcacctaaaaaga

SEQ ID NO: 1427856 - DNA, 15 bp, Homo sapiens
agcacctaaaaagaa

SEQ ID NO: 1427857 - DNA, 15 bp, Homo sapiens
gcacctaaaaagaat

SEQ ID NO: 1427858 - DNA, 15 bp, Homo sapiens
cacctaaaaagaata

SEQ ID NO: 1427859 - DNA, 15 bp, Homo sapiens
acctaaaaagaatag

SEQ ID NO: 1427860 - DNA, 15 bp, Homo sapiens
cctaaaaagaatagg

SEQ ID NO: 1427861 - DNA, 15 bp, Homo sapiens
ctaaaaagaataggc

SEQ ID NO: 1427862 - DNA, 15 bp, Homo sapiens
taaaaagaataggct

SEQ ID NO: 1427863 - DNA, 15 bp, Homo sapiens
aaaaagaataggctg

SEQ ID NO: 1427864 - DNA, 15 bp, Homo sapiens
aaaagaataggctga

SEQ ID NO: 1427865 - DNA, 15 bp, Homo sapiens
aaagaataggctgag

SEQ ID NO: 1427866 - DNA, 15 bp, Homo sapiens
aagaataggctgagg

SEQ ID NO: 1427867 - DNA, 15 bp, Homo sapiens
agaataggctgagga

SEQ ID NO: 1427868 - DNA, 15 bp, Homo sapiens
gaataggctgaggag

SEQ ID NO: 1427869 - DNA, 15 bp, Homo sapiens
aataggctgaggagg

SEQ ID NO: 1427870 - DNA, 15 bp, Homo sapiens
ataggctgaggagga

SEQ ID NO: 1427871 - DNA, 15 bp, Homo sapiens
taggctgaggaggaa

SEQ ID NO: 1427872 - DNA, 15 bp, Homo sapiens
aggctgaggaggaag

SEQ ID NO: 1427873 - DNA, 15 bp, Homo sapiens
ggctgaggaggaagt

SEQ ID NO: 1427874 - DNA, 15 bp, Homo sapiens
gctgaggaggaagtc

SEQ ID NO: 1427875 - DNA, 15 bp, Homo sapiens
ctgaggaggaagtct

SEQ ID NO: 1427876 - DNA, 15 bp, Homo sapiens
tgaggaggaagtctt

SEQ ID NO: 1427877 - DNA, 15 bp, Homo sapiens
gaggaggaagtcttc

SEQ ID NO: 1427878 - DNA, 15 bp, Homo sapiens
aggaggaagtcttct

SEQ ID NO: 1427879 - DNA, 15 bp, Homo sapiens
ggaggaagtcttcta

SEQ ID NO: 1427880 - DNA, 15 bp, Homo sapiens
gaggaagtcttctac

SEQ ID NO: 1427881 - DNA, 15 bp, Homo sapiens
aggaagtcttctacc

SEQ ID NO: 1427882 - DNA, 15 bp, Homo sapiens
ggaagtcttctacca

SEQ ID NO: 1427883 - DNA, 15 bp, Homo sapiens
gaagtcttctaccag

SEQ ID NO: 1427884 - DNA, 15 bp, Homo sapiens
aagtcttctaccagg

SEQ ID NO: 1427885 - DNA, 15 bp, Homo sapiens
agtcttctaccaggc

SEQ ID NO: 1427886 - DNA, 15 bp, Homo sapiens
gtcttctaccaggca

SEQ ID NO: 1427887 - DNA, 15 bp, Homo sapiens
tcttctaccaggcat

SEQ ID NO: 1427888 - DNA, 15 bp, Homo sapiens
cttctaccaggcata

SEQ ID NO: 1427889 - DNA, 15 bp, Homo sapiens
ttctaccaggcatat

SEQ ID NO: 1427890 - DNA, 15 bp, Homo sapiens
tctaccaggcatatt

SEQ ID NO: 1427891 - DNA, 15 bp, Homo sapiens
ctaccaggcatattc

SEQ ID NO: 1427892 - DNA, 15 bp, Homo sapiens
taccaggcatattca

SEQ ID NO: 1427893 - DNA, 15 bp, Homo sapiens
accaggcatattcat

SEQ ID NO: 1427894 - DNA, 15 bp, Homo sapiens
ccaggcatattcatg

SEQ ID NO: 1427895 - DNA, 15 bp, Homo sapiens
caggcatattcatgc

SEQ ID NO: 1427896 - DNA, 15 bp, Homo sapiens
aggcatattcatgcg

SEQ ID NO: 1427897 - DNA, 15 bp, Homo sapiens
ggcatattcatgcgc

SEQ ID NO: 1427898 - DNA, 15 bp, Homo sapiens
gcatattcatgcgct

SEQ ID NO: 1427899 - DNA, 15 bp, Homo sapiens
catattcatgcgctt

SEQ ID NO: 1427900 - DNA, 15 bp, Homo sapiens
atattcatgcgcttg

SEQ ID NO: 1427901 - DNA, 15 bp, Homo sapiens
tattcatgcgcttga

SEQ ID NO: 1427902 - DNA, 15 bp, Homo sapiens
attcatgcgcttgaa

SEQ ID NO: 1427903 - DNA, 15 bp, Homo sapiens
ttcatgcgcttgaac

SEQ ID NO: 1427904 - DNA, 15 bp, Homo sapiens
tcatgcgcttgaact

SEQ ID NO: 1427905 - DNA, 15 bp, Homo sapiens
catgcgcttgaacta

SEQ ID NO: 1427906 - DNA, 15 bp, Homo sapiens
atgcgcttgaactag

SEQ ID NO: 1427907 - DNA, 15 bp, Homo sapiens
tgcgcttgaactagt

SEQ ID NO: 1427908 - DNA, 15 bp, Homo sapiens
gcgcttgaactagta

SEQ ID NO: 1427909 - DNA, 15 bp, Homo sapiens
cgcttgaactagtag

SEQ ID NO: 1427910 - DNA, 15 bp, Homo sapiens
gcttgaactagtagt

SEQ ID NO: 1427911 - DNA, 15 bp, Homo sapiens
cttgaactagtagtc

SEQ ID NO: 1427912 - DNA, 15 bp, Homo sapiens
ttgaactagtagtca

SEQ ID NO: 1427913 - DNA, 15 bp, Homo sapiens
tgaactagtagtcag

SEQ ID NO: 1427914 - DNA, 15 bp, Homo sapiens
gaactagtagtcagt

SEQ ID NO: 1427915 - DNA, 15 bp, Homo sapiens
aactagtagtcagta

SEQ ID NO: 1427916 - DNA, 15 bp, Homo sapiens
actagtagtcagtag

SEQ ID NO: 1427917 - DNA, 15 bp, Homo sapiens
ctagtagtcagtaga

SEQ ID NO: 1427918 - DNA, 15 bp, Homo sapiens
tagtagtcagtagaa

SEQ ID NO: 1427919 - DNA, 15 bp, Homo sapiens
agtagtcagtagaaa

SEQ ID NO: 1427920 - DNA, 15 bp, Homo sapiens
gtagtcagtagaaat

SEQ ID NO: 1427921 - DNA, 15 bp, Homo sapiens
tagtcagtagaaatc

SEQ ID NO: 1427922 - DNA, 15 bp, Homo sapiens
agtcagtagaaatct

SEQ ID NO: 1427923 - DNA, 15 bp, Homo sapiens
gtcagtagaaatcta

SEQ ID NO: 1427924 - DNA, 15 bp, Homo sapiens
tcagtagaaatctaa

SEQ ID NO: 1427925 - DNA, 15 bp, Homo sapiens
cagtagaaatctaag

SEQ ID NO: 1427926 - DNA, 15 bp, Homo sapiens
agtagaaatctaagc

SEQ ID NO: 1427927 - DNA, 15 bp, Homo sapiens
gtagaaatctaagcc

SEQ ID NO: 1427928 - DNA, 15 bp, Homo sapiens
tagaaatctaagccc

SEQ ID NO: 1427929 - DNA, 15 bp, Homo sapiens
agaaatctaagccca

SEQ ID NO: 1427930 - DNA, 15 bp, Homo sapiens
gaaatctaagcccac

SEQ ID NO: 1427931 - DNA, 15 bp, Homo sapiens
aaatctaagcccacc

SEQ ID NO: 1427932 - DNA, 15 bp, Homo sapiens
aatctaagcccacct

SEQ ID NO: 1427933 - DNA, 15 bp, Homo sapiens
atctaagcccaccta

SEQ ID NO: 1427934 - DNA, 15 bp, Homo sapiens
tctaagcccacctaa

SEQ ID NO: 1427935 - DNA, 15 bp, Homo sapiens
ctaagcccacctaat

SEQ ID NO: 1427936 - DNA, 15 bp, Homo sapiens
taagcccacctaatt

SEQ ID NO: 1427937 - DNA, 15 bp, Homo sapiens
aagcccacctaattg

SEQ ID NO: 1427938 - DNA, 15 bp, Homo sapiens
agcccacctaattgt

SEQ ID NO: 1427939 - DNA, 15 bp, Homo sapiens
gcccacctaattgta

SEQ ID NO: 1427940 - DNA, 15 bp, Homo sapiens
cccacctaattgtac

SEQ ID NO: 1427941 - DNA, 15 bp, Homo sapiens
ccacctaattgtact

SEQ ID NO: 1427942 - DNA, 15 bp, Homo sapiens
cacctaattgtactg

SEQ ID NO: 1427943 - DNA, 15 bp, Homo sapiens
acctaattgtactga

SEQ ID NO: 1427944 - DNA, 15 bp, Homo sapiens
cctaattgtactgaa

SEQ ID NO: 1427945 - DNA, 15 bp, Homo sapiens
tgaagttaacaaatg

SEQ ID NO: 1427946 - DNA, 15 bp, Homo sapiens
gaagttaacaaatgc

SEQ ID NO: 1427947 - DNA, 15 bp, Homo sapiens
aagttaacaaatgca

SEQ ID NO: 1427948 - DNA, 15 bp, Homo sapiens
agttaacaaatgcac

SEQ ID NO: 1427949 - DNA, 15 bp, Homo sapiens
gttaacaaatgcacc

SEQ ID NO: 1427950 - DNA, 15 bp, Homo sapiens
ttaacaaatgcacct

SEQ ID NO: 1427951 - DNA, 15 bp, Homo sapiens
taacaaatgcacctg

SEQ ID NO: 1427952 - DNA, 15 bp, Homo sapiens
aacaaatgcacctgg

SEQ ID NO: 1427953 - DNA, 15 bp, Homo sapiens
acaaatgcacctggt

SEQ ID NO: 1427954 - DNA, 15 bp, Homo sapiens
caaatgcacctggtt

SEQ ID NO: 1427955 - DNA, 15 bp, Homo sapiens
aaatgcacctggttc

SEQ ID NO: 1427956 - DNA, 15 bp, Homo sapiens
aatgcacctggttct

SEQ ID NO: 1427957 - DNA, 15 bp, Homo sapiens
atgcacctggttctt

SEQ ID NO: 1427958 - DNA, 15 bp, Homo sapiens
tgcacctggttcttt

SEQ ID NO: 1427959 - DNA, 15 bp, Homo sapiens
gcacctggttctttt

SEQ ID NO: 1427960 - DNA, 15 bp, Homo sapiens
cacctggttctttta

SEQ ID NO: 1427961 - DNA, 15 bp, Homo sapiens
acctggttcttttac

SEQ ID NO: 1427962 - DNA, 15 bp, Homo sapiens
cctggttcttttact

SEQ ID NO: 1427963 - DNA, 15 bp, Homo sapiens
ctggttcttttacta

SEQ ID NO: 1427964 - DNA, 15 bp, Homo sapiens
tggttcttttactaa

SEQ ID NO: 1427965 - DNA, 15 bp, Homo sapiens
ggttcttttactaag

SEQ ID NO: 1427966 - DNA, 15 bp, Homo sapiens
gttcttttactaagt

SEQ ID NO: 1427967 - DNA, 15 bp, Homo sapiens
ttcttttactaagtg

SEQ ID NO: 1427968 - DNA, 15 bp, Homo sapiens
tcttttactaagtgt

SEQ ID NO: 1427969 - DNA, 15 bp, Homo sapiens
cttttactaagtgtt

SEQ ID NO: 1427970 - DNA, 15 bp, Homo sapiens
ttttactaagtgttc

SEQ ID NO: 1427971 - DNA, 15 bp, Homo sapiens
tttactaagtgttca

SEQ ID NO: 1427972 - DNA, 15 bp, Homo sapiens
ttactaagtgttcaa

SEQ ID NO: 1427973 - DNA, 15 bp, Homo sapiens
tactaagtgttcaaa

SEQ ID NO: 1427974 - DNA, 15 bp, Homo sapiens
actaagtgttcaaat

SEQ ID NO: 1427975 - DNA, 15 bp, Homo sapiens
ctaagtgttcaaata

SEQ ID NO: 1427976 - DNA, 15 bp, Homo sapiens
taagtgttcaaatac

SEQ ID NO: 1427977 - DNA, 15 bp, Homo sapiens
aagtgttcaaatacc

SEQ ID NO: 1427978 - DNA, 15 bp, Homo sapiens
agtgttcaaatacca

SEQ ID NO: 1427979 - DNA, 15 bp, Homo sapiens
gtgttcaaataccag

SEQ ID NO: 1427980 - DNA, 15 bp, Homo sapiens
tgttcaaataccagt

SEQ ID NO: 1427981 - DNA, 15 bp, Homo sapiens
gttcaaataccagtg

SEQ ID NO: 1427982 - DNA, 15 bp, Homo sapiens
ttcaaataccagtga

SEQ ID NO: 1427983 - DNA, 15 bp, Homo sapiens
tcaaataccagtgaa

SEQ ID NO: 1427984 - DNA, 15 bp, Homo sapiens
caaataccagtgaac

SEQ ID NO: 1427985 - DNA, 15 bp, Homo sapiens
aaataccagtgaact

SEQ ID NO: 1427986 - DNA, 15 bp, Homo sapiens
aataccagtgaactt

SEQ ID NO: 1427987 - DNA, 15 bp, Homo sapiens
ataccagtgaactta

SEQ ID NO: 1427988 - DNA, 15 bp, Homo sapiens
taccagtgaacttaa

SEQ ID NO: 1427989 - DNA, 15 bp, Homo sapiens
accagtgaacttaaa

SEQ ID NO: 1427990 - DNA, 15 bp, Homo sapiens
ccagtgaacttaaag

SEQ ID NO: 1427991 - DNA, 15 bp, Homo sapiens
cagtgaacttaaaga

SEQ ID NO: 1427992 - DNA, 15 bp, Homo sapiens
agtgaacttaaagaa

SEQ ID NO: 1427993 - DNA, 15 bp, Homo sapiens
gtgaacttaaagaat

SEQ ID NO: 1427994 - DNA, 15 bp, Homo sapiens
tgaacttaaagaatt

SEQ ID NO: 1427995 - DNA, 15 bp, Homo sapiens
gaacttaaagaattt

SEQ ID NO: 1427996 - DNA, 15 bp, Homo sapiens
aacttaaagaatttg

SEQ ID NO: 1427997 - DNA, 15 bp, Homo sapiens
acttaaagaatttgt

SEQ ID NO: 1427998 - DNA, 15 bp, Homo sapiens
cttaaagaatttgtc

SEQ ID NO: 1427999 - DNA, 15 bp, Homo sapiens
ttaaagaatttgtca

SEQ ID NO: 1428000 - DNA, 15 bp, Homo sapiens
taaagaatttgtcaa

SEQ ID NO: 1428001 - DNA, 15 bp, Homo sapiens
aaagaatttgtcaat

SEQ ID NO: 1428002 - DNA, 15 bp, Homo sapiens
aagaatttgtcaatc

SEQ ID NO: 1428003 - DNA, 15 bp, Homo sapiens
agaatttgtcaatcc

SEQ ID NO: 1428004 - DNA, 15 bp, Homo sapiens
aatttgtcaatccta

SEQ ID NO: 1428005 - DNA, 15 bp, Homo sapiens
atttgtcaatcctag

SEQ ID NO: 1428006 - DNA, 15 bp, Homo sapiens
tttgtcaatcctagc

SEQ ID NO: 1428007 - DNA, 15 bp, Homo sapiens
ttgtcaatcctagcc

SEQ ID NO: 1428008 - DNA, 15 bp, Homo sapiens
tgtcaatcctagcct

SEQ ID NO: 1428009 - DNA, 15 bp, Homo sapiens
gtcaatcctagcctt

SEQ ID NO: 1428010 - DNA, 15 bp, Homo sapiens
tcaatcctagccttc

SEQ ID NO: 1428011 - DNA, 15 bp, Homo sapiens
caatcctagccttcc

SEQ ID NO: 1428012 - DNA, 15 bp, Homo sapiens
atcctagccttccaa

SEQ ID NO: 1428013 - DNA, 15 bp, Homo sapiens
tcctagccttccaag

SEQ ID NO: 1428014 - DNA, 15 bp, Homo sapiens
cctagccttccaaga

SEQ ID NO: 1428015 - DNA, 15 bp, Homo sapiens
ctagccttccaagag

SEQ ID NO: 1428016 - DNA, 15 bp, Homo sapiens
tagccttccaagaga

SEQ ID NO: 1428017 - DNA, 15 bp, Homo sapiens
agccttccaagagaa

SEQ ID NO: 1428018 - DNA, 15 bp, Homo sapiens
gccttccaagagaag

SEQ ID NO: 1428019 - DNA, 15 bp, Homo sapiens
ccttccaagagaaga

SEQ ID NO: 1428020 - DNA, 15 bp, Homo sapiens
cttccaagagaagaa

SEQ ID NO: 1428021 - DNA, 15 bp, Homo sapiens
ttccaagagaagaaa

SEQ ID NO: 1428022 - DNA, 15 bp, Homo sapiens
tccaagagaagaaaa

SEQ ID NO: 1428023 - DNA, 15 bp, Homo sapiens
ccaagagaagaaaaa

SEQ ID NO: 1428024 - DNA, 15 bp, Homo sapiens
caagagaagaaaaag

SEQ ID NO: 1428025 - DNA, 15 bp, Homo sapiens
aagagaagaaaaaga

SEQ ID NO: 1428026 - DNA, 15 bp, Homo sapiens
agagaagaaaaagaa

SEQ ID NO: 1428027 - DNA, 15 bp, Homo sapiens
gagaagaaaaagaag

SEQ ID NO: 1428028 - DNA, 15 bp, Homo sapiens
agaagaaaaagaaga

SEQ ID NO: 1428029 - DNA, 15 bp, Homo sapiens
gaagaaaaagaagag

SEQ ID NO: 1428030 - DNA, 15 bp, Homo sapiens
aagaaaaagaagaga

SEQ ID NO: 1428031 - DNA, 15 bp, Homo sapiens
gaaaaagaagagaaa

SEQ ID NO: 1428032 - DNA, 15 bp, Homo sapiens
aaaaagaagagaaac

SEQ ID NO: 1428033 - DNA, 15 bp, Homo sapiens
aaaagaagagaaact

SEQ ID NO: 1428034 - DNA, 15 bp, Homo sapiens
aaagaagagaaacta

SEQ ID NO: 1428035 - DNA, 15 bp, Homo sapiens
aagaagagaaactag

SEQ ID NO: 1428036 - DNA, 15 bp, Homo sapiens
agaagagaaactaga

SEQ ID NO: 1428037 - DNA, 15 bp, Homo sapiens
gaagagaaactagaa

SEQ ID NO: 1428038 - DNA, 15 bp, Homo sapiens
aagagaaactagaaa

SEQ ID NO: 1428039 - DNA, 15 bp, Homo sapiens
agagaaactagaaac

SEQ ID NO: 1428040 - DNA, 15 bp, Homo sapiens
gagaaactagaaaca

SEQ ID NO: 1428041 - DNA, 15 bp, Homo sapiens
agaaactagaaacag

SEQ ID NO: 1428042 - DNA, 15 bp, Homo sapiens
gaaactagaaacagt

SEQ ID NO: 1428043 - DNA, 15 bp, Homo sapiens
aaactagaaacagtt

SEQ ID NO: 1428044 - DNA, 15 bp, Homo sapiens
aactagaaacagtta

SEQ ID NO: 1428045 - DNA, 15 bp, Homo sapiens
actagaaacagttaa

SEQ ID NO: 1428046 - DNA, 15 bp, Homo sapiens
ctagaaacagttaaa

SEQ ID NO: 1428047 - DNA, 15 bp, Homo sapiens
tagaaacagttaaag

SEQ ID NO: 1428048 - DNA, 15 bp, Homo sapiens
agaaacagttaaagt

SEQ ID NO: 1428049 - DNA, 15 bp, Homo sapiens
gaaacagttaaagtg

SEQ ID NO: 1428050 - DNA, 15 bp, Homo sapiens
aaacagttaaagtgt

SEQ ID NO: 1428051 - DNA, 15 bp, Homo sapiens
aacagttaaagtgtc

SEQ ID NO: 1428052 - DNA, 15 bp, Homo sapiens
acagttaaagtgtct

SEQ ID NO: 1428053 - DNA, 15 bp, Homo sapiens
cagttaaagtgtcta

SEQ ID NO: 1428054 - DNA, 15 bp, Homo sapiens
agttaaagtgtctaa

SEQ ID NO: 1428055 - DNA, 15 bp, Homo sapiens
gttaaagtgtctaat

SEQ ID NO: 1428056 - DNA, 15 bp, Homo sapiens
ttaaagtgtctaata

SEQ ID NO: 1428057 - DNA, 15 bp, Homo sapiens
taaagtgtctaataa

SEQ ID NO: 1428058 - DNA, 15 bp, Homo sapiens
aaagtgtctaataat

SEQ ID NO: 1428059 - DNA, 15 bp, Homo sapiens
aagtgtctaataatg

SEQ ID NO: 1428060 - DNA, 15 bp, Homo sapiens
agtgtctaataatgc

SEQ ID NO: 1428061 - DNA, 15 bp, Homo sapiens
gtgtctaataatgct

SEQ ID NO: 1428062 - DNA, 15 bp, Homo sapiens
tgtctaataatgctg

SEQ ID NO: 1428063 - DNA, 15 bp, Homo sapiens
gtctaataatgctga

SEQ ID NO: 1428064 - DNA, 15 bp, Homo sapiens
tctaataatgctgaa

SEQ ID NO: 1428065 - DNA, 15 bp, Homo sapiens
ctaataatgctgaag

SEQ ID NO: 1428066 - DNA, 15 bp, Homo sapiens
taataatgctgaaga

SEQ ID NO: 1428067 - DNA, 15 bp, Homo sapiens
aataatgctgaagac

SEQ ID NO: 1428068 - DNA, 15 bp, Homo sapiens
ataatgctgaagacc

SEQ ID NO: 1428069 - DNA, 15 bp, Homo sapiens
taatgctgaagaccc

SEQ ID NO: 1428070 - DNA, 15 bp, Homo sapiens
aatgctgaagacccc

SEQ ID NO: 1428071 - DNA, 15 bp, Homo sapiens
atgctgaagacccca

SEQ ID NO: 1428072 - DNA, 15 bp, Homo sapiens
tgctgaagaccccaa

SEQ ID NO: 1428073 - DNA, 15 bp, Homo sapiens
gctgaagaccccaaa

SEQ ID NO: 1428074 - DNA, 15 bp, Homo sapiens
ctgaagaccccaaag

SEQ ID NO: 1428075 - DNA, 15 bp, Homo sapiens
tgaagaccccaaaga

SEQ ID NO: 1428076 - DNA, 15 bp, Homo sapiens
gaagaccccaaagat

SEQ ID NO: 1428077 - DNA, 15 bp, Homo sapiens
aagaccccaaagatc

SEQ ID NO: 1428078 - DNA, 15 bp, Homo sapiens
agaccccaaagatct

SEQ ID NO: 1428079 - DNA, 15 bp, Homo sapiens
gaccccaaagatctc

SEQ ID NO: 1428080 - DNA, 15 bp, Homo sapiens
accccaaagatctca

SEQ ID NO: 1428081 - DNA, 15 bp, Homo sapiens
ccccaaagatctcat

SEQ ID NO: 1428082 - DNA, 15 bp, Homo sapiens
cccaaagatctcatg

SEQ ID NO: 1428083 - DNA, 15 bp, Homo sapiens
ccaaagatctcatgt

SEQ ID NO: 1428084 - DNA, 15 bp, Homo sapiens
caaagatctcatgtt

SEQ ID NO: 1428085 - DNA, 15 bp, Homo sapiens
aaagatctcatgtta

SEQ ID NO: 1428086 - DNA, 15 bp, Homo sapiens
aagatctcatgttaa

SEQ ID NO: 1428087 - DNA, 15 bp, Homo sapiens
agatctcatgttaag

SEQ ID NO: 1428088 - DNA, 15 bp, Homo sapiens
gatctcatgttaagt

SEQ ID NO: 1428089 - DNA, 15 bp, Homo sapiens
atctcatgttaagtg

SEQ ID NO: 1428090 - DNA, 15 bp, Homo sapiens
tctcatgttaagtgg

SEQ ID NO: 1428091 - DNA, 15 bp, Homo sapiens
ctcatgttaagtgga

SEQ ID NO: 1428092 - DNA, 15 bp, Homo sapiens
tcatgttaagtggag

SEQ ID NO: 1428093 - DNA, 15 bp, Homo sapiens
catgttaagtggaga

SEQ ID NO: 1428094 - DNA, 15 bp, Homo sapiens
atgttaagtggagaa

SEQ ID NO: 1428095 - DNA, 15 bp, Homo sapiens
tgttaagtggagaaa

SEQ ID NO: 1428096 - DNA, 15 bp, Homo sapiens
gttaagtggagaaag

SEQ ID NO: 1428097 - DNA, 15 bp, Homo sapiens
ttaagtggagaaagg

SEQ ID NO: 1428098 - DNA, 15 bp, Homo sapiens
taagtggagaaaggg

SEQ ID NO: 1428099 - DNA, 15 bp, Homo sapiens
aagtggagaaagggt

SEQ ID NO: 1428100 - DNA, 15 bp, Homo sapiens
agtggagaaagggtt

SEQ ID NO: 1428101 - DNA, 15 bp, Homo sapiens
gtggagaaagggttt

SEQ ID NO: 1428102 - DNA, 15 bp, Homo sapiens
tggagaaagggtttt

SEQ ID NO: 1428103 - DNA, 15 bp, Homo sapiens
ggagaaagggttttg

SEQ ID NO: 1428104 - DNA, 15 bp, Homo sapiens
gagaaagggttttgc

SEQ ID NO: 1428105 - DNA, 15 bp, Homo sapiens
agaaagggttttgca

SEQ ID NO: 1428106 - DNA, 15 bp, Homo sapiens
gaaagggttttgcaa

SEQ ID NO: 1428107 - DNA, 15 bp, Homo sapiens
aaagggttttgcaaa

SEQ ID NO: 1428108 - DNA, 15 bp, Homo sapiens
aagggttttgcaaac

SEQ ID NO: 1428109 - DNA, 15 bp, Homo sapiens
agggttttgcaaact

SEQ ID NO: 1428110 - DNA, 15 bp, Homo sapiens
gggttttgcaaactg

SEQ ID NO: 1428111 - DNA, 15 bp, Homo sapiens
ggttttgcaaactga

SEQ ID NO: 1428112 - DNA, 15 bp, Homo sapiens
gttttgcaaactgaa

SEQ ID NO: 1428113 - DNA, 15 bp, Homo sapiens
ttttgcaaactgaaa

SEQ ID NO: 1428114 - DNA, 15 bp, Homo sapiens
tttgcaaactgaaag

SEQ ID NO: 1428115 - DNA, 15 bp, Homo sapiens
ttgcaaactgaaaga

SEQ ID NO: 1428116 - DNA, 15 bp, Homo sapiens
tgcaaactgaaagat

SEQ ID NO: 1428117 - DNA, 15 bp, Homo sapiens
gcaaactgaaagatc

SEQ ID NO: 1428118 - DNA, 15 bp, Homo sapiens
caaactgaaagatct

SEQ ID NO: 1428119 - DNA, 15 bp, Homo sapiens
aaactgaaagatctg

SEQ ID NO: 1428120 - DNA, 15 bp, Homo sapiens
aactgaaagatctgt

SEQ ID NO: 1428121 - DNA, 15 bp, Homo sapiens
actgaaagatctgta

SEQ ID NO: 1428122 - DNA, 15 bp, Homo sapiens
ctgaaagatctgtag

SEQ ID NO: 1428123 - DNA, 15 bp, Homo sapiens
tgaaagatctgtaga

SEQ ID NO: 1428124 - DNA, 15 bp, Homo sapiens
gaaagatctgtagag

SEQ ID NO: 1428125 - DNA, 15 bp, Homo sapiens
aaagatctgtagaga

SEQ ID NO: 1428126 - DNA, 15 bp, Homo sapiens
aagatctgtagagag

SEQ ID NO: 1428127 - DNA, 15 bp, Homo sapiens
agatctgtagagagt

SEQ ID NO: 1428128 - DNA, 15 bp, Homo sapiens
gatctgtagagagta

SEQ ID NO: 1428129 - DNA, 15 bp, Homo sapiens
atctgtagagagtag

SEQ ID NO: 1428130 - DNA, 15 bp, Homo sapiens
tctgtagagagtagc

SEQ ID NO: 1428131 - DNA, 15 bp, Homo sapiens
ctgtagagagtagca

SEQ ID NO: 1428132 - DNA, 15 bp, Homo sapiens
tgtagagagtagcag

SEQ ID NO: 1428133 - DNA, 15 bp, Homo sapiens
gtagagagtagcagt

SEQ ID NO: 1428134 - DNA, 15 bp, Homo sapiens
tagagagtagcagta

SEQ ID NO: 1428135 - DNA, 15 bp, Homo sapiens
agagagtagcagtat

SEQ ID NO: 1428136 - DNA, 15 bp, Homo sapiens
gagagtagcagtatt

SEQ ID NO: 1428137 - DNA, 15 bp, Homo sapiens
agagtagcagtattt

SEQ ID NO: 1428138 - DNA, 15 bp, Homo sapiens
gagtagcagtatttc

SEQ ID NO: 1428139 - DNA, 15 bp, Homo sapiens
agtagcagtatttca

SEQ ID NO: 1428140 - DNA, 15 bp, Homo sapiens
gtagcagtatttcat

SEQ ID NO: 1428141 - DNA, 15 bp, Homo sapiens
tagcagtatttcatt

SEQ ID NO: 1428142 - DNA, 15 bp, Homo sapiens
agcagtatttcattg

SEQ ID NO: 1428143 - DNA, 15 bp, Homo sapiens
gcagtatttcattgg

SEQ ID NO: 1428144 - DNA, 15 bp, Homo sapiens
cagtatttcattggt

SEQ ID NO: 1428145 - DNA, 15 bp, Homo sapiens
agtatttcattggta

SEQ ID NO: 1428146 - DNA, 15 bp, Homo sapiens
gtatttcattggtac

SEQ ID NO: 1428147 - DNA, 15 bp, Homo sapiens
tatttcattggtacc

SEQ ID NO: 1428148 - DNA, 15 bp, Homo sapiens
atttcattggtacct

SEQ ID NO: 1428149 - DNA, 15 bp, Homo sapiens
tttcattggtacctg

SEQ ID NO: 1428150 - DNA, 15 bp, Homo sapiens
ttcattggtacctgg

SEQ ID NO: 1428151 - DNA, 15 bp, Homo sapiens
tcattggtacctggt

SEQ ID NO: 1428152 - DNA, 15 bp, Homo sapiens
cattggtacctggta

SEQ ID NO: 1428153 - DNA, 15 bp, Homo sapiens
attggtacctggtac

SEQ ID NO: 1428154 - DNA, 15 bp, Homo sapiens
ttggtacctggtact

SEQ ID NO: 1428155 - DNA, 15 bp, Homo sapiens
tggtacctggtactg

SEQ ID NO: 1428156 - DNA, 15 bp, Homo sapiens
ggtacctggtactga

SEQ ID NO: 1428157 - DNA, 15 bp, Homo sapiens
gtacctggtactgat

SEQ ID NO: 1428158 - DNA, 15 bp, Homo sapiens
tacctggtactgatt

SEQ ID NO: 1428159 - DNA, 15 bp, Homo sapiens
acctggtactgatta

SEQ ID NO: 1428160 - DNA, 15 bp, Homo sapiens
cctggtactgattat

SEQ ID NO: 1428161 - DNA, 15 bp, Homo sapiens
ctggtactgattatg

SEQ ID NO: 1428162 - DNA, 15 bp, Homo sapiens
tggtactgattatgg

SEQ ID NO: 1428163 - DNA, 15 bp, Homo sapiens
ggtactgattatggc

SEQ ID NO: 1428164 - DNA, 15 bp, Homo sapiens
gtactgattatggca

SEQ ID NO: 1428165 - DNA, 15 bp, Homo sapiens
tactgattatggcac

SEQ ID NO: 1428166 - DNA, 15 bp, Homo sapiens
actgattatggcact

SEQ ID NO: 1428167 - DNA, 15 bp, Homo sapiens
ctgattatggcactc

SEQ ID NO: 1428168 - DNA, 15 bp, Homo sapiens
tgattatggcactca

SEQ ID NO: 1428169 - DNA, 15 bp, Homo sapiens
gattatggcactcag

SEQ ID NO: 1428170 - DNA, 15 bp, Homo sapiens
attatggcactcagg

SEQ ID NO: 1428171 - DNA, 15 bp, Homo sapiens
ttatggcactcagga

SEQ ID NO: 1428172 - DNA, 15 bp, Homo sapiens
tatggcactcaggaa

SEQ ID NO: 1428173 - DNA, 15 bp, Homo sapiens
atggcactcaggaaa

SEQ ID NO: 1428174 - DNA, 15 bp, Homo sapiens
tggcactcaggaaag

SEQ ID NO: 1428175 - DNA, 15 bp, Homo sapiens
ggcactcaggaaagt

SEQ ID NO: 1428176 - DNA, 15 bp, Homo sapiens
gcactcaggaaagta

SEQ ID NO: 1428177 - DNA, 15 bp, Homo sapiens
cactcaggaaagtat

SEQ ID NO: 1428178 - DNA, 15 bp, Homo sapiens
actcaggaaagtatc

SEQ ID NO: 1428179 - DNA, 15 bp, Homo sapiens
ctcaggaaagtatct

SEQ ID NO: 1428180 - DNA, 15 bp, Homo sapiens
tcaggaaagtatctc

SEQ ID NO: 1428181 - DNA, 15 bp, Homo sapiens
caggaaagtatctcg

SEQ ID NO: 1428182 - DNA, 15 bp, Homo sapiens
aggaaagtatctcgt

SEQ ID NO: 1428183 - DNA, 15 bp, Homo sapiens
ggaaagtatctcgtt

SEQ ID NO: 1428184 - DNA, 15 bp, Homo sapiens
gaaagtatctcgtta

SEQ ID NO: 1428185 - DNA, 15 bp, Homo sapiens
aaagtatctcgttac

SEQ ID NO: 1428186 - DNA, 15 bp, Homo sapiens
aagtatctcgttact

SEQ ID NO: 1428187 - DNA, 15 bp, Homo sapiens
agtatctcgttactg

SEQ ID NO: 1428188 - DNA, 15 bp, Homo sapiens
gtatctcgttactgg

SEQ ID NO: 1428189 - DNA, 15 bp, Homo sapiens
tatctcgttactgga

SEQ ID NO: 1428190 - DNA, 15 bp, Homo sapiens
atctcgttactggaa

SEQ ID NO: 1428191 - DNA, 15 bp, Homo sapiens
tctcgttactggaag

SEQ ID NO: 1428192 - DNA, 15 bp, Homo sapiens
ctcgttactggaagt

SEQ ID NO: 1428193 - DNA, 15 bp, Homo sapiens
tcgttactggaagtt

SEQ ID NO: 1428194 - DNA, 15 bp, Homo sapiens
cgttactggaagtta

SEQ ID NO: 1428195 - DNA, 15 bp, Homo sapiens
gttactggaagttag

SEQ ID NO: 1428196 - DNA, 15 bp, Homo sapiens
ttactggaagttagc

SEQ ID NO: 1428197 - DNA, 15 bp, Homo sapiens
tactggaagttagca

SEQ ID NO: 1428198 - DNA, 15 bp, Homo sapiens
actggaagttagcac

SEQ ID NO: 1428199 - DNA, 15 bp, Homo sapiens
ctggaagttagcact

SEQ ID NO: 1428200 - DNA, 15 bp, Homo sapiens
tggaagttagcactc

SEQ ID NO: 1428201 - DNA, 15 bp, Homo sapiens
ggaagttagcactct

SEQ ID NO: 1428202 - DNA, 15 bp, Homo sapiens
gaagttagcactcta

SEQ ID NO: 1428203 - DNA, 15 bp, Homo sapiens
aagttagcactctag

SEQ ID NO: 1428204 - DNA, 15 bp, Homo sapiens
agttagcactctagg

SEQ ID NO: 1428205 - DNA, 15 bp, Homo sapiens
gttagcactctaggg

SEQ ID NO: 1428206 - DNA, 15 bp, Homo sapiens
ttagcactctaggga

SEQ ID NO: 1428207 - DNA, 15 bp, Homo sapiens
tagcactctagggaa

SEQ ID NO: 1428208 - DNA, 15 bp, Homo sapiens
agcactctagggaag

SEQ ID NO: 1428209 - DNA, 15 bp, Homo sapiens
gcactctagggaagg

SEQ ID NO: 1428210 - DNA, 15 bp, Homo sapiens
cactctagggaaggc

SEQ ID NO: 1428211 - DNA, 15 bp, Homo sapiens
actctagggaaggca

SEQ ID NO: 1428212 - DNA, 15 bp, Homo sapiens
ctctagggaaggcaa

SEQ ID NO: 1428213 - DNA, 15 bp, Homo sapiens
tctagggaaggcaaa

SEQ ID NO: 1428214 - DNA, 15 bp, Homo sapiens
ctagggaaggcaaaa

SEQ ID NO: 1428215 - DNA, 15 bp, Homo sapiens
tagggaaggcaaaaa

SEQ ID NO: 1428216 - DNA, 15 bp, Homo sapiens
agggaaggcaaaaac

SEQ ID NO: 1428217 - DNA, 15 bp, Homo sapiens
gggaaggcaaaaaca

SEQ ID NO: 1428218 - DNA, 15 bp, Homo sapiens
ggaaggcaaaaacag

SEQ ID NO: 1428219 - DNA, 15 bp, Homo sapiens
gaaggcaaaaacaga

SEQ ID NO: 1428220 - DNA, 15 bp, Homo sapiens
aaggcaaaaacagaa

SEQ ID NO: 1428221 - DNA, 15 bp, Homo sapiens
aggcaaaaacagaac

SEQ ID NO: 1428222 - DNA, 15 bp, Homo sapiens
ggcaaaaacagaacc

SEQ ID NO: 1428223 - DNA, 15 bp, Homo sapiens
gcaaaaacagaacca

SEQ ID NO: 1428224 - DNA, 15 bp, Homo sapiens
caaaaacagaaccaa

SEQ ID NO: 1428225 - DNA, 15 bp, Homo sapiens
aaaaacagaaccaaa

SEQ ID NO: 1428226 - DNA, 15 bp, Homo sapiens
aaaacagaaccaaat

SEQ ID NO: 1428227 - DNA, 15 bp, Homo sapiens
aaacagaaccaaata

SEQ ID NO: 1428228 - DNA, 15 bp, Homo sapiens
aacagaaccaaataa

SEQ ID NO: 1428229 - DNA, 15 bp, Homo sapiens
acagaaccaaataaa

SEQ ID NO: 1428230 - DNA, 15 bp, Homo sapiens
cagaaccaaataaat

SEQ ID NO: 1428231 - DNA, 15 bp, Homo sapiens
agaaccaaataaatg

SEQ ID NO: 1428232 - DNA, 15 bp, Homo sapiens
gaaccaaataaatgt

SEQ ID NO: 1428233 - DNA, 15 bp, Homo sapiens
aaccaaataaatgtg

SEQ ID NO: 1428234 - DNA, 15 bp, Homo sapiens
accaaataaatgtgt

SEQ ID NO: 1428235 - DNA, 15 bp, Homo sapiens
ccaaataaatgtgtg

SEQ ID NO: 1428236 - DNA, 15 bp, Homo sapiens
caaataaatgtgtga

SEQ ID NO: 1428237 - DNA, 15 bp, Homo sapiens
aaataaatgtgtgag

SEQ ID NO: 1428238 - DNA, 15 bp, Homo sapiens
aataaatgtgtgagt

SEQ ID NO: 1428239 - DNA, 15 bp, Homo sapiens
ataaatgtgtgagtc

SEQ ID NO: 1428240 - DNA, 15 bp, Homo sapiens
taaatgtgtgagtca

SEQ ID NO: 1428241 - DNA, 15 bp, Homo sapiens
aaatgtgtgagtcag

SEQ ID NO: 1428242 - DNA, 15 bp, Homo sapiens
aatgtgtgagtcagt

SEQ ID NO: 1428243 - DNA, 15 bp, Homo sapiens
atgtgtgagtcagtg

SEQ ID NO: 1428244 - DNA, 15 bp, Homo sapiens
tgtgtgagtcagtgt

SEQ ID NO: 1428245 - DNA, 15 bp, Homo sapiens
gtgtgagtcagtgtg

SEQ ID NO: 1428246 - DNA, 15 bp, Homo sapiens
tgtgagtcagtgtgc

SEQ ID NO: 1428247 - DNA, 15 bp, Homo sapiens
gtgagtcagtgtgca

SEQ ID NO: 1428248 - DNA, 15 bp, Homo sapiens
tgagtcagtgtgcag

SEQ ID NO: 1428249 - DNA, 15 bp, Homo sapiens
gagtcagtgtgcagc

SEQ ID NO: 1428250 - DNA, 15 bp, Homo sapiens
gtcagtgtgcagcat

SEQ ID NO: 1428251 - DNA, 15 bp, Homo sapiens
tcagtgtgcagcatt

SEQ ID NO: 1428252 - DNA, 15 bp, Homo sapiens
cagtgtgcagcattt

SEQ ID NO: 1428253 - DNA, 15 bp, Homo sapiens
agtgtgcagcatttg

SEQ ID NO: 1428254 - DNA, 15 bp, Homo sapiens
gtgtgcagcatttga

SEQ ID NO: 1428255 - DNA, 15 bp, Homo sapiens
tgtgcagcatttgaa

SEQ ID NO: 1428256 - DNA, 15 bp, Homo sapiens
gtgcagcatttgaaa

SEQ ID NO: 1428257 - DNA, 15 bp, Homo sapiens
tgcagcatttgaaaa

SEQ ID NO: 1428258 - DNA, 15 bp, Homo sapiens
gcagcatttgaaaac

SEQ ID NO: 1428259 - DNA, 15 bp, Homo sapiens
cagcatttgaaaacc

SEQ ID NO: 1428260 - DNA, 15 bp, Homo sapiens
agcatttgaaaaccc

SEQ ID NO: 1428261 - DNA, 15 bp, Homo sapiens
gcatttgaaaacccc

SEQ ID NO: 1428262 - DNA, 15 bp, Homo sapiens
catttgaaaacccca

SEQ ID NO: 1428263 - DNA, 15 bp, Homo sapiens
atttgaaaaccccaa

SEQ ID NO: 1428264 - DNA, 15 bp, Homo sapiens
tttgaaaaccccaag

SEQ ID NO: 1428265 - DNA, 15 bp, Homo sapiens
ttgaaaaccccaagg

SEQ ID NO: 1428266 - DNA, 15 bp, Homo sapiens
tgaaaaccccaaggg

SEQ ID NO: 1428267 - DNA, 15 bp, Homo sapiens
gaaaaccccaaggga

SEQ ID NO: 1428268 - DNA, 15 bp, Homo sapiens
aaaaccccaagggac

SEQ ID NO: 1428269 - DNA, 15 bp, Homo sapiens
aaaccccaagggact

SEQ ID NO: 1428270 - DNA, 15 bp, Homo sapiens
aaccccaagggacta

SEQ ID NO: 1428271 - DNA, 15 bp, Homo sapiens
accccaagggactaa

SEQ ID NO: 1428272 - DNA, 15 bp, Homo sapiens
ccccaagggactaat

SEQ ID NO: 1428273 - DNA, 15 bp, Homo sapiens
cccaagggactaatt

SEQ ID NO: 1428274 - DNA, 15 bp, Homo sapiens
ccaagggactaattc

SEQ ID NO: 1428275 - DNA, 15 bp, Homo sapiens
caagggactaattca

SEQ ID NO: 1428276 - DNA, 15 bp, Homo sapiens
aagggactaattcat

SEQ ID NO: 1428277 - DNA, 15 bp, Homo sapiens
agggactaattcatg

SEQ ID NO: 1428278 - DNA, 15 bp, Homo sapiens
gggactaattcatgg

SEQ ID NO: 1428279 - DNA, 15 bp, Homo sapiens
ggactaattcatggt

SEQ ID NO: 1428280 - DNA, 15 bp, Homo sapiens
gactaattcatggtt

SEQ ID NO: 1428281 - DNA, 15 bp, Homo sapiens
actaattcatggttg

SEQ ID NO: 1428282 - DNA, 15 bp, Homo sapiens
ctaattcatggttgt

SEQ ID NO: 1428283 - DNA, 15 bp, Homo sapiens
taattcatggttgtt

SEQ ID NO: 1428284 - DNA, 15 bp, Homo sapiens
aattcatggttgttc

SEQ ID NO: 1428285 - DNA, 15 bp, Homo sapiens
attcatggttgttcc

SEQ ID NO: 1428286 - DNA, 15 bp, Homo sapiens
ttcatggttgttcca

SEQ ID NO: 1428287 - DNA, 15 bp, Homo sapiens
tcatggttgttccaa

SEQ ID NO: 1428288 - DNA, 15 bp, Homo sapiens
catggttgttccaaa

SEQ ID NO: 1428289 - DNA, 15 bp, Homo sapiens
atggttgttccaaag

SEQ ID NO: 1428290 - DNA, 15 bp, Homo sapiens
tggttgttccaaaga

SEQ ID NO: 1428291 - DNA, 15 bp, Homo sapiens
ggttgttccaaagat

SEQ ID NO: 1428292 - DNA, 15 bp, Homo sapiens
gttgttccaaagata

SEQ ID NO: 1428293 - DNA, 15 bp, Homo sapiens
ttgttccaaagataa

SEQ ID NO: 1428294 - DNA, 15 bp, Homo sapiens
tgttccaaagataat

SEQ ID NO: 1428295 - DNA, 15 bp, Homo sapiens
gttccaaagataata

SEQ ID NO: 1428296 - DNA, 15 bp, Homo sapiens
ttccaaagataatag

SEQ ID NO: 1428297 - DNA, 15 bp, Homo sapiens
tccaaagataataga

SEQ ID NO: 1428298 - DNA, 15 bp, Homo sapiens
ccaaagataatagaa

SEQ ID NO: 1428299 - DNA, 15 bp, Homo sapiens
caaagataatagaaa

SEQ ID NO: 1428300 - DNA, 15 bp, Homo sapiens
aaagataatagaaat

SEQ ID NO: 1428301 - DNA, 15 bp, Homo sapiens
aagataatagaaatg

SEQ ID NO: 1428302 - DNA, 15 bp, Homo sapiens
agataatagaaatga

SEQ ID NO: 1428303 - DNA, 15 bp, Homo sapiens
gataatagaaatgac

SEQ ID NO: 1428304 - DNA, 15 bp, Homo sapiens
ataatagaaatgaca

SEQ ID NO: 1428305 - DNA, 15 bp, Homo sapiens
taatagaaatgacac

SEQ ID NO: 1428306 - DNA, 15 bp, Homo sapiens
aatagaaatgacaca

SEQ ID NO: 1428307 - DNA, 15 bp, Homo sapiens
atagaaatgacacag

SEQ ID NO: 1428308 - DNA, 15 bp, Homo sapiens
tagaaatgacacaga

SEQ ID NO: 1428309 - DNA, 15 bp, Homo sapiens
agaaatgacacagaa

SEQ ID NO: 1428310 - DNA, 15 bp, Homo sapiens
gaaatgacacagaag

SEQ ID NO: 1428311 - DNA, 15 bp, Homo sapiens
aaatgacacagaagg

SEQ ID NO: 1428312 - DNA, 15 bp, Homo sapiens
aatgacacagaaggc

SEQ ID NO: 1428313 - DNA, 15 bp, Homo sapiens
atgacacagaaggct

SEQ ID NO: 1428314 - DNA, 15 bp, Homo sapiens
tgacacagaaggctt

SEQ ID NO: 1428315 - DNA, 15 bp, Homo sapiens
gacacagaaggcttt

SEQ ID NO: 1428316 - DNA, 15 bp, Homo sapiens
acacagaaggcttta

SEQ ID NO: 1428317 - DNA, 15 bp, Homo sapiens
cacagaaggctttaa

SEQ ID NO: 1428318 - DNA, 15 bp, Homo sapiens
acagaaggctttaag

SEQ ID NO: 1428319 - DNA, 15 bp, Homo sapiens
cagaaggctttaagt

SEQ ID NO: 1428320 - DNA, 15 bp, Homo sapiens
agaaggctttaagta

SEQ ID NO: 1428321 - DNA, 15 bp, Homo sapiens
gaaggctttaagtat

SEQ ID NO: 1428322 - DNA, 15 bp, Homo sapiens
aaggctttaagtatc

SEQ ID NO: 1428323 - DNA, 15 bp, Homo sapiens
aggctttaagtatcc

SEQ ID NO: 1428324 - DNA, 15 bp, Homo sapiens
ggctttaagtatcca

SEQ ID NO: 1428325 - DNA, 15 bp, Homo sapiens
gctttaagtatccat

SEQ ID NO: 1428326 - DNA, 15 bp, Homo sapiens
ctttaagtatccatt

SEQ ID NO: 1428327 - DNA, 15 bp, Homo sapiens
tttaagtatccattg

SEQ ID NO: 1428328 - DNA, 15 bp, Homo sapiens
ttaagtatccattgg

SEQ ID NO: 1428329 - DNA, 15 bp, Homo sapiens
taagtatccattggg

SEQ ID NO: 1428330 - DNA, 15 bp, Homo sapiens
aagtatccattggga

SEQ ID NO: 1428331 - DNA, 15 bp, Homo sapiens
agtatccattgggac

SEQ ID NO: 1428332 - DNA, 15 bp, Homo sapiens
gtatccattgggaca

SEQ ID NO: 1428333 - DNA, 15 bp, Homo sapiens
tatccattgggacat

SEQ ID NO: 1428334 - DNA, 15 bp, Homo sapiens
atccattgggacatg

SEQ ID NO: 1428335 - DNA, 15 bp, Homo sapiens
tccattgggacatga

SEQ ID NO: 1428336 - DNA, 15 bp, Homo sapiens
ccattgggacatgaa

SEQ ID NO: 1428337 - DNA, 15 bp, Homo sapiens
cattgggacatgaag

SEQ ID NO: 1428338 - DNA, 15 bp, Homo sapiens
attgggacatgaagt

SEQ ID NO: 1428339 - DNA, 15 bp, Homo sapiens
ttgggacatgaagtt

SEQ ID NO: 1428340 - DNA, 15 bp, Homo sapiens
tgggacatgaagtta

SEQ ID NO: 1428341 - DNA, 15 bp, Homo sapiens
gggacatgaagttaa

SEQ ID NO: 1428342 - DNA, 15 bp, Homo sapiens
ggacatgaagttaac

SEQ ID NO: 1428343 - DNA, 15 bp, Homo sapiens
gacatgaagttaacc

SEQ ID NO: 1428344 - DNA, 15 bp, Homo sapiens
acatgaagttaacca

SEQ ID NO: 1428345 - DNA, 15 bp, Homo sapiens
catgaagttaaccac

SEQ ID NO: 1428346 - DNA, 15 bp, Homo sapiens
atgaagttaaccaca

SEQ ID NO: 1428347 - DNA, 15 bp, Homo sapiens
tgaagttaaccacag

SEQ ID NO: 1428348 - DNA, 15 bp, Homo sapiens
gaagttaaccacagt

SEQ ID NO: 1428349 - DNA, 15 bp, Homo sapiens
aagttaaccacagtc

SEQ ID NO: 1428350 - DNA, 15 bp, Homo sapiens
agttaaccacagtcg

SEQ ID NO: 1428351 - DNA, 15 bp, Homo sapiens
gttaaccacagtcgg

SEQ ID NO: 1428352 - DNA, 15 bp, Homo sapiens
ttaaccacagtcggg

SEQ ID NO: 1428353 - DNA, 15 bp, Homo sapiens
taaccacagtcggga

SEQ ID NO: 1428354 - DNA, 15 bp, Homo sapiens
aaccacagtcgggaa

SEQ ID NO: 1428355 - DNA, 15 bp, Homo sapiens
accacagtcgggaaa

SEQ ID NO: 1428356 - DNA, 15 bp, Homo sapiens
ccacagtcgggaaac

SEQ ID NO: 1428357 - DNA, 15 bp, Homo sapiens
cacagtcgggaaaca

SEQ ID NO: 1428358 - DNA, 15 bp, Homo sapiens
acagtcgggaaacaa

SEQ ID NO: 1428359 - DNA, 15 bp, Homo sapiens
cagtcgggaaacaag

SEQ ID NO: 1428360 - DNA, 15 bp, Homo sapiens
gtcgggaaacaagca

SEQ ID NO: 1428361 - DNA, 15 bp, Homo sapiens
tcgggaaacaagcat

SEQ ID NO: 1428362 - DNA, 15 bp, Homo sapiens
cgggaaacaagcata

SEQ ID NO: 1428363 - DNA, 15 bp, Homo sapiens
gggaaacaagcatag

SEQ ID NO: 1428364 - DNA, 15 bp, Homo sapiens
ggaaacaagcataga

SEQ ID NO: 1428365 - DNA, 15 bp, Homo sapiens
gaaacaagcatagaa

SEQ ID NO: 1428366 - DNA, 15 bp, Homo sapiens
aaacaagcatagaaa

SEQ ID NO: 1428367 - DNA, 15 bp, Homo sapiens
aacaagcatagaaat

SEQ ID NO: 1428368 - DNA, 15 bp, Homo sapiens
acaagcatagaaatg

SEQ ID NO: 1428369 - DNA, 15 bp, Homo sapiens
caagcatagaaatgg

SEQ ID NO: 1428370 - DNA, 15 bp, Homo sapiens
aagcatagaaatgga

SEQ ID NO: 1428371 - DNA, 15 bp, Homo sapiens
agcatagaaatggaa

SEQ ID NO: 1428372 - DNA, 15 bp, Homo sapiens
gcatagaaatggaag

SEQ ID NO: 1428373 - DNA, 15 bp, Homo sapiens
catagaaatggaaga

SEQ ID NO: 1428374 - DNA, 15 bp, Homo sapiens
atagaaatggaagaa

SEQ ID NO: 1428375 - DNA, 15 bp, Homo sapiens
tagaaatggaagaaa

SEQ ID NO: 1428376 - DNA, 15 bp, Homo sapiens
agaaatggaagaaag

SEQ ID NO: 1428377 - DNA, 15 bp, Homo sapiens
gaaatggaagaaagt

SEQ ID NO: 1428378 - DNA, 15 bp, Homo sapiens
aaatggaagaaagtg

SEQ ID NO: 1428379 - DNA, 15 bp, Homo sapiens
aatggaagaaagtga

SEQ ID NO: 1428380 - DNA, 15 bp, Homo sapiens
atggaagaaagtgaa

SEQ ID NO: 1428381 - DNA, 15 bp, Homo sapiens
tggaagaaagtgaac

SEQ ID NO: 1428382 - DNA, 15 bp, Homo sapiens
ggaagaaagtgaact

SEQ ID NO: 1428383 - DNA, 15 bp, Homo sapiens
gaagaaagtgaactt

SEQ ID NO: 1428384 - DNA, 15 bp, Homo sapiens
aagaaagtgaacttg

SEQ ID NO: 1428385 - DNA, 15 bp, Homo sapiens
agaaagtgaacttga

SEQ ID NO: 1428386 - DNA, 15 bp, Homo sapiens
gaaagtgaacttgat

SEQ ID NO: 1428387 - DNA, 15 bp, Homo sapiens
aaagtgaacttgatg

SEQ ID NO: 1428388 - DNA, 15 bp, Homo sapiens
aagtgaacttgatgc

SEQ ID NO: 1428389 - DNA, 15 bp, Homo sapiens
agtgaacttgatgct

SEQ ID NO: 1428390 - DNA, 15 bp, Homo sapiens
gtgaacttgatgctc

SEQ ID NO: 1428391 - DNA, 15 bp, Homo sapiens
tgaacttgatgctca

SEQ ID NO: 1428392 - DNA, 15 bp, Homo sapiens
gaacttgatgctcag

SEQ ID NO: 1428393 - DNA, 15 bp, Homo sapiens
aacttgatgctcagt

SEQ ID NO: 1428394 - DNA, 15 bp, Homo sapiens
acttgatgctcagta

SEQ ID NO: 1428395 - DNA, 15 bp, Homo sapiens
cttgatgctcagtat

SEQ ID NO: 1428396 - DNA, 15 bp, Homo sapiens
ttgatgctcagtatt

SEQ ID NO: 1428397 - DNA, 15 bp, Homo sapiens
tgatgctcagtattt

SEQ ID NO: 1428398 - DNA, 15 bp, Homo sapiens
gatgctcagtatttg

SEQ ID NO: 1428399 - DNA, 15 bp, Homo sapiens
atgctcagtatttgc

SEQ ID NO: 1428400 - DNA, 15 bp, Homo sapiens
tgctcagtatttgca

SEQ ID NO: 1428401 - DNA, 15 bp, Homo sapiens
gctcagtatttgcag

SEQ ID NO: 1428402 - DNA, 15 bp, Homo sapiens
ctcagtatttgcaga

SEQ ID NO: 1428403 - DNA, 15 bp, Homo sapiens
tcagtatttgcagaa

SEQ ID NO: 1428404 - DNA, 15 bp, Homo sapiens
cagtatttgcagaat

SEQ ID NO: 1428405 - DNA, 15 bp, Homo sapiens
agtatttgcagaata

SEQ ID NO: 1428406 - DNA, 15 bp, Homo sapiens
gtatttgcagaatac

SEQ ID NO: 1428407 - DNA, 15 bp, Homo sapiens
tatttgcagaataca

SEQ ID NO: 1428408 - DNA, 15 bp, Homo sapiens
atttgcagaatacat

SEQ ID NO: 1428409 - DNA, 15 bp, Homo sapiens
tttgcagaatacatt

SEQ ID NO: 1428410 - DNA, 15 bp, Homo sapiens
ttgcagaatacattc

SEQ ID NO: 1428411 - DNA, 15 bp, Homo sapiens
tgcagaatacattca

SEQ ID NO: 1428412 - DNA, 15 bp, Homo sapiens
gcagaatacattcaa

SEQ ID NO: 1428413 - DNA, 15 bp, Homo sapiens
cagaatacattcaag

SEQ ID NO: 1428414 - DNA, 15 bp, Homo sapiens
agaatacattcaagg

SEQ ID NO: 1428415 - DNA, 15 bp, Homo sapiens
gaatacattcaaggt

SEQ ID NO: 1428416 - DNA, 15 bp, Homo sapiens
aatacattcaaggtt

SEQ ID NO: 1428417 - DNA, 15 bp, Homo sapiens
atacattcaaggttt

SEQ ID NO: 1428418 - DNA, 15 bp, Homo sapiens
tacattcaaggtttc

SEQ ID NO: 1428419 - DNA, 15 bp, Homo sapiens
acattcaaggtttca

SEQ ID NO: 1428420 - DNA, 15 bp, Homo sapiens
cattcaaggtttcaa

SEQ ID NO: 1428421 - DNA, 15 bp, Homo sapiens
attcaaggtttcaaa

SEQ ID NO: 1428422 - DNA, 15 bp, Homo sapiens
ttcaaggtttcaaag

SEQ ID NO: 1428423 - DNA, 15 bp, Homo sapiens
tcaaggtttcaaagc

SEQ ID NO: 1428424 - DNA, 15 bp, Homo sapiens
caaggtttcaaagcg

SEQ ID NO: 1428425 - DNA, 15 bp, Homo sapiens
aaggtttcaaagcgc

SEQ ID NO: 1428426 - DNA, 15 bp, Homo sapiens
aggtttcaaagcgcc

SEQ ID NO: 1428427 - DNA, 15 bp, Homo sapiens
ggtttcaaagcgcca

SEQ ID NO: 1428428 - DNA, 15 bp, Homo sapiens
gtttcaaagcgccag

SEQ ID NO: 1428429 - DNA, 15 bp, Homo sapiens
tttcaaagcgccagt

SEQ ID NO: 1428430 - DNA, 15 bp, Homo sapiens
ttcaaagcgccagtc

SEQ ID NO: 1428431 - DNA, 15 bp, Homo sapiens
tcaaagcgccagtca

SEQ ID NO: 1428432 - DNA, 15 bp, Homo sapiens
caaagcgccagtcat

SEQ ID NO: 1428433 - DNA, 15 bp, Homo sapiens
aaagcgccagtcatt

SEQ ID NO: 1428434 - DNA, 15 bp, Homo sapiens
aagcgccagtcattt

SEQ ID NO: 1428435 - DNA, 15 bp, Homo sapiens
agcgccagtcatttg

SEQ ID NO: 1428436 - DNA, 15 bp, Homo sapiens
gcgccagtcatttgc

SEQ ID NO: 1428437 - DNA, 15 bp, Homo sapiens
cgccagtcatttgct

SEQ ID NO: 1428438 - DNA, 15 bp, Homo sapiens
gccagtcatttgctc

SEQ ID NO: 1428439 - DNA, 15 bp, Homo sapiens
ccagtcatttgctcc

SEQ ID NO: 1428440 - DNA, 15 bp, Homo sapiens
cagtcatttgctccg

SEQ ID NO: 1428441 - DNA, 15 bp, Homo sapiens
agtcatttgctccgt

SEQ ID NO: 1428442 - DNA, 15 bp, Homo sapiens
gtcatttgctccgtt

SEQ ID NO: 1428443 - DNA, 15 bp, Homo sapiens
tcatttgctccgttt

SEQ ID NO: 1428444 - DNA, 15 bp, Homo sapiens
catttgctccgtttt

SEQ ID NO: 1428445 - DNA, 15 bp, Homo sapiens
atttgctccgttttc

SEQ ID NO: 1428446 - DNA, 15 bp, Homo sapiens
tttgctccgttttca

SEQ ID NO: 1428447 - DNA, 15 bp, Homo sapiens
ttgctccgttttcaa

SEQ ID NO: 1428448 - DNA, 15 bp, Homo sapiens
tgctccgttttcaaa

SEQ ID NO: 1428449 - DNA, 15 bp, Homo sapiens
gctccgttttcaaat

SEQ ID NO: 1428450 - DNA, 15 bp, Homo sapiens
ctccgttttcaaatc

SEQ ID NO: 1428451 - DNA, 15 bp, Homo sapiens
tccgttttcaaatcc

SEQ ID NO: 1428452 - DNA, 15 bp, Homo sapiens
ccgttttcaaatcca

SEQ ID NO: 1428453 - DNA, 15 bp, Homo sapiens
cgttttcaaatccag

SEQ ID NO: 1428454 - DNA, 15 bp, Homo sapiens
gttttcaaatccagg

SEQ ID NO: 1428455 - DNA, 15 bp, Homo sapiens
ttttcaaatccagga

SEQ ID NO: 1428456 - DNA, 15 bp, Homo sapiens
tttcaaatccaggaa

SEQ ID NO: 1428457 - DNA, 15 bp, Homo sapiens
ttcaaatccaggaaa

SEQ ID NO: 1428458 - DNA, 15 bp, Homo sapiens
tcaaatccaggaaat

SEQ ID NO: 1428459 - DNA, 15 bp, Homo sapiens
caaatccaggaaatg

SEQ ID NO: 1428460 - DNA, 15 bp, Homo sapiens
aaatccaggaaatgc

SEQ ID NO: 1428461 - DNA, 15 bp, Homo sapiens
aatccaggaaatgca

SEQ ID NO: 1428462 - DNA, 15 bp, Homo sapiens
atccaggaaatgcag

SEQ ID NO: 1428463 - DNA, 15 bp, Homo sapiens
tccaggaaatgcaga

SEQ ID NO: 1428464 - DNA, 15 bp, Homo sapiens
ccaggaaatgcagaa

SEQ ID NO: 1428465 - DNA, 15 bp, Homo sapiens
caggaaatgcagaag

SEQ ID NO: 1428466 - DNA, 15 bp, Homo sapiens
aggaaatgcagaaga

SEQ ID NO: 1428467 - DNA, 15 bp, Homo sapiens
ggaaatgcagaagag

SEQ ID NO: 1428468 - DNA, 15 bp, Homo sapiens
gaaatgcagaagagg

SEQ ID NO: 1428469 - DNA, 15 bp, Homo sapiens
aaatgcagaagagga

SEQ ID NO: 1428470 - DNA, 15 bp, Homo sapiens
aatgcagaagaggaa

SEQ ID NO: 1428471 - DNA, 15 bp, Homo sapiens
atgcagaagaggaat

SEQ ID NO: 1428472 - DNA, 15 bp, Homo sapiens
tgcagaagaggaatg

SEQ ID NO: 1428473 - DNA, 15 bp, Homo sapiens
gcagaagaggaatgt

SEQ ID NO: 1428474 - DNA, 15 bp, Homo sapiens
cagaagaggaatgtg

SEQ ID NO: 1428475 - DNA, 15 bp, Homo sapiens
agaagaggaatgtgc

SEQ ID NO: 1428476 - DNA, 15 bp, Homo sapiens
gaagaggaatgtgca

SEQ ID NO: 1428477 - DNA, 15 bp, Homo sapiens
aagaggaatgtgcaa

SEQ ID NO: 1428478 - DNA, 15 bp, Homo sapiens
agaggaatgtgcaac

SEQ ID NO: 1428479 - DNA, 15 bp, Homo sapiens
gaggaatgtgcaaca

SEQ ID NO: 1428480 - DNA, 15 bp, Homo sapiens
aggaatgtgcaacat

SEQ ID NO: 1428481 - DNA, 15 bp, Homo sapiens
ggaatgtgcaacatt

SEQ ID NO: 1428482 - DNA, 15 bp, Homo sapiens
gaatgtgcaacattc

SEQ ID NO: 1428483 - DNA, 15 bp, Homo sapiens
aatgtgcaacattct

SEQ ID NO: 1428484 - DNA, 15 bp, Homo sapiens
atgtgcaacattctc

SEQ ID NO: 1428485 - DNA, 15 bp, Homo sapiens
tgtgcaacattctct

SEQ ID NO: 1428486 - DNA, 15 bp, Homo sapiens
gtgcaacattctctg

SEQ ID NO: 1428487 - DNA, 15 bp, Homo sapiens
tgcaacattctctgc

SEQ ID NO: 1428488 - DNA, 15 bp, Homo sapiens
gcaacattctctgcc

SEQ ID NO: 1428489 - DNA, 15 bp, Homo sapiens
caacattctctgccc

SEQ ID NO: 1428490 - DNA, 15 bp, Homo sapiens
aacattctctgccca

SEQ ID NO: 1428491 - DNA, 15 bp, Homo sapiens
acattctctgcccac

SEQ ID NO: 1428492 - DNA, 15 bp, Homo sapiens
cattctctgcccact

SEQ ID NO: 1428493 - DNA, 15 bp, Homo sapiens
attctctgcccactc

SEQ ID NO: 1428494 - DNA, 15 bp, Homo sapiens
ttctctgcccactct

SEQ ID NO: 1428495 - DNA, 15 bp, Homo sapiens
tctctgcccactctg

SEQ ID NO: 1428496 - DNA, 15 bp, Homo sapiens
ctctgcccactctgg

SEQ ID NO: 1428497 - DNA, 15 bp, Homo sapiens
tctgcccactctggg

SEQ ID NO: 1428498 - DNA, 15 bp, Homo sapiens
ctgcccactctgggt

SEQ ID NO: 1428499 - DNA, 15 bp, Homo sapiens
tgcccactctgggtc

SEQ ID NO: 1428500 - DNA, 15 bp, Homo sapiens
gcccactctgggtcc

SEQ ID NO: 1428501 - DNA, 15 bp, Homo sapiens
cccactctgggtcct

SEQ ID NO: 1428502 - DNA, 15 bp, Homo sapiens
ccactctgggtcctt

SEQ ID NO: 1428503 - DNA, 15 bp, Homo sapiens
cactctgggtcctta

SEQ ID NO: 1428504 - DNA, 15 bp, Homo sapiens
actctgggtccttaa

SEQ ID NO: 1428505 - DNA, 15 bp, Homo sapiens
ctctgggtccttaaa

SEQ ID NO: 1428506 - DNA, 15 bp, Homo sapiens
tctgggtccttaaag

SEQ ID NO: 1428507 - DNA, 15 bp, Homo sapiens
ctgggtccttaaaga

SEQ ID NO: 1428508 - DNA, 15 bp, Homo sapiens
tgggtccttaaagaa

SEQ ID NO: 1428509 - DNA, 15 bp, Homo sapiens
gggtccttaaagaaa

SEQ ID NO: 1428510 - DNA, 15 bp, Homo sapiens
ggtccttaaagaaac

SEQ ID NO: 1428511 - DNA, 15 bp, Homo sapiens
gtccttaaagaaaca

SEQ ID NO: 1428512 - DNA, 15 bp, Homo sapiens
tccttaaagaaacaa

SEQ ID NO: 1428513 - DNA, 15 bp, Homo sapiens
ccttaaagaaacaaa

SEQ ID NO: 1428514 - DNA, 15 bp, Homo sapiens
cttaaagaaacaaag

SEQ ID NO: 1428515 - DNA, 15 bp, Homo sapiens
taaagaaacaaagtc

SEQ ID NO: 1428516 - DNA, 15 bp, Homo sapiens
aaagaaacaaagtcc

SEQ ID NO: 1428517 - DNA, 15 bp, Homo sapiens
aagaaacaaagtcca

SEQ ID NO: 1428518 - DNA, 15 bp, Homo sapiens
agaaacaaagtccaa

SEQ ID NO: 1428519 - DNA, 15 bp, Homo sapiens
gaaacaaagtccaaa

SEQ ID NO: 1428520 - DNA, 15 bp, Homo sapiens
aaacaaagtccaaaa

SEQ ID NO: 1428521 - DNA, 15 bp, Homo sapiens
aacaaagtccaaaag

SEQ ID NO: 1428522 - DNA, 15 bp, Homo sapiens
acaaagtccaaaagt

SEQ ID NO: 1428523 - DNA, 15 bp, Homo sapiens
caaagtccaaaagtc

SEQ ID NO: 1428524 - DNA, 15 bp, Homo sapiens
aaagtccaaaagtca

SEQ ID NO: 1428525 - DNA, 15 bp, Homo sapiens
aagtccaaaagtcac

SEQ ID NO: 1428526 - DNA, 15 bp, Homo sapiens
agtccaaaagtcact

SEQ ID NO: 1428527 - DNA, 15 bp, Homo sapiens
gtccaaaagtcactt

SEQ ID NO: 1428528 - DNA, 15 bp, Homo sapiens
tccaaaagtcacttt

SEQ ID NO: 1428529 - DNA, 15 bp, Homo sapiens
ccaaaagtcactttt

SEQ ID NO: 1428530 - DNA, 15 bp, Homo sapiens
caaaagtcacttttg

SEQ ID NO: 1428531 - DNA, 15 bp, Homo sapiens
aaaagtcacttttga

SEQ ID NO: 1428532 - DNA, 15 bp, Homo sapiens
aaagtcacttttgaa

SEQ ID NO: 1428533 - DNA, 15 bp, Homo sapiens
aagtcacttttgaat

SEQ ID NO: 1428534 - DNA, 15 bp, Homo sapiens
agtcacttttgaatg

SEQ ID NO: 1428535 - DNA, 15 bp, Homo sapiens
gtcacttttgaatgt

SEQ ID NO: 1428536 - DNA, 15 bp, Homo sapiens
tcacttttgaatgtg

SEQ ID NO: 1428537 - DNA, 15 bp, Homo sapiens
cacttttgaatgtga

SEQ ID NO: 1428538 - DNA, 15 bp, Homo sapiens
acttttgaatgtgaa

SEQ ID NO: 1428539 - DNA, 15 bp, Homo sapiens
cttttgaatgtgaac

SEQ ID NO: 1428540 - DNA, 15 bp, Homo sapiens
ttttgaatgtgaaca

SEQ ID NO: 1428541 - DNA, 15 bp, Homo sapiens
tttgaatgtgaacaa

SEQ ID NO: 1428542 - DNA, 15 bp, Homo sapiens
ttgaatgtgaacaaa

SEQ ID NO: 1428543 - DNA, 15 bp, Homo sapiens
tgaatgtgaacaaaa

SEQ ID NO: 1428544 - DNA, 15 bp, Homo sapiens
gaatgtgaacaaaag

SEQ ID NO: 1428545 - DNA, 15 bp, Homo sapiens
aatgtgaacaaaagg

SEQ ID NO: 1428546 - DNA, 15 bp, Homo sapiens
atgtgaacaaaagga

SEQ ID NO: 1428547 - DNA, 15 bp, Homo sapiens
tgtgaacaaaaggaa

SEQ ID NO: 1428548 - DNA, 15 bp, Homo sapiens
gtgaacaaaaggaag

SEQ ID NO: 1428549 - DNA, 15 bp, Homo sapiens
tgaacaaaaggaaga

SEQ ID NO: 1428550 - DNA, 15 bp, Homo sapiens
gaacaaaaggaagaa

SEQ ID NO: 1428551 - DNA, 15 bp, Homo sapiens
aacaaaaggaagaaa

SEQ ID NO: 1428552 - DNA, 15 bp, Homo sapiens
acaaaaggaagaaaa

SEQ ID NO: 1428553 - DNA, 15 bp, Homo sapiens
caaaaggaagaaaat

SEQ ID NO: 1428554 - DNA, 15 bp, Homo sapiens
aaaaggaagaaaatc

SEQ ID NO: 1428555 - DNA, 15 bp, Homo sapiens
aaaggaagaaaatca

SEQ ID NO: 1428556 - DNA, 15 bp, Homo sapiens
aaggaagaaaatcaa

SEQ ID NO: 1428557 - DNA, 15 bp, Homo sapiens
aggaagaaaatcaag

SEQ ID NO: 1428558 - DNA, 15 bp, Homo sapiens
ggaagaaaatcaagg

SEQ ID NO: 1428559 - DNA, 15 bp, Homo sapiens
gaagaaaatcaagga

SEQ ID NO: 1428560 - DNA, 15 bp, Homo sapiens
aagaaaatcaaggaa

SEQ ID NO: 1428561 - DNA, 15 bp, Homo sapiens
agaaaatcaaggaaa

SEQ ID NO: 1428562 - DNA, 15 bp, Homo sapiens
gaaaatcaaggaaag

SEQ ID NO: 1428563 - DNA, 15 bp, Homo sapiens
aaaatcaaggaaaga

SEQ ID NO: 1428564 - DNA, 15 bp, Homo sapiens
aaatcaaggaaagaa

SEQ ID NO: 1428565 - DNA, 15 bp, Homo sapiens
aatcaaggaaagaat

SEQ ID NO: 1428566 - DNA, 15 bp, Homo sapiens
atcaaggaaagaatg

SEQ ID NO: 1428567 - DNA, 15 bp, Homo sapiens
tcaaggaaagaatga

SEQ ID NO: 1428568 - DNA, 15 bp, Homo sapiens
caaggaaagaatgag

SEQ ID NO: 1428569 - DNA, 15 bp, Homo sapiens
aaggaaagaatgagt

SEQ ID NO: 1428570 - DNA, 15 bp, Homo sapiens
aggaaagaatgagtc

SEQ ID NO: 1428571 - DNA, 15 bp, Homo sapiens
ggaaagaatgagtct

SEQ ID NO: 1428572 - DNA, 15 bp, Homo sapiens
gaaagaatgagtcta

SEQ ID NO: 1428573 - DNA, 15 bp, Homo sapiens
aaagaatgagtctaa

SEQ ID NO: 1428574 - DNA, 15 bp, Homo sapiens
aagaatgagtctaat

SEQ ID NO: 1428575 - DNA, 15 bp, Homo sapiens
agaatgagtctaata

SEQ ID NO: 1428576 - DNA, 15 bp, Homo sapiens
gaatgagtctaatat

SEQ ID NO: 1428577 - DNA, 15 bp, Homo sapiens
aatgagtctaatatc

SEQ ID NO: 1428578 - DNA, 15 bp, Homo sapiens
atgagtctaatatca

SEQ ID NO: 1428579 - DNA, 15 bp, Homo sapiens
tgagtctaatatcaa

SEQ ID NO: 1428580 - DNA, 15 bp, Homo sapiens
gagtctaatatcaag

SEQ ID NO: 1428581 - DNA, 15 bp, Homo sapiens
agtctaatatcaagc

SEQ ID NO: 1428582 - DNA, 15 bp, Homo sapiens
gtctaatatcaagcc

SEQ ID NO: 1428583 - DNA, 15 bp, Homo sapiens
tctaatatcaagcct

SEQ ID NO: 1428584 - DNA, 15 bp, Homo sapiens
ctaatatcaagcctg

SEQ ID NO: 1428585 - DNA, 15 bp, Homo sapiens
taatatcaagcctgt

SEQ ID NO: 1428586 - DNA, 15 bp, Homo sapiens
aatatcaagcctgta

SEQ ID NO: 1428587 - DNA, 15 bp, Homo sapiens
atatcaagcctgtac

SEQ ID NO: 1428588 - DNA, 15 bp, Homo sapiens
tatcaagcctgtaca

SEQ ID NO: 1428589 - DNA, 15 bp, Homo sapiens
atcaagcctgtacag

SEQ ID NO: 1428590 - DNA, 15 bp, Homo sapiens
tcaagcctgtacaga

SEQ ID NO: 1428591 - DNA, 15 bp, Homo sapiens
caagcctgtacagac

SEQ ID NO: 1428592 - DNA, 15 bp, Homo sapiens
aagcctgtacagaca

SEQ ID NO: 1428593 - DNA, 15 bp, Homo sapiens
agcctgtacagacag

SEQ ID NO: 1428594 - DNA, 15 bp, Homo sapiens
gcctgtacagacagt

SEQ ID NO: 1428595 - DNA, 15 bp, Homo sapiens
cctgtacagacagtt

SEQ ID NO: 1428596 - DNA, 15 bp, Homo sapiens
ctgtacagacagtta

SEQ ID NO: 1428597 - DNA, 15 bp, Homo sapiens
tgtacagacagttaa

SEQ ID NO: 1428598 - DNA, 15 bp, Homo sapiens
gtacagacagttaat

SEQ ID NO: 1428599 - DNA, 15 bp, Homo sapiens
tacagacagttaata

SEQ ID NO: 1428600 - DNA, 15 bp, Homo sapiens
acagacagttaatat

SEQ ID NO: 1428601 - DNA, 15 bp, Homo sapiens
cagacagttaatatc

SEQ ID NO: 1428602 - DNA, 15 bp, Homo sapiens
agacagttaatatca

SEQ ID NO: 1428603 - DNA, 15 bp, Homo sapiens
gacagttaatatcac

SEQ ID NO: 1428604 - DNA, 15 bp, Homo sapiens
acagttaatatcact

SEQ ID NO: 1428605 - DNA, 15 bp, Homo sapiens
cagttaatatcactg

SEQ ID NO: 1428606 - DNA, 15 bp, Homo sapiens
agttaatatcactgc

SEQ ID NO: 1428607 - DNA, 15 bp, Homo sapiens
gttaatatcactgca

SEQ ID NO: 1428608 - DNA, 15 bp, Homo sapiens
ttaatatcactgcag

SEQ ID NO: 1428609 - DNA, 15 bp, Homo sapiens
taatatcactgcagg

SEQ ID NO: 1428610 - DNA, 15 bp, Homo sapiens
aatatcactgcaggc

SEQ ID NO: 1428611 - DNA, 15 bp, Homo sapiens
atatcactgcaggct

SEQ ID NO: 1428612 - DNA, 15 bp, Homo sapiens
tatcactgcaggctt

SEQ ID NO: 1428613 - DNA, 15 bp, Homo sapiens
atcactgcaggcttt

SEQ ID NO: 1428614 - DNA, 15 bp, Homo sapiens
tcactgcaggctttc

SEQ ID NO: 1428615 - DNA, 15 bp, Homo sapiens
cactgcaggctttcc

SEQ ID NO: 1428616 - DNA, 15 bp, Homo sapiens
actgcaggctttcct

SEQ ID NO: 1428617 - DNA, 15 bp, Homo sapiens
ctgcaggctttcctg

SEQ ID NO: 1428618 - DNA, 15 bp, Homo sapiens
tgcaggctttcctgt

SEQ ID NO: 1428619 - DNA, 15 bp, Homo sapiens
gcaggctttcctgtg

SEQ ID NO: 1428620 - DNA, 15 bp, Homo sapiens
caggctttcctgtgg

SEQ ID NO: 1428621 - DNA, 15 bp, Homo sapiens
aggctttcctgtggt

SEQ ID NO: 1428622 - DNA, 15 bp, Homo sapiens
ggctttcctgtggtt

SEQ ID NO: 1428623 - DNA, 15 bp, Homo sapiens
gctttcctgtggttg

SEQ ID NO: 1428624 - DNA, 15 bp, Homo sapiens
ctttcctgtggttgg

SEQ ID NO: 1428625 - DNA, 15 bp, Homo sapiens
tttcctgtggttggt

SEQ ID NO: 1428626 - DNA, 15 bp, Homo sapiens
ttcctgtggttggtc

SEQ ID NO: 1428627 - DNA, 15 bp, Homo sapiens
tcctgtggttggtca

SEQ ID NO: 1428628 - DNA, 15 bp, Homo sapiens
cctgtggttggtcag

SEQ ID NO: 1428629 - DNA, 15 bp, Homo sapiens
ctgtggttggtcaga

SEQ ID NO: 1428630 - DNA, 15 bp, Homo sapiens
tgtggttggtcagaa

SEQ ID NO: 1428631 - DNA, 15 bp, Homo sapiens
gtggttggtcagaaa

SEQ ID NO: 1428632 - DNA, 15 bp, Homo sapiens
tggttggtcagaaag

SEQ ID NO: 1428633 - DNA, 15 bp, Homo sapiens
ggttggtcagaaaga

SEQ ID NO: 1428634 - DNA, 15 bp, Homo sapiens
gttggtcagaaagat

SEQ ID NO: 1428635 - DNA, 15 bp, Homo sapiens
ttggtcagaaagata

SEQ ID NO: 1428636 - DNA, 15 bp, Homo sapiens
tggtcagaaagataa

SEQ ID NO: 1428637 - DNA, 15 bp, Homo sapiens
ggtcagaaagataag

SEQ ID NO: 1428638 - DNA, 15 bp, Homo sapiens
gtcagaaagataagc

SEQ ID NO: 1428639 - DNA, 15 bp, Homo sapiens
tcagaaagataagcc

SEQ ID NO: 1428640 - DNA, 15 bp, Homo sapiens
cagaaagataagcca

SEQ ID NO: 1428641 - DNA, 15 bp, Homo sapiens
agaaagataagccag

SEQ ID NO: 1428642 - DNA, 15 bp, Homo sapiens
gaaagataagccagt

SEQ ID NO: 1428643 - DNA, 15 bp, Homo sapiens
aaagataagccagtt

SEQ ID NO: 1428644 - DNA, 15 bp, Homo sapiens
aagataagccagttg

SEQ ID NO: 1428645 - DNA, 15 bp, Homo sapiens
agataagccagttga

SEQ ID NO: 1428646 - DNA, 15 bp, Homo sapiens
gataagccagttgat

SEQ ID NO: 1428647 - DNA, 15 bp, Homo sapiens
ataagccagttgata

SEQ ID NO: 1428648 - DNA, 15 bp, Homo sapiens
taagccagttgataa

SEQ ID NO: 1428649 - DNA, 15 bp, Homo sapiens
aagccagttgataat

SEQ ID NO: 1428650 - DNA, 15 bp, Homo sapiens
agccagttgataatg

SEQ ID NO: 1428651 - DNA, 15 bp, Homo sapiens
gccagttgataatgc

SEQ ID NO: 1428652 - DNA, 15 bp, Homo sapiens
ccagttgataatgcc

SEQ ID NO: 1428653 - DNA, 15 bp, Homo sapiens
cagttgataatgcca

SEQ ID NO: 1428654 - DNA, 15 bp, Homo sapiens
agttgataatgccaa

SEQ ID NO: 1428655 - DNA, 15 bp, Homo sapiens
gttgataatgccaaa

SEQ ID NO: 1428656 - DNA, 15 bp, Homo sapiens
ttgataatgccaaat

SEQ ID NO: 1428657 - DNA, 15 bp, Homo sapiens
tgataatgccaaatg

SEQ ID NO: 1428658 - DNA, 15 bp, Homo sapiens
gataatgccaaatgt

SEQ ID NO: 1428659 - DNA, 15 bp, Homo sapiens
ataatgccaaatgta

SEQ ID NO: 1428660 - DNA, 15 bp, Homo sapiens
taatgccaaatgtag

SEQ ID NO: 1428661 - DNA, 15 bp, Homo sapiens
aatgccaaatgtagt

SEQ ID NO: 1428662 - DNA, 15 bp, Homo sapiens
atgccaaatgtagta

SEQ ID NO: 1428663 - DNA, 15 bp, Homo sapiens
tgccaaatgtagtat

SEQ ID NO: 1428664 - DNA, 15 bp, Homo sapiens
gccaaatgtagtatc

SEQ ID NO: 1428665 - DNA, 15 bp, Homo sapiens
ccaaatgtagtatca

SEQ ID NO: 1428666 - DNA, 15 bp, Homo sapiens
caaatgtagtatcaa

SEQ ID NO: 1428667 - DNA, 15 bp, Homo sapiens
aaatgtagtatcaaa

SEQ ID NO: 1428668 - DNA, 15 bp, Homo sapiens
aatgtagtatcaaag

SEQ ID NO: 1428669 - DNA, 15 bp, Homo sapiens
atgtagtatcaaagg

SEQ ID NO: 1428670 - DNA, 15 bp, Homo sapiens
tgtagtatcaaagga

SEQ ID NO: 1428671 - DNA, 15 bp, Homo sapiens
gtagtatcaaaggag

SEQ ID NO: 1428672 - DNA, 15 bp, Homo sapiens
tagtatcaaaggagg

SEQ ID NO: 1428673 - DNA, 15 bp, Homo sapiens
agtatcaaaggaggc

SEQ ID NO: 1428674 - DNA, 15 bp, Homo sapiens
gtatcaaaggaggct

SEQ ID NO: 1428675 - DNA, 15 bp, Homo sapiens
tatcaaaggaggctc

SEQ ID NO: 1428676 - DNA, 15 bp, Homo sapiens
atcaaaggaggctct

SEQ ID NO: 1428677 - DNA, 15 bp, Homo sapiens
tcaaaggaggctcta

SEQ ID NO: 1428678 - DNA, 15 bp, Homo sapiens
caaaggaggctctag

SEQ ID NO: 1428679 - DNA, 15 bp, Homo sapiens
aaaggaggctctagg

SEQ ID NO: 1428680 - DNA, 15 bp, Homo sapiens
aaggaggctctaggt

SEQ ID NO: 1428681 - DNA, 15 bp, Homo sapiens
aggaggctctaggtt

SEQ ID NO: 1428682 - DNA, 15 bp, Homo sapiens
ggaggctctaggttt

SEQ ID NO: 1428683 - DNA, 15 bp, Homo sapiens
gaggctctaggtttt

SEQ ID NO: 1428684 - DNA, 15 bp, Homo sapiens
aggctctaggttttg

SEQ ID NO: 1428685 - DNA, 15 bp, Homo sapiens
ggctctaggttttgt

SEQ ID NO: 1428686 - DNA, 15 bp, Homo sapiens
gctctaggttttgtc

SEQ ID NO: 1428687 - DNA, 15 bp, Homo sapiens
ctctaggttttgtct

SEQ ID NO: 1428688 - DNA, 15 bp, Homo sapiens
tctaggttttgtcta

SEQ ID NO: 1428689 - DNA, 15 bp, Homo sapiens
ctaggttttgtctat

SEQ ID NO: 1428690 - DNA, 15 bp, Homo sapiens
taggttttgtctatc

SEQ ID NO: 1428691 - DNA, 15 bp, Homo sapiens
aggttttgtctatca

SEQ ID NO: 1428692 - DNA, 15 bp, Homo sapiens
ggttttgtctatcat

SEQ ID NO: 1428693 - DNA, 15 bp, Homo sapiens
gttttgtctatcatc

SEQ ID NO: 1428694 - DNA, 15 bp, Homo sapiens
ttttgtctatcatct

SEQ ID NO: 1428695 - DNA, 15 bp, Homo sapiens
tttgtctatcatctc

SEQ ID NO: 1428696 - DNA, 15 bp, Homo sapiens
ttgtctatcatctca

SEQ ID NO: 1428697 - DNA, 15 bp, Homo sapiens
tgtctatcatctcag

SEQ ID NO: 1428698 - DNA, 15 bp, Homo sapiens
gtctatcatctcagt

SEQ ID NO: 1428699 - DNA, 15 bp, Homo sapiens
tctatcatctcagtt

SEQ ID NO: 1428700 - DNA, 15 bp, Homo sapiens
ctatcatctcagttc

SEQ ID NO: 1428701 - DNA, 15 bp, Homo sapiens
tatcatctcagttca

SEQ ID NO: 1428702 - DNA, 15 bp, Homo sapiens
atcatctcagttcag

SEQ ID NO: 1428703 - DNA, 15 bp, Homo sapiens
tcatctcagttcaga

SEQ ID NO: 1428704 - DNA, 15 bp, Homo sapiens
catctcagttcagag

SEQ ID NO: 1428705 - DNA, 15 bp, Homo sapiens
atctcagttcagagg

SEQ ID NO: 1428706 - DNA, 15 bp, Homo sapiens
tctcagttcagaggc

SEQ ID NO: 1428707 - DNA, 15 bp, Homo sapiens
ctcagttcagaggca

SEQ ID NO: 1428708 - DNA, 15 bp, Homo sapiens
tcagttcagaggcaa

SEQ ID NO: 1428709 - DNA, 15 bp, Homo sapiens
cagttcagaggcaac

SEQ ID NO: 1428710 - DNA, 15 bp, Homo sapiens
agttcagaggcaacg

SEQ ID NO: 1428711 - DNA, 15 bp, Homo sapiens
gttcagaggcaacga

SEQ ID NO: 1428712 - DNA, 15 bp, Homo sapiens
ttcagaggcaacgaa

SEQ ID NO: 1428713 - DNA, 15 bp, Homo sapiens
tcagaggcaacgaaa

SEQ ID NO: 1428714 - DNA, 15 bp, Homo sapiens
cagaggcaacgaaac

SEQ ID NO: 1428715 - DNA, 15 bp, Homo sapiens
agaggcaacgaaact

SEQ ID NO: 1428716 - DNA, 15 bp, Homo sapiens
gaggcaacgaaactg

SEQ ID NO: 1428717 - DNA, 15 bp, Homo sapiens
aggcaacgaaactgg

SEQ ID NO: 1428718 - DNA, 15 bp, Homo sapiens
ggcaacgaaactgga

SEQ ID NO: 1428719 - DNA, 15 bp, Homo sapiens
gcaacgaaactggac

SEQ ID NO: 1428720 - DNA, 15 bp, Homo sapiens
caacgaaactggact

SEQ ID NO: 1428721 - DNA, 15 bp, Homo sapiens
aacgaaactggactc

SEQ ID NO: 1428722 - DNA, 15 bp, Homo sapiens
acgaaactggactca

SEQ ID NO: 1428723 - DNA, 15 bp, Homo sapiens
cgaaactggactcat

SEQ ID NO: 1428724 - DNA, 15 bp, Homo sapiens
gaaactggactcatt

SEQ ID NO: 1428725 - DNA, 15 bp, Homo sapiens
aaactggactcatta

SEQ ID NO: 1428726 - DNA, 15 bp, Homo sapiens
aactggactcattac

SEQ ID NO: 1428727 - DNA, 15 bp, Homo sapiens
actggactcattact

SEQ ID NO: 1428728 - DNA, 15 bp, Homo sapiens
ctggactcattactc

SEQ ID NO: 1428729 - DNA, 15 bp, Homo sapiens
tggactcattactcc

SEQ ID NO: 1428730 - DNA, 15 bp, Homo sapiens
ggactcattactcca

SEQ ID NO: 1428731 - DNA, 15 bp, Homo sapiens
gactcattactccaa

SEQ ID NO: 1428732 - DNA, 15 bp, Homo sapiens
actcattactccaaa

SEQ ID NO: 1428733 - DNA, 15 bp, Homo sapiens
ctcattactccaaat

SEQ ID NO: 1428734 - DNA, 15 bp, Homo sapiens
tcattactccaaata

SEQ ID NO: 1428735 - DNA, 15 bp, Homo sapiens
cattactccaaataa

SEQ ID NO: 1428736 - DNA, 15 bp, Homo sapiens
attactccaaataaa

SEQ ID NO: 1428737 - DNA, 15 bp, Homo sapiens
ttactccaaataaac

SEQ ID NO: 1428738 - DNA, 15 bp, Homo sapiens
tactccaaataaaca

SEQ ID NO: 1428739 - DNA, 15 bp, Homo sapiens
actccaaataaacat

SEQ ID NO: 1428740 - DNA, 15 bp, Homo sapiens
ctccaaataaacatg

SEQ ID NO: 1428741 - DNA, 15 bp, Homo sapiens
tccaaataaacatgg

SEQ ID NO: 1428742 - DNA, 15 bp, Homo sapiens
ccaaataaacatgga

SEQ ID NO: 1428743 - DNA, 15 bp, Homo sapiens
caaataaacatggac

SEQ ID NO: 1428744 - DNA, 15 bp, Homo sapiens
aaataaacatggact

SEQ ID NO: 1428745 - DNA, 15 bp, Homo sapiens
aataaacatggactt

SEQ ID NO: 1428746 - DNA, 15 bp, Homo sapiens
ataaacatggacttt

SEQ ID NO: 1428747 - DNA, 15 bp, Homo sapiens
taaacatggactttt

SEQ ID NO: 1428748 - DNA, 15 bp, Homo sapiens
aaacatggactttta

SEQ ID NO: 1428749 - DNA, 15 bp, Homo sapiens
aacatggacttttac

SEQ ID NO: 1428750 - DNA, 15 bp, Homo sapiens
acatggacttttaca

SEQ ID NO: 1428751 - DNA, 15 bp, Homo sapiens
catggacttttacaa

SEQ ID NO: 1428752 - DNA, 15 bp, Homo sapiens
atggacttttacaaa

SEQ ID NO: 1428753 - DNA, 15 bp, Homo sapiens
tggacttttacaaaa

SEQ ID NO: 1428754 - DNA, 15 bp, Homo sapiens
ggacttttacaaaac

SEQ ID NO: 1428755 - DNA, 15 bp, Homo sapiens
gacttttacaaaacc

SEQ ID NO: 1428756 - DNA, 15 bp, Homo sapiens
acttttacaaaaccc

SEQ ID NO: 1428757 - DNA, 15 bp, Homo sapiens
cttttacaaaaccca

SEQ ID NO: 1428758 - DNA, 15 bp, Homo sapiens
ttttacaaaacccat

SEQ ID NO: 1428759 - DNA, 15 bp, Homo sapiens
tttacaaaacccata

SEQ ID NO: 1428760 - DNA, 15 bp, Homo sapiens
ttacaaaacccatat

SEQ ID NO: 1428761 - DNA, 15 bp, Homo sapiens
tacaaaacccatatc

SEQ ID NO: 1428762 - DNA, 15 bp, Homo sapiens
acaaaacccatatcg

SEQ ID NO: 1428763 - DNA, 15 bp, Homo sapiens
caaaacccatatcgt

SEQ ID NO: 1428764 - DNA, 15 bp, Homo sapiens
aaaacccatatcgta

SEQ ID NO: 1428765 - DNA, 15 bp, Homo sapiens
aaacccatatcgtat

SEQ ID NO: 1428766 - DNA, 15 bp, Homo sapiens
aacccatatcgtata

SEQ ID NO: 1428767 - DNA, 15 bp, Homo sapiens
acccatatcgtatac

SEQ ID NO: 1428768 - DNA, 15 bp, Homo sapiens
cccatatcgtatacc

SEQ ID NO: 1428769 - DNA, 15 bp, Homo sapiens
ccatatcgtatacca

SEQ ID NO: 1428770 - DNA, 15 bp, Homo sapiens
catatcgtataccac

SEQ ID NO: 1428771 - DNA, 15 bp, Homo sapiens
atatcgtataccacc

SEQ ID NO: 1428772 - DNA, 15 bp, Homo sapiens
tatcgtataccacca

SEQ ID NO: 1428773 - DNA, 15 bp, Homo sapiens
atcgtataccaccac

SEQ ID NO: 1428774 - DNA, 15 bp, Homo sapiens
tcgtataccaccact

SEQ ID NO: 1428775 - DNA, 15 bp, Homo sapiens
cgtataccaccactt

SEQ ID NO: 1428776 - DNA, 15 bp, Homo sapiens
gtataccaccacttt

SEQ ID NO: 1428777 - DNA, 15 bp, Homo sapiens
tataccaccactttt

SEQ ID NO: 1428778 - DNA, 15 bp, Homo sapiens
ataccaccacttttt

SEQ ID NO: 1428779 - DNA, 15 bp, Homo sapiens
taccaccactttttc

SEQ ID NO: 1428780 - DNA, 15 bp, Homo sapiens
accaccactttttcc

SEQ ID NO: 1428781 - DNA, 15 bp, Homo sapiens
ccaccactttttccc

SEQ ID NO: 1428782 - DNA, 15 bp, Homo sapiens
caccactttttccca

SEQ ID NO: 1428783 - DNA, 15 bp, Homo sapiens
accactttttcccat

SEQ ID NO: 1428784 - DNA, 15 bp, Homo sapiens
ccactttttcccatc

SEQ ID NO: 1428785 - DNA, 15 bp, Homo sapiens
cactttttcccatca

SEQ ID NO: 1428786 - DNA, 15 bp, Homo sapiens
actttttcccatcaa

SEQ ID NO: 1428787 - DNA, 15 bp, Homo sapiens
ctttttcccatcaag

SEQ ID NO: 1428788 - DNA, 15 bp, Homo sapiens
tttttcccatcaagt

SEQ ID NO: 1428789 - DNA, 15 bp, Homo sapiens
ttttcccatcaagtc

SEQ ID NO: 1428790 - DNA, 15 bp, Homo sapiens
tttcccatcaagtca

SEQ ID NO: 1428791 - DNA, 15 bp, Homo sapiens
ttcccatcaagtcat

SEQ ID NO: 1428792 - DNA, 15 bp, Homo sapiens
tcccatcaagtcatt

SEQ ID NO: 1428793 - DNA, 15 bp, Homo sapiens
cccatcaagtcattt

SEQ ID NO: 1428794 - DNA, 15 bp, Homo sapiens
ccatcaagtcatttg

SEQ ID NO: 1428795 - DNA, 15 bp, Homo sapiens
catcaagtcatttgt

SEQ ID NO: 1428796 - DNA, 15 bp, Homo sapiens
atcaagtcatttgtt

SEQ ID NO: 1428797 - DNA, 15 bp, Homo sapiens
tcaagtcatttgtta

SEQ ID NO: 1428798 - DNA, 15 bp, Homo sapiens
caagtcatttgttaa

SEQ ID NO: 1428799 - DNA, 15 bp, Homo sapiens
aagtcatttgttaaa

SEQ ID NO: 1428800 - DNA, 15 bp, Homo sapiens
agtcatttgttaaaa

SEQ ID NO: 1428801 - DNA, 15 bp, Homo sapiens
gtcatttgttaaaac

SEQ ID NO: 1428802 - DNA, 15 bp, Homo sapiens
tcatttgttaaaact

SEQ ID NO: 1428803 - DNA, 15 bp, Homo sapiens
catttgttaaaacta

SEQ ID NO: 1428804 - DNA, 15 bp, Homo sapiens
atttgttaaaactaa

SEQ ID NO: 1428805 - DNA, 15 bp, Homo sapiens
tttgttaaaactaaa

SEQ ID NO: 1428806 - DNA, 15 bp, Homo sapiens
ttgttaaaactaaat

SEQ ID NO: 1428807 - DNA, 15 bp, Homo sapiens
tgttaaaactaaatg

SEQ ID NO: 1428808 - DNA, 15 bp, Homo sapiens
gttaaaactaaatgt

SEQ ID NO: 1428809 - DNA, 15 bp, Homo sapiens
ttaaaactaaatgta

SEQ ID NO: 1428810 - DNA, 15 bp, Homo sapiens
taaaactaaatgtaa

SEQ ID NO: 1428811 - DNA, 15 bp, Homo sapiens
aaaactaaatgtaag

SEQ ID NO: 1428812 - DNA, 15 bp, Homo sapiens
aaactaaatgtaaga

SEQ ID NO: 1428813 - DNA, 15 bp, Homo sapiens
aactaaatgtaagaa

SEQ ID NO: 1428814 - DNA, 15 bp, Homo sapiens
actaaatgtaagaaa

SEQ ID NO: 1428815 - DNA, 15 bp, Homo sapiens
ctaaatgtaagaaaa

SEQ ID NO: 1428816 - DNA, 15 bp, Homo sapiens
taaatgtaagaaaaa

SEQ ID NO: 1428817 - DNA, 15 bp, Homo sapiens
aaatgtaagaaaaat

SEQ ID NO: 1428818 - DNA, 15 bp, Homo sapiens
aatgtaagaaaaatc

SEQ ID NO: 1428819 - DNA, 15 bp, Homo sapiens
atgtaagaaaaatct

SEQ ID NO: 1428820 - DNA, 15 bp, Homo sapiens
tgtaagaaaaatctg

SEQ ID NO: 1428821 - DNA, 15 bp, Homo sapiens
gtaagaaaaatctgc

SEQ ID NO: 1428822 - DNA, 15 bp, Homo sapiens
taagaaaaatctgct

SEQ ID NO: 1428823 - DNA, 15 bp, Homo sapiens
aagaaaaatctgcta

SEQ ID NO: 1428824 - DNA, 15 bp, Homo sapiens
agaaaaatctgctag

SEQ ID NO: 1428825 - DNA, 15 bp, Homo sapiens
gaaaaatctgctaga

SEQ ID NO: 1428826 - DNA, 15 bp, Homo sapiens
aaaaatctgctagag

SEQ ID NO: 1428827 - DNA, 15 bp, Homo sapiens
aaaatctgctagagg

SEQ ID NO: 1428828 - DNA, 15 bp, Homo sapiens
aaatctgctagagga

SEQ ID NO: 1428829 - DNA, 15 bp, Homo sapiens
aatctgctagaggaa

SEQ ID NO: 1428830 - DNA, 15 bp, Homo sapiens
atctgctagaggaaa

SEQ ID NO: 1428831 - DNA, 15 bp, Homo sapiens
tctgctagaggaaaa

SEQ ID NO: 1428832 - DNA, 15 bp, Homo sapiens
ctgctagaggaaaac

SEQ ID NO: 1428833 - DNA, 15 bp, Homo sapiens
tgctagaggaaaact

SEQ ID NO: 1428834 - DNA, 15 bp, Homo sapiens
gctagaggaaaactt

SEQ ID NO: 1428835 - DNA, 15 bp, Homo sapiens
ctagaggaaaacttt

SEQ ID NO: 1428836 - DNA, 15 bp, Homo sapiens
tagaggaaaactttg

SEQ ID NO: 1428837 - DNA, 15 bp, Homo sapiens
agaggaaaactttga

SEQ ID NO: 1428838 - DNA, 15 bp, Homo sapiens
gaggaaaactttgag

SEQ ID NO: 1428839 - DNA, 15 bp, Homo sapiens
aggaaaactttgagg

SEQ ID NO: 1428840 - DNA, 15 bp, Homo sapiens
ggaaaactttgagga

SEQ ID NO: 1428841 - DNA, 15 bp, Homo sapiens
gaaaactttgaggaa

SEQ ID NO: 1428842 - DNA, 15 bp, Homo sapiens
aaaactttgaggaac

SEQ ID NO: 1428843 - DNA, 15 bp, Homo sapiens
aaactttgaggaaca

SEQ ID NO: 1428844 - DNA, 15 bp, Homo sapiens
aactttgaggaacat

SEQ ID NO: 1428845 - DNA, 15 bp, Homo sapiens
actttgaggaacatt

SEQ ID NO: 1428846 - DNA, 15 bp, Homo sapiens
ctttgaggaacattc

SEQ ID NO: 1428847 - DNA, 15 bp, Homo sapiens
tttgaggaacattca

SEQ ID NO: 1428848 - DNA, 15 bp, Homo sapiens
ttgaggaacattcaa

SEQ ID NO: 1428849 - DNA, 15 bp, Homo sapiens
tgaggaacattcaat

SEQ ID NO: 1428850 - DNA, 15 bp, Homo sapiens
gaggaacattcaatg

SEQ ID NO: 1428851 - DNA, 15 bp, Homo sapiens
aggaacattcaatgt

SEQ ID NO: 1428852 - DNA, 15 bp, Homo sapiens
ggaacattcaatgtc

SEQ ID NO: 1428853 - DNA, 15 bp, Homo sapiens
gaacattcaatgtca

SEQ ID NO: 1428854 - DNA, 15 bp, Homo sapiens
aacattcaatgtcac

SEQ ID NO: 1428855 - DNA, 15 bp, Homo sapiens
acattcaatgtcacc

SEQ ID NO: 1428856 - DNA, 15 bp, Homo sapiens
cattcaatgtcacct

SEQ ID NO: 1428857 - DNA, 15 bp, Homo sapiens
attcaatgtcacctg

SEQ ID NO: 1428858 - DNA, 15 bp, Homo sapiens
ttcaatgtcacctga

SEQ ID NO: 1428859 - DNA, 15 bp, Homo sapiens
tcaatgtcacctgaa

SEQ ID NO: 1428860 - DNA, 15 bp, Homo sapiens
caatgtcacctgaaa

SEQ ID NO: 1428861 - DNA, 15 bp, Homo sapiens
aatgtcacctgaaag

SEQ ID NO: 1428862 - DNA, 15 bp, Homo sapiens
atgtcacctgaaaga

SEQ ID NO: 1428863 - DNA, 15 bp, Homo sapiens
tgtcacctgaaagag

SEQ ID NO: 1428864 - DNA, 15 bp, Homo sapiens
gtcacctgaaagaga

SEQ ID NO: 1428865 - DNA, 15 bp, Homo sapiens
tcacctgaaagagaa

SEQ ID NO: 1428866 - DNA, 15 bp, Homo sapiens
cacctgaaagagaaa

SEQ ID NO: 1428867 - DNA, 15 bp, Homo sapiens
acctgaaagagaaat

SEQ ID NO: 1428868 - DNA, 15 bp, Homo sapiens
cctgaaagagaaatg

SEQ ID NO: 1428869 - DNA, 15 bp, Homo sapiens
ctgaaagagaaatgg

SEQ ID NO: 1428870 - DNA, 15 bp, Homo sapiens
tgaaagagaaatggg

SEQ ID NO: 1428871 - DNA, 15 bp, Homo sapiens
gaaagagaaatggga

SEQ ID NO: 1428872 - DNA, 15 bp, Homo sapiens
aaagagaaatgggaa

SEQ ID NO: 1428873 - DNA, 15 bp, Homo sapiens
aagagaaatgggaaa

SEQ ID NO: 1428874 - DNA, 15 bp, Homo sapiens
agagaaatgggaaat

SEQ ID NO: 1428875 - DNA, 15 bp, Homo sapiens
gagaaatgggaaatg

SEQ ID NO: 1428876 - DNA, 15 bp, Homo sapiens
agaaatgggaaatga

SEQ ID NO: 1428877 - DNA, 15 bp, Homo sapiens
gaaatgggaaatgag

SEQ ID NO: 1428878 - DNA, 15 bp, Homo sapiens
aaatgggaaatgaga

SEQ ID NO: 1428879 - DNA, 15 bp, Homo sapiens
aatgggaaatgagaa

SEQ ID NO: 1428880 - DNA, 15 bp, Homo sapiens
atgggaaatgagaac

SEQ ID NO: 1428881 - DNA, 15 bp, Homo sapiens
tgggaaatgagaaca

SEQ ID NO: 1428882 - DNA, 15 bp, Homo sapiens
gggaaatgagaacat

SEQ ID NO: 1428883 - DNA, 15 bp, Homo sapiens
ggaaatgagaacatt

SEQ ID NO: 1428884 - DNA, 15 bp, Homo sapiens
gaaatgagaacattc

SEQ ID NO: 1428885 - DNA, 15 bp, Homo sapiens
aaatgagaacattcc

SEQ ID NO: 1428886 - DNA, 15 bp, Homo sapiens
aatgagaacattcca

SEQ ID NO: 1428887 - DNA, 15 bp, Homo sapiens
atgagaacattccaa

SEQ ID NO: 1428888 - DNA, 15 bp, Homo sapiens
tgagaacattccaag

SEQ ID NO: 1428889 - DNA, 15 bp, Homo sapiens
gagaacattccaagt

SEQ ID NO: 1428890 - DNA, 15 bp, Homo sapiens
agaacattccaagta

SEQ ID NO: 1428891 - DNA, 15 bp, Homo sapiens
gaacattccaagtac

SEQ ID NO: 1428892 - DNA, 15 bp, Homo sapiens
aacattccaagtaca

SEQ ID NO: 1428893 - DNA, 15 bp, Homo sapiens
acattccaagtacag

SEQ ID NO: 1428894 - DNA, 15 bp, Homo sapiens
cattccaagtacagt

SEQ ID NO: 1428895 - DNA, 15 bp, Homo sapiens
attccaagtacagtg

SEQ ID NO: 1428896 - DNA, 15 bp, Homo sapiens
ttccaagtacagtga

SEQ ID NO: 1428897 - DNA, 15 bp, Homo sapiens
tccaagtacagtgag

SEQ ID NO: 1428898 - DNA, 15 bp, Homo sapiens
ccaagtacagtgagc

SEQ ID NO: 1428899 - DNA, 15 bp, Homo sapiens
caagtacagtgagca

SEQ ID NO: 1428900 - DNA, 15 bp, Homo sapiens
aagtacagtgagcac

SEQ ID NO: 1428901 - DNA, 15 bp, Homo sapiens
agtacagtgagcaca

SEQ ID NO: 1428902 - DNA, 15 bp, Homo sapiens
gtacagtgagcacaa

SEQ ID NO: 1428903 - DNA, 15 bp, Homo sapiens
tacagtgagcacaat

SEQ ID NO: 1428904 - DNA, 15 bp, Homo sapiens
acagtgagcacaatt

SEQ ID NO: 1428905 - DNA, 15 bp, Homo sapiens
cagtgagcacaatta

SEQ ID NO: 1428906 - DNA, 15 bp, Homo sapiens
agtgagcacaattag

SEQ ID NO: 1428907 - DNA, 15 bp, Homo sapiens
gtgagcacaattagc

SEQ ID NO: 1428908 - DNA, 15 bp, Homo sapiens
tgagcacaattagcc

SEQ ID NO: 1428909 - DNA, 15 bp, Homo sapiens
gagcacaattagccg

SEQ ID NO: 1428910 - DNA, 15 bp, Homo sapiens
agcacaattagccgt

SEQ ID NO: 1428911 - DNA, 15 bp, Homo sapiens
gcacaattagccgta

SEQ ID NO: 1428912 - DNA, 15 bp, Homo sapiens
cacaattagccgtaa

SEQ ID NO: 1428913 - DNA, 15 bp, Homo sapiens
acaattagccgtaat

SEQ ID NO: 1428914 - DNA, 15 bp, Homo sapiens
caattagccgtaata

SEQ ID NO: 1428915 - DNA, 15 bp, Homo sapiens
aattagccgtaataa

SEQ ID NO: 1428916 - DNA, 15 bp, Homo sapiens
attagccgtaataac

SEQ ID NO: 1428917 - DNA, 15 bp, Homo sapiens
ttagccgtaataaca

SEQ ID NO: 1428918 - DNA, 15 bp, Homo sapiens
tagccgtaataacat

SEQ ID NO: 1428919 - DNA, 15 bp, Homo sapiens
agccgtaataacatt

SEQ ID NO: 1428920 - DNA, 15 bp, Homo sapiens
gccgtaataacatta

SEQ ID NO: 1428921 - DNA, 15 bp, Homo sapiens
ccgtaataacattag

SEQ ID NO: 1428922 - DNA, 15 bp, Homo sapiens
cgtaataacattaga

SEQ ID NO: 1428923 - DNA, 15 bp, Homo sapiens
gtaataacattagag

SEQ ID NO: 1428924 - DNA, 15 bp, Homo sapiens
taataacattagaga

SEQ ID NO: 1428925 - DNA, 15 bp, Homo sapiens
aataacattagagaa

SEQ ID NO: 1428926 - DNA, 15 bp, Homo sapiens
ataacattagagaaa

SEQ ID NO: 1428927 - DNA, 15 bp, Homo sapiens
taacattagagaaaa

SEQ ID NO: 1428928 - DNA, 15 bp, Homo sapiens
aacattagagaaaat

SEQ ID NO: 1428929 - DNA, 15 bp, Homo sapiens
acattagagaaaatg

SEQ ID NO: 1428930 - DNA, 15 bp, Homo sapiens
cattagagaaaatgt

SEQ ID NO: 1428931 - DNA, 15 bp, Homo sapiens
attagagaaaatgtt

SEQ ID NO: 1428932 - DNA, 15 bp, Homo sapiens
ttagagaaaatgttt

SEQ ID NO: 1428933 - DNA, 15 bp, Homo sapiens
tagagaaaatgtttt

SEQ ID NO: 1428934 - DNA, 15 bp, Homo sapiens
agagaaaatgttttt

SEQ ID NO: 1428935 - DNA, 15 bp, Homo sapiens
gagaaaatgttttta

SEQ ID NO: 1428936 - DNA, 15 bp, Homo sapiens
agaaaatgtttttaa

SEQ ID NO: 1428937 - DNA, 15 bp, Homo sapiens
gaaaatgtttttaaa

SEQ ID NO: 1428938 - DNA, 15 bp, Homo sapiens
atgtttttaaagaag

SEQ ID NO: 1428939 - DNA, 15 bp, Homo sapiens
tgtttttaaagaagc

SEQ ID NO: 1428940 - DNA, 15 bp, Homo sapiens
gtttttaaagaagcc

SEQ ID NO: 1428941 - DNA, 15 bp, Homo sapiens
tttttaaagaagcca

SEQ ID NO: 1428942 - DNA, 15 bp, Homo sapiens
ttttaaagaagccag

SEQ ID NO: 1428943 - DNA, 15 bp, Homo sapiens
tttaaagaagccagc

SEQ ID NO: 1428944 - DNA, 15 bp, Homo sapiens
ttaaagaagccagct

SEQ ID NO: 1428945 - DNA, 15 bp, Homo sapiens
taaagaagccagctc

SEQ ID NO: 1428946 - DNA, 15 bp, Homo sapiens
aaagaagccagctca

SEQ ID NO: 1428947 - DNA, 15 bp, Homo sapiens
aagaagccagctcaa

SEQ ID NO: 1428948 - DNA, 15 bp, Homo sapiens
agaagccagctcaag

SEQ ID NO: 1428949 - DNA, 15 bp, Homo sapiens
gaagccagctcaagc

SEQ ID NO: 1428950 - DNA, 15 bp, Homo sapiens
aagccagctcaagca

SEQ ID NO: 1428951 - DNA, 15 bp, Homo sapiens
agccagctcaagcaa

SEQ ID NO: 1428952 - DNA, 15 bp, Homo sapiens
gccagctcaagcaat

SEQ ID NO: 1428953 - DNA, 15 bp, Homo sapiens
ccagctcaagcaata

SEQ ID NO: 1428954 - DNA, 15 bp, Homo sapiens
cagctcaagcaatat

SEQ ID NO: 1428955 - DNA, 15 bp, Homo sapiens
agctcaagcaatatt

SEQ ID NO: 1428956 - DNA, 15 bp, Homo sapiens
gctcaagcaatatta

SEQ ID NO: 1428957 - DNA, 15 bp, Homo sapiens
ctcaagcaatattaa

SEQ ID NO: 1428958 - DNA, 15 bp, Homo sapiens
tcaagcaatattaat

SEQ ID NO: 1428959 - DNA, 15 bp, Homo sapiens
caagcaatattaatg

SEQ ID NO: 1428960 - DNA, 15 bp, Homo sapiens
aagcaatattaatga

SEQ ID NO: 1428961 - DNA, 15 bp, Homo sapiens
agcaatattaatgaa

SEQ ID NO: 1428962 - DNA, 15 bp, Homo sapiens
gcaatattaatgaag

SEQ ID NO: 1428963 - DNA, 15 bp, Homo sapiens
caatattaatgaagt

SEQ ID NO: 1428964 - DNA, 15 bp, Homo sapiens
aatattaatgaagta

SEQ ID NO: 1428965 - DNA, 15 bp, Homo sapiens
atattaatgaagtag

SEQ ID NO: 1428966 - DNA, 15 bp, Homo sapiens
tattaatgaagtagg

SEQ ID NO: 1428967 - DNA, 15 bp, Homo sapiens
attaatgaagtaggt

SEQ ID NO: 1428968 - DNA, 15 bp, Homo sapiens
ttaatgaagtaggtt

SEQ ID NO: 1428969 - DNA, 15 bp, Homo sapiens
taatgaagtaggttc

SEQ ID NO: 1428970 - DNA, 15 bp, Homo sapiens
aatgaagtaggttcc

SEQ ID NO: 1428971 - DNA, 15 bp, Homo sapiens
atgaagtaggttcca

SEQ ID NO: 1428972 - DNA, 15 bp, Homo sapiens
tgaagtaggttccag

SEQ ID NO: 1428973 - DNA, 15 bp, Homo sapiens
gaagtaggttccagt

SEQ ID NO: 1428974 - DNA, 15 bp, Homo sapiens
aagtaggttccagta

SEQ ID NO: 1428975 - DNA, 15 bp, Homo sapiens
agtaggttccagtac

SEQ ID NO: 1428976 - DNA, 15 bp, Homo sapiens
gtaggttccagtact

SEQ ID NO: 1428977 - DNA, 15 bp, Homo sapiens
taggttccagtacta

SEQ ID NO: 1428978 - DNA, 15 bp, Homo sapiens
aggttccagtactaa

SEQ ID NO: 1428979 - DNA, 15 bp, Homo sapiens
ggttccagtactaat

SEQ ID NO: 1428980 - DNA, 15 bp, Homo sapiens
gttccagtactaatg

SEQ ID NO: 1428981 - DNA, 15 bp, Homo sapiens
ttccagtactaatga

SEQ ID NO: 1428982 - DNA, 15 bp, Homo sapiens
tccagtactaatgaa

SEQ ID NO: 1428983 - DNA, 15 bp, Homo sapiens
ccagtactaatgaag

SEQ ID NO: 1428984 - DNA, 15 bp, Homo sapiens
cagtactaatgaagt

SEQ ID NO: 1428985 - DNA, 15 bp, Homo sapiens
agtactaatgaagtg

SEQ ID NO: 1428986 - DNA, 15 bp, Homo sapiens
gtactaatgaagtgg

SEQ ID NO: 1428987 - DNA, 15 bp, Homo sapiens
tactaatgaagtggg

SEQ ID NO: 1428988 - DNA, 15 bp, Homo sapiens
actaatgaagtgggc

SEQ ID NO: 1428989 - DNA, 15 bp, Homo sapiens
ctaatgaagtgggct

SEQ ID NO: 1428990 - DNA, 15 bp, Homo sapiens
taatgaagtgggctc

SEQ ID NO: 1428991 - DNA, 15 bp, Homo sapiens
aatgaagtgggctcc

SEQ ID NO: 1428992 - DNA, 15 bp, Homo sapiens
atgaagtgggctcca

SEQ ID NO: 1428993 - DNA, 15 bp, Homo sapiens
tgaagtgggctccag

SEQ ID NO: 1428994 - DNA, 15 bp, Homo sapiens
gaagtgggctccagt

SEQ ID NO: 1428995 - DNA, 15 bp, Homo sapiens
aagtgggctccagta

SEQ ID NO: 1428996 - DNA, 15 bp, Homo sapiens
agtgggctccagtat

SEQ ID NO: 1428997 - DNA, 15 bp, Homo sapiens
gtgggctccagtatt

SEQ ID NO: 1428998 - DNA, 15 bp, Homo sapiens
tgggctccagtatta

SEQ ID NO: 1428999 - DNA, 15 bp, Homo sapiens
gggctccagtattaa

SEQ ID NO: 1429000 - DNA, 15 bp, Homo sapiens
ggctccagtattaat

SEQ ID NO: 1429001 - DNA, 15 bp, Homo sapiens
gctccagtattaatg

SEQ ID NO: 1429002 - DNA, 15 bp, Homo sapiens
ctccagtattaatga

SEQ ID NO: 1429003 - DNA, 15 bp, Homo sapiens
tccagtattaatgaa

SEQ ID NO: 1429004 - DNA, 15 bp, Homo sapiens
ccagtattaatgaaa

SEQ ID NO: 1429005 - DNA, 15 bp, Homo sapiens
cagtattaatgaaat

SEQ ID NO: 1429006 - DNA, 15 bp, Homo sapiens
agtattaatgaaata

SEQ ID NO: 1429007 - DNA, 15 bp, Homo sapiens
gtattaatgaaatag

SEQ ID NO: 1429008 - DNA, 15 bp, Homo sapiens
tattaatgaaatagg

SEQ ID NO: 1429009 - DNA, 15 bp, Homo sapiens
attaatgaaataggt

SEQ ID NO: 1429010 - DNA, 15 bp, Homo sapiens
ttaatgaaataggtt

SEQ ID NO: 1429011 - DNA, 15 bp, Homo sapiens
taatgaaataggttc

SEQ ID NO: 1429012 - DNA, 15 bp, Homo sapiens
aatgaaataggttcc

SEQ ID NO: 1429013 - DNA, 15 bp, Homo sapiens
atgaaataggttcca

SEQ ID NO: 1429014 - DNA, 15 bp, Homo sapiens
tgaaataggttccag

SEQ ID NO: 1429015 - DNA, 15 bp, Homo sapiens
gaaataggttccagt

SEQ ID NO: 1429016 - DNA, 15 bp, Homo sapiens
aaataggttccagtg

SEQ ID NO: 1429017 - DNA, 15 bp, Homo sapiens
aataggttccagtga

SEQ ID NO: 1429018 - DNA, 15 bp, Homo sapiens
ataggttccagtgat

SEQ ID NO: 1429019 - DNA, 15 bp, Homo sapiens
taggttccagtgatg

SEQ ID NO: 1429020 - DNA, 15 bp, Homo sapiens
aggttccagtgatga

SEQ ID NO: 1429021 - DNA, 15 bp, Homo sapiens
ggttccagtgatgaa

SEQ ID NO: 1429022 - DNA, 15 bp, Homo sapiens
gttccagtgatgaaa

SEQ ID NO: 1429023 - DNA, 15 bp, Homo sapiens
ttccagtgatgaaaa

SEQ ID NO: 1429024 - DNA, 15 bp, Homo sapiens
tccagtgatgaaaac

SEQ ID NO: 1429025 - DNA, 15 bp, Homo sapiens
ccagtgatgaaaaca

SEQ ID NO: 1429026 - DNA, 15 bp, Homo sapiens
cagtgatgaaaacat

SEQ ID NO: 1429027 - DNA, 15 bp, Homo sapiens
agtgatgaaaacatt

SEQ ID NO: 1429028 - DNA, 15 bp, Homo sapiens
gtgatgaaaacattc

SEQ ID NO: 1429029 - DNA, 15 bp, Homo sapiens
tgatgaaaacattca

SEQ ID NO: 1429030 - DNA, 15 bp, Homo sapiens
gatgaaaacattcaa

SEQ ID NO: 1429031 - DNA, 15 bp, Homo sapiens
atgaaaacattcaag

SEQ ID NO: 1429032 - DNA, 15 bp, Homo sapiens
tgaaaacattcaagc

SEQ ID NO: 1429033 - DNA, 15 bp, Homo sapiens
gaaaacattcaagca

SEQ ID NO: 1429034 - DNA, 15 bp, Homo sapiens
aaaacattcaagcag

SEQ ID NO: 1429035 - DNA, 15 bp, Homo sapiens
aaacattcaagcaga

SEQ ID NO: 1429036 - DNA, 15 bp, Homo sapiens
aacattcaagcagaa

SEQ ID NO: 1429037 - DNA, 15 bp, Homo sapiens
acattcaagcagaac

SEQ ID NO: 1429038 - DNA, 15 bp, Homo sapiens
cattcaagcagaact

SEQ ID NO: 1429039 - DNA, 15 bp, Homo sapiens
attcaagcagaacta

SEQ ID NO: 1429040 - DNA, 15 bp, Homo sapiens
ttcaagcagaactag

SEQ ID NO: 1429041 - DNA, 15 bp, Homo sapiens
tcaagcagaactagg

SEQ ID NO: 1429042 - DNA, 15 bp, Homo sapiens
caagcagaactaggt

SEQ ID NO: 1429043 - DNA, 15 bp, Homo sapiens
aagcagaactaggta

SEQ ID NO: 1429044 - DNA, 15 bp, Homo sapiens
agcagaactaggtag

SEQ ID NO: 1429045 - DNA, 15 bp, Homo sapiens
gcagaactaggtaga

SEQ ID NO: 1429046 - DNA, 15 bp, Homo sapiens
cagaactaggtagaa

SEQ ID NO: 1429047 - DNA, 15 bp, Homo sapiens
agaactaggtagaaa

SEQ ID NO: 1429048 - DNA, 15 bp, Homo sapiens
gaactaggtagaaac

SEQ ID NO: 1429049 - DNA, 15 bp, Homo sapiens
aactaggtagaaaca

SEQ ID NO: 1429050 - DNA, 15 bp, Homo sapiens
actaggtagaaacag

SEQ ID NO: 1429051 - DNA, 15 bp, Homo sapiens
ctaggtagaaacaga

SEQ ID NO: 1429052 - DNA, 15 bp, Homo sapiens
taggtagaaacagag

SEQ ID NO: 1429053 - DNA, 15 bp, Homo sapiens
aggtagaaacagagg

SEQ ID NO: 1429054 - DNA, 15 bp, Homo sapiens
ggtagaaacagaggg

SEQ ID NO: 1429055 - DNA, 15 bp, Homo sapiens
gtagaaacagagggc

SEQ ID NO: 1429056 - DNA, 15 bp, Homo sapiens
tagaaacagagggcc

SEQ ID NO: 1429057 - DNA, 15 bp, Homo sapiens
agaaacagagggcca

SEQ ID NO: 1429058 - DNA, 15 bp, Homo sapiens
gaaacagagggccaa

SEQ ID NO: 1429059 - DNA, 15 bp, Homo sapiens
aaacagagggccaaa

SEQ ID NO: 1429060 - DNA, 15 bp, Homo sapiens
aacagagggccaaaa

SEQ ID NO: 1429061 - DNA, 15 bp, Homo sapiens
acagagggccaaaat

SEQ ID NO: 1429062 - DNA, 15 bp, Homo sapiens
cagagggccaaaatt

SEQ ID NO: 1429063 - DNA, 15 bp, Homo sapiens
agagggccaaaattg

SEQ ID NO: 1429064 - DNA, 15 bp, Homo sapiens
gagggccaaaattga

SEQ ID NO: 1429065 - DNA, 15 bp, Homo sapiens
agggccaaaattgaa

SEQ ID NO: 1429066 - DNA, 15 bp, Homo sapiens
gggccaaaattgaat

SEQ ID NO: 1429067 - DNA, 15 bp, Homo sapiens
ggccaaaattgaatg

SEQ ID NO: 1429068 - DNA, 15 bp, Homo sapiens
gccaaaattgaatgc

SEQ ID NO: 1429069 - DNA, 15 bp, Homo sapiens
ccaaaattgaatgct

SEQ ID NO: 1429070 - DNA, 15 bp, Homo sapiens
caaaattgaatgcta

SEQ ID NO: 1429071 - DNA, 15 bp, Homo sapiens
aaaattgaatgctat

SEQ ID NO: 1429072 - DNA, 15 bp, Homo sapiens
aaattgaatgctatg

SEQ ID NO: 1429073 - DNA, 15 bp, Homo sapiens
attgaatgctatgct

SEQ ID NO: 1429074 - DNA, 15 bp, Homo sapiens
ttgaatgctatgctt

SEQ ID NO: 1429075 - DNA, 15 bp, Homo sapiens
tgaatgctatgctta

SEQ ID NO: 1429076 - DNA, 15 bp, Homo sapiens
gaatgctatgcttag

SEQ ID NO: 1429077 - DNA, 15 bp, Homo sapiens
aatgctatgcttaga

SEQ ID NO: 1429078 - DNA, 15 bp, Homo sapiens
atgctatgcttagat

SEQ ID NO: 1429079 - DNA, 15 bp, Homo sapiens
tgctatgcttagatt

SEQ ID NO: 1429080 - DNA, 15 bp, Homo sapiens
gctatgcttagatta

SEQ ID NO: 1429081 - DNA, 15 bp, Homo sapiens
ctatgcttagattag

SEQ ID NO: 1429082 - DNA, 15 bp, Homo sapiens
tatgcttagattagg

SEQ ID NO: 1429083 - DNA, 15 bp, Homo sapiens
atgcttagattaggg

SEQ ID NO: 1429084 - DNA, 15 bp, Homo sapiens
tgcttagattagggg

SEQ ID NO: 1429085 - DNA, 15 bp, Homo sapiens
gcttagattaggggt

SEQ ID NO: 1429086 - DNA, 15 bp, Homo sapiens
cttagattaggggtt

SEQ ID NO: 1429087 - DNA, 15 bp, Homo sapiens
ttagattaggggttt

SEQ ID NO: 1429088 - DNA, 15 bp, Homo sapiens
tagattaggggtttt

SEQ ID NO: 1429089 - DNA, 15 bp, Homo sapiens
agattaggggttttg

SEQ ID NO: 1429090 - DNA, 15 bp, Homo sapiens
gattaggggttttgc

SEQ ID NO: 1429091 - DNA, 15 bp, Homo sapiens
attaggggttttgca

SEQ ID NO: 1429092 - DNA, 15 bp, Homo sapiens
ttaggggttttgcaa

SEQ ID NO: 1429093 - DNA, 15 bp, Homo sapiens
taggggttttgcaac

SEQ ID NO: 1429094 - DNA, 15 bp, Homo sapiens
aggggttttgcaacc

SEQ ID NO: 1429095 - DNA, 15 bp, Homo sapiens
ggggttttgcaacct

SEQ ID NO: 1429096 - DNA, 15 bp, Homo sapiens
gggttttgcaacctg

SEQ ID NO: 1429097 - DNA, 15 bp, Homo sapiens
ggttttgcaacctga

SEQ ID NO: 1429098 - DNA, 15 bp, Homo sapiens
gttttgcaacctgag

SEQ ID NO: 1429099 - DNA, 15 bp, Homo sapiens
ttttgcaacctgagg

SEQ ID NO: 1429100 - DNA, 15 bp, Homo sapiens
tttgcaacctgaggt

SEQ ID NO: 1429101 - DNA, 15 bp, Homo sapiens
ttgcaacctgaggtc

SEQ ID NO: 1429102 - DNA, 15 bp, Homo sapiens
tgcaacctgaggtct

SEQ ID NO: 1429103 - DNA, 15 bp, Homo sapiens
gcaacctgaggtcta

SEQ ID NO: 1429104 - DNA, 15 bp, Homo sapiens
caacctgaggtctat

SEQ ID NO: 1429105 - DNA, 15 bp, Homo sapiens
aacctgaggtctata

SEQ ID NO: 1429106 - DNA, 15 bp, Homo sapiens
acctgaggtctataa

SEQ ID NO: 1429107 - DNA, 15 bp, Homo sapiens
cctgaggtctataaa

SEQ ID NO: 1429108 - DNA, 15 bp, Homo sapiens
ctgaggtctataaac

SEQ ID NO: 1429109 - DNA, 15 bp, Homo sapiens
tgaggtctataaaca

SEQ ID NO: 1429110 - DNA, 15 bp, Homo sapiens
gaggtctataaacaa

SEQ ID NO: 1429111 - DNA, 15 bp, Homo sapiens
aggtctataaacaaa

SEQ ID NO: 1429112 - DNA, 15 bp, Homo sapiens
ggtctataaacaaag

SEQ ID NO: 1429113 - DNA, 15 bp, Homo sapiens
gtctataaacaaagt

SEQ ID NO: 1429114 - DNA, 15 bp, Homo sapiens
tctataaacaaagtc

SEQ ID NO: 1429115 - DNA, 15 bp, Homo sapiens
ctataaacaaagtct

SEQ ID NO: 1429116 - DNA, 15 bp, Homo sapiens
tataaacaaagtctt

SEQ ID NO: 1429117 - DNA, 15 bp, Homo sapiens
ataaacaaagtcttc

SEQ ID NO: 1429118 - DNA, 15 bp, Homo sapiens
taaacaaagtcttcc

SEQ ID NO: 1429119 - DNA, 15 bp, Homo sapiens
aaacaaagtcttcct

SEQ ID NO: 1429120 - DNA, 15 bp, Homo sapiens
aacaaagtcttcctg

SEQ ID NO: 1429121 - DNA, 15 bp, Homo sapiens
acaaagtcttcctgg

SEQ ID NO: 1429122 - DNA, 15 bp, Homo sapiens
caaagtcttcctgga

SEQ ID NO: 1429123 - DNA, 15 bp, Homo sapiens
aaagtcttcctggaa

SEQ ID NO: 1429124 - DNA, 15 bp, Homo sapiens
aagtcttcctggaag

SEQ ID NO: 1429125 - DNA, 15 bp, Homo sapiens
agtcttcctggaagt

SEQ ID NO: 1429126 - DNA, 15 bp, Homo sapiens
gtcttcctggaagta

SEQ ID NO: 1429127 - DNA, 15 bp, Homo sapiens
tcttcctggaagtaa

SEQ ID NO: 1429128 - DNA, 15 bp, Homo sapiens
cttcctggaagtaat

SEQ ID NO: 1429129 - DNA, 15 bp, Homo sapiens
ttcctggaagtaatt

SEQ ID NO: 1429130 - DNA, 15 bp, Homo sapiens
tcctggaagtaattg

SEQ ID NO: 1429131 - DNA, 15 bp, Homo sapiens
cctggaagtaattgt

SEQ ID NO: 1429132 - DNA, 15 bp, Homo sapiens
ctggaagtaattgta

SEQ ID NO: 1429133 - DNA, 15 bp, Homo sapiens
tggaagtaattgtaa

SEQ ID NO: 1429134 - DNA, 15 bp, Homo sapiens
ggaagtaattgtaag

SEQ ID NO: 1429135 - DNA, 15 bp, Homo sapiens
gaagtaattgtaagc

SEQ ID NO: 1429136 - DNA, 15 bp, Homo sapiens
aagtaattgtaagca

SEQ ID NO: 1429137 - DNA, 15 bp, Homo sapiens
agtaattgtaagcat

SEQ ID NO: 1429138 - DNA, 15 bp, Homo sapiens
gtaattgtaagcatc

SEQ ID NO: 1429139 - DNA, 15 bp, Homo sapiens
taattgtaagcatcc

SEQ ID NO: 1429140 - DNA, 15 bp, Homo sapiens
aattgtaagcatcct

SEQ ID NO: 1429141 - DNA, 15 bp, Homo sapiens
attgtaagcatcctg

SEQ ID NO: 1429142 - DNA, 15 bp, Homo sapiens
ttgtaagcatcctga

SEQ ID NO: 1429143 - DNA, 15 bp, Homo sapiens
tgtaagcatcctgaa

SEQ ID NO: 1429144 - DNA, 15 bp, Homo sapiens
gtaagcatcctgaaa

SEQ ID NO: 1429145 - DNA, 15 bp, Homo sapiens
taagcatcctgaaat

SEQ ID NO: 1429146 - DNA, 15 bp, Homo sapiens
aagcatcctgaaata

SEQ ID NO: 1429147 - DNA, 15 bp, Homo sapiens
agcatcctgaaataa

SEQ ID NO: 1429148 - DNA, 15 bp, Homo sapiens
gcatcctgaaataaa

SEQ ID NO: 1429149 - DNA, 15 bp, Homo sapiens
catcctgaaataaaa

SEQ ID NO: 1429150 - DNA, 15 bp, Homo sapiens
atcctgaaataaaaa

SEQ ID NO: 1429151 - DNA, 15 bp, Homo sapiens
tcctgaaataaaaaa

SEQ ID NO: 1429152 - DNA, 15 bp, Homo sapiens
cctgaaataaaaaag

SEQ ID NO: 1429153 - DNA, 15 bp, Homo sapiens
ctgaaataaaaaagc

SEQ ID NO: 1429154 - DNA, 15 bp, Homo sapiens
tgaaataaaaaagca

SEQ ID NO: 1429155 - DNA, 15 bp, Homo sapiens
gaaataaaaaagcaa

SEQ ID NO: 1429156 - DNA, 15 bp, Homo sapiens
aaataaaaaagcaag

SEQ ID NO: 1429157 - DNA, 15 bp, Homo sapiens
aataaaaaagcaaga

SEQ ID NO: 1429158 - DNA, 15 bp, Homo sapiens
ataaaaaagcaagaa

SEQ ID NO: 1429159 - DNA, 15 bp, Homo sapiens
taaaaaagcaagaat

SEQ ID NO: 1429160 - DNA, 15 bp, Homo sapiens
aaaaaagcaagaata

SEQ ID NO: 1429161 - DNA, 15 bp, Homo sapiens
aaaaagcaagaatat

SEQ ID NO: 1429162 - DNA, 15 bp, Homo sapiens
aaaagcaagaatatg

SEQ ID NO: 1429163 - DNA, 15 bp, Homo sapiens
aaagcaagaatatga

SEQ ID NO: 1429164 - DNA, 15 bp, Homo sapiens
aagcaagaatatgaa

SEQ ID NO: 1429165 - DNA, 15 bp, Homo sapiens
agcaagaatatgaag

SEQ ID NO: 1429166 - DNA, 15 bp, Homo sapiens
gcaagaatatgaaga

SEQ ID NO: 1429167 - DNA, 15 bp, Homo sapiens
caagaatatgaagaa

SEQ ID NO: 1429168 - DNA, 15 bp, Homo sapiens
aagaatatgaagaag

SEQ ID NO: 1429169 - DNA, 15 bp, Homo sapiens
agaatatgaagaagt

SEQ ID NO: 1429170 - DNA, 15 bp, Homo sapiens
gaatatgaagaagta

SEQ ID NO: 1429171 - DNA, 15 bp, Homo sapiens
aatatgaagaagtag

SEQ ID NO: 1429172 - DNA, 15 bp, Homo sapiens
atatgaagaagtagt

SEQ ID NO: 1429173 - DNA, 15 bp, Homo sapiens
tatgaagaagtagtt

SEQ ID NO: 1429174 - DNA, 15 bp, Homo sapiens
atgaagaagtagttc

SEQ ID NO: 1429175 - DNA, 15 bp, Homo sapiens
tgaagaagtagttca

SEQ ID NO: 1429176 - DNA, 15 bp, Homo sapiens
gaagaagtagttcag

SEQ ID NO: 1429177 - DNA, 15 bp, Homo sapiens
aagaagtagttcaga

SEQ ID NO: 1429178 - DNA, 15 bp, Homo sapiens
agaagtagttcagac

SEQ ID NO: 1429179 - DNA, 15 bp, Homo sapiens
gaagtagttcagact

SEQ ID NO: 1429180 - DNA, 15 bp, Homo sapiens
aagtagttcagactg

SEQ ID NO: 1429181 - DNA, 15 bp, Homo sapiens
agtagttcagactgt

SEQ ID NO: 1429182 - DNA, 15 bp, Homo sapiens
gtagttcagactgtt

SEQ ID NO: 1429183 - DNA, 15 bp, Homo sapiens
tagttcagactgtta

SEQ ID NO: 1429184 - DNA, 15 bp, Homo sapiens
agttcagactgttaa

SEQ ID NO: 1429185 - DNA, 15 bp, Homo sapiens
gttcagactgttaat

SEQ ID NO: 1429186 - DNA, 15 bp, Homo sapiens
ttcagactgttaata

SEQ ID NO: 1429187 - DNA, 15 bp, Homo sapiens
tcagactgttaatac

SEQ ID NO: 1429188 - DNA, 15 bp, Homo sapiens
cagactgttaataca

SEQ ID NO: 1429189 - DNA, 15 bp, Homo sapiens
agactgttaatacag

SEQ ID NO: 1429190 - DNA, 15 bp, Homo sapiens
gactgttaatacaga

SEQ ID NO: 1429191 - DNA, 15 bp, Homo sapiens
actgttaatacagat

SEQ ID NO: 1429192 - DNA, 15 bp, Homo sapiens
ctgttaatacagatt

SEQ ID NO: 1429193 - DNA, 15 bp, Homo sapiens
tgttaatacagattt

SEQ ID NO: 1429194 - DNA, 15 bp, Homo sapiens
gttaatacagatttc

SEQ ID NO: 1429195 - DNA, 15 bp, Homo sapiens
ttaatacagatttct

SEQ ID NO: 1429196 - DNA, 15 bp, Homo sapiens
taatacagatttctc

SEQ ID NO: 1429197 - DNA, 15 bp, Homo sapiens
aatacagatttctct

SEQ ID NO: 1429198 - DNA, 15 bp, Homo sapiens
atacagatttctctc

SEQ ID NO: 1429199 - DNA, 15 bp, Homo sapiens
tacagatttctctcc

SEQ ID NO: 1429200 - DNA, 15 bp, Homo sapiens
acagatttctctcca

SEQ ID NO: 1429201 - DNA, 15 bp, Homo sapiens
cagatttctctccat

SEQ ID NO: 1429202 - DNA, 15 bp, Homo sapiens
agatttctctccata

SEQ ID NO: 1429203 - DNA, 15 bp, Homo sapiens
gatttctctccatat

SEQ ID NO: 1429204 - DNA, 15 bp, Homo sapiens
atttctctccatatc

SEQ ID NO: 1429205 - DNA, 15 bp, Homo sapiens
tttctctccatatct

SEQ ID NO: 1429206 - DNA, 15 bp, Homo sapiens
ttctctccatatctg

SEQ ID NO: 1429207 - DNA, 15 bp, Homo sapiens
tctctccatatctga

SEQ ID NO: 1429208 - DNA, 15 bp, Homo sapiens
ctctccatatctgat

SEQ ID NO: 1429209 - DNA, 15 bp, Homo sapiens
tctccatatctgatt

SEQ ID NO: 1429210 - DNA, 15 bp, Homo sapiens
ctccatatctgattt

SEQ ID NO: 1429211 - DNA, 15 bp, Homo sapiens
tccatatctgatttc

SEQ ID NO: 1429212 - DNA, 15 bp, Homo sapiens
ccatatctgatttca

SEQ ID NO: 1429213 - DNA, 15 bp, Homo sapiens
catatctgatttcag

SEQ ID NO: 1429214 - DNA, 15 bp, Homo sapiens
atatctgatttcaga

SEQ ID NO: 1429215 - DNA, 15 bp, Homo sapiens
tatctgatttcagat

SEQ ID NO: 1429216 - DNA, 15 bp, Homo sapiens
atctgatttcagata

SEQ ID NO: 1429217 - DNA, 15 bp, Homo sapiens
tctgatttcagataa

SEQ ID NO: 1429218 - DNA, 15 bp, Homo sapiens
ctgatttcagataac

SEQ ID NO: 1429219 - DNA, 15 bp, Homo sapiens
tgatttcagataact

SEQ ID NO: 1429220 - DNA, 15 bp, Homo sapiens
ctagccctttcaccc

SEQ ID NO: 1429221 - DNA, 15 bp, Homo sapiens
tagccctttcaccca

SEQ ID NO: 1429222 - DNA, 15 bp, Homo sapiens
agccctttcacccat

SEQ ID NO: 1429223 - DNA, 15 bp, Homo sapiens
gccctttcacccata

SEQ ID NO: 1429224 - DNA, 15 bp, Homo sapiens
ccctttcacccatac

SEQ ID NO: 1429225 - DNA, 15 bp, Homo sapiens
cctttcacccataca

SEQ ID NO: 1429226 - DNA, 15 bp, Homo sapiens
ctttcacccatacac

SEQ ID NO: 1429227 - DNA, 15 bp, Homo sapiens
tttcacccatacaca

SEQ ID NO: 1429228 - DNA, 15 bp, Homo sapiens
ttcacccatacacat

SEQ ID NO: 1429229 - DNA, 15 bp, Homo sapiens
tcacccatacacatt

SEQ ID NO: 1429230 - DNA, 15 bp, Homo sapiens
cacccatacacattt

SEQ ID NO: 1429231 - DNA, 15 bp, Homo sapiens
acccatacacatttg

SEQ ID NO: 1429232 - DNA, 15 bp, Homo sapiens
cccatacacatttgg

SEQ ID NO: 1429233 - DNA, 15 bp, Homo sapiens
ccatacacatttggc

SEQ ID NO: 1429234 - DNA, 15 bp, Homo sapiens
catacacatttggct

SEQ ID NO: 1429235 - DNA, 15 bp, Homo sapiens
atacacatttggctc

SEQ ID NO: 1429236 - DNA, 15 bp, Homo sapiens
tacacatttggctca

SEQ ID NO: 1429237 - DNA, 15 bp, Homo sapiens
acacatttggctcag

SEQ ID NO: 1429238 - DNA, 15 bp, Homo sapiens
cacatttggctcagg

SEQ ID NO: 1429239 - DNA, 15 bp, Homo sapiens
acatttggctcaggg

SEQ ID NO: 1429240 - DNA, 15 bp, Homo sapiens
catttggctcagggt

SEQ ID NO: 1429241 - DNA, 15 bp, Homo sapiens
atttggctcagggtt

SEQ ID NO: 1429242 - DNA, 15 bp, Homo sapiens
ttggctcagggttac

SEQ ID NO: 1429243 - DNA, 15 bp, Homo sapiens
tggctcagggttacc

SEQ ID NO: 1429244 - DNA, 15 bp, Homo sapiens
ggctcagggttaccg

SEQ ID NO: 1429245 - DNA, 15 bp, Homo sapiens
gctcagggttaccga

SEQ ID NO: 1429246 - DNA, 15 bp, Homo sapiens
ctcagggttaccgaa

SEQ ID NO: 1429247 - DNA, 15 bp, Homo sapiens
tcagggttaccgaag

SEQ ID NO: 1429248 - DNA, 15 bp, Homo sapiens
cagggttaccgaaga

SEQ ID NO: 1429249 - DNA, 15 bp, Homo sapiens
agggttaccgaagag

SEQ ID NO: 1429250 - DNA, 15 bp, Homo sapiens
gggttaccgaagagg

SEQ ID NO: 1429251 - DNA, 15 bp, Homo sapiens
ggttaccgaagaggg

SEQ ID NO: 1429252 - DNA, 15 bp, Homo sapiens
gttaccgaagagggg

SEQ ID NO: 1429253 - DNA, 15 bp, Homo sapiens
ttaccgaagaggggc

SEQ ID NO: 1429254 - DNA, 15 bp, Homo sapiens
taccgaagaggggcc

SEQ ID NO: 1429255 - DNA, 15 bp, Homo sapiens
accgaagaggggcca

SEQ ID NO: 1429256 - DNA, 15 bp, Homo sapiens
ccgaagaggggccaa

SEQ ID NO: 1429257 - DNA, 15 bp, Homo sapiens
cgaagaggggccaag

SEQ ID NO: 1429258 - DNA, 15 bp, Homo sapiens
gaagaggggccaaga

SEQ ID NO: 1429259 - DNA, 15 bp, Homo sapiens
aagaggggccaagaa

SEQ ID NO: 1429260 - DNA, 15 bp, Homo sapiens
agaggggccaagaaa

SEQ ID NO: 1429261 - DNA, 15 bp, Homo sapiens
gaggggccaagaaat

SEQ ID NO: 1429262 - DNA, 15 bp, Homo sapiens
aggggccaagaaatt

SEQ ID NO: 1429263 - DNA, 15 bp, Homo sapiens
ggggccaagaaatta

SEQ ID NO: 1429264 - DNA, 15 bp, Homo sapiens
gggccaagaaattag

SEQ ID NO: 1429265 - DNA, 15 bp, Homo sapiens
ggccaagaaattaga

SEQ ID NO: 1429266 - DNA, 15 bp, Homo sapiens
gccaagaaattagag

SEQ ID NO: 1429267 - DNA, 15 bp, Homo sapiens
ccaagaaattagagt

SEQ ID NO: 1429268 - DNA, 15 bp, Homo sapiens
caagaaattagagtc

SEQ ID NO: 1429269 - DNA, 15 bp, Homo sapiens
aagaaattagagtcc

SEQ ID NO: 1429270 - DNA, 15 bp, Homo sapiens
agaaattagagtcct

SEQ ID NO: 1429271 - DNA, 15 bp, Homo sapiens
gaaattagagtcctc

SEQ ID NO: 1429272 - DNA, 15 bp, Homo sapiens
aaattagagtcctca

SEQ ID NO: 1429273 - DNA, 15 bp, Homo sapiens
aattagagtcctcag

SEQ ID NO: 1429274 - DNA, 15 bp, Homo sapiens
attagagtcctcaga

SEQ ID NO: 1429275 - DNA, 15 bp, Homo sapiens
ttagagtcctcagaa

SEQ ID NO: 1429276 - DNA, 15 bp, Homo sapiens
tagagtcctcagaag

SEQ ID NO: 1429277 - DNA, 15 bp, Homo sapiens
agagtcctcagaaga

SEQ ID NO: 1429278 - DNA, 15 bp, Homo sapiens
gagtcctcagaagag

SEQ ID NO: 1429279 - DNA, 15 bp, Homo sapiens
agtcctcagaagaga

SEQ ID NO: 1429280 - DNA, 15 bp, Homo sapiens
gtcctcagaagagaa

SEQ ID NO: 1429281 - DNA, 15 bp, Homo sapiens
tcctcagaagagaac

SEQ ID NO: 1429282 - DNA, 15 bp, Homo sapiens
cctcagaagagaact

SEQ ID NO: 1429283 - DNA, 15 bp, Homo sapiens
ctcagaagagaactt

SEQ ID NO: 1429284 - DNA, 15 bp, Homo sapiens
ggaaacaaaatgttc

SEQ ID NO: 1429285 - DNA, 15 bp, Homo sapiens
gaaacaaaatgttct

SEQ ID NO: 1429286 - DNA, 15 bp, Homo sapiens
aaacaaaatgttctg

SEQ ID NO: 1429287 - DNA, 15 bp, Homo sapiens
aacaaaatgttctgc

SEQ ID NO: 1429288 - DNA, 15 bp, Homo sapiens
acaaaatgttctgct

SEQ ID NO: 1429289 - DNA, 15 bp, Homo sapiens
caaaatgttctgcta

SEQ ID NO: 1429290 - DNA, 15 bp, Homo sapiens
aaaatgttctgctag

SEQ ID NO: 1429291 - DNA, 15 bp, Homo sapiens
aaatgttctgctagc

SEQ ID NO: 1429292 - DNA, 15 bp, Homo sapiens
aatgttctgctagct

SEQ ID NO: 1429293 - DNA, 15 bp, Homo sapiens
atgttctgctagctt

SEQ ID NO: 1429294 - DNA, 15 bp, Homo sapiens
tgttctgctagcttg

SEQ ID NO: 1429295 - DNA, 15 bp, Homo sapiens
gttctgctagcttgt

SEQ ID NO: 1429296 - DNA, 15 bp, Homo sapiens
ttctgctagcttgtt

SEQ ID NO: 1429297 - DNA, 15 bp, Homo sapiens
tctgctagcttgttt

SEQ ID NO: 1429298 - DNA, 15 bp, Homo sapiens
ctgctagcttgtttt

SEQ ID NO: 1429299 - DNA, 15 bp, Homo sapiens
tgctagcttgttttc

SEQ ID NO: 1429300 - DNA, 15 bp, Homo sapiens
gctagcttgttttct

SEQ ID NO: 1429301 - DNA, 15 bp, Homo sapiens
ctagcttgttttctt

SEQ ID NO: 1429302 - DNA, 15 bp, Homo sapiens
tagcttgttttcttc

SEQ ID NO: 1429303 - DNA, 15 bp, Homo sapiens
agcttgttttcttca

SEQ ID NO: 1429304 - DNA, 15 bp, Homo sapiens
gcttgttttcttcac

SEQ ID NO: 1429305 - DNA, 15 bp, Homo sapiens
cttgttttcttcaca

SEQ ID NO: 1429306 - DNA, 15 bp, Homo sapiens
ttgttttcttcacag

SEQ ID NO: 1429307 - DNA, 15 bp, Homo sapiens
gttttcttcacagtg

SEQ ID NO: 1429308 - DNA, 15 bp, Homo sapiens
ttttcttcacagtgc

SEQ ID NO: 1429309 - DNA, 15 bp, Homo sapiens
tttcttcacagtgca

SEQ ID NO: 1429310 - DNA, 15 bp, Homo sapiens
ttcttcacagtgcag

SEQ ID NO: 1429311 - DNA, 15 bp, Homo sapiens
tcttcacagtgcagt

SEQ ID NO: 1429312 - DNA, 15 bp, Homo sapiens
cttcacagtgcagtg

SEQ ID NO: 1429313 - DNA, 15 bp, Homo sapiens
ttcacagtgcagtga

SEQ ID NO: 1429314 - DNA, 15 bp, Homo sapiens
tcacagtgcagtgaa

SEQ ID NO: 1429315 - DNA, 15 bp, Homo sapiens
cacagtgcagtgaat

SEQ ID NO: 1429316 - DNA, 15 bp, Homo sapiens
acagtgcagtgaatt

SEQ ID NO: 1429317 - DNA, 15 bp, Homo sapiens
cagtgcagtgaattg

SEQ ID NO: 1429318 - DNA, 15 bp, Homo sapiens
agtgcagtgaattgg

SEQ ID NO: 1429319 - DNA, 15 bp, Homo sapiens
gtgcagtgaattgga

SEQ ID NO: 1429320 - DNA, 15 bp, Homo sapiens
tgcagtgaattggaa

SEQ ID NO: 1429321 - DNA, 15 bp, Homo sapiens
gcagtgaattggaag

SEQ ID NO: 1429322 - DNA, 15 bp, Homo sapiens
cagtgaattggaaga

SEQ ID NO: 1429323 - DNA, 15 bp, Homo sapiens
agtgaattggaagac

SEQ ID NO: 1429324 - DNA, 15 bp, Homo sapiens
gtgaattggaagact

SEQ ID NO: 1429325 - DNA, 15 bp, Homo sapiens
tgaattggaagactt

SEQ ID NO: 1429326 - DNA, 15 bp, Homo sapiens
gaattggaagacttg

SEQ ID NO: 1429327 - DNA, 15 bp, Homo sapiens
aattggaagacttga

SEQ ID NO: 1429328 - DNA, 15 bp, Homo sapiens
attggaagacttgac

SEQ ID NO: 1429329 - DNA, 15 bp, Homo sapiens
ttggaagacttgact

SEQ ID NO: 1429330 - DNA, 15 bp, Homo sapiens
tggaagacttgactg

SEQ ID NO: 1429331 - DNA, 15 bp, Homo sapiens
ggaagacttgactgc

SEQ ID NO: 1429332 - DNA, 15 bp, Homo sapiens
gaagacttgactgca

SEQ ID NO: 1429333 - DNA, 15 bp, Homo sapiens
aagacttgactgcaa

SEQ ID NO: 1429334 - DNA, 15 bp, Homo sapiens
agacttgactgcaaa

SEQ ID NO: 1429335 - DNA, 15 bp, Homo sapiens
gacttgactgcaaat

SEQ ID NO: 1429336 - DNA, 15 bp, Homo sapiens
acttgactgcaaata

SEQ ID NO: 1429337 - DNA, 15 bp, Homo sapiens
cttgactgcaaatac

SEQ ID NO: 1429338 - DNA, 15 bp, Homo sapiens
ttgactgcaaataca

SEQ ID NO: 1429339 - DNA, 15 bp, Homo sapiens
tgactgcaaatacaa

SEQ ID NO: 1429340 - DNA, 15 bp, Homo sapiens
gactgcaaatacaaa

SEQ ID NO: 1429341 - DNA, 15 bp, Homo sapiens
actgcaaatacaaac

SEQ ID NO: 1429342 - DNA, 15 bp, Homo sapiens
ctgcaaatacaaaca

SEQ ID NO: 1429343 - DNA, 15 bp, Homo sapiens
tgcaaatacaaacac

SEQ ID NO: 1429344 - DNA, 15 bp, Homo sapiens
gcaaatacaaacacc

SEQ ID NO: 1429345 - DNA, 15 bp, Homo sapiens
caaatacaaacaccc

SEQ ID NO: 1429346 - DNA, 15 bp, Homo sapiens
aaatacaaacaccca

SEQ ID NO: 1429347 - DNA, 15 bp, Homo sapiens
aatacaaacacccag

SEQ ID NO: 1429348 - DNA, 15 bp, Homo sapiens
atacaaacacccagg

SEQ ID NO: 1429349 - DNA, 15 bp, Homo sapiens
tacaaacacccagga

SEQ ID NO: 1429350 - DNA, 15 bp, Homo sapiens
acaaacacccaggat

SEQ ID NO: 1429351 - DNA, 15 bp, Homo sapiens
caaacacccaggatc

SEQ ID NO: 1429352 - DNA, 15 bp, Homo sapiens
aaacacccaggatcc

SEQ ID NO: 1429353 - DNA, 15 bp, Homo sapiens
aacacccaggatcct

SEQ ID NO: 1429354 - DNA, 15 bp, Homo sapiens
acacccaggatcctt

SEQ ID NO: 1429355 - DNA, 15 bp, Homo sapiens
cacccaggatccttt

SEQ ID NO: 1429356 - DNA, 15 bp, Homo sapiens
acccaggatcctttc

SEQ ID NO: 1429357 - DNA, 15 bp, Homo sapiens
cccaggatcctttct

SEQ ID NO: 1429358 - DNA, 15 bp, Homo sapiens
ccaggatcctttctt

SEQ ID NO: 1429359 - DNA, 15 bp, Homo sapiens
caggatcctttcttg

SEQ ID NO: 1429360 - DNA, 15 bp, Homo sapiens
aggatcctttcttga

SEQ ID NO: 1429361 - DNA, 15 bp, Homo sapiens
ggatcctttcttgat

SEQ ID NO: 1429362 - DNA, 15 bp, Homo sapiens
gatcctttcttgatt

SEQ ID NO: 1429363 - DNA, 15 bp, Homo sapiens
atcctttcttgattg

SEQ ID NO: 1429364 - DNA, 15 bp, Homo sapiens
tcctttcttgattgg

SEQ ID NO: 1429365 - DNA, 15 bp, Homo sapiens
cctttcttgattggt

SEQ ID NO: 1429366 - DNA, 15 bp, Homo sapiens
ctttcttgattggtt

SEQ ID NO: 1429367 - DNA, 15 bp, Homo sapiens
tttcttgattggttc

SEQ ID NO: 1429368 - DNA, 15 bp, Homo sapiens
ttcttgattggttct

SEQ ID NO: 1429369 - DNA, 15 bp, Homo sapiens
tcttgattggttctt

SEQ ID NO: 1429370 - DNA, 15 bp, Homo sapiens
cttgattggttcttc

SEQ ID NO: 1429371 - DNA, 15 bp, Homo sapiens
ttgattggttcttcc

SEQ ID NO: 1429372 - DNA, 15 bp, Homo sapiens
tgattggttcttcca

SEQ ID NO: 1429373 - DNA, 15 bp, Homo sapiens
gattggttcttccaa

SEQ ID NO: 1429374 - DNA, 15 bp, Homo sapiens
attggttcttccaaa

SEQ ID NO: 1429375 - DNA, 15 bp, Homo sapiens
ttggttcttccaaac

SEQ ID NO: 1429376 - DNA, 15 bp, Homo sapiens
tggttcttccaaaca

SEQ ID NO: 1429377 - DNA, 15 bp, Homo sapiens
ggttcttccaaacaa

SEQ ID NO: 1429378 - DNA, 15 bp, Homo sapiens
gttcttccaaacaaa

SEQ ID NO: 1429379 - DNA, 15 bp, Homo sapiens
ttcttccaaacaaat

SEQ ID NO: 1429380 - DNA, 15 bp, Homo sapiens
tcttccaaacaaatg

SEQ ID NO: 1429381 - DNA, 15 bp, Homo sapiens
cttccaaacaaatga

SEQ ID NO: 1429382 - DNA, 15 bp, Homo sapiens
ttccaaacaaatgag

SEQ ID NO: 1429383 - DNA, 15 bp, Homo sapiens
tccaaacaaatgagg

SEQ ID NO: 1429384 - DNA, 15 bp, Homo sapiens
ccaaacaaatgaggc

SEQ ID NO: 1429385 - DNA, 15 bp, Homo sapiens
caaacaaatgaggca

SEQ ID NO: 1429386 - DNA, 15 bp, Homo sapiens
aaacaaatgaggcat

SEQ ID NO: 1429387 - DNA, 15 bp, Homo sapiens
aacaaatgaggcatc

SEQ ID NO: 1429388 - DNA, 15 bp, Homo sapiens
acaaatgaggcatca

SEQ ID NO: 1429389 - DNA, 15 bp, Homo sapiens
caaatgaggcatcag

SEQ ID NO: 1429390 - DNA, 15 bp, Homo sapiens
aaatgaggcatcagt

SEQ ID NO: 1429391 - DNA, 15 bp, Homo sapiens
aatgaggcatcagtc

SEQ ID NO: 1429392 - DNA, 15 bp, Homo sapiens
atgaggcatcagtct

SEQ ID NO: 1429393 - DNA, 15 bp, Homo sapiens
tgaggcatcagtctg

SEQ ID NO: 1429394 - DNA, 15 bp, Homo sapiens
gaggcatcagtctga

SEQ ID NO: 1429395 - DNA, 15 bp, Homo sapiens
aggcatcagtctgaa

SEQ ID NO: 1429396 - DNA, 15 bp, Homo sapiens
ggcatcagtctgaaa

SEQ ID NO: 1429397 - DNA, 15 bp, Homo sapiens
gcatcagtctgaaag

SEQ ID NO: 1429398 - DNA, 15 bp, Homo sapiens
catcagtctgaaagc

SEQ ID NO: 1429399 - DNA, 15 bp, Homo sapiens
atcagtctgaaagcc

SEQ ID NO: 1429400 - DNA, 15 bp, Homo sapiens
tcagtctgaaagcca

SEQ ID NO: 1429401 - DNA, 15 bp, Homo sapiens
cagtctgaaagccag

SEQ ID NO: 1429402 - DNA, 15 bp, Homo sapiens
agtctgaaagccagg

SEQ ID NO: 1429403 - DNA, 15 bp, Homo sapiens
gtctgaaagccaggg

SEQ ID NO: 1429404 - DNA, 15 bp, Homo sapiens
tctgaaagccaggga

SEQ ID NO: 1429405 - DNA, 15 bp, Homo sapiens
ctgaaagccagggag

SEQ ID NO: 1429406 - DNA, 15 bp, Homo sapiens
tgaaagccagggagt

SEQ ID NO: 1429407 - DNA, 15 bp, Homo sapiens
gaaagccagggagtt

SEQ ID NO: 1429408 - DNA, 15 bp, Homo sapiens
aaagccagggagttg

SEQ ID NO: 1429409 - DNA, 15 bp, Homo sapiens
aagccagggagttgg

SEQ ID NO: 1429410 - DNA, 15 bp, Homo sapiens
agccagggagttggt

SEQ ID NO: 1429411 - DNA, 15 bp, Homo sapiens
gccagggagttggtc

SEQ ID NO: 1429412 - DNA, 15 bp, Homo sapiens
ccagggagttggtct

SEQ ID NO: 1429413 - DNA, 15 bp, Homo sapiens
cagggagttggtctg

SEQ ID NO: 1429414 - DNA, 15 bp, Homo sapiens
agggagttggtctga

SEQ ID NO: 1429415 - DNA, 15 bp, Homo sapiens
gggagttggtctgag

SEQ ID NO: 1429416 - DNA, 15 bp, Homo sapiens
ggagttggtctgagt

SEQ ID NO: 1429417 - DNA, 15 bp, Homo sapiens
gagttggtctgagtg

SEQ ID NO: 1429418 - DNA, 15 bp, Homo sapiens
agttggtctgagtga

SEQ ID NO: 1429419 - DNA, 15 bp, Homo sapiens
gttggtctgagtgac

SEQ ID NO: 1429420 - DNA, 15 bp, Homo sapiens
ttggtctgagtgaca

SEQ ID NO: 1429421 - DNA, 15 bp, Homo sapiens
tggtctgagtgacaa

SEQ ID NO: 1429422 - DNA, 15 bp, Homo sapiens
ggtctgagtgacaag

SEQ ID NO: 1429423 - DNA, 15 bp, Homo sapiens
gtctgagtgacaagg

SEQ ID NO: 1429424 - DNA, 15 bp, Homo sapiens
tctgagtgacaagga

SEQ ID NO: 1429425 - DNA, 15 bp, Homo sapiens
ctgagtgacaaggaa

SEQ ID NO: 1429426 - DNA, 15 bp, Homo sapiens
tgagtgacaaggaat

SEQ ID NO: 1429427 - DNA, 15 bp, Homo sapiens
gagtgacaaggaatt

SEQ ID NO: 1429428 - DNA, 15 bp, Homo sapiens
agtgacaaggaattg

SEQ ID NO: 1429429 - DNA, 15 bp, Homo sapiens
gtgacaaggaattgg

SEQ ID NO: 1429430 - DNA, 15 bp, Homo sapiens
tgacaaggaattggt

SEQ ID NO: 1429431 - DNA, 15 bp, Homo sapiens
gacaaggaattggtt

SEQ ID NO: 1429432 - DNA, 15 bp, Homo sapiens
acaaggaattggttt

SEQ ID NO: 1429433 - DNA, 15 bp, Homo sapiens
caaggaattggtttc

SEQ ID NO: 1429434 - DNA, 15 bp, Homo sapiens
aaggaattggtttca

SEQ ID NO: 1429435 - DNA, 15 bp, Homo sapiens
aggaattggtttcag

SEQ ID NO: 1429436 - DNA, 15 bp, Homo sapiens
ggaattggtttcaga

SEQ ID NO: 1429437 - DNA, 15 bp, Homo sapiens
gaattggtttcagat

SEQ ID NO: 1429438 - DNA, 15 bp, Homo sapiens
aattggtttcagatg

SEQ ID NO: 1429439 - DNA, 15 bp, Homo sapiens
attggtttcagatga

SEQ ID NO: 1429440 - DNA, 15 bp, Homo sapiens
ttggtttcagatgat

SEQ ID NO: 1429441 - DNA, 15 bp, Homo sapiens
tggtttcagatgatg

SEQ ID NO: 1429442 - DNA, 15 bp, Homo sapiens
ggtttcagatgatga

SEQ ID NO: 1429443 - DNA, 15 bp, Homo sapiens
gtttcagatgatgaa

SEQ ID NO: 1429444 - DNA, 15 bp, Homo sapiens
tttcagatgatgaag

SEQ ID NO: 1429445 - DNA, 15 bp, Homo sapiens
ttcagatgatgaaga

SEQ ID NO: 1429446 - DNA, 15 bp, Homo sapiens
tcagatgatgaagaa

SEQ ID NO: 1429447 - DNA, 15 bp, Homo sapiens
cagatgatgaagaaa

SEQ ID NO: 1429448 - DNA, 15 bp, Homo sapiens
agatgatgaagaaag

SEQ ID NO: 1429449 - DNA, 15 bp, Homo sapiens
gatgatgaagaaaga

SEQ ID NO: 1429450 - DNA, 15 bp, Homo sapiens
tgatgaagaaagagg

SEQ ID NO: 1429451 - DNA, 15 bp, Homo sapiens
gatgaagaaagagga

SEQ ID NO: 1429452 - DNA, 15 bp, Homo sapiens
atgaagaaagaggaa

SEQ ID NO: 1429453 - DNA, 15 bp, Homo sapiens
tgaagaaagaggaac

SEQ ID NO: 1429454 - DNA, 15 bp, Homo sapiens
gaagaaagaggaacg

SEQ ID NO: 1429455 - DNA, 15 bp, Homo sapiens
aagaaagaggaacgg

SEQ ID NO: 1429456 - DNA, 15 bp, Homo sapiens
agaaagaggaacggg

SEQ ID NO: 1429457 - DNA, 15 bp, Homo sapiens
gaaagaggaacgggc

SEQ ID NO: 1429458 - DNA, 15 bp, Homo sapiens
aaagaggaacgggct

SEQ ID NO: 1429459 - DNA, 15 bp, Homo sapiens
aagaggaacgggctt

SEQ ID NO: 1429460 - DNA, 15 bp, Homo sapiens
agaggaacgggcttg

SEQ ID NO: 1429461 - DNA, 15 bp, Homo sapiens
gaggaacgggcttgg

SEQ ID NO: 1429462 - DNA, 15 bp, Homo sapiens
aggaacgggcttgga

SEQ ID NO: 1429463 - DNA, 15 bp, Homo sapiens
ggaacgggcttggaa

SEQ ID NO: 1429464 - DNA, 15 bp, Homo sapiens
gaacgggcttggaag

SEQ ID NO: 1429465 - DNA, 15 bp, Homo sapiens
aacgggcttggaaga

SEQ ID NO: 1429466 - DNA, 15 bp, Homo sapiens
acgggcttggaagaa

SEQ ID NO: 1429467 - DNA, 15 bp, Homo sapiens
cgggcttggaagaaa

SEQ ID NO: 1429468 - DNA, 15 bp, Homo sapiens
gggcttggaagaaaa

SEQ ID NO: 1429469 - DNA, 15 bp, Homo sapiens
ggcttggaagaaaat

SEQ ID NO: 1429470 - DNA, 15 bp, Homo sapiens
gcttggaagaaaata

SEQ ID NO: 1429471 - DNA, 15 bp, Homo sapiens
cttggaagaaaataa

SEQ ID NO: 1429472 - DNA, 15 bp, Homo sapiens
ttggaagaaaataat

SEQ ID NO: 1429473 - DNA, 15 bp, Homo sapiens
tggaagaaaataatc

SEQ ID NO: 1429474 - DNA, 15 bp, Homo sapiens
ggaagaaaataatca

SEQ ID NO: 1429475 - DNA, 15 bp, Homo sapiens
gaagaaaataatcaa

SEQ ID NO: 1429476 - DNA, 15 bp, Homo sapiens
aagaaaataatcaag

SEQ ID NO: 1429477 - DNA, 15 bp, Homo sapiens
agaaaataatcaaga

SEQ ID NO: 1429478 - DNA, 15 bp, Homo sapiens
gaaaataatcaagaa

SEQ ID NO: 1429479 - DNA, 15 bp, Homo sapiens
aaaataatcaagaag

SEQ ID NO: 1429480 - DNA, 15 bp, Homo sapiens
aaataatcaagaaga

SEQ ID NO: 1429481 - DNA, 15 bp, Homo sapiens
aataatcaagaagag

SEQ ID NO: 1429482 - DNA, 15 bp, Homo sapiens
ataatcaagaagagc

SEQ ID NO: 1429483 - DNA, 15 bp, Homo sapiens
taatcaagaagagca

SEQ ID NO: 1429484 - DNA, 15 bp, Homo sapiens
aatcaagaagagcaa

SEQ ID NO: 1429485 - DNA, 15 bp, Homo sapiens
atcaagaagagcaaa

SEQ ID NO: 1429486 - DNA, 15 bp, Homo sapiens
tcaagaagagcaaag

SEQ ID NO: 1429487 - DNA, 15 bp, Homo sapiens
caagaagagcaaagc

SEQ ID NO: 1429488 - DNA, 15 bp, Homo sapiens
aagaagagcaaagca

SEQ ID NO: 1429489 - DNA, 15 bp, Homo sapiens
agaagagcaaagcat

SEQ ID NO: 1429490 - DNA, 15 bp, Homo sapiens
gaagagcaaagcatg

SEQ ID NO: 1429491 - DNA, 15 bp, Homo sapiens
aagagcaaagcatgg

SEQ ID NO: 1429492 - DNA, 15 bp, Homo sapiens
agagcaaagcatgga

SEQ ID NO: 1429493 - DNA, 15 bp, Homo sapiens
gagcaaagcatggat

SEQ ID NO: 1429494 - DNA, 15 bp, Homo sapiens
agcaaagcatggatt

SEQ ID NO: 1429495 - DNA, 15 bp, Homo sapiens
gcaaagcatggattc

SEQ ID NO: 1429496 - DNA, 15 bp, Homo sapiens
caaagcatggattca

SEQ ID NO: 1429497 - DNA, 15 bp, Homo sapiens
aaagcatggattcaa

SEQ ID NO: 1429498 - DNA, 15 bp, Homo sapiens
aagcatggattcaaa

SEQ ID NO: 1429499 - DNA, 15 bp, Homo sapiens
agcatggattcaaac

SEQ ID NO: 1429500 - DNA, 15 bp, Homo sapiens
gcatggattcaaact

SEQ ID NO: 1429501 - DNA, 15 bp, Homo sapiens
catggattcaaactt

SEQ ID NO: 1429502 - DNA, 15 bp, Homo sapiens
atggattcaaactta

SEQ ID NO: 1429503 - DNA, 15 bp, Homo sapiens
tggattcaaacttag

SEQ ID NO: 1429504 - DNA, 15 bp, Homo sapiens
ggattcaaacttagg

SEQ ID NO: 1429505 - DNA, 15 bp, Homo sapiens
gattcaaacttaggt

SEQ ID NO: 1429506 - DNA, 15 bp, Homo sapiens
attcaaacttaggta

SEQ ID NO: 1429507 - DNA, 15 bp, Homo sapiens
ttcaaacttaggtat

SEQ ID NO: 1429508 - DNA, 15 bp, Homo sapiens
tcaaacttaggtatt

SEQ ID NO: 1429509 - DNA, 15 bp, Homo sapiens
caaacttaggtattg

SEQ ID NO: 1429510 - DNA, 15 bp, Homo sapiens
aaacttaggtattgg

SEQ ID NO: 1429511 - DNA, 15 bp, Homo sapiens
aacttaggtattgga

SEQ ID NO: 1429512 - DNA, 15 bp, Homo sapiens
acttaggtattggaa

SEQ ID NO: 1429513 - DNA, 15 bp, Homo sapiens
cttaggtattggaac

SEQ ID NO: 1429514 - DNA, 15 bp, Homo sapiens
ttaggtattggaacc

SEQ ID NO: 1429515 - DNA, 15 bp, Homo sapiens
taggtattggaacca

SEQ ID NO: 1429516 - DNA, 15 bp, Homo sapiens
aggtattggaaccag

SEQ ID NO: 1429517 - DNA, 15 bp, Homo sapiens
ggtattggaaccagg

SEQ ID NO: 1429518 - DNA, 15 bp, Homo sapiens
gtattggaaccaggt

SEQ ID NO: 1429519 - DNA, 15 bp, Homo sapiens
tattggaaccaggtt

SEQ ID NO: 1429520 - DNA, 15 bp, Homo sapiens
attggaaccaggttt

SEQ ID NO: 1429521 - DNA, 15 bp, Homo sapiens
ttggaaccaggtttt

SEQ ID NO: 1429522 - DNA, 15 bp, Homo sapiens
tggaaccaggttttt

SEQ ID NO: 1429523 - DNA, 15 bp, Homo sapiens
ggaaccaggtttttg

SEQ ID NO: 1429524 - DNA, 15 bp, Homo sapiens
gaaccaggtttttgt

SEQ ID NO: 1429525 - DNA, 15 bp, Homo sapiens
aaccaggtttttgtg

SEQ ID NO: 1429526 - DNA, 15 bp, Homo sapiens
accaggtttttgtgt

SEQ ID NO: 1429527 - DNA, 15 bp, Homo sapiens
ccaggtttttgtgtt

SEQ ID NO: 1429528 - DNA, 15 bp, Homo sapiens
caggtttttgtgttt

SEQ ID NO: 1429529 - DNA, 15 bp, Homo sapiens
aggtttttgtgtttg

SEQ ID NO: 1429530 - DNA, 15 bp, Homo sapiens
ggtttttgtgtttgc

SEQ ID NO: 1429531 - DNA, 15 bp, Homo sapiens
gtttttgtgtttgcc

SEQ ID NO: 1429532 - DNA, 15 bp, Homo sapiens
tttttgtgtttgccc

SEQ ID NO: 1429533 - DNA, 15 bp, Homo sapiens
ttttgtgtttgcccc

SEQ ID NO: 1429534 - DNA, 15 bp, Homo sapiens
tttgtgtttgcccca

SEQ ID NO: 1429535 - DNA, 15 bp, Homo sapiens
ttgtgtttgccccag

SEQ ID NO: 1429536 - DNA, 15 bp, Homo sapiens
tgtgtttgccccagt

SEQ ID NO: 1429537 - DNA, 15 bp, Homo sapiens
gtgtttgccccagtc

SEQ ID NO: 1429538 - DNA, 15 bp, Homo sapiens
tgtttgccccagtct

SEQ ID NO: 1429539 - DNA, 15 bp, Homo sapiens
gtttgccccagtcta

SEQ ID NO: 1429540 - DNA, 15 bp, Homo sapiens
tttgccccagtctat

SEQ ID NO: 1429541 - DNA, 15 bp, Homo sapiens
ttgccccagtctatt

SEQ ID NO: 1429542 - DNA, 15 bp, Homo sapiens
tgccccagtctattt

SEQ ID NO: 1429543 - DNA, 15 bp, Homo sapiens
gccccagtctattta

SEQ ID NO: 1429544 - DNA, 15 bp, Homo sapiens
ccccagtctatttat

SEQ ID NO: 1429545 - DNA, 15 bp, Homo sapiens
cccagtctatttata

SEQ ID NO: 1429546 - DNA, 15 bp, Homo sapiens
ccagtctatttatag

SEQ ID NO: 1429547 - DNA, 15 bp, Homo sapiens
cagtctatttataga

SEQ ID NO: 1429548 - DNA, 15 bp, Homo sapiens
agtctatttatagaa

SEQ ID NO: 1429549 - DNA, 15 bp, Homo sapiens
gtctatttatagaag

SEQ ID NO: 1429550 - DNA, 15 bp, Homo sapiens
tctatttatagaagt

SEQ ID NO: 1429551 - DNA, 15 bp, Homo sapiens
ctatttatagaagtg

SEQ ID NO: 1429552 - DNA, 15 bp, Homo sapiens
tatttatagaagtga

SEQ ID NO: 1429553 - DNA, 15 bp, Homo sapiens
atttatagaagtgag

SEQ ID NO: 1429554 - DNA, 15 bp, Homo sapiens
tttatagaagtgagc

SEQ ID NO: 1429555 - DNA, 15 bp, Homo sapiens
ttatagaagtgagct

SEQ ID NO: 1429556 - DNA, 15 bp, Homo sapiens
tatagaagtgagcta

SEQ ID NO: 1429557 - DNA, 15 bp, Homo sapiens
atagaagtgagctaa

SEQ ID NO: 1429558 - DNA, 15 bp, Homo sapiens
tagaagtgagctaaa

SEQ ID NO: 1429559 - DNA, 15 bp, Homo sapiens
agaagtgagctaaat

SEQ ID NO: 1429560 - DNA, 15 bp, Homo sapiens
gaagtgagctaaatg

SEQ ID NO: 1429561 - DNA, 15 bp, Homo sapiens
aagtgagctaaatgt

SEQ ID NO: 1429562 - DNA, 15 bp, Homo sapiens
agtgagctaaatgtt

SEQ ID NO: 1429563 - DNA, 15 bp, Homo sapiens
gtgagctaaatgttt

SEQ ID NO: 1429564 - DNA, 15 bp, Homo sapiens
tgagctaaatgttta

SEQ ID NO: 1429565 - DNA, 15 bp, Homo sapiens
gagctaaatgtttat

SEQ ID NO: 1429566 - DNA, 15 bp, Homo sapiens
agctaaatgtttatg

SEQ ID NO: 1429567 - DNA, 15 bp, Homo sapiens
gctaaatgtttatgc

SEQ ID NO: 1429568 - DNA, 15 bp, Homo sapiens
ctaaatgtttatgct

SEQ ID NO: 1429569 - DNA, 15 bp, Homo sapiens
taaatgtttatgctt

SEQ ID NO: 1429570 - DNA, 15 bp, Homo sapiens
aaatgtttatgcttt

SEQ ID NO: 1429571 - DNA, 15 bp, Homo sapiens
aatgtttatgctttt

SEQ ID NO: 1429572 - DNA, 15 bp, Homo sapiens
atgtttatgcttttg

SEQ ID NO: 1429573 - DNA, 15 bp, Homo sapiens
tgtttatgcttttgg

SEQ ID NO: 1429574 - DNA, 15 bp, Homo sapiens
gtttatgcttttggg

SEQ ID NO: 1429575 - DNA, 15 bp, Homo sapiens
tttatgcttttgggg

SEQ ID NO: 1429576 - DNA, 15 bp, Homo sapiens
ttatgcttttgggga

SEQ ID NO: 1429577 - DNA, 15 bp, Homo sapiens
tatgcttttggggag

SEQ ID NO: 1429578 - DNA, 15 bp, Homo sapiens
atgcttttggggagc

SEQ ID NO: 1429579 - DNA, 15 bp, Homo sapiens
tgcttttggggagca

SEQ ID NO: 1429580 - DNA, 15 bp, Homo sapiens
gcttttggggagcac

SEQ ID NO: 1429581 - DNA, 15 bp, Homo sapiens
cttttggggagcaca

SEQ ID NO: 1429582 - DNA, 15 bp, Homo sapiens
ttttggggagcacat

SEQ ID NO: 1429583 - DNA, 15 bp, Homo sapiens
tttggggagcacatt

SEQ ID NO: 1429584 - DNA, 15 bp, Homo sapiens
ttggggagcacattt

SEQ ID NO: 1429585 - DNA, 15 bp, Homo sapiens
tggggagcacatttt

SEQ ID NO: 1429586 - DNA, 15 bp, Homo sapiens
ggggagcacatttta

SEQ ID NO: 1429587 - DNA, 15 bp, Homo sapiens
gggagcacattttac

SEQ ID NO: 1429588 - DNA, 15 bp, Homo sapiens
ggagcacattttaca

SEQ ID NO: 1429589 - DNA, 15 bp, Homo sapiens
gagcacattttacaa

SEQ ID NO: 1429590 - DNA, 15 bp, Homo sapiens
agcacattttacaaa

SEQ ID NO: 1429591 - DNA, 15 bp, Homo sapiens
gcacattttacaaat

SEQ ID NO: 1429592 - DNA, 15 bp, Homo sapiens
cacattttacaaatt

SEQ ID NO: 1429593 - DNA, 15 bp, Homo sapiens
acattttacaaattt

SEQ ID NO: 1429594 - DNA, 15 bp, Homo sapiens
cattttacaaatttc

SEQ ID NO: 1429595 - DNA, 15 bp, Homo sapiens
attttacaaatttcc

SEQ ID NO: 1429596 - DNA, 15 bp, Homo sapiens
ttttacaaatttcca

SEQ ID NO: 1429597 - DNA, 15 bp, Homo sapiens
tttacaaatttccaa

SEQ ID NO: 1429598 - DNA, 15 bp, Homo sapiens
ttacaaatttccaag

SEQ ID NO: 1429599 - DNA, 15 bp, Homo sapiens
tacaaatttccaagt

SEQ ID NO: 1429600 - DNA, 15 bp, Homo sapiens
acaaatttccaagta

SEQ ID NO: 1429601 - DNA, 15 bp, Homo sapiens
caaatttccaagtat

SEQ ID NO: 1429602 - DNA, 15 bp, Homo sapiens
aaatttccaagtata

SEQ ID NO: 1429603 - DNA, 15 bp, Homo sapiens
aatttccaagtatag

SEQ ID NO: 1429604 - DNA, 15 bp, Homo sapiens
atttccaagtatagt

SEQ ID NO: 1429605 - DNA, 15 bp, Homo sapiens
tttccaagtatagtt

SEQ ID NO: 1429606 - DNA, 15 bp, Homo sapiens
ttccaagtatagtta

SEQ ID NO: 1429607 - DNA, 15 bp, Homo sapiens
tccaagtatagttaa

SEQ ID NO: 1429608 - DNA, 15 bp, Homo sapiens
ccaagtatagttaaa

SEQ ID NO: 1429609 - DNA, 15 bp, Homo sapiens
caagtatagttaaag

SEQ ID NO: 1429610 - DNA, 15 bp, Homo sapiens
aagtatagttaaagg

SEQ ID NO: 1429611 - DNA, 15 bp, Homo sapiens
agtatagttaaagga

SEQ ID NO: 1429612 - DNA, 15 bp, Homo sapiens
gtatagttaaaggaa

SEQ ID NO: 1429613 - DNA, 15 bp, Homo sapiens
tatagttaaaggaac

SEQ ID NO: 1429614 - DNA, 15 bp, Homo sapiens
atagttaaaggaact

SEQ ID NO: 1429615 - DNA, 15 bp, Homo sapiens
tagttaaaggaactg

SEQ ID NO: 1429616 - DNA, 15 bp, Homo sapiens
agttaaaggaactgc

SEQ ID NO: 1429617 - DNA, 15 bp, Homo sapiens
gttaaaggaactgct

SEQ ID NO: 1429618 - DNA, 15 bp, Homo sapiens
ttaaaggaactgctt

SEQ ID NO: 1429619 - DNA, 15 bp, Homo sapiens
taaaggaactgcttc

SEQ ID NO: 1429620 - DNA, 15 bp, Homo sapiens
aaaggaactgcttct

SEQ ID NO: 1429621 - DNA, 15 bp, Homo sapiens
aaggaactgcttctt

SEQ ID NO: 1429622 - DNA, 15 bp, Homo sapiens
aggaactgcttctta

SEQ ID NO: 1429623 - DNA, 15 bp, Homo sapiens
ggaactgcttcttaa

SEQ ID NO: 1429624 - DNA, 15 bp, Homo sapiens
gaactgcttcttaaa

SEQ ID NO: 1429625 - DNA, 15 bp, Homo sapiens
aactgcttcttaaac

SEQ ID NO: 1429626 - DNA, 15 bp, Homo sapiens
actgcttcttaaact

SEQ ID NO: 1429627 - DNA, 15 bp, Homo sapiens
ctgcttcttaaactt

SEQ ID NO: 1429628 - DNA, 15 bp, Homo sapiens
tgcttcttaaacttg

SEQ ID NO: 1429629 - DNA, 15 bp, Homo sapiens
gcttcttaaacttga

SEQ ID NO: 1429630 - DNA, 15 bp, Homo sapiens
cttcttaaacttgaa

SEQ ID NO: 1429631 - DNA, 15 bp, Homo sapiens
ttcttaaacttgaaa

SEQ ID NO: 1429632 - DNA, 15 bp, Homo sapiens
tcttaaacttgaaac

SEQ ID NO: 1429633 - DNA, 15 bp, Homo sapiens
cttaaacttgaaaca

SEQ ID NO: 1429634 - DNA, 15 bp, Homo sapiens
ttaaacttgaaacat

SEQ ID NO: 1429635 - DNA, 15 bp, Homo sapiens
taaacttgaaacatg

SEQ ID NO: 1429636 - DNA, 15 bp, Homo sapiens
aaacttgaaacatgt

SEQ ID NO: 1429637 - DNA, 15 bp, Homo sapiens
aacttgaaacatgtt

SEQ ID NO: 1429638 - DNA, 15 bp, Homo sapiens
acttgaaacatgttc

SEQ ID NO: 1429639 - DNA, 15 bp, Homo sapiens
cttgaaacatgttcc

SEQ ID NO: 1429640 - DNA, 15 bp, Homo sapiens
ttgaaacatgttcct

SEQ ID NO: 1429641 - DNA, 15 bp, Homo sapiens
tgaaacatgttcctc

SEQ ID NO: 1429642 - DNA, 15 bp, Homo sapiens
gaaacatgttcctcc

SEQ ID NO: 1429643 - DNA, 15 bp, Homo sapiens
aaacatgttcctcct

SEQ ID NO: 1429644 - DNA, 15 bp, Homo sapiens
aacatgttcctccta

SEQ ID NO: 1429645 - DNA, 15 bp, Homo sapiens
acatgttcctcctaa

SEQ ID NO: 1429646 - DNA, 15 bp, Homo sapiens
catgttcctcctaag

SEQ ID NO: 1429647 - DNA, 15 bp, Homo sapiens
atgttcctcctaagg

SEQ ID NO: 1429648 - DNA, 15 bp, Homo sapiens
tgttcctcctaaggt

SEQ ID NO: 1429649 - DNA, 15 bp, Homo sapiens
gttcctcctaaggtg

SEQ ID NO: 1429650 - DNA, 15 bp, Homo sapiens
ttcctcctaaggtgc

SEQ ID NO: 1429651 - DNA, 15 bp, Homo sapiens
tcctcctaaggtgct

SEQ ID NO: 1429652 - DNA, 15 bp, Homo sapiens
cctcctaaggtgctt

SEQ ID NO: 1429653 - DNA, 15 bp, Homo sapiens
ctcctaaggtgcttt

SEQ ID NO: 1429654 - DNA, 15 bp, Homo sapiens
tcctaaggtgctttt

SEQ ID NO: 1429655 - DNA, 15 bp, Homo sapiens
cctaaggtgcttttc

SEQ ID NO: 1429656 - DNA, 15 bp, Homo sapiens
ctaaggtgcttttca

SEQ ID NO: 1429657 - DNA, 15 bp, Homo sapiens
taaggtgcttttcat

SEQ ID NO: 1429658 - DNA, 15 bp, Homo sapiens
aaggtgcttttcata

SEQ ID NO: 1429659 - DNA, 15 bp, Homo sapiens
aggtgcttttcatag

SEQ ID NO: 1429660 - DNA, 15 bp, Homo sapiens
ggtgcttttcataga

SEQ ID NO: 1429661 - DNA, 15 bp, Homo sapiens
gtgcttttcatagaa

SEQ ID NO: 1429662 - DNA, 15 bp, Homo sapiens
tgcttttcatagaaa

SEQ ID NO: 1429663 - DNA, 15 bp, Homo sapiens
gcttttcatagaaaa

SEQ ID NO: 1429664 - DNA, 15 bp, Homo sapiens
cttttcatagaaaaa

SEQ ID NO: 1429665 - DNA, 15 bp, Homo sapiens
ttttcatagaaaaaa

SEQ ID NO: 1429666 - DNA, 15 bp, Homo sapiens
tttcatagaaaaaag

SEQ ID NO: 1429667 - DNA, 15 bp, Homo sapiens
ttcatagaaaaaagt

SEQ ID NO: 1429668 - DNA, 15 bp, Homo sapiens
tcatagaaaaaagtc

SEQ ID NO: 1429669 - DNA, 15 bp, Homo sapiens
catagaaaaaagtcc

SEQ ID NO: 1429670 - DNA, 15 bp, Homo sapiens
atagaaaaaagtcct

SEQ ID NO: 1429671 - DNA, 15 bp, Homo sapiens
tagaaaaaagtcctt

SEQ ID NO: 1429672 - DNA, 15 bp, Homo sapiens
agaaaaaagtccttc

SEQ ID NO: 1429673 - DNA, 15 bp, Homo sapiens
gaaaaaagtccttca

SEQ ID NO: 1429674 - DNA, 15 bp, Homo sapiens
aaaaaagtccttcac

SEQ ID NO: 1429675 - DNA, 15 bp, Homo sapiens
aaaaagtccttcaca

SEQ ID NO: 1429676 - DNA, 15 bp, Homo sapiens
aaaagtccttcacac

SEQ ID NO: 1429677 - DNA, 15 bp, Homo sapiens
aaagtccttcacaca

SEQ ID NO: 1429678 - DNA, 15 bp, Homo sapiens
aagtccttcacacag

SEQ ID NO: 1429679 - DNA, 15 bp, Homo sapiens
agtccttcacacagc

SEQ ID NO: 1429680 - DNA, 15 bp, Homo sapiens
gtccttcacacagct

SEQ ID NO: 1429681 - DNA, 15 bp, Homo sapiens
tccttcacacagcta

SEQ ID NO: 1429682 - DNA, 15 bp, Homo sapiens
ccttcacacagctag

SEQ ID NO: 1429683 - DNA, 15 bp, Homo sapiens
cttcacacagctagg

SEQ ID NO: 1429684 - DNA, 15 bp, Homo sapiens
ttcacacagctagga

SEQ ID NO: 1429685 - DNA, 15 bp, Homo sapiens
tcacacagctaggac

SEQ ID NO: 1429686 - DNA, 15 bp, Homo sapiens
cacacagctaggacg

SEQ ID NO: 1429687 - DNA, 15 bp, Homo sapiens
acacagctaggacgt

SEQ ID NO: 1429688 - DNA, 15 bp, Homo sapiens
cacagctaggacgtc

SEQ ID NO: 1429689 - DNA, 15 bp, Homo sapiens
acagctaggacgtca

SEQ ID NO: 1429690 - DNA, 15 bp, Homo sapiens
cagctaggacgtcat

SEQ ID NO: 1429691 - DNA, 15 bp, Homo sapiens
agctaggacgtcatc

SEQ ID NO: 1429692 - DNA, 15 bp, Homo sapiens
gctaggacgtcatct

SEQ ID NO: 1429693 - DNA, 15 bp, Homo sapiens
ctaggacgtcatctt

SEQ ID NO: 1429694 - DNA, 15 bp, Homo sapiens
taggacgtcatcttt

SEQ ID NO: 1429695 - DNA, 15 bp, Homo sapiens
aggacgtcatctttg

SEQ ID NO: 1429696 - DNA, 15 bp, Homo sapiens
ggacgtcatctttga

SEQ ID NO: 1429697 - DNA, 15 bp, Homo sapiens
gacgtcatctttgac

SEQ ID NO: 1429698 - DNA, 15 bp, Homo sapiens
acgtcatctttgact

SEQ ID NO: 1429699 - DNA, 15 bp, Homo sapiens
cgtcatctttgactg

SEQ ID NO: 1429700 - DNA, 15 bp, Homo sapiens
gtcatctttgactga

SEQ ID NO: 1429701 - DNA, 15 bp, Homo sapiens
tcatctttgactgaa

SEQ ID NO: 1429702 - DNA, 15 bp, Homo sapiens
catctttgactgaat

SEQ ID NO: 1429703 - DNA, 15 bp, Homo sapiens
atctttgactgaatg

SEQ ID NO: 1429704 - DNA, 15 bp, Homo sapiens
tctttgactgaatga

SEQ ID NO: 1429705 - DNA, 15 bp, Homo sapiens
ctttgactgaatgag

SEQ ID NO: 1429706 - DNA, 15 bp, Homo sapiens
tttgactgaatgagc

SEQ ID NO: 1429707 - DNA, 15 bp, Homo sapiens
ttgactgaatgagct

SEQ ID NO: 1429708 - DNA, 15 bp, Homo sapiens
tgactgaatgagctt

SEQ ID NO: 1429709 - DNA, 15 bp, Homo sapiens
gactgaatgagcttt

SEQ ID NO: 1429710 - DNA, 15 bp, Homo sapiens
actgaatgagcttta

SEQ ID NO: 1429711 - DNA, 15 bp, Homo sapiens
ctgaatgagctttaa

SEQ ID NO: 1429712 - DNA, 15 bp, Homo sapiens
tgaatgagctttaac

SEQ ID NO: 1429713 - DNA, 15 bp, Homo sapiens
gaatgagctttaaca

SEQ ID NO: 1429714 - DNA, 15 bp, Homo sapiens
aatgagctttaacat

SEQ ID NO: 1429715 - DNA, 15 bp, Homo sapiens
atgagctttaacatc

SEQ ID NO: 1429716 - DNA, 15 bp, Homo sapiens
tgagctttaacatcc

SEQ ID NO: 1429717 - DNA, 15 bp, Homo sapiens
gagctttaacatcct

SEQ ID NO: 1429718 - DNA, 15 bp, Homo sapiens
agctttaacatccta

SEQ ID NO: 1429719 - DNA, 15 bp, Homo sapiens
gctttaacatcctaa

SEQ ID NO: 1429720 - DNA, 15 bp, Homo sapiens
ctttaacatcctaat

SEQ ID NO: 1429721 - DNA, 15 bp, Homo sapiens
tttaacatcctaatt

SEQ ID NO: 1429722 - DNA, 15 bp, Homo sapiens
ttaacatcctaatta

SEQ ID NO: 1429723 - DNA, 15 bp, Homo sapiens
taacatcctaattac

SEQ ID NO: 1429724 - DNA, 15 bp, Homo sapiens
aacatcctaattact

SEQ ID NO: 1429725 - DNA, 15 bp, Homo sapiens
acatcctaattactg

SEQ ID NO: 1429726 - DNA, 15 bp, Homo sapiens
catcctaattactgg

SEQ ID NO: 1429727 - DNA, 15 bp, Homo sapiens
atcctaattactggt

SEQ ID NO: 1429728 - DNA, 15 bp, Homo sapiens
tcctaattactggtg

SEQ ID NO: 1429729 - DNA, 15 bp, Homo sapiens
cctaattactggtgg

SEQ ID NO: 1429730 - DNA, 15 bp, Homo sapiens
ctaattactggtgga

SEQ ID NO: 1429731 - DNA, 15 bp, Homo sapiens
taattactggtggac

SEQ ID NO: 1429732 - DNA, 15 bp, Homo sapiens
aattactggtggact

SEQ ID NO: 1429733 - DNA, 15 bp, Homo sapiens
attactggtggactt

SEQ ID NO: 1429734 - DNA, 15 bp, Homo sapiens
ttactggtggactta

SEQ ID NO: 1429735 - DNA, 15 bp, Homo sapiens
tactggtggacttac

SEQ ID NO: 1429736 - DNA, 15 bp, Homo sapiens
actggtggacttact

SEQ ID NO: 1429737 - DNA, 15 bp, Homo sapiens
ctggtggacttactt

SEQ ID NO: 1429738 - DNA, 15 bp, Homo sapiens
tggtggacttacttc

SEQ ID NO: 1429739 - DNA, 15 bp, Homo sapiens
ggtggacttacttct

SEQ ID NO: 1429740 - DNA, 15 bp, Homo sapiens
gtggacttacttctg

SEQ ID NO: 1429741 - DNA, 15 bp, Homo sapiens
tggacttacttctgg

SEQ ID NO: 1429742 - DNA, 15 bp, Homo sapiens
ggacttacttctggt

SEQ ID NO: 1429743 - DNA, 15 bp, Homo sapiens
gacttacttctggtt

SEQ ID NO: 1429744 - DNA, 15 bp, Homo sapiens
acttacttctggttt

SEQ ID NO: 1429745 - DNA, 15 bp, Homo sapiens
cttacttctggtttc

SEQ ID NO: 1429746 - DNA, 15 bp, Homo sapiens
ttacttctggtttca

SEQ ID NO: 1429747 - DNA, 15 bp, Homo sapiens
tacttctggtttcat

SEQ ID NO: 1429748 - DNA, 15 bp, Homo sapiens
acttctggtttcatt

SEQ ID NO: 1429749 - DNA, 15 bp, Homo sapiens
cttctggtttcattt

SEQ ID NO: 1429750 - DNA, 15 bp, Homo sapiens
ttctggtttcatttt

SEQ ID NO: 1429751 - DNA, 15 bp, Homo sapiens
tctggtttcatttta

SEQ ID NO: 1429752 - DNA, 15 bp, Homo sapiens
ctggtttcattttat

SEQ ID NO: 1429753 - DNA, 15 bp, Homo sapiens
tggtttcattttata

SEQ ID NO: 1429754 - DNA, 15 bp, Homo sapiens
ggtttcattttataa

SEQ ID NO: 1429755 - DNA, 15 bp, Homo sapiens
gtttcattttataaa

SEQ ID NO: 1429756 - DNA, 15 bp, Homo sapiens
tttcattttataaaa

SEQ ID NO: 1429757 - DNA, 15 bp, Homo sapiens
ttcattttataaaag

SEQ ID NO: 1429758 - DNA, 15 bp, Homo sapiens
tcattttataaaagc

SEQ ID NO: 1429759 - DNA, 15 bp, Homo sapiens
cattttataaaagca

SEQ ID NO: 1429760 - DNA, 15 bp, Homo sapiens
attttataaaagcaa

SEQ ID NO: 1429761 - DNA, 15 bp, Homo sapiens
ttttataaaagcaaa

SEQ ID NO: 1429762 - DNA, 15 bp, Homo sapiens
tttataaaagcaaat

SEQ ID NO: 1429763 - DNA, 15 bp, Homo sapiens
ttataaaagcaaatc

SEQ ID NO: 1429764 - DNA, 15 bp, Homo sapiens
tataaaagcaaatcc

SEQ ID NO: 1429765 - DNA, 15 bp, Homo sapiens
ataaaagcaaatcca

SEQ ID NO: 1429766 - DNA, 15 bp, Homo sapiens
taaaagcaaatccag

SEQ ID NO: 1429767 - DNA, 15 bp, Homo sapiens
aaaagcaaatccagg

SEQ ID NO: 1429768 - DNA, 15 bp, Homo sapiens
aaagcaaatccaggt

SEQ ID NO: 1429769 - DNA, 15 bp, Homo sapiens
aagcaaatccaggtg

SEQ ID NO: 1429770 - DNA, 15 bp, Homo sapiens
agcaaatccaggtgt

SEQ ID NO: 1429771 - DNA, 15 bp, Homo sapiens
gcaaatccaggtgtc

SEQ ID NO: 1429772 - DNA, 15 bp, Homo sapiens
caaatccaggtgtcc

SEQ ID NO: 1429773 - DNA, 15 bp, Homo sapiens
aaatccaggtgtccc

SEQ ID NO: 1429774 - DNA, 15 bp, Homo sapiens
aatccaggtgtccca

SEQ ID NO: 1429775 - DNA, 15 bp, Homo sapiens
atccaggtgtcccaa

SEQ ID NO: 1429776 - DNA, 15 bp, Homo sapiens
tccaggtgtcccaaa

SEQ ID NO: 1429777 - DNA, 15 bp, Homo sapiens
ccaggtgtcccaaag

SEQ ID NO: 1429778 - DNA, 15 bp, Homo sapiens
caggtgtcccaaagc

SEQ ID NO: 1429779 - DNA, 15 bp, Homo sapiens
aggtgtcccaaagca

SEQ ID NO: 1429780 - DNA, 15 bp, Homo sapiens
ggtgtcccaaagcaa

SEQ ID NO: 1429781 - DNA, 15 bp, Homo sapiens
gtgtcccaaagcaag

SEQ ID NO: 1429782 - DNA, 15 bp, Homo sapiens
tgtcccaaagcaagg

SEQ ID NO: 1429783 - DNA, 15 bp, Homo sapiens
gtcccaaagcaagga

SEQ ID NO: 1429784 - DNA, 15 bp, Homo sapiens
tcccaaagcaaggaa

SEQ ID NO: 1429785 - DNA, 15 bp, Homo sapiens
cccaaagcaaggaat

SEQ ID NO: 1429786 - DNA, 15 bp, Homo sapiens
ccaaagcaaggaatt

SEQ ID NO: 1429787 - DNA, 15 bp, Homo sapiens
caaagcaaggaattt

SEQ ID NO: 1429788 - DNA, 15 bp, Homo sapiens
aaagcaaggaattta

SEQ ID NO: 1429789 - DNA, 15 bp, Homo sapiens
aagcaaggaatttaa

SEQ ID NO: 1429790 - DNA, 15 bp, Homo sapiens
agcaaggaatttaat

SEQ ID NO: 1429791 - DNA, 15 bp, Homo sapiens
gcaaggaatttaatc

SEQ ID NO: 1429792 - DNA, 15 bp, Homo sapiens
caaggaatttaatca

SEQ ID NO: 1429793 - DNA, 15 bp, Homo sapiens
aaggaatttaatcat

SEQ ID NO: 1429794 - DNA, 15 bp, Homo sapiens
aggaatttaatcatt

SEQ ID NO: 1429795 - DNA, 15 bp, Homo sapiens
ggaatttaatcattt

SEQ ID NO: 1429796 - DNA, 15 bp, Homo sapiens
gaatttaatcatttt

SEQ ID NO: 1429797 - DNA, 15 bp, Homo sapiens
aatttaatcattttg

SEQ ID NO: 1429798 - DNA, 15 bp, Homo sapiens
atttaatcattttgt

SEQ ID NO: 1429799 - DNA, 15 bp, Homo sapiens
tttaatcattttgtg

SEQ ID NO: 1429800 - DNA, 15 bp, Homo sapiens
ttaatcattttgtgt

SEQ ID NO: 1429801 - DNA, 15 bp, Homo sapiens
taatcattttgtgtg

SEQ ID NO: 1429802 - DNA, 15 bp, Homo sapiens
aatcattttgtgtga

SEQ ID NO: 1429803 - DNA, 15 bp, Homo sapiens
atcattttgtgtgac

SEQ ID NO: 1429804 - DNA, 15 bp, Homo sapiens
tcattttgtgtgaca

SEQ ID NO: 1429805 - DNA, 15 bp, Homo sapiens
cattttgtgtgacat

SEQ ID NO: 1429806 - DNA, 15 bp, Homo sapiens
attttgtgtgacatg

SEQ ID NO: 1429807 - DNA, 15 bp, Homo sapiens
ttttgtgtgacatga

SEQ ID NO: 1429808 - DNA, 15 bp, Homo sapiens
tttgtgtgacatgaa

SEQ ID NO: 1429809 - DNA, 15 bp, Homo sapiens
ttgtgtgacatgaaa

SEQ ID NO: 1429810 - DNA, 15 bp, Homo sapiens
tgtgtgacatgaaag

SEQ ID NO: 1429811 - DNA, 15 bp, Homo sapiens
gtgtgacatgaaagt

SEQ ID NO: 1429812 - DNA, 15 bp, Homo sapiens
tgtgacatgaaagta

SEQ ID NO: 1429813 - DNA, 15 bp, Homo sapiens
gtgacatgaaagtaa

SEQ ID NO: 1429814 - DNA, 15 bp, Homo sapiens
tgacatgaaagtaaa

SEQ ID NO: 1429815 - DNA, 15 bp, Homo sapiens
gacatgaaagtaaat

SEQ ID NO: 1429816 - DNA, 15 bp, Homo sapiens
acatgaaagtaaatc

SEQ ID NO: 1429817 - DNA, 15 bp, Homo sapiens
catgaaagtaaatcc

SEQ ID NO: 1429818 - DNA, 15 bp, Homo sapiens
atgaaagtaaatcca

SEQ ID NO: 1429819 - DNA, 15 bp, Homo sapiens
tgaaagtaaatccag

SEQ ID NO: 1429820 - DNA, 15 bp, Homo sapiens
gaaagtaaatccagt

SEQ ID NO: 1429821 - DNA, 15 bp, Homo sapiens
aaagtaaatccagtc

SEQ ID NO: 1429822 - DNA, 15 bp, Homo sapiens
aagtaaatccagtcc

SEQ ID NO: 1429823 - DNA, 15 bp, Homo sapiens
agtaaatccagtcct

SEQ ID NO: 1429824 - DNA, 15 bp, Homo sapiens
gtaaatccagtcctg

SEQ ID NO: 1429825 - DNA, 15 bp, Homo sapiens
taaatccagtcctgc

SEQ ID NO: 1429826 - DNA, 15 bp, Homo sapiens
aaatccagtcctgcc

SEQ ID NO: 1429827 - DNA, 15 bp, Homo sapiens
aatccagtcctgcca

SEQ ID NO: 1429828 - DNA, 15 bp, Homo sapiens
atccagtcctgccaa

SEQ ID NO: 1429829 - DNA, 15 bp, Homo sapiens
tccagtcctgccaat

SEQ ID NO: 1429830 - DNA, 15 bp, Homo sapiens
ccagtcctgccaatg

SEQ ID NO: 1429831 - DNA, 15 bp, Homo sapiens
cagtcctgccaatga

SEQ ID NO: 1429832 - DNA, 15 bp, Homo sapiens
agtcctgccaatgag

SEQ ID NO: 1429833 - DNA, 15 bp, Homo sapiens
gtcctgccaatgaga

SEQ ID NO: 1429834 - DNA, 15 bp, Homo sapiens
tcctgccaatgagaa

SEQ ID NO: 1429835 - DNA, 15 bp, Homo sapiens
cctgccaatgagaag

SEQ ID NO: 1429836 - DNA, 15 bp, Homo sapiens
ctgccaatgagaaga

SEQ ID NO: 1429837 - DNA, 15 bp, Homo sapiens
tgccaatgagaagaa

SEQ ID NO: 1429838 - DNA, 15 bp, Homo sapiens
gccaatgagaagaaa

SEQ ID NO: 1429839 - DNA, 15 bp, Homo sapiens
ccaatgagaagaaaa

SEQ ID NO: 1429840 - DNA, 15 bp, Homo sapiens
caatgagaagaaaaa

SEQ ID NO: 1429841 - DNA, 15 bp, Homo sapiens
aatgagaagaaaaag

SEQ ID NO: 1429842 - DNA, 15 bp, Homo sapiens
atgagaagaaaaaga

SEQ ID NO: 1429843 - DNA, 15 bp, Homo sapiens
tgagaagaaaaagac

SEQ ID NO: 1429844 - DNA, 15 bp, Homo sapiens
gagaagaaaaagaca

SEQ ID NO: 1429845 - DNA, 15 bp, Homo sapiens
agaagaaaaagacac

SEQ ID NO: 1429846 - DNA, 15 bp, Homo sapiens
gaagaaaaagacaca

SEQ ID NO: 1429847 - DNA, 15 bp, Homo sapiens
aagaaaaagacacag

SEQ ID NO: 1429848 - DNA, 15 bp, Homo sapiens
agaaaaagacacagc

SEQ ID NO: 1429849 - DNA, 15 bp, Homo sapiens
gaaaaagacacagca

SEQ ID NO: 1429850 - DNA, 15 bp, Homo sapiens
aaaaagacacagcaa

SEQ ID NO: 1429851 - DNA, 15 bp, Homo sapiens
aaaagacacagcaag

SEQ ID NO: 1429852 - DNA, 15 bp, Homo sapiens
aaagacacagcaagt

SEQ ID NO: 1429853 - DNA, 15 bp, Homo sapiens
aagacacagcaagtt

SEQ ID NO: 1429854 - DNA, 15 bp, Homo sapiens
agacacagcaagttg

SEQ ID NO: 1429855 - DNA, 15 bp, Homo sapiens
gacacagcaagttgc

SEQ ID NO: 1429856 - DNA, 15 bp, Homo sapiens
acacagcaagttgca

SEQ ID NO: 1429857 - DNA, 15 bp, Homo sapiens
cacagcaagttgcag

SEQ ID NO: 1429858 - DNA, 15 bp, Homo sapiens
acagcaagttgcagc

SEQ ID NO: 1429859 - DNA, 15 bp, Homo sapiens
cagcaagttgcagcg

SEQ ID NO: 1429860 - DNA, 15 bp, Homo sapiens
agcaagttgcagcgt

SEQ ID NO: 1429861 - DNA, 15 bp, Homo sapiens
gcaagttgcagcgtt

SEQ ID NO: 1429862 - DNA, 15 bp, Homo sapiens
caagttgcagcgttt

SEQ ID NO: 1429863 - DNA, 15 bp, Homo sapiens
aagttgcagcgttta

SEQ ID NO: 1429864 - DNA, 15 bp, Homo sapiens
agttgcagcgtttat

SEQ ID NO: 1429865 - DNA, 15 bp, Homo sapiens
gttgcagcgtttata

SEQ ID NO: 1429866 - DNA, 15 bp, Homo sapiens
ttgcagcgtttatag

SEQ ID NO: 1429867 - DNA, 15 bp, Homo sapiens
tgcagcgtttatagt

SEQ ID NO: 1429868 - DNA, 15 bp, Homo sapiens
gcagcgtttatagtc

SEQ ID NO: 1429869 - DNA, 15 bp, Homo sapiens
cagcgtttatagtct

SEQ ID NO: 1429870 - DNA, 15 bp, Homo sapiens
agcgtttatagtctg

SEQ ID NO: 1429871 - DNA, 15 bp, Homo sapiens
gcgtttatagtctgc

SEQ ID NO: 1429872 - DNA, 15 bp, Homo sapiens
cgtttatagtctgct

SEQ ID NO: 1429873 - DNA, 15 bp, Homo sapiens
gtttatagtctgctt

SEQ ID NO: 1429874 - DNA, 15 bp, Homo sapiens
tttatagtctgcttt

SEQ ID NO: 1429875 - DNA, 15 bp, Homo sapiens
ttatagtctgctttt

SEQ ID NO: 1429876 - DNA, 15 bp, Homo sapiens
tatagtctgctttta

SEQ ID NO: 1429877 - DNA, 15 bp, Homo sapiens
atagtctgcttttac

SEQ ID NO: 1429878 - DNA, 15 bp, Homo sapiens
tagtctgcttttaca

SEQ ID NO: 1429879 - DNA, 15 bp, Homo sapiens
agtctgcttttacat

SEQ ID NO: 1429880 - DNA, 15 bp, Homo sapiens
gtctgcttttacatc

SEQ ID NO: 1429881 - DNA, 15 bp, Homo sapiens
tctgcttttacatct

SEQ ID NO: 1429882 - DNA, 15 bp, Homo sapiens
ctgcttttacatctg

SEQ ID NO: 1429883 - DNA, 15 bp, Homo sapiens
tgcttttacatctga

SEQ ID NO: 1429884 - DNA, 15 bp, Homo sapiens
gcttttacatctgaa

SEQ ID NO: 1429885 - DNA, 15 bp, Homo sapiens
cttttacatctgaac

SEQ ID NO: 1429886 - DNA, 15 bp, Homo sapiens
ttttacatctgaacc

SEQ ID NO: 1429887 - DNA, 15 bp, Homo sapiens
tttacatctgaacct

SEQ ID NO: 1429888 - DNA, 15 bp, Homo sapiens
ttacatctgaacctc

SEQ ID NO: 1429889 - DNA, 15 bp, Homo sapiens
tacatctgaacctct

SEQ ID NO: 1429890 - DNA, 15 bp, Homo sapiens
acatctgaacctctg

SEQ ID NO: 1429891 - DNA, 15 bp, Homo sapiens
catctgaacctctgt

SEQ ID NO: 1429892 - DNA, 15 bp, Homo sapiens
atctgaacctctgtt

SEQ ID NO: 1429893 - DNA, 15 bp, Homo sapiens
tctgaacctctgttt

SEQ ID NO: 1429894 - DNA, 15 bp, Homo sapiens
ctgaacctctgtttt

SEQ ID NO: 1429895 - DNA, 15 bp, Homo sapiens
tgaacctctgttttt

SEQ ID NO: 1429896 - DNA, 15 bp, Homo sapiens
gaacctctgtttttg

SEQ ID NO: 1429897 - DNA, 15 bp, Homo sapiens
aacctctgtttttgt

SEQ ID NO: 1429898 - DNA, 15 bp, Homo sapiens
acctctgtttttgtt

SEQ ID NO: 1429899 - DNA, 15 bp, Homo sapiens
cctctgtttttgtta

SEQ ID NO: 1429900 - DNA, 15 bp, Homo sapiens
ctctgtttttgttat

SEQ ID NO: 1429901 - DNA, 15 bp, Homo sapiens
tctgtttttgttatt

SEQ ID NO: 1429902 - DNA, 15 bp, Homo sapiens
ctgtttttgttattt

SEQ ID NO: 1429903 - DNA, 15 bp, Homo sapiens
tgtttttgttattta

SEQ ID NO: 1429904 - DNA, 15 bp, Homo sapiens
gtttttgttatttaa

SEQ ID NO: 1429905 - DNA, 15 bp, Homo sapiens
tttttgttatttaag

SEQ ID NO: 1429906 - DNA, 15 bp, Homo sapiens
ttttgttatttaagg

SEQ ID NO: 1429907 - DNA, 15 bp, Homo sapiens
tttgttatttaaggt

SEQ ID NO: 1429908 - DNA, 15 bp, Homo sapiens
ttgttatttaaggtg

SEQ ID NO: 1429909 - DNA, 15 bp, Homo sapiens
tgttatttaaggtga

SEQ ID NO: 1429910 - DNA, 15 bp, Homo sapiens
gttatttaaggtgaa

SEQ ID NO: 1429911 - DNA, 15 bp, Homo sapiens
ttatttaaggtgaag

SEQ ID NO: 1429912 - DNA, 15 bp, Homo sapiens
tatttaaggtgaagc

SEQ ID NO: 1429913 - DNA, 15 bp, Homo sapiens
atttaaggtgaagca

SEQ ID NO: 1429914 - DNA, 15 bp, Homo sapiens
tttaaggtgaagcag

SEQ ID NO: 1429915 - DNA, 15 bp, Homo sapiens
ttaaggtgaagcagc

SEQ ID NO: 1429916 - DNA, 15 bp, Homo sapiens
taaggtgaagcagca

SEQ ID NO: 1429917 - DNA, 15 bp, Homo sapiens
aaggtgaagcagcat

SEQ ID NO: 1429918 - DNA, 15 bp, Homo sapiens
aggtgaagcagcatc

SEQ ID NO: 1429919 - DNA, 15 bp, Homo sapiens
ggtgaagcagcatct

SEQ ID NO: 1429920 - DNA, 15 bp, Homo sapiens
gtgaagcagcatctg

SEQ ID NO: 1429921 - DNA, 15 bp, Homo sapiens
tgaagcagcatctgg

SEQ ID NO: 1429922 - DNA, 15 bp, Homo sapiens
gaagcagcatctggg

SEQ ID NO: 1429923 - DNA, 15 bp, Homo sapiens
aagcagcatctgggt

SEQ ID NO: 1429924 - DNA, 15 bp, Homo sapiens
agcagcatctgggtg

SEQ ID NO: 1429925 - DNA, 15 bp, Homo sapiens
gcagcatctgggtgt

SEQ ID NO: 1429926 - DNA, 15 bp, Homo sapiens
cagcatctgggtgtg

SEQ ID NO: 1429927 - DNA, 15 bp, Homo sapiens
agcatctgggtgtga

SEQ ID NO: 1429928 - DNA, 15 bp, Homo sapiens
gcatctgggtgtgag

SEQ ID NO: 1429929 - DNA, 15 bp, Homo sapiens
catctgggtgtgaga

SEQ ID NO: 1429930 - DNA, 15 bp, Homo sapiens
atctgggtgtgagag

SEQ ID NO: 1429931 - DNA, 15 bp, Homo sapiens
tctgggtgtgagagt

SEQ ID NO: 1429932 - DNA, 15 bp, Homo sapiens
ctgggtgtgagagtg

SEQ ID NO: 1429933 - DNA, 15 bp, Homo sapiens
tgggtgtgagagtga

SEQ ID NO: 1429934 - DNA, 15 bp, Homo sapiens
gggtgtgagagtgaa

SEQ ID NO: 1429935 - DNA, 15 bp, Homo sapiens
ggtgtgagagtgaaa

SEQ ID NO: 1429936 - DNA, 15 bp, Homo sapiens
gtgtgagagtgaaac

SEQ ID NO: 1429937 - DNA, 15 bp, Homo sapiens
tgtgagagtgaaaca

SEQ ID NO: 1429938 - DNA, 15 bp, Homo sapiens
gtgagagtgaaacaa

SEQ ID NO: 1429939 - DNA, 15 bp, Homo sapiens
tgagagtgaaacaag

SEQ ID NO: 1429940 - DNA, 15 bp, Homo sapiens
gagagtgaaacaagc

SEQ ID NO: 1429941 - DNA, 15 bp, Homo sapiens
agagtgaaacaagcg

SEQ ID NO: 1429942 - DNA, 15 bp, Homo sapiens
gagtgaaacaagcgt

SEQ ID NO: 1429943 - DNA, 15 bp, Homo sapiens
agtgaaacaagcgtc

SEQ ID NO: 1429944 - DNA, 15 bp, Homo sapiens
gtgaaacaagcgtct

SEQ ID NO: 1429945 - DNA, 15 bp, Homo sapiens
tgaaacaagcgtctc

SEQ ID NO: 1429946 - DNA, 15 bp, Homo sapiens
gaaacaagcgtctct

SEQ ID NO: 1429947 - DNA, 15 bp, Homo sapiens
aaacaagcgtctctg

SEQ ID NO: 1429948 - DNA, 15 bp, Homo sapiens
aacaagcgtctctga

SEQ ID NO: 1429949 - DNA, 15 bp, Homo sapiens
acaagcgtctctgaa

SEQ ID NO: 1429950 - DNA, 15 bp, Homo sapiens
caagcgtctctgaag

SEQ ID NO: 1429951 - DNA, 15 bp, Homo sapiens
aagcgtctctgaaga

SEQ ID NO: 1429952 - DNA, 15 bp, Homo sapiens
agcgtctctgaagac

SEQ ID NO: 1429953 - DNA, 15 bp, Homo sapiens
gcgtctctgaagact

SEQ ID NO: 1429954 - DNA, 15 bp, Homo sapiens
cgtctctgaagactg

SEQ ID NO: 1429955 - DNA, 15 bp, Homo sapiens
gtctctgaagactgc

SEQ ID NO: 1429956 - DNA, 15 bp, Homo sapiens
tctctgaagactgct

SEQ ID NO: 1429957 - DNA, 15 bp, Homo sapiens
ctctgaagactgctc

SEQ ID NO: 1429958 - DNA, 15 bp, Homo sapiens
tctgaagactgctca

SEQ ID NO: 1429959 - DNA, 15 bp, Homo sapiens
ctgaagactgctcag

SEQ ID NO: 1429960 - DNA, 15 bp, Homo sapiens
tgaagactgctcagg

SEQ ID NO: 1429961 - DNA, 15 bp, Homo sapiens
gaagactgctcaggg

SEQ ID NO: 1429962 - DNA, 15 bp, Homo sapiens
aagactgctcagggc

SEQ ID NO: 1429963 - DNA, 15 bp, Homo sapiens
agactgctcagggct

SEQ ID NO: 1429964 - DNA, 15 bp, Homo sapiens
gactgctcagggcta

SEQ ID NO: 1429965 - DNA, 15 bp, Homo sapiens
actgctcagggctat

SEQ ID NO: 1429966 - DNA, 15 bp, Homo sapiens
tgctcagggctatcc

SEQ ID NO: 1429967 - DNA, 15 bp, Homo sapiens
gctcagggctatcct

SEQ ID NO: 1429968 - DNA, 15 bp, Homo sapiens
ctcagggctatcctc

SEQ ID NO: 1429969 - DNA, 15 bp, Homo sapiens
tcagggctatcctct

SEQ ID NO: 1429970 - DNA, 15 bp, Homo sapiens
cagggctatcctctc

SEQ ID NO: 1429971 - DNA, 15 bp, Homo sapiens
agggctatcctctca

SEQ ID NO: 1429972 - DNA, 15 bp, Homo sapiens
gggctatcctctcag

SEQ ID NO: 1429973 - DNA, 15 bp, Homo sapiens
ggctatcctctcaga

SEQ ID NO: 1429974 - DNA, 15 bp, Homo sapiens
gctatcctctcagag

SEQ ID NO: 1429975 - DNA, 15 bp, Homo sapiens
ctatcctctcagagt

SEQ ID NO: 1429976 - DNA, 15 bp, Homo sapiens
tatcctctcagagtg

SEQ ID NO: 1429977 - DNA, 15 bp, Homo sapiens
atcctctcagagtga

SEQ ID NO: 1429978 - DNA, 15 bp, Homo sapiens
tcctctcagagtgac

SEQ ID NO: 1429979 - DNA, 15 bp, Homo sapiens
cctctcagagtgaca

SEQ ID NO: 1429980 - DNA, 15 bp, Homo sapiens
ctctcagagtgacat

SEQ ID NO: 1429981 - DNA, 15 bp, Homo sapiens
tctcagagtgacatt

SEQ ID NO: 1429982 - DNA, 15 bp, Homo sapiens
ctcagagtgacattt

SEQ ID NO: 1429983 - DNA, 15 bp, Homo sapiens
tcagagtgacatttt

SEQ ID NO: 1429984 - DNA, 15 bp, Homo sapiens
cagagtgacatttta

SEQ ID NO: 1429985 - DNA, 15 bp, Homo sapiens
agagtgacattttaa

SEQ ID NO: 1429986 - DNA, 15 bp, Homo sapiens
gagtgacattttaac

SEQ ID NO: 1429987 - DNA, 15 bp, Homo sapiens
agtgacattttaacc

SEQ ID NO: 1429988 - DNA, 15 bp, Homo sapiens
gtgacattttaacca

SEQ ID NO: 1429989 - DNA, 15 bp, Homo sapiens
tgacattttaaccac

SEQ ID NO: 1429990 - DNA, 15 bp, Homo sapiens
gacattttaaccact

SEQ ID NO: 1429991 - DNA, 15 bp, Homo sapiens
acattttaaccactc

SEQ ID NO: 1429992 - DNA, 15 bp, Homo sapiens
cattttaaccactca

SEQ ID NO: 1429993 - DNA, 15 bp, Homo sapiens
attttaaccactcag

SEQ ID NO: 1429994 - DNA, 15 bp, Homo sapiens
ttttaaccactcagg

SEQ ID NO: 1429995 - DNA, 15 bp, Homo sapiens
tttaaccactcaggt

SEQ ID NO: 1429996 - DNA, 15 bp, Homo sapiens
ttaaccactcaggta

SEQ ID NO: 1429997 - DNA, 15 bp, Homo sapiens
taaccactcaggtaa

SEQ ID NO: 1429998 - DNA, 15 bp, Homo sapiens
aaccactcaggtaaa

SEQ ID NO: 1429999 - DNA, 15 bp, Homo sapiens
accactcaggtaaaa

SEQ ID NO: 1430000 - DNA, 15 bp, Homo sapiens
ccactcaggtaaaaa

SEQ ID NO: 1430001 - DNA, 15 bp, Homo sapiens
cactcaggtaaaaag

SEQ ID NO: 1430002 - DNA, 15 bp, Homo sapiens
actcaggtaaaaagc

SEQ ID NO: 1430003 - DNA, 15 bp, Homo sapiens
ctcaggtaaaaagcg

SEQ ID NO: 1430004 - DNA, 15 bp, Homo sapiens
tcaggtaaaaagcgt

SEQ ID NO: 1430005 - DNA, 15 bp, Homo sapiens
caggtaaaaagcgtg

SEQ ID NO: 1430006 - DNA, 15 bp, Homo sapiens
aggtaaaaagcgtgt

SEQ ID NO: 1430007 - DNA, 15 bp, Homo sapiens
ggtaaaaagcgtgtg

SEQ ID NO: 1430008 - DNA, 15 bp, Homo sapiens
gtaaaaagcgtgtgt

SEQ ID NO: 1430009 - DNA, 15 bp, Homo sapiens
taaaaagcgtgtgtg

SEQ ID NO: 1430010 - DNA, 15 bp, Homo sapiens
aaaaagcgtgtgtgt

SEQ ID NO: 1430011 - DNA, 15 bp, Homo sapiens
aaaagcgtgtgtgtg

SEQ ID NO: 1430012 - DNA, 15 bp, Homo sapiens
aaagcgtgtgtgtgt

SEQ ID NO: 1430013 - DNA, 15 bp, Homo sapiens
aagcgtgtgtgtgtg

SEQ ID NO: 1430014 - DNA, 15 bp, Homo sapiens
agcgtgtgtgtgtgt

SEQ ID NO: 1430015 - DNA, 15 bp, Homo sapiens
gcgtgtgtgtgtgtg

SEQ ID NO: 1430016 - DNA, 15 bp, Homo sapiens
cgtgtgtgtgtgtgc

SEQ ID NO: 1430017 - DNA, 15 bp, Homo sapiens
tgtgtgtgtgtgcac

SEQ ID NO: 1430018 - DNA, 15 bp, Homo sapiens
gtgtgtgtgtgcaca

SEQ ID NO: 1430019 - DNA, 15 bp, Homo sapiens
tgtgtgtgcacatgc

SEQ ID NO: 1430020 - DNA, 15 bp, Homo sapiens
gtgtgtgcacatgcg

SEQ ID NO: 1430021 - DNA, 15 bp, Homo sapiens
tgtgtgcacatgcgt

SEQ ID NO: 1430022 - DNA, 15 bp, Homo sapiens
gtgtgcacatgcgtg

SEQ ID NO: 1430023 - DNA, 15 bp, Homo sapiens
tgtgcacatgcgtgt

SEQ ID NO: 1430024 - DNA, 15 bp, Homo sapiens
gtgcacatgcgtgtg

SEQ ID NO: 1430025 - DNA, 15 bp, Homo sapiens
tgcacatgcgtgtgt

SEQ ID NO: 1430026 - DNA, 15 bp, Homo sapiens
gcacatgcgtgtgtg

SEQ ID NO: 1430027 - DNA, 15 bp, Homo sapiens
cacatgcgtgtgtgt

SEQ ID NO: 1430028 - DNA, 15 bp, Homo sapiens
acatgcgtgtgtgtg

SEQ ID NO: 1430029 - DNA, 15 bp, Homo sapiens
catgcgtgtgtgtgg

SEQ ID NO: 1430030 - DNA, 15 bp, Homo sapiens
atgcgtgtgtgtggt

SEQ ID NO: 1430031 - DNA, 15 bp, Homo sapiens
tgcgtgtgtgtggtg

SEQ ID NO: 1430032 - DNA, 15 bp, Homo sapiens
gcgtgtgtgtggtgt

SEQ ID NO: 1430033 - DNA, 15 bp, Homo sapiens
cgtgtgtgtggtgtc

SEQ ID NO: 1430034 - DNA, 15 bp, Homo sapiens
gtgtgtgtggtgtcc

SEQ ID NO: 1430035 - DNA, 15 bp, Homo sapiens
tgtgtgtggtgtcct

SEQ ID NO: 1430036 - DNA, 15 bp, Homo sapiens
gtgtgtggtgtcctt

SEQ ID NO: 1430037 - DNA, 15 bp, Homo sapiens
tgtgtggtgtccttt

SEQ ID NO: 1430038 - DNA, 15 bp, Homo sapiens
gtgtggtgtcctttg

SEQ ID NO: 1430039 - DNA, 15 bp, Homo sapiens
tgtggtgtcctttgc

SEQ ID NO: 1430040 - DNA, 15 bp, Homo sapiens
gtggtgtcctttgca

SEQ ID NO: 1430041 - DNA, 15 bp, Homo sapiens
tggtgtcctttgcat

SEQ ID NO: 1430042 - DNA, 15 bp, Homo sapiens
ggtgtcctttgcatt

SEQ ID NO: 1430043 - DNA, 15 bp, Homo sapiens
gtgtcctttgcattc

SEQ ID NO: 1430044 - DNA, 15 bp, Homo sapiens
tgtcctttgcattca

SEQ ID NO: 1430045 - DNA, 15 bp, Homo sapiens
gtcctttgcattcag

SEQ ID NO: 1430046 - DNA, 15 bp, Homo sapiens
tcctttgcattcagt

SEQ ID NO: 1430047 - DNA, 15 bp, Homo sapiens
cctttgcattcagta

SEQ ID NO: 1430048 - DNA, 15 bp, Homo sapiens
ctttgcattcagtag

SEQ ID NO: 1430049 - DNA, 15 bp, Homo sapiens
tttgcattcagtagt

SEQ ID NO: 1430050 - DNA, 15 bp, Homo sapiens
ttgcattcagtagta

SEQ ID NO: 1430051 - DNA, 15 bp, Homo sapiens
tgcattcagtagtat

SEQ ID NO: 1430052 - DNA, 15 bp, Homo sapiens
gcattcagtagtatg

SEQ ID NO: 1430053 - DNA, 15 bp, Homo sapiens
cattcagtagtatgt

SEQ ID NO: 1430054 - DNA, 15 bp, Homo sapiens
attcagtagtatgta

SEQ ID NO: 1430055 - DNA, 15 bp, Homo sapiens
ttcagtagtatgtat

SEQ ID NO: 1430056 - DNA, 15 bp, Homo sapiens
tcagtagtatgtatc

SEQ ID NO: 1430057 - DNA, 15 bp, Homo sapiens
cagtagtatgtatcc

SEQ ID NO: 1430058 - DNA, 15 bp, Homo sapiens
agtagtatgtatccc

SEQ ID NO: 1430059 - DNA, 15 bp, Homo sapiens
gtagtatgtatccca

SEQ ID NO: 1430060 - DNA, 15 bp, Homo sapiens
tagtatgtatcccac

SEQ ID NO: 1430061 - DNA, 15 bp, Homo sapiens
agtatgtatcccaca

SEQ ID NO: 1430062 - DNA, 15 bp, Homo sapiens
gtatgtatcccacat

SEQ ID NO: 1430063 - DNA, 15 bp, Homo sapiens
tatgtatcccacatt

SEQ ID NO: 1430064 - DNA, 15 bp, Homo sapiens
atgtatcccacattc

SEQ ID NO: 1430065 - DNA, 15 bp, Homo sapiens
tgtatcccacattct

SEQ ID NO: 1430066 - DNA, 15 bp, Homo sapiens
gtatcccacattctt

SEQ ID NO: 1430067 - DNA, 15 bp, Homo sapiens
tatcccacattctta

SEQ ID NO: 1430068 - DNA, 15 bp, Homo sapiens
atcccacattcttag

SEQ ID NO: 1430069 - DNA, 15 bp, Homo sapiens
tcccacattcttagg

SEQ ID NO: 1430070 - DNA, 15 bp, Homo sapiens
cccacattcttaggt

SEQ ID NO: 1430071 - DNA, 15 bp, Homo sapiens
ccacattcttaggtt

SEQ ID NO: 1430072 - DNA, 15 bp, Homo sapiens
cacattcttaggttt

SEQ ID NO: 1430073 - DNA, 15 bp, Homo sapiens
acattcttaggtttg

SEQ ID NO: 1430074 - DNA, 15 bp, Homo sapiens
cattcttaggtttgc

SEQ ID NO: 1430075 - DNA, 15 bp, Homo sapiens
attcttaggtttgct

SEQ ID NO: 1430076 - DNA, 15 bp, Homo sapiens
ttcttaggtttgctg

SEQ ID NO: 1430077 - DNA, 15 bp, Homo sapiens
tcttaggtttgctga

SEQ ID NO: 1430078 - DNA, 15 bp, Homo sapiens
cttaggtttgctgac

SEQ ID NO: 1430079 - DNA, 15 bp, Homo sapiens
ttaggtttgctgaca

SEQ ID NO: 1430080 - DNA, 15 bp, Homo sapiens
taggtttgctgacat

SEQ ID NO: 1430081 - DNA, 15 bp, Homo sapiens
aggtttgctgacatc

SEQ ID NO: 1430082 - DNA, 15 bp, Homo sapiens
ggtttgctgacatca

SEQ ID NO: 1430083 - DNA, 15 bp, Homo sapiens
gtttgctgacatcat

SEQ ID NO: 1430084 - DNA, 15 bp, Homo sapiens
tttgctgacatcatc

SEQ ID NO: 1430085 - DNA, 15 bp, Homo sapiens
ttgctgacatcatct

SEQ ID NO: 1430086 - DNA, 15 bp, Homo sapiens
tgctgacatcatctc

SEQ ID NO: 1430087 - DNA, 15 bp, Homo sapiens
gctgacatcatctct

SEQ ID NO: 1430088 - DNA, 15 bp, Homo sapiens
ctgacatcatctctt

SEQ ID NO: 1430089 - DNA, 15 bp, Homo sapiens
tgacatcatctcttt

SEQ ID NO: 1430090 - DNA, 15 bp, Homo sapiens
gacatcatctctttg

SEQ ID NO: 1430091 - DNA, 15 bp, Homo sapiens
acatcatctctttga

SEQ ID NO: 1430092 - DNA, 15 bp, Homo sapiens
catcatctctttgaa

SEQ ID NO: 1430093 - DNA, 15 bp, Homo sapiens
atcatctctttgaat

SEQ ID NO: 1430094 - DNA, 15 bp, Homo sapiens
tcatctctttgaatt

SEQ ID NO: 1430095 - DNA, 15 bp, Homo sapiens
catctctttgaatta

SEQ ID NO: 1430096 - DNA, 15 bp, Homo sapiens
atctctttgaattaa

SEQ ID NO: 1430097 - DNA, 15 bp, Homo sapiens
tctctttgaattaat

SEQ ID NO: 1430098 - DNA, 15 bp, Homo sapiens
ctctttgaattaatg

SEQ ID NO: 1430099 - DNA, 15 bp, Homo sapiens
tctttgaattaatgg

SEQ ID NO: 1430100 - DNA, 15 bp, Homo sapiens
ctttgaattaatggc

SEQ ID NO: 1430101 - DNA, 15 bp, Homo sapiens
tttgaattaatggca

SEQ ID NO: 1430102 - DNA, 15 bp, Homo sapiens
ttgaattaatggcac

SEQ ID NO: 1430103 - DNA, 15 bp, Homo sapiens
tgaattaatggcaca

SEQ ID NO: 1430104 - DNA, 15 bp, Homo sapiens
gaattaatggcacaa

SEQ ID NO: 1430105 - DNA, 15 bp, Homo sapiens
aattaatggcacaat

SEQ ID NO: 1430106 - DNA, 15 bp, Homo sapiens
attaatggcacaatt

SEQ ID NO: 1430107 - DNA, 15 bp, Homo sapiens
ttaatggcacaattg

SEQ ID NO: 1430108 - DNA, 15 bp, Homo sapiens
taatggcacaattgt

SEQ ID NO: 1430109 - DNA, 15 bp, Homo sapiens
aatggcacaattgtt

SEQ ID NO: 1430110 - DNA, 15 bp, Homo sapiens
atggcacaattgttt

SEQ ID NO: 1430111 - DNA, 15 bp, Homo sapiens
tggcacaattgtttg

SEQ ID NO: 1430112 - DNA, 15 bp, Homo sapiens
ggcacaattgtttgt

SEQ ID NO: 1430113 - DNA, 15 bp, Homo sapiens
gcacaattgtttgtg

SEQ ID NO: 1430114 - DNA, 15 bp, Homo sapiens
cacaattgtttgtgg

SEQ ID NO: 1430115 - DNA, 15 bp, Homo sapiens
acaattgtttgtggt

SEQ ID NO: 1430116 - DNA, 15 bp, Homo sapiens
caattgtttgtggtt

SEQ ID NO: 1430117 - DNA, 15 bp, Homo sapiens
aattgtttgtggttc

SEQ ID NO: 1430118 - DNA, 15 bp, Homo sapiens
attgtttgtggttca

SEQ ID NO: 1430119 - DNA, 15 bp, Homo sapiens
ttgtttgtggttcat

SEQ ID NO: 1430120 - DNA, 15 bp, Homo sapiens
tgtttgtggttcatt

SEQ ID NO: 1430121 - DNA, 15 bp, Homo sapiens
gtttgtggttcattg

SEQ ID NO: 1430122 - DNA, 15 bp, Homo sapiens
tttgtggttcattgt

SEQ ID NO: 1430123 - DNA, 15 bp, Homo sapiens
ttgtggttcattgtc

SEQ ID NO: 1430124 - DNA, 15 bp, Homo sapiens
tgtggttcattgtct

SEQ ID NO: 1430125 - DNA, 15 bp, Homo sapiens
gtggttcattgtctc

SEQ ID NO: 1430126 - DNA, 15 bp, Homo sapiens
tggttcattgtctcc

SEQ ID NO: 1430127 - DNA, 15 bp, Homo sapiens
ggttcattgtctcct

SEQ ID NO: 1430128 - DNA, 15 bp, Homo sapiens
gttcattgtctcctt

SEQ ID NO: 1430129 - DNA, 15 bp, Homo sapiens
ttcattgtctcctta

SEQ ID NO: 1430130 - DNA, 15 bp, Homo sapiens
tcattgtctccttaa

SEQ ID NO: 1430131 - DNA, 15 bp, Homo sapiens
cattgtctccttaaa

SEQ ID NO: 1430132 - DNA, 15 bp, Homo sapiens
attgtctccttaaat

SEQ ID NO: 1430133 - DNA, 15 bp, Homo sapiens
ttgtctccttaaatt

SEQ ID NO: 1430134 - DNA, 15 bp, Homo sapiens
tgtctccttaaatta

SEQ ID NO: 1430135 - DNA, 15 bp, Homo sapiens
gtctccttaaattag

SEQ ID NO: 1430136 - DNA, 15 bp, Homo sapiens
tctccttaaattaga

SEQ ID NO: 1430137 - DNA, 15 bp, Homo sapiens
ctccttaaattagac

SEQ ID NO: 1430138 - DNA, 15 bp, Homo sapiens
tccttaaattagact

SEQ ID NO: 1430139 - DNA, 15 bp, Homo sapiens
ccttaaattagactg

SEQ ID NO: 1430140 - DNA, 15 bp, Homo sapiens
cttaaattagactgt

SEQ ID NO: 1430141 - DNA, 15 bp, Homo sapiens
ttaaattagactgta

SEQ ID NO: 1430142 - DNA, 15 bp, Homo sapiens
taaattagactgtaa

SEQ ID NO: 1430143 - DNA, 15 bp, Homo sapiens
aaattagactgtaag

SEQ ID NO: 1430144 - DNA, 15 bp, Homo sapiens
aattagactgtaagc

SEQ ID NO: 1430145 - DNA, 15 bp, Homo sapiens
attagactgtaagca

SEQ ID NO: 1430146 - DNA, 15 bp, Homo sapiens
ttagactgtaagcac

SEQ ID NO: 1430147 - DNA, 15 bp, Homo sapiens
tagactgtaagcacc

SEQ ID NO: 1430148 - DNA, 15 bp, Homo sapiens
agactgtaagcacct

SEQ ID NO: 1430149 - DNA, 15 bp, Homo sapiens
gactgtaagcacctt

SEQ ID NO: 1430150 - DNA, 15 bp, Homo sapiens
actgtaagcaccttg

SEQ ID NO: 1430151 - DNA, 15 bp, Homo sapiens
ctgtaagcaccttga

SEQ ID NO: 1430152 - DNA, 15 bp, Homo sapiens
tgtaagcaccttgat

SEQ ID NO: 1430153 - DNA, 15 bp, Homo sapiens
gtaagcaccttgatg

SEQ ID NO: 1430154 - DNA, 15 bp, Homo sapiens
taagcaccttgatgg

SEQ ID NO: 1430155 - DNA, 15 bp, Homo sapiens
aagcaccttgatgga

SEQ ID NO: 1430156 - DNA, 15 bp, Homo sapiens
agcaccttgatggaa

SEQ ID NO: 1430157 - DNA, 15 bp, Homo sapiens
gcaccttgatggaac

SEQ ID NO: 1430158 - DNA, 15 bp, Homo sapiens
caccttgatggaact

SEQ ID NO: 1430159 - DNA, 15 bp, Homo sapiens
accttgatggaactc

SEQ ID NO: 1430160 - DNA, 15 bp, Homo sapiens
ccttgatggaactca

SEQ ID NO: 1430161 - DNA, 15 bp, Homo sapiens
cttgatggaactcat

SEQ ID NO: 1430162 - DNA, 15 bp, Homo sapiens
ttgatggaactcata

SEQ ID NO: 1430163 - DNA, 15 bp, Homo sapiens
tgatggaactcatac

SEQ ID NO: 1430164 - DNA, 15 bp, Homo sapiens
gatggaactcatact

SEQ ID NO: 1430165 - DNA, 15 bp, Homo sapiens
atggaactcatacta

SEQ ID NO: 1430166 - DNA, 15 bp, Homo sapiens
tggaactcatactac

SEQ ID NO: 1430167 - DNA, 15 bp, Homo sapiens
ggaactcatactacc

SEQ ID NO: 1430168 - DNA, 15 bp, Homo sapiens
gaactcatactacct

SEQ ID NO: 1430169 - DNA, 15 bp, Homo sapiens
aactcatactacctt

SEQ ID NO: 1430170 - DNA, 15 bp, Homo sapiens
actcatactaccttt

SEQ ID NO: 1430171 - DNA, 15 bp, Homo sapiens
ctcatactacctttt

SEQ ID NO: 1430172 - DNA, 15 bp, Homo sapiens
tcatactacctttta

SEQ ID NO: 1430173 - DNA, 15 bp, Homo sapiens
catactaccttttat

SEQ ID NO: 1430174 - DNA, 15 bp, Homo sapiens
atactaccttttatt

SEQ ID NO: 1430175 - DNA, 15 bp, Homo sapiens
tactaccttttattt

SEQ ID NO: 1430176 - DNA, 15 bp, Homo sapiens
actaccttttatttc

SEQ ID NO: 1430177 - DNA, 15 bp, Homo sapiens
ctaccttttatttca

SEQ ID NO: 1430178 - DNA, 15 bp, Homo sapiens
taccttttatttcac

SEQ ID NO: 1430179 - DNA, 15 bp, Homo sapiens
accttttatttcaca

SEQ ID NO: 1430180 - DNA, 15 bp, Homo sapiens
ccttttatttcacac

SEQ ID NO: 1430181 - DNA, 15 bp, Homo sapiens
cttttatttcacaca

SEQ ID NO: 1430182 - DNA, 15 bp, Homo sapiens
ttttatttcacacac

SEQ ID NO: 1430183 - DNA, 15 bp, Homo sapiens
tttatttcacacaca

SEQ ID NO: 1430184 - DNA, 15 bp, Homo sapiens
ttatttcacacacac

SEQ ID NO: 1430185 - DNA, 15 bp, Homo sapiens
tatttcacacacacg

SEQ ID NO: 1430186 - DNA, 15 bp, Homo sapiens
atttcacacacacgc

SEQ ID NO: 1430187 - DNA, 15 bp, Homo sapiens
tttcacacacacgca

SEQ ID NO: 1430188 - DNA, 15 bp, Homo sapiens
ttcacacacacgcac

SEQ ID NO: 1430189 - DNA, 15 bp, Homo sapiens
tcacacacacgcaca

SEQ ID NO: 1430190 - DNA, 15 bp, Homo sapiens
acacacacgcacacg

SEQ ID NO: 1430191 - DNA, 15 bp, Homo sapiens
cacacacgcacacgc

SEQ ID NO: 1430192 - DNA, 15 bp, Homo sapiens
acacacgcacacgcg

SEQ ID NO: 1430193 - DNA, 15 bp, Homo sapiens
cacacgcacacgcgc

SEQ ID NO: 1430194 - DNA, 15 bp, Homo sapiens
acacgcacacgcgca

SEQ ID NO: 1430195 - DNA, 15 bp, Homo sapiens
cacgcacacgcgcac

SEQ ID NO: 1430196 - DNA, 15 bp, Homo sapiens
cacgcgcacacacag

SEQ ID NO: 1430197 - DNA, 15 bp, Homo sapiens
acgcgcacacacagc

SEQ ID NO: 1430198 - DNA, 15 bp, Homo sapiens
cgcgcacacacagcc

SEQ ID NO: 1430199 - DNA, 15 bp, Homo sapiens
gcgcacacacagcct

SEQ ID NO: 1430200 - DNA, 15 bp, Homo sapiens
cgcacacacagccta

SEQ ID NO: 1430201 - DNA, 15 bp, Homo sapiens
gcacacacagcctac

SEQ ID NO: 1430202 - DNA, 15 bp, Homo sapiens
cacacacagcctaca

SEQ ID NO: 1430203 - DNA, 15 bp, Homo sapiens
acacacagcctacac

SEQ ID NO: 1430204 - DNA, 15 bp, Homo sapiens
cacacagcctacaca

SEQ ID NO: 1430205 - DNA, 15 bp, Homo sapiens
acacagcctacacat

SEQ ID NO: 1430206 - DNA, 15 bp, Homo sapiens
cacagcctacacata

SEQ ID NO: 1430207 - DNA, 15 bp, Homo sapiens
acagcctacacatac

SEQ ID NO: 1430208 - DNA, 15 bp, Homo sapiens
cagcctacacataca

SEQ ID NO: 1430209 - DNA, 15 bp, Homo sapiens
agcctacacatacac

SEQ ID NO: 1430210 - DNA, 15 bp, Homo sapiens
gcctacacatacact

SEQ ID NO: 1430211 - DNA, 15 bp, Homo sapiens
cctacacatacactg

SEQ ID NO: 1430212 - DNA, 15 bp, Homo sapiens
ctacacatacactgc

SEQ ID NO: 1430213 - DNA, 15 bp, Homo sapiens
tacacatacactgcc

SEQ ID NO: 1430214 - DNA, 15 bp, Homo sapiens
acacatacactgcct

SEQ ID NO: 1430215 - DNA, 15 bp, Homo sapiens
cacatacactgccta

SEQ ID NO: 1430216 - DNA, 15 bp, Homo sapiens
acatacactgcctag

SEQ ID NO: 1430217 - DNA, 15 bp, Homo sapiens
catacactgcctagc

SEQ ID NO: 1430218 - DNA, 15 bp, Homo sapiens
atacactgcctagct

SEQ ID NO: 1430219 - DNA, 15 bp, Homo sapiens
tacactgcctagctc

SEQ ID NO: 1430220 - DNA, 15 bp, Homo sapiens
acactgcctagctca

SEQ ID NO: 1430221 - DNA, 15 bp, Homo sapiens
cactgcctagctcat

SEQ ID NO: 1430222 - DNA, 15 bp, Homo sapiens
actgcctagctcatt

SEQ ID NO: 1430223 - DNA, 15 bp, Homo sapiens
ctgcctagctcattg

SEQ ID NO: 1430224 - DNA, 15 bp, Homo sapiens
tgcctagctcattgt

SEQ ID NO: 1430225 - DNA, 15 bp, Homo sapiens
gcctagctcattgta

SEQ ID NO: 1430226 - DNA, 15 bp, Homo sapiens
cctagctcattgtag

SEQ ID NO: 1430227 - DNA, 15 bp, Homo sapiens
ctagctcattgtagc

SEQ ID NO: 1430228 - DNA, 15 bp, Homo sapiens
tagctcattgtagca

SEQ ID NO: 1430229 - DNA, 15 bp, Homo sapiens
agctcattgtagcat

SEQ ID NO: 1430230 - DNA, 15 bp, Homo sapiens
gctcattgtagcata

SEQ ID NO: 1430231 - DNA, 15 bp, Homo sapiens
ctcattgtagcatac

SEQ ID NO: 1430232 - DNA, 15 bp, Homo sapiens
tcattgtagcatact

SEQ ID NO: 1430233 - DNA, 15 bp, Homo sapiens
cattgtagcatacta

SEQ ID NO: 1430234 - DNA, 15 bp, Homo sapiens
attgtagcatactaa

SEQ ID NO: 1430235 - DNA, 15 bp, Homo sapiens
ttgtagcatactaaa

SEQ ID NO: 1430236 - DNA, 15 bp, Homo sapiens
tgtagcatactaaat

SEQ ID NO: 1430237 - DNA, 15 bp, Homo sapiens
gtagcatactaaata

SEQ ID NO: 1430238 - DNA, 15 bp, Homo sapiens
tagcatactaaatac

SEQ ID NO: 1430239 - DNA, 15 bp, Homo sapiens
agcatactaaatact

SEQ ID NO: 1430240 - DNA, 15 bp, Homo sapiens
gcatactaaatactg

SEQ ID NO: 1430241 - DNA, 15 bp, Homo sapiens
catactaaatactga

SEQ ID NO: 1430242 - DNA, 15 bp, Homo sapiens
atactaaatactgat

SEQ ID NO: 1430243 - DNA, 15 bp, Homo sapiens
tactaaatactgatt

SEQ ID NO: 1430244 - DNA, 15 bp, Homo sapiens
actaaatactgattt

SEQ ID NO: 1430245 - DNA, 15 bp, Homo sapiens
ctaaatactgatttt

SEQ ID NO: 1430246 - DNA, 15 bp, Homo sapiens
taaatactgatttta

SEQ ID NO: 1430247 - DNA, 15 bp, Homo sapiens
aaatactgattttaa

SEQ ID NO: 1430248 - DNA, 15 bp, Homo sapiens
aatactgattttaat

SEQ ID NO: 1430249 - DNA, 15 bp, Homo sapiens
atactgattttaatg

SEQ ID NO: 1430250 - DNA, 15 bp, Homo sapiens
tactgattttaatga

SEQ ID NO: 1430251 - DNA, 15 bp, Homo sapiens
actgattttaatgaa

SEQ ID NO: 1430252 - DNA, 15 bp, Homo sapiens
ctgattttaatgaat

SEQ ID NO: 1430253 - DNA, 15 bp, Homo sapiens
tgattttaatgaata

SEQ ID NO: 1430254 - DNA, 15 bp, Homo sapiens
gattttaatgaataa

SEQ ID NO: 1430255 - DNA, 15 bp, Homo sapiens
attttaatgaataag

SEQ ID NO: 1430256 - DNA, 15 bp, Homo sapiens
ttttaatgaataagc

SEQ ID NO: 1430257 - DNA, 15 bp, Homo sapiens
tttaatgaataagct

SEQ ID NO: 1430258 - DNA, 15 bp, Homo sapiens
ttaatgaataagcta

SEQ ID NO: 1430259 - DNA, 15 bp, Homo sapiens
taatgaataagctaa

SEQ ID NO: 1430260 - DNA, 15 bp, Homo sapiens
aatgaataagctaaa

SEQ ID NO: 1430261 - DNA, 15 bp, Homo sapiens
atgaataagctaaac

SEQ ID NO: 1430262 - DNA, 15 bp, Homo sapiens
tgaataagctaaacc

SEQ ID NO: 1430263 - DNA, 15 bp, Homo sapiens
gaataagctaaacct

SEQ ID NO: 1430264 - DNA, 15 bp, Homo sapiens
aataagctaaacctt

SEQ ID NO: 1430265 - DNA, 15 bp, Homo sapiens
ataagctaaaccttc

SEQ ID NO: 1430266 - DNA, 15 bp, Homo sapiens
taagctaaaccttcg

SEQ ID NO: 1430267 - DNA, 15 bp, Homo sapiens
aagctaaaccttcga

SEQ ID NO: 1430268 - DNA, 15 bp, Homo sapiens
agctaaaccttcgaa

SEQ ID NO: 1430269 - DNA, 15 bp, Homo sapiens
gctaaaccttcgaaa

SEQ ID NO: 1430270 - DNA, 15 bp, Homo sapiens
ctaaaccttcgaaac

SEQ ID NO: 1430271 - DNA, 15 bp, Homo sapiens
taaaccttcgaaacc

SEQ ID NO: 1430272 - DNA, 15 bp, Homo sapiens
aaaccttcgaaaccc

SEQ ID NO: 1430273 - DNA, 15 bp, Homo sapiens
aaccttcgaaaccca

SEQ ID NO: 1430274 - DNA, 15 bp, Homo sapiens
accttcgaaacccat

SEQ ID NO: 1430275 - DNA, 15 bp, Homo sapiens
ccttcgaaacccatt

SEQ ID NO: 1430276 - DNA, 15 bp, Homo sapiens
cttcgaaacccattt

SEQ ID NO: 1430277 - DNA, 15 bp, Homo sapiens
ttcgaaacccatttg

SEQ ID NO: 1430278 - DNA, 15 bp, Homo sapiens
tcgaaacccatttgc

SEQ ID NO: 1430279 - DNA, 15 bp, Homo sapiens
cgaaacccatttgct

SEQ ID NO: 1430280 - DNA, 15 bp, Homo sapiens
gaaacccatttgcta

SEQ ID NO: 1430281 - DNA, 15 bp, Homo sapiens
aaacccatttgctaa

SEQ ID NO: 1430282 - DNA, 15 bp, Homo sapiens
aacccatttgctaat

SEQ ID NO: 1430283 - DNA, 15 bp, Homo sapiens
acccatttgctaatc

SEQ ID NO: 1430284 - DNA, 15 bp, Homo sapiens
cccatttgctaatcc

SEQ ID NO: 1430285 - DNA, 15 bp, Homo sapiens
ccatttgctaatccc

SEQ ID NO: 1430286 - DNA, 15 bp, Homo sapiens
catttgctaatccca

SEQ ID NO: 1430287 - DNA, 15 bp, Homo sapiens
atttgctaatcccag

SEQ ID NO: 1430288 - DNA, 15 bp, Homo sapiens
tttgctaatcccagc

SEQ ID NO: 1430289 - DNA, 15 bp, Homo sapiens
ttgctaatcccagca

SEQ ID NO: 1430290 - DNA, 15 bp, Homo sapiens
tgctaatcccagcac

SEQ ID NO: 1430291 - DNA, 15 bp, Homo sapiens
gctaatcccagcact

SEQ ID NO: 1430292 - DNA, 15 bp, Homo sapiens
aggccaaggtgggtg

SEQ ID NO: 1430293 - DNA, 15 bp, Homo sapiens
ggccaaggtgggtgg

SEQ ID NO: 1430294 - DNA, 15 bp, Homo sapiens
gccaaggtgggtgga

SEQ ID NO: 1430295 - DNA, 15 bp, Homo sapiens
ccaaggtgggtggat

SEQ ID NO: 1430296 - DNA, 15 bp, Homo sapiens
caaggtgggtggatc

SEQ ID NO: 1430297 - DNA, 15 bp, Homo sapiens
aaggtgggtggatca

SEQ ID NO: 1430298 - DNA, 15 bp, Homo sapiens
tgggtggatcacctc

SEQ ID NO: 1430299 - DNA, 15 bp, Homo sapiens
gggtggatcacctca

SEQ ID NO: 1430300 - DNA, 15 bp, Homo sapiens
ggtggatcacctcag

SEQ ID NO: 1430301 - DNA, 15 bp, Homo sapiens
gtggatcacctcagg

SEQ ID NO: 1430302 - DNA, 15 bp, Homo sapiens
tggatcacctcaggt

SEQ ID NO: 1430303 - DNA, 15 bp, Homo sapiens
ggatcacctcaggtc

SEQ ID NO: 1430304 - DNA, 15 bp, Homo sapiens
gatcacctcaggtca

SEQ ID NO: 1430305 - DNA, 15 bp, Homo sapiens
atcacctcaggtcag

SEQ ID NO: 1430306 - DNA, 15 bp, Homo sapiens
tcacctcaggtcaga

SEQ ID NO: 1430307 - DNA, 15 bp, Homo sapiens
cacctcaggtcagaa

SEQ ID NO: 1430308 - DNA, 15 bp, Homo sapiens
acctcaggtcagaag

SEQ ID NO: 1430309 - DNA, 15 bp, Homo sapiens
cctcaggtcagaagt

SEQ ID NO: 1430310 - DNA, 15 bp, Homo sapiens
ctcaggtcagaagtt

SEQ ID NO: 1430311 - DNA, 15 bp, Homo sapiens
tcaggtcagaagttt

SEQ ID NO: 1430312 - DNA, 15 bp, Homo sapiens
caggtcagaagtttg

SEQ ID NO: 1430313 - DNA, 15 bp, Homo sapiens
aggtcagaagtttga

SEQ ID NO: 1430314 - DNA, 15 bp, Homo sapiens
ggtcagaagtttgag

SEQ ID NO: 1430315 - DNA, 15 bp, Homo sapiens
gtcagaagtttgaga

SEQ ID NO: 1430316 - DNA, 15 bp, Homo sapiens
tcagaagtttgagac

SEQ ID NO: 1430317 - DNA, 15 bp, Homo sapiens
cagaagtttgagacc

SEQ ID NO: 1430318 - DNA, 15 bp, Homo sapiens
agaagtttgagacca

SEQ ID NO: 1430319 - DNA, 15 bp, Homo sapiens
gaagtttgagaccag

SEQ ID NO: 1430320 - DNA, 15 bp, Homo sapiens
aagtttgagaccagc

SEQ ID NO: 1430321 - DNA, 15 bp, Homo sapiens
atggtgaaaccccac

SEQ ID NO: 1430322 - DNA, 15 bp, Homo sapiens
tggtgaaaccccaca

SEQ ID NO: 1430323 - DNA, 15 bp, Homo sapiens
ggtgaaaccccacat

SEQ ID NO: 1430324 - DNA, 15 bp, Homo sapiens
gtgaaaccccacatc

SEQ ID NO: 1430325 - DNA, 15 bp, Homo sapiens
tgaaaccccacatct

SEQ ID NO: 1430326 - DNA, 15 bp, Homo sapiens
gaaaccccacatcta

SEQ ID NO: 1430327 - DNA, 15 bp, Homo sapiens
aaaccccacatctac

SEQ ID NO: 1430328 - DNA, 15 bp, Homo sapiens
aaccccacatctact

SEQ ID NO: 1430329 - DNA, 15 bp, Homo sapiens
accccacatctacta

SEQ ID NO: 1430330 - DNA, 15 bp, Homo sapiens
ccccacatctactaa

SEQ ID NO: 1430331 - DNA, 15 bp, Homo sapiens
cccacatctactaaa

SEQ ID NO: 1430332 - DNA, 15 bp, Homo sapiens
ccacatctactaaaa

SEQ ID NO: 1430333 - DNA, 15 bp, Homo sapiens
cacatctactaaaaa

SEQ ID NO: 1430334 - DNA, 15 bp, Homo sapiens
acatctactaaaaat

SEQ ID NO: 1430335 - DNA, 15 bp, Homo sapiens
catctactaaaaata

SEQ ID NO: 1430336 - DNA, 15 bp, Homo sapiens
atctactaaaaatac

SEQ ID NO: 1430337 - DNA, 15 bp, Homo sapiens
gggcgtggtggccaa

SEQ ID NO: 1430338 - DNA, 15 bp, Homo sapiens
ggcgtggtggccaat

SEQ ID NO: 1430339 - DNA, 15 bp, Homo sapiens
gcgtggtggccaatg

SEQ ID NO: 1430340 - DNA, 15 bp, Homo sapiens
cgtggtggccaatgc

SEQ ID NO: 1430341 - DNA, 15 bp, Homo sapiens
gtggtggccaatgcc

SEQ ID NO: 1430342 - DNA, 15 bp, Homo sapiens
tggtggccaatgcct

SEQ ID NO: 1430343 - DNA, 15 bp, Homo sapiens
ggtggccaatgcctt

SEQ ID NO: 1430344 - DNA, 15 bp, Homo sapiens
gtggccaatgccttg

SEQ ID NO: 1430345 - DNA, 15 bp, Homo sapiens
tggccaatgccttgt

SEQ ID NO: 1430346 - DNA, 15 bp, Homo sapiens
ggccaatgccttgta

SEQ ID NO: 1430347 - DNA, 15 bp, Homo sapiens
gccaatgccttgtaa

SEQ ID NO: 1430348 - DNA, 15 bp, Homo sapiens
ccaatgccttgtaat

SEQ ID NO: 1430349 - DNA, 15 bp, Homo sapiens
caatgccttgtaatc

SEQ ID NO: 1430350 - DNA, 15 bp, Homo sapiens
aatgccttgtaatcc

SEQ ID NO: 1430351 - DNA, 15 bp, Homo sapiens
atgccttgtaatccc

SEQ ID NO: 1430352 - DNA, 15 bp, Homo sapiens
tgccttgtaatccca

SEQ ID NO: 1430353 - DNA, 15 bp, Homo sapiens
gccttgtaatcccag

SEQ ID NO: 1430354 - DNA, 15 bp, Homo sapiens
ccttgtaatcccagc

SEQ ID NO: 1430355 - DNA, 15 bp, Homo sapiens
aatcccagctattct

SEQ ID NO: 1430356 - DNA, 15 bp, Homo sapiens
atcccagctattctg

SEQ ID NO: 1430357 - DNA, 15 bp, Homo sapiens
ttctggaggctgaga

SEQ ID NO: 1430358 - DNA, 15 bp, Homo sapiens
tctggaggctgagac

SEQ ID NO: 1430359 - DNA, 15 bp, Homo sapiens
ctggaggctgagaca

SEQ ID NO: 1430360 - DNA, 15 bp, Homo sapiens
tggaggctgagacag

SEQ ID NO: 1430361 - DNA, 15 bp, Homo sapiens
gacaggagaatcgcc

SEQ ID NO: 1430362 - DNA, 15 bp, Homo sapiens
acaggagaatcgcct

SEQ ID NO: 1430363 - DNA, 15 bp, Homo sapiens
caggagaatcgcctg

SEQ ID NO: 1430364 - DNA, 15 bp, Homo sapiens
gaatcgcctgaacct

SEQ ID NO: 1430365 - DNA, 15 bp, Homo sapiens
aatcgcctgaacctg

SEQ ID NO: 1430366 - DNA, 15 bp, Homo sapiens
atcgcctgaacctgg

SEQ ID NO: 1430367 - DNA, 15 bp, Homo sapiens
tcgcctgaacctggg

SEQ ID NO: 1430368 - DNA, 15 bp, Homo sapiens
cgcctgaacctggga

SEQ ID NO: 1430369 - DNA, 15 bp, Homo sapiens
gcctgaacctgggag

SEQ ID NO: 1430370 - DNA, 15 bp, Homo sapiens
cctgaacctgggagg

SEQ ID NO: 1430371 - DNA, 15 bp, Homo sapiens
ctgaacctgggaggc

SEQ ID NO: 1430372 - DNA, 15 bp, Homo sapiens
aggttgcactgagct

SEQ ID NO: 1430373 - DNA, 15 bp, Homo sapiens
ggttgcactgagctg

SEQ ID NO: 1430374 - DNA, 15 bp, Homo sapiens
gttgcactgagctgg

SEQ ID NO: 1430375 - DNA, 15 bp, Homo sapiens
ttgcactgagctggg

SEQ ID NO: 1430376 - DNA, 15 bp, Homo sapiens
tgcactgagctggga

SEQ ID NO: 1430377 - DNA, 15 bp, Homo sapiens
gcactgagctgggat

SEQ ID NO: 1430378 - DNA, 15 bp, Homo sapiens
cactgagctgggatt

SEQ ID NO: 1430379 - DNA, 15 bp, Homo sapiens
actgagctgggattg

SEQ ID NO: 1430380 - DNA, 15 bp, Homo sapiens
ctgagctgggattgt

SEQ ID NO: 1430381 - DNA, 15 bp, Homo sapiens
tgagctgggattgta

SEQ ID NO: 1430382 - DNA, 15 bp, Homo sapiens
gagctgggattgtac

SEQ ID NO: 1430383 - DNA, 15 bp, Homo sapiens
agctgggattgtacc

SEQ ID NO: 1430384 - DNA, 15 bp, Homo sapiens
gctgggattgtacca

SEQ ID NO: 1430385 - DNA, 15 bp, Homo sapiens
ctgggattgtaccac

SEQ ID NO: 1430386 - DNA, 15 bp, Homo sapiens
tgggattgtaccact

SEQ ID NO: 1430387 - DNA, 15 bp, Homo sapiens
gggattgtaccactg

SEQ ID NO: 1430388 - DNA, 15 bp, Homo sapiens
ggattgtaccactgc

SEQ ID NO: 1430389 - DNA, 15 bp, Homo sapiens
acaaagtgagactcc

SEQ ID NO: 1430390 - DNA, 15 bp, Homo sapiens
caaagtgagactcca

SEQ ID NO: 1430391 - DNA, 15 bp, Homo sapiens
aaagtgagactccat

SEQ ID NO: 1430392 - DNA, 15 bp, Homo sapiens
aagtgagactccatc

SEQ ID NO: 1430393 - DNA, 15 bp, Homo sapiens
atctcaaaaacaaac

SEQ ID NO: 1430394 - DNA, 15 bp, Homo sapiens
tctcaaaaacaaaca

SEQ ID NO: 1430395 - DNA, 15 bp, Homo sapiens
ctcaaaaacaaacaa

SEQ ID NO: 1430396 - DNA, 15 bp, Homo sapiens
tcaaaaacaaacaaa

SEQ ID NO: 1430397 - DNA, 15 bp, Homo sapiens
caaacaaacaaaaac

SEQ ID NO: 1430398 - DNA, 15 bp, Homo sapiens
aaacaaacaaaaaca

SEQ ID NO: 1430399 - DNA, 15 bp, Homo sapiens
aacaaacaaaaacac

SEQ ID NO: 1430400 - DNA, 15 bp, Homo sapiens
acaaacaaaaacaca

SEQ ID NO: 1430401 - DNA, 15 bp, Homo sapiens
caaacaaaaacacat

SEQ ID NO: 1430402 - DNA, 15 bp, Homo sapiens
aaacaaaaacacatc

SEQ ID NO: 1430403 - DNA, 15 bp, Homo sapiens
aacaaaaacacatca

SEQ ID NO: 1430404 - DNA, 15 bp, Homo sapiens
acaaaaacacatcat

SEQ ID NO: 1430405 - DNA, 15 bp, Homo sapiens
caaaaacacatcatt

SEQ ID NO: 1430406 - DNA, 15 bp, Homo sapiens
aaaaacacatcattt

SEQ ID NO: 1430407 - DNA, 15 bp, Homo sapiens
aaaacacatcatttc

SEQ ID NO: 1430408 - DNA, 15 bp, Homo sapiens
aaacacatcatttcc

SEQ ID NO: 1430409 - DNA, 15 bp, Homo sapiens
aacacatcatttccc

SEQ ID NO: 1430410 - DNA, 15 bp, Homo sapiens
acacatcatttcccc

SEQ ID NO: 1430411 - DNA, 15 bp, Homo sapiens
cacatcatttcccct

SEQ ID NO: 1430412 - DNA, 15 bp, Homo sapiens
acatcatttccccta

SEQ ID NO: 1430413 - DNA, 15 bp, Homo sapiens
catcatttcccctat

SEQ ID NO: 1430414 - DNA, 15 bp, Homo sapiens
atcatttcccctata

SEQ ID NO: 1430415 - DNA, 15 bp, Homo sapiens
tcatttcccctatag

SEQ ID NO: 1430416 - DNA, 15 bp, Homo sapiens
catttcccctatagc

SEQ ID NO: 1430417 - DNA, 15 bp, Homo sapiens
atttcccctatagca

SEQ ID NO: 1430418 - DNA, 15 bp, Homo sapiens
tttcccctatagcaa

SEQ ID NO: 1430419 - DNA, 15 bp, Homo sapiens
ttcccctatagcaaa

SEQ ID NO: 1430420 - DNA, 15 bp, Homo sapiens
tcccctatagcaaaa

SEQ ID NO: 1430421 - DNA, 15 bp, Homo sapiens
cccctatagcaaaaa

SEQ ID NO: 1430422 - DNA, 15 bp, Homo sapiens
ccctatagcaaaaac

SEQ ID NO: 1430423 - DNA, 15 bp, Homo sapiens
cctatagcaaaaaca

SEQ ID NO: 1430424 - DNA, 15 bp, Homo sapiens
ctatagcaaaaacat

SEQ ID NO: 1430425 - DNA, 15 bp, Homo sapiens
tatagcaaaaacatg

SEQ ID NO: 1430426 - DNA, 15 bp, Homo sapiens
atagcaaaaacatga

SEQ ID NO: 1430427 - DNA, 15 bp, Homo sapiens
tagcaaaaacatgac

SEQ ID NO: 1430428 - DNA, 15 bp, Homo sapiens
agcaaaaacatgacg

SEQ ID NO: 1430429 - DNA, 15 bp, Homo sapiens
gcaaaaacatgacgg

SEQ ID NO: 1430430 - DNA, 15 bp, Homo sapiens
caaaaacatgacggc

SEQ ID NO: 1430431 - DNA, 15 bp, Homo sapiens
aaaaacatgacggca

SEQ ID NO: 1430432 - DNA, 15 bp, Homo sapiens
aaaacatgacggcac

SEQ ID NO: 1430433 - DNA, 15 bp, Homo sapiens
aaacatgacggcact

SEQ ID NO: 1430434 - DNA, 15 bp, Homo sapiens
aacatgacggcactt

SEQ ID NO: 1430435 - DNA, 15 bp, Homo sapiens
acatgacggcactta

SEQ ID NO: 1430436 - DNA, 15 bp, Homo sapiens
catgacggcacttac

SEQ ID NO: 1430437 - DNA, 15 bp, Homo sapiens
atgacggcacttact

SEQ ID NO: 1430438 - DNA, 15 bp, Homo sapiens
tgacggcacttactg

SEQ ID NO: 1430439 - DNA, 15 bp, Homo sapiens
gacggcacttactgt

SEQ ID NO: 1430440 - DNA, 15 bp, Homo sapiens
acggcacttactgta

SEQ ID NO: 1430441 - DNA, 15 bp, Homo sapiens
cggcacttactgtat

SEQ ID NO: 1430442 - DNA, 15 bp, Homo sapiens
ggcacttactgtatc

SEQ ID NO: 1430443 - DNA, 15 bp, Homo sapiens
gcacttactgtatca

SEQ ID NO: 1430444 - DNA, 15 bp, Homo sapiens
cacttactgtatcaa

SEQ ID NO: 1430445 - DNA, 15 bp, Homo sapiens
acttactgtatcaag

SEQ ID NO: 1430446 - DNA, 15 bp, Homo sapiens
cttactgtatcaaga

SEQ ID NO: 1430447 - DNA, 15 bp, Homo sapiens
ttactgtatcaagag

SEQ ID NO: 1430448 - DNA, 15 bp, Homo sapiens
tactgtatcaagaga

SEQ ID NO: 1430449 - DNA, 15 bp, Homo sapiens
actgtatcaagagag

SEQ ID NO: 1430450 - DNA, 15 bp, Homo sapiens
ctgtatcaagagagg

SEQ ID NO: 1430451 - DNA, 15 bp, Homo sapiens
tgtatcaagagaggt

SEQ ID NO: 1430452 - DNA, 15 bp, Homo sapiens
gtatcaagagaggtg

SEQ ID NO: 1430453 - DNA, 15 bp, Homo sapiens
tatcaagagaggtga

SEQ ID NO: 1430454 - DNA, 15 bp, Homo sapiens
atcaagagaggtgag

SEQ ID NO: 1430455 - DNA, 15 bp, Homo sapiens
tcaagagaggtgaga

SEQ ID NO: 1430456 - DNA, 15 bp, Homo sapiens
caagagaggtgagaa

SEQ ID NO: 1430457 - DNA, 15 bp, Homo sapiens
aagagaggtgagaaa

SEQ ID NO: 1430458 - DNA, 15 bp, Homo sapiens
agagaggtgagaaaa

SEQ ID NO: 1430459 - DNA, 15 bp, Homo sapiens
gagaggtgagaaaaa

SEQ ID NO: 1430460 - DNA, 15 bp, Homo sapiens
agaggtgagaaaaag

SEQ ID NO: 1430461 - DNA, 15 bp, Homo sapiens
gaggtgagaaaaagg

SEQ ID NO: 1430462 - DNA, 15 bp, Homo sapiens
aggtgagaaaaagga

SEQ ID NO: 1430463 - DNA, 15 bp, Homo sapiens
ggtgagaaaaaggag

SEQ ID NO: 1430464 - DNA, 15 bp, Homo sapiens
gtgagaaaaaggagc

SEQ ID NO: 1430465 - DNA, 15 bp, Homo sapiens
tgagaaaaaggagcc

SEQ ID NO: 1430466 - DNA, 15 bp, Homo sapiens
gagaaaaaggagcca

SEQ ID NO: 1430467 - DNA, 15 bp, Homo sapiens
agaaaaaggagccac

SEQ ID NO: 1430468 - DNA, 15 bp, Homo sapiens
gaaaaaggagccaca

SEQ ID NO: 1430469 - DNA, 15 bp, Homo sapiens
aaaaaggagccacag

SEQ ID NO: 1430470 - DNA, 15 bp, Homo sapiens
aaaaggagccacagc

SEQ ID NO: 1430471 - DNA, 15 bp, Homo sapiens
aaaggagccacagca

SEQ ID NO: 1430472 - DNA, 15 bp, Homo sapiens
aaggagccacagcag

SEQ ID NO: 1430473 - DNA, 15 bp, Homo sapiens
aggagccacagcagg

SEQ ID NO: 1430474 - DNA, 15 bp, Homo sapiens
ggagccacagcagga

SEQ ID NO: 1430475 - DNA, 15 bp, Homo sapiens
gagccacagcaggat

SEQ ID NO: 1430476 - DNA, 15 bp, Homo sapiens
agccacagcaggatg

SEQ ID NO: 1430477 - DNA, 15 bp, Homo sapiens
gccacagcaggatga

SEQ ID NO: 1430478 - DNA, 15 bp, Homo sapiens
ccacagcaggatgat

SEQ ID NO: 1430479 - DNA, 15 bp, Homo sapiens
cacagcaggatgatt

SEQ ID NO: 1430480 - DNA, 15 bp, Homo sapiens
acagcaggatgattc

SEQ ID NO: 1430481 - DNA, 15 bp, Homo sapiens
cagcaggatgattca

SEQ ID NO: 1430482 - DNA, 15 bp, Homo sapiens
agcaggatgattcaa

SEQ ID NO: 1430483 - DNA, 15 bp, Homo sapiens
gcaggatgattcaag

SEQ ID NO: 1430484 - DNA, 15 bp, Homo sapiens
caggatgattcaagg

SEQ ID NO: 1430485 - DNA, 15 bp, Homo sapiens
aggatgattcaaggg

SEQ ID NO: 1430486 - DNA, 15 bp, Homo sapiens
ggatgattcaaggga

SEQ ID NO: 1430487 - DNA, 15 bp, Homo sapiens
gatgattcaagggac

SEQ ID NO: 1430488 - DNA, 15 bp, Homo sapiens
atgattcaagggact

SEQ ID NO: 1430489 - DNA, 15 bp, Homo sapiens
tgattcaagggactc

SEQ ID NO: 1430490 - DNA, 15 bp, Homo sapiens
attcaagggactctg

SEQ ID NO: 1430491 - DNA, 15 bp, Homo sapiens
ttcaagggactctgc

SEQ ID NO: 1430492 - DNA, 15 bp, Homo sapiens
tcaagggactctgca

SEQ ID NO: 1430493 - DNA, 15 bp, Homo sapiens
caagggactctgcat

SEQ ID NO: 1430494 - DNA, 15 bp, Homo sapiens
aagggactctgcata

SEQ ID NO: 1430495 - DNA, 15 bp, Homo sapiens
agggactctgcatag

SEQ ID NO: 1430496 - DNA, 15 bp, Homo sapiens
gggactctgcatagc

SEQ ID NO: 1430497 - DNA, 15 bp, Homo sapiens
ggactctgcatagct

SEQ ID NO: 1430498 - DNA, 15 bp, Homo sapiens
gactctgcatagctc

SEQ ID NO: 1430499 - DNA, 15 bp, Homo sapiens
actctgcatagctcc

SEQ ID NO: 1430500 - DNA, 15 bp, Homo sapiens
ctctgcatagctcca

SEQ ID NO: 1430501 - DNA, 15 bp, Homo sapiens
tctgcatagctccat

SEQ ID NO: 1430502 - DNA, 15 bp, Homo sapiens
ctgcatagctccatt

SEQ ID NO: 1430503 - DNA, 15 bp, Homo sapiens
tgcatagctccattt

SEQ ID NO: 1430504 - DNA, 15 bp, Homo sapiens
gcatagctccatttt

SEQ ID NO: 1430505 - DNA, 15 bp, Homo sapiens
catagctccatttta

SEQ ID NO: 1430506 - DNA, 15 bp, Homo sapiens
atagctccattttaa

SEQ ID NO: 1430507 - DNA, 15 bp, Homo sapiens
tagctccattttaag

SEQ ID NO: 1430508 - DNA, 15 bp, Homo sapiens
agctccattttaaga

SEQ ID NO: 1430509 - DNA, 15 bp, Homo sapiens
gctccattttaagaa

SEQ ID NO: 1430510 - DNA, 15 bp, Homo sapiens
ctccattttaagaat

SEQ ID NO: 1430511 - DNA, 15 bp, Homo sapiens
tccattttaagaata

SEQ ID NO: 1430512 - DNA, 15 bp, Homo sapiens
ccattttaagaatat

SEQ ID NO: 1430513 - DNA, 15 bp, Homo sapiens
cattttaagaatatg

SEQ ID NO: 1430514 - DNA, 15 bp, Homo sapiens
attttaagaatatgc

SEQ ID NO: 1430515 - DNA, 15 bp, Homo sapiens
ttttaagaatatgcc

SEQ ID NO: 1430516 - DNA, 15 bp, Homo sapiens
tttaagaatatgcct

SEQ ID NO: 1430517 - DNA, 15 bp, Homo sapiens
ttaagaatatgccta

SEQ ID NO: 1430518 - DNA, 15 bp, Homo sapiens
taagaatatgcctac

SEQ ID NO: 1430519 - DNA, 15 bp, Homo sapiens
aagaatatgcctact

SEQ ID NO: 1430520 - DNA, 15 bp, Homo sapiens
agaatatgcctactg

SEQ ID NO: 1430521 - DNA, 15 bp, Homo sapiens
gaatatgcctactgc

SEQ ID NO: 1430522 - DNA, 15 bp, Homo sapiens
aatatgcctactgca

SEQ ID NO: 1430523 - DNA, 15 bp, Homo sapiens
atatgcctactgcag

SEQ ID NO: 1430524 - DNA, 15 bp, Homo sapiens
tatgcctactgcagg

SEQ ID NO: 1430525 - DNA, 15 bp, Homo sapiens
atgcctactgcaggt

SEQ ID NO: 1430526 - DNA, 15 bp, Homo sapiens
tgcctactgcaggtc

SEQ ID NO: 1430527 - DNA, 15 bp, Homo sapiens
gcctactgcaggtca

SEQ ID NO: 1430528 - DNA, 15 bp, Homo sapiens
cctactgcaggtcag

SEQ ID NO: 1430529 - DNA, 15 bp, Homo sapiens
ctactgcaggtcaga

SEQ ID NO: 1430530 - DNA, 15 bp, Homo sapiens
tactgcaggtcagag

SEQ ID NO: 1430531 - DNA, 15 bp, Homo sapiens
actgcaggtcagaga

SEQ ID NO: 1430532 - DNA, 15 bp, Homo sapiens
ctgcaggtcagagaa

SEQ ID NO: 1430533 - DNA, 15 bp, Homo sapiens
tgcaggtcagagaag

SEQ ID NO: 1430534 - DNA, 15 bp, Homo sapiens
gcaggtcagagaagg

SEQ ID NO: 1430535 - DNA, 15 bp, Homo sapiens
caggtcagagaaggt

SEQ ID NO: 1430536 - DNA, 15 bp, Homo sapiens
aggtcagagaaggta

SEQ ID NO: 1430537 - DNA, 15 bp, Homo sapiens
ggtcagagaaggtaa

SEQ ID NO: 1430538 - DNA, 15 bp, Homo sapiens
gtcagagaaggtaag

SEQ ID NO: 1430539 - DNA, 15 bp, Homo sapiens
tcagagaaggtaagc

SEQ ID NO: 1430540 - DNA, 15 bp, Homo sapiens
cagagaaggtaagca

SEQ ID NO: 1430541 - DNA, 15 bp, Homo sapiens
agagaaggtaagcaa

SEQ ID NO: 1430542 - DNA, 15 bp, Homo sapiens
gagaaggtaagcaaa

SEQ ID NO: 1430543 - DNA, 15 bp, Homo sapiens
agaaggtaagcaaac

SEQ ID NO: 1430544 - DNA, 15 bp, Homo sapiens
gaaggtaagcaaact

SEQ ID NO: 1430545 - DNA, 15 bp, Homo sapiens
aaggtaagcaaactg

SEQ ID NO: 1430546 - DNA, 15 bp, Homo sapiens
aggtaagcaaactgc

SEQ ID NO: 1430547 - DNA, 15 bp, Homo sapiens
ggtaagcaaactgcc

SEQ ID NO: 1430548 - DNA, 15 bp, Homo sapiens
gtaagcaaactgcct

SEQ ID NO: 1430549 - DNA, 15 bp, Homo sapiens
taagcaaactgccta

SEQ ID NO: 1430550 - DNA, 15 bp, Homo sapiens
aagcaaactgcctaa

SEQ ID NO: 1430551 - DNA, 15 bp, Homo sapiens
agcaaactgcctaag

SEQ ID NO: 1430552 - DNA, 15 bp, Homo sapiens
gcaaactgcctaagg

SEQ ID NO: 1430553 - DNA, 15 bp, Homo sapiens
caaactgcctaaggc

SEQ ID NO: 1430554 - DNA, 15 bp, Homo sapiens
aaactgcctaaggcc

SEQ ID NO: 1430555 - DNA, 15 bp, Homo sapiens
aactgcctaaggcca

SEQ ID NO: 1430556 - DNA, 15 bp, Homo sapiens
actgcctaaggccac

SEQ ID NO: 1430557 - DNA, 15 bp, Homo sapiens
ctgcctaaggccaca

SEQ ID NO: 1430558 - DNA, 15 bp, Homo sapiens
tgcctaaggccacac

SEQ ID NO: 1430559 - DNA, 15 bp, Homo sapiens
gcctaaggccacaca

SEQ ID NO: 1430560 - DNA, 15 bp, Homo sapiens
cctaaggccacacag

SEQ ID NO: 1430561 - DNA, 15 bp, Homo sapiens
ctaaggccacacagc

SEQ ID NO: 1430562 - DNA, 15 bp, Homo sapiens
taaggccacacagcc

SEQ ID NO: 1430563 - DNA, 15 bp, Homo sapiens
aaggccacacagcca

SEQ ID NO: 1430564 - DNA, 15 bp, Homo sapiens
aggccacacagccag

SEQ ID NO: 1430565 - DNA, 15 bp, Homo sapiens
ggccacacagccagg

SEQ ID NO: 1430566 - DNA, 15 bp, Homo sapiens
gccacacagccaggt

SEQ ID NO: 1430567 - DNA, 15 bp, Homo sapiens
ccacacagccaggta

SEQ ID NO: 1430568 - DNA, 15 bp, Homo sapiens
cacacagccaggtac

SEQ ID NO: 1430569 - DNA, 15 bp, Homo sapiens
acacagccaggtaca

SEQ ID NO: 1430570 - DNA, 15 bp, Homo sapiens
cacagccaggtacag

SEQ ID NO: 1430571 - DNA, 15 bp, Homo sapiens
acagccaggtacaga

SEQ ID NO: 1430572 - DNA, 15 bp, Homo sapiens
cagccaggtacagaa

SEQ ID NO: 1430573 - DNA, 15 bp, Homo sapiens
agccaggtacagaac

SEQ ID NO: 1430574 - DNA, 15 bp, Homo sapiens
gccaggtacagaact

SEQ ID NO: 1430575 - DNA, 15 bp, Homo sapiens
ccaggtacagaactc

SEQ ID NO: 1430576 - DNA, 15 bp, Homo sapiens
caggtacagaactct

SEQ ID NO: 1430577 - DNA, 15 bp, Homo sapiens
aggtacagaactctc

SEQ ID NO: 1430578 - DNA, 15 bp, Homo sapiens
ggtacagaactctca

SEQ ID NO: 1430579 - DNA, 15 bp, Homo sapiens
gtacagaactctcac

SEQ ID NO: 1430580 - DNA, 15 bp, Homo sapiens
tacagaactctcacc

SEQ ID NO: 1430581 - DNA, 15 bp, Homo sapiens
acagaactctcacca

SEQ ID NO: 1430582 - DNA, 15 bp, Homo sapiens
cagaactctcaccaa

SEQ ID NO: 1430583 - DNA, 15 bp, Homo sapiens
agaactctcaccaat

SEQ ID NO: 1430584 - DNA, 15 bp, Homo sapiens
gaactctcaccaata

SEQ ID NO: 1430585 - DNA, 15 bp, Homo sapiens
aactctcaccaatat

SEQ ID NO: 1430586 - DNA, 15 bp, Homo sapiens
actctcaccaatatt

SEQ ID NO: 1430587 - DNA, 15 bp, Homo sapiens
ctctcaccaatatta

SEQ ID NO: 1430588 - DNA, 15 bp, Homo sapiens
tctcaccaatattat

SEQ ID NO: 1430589 - DNA, 15 bp, Homo sapiens
ctcaccaatattatt

SEQ ID NO: 1430590 - DNA, 15 bp, Homo sapiens
tcaccaatattattg

SEQ ID NO: 1430591 - DNA, 15 bp, Homo sapiens
caccaatattattgc

SEQ ID NO: 1430592 - DNA, 15 bp, Homo sapiens
accaatattattgcc

SEQ ID NO: 1430593 - DNA, 15 bp, Homo sapiens
ccaatattattgcca

SEQ ID NO: 1430594 - DNA, 15 bp, Homo sapiens
caatattattgccag

SEQ ID NO: 1430595 - DNA, 15 bp, Homo sapiens
aatattattgccagc

SEQ ID NO: 1430596 - DNA, 15 bp, Homo sapiens
atattattgccagca

SEQ ID NO: 1430597 - DNA, 15 bp, Homo sapiens
tattattgccagcaa

SEQ ID NO: 1430598 - DNA, 15 bp, Homo sapiens
attattgccagcaat

SEQ ID NO: 1430599 - DNA, 15 bp, Homo sapiens
ttattgccagcaatc

SEQ ID NO: 1430600 - DNA, 15 bp, Homo sapiens
tattgccagcaatcg

SEQ ID NO: 1430601 - DNA, 15 bp, Homo sapiens
attgccagcaatcgc

SEQ ID NO: 1430602 - DNA, 15 bp, Homo sapiens
ttgccagcaatcgca

SEQ ID NO: 1430603 - DNA, 15 bp, Homo sapiens
tgccagcaatcgcaa

SEQ ID NO: 1430604 - DNA, 15 bp, Homo sapiens
gccagcaatcgcaat

SEQ ID NO: 1430605 - DNA, 15 bp, Homo sapiens
ccagcaatcgcaatt

SEQ ID NO: 1430606 - DNA, 15 bp, Homo sapiens
cagcaatcgcaattt

SEQ ID NO: 1430607 - DNA, 15 bp, Homo sapiens
agcaatcgcaatttt

SEQ ID NO: 1430608 - DNA, 15 bp, Homo sapiens
gcaatcgcaattttg

SEQ ID NO: 1430609 - DNA, 15 bp, Homo sapiens
caatcgcaattttgg

SEQ ID NO: 1430610 - DNA, 15 bp, Homo sapiens
aatcgcaattttggt

SEQ ID NO: 1430611 - DNA, 15 bp, Homo sapiens
atcgcaattttggtg

SEQ ID NO: 1430612 - DNA, 15 bp, Homo sapiens
tcgcaattttggtgt

SEQ ID NO: 1430613 - DNA, 15 bp, Homo sapiens
cgcaattttggtgtt

SEQ ID NO: 1430614 - DNA, 15 bp, Homo sapiens
gcaattttggtgttt

SEQ ID NO: 1430615 - DNA, 15 bp, Homo sapiens
caattttggtgttta

SEQ ID NO: 1430616 - DNA, 15 bp, Homo sapiens
aattttggtgtttat

SEQ ID NO: 1430617 - DNA, 15 bp, Homo sapiens
attttggtgtttatt

SEQ ID NO: 1430618 - DNA, 15 bp, Homo sapiens
ttttggtgtttattc

SEQ ID NO: 1430619 - DNA, 15 bp, Homo sapiens
tttggtgtttattct

SEQ ID NO: 1430620 - DNA, 15 bp, Homo sapiens
ttggtgtttattctt

SEQ ID NO: 1430621 - DNA, 15 bp, Homo sapiens
tggtgtttattcttg

SEQ ID NO: 1430622 - DNA, 15 bp, Homo sapiens
ggtgtttattcttgg

SEQ ID NO: 1430623 - DNA, 15 bp, Homo sapiens
gtgtttattcttggt

SEQ ID NO: 1430624 - DNA, 15 bp, Homo sapiens
tgtttattcttggta

SEQ ID NO: 1430625 - DNA, 15 bp, Homo sapiens
gtttattcttggtac

SEQ ID NO: 1430626 - DNA, 15 bp, Homo sapiens
tttattcttggtacc

SEQ ID NO: 1430627 - DNA, 15 bp, Homo sapiens
ttattcttggtacca

SEQ ID NO: 1430628 - DNA, 15 bp, Homo sapiens
tattcttggtaccaa

SEQ ID NO: 1430629 - DNA, 15 bp, Homo sapiens
attcttggtaccaag

SEQ ID NO: 1430630 - DNA, 15 bp, Homo sapiens
ttcttggtaccaagt

SEQ ID NO: 1430631 - DNA, 15 bp, Homo sapiens
tcttggtaccaagtt

SEQ ID NO: 1430632 - DNA, 15 bp, Homo sapiens
cttggtaccaagttg

SEQ ID NO: 1430633 - DNA, 15 bp, Homo sapiens
ttggtaccaagttgg

SEQ ID NO: 1430634 - DNA, 15 bp, Homo sapiens
tggtaccaagttgga

SEQ ID NO: 1430635 - DNA, 15 bp, Homo sapiens
ggtaccaagttggag

SEQ ID NO: 1430636 - DNA, 15 bp, Homo sapiens
gtaccaagttggaga

SEQ ID NO: 1430637 - DNA, 15 bp, Homo sapiens
taccaagttggagac

SEQ ID NO: 1430638 - DNA, 15 bp, Homo sapiens
accaagttggagact

SEQ ID NO: 1430639 - DNA, 15 bp, Homo sapiens
ccaagttggagacta

SEQ ID NO: 1430640 - DNA, 15 bp, Homo sapiens
caagttggagactat

SEQ ID NO: 1430641 - DNA, 15 bp, Homo sapiens
aagttggagactata

SEQ ID NO: 1430642 - DNA, 15 bp, Homo sapiens
agttggagactatag

SEQ ID NO: 1430643 - DNA, 15 bp, Homo sapiens
gttggagactatagg

SEQ ID NO: 1430644 - DNA, 15 bp, Homo sapiens
ttggagactataggg

SEQ ID NO: 1430645 - DNA, 15 bp, Homo sapiens
tggagactatagggt

SEQ ID NO: 1430646 - DNA, 15 bp, Homo sapiens
ggagactatagggtt

SEQ ID NO: 1430647 - DNA, 15 bp, Homo sapiens
gagactatagggttc

SEQ ID NO: 1430648 - DNA, 15 bp, Homo sapiens
agactatagggttct

SEQ ID NO: 1430649 - DNA, 15 bp, Homo sapiens
gactatagggttctc

SEQ ID NO: 1430650 - DNA, 15 bp, Homo sapiens
actatagggttctct

SEQ ID NO: 1430651 - DNA, 15 bp, Homo sapiens
ctatagggttctctt

SEQ ID NO: 1430652 - DNA, 15 bp, Homo sapiens
tatagggttctcttc

SEQ ID NO: 1430653 - DNA, 15 bp, Homo sapiens
atagggttctcttcc

SEQ ID NO: 1430654 - DNA, 15 bp, Homo sapiens
tagggttctcttcct

SEQ ID NO: 1430655 - DNA, 15 bp, Homo sapiens
agggttctcttccta

SEQ ID NO: 1430656 - DNA, 15 bp, Homo sapiens
gggttctcttcctaa

SEQ ID NO: 1430657 - DNA, 15 bp, Homo sapiens
ggttctcttcctaat

SEQ ID NO: 1430658 - DNA, 15 bp, Homo sapiens
gttctcttcctaata

SEQ ID NO: 1430659 - DNA, 15 bp, Homo sapiens
ttctcttcctaatag

SEQ ID NO: 1430660 - DNA, 15 bp, Homo sapiens
tctcttcctaataga

SEQ ID NO: 1430661 - DNA, 15 bp, Homo sapiens
ctcttcctaatagag

SEQ ID NO: 1430662 - DNA, 15 bp, Homo sapiens
tcttcctaatagaga

SEQ ID NO: 1430663 - DNA, 15 bp, Homo sapiens
cttcctaatagagac

SEQ ID NO: 1430664 - DNA, 15 bp, Homo sapiens
ttcctaatagagacc

SEQ ID NO: 1430665 - DNA, 15 bp, Homo sapiens
tcctaatagagacca

SEQ ID NO: 1430666 - DNA, 15 bp, Homo sapiens
cctaatagagaccat

SEQ ID NO: 1430667 - DNA, 15 bp, Homo sapiens
ctaatagagaccatc

SEQ ID NO: 1430668 - DNA, 15 bp, Homo sapiens
taatagagaccatct

SEQ ID NO: 1430669 - DNA, 15 bp, Homo sapiens
aatagagaccatcta

SEQ ID NO: 1430670 - DNA, 15 bp, Homo sapiens
atagagaccatctag

SEQ ID NO: 1430671 - DNA, 15 bp, Homo sapiens
tagagaccatctagc

SEQ ID NO: 1430672 - DNA, 15 bp, Homo sapiens
agagaccatctagcc

SEQ ID NO: 1430673 - DNA, 15 bp, Homo sapiens
gagaccatctagcct

SEQ ID NO: 1430674 - DNA, 15 bp, Homo sapiens
agaccatctagcctt

SEQ ID NO: 1430675 - DNA, 15 bp, Homo sapiens
gaccatctagccttt

SEQ ID NO: 1430676 - DNA, 15 bp, Homo sapiens
accatctagcctttc

SEQ ID NO: 1430677 - DNA, 15 bp, Homo sapiens
ccatctagcctttca

SEQ ID NO: 1430678 - DNA, 15 bp, Homo sapiens
catctagcctttcac

SEQ ID NO: 1430679 - DNA, 15 bp, Homo sapiens
atctagcctttcact

SEQ ID NO: 1430680 - DNA, 15 bp, Homo sapiens
tctagcctttcactg

SEQ ID NO: 1430681 - DNA, 15 bp, Homo sapiens
ctagcctttcactgt

SEQ ID NO: 1430682 - DNA, 15 bp, Homo sapiens
tagcctttcactgtt

SEQ ID NO: 1430683 - DNA, 15 bp, Homo sapiens
agcctttcactgttt

SEQ ID NO: 1430684 - DNA, 15 bp, Homo sapiens
gcctttcactgtttt

SEQ ID NO: 1430685 - DNA, 15 bp, Homo sapiens
cctttcactgttttg

SEQ ID NO: 1430686 - DNA, 15 bp, Homo sapiens
ctttcactgttttgt

SEQ ID NO: 1430687 - DNA, 15 bp, Homo sapiens
tttcactgttttgtg

SEQ ID NO: 1430688 - DNA, 15 bp, Homo sapiens
ttcactgttttgtgg

SEQ ID NO: 1430689 - DNA, 15 bp, Homo sapiens
tcactgttttgtgga

SEQ ID NO: 1430690 - DNA, 15 bp, Homo sapiens
cactgttttgtggat

SEQ ID NO: 1430691 - DNA, 15 bp, Homo sapiens
actgttttgtggata

SEQ ID NO: 1430692 - DNA, 15 bp, Homo sapiens
ctgttttgtggatac

SEQ ID NO: 1430693 - DNA, 15 bp, Homo sapiens
tgttttgtggatact

SEQ ID NO: 1430694 - DNA, 15 bp, Homo sapiens
gttttgtggatactt

SEQ ID NO: 1430695 - DNA, 15 bp, Homo sapiens
ttttgtggatacttc

SEQ ID NO: 1430696 - DNA, 15 bp, Homo sapiens
tttgtggatacttct

SEQ ID NO: 1430697 - DNA, 15 bp, Homo sapiens
ttgtggatacttctt

SEQ ID NO: 1430698 - DNA, 15 bp, Homo sapiens
tgtggatacttcttt

SEQ ID NO: 1430699 - DNA, 15 bp, Homo sapiens
gtggatacttctttc

SEQ ID NO: 1430700 - DNA, 15 bp, Homo sapiens
tggatacttctttct

SEQ ID NO: 1430701 - DNA, 15 bp, Homo sapiens
ggatacttctttctc

SEQ ID NO: 1430702 - DNA, 15 bp, Homo sapiens
gatacttctttctct

SEQ ID NO: 1430703 - DNA, 15 bp, Homo sapiens
atacttctttctctt

SEQ ID NO: 1430704 - DNA, 15 bp, Homo sapiens
tacttctttctcttc

SEQ ID NO: 1430705 - DNA, 15 bp, Homo sapiens
acttctttctcttct

SEQ ID NO: 1430706 - DNA, 15 bp, Homo sapiens
cttctttctcttctt

SEQ ID NO: 1430707 - DNA, 15 bp, Homo sapiens
ttctttctcttcttc

SEQ ID NO: 1430708 - DNA, 15 bp, Homo sapiens
tctttctcttcttct

SEQ ID NO: 1430709 - DNA, 15 bp, Homo sapiens
ctttctcttcttctt

SEQ ID NO: 1430710 - DNA, 15 bp, Homo sapiens
tttctcttcttcttt

SEQ ID NO: 1430711 - DNA, 15 bp, Homo sapiens
ttctcttcttctttt

SEQ ID NO: 1430712 - DNA, 15 bp, Homo sapiens
tctcttcttcttttt

SEQ ID NO: 1430713 - DNA, 15 bp, Homo sapiens
ctcttcttctttttt

SEQ ID NO: 1430714 - DNA, 15 bp, Homo sapiens
cttcttctttttttt

SEQ ID NO: 1430715 - DNA, 15 bp, Homo sapiens
tcttctttttttttt

SEQ ID NO: 1430716 - DNA, 15 bp, Homo sapiens
ttctttttttttttc

SEQ ID NO: 1430717 - DNA, 15 bp, Homo sapiens
ctttttttttttccc

SEQ ID NO: 1430718 - DNA, 15 bp, Homo sapiens
ttttttttttccctt

SEQ ID NO: 1430719 - DNA, 15 bp, Homo sapiens
tttttttttcccttt

SEQ ID NO: 1430720 - DNA, 15 bp, Homo sapiens
ttttttttccctttt

SEQ ID NO: 1430721 - DNA, 15 bp, Homo sapiens
tttttttccctttta

SEQ ID NO: 1430722 - DNA, 15 bp, Homo sapiens
ttttttcccttttaa

SEQ ID NO: 1430723 - DNA, 15 bp, Homo sapiens
tttttcccttttaaa

SEQ ID NO: 1430724 - DNA, 15 bp, Homo sapiens
ttttcccttttaaaa

SEQ ID NO: 1430725 - DNA, 15 bp, Homo sapiens
tttcccttttaaaat

SEQ ID NO: 1430726 - DNA, 15 bp, Homo sapiens
ttcccttttaaaatc

SEQ ID NO: 1430727 - DNA, 15 bp, Homo sapiens
tcccttttaaaatct

SEQ ID NO: 1430728 - DNA, 15 bp, Homo sapiens
cccttttaaaatcta

SEQ ID NO: 1430729 - DNA, 15 bp, Homo sapiens
ccttttaaaatctag

SEQ ID NO: 1430730 - DNA, 15 bp, Homo sapiens
cttttaaaatctagt

SEQ ID NO: 1430731 - DNA, 15 bp, Homo sapiens
ttttaaaatctagtt

SEQ ID NO: 1430732 - DNA, 15 bp, Homo sapiens
tttaaaatctagtta

SEQ ID NO: 1430733 - DNA, 15 bp, Homo sapiens
ttaaaatctagttat

SEQ ID NO: 1430734 - DNA, 15 bp, Homo sapiens
taaaatctagttatt

SEQ ID NO: 1430735 - DNA, 15 bp, Homo sapiens
aaaatctagttattt

SEQ ID NO: 1430736 - DNA, 15 bp, Homo sapiens
aaatctagttatttt

SEQ ID NO: 1430737 - DNA, 15 bp, Homo sapiens
aatctagttattttt

SEQ ID NO: 1430738 - DNA, 15 bp, Homo sapiens
atctagttatttttt

SEQ ID NO: 1430739 - DNA, 15 bp, Homo sapiens
tctagttattttttt

SEQ ID NO: 1430740 - DNA, 15 bp, Homo sapiens
ctagttatttttttc

SEQ ID NO: 1430741 - DNA, 15 bp, Homo sapiens
tagttatttttttct

SEQ ID NO: 1430742 - DNA, 15 bp, Homo sapiens
agttatttttttctt

SEQ ID NO: 1430743 - DNA, 15 bp, Homo sapiens
gttatttttttcttt

SEQ ID NO: 1430744 - DNA, 15 bp, Homo sapiens
atttttttctttttg

SEQ ID NO: 1430745 - DNA, 15 bp, Homo sapiens
tttttttctttttgg

SEQ ID NO: 1430746 - DNA, 15 bp, Homo sapiens
ttttttctttttggt

SEQ ID NO: 1430747 - DNA, 15 bp, Homo sapiens
tttttctttttggtt

SEQ ID NO: 1430748 - DNA, 15 bp, Homo sapiens
ttttctttttggttt

SEQ ID NO: 1430749 - DNA, 15 bp, Homo sapiens
tttctttttggtttc

SEQ ID NO: 1430750 - DNA, 15 bp, Homo sapiens
ttctttttggtttct

SEQ ID NO: 1430751 - DNA, 15 bp, Homo sapiens
tctttttggtttctt

SEQ ID NO: 1430752 - DNA, 15 bp, Homo sapiens
ctttttggtttcttt

SEQ ID NO: 1430753 - DNA, 15 bp, Homo sapiens
tttttggtttctttg

SEQ ID NO: 1430754 - DNA, 15 bp, Homo sapiens
ttttggtttctttga

SEQ ID NO: 1430755 - DNA, 15 bp, Homo sapiens
tttggtttctttgac

SEQ ID NO: 1430756 - DNA, 15 bp, Homo sapiens
ttggtttctttgaca

SEQ ID NO: 1430757 - DNA, 15 bp, Homo sapiens
tggtttctttgacac

SEQ ID NO: 1430758 - DNA, 15 bp, Homo sapiens
ggtttctttgacaca

SEQ ID NO: 1430759 - DNA, 15 bp, Homo sapiens
gtttctttgacacag

SEQ ID NO: 1430760 - DNA, 15 bp, Homo sapiens
tttctttgacacagg

SEQ ID NO: 1430761 - DNA, 15 bp, Homo sapiens
ttctttgacacaggg

SEQ ID NO: 1430762 - DNA, 15 bp, Homo sapiens
tctttgacacagggt

SEQ ID NO: 1430763 - DNA, 15 bp, Homo sapiens
ctttgacacagggtc

SEQ ID NO: 1430764 - DNA, 15 bp, Homo sapiens
tttgacacagggtct

SEQ ID NO: 1430765 - DNA, 15 bp, Homo sapiens
ttgacacagggtctc

SEQ ID NO: 1430766 - DNA, 15 bp, Homo sapiens
tgacacagggtctct

SEQ ID NO: 1430767 - DNA, 15 bp, Homo sapiens
gacacagggtctctt

SEQ ID NO: 1430768 - DNA, 15 bp, Homo sapiens
acacagggtctctta

SEQ ID NO: 1430769 - DNA, 15 bp, Homo sapiens
cacagggtctcttac

SEQ ID NO: 1430770 - DNA, 15 bp, Homo sapiens
acagggtctcttact

SEQ ID NO: 1430771 - DNA, 15 bp, Homo sapiens
cagggtctcttactc

SEQ ID NO: 1430772 - DNA, 15 bp, Homo sapiens
agggtctcttactct

SEQ ID NO: 1430773 - DNA, 15 bp, Homo sapiens
gggtctcttactctg

SEQ ID NO: 1430774 - DNA, 15 bp, Homo sapiens
ggtctcttactctgt

SEQ ID NO: 1430775 - DNA, 15 bp, Homo sapiens
gtctcttactctgtt

SEQ ID NO: 1430776 - DNA, 15 bp, Homo sapiens
tctcttactctgtta

SEQ ID NO: 1430777 - DNA, 15 bp, Homo sapiens
ctcttactctgttac

SEQ ID NO: 1430778 - DNA, 15 bp, Homo sapiens
tcttactctgttacc

SEQ ID NO: 1430779 - DNA, 15 bp, Homo sapiens
cttactctgttaccc

SEQ ID NO: 1430780 - DNA, 15 bp, Homo sapiens
ttactctgttaccca

SEQ ID NO: 1430781 - DNA, 15 bp, Homo sapiens
tactctgttacccag

SEQ ID NO: 1430782 - DNA, 15 bp, Homo sapiens
actctgttacccagg

SEQ ID NO: 1430783 - DNA, 15 bp, Homo sapiens
cccaggctggaatgg

SEQ ID NO: 1430784 - DNA, 15 bp, Homo sapiens
ccaggctggaatgga

SEQ ID NO: 1430785 - DNA, 15 bp, Homo sapiens
caggctggaatggag

SEQ ID NO: 1430786 - DNA, 15 bp, Homo sapiens
aggctggaatggagt

SEQ ID NO: 1430787 - DNA, 15 bp, Homo sapiens
ggctggaatggagta

SEQ ID NO: 1430788 - DNA, 15 bp, Homo sapiens
gctggaatggagtag

SEQ ID NO: 1430789 - DNA, 15 bp, Homo sapiens
ctggaatggagtagt

SEQ ID NO: 1430790 - DNA, 15 bp, Homo sapiens
tggaatggagtagtg

SEQ ID NO: 1430791 - DNA, 15 bp, Homo sapiens
ggaatggagtagtgc

SEQ ID NO: 1430792 - DNA, 15 bp, Homo sapiens
gaatggagtagtgca

SEQ ID NO: 1430793 - DNA, 15 bp, Homo sapiens
aatggagtagtgcag

SEQ ID NO: 1430794 - DNA, 15 bp, Homo sapiens
atggagtagtgcagt

SEQ ID NO: 1430795 - DNA, 15 bp, Homo sapiens
tggagtagtgcagtc

SEQ ID NO: 1430796 - DNA, 15 bp, Homo sapiens
ggagtagtgcagtca

SEQ ID NO: 1430797 - DNA, 15 bp, Homo sapiens
gagtagtgcagtcat

SEQ ID NO: 1430798 - DNA, 15 bp, Homo sapiens
agtagtgcagtcatg

SEQ ID NO: 1430799 - DNA, 15 bp, Homo sapiens
gtagtgcagtcatgg

SEQ ID NO: 1430800 - DNA, 15 bp, Homo sapiens
tagtgcagtcatggt

SEQ ID NO: 1430801 - DNA, 15 bp, Homo sapiens
agtgcagtcatggtt

SEQ ID NO: 1430802 - DNA, 15 bp, Homo sapiens
gtgcagtcatggttc

SEQ ID NO: 1430803 - DNA, 15 bp, Homo sapiens
tgcagtcatggttca

SEQ ID NO: 1430804 - DNA, 15 bp, Homo sapiens
gcagtcatggttcac

SEQ ID NO: 1430805 - DNA, 15 bp, Homo sapiens
cagtcatggttcact

SEQ ID NO: 1430806 - DNA, 15 bp, Homo sapiens
agtcatggttcactg

SEQ ID NO: 1430807 - DNA, 15 bp, Homo sapiens
gtcatggttcactgt

SEQ ID NO: 1430808 - DNA, 15 bp, Homo sapiens
tcatggttcactgta

SEQ ID NO: 1430809 - DNA, 15 bp, Homo sapiens
catggttcactgtag

SEQ ID NO: 1430810 - DNA, 15 bp, Homo sapiens
atggttcactgtagc

SEQ ID NO: 1430811 - DNA, 15 bp, Homo sapiens
tggttcactgtagct

SEQ ID NO: 1430812 - DNA, 15 bp, Homo sapiens
ggttcactgtagctt

SEQ ID NO: 1430813 - DNA, 15 bp, Homo sapiens
gttcactgtagcttt

SEQ ID NO: 1430814 - DNA, 15 bp, Homo sapiens
ttcactgtagctttg

SEQ ID NO: 1430815 - DNA, 15 bp, Homo sapiens
tcactgtagctttga

SEQ ID NO: 1430816 - DNA, 15 bp, Homo sapiens
cactgtagctttgac

SEQ ID NO: 1430817 - DNA, 15 bp, Homo sapiens
actgtagctttgact

SEQ ID NO: 1430818 - DNA, 15 bp, Homo sapiens
ctgtagctttgactt

SEQ ID NO: 1430819 - DNA, 15 bp, Homo sapiens
tgtagctttgacttc

SEQ ID NO: 1430820 - DNA, 15 bp, Homo sapiens
gtagctttgacttcc

SEQ ID NO: 1430821 - DNA, 15 bp, Homo sapiens
tagctttgacttcct

SEQ ID NO: 1430822 - DNA, 15 bp, Homo sapiens
agctttgacttcctg

SEQ ID NO: 1430823 - DNA, 15 bp, Homo sapiens
gctttgacttcctgg

SEQ ID NO: 1430824 - DNA, 15 bp, Homo sapiens
ctttgacttcctggg

SEQ ID NO: 1430825 - DNA, 15 bp, Homo sapiens
tttgacttcctgggc

SEQ ID NO: 1430826 - DNA, 15 bp, Homo sapiens
ttgacttcctgggct

SEQ ID NO: 1430827 - DNA, 15 bp, Homo sapiens
tgacttcctgggctc

SEQ ID NO: 1430828 - DNA, 15 bp, Homo sapiens
gacttcctgggctca

SEQ ID NO: 1430829 - DNA, 15 bp, Homo sapiens
caagcgatcctccta

SEQ ID NO: 1430830 - DNA, 15 bp, Homo sapiens
aagcgatcctcctac

SEQ ID NO: 1430831 - DNA, 15 bp, Homo sapiens
agcgatcctcctacc

SEQ ID NO: 1430832 - DNA, 15 bp, Homo sapiens
gcgatcctcctacct

SEQ ID NO: 1430833 - DNA, 15 bp, Homo sapiens
cgatcctcctacctc

SEQ ID NO: 1430834 - DNA, 15 bp, Homo sapiens
tacctcagcttcccg

SEQ ID NO: 1430835 - DNA, 15 bp, Homo sapiens
acctcagcttcccga

SEQ ID NO: 1430836 - DNA, 15 bp, Homo sapiens
ctcagcttcccgagt

SEQ ID NO: 1430837 - DNA, 15 bp, Homo sapiens
tcagcttcccgagta

SEQ ID NO: 1430838 - DNA, 15 bp, Homo sapiens
cagcttcccgagtag

SEQ ID NO: 1430839 - DNA, 15 bp, Homo sapiens
agcttcccgagtagc

SEQ ID NO: 1430840 - DNA, 15 bp, Homo sapiens
gcttcccgagtagct

SEQ ID NO: 1430841 - DNA, 15 bp, Homo sapiens
cttcccgagtagctg

SEQ ID NO: 1430842 - DNA, 15 bp, Homo sapiens
ttcccgagtagctgg

SEQ ID NO: 1430843 - DNA, 15 bp, Homo sapiens
cgagtagctgggacc

SEQ ID NO: 1430844 - DNA, 15 bp, Homo sapiens
ctgggaccacaggcg

SEQ ID NO: 1430845 - DNA, 15 bp, Homo sapiens
tgggaccacaggcgc

SEQ ID NO: 1430846 - DNA, 15 bp, Homo sapiens
gggaccacaggcgcc

SEQ ID NO: 1430847 - DNA, 15 bp, Homo sapiens
ggaccacaggcgccc

SEQ ID NO: 1430848 - DNA, 15 bp, Homo sapiens
gaccacaggcgccca

SEQ ID NO: 1430849 - DNA, 15 bp, Homo sapiens
accacaggcgcccac

SEQ ID NO: 1430850 - DNA, 15 bp, Homo sapiens
ccacaggcgcccacc

SEQ ID NO: 1430851 - DNA, 15 bp, Homo sapiens
cacaggcgcccacca

SEQ ID NO: 1430852 - DNA, 15 bp, Homo sapiens
acaggcgcccaccaa

SEQ ID NO: 1430853 - DNA, 15 bp, Homo sapiens
caggcgcccaccaac

SEQ ID NO: 1430854 - DNA, 15 bp, Homo sapiens
aggcgcccaccaaca

SEQ ID NO: 1430855 - DNA, 15 bp, Homo sapiens
ggcgcccaccaacac

SEQ ID NO: 1430856 - DNA, 15 bp, Homo sapiens
gcgcccaccaacacc

SEQ ID NO: 1430857 - DNA, 15 bp, Homo sapiens
cgcccaccaacacct

SEQ ID NO: 1430858 - DNA, 15 bp, Homo sapiens
gcccaccaacacctc

SEQ ID NO: 1430859 - DNA, 15 bp, Homo sapiens
cccaccaacacctcc

SEQ ID NO: 1430860 - DNA, 15 bp, Homo sapiens
ccaccaacacctcca

SEQ ID NO: 1430861 - DNA, 15 bp, Homo sapiens
caccaacacctccag

SEQ ID NO: 1430862 - DNA, 15 bp, Homo sapiens
accaacacctccagc

SEQ ID NO: 1430863 - DNA, 15 bp, Homo sapiens
ccaacacctccagct

SEQ ID NO: 1430864 - DNA, 15 bp, Homo sapiens
caacacctccagcta

SEQ ID NO: 1430865 - DNA, 15 bp, Homo sapiens
aacacctccagctaa

SEQ ID NO: 1430866 - DNA, 15 bp, Homo sapiens
acacctccagctaat

SEQ ID NO: 1430867 - DNA, 15 bp, Homo sapiens
cacctccagctaatt

SEQ ID NO: 1430868 - DNA, 15 bp, Homo sapiens
acctccagctaattt

SEQ ID NO: 1430869 - DNA, 15 bp, Homo sapiens
cctccagctaatttt

SEQ ID NO: 1430870 - DNA, 15 bp, Homo sapiens
ctccagctaattttt

SEQ ID NO: 1430871 - DNA, 15 bp, Homo sapiens
tccagctaattttta

SEQ ID NO: 1430872 - DNA, 15 bp, Homo sapiens
taatttttaagtttt

SEQ ID NO: 1430873 - DNA, 15 bp, Homo sapiens
aatttttaagttttt

SEQ ID NO: 1430874 - DNA, 15 bp, Homo sapiens
atttttaagttttta

SEQ ID NO: 1430875 - DNA, 15 bp, Homo sapiens
tttttaagtttttac

SEQ ID NO: 1430876 - DNA, 15 bp, Homo sapiens
ttttaagtttttact

SEQ ID NO: 1430877 - DNA, 15 bp, Homo sapiens
tttaagtttttacta

SEQ ID NO: 1430878 - DNA, 15 bp, Homo sapiens
ttaagtttttactag

SEQ ID NO: 1430879 - DNA, 15 bp, Homo sapiens
taagtttttactaga

SEQ ID NO: 1430880 - DNA, 15 bp, Homo sapiens
aagtttttactagag

SEQ ID NO: 1430881 - DNA, 15 bp, Homo sapiens
agtttttactagaga

SEQ ID NO: 1430882 - DNA, 15 bp, Homo sapiens
gtttttactagagac

SEQ ID NO: 1430883 - DNA, 15 bp, Homo sapiens
tttttactagagaca

SEQ ID NO: 1430884 - DNA, 15 bp, Homo sapiens
ttttactagagacaa

SEQ ID NO: 1430885 - DNA, 15 bp, Homo sapiens
tttactagagacaac

SEQ ID NO: 1430886 - DNA, 15 bp, Homo sapiens
ttactagagacaaca

SEQ ID NO: 1430887 - DNA, 15 bp, Homo sapiens
tactagagacaacat

SEQ ID NO: 1430888 - DNA, 15 bp, Homo sapiens
actagagacaacatc

SEQ ID NO: 1430889 - DNA, 15 bp, Homo sapiens
ctagagacaacatct

SEQ ID NO: 1430890 - DNA, 15 bp, Homo sapiens
tagagacaacatctc

SEQ ID NO: 1430891 - DNA, 15 bp, Homo sapiens
agagacaacatctca

SEQ ID NO: 1430892 - DNA, 15 bp, Homo sapiens
gagacaacatctcac

SEQ ID NO: 1430893 - DNA, 15 bp, Homo sapiens
agacaacatctcact

SEQ ID NO: 1430894 - DNA, 15 bp, Homo sapiens
gacaacatctcacta

SEQ ID NO: 1430895 - DNA, 15 bp, Homo sapiens
acaacatctcactat

SEQ ID NO: 1430896 - DNA, 15 bp, Homo sapiens
caacatctcactatg

SEQ ID NO: 1430897 - DNA, 15 bp, Homo sapiens
aacatctcactatgt

SEQ ID NO: 1430898 - DNA, 15 bp, Homo sapiens
acatctcactatgtt

SEQ ID NO: 1430899 - DNA, 15 bp, Homo sapiens
catctcactatgttg

SEQ ID NO: 1430900 - DNA, 15 bp, Homo sapiens
atctcactatgttgc

SEQ ID NO: 1430901 - DNA, 15 bp, Homo sapiens
cctcaggtgatctgt

SEQ ID NO: 1430902 - DNA, 15 bp, Homo sapiens
ctcaggtgatctgtc

SEQ ID NO: 1430903 - DNA, 15 bp, Homo sapiens
tcaggtgatctgtcc

SEQ ID NO: 1430904 - DNA, 15 bp, Homo sapiens
caggtgatctgtcca

SEQ ID NO: 1430905 - DNA, 15 bp, Homo sapiens
aggtgatctgtccac

SEQ ID NO: 1430906 - DNA, 15 bp, Homo sapiens
ggtgatctgtccacc

SEQ ID NO: 1430907 - DNA, 15 bp, Homo sapiens
gtgatctgtccacct

SEQ ID NO: 1430908 - DNA, 15 bp, Homo sapiens
tgatctgtccacctc

SEQ ID NO: 1430909 - DNA, 15 bp, Homo sapiens
gatctgtccacctcg

SEQ ID NO: 1430910 - DNA, 15 bp, Homo sapiens
atctgtccacctcgg

SEQ ID NO: 1430911 - DNA, 15 bp, Homo sapiens
tctgtccacctcggc

SEQ ID NO: 1430912 - DNA, 15 bp, Homo sapiens
ctgtccacctcggcc

SEQ ID NO: 1430913 - DNA, 15 bp, Homo sapiens
tgtccacctcggcct

SEQ ID NO: 1430914 - DNA, 15 bp, Homo sapiens
gtccacctcggcctc

SEQ ID NO: 1430915 - DNA, 15 bp, Homo sapiens
tccacctcggcctct

SEQ ID NO: 1430916 - DNA, 15 bp, Homo sapiens
ccacctcggcctctc

SEQ ID NO: 1430917 - DNA, 15 bp, Homo sapiens
cacctcggcctctca

SEQ ID NO: 1430918 - DNA, 15 bp, Homo sapiens
acctcggcctctcaa

SEQ ID NO: 1430919 - DNA, 15 bp, Homo sapiens
cctcggcctctcaaa

SEQ ID NO: 1430920 - DNA, 15 bp, Homo sapiens
ctcggcctctcaaag

SEQ ID NO: 1430921 - DNA, 15 bp, Homo sapiens
tcggcctctcaaagt

SEQ ID NO: 1430922 - DNA, 15 bp, Homo sapiens
cggcctctcaaagtg

SEQ ID NO: 1430923 - DNA, 15 bp, Homo sapiens
ggcctctcaaagtgc

SEQ ID NO: 1430924 - DNA, 15 bp, Homo sapiens
aagtgctgggattgt

SEQ ID NO: 1430925 - DNA, 15 bp, Homo sapiens
agtgctgggattgta

SEQ ID NO: 1430926 - DNA, 15 bp, Homo sapiens
gtgctgggattgtag

SEQ ID NO: 1430927 - DNA, 15 bp, Homo sapiens
tgctgggattgtagg

SEQ ID NO: 1430928 - DNA, 15 bp, Homo sapiens
gctgggattgtaggc

SEQ ID NO: 1430929 - DNA, 15 bp, Homo sapiens
ctgggattgtaggcg

SEQ ID NO: 1430930 - DNA, 15 bp, Homo sapiens
tgggattgtaggcgt

SEQ ID NO: 1430931 - DNA, 15 bp, Homo sapiens
gggattgtaggcgtg

SEQ ID NO: 1430932 - DNA, 15 bp, Homo sapiens
ggattgtaggcgtga

SEQ ID NO: 1430933 - DNA, 15 bp, Homo sapiens
gattgtaggcgtgag

SEQ ID NO: 1430934 - DNA, 15 bp, Homo sapiens
attgtaggcgtgagc

SEQ ID NO: 1430935 - DNA, 15 bp, Homo sapiens
ttgtaggcgtgagcc

SEQ ID NO: 1430936 - DNA, 15 bp, Homo sapiens
tgtaggcgtgagcca

SEQ ID NO: 1430937 - DNA, 15 bp, Homo sapiens
gtaggcgtgagccac

SEQ ID NO: 1430938 - DNA, 15 bp, Homo sapiens
taggcgtgagccaca

SEQ ID NO: 1430939 - DNA, 15 bp, Homo sapiens
aggcgtgagccacat

SEQ ID NO: 1430940 - DNA, 15 bp, Homo sapiens
ggcgtgagccacatc

SEQ ID NO: 1430941 - DNA, 15 bp, Homo sapiens
gcgtgagccacatca

SEQ ID NO: 1430942 - DNA, 15 bp, Homo sapiens
cgtgagccacatcac

SEQ ID NO: 1430943 - DNA, 15 bp, Homo sapiens
gtgagccacatcacc

SEQ ID NO: 1430944 - DNA, 15 bp, Homo sapiens
tgagccacatcacct

SEQ ID NO: 1430945 - DNA, 15 bp, Homo sapiens
gagccacatcacctg

SEQ ID NO: 1430946 - DNA, 15 bp, Homo sapiens
agccacatcacctgg

SEQ ID NO: 1430947 - DNA, 15 bp, Homo sapiens
gccacatcacctggc

SEQ ID NO: 1430948 - DNA, 15 bp, Homo sapiens
ccacatcacctggcc

SEQ ID NO: 1430949 - DNA, 15 bp, Homo sapiens
cacatcacctggcca

SEQ ID NO: 1430950 - DNA, 15 bp, Homo sapiens
acatcacctggccac

SEQ ID NO: 1430951 - DNA, 15 bp, Homo sapiens
catcacctggccact

SEQ ID NO: 1430952 - DNA, 15 bp, Homo sapiens
atcacctggccactt

SEQ ID NO: 1430953 - DNA, 15 bp, Homo sapiens
tcacctggccacttt

SEQ ID NO: 1430954 - DNA, 15 bp, Homo sapiens
cacctggccactttt

SEQ ID NO: 1430955 - DNA, 15 bp, Homo sapiens
acctggccacttttt

SEQ ID NO: 1430956 - DNA, 15 bp, Homo sapiens
cctggccactttttt

SEQ ID NO: 1430957 - DNA, 15 bp, Homo sapiens
ctggccactttttta

SEQ ID NO: 1430958 - DNA, 15 bp, Homo sapiens
tggccacttttttaa

SEQ ID NO: 1430959 - DNA, 15 bp, Homo sapiens
ggccacttttttaac

SEQ ID NO: 1430960 - DNA, 15 bp, Homo sapiens
gccacttttttaact

SEQ ID NO: 1430961 - DNA, 15 bp, Homo sapiens
ccacttttttaactc

SEQ ID NO: 1430962 - DNA, 15 bp, Homo sapiens
cacttttttaactct

SEQ ID NO: 1430963 - DNA, 15 bp, Homo sapiens
acttttttaactctt

SEQ ID NO: 1430964 - DNA, 15 bp, Homo sapiens
cttttttaactcttt

SEQ ID NO: 1430965 - DNA, 15 bp, Homo sapiens
ttttttaactctttc

SEQ ID NO: 1430966 - DNA, 15 bp, Homo sapiens
tttttaactctttcc

SEQ ID NO: 1430967 - DNA, 15 bp, Homo sapiens
ttttaactctttcca

SEQ ID NO: 1430968 - DNA, 15 bp, Homo sapiens
tttaactctttccaa

SEQ ID NO: 1430969 - DNA, 15 bp, Homo sapiens
ttaactctttccaat

SEQ ID NO: 1430970 - DNA, 15 bp, Homo sapiens
taactctttccaatg

SEQ ID NO: 1430971 - DNA, 15 bp, Homo sapiens
aactctttccaatgg

SEQ ID NO: 1430972 - DNA, 15 bp, Homo sapiens
actctttccaatggt

SEQ ID NO: 1430973 - DNA, 15 bp, Homo sapiens
ctctttccaatggtt

SEQ ID NO: 1430974 - DNA, 15 bp, Homo sapiens
tctttccaatggtta

SEQ ID NO: 1430975 - DNA, 15 bp, Homo sapiens
ctttccaatggttaa

SEQ ID NO: 1430976 - DNA, 15 bp, Homo sapiens
tttccaatggttaat

SEQ ID NO: 1430977 - DNA, 15 bp, Homo sapiens
ttccaatggttaatt

SEQ ID NO: 1430978 - DNA, 15 bp, Homo sapiens
tccaatggttaattc

SEQ ID NO: 1430979 - DNA, 15 bp, Homo sapiens
ccaatggttaattcc

SEQ ID NO: 1430980 - DNA, 15 bp, Homo sapiens
caatggttaattccg

SEQ ID NO: 1430981 - DNA, 15 bp, Homo sapiens
aatggttaattccgt

SEQ ID NO: 1430982 - DNA, 15 bp, Homo sapiens
atggttaattccgtt

SEQ ID NO: 1430983 - DNA, 15 bp, Homo sapiens
tggttaattccgttt

SEQ ID NO: 1430984 - DNA, 15 bp, Homo sapiens
ggttaattccgtttg

SEQ ID NO: 1430985 - DNA, 15 bp, Homo sapiens
gttaattccgtttga

SEQ ID NO: 1430986 - DNA, 15 bp, Homo sapiens
ttaattccgtttgat

SEQ ID NO: 1430987 - DNA, 15 bp, Homo sapiens
taattccgtttgata

SEQ ID NO: 1430988 - DNA, 15 bp, Homo sapiens
aattccgtttgatat

SEQ ID NO: 1430989 - DNA, 15 bp, Homo sapiens
attccgtttgatatg

SEQ ID NO: 1430990 - DNA, 15 bp, Homo sapiens
ttccgtttgatatgg

SEQ ID NO: 1430991 - DNA, 15 bp, Homo sapiens
tccgtttgatatggt

SEQ ID NO: 1430992 - DNA, 15 bp, Homo sapiens
ccgtttgatatggtt

SEQ ID NO: 1430993 - DNA, 15 bp, Homo sapiens
cgtttgatatggttc

SEQ ID NO: 1430994 - DNA, 15 bp, Homo sapiens
gtttgatatggttcc

SEQ ID NO: 1430995 - DNA, 15 bp, Homo sapiens
tttgatatggttcct

SEQ ID NO: 1430996 - DNA, 15 bp, Homo sapiens
ttgatatggttcctt

SEQ ID NO: 1430997 - DNA, 15 bp, Homo sapiens
tgatatggttccttg

SEQ ID NO: 1430998 - DNA, 15 bp, Homo sapiens
gatatggttccttgg

SEQ ID NO: 1430999 - DNA, 15 bp, Homo sapiens
atatggttccttgga

SEQ ID NO: 1431000 - DNA, 15 bp, Homo sapiens
tatggttccttggaa

SEQ ID NO: 1431001 - DNA, 15 bp, Homo sapiens
atggttccttggaac

SEQ ID NO: 1431002 - DNA, 15 bp, Homo sapiens
tggttccttggaact

SEQ ID NO: 1431003 - DNA, 15 bp, Homo sapiens
ggttccttggaactt

SEQ ID NO: 1431004 - DNA, 15 bp, Homo sapiens
ttccttggaacttgc

SEQ ID NO: 1431005 - DNA, 15 bp, Homo sapiens
tccttggaacttgca

SEQ ID NO: 1431006 - DNA, 15 bp, Homo sapiens
ccttggaacttgcac

SEQ ID NO: 1431007 - DNA, 15 bp, Homo sapiens
cttggaacttgcaca

SEQ ID NO: 1431008 - DNA, 15 bp, Homo sapiens
ttggaacttgcacat

SEQ ID NO: 1431009 - DNA, 15 bp, Homo sapiens
tggaacttgcacatt

SEQ ID NO: 1431010 - DNA, 15 bp, Homo sapiens
ggaacttgcacatta

SEQ ID NO: 1431011 - DNA, 15 bp, Homo sapiens
gaacttgcacattac

SEQ ID NO: 1431012 - DNA, 15 bp, Homo sapiens
aacttgcacattacc

SEQ ID NO: 1431013 - DNA, 15 bp, Homo sapiens
acttgcacattaccc

SEQ ID NO: 1431014 - DNA, 15 bp, Homo sapiens
cttgcacattaccct

SEQ ID NO: 1431015 - DNA, 15 bp, Homo sapiens
ttgcacattaccctt

SEQ ID NO: 1431016 - DNA, 15 bp, Homo sapiens
tgcacattacccttt

SEQ ID NO: 1431017 - DNA, 15 bp, Homo sapiens
gcacattacccttta

SEQ ID NO: 1431018 - DNA, 15 bp, Homo sapiens
cacattaccctttat

SEQ ID NO: 1431019 - DNA, 15 bp, Homo sapiens
acattaccctttatc

SEQ ID NO: 1431020 - DNA, 15 bp, Homo sapiens
cattaccctttatca

SEQ ID NO: 1431021 - DNA, 15 bp, Homo sapiens
attaccctttatcaa

SEQ ID NO: 1431022 - DNA, 15 bp, Homo sapiens
ttaccctttatcaat

SEQ ID NO: 1431023 - DNA, 15 bp, Homo sapiens
taccctttatcaatt

SEQ ID NO: 1431024 - DNA, 15 bp, Homo sapiens
accctttatcaatta

SEQ ID NO: 1431025 - DNA, 15 bp, Homo sapiens
ccctttatcaattat

SEQ ID NO: 1431026 - DNA, 15 bp, Homo sapiens
cctttatcaattatc

SEQ ID NO: 1431027 - DNA, 15 bp, Homo sapiens
ctttatcaattatca

SEQ ID NO: 1431028 - DNA, 15 bp, Homo sapiens
tttatcaattatcac

SEQ ID NO: 1431029 - DNA, 15 bp, Homo sapiens
ttatcaattatcacc

SEQ ID NO: 1431030 - DNA, 15 bp, Homo sapiens
tatcaattatcaccc

SEQ ID NO: 1431031 - DNA, 15 bp, Homo sapiens
atcaattatcaccct

SEQ ID NO: 1431032 - DNA, 15 bp, Homo sapiens
tcaattatcaccctg

SEQ ID NO: 1431033 - DNA, 15 bp, Homo sapiens
caattatcaccctgt

SEQ ID NO: 1431034 - DNA, 15 bp, Homo sapiens
aattatcaccctgta

SEQ ID NO: 1431035 - DNA, 15 bp, Homo sapiens
attatcaccctgtat

SEQ ID NO: 1431036 - DNA, 15 bp, Homo sapiens
ttatcaccctgtatt

SEQ ID NO: 1431037 - DNA, 15 bp, Homo sapiens
tatcaccctgtattg

SEQ ID NO: 1431038 - DNA, 15 bp, Homo sapiens
atcaccctgtattgg

SEQ ID NO: 1431039 - DNA, 15 bp, Homo sapiens
tcaccctgtattggg

SEQ ID NO: 1431040 - DNA, 15 bp, Homo sapiens
caccctgtattgggg

SEQ ID NO: 1431041 - DNA, 15 bp, Homo sapiens
accctgtattggggg

SEQ ID NO: 1431042 - DNA, 15 bp, Homo sapiens
ccctgtattgggggt

SEQ ID NO: 1431043 - DNA, 15 bp, Homo sapiens
cctgtattgggggtg

SEQ ID NO: 1431044 - DNA, 15 bp, Homo sapiens
ctgtattgggggtgg

SEQ ID NO: 1431045 - DNA, 15 bp, Homo sapiens
tgtattgggggtggg

SEQ ID NO: 1431046 - DNA, 15 bp, Homo sapiens
gtattgggggtgggg

SEQ ID NO: 1431047 - DNA, 15 bp, Homo sapiens
tattgggggtgggga

SEQ ID NO: 1431048 - DNA, 15 bp, Homo sapiens
attgggggtggggag

SEQ ID NO: 1431049 - DNA, 15 bp, Homo sapiens
tgggggtggggagga

SEQ ID NO: 1431050 - DNA, 15 bp, Homo sapiens
gggggtggggaggat

SEQ ID NO: 1431051 - DNA, 15 bp, Homo sapiens
ggggtggggaggatg

SEQ ID NO: 1431052 - DNA, 15 bp, Homo sapiens
gggtggggaggatga

SEQ ID NO: 1431053 - DNA, 15 bp, Homo sapiens
ggtggggaggatgat

SEQ ID NO: 1431054 - DNA, 15 bp, Homo sapiens
gtggggaggatgata

SEQ ID NO: 1431055 - DNA, 15 bp, Homo sapiens
tggggaggatgatac

SEQ ID NO: 1431056 - DNA, 15 bp, Homo sapiens
ggggaggatgatacc

SEQ ID NO: 1431057 - DNA, 15 bp, Homo sapiens
gggaggatgatacct

SEQ ID NO: 1431058 - DNA, 15 bp, Homo sapiens
ggaggatgatacctc

SEQ ID NO: 1431059 - DNA, 15 bp, Homo sapiens
gaggatgatacctct

SEQ ID NO: 1431060 - DNA, 15 bp, Homo sapiens
aggatgatacctctc

SEQ ID NO: 1431061 - DNA, 15 bp, Homo sapiens
ggatgatacctctct

SEQ ID NO: 1431062 - DNA, 15 bp, Homo sapiens
gatgatacctctctt

SEQ ID NO: 1431063 - DNA, 15 bp, Homo sapiens
atgatacctctcttc

SEQ ID NO: 1431064 - DNA, 15 bp, Homo sapiens
tgatacctctcttca

SEQ ID NO: 1431065 - DNA, 15 bp, Homo sapiens
gatacctctcttcat

SEQ ID NO: 1431066 - DNA, 15 bp, Homo sapiens
atacctctcttcata

SEQ ID NO: 1431067 - DNA, 15 bp, Homo sapiens
tacctctcttcatag

SEQ ID NO: 1431068 - DNA, 15 bp, Homo sapiens
acctctcttcatagt

SEQ ID NO: 1431069 - DNA, 15 bp, Homo sapiens
cctctcttcatagtt

SEQ ID NO: 1431070 - DNA, 15 bp, Homo sapiens
ctctcttcatagtta

SEQ ID NO: 1431071 - DNA, 15 bp, Homo sapiens
tctcttcatagttag

SEQ ID NO: 1431072 - DNA, 15 bp, Homo sapiens
ctcttcatagttaga

SEQ ID NO: 1431073 - DNA, 15 bp, Homo sapiens
tcttcatagttagat

SEQ ID NO: 1431074 - DNA, 15 bp, Homo sapiens
cttcatagttagatc

SEQ ID NO: 1431075 - DNA, 15 bp, Homo sapiens
ttcatagttagatcc

SEQ ID NO: 1431076 - DNA, 15 bp, Homo sapiens
tcatagttagatcct

SEQ ID NO: 1431077 - DNA, 15 bp, Homo sapiens
catagttagatccta

SEQ ID NO: 1431078 - DNA, 15 bp, Homo sapiens
atagttagatcctac

SEQ ID NO: 1431079 - DNA, 15 bp, Homo sapiens
tagttagatcctact

SEQ ID NO: 1431080 - DNA, 15 bp, Homo sapiens
agttagatcctactt

SEQ ID NO: 1431081 - DNA, 15 bp, Homo sapiens
gttagatcctactta

SEQ ID NO: 1431082 - DNA, 15 bp, Homo sapiens
ttagatcctacttac

SEQ ID NO: 1431083 - DNA, 15 bp, Homo sapiens
tagatcctacttact

SEQ ID NO: 1431084 - DNA, 15 bp, Homo sapiens
agatcctacttactt

SEQ ID NO: 1431085 - DNA, 15 bp, Homo sapiens
gatcctacttacttt

SEQ ID NO: 1431086 - DNA, 15 bp, Homo sapiens
atcctacttactttc

SEQ ID NO: 1431087 - DNA, 15 bp, Homo sapiens
tcctacttactttca

SEQ ID NO: 1431088 - DNA, 15 bp, Homo sapiens
cctacttactttcaa

SEQ ID NO: 1431089 - DNA, 15 bp, Homo sapiens
ctacttactttcaac

SEQ ID NO: 1431090 - DNA, 15 bp, Homo sapiens
tacttactttcaaca

SEQ ID NO: 1431091 - DNA, 15 bp, Homo sapiens
acttactttcaacag

SEQ ID NO: 1431092 - DNA, 15 bp, Homo sapiens
cttactttcaacaga

SEQ ID NO: 1431093 - DNA, 15 bp, Homo sapiens
ttactttcaacagag

SEQ ID NO: 1431094 - DNA, 15 bp, Homo sapiens
tactttcaacagagt

SEQ ID NO: 1431095 - DNA, 15 bp, Homo sapiens
actttcaacagagtt

SEQ ID NO: 1431096 - DNA, 15 bp, Homo sapiens
ctttcaacagagttc

SEQ ID NO: 1431097 - DNA, 15 bp, Homo sapiens
tttcaacagagttct

SEQ ID NO: 1431098 - DNA, 15 bp, Homo sapiens
ttcaacagagttctt

SEQ ID NO: 1431099 - DNA, 15 bp, Homo sapiens
tcaacagagttctta

SEQ ID NO: 1431100 - DNA, 15 bp, Homo sapiens
caacagagttcttaa

SEQ ID NO: 1431101 - DNA, 15 bp, Homo sapiens
aacagagttcttaac

SEQ ID NO: 1431102 - DNA, 15 bp, Homo sapiens
acagagttcttaaca

SEQ ID NO: 1431103 - DNA, 15 bp, Homo sapiens
cagagttcttaacaa

SEQ ID NO: 1431104 - DNA, 15 bp, Homo sapiens
agagttcttaacaat

SEQ ID NO: 1431105 - DNA, 15 bp, Homo sapiens
gagttcttaacaatc

SEQ ID NO: 1431106 - DNA, 15 bp, Homo sapiens
agttcttaacaatcc

SEQ ID NO: 1431107 - DNA, 15 bp, Homo sapiens
gttcttaacaatcct

SEQ ID NO: 1431108 - DNA, 15 bp, Homo sapiens
ttcttaacaatccta

SEQ ID NO: 1431109 - DNA, 15 bp, Homo sapiens
tcttaacaatcctag

SEQ ID NO: 1431110 - DNA, 15 bp, Homo sapiens
cttaacaatcctaga

SEQ ID NO: 1431111 - DNA, 15 bp, Homo sapiens
ttaacaatcctagaa

SEQ ID NO: 1431112 - DNA, 15 bp, Homo sapiens
taacaatcctagaaa

SEQ ID NO: 1431113 - DNA, 15 bp, Homo sapiens
aacaatcctagaaac

SEQ ID NO: 1431114 - DNA, 15 bp, Homo sapiens
acaatcctagaaact

SEQ ID NO: 1431115 - DNA, 15 bp, Homo sapiens
caatcctagaaactc

SEQ ID NO: 1431116 - DNA, 15 bp, Homo sapiens
aatcctagaaactca

SEQ ID NO: 1431117 - DNA, 15 bp, Homo sapiens
atcctagaaactcac

SEQ ID NO: 1431118 - DNA, 15 bp, Homo sapiens
tcctagaaactcaca

SEQ ID NO: 1431119 - DNA, 15 bp, Homo sapiens
cctagaaactcacag

SEQ ID NO: 1431120 - DNA, 15 bp, Homo sapiens
ctagaaactcacagg

SEQ ID NO: 1431121 - DNA, 15 bp, Homo sapiens
tagaaactcacaggt

SEQ ID NO: 1431122 - DNA, 15 bp, Homo sapiens
agaaactcacaggtc

SEQ ID NO: 1431123 - DNA, 15 bp, Homo sapiens
gaaactcacaggtcc

SEQ ID NO: 1431124 - DNA, 15 bp, Homo sapiens
aaactcacaggtcca

SEQ ID NO: 1431125 - DNA, 15 bp, Homo sapiens
aactcacaggtccag

SEQ ID NO: 1431126 - DNA, 15 bp, Homo sapiens
actcacaggtccaga

SEQ ID NO: 1431127 - DNA, 15 bp, Homo sapiens
ctcacaggtccagaa

SEQ ID NO: 1431128 - DNA, 15 bp, Homo sapiens
tcacaggtccagaaa

SEQ ID NO: 1431129 - DNA, 15 bp, Homo sapiens
cacaggtccagaaaa

SEQ ID NO: 1431130 - DNA, 15 bp, Homo sapiens
acaggtccagaaaag

SEQ ID NO: 1431131 - DNA, 15 bp, Homo sapiens
caggtccagaaaaga

SEQ ID NO: 1431132 - DNA, 15 bp, Homo sapiens
aggtccagaaaagac

SEQ ID NO: 1431133 - DNA, 15 bp, Homo sapiens
ggtccagaaaagaca

SEQ ID NO: 1431134 - DNA, 15 bp, Homo sapiens
gtccagaaaagacaa

SEQ ID NO: 1431135 - DNA, 15 bp, Homo sapiens
tccagaaaagacaag

SEQ ID NO: 1431136 - DNA, 15 bp, Homo sapiens
ccagaaaagacaagc

SEQ ID NO: 1431137 - DNA, 15 bp, Homo sapiens
cagaaaagacaagca

SEQ ID NO: 1431138 - DNA, 15 bp, Homo sapiens
agaaaagacaagcat

SEQ ID NO: 1431139 - DNA, 15 bp, Homo sapiens
gaaaagacaagcata

SEQ ID NO: 1431140 - DNA, 15 bp, Homo sapiens
aaaagacaagcataa

SEQ ID NO: 1431141 - DNA, 15 bp, Homo sapiens
aaagacaagcataaa

SEQ ID NO: 1431142 - DNA, 15 bp, Homo sapiens
aagacaagcataaag

SEQ ID NO: 1431143 - DNA, 15 bp, Homo sapiens
agacaagcataaagg

SEQ ID NO: 1431144 - DNA, 15 bp, Homo sapiens
gacaagcataaagga

SEQ ID NO: 1431145 - DNA, 15 bp, Homo sapiens
acaagcataaaggaa

SEQ ID NO: 1431146 - DNA, 15 bp, Homo sapiens
caagcataaaggaaa

SEQ ID NO: 1431147 - DNA, 15 bp, Homo sapiens
aagcataaaggaaac

SEQ ID NO: 1431148 - DNA, 15 bp, Homo sapiens
agcataaaggaaact

SEQ ID NO: 1431149 - DNA, 15 bp, Homo sapiens
gcataaaggaaacta

SEQ ID NO: 1431150 - DNA, 15 bp, Homo sapiens
cataaaggaaactat

SEQ ID NO: 1431151 - DNA, 15 bp, Homo sapiens
ataaaggaaactata

SEQ ID NO: 1431152 - DNA, 15 bp, Homo sapiens
taaaggaaactataa

SEQ ID NO: 1431153 - DNA, 15 bp, Homo sapiens
aaaggaaactataaa

SEQ ID NO: 1431154 - DNA, 15 bp, Homo sapiens
aaggaaactataaat

SEQ ID NO: 1431155 - DNA, 15 bp, Homo sapiens
aggaaactataaata

SEQ ID NO: 1431156 - DNA, 15 bp, Homo sapiens
ggaaactataaataa

SEQ ID NO: 1431157 - DNA, 15 bp, Homo sapiens
gaaactataaataat

SEQ ID NO: 1431158 - DNA, 15 bp, Homo sapiens
aaactataaataatg

SEQ ID NO: 1431159 - DNA, 15 bp, Homo sapiens
aactataaataatgc

SEQ ID NO: 1431160 - DNA, 15 bp, Homo sapiens
actataaataatgca

SEQ ID NO: 1431161 - DNA, 15 bp, Homo sapiens
ctataaataatgcat

SEQ ID NO: 1431162 - DNA, 15 bp, Homo sapiens
tataaataatgcatt

SEQ ID NO: 1431163 - DNA, 15 bp, Homo sapiens
ataaataatgcattt

SEQ ID NO: 1431164 - DNA, 15 bp, Homo sapiens
taaataatgcatttg

SEQ ID NO: 1431165 - DNA, 15 bp, Homo sapiens
aaataatgcatttga

SEQ ID NO: 1431166 - DNA, 15 bp, Homo sapiens
aataatgcatttgaa

SEQ ID NO: 1431167 - DNA, 15 bp, Homo sapiens
ataatgcatttgaag

SEQ ID NO: 1431168 - DNA, 15 bp, Homo sapiens
taatgcatttgaaga

SEQ ID NO: 1431169 - DNA, 15 bp, Homo sapiens
aatgcatttgaagac

SEQ ID NO: 1431170 - DNA, 15 bp, Homo sapiens
atgcatttgaagact

SEQ ID NO: 1431171 - DNA, 15 bp, Homo sapiens
tgcatttgaagacta

SEQ ID NO: 1431172 - DNA, 15 bp, Homo sapiens
gcatttgaagactaa

SEQ ID NO: 1431173 - DNA, 15 bp, Homo sapiens
catttgaagactaac

SEQ ID NO: 1431174 - DNA, 15 bp, Homo sapiens
atttgaagactaact

SEQ ID NO: 1431175 - DNA, 15 bp, Homo sapiens
tttgaagactaactc

SEQ ID NO: 1431176 - DNA, 15 bp, Homo sapiens
ttgaagactaactca

SEQ ID NO: 1431177 - DNA, 15 bp, Homo sapiens
tgaagactaactcag

SEQ ID NO: 1431178 - DNA, 15 bp, Homo sapiens
gaagactaactcagg

SEQ ID NO: 1431179 - DNA, 15 bp, Homo sapiens
aagactaactcagga

SEQ ID NO: 1431180 - DNA, 15 bp, Homo sapiens
agactaactcaggaa

SEQ ID NO: 1431181 - DNA, 15 bp, Homo sapiens
gactaactcaggaaa

SEQ ID NO: 1431182 - DNA, 15 bp, Homo sapiens
actaactcaggaaat

SEQ ID NO: 1431183 - DNA, 15 bp, Homo sapiens
ctaactcaggaaatc

SEQ ID NO: 1431184 - DNA, 15 bp, Homo sapiens
taactcaggaaatca

SEQ ID NO: 1431185 - DNA, 15 bp, Homo sapiens
aactcaggaaatcaa

SEQ ID NO: 1431186 - DNA, 15 bp, Homo sapiens
actcaggaaatcaat

SEQ ID NO: 1431187 - DNA, 15 bp, Homo sapiens
ctcaggaaatcaatg

SEQ ID NO: 1431188 - DNA, 15 bp, Homo sapiens
tcaggaaatcaatga

SEQ ID NO: 1431189 - DNA, 15 bp, Homo sapiens
caggaaatcaatgat

SEQ ID NO: 1431190 - DNA, 15 bp, Homo sapiens
aggaaatcaatgatt

SEQ ID NO: 1431191 - DNA, 15 bp, Homo sapiens
ggaaatcaatgatta

SEQ ID NO: 1431192 - DNA, 15 bp, Homo sapiens
gaaatcaatgattat

SEQ ID NO: 1431193 - DNA, 15 bp, Homo sapiens
aaatcaatgattatt

SEQ ID NO: 1431194 - DNA, 15 bp, Homo sapiens
aatcaatgattattt

SEQ ID NO: 1431195 - DNA, 15 bp, Homo sapiens
atcaatgattatttc

SEQ ID NO: 1431196 - DNA, 15 bp, Homo sapiens
tcaatgattatttcc

SEQ ID NO: 1431197 - DNA, 15 bp, Homo sapiens
caatgattatttccc

SEQ ID NO: 1431198 - DNA, 15 bp, Homo sapiens
aatgattatttcccc

SEQ ID NO: 1431199 - DNA, 15 bp, Homo sapiens
atgattatttccccc

SEQ ID NO: 1431200 - DNA, 15 bp, Homo sapiens
tgattatttcccccc

SEQ ID NO: 1431201 - DNA, 15 bp, Homo sapiens
gattatttcccccca

SEQ ID NO: 1431202 - DNA, 15 bp, Homo sapiens
attatttccccccag

SEQ ID NO: 1431203 - DNA, 15 bp, Homo sapiens
ttatttccccccagg

SEQ ID NO: 1431204 - DNA, 15 bp, Homo sapiens
tatttccccccaggc

SEQ ID NO: 1431205 - DNA, 15 bp, Homo sapiens
atttccccccaggct

SEQ ID NO: 1431206 - DNA, 15 bp, Homo sapiens
tttccccccaggcta

SEQ ID NO: 1431207 - DNA, 15 bp, Homo sapiens
ttccccccaggctac

SEQ ID NO: 1431208 - DNA, 15 bp, Homo sapiens
tccccccaggctacc

SEQ ID NO: 1431209 - DNA, 15 bp, Homo sapiens
ccccccaggctaccc

SEQ ID NO: 1431210 - DNA, 15 bp, Homo sapiens
cccccaggctaccca

SEQ ID NO: 1431211 - DNA, 15 bp, Homo sapiens
ccccaggctacccag

SEQ ID NO: 1431212 - DNA, 15 bp, Homo sapiens
cccaggctacccagt

SEQ ID NO: 1431213 - DNA, 15 bp, Homo sapiens
ccaggctacccagtg

SEQ ID NO: 1431214 - DNA, 15 bp, Homo sapiens
caggctacccagtgt

SEQ ID NO: 1431215 - DNA, 15 bp, Homo sapiens
aggctacccagtgtc

SEQ ID NO: 1431216 - DNA, 15 bp, Homo sapiens
ggctacccagtgtct

SEQ ID NO: 1431217 - DNA, 15 bp, Homo sapiens
gctacccagtgtctt

SEQ ID NO: 1431218 - DNA, 15 bp, Homo sapiens
ctacccagtgtctta

SEQ ID NO: 1431219 - DNA, 15 bp, Homo sapiens
tacccagtgtcttaa

SEQ ID NO: 1431220 - DNA, 15 bp, Homo sapiens
acccagtgtcttaaa

SEQ ID NO: 1431221 - DNA, 15 bp, Homo sapiens
cccagtgtcttaaaa

SEQ ID NO: 1431222 - DNA, 15 bp, Homo sapiens
ccagtgtcttaaaaa

SEQ ID NO: 1431223 - DNA, 15 bp, Homo sapiens
cagtgtcttaaaaaa

SEQ ID NO: 1431224 - DNA, 15 bp, Homo sapiens
agtgtcttaaaaaaa

SEQ ID NO: 1431225 - DNA, 15 bp, Homo sapiens
gtgtcttaaaaaaac

SEQ ID NO: 1431226 - DNA, 15 bp, Homo sapiens
tgtcttaaaaaaaca

SEQ ID NO: 1431227 - DNA, 15 bp, Homo sapiens
gtcttaaaaaaacag

SEQ ID NO: 1431228 - DNA, 15 bp, Homo sapiens
tcttaaaaaaacagt

SEQ ID NO: 1431229 - DNA, 15 bp, Homo sapiens
cttaaaaaaacagtt

SEQ ID NO: 1431230 - DNA, 15 bp, Homo sapiens
ttaaaaaaacagttt

SEQ ID NO: 1431231 - DNA, 15 bp, Homo sapiens
taaaaaaacagttta

SEQ ID NO: 1431232 - DNA, 15 bp, Homo sapiens
aaaaaaacagtttaa

SEQ ID NO: 1431233 - DNA, 15 bp, Homo sapiens
aaaaaacagtttaat

SEQ ID NO: 1431234 - DNA, 15 bp, Homo sapiens
aaaaacagtttaatt

SEQ ID NO: 1431235 - DNA, 15 bp, Homo sapiens
aaaacagtttaatta

SEQ ID NO: 1431236 - DNA, 15 bp, Homo sapiens
aaacagtttaattaa

SEQ ID NO: 1431237 - DNA, 15 bp, Homo sapiens
aacagtttaattaat

SEQ ID NO: 1431238 - DNA, 15 bp, Homo sapiens
acagtttaattaata

SEQ ID NO: 1431239 - DNA, 15 bp, Homo sapiens
cagtttaattaatac

SEQ ID NO: 1431240 - DNA, 15 bp, Homo sapiens
agtttaattaataca

SEQ ID NO: 1431241 - DNA, 15 bp, Homo sapiens
gtttaattaatacaa

SEQ ID NO: 1431242 - DNA, 15 bp, Homo sapiens
tttaattaatacaat

SEQ ID NO: 1431243 - DNA, 15 bp, Homo sapiens
ttaattaatacaatc

SEQ ID NO: 1431244 - DNA, 15 bp, Homo sapiens
taattaatacaatct

SEQ ID NO: 1431245 - DNA, 15 bp, Homo sapiens
aattaatacaatctt

SEQ ID NO: 1431246 - DNA, 15 bp, Homo sapiens
attaatacaatcttt

SEQ ID NO: 1431247 - DNA, 15 bp, Homo sapiens
ttaatacaatctttt

SEQ ID NO: 1431248 - DNA, 15 bp, Homo sapiens
taatacaatcttttg

SEQ ID NO: 1431249 - DNA, 15 bp, Homo sapiens
aatacaatcttttgt

SEQ ID NO: 1431250 - DNA, 15 bp, Homo sapiens
atacaatcttttgtt

SEQ ID NO: 1431251 - DNA, 15 bp, Homo sapiens
tacaatcttttgttt

SEQ ID NO: 1431252 - DNA, 15 bp, Homo sapiens
acaatcttttgtttc

SEQ ID NO: 1431253 - DNA, 15 bp, Homo sapiens
caatcttttgtttca

SEQ ID NO: 1431254 - DNA, 15 bp, Homo sapiens
aatcttttgtttcaa

SEQ ID NO: 1431255 - DNA, 15 bp, Homo sapiens
atcttttgtttcaat

SEQ ID NO: 1431256 - DNA, 15 bp, Homo sapiens
tcttttgtttcaatt

SEQ ID NO: 1431257 - DNA, 15 bp, Homo sapiens
cttttgtttcaattt

SEQ ID NO: 1431258 - DNA, 15 bp, Homo sapiens
ttttgtttcaatttt

SEQ ID NO: 1431259 - DNA, 15 bp, Homo sapiens
tttgtttcaattttc

SEQ ID NO: 1431260 - DNA, 15 bp, Homo sapiens
ttgtttcaattttct

SEQ ID NO: 1431261 - DNA, 15 bp, Homo sapiens
tgtttcaattttcta

SEQ ID NO: 1431262 - DNA, 15 bp, Homo sapiens
gtttcaattttctac

SEQ ID NO: 1431263 - DNA, 15 bp, Homo sapiens
tttcaattttctacc

SEQ ID NO: 1431264 - DNA, 15 bp, Homo sapiens
ttcaattttctacct

SEQ ID NO: 1431265 - DNA, 15 bp, Homo sapiens
tcaattttctaccta

SEQ ID NO: 1431266 - DNA, 15 bp, Homo sapiens
caattttctacctat

SEQ ID NO: 1431267 - DNA, 15 bp, Homo sapiens
aattttctacctata

SEQ ID NO: 1431268 - DNA, 15 bp, Homo sapiens
attttctacctatat

SEQ ID NO: 1431269 - DNA, 15 bp, Homo sapiens
ttttctacctatatt

SEQ ID NO: 1431270 - DNA, 15 bp, Homo sapiens
tttctacctatattt

SEQ ID NO: 1431271 - DNA, 15 bp, Homo sapiens
ttctacctatattta

SEQ ID NO: 1431272 - DNA, 15 bp, Homo sapiens
tctacctatatttat

SEQ ID NO: 1431273 - DNA, 15 bp, Homo sapiens
ctacctatatttatg

SEQ ID NO: 1431274 - DNA, 15 bp, Homo sapiens
tacctatatttatgg

SEQ ID NO: 1431275 - DNA, 15 bp, Homo sapiens
acctatatttatggc

SEQ ID NO: 1431276 - DNA, 15 bp, Homo sapiens
cctatatttatggct

SEQ ID NO: 1431277 - DNA, 15 bp, Homo sapiens
ctatatttatggctt

SEQ ID NO: 1431278 - DNA, 15 bp, Homo sapiens
tatatttatggcttt

SEQ ID NO: 1431279 - DNA, 15 bp, Homo sapiens
atatttatggctttt

SEQ ID NO: 1431280 - DNA, 15 bp, Homo sapiens
tatttatggctttta

SEQ ID NO: 1431281 - DNA, 15 bp, Homo sapiens
atttatggcttttag

SEQ ID NO: 1431282 - DNA, 15 bp, Homo sapiens
tttatggcttttagc

SEQ ID NO: 1431283 - DNA, 15 bp, Homo sapiens
ttatggcttttagct

SEQ ID NO: 1431284 - DNA, 15 bp, Homo sapiens
tatggcttttagctt

SEQ ID NO: 1431285 - DNA, 15 bp, Homo sapiens
atggcttttagcttt

SEQ ID NO: 1431286 - DNA, 15 bp, Homo sapiens
tggcttttagctttt

SEQ ID NO: 1431287 - DNA, 15 bp, Homo sapiens
ggcttttagcttttc

SEQ ID NO: 1431288 - DNA, 15 bp, Homo sapiens
gcttttagcttttct

SEQ ID NO: 1431289 - DNA, 15 bp, Homo sapiens
cttttagcttttcta

SEQ ID NO: 1431290 - DNA, 15 bp, Homo sapiens
ttttagcttttctaa

SEQ ID NO: 1431291 - DNA, 15 bp, Homo sapiens
tttagcttttctaat

SEQ ID NO: 1431292 - DNA, 15 bp, Homo sapiens
ttagcttttctaata

SEQ ID NO: 1431293 - DNA, 15 bp, Homo sapiens
tagcttttctaataa

SEQ ID NO: 1431294 - DNA, 15 bp, Homo sapiens
agcttttctaataaa

SEQ ID NO: 1431295 - DNA, 15 bp, Homo sapiens
gcttttctaataaaa

SEQ ID NO: 1431296 - DNA, 15 bp, Homo sapiens
cttttctaataaaag

SEQ ID NO: 1431297 - DNA, 15 bp, Homo sapiens
ttttctaataaaagc

SEQ ID NO: 1431298 - DNA, 15 bp, Homo sapiens
tttctaataaaagct

SEQ ID NO: 1431299 - DNA, 15 bp, Homo sapiens
ttctaataaaagctc

SEQ ID NO: 1431300 - DNA, 15 bp, Homo sapiens
tctaataaaagctca

SEQ ID NO: 1431301 - DNA, 15 bp, Homo sapiens
ctaataaaagctcaa

SEQ ID NO: 1431302 - DNA, 15 bp, Homo sapiens
taataaaagctcaaa

SEQ ID NO: 1431303 - DNA, 15 bp, Homo sapiens
aataaaagctcaaaa

SEQ ID NO: 1431304 - DNA, 15 bp, Homo sapiens
taaaagctcaaaatg

SEQ ID NO: 1431305 - DNA, 15 bp, Homo sapiens
aaaagctcaaaatga

SEQ ID NO: 1431306 - DNA, 15 bp, Homo sapiens
aaagctcaaaatgaa

SEQ ID NO: 1431307 - DNA, 15 bp, Homo sapiens
aagctcaaaatgaat

SEQ ID NO: 1431308 - DNA, 15 bp, Homo sapiens
agctcaaaatgaatt

SEQ ID NO: 1431309 - DNA, 15 bp, Homo sapiens
gctcaaaatgaatta

SEQ ID NO: 1431310 - DNA, 15 bp, Homo sapiens
ctcaaaatgaattac

SEQ ID NO: 1431311 - DNA, 15 bp, Homo sapiens
tcaaaatgaattaca

SEQ ID NO: 1431312 - DNA, 15 bp, Homo sapiens
caaaatgaattacag

SEQ ID NO: 1431313 - DNA, 15 bp, Homo sapiens
aaaatgaattacagt

SEQ ID NO: 1431314 - DNA, 15 bp, Homo sapiens
aaatgaattacagtc

SEQ ID NO: 1431315 - DNA, 15 bp, Homo sapiens
aatgaattacagtca

SEQ ID NO: 1431316 - DNA, 15 bp, Homo sapiens
atgaattacagtcat

SEQ ID NO: 1431317 - DNA, 15 bp, Homo sapiens
tgaattacagtcatc

SEQ ID NO: 1431318 - DNA, 15 bp, Homo sapiens
gaattacagtcatca

SEQ ID NO: 1431319 - DNA, 15 bp, Homo sapiens
aattacagtcatcag

SEQ ID NO: 1431320 - DNA, 15 bp, Homo sapiens
attacagtcatcagt

SEQ ID NO: 1431321 - DNA, 15 bp, Homo sapiens
ttacagtcatcagtg

SEQ ID NO: 1431322 - DNA, 15 bp, Homo sapiens
tacagtcatcagtga

SEQ ID NO: 1431323 - DNA, 15 bp, Homo sapiens
acagtcatcagtgac

SEQ ID NO: 1431324 - DNA, 15 bp, Homo sapiens
cagtcatcagtgact

SEQ ID NO: 1431325 - DNA, 15 bp, Homo sapiens
agtcatcagtgactt

SEQ ID NO: 1431326 - DNA, 15 bp, Homo sapiens
gtcatcagtgacttt

SEQ ID NO: 1431327 - DNA, 15 bp, Homo sapiens
tcatcagtgactttt

SEQ ID NO: 1431328 - DNA, 15 bp, Homo sapiens
catcagtgacttttt

SEQ ID NO: 1431329 - DNA, 15 bp, Homo sapiens
atcagtgacttttta

SEQ ID NO: 1431330 - DNA, 15 bp, Homo sapiens
tcagtgactttttaa

SEQ ID NO: 1431331 - DNA, 15 bp, Homo sapiens
cagtgactttttaat

SEQ ID NO: 1431332 - DNA, 15 bp, Homo sapiens
agtgactttttaatg

SEQ ID NO: 1431333 - DNA, 15 bp, Homo sapiens
gtgactttttaatga

SEQ ID NO: 1431334 - DNA, 15 bp, Homo sapiens
tgactttttaatgaa

SEQ ID NO: 1431335 - DNA, 15 bp, Homo sapiens
gactttttaatgaat

SEQ ID NO: 1431336 - DNA, 15 bp, Homo sapiens
actttttaatgaata

SEQ ID NO: 1431337 - DNA, 15 bp, Homo sapiens
ctttttaatgaatag

SEQ ID NO: 1431338 - DNA, 15 bp, Homo sapiens
tttttaatgaataga

SEQ ID NO: 1431339 - DNA, 15 bp, Homo sapiens
ttttaatgaatagaa

SEQ ID NO: 1431340 - DNA, 15 bp, Homo sapiens
tttaatgaatagaag

SEQ ID NO: 1431341 - DNA, 15 bp, Homo sapiens
ttaatgaatagaaga

SEQ ID NO: 1431342 - DNA, 15 bp, Homo sapiens
taatgaatagaagac

SEQ ID NO: 1431343 - DNA, 15 bp, Homo sapiens
aatgaatagaagact

SEQ ID NO: 1431344 - DNA, 15 bp, Homo sapiens
atgaatagaagactt

SEQ ID NO: 1431345 - DNA, 15 bp, Homo sapiens
tgaatagaagacttt

SEQ ID NO: 1431346 - DNA, 15 bp, Homo sapiens
gaatagaagactttt

SEQ ID NO: 1431347 - DNA, 15 bp, Homo sapiens
aatagaagacttttg

SEQ ID NO: 1431348 - DNA, 15 bp, Homo sapiens
atagaagacttttgc

SEQ ID NO: 1431349 - DNA, 15 bp, Homo sapiens
tagaagacttttgca

SEQ ID NO: 1431350 - DNA, 15 bp, Homo sapiens
agaagacttttgcaa

SEQ ID NO: 1431351 - DNA, 15 bp, Homo sapiens
gaagacttttgcaat

SEQ ID NO: 1431352 - DNA, 15 bp, Homo sapiens
aagacttttgcaatt

SEQ ID NO: 1431353 - DNA, 15 bp, Homo sapiens
agacttttgcaattt

SEQ ID NO: 1431354 - DNA, 15 bp, Homo sapiens
gacttttgcaatttt

SEQ ID NO: 1431355 - DNA, 15 bp, Homo sapiens
acttttgcaattttt

SEQ ID NO: 1431356 - DNA, 15 bp, Homo sapiens
cttttgcaattttta

SEQ ID NO: 1431357 - DNA, 15 bp, Homo sapiens
ttttgcaatttttaa

SEQ ID NO: 1431358 - DNA, 15 bp, Homo sapiens
tttgcaatttttaac

SEQ ID NO: 1431359 - DNA, 15 bp, Homo sapiens
ttgcaatttttaact

SEQ ID NO: 1431360 - DNA, 15 bp, Homo sapiens
tgcaatttttaacta

SEQ ID NO: 1431361 - DNA, 15 bp, Homo sapiens
gcaatttttaactat

SEQ ID NO: 1431362 - DNA, 15 bp, Homo sapiens
caatttttaactatt

SEQ ID NO: 1431363 - DNA, 15 bp, Homo sapiens
aatttttaactattt

SEQ ID NO: 1431364 - DNA, 15 bp, Homo sapiens
atttttaactatttg

SEQ ID NO: 1431365 - DNA, 15 bp, Homo sapiens
tttttaactatttgt

SEQ ID NO: 1431366 - DNA, 15 bp, Homo sapiens
ttttaactatttgtt

SEQ ID NO: 1431367 - DNA, 15 bp, Homo sapiens
tttaactatttgttt

SEQ ID NO: 1431368 - DNA, 15 bp, Homo sapiens
ttaactatttgtttt

SEQ ID NO: 1431369 - DNA, 15 bp, Homo sapiens
taactatttgttttt

SEQ ID NO: 1431370 - DNA, 15 bp, Homo sapiens
aactatttgttttta

SEQ ID NO: 1431371 - DNA, 15 bp, Homo sapiens
actatttgtttttac

SEQ ID NO: 1431372 - DNA, 15 bp, Homo sapiens
ctatttgtttttact

SEQ ID NO: 1431373 - DNA, 15 bp, Homo sapiens
tatttgtttttactt

SEQ ID NO: 1431374 - DNA, 15 bp, Homo sapiens
atttgtttttactta

SEQ ID NO: 1431375 - DNA, 15 bp, Homo sapiens
tttgtttttacttat

SEQ ID NO: 1431376 - DNA, 15 bp, Homo sapiens
ttgtttttacttatt

SEQ ID NO: 1431377 - DNA, 15 bp, Homo sapiens
tgtttttacttatta

SEQ ID NO: 1431378 - DNA, 15 bp, Homo sapiens
gtttttacttattaa

SEQ ID NO: 1431379 - DNA, 15 bp, Homo sapiens
tttttacttattaaa

SEQ ID NO: 1431380 - DNA, 15 bp, Homo sapiens
ttttacttattaaat

SEQ ID NO: 1431381 - DNA, 15 bp, Homo sapiens
tttacttattaaata

SEQ ID NO: 1431382 - DNA, 15 bp, Homo sapiens
ttacttattaaatat

SEQ ID NO: 1431383 - DNA, 15 bp, Homo sapiens
tacttattaaatatt

SEQ ID NO: 1431384 - DNA, 15 bp, Homo sapiens
acttattaaatattt

SEQ ID NO: 1431385 - DNA, 15 bp, Homo sapiens
cttattaaatatttc

SEQ ID NO: 1431386 - DNA, 15 bp, Homo sapiens
ttattaaatatttcc

SEQ ID NO: 1431387 - DNA, 15 bp, Homo sapiens
tattaaatatttccg

SEQ ID NO: 1431388 - DNA, 15 bp, Homo sapiens
attaaatatttccgc

SEQ ID NO: 1431389 - DNA, 15 bp, Homo sapiens
ttaaatatttccgcc

SEQ ID NO: 1431390 - DNA, 15 bp, Homo sapiens
taaatatttccgcct

SEQ ID NO: 1431391 - DNA, 15 bp, Homo sapiens
aaatatttccgcctt

SEQ ID NO: 1431392 - DNA, 15 bp, Homo sapiens
aatatttccgccttg

SEQ ID NO: 1431393 - DNA, 15 bp, Homo sapiens
atatttccgccttgg

SEQ ID NO: 1431394 - DNA, 15 bp, Homo sapiens
tatttccgccttggc

SEQ ID NO: 1431395 - DNA, 15 bp, Homo sapiens
atttccgccttggcc

SEQ ID NO: 1431396 - DNA, 15 bp, Homo sapiens
tttccgccttggcca

SEQ ID NO: 1431397 - DNA, 15 bp, Homo sapiens
ttccgccttggccag

SEQ ID NO: 1431398 - DNA, 15 bp, Homo sapiens
tccgccttggccagg

SEQ ID NO: 1431399 - DNA, 15 bp, Homo sapiens
ccgccttggccaggc

SEQ ID NO: 1431400 - DNA, 15 bp, Homo sapiens
cgccttggccaggca

SEQ ID NO: 1431401 - DNA, 15 bp, Homo sapiens
gccttggccaggcat

SEQ ID NO: 1431402 - DNA, 15 bp, Homo sapiens
ccttggccaggcatg

SEQ ID NO: 1431403 - DNA, 15 bp, Homo sapiens
cttggccaggcatgg

SEQ ID NO: 1431404 - DNA, 15 bp, Homo sapiens
ttggccaggcatggt

SEQ ID NO: 1431405 - DNA, 15 bp, Homo sapiens
tggccaggcatggtg

SEQ ID NO: 1431406 - DNA, 15 bp, Homo sapiens
ataatcccagcactg

SEQ ID NO: 1431407 - DNA, 15 bp, Homo sapiens
atcccagcactgtga

SEQ ID NO: 1431408 - DNA, 15 bp, Homo sapiens
tcccagcactgtgag

SEQ ID NO: 1431409 - DNA, 15 bp, Homo sapiens
cccagcactgtgaga

SEQ ID NO: 1431410 - DNA, 15 bp, Homo sapiens
ccagcactgtgagat

SEQ ID NO: 1431411 - DNA, 15 bp, Homo sapiens
cagcactgtgagatg

SEQ ID NO: 1431412 - DNA, 15 bp, Homo sapiens
agcactgtgagatgc

SEQ ID NO: 1431413 - DNA, 15 bp, Homo sapiens
gcactgtgagatgcc

SEQ ID NO: 1431414 - DNA, 15 bp, Homo sapiens
cactgtgagatgcca

SEQ ID NO: 1431415 - DNA, 15 bp, Homo sapiens
actgtgagatgccaa

SEQ ID NO: 1431416 - DNA, 15 bp, Homo sapiens
ctgtgagatgccaag

SEQ ID NO: 1431417 - DNA, 15 bp, Homo sapiens
tgtgagatgccaagg

SEQ ID NO: 1431418 - DNA, 15 bp, Homo sapiens
gtgagatgccaaggc

SEQ ID NO: 1431419 - DNA, 15 bp, Homo sapiens
tgagatgccaaggca

SEQ ID NO: 1431420 - DNA, 15 bp, Homo sapiens
gagatgccaaggcag

SEQ ID NO: 1431421 - DNA, 15 bp, Homo sapiens
agatgccaaggcagg

SEQ ID NO: 1431422 - DNA, 15 bp, Homo sapiens
aggatcacttgagtt

SEQ ID NO: 1431423 - DNA, 15 bp, Homo sapiens
ggatcacttgagttt

SEQ ID NO: 1431424 - DNA, 15 bp, Homo sapiens
gatcacttgagttta

SEQ ID NO: 1431425 - DNA, 15 bp, Homo sapiens
atcacttgagtttaa

SEQ ID NO: 1431426 - DNA, 15 bp, Homo sapiens
tcacttgagtttaag

SEQ ID NO: 1431427 - DNA, 15 bp, Homo sapiens
cacttgagtttaaga

SEQ ID NO: 1431428 - DNA, 15 bp, Homo sapiens
acttgagtttaagag

SEQ ID NO: 1431429 - DNA, 15 bp, Homo sapiens
cttgagtttaagagt

SEQ ID NO: 1431430 - DNA, 15 bp, Homo sapiens
ttgagtttaagagtt

SEQ ID NO: 1431431 - DNA, 15 bp, Homo sapiens
tgagtttaagagttc

SEQ ID NO: 1431432 - DNA, 15 bp, Homo sapiens
gagtttaagagttct

SEQ ID NO: 1431433 - DNA, 15 bp, Homo sapiens
agtttaagagttcta

SEQ ID NO: 1431434 - DNA, 15 bp, Homo sapiens
gtttaagagttctag

SEQ ID NO: 1431435 - DNA, 15 bp, Homo sapiens
tttaagagttctaga

SEQ ID NO: 1431436 - DNA, 15 bp, Homo sapiens
ttaagagttctagac

SEQ ID NO: 1431437 - DNA, 15 bp, Homo sapiens
taagagttctagacc

SEQ ID NO: 1431438 - DNA, 15 bp, Homo sapiens
aagagttctagacca

SEQ ID NO: 1431439 - DNA, 15 bp, Homo sapiens
agagttctagaccag

SEQ ID NO: 1431440 - DNA, 15 bp, Homo sapiens
gagttctagaccagg

SEQ ID NO: 1431441 - DNA, 15 bp, Homo sapiens
agttctagaccaggc

SEQ ID NO: 1431442 - DNA, 15 bp, Homo sapiens
gttctagaccaggct

SEQ ID NO: 1431443 - DNA, 15 bp, Homo sapiens
ttctagaccaggctg

SEQ ID NO: 1431444 - DNA, 15 bp, Homo sapiens
tctagaccaggctgg

SEQ ID NO: 1431445 - DNA, 15 bp, Homo sapiens
ctagaccaggctggg

SEQ ID NO: 1431446 - DNA, 15 bp, Homo sapiens
tagaccaggctgggt

SEQ ID NO: 1431447 - DNA, 15 bp, Homo sapiens
agaccaggctgggta

SEQ ID NO: 1431448 - DNA, 15 bp, Homo sapiens
gaccaggctgggtat

SEQ ID NO: 1431449 - DNA, 15 bp, Homo sapiens
accaggctgggtatg

SEQ ID NO: 1431450 - DNA, 15 bp, Homo sapiens
ccaggctgggtatgg

SEQ ID NO: 1431451 - DNA, 15 bp, Homo sapiens
caggctgggtatggt

SEQ ID NO: 1431452 - DNA, 15 bp, Homo sapiens
aggctgggtatggtg

SEQ ID NO: 1431453 - DNA, 15 bp, Homo sapiens
ggctgggtatggtgg

SEQ ID NO: 1431454 - DNA, 15 bp, Homo sapiens
ctgggtatggtggct

SEQ ID NO: 1431455 - DNA, 15 bp, Homo sapiens
tgggtatggtggctc

SEQ ID NO: 1431456 - DNA, 15 bp, Homo sapiens
gggtatggtggctca

SEQ ID NO: 1431457 - DNA, 15 bp, Homo sapiens
ggtatggtggctcat

SEQ ID NO: 1431458 - DNA, 15 bp, Homo sapiens
atcccagcactttgt

SEQ ID NO: 1431459 - DNA, 15 bp, Homo sapiens
tcccagcactttgtg

SEQ ID NO: 1431460 - DNA, 15 bp, Homo sapiens
cccagcactttgtga

SEQ ID NO: 1431461 - DNA, 15 bp, Homo sapiens
ccagcactttgtgag

SEQ ID NO: 1431462 - DNA, 15 bp, Homo sapiens
cagcactttgtgagg

SEQ ID NO: 1431463 - DNA, 15 bp, Homo sapiens
agcactttgtgaggc

SEQ ID NO: 1431464 - DNA, 15 bp, Homo sapiens
gcactttgtgaggcc

SEQ ID NO: 1431465 - DNA, 15 bp, Homo sapiens
cactttgtgaggcca

SEQ ID NO: 1431466 - DNA, 15 bp, Homo sapiens
actttgtgaggccaa

SEQ ID NO: 1431467 - DNA, 15 bp, Homo sapiens
ctttgtgaggccaag

SEQ ID NO: 1431468 - DNA, 15 bp, Homo sapiens
tttgtgaggccaagg

SEQ ID NO: 1431469 - DNA, 15 bp, Homo sapiens
ttgtgaggccaaggt

SEQ ID NO: 1431470 - DNA, 15 bp, Homo sapiens
tgtgaggccaaggtt

SEQ ID NO: 1431471 - DNA, 15 bp, Homo sapiens
gtgaggccaaggttg

SEQ ID NO: 1431472 - DNA, 15 bp, Homo sapiens
tgaggccaaggttgg

SEQ ID NO: 1431473 - DNA, 15 bp, Homo sapiens
gaggccaaggttggc

SEQ ID NO: 1431474 - DNA, 15 bp, Homo sapiens
aggccaaggttggcg

SEQ ID NO: 1431475 - DNA, 15 bp, Homo sapiens
ggccaaggttggcgg

SEQ ID NO: 1431476 - DNA, 15 bp, Homo sapiens
gccaaggttggcgga

SEQ ID NO: 1431477 - DNA, 15 bp, Homo sapiens
ccaaggttggcggat

SEQ ID NO: 1431478 - DNA, 15 bp, Homo sapiens
caaggttggcggatc

SEQ ID NO: 1431479 - DNA, 15 bp, Homo sapiens
aaggttggcggatca

SEQ ID NO: 1431480 - DNA, 15 bp, Homo sapiens
aggttggcggatcac

SEQ ID NO: 1431481 - DNA, 15 bp, Homo sapiens
ggttggcggatcacc

SEQ ID NO: 1431482 - DNA, 15 bp, Homo sapiens
gttggcggatcacct

SEQ ID NO: 1431483 - DNA, 15 bp, Homo sapiens
ttggcggatcacctg

SEQ ID NO: 1431484 - DNA, 15 bp, Homo sapiens
acaaaaattagccaa

SEQ ID NO: 1431485 - DNA, 15 bp, Homo sapiens
caaaaattagccaag

SEQ ID NO: 1431486 - DNA, 15 bp, Homo sapiens
aaaaattagccaagg

SEQ ID NO: 1431487 - DNA, 15 bp, Homo sapiens
aaaattagccaaggg

SEQ ID NO: 1431488 - DNA, 15 bp, Homo sapiens
aaattagccaagggg

SEQ ID NO: 1431489 - DNA, 15 bp, Homo sapiens
aattagccaaggggt

SEQ ID NO: 1431490 - DNA, 15 bp, Homo sapiens
attagccaaggggtg

SEQ ID NO: 1431491 - DNA, 15 bp, Homo sapiens
ttagccaaggggtgg

SEQ ID NO: 1431492 - DNA, 15 bp, Homo sapiens
tagccaaggggtggt

SEQ ID NO: 1431493 - DNA, 15 bp, Homo sapiens
agccaaggggtggtg

SEQ ID NO: 1431494 - DNA, 15 bp, Homo sapiens
gccaaggggtggtgg

SEQ ID NO: 1431495 - DNA, 15 bp, Homo sapiens
ccaaggggtggtggt

SEQ ID NO: 1431496 - DNA, 15 bp, Homo sapiens
caaggggtggtggtg

SEQ ID NO: 1431497 - DNA, 15 bp, Homo sapiens
aaggggtggtggtgg

SEQ ID NO: 1431498 - DNA, 15 bp, Homo sapiens
aggggtggtggtggg

SEQ ID NO: 1431499 - DNA, 15 bp, Homo sapiens
ggggtggtggtgggc

SEQ ID NO: 1431500 - DNA, 15 bp, Homo sapiens
gggtggtggtgggca

SEQ ID NO: 1431501 - DNA, 15 bp, Homo sapiens
ggtggtggtgggcac

SEQ ID NO: 1431502 - DNA, 15 bp, Homo sapiens
gtggtggtgggcacc

SEQ ID NO: 1431503 - DNA, 15 bp, Homo sapiens
ggtggtgggcaccta

SEQ ID NO: 1431504 - DNA, 15 bp, Homo sapiens
gtggtgggcacctat

SEQ ID NO: 1431505 - DNA, 15 bp, Homo sapiens
tggtgggcacctata

SEQ ID NO: 1431506 - DNA, 15 bp, Homo sapiens
ggtgggcacctataa

SEQ ID NO: 1431507 - DNA, 15 bp, Homo sapiens
gtgggcacctataat

SEQ ID NO: 1431508 - DNA, 15 bp, Homo sapiens
tgggcacctataatc

SEQ ID NO: 1431509 - DNA, 15 bp, Homo sapiens
gggcacctataatcc

SEQ ID NO: 1431510 - DNA, 15 bp, Homo sapiens
ggcacctataatccc

SEQ ID NO: 1431511 - DNA, 15 bp, Homo sapiens
gcacctataatccca

SEQ ID NO: 1431512 - DNA, 15 bp, Homo sapiens
cacctataatcccat

SEQ ID NO: 1431513 - DNA, 15 bp, Homo sapiens
acctataatcccatc

SEQ ID NO: 1431514 - DNA, 15 bp, Homo sapiens
cctataatcccatct

SEQ ID NO: 1431515 - DNA, 15 bp, Homo sapiens
ctataatcccatctt

SEQ ID NO: 1431516 - DNA, 15 bp, Homo sapiens
tataatcccatcttc

SEQ ID NO: 1431517 - DNA, 15 bp, Homo sapiens
ataatcccatcttct

SEQ ID NO: 1431518 - DNA, 15 bp, Homo sapiens
taatcccatcttctt

SEQ ID NO: 1431519 - DNA, 15 bp, Homo sapiens
aatcccatcttcttg

SEQ ID NO: 1431520 - DNA, 15 bp, Homo sapiens
atcccatcttcttgg

SEQ ID NO: 1431521 - DNA, 15 bp, Homo sapiens
tcccatcttcttggg

SEQ ID NO: 1431522 - DNA, 15 bp, Homo sapiens
cccatcttcttggga

SEQ ID NO: 1431523 - DNA, 15 bp, Homo sapiens
ccatcttcttgggag

SEQ ID NO: 1431524 - DNA, 15 bp, Homo sapiens
catcttcttgggagg

SEQ ID NO: 1431525 - DNA, 15 bp, Homo sapiens
atcttcttgggaggc

SEQ ID NO: 1431526 - DNA, 15 bp, Homo sapiens
tcttcttgggaggct

SEQ ID NO: 1431527 - DNA, 15 bp, Homo sapiens
cttcttgggaggcta

SEQ ID NO: 1431528 - DNA, 15 bp, Homo sapiens
ttcttgggaggctaa

SEQ ID NO: 1431529 - DNA, 15 bp, Homo sapiens
tcttgggaggctaag

SEQ ID NO: 1431530 - DNA, 15 bp, Homo sapiens
tcgcttgaacctgga

SEQ ID NO: 1431531 - DNA, 15 bp, Homo sapiens
cgcttgaacctggag

SEQ ID NO: 1431532 - DNA, 15 bp, Homo sapiens
gcttgaacctggagg

SEQ ID NO: 1431533 - DNA, 15 bp, Homo sapiens
cttgaacctggaggc

SEQ ID NO: 1431534 - DNA, 15 bp, Homo sapiens
ttgaacctggaggca

SEQ ID NO: 1431535 - DNA, 15 bp, Homo sapiens
tgaacctggaggcag

SEQ ID NO: 1431536 - DNA, 15 bp, Homo sapiens
gaacctggaggcaga

SEQ ID NO: 1431537 - DNA, 15 bp, Homo sapiens
aacctggaggcagag

SEQ ID NO: 1431538 - DNA, 15 bp, Homo sapiens
acctggaggcagagg

SEQ ID NO: 1431539 - DNA, 15 bp, Homo sapiens
agatcatgccactgt

SEQ ID NO: 1431540 - DNA, 15 bp, Homo sapiens
gatcatgccactgta

SEQ ID NO: 1431541 - DNA, 15 bp, Homo sapiens
atcatgccactgtat

SEQ ID NO: 1431542 - DNA, 15 bp, Homo sapiens
tcatgccactgtatt

SEQ ID NO: 1431543 - DNA, 15 bp, Homo sapiens
catgccactgtattc

SEQ ID NO: 1431544 - DNA, 15 bp, Homo sapiens
atgccactgtattcc

SEQ ID NO: 1431545 - DNA, 15 bp, Homo sapiens
tgccactgtattcca

SEQ ID NO: 1431546 - DNA, 15 bp, Homo sapiens
gccactgtattccag

SEQ ID NO: 1431547 - DNA, 15 bp, Homo sapiens
ccactgtattccagc

SEQ ID NO: 1431548 - DNA, 15 bp, Homo sapiens
cactgtattccagcc

SEQ ID NO: 1431549 - DNA, 15 bp, Homo sapiens
actgtattccagcct

SEQ ID NO: 1431550 - DNA, 15 bp, Homo sapiens
ctgtattccagcctg

SEQ ID NO: 1431551 - DNA, 15 bp, Homo sapiens
tgtattccagcctgg

SEQ ID NO: 1431552 - DNA, 15 bp, Homo sapiens
gtattccagcctggg

SEQ ID NO: 1431553 - DNA, 15 bp, Homo sapiens
tattccagcctgggt

SEQ ID NO: 1431554 - DNA, 15 bp, Homo sapiens
cctgggtaacagagc

SEQ ID NO: 1431555 - DNA, 15 bp, Homo sapiens
ctgggtaacagagca

SEQ ID NO: 1431556 - DNA, 15 bp, Homo sapiens
tgggtaacagagcaa

SEQ ID NO: 1431557 - DNA, 15 bp, Homo sapiens
gggtaacagagcaag

SEQ ID NO: 1431558 - DNA, 15 bp, Homo sapiens
ggtaacagagcaaga

SEQ ID NO: 1431559 - DNA, 15 bp, Homo sapiens
gtaacagagcaagac

SEQ ID NO: 1431560 - DNA, 15 bp, Homo sapiens
taacagagcaagact

SEQ ID NO: 1431561 - DNA, 15 bp, Homo sapiens
aaaaaaaagtttgaa

SEQ ID NO: 1431562 - DNA, 15 bp, Homo sapiens
aaaaaaagtttgaaa

SEQ ID NO: 1431563 - DNA, 15 bp, Homo sapiens
aaaaaagtttgaaac

SEQ ID NO: 1431564 - DNA, 15 bp, Homo sapiens
aaaaagtttgaaacc

SEQ ID NO: 1431565 - DNA, 15 bp, Homo sapiens
aaaagtttgaaacca

SEQ ID NO: 1431566 - DNA, 15 bp, Homo sapiens
aaagtttgaaaccag

SEQ ID NO: 1431567 - DNA, 15 bp, Homo sapiens
aagtttgaaaccagc

SEQ ID NO: 1431568 - DNA, 15 bp, Homo sapiens
agtttgaaaccagcc

SEQ ID NO: 1431569 - DNA, 15 bp, Homo sapiens
gtttgaaaccagcct

SEQ ID NO: 1431570 - DNA, 15 bp, Homo sapiens
tttgaaaccagcctg

SEQ ID NO: 1431571 - DNA, 15 bp, Homo sapiens
ttgaaaccagcctgg

SEQ ID NO: 1431572 - DNA, 15 bp, Homo sapiens
tgaaaccagcctggt

SEQ ID NO: 1431573 - DNA, 15 bp, Homo sapiens
gaaaccagcctggtc

SEQ ID NO: 1431574 - DNA, 15 bp, Homo sapiens
aaaccagcctggtca

SEQ ID NO: 1431575 - DNA, 15 bp, Homo sapiens
aaccagcctggtcaa

SEQ ID NO: 1431576 - DNA, 15 bp, Homo sapiens
cagcctggtcaacac

SEQ ID NO: 1431577 - DNA, 15 bp, Homo sapiens
agcctggtcaacaca

SEQ ID NO: 1431578 - DNA, 15 bp, Homo sapiens
gcctggtcaacacag

SEQ ID NO: 1431579 - DNA, 15 bp, Homo sapiens
cctggtcaacacagc

SEQ ID NO: 1431580 - DNA, 15 bp, Homo sapiens
ctggtcaacacagca

SEQ ID NO: 1431581 - DNA, 15 bp, Homo sapiens
tggtcaacacagcaa

SEQ ID NO: 1431582 - DNA, 15 bp, Homo sapiens
ggtcaacacagcaag

SEQ ID NO: 1431583 - DNA, 15 bp, Homo sapiens
gtcaacacagcaaga

SEQ ID NO: 1431584 - DNA, 15 bp, Homo sapiens
tcaacacagcaagac

SEQ ID NO: 1431585 - DNA, 15 bp, Homo sapiens
caacacagcaagaca

SEQ ID NO: 1431586 - DNA, 15 bp, Homo sapiens
aacacagcaagacac

SEQ ID NO: 1431587 - DNA, 15 bp, Homo sapiens
acacagcaagacacc

SEQ ID NO: 1431588 - DNA, 15 bp, Homo sapiens
cacagcaagacaccc

SEQ ID NO: 1431589 - DNA, 15 bp, Homo sapiens
acagcaagacaccca

SEQ ID NO: 1431590 - DNA, 15 bp, Homo sapiens
cagcaagacacccat

SEQ ID NO: 1431591 - DNA, 15 bp, Homo sapiens
agcaagacacccatc

SEQ ID NO: 1431592 - DNA, 15 bp, Homo sapiens
gcaagacacccatct

SEQ ID NO: 1431593 - DNA, 15 bp, Homo sapiens
caagacacccatctc

SEQ ID NO: 1431594 - DNA, 15 bp, Homo sapiens
aagacacccatctcg

SEQ ID NO: 1431595 - DNA, 15 bp, Homo sapiens
agacacccatctcgt

SEQ ID NO: 1431596 - DNA, 15 bp, Homo sapiens
gacacccatctcgtt

SEQ ID NO: 1431597 - DNA, 15 bp, Homo sapiens
acacccatctcgttg

SEQ ID NO: 1431598 - DNA, 15 bp, Homo sapiens
cacccatctcgttga

SEQ ID NO: 1431599 - DNA, 15 bp, Homo sapiens
acccatctcgttgaa

SEQ ID NO: 1431600 - DNA, 15 bp, Homo sapiens
cccatctcgttgaaa

SEQ ID NO: 1431601 - DNA, 15 bp, Homo sapiens
ccatctcgttgaaaa

SEQ ID NO: 1431602 - DNA, 15 bp, Homo sapiens
catctcgttgaaaaa

SEQ ID NO: 1431603 - DNA, 15 bp, Homo sapiens
atctcgttgaaaaat

SEQ ID NO: 1431604 - DNA, 15 bp, Homo sapiens
tctcgttgaaaaata

SEQ ID NO: 1431605 - DNA, 15 bp, Homo sapiens
ctcgttgaaaaataa

SEQ ID NO: 1431606 - DNA, 15 bp, Homo sapiens
tcgttgaaaaataac

SEQ ID NO: 1431607 - DNA, 15 bp, Homo sapiens
cgttgaaaaataacg

SEQ ID NO: 1431608 - DNA, 15 bp, Homo sapiens
gttgaaaaataacgg

SEQ ID NO: 1431609 - DNA, 15 bp, Homo sapiens
ttgaaaaataacggt

SEQ ID NO: 1431610 - DNA, 15 bp, Homo sapiens
tgaaaaataacggtc

SEQ ID NO: 1431611 - DNA, 15 bp, Homo sapiens
gaaaaataacggtcg

SEQ ID NO: 1431612 - DNA, 15 bp, Homo sapiens
aaaaataacggtcgg

SEQ ID NO: 1431613 - DNA, 15 bp, Homo sapiens
aaaataacggtcggg

SEQ ID NO: 1431614 - DNA, 15 bp, Homo sapiens
aaataacggtcgggc

SEQ ID NO: 1431615 - DNA, 15 bp, Homo sapiens
aataacggtcgggcg

SEQ ID NO: 1431616 - DNA, 15 bp, Homo sapiens
ataacggtcgggcgc

SEQ ID NO: 1431617 - DNA, 15 bp, Homo sapiens
taacggtcgggcgca

SEQ ID NO: 1431618 - DNA, 15 bp, Homo sapiens
aacggtcgggcgcag

SEQ ID NO: 1431619 - DNA, 15 bp, Homo sapiens
acggtcgggcgcagt

SEQ ID NO: 1431620 - DNA, 15 bp, Homo sapiens
cggtcgggcgcagtg

SEQ ID NO: 1431621 - DNA, 15 bp, Homo sapiens
ggtcgggcgcagtgg

SEQ ID NO: 1431622 - DNA, 15 bp, Homo sapiens
gtcgggcgcagtggc

SEQ ID NO: 1431623 - DNA, 15 bp, Homo sapiens
tcgggcgcagtggct

SEQ ID NO: 1431624 - DNA, 15 bp, Homo sapiens
cctgtaatcccatca

SEQ ID NO: 1431625 - DNA, 15 bp, Homo sapiens
ctgtaatcccatcac

SEQ ID NO: 1431626 - DNA, 15 bp, Homo sapiens
tgtaatcccatcact

SEQ ID NO: 1431627 - DNA, 15 bp, Homo sapiens
gtaatcccatcactt

SEQ ID NO: 1431628 - DNA, 15 bp, Homo sapiens
taatcccatcacttt

SEQ ID NO: 1431629 - DNA, 15 bp, Homo sapiens
aatcccatcactttg

SEQ ID NO: 1431630 - DNA, 15 bp, Homo sapiens
atcccatcactttgg

SEQ ID NO: 1431631 - DNA, 15 bp, Homo sapiens
tcccatcactttggg

SEQ ID NO: 1431632 - DNA, 15 bp, Homo sapiens
cccatcactttggga

SEQ ID NO: 1431633 - DNA, 15 bp, Homo sapiens
ccatcactttgggag

SEQ ID NO: 1431634 - DNA, 15 bp, Homo sapiens
catcactttgggagg

SEQ ID NO: 1431635 - DNA, 15 bp, Homo sapiens
tcactttgggaggcc

SEQ ID NO: 1431636 - DNA, 15 bp, Homo sapiens
agttcgagaccagcg

SEQ ID NO: 1431637 - DNA, 15 bp, Homo sapiens
gttcgagaccagcgt

SEQ ID NO: 1431638 - DNA, 15 bp, Homo sapiens
ttcgagaccagcgtg

SEQ ID NO: 1431639 - DNA, 15 bp, Homo sapiens
tcgagaccagcgtga

SEQ ID NO: 1431640 - DNA, 15 bp, Homo sapiens
cgagaccagcgtgac

SEQ ID NO: 1431641 - DNA, 15 bp, Homo sapiens
gagaccagcgtgacc

SEQ ID NO: 1431642 - DNA, 15 bp, Homo sapiens
agaccagcgtgacca

SEQ ID NO: 1431643 - DNA, 15 bp, Homo sapiens
gaccagcgtgaccaa

SEQ ID NO: 1431644 - DNA, 15 bp, Homo sapiens
accagcgtgaccaac

SEQ ID NO: 1431645 - DNA, 15 bp, Homo sapiens
ccagcgtgaccaaca

SEQ ID NO: 1431646 - DNA, 15 bp, Homo sapiens
cagcgtgaccaacat

SEQ ID NO: 1431647 - DNA, 15 bp, Homo sapiens
agcgtgaccaacatg

SEQ ID NO: 1431648 - DNA, 15 bp, Homo sapiens
gcgtgaccaacatgg

SEQ ID NO: 1431649 - DNA, 15 bp, Homo sapiens
cgtgaccaacatgga

SEQ ID NO: 1431650 - DNA, 15 bp, Homo sapiens
gtgaccaacatggag

SEQ ID NO: 1431651 - DNA, 15 bp, Homo sapiens
aaatacaaaattagt

SEQ ID NO: 1431652 - DNA, 15 bp, Homo sapiens
aatacaaaattagtt

SEQ ID NO: 1431653 - DNA, 15 bp, Homo sapiens
atacaaaattagttg

SEQ ID NO: 1431654 - DNA, 15 bp, Homo sapiens
tacaaaattagttgg

SEQ ID NO: 1431655 - DNA, 15 bp, Homo sapiens
acaaaattagttggg

SEQ ID NO: 1431656 - DNA, 15 bp, Homo sapiens
caaaattagttgggc

SEQ ID NO: 1431657 - DNA, 15 bp, Homo sapiens
aaaattagttgggcg

SEQ ID NO: 1431658 - DNA, 15 bp, Homo sapiens
aaattagttgggcga

SEQ ID NO: 1431659 - DNA, 15 bp, Homo sapiens
aattagttgggcgag

SEQ ID NO: 1431660 - DNA, 15 bp, Homo sapiens
attagttgggcgagg

SEQ ID NO: 1431661 - DNA, 15 bp, Homo sapiens
ttagttgggcgaggt

SEQ ID NO: 1431662 - DNA, 15 bp, Homo sapiens
tagttgggcgaggtg

SEQ ID NO: 1431663 - DNA, 15 bp, Homo sapiens
agttgggcgaggtgg

SEQ ID NO: 1431664 - DNA, 15 bp, Homo sapiens
gttgggcgaggtggt

SEQ ID NO: 1431665 - DNA, 15 bp, Homo sapiens
ttgggcgaggtggtg

SEQ ID NO: 1431666 - DNA, 15 bp, Homo sapiens
tgggcgaggtggtgc

SEQ ID NO: 1431667 - DNA, 15 bp, Homo sapiens
gggcgaggtggtgca

SEQ ID NO: 1431668 - DNA, 15 bp, Homo sapiens
ggcgaggtggtgcat

SEQ ID NO: 1431669 - DNA, 15 bp, Homo sapiens
gcgaggtggtgcata

SEQ ID NO: 1431670 - DNA, 15 bp, Homo sapiens
cgaggtggtgcatac

SEQ ID NO: 1431671 - DNA, 15 bp, Homo sapiens
gaggtggtgcatacc

SEQ ID NO: 1431672 - DNA, 15 bp, Homo sapiens
aggtggtgcatacct

SEQ ID NO: 1431673 - DNA, 15 bp, Homo sapiens
ggtggtgcatacctg

SEQ ID NO: 1431674 - DNA, 15 bp, Homo sapiens
gtggtgcatacctgt

SEQ ID NO: 1431675 - DNA, 15 bp, Homo sapiens
tggtgcatacctgta

SEQ ID NO: 1431676 - DNA, 15 bp, Homo sapiens
ggtgcatacctgtaa

SEQ ID NO: 1431677 - DNA, 15 bp, Homo sapiens
gtgcatacctgtaat

SEQ ID NO: 1431678 - DNA, 15 bp, Homo sapiens
tgcatacctgtaatc

SEQ ID NO: 1431679 - DNA, 15 bp, Homo sapiens
gcatacctgtaatcc

SEQ ID NO: 1431680 - DNA, 15 bp, Homo sapiens
tacctgtaatcccaa

SEQ ID NO: 1431681 - DNA, 15 bp, Homo sapiens
taatcccaactactt

SEQ ID NO: 1431682 - DNA, 15 bp, Homo sapiens
aatcccaactacttg

SEQ ID NO: 1431683 - DNA, 15 bp, Homo sapiens
atcccaactacttgg

SEQ ID NO: 1431684 - DNA, 15 bp, Homo sapiens
tcccaactacttggg

SEQ ID NO: 1431685 - DNA, 15 bp, Homo sapiens
cccaactacttggga

SEQ ID NO: 1431686 - DNA, 15 bp, Homo sapiens
ccaactacttgggag

SEQ ID NO: 1431687 - DNA, 15 bp, Homo sapiens
caactacttgggagg

SEQ ID NO: 1431688 - DNA, 15 bp, Homo sapiens
aactacttgggaggc

SEQ ID NO: 1431689 - DNA, 15 bp, Homo sapiens
actacttgggaggct

SEQ ID NO: 1431690 - DNA, 15 bp, Homo sapiens
ctgaggcaggagaac

SEQ ID NO: 1431691 - DNA, 15 bp, Homo sapiens
tgaggcaggagaaca

SEQ ID NO: 1431692 - DNA, 15 bp, Homo sapiens
gaggcaggagaacag

SEQ ID NO: 1431693 - DNA, 15 bp, Homo sapiens
aggcaggagaacagc

SEQ ID NO: 1431694 - DNA, 15 bp, Homo sapiens
ggcaggagaacagct

SEQ ID NO: 1431695 - DNA, 15 bp, Homo sapiens
gcaggagaacagctt

SEQ ID NO: 1431696 - DNA, 15 bp, Homo sapiens
caggagaacagcttg

SEQ ID NO: 1431697 - DNA, 15 bp, Homo sapiens
aggagaacagcttga

SEQ ID NO: 1431698 - DNA, 15 bp, Homo sapiens
ggagaacagcttgaa

SEQ ID NO: 1431699 - DNA, 15 bp, Homo sapiens
gagaacagcttgaac

SEQ ID NO: 1431700 - DNA, 15 bp, Homo sapiens
agaacagcttgaacc

SEQ ID NO: 1431701 - DNA, 15 bp, Homo sapiens
gaacagcttgaacct

SEQ ID NO: 1431702 - DNA, 15 bp, Homo sapiens
aacagcttgaacctg

SEQ ID NO: 1431703 - DNA, 15 bp, Homo sapiens
acagcttgaacctgg

SEQ ID NO: 1431704 - DNA, 15 bp, Homo sapiens
cagcttgaacctggg

SEQ ID NO: 1431705 - DNA, 15 bp, Homo sapiens
agcttgaacctggga

SEQ ID NO: 1431706 - DNA, 15 bp, Homo sapiens
cctgggaggcagaga

SEQ ID NO: 1431707 - DNA, 15 bp, Homo sapiens
ctgggaggcagagag

SEQ ID NO: 1431708 - DNA, 15 bp, Homo sapiens
tgggaggcagagagg

SEQ ID NO: 1431709 - DNA, 15 bp, Homo sapiens
gggaggcagagaggt

SEQ ID NO: 1431710 - DNA, 15 bp, Homo sapiens
ggaggcagagaggtt

SEQ ID NO: 1431711 - DNA, 15 bp, Homo sapiens
gaggcagagaggttg

SEQ ID NO: 1431712 - DNA, 15 bp, Homo sapiens
aggcagagaggttgt

SEQ ID NO: 1431713 - DNA, 15 bp, Homo sapiens
ggcagagaggttgtg

SEQ ID NO: 1431714 - DNA, 15 bp, Homo sapiens
gcagagaggttgtgg

SEQ ID NO: 1431715 - DNA, 15 bp, Homo sapiens
cagagaggttgtggt

SEQ ID NO: 1431716 - DNA, 15 bp, Homo sapiens
agagaggttgtggtg

SEQ ID NO: 1431717 - DNA, 15 bp, Homo sapiens
gagaggttgtggtga

SEQ ID NO: 1431718 - DNA, 15 bp, Homo sapiens
gtgagccaagatcat

SEQ ID NO: 1431719 - DNA, 15 bp, Homo sapiens
tgagccaagatcatg

SEQ ID NO: 1431720 - DNA, 15 bp, Homo sapiens
gagccaagatcatgc

SEQ ID NO: 1431721 - DNA, 15 bp, Homo sapiens
ccaagatcatgccat

SEQ ID NO: 1431722 - DNA, 15 bp, Homo sapiens
caagatcatgccatt

SEQ ID NO: 1431723 - DNA, 15 bp, Homo sapiens
aagatcatgccattg

SEQ ID NO: 1431724 - DNA, 15 bp, Homo sapiens
agatcatgccattgc

SEQ ID NO: 1431725 - DNA, 15 bp, Homo sapiens
gatcatgccattgca

SEQ ID NO: 1431726 - DNA, 15 bp, Homo sapiens
atcatgccattgcac

SEQ ID NO: 1431727 - DNA, 15 bp, Homo sapiens
tcatgccattgcact

SEQ ID NO: 1431728 - DNA, 15 bp, Homo sapiens
catgccattgcactg

SEQ ID NO: 1431729 - DNA, 15 bp, Homo sapiens
atgccattgcactgc

SEQ ID NO: 1431730 - DNA, 15 bp, Homo sapiens
tgccattgcactgca

SEQ ID NO: 1431731 - DNA, 15 bp, Homo sapiens
gccattgcactgcag

SEQ ID NO: 1431732 - DNA, 15 bp, Homo sapiens
ccattgcactgcagc

SEQ ID NO: 1431733 - DNA, 15 bp, Homo sapiens
cattgcactgcagcc

SEQ ID NO: 1431734 - DNA, 15 bp, Homo sapiens
attgcactgcagcct

SEQ ID NO: 1431735 - DNA, 15 bp, Homo sapiens
ttgcactgcagcctg

SEQ ID NO: 1431736 - DNA, 15 bp, Homo sapiens
gcactgcagcctggg

SEQ ID NO: 1431737 - DNA, 15 bp, Homo sapiens
cactgcagcctgggc

SEQ ID NO: 1431738 - DNA, 15 bp, Homo sapiens
actgcagcctgggca

SEQ ID NO: 1431739 - DNA, 15 bp, Homo sapiens
ctgcagcctgggcaa

SEQ ID NO: 1431740 - DNA, 15 bp, Homo sapiens
tgcagcctgggcaac

SEQ ID NO: 1431741 - DNA, 15 bp, Homo sapiens
ctgggcaacaagagc

SEQ ID NO: 1431742 - DNA, 15 bp, Homo sapiens
gcaacaagagcaaac

SEQ ID NO: 1431743 - DNA, 15 bp, Homo sapiens
caacaagagcaaact

SEQ ID NO: 1431744 - DNA, 15 bp, Homo sapiens
aacaagagcaaactc

SEQ ID NO: 1431745 - DNA, 15 bp, Homo sapiens
acaagagcaaactcc

SEQ ID NO: 1431746 - DNA, 15 bp, Homo sapiens
caagagcaaactcca

SEQ ID NO: 1431747 - DNA, 15 bp, Homo sapiens
aagagcaaactccat

SEQ ID NO: 1431748 - DNA, 15 bp, Homo sapiens
agagcaaactccatc

SEQ ID NO: 1431749 - DNA, 15 bp, Homo sapiens
gagcaaactccatct

SEQ ID NO: 1431750 - DNA, 15 bp, Homo sapiens
agcaaactccatctc

SEQ ID NO: 1431751 - DNA, 15 bp, Homo sapiens
gcaaactccatctca

SEQ ID NO: 1431752 - DNA, 15 bp, Homo sapiens
caaactccatctcaa

SEQ ID NO: 1431753 - DNA, 15 bp, Homo sapiens
catctcaaaaaaaat

SEQ ID NO: 1431754 - DNA, 15 bp, Homo sapiens
atctcaaaaaaaata

SEQ ID NO: 1431755 - DNA, 15 bp, Homo sapiens
taaataaataagtac

SEQ ID NO: 1431756 - DNA, 15 bp, Homo sapiens
aaataaataagtact

SEQ ID NO: 1431757 - DNA, 15 bp, Homo sapiens
aataaataagtactt

SEQ ID NO: 1431758 - DNA, 15 bp, Homo sapiens
ataaataagtacttc

SEQ ID NO: 1431759 - DNA, 15 bp, Homo sapiens
taaataagtacttct

SEQ ID NO: 1431760 - DNA, 15 bp, Homo sapiens
aaataagtacttctg

SEQ ID NO: 1431761 - DNA, 15 bp, Homo sapiens
aataagtacttctgc

SEQ ID NO: 1431762 - DNA, 15 bp, Homo sapiens
ataagtacttctgcc

SEQ ID NO: 1431763 - DNA, 15 bp, Homo sapiens
taagtacttctgcct

SEQ ID NO: 1431764 - DNA, 15 bp, Homo sapiens
aagtacttctgcctt

SEQ ID NO: 1431765 - DNA, 15 bp, Homo sapiens
agtacttctgccttt

SEQ ID NO: 1431766 - DNA, 15 bp, Homo sapiens
gtacttctgccttta

SEQ ID NO: 1431767 - DNA, 15 bp, Homo sapiens
tacttctgcctttaa

SEQ ID NO: 1431768 - DNA, 15 bp, Homo sapiens
acttctgcctttaag

SEQ ID NO: 1431769 - DNA, 15 bp, Homo sapiens
cttctgcctttaagc

SEQ ID NO: 1431770 - DNA, 15 bp, Homo sapiens
ttctgcctttaagcc

SEQ ID NO: 1431771 - DNA, 15 bp, Homo sapiens
tctgcctttaagcca

SEQ ID NO: 1431772 - DNA, 15 bp, Homo sapiens
ctgcctttaagccac

SEQ ID NO: 1431773 - DNA, 15 bp, Homo sapiens
tgcctttaagccact

SEQ ID NO: 1431774 - DNA, 15 bp, Homo sapiens
gcctttaagccactt

SEQ ID NO: 1431775 - DNA, 15 bp, Homo sapiens
cctttaagccacttc

SEQ ID NO: 1431776 - DNA, 15 bp, Homo sapiens
ctttaagccacttcc

SEQ ID NO: 1431777 - DNA, 15 bp, Homo sapiens
tttaagccacttcct

SEQ ID NO: 1431778 - DNA, 15 bp, Homo sapiens
ttaagccacttccta

SEQ ID NO: 1431779 - DNA, 15 bp, Homo sapiens
taagccacttcctag

SEQ ID NO: 1431780 - DNA, 15 bp, Homo sapiens
aagccacttcctaga

SEQ ID NO: 1431781 - DNA, 15 bp, Homo sapiens
agccacttcctagaa

SEQ ID NO: 1431782 - DNA, 15 bp, Homo sapiens
gccacttcctagaag

SEQ ID NO: 1431783 - DNA, 15 bp, Homo sapiens
ccacttcctagaagg

SEQ ID NO: 1431784 - DNA, 15 bp, Homo sapiens
cacttcctagaaggc

SEQ ID NO: 1431785 - DNA, 15 bp, Homo sapiens
acttcctagaaggca

SEQ ID NO: 1431786 - DNA, 15 bp, Homo sapiens
cttcctagaaggcag

SEQ ID NO: 1431787 - DNA, 15 bp, Homo sapiens
ttcctagaaggcagt

SEQ ID NO: 1431788 - DNA, 15 bp, Homo sapiens
tcctagaaggcagtg

SEQ ID NO: 1431789 - DNA, 15 bp, Homo sapiens
cctagaaggcagtgg

SEQ ID NO: 1431790 - DNA, 15 bp, Homo sapiens
ctagaaggcagtggc

SEQ ID NO: 1431791 - DNA, 15 bp, Homo sapiens
tagaaggcagtggca

SEQ ID NO: 1431792 - DNA, 15 bp, Homo sapiens
gaaggcagtggcaca

SEQ ID NO: 1431793 - DNA, 15 bp, Homo sapiens
aaggcagtggcacaa

SEQ ID NO: 1431794 - DNA, 15 bp, Homo sapiens
aggcagtggcacaaa

SEQ ID NO: 1431795 - DNA, 15 bp, Homo sapiens
ggcagtggcacaaag

SEQ ID NO: 1431796 - DNA, 15 bp, Homo sapiens
gcagtggcacaaagt

SEQ ID NO: 1431797 - DNA, 15 bp, Homo sapiens
cagtggcacaaagtg

SEQ ID NO: 1431798 - DNA, 15 bp, Homo sapiens
agtggcacaaagtga

SEQ ID NO: 1431799 - DNA, 15 bp, Homo sapiens
gtggcacaaagtgat

SEQ ID NO: 1431800 - DNA, 15 bp, Homo sapiens
tggcacaaagtgata

SEQ ID NO: 1431801 - DNA, 15 bp, Homo sapiens
ggcacaaagtgatac

SEQ ID NO: 1431802 - DNA, 15 bp, Homo sapiens
gcacaaagtgataca

SEQ ID NO: 1431803 - DNA, 15 bp, Homo sapiens
cacaaagtgatacat

SEQ ID NO: 1431804 - DNA, 15 bp, Homo sapiens
acaaagtgatacatt

SEQ ID NO: 1431805 - DNA, 15 bp, Homo sapiens
caaagtgatacattt

SEQ ID NO: 1431806 - DNA, 15 bp, Homo sapiens
aaagtgatacatttg

SEQ ID NO: 1431807 - DNA, 15 bp, Homo sapiens
aagtgatacatttgg

SEQ ID NO: 1431808 - DNA, 15 bp, Homo sapiens
agtgatacatttgga

SEQ ID NO: 1431809 - DNA, 15 bp, Homo sapiens
gtgatacatttggag

SEQ ID NO: 1431810 - DNA, 15 bp, Homo sapiens
tgatacatttggagg

SEQ ID NO: 1431811 - DNA, 15 bp, Homo sapiens
gatacatttggagga

SEQ ID NO: 1431812 - DNA, 15 bp, Homo sapiens
atacatttggaggag

SEQ ID NO: 1431813 - DNA, 15 bp, Homo sapiens
tacatttggaggagt

SEQ ID NO: 1431814 - DNA, 15 bp, Homo sapiens
acatttggaggagta

SEQ ID NO: 1431815 - DNA, 15 bp, Homo sapiens
catttggaggagtaa

SEQ ID NO: 1431816 - DNA, 15 bp, Homo sapiens
atttggaggagtaaa

SEQ ID NO: 1431817 - DNA, 15 bp, Homo sapiens
tttggaggagtaaat

SEQ ID NO: 1431818 - DNA, 15 bp, Homo sapiens
ttggaggagtaaata

SEQ ID NO: 1431819 - DNA, 15 bp, Homo sapiens
tggaggagtaaatat

SEQ ID NO: 1431820 - DNA, 15 bp, Homo sapiens
ggaggagtaaatata

SEQ ID NO: 1431821 - DNA, 15 bp, Homo sapiens
gaggagtaaatatat

SEQ ID NO: 1431822 - DNA, 15 bp, Homo sapiens
aggagtaaatatatt

SEQ ID NO: 1431823 - DNA, 15 bp, Homo sapiens
ggagtaaatatatta

SEQ ID NO: 1431824 - DNA, 15 bp, Homo sapiens
gagtaaatatattac

SEQ ID NO: 1431825 - DNA, 15 bp, Homo sapiens
agtaaatatattaca

SEQ ID NO: 1431826 - DNA, 15 bp, Homo sapiens
gtaaatatattacaa

SEQ ID NO: 1431827 - DNA, 15 bp, Homo sapiens
taaatatattacaaa

SEQ ID NO: 1431828 - DNA, 15 bp, Homo sapiens
aaatatattacaaaa

SEQ ID NO: 1431829 - DNA, 15 bp, Homo sapiens
aatatattacaaaat

SEQ ID NO: 1431830 - DNA, 15 bp, Homo sapiens
atatattacaaaatg

SEQ ID NO: 1431831 - DNA, 15 bp, Homo sapiens
tatattacaaaatga

SEQ ID NO: 1431832 - DNA, 15 bp, Homo sapiens
atattacaaaatgaa

SEQ ID NO: 1431833 - DNA, 15 bp, Homo sapiens
tattacaaaatgaat

SEQ ID NO: 1431834 - DNA, 15 bp, Homo sapiens
attacaaaatgaatt

SEQ ID NO: 1431835 - DNA, 15 bp, Homo sapiens
ttacaaaatgaatta

SEQ ID NO: 1431836 - DNA, 15 bp, Homo sapiens
tacaaaatgaattag

SEQ ID NO: 1431837 - DNA, 15 bp, Homo sapiens
acaaaatgaattagg

SEQ ID NO: 1431838 - DNA, 15 bp, Homo sapiens
caaaatgaattaggc

SEQ ID NO: 1431839 - DNA, 15 bp, Homo sapiens
aaaatgaattaggct

SEQ ID NO: 1431840 - DNA, 15 bp, Homo sapiens
aaatgaattaggctg

SEQ ID NO: 1431841 - DNA, 15 bp, Homo sapiens
aatgaattaggctgg

SEQ ID NO: 1431842 - DNA, 15 bp, Homo sapiens
atgaattaggctggg

SEQ ID NO: 1431843 - DNA, 15 bp, Homo sapiens
tgaattaggctgggc

SEQ ID NO: 1431844 - DNA, 15 bp, Homo sapiens
gaattaggctgggcg

SEQ ID NO: 1431845 - DNA, 15 bp, Homo sapiens
aattaggctgggcgc

SEQ ID NO: 1431846 - DNA, 15 bp, Homo sapiens
attaggctgggcgca

SEQ ID NO: 1431847 - DNA, 15 bp, Homo sapiens
ttaggctgggcgcag

SEQ ID NO: 1431848 - DNA, 15 bp, Homo sapiens
taggctgggcgcagt

SEQ ID NO: 1431849 - DNA, 15 bp, Homo sapiens
aggctgggcgcagtg

SEQ ID NO: 1431850 - DNA, 15 bp, Homo sapiens
cgcagtggctcatgt

SEQ ID NO: 1431851 - DNA, 15 bp, Homo sapiens
gcagtggctcatgtc

SEQ ID NO: 1431852 - DNA, 15 bp, Homo sapiens
atgtctgtaatcccc

SEQ ID NO: 1431853 - DNA, 15 bp, Homo sapiens
tgtctgtaatccccg

SEQ ID NO: 1431854 - DNA, 15 bp, Homo sapiens
gtctgtaatccccgc

SEQ ID NO: 1431855 - DNA, 15 bp, Homo sapiens
tctgtaatccccgca

SEQ ID NO: 1431856 - DNA, 15 bp, Homo sapiens
ctgtaatccccgcac

SEQ ID NO: 1431857 - DNA, 15 bp, Homo sapiens
tgtaatccccgcact

SEQ ID NO: 1431858 - DNA, 15 bp, Homo sapiens
gtaatccccgcactt

SEQ ID NO: 1431859 - DNA, 15 bp, Homo sapiens
taatccccgcacttt

SEQ ID NO: 1431860 - DNA, 15 bp, Homo sapiens
aatccccgcactttg

SEQ ID NO: 1431861 - DNA, 15 bp, Homo sapiens
atccccgcactttgg

SEQ ID NO: 1431862 - DNA, 15 bp, Homo sapiens
tccccgcactttggg

SEQ ID NO: 1431863 - DNA, 15 bp, Homo sapiens
ccccgcactttggga

SEQ ID NO: 1431864 - DNA, 15 bp, Homo sapiens
cccgcactttgggag

SEQ ID NO: 1431865 - DNA, 15 bp, Homo sapiens
ccgcactttgggagg

SEQ ID NO: 1431866 - DNA, 15 bp, Homo sapiens
cgcactttgggaggc

SEQ ID NO: 1431867 - DNA, 15 bp, Homo sapiens
cgagactagcctgat

SEQ ID NO: 1431868 - DNA, 15 bp, Homo sapiens
gagactagcctgatc

SEQ ID NO: 1431869 - DNA, 15 bp, Homo sapiens
agactagcctgatca

SEQ ID NO: 1431870 - DNA, 15 bp, Homo sapiens
gactagcctgatcaa

SEQ ID NO: 1431871 - DNA, 15 bp, Homo sapiens
actagcctgatcaac

SEQ ID NO: 1431872 - DNA, 15 bp, Homo sapiens
ctagcctgatcaaca

SEQ ID NO: 1431873 - DNA, 15 bp, Homo sapiens
tagcctgatcaacag

SEQ ID NO: 1431874 - DNA, 15 bp, Homo sapiens
agcctgatcaacagg

SEQ ID NO: 1431875 - DNA, 15 bp, Homo sapiens
gcctgatcaacaggg

SEQ ID NO: 1431876 - DNA, 15 bp, Homo sapiens
cctgatcaacagggt

SEQ ID NO: 1431877 - DNA, 15 bp, Homo sapiens
ctgatcaacagggta

SEQ ID NO: 1431878 - DNA, 15 bp, Homo sapiens
tgatcaacagggtaa

SEQ ID NO: 1431879 - DNA, 15 bp, Homo sapiens
gatcaacagggtaaa

SEQ ID NO: 1431880 - DNA, 15 bp, Homo sapiens
atcaacagggtaaaa

SEQ ID NO: 1431881 - DNA, 15 bp, Homo sapiens
tcaacagggtaaaat

SEQ ID NO: 1431882 - DNA, 15 bp, Homo sapiens
caacagggtaaaatc

SEQ ID NO: 1431883 - DNA, 15 bp, Homo sapiens
aacagggtaaaatcc

SEQ ID NO: 1431884 - DNA, 15 bp, Homo sapiens
acagggtaaaatccc

SEQ ID NO: 1431885 - DNA, 15 bp, Homo sapiens
cagggtaaaatccca

SEQ ID NO: 1431886 - DNA, 15 bp, Homo sapiens
agggtaaaatcccat

SEQ ID NO: 1431887 - DNA, 15 bp, Homo sapiens
gggtaaaatcccatc

SEQ ID NO: 1431888 - DNA, 15 bp, Homo sapiens
ggtaaaatcccatct

SEQ ID NO: 1431889 - DNA, 15 bp, Homo sapiens
gtaaaatcccatctc

SEQ ID NO: 1431890 - DNA, 15 bp, Homo sapiens
taaaatcccatctct

SEQ ID NO: 1431891 - DNA, 15 bp, Homo sapiens
aaaatcccatctcta

SEQ ID NO: 1431892 - DNA, 15 bp, Homo sapiens
atcccatctctacta

SEQ ID NO: 1431893 - DNA, 15 bp, Homo sapiens
tcccatctctactaa

SEQ ID NO: 1431894 - DNA, 15 bp, Homo sapiens
tctactaaaaatacc

SEQ ID NO: 1431895 - DNA, 15 bp, Homo sapiens
ctactaaaaatacca

SEQ ID NO: 1431896 - DNA, 15 bp, Homo sapiens
tactaaaaataccaa

SEQ ID NO: 1431897 - DNA, 15 bp, Homo sapiens
actaaaaataccaaa

SEQ ID NO: 1431898 - DNA, 15 bp, Homo sapiens
ctaaaaataccaaaa

SEQ ID NO: 1431899 - DNA, 15 bp, Homo sapiens
taaaaataccaaaaa

SEQ ID NO: 1431900 - DNA, 15 bp, Homo sapiens
aaaaataccaaaaaa

SEQ ID NO: 1431901 - DNA, 15 bp, Homo sapiens
aaaataccaaaaaaa

SEQ ID NO: 1431902 - DNA, 15 bp, Homo sapiens
aaataccaaaaaaac

SEQ ID NO: 1431903 - DNA, 15 bp, Homo sapiens
aataccaaaaaaact

SEQ ID NO: 1431904 - DNA, 15 bp, Homo sapiens
ataccaaaaaaacta

SEQ ID NO: 1431905 - DNA, 15 bp, Homo sapiens
taccaaaaaaactag

SEQ ID NO: 1431906 - DNA, 15 bp, Homo sapiens
accaaaaaaactagc

SEQ ID NO: 1431907 - DNA, 15 bp, Homo sapiens
ccaaaaaaactagct

SEQ ID NO: 1431908 - DNA, 15 bp, Homo sapiens
caaaaaaactagctg

SEQ ID NO: 1431909 - DNA, 15 bp, Homo sapiens
aaaaaaactagctgg

SEQ ID NO: 1431910 - DNA, 15 bp, Homo sapiens
aaaaaactagctggg

SEQ ID NO: 1431911 - DNA, 15 bp, Homo sapiens
aaaaactagctgggc

SEQ ID NO: 1431912 - DNA, 15 bp, Homo sapiens
aaaactagctgggcg

SEQ ID NO: 1431913 - DNA, 15 bp, Homo sapiens
aaactagctgggcgt

SEQ ID NO: 1431914 - DNA, 15 bp, Homo sapiens
aactagctgggcgtg

SEQ ID NO: 1431915 - DNA, 15 bp, Homo sapiens
actagctgggcgtgg

SEQ ID NO: 1431916 - DNA, 15 bp, Homo sapiens
ctagctgggcgtggt

SEQ ID NO: 1431917 - DNA, 15 bp, Homo sapiens
gcgtggtggcaggca

SEQ ID NO: 1431918 - DNA, 15 bp, Homo sapiens
cgtggtggcaggcac

SEQ ID NO: 1431919 - DNA, 15 bp, Homo sapiens
gtggtggcaggcacc

SEQ ID NO: 1431920 - DNA, 15 bp, Homo sapiens
caggcacctgtaatg

SEQ ID NO: 1431921 - DNA, 15 bp, Homo sapiens
aggcacctgtaatgt

SEQ ID NO: 1431922 - DNA, 15 bp, Homo sapiens
ggcacctgtaatgtc

SEQ ID NO: 1431923 - DNA, 15 bp, Homo sapiens
gcacctgtaatgtca

SEQ ID NO: 1431924 - DNA, 15 bp, Homo sapiens
cacctgtaatgtcag

SEQ ID NO: 1431925 - DNA, 15 bp, Homo sapiens
acctgtaatgtcagc

SEQ ID NO: 1431926 - DNA, 15 bp, Homo sapiens
cctgtaatgtcagct

SEQ ID NO: 1431927 - DNA, 15 bp, Homo sapiens
ctgtaatgtcagcta

SEQ ID NO: 1431928 - DNA, 15 bp, Homo sapiens
tgtaatgtcagctac

SEQ ID NO: 1431929 - DNA, 15 bp, Homo sapiens
gtaatgtcagctact

SEQ ID NO: 1431930 - DNA, 15 bp, Homo sapiens
taatgtcagctacta

SEQ ID NO: 1431931 - DNA, 15 bp, Homo sapiens
aatgtcagctactag

SEQ ID NO: 1431932 - DNA, 15 bp, Homo sapiens
atgtcagctactagg

SEQ ID NO: 1431933 - DNA, 15 bp, Homo sapiens
tgtcagctactagga

SEQ ID NO: 1431934 - DNA, 15 bp, Homo sapiens
gtcagctactaggaa

SEQ ID NO: 1431935 - DNA, 15 bp, Homo sapiens
tcagctactaggaag

SEQ ID NO: 1431936 - DNA, 15 bp, Homo sapiens
cagctactaggaagg

SEQ ID NO: 1431937 - DNA, 15 bp, Homo sapiens
agctactaggaaggc

SEQ ID NO: 1431938 - DNA, 15 bp, Homo sapiens
gctactaggaaggct

SEQ ID NO: 1431939 - DNA, 15 bp, Homo sapiens
ctactaggaaggctg

SEQ ID NO: 1431940 - DNA, 15 bp, Homo sapiens
tactaggaaggctga

SEQ ID NO: 1431941 - DNA, 15 bp, Homo sapiens
actaggaaggctgag

SEQ ID NO: 1431942 - DNA, 15 bp, Homo sapiens
ctaggaaggctgagg

SEQ ID NO: 1431943 - DNA, 15 bp, Homo sapiens
taggaaggctgaggc

SEQ ID NO: 1431944 - DNA, 15 bp, Homo sapiens
aggaaggctgaggca

SEQ ID NO: 1431945 - DNA, 15 bp, Homo sapiens
ggaaggctgaggcag

SEQ ID NO: 1431946 - DNA, 15 bp, Homo sapiens
gagccaagattgcac

SEQ ID NO: 1431947 - DNA, 15 bp, Homo sapiens
agccaagattgcacc

SEQ ID NO: 1431948 - DNA, 15 bp, Homo sapiens
gccaagattgcacca

SEQ ID NO: 1431949 - DNA, 15 bp, Homo sapiens
ccaagattgcaccat

SEQ ID NO: 1431950 - DNA, 15 bp, Homo sapiens
caagattgcaccatt

SEQ ID NO: 1431951 - DNA, 15 bp, Homo sapiens
aagattgcaccattg

SEQ ID NO: 1431952 - DNA, 15 bp, Homo sapiens
agattgcaccattgc

SEQ ID NO: 1431953 - DNA, 15 bp, Homo sapiens
gattgcaccattgca

SEQ ID NO: 1431954 - DNA, 15 bp, Homo sapiens
tgcaccattgcactt

SEQ ID NO: 1431955 - DNA, 15 bp, Homo sapiens
gcaccattgcacttc

SEQ ID NO: 1431956 - DNA, 15 bp, Homo sapiens
caccattgcacttca

SEQ ID NO: 1431957 - DNA, 15 bp, Homo sapiens
accattgcacttcag

SEQ ID NO: 1431958 - DNA, 15 bp, Homo sapiens
ccattgcacttcagc

SEQ ID NO: 1431959 - DNA, 15 bp, Homo sapiens
cattgcacttcagct

SEQ ID NO: 1431960 - DNA, 15 bp, Homo sapiens
attgcacttcagctt

SEQ ID NO: 1431961 - DNA, 15 bp, Homo sapiens
ttgcacttcagcttg

SEQ ID NO: 1431962 - DNA, 15 bp, Homo sapiens
tgcacttcagcttgg

SEQ ID NO: 1431963 - DNA, 15 bp, Homo sapiens
gcacttcagcttggg

SEQ ID NO: 1431964 - DNA, 15 bp, Homo sapiens
cacttcagcttgggc

SEQ ID NO: 1431965 - DNA, 15 bp, Homo sapiens
acttcagcttgggca

SEQ ID NO: 1431966 - DNA, 15 bp, Homo sapiens
cttcagcttgggcaa

SEQ ID NO: 1431967 - DNA, 15 bp, Homo sapiens
ttcagcttgggcaac

SEQ ID NO: 1431968 - DNA, 15 bp, Homo sapiens
tcagcttgggcaaca

SEQ ID NO: 1431969 - DNA, 15 bp, Homo sapiens
cagcttgggcaacag

SEQ ID NO: 1431970 - DNA, 15 bp, Homo sapiens
agcttgggcaacaga

SEQ ID NO: 1431971 - DNA, 15 bp, Homo sapiens
gcttgggcaacagag

SEQ ID NO: 1431972 - DNA, 15 bp, Homo sapiens
cttgggcaacagagt

SEQ ID NO: 1431973 - DNA, 15 bp, Homo sapiens
ttgggcaacagagtg

SEQ ID NO: 1431974 - DNA, 15 bp, Homo sapiens
aaaaaaaaagaacta

SEQ ID NO: 1431975 - DNA, 15 bp, Homo sapiens
aaaaaaaagaactaa

SEQ ID NO: 1431976 - DNA, 15 bp, Homo sapiens
aaaaaaagaactaac

SEQ ID NO: 1431977 - DNA, 15 bp, Homo sapiens
aaaaaagaactaaca

SEQ ID NO: 1431978 - DNA, 15 bp, Homo sapiens
aaaaagaactaacat

SEQ ID NO: 1431979 - DNA, 15 bp, Homo sapiens
aaaagaactaacatg

SEQ ID NO: 1431980 - DNA, 15 bp, Homo sapiens
aaagaactaacatgc

SEQ ID NO: 1431981 - DNA, 15 bp, Homo sapiens
aagaactaacatgcc

SEQ ID NO: 1431982 - DNA, 15 bp, Homo sapiens
agaactaacatgcca

SEQ ID NO: 1431983 - DNA, 15 bp, Homo sapiens
gaactaacatgccag

SEQ ID NO: 1431984 - DNA, 15 bp, Homo sapiens
aactaacatgccaga

SEQ ID NO: 1431985 - DNA, 15 bp, Homo sapiens
actaacatgccagaa

SEQ ID NO: 1431986 - DNA, 15 bp, Homo sapiens
ctaacatgccagaac

SEQ ID NO: 1431987 - DNA, 15 bp, Homo sapiens
taacatgccagaact

SEQ ID NO: 1431988 - DNA, 15 bp, Homo sapiens
aacatgccagaactt

SEQ ID NO: 1431989 - DNA, 15 bp, Homo sapiens
acatgccagaacttt

SEQ ID NO: 1431990 - DNA, 15 bp, Homo sapiens
catgccagaactttg

SEQ ID NO: 1431991 - DNA, 15 bp, Homo sapiens
atgccagaactttgc

SEQ ID NO: 1431992 - DNA, 15 bp, Homo sapiens
tgccagaactttgcc

SEQ ID NO: 1431993 - DNA, 15 bp, Homo sapiens
gccagaactttgcct

SEQ ID NO: 1431994 - DNA, 15 bp, Homo sapiens
ccagaactttgcctt

SEQ ID NO: 1431995 - DNA, 15 bp, Homo sapiens
cagaactttgccttc

SEQ ID NO: 1431996 - DNA, 15 bp, Homo sapiens
agaactttgccttca

SEQ ID NO: 1431997 - DNA, 15 bp, Homo sapiens
gaactttgccttcag

SEQ ID NO: 1431998 - DNA, 15 bp, Homo sapiens
aactttgccttcagt

SEQ ID NO: 1431999 - DNA, 15 bp, Homo sapiens
actttgccttcagta

SEQ ID NO: 1432000 - DNA, 15 bp, Homo sapiens
ctttgccttcagtat

SEQ ID NO: 1432001 - DNA, 15 bp, Homo sapiens
tttgccttcagtatg

SEQ ID NO: 1432002 - DNA, 15 bp, Homo sapiens
ttgccttcagtatgt

SEQ ID NO: 1432003 - DNA, 15 bp, Homo sapiens
tgccttcagtatgtt

SEQ ID NO: 1432004 - DNA, 15 bp, Homo sapiens
gccttcagtatgttt

SEQ ID NO: 1432005 - DNA, 15 bp, Homo sapiens
ccttcagtatgtttt

SEQ ID NO: 1432006 - DNA, 15 bp, Homo sapiens
cttcagtatgttttg

SEQ ID NO: 1432007 - DNA, 15 bp, Homo sapiens
ttcagtatgttttgt

SEQ ID NO: 1432008 - DNA, 15 bp, Homo sapiens
tcagtatgttttgtg

SEQ ID NO: 1432009 - DNA, 15 bp, Homo sapiens
cagtatgttttgtga

SEQ ID NO: 1432010 - DNA, 15 bp, Homo sapiens
agtatgttttgtgat

SEQ ID NO: 1432011 - DNA, 15 bp, Homo sapiens
gtatgttttgtgatt

SEQ ID NO: 1432012 - DNA, 15 bp, Homo sapiens
tatgttttgtgattt

SEQ ID NO: 1432013 - DNA, 15 bp, Homo sapiens
atgttttgtgatttt

SEQ ID NO: 1432014 - DNA, 15 bp, Homo sapiens
tgttttgtgattttt

SEQ ID NO: 1432015 - DNA, 15 bp, Homo sapiens
gttttgtgatttttc

SEQ ID NO: 1432016 - DNA, 15 bp, Homo sapiens
ttttgtgatttttcc

SEQ ID NO: 1432017 - DNA, 15 bp, Homo sapiens
tttgtgatttttccc

SEQ ID NO: 1432018 - DNA, 15 bp, Homo sapiens
ttgtgatttttccct

SEQ ID NO: 1432019 - DNA, 15 bp, Homo sapiens
tgtgatttttccctt

SEQ ID NO: 1432020 - DNA, 15 bp, Homo sapiens
gtgatttttcccttc

SEQ ID NO: 1432021 - DNA, 15 bp, Homo sapiens
tgatttttcccttct

SEQ ID NO: 1432022 - DNA, 15 bp, Homo sapiens
gatttttcccttctt

SEQ ID NO: 1432023 - DNA, 15 bp, Homo sapiens
atttttcccttcttg

SEQ ID NO: 1432024 - DNA, 15 bp, Homo sapiens
tttttcccttcttgt

SEQ ID NO: 1432025 - DNA, 15 bp, Homo sapiens
ttttcccttcttgtg

SEQ ID NO: 1432026 - DNA, 15 bp, Homo sapiens
tttcccttcttgtgc

SEQ ID NO: 1432027 - DNA, 15 bp, Homo sapiens
ttcccttcttgtgcc

SEQ ID NO: 1432028 - DNA, 15 bp, Homo sapiens
tcccttcttgtgcca

SEQ ID NO: 1432029 - DNA, 15 bp, Homo sapiens
cccttcttgtgccat

SEQ ID NO: 1432030 - DNA, 15 bp, Homo sapiens
ccttcttgtgccatt

SEQ ID NO: 1432031 - DNA, 15 bp, Homo sapiens
cttcttgtgccattt

SEQ ID NO: 1432032 - DNA, 15 bp, Homo sapiens
ttcttgtgccatttc

SEQ ID NO: 1432033 - DNA, 15 bp, Homo sapiens
tcttgtgccatttca

SEQ ID NO: 1432034 - DNA, 15 bp, Homo sapiens
cttgtgccatttcat

SEQ ID NO: 1432035 - DNA, 15 bp, Homo sapiens
ttgtgccatttcatc

SEQ ID NO: 1432036 - DNA, 15 bp, Homo sapiens
tgtgccatttcatca

SEQ ID NO: 1432037 - DNA, 15 bp, Homo sapiens
gtgccatttcatcat

SEQ ID NO: 1432038 - DNA, 15 bp, Homo sapiens
tgccatttcatcatt

SEQ ID NO: 1432039 - DNA, 15 bp, Homo sapiens
gccatttcatcatta

SEQ ID NO: 1432040 - DNA, 15 bp, Homo sapiens
ccatttcatcattag

SEQ ID NO: 1432041 - DNA, 15 bp, Homo sapiens
catttcatcattagt

SEQ ID NO: 1432042 - DNA, 15 bp, Homo sapiens
atttcatcattagtt

SEQ ID NO: 1432043 - DNA, 15 bp, Homo sapiens
tttcatcattagttc

SEQ ID NO: 1432044 - DNA, 15 bp, Homo sapiens
ttcatcattagttcc

SEQ ID NO: 1432045 - DNA, 15 bp, Homo sapiens
tcatcattagttcca

SEQ ID NO: 1432046 - DNA, 15 bp, Homo sapiens
catcattagttccat

SEQ ID NO: 1432047 - DNA, 15 bp, Homo sapiens
atcattagttccatg

SEQ ID NO: 1432048 - DNA, 15 bp, Homo sapiens
tcattagttccatgt

SEQ ID NO: 1432049 - DNA, 15 bp, Homo sapiens
cattagttccatgta

SEQ ID NO: 1432050 - DNA, 15 bp, Homo sapiens
attagttccatgtat

SEQ ID NO: 1432051 - DNA, 15 bp, Homo sapiens
ttagttccatgtatt

SEQ ID NO: 1432052 - DNA, 15 bp, Homo sapiens
tagttccatgtatta

SEQ ID NO: 1432053 - DNA, 15 bp, Homo sapiens
agttccatgtattat

SEQ ID NO: 1432054 - DNA, 15 bp, Homo sapiens
gttccatgtattatt

SEQ ID NO: 1432055 - DNA, 15 bp, Homo sapiens
ttccatgtattattt

SEQ ID NO: 1432056 - DNA, 15 bp, Homo sapiens
tccatgtattattta

SEQ ID NO: 1432057 - DNA, 15 bp, Homo sapiens
ccatgtattatttaa

SEQ ID NO: 1432058 - DNA, 15 bp, Homo sapiens
catgtattatttaag

SEQ ID NO: 1432059 - DNA, 15 bp, Homo sapiens
atgtattatttaaga

SEQ ID NO: 1432060 - DNA, 15 bp, Homo sapiens
tgtattatttaagat

SEQ ID NO: 1432061 - DNA, 15 bp, Homo sapiens
gtattatttaagatt

SEQ ID NO: 1432062 - DNA, 15 bp, Homo sapiens
tattatttaagattt

SEQ ID NO: 1432063 - DNA, 15 bp, Homo sapiens
attatttaagatttc

SEQ ID NO: 1432064 - DNA, 15 bp, Homo sapiens
ttatttaagatttct

SEQ ID NO: 1432065 - DNA, 15 bp, Homo sapiens
tatttaagatttctt

SEQ ID NO: 1432066 - DNA, 15 bp, Homo sapiens
tttaagatttcttat

SEQ ID NO: 1432067 - DNA, 15 bp, Homo sapiens
ttaagatttcttatc

SEQ ID NO: 1432068 - DNA, 15 bp, Homo sapiens
taagatttcttatca

SEQ ID NO: 1432069 - DNA, 15 bp, Homo sapiens
aagatttcttatcaa

SEQ ID NO: 1432070 - DNA, 15 bp, Homo sapiens
agatttcttatcaac

SEQ ID NO: 1432071 - DNA, 15 bp, Homo sapiens
gatttcttatcaacc

SEQ ID NO: 1432072 - DNA, 15 bp, Homo sapiens
atttcttatcaacca

SEQ ID NO: 1432073 - DNA, 15 bp, Homo sapiens
tttcttatcaaccag

SEQ ID NO: 1432074 - DNA, 15 bp, Homo sapiens
ttcttatcaaccagc

SEQ ID NO: 1432075 - DNA, 15 bp, Homo sapiens
tcttatcaaccagca

SEQ ID NO: 1432076 - DNA, 15 bp, Homo sapiens
cttatcaaccagcac

SEQ ID NO: 1432077 - DNA, 15 bp, Homo sapiens
ttatcaaccagcacc

SEQ ID NO: 1432078 - DNA, 15 bp, Homo sapiens
tatcaaccagcacct

SEQ ID NO: 1432079 - DNA, 15 bp, Homo sapiens
atcaaccagcacctt

SEQ ID NO: 1432080 - DNA, 15 bp, Homo sapiens
tcaaccagcaccttg

SEQ ID NO: 1432081 - DNA, 15 bp, Homo sapiens
caaccagcaccttgg

SEQ ID NO: 1432082 - DNA, 15 bp, Homo sapiens
aaccagcaccttggg

SEQ ID NO: 1432083 - DNA, 15 bp, Homo sapiens
accagcaccttggga

SEQ ID NO: 1432084 - DNA, 15 bp, Homo sapiens
ccagcaccttgggat

SEQ ID NO: 1432085 - DNA, 15 bp, Homo sapiens
cagcaccttgggatt

SEQ ID NO: 1432086 - DNA, 15 bp, Homo sapiens
agcaccttgggattt

SEQ ID NO: 1432087 - DNA, 15 bp, Homo sapiens
gcaccttgggatttt

SEQ ID NO: 1432088 - DNA, 15 bp, Homo sapiens
caccttgggattttt

SEQ ID NO: 1432089 - DNA, 15 bp, Homo sapiens
accttgggatttttt

SEQ ID NO: 1432090 - DNA, 15 bp, Homo sapiens
ccttgggattttttt

SEQ ID NO: 1432091 - DNA, 15 bp, Homo sapiens
cttgggatttttttg

SEQ ID NO: 1432092 - DNA, 15 bp, Homo sapiens
ttgggatttttttgt

SEQ ID NO: 1432093 - DNA, 15 bp, Homo sapiens
tgggatttttttgtg

SEQ ID NO: 1432094 - DNA, 15 bp, Homo sapiens
gggatttttttgtgt

SEQ ID NO: 1432095 - DNA, 15 bp, Homo sapiens
ggatttttttgtgta

SEQ ID NO: 1432096 - DNA, 15 bp, Homo sapiens
gatttttttgtgtat

SEQ ID NO: 1432097 - DNA, 15 bp, Homo sapiens
atttttttgtgtatg

SEQ ID NO: 1432098 - DNA, 15 bp, Homo sapiens
tttttttgtgtatgt

SEQ ID NO: 1432099 - DNA, 15 bp, Homo sapiens
ttttttgtgtatgtg

SEQ ID NO: 1432100 - DNA, 15 bp, Homo sapiens
tttttgtgtatgtgt

SEQ ID NO: 1432101 - DNA, 15 bp, Homo sapiens
ttttgtgtatgtgtt

SEQ ID NO: 1432102 - DNA, 15 bp, Homo sapiens
tttgtgtatgtgttg

SEQ ID NO: 1432103 - DNA, 15 bp, Homo sapiens
ttgtgtatgtgttgg

SEQ ID NO: 1432104 - DNA, 15 bp, Homo sapiens
tgtgtatgtgttggt

SEQ ID NO: 1432105 - DNA, 15 bp, Homo sapiens
gtgtatgtgttggtt

SEQ ID NO: 1432106 - DNA, 15 bp, Homo sapiens
tgtatgtgttggttt

SEQ ID NO: 1432107 - DNA, 15 bp, Homo sapiens
gtatgtgttggttta

SEQ ID NO: 1432108 - DNA, 15 bp, Homo sapiens
tatgtgttggtttag

SEQ ID NO: 1432109 - DNA, 15 bp, Homo sapiens
atgtgttggtttagg

SEQ ID NO: 1432110 - DNA, 15 bp, Homo sapiens
tgtgttggtttaggg

SEQ ID NO: 1432111 - DNA, 15 bp, Homo sapiens
gtgttggtttagggg

SEQ ID NO: 1432112 - DNA, 15 bp, Homo sapiens
tgttggtttaggggg

SEQ ID NO: 1432113 - DNA, 15 bp, Homo sapiens
gttggtttagggggt

SEQ ID NO: 1432114 - DNA, 15 bp, Homo sapiens
ttggtttagggggtt

SEQ ID NO: 1432115 - DNA, 15 bp, Homo sapiens
tggtttagggggttt

SEQ ID NO: 1432116 - DNA, 15 bp, Homo sapiens
ggtttagggggttta

SEQ ID NO: 1432117 - DNA, 15 bp, Homo sapiens
gtttagggggtttat

SEQ ID NO: 1432118 - DNA, 15 bp, Homo sapiens
tttagggggtttatt

SEQ ID NO: 1432119 - DNA, 15 bp, Homo sapiens
ttagggggtttattt

SEQ ID NO: 1432120 - DNA, 15 bp, Homo sapiens
tagggggtttatttg

SEQ ID NO: 1432121 - DNA, 15 bp, Homo sapiens
agggggtttatttgt

SEQ ID NO: 1432122 - DNA, 15 bp, Homo sapiens
gggggtttatttgtt

SEQ ID NO: 1432123 - DNA, 15 bp, Homo sapiens
ggggtttatttgttt

SEQ ID NO: 1432124 - DNA, 15 bp, Homo sapiens
gggtttatttgtttt

SEQ ID NO: 1432125 - DNA, 15 bp, Homo sapiens
ggtttatttgttttt

SEQ ID NO: 1432126 - DNA, 15 bp, Homo sapiens
gtttatttgtttttt

SEQ ID NO: 1432127 - DNA, 15 bp, Homo sapiens
tttatttgttttttt

SEQ ID NO: 1432128 - DNA, 15 bp, Homo sapiens
ttatttgtttttttc

SEQ ID NO: 1432129 - DNA, 15 bp, Homo sapiens
tatttgtttttttct

SEQ ID NO: 1432130 - DNA, 15 bp, Homo sapiens
atttgtttttttctt

SEQ ID NO: 1432131 - DNA, 15 bp, Homo sapiens
tttgtttttttcttt

SEQ ID NO: 1432132 - DNA, 15 bp, Homo sapiens
ttgtttttttctttt

SEQ ID NO: 1432133 - DNA, 15 bp, Homo sapiens
tgtttttttcttttt

SEQ ID NO: 1432134 - DNA, 15 bp, Homo sapiens
ttttcttttttttcg

SEQ ID NO: 1432135 - DNA, 15 bp, Homo sapiens
tttcttttttttcgg

SEQ ID NO: 1432136 - DNA, 15 bp, Homo sapiens
ttcttttttttcggt

SEQ ID NO: 1432137 - DNA, 15 bp, Homo sapiens
tcttttttttcggta

SEQ ID NO: 1432138 - DNA, 15 bp, Homo sapiens
cttttttttcggtaa

SEQ ID NO: 1432139 - DNA, 15 bp, Homo sapiens
ttttttttcggtaat

SEQ ID NO: 1432140 - DNA, 15 bp, Homo sapiens
tttttttcggtaatt

SEQ ID NO: 1432141 - DNA, 15 bp, Homo sapiens
ttttttcggtaattg

SEQ ID NO: 1432142 - DNA, 15 bp, Homo sapiens
tttttcggtaattga

SEQ ID NO: 1432143 - DNA, 15 bp, Homo sapiens
ttttcggtaattgaa

SEQ ID NO: 1432144 - DNA, 15 bp, Homo sapiens
tttcggtaattgaaa

SEQ ID NO: 1432145 - DNA, 15 bp, Homo sapiens
ttcggtaattgaaaa

SEQ ID NO: 1432146 - DNA, 15 bp, Homo sapiens
tcggtaattgaaaat

SEQ ID NO: 1432147 - DNA, 15 bp, Homo sapiens
cggtaattgaaaatg

SEQ ID NO: 1432148 - DNA, 15 bp, Homo sapiens
ggtaattgaaaatgt

SEQ ID NO: 1432149 - DNA, 15 bp, Homo sapiens
gtaattgaaaatgtg

SEQ ID NO: 1432150 - DNA, 15 bp, Homo sapiens
taattgaaaatgtga

SEQ ID NO: 1432151 - DNA, 15 bp, Homo sapiens
aattgaaaatgtgaa

SEQ ID NO: 1432152 - DNA, 15 bp, Homo sapiens
attgaaaatgtgaag

SEQ ID NO: 1432153 - DNA, 15 bp, Homo sapiens
ttgaaaatgtgaagc

SEQ ID NO: 1432154 - DNA, 15 bp, Homo sapiens
tgaaaatgtgaagca

SEQ ID NO: 1432155 - DNA, 15 bp, Homo sapiens
gaaaatgtgaagcaa

SEQ ID NO: 1432156 - DNA, 15 bp, Homo sapiens
aaaatgtgaagcaaa

SEQ ID NO: 1432157 - DNA, 15 bp, Homo sapiens
aaatgtgaagcaaaa

SEQ ID NO: 1432158 - DNA, 15 bp, Homo sapiens
aatgtgaagcaaaat

SEQ ID NO: 1432159 - DNA, 15 bp, Homo sapiens
atgtgaagcaaaatg

SEQ ID NO: 1432160 - DNA, 15 bp, Homo sapiens
tgtgaagcaaaatgt

SEQ ID NO: 1432161 - DNA, 15 bp, Homo sapiens
gtgaagcaaaatgtc

SEQ ID NO: 1432162 - DNA, 15 bp, Homo sapiens
tgaagcaaaatgtca

SEQ ID NO: 1432163 - DNA, 15 bp, Homo sapiens
gaagcaaaatgtcac

SEQ ID NO: 1432164 - DNA, 15 bp, Homo sapiens
aagcaaaatgtcacc

SEQ ID NO: 1432165 - DNA, 15 bp, Homo sapiens
agcaaaatgtcacct

SEQ ID NO: 1432166 - DNA, 15 bp, Homo sapiens
gcaaaatgtcacctg

SEQ ID NO: 1432167 - DNA, 15 bp, Homo sapiens
caaaatgtcacctgt

SEQ ID NO: 1432168 - DNA, 15 bp, Homo sapiens
aaaatgtcacctgtt

SEQ ID NO: 1432169 - DNA, 15 bp, Homo sapiens
aaatgtcacctgttt

SEQ ID NO: 1432170 - DNA, 15 bp, Homo sapiens
aatgtcacctgtttt

SEQ ID NO: 1432171 - DNA, 15 bp, Homo sapiens
atgtcacctgttttt

SEQ ID NO: 1432172 - DNA, 15 bp, Homo sapiens
tgtcacctgtttttt

SEQ ID NO: 1432173 - DNA, 15 bp, Homo sapiens
gtcacctgttttttc

SEQ ID NO: 1432174 - DNA, 15 bp, Homo sapiens
tcacctgttttttct

SEQ ID NO: 1432175 - DNA, 15 bp, Homo sapiens
cacctgttttttctt

SEQ ID NO: 1432176 - DNA, 15 bp, Homo sapiens
acctgttttttcttt

SEQ ID NO: 1432177 - DNA, 15 bp, Homo sapiens
cctgttttttctttc

SEQ ID NO: 1432178 - DNA, 15 bp, Homo sapiens
ctgttttttctttca

SEQ ID NO: 1432179 - DNA, 15 bp, Homo sapiens
tgttttttctttcat

SEQ ID NO: 1432180 - DNA, 15 bp, Homo sapiens
gttttttctttcatg

SEQ ID NO: 1432181 - DNA, 15 bp, Homo sapiens
ttttttctttcatgt

SEQ ID NO: 1432182 - DNA, 15 bp, Homo sapiens
tttttctttcatgtc

SEQ ID NO: 1432183 - DNA, 15 bp, Homo sapiens
ttttctttcatgtct

SEQ ID NO: 1432184 - DNA, 15 bp, Homo sapiens
tttctttcatgtctg

SEQ ID NO: 1432185 - DNA, 15 bp, Homo sapiens
ttctttcatgtctga

SEQ ID NO: 1432186 - DNA, 15 bp, Homo sapiens
tctttcatgtctgac

SEQ ID NO: 1432187 - DNA, 15 bp, Homo sapiens
ctttcatgtctgaca

SEQ ID NO: 1432188 - DNA, 15 bp, Homo sapiens
tttcatgtctgacac

SEQ ID NO: 1432189 - DNA, 15 bp, Homo sapiens
ttcatgtctgacact

SEQ ID NO: 1432190 - DNA, 15 bp, Homo sapiens
tcatgtctgacactc

SEQ ID NO: 1432191 - DNA, 15 bp, Homo sapiens
catgtctgacactca

SEQ ID NO: 1432192 - DNA, 15 bp, Homo sapiens
atgtctgacactcat

SEQ ID NO: 1432193 - DNA, 15 bp, Homo sapiens
tgtctgacactcatg

SEQ ID NO: 1432194 - DNA, 15 bp, Homo sapiens
gtctgacactcatgt

SEQ ID NO: 1432195 - DNA, 15 bp, Homo sapiens
tctgacactcatgtc

SEQ ID NO: 1432196 - DNA, 15 bp, Homo sapiens
ctgacactcatgtct

SEQ ID NO: 1432197 - DNA, 15 bp, Homo sapiens
tgacactcatgtctt

SEQ ID NO: 1432198 - DNA, 15 bp, Homo sapiens
gacactcatgtcttg

SEQ ID NO: 1432199 - DNA, 15 bp, Homo sapiens
acactcatgtcttgt

SEQ ID NO: 1432200 - DNA, 15 bp, Homo sapiens
cactcatgtcttgtt

SEQ ID NO: 1432201 - DNA, 15 bp, Homo sapiens
actcatgtcttgttt

SEQ ID NO: 1432202 - DNA, 15 bp, Homo sapiens
ctcatgtcttgttta

SEQ ID NO: 1432203 - DNA, 15 bp, Homo sapiens
tcatgtcttgtttac

SEQ ID NO: 1432204 - DNA, 15 bp, Homo sapiens
catgtcttgtttacc

SEQ ID NO: 1432205 - DNA, 15 bp, Homo sapiens
atgtcttgtttaccc

SEQ ID NO: 1432206 - DNA, 15 bp, Homo sapiens
tgtcttgtttacccc

SEQ ID NO: 1432207 - DNA, 15 bp, Homo sapiens
gtcttgtttaccccc

SEQ ID NO: 1432208 - DNA, 15 bp, Homo sapiens
tcttgtttacccccg

SEQ ID NO: 1432209 - DNA, 15 bp, Homo sapiens
cttgtttacccccga

SEQ ID NO: 1432210 - DNA, 15 bp, Homo sapiens
ttgtttacccccgac

SEQ ID NO: 1432211 - DNA, 15 bp, Homo sapiens
tgtttacccccgaca

SEQ ID NO: 1432212 - DNA, 15 bp, Homo sapiens
gtttacccccgacat

SEQ ID NO: 1432213 - DNA, 15 bp, Homo sapiens
tttacccccgacatg

SEQ ID NO: 1432214 - DNA, 15 bp, Homo sapiens
ttacccccgacatgc

SEQ ID NO: 1432215 - DNA, 15 bp, Homo sapiens
tacccccgacatgca

SEQ ID NO: 1432216 - DNA, 15 bp, Homo sapiens
acccccgacatgcag

SEQ ID NO: 1432217 - DNA, 15 bp, Homo sapiens
cccccgacatgcaga

SEQ ID NO: 1432218 - DNA, 15 bp, Homo sapiens
ccccgacatgcagaa

SEQ ID NO: 1432219 - DNA, 15 bp, Homo sapiens
cccgacatgcagaag

SEQ ID NO: 1432220 - DNA, 15 bp, Homo sapiens
ccgacatgcagaagc

SEQ ID NO: 1432221 - DNA, 15 bp, Homo sapiens
cgacatgcagaagct

SEQ ID NO: 1432222 - DNA, 15 bp, Homo sapiens
gacatgcagaagctg

SEQ ID NO: 1432223 - DNA, 15 bp, Homo sapiens
acatgcagaagctga

SEQ ID NO: 1432224 - DNA, 15 bp, Homo sapiens
catgcagaagctgaa

SEQ ID NO: 1432225 - DNA, 15 bp, Homo sapiens
atgcagaagctgaaa

SEQ ID NO: 1432226 - DNA, 15 bp, Homo sapiens
tgcagaagctgaaat

SEQ ID NO: 1432227 - DNA, 15 bp, Homo sapiens
gcagaagctgaaatc

SEQ ID NO: 1432228 - DNA, 15 bp, Homo sapiens
cagaagctgaaatcc

SEQ ID NO: 1432229 - DNA, 15 bp, Homo sapiens
agaagctgaaatccc

SEQ ID NO: 1432230 - DNA, 15 bp, Homo sapiens
gaagctgaaatcccc

SEQ ID NO: 1432231 - DNA, 15 bp, Homo sapiens
aagctgaaatcccca

SEQ ID NO: 1432232 - DNA, 15 bp, Homo sapiens
agctgaaatccccat

SEQ ID NO: 1432233 - DNA, 15 bp, Homo sapiens
gctgaaatccccatt

SEQ ID NO: 1432234 - DNA, 15 bp, Homo sapiens
ctgaaatccccattt

SEQ ID NO: 1432235 - DNA, 15 bp, Homo sapiens
tgaaatccccatttc

SEQ ID NO: 1432236 - DNA, 15 bp, Homo sapiens
gaaatccccatttca

SEQ ID NO: 1432237 - DNA, 15 bp, Homo sapiens
aaatccccatttcat

SEQ ID NO: 1432238 - DNA, 15 bp, Homo sapiens
aatccccatttcata

SEQ ID NO: 1432239 - DNA, 15 bp, Homo sapiens
atccccatttcatac

SEQ ID NO: 1432240 - DNA, 15 bp, Homo sapiens
tccccatttcataca

SEQ ID NO: 1432241 - DNA, 15 bp, Homo sapiens
ccccatttcatacag

SEQ ID NO: 1432242 - DNA, 15 bp, Homo sapiens
cccatttcatacagt

SEQ ID NO: 1432243 - DNA, 15 bp, Homo sapiens
ccatttcatacagtc

SEQ ID NO: 1432244 - DNA, 15 bp, Homo sapiens
catttcatacagtct

SEQ ID NO: 1432245 - DNA, 15 bp, Homo sapiens
attgaattccatttg

SEQ ID NO: 1432246 - DNA, 15 bp, Homo sapiens
ttgaattccatttgg

SEQ ID NO: 1432247 - DNA, 15 bp, Homo sapiens
tgaattccatttggt

SEQ ID NO: 1432248 - DNA, 15 bp, Homo sapiens
gaattccatttggtg

SEQ ID NO: 1432249 - DNA, 15 bp, Homo sapiens
aattccatttggtgc

SEQ ID NO: 1432250 - DNA, 15 bp, Homo sapiens
attccatttggtgct

SEQ ID NO: 1432251 - DNA, 15 bp, Homo sapiens
ttccatttggtgcta

SEQ ID NO: 1432252 - DNA, 15 bp, Homo sapiens
tccatttggtgctag

SEQ ID NO: 1432253 - DNA, 15 bp, Homo sapiens
ccatttggtgctagc

SEQ ID NO: 1432254 - DNA, 15 bp, Homo sapiens
catttggtgctagca

SEQ ID NO: 1432255 - DNA, 15 bp, Homo sapiens
atttggtgctagcat

SEQ ID NO: 1432256 - DNA, 15 bp, Homo sapiens
tttggtgctagcatc

SEQ ID NO: 1432257 - DNA, 15 bp, Homo sapiens
ttggtgctagcatct

SEQ ID NO: 1432258 - DNA, 15 bp, Homo sapiens
tggtgctagcatctg

SEQ ID NO: 1432259 - DNA, 15 bp, Homo sapiens
ggtgctagcatctgt

SEQ ID NO: 1432260 - DNA, 15 bp, Homo sapiens
gtgctagcatctgtc

SEQ ID NO: 1432261 - DNA, 15 bp, Homo sapiens
tgctagcatctgtct

SEQ ID NO: 1432262 - DNA, 15 bp, Homo sapiens
gctagcatctgtctg

SEQ ID NO: 1432263 - DNA, 15 bp, Homo sapiens
ctagcatctgtctgt

SEQ ID NO: 1432264 - DNA, 15 bp, Homo sapiens
tagcatctgtctgtt

SEQ ID NO: 1432265 - DNA, 15 bp, Homo sapiens
agcatctgtctgttg

SEQ ID NO: 1432266 - DNA, 15 bp, Homo sapiens
gcatctgtctgttgc

SEQ ID NO: 1432267 - DNA, 15 bp, Homo sapiens
catctgtctgttgca

SEQ ID NO: 1432268 - DNA, 15 bp, Homo sapiens
atctgtctgttgcat

SEQ ID NO: 1432269 - DNA, 15 bp, Homo sapiens
tctgtctgttgcatt

SEQ ID NO: 1432270 - DNA, 15 bp, Homo sapiens
ctgtctgttgcattg

SEQ ID NO: 1432271 - DNA, 15 bp, Homo sapiens
tgtctgttgcattgc

SEQ ID NO: 1432272 - DNA, 15 bp, Homo sapiens
gtctgttgcattgct

SEQ ID NO: 1432273 - DNA, 15 bp, Homo sapiens
tctgttgcattgctt

SEQ ID NO: 1432274 - DNA, 15 bp, Homo sapiens
ctgttgcattgcttg

SEQ ID NO: 1432275 - DNA, 15 bp, Homo sapiens
tgttgcattgcttgt

SEQ ID NO: 1432276 - DNA, 15 bp, Homo sapiens
gttgcattgcttgtg

SEQ ID NO: 1432277 - DNA, 15 bp, Homo sapiens
ttgcattgcttgtgt

SEQ ID NO: 1432278 - DNA, 15 bp, Homo sapiens
tgcattgcttgtgtt

SEQ ID NO: 1432279 - DNA, 15 bp, Homo sapiens
gcattgcttgtgttt

SEQ ID NO: 1432280 - DNA, 15 bp, Homo sapiens
cattgcttgtgttta

SEQ ID NO: 1432281 - DNA, 15 bp, Homo sapiens
attgcttgtgtttat

SEQ ID NO: 1432282 - DNA, 15 bp, Homo sapiens
ttgcttgtgtttata

SEQ ID NO: 1432283 - DNA, 15 bp, Homo sapiens
tgcttgtgtttataa

SEQ ID NO: 1432284 - DNA, 15 bp, Homo sapiens
gcttgtgtttataaa

SEQ ID NO: 1432285 - DNA, 15 bp, Homo sapiens
cttgtgtttataaaa

SEQ ID NO: 1432286 - DNA, 15 bp, Homo sapiens
ttgtgtttataaaat

SEQ ID NO: 1432287 - DNA, 15 bp, Homo sapiens
tgtgtttataaaatt

SEQ ID NO: 1432288 - DNA, 15 bp, Homo sapiens
gtgtttataaaattc

SEQ ID NO: 1432289 - DNA, 15 bp, Homo sapiens
tgtttataaaattct

SEQ ID NO: 1432290 - DNA, 15 bp, Homo sapiens
gtttataaaattctg

SEQ ID NO: 1432291 - DNA, 15 bp, Homo sapiens
tttataaaattctgc

SEQ ID NO: 1432292 - DNA, 15 bp, Homo sapiens
ttataaaattctgcc

SEQ ID NO: 1432293 - DNA, 15 bp, Homo sapiens
tataaaattctgcct

SEQ ID NO: 1432294 - DNA, 15 bp, Homo sapiens
ataaaattctgcctg

SEQ ID NO: 1432295 - DNA, 15 bp, Homo sapiens
taaaattctgcctga

SEQ ID NO: 1432296 - DNA, 15 bp, Homo sapiens
aaaattctgcctgat

SEQ ID NO: 1432297 - DNA, 15 bp, Homo sapiens
aaattctgcctgata

SEQ ID NO: 1432298 - DNA, 15 bp, Homo sapiens
aattctgcctgatat

SEQ ID NO: 1432299 - DNA, 15 bp, Homo sapiens
attctgcctgatata

SEQ ID NO: 1432300 - DNA, 15 bp, Homo sapiens
ttctgcctgatatac

SEQ ID NO: 1432301 - DNA, 15 bp, Homo sapiens
tctgcctgatatact

SEQ ID NO: 1432302 - DNA, 15 bp, Homo sapiens
ctgcctgatatactt

SEQ ID NO: 1432303 - DNA, 15 bp, Homo sapiens
tgcctgatatacttg

SEQ ID NO: 1432304 - DNA, 15 bp, Homo sapiens
gcctgatatacttgt

SEQ ID NO: 1432305 - DNA, 15 bp, Homo sapiens
cctgatatacttgtt

SEQ ID NO: 1432306 - DNA, 15 bp, Homo sapiens
ctgatatacttgttt

SEQ ID NO: 1432307 - DNA, 15 bp, Homo sapiens
tgatatacttgttta

SEQ ID NO: 1432308 - DNA, 15 bp, Homo sapiens
gatatacttgtttaa

SEQ ID NO: 1432309 - DNA, 15 bp, Homo sapiens
atatacttgtttaaa

SEQ ID NO: 1432310 - DNA, 15 bp, Homo sapiens
tatacttgtttaaaa

SEQ ID NO: 1432311 - DNA, 15 bp, Homo sapiens
atacttgtttaaaaa

SEQ ID NO: 1432312 - DNA, 15 bp, Homo sapiens
tacttgtttaaaaac

SEQ ID NO: 1432313 - DNA, 15 bp, Homo sapiens
acttgtttaaaaacc

SEQ ID NO: 1432314 - DNA, 15 bp, Homo sapiens
cttgtttaaaaacca

SEQ ID NO: 1432315 - DNA, 15 bp, Homo sapiens
ttgtttaaaaaccaa

SEQ ID NO: 1432316 - DNA, 15 bp, Homo sapiens
tgtttaaaaaccaat

SEQ ID NO: 1432317 - DNA, 15 bp, Homo sapiens
gtttaaaaaccaatt

SEQ ID NO: 1432318 - DNA, 15 bp, Homo sapiens
tttaaaaaccaattt

SEQ ID NO: 1432319 - DNA, 15 bp, Homo sapiens
ttaaaaaccaatttg

SEQ ID NO: 1432320 - DNA, 15 bp, Homo sapiens
taaaaaccaatttgt

SEQ ID NO: 1432321 - DNA, 15 bp, Homo sapiens
aaaaaccaatttgtg

SEQ ID NO: 1432322 - DNA, 15 bp, Homo sapiens
aaaaccaatttgtgt

SEQ ID NO: 1432323 - DNA, 15 bp, Homo sapiens
aaaccaatttgtgta

SEQ ID NO: 1432324 - DNA, 15 bp, Homo sapiens
aaccaatttgtgtat

SEQ ID NO: 1432325 - DNA, 15 bp, Homo sapiens
accaatttgtgtatc

SEQ ID NO: 1432326 - DNA, 15 bp, Homo sapiens
ccaatttgtgtatca

SEQ ID NO: 1432327 - DNA, 15 bp, Homo sapiens
caatttgtgtatcat

SEQ ID NO: 1432328 - DNA, 15 bp, Homo sapiens
aatttgtgtatcata

SEQ ID NO: 1432329 - DNA, 15 bp, Homo sapiens
atttgtgtatcatag

SEQ ID NO: 1432330 - DNA, 15 bp, Homo sapiens
tttgtgtatcataga

SEQ ID NO: 1432331 - DNA, 15 bp, Homo sapiens
ttgtgtatcatagat

SEQ ID NO: 1432332 - DNA, 15 bp, Homo sapiens
tgtgtatcatagatt

SEQ ID NO: 1432333 - DNA, 15 bp, Homo sapiens
gtgtatcatagattg

SEQ ID NO: 1432334 - DNA, 15 bp, Homo sapiens
tgtatcatagattga

SEQ ID NO: 1432335 - DNA, 15 bp, Homo sapiens
gtatcatagattgat

SEQ ID NO: 1432336 - DNA, 15 bp, Homo sapiens
tatcatagattgatg

SEQ ID NO: 1432337 - DNA, 15 bp, Homo sapiens
atcatagattgatgc

SEQ ID NO: 1432338 - DNA, 15 bp, Homo sapiens
tcatagattgatgct

SEQ ID NO: 1432339 - DNA, 15 bp, Homo sapiens
catagattgatgctt

SEQ ID NO: 1432340 - DNA, 15 bp, Homo sapiens
atagattgatgcttt

SEQ ID NO: 1432341 - DNA, 15 bp, Homo sapiens
tagattgatgctttt

SEQ ID NO: 1432342 - DNA, 15 bp, Homo sapiens
agattgatgcttttg

SEQ ID NO: 1432343 - DNA, 15 bp, Homo sapiens
gattgatgcttttga

SEQ ID NO: 1432344 - DNA, 15 bp, Homo sapiens
attgatgcttttgaa

SEQ ID NO: 1432345 - DNA, 15 bp, Homo sapiens
ttgatgcttttgaaa

SEQ ID NO: 1432346 - DNA, 15 bp, Homo sapiens
tgatgcttttgaaaa

SEQ ID NO: 1432347 - DNA, 15 bp, Homo sapiens
gatgcttttgaaaaa

SEQ ID NO: 1432348 - DNA, 15 bp, Homo sapiens
atgcttttgaaaaaa

SEQ ID NO: 1432349 - DNA, 15 bp, Homo sapiens
tgcttttgaaaaaaa

SEQ ID NO: 1432350 - DNA, 15 bp, Homo sapiens
gcttttgaaaaaaat

SEQ ID NO: 1432351 - DNA, 15 bp, Homo sapiens
cttttgaaaaaaatc

SEQ ID NO: 1432352 - DNA, 15 bp, Homo sapiens
ttttgaaaaaaatca

SEQ ID NO: 1432353 - DNA, 15 bp, Homo sapiens
tttgaaaaaaatcag

SEQ ID NO: 1432354 - DNA, 15 bp, Homo sapiens
ttgaaaaaaatcagt

SEQ ID NO: 1432355 - DNA, 15 bp, Homo sapiens
tgaaaaaaatcagta

SEQ ID NO: 1432356 - DNA, 15 bp, Homo sapiens
gaaaaaaatcagtat

SEQ ID NO: 1432357 - DNA, 15 bp, Homo sapiens
aaaaaaatcagtatt

SEQ ID NO: 1432358 - DNA, 15 bp, Homo sapiens
aaaaaatcagtattc

SEQ ID NO: 1432359 - DNA, 15 bp, Homo sapiens
aaaaatcagtattct

SEQ ID NO: 1432360 - DNA, 15 bp, Homo sapiens
aaaatcagtattcta

SEQ ID NO: 1432361 - DNA, 15 bp, Homo sapiens
aaatcagtattctaa

SEQ ID NO: 1432362 - DNA, 15 bp, Homo sapiens
aatcagtattctaac

SEQ ID NO: 1432363 - DNA, 15 bp, Homo sapiens
atcagtattctaacc

SEQ ID NO: 1432364 - DNA, 15 bp, Homo sapiens
tcagtattctaacct

SEQ ID NO: 1432365 - DNA, 15 bp, Homo sapiens
cagtattctaacctg

SEQ ID NO: 1432366 - DNA, 15 bp, Homo sapiens
agtattctaacctga

SEQ ID NO: 1432367 - DNA, 15 bp, Homo sapiens
gtattctaacctgaa

SEQ ID NO: 1432368 - DNA, 15 bp, Homo sapiens
tattctaacctgaat

SEQ ID NO: 1432369 - DNA, 15 bp, Homo sapiens
attctaacctgaatt

SEQ ID NO: 1432370 - DNA, 15 bp, Homo sapiens
ttctaacctgaatta

SEQ ID NO: 1432371 - DNA, 15 bp, Homo sapiens
tctaacctgaattat

SEQ ID NO: 1432372 - DNA, 15 bp, Homo sapiens
ctaacctgaattatc

SEQ ID NO: 1432373 - DNA, 15 bp, Homo sapiens
taacctgaattatca

SEQ ID NO: 1432374 - DNA, 15 bp, Homo sapiens
aacctgaattatcac

SEQ ID NO: 1432375 - DNA, 15 bp, Homo sapiens
acctgaattatcact

SEQ ID NO: 1432376 - DNA, 15 bp, Homo sapiens
cctgaattatcacta

SEQ ID NO: 1432377 - DNA, 15 bp, Homo sapiens
ctgaattatcactat

SEQ ID NO: 1432378 - DNA, 15 bp, Homo sapiens
tgaattatcactatc

SEQ ID NO: 1432379 - DNA, 15 bp, Homo sapiens
gaattatcactatca

SEQ ID NO: 1432380 - DNA, 15 bp, Homo sapiens
aattatcactatcag

SEQ ID NO: 1432381 - DNA, 15 bp, Homo sapiens
attatcactatcaga

SEQ ID NO: 1432382 - DNA, 15 bp, Homo sapiens
ttatcactatcagaa

SEQ ID NO: 1432383 - DNA, 15 bp, Homo sapiens
tatcactatcagaac

SEQ ID NO: 1432384 - DNA, 15 bp, Homo sapiens
atcactatcagaaca

SEQ ID NO: 1432385 - DNA, 15 bp, Homo sapiens
tcactatcagaacaa

SEQ ID NO: 1432386 - DNA, 15 bp, Homo sapiens
cactatcagaacaaa

SEQ ID NO: 1432387 - DNA, 15 bp, Homo sapiens
actatcagaacaaag

SEQ ID NO: 1432388 - DNA, 15 bp, Homo sapiens
ctatcagaacaaagc

SEQ ID NO: 1432389 - DNA, 15 bp, Homo sapiens
tatcagaacaaagca

SEQ ID NO: 1432390 - DNA, 15 bp, Homo sapiens
atcagaacaaagcag

SEQ ID NO: 1432391 - DNA, 15 bp, Homo sapiens
tcagaacaaagcagt

SEQ ID NO: 1432392 - DNA, 15 bp, Homo sapiens
cagaacaaagcagta

SEQ ID NO: 1432393 - DNA, 15 bp, Homo sapiens
agaacaaagcagtaa

SEQ ID NO: 1432394 - DNA, 15 bp, Homo sapiens
gaacaaagcagtaaa

SEQ ID NO: 1432395 - DNA, 15 bp, Homo sapiens
aacaaagcagtaaag

SEQ ID NO: 1432396 - DNA, 15 bp, Homo sapiens
acaaagcagtaaagt

SEQ ID NO: 1432397 - DNA, 15 bp, Homo sapiens
caaagcagtaaagta

SEQ ID NO: 1432398 - DNA, 15 bp, Homo sapiens
aaagcagtaaagtag

SEQ ID NO: 1432399 - DNA, 15 bp, Homo sapiens
aagcagtaaagtaga

SEQ ID NO: 1432400 - DNA, 15 bp, Homo sapiens
agcagtaaagtagat

SEQ ID NO: 1432401 - DNA, 15 bp, Homo sapiens
gcagtaaagtagatt

SEQ ID NO: 1432402 - DNA, 15 bp, Homo sapiens
cagtaaagtagattt

SEQ ID NO: 1432403 - DNA, 15 bp, Homo sapiens
agtaaagtagatttg

SEQ ID NO: 1432404 - DNA, 15 bp, Homo sapiens
gtaaagtagatttgt

SEQ ID NO: 1432405 - DNA, 15 bp, Homo sapiens
taaagtagatttgtt

SEQ ID NO: 1432406 - DNA, 15 bp, Homo sapiens
aaagtagatttgttt

SEQ ID NO: 1432407 - DNA, 15 bp, Homo sapiens
aagtagatttgtttt

SEQ ID NO: 1432408 - DNA, 15 bp, Homo sapiens
agtagatttgttttc

SEQ ID NO: 1432409 - DNA, 15 bp, Homo sapiens
gtagatttgttttct

SEQ ID NO: 1432410 - DNA, 15 bp, Homo sapiens
tagatttgttttctc

SEQ ID NO: 1432411 - DNA, 15 bp, Homo sapiens
agatttgttttctca

SEQ ID NO: 1432412 - DNA, 15 bp, Homo sapiens
gatttgttttctcat

SEQ ID NO: 1432413 - DNA, 15 bp, Homo sapiens
atttgttttctcatt

SEQ ID NO: 1432414 - DNA, 15 bp, Homo sapiens
tttgttttctcattc

SEQ ID NO: 1432415 - DNA, 15 bp, Homo sapiens
ttgttttctcattcc

SEQ ID NO: 1432416 - DNA, 15 bp, Homo sapiens
tgttttctcattcca

SEQ ID NO: 1432417 - DNA, 15 bp, Homo sapiens
gttttctcattccat

SEQ ID NO: 1432418 - DNA, 15 bp, Homo sapiens
ttttctcattccatt

SEQ ID NO: 1432419 - DNA, 15 bp, Homo sapiens
tttctcattccattt

SEQ ID NO: 1432420 - DNA, 15 bp, Homo sapiens
ttctcattccattta

SEQ ID NO: 1432421 - DNA, 15 bp, Homo sapiens
tctcattccatttaa

SEQ ID NO: 1432422 - DNA, 15 bp, Homo sapiens
ctcattccatttaaa

SEQ ID NO: 1432423 - DNA, 15 bp, Homo sapiens
tcattccatttaaag

SEQ ID NO: 1432424 - DNA, 15 bp, Homo sapiens
cattccatttaaagc

SEQ ID NO: 1432425 - DNA, 15 bp, Homo sapiens
attccatttaaagca

SEQ ID NO: 1432426 - DNA, 15 bp, Homo sapiens
ttccatttaaagcag

SEQ ID NO: 1432427 - DNA, 15 bp, Homo sapiens
tccatttaaagcagt

SEQ ID NO: 1432428 - DNA, 15 bp, Homo sapiens
ccatttaaagcagta

SEQ ID NO: 1432429 - DNA, 15 bp, Homo sapiens
catttaaagcagtat

SEQ ID NO: 1432430 - DNA, 15 bp, Homo sapiens
atttaaagcagtatt

SEQ ID NO: 1432431 - DNA, 15 bp, Homo sapiens
tttaaagcagtatta

SEQ ID NO: 1432432 - DNA, 15 bp, Homo sapiens
ttaaagcagtattaa

SEQ ID NO: 1432433 - DNA, 15 bp, Homo sapiens
taaagcagtattaac

SEQ ID NO: 1432434 - DNA, 15 bp, Homo sapiens
aaagcagtattaact

SEQ ID NO: 1432435 - DNA, 15 bp, Homo sapiens
aagcagtattaactt

SEQ ID NO: 1432436 - DNA, 15 bp, Homo sapiens
agcagtattaacttc

SEQ ID NO: 1432437 - DNA, 15 bp, Homo sapiens
gcagtattaacttca

SEQ ID NO: 1432438 - DNA, 15 bp, Homo sapiens
cagtattaacttcac

SEQ ID NO: 1432439 - DNA, 15 bp, Homo sapiens
agtattaacttcaca

SEQ ID NO: 1432440 - DNA, 15 bp, Homo sapiens
gtattaacttcacag

SEQ ID NO: 1432441 - DNA, 15 bp, Homo sapiens
tattaacttcacaga

SEQ ID NO: 1432442 - DNA, 15 bp, Homo sapiens
attaacttcacagaa

SEQ ID NO: 1432443 - DNA, 15 bp, Homo sapiens
ttaacttcacagaaa

SEQ ID NO: 1432444 - DNA, 15 bp, Homo sapiens
taacttcacagaaaa

SEQ ID NO: 1432445 - DNA, 15 bp, Homo sapiens
aacttcacagaaaag

SEQ ID NO: 1432446 - DNA, 15 bp, Homo sapiens
acttcacagaaaagt

SEQ ID NO: 1432447 - DNA, 15 bp, Homo sapiens
cttcacagaaaagta

SEQ ID NO: 1432448 - DNA, 15 bp, Homo sapiens
ttcacagaaaagtag

SEQ ID NO: 1432449 - DNA, 15 bp, Homo sapiens
tcacagaaaagtagt

SEQ ID NO: 1432450 - DNA, 15 bp, Homo sapiens
cacagaaaagtagtg

SEQ ID NO: 1432451 - DNA, 15 bp, Homo sapiens
acagaaaagtagtga

SEQ ID NO: 1432452 - DNA, 15 bp, Homo sapiens
cagaaaagtagtgaa

SEQ ID NO: 1432453 - DNA, 15 bp, Homo sapiens
agaaaagtagtgaat

SEQ ID NO: 1432454 - DNA, 15 bp, Homo sapiens
gaaaagtagtgaata

SEQ ID NO: 1432455 - DNA, 15 bp, Homo sapiens
aaaagtagtgaatac

SEQ ID NO: 1432456 - DNA, 15 bp, Homo sapiens
aaagtagtgaatacc

SEQ ID NO: 1432457 - DNA, 15 bp, Homo sapiens
aagtagtgaataccc

SEQ ID NO: 1432458 - DNA, 15 bp, Homo sapiens
agtagtgaataccct

SEQ ID NO: 1432459 - DNA, 15 bp, Homo sapiens
gtagtgaatacccta

SEQ ID NO: 1432460 - DNA, 15 bp, Homo sapiens
tagtgaataccctat

SEQ ID NO: 1432461 - DNA, 15 bp, Homo sapiens
agtgaataccctata

SEQ ID NO: 1432462 - DNA, 15 bp, Homo sapiens
gtgaataccctataa

SEQ ID NO: 1432463 - DNA, 15 bp, Homo sapiens
tgaataccctataag

SEQ ID NO: 1432464 - DNA, 15 bp, Homo sapiens
gaataccctataagc

SEQ ID NO: 1432465 - DNA, 15 bp, Homo sapiens
aataccctataagcc

SEQ ID NO: 1432466 - DNA, 15 bp, Homo sapiens
ataccctataagcca

SEQ ID NO: 1432467 - DNA, 15 bp, Homo sapiens
taccctataagccag

SEQ ID NO: 1432468 - DNA, 15 bp, Homo sapiens
accctataagccaga

SEQ ID NO: 1432469 - DNA, 15 bp, Homo sapiens
ccctataagccagaa

SEQ ID NO: 1432470 - DNA, 15 bp, Homo sapiens
cctataagccagaat

SEQ ID NO: 1432471 - DNA, 15 bp, Homo sapiens
ctataagccagaatc

SEQ ID NO: 1432472 - DNA, 15 bp, Homo sapiens
tataagccagaatcc

SEQ ID NO: 1432473 - DNA, 15 bp, Homo sapiens
ataagccagaatcca

SEQ ID NO: 1432474 - DNA, 15 bp, Homo sapiens
taagccagaatccag

SEQ ID NO: 1432475 - DNA, 15 bp, Homo sapiens
aagccagaatccaga

SEQ ID NO: 1432476 - DNA, 15 bp, Homo sapiens
agccagaatccagaa

SEQ ID NO: 1432477 - DNA, 15 bp, Homo sapiens
gccagaatccagaag

SEQ ID NO: 1432478 - DNA, 15 bp, Homo sapiens
ccagaatccagaagg

SEQ ID NO: 1432479 - DNA, 15 bp, Homo sapiens
cagaatccagaaggc

SEQ ID NO: 1432480 - DNA, 15 bp, Homo sapiens
agaatccagaaggcc

SEQ ID NO: 1432481 - DNA, 15 bp, Homo sapiens
gaatccagaaggcct

SEQ ID NO: 1432482 - DNA, 15 bp, Homo sapiens
aatccagaaggcctt

SEQ ID NO: 1432483 - DNA, 15 bp, Homo sapiens
atccagaaggccttt

SEQ ID NO: 1432484 - DNA, 15 bp, Homo sapiens
tccagaaggcctttc

SEQ ID NO: 1432485 - DNA, 15 bp, Homo sapiens
ccagaaggcctttct

SEQ ID NO: 1432486 - DNA, 15 bp, Homo sapiens
cagaaggcctttctg

SEQ ID NO: 1432487 - DNA, 15 bp, Homo sapiens
agaaggcctttctgc

SEQ ID NO: 1432488 - DNA, 15 bp, Homo sapiens
gaaggcctttctgct

SEQ ID NO: 1432489 - DNA, 15 bp, Homo sapiens
aaggcctttctgctg

SEQ ID NO: 1432490 - DNA, 15 bp, Homo sapiens
aggcctttctgctga

SEQ ID NO: 1432491 - DNA, 15 bp, Homo sapiens
ggcctttctgctgac

SEQ ID NO: 1432492 - DNA, 15 bp, Homo sapiens
gcctttctgctgaca

SEQ ID NO: 1432493 - DNA, 15 bp, Homo sapiens
cctttctgctgacaa

SEQ ID NO: 1432494 - DNA, 15 bp, Homo sapiens
ctttctgctgacaag

SEQ ID NO: 1432495 - DNA, 15 bp, Homo sapiens
tttctgctgacaagt

SEQ ID NO: 1432496 - DNA, 15 bp, Homo sapiens
ttctgctgacaagtt

SEQ ID NO: 1432497 - DNA, 15 bp, Homo sapiens
tctgctgacaagttt

SEQ ID NO: 1432498 - DNA, 15 bp, Homo sapiens
ctgctgacaagtttg

SEQ ID NO: 1432499 - DNA, 15 bp, Homo sapiens
tgctgacaagtttga

SEQ ID NO: 1432500 - DNA, 15 bp, Homo sapiens
gctgacaagtttgag

SEQ ID NO: 1432501 - DNA, 15 bp, Homo sapiens
ctgacaagtttgagg

SEQ ID NO: 1432502 - DNA, 15 bp, Homo sapiens
tgacaagtttgaggt

SEQ ID NO: 1432503 - DNA, 15 bp, Homo sapiens
gacaagtttgaggtg

SEQ ID NO: 1432504 - DNA, 15 bp, Homo sapiens
acaagtttgaggtgt

SEQ ID NO: 1432505 - DNA, 15 bp, Homo sapiens
caagtttgaggtgtc

SEQ ID NO: 1432506 - DNA, 15 bp, Homo sapiens
aagtttgaggtgtct

SEQ ID NO: 1432507 - DNA, 15 bp, Homo sapiens
agtttgaggtgtctg

SEQ ID NO: 1432508 - DNA, 15 bp, Homo sapiens
gtttgaggtgtctgc

SEQ ID NO: 1432509 - DNA, 15 bp, Homo sapiens
tttgaggtgtctgca

SEQ ID NO: 1432510 - DNA, 15 bp, Homo sapiens
ttgaggtgtctgcag

SEQ ID NO: 1432511 - DNA, 15 bp, Homo sapiens
tgaggtgtctgcaga

SEQ ID NO: 1432512 - DNA, 15 bp, Homo sapiens
gaggtgtctgcagat

SEQ ID NO: 1432513 - DNA, 15 bp, Homo sapiens
aggtgtctgcagata

SEQ ID NO: 1432514 - DNA, 15 bp, Homo sapiens
ggtgtctgcagatag

SEQ ID NO: 1432515 - DNA, 15 bp, Homo sapiens
gtgtctgcagatagt

SEQ ID NO: 1432516 - DNA, 15 bp, Homo sapiens
tgtctgcagatagtt

SEQ ID NO: 1432517 - DNA, 15 bp, Homo sapiens
gtctgcagatagttc

SEQ ID NO: 1432518 - DNA, 15 bp, Homo sapiens
tctgcagatagttct

SEQ ID NO: 1432519 - DNA, 15 bp, Homo sapiens
ctgcagatagttcta

SEQ ID NO: 1432520 - DNA, 15 bp, Homo sapiens
tgcagatagttctac

SEQ ID NO: 1432521 - DNA, 15 bp, Homo sapiens
gcagatagttctacc

SEQ ID NO: 1432522 - DNA, 15 bp, Homo sapiens
cagatagttctacca

SEQ ID NO: 1432523 - DNA, 15 bp, Homo sapiens
agatagttctaccag

SEQ ID NO: 1432524 - DNA, 15 bp, Homo sapiens
gatagttctaccagt

SEQ ID NO: 1432525 - DNA, 15 bp, Homo sapiens
atagttctaccagta

SEQ ID NO: 1432526 - DNA, 15 bp, Homo sapiens
tagttctaccagtaa

SEQ ID NO: 1432527 - DNA, 15 bp, Homo sapiens
agttctaccagtaaa

SEQ ID NO: 1432528 - DNA, 15 bp, Homo sapiens
gttctaccagtaaaa

SEQ ID NO: 1432529 - DNA, 15 bp, Homo sapiens
ttctaccagtaaaaa

SEQ ID NO: 1432530 - DNA, 15 bp, Homo sapiens
tctaccagtaaaaat

SEQ ID NO: 1432531 - DNA, 15 bp, Homo sapiens
ctaccagtaaaaata

SEQ ID NO: 1432532 - DNA, 15 bp, Homo sapiens
taccagtaaaaataa

SEQ ID NO: 1432533 - DNA, 15 bp, Homo sapiens
accagtaaaaataaa

SEQ ID NO: 1432534 - DNA, 15 bp, Homo sapiens
ccagtaaaaataaag

SEQ ID NO: 1432535 - DNA, 15 bp, Homo sapiens
cagtaaaaataaaga

SEQ ID NO: 1432536 - DNA, 15 bp, Homo sapiens
agtaaaaataaagaa

SEQ ID NO: 1432537 - DNA, 15 bp, Homo sapiens
gtaaaaataaagaac

SEQ ID NO: 1432538 - DNA, 15 bp, Homo sapiens
taaaaataaagaacc

SEQ ID NO: 1432539 - DNA, 15 bp, Homo sapiens
aaaaataaagaacca

SEQ ID NO: 1432540 - DNA, 15 bp, Homo sapiens
aaaataaagaaccag

SEQ ID NO: 1432541 - DNA, 15 bp, Homo sapiens
aaataaagaaccagg

SEQ ID NO: 1432542 - DNA, 15 bp, Homo sapiens
aataaagaaccagga

SEQ ID NO: 1432543 - DNA, 15 bp, Homo sapiens
ataaagaaccaggag

SEQ ID NO: 1432544 - DNA, 15 bp, Homo sapiens
taaagaaccaggagt

SEQ ID NO: 1432545 - DNA, 15 bp, Homo sapiens
aaagaaccaggagtg

SEQ ID NO: 1432546 - DNA, 15 bp, Homo sapiens
aagaaccaggagtgg

SEQ ID NO: 1432547 - DNA, 15 bp, Homo sapiens
agaaccaggagtgga

SEQ ID NO: 1432548 - DNA, 15 bp, Homo sapiens
gaaccaggagtggaa

SEQ ID NO: 1432549 - DNA, 15 bp, Homo sapiens
aaccaggagtggaaa

SEQ ID NO: 1432550 - DNA, 15 bp, Homo sapiens
accaggagtggaaag

SEQ ID NO: 1432551 - DNA, 15 bp, Homo sapiens
ccaggagtggaaagg

SEQ ID NO: 1432552 - DNA, 15 bp, Homo sapiens
caggagtggaaaggt

SEQ ID NO: 1432553 - DNA, 15 bp, Homo sapiens
aggagtggaaaggta

SEQ ID NO: 1432554 - DNA, 15 bp, Homo sapiens
ggagtggaaaggtaa

SEQ ID NO: 1432555 - DNA, 15 bp, Homo sapiens
gagtggaaaggtaag

SEQ ID NO: 1432556 - DNA, 15 bp, Homo sapiens
agtggaaaggtaaga

SEQ ID NO: 1432557 - DNA, 15 bp, Homo sapiens
gtggaaaggtaagaa

SEQ ID NO: 1432558 - DNA, 15 bp, Homo sapiens
aaaggtaagaaacat

SEQ ID NO: 1432559 - DNA, 15 bp, Homo sapiens
aaggtaagaaacatc

SEQ ID NO: 1432560 - DNA, 15 bp, Homo sapiens
aggtaagaaacatca

SEQ ID NO: 1432561 - DNA, 15 bp, Homo sapiens
ggtaagaaacatcaa

SEQ ID NO: 1432562 - DNA, 15 bp, Homo sapiens
gtaagaaacatcaat

SEQ ID NO: 1432563 - DNA, 15 bp, Homo sapiens
taagaaacatcaatg

SEQ ID NO: 1432564 - DNA, 15 bp, Homo sapiens
aagaaacatcaatgt

SEQ ID NO: 1432565 - DNA, 15 bp, Homo sapiens
agaaacatcaatgta

SEQ ID NO: 1432566 - DNA, 15 bp, Homo sapiens
gaaacatcaatgtaa

SEQ ID NO: 1432567 - DNA, 15 bp, Homo sapiens
aaacatcaatgtaaa

SEQ ID NO: 1432568 - DNA, 15 bp, Homo sapiens
aacatcaatgtaaag

SEQ ID NO: 1432569 - DNA, 15 bp, Homo sapiens
acatcaatgtaaaga

SEQ ID NO: 1432570 - DNA, 15 bp, Homo sapiens
catcaatgtaaagat

SEQ ID NO: 1432571 - DNA, 15 bp, Homo sapiens
atcaatgtaaagatg

SEQ ID NO: 1432572 - DNA, 15 bp, Homo sapiens
tcaatgtaaagatgc

SEQ ID NO: 1432573 - DNA, 15 bp, Homo sapiens
caatgtaaagatgct

SEQ ID NO: 1432574 - DNA, 15 bp, Homo sapiens
aatgtaaagatgctg

SEQ ID NO: 1432575 - DNA, 15 bp, Homo sapiens
atgtaaagatgctgt

SEQ ID NO: 1432576 - DNA, 15 bp, Homo sapiens
tgtaaagatgctgtg

SEQ ID NO: 1432577 - DNA, 15 bp, Homo sapiens
gtaaagatgctgtgg

SEQ ID NO: 1432578 - DNA, 15 bp, Homo sapiens
taaagatgctgtggt

SEQ ID NO: 1432579 - DNA, 15 bp, Homo sapiens
aaagatgctgtggta

SEQ ID NO: 1432580 - DNA, 15 bp, Homo sapiens
aagatgctgtggtat

SEQ ID NO: 1432581 - DNA, 15 bp, Homo sapiens
agatgctgtggtatc

SEQ ID NO: 1432582 - DNA, 15 bp, Homo sapiens
gatgctgtggtatct

SEQ ID NO: 1432583 - DNA, 15 bp, Homo sapiens
atgctgtggtatctg

SEQ ID NO: 1432584 - DNA, 15 bp, Homo sapiens
tgctgtggtatctga

SEQ ID NO: 1432585 - DNA, 15 bp, Homo sapiens
gctgtggtatctgac

SEQ ID NO: 1432586 - DNA, 15 bp, Homo sapiens
ctgtggtatctgaca

SEQ ID NO: 1432587 - DNA, 15 bp, Homo sapiens
tgtggtatctgacat

SEQ ID NO: 1432588 - DNA, 15 bp, Homo sapiens
gtggtatctgacatc

SEQ ID NO: 1432589 - DNA, 15 bp, Homo sapiens
tggtatctgacatct

SEQ ID NO: 1432590 - DNA, 15 bp, Homo sapiens
ggtatctgacatctt

SEQ ID NO: 1432591 - DNA, 15 bp, Homo sapiens
gtatctgacatcttt

SEQ ID NO: 1432592 - DNA, 15 bp, Homo sapiens
tatctgacatcttta

SEQ ID NO: 1432593 - DNA, 15 bp, Homo sapiens
atctgacatctttat

SEQ ID NO: 1432594 - DNA, 15 bp, Homo sapiens
tctgacatctttatt

SEQ ID NO: 1432595 - DNA, 15 bp, Homo sapiens
ctgacatctttattt

SEQ ID NO: 1432596 - DNA, 15 bp, Homo sapiens
tgacatctttattta

SEQ ID NO: 1432597 - DNA, 15 bp, Homo sapiens
gacatctttatttat

SEQ ID NO: 1432598 - DNA, 15 bp, Homo sapiens
acatctttatttata

SEQ ID NO: 1432599 - DNA, 15 bp, Homo sapiens
catctttatttatat

SEQ ID NO: 1432600 - DNA, 15 bp, Homo sapiens
atctttatttatatt

SEQ ID NO: 1432601 - DNA, 15 bp, Homo sapiens
tctttatttatattg

SEQ ID NO: 1432602 - DNA, 15 bp, Homo sapiens
ctttatttatattga

SEQ ID NO: 1432603 - DNA, 15 bp, Homo sapiens
tttatttatattgaa

SEQ ID NO: 1432604 - DNA, 15 bp, Homo sapiens
ttatttatattgaac

SEQ ID NO: 1432605 - DNA, 15 bp, Homo sapiens
tatttatattgaact

SEQ ID NO: 1432606 - DNA, 15 bp, Homo sapiens
atttatattgaactc

SEQ ID NO: 1432607 - DNA, 15 bp, Homo sapiens
tttatattgaactct

SEQ ID NO: 1432608 - DNA, 15 bp, Homo sapiens
ttatattgaactctg

SEQ ID NO: 1432609 - DNA, 15 bp, Homo sapiens
tatattgaactctga

SEQ ID NO: 1432610 - DNA, 15 bp, Homo sapiens
atattgaactctgat

SEQ ID NO: 1432611 - DNA, 15 bp, Homo sapiens
tattgaactctgatt

SEQ ID NO: 1432612 - DNA, 15 bp, Homo sapiens
attgaactctgattg

SEQ ID NO: 1432613 - DNA, 15 bp, Homo sapiens
ttgaactctgattgt

SEQ ID NO: 1432614 - DNA, 15 bp, Homo sapiens
tgaactctgattgtt

SEQ ID NO: 1432615 - DNA, 15 bp, Homo sapiens
gaactctgattgtta

SEQ ID NO: 1432616 - DNA, 15 bp, Homo sapiens
aactctgattgttaa

SEQ ID NO: 1432617 - DNA, 15 bp, Homo sapiens
actctgattgttaat

SEQ ID NO: 1432618 - DNA, 15 bp, Homo sapiens
ctctgattgttaatt

SEQ ID NO: 1432619 - DNA, 15 bp, Homo sapiens
tctgattgttaattt

SEQ ID NO: 1432620 - DNA, 15 bp, Homo sapiens
ctgattgttaatttt

SEQ ID NO: 1432621 - DNA, 15 bp, Homo sapiens
tgattgttaattttt

SEQ ID NO: 1432622 - DNA, 15 bp, Homo sapiens
gattgttaatttttt

SEQ ID NO: 1432623 - DNA, 15 bp, Homo sapiens
attgttaattttttt

SEQ ID NO: 1432624 - DNA, 15 bp, Homo sapiens
ttgttaatttttttc

SEQ ID NO: 1432625 - DNA, 15 bp, Homo sapiens
tgttaatttttttca

SEQ ID NO: 1432626 - DNA, 15 bp, Homo sapiens
gttaatttttttcac

SEQ ID NO: 1432627 - DNA, 15 bp, Homo sapiens
ttaatttttttcacc

SEQ ID NO: 1432628 - DNA, 15 bp, Homo sapiens
taatttttttcacca

SEQ ID NO: 1432629 - DNA, 15 bp, Homo sapiens
aatttttttcaccat

SEQ ID NO: 1432630 - DNA, 15 bp, Homo sapiens
atttttttcaccata

SEQ ID NO: 1432631 - DNA, 15 bp, Homo sapiens
tttttttcaccatac

SEQ ID NO: 1432632 - DNA, 15 bp, Homo sapiens
ttttttcaccatact

SEQ ID NO: 1432633 - DNA, 15 bp, Homo sapiens
tttttcaccatactt

SEQ ID NO: 1432634 - DNA, 15 bp, Homo sapiens
ttttcaccatacttt

SEQ ID NO: 1432635 - DNA, 15 bp, Homo sapiens
tttcaccatactttc

SEQ ID NO: 1432636 - DNA, 15 bp, Homo sapiens
ttcaccatactttct

SEQ ID NO: 1432637 - DNA, 15 bp, Homo sapiens
tcaccatactttctc

SEQ ID NO: 1432638 - DNA, 15 bp, Homo sapiens
caccatactttctcc

SEQ ID NO: 1432639 - DNA, 15 bp, Homo sapiens
accatactttctcca

SEQ ID NO: 1432640 - DNA, 15 bp, Homo sapiens
ccatactttctccag

SEQ ID NO: 1432641 - DNA, 15 bp, Homo sapiens
catactttctccagt

SEQ ID NO: 1432642 - DNA, 15 bp, Homo sapiens
atactttctccagtt

SEQ ID NO: 1432643 - DNA, 15 bp, Homo sapiens
tactttctccagttt

SEQ ID NO: 1432644 - DNA, 15 bp, Homo sapiens
actttctccagtttt

SEQ ID NO: 1432645 - DNA, 15 bp, Homo sapiens
ctttctccagttttt

SEQ ID NO: 1432646 - DNA, 15 bp, Homo sapiens
tttctccagtttttt

SEQ ID NO: 1432647 - DNA, 15 bp, Homo sapiens
ttctccagttttttg

SEQ ID NO: 1432648 - DNA, 15 bp, Homo sapiens
tctccagttttttgc

SEQ ID NO: 1432649 - DNA, 15 bp, Homo sapiens
ctccagttttttgca

SEQ ID NO: 1432650 - DNA, 15 bp, Homo sapiens
tccagttttttgcat

SEQ ID NO: 1432651 - DNA, 15 bp, Homo sapiens
ccagttttttgcata

SEQ ID NO: 1432652 - DNA, 15 bp, Homo sapiens
cagttttttgcatac

SEQ ID NO: 1432653 - DNA, 15 bp, Homo sapiens
agttttttgcataca

SEQ ID NO: 1432654 - DNA, 15 bp, Homo sapiens
gttttttgcatacag

SEQ ID NO: 1432655 - DNA, 15 bp, Homo sapiens
ttttttgcatacagg

SEQ ID NO: 1432656 - DNA, 15 bp, Homo sapiens
tttttgcatacaggc

SEQ ID NO: 1432657 - DNA, 15 bp, Homo sapiens
ttttgcatacaggca

SEQ ID NO: 1432658 - DNA, 15 bp, Homo sapiens
tttgcatacaggcat

SEQ ID NO: 1432659 - DNA, 15 bp, Homo sapiens
ttgcatacaggcatt

SEQ ID NO: 1432660 - DNA, 15 bp, Homo sapiens
tgcatacaggcattt

SEQ ID NO: 1432661 - DNA, 15 bp, Homo sapiens
gcatacaggcattta

SEQ ID NO: 1432662 - DNA, 15 bp, Homo sapiens
catacaggcatttat

SEQ ID NO: 1432663 - DNA, 15 bp, Homo sapiens
atacaggcatttata

SEQ ID NO: 1432664 - DNA, 15 bp, Homo sapiens
tacaggcatttatac

SEQ ID NO: 1432665 - DNA, 15 bp, Homo sapiens
acaggcatttataca

SEQ ID NO: 1432666 - DNA, 15 bp, Homo sapiens
caggcatttatacac

SEQ ID NO: 1432667 - DNA, 15 bp, Homo sapiens
aggcatttatacact

SEQ ID NO: 1432668 - DNA, 15 bp, Homo sapiens
ggcatttatacactt

SEQ ID NO: 1432669 - DNA, 15 bp, Homo sapiens
gcatttatacacttt

SEQ ID NO: 1432670 - DNA, 15 bp, Homo sapiens
catttatacactttt

SEQ ID NO: 1432671 - DNA, 15 bp, Homo sapiens
atttatacactttta

SEQ ID NO: 1432672 - DNA, 15 bp, Homo sapiens
tttatacacttttat

SEQ ID NO: 1432673 - DNA, 15 bp, Homo sapiens
ttatacacttttatt

SEQ ID NO: 1432674 - DNA, 15 bp, Homo sapiens
tatacacttttattg

SEQ ID NO: 1432675 - DNA, 15 bp, Homo sapiens
atacacttttattgc

SEQ ID NO: 1432676 - DNA, 15 bp, Homo sapiens
tacacttttattgct

SEQ ID NO: 1432677 - DNA, 15 bp, Homo sapiens
acacttttattgctc

SEQ ID NO: 1432678 - DNA, 15 bp, Homo sapiens
cacttttattgctct

SEQ ID NO: 1432679 - DNA, 15 bp, Homo sapiens
acttttattgctcta

SEQ ID NO: 1432680 - DNA, 15 bp, Homo sapiens
cttttattgctctag

SEQ ID NO: 1432681 - DNA, 15 bp, Homo sapiens
ttttattgctctagg

SEQ ID NO: 1432682 - DNA, 15 bp, Homo sapiens
tttattgctctagga

SEQ ID NO: 1432683 - DNA, 15 bp, Homo sapiens
ttattgctctaggat

SEQ ID NO: 1432684 - DNA, 15 bp, Homo sapiens
tattgctctaggata

SEQ ID NO: 1432685 - DNA, 15 bp, Homo sapiens
attgctctaggatac

SEQ ID NO: 1432686 - DNA, 15 bp, Homo sapiens
ttgctctaggatact

SEQ ID NO: 1432687 - DNA, 15 bp, Homo sapiens
tgctctaggatactt

SEQ ID NO: 1432688 - DNA, 15 bp, Homo sapiens
gctctaggatacttc

SEQ ID NO: 1432689 - DNA, 15 bp, Homo sapiens
ctctaggatacttct

SEQ ID NO: 1432690 - DNA, 15 bp, Homo sapiens
tctaggatacttctt

SEQ ID NO: 1432691 - DNA, 15 bp, Homo sapiens
ctaggatacttcttt

SEQ ID NO: 1432692 - DNA, 15 bp, Homo sapiens
taggatacttctttt

SEQ ID NO: 1432693 - DNA, 15 bp, Homo sapiens
aggatacttcttttg

SEQ ID NO: 1432694 - DNA, 15 bp, Homo sapiens
ggatacttcttttgt

SEQ ID NO: 1432695 - DNA, 15 bp, Homo sapiens
gatacttcttttgtt

SEQ ID NO: 1432696 - DNA, 15 bp, Homo sapiens
atacttcttttgttt

SEQ ID NO: 1432697 - DNA, 15 bp, Homo sapiens
tacttcttttgttta

SEQ ID NO: 1432698 - DNA, 15 bp, Homo sapiens
acttcttttgtttaa

SEQ ID NO: 1432699 - DNA, 15 bp, Homo sapiens
cttcttttgtttaat

SEQ ID NO: 1432700 - DNA, 15 bp, Homo sapiens
ttcttttgtttaatc

SEQ ID NO: 1432701 - DNA, 15 bp, Homo sapiens
tcttttgtttaatcc

SEQ ID NO: 1432702 - DNA, 15 bp, Homo sapiens
cttttgtttaatcct

SEQ ID NO: 1432703 - DNA, 15 bp, Homo sapiens
ttttgtttaatccta

SEQ ID NO: 1432704 - DNA, 15 bp, Homo sapiens
tttgtttaatcctat

SEQ ID NO: 1432705 - DNA, 15 bp, Homo sapiens
ttgtttaatcctata

SEQ ID NO: 1432706 - DNA, 15 bp, Homo sapiens
tgtttaatcctatat

SEQ ID NO: 1432707 - DNA, 15 bp, Homo sapiens
gtttaatcctatata

SEQ ID NO: 1432708 - DNA, 15 bp, Homo sapiens
tttaatcctatatag

SEQ ID NO: 1432709 - DNA, 15 bp, Homo sapiens
ttaatcctatatagg

SEQ ID NO: 1432710 - DNA, 15 bp, Homo sapiens
taatcctatataggt

SEQ ID NO: 1432711 - DNA, 15 bp, Homo sapiens
aatcctatataggtt

SEQ ID NO: 1432712 - DNA, 15 bp, Homo sapiens
atcctatataggttt

SEQ ID NO: 1432713 - DNA, 15 bp, Homo sapiens
tcctatataggtttt

SEQ ID NO: 1432714 - DNA, 15 bp, Homo sapiens
cctatataggttttt

SEQ ID NO: 1432715 - DNA, 15 bp, Homo sapiens
ctatataggtttttt

SEQ ID NO: 1432716 - DNA, 15 bp, Homo sapiens
tatataggttttttg

SEQ ID NO: 1432717 - DNA, 15 bp, Homo sapiens
atataggttttttga

SEQ ID NO: 1432718 - DNA, 15 bp, Homo sapiens
tataggttttttgaa

SEQ ID NO: 1432719 - DNA, 15 bp, Homo sapiens
ataggttttttgaac

SEQ ID NO: 1432720 - DNA, 15 bp, Homo sapiens
taggttttttgaacc

SEQ ID NO: 1432721 - DNA, 15 bp, Homo sapiens
aggttttttgaacct

SEQ ID NO: 1432722 - DNA, 15 bp, Homo sapiens
ggttttttgaaccta

SEQ ID NO: 1432723 - DNA, 15 bp, Homo sapiens
gttttttgaacctat

SEQ ID NO: 1432724 - DNA, 15 bp, Homo sapiens
ttttttgaacctata

SEQ ID NO: 1432725 - DNA, 15 bp, Homo sapiens
tttttgaacctataa

SEQ ID NO: 1432726 - DNA, 15 bp, Homo sapiens
ttttgaacctataac

SEQ ID NO: 1432727 - DNA, 15 bp, Homo sapiens
tttgaacctataaca

SEQ ID NO: 1432728 - DNA, 15 bp, Homo sapiens
ttgaacctataacat

SEQ ID NO: 1432729 - DNA, 15 bp, Homo sapiens
tgaacctataacata

SEQ ID NO: 1432730 - DNA, 15 bp, Homo sapiens
gaacctataacataa

SEQ ID NO: 1432731 - DNA, 15 bp, Homo sapiens
aacctataacataag

SEQ ID NO: 1432732 - DNA, 15 bp, Homo sapiens
acctataacataagc

SEQ ID NO: 1432733 - DNA, 15 bp, Homo sapiens
cctataacataagct

SEQ ID NO: 1432734 - DNA, 15 bp, Homo sapiens
ctataacataagcta

SEQ ID NO: 1432735 - DNA, 15 bp, Homo sapiens
tataacataagctac

SEQ ID NO: 1432736 - DNA, 15 bp, Homo sapiens
ataacataagctaca

SEQ ID NO: 1432737 - DNA, 15 bp, Homo sapiens
taacataagctacaa

SEQ ID NO: 1432738 - DNA, 15 bp, Homo sapiens
aacataagctacaac

SEQ ID NO: 1432739 - DNA, 15 bp, Homo sapiens
acataagctacaaca

SEQ ID NO: 1432740 - DNA, 15 bp, Homo sapiens
cataagctacaacat

SEQ ID NO: 1432741 - DNA, 15 bp, Homo sapiens
ataagctacaacatg

SEQ ID NO: 1432742 - DNA, 15 bp, Homo sapiens
taagctacaacatga

SEQ ID NO: 1432743 - DNA, 15 bp, Homo sapiens
aagctacaacatgag

SEQ ID NO: 1432744 - DNA, 15 bp, Homo sapiens
agctacaacatgaga

SEQ ID NO: 1432745 - DNA, 15 bp, Homo sapiens
gctacaacatgagaa

SEQ ID NO: 1432746 - DNA, 15 bp, Homo sapiens
ctacaacatgagaaa

SEQ ID NO: 1432747 - DNA, 15 bp, Homo sapiens
tacaacatgagaaat

SEQ ID NO: 1432748 - DNA, 15 bp, Homo sapiens
acaacatgagaaatg

SEQ ID NO: 1432749 - DNA, 15 bp, Homo sapiens
caacatgagaaatgt

SEQ ID NO: 1432750 - DNA, 15 bp, Homo sapiens
aacatgagaaatgtg

SEQ ID NO: 1432751 - DNA, 15 bp, Homo sapiens
acatgagaaatgtgc

SEQ ID NO: 1432752 - DNA, 15 bp, Homo sapiens
catgagaaatgtgcg

SEQ ID NO: 1432753 - DNA, 15 bp, Homo sapiens
atgagaaatgtgcgg

SEQ ID NO: 1432754 - DNA, 15 bp, Homo sapiens
tgagaaatgtgcggt

SEQ ID NO: 1432755 - DNA, 15 bp, Homo sapiens
gagaaatgtgcggtt

SEQ ID NO: 1432756 - DNA, 15 bp, Homo sapiens
agaaatgtgcggtta

SEQ ID NO: 1432757 - DNA, 15 bp, Homo sapiens
gaaatgtgcggttag

SEQ ID NO: 1432758 - DNA, 15 bp, Homo sapiens
aaatgtgcggttaga

SEQ ID NO: 1432759 - DNA, 15 bp, Homo sapiens
aatgtgcggttagat

SEQ ID NO: 1432760 - DNA, 15 bp, Homo sapiens
atgtgcggttagata

SEQ ID NO: 1432761 - DNA, 15 bp, Homo sapiens
tgtgcggttagatag

SEQ ID NO: 1432762 - DNA, 15 bp, Homo sapiens
gtgcggttagataga

SEQ ID NO: 1432763 - DNA, 15 bp, Homo sapiens
tgcggttagatagat

SEQ ID NO: 1432764 - DNA, 15 bp, Homo sapiens
gcggttagatagata

SEQ ID NO: 1432765 - DNA, 15 bp, Homo sapiens
cggttagatagatat

SEQ ID NO: 1432766 - DNA, 15 bp, Homo sapiens
ggttagatagatatg

SEQ ID NO: 1432767 - DNA, 15 bp, Homo sapiens
gttagatagatatgt

SEQ ID NO: 1432768 - DNA, 15 bp, Homo sapiens
ttagatagatatgtc

SEQ ID NO: 1432769 - DNA, 15 bp, Homo sapiens
tagatagatatgtcc

SEQ ID NO: 1432770 - DNA, 15 bp, Homo sapiens
agatagatatgtccc

SEQ ID NO: 1432771 - DNA, 15 bp, Homo sapiens
gatagatatgtccct

SEQ ID NO: 1432772 - DNA, 15 bp, Homo sapiens
atagatatgtccctt

SEQ ID NO: 1432773 - DNA, 15 bp, Homo sapiens
tagatatgtcccttc

SEQ ID NO: 1432774 - DNA, 15 bp, Homo sapiens
agatatgtcccttct

SEQ ID NO: 1432775 - DNA, 15 bp, Homo sapiens
gatatgtcccttctg

SEQ ID NO: 1432776 - DNA, 15 bp, Homo sapiens
atatgtcccttctga

SEQ ID NO: 1432777 - DNA, 15 bp, Homo sapiens
tatgtcccttctgaa

SEQ ID NO: 1432778 - DNA, 15 bp, Homo sapiens
atgtcccttctgaag

SEQ ID NO: 1432779 - DNA, 15 bp, Homo sapiens
tgtcccttctgaagg

SEQ ID NO: 1432780 - DNA, 15 bp, Homo sapiens
gtcccttctgaaggt

SEQ ID NO: 1432781 - DNA, 15 bp, Homo sapiens
tcccttctgaaggtc

SEQ ID NO: 1432782 - DNA, 15 bp, Homo sapiens
cccttctgaaggtca

SEQ ID NO: 1432783 - DNA, 15 bp, Homo sapiens
ccttctgaaggtcag

SEQ ID NO: 1432784 - DNA, 15 bp, Homo sapiens
cttctgaaggtcaga

SEQ ID NO: 1432785 - DNA, 15 bp, Homo sapiens
ttctgaaggtcagaa

SEQ ID NO: 1432786 - DNA, 15 bp, Homo sapiens
tctgaaggtcagaaa

SEQ ID NO: 1432787 - DNA, 15 bp, Homo sapiens
ctgaaggtcagaaaa

SEQ ID NO: 1432788 - DNA, 15 bp, Homo sapiens
tgaaggtcagaaaaa

SEQ ID NO: 1432789 - DNA, 15 bp, Homo sapiens
gaaggtcagaaaaaa

SEQ ID NO: 1432790 - DNA, 15 bp, Homo sapiens
aaggtcagaaaaaaa

SEQ ID NO: 1432791 - DNA, 15 bp, Homo sapiens
aggtcagaaaaaaat

SEQ ID NO: 1432792 - DNA, 15 bp, Homo sapiens
ggtcagaaaaaaata

SEQ ID NO: 1432793 - DNA, 15 bp, Homo sapiens
gtcagaaaaaaatat

SEQ ID NO: 1432794 - DNA, 15 bp, Homo sapiens
tcagaaaaaaatata

SEQ ID NO: 1432795 - DNA, 15 bp, Homo sapiens
cagaaaaaaatataa

SEQ ID NO: 1432796 - DNA, 15 bp, Homo sapiens
agaaaaaaatataat

SEQ ID NO: 1432797 - DNA, 15 bp, Homo sapiens
gaaaaaaatataatg

SEQ ID NO: 1432798 - DNA, 15 bp, Homo sapiens
aaaaaaatataatgg

SEQ ID NO: 1432799 - DNA, 15 bp, Homo sapiens
aaaaaatataatgga

SEQ ID NO: 1432800 - DNA, 15 bp, Homo sapiens
aaaaatataatggag

SEQ ID NO: 1432801 - DNA, 15 bp, Homo sapiens
aaaatataatggagg

SEQ ID NO: 1432802 - DNA, 15 bp, Homo sapiens
aaatataatggaggt

SEQ ID NO: 1432803 - DNA, 15 bp, Homo sapiens
aatataatggaggta

SEQ ID NO: 1432804 - DNA, 15 bp, Homo sapiens
atataatggaggtaa

SEQ ID NO: 1432805 - DNA, 15 bp, Homo sapiens
tataatggaggtaaa

SEQ ID NO: 1432806 - DNA, 15 bp, Homo sapiens
ataatggaggtaaaa

SEQ ID NO: 1432807 - DNA, 15 bp, Homo sapiens
taatggaggtaaaac

SEQ ID NO: 1432808 - DNA, 15 bp, Homo sapiens
aatggaggtaaaacc

SEQ ID NO: 1432809 - DNA, 15 bp, Homo sapiens
atggaggtaaaacct

SEQ ID NO: 1432810 - DNA, 15 bp, Homo sapiens
tggaggtaaaacctg

SEQ ID NO: 1432811 - DNA, 15 bp, Homo sapiens
ggaggtaaaacctga

SEQ ID NO: 1432812 - DNA, 15 bp, Homo sapiens
gaggtaaaacctgaa

SEQ ID NO: 1432813 - DNA, 15 bp, Homo sapiens
aggtaaaacctgaac

SEQ ID NO: 1432814 - DNA, 15 bp, Homo sapiens
ggtaaaacctgaaca

SEQ ID NO: 1432815 - DNA, 15 bp, Homo sapiens
gtaaaacctgaacaa

SEQ ID NO: 1432816 - DNA, 15 bp, Homo sapiens
taaaacctgaacaag

SEQ ID NO: 1432817 - DNA, 15 bp, Homo sapiens
aaaacctgaacaagc

SEQ ID NO: 1432818 - DNA, 15 bp, Homo sapiens
aaacctgaacaagct

SEQ ID NO: 1432819 - DNA, 15 bp, Homo sapiens
aacctgaacaagctt

SEQ ID NO: 1432820 - DNA, 15 bp, Homo sapiens
acctgaacaagcttg

SEQ ID NO: 1432821 - DNA, 15 bp, Homo sapiens
cctgaacaagcttgg

SEQ ID NO: 1432822 - DNA, 15 bp, Homo sapiens
ctgaacaagcttgga

SEQ ID NO: 1432823 - DNA, 15 bp, Homo sapiens
tgaacaagcttggaa

SEQ ID NO: 1432824 - DNA, 15 bp, Homo sapiens
gaacaagcttggaaa

SEQ ID NO: 1432825 - DNA, 15 bp, Homo sapiens
aacaagcttggaaac

SEQ ID NO: 1432826 - DNA, 15 bp, Homo sapiens
acaagcttggaaact

SEQ ID NO: 1432827 - DNA, 15 bp, Homo sapiens
caagcttggaaactg

SEQ ID NO: 1432828 - DNA, 15 bp, Homo sapiens
aagcttggaaactga

SEQ ID NO: 1432829 - DNA, 15 bp, Homo sapiens
agcttggaaactgat

SEQ ID NO: 1432830 - DNA, 15 bp, Homo sapiens
gcttggaaactgatg

SEQ ID NO: 1432831 - DNA, 15 bp, Homo sapiens
cttggaaactgatgg

SEQ ID NO: 1432832 - DNA, 15 bp, Homo sapiens
ttggaaactgatggt

SEQ ID NO: 1432833 - DNA, 15 bp, Homo sapiens
tggaaactgatggta

SEQ ID NO: 1432834 - DNA, 15 bp, Homo sapiens
ggaaactgatggtag

SEQ ID NO: 1432835 - DNA, 15 bp, Homo sapiens
gaaactgatggtaga

SEQ ID NO: 1432836 - DNA, 15 bp, Homo sapiens
aaactgatggtagac

SEQ ID NO: 1432837 - DNA, 15 bp, Homo sapiens
aactgatggtagact

SEQ ID NO: 1432838 - DNA, 15 bp, Homo sapiens
actgatggtagactt

SEQ ID NO: 1432839 - DNA, 15 bp, Homo sapiens
ctgatggtagacttc

SEQ ID NO: 1432840 - DNA, 15 bp, Homo sapiens
tgatggtagacttct

SEQ ID NO: 1432841 - DNA, 15 bp, Homo sapiens
gatggtagacttctt

SEQ ID NO: 1432842 - DNA, 15 bp, Homo sapiens
atggtagacttcttc

SEQ ID NO: 1432843 - DNA, 15 bp, Homo sapiens
tggtagacttcttca

SEQ ID NO: 1432844 - DNA, 15 bp, Homo sapiens
ggtagacttcttcaa

SEQ ID NO: 1432845 - DNA, 15 bp, Homo sapiens
gtagacttcttcaag

SEQ ID NO: 1432846 - DNA, 15 bp, Homo sapiens
tagacttcttcaagg

SEQ ID NO: 1432847 - DNA, 15 bp, Homo sapiens
agacttcttcaaggc

SEQ ID NO: 1432848 - DNA, 15 bp, Homo sapiens
gacttcttcaaggca

SEQ ID NO: 1432849 - DNA, 15 bp, Homo sapiens
acttcttcaaggcag

SEQ ID NO: 1432850 - DNA, 15 bp, Homo sapiens
cttcttcaaggcagc

SEQ ID NO: 1432851 - DNA, 15 bp, Homo sapiens
ttcttcaaggcagcc

SEQ ID NO: 1432852 - DNA, 15 bp, Homo sapiens
tcttcaaggcagccc

SEQ ID NO: 1432853 - DNA, 15 bp, Homo sapiens
cttcaaggcagccct

SEQ ID NO: 1432854 - DNA, 15 bp, Homo sapiens
ttcaaggcagccctt

SEQ ID NO: 1432855 - DNA, 15 bp, Homo sapiens
tcaaggcagcccttg

SEQ ID NO: 1432856 - DNA, 15 bp, Homo sapiens
caaggcagcccttgc

SEQ ID NO: 1432857 - DNA, 15 bp, Homo sapiens
aaggcagcccttgcc

SEQ ID NO: 1432858 - DNA, 15 bp, Homo sapiens
aggcagcccttgccc

SEQ ID NO: 1432859 - DNA, 15 bp, Homo sapiens
ggcagcccttgccct

SEQ ID NO: 1432860 - DNA, 15 bp, Homo sapiens
gcagcccttgcccta

SEQ ID NO: 1432861 - DNA, 15 bp, Homo sapiens
cagcccttgccctaa

SEQ ID NO: 1432862 - DNA, 15 bp, Homo sapiens
agcccttgccctaat

SEQ ID NO: 1432863 - DNA, 15 bp, Homo sapiens
gcccttgccctaatt

SEQ ID NO: 1432864 - DNA, 15 bp, Homo sapiens
cccttgccctaatta

SEQ ID NO: 1432865 - DNA, 15 bp, Homo sapiens
ccttgccctaattaa

SEQ ID NO: 1432866 - DNA, 15 bp, Homo sapiens
cttgccctaattaaa

SEQ ID NO: 1432867 - DNA, 15 bp, Homo sapiens
ttgccctaattaaaa

SEQ ID NO: 1432868 - DNA, 15 bp, Homo sapiens
tgccctaattaaaat

SEQ ID NO: 1432869 - DNA, 15 bp, Homo sapiens
gccctaattaaaatt

SEQ ID NO: 1432870 - DNA, 15 bp, Homo sapiens
ccctaattaaaattc

SEQ ID NO: 1432871 - DNA, 15 bp, Homo sapiens
cctaattaaaattct

SEQ ID NO: 1432872 - DNA, 15 bp, Homo sapiens
ctaattaaaattctt

SEQ ID NO: 1432873 - DNA, 15 bp, Homo sapiens
taattaaaattcttg

SEQ ID NO: 1432874 - DNA, 15 bp, Homo sapiens
aattaaaattcttgt

SEQ ID NO: 1432875 - DNA, 15 bp, Homo sapiens
attaaaattcttgtc

SEQ ID NO: 1432876 - DNA, 15 bp, Homo sapiens
ttaaaattcttgtct

SEQ ID NO: 1432877 - DNA, 15 bp, Homo sapiens
taaaattcttgtctt

SEQ ID NO: 1432878 - DNA, 15 bp, Homo sapiens
aaaattcttgtcttt

SEQ ID NO: 1432879 - DNA, 15 bp, Homo sapiens
aaattcttgtctttc

SEQ ID NO: 1432880 - DNA, 15 bp, Homo sapiens
aattcttgtctttct

SEQ ID NO: 1432881 - DNA, 15 bp, Homo sapiens
attcttgtctttcta

SEQ ID NO: 1432882 - DNA, 15 bp, Homo sapiens
ttcttgtctttctag

SEQ ID NO: 1432883 - DNA, 15 bp, Homo sapiens
tcttgtctttctaga

SEQ ID NO: 1432884 - DNA, 15 bp, Homo sapiens
cttgtctttctagaa

SEQ ID NO: 1432885 - DNA, 15 bp, Homo sapiens
ttgtctttctagaaa

SEQ ID NO: 1432886 - DNA, 15 bp, Homo sapiens
tgtctttctagaaaa

SEQ ID NO: 1432887 - DNA, 15 bp, Homo sapiens
gtctttctagaaaaa

SEQ ID NO: 1432888 - DNA, 15 bp, Homo sapiens
tctttctagaaaaag

SEQ ID NO: 1432889 - DNA, 15 bp, Homo sapiens
ctttctagaaaaagt

SEQ ID NO: 1432890 - DNA, 15 bp, Homo sapiens
tttctagaaaaagtc

SEQ ID NO: 1432891 - DNA, 15 bp, Homo sapiens
ttctagaaaaagtct

SEQ ID NO: 1432892 - DNA, 15 bp, Homo sapiens
tctagaaaaagtcta

SEQ ID NO: 1432893 - DNA, 15 bp, Homo sapiens
ctagaaaaagtctag

SEQ ID NO: 1432894 - DNA, 15 bp, Homo sapiens
tagaaaaagtctagc

SEQ ID NO: 1432895 - DNA, 15 bp, Homo sapiens
agaaaaagtctagct

SEQ ID NO: 1432896 - DNA, 15 bp, Homo sapiens
gaaaaagtctagctg

SEQ ID NO: 1432897 - DNA, 15 bp, Homo sapiens
aaaaagtctagctgt

SEQ ID NO: 1432898 - DNA, 15 bp, Homo sapiens
aaaagtctagctgtt

SEQ ID NO: 1432899 - DNA, 15 bp, Homo sapiens
aaagtctagctgttg

SEQ ID NO: 1432900 - DNA, 15 bp, Homo sapiens
aagtctagctgttga

SEQ ID NO: 1432901 - DNA, 15 bp, Homo sapiens
agtctagctgttgat

SEQ ID NO: 1432902 - DNA, 15 bp, Homo sapiens
gtctagctgttgatt

SEQ ID NO: 1432903 - DNA, 15 bp, Homo sapiens
tctagctgttgattt

SEQ ID NO: 1432904 - DNA, 15 bp, Homo sapiens
ctagctgttgattta

SEQ ID NO: 1432905 - DNA, 15 bp, Homo sapiens
tagctgttgatttac

SEQ ID NO: 1432906 - DNA, 15 bp, Homo sapiens
agctgttgatttacc

SEQ ID NO: 1432907 - DNA, 15 bp, Homo sapiens
gctgttgatttacca

SEQ ID NO: 1432908 - DNA, 15 bp, Homo sapiens
ctgttgatttaccac

SEQ ID NO: 1432909 - DNA, 15 bp, Homo sapiens
tgttgatttaccaca

SEQ ID NO: 1432910 - DNA, 15 bp, Homo sapiens
gttgatttaccacag

SEQ ID NO: 1432911 - DNA, 15 bp, Homo sapiens
ttgatttaccacaga

SEQ ID NO: 1432912 - DNA, 15 bp, Homo sapiens
tgatttaccacagaa

SEQ ID NO: 1432913 - DNA, 15 bp, Homo sapiens
gatttaccacagaaa

SEQ ID NO: 1432914 - DNA, 15 bp, Homo sapiens
atttaccacagaaaa

SEQ ID NO: 1432915 - DNA, 15 bp, Homo sapiens
tttaccacagaaaat

SEQ ID NO: 1432916 - DNA, 15 bp, Homo sapiens
ttaccacagaaaata

SEQ ID NO: 1432917 - DNA, 15 bp, Homo sapiens
taccacagaaaataa

SEQ ID NO: 1432918 - DNA, 15 bp, Homo sapiens
accacagaaaataat

SEQ ID NO: 1432919 - DNA, 15 bp, Homo sapiens
ccacagaaaataata

SEQ ID NO: 1432920 - DNA, 15 bp, Homo sapiens
cacagaaaataataa

SEQ ID NO: 1432921 - DNA, 15 bp, Homo sapiens
acagaaaataataat

SEQ ID NO: 1432922 - DNA, 15 bp, Homo sapiens
cagaaaataataata

SEQ ID NO: 1432923 - DNA, 15 bp, Homo sapiens
agaaaataataataa

SEQ ID NO: 1432924 - DNA, 15 bp, Homo sapiens
gaaaataataataat

SEQ ID NO: 1432925 - DNA, 15 bp, Homo sapiens
taataataataatta

SEQ ID NO: 1432926 - DNA, 15 bp, Homo sapiens
aataataataattac

SEQ ID NO: 1432927 - DNA, 15 bp, Homo sapiens
ataataataattact

SEQ ID NO: 1432928 - DNA, 15 bp, Homo sapiens
taataataattacta

SEQ ID NO: 1432929 - DNA, 15 bp, Homo sapiens
aataataattactat

SEQ ID NO: 1432930 - DNA, 15 bp, Homo sapiens
ataataattactatt

SEQ ID NO: 1432931 - DNA, 15 bp, Homo sapiens
taataattactatta

SEQ ID NO: 1432932 - DNA, 15 bp, Homo sapiens
aataattactattat

SEQ ID NO: 1432933 - DNA, 15 bp, Homo sapiens
ataattactattatt

SEQ ID NO: 1432934 - DNA, 15 bp, Homo sapiens
taattactattatta

SEQ ID NO: 1432935 - DNA, 15 bp, Homo sapiens
aattactattattat

SEQ ID NO: 1432936 - DNA, 15 bp, Homo sapiens
attactattattatt

SEQ ID NO: 1432937 - DNA, 15 bp, Homo sapiens
ttactattattatta

SEQ ID NO: 1432938 - DNA, 15 bp, Homo sapiens
tactattattattat

SEQ ID NO: 1432939 - DNA, 15 bp, Homo sapiens
actattattattatt

SEQ ID NO: 1432940 - DNA, 15 bp, Homo sapiens
ctattattattattt

SEQ ID NO: 1432941 - DNA, 15 bp, Homo sapiens
tattattattttttg

SEQ ID NO: 1432942 - DNA, 15 bp, Homo sapiens
attattattttttga

SEQ ID NO: 1432943 - DNA, 15 bp, Homo sapiens
ttattattttttgag

SEQ ID NO: 1432944 - DNA, 15 bp, Homo sapiens
tattattttttgaga

SEQ ID NO: 1432945 - DNA, 15 bp, Homo sapiens
attattttttgagac

SEQ ID NO: 1432946 - DNA, 15 bp, Homo sapiens
tttgagacagggtcg

SEQ ID NO: 1432947 - DNA, 15 bp, Homo sapiens
ttgagacagggtcgc

SEQ ID NO: 1432948 - DNA, 15 bp, Homo sapiens
tgagacagggtcgcc

SEQ ID NO: 1432949 - DNA, 15 bp, Homo sapiens
gagacagggtcgccc

SEQ ID NO: 1432950 - DNA, 15 bp, Homo sapiens
agacagggtcgccct

SEQ ID NO: 1432951 - DNA, 15 bp, Homo sapiens
gacagggtcgccctg

SEQ ID NO: 1432952 - DNA, 15 bp, Homo sapiens
acagggtcgccctgt

SEQ ID NO: 1432953 - DNA, 15 bp, Homo sapiens
cagggtcgccctgtg

SEQ ID NO: 1432954 - DNA, 15 bp, Homo sapiens
agggtcgccctgtgt

SEQ ID NO: 1432955 - DNA, 15 bp, Homo sapiens
gggtcgccctgtgtc

SEQ ID NO: 1432956 - DNA, 15 bp, Homo sapiens
ggtcgccctgtgtca

SEQ ID NO: 1432957 - DNA, 15 bp, Homo sapiens
gtcgccctgtgtcac

SEQ ID NO: 1432958 - DNA, 15 bp, Homo sapiens
tcgccctgtgtcacc

SEQ ID NO: 1432959 - DNA, 15 bp, Homo sapiens
cgccctgtgtcacct

SEQ ID NO: 1432960 - DNA, 15 bp, Homo sapiens
gccctgtgtcaccta

SEQ ID NO: 1432961 - DNA, 15 bp, Homo sapiens
ccctgtgtcacctag

SEQ ID NO: 1432962 - DNA, 15 bp, Homo sapiens
cctgtgtcacctaga

SEQ ID NO: 1432963 - DNA, 15 bp, Homo sapiens
ctgtgtcacctagat

SEQ ID NO: 1432964 - DNA, 15 bp, Homo sapiens
tgtgtcacctagatt

SEQ ID NO: 1432965 - DNA, 15 bp, Homo sapiens
gtgtcacctagattg

SEQ ID NO: 1432966 - DNA, 15 bp, Homo sapiens
tgtcacctagattgc

SEQ ID NO: 1432967 - DNA, 15 bp, Homo sapiens
gtcacctagattgca

SEQ ID NO: 1432968 - DNA, 15 bp, Homo sapiens
tcacctagattgcag

SEQ ID NO: 1432969 - DNA, 15 bp, Homo sapiens
cacctagattgcagt

SEQ ID NO: 1432970 - DNA, 15 bp, Homo sapiens
acctagattgcagtg

SEQ ID NO: 1432971 - DNA, 15 bp, Homo sapiens
cctagattgcagtgg

SEQ ID NO: 1432972 - DNA, 15 bp, Homo sapiens
ctagattgcagtggt

SEQ ID NO: 1432973 - DNA, 15 bp, Homo sapiens
tagattgcagtggtg

SEQ ID NO: 1432974 - DNA, 15 bp, Homo sapiens
agattgcagtggtgc

SEQ ID NO: 1432975 - DNA, 15 bp, Homo sapiens
gattgcagtggtgca

SEQ ID NO: 1432976 - DNA, 15 bp, Homo sapiens
attgcagtggtgcag

SEQ ID NO: 1432977 - DNA, 15 bp, Homo sapiens
ttgcagtggtgcagt

SEQ ID NO: 1432978 - DNA, 15 bp, Homo sapiens
agtggtgcagtcatg

SEQ ID NO: 1432979 - DNA, 15 bp, Homo sapiens
gtggtgcagtcatgg

SEQ ID NO: 1432980 - DNA, 15 bp, Homo sapiens
tggtgcagtcatggc

SEQ ID NO: 1432981 - DNA, 15 bp, Homo sapiens
ggtgcagtcatggct

SEQ ID NO: 1432982 - DNA, 15 bp, Homo sapiens
gtgcagtcatggctc

SEQ ID NO: 1432983 - DNA, 15 bp, Homo sapiens
tgcagtcatggctca

SEQ ID NO: 1432984 - DNA, 15 bp, Homo sapiens
gcagtcatggctcac

SEQ ID NO: 1432985 - DNA, 15 bp, Homo sapiens
cagtcatggctcact

SEQ ID NO: 1432986 - DNA, 15 bp, Homo sapiens
agtcatggctcactg

SEQ ID NO: 1432987 - DNA, 15 bp, Homo sapiens
gtcatggctcactgc

SEQ ID NO: 1432988 - DNA, 15 bp, Homo sapiens
catggctcactgcat

SEQ ID NO: 1432989 - DNA, 15 bp, Homo sapiens
atggctcactgcatc

SEQ ID NO: 1432990 - DNA, 15 bp, Homo sapiens
tggctcactgcatcc

SEQ ID NO: 1432991 - DNA, 15 bp, Homo sapiens
ggctcactgcatcct

SEQ ID NO: 1432992 - DNA, 15 bp, Homo sapiens
gctcactgcatcctc

SEQ ID NO: 1432993 - DNA, 15 bp, Homo sapiens
ctcactgcatcctcc

SEQ ID NO: 1432994 - DNA, 15 bp, Homo sapiens
tcactgcatcctccg

SEQ ID NO: 1432995 - DNA, 15 bp, Homo sapiens
cactgcatcctccgt

SEQ ID NO: 1432996 - DNA, 15 bp, Homo sapiens
actgcatcctccgtt

SEQ ID NO: 1432997 - DNA, 15 bp, Homo sapiens
ctgcatcctccgttt

SEQ ID NO: 1432998 - DNA, 15 bp, Homo sapiens
tgcatcctccgtttt

SEQ ID NO: 1432999 - DNA, 15 bp, Homo sapiens
gcatcctccgttttt

SEQ ID NO: 1433000 - DNA, 15 bp, Homo sapiens
catcctccgtttttc

SEQ ID NO: 1433001 - DNA, 15 bp, Homo sapiens
atcctccgtttttca

SEQ ID NO: 1433002 - DNA, 15 bp, Homo sapiens
tcctccgtttttcag

SEQ ID NO: 1433003 - DNA, 15 bp, Homo sapiens
cctccgtttttcagg

SEQ ID NO: 1433004 - DNA, 15 bp, Homo sapiens
ctccgtttttcaggc

SEQ ID NO: 1433005 - DNA, 15 bp, Homo sapiens
tccgtttttcaggct

SEQ ID NO: 1433006 - DNA, 15 bp, Homo sapiens
ccgtttttcaggctc

SEQ ID NO: 1433007 - DNA, 15 bp, Homo sapiens
cgtttttcaggctca

SEQ ID NO: 1433008 - DNA, 15 bp, Homo sapiens
gtttttcaggctcaa

SEQ ID NO: 1433009 - DNA, 15 bp, Homo sapiens
tttttcaggctcaag

SEQ ID NO: 1433010 - DNA, 15 bp, Homo sapiens
ttttcaggctcaagc

SEQ ID NO: 1433011 - DNA, 15 bp, Homo sapiens
tttcaggctcaagca

SEQ ID NO: 1433012 - DNA, 15 bp, Homo sapiens
ttcaggctcaagcaa

SEQ ID NO: 1433013 - DNA, 15 bp, Homo sapiens
caatcctcccacctt

SEQ ID NO: 1433014 - DNA, 15 bp, Homo sapiens
aatcctcccacctta

SEQ ID NO: 1433015 - DNA, 15 bp, Homo sapiens
tcctcccaccttagc

SEQ ID NO: 1433016 - DNA, 15 bp, Homo sapiens
cctcccaccttagcc

SEQ ID NO: 1433017 - DNA, 15 bp, Homo sapiens
ctcccaccttagcct

SEQ ID NO: 1433018 - DNA, 15 bp, Homo sapiens
tcccaccttagcctc

SEQ ID NO: 1433019 - DNA, 15 bp, Homo sapiens
ccaccttagcctcct

SEQ ID NO: 1433020 - DNA, 15 bp, Homo sapiens
caccttagcctcctg

SEQ ID NO: 1433021 - DNA, 15 bp, Homo sapiens
accttagcctcctga

SEQ ID NO: 1433022 - DNA, 15 bp, Homo sapiens
tgagtagctgggtcc

SEQ ID NO: 1433023 - DNA, 15 bp, Homo sapiens
gagtagctgggtcca

SEQ ID NO: 1433024 - DNA, 15 bp, Homo sapiens
agtagctgggtccac

SEQ ID NO: 1433025 - DNA, 15 bp, Homo sapiens
gtagctgggtccaca

SEQ ID NO: 1433026 - DNA, 15 bp, Homo sapiens
tagctgggtccacaa

SEQ ID NO: 1433027 - DNA, 15 bp, Homo sapiens
agctgggtccacaag

SEQ ID NO: 1433028 - DNA, 15 bp, Homo sapiens
gctgggtccacaagc

SEQ ID NO: 1433029 - DNA, 15 bp, Homo sapiens
ctgggtccacaagca

SEQ ID NO: 1433030 - DNA, 15 bp, Homo sapiens
tgggtccacaagcat

SEQ ID NO: 1433031 - DNA, 15 bp, Homo sapiens
gggtccacaagcatg

SEQ ID NO: 1433032 - DNA, 15 bp, Homo sapiens
ggtccacaagcatgc

SEQ ID NO: 1433033 - DNA, 15 bp, Homo sapiens
gtccacaagcatgcg

SEQ ID NO: 1433034 - DNA, 15 bp, Homo sapiens
tccacaagcatgcgc

SEQ ID NO: 1433035 - DNA, 15 bp, Homo sapiens
ccacaagcatgcgcc

SEQ ID NO: 1433036 - DNA, 15 bp, Homo sapiens
cacaagcatgcgcca

SEQ ID NO: 1433037 - DNA, 15 bp, Homo sapiens
aagcatgcgccaccc

SEQ ID NO: 1433038 - DNA, 15 bp, Homo sapiens
agcatgcgccaccca

SEQ ID NO: 1433039 - DNA, 15 bp, Homo sapiens
gcatgcgccacccac

SEQ ID NO: 1433040 - DNA, 15 bp, Homo sapiens
catgcgccacccaca

SEQ ID NO: 1433041 - DNA, 15 bp, Homo sapiens
atgcgccacccacac

SEQ ID NO: 1433042 - DNA, 15 bp, Homo sapiens
tgcgccacccacacc

SEQ ID NO: 1433043 - DNA, 15 bp, Homo sapiens
gcgccacccacaccc

SEQ ID NO: 1433044 - DNA, 15 bp, Homo sapiens
cgccacccacaccca

SEQ ID NO: 1433045 - DNA, 15 bp, Homo sapiens
gccacccacacccac

SEQ ID NO: 1433046 - DNA, 15 bp, Homo sapiens
ccacccacacccact

SEQ ID NO: 1433047 - DNA, 15 bp, Homo sapiens
cacccacacccacta

SEQ ID NO: 1433048 - DNA, 15 bp, Homo sapiens
acccacacccactaa

SEQ ID NO: 1433049 - DNA, 15 bp, Homo sapiens
cccacacccactaag

SEQ ID NO: 1433050 - DNA, 15 bp, Homo sapiens
ccacacccactaagt

SEQ ID NO: 1433051 - DNA, 15 bp, Homo sapiens
cacacccactaagtt

SEQ ID NO: 1433052 - DNA, 15 bp, Homo sapiens
acacccactaagttt

SEQ ID NO: 1433053 - DNA, 15 bp, Homo sapiens
cacccactaagtttt

SEQ ID NO: 1433054 - DNA, 15 bp, Homo sapiens
acccactaagttttt

SEQ ID NO: 1433055 - DNA, 15 bp, Homo sapiens
cccactaagtttttg

SEQ ID NO: 1433056 - DNA, 15 bp, Homo sapiens
ccactaagtttttgt

SEQ ID NO: 1433057 - DNA, 15 bp, Homo sapiens
cactaagtttttgta

SEQ ID NO: 1433058 - DNA, 15 bp, Homo sapiens
actaagtttttgtat

SEQ ID NO: 1433059 - DNA, 15 bp, Homo sapiens
ctaagtttttgtatt

SEQ ID NO: 1433060 - DNA, 15 bp, Homo sapiens
gtttttgtatttttg

SEQ ID NO: 1433061 - DNA, 15 bp, Homo sapiens
tttggtagagatgga

SEQ ID NO: 1433062 - DNA, 15 bp, Homo sapiens
ttggtagagatggag

SEQ ID NO: 1433063 - DNA, 15 bp, Homo sapiens
tggtagagatggagt

SEQ ID NO: 1433064 - DNA, 15 bp, Homo sapiens
ggtagagatggagtt

SEQ ID NO: 1433065 - DNA, 15 bp, Homo sapiens
tagagatggagtttt

SEQ ID NO: 1433066 - DNA, 15 bp, Homo sapiens
agagatggagtttta

SEQ ID NO: 1433067 - DNA, 15 bp, Homo sapiens
gagatggagttttac

SEQ ID NO: 1433068 - DNA, 15 bp, Homo sapiens
agatggagttttacc

SEQ ID NO: 1433069 - DNA, 15 bp, Homo sapiens
gatggagttttacct

SEQ ID NO: 1433070 - DNA, 15 bp, Homo sapiens
atggagttttacctt

SEQ ID NO: 1433071 - DNA, 15 bp, Homo sapiens
tggagttttaccttg

SEQ ID NO: 1433072 - DNA, 15 bp, Homo sapiens
ggagttttaccttgt

SEQ ID NO: 1433073 - DNA, 15 bp, Homo sapiens
gagttttaccttgtt

SEQ ID NO: 1433074 - DNA, 15 bp, Homo sapiens
agttttaccttgttg

SEQ ID NO: 1433075 - DNA, 15 bp, Homo sapiens
gttttaccttgttgc

SEQ ID NO: 1433076 - DNA, 15 bp, Homo sapiens
ttttaccttgttgcc

SEQ ID NO: 1433077 - DNA, 15 bp, Homo sapiens
tttaccttgttgccc

SEQ ID NO: 1433078 - DNA, 15 bp, Homo sapiens
ttaccttgttgccca

SEQ ID NO: 1433079 - DNA, 15 bp, Homo sapiens
taccttgttgcccag

SEQ ID NO: 1433080 - DNA, 15 bp, Homo sapiens
accttgttgcccagg

SEQ ID NO: 1433081 - DNA, 15 bp, Homo sapiens
tctcaaattcctgga

SEQ ID NO: 1433082 - DNA, 15 bp, Homo sapiens
ctcaaattcctggac

SEQ ID NO: 1433083 - DNA, 15 bp, Homo sapiens
tcaaattcctggact

SEQ ID NO: 1433084 - DNA, 15 bp, Homo sapiens
caaattcctggactc

SEQ ID NO: 1433085 - DNA, 15 bp, Homo sapiens
aaattcctggactca

SEQ ID NO: 1433086 - DNA, 15 bp, Homo sapiens
aattcctggactcaa

SEQ ID NO: 1433087 - DNA, 15 bp, Homo sapiens
attcctggactcaag

SEQ ID NO: 1433088 - DNA, 15 bp, Homo sapiens
ttcctggactcaagt

SEQ ID NO: 1433089 - DNA, 15 bp, Homo sapiens
tcctggactcaagta

SEQ ID NO: 1433090 - DNA, 15 bp, Homo sapiens
cctggactcaagtag

SEQ ID NO: 1433091 - DNA, 15 bp, Homo sapiens
ctggactcaagtagt

SEQ ID NO: 1433092 - DNA, 15 bp, Homo sapiens
tggactcaagtagtc

SEQ ID NO: 1433093 - DNA, 15 bp, Homo sapiens
ggactcaagtagtcc

SEQ ID NO: 1433094 - DNA, 15 bp, Homo sapiens
gactcaagtagtccg

SEQ ID NO: 1433095 - DNA, 15 bp, Homo sapiens
actcaagtagtccgc

SEQ ID NO: 1433096 - DNA, 15 bp, Homo sapiens
ctcaagtagtccgcc

SEQ ID NO: 1433097 - DNA, 15 bp, Homo sapiens
tcaagtagtccgccc

SEQ ID NO: 1433098 - DNA, 15 bp, Homo sapiens
caagtagtccgcccg

SEQ ID NO: 1433099 - DNA, 15 bp, Homo sapiens
aagtagtccgcccgc

SEQ ID NO: 1433100 - DNA, 15 bp, Homo sapiens
agtagtccgcccgcc

SEQ ID NO: 1433101 - DNA, 15 bp, Homo sapiens
gtagtccgcccgcct

SEQ ID NO: 1433102 - DNA, 15 bp, Homo sapiens
tagtccgcccgcctt

SEQ ID NO: 1433103 - DNA, 15 bp, Homo sapiens
agtccgcccgccttg

SEQ ID NO: 1433104 - DNA, 15 bp, Homo sapiens
gtccgcccgccttgc

SEQ ID NO: 1433105 - DNA, 15 bp, Homo sapiens
tccgcccgccttgcc

SEQ ID NO: 1433106 - DNA, 15 bp, Homo sapiens
ccgcccgccttgccc

SEQ ID NO: 1433107 - DNA, 15 bp, Homo sapiens
cgcccgccttgccct

SEQ ID NO: 1433108 - DNA, 15 bp, Homo sapiens
gcccgccttgccctc

SEQ ID NO: 1433109 - DNA, 15 bp, Homo sapiens
cccgccttgccctcc

SEQ ID NO: 1433110 - DNA, 15 bp, Homo sapiens
ccgccttgccctccc

SEQ ID NO: 1433111 - DNA, 15 bp, Homo sapiens
cgccttgccctccca

SEQ ID NO: 1433112 - DNA, 15 bp, Homo sapiens
gccttgccctcccaa

SEQ ID NO: 1433113 - DNA, 15 bp, Homo sapiens
ccttgccctcccaaa

SEQ ID NO: 1433114 - DNA, 15 bp, Homo sapiens
cttgccctcccaaag

SEQ ID NO: 1433115 - DNA, 15 bp, Homo sapiens
ttgccctcccaaagc

SEQ ID NO: 1433116 - DNA, 15 bp, Homo sapiens
tgccctcccaaagcc

SEQ ID NO: 1433117 - DNA, 15 bp, Homo sapiens
gccctcccaaagcca

SEQ ID NO: 1433118 - DNA, 15 bp, Homo sapiens
ccctcccaaagccag

SEQ ID NO: 1433119 - DNA, 15 bp, Homo sapiens
cctcccaaagccaga

SEQ ID NO: 1433120 - DNA, 15 bp, Homo sapiens
ctcccaaagccagaa

SEQ ID NO: 1433121 - DNA, 15 bp, Homo sapiens
tcccaaagccagaaa

SEQ ID NO: 1433122 - DNA, 15 bp, Homo sapiens
cccaaagccagaaaa

SEQ ID NO: 1433123 - DNA, 15 bp, Homo sapiens
ccaaagccagaaaac

SEQ ID NO: 1433124 - DNA, 15 bp, Homo sapiens
caaagccagaaaaca

SEQ ID NO: 1433125 - DNA, 15 bp, Homo sapiens
aaagccagaaaacat

SEQ ID NO: 1433126 - DNA, 15 bp, Homo sapiens
aagccagaaaacatt

SEQ ID NO: 1433127 - DNA, 15 bp, Homo sapiens
agccagaaaacattt

SEQ ID NO: 1433128 - DNA, 15 bp, Homo sapiens
gccagaaaacattta

SEQ ID NO: 1433129 - DNA, 15 bp, Homo sapiens
ccagaaaacatttag

SEQ ID NO: 1433130 - DNA, 15 bp, Homo sapiens
cagaaaacatttaga

SEQ ID NO: 1433131 - DNA, 15 bp, Homo sapiens
agaaaacatttagaa

SEQ ID NO: 1433132 - DNA, 15 bp, Homo sapiens
gaaaacatttagaat

SEQ ID NO: 1433133 - DNA, 15 bp, Homo sapiens
aaaacatttagaata

SEQ ID NO: 1433134 - DNA, 15 bp, Homo sapiens
aaacatttagaatat

SEQ ID NO: 1433135 - DNA, 15 bp, Homo sapiens
aacatttagaatatc

SEQ ID NO: 1433136 - DNA, 15 bp, Homo sapiens
acatttagaatatct

SEQ ID NO: 1433137 - DNA, 15 bp, Homo sapiens
catttagaatatctt

SEQ ID NO: 1433138 - DNA, 15 bp, Homo sapiens
atttagaatatcttt

SEQ ID NO: 1433139 - DNA, 15 bp, Homo sapiens
tttagaatatctttc

SEQ ID NO: 1433140 - DNA, 15 bp, Homo sapiens
ttagaatatctttca

SEQ ID NO: 1433141 - DNA, 15 bp, Homo sapiens
agaatatctttcaga

SEQ ID NO: 1433142 - DNA, 15 bp, Homo sapiens
gaatatctttcagag

SEQ ID NO: 1433143 - DNA, 15 bp, Homo sapiens
aatatctttcagaga

SEQ ID NO: 1433144 - DNA, 15 bp, Homo sapiens
atatctttcagagat

SEQ ID NO: 1433145 - DNA, 15 bp, Homo sapiens
tatctttcagagatg

SEQ ID NO: 1433146 - DNA, 15 bp, Homo sapiens
atctttcagagatgt

SEQ ID NO: 1433147 - DNA, 15 bp, Homo sapiens
tctttcagagatgtg

SEQ ID NO: 1433148 - DNA, 15 bp, Homo sapiens
ctttcagagatgtgt

SEQ ID NO: 1433149 - DNA, 15 bp, Homo sapiens
tttcagagatgtgta

SEQ ID NO: 1433150 - DNA, 15 bp, Homo sapiens
ttcagagatgtgtat

SEQ ID NO: 1433151 - DNA, 15 bp, Homo sapiens
tcagagatgtgtatt

SEQ ID NO: 1433152 - DNA, 15 bp, Homo sapiens
cagagatgtgtattt

SEQ ID NO: 1433153 - DNA, 15 bp, Homo sapiens
agagatgtgtattta

SEQ ID NO: 1433154 - DNA, 15 bp, Homo sapiens
gagatgtgtatttac

SEQ ID NO: 1433155 - DNA, 15 bp, Homo sapiens
agatgtgtatttaca

SEQ ID NO: 1433156 - DNA, 15 bp, Homo sapiens
gatgtgtatttacac

SEQ ID NO: 1433157 - DNA, 15 bp, Homo sapiens
atgtgtatttacacc

SEQ ID NO: 1433158 - DNA, 15 bp, Homo sapiens
tgtgtatttacacca

SEQ ID NO: 1433159 - DNA, 15 bp, Homo sapiens
gtgtatttacaccac

SEQ ID NO: 1433160 - DNA, 15 bp, Homo sapiens
tgtatttacaccact

SEQ ID NO: 1433161 - DNA, 15 bp, Homo sapiens
gtatttacaccacta

SEQ ID NO: 1433162 - DNA, 15 bp, Homo sapiens
tatttacaccactat

SEQ ID NO: 1433163 - DNA, 15 bp, Homo sapiens
atttacaccactatt

SEQ ID NO: 1433164 - DNA, 15 bp, Homo sapiens
tttacaccactatta

SEQ ID NO: 1433165 - DNA, 15 bp, Homo sapiens
ttacaccactattaa

SEQ ID NO: 1433166 - DNA, 15 bp, Homo sapiens
tacaccactattaac

SEQ ID NO: 1433167 - DNA, 15 bp, Homo sapiens
accactattaacaca

SEQ ID NO: 1433168 - DNA, 15 bp, Homo sapiens
ccactattaacacag

SEQ ID NO: 1433169 - DNA, 15 bp, Homo sapiens
cactattaacacagg

SEQ ID NO: 1433170 - DNA, 15 bp, Homo sapiens
actattaacacaggg

SEQ ID NO: 1433171 - DNA, 15 bp, Homo sapiens
ctattaacacagggc

SEQ ID NO: 1433172 - DNA, 15 bp, Homo sapiens
tattaacacagggct

SEQ ID NO: 1433173 - DNA, 15 bp, Homo sapiens
attaacacagggctg

SEQ ID NO: 1433174 - DNA, 15 bp, Homo sapiens
ttaacacagggctgt

SEQ ID NO: 1433175 - DNA, 15 bp, Homo sapiens
taacacagggctgta

SEQ ID NO: 1433176 - DNA, 15 bp, Homo sapiens
aacacagggctgtat

SEQ ID NO: 1433177 - DNA, 15 bp, Homo sapiens
acacagggctgtata

SEQ ID NO: 1433178 - DNA, 15 bp, Homo sapiens
cacagggctgtatag

SEQ ID NO: 1433179 - DNA, 15 bp, Homo sapiens
acagggctgtatagc

SEQ ID NO: 1433180 - DNA, 15 bp, Homo sapiens
cagggctgtatagca

SEQ ID NO: 1433181 - DNA, 15 bp, Homo sapiens
agggctgtatagcag

SEQ ID NO: 1433182 - DNA, 15 bp, Homo sapiens
gggctgtatagcagt

SEQ ID NO: 1433183 - DNA, 15 bp, Homo sapiens
ggctgtatagcagtc

SEQ ID NO: 1433184 - DNA, 15 bp, Homo sapiens
gctgtatagcagtcc

SEQ ID NO: 1433185 - DNA, 15 bp, Homo sapiens
ctgtatagcagtcca

SEQ ID NO: 1433186 - DNA, 15 bp, Homo sapiens
tgtatagcagtccag

SEQ ID NO: 1433187 - DNA, 15 bp, Homo sapiens
gtatagcagtccagt

SEQ ID NO: 1433188 - DNA, 15 bp, Homo sapiens
tatagcagtccagta

SEQ ID NO: 1433189 - DNA, 15 bp, Homo sapiens
atagcagtccagtac

SEQ ID NO: 1433190 - DNA, 15 bp, Homo sapiens
tagcagtccagtact

SEQ ID NO: 1433191 - DNA, 15 bp, Homo sapiens
agcagtccagtactg

SEQ ID NO: 1433192 - DNA, 15 bp, Homo sapiens
gcagtccagtactgg

SEQ ID NO: 1433193 - DNA, 15 bp, Homo sapiens
cagtccagtactgga

SEQ ID NO: 1433194 - DNA, 15 bp, Homo sapiens
tccagtactggacta

SEQ ID NO: 1433195 - DNA, 15 bp, Homo sapiens
ccagtactggactat

SEQ ID NO: 1433196 - DNA, 15 bp, Homo sapiens
cagtactggactatg

SEQ ID NO: 1433197 - DNA, 15 bp, Homo sapiens
agtactggactatgt

SEQ ID NO: 1433198 - DNA, 15 bp, Homo sapiens
gtactggactatgta

SEQ ID NO: 1433199 - DNA, 15 bp, Homo sapiens
tactggactatgtag

SEQ ID NO: 1433200 - DNA, 15 bp, Homo sapiens
actggactatgtagt

SEQ ID NO: 1433201 - DNA, 15 bp, Homo sapiens
ctggactatgtagtc

SEQ ID NO: 1433202 - DNA, 15 bp, Homo sapiens
tggactatgtagtcc

SEQ ID NO: 1433203 - DNA, 15 bp, Homo sapiens
ggactatgtagtcca

SEQ ID NO: 1433204 - DNA, 15 bp, Homo sapiens
gactatgtagtccag

SEQ ID NO: 1433205 - DNA, 15 bp, Homo sapiens
actatgtagtccagt

SEQ ID NO: 1433206 - DNA, 15 bp, Homo sapiens
ctatgtagtccagta

SEQ ID NO: 1433207 - DNA, 15 bp, Homo sapiens
tatgtagtccagtac

SEQ ID NO: 1433208 - DNA, 15 bp, Homo sapiens
atgtagtccagtact

SEQ ID NO: 1433209 - DNA, 15 bp, Homo sapiens
tgtagtccagtacta

SEQ ID NO: 1433210 - DNA, 15 bp, Homo sapiens
gtagtccagtactat

SEQ ID NO: 1433211 - DNA, 15 bp, Homo sapiens
tagtccagtactatt

SEQ ID NO: 1433212 - DNA, 15 bp, Homo sapiens
agtccagtactattc

SEQ ID NO: 1433213 - DNA, 15 bp, Homo sapiens
gtccagtactattct

SEQ ID NO: 1433214 - DNA, 15 bp, Homo sapiens
tccagtactattctt

SEQ ID NO: 1433215 - DNA, 15 bp, Homo sapiens
ccagtactattcttt

SEQ ID NO: 1433216 - DNA, 15 bp, Homo sapiens
cagtactattctttt

SEQ ID NO: 1433217 - DNA, 15 bp, Homo sapiens
agtactattcttttc

SEQ ID NO: 1433218 - DNA, 15 bp, Homo sapiens
gtactattcttttcc

SEQ ID NO: 1433219 - DNA, 15 bp, Homo sapiens
tactattcttttcct

SEQ ID NO: 1433220 - DNA, 15 bp, Homo sapiens
actattcttttcctt

SEQ ID NO: 1433221 - DNA, 15 bp, Homo sapiens
ctattcttttcctta

SEQ ID NO: 1433222 - DNA, 15 bp, Homo sapiens
tattcttttccttac

SEQ ID NO: 1433223 - DNA, 15 bp, Homo sapiens
attcttttccttact

SEQ ID NO: 1433224 - DNA, 15 bp, Homo sapiens
ttcttttccttactg

SEQ ID NO: 1433225 - DNA, 15 bp, Homo sapiens
tcttttccttactgg

SEQ ID NO: 1433226 - DNA, 15 bp, Homo sapiens
cttttccttactgga

SEQ ID NO: 1433227 - DNA, 15 bp, Homo sapiens
ttttccttactggag

SEQ ID NO: 1433228 - DNA, 15 bp, Homo sapiens
tttccttactggagg

SEQ ID NO: 1433229 - DNA, 15 bp, Homo sapiens
ttccttactggaggg

SEQ ID NO: 1433230 - DNA, 15 bp, Homo sapiens
tccttactggagggc

SEQ ID NO: 1433231 - DNA, 15 bp, Homo sapiens
ccttactggagggcc

SEQ ID NO: 1433232 - DNA, 15 bp, Homo sapiens
cttactggagggcca

SEQ ID NO: 1433233 - DNA, 15 bp, Homo sapiens
ttactggagggccag

SEQ ID NO: 1433234 - DNA, 15 bp, Homo sapiens
tactggagggccagg

SEQ ID NO: 1433235 - DNA, 15 bp, Homo sapiens
actggagggccaggc

SEQ ID NO: 1433236 - DNA, 15 bp, Homo sapiens
ctggagggccaggcg

SEQ ID NO: 1433237 - DNA, 15 bp, Homo sapiens
tggagggccaggcgt

SEQ ID NO: 1433238 - DNA, 15 bp, Homo sapiens
ggagggccaggcgtg

SEQ ID NO: 1433239 - DNA, 15 bp, Homo sapiens
gagggccaggcgtgg

SEQ ID NO: 1433240 - DNA, 15 bp, Homo sapiens
agggccaggcgtggt

SEQ ID NO: 1433241 - DNA, 15 bp, Homo sapiens
gggccaggcgtggtg

SEQ ID NO: 1433242 - DNA, 15 bp, Homo sapiens
gcagtgagctgggac

SEQ ID NO: 1433243 - DNA, 15 bp, Homo sapiens
cagtgagctgggacc

SEQ ID NO: 1433244 - DNA, 15 bp, Homo sapiens
agtgagctgggaccg

SEQ ID NO: 1433245 - DNA, 15 bp, Homo sapiens
gtgagctgggaccgt

SEQ ID NO: 1433246 - DNA, 15 bp, Homo sapiens
tgagctgggaccgtg

SEQ ID NO: 1433247 - DNA, 15 bp, Homo sapiens
gagctgggaccgtgc

SEQ ID NO: 1433248 - DNA, 15 bp, Homo sapiens
agctgggaccgtgcc

SEQ ID NO: 1433249 - DNA, 15 bp, Homo sapiens
gctgggaccgtgcca

SEQ ID NO: 1433250 - DNA, 15 bp, Homo sapiens
ctgggaccgtgccat

SEQ ID NO: 1433251 - DNA, 15 bp, Homo sapiens
tgggaccgtgccatt

SEQ ID NO: 1433252 - DNA, 15 bp, Homo sapiens
gggaccgtgccattg

SEQ ID NO: 1433253 - DNA, 15 bp, Homo sapiens
ggaccgtgccattgc

SEQ ID NO: 1433254 - DNA, 15 bp, Homo sapiens
gaccgtgccattgca

SEQ ID NO: 1433255 - DNA, 15 bp, Homo sapiens
accgtgccattgcac

SEQ ID NO: 1433256 - DNA, 15 bp, Homo sapiens
ccgtgccattgcact

SEQ ID NO: 1433257 - DNA, 15 bp, Homo sapiens
tctcaaaacaaaaaa

SEQ ID NO: 1433258 - DNA, 15 bp, Homo sapiens
ctcaaaacaaaaaaa

SEQ ID NO: 1433259 - DNA, 15 bp, Homo sapiens
tcaaaacaaaaaaaa

SEQ ID NO: 1433260 - DNA, 15 bp, Homo sapiens
aacaaaaaaaaaaag

SEQ ID NO: 1433261 - DNA, 15 bp, Homo sapiens
acaaaaaaaaaaaga

SEQ ID NO: 1433262 - DNA, 15 bp, Homo sapiens
caaaaaaaaaaagag

SEQ ID NO: 1433263 - DNA, 15 bp, Homo sapiens
aaagagagagagagc

SEQ ID NO: 1433264 - DNA, 15 bp, Homo sapiens
aagagagagagagca

SEQ ID NO: 1433265 - DNA, 15 bp, Homo sapiens
agagagagagagcag

SEQ ID NO: 1433266 - DNA, 15 bp, Homo sapiens
gagagagagagcagt

SEQ ID NO: 1433267 - DNA, 15 bp, Homo sapiens
agagagagagcagta

SEQ ID NO: 1433268 - DNA, 15 bp, Homo sapiens
gagagagagcagtaa

SEQ ID NO: 1433269 - DNA, 15 bp, Homo sapiens
agagagagcagtaat

SEQ ID NO: 1433270 - DNA, 15 bp, Homo sapiens
gagagagcagtaatt

SEQ ID NO: 1433271 - DNA, 15 bp, Homo sapiens
agagagcagtaattc

SEQ ID NO: 1433272 - DNA, 15 bp, Homo sapiens
gagagcagtaattca

SEQ ID NO: 1433273 - DNA, 15 bp, Homo sapiens
agagcagtaattcag

SEQ ID NO: 1433274 - DNA, 15 bp, Homo sapiens
gagcagtaattcagg

SEQ ID NO: 1433275 - DNA, 15 bp, Homo sapiens
agcagtaattcaggt

SEQ ID NO: 1433276 - DNA, 15 bp, Homo sapiens
gcagtaattcaggtc

SEQ ID NO: 1433277 - DNA, 15 bp, Homo sapiens
cagtaattcaggtct

SEQ ID NO: 1433278 - DNA, 15 bp, Homo sapiens
agtaattcaggtctc

SEQ ID NO: 1433279 - DNA, 15 bp, Homo sapiens
gtaattcaggtctca

SEQ ID NO: 1433280 - DNA, 15 bp, Homo sapiens
taattcaggtctcac

SEQ ID NO: 1433281 - DNA, 15 bp, Homo sapiens
aattcaggtctcacc

SEQ ID NO: 1433282 - DNA, 15 bp, Homo sapiens
attcaggtctcaccc

SEQ ID NO: 1433283 - DNA, 15 bp, Homo sapiens
ttcaggtctcaccca

SEQ ID NO: 1433284 - DNA, 15 bp, Homo sapiens
tcaggtctcacccat

SEQ ID NO: 1433285 - DNA, 15 bp, Homo sapiens
caggtctcacccatc

SEQ ID NO: 1433286 - DNA, 15 bp, Homo sapiens
aggtctcacccatct

SEQ ID NO: 1433287 - DNA, 15 bp, Homo sapiens
ggtctcacccatctt

SEQ ID NO: 1433288 - DNA, 15 bp, Homo sapiens
gtctcacccatcttc

SEQ ID NO: 1433289 - DNA, 15 bp, Homo sapiens
tctcacccatcttca

SEQ ID NO: 1433290 - DNA, 15 bp, Homo sapiens
ctcacccatcttcaa

SEQ ID NO: 1433291 - DNA, 15 bp, Homo sapiens
tcacccatcttcaat

SEQ ID NO: 1433292 - DNA, 15 bp, Homo sapiens
acccatcttcaatcc

SEQ ID NO: 1433293 - DNA, 15 bp, Homo sapiens
cccatcttcaatcca

SEQ ID NO: 1433294 - DNA, 15 bp, Homo sapiens
ccatcttcaatccag

SEQ ID NO: 1433295 - DNA, 15 bp, Homo sapiens
catcttcaatccagg

SEQ ID NO: 1433296 - DNA, 15 bp, Homo sapiens
atcttcaatccaggg

SEQ ID NO: 1433297 - DNA, 15 bp, Homo sapiens
tcttcaatccagggg

SEQ ID NO: 1433298 - DNA, 15 bp, Homo sapiens
cttcaatccaggggg

SEQ ID NO: 1433299 - DNA, 15 bp, Homo sapiens
ttcaatccagggggc

SEQ ID NO: 1433300 - DNA, 15 bp, Homo sapiens
tcaatccagggggcc

SEQ ID NO: 1433301 - DNA, 15 bp, Homo sapiens
caatccagggggcct

SEQ ID NO: 1433302 - DNA, 15 bp, Homo sapiens
aatccagggggccta

SEQ ID NO: 1433303 - DNA, 15 bp, Homo sapiens
atccagggggcctag

SEQ ID NO: 1433304 - DNA, 15 bp, Homo sapiens
tccagggggcctagc

SEQ ID NO: 1433305 - DNA, 15 bp, Homo sapiens
ccagggggcctagcc

SEQ ID NO: 1433306 - DNA, 15 bp, Homo sapiens
cagggggcctagcct

SEQ ID NO: 1433307 - DNA, 15 bp, Homo sapiens
agggggcctagcctt

SEQ ID NO: 1433308 - DNA, 15 bp, Homo sapiens
gggggcctagcctta

SEQ ID NO: 1433309 - DNA, 15 bp, Homo sapiens
ggggcctagccttag

SEQ ID NO: 1433310 - DNA, 15 bp, Homo sapiens
gggcctagccttagt

SEQ ID NO: 1433311 - DNA, 15 bp, Homo sapiens
ggcctagccttagta

SEQ ID NO: 1433312 - DNA, 15 bp, Homo sapiens
gcctagccttagtat

SEQ ID NO: 1433313 - DNA, 15 bp, Homo sapiens
cctagccttagtatt

SEQ ID NO: 1433314 - DNA, 15 bp, Homo sapiens
ctagccttagtattt

SEQ ID NO: 1433315 - DNA, 15 bp, Homo sapiens
tagccttagtatttg

SEQ ID NO: 1433316 - DNA, 15 bp, Homo sapiens
agccttagtatttga

SEQ ID NO: 1433317 - DNA, 15 bp, Homo sapiens
gccttagtatttgac

SEQ ID NO: 1433318 - DNA, 15 bp, Homo sapiens
ccttagtatttgacc

SEQ ID NO: 1433319 - DNA, 15 bp, Homo sapiens
cttagtatttgaccc

SEQ ID NO: 1433320 - DNA, 15 bp, Homo sapiens
ttagtatttgaccca

SEQ ID NO: 1433321 - DNA, 15 bp, Homo sapiens
tagtatttgacccat

SEQ ID NO: 1433322 - DNA, 15 bp, Homo sapiens
agtatttgacccata

SEQ ID NO: 1433323 - DNA, 15 bp, Homo sapiens
gtatttgacccatag

SEQ ID NO: 1433324 - DNA, 15 bp, Homo sapiens
tatttgacccatagt

SEQ ID NO: 1433325 - DNA, 15 bp, Homo sapiens
atttgacccatagta

SEQ ID NO: 1433326 - DNA, 15 bp, Homo sapiens
tttgacccatagtaa

SEQ ID NO: 1433327 - DNA, 15 bp, Homo sapiens
ttgacccatagtaag

SEQ ID NO: 1433328 - DNA, 15 bp, Homo sapiens
tgacccatagtaagc

SEQ ID NO: 1433329 - DNA, 15 bp, Homo sapiens
gacccatagtaagca

SEQ ID NO: 1433330 - DNA, 15 bp, Homo sapiens
acccatagtaagcac

SEQ ID NO: 1433331 - DNA, 15 bp, Homo sapiens
cccatagtaagcacc

SEQ ID NO: 1433332 - DNA, 15 bp, Homo sapiens
ccatagtaagcaccc

SEQ ID NO: 1433333 - DNA, 15 bp, Homo sapiens
catagtaagcaccca

SEQ ID NO: 1433334 - DNA, 15 bp, Homo sapiens
atagtaagcacccaa

SEQ ID NO: 1433335 - DNA, 15 bp, Homo sapiens
tagtaagcacccaat

SEQ ID NO: 1433336 - DNA, 15 bp, Homo sapiens
agtaagcacccaata

SEQ ID NO: 1433337 - DNA, 15 bp, Homo sapiens
gtaagcacccaataa

SEQ ID NO: 1433338 - DNA, 15 bp, Homo sapiens
taagcacccaataat

SEQ ID NO: 1433339 - DNA, 15 bp, Homo sapiens
aagcacccaataatt

SEQ ID NO: 1433340 - DNA, 15 bp, Homo sapiens
agcacccaataattg

SEQ ID NO: 1433341 - DNA, 15 bp, Homo sapiens
gcacccaataattgt

SEQ ID NO: 1433342 - DNA, 15 bp, Homo sapiens
cacccaataattgtt

SEQ ID NO: 1433343 - DNA, 15 bp, Homo sapiens
acccaataattgttt

SEQ ID NO: 1433344 - DNA, 15 bp, Homo sapiens
cccaataattgttta

SEQ ID NO: 1433345 - DNA, 15 bp, Homo sapiens
ccaataattgtttaa

SEQ ID NO: 1433346 - DNA, 15 bp, Homo sapiens
caataattgtttaaa

SEQ ID NO: 1433347 - DNA, 15 bp, Homo sapiens
aataattgtttaaat

SEQ ID NO: 1433348 - DNA, 15 bp, Homo sapiens
ataattgtttaaatt

SEQ ID NO: 1433349 - DNA, 15 bp, Homo sapiens
taattgtttaaatta

SEQ ID NO: 1433350 - DNA, 15 bp, Homo sapiens
aattgtttaaattaa

SEQ ID NO: 1433351 - DNA, 15 bp, Homo sapiens
attgtttaaattaat

SEQ ID NO: 1433352 - DNA, 15 bp, Homo sapiens
ttgtttaaattaatt

SEQ ID NO: 1433353 - DNA, 15 bp, Homo sapiens
tgtttaaattaatta

SEQ ID NO: 1433354 - DNA, 15 bp, Homo sapiens
gtttaaattaattaa

SEQ ID NO: 1433355 - DNA, 15 bp, Homo sapiens
tttaaattaattaac

SEQ ID NO: 1433356 - DNA, 15 bp, Homo sapiens
ttaaattaattaacc

SEQ ID NO: 1433357 - DNA, 15 bp, Homo sapiens
taaattaattaacct

SEQ ID NO: 1433358 - DNA, 15 bp, Homo sapiens
aaattaattaacctc

SEQ ID NO: 1433359 - DNA, 15 bp, Homo sapiens
aattaattaacctct

SEQ ID NO: 1433360 - DNA, 15 bp, Homo sapiens
attaattaacctctg

SEQ ID NO: 1433361 - DNA, 15 bp, Homo sapiens
ttaattaacctctga

SEQ ID NO: 1433362 - DNA, 15 bp, Homo sapiens
taattaacctctgag

SEQ ID NO: 1433363 - DNA, 15 bp, Homo sapiens
aattaacctctgagg

SEQ ID NO: 1433364 - DNA, 15 bp, Homo sapiens
attaacctctgaggc

SEQ ID NO: 1433365 - DNA, 15 bp, Homo sapiens
ttaacctctgaggcc

SEQ ID NO: 1433366 - DNA, 15 bp, Homo sapiens
taacctctgaggccc

SEQ ID NO: 1433367 - DNA, 15 bp, Homo sapiens
aacctctgaggccct

SEQ ID NO: 1433368 - DNA, 15 bp, Homo sapiens
acctctgaggccctt

SEQ ID NO: 1433369 - DNA, 15 bp, Homo sapiens
cctctgaggcccttt

SEQ ID NO: 1433370 - DNA, 15 bp, Homo sapiens
ctctgaggcccttta

SEQ ID NO: 1433371 - DNA, 15 bp, Homo sapiens
tctgaggccctttaa

SEQ ID NO: 1433372 - DNA, 15 bp, Homo sapiens
ctgaggccctttaaa

SEQ ID NO: 1433373 - DNA, 15 bp, Homo sapiens
tgaggccctttaaat

SEQ ID NO: 1433374 - DNA, 15 bp, Homo sapiens
gaggccctttaaatc

SEQ ID NO: 1433375 - DNA, 15 bp, Homo sapiens
aggccctttaaatct

SEQ ID NO: 1433376 - DNA, 15 bp, Homo sapiens
ggccctttaaatctg

SEQ ID NO: 1433377 - DNA, 15 bp, Homo sapiens
gccctttaaatctgt

SEQ ID NO: 1433378 - DNA, 15 bp, Homo sapiens
ccctttaaatctgtt

SEQ ID NO: 1433379 - DNA, 15 bp, Homo sapiens
cctttaaatctgttg

SEQ ID NO: 1433380 - DNA, 15 bp, Homo sapiens
ctttaaatctgttga

SEQ ID NO: 1433381 - DNA, 15 bp, Homo sapiens
tttaaatctgttgat

SEQ ID NO: 1433382 - DNA, 15 bp, Homo sapiens
ttaaatctgttgata

SEQ ID NO: 1433383 - DNA, 15 bp, Homo sapiens
taaatctgttgataa

SEQ ID NO: 1433384 - DNA, 15 bp, Homo sapiens
aaatctgttgataag

SEQ ID NO: 1433385 - DNA, 15 bp, Homo sapiens
aatctgttgataagt

SEQ ID NO: 1433386 - DNA, 15 bp, Homo sapiens
atctgttgataagta

SEQ ID NO: 1433387 - DNA, 15 bp, Homo sapiens
tctgttgataagtat

SEQ ID NO: 1433388 - DNA, 15 bp, Homo sapiens
ctgttgataagtatc

SEQ ID NO: 1433389 - DNA, 15 bp, Homo sapiens
tgttgataagtatct

SEQ ID NO: 1433390 - DNA, 15 bp, Homo sapiens
gttgataagtatctt

SEQ ID NO: 1433391 - DNA, 15 bp, Homo sapiens
ttgataagtatctta

SEQ ID NO: 1433392 - DNA, 15 bp, Homo sapiens
tgataagtatcttat

SEQ ID NO: 1433393 - DNA, 15 bp, Homo sapiens
gataagtatcttatt

SEQ ID NO: 1433394 - DNA, 15 bp, Homo sapiens
ataagtatcttattt

SEQ ID NO: 1433395 - DNA, 15 bp, Homo sapiens
taagtatcttatttt

SEQ ID NO: 1433396 - DNA, 15 bp, Homo sapiens
aagtatcttattttg

SEQ ID NO: 1433397 - DNA, 15 bp, Homo sapiens
agtatcttattttgc

SEQ ID NO: 1433398 - DNA, 15 bp, Homo sapiens
gtatcttattttgca

SEQ ID NO: 1433399 - DNA, 15 bp, Homo sapiens
tatcttattttgcaa

SEQ ID NO: 1433400 - DNA, 15 bp, Homo sapiens
atcttattttgcaaa

SEQ ID NO: 1433401 - DNA, 15 bp, Homo sapiens
tcttattttgcaaag

SEQ ID NO: 1433402 - DNA, 15 bp, Homo sapiens
cttattttgcaaagt

SEQ ID NO: 1433403 - DNA, 15 bp, Homo sapiens
ttattttgcaaagtc

SEQ ID NO: 1433404 - DNA, 15 bp, Homo sapiens
tattttgcaaagtcc

SEQ ID NO: 1433405 - DNA, 15 bp, Homo sapiens
attttgcaaagtcct

SEQ ID NO: 1433406 - DNA, 15 bp, Homo sapiens
ttttgcaaagtccta

SEQ ID NO: 1433407 - DNA, 15 bp, Homo sapiens
tttgcaaagtcctaa

SEQ ID NO: 1433408 - DNA, 15 bp, Homo sapiens
ttgcaaagtcctaag

SEQ ID NO: 1433409 - DNA, 15 bp, Homo sapiens
tgcaaagtcctaagc

SEQ ID NO: 1433410 - DNA, 15 bp, Homo sapiens
gcaaagtcctaagca

SEQ ID NO: 1433411 - DNA, 15 bp, Homo sapiens
caaagtcctaagcac

SEQ ID NO: 1433412 - DNA, 15 bp, Homo sapiens
aaagtcctaagcact

SEQ ID NO: 1433413 - DNA, 15 bp, Homo sapiens
aagtcctaagcactt

SEQ ID NO: 1433414 - DNA, 15 bp, Homo sapiens
agtcctaagcacttg

SEQ ID NO: 1433415 - DNA, 15 bp, Homo sapiens
gtcctaagcacttgg

SEQ ID NO: 1433416 - DNA, 15 bp, Homo sapiens
tcctaagcacttgga

SEQ ID NO: 1433417 - DNA, 15 bp, Homo sapiens
cctaagcacttggaa

SEQ ID NO: 1433418 - DNA, 15 bp, Homo sapiens
ctaagcacttggaag

SEQ ID NO: 1433419 - DNA, 15 bp, Homo sapiens
taagcacttggaaga

SEQ ID NO: 1433420 - DNA, 15 bp, Homo sapiens
aagcacttggaagag

SEQ ID NO: 1433421 - DNA, 15 bp, Homo sapiens
agcacttggaagagc

SEQ ID NO: 1433422 - DNA, 15 bp, Homo sapiens
gcacttggaagagca

SEQ ID NO: 1433423 - DNA, 15 bp, Homo sapiens
cacttggaagagcag

SEQ ID NO: 1433424 - DNA, 15 bp, Homo sapiens
acttggaagagcaga

SEQ ID NO: 1433425 - DNA, 15 bp, Homo sapiens
cttggaagagcagag

SEQ ID NO: 1433426 - DNA, 15 bp, Homo sapiens
ttggaagagcagagg

SEQ ID NO: 1433427 - DNA, 15 bp, Homo sapiens
tggaagagcagagga

SEQ ID NO: 1433428 - DNA, 15 bp, Homo sapiens
ggaagagcagaggaa

SEQ ID NO: 1433429 - DNA, 15 bp, Homo sapiens
gaagagcagaggaac

SEQ ID NO: 1433430 - DNA, 15 bp, Homo sapiens
aagagcagaggaact

SEQ ID NO: 1433431 - DNA, 15 bp, Homo sapiens
agagcagaggaacta

SEQ ID NO: 1433432 - DNA, 15 bp, Homo sapiens
gagcagaggaactat

SEQ ID NO: 1433433 - DNA, 15 bp, Homo sapiens
agcagaggaactatt

SEQ ID NO: 1433434 - DNA, 15 bp, Homo sapiens
gcagaggaactattt

SEQ ID NO: 1433435 - DNA, 15 bp, Homo sapiens
cagaggaactattta

SEQ ID NO: 1433436 - DNA, 15 bp, Homo sapiens
agaggaactatttac

SEQ ID NO: 1433437 - DNA, 15 bp, Homo sapiens
gaggaactatttact

SEQ ID NO: 1433438 - DNA, 15 bp, Homo sapiens
aggaactatttactg

SEQ ID NO: 1433439 - DNA, 15 bp, Homo sapiens
ggaactatttactgg

SEQ ID NO: 1433440 - DNA, 15 bp, Homo sapiens
gaactatttactggg

SEQ ID NO: 1433441 - DNA, 15 bp, Homo sapiens
aactatttactgggt

SEQ ID NO: 1433442 - DNA, 15 bp, Homo sapiens
actatttactgggtg

SEQ ID NO: 1433443 - DNA, 15 bp, Homo sapiens
ctatttactgggtgt

SEQ ID NO: 1433444 - DNA, 15 bp, Homo sapiens
tatttactgggtgtg

SEQ ID NO: 1433445 - DNA, 15 bp, Homo sapiens
atttactgggtgtgt

SEQ ID NO: 1433446 - DNA, 15 bp, Homo sapiens
tttactgggtgtgta

SEQ ID NO: 1433447 - DNA, 15 bp, Homo sapiens
ttactgggtgtgtat

SEQ ID NO: 1433448 - DNA, 15 bp, Homo sapiens
tactgggtgtgtatg

SEQ ID NO: 1433449 - DNA, 15 bp, Homo sapiens
actgggtgtgtatgc

SEQ ID NO: 1433450 - DNA, 15 bp, Homo sapiens
ctgggtgtgtatgct

SEQ ID NO: 1433451 - DNA, 15 bp, Homo sapiens
tgggtgtgtatgctt

SEQ ID NO: 1433452 - DNA, 15 bp, Homo sapiens
gggtgtgtatgcttt

SEQ ID NO: 1433453 - DNA, 15 bp, Homo sapiens
ggtgtgtatgctttt

SEQ ID NO: 1433454 - DNA, 15 bp, Homo sapiens
gtgtgtatgcttttc

SEQ ID NO: 1433455 - DNA, 15 bp, Homo sapiens
tgtgtatgcttttct

SEQ ID NO: 1433456 - DNA, 15 bp, Homo sapiens
gtgtatgcttttcta

SEQ ID NO: 1433457 - DNA, 15 bp, Homo sapiens
tgtatgcttttctaa

SEQ ID NO: 1433458 - DNA, 15 bp, Homo sapiens
gtatgcttttctaac

SEQ ID NO: 1433459 - DNA, 15 bp, Homo sapiens
tatgcttttctaaca

SEQ ID NO: 1433460 - DNA, 15 bp, Homo sapiens
atgcttttctaacaa

SEQ ID NO: 1433461 - DNA, 15 bp, Homo sapiens
tgcttttctaacaat

SEQ ID NO: 1433462 - DNA, 15 bp, Homo sapiens
gcttttctaacaata

SEQ ID NO: 1433463 - DNA, 15 bp, Homo sapiens
cttttctaacaatat

SEQ ID NO: 1433464 - DNA, 15 bp, Homo sapiens
ttttctaacaatatt

SEQ ID NO: 1433465 - DNA, 15 bp, Homo sapiens
tttctaacaatattt

SEQ ID NO: 1433466 - DNA, 15 bp, Homo sapiens
ttctaacaatatttt

SEQ ID NO: 1433467 - DNA, 15 bp, Homo sapiens
tctaacaatatttta

SEQ ID NO: 1433468 - DNA, 15 bp, Homo sapiens
ctaacaatattttat

SEQ ID NO: 1433469 - DNA, 15 bp, Homo sapiens
taacaatattttata

SEQ ID NO: 1433470 - DNA, 15 bp, Homo sapiens
aacaatattttatag

SEQ ID NO: 1433471 - DNA, 15 bp, Homo sapiens
acaatattttatagc

SEQ ID NO: 1433472 - DNA, 15 bp, Homo sapiens
caatattttatagct

SEQ ID NO: 1433473 - DNA, 15 bp, Homo sapiens
aatattttatagctg

SEQ ID NO: 1433474 - DNA, 15 bp, Homo sapiens
atattttatagctgg

SEQ ID NO: 1433475 - DNA, 15 bp, Homo sapiens
tattttatagctggc

SEQ ID NO: 1433476 - DNA, 15 bp, Homo sapiens
attttatagctggct

SEQ ID NO: 1433477 - DNA, 15 bp, Homo sapiens
ttttatagctggctt

SEQ ID NO: 1433478 - DNA, 15 bp, Homo sapiens
tttatagctggcttt

SEQ ID NO: 1433479 - DNA, 15 bp, Homo sapiens
ttatagctggctttt

SEQ ID NO: 1433480 - DNA, 15 bp, Homo sapiens
tatagctggcttttg

SEQ ID NO: 1433481 - DNA, 15 bp, Homo sapiens
atagctggcttttgt

SEQ ID NO: 1433482 - DNA, 15 bp, Homo sapiens
tagctggcttttgtt

SEQ ID NO: 1433483 - DNA, 15 bp, Homo sapiens
agctggcttttgttt

SEQ ID NO: 1433484 - DNA, 15 bp, Homo sapiens
gctggcttttgtttt

SEQ ID NO: 1433485 - DNA, 15 bp, Homo sapiens
ctggcttttgttttt

SEQ ID NO: 1433486 - DNA, 15 bp, Homo sapiens
tggcttttgttttta

SEQ ID NO: 1433487 - DNA, 15 bp, Homo sapiens
ggcttttgtttttag

SEQ ID NO: 1433488 - DNA, 15 bp, Homo sapiens
gcttttgtttttaga

SEQ ID NO: 1433489 - DNA, 15 bp, Homo sapiens
cttttgtttttagaa

SEQ ID NO: 1433490 - DNA, 15 bp, Homo sapiens
ttttgtttttagaat

SEQ ID NO: 1433491 - DNA, 15 bp, Homo sapiens
tttgtttttagaatg

SEQ ID NO: 1433492 - DNA, 15 bp, Homo sapiens
ttgtttttagaatga

SEQ ID NO: 1433493 - DNA, 15 bp, Homo sapiens
tgtttttagaatgaa

SEQ ID NO: 1433494 - DNA, 15 bp, Homo sapiens
gtttttagaatgaat

SEQ ID NO: 1433495 - DNA, 15 bp, Homo sapiens
tttttagaatgaatt

SEQ ID NO: 1433496 - DNA, 15 bp, Homo sapiens
ttttagaatgaattt

SEQ ID NO: 1433497 - DNA, 15 bp, Homo sapiens
tttagaatgaatttg

SEQ ID NO: 1433498 - DNA, 15 bp, Homo sapiens
ttagaatgaatttga

SEQ ID NO: 1433499 - DNA, 15 bp, Homo sapiens
tagaatgaatttgaa

SEQ ID NO: 1433500 - DNA, 15 bp, Homo sapiens
agaatgaatttgaac

SEQ ID NO: 1433501 - DNA, 15 bp, Homo sapiens
gaatgaatttgaaca

SEQ ID NO: 1433502 - DNA, 15 bp, Homo sapiens
aatgaatttgaacat

SEQ ID NO: 1433503 - DNA, 15 bp, Homo sapiens
atgaatttgaacatt

SEQ ID NO: 1433504 - DNA, 15 bp, Homo sapiens
tgaatttgaacattg

SEQ ID NO: 1433505 - DNA, 15 bp, Homo sapiens
gaatttgaacattga

SEQ ID NO: 1433506 - DNA, 15 bp, Homo sapiens
aatttgaacattgaa

SEQ ID NO: 1433507 - DNA, 15 bp, Homo sapiens
atttgaacattgaaa

SEQ ID NO: 1433508 - DNA, 15 bp, Homo sapiens
tttgaacattgaaaa

SEQ ID NO: 1433509 - DNA, 15 bp, Homo sapiens
ttgaacattgaaaag

SEQ ID NO: 1433510 - DNA, 15 bp, Homo sapiens
tgaacattgaaaagg

SEQ ID NO: 1433511 - DNA, 15 bp, Homo sapiens
gaacattgaaaaggc

SEQ ID NO: 1433512 - DNA, 15 bp, Homo sapiens
aacattgaaaaggca

SEQ ID NO: 1433513 - DNA, 15 bp, Homo sapiens
acattgaaaaggcag

SEQ ID NO: 1433514 - DNA, 15 bp, Homo sapiens
cattgaaaaggcagg

SEQ ID NO: 1433515 - DNA, 15 bp, Homo sapiens
attgaaaaggcaggc

SEQ ID NO: 1433516 - DNA, 15 bp, Homo sapiens
ttgaaaaggcaggca

SEQ ID NO: 1433517 - DNA, 15 bp, Homo sapiens
tgaaaaggcaggcaa

SEQ ID NO: 1433518 - DNA, 15 bp, Homo sapiens
gaaaaggcaggcaat

SEQ ID NO: 1433519 - DNA, 15 bp, Homo sapiens
aaaaggcaggcaata

SEQ ID NO: 1433520 - DNA, 15 bp, Homo sapiens
aaaggcaggcaatag

SEQ ID NO: 1433521 - DNA, 15 bp, Homo sapiens
aaggcaggcaatagg

SEQ ID NO: 1433522 - DNA, 15 bp, Homo sapiens
aggcaggcaataggg

SEQ ID NO: 1433523 - DNA, 15 bp, Homo sapiens
ggcaggcaataggga

SEQ ID NO: 1433524 - DNA, 15 bp, Homo sapiens
gcaggcaatagggat

SEQ ID NO: 1433525 - DNA, 15 bp, Homo sapiens
caggcaatagggatg

SEQ ID NO: 1433526 - DNA, 15 bp, Homo sapiens
aggcaatagggatga

SEQ ID NO: 1433527 - DNA, 15 bp, Homo sapiens
ggcaatagggatgat

SEQ ID NO: 1433528 - DNA, 15 bp, Homo sapiens
gcaatagggatgatt

SEQ ID NO: 1433529 - DNA, 15 bp, Homo sapiens
caatagggatgattc

SEQ ID NO: 1433530 - DNA, 15 bp, Homo sapiens
aatagggatgattct

SEQ ID NO: 1433531 - DNA, 15 bp, Homo sapiens
atagggatgattctg

SEQ ID NO: 1433532 - DNA, 15 bp, Homo sapiens
tagggatgattctgt

SEQ ID NO: 1433533 - DNA, 15 bp, Homo sapiens
agggatgattctgtg

SEQ ID NO: 1433534 - DNA, 15 bp, Homo sapiens
gggatgattctgtga

SEQ ID NO: 1433535 - DNA, 15 bp, Homo sapiens
ggatgattctgtgaa

SEQ ID NO: 1433536 - DNA, 15 bp, Homo sapiens
gatgattctgtgaat

SEQ ID NO: 1433537 - DNA, 15 bp, Homo sapiens
atgattctgtgaatt

SEQ ID NO: 1433538 - DNA, 15 bp, Homo sapiens
tgattctgtgaattc

SEQ ID NO: 1433539 - DNA, 15 bp, Homo sapiens
gattctgtgaattct

SEQ ID NO: 1433540 - DNA, 15 bp, Homo sapiens
attctgtgaattctg

SEQ ID NO: 1433541 - DNA, 15 bp, Homo sapiens
ttctgtgaattctgc

SEQ ID NO: 1433542 - DNA, 15 bp, Homo sapiens
tctgtgaattctgct

SEQ ID NO: 1433543 - DNA, 15 bp, Homo sapiens
ctgtgaattctgcta

SEQ ID NO: 1433544 - DNA, 15 bp, Homo sapiens
tgtgaattctgctaa

SEQ ID NO: 1433545 - DNA, 15 bp, Homo sapiens
gtgaattctgctaaa

SEQ ID NO: 1433546 - DNA, 15 bp, Homo sapiens
tgaattctgctaaaa

SEQ ID NO: 1433547 - DNA, 15 bp, Homo sapiens
gaattctgctaaaac

SEQ ID NO: 1433548 - DNA, 15 bp, Homo sapiens
aattctgctaaaact

SEQ ID NO: 1433549 - DNA, 15 bp, Homo sapiens
attctgctaaaactg

SEQ ID NO: 1433550 - DNA, 15 bp, Homo sapiens
ttctgctaaaactga

SEQ ID NO: 1433551 - DNA, 15 bp, Homo sapiens
tctgctaaaactgag

SEQ ID NO: 1433552 - DNA, 15 bp, Homo sapiens
ctgctaaaactgagt

SEQ ID NO: 1433553 - DNA, 15 bp, Homo sapiens
tgctaaaactgagta

SEQ ID NO: 1433554 - DNA, 15 bp, Homo sapiens
gctaaaactgagtag

SEQ ID NO: 1433555 - DNA, 15 bp, Homo sapiens
ctaaaactgagtaga

SEQ ID NO: 1433556 - DNA, 15 bp, Homo sapiens
taaaactgagtagaa

SEQ ID NO: 1433557 - DNA, 15 bp, Homo sapiens
aaaactgagtagaaa

SEQ ID NO: 1433558 - DNA, 15 bp, Homo sapiens
aaactgagtagaaag

SEQ ID NO: 1433559 - DNA, 15 bp, Homo sapiens
aactgagtagaaaga

SEQ ID NO: 1433560 - DNA, 15 bp, Homo sapiens
actgagtagaaagaa

SEQ ID NO: 1433561 - DNA, 15 bp, Homo sapiens
ctgagtagaaagaat

SEQ ID NO: 1433562 - DNA, 15 bp, Homo sapiens
tgagtagaaagaatg

SEQ ID NO: 1433563 - DNA, 15 bp, Homo sapiens
gagtagaaagaatga

SEQ ID NO: 1433564 - DNA, 15 bp, Homo sapiens
agtagaaagaatgag

SEQ ID NO: 1433565 - DNA, 15 bp, Homo sapiens
gtagaaagaatgagt

SEQ ID NO: 1433566 - DNA, 15 bp, Homo sapiens
tagaaagaatgagtg

SEQ ID NO: 1433567 - DNA, 15 bp, Homo sapiens
agaaagaatgagtgt

SEQ ID NO: 1433568 - DNA, 15 bp, Homo sapiens
gaaagaatgagtgta

SEQ ID NO: 1433569 - DNA, 15 bp, Homo sapiens
aaagaatgagtgtag

SEQ ID NO: 1433570 - DNA, 15 bp, Homo sapiens
aagaatgagtgtaga

SEQ ID NO: 1433571 - DNA, 15 bp, Homo sapiens
agaatgagtgtagag

SEQ ID NO: 1433572 - DNA, 15 bp, Homo sapiens
gaatgagtgtagaga

SEQ ID NO: 1433573 - DNA, 15 bp, Homo sapiens
aatgagtgtagagat

SEQ ID NO: 1433574 - DNA, 15 bp, Homo sapiens
atgagtgtagagatg

SEQ ID NO: 1433575 - DNA, 15 bp, Homo sapiens
tgagtgtagagatgt

SEQ ID NO: 1433576 - DNA, 15 bp, Homo sapiens
gagtgtagagatgtc

SEQ ID NO: 1433577 - DNA, 15 bp, Homo sapiens
agtgtagagatgtcg

SEQ ID NO: 1433578 - DNA, 15 bp, Homo sapiens
gtgtagagatgtcga

SEQ ID NO: 1433579 - DNA, 15 bp, Homo sapiens
tgtagagatgtcgac

SEQ ID NO: 1433580 - DNA, 15 bp, Homo sapiens
gtagagatgtcgaca

SEQ ID NO: 1433581 - DNA, 15 bp, Homo sapiens
tagagatgtcgacat

SEQ ID NO: 1433582 - DNA, 15 bp, Homo sapiens
agagatgtcgacatt

SEQ ID NO: 1433583 - DNA, 15 bp, Homo sapiens
gagatgtcgacattg

SEQ ID NO: 1433584 - DNA, 15 bp, Homo sapiens
agatgtcgacattga

SEQ ID NO: 1433585 - DNA, 15 bp, Homo sapiens
gatgtcgacattgat

SEQ ID NO: 1433586 - DNA, 15 bp, Homo sapiens
atgtcgacattgatc

SEQ ID NO: 1433587 - DNA, 15 bp, Homo sapiens
tgtcgacattgatca

SEQ ID NO: 1433588 - DNA, 15 bp, Homo sapiens
gtcgacattgatcaa

SEQ ID NO: 1433589 - DNA, 15 bp, Homo sapiens
tcgacattgatcaac

SEQ ID NO: 1433590 - DNA, 15 bp, Homo sapiens
cgacattgatcaact

SEQ ID NO: 1433591 - DNA, 15 bp, Homo sapiens
gacattgatcaactt

SEQ ID NO: 1433592 - DNA, 15 bp, Homo sapiens
acattgatcaacttt

SEQ ID NO: 1433593 - DNA, 15 bp, Homo sapiens
cattgatcaactttc

SEQ ID NO: 1433594 - DNA, 15 bp, Homo sapiens
attgatcaactttct

SEQ ID NO: 1433595 - DNA, 15 bp, Homo sapiens
ttgatcaactttcta

SEQ ID NO: 1433596 - DNA, 15 bp, Homo sapiens
tgatcaactttctat

SEQ ID NO: 1433597 - DNA, 15 bp, Homo sapiens
gatcaactttctatc

SEQ ID NO: 1433598 - DNA, 15 bp, Homo sapiens
atcaactttctatct

SEQ ID NO: 1433599 - DNA, 15 bp, Homo sapiens
tcaactttctatctt

SEQ ID NO: 1433600 - DNA, 15 bp, Homo sapiens
caactttctatcttc

SEQ ID NO: 1433601 - DNA, 15 bp, Homo sapiens
aactttctatcttca

SEQ ID NO: 1433602 - DNA, 15 bp, Homo sapiens
actttctatcttcat

SEQ ID NO: 1433603 - DNA, 15 bp, Homo sapiens
ctttctatcttcata

SEQ ID NO: 1433604 - DNA, 15 bp, Homo sapiens
tttctatcttcataa

SEQ ID NO: 1433605 - DNA, 15 bp, Homo sapiens
ttctatcttcataag

SEQ ID NO: 1433606 - DNA, 15 bp, Homo sapiens
tctatcttcataaga

SEQ ID NO: 1433607 - DNA, 15 bp, Homo sapiens
ctatcttcataagag

SEQ ID NO: 1433608 - DNA, 15 bp, Homo sapiens
tatcttcataagaga

SEQ ID NO: 1433609 - DNA, 15 bp, Homo sapiens
atcttcataagagat

SEQ ID NO: 1433610 - DNA, 15 bp, Homo sapiens
tcttcataagagatc

SEQ ID NO: 1433611 - DNA, 15 bp, Homo sapiens
cttcataagagatct

SEQ ID NO: 1433612 - DNA, 15 bp, Homo sapiens
ttcataagagatctg

SEQ ID NO: 1433613 - DNA, 15 bp, Homo sapiens
tcataagagatctga

SEQ ID NO: 1433614 - DNA, 15 bp, Homo sapiens
cataagagatctgat

SEQ ID NO: 1433615 - DNA, 15 bp, Homo sapiens
ataagagatctgatt

SEQ ID NO: 1433616 - DNA, 15 bp, Homo sapiens
taagagatctgattc

SEQ ID NO: 1433617 - DNA, 15 bp, Homo sapiens
aagagatctgattct

SEQ ID NO: 1433618 - DNA, 15 bp, Homo sapiens
agagatctgattcta

SEQ ID NO: 1433619 - DNA, 15 bp, Homo sapiens
gagatctgattctaa

SEQ ID NO: 1433620 - DNA, 15 bp, Homo sapiens
agatctgattctaac

SEQ ID NO: 1433621 - DNA, 15 bp, Homo sapiens
gatctgattctaaca

SEQ ID NO: 1433622 - DNA, 15 bp, Homo sapiens
atctgattctaacat

SEQ ID NO: 1433623 - DNA, 15 bp, Homo sapiens
tctgattctaacata

SEQ ID NO: 1433624 - DNA, 15 bp, Homo sapiens
ctgattctaacatat

SEQ ID NO: 1433625 - DNA, 15 bp, Homo sapiens
tgattctaacatatc

SEQ ID NO: 1433626 - DNA, 15 bp, Homo sapiens
gattctaacatatcc

SEQ ID NO: 1433627 - DNA, 15 bp, Homo sapiens
attctaacatatcca

SEQ ID NO: 1433628 - DNA, 15 bp, Homo sapiens
ttctaacatatccat

SEQ ID NO: 1433629 - DNA, 15 bp, Homo sapiens
tctaacatatccatt

SEQ ID NO: 1433630 - DNA, 15 bp, Homo sapiens
ctaacatatccattt

SEQ ID NO: 1433631 - DNA, 15 bp, Homo sapiens
taacatatccattta

SEQ ID NO: 1433632 - DNA, 15 bp, Homo sapiens
aacatatccatttag

SEQ ID NO: 1433633 - DNA, 15 bp, Homo sapiens
acatatccatttaga

SEQ ID NO: 1433634 - DNA, 15 bp, Homo sapiens
catatccatttagac

SEQ ID NO: 1433635 - DNA, 15 bp, Homo sapiens
atatccatttagact

SEQ ID NO: 1433636 - DNA, 15 bp, Homo sapiens
tatccatttagactc

SEQ ID NO: 1433637 - DNA, 15 bp, Homo sapiens
atccatttagactca

SEQ ID NO: 1433638 - DNA, 15 bp, Homo sapiens
tccatttagactcaa

SEQ ID NO: 1433639 - DNA, 15 bp, Homo sapiens
ccatttagactcaag

SEQ ID NO: 1433640 - DNA, 15 bp, Homo sapiens
catttagactcaagt

SEQ ID NO: 1433641 - DNA, 15 bp, Homo sapiens
atttagactcaagta

SEQ ID NO: 1433642 - DNA, 15 bp, Homo sapiens
tttagactcaagtag

SEQ ID NO: 1433643 - DNA, 15 bp, Homo sapiens
ttagactcaagtaga

SEQ ID NO: 1433644 - DNA, 15 bp, Homo sapiens
tagactcaagtagaa

SEQ ID NO: 1433645 - DNA, 15 bp, Homo sapiens
agactcaagtagaat

SEQ ID NO: 1433646 - DNA, 15 bp, Homo sapiens
gactcaagtagaata

SEQ ID NO: 1433647 - DNA, 15 bp, Homo sapiens
actcaagtagaatat

SEQ ID NO: 1433648 - DNA, 15 bp, Homo sapiens
ctcaagtagaatatt

SEQ ID NO: 1433649 - DNA, 15 bp, Homo sapiens
tcaagtagaatattg

SEQ ID NO: 1433650 - DNA, 15 bp, Homo sapiens
caagtagaatattgt

SEQ ID NO: 1433651 - DNA, 15 bp, Homo sapiens
aagtagaatattgtg

SEQ ID NO: 1433652 - DNA, 15 bp, Homo sapiens
agtagaatattgtgt

SEQ ID NO: 1433653 - DNA, 15 bp, Homo sapiens
gtagaatattgtgta

SEQ ID NO: 1433654 - DNA, 15 bp, Homo sapiens
gaatattgtgtatag

SEQ ID NO: 1433655 - DNA, 15 bp, Homo sapiens
aatattgtgtataga

SEQ ID NO: 1433656 - DNA, 15 bp, Homo sapiens
atattgtgtatagag

SEQ ID NO: 1433657 - DNA, 15 bp, Homo sapiens
tattgtgtatagagt

SEQ ID NO: 1433658 - DNA, 15 bp, Homo sapiens
attgtgtatagagtg

SEQ ID NO: 1433659 - DNA, 15 bp, Homo sapiens
ttgtgtatagagtga

SEQ ID NO: 1433660 - DNA, 15 bp, Homo sapiens
tgtgtatagagtgag

SEQ ID NO: 1433661 - DNA, 15 bp, Homo sapiens
gtgtatagagtgagt

SEQ ID NO: 1433662 - DNA, 15 bp, Homo sapiens
tgtatagagtgagtg

SEQ ID NO: 1433663 - DNA, 15 bp, Homo sapiens
gtatagagtgagtgg

SEQ ID NO: 1433664 - DNA, 15 bp, Homo sapiens
tatagagtgagtggc

SEQ ID NO: 1433665 - DNA, 15 bp, Homo sapiens
atagagtgagtggca

SEQ ID NO: 1433666 - DNA, 15 bp, Homo sapiens
tagagtgagtggcag

SEQ ID NO: 1433667 - DNA, 15 bp, Homo sapiens
agagtgagtggcagt

SEQ ID NO: 1433668 - DNA, 15 bp, Homo sapiens
gagtgagtggcagtg

SEQ ID NO: 1433669 - DNA, 15 bp, Homo sapiens
agtgagtggcagtga

SEQ ID NO: 1433670 - DNA, 15 bp, Homo sapiens
gtgagtggcagtgag

SEQ ID NO: 1433671 - DNA, 15 bp, Homo sapiens
tgagtggcagtgagt

SEQ ID NO: 1433672 - DNA, 15 bp, Homo sapiens
gagtggcagtgagta

SEQ ID NO: 1433673 - DNA, 15 bp, Homo sapiens
agtggcagtgagtaa

SEQ ID NO: 1433674 - DNA, 15 bp, Homo sapiens
gtggcagtgagtaat

SEQ ID NO: 1433675 - DNA, 15 bp, Homo sapiens
tggcagtgagtaatt

SEQ ID NO: 1433676 - DNA, 15 bp, Homo sapiens
ggcagtgagtaattt

SEQ ID NO: 1433677 - DNA, 15 bp, Homo sapiens
gcagtgagtaatttg

SEQ ID NO: 1433678 - DNA, 15 bp, Homo sapiens
cagtgagtaatttgg

SEQ ID NO: 1433679 - DNA, 15 bp, Homo sapiens
agtgagtaatttggt

SEQ ID NO: 1433680 - DNA, 15 bp, Homo sapiens
gtgagtaatttggta

SEQ ID NO: 1433681 - DNA, 15 bp, Homo sapiens
tgagtaatttggtaa

SEQ ID NO: 1433682 - DNA, 15 bp, Homo sapiens
gagtaatttggtaaa

SEQ ID NO: 1433683 - DNA, 15 bp, Homo sapiens
agtaatttggtaaaa

SEQ ID NO: 1433684 - DNA, 15 bp, Homo sapiens
gtaatttggtaaaaa

SEQ ID NO: 1433685 - DNA, 15 bp, Homo sapiens
taatttggtaaaaat

SEQ ID NO: 1433686 - DNA, 15 bp, Homo sapiens
aatttggtaaaaatt

SEQ ID NO: 1433687 - DNA, 15 bp, Homo sapiens
atttggtaaaaattt

SEQ ID NO: 1433688 - DNA, 15 bp, Homo sapiens
tttggtaaaaatttg

SEQ ID NO: 1433689 - DNA, 15 bp, Homo sapiens
ttggtaaaaatttgc

SEQ ID NO: 1433690 - DNA, 15 bp, Homo sapiens
tggtaaaaatttgct

SEQ ID NO: 1433691 - DNA, 15 bp, Homo sapiens
ggtaaaaatttgctg

SEQ ID NO: 1433692 - DNA, 15 bp, Homo sapiens
gtaaaaatttgctga

SEQ ID NO: 1433693 - DNA, 15 bp, Homo sapiens
taaaaatttgctgac

SEQ ID NO: 1433694 - DNA, 15 bp, Homo sapiens
aaaaatttgctgacc

SEQ ID NO: 1433695 - DNA, 15 bp, Homo sapiens
aaaatttgctgacct

SEQ ID NO: 1433696 - DNA, 15 bp, Homo sapiens
aaatttgctgacctg

SEQ ID NO: 1433697 - DNA, 15 bp, Homo sapiens
aatttgctgacctgc

SEQ ID NO: 1433698 - DNA, 15 bp, Homo sapiens
atttgctgacctgct

SEQ ID NO: 1433699 - DNA, 15 bp, Homo sapiens
tttgctgacctgctt

SEQ ID NO: 1433700 - DNA, 15 bp, Homo sapiens
ttgctgacctgcttt

SEQ ID NO: 1433701 - DNA, 15 bp, Homo sapiens
tgctgacctgctttt

SEQ ID NO: 1433702 - DNA, 15 bp, Homo sapiens
gctgacctgctttta

SEQ ID NO: 1433703 - DNA, 15 bp, Homo sapiens
ctgacctgcttttat

SEQ ID NO: 1433704 - DNA, 15 bp, Homo sapiens
tgacctgcttttatt

SEQ ID NO: 1433705 - DNA, 15 bp, Homo sapiens
gacctgcttttattc

SEQ ID NO: 1433706 - DNA, 15 bp, Homo sapiens
acctgcttttattct

SEQ ID NO: 1433707 - DNA, 15 bp, Homo sapiens
cctgcttttattctt

SEQ ID NO: 1433708 - DNA, 15 bp, Homo sapiens
ctgcttttattcttt

SEQ ID NO: 1433709 - DNA, 15 bp, Homo sapiens
tgcttttattctttc

SEQ ID NO: 1433710 - DNA, 15 bp, Homo sapiens
gcttttattctttcc

SEQ ID NO: 1433711 - DNA, 15 bp, Homo sapiens
cttttattctttcct

SEQ ID NO: 1433712 - DNA, 15 bp, Homo sapiens
ttttattctttcctc

SEQ ID NO: 1433713 - DNA, 15 bp, Homo sapiens
tttattctttcctcc

SEQ ID NO: 1433714 - DNA, 15 bp, Homo sapiens
ttattctttcctcct

SEQ ID NO: 1433715 - DNA, 15 bp, Homo sapiens
tattctttcctcctt

SEQ ID NO: 1433716 - DNA, 15 bp, Homo sapiens
attctttcctccttt

SEQ ID NO: 1433717 - DNA, 15 bp, Homo sapiens
ttctttcctcctttc

SEQ ID NO: 1433718 - DNA, 15 bp, Homo sapiens
tctttcctcctttct

SEQ ID NO: 1433719 - DNA, 15 bp, Homo sapiens
ctttcctcctttctt

SEQ ID NO: 1433720 - DNA, 15 bp, Homo sapiens
tttcctcctttcttt

SEQ ID NO: 1433721 - DNA, 15 bp, Homo sapiens
ttcctcctttctttc

SEQ ID NO: 1433722 - DNA, 15 bp, Homo sapiens
tcctcctttctttct

SEQ ID NO: 1433723 - DNA, 15 bp, Homo sapiens
cctcctttctttctt

SEQ ID NO: 1433724 - DNA, 15 bp, Homo sapiens
ctcctttctttcttc

SEQ ID NO: 1433725 - DNA, 15 bp, Homo sapiens
tcctttctttcttcc

SEQ ID NO: 1433726 - DNA, 15 bp, Homo sapiens
cctttctttcttcct

SEQ ID NO: 1433727 - DNA, 15 bp, Homo sapiens
ctttctttcttcctt

SEQ ID NO: 1433728 - DNA, 15 bp, Homo sapiens
tttctttcttccttt

SEQ ID NO: 1433729 - DNA, 15 bp, Homo sapiens
ttctttcttcctttc

SEQ ID NO: 1433730 - DNA, 15 bp, Homo sapiens
tctttcttcctttcc

SEQ ID NO: 1433731 - DNA, 15 bp, Homo sapiens
ctttcttcctttcct

SEQ ID NO: 1433732 - DNA, 15 bp, Homo sapiens
tttcttcctttcctt

SEQ ID NO: 1433733 - DNA, 15 bp, Homo sapiens
ttcttcctttccttc

SEQ ID NO: 1433734 - DNA, 15 bp, Homo sapiens
tcttcctttccttcc

SEQ ID NO: 1433735 - DNA, 15 bp, Homo sapiens
cttcctttccttcct

SEQ ID NO: 1433736 - DNA, 15 bp, Homo sapiens
ttcctttccttcctt

SEQ ID NO: 1433737 - DNA, 15 bp, Homo sapiens
tcctttccttccttc

SEQ ID NO: 1433738 - DNA, 15 bp, Homo sapiens
cctttccttccttcc

SEQ ID NO: 1433739 - DNA, 15 bp, Homo sapiens
ccttccttccttccg

SEQ ID NO: 1433740 - DNA, 15 bp, Homo sapiens
cttccttccttccgt

SEQ ID NO: 1433741 - DNA, 15 bp, Homo sapiens
ttccttccttccgtc

SEQ ID NO: 1433742 - DNA, 15 bp, Homo sapiens
tccttccttccgtcc

SEQ ID NO: 1433743 - DNA, 15 bp, Homo sapiens
ccttccttccgtcct

SEQ ID NO: 1433744 - DNA, 15 bp, Homo sapiens
cttccttccgtcctt

SEQ ID NO: 1433745 - DNA, 15 bp, Homo sapiens
ttccttccgtccttt

SEQ ID NO: 1433746 - DNA, 15 bp, Homo sapiens
tccttccgtcctttc

SEQ ID NO: 1433747 - DNA, 15 bp, Homo sapiens
ccttccgtcctttcc

SEQ ID NO: 1433748 - DNA, 15 bp, Homo sapiens
cttccgtcctttcct

SEQ ID NO: 1433749 - DNA, 15 bp, Homo sapiens
ttccgtcctttcctt

SEQ ID NO: 1433750 - DNA, 15 bp, Homo sapiens
tccgtcctttccttt

SEQ ID NO: 1433751 - DNA, 15 bp, Homo sapiens
ccgtcctttcctttc

SEQ ID NO: 1433752 - DNA, 15 bp, Homo sapiens
cgtcctttcctttcc

SEQ ID NO: 1433753 - DNA, 15 bp, Homo sapiens
gtcctttcctttcct

SEQ ID NO: 1433754 - DNA, 15 bp, Homo sapiens
tcctttcctttcctt

SEQ ID NO: 1433755 - DNA, 15 bp, Homo sapiens
cctttcctttccttt

SEQ ID NO: 1433756 - DNA, 15 bp, Homo sapiens
ctttcctttcctttc

SEQ ID NO: 1433757 - DNA, 15 bp, Homo sapiens
tttcctttcctttcc

SEQ ID NO: 1433758 - DNA, 15 bp, Homo sapiens
ttcctttcctttccc

SEQ ID NO: 1433759 - DNA, 15 bp, Homo sapiens
tcctttcctttccct

SEQ ID NO: 1433760 - DNA, 15 bp, Homo sapiens
cctttcctttccctc

SEQ ID NO: 1433761 - DNA, 15 bp, Homo sapiens
ctttcctttccctcc

SEQ ID NO: 1433762 - DNA, 15 bp, Homo sapiens
tttcctttccctccc

SEQ ID NO: 1433763 - DNA, 15 bp, Homo sapiens
ttcctttccctccct

SEQ ID NO: 1433764 - DNA, 15 bp, Homo sapiens
tcctttccctccctt

SEQ ID NO: 1433765 - DNA, 15 bp, Homo sapiens
tttccctcccttcct

SEQ ID NO: 1433766 - DNA, 15 bp, Homo sapiens
tcccttccttccttc

SEQ ID NO: 1433767 - DNA, 15 bp, Homo sapiens
cccttccttccttct

SEQ ID NO: 1433768 - DNA, 15 bp, Homo sapiens
tccttctttccttct

SEQ ID NO: 1433769 - DNA, 15 bp, Homo sapiens
ccttctttccttctt

SEQ ID NO: 1433770 - DNA, 15 bp, Homo sapiens
cttctttccttcttt

SEQ ID NO: 1433771 - DNA, 15 bp, Homo sapiens
ttctttccttctttc

SEQ ID NO: 1433772 - DNA, 15 bp, Homo sapiens
tctttccttctttct

SEQ ID NO: 1433773 - DNA, 15 bp, Homo sapiens
ctttccttctttctt

SEQ ID NO: 1433774 - DNA, 15 bp, Homo sapiens
tttccttctttcttt

SEQ ID NO: 1433775 - DNA, 15 bp, Homo sapiens
ttccttctttctttc

SEQ ID NO: 1433776 - DNA, 15 bp, Homo sapiens
tccttctttctttcc

SEQ ID NO: 1433777 - DNA, 15 bp, Homo sapiens
ccttctttctttcct

SEQ ID NO: 1433778 - DNA, 15 bp, Homo sapiens
cttctttctttcctt

SEQ ID NO: 1433779 - DNA, 15 bp, Homo sapiens
ctttcctttctttcc

SEQ ID NO: 1433780 - DNA, 15 bp, Homo sapiens
tttcctttctttcct

SEQ ID NO: 1433781 - DNA, 15 bp, Homo sapiens
tcctttctttccttt

SEQ ID NO: 1433782 - DNA, 15 bp, Homo sapiens
tttcctttcttcctt

SEQ ID NO: 1433783 - DNA, 15 bp, Homo sapiens
ttcctttcttccttt

SEQ ID NO: 1433784 - DNA, 15 bp, Homo sapiens
tcctttcttcctttc

SEQ ID NO: 1433785 - DNA, 15 bp, Homo sapiens
cctttcttcctttct

SEQ ID NO: 1433786 - DNA, 15 bp, Homo sapiens
ctttcttcctttctt

SEQ ID NO: 1433787 - DNA, 15 bp, Homo sapiens
cctttctttccttcc

SEQ ID NO: 1433788 - DNA, 15 bp, Homo sapiens
ctttctttccttcct

SEQ ID NO: 1433789 - DNA, 15 bp, Homo sapiens
tttctttccttcctc

SEQ ID NO: 1433790 - DNA, 15 bp, Homo sapiens
ttctttccttcctcc

SEQ ID NO: 1433791 - DNA, 15 bp, Homo sapiens
tctttccttcctccc

SEQ ID NO: 1433792 - DNA, 15 bp, Homo sapiens
ctttccttcctccct

SEQ ID NO: 1433793 - DNA, 15 bp, Homo sapiens
tttccttcctccctt

SEQ ID NO: 1433794 - DNA, 15 bp, Homo sapiens
ttccttcctcccttc

SEQ ID NO: 1433795 - DNA, 15 bp, Homo sapiens
tccttcctcccttcc

SEQ ID NO: 1433796 - DNA, 15 bp, Homo sapiens
ccttcctcccttcct

SEQ ID NO: 1433797 - DNA, 15 bp, Homo sapiens
cttcctcccttcctt

SEQ ID NO: 1433798 - DNA, 15 bp, Homo sapiens
accccagagttccag

SEQ ID NO: 1433799 - DNA, 15 bp, Homo sapiens
ccccagagttccagc

SEQ ID NO: 1433800 - DNA, 15 bp, Homo sapiens
cccagagttccagca

SEQ ID NO: 1433801 - DNA, 15 bp, Homo sapiens
ccagagttccagcac

SEQ ID NO: 1433802 - DNA, 15 bp, Homo sapiens
cagagttccagcacc

SEQ ID NO: 1433803 - DNA, 15 bp, Homo sapiens
agagttccagcacca

SEQ ID NO: 1433804 - DNA, 15 bp, Homo sapiens
gagttccagcaccag

SEQ ID NO: 1433805 - DNA, 15 bp, Homo sapiens
agttccagcaccagc

SEQ ID NO: 1433806 - DNA, 15 bp, Homo sapiens
gttccagcaccagcc

SEQ ID NO: 1433807 - DNA, 15 bp, Homo sapiens
ttccagcaccagcct

SEQ ID NO: 1433808 - DNA, 15 bp, Homo sapiens
tccagcaccagcctt

SEQ ID NO: 1433809 - DNA, 15 bp, Homo sapiens
ccagcaccagccttt

SEQ ID NO: 1433810 - DNA, 15 bp, Homo sapiens
cagcaccagcctttg

SEQ ID NO: 1433811 - DNA, 15 bp, Homo sapiens
agcaccagcctttgt

SEQ ID NO: 1433812 - DNA, 15 bp, Homo sapiens
gcaccagcctttgtc

SEQ ID NO: 1433813 - DNA, 15 bp, Homo sapiens
caccagcctttgtct

SEQ ID NO: 1433814 - DNA, 15 bp, Homo sapiens
accagcctttgtctt

SEQ ID NO: 1433815 - DNA, 15 bp, Homo sapiens
ccagcctttgtctta

SEQ ID NO: 1433816 - DNA, 15 bp, Homo sapiens
cagcctttgtcttac

SEQ ID NO: 1433817 - DNA, 15 bp, Homo sapiens
agcctttgtcttaca

SEQ ID NO: 1433818 - DNA, 15 bp, Homo sapiens
gcctttgtcttacat

SEQ ID NO: 1433819 - DNA, 15 bp, Homo sapiens
cctttgtcttacata

SEQ ID NO: 1433820 - DNA, 15 bp, Homo sapiens
ctttgtcttacatag

SEQ ID NO: 1433821 - DNA, 15 bp, Homo sapiens
tttgtcttacatagt

SEQ ID NO: 1433822 - DNA, 15 bp, Homo sapiens
ttgtcttacatagtg

SEQ ID NO: 1433823 - DNA, 15 bp, Homo sapiens
tgtcttacatagtgg

SEQ ID NO: 1433824 - DNA, 15 bp, Homo sapiens
gtcttacatagtgga

SEQ ID NO: 1433825 - DNA, 15 bp, Homo sapiens
tcttacatagtggag

SEQ ID NO: 1433826 - DNA, 15 bp, Homo sapiens
cttacatagtggagt

SEQ ID NO: 1433827 - DNA, 15 bp, Homo sapiens
ttacatagtggagta

SEQ ID NO: 1433828 - DNA, 15 bp, Homo sapiens
tacatagtggagtat

SEQ ID NO: 1433829 - DNA, 15 bp, Homo sapiens
acatagtggagtatt

SEQ ID NO: 1433830 - DNA, 15 bp, Homo sapiens
catagtggagtatta

SEQ ID NO: 1433831 - DNA, 15 bp, Homo sapiens
atagtggagtattat

SEQ ID NO: 1433832 - DNA, 15 bp, Homo sapiens
tagtggagtattata

SEQ ID NO: 1433833 - DNA, 15 bp, Homo sapiens
agtggagtattataa

SEQ ID NO: 1433834 - DNA, 15 bp, Homo sapiens
gtggagtattataag

SEQ ID NO: 1433835 - DNA, 15 bp, Homo sapiens
tggagtattataagc

SEQ ID NO: 1433836 - DNA, 15 bp, Homo sapiens
ggagtattataagca

SEQ ID NO: 1433837 - DNA, 15 bp, Homo sapiens
gagtattataagcaa

SEQ ID NO: 1433838 - DNA, 15 bp, Homo sapiens
agtattataagcaag

SEQ ID NO: 1433839 - DNA, 15 bp, Homo sapiens
gtattataagcaaga

SEQ ID NO: 1433840 - DNA, 15 bp, Homo sapiens
tattataagcaagat

SEQ ID NO: 1433841 - DNA, 15 bp, Homo sapiens
attataagcaagatc

SEQ ID NO: 1433842 - DNA, 15 bp, Homo sapiens
ttataagcaagatcc

SEQ ID NO: 1433843 - DNA, 15 bp, Homo sapiens
tataagcaagatccc

SEQ ID NO: 1433844 - DNA, 15 bp, Homo sapiens
ataagcaagatccca

SEQ ID NO: 1433845 - DNA, 15 bp, Homo sapiens
taagcaagatcccac

SEQ ID NO: 1433846 - DNA, 15 bp, Homo sapiens
aagcaagatcccacg

SEQ ID NO: 1433847 - DNA, 15 bp, Homo sapiens
agcaagatcccacga

SEQ ID NO: 1433848 - DNA, 15 bp, Homo sapiens
gcaagatcccacgat

SEQ ID NO: 1433849 - DNA, 15 bp, Homo sapiens
caagatcccacgatg

SEQ ID NO: 1433850 - DNA, 15 bp, Homo sapiens
aagatcccacgatgg

SEQ ID NO: 1433851 - DNA, 15 bp, Homo sapiens
agatcccacgatggg

SEQ ID NO: 1433852 - DNA, 15 bp, Homo sapiens
gatcccacgatgggg

SEQ ID NO: 1433853 - DNA, 15 bp, Homo sapiens
atcccacgatggggg

SEQ ID NO: 1433854 - DNA, 15 bp, Homo sapiens
tcccacgatgggggt

SEQ ID NO: 1433855 - DNA, 15 bp, Homo sapiens
cccacgatgggggtt

SEQ ID NO: 1433856 - DNA, 15 bp, Homo sapiens
ccacgatgggggttc

SEQ ID NO: 1433857 - DNA, 15 bp, Homo sapiens
cacgatgggggttcc

SEQ ID NO: 1433858 - DNA, 15 bp, Homo sapiens
acgatgggggttcct

SEQ ID NO: 1433859 - DNA, 15 bp, Homo sapiens
cgatgggggttcctc

SEQ ID NO: 1433860 - DNA, 15 bp, Homo sapiens
gatgggggttcctca

SEQ ID NO: 1433861 - DNA, 15 bp, Homo sapiens
atgggggttcctcag

SEQ ID NO: 1433862 - DNA, 15 bp, Homo sapiens
tgggggttcctcaga

SEQ ID NO: 1433863 - DNA, 15 bp, Homo sapiens
gggggttcctcagat

SEQ ID NO: 1433864 - DNA, 15 bp, Homo sapiens
ggggttcctcagatt

SEQ ID NO: 1433865 - DNA, 15 bp, Homo sapiens
gggttcctcagattg

SEQ ID NO: 1433866 - DNA, 15 bp, Homo sapiens
ggttcctcagattgc

SEQ ID NO: 1433867 - DNA, 15 bp, Homo sapiens
gttcctcagattgct

SEQ ID NO: 1433868 - DNA, 15 bp, Homo sapiens
ttcctcagattgctg

SEQ ID NO: 1433869 - DNA, 15 bp, Homo sapiens
tcctcagattgctga

SEQ ID NO: 1433870 - DNA, 15 bp, Homo sapiens
cctcagattgctgaa

SEQ ID NO: 1433871 - DNA, 15 bp, Homo sapiens
ctcagattgctgaaa

SEQ ID NO: 1433872 - DNA, 15 bp, Homo sapiens
tcagattgctgaaat

SEQ ID NO: 1433873 - DNA, 15 bp, Homo sapiens
cagattgctgaaatg

SEQ ID NO: 1433874 - DNA, 15 bp, Homo sapiens
agattgctgaaatgt

SEQ ID NO: 1433875 - DNA, 15 bp, Homo sapiens
gattgctgaaatgtt

SEQ ID NO: 1433876 - DNA, 15 bp, Homo sapiens
attgctgaaatgttc

SEQ ID NO: 1433877 - DNA, 15 bp, Homo sapiens
ttgctgaaatgttct

SEQ ID NO: 1433878 - DNA, 15 bp, Homo sapiens
tgctgaaatgttcta

SEQ ID NO: 1433879 - DNA, 15 bp, Homo sapiens
gctgaaatgttctag

SEQ ID NO: 1433880 - DNA, 15 bp, Homo sapiens
ctgaaatgttctaga

SEQ ID NO: 1433881 - DNA, 15 bp, Homo sapiens
tgaaatgttctagag

SEQ ID NO: 1433882 - DNA, 15 bp, Homo sapiens
gaaatgttctagagg

SEQ ID NO: 1433883 - DNA, 15 bp, Homo sapiens
aaatgttctagaggc

SEQ ID NO: 1433884 - DNA, 15 bp, Homo sapiens
aatgttctagaggct

SEQ ID NO: 1433885 - DNA, 15 bp, Homo sapiens
atgttctagaggcta

SEQ ID NO: 1433886 - DNA, 15 bp, Homo sapiens
tgttctagaggctat

SEQ ID NO: 1433887 - DNA, 15 bp, Homo sapiens
gttctagaggctatt

SEQ ID NO: 1433888 - DNA, 15 bp, Homo sapiens
ttctagaggctattc

SEQ ID NO: 1433889 - DNA, 15 bp, Homo sapiens
tctagaggctattct

SEQ ID NO: 1433890 - DNA, 15 bp, Homo sapiens
ctagaggctattcta

SEQ ID NO: 1433891 - DNA, 15 bp, Homo sapiens
tagaggctattctat

SEQ ID NO: 1433892 - DNA, 15 bp, Homo sapiens
agaggctattctatt

SEQ ID NO: 1433893 - DNA, 15 bp, Homo sapiens
gaggctattctattt

SEQ ID NO: 1433894 - DNA, 15 bp, Homo sapiens
aggctattctatttc

SEQ ID NO: 1433895 - DNA, 15 bp, Homo sapiens
ggctattctatttct

SEQ ID NO: 1433896 - DNA, 15 bp, Homo sapiens
gctattctatttctc

SEQ ID NO: 1433897 - DNA, 15 bp, Homo sapiens
ctattctatttctct

SEQ ID NO: 1433898 - DNA, 15 bp, Homo sapiens
tattctatttctcta

SEQ ID NO: 1433899 - DNA, 15 bp, Homo sapiens
attctatttctctac

SEQ ID NO: 1433900 - DNA, 15 bp, Homo sapiens
ttctatttctctacc

SEQ ID NO: 1433901 - DNA, 15 bp, Homo sapiens
tctatttctctacca

SEQ ID NO: 1433902 - DNA, 15 bp, Homo sapiens
ctatttctctaccac

SEQ ID NO: 1433903 - DNA, 15 bp, Homo sapiens
tatttctctaccact

SEQ ID NO: 1433904 - DNA, 15 bp, Homo sapiens
atttctctaccactc

SEQ ID NO: 1433905 - DNA, 15 bp, Homo sapiens
tttctctaccactct

SEQ ID NO: 1433906 - DNA, 15 bp, Homo sapiens
ttctctaccactctc

SEQ ID NO: 1433907 - DNA, 15 bp, Homo sapiens
tctctaccactctcc

SEQ ID NO: 1433908 - DNA, 15 bp, Homo sapiens
ctctaccactctcca

SEQ ID NO: 1433909 - DNA, 15 bp, Homo sapiens
tctaccactctccaa

SEQ ID NO: 1433910 - DNA, 15 bp, Homo sapiens
ctaccactctccaaa

SEQ ID NO: 1433911 - DNA, 15 bp, Homo sapiens
taccactctccaaac

SEQ ID NO: 1433912 - DNA, 15 bp, Homo sapiens
accactctccaaaca

SEQ ID NO: 1433913 - DNA, 15 bp, Homo sapiens
ccactctccaaacaa

SEQ ID NO: 1433914 - DNA, 15 bp, Homo sapiens
cactctccaaacaaa

SEQ ID NO: 1433915 - DNA, 15 bp, Homo sapiens
actctccaaacaaaa

SEQ ID NO: 1433916 - DNA, 15 bp, Homo sapiens
ctctccaaacaaaac

SEQ ID NO: 1433917 - DNA, 15 bp, Homo sapiens
tctccaaacaaaaca

SEQ ID NO: 1433918 - DNA, 15 bp, Homo sapiens
ctccaaacaaaacag

SEQ ID NO: 1433919 - DNA, 15 bp, Homo sapiens
tccaaacaaaacagc

SEQ ID NO: 1433920 - DNA, 15 bp, Homo sapiens
ccaaacaaaacagca

SEQ ID NO: 1433921 - DNA, 15 bp, Homo sapiens
caaacaaaacagcac

SEQ ID NO: 1433922 - DNA, 15 bp, Homo sapiens
aaacaaaacagcacc

SEQ ID NO: 1433923 - DNA, 15 bp, Homo sapiens
aacaaaacagcacct

SEQ ID NO: 1433924 - DNA, 15 bp, Homo sapiens
acaaaacagcaccta

SEQ ID NO: 1433925 - DNA, 15 bp, Homo sapiens
caaaacagcacctaa

SEQ ID NO: 1433926 - DNA, 15 bp, Homo sapiens
aaaacagcacctaaa

SEQ ID NO: 1433927 - DNA, 15 bp, Homo sapiens
aaacagcacctaaat

SEQ ID NO: 1433928 - DNA, 15 bp, Homo sapiens
aacagcacctaaatg

SEQ ID NO: 1433929 - DNA, 15 bp, Homo sapiens
acagcacctaaatgt

SEQ ID NO: 1433930 - DNA, 15 bp, Homo sapiens
cagcacctaaatgtt

SEQ ID NO: 1433931 - DNA, 15 bp, Homo sapiens
agcacctaaatgtta

SEQ ID NO: 1433932 - DNA, 15 bp, Homo sapiens
gcacctaaatgttat

SEQ ID NO: 1433933 - DNA, 15 bp, Homo sapiens
cacctaaatgttatc

SEQ ID NO: 1433934 - DNA, 15 bp, Homo sapiens
acctaaatgttatcc

SEQ ID NO: 1433935 - DNA, 15 bp, Homo sapiens
cctaaatgttatcct

SEQ ID NO: 1433936 - DNA, 15 bp, Homo sapiens
ctaaatgttatccta

SEQ ID NO: 1433937 - DNA, 15 bp, Homo sapiens
taaatgttatcctat

SEQ ID NO: 1433938 - DNA, 15 bp, Homo sapiens
aaatgttatcctatg

SEQ ID NO: 1433939 - DNA, 15 bp, Homo sapiens
aatgttatcctatgg

SEQ ID NO: 1433940 - DNA, 15 bp, Homo sapiens
atgttatcctatggc

SEQ ID NO: 1433941 - DNA, 15 bp, Homo sapiens
tgttatcctatggca

SEQ ID NO: 1433942 - DNA, 15 bp, Homo sapiens
gttatcctatggcaa

SEQ ID NO: 1433943 - DNA, 15 bp, Homo sapiens
ttatcctatggcaaa

SEQ ID NO: 1433944 - DNA, 15 bp, Homo sapiens
tatcctatggcaaaa

SEQ ID NO: 1433945 - DNA, 15 bp, Homo sapiens
atcctatggcaaaaa

SEQ ID NO: 1433946 - DNA, 15 bp, Homo sapiens
tcctatggcaaaaaa

SEQ ID NO: 1433947 - DNA, 15 bp, Homo sapiens
cctatggcaaaaaaa

SEQ ID NO: 1433948 - DNA, 15 bp, Homo sapiens
ctatggcaaaaaaaa

SEQ ID NO: 1433949 - DNA, 15 bp, Homo sapiens
tatggcaaaaaaaaa

SEQ ID NO: 1433950 - DNA, 15 bp, Homo sapiens
atggcaaaaaaaaac

SEQ ID NO: 1433951 - DNA, 15 bp, Homo sapiens
tggcaaaaaaaaact

SEQ ID NO: 1433952 - DNA, 15 bp, Homo sapiens
ggcaaaaaaaaacta

SEQ ID NO: 1433953 - DNA, 15 bp, Homo sapiens
gcaaaaaaaaactat

SEQ ID NO: 1433954 - DNA, 15 bp, Homo sapiens
caaaaaaaaactata

SEQ ID NO: 1433955 - DNA, 15 bp, Homo sapiens
aaaaaaaaactatac

SEQ ID NO: 1433956 - DNA, 15 bp, Homo sapiens
aaaaaaaactatacc

SEQ ID NO: 1433957 - DNA, 15 bp, Homo sapiens
aaaaaaactatacct

SEQ ID NO: 1433958 - DNA, 15 bp, Homo sapiens
aaaaaactatacctt

SEQ ID NO: 1433959 - DNA, 15 bp, Homo sapiens
aaaaactataccttg

SEQ ID NO: 1433960 - DNA, 15 bp, Homo sapiens
aaaactataccttgt

SEQ ID NO: 1433961 - DNA, 15 bp, Homo sapiens
aaactataccttgtc

SEQ ID NO: 1433962 - DNA, 15 bp, Homo sapiens
aactataccttgtcc

SEQ ID NO: 1433963 - DNA, 15 bp, Homo sapiens
actataccttgtccc

SEQ ID NO: 1433964 - DNA, 15 bp, Homo sapiens
ctataccttgtcccc

SEQ ID NO: 1433965 - DNA, 15 bp, Homo sapiens
tataccttgtccccc

SEQ ID NO: 1433966 - DNA, 15 bp, Homo sapiens
ataccttgtccccct

SEQ ID NO: 1433967 - DNA, 15 bp, Homo sapiens
taccttgtccccctt

SEQ ID NO: 1433968 - DNA, 15 bp, Homo sapiens
accttgtcccccttc

SEQ ID NO: 1433969 - DNA, 15 bp, Homo sapiens
ccttgtcccccttct

SEQ ID NO: 1433970 - DNA, 15 bp, Homo sapiens
cttgtcccccttctc

SEQ ID NO: 1433971 - DNA, 15 bp, Homo sapiens
ttgtcccccttctca

SEQ ID NO: 1433972 - DNA, 15 bp, Homo sapiens
tgtcccccttctcaa

SEQ ID NO: 1433973 - DNA, 15 bp, Homo sapiens
gtcccccttctcaag

SEQ ID NO: 1433974 - DNA, 15 bp, Homo sapiens
tcccccttctcaaga

SEQ ID NO: 1433975 - DNA, 15 bp, Homo sapiens
cccccttctcaagag

SEQ ID NO: 1433976 - DNA, 15 bp, Homo sapiens
ccccttctcaagagc

SEQ ID NO: 1433977 - DNA, 15 bp, Homo sapiens
cccttctcaagagca

SEQ ID NO: 1433978 - DNA, 15 bp, Homo sapiens
ccttctcaagagcat

SEQ ID NO: 1433979 - DNA, 15 bp, Homo sapiens
cttctcaagagcatg

SEQ ID NO: 1433980 - DNA, 15 bp, Homo sapiens
ttctcaagagcatga

SEQ ID NO: 1433981 - DNA, 15 bp, Homo sapiens
tctcaagagcatgaa

SEQ ID NO: 1433982 - DNA, 15 bp, Homo sapiens
ctcaagagcatgaag

SEQ ID NO: 1433983 - DNA, 15 bp, Homo sapiens
tcaagagcatgaagg

SEQ ID NO: 1433984 - DNA, 15 bp, Homo sapiens
caagagcatgaaggt

SEQ ID NO: 1433985 - DNA, 15 bp, Homo sapiens
aagagcatgaaggtg

SEQ ID NO: 1433986 - DNA, 15 bp, Homo sapiens
agagcatgaaggtgg

SEQ ID NO: 1433987 - DNA, 15 bp, Homo sapiens
gagcatgaaggtggt

SEQ ID NO: 1433988 - DNA, 15 bp, Homo sapiens
agcatgaaggtggtt

SEQ ID NO: 1433989 - DNA, 15 bp, Homo sapiens
gcatgaaggtggtta

SEQ ID NO: 1433990 - DNA, 15 bp, Homo sapiens
catgaaggtggttaa

SEQ ID NO: 1433991 - DNA, 15 bp, Homo sapiens
atgaaggtggttaat

SEQ ID NO: 1433992 - DNA, 15 bp, Homo sapiens
tgaaggtggttaata

SEQ ID NO: 1433993 - DNA, 15 bp, Homo sapiens
gaaggtggttaatag

SEQ ID NO: 1433994 - DNA, 15 bp, Homo sapiens
aaggtggttaatagt

SEQ ID NO: 1433995 - DNA, 15 bp, Homo sapiens
aggtggttaatagtt

SEQ ID NO: 1433996 - DNA, 15 bp, Homo sapiens
ggtggttaatagtta

SEQ ID NO: 1433997 - DNA, 15 bp, Homo sapiens
gtggttaatagttag

SEQ ID NO: 1433998 - DNA, 15 bp, Homo sapiens
tggttaatagttagg

SEQ ID NO: 1433999 - DNA, 15 bp, Homo sapiens
ggttaatagttagga

SEQ ID NO: 1434000 - DNA, 15 bp, Homo sapiens
gttaatagttaggat

SEQ ID NO: 1434001 - DNA, 15 bp, Homo sapiens
ttaatagttaggatt

SEQ ID NO: 1434002 - DNA, 15 bp, Homo sapiens
taatagttaggattc

SEQ ID NO: 1434003 - DNA, 15 bp, Homo sapiens
aatagttaggattca

SEQ ID NO: 1434004 - DNA, 15 bp, Homo sapiens
atagttaggattcag

SEQ ID NO: 1434005 - DNA, 15 bp, Homo sapiens
tagttaggattcagt

SEQ ID NO: 1434006 - DNA, 15 bp, Homo sapiens
agttaggattcagta

SEQ ID NO: 1434007 - DNA, 15 bp, Homo sapiens
gttaggattcagtat

SEQ ID NO: 1434008 - DNA, 15 bp, Homo sapiens
ttaggattcagtatg

SEQ ID NO: 1434009 - DNA, 15 bp, Homo sapiens
taggattcagtatgt

SEQ ID NO: 1434010 - DNA, 15 bp, Homo sapiens
aggattcagtatgtt

SEQ ID NO: 1434011 - DNA, 15 bp, Homo sapiens
ggattcagtatgtta

SEQ ID NO: 1434012 - DNA, 15 bp, Homo sapiens
gattcagtatgttat

SEQ ID NO: 1434013 - DNA, 15 bp, Homo sapiens
attcagtatgttatg

SEQ ID NO: 1434014 - DNA, 15 bp, Homo sapiens
ttcagtatgttatgt

SEQ ID NO: 1434015 - DNA, 15 bp, Homo sapiens
tcagtatgttatgtg

SEQ ID NO: 1434016 - DNA, 15 bp, Homo sapiens
cagtatgttatgtgt

SEQ ID NO: 1434017 - DNA, 15 bp, Homo sapiens
agtatgttatgtgtt

SEQ ID NO: 1434018 - DNA, 15 bp, Homo sapiens
gtatgttatgtgttc

SEQ ID NO: 1434019 - DNA, 15 bp, Homo sapiens
tatgttatgtgttca

SEQ ID NO: 1434020 - DNA, 15 bp, Homo sapiens
atgttatgtgttcag

SEQ ID NO: 1434021 - DNA, 15 bp, Homo sapiens
tgttatgtgttcaga

SEQ ID NO: 1434022 - DNA, 15 bp, Homo sapiens
gttatgtgttcagat

SEQ ID NO: 1434023 - DNA, 15 bp, Homo sapiens
ttatgtgttcagatg

SEQ ID NO: 1434024 - DNA, 15 bp, Homo sapiens
tatgtgttcagatgg

SEQ ID NO: 1434025 - DNA, 15 bp, Homo sapiens
atgtgttcagatggc

SEQ ID NO: 1434026 - DNA, 15 bp, Homo sapiens
tgtgttcagatggcg

SEQ ID NO: 1434027 - DNA, 15 bp, Homo sapiens
gtgttcagatggcgt

SEQ ID NO: 1434028 - DNA, 15 bp, Homo sapiens
tgttcagatggcgtt

SEQ ID NO: 1434029 - DNA, 15 bp, Homo sapiens
gttcagatggcgttg

SEQ ID NO: 1434030 - DNA, 15 bp, Homo sapiens
ttcagatggcgttga

SEQ ID NO: 1434031 - DNA, 15 bp, Homo sapiens
tcagatggcgttgag

SEQ ID NO: 1434032 - DNA, 15 bp, Homo sapiens
cagatggcgttgagc

SEQ ID NO: 1434033 - DNA, 15 bp, Homo sapiens
agatggcgttgagct

SEQ ID NO: 1434034 - DNA, 15 bp, Homo sapiens
gatggcgttgagctg

SEQ ID NO: 1434035 - DNA, 15 bp, Homo sapiens
atggcgttgagctgc

SEQ ID NO: 1434036 - DNA, 15 bp, Homo sapiens
tggcgttgagctgct

SEQ ID NO: 1434037 - DNA, 15 bp, Homo sapiens
ggcgttgagctgctg

SEQ ID NO: 1434038 - DNA, 15 bp, Homo sapiens
gcgttgagctgctgt

SEQ ID NO: 1434039 - DNA, 15 bp, Homo sapiens
cgttgagctgctgtt

SEQ ID NO: 1434040 - DNA, 15 bp, Homo sapiens
gttgagctgctgtta

SEQ ID NO: 1434041 - DNA, 15 bp, Homo sapiens
ttgagctgctgttag

SEQ ID NO: 1434042 - DNA, 15 bp, Homo sapiens
tgagctgctgttagt

SEQ ID NO: 1434043 - DNA, 15 bp, Homo sapiens
gagctgctgttagtg

SEQ ID NO: 1434044 - DNA, 15 bp, Homo sapiens
agctgctgttagtgc

SEQ ID NO: 1434045 - DNA, 15 bp, Homo sapiens
gctgctgttagtgcc

SEQ ID NO: 1434046 - DNA, 15 bp, Homo sapiens
ctgctgttagtgcca

SEQ ID NO: 1434047 - DNA, 15 bp, Homo sapiens
tgctgttagtgccaa

SEQ ID NO: 1434048 - DNA, 15 bp, Homo sapiens
gctgttagtgccaac

SEQ ID NO: 1434049 - DNA, 15 bp, Homo sapiens
ctgttagtgccaaca

SEQ ID NO: 1434050 - DNA, 15 bp, Homo sapiens
tgttagtgccaacat

SEQ ID NO: 1434051 - DNA, 15 bp, Homo sapiens
gttagtgccaacatg

SEQ ID NO: 1434052 - DNA, 15 bp, Homo sapiens
ttagtgccaacatgt

SEQ ID NO: 1434053 - DNA, 15 bp, Homo sapiens
tagtgccaacatgtt

SEQ ID NO: 1434054 - DNA, 15 bp, Homo sapiens
agtgccaacatgtta

SEQ ID NO: 1434055 - DNA, 15 bp, Homo sapiens
gtgccaacatgttag

SEQ ID NO: 1434056 - DNA, 15 bp, Homo sapiens
tgccaacatgttagt

SEQ ID NO: 1434057 - DNA, 15 bp, Homo sapiens
gccaacatgttagtg

SEQ ID NO: 1434058 - DNA, 15 bp, Homo sapiens
ccaacatgttagtga

SEQ ID NO: 1434059 - DNA, 15 bp, Homo sapiens
caacatgttagtgag

SEQ ID NO: 1434060 - DNA, 15 bp, Homo sapiens
aacatgttagtgaga

SEQ ID NO: 1434061 - DNA, 15 bp, Homo sapiens
acatgttagtgagaa

SEQ ID NO: 1434062 - DNA, 15 bp, Homo sapiens
catgttagtgagaaa

SEQ ID NO: 1434063 - DNA, 15 bp, Homo sapiens
atgttagtgagaaaa

SEQ ID NO: 1434064 - DNA, 15 bp, Homo sapiens
tgttagtgagaaaat

SEQ ID NO: 1434065 - DNA, 15 bp, Homo sapiens
gttagtgagaaaata

SEQ ID NO: 1434066 - DNA, 15 bp, Homo sapiens
ttagtgagaaaatat

SEQ ID NO: 1434067 - DNA, 15 bp, Homo sapiens
tagtgagaaaatatc

SEQ ID NO: 1434068 - DNA, 15 bp, Homo sapiens
agtgagaaaatatct

SEQ ID NO: 1434069 - DNA, 15 bp, Homo sapiens
gtgagaaaatatctt

SEQ ID NO: 1434070 - DNA, 15 bp, Homo sapiens
tgagaaaatatcttt

SEQ ID NO: 1434071 - DNA, 15 bp, Homo sapiens
gagaaaatatctttg

SEQ ID NO: 1434072 - DNA, 15 bp, Homo sapiens
agaaaatatctttgg

SEQ ID NO: 1434073 - DNA, 15 bp, Homo sapiens
gaaaatatctttgga

SEQ ID NO: 1434074 - DNA, 15 bp, Homo sapiens
aaaatatctttggat

SEQ ID NO: 1434075 - DNA, 15 bp, Homo sapiens
aaatatctttggata

SEQ ID NO: 1434076 - DNA, 15 bp, Homo sapiens
aatatctttggatag

SEQ ID NO: 1434077 - DNA, 15 bp, Homo sapiens
atatctttggatagg

SEQ ID NO: 1434078 - DNA, 15 bp, Homo sapiens
tatctttggataggt

SEQ ID NO: 1434079 - DNA, 15 bp, Homo sapiens
atctttggataggta

SEQ ID NO: 1434080 - DNA, 15 bp, Homo sapiens
tctttggataggtaa

SEQ ID NO: 1434081 - DNA, 15 bp, Homo sapiens
ctttggataggtaaa

SEQ ID NO: 1434082 - DNA, 15 bp, Homo sapiens
tttggataggtaaaa

SEQ ID NO: 1434083 - DNA, 15 bp, Homo sapiens
ttggataggtaaaaa

SEQ ID NO: 1434084 - DNA, 15 bp, Homo sapiens
tggataggtaaaaat

SEQ ID NO: 1434085 - DNA, 15 bp, Homo sapiens
ggataggtaaaaatc

SEQ ID NO: 1434086 - DNA, 15 bp, Homo sapiens
gataggtaaaaatca

SEQ ID NO: 1434087 - DNA, 15 bp, Homo sapiens
ataggtaaaaatcaa

SEQ ID NO: 1434088 - DNA, 15 bp, Homo sapiens
aggtaaaaatcaagg

SEQ ID NO: 1434089 - DNA, 15 bp, Homo sapiens
ggtaaaaatcaagga

SEQ ID NO: 1434090 - DNA, 15 bp, Homo sapiens
gtaaaaatcaaggag

SEQ ID NO: 1434091 - DNA, 15 bp, Homo sapiens
taaaaatcaaggagg

SEQ ID NO: 1434092 - DNA, 15 bp, Homo sapiens
aaaaatcaaggagga

SEQ ID NO: 1434093 - DNA, 15 bp, Homo sapiens
aaaatcaaggaggag

SEQ ID NO: 1434094 - DNA, 15 bp, Homo sapiens
aaatcaaggaggagt

SEQ ID NO: 1434095 - DNA, 15 bp, Homo sapiens
aatcaaggaggagtt

SEQ ID NO: 1434096 - DNA, 15 bp, Homo sapiens
atcaaggaggagttc

SEQ ID NO: 1434097 - DNA, 15 bp, Homo sapiens
tcaaggaggagttct

SEQ ID NO: 1434098 - DNA, 15 bp, Homo sapiens
caaggaggagttctc

SEQ ID NO: 1434099 - DNA, 15 bp, Homo sapiens
aaggaggagttctcc

SEQ ID NO: 1434100 - DNA, 15 bp, Homo sapiens
aggaggagttctcct

SEQ ID NO: 1434101 - DNA, 15 bp, Homo sapiens
ggaggagttctcctc

SEQ ID NO: 1434102 - DNA, 15 bp, Homo sapiens
gaggagttctcctct

SEQ ID NO: 1434103 - DNA, 15 bp, Homo sapiens
aggagttctcctctt

SEQ ID NO: 1434104 - DNA, 15 bp, Homo sapiens
ggagttctcctcttc

SEQ ID NO: 1434105 - DNA, 15 bp, Homo sapiens
gagttctcctcttcc

SEQ ID NO: 1434106 - DNA, 15 bp, Homo sapiens
agttctcctcttcct

SEQ ID NO: 1434107 - DNA, 15 bp, Homo sapiens
gttctcctcttccta

SEQ ID NO: 1434108 - DNA, 15 bp, Homo sapiens
ttctcctcttcctaa

SEQ ID NO: 1434109 - DNA, 15 bp, Homo sapiens
tctcctcttcctaaa

SEQ ID NO: 1434110 - DNA, 15 bp, Homo sapiens
ctcctcttcctaaac

SEQ ID NO: 1434111 - DNA, 15 bp, Homo sapiens
tcctcttcctaaacc

SEQ ID NO: 1434112 - DNA, 15 bp, Homo sapiens
cctcttcctaaacca

SEQ ID NO: 1434113 - DNA, 15 bp, Homo sapiens
ctcttcctaaaccat

SEQ ID NO: 1434114 - DNA, 15 bp, Homo sapiens
tcttcctaaaccatc

SEQ ID NO: 1434115 - DNA, 15 bp, Homo sapiens
cttcctaaaccatct

SEQ ID NO: 1434116 - DNA, 15 bp, Homo sapiens
ttcctaaaccatctt

SEQ ID NO: 1434117 - DNA, 15 bp, Homo sapiens
tcctaaaccatctta

SEQ ID NO: 1434118 - DNA, 15 bp, Homo sapiens
cctaaaccatcttaa

SEQ ID NO: 1434119 - DNA, 15 bp, Homo sapiens
ctaaaccatcttaat

SEQ ID NO: 1434120 - DNA, 15 bp, Homo sapiens
taaaccatcttaatt

SEQ ID NO: 1434121 - DNA, 15 bp, Homo sapiens
aaaccatcttaattt

SEQ ID NO: 1434122 - DNA, 15 bp, Homo sapiens
aaccatcttaattta

SEQ ID NO: 1434123 - DNA, 15 bp, Homo sapiens
accatcttaatttac

SEQ ID NO: 1434124 - DNA, 15 bp, Homo sapiens
ccatcttaatttact

SEQ ID NO: 1434125 - DNA, 15 bp, Homo sapiens
catcttaatttactt

SEQ ID NO: 1434126 - DNA, 15 bp, Homo sapiens
atcttaatttactta

SEQ ID NO: 1434127 - DNA, 15 bp, Homo sapiens
tcttaatttacttac

SEQ ID NO: 1434128 - DNA, 15 bp, Homo sapiens
cttaatttacttaca

SEQ ID NO: 1434129 - DNA, 15 bp, Homo sapiens
ttaatttacttacat

SEQ ID NO: 1434130 - DNA, 15 bp, Homo sapiens
taatttacttacata

SEQ ID NO: 1434131 - DNA, 15 bp, Homo sapiens
aatttacttacatag

SEQ ID NO: 1434132 - DNA, 15 bp, Homo sapiens
atttacttacataga

SEQ ID NO: 1434133 - DNA, 15 bp, Homo sapiens
tttacttacatagaa

SEQ ID NO: 1434134 - DNA, 15 bp, Homo sapiens
ttacttacatagaag

SEQ ID NO: 1434135 - DNA, 15 bp, Homo sapiens
tacttacatagaaga

SEQ ID NO: 1434136 - DNA, 15 bp, Homo sapiens
acttacatagaagaa

SEQ ID NO: 1434137 - DNA, 15 bp, Homo sapiens
cttacatagaagaaa

SEQ ID NO: 1434138 - DNA, 15 bp, Homo sapiens
ttacatagaagaaag

SEQ ID NO: 1434139 - DNA, 15 bp, Homo sapiens
tacatagaagaaagc

SEQ ID NO: 1434140 - DNA, 15 bp, Homo sapiens
acatagaagaaagca

SEQ ID NO: 1434141 - DNA, 15 bp, Homo sapiens
catagaagaaagcac

SEQ ID NO: 1434142 - DNA, 15 bp, Homo sapiens
atagaagaaagcaca

SEQ ID NO: 1434143 - DNA, 15 bp, Homo sapiens
tagaagaaagcacag

SEQ ID NO: 1434144 - DNA, 15 bp, Homo sapiens
agaagaaagcacagc

SEQ ID NO: 1434145 - DNA, 15 bp, Homo sapiens
gaagaaagcacagca

SEQ ID NO: 1434146 - DNA, 15 bp, Homo sapiens
aagaaagcacagcag

SEQ ID NO: 1434147 - DNA, 15 bp, Homo sapiens
agaaagcacagcagc

SEQ ID NO: 1434148 - DNA, 15 bp, Homo sapiens
gaaagcacagcagct

SEQ ID NO: 1434149 - DNA, 15 bp, Homo sapiens
aaagcacagcagctg

SEQ ID NO: 1434150 - DNA, 15 bp, Homo sapiens
aagcacagcagctgg

SEQ ID NO: 1434151 - DNA, 15 bp, Homo sapiens
agcacagcagctggc

SEQ ID NO: 1434152 - DNA, 15 bp, Homo sapiens
gcacagcagctggcc

SEQ ID NO: 1434153 - DNA, 15 bp, Homo sapiens
cacagcagctggccc

SEQ ID NO: 1434154 - DNA, 15 bp, Homo sapiens
acagcagctggccca

SEQ ID NO: 1434155 - DNA, 15 bp, Homo sapiens
cagcagctggcccac

SEQ ID NO: 1434156 - DNA, 15 bp, Homo sapiens
agcagctggcccacc

SEQ ID NO: 1434157 - DNA, 15 bp, Homo sapiens
gcagctggcccacca

SEQ ID NO: 1434158 - DNA, 15 bp, Homo sapiens
cagctggcccaccac

SEQ ID NO: 1434159 - DNA, 15 bp, Homo sapiens
agctggcccaccacg

SEQ ID NO: 1434160 - DNA, 15 bp, Homo sapiens
gctggcccaccacgg

SEQ ID NO: 1434161 - DNA, 15 bp, Homo sapiens
ctggcccaccacgga

SEQ ID NO: 1434162 - DNA, 15 bp, Homo sapiens
tggcccaccacggac

SEQ ID NO: 1434163 - DNA, 15 bp, Homo sapiens
ggcccaccacggacg

SEQ ID NO: 1434164 - DNA, 15 bp, Homo sapiens
gcccaccacggacgg

SEQ ID NO: 1434165 - DNA, 15 bp, Homo sapiens
cccaccacggacggg

SEQ ID NO: 1434166 - DNA, 15 bp, Homo sapiens
ccaccacggacgggc

SEQ ID NO: 1434167 - DNA, 15 bp, Homo sapiens
caccacggacgggcc

SEQ ID NO: 1434168 - DNA, 15 bp, Homo sapiens
accacggacgggccc

SEQ ID NO: 1434169 - DNA, 15 bp, Homo sapiens
ccacggacgggccca

SEQ ID NO: 1434170 - DNA, 15 bp, Homo sapiens
cacggacgggcccag

SEQ ID NO: 1434171 - DNA, 15 bp, Homo sapiens
acggacgggcccaga

SEQ ID NO: 1434172 - DNA, 15 bp, Homo sapiens
cggacgggcccagag

SEQ ID NO: 1434173 - DNA, 15 bp, Homo sapiens
ggacgggcccagagc

SEQ ID NO: 1434174 - DNA, 15 bp, Homo sapiens
gacgggcccagagca

SEQ ID NO: 1434175 - DNA, 15 bp, Homo sapiens
acgggcccagagcag

SEQ ID NO: 1434176 - DNA, 15 bp, Homo sapiens
cgggcccagagcagg

SEQ ID NO: 1434177 - DNA, 15 bp, Homo sapiens
gggcccagagcaggg

SEQ ID NO: 1434178 - DNA, 15 bp, Homo sapiens
ggcccagagcagggg

SEQ ID NO: 1434179 - DNA, 15 bp, Homo sapiens
gcccagagcagggga

SEQ ID NO: 1434180 - DNA, 15 bp, Homo sapiens
cccagagcaggggaa

SEQ ID NO: 1434181 - DNA, 15 bp, Homo sapiens
ccagagcaggggaag

SEQ ID NO: 1434182 - DNA, 15 bp, Homo sapiens
cagagcaggggaaga

SEQ ID NO: 1434183 - DNA, 15 bp, Homo sapiens
agagcaggggaagat

SEQ ID NO: 1434184 - DNA, 15 bp, Homo sapiens
gagcaggggaagatt

SEQ ID NO: 1434185 - DNA, 15 bp, Homo sapiens
agcaggggaagattc

SEQ ID NO: 1434186 - DNA, 15 bp, Homo sapiens
gcaggggaagattct

SEQ ID NO: 1434187 - DNA, 15 bp, Homo sapiens
caggggaagattctc

SEQ ID NO: 1434188 - DNA, 15 bp, Homo sapiens
aggggaagattctcg

SEQ ID NO: 1434189 - DNA, 15 bp, Homo sapiens
ggggaagattctcgg

SEQ ID NO: 1434190 - DNA, 15 bp, Homo sapiens
gggaagattctcggt

SEQ ID NO: 1434191 - DNA, 15 bp, Homo sapiens
ggaagattctcggtg

SEQ ID NO: 1434192 - DNA, 15 bp, Homo sapiens
gaagattctcggtga

SEQ ID NO: 1434193 - DNA, 15 bp, Homo sapiens
aagattctcggtgaa

SEQ ID NO: 1434194 - DNA, 15 bp, Homo sapiens
agattctcggtgaac

SEQ ID NO: 1434195 - DNA, 15 bp, Homo sapiens
gattctcggtgaaca

SEQ ID NO: 1434196 - DNA, 15 bp, Homo sapiens
attctcggtgaacat

SEQ ID NO: 1434197 - DNA, 15 bp, Homo sapiens
ttctcggtgaacatt

SEQ ID NO: 1434198 - DNA, 15 bp, Homo sapiens
tctcggtgaacattt

SEQ ID NO: 1434199 - DNA, 15 bp, Homo sapiens
ctcggtgaacatttc

SEQ ID NO: 1434200 - DNA, 15 bp, Homo sapiens
tcggtgaacatttct

SEQ ID NO: 1434201 - DNA, 15 bp, Homo sapiens
cggtgaacatttctt

SEQ ID NO: 1434202 - DNA, 15 bp, Homo sapiens
ggtgaacatttcttt

SEQ ID NO: 1434203 - DNA, 15 bp, Homo sapiens
gtgaacatttctttt

SEQ ID NO: 1434204 - DNA, 15 bp, Homo sapiens
tgaacatttcttttt

SEQ ID NO: 1434205 - DNA, 15 bp, Homo sapiens
gaacatttctttttt

SEQ ID NO: 1434206 - DNA, 15 bp, Homo sapiens
tctttttttttttct

SEQ ID NO: 1434207 - DNA, 15 bp, Homo sapiens
ctttttttttttctt

SEQ ID NO: 1434208 - DNA, 15 bp, Homo sapiens
tctttttttttgagg

SEQ ID NO: 1434209 - DNA, 15 bp, Homo sapiens
ctttttttttgaggt

SEQ ID NO: 1434210 - DNA, 15 bp, Homo sapiens
tttttttttgaggtc

SEQ ID NO: 1434211 - DNA, 15 bp, Homo sapiens
ttttttttgaggtcg

SEQ ID NO: 1434212 - DNA, 15 bp, Homo sapiens
tttttttgaggtcga

SEQ ID NO: 1434213 - DNA, 15 bp, Homo sapiens
ttttttgaggtcgag

SEQ ID NO: 1434214 - DNA, 15 bp, Homo sapiens
tttttgaggtcgagt

SEQ ID NO: 1434215 - DNA, 15 bp, Homo sapiens
ttttgaggtcgagtc

SEQ ID NO: 1434216 - DNA, 15 bp, Homo sapiens
tttgaggtcgagtct

SEQ ID NO: 1434217 - DNA, 15 bp, Homo sapiens
ttgaggtcgagtctc

SEQ ID NO: 1434218 - DNA, 15 bp, Homo sapiens
tgaggtcgagtctct

SEQ ID NO: 1434219 - DNA, 15 bp, Homo sapiens
gaggtcgagtctctg

SEQ ID NO: 1434220 - DNA, 15 bp, Homo sapiens
aggtcgagtctctgt

SEQ ID NO: 1434221 - DNA, 15 bp, Homo sapiens
ggtcgagtctctgtt

SEQ ID NO: 1434222 - DNA, 15 bp, Homo sapiens
gtcgagtctctgttg

SEQ ID NO: 1434223 - DNA, 15 bp, Homo sapiens
tcgagtctctgttgc

SEQ ID NO: 1434224 - DNA, 15 bp, Homo sapiens
cgagtctctgttgcc

SEQ ID NO: 1434225 - DNA, 15 bp, Homo sapiens
tctgttgcccaggcc

SEQ ID NO: 1434226 - DNA, 15 bp, Homo sapiens
ctgttgcccaggcca

SEQ ID NO: 1434227 - DNA, 15 bp, Homo sapiens
tgttgcccaggccag

SEQ ID NO: 1434228 - DNA, 15 bp, Homo sapiens
gttgcccaggccaga

SEQ ID NO: 1434229 - DNA, 15 bp, Homo sapiens
caggccagagtgcaa

SEQ ID NO: 1434230 - DNA, 15 bp, Homo sapiens
aggccagagtgcaat

SEQ ID NO: 1434231 - DNA, 15 bp, Homo sapiens
ggccagagtgcaatg

SEQ ID NO: 1434232 - DNA, 15 bp, Homo sapiens
gccagagtgcaatgg

SEQ ID NO: 1434233 - DNA, 15 bp, Homo sapiens
ccagagtgcaatggc

SEQ ID NO: 1434234 - DNA, 15 bp, Homo sapiens
cagagtgcaatggcg

SEQ ID NO: 1434235 - DNA, 15 bp, Homo sapiens
ctcccaaatagctga

SEQ ID NO: 1434236 - DNA, 15 bp, Homo sapiens
tcccaaatagctgag

SEQ ID NO: 1434237 - DNA, 15 bp, Homo sapiens
cccaaatagctgaga

SEQ ID NO: 1434238 - DNA, 15 bp, Homo sapiens
ccaaatagctgagac

SEQ ID NO: 1434239 - DNA, 15 bp, Homo sapiens
caaatagctgagact

SEQ ID NO: 1434240 - DNA, 15 bp, Homo sapiens
aaatagctgagacta

SEQ ID NO: 1434241 - DNA, 15 bp, Homo sapiens
aatagctgagactac

SEQ ID NO: 1434242 - DNA, 15 bp, Homo sapiens
atagctgagactaca

SEQ ID NO: 1434243 - DNA, 15 bp, Homo sapiens
ctgagactacaggcg

SEQ ID NO: 1434244 - DNA, 15 bp, Homo sapiens
tgagactacaggcgt

SEQ ID NO: 1434245 - DNA, 15 bp, Homo sapiens
gagactacaggcgtg

SEQ ID NO: 1434246 - DNA, 15 bp, Homo sapiens
agactacaggcgtgt

SEQ ID NO: 1434247 - DNA, 15 bp, Homo sapiens
gactacaggcgtgtg

SEQ ID NO: 1434248 - DNA, 15 bp, Homo sapiens
cgtgtgccaccacgc

SEQ ID NO: 1434249 - DNA, 15 bp, Homo sapiens
gtgccaccacgcccg

SEQ ID NO: 1434250 - DNA, 15 bp, Homo sapiens
tgccaccacgcccga

SEQ ID NO: 1434251 - DNA, 15 bp, Homo sapiens
ccgactaattttttg

SEQ ID NO: 1434252 - DNA, 15 bp, Homo sapiens
cgactaattttttgt

SEQ ID NO: 1434253 - DNA, 15 bp, Homo sapiens
ttgtatttttttttt

SEQ ID NO: 1434254 - DNA, 15 bp, Homo sapiens
tgtatttttttttta

SEQ ID NO: 1434255 - DNA, 15 bp, Homo sapiens
gtattttttttttag

SEQ ID NO: 1434256 - DNA, 15 bp, Homo sapiens
tattttttttttagt

SEQ ID NO: 1434257 - DNA, 15 bp, Homo sapiens
attttttttttagta

SEQ ID NO: 1434258 - DNA, 15 bp, Homo sapiens
caccgtgttagccaa

SEQ ID NO: 1434259 - DNA, 15 bp, Homo sapiens
accgtgttagccaat

SEQ ID NO: 1434260 - DNA, 15 bp, Homo sapiens
ccgtgttagccaata

SEQ ID NO: 1434261 - DNA, 15 bp, Homo sapiens
cgtgttagccaatat

SEQ ID NO: 1434262 - DNA, 15 bp, Homo sapiens
gtgttagccaatatg

SEQ ID NO: 1434263 - DNA, 15 bp, Homo sapiens
tgttagccaatatgg

SEQ ID NO: 1434264 - DNA, 15 bp, Homo sapiens
gttagccaatatggt

SEQ ID NO: 1434265 - DNA, 15 bp, Homo sapiens
ttagccaatatggtc

SEQ ID NO: 1434266 - DNA, 15 bp, Homo sapiens
tagccaatatggtcc

SEQ ID NO: 1434267 - DNA, 15 bp, Homo sapiens
agccaatatggtccc

SEQ ID NO: 1434268 - DNA, 15 bp, Homo sapiens
gccaatatggtcccg

SEQ ID NO: 1434269 - DNA, 15 bp, Homo sapiens
ccaatatggtcccga

SEQ ID NO: 1434270 - DNA, 15 bp, Homo sapiens
caatatggtcccgat

SEQ ID NO: 1434271 - DNA, 15 bp, Homo sapiens
aatatggtcccgatc

SEQ ID NO: 1434272 - DNA, 15 bp, Homo sapiens
atatggtcccgatct

SEQ ID NO: 1434273 - DNA, 15 bp, Homo sapiens
tatggtcccgatctc

SEQ ID NO: 1434274 - DNA, 15 bp, Homo sapiens
atggtcccgatctcc

SEQ ID NO: 1434275 - DNA, 15 bp, Homo sapiens
tggtcccgatctcct

SEQ ID NO: 1434276 - DNA, 15 bp, Homo sapiens
ggtcccgatctcctg

SEQ ID NO: 1434277 - DNA, 15 bp, Homo sapiens
gtcccgatctcctga

SEQ ID NO: 1434278 - DNA, 15 bp, Homo sapiens
tcccgatctcctgac

SEQ ID NO: 1434279 - DNA, 15 bp, Homo sapiens
cccgatctcctgacc

SEQ ID NO: 1434280 - DNA, 15 bp, Homo sapiens
ccgatctcctgacct

SEQ ID NO: 1434281 - DNA, 15 bp, Homo sapiens
cactgtgcccagccc

SEQ ID NO: 1434282 - DNA, 15 bp, Homo sapiens
actgtgcccagccct

SEQ ID NO: 1434283 - DNA, 15 bp, Homo sapiens
ctgtgcccagccctc

SEQ ID NO: 1434284 - DNA, 15 bp, Homo sapiens
tgtgcccagccctct

SEQ ID NO: 1434285 - DNA, 15 bp, Homo sapiens
gtgcccagccctctc

SEQ ID NO: 1434286 - DNA, 15 bp, Homo sapiens
tgcccagccctctcc

SEQ ID NO: 1434287 - DNA, 15 bp, Homo sapiens
cccagccctctccat

SEQ ID NO: 1434288 - DNA, 15 bp, Homo sapiens
ccagccctctccatg

SEQ ID NO: 1434289 - DNA, 15 bp, Homo sapiens
cagccctctccatga

SEQ ID NO: 1434290 - DNA, 15 bp, Homo sapiens
agccctctccatgaa

SEQ ID NO: 1434291 - DNA, 15 bp, Homo sapiens
gccctctccatgaac

SEQ ID NO: 1434292 - DNA, 15 bp, Homo sapiens
ccctctccatgaaca

SEQ ID NO: 1434293 - DNA, 15 bp, Homo sapiens
cctctccatgaacat

SEQ ID NO: 1434294 - DNA, 15 bp, Homo sapiens
ctctccatgaacatt

SEQ ID NO: 1434295 - DNA, 15 bp, Homo sapiens
tctccatgaacattt

SEQ ID NO: 1434296 - DNA, 15 bp, Homo sapiens
ctccatgaacatttt

SEQ ID NO: 1434297 - DNA, 15 bp, Homo sapiens
tccatgaacattttc

SEQ ID NO: 1434298 - DNA, 15 bp, Homo sapiens
ccatgaacattttct

SEQ ID NO: 1434299 - DNA, 15 bp, Homo sapiens
catgaacattttcta

SEQ ID NO: 1434300 - DNA, 15 bp, Homo sapiens
atgaacattttctaa

SEQ ID NO: 1434301 - DNA, 15 bp, Homo sapiens
tgaacattttctaat

SEQ ID NO: 1434302 - DNA, 15 bp, Homo sapiens
gaacattttctaatt

SEQ ID NO: 1434303 - DNA, 15 bp, Homo sapiens
aacattttctaatta

SEQ ID NO: 1434304 - DNA, 15 bp, Homo sapiens
acattttctaattaa

SEQ ID NO: 1434305 - DNA, 15 bp, Homo sapiens
cattttctaattaaa

SEQ ID NO: 1434306 - DNA, 15 bp, Homo sapiens
attttctaattaaac

SEQ ID NO: 1434307 - DNA, 15 bp, Homo sapiens
ttttctaattaaact

SEQ ID NO: 1434308 - DNA, 15 bp, Homo sapiens
tttctaattaaactt

SEQ ID NO: 1434309 - DNA, 15 bp, Homo sapiens
ttctaattaaacttg

SEQ ID NO: 1434310 - DNA, 15 bp, Homo sapiens
tctaattaaacttga

SEQ ID NO: 1434311 - DNA, 15 bp, Homo sapiens
ctaattaaacttgac

SEQ ID NO: 1434312 - DNA, 15 bp, Homo sapiens
taattaaacttgaca

SEQ ID NO: 1434313 - DNA, 15 bp, Homo sapiens
aattaaacttgacac

SEQ ID NO: 1434314 - DNA, 15 bp, Homo sapiens
attaaacttgacact

SEQ ID NO: 1434315 - DNA, 15 bp, Homo sapiens
ttaaacttgacactt

SEQ ID NO: 1434316 - DNA, 15 bp, Homo sapiens
taaacttgacactta

SEQ ID NO: 1434317 - DNA, 15 bp, Homo sapiens
aaacttgacacttaa

SEQ ID NO: 1434318 - DNA, 15 bp, Homo sapiens
aacttgacacttaat

SEQ ID NO: 1434319 - DNA, 15 bp, Homo sapiens
acttgacacttaata

SEQ ID NO: 1434320 - DNA, 15 bp, Homo sapiens
cttgacacttaatac

SEQ ID NO: 1434321 - DNA, 15 bp, Homo sapiens
ttgacacttaataca

SEQ ID NO: 1434322 - DNA, 15 bp, Homo sapiens
tgacacttaatacaa

SEQ ID NO: 1434323 - DNA, 15 bp, Homo sapiens
gacacttaatacaat

SEQ ID NO: 1434324 - DNA, 15 bp, Homo sapiens
acacttaatacaatg

SEQ ID NO: 1434325 - DNA, 15 bp, Homo sapiens
cacttaatacaatgt

SEQ ID NO: 1434326 - DNA, 15 bp, Homo sapiens
acttaatacaatgtt

SEQ ID NO: 1434327 - DNA, 15 bp, Homo sapiens
cttaatacaatgtta

SEQ ID NO: 1434328 - DNA, 15 bp, Homo sapiens
ttaatacaatgttat

SEQ ID NO: 1434329 - DNA, 15 bp, Homo sapiens
taatacaatgttatg

SEQ ID NO: 1434330 - DNA, 15 bp, Homo sapiens
aatacaatgttatgc

SEQ ID NO: 1434331 - DNA, 15 bp, Homo sapiens
atacaatgttatgct

SEQ ID NO: 1434332 - DNA, 15 bp, Homo sapiens
tacaatgttatgctt

SEQ ID NO: 1434333 - DNA, 15 bp, Homo sapiens
acaatgttatgctta

SEQ ID NO: 1434334 - DNA, 15 bp, Homo sapiens
caatgttatgcttag

SEQ ID NO: 1434335 - DNA, 15 bp, Homo sapiens
aatgttatgcttagg

SEQ ID NO: 1434336 - DNA, 15 bp, Homo sapiens
atgttatgcttagga

SEQ ID NO: 1434337 - DNA, 15 bp, Homo sapiens
tgttatgcttaggac

SEQ ID NO: 1434338 - DNA, 15 bp, Homo sapiens
gttatgcttaggact

SEQ ID NO: 1434339 - DNA, 15 bp, Homo sapiens
ttatgcttaggactg

SEQ ID NO: 1434340 - DNA, 15 bp, Homo sapiens
tatgcttaggactgc

SEQ ID NO: 1434341 - DNA, 15 bp, Homo sapiens
atgcttaggactgct

SEQ ID NO: 1434342 - DNA, 15 bp, Homo sapiens
tgcttaggactgcta

SEQ ID NO: 1434343 - DNA, 15 bp, Homo sapiens
gcttaggactgctat

SEQ ID NO: 1434344 - DNA, 15 bp, Homo sapiens
cttaggactgctata

SEQ ID NO: 1434345 - DNA, 15 bp, Homo sapiens
ttaggactgctataa

SEQ ID NO: 1434346 - DNA, 15 bp, Homo sapiens
taggactgctataaa

SEQ ID NO: 1434347 - DNA, 15 bp, Homo sapiens
aggactgctataaag

SEQ ID NO: 1434348 - DNA, 15 bp, Homo sapiens
ggactgctataaagc

SEQ ID NO: 1434349 - DNA, 15 bp, Homo sapiens
gactgctataaagct

SEQ ID NO: 1434350 - DNA, 15 bp, Homo sapiens
actgctataaagctt

SEQ ID NO: 1434351 - DNA, 15 bp, Homo sapiens
ctgctataaagctta

SEQ ID NO: 1434352 - DNA, 15 bp, Homo sapiens
tgctataaagcttac

SEQ ID NO: 1434353 - DNA, 15 bp, Homo sapiens
gctataaagcttacc

SEQ ID NO: 1434354 - DNA, 15 bp, Homo sapiens
ctataaagcttacct

SEQ ID NO: 1434355 - DNA, 15 bp, Homo sapiens
tataaagcttacctc

SEQ ID NO: 1434356 - DNA, 15 bp, Homo sapiens
ataaagcttacctct

SEQ ID NO: 1434357 - DNA, 15 bp, Homo sapiens
taaagcttacctctg

SEQ ID NO: 1434358 - DNA, 15 bp, Homo sapiens
aaagcttacctctgg

SEQ ID NO: 1434359 - DNA, 15 bp, Homo sapiens
aagcttacctctgga

SEQ ID NO: 1434360 - DNA, 15 bp, Homo sapiens
agcttacctctggag

SEQ ID NO: 1434361 - DNA, 15 bp, Homo sapiens
gcttacctctggagt

SEQ ID NO: 1434362 - DNA, 15 bp, Homo sapiens
cttacctctggagtt

SEQ ID NO: 1434363 - DNA, 15 bp, Homo sapiens
ttacctctggagttg

SEQ ID NO: 1434364 - DNA, 15 bp, Homo sapiens
tacctctggagttgc

SEQ ID NO: 1434365 - DNA, 15 bp, Homo sapiens
acctctggagttgcg

SEQ ID NO: 1434366 - DNA, 15 bp, Homo sapiens
cctctggagttgcgc

SEQ ID NO: 1434367 - DNA, 15 bp, Homo sapiens
ctctggagttgcgca

SEQ ID NO: 1434368 - DNA, 15 bp, Homo sapiens
tctggagttgcgcag

SEQ ID NO: 1434369 - DNA, 15 bp, Homo sapiens
ctggagttgcgcagc

SEQ ID NO: 1434370 - DNA, 15 bp, Homo sapiens
tggagttgcgcagca

SEQ ID NO: 1434371 - DNA, 15 bp, Homo sapiens
ggagttgcgcagcac

SEQ ID NO: 1434372 - DNA, 15 bp, Homo sapiens
gagttgcgcagcaca

SEQ ID NO: 1434373 - DNA, 15 bp, Homo sapiens
agttgcgcagcacaa

SEQ ID NO: 1434374 - DNA, 15 bp, Homo sapiens
gttgcgcagcacaaa

SEQ ID NO: 1434375 - DNA, 15 bp, Homo sapiens
ttgcgcagcacaaag

SEQ ID NO: 1434376 - DNA, 15 bp, Homo sapiens
tgcgcagcacaaagg

SEQ ID NO: 1434377 - DNA, 15 bp, Homo sapiens
gcgcagcacaaaggc

SEQ ID NO: 1434378 - DNA, 15 bp, Homo sapiens
cgcagcacaaaggcc

SEQ ID NO: 1434379 - DNA, 15 bp, Homo sapiens
gcagcacaaaggcct

SEQ ID NO: 1434380 - DNA, 15 bp, Homo sapiens
cagcacaaaggcctt

SEQ ID NO: 1434381 - DNA, 15 bp, Homo sapiens
agcacaaaggccttg

SEQ ID NO: 1434382 - DNA, 15 bp, Homo sapiens
gcacaaaggccttgg

SEQ ID NO: 1434383 - DNA, 15 bp, Homo sapiens
cacaaaggccttggt

SEQ ID NO: 1434384 - DNA, 15 bp, Homo sapiens
acaaaggccttggtg

SEQ ID NO: 1434385 - DNA, 15 bp, Homo sapiens
caaaggccttggtgt

SEQ ID NO: 1434386 - DNA, 15 bp, Homo sapiens
aaaggccttggtgtg

SEQ ID NO: 1434387 - DNA, 15 bp, Homo sapiens
aaggccttggtgtgt

SEQ ID NO: 1434388 - DNA, 15 bp, Homo sapiens
aggccttggtgtgtg

SEQ ID NO: 1434389 - DNA, 15 bp, Homo sapiens
ggccttggtgtgtgt

SEQ ID NO: 1434390 - DNA, 15 bp, Homo sapiens
gccttggtgtgtgta

SEQ ID NO: 1434391 - DNA, 15 bp, Homo sapiens
ccttggtgtgtgtat

SEQ ID NO: 1434392 - DNA, 15 bp, Homo sapiens
cttggtgtgtgtata

SEQ ID NO: 1434393 - DNA, 15 bp, Homo sapiens
ttggtgtgtgtataa

SEQ ID NO: 1434394 - DNA, 15 bp, Homo sapiens
tggtgtgtgtataaa

SEQ ID NO: 1434395 - DNA, 15 bp, Homo sapiens
ggtgtgtgtataaat

SEQ ID NO: 1434396 - DNA, 15 bp, Homo sapiens
gtgtgtgtataaatt

SEQ ID NO: 1434397 - DNA, 15 bp, Homo sapiens
tgtgtgtataaattt

SEQ ID NO: 1434398 - DNA, 15 bp, Homo sapiens
gtgtgtataaatttg

SEQ ID NO: 1434399 - DNA, 15 bp, Homo sapiens
tgtgtataaatttgg

SEQ ID NO: 1434400 - DNA, 15 bp, Homo sapiens
gtgtataaatttggt

SEQ ID NO: 1434401 - DNA, 15 bp, Homo sapiens
tgtataaatttggtt

SEQ ID NO: 1434402 - DNA, 15 bp, Homo sapiens
gtataaatttggttt

SEQ ID NO: 1434403 - DNA, 15 bp, Homo sapiens
tataaatttggtttg

SEQ ID NO: 1434404 - DNA, 15 bp, Homo sapiens
ataaatttggtttgt

SEQ ID NO: 1434405 - DNA, 15 bp, Homo sapiens
taaatttggtttgtt

SEQ ID NO: 1434406 - DNA, 15 bp, Homo sapiens
aaatttggtttgttc

SEQ ID NO: 1434407 - DNA, 15 bp, Homo sapiens
aatttggtttgttct

SEQ ID NO: 1434408 - DNA, 15 bp, Homo sapiens
atttggtttgttctt

SEQ ID NO: 1434409 - DNA, 15 bp, Homo sapiens
tttggtttgttcttt

SEQ ID NO: 1434410 - DNA, 15 bp, Homo sapiens
ttggtttgttctttt

SEQ ID NO: 1434411 - DNA, 15 bp, Homo sapiens
tggtttgttcttttc

SEQ ID NO: 1434412 - DNA, 15 bp, Homo sapiens
ggtttgttcttttca

SEQ ID NO: 1434413 - DNA, 15 bp, Homo sapiens
gtttgttcttttcac

SEQ ID NO: 1434414 - DNA, 15 bp, Homo sapiens
tttgttcttttcaca

SEQ ID NO: 1434415 - DNA, 15 bp, Homo sapiens
ttgttcttttcacag

SEQ ID NO: 1434416 - DNA, 15 bp, Homo sapiens
gttcttttcacagca

SEQ ID NO: 1434417 - DNA, 15 bp, Homo sapiens
ttcttttcacagcaa

SEQ ID NO: 1434418 - DNA, 15 bp, Homo sapiens
tcttttcacagcaaa

SEQ ID NO: 1434419 - DNA, 15 bp, Homo sapiens
cttttcacagcaaaa

SEQ ID NO: 1434420 - DNA, 15 bp, Homo sapiens
ttttcacagcaaaag

SEQ ID NO: 1434421 - DNA, 15 bp, Homo sapiens
tttcacagcaaaagc

SEQ ID NO: 1434422 - DNA, 15 bp, Homo sapiens
ttcacagcaaaagct

SEQ ID NO: 1434423 - DNA, 15 bp, Homo sapiens
tcacagcaaaagcta

SEQ ID NO: 1434424 - DNA, 15 bp, Homo sapiens
cacagcaaaagctac

SEQ ID NO: 1434425 - DNA, 15 bp, Homo sapiens
acagcaaaagctacc

SEQ ID NO: 1434426 - DNA, 15 bp, Homo sapiens
cagcaaaagctaccc

SEQ ID NO: 1434427 - DNA, 15 bp, Homo sapiens
agcaaaagctaccca

SEQ ID NO: 1434428 - DNA, 15 bp, Homo sapiens
gcaaaagctacccac

SEQ ID NO: 1434429 - DNA, 15 bp, Homo sapiens
caaaagctacccacc

SEQ ID NO: 1434430 - DNA, 15 bp, Homo sapiens
aaaagctacccacct

SEQ ID NO: 1434431 - DNA, 15 bp, Homo sapiens
aaagctacccacctt

SEQ ID NO: 1434432 - DNA, 15 bp, Homo sapiens
aagctacccaccttt

SEQ ID NO: 1434433 - DNA, 15 bp, Homo sapiens
agctacccacctttg

SEQ ID NO: 1434434 - DNA, 15 bp, Homo sapiens
gctacccacctttgc

SEQ ID NO: 1434435 - DNA, 15 bp, Homo sapiens
ctacccacctttgcc

SEQ ID NO: 1434436 - DNA, 15 bp, Homo sapiens
tacccacctttgcct

SEQ ID NO: 1434437 - DNA, 15 bp, Homo sapiens
acccacctttgcctc

SEQ ID NO: 1434438 - DNA, 15 bp, Homo sapiens
cccacctttgcctcc

SEQ ID NO: 1434439 - DNA, 15 bp, Homo sapiens
ccacctttgcctcct

SEQ ID NO: 1434440 - DNA, 15 bp, Homo sapiens
cacctttgcctcctg

SEQ ID NO: 1434441 - DNA, 15 bp, Homo sapiens
acctttgcctcctgt

SEQ ID NO: 1434442 - DNA, 15 bp, Homo sapiens
cctttgcctcctgtg

SEQ ID NO: 1434443 - DNA, 15 bp, Homo sapiens
ctttgcctcctgtgc

SEQ ID NO: 1434444 - DNA, 15 bp, Homo sapiens
tttgcctcctgtgcc

SEQ ID NO: 1434445 - DNA, 15 bp, Homo sapiens
ttgcctcctgtgcct

SEQ ID NO: 1434446 - DNA, 15 bp, Homo sapiens
tgcctcctgtgcctg

SEQ ID NO: 1434447 - DNA, 15 bp, Homo sapiens
gcctcctgtgcctgc

SEQ ID NO: 1434448 - DNA, 15 bp, Homo sapiens
cctcctgtgcctgct

SEQ ID NO: 1434449 - DNA, 15 bp, Homo sapiens
ctcctgtgcctgctt

SEQ ID NO: 1434450 - DNA, 15 bp, Homo sapiens
tcctgtgcctgcttc

SEQ ID NO: 1434451 - DNA, 15 bp, Homo sapiens
cctgtgcctgcttct

SEQ ID NO: 1434452 - DNA, 15 bp, Homo sapiens
ctgtgcctgcttctg

SEQ ID NO: 1434453 - DNA, 15 bp, Homo sapiens
tgtgcctgcttctgc

SEQ ID NO: 1434454 - DNA, 15 bp, Homo sapiens
gtgcctgcttctgcc

SEQ ID NO: 1434455 - DNA, 15 bp, Homo sapiens
tgcctgcttctgccc

SEQ ID NO: 1434456 - DNA, 15 bp, Homo sapiens
gcctgcttctgccca

SEQ ID NO: 1434457 - DNA, 15 bp, Homo sapiens
cctgcttctgcccag

SEQ ID NO: 1434458 - DNA, 15 bp, Homo sapiens
ctgcttctgcccagg

SEQ ID NO: 1434459 - DNA, 15 bp, Homo sapiens
tgcttctgcccaggg

SEQ ID NO: 1434460 - DNA, 15 bp, Homo sapiens
gcttctgcccaggga

SEQ ID NO: 1434461 - DNA, 15 bp, Homo sapiens
cttctgcccagggac

SEQ ID NO: 1434462 - DNA, 15 bp, Homo sapiens
ttctgcccagggact

SEQ ID NO: 1434463 - DNA, 15 bp, Homo sapiens
tctgcccagggactt

SEQ ID NO: 1434464 - DNA, 15 bp, Homo sapiens
ctgcccagggactta

SEQ ID NO: 1434465 - DNA, 15 bp, Homo sapiens
tgcccagggacttag

SEQ ID NO: 1434466 - DNA, 15 bp, Homo sapiens
gcccagggacttagg

SEQ ID NO: 1434467 - DNA, 15 bp, Homo sapiens
cccagggacttaggt

SEQ ID NO: 1434468 - DNA, 15 bp, Homo sapiens
ccagggacttaggtc

SEQ ID NO: 1434469 - DNA, 15 bp, Homo sapiens
cagggacttaggtcc

SEQ ID NO: 1434470 - DNA, 15 bp, Homo sapiens
agggacttaggtcct

SEQ ID NO: 1434471 - DNA, 15 bp, Homo sapiens
gggacttaggtcctc

SEQ ID NO: 1434472 - DNA, 15 bp, Homo sapiens
ggacttaggtcctct

SEQ ID NO: 1434473 - DNA, 15 bp, Homo sapiens
gacttaggtcctctt

SEQ ID NO: 1434474 - DNA, 15 bp, Homo sapiens
acttaggtcctctta

SEQ ID NO: 1434475 - DNA, 15 bp, Homo sapiens
cttaggtcctcttac

SEQ ID NO: 1434476 - DNA, 15 bp, Homo sapiens
ttaggtcctcttaca

SEQ ID NO: 1434477 - DNA, 15 bp, Homo sapiens
taggtcctcttacac

SEQ ID NO: 1434478 - DNA, 15 bp, Homo sapiens
aggtcctcttacacc

SEQ ID NO: 1434479 - DNA, 15 bp, Homo sapiens
ggtcctcttacacct

SEQ ID NO: 1434480 - DNA, 15 bp, Homo sapiens
gtcctcttacacctt

SEQ ID NO: 1434481 - DNA, 15 bp, Homo sapiens
tcctcttacacctta

SEQ ID NO: 1434482 - DNA, 15 bp, Homo sapiens
cctcttacaccttag

SEQ ID NO: 1434483 - DNA, 15 bp, Homo sapiens
ctcttacaccttaga

SEQ ID NO: 1434484 - DNA, 15 bp, Homo sapiens
tcttacaccttagag

SEQ ID NO: 1434485 - DNA, 15 bp, Homo sapiens
cttacaccttagaga

SEQ ID NO: 1434486 - DNA, 15 bp, Homo sapiens
ttacaccttagagaa

SEQ ID NO: 1434487 - DNA, 15 bp, Homo sapiens
tacaccttagagaaa

SEQ ID NO: 1434488 - DNA, 15 bp, Homo sapiens
acaccttagagaaag

SEQ ID NO: 1434489 - DNA, 15 bp, Homo sapiens
caccttagagaaagg

SEQ ID NO: 1434490 - DNA, 15 bp, Homo sapiens
accttagagaaaggc

SEQ ID NO: 1434491 - DNA, 15 bp, Homo sapiens
ccttagagaaaggcc

SEQ ID NO: 1434492 - DNA, 15 bp, Homo sapiens
cttagagaaaggcct

SEQ ID NO: 1434493 - DNA, 15 bp, Homo sapiens
ttagagaaaggcctt

SEQ ID NO: 1434494 - DNA, 15 bp, Homo sapiens
tagagaaaggcctta

SEQ ID NO: 1434495 - DNA, 15 bp, Homo sapiens
agagaaaggccttag

SEQ ID NO: 1434496 - DNA, 15 bp, Homo sapiens
gagaaaggccttagc

SEQ ID NO: 1434497 - DNA, 15 bp, Homo sapiens
agaaaggccttagca

SEQ ID NO: 1434498 - DNA, 15 bp, Homo sapiens
gaaaggccttagcat

SEQ ID NO: 1434499 - DNA, 15 bp, Homo sapiens
aaaggccttagcatc

SEQ ID NO: 1434500 - DNA, 15 bp, Homo sapiens
aaggccttagcatct

SEQ ID NO: 1434501 - DNA, 15 bp, Homo sapiens
aggccttagcatctg

SEQ ID NO: 1434502 - DNA, 15 bp, Homo sapiens
ggccttagcatctgg

SEQ ID NO: 1434503 - DNA, 15 bp, Homo sapiens
gccttagcatctggt

SEQ ID NO: 1434504 - DNA, 15 bp, Homo sapiens
ccttagcatctggtc

SEQ ID NO: 1434505 - DNA, 15 bp, Homo sapiens
cttagcatctggtca

SEQ ID NO: 1434506 - DNA, 15 bp, Homo sapiens
ttagcatctggtcac

SEQ ID NO: 1434507 - DNA, 15 bp, Homo sapiens
tagcatctggtcaca

SEQ ID NO: 1434508 - DNA, 15 bp, Homo sapiens
agcatctggtcacag

SEQ ID NO: 1434509 - DNA, 15 bp, Homo sapiens
gcatctggtcacagg

SEQ ID NO: 1434510 - DNA, 15 bp, Homo sapiens
catctggtcacaggc

SEQ ID NO: 1434511 - DNA, 15 bp, Homo sapiens
atctggtcacaggca

SEQ ID NO: 1434512 - DNA, 15 bp, Homo sapiens
tctggtcacaggcag

SEQ ID NO: 1434513 - DNA, 15 bp, Homo sapiens
ctggtcacaggcaga

SEQ ID NO: 1434514 - DNA, 15 bp, Homo sapiens
tggtcacaggcagat

SEQ ID NO: 1434515 - DNA, 15 bp, Homo sapiens
ggtcacaggcagatg

SEQ ID NO: 1434516 - DNA, 15 bp, Homo sapiens
gtcacaggcagatga

SEQ ID NO: 1434517 - DNA, 15 bp, Homo sapiens
tcacaggcagatgag

SEQ ID NO: 1434518 - DNA, 15 bp, Homo sapiens
cacaggcagatgagt

SEQ ID NO: 1434519 - DNA, 15 bp, Homo sapiens
acaggcagatgagtg

SEQ ID NO: 1434520 - DNA, 15 bp, Homo sapiens
caggcagatgagtga

SEQ ID NO: 1434521 - DNA, 15 bp, Homo sapiens
aggcagatgagtgac

SEQ ID NO: 1434522 - DNA, 15 bp, Homo sapiens
ggcagatgagtgaca

SEQ ID NO: 1434523 - DNA, 15 bp, Homo sapiens
gcagatgagtgacag

SEQ ID NO: 1434524 - DNA, 15 bp, Homo sapiens
cagatgagtgacagc

SEQ ID NO: 1434525 - DNA, 15 bp, Homo sapiens
agatgagtgacagca

SEQ ID NO: 1434526 - DNA, 15 bp, Homo sapiens
gatgagtgacagcaa

SEQ ID NO: 1434527 - DNA, 15 bp, Homo sapiens
atgagtgacagcaag

SEQ ID NO: 1434528 - DNA, 15 bp, Homo sapiens
tgagtgacagcaaga

SEQ ID NO: 1434529 - DNA, 15 bp, Homo sapiens
gagtgacagcaagaa

SEQ ID NO: 1434530 - DNA, 15 bp, Homo sapiens
agtgacagcaagaaa

SEQ ID NO: 1434531 - DNA, 15 bp, Homo sapiens
gtgacagcaagaaaa

SEQ ID NO: 1434532 - DNA, 15 bp, Homo sapiens
tgacagcaagaaaac

SEQ ID NO: 1434533 - DNA, 15 bp, Homo sapiens
gacagcaagaaaacc

SEQ ID NO: 1434534 - DNA, 15 bp, Homo sapiens
acagcaagaaaacct

SEQ ID NO: 1434535 - DNA, 15 bp, Homo sapiens
cagcaagaaaacctg

SEQ ID NO: 1434536 - DNA, 15 bp, Homo sapiens
agcaagaaaacctgg

SEQ ID NO: 1434537 - DNA, 15 bp, Homo sapiens
gcaagaaaacctggc

SEQ ID NO: 1434538 - DNA, 15 bp, Homo sapiens
caagaaaacctggct

SEQ ID NO: 1434539 - DNA, 15 bp, Homo sapiens
aagaaaacctggctg

SEQ ID NO: 1434540 - DNA, 15 bp, Homo sapiens
agaaaacctggctgc

SEQ ID NO: 1434541 - DNA, 15 bp, Homo sapiens
gaaaacctggctgca

SEQ ID NO: 1434542 - DNA, 15 bp, Homo sapiens
aaaacctggctgcaa

SEQ ID NO: 1434543 - DNA, 15 bp, Homo sapiens
aaacctggctgcaat

SEQ ID NO: 1434544 - DNA, 15 bp, Homo sapiens
aacctggctgcaatg

SEQ ID NO: 1434545 - DNA, 15 bp, Homo sapiens
acctggctgcaatgt

SEQ ID NO: 1434546 - DNA, 15 bp, Homo sapiens
cctggctgcaatgta

SEQ ID NO: 1434547 - DNA, 15 bp, Homo sapiens
ctggctgcaatgtaa

SEQ ID NO: 1434548 - DNA, 15 bp, Homo sapiens
tggctgcaatgtaat

SEQ ID NO: 1434549 - DNA, 15 bp, Homo sapiens
ggctgcaatgtaatt

SEQ ID NO: 1434550 - DNA, 15 bp, Homo sapiens
gctgcaatgtaattt

SEQ ID NO: 1434551 - DNA, 15 bp, Homo sapiens
ctgcaatgtaatttt

SEQ ID NO: 1434552 - DNA, 15 bp, Homo sapiens
tgcaatgtaattttg

SEQ ID NO: 1434553 - DNA, 15 bp, Homo sapiens
gcaatgtaattttgt

SEQ ID NO: 1434554 - DNA, 15 bp, Homo sapiens
caatgtaattttgtt

SEQ ID NO: 1434555 - DNA, 15 bp, Homo sapiens
aatgtaattttgttt

SEQ ID NO: 1434556 - DNA, 15 bp, Homo sapiens
atgtaattttgtttc

SEQ ID NO: 1434557 - DNA, 15 bp, Homo sapiens
tgtaattttgtttcc

SEQ ID NO: 1434558 - DNA, 15 bp, Homo sapiens
gtaattttgtttcca

SEQ ID NO: 1434559 - DNA, 15 bp, Homo sapiens
taattttgtttccat

SEQ ID NO: 1434560 - DNA, 15 bp, Homo sapiens
aattttgtttccatc

SEQ ID NO: 1434561 - DNA, 15 bp, Homo sapiens
attttgtttccatcc

SEQ ID NO: 1434562 - DNA, 15 bp, Homo sapiens
ttttgtttccatcct

SEQ ID NO: 1434563 - DNA, 15 bp, Homo sapiens
tttgtttccatcctc

SEQ ID NO: 1434564 - DNA, 15 bp, Homo sapiens
ttgtttccatcctct

SEQ ID NO: 1434565 - DNA, 15 bp, Homo sapiens
tgtttccatcctctt

SEQ ID NO: 1434566 - DNA, 15 bp, Homo sapiens
gtttccatcctcttt

SEQ ID NO: 1434567 - DNA, 15 bp, Homo sapiens
tttccatcctcttta

SEQ ID NO: 1434568 - DNA, 15 bp, Homo sapiens
ttccatcctctttat

SEQ ID NO: 1434569 - DNA, 15 bp, Homo sapiens
tccatcctctttatt

SEQ ID NO: 1434570 - DNA, 15 bp, Homo sapiens
ccatcctctttatta

SEQ ID NO: 1434571 - DNA, 15 bp, Homo sapiens
catcctctttattag

SEQ ID NO: 1434572 - DNA, 15 bp, Homo sapiens
atcctctttattagt

SEQ ID NO: 1434573 - DNA, 15 bp, Homo sapiens
tcctctttattagtt

SEQ ID NO: 1434574 - DNA, 15 bp, Homo sapiens
cctctttattagtta

SEQ ID NO: 1434575 - DNA, 15 bp, Homo sapiens
ctctttattagttat

SEQ ID NO: 1434576 - DNA, 15 bp, Homo sapiens
tctttattagttatc

SEQ ID NO: 1434577 - DNA, 15 bp, Homo sapiens
ctttattagttatca

SEQ ID NO: 1434578 - DNA, 15 bp, Homo sapiens
tttattagttatcaa

SEQ ID NO: 1434579 - DNA, 15 bp, Homo sapiens
ttattagttatcaat

SEQ ID NO: 1434580 - DNA, 15 bp, Homo sapiens
tattagttatcaatt

SEQ ID NO: 1434581 - DNA, 15 bp, Homo sapiens
attagttatcaattg

SEQ ID NO: 1434582 - DNA, 15 bp, Homo sapiens
ttagttatcaattgg

SEQ ID NO: 1434583 - DNA, 15 bp, Homo sapiens
tagttatcaattgga

SEQ ID NO: 1434584 - DNA, 15 bp, Homo sapiens
agttatcaattggat

SEQ ID NO: 1434585 - DNA, 15 bp, Homo sapiens
gttatcaattggatt

SEQ ID NO: 1434586 - DNA, 15 bp, Homo sapiens
ttatcaattggattt

SEQ ID NO: 1434587 - DNA, 15 bp, Homo sapiens
tatcaattggatttt

SEQ ID NO: 1434588 - DNA, 15 bp, Homo sapiens
atcaattggattttt

SEQ ID NO: 1434589 - DNA, 15 bp, Homo sapiens
tcaattggattttta

SEQ ID NO: 1434590 - DNA, 15 bp, Homo sapiens
caattggatttttat

SEQ ID NO: 1434591 - DNA, 15 bp, Homo sapiens
aattggatttttatg

SEQ ID NO: 1434592 - DNA, 15 bp, Homo sapiens
attggatttttatga

SEQ ID NO: 1434593 - DNA, 15 bp, Homo sapiens
ttggatttttatgaa

SEQ ID NO: 1434594 - DNA, 15 bp, Homo sapiens
tggatttttatgaaa

SEQ ID NO: 1434595 - DNA, 15 bp, Homo sapiens
ggatttttatgaaat

SEQ ID NO: 1434596 - DNA, 15 bp, Homo sapiens
gatttttatgaaatt

SEQ ID NO: 1434597 - DNA, 15 bp, Homo sapiens
atttttatgaaattt

SEQ ID NO: 1434598 - DNA, 15 bp, Homo sapiens
tttttatgaaatttc

SEQ ID NO: 1434599 - DNA, 15 bp, Homo sapiens
ttttatgaaatttcc

SEQ ID NO: 1434600 - DNA, 15 bp, Homo sapiens
tttatgaaatttcca

SEQ ID NO: 1434601 - DNA, 15 bp, Homo sapiens
ttatgaaatttccaa

SEQ ID NO: 1434602 - DNA, 15 bp, Homo sapiens
tatgaaatttccaag

SEQ ID NO: 1434603 - DNA, 15 bp, Homo sapiens
atgaaatttccaagt

SEQ ID NO: 1434604 - DNA, 15 bp, Homo sapiens
tgaaatttccaagtt

SEQ ID NO: 1434605 - DNA, 15 bp, Homo sapiens
gaaatttccaagttc

SEQ ID NO: 1434606 - DNA, 15 bp, Homo sapiens
aaatttccaagttcc

SEQ ID NO: 1434607 - DNA, 15 bp, Homo sapiens
aatttccaagttcca

SEQ ID NO: 1434608 - DNA, 15 bp, Homo sapiens
atttccaagttccac

SEQ ID NO: 1434609 - DNA, 15 bp, Homo sapiens
tttccaagttccact

SEQ ID NO: 1434610 - DNA, 15 bp, Homo sapiens
ttccaagttccactc

SEQ ID NO: 1434611 - DNA, 15 bp, Homo sapiens
tccaagttccactca

SEQ ID NO: 1434612 - DNA, 15 bp, Homo sapiens
ccaagttccactcaa

SEQ ID NO: 1434613 - DNA, 15 bp, Homo sapiens
caagttccactcaag

SEQ ID NO: 1434614 - DNA, 15 bp, Homo sapiens
aagttccactcaagg

SEQ ID NO: 1434615 - DNA, 15 bp, Homo sapiens
agttccactcaagga

SEQ ID NO: 1434616 - DNA, 15 bp, Homo sapiens
gttccactcaaggat

SEQ ID NO: 1434617 - DNA, 15 bp, Homo sapiens
ttccactcaaggatt

SEQ ID NO: 1434618 - DNA, 15 bp, Homo sapiens
tccactcaaggattt

SEQ ID NO: 1434619 - DNA, 15 bp, Homo sapiens
ccactcaaggatttc

SEQ ID NO: 1434620 - DNA, 15 bp, Homo sapiens
cactcaaggatttct

SEQ ID NO: 1434621 - DNA, 15 bp, Homo sapiens
actcaaggatttctc

SEQ ID NO: 1434622 - DNA, 15 bp, Homo sapiens
ctcaaggatttctca

SEQ ID NO: 1434623 - DNA, 15 bp, Homo sapiens
tcaaggatttctcag

SEQ ID NO: 1434624 - DNA, 15 bp, Homo sapiens
caaggatttctcagt

SEQ ID NO: 1434625 - DNA, 15 bp, Homo sapiens
aaggatttctcagtg

SEQ ID NO: 1434626 - DNA, 15 bp, Homo sapiens
aggatttctcagtgt

SEQ ID NO: 1434627 - DNA, 15 bp, Homo sapiens
ggatttctcagtgtt

SEQ ID NO: 1434628 - DNA, 15 bp, Homo sapiens
gatttctcagtgttt

SEQ ID NO: 1434629 - DNA, 15 bp, Homo sapiens
atttctcagtgtttt

SEQ ID NO: 1434630 - DNA, 15 bp, Homo sapiens
tttctcagtgttttt

SEQ ID NO: 1434631 - DNA, 15 bp, Homo sapiens
ttctcagtgtttttt

SEQ ID NO: 1434632 - DNA, 15 bp, Homo sapiens
tctcagtgttttttt

SEQ ID NO: 1434633 - DNA, 15 bp, Homo sapiens
ctcagtgttttttta

SEQ ID NO: 1434634 - DNA, 15 bp, Homo sapiens
tcagtgtttttttac

SEQ ID NO: 1434635 - DNA, 15 bp, Homo sapiens
cagtgtttttttact

SEQ ID NO: 1434636 - DNA, 15 bp, Homo sapiens
agtgtttttttactt

SEQ ID NO: 1434637 - DNA, 15 bp, Homo sapiens
gtgtttttttacttt

SEQ ID NO: 1434638 - DNA, 15 bp, Homo sapiens
tgtttttttactttg

SEQ ID NO: 1434639 - DNA, 15 bp, Homo sapiens
gtttttttactttgg

SEQ ID NO: 1434640 - DNA, 15 bp, Homo sapiens
tttttttactttggt

SEQ ID NO: 1434641 - DNA, 15 bp, Homo sapiens
ttttttactttggta

SEQ ID NO: 1434642 - DNA, 15 bp, Homo sapiens
tttttactttggtat

SEQ ID NO: 1434643 - DNA, 15 bp, Homo sapiens
ttttactttggtata

SEQ ID NO: 1434644 - DNA, 15 bp, Homo sapiens
tttactttggtatag

SEQ ID NO: 1434645 - DNA, 15 bp, Homo sapiens
ttactttggtatagt

SEQ ID NO: 1434646 - DNA, 15 bp, Homo sapiens
tactttggtatagtg

SEQ ID NO: 1434647 - DNA, 15 bp, Homo sapiens
actttggtatagtgg

SEQ ID NO: 1434648 - DNA, 15 bp, Homo sapiens
ctttggtatagtgga

SEQ ID NO: 1434649 - DNA, 15 bp, Homo sapiens
tttggtatagtggaa

SEQ ID NO: 1434650 - DNA, 15 bp, Homo sapiens
ttggtatagtggaaa

SEQ ID NO: 1434651 - DNA, 15 bp, Homo sapiens
tggtatagtggaaac

SEQ ID NO: 1434652 - DNA, 15 bp, Homo sapiens
ggtatagtggaaacc

SEQ ID NO: 1434653 - DNA, 15 bp, Homo sapiens
gtatagtggaaacca

SEQ ID NO: 1434654 - DNA, 15 bp, Homo sapiens
tatagtggaaaccag

SEQ ID NO: 1434655 - DNA, 15 bp, Homo sapiens
atagtggaaaccagg

SEQ ID NO: 1434656 - DNA, 15 bp, Homo sapiens
tagtggaaaccaggg

SEQ ID NO: 1434657 - DNA, 15 bp, Homo sapiens
agtggaaaccagggt

SEQ ID NO: 1434658 - DNA, 15 bp, Homo sapiens
gtggaaaccagggtt

SEQ ID NO: 1434659 - DNA, 15 bp, Homo sapiens
tggaaaccagggttg

SEQ ID NO: 1434660 - DNA, 15 bp, Homo sapiens
ggaaaccagggttgc

SEQ ID NO: 1434661 - DNA, 15 bp, Homo sapiens
gaaaccagggttgcc

SEQ ID NO: 1434662 - DNA, 15 bp, Homo sapiens
aaaccagggttgcca

SEQ ID NO: 1434663 - DNA, 15 bp, Homo sapiens
aaccagggttgccag

SEQ ID NO: 1434664 - DNA, 15 bp, Homo sapiens
accagggttgccaga

SEQ ID NO: 1434665 - DNA, 15 bp, Homo sapiens
ccagggttgccagaa

SEQ ID NO: 1434666 - DNA, 15 bp, Homo sapiens
cagggttgccagaaa

SEQ ID NO: 1434667 - DNA, 15 bp, Homo sapiens
agggttgccagaaag

SEQ ID NO: 1434668 - DNA, 15 bp, Homo sapiens
gggttgccagaaagt

SEQ ID NO: 1434669 - DNA, 15 bp, Homo sapiens
ggttgccagaaagta

SEQ ID NO: 1434670 - DNA, 15 bp, Homo sapiens
gttgccagaaagtat

SEQ ID NO: 1434671 - DNA, 15 bp, Homo sapiens
ttgccagaaagtatt

SEQ ID NO: 1434672 - DNA, 15 bp, Homo sapiens
tgccagaaagtatta

SEQ ID NO: 1434673 - DNA, 15 bp, Homo sapiens
gccagaaagtattat

SEQ ID NO: 1434674 - DNA, 15 bp, Homo sapiens
ccagaaagtattatt

SEQ ID NO: 1434675 - DNA, 15 bp, Homo sapiens
cagaaagtattattt

SEQ ID NO: 1434676 - DNA, 15 bp, Homo sapiens
agaaagtattatttt

SEQ ID NO: 1434677 - DNA, 15 bp, Homo sapiens
gaaagtattattttg

SEQ ID NO: 1434678 - DNA, 15 bp, Homo sapiens
aaagtattattttgg

SEQ ID NO: 1434679 - DNA, 15 bp, Homo sapiens
aagtattattttggg

SEQ ID NO: 1434680 - DNA, 15 bp, Homo sapiens
agtattattttgggg

SEQ ID NO: 1434681 - DNA, 15 bp, Homo sapiens
gtattattttggggg

SEQ ID NO: 1434682 - DNA, 15 bp, Homo sapiens
tattattttgggggt

SEQ ID NO: 1434683 - DNA, 15 bp, Homo sapiens
attattttgggggtg

SEQ ID NO: 1434684 - DNA, 15 bp, Homo sapiens
ttattttgggggtga

SEQ ID NO: 1434685 - DNA, 15 bp, Homo sapiens
tattttgggggtgag

SEQ ID NO: 1434686 - DNA, 15 bp, Homo sapiens
attttgggggtgagt

SEQ ID NO: 1434687 - DNA, 15 bp, Homo sapiens
ttttgggggtgagtt

SEQ ID NO: 1434688 - DNA, 15 bp, Homo sapiens
tgggggtgagttagt

SEQ ID NO: 1434689 - DNA, 15 bp, Homo sapiens
gggggtgagttagtc

SEQ ID NO: 1434690 - DNA, 15 bp, Homo sapiens
ggggtgagttagtca

SEQ ID NO: 1434691 - DNA, 15 bp, Homo sapiens
gggtgagttagtcaa

SEQ ID NO: 1434692 - DNA, 15 bp, Homo sapiens
ggtgagttagtcaac

SEQ ID NO: 1434693 - DNA, 15 bp, Homo sapiens
gtgagttagtcaacc

SEQ ID NO: 1434694 - DNA, 15 bp, Homo sapiens
tgagttagtcaacct

SEQ ID NO: 1434695 - DNA, 15 bp, Homo sapiens
gagttagtcaacctt

SEQ ID NO: 1434696 - DNA, 15 bp, Homo sapiens
agttagtcaaccttc

SEQ ID NO: 1434697 - DNA, 15 bp, Homo sapiens
gttagtcaaccttcg

SEQ ID NO: 1434698 - DNA, 15 bp, Homo sapiens
ttagtcaaccttcgt

SEQ ID NO: 1434699 - DNA, 15 bp, Homo sapiens
tagtcaaccttcgtt

SEQ ID NO: 1434700 - DNA, 15 bp, Homo sapiens
agtcaaccttcgttc

SEQ ID NO: 1434701 - DNA, 15 bp, Homo sapiens
gtcaaccttcgttca

SEQ ID NO: 1434702 - DNA, 15 bp, Homo sapiens
tcaaccttcgttcag

SEQ ID NO: 1434703 - DNA, 15 bp, Homo sapiens
caaccttcgttcagt

SEQ ID NO: 1434704 - DNA, 15 bp, Homo sapiens
aaccttcgttcagtc

SEQ ID NO: 1434705 - DNA, 15 bp, Homo sapiens
accttcgttcagtca

SEQ ID NO: 1434706 - DNA, 15 bp, Homo sapiens
ccttcgttcagtcag

SEQ ID NO: 1434707 - DNA, 15 bp, Homo sapiens
cttcgttcagtcaga

SEQ ID NO: 1434708 - DNA, 15 bp, Homo sapiens
ttcgttcagtcagac

SEQ ID NO: 1434709 - DNA, 15 bp, Homo sapiens
tcgttcagtcagaca

SEQ ID NO: 1434710 - DNA, 15 bp, Homo sapiens
cgttcagtcagacag

SEQ ID NO: 1434711 - DNA, 15 bp, Homo sapiens
gttcagtcagacaga

SEQ ID NO: 1434712 - DNA, 15 bp, Homo sapiens
ttcagtcagacagac

SEQ ID NO: 1434713 - DNA, 15 bp, Homo sapiens
tcagtcagacagaca

SEQ ID NO: 1434714 - DNA, 15 bp, Homo sapiens
cagtcagacagacag

SEQ ID NO: 1434715 - DNA, 15 bp, Homo sapiens
agtcagacagacagg

SEQ ID NO: 1434716 - DNA, 15 bp, Homo sapiens
gtcagacagacagga

SEQ ID NO: 1434717 - DNA, 15 bp, Homo sapiens
tcagacagacaggag

SEQ ID NO: 1434718 - DNA, 15 bp, Homo sapiens
cagacagacaggagc

SEQ ID NO: 1434719 - DNA, 15 bp, Homo sapiens
agacagacaggagca

SEQ ID NO: 1434720 - DNA, 15 bp, Homo sapiens
gacagacaggagcac

SEQ ID NO: 1434721 - DNA, 15 bp, Homo sapiens
acagacaggagcacc

SEQ ID NO: 1434722 - DNA, 15 bp, Homo sapiens
cagacaggagcacct

SEQ ID NO: 1434723 - DNA, 15 bp, Homo sapiens
agacaggagcacctc

SEQ ID NO: 1434724 - DNA, 15 bp, Homo sapiens
gacaggagcacctca

SEQ ID NO: 1434725 - DNA, 15 bp, Homo sapiens
acaggagcacctcag

SEQ ID NO: 1434726 - DNA, 15 bp, Homo sapiens
caggagcacctcagc

SEQ ID NO: 1434727 - DNA, 15 bp, Homo sapiens
aggagcacctcagca

SEQ ID NO: 1434728 - DNA, 15 bp, Homo sapiens
ggagcacctcagcaa

SEQ ID NO: 1434729 - DNA, 15 bp, Homo sapiens
gagcacctcagcaat

SEQ ID NO: 1434730 - DNA, 15 bp, Homo sapiens
agcacctcagcaatt

SEQ ID NO: 1434731 - DNA, 15 bp, Homo sapiens
gcacctcagcaattc

SEQ ID NO: 1434732 - DNA, 15 bp, Homo sapiens
cacctcagcaattcc

SEQ ID NO: 1434733 - DNA, 15 bp, Homo sapiens
acctcagcaattccc

SEQ ID NO: 1434734 - DNA, 15 bp, Homo sapiens
cctcagcaattccca

SEQ ID NO: 1434735 - DNA, 15 bp, Homo sapiens
ctcagcaattcccag

SEQ ID NO: 1434736 - DNA, 15 bp, Homo sapiens
tcagcaattcccaga

SEQ ID NO: 1434737 - DNA, 15 bp, Homo sapiens
cagcaattcccagaa

SEQ ID NO: 1434738 - DNA, 15 bp, Homo sapiens
agcaattcccagaaa

SEQ ID NO: 1434739 - DNA, 15 bp, Homo sapiens
gcaattcccagaaac

SEQ ID NO: 1434740 - DNA, 15 bp, Homo sapiens
caattcccagaaacg

SEQ ID NO: 1434741 - DNA, 15 bp, Homo sapiens
aattcccagaaacgg

SEQ ID NO: 1434742 - DNA, 15 bp, Homo sapiens
attcccagaaacggg

SEQ ID NO: 1434743 - DNA, 15 bp, Homo sapiens
ttcccagaaacgggc

SEQ ID NO: 1434744 - DNA, 15 bp, Homo sapiens
tcccagaaacgggct

SEQ ID NO: 1434745 - DNA, 15 bp, Homo sapiens
cccagaaacgggctg

SEQ ID NO: 1434746 - DNA, 15 bp, Homo sapiens
ccagaaacgggctga

SEQ ID NO: 1434747 - DNA, 15 bp, Homo sapiens
cagaaacgggctgat

SEQ ID NO: 1434748 - DNA, 15 bp, Homo sapiens
agaaacgggctgatg

SEQ ID NO: 1434749 - DNA, 15 bp, Homo sapiens
gaaacgggctgatgg

SEQ ID NO: 1434750 - DNA, 15 bp, Homo sapiens
aaacgggctgatggg

SEQ ID NO: 1434751 - DNA, 15 bp, Homo sapiens
aacgggctgatggga

SEQ ID NO: 1434752 - DNA, 15 bp, Homo sapiens
acgggctgatgggaa

SEQ ID NO: 1434753 - DNA, 15 bp, Homo sapiens
cgggctgatgggaaa

SEQ ID NO: 1434754 - DNA, 15 bp, Homo sapiens
gggctgatgggaaag

SEQ ID NO: 1434755 - DNA, 15 bp, Homo sapiens
ggctgatgggaaaga

SEQ ID NO: 1434756 - DNA, 15 bp, Homo sapiens
gctgatgggaaagag

SEQ ID NO: 1434757 - DNA, 15 bp, Homo sapiens
ctgatgggaaagagc

SEQ ID NO: 1434758 - DNA, 15 bp, Homo sapiens
tgatgggaaagagca

SEQ ID NO: 1434759 - DNA, 15 bp, Homo sapiens
gatgggaaagagcaa

SEQ ID NO: 1434760 - DNA, 15 bp, Homo sapiens
atgggaaagagcaac

SEQ ID NO: 1434761 - DNA, 15 bp, Homo sapiens
tgggaaagagcaaca

SEQ ID NO: 1434762 - DNA, 15 bp, Homo sapiens
gggaaagagcaacat

SEQ ID NO: 1434763 - DNA, 15 bp, Homo sapiens
ggaaagagcaacata

SEQ ID NO: 1434764 - DNA, 15 bp, Homo sapiens
gaaagagcaacatac

SEQ ID NO: 1434765 - DNA, 15 bp, Homo sapiens
aaagagcaacataca

SEQ ID NO: 1434766 - DNA, 15 bp, Homo sapiens
aagagcaacatacat

SEQ ID NO: 1434767 - DNA, 15 bp, Homo sapiens
agagcaacatacatg

SEQ ID NO: 1434768 - DNA, 15 bp, Homo sapiens
gagcaacatacatga

SEQ ID NO: 1434769 - DNA, 15 bp, Homo sapiens
agcaacatacatgaa

SEQ ID NO: 1434770 - DNA, 15 bp, Homo sapiens
gcaacatacatgaat

SEQ ID NO: 1434771 - DNA, 15 bp, Homo sapiens
caacatacatgaatg

SEQ ID NO: 1434772 - DNA, 15 bp, Homo sapiens
aacatacatgaatgt

SEQ ID NO: 1434773 - DNA, 15 bp, Homo sapiens
acatacatgaatgtc

SEQ ID NO: 1434774 - DNA, 15 bp, Homo sapiens
catacatgaatgtct

SEQ ID NO: 1434775 - DNA, 15 bp, Homo sapiens
atacatgaatgtctt

SEQ ID NO: 1434776 - DNA, 15 bp, Homo sapiens
tacatgaatgtcttg

SEQ ID NO: 1434777 - DNA, 15 bp, Homo sapiens
acatgaatgtcttga

SEQ ID NO: 1434778 - DNA, 15 bp, Homo sapiens
catgaatgtcttgaa

SEQ ID NO: 1434779 - DNA, 15 bp, Homo sapiens
atgaatgtcttgaag

SEQ ID NO: 1434780 - DNA, 15 bp, Homo sapiens
tgaatgtcttgaaga

SEQ ID NO: 1434781 - DNA, 15 bp, Homo sapiens
gaatgtcttgaagaa

SEQ ID NO: 1434782 - DNA, 15 bp, Homo sapiens
aatgtcttgaagaac

SEQ ID NO: 1434783 - DNA, 15 bp, Homo sapiens
atgtcttgaagaaca

SEQ ID NO: 1434784 - DNA, 15 bp, Homo sapiens
tgtcttgaagaacac

SEQ ID NO: 1434785 - DNA, 15 bp, Homo sapiens
gtcttgaagaacaca

SEQ ID NO: 1434786 - DNA, 15 bp, Homo sapiens
tcttgaagaacacag

SEQ ID NO: 1434787 - DNA, 15 bp, Homo sapiens
cttgaagaacacagc

SEQ ID NO: 1434788 - DNA, 15 bp, Homo sapiens
ttgaagaacacagcc

SEQ ID NO: 1434789 - DNA, 15 bp, Homo sapiens
tgaagaacacagcca

SEQ ID NO: 1434790 - DNA, 15 bp, Homo sapiens
gaagaacacagccaa

SEQ ID NO: 1434791 - DNA, 15 bp, Homo sapiens
aagaacacagccaac

SEQ ID NO: 1434792 - DNA, 15 bp, Homo sapiens
agaacacagccaaca

SEQ ID NO: 1434793 - DNA, 15 bp, Homo sapiens
gaacacagccaacag

SEQ ID NO: 1434794 - DNA, 15 bp, Homo sapiens
aacacagccaacaga

SEQ ID NO: 1434795 - DNA, 15 bp, Homo sapiens
acacagccaacagag

SEQ ID NO: 1434796 - DNA, 15 bp, Homo sapiens
cacagccaacagagc

SEQ ID NO: 1434797 - DNA, 15 bp, Homo sapiens
acagccaacagagcc

SEQ ID NO: 1434798 - DNA, 15 bp, Homo sapiens
cagccaacagagccc

SEQ ID NO: 1434799 - DNA, 15 bp, Homo sapiens
agccaacagagccca

SEQ ID NO: 1434800 - DNA, 15 bp, Homo sapiens
gccaacagagcccat

SEQ ID NO: 1434801 - DNA, 15 bp, Homo sapiens
ccaacagagcccatt

SEQ ID NO: 1434802 - DNA, 15 bp, Homo sapiens
caacagagcccattg

SEQ ID NO: 1434803 - DNA, 15 bp, Homo sapiens
aacagagcccattgg

SEQ ID NO: 1434804 - DNA, 15 bp, Homo sapiens
acagagcccattggg

SEQ ID NO: 1434805 - DNA, 15 bp, Homo sapiens
cagagcccattgggc

SEQ ID NO: 1434806 - DNA, 15 bp, Homo sapiens
agagcccattgggca

SEQ ID NO: 1434807 - DNA, 15 bp, Homo sapiens
gagcccattgggcag

SEQ ID NO: 1434808 - DNA, 15 bp, Homo sapiens
agcccattgggcagt

SEQ ID NO: 1434809 - DNA, 15 bp, Homo sapiens
gcccattgggcagtt

SEQ ID NO: 1434810 - DNA, 15 bp, Homo sapiens
cccattgggcagttc

SEQ ID NO: 1434811 - DNA, 15 bp, Homo sapiens
ccattgggcagttct

SEQ ID NO: 1434812 - DNA, 15 bp, Homo sapiens
cattgggcagttctg

SEQ ID NO: 1434813 - DNA, 15 bp, Homo sapiens
attgggcagttctga

SEQ ID NO: 1434814 - DNA, 15 bp, Homo sapiens
ttgggcagttctgat

SEQ ID NO: 1434815 - DNA, 15 bp, Homo sapiens
tgggcagttctgatt

SEQ ID NO: 1434816 - DNA, 15 bp, Homo sapiens
gggcagttctgattt

SEQ ID NO: 1434817 - DNA, 15 bp, Homo sapiens
ggcagttctgatttt

SEQ ID NO: 1434818 - DNA, 15 bp, Homo sapiens
gcagttctgattttc

SEQ ID NO: 1434819 - DNA, 15 bp, Homo sapiens
cagttctgattttcc

SEQ ID NO: 1434820 - DNA, 15 bp, Homo sapiens
agttctgattttcca

SEQ ID NO: 1434821 - DNA, 15 bp, Homo sapiens
gttctgattttccag

SEQ ID NO: 1434822 - DNA, 15 bp, Homo sapiens
ttctgattttccagg

SEQ ID NO: 1434823 - DNA, 15 bp, Homo sapiens
tctgattttccaggt

SEQ ID NO: 1434824 - DNA, 15 bp, Homo sapiens
ctgattttccaggta

SEQ ID NO: 1434825 - DNA, 15 bp, Homo sapiens
tgattttccaggtac

SEQ ID NO: 1434826 - DNA, 15 bp, Homo sapiens
gattttccaggtaca

SEQ ID NO: 1434827 - DNA, 15 bp, Homo sapiens
attttccaggtacac

SEQ ID NO: 1434828 - DNA, 15 bp, Homo sapiens
ttttccaggtacaca

SEQ ID NO: 1434829 - DNA, 15 bp, Homo sapiens
tttccaggtacacag

SEQ ID NO: 1434830 - DNA, 15 bp, Homo sapiens
ttccaggtacacagc

SEQ ID NO: 1434831 - DNA, 15 bp, Homo sapiens
tccaggtacacagca

SEQ ID NO: 1434832 - DNA, 15 bp, Homo sapiens
ccaggtacacagcat

SEQ ID NO: 1434833 - DNA, 15 bp, Homo sapiens
caggtacacagcatc

SEQ ID NO: 1434834 - DNA, 15 bp, Homo sapiens
aggtacacagcatct

SEQ ID NO: 1434835 - DNA, 15 bp, Homo sapiens
ggtacacagcatctc

SEQ ID NO: 1434836 - DNA, 15 bp, Homo sapiens
gtacacagcatctcc

SEQ ID NO: 1434837 - DNA, 15 bp, Homo sapiens
tacacagcatctcca

SEQ ID NO: 1434838 - DNA, 15 bp, Homo sapiens
acacagcatctccac

SEQ ID NO: 1434839 - DNA, 15 bp, Homo sapiens
cacagcatctccaca

SEQ ID NO: 1434840 - DNA, 15 bp, Homo sapiens
acagcatctccacag

SEQ ID NO: 1434841 - DNA, 15 bp, Homo sapiens
cagcatctccacagt

SEQ ID NO: 1434842 - DNA, 15 bp, Homo sapiens
agcatctccacagtc

SEQ ID NO: 1434843 - DNA, 15 bp, Homo sapiens
gcatctccacagtct

SEQ ID NO: 1434844 - DNA, 15 bp, Homo sapiens
catctccacagtctc

SEQ ID NO: 1434845 - DNA, 15 bp, Homo sapiens
atctccacagtctct

SEQ ID NO: 1434846 - DNA, 15 bp, Homo sapiens
tctccacagtctctt

SEQ ID NO: 1434847 - DNA, 15 bp, Homo sapiens
ctccacagtctcttc

SEQ ID NO: 1434848 - DNA, 15 bp, Homo sapiens
tccacagtctcttct

SEQ ID NO: 1434849 - DNA, 15 bp, Homo sapiens
ccacagtctcttctg

SEQ ID NO: 1434850 - DNA, 15 bp, Homo sapiens
cacagtctcttctga

SEQ ID NO: 1434851 - DNA, 15 bp, Homo sapiens
acagtctcttctgat

SEQ ID NO: 1434852 - DNA, 15 bp, Homo sapiens
cagtctcttctgatt

SEQ ID NO: 1434853 - DNA, 15 bp, Homo sapiens
agtctcttctgattt

SEQ ID NO: 1434854 - DNA, 15 bp, Homo sapiens
gtctcttctgatttt

SEQ ID NO: 1434855 - DNA, 15 bp, Homo sapiens
tctcttctgattttt

SEQ ID NO: 1434856 - DNA, 15 bp, Homo sapiens
ctcttctgattttta

SEQ ID NO: 1434857 - DNA, 15 bp, Homo sapiens
tcttctgatttttat

SEQ ID NO: 1434858 - DNA, 15 bp, Homo sapiens
cttctgatttttatt

SEQ ID NO: 1434859 - DNA, 15 bp, Homo sapiens
ttctgatttttattc

SEQ ID NO: 1434860 - DNA, 15 bp, Homo sapiens
tctgatttttattcc

SEQ ID NO: 1434861 - DNA, 15 bp, Homo sapiens
ctgatttttattccc

SEQ ID NO: 1434862 - DNA, 15 bp, Homo sapiens
tgatttttattcccc

SEQ ID NO: 1434863 - DNA, 15 bp, Homo sapiens
gatttttattcccct

SEQ ID NO: 1434864 - DNA, 15 bp, Homo sapiens
atttttattcccctg

SEQ ID NO: 1434865 - DNA, 15 bp, Homo sapiens
tttttattcccctga

SEQ ID NO: 1434866 - DNA, 15 bp, Homo sapiens
ttttattcccctgag

SEQ ID NO: 1434867 - DNA, 15 bp, Homo sapiens
tttattcccctgagt

SEQ ID NO: 1434868 - DNA, 15 bp, Homo sapiens
ttattcccctgagta

SEQ ID NO: 1434869 - DNA, 15 bp, Homo sapiens
tattcccctgagtat

SEQ ID NO: 1434870 - DNA, 15 bp, Homo sapiens
attcccctgagtata

SEQ ID NO: 1434871 - DNA, 15 bp, Homo sapiens
ttcccctgagtatat

SEQ ID NO: 1434872 - DNA, 15 bp, Homo sapiens
tcccctgagtatatg

SEQ ID NO: 1434873 - DNA, 15 bp, Homo sapiens
cccctgagtatatgg

SEQ ID NO: 1434874 - DNA, 15 bp, Homo sapiens
ccctgagtatatgga

SEQ ID NO: 1434875 - DNA, 15 bp, Homo sapiens
cctgagtatatggat

SEQ ID NO: 1434876 - DNA, 15 bp, Homo sapiens
ctgagtatatggatt

SEQ ID NO: 1434877 - DNA, 15 bp, Homo sapiens
tgagtatatggattc

SEQ ID NO: 1434878 - DNA, 15 bp, Homo sapiens
gagtatatggattcc

SEQ ID NO: 1434879 - DNA, 15 bp, Homo sapiens
agtatatggattcca

SEQ ID NO: 1434880 - DNA, 15 bp, Homo sapiens
gtatatggattccag

SEQ ID NO: 1434881 - DNA, 15 bp, Homo sapiens
tatatggattccagc

SEQ ID NO: 1434882 - DNA, 15 bp, Homo sapiens
atatggattccagct

SEQ ID NO: 1434883 - DNA, 15 bp, Homo sapiens
tatggattccagctc

SEQ ID NO: 1434884 - DNA, 15 bp, Homo sapiens
atggattccagctca

SEQ ID NO: 1434885 - DNA, 15 bp, Homo sapiens
tggattccagctcag

SEQ ID NO: 1434886 - DNA, 15 bp, Homo sapiens
ggattccagctcagc

SEQ ID NO: 1434887 - DNA, 15 bp, Homo sapiens
gattccagctcagca

SEQ ID NO: 1434888 - DNA, 15 bp, Homo sapiens
attccagctcagcat

SEQ ID NO: 1434889 - DNA, 15 bp, Homo sapiens
ttccagctcagcatg

SEQ ID NO: 1434890 - DNA, 15 bp, Homo sapiens
tccagctcagcatgt

SEQ ID NO: 1434891 - DNA, 15 bp, Homo sapiens
ccagctcagcatgta

SEQ ID NO: 1434892 - DNA, 15 bp, Homo sapiens
cagctcagcatgtag

SEQ ID NO: 1434893 - DNA, 15 bp, Homo sapiens
agctcagcatgtagc

SEQ ID NO: 1434894 - DNA, 15 bp, Homo sapiens
gctcagcatgtagcc

SEQ ID NO: 1434895 - DNA, 15 bp, Homo sapiens
ctcagcatgtagcct

SEQ ID NO: 1434896 - DNA, 15 bp, Homo sapiens
tcagcatgtagcctt

SEQ ID NO: 1434897 - DNA, 15 bp, Homo sapiens
cagcatgtagccttt

SEQ ID NO: 1434898 - DNA, 15 bp, Homo sapiens
agcatgtagcctttc

SEQ ID NO: 1434899 - DNA, 15 bp, Homo sapiens
gcatgtagcctttcc

SEQ ID NO: 1434900 - DNA, 15 bp, Homo sapiens
catgtagcctttccc

SEQ ID NO: 1434901 - DNA, 15 bp, Homo sapiens
atgtagcctttccct

SEQ ID NO: 1434902 - DNA, 15 bp, Homo sapiens
tgtagcctttccctg

SEQ ID NO: 1434903 - DNA, 15 bp, Homo sapiens
gtagcctttccctgc

SEQ ID NO: 1434904 - DNA, 15 bp, Homo sapiens
tagcctttccctgct

SEQ ID NO: 1434905 - DNA, 15 bp, Homo sapiens
agcctttccctgctg

SEQ ID NO: 1434906 - DNA, 15 bp, Homo sapiens
gcctttccctgctga

SEQ ID NO: 1434907 - DNA, 15 bp, Homo sapiens
cctttccctgctgag

SEQ ID NO: 1434908 - DNA, 15 bp, Homo sapiens
ctttccctgctgagt

SEQ ID NO: 1434909 - DNA, 15 bp, Homo sapiens
tttccctgctgagtc

SEQ ID NO: 1434910 - DNA, 15 bp, Homo sapiens
ttccctgctgagtct

SEQ ID NO: 1434911 - DNA, 15 bp, Homo sapiens
tccctgctgagtctc

SEQ ID NO: 1434912 - DNA, 15 bp, Homo sapiens
ccctgctgagtctct

SEQ ID NO: 1434913 - DNA, 15 bp, Homo sapiens
cctgctgagtctcta

SEQ ID NO: 1434914 - DNA, 15 bp, Homo sapiens
ctgctgagtctctaa

SEQ ID NO: 1434915 - DNA, 15 bp, Homo sapiens
tgctgagtctctaac

SEQ ID NO: 1434916 - DNA, 15 bp, Homo sapiens
gctgagtctctaacc

SEQ ID NO: 1434917 - DNA, 15 bp, Homo sapiens
ctgagtctctaacca

SEQ ID NO: 1434918 - DNA, 15 bp, Homo sapiens
tgagtctctaaccag

SEQ ID NO: 1434919 - DNA, 15 bp, Homo sapiens
gagtctctaaccagg

SEQ ID NO: 1434920 - DNA, 15 bp, Homo sapiens
agtctctaaccagga

SEQ ID NO: 1434921 - DNA, 15 bp, Homo sapiens
gtctctaaccaggat

SEQ ID NO: 1434922 - DNA, 15 bp, Homo sapiens
tctctaaccaggata

SEQ ID NO: 1434923 - DNA, 15 bp, Homo sapiens
ctctaaccaggataa

SEQ ID NO: 1434924 - DNA, 15 bp, Homo sapiens
tctaaccaggataac

SEQ ID NO: 1434925 - DNA, 15 bp, Homo sapiens
ctaaccaggataaca

SEQ ID NO: 1434926 - DNA, 15 bp, Homo sapiens
taaccaggataacat

SEQ ID NO: 1434927 - DNA, 15 bp, Homo sapiens
aaccaggataacatg

SEQ ID NO: 1434928 - DNA, 15 bp, Homo sapiens
accaggataacatgt

SEQ ID NO: 1434929 - DNA, 15 bp, Homo sapiens
ccaggataacatgta

SEQ ID NO: 1434930 - DNA, 15 bp, Homo sapiens
caggataacatgtat

SEQ ID NO: 1434931 - DNA, 15 bp, Homo sapiens
aggataacatgtatt

SEQ ID NO: 1434932 - DNA, 15 bp, Homo sapiens
ggataacatgtattt

SEQ ID NO: 1434933 - DNA, 15 bp, Homo sapiens
gataacatgtatttt

SEQ ID NO: 1434934 - DNA, 15 bp, Homo sapiens
ataacatgtattttt

SEQ ID NO: 1434935 - DNA, 15 bp, Homo sapiens
taacatgtatttttt

SEQ ID NO: 1434936 - DNA, 15 bp, Homo sapiens
aacatgtattttttt

SEQ ID NO: 1434937 - DNA, 15 bp, Homo sapiens
acatgtatttttttg

SEQ ID NO: 1434938 - DNA, 15 bp, Homo sapiens
catgtatttttttga

SEQ ID NO: 1434939 - DNA, 15 bp, Homo sapiens
atgtatttttttgac

SEQ ID NO: 1434940 - DNA, 15 bp, Homo sapiens
tgtatttttttgact

SEQ ID NO: 1434941 - DNA, 15 bp, Homo sapiens
gtatttttttgactg

SEQ ID NO: 1434942 - DNA, 15 bp, Homo sapiens
tatttttttgactgg

SEQ ID NO: 1434943 - DNA, 15 bp, Homo sapiens
atttttttgactgga

SEQ ID NO: 1434944 - DNA, 15 bp, Homo sapiens
tttttttgactggat

SEQ ID NO: 1434945 - DNA, 15 bp, Homo sapiens
ttttttgactggatg

SEQ ID NO: 1434946 - DNA, 15 bp, Homo sapiens
tttttgactggatga

SEQ ID NO: 1434947 - DNA, 15 bp, Homo sapiens
ttttgactggatgaa

SEQ ID NO: 1434948 - DNA, 15 bp, Homo sapiens
tttgactggatgaat

SEQ ID NO: 1434949 - DNA, 15 bp, Homo sapiens
ttgactggatgaatt

SEQ ID NO: 1434950 - DNA, 15 bp, Homo sapiens
tgactggatgaatta

SEQ ID NO: 1434951 - DNA, 15 bp, Homo sapiens
gactggatgaattat

SEQ ID NO: 1434952 - DNA, 15 bp, Homo sapiens
actggatgaattatc

SEQ ID NO: 1434953 - DNA, 15 bp, Homo sapiens
ctggatgaattatct

SEQ ID NO: 1434954 - DNA, 15 bp, Homo sapiens
tggatgaattatctt

SEQ ID NO: 1434955 - DNA, 15 bp, Homo sapiens
ggatgaattatcttc

SEQ ID NO: 1434956 - DNA, 15 bp, Homo sapiens
gatgaattatcttcc

SEQ ID NO: 1434957 - DNA, 15 bp, Homo sapiens
atgaattatcttccc

SEQ ID NO: 1434958 - DNA, 15 bp, Homo sapiens
tgaattatcttccca

SEQ ID NO: 1434959 - DNA, 15 bp, Homo sapiens
gaattatcttcccat

SEQ ID NO: 1434960 - DNA, 15 bp, Homo sapiens
aattatcttcccatc

SEQ ID NO: 1434961 - DNA, 15 bp, Homo sapiens
attatcttcccatct

SEQ ID NO: 1434962 - DNA, 15 bp, Homo sapiens
ttatcttcccatctc

SEQ ID NO: 1434963 - DNA, 15 bp, Homo sapiens
tatcttcccatctct

SEQ ID NO: 1434964 - DNA, 15 bp, Homo sapiens
atcttcccatctctt

SEQ ID NO: 1434965 - DNA, 15 bp, Homo sapiens
tcttcccatctcttg

SEQ ID NO: 1434966 - DNA, 15 bp, Homo sapiens
cttcccatctcttga

SEQ ID NO: 1434967 - DNA, 15 bp, Homo sapiens
ttcccatctcttgac

SEQ ID NO: 1434968 - DNA, 15 bp, Homo sapiens
tcccatctcttgaca

SEQ ID NO: 1434969 - DNA, 15 bp, Homo sapiens
cccatctcttgacat

SEQ ID NO: 1434970 - DNA, 15 bp, Homo sapiens
ccatctcttgacatt

SEQ ID NO: 1434971 - DNA, 15 bp, Homo sapiens
catctcttgacattt

SEQ ID NO: 1434972 - DNA, 15 bp, Homo sapiens
atctcttgacattta

SEQ ID NO: 1434973 - DNA, 15 bp, Homo sapiens
tctcttgacatttac

SEQ ID NO: 1434974 - DNA, 15 bp, Homo sapiens
ctcttgacatttaca

SEQ ID NO: 1434975 - DNA, 15 bp, Homo sapiens
tcttgacatttacag

SEQ ID NO: 1434976 - DNA, 15 bp, Homo sapiens
cttgacatttacagt

SEQ ID NO: 1434977 - DNA, 15 bp, Homo sapiens
ttgacatttacagta

SEQ ID NO: 1434978 - DNA, 15 bp, Homo sapiens
tgacatttacagtaa

SEQ ID NO: 1434979 - DNA, 15 bp, Homo sapiens
gacatttacagtaat

SEQ ID NO: 1434980 - DNA, 15 bp, Homo sapiens
acatttacagtaatt

SEQ ID NO: 1434981 - DNA, 15 bp, Homo sapiens
catttacagtaatta

SEQ ID NO: 1434982 - DNA, 15 bp, Homo sapiens
atttacagtaattac

SEQ ID NO: 1434983 - DNA, 15 bp, Homo sapiens
tttacagtaattacc

SEQ ID NO: 1434984 - DNA, 15 bp, Homo sapiens
ttacagtaattacca

SEQ ID NO: 1434985 - DNA, 15 bp, Homo sapiens
tacagtaattaccac

SEQ ID NO: 1434986 - DNA, 15 bp, Homo sapiens
acagtaattaccacc

SEQ ID NO: 1434987 - DNA, 15 bp, Homo sapiens
cagtaattaccacca

SEQ ID NO: 1434988 - DNA, 15 bp, Homo sapiens
agtaattaccaccaa

SEQ ID NO: 1434989 - DNA, 15 bp, Homo sapiens
gtaattaccaccaag

SEQ ID NO: 1434990 - DNA, 15 bp, Homo sapiens
taattaccaccaagt

SEQ ID NO: 1434991 - DNA, 15 bp, Homo sapiens
aattaccaccaagta

SEQ ID NO: 1434992 - DNA, 15 bp, Homo sapiens
attaccaccaagtat

SEQ ID NO: 1434993 - DNA, 15 bp, Homo sapiens
ttaccaccaagtatg

SEQ ID NO: 1434994 - DNA, 15 bp, Homo sapiens
taccaccaagtatgg

SEQ ID NO: 1434995 - DNA, 15 bp, Homo sapiens
accaccaagtatggt

SEQ ID NO: 1434996 - DNA, 15 bp, Homo sapiens
ccaccaagtatggta

SEQ ID NO: 1434997 - DNA, 15 bp, Homo sapiens
caccaagtatggtat

SEQ ID NO: 1434998 - DNA, 15 bp, Homo sapiens
accaagtatggtatt

SEQ ID NO: 1434999 - DNA, 15 bp, Homo sapiens
ccaagtatggtattt

SEQ ID NO: 1435000 - DNA, 15 bp, Homo sapiens
caagtatggtatttt

SEQ ID NO: 1435001 - DNA, 15 bp, Homo sapiens
aagtatggtattttc

SEQ ID NO: 1435002 - DNA, 15 bp, Homo sapiens
agtatggtattttca

SEQ ID NO: 1435003 - DNA, 15 bp, Homo sapiens
gtatggtattttcag

SEQ ID NO: 1435004 - DNA, 15 bp, Homo sapiens
tatggtattttcagt

SEQ ID NO: 1435005 - DNA, 15 bp, Homo sapiens
atggtattttcagtg

SEQ ID NO: 1435006 - DNA, 15 bp, Homo sapiens
tggtattttcagtgg

SEQ ID NO: 1435007 - DNA, 15 bp, Homo sapiens
ggtattttcagtggc

SEQ ID NO: 1435008 - DNA, 15 bp, Homo sapiens
gtattttcagtggcc

SEQ ID NO: 1435009 - DNA, 15 bp, Homo sapiens
tattttcagtggccg

SEQ ID NO: 1435010 - DNA, 15 bp, Homo sapiens
attttcagtggccgt

SEQ ID NO: 1435011 - DNA, 15 bp, Homo sapiens
ttttcagtggccgtg

SEQ ID NO: 1435012 - DNA, 15 bp, Homo sapiens
tttcagtggccgtga

SEQ ID NO: 1435013 - DNA, 15 bp, Homo sapiens
ttcagtggccgtgat

SEQ ID NO: 1435014 - DNA, 15 bp, Homo sapiens
tcagtggccgtgatt

SEQ ID NO: 1435015 - DNA, 15 bp, Homo sapiens
cagtggccgtgatta

SEQ ID NO: 1435016 - DNA, 15 bp, Homo sapiens
agtggccgtgattat

SEQ ID NO: 1435017 - DNA, 15 bp, Homo sapiens
gtggccgtgattatc

SEQ ID NO: 1435018 - DNA, 15 bp, Homo sapiens
tggccgtgattatca

SEQ ID NO: 1435019 - DNA, 15 bp, Homo sapiens
ggccgtgattatcag

SEQ ID NO: 1435020 - DNA, 15 bp, Homo sapiens
gccgtgattatcagt

SEQ ID NO: 1435021 - DNA, 15 bp, Homo sapiens
ccgtgattatcagtt

SEQ ID NO: 1435022 - DNA, 15 bp, Homo sapiens
cgtgattatcagtta

SEQ ID NO: 1435023 - DNA, 15 bp, Homo sapiens
gtgattatcagttac

SEQ ID NO: 1435024 - DNA, 15 bp, Homo sapiens
tgattatcagttacc

SEQ ID NO: 1435025 - DNA, 15 bp, Homo sapiens
gattatcagttacca

SEQ ID NO: 1435026 - DNA, 15 bp, Homo sapiens
attatcagttaccaa

SEQ ID NO: 1435027 - DNA, 15 bp, Homo sapiens
ttatcagttaccaac

SEQ ID NO: 1435028 - DNA, 15 bp, Homo sapiens
tatcagttaccaaca

SEQ ID NO: 1435029 - DNA, 15 bp, Homo sapiens
atcagttaccaacac

SEQ ID NO: 1435030 - DNA, 15 bp, Homo sapiens
tcagttaccaacaca

SEQ ID NO: 1435031 - DNA, 15 bp, Homo sapiens
cagttaccaacacag

SEQ ID NO: 1435032 - DNA, 15 bp, Homo sapiens
agttaccaacacaga

SEQ ID NO: 1435033 - DNA, 15 bp, Homo sapiens
gttaccaacacagaa

SEQ ID NO: 1435034 - DNA, 15 bp, Homo sapiens
ttaccaacacagaat

SEQ ID NO: 1435035 - DNA, 15 bp, Homo sapiens
taccaacacagaatt

SEQ ID NO: 1435036 - DNA, 15 bp, Homo sapiens
accaacacagaatta

SEQ ID NO: 1435037 - DNA, 15 bp, Homo sapiens
ccaacacagaattag

SEQ ID NO: 1435038 - DNA, 15 bp, Homo sapiens
caacacagaattagg

SEQ ID NO: 1435039 - DNA, 15 bp, Homo sapiens
aacacagaattagga

SEQ ID NO: 1435040 - DNA, 15 bp, Homo sapiens
acacagaattaggat

SEQ ID NO: 1435041 - DNA, 15 bp, Homo sapiens
cacagaattaggatg

SEQ ID NO: 1435042 - DNA, 15 bp, Homo sapiens
acagaattaggatga

SEQ ID NO: 1435043 - DNA, 15 bp, Homo sapiens
cagaattaggatgaa

SEQ ID NO: 1435044 - DNA, 15 bp, Homo sapiens
agaattaggatgaag

SEQ ID NO: 1435045 - DNA, 15 bp, Homo sapiens
gaattaggatgaagg

SEQ ID NO: 1435046 - DNA, 15 bp, Homo sapiens
aattaggatgaaggg

SEQ ID NO: 1435047 - DNA, 15 bp, Homo sapiens
attaggatgaaggga

SEQ ID NO: 1435048 - DNA, 15 bp, Homo sapiens
ttaggatgaagggag

SEQ ID NO: 1435049 - DNA, 15 bp, Homo sapiens
taggatgaagggagg

SEQ ID NO: 1435050 - DNA, 15 bp, Homo sapiens
aggatgaagggagga

SEQ ID NO: 1435051 - DNA, 15 bp, Homo sapiens
ggatgaagggaggaa

SEQ ID NO: 1435052 - DNA, 15 bp, Homo sapiens
gatgaagggaggaag

SEQ ID NO: 1435053 - DNA, 15 bp, Homo sapiens
atgaagggaggaagg

SEQ ID NO: 1435054 - DNA, 15 bp, Homo sapiens
tgaagggaggaaggg

SEQ ID NO: 1435055 - DNA, 15 bp, Homo sapiens
gaagggaggaaggga

SEQ ID NO: 1435056 - DNA, 15 bp, Homo sapiens
aagggaggaagggag

SEQ ID NO: 1435057 - DNA, 15 bp, Homo sapiens
agggaggaagggagg

SEQ ID NO: 1435058 - DNA, 15 bp, Homo sapiens
gggaggaagggaggg

SEQ ID NO: 1435059 - DNA, 15 bp, Homo sapiens
ggaggaagggaggga

SEQ ID NO: 1435060 - DNA, 15 bp, Homo sapiens
gaggaagggagggaa

SEQ ID NO: 1435061 - DNA, 15 bp, Homo sapiens
aggaagggagggaag

SEQ ID NO: 1435062 - DNA, 15 bp, Homo sapiens
ggaagggagggaagg

SEQ ID NO: 1435063 - DNA, 15 bp, Homo sapiens
gaagggagggaagga

SEQ ID NO: 1435064 - DNA, 15 bp, Homo sapiens
aagggagggaaggaa

SEQ ID NO: 1435065 - DNA, 15 bp, Homo sapiens
ggagggaaggaaggt

SEQ ID NO: 1435066 - DNA, 15 bp, Homo sapiens
gagggaaggaaggtg

SEQ ID NO: 1435067 - DNA, 15 bp, Homo sapiens
agggaaggaaggtgg

SEQ ID NO: 1435068 - DNA, 15 bp, Homo sapiens
gggaaggaaggtggg

SEQ ID NO: 1435069 - DNA, 15 bp, Homo sapiens
ggaaggaaggtgggt

SEQ ID NO: 1435070 - DNA, 15 bp, Homo sapiens
gaaggaaggtgggtg

SEQ ID NO: 1435071 - DNA, 15 bp, Homo sapiens
aaggaaggtgggtgt

SEQ ID NO: 1435072 - DNA, 15 bp, Homo sapiens
aggaaggtgggtgtt

SEQ ID NO: 1435073 - DNA, 15 bp, Homo sapiens
ggaaggtgggtgttt

SEQ ID NO: 1435074 - DNA, 15 bp, Homo sapiens
gaaggtgggtgtttt

SEQ ID NO: 1435075 - DNA, 15 bp, Homo sapiens
aaggtgggtgttttt

SEQ ID NO: 1435076 - DNA, 15 bp, Homo sapiens
aggtgggtgtttttt

SEQ ID NO: 1435077 - DNA, 15 bp, Homo sapiens
ggtgggtgttttttc

SEQ ID NO: 1435078 - DNA, 15 bp, Homo sapiens
gtgggtgttttttca

SEQ ID NO: 1435079 - DNA, 15 bp, Homo sapiens
tgggtgttttttcac

SEQ ID NO: 1435080 - DNA, 15 bp, Homo sapiens
gggtgttttttcaca

SEQ ID NO: 1435081 - DNA, 15 bp, Homo sapiens
ggtgttttttcacac

SEQ ID NO: 1435082 - DNA, 15 bp, Homo sapiens
gtgttttttcacaca

SEQ ID NO: 1435083 - DNA, 15 bp, Homo sapiens
tgttttttcacacag

SEQ ID NO: 1435084 - DNA, 15 bp, Homo sapiens
gttttttcacacagt

SEQ ID NO: 1435085 - DNA, 15 bp, Homo sapiens
ttttttcacacagtg

SEQ ID NO: 1435086 - DNA, 15 bp, Homo sapiens
tttttcacacagtgt

SEQ ID NO: 1435087 - DNA, 15 bp, Homo sapiens
ttttcacacagtgtc

SEQ ID NO: 1435088 - DNA, 15 bp, Homo sapiens
tttcacacagtgtct

SEQ ID NO: 1435089 - DNA, 15 bp, Homo sapiens
ttcacacagtgtctt

SEQ ID NO: 1435090 - DNA, 15 bp, Homo sapiens
tcacacagtgtctta

SEQ ID NO: 1435091 - DNA, 15 bp, Homo sapiens
cacacagtgtcttag

SEQ ID NO: 1435092 - DNA, 15 bp, Homo sapiens
acacagtgtcttagc

SEQ ID NO: 1435093 - DNA, 15 bp, Homo sapiens
cacagtgtcttagcc

SEQ ID NO: 1435094 - DNA, 15 bp, Homo sapiens
acagtgtcttagcca

SEQ ID NO: 1435095 - DNA, 15 bp, Homo sapiens
cagtgtcttagccag

SEQ ID NO: 1435096 - DNA, 15 bp, Homo sapiens
agtgtcttagccagc

SEQ ID NO: 1435097 - DNA, 15 bp, Homo sapiens
gtgtcttagccagca

SEQ ID NO: 1435098 - DNA, 15 bp, Homo sapiens
tgtcttagccagcaa

SEQ ID NO: 1435099 - DNA, 15 bp, Homo sapiens
gtcttagccagcaat

SEQ ID NO: 1435100 - DNA, 15 bp, Homo sapiens
tcttagccagcaatt

SEQ ID NO: 1435101 - DNA, 15 bp, Homo sapiens
cttagccagcaattt

SEQ ID NO: 1435102 - DNA, 15 bp, Homo sapiens
ttagccagcaattta

SEQ ID NO: 1435103 - DNA, 15 bp, Homo sapiens
tagccagcaatttag

SEQ ID NO: 1435104 - DNA, 15 bp, Homo sapiens
agccagcaatttagc

SEQ ID NO: 1435105 - DNA, 15 bp, Homo sapiens
gccagcaatttagca

SEQ ID NO: 1435106 - DNA, 15 bp, Homo sapiens
ccagcaatttagcaa

SEQ ID NO: 1435107 - DNA, 15 bp, Homo sapiens
cagcaatttagcaaa

SEQ ID NO: 1435108 - DNA, 15 bp, Homo sapiens
agcaatttagcaaat

SEQ ID NO: 1435109 - DNA, 15 bp, Homo sapiens
gcaatttagcaaatt

SEQ ID NO: 1435110 - DNA, 15 bp, Homo sapiens
caatttagcaaatta

SEQ ID NO: 1435111 - DNA, 15 bp, Homo sapiens
aatttagcaaattaa

SEQ ID NO: 1435112 - DNA, 15 bp, Homo sapiens
atttagcaaattaat

SEQ ID NO: 1435113 - DNA, 15 bp, Homo sapiens
tttagcaaattaatg

SEQ ID NO: 1435114 - DNA, 15 bp, Homo sapiens
ttagcaaattaatgg

SEQ ID NO: 1435115 - DNA, 15 bp, Homo sapiens
tagcaaattaatgga

SEQ ID NO: 1435116 - DNA, 15 bp, Homo sapiens
agcaaattaatggaa

SEQ ID NO: 1435117 - DNA, 15 bp, Homo sapiens
gcaaattaatggaaa

SEQ ID NO: 1435118 - DNA, 15 bp, Homo sapiens
caaattaatggaaat

SEQ ID NO: 1435119 - DNA, 15 bp, Homo sapiens
aaattaatggaaatt

SEQ ID NO: 1435120 - DNA, 15 bp, Homo sapiens
aattaatggaaatta

SEQ ID NO: 1435121 - DNA, 15 bp, Homo sapiens
attaatggaaattag

SEQ ID NO: 1435122 - DNA, 15 bp, Homo sapiens
ttaatggaaattaga

SEQ ID NO: 1435123 - DNA, 15 bp, Homo sapiens
taatggaaattagat

SEQ ID NO: 1435124 - DNA, 15 bp, Homo sapiens
aatggaaattagatc

SEQ ID NO: 1435125 - DNA, 15 bp, Homo sapiens
atggaaattagatct

SEQ ID NO: 1435126 - DNA, 15 bp, Homo sapiens
tggaaattagatctt

SEQ ID NO: 1435127 - DNA, 15 bp, Homo sapiens
ggaaattagatcttt

SEQ ID NO: 1435128 - DNA, 15 bp, Homo sapiens
gaaattagatctttg

SEQ ID NO: 1435129 - DNA, 15 bp, Homo sapiens
aaattagatctttga

SEQ ID NO: 1435130 - DNA, 15 bp, Homo sapiens
aattagatctttgat

SEQ ID NO: 1435131 - DNA, 15 bp, Homo sapiens
attagatctttgatt

SEQ ID NO: 1435132 - DNA, 15 bp, Homo sapiens
ttagatctttgattt

SEQ ID NO: 1435133 - DNA, 15 bp, Homo sapiens
tagatctttgatttt

SEQ ID NO: 1435134 - DNA, 15 bp, Homo sapiens
agatctttgattttt

SEQ ID NO: 1435135 - DNA, 15 bp, Homo sapiens
gatctttgatttttt

SEQ ID NO: 1435136 - DNA, 15 bp, Homo sapiens
atctttgattttttt

SEQ ID NO: 1435137 - DNA, 15 bp, Homo sapiens
tctttgatttttttt

SEQ ID NO: 1435138 - DNA, 15 bp, Homo sapiens
ctttgattttttttt

SEQ ID NO: 1435139 - DNA, 15 bp, Homo sapiens
tttgatttttttttc

SEQ ID NO: 1435140 - DNA, 15 bp, Homo sapiens
ttgatttttttttct

SEQ ID NO: 1435141 - DNA, 15 bp, Homo sapiens
tgatttttttttctt

SEQ ID NO: 1435142 - DNA, 15 bp, Homo sapiens
ttttttttctttcaa

SEQ ID NO: 1435143 - DNA, 15 bp, Homo sapiens
tttttttctttcaag

SEQ ID NO: 1435144 - DNA, 15 bp, Homo sapiens
ttttttctttcaagc

SEQ ID NO: 1435145 - DNA, 15 bp, Homo sapiens
tttttctttcaagca

SEQ ID NO: 1435146 - DNA, 15 bp, Homo sapiens
ttttctttcaagcat

SEQ ID NO: 1435147 - DNA, 15 bp, Homo sapiens
tttctttcaagcatt

SEQ ID NO: 1435148 - DNA, 15 bp, Homo sapiens
ttctttcaagcattt

SEQ ID NO: 1435149 - DNA, 15 bp, Homo sapiens
tctttcaagcatttt

SEQ ID NO: 1435150 - DNA, 15 bp, Homo sapiens
ctttcaagcatttta

SEQ ID NO: 1435151 - DNA, 15 bp, Homo sapiens
tttcaagcattttat

SEQ ID NO: 1435152 - DNA, 15 bp, Homo sapiens
ttcaagcattttatt

SEQ ID NO: 1435153 - DNA, 15 bp, Homo sapiens
tcaagcattttattt

SEQ ID NO: 1435154 - DNA, 15 bp, Homo sapiens
caagcattttatttg

SEQ ID NO: 1435155 - DNA, 15 bp, Homo sapiens
aagcattttatttga

SEQ ID NO: 1435156 - DNA, 15 bp, Homo sapiens
agcattttatttgag

SEQ ID NO: 1435157 - DNA, 15 bp, Homo sapiens
gcattttatttgaga

SEQ ID NO: 1435158 - DNA, 15 bp, Homo sapiens
cattttatttgagag

SEQ ID NO: 1435159 - DNA, 15 bp, Homo sapiens
attttatttgagaga

SEQ ID NO: 1435160 - DNA, 15 bp, Homo sapiens
ttttatttgagagac

SEQ ID NO: 1435161 - DNA, 15 bp, Homo sapiens
tttatttgagagact

SEQ ID NO: 1435162 - DNA, 15 bp, Homo sapiens
ttatttgagagacta

SEQ ID NO: 1435163 - DNA, 15 bp, Homo sapiens
tatttgagagactat

SEQ ID NO: 1435164 - DNA, 15 bp, Homo sapiens
atttgagagactatc

SEQ ID NO: 1435165 - DNA, 15 bp, Homo sapiens
tttgagagactatca

SEQ ID NO: 1435166 - DNA, 15 bp, Homo sapiens
ttgagagactatcaa

SEQ ID NO: 1435167 - DNA, 15 bp, Homo sapiens
tgagagactatcaaa

SEQ ID NO: 1435168 - DNA, 15 bp, Homo sapiens
gagagactatcaaac

SEQ ID NO: 1435169 - DNA, 15 bp, Homo sapiens
agagactatcaaacc

SEQ ID NO: 1435170 - DNA, 15 bp, Homo sapiens
gagactatcaaacct

SEQ ID NO: 1435171 - DNA, 15 bp, Homo sapiens
agactatcaaacctt

SEQ ID NO: 1435172 - DNA, 15 bp, Homo sapiens
gactatcaaacctta

SEQ ID NO: 1435173 - DNA, 15 bp, Homo sapiens
actatcaaaccttat

SEQ ID NO: 1435174 - DNA, 15 bp, Homo sapiens
ctatcaaaccttata

SEQ ID NO: 1435175 - DNA, 15 bp, Homo sapiens
tatcaaaccttatac

SEQ ID NO: 1435176 - DNA, 15 bp, Homo sapiens
atcaaaccttatacc

SEQ ID NO: 1435177 - DNA, 15 bp, Homo sapiens
tcaaaccttatacca

SEQ ID NO: 1435178 - DNA, 15 bp, Homo sapiens
caaaccttataccaa

SEQ ID NO: 1435179 - DNA, 15 bp, Homo sapiens
aaaccttataccaag

SEQ ID NO: 1435180 - DNA, 15 bp, Homo sapiens
aaccttataccaagt

SEQ ID NO: 1435181 - DNA, 15 bp, Homo sapiens
accttataccaagtg

SEQ ID NO: 1435182 - DNA, 15 bp, Homo sapiens
ccttataccaagtgg

SEQ ID NO: 1435183 - DNA, 15 bp, Homo sapiens
cttataccaagtggc

SEQ ID NO: 1435184 - DNA, 15 bp, Homo sapiens
ttataccaagtggcc

SEQ ID NO: 1435185 - DNA, 15 bp, Homo sapiens
tataccaagtggcct

SEQ ID NO: 1435186 - DNA, 15 bp, Homo sapiens
ataccaagtggcctt

SEQ ID NO: 1435187 - DNA, 15 bp, Homo sapiens
taccaagtggcctta

SEQ ID NO: 1435188 - DNA, 15 bp, Homo sapiens
accaagtggccttat

SEQ ID NO: 1435189 - DNA, 15 bp, Homo sapiens
ccaagtggccttatg

SEQ ID NO: 1435190 - DNA, 15 bp, Homo sapiens
caagtggccttatgg

SEQ ID NO: 1435191 - DNA, 15 bp, Homo sapiens
aagtggccttatgga

SEQ ID NO: 1435192 - DNA, 15 bp, Homo sapiens
agtggccttatggag

SEQ ID NO: 1435193 - DNA, 15 bp, Homo sapiens
gtggccttatggaga

SEQ ID NO: 1435194 - DNA, 15 bp, Homo sapiens
tggccttatggagac

SEQ ID NO: 1435195 - DNA, 15 bp, Homo sapiens
ggccttatggagact

SEQ ID NO: 1435196 - DNA, 15 bp, Homo sapiens
gccttatggagactg

SEQ ID NO: 1435197 - DNA, 15 bp, Homo sapiens
ccttatggagactga

SEQ ID NO: 1435198 - DNA, 15 bp, Homo sapiens
cttatggagactgat

SEQ ID NO: 1435199 - DNA, 15 bp, Homo sapiens
ttatggagactgata

SEQ ID NO: 1435200 - DNA, 15 bp, Homo sapiens
tatggagactgataa

SEQ ID NO: 1435201 - DNA, 15 bp, Homo sapiens
atggagactgataac

SEQ ID NO: 1435202 - DNA, 15 bp, Homo sapiens
tggagactgataacc

SEQ ID NO: 1435203 - DNA, 15 bp, Homo sapiens
ggagactgataacca

SEQ ID NO: 1435204 - DNA, 15 bp, Homo sapiens
gagactgataaccag

SEQ ID NO: 1435205 - DNA, 15 bp, Homo sapiens
agactgataaccaga

SEQ ID NO: 1435206 - DNA, 15 bp, Homo sapiens
gactgataaccagag

SEQ ID NO: 1435207 - DNA, 15 bp, Homo sapiens
actgataaccagagt

SEQ ID NO: 1435208 - DNA, 15 bp, Homo sapiens
ctgataaccagagta

SEQ ID NO: 1435209 - DNA, 15 bp, Homo sapiens
tgataaccagagtac

SEQ ID NO: 1435210 - DNA, 15 bp, Homo sapiens
gataaccagagtaca

SEQ ID NO: 1435211 - DNA, 15 bp, Homo sapiens
ataaccagagtacat

SEQ ID NO: 1435212 - DNA, 15 bp, Homo sapiens
taaccagagtacatg

SEQ ID NO: 1435213 - DNA, 15 bp, Homo sapiens
aaccagagtacatgg

SEQ ID NO: 1435214 - DNA, 15 bp, Homo sapiens
accagagtacatggc

SEQ ID NO: 1435215 - DNA, 15 bp, Homo sapiens
ccagagtacatggca

SEQ ID NO: 1435216 - DNA, 15 bp, Homo sapiens
cagagtacatggcat

SEQ ID NO: 1435217 - DNA, 15 bp, Homo sapiens
agagtacatggcata

SEQ ID NO: 1435218 - DNA, 15 bp, Homo sapiens
gagtacatggcatat

SEQ ID NO: 1435219 - DNA, 15 bp, Homo sapiens
agtacatggcatatc

SEQ ID NO: 1435220 - DNA, 15 bp, Homo sapiens
gtacatggcatatca

SEQ ID NO: 1435221 - DNA, 15 bp, Homo sapiens
tacatggcatatcag

SEQ ID NO: 1435222 - DNA, 15 bp, Homo sapiens
acatggcatatcagt

SEQ ID NO: 1435223 - DNA, 15 bp, Homo sapiens
catggcatatcagtg

SEQ ID NO: 1435224 - DNA, 15 bp, Homo sapiens
atggcatatcagtgg

SEQ ID NO: 1435225 - DNA, 15 bp, Homo sapiens
tggcatatcagtggc

SEQ ID NO: 1435226 - DNA, 15 bp, Homo sapiens
ggcatatcagtggca

SEQ ID NO: 1435227 - DNA, 15 bp, Homo sapiens
gcatatcagtggcaa

SEQ ID NO: 1435228 - DNA, 15 bp, Homo sapiens
catatcagtggcaaa

SEQ ID NO: 1435229 - DNA, 15 bp, Homo sapiens
atatcagtggcaaat

SEQ ID NO: 1435230 - DNA, 15 bp, Homo sapiens
tatcagtggcaaatt

SEQ ID NO: 1435231 - DNA, 15 bp, Homo sapiens
atcagtggcaaattg

SEQ ID NO: 1435232 - DNA, 15 bp, Homo sapiens
tcagtggcaaattga

SEQ ID NO: 1435233 - DNA, 15 bp, Homo sapiens
cagtggcaaattgac

SEQ ID NO: 1435234 - DNA, 15 bp, Homo sapiens
agtggcaaattgact

SEQ ID NO: 1435235 - DNA, 15 bp, Homo sapiens
gtggcaaattgactt

SEQ ID NO: 1435236 - DNA, 15 bp, Homo sapiens
tggcaaattgactta

SEQ ID NO: 1435237 - DNA, 15 bp, Homo sapiens
ggcaaattgacttaa

SEQ ID NO: 1435238 - DNA, 15 bp, Homo sapiens
gcaaattgacttaaa

SEQ ID NO: 1435239 - DNA, 15 bp, Homo sapiens
caaattgacttaaaa

SEQ ID NO: 1435240 - DNA, 15 bp, Homo sapiens
aaattgacttaaaat

SEQ ID NO: 1435241 - DNA, 15 bp, Homo sapiens
aattgacttaaaatc

SEQ ID NO: 1435242 - DNA, 15 bp, Homo sapiens
attgacttaaaatcc

SEQ ID NO: 1435243 - DNA, 15 bp, Homo sapiens
ttgacttaaaatcca

SEQ ID NO: 1435244 - DNA, 15 bp, Homo sapiens
tgacttaaaatccat

SEQ ID NO: 1435245 - DNA, 15 bp, Homo sapiens
gacttaaaatccata

SEQ ID NO: 1435246 - DNA, 15 bp, Homo sapiens
acttaaaatccatac

SEQ ID NO: 1435247 - DNA, 15 bp, Homo sapiens
cttaaaatccatacc

SEQ ID NO: 1435248 - DNA, 15 bp, Homo sapiens
ttaaaatccataccc

SEQ ID NO: 1435249 - DNA, 15 bp, Homo sapiens
taaaatccatacccc

SEQ ID NO: 1435250 - DNA, 15 bp, Homo sapiens
aaaatccatacccct

SEQ ID NO: 1435251 - DNA, 15 bp, Homo sapiens
aaatccataccccta

SEQ ID NO: 1435252 - DNA, 15 bp, Homo sapiens
aatccatacccctac

SEQ ID NO: 1435253 - DNA, 15 bp, Homo sapiens
atccatacccctact

SEQ ID NO: 1435254 - DNA, 15 bp, Homo sapiens
tccatacccctacta

SEQ ID NO: 1435255 - DNA, 15 bp, Homo sapiens
ccatacccctactat

SEQ ID NO: 1435256 - DNA, 15 bp, Homo sapiens
catacccctactatt

SEQ ID NO: 1435257 - DNA, 15 bp, Homo sapiens
atacccctactattt

SEQ ID NO: 1435258 - DNA, 15 bp, Homo sapiens
tacccctactatttt

SEQ ID NO: 1435259 - DNA, 15 bp, Homo sapiens
acccctactatttta

SEQ ID NO: 1435260 - DNA, 15 bp, Homo sapiens
cccctactattttaa

SEQ ID NO: 1435261 - DNA, 15 bp, Homo sapiens
ccctactattttaag

SEQ ID NO: 1435262 - DNA, 15 bp, Homo sapiens
cctactattttaaga

SEQ ID NO: 1435263 - DNA, 15 bp, Homo sapiens
ctactattttaagac

SEQ ID NO: 1435264 - DNA, 15 bp, Homo sapiens
tactattttaagacc

SEQ ID NO: 1435265 - DNA, 15 bp, Homo sapiens
actattttaagacca

SEQ ID NO: 1435266 - DNA, 15 bp, Homo sapiens
ctattttaagaccat

SEQ ID NO: 1435267 - DNA, 15 bp, Homo sapiens
tattttaagaccatt

SEQ ID NO: 1435268 - DNA, 15 bp, Homo sapiens
attttaagaccattg

SEQ ID NO: 1435269 - DNA, 15 bp, Homo sapiens
ttttaagaccattgt

SEQ ID NO: 1435270 - DNA, 15 bp, Homo sapiens
tttaagaccattgtc

SEQ ID NO: 1435271 - DNA, 15 bp, Homo sapiens
ttaagaccattgtcc

SEQ ID NO: 1435272 - DNA, 15 bp, Homo sapiens
taagaccattgtcct

SEQ ID NO: 1435273 - DNA, 15 bp, Homo sapiens
aagaccattgtcctt

SEQ ID NO: 1435274 - DNA, 15 bp, Homo sapiens
agaccattgtccttt

SEQ ID NO: 1435275 - DNA, 15 bp, Homo sapiens
gaccattgtcctttg

SEQ ID NO: 1435276 - DNA, 15 bp, Homo sapiens
accattgtcctttgg

SEQ ID NO: 1435277 - DNA, 15 bp, Homo sapiens
ccattgtcctttgga

SEQ ID NO: 1435278 - DNA, 15 bp, Homo sapiens
cattgtcctttggag

SEQ ID NO: 1435279 - DNA, 15 bp, Homo sapiens
attgtcctttggagc

SEQ ID NO: 1435280 - DNA, 15 bp, Homo sapiens
ttgtcctttggagca

SEQ ID NO: 1435281 - DNA, 15 bp, Homo sapiens
tgtcctttggagcag

SEQ ID NO: 1435282 - DNA, 15 bp, Homo sapiens
gtcctttggagcaga

SEQ ID NO: 1435283 - DNA, 15 bp, Homo sapiens
tcctttggagcagag

SEQ ID NO: 1435284 - DNA, 15 bp, Homo sapiens
cctttggagcagaga

SEQ ID NO: 1435285 - DNA, 15 bp, Homo sapiens
ctttggagcagagag

SEQ ID NO: 1435286 - DNA, 15 bp, Homo sapiens
tttggagcagagaga

SEQ ID NO: 1435287 - DNA, 15 bp, Homo sapiens
ttggagcagagagac

SEQ ID NO: 1435288 - DNA, 15 bp, Homo sapiens
tggagcagagagaca

SEQ ID NO: 1435289 - DNA, 15 bp, Homo sapiens
ggagcagagagacag

SEQ ID NO: 1435290 - DNA, 15 bp, Homo sapiens
gagcagagagacaga

SEQ ID NO: 1435291 - DNA, 15 bp, Homo sapiens
agcagagagacagac

SEQ ID NO: 1435292 - DNA, 15 bp, Homo sapiens
gcagagagacagact

SEQ ID NO: 1435293 - DNA, 15 bp, Homo sapiens
cagagagacagactc

SEQ ID NO: 1435294 - DNA, 15 bp, Homo sapiens
agagagacagactct

SEQ ID NO: 1435295 - DNA, 15 bp, Homo sapiens
gagagacagactctc

SEQ ID NO: 1435296 - DNA, 15 bp, Homo sapiens
agagacagactctcc

SEQ ID NO: 1435297 - DNA, 15 bp, Homo sapiens
gagacagactctccc

SEQ ID NO: 1435298 - DNA, 15 bp, Homo sapiens
agacagactctccca

SEQ ID NO: 1435299 - DNA, 15 bp, Homo sapiens
gacagactctcccat

SEQ ID NO: 1435300 - DNA, 15 bp, Homo sapiens
acagactctcccatt

SEQ ID NO: 1435301 - DNA, 15 bp, Homo sapiens
cagactctcccattg

SEQ ID NO: 1435302 - DNA, 15 bp, Homo sapiens
agactctcccattga

SEQ ID NO: 1435303 - DNA, 15 bp, Homo sapiens
gactctcccattgag

SEQ ID NO: 1435304 - DNA, 15 bp, Homo sapiens
actctcccattgaga

SEQ ID NO: 1435305 - DNA, 15 bp, Homo sapiens
ctctcccattgagag

SEQ ID NO: 1435306 - DNA, 15 bp, Homo sapiens
tctcccattgagagg

SEQ ID NO: 1435307 - DNA, 15 bp, Homo sapiens
ctcccattgagaggt

SEQ ID NO: 1435308 - DNA, 15 bp, Homo sapiens
tcccattgagaggtc

SEQ ID NO: 1435309 - DNA, 15 bp, Homo sapiens
cccattgagaggtct

SEQ ID NO: 1435310 - DNA, 15 bp, Homo sapiens
ccattgagaggtctt

SEQ ID NO: 1435311 - DNA, 15 bp, Homo sapiens
cattgagaggtcttg

SEQ ID NO: 1435312 - DNA, 15 bp, Homo sapiens
attgagaggtcttgc

SEQ ID NO: 1435313 - DNA, 15 bp, Homo sapiens
ttgagaggtcttgct

SEQ ID NO: 1435314 - DNA, 15 bp, Homo sapiens
tgagaggtcttgcta

SEQ ID NO: 1435315 - DNA, 15 bp, Homo sapiens
gagaggtcttgctat

SEQ ID NO: 1435316 - DNA, 15 bp, Homo sapiens
agaggtcttgctata

SEQ ID NO: 1435317 - DNA, 15 bp, Homo sapiens
gaggtcttgctataa

SEQ ID NO: 1435318 - DNA, 15 bp, Homo sapiens
aggtcttgctataag

SEQ ID NO: 1435319 - DNA, 15 bp, Homo sapiens
ggtcttgctataagc

SEQ ID NO: 1435320 - DNA, 15 bp, Homo sapiens
gtcttgctataagcc

SEQ ID NO: 1435321 - DNA, 15 bp, Homo sapiens
tcttgctataagcct

SEQ ID NO: 1435322 - DNA, 15 bp, Homo sapiens
cttgctataagcctt

SEQ ID NO: 1435323 - DNA, 15 bp, Homo sapiens
ttgctataagccttc

SEQ ID NO: 1435324 - DNA, 15 bp, Homo sapiens
tgctataagccttca

SEQ ID NO: 1435325 - DNA, 15 bp, Homo sapiens
gctataagccttcat

SEQ ID NO: 1435326 - DNA, 15 bp, Homo sapiens
ctataagccttcatc

SEQ ID NO: 1435327 - DNA, 15 bp, Homo sapiens
tataagccttcatcc

SEQ ID NO: 1435328 - DNA, 15 bp, Homo sapiens
ataagccttcatccg

SEQ ID NO: 1435329 - DNA, 15 bp, Homo sapiens
taagccttcatccgg

SEQ ID NO: 1435330 - DNA, 15 bp, Homo sapiens
aagccttcatccgga

SEQ ID NO: 1435331 - DNA, 15 bp, Homo sapiens
agccttcatccggag

SEQ ID NO: 1435332 - DNA, 15 bp, Homo sapiens
gccttcatccggaga

SEQ ID NO: 1435333 - DNA, 15 bp, Homo sapiens
ccttcatccggagag

SEQ ID NO: 1435334 - DNA, 15 bp, Homo sapiens
cttcatccggagagt

SEQ ID NO: 1435335 - DNA, 15 bp, Homo sapiens
ttcatccggagagtg

SEQ ID NO: 1435336 - DNA, 15 bp, Homo sapiens
tcatccggagagtgt

SEQ ID NO: 1435337 - DNA, 15 bp, Homo sapiens
catccggagagtgta

SEQ ID NO: 1435338 - DNA, 15 bp, Homo sapiens
atccggagagtgtag

SEQ ID NO: 1435339 - DNA, 15 bp, Homo sapiens
tccggagagtgtagg

SEQ ID NO: 1435340 - DNA, 15 bp, Homo sapiens
ccggagagtgtaggg

SEQ ID NO: 1435341 - DNA, 15 bp, Homo sapiens
cggagagtgtagggt

SEQ ID NO: 1435342 - DNA, 15 bp, Homo sapiens
ggagagtgtagggta

SEQ ID NO: 1435343 - DNA, 15 bp, Homo sapiens
gagagtgtagggtag

SEQ ID NO: 1435344 - DNA, 15 bp, Homo sapiens
agagtgtagggtaga

SEQ ID NO: 1435345 - DNA, 15 bp, Homo sapiens
gagtgtagggtagag

SEQ ID NO: 1435346 - DNA, 15 bp, Homo sapiens
agtgtagggtagagg

SEQ ID NO: 1435347 - DNA, 15 bp, Homo sapiens
gtgtagggtagaggg

SEQ ID NO: 1435348 - DNA, 15 bp, Homo sapiens
tgtagggtagagggc

SEQ ID NO: 1435349 - DNA, 15 bp, Homo sapiens
gtagggtagagggcc

SEQ ID NO: 1435350 - DNA, 15 bp, Homo sapiens
tagggtagagggcct

SEQ ID NO: 1435351 - DNA, 15 bp, Homo sapiens
agggtagagggcctg

SEQ ID NO: 1435352 - DNA, 15 bp, Homo sapiens
gggtagagggcctgg

SEQ ID NO: 1435353 - DNA, 15 bp, Homo sapiens
ggtagagggcctggg

SEQ ID NO: 1435354 - DNA, 15 bp, Homo sapiens
gtagagggcctgggt

SEQ ID NO: 1435355 - DNA, 15 bp, Homo sapiens
tagagggcctgggtt

SEQ ID NO: 1435356 - DNA, 15 bp, Homo sapiens
agagggcctgggtta

SEQ ID NO: 1435357 - DNA, 15 bp, Homo sapiens
gagggcctgggttaa

SEQ ID NO: 1435358 - DNA, 15 bp, Homo sapiens
agggcctgggttaag

SEQ ID NO: 1435359 - DNA, 15 bp, Homo sapiens
gggcctgggttaagt

SEQ ID NO: 1435360 - DNA, 15 bp, Homo sapiens
ggcctgggttaagta

SEQ ID NO: 1435361 - DNA, 15 bp, Homo sapiens
gcctgggttaagtat

SEQ ID NO: 1435362 - DNA, 15 bp, Homo sapiens
cctgggttaagtatg

SEQ ID NO: 1435363 - DNA, 15 bp, Homo sapiens
ctgggttaagtatgc

SEQ ID NO: 1435364 - DNA, 15 bp, Homo sapiens
tgggttaagtatgca

SEQ ID NO: 1435365 - DNA, 15 bp, Homo sapiens
gggttaagtatgcag

SEQ ID NO: 1435366 - DNA, 15 bp, Homo sapiens
ggttaagtatgcaga

SEQ ID NO: 1435367 - DNA, 15 bp, Homo sapiens
gttaagtatgcagat

SEQ ID NO: 1435368 - DNA, 15 bp, Homo sapiens
ttaagtatgcagatt

SEQ ID NO: 1435369 - DNA, 15 bp, Homo sapiens
taagtatgcagatta

SEQ ID NO: 1435370 - DNA, 15 bp, Homo sapiens
aagtatgcagattac

SEQ ID NO: 1435371 - DNA, 15 bp, Homo sapiens
agtatgcagattact

SEQ ID NO: 1435372 - DNA, 15 bp, Homo sapiens
gtatgcagattactg

SEQ ID NO: 1435373 - DNA, 15 bp, Homo sapiens
tatgcagattactgc

SEQ ID NO: 1435374 - DNA, 15 bp, Homo sapiens
atgcagattactgca

SEQ ID NO: 1435375 - DNA, 15 bp, Homo sapiens
tgcagattactgcag

SEQ ID NO: 1435376 - DNA, 15 bp, Homo sapiens
gcagattactgcagt

SEQ ID NO: 1435377 - DNA, 15 bp, Homo sapiens
cagattactgcagtg

SEQ ID NO: 1435378 - DNA, 15 bp, Homo sapiens
agattactgcagtga

SEQ ID NO: 1435379 - DNA, 15 bp, Homo sapiens
gattactgcagtgat

SEQ ID NO: 1435380 - DNA, 15 bp, Homo sapiens
attactgcagtgatt

SEQ ID NO: 1435381 - DNA, 15 bp, Homo sapiens
ttactgcagtgattt

SEQ ID NO: 1435382 - DNA, 15 bp, Homo sapiens
tactgcagtgatttt

SEQ ID NO: 1435383 - DNA, 15 bp, Homo sapiens
actgcagtgatttta

SEQ ID NO: 1435384 - DNA, 15 bp, Homo sapiens
ctgcagtgattttac

SEQ ID NO: 1435385 - DNA, 15 bp, Homo sapiens
tgcagtgattttaca

SEQ ID NO: 1435386 - DNA, 15 bp, Homo sapiens
gcagtgattttacat

SEQ ID NO: 1435387 - DNA, 15 bp, Homo sapiens
cagtgattttacatc

SEQ ID NO: 1435388 - DNA, 15 bp, Homo sapiens
agtgattttacatct

SEQ ID NO: 1435389 - DNA, 15 bp, Homo sapiens
gtgattttacatcta

SEQ ID NO: 1435390 - DNA, 15 bp, Homo sapiens
tgattttacatctaa

SEQ ID NO: 1435391 - DNA, 15 bp, Homo sapiens
gattttacatctaaa

SEQ ID NO: 1435392 - DNA, 15 bp, Homo sapiens
attttacatctaaat

SEQ ID NO: 1435393 - DNA, 15 bp, Homo sapiens
ttttacatctaaatg

SEQ ID NO: 1435394 - DNA, 15 bp, Homo sapiens
tttacatctaaatgt

SEQ ID NO: 1435395 - DNA, 15 bp, Homo sapiens
ttacatctaaatgtc

SEQ ID NO: 1435396 - DNA, 15 bp, Homo sapiens
tacatctaaatgtcc

SEQ ID NO: 1435397 - DNA, 15 bp, Homo sapiens
acatctaaatgtcca

SEQ ID NO: 1435398 - DNA, 15 bp, Homo sapiens
catctaaatgtccat

SEQ ID NO: 1435399 - DNA, 15 bp, Homo sapiens
atctaaatgtccatt

SEQ ID NO: 1435400 - DNA, 15 bp, Homo sapiens
tctaaatgtccattt

SEQ ID NO: 1435401 - DNA, 15 bp, Homo sapiens
ctaaatgtccatttt

SEQ ID NO: 1435402 - DNA, 15 bp, Homo sapiens
taaatgtccatttta

SEQ ID NO: 1435403 - DNA, 15 bp, Homo sapiens
aaatgtccattttag

SEQ ID NO: 1435404 - DNA, 15 bp, Homo sapiens
aatgtccattttaga

SEQ ID NO: 1435405 - DNA, 15 bp, Homo sapiens
atgtccattttagat

SEQ ID NO: 1435406 - DNA, 15 bp, Homo sapiens
tgtccattttagatc

SEQ ID NO: 1435407 - DNA, 15 bp, Homo sapiens
gtccattttagatca

SEQ ID NO: 1435408 - DNA, 15 bp, Homo sapiens
tccattttagatcaa

SEQ ID NO: 1435409 - DNA, 15 bp, Homo sapiens
ccattttagatcaac

SEQ ID NO: 1435410 - DNA, 15 bp, Homo sapiens
cattttagatcaact

SEQ ID NO: 1435411 - DNA, 15 bp, Homo sapiens
attttagatcaactg

SEQ ID NO: 1435412 - DNA, 15 bp, Homo sapiens
ttttagatcaactgg

SEQ ID NO: 1435413 - DNA, 15 bp, Homo sapiens
tttagatcaactgga

SEQ ID NO: 1435414 - DNA, 15 bp, Homo sapiens
ttagatcaactggaa

SEQ ID NO: 1435415 - DNA, 15 bp, Homo sapiens
tagatcaactggaat

SEQ ID NO: 1435416 - DNA, 15 bp, Homo sapiens
agatcaactggaatg

SEQ ID NO: 1435417 - DNA, 15 bp, Homo sapiens
gatcaactggaatgg

SEQ ID NO: 1435418 - DNA, 15 bp, Homo sapiens
atcaactggaatgga

SEQ ID NO: 1435419 - DNA, 15 bp, Homo sapiens
tcaactggaatggat

SEQ ID NO: 1435420 - DNA, 15 bp, Homo sapiens
caactggaatggatg

SEQ ID NO: 1435421 - DNA, 15 bp, Homo sapiens
aactggaatggatgg

SEQ ID NO: 1435422 - DNA, 15 bp, Homo sapiens
actggaatggatggt

SEQ ID NO: 1435423 - DNA, 15 bp, Homo sapiens
ctggaatggatggta

SEQ ID NO: 1435424 - DNA, 15 bp, Homo sapiens
tggaatggatggtac

SEQ ID NO: 1435425 - DNA, 15 bp, Homo sapiens
ggaatggatggtaca

SEQ ID NO: 1435426 - DNA, 15 bp, Homo sapiens
gaatggatggtacag

SEQ ID NO: 1435427 - DNA, 15 bp, Homo sapiens
aatggatggtacagc

SEQ ID NO: 1435428 - DNA, 15 bp, Homo sapiens
atggatggtacagct

SEQ ID NO: 1435429 - DNA, 15 bp, Homo sapiens
tggatggtacagctg

SEQ ID NO: 1435430 - DNA, 15 bp, Homo sapiens
ggatggtacagctgt

SEQ ID NO: 1435431 - DNA, 15 bp, Homo sapiens
gatggtacagctgtg

SEQ ID NO: 1435432 - DNA, 15 bp, Homo sapiens
atggtacagctgtgt

SEQ ID NO: 1435433 - DNA, 15 bp, Homo sapiens
tggtacagctgtgtg

SEQ ID NO: 1435434 - DNA, 15 bp, Homo sapiens
ggtacagctgtgtgg

SEQ ID NO: 1435435 - DNA, 15 bp, Homo sapiens
gtacagctgtgtggt

SEQ ID NO: 1435436 - DNA, 15 bp, Homo sapiens
tacagctgtgtggtg

SEQ ID NO: 1435437 - DNA, 15 bp, Homo sapiens
acagctgtgtggtgc

SEQ ID NO: 1435438 - DNA, 15 bp, Homo sapiens
cagctgtgtggtgct

SEQ ID NO: 1435439 - DNA, 15 bp, Homo sapiens
agctgtgtggtgctt

SEQ ID NO: 1435440 - DNA, 15 bp, Homo sapiens
gctgtgtggtgcttc

SEQ ID NO: 1435441 - DNA, 15 bp, Homo sapiens
ctgtgtggtgcttct

SEQ ID NO: 1435442 - DNA, 15 bp, Homo sapiens
tgtgtggtgcttctg

SEQ ID NO: 1435443 - DNA, 15 bp, Homo sapiens
gtgtggtgcttctgt

SEQ ID NO: 1435444 - DNA, 15 bp, Homo sapiens
tgtggtgcttctgtg

SEQ ID NO: 1435445 - DNA, 15 bp, Homo sapiens
gtggtgcttctgtgg

SEQ ID NO: 1435446 - DNA, 15 bp, Homo sapiens
tggtgcttctgtggt

SEQ ID NO: 1435447 - DNA, 15 bp, Homo sapiens
ggtgcttctgtggtg

SEQ ID NO: 1435448 - DNA, 15 bp, Homo sapiens
gtgcttctgtggtga

SEQ ID NO: 1435449 - DNA, 15 bp, Homo sapiens
tgcttctgtggtgaa

SEQ ID NO: 1435450 - DNA, 15 bp, Homo sapiens
gcttctgtggtgaag

SEQ ID NO: 1435451 - DNA, 15 bp, Homo sapiens
cttctgtggtgaagg

SEQ ID NO: 1435452 - DNA, 15 bp, Homo sapiens
ttctgtggtgaagga

SEQ ID NO: 1435453 - DNA, 15 bp, Homo sapiens
tctgtggtgaaggag

SEQ ID NO: 1435454 - DNA, 15 bp, Homo sapiens
ctgtggtgaaggagc

SEQ ID NO: 1435455 - DNA, 15 bp, Homo sapiens
tgtggtgaaggagct

SEQ ID NO: 1435456 - DNA, 15 bp, Homo sapiens
gtggtgaaggagctt

SEQ ID NO: 1435457 - DNA, 15 bp, Homo sapiens
tggtgaaggagcttt

SEQ ID NO: 1435458 - DNA, 15 bp, Homo sapiens
ggtgaaggagctttc

SEQ ID NO: 1435459 - DNA, 15 bp, Homo sapiens
gtgaaggagctttca

SEQ ID NO: 1435460 - DNA, 15 bp, Homo sapiens
tgaaggagctttcat

SEQ ID NO: 1435461 - DNA, 15 bp, Homo sapiens
gaaggagctttcatc

SEQ ID NO: 1435462 - DNA, 15 bp, Homo sapiens
aaggagctttcatca

SEQ ID NO: 1435463 - DNA, 15 bp, Homo sapiens
aggagctttcatcat

SEQ ID NO: 1435464 - DNA, 15 bp, Homo sapiens
ggagctttcatcatt

SEQ ID NO: 1435465 - DNA, 15 bp, Homo sapiens
gagctttcatcattc

SEQ ID NO: 1435466 - DNA, 15 bp, Homo sapiens
agctttcatcattca

SEQ ID NO: 1435467 - DNA, 15 bp, Homo sapiens
gctttcatcattcac

SEQ ID NO: 1435468 - DNA, 15 bp, Homo sapiens
ctttcatcattcacc

SEQ ID NO: 1435469 - DNA, 15 bp, Homo sapiens
tttcatcattcaccc

SEQ ID NO: 1435470 - DNA, 15 bp, Homo sapiens
ttcatcattcaccct

SEQ ID NO: 1435471 - DNA, 15 bp, Homo sapiens
tcatcattcaccctt

SEQ ID NO: 1435472 - DNA, 15 bp, Homo sapiens
catcattcacccttg

SEQ ID NO: 1435473 - DNA, 15 bp, Homo sapiens
atcattcacccttgg

SEQ ID NO: 1435474 - DNA, 15 bp, Homo sapiens
tcattcacccttggc

SEQ ID NO: 1435475 - DNA, 15 bp, Homo sapiens
cattcacccttggca

SEQ ID NO: 1435476 - DNA, 15 bp, Homo sapiens
attcacccttggcac

SEQ ID NO: 1435477 - DNA, 15 bp, Homo sapiens
ttcacccttggcaca

SEQ ID NO: 1435478 - DNA, 15 bp, Homo sapiens
tcacccttggcacag

SEQ ID NO: 1435479 - DNA, 15 bp, Homo sapiens
cacccttggcacagt

SEQ ID NO: 1435480 - DNA, 15 bp, Homo sapiens
acccttggcacagta

SEQ ID NO: 1435481 - DNA, 15 bp, Homo sapiens
cccttggcacagtaa

SEQ ID NO: 1435482 - DNA, 15 bp, Homo sapiens
ccttggcacagtaag

SEQ ID NO: 1435483 - DNA, 15 bp, Homo sapiens
cttggcacagtaagt

SEQ ID NO: 1435484 - DNA, 15 bp, Homo sapiens
ttggcacagtaagta

SEQ ID NO: 1435485 - DNA, 15 bp, Homo sapiens
tggcacagtaagtat

SEQ ID NO: 1435486 - DNA, 15 bp, Homo sapiens
ggcacagtaagtatt

SEQ ID NO: 1435487 - DNA, 15 bp, Homo sapiens
gcacagtaagtattg

SEQ ID NO: 1435488 - DNA, 15 bp, Homo sapiens
cacagtaagtattgg

SEQ ID NO: 1435489 - DNA, 15 bp, Homo sapiens
acagtaagtattggg

SEQ ID NO: 1435490 - DNA, 15 bp, Homo sapiens
cagtaagtattgggt

SEQ ID NO: 1435491 - DNA, 15 bp, Homo sapiens
agtaagtattgggtg

SEQ ID NO: 1435492 - DNA, 15 bp, Homo sapiens
gtaagtattgggtgc

SEQ ID NO: 1435493 - DNA, 15 bp, Homo sapiens
taagtattgggtgcc

SEQ ID NO: 1435494 - DNA, 15 bp, Homo sapiens
aagtattgggtgccc

SEQ ID NO: 1435495 - DNA, 15 bp, Homo sapiens
agtattgggtgccct

SEQ ID NO: 1435496 - DNA, 15 bp, Homo sapiens
gtattgggtgccctg

SEQ ID NO: 1435497 - DNA, 15 bp, Homo sapiens
tattgggtgccctgt

SEQ ID NO: 1435498 - DNA, 15 bp, Homo sapiens
attgggtgccctgtc

SEQ ID NO: 1435499 - DNA, 15 bp, Homo sapiens
ttgggtgccctgtca

SEQ ID NO: 1435500 - DNA, 15 bp, Homo sapiens
tgggtgccctgtcag

SEQ ID NO: 1435501 - DNA, 15 bp, Homo sapiens
gggtgccctgtcaga

SEQ ID NO: 1435502 - DNA, 15 bp, Homo sapiens
ggtgccctgtcagag

SEQ ID NO: 1435503 - DNA, 15 bp, Homo sapiens
gtgccctgtcagaga

SEQ ID NO: 1435504 - DNA, 15 bp, Homo sapiens
tgccctgtcagagag

SEQ ID NO: 1435505 - DNA, 15 bp, Homo sapiens
gccctgtcagagagg

SEQ ID NO: 1435506 - DNA, 15 bp, Homo sapiens
ccctgtcagagaggg

SEQ ID NO: 1435507 - DNA, 15 bp, Homo sapiens
cctgtcagagaggga

SEQ ID NO: 1435508 - DNA, 15 bp, Homo sapiens
ctgtcagagagggag

SEQ ID NO: 1435509 - DNA, 15 bp, Homo sapiens
tgtcagagagggagg

SEQ ID NO: 1435510 - DNA, 15 bp, Homo sapiens
gtcagagagggagga

SEQ ID NO: 1435511 - DNA, 15 bp, Homo sapiens
tcagagagggaggac

SEQ ID NO: 1435512 - DNA, 15 bp, Homo sapiens
cagagagggaggaca

SEQ ID NO: 1435513 - DNA, 15 bp, Homo sapiens
agagagggaggacac

SEQ ID NO: 1435514 - DNA, 15 bp, Homo sapiens
gagagggaggacaca

SEQ ID NO: 1435515 - DNA, 15 bp, Homo sapiens
agagggaggacacaa

SEQ ID NO: 1435516 - DNA, 15 bp, Homo sapiens
gagggaggacacaat

SEQ ID NO: 1435517 - DNA, 15 bp, Homo sapiens
agggaggacacaata

SEQ ID NO: 1435518 - DNA, 15 bp, Homo sapiens
gggaggacacaatat

SEQ ID NO: 1435519 - DNA, 15 bp, Homo sapiens
ggaggacacaatatt

SEQ ID NO: 1435520 - DNA, 15 bp, Homo sapiens
gaggacacaatattc

SEQ ID NO: 1435521 - DNA, 15 bp, Homo sapiens
aggacacaatattct

SEQ ID NO: 1435522 - DNA, 15 bp, Homo sapiens
ggacacaatattctc

SEQ ID NO: 1435523 - DNA, 15 bp, Homo sapiens
gacacaatattctct

SEQ ID NO: 1435524 - DNA, 15 bp, Homo sapiens
acacaatattctctc

SEQ ID NO: 1435525 - DNA, 15 bp, Homo sapiens
cacaatattctctcc

SEQ ID NO: 1435526 - DNA, 15 bp, Homo sapiens
ctgggcgcgtcttga

SEQ ID NO: 1435527 - DNA, 15 bp, Homo sapiens
tgggcgcgtcttgat

SEQ ID NO: 1435528 - DNA, 15 bp, Homo sapiens
gggcgcgtcttgatg

SEQ ID NO: 1435529 - DNA, 15 bp, Homo sapiens
ggcgcgtcttgatgc

SEQ ID NO: 1435530 - DNA, 15 bp, Homo sapiens
gcgcgtcttgatgct

SEQ ID NO: 1435531 - DNA, 15 bp, Homo sapiens
cgcgtcttgatgctc

SEQ ID NO: 1435532 - DNA, 15 bp, Homo sapiens
gcgtcttgatgctct

SEQ ID NO: 1435533 - DNA, 15 bp, Homo sapiens
cgtcttgatgctctc

SEQ ID NO: 1435534 - DNA, 15 bp, Homo sapiens
gtcttgatgctctca

SEQ ID NO: 1435535 - DNA, 15 bp, Homo sapiens
tcttgatgctctcaa

SEQ ID NO: 1435536 - DNA, 15 bp, Homo sapiens
cttgatgctctcaac

SEQ ID NO: 1435537 - DNA, 15 bp, Homo sapiens
ttgatgctctcaaca

SEQ ID NO: 1435538 - DNA, 15 bp, Homo sapiens
tgatgctctcaacag

SEQ ID NO: 1435539 - DNA, 15 bp, Homo sapiens
gatgctctcaacagc

SEQ ID NO: 1435540 - DNA, 15 bp, Homo sapiens
atgctctcaacagca

SEQ ID NO: 1435541 - DNA, 15 bp, Homo sapiens
tgctctcaacagcag

SEQ ID NO: 1435542 - DNA, 15 bp, Homo sapiens
gctctcaacagcagc

SEQ ID NO: 1435543 - DNA, 15 bp, Homo sapiens
ctctcaacagcagcc

SEQ ID NO: 1435544 - DNA, 15 bp, Homo sapiens
tctcaacagcagccc

SEQ ID NO: 1435545 - DNA, 15 bp, Homo sapiens
ctcaacagcagccct

SEQ ID NO: 1435546 - DNA, 15 bp, Homo sapiens
tcaacagcagccctc

SEQ ID NO: 1435547 - DNA, 15 bp, Homo sapiens
caacagcagccctca

SEQ ID NO: 1435548 - DNA, 15 bp, Homo sapiens
aacagcagccctcag

SEQ ID NO: 1435549 - DNA, 15 bp, Homo sapiens
acagcagccctcagg

SEQ ID NO: 1435550 - DNA, 15 bp, Homo sapiens
cagcagccctcagga

SEQ ID NO: 1435551 - DNA, 15 bp, Homo sapiens
agcagccctcaggat

SEQ ID NO: 1435552 - DNA, 15 bp, Homo sapiens
gcagccctcaggatt

SEQ ID NO: 1435553 - DNA, 15 bp, Homo sapiens
cagccctcaggattc

SEQ ID NO: 1435554 - DNA, 15 bp, Homo sapiens
agccctcaggattct

SEQ ID NO: 1435555 - DNA, 15 bp, Homo sapiens
gccctcaggattctg

SEQ ID NO: 1435556 - DNA, 15 bp, Homo sapiens
ccctcaggattctgg

SEQ ID NO: 1435557 - DNA, 15 bp, Homo sapiens
cctcaggattctgga

SEQ ID NO: 1435558 - DNA, 15 bp, Homo sapiens
ctcaggattctggac

SEQ ID NO: 1435559 - DNA, 15 bp, Homo sapiens
tcaggattctggact

SEQ ID NO: 1435560 - DNA, 15 bp, Homo sapiens
caggattctggactg

SEQ ID NO: 1435561 - DNA, 15 bp, Homo sapiens
aggattctggactgt

SEQ ID NO: 1435562 - DNA, 15 bp, Homo sapiens
ggattctggactgtg

SEQ ID NO: 1435563 - DNA, 15 bp, Homo sapiens
gattctggactgtgg

SEQ ID NO: 1435564 - DNA, 15 bp, Homo sapiens
attctggactgtggg

SEQ ID NO: 1435565 - DNA, 15 bp, Homo sapiens
ttctggactgtgggt

SEQ ID NO: 1435566 - DNA, 15 bp, Homo sapiens
tctggactgtgggtc

SEQ ID NO: 1435567 - DNA, 15 bp, Homo sapiens
ctggactgtgggtcc

SEQ ID NO: 1435568 - DNA, 15 bp, Homo sapiens
tggactgtgggtccc

SEQ ID NO: 1435569 - DNA, 15 bp, Homo sapiens
ggactgtgggtccca

SEQ ID NO: 1435570 - DNA, 15 bp, Homo sapiens
gactgtgggtcccac

SEQ ID NO: 1435571 - DNA, 15 bp, Homo sapiens
actgtgggtcccaca

SEQ ID NO: 1435572 - DNA, 15 bp, Homo sapiens
ctgtgggtcccacat

SEQ ID NO: 1435573 - DNA, 15 bp, Homo sapiens
tgtgggtcccacatt

SEQ ID NO: 1435574 - DNA, 15 bp, Homo sapiens
gtgggtcccacattc

SEQ ID NO: 1435575 - DNA, 15 bp, Homo sapiens
tgggtcccacattcc

SEQ ID NO: 1435576 - DNA, 15 bp, Homo sapiens
gggtcccacattcca

SEQ ID NO: 1435577 - DNA, 15 bp, Homo sapiens
ggtcccacattccag

SEQ ID NO: 1435578 - DNA, 15 bp, Homo sapiens
gtcccacattccaga

SEQ ID NO: 1435579 - DNA, 15 bp, Homo sapiens
tcccacattccagat

SEQ ID NO: 1435580 - DNA, 15 bp, Homo sapiens
cccacattccagata

SEQ ID NO: 1435581 - DNA, 15 bp, Homo sapiens
ccacattccagatac

SEQ ID NO: 1435582 - DNA, 15 bp, Homo sapiens
cacattccagatacc

SEQ ID NO: 1435583 - DNA, 15 bp, Homo sapiens
acattccagatacca

SEQ ID NO: 1435584 - DNA, 15 bp, Homo sapiens
cattccagataccat

SEQ ID NO: 1435585 - DNA, 15 bp, Homo sapiens
attccagataccatt

SEQ ID NO: 1435586 - DNA, 15 bp, Homo sapiens
ttccagataccattt

SEQ ID NO: 1435587 - DNA, 15 bp, Homo sapiens
tccagataccatttg

SEQ ID NO: 1435588 - DNA, 15 bp, Homo sapiens
ccagataccatttgt

SEQ ID NO: 1435589 - DNA, 15 bp, Homo sapiens
cagataccatttgtg

SEQ ID NO: 1435590 - DNA, 15 bp, Homo sapiens
agataccatttgtgg

SEQ ID NO: 1435591 - DNA, 15 bp, Homo sapiens
gataccatttgtgga

SEQ ID NO: 1435592 - DNA, 15 bp, Homo sapiens
ataccatttgtggaa

SEQ ID NO: 1435593 - DNA, 15 bp, Homo sapiens
taccatttgtggaat

SEQ ID NO: 1435594 - DNA, 15 bp, Homo sapiens
accatttgtggaatg

SEQ ID NO: 1435595 - DNA, 15 bp, Homo sapiens
ccatttgtggaatgg

SEQ ID NO: 1435596 - DNA, 15 bp, Homo sapiens
catttgtggaatggc

SEQ ID NO: 1435597 - DNA, 15 bp, Homo sapiens
atttgtggaatggct

SEQ ID NO: 1435598 - DNA, 15 bp, Homo sapiens
tttgtggaatggctg

SEQ ID NO: 1435599 - DNA, 15 bp, Homo sapiens
ttgtggaatggctgg

SEQ ID NO: 1435600 - DNA, 15 bp, Homo sapiens
tgtggaatggctgga

SEQ ID NO: 1435601 - DNA, 15 bp, Homo sapiens
gtggaatggctggat

SEQ ID NO: 1435602 - DNA, 15 bp, Homo sapiens
tggaatggctggatg

SEQ ID NO: 1435603 - DNA, 15 bp, Homo sapiens
ggaatggctggatga

SEQ ID NO: 1435604 - DNA, 15 bp, Homo sapiens
gaatggctggatgag

SEQ ID NO: 1435605 - DNA, 15 bp, Homo sapiens
aatggctggatgaga

SEQ ID NO: 1435606 - DNA, 15 bp, Homo sapiens
atggctggatgagaa

SEQ ID NO: 1435607 - DNA, 15 bp, Homo sapiens
tggctggatgagaaa

SEQ ID NO: 1435608 - DNA, 15 bp, Homo sapiens
ggctggatgagaaaa

SEQ ID NO: 1435609 - DNA, 15 bp, Homo sapiens
gctggatgagaaaat

SEQ ID NO: 1435610 - DNA, 15 bp, Homo sapiens
ctggatgagaaaatt

SEQ ID NO: 1435611 - DNA, 15 bp, Homo sapiens
tggatgagaaaattg

SEQ ID NO: 1435612 - DNA, 15 bp, Homo sapiens
ggatgagaaaattgc

SEQ ID NO: 1435613 - DNA, 15 bp, Homo sapiens
gatgagaaaattgca

SEQ ID NO: 1435614 - DNA, 15 bp, Homo sapiens
atgagaaaattgcaa

SEQ ID NO: 1435615 - DNA, 15 bp, Homo sapiens
tgagaaaattgcaac

SEQ ID NO: 1435616 - DNA, 15 bp, Homo sapiens
gagaaaattgcaaca

SEQ ID NO: 1435617 - DNA, 15 bp, Homo sapiens
agaaaattgcaacag

SEQ ID NO: 1435618 - DNA, 15 bp, Homo sapiens
gaaaattgcaacagc

SEQ ID NO: 1435619 - DNA, 15 bp, Homo sapiens
aaaattgcaacagca

SEQ ID NO: 1435620 - DNA, 15 bp, Homo sapiens
aaattgcaacagcac

SEQ ID NO: 1435621 - DNA, 15 bp, Homo sapiens
aattgcaacagcacc

SEQ ID NO: 1435622 - DNA, 15 bp, Homo sapiens
attgcaacagcaccc

SEQ ID NO: 1435623 - DNA, 15 bp, Homo sapiens
ttgcaacagcaccct

SEQ ID NO: 1435624 - DNA, 15 bp, Homo sapiens
tgcaacagcaccctc

SEQ ID NO: 1435625 - DNA, 15 bp, Homo sapiens
gcaacagcaccctca

SEQ ID NO: 1435626 - DNA, 15 bp, Homo sapiens
caacagcaccctcat

SEQ ID NO: 1435627 - DNA, 15 bp, Homo sapiens
aacagcaccctcatt

SEQ ID NO: 1435628 - DNA, 15 bp, Homo sapiens
acagcaccctcattt

SEQ ID NO: 1435629 - DNA, 15 bp, Homo sapiens
cagcaccctcatttc

SEQ ID NO: 1435630 - DNA, 15 bp, Homo sapiens
agcaccctcatttcc

SEQ ID NO: 1435631 - DNA, 15 bp, Homo sapiens
gcaccctcatttcca

SEQ ID NO: 1435632 - DNA, 15 bp, Homo sapiens
caccctcatttccag

SEQ ID NO: 1435633 - DNA, 15 bp, Homo sapiens
accctcatttccagt

SEQ ID NO: 1435634 - DNA, 15 bp, Homo sapiens
ccctcatttccagtt

SEQ ID NO: 1435635 - DNA, 15 bp, Homo sapiens
cctcatttccagtta

SEQ ID NO: 1435636 - DNA, 15 bp, Homo sapiens
ctcatttccagttaa

SEQ ID NO: 1435637 - DNA, 15 bp, Homo sapiens
tcatttccagttaag

SEQ ID NO: 1435638 - DNA, 15 bp, Homo sapiens
catttccagttaagg

SEQ ID NO: 1435639 - DNA, 15 bp, Homo sapiens
atttccagttaaggg

SEQ ID NO: 1435640 - DNA, 15 bp, Homo sapiens
tttccagttaaggga

SEQ ID NO: 1435641 - DNA, 15 bp, Homo sapiens
ttccagttaagggaa

SEQ ID NO: 1435642 - DNA, 15 bp, Homo sapiens
tccagttaagggaat

SEQ ID NO: 1435643 - DNA, 15 bp, Homo sapiens
ccagttaagggaatg

SEQ ID NO: 1435644 - DNA, 15 bp, Homo sapiens
cagttaagggaatgg

SEQ ID NO: 1435645 - DNA, 15 bp, Homo sapiens
agttaagggaatggg

SEQ ID NO: 1435646 - DNA, 15 bp, Homo sapiens
gttaagggaatgggc

SEQ ID NO: 1435647 - DNA, 15 bp, Homo sapiens
ttaagggaatgggcg

SEQ ID NO: 1435648 - DNA, 15 bp, Homo sapiens
taagggaatgggcgg

SEQ ID NO: 1435649 - DNA, 15 bp, Homo sapiens
aagggaatgggcggg

SEQ ID NO: 1435650 - DNA, 15 bp, Homo sapiens
agggaatgggcgggt

SEQ ID NO: 1435651 - DNA, 15 bp, Homo sapiens
gggaatgggcgggtt

SEQ ID NO: 1435652 - DNA, 15 bp, Homo sapiens
ggaatgggcgggtta

SEQ ID NO: 1435653 - DNA, 15 bp, Homo sapiens
gaatgggcgggttac

SEQ ID NO: 1435654 - DNA, 15 bp, Homo sapiens
aatgggcgggttacc

SEQ ID NO: 1435655 - DNA, 15 bp, Homo sapiens
caaccaccaagcttc

SEQ ID NO: 1435656 - DNA, 15 bp, Homo sapiens
aaccaccaagcttca

SEQ ID NO: 1435657 - DNA, 15 bp, Homo sapiens
accaccaagcttcac

SEQ ID NO: 1435658 - DNA, 15 bp, Homo sapiens
ccaccaagcttcact

SEQ ID NO: 1435659 - DNA, 15 bp, Homo sapiens
caccaagcttcactt

SEQ ID NO: 1435660 - DNA, 15 bp, Homo sapiens
accaagcttcacttg

SEQ ID NO: 1435661 - DNA, 15 bp, Homo sapiens
ccaagcttcacttgc

SEQ ID NO: 1435662 - DNA, 15 bp, Homo sapiens
caagcttcacttgca

SEQ ID NO: 1435663 - DNA, 15 bp, Homo sapiens
aagcttcacttgcac

SEQ ID NO: 1435664 - DNA, 15 bp, Homo sapiens
agcttcacttgcact

SEQ ID NO: 1435665 - DNA, 15 bp, Homo sapiens
gcttcacttgcactg

SEQ ID NO: 1435666 - DNA, 15 bp, Homo sapiens
cttcacttgcactga

SEQ ID NO: 1435667 - DNA, 15 bp, Homo sapiens
ttcacttgcactgag

SEQ ID NO: 1435668 - DNA, 15 bp, Homo sapiens
tcacttgcactgagg

SEQ ID NO: 1435669 - DNA, 15 bp, Homo sapiens
cacttgcactgaggc

SEQ ID NO: 1435670 - DNA, 15 bp, Homo sapiens
acttgcactgaggcc

SEQ ID NO: 1435671 - DNA, 15 bp, Homo sapiens
cttgcactgaggccg

SEQ ID NO: 1435672 - DNA, 15 bp, Homo sapiens
ttgcactgaggccgt

SEQ ID NO: 1435673 - DNA, 15 bp, Homo sapiens
tgcactgaggccgtg

SEQ ID NO: 1435674 - DNA, 15 bp, Homo sapiens
gcactgaggccgtgt

SEQ ID NO: 1435675 - DNA, 15 bp, Homo sapiens
cactgaggccgtgtc

SEQ ID NO: 1435676 - DNA, 15 bp, Homo sapiens
actgaggccgtgtct

SEQ ID NO: 1435677 - DNA, 15 bp, Homo sapiens
ctgaggccgtgtctc

SEQ ID NO: 1435678 - DNA, 15 bp, Homo sapiens
tgaggccgtgtctcc

SEQ ID NO: 1435679 - DNA, 15 bp, Homo sapiens
gaggccgtgtctcca

SEQ ID NO: 1435680 - DNA, 15 bp, Homo sapiens
aggccgtgtctccaa

SEQ ID NO: 1435681 - DNA, 15 bp, Homo sapiens
ggccgtgtctccaat

SEQ ID NO: 1435682 - DNA, 15 bp, Homo sapiens
gccgtgtctccaatg

SEQ ID NO: 1435683 - DNA, 15 bp, Homo sapiens
ccgtgtctccaatgg

SEQ ID NO: 1435684 - DNA, 15 bp, Homo sapiens
cgtgtctccaatgga

SEQ ID NO: 1435685 - DNA, 15 bp, Homo sapiens
gtgtctccaatggaa

SEQ ID NO: 1435686 - DNA, 15 bp, Homo sapiens
tgtctccaatggaaa

SEQ ID NO: 1435687 - DNA, 15 bp, Homo sapiens
gtctccaatggaaat

SEQ ID NO: 1435688 - DNA, 15 bp, Homo sapiens
tctccaatggaaatg

SEQ ID NO: 1435689 - DNA, 15 bp, Homo sapiens
ctccaatggaaatga

SEQ ID NO: 1435690 - DNA, 15 bp, Homo sapiens
tccaatggaaatgag

SEQ ID NO: 1435691 - DNA, 15 bp, Homo sapiens
ccaatggaaatgagg

SEQ ID NO: 1435692 - DNA, 15 bp, Homo sapiens
caatggaaatgaggc

SEQ ID NO: 1435693 - DNA, 15 bp, Homo sapiens
aatggaaatgaggca

SEQ ID NO: 1435694 - DNA, 15 bp, Homo sapiens
atggaaatgaggcag

SEQ ID NO: 1435695 - DNA, 15 bp, Homo sapiens
tggaaatgaggcagc

SEQ ID NO: 1435696 - DNA, 15 bp, Homo sapiens
ggaaatgaggcagct

SEQ ID NO: 1435697 - DNA, 15 bp, Homo sapiens
gaaatgaggcagctg

SEQ ID NO: 1435698 - DNA, 15 bp, Homo sapiens
aaatgaggcagctgg

SEQ ID NO: 1435699 - DNA, 15 bp, Homo sapiens
aatgaggcagctggc

SEQ ID NO: 1435700 - DNA, 15 bp, Homo sapiens
atgaggcagctggct

SEQ ID NO: 1435701 - DNA, 15 bp, Homo sapiens
tgaggcagctggctt

SEQ ID NO: 1435702 - DNA, 15 bp, Homo sapiens
gaggcagctggcttg

SEQ ID NO: 1435703 - DNA, 15 bp, Homo sapiens
aggcagctggcttgc

SEQ ID NO: 1435704 - DNA, 15 bp, Homo sapiens
ggcagctggcttgca

SEQ ID NO: 1435705 - DNA, 15 bp, Homo sapiens
gcagctggcttgcag

SEQ ID NO: 1435706 - DNA, 15 bp, Homo sapiens
cagctggcttgcagg

SEQ ID NO: 1435707 - DNA, 15 bp, Homo sapiens
agctggcttgcagga

SEQ ID NO: 1435708 - DNA, 15 bp, Homo sapiens
gctggcttgcaggag

SEQ ID NO: 1435709 - DNA, 15 bp, Homo sapiens
ctggcttgcaggagc

SEQ ID NO: 1435710 - DNA, 15 bp, Homo sapiens
tggcttgcaggagct

SEQ ID NO: 1435711 - DNA, 15 bp, Homo sapiens
ggcttgcaggagctt

SEQ ID NO: 1435712 - DNA, 15 bp, Homo sapiens
gcttgcaggagcttc

SEQ ID NO: 1435713 - DNA, 15 bp, Homo sapiens
cttgcaggagcttcc

SEQ ID NO: 1435714 - DNA, 15 bp, Homo sapiens
ttgcaggagcttccc

SEQ ID NO: 1435715 - DNA, 15 bp, Homo sapiens
tgcaggagcttccca

SEQ ID NO: 1435716 - DNA, 15 bp, Homo sapiens
gcaggagcttcccaa

SEQ ID NO: 1435717 - DNA, 15 bp, Homo sapiens
caggagcttcccaac

SEQ ID NO: 1435718 - DNA, 15 bp, Homo sapiens
aggagcttcccaact

SEQ ID NO: 1435719 - DNA, 15 bp, Homo sapiens
ggagcttcccaactc

SEQ ID NO: 1435720 - DNA, 15 bp, Homo sapiens
gagcttcccaactca

SEQ ID NO: 1435721 - DNA, 15 bp, Homo sapiens
agcttcccaactcag

SEQ ID NO: 1435722 - DNA, 15 bp, Homo sapiens
gcttcccaactcagg

SEQ ID NO: 1435723 - DNA, 15 bp, Homo sapiens
cttcccaactcaggg

SEQ ID NO: 1435724 - DNA, 15 bp, Homo sapiens
ttcccaactcaggga

SEQ ID NO: 1435725 - DNA, 15 bp, Homo sapiens
tcccaactcagggaa

SEQ ID NO: 1435726 - DNA, 15 bp, Homo sapiens
cccaactcagggaag

SEQ ID NO: 1435727 - DNA, 15 bp, Homo sapiens
ccaactcagggaagt

SEQ ID NO: 1435728 - DNA, 15 bp, Homo sapiens
caactcagggaagta

SEQ ID NO: 1435729 - DNA, 15 bp, Homo sapiens
aactcagggaagtag

SEQ ID NO: 1435730 - DNA, 15 bp, Homo sapiens
actcagggaagtaga

SEQ ID NO: 1435731 - DNA, 15 bp, Homo sapiens
ctcagggaagtagaa

SEQ ID NO: 1435732 - DNA, 15 bp, Homo sapiens
tcagggaagtagaac

SEQ ID NO: 1435733 - DNA, 15 bp, Homo sapiens
cagggaagtagaact

SEQ ID NO: 1435734 - DNA, 15 bp, Homo sapiens
agggaagtagaactc

SEQ ID NO: 1435735 - DNA, 15 bp, Homo sapiens
gggaagtagaactcc

SEQ ID NO: 1435736 - DNA, 15 bp, Homo sapiens
gaagtagaactcctg

SEQ ID NO: 1435737 - DNA, 15 bp, Homo sapiens
aagtagaactcctga

SEQ ID NO: 1435738 - DNA, 15 bp, Homo sapiens
agtagaactcctgag

SEQ ID NO: 1435739 - DNA, 15 bp, Homo sapiens
gtagaactcctgagt

SEQ ID NO: 1435740 - DNA, 15 bp, Homo sapiens
tagaactcctgagtc

SEQ ID NO: 1435741 - DNA, 15 bp, Homo sapiens
agaactcctgagtca

SEQ ID NO: 1435742 - DNA, 15 bp, Homo sapiens
gaactcctgagtcac

SEQ ID NO: 1435743 - DNA, 15 bp, Homo sapiens
aactcctgagtcacc

SEQ ID NO: 1435744 - DNA, 15 bp, Homo sapiens
actcctgagtcacct

SEQ ID NO: 1435745 - DNA, 15 bp, Homo sapiens
ctcctgagtcacctc

SEQ ID NO: 1435746 - DNA, 15 bp, Homo sapiens
tcctgagtcacctcc

SEQ ID NO: 1435747 - DNA, 15 bp, Homo sapiens
cctgagtcacctcca

SEQ ID NO: 1435748 - DNA, 15 bp, Homo sapiens
ctgagtcacctccat

SEQ ID NO: 1435749 - DNA, 15 bp, Homo sapiens
tgagtcacctccata

SEQ ID NO: 1435750 - DNA, 15 bp, Homo sapiens
gagtcacctccatat

SEQ ID NO: 1435751 - DNA, 15 bp, Homo sapiens
agtcacctccatatg

SEQ ID NO: 1435752 - DNA, 15 bp, Homo sapiens
gtcacctccatatgc

SEQ ID NO: 1435753 - DNA, 15 bp, Homo sapiens
tcacctccatatgca

SEQ ID NO: 1435754 - DNA, 15 bp, Homo sapiens
cacctccatatgcaa

SEQ ID NO: 1435755 - DNA, 15 bp, Homo sapiens
acctccatatgcaaa

SEQ ID NO: 1435756 - DNA, 15 bp, Homo sapiens
cctccatatgcaaat

SEQ ID NO: 1435757 - DNA, 15 bp, Homo sapiens
ctccatatgcaaatg

SEQ ID NO: 1435758 - DNA, 15 bp, Homo sapiens
tccatatgcaaatga

SEQ ID NO: 1435759 - DNA, 15 bp, Homo sapiens
ccatatgcaaatgat

SEQ ID NO: 1435760 - DNA, 15 bp, Homo sapiens
catatgcaaatgatt

SEQ ID NO: 1435761 - DNA, 15 bp, Homo sapiens
atatgcaaatgattt

SEQ ID NO: 1435762 - DNA, 15 bp, Homo sapiens
tatgcaaatgatttc

SEQ ID NO: 1435763 - DNA, 15 bp, Homo sapiens
atgcaaatgatttca

SEQ ID NO: 1435764 - DNA, 15 bp, Homo sapiens
tgcaaatgatttcac

SEQ ID NO: 1435765 - DNA, 15 bp, Homo sapiens
gcaaatgatttcaca

SEQ ID NO: 1435766 - DNA, 15 bp, Homo sapiens
caaatgatttcacag

SEQ ID NO: 1435767 - DNA, 15 bp, Homo sapiens
aaatgatttcacagt

SEQ ID NO: 1435768 - DNA, 15 bp, Homo sapiens
aatgatttcacagta

SEQ ID NO: 1435769 - DNA, 15 bp, Homo sapiens
atgatttcacagtaa

SEQ ID NO: 1435770 - DNA, 15 bp, Homo sapiens
tgatttcacagtaat

SEQ ID NO: 1435771 - DNA, 15 bp, Homo sapiens
gatttcacagtaatg

SEQ ID NO: 1435772 - DNA, 15 bp, Homo sapiens
atttcacagtaatgc

SEQ ID NO: 1435773 - DNA, 15 bp, Homo sapiens
tttcacagtaatgct

SEQ ID NO: 1435774 - DNA, 15 bp, Homo sapiens
ttcacagtaatgctg

SEQ ID NO: 1435775 - DNA, 15 bp, Homo sapiens
tcacagtaatgctgt

SEQ ID NO: 1435776 - DNA, 15 bp, Homo sapiens
cacagtaatgctgtt

SEQ ID NO: 1435777 - DNA, 15 bp, Homo sapiens
acagtaatgctgttg

SEQ ID NO: 1435778 - DNA, 15 bp, Homo sapiens
cagtaatgctgttga

SEQ ID NO: 1435779 - DNA, 15 bp, Homo sapiens
agtaatgctgttgaa

SEQ ID NO: 1435780 - DNA, 15 bp, Homo sapiens
gtaatgctgttgaac

SEQ ID NO: 1435781 - DNA, 15 bp, Homo sapiens
taatgctgttgaact

SEQ ID NO: 1435782 - DNA, 15 bp, Homo sapiens
aatgctgttgaactt

SEQ ID NO: 1435783 - DNA, 15 bp, Homo sapiens
atgctgttgaacttc

SEQ ID NO: 1435784 - DNA, 15 bp, Homo sapiens
tgctgttgaacttca

SEQ ID NO: 1435785 - DNA, 15 bp, Homo sapiens
gctgttgaacttcac

SEQ ID NO: 1435786 - DNA, 15 bp, Homo sapiens
ctgttgaacttcact

SEQ ID NO: 1435787 - DNA, 15 bp, Homo sapiens
tgttgaacttcactt

SEQ ID NO: 1435788 - DNA, 15 bp, Homo sapiens
gttgaacttcacttc

SEQ ID NO: 1435789 - DNA, 15 bp, Homo sapiens
ttgaacttcacttcc

SEQ ID NO: 1435790 - DNA, 15 bp, Homo sapiens
tgaacttcacttccc

SEQ ID NO: 1435791 - DNA, 15 bp, Homo sapiens
gaacttcacttccca

SEQ ID NO: 1435792 - DNA, 15 bp, Homo sapiens
aacttcacttcccat

SEQ ID NO: 1435793 - DNA, 15 bp, Homo sapiens
acttcacttcccatc

SEQ ID NO: 1435794 - DNA, 15 bp, Homo sapiens
cttcacttcccatca

SEQ ID NO: 1435795 - DNA, 15 bp, Homo sapiens
ttcacttcccatcac

SEQ ID NO: 1435796 - DNA, 15 bp, Homo sapiens
tcacttcccatcaca

SEQ ID NO: 1435797 - DNA, 15 bp, Homo sapiens
cacttcccatcacag

SEQ ID NO: 1435798 - DNA, 15 bp, Homo sapiens
acttcccatcacagc

SEQ ID NO: 1435799 - DNA, 15 bp, Homo sapiens
cttcccatcacagca

SEQ ID NO: 1435800 - DNA, 15 bp, Homo sapiens
ttcccatcacagcaa

SEQ ID NO: 1435801 - DNA, 15 bp, Homo sapiens
tcccatcacagcaaa

SEQ ID NO: 1435802 - DNA, 15 bp, Homo sapiens
cccatcacagcaaat

SEQ ID NO: 1435803 - DNA, 15 bp, Homo sapiens
ccatcacagcaaatg

SEQ ID NO: 1435804 - DNA, 15 bp, Homo sapiens
catcacagcaaatgt

SEQ ID NO: 1435805 - DNA, 15 bp, Homo sapiens
atcacagcaaatgtg

SEQ ID NO: 1435806 - DNA, 15 bp, Homo sapiens
tcacagcaaatgtgt

SEQ ID NO: 1435807 - DNA, 15 bp, Homo sapiens
cacagcaaatgtgtg

SEQ ID NO: 1435808 - DNA, 15 bp, Homo sapiens
acagcaaatgtgtgg

SEQ ID NO: 1435809 - DNA, 15 bp, Homo sapiens
cagcaaatgtgtggt

SEQ ID NO: 1435810 - DNA, 15 bp, Homo sapiens
agcaaatgtgtggta

SEQ ID NO: 1435811 - DNA, 15 bp, Homo sapiens
gcaaatgtgtggtaa

SEQ ID NO: 1435812 - DNA, 15 bp, Homo sapiens
caaatgtgtggtaac

SEQ ID NO: 1435813 - DNA, 15 bp, Homo sapiens
aaatgtgtggtaaca

SEQ ID NO: 1435814 - DNA, 15 bp, Homo sapiens
aatgtgtggtaacat

SEQ ID NO: 1435815 - DNA, 15 bp, Homo sapiens
atgtgtggtaacata

SEQ ID NO: 1435816 - DNA, 15 bp, Homo sapiens
tgtgtggtaacatag

SEQ ID NO: 1435817 - DNA, 15 bp, Homo sapiens
gtgtggtaacatagc

SEQ ID NO: 1435818 - DNA, 15 bp, Homo sapiens
tgtggtaacatagct

SEQ ID NO: 1435819 - DNA, 15 bp, Homo sapiens
gtggtaacatagctt

SEQ ID NO: 1435820 - DNA, 15 bp, Homo sapiens
tggtaacatagcttc

SEQ ID NO: 1435821 - DNA, 15 bp, Homo sapiens
ggtaacatagcttcc

SEQ ID NO: 1435822 - DNA, 15 bp, Homo sapiens
gtaacatagcttccc

SEQ ID NO: 1435823 - DNA, 15 bp, Homo sapiens
taacatagcttcccc

SEQ ID NO: 1435824 - DNA, 15 bp, Homo sapiens
aacatagcttcccca

SEQ ID NO: 1435825 - DNA, 15 bp, Homo sapiens
acatagcttccccac

SEQ ID NO: 1435826 - DNA, 15 bp, Homo sapiens
catagcttccccaca

SEQ ID NO: 1435827 - DNA, 15 bp, Homo sapiens
atagcttccccacag

SEQ ID NO: 1435828 - DNA, 15 bp, Homo sapiens
tagcttccccacagg

SEQ ID NO: 1435829 - DNA, 15 bp, Homo sapiens
agcttccccacagga

SEQ ID NO: 1435830 - DNA, 15 bp, Homo sapiens
gcttccccacaggag

SEQ ID NO: 1435831 - DNA, 15 bp, Homo sapiens
cttccccacaggagt

SEQ ID NO: 1435832 - DNA, 15 bp, Homo sapiens
ttccccacaggagtt

SEQ ID NO: 1435833 - DNA, 15 bp, Homo sapiens
tccccacaggagttt

SEQ ID NO: 1435834 - DNA, 15 bp, Homo sapiens
ccccacaggagttta

SEQ ID NO: 1435835 - DNA, 15 bp, Homo sapiens
cccacaggagtttac

SEQ ID NO: 1435836 - DNA, 15 bp, Homo sapiens
ccacaggagtttact

SEQ ID NO: 1435837 - DNA, 15 bp, Homo sapiens
cacaggagtttactc

SEQ ID NO: 1435838 - DNA, 15 bp, Homo sapiens
acaggagtttactca

SEQ ID NO: 1435839 - DNA, 15 bp, Homo sapiens
caggagtttactcac

SEQ ID NO: 1435840 - DNA, 15 bp, Homo sapiens
aggagtttactcacc

SEQ ID NO: 1435841 - DNA, 15 bp, Homo sapiens
ggagtttactcacca

SEQ ID NO: 1435842 - DNA, 15 bp, Homo sapiens
gagtttactcaccat

SEQ ID NO: 1435843 - DNA, 15 bp, Homo sapiens
agtttactcaccatg

SEQ ID NO: 1435844 - DNA, 15 bp, Homo sapiens
gtttactcaccatgg

SEQ ID NO: 1435845 - DNA, 15 bp, Homo sapiens
tttactcaccatggt

SEQ ID NO: 1435846 - DNA, 15 bp, Homo sapiens
ttactcaccatggta

SEQ ID NO: 1435847 - DNA, 15 bp, Homo sapiens
tactcaccatggtat

SEQ ID NO: 1435848 - DNA, 15 bp, Homo sapiens
actcaccatggtatt

SEQ ID NO: 1435849 - DNA, 15 bp, Homo sapiens
ctcaccatggtattt

SEQ ID NO: 1435850 - DNA, 15 bp, Homo sapiens
tcaccatggtatttt

SEQ ID NO: 1435851 - DNA, 15 bp, Homo sapiens
caccatggtatttta

SEQ ID NO: 1435852 - DNA, 15 bp, Homo sapiens
accatggtattttaa

SEQ ID NO: 1435853 - DNA, 15 bp, Homo sapiens
ccatggtattttaaa

SEQ ID NO: 1435854 - DNA, 15 bp, Homo sapiens
catggtattttaaag

SEQ ID NO: 1435855 - DNA, 15 bp, Homo sapiens
atggtattttaaagg

SEQ ID NO: 1435856 - DNA, 15 bp, Homo sapiens
tggtattttaaaggt

SEQ ID NO: 1435857 - DNA, 15 bp, Homo sapiens
ggtattttaaaggtg

SEQ ID NO: 1435858 - DNA, 15 bp, Homo sapiens
gtattttaaaggtga

SEQ ID NO: 1435859 - DNA, 15 bp, Homo sapiens
tattttaaaggtgaa

SEQ ID NO: 1435860 - DNA, 15 bp, Homo sapiens
attttaaaggtgaaa

SEQ ID NO: 1435861 - DNA, 15 bp, Homo sapiens
ttttaaaggtgaaac

SEQ ID NO: 1435862 - DNA, 15 bp, Homo sapiens
tttaaaggtgaaaca

SEQ ID NO: 1435863 - DNA, 15 bp, Homo sapiens
ttaaaggtgaaacat

SEQ ID NO: 1435864 - DNA, 15 bp, Homo sapiens
taaaggtgaaacatt

SEQ ID NO: 1435865 - DNA, 15 bp, Homo sapiens
aaaggtgaaacattt

SEQ ID NO: 1435866 - DNA, 15 bp, Homo sapiens
aaggtgaaacatttc

SEQ ID NO: 1435867 - DNA, 15 bp, Homo sapiens
aggtgaaacatttca

SEQ ID NO: 1435868 - DNA, 15 bp, Homo sapiens
ggtgaaacatttcaa

SEQ ID NO: 1435869 - DNA, 15 bp, Homo sapiens
gtgaaacatttcaaa

SEQ ID NO: 1435870 - DNA, 15 bp, Homo sapiens
tgaaacatttcaaaa

SEQ ID NO: 1435871 - DNA, 15 bp, Homo sapiens
gaaacatttcaaaac

SEQ ID NO: 1435872 - DNA, 15 bp, Homo sapiens
aaacatttcaaaact

SEQ ID NO: 1435873 - DNA, 15 bp, Homo sapiens
aacatttcaaaactg

SEQ ID NO: 1435874 - DNA, 15 bp, Homo sapiens
acatttcaaaactga

SEQ ID NO: 1435875 - DNA, 15 bp, Homo sapiens
catttcaaaactgaa

SEQ ID NO: 1435876 - DNA, 15 bp, Homo sapiens
atttcaaaactgaaa

SEQ ID NO: 1435877 - DNA, 15 bp, Homo sapiens
tttcaaaactgaaat

SEQ ID NO: 1435878 - DNA, 15 bp, Homo sapiens
ttcaaaactgaaatt

SEQ ID NO: 1435879 - DNA, 15 bp, Homo sapiens
tcaaaactgaaattt

SEQ ID NO: 1435880 - DNA, 15 bp, Homo sapiens
caaaactgaaatttg

SEQ ID NO: 1435881 - DNA, 15 bp, Homo sapiens
aaaactgaaatttga

SEQ ID NO: 1435882 - DNA, 15 bp, Homo sapiens
aaactgaaatttgaa

SEQ ID NO: 1435883 - DNA, 15 bp, Homo sapiens
aactgaaatttgaaa

SEQ ID NO: 1435884 - DNA, 15 bp, Homo sapiens
actgaaatttgaaag

SEQ ID NO: 1435885 - DNA, 15 bp, Homo sapiens
ctgaaatttgaaaga

SEQ ID NO: 1435886 - DNA, 15 bp, Homo sapiens
tgaaatttgaaagaa

SEQ ID NO: 1435887 - DNA, 15 bp, Homo sapiens
gaaatttgaaagaat

SEQ ID NO: 1435888 - DNA, 15 bp, Homo sapiens
aaatttgaaagaatt

SEQ ID NO: 1435889 - DNA, 15 bp, Homo sapiens
aatttgaaagaattt

SEQ ID NO: 1435890 - DNA, 15 bp, Homo sapiens
atttgaaagaattta

SEQ ID NO: 1435891 - DNA, 15 bp, Homo sapiens
tttgaaagaatttag

SEQ ID NO: 1435892 - DNA, 15 bp, Homo sapiens
ttgaaagaatttagt

SEQ ID NO: 1435893 - DNA, 15 bp, Homo sapiens
tgaaagaatttagtt

SEQ ID NO: 1435894 - DNA, 15 bp, Homo sapiens
gaaagaatttagttt

SEQ ID NO: 1435895 - DNA, 15 bp, Homo sapiens
aaagaatttagtttt

SEQ ID NO: 1435896 - DNA, 15 bp, Homo sapiens
aagaatttagttttg

SEQ ID NO: 1435897 - DNA, 15 bp, Homo sapiens
agaatttagttttgg

SEQ ID NO: 1435898 - DNA, 15 bp, Homo sapiens
gaatttagttttgga

SEQ ID NO: 1435899 - DNA, 15 bp, Homo sapiens
aatttagttttggat

SEQ ID NO: 1435900 - DNA, 15 bp, Homo sapiens
atttagttttggatt

SEQ ID NO: 1435901 - DNA, 15 bp, Homo sapiens
tttagttttggattc

SEQ ID NO: 1435902 - DNA, 15 bp, Homo sapiens
ttagttttggattca

SEQ ID NO: 1435903 - DNA, 15 bp, Homo sapiens
tagttttggattcac

SEQ ID NO: 1435904 - DNA, 15 bp, Homo sapiens
agttttggattcact

SEQ ID NO: 1435905 - DNA, 15 bp, Homo sapiens
gttttggattcactc

SEQ ID NO: 1435906 - DNA, 15 bp, Homo sapiens
ttttggattcactca

SEQ ID NO: 1435907 - DNA, 15 bp, Homo sapiens
tttggattcactcaa

SEQ ID NO: 1435908 - DNA, 15 bp, Homo sapiens
ttggattcactcaat

SEQ ID NO: 1435909 - DNA, 15 bp, Homo sapiens
tggattcactcaatt

SEQ ID NO: 1435910 - DNA, 15 bp, Homo sapiens
ggattcactcaatta

SEQ ID NO: 1435911 - DNA, 15 bp, Homo sapiens
gattcactcaattat

SEQ ID NO: 1435912 - DNA, 15 bp, Homo sapiens
attcactcaattatc

SEQ ID NO: 1435913 - DNA, 15 bp, Homo sapiens
ttcactcaattatca

SEQ ID NO: 1435914 - DNA, 15 bp, Homo sapiens
tcactcaattatcac

SEQ ID NO: 1435915 - DNA, 15 bp, Homo sapiens
cactcaattatcact

SEQ ID NO: 1435916 - DNA, 15 bp, Homo sapiens
actcaattatcacta

SEQ ID NO: 1435917 - DNA, 15 bp, Homo sapiens
ctcaattatcactat

SEQ ID NO: 1435918 - DNA, 15 bp, Homo sapiens
tcaattatcactatc

SEQ ID NO: 1435919 - DNA, 15 bp, Homo sapiens
caattatcactatca

SEQ ID NO: 1435920 - DNA, 15 bp, Homo sapiens
aattatcactatcac

SEQ ID NO: 1435921 - DNA, 15 bp, Homo sapiens
attatcactatcact

SEQ ID NO: 1435922 - DNA, 15 bp, Homo sapiens
ttatcactatcactt

SEQ ID NO: 1435923 - DNA, 15 bp, Homo sapiens
tatcactatcacttc

SEQ ID NO: 1435924 - DNA, 15 bp, Homo sapiens
atcactatcacttcg

SEQ ID NO: 1435925 - DNA, 15 bp, Homo sapiens
tcactatcacttcgg

SEQ ID NO: 1435926 - DNA, 15 bp, Homo sapiens
cactatcacttcggg

SEQ ID NO: 1435927 - DNA, 15 bp, Homo sapiens
actatcacttcgggt

SEQ ID NO: 1435928 - DNA, 15 bp, Homo sapiens
ctatcacttcgggtg

SEQ ID NO: 1435929 - DNA, 15 bp, Homo sapiens
tatcacttcgggtgt

SEQ ID NO: 1435930 - DNA, 15 bp, Homo sapiens
atcacttcgggtgtt

SEQ ID NO: 1435931 - DNA, 15 bp, Homo sapiens
tcacttcgggtgtta

SEQ ID NO: 1435932 - DNA, 15 bp, Homo sapiens
cacttcgggtgttat

SEQ ID NO: 1435933 - DNA, 15 bp, Homo sapiens
acttcgggtgttatt

SEQ ID NO: 1435934 - DNA, 15 bp, Homo sapiens
cttcgggtgttattg

SEQ ID NO: 1435935 - DNA, 15 bp, Homo sapiens
ttcgggtgttattgc

SEQ ID NO: 1435936 - DNA, 15 bp, Homo sapiens
tcgggtgttattgca

SEQ ID NO: 1435937 - DNA, 15 bp, Homo sapiens
cgggtgttattgcac

SEQ ID NO: 1435938 - DNA, 15 bp, Homo sapiens
gggtgttattgcacc

SEQ ID NO: 1435939 - DNA, 15 bp, Homo sapiens
ggtgttattgcacct

SEQ ID NO: 1435940 - DNA, 15 bp, Homo sapiens
gtgttattgcacctt

SEQ ID NO: 1435941 - DNA, 15 bp, Homo sapiens
tgttattgcaccttt

SEQ ID NO: 1435942 - DNA, 15 bp, Homo sapiens
gttattgcacctttc

SEQ ID NO: 1435943 - DNA, 15 bp, Homo sapiens
ttattgcacctttct

SEQ ID NO: 1435944 - DNA, 15 bp, Homo sapiens
tattgcacctttctt

SEQ ID NO: 1435945 - DNA, 15 bp, Homo sapiens
attgcacctttcttg

SEQ ID NO: 1435946 - DNA, 15 bp, Homo sapiens
ttgcacctttcttgt

SEQ ID NO: 1435947 - DNA, 15 bp, Homo sapiens
tgcacctttcttgtt

SEQ ID NO: 1435948 - DNA, 15 bp, Homo sapiens
gcacctttcttgttt

SEQ ID NO: 1435949 - DNA, 15 bp, Homo sapiens
cacctttcttgtttg

SEQ ID NO: 1435950 - DNA, 15 bp, Homo sapiens
acctttcttgtttgt

SEQ ID NO: 1435951 - DNA, 15 bp, Homo sapiens
cctttcttgtttgtg

SEQ ID NO: 1435952 - DNA, 15 bp, Homo sapiens
ctttcttgtttgtga

SEQ ID NO: 1435953 - DNA, 15 bp, Homo sapiens
tttcttgtttgtgag

SEQ ID NO: 1435954 - DNA, 15 bp, Homo sapiens
ttcttgtttgtgagt

SEQ ID NO: 1435955 - DNA, 15 bp, Homo sapiens
tcttgtttgtgagtt

SEQ ID NO: 1435956 - DNA, 15 bp, Homo sapiens
cttgtttgtgagttt

SEQ ID NO: 1435957 - DNA, 15 bp, Homo sapiens
ttgtttgtgagttta

SEQ ID NO: 1435958 - DNA, 15 bp, Homo sapiens
tgtttgtgagtttaa

SEQ ID NO: 1435959 - DNA, 15 bp, Homo sapiens
gtttgtgagtttaaa

SEQ ID NO: 1435960 - DNA, 15 bp, Homo sapiens
tttgtgagtttaaat

SEQ ID NO: 1435961 - DNA, 15 bp, Homo sapiens
ttgtgagtttaaatg

SEQ ID NO: 1435962 - DNA, 15 bp, Homo sapiens
tgtgagtttaaatgc

SEQ ID NO: 1435963 - DNA, 15 bp, Homo sapiens
gtgagtttaaatgcc

SEQ ID NO: 1435964 - DNA, 15 bp, Homo sapiens
tgagtttaaatgcca

SEQ ID NO: 1435965 - DNA, 15 bp, Homo sapiens
gagtttaaatgccag

SEQ ID NO: 1435966 - DNA, 15 bp, Homo sapiens
agtttaaatgccaga

SEQ ID NO: 1435967 - DNA, 15 bp, Homo sapiens
gtttaaatgccagac

SEQ ID NO: 1435968 - DNA, 15 bp, Homo sapiens
tttaaatgccagact

SEQ ID NO: 1435969 - DNA, 15 bp, Homo sapiens
ttaaatgccagactc

SEQ ID NO: 1435970 - DNA, 15 bp, Homo sapiens
taaatgccagactct

SEQ ID NO: 1435971 - DNA, 15 bp, Homo sapiens
aaatgccagactctc

SEQ ID NO: 1435972 - DNA, 15 bp, Homo sapiens
aatgccagactctca

SEQ ID NO: 1435973 - DNA, 15 bp, Homo sapiens
atgccagactctcag

SEQ ID NO: 1435974 - DNA, 15 bp, Homo sapiens
tgccagactctcagg

SEQ ID NO: 1435975 - DNA, 15 bp, Homo sapiens
gccagactctcaggc

SEQ ID NO: 1435976 - DNA, 15 bp, Homo sapiens
ccagactctcaggcc

SEQ ID NO: 1435977 - DNA, 15 bp, Homo sapiens
cagactctcaggcca

SEQ ID NO: 1435978 - DNA, 15 bp, Homo sapiens
agactctcaggccac

SEQ ID NO: 1435979 - DNA, 15 bp, Homo sapiens
gactctcaggccact

SEQ ID NO: 1435980 - DNA, 15 bp, Homo sapiens
actctcaggccacta

SEQ ID NO: 1435981 - DNA, 15 bp, Homo sapiens
ctctcaggccactaa

SEQ ID NO: 1435982 - DNA, 15 bp, Homo sapiens
tctcaggccactaac

SEQ ID NO: 1435983 - DNA, 15 bp, Homo sapiens
ctcaggccactaact

SEQ ID NO: 1435984 - DNA, 15 bp, Homo sapiens
tcaggccactaactt

SEQ ID NO: 1435985 - DNA, 15 bp, Homo sapiens
caggccactaacttt

SEQ ID NO: 1435986 - DNA, 15 bp, Homo sapiens
aggccactaactttc

SEQ ID NO: 1435987 - DNA, 15 bp, Homo sapiens
ggccactaactttca

SEQ ID NO: 1435988 - DNA, 15 bp, Homo sapiens
gccactaactttcaa

SEQ ID NO: 1435989 - DNA, 15 bp, Homo sapiens
ccactaactttcaat

SEQ ID NO: 1435990 - DNA, 15 bp, Homo sapiens
cactaactttcaatt

SEQ ID NO: 1435991 - DNA, 15 bp, Homo sapiens
actaactttcaatta

SEQ ID NO: 1435992 - DNA, 15 bp, Homo sapiens
ctaactttcaattaa

SEQ ID NO: 1435993 - DNA, 15 bp, Homo sapiens
taactttcaattaaa

SEQ ID NO: 1435994 - DNA, 15 bp, Homo sapiens
aactttcaattaaaa

SEQ ID NO: 1435995 - DNA, 15 bp, Homo sapiens
actttcaattaaaag

SEQ ID NO: 1435996 - DNA, 15 bp, Homo sapiens
ctttcaattaaaagt

SEQ ID NO: 1435997 - DNA, 15 bp, Homo sapiens
tttcaattaaaagtg

SEQ ID NO: 1435998 - DNA, 15 bp, Homo sapiens
ttcaattaaaagtgt

SEQ ID NO: 1435999 - DNA, 15 bp, Homo sapiens
tcaattaaaagtgtt

SEQ ID NO: 1436000 - DNA, 15 bp, Homo sapiens
caattaaaagtgttt

SEQ ID NO: 1436001 - DNA, 15 bp, Homo sapiens
aattaaaagtgtttt

SEQ ID NO: 1436002 - DNA, 15 bp, Homo sapiens
attaaaagtgttttt

SEQ ID NO: 1436003 - DNA, 15 bp, Homo sapiens
ttaaaagtgtttttc

SEQ ID NO: 1436004 - DNA, 15 bp, Homo sapiens
taaaagtgtttttct

SEQ ID NO: 1436005 - DNA, 15 bp, Homo sapiens
aaaagtgtttttctt

SEQ ID NO: 1436006 - DNA, 15 bp, Homo sapiens
aaagtgtttttcttt

SEQ ID NO: 1436007 - DNA, 15 bp, Homo sapiens
aagtgtttttcttta

SEQ ID NO: 1436008 - DNA, 15 bp, Homo sapiens
agtgtttttctttaa

SEQ ID NO: 1436009 - DNA, 15 bp, Homo sapiens
gtgtttttctttaat

SEQ ID NO: 1436010 - DNA, 15 bp, Homo sapiens
tgtttttctttaatc

SEQ ID NO: 1436011 - DNA, 15 bp, Homo sapiens
gtttttctttaatcg

SEQ ID NO: 1436012 - DNA, 15 bp, Homo sapiens
tttttctttaatcgc

SEQ ID NO: 1436013 - DNA, 15 bp, Homo sapiens
ttttctttaatcgct

SEQ ID NO: 1436014 - DNA, 15 bp, Homo sapiens
tttctttaatcgctg

SEQ ID NO: 1436015 - DNA, 15 bp, Homo sapiens
ttctttaatcgctga

SEQ ID NO: 1436016 - DNA, 15 bp, Homo sapiens
tctttaatcgctgaa

SEQ ID NO: 1436017 - DNA, 15 bp, Homo sapiens
ctttaatcgctgaac

SEQ ID NO: 1436018 - DNA, 15 bp, Homo sapiens
tttaatcgctgaacc

SEQ ID NO: 1436019 - DNA, 15 bp, Homo sapiens
ttaatcgctgaacct

SEQ ID NO: 1436020 - DNA, 15 bp, Homo sapiens
taatcgctgaaccta

SEQ ID NO: 1436021 - DNA, 15 bp, Homo sapiens
aatcgctgaacctaa

SEQ ID NO: 1436022 - DNA, 15 bp, Homo sapiens
atcgctgaacctaac

SEQ ID NO: 1436023 - DNA, 15 bp, Homo sapiens
tcgctgaacctaaca

SEQ ID NO: 1436024 - DNA, 15 bp, Homo sapiens
cgctgaacctaacag

SEQ ID NO: 1436025 - DNA, 15 bp, Homo sapiens
gctgaacctaacagc

SEQ ID NO: 1436026 - DNA, 15 bp, Homo sapiens
ctgaacctaacagca

SEQ ID NO: 1436027 - DNA, 15 bp, Homo sapiens
tgaacctaacagcag

SEQ ID NO: 1436028 - DNA, 15 bp, Homo sapiens
gaacctaacagcagg

SEQ ID NO: 1436029 - DNA, 15 bp, Homo sapiens
aacctaacagcaggg

SEQ ID NO: 1436030 - DNA, 15 bp, Homo sapiens
acctaacagcaggga

SEQ ID NO: 1436031 - DNA, 15 bp, Homo sapiens
cctaacagcagggaa

SEQ ID NO: 1436032 - DNA, 15 bp, Homo sapiens
ctaacagcagggaaa

SEQ ID NO: 1436033 - DNA, 15 bp, Homo sapiens
taacagcagggaaaa

SEQ ID NO: 1436034 - DNA, 15 bp, Homo sapiens
aacagcagggaaaac

SEQ ID NO: 1436035 - DNA, 15 bp, Homo sapiens
acagcagggaaaacg

SEQ ID NO: 1436036 - DNA, 15 bp, Homo sapiens
cagcagggaaaacga

SEQ ID NO: 1436037 - DNA, 15 bp, Homo sapiens
agcagggaaaacgaa

SEQ ID NO: 1436038 - DNA, 15 bp, Homo sapiens
gcagggaaaacgaaa

SEQ ID NO: 1436039 - DNA, 15 bp, Homo sapiens
cagggaaaacgaaat

SEQ ID NO: 1436040 - DNA, 15 bp, Homo sapiens
agggaaaacgaaatg

SEQ ID NO: 1436041 - DNA, 15 bp, Homo sapiens
gggaaaacgaaatgt

SEQ ID NO: 1436042 - DNA, 15 bp, Homo sapiens
ggaaaacgaaatgtt

SEQ ID NO: 1436043 - DNA, 15 bp, Homo sapiens
gaaaacgaaatgttc

SEQ ID NO: 1436044 - DNA, 15 bp, Homo sapiens
aaaacgaaatgttca

SEQ ID NO: 1436045 - DNA, 15 bp, Homo sapiens
aaacgaaatgttcat

SEQ ID NO: 1436046 - DNA, 15 bp, Homo sapiens
aacgaaatgttcatt

SEQ ID NO: 1436047 - DNA, 15 bp, Homo sapiens
acgaaatgttcattc

SEQ ID NO: 1436048 - DNA, 15 bp, Homo sapiens
cgaaatgttcattca

SEQ ID NO: 1436049 - DNA, 15 bp, Homo sapiens
gaaatgttcattcag

SEQ ID NO: 1436050 - DNA, 15 bp, Homo sapiens
aaatgttcattcaga

SEQ ID NO: 1436051 - DNA, 15 bp, Homo sapiens
aatgttcattcagac

SEQ ID NO: 1436052 - DNA, 15 bp, Homo sapiens
atgttcattcagact

SEQ ID NO: 1436053 - DNA, 15 bp, Homo sapiens
tgttcattcagactt

SEQ ID NO: 1436054 - DNA, 15 bp, Homo sapiens
gttcattcagacttt

SEQ ID NO: 1436055 - DNA, 15 bp, Homo sapiens
ttcattcagactttc

SEQ ID NO: 1436056 - DNA, 15 bp, Homo sapiens
tcattcagactttca

SEQ ID NO: 1436057 - DNA, 15 bp, Homo sapiens
cattcagactttcag

SEQ ID NO: 1436058 - DNA, 15 bp, Homo sapiens
attcagactttcaga

SEQ ID NO: 1436059 - DNA, 15 bp, Homo sapiens
ttcagactttcagaa

SEQ ID NO: 1436060 - DNA, 15 bp, Homo sapiens
tcagactttcagaac

SEQ ID NO: 1436061 - DNA, 15 bp, Homo sapiens
cagactttcagaacc

SEQ ID NO: 1436062 - DNA, 15 bp, Homo sapiens
agactttcagaacct

SEQ ID NO: 1436063 - DNA, 15 bp, Homo sapiens
gactttcagaacctt

SEQ ID NO: 1436064 - DNA, 15 bp, Homo sapiens
actttcagaaccttc

SEQ ID NO: 1436065 - DNA, 15 bp, Homo sapiens
ctttcagaaccttca

SEQ ID NO: 1436066 - DNA, 15 bp, Homo sapiens
tttcagaaccttcaa

SEQ ID NO: 1436067 - DNA, 15 bp, Homo sapiens
ttcagaaccttcaat

SEQ ID NO: 1436068 - DNA, 15 bp, Homo sapiens
tcagaaccttcaatg

SEQ ID NO: 1436069 - DNA, 15 bp, Homo sapiens
cagaaccttcaatga

SEQ ID NO: 1436070 - DNA, 15 bp, Homo sapiens
agaaccttcaatgag

SEQ ID NO: 1436071 - DNA, 15 bp, Homo sapiens
gaaccttcaatgaga

SEQ ID NO: 1436072 - DNA, 15 bp, Homo sapiens
aaccttcaatgagat

SEQ ID NO: 1436073 - DNA, 15 bp, Homo sapiens
accttcaatgagatt

SEQ ID NO: 1436074 - DNA, 15 bp, Homo sapiens
ccttcaatgagatta

SEQ ID NO: 1436075 - DNA, 15 bp, Homo sapiens
cttcaatgagattag

SEQ ID NO: 1436076 - DNA, 15 bp, Homo sapiens
ttcaatgagattagg

SEQ ID NO: 1436077 - DNA, 15 bp, Homo sapiens
tcaatgagattaggc

SEQ ID NO: 1436078 - DNA, 15 bp, Homo sapiens
caatgagattaggca

SEQ ID NO: 1436079 - DNA, 15 bp, Homo sapiens
aatgagattaggcag

SEQ ID NO: 1436080 - DNA, 15 bp, Homo sapiens
atgagattaggcagc

SEQ ID NO: 1436081 - DNA, 15 bp, Homo sapiens
tgagattaggcagct

SEQ ID NO: 1436082 - DNA, 15 bp, Homo sapiens
gagattaggcagctg

SEQ ID NO: 1436083 - DNA, 15 bp, Homo sapiens
agattaggcagctga

SEQ ID NO: 1436084 - DNA, 15 bp, Homo sapiens
gattaggcagctgaa

SEQ ID NO: 1436085 - DNA, 15 bp, Homo sapiens
attaggcagctgaaa

SEQ ID NO: 1436086 - DNA, 15 bp, Homo sapiens
ttaggcagctgaaag

SEQ ID NO: 1436087 - DNA, 15 bp, Homo sapiens
taggcagctgaaaga

SEQ ID NO: 1436088 - DNA, 15 bp, Homo sapiens
aggcagctgaaagat

SEQ ID NO: 1436089 - DNA, 15 bp, Homo sapiens
ggcagctgaaagatc

SEQ ID NO: 1436090 - DNA, 15 bp, Homo sapiens
gcagctgaaagatca

SEQ ID NO: 1436091 - DNA, 15 bp, Homo sapiens
cagctgaaagatcaa

SEQ ID NO: 1436092 - DNA, 15 bp, Homo sapiens
agctgaaagatcaaa

SEQ ID NO: 1436093 - DNA, 15 bp, Homo sapiens
gctgaaagatcaaag

SEQ ID NO: 1436094 - DNA, 15 bp, Homo sapiens
ctgaaagatcaaagt

SEQ ID NO: 1436095 - DNA, 15 bp, Homo sapiens
tgaaagatcaaagtg

SEQ ID NO: 1436096 - DNA, 15 bp, Homo sapiens
gaaagatcaaagtgt

SEQ ID NO: 1436097 - DNA, 15 bp, Homo sapiens
aaagatcaaagtgtt

SEQ ID NO: 1436098 - DNA, 15 bp, Homo sapiens
aagatcaaagtgttg

SEQ ID NO: 1436099 - DNA, 15 bp, Homo sapiens
agatcaaagtgttgc

SEQ ID NO: 1436100 - DNA, 15 bp, Homo sapiens
gatcaaagtgttgca

SEQ ID NO: 1436101 - DNA, 15 bp, Homo sapiens
atcaaagtgttgcat

SEQ ID NO: 1436102 - DNA, 15 bp, Homo sapiens
tcaaagtgttgcata

SEQ ID NO: 1436103 - DNA, 15 bp, Homo sapiens
caaagtgttgcatag

SEQ ID NO: 1436104 - DNA, 15 bp, Homo sapiens
aaagtgttgcatagt

SEQ ID NO: 1436105 - DNA, 15 bp, Homo sapiens
aagtgttgcatagtt

SEQ ID NO: 1436106 - DNA, 15 bp, Homo sapiens
agtgttgcatagttg

SEQ ID NO: 1436107 - DNA, 15 bp, Homo sapiens
gtgttgcatagttgt

SEQ ID NO: 1436108 - DNA, 15 bp, Homo sapiens
tgttgcatagttgtc

SEQ ID NO: 1436109 - DNA, 15 bp, Homo sapiens
gttgcatagttgtcc

SEQ ID NO: 1436110 - DNA, 15 bp, Homo sapiens
ttgcatagttgtccc

SEQ ID NO: 1436111 - DNA, 15 bp, Homo sapiens
tgcatagttgtcccg

SEQ ID NO: 1436112 - DNA, 15 bp, Homo sapiens
gcatagttgtcccga

SEQ ID NO: 1436113 - DNA, 15 bp, Homo sapiens
catagttgtcccgat

SEQ ID NO: 1436114 - DNA, 15 bp, Homo sapiens
atagttgtcccgata

SEQ ID NO: 1436115 - DNA, 15 bp, Homo sapiens
tagttgtcccgataa

SEQ ID NO: 1436116 - DNA, 15 bp, Homo sapiens
agttgtcccgataaa

SEQ ID NO: 1436117 - DNA, 15 bp, Homo sapiens
gttgtcccgataaag

SEQ ID NO: 1436118 - DNA, 15 bp, Homo sapiens
ttgtcccgataaagc

SEQ ID NO: 1436119 - DNA, 15 bp, Homo sapiens
tgtcccgataaagct

SEQ ID NO: 1436120 - DNA, 15 bp, Homo sapiens
gtcccgataaagcta

SEQ ID NO: 1436121 - DNA, 15 bp, Homo sapiens
tcccgataaagctat

SEQ ID NO: 1436122 - DNA, 15 bp, Homo sapiens
cccgataaagctatt

SEQ ID NO: 1436123 - DNA, 15 bp, Homo sapiens
ccgataaagctattt

SEQ ID NO: 1436124 - DNA, 15 bp, Homo sapiens
cgataaagctatttg

SEQ ID NO: 1436125 - DNA, 15 bp, Homo sapiens
gataaagctatttgg

SEQ ID NO: 1436126 - DNA, 15 bp, Homo sapiens
ataaagctatttgga

SEQ ID NO: 1436127 - DNA, 15 bp, Homo sapiens
taaagctatttggat

SEQ ID NO: 1436128 - DNA, 15 bp, Homo sapiens
aaagctatttggatc

SEQ ID NO: 1436129 - DNA, 15 bp, Homo sapiens
aagctatttggatca

SEQ ID NO: 1436130 - DNA, 15 bp, Homo sapiens
agctatttggatcat

SEQ ID NO: 1436131 - DNA, 15 bp, Homo sapiens
gctatttggatcata

SEQ ID NO: 1436132 - DNA, 15 bp, Homo sapiens
ctatttggatcatat

SEQ ID NO: 1436133 - DNA, 15 bp, Homo sapiens
tatttggatcatatg

SEQ ID NO: 1436134 - DNA, 15 bp, Homo sapiens
atttggatcatatgg

SEQ ID NO: 1436135 - DNA, 15 bp, Homo sapiens
tttggatcatatgga

SEQ ID NO: 1436136 - DNA, 15 bp, Homo sapiens
ttggatcatatggac

SEQ ID NO: 1436137 - DNA, 15 bp, Homo sapiens
tggatcatatggacc

SEQ ID NO: 1436138 - DNA, 15 bp, Homo sapiens
ggatcatatggacca

SEQ ID NO: 1436139 - DNA, 15 bp, Homo sapiens
gatcatatggaccaa

SEQ ID NO: 1436140 - DNA, 15 bp, Homo sapiens
atcatatggaccaaa

SEQ ID NO: 1436141 - DNA, 15 bp, Homo sapiens
tcatatggaccaaat

SEQ ID NO: 1436142 - DNA, 15 bp, Homo sapiens
catatggaccaaatc

SEQ ID NO: 1436143 - DNA, 15 bp, Homo sapiens
atatggaccaaatcg

SEQ ID NO: 1436144 - DNA, 15 bp, Homo sapiens
tatggaccaaatcga

SEQ ID NO: 1436145 - DNA, 15 bp, Homo sapiens
atggaccaaatcgac

SEQ ID NO: 1436146 - DNA, 15 bp, Homo sapiens
tggaccaaatcgact

SEQ ID NO: 1436147 - DNA, 15 bp, Homo sapiens
ggaccaaatcgactg

SEQ ID NO: 1436148 - DNA, 15 bp, Homo sapiens
gaccaaatcgactgc

SEQ ID NO: 1436149 - DNA, 15 bp, Homo sapiens
accaaatcgactgct

SEQ ID NO: 1436150 - DNA, 15 bp, Homo sapiens
ccaaatcgactgctg

SEQ ID NO: 1436151 - DNA, 15 bp, Homo sapiens
caaatcgactgctgt

SEQ ID NO: 1436152 - DNA, 15 bp, Homo sapiens
aaatcgactgctgtc

SEQ ID NO: 1436153 - DNA, 15 bp, Homo sapiens
aatcgactgctgtca

SEQ ID NO: 1436154 - DNA, 15 bp, Homo sapiens
atcgactgctgtcat

SEQ ID NO: 1436155 - DNA, 15 bp, Homo sapiens
tcgactgctgtcatt

SEQ ID NO: 1436156 - DNA, 15 bp, Homo sapiens
cgactgctgtcattc

SEQ ID NO: 1436157 - DNA, 15 bp, Homo sapiens
gactgctgtcattcc

SEQ ID NO: 1436158 - DNA, 15 bp, Homo sapiens
actgctgtcattccc

SEQ ID NO: 1436159 - DNA, 15 bp, Homo sapiens
ctgctgtcattcccc

SEQ ID NO: 1436160 - DNA, 15 bp, Homo sapiens
tgctgtcattcccca

SEQ ID NO: 1436161 - DNA, 15 bp, Homo sapiens
gctgtcattccccac

SEQ ID NO: 1436162 - DNA, 15 bp, Homo sapiens
ctgtcattccccacc

SEQ ID NO: 1436163 - DNA, 15 bp, Homo sapiens
tgtcattccccacca

SEQ ID NO: 1436164 - DNA, 15 bp, Homo sapiens
gtcattccccaccaa

SEQ ID NO: 1436165 - DNA, 15 bp, Homo sapiens
tcattccccaccaac

SEQ ID NO: 1436166 - DNA, 15 bp, Homo sapiens
cattccccaccaacc

SEQ ID NO: 1436167 - DNA, 15 bp, Homo sapiens
attccccaccaaccc

SEQ ID NO: 1436168 - DNA, 15 bp, Homo sapiens
ttccccaccaacccc

SEQ ID NO: 1436169 - DNA, 15 bp, Homo sapiens
tccccaccaacccca

SEQ ID NO: 1436170 - DNA, 15 bp, Homo sapiens
ccccaccaaccccat

SEQ ID NO: 1436171 - DNA, 15 bp, Homo sapiens
cccaccaaccccatc

SEQ ID NO: 1436172 - DNA, 15 bp, Homo sapiens
ccaccaaccccatct

SEQ ID NO: 1436173 - DNA, 15 bp, Homo sapiens
caccaaccccatctc

SEQ ID NO: 1436174 - DNA, 15 bp, Homo sapiens
accaaccccatctct

SEQ ID NO: 1436175 - DNA, 15 bp, Homo sapiens
ccaaccccatctctc

SEQ ID NO: 1436176 - DNA, 15 bp, Homo sapiens
caaccccatctctcc

SEQ ID NO: 1436177 - DNA, 15 bp, Homo sapiens
aaccccatctctccc

SEQ ID NO: 1436178 - DNA, 15 bp, Homo sapiens
accccatctctcccc

SEQ ID NO: 1436179 - DNA, 15 bp, Homo sapiens
ccccatctctcccca

SEQ ID NO: 1436180 - DNA, 15 bp, Homo sapiens
cccatctctccccaa

SEQ ID NO: 1436181 - DNA, 15 bp, Homo sapiens
ccatctctccccaaa

SEQ ID NO: 1436182 - DNA, 15 bp, Homo sapiens
catctctccccaaaa

SEQ ID NO: 1436183 - DNA, 15 bp, Homo sapiens
atctctccccaaaat

SEQ ID NO: 1436184 - DNA, 15 bp, Homo sapiens
tctctccccaaaatt

SEQ ID NO: 1436185 - DNA, 15 bp, Homo sapiens
ctctccccaaaattc

SEQ ID NO: 1436186 - DNA, 15 bp, Homo sapiens
tctccccaaaattcc

SEQ ID NO: 1436187 - DNA, 15 bp, Homo sapiens
ctccccaaaattccc

SEQ ID NO: 1436188 - DNA, 15 bp, Homo sapiens
tccccaaaattccca

SEQ ID NO: 1436189 - DNA, 15 bp, Homo sapiens
ccccaaaattcccag

SEQ ID NO: 1436190 - DNA, 15 bp, Homo sapiens
cccaaaattcccagc

SEQ ID NO: 1436191 - DNA, 15 bp, Homo sapiens
ccaaaattcccagcc

SEQ ID NO: 1436192 - DNA, 15 bp, Homo sapiens
caaaattcccagccc

SEQ ID NO: 1436193 - DNA, 15 bp, Homo sapiens
aaaattcccagccct

SEQ ID NO: 1436194 - DNA, 15 bp, Homo sapiens
aaattcccagccctg

SEQ ID NO: 1436195 - DNA, 15 bp, Homo sapiens
aattcccagccctgt

SEQ ID NO: 1436196 - DNA, 15 bp, Homo sapiens
attcccagccctgtt

SEQ ID NO: 1436197 - DNA, 15 bp, Homo sapiens
ttcccagccctgttt

SEQ ID NO: 1436198 - DNA, 15 bp, Homo sapiens
tcccagccctgttta

SEQ ID NO: 1436199 - DNA, 15 bp, Homo sapiens
cccagccctgtttaa

SEQ ID NO: 1436200 - DNA, 15 bp, Homo sapiens
ccagccctgtttaag

SEQ ID NO: 1436201 - DNA, 15 bp, Homo sapiens
cagccctgtttaagt

SEQ ID NO: 1436202 - DNA, 15 bp, Homo sapiens
agccctgtttaagtg

SEQ ID NO: 1436203 - DNA, 15 bp, Homo sapiens
gccctgtttaagtgt

SEQ ID NO: 1436204 - DNA, 15 bp, Homo sapiens
ccctgtttaagtgtt

SEQ ID NO: 1436205 - DNA, 15 bp, Homo sapiens
cctgtttaagtgttc

SEQ ID NO: 1436206 - DNA, 15 bp, Homo sapiens
ctgtttaagtgttct

SEQ ID NO: 1436207 - DNA, 15 bp, Homo sapiens
tgtttaagtgttctc

SEQ ID NO: 1436208 - DNA, 15 bp, Homo sapiens
gtttaagtgttctct

SEQ ID NO: 1436209 - DNA, 15 bp, Homo sapiens
tttaagtgttctctg

SEQ ID NO: 1436210 - DNA, 15 bp, Homo sapiens
ttaagtgttctctgt

SEQ ID NO: 1436211 - DNA, 15 bp, Homo sapiens
taagtgttctctgta

SEQ ID NO: 1436212 - DNA, 15 bp, Homo sapiens
aagtgttctctgtag

SEQ ID NO: 1436213 - DNA, 15 bp, Homo sapiens
agtgttctctgtagc

SEQ ID NO: 1436214 - DNA, 15 bp, Homo sapiens
gtgttctctgtagca

SEQ ID NO: 1436215 - DNA, 15 bp, Homo sapiens
tgttctctgtagcat

SEQ ID NO: 1436216 - DNA, 15 bp, Homo sapiens
gttctctgtagcatt

SEQ ID NO: 1436217 - DNA, 15 bp, Homo sapiens
ttctctgtagcattt

SEQ ID NO: 1436218 - DNA, 15 bp, Homo sapiens
tctctgtagcattta

SEQ ID NO: 1436219 - DNA, 15 bp, Homo sapiens
ctctgtagcatttat

SEQ ID NO: 1436220 - DNA, 15 bp, Homo sapiens
tctgtagcatttatc

SEQ ID NO: 1436221 - DNA, 15 bp, Homo sapiens
ctgtagcatttatct

SEQ ID NO: 1436222 - DNA, 15 bp, Homo sapiens
tgtagcatttatctc

SEQ ID NO: 1436223 - DNA, 15 bp, Homo sapiens
gtagcatttatctct

SEQ ID NO: 1436224 - DNA, 15 bp, Homo sapiens
tagcatttatctcta

SEQ ID NO: 1436225 - DNA, 15 bp, Homo sapiens
agcatttatctctat

SEQ ID NO: 1436226 - DNA, 15 bp, Homo sapiens
gcatttatctctatc

SEQ ID NO: 1436227 - DNA, 15 bp, Homo sapiens
catttatctctatct

SEQ ID NO: 1436228 - DNA, 15 bp, Homo sapiens
atttatctctatcta

SEQ ID NO: 1436229 - DNA, 15 bp, Homo sapiens
tttatctctatctag

SEQ ID NO: 1436230 - DNA, 15 bp, Homo sapiens
ttatctctatctagt

SEQ ID NO: 1436231 - DNA, 15 bp, Homo sapiens
tatctctatctagta

SEQ ID NO: 1436232 - DNA, 15 bp, Homo sapiens
atctctatctagtat

SEQ ID NO: 1436233 - DNA, 15 bp, Homo sapiens
tctctatctagtata

SEQ ID NO: 1436234 - DNA, 15 bp, Homo sapiens
ctctatctagtatat

SEQ ID NO: 1436235 - DNA, 15 bp, Homo sapiens
tctatctagtatatt

SEQ ID NO: 1436236 - DNA, 15 bp, Homo sapiens
ctatctagtatattg

SEQ ID NO: 1436237 - DNA, 15 bp, Homo sapiens
tatctagtatattgt

SEQ ID NO: 1436238 - DNA, 15 bp, Homo sapiens
atctagtatattgtg

SEQ ID NO: 1436239 - DNA, 15 bp, Homo sapiens
tctagtatattgtgt

SEQ ID NO: 1436240 - DNA, 15 bp, Homo sapiens
ctagtatattgtgta

SEQ ID NO: 1436241 - DNA, 15 bp, Homo sapiens
tagtatattgtgtag

SEQ ID NO: 1436242 - DNA, 15 bp, Homo sapiens
agtatattgtgtagc

SEQ ID NO: 1436243 - DNA, 15 bp, Homo sapiens
gtatattgtgtagca

SEQ ID NO: 1436244 - DNA, 15 bp, Homo sapiens
tatattgtgtagcat

SEQ ID NO: 1436245 - DNA, 15 bp, Homo sapiens
atattgtgtagcata

SEQ ID NO: 1436246 - DNA, 15 bp, Homo sapiens
tattgtgtagcatat

SEQ ID NO: 1436247 - DNA, 15 bp, Homo sapiens
attgtgtagcatatc

SEQ ID NO: 1436248 - DNA, 15 bp, Homo sapiens
ttgtgtagcatatca

SEQ ID NO: 1436249 - DNA, 15 bp, Homo sapiens
tgtgtagcatatcat

SEQ ID NO: 1436250 - DNA, 15 bp, Homo sapiens
gtgtagcatatcata

SEQ ID NO: 1436251 - DNA, 15 bp, Homo sapiens
tgtagcatatcatat

SEQ ID NO: 1436252 - DNA, 15 bp, Homo sapiens
gtagcatatcatatc

SEQ ID NO: 1436253 - DNA, 15 bp, Homo sapiens
tagcatatcatatca

SEQ ID NO: 1436254 - DNA, 15 bp, Homo sapiens
agcatatcatatcat

SEQ ID NO: 1436255 - DNA, 15 bp, Homo sapiens
gcatatcatatcata

SEQ ID NO: 1436256 - DNA, 15 bp, Homo sapiens
catatcatatcatac

SEQ ID NO: 1436257 - DNA, 15 bp, Homo sapiens
atatcatatcatact

SEQ ID NO: 1436258 - DNA, 15 bp, Homo sapiens
tatcatatcatactt

SEQ ID NO: 1436259 - DNA, 15 bp, Homo sapiens
atcatatcatacttt

SEQ ID NO: 1436260 - DNA, 15 bp, Homo sapiens
tcatatcatactttt

SEQ ID NO: 1436261 - DNA, 15 bp, Homo sapiens
catatcatacttttc

SEQ ID NO: 1436262 - DNA, 15 bp, Homo sapiens
atatcatacttttct

SEQ ID NO: 1436263 - DNA, 15 bp, Homo sapiens
tatcatacttttctg

SEQ ID NO: 1436264 - DNA, 15 bp, Homo sapiens
atcatacttttctgt

SEQ ID NO: 1436265 - DNA, 15 bp, Homo sapiens
tcatacttttctgtt

SEQ ID NO: 1436266 - DNA, 15 bp, Homo sapiens
catacttttctgttt

SEQ ID NO: 1436267 - DNA, 15 bp, Homo sapiens
atacttttctgtttt

SEQ ID NO: 1436268 - DNA, 15 bp, Homo sapiens
tacttttctgttttg

SEQ ID NO: 1436269 - DNA, 15 bp, Homo sapiens
acttttctgttttgt

SEQ ID NO: 1436270 - DNA, 15 bp, Homo sapiens
cttttctgttttgtt

SEQ ID NO: 1436271 - DNA, 15 bp, Homo sapiens
ttttctgttttgttt

SEQ ID NO: 1436272 - DNA, 15 bp, Homo sapiens
tttctgttttgttta

SEQ ID NO: 1436273 - DNA, 15 bp, Homo sapiens
ttctgttttgtttat

SEQ ID NO: 1436274 - DNA, 15 bp, Homo sapiens
tctgttttgtttatt

SEQ ID NO: 1436275 - DNA, 15 bp, Homo sapiens
ctgttttgtttattg

SEQ ID NO: 1436276 - DNA, 15 bp, Homo sapiens
tgttttgtttattgt

SEQ ID NO: 1436277 - DNA, 15 bp, Homo sapiens
gttttgtttattgtc

SEQ ID NO: 1436278 - DNA, 15 bp, Homo sapiens
ttttgtttattgtct

SEQ ID NO: 1436279 - DNA, 15 bp, Homo sapiens
tttgtttattgtctc

SEQ ID NO: 1436280 - DNA, 15 bp, Homo sapiens
ttgtttattgtctct

SEQ ID NO: 1436281 - DNA, 15 bp, Homo sapiens
tgtttattgtctctc

SEQ ID NO: 1436282 - DNA, 15 bp, Homo sapiens
gtttattgtctctct

SEQ ID NO: 1436283 - DNA, 15 bp, Homo sapiens
tttattgtctctctc

SEQ ID NO: 1436284 - DNA, 15 bp, Homo sapiens
ttattgtctctctcc

SEQ ID NO: 1436285 - DNA, 15 bp, Homo sapiens
tattgtctctctcct

SEQ ID NO: 1436286 - DNA, 15 bp, Homo sapiens
attgtctctctcctc

SEQ ID NO: 1436287 - DNA, 15 bp, Homo sapiens
ttgtctctctcctcc

SEQ ID NO: 1436288 - DNA, 15 bp, Homo sapiens
tgtctctctcctcct

SEQ ID NO: 1436289 - DNA, 15 bp, Homo sapiens
gtctctctcctccta

SEQ ID NO: 1436290 - DNA, 15 bp, Homo sapiens
tctctctcctcctag

SEQ ID NO: 1436291 - DNA, 15 bp, Homo sapiens
ctctctcctcctaga

SEQ ID NO: 1436292 - DNA, 15 bp, Homo sapiens
tctctcctcctagaa

SEQ ID NO: 1436293 - DNA, 15 bp, Homo sapiens
ctctcctcctagaat

SEQ ID NO: 1436294 - DNA, 15 bp, Homo sapiens
tctcctcctagaata

SEQ ID NO: 1436295 - DNA, 15 bp, Homo sapiens
ctcctcctagaatat

SEQ ID NO: 1436296 - DNA, 15 bp, Homo sapiens
tcctcctagaatata

SEQ ID NO: 1436297 - DNA, 15 bp, Homo sapiens
cctcctagaatataa

SEQ ID NO: 1436298 - DNA, 15 bp, Homo sapiens
ctcctagaatataaa

SEQ ID NO: 1436299 - DNA, 15 bp, Homo sapiens
tcctagaatataaac

SEQ ID NO: 1436300 - DNA, 15 bp, Homo sapiens
cctagaatataaact

SEQ ID NO: 1436301 - DNA, 15 bp, Homo sapiens
ctagaatataaactc

SEQ ID NO: 1436302 - DNA, 15 bp, Homo sapiens
tagaatataaactcc

SEQ ID NO: 1436303 - DNA, 15 bp, Homo sapiens
agaatataaactcca

SEQ ID NO: 1436304 - DNA, 15 bp, Homo sapiens
gaatataaactccac

SEQ ID NO: 1436305 - DNA, 15 bp, Homo sapiens
aatataaactccaca

SEQ ID NO: 1436306 - DNA, 15 bp, Homo sapiens
atataaactccacaa

SEQ ID NO: 1436307 - DNA, 15 bp, Homo sapiens
tataaactccacaag

SEQ ID NO: 1436308 - DNA, 15 bp, Homo sapiens
ataaactccacaagc

SEQ ID NO: 1436309 - DNA, 15 bp, Homo sapiens
taaactccacaagca

SEQ ID NO: 1436310 - DNA, 15 bp, Homo sapiens
aaactccacaagcac

SEQ ID NO: 1436311 - DNA, 15 bp, Homo sapiens
aactccacaagcaca

SEQ ID NO: 1436312 - DNA, 15 bp, Homo sapiens
actccacaagcacaa

SEQ ID NO: 1436313 - DNA, 15 bp, Homo sapiens
ctccacaagcacaaa

SEQ ID NO: 1436314 - DNA, 15 bp, Homo sapiens
tccacaagcacaaag

SEQ ID NO: 1436315 - DNA, 15 bp, Homo sapiens
ccacaagcacaaaga

SEQ ID NO: 1436316 - DNA, 15 bp, Homo sapiens
cacaagcacaaagat

SEQ ID NO: 1436317 - DNA, 15 bp, Homo sapiens
acaagcacaaagatt

SEQ ID NO: 1436318 - DNA, 15 bp, Homo sapiens
caagcacaaagattt

SEQ ID NO: 1436319 - DNA, 15 bp, Homo sapiens
aagcacaaagatttg

SEQ ID NO: 1436320 - DNA, 15 bp, Homo sapiens
agcacaaagatttgg

SEQ ID NO: 1436321 - DNA, 15 bp, Homo sapiens
gcacaaagatttggg

SEQ ID NO: 1436322 - DNA, 15 bp, Homo sapiens
cacaaagatttgggc

SEQ ID NO: 1436323 - DNA, 15 bp, Homo sapiens
acaaagatttgggcc

SEQ ID NO: 1436324 - DNA, 15 bp, Homo sapiens
caaagatttgggcct

SEQ ID NO: 1436325 - DNA, 15 bp, Homo sapiens
aaagatttgggcctg

SEQ ID NO: 1436326 - DNA, 15 bp, Homo sapiens
aagatttgggcctgt

SEQ ID NO: 1436327 - DNA, 15 bp, Homo sapiens
agatttgggcctgtt

SEQ ID NO: 1436328 - DNA, 15 bp, Homo sapiens
gatttgggcctgttt

SEQ ID NO: 1436329 - DNA, 15 bp, Homo sapiens
atttgggcctgtttt

SEQ ID NO: 1436330 - DNA, 15 bp, Homo sapiens
tttgggcctgtttta

SEQ ID NO: 1436331 - DNA, 15 bp, Homo sapiens
ttgggcctgttttat

SEQ ID NO: 1436332 - DNA, 15 bp, Homo sapiens
tgggcctgttttata

SEQ ID NO: 1436333 - DNA, 15 bp, Homo sapiens
gggcctgttttataa

SEQ ID NO: 1436334 - DNA, 15 bp, Homo sapiens
ggcctgttttataat

SEQ ID NO: 1436335 - DNA, 15 bp, Homo sapiens
gcctgttttataata

SEQ ID NO: 1436336 - DNA, 15 bp, Homo sapiens
cctgttttataatat

SEQ ID NO: 1436337 - DNA, 15 bp, Homo sapiens
ctgttttataatatt

SEQ ID NO: 1436338 - DNA, 15 bp, Homo sapiens
tgttttataatattg

SEQ ID NO: 1436339 - DNA, 15 bp, Homo sapiens
gttttataatattgt

SEQ ID NO: 1436340 - DNA, 15 bp, Homo sapiens
ttttataatattgtt

SEQ ID NO: 1436341 - DNA, 15 bp, Homo sapiens
tttataatattgttg

SEQ ID NO: 1436342 - DNA, 15 bp, Homo sapiens
ttataatattgttgc

SEQ ID NO: 1436343 - DNA, 15 bp, Homo sapiens
tataatattgttgca

SEQ ID NO: 1436344 - DNA, 15 bp, Homo sapiens
ataatattgttgcat

SEQ ID NO: 1436345 - DNA, 15 bp, Homo sapiens
taatattgttgcatc

SEQ ID NO: 1436346 - DNA, 15 bp, Homo sapiens
aatattgttgcatcc

SEQ ID NO: 1436347 - DNA, 15 bp, Homo sapiens
atattgttgcatccc

SEQ ID NO: 1436348 - DNA, 15 bp, Homo sapiens
tattgttgcatcccc

SEQ ID NO: 1436349 - DNA, 15 bp, Homo sapiens
attgttgcatcccca

SEQ ID NO: 1436350 - DNA, 15 bp, Homo sapiens
ttgttgcatccccag

SEQ ID NO: 1436351 - DNA, 15 bp, Homo sapiens
tgttgcatccccagg

SEQ ID NO: 1436352 - DNA, 15 bp, Homo sapiens
gttgcatccccaggg

SEQ ID NO: 1436353 - DNA, 15 bp, Homo sapiens
ttgcatccccagggc

SEQ ID NO: 1436354 - DNA, 15 bp, Homo sapiens
tgcatccccagggcc

SEQ ID NO: 1436355 - DNA, 15 bp, Homo sapiens
gcatccccagggcct

SEQ ID NO: 1436356 - DNA, 15 bp, Homo sapiens
catccccagggcctg

SEQ ID NO: 1436357 - DNA, 15 bp, Homo sapiens
atccccagggcctga

SEQ ID NO: 1436358 - DNA, 15 bp, Homo sapiens
tccccagggcctgat

SEQ ID NO: 1436359 - DNA, 15 bp, Homo sapiens
ccccagggcctgata

SEQ ID NO: 1436360 - DNA, 15 bp, Homo sapiens
cccagggcctgatat

SEQ ID NO: 1436361 - DNA, 15 bp, Homo sapiens
ccagggcctgatata

SEQ ID NO: 1436362 - DNA, 15 bp, Homo sapiens
cagggcctgatatac

SEQ ID NO: 1436363 - DNA, 15 bp, Homo sapiens
agggcctgatataca

SEQ ID NO: 1436364 - DNA, 15 bp, Homo sapiens
gggcctgatatacag

SEQ ID NO: 1436365 - DNA, 15 bp, Homo sapiens
ggcctgatatacagc

SEQ ID NO: 1436366 - DNA, 15 bp, Homo sapiens
gcctgatatacagca

SEQ ID NO: 1436367 - DNA, 15 bp, Homo sapiens
cctgatatacagcag

SEQ ID NO: 1436368 - DNA, 15 bp, Homo sapiens
ctgatatacagcaga

SEQ ID NO: 1436369 - DNA, 15 bp, Homo sapiens
tgatatacagcagag

SEQ ID NO: 1436370 - DNA, 15 bp, Homo sapiens
gatatacagcagagt

SEQ ID NO: 1436371 - DNA, 15 bp, Homo sapiens
atatacagcagagtg

SEQ ID NO: 1436372 - DNA, 15 bp, Homo sapiens
tatacagcagagtgg

SEQ ID NO: 1436373 - DNA, 15 bp, Homo sapiens
atacagcagagtggt

SEQ ID NO: 1436374 - DNA, 15 bp, Homo sapiens
tacagcagagtggtg

SEQ ID NO: 1436375 - DNA, 15 bp, Homo sapiens
acagcagagtggtgg

SEQ ID NO: 1436376 - DNA, 15 bp, Homo sapiens
cagcagagtggtggt

SEQ ID NO: 1436377 - DNA, 15 bp, Homo sapiens
agcagagtggtggta

SEQ ID NO: 1436378 - DNA, 15 bp, Homo sapiens
gcagagtggtggtac

SEQ ID NO: 1436379 - DNA, 15 bp, Homo sapiens
cagagtggtggtacg

SEQ ID NO: 1436380 - DNA, 15 bp, Homo sapiens
agagtggtggtacga

SEQ ID NO: 1436381 - DNA, 15 bp, Homo sapiens
gagtggtggtacgaa

SEQ ID NO: 1436382 - DNA, 15 bp, Homo sapiens
agtggtggtacgaaa

SEQ ID NO: 1436383 - DNA, 15 bp, Homo sapiens
gtggtggtacgaaaa

SEQ ID NO: 1436384 - DNA, 15 bp, Homo sapiens
tggtggtacgaaaag

SEQ ID NO: 1436385 - DNA, 15 bp, Homo sapiens
ggtggtacgaaaaga

SEQ ID NO: 1436386 - DNA, 15 bp, Homo sapiens
gtggtacgaaaagag

SEQ ID NO: 1436387 - DNA, 15 bp, Homo sapiens
tggtacgaaaagagc

SEQ ID NO: 1436388 - DNA, 15 bp, Homo sapiens
ggtacgaaaagagca

SEQ ID NO: 1436389 - DNA, 15 bp, Homo sapiens
gtacgaaaagagcac

SEQ ID NO: 1436390 - DNA, 15 bp, Homo sapiens
tacgaaaagagcaca

SEQ ID NO: 1436391 - DNA, 15 bp, Homo sapiens
acgaaaagagcacac

SEQ ID NO: 1436392 - DNA, 15 bp, Homo sapiens
cgaaaagagcacaca

SEQ ID NO: 1436393 - DNA, 15 bp, Homo sapiens
gaaaagagcacacaa

SEQ ID NO: 1436394 - DNA, 15 bp, Homo sapiens
aaaagagcacacaaa

SEQ ID NO: 1436395 - DNA, 15 bp, Homo sapiens
aaagagcacacaaaa

SEQ ID NO: 1436396 - DNA, 15 bp, Homo sapiens
aagagcacacaaaaa

SEQ ID NO: 1436397 - DNA, 15 bp, Homo sapiens
agagcacacaaaaaa

SEQ ID NO: 1436398 - DNA, 15 bp, Homo sapiens
gagcacacaaaaaaa

SEQ ID NO: 1436399 - DNA, 15 bp, Homo sapiens
agcacacaaaaaaat

SEQ ID NO: 1436400 - DNA, 15 bp, Homo sapiens
gcacacaaaaaaata

SEQ ID NO: 1436401 - DNA, 15 bp, Homo sapiens
cacacaaaaaaatat

SEQ ID NO: 1436402 - DNA, 15 bp, Homo sapiens
acacaaaaaaatatt

SEQ ID NO: 1436403 - DNA, 15 bp, Homo sapiens
cacaaaaaaatattt

SEQ ID NO: 1436404 - DNA, 15 bp, Homo sapiens
acaaaaaaatatttg

SEQ ID NO: 1436405 - DNA, 15 bp, Homo sapiens
caaaaaaatatttgt

SEQ ID NO: 1436406 - DNA, 15 bp, Homo sapiens
aaaaaaatatttgtt

SEQ ID NO: 1436407 - DNA, 15 bp, Homo sapiens
aaaaaatatttgttg

SEQ ID NO: 1436408 - DNA, 15 bp, Homo sapiens
aaaaatatttgttga

SEQ ID NO: 1436409 - DNA, 15 bp, Homo sapiens
aaaatatttgttgag

SEQ ID NO: 1436410 - DNA, 15 bp, Homo sapiens
aaatatttgttgagt

SEQ ID NO: 1436411 - DNA, 15 bp, Homo sapiens
aatatttgttgagtc

SEQ ID NO: 1436412 - DNA, 15 bp, Homo sapiens
atatttgttgagtca

SEQ ID NO: 1436413 - DNA, 15 bp, Homo sapiens
tatttgttgagtcaa

SEQ ID NO: 1436414 - DNA, 15 bp, Homo sapiens
atttgttgagtcaat

SEQ ID NO: 1436415 - DNA, 15 bp, Homo sapiens
tttgttgagtcaatg

SEQ ID NO: 1436416 - DNA, 15 bp, Homo sapiens
ttgttgagtcaatga

SEQ ID NO: 1436417 - DNA, 15 bp, Homo sapiens
tgttgagtcaatgaa

SEQ ID NO: 1436418 - DNA, 15 bp, Homo sapiens
gttgagtcaatgaat

SEQ ID NO: 1436419 - DNA, 15 bp, Homo sapiens
ttgagtcaatgaatg

SEQ ID NO: 1436420 - DNA, 15 bp, Homo sapiens
tgagtcaatgaatga

SEQ ID NO: 1436421 - DNA, 15 bp, Homo sapiens
gagtcaatgaatgaa

SEQ ID NO: 1436422 - DNA, 15 bp, Homo sapiens
agtcaatgaatgaat

SEQ ID NO: 1436423 - DNA, 15 bp, Homo sapiens
gtcaatgaatgaatg

SEQ ID NO: 1436424 - DNA, 15 bp, Homo sapiens
tcaatgaatgaatga

SEQ ID NO: 1436425 - DNA, 15 bp, Homo sapiens
caatgaatgaatgat

SEQ ID NO: 1436426 - DNA, 15 bp, Homo sapiens
atgaatgaatgattt

SEQ ID NO: 1436427 - DNA, 15 bp, Homo sapiens
tgaatgaatgatttc

SEQ ID NO: 1436428 - DNA, 15 bp, Homo sapiens
gaatgaatgatttcc

SEQ ID NO: 1436429 - DNA, 15 bp, Homo sapiens
aatgaatgatttcct

SEQ ID NO: 1436430 - DNA, 15 bp, Homo sapiens
atgaatgatttcctc

SEQ ID NO: 1436431 - DNA, 15 bp, Homo sapiens
tgaatgatttcctca

SEQ ID NO: 1436432 - DNA, 15 bp, Homo sapiens
gaatgatttcctcaa

SEQ ID NO: 1436433 - DNA, 15 bp, Homo sapiens
aatgatttcctcaaa

SEQ ID NO: 1436434 - DNA, 15 bp, Homo sapiens
atgatttcctcaaat

SEQ ID NO: 1436435 - DNA, 15 bp, Homo sapiens
tgatttcctcaaata

SEQ ID NO: 1436436 - DNA, 15 bp, Homo sapiens
gatttcctcaaatag

SEQ ID NO: 1436437 - DNA, 15 bp, Homo sapiens
atttcctcaaatagg

SEQ ID NO: 1436438 - DNA, 15 bp, Homo sapiens
tttcctcaaatagga

SEQ ID NO: 1436439 - DNA, 15 bp, Homo sapiens
ttcctcaaataggat

SEQ ID NO: 1436440 - DNA, 15 bp, Homo sapiens
tcctcaaataggatt

SEQ ID NO: 1436441 - DNA, 15 bp, Homo sapiens
cctcaaataggatta

SEQ ID NO: 1436442 - DNA, 15 bp, Homo sapiens
ctcaaataggattag

SEQ ID NO: 1436443 - DNA, 15 bp, Homo sapiens
tcaaataggattagc

SEQ ID NO: 1436444 - DNA, 15 bp, Homo sapiens
caaataggattagcc

SEQ ID NO: 1436445 - DNA, 15 bp, Homo sapiens
aaataggattagcct

SEQ ID NO: 1436446 - DNA, 15 bp, Homo sapiens
aataggattagccta

SEQ ID NO: 1436447 - DNA, 15 bp, Homo sapiens
ataggattagcctaa

SEQ ID NO: 1436448 - DNA, 15 bp, Homo sapiens
taggattagcctaaa

SEQ ID NO: 1436449 - DNA, 15 bp, Homo sapiens
aggattagcctaaaa

SEQ ID NO: 1436450 - DNA, 15 bp, Homo sapiens
ggattagcctaaaat

SEQ ID NO: 1436451 - DNA, 15 bp, Homo sapiens
gattagcctaaaatt

SEQ ID NO: 1436452 - DNA, 15 bp, Homo sapiens
attagcctaaaattt

SEQ ID NO: 1436453 - DNA, 15 bp, Homo sapiens
ttagcctaaaatttt

SEQ ID NO: 1436454 - DNA, 15 bp, Homo sapiens
tagcctaaaattttg

SEQ ID NO: 1436455 - DNA, 15 bp, Homo sapiens
agcctaaaattttgg

SEQ ID NO: 1436456 - DNA, 15 bp, Homo sapiens
gcctaaaattttgga

SEQ ID NO: 1436457 - DNA, 15 bp, Homo sapiens
cctaaaattttggaa

SEQ ID NO: 1436458 - DNA, 15 bp, Homo sapiens
ctaaaattttggaaa

SEQ ID NO: 1436459 - DNA, 15 bp, Homo sapiens
taaaattttggaaac

SEQ ID NO: 1436460 - DNA, 15 bp, Homo sapiens
aaaattttggaaaca

SEQ ID NO: 1436461 - DNA, 15 bp, Homo sapiens
aaattttggaaacat

SEQ ID NO: 1436462 - DNA, 15 bp, Homo sapiens
aattttggaaacatg

SEQ ID NO: 1436463 - DNA, 15 bp, Homo sapiens
attttggaaacatga

SEQ ID NO: 1436464 - DNA, 15 bp, Homo sapiens
ttttggaaacatgaa

SEQ ID NO: 1436465 - DNA, 15 bp, Homo sapiens
tttggaaacatgaac

SEQ ID NO: 1436466 - DNA, 15 bp, Homo sapiens
ttggaaacatgaaca

SEQ ID NO: 1436467 - DNA, 15 bp, Homo sapiens
tggaaacatgaacag

SEQ ID NO: 1436468 - DNA, 15 bp, Homo sapiens
ggaaacatgaacaga

SEQ ID NO: 1436469 - DNA, 15 bp, Homo sapiens
gaaacatgaacagat

SEQ ID NO: 1436470 - DNA, 15 bp, Homo sapiens
aaacatgaacagatt

SEQ ID NO: 1436471 - DNA, 15 bp, Homo sapiens
aacatgaacagattt

SEQ ID NO: 1436472 - DNA, 15 bp, Homo sapiens
acatgaacagatttg

SEQ ID NO: 1436473 - DNA, 15 bp, Homo sapiens
catgaacagatttgg

SEQ ID NO: 1436474 - DNA, 15 bp, Homo sapiens
atgaacagatttgga

SEQ ID NO: 1436475 - DNA, 15 bp, Homo sapiens
tgaacagatttggat

SEQ ID NO: 1436476 - DNA, 15 bp, Homo sapiens
gaacagatttggata

SEQ ID NO: 1436477 - DNA, 15 bp, Homo sapiens
aacagatttggatat

SEQ ID NO: 1436478 - DNA, 15 bp, Homo sapiens
acagatttggatatg

SEQ ID NO: 1436479 - DNA, 15 bp, Homo sapiens
cagatttggatatgt

SEQ ID NO: 1436480 - DNA, 15 bp, Homo sapiens
agatttggatatgtg

SEQ ID NO: 1436481 - DNA, 15 bp, Homo sapiens
gatttggatatgtga

SEQ ID NO: 1436482 - DNA, 15 bp, Homo sapiens
atttggatatgtgaa

SEQ ID NO: 1436483 - DNA, 15 bp, Homo sapiens
tttggatatgtgaaa

SEQ ID NO: 1436484 - DNA, 15 bp, Homo sapiens
ttggatatgtgaaaa

SEQ ID NO: 1436485 - DNA, 15 bp, Homo sapiens
tggatatgtgaaaat

SEQ ID NO: 1436486 - DNA, 15 bp, Homo sapiens
ggatatgtgaaaatt

SEQ ID NO: 1436487 - DNA, 15 bp, Homo sapiens
gatatgtgaaaattt

SEQ ID NO: 1436488 - DNA, 15 bp, Homo sapiens
atatgtgaaaattta

SEQ ID NO: 1436489 - DNA, 15 bp, Homo sapiens
tatgtgaaaatttat

SEQ ID NO: 1436490 - DNA, 15 bp, Homo sapiens
atgtgaaaatttatt

SEQ ID NO: 1436491 - DNA, 15 bp, Homo sapiens
tgtgaaaatttattt

SEQ ID NO: 1436492 - DNA, 15 bp, Homo sapiens
gtgaaaatttatttc

SEQ ID NO: 1436493 - DNA, 15 bp, Homo sapiens
tgaaaatttatttcc

SEQ ID NO: 1436494 - DNA, 15 bp, Homo sapiens
gaaaatttatttcca

SEQ ID NO: 1436495 - DNA, 15 bp, Homo sapiens
aaaatttatttccag

SEQ ID NO: 1436496 - DNA, 15 bp, Homo sapiens
aaatttatttccaga

SEQ ID NO: 1436497 - DNA, 15 bp, Homo sapiens
aatttatttccagac

SEQ ID NO: 1436498 - DNA, 15 bp, Homo sapiens
tttatttccagactg

SEQ ID NO: 1436499 - DNA, 15 bp, Homo sapiens
ttatttccagactgt

SEQ ID NO: 1436500 - DNA, 15 bp, Homo sapiens
tatttccagactgtt

SEQ ID NO: 1436501 - DNA, 15 bp, Homo sapiens
atttccagactgttc

SEQ ID NO: 1436502 - DNA, 15 bp, Homo sapiens
tttccagactgttca

SEQ ID NO: 1436503 - DNA, 15 bp, Homo sapiens
ttccagactgttcat

SEQ ID NO: 1436504 - DNA, 15 bp, Homo sapiens
tccagactgttcatc

SEQ ID NO: 1436505 - DNA, 15 bp, Homo sapiens
ccagactgttcatca

SEQ ID NO: 1436506 - DNA, 15 bp, Homo sapiens
cagactgttcatcag

SEQ ID NO: 1436507 - DNA, 15 bp, Homo sapiens
agactgttcatcagg

SEQ ID NO: 1436508 - DNA, 15 bp, Homo sapiens
gactgttcatcagga

SEQ ID NO: 1436509 - DNA, 15 bp, Homo sapiens
actgttcatcaggaa

SEQ ID NO: 1436510 - DNA, 15 bp, Homo sapiens
ctgttcatcaggaac

SEQ ID NO: 1436511 - DNA, 15 bp, Homo sapiens
tgttcatcaggaact

SEQ ID NO: 1436512 - DNA, 15 bp, Homo sapiens
gttcatcaggaactg

SEQ ID NO: 1436513 - DNA, 15 bp, Homo sapiens
ttcatcaggaactgt

SEQ ID NO: 1436514 - DNA, 15 bp, Homo sapiens
tcatcaggaactgtt

SEQ ID NO: 1436515 - DNA, 15 bp, Homo sapiens
catcaggaactgtta

SEQ ID NO: 1436516 - DNA, 15 bp, Homo sapiens
atcaggaactgttag

SEQ ID NO: 1436517 - DNA, 15 bp, Homo sapiens
tcaggaactgttagc

SEQ ID NO: 1436518 - DNA, 15 bp, Homo sapiens
caggaactgttagca

SEQ ID NO: 1436519 - DNA, 15 bp, Homo sapiens
aggaactgttagcag

SEQ ID NO: 1436520 - DNA, 15 bp, Homo sapiens
ggaactgttagcagc

SEQ ID NO: 1436521 - DNA, 15 bp, Homo sapiens
gaactgttagcagct

SEQ ID NO: 1436522 - DNA, 15 bp, Homo sapiens
aactgttagcagctt

SEQ ID NO: 1436523 - DNA, 15 bp, Homo sapiens
actgttagcagcttc

SEQ ID NO: 1436524 - DNA, 15 bp, Homo sapiens
ctgttagcagcttct

SEQ ID NO: 1436525 - DNA, 15 bp, Homo sapiens
tgttagcagcttcta

SEQ ID NO: 1436526 - DNA, 15 bp, Homo sapiens
gttagcagcttctaa

SEQ ID NO: 1436527 - DNA, 15 bp, Homo sapiens
ttagcagcttctaaa

SEQ ID NO: 1436528 - DNA, 15 bp, Homo sapiens
tagcagcttctaaag

SEQ ID NO: 1436529 - DNA, 15 bp, Homo sapiens
agcagcttctaaagg

SEQ ID NO: 1436530 - DNA, 15 bp, Homo sapiens
gcagcttctaaaggg

SEQ ID NO: 1436531 - DNA, 15 bp, Homo sapiens
cagcttctaaagggt

SEQ ID NO: 1436532 - DNA, 15 bp, Homo sapiens
agcttctaaagggta

SEQ ID NO: 1436533 - DNA, 15 bp, Homo sapiens
gcttctaaagggtac

SEQ ID NO: 1436534 - DNA, 15 bp, Homo sapiens
cttctaaagggtaca

SEQ ID NO: 1436535 - DNA, 15 bp, Homo sapiens
ttctaaagggtacac

SEQ ID NO: 1436536 - DNA, 15 bp, Homo sapiens
tctaaagggtacact

SEQ ID NO: 1436537 - DNA, 15 bp, Homo sapiens
ctaaagggtacactg

SEQ ID NO: 1436538 - DNA, 15 bp, Homo sapiens
taaagggtacactgg

SEQ ID NO: 1436539 - DNA, 15 bp, Homo sapiens
aaagggtacactgga

SEQ ID NO: 1436540 - DNA, 15 bp, Homo sapiens
aagggtacactggag

SEQ ID NO: 1436541 - DNA, 15 bp, Homo sapiens
agggtacactggagc

SEQ ID NO: 1436542 - DNA, 15 bp, Homo sapiens
gggtacactggagca

SEQ ID NO: 1436543 - DNA, 15 bp, Homo sapiens
ggtacactggagcag

SEQ ID NO: 1436544 - DNA, 15 bp, Homo sapiens
gtacactggagcagc

SEQ ID NO: 1436545 - DNA, 15 bp, Homo sapiens
tacactggagcagca

SEQ ID NO: 1436546 - DNA, 15 bp, Homo sapiens
acactggagcagcag

SEQ ID NO: 1436547 - DNA, 15 bp, Homo sapiens
cactggagcagcagt

SEQ ID NO: 1436548 - DNA, 15 bp, Homo sapiens
actggagcagcagta

SEQ ID NO: 1436549 - DNA, 15 bp, Homo sapiens
ctggagcagcagtag

SEQ ID NO: 1436550 - DNA, 15 bp, Homo sapiens
tggagcagcagtagt

SEQ ID NO: 1436551 - DNA, 15 bp, Homo sapiens
ggagcagcagtagta

SEQ ID NO: 1436552 - DNA, 15 bp, Homo sapiens
gagcagcagtagtaa

SEQ ID NO: 1436553 - DNA, 15 bp, Homo sapiens
agcagcagtagtaaa

SEQ ID NO: 1436554 - DNA, 15 bp, Homo sapiens
gcagcagtagtaaaa

SEQ ID NO: 1436555 - DNA, 15 bp, Homo sapiens
cagcagtagtaaaag

SEQ ID NO: 1436556 - DNA, 15 bp, Homo sapiens
agcagtagtaaaagg

SEQ ID NO: 1436557 - DNA, 15 bp, Homo sapiens
gcagtagtaaaagga

SEQ ID NO: 1436558 - DNA, 15 bp, Homo sapiens
cagtagtaaaaggag

SEQ ID NO: 1436559 - DNA, 15 bp, Homo sapiens
agtagtaaaaggagg

SEQ ID NO: 1436560 - DNA, 15 bp, Homo sapiens
gtagtaaaaggagga

SEQ ID NO: 1436561 - DNA, 15 bp, Homo sapiens
tagtaaaaggaggaa

SEQ ID NO: 1436562 - DNA, 15 bp, Homo sapiens
agtaaaaggaggaag

SEQ ID NO: 1436563 - DNA, 15 bp, Homo sapiens
gtaaaaggaggaaga

SEQ ID NO: 1436564 - DNA, 15 bp, Homo sapiens
taaaaggaggaagag

SEQ ID NO: 1436565 - DNA, 15 bp, Homo sapiens
aaaaggaggaagagg

SEQ ID NO: 1436566 - DNA, 15 bp, Homo sapiens
aaaggaggaagagga

SEQ ID NO: 1436567 - DNA, 15 bp, Homo sapiens
aaggaggaagaggag

SEQ ID NO: 1436568 - DNA, 15 bp, Homo sapiens
aggaggaagaggagc

SEQ ID NO: 1436569 - DNA, 15 bp, Homo sapiens
ggaggaagaggagca

SEQ ID NO: 1436570 - DNA, 15 bp, Homo sapiens
gaggaagaggagcag

SEQ ID NO: 1436571 - DNA, 15 bp, Homo sapiens
aggaagaggagcagc

SEQ ID NO: 1436572 - DNA, 15 bp, Homo sapiens
ggaagaggagcagct

SEQ ID NO: 1436573 - DNA, 15 bp, Homo sapiens
gaagaggagcagctc

SEQ ID NO: 1436574 - DNA, 15 bp, Homo sapiens
aagaggagcagctct

SEQ ID NO: 1436575 - DNA, 15 bp, Homo sapiens
agaggagcagctctg

SEQ ID NO: 1436576 - DNA, 15 bp, Homo sapiens
gaggagcagctctgc

SEQ ID NO: 1436577 - DNA, 15 bp, Homo sapiens
aggagcagctctgct

SEQ ID NO: 1436578 - DNA, 15 bp, Homo sapiens
ggagcagctctgcta

SEQ ID NO: 1436579 - DNA, 15 bp, Homo sapiens
gagcagctctgctac

SEQ ID NO: 1436580 - DNA, 15 bp, Homo sapiens
agcagctctgctact

SEQ ID NO: 1436581 - DNA, 15 bp, Homo sapiens
gcagctctgctactg

SEQ ID NO: 1436582 - DNA, 15 bp, Homo sapiens
cagctctgctactgc

SEQ ID NO: 1436583 - DNA, 15 bp, Homo sapiens
agctctgctactgct

SEQ ID NO: 1436584 - DNA, 15 bp, Homo sapiens
gctctgctactgcta

SEQ ID NO: 1436585 - DNA, 15 bp, Homo sapiens
ctctgctactgctac

SEQ ID NO: 1436586 - DNA, 15 bp, Homo sapiens
tctgctactgctact

SEQ ID NO: 1436587 - DNA, 15 bp, Homo sapiens
ctgctactgctacta

SEQ ID NO: 1436588 - DNA, 15 bp, Homo sapiens
tgctactgctactat

SEQ ID NO: 1436589 - DNA, 15 bp, Homo sapiens
gctactgctactatc

SEQ ID NO: 1436590 - DNA, 15 bp, Homo sapiens
ctactgctactatcg

SEQ ID NO: 1436591 - DNA, 15 bp, Homo sapiens
tactgctactatcga

SEQ ID NO: 1436592 - DNA, 15 bp, Homo sapiens
actgctactatcgag

SEQ ID NO: 1436593 - DNA, 15 bp, Homo sapiens
ctgctactatcgagt

SEQ ID NO: 1436594 - DNA, 15 bp, Homo sapiens
tgctactatcgagta

SEQ ID NO: 1436595 - DNA, 15 bp, Homo sapiens
gctactatcgagtac

SEQ ID NO: 1436596 - DNA, 15 bp, Homo sapiens
ctactatcgagtact

SEQ ID NO: 1436597 - DNA, 15 bp, Homo sapiens
tactatcgagtacta

SEQ ID NO: 1436598 - DNA, 15 bp, Homo sapiens
actatcgagtactac

SEQ ID NO: 1436599 - DNA, 15 bp, Homo sapiens
ctatcgagtactact

SEQ ID NO: 1436600 - DNA, 15 bp, Homo sapiens
tatcgagtactacta

SEQ ID NO: 1436601 - DNA, 15 bp, Homo sapiens
atcgagtactactac

SEQ ID NO: 1436602 - DNA, 15 bp, Homo sapiens
tcgagtactactaca

SEQ ID NO: 1436603 - DNA, 15 bp, Homo sapiens
cgagtactactacaa

SEQ ID NO: 1436604 - DNA, 15 bp, Homo sapiens
gagtactactacaat

SEQ ID NO: 1436605 - DNA, 15 bp, Homo sapiens
agtactactacaatt

SEQ ID NO: 1436606 - DNA, 15 bp, Homo sapiens
gtactactacaatta

SEQ ID NO: 1436607 - DNA, 15 bp, Homo sapiens
tactactacaattag

SEQ ID NO: 1436608 - DNA, 15 bp, Homo sapiens
actactacaattagc

SEQ ID NO: 1436609 - DNA, 15 bp, Homo sapiens
ctactacaattagca

SEQ ID NO: 1436610 - DNA, 15 bp, Homo sapiens
tactacaattagcac

SEQ ID NO: 1436611 - DNA, 15 bp, Homo sapiens
actacaattagcact

SEQ ID NO: 1436612 - DNA, 15 bp, Homo sapiens
ctacaattagcactt

SEQ ID NO: 1436613 - DNA, 15 bp, Homo sapiens
tacaattagcacttg

SEQ ID NO: 1436614 - DNA, 15 bp, Homo sapiens
acaattagcacttgc

SEQ ID NO: 1436615 - DNA, 15 bp, Homo sapiens
caattagcacttgct

SEQ ID NO: 1436616 - DNA, 15 bp, Homo sapiens
aattagcacttgctt

SEQ ID NO: 1436617 - DNA, 15 bp, Homo sapiens
attagcacttgctta

SEQ ID NO: 1436618 - DNA, 15 bp, Homo sapiens
ttagcacttgcttat

SEQ ID NO: 1436619 - DNA, 15 bp, Homo sapiens
tagcacttgcttatt

SEQ ID NO: 1436620 - DNA, 15 bp, Homo sapiens
agcacttgcttattc

SEQ ID NO: 1436621 - DNA, 15 bp, Homo sapiens
gcacttgcttattct

SEQ ID NO: 1436622 - DNA, 15 bp, Homo sapiens
cacttgcttattctg

SEQ ID NO: 1436623 - DNA, 15 bp, Homo sapiens
acttgcttattctgt

SEQ ID NO: 1436624 - DNA, 15 bp, Homo sapiens
cttgcttattctgtg

SEQ ID NO: 1436625 - DNA, 15 bp, Homo sapiens
ttgcttattctgtgt

SEQ ID NO: 1436626 - DNA, 15 bp, Homo sapiens
tgcttattctgtgtg

SEQ ID NO: 1436627 - DNA, 15 bp, Homo sapiens
gcttattctgtgtgt

SEQ ID NO: 1436628 - DNA, 15 bp, Homo sapiens
cttattctgtgtgtt

SEQ ID NO: 1436629 - DNA, 15 bp, Homo sapiens
ttattctgtgtgtta

SEQ ID NO: 1436630 - DNA, 15 bp, Homo sapiens
tattctgtgtgttag

SEQ ID NO: 1436631 - DNA, 15 bp, Homo sapiens
attctgtgtgttagg

SEQ ID NO: 1436632 - DNA, 15 bp, Homo sapiens
ttctgtgtgttaggc

SEQ ID NO: 1436633 - DNA, 15 bp, Homo sapiens
tctgtgtgttaggcc

SEQ ID NO: 1436634 - DNA, 15 bp, Homo sapiens
ctgtgtgttaggccc

SEQ ID NO: 1436635 - DNA, 15 bp, Homo sapiens
tgtgtgttaggccct

SEQ ID NO: 1436636 - DNA, 15 bp, Homo sapiens
gtgtgttaggccctg

SEQ ID NO: 1436637 - DNA, 15 bp, Homo sapiens
tgtgttaggccctgt

SEQ ID NO: 1436638 - DNA, 15 bp, Homo sapiens
gtgttaggccctgta

SEQ ID NO: 1436639 - DNA, 15 bp, Homo sapiens
tgttaggccctgtac

SEQ ID NO: 1436640 - DNA, 15 bp, Homo sapiens
gttaggccctgtact

SEQ ID NO: 1436641 - DNA, 15 bp, Homo sapiens
ttaggccctgtactg

SEQ ID NO: 1436642 - DNA, 15 bp, Homo sapiens
taggccctgtactga

SEQ ID NO: 1436643 - DNA, 15 bp, Homo sapiens
aggccctgtactgaa

SEQ ID NO: 1436644 - DNA, 15 bp, Homo sapiens
ggccctgtactgaac

SEQ ID NO: 1436645 - DNA, 15 bp, Homo sapiens
gccctgtactgaaca

SEQ ID NO: 1436646 - DNA, 15 bp, Homo sapiens
ccctgtactgaacac

SEQ ID NO: 1436647 - DNA, 15 bp, Homo sapiens
cctgtactgaacact

SEQ ID NO: 1436648 - DNA, 15 bp, Homo sapiens
ctgtactgaacactc

SEQ ID NO: 1436649 - DNA, 15 bp, Homo sapiens
tgtactgaacactct

SEQ ID NO: 1436650 - DNA, 15 bp, Homo sapiens
gtactgaacactctg

SEQ ID NO: 1436651 - DNA, 15 bp, Homo sapiens
tactgaacactctgt

SEQ ID NO: 1436652 - DNA, 15 bp, Homo sapiens
actgaacactctgtc

SEQ ID NO: 1436653 - DNA, 15 bp, Homo sapiens
ctgaacactctgtct

SEQ ID NO: 1436654 - DNA, 15 bp, Homo sapiens
tgaacactctgtcta

SEQ ID NO: 1436655 - DNA, 15 bp, Homo sapiens
gaacactctgtctaa

SEQ ID NO: 1436656 - DNA, 15 bp, Homo sapiens
aacactctgtctaaa

SEQ ID NO: 1436657 - DNA, 15 bp, Homo sapiens
acactctgtctaaat

SEQ ID NO: 1436658 - DNA, 15 bp, Homo sapiens
cactctgtctaaatt

SEQ ID NO: 1436659 - DNA, 15 bp, Homo sapiens
actctgtctaaatta

SEQ ID NO: 1436660 - DNA, 15 bp, Homo sapiens
ctctgtctaaattag

SEQ ID NO: 1436661 - DNA, 15 bp, Homo sapiens
tctgtctaaattagt

SEQ ID NO: 1436662 - DNA, 15 bp, Homo sapiens
ctgtctaaattagtt

SEQ ID NO: 1436663 - DNA, 15 bp, Homo sapiens
tgtctaaattagttc

SEQ ID NO: 1436664 - DNA, 15 bp, Homo sapiens
gtctaaattagttca

SEQ ID NO: 1436665 - DNA, 15 bp, Homo sapiens
tctaaattagttcat

SEQ ID NO: 1436666 - DNA, 15 bp, Homo sapiens
ctaaattagttcatt

SEQ ID NO: 1436667 - DNA, 15 bp, Homo sapiens
taaattagttcattt

SEQ ID NO: 1436668 - DNA, 15 bp, Homo sapiens
aaattagttcatttc

SEQ ID NO: 1436669 - DNA, 15 bp, Homo sapiens
aattagttcatttcc

SEQ ID NO: 1436670 - DNA, 15 bp, Homo sapiens
attagttcatttcct

SEQ ID NO: 1436671 - DNA, 15 bp, Homo sapiens
ttagttcatttcctc

SEQ ID NO: 1436672 - DNA, 15 bp, Homo sapiens
tagttcatttcctcc

SEQ ID NO: 1436673 - DNA, 15 bp, Homo sapiens
agttcatttcctcct

SEQ ID NO: 1436674 - DNA, 15 bp, Homo sapiens
gttcatttcctcctg

SEQ ID NO: 1436675 - DNA, 15 bp, Homo sapiens
ttcatttcctcctgg

SEQ ID NO: 1436676 - DNA, 15 bp, Homo sapiens
tcatttcctcctgga

SEQ ID NO: 1436677 - DNA, 15 bp, Homo sapiens
catttcctcctggaa

SEQ ID NO: 1436678 - DNA, 15 bp, Homo sapiens
atttcctcctggaaa

SEQ ID NO: 1436679 - DNA, 15 bp, Homo sapiens
tttcctcctggaaat

SEQ ID NO: 1436680 - DNA, 15 bp, Homo sapiens
ttcctcctggaaatg

SEQ ID NO: 1436681 - DNA, 15 bp, Homo sapiens
tcctcctggaaatga

SEQ ID NO: 1436682 - DNA, 15 bp, Homo sapiens
cctcctggaaatgac

SEQ ID NO: 1436683 - DNA, 15 bp, Homo sapiens
ctcctggaaatgact

SEQ ID NO: 1436684 - DNA, 15 bp, Homo sapiens
tcctggaaatgactc

SEQ ID NO: 1436685 - DNA, 15 bp, Homo sapiens
cctggaaatgactct

SEQ ID NO: 1436686 - DNA, 15 bp, Homo sapiens
ctggaaatgactcta

SEQ ID NO: 1436687 - DNA, 15 bp, Homo sapiens
tggaaatgactctag

SEQ ID NO: 1436688 - DNA, 15 bp, Homo sapiens
ggaaatgactctagg

SEQ ID NO: 1436689 - DNA, 15 bp, Homo sapiens
gaaatgactctaggg

SEQ ID NO: 1436690 - DNA, 15 bp, Homo sapiens
aaatgactctagggg

SEQ ID NO: 1436691 - DNA, 15 bp, Homo sapiens
aatgactctaggggg

SEQ ID NO: 1436692 - DNA, 15 bp, Homo sapiens
atgactctagggggt

SEQ ID NO: 1436693 - DNA, 15 bp, Homo sapiens
tgactctagggggta

SEQ ID NO: 1436694 - DNA, 15 bp, Homo sapiens
gactctagggggtaa

SEQ ID NO: 1436695 - DNA, 15 bp, Homo sapiens
actctagggggtaag

SEQ ID NO: 1436696 - DNA, 15 bp, Homo sapiens
ctctagggggtaagt

SEQ ID NO: 1436697 - DNA, 15 bp, Homo sapiens
tctagggggtaagtg

SEQ ID NO: 1436698 - DNA, 15 bp, Homo sapiens
ctagggggtaagtgc

SEQ ID NO: 1436699 - DNA, 15 bp, Homo sapiens
tagggggtaagtgct

SEQ ID NO: 1436700 - DNA, 15 bp, Homo sapiens
agggggtaagtgctt

SEQ ID NO: 1436701 - DNA, 15 bp, Homo sapiens
gggggtaagtgcttc

SEQ ID NO: 1436702 - DNA, 15 bp, Homo sapiens
ggggtaagtgcttca

SEQ ID NO: 1436703 - DNA, 15 bp, Homo sapiens
gggtaagtgcttcat

SEQ ID NO: 1436704 - DNA, 15 bp, Homo sapiens
ggtaagtgcttcatc

SEQ ID NO: 1436705 - DNA, 15 bp, Homo sapiens
gtaagtgcttcatca

SEQ ID NO: 1436706 - DNA, 15 bp, Homo sapiens
taagtgcttcatcat

SEQ ID NO: 1436707 - DNA, 15 bp, Homo sapiens
aagtgcttcatcatg

SEQ ID NO: 1436708 - DNA, 15 bp, Homo sapiens
agtgcttcatcatgt

SEQ ID NO: 1436709 - DNA, 15 bp, Homo sapiens
gtgcttcatcatgta

SEQ ID NO: 1436710 - DNA, 15 bp, Homo sapiens
tgcttcatcatgtaa

SEQ ID NO: 1436711 - DNA, 15 bp, Homo sapiens
gcttcatcatgtaag

SEQ ID NO: 1436712 - DNA, 15 bp, Homo sapiens
cttcatcatgtaaga

SEQ ID NO: 1436713 - DNA, 15 bp, Homo sapiens
ttcatcatgtaagat

SEQ ID NO: 1436714 - DNA, 15 bp, Homo sapiens
tcatcatgtaagatg

SEQ ID NO: 1436715 - DNA, 15 bp, Homo sapiens
catcatgtaagatga

SEQ ID NO: 1436716 - DNA, 15 bp, Homo sapiens
atcatgtaagatgag

SEQ ID NO: 1436717 - DNA, 15 bp, Homo sapiens
tcatgtaagatgagt

SEQ ID NO: 1436718 - DNA, 15 bp, Homo sapiens
catgtaagatgagta

SEQ ID NO: 1436719 - DNA, 15 bp, Homo sapiens
atgtaagatgagtat

SEQ ID NO: 1436720 - DNA, 15 bp, Homo sapiens
tgtaagatgagtatt

SEQ ID NO: 1436721 - DNA, 15 bp, Homo sapiens
gtaagatgagtattt

SEQ ID NO: 1436722 - DNA, 15 bp, Homo sapiens
taagatgagtatttt

SEQ ID NO: 1436723 - DNA, 15 bp, Homo sapiens
aagatgagtattttt

SEQ ID NO: 1436724 - DNA, 15 bp, Homo sapiens
agatgagtatttttc

SEQ ID NO: 1436725 - DNA, 15 bp, Homo sapiens
gatgagtatttttca

SEQ ID NO: 1436726 - DNA, 15 bp, Homo sapiens
atgagtatttttcac

SEQ ID NO: 1436727 - DNA, 15 bp, Homo sapiens
tgagtatttttcaca

SEQ ID NO: 1436728 - DNA, 15 bp, Homo sapiens
gagtatttttcacat

SEQ ID NO: 1436729 - DNA, 15 bp, Homo sapiens
agtatttttcacatt

SEQ ID NO: 1436730 - DNA, 15 bp, Homo sapiens
gtatttttcacattt

SEQ ID NO: 1436731 - DNA, 15 bp, Homo sapiens
tatttttcacatttt

SEQ ID NO: 1436732 - DNA, 15 bp, Homo sapiens
atttttcacattttg

SEQ ID NO: 1436733 - DNA, 15 bp, Homo sapiens
tttcacattttgttg

SEQ ID NO: 1436734 - DNA, 15 bp, Homo sapiens
ttcacattttgttgt

SEQ ID NO: 1436735 - DNA, 15 bp, Homo sapiens
tcacattttgttgtg

SEQ ID NO: 1436736 - DNA, 15 bp, Homo sapiens
cacattttgttgtgt

SEQ ID NO: 1436737 - DNA, 15 bp, Homo sapiens
acattttgttgtgtc

SEQ ID NO: 1436738 - DNA, 15 bp, Homo sapiens
cattttgttgtgtct

SEQ ID NO: 1436739 - DNA, 15 bp, Homo sapiens
attttgttgtgtctg

SEQ ID NO: 1436740 - DNA, 15 bp, Homo sapiens
ttttgttgtgtctga

SEQ ID NO: 1436741 - DNA, 15 bp, Homo sapiens
tttgttgtgtctgaa

SEQ ID NO: 1436742 - DNA, 15 bp, Homo sapiens
ttgttgtgtctgaaa

SEQ ID NO: 1436743 - DNA, 15 bp, Homo sapiens
tgttgtgtctgaaat

SEQ ID NO: 1436744 - DNA, 15 bp, Homo sapiens
gttgtgtctgaaatc

SEQ ID NO: 1436745 - DNA, 15 bp, Homo sapiens
ttgtgtctgaaatct

SEQ ID NO: 1436746 - DNA, 15 bp, Homo sapiens
tgtgtctgaaatctg

SEQ ID NO: 1436747 - DNA, 15 bp, Homo sapiens
gtgtctgaaatctga

SEQ ID NO: 1436748 - DNA, 15 bp, Homo sapiens
tgtctgaaatctgag

SEQ ID NO: 1436749 - DNA, 15 bp, Homo sapiens
gtctgaaatctgagt

SEQ ID NO: 1436750 - DNA, 15 bp, Homo sapiens
tctgaaatctgagtg

SEQ ID NO: 1436751 - DNA, 15 bp, Homo sapiens
ctgaaatctgagtgt

SEQ ID NO: 1436752 - DNA, 15 bp, Homo sapiens
tgaaatctgagtgtg

SEQ ID NO: 1436753 - DNA, 15 bp, Homo sapiens
gaaatctgagtgtgt

SEQ ID NO: 1436754 - DNA, 15 bp, Homo sapiens
aaatctgagtgtgtc

SEQ ID NO: 1436755 - DNA, 15 bp, Homo sapiens
aatctgagtgtgtct

SEQ ID NO: 1436756 - DNA, 15 bp, Homo sapiens
atctgagtgtgtctt

SEQ ID NO: 1436757 - DNA, 15 bp, Homo sapiens
tctgagtgtgtcttt

SEQ ID NO: 1436758 - DNA, 15 bp, Homo sapiens
ctgagtgtgtctttc

SEQ ID NO: 1436759 - DNA, 15 bp, Homo sapiens
tgagtgtgtctttca

SEQ ID NO: 1436760 - DNA, 15 bp, Homo sapiens
gagtgtgtctttcaa

SEQ ID NO: 1436761 - DNA, 15 bp, Homo sapiens
agtgtgtctttcaat

SEQ ID NO: 1436762 - DNA, 15 bp, Homo sapiens
gtgtgtctttcaatg

SEQ ID NO: 1436763 - DNA, 15 bp, Homo sapiens
tgtgtctttcaatga

SEQ ID NO: 1436764 - DNA, 15 bp, Homo sapiens
gtgtctttcaatgat

SEQ ID NO: 1436765 - DNA, 15 bp, Homo sapiens
tgtctttcaatgatg

SEQ ID NO: 1436766 - DNA, 15 bp, Homo sapiens
gtctttcaatgatgg

SEQ ID NO: 1436767 - DNA, 15 bp, Homo sapiens
tctttcaatgatgga

SEQ ID NO: 1436768 - DNA, 15 bp, Homo sapiens
ctttcaatgatggaa

SEQ ID NO: 1436769 - DNA, 15 bp, Homo sapiens
tttcaatgatggaat

SEQ ID NO: 1436770 - DNA, 15 bp, Homo sapiens
ttcaatgatggaatc

SEQ ID NO: 1436771 - DNA, 15 bp, Homo sapiens
tcaatgatggaatct

SEQ ID NO: 1436772 - DNA, 15 bp, Homo sapiens
caatgatggaatctt

SEQ ID NO: 1436773 - DNA, 15 bp, Homo sapiens
aatgatggaatcttt

SEQ ID NO: 1436774 - DNA, 15 bp, Homo sapiens
atgatggaatctttg

SEQ ID NO: 1436775 - DNA, 15 bp, Homo sapiens
tgatggaatctttga

SEQ ID NO: 1436776 - DNA, 15 bp, Homo sapiens
gatggaatctttgat

SEQ ID NO: 1436777 - DNA, 15 bp, Homo sapiens
atggaatctttgatt

SEQ ID NO: 1436778 - DNA, 15 bp, Homo sapiens
tggaatctttgattc

SEQ ID NO: 1436779 - DNA, 15 bp, Homo sapiens
ggaatctttgattcc

SEQ ID NO: 1436780 - DNA, 15 bp, Homo sapiens
gaatctttgattcca

SEQ ID NO: 1436781 - DNA, 15 bp, Homo sapiens
aatctttgattccat

SEQ ID NO: 1436782 - DNA, 15 bp, Homo sapiens
atctttgattccatg

SEQ ID NO: 1436783 - DNA, 15 bp, Homo sapiens
tctttgattccatga

SEQ ID NO: 1436784 - DNA, 15 bp, Homo sapiens
ctttgattccatgat

SEQ ID NO: 1436785 - DNA, 15 bp, Homo sapiens
tttgattccatgata

SEQ ID NO: 1436786 - DNA, 15 bp, Homo sapiens
ttgattccatgataa

SEQ ID NO: 1436787 - DNA, 15 bp, Homo sapiens
tgattccatgataag

SEQ ID NO: 1436788 - DNA, 15 bp, Homo sapiens
gattccatgataagt

SEQ ID NO: 1436789 - DNA, 15 bp, Homo sapiens
attccatgataagtg

SEQ ID NO: 1436790 - DNA, 15 bp, Homo sapiens
ttccatgataagtgg

SEQ ID NO: 1436791 - DNA, 15 bp, Homo sapiens
tccatgataagtggt

SEQ ID NO: 1436792 - DNA, 15 bp, Homo sapiens
ccatgataagtggta

SEQ ID NO: 1436793 - DNA, 15 bp, Homo sapiens
catgataagtggtat

SEQ ID NO: 1436794 - DNA, 15 bp, Homo sapiens
atgataagtggtatt

SEQ ID NO: 1436795 - DNA, 15 bp, Homo sapiens
tgataagtggtatta

SEQ ID NO: 1436796 - DNA, 15 bp, Homo sapiens
gataagtggtattat

SEQ ID NO: 1436797 - DNA, 15 bp, Homo sapiens
ataagtggtattatt

SEQ ID NO: 1436798 - DNA, 15 bp, Homo sapiens
taagtggtattattc

SEQ ID NO: 1436799 - DNA, 15 bp, Homo sapiens
aagtggtattattcc

SEQ ID NO: 1436800 - DNA, 15 bp, Homo sapiens
agtggtattattccc

SEQ ID NO: 1436801 - DNA, 15 bp, Homo sapiens
gtggtattattccca

SEQ ID NO: 1436802 - DNA, 15 bp, Homo sapiens
tggtattattcccat

SEQ ID NO: 1436803 - DNA, 15 bp, Homo sapiens
ggtattattcccatt

SEQ ID NO: 1436804 - DNA, 15 bp, Homo sapiens
gtattattcccattt

SEQ ID NO: 1436805 - DNA, 15 bp, Homo sapiens
tattattcccatttt

SEQ ID NO: 1436806 - DNA, 15 bp, Homo sapiens
attattcccatttta

SEQ ID NO: 1436807 - DNA, 15 bp, Homo sapiens
ttattcccattttaa

SEQ ID NO: 1436808 - DNA, 15 bp, Homo sapiens
tattcccattttaag

SEQ ID NO: 1436809 - DNA, 15 bp, Homo sapiens
attcccattttaagg

SEQ ID NO: 1436810 - DNA, 15 bp, Homo sapiens
ttcccattttaagga

SEQ ID NO: 1436811 - DNA, 15 bp, Homo sapiens
tcccattttaaggat

SEQ ID NO: 1436812 - DNA, 15 bp, Homo sapiens
cccattttaaggatg

SEQ ID NO: 1436813 - DNA, 15 bp, Homo sapiens
ccattttaaggatga

SEQ ID NO: 1436814 - DNA, 15 bp, Homo sapiens
cattttaaggatgag

SEQ ID NO: 1436815 - DNA, 15 bp, Homo sapiens
attttaaggatgagg

SEQ ID NO: 1436816 - DNA, 15 bp, Homo sapiens
ttttaaggatgagga

SEQ ID NO: 1436817 - DNA, 15 bp, Homo sapiens
tttaaggatgaggaa

SEQ ID NO: 1436818 - DNA, 15 bp, Homo sapiens
ttaaggatgaggaaa

SEQ ID NO: 1436819 - DNA, 15 bp, Homo sapiens
taaggatgaggaaac

SEQ ID NO: 1436820 - DNA, 15 bp, Homo sapiens
aaggatgaggaaact

SEQ ID NO: 1436821 - DNA, 15 bp, Homo sapiens
aggatgaggaaactg

SEQ ID NO: 1436822 - DNA, 15 bp, Homo sapiens
ggatgaggaaactga

SEQ ID NO: 1436823 - DNA, 15 bp, Homo sapiens
tgaggaaactgaggt

SEQ ID NO: 1436824 - DNA, 15 bp, Homo sapiens
gaggaaactgaggtc

SEQ ID NO: 1436825 - DNA, 15 bp, Homo sapiens
aggaaactgaggtcc

SEQ ID NO: 1436826 - DNA, 15 bp, Homo sapiens
ggaaactgaggtcca

SEQ ID NO: 1436827 - DNA, 15 bp, Homo sapiens
gaaactgaggtccaa

SEQ ID NO: 1436828 - DNA, 15 bp, Homo sapiens
aaactgaggtccaaa

SEQ ID NO: 1436829 - DNA, 15 bp, Homo sapiens
aactgaggtccaaag

SEQ ID NO: 1436830 - DNA, 15 bp, Homo sapiens
actgaggtccaaaga

SEQ ID NO: 1436831 - DNA, 15 bp, Homo sapiens
ctgaggtccaaagaa

SEQ ID NO: 1436832 - DNA, 15 bp, Homo sapiens
tgaggtccaaagaaa

SEQ ID NO: 1436833 - DNA, 15 bp, Homo sapiens
gaggtccaaagaaat

SEQ ID NO: 1436834 - DNA, 15 bp, Homo sapiens
aggtccaaagaaatt

SEQ ID NO: 1436835 - DNA, 15 bp, Homo sapiens
ggtccaaagaaatta

SEQ ID NO: 1436836 - DNA, 15 bp, Homo sapiens
gtccaaagaaattaa

SEQ ID NO: 1436837 - DNA, 15 bp, Homo sapiens
tccaaagaaattaag

SEQ ID NO: 1436838 - DNA, 15 bp, Homo sapiens
ccaaagaaattaagt

SEQ ID NO: 1436839 - DNA, 15 bp, Homo sapiens
caaagaaattaagta

SEQ ID NO: 1436840 - DNA, 15 bp, Homo sapiens
aaagaaattaagtaa

SEQ ID NO: 1436841 - DNA, 15 bp, Homo sapiens
aagaaattaagtaat

SEQ ID NO: 1436842 - DNA, 15 bp, Homo sapiens
agaaattaagtaatt

SEQ ID NO: 1436843 - DNA, 15 bp, Homo sapiens
gaaattaagtaattt

SEQ ID NO: 1436844 - DNA, 15 bp, Homo sapiens
aaattaagtaatttg

SEQ ID NO: 1436845 - DNA, 15 bp, Homo sapiens
aattaagtaatttgc

SEQ ID NO: 1436846 - DNA, 15 bp, Homo sapiens
attaagtaatttgcc

SEQ ID NO: 1436847 - DNA, 15 bp, Homo sapiens
ttaagtaatttgccc

SEQ ID NO: 1436848 - DNA, 15 bp, Homo sapiens
taagtaatttgccca

SEQ ID NO: 1436849 - DNA, 15 bp, Homo sapiens
aagtaatttgcccaa

SEQ ID NO: 1436850 - DNA, 15 bp, Homo sapiens
agtaatttgcccaaa

SEQ ID NO: 1436851 - DNA, 15 bp, Homo sapiens
gtaatttgcccaaat

SEQ ID NO: 1436852 - DNA, 15 bp, Homo sapiens
taatttgcccaaatt

SEQ ID NO: 1436853 - DNA, 15 bp, Homo sapiens
aatttgcccaaattc

SEQ ID NO: 1436854 - DNA, 15 bp, Homo sapiens
atttgcccaaattca

SEQ ID NO: 1436855 - DNA, 15 bp, Homo sapiens
tttgcccaaattcac

SEQ ID NO: 1436856 - DNA, 15 bp, Homo sapiens
ttgcccaaattcacc

SEQ ID NO: 1436857 - DNA, 15 bp, Homo sapiens
tgcccaaattcaccc

SEQ ID NO: 1436858 - DNA, 15 bp, Homo sapiens
gcccaaattcaccca

SEQ ID NO: 1436859 - DNA, 15 bp, Homo sapiens
cccaaattcacccag

SEQ ID NO: 1436860 - DNA, 15 bp, Homo sapiens
ccaaattcacccagc

SEQ ID NO: 1436861 - DNA, 15 bp, Homo sapiens
caaattcacccagcc

SEQ ID NO: 1436862 - DNA, 15 bp, Homo sapiens
aaattcacccagcct

SEQ ID NO: 1436863 - DNA, 15 bp, Homo sapiens
aattcacccagccta

SEQ ID NO: 1436864 - DNA, 15 bp, Homo sapiens
attcacccagcctag

SEQ ID NO: 1436865 - DNA, 15 bp, Homo sapiens
ttcacccagcctaga

SEQ ID NO: 1436866 - DNA, 15 bp, Homo sapiens
tcacccagcctagaa

SEQ ID NO: 1436867 - DNA, 15 bp, Homo sapiens
cacccagcctagaaa

SEQ ID NO: 1436868 - DNA, 15 bp, Homo sapiens
acccagcctagaaaa

SEQ ID NO: 1436869 - DNA, 15 bp, Homo sapiens
cccagcctagaaaat

SEQ ID NO: 1436870 - DNA, 15 bp, Homo sapiens
ccagcctagaaaatg

SEQ ID NO: 1436871 - DNA, 15 bp, Homo sapiens
cagcctagaaaatga

SEQ ID NO: 1436872 - DNA, 15 bp, Homo sapiens
agcctagaaaatgat

SEQ ID NO: 1436873 - DNA, 15 bp, Homo sapiens
gcctagaaaatgata

SEQ ID NO: 1436874 - DNA, 15 bp, Homo sapiens
cctagaaaatgataa

SEQ ID NO: 1436875 - DNA, 15 bp, Homo sapiens
ctagaaaatgataaa

SEQ ID NO: 1436876 - DNA, 15 bp, Homo sapiens
tagaaaatgataaag

SEQ ID NO: 1436877 - DNA, 15 bp, Homo sapiens
agaaaatgataaagc

SEQ ID NO: 1436878 - DNA, 15 bp, Homo sapiens
gaaaatgataaagct

SEQ ID NO: 1436879 - DNA, 15 bp, Homo sapiens
aaaatgataaagcta

SEQ ID NO: 1436880 - DNA, 15 bp, Homo sapiens
aaatgataaagctag

SEQ ID NO: 1436881 - DNA, 15 bp, Homo sapiens
aatgataaagctagt

SEQ ID NO: 1436882 - DNA, 15 bp, Homo sapiens
atgataaagctagtt

SEQ ID NO: 1436883 - DNA, 15 bp, Homo sapiens
tgataaagctagttc

SEQ ID NO: 1436884 - DNA, 15 bp, Homo sapiens
gataaagctagttct

SEQ ID NO: 1436885 - DNA, 15 bp, Homo sapiens
ataaagctagttcta

SEQ ID NO: 1436886 - DNA, 15 bp, Homo sapiens
taaagctagttctaa

SEQ ID NO: 1436887 - DNA, 15 bp, Homo sapiens
aaagctagttctaaa

SEQ ID NO: 1436888 - DNA, 15 bp, Homo sapiens
aagctagttctaaac

SEQ ID NO: 1436889 - DNA, 15 bp, Homo sapiens
agctagttctaaacc

SEQ ID NO: 1436890 - DNA, 15 bp, Homo sapiens
gctagttctaaaccc

SEQ ID NO: 1436891 - DNA, 15 bp, Homo sapiens
ctagttctaaaccca

SEQ ID NO: 1436892 - DNA, 15 bp, Homo sapiens
tagttctaaacccaa

SEQ ID NO: 1436893 - DNA, 15 bp, Homo sapiens
agttctaaacccaag

SEQ ID NO: 1436894 - DNA, 15 bp, Homo sapiens
gttctaaacccaagc

SEQ ID NO: 1436895 - DNA, 15 bp, Homo sapiens
ttctaaacccaagca

SEQ ID NO: 1436896 - DNA, 15 bp, Homo sapiens
tctaaacccaagcag

SEQ ID NO: 1436897 - DNA, 15 bp, Homo sapiens
ctaaacccaagcaga

SEQ ID NO: 1436898 - DNA, 15 bp, Homo sapiens
taaacccaagcagat

SEQ ID NO: 1436899 - DNA, 15 bp, Homo sapiens
aaacccaagcagatt

SEQ ID NO: 1436900 - DNA, 15 bp, Homo sapiens
aacccaagcagatta

SEQ ID NO: 1436901 - DNA, 15 bp, Homo sapiens
acccaagcagattag

SEQ ID NO: 1436902 - DNA, 15 bp, Homo sapiens
cccaagcagattagc

SEQ ID NO: 1436903 - DNA, 15 bp, Homo sapiens
ccaagcagattagct

SEQ ID NO: 1436904 - DNA, 15 bp, Homo sapiens
caagcagattagctc

SEQ ID NO: 1436905 - DNA, 15 bp, Homo sapiens
aagcagattagctct

SEQ ID NO: 1436906 - DNA, 15 bp, Homo sapiens
agcagattagctctg

SEQ ID NO: 1436907 - DNA, 15 bp, Homo sapiens
gcagattagctctga

SEQ ID NO: 1436908 - DNA, 15 bp, Homo sapiens
cagattagctctgaa

SEQ ID NO: 1436909 - DNA, 15 bp, Homo sapiens
agattagctctgaag

SEQ ID NO: 1436910 - DNA, 15 bp, Homo sapiens
gattagctctgaagt

SEQ ID NO: 1436911 - DNA, 15 bp, Homo sapiens
attagctctgaagtc

SEQ ID NO: 1436912 - DNA, 15 bp, Homo sapiens
ttagctctgaagtct

SEQ ID NO: 1436913 - DNA, 15 bp, Homo sapiens
tagctctgaagtctg

SEQ ID NO: 1436914 - DNA, 15 bp, Homo sapiens
agctctgaagtctgg

SEQ ID NO: 1436915 - DNA, 15 bp, Homo sapiens
gctctgaagtctggg

SEQ ID NO: 1436916 - DNA, 15 bp, Homo sapiens
ctctgaagtctgggc

SEQ ID NO: 1436917 - DNA, 15 bp, Homo sapiens
tctgaagtctgggcc

SEQ ID NO: 1436918 - DNA, 15 bp, Homo sapiens
ctgaagtctgggccc

SEQ ID NO: 1436919 - DNA, 15 bp, Homo sapiens
tgaagtctgggccct

SEQ ID NO: 1436920 - DNA, 15 bp, Homo sapiens
gaagtctgggccctt

SEQ ID NO: 1436921 - DNA, 15 bp, Homo sapiens
aagtctgggccctta

SEQ ID NO: 1436922 - DNA, 15 bp, Homo sapiens
agtctgggcccttaa

SEQ ID NO: 1436923 - DNA, 15 bp, Homo sapiens
gtctgggcccttaat

SEQ ID NO: 1436924 - DNA, 15 bp, Homo sapiens
tctgggcccttaata

SEQ ID NO: 1436925 - DNA, 15 bp, Homo sapiens
ctgggcccttaataa

SEQ ID NO: 1436926 - DNA, 15 bp, Homo sapiens
tgggcccttaataac

SEQ ID NO: 1436927 - DNA, 15 bp, Homo sapiens
gggcccttaataacc

SEQ ID NO: 1436928 - DNA, 15 bp, Homo sapiens
ggcccttaataacca

SEQ ID NO: 1436929 - DNA, 15 bp, Homo sapiens
gcccttaataaccac

SEQ ID NO: 1436930 - DNA, 15 bp, Homo sapiens
cccttaataaccact

SEQ ID NO: 1436931 - DNA, 15 bp, Homo sapiens
ccttaataaccactt

SEQ ID NO: 1436932 - DNA, 15 bp, Homo sapiens
cttaataaccacttt

SEQ ID NO: 1436933 - DNA, 15 bp, Homo sapiens
ttaataaccactttt

SEQ ID NO: 1436934 - DNA, 15 bp, Homo sapiens
taataaccacttttt

SEQ ID NO: 1436935 - DNA, 15 bp, Homo sapiens
aataaccacttttta

SEQ ID NO: 1436936 - DNA, 15 bp, Homo sapiens
ataaccactttttat

SEQ ID NO: 1436937 - DNA, 15 bp, Homo sapiens
taaccactttttatt

SEQ ID NO: 1436938 - DNA, 15 bp, Homo sapiens
aaccactttttattg

SEQ ID NO: 1436939 - DNA, 15 bp, Homo sapiens
accactttttattgc

SEQ ID NO: 1436940 - DNA, 15 bp, Homo sapiens
ccactttttattgcc

SEQ ID NO: 1436941 - DNA, 15 bp, Homo sapiens
cactttttattgcct

SEQ ID NO: 1436942 - DNA, 15 bp, Homo sapiens
actttttattgccta

SEQ ID NO: 1436943 - DNA, 15 bp, Homo sapiens
ctttttattgcctat

SEQ ID NO: 1436944 - DNA, 15 bp, Homo sapiens
tttttattgcctata

SEQ ID NO: 1436945 - DNA, 15 bp, Homo sapiens
ttttattgcctatat

SEQ ID NO: 1436946 - DNA, 15 bp, Homo sapiens
tttattgcctatatt

SEQ ID NO: 1436947 - DNA, 15 bp, Homo sapiens
ttattgcctatattt

SEQ ID NO: 1436948 - DNA, 15 bp, Homo sapiens
tattgcctatatttg

SEQ ID NO: 1436949 - DNA, 15 bp, Homo sapiens
attgcctatatttgt

SEQ ID NO: 1436950 - DNA, 15 bp, Homo sapiens
ttgcctatatttgta

SEQ ID NO: 1436951 - DNA, 15 bp, Homo sapiens
tgcctatatttgtac

SEQ ID NO: 1436952 - DNA, 15 bp, Homo sapiens
gcctatatttgtacc

SEQ ID NO: 1436953 - DNA, 15 bp, Homo sapiens
cctatatttgtacct

SEQ ID NO: 1436954 - DNA, 15 bp, Homo sapiens
ctatatttgtacctc

SEQ ID NO: 1436955 - DNA, 15 bp, Homo sapiens
tatatttgtacctct

SEQ ID NO: 1436956 - DNA, 15 bp, Homo sapiens
atatttgtacctctg

SEQ ID NO: 1436957 - DNA, 15 bp, Homo sapiens
tatttgtacctctgg

SEQ ID NO: 1436958 - DNA, 15 bp, Homo sapiens
atttgtacctctggt

SEQ ID NO: 1436959 - DNA, 15 bp, Homo sapiens
tttgtacctctggtg

SEQ ID NO: 1436960 - DNA, 15 bp, Homo sapiens
ttgtacctctggtgt

SEQ ID NO: 1436961 - DNA, 15 bp, Homo sapiens
tgtacctctggtgta

SEQ ID NO: 1436962 - DNA, 15 bp, Homo sapiens
gtacctctggtgtac

SEQ ID NO: 1436963 - DNA, 15 bp, Homo sapiens
tacctctggtgtacg

SEQ ID NO: 1436964 - DNA, 15 bp, Homo sapiens
acctctggtgtacgt

SEQ ID NO: 1436965 - DNA, 15 bp, Homo sapiens
cctctggtgtacgta

SEQ ID NO: 1436966 - DNA, 15 bp, Homo sapiens
ctctggtgtacgtat

SEQ ID NO: 1436967 - DNA, 15 bp, Homo sapiens
tctggtgtacgtatc

SEQ ID NO: 1436968 - DNA, 15 bp, Homo sapiens
ctggtgtacgtatca

SEQ ID NO: 1436969 - DNA, 15 bp, Homo sapiens
tggtgtacgtatcaa

SEQ ID NO: 1436970 - DNA, 15 bp, Homo sapiens
ggtgtacgtatcaag

SEQ ID NO: 1436971 - DNA, 15 bp, Homo sapiens
gtgtacgtatcaagt

SEQ ID NO: 1436972 - DNA, 15 bp, Homo sapiens
tgtacgtatcaagtt

SEQ ID NO: 1436973 - DNA, 15 bp, Homo sapiens
gtacgtatcaagtta

SEQ ID NO: 1436974 - DNA, 15 bp, Homo sapiens
tacgtatcaagttat

SEQ ID NO: 1436975 - DNA, 15 bp, Homo sapiens
acgtatcaagttata

SEQ ID NO: 1436976 - DNA, 15 bp, Homo sapiens
cgtatcaagttatat

SEQ ID NO: 1436977 - DNA, 15 bp, Homo sapiens
gtatcaagttatatg

SEQ ID NO: 1436978 - DNA, 15 bp, Homo sapiens
tatcaagttatatgt

SEQ ID NO: 1436979 - DNA, 15 bp, Homo sapiens
atcaagttatatgtt

SEQ ID NO: 1436980 - DNA, 15 bp, Homo sapiens
tcaagttatatgttg

SEQ ID NO: 1436981 - DNA, 15 bp, Homo sapiens
caagttatatgttga

SEQ ID NO: 1436982 - DNA, 15 bp, Homo sapiens
aagttatatgttgac

SEQ ID NO: 1436983 - DNA, 15 bp, Homo sapiens
agttatatgttgact

SEQ ID NO: 1436984 - DNA, 15 bp, Homo sapiens
gttatatgttgactt

SEQ ID NO: 1436985 - DNA, 15 bp, Homo sapiens
ttatatgttgacttc

SEQ ID NO: 1436986 - DNA, 15 bp, Homo sapiens
tatatgttgacttca

SEQ ID NO: 1436987 - DNA, 15 bp, Homo sapiens
atatgttgacttcaa

SEQ ID NO: 1436988 - DNA, 15 bp, Homo sapiens
tatgttgacttcaaa

SEQ ID NO: 1436989 - DNA, 15 bp, Homo sapiens
atgttgacttcaaaa

SEQ ID NO: 1436990 - DNA, 15 bp, Homo sapiens
tgttgacttcaaaac

SEQ ID NO: 1436991 - DNA, 15 bp, Homo sapiens
gttgacttcaaaact

SEQ ID NO: 1436992 - DNA, 15 bp, Homo sapiens
ttgacttcaaaacta

SEQ ID NO: 1436993 - DNA, 15 bp, Homo sapiens
tgacttcaaaactat

SEQ ID NO: 1436994 - DNA, 15 bp, Homo sapiens
gacttcaaaactatc

SEQ ID NO: 1436995 - DNA, 15 bp, Homo sapiens
acttcaaaactatca

SEQ ID NO: 1436996 - DNA, 15 bp, Homo sapiens
cttcaaaactatcat

SEQ ID NO: 1436997 - DNA, 15 bp, Homo sapiens
ttcaaaactatcatg

SEQ ID NO: 1436998 - DNA, 15 bp, Homo sapiens
tcaaaactatcatga

SEQ ID NO: 1436999 - DNA, 15 bp, Homo sapiens
caaaactatcatgac

SEQ ID NO: 1437000 - DNA, 15 bp, Homo sapiens
aaaactatcatgacc

SEQ ID NO: 1437001 - DNA, 15 bp, Homo sapiens
aaactatcatgacct

SEQ ID NO: 1437002 - DNA, 15 bp, Homo sapiens
aactatcatgacctt

SEQ ID NO: 1437003 - DNA, 15 bp, Homo sapiens
actatcatgaccttt

SEQ ID NO: 1437004 - DNA, 15 bp, Homo sapiens
ctatcatgacctttt

SEQ ID NO: 1437005 - DNA, 15 bp, Homo sapiens
tatcatgaccttttc

SEQ ID NO: 1437006 - DNA, 15 bp, Homo sapiens
atcatgaccttttct

SEQ ID NO: 1437007 - DNA, 15 bp, Homo sapiens
tcatgaccttttctt

SEQ ID NO: 1437008 - DNA, 15 bp, Homo sapiens
catgaccttttcttg

SEQ ID NO: 1437009 - DNA, 15 bp, Homo sapiens
atgaccttttcttgg

SEQ ID NO: 1437010 - DNA, 15 bp, Homo sapiens
tgaccttttcttggt

SEQ ID NO: 1437011 - DNA, 15 bp, Homo sapiens
gaccttttcttggtt

SEQ ID NO: 1437012 - DNA, 15 bp, Homo sapiens
accttttcttggttt

SEQ ID NO: 1437013 - DNA, 15 bp, Homo sapiens
ccttttcttggtttt

SEQ ID NO: 1437014 - DNA, 15 bp, Homo sapiens
cttttcttggttttg

SEQ ID NO: 1437015 - DNA, 15 bp, Homo sapiens
ttttcttggttttga

SEQ ID NO: 1437016 - DNA, 15 bp, Homo sapiens
tttcttggttttgat

SEQ ID NO: 1437017 - DNA, 15 bp, Homo sapiens
ttcttggttttgatt

SEQ ID NO: 1437018 - DNA, 15 bp, Homo sapiens
tcttggttttgattg

SEQ ID NO: 1437019 - DNA, 15 bp, Homo sapiens
cttggttttgattgt

SEQ ID NO: 1437020 - DNA, 15 bp, Homo sapiens
ttggttttgattgtc

SEQ ID NO: 1437021 - DNA, 15 bp, Homo sapiens
tggttttgattgtcc

SEQ ID NO: 1437022 - DNA, 15 bp, Homo sapiens
ggttttgattgtcca

SEQ ID NO: 1437023 - DNA, 15 bp, Homo sapiens
gttttgattgtccaa

SEQ ID NO: 1437024 - DNA, 15 bp, Homo sapiens
ttttgattgtccaac

SEQ ID NO: 1437025 - DNA, 15 bp, Homo sapiens
tttgattgtccaaca

SEQ ID NO: 1437026 - DNA, 15 bp, Homo sapiens
ttgattgtccaacat

SEQ ID NO: 1437027 - DNA, 15 bp, Homo sapiens
tgattgtccaacatt

SEQ ID NO: 1437028 - DNA, 15 bp, Homo sapiens
gattgtccaacatta

SEQ ID NO: 1437029 - DNA, 15 bp, Homo sapiens
attgtccaacattag

SEQ ID NO: 1437030 - DNA, 15 bp, Homo sapiens
ttgtccaacattagt

SEQ ID NO: 1437031 - DNA, 15 bp, Homo sapiens
tgtccaacattagta

SEQ ID NO: 1437032 - DNA, 15 bp, Homo sapiens
gtccaacattagtat

SEQ ID NO: 1437033 - DNA, 15 bp, Homo sapiens
tccaacattagtata

SEQ ID NO: 1437034 - DNA, 15 bp, Homo sapiens
ccaacattagtatag

SEQ ID NO: 1437035 - DNA, 15 bp, Homo sapiens
caacattagtatagt

SEQ ID NO: 1437036 - DNA, 15 bp, Homo sapiens
aacattagtatagtg

SEQ ID NO: 1437037 - DNA, 15 bp, Homo sapiens
acattagtatagtgt

SEQ ID NO: 1437038 - DNA, 15 bp, Homo sapiens
cattagtatagtgtt

SEQ ID NO: 1437039 - DNA, 15 bp, Homo sapiens
attagtatagtgttc

SEQ ID NO: 1437040 - DNA, 15 bp, Homo sapiens
ttagtatagtgttct

SEQ ID NO: 1437041 - DNA, 15 bp, Homo sapiens
tagtatagtgttctg

SEQ ID NO: 1437042 - DNA, 15 bp, Homo sapiens
agtatagtgttctgg

SEQ ID NO: 1437043 - DNA, 15 bp, Homo sapiens
gtatagtgttctggg

SEQ ID NO: 1437044 - DNA, 15 bp, Homo sapiens
tatagtgttctgggt

SEQ ID NO: 1437045 - DNA, 15 bp, Homo sapiens
atagtgttctgggtc

SEQ ID NO: 1437046 - DNA, 15 bp, Homo sapiens
tagtgttctgggtct

SEQ ID NO: 1437047 - DNA, 15 bp, Homo sapiens
agtgttctgggtctg

SEQ ID NO: 1437048 - DNA, 15 bp, Homo sapiens
gtgttctgggtctgc

SEQ ID NO: 1437049 - DNA, 15 bp, Homo sapiens
tgttctgggtctgca

SEQ ID NO: 1437050 - DNA, 15 bp, Homo sapiens
gttctgggtctgcaa

SEQ ID NO: 1437051 - DNA, 15 bp, Homo sapiens
ttctgggtctgcaaa

SEQ ID NO: 1437052 - DNA, 15 bp, Homo sapiens
tctgggtctgcaaaa

SEQ ID NO: 1437053 - DNA, 15 bp, Homo sapiens
ctgggtctgcaaaaa

SEQ ID NO: 1437054 - DNA, 15 bp, Homo sapiens
tgggtctgcaaaaat

SEQ ID NO: 1437055 - DNA, 15 bp, Homo sapiens
gggtctgcaaaaatt

SEQ ID NO: 1437056 - DNA, 15 bp, Homo sapiens
ggtctgcaaaaattt

SEQ ID NO: 1437057 - DNA, 15 bp, Homo sapiens
gtctgcaaaaatttt

SEQ ID NO: 1437058 - DNA, 15 bp, Homo sapiens
tctgcaaaaattttg

SEQ ID NO: 1437059 - DNA, 15 bp, Homo sapiens
ctgcaaaaattttga

SEQ ID NO: 1437060 - DNA, 15 bp, Homo sapiens
tgcaaaaattttgat

SEQ ID NO: 1437061 - DNA, 15 bp, Homo sapiens
gcaaaaattttgatt

SEQ ID NO: 1437062 - DNA, 15 bp, Homo sapiens
caaaaattttgatta

SEQ ID NO: 1437063 - DNA, 15 bp, Homo sapiens
aaaaattttgattac

SEQ ID NO: 1437064 - DNA, 15 bp, Homo sapiens
aaaattttgattact

SEQ ID NO: 1437065 - DNA, 15 bp, Homo sapiens
aaattttgattactc

SEQ ID NO: 1437066 - DNA, 15 bp, Homo sapiens
aattttgattactca

SEQ ID NO: 1437067 - DNA, 15 bp, Homo sapiens
attttgattactcat

SEQ ID NO: 1437068 - DNA, 15 bp, Homo sapiens
ttttgattactcatc

SEQ ID NO: 1437069 - DNA, 15 bp, Homo sapiens
tttgattactcatct

SEQ ID NO: 1437070 - DNA, 15 bp, Homo sapiens
ttgattactcatctc

SEQ ID NO: 1437071 - DNA, 15 bp, Homo sapiens
tgattactcatctca

SEQ ID NO: 1437072 - DNA, 15 bp, Homo sapiens
gattactcatctcat

SEQ ID NO: 1437073 - DNA, 15 bp, Homo sapiens
attactcatctcatc

SEQ ID NO: 1437074 - DNA, 15 bp, Homo sapiens
ttactcatctcatct

SEQ ID NO: 1437075 - DNA, 15 bp, Homo sapiens
tactcatctcatctg

SEQ ID NO: 1437076 - DNA, 15 bp, Homo sapiens
actcatctcatctgt

SEQ ID NO: 1437077 - DNA, 15 bp, Homo sapiens
ctcatctcatctgta

SEQ ID NO: 1437078 - DNA, 15 bp, Homo sapiens
tcatctcatctgtaa

SEQ ID NO: 1437079 - DNA, 15 bp, Homo sapiens
catctcatctgtaaa

SEQ ID NO: 1437080 - DNA, 15 bp, Homo sapiens
atctcatctgtaaaa

SEQ ID NO: 1437081 - DNA, 15 bp, Homo sapiens
tctcatctgtaaaac

SEQ ID NO: 1437082 - DNA, 15 bp, Homo sapiens
ctcatctgtaaaaca

SEQ ID NO: 1437083 - DNA, 15 bp, Homo sapiens
tcatctgtaaaacat

SEQ ID NO: 1437084 - DNA, 15 bp, Homo sapiens
catctgtaaaacatt

SEQ ID NO: 1437085 - DNA, 15 bp, Homo sapiens
atctgtaaaacattt

SEQ ID NO: 1437086 - DNA, 15 bp, Homo sapiens
tctgtaaaacatttt

SEQ ID NO: 1437087 - DNA, 15 bp, Homo sapiens
ctgtaaaacattttg

SEQ ID NO: 1437088 - DNA, 15 bp, Homo sapiens
tgtaaaacattttga

SEQ ID NO: 1437089 - DNA, 15 bp, Homo sapiens
gtaaaacattttgaa

SEQ ID NO: 1437090 - DNA, 15 bp, Homo sapiens
taaaacattttgaac

SEQ ID NO: 1437091 - DNA, 15 bp, Homo sapiens
aaaacattttgaact

SEQ ID NO: 1437092 - DNA, 15 bp, Homo sapiens
aaacattttgaactc

SEQ ID NO: 1437093 - DNA, 15 bp, Homo sapiens
aacattttgaactcg

SEQ ID NO: 1437094 - DNA, 15 bp, Homo sapiens
acattttgaactcgt

SEQ ID NO: 1437095 - DNA, 15 bp, Homo sapiens
cattttgaactcgtg

SEQ ID NO: 1437096 - DNA, 15 bp, Homo sapiens
attttgaactcgtgt

SEQ ID NO: 1437097 - DNA, 15 bp, Homo sapiens
ttttgaactcgtgtg

SEQ ID NO: 1437098 - DNA, 15 bp, Homo sapiens
tttgaactcgtgtgt

SEQ ID NO: 1437099 - DNA, 15 bp, Homo sapiens
ttgaactcgtgtgtt

SEQ ID NO: 1437100 - DNA, 15 bp, Homo sapiens
tgaactcgtgtgttt

SEQ ID NO: 1437101 - DNA, 15 bp, Homo sapiens
gaactcgtgtgtttg

SEQ ID NO: 1437102 - DNA, 15 bp, Homo sapiens
aactcgtgtgtttgt

SEQ ID NO: 1437103 - DNA, 15 bp, Homo sapiens
actcgtgtgtttgtg

SEQ ID NO: 1437104 - DNA, 15 bp, Homo sapiens
ctcgtgtgtttgtgc

SEQ ID NO: 1437105 - DNA, 15 bp, Homo sapiens
tcgtgtgtttgtgca

SEQ ID NO: 1437106 - DNA, 15 bp, Homo sapiens
cgtgtgtttgtgcat

SEQ ID NO: 1437107 - DNA, 15 bp, Homo sapiens
gtgtgtttgtgcatg

SEQ ID NO: 1437108 - DNA, 15 bp, Homo sapiens
tgtgtttgtgcatgc

SEQ ID NO: 1437109 - DNA, 15 bp, Homo sapiens
gtgtttgtgcatgca

SEQ ID NO: 1437110 - DNA, 15 bp, Homo sapiens
tgtttgtgcatgcac

SEQ ID NO: 1437111 - DNA, 15 bp, Homo sapiens
gtttgtgcatgcaca

SEQ ID NO: 1437112 - DNA, 15 bp, Homo sapiens
tttgtgcatgcacat

SEQ ID NO: 1437113 - DNA, 15 bp, Homo sapiens
ttgtgcatgcacatt

SEQ ID NO: 1437114 - DNA, 15 bp, Homo sapiens
tgtgcatgcacattt

SEQ ID NO: 1437115 - DNA, 15 bp, Homo sapiens
gtgcatgcacatttg

SEQ ID NO: 1437116 - DNA, 15 bp, Homo sapiens
tgcatgcacatttgt

SEQ ID NO: 1437117 - DNA, 15 bp, Homo sapiens
gcatgcacatttgtg

SEQ ID NO: 1437118 - DNA, 15 bp, Homo sapiens
catgcacatttgtgt

SEQ ID NO: 1437119 - DNA, 15 bp, Homo sapiens
atgcacatttgtgtg

SEQ ID NO: 1437120 - DNA, 15 bp, Homo sapiens
tgcacatttgtgtgt

SEQ ID NO: 1437121 - DNA, 15 bp, Homo sapiens
gcacatttgtgtgta

SEQ ID NO: 1437122 - DNA, 15 bp, Homo sapiens
cacatttgtgtgtaa

SEQ ID NO: 1437123 - DNA, 15 bp, Homo sapiens
acatttgtgtgtaat

SEQ ID NO: 1437124 - DNA, 15 bp, Homo sapiens
catttgtgtgtaatt

SEQ ID NO: 1437125 - DNA, 15 bp, Homo sapiens
atttgtgtgtaatta

SEQ ID NO: 1437126 - DNA, 15 bp, Homo sapiens
tttgtgtgtaattat

SEQ ID NO: 1437127 - DNA, 15 bp, Homo sapiens
ttgtgtgtaattata

SEQ ID NO: 1437128 - DNA, 15 bp, Homo sapiens
tgtgtgtaattataa

SEQ ID NO: 1437129 - DNA, 15 bp, Homo sapiens
gtgtgtaattataaa

SEQ ID NO: 1437130 - DNA, 15 bp, Homo sapiens
tgtgtaattataaaa

SEQ ID NO: 1437131 - DNA, 15 bp, Homo sapiens
gtgtaattataaaaa

SEQ ID NO: 1437132 - DNA, 15 bp, Homo sapiens
tgtaattataaaaat

SEQ ID NO: 1437133 - DNA, 15 bp, Homo sapiens
gtaattataaaaatt

SEQ ID NO: 1437134 - DNA, 15 bp, Homo sapiens
taattataaaaattt

SEQ ID NO: 1437135 - DNA, 15 bp, Homo sapiens
aattataaaaatttt

SEQ ID NO: 1437136 - DNA, 15 bp, Homo sapiens
attataaaaatttta

SEQ ID NO: 1437137 - DNA, 15 bp, Homo sapiens
ttataaaaattttac

SEQ ID NO: 1437138 - DNA, 15 bp, Homo sapiens
tataaaaattttact

SEQ ID NO: 1437139 - DNA, 15 bp, Homo sapiens
ataaaaattttactt

SEQ ID NO: 1437140 - DNA, 15 bp, Homo sapiens
taaaaattttacttt

SEQ ID NO: 1437141 - DNA, 15 bp, Homo sapiens
aaaaattttactttc

SEQ ID NO: 1437142 - DNA, 15 bp, Homo sapiens
aaaattttactttct

SEQ ID NO: 1437143 - DNA, 15 bp, Homo sapiens
aaattttactttctg

SEQ ID NO: 1437144 - DNA, 15 bp, Homo sapiens
aattttactttctgt

SEQ ID NO: 1437145 - DNA, 15 bp, Homo sapiens
attttactttctgtt

SEQ ID NO: 1437146 - DNA, 15 bp, Homo sapiens
ttttactttctgtta

SEQ ID NO: 1437147 - DNA, 15 bp, Homo sapiens
tttactttctgttaa

SEQ ID NO: 1437148 - DNA, 15 bp, Homo sapiens
ttactttctgttaat

SEQ ID NO: 1437149 - DNA, 15 bp, Homo sapiens
tactttctgttaata

SEQ ID NO: 1437150 - DNA, 15 bp, Homo sapiens
actttctgttaatat

SEQ ID NO: 1437151 - DNA, 15 bp, Homo sapiens
ctttctgttaatata

SEQ ID NO: 1437152 - DNA, 15 bp, Homo sapiens
tttctgttaatatat

SEQ ID NO: 1437153 - DNA, 15 bp, Homo sapiens
ttctgttaatatata

SEQ ID NO: 1437154 - DNA, 15 bp, Homo sapiens
tctgttaatatataa

SEQ ID NO: 1437155 - DNA, 15 bp, Homo sapiens
ctgttaatatataag

SEQ ID NO: 1437156 - DNA, 15 bp, Homo sapiens
tgttaatatataagt

SEQ ID NO: 1437157 - DNA, 15 bp, Homo sapiens
gttaatatataagtt

SEQ ID NO: 1437158 - DNA, 15 bp, Homo sapiens
ttaatatataagttg

SEQ ID NO: 1437159 - DNA, 15 bp, Homo sapiens
taatatataagttgt

SEQ ID NO: 1437160 - DNA, 15 bp, Homo sapiens
aatatataagttgta

SEQ ID NO: 1437161 - DNA, 15 bp, Homo sapiens
atatataagttgtat

SEQ ID NO: 1437162 - DNA, 15 bp, Homo sapiens
tatataagttgtatc

SEQ ID NO: 1437163 - DNA, 15 bp, Homo sapiens
atataagttgtatca

SEQ ID NO: 1437164 - DNA, 15 bp, Homo sapiens
tataagttgtatcat

SEQ ID NO: 1437165 - DNA, 15 bp, Homo sapiens
ataagttgtatcata

SEQ ID NO: 1437166 - DNA, 15 bp, Homo sapiens
taagttgtatcataa

SEQ ID NO: 1437167 - DNA, 15 bp, Homo sapiens
aagttgtatcataag

SEQ ID NO: 1437168 - DNA, 15 bp, Homo sapiens
agttgtatcataaga

SEQ ID NO: 1437169 - DNA, 15 bp, Homo sapiens
gttgtatcataagaa

SEQ ID NO: 1437170 - DNA, 15 bp, Homo sapiens
ttgtatcataagaaa

SEQ ID NO: 1437171 - DNA, 15 bp, Homo sapiens
tgtatcataagaaac

SEQ ID NO: 1437172 - DNA, 15 bp, Homo sapiens
gtatcataagaaact

SEQ ID NO: 1437173 - DNA, 15 bp, Homo sapiens
tatcataagaaactg

SEQ ID NO: 1437174 - DNA, 15 bp, Homo sapiens
atcataagaaactgc

SEQ ID NO: 1437175 - DNA, 15 bp, Homo sapiens
tcataagaaactgcc

SEQ ID NO: 1437176 - DNA, 15 bp, Homo sapiens
cataagaaactgccg

SEQ ID NO: 1437177 - DNA, 15 bp, Homo sapiens
ataagaaactgccgt

SEQ ID NO: 1437178 - DNA, 15 bp, Homo sapiens
taagaaactgccgtt

SEQ ID NO: 1437179 - DNA, 15 bp, Homo sapiens
aagaaactgccgttt

SEQ ID NO: 1437180 - DNA, 15 bp, Homo sapiens
agaaactgccgtttt

SEQ ID NO: 1437181 - DNA, 15 bp, Homo sapiens
gaaactgccgttttt

SEQ ID NO: 1437182 - DNA, 15 bp, Homo sapiens
aaactgccgtttttg

SEQ ID NO: 1437183 - DNA, 15 bp, Homo sapiens
aactgccgtttttga

SEQ ID NO: 1437184 - DNA, 15 bp, Homo sapiens
actgccgtttttgaa

SEQ ID NO: 1437185 - DNA, 15 bp, Homo sapiens
ctgccgtttttgaag

SEQ ID NO: 1437186 - DNA, 15 bp, Homo sapiens
tgccgtttttgaaga

SEQ ID NO: 1437187 - DNA, 15 bp, Homo sapiens
gccgtttttgaagag

SEQ ID NO: 1437188 - DNA, 15 bp, Homo sapiens
ccgtttttgaagagc

SEQ ID NO: 1437189 - DNA, 15 bp, Homo sapiens
cgtttttgaagagca

SEQ ID NO: 1437190 - DNA, 15 bp, Homo sapiens
gtttttgaagagcaa

SEQ ID NO: 1437191 - DNA, 15 bp, Homo sapiens
tttttgaagagcaaa

SEQ ID NO: 1437192 - DNA, 15 bp, Homo sapiens
ttttgaagagcaaaa

SEQ ID NO: 1437193 - DNA, 15 bp, Homo sapiens
tttgaagagcaaaaa

SEQ ID NO: 1437194 - DNA, 15 bp, Homo sapiens
ttgaagagcaaaaaa

SEQ ID NO: 1437195 - DNA, 15 bp, Homo sapiens
tgaagagcaaaaaaa

SEQ ID NO: 1437196 - DNA, 15 bp, Homo sapiens
gaagagcaaaaaaag

SEQ ID NO: 1437197 - DNA, 15 bp, Homo sapiens
aagagcaaaaaaagg

SEQ ID NO: 1437198 - DNA, 15 bp, Homo sapiens
agagcaaaaaaaggt

SEQ ID NO: 1437199 - DNA, 15 bp, Homo sapiens
gagcaaaaaaaggtt

SEQ ID NO: 1437200 - DNA, 15 bp, Homo sapiens
agcaaaaaaaggttg

SEQ ID NO: 1437201 - DNA, 15 bp, Homo sapiens
gcaaaaaaaggttga

SEQ ID NO: 1437202 - DNA, 15 bp, Homo sapiens
caaaaaaaggttgaa

SEQ ID NO: 1437203 - DNA, 15 bp, Homo sapiens
aaaaaaaggttgaat

SEQ ID NO: 1437204 - DNA, 15 bp, Homo sapiens
aaaaaaggttgaatg

SEQ ID NO: 1437205 - DNA, 15 bp, Homo sapiens
aaaaaggttgaatgt

SEQ ID NO: 1437206 - DNA, 15 bp, Homo sapiens
aaaaggttgaatgtt

SEQ ID NO: 1437207 - DNA, 15 bp, Homo sapiens
aaaggttgaatgtta

SEQ ID NO: 1437208 - DNA, 15 bp, Homo sapiens
aaggttgaatgttac

SEQ ID NO: 1437209 - DNA, 15 bp, Homo sapiens
aggttgaatgttacc

SEQ ID NO: 1437210 - DNA, 15 bp, Homo sapiens
ggttgaatgttacca

SEQ ID NO: 1437211 - DNA, 15 bp, Homo sapiens
gttgaatgttaccag

SEQ ID NO: 1437212 - DNA, 15 bp, Homo sapiens
ttgaatgttaccagt

SEQ ID NO: 1437213 - DNA, 15 bp, Homo sapiens
tgaatgttaccagtt

SEQ ID NO: 1437214 - DNA, 15 bp, Homo sapiens
gaatgttaccagtta

SEQ ID NO: 1437215 - DNA, 15 bp, Homo sapiens
aatgttaccagttac

SEQ ID NO: 1437216 - DNA, 15 bp, Homo sapiens
atgttaccagttaca

SEQ ID NO: 1437217 - DNA, 15 bp, Homo sapiens
tgttaccagttacat

SEQ ID NO: 1437218 - DNA, 15 bp, Homo sapiens
gttaccagttacatc

SEQ ID NO: 1437219 - DNA, 15 bp, Homo sapiens
ttaccagttacatct

SEQ ID NO: 1437220 - DNA, 15 bp, Homo sapiens
taccagttacatctg

SEQ ID NO: 1437221 - DNA, 15 bp, Homo sapiens
accagttacatctgg

SEQ ID NO: 1437222 - DNA, 15 bp, Homo sapiens
ccagttacatctggt

SEQ ID NO: 1437223 - DNA, 15 bp, Homo sapiens
cagttacatctggtt

SEQ ID NO: 1437224 - DNA, 15 bp, Homo sapiens
agttacatctggttc

SEQ ID NO: 1437225 - DNA, 15 bp, Homo sapiens
gttacatctggttca

SEQ ID NO: 1437226 - DNA, 15 bp, Homo sapiens
ttacatctggttcaa

SEQ ID NO: 1437227 - DNA, 15 bp, Homo sapiens
tacatctggttcaac

SEQ ID NO: 1437228 - DNA, 15 bp, Homo sapiens
acatctggttcaacc

SEQ ID NO: 1437229 - DNA, 15 bp, Homo sapiens
catctggttcaacct

SEQ ID NO: 1437230 - DNA, 15 bp, Homo sapiens
atctggttcaaccta

SEQ ID NO: 1437231 - DNA, 15 bp, Homo sapiens
tctggttcaacctaa

SEQ ID NO: 1437232 - DNA, 15 bp, Homo sapiens
ctggttcaacctaat

SEQ ID NO: 1437233 - DNA, 15 bp, Homo sapiens
tggttcaacctaata

SEQ ID NO: 1437234 - DNA, 15 bp, Homo sapiens
ggttcaacctaatag

SEQ ID NO: 1437235 - DNA, 15 bp, Homo sapiens
gttcaacctaataga

SEQ ID NO: 1437236 - DNA, 15 bp, Homo sapiens
ttcaacctaatagac

SEQ ID NO: 1437237 - DNA, 15 bp, Homo sapiens
tcaacctaatagaca

SEQ ID NO: 1437238 - DNA, 15 bp, Homo sapiens
caacctaatagacat

SEQ ID NO: 1437239 - DNA, 15 bp, Homo sapiens
aacctaatagacatt

SEQ ID NO: 1437240 - DNA, 15 bp, Homo sapiens
acctaatagacattt

SEQ ID NO: 1437241 - DNA, 15 bp, Homo sapiens
cctaatagacatttg

SEQ ID NO: 1437242 - DNA, 15 bp, Homo sapiens
ctaatagacatttgt

SEQ ID NO: 1437243 - DNA, 15 bp, Homo sapiens
taatagacatttgta

SEQ ID NO: 1437244 - DNA, 15 bp, Homo sapiens
aatagacatttgtac

SEQ ID NO: 1437245 - DNA, 15 bp, Homo sapiens
atagacatttgtaca

SEQ ID NO: 1437246 - DNA, 15 bp, Homo sapiens
tagacatttgtacaa

SEQ ID NO: 1437247 - DNA, 15 bp, Homo sapiens
agacatttgtacaaa

SEQ ID NO: 1437248 - DNA, 15 bp, Homo sapiens
gacatttgtacaaaa

SEQ ID NO: 1437249 - DNA, 15 bp, Homo sapiens
acatttgtacaaaaa

SEQ ID NO: 1437250 - DNA, 15 bp, Homo sapiens
catttgtacaaaaac

SEQ ID NO: 1437251 - DNA, 15 bp, Homo sapiens
atttgtacaaaaaca

SEQ ID NO: 1437252 - DNA, 15 bp, Homo sapiens
tttgtacaaaaacag

SEQ ID NO: 1437253 - DNA, 15 bp, Homo sapiens
ttgtacaaaaacaga

SEQ ID NO: 1437254 - DNA, 15 bp, Homo sapiens
tgtacaaaaacagac

SEQ ID NO: 1437255 - DNA, 15 bp, Homo sapiens
gtacaaaaacagaca

SEQ ID NO: 1437256 - DNA, 15 bp, Homo sapiens
tacaaaaacagacat

SEQ ID NO: 1437257 - DNA, 15 bp, Homo sapiens
acaaaaacagacatt

SEQ ID NO: 1437258 - DNA, 15 bp, Homo sapiens
caaaaacagacattt

SEQ ID NO: 1437259 - DNA, 15 bp, Homo sapiens
aaaaacagacatttt

SEQ ID NO: 1437260 - DNA, 15 bp, Homo sapiens
aaaacagacatttta

SEQ ID NO: 1437261 - DNA, 15 bp, Homo sapiens
aaacagacattttaa

SEQ ID NO: 1437262 - DNA, 15 bp, Homo sapiens
aacagacattttaag

SEQ ID NO: 1437263 - DNA, 15 bp, Homo sapiens
acagacattttaaga

SEQ ID NO: 1437264 - DNA, 15 bp, Homo sapiens
cagacattttaagag

SEQ ID NO: 1437265 - DNA, 15 bp, Homo sapiens
agacattttaagagg

SEQ ID NO: 1437266 - DNA, 15 bp, Homo sapiens
gacattttaagaggt

SEQ ID NO: 1437267 - DNA, 15 bp, Homo sapiens
acattttaagaggtt

SEQ ID NO: 1437268 - DNA, 15 bp, Homo sapiens
cattttaagaggttg

SEQ ID NO: 1437269 - DNA, 15 bp, Homo sapiens
attttaagaggttga

SEQ ID NO: 1437270 - DNA, 15 bp, Homo sapiens
ttttaagaggttgaa

SEQ ID NO: 1437271 - DNA, 15 bp, Homo sapiens
tttaagaggttgaaa

SEQ ID NO: 1437272 - DNA, 15 bp, Homo sapiens
ttaagaggttgaaat

SEQ ID NO: 1437273 - DNA, 15 bp, Homo sapiens
taagaggttgaaata

SEQ ID NO: 1437274 - DNA, 15 bp, Homo sapiens
aagaggttgaaataa

SEQ ID NO: 1437275 - DNA, 15 bp, Homo sapiens
agaggttgaaataaa

SEQ ID NO: 1437276 - DNA, 15 bp, Homo sapiens
gaggttgaaataaaa

SEQ ID NO: 1437277 - DNA, 15 bp, Homo sapiens
aggttgaaataaaaa

SEQ ID NO: 1437278 - DNA, 15 bp, Homo sapiens
ggttgaaataaaaat

SEQ ID NO: 1437279 - DNA, 15 bp, Homo sapiens
gttgaaataaaaatt

SEQ ID NO: 1437280 - DNA, 15 bp, Homo sapiens
ttgaaataaaaattt

SEQ ID NO: 1437281 - DNA, 15 bp, Homo sapiens
tgaaataaaaattta

SEQ ID NO: 1437282 - DNA, 15 bp, Homo sapiens
gaaataaaaatttaa

SEQ ID NO: 1437283 - DNA, 15 bp, Homo sapiens
aaataaaaatttaat

SEQ ID NO: 1437284 - DNA, 15 bp, Homo sapiens
aataaaaatttaata

SEQ ID NO: 1437285 - DNA, 15 bp, Homo sapiens
ataaaaatttaataa

SEQ ID NO: 1437286 - DNA, 15 bp, Homo sapiens
taaaaatttaataaa

SEQ ID NO: 1437287 - DNA, 15 bp, Homo sapiens
aaaaatttaataaac

SEQ ID NO: 1437288 - DNA, 15 bp, Homo sapiens
aaaatttaataaaca

SEQ ID NO: 1437289 - DNA, 15 bp, Homo sapiens
aaatttaataaacaa

SEQ ID NO: 1437290 - DNA, 15 bp, Homo sapiens
aatttaataaacaat

SEQ ID NO: 1437291 - DNA, 15 bp, Homo sapiens
atttaataaacaata

SEQ ID NO: 1437292 - DNA, 15 bp, Homo sapiens
tttaataaacaatat

SEQ ID NO: 1437293 - DNA, 15 bp, Homo sapiens
ttaataaacaatatt

SEQ ID NO: 1437294 - DNA, 15 bp, Homo sapiens
taataaacaatattt

SEQ ID NO: 1437295 - DNA, 15 bp, Homo sapiens
aataaacaatatttt

SEQ ID NO: 1437296 - DNA, 15 bp, Homo sapiens
ataaacaatattttc

SEQ ID NO: 1437297 - DNA, 15 bp, Homo sapiens
taaacaatattttca

SEQ ID NO: 1437298 - DNA, 15 bp, Homo sapiens
aaacaatattttcag

SEQ ID NO: 1437299 - DNA, 15 bp, Homo sapiens
aacaatattttcagt

SEQ ID NO: 1437300 - DNA, 15 bp, Homo sapiens
acaatattttcagtt

SEQ ID NO: 1437301 - DNA, 15 bp, Homo sapiens
caatattttcagttt

SEQ ID NO: 1437302 - DNA, 15 bp, Homo sapiens
aatattttcagtttt

SEQ ID NO: 1437303 - DNA, 15 bp, Homo sapiens
atattttcagttttt

SEQ ID NO: 1437304 - DNA, 15 bp, Homo sapiens
tattttcagttttta

SEQ ID NO: 1437305 - DNA, 15 bp, Homo sapiens
attttcagtttttac

SEQ ID NO: 1437306 - DNA, 15 bp, Homo sapiens
ttttcagtttttact

SEQ ID NO: 1437307 - DNA, 15 bp, Homo sapiens
tttcagtttttacta

SEQ ID NO: 1437308 - DNA, 15 bp, Homo sapiens
ttcagtttttactaa

SEQ ID NO: 1437309 - DNA, 15 bp, Homo sapiens
tcagtttttactaat

SEQ ID NO: 1437310 - DNA, 15 bp, Homo sapiens
cagtttttactaatt

SEQ ID NO: 1437311 - DNA, 15 bp, Homo sapiens
agtttttactaattg

SEQ ID NO: 1437312 - DNA, 15 bp, Homo sapiens
gtttttactaattgt

SEQ ID NO: 1437313 - DNA, 15 bp, Homo sapiens
tttttactaattgtg

SEQ ID NO: 1437314 - DNA, 15 bp, Homo sapiens
ttttactaattgtga

SEQ ID NO: 1437315 - DNA, 15 bp, Homo sapiens
tttactaattgtgat

SEQ ID NO: 1437316 - DNA, 15 bp, Homo sapiens
ttactaattgtgatg

SEQ ID NO: 1437317 - DNA, 15 bp, Homo sapiens
tactaattgtgatgc

SEQ ID NO: 1437318 - DNA, 15 bp, Homo sapiens
actaattgtgatgct

SEQ ID NO: 1437319 - DNA, 15 bp, Homo sapiens
ctaattgtgatgctt

SEQ ID NO: 1437320 - DNA, 15 bp, Homo sapiens
taattgtgatgcttc

SEQ ID NO: 1437321 - DNA, 15 bp, Homo sapiens
aattgtgatgcttca

SEQ ID NO: 1437322 - DNA, 15 bp, Homo sapiens
attgtgatgcttcac

SEQ ID NO: 1437323 - DNA, 15 bp, Homo sapiens
ttgtgatgcttcact

SEQ ID NO: 1437324 - DNA, 15 bp, Homo sapiens
tgtgatgcttcacta

SEQ ID NO: 1437325 - DNA, 15 bp, Homo sapiens
gtgatgcttcactat

SEQ ID NO: 1437326 - DNA, 15 bp, Homo sapiens
tgatgcttcactatc

SEQ ID NO: 1437327 - DNA, 15 bp, Homo sapiens
gatgcttcactatca

SEQ ID NO: 1437328 - DNA, 15 bp, Homo sapiens
atgcttcactatcat

SEQ ID NO: 1437329 - DNA, 15 bp, Homo sapiens
tgcttcactatcatt

SEQ ID NO: 1437330 - DNA, 15 bp, Homo sapiens
gcttcactatcatta

SEQ ID NO: 1437331 - DNA, 15 bp, Homo sapiens
cttcactatcattag

SEQ ID NO: 1437332 - DNA, 15 bp, Homo sapiens
ttcactatcattagc

SEQ ID NO: 1437333 - DNA, 15 bp, Homo sapiens
tcactatcattagct

SEQ ID NO: 1437334 - DNA, 15 bp, Homo sapiens
cactatcattagcta

SEQ ID NO: 1437335 - DNA, 15 bp, Homo sapiens
actatcattagctaa

SEQ ID NO: 1437336 - DNA, 15 bp, Homo sapiens
ctatcattagctaat

SEQ ID NO: 1437337 - DNA, 15 bp, Homo sapiens
tatcattagctaata

SEQ ID NO: 1437338 - DNA, 15 bp, Homo sapiens
atcattagctaatat

SEQ ID NO: 1437339 - DNA, 15 bp, Homo sapiens
tcattagctaatatg

SEQ ID NO: 1437340 - DNA, 15 bp, Homo sapiens
cattagctaatatgt

SEQ ID NO: 1437341 - DNA, 15 bp, Homo sapiens
attagctaatatgtc

SEQ ID NO: 1437342 - DNA, 15 bp, Homo sapiens
ttagctaatatgtca

SEQ ID NO: 1437343 - DNA, 15 bp, Homo sapiens
tagctaatatgtcaa

SEQ ID NO: 1437344 - DNA, 15 bp, Homo sapiens
agctaatatgtcaag

SEQ ID NO: 1437345 - DNA, 15 bp, Homo sapiens
gctaatatgtcaagg

SEQ ID NO: 1437346 - DNA, 15 bp, Homo sapiens
ctaatatgtcaaggc

SEQ ID NO: 1437347 - DNA, 15 bp, Homo sapiens
taatatgtcaaggca

SEQ ID NO: 1437348 - DNA, 15 bp, Homo sapiens
aatatgtcaaggcat

SEQ ID NO: 1437349 - DNA, 15 bp, Homo sapiens
atatgtcaaggcata

SEQ ID NO: 1437350 - DNA, 15 bp, Homo sapiens
tatgtcaaggcataa

SEQ ID NO: 1437351 - DNA, 15 bp, Homo sapiens
atgtcaaggcataat

SEQ ID NO: 1437352 - DNA, 15 bp, Homo sapiens
tgtcaaggcataata

SEQ ID NO: 1437353 - DNA, 15 bp, Homo sapiens
gtcaaggcataatat

SEQ ID NO: 1437354 - DNA, 15 bp, Homo sapiens
tcaaggcataatata

SEQ ID NO: 1437355 - DNA, 15 bp, Homo sapiens
caaggcataatatac

SEQ ID NO: 1437356 - DNA, 15 bp, Homo sapiens
aaggcataatatacc

SEQ ID NO: 1437357 - DNA, 15 bp, Homo sapiens
aggcataatatacct

SEQ ID NO: 1437358 - DNA, 15 bp, Homo sapiens
ggcataatatacctt

SEQ ID NO: 1437359 - DNA, 15 bp, Homo sapiens
gcataatatacctta

SEQ ID NO: 1437360 - DNA, 15 bp, Homo sapiens
cataatataccttag

SEQ ID NO: 1437361 - DNA, 15 bp, Homo sapiens
ataatataccttagg

SEQ ID NO: 1437362 - DNA, 15 bp, Homo sapiens
taatataccttaggg

SEQ ID NO: 1437363 - DNA, 15 bp, Homo sapiens
aatataccttagggt

SEQ ID NO: 1437364 - DNA, 15 bp, Homo sapiens
atataccttagggtg

SEQ ID NO: 1437365 - DNA, 15 bp, Homo sapiens
tataccttagggtga

SEQ ID NO: 1437366 - DNA, 15 bp, Homo sapiens
ataccttagggtgaa

SEQ ID NO: 1437367 - DNA, 15 bp, Homo sapiens
taccttagggtgaac

SEQ ID NO: 1437368 - DNA, 15 bp, Homo sapiens
accttagggtgaact

SEQ ID NO: 1437369 - DNA, 15 bp, Homo sapiens
ccttagggtgaactt

SEQ ID NO: 1437370 - DNA, 15 bp, Homo sapiens
cttagggtgaacttt

SEQ ID NO: 1437371 - DNA, 15 bp, Homo sapiens
ttagggtgaacttta

SEQ ID NO: 1437372 - DNA, 15 bp, Homo sapiens
tagggtgaactttat

SEQ ID NO: 1437373 - DNA, 15 bp, Homo sapiens
agggtgaactttatc

SEQ ID NO: 1437374 - DNA, 15 bp, Homo sapiens
gggtgaactttatca

SEQ ID NO: 1437375 - DNA, 15 bp, Homo sapiens
ggtgaactttatcat

SEQ ID NO: 1437376 - DNA, 15 bp, Homo sapiens
gtgaactttatcatt

SEQ ID NO: 1437377 - DNA, 15 bp, Homo sapiens
tgaactttatcatta

SEQ ID NO: 1437378 - DNA, 15 bp, Homo sapiens
gaactttatcattaa

SEQ ID NO: 1437379 - DNA, 15 bp, Homo sapiens
aactttatcattaac

SEQ ID NO: 1437380 - DNA, 15 bp, Homo sapiens
actttatcattaaca

SEQ ID NO: 1437381 - DNA, 15 bp, Homo sapiens
ctttatcattaacaa

SEQ ID NO: 1437382 - DNA, 15 bp, Homo sapiens
tttatcattaacaaa

SEQ ID NO: 1437383 - DNA, 15 bp, Homo sapiens
ttatcattaacaaag

SEQ ID NO: 1437384 - DNA, 15 bp, Homo sapiens
tatcattaacaaagg

SEQ ID NO: 1437385 - DNA, 15 bp, Homo sapiens
atcattaacaaaggt

SEQ ID NO: 1437386 - DNA, 15 bp, Homo sapiens
tcattaacaaaggtg

SEQ ID NO: 1437387 - DNA, 15 bp, Homo sapiens
cattaacaaaggtgg

SEQ ID NO: 1437388 - DNA, 15 bp, Homo sapiens
attaacaaaggtgga

SEQ ID NO: 1437389 - DNA, 15 bp, Homo sapiens
ttaacaaaggtggat

SEQ ID NO: 1437390 - DNA, 15 bp, Homo sapiens
taacaaaggtggatg

SEQ ID NO: 1437391 - DNA, 15 bp, Homo sapiens
aacaaaggtggatgg

SEQ ID NO: 1437392 - DNA, 15 bp, Homo sapiens
acaaaggtggatggt

SEQ ID NO: 1437393 - DNA, 15 bp, Homo sapiens
caaaggtggatggtg

SEQ ID NO: 1437394 - DNA, 15 bp, Homo sapiens
aaaggtggatggtgt

SEQ ID NO: 1437395 - DNA, 15 bp, Homo sapiens
aaggtggatggtgtc

SEQ ID NO: 1437396 - DNA, 15 bp, Homo sapiens
aggtggatggtgtca

SEQ ID NO: 1437397 - DNA, 15 bp, Homo sapiens
ggtggatggtgtcaa

SEQ ID NO: 1437398 - DNA, 15 bp, Homo sapiens
gtggatggtgtcaat

SEQ ID NO: 1437399 - DNA, 15 bp, Homo sapiens
tggatggtgtcaata

SEQ ID NO: 1437400 - DNA, 15 bp, Homo sapiens
ggatggtgtcaataa

SEQ ID NO: 1437401 - DNA, 15 bp, Homo sapiens
gatggtgtcaataat

SEQ ID NO: 1437402 - DNA, 15 bp, Homo sapiens
atggtgtcaataatc

SEQ ID NO: 1437403 - DNA, 15 bp, Homo sapiens
tggtgtcaataatct

SEQ ID NO: 1437404 - DNA, 15 bp, Homo sapiens
ggtgtcaataatctt

SEQ ID NO: 1437405 - DNA, 15 bp, Homo sapiens
gtgtcaataatcttg

SEQ ID NO: 1437406 - DNA, 15 bp, Homo sapiens
tgtcaataatcttga

SEQ ID NO: 1437407 - DNA, 15 bp, Homo sapiens
gtcaataatcttgag

SEQ ID NO: 1437408 - DNA, 15 bp, Homo sapiens
tcaataatcttgagg

SEQ ID NO: 1437409 - DNA, 15 bp, Homo sapiens
caataatcttgaggt

SEQ ID NO: 1437410 - DNA, 15 bp, Homo sapiens
aataatcttgaggtt

SEQ ID NO: 1437411 - DNA, 15 bp, Homo sapiens
ataatcttgaggttt

SEQ ID NO: 1437412 - DNA, 15 bp, Homo sapiens
taatcttgaggtttg

SEQ ID NO: 1437413 - DNA, 15 bp, Homo sapiens
aatcttgaggtttgt

SEQ ID NO: 1437414 - DNA, 15 bp, Homo sapiens
atcttgaggtttgtg

SEQ ID NO: 1437415 - DNA, 15 bp, Homo sapiens
tcttgaggtttgtgt

SEQ ID NO: 1437416 - DNA, 15 bp, Homo sapiens
cttgaggtttgtgtt

SEQ ID NO: 1437417 - DNA, 15 bp, Homo sapiens
ttgaggtttgtgttt

SEQ ID NO: 1437418 - DNA, 15 bp, Homo sapiens
tgaggtttgtgtttt

SEQ ID NO: 1437419 - DNA, 15 bp, Homo sapiens
gaggtttgtgttttt

SEQ ID NO: 1437420 - DNA, 15 bp, Homo sapiens
aggtttgtgtttttt

SEQ ID NO: 1437421 - DNA, 15 bp, Homo sapiens
ggtttgtgttttttt

SEQ ID NO: 1437422 - DNA, 15 bp, Homo sapiens
gtttgtgttttttta

SEQ ID NO: 1437423 - DNA, 15 bp, Homo sapiens
tttgtgtttttttat

SEQ ID NO: 1437424 - DNA, 15 bp, Homo sapiens
ttgtgtttttttata

SEQ ID NO: 1437425 - DNA, 15 bp, Homo sapiens
tgtgtttttttatat

SEQ ID NO: 1437426 - DNA, 15 bp, Homo sapiens
gtgtttttttatata

SEQ ID NO: 1437427 - DNA, 15 bp, Homo sapiens
tgtttttttatataa

SEQ ID NO: 1437428 - DNA, 15 bp, Homo sapiens
gtttttttatataac

SEQ ID NO: 1437429 - DNA, 15 bp, Homo sapiens
tttttttatataaca

SEQ ID NO: 1437430 - DNA, 15 bp, Homo sapiens
ttttttatataacac

SEQ ID NO: 1437431 - DNA, 15 bp, Homo sapiens
tttttatataacact

SEQ ID NO: 1437432 - DNA, 15 bp, Homo sapiens
ttttatataacactg

SEQ ID NO: 1437433 - DNA, 15 bp, Homo sapiens
tttatataacactgc

SEQ ID NO: 1437434 - DNA, 15 bp, Homo sapiens
ttatataacactgcg

SEQ ID NO: 1437435 - DNA, 15 bp, Homo sapiens
tatataacactgcga

SEQ ID NO: 1437436 - DNA, 15 bp, Homo sapiens
atataacactgcgag

SEQ ID NO: 1437437 - DNA, 15 bp, Homo sapiens
tataacactgcgagg

SEQ ID NO: 1437438 - DNA, 15 bp, Homo sapiens
ataacactgcgaggt

SEQ ID NO: 1437439 - DNA, 15 bp, Homo sapiens
taacactgcgaggtc

SEQ ID NO: 1437440 - DNA, 15 bp, Homo sapiens
aacactgcgaggtct

SEQ ID NO: 1437441 - DNA, 15 bp, Homo sapiens
acactgcgaggtcta

SEQ ID NO: 1437442 - DNA, 15 bp, Homo sapiens
cactgcgaggtctaa

SEQ ID NO: 1437443 - DNA, 15 bp, Homo sapiens
actgcgaggtctaat

SEQ ID NO: 1437444 - DNA, 15 bp, Homo sapiens
ctgcgaggtctaatt

SEQ ID NO: 1437445 - DNA, 15 bp, Homo sapiens
tgcgaggtctaatta

SEQ ID NO: 1437446 - DNA, 15 bp, Homo sapiens
gcgaggtctaattaa

SEQ ID NO: 1437447 - DNA, 15 bp, Homo sapiens
cgaggtctaattaag

SEQ ID NO: 1437448 - DNA, 15 bp, Homo sapiens
gaggtctaattaagt

SEQ ID NO: 1437449 - DNA, 15 bp, Homo sapiens
aggtctaattaagta

SEQ ID NO: 1437450 - DNA, 15 bp, Homo sapiens
ggtctaattaagtac

SEQ ID NO: 1437451 - DNA, 15 bp, Homo sapiens
gtctaattaagtact

SEQ ID NO: 1437452 - DNA, 15 bp, Homo sapiens
tctaattaagtactt

SEQ ID NO: 1437453 - DNA, 15 bp, Homo sapiens
ctaattaagtactta

SEQ ID NO: 1437454 - DNA, 15 bp, Homo sapiens
taattaagtacttac

SEQ ID NO: 1437455 - DNA, 15 bp, Homo sapiens
aattaagtacttact

SEQ ID NO: 1437456 - DNA, 15 bp, Homo sapiens
attaagtacttactg

SEQ ID NO: 1437457 - DNA, 15 bp, Homo sapiens
ttaagtacttactgt

SEQ ID NO: 1437458 - DNA, 15 bp, Homo sapiens
taagtacttactgtt

SEQ ID NO: 1437459 - DNA, 15 bp, Homo sapiens
aagtacttactgttt

SEQ ID NO: 1437460 - DNA, 15 bp, Homo sapiens
agtacttactgttta

SEQ ID NO: 1437461 - DNA, 15 bp, Homo sapiens
gtacttactgtttac

SEQ ID NO: 1437462 - DNA, 15 bp, Homo sapiens
tacttactgtttacc

SEQ ID NO: 1437463 - DNA, 15 bp, Homo sapiens
acttactgtttacca

SEQ ID NO: 1437464 - DNA, 15 bp, Homo sapiens
cttactgtttaccac

SEQ ID NO: 1437465 - DNA, 15 bp, Homo sapiens
ttactgtttaccacc

SEQ ID NO: 1437466 - DNA, 15 bp, Homo sapiens
tactgtttaccacct

SEQ ID NO: 1437467 - DNA, 15 bp, Homo sapiens
actgtttaccacctc

SEQ ID NO: 1437468 - DNA, 15 bp, Homo sapiens
ctgtttaccacctca

SEQ ID NO: 1437469 - DNA, 15 bp, Homo sapiens
tgtttaccacctcat

SEQ ID NO: 1437470 - DNA, 15 bp, Homo sapiens
gtttaccacctcata

SEQ ID NO: 1437471 - DNA, 15 bp, Homo sapiens
tttaccacctcatac

SEQ ID NO: 1437472 - DNA, 15 bp, Homo sapiens
ttaccacctcataca

SEQ ID NO: 1437473 - DNA, 15 bp, Homo sapiens
taccacctcatacag

SEQ ID NO: 1437474 - DNA, 15 bp, Homo sapiens
accacctcatacagt

SEQ ID NO: 1437475 - DNA, 15 bp, Homo sapiens
ccacctcatacagtg

SEQ ID NO: 1437476 - DNA, 15 bp, Homo sapiens
cacctcatacagtgg

SEQ ID NO: 1437477 - DNA, 15 bp, Homo sapiens
acctcatacagtggc

SEQ ID NO: 1437478 - DNA, 15 bp, Homo sapiens
cctcatacagtggcc

SEQ ID NO: 1437479 - DNA, 15 bp, Homo sapiens
ctcatacagtggccg

SEQ ID NO: 1437480 - DNA, 15 bp, Homo sapiens
tcatacagtggccga

SEQ ID NO: 1437481 - DNA, 15 bp, Homo sapiens
catacagtggccgat

SEQ ID NO: 1437482 - DNA, 15 bp, Homo sapiens
atacagtggccgata

SEQ ID NO: 1437483 - DNA, 15 bp, Homo sapiens
tacagtggccgataa

SEQ ID NO: 1437484 - DNA, 15 bp, Homo sapiens
acagtggccgataaa

SEQ ID NO: 1437485 - DNA, 15 bp, Homo sapiens
cagtggccgataaaa

SEQ ID NO: 1437486 - DNA, 15 bp, Homo sapiens
agtggccgataaaaa

SEQ ID NO: 1437487 - DNA, 15 bp, Homo sapiens
gtggccgataaaaag

SEQ ID NO: 1437488 - DNA, 15 bp, Homo sapiens
tggccgataaaaagt

SEQ ID NO: 1437489 - DNA, 15 bp, Homo sapiens
ggccgataaaaagtg

SEQ ID NO: 1437490 - DNA, 15 bp, Homo sapiens
gccgataaaaagtgt

SEQ ID NO: 1437491 - DNA, 15 bp, Homo sapiens
ccgataaaaagtgtc

SEQ ID NO: 1437492 - DNA, 15 bp, Homo sapiens
cgataaaaagtgtca

SEQ ID NO: 1437493 - DNA, 15 bp, Homo sapiens
gataaaaagtgtcac

SEQ ID NO: 1437494 - DNA, 15 bp, Homo sapiens
ataaaaagtgtcact

SEQ ID NO: 1437495 - DNA, 15 bp, Homo sapiens
taaaaagtgtcactt

SEQ ID NO: 1437496 - DNA, 15 bp, Homo sapiens
aaaaagtgtcacttc

SEQ ID NO: 1437497 - DNA, 15 bp, Homo sapiens
aaaagtgtcacttct

SEQ ID NO: 1437498 - DNA, 15 bp, Homo sapiens
aaagtgtcacttctg

SEQ ID NO: 1437499 - DNA, 15 bp, Homo sapiens
aagtgtcacttctgc

SEQ ID NO: 1437500 - DNA, 15 bp, Homo sapiens
agtgtcacttctgct

SEQ ID NO: 1437501 - DNA, 15 bp, Homo sapiens
gtgtcacttctgctg

SEQ ID NO: 1437502 - DNA, 15 bp, Homo sapiens
tgtcacttctgctgt

SEQ ID NO: 1437503 - DNA, 15 bp, Homo sapiens
gtcacttctgctgtt

SEQ ID NO: 1437504 - DNA, 15 bp, Homo sapiens
tcacttctgctgttt

SEQ ID NO: 1437505 - DNA, 15 bp, Homo sapiens
cacttctgctgtttc

SEQ ID NO: 1437506 - DNA, 15 bp, Homo sapiens
acttctgctgtttcc

SEQ ID NO: 1437507 - DNA, 15 bp, Homo sapiens
cttctgctgtttcct

SEQ ID NO: 1437508 - DNA, 15 bp, Homo sapiens
ttctgctgtttcctc

SEQ ID NO: 1437509 - DNA, 15 bp, Homo sapiens
tctgctgtttcctct

SEQ ID NO: 1437510 - DNA, 15 bp, Homo sapiens
ctgctgtttcctctg

SEQ ID NO: 1437511 - DNA, 15 bp, Homo sapiens
tgctgtttcctctgg

SEQ ID NO: 1437512 - DNA, 15 bp, Homo sapiens
gctgtttcctctggg

SEQ ID NO: 1437513 - DNA, 15 bp, Homo sapiens
ctgtttcctctgggt

SEQ ID NO: 1437514 - DNA, 15 bp, Homo sapiens
tgtttcctctgggtt

SEQ ID NO: 1437515 - DNA, 15 bp, Homo sapiens
gtttcctctgggttg

SEQ ID NO: 1437516 - DNA, 15 bp, Homo sapiens
tttcctctgggttgt

SEQ ID NO: 1437517 - DNA, 15 bp, Homo sapiens
ttcctctgggttgtg

SEQ ID NO: 1437518 - DNA, 15 bp, Homo sapiens
tcctctgggttgtgc

SEQ ID NO: 1437519 - DNA, 15 bp, Homo sapiens
cctctgggttgtgct

SEQ ID NO: 1437520 - DNA, 15 bp, Homo sapiens
ctctgggttgtgctt

SEQ ID NO: 1437521 - DNA, 15 bp, Homo sapiens
tctgggttgtgcttg

SEQ ID NO: 1437522 - DNA, 15 bp, Homo sapiens
ctgggttgtgcttga

SEQ ID NO: 1437523 - DNA, 15 bp, Homo sapiens
tgggttgtgcttgaa

SEQ ID NO: 1437524 - DNA, 15 bp, Homo sapiens
gggttgtgcttgaat

SEQ ID NO: 1437525 - DNA, 15 bp, Homo sapiens
ggttgtgcttgaatt

SEQ ID NO: 1437526 - DNA, 15 bp, Homo sapiens
gttgtgcttgaatta

SEQ ID NO: 1437527 - DNA, 15 bp, Homo sapiens
ttgtgcttgaattat

SEQ ID NO: 1437528 - DNA, 15 bp, Homo sapiens
tgtgcttgaattatt

SEQ ID NO: 1437529 - DNA, 15 bp, Homo sapiens
gtgcttgaattatta

SEQ ID NO: 1437530 - DNA, 15 bp, Homo sapiens
tgcttgaattattag

SEQ ID NO: 1437531 - DNA, 15 bp, Homo sapiens
gcttgaattattagt

SEQ ID NO: 1437532 - DNA, 15 bp, Homo sapiens
cttgaattattagta

SEQ ID NO: 1437533 - DNA, 15 bp, Homo sapiens
ttgaattattagtat

SEQ ID NO: 1437534 - DNA, 15 bp, Homo sapiens
tgaattattagtatt

SEQ ID NO: 1437535 - DNA, 15 bp, Homo sapiens
gaattattagtatta

SEQ ID NO: 1437536 - DNA, 15 bp, Homo sapiens
attattagtattatc

SEQ ID NO: 1437537 - DNA, 15 bp, Homo sapiens
ttattagtattatct

SEQ ID NO: 1437538 - DNA, 15 bp, Homo sapiens
tattagtattatctt

SEQ ID NO: 1437539 - DNA, 15 bp, Homo sapiens
attagtattatcttc

SEQ ID NO: 1437540 - DNA, 15 bp, Homo sapiens
ttagtattatcttca

SEQ ID NO: 1437541 - DNA, 15 bp, Homo sapiens
tagtattatcttcag

SEQ ID NO: 1437542 - DNA, 15 bp, Homo sapiens
agtattatcttcagt

SEQ ID NO: 1437543 - DNA, 15 bp, Homo sapiens
gtattatcttcagtc

SEQ ID NO: 1437544 - DNA, 15 bp, Homo sapiens
tattatcttcagtcc

SEQ ID NO: 1437545 - DNA, 15 bp, Homo sapiens
attatcttcagtcct

SEQ ID NO: 1437546 - DNA, 15 bp, Homo sapiens
ttatcttcagtcctc

SEQ ID NO: 1437547 - DNA, 15 bp, Homo sapiens
tatcttcagtcctca

SEQ ID NO: 1437548 - DNA, 15 bp, Homo sapiens
atcttcagtcctcag

SEQ ID NO: 1437549 - DNA, 15 bp, Homo sapiens
tcttcagtcctcagt

SEQ ID NO: 1437550 - DNA, 15 bp, Homo sapiens
cttcagtcctcagtt

SEQ ID NO: 1437551 - DNA, 15 bp, Homo sapiens
ttcagtcctcagttt

SEQ ID NO: 1437552 - DNA, 15 bp, Homo sapiens
tcagtcctcagtttc

SEQ ID NO: 1437553 - DNA, 15 bp, Homo sapiens
cagtcctcagtttct

SEQ ID NO: 1437554 - DNA, 15 bp, Homo sapiens
agtcctcagtttctt

SEQ ID NO: 1437555 - DNA, 15 bp, Homo sapiens
gtcctcagtttcttt

SEQ ID NO: 1437556 - DNA, 15 bp, Homo sapiens
tcctcagtttctttg

SEQ ID NO: 1437557 - DNA, 15 bp, Homo sapiens
cctcagtttctttgt

SEQ ID NO: 1437558 - DNA, 15 bp, Homo sapiens
ctcagtttctttgtg

SEQ ID NO: 1437559 - DNA, 15 bp, Homo sapiens
tcagtttctttgtgg

SEQ ID NO: 1437560 - DNA, 15 bp, Homo sapiens
cagtttctttgtggg

SEQ ID NO: 1437561 - DNA, 15 bp, Homo sapiens
agtttctttgtggga

SEQ ID NO: 1437562 - DNA, 15 bp, Homo sapiens
gtttctttgtgggaa

SEQ ID NO: 1437563 - DNA, 15 bp, Homo sapiens
tttctttgtgggaaa

SEQ ID NO: 1437564 - DNA, 15 bp, Homo sapiens
ttctttgtgggaaac

SEQ ID NO: 1437565 - DNA, 15 bp, Homo sapiens
tctttgtgggaaact

SEQ ID NO: 1437566 - DNA, 15 bp, Homo sapiens
ctttgtgggaaactt

SEQ ID NO: 1437567 - DNA, 15 bp, Homo sapiens
tttgtgggaaacttt

SEQ ID NO: 1437568 - DNA, 15 bp, Homo sapiens
ttgtgggaaactttt

SEQ ID NO: 1437569 - DNA, 15 bp, Homo sapiens
tgtgggaaacttttt

SEQ ID NO: 1437570 - DNA, 15 bp, Homo sapiens
gtgggaaacttttta

SEQ ID NO: 1437571 - DNA, 15 bp, Homo sapiens
tgggaaactttttaa

SEQ ID NO: 1437572 - DNA, 15 bp, Homo sapiens
gggaaactttttaat

SEQ ID NO: 1437573 - DNA, 15 bp, Homo sapiens
ggaaactttttaatt

SEQ ID NO: 1437574 - DNA, 15 bp, Homo sapiens
gaaactttttaatta

SEQ ID NO: 1437575 - DNA, 15 bp, Homo sapiens
aaactttttaattag

SEQ ID NO: 1437576 - DNA, 15 bp, Homo sapiens
aactttttaattagt

SEQ ID NO: 1437577 - DNA, 15 bp, Homo sapiens
actttttaattagtt

SEQ ID NO: 1437578 - DNA, 15 bp, Homo sapiens
ctttttaattagttg

SEQ ID NO: 1437579 - DNA, 15 bp, Homo sapiens
tttttaattagttgt

SEQ ID NO: 1437580 - DNA, 15 bp, Homo sapiens
ttttaattagttgtt

SEQ ID NO: 1437581 - DNA, 15 bp, Homo sapiens
tttaattagttgttt

SEQ ID NO: 1437582 - DNA, 15 bp, Homo sapiens
ttaattagttgttta

SEQ ID NO: 1437583 - DNA, 15 bp, Homo sapiens
taattagttgtttaa

SEQ ID NO: 1437584 - DNA, 15 bp, Homo sapiens
aattagttgtttaat

SEQ ID NO: 1437585 - DNA, 15 bp, Homo sapiens
attagttgtttaatt

SEQ ID NO: 1437586 - DNA, 15 bp, Homo sapiens
ttagttgtttaattt

SEQ ID NO: 1437587 - DNA, 15 bp, Homo sapiens
tagttgtttaatttt

SEQ ID NO: 1437588 - DNA, 15 bp, Homo sapiens
agttgtttaattttg

SEQ ID NO: 1437589 - DNA, 15 bp, Homo sapiens
gttgtttaattttgt

SEQ ID NO: 1437590 - DNA, 15 bp, Homo sapiens
ttgtttaattttgta

SEQ ID NO: 1437591 - DNA, 15 bp, Homo sapiens
tgtttaattttgtaa

SEQ ID NO: 1437592 - DNA, 15 bp, Homo sapiens
gtttaattttgtaag

SEQ ID NO: 1437593 - DNA, 15 bp, Homo sapiens
tttaattttgtaaga

SEQ ID NO: 1437594 - DNA, 15 bp, Homo sapiens
ttaattttgtaagat

SEQ ID NO: 1437595 - DNA, 15 bp, Homo sapiens
taattttgtaagatg

SEQ ID NO: 1437596 - DNA, 15 bp, Homo sapiens
aattttgtaagatgg

SEQ ID NO: 1437597 - DNA, 15 bp, Homo sapiens
attttgtaagatggt

SEQ ID NO: 1437598 - DNA, 15 bp, Homo sapiens
ttttgtaagatggtt

SEQ ID NO: 1437599 - DNA, 15 bp, Homo sapiens
tttgtaagatggtta

SEQ ID NO: 1437600 - DNA, 15 bp, Homo sapiens
ttgtaagatggttag

SEQ ID NO: 1437601 - DNA, 15 bp, Homo sapiens
tgtaagatggttagt

SEQ ID NO: 1437602 - DNA, 15 bp, Homo sapiens
gtaagatggttagtt

SEQ ID NO: 1437603 - DNA, 15 bp, Homo sapiens
taagatggttagttt

SEQ ID NO: 1437604 - DNA, 15 bp, Homo sapiens
aagatggttagttta

SEQ ID NO: 1437605 - DNA, 15 bp, Homo sapiens
agatggttagtttag

SEQ ID NO: 1437606 - DNA, 15 bp, Homo sapiens
gatggttagtttagt

SEQ ID NO: 1437607 - DNA, 15 bp, Homo sapiens
atggttagtttagtc

SEQ ID NO: 1437608 - DNA, 15 bp, Homo sapiens
tggttagtttagtca

SEQ ID NO: 1437609 - DNA, 15 bp, Homo sapiens
ggttagtttagtcaa

SEQ ID NO: 1437610 - DNA, 15 bp, Homo sapiens
gttagtttagtcaaa

SEQ ID NO: 1437611 - DNA, 15 bp, Homo sapiens
ttagtttagtcaaaa

SEQ ID NO: 1437612 - DNA, 15 bp, Homo sapiens
tagtttagtcaaaat

SEQ ID NO: 1437613 - DNA, 15 bp, Homo sapiens
agtttagtcaaaatt

SEQ ID NO: 1437614 - DNA, 15 bp, Homo sapiens
gtttagtcaaaatta

SEQ ID NO: 1437615 - DNA, 15 bp, Homo sapiens
tttagtcaaaattag

SEQ ID NO: 1437616 - DNA, 15 bp, Homo sapiens
ttagtcaaaattaga

SEQ ID NO: 1437617 - DNA, 15 bp, Homo sapiens
tagtcaaaattagat

SEQ ID NO: 1437618 - DNA, 15 bp, Homo sapiens
agtcaaaattagata

SEQ ID NO: 1437619 - DNA, 15 bp, Homo sapiens
gtcaaaattagataa

SEQ ID NO: 1437620 - DNA, 15 bp, Homo sapiens
tcaaaattagataag

SEQ ID NO: 1437621 - DNA, 15 bp, Homo sapiens
caaaattagataaga

SEQ ID NO: 1437622 - DNA, 15 bp, Homo sapiens
aaaattagataagag

SEQ ID NO: 1437623 - DNA, 15 bp, Homo sapiens
aaattagataagaga

SEQ ID NO: 1437624 - DNA, 15 bp, Homo sapiens
aattagataagagaa

SEQ ID NO: 1437625 - DNA, 15 bp, Homo sapiens
attagataagagaat

SEQ ID NO: 1437626 - DNA, 15 bp, Homo sapiens
ttagataagagaatt

SEQ ID NO: 1437627 - DNA, 15 bp, Homo sapiens
tagataagagaattt

SEQ ID NO: 1437628 - DNA, 15 bp, Homo sapiens
agataagagaatttg

SEQ ID NO: 1437629 - DNA, 15 bp, Homo sapiens
gataagagaatttga

SEQ ID NO: 1437630 - DNA, 15 bp, Homo sapiens
ataagagaatttgaa

SEQ ID NO: 1437631 - DNA, 15 bp, Homo sapiens
taagagaatttgaaa

SEQ ID NO: 1437632 - DNA, 15 bp, Homo sapiens
aagagaatttgaaaa

SEQ ID NO: 1437633 - DNA, 15 bp, Homo sapiens
agagaatttgaaaat

SEQ ID NO: 1437634 - DNA, 15 bp, Homo sapiens
gagaatttgaaaatc

SEQ ID NO: 1437635 - DNA, 15 bp, Homo sapiens
agaatttgaaaatcc

SEQ ID NO: 1437636 - DNA, 15 bp, Homo sapiens
gaatttgaaaatccg

SEQ ID NO: 1437637 - DNA, 15 bp, Homo sapiens
aatttgaaaatccgt

SEQ ID NO: 1437638 - DNA, 15 bp, Homo sapiens
atttgaaaatccgta

SEQ ID NO: 1437639 - DNA, 15 bp, Homo sapiens
tttgaaaatccgtag

SEQ ID NO: 1437640 - DNA, 15 bp, Homo sapiens
ttgaaaatccgtagc

SEQ ID NO: 1437641 - DNA, 15 bp, Homo sapiens
tgaaaatccgtagct

SEQ ID NO: 1437642 - DNA, 15 bp, Homo sapiens
gaaaatccgtagcta

SEQ ID NO: 1437643 - DNA, 15 bp, Homo sapiens
aaaatccgtagctac

SEQ ID NO: 1437644 - DNA, 15 bp, Homo sapiens
aaatccgtagctacc

SEQ ID NO: 1437645 - DNA, 15 bp, Homo sapiens
aatccgtagctaccc

SEQ ID NO: 1437646 - DNA, 15 bp, Homo sapiens
atccgtagctacccc

SEQ ID NO: 1437647 - DNA, 15 bp, Homo sapiens
tccgtagctacccca

SEQ ID NO: 1437648 - DNA, 15 bp, Homo sapiens
ccgtagctaccccaa

SEQ ID NO: 1437649 - DNA, 15 bp, Homo sapiens
cgtagctaccccaaa

SEQ ID NO: 1437650 - DNA, 15 bp, Homo sapiens
gtagctaccccaaag

SEQ ID NO: 1437651 - DNA, 15 bp, Homo sapiens
tagctaccccaaagc

SEQ ID NO: 1437652 - DNA, 15 bp, Homo sapiens
agctaccccaaagca

SEQ ID NO: 1437653 - DNA, 15 bp, Homo sapiens
gctaccccaaagcaa

SEQ ID NO: 1437654 - DNA, 15 bp, Homo sapiens
ctaccccaaagcaac

SEQ ID NO: 1437655 - DNA, 15 bp, Homo sapiens
taccccaaagcaacc

SEQ ID NO: 1437656 - DNA, 15 bp, Homo sapiens
accccaaagcaacct

SEQ ID NO: 1437657 - DNA, 15 bp, Homo sapiens
ccccaaagcaaccta

SEQ ID NO: 1437658 - DNA, 15 bp, Homo sapiens
cccaaagcaacctac

SEQ ID NO: 1437659 - DNA, 15 bp, Homo sapiens
ccaaagcaacctaca

SEQ ID NO: 1437660 - DNA, 15 bp, Homo sapiens
caaagcaacctacac

SEQ ID NO: 1437661 - DNA, 15 bp, Homo sapiens
aaagcaacctacaca

SEQ ID NO: 1437662 - DNA, 15 bp, Homo sapiens
aagcaacctacacat

SEQ ID NO: 1437663 - DNA, 15 bp, Homo sapiens
agcaacctacacata

SEQ ID NO: 1437664 - DNA, 15 bp, Homo sapiens
gcaacctacacataa

SEQ ID NO: 1437665 - DNA, 15 bp, Homo sapiens
caacctacacataag

SEQ ID NO: 1437666 - DNA, 15 bp, Homo sapiens
aacctacacataaga

SEQ ID NO: 1437667 - DNA, 15 bp, Homo sapiens
acctacacataagaa

SEQ ID NO: 1437668 - DNA, 15 bp, Homo sapiens
cctacacataagaac

SEQ ID NO: 1437669 - DNA, 15 bp, Homo sapiens
ctacacataagaact

SEQ ID NO: 1437670 - DNA, 15 bp, Homo sapiens
tacacataagaacta

SEQ ID NO: 1437671 - DNA, 15 bp, Homo sapiens
acacataagaactat

SEQ ID NO: 1437672 - DNA, 15 bp, Homo sapiens
cacataagaactatt

SEQ ID NO: 1437673 - DNA, 15 bp, Homo sapiens
acataagaactatta

SEQ ID NO: 1437674 - DNA, 15 bp, Homo sapiens
cataagaactattat

SEQ ID NO: 1437675 - DNA, 15 bp, Homo sapiens
ataagaactattatt

SEQ ID NO: 1437676 - DNA, 15 bp, Homo sapiens
taagaactattattt

SEQ ID NO: 1437677 - DNA, 15 bp, Homo sapiens
aagaactattatttt

SEQ ID NO: 1437678 - DNA, 15 bp, Homo sapiens
agaactattattttt

SEQ ID NO: 1437679 - DNA, 15 bp, Homo sapiens
gaactattatttttg

SEQ ID NO: 1437680 - DNA, 15 bp, Homo sapiens
aactattatttttgt

SEQ ID NO: 1437681 - DNA, 15 bp, Homo sapiens
actattatttttgtg

SEQ ID NO: 1437682 - DNA, 15 bp, Homo sapiens
ctattatttttgtgt

SEQ ID NO: 1437683 - DNA, 15 bp, Homo sapiens
tattatttttgtgtt

SEQ ID NO: 1437684 - DNA, 15 bp, Homo sapiens
attatttttgtgttt

SEQ ID NO: 1437685 - DNA, 15 bp, Homo sapiens
ttatttttgtgtttt

SEQ ID NO: 1437686 - DNA, 15 bp, Homo sapiens
tatttttgtgttttg

SEQ ID NO: 1437687 - DNA, 15 bp, Homo sapiens
atttttgtgttttga

SEQ ID NO: 1437688 - DNA, 15 bp, Homo sapiens
tttttgtgttttgaa

SEQ ID NO: 1437689 - DNA, 15 bp, Homo sapiens
ttttgtgttttgaaa

SEQ ID NO: 1437690 - DNA, 15 bp, Homo sapiens
tttgtgttttgaaat

SEQ ID NO: 1437691 - DNA, 15 bp, Homo sapiens
ttgtgttttgaaatc

SEQ ID NO: 1437692 - DNA, 15 bp, Homo sapiens
tgtgttttgaaatca

SEQ ID NO: 1437693 - DNA, 15 bp, Homo sapiens
gtgttttgaaatcat

SEQ ID NO: 1437694 - DNA, 15 bp, Homo sapiens
tgttttgaaatcata

SEQ ID NO: 1437695 - DNA, 15 bp, Homo sapiens
gttttgaaatcataa

SEQ ID NO: 1437696 - DNA, 15 bp, Homo sapiens
ttttgaaatcataat

SEQ ID NO: 1437697 - DNA, 15 bp, Homo sapiens
tttgaaatcataatt

SEQ ID NO: 1437698 - DNA, 15 bp, Homo sapiens
ttgaaatcataattt

SEQ ID NO: 1437699 - DNA, 15 bp, Homo sapiens
tgaaatcataatttt

SEQ ID NO: 1437700 - DNA, 15 bp, Homo sapiens
gaaatcataatttta

SEQ ID NO: 1437701 - DNA, 15 bp, Homo sapiens
aaatcataattttat

SEQ ID NO: 1437702 - DNA, 15 bp, Homo sapiens
aatcataattttatt

SEQ ID NO: 1437703 - DNA, 15 bp, Homo sapiens
atcataattttattg

SEQ ID NO: 1437704 - DNA, 15 bp, Homo sapiens
tcataattttattga

SEQ ID NO: 1437705 - DNA, 15 bp, Homo sapiens
cataattttattgat

SEQ ID NO: 1437706 - DNA, 15 bp, Homo sapiens
ataattttattgatt

SEQ ID NO: 1437707 - DNA, 15 bp, Homo sapiens
taattttattgattt

SEQ ID NO: 1437708 - DNA, 15 bp, Homo sapiens
aattttattgatttc

SEQ ID NO: 1437709 - DNA, 15 bp, Homo sapiens
attttattgatttcc

SEQ ID NO: 1437710 - DNA, 15 bp, Homo sapiens
ttttattgatttcca

SEQ ID NO: 1437711 - DNA, 15 bp, Homo sapiens
tttattgatttccag

SEQ ID NO: 1437712 - DNA, 15 bp, Homo sapiens
ttattgatttccagt

SEQ ID NO: 1437713 - DNA, 15 bp, Homo sapiens
tattgatttccagtg

SEQ ID NO: 1437714 - DNA, 15 bp, Homo sapiens
attgatttccagtgt

SEQ ID NO: 1437715 - DNA, 15 bp, Homo sapiens
ttgatttccagtgtt

SEQ ID NO: 1437716 - DNA, 15 bp, Homo sapiens
tgatttccagtgttt

SEQ ID NO: 1437717 - DNA, 15 bp, Homo sapiens
gatttccagtgtttc

SEQ ID NO: 1437718 - DNA, 15 bp, Homo sapiens
atttccagtgtttcc

SEQ ID NO: 1437719 - DNA, 15 bp, Homo sapiens
tttccagtgtttcca

SEQ ID NO: 1437720 - DNA, 15 bp, Homo sapiens
ttccagtgtttccac

SEQ ID NO: 1437721 - DNA, 15 bp, Homo sapiens
tccagtgtttccact

SEQ ID NO: 1437722 - DNA, 15 bp, Homo sapiens
ccagtgtttccactg

SEQ ID NO: 1437723 - DNA, 15 bp, Homo sapiens
cagtgtttccactgg

SEQ ID NO: 1437724 - DNA, 15 bp, Homo sapiens
agtgtttccactggt

SEQ ID NO: 1437725 - DNA, 15 bp, Homo sapiens
gtgtttccactggta

SEQ ID NO: 1437726 - DNA, 15 bp, Homo sapiens
tgtttccactggtag

SEQ ID NO: 1437727 - DNA, 15 bp, Homo sapiens
gtttccactggtagt

SEQ ID NO: 1437728 - DNA, 15 bp, Homo sapiens
tttccactggtagtg

SEQ ID NO: 1437729 - DNA, 15 bp, Homo sapiens
ttccactggtagtgg

SEQ ID NO: 1437730 - DNA, 15 bp, Homo sapiens
tccactggtagtggt

SEQ ID NO: 1437731 - DNA, 15 bp, Homo sapiens
ccactggtagtggtt

SEQ ID NO: 1437732 - DNA, 15 bp, Homo sapiens
cactggtagtggttt

SEQ ID NO: 1437733 - DNA, 15 bp, Homo sapiens
actggtagtggtttc

SEQ ID NO: 1437734 - DNA, 15 bp, Homo sapiens
ctggtagtggtttca

SEQ ID NO: 1437735 - DNA, 15 bp, Homo sapiens
tggtagtggtttcat

SEQ ID NO: 1437736 - DNA, 15 bp, Homo sapiens
ggtagtggtttcatt

SEQ ID NO: 1437737 - DNA, 15 bp, Homo sapiens
gtagtggtttcattg

SEQ ID NO: 1437738 - DNA, 15 bp, Homo sapiens
tagtggtttcattga

SEQ ID NO: 1437739 - DNA, 15 bp, Homo sapiens
agtggtttcattgat

SEQ ID NO: 1437740 - DNA, 15 bp, Homo sapiens
gtggtttcattgata

SEQ ID NO: 1437741 - DNA, 15 bp, Homo sapiens
tggtttcattgatat

SEQ ID NO: 1437742 - DNA, 15 bp, Homo sapiens
ggtttcattgatata

SEQ ID NO: 1437743 - DNA, 15 bp, Homo sapiens
gtttcattgatatag

SEQ ID NO: 1437744 - DNA, 15 bp, Homo sapiens
tttcattgatatagg

SEQ ID NO: 1437745 - DNA, 15 bp, Homo sapiens
ttcattgatatagga

SEQ ID NO: 1437746 - DNA, 15 bp, Homo sapiens
tcattgatataggag

SEQ ID NO: 1437747 - DNA, 15 bp, Homo sapiens
cattgatataggagt

SEQ ID NO: 1437748 - DNA, 15 bp, Homo sapiens
attgatataggagta

SEQ ID NO: 1437749 - DNA, 15 bp, Homo sapiens
ttgatataggagtat

SEQ ID NO: 1437750 - DNA, 15 bp, Homo sapiens
tgatataggagtatc

SEQ ID NO: 1437751 - DNA, 15 bp, Homo sapiens
gatataggagtatca

SEQ ID NO: 1437752 - DNA, 15 bp, Homo sapiens
atataggagtatcaa

SEQ ID NO: 1437753 - DNA, 15 bp, Homo sapiens
tataggagtatcaaa

SEQ ID NO: 1437754 - DNA, 15 bp, Homo sapiens
ataggagtatcaaaa

SEQ ID NO: 1437755 - DNA, 15 bp, Homo sapiens
taggagtatcaaaac

SEQ ID NO: 1437756 - DNA, 15 bp, Homo sapiens
aggagtatcaaaaca

SEQ ID NO: 1437757 - DNA, 15 bp, Homo sapiens
ggagtatcaaaacat

SEQ ID NO: 1437758 - DNA, 15 bp, Homo sapiens
gagtatcaaaacatc

SEQ ID NO: 1437759 - DNA, 15 bp, Homo sapiens
agtatcaaaacatca

SEQ ID NO: 1437760 - DNA, 15 bp, Homo sapiens
gtatcaaaacatcac

SEQ ID NO: 1437761 - DNA, 15 bp, Homo sapiens
tatcaaaacatcact

SEQ ID NO: 1437762 - DNA, 15 bp, Homo sapiens
atcaaaacatcactc

SEQ ID NO: 1437763 - DNA, 15 bp, Homo sapiens
tcaaaacatcactca

SEQ ID NO: 1437764 - DNA, 15 bp, Homo sapiens
caaaacatcactcat

SEQ ID NO: 1437765 - DNA, 15 bp, Homo sapiens
aaaacatcactcatt

SEQ ID NO: 1437766 - DNA, 15 bp, Homo sapiens
aaacatcactcatta

SEQ ID NO: 1437767 - DNA, 15 bp, Homo sapiens
aacatcactcattat

SEQ ID NO: 1437768 - DNA, 15 bp, Homo sapiens
acatcactcattatt

SEQ ID NO: 1437769 - DNA, 15 bp, Homo sapiens
catcactcattattt

SEQ ID NO: 1437770 - DNA, 15 bp, Homo sapiens
atcactcattattta

SEQ ID NO: 1437771 - DNA, 15 bp, Homo sapiens
tcactcattatttat

SEQ ID NO: 1437772 - DNA, 15 bp, Homo sapiens
cactcattatttatt

SEQ ID NO: 1437773 - DNA, 15 bp, Homo sapiens
actcattatttattt

SEQ ID NO: 1437774 - DNA, 15 bp, Homo sapiens
ctcattatttatttc

SEQ ID NO: 1437775 - DNA, 15 bp, Homo sapiens
tcattatttatttca

SEQ ID NO: 1437776 - DNA, 15 bp, Homo sapiens
cattatttatttcag

SEQ ID NO: 1437777 - DNA, 15 bp, Homo sapiens
attatttatttcagt

SEQ ID NO: 1437778 - DNA, 15 bp, Homo sapiens
ttatttatttcagtt

SEQ ID NO: 1437779 - DNA, 15 bp, Homo sapiens
tatttatttcagttt

SEQ ID NO: 1437780 - DNA, 15 bp, Homo sapiens
atttatttcagtttc

SEQ ID NO: 1437781 - DNA, 15 bp, Homo sapiens
ttatttcagtttcat

SEQ ID NO: 1437782 - DNA, 15 bp, Homo sapiens
tatttcagtttcatt

SEQ ID NO: 1437783 - DNA, 15 bp, Homo sapiens
atttcagtttcattt

SEQ ID NO: 1437784 - DNA, 15 bp, Homo sapiens
tttcagtttcatttg

SEQ ID NO: 1437785 - DNA, 15 bp, Homo sapiens
ttcagtttcatttga

SEQ ID NO: 1437786 - DNA, 15 bp, Homo sapiens
tcagtttcatttgat

SEQ ID NO: 1437787 - DNA, 15 bp, Homo sapiens
cagtttcatttgatc

SEQ ID NO: 1437788 - DNA, 15 bp, Homo sapiens
agtttcatttgatcc

SEQ ID NO: 1437789 - DNA, 15 bp, Homo sapiens
gtttcatttgatcct

SEQ ID NO: 1437790 - DNA, 15 bp, Homo sapiens
tttcatttgatccta

SEQ ID NO: 1437791 - DNA, 15 bp, Homo sapiens
ttcatttgatcctag

SEQ ID NO: 1437792 - DNA, 15 bp, Homo sapiens
tcatttgatcctagc

SEQ ID NO: 1437793 - DNA, 15 bp, Homo sapiens
catttgatcctagcc

SEQ ID NO: 1437794 - DNA, 15 bp, Homo sapiens
atttgatcctagccg

SEQ ID NO: 1437795 - DNA, 15 bp, Homo sapiens
tttgatcctagccgt

SEQ ID NO: 1437796 - DNA, 15 bp, Homo sapiens
ttgatcctagccgtt

SEQ ID NO: 1437797 - DNA, 15 bp, Homo sapiens
tgatcctagccgttt

SEQ ID NO: 1437798 - DNA, 15 bp, Homo sapiens
gatcctagccgtttt

SEQ ID NO: 1437799 - DNA, 15 bp, Homo sapiens
atcctagccgttttg

SEQ ID NO: 1437800 - DNA, 15 bp, Homo sapiens
tcctagccgttttgt

SEQ ID NO: 1437801 - DNA, 15 bp, Homo sapiens
cctagccgttttgta

SEQ ID NO: 1437802 - DNA, 15 bp, Homo sapiens
ctagccgttttgtat

SEQ ID NO: 1437803 - DNA, 15 bp, Homo sapiens
tagccgttttgtatt

SEQ ID NO: 1437804 - DNA, 15 bp, Homo sapiens
agccgttttgtatta

SEQ ID NO: 1437805 - DNA, 15 bp, Homo sapiens
gccgttttgtattaa

SEQ ID NO: 1437806 - DNA, 15 bp, Homo sapiens
ccgttttgtattaac

SEQ ID NO: 1437807 - DNA, 15 bp, Homo sapiens
cgttttgtattaact

SEQ ID NO: 1437808 - DNA, 15 bp, Homo sapiens
gttttgtattaactc

SEQ ID NO: 1437809 - DNA, 15 bp, Homo sapiens
ttttgtattaactct

SEQ ID NO: 1437810 - DNA, 15 bp, Homo sapiens
tttgtattaactctc

SEQ ID NO: 1437811 - DNA, 15 bp, Homo sapiens
ttgtattaactctct

SEQ ID NO: 1437812 - DNA, 15 bp, Homo sapiens
tgtattaactctctg

SEQ ID NO: 1437813 - DNA, 15 bp, Homo sapiens
gtattaactctctgt

SEQ ID NO: 1437814 - DNA, 15 bp, Homo sapiens
tattaactctctgtg

SEQ ID NO: 1437815 - DNA, 15 bp, Homo sapiens
attaactctctgtga

SEQ ID NO: 1437816 - DNA, 15 bp, Homo sapiens
ttaactctctgtgaa

SEQ ID NO: 1437817 - DNA, 15 bp, Homo sapiens
taactctctgtgaag

SEQ ID NO: 1437818 - DNA, 15 bp, Homo sapiens
aactctctgtgaaga

SEQ ID NO: 1437819 - DNA, 15 bp, Homo sapiens
actctctgtgaagaa

SEQ ID NO: 1437820 - DNA, 15 bp, Homo sapiens
ctctctgtgaagaaa

SEQ ID NO: 1437821 - DNA, 15 bp, Homo sapiens
tctctgtgaagaaat

SEQ ID NO: 1437822 - DNA, 15 bp, Homo sapiens
ctctgtgaagaaatt

SEQ ID NO: 1437823 - DNA, 15 bp, Homo sapiens
tctgtgaagaaatta

SEQ ID NO: 1437824 - DNA, 15 bp, Homo sapiens
ctgtgaagaaattac

SEQ ID NO: 1437825 - DNA, 15 bp, Homo sapiens
tgtgaagaaattacc

SEQ ID NO: 1437826 - DNA, 15 bp, Homo sapiens
gtgaagaaattacct

SEQ ID NO: 1437827 - DNA, 15 bp, Homo sapiens
tgaagaaattacctc

SEQ ID NO: 1437828 - DNA, 15 bp, Homo sapiens
gaagaaattacctca

SEQ ID NO: 1437829 - DNA, 15 bp, Homo sapiens
aagaaattacctcac

SEQ ID NO: 1437830 - DNA, 15 bp, Homo sapiens
agaaattacctcaca

SEQ ID NO: 1437831 - DNA, 15 bp, Homo sapiens
gaaattacctcacaa

SEQ ID NO: 1437832 - DNA, 15 bp, Homo sapiens
aaattacctcacaaa

SEQ ID NO: 1437833 - DNA, 15 bp, Homo sapiens
aattacctcacaaat

SEQ ID NO: 1437834 - DNA, 15 bp, Homo sapiens
attacctcacaaatc

SEQ ID NO: 1437835 - DNA, 15 bp, Homo sapiens
ttacctcacaaatct

SEQ ID NO: 1437836 - DNA, 15 bp, Homo sapiens
tacctcacaaatcta

SEQ ID NO: 1437837 - DNA, 15 bp, Homo sapiens
acctcacaaatctat

SEQ ID NO: 1437838 - DNA, 15 bp, Homo sapiens
cctcacaaatctatt

SEQ ID NO: 1437839 - DNA, 15 bp, Homo sapiens
ctcacaaatctattg

SEQ ID NO: 1437840 - DNA, 15 bp, Homo sapiens
tcacaaatctattgc

SEQ ID NO: 1437841 - DNA, 15 bp, Homo sapiens
cacaaatctattgct

SEQ ID NO: 1437842 - DNA, 15 bp, Homo sapiens
acaaatctattgctg

SEQ ID NO: 1437843 - DNA, 15 bp, Homo sapiens
caaatctattgctgt

SEQ ID NO: 1437844 - DNA, 15 bp, Homo sapiens
aaatctattgctgtc

SEQ ID NO: 1437845 - DNA, 15 bp, Homo sapiens
aatctattgctgtcc

SEQ ID NO: 1437846 - DNA, 15 bp, Homo sapiens
atctattgctgtcct

SEQ ID NO: 1437847 - DNA, 15 bp, Homo sapiens
tctattgctgtcctt

SEQ ID NO: 1437848 - DNA, 15 bp, Homo sapiens
ctattgctgtccttg

SEQ ID NO: 1437849 - DNA, 15 bp, Homo sapiens
tattgctgtccttgg

SEQ ID NO: 1437850 - DNA, 15 bp, Homo sapiens
attgctgtccttggt

SEQ ID NO: 1437851 - DNA, 15 bp, Homo sapiens
ttgctgtccttggta

SEQ ID NO: 1437852 - DNA, 15 bp, Homo sapiens
tgctgtccttggtaa

SEQ ID NO: 1437853 - DNA, 15 bp, Homo sapiens
gctgtccttggtaaa

SEQ ID NO: 1437854 - DNA, 15 bp, Homo sapiens
ctgtccttggtaaag

SEQ ID NO: 1437855 - DNA, 15 bp, Homo sapiens
tgtccttggtaaagg

SEQ ID NO: 1437856 - DNA, 15 bp, Homo sapiens
gtccttggtaaagga

SEQ ID NO: 1437857 - DNA, 15 bp, Homo sapiens
tccttggtaaaggaa

SEQ ID NO: 1437858 - DNA, 15 bp, Homo sapiens
ccttggtaaaggaat

SEQ ID NO: 1437859 - DNA, 15 bp, Homo sapiens
cttggtaaaggaatg

SEQ ID NO: 1437860 - DNA, 15 bp, Homo sapiens
ttggtaaaggaatgg

SEQ ID NO: 1437861 - DNA, 15 bp, Homo sapiens
tggtaaaggaatgga

SEQ ID NO: 1437862 - DNA, 15 bp, Homo sapiens
ggtaaaggaatggag

SEQ ID NO: 1437863 - DNA, 15 bp, Homo sapiens
gtaaaggaatggaga

SEQ ID NO: 1437864 - DNA, 15 bp, Homo sapiens
taaaggaatggagaa

SEQ ID NO: 1437865 - DNA, 15 bp, Homo sapiens
aaaggaatggagaat

SEQ ID NO: 1437866 - DNA, 15 bp, Homo sapiens
aaggaatggagaatt

SEQ ID NO: 1437867 - DNA, 15 bp, Homo sapiens
aggaatggagaatta

SEQ ID NO: 1437868 - DNA, 15 bp, Homo sapiens
ggaatggagaattaa

SEQ ID NO: 1437869 - DNA, 15 bp, Homo sapiens
gaatggagaattaag

SEQ ID NO: 1437870 - DNA, 15 bp, Homo sapiens
aatggagaattaagg

SEQ ID NO: 1437871 - DNA, 15 bp, Homo sapiens
atggagaattaaggc

SEQ ID NO: 1437872 - DNA, 15 bp, Homo sapiens
tggagaattaaggct

SEQ ID NO: 1437873 - DNA, 15 bp, Homo sapiens
ggagaattaaggctc

SEQ ID NO: 1437874 - DNA, 15 bp, Homo sapiens
gagaattaaggctct

SEQ ID NO: 1437875 - DNA, 15 bp, Homo sapiens
agaattaaggctcta

SEQ ID NO: 1437876 - DNA, 15 bp, Homo sapiens
gaattaaggctctag

SEQ ID NO: 1437877 - DNA, 15 bp, Homo sapiens
aattaaggctctaga

SEQ ID NO: 1437878 - DNA, 15 bp, Homo sapiens
attaaggctctagat

SEQ ID NO: 1437879 - DNA, 15 bp, Homo sapiens
ttaaggctctagatc

SEQ ID NO: 1437880 - DNA, 15 bp, Homo sapiens
taaggctctagatca

SEQ ID NO: 1437881 - DNA, 15 bp, Homo sapiens
aaggctctagatcat

SEQ ID NO: 1437882 - DNA, 15 bp, Homo sapiens
aggctctagatcatt

SEQ ID NO: 1437883 - DNA, 15 bp, Homo sapiens
ggctctagatcatta

SEQ ID NO: 1437884 - DNA, 15 bp, Homo sapiens
gctctagatcattag

SEQ ID NO: 1437885 - DNA, 15 bp, Homo sapiens
ctctagatcattagt

SEQ ID NO: 1437886 - DNA, 15 bp, Homo sapiens
tctagatcattagtg

SEQ ID NO: 1437887 - DNA, 15 bp, Homo sapiens
ctagatcattagtgg

SEQ ID NO: 1437888 - DNA, 15 bp, Homo sapiens
tagatcattagtggt

SEQ ID NO: 1437889 - DNA, 15 bp, Homo sapiens
agatcattagtggtt

SEQ ID NO: 1437890 - DNA, 15 bp, Homo sapiens
gatcattagtggtta

SEQ ID NO: 1437891 - DNA, 15 bp, Homo sapiens
atcattagtggttac

SEQ ID NO: 1437892 - DNA, 15 bp, Homo sapiens
tcattagtggttaca

SEQ ID NO: 1437893 - DNA, 15 bp, Homo sapiens
cattagtggttacac

SEQ ID NO: 1437894 - DNA, 15 bp, Homo sapiens
attagtggttacact

SEQ ID NO: 1437895 - DNA, 15 bp, Homo sapiens
ttagtggttacacta

SEQ ID NO: 1437896 - DNA, 15 bp, Homo sapiens
tagtggttacactat

SEQ ID NO: 1437897 - DNA, 15 bp, Homo sapiens
agtggttacactata

SEQ ID NO: 1437898 - DNA, 15 bp, Homo sapiens
gtggttacactatag

SEQ ID NO: 1437899 - DNA, 15 bp, Homo sapiens
tggttacactatagt

SEQ ID NO: 1437900 - DNA, 15 bp, Homo sapiens
ggttacactatagta

SEQ ID NO: 1437901 - DNA, 15 bp, Homo sapiens
gttacactatagtat

SEQ ID NO: 1437902 - DNA, 15 bp, Homo sapiens
ttacactatagtatt

SEQ ID NO: 1437903 - DNA, 15 bp, Homo sapiens
tacactatagtatta

SEQ ID NO: 1437904 - DNA, 15 bp, Homo sapiens
acactatagtattag

SEQ ID NO: 1437905 - DNA, 15 bp, Homo sapiens
cactatagtattaga

SEQ ID NO: 1437906 - DNA, 15 bp, Homo sapiens
actatagtattagaa

SEQ ID NO: 1437907 - DNA, 15 bp, Homo sapiens
ctatagtattagaag

SEQ ID NO: 1437908 - DNA, 15 bp, Homo sapiens
tatagtattagaagt

SEQ ID NO: 1437909 - DNA, 15 bp, Homo sapiens
atagtattagaagta

SEQ ID NO: 1437910 - DNA, 15 bp, Homo sapiens
tagtattagaagtaa

SEQ ID NO: 1437911 - DNA, 15 bp, Homo sapiens
agtattagaagtaaa

SEQ ID NO: 1437912 - DNA, 15 bp, Homo sapiens
gtattagaagtaaaa

SEQ ID NO: 1437913 - DNA, 15 bp, Homo sapiens
tattagaagtaaaaa

SEQ ID NO: 1437914 - DNA, 15 bp, Homo sapiens
attagaagtaaaaaa

SEQ ID NO: 1437915 - DNA, 15 bp, Homo sapiens
ttagaagtaaaaaaa

SEQ ID NO: 1437916 - DNA, 15 bp, Homo sapiens
tagaagtaaaaaaaa

SEQ ID NO: 1437917 - DNA, 15 bp, Homo sapiens
agaagtaaaaaaaag

SEQ ID NO: 1437918 - DNA, 15 bp, Homo sapiens
gaagtaaaaaaaaga

SEQ ID NO: 1437919 - DNA, 15 bp, Homo sapiens
aagtaaaaaaaagat

SEQ ID NO: 1437920 - DNA, 15 bp, Homo sapiens
agtaaaaaaaagatt

SEQ ID NO: 1437921 - DNA, 15 bp, Homo sapiens
gtaaaaaaaagatta

SEQ ID NO: 1437922 - DNA, 15 bp, Homo sapiens
taaaaaaaagattat

SEQ ID NO: 1437923 - DNA, 15 bp, Homo sapiens
aaaaaaaagattata

SEQ ID NO: 1437924 - DNA, 15 bp, Homo sapiens
aaaaaaagattatac

SEQ ID NO: 1437925 - DNA, 15 bp, Homo sapiens
aaaaaagattatacc

SEQ ID NO: 1437926 - DNA, 15 bp, Homo sapiens
aaaaagattatacca

SEQ ID NO: 1437927 - DNA, 15 bp, Homo sapiens
aaaagattataccaa

SEQ ID NO: 1437928 - DNA, 15 bp, Homo sapiens
aaagattataccaac

SEQ ID NO: 1437929 - DNA, 15 bp, Homo sapiens
aagattataccaaca

SEQ ID NO: 1437930 - DNA, 15 bp, Homo sapiens
agattataccaacaa

SEQ ID NO: 1437931 - DNA, 15 bp, Homo sapiens
gattataccaacaaa

SEQ ID NO: 1437932 - DNA, 15 bp, Homo sapiens
attataccaacaaaa

SEQ ID NO: 1437933 - DNA, 15 bp, Homo sapiens
ttataccaacaaaat

SEQ ID NO: 1437934 - DNA, 15 bp, Homo sapiens
tataccaacaaaata

SEQ ID NO: 1437935 - DNA, 15 bp, Homo sapiens
ataccaacaaaataa

SEQ ID NO: 1437936 - DNA, 15 bp, Homo sapiens
taccaacaaaataag

SEQ ID NO: 1437937 - DNA, 15 bp, Homo sapiens
accaacaaaataaga

SEQ ID NO: 1437938 - DNA, 15 bp, Homo sapiens
ccaacaaaataagaa

SEQ ID NO: 1437939 - DNA, 15 bp, Homo sapiens
caacaaaataagaac

SEQ ID NO: 1437940 - DNA, 15 bp, Homo sapiens
aacaaaataagaaca

SEQ ID NO: 1437941 - DNA, 15 bp, Homo sapiens
acaaaataagaacat

SEQ ID NO: 1437942 - DNA, 15 bp, Homo sapiens
caaaataagaacatg

SEQ ID NO: 1437943 - DNA, 15 bp, Homo sapiens
aaaataagaacatgt

SEQ ID NO: 1437944 - DNA, 15 bp, Homo sapiens
aaataagaacatgtt

SEQ ID NO: 1437945 - DNA, 15 bp, Homo sapiens
aataagaacatgtta

SEQ ID NO: 1437946 - DNA, 15 bp, Homo sapiens
ataagaacatgttaa

SEQ ID NO: 1437947 - DNA, 15 bp, Homo sapiens
taagaacatgttaat

SEQ ID NO: 1437948 - DNA, 15 bp, Homo sapiens
aagaacatgttaatg

SEQ ID NO: 1437949 - DNA, 15 bp, Homo sapiens
agaacatgttaatgt

SEQ ID NO: 1437950 - DNA, 15 bp, Homo sapiens
gaacatgttaatgta

SEQ ID NO: 1437951 - DNA, 15 bp, Homo sapiens
aacatgttaatgtac

SEQ ID NO: 1437952 - DNA, 15 bp, Homo sapiens
acatgttaatgtact

SEQ ID NO: 1437953 - DNA, 15 bp, Homo sapiens
catgttaatgtactt

SEQ ID NO: 1437954 - DNA, 15 bp, Homo sapiens
atgttaatgtacttg

SEQ ID NO: 1437955 - DNA, 15 bp, Homo sapiens
tgttaatgtacttgt

SEQ ID NO: 1437956 - DNA, 15 bp, Homo sapiens
gttaatgtacttgta

SEQ ID NO: 1437957 - DNA, 15 bp, Homo sapiens
ttaatgtacttgtaa

SEQ ID NO: 1437958 - DNA, 15 bp, Homo sapiens
taatgtacttgtaat

SEQ ID NO: 1437959 - DNA, 15 bp, Homo sapiens
aatgtacttgtaatg

SEQ ID NO: 1437960 - DNA, 15 bp, Homo sapiens
atgtacttgtaatga

SEQ ID NO: 1437961 - DNA, 15 bp, Homo sapiens
tgtacttgtaatgaa

SEQ ID NO: 1437962 - DNA, 15 bp, Homo sapiens
gtacttgtaatgaat

SEQ ID NO: 1437963 - DNA, 15 bp, Homo sapiens
tacttgtaatgaata

SEQ ID NO: 1437964 - DNA, 15 bp, Homo sapiens
acttgtaatgaataa

SEQ ID NO: 1437965 - DNA, 15 bp, Homo sapiens
cttgtaatgaataaa

SEQ ID NO: 1437966 - DNA, 15 bp, Homo sapiens
ttgtaatgaataaac

SEQ ID NO: 1437967 - DNA, 15 bp, Homo sapiens
tgtaatgaataaaca

SEQ ID NO: 1437968 - DNA, 15 bp, Homo sapiens
gtaatgaataaacat

SEQ ID NO: 1437969 - DNA, 15 bp, Homo sapiens
taatgaataaacatg

SEQ ID NO: 1437970 - DNA, 15 bp, Homo sapiens
aatgaataaacatga

SEQ ID NO: 1437971 - DNA, 15 bp, Homo sapiens
atgaataaacatgaa

SEQ ID NO: 1437972 - DNA, 15 bp, Homo sapiens
tgaataaacatgaat

SEQ ID NO: 1437973 - DNA, 15 bp, Homo sapiens
gaataaacatgaata

SEQ ID NO: 1437974 - DNA, 15 bp, Homo sapiens
aataaacatgaataa

SEQ ID NO: 1437975 - DNA, 15 bp, Homo sapiens
ataaacatgaataaa

SEQ ID NO: 1437976 - DNA, 15 bp, Homo sapiens
taaacatgaataaag

SEQ ID NO: 1437977 - DNA, 15 bp, Homo sapiens
aaacatgaataaagc

SEQ ID NO: 1437978 - DNA, 15 bp, Homo sapiens
aacatgaataaagct

SEQ ID NO: 1437979 - DNA, 15 bp, Homo sapiens
acatgaataaagctc

SEQ ID NO: 1437980 - DNA, 15 bp, Homo sapiens
catgaataaagctct

SEQ ID NO: 1437981 - DNA, 15 bp, Homo sapiens
atgaataaagctctt

SEQ ID NO: 1437982 - DNA, 15 bp, Homo sapiens
tgaataaagctctta

SEQ ID NO: 1437983 - DNA, 15 bp, Homo sapiens
gaataaagctcttat

SEQ ID NO: 1437984 - DNA, 15 bp, Homo sapiens
aataaagctcttatg

SEQ ID NO: 1437985 - DNA, 15 bp, Homo sapiens
ataaagctcttatgc

SEQ ID NO: 1437986 - DNA, 15 bp, Homo sapiens
taaagctcttatgct

SEQ ID NO: 1437987 - DNA, 15 bp, Homo sapiens
aaagctcttatgcta

SEQ ID NO: 1437988 - DNA, 15 bp, Homo sapiens
aagctcttatgctat

SEQ ID NO: 1437989 - DNA, 15 bp, Homo sapiens
agctcttatgctata

SEQ ID NO: 1437990 - DNA, 15 bp, Homo sapiens
gctcttatgctatat

SEQ ID NO: 1437991 - DNA, 15 bp, Homo sapiens
ctcttatgctatata

SEQ ID NO: 1437992 - DNA, 15 bp, Homo sapiens
tcttatgctatatag

SEQ ID NO: 1437993 - DNA, 15 bp, Homo sapiens
cttatgctatatagg

SEQ ID NO: 1437994 - DNA, 15 bp, Homo sapiens
ttatgctatataggt

SEQ ID NO: 1437995 - DNA, 15 bp, Homo sapiens
tatgctatataggtg

SEQ ID NO: 1437996 - DNA, 15 bp, Homo sapiens
atgctatataggtgc

SEQ ID NO: 1437997 - DNA, 15 bp, Homo sapiens
tgctatataggtgca

SEQ ID NO: 1437998 - DNA, 15 bp, Homo sapiens
gctatataggtgcac

SEQ ID NO: 1437999 - DNA, 15 bp, Homo sapiens
ctatataggtgcact

SEQ ID NO: 1438000 - DNA, 15 bp, Homo sapiens
tatataggtgcacta

SEQ ID NO: 1438001 - DNA, 15 bp, Homo sapiens
atataggtgcactaa

SEQ ID NO: 1438002 - DNA, 15 bp, Homo sapiens
tataggtgcactaaa

SEQ ID NO: 1438003 - DNA, 15 bp, Homo sapiens
ataggtgcactaaac

SEQ ID NO: 1438004 - DNA, 15 bp, Homo sapiens
taggtgcactaaaca

SEQ ID NO: 1438005 - DNA, 15 bp, Homo sapiens
aggtgcactaaacaa

SEQ ID NO: 1438006 - DNA, 15 bp, Homo sapiens
ggtgcactaaacaat

SEQ ID NO: 1438007 - DNA, 15 bp, Homo sapiens
gtgcactaaacaatc

SEQ ID NO: 1438008 - DNA, 15 bp, Homo sapiens
tgcactaaacaatct

SEQ ID NO: 1438009 - DNA, 15 bp, Homo sapiens
gcactaaacaatcta

SEQ ID NO: 1438010 - DNA, 15 bp, Homo sapiens
cactaaacaatctac

SEQ ID NO: 1438011 - DNA, 15 bp, Homo sapiens
actaaacaatctact

SEQ ID NO: 1438012 - DNA, 15 bp, Homo sapiens
ctaaacaatctacta

SEQ ID NO: 1438013 - DNA, 15 bp, Homo sapiens
taaacaatctactag

SEQ ID NO: 1438014 - DNA, 15 bp, Homo sapiens
aaacaatctactaga

SEQ ID NO: 1438015 - DNA, 15 bp, Homo sapiens
aacaatctactagaa

SEQ ID NO: 1438016 - DNA, 15 bp, Homo sapiens
acaatctactagaat

SEQ ID NO: 1438017 - DNA, 15 bp, Homo sapiens
caatctactagaatt

SEQ ID NO: 1438018 - DNA, 15 bp, Homo sapiens
aatctactagaattg

SEQ ID NO: 1438019 - DNA, 15 bp, Homo sapiens
atctactagaattgt

SEQ ID NO: 1438020 - DNA, 15 bp, Homo sapiens
tctactagaattgtc

SEQ ID NO: 1438021 - DNA, 15 bp, Homo sapiens
ctactagaattgtca

SEQ ID NO: 1438022 - DNA, 15 bp, Homo sapiens
tactagaattgtcag

SEQ ID NO: 1438023 - DNA, 15 bp, Homo sapiens
actagaattgtcagc

SEQ ID NO: 1438024 - DNA, 15 bp, Homo sapiens
ctagaattgtcagca

SEQ ID NO: 1438025 - DNA, 15 bp, Homo sapiens
tagaattgtcagcaa

SEQ ID NO: 1438026 - DNA, 15 bp, Homo sapiens
agaattgtcagcaaa

SEQ ID NO: 1438027 - DNA, 15 bp, Homo sapiens
gaattgtcagcaaac

SEQ ID NO: 1438028 - DNA, 15 bp, Homo sapiens
aattgtcagcaaact

SEQ ID NO: 1438029 - DNA, 15 bp, Homo sapiens
attgtcagcaaacta

SEQ ID NO: 1438030 - DNA, 15 bp, Homo sapiens
ttgtcagcaaactac

SEQ ID NO: 1438031 - DNA, 15 bp, Homo sapiens
tgtcagcaaactacg

SEQ ID NO: 1438032 - DNA, 15 bp, Homo sapiens
gtcagcaaactacgt

SEQ ID NO: 1438033 - DNA, 15 bp, Homo sapiens
tcagcaaactacgta

SEQ ID NO: 1438034 - DNA, 15 bp, Homo sapiens
cagcaaactacgtat

SEQ ID NO: 1438035 - DNA, 15 bp, Homo sapiens
agcaaactacgtatc

SEQ ID NO: 1438036 - DNA, 15 bp, Homo sapiens
gcaaactacgtatct

SEQ ID NO: 1438037 - DNA, 15 bp, Homo sapiens
caaactacgtatctt

SEQ ID NO: 1438038 - DNA, 15 bp, Homo sapiens
aaactacgtatctta

SEQ ID NO: 1438039 - DNA, 15 bp, Homo sapiens
aactacgtatcttaa

SEQ ID NO: 1438040 - DNA, 15 bp, Homo sapiens
actacgtatcttaat

SEQ ID NO: 1438041 - DNA, 15 bp, Homo sapiens
ctacgtatcttaatc

SEQ ID NO: 1438042 - DNA, 15 bp, Homo sapiens
tacgtatcttaatcc

SEQ ID NO: 1438043 - DNA, 15 bp, Homo sapiens
acgtatcttaatcct

SEQ ID NO: 1438044 - DNA, 15 bp, Homo sapiens
cgtatcttaatcctg

SEQ ID NO: 1438045 - DNA, 15 bp, Homo sapiens
gtatcttaatcctga

SEQ ID NO: 1438046 - DNA, 15 bp, Homo sapiens
tatcttaatcctgaa

SEQ ID NO: 1438047 - DNA, 15 bp, Homo sapiens
atcttaatcctgaaa

SEQ ID NO: 1438048 - DNA, 15 bp, Homo sapiens
tcttaatcctgaaag

SEQ ID NO: 1438049 - DNA, 15 bp, Homo sapiens
cttaatcctgaaagg

SEQ ID NO: 1438050 - DNA, 15 bp, Homo sapiens
ttaatcctgaaaggg

SEQ ID NO: 1438051 - DNA, 15 bp, Homo sapiens
taatcctgaaagggt

SEQ ID NO: 1438052 - DNA, 15 bp, Homo sapiens
aatcctgaaagggtc

SEQ ID NO: 1438053 - DNA, 15 bp, Homo sapiens
atcctgaaagggtcc

SEQ ID NO: 1438054 - DNA, 15 bp, Homo sapiens
tcctgaaagggtccc

SEQ ID NO: 1438055 - DNA, 15 bp, Homo sapiens
cctgaaagggtccca

SEQ ID NO: 1438056 - DNA, 15 bp, Homo sapiens
ctgaaagggtcccaa

SEQ ID NO: 1438057 - DNA, 15 bp, Homo sapiens
tgaaagggtcccaaa

SEQ ID NO: 1438058 - DNA, 15 bp, Homo sapiens
gaaagggtcccaaac

SEQ ID NO: 1438059 - DNA, 15 bp, Homo sapiens
aaagggtcccaaacc

SEQ ID NO: 1438060 - DNA, 15 bp, Homo sapiens
aagggtcccaaacca

SEQ ID NO: 1438061 - DNA, 15 bp, Homo sapiens
agggtcccaaaccaa

SEQ ID NO: 1438062 - DNA, 15 bp, Homo sapiens
gggtcccaaaccaat

SEQ ID NO: 1438063 - DNA, 15 bp, Homo sapiens
ggtcccaaaccaatg

SEQ ID NO: 1438064 - DNA, 15 bp, Homo sapiens
gtcccaaaccaatga

SEQ ID NO: 1438065 - DNA, 15 bp, Homo sapiens
tcccaaaccaatgat

SEQ ID NO: 1438066 - DNA, 15 bp, Homo sapiens
cccaaaccaatgatc

SEQ ID NO: 1438067 - DNA, 15 bp, Homo sapiens
ccaaaccaatgatct

SEQ ID NO: 1438068 - DNA, 15 bp, Homo sapiens
caaaccaatgatcta

SEQ ID NO: 1438069 - DNA, 15 bp, Homo sapiens
aaaccaatgatctaa

SEQ ID NO: 1438070 - DNA, 15 bp, Homo sapiens
aaccaatgatctaaa

SEQ ID NO: 1438071 - DNA, 15 bp, Homo sapiens
accaatgatctaaaa

SEQ ID NO: 1438072 - DNA, 15 bp, Homo sapiens
ccaatgatctaaaat

SEQ ID NO: 1438073 - DNA, 15 bp, Homo sapiens
caatgatctaaaatt

SEQ ID NO: 1438074 - DNA, 15 bp, Homo sapiens
aatgatctaaaattg

SEQ ID NO: 1438075 - DNA, 15 bp, Homo sapiens
atgatctaaaattga

SEQ ID NO: 1438076 - DNA, 15 bp, Homo sapiens
tgatctaaaattgaa

SEQ ID NO: 1438077 - DNA, 15 bp, Homo sapiens
gatctaaaattgaat

SEQ ID NO: 1438078 - DNA, 15 bp, Homo sapiens
atctaaaattgaatc

SEQ ID NO: 1438079 - DNA, 15 bp, Homo sapiens
tctaaaattgaatca

SEQ ID NO: 1438080 - DNA, 15 bp, Homo sapiens
ctaaaattgaatcaa

SEQ ID NO: 1438081 - DNA, 15 bp, Homo sapiens
taaaattgaatcaaa

SEQ ID NO: 1438082 - DNA, 15 bp, Homo sapiens
aaaattgaatcaaac

SEQ ID NO: 1438083 - DNA, 15 bp, Homo sapiens
aaattgaatcaaact

SEQ ID NO: 1438084 - DNA, 15 bp, Homo sapiens
aattgaatcaaactt

SEQ ID NO: 1438085 - DNA, 15 bp, Homo sapiens
attgaatcaaacttt

SEQ ID NO: 1438086 - DNA, 15 bp, Homo sapiens
ttgaatcaaactttc

SEQ ID NO: 1438087 - DNA, 15 bp, Homo sapiens
tgaatcaaactttct

SEQ ID NO: 1438088 - DNA, 15 bp, Homo sapiens
gaatcaaactttctt

SEQ ID NO: 1438089 - DNA, 15 bp, Homo sapiens
aatcaaactttcttc

SEQ ID NO: 1438090 - DNA, 15 bp, Homo sapiens
atcaaactttcttcc

SEQ ID NO: 1438091 - DNA, 15 bp, Homo sapiens
tcaaactttcttcct

SEQ ID NO: 1438092 - DNA, 15 bp, Homo sapiens
caaactttcttcctt

SEQ ID NO: 1438093 - DNA, 15 bp, Homo sapiens
aaactttcttccttg

SEQ ID NO: 1438094 - DNA, 15 bp, Homo sapiens
aactttcttccttga

SEQ ID NO: 1438095 - DNA, 15 bp, Homo sapiens
actttcttccttgag

SEQ ID NO: 1438096 - DNA, 15 bp, Homo sapiens
ctttcttccttgagc

SEQ ID NO: 1438097 - DNA, 15 bp, Homo sapiens
tttcttccttgagca

SEQ ID NO: 1438098 - DNA, 15 bp, Homo sapiens
ttcttccttgagcat

SEQ ID NO: 1438099 - DNA, 15 bp, Homo sapiens
tcttccttgagcata

SEQ ID NO: 1438100 - DNA, 15 bp, Homo sapiens
cttccttgagcataa

SEQ ID NO: 1438101 - DNA, 15 bp, Homo sapiens
ttccttgagcataat

SEQ ID NO: 1438102 - DNA, 15 bp, Homo sapiens
tccttgagcataatt

SEQ ID NO: 1438103 - DNA, 15 bp, Homo sapiens
ccttgagcataatta

SEQ ID NO: 1438104 - DNA, 15 bp, Homo sapiens
cttgagcataattac

SEQ ID NO: 1438105 - DNA, 15 bp, Homo sapiens
ttgagcataattact

SEQ ID NO: 1438106 - DNA, 15 bp, Homo sapiens
tgagcataattactt

SEQ ID NO: 1438107 - DNA, 15 bp, Homo sapiens
gagcataattactta

SEQ ID NO: 1438108 - DNA, 15 bp, Homo sapiens
agcataattacttaa

SEQ ID NO: 1438109 - DNA, 15 bp, Homo sapiens
gcataattacttaaa

SEQ ID NO: 1438110 - DNA, 15 bp, Homo sapiens
cataattacttaaat

SEQ ID NO: 1438111 - DNA, 15 bp, Homo sapiens
ataattacttaaatg

SEQ ID NO: 1438112 - DNA, 15 bp, Homo sapiens
taattacttaaatga

SEQ ID NO: 1438113 - DNA, 15 bp, Homo sapiens
aattacttaaatgat

SEQ ID NO: 1438114 - DNA, 15 bp, Homo sapiens
attacttaaatgatt

SEQ ID NO: 1438115 - DNA, 15 bp, Homo sapiens
ttacttaaatgattt

SEQ ID NO: 1438116 - DNA, 15 bp, Homo sapiens
tacttaaatgattta

SEQ ID NO: 1438117 - DNA, 15 bp, Homo sapiens
acttaaatgatttat

SEQ ID NO: 1438118 - DNA, 15 bp, Homo sapiens
cttaaatgatttatt

SEQ ID NO: 1438119 - DNA, 15 bp, Homo sapiens
ttaaatgatttatta

SEQ ID NO: 1438120 - DNA, 15 bp, Homo sapiens
taaatgatttattaa

SEQ ID NO: 1438121 - DNA, 15 bp, Homo sapiens
aaatgatttattaaa

SEQ ID NO: 1438122 - DNA, 15 bp, Homo sapiens
aatgatttattaaaa

SEQ ID NO: 1438123 - DNA, 15 bp, Homo sapiens
atgatttattaaaat

SEQ ID NO: 1438124 - DNA, 15 bp, Homo sapiens
tgatttattaaaata

SEQ ID NO: 1438125 - DNA, 15 bp, Homo sapiens
gatttattaaaatag

SEQ ID NO: 1438126 - DNA, 15 bp, Homo sapiens
atttattaaaatagc

SEQ ID NO: 1438127 - DNA, 15 bp, Homo sapiens
tttattaaaatagcc

SEQ ID NO: 1438128 - DNA, 15 bp, Homo sapiens
ttattaaaatagcca

SEQ ID NO: 1438129 - DNA, 15 bp, Homo sapiens
tattaaaatagccag

SEQ ID NO: 1438130 - DNA, 15 bp, Homo sapiens
attaaaatagccagc

SEQ ID NO: 1438131 - DNA, 15 bp, Homo sapiens
ttaaaatagccagca

SEQ ID NO: 1438132 - DNA, 15 bp, Homo sapiens
taaaatagccagcat

SEQ ID NO: 1438133 - DNA, 15 bp, Homo sapiens
aaaatagccagcatt

SEQ ID NO: 1438134 - DNA, 15 bp, Homo sapiens
aaatagccagcattt

SEQ ID NO: 1438135 - DNA, 15 bp, Homo sapiens
aatagccagcattta

SEQ ID NO: 1438136 - DNA, 15 bp, Homo sapiens
atagccagcatttaa

SEQ ID NO: 1438137 - DNA, 15 bp, Homo sapiens
tagccagcatttaaa

SEQ ID NO: 1438138 - DNA, 15 bp, Homo sapiens
agccagcatttaaaa

SEQ ID NO: 1438139 - DNA, 15 bp, Homo sapiens
gccagcatttaaaag

SEQ ID NO: 1438140 - DNA, 15 bp, Homo sapiens
ccagcatttaaaagc

SEQ ID NO: 1438141 - DNA, 15 bp, Homo sapiens
cagcatttaaaagct

SEQ ID NO: 1438142 - DNA, 15 bp, Homo sapiens
agcatttaaaagctt

SEQ ID NO: 1438143 - DNA, 15 bp, Homo sapiens
gcatttaaaagctta

SEQ ID NO: 1438144 - DNA, 15 bp, Homo sapiens
catttaaaagcttaa

SEQ ID NO: 1438145 - DNA, 15 bp, Homo sapiens
atttaaaagcttaaa

SEQ ID NO: 1438146 - DNA, 15 bp, Homo sapiens
tttaaaagcttaaaa

SEQ ID NO: 1438147 - DNA, 15 bp, Homo sapiens
ttaaaagcttaaaat

SEQ ID NO: 1438148 - DNA, 15 bp, Homo sapiens
taaaagcttaaaatg

SEQ ID NO: 1438149 - DNA, 15 bp, Homo sapiens
aaaagcttaaaatgt

SEQ ID NO: 1438150 - DNA, 15 bp, Homo sapiens
aaagcttaaaatgta

SEQ ID NO: 1438151 - DNA, 15 bp, Homo sapiens
aagcttaaaatgtaa

SEQ ID NO: 1438152 - DNA, 15 bp, Homo sapiens
agcttaaaatgtaaa

SEQ ID NO: 1438153 - DNA, 15 bp, Homo sapiens
gcttaaaatgtaaat

SEQ ID NO: 1438154 - DNA, 15 bp, Homo sapiens
cttaaaatgtaaata

SEQ ID NO: 1438155 - DNA, 15 bp, Homo sapiens
ttaaaatgtaaatat

SEQ ID NO: 1438156 - DNA, 15 bp, Homo sapiens
taaaatgtaaatatc

SEQ ID NO: 1438157 - DNA, 15 bp, Homo sapiens
aaaatgtaaatatca

SEQ ID NO: 1438158 - DNA, 15 bp, Homo sapiens
aaatgtaaatatcat

SEQ ID NO: 1438159 - DNA, 15 bp, Homo sapiens
aatgtaaatatcata

SEQ ID NO: 1438160 - DNA, 15 bp, Homo sapiens
atgtaaatatcataa

SEQ ID NO: 1438161 - DNA, 15 bp, Homo sapiens
tgtaaatatcataat

SEQ ID NO: 1438162 - DNA, 15 bp, Homo sapiens
gtaaatatcataatg

SEQ ID NO: 1438163 - DNA, 15 bp, Homo sapiens
taaatatcataatgt

SEQ ID NO: 1438164 - DNA, 15 bp, Homo sapiens
aaatatcataatgtg

SEQ ID NO: 1438165 - DNA, 15 bp, Homo sapiens
aatatcataatgtgg

SEQ ID NO: 1438166 - DNA, 15 bp, Homo sapiens
atatcataatgtggt

SEQ ID NO: 1438167 - DNA, 15 bp, Homo sapiens
tatcataatgtggta

SEQ ID NO: 1438168 - DNA, 15 bp, Homo sapiens
atcataatgtggtat

SEQ ID NO: 1438169 - DNA, 15 bp, Homo sapiens
tcataatgtggtatc

SEQ ID NO: 1438170 - DNA, 15 bp, Homo sapiens
cataatgtggtatcc

SEQ ID NO: 1438171 - DNA, 15 bp, Homo sapiens
ataatgtggtatcct

SEQ ID NO: 1438172 - DNA, 15 bp, Homo sapiens
taatgtggtatccta

SEQ ID NO: 1438173 - DNA, 15 bp, Homo sapiens
aatgtggtatcctag

SEQ ID NO: 1438174 - DNA, 15 bp, Homo sapiens
atgtggtatcctaga

SEQ ID NO: 1438175 - DNA, 15 bp, Homo sapiens
tgtggtatcctagat

SEQ ID NO: 1438176 - DNA, 15 bp, Homo sapiens
gtggtatcctagata

SEQ ID NO: 1438177 - DNA, 15 bp, Homo sapiens
tggtatcctagatag

SEQ ID NO: 1438178 - DNA, 15 bp, Homo sapiens
ggtatcctagatagc

SEQ ID NO: 1438179 - DNA, 15 bp, Homo sapiens
gtatcctagatagca

SEQ ID NO: 1438180 - DNA, 15 bp, Homo sapiens
tatcctagatagcat

SEQ ID NO: 1438181 - DNA, 15 bp, Homo sapiens
atcctagatagcatc

SEQ ID NO: 1438182 - DNA, 15 bp, Homo sapiens
tcctagatagcatcc

SEQ ID NO: 1438183 - DNA, 15 bp, Homo sapiens
cctagatagcatccc

SEQ ID NO: 1438184 - DNA, 15 bp, Homo sapiens
ctagatagcatccca

SEQ ID NO: 1438185 - DNA, 15 bp, Homo sapiens
tagatagcatcccag

SEQ ID NO: 1438186 - DNA, 15 bp, Homo sapiens
agatagcatcccaga

SEQ ID NO: 1438187 - DNA, 15 bp, Homo sapiens
gatagcatcccagaa

SEQ ID NO: 1438188 - DNA, 15 bp, Homo sapiens
atagcatcccagaac

SEQ ID NO: 1438189 - DNA, 15 bp, Homo sapiens
catcccagaacagaa

SEQ ID NO: 1438190 - DNA, 15 bp, Homo sapiens
atcccagaacagaaa

SEQ ID NO: 1438191 - DNA, 15 bp, Homo sapiens
tcccagaacagaaaa

SEQ ID NO: 1438192 - DNA, 15 bp, Homo sapiens
cccagaacagaaaaa

SEQ ID NO: 1438193 - DNA, 15 bp, Homo sapiens
ccagaacagaaaaag

SEQ ID NO: 1438194 - DNA, 15 bp, Homo sapiens
cagaacagaaaaagg

SEQ ID NO: 1438195 - DNA, 15 bp, Homo sapiens
agaacagaaaaagga

SEQ ID NO: 1438196 - DNA, 15 bp, Homo sapiens
gaacagaaaaaggat

SEQ ID NO: 1438197 - DNA, 15 bp, Homo sapiens
aacagaaaaaggata

SEQ ID NO: 1438198 - DNA, 15 bp, Homo sapiens
acagaaaaaggatat

SEQ ID NO: 1438199 - DNA, 15 bp, Homo sapiens
cagaaaaaggatatt

SEQ ID NO: 1438200 - DNA, 15 bp, Homo sapiens
agaaaaaggatatta

SEQ ID NO: 1438201 - DNA, 15 bp, Homo sapiens
gaaaaaggatattag

SEQ ID NO: 1438202 - DNA, 15 bp, Homo sapiens
aaaaaggatattagg

SEQ ID NO: 1438203 - DNA, 15 bp, Homo sapiens
aaaaggatattaggg

SEQ ID NO: 1438204 - DNA, 15 bp, Homo sapiens
aaaggatattaggga

SEQ ID NO: 1438205 - DNA, 15 bp, Homo sapiens
aaggatattagggaa

SEQ ID NO: 1438206 - DNA, 15 bp, Homo sapiens
aggatattagggaaa

SEQ ID NO: 1438207 - DNA, 15 bp, Homo sapiens
ggatattagggaaaa

SEQ ID NO: 1438208 - DNA, 15 bp, Homo sapiens
gatattagggaaaaa

SEQ ID NO: 1438209 - DNA, 15 bp, Homo sapiens
atattagggaaaaac

SEQ ID NO: 1438210 - DNA, 15 bp, Homo sapiens
tattagggaaaaact

SEQ ID NO: 1438211 - DNA, 15 bp, Homo sapiens
attagggaaaaactg

SEQ ID NO: 1438212 - DNA, 15 bp, Homo sapiens
ttagggaaaaactgg

SEQ ID NO: 1438213 - DNA, 15 bp, Homo sapiens
tagggaaaaactgga

SEQ ID NO: 1438214 - DNA, 15 bp, Homo sapiens
agggaaaaactggag

SEQ ID NO: 1438215 - DNA, 15 bp, Homo sapiens
gggaaaaactggagg

SEQ ID NO: 1438216 - DNA, 15 bp, Homo sapiens
ggaaaaactggagga

SEQ ID NO: 1438217 - DNA, 15 bp, Homo sapiens
gaaaaactggaggaa

SEQ ID NO: 1438218 - DNA, 15 bp, Homo sapiens
aaaaactggaggaat

SEQ ID NO: 1438219 - DNA, 15 bp, Homo sapiens
aaaactggaggaatg

SEQ ID NO: 1438220 - DNA, 15 bp, Homo sapiens
aaactggaggaatgg

SEQ ID NO: 1438221 - DNA, 15 bp, Homo sapiens
aactggaggaatgga

SEQ ID NO: 1438222 - DNA, 15 bp, Homo sapiens
actggaggaatggaa

SEQ ID NO: 1438223 - DNA, 15 bp, Homo sapiens
ctggaggaatggaat

SEQ ID NO: 1438224 - DNA, 15 bp, Homo sapiens
tggaggaatggaata

SEQ ID NO: 1438225 - DNA, 15 bp, Homo sapiens
ggaggaatggaataa

SEQ ID NO: 1438226 - DNA, 15 bp, Homo sapiens
gaggaatggaataaa

SEQ ID NO: 1438227 - DNA, 15 bp, Homo sapiens
aggaatggaataaat

SEQ ID NO: 1438228 - DNA, 15 bp, Homo sapiens
ggaatggaataaatt

SEQ ID NO: 1438229 - DNA, 15 bp, Homo sapiens
gaatggaataaatta

SEQ ID NO: 1438230 - DNA, 15 bp, Homo sapiens
aatggaataaattat

SEQ ID NO: 1438231 - DNA, 15 bp, Homo sapiens
atggaataaattatg

SEQ ID NO: 1438232 - DNA, 15 bp, Homo sapiens
tggaataaattatgc

SEQ ID NO: 1438233 - DNA, 15 bp, Homo sapiens
ggaataaattatgca

SEQ ID NO: 1438234 - DNA, 15 bp, Homo sapiens
gaataaattatgcag

SEQ ID NO: 1438235 - DNA, 15 bp, Homo sapiens
aataaattatgcagt

SEQ ID NO: 1438236 - DNA, 15 bp, Homo sapiens
ataaattatgcagtt

SEQ ID NO: 1438237 - DNA, 15 bp, Homo sapiens
taaattatgcagttt

SEQ ID NO: 1438238 - DNA, 15 bp, Homo sapiens
aaattatgcagttta

SEQ ID NO: 1438239 - DNA, 15 bp, Homo sapiens
attatgcagtttagt

SEQ ID NO: 1438240 - DNA, 15 bp, Homo sapiens
ttatgcagtttagtt

SEQ ID NO: 1438241 - DNA, 15 bp, Homo sapiens
tatgcagtttagtta

SEQ ID NO: 1438242 - DNA, 15 bp, Homo sapiens
atgcagtttagttat

SEQ ID NO: 1438243 - DNA, 15 bp, Homo sapiens
tgcagtttagttatt

SEQ ID NO: 1438244 - DNA, 15 bp, Homo sapiens
gcagtttagttatta

SEQ ID NO: 1438245 - DNA, 15 bp, Homo sapiens
cagtttagttattaa

SEQ ID NO: 1438246 - DNA, 15 bp, Homo sapiens
agtttagttattaat

SEQ ID NO: 1438247 - DNA, 15 bp, Homo sapiens
gtttagttattaata

SEQ ID NO: 1438248 - DNA, 15 bp, Homo sapiens
tttagttattaataa

SEQ ID NO: 1438249 - DNA, 15 bp, Homo sapiens
ttagttattaataat

SEQ ID NO: 1438250 - DNA, 15 bp, Homo sapiens
tagttattaataatg

SEQ ID NO: 1438251 - DNA, 15 bp, Homo sapiens
agttattaataatgt

SEQ ID NO: 1438252 - DNA, 15 bp, Homo sapiens
gttattaataatgta

SEQ ID NO: 1438253 - DNA, 15 bp, Homo sapiens
ttattaataatgtac

SEQ ID NO: 1438254 - DNA, 15 bp, Homo sapiens
tattaataatgtact

SEQ ID NO: 1438255 - DNA, 15 bp, Homo sapiens
attaataatgtacta

SEQ ID NO: 1438256 - DNA, 15 bp, Homo sapiens
ttaataatgtactaa

SEQ ID NO: 1438257 - DNA, 15 bp, Homo sapiens
taataatgtactaac

SEQ ID NO: 1438258 - DNA, 15 bp, Homo sapiens
aataatgtactaacg

SEQ ID NO: 1438259 - DNA, 15 bp, Homo sapiens
ataatgtactaacgt

SEQ ID NO: 1438260 - DNA, 15 bp, Homo sapiens
taatgtactaacgtc

SEQ ID NO: 1438261 - DNA, 15 bp, Homo sapiens
aatgtactaacgtcc

SEQ ID NO: 1438262 - DNA, 15 bp, Homo sapiens
atgtactaacgtcct

SEQ ID NO: 1438263 - DNA, 15 bp, Homo sapiens
tgtactaacgtcctt

SEQ ID NO: 1438264 - DNA, 15 bp, Homo sapiens
gtactaacgtcctta

SEQ ID NO: 1438265 - DNA, 15 bp, Homo sapiens
tactaacgtccttag

SEQ ID NO: 1438266 - DNA, 15 bp, Homo sapiens
actaacgtccttagt

SEQ ID NO: 1438267 - DNA, 15 bp, Homo sapiens
ctaacgtccttagtt

SEQ ID NO: 1438268 - DNA, 15 bp, Homo sapiens
taacgtccttagtta

SEQ ID NO: 1438269 - DNA, 15 bp, Homo sapiens
aacgtccttagttat

SEQ ID NO: 1438270 - DNA, 15 bp, Homo sapiens
acgtccttagttatg

SEQ ID NO: 1438271 - DNA, 15 bp, Homo sapiens
cgtccttagttatga

SEQ ID NO: 1438272 - DNA, 15 bp, Homo sapiens
gtccttagttatgac

SEQ ID NO: 1438273 - DNA, 15 bp, Homo sapiens
tccttagttatgacg

SEQ ID NO: 1438274 - DNA, 15 bp, Homo sapiens
ccttagttatgacga

SEQ ID NO: 1438275 - DNA, 15 bp, Homo sapiens
cttagttatgacgat

SEQ ID NO: 1438276 - DNA, 15 bp, Homo sapiens
ttagttatgacgatt

SEQ ID NO: 1438277 - DNA, 15 bp, Homo sapiens
tagttatgacgattg

SEQ ID NO: 1438278 - DNA, 15 bp, Homo sapiens
agttatgacgattgt

SEQ ID NO: 1438279 - DNA, 15 bp, Homo sapiens
gttatgacgattgta

SEQ ID NO: 1438280 - DNA, 15 bp, Homo sapiens
ttatgacgattgtac

SEQ ID NO: 1438281 - DNA, 15 bp, Homo sapiens
tatgacgattgtacc

SEQ ID NO: 1438282 - DNA, 15 bp, Homo sapiens
atgacgattgtacca

SEQ ID NO: 1438283 - DNA, 15 bp, Homo sapiens
tgacgattgtaccat

SEQ ID NO: 1438284 - DNA, 15 bp, Homo sapiens
gacgattgtaccatg

SEQ ID NO: 1438285 - DNA, 15 bp, Homo sapiens
acgattgtaccatgg

SEQ ID NO: 1438286 - DNA, 15 bp, Homo sapiens
cgattgtaccatggt

SEQ ID NO: 1438287 - DNA, 15 bp, Homo sapiens
gattgtaccatggta

SEQ ID NO: 1438288 - DNA, 15 bp, Homo sapiens
attgtaccatggtaa

SEQ ID NO: 1438289 - DNA, 15 bp, Homo sapiens
ttgtaccatggtaat

SEQ ID NO: 1438290 - DNA, 15 bp, Homo sapiens
tgtaccatggtaatg

SEQ ID NO: 1438291 - DNA, 15 bp, Homo sapiens
gtaccatggtaatgt

SEQ ID NO: 1438292 - DNA, 15 bp, Homo sapiens
taccatggtaatgta

SEQ ID NO: 1438293 - DNA, 15 bp, Homo sapiens
accatggtaatgtaa

SEQ ID NO: 1438294 - DNA, 15 bp, Homo sapiens
ccatggtaatgtaag

SEQ ID NO: 1438295 - DNA, 15 bp, Homo sapiens
catggtaatgtaaga

SEQ ID NO: 1438296 - DNA, 15 bp, Homo sapiens
atggtaatgtaagat

SEQ ID NO: 1438297 - DNA, 15 bp, Homo sapiens
tggtaatgtaagata

SEQ ID NO: 1438298 - DNA, 15 bp, Homo sapiens
ggtaatgtaagatac

SEQ ID NO: 1438299 - DNA, 15 bp, Homo sapiens
gtaatgtaagatact

SEQ ID NO: 1438300 - DNA, 15 bp, Homo sapiens
taatgtaagatacta

SEQ ID NO: 1438301 - DNA, 15 bp, Homo sapiens
aatgtaagatactaa

SEQ ID NO: 1438302 - DNA, 15 bp, Homo sapiens
atgtaagatactaac

SEQ ID NO: 1438303 - DNA, 15 bp, Homo sapiens
tgtaagatactaaca

SEQ ID NO: 1438304 - DNA, 15 bp, Homo sapiens
gtaagatactaacaa

SEQ ID NO: 1438305 - DNA, 15 bp, Homo sapiens
taagatactaacaat

SEQ ID NO: 1438306 - DNA, 15 bp, Homo sapiens
aagatactaacaata

SEQ ID NO: 1438307 - DNA, 15 bp, Homo sapiens
agatactaacaatag

SEQ ID NO: 1438308 - DNA, 15 bp, Homo sapiens
gatactaacaataga

SEQ ID NO: 1438309 - DNA, 15 bp, Homo sapiens
atactaacaatagag

SEQ ID NO: 1438310 - DNA, 15 bp, Homo sapiens
tactaacaatagagg

SEQ ID NO: 1438311 - DNA, 15 bp, Homo sapiens
actaacaatagagga

SEQ ID NO: 1438312 - DNA, 15 bp, Homo sapiens
ctaacaatagaggaa

SEQ ID NO: 1438313 - DNA, 15 bp, Homo sapiens
taacaatagaggaaa

SEQ ID NO: 1438314 - DNA, 15 bp, Homo sapiens
aacaatagaggaaac

SEQ ID NO: 1438315 - DNA, 15 bp, Homo sapiens
acaatagaggaaacc

SEQ ID NO: 1438316 - DNA, 15 bp, Homo sapiens
caatagaggaaaccg

SEQ ID NO: 1438317 - DNA, 15 bp, Homo sapiens
aatagaggaaaccgg

SEQ ID NO: 1438318 - DNA, 15 bp, Homo sapiens
atagaggaaaccggg

SEQ ID NO: 1438319 - DNA, 15 bp, Homo sapiens
tagaggaaaccgggt

SEQ ID NO: 1438320 - DNA, 15 bp, Homo sapiens
agaggaaaccgggta

SEQ ID NO: 1438321 - DNA, 15 bp, Homo sapiens
gaggaaaccgggtaa

SEQ ID NO: 1438322 - DNA, 15 bp, Homo sapiens
aggaaaccgggtaag

SEQ ID NO: 1438323 - DNA, 15 bp, Homo sapiens
ggaaaccgggtaagg

SEQ ID NO: 1438324 - DNA, 15 bp, Homo sapiens
gaaaccgggtaagga

SEQ ID NO: 1438325 - DNA, 15 bp, Homo sapiens
aaaccgggtaaggag

SEQ ID NO: 1438326 - DNA, 15 bp, Homo sapiens
aaccgggtaaggagt

SEQ ID NO: 1438327 - DNA, 15 bp, Homo sapiens
accgggtaaggagta

SEQ ID NO: 1438328 - DNA, 15 bp, Homo sapiens
ccgggtaaggagtat

SEQ ID NO: 1438329 - DNA, 15 bp, Homo sapiens
cgggtaaggagtata

SEQ ID NO: 1438330 - DNA, 15 bp, Homo sapiens
gggtaaggagtatac

SEQ ID NO: 1438331 - DNA, 15 bp, Homo sapiens
ggtaaggagtataca

SEQ ID NO: 1438332 - DNA, 15 bp, Homo sapiens
gtaaggagtatacag

SEQ ID NO: 1438333 - DNA, 15 bp, Homo sapiens
taaggagtatacagt

SEQ ID NO: 1438334 - DNA, 15 bp, Homo sapiens
aaggagtatacagta

SEQ ID NO: 1438335 - DNA, 15 bp, Homo sapiens
aggagtatacagtaa

SEQ ID NO: 1438336 - DNA, 15 bp, Homo sapiens
ggagtatacagtaac

SEQ ID NO: 1438337 - DNA, 15 bp, Homo sapiens
gagtatacagtaact

SEQ ID NO: 1438338 - DNA, 15 bp, Homo sapiens
agtatacagtaactc

SEQ ID NO: 1438339 - DNA, 15 bp, Homo sapiens
gtatacagtaactct

SEQ ID NO: 1438340 - DNA, 15 bp, Homo sapiens
tatacagtaactcta

SEQ ID NO: 1438341 - DNA, 15 bp, Homo sapiens
atacagtaactctat

SEQ ID NO: 1438342 - DNA, 15 bp, Homo sapiens
tacagtaactctata

SEQ ID NO: 1438343 - DNA, 15 bp, Homo sapiens
acagtaactctatac

SEQ ID NO: 1438344 - DNA, 15 bp, Homo sapiens
cagtaactctatact

SEQ ID NO: 1438345 - DNA, 15 bp, Homo sapiens
agtaactctatacta

SEQ ID NO: 1438346 - DNA, 15 bp, Homo sapiens
gtaactctatactat

SEQ ID NO: 1438347 - DNA, 15 bp, Homo sapiens
taactctatactatc

SEQ ID NO: 1438348 - DNA, 15 bp, Homo sapiens
aactctatactatct

SEQ ID NO: 1438349 - DNA, 15 bp, Homo sapiens
actctatactatctt

SEQ ID NO: 1438350 - DNA, 15 bp, Homo sapiens
ctctatactatcttt

SEQ ID NO: 1438351 - DNA, 15 bp, Homo sapiens
tctatactatctttg

SEQ ID NO: 1438352 - DNA, 15 bp, Homo sapiens
ctatactatctttgc

SEQ ID NO: 1438353 - DNA, 15 bp, Homo sapiens
tatactatctttgca

SEQ ID NO: 1438354 - DNA, 15 bp, Homo sapiens
atactatctttgcaa

SEQ ID NO: 1438355 - DNA, 15 bp, Homo sapiens
tactatctttgcaac

SEQ ID NO: 1438356 - DNA, 15 bp, Homo sapiens
actatctttgcaact

SEQ ID NO: 1438357 - DNA, 15 bp, Homo sapiens
ctatctttgcaactt

SEQ ID NO: 1438358 - DNA, 15 bp, Homo sapiens
tatctttgcaacttt

SEQ ID NO: 1438359 - DNA, 15 bp, Homo sapiens
atctttgcaactttt

SEQ ID NO: 1438360 - DNA, 15 bp, Homo sapiens
tctttgcaacttttt

SEQ ID NO: 1438361 - DNA, 15 bp, Homo sapiens
ctttgcaactttttt

SEQ ID NO: 1438362 - DNA, 15 bp, Homo sapiens
tttgcaacttttttg

SEQ ID NO: 1438363 - DNA, 15 bp, Homo sapiens
ttgcaacttttttgt

SEQ ID NO: 1438364 - DNA, 15 bp, Homo sapiens
tgcaacttttttgta

SEQ ID NO: 1438365 - DNA, 15 bp, Homo sapiens
gcaacttttttgtaa

SEQ ID NO: 1438366 - DNA, 15 bp, Homo sapiens
caacttttttgtaaa

SEQ ID NO: 1438367 - DNA, 15 bp, Homo sapiens
aacttttttgtaaat

SEQ ID NO: 1438368 - DNA, 15 bp, Homo sapiens
acttttttgtaaatt

SEQ ID NO: 1438369 - DNA, 15 bp, Homo sapiens
cttttttgtaaattt

SEQ ID NO: 1438370 - DNA, 15 bp, Homo sapiens
ttttttgtaaattta

SEQ ID NO: 1438371 - DNA, 15 bp, Homo sapiens
tttttgtaaatttaa

SEQ ID NO: 1438372 - DNA, 15 bp, Homo sapiens
ttttgtaaatttaaa

SEQ ID NO: 1438373 - DNA, 15 bp, Homo sapiens
tttgtaaatttaaaa

SEQ ID NO: 1438374 - DNA, 15 bp, Homo sapiens
ttgtaaatttaaaac

SEQ ID NO: 1438375 - DNA, 15 bp, Homo sapiens
tgtaaatttaaaact

SEQ ID NO: 1438376 - DNA, 15 bp, Homo sapiens
gtaaatttaaaactt

SEQ ID NO: 1438377 - DNA, 15 bp, Homo sapiens
taaatttaaaacttc

SEQ ID NO: 1438378 - DNA, 15 bp, Homo sapiens
aaatttaaaacttct

SEQ ID NO: 1438379 - DNA, 15 bp, Homo sapiens
aatttaaaacttcta

SEQ ID NO: 1438380 - DNA, 15 bp, Homo sapiens
atttaaaacttctaa

SEQ ID NO: 1438381 - DNA, 15 bp, Homo sapiens
tttaaaacttctaaa

SEQ ID NO: 1438382 - DNA, 15 bp, Homo sapiens
ttaaaacttctaaaa

SEQ ID NO: 1438383 - DNA, 15 bp, Homo sapiens
taaaacttctaaaat

SEQ ID NO: 1438384 - DNA, 15 bp, Homo sapiens
aaaacttctaaaata

SEQ ID NO: 1438385 - DNA, 15 bp, Homo sapiens
aaacttctaaaataa

SEQ ID NO: 1438386 - DNA, 15 bp, Homo sapiens
aacttctaaaataaa

SEQ ID NO: 1438387 - DNA, 15 bp, Homo sapiens
acttctaaaataaag

SEQ ID NO: 1438388 - DNA, 15 bp, Homo sapiens
cttctaaaataaaga

SEQ ID NO: 1438389 - DNA, 15 bp, Homo sapiens
ttctaaaataaagaa

SEQ ID NO: 1438390 - DNA, 15 bp, Homo sapiens
tctaaaataaagaac

SEQ ID NO: 1438391 - DNA, 15 bp, Homo sapiens
ctaaaataaagaaca

SEQ ID NO: 1438392 - DNA, 15 bp, Homo sapiens
taaaataaagaacaa

SEQ ID NO: 1438393 - DNA, 15 bp, Homo sapiens
aaaataaagaacaaa

SEQ ID NO: 1438394 - DNA, 15 bp, Homo sapiens
aaataaagaacaaat

SEQ ID NO: 1438395 - DNA, 15 bp, Homo sapiens
aataaagaacaaatt

SEQ ID NO: 1438396 - DNA, 15 bp, Homo sapiens
ataaagaacaaattt

SEQ ID NO: 1438397 - DNA, 15 bp, Homo sapiens
taaagaacaaattta

SEQ ID NO: 1438398 - DNA, 15 bp, Homo sapiens
aaagaacaaatttaa

SEQ ID NO: 1438399 - DNA, 15 bp, Homo sapiens
aagaacaaatttaaa

SEQ ID NO: 1438400 - DNA, 15 bp, Homo sapiens
agaacaaatttaaac

SEQ ID NO: 1438401 - DNA, 15 bp, Homo sapiens
gaacaaatttaaaca

SEQ ID NO: 1438402 - DNA, 15 bp, Homo sapiens
aacaaatttaaacat

SEQ ID NO: 1438403 - DNA, 15 bp, Homo sapiens
acaaatttaaacatt

SEQ ID NO: 1438404 - DNA, 15 bp, Homo sapiens
caaatttaaacatta

SEQ ID NO: 1438405 - DNA, 15 bp, Homo sapiens
aaatttaaacattaa

SEQ ID NO: 1438406 - DNA, 15 bp, Homo sapiens
aatttaaacattaaa

SEQ ID NO: 1438407 - DNA, 15 bp, Homo sapiens
atttaaacattaaaa

SEQ ID NO: 1438408 - DNA, 15 bp, Homo sapiens
tttaaacattaaaaa

SEQ ID NO: 1438409 - DNA, 15 bp, Homo sapiens
ttaaacattaaaaag

SEQ ID NO: 1438410 - DNA, 15 bp, Homo sapiens
taaacattaaaaagt

SEQ ID NO: 1438411 - DNA, 15 bp, Homo sapiens
aaacattaaaaagta

SEQ ID NO: 1438412 - DNA, 15 bp, Homo sapiens
aacattaaaaagtat

SEQ ID NO: 1438413 - DNA, 15 bp, Homo sapiens
acattaaaaagtatc

SEQ ID NO: 1438414 - DNA, 15 bp, Homo sapiens
cattaaaaagtatca

SEQ ID NO: 1438415 - DNA, 15 bp, Homo sapiens
attaaaaagtatcac

SEQ ID NO: 1438416 - DNA, 15 bp, Homo sapiens
ttaaaaagtatcacc

SEQ ID NO: 1438417 - DNA, 15 bp, Homo sapiens
taaaaagtatcacca

SEQ ID NO: 1438418 - DNA, 15 bp, Homo sapiens
aaaaagtatcaccag

SEQ ID NO: 1438419 - DNA, 15 bp, Homo sapiens
aaaagtatcaccagg

SEQ ID NO: 1438420 - DNA, 15 bp, Homo sapiens
aaagtatcaccagga

SEQ ID NO: 1438421 - DNA, 15 bp, Homo sapiens
aagtatcaccaggaa

SEQ ID NO: 1438422 - DNA, 15 bp, Homo sapiens
agtatcaccaggaac

SEQ ID NO: 1438423 - DNA, 15 bp, Homo sapiens
gtatcaccaggaaca

SEQ ID NO: 1438424 - DNA, 15 bp, Homo sapiens
tatcaccaggaacat

SEQ ID NO: 1438425 - DNA, 15 bp, Homo sapiens
atcaccaggaacata

SEQ ID NO: 1438426 - DNA, 15 bp, Homo sapiens
tcaccaggaacatat

SEQ ID NO: 1438427 - DNA, 15 bp, Homo sapiens
caccaggaacatata

SEQ ID NO: 1438428 - DNA, 15 bp, Homo sapiens
accaggaacatatat

SEQ ID NO: 1438429 - DNA, 15 bp, Homo sapiens
ccaggaacatatatc

SEQ ID NO: 1438430 - DNA, 15 bp, Homo sapiens
caggaacatatatca

SEQ ID NO: 1438431 - DNA, 15 bp, Homo sapiens
aggaacatatatcac

SEQ ID NO: 1438432 - DNA, 15 bp, Homo sapiens
ggaacatatatcact

SEQ ID NO: 1438433 - DNA, 15 bp, Homo sapiens
gaacatatatcactg

SEQ ID NO: 1438434 - DNA, 15 bp, Homo sapiens
aacatatatcactgt

SEQ ID NO: 1438435 - DNA, 15 bp, Homo sapiens
acatatatcactgtt

SEQ ID NO: 1438436 - DNA, 15 bp, Homo sapiens
catatatcactgttt

SEQ ID NO: 1438437 - DNA, 15 bp, Homo sapiens
atatatcactgttta

SEQ ID NO: 1438438 - DNA, 15 bp, Homo sapiens
tatatcactgtttac

SEQ ID NO: 1438439 - DNA, 15 bp, Homo sapiens
atatcactgtttaca

SEQ ID NO: 1438440 - DNA, 15 bp, Homo sapiens
tatcactgtttacag

SEQ ID NO: 1438441 - DNA, 15 bp, Homo sapiens
atcactgtttacaga

SEQ ID NO: 1438442 - DNA, 15 bp, Homo sapiens
tcactgtttacagat

SEQ ID NO: 1438443 - DNA, 15 bp, Homo sapiens
cactgtttacagatg

SEQ ID NO: 1438444 - DNA, 15 bp, Homo sapiens
actgtttacagatga

SEQ ID NO: 1438445 - DNA, 15 bp, Homo sapiens
ctgtttacagatgaa

SEQ ID NO: 1438446 - DNA, 15 bp, Homo sapiens
tgtttacagatgaaa

SEQ ID NO: 1438447 - DNA, 15 bp, Homo sapiens
gtttacagatgaaat

SEQ ID NO: 1438448 - DNA, 15 bp, Homo sapiens
tttacagatgaaata

SEQ ID NO: 1438449 - DNA, 15 bp, Homo sapiens
ttacagatgaaatac

SEQ ID NO: 1438450 - DNA, 15 bp, Homo sapiens
tacagatgaaatact

SEQ ID NO: 1438451 - DNA, 15 bp, Homo sapiens
acagatgaaatacta

SEQ ID NO: 1438452 - DNA, 15 bp, Homo sapiens
cagatgaaatactat

SEQ ID NO: 1438453 - DNA, 15 bp, Homo sapiens
agatgaaatactatg

SEQ ID NO: 1438454 - DNA, 15 bp, Homo sapiens
gatgaaatactatgt

SEQ ID NO: 1438455 - DNA, 15 bp, Homo sapiens
atgaaatactatgta

SEQ ID NO: 1438456 - DNA, 15 bp, Homo sapiens
tgaaatactatgtat

SEQ ID NO: 1438457 - DNA, 15 bp, Homo sapiens
gaaatactatgtatt

SEQ ID NO: 1438458 - DNA, 15 bp, Homo sapiens
aaatactatgtattt

SEQ ID NO: 1438459 - DNA, 15 bp, Homo sapiens
aatactatgtatttt

SEQ ID NO: 1438460 - DNA, 15 bp, Homo sapiens
atactatgtattttc

SEQ ID NO: 1438461 - DNA, 15 bp, Homo sapiens
tactatgtattttca

SEQ ID NO: 1438462 - DNA, 15 bp, Homo sapiens
actatgtattttcat

SEQ ID NO: 1438463 - DNA, 15 bp, Homo sapiens
ctatgtattttcata

SEQ ID NO: 1438464 - DNA, 15 bp, Homo sapiens
tatgtattttcatat

SEQ ID NO: 1438465 - DNA, 15 bp, Homo sapiens
atgtattttcatatc

SEQ ID NO: 1438466 - DNA, 15 bp, Homo sapiens
tgtattttcatatct

SEQ ID NO: 1438467 - DNA, 15 bp, Homo sapiens
gtattttcatatcta

SEQ ID NO: 1438468 - DNA, 15 bp, Homo sapiens
tattttcatatctaa

SEQ ID NO: 1438469 - DNA, 15 bp, Homo sapiens
attttcatatctaat

SEQ ID NO: 1438470 - DNA, 15 bp, Homo sapiens
ttttcatatctaatt

SEQ ID NO: 1438471 - DNA, 15 bp, Homo sapiens
tttcatatctaattt

SEQ ID NO: 1438472 - DNA, 15 bp, Homo sapiens
ttcatatctaatttc

SEQ ID NO: 1438473 - DNA, 15 bp, Homo sapiens
tcatatctaatttct

SEQ ID NO: 1438474 - DNA, 15 bp, Homo sapiens
catatctaatttctg

SEQ ID NO: 1438475 - DNA, 15 bp, Homo sapiens
atatctaatttctga

SEQ ID NO: 1438476 - DNA, 15 bp, Homo sapiens
tatctaatttctgat

SEQ ID NO: 1438477 - DNA, 15 bp, Homo sapiens
atctaatttctgatc

SEQ ID NO: 1438478 - DNA, 15 bp, Homo sapiens
tctaatttctgatca

SEQ ID NO: 1438479 - DNA, 15 bp, Homo sapiens
ctaatttctgatcat

SEQ ID NO: 1438480 - DNA, 15 bp, Homo sapiens
taatttctgatcatt

SEQ ID NO: 1438481 - DNA, 15 bp, Homo sapiens
aatttctgatcattg

SEQ ID NO: 1438482 - DNA, 15 bp, Homo sapiens
atttctgatcattga

SEQ ID NO: 1438483 - DNA, 15 bp, Homo sapiens
tttctgatcattgac

SEQ ID NO: 1438484 - DNA, 15 bp, Homo sapiens
ttctgatcattgact

SEQ ID NO: 1438485 - DNA, 15 bp, Homo sapiens
tctgatcattgactt

SEQ ID NO: 1438486 - DNA, 15 bp, Homo sapiens
ctgatcattgacttc

SEQ ID NO: 1438487 - DNA, 15 bp, Homo sapiens
tgatcattgacttca

SEQ ID NO: 1438488 - DNA, 15 bp, Homo sapiens
gatcattgacttcaa

SEQ ID NO: 1438489 - DNA, 15 bp, Homo sapiens
atcattgacttcaaa

SEQ ID NO: 1438490 - DNA, 15 bp, Homo sapiens
tcattgacttcaaat

SEQ ID NO: 1438491 - DNA, 15 bp, Homo sapiens
cattgacttcaaatc

SEQ ID NO: 1438492 - DNA, 15 bp, Homo sapiens
attgacttcaaatca

SEQ ID NO: 1438493 - DNA, 15 bp, Homo sapiens
ttgacttcaaatcag

SEQ ID NO: 1438494 - DNA, 15 bp, Homo sapiens
tgacttcaaatcaga

SEQ ID NO: 1438495 - DNA, 15 bp, Homo sapiens
gacttcaaatcagaa

SEQ ID NO: 1438496 - DNA, 15 bp, Homo sapiens
acttcaaatcagaaa

SEQ ID NO: 1438497 - DNA, 15 bp, Homo sapiens
cttcaaatcagaaaa

SEQ ID NO: 1438498 - DNA, 15 bp, Homo sapiens
ttcaaatcagaaaag

SEQ ID NO: 1438499 - DNA, 15 bp, Homo sapiens
tcaaatcagaaaagt

SEQ ID NO: 1438500 - DNA, 15 bp, Homo sapiens
caaatcagaaaagtg

SEQ ID NO: 1438501 - DNA, 15 bp, Homo sapiens
aaatcagaaaagtga

SEQ ID NO: 1438502 - DNA, 15 bp, Homo sapiens
aatcagaaaagtgaa

SEQ ID NO: 1438503 - DNA, 15 bp, Homo sapiens
atcagaaaagtgaat

SEQ ID NO: 1438504 - DNA, 15 bp, Homo sapiens
tcagaaaagtgaatg

SEQ ID NO: 1438505 - DNA, 15 bp, Homo sapiens
cagaaaagtgaatga

SEQ ID NO: 1438506 - DNA, 15 bp, Homo sapiens
agaaaagtgaatgac

SEQ ID NO: 1438507 - DNA, 15 bp, Homo sapiens
gaaaagtgaatgaca

SEQ ID NO: 1438508 - DNA, 15 bp, Homo sapiens
aaaagtgaatgacac

SEQ ID NO: 1438509 - DNA, 15 bp, Homo sapiens
aaagtgaatgacacc

SEQ ID NO: 1438510 - DNA, 15 bp, Homo sapiens
aagtgaatgacacct

SEQ ID NO: 1438511 - DNA, 15 bp, Homo sapiens
agtgaatgacacctc

SEQ ID NO: 1438512 - DNA, 15 bp, Homo sapiens
gtgaatgacacctca

SEQ ID NO: 1438513 - DNA, 15 bp, Homo sapiens
tgaatgacacctcaa

SEQ ID NO: 1438514 - DNA, 15 bp, Homo sapiens
gaatgacacctcaaa

SEQ ID NO: 1438515 - DNA, 15 bp, Homo sapiens
aatgacacctcaaaa

SEQ ID NO: 1438516 - DNA, 15 bp, Homo sapiens
atgacacctcaaaat

SEQ ID NO: 1438517 - DNA, 15 bp, Homo sapiens
tgacacctcaaaatc

SEQ ID NO: 1438518 - DNA, 15 bp, Homo sapiens
gacacctcaaaatca

SEQ ID NO: 1438519 - DNA, 15 bp, Homo sapiens
acacctcaaaatcag

SEQ ID NO: 1438520 - DNA, 15 bp, Homo sapiens
cacctcaaaatcagg

SEQ ID NO: 1438521 - DNA, 15 bp, Homo sapiens
acctcaaaatcaggt

SEQ ID NO: 1438522 - DNA, 15 bp, Homo sapiens
cctcaaaatcaggtt

SEQ ID NO: 1438523 - DNA, 15 bp, Homo sapiens
ctcaaaatcaggttt

SEQ ID NO: 1438524 - DNA, 15 bp, Homo sapiens
tcaaaatcaggtttt

SEQ ID NO: 1438525 - DNA, 15 bp, Homo sapiens
caaaatcaggttttc

SEQ ID NO: 1438526 - DNA, 15 bp, Homo sapiens
aaaatcaggttttct

SEQ ID NO: 1438527 - DNA, 15 bp, Homo sapiens
aaatcaggttttctg

SEQ ID NO: 1438528 - DNA, 15 bp, Homo sapiens
aatcaggttttctgt

SEQ ID NO: 1438529 - DNA, 15 bp, Homo sapiens
atcaggttttctgtt

SEQ ID NO: 1438530 - DNA, 15 bp, Homo sapiens
tcaggttttctgttt

SEQ ID NO: 1438531 - DNA, 15 bp, Homo sapiens
caggttttctgttta

SEQ ID NO: 1438532 - DNA, 15 bp, Homo sapiens
aggttttctgtttac

SEQ ID NO: 1438533 - DNA, 15 bp, Homo sapiens
ggttttctgtttact

SEQ ID NO: 1438534 - DNA, 15 bp, Homo sapiens
gttttctgtttactg

SEQ ID NO: 1438535 - DNA, 15 bp, Homo sapiens
ttttctgtttactga

SEQ ID NO: 1438536 - DNA, 15 bp, Homo sapiens
tttctgtttactgaa

SEQ ID NO: 1438537 - DNA, 15 bp, Homo sapiens
ttctgtttactgaag

SEQ ID NO: 1438538 - DNA, 15 bp, Homo sapiens
tctgtttactgaagt

SEQ ID NO: 1438539 - DNA, 15 bp, Homo sapiens
ctgtttactgaagtc

SEQ ID NO: 1438540 - DNA, 15 bp, Homo sapiens
tgtttactgaagtct

SEQ ID NO: 1438541 - DNA, 15 bp, Homo sapiens
gtttactgaagtcta

SEQ ID NO: 1438542 - DNA, 15 bp, Homo sapiens
tttactgaagtctaa

SEQ ID NO: 1438543 - DNA, 15 bp, Homo sapiens
ttactgaagtctaag

SEQ ID NO: 1438544 - DNA, 15 bp, Homo sapiens
tactgaagtctaaga

SEQ ID NO: 1438545 - DNA, 15 bp, Homo sapiens
actgaagtctaagaa

SEQ ID NO: 1438546 - DNA, 15 bp, Homo sapiens
ctgaagtctaagaaa

SEQ ID NO: 1438547 - DNA, 15 bp, Homo sapiens
tgaagtctaagaaaa

SEQ ID NO: 1438548 - DNA, 15 bp, Homo sapiens
gaagtctaagaaaag

SEQ ID NO: 1438549 - DNA, 15 bp, Homo sapiens
aagtctaagaaaaga

SEQ ID NO: 1438550 - DNA, 15 bp, Homo sapiens
agtctaagaaaagaa

SEQ ID NO: 1438551 - DNA, 15 bp, Homo sapiens
gtctaagaaaagaaa

SEQ ID NO: 1438552 - DNA, 15 bp, Homo sapiens
tctaagaaaagaaag

SEQ ID NO: 1438553 - DNA, 15 bp, Homo sapiens
ctaagaaaagaaagc

SEQ ID NO: 1438554 - DNA, 15 bp, Homo sapiens
taagaaaagaaagca

SEQ ID NO: 1438555 - DNA, 15 bp, Homo sapiens
aagaaaagaaagcat

SEQ ID NO: 1438556 - DNA, 15 bp, Homo sapiens
agaaaagaaagcata

SEQ ID NO: 1438557 - DNA, 15 bp, Homo sapiens
gaaaagaaagcatac

SEQ ID NO: 1438558 - DNA, 15 bp, Homo sapiens
aaaagaaagcatacc

SEQ ID NO: 1438559 - DNA, 15 bp, Homo sapiens
aaagaaagcatacca

SEQ ID NO: 1438560 - DNA, 15 bp, Homo sapiens
aagaaagcataccag

SEQ ID NO: 1438561 - DNA, 15 bp, Homo sapiens
agaaagcataccagc

SEQ ID NO: 1438562 - DNA, 15 bp, Homo sapiens
gaaagcataccagct

SEQ ID NO: 1438563 - DNA, 15 bp, Homo sapiens
aaagcataccagctg

SEQ ID NO: 1438564 - DNA, 15 bp, Homo sapiens
aagcataccagctgg

SEQ ID NO: 1438565 - DNA, 15 bp, Homo sapiens
agcataccagctgga

SEQ ID NO: 1438566 - DNA, 15 bp, Homo sapiens
gcataccagctggag

SEQ ID NO: 1438567 - DNA, 15 bp, Homo sapiens
cataccagctggaga

SEQ ID NO: 1438568 - DNA, 15 bp, Homo sapiens
ataccagctggagag

SEQ ID NO: 1438569 - DNA, 15 bp, Homo sapiens
taccagctggagaga

SEQ ID NO: 1438570 - DNA, 15 bp, Homo sapiens
accagctggagagat

SEQ ID NO: 1438571 - DNA, 15 bp, Homo sapiens
ccagctggagagatt

SEQ ID NO: 1438572 - DNA, 15 bp, Homo sapiens
cagctggagagattc

SEQ ID NO: 1438573 - DNA, 15 bp, Homo sapiens
agctggagagattca

SEQ ID NO: 1438574 - DNA, 15 bp, Homo sapiens
gctggagagattcat

SEQ ID NO: 1438575 - DNA, 15 bp, Homo sapiens
ctggagagattcatg

SEQ ID NO: 1438576 - DNA, 15 bp, Homo sapiens
tggagagattcatgt

SEQ ID NO: 1438577 - DNA, 15 bp, Homo sapiens
ggagagattcatgtt

SEQ ID NO: 1438578 - DNA, 15 bp, Homo sapiens
gagagattcatgttt

SEQ ID NO: 1438579 - DNA, 15 bp, Homo sapiens
agagattcatgttta

SEQ ID NO: 1438580 - DNA, 15 bp, Homo sapiens
gagattcatgtttat

SEQ ID NO: 1438581 - DNA, 15 bp, Homo sapiens
agattcatgtttata

SEQ ID NO: 1438582 - DNA, 15 bp, Homo sapiens
gattcatgtttataa

SEQ ID NO: 1438583 - DNA, 15 bp, Homo sapiens
attcatgtttataaa

SEQ ID NO: 1438584 - DNA, 15 bp, Homo sapiens
ttcatgtttataaag

SEQ ID NO: 1438585 - DNA, 15 bp, Homo sapiens
tcatgtttataaaga

SEQ ID NO: 1438586 - DNA, 15 bp, Homo sapiens
catgtttataaagac

SEQ ID NO: 1438587 - DNA, 15 bp, Homo sapiens
atgtttataaagaca

SEQ ID NO: 1438588 - DNA, 15 bp, Homo sapiens
tgtttataaagacag

SEQ ID NO: 1438589 - DNA, 15 bp, Homo sapiens
gtttataaagacaga

SEQ ID NO: 1438590 - DNA, 15 bp, Homo sapiens
tttataaagacagat

SEQ ID NO: 1438591 - DNA, 15 bp, Homo sapiens
ttataaagacagatt

SEQ ID NO: 1438592 - DNA, 15 bp, Homo sapiens
tataaagacagattt

SEQ ID NO: 1438593 - DNA, 15 bp, Homo sapiens
ataaagacagattta

SEQ ID NO: 1438594 - DNA, 15 bp, Homo sapiens
taaagacagatttat

SEQ ID NO: 1438595 - DNA, 15 bp, Homo sapiens
aaagacagatttata

SEQ ID NO: 1438596 - DNA, 15 bp, Homo sapiens
aagacagatttataa

SEQ ID NO: 1438597 - DNA, 15 bp, Homo sapiens
agacagatttataac

SEQ ID NO: 1438598 - DNA, 15 bp, Homo sapiens
gacagatttataaca

SEQ ID NO: 1438599 - DNA, 15 bp, Homo sapiens
acagatttataacaa

SEQ ID NO: 1438600 - DNA, 15 bp, Homo sapiens
cagatttataacaac

SEQ ID NO: 1438601 - DNA, 15 bp, Homo sapiens
agatttataacaaca

SEQ ID NO: 1438602 - DNA, 15 bp, Homo sapiens
gatttataacaacaa

SEQ ID NO: 1438603 - DNA, 15 bp, Homo sapiens
atttataacaacaaa

SEQ ID NO: 1438604 - DNA, 15 bp, Homo sapiens
tttataacaacaaaa

SEQ ID NO: 1438605 - DNA, 15 bp, Homo sapiens
ttataacaacaaaaa

SEQ ID NO: 1438606 - DNA, 15 bp, Homo sapiens
tataacaacaaaaat

SEQ ID NO: 1438607 - DNA, 15 bp, Homo sapiens
ataacaacaaaaata

SEQ ID NO: 1438608 - DNA, 15 bp, Homo sapiens
taacaacaaaaataa

SEQ ID NO: 1438609 - DNA, 15 bp, Homo sapiens
aacaacaaaaataaa

SEQ ID NO: 1438610 - DNA, 15 bp, Homo sapiens
acaacaaaaataaaa

SEQ ID NO: 1438611 - DNA, 15 bp, Homo sapiens
caacaaaaataaaat

SEQ ID NO: 1438612 - DNA, 15 bp, Homo sapiens
aacaaaaataaaata

SEQ ID NO: 1438613 - DNA, 15 bp, Homo sapiens
acaaaaataaaatat

SEQ ID NO: 1438614 - DNA, 15 bp, Homo sapiens
caaaaataaaatatc

SEQ ID NO: 1438615 - DNA, 15 bp, Homo sapiens
aaaaataaaatatcc

SEQ ID NO: 1438616 - DNA, 15 bp, Homo sapiens
aaaataaaatatcca

SEQ ID NO: 1438617 - DNA, 15 bp, Homo sapiens
aaataaaatatccaa

SEQ ID NO: 1438618 - DNA, 15 bp, Homo sapiens
aataaaatatccaag

SEQ ID NO: 1438619 - DNA, 15 bp, Homo sapiens
ataaaatatccaaga

SEQ ID NO: 1438620 - DNA, 15 bp, Homo sapiens
taaaatatccaagaa

SEQ ID NO: 1438621 - DNA, 15 bp, Homo sapiens
aaaatatccaagaat

SEQ ID NO: 1438622 - DNA, 15 bp, Homo sapiens
aaatatccaagaata

SEQ ID NO: 1438623 - DNA, 15 bp, Homo sapiens
aatatccaagaataa

SEQ ID NO: 1438624 - DNA, 15 bp, Homo sapiens
atatccaagaataaa

SEQ ID NO: 1438625 - DNA, 15 bp, Homo sapiens
tatccaagaataaat

SEQ ID NO: 1438626 - DNA, 15 bp, Homo sapiens
atccaagaataaatt

SEQ ID NO: 1438627 - DNA, 15 bp, Homo sapiens
tccaagaataaattt

SEQ ID NO: 1438628 - DNA, 15 bp, Homo sapiens
ccaagaataaattta

SEQ ID NO: 1438629 - DNA, 15 bp, Homo sapiens
caagaataaatttaa

SEQ ID NO: 1438630 - DNA, 15 bp, Homo sapiens
aagaataaatttaag

SEQ ID NO: 1438631 - DNA, 15 bp, Homo sapiens
agaataaatttaaga

SEQ ID NO: 1438632 - DNA, 15 bp, Homo sapiens
gaataaatttaagaa

SEQ ID NO: 1438633 - DNA, 15 bp, Homo sapiens
aataaatttaagaag

SEQ ID NO: 1438634 - DNA, 15 bp, Homo sapiens
ataaatttaagaaga

SEQ ID NO: 1438635 - DNA, 15 bp, Homo sapiens
taaatttaagaagaa

SEQ ID NO: 1438636 - DNA, 15 bp, Homo sapiens
aaatttaagaagaag

SEQ ID NO: 1438637 - DNA, 15 bp, Homo sapiens
aatttaagaagaagc

SEQ ID NO: 1438638 - DNA, 15 bp, Homo sapiens
atttaagaagaagca

SEQ ID NO: 1438639 - DNA, 15 bp, Homo sapiens
tttaagaagaagcac

SEQ ID NO: 1438640 - DNA, 15 bp, Homo sapiens
ttaagaagaagcact

SEQ ID NO: 1438641 - DNA, 15 bp, Homo sapiens
taagaagaagcactt

SEQ ID NO: 1438642 - DNA, 15 bp, Homo sapiens
aagaagaagcacttt

SEQ ID NO: 1438643 - DNA, 15 bp, Homo sapiens
agaagaagcacttta

SEQ ID NO: 1438644 - DNA, 15 bp, Homo sapiens
gaagaagcactttac

SEQ ID NO: 1438645 - DNA, 15 bp, Homo sapiens
aagaagcactttact

SEQ ID NO: 1438646 - DNA, 15 bp, Homo sapiens
agaagcactttactg

SEQ ID NO: 1438647 - DNA, 15 bp, Homo sapiens
gaagcactttactga

SEQ ID NO: 1438648 - DNA, 15 bp, Homo sapiens
aagcactttactgag

SEQ ID NO: 1438649 - DNA, 15 bp, Homo sapiens
agcactttactgaga

SEQ ID NO: 1438650 - DNA, 15 bp, Homo sapiens
gcactttactgagaa

SEQ ID NO: 1438651 - DNA, 15 bp, Homo sapiens
cactttactgagaaa

SEQ ID NO: 1438652 - DNA, 15 bp, Homo sapiens
actttactgagaaac

SEQ ID NO: 1438653 - DNA, 15 bp, Homo sapiens
ctttactgagaaaca

SEQ ID NO: 1438654 - DNA, 15 bp, Homo sapiens
tttactgagaaacat

SEQ ID NO: 1438655 - DNA, 15 bp, Homo sapiens
ttactgagaaacata

SEQ ID NO: 1438656 - DNA, 15 bp, Homo sapiens
tactgagaaacatat

SEQ ID NO: 1438657 - DNA, 15 bp, Homo sapiens
actgagaaacatatg

SEQ ID NO: 1438658 - DNA, 15 bp, Homo sapiens
ctgagaaacatatga

SEQ ID NO: 1438659 - DNA, 15 bp, Homo sapiens
tgagaaacatatgaa

SEQ ID NO: 1438660 - DNA, 15 bp, Homo sapiens
gagaaacatatgaaa

SEQ ID NO: 1438661 - DNA, 15 bp, Homo sapiens
agaaacatatgaaaa

SEQ ID NO: 1438662 - DNA, 15 bp, Homo sapiens
gaaacatatgaaaac

SEQ ID NO: 1438663 - DNA, 15 bp, Homo sapiens
aaacatatgaaaacc

SEQ ID NO: 1438664 - DNA, 15 bp, Homo sapiens
aacatatgaaaacct

SEQ ID NO: 1438665 - DNA, 15 bp, Homo sapiens
acatatgaaaacctg

SEQ ID NO: 1438666 - DNA, 15 bp, Homo sapiens
catatgaaaacctga

SEQ ID NO: 1438667 - DNA, 15 bp, Homo sapiens
atatgaaaacctgaa

SEQ ID NO: 1438668 - DNA, 15 bp, Homo sapiens
tatgaaaacctgaac

SEQ ID NO: 1438669 - DNA, 15 bp, Homo sapiens
atgaaaacctgaaca

SEQ ID NO: 1438670 - DNA, 15 bp, Homo sapiens
tgaaaacctgaacaa

SEQ ID NO: 1438671 - DNA, 15 bp, Homo sapiens
gaaaacctgaacaaa

SEQ ID NO: 1438672 - DNA, 15 bp, Homo sapiens
aaaacctgaacaaat

SEQ ID NO: 1438673 - DNA, 15 bp, Homo sapiens
aaacctgaacaaatg

SEQ ID NO: 1438674 - DNA, 15 bp, Homo sapiens
aacctgaacaaatgg

SEQ ID NO: 1438675 - DNA, 15 bp, Homo sapiens
acctgaacaaatgga

SEQ ID NO: 1438676 - DNA, 15 bp, Homo sapiens
cctgaacaaatggag

SEQ ID NO: 1438677 - DNA, 15 bp, Homo sapiens
ctgaacaaatggaga

SEQ ID NO: 1438678 - DNA, 15 bp, Homo sapiens
tgaacaaatggagag

SEQ ID NO: 1438679 - DNA, 15 bp, Homo sapiens
gaacaaatggagagg

SEQ ID NO: 1438680 - DNA, 15 bp, Homo sapiens
aacaaatggagaggg

SEQ ID NO: 1438681 - DNA, 15 bp, Homo sapiens
acaaatggagaggga

SEQ ID NO: 1438682 - DNA, 15 bp, Homo sapiens
caaatggagagggat

SEQ ID NO: 1438683 - DNA, 15 bp, Homo sapiens
aaatggagagggata

SEQ ID NO: 1438684 - DNA, 15 bp, Homo sapiens
aatggagagggatat

SEQ ID NO: 1438685 - DNA, 15 bp, Homo sapiens
atggagagggatatt

SEQ ID NO: 1438686 - DNA, 15 bp, Homo sapiens
tggagagggatattt

SEQ ID NO: 1438687 - DNA, 15 bp, Homo sapiens
ggagagggatatttt

SEQ ID NO: 1438688 - DNA, 15 bp, Homo sapiens
gagagggatattttg

SEQ ID NO: 1438689 - DNA, 15 bp, Homo sapiens
agagggatattttgt

SEQ ID NO: 1438690 - DNA, 15 bp, Homo sapiens
gagggatattttgta

SEQ ID NO: 1438691 - DNA, 15 bp, Homo sapiens
agggatattttgtat

SEQ ID NO: 1438692 - DNA, 15 bp, Homo sapiens
gggatattttgtatt

SEQ ID NO: 1438693 - DNA, 15 bp, Homo sapiens
ggatattttgtattt

SEQ ID NO: 1438694 - DNA, 15 bp, Homo sapiens
gatattttgtatttg

SEQ ID NO: 1438695 - DNA, 15 bp, Homo sapiens
atattttgtatttga

SEQ ID NO: 1438696 - DNA, 15 bp, Homo sapiens
tattttgtatttgaa

SEQ ID NO: 1438697 - DNA, 15 bp, Homo sapiens
attttgtatttgaat

SEQ ID NO: 1438698 - DNA, 15 bp, Homo sapiens
ttttgtatttgaata

SEQ ID NO: 1438699 - DNA, 15 bp, Homo sapiens
tttgtatttgaatag

SEQ ID NO: 1438700 - DNA, 15 bp, Homo sapiens
ttgtatttgaataga

SEQ ID NO: 1438701 - DNA, 15 bp, Homo sapiens
tgtatttgaatagaa

SEQ ID NO: 1438702 - DNA, 15 bp, Homo sapiens
gtatttgaatagaaa

SEQ ID NO: 1438703 - DNA, 15 bp, Homo sapiens
tatttgaatagaaag

SEQ ID NO: 1438704 - DNA, 15 bp, Homo sapiens
atttgaatagaaaga

SEQ ID NO: 1438705 - DNA, 15 bp, Homo sapiens
tttgaatagaaagac

SEQ ID NO: 1438706 - DNA, 15 bp, Homo sapiens
ttgaatagaaagact

SEQ ID NO: 1438707 - DNA, 15 bp, Homo sapiens
tgaatagaaagactt

SEQ ID NO: 1438708 - DNA, 15 bp, Homo sapiens
gaatagaaagacttc

SEQ ID NO: 1438709 - DNA, 15 bp, Homo sapiens
aatagaaagacttct

SEQ ID NO: 1438710 - DNA, 15 bp, Homo sapiens
atagaaagacttctg

SEQ ID NO: 1438711 - DNA, 15 bp, Homo sapiens
tagaaagacttctgg

SEQ ID NO: 1438712 - DNA, 15 bp, Homo sapiens
agaaagacttctggt

SEQ ID NO: 1438713 - DNA, 15 bp, Homo sapiens
gaaagacttctggtt

SEQ ID NO: 1438714 - DNA, 15 bp, Homo sapiens
aaagacttctggttt

SEQ ID NO: 1438715 - DNA, 15 bp, Homo sapiens
aagacttctggttta

SEQ ID NO: 1438716 - DNA, 15 bp, Homo sapiens
agacttctggtttaa

SEQ ID NO: 1438717 - DNA, 15 bp, Homo sapiens
gacttctggtttaaa

SEQ ID NO: 1438718 - DNA, 15 bp, Homo sapiens
acttctggtttaaag

SEQ ID NO: 1438719 - DNA, 15 bp, Homo sapiens
cttctggtttaaaga

SEQ ID NO: 1438720 - DNA, 15 bp, Homo sapiens
ttctggtttaaagat

SEQ ID NO: 1438721 - DNA, 15 bp, Homo sapiens
tctggtttaaagata

SEQ ID NO: 1438722 - DNA, 15 bp, Homo sapiens
ctggtttaaagataa

SEQ ID NO: 1438723 - DNA, 15 bp, Homo sapiens
tggtttaaagataat

SEQ ID NO: 1438724 - DNA, 15 bp, Homo sapiens
ggtttaaagataatt

SEQ ID NO: 1438725 - DNA, 15 bp, Homo sapiens
gtttaaagataattc

SEQ ID NO: 1438726 - DNA, 15 bp, Homo sapiens
tttaaagataattct

SEQ ID NO: 1438727 - DNA, 15 bp, Homo sapiens
ttaaagataattctc

SEQ ID NO: 1438728 - DNA, 15 bp, Homo sapiens
taaagataattctct

SEQ ID NO: 1438729 - DNA, 15 bp, Homo sapiens
aaagataattctctt

SEQ ID NO: 1438730 - DNA, 15 bp, Homo sapiens
aagataattctcttt

SEQ ID NO: 1438731 - DNA, 15 bp, Homo sapiens
agataattctcttta

SEQ ID NO: 1438732 - DNA, 15 bp, Homo sapiens
gataattctctttaa

SEQ ID NO: 1438733 - DNA, 15 bp, Homo sapiens
ataattctctttaaa

SEQ ID NO: 1438734 - DNA, 15 bp, Homo sapiens
taattctctttaaat

SEQ ID NO: 1438735 - DNA, 15 bp, Homo sapiens
aattctctttaaatt

SEQ ID NO: 1438736 - DNA, 15 bp, Homo sapiens
attctctttaaatta

SEQ ID NO: 1438737 - DNA, 15 bp, Homo sapiens
ttctctttaaattat

SEQ ID NO: 1438738 - DNA, 15 bp, Homo sapiens
tctctttaaattatt

SEQ ID NO: 1438739 - DNA, 15 bp, Homo sapiens
ctctttaaattattt

SEQ ID NO: 1438740 - DNA, 15 bp, Homo sapiens
tctttaaattatttt

SEQ ID NO: 1438741 - DNA, 15 bp, Homo sapiens
ctttaaattattttt

SEQ ID NO: 1438742 - DNA, 15 bp, Homo sapiens
tttaaattatttttt

SEQ ID NO: 1438743 - DNA, 15 bp, Homo sapiens
taaattattttttgt

SEQ ID NO: 1438744 - DNA, 15 bp, Homo sapiens
aaattattttttgta

SEQ ID NO: 1438745 - DNA, 15 bp, Homo sapiens
aattattttttgtag

SEQ ID NO: 1438746 - DNA, 15 bp, Homo sapiens
attattttttgtaga

SEQ ID NO: 1438747 - DNA, 15 bp, Homo sapiens
ttattttttgtagaa

SEQ ID NO: 1438748 - DNA, 15 bp, Homo sapiens
tattttttgtagaaa

SEQ ID NO: 1438749 - DNA, 15 bp, Homo sapiens
attttttgtagaaat

SEQ ID NO: 1438750 - DNA, 15 bp, Homo sapiens
ttttttgtagaaatt

SEQ ID NO: 1438751 - DNA, 15 bp, Homo sapiens
tttttgtagaaattt

SEQ ID NO: 1438752 - DNA, 15 bp, Homo sapiens
ttttgtagaaattta

SEQ ID NO: 1438753 - DNA, 15 bp, Homo sapiens
tttgtagaaatttaa

SEQ ID NO: 1438754 - DNA, 15 bp, Homo sapiens
ttgtagaaatttaag

SEQ ID NO: 1438755 - DNA, 15 bp, Homo sapiens
tgtagaaatttaagg

SEQ ID NO: 1438756 - DNA, 15 bp, Homo sapiens
gtagaaatttaaggg

SEQ ID NO: 1438757 - DNA, 15 bp, Homo sapiens
tagaaatttaagggg

SEQ ID NO: 1438758 - DNA, 15 bp, Homo sapiens
agaaatttaaggggt

SEQ ID NO: 1438759 - DNA, 15 bp, Homo sapiens
gaaatttaaggggta

SEQ ID NO: 1438760 - DNA, 15 bp, Homo sapiens
aaatttaaggggtac

SEQ ID NO: 1438761 - DNA, 15 bp, Homo sapiens
aatttaaggggtaca

SEQ ID NO: 1438762 - DNA, 15 bp, Homo sapiens
atttaaggggtacaa

SEQ ID NO: 1438763 - DNA, 15 bp, Homo sapiens
tttaaggggtacaag

SEQ ID NO: 1438764 - DNA, 15 bp, Homo sapiens
ttaaggggtacaaga

SEQ ID NO: 1438765 - DNA, 15 bp, Homo sapiens
taaggggtacaagag

SEQ ID NO: 1438766 - DNA, 15 bp, Homo sapiens
aaggggtacaagagc

SEQ ID NO: 1438767 - DNA, 15 bp, Homo sapiens
aggggtacaagagca

SEQ ID NO: 1438768 - DNA, 15 bp, Homo sapiens
ggggtacaagagcag

SEQ ID NO: 1438769 - DNA, 15 bp, Homo sapiens
gggtacaagagcagt

SEQ ID NO: 1438770 - DNA, 15 bp, Homo sapiens
ggtacaagagcagtg

SEQ ID NO: 1438771 - DNA, 15 bp, Homo sapiens
gtacaagagcagtgt

SEQ ID NO: 1438772 - DNA, 15 bp, Homo sapiens
tacaagagcagtgtt

SEQ ID NO: 1438773 - DNA, 15 bp, Homo sapiens
acaagagcagtgttg

SEQ ID NO: 1438774 - DNA, 15 bp, Homo sapiens
caagagcagtgttgt

SEQ ID NO: 1438775 - DNA, 15 bp, Homo sapiens
aagagcagtgttgtc

SEQ ID NO: 1438776 - DNA, 15 bp, Homo sapiens
agagcagtgttgtca

SEQ ID NO: 1438777 - DNA, 15 bp, Homo sapiens
gagcagtgttgtcac

SEQ ID NO: 1438778 - DNA, 15 bp, Homo sapiens
agcagtgttgtcaca

SEQ ID NO: 1438779 - DNA, 15 bp, Homo sapiens
gcagtgttgtcacat

SEQ ID NO: 1438780 - DNA, 15 bp, Homo sapiens
cagtgttgtcacatg

SEQ ID NO: 1438781 - DNA, 15 bp, Homo sapiens
agtgttgtcacatgg

SEQ ID NO: 1438782 - DNA, 15 bp, Homo sapiens
gtgttgtcacatgga

SEQ ID NO: 1438783 - DNA, 15 bp, Homo sapiens
tgttgtcacatggat

SEQ ID NO: 1438784 - DNA, 15 bp, Homo sapiens
gttgtcacatggata

SEQ ID NO: 1438785 - DNA, 15 bp, Homo sapiens
ttgtcacatggatat

SEQ ID NO: 1438786 - DNA, 15 bp, Homo sapiens
tgtcacatggatata

SEQ ID NO: 1438787 - DNA, 15 bp, Homo sapiens
gtcacatggatatat

SEQ ID NO: 1438788 - DNA, 15 bp, Homo sapiens
tcacatggatatatt

SEQ ID NO: 1438789 - DNA, 15 bp, Homo sapiens
cacatggatatatta

SEQ ID NO: 1438790 - DNA, 15 bp, Homo sapiens
acatggatatattac

SEQ ID NO: 1438791 - DNA, 15 bp, Homo sapiens
catggatatattaca

SEQ ID NO: 1438792 - DNA, 15 bp, Homo sapiens
atggatatattacat

SEQ ID NO: 1438793 - DNA, 15 bp, Homo sapiens
tggatatattacata

SEQ ID NO: 1438794 - DNA, 15 bp, Homo sapiens
ggatatattacatag

SEQ ID NO: 1438795 - DNA, 15 bp, Homo sapiens
gatatattacatagt

SEQ ID NO: 1438796 - DNA, 15 bp, Homo sapiens
atatattacatagtg

SEQ ID NO: 1438797 - DNA, 15 bp, Homo sapiens
tatattacatagtgg

SEQ ID NO: 1438798 - DNA, 15 bp, Homo sapiens
atattacatagtggt

SEQ ID NO: 1438799 - DNA, 15 bp, Homo sapiens
tattacatagtggtg

SEQ ID NO: 1438800 - DNA, 15 bp, Homo sapiens
attacatagtggtga

SEQ ID NO: 1438801 - DNA, 15 bp, Homo sapiens
ttacatagtggtgaa

SEQ ID NO: 1438802 - DNA, 15 bp, Homo sapiens
tacatagtggtgaag

SEQ ID NO: 1438803 - DNA, 15 bp, Homo sapiens
acatagtggtgaagt

SEQ ID NO: 1438804 - DNA, 15 bp, Homo sapiens
catagtggtgaagtc

SEQ ID NO: 1438805 - DNA, 15 bp, Homo sapiens
atagtggtgaagtct

SEQ ID NO: 1438806 - DNA, 15 bp, Homo sapiens
tagtggtgaagtctg

SEQ ID NO: 1438807 - DNA, 15 bp, Homo sapiens
agtggtgaagtctgg

SEQ ID NO: 1438808 - DNA, 15 bp, Homo sapiens
gtggtgaagtctggg

SEQ ID NO: 1438809 - DNA, 15 bp, Homo sapiens
tggtgaagtctgggg

SEQ ID NO: 1438810 - DNA, 15 bp, Homo sapiens
ggtgaagtctggggt

SEQ ID NO: 1438811 - DNA, 15 bp, Homo sapiens
gtgaagtctggggtt

SEQ ID NO: 1438812 - DNA, 15 bp, Homo sapiens
tgaagtctggggttt

SEQ ID NO: 1438813 - DNA, 15 bp, Homo sapiens
gaagtctggggtttt

SEQ ID NO: 1438814 - DNA, 15 bp, Homo sapiens
aagtctggggtttta

SEQ ID NO: 1438815 - DNA, 15 bp, Homo sapiens
agtctggggttttag

SEQ ID NO: 1438816 - DNA, 15 bp, Homo sapiens
gtctggggttttagt

SEQ ID NO: 1438817 - DNA, 15 bp, Homo sapiens
tctggggttttagtg

SEQ ID NO: 1438818 - DNA, 15 bp, Homo sapiens
ctggggttttagtgt

SEQ ID NO: 1438819 - DNA, 15 bp, Homo sapiens
tggggttttagtgta

SEQ ID NO: 1438820 - DNA, 15 bp, Homo sapiens
ggggttttagtgtaa

SEQ ID NO: 1438821 - DNA, 15 bp, Homo sapiens
gggttttagtgtaaa

SEQ ID NO: 1438822 - DNA, 15 bp, Homo sapiens
ggttttagtgtaaat

SEQ ID NO: 1438823 - DNA, 15 bp, Homo sapiens
gttttagtgtaaatt

SEQ ID NO: 1438824 - DNA, 15 bp, Homo sapiens
ttttagtgtaaatta

SEQ ID NO: 1438825 - DNA, 15 bp, Homo sapiens
tttagtgtaaattaa

SEQ ID NO: 1438826 - DNA, 15 bp, Homo sapiens
ttagtgtaaattaat

SEQ ID NO: 1438827 - DNA, 15 bp, Homo sapiens
tagtgtaaattaatc

SEQ ID NO: 1438828 - DNA, 15 bp, Homo sapiens
agtgtaaattaatct

SEQ ID NO: 1438829 - DNA, 15 bp, Homo sapiens
gtgtaaattaatctt

SEQ ID NO: 1438830 - DNA, 15 bp, Homo sapiens
tgtaaattaatcttt

SEQ ID NO: 1438831 - DNA, 15 bp, Homo sapiens
gtaaattaatcttta

SEQ ID NO: 1438832 - DNA, 15 bp, Homo sapiens
taaattaatctttac

SEQ ID NO: 1438833 - DNA, 15 bp, Homo sapiens
aaattaatctttaca

SEQ ID NO: 1438834 - DNA, 15 bp, Homo sapiens
aattaatctttacat

SEQ ID NO: 1438835 - DNA, 15 bp, Homo sapiens
attaatctttacatt

SEQ ID NO: 1438836 - DNA, 15 bp, Homo sapiens
ttaatctttacattt

SEQ ID NO: 1438837 - DNA, 15 bp, Homo sapiens
taatctttacatttt

SEQ ID NO: 1438838 - DNA, 15 bp, Homo sapiens
aatctttacattttg

SEQ ID NO: 1438839 - DNA, 15 bp, Homo sapiens
atctttacattttgt

SEQ ID NO: 1438840 - DNA, 15 bp, Homo sapiens
tctttacattttgtt

SEQ ID NO: 1438841 - DNA, 15 bp, Homo sapiens
ctttacattttgttt

SEQ ID NO: 1438842 - DNA, 15 bp, Homo sapiens
tttacattttgtttg

SEQ ID NO: 1438843 - DNA, 15 bp, Homo sapiens
ttacattttgtttga

SEQ ID NO: 1438844 - DNA, 15 bp, Homo sapiens
tacattttgtttgag

SEQ ID NO: 1438845 - DNA, 15 bp, Homo sapiens
acattttgtttgagc

SEQ ID NO: 1438846 - DNA, 15 bp, Homo sapiens
cattttgtttgagcc

SEQ ID NO: 1438847 - DNA, 15 bp, Homo sapiens
attttgtttgagccc

SEQ ID NO: 1438848 - DNA, 15 bp, Homo sapiens
ttttgtttgagccca

SEQ ID NO: 1438849 - DNA, 15 bp, Homo sapiens
tttgtttgagcccaa

SEQ ID NO: 1438850 - DNA, 15 bp, Homo sapiens
ttgtttgagcccaat

SEQ ID NO: 1438851 - DNA, 15 bp, Homo sapiens
tgtttgagcccaata

SEQ ID NO: 1438852 - DNA, 15 bp, Homo sapiens
gtttgagcccaataa

SEQ ID NO: 1438853 - DNA, 15 bp, Homo sapiens
tttgagcccaataaa

SEQ ID NO: 1438854 - DNA, 15 bp, Homo sapiens
ttgagcccaataaat

SEQ ID NO: 1438855 - DNA, 15 bp, Homo sapiens
gagcccaataaatgt

SEQ ID NO: 1438856 - DNA, 15 bp, Homo sapiens
agcccaataaatgta

SEQ ID NO: 1438857 - DNA, 15 bp, Homo sapiens
gcccaataaatgtac

SEQ ID NO: 1438858 - DNA, 15 bp, Homo sapiens
cccaataaatgtacc

SEQ ID NO: 1438859 - DNA, 15 bp, Homo sapiens
ccaataaatgtacca

SEQ ID NO: 1438860 - DNA, 15 bp, Homo sapiens
caataaatgtaccaa

SEQ ID NO: 1438861 - DNA, 15 bp, Homo sapiens
aataaatgtaccaac

SEQ ID NO: 1438862 - DNA, 15 bp, Homo sapiens
ataaatgtaccaaca

SEQ ID NO: 1438863 - DNA, 15 bp, Homo sapiens
taaatgtaccaacat

SEQ ID NO: 1438864 - DNA, 15 bp, Homo sapiens
aaatgtaccaacatg

SEQ ID NO: 1438865 - DNA, 15 bp, Homo sapiens
aatgtaccaacatga

SEQ ID NO: 1438866 - DNA, 15 bp, Homo sapiens
atgtaccaacatgat

SEQ ID NO: 1438867 - DNA, 15 bp, Homo sapiens
tgtaccaacatgatt

SEQ ID NO: 1438868 - DNA, 15 bp, Homo sapiens
gtaccaacatgattt

SEQ ID NO: 1438869 - DNA, 15 bp, Homo sapiens
taccaacatgatttt

SEQ ID NO: 1438870 - DNA, 15 bp, Homo sapiens
accaacatgattttt

SEQ ID NO: 1438871 - DNA, 15 bp, Homo sapiens
ccaacatgattttta

SEQ ID NO: 1438872 - DNA, 15 bp, Homo sapiens
caacatgatttttat

SEQ ID NO: 1438873 - DNA, 15 bp, Homo sapiens
aacatgatttttata

SEQ ID NO: 1438874 - DNA, 15 bp, Homo sapiens
acatgatttttatag

SEQ ID NO: 1438875 - DNA, 15 bp, Homo sapiens
catgatttttataga

SEQ ID NO: 1438876 - DNA, 15 bp, Homo sapiens
atgatttttatagaa

SEQ ID NO: 1438877 - DNA, 15 bp, Homo sapiens
tgatttttatagaaa

SEQ ID NO: 1438878 - DNA, 15 bp, Homo sapiens
gatttttatagaaag

SEQ ID NO: 1438879 - DNA, 15 bp, Homo sapiens
atttttatagaaaga

SEQ ID NO: 1438880 - DNA, 15 bp, Homo sapiens
tttttatagaaagat

SEQ ID NO: 1438881 - DNA, 15 bp, Homo sapiens
ttttatagaaagata

SEQ ID NO: 1438882 - DNA, 15 bp, Homo sapiens
tttatagaaagatag

SEQ ID NO: 1438883 - DNA, 15 bp, Homo sapiens
ttatagaaagatagt

SEQ ID NO: 1438884 - DNA, 15 bp, Homo sapiens
tatagaaagatagtc

SEQ ID NO: 1438885 - DNA, 15 bp, Homo sapiens
atagaaagatagtca

SEQ ID NO: 1438886 - DNA, 15 bp, Homo sapiens
tagaaagatagtcat

SEQ ID NO: 1438887 - DNA, 15 bp, Homo sapiens
agaaagatagtcatt

SEQ ID NO: 1438888 - DNA, 15 bp, Homo sapiens
gaaagatagtcattc

SEQ ID NO: 1438889 - DNA, 15 bp, Homo sapiens
aaagatagtcattcc

SEQ ID NO: 1438890 - DNA, 15 bp, Homo sapiens
aagatagtcattcct

SEQ ID NO: 1438891 - DNA, 15 bp, Homo sapiens
agatagtcattccta

SEQ ID NO: 1438892 - DNA, 15 bp, Homo sapiens
gatagtcattcctat

SEQ ID NO: 1438893 - DNA, 15 bp, Homo sapiens
atagtcattcctatt

SEQ ID NO: 1438894 - DNA, 15 bp, Homo sapiens
tagtcattcctatta

SEQ ID NO: 1438895 - DNA, 15 bp, Homo sapiens
agtcattcctattaa

SEQ ID NO: 1438896 - DNA, 15 bp, Homo sapiens
gtcattcctattaat

SEQ ID NO: 1438897 - DNA, 15 bp, Homo sapiens
tcattcctattaatc

SEQ ID NO: 1438898 - DNA, 15 bp, Homo sapiens
cattcctattaatcc

SEQ ID NO: 1438899 - DNA, 15 bp, Homo sapiens
attcctattaatcca

SEQ ID NO: 1438900 - DNA, 15 bp, Homo sapiens
ttcctattaatccaa

SEQ ID NO: 1438901 - DNA, 15 bp, Homo sapiens
tcctattaatccaaa

SEQ ID NO: 1438902 - DNA, 15 bp, Homo sapiens
cctattaatccaaac

SEQ ID NO: 1438903 - DNA, 15 bp, Homo sapiens
ctattaatccaaact

SEQ ID NO: 1438904 - DNA, 15 bp, Homo sapiens
tattaatccaaactt

SEQ ID NO: 1438905 - DNA, 15 bp, Homo sapiens
attaatccaaacttg

SEQ ID NO: 1438906 - DNA, 15 bp, Homo sapiens
ttaatccaaacttgt

SEQ ID NO: 1438907 - DNA, 15 bp, Homo sapiens
taatccaaacttgtc

SEQ ID NO: 1438908 - DNA, 15 bp, Homo sapiens
aatccaaacttgtcc

SEQ ID NO: 1438909 - DNA, 15 bp, Homo sapiens
atccaaacttgtccc

SEQ ID NO: 1438910 - DNA, 15 bp, Homo sapiens
tccaaacttgtccca

SEQ ID NO: 1438911 - DNA, 15 bp, Homo sapiens
ccaaacttgtcccaa

SEQ ID NO: 1438912 - DNA, 15 bp, Homo sapiens
caaacttgtcccaac

SEQ ID NO: 1438913 - DNA, 15 bp, Homo sapiens
aaacttgtcccaact

SEQ ID NO: 1438914 - DNA, 15 bp, Homo sapiens
aacttgtcccaactt

SEQ ID NO: 1438915 - DNA, 15 bp, Homo sapiens
acttgtcccaacttt

SEQ ID NO: 1438916 - DNA, 15 bp, Homo sapiens
cttgtcccaactttg

SEQ ID NO: 1438917 - DNA, 15 bp, Homo sapiens
ttgtcccaactttga

SEQ ID NO: 1438918 - DNA, 15 bp, Homo sapiens
tgtcccaactttgaa

SEQ ID NO: 1438919 - DNA, 15 bp, Homo sapiens
gtcccaactttgaat

SEQ ID NO: 1438920 - DNA, 15 bp, Homo sapiens
tcccaactttgaatt

SEQ ID NO: 1438921 - DNA, 15 bp, Homo sapiens
cccaactttgaattg

SEQ ID NO: 1438922 - DNA, 15 bp, Homo sapiens
ccaactttgaattga

SEQ ID NO: 1438923 - DNA, 15 bp, Homo sapiens
caactttgaattgaa

SEQ ID NO: 1438924 - DNA, 15 bp, Homo sapiens
aactttgaattgaat

SEQ ID NO: 1438925 - DNA, 15 bp, Homo sapiens
actttgaattgaatt

SEQ ID NO: 1438926 - DNA, 15 bp, Homo sapiens
ctttgaattgaattg

SEQ ID NO: 1438927 - DNA, 15 bp, Homo sapiens
tttgaattgaattga

SEQ ID NO: 1438928 - DNA, 15 bp, Homo sapiens
tgaattgaattgagg

SEQ ID NO: 1438929 - DNA, 15 bp, Homo sapiens
gaattgaattgaggc

SEQ ID NO: 1438930 - DNA, 15 bp, Homo sapiens
aattgaattgaggca

SEQ ID NO: 1438931 - DNA, 15 bp, Homo sapiens
attgaattgaggcag

SEQ ID NO: 1438932 - DNA, 15 bp, Homo sapiens
ttgaattgaggcaga

SEQ ID NO: 1438933 - DNA, 15 bp, Homo sapiens
tgaattgaggcagag

SEQ ID NO: 1438934 - DNA, 15 bp, Homo sapiens
gaattgaggcagagc

SEQ ID NO: 1438935 - DNA, 15 bp, Homo sapiens
aattgaggcagagct

SEQ ID NO: 1438936 - DNA, 15 bp, Homo sapiens
attgaggcagagcta

SEQ ID NO: 1438937 - DNA, 15 bp, Homo sapiens
ttgaggcagagctag

SEQ ID NO: 1438938 - DNA, 15 bp, Homo sapiens
tgaggcagagctagc

SEQ ID NO: 1438939 - DNA, 15 bp, Homo sapiens
gaggcagagctagca

SEQ ID NO: 1438940 - DNA, 15 bp, Homo sapiens
aggcagagctagcag

SEQ ID NO: 1438941 - DNA, 15 bp, Homo sapiens
ggcagagctagcagg

SEQ ID NO: 1438942 - DNA, 15 bp, Homo sapiens
gcagagctagcaggt

SEQ ID NO: 1438943 - DNA, 15 bp, Homo sapiens
cagagctagcaggtg

SEQ ID NO: 1438944 - DNA, 15 bp, Homo sapiens
agagctagcaggtgt

SEQ ID NO: 1438945 - DNA, 15 bp, Homo sapiens
gagctagcaggtgtt

SEQ ID NO: 1438946 - DNA, 15 bp, Homo sapiens
agctagcaggtgttc

SEQ ID NO: 1438947 - DNA, 15 bp, Homo sapiens
gctagcaggtgttcc

SEQ ID NO: 1438948 - DNA, 15 bp, Homo sapiens
ctagcaggtgttccc

SEQ ID NO: 1438949 - DNA, 15 bp, Homo sapiens
tagcaggtgttcccc

SEQ ID NO: 1438950 - DNA, 15 bp, Homo sapiens
agcaggtgttcccca

SEQ ID NO: 1438951 - DNA, 15 bp, Homo sapiens
gcaggtgttccccac

SEQ ID NO: 1438952 - DNA, 15 bp, Homo sapiens
caggtgttccccacg

SEQ ID NO: 1438953 - DNA, 15 bp, Homo sapiens
aggtgttccccacgg

SEQ ID NO: 1438954 - DNA, 15 bp, Homo sapiens
ggtgttccccacggc

SEQ ID NO: 1438955 - DNA, 15 bp, Homo sapiens
gtgttccccacggct

SEQ ID NO: 1438956 - DNA, 15 bp, Homo sapiens
tgttccccacggctg

SEQ ID NO: 1438957 - DNA, 15 bp, Homo sapiens
gttccccacggctga

SEQ ID NO: 1438958 - DNA, 15 bp, Homo sapiens
ttccccacggctgag

SEQ ID NO: 1438959 - DNA, 15 bp, Homo sapiens
tccccacggctgagg

SEQ ID NO: 1438960 - DNA, 15 bp, Homo sapiens
ccccacggctgaggc

SEQ ID NO: 1438961 - DNA, 15 bp, Homo sapiens
cccacggctgaggca

SEQ ID NO: 1438962 - DNA, 15 bp, Homo sapiens
ccacggctgaggcat

SEQ ID NO: 1438963 - DNA, 15 bp, Homo sapiens
cacggctgaggcatc

SEQ ID NO: 1438964 - DNA, 15 bp, Homo sapiens
acggctgaggcatct

SEQ ID NO: 1438965 - DNA, 15 bp, Homo sapiens
cggctgaggcatctg

SEQ ID NO: 1438966 - DNA, 15 bp, Homo sapiens
ggctgaggcatctga

SEQ ID NO: 1438967 - DNA, 15 bp, Homo sapiens
gctgaggcatctgaa

SEQ ID NO: 1438968 - DNA, 15 bp, Homo sapiens
ctgaggcatctgaac

SEQ ID NO: 1438969 - DNA, 15 bp, Homo sapiens
tgaggcatctgaaca

SEQ ID NO: 1438970 - DNA, 15 bp, Homo sapiens
gaggcatctgaacat

SEQ ID NO: 1438971 - DNA, 15 bp, Homo sapiens
aggcatctgaacatt

SEQ ID NO: 1438972 - DNA, 15 bp, Homo sapiens
ggcatctgaacatta

SEQ ID NO: 1438973 - DNA, 15 bp, Homo sapiens
gcatctgaacattaa

SEQ ID NO: 1438974 - DNA, 15 bp, Homo sapiens
catctgaacattaag

SEQ ID NO: 1438975 - DNA, 15 bp, Homo sapiens
atctgaacattaagc

SEQ ID NO: 1438976 - DNA, 15 bp, Homo sapiens
tctgaacattaagca

SEQ ID NO: 1438977 - DNA, 15 bp, Homo sapiens
ctgaacattaagcat

SEQ ID NO: 1438978 - DNA, 15 bp, Homo sapiens
tgaacattaagcata

SEQ ID NO: 1438979 - DNA, 15 bp, Homo sapiens
gaacattaagcatat

SEQ ID NO: 1438980 - DNA, 15 bp, Homo sapiens
aacattaagcatatc

SEQ ID NO: 1438981 - DNA, 15 bp, Homo sapiens
acattaagcatatcc

SEQ ID NO: 1438982 - DNA, 15 bp, Homo sapiens
cattaagcatatccc

SEQ ID NO: 1438983 - DNA, 15 bp, Homo sapiens
attaagcatatccct

SEQ ID NO: 1438984 - DNA, 15 bp, Homo sapiens
ttaagcatatccctc

SEQ ID NO: 1438985 - DNA, 15 bp, Homo sapiens
taagcatatccctct

SEQ ID NO: 1438986 - DNA, 15 bp, Homo sapiens
aagcatatccctctg

SEQ ID NO: 1438987 - DNA, 15 bp, Homo sapiens
agcatatccctctga

SEQ ID NO: 1438988 - DNA, 15 bp, Homo sapiens
gcatatccctctgag

SEQ ID NO: 1438989 - DNA, 15 bp, Homo sapiens
catatccctctgaga

SEQ ID NO: 1438990 - DNA, 15 bp, Homo sapiens
atatccctctgagaa

SEQ ID NO: 1438991 - DNA, 15 bp, Homo sapiens
tatccctctgagaac

SEQ ID NO: 1438992 - DNA, 15 bp, Homo sapiens
atccctctgagaacc

SEQ ID NO: 1438993 - DNA, 15 bp, Homo sapiens
tccctctgagaacca

SEQ ID NO: 1438994 - DNA, 15 bp, Homo sapiens
ccctctgagaaccag

SEQ ID NO: 1438995 - DNA, 15 bp, Homo sapiens
cctctgagaaccagc

SEQ ID NO: 1438996 - DNA, 15 bp, Homo sapiens
ctctgagaaccagcc

SEQ ID NO: 1438997 - DNA, 15 bp, Homo sapiens
tctgagaaccagcct

SEQ ID NO: 1438998 - DNA, 15 bp, Homo sapiens
ctgagaaccagcctg

SEQ ID NO: 1438999 - DNA, 15 bp, Homo sapiens
tgagaaccagcctgc

SEQ ID NO: 1439000 - DNA, 15 bp, Homo sapiens
gagaaccagcctgca

SEQ ID NO: 1439001 - DNA, 15 bp, Homo sapiens
agaaccagcctgcat

SEQ ID NO: 1439002 - DNA, 15 bp, Homo sapiens
gaaccagcctgcatt

SEQ ID NO: 1439003 - DNA, 15 bp, Homo sapiens
aaccagcctgcattg

SEQ ID NO: 1439004 - DNA, 15 bp, Homo sapiens
accagcctgcattga

SEQ ID NO: 1439005 - DNA, 15 bp, Homo sapiens
ccagcctgcattgat

SEQ ID NO: 1439006 - DNA, 15 bp, Homo sapiens
cagcctgcattgata

SEQ ID NO: 1439007 - DNA, 15 bp, Homo sapiens
agcctgcattgatac

SEQ ID NO: 1439008 - DNA, 15 bp, Homo sapiens
gcctgcattgatact

SEQ ID NO: 1439009 - DNA, 15 bp, Homo sapiens
cctgcattgatactc

SEQ ID NO: 1439010 - DNA, 15 bp, Homo sapiens
ctgcattgatactct

SEQ ID NO: 1439011 - DNA, 15 bp, Homo sapiens
tgcattgatactctt

SEQ ID NO: 1439012 - DNA, 15 bp, Homo sapiens
gcattgatactcttt

SEQ ID NO: 1439013 - DNA, 15 bp, Homo sapiens
cattgatactctttc

SEQ ID NO: 1439014 - DNA, 15 bp, Homo sapiens
attgatactctttct

SEQ ID NO: 1439015 - DNA, 15 bp, Homo sapiens
ttgatactctttcta

SEQ ID NO: 1439016 - DNA, 15 bp, Homo sapiens
tgatactctttctaa

SEQ ID NO: 1439017 - DNA, 15 bp, Homo sapiens
gatactctttctaat

SEQ ID NO: 1439018 - DNA, 15 bp, Homo sapiens
atactctttctaatg

SEQ ID NO: 1439019 - DNA, 15 bp, Homo sapiens
tactctttctaatgt

SEQ ID NO: 1439020 - DNA, 15 bp, Homo sapiens
actctttctaatgtg

SEQ ID NO: 1439021 - DNA, 15 bp, Homo sapiens
ctctttctaatgtgg

SEQ ID NO: 1439022 - DNA, 15 bp, Homo sapiens
tctttctaatgtgga

SEQ ID NO: 1439023 - DNA, 15 bp, Homo sapiens
ctttctaatgtggac

SEQ ID NO: 1439024 - DNA, 15 bp, Homo sapiens
tttctaatgtggaca

SEQ ID NO: 1439025 - DNA, 15 bp, Homo sapiens
ttctaatgtggacag

SEQ ID NO: 1439026 - DNA, 15 bp, Homo sapiens
tctaatgtggacagc

SEQ ID NO: 1439027 - DNA, 15 bp, Homo sapiens
ctaatgtggacagca

SEQ ID NO: 1439028 - DNA, 15 bp, Homo sapiens
taatgtggacagcat

SEQ ID NO: 1439029 - DNA, 15 bp, Homo sapiens
aatgtggacagcatc

SEQ ID NO: 1439030 - DNA, 15 bp, Homo sapiens
atgtggacagcatca

SEQ ID NO: 1439031 - DNA, 15 bp, Homo sapiens
tgtggacagcatcaa

SEQ ID NO: 1439032 - DNA, 15 bp, Homo sapiens
gtggacagcatcaag

SEQ ID NO: 1439033 - DNA, 15 bp, Homo sapiens
tggacagcatcaagc

SEQ ID NO: 1439034 - DNA, 15 bp, Homo sapiens
ggacagcatcaagct

SEQ ID NO: 1439035 - DNA, 15 bp, Homo sapiens
gacagcatcaagcta

SEQ ID NO: 1439036 - DNA, 15 bp, Homo sapiens
acagcatcaagctat

SEQ ID NO: 1439037 - DNA, 15 bp, Homo sapiens
cagcatcaagctatg

SEQ ID NO: 1439038 - DNA, 15 bp, Homo sapiens
agcatcaagctatgt

SEQ ID NO: 1439039 - DNA, 15 bp, Homo sapiens
gcatcaagctatgta

SEQ ID NO: 1439040 - DNA, 15 bp, Homo sapiens
catcaagctatgtac

SEQ ID NO: 1439041 - DNA, 15 bp, Homo sapiens
atcaagctatgtacg

SEQ ID NO: 1439042 - DNA, 15 bp, Homo sapiens
tcaagctatgtacgt

SEQ ID NO: 1439043 - DNA, 15 bp, Homo sapiens
caagctatgtacgta

SEQ ID NO: 1439044 - DNA, 15 bp, Homo sapiens
aagctatgtacgtag

SEQ ID NO: 1439045 - DNA, 15 bp, Homo sapiens
agctatgtacgtagt

SEQ ID NO: 1439046 - DNA, 15 bp, Homo sapiens
gctatgtacgtagtt

SEQ ID NO: 1439047 - DNA, 15 bp, Homo sapiens
ctatgtacgtagttc

SEQ ID NO: 1439048 - DNA, 15 bp, Homo sapiens
tatgtacgtagttct

SEQ ID NO: 1439049 - DNA, 15 bp, Homo sapiens
atgtacgtagttctg

SEQ ID NO: 1439050 - DNA, 15 bp, Homo sapiens
tgtacgtagttctgt

SEQ ID NO: 1439051 - DNA, 15 bp, Homo sapiens
gtacgtagttctgtg

SEQ ID NO: 1439052 - DNA, 15 bp, Homo sapiens
tacgtagttctgtgc

SEQ ID NO: 1439053 - DNA, 15 bp, Homo sapiens
acgtagttctgtgct

SEQ ID NO: 1439054 - DNA, 15 bp, Homo sapiens
cgtagttctgtgctc

SEQ ID NO: 1439055 - DNA, 15 bp, Homo sapiens
gtagttctgtgctca

SEQ ID NO: 1439056 - DNA, 15 bp, Homo sapiens
tagttctgtgctcag

SEQ ID NO: 1439057 - DNA, 15 bp, Homo sapiens
agttctgtgctcagc

SEQ ID NO: 1439058 - DNA, 15 bp, Homo sapiens
gttctgtgctcagca

SEQ ID NO: 1439059 - DNA, 15 bp, Homo sapiens
ttctgtgctcagcaa

SEQ ID NO: 1439060 - DNA, 15 bp, Homo sapiens
tctgtgctcagcaaa

SEQ ID NO: 1439061 - DNA, 15 bp, Homo sapiens
ctgtgctcagcaaaa

SEQ ID NO: 1439062 - DNA, 15 bp, Homo sapiens
tgtgctcagcaaaag

SEQ ID NO: 1439063 - DNA, 15 bp, Homo sapiens
gtgctcagcaaaagc

SEQ ID NO: 1439064 - DNA, 15 bp, Homo sapiens
tgctcagcaaaagcc

SEQ ID NO: 1439065 - DNA, 15 bp, Homo sapiens
gctcagcaaaagccc

SEQ ID NO: 1439066 - DNA, 15 bp, Homo sapiens
ctcagcaaaagccct

SEQ ID NO: 1439067 - DNA, 15 bp, Homo sapiens
tcagcaaaagccctg

SEQ ID NO: 1439068 - DNA, 15 bp, Homo sapiens
cagcaaaagccctga

SEQ ID NO: 1439069 - DNA, 15 bp, Homo sapiens
agcaaaagccctgac

SEQ ID NO: 1439070 - DNA, 15 bp, Homo sapiens
gcaaaagccctgact

SEQ ID NO: 1439071 - DNA, 15 bp, Homo sapiens
caaaagccctgactt

SEQ ID NO: 1439072 - DNA, 15 bp, Homo sapiens
aaaagccctgacttc

SEQ ID NO: 1439073 - DNA, 15 bp, Homo sapiens
aaagccctgacttct

SEQ ID NO: 1439074 - DNA, 15 bp, Homo sapiens
aagccctgacttctt

SEQ ID NO: 1439075 - DNA, 15 bp, Homo sapiens
agccctgacttcttt

SEQ ID NO: 1439076 - DNA, 15 bp, Homo sapiens
gccctgacttctttt

SEQ ID NO: 1439077 - DNA, 15 bp, Homo sapiens
ccctgacttcttttt

SEQ ID NO: 1439078 - DNA, 15 bp, Homo sapiens
cctgacttctttttg

SEQ ID NO: 1439079 - DNA, 15 bp, Homo sapiens
ctgacttctttttgt

SEQ ID NO: 1439080 - DNA, 15 bp, Homo sapiens
tgacttctttttgtt

SEQ ID NO: 1439081 - DNA, 15 bp, Homo sapiens
gacttctttttgttt

SEQ ID NO: 1439082 - DNA, 15 bp, Homo sapiens
acttctttttgttta

SEQ ID NO: 1439083 - DNA, 15 bp, Homo sapiens
cttctttttgtttat

SEQ ID NO: 1439084 - DNA, 15 bp, Homo sapiens
ttctttttgtttatg

SEQ ID NO: 1439085 - DNA, 15 bp, Homo sapiens
tctttttgtttatgt

SEQ ID NO: 1439086 - DNA, 15 bp, Homo sapiens
ctttttgtttatgtc

SEQ ID NO: 1439087 - DNA, 15 bp, Homo sapiens
tttttgtttatgtcc

SEQ ID NO: 1439088 - DNA, 15 bp, Homo sapiens
ttttgtttatgtcct

SEQ ID NO: 1439089 - DNA, 15 bp, Homo sapiens
tttgtttatgtccta

SEQ ID NO: 1439090 - DNA, 15 bp, Homo sapiens
ttgtttatgtcctag

SEQ ID NO: 1439091 - DNA, 15 bp, Homo sapiens
tgtttatgtcctagc

SEQ ID NO: 1439092 - DNA, 15 bp, Homo sapiens
gtttatgtcctagcc

SEQ ID NO: 1439093 - DNA, 15 bp, Homo sapiens
tttatgtcctagccc

SEQ ID NO: 1439094 - DNA, 15 bp, Homo sapiens
ttatgtcctagcccc

SEQ ID NO: 1439095 - DNA, 15 bp, Homo sapiens
tatgtcctagcccca

SEQ ID NO: 1439096 - DNA, 15 bp, Homo sapiens
atgtcctagccccat

SEQ ID NO: 1439097 - DNA, 15 bp, Homo sapiens
tgtcctagccccata

SEQ ID NO: 1439098 - DNA, 15 bp, Homo sapiens
gtcctagccccatac

SEQ ID NO: 1439099 - DNA, 15 bp, Homo sapiens
tcctagccccataca

SEQ ID NO: 1439100 - DNA, 15 bp, Homo sapiens
cctagccccatacaa

SEQ ID NO: 1439101 - DNA, 15 bp, Homo sapiens
ctagccccatacaac

SEQ ID NO: 1439102 - DNA, 15 bp, Homo sapiens
tagccccatacaaca

SEQ ID NO: 1439103 - DNA, 15 bp, Homo sapiens
agccccatacaacaa

SEQ ID NO: 1439104 - DNA, 15 bp, Homo sapiens
gccccatacaacaaa

SEQ ID NO: 1439105 - DNA, 15 bp, Homo sapiens
ccccatacaacaaaa

SEQ ID NO: 1439106 - DNA, 15 bp, Homo sapiens
cccatacaacaaaat

SEQ ID NO: 1439107 - DNA, 15 bp, Homo sapiens
ccatacaacaaaatc

SEQ ID NO: 1439108 - DNA, 15 bp, Homo sapiens
catacaacaaaatca

SEQ ID NO: 1439109 - DNA, 15 bp, Homo sapiens
atacaacaaaatcaa

SEQ ID NO: 1439110 - DNA, 15 bp, Homo sapiens
tacaacaaaatcaac

SEQ ID NO: 1439111 - DNA, 15 bp, Homo sapiens
acaacaaaatcaacc

SEQ ID NO: 1439112 - DNA, 15 bp, Homo sapiens
caacaaaatcaacca

SEQ ID NO: 1439113 - DNA, 15 bp, Homo sapiens
aacaaaatcaaccaa

SEQ ID NO: 1439114 - DNA, 15 bp, Homo sapiens
acaaaatcaaccaaa

SEQ ID NO: 1439115 - DNA, 15 bp, Homo sapiens
caaaatcaaccaaag

SEQ ID NO: 1439116 - DNA, 15 bp, Homo sapiens
aaaatcaaccaaaga

SEQ ID NO: 1439117 - DNA, 15 bp, Homo sapiens
aaatcaaccaaagaa

SEQ ID NO: 1439118 - DNA, 15 bp, Homo sapiens
aatcaaccaaagaat

SEQ ID NO: 1439119 - DNA, 15 bp, Homo sapiens
atcaaccaaagaatt

SEQ ID NO: 1439120 - DNA, 15 bp, Homo sapiens
tcaaccaaagaattt

SEQ ID NO: 1439121 - DNA, 15 bp, Homo sapiens
caaccaaagaatttt

SEQ ID NO: 1439122 - DNA, 15 bp, Homo sapiens
aaccaaagaattttg

SEQ ID NO: 1439123 - DNA, 15 bp, Homo sapiens
accaaagaattttgg

SEQ ID NO: 1439124 - DNA, 15 bp, Homo sapiens
ccaaagaattttggt

SEQ ID NO: 1439125 - DNA, 15 bp, Homo sapiens
caaagaattttggtt

SEQ ID NO: 1439126 - DNA, 15 bp, Homo sapiens
aaagaattttggttg

SEQ ID NO: 1439127 - DNA, 15 bp, Homo sapiens
aagaattttggttgt

SEQ ID NO: 1439128 - DNA, 15 bp, Homo sapiens
agaattttggttgtg

SEQ ID NO: 1439129 - DNA, 15 bp, Homo sapiens
gaattttggttgtgg

SEQ ID NO: 1439130 - DNA, 15 bp, Homo sapiens
aattttggttgtgga

SEQ ID NO: 1439131 - DNA, 15 bp, Homo sapiens
attttggttgtggat

SEQ ID NO: 1439132 - DNA, 15 bp, Homo sapiens
ttttggttgtggatc

SEQ ID NO: 1439133 - DNA, 15 bp, Homo sapiens
tttggttgtggatcc

SEQ ID NO: 1439134 - DNA, 15 bp, Homo sapiens
ttggttgtggatcca

SEQ ID NO: 1439135 - DNA, 15 bp, Homo sapiens
tggttgtggatccag

SEQ ID NO: 1439136 - DNA, 15 bp, Homo sapiens
ggttgtggatccagt

SEQ ID NO: 1439137 - DNA, 15 bp, Homo sapiens
gttgtggatccagtc

SEQ ID NO: 1439138 - DNA, 15 bp, Homo sapiens
ttgtggatccagtca

SEQ ID NO: 1439139 - DNA, 15 bp, Homo sapiens
tgtggatccagtcac

SEQ ID NO: 1439140 - DNA, 15 bp, Homo sapiens
gtggatccagtcacc

SEQ ID NO: 1439141 - DNA, 15 bp, Homo sapiens
tggatccagtcacct

SEQ ID NO: 1439142 - DNA, 15 bp, Homo sapiens
ggatccagtcacctc

SEQ ID NO: 1439143 - DNA, 15 bp, Homo sapiens
gatccagtcacctct

SEQ ID NO: 1439144 - DNA, 15 bp, Homo sapiens
atccagtcacctctg

SEQ ID NO: 1439145 - DNA, 15 bp, Homo sapiens
tccagtcacctctga

SEQ ID NO: 1439146 - DNA, 15 bp, Homo sapiens
ccagtcacctctgaa

SEQ ID NO: 1439147 - DNA, 15 bp, Homo sapiens
cagtcacctctgaac

SEQ ID NO: 1439148 - DNA, 15 bp, Homo sapiens
agtcacctctgaaca

SEQ ID NO: 1439149 - DNA, 15 bp, Homo sapiens
gtcacctctgaacat

SEQ ID NO: 1439150 - DNA, 15 bp, Homo sapiens
tcacctctgaacatg

SEQ ID NO: 1439151 - DNA, 15 bp, Homo sapiens
cacctctgaacatga

SEQ ID NO: 1439152 - DNA, 15 bp, Homo sapiens
acctctgaacatgaa

SEQ ID NO: 1439153 - DNA, 15 bp, Homo sapiens
cctctgaacatgaac

SEQ ID NO: 1439154 - DNA, 15 bp, Homo sapiens
ctctgaacatgaact

SEQ ID NO: 1439155 - DNA, 15 bp, Homo sapiens
tctgaacatgaactg

SEQ ID NO: 1439156 - DNA, 15 bp, Homo sapiens
ctgaacatgaactga

SEQ ID NO: 1439157 - DNA, 15 bp, Homo sapiens
tgaacatgaactgac

SEQ ID NO: 1439158 - DNA, 15 bp, Homo sapiens
gaacatgaactgaca

SEQ ID NO: 1439159 - DNA, 15 bp, Homo sapiens
aacatgaactgacat

SEQ ID NO: 1439160 - DNA, 15 bp, Homo sapiens
acatgaactgacatg

SEQ ID NO: 1439161 - DNA, 15 bp, Homo sapiens
catgaactgacatgt

SEQ ID NO: 1439162 - DNA, 15 bp, Homo sapiens
atgaactgacatgtc

SEQ ID NO: 1439163 - DNA, 15 bp, Homo sapiens
tgaactgacatgtca

SEQ ID NO: 1439164 - DNA, 15 bp, Homo sapiens
gaactgacatgtcag

SEQ ID NO: 1439165 - DNA, 15 bp, Homo sapiens
aactgacatgtcagg

SEQ ID NO: 1439166 - DNA, 15 bp, Homo sapiens
actgacatgtcaggc

SEQ ID NO: 1439167 - DNA, 15 bp, Homo sapiens
ctgacatgtcaggct

SEQ ID NO: 1439168 - DNA, 15 bp, Homo sapiens
tgacatgtcaggctg

SEQ ID NO: 1439169 - DNA, 15 bp, Homo sapiens
gacatgtcaggctga

SEQ ID NO: 1439170 - DNA, 15 bp, Homo sapiens
acatgtcaggctgag

SEQ ID NO: 1439171 - DNA, 15 bp, Homo sapiens
catgtcaggctgagg

SEQ ID NO: 1439172 - DNA, 15 bp, Homo sapiens
atgtcaggctgaggg

SEQ ID NO: 1439173 - DNA, 15 bp, Homo sapiens
tgtcaggctgagggc

SEQ ID NO: 1439174 - DNA, 15 bp, Homo sapiens
gtcaggctgagggct

SEQ ID NO: 1439175 - DNA, 15 bp, Homo sapiens
tcaggctgagggcta

SEQ ID NO: 1439176 - DNA, 15 bp, Homo sapiens
caggctgagggctac

SEQ ID NO: 1439177 - DNA, 15 bp, Homo sapiens
aggctgagggctacc

SEQ ID NO: 1439178 - DNA, 15 bp, Homo sapiens
ggctgagggctaccc

SEQ ID NO: 1439179 - DNA, 15 bp, Homo sapiens
gctgagggctacccc

SEQ ID NO: 1439180 - DNA, 15 bp, Homo sapiens
ctgagggctacccca

SEQ ID NO: 1439181 - DNA, 15 bp, Homo sapiens
tgagggctaccccaa

SEQ ID NO: 1439182 - DNA, 15 bp, Homo sapiens
gagggctaccccaag

SEQ ID NO: 1439183 - DNA, 15 bp, Homo sapiens
agggctaccccaagg

SEQ ID NO: 1439184 - DNA, 15 bp, Homo sapiens
gggctaccccaaggc

SEQ ID NO: 1439185 - DNA, 15 bp, Homo sapiens
ggctaccccaaggcc

SEQ ID NO: 1439186 - DNA, 15 bp, Homo sapiens
gctaccccaaggccg

SEQ ID NO: 1439187 - DNA, 15 bp, Homo sapiens
ctaccccaaggccga

SEQ ID NO: 1439188 - DNA, 15 bp, Homo sapiens
taccccaaggccgaa

SEQ ID NO: 1439189 - DNA, 15 bp, Homo sapiens
accccaaggccgaag

SEQ ID NO: 1439190 - DNA, 15 bp, Homo sapiens
ccccaaggccgaagt

SEQ ID NO: 1439191 - DNA, 15 bp, Homo sapiens
cccaaggccgaagtc

SEQ ID NO: 1439192 - DNA, 15 bp, Homo sapiens
ccaaggccgaagtca

SEQ ID NO: 1439193 - DNA, 15 bp, Homo sapiens
caaggccgaagtcat

SEQ ID NO: 1439194 - DNA, 15 bp, Homo sapiens
aaggccgaagtcatc

SEQ ID NO: 1439195 - DNA, 15 bp, Homo sapiens
aggccgaagtcatct

SEQ ID NO: 1439196 - DNA, 15 bp, Homo sapiens
ggccgaagtcatctg

SEQ ID NO: 1439197 - DNA, 15 bp, Homo sapiens
gccgaagtcatctgg

SEQ ID NO: 1439198 - DNA, 15 bp, Homo sapiens
ccgaagtcatctgga

SEQ ID NO: 1439199 - DNA, 15 bp, Homo sapiens
cgaagtcatctggac

SEQ ID NO: 1439200 - DNA, 15 bp, Homo sapiens
gaagtcatctggaca

SEQ ID NO: 1439201 - DNA, 15 bp, Homo sapiens
aagtcatctggacaa

SEQ ID NO: 1439202 - DNA, 15 bp, Homo sapiens
agtcatctggacaag

SEQ ID NO: 1439203 - DNA, 15 bp, Homo sapiens
gtcatctggacaagc

SEQ ID NO: 1439204 - DNA, 15 bp, Homo sapiens
tcatctggacaagca

SEQ ID NO: 1439205 - DNA, 15 bp, Homo sapiens
catctggacaagcag

SEQ ID NO: 1439206 - DNA, 15 bp, Homo sapiens
atctggacaagcagt

SEQ ID NO: 1439207 - DNA, 15 bp, Homo sapiens
tctggacaagcagtg

SEQ ID NO: 1439208 - DNA, 15 bp, Homo sapiens
ctggacaagcagtga

SEQ ID NO: 1439209 - DNA, 15 bp, Homo sapiens
tggacaagcagtgac

SEQ ID NO: 1439210 - DNA, 15 bp, Homo sapiens
ggacaagcagtgacc

SEQ ID NO: 1439211 - DNA, 15 bp, Homo sapiens
gacaagcagtgacca

SEQ ID NO: 1439212 - DNA, 15 bp, Homo sapiens
acaagcagtgaccat

SEQ ID NO: 1439213 - DNA, 15 bp, Homo sapiens
caagcagtgaccatc

SEQ ID NO: 1439214 - DNA, 15 bp, Homo sapiens
aagcagtgaccatca

SEQ ID NO: 1439215 - DNA, 15 bp, Homo sapiens
agcagtgaccatcaa

SEQ ID NO: 1439216 - DNA, 15 bp, Homo sapiens
gcagtgaccatcaag

SEQ ID NO: 1439217 - DNA, 15 bp, Homo sapiens
cagtgaccatcaagt

SEQ ID NO: 1439218 - DNA, 15 bp, Homo sapiens
agtgaccatcaagtc

SEQ ID NO: 1439219 - DNA, 15 bp, Homo sapiens
gtgaccatcaagtcc

SEQ ID NO: 1439220 - DNA, 15 bp, Homo sapiens
tgaccatcaagtcct

SEQ ID NO: 1439221 - DNA, 15 bp, Homo sapiens
gaccatcaagtcctg

SEQ ID NO: 1439222 - DNA, 15 bp, Homo sapiens
accatcaagtcctga

SEQ ID NO: 1439223 - DNA, 15 bp, Homo sapiens
ccatcaagtcctgag

SEQ ID NO: 1439224 - DNA, 15 bp, Homo sapiens
catcaagtcctgagt

SEQ ID NO: 1439225 - DNA, 15 bp, Homo sapiens
atcaagtcctgagtg

SEQ ID NO: 1439226 - DNA, 15 bp, Homo sapiens
tcaagtcctgagtgg

SEQ ID NO: 1439227 - DNA, 15 bp, Homo sapiens
caagtcctgagtggt

SEQ ID NO: 1439228 - DNA, 15 bp, Homo sapiens
aagtcctgagtggta

SEQ ID NO: 1439229 - DNA, 15 bp, Homo sapiens
agtcctgagtggtaa

SEQ ID NO: 1439230 - DNA, 15 bp, Homo sapiens
gtcctgagtggtaag

SEQ ID NO: 1439231 - DNA, 15 bp, Homo sapiens
tcctgagtggtaaga

SEQ ID NO: 1439232 - DNA, 15 bp, Homo sapiens
cctgagtggtaagac

SEQ ID NO: 1439233 - DNA, 15 bp, Homo sapiens
ctgagtggtaagacc

SEQ ID NO: 1439234 - DNA, 15 bp, Homo sapiens
tgagtggtaagacca

SEQ ID NO: 1439235 - DNA, 15 bp, Homo sapiens
gagtggtaagaccac

SEQ ID NO: 1439236 - DNA, 15 bp, Homo sapiens
agtggtaagaccacc

SEQ ID NO: 1439237 - DNA, 15 bp, Homo sapiens
gtggtaagaccacca

SEQ ID NO: 1439238 - DNA, 15 bp, Homo sapiens
tggtaagaccaccac

SEQ ID NO: 1439239 - DNA, 15 bp, Homo sapiens
ggtaagaccaccacc

SEQ ID NO: 1439240 - DNA, 15 bp, Homo sapiens
gtaagaccaccacca

SEQ ID NO: 1439241 - DNA, 15 bp, Homo sapiens
taagaccaccaccac

SEQ ID NO: 1439242 - DNA, 15 bp, Homo sapiens
aagaccaccaccacc

SEQ ID NO: 1439243 - DNA, 15 bp, Homo sapiens
agaccaccaccacca

SEQ ID NO: 1439244 - DNA, 15 bp, Homo sapiens
gaccaccaccaccaa

SEQ ID NO: 1439245 - DNA, 15 bp, Homo sapiens
accaccaccaccaat

SEQ ID NO: 1439246 - DNA, 15 bp, Homo sapiens
ccaccaccaccaatt

SEQ ID NO: 1439247 - DNA, 15 bp, Homo sapiens
caccaccaccaattc

SEQ ID NO: 1439248 - DNA, 15 bp, Homo sapiens
accaccaccaattcc

SEQ ID NO: 1439249 - DNA, 15 bp, Homo sapiens
ccaccaccaattcca

SEQ ID NO: 1439250 - DNA, 15 bp, Homo sapiens
caccaccaattccaa

SEQ ID NO: 1439251 - DNA, 15 bp, Homo sapiens
accaccaattccaag

SEQ ID NO: 1439252 - DNA, 15 bp, Homo sapiens
ccaccaattccaaga

SEQ ID NO: 1439253 - DNA, 15 bp, Homo sapiens
caccaattccaagag

SEQ ID NO: 1439254 - DNA, 15 bp, Homo sapiens
accaattccaagaga

SEQ ID NO: 1439255 - DNA, 15 bp, Homo sapiens
ccaattccaagagag

SEQ ID NO: 1439256 - DNA, 15 bp, Homo sapiens
caattccaagagaga

SEQ ID NO: 1439257 - DNA, 15 bp, Homo sapiens
aattccaagagagag

SEQ ID NO: 1439258 - DNA, 15 bp, Homo sapiens
attccaagagagagg

SEQ ID NO: 1439259 - DNA, 15 bp, Homo sapiens
ttccaagagagagga

SEQ ID NO: 1439260 - DNA, 15 bp, Homo sapiens
tccaagagagaggag

SEQ ID NO: 1439261 - DNA, 15 bp, Homo sapiens
ccaagagagaggaga

SEQ ID NO: 1439262 - DNA, 15 bp, Homo sapiens
caagagagaggagaa

SEQ ID NO: 1439263 - DNA, 15 bp, Homo sapiens
aagagagaggagaag

SEQ ID NO: 1439264 - DNA, 15 bp, Homo sapiens
agagagaggagaagc

SEQ ID NO: 1439265 - DNA, 15 bp, Homo sapiens
gagagaggagaagct

SEQ ID NO: 1439266 - DNA, 15 bp, Homo sapiens
agagaggagaagctt

SEQ ID NO: 1439267 - DNA, 15 bp, Homo sapiens
gagaggagaagcttt

SEQ ID NO: 1439268 - DNA, 15 bp, Homo sapiens
agaggagaagctttt

SEQ ID NO: 1439269 - DNA, 15 bp, Homo sapiens
gaggagaagcttttc

SEQ ID NO: 1439270 - DNA, 15 bp, Homo sapiens
aggagaagcttttca

SEQ ID NO: 1439271 - DNA, 15 bp, Homo sapiens
ggagaagcttttcaa

SEQ ID NO: 1439272 - DNA, 15 bp, Homo sapiens
gagaagcttttcaat

SEQ ID NO: 1439273 - DNA, 15 bp, Homo sapiens
agaagcttttcaatg

SEQ ID NO: 1439274 - DNA, 15 bp, Homo sapiens
gaagcttttcaatgt

SEQ ID NO: 1439275 - DNA, 15 bp, Homo sapiens
aagcttttcaatgtg

SEQ ID NO: 1439276 - DNA, 15 bp, Homo sapiens
agcttttcaatgtga

SEQ ID NO: 1439277 - DNA, 15 bp, Homo sapiens
gcttttcaatgtgac

SEQ ID NO: 1439278 - DNA, 15 bp, Homo sapiens
cttttcaatgtgacc

SEQ ID NO: 1439279 - DNA, 15 bp, Homo sapiens
ttttcaatgtgacca

SEQ ID NO: 1439280 - DNA, 15 bp, Homo sapiens
tttcaatgtgaccag

SEQ ID NO: 1439281 - DNA, 15 bp, Homo sapiens
ttcaatgtgaccagc

SEQ ID NO: 1439282 - DNA, 15 bp, Homo sapiens
caatgtgaccagcac

SEQ ID NO: 1439283 - DNA, 15 bp, Homo sapiens
aatgtgaccagcaca

SEQ ID NO: 1439284 - DNA, 15 bp, Homo sapiens
atgtgaccagcacac

SEQ ID NO: 1439285 - DNA, 15 bp, Homo sapiens
tgtgaccagcacact

SEQ ID NO: 1439286 - DNA, 15 bp, Homo sapiens
gtgaccagcacactg

SEQ ID NO: 1439287 - DNA, 15 bp, Homo sapiens
tgaccagcacactga

SEQ ID NO: 1439288 - DNA, 15 bp, Homo sapiens
gaccagcacactgag

SEQ ID NO: 1439289 - DNA, 15 bp, Homo sapiens
accagcacactgaga

SEQ ID NO: 1439290 - DNA, 15 bp, Homo sapiens
ccagcacactgagaa

SEQ ID NO: 1439291 - DNA, 15 bp, Homo sapiens
cagcacactgagaat

SEQ ID NO: 1439292 - DNA, 15 bp, Homo sapiens
agcacactgagaatc

SEQ ID NO: 1439293 - DNA, 15 bp, Homo sapiens
gcacactgagaatca

SEQ ID NO: 1439294 - DNA, 15 bp, Homo sapiens
cacactgagaatcaa

SEQ ID NO: 1439295 - DNA, 15 bp, Homo sapiens
acactgagaatcaac

SEQ ID NO: 1439296 - DNA, 15 bp, Homo sapiens
cactgagaatcaaca

SEQ ID NO: 1439297 - DNA, 15 bp, Homo sapiens
actgagaatcaacac

SEQ ID NO: 1439298 - DNA, 15 bp, Homo sapiens
ctgagaatcaacaca

SEQ ID NO: 1439299 - DNA, 15 bp, Homo sapiens
tgagaatcaacacaa

SEQ ID NO: 1439300 - DNA, 15 bp, Homo sapiens
gagaatcaacacaac

SEQ ID NO: 1439301 - DNA, 15 bp, Homo sapiens
agaatcaacacaaca

SEQ ID NO: 1439302 - DNA, 15 bp, Homo sapiens
gaatcaacacaacaa

SEQ ID NO: 1439303 - DNA, 15 bp, Homo sapiens
aatcaacacaacaac

SEQ ID NO: 1439304 - DNA, 15 bp, Homo sapiens
atcaacacaacaact

SEQ ID NO: 1439305 - DNA, 15 bp, Homo sapiens
tcaacacaacaacta

SEQ ID NO: 1439306 - DNA, 15 bp, Homo sapiens
caacacaacaactaa

SEQ ID NO: 1439307 - DNA, 15 bp, Homo sapiens
aacacaacaactaat

SEQ ID NO: 1439308 - DNA, 15 bp, Homo sapiens
acacaacaactaatg

SEQ ID NO: 1439309 - DNA, 15 bp, Homo sapiens
cacaacaactaatga

SEQ ID NO: 1439310 - DNA, 15 bp, Homo sapiens
acaacaactaatgag

SEQ ID NO: 1439311 - DNA, 15 bp, Homo sapiens
caacaactaatgaga

SEQ ID NO: 1439312 - DNA, 15 bp, Homo sapiens
aacaactaatgagat

SEQ ID NO: 1439313 - DNA, 15 bp, Homo sapiens
acaactaatgagatt

SEQ ID NO: 1439314 - DNA, 15 bp, Homo sapiens
caactaatgagattt

SEQ ID NO: 1439315 - DNA, 15 bp, Homo sapiens
aactaatgagatttt

SEQ ID NO: 1439316 - DNA, 15 bp, Homo sapiens
actaatgagattttc

SEQ ID NO: 1439317 - DNA, 15 bp, Homo sapiens
ctaatgagattttct

SEQ ID NO: 1439318 - DNA, 15 bp, Homo sapiens
taatgagattttcta

SEQ ID NO: 1439319 - DNA, 15 bp, Homo sapiens
aatgagattttctac

SEQ ID NO: 1439320 - DNA, 15 bp, Homo sapiens
atgagattttctact

SEQ ID NO: 1439321 - DNA, 15 bp, Homo sapiens
tgagattttctactg

SEQ ID NO: 1439322 - DNA, 15 bp, Homo sapiens
gagattttctactgc

SEQ ID NO: 1439323 - DNA, 15 bp, Homo sapiens
agattttctactgca

SEQ ID NO: 1439324 - DNA, 15 bp, Homo sapiens
gattttctactgcac

SEQ ID NO: 1439325 - DNA, 15 bp, Homo sapiens
attttctactgcact

SEQ ID NO: 1439326 - DNA, 15 bp, Homo sapiens
ttttctactgcactt

SEQ ID NO: 1439327 - DNA, 15 bp, Homo sapiens
tttctactgcacttt

SEQ ID NO: 1439328 - DNA, 15 bp, Homo sapiens
ttctactgcactttt

SEQ ID NO: 1439329 - DNA, 15 bp, Homo sapiens
tctactgcactttta

SEQ ID NO: 1439330 - DNA, 15 bp, Homo sapiens
ctactgcacttttag

SEQ ID NO: 1439331 - DNA, 15 bp, Homo sapiens
tactgcacttttagg

SEQ ID NO: 1439332 - DNA, 15 bp, Homo sapiens
actgcacttttagga

SEQ ID NO: 1439333 - DNA, 15 bp, Homo sapiens
ctgcacttttaggag

SEQ ID NO: 1439334 - DNA, 15 bp, Homo sapiens
tgcacttttaggaga

SEQ ID NO: 1439335 - DNA, 15 bp, Homo sapiens
gcacttttaggagat

SEQ ID NO: 1439336 - DNA, 15 bp, Homo sapiens
cacttttaggagatt

SEQ ID NO: 1439337 - DNA, 15 bp, Homo sapiens
acttttaggagatta

SEQ ID NO: 1439338 - DNA, 15 bp, Homo sapiens
cttttaggagattag

SEQ ID NO: 1439339 - DNA, 15 bp, Homo sapiens
ttttaggagattaga

SEQ ID NO: 1439340 - DNA, 15 bp, Homo sapiens
tttaggagattagat

SEQ ID NO: 1439341 - DNA, 15 bp, Homo sapiens
ttaggagattagatc

SEQ ID NO: 1439342 - DNA, 15 bp, Homo sapiens
taggagattagatcc

SEQ ID NO: 1439343 - DNA, 15 bp, Homo sapiens
aggagattagatcct

SEQ ID NO: 1439344 - DNA, 15 bp, Homo sapiens
ggagattagatcctg

SEQ ID NO: 1439345 - DNA, 15 bp, Homo sapiens
gagattagatcctga

SEQ ID NO: 1439346 - DNA, 15 bp, Homo sapiens
agattagatcctgag

SEQ ID NO: 1439347 - DNA, 15 bp, Homo sapiens
gattagatcctgagg

SEQ ID NO: 1439348 - DNA, 15 bp, Homo sapiens
attagatcctgagga

SEQ ID NO: 1439349 - DNA, 15 bp, Homo sapiens
ttagatcctgaggaa

SEQ ID NO: 1439350 - DNA, 15 bp, Homo sapiens
tagatcctgaggaaa

SEQ ID NO: 1439351 - DNA, 15 bp, Homo sapiens
agatcctgaggaaaa

SEQ ID NO: 1439352 - DNA, 15 bp, Homo sapiens
gatcctgaggaaaac

SEQ ID NO: 1439353 - DNA, 15 bp, Homo sapiens
atcctgaggaaaacc

SEQ ID NO: 1439354 - DNA, 15 bp, Homo sapiens
tcctgaggaaaacca

SEQ ID NO: 1439355 - DNA, 15 bp, Homo sapiens
cctgaggaaaaccat

SEQ ID NO: 1439356 - DNA, 15 bp, Homo sapiens
ctgaggaaaaccata

SEQ ID NO: 1439357 - DNA, 15 bp, Homo sapiens
tgaggaaaaccatac

SEQ ID NO: 1439358 - DNA, 15 bp, Homo sapiens
gaggaaaaccataca

SEQ ID NO: 1439359 - DNA, 15 bp, Homo sapiens
aggaaaaccatacag

SEQ ID NO: 1439360 - DNA, 15 bp, Homo sapiens
ggaaaaccatacagc

SEQ ID NO: 1439361 - DNA, 15 bp, Homo sapiens
gaaaaccatacagct

SEQ ID NO: 1439362 - DNA, 15 bp, Homo sapiens
aaaaccatacagctg

SEQ ID NO: 1439363 - DNA, 15 bp, Homo sapiens
aaaccatacagctga

SEQ ID NO: 1439364 - DNA, 15 bp, Homo sapiens
aaccatacagctgaa

SEQ ID NO: 1439365 - DNA, 15 bp, Homo sapiens
accatacagctgaat

SEQ ID NO: 1439366 - DNA, 15 bp, Homo sapiens
ccatacagctgaatt

SEQ ID NO: 1439367 - DNA, 15 bp, Homo sapiens
catacagctgaattg

SEQ ID NO: 1439368 - DNA, 15 bp, Homo sapiens
atacagctgaattgg

SEQ ID NO: 1439369 - DNA, 15 bp, Homo sapiens
tacagctgaattggt

SEQ ID NO: 1439370 - DNA, 15 bp, Homo sapiens
acagctgaattggtc

SEQ ID NO: 1439371 - DNA, 15 bp, Homo sapiens
cagctgaattggtca

SEQ ID NO: 1439372 - DNA, 15 bp, Homo sapiens
agctgaattggtcat

SEQ ID NO: 1439373 - DNA, 15 bp, Homo sapiens
gctgaattggtcatc

SEQ ID NO: 1439374 - DNA, 15 bp, Homo sapiens
ctgaattggtcatcc

SEQ ID NO: 1439375 - DNA, 15 bp, Homo sapiens
tgaattggtcatccc

SEQ ID NO: 1439376 - DNA, 15 bp, Homo sapiens
gaattggtcatccca

SEQ ID NO: 1439377 - DNA, 15 bp, Homo sapiens
aattggtcatcccag

SEQ ID NO: 1439378 - DNA, 15 bp, Homo sapiens
attggtcatcccagg

SEQ ID NO: 1439379 - DNA, 15 bp, Homo sapiens
ttggtcatcccaggt

SEQ ID NO: 1439380 - DNA, 15 bp, Homo sapiens
tggtcatcccaggta

SEQ ID NO: 1439381 - DNA, 15 bp, Homo sapiens
ggtcatcccaggtaa

SEQ ID NO: 1439382 - DNA, 15 bp, Homo sapiens
gtcatcccaggtaat

SEQ ID NO: 1439383 - DNA, 15 bp, Homo sapiens
tcatcccaggtaata

SEQ ID NO: 1439384 - DNA, 15 bp, Homo sapiens
catcccaggtaatat

SEQ ID NO: 1439385 - DNA, 15 bp, Homo sapiens
atcccaggtaatatt

SEQ ID NO: 1439386 - DNA, 15 bp, Homo sapiens
tcccaggtaatattc

SEQ ID NO: 1439387 - DNA, 15 bp, Homo sapiens
cccaggtaatattct

SEQ ID NO: 1439388 - DNA, 15 bp, Homo sapiens
ccaggtaatattctg

SEQ ID NO: 1439389 - DNA, 15 bp, Homo sapiens
caggtaatattctga

SEQ ID NO: 1439390 - DNA, 15 bp, Homo sapiens
aggtaatattctgaa

SEQ ID NO: 1439391 - DNA, 15 bp, Homo sapiens
ggtaatattctgaat

SEQ ID NO: 1439392 - DNA, 15 bp, Homo sapiens
gtaatattctgaatg

SEQ ID NO: 1439393 - DNA, 15 bp, Homo sapiens
taatattctgaatgt

SEQ ID NO: 1439394 - DNA, 15 bp, Homo sapiens
aatattctgaatgtg

SEQ ID NO: 1439395 - DNA, 15 bp, Homo sapiens
atattctgaatgtgt

SEQ ID NO: 1439396 - DNA, 15 bp, Homo sapiens
tattctgaatgtgtc

SEQ ID NO: 1439397 - DNA, 15 bp, Homo sapiens
attctgaatgtgtcc

SEQ ID NO: 1439398 - DNA, 15 bp, Homo sapiens
ttctgaatgtgtcca

SEQ ID NO: 1439399 - DNA, 15 bp, Homo sapiens
tctgaatgtgtccat

SEQ ID NO: 1439400 - DNA, 15 bp, Homo sapiens
ctgaatgtgtccatt

SEQ ID NO: 1439401 - DNA, 15 bp, Homo sapiens
tgaatgtgtccatta

SEQ ID NO: 1439402 - DNA, 15 bp, Homo sapiens
gaatgtgtccattaa

SEQ ID NO: 1439403 - DNA, 15 bp, Homo sapiens
aatgtgtccattaaa

SEQ ID NO: 1439404 - DNA, 15 bp, Homo sapiens
atgtgtccattaaaa

SEQ ID NO: 1439405 - DNA, 15 bp, Homo sapiens
tgtgtccattaaaat

SEQ ID NO: 1439406 - DNA, 15 bp, Homo sapiens
gtgtccattaaaata

SEQ ID NO: 1439407 - DNA, 15 bp, Homo sapiens
tgtccattaaaatat

SEQ ID NO: 1439408 - DNA, 15 bp, Homo sapiens
gtccattaaaatatg

SEQ ID NO: 1439409 - DNA, 15 bp, Homo sapiens
tccattaaaatatgt

SEQ ID NO: 1439410 - DNA, 15 bp, Homo sapiens
ccattaaaatatgtc

SEQ ID NO: 1439411 - DNA, 15 bp, Homo sapiens
cattaaaatatgtct

SEQ ID NO: 1439412 - DNA, 15 bp, Homo sapiens
attaaaatatgtcta

SEQ ID NO: 1439413 - DNA, 15 bp, Homo sapiens
ttaaaatatgtctaa

SEQ ID NO: 1439414 - DNA, 15 bp, Homo sapiens
taaaatatgtctaac

SEQ ID NO: 1439415 - DNA, 15 bp, Homo sapiens
aaaatatgtctaaca

SEQ ID NO: 1439416 - DNA, 15 bp, Homo sapiens
aaatatgtctaacac

SEQ ID NO: 1439417 - DNA, 15 bp, Homo sapiens
aatatgtctaacact

SEQ ID NO: 1439418 - DNA, 15 bp, Homo sapiens
atatgtctaacactg

SEQ ID NO: 1439419 - DNA, 15 bp, Homo sapiens
tatgtctaacactgt

SEQ ID NO: 1439420 - DNA, 15 bp, Homo sapiens
atgtctaacactgtc

SEQ ID NO: 1439421 - DNA, 15 bp, Homo sapiens
tgtctaacactgtcc

SEQ ID NO: 1439422 - DNA, 15 bp, Homo sapiens
gtctaacactgtccc

SEQ ID NO: 1439423 - DNA, 15 bp, Homo sapiens
tctaacactgtcccc

SEQ ID NO: 1439424 - DNA, 15 bp, Homo sapiens
ctaacactgtcccct

SEQ ID NO: 1439425 - DNA, 15 bp, Homo sapiens
taacactgtccccta

SEQ ID NO: 1439426 - DNA, 15 bp, Homo sapiens
aacactgtcccctag

SEQ ID NO: 1439427 - DNA, 15 bp, Homo sapiens
acactgtcccctagc

SEQ ID NO: 1439428 - DNA, 15 bp, Homo sapiens
cactgtcccctagca

SEQ ID NO: 1439429 - DNA, 15 bp, Homo sapiens
actgtcccctagcac

SEQ ID NO: 1439430 - DNA, 15 bp, Homo sapiens
ctgtcccctagcacc

SEQ ID NO: 1439431 - DNA, 15 bp, Homo sapiens
tgtcccctagcacct

SEQ ID NO: 1439432 - DNA, 15 bp, Homo sapiens
gtcccctagcaccta

SEQ ID NO: 1439433 - DNA, 15 bp, Homo sapiens
tcccctagcacctag

SEQ ID NO: 1439434 - DNA, 15 bp, Homo sapiens
cccctagcacctagc

SEQ ID NO: 1439435 - DNA, 15 bp, Homo sapiens
ccctagcacctagca

SEQ ID NO: 1439436 - DNA, 15 bp, Homo sapiens
cctagcacctagcat

SEQ ID NO: 1439437 - DNA, 15 bp, Homo sapiens
ctagcacctagcatg

SEQ ID NO: 1439438 - DNA, 15 bp, Homo sapiens
tagcacctagcatga

SEQ ID NO: 1439439 - DNA, 15 bp, Homo sapiens
agcacctagcatgat

SEQ ID NO: 1439440 - DNA, 15 bp, Homo sapiens
gcacctagcatgatg

SEQ ID NO: 1439441 - DNA, 15 bp, Homo sapiens
cacctagcatgatgt

SEQ ID NO: 1439442 - DNA, 15 bp, Homo sapiens
acctagcatgatgtc

SEQ ID NO: 1439443 - DNA, 15 bp, Homo sapiens
cctagcatgatgtct

SEQ ID NO: 1439444 - DNA, 15 bp, Homo sapiens
ctagcatgatgtctg

SEQ ID NO: 1439445 - DNA, 15 bp, Homo sapiens
tagcatgatgtctgc

SEQ ID NO: 1439446 - DNA, 15 bp, Homo sapiens
agcatgatgtctgcc

SEQ ID NO: 1439447 - DNA, 15 bp, Homo sapiens
gcatgatgtctgcct

SEQ ID NO: 1439448 - DNA, 15 bp, Homo sapiens
catgatgtctgccta

SEQ ID NO: 1439449 - DNA, 15 bp, Homo sapiens
atgatgtctgcctat

SEQ ID NO: 1439450 - DNA, 15 bp, Homo sapiens
tgatgtctgcctatc

SEQ ID NO: 1439451 - DNA, 15 bp, Homo sapiens
gatgtctgcctatca

SEQ ID NO: 1439452 - DNA, 15 bp, Homo sapiens
atgtctgcctatcat

SEQ ID NO: 1439453 - DNA, 15 bp, Homo sapiens
tgtctgcctatcata

SEQ ID NO: 1439454 - DNA, 15 bp, Homo sapiens
gtctgcctatcatag

SEQ ID NO: 1439455 - DNA, 15 bp, Homo sapiens
tctgcctatcatagt

SEQ ID NO: 1439456 - DNA, 15 bp, Homo sapiens
ctgcctatcatagtc

SEQ ID NO: 1439457 - DNA, 15 bp, Homo sapiens
tgcctatcatagtca

SEQ ID NO: 1439458 - DNA, 15 bp, Homo sapiens
gcctatcatagtcat

SEQ ID NO: 1439459 - DNA, 15 bp, Homo sapiens
cctatcatagtcatt

SEQ ID NO: 1439460 - DNA, 15 bp, Homo sapiens
ctatcatagtcattc

SEQ ID NO: 1439461 - DNA, 15 bp, Homo sapiens
tatcatagtcattca

SEQ ID NO: 1439462 - DNA, 15 bp, Homo sapiens
atcatagtcattcag

SEQ ID NO: 1439463 - DNA, 15 bp, Homo sapiens
tcatagtcattcagt

SEQ ID NO: 1439464 - DNA, 15 bp, Homo sapiens
catagtcattcagtg

SEQ ID NO: 1439465 - DNA, 15 bp, Homo sapiens
atagtcattcagtga

SEQ ID NO: 1439466 - DNA, 15 bp, Homo sapiens
tagtcattcagtgat

SEQ ID NO: 1439467 - DNA, 15 bp, Homo sapiens
agtcattcagtgatt

SEQ ID NO: 1439468 - DNA, 15 bp, Homo sapiens
gtcattcagtgattg

SEQ ID NO: 1439469 - DNA, 15 bp, Homo sapiens
tcattcagtgattgt

SEQ ID NO: 1439470 - DNA, 15 bp, Homo sapiens
cattcagtgattgtt

SEQ ID NO: 1439471 - DNA, 15 bp, Homo sapiens
attcagtgattgttg

SEQ ID NO: 1439472 - DNA, 15 bp, Homo sapiens
ttcagtgattgttga

SEQ ID NO: 1439473 - DNA, 15 bp, Homo sapiens
tcagtgattgttgaa

SEQ ID NO: 1439474 - DNA, 15 bp, Homo sapiens
cagtgattgttgaat

SEQ ID NO: 1439475 - DNA, 15 bp, Homo sapiens
agtgattgttgaata

SEQ ID NO: 1439476 - DNA, 15 bp, Homo sapiens
gtgattgttgaataa

SEQ ID NO: 1439477 - DNA, 15 bp, Homo sapiens
tgattgttgaataaa

SEQ ID NO: 1439478 - DNA, 15 bp, Homo sapiens
gattgttgaataaat

SEQ ID NO: 1439479 - DNA, 15 bp, Homo sapiens
attgttgaataaatg

SEQ ID NO: 1439480 - DNA, 15 bp, Homo sapiens
ttgttgaataaatga

SEQ ID NO: 1439481 - DNA, 15 bp, Homo sapiens
tgttgaataaatgaa

SEQ ID NO: 1439482 - DNA, 15 bp, Homo sapiens
gttgaataaatgaat

SEQ ID NO: 1439483 - DNA, 15 bp, Homo sapiens
ttgaataaatgaatg

SEQ ID NO: 1439484 - DNA, 15 bp, Homo sapiens
atgaatgaatgaata

SEQ ID NO: 1439485 - DNA, 15 bp, Homo sapiens
tgaatgaatgaataa

SEQ ID NO: 1439486 - DNA, 15 bp, Homo sapiens
gaatgaatgaataac

SEQ ID NO: 1439487 - DNA, 15 bp, Homo sapiens
aatgaatgaataaca

SEQ ID NO: 1439488 - DNA, 15 bp, Homo sapiens
atgaatgaataacac

SEQ ID NO: 1439489 - DNA, 15 bp, Homo sapiens
tgaatgaataacact

SEQ ID NO: 1439490 - DNA, 15 bp, Homo sapiens
gaatgaataacacta

SEQ ID NO: 1439491 - DNA, 15 bp, Homo sapiens
aatgaataacactat

SEQ ID NO: 1439492 - DNA, 15 bp, Homo sapiens
atgaataacactatg

SEQ ID NO: 1439493 - DNA, 15 bp, Homo sapiens
tgaataacactatgt

SEQ ID NO: 1439494 - DNA, 15 bp, Homo sapiens
gaataacactatgtt

SEQ ID NO: 1439495 - DNA, 15 bp, Homo sapiens
aataacactatgttt

SEQ ID NO: 1439496 - DNA, 15 bp, Homo sapiens
ataacactatgttta

SEQ ID NO: 1439497 - DNA, 15 bp, Homo sapiens
taacactatgtttac

SEQ ID NO: 1439498 - DNA, 15 bp, Homo sapiens
aacactatgtttaca

SEQ ID NO: 1439499 - DNA, 15 bp, Homo sapiens
acactatgtttacaa

SEQ ID NO: 1439500 - DNA, 15 bp, Homo sapiens
cactatgtttacaaa

SEQ ID NO: 1439501 - DNA, 15 bp, Homo sapiens
actatgtttacaaaa

SEQ ID NO: 1439502 - DNA, 15 bp, Homo sapiens
ctatgtttacaaaat

SEQ ID NO: 1439503 - DNA, 15 bp, Homo sapiens
tatgtttacaaaata

SEQ ID NO: 1439504 - DNA, 15 bp, Homo sapiens
atgtttacaaaatat

SEQ ID NO: 1439505 - DNA, 15 bp, Homo sapiens
tgtttacaaaatata

SEQ ID NO: 1439506 - DNA, 15 bp, Homo sapiens
gtttacaaaatatat

SEQ ID NO: 1439507 - DNA, 15 bp, Homo sapiens
tttacaaaatatatc

SEQ ID NO: 1439508 - DNA, 15 bp, Homo sapiens
ttacaaaatatatcc

SEQ ID NO: 1439509 - DNA, 15 bp, Homo sapiens
tacaaaatatatcct

SEQ ID NO: 1439510 - DNA, 15 bp, Homo sapiens
acaaaatatatccta

SEQ ID NO: 1439511 - DNA, 15 bp, Homo sapiens
caaaatatatcctaa

SEQ ID NO: 1439512 - DNA, 15 bp, Homo sapiens
aaaatatatcctaat

SEQ ID NO: 1439513 - DNA, 15 bp, Homo sapiens
aaatatatcctaatt

SEQ ID NO: 1439514 - DNA, 15 bp, Homo sapiens
aatatatcctaattc

SEQ ID NO: 1439515 - DNA, 15 bp, Homo sapiens
atatatcctaattcc

SEQ ID NO: 1439516 - DNA, 15 bp, Homo sapiens
tatatcctaattcct

SEQ ID NO: 1439517 - DNA, 15 bp, Homo sapiens
atatcctaattcctc

SEQ ID NO: 1439518 - DNA, 15 bp, Homo sapiens
tatcctaattcctca

SEQ ID NO: 1439519 - DNA, 15 bp, Homo sapiens
atcctaattcctcac

SEQ ID NO: 1439520 - DNA, 15 bp, Homo sapiens
tcctaattcctcacc

SEQ ID NO: 1439521 - DNA, 15 bp, Homo sapiens
cctaattcctcacct

SEQ ID NO: 1439522 - DNA, 15 bp, Homo sapiens
ctaattcctcacctc

SEQ ID NO: 1439523 - DNA, 15 bp, Homo sapiens
taattcctcacctcc

SEQ ID NO: 1439524 - DNA, 15 bp, Homo sapiens
aattcctcacctcca

SEQ ID NO: 1439525 - DNA, 15 bp, Homo sapiens
attcctcacctccat

SEQ ID NO: 1439526 - DNA, 15 bp, Homo sapiens
ttcctcacctccatt

SEQ ID NO: 1439527 - DNA, 15 bp, Homo sapiens
tcctcacctccattc

SEQ ID NO: 1439528 - DNA, 15 bp, Homo sapiens
cctcacctccattca

SEQ ID NO: 1439529 - DNA, 15 bp, Homo sapiens
ctcacctccattcat

SEQ ID NO: 1439530 - DNA, 15 bp, Homo sapiens
tcacctccattcatc

SEQ ID NO: 1439531 - DNA, 15 bp, Homo sapiens
cacctccattcatcc

SEQ ID NO: 1439532 - DNA, 15 bp, Homo sapiens
acctccattcatcca

SEQ ID NO: 1439533 - DNA, 15 bp, Homo sapiens
cctccattcatccaa

SEQ ID NO: 1439534 - DNA, 15 bp, Homo sapiens
ctccattcatccaaa

SEQ ID NO: 1439535 - DNA, 15 bp, Homo sapiens
tccattcatccaaac

SEQ ID NO: 1439536 - DNA, 15 bp, Homo sapiens
ccattcatccaaacc

SEQ ID NO: 1439537 - DNA, 15 bp, Homo sapiens
cattcatccaaacca

SEQ ID NO: 1439538 - DNA, 15 bp, Homo sapiens
attcatccaaaccat

SEQ ID NO: 1439539 - DNA, 15 bp, Homo sapiens
ttcatccaaaccata

SEQ ID NO: 1439540 - DNA, 15 bp, Homo sapiens
tcatccaaaccatat

SEQ ID NO: 1439541 - DNA, 15 bp, Homo sapiens
catccaaaccatatt

SEQ ID NO: 1439542 - DNA, 15 bp, Homo sapiens
atccaaaccatattg

SEQ ID NO: 1439543 - DNA, 15 bp, Homo sapiens
tccaaaccatattgt

SEQ ID NO: 1439544 - DNA, 15 bp, Homo sapiens
ccaaaccatattgtt

SEQ ID NO: 1439545 - DNA, 15 bp, Homo sapiens
caaaccatattgtta

SEQ ID NO: 1439546 - DNA, 15 bp, Homo sapiens
aaaccatattgttac

SEQ ID NO: 1439547 - DNA, 15 bp, Homo sapiens
aaccatattgttact

SEQ ID NO: 1439548 - DNA, 15 bp, Homo sapiens
accatattgttactt

SEQ ID NO: 1439549 - DNA, 15 bp, Homo sapiens
ccatattgttactta

SEQ ID NO: 1439550 - DNA, 15 bp, Homo sapiens
catattgttacttaa

SEQ ID NO: 1439551 - DNA, 15 bp, Homo sapiens
atattgttacttaat

SEQ ID NO: 1439552 - DNA, 15 bp, Homo sapiens
tattgttacttaata

SEQ ID NO: 1439553 - DNA, 15 bp, Homo sapiens
attgttacttaataa

SEQ ID NO: 1439554 - DNA, 15 bp, Homo sapiens
ttgttacttaataaa

SEQ ID NO: 1439555 - DNA, 15 bp, Homo sapiens
tgttacttaataaac

SEQ ID NO: 1439556 - DNA, 15 bp, Homo sapiens
gttacttaataaaca

SEQ ID NO: 1439557 - DNA, 15 bp, Homo sapiens
ttacttaataaacat

SEQ ID NO: 1439558 - DNA, 15 bp, Homo sapiens
tacttaataaacatt

SEQ ID NO: 1439559 - DNA, 15 bp, Homo sapiens
acttaataaacattc

SEQ ID NO: 1439560 - DNA, 15 bp, Homo sapiens
cttaataaacattca

SEQ ID NO: 1439561 - DNA, 15 bp, Homo sapiens
ttaataaacattcag

SEQ ID NO: 1439562 - DNA, 15 bp, Homo sapiens
taataaacattcagc

SEQ ID NO: 1439563 - DNA, 15 bp, Homo sapiens
aataaacattcagca

SEQ ID NO: 1439564 - DNA, 15 bp, Homo sapiens
ataaacattcagcag

SEQ ID NO: 1439565 - DNA, 15 bp, Homo sapiens
taaacattcagcaga

SEQ ID NO: 1439566 - DNA, 15 bp, Homo sapiens
aaacattcagcagat

SEQ ID NO: 1439567 - DNA, 15 bp, Homo sapiens
aacattcagcagata

SEQ ID NO: 1439568 - DNA, 15 bp, Homo sapiens
acattcagcagatat

SEQ ID NO: 1439569 - DNA, 15 bp, Homo sapiens
cattcagcagatatt

SEQ ID NO: 1439570 - DNA, 15 bp, Homo sapiens
attcagcagatattt

SEQ ID NO: 1439571 - DNA, 15 bp, Homo sapiens
ttcagcagatattta

SEQ ID NO: 1439572 - DNA, 15 bp, Homo sapiens
tcagcagatatttat

SEQ ID NO: 1439573 - DNA, 15 bp, Homo sapiens
cagcagatatttatg

SEQ ID NO: 1439574 - DNA, 15 bp, Homo sapiens
agcagatatttatgg

SEQ ID NO: 1439575 - DNA, 15 bp, Homo sapiens
gcagatatttatgga

SEQ ID NO: 1439576 - DNA, 15 bp, Homo sapiens
cagatatttatggaa

SEQ ID NO: 1439577 - DNA, 15 bp, Homo sapiens
agatatttatggaat

SEQ ID NO: 1439578 - DNA, 15 bp, Homo sapiens
gatatttatggaata

SEQ ID NO: 1439579 - DNA, 15 bp, Homo sapiens
atatttatggaatat

SEQ ID NO: 1439580 - DNA, 15 bp, Homo sapiens
tatttatggaatata

SEQ ID NO: 1439581 - DNA, 15 bp, Homo sapiens
atttatggaatatac

SEQ ID NO: 1439582 - DNA, 15 bp, Homo sapiens
tttatggaatatacc

SEQ ID NO: 1439583 - DNA, 15 bp, Homo sapiens
ttatggaatatacct

SEQ ID NO: 1439584 - DNA, 15 bp, Homo sapiens
tatggaatatacctt

SEQ ID NO: 1439585 - DNA, 15 bp, Homo sapiens
atggaatataccttt

SEQ ID NO: 1439586 - DNA, 15 bp, Homo sapiens
tggaatatacctttt

SEQ ID NO: 1439587 - DNA, 15 bp, Homo sapiens
ggaatataccttttg

SEQ ID NO: 1439588 - DNA, 15 bp, Homo sapiens
gaatataccttttgt

SEQ ID NO: 1439589 - DNA, 15 bp, Homo sapiens
aatataccttttgtt

SEQ ID NO: 1439590 - DNA, 15 bp, Homo sapiens
atataccttttgttc

SEQ ID NO: 1439591 - DNA, 15 bp, Homo sapiens
tataccttttgttcc

SEQ ID NO: 1439592 - DNA, 15 bp, Homo sapiens
ataccttttgttcca

SEQ ID NO: 1439593 - DNA, 15 bp, Homo sapiens
taccttttgttccat

SEQ ID NO: 1439594 - DNA, 15 bp, Homo sapiens
accttttgttccatg

SEQ ID NO: 1439595 - DNA, 15 bp, Homo sapiens
ccttttgttccatgc

SEQ ID NO: 1439596 - DNA, 15 bp, Homo sapiens
cttttgttccatgca

SEQ ID NO: 1439597 - DNA, 15 bp, Homo sapiens
ttttgttccatgcat

SEQ ID NO: 1439598 - DNA, 15 bp, Homo sapiens
tttgttccatgcatt

SEQ ID NO: 1439599 - DNA, 15 bp, Homo sapiens
ttgttccatgcattg

SEQ ID NO: 1439600 - DNA, 15 bp, Homo sapiens
tgttccatgcattgt

SEQ ID NO: 1439601 - DNA, 15 bp, Homo sapiens
gttccatgcattgta

SEQ ID NO: 1439602 - DNA, 15 bp, Homo sapiens
ttccatgcattgtag

SEQ ID NO: 1439603 - DNA, 15 bp, Homo sapiens
tccatgcattgtagt

SEQ ID NO: 1439604 - DNA, 15 bp, Homo sapiens
ccatgcattgtagta

SEQ ID NO: 1439605 - DNA, 15 bp, Homo sapiens
catgcattgtagtac

SEQ ID NO: 1439606 - DNA, 15 bp, Homo sapiens
atgcattgtagtact

SEQ ID NO: 1439607 - DNA, 15 bp, Homo sapiens
tgcattgtagtactc

SEQ ID NO: 1439608 - DNA, 15 bp, Homo sapiens
gcattgtagtactca

SEQ ID NO: 1439609 - DNA, 15 bp, Homo sapiens
cattgtagtactcat

SEQ ID NO: 1439610 - DNA, 15 bp, Homo sapiens
attgtagtactcatt

SEQ ID NO: 1439611 - DNA, 15 bp, Homo sapiens
ttgtagtactcattg

SEQ ID NO: 1439612 - DNA, 15 bp, Homo sapiens
tgtagtactcattgg

SEQ ID NO: 1439613 - DNA, 15 bp, Homo sapiens
gtagtactcattgga

SEQ ID NO: 1439614 - DNA, 15 bp, Homo sapiens
tagtactcattggat

SEQ ID NO: 1439615 - DNA, 15 bp, Homo sapiens
agtactcattggata

SEQ ID NO: 1439616 - DNA, 15 bp, Homo sapiens
gtactcattggatac

SEQ ID NO: 1439617 - DNA, 15 bp, Homo sapiens
tactcattggataca

SEQ ID NO: 1439618 - DNA, 15 bp, Homo sapiens
actcattggatacac

SEQ ID NO: 1439619 - DNA, 15 bp, Homo sapiens
ctcattggatacaca

SEQ ID NO: 1439620 - DNA, 15 bp, Homo sapiens
tcattggatacacat

SEQ ID NO: 1439621 - DNA, 15 bp, Homo sapiens
cattggatacacata

SEQ ID NO: 1439622 - DNA, 15 bp, Homo sapiens
attggatacacatag

SEQ ID NO: 1439623 - DNA, 15 bp, Homo sapiens
ttggatacacataga

SEQ ID NO: 1439624 - DNA, 15 bp, Homo sapiens
tggatacacatagaa

SEQ ID NO: 1439625 - DNA, 15 bp, Homo sapiens
ggatacacatagaat

SEQ ID NO: 1439626 - DNA, 15 bp, Homo sapiens
gatacacatagaata

SEQ ID NO: 1439627 - DNA, 15 bp, Homo sapiens
atacacatagaataa

SEQ ID NO: 1439628 - DNA, 15 bp, Homo sapiens
tacacatagaataat

SEQ ID NO: 1439629 - DNA, 15 bp, Homo sapiens
acacatagaataata

SEQ ID NO: 1439630 - DNA, 15 bp, Homo sapiens
cacatagaataataa

SEQ ID NO: 1439631 - DNA, 15 bp, Homo sapiens
acatagaataataag

SEQ ID NO: 1439632 - DNA, 15 bp, Homo sapiens
catagaataataaga

SEQ ID NO: 1439633 - DNA, 15 bp, Homo sapiens
atagaataataagac

SEQ ID NO: 1439634 - DNA, 15 bp, Homo sapiens
tagaataataagact

SEQ ID NO: 1439635 - DNA, 15 bp, Homo sapiens
agaataataagactc

SEQ ID NO: 1439636 - DNA, 15 bp, Homo sapiens
gaataataagactca

SEQ ID NO: 1439637 - DNA, 15 bp, Homo sapiens
aataataagactcag

SEQ ID NO: 1439638 - DNA, 15 bp, Homo sapiens
ataataagactcagt

SEQ ID NO: 1439639 - DNA, 15 bp, Homo sapiens
taataagactcagtt

SEQ ID NO: 1439640 - DNA, 15 bp, Homo sapiens
aataagactcagttc

SEQ ID NO: 1439641 - DNA, 15 bp, Homo sapiens
ataagactcagttca

SEQ ID NO: 1439642 - DNA, 15 bp, Homo sapiens
taagactcagttcac

SEQ ID NO: 1439643 - DNA, 15 bp, Homo sapiens
aagactcagttcaca

SEQ ID NO: 1439644 - DNA, 15 bp, Homo sapiens
agactcagttcacac

SEQ ID NO: 1439645 - DNA, 15 bp, Homo sapiens
gactcagttcacact

SEQ ID NO: 1439646 - DNA, 15 bp, Homo sapiens
actcagttcacactc

SEQ ID NO: 1439647 - DNA, 15 bp, Homo sapiens
ctcagttcacactct

SEQ ID NO: 1439648 - DNA, 15 bp, Homo sapiens
tcagttcacactctt

SEQ ID NO: 1439649 - DNA, 15 bp, Homo sapiens
cagttcacactcttc

SEQ ID NO: 1439650 - DNA, 15 bp, Homo sapiens
agttcacactcttca

SEQ ID NO: 1439651 - DNA, 15 bp, Homo sapiens
gttcacactcttcag

SEQ ID NO: 1439652 - DNA, 15 bp, Homo sapiens
ttcacactcttcagg

SEQ ID NO: 1439653 - DNA, 15 bp, Homo sapiens
tcacactcttcagga

SEQ ID NO: 1439654 - DNA, 15 bp, Homo sapiens
cacactcttcaggaa

SEQ ID NO: 1439655 - DNA, 15 bp, Homo sapiens
acactcttcaggaaa

SEQ ID NO: 1439656 - DNA, 15 bp, Homo sapiens
cactcttcaggaaac

SEQ ID NO: 1439657 - DNA, 15 bp, Homo sapiens
actcttcaggaaaca

SEQ ID NO: 1439658 - DNA, 15 bp, Homo sapiens
ctcttcaggaaacag

SEQ ID NO: 1439659 - DNA, 15 bp, Homo sapiens
tcttcaggaaacaga

SEQ ID NO: 1439660 - DNA, 15 bp, Homo sapiens
cttcaggaaacagat

SEQ ID NO: 1439661 - DNA, 15 bp, Homo sapiens
ttcaggaaacagata

SEQ ID NO: 1439662 - DNA, 15 bp, Homo sapiens
tcaggaaacagataa

SEQ ID NO: 1439663 - DNA, 15 bp, Homo sapiens
caggaaacagataaa

SEQ ID NO: 1439664 - DNA, 15 bp, Homo sapiens
aggaaacagataaaa

SEQ ID NO: 1439665 - DNA, 15 bp, Homo sapiens
ggaaacagataaaaa

SEQ ID NO: 1439666 - DNA, 15 bp, Homo sapiens
gaaacagataaaaaa

SEQ ID NO: 1439667 - DNA, 15 bp, Homo sapiens
aaacagataaaaaac

SEQ ID NO: 1439668 - DNA, 15 bp, Homo sapiens
aacagataaaaaact

SEQ ID NO: 1439669 - DNA, 15 bp, Homo sapiens
acagataaaaaacta

SEQ ID NO: 1439670 - DNA, 15 bp, Homo sapiens
cagataaaaaactaa

SEQ ID NO: 1439671 - DNA, 15 bp, Homo sapiens
agataaaaaactaag

SEQ ID NO: 1439672 - DNA, 15 bp, Homo sapiens
gataaaaaactaaga

SEQ ID NO: 1439673 - DNA, 15 bp, Homo sapiens
ataaaaaactaagaa

SEQ ID NO: 1439674 - DNA, 15 bp, Homo sapiens
taaaaaactaagaaa

SEQ ID NO: 1439675 - DNA, 15 bp, Homo sapiens
aaaaaactaagaaac

SEQ ID NO: 1439676 - DNA, 15 bp, Homo sapiens
aaaaactaagaaaca

SEQ ID NO: 1439677 - DNA, 15 bp, Homo sapiens
aaaactaagaaacaa

SEQ ID NO: 1439678 - DNA, 15 bp, Homo sapiens
aaactaagaaacaaa

SEQ ID NO: 1439679 - DNA, 15 bp, Homo sapiens
aactaagaaacaaac

SEQ ID NO: 1439680 - DNA, 15 bp, Homo sapiens
actaagaaacaaaca

SEQ ID NO: 1439681 - DNA, 15 bp, Homo sapiens
ctaagaaacaaacaa

SEQ ID NO: 1439682 - DNA, 15 bp, Homo sapiens
taagaaacaaacaaa

SEQ ID NO: 1439683 - DNA, 15 bp, Homo sapiens
aagaaacaaacaaaa

SEQ ID NO: 1439684 - DNA, 15 bp, Homo sapiens
agaaacaaacaaaaa

SEQ ID NO: 1439685 - DNA, 15 bp, Homo sapiens
aacaaacaaaaaaca

SEQ ID NO: 1439686 - DNA, 15 bp, Homo sapiens
acaaacaaaaaacag

SEQ ID NO: 1439687 - DNA, 15 bp, Homo sapiens
caaacaaaaaacagg

SEQ ID NO: 1439688 - DNA, 15 bp, Homo sapiens
aaacaaaaaacaggc

SEQ ID NO: 1439689 - DNA, 15 bp, Homo sapiens
aacaaaaaacaggca

SEQ ID NO: 1439690 - DNA, 15 bp, Homo sapiens
acaaaaaacaggcaa

SEQ ID NO: 1439691 - DNA, 15 bp, Homo sapiens
caaaaaacaggcaat

SEQ ID NO: 1439692 - DNA, 15 bp, Homo sapiens
aaaaaacaggcaatc

SEQ ID NO: 1439693 - DNA, 15 bp, Homo sapiens
aaaaacaggcaatcc

SEQ ID NO: 1439694 - DNA, 15 bp, Homo sapiens
aaaacaggcaatcca

SEQ ID NO: 1439695 - DNA, 15 bp, Homo sapiens
aaacaggcaatccaa

SEQ ID NO: 1439696 - DNA, 15 bp, Homo sapiens
aacaggcaatccaac

SEQ ID NO: 1439697 - DNA, 15 bp, Homo sapiens
acaggcaatccaaca

SEQ ID NO: 1439698 - DNA, 15 bp, Homo sapiens
caggcaatccaacac

SEQ ID NO: 1439699 - DNA, 15 bp, Homo sapiens
aggcaatccaacacc

SEQ ID NO: 1439700 - DNA, 15 bp, Homo sapiens
ggcaatccaacacca

SEQ ID NO: 1439701 - DNA, 15 bp, Homo sapiens
gcaatccaacaccat

SEQ ID NO: 1439702 - DNA, 15 bp, Homo sapiens
caatccaacaccatg

SEQ ID NO: 1439703 - DNA, 15 bp, Homo sapiens
aatccaacaccatgt

SEQ ID NO: 1439704 - DNA, 15 bp, Homo sapiens
atccaacaccatgtg

SEQ ID NO: 1439705 - DNA, 15 bp, Homo sapiens
tccaacaccatgtgg

SEQ ID NO: 1439706 - DNA, 15 bp, Homo sapiens
ccaacaccatgtggg

SEQ ID NO: 1439707 - DNA, 15 bp, Homo sapiens
caacaccatgtggga

SEQ ID NO: 1439708 - DNA, 15 bp, Homo sapiens
aacaccatgtgggaa

SEQ ID NO: 1439709 - DNA, 15 bp, Homo sapiens
acaccatgtgggaaa

SEQ ID NO: 1439710 - DNA, 15 bp, Homo sapiens
caccatgtgggaaat

SEQ ID NO: 1439711 - DNA, 15 bp, Homo sapiens
accatgtgggaaatg

SEQ ID NO: 1439712 - DNA, 15 bp, Homo sapiens
ccatgtgggaaatgc

SEQ ID NO: 1439713 - DNA, 15 bp, Homo sapiens
catgtgggaaatgct

SEQ ID NO: 1439714 - DNA, 15 bp, Homo sapiens
atgtgggaaatgctt

SEQ ID NO: 1439715 - DNA, 15 bp, Homo sapiens
tgtgggaaatgcttt

SEQ ID NO: 1439716 - DNA, 15 bp, Homo sapiens
gtgggaaatgctttc

SEQ ID NO: 1439717 - DNA, 15 bp, Homo sapiens
tgggaaatgctttca

SEQ ID NO: 1439718 - DNA, 15 bp, Homo sapiens
gggaaatgctttcat

SEQ ID NO: 1439719 - DNA, 15 bp, Homo sapiens
ggaaatgctttcata

SEQ ID NO: 1439720 - DNA, 15 bp, Homo sapiens
gaaatgctttcatag

SEQ ID NO: 1439721 - DNA, 15 bp, Homo sapiens
aaatgctttcatagc

SEQ ID NO: 1439722 - DNA, 15 bp, Homo sapiens
aatgctttcatagcc

SEQ ID NO: 1439723 - DNA, 15 bp, Homo sapiens
atgctttcatagccg

SEQ ID NO: 1439724 - DNA, 15 bp, Homo sapiens
tgctttcatagccgg

SEQ ID NO: 1439725 - DNA, 15 bp, Homo sapiens
gctttcatagccggg

SEQ ID NO: 1439726 - DNA, 15 bp, Homo sapiens
ctttcatagccggga

SEQ ID NO: 1439727 - DNA, 15 bp, Homo sapiens
tttcatagccgggaa

SEQ ID NO: 1439728 - DNA, 15 bp, Homo sapiens
ttcatagccgggaaa

SEQ ID NO: 1439729 - DNA, 15 bp, Homo sapiens
tcatagccgggaaac

SEQ ID NO: 1439730 - DNA, 15 bp, Homo sapiens
catagccgggaaacc

SEQ ID NO: 1439731 - DNA, 15 bp, Homo sapiens
atagccgggaaacct

SEQ ID NO: 1439732 - DNA, 15 bp, Homo sapiens
tagccgggaaacctg

SEQ ID NO: 1439733 - DNA, 15 bp, Homo sapiens
agccgggaaacctgg

SEQ ID NO: 1439734 - DNA, 15 bp, Homo sapiens
gccgggaaacctggg

SEQ ID NO: 1439735 - DNA, 15 bp, Homo sapiens
ccgggaaacctgggg

SEQ ID NO: 1439736 - DNA, 15 bp, Homo sapiens
cgggaaacctgggga

SEQ ID NO: 1439737 - DNA, 15 bp, Homo sapiens
gggaaacctggggaa

SEQ ID NO: 1439738 - DNA, 15 bp, Homo sapiens
ggaaacctggggaat

SEQ ID NO: 1439739 - DNA, 15 bp, Homo sapiens
gaaacctggggaata

SEQ ID NO: 1439740 - DNA, 15 bp, Homo sapiens
aaacctggggaatac

SEQ ID NO: 1439741 - DNA, 15 bp, Homo sapiens
aacctggggaatacc

SEQ ID NO: 1439742 - DNA, 15 bp, Homo sapiens
acctggggaatacct

SEQ ID NO: 1439743 - DNA, 15 bp, Homo sapiens
cctggggaatacctg

SEQ ID NO: 1439744 - DNA, 15 bp, Homo sapiens
ctggggaatacctga

SEQ ID NO: 1439745 - DNA, 15 bp, Homo sapiens
tggggaatacctgag

SEQ ID NO: 1439746 - DNA, 15 bp, Homo sapiens
ggggaatacctgaga

SEQ ID NO: 1439747 - DNA, 15 bp, Homo sapiens
gggaatacctgagag

SEQ ID NO: 1439748 - DNA, 15 bp, Homo sapiens
ggaatacctgagagg

SEQ ID NO: 1439749 - DNA, 15 bp, Homo sapiens
gaatacctgagagga

SEQ ID NO: 1439750 - DNA, 15 bp, Homo sapiens
aatacctgagaggaa

SEQ ID NO: 1439751 - DNA, 15 bp, Homo sapiens
atacctgagaggaat

SEQ ID NO: 1439752 - DNA, 15 bp, Homo sapiens
tacctgagaggaata

SEQ ID NO: 1439753 - DNA, 15 bp, Homo sapiens
acctgagaggaatac

SEQ ID NO: 1439754 - DNA, 15 bp, Homo sapiens
cctgagaggaatact

SEQ ID NO: 1439755 - DNA, 15 bp, Homo sapiens
ctgagaggaatactc

SEQ ID NO: 1439756 - DNA, 15 bp, Homo sapiens
tgagaggaatactca

SEQ ID NO: 1439757 - DNA, 15 bp, Homo sapiens
gagaggaatactcaa

SEQ ID NO: 1439758 - DNA, 15 bp, Homo sapiens
agaggaatactcaat

SEQ ID NO: 1439759 - DNA, 15 bp, Homo sapiens
gaggaatactcaatt

SEQ ID NO: 1439760 - DNA, 15 bp, Homo sapiens
aggaatactcaattc

SEQ ID NO: 1439761 - DNA, 15 bp, Homo sapiens
ggaatactcaattca

SEQ ID NO: 1439762 - DNA, 15 bp, Homo sapiens
gaatactcaattcag

SEQ ID NO: 1439763 - DNA, 15 bp, Homo sapiens
aatactcaattcagg

SEQ ID NO: 1439764 - DNA, 15 bp, Homo sapiens
atactcaattcaggc

SEQ ID NO: 1439765 - DNA, 15 bp, Homo sapiens
tactcaattcaggcc

SEQ ID NO: 1439766 - DNA, 15 bp, Homo sapiens
actcaattcaggcct

SEQ ID NO: 1439767 - DNA, 15 bp, Homo sapiens
ctcaattcaggcctt

SEQ ID NO: 1439768 - DNA, 15 bp, Homo sapiens
tcaattcaggccttg

SEQ ID NO: 1439769 - DNA, 15 bp, Homo sapiens
caattcaggccttgt

SEQ ID NO: 1439770 - DNA, 15 bp, Homo sapiens
aattcaggccttgtt

SEQ ID NO: 1439771 - DNA, 15 bp, Homo sapiens
attcaggccttgttt

SEQ ID NO: 1439772 - DNA, 15 bp, Homo sapiens
ttcaggccttgtttc

SEQ ID NO: 1439773 - DNA, 15 bp, Homo sapiens
tcaggccttgtttca

SEQ ID NO: 1439774 - DNA, 15 bp, Homo sapiens
caggccttgtttcag

SEQ ID NO: 1439775 - DNA, 15 bp, Homo sapiens
aggccttgtttcagg

SEQ ID NO: 1439776 - DNA, 15 bp, Homo sapiens
ggccttgtttcagga

SEQ ID NO: 1439777 - DNA, 15 bp, Homo sapiens
gccttgtttcaggaa

SEQ ID NO: 1439778 - DNA, 15 bp, Homo sapiens
ccttgtttcaggaat

SEQ ID NO: 1439779 - DNA, 15 bp, Homo sapiens
cttgtttcaggaatc

SEQ ID NO: 1439780 - DNA, 15 bp, Homo sapiens
ttgtttcaggaatcc

SEQ ID NO: 1439781 - DNA, 15 bp, Homo sapiens
tgtttcaggaatcca

SEQ ID NO: 1439782 - DNA, 15 bp, Homo sapiens
gtttcaggaatccaa

SEQ ID NO: 1439783 - DNA, 15 bp, Homo sapiens
tttcaggaatccaaa

SEQ ID NO: 1439784 - DNA, 15 bp, Homo sapiens
ttcaggaatccaaat

SEQ ID NO: 1439785 - DNA, 15 bp, Homo sapiens
tcaggaatccaaatc

SEQ ID NO: 1439786 - DNA, 15 bp, Homo sapiens
caggaatccaaatcc

SEQ ID NO: 1439787 - DNA, 15 bp, Homo sapiens
aggaatccaaatcct

SEQ ID NO: 1439788 - DNA, 15 bp, Homo sapiens
ggaatccaaatcctg

SEQ ID NO: 1439789 - DNA, 15 bp, Homo sapiens
gaatccaaatcctgg

SEQ ID NO: 1439790 - DNA, 15 bp, Homo sapiens
aatccaaatcctggc

SEQ ID NO: 1439791 - DNA, 15 bp, Homo sapiens
atccaaatcctggca

SEQ ID NO: 1439792 - DNA, 15 bp, Homo sapiens
tccaaatcctggcac

SEQ ID NO: 1439793 - DNA, 15 bp, Homo sapiens
ccaaatcctggcaca

SEQ ID NO: 1439794 - DNA, 15 bp, Homo sapiens
caaatcctggcacat

SEQ ID NO: 1439795 - DNA, 15 bp, Homo sapiens
aaatcctggcacatc

SEQ ID NO: 1439796 - DNA, 15 bp, Homo sapiens
aatcctggcacatca

SEQ ID NO: 1439797 - DNA, 15 bp, Homo sapiens
atcctggcacatcag

SEQ ID NO: 1439798 - DNA, 15 bp, Homo sapiens
tcctggcacatcaga

SEQ ID NO: 1439799 - DNA, 15 bp, Homo sapiens
cctggcacatcagag

SEQ ID NO: 1439800 - DNA, 15 bp, Homo sapiens
ctggcacatcagagc

SEQ ID NO: 1439801 - DNA, 15 bp, Homo sapiens
tggcacatcagagct

SEQ ID NO: 1439802 - DNA, 15 bp, Homo sapiens
ggcacatcagagctg

SEQ ID NO: 1439803 - DNA, 15 bp, Homo sapiens
gcacatcagagctgc

SEQ ID NO: 1439804 - DNA, 15 bp, Homo sapiens
cacatcagagctgct

SEQ ID NO: 1439805 - DNA, 15 bp, Homo sapiens
acatcagagctgctt

SEQ ID NO: 1439806 - DNA, 15 bp, Homo sapiens
catcagagctgcttc

SEQ ID NO: 1439807 - DNA, 15 bp, Homo sapiens
atcagagctgcttcc

SEQ ID NO: 1439808 - DNA, 15 bp, Homo sapiens
tcagagctgcttccc

SEQ ID NO: 1439809 - DNA, 15 bp, Homo sapiens
cagagctgcttccct

SEQ ID NO: 1439810 - DNA, 15 bp, Homo sapiens
agagctgcttccctc

SEQ ID NO: 1439811 - DNA, 15 bp, Homo sapiens
gagctgcttccctct

SEQ ID NO: 1439812 - DNA, 15 bp, Homo sapiens
agctgcttccctctt

SEQ ID NO: 1439813 - DNA, 15 bp, Homo sapiens
gctgcttccctcttt

SEQ ID NO: 1439814 - DNA, 15 bp, Homo sapiens
ctgcttccctctttc

SEQ ID NO: 1439815 - DNA, 15 bp, Homo sapiens
tgcttccctctttcc

SEQ ID NO: 1439816 - DNA, 15 bp, Homo sapiens
gcttccctctttcca

SEQ ID NO: 1439817 - DNA, 15 bp, Homo sapiens
cttccctctttccag

SEQ ID NO: 1439818 - DNA, 15 bp, Homo sapiens
ttccctctttccagg

SEQ ID NO: 1439819 - DNA, 15 bp, Homo sapiens
tccctctttccaggg

SEQ ID NO: 1439820 - DNA, 15 bp, Homo sapiens
ccctctttccagggt

SEQ ID NO: 1439821 - DNA, 15 bp, Homo sapiens
cctctttccagggtg

SEQ ID NO: 1439822 - DNA, 15 bp, Homo sapiens
ctctttccagggtgg

SEQ ID NO: 1439823 - DNA, 15 bp, Homo sapiens
tctttccagggtggc

SEQ ID NO: 1439824 - DNA, 15 bp, Homo sapiens
ctttccagggtggca

SEQ ID NO: 1439825 - DNA, 15 bp, Homo sapiens
tttccagggtggcag

SEQ ID NO: 1439826 - DNA, 15 bp, Homo sapiens
ttccagggtggcagg

SEQ ID NO: 1439827 - DNA, 15 bp, Homo sapiens
tccagggtggcagga

SEQ ID NO: 1439828 - DNA, 15 bp, Homo sapiens
ccagggtggcaggaa

SEQ ID NO: 1439829 - DNA, 15 bp, Homo sapiens
cagggtggcaggaaa

SEQ ID NO: 1439830 - DNA, 15 bp, Homo sapiens
agggtggcaggaaat

SEQ ID NO: 1439831 - DNA, 15 bp, Homo sapiens
gggtggcaggaaata

SEQ ID NO: 1439832 - DNA, 15 bp, Homo sapiens
ggtggcaggaaataa

SEQ ID NO: 1439833 - DNA, 15 bp, Homo sapiens
gtggcaggaaataaa

SEQ ID NO: 1439834 - DNA, 15 bp, Homo sapiens
tggcaggaaataaat

SEQ ID NO: 1439835 - DNA, 15 bp, Homo sapiens
ggcaggaaataaatg

SEQ ID NO: 1439836 - DNA, 15 bp, Homo sapiens
gcaggaaataaatgg

SEQ ID NO: 1439837 - DNA, 15 bp, Homo sapiens
caggaaataaatgga

SEQ ID NO: 1439838 - DNA, 15 bp, Homo sapiens
aggaaataaatggaa

SEQ ID NO: 1439839 - DNA, 15 bp, Homo sapiens
ggaaataaatggaac

SEQ ID NO: 1439840 - DNA, 15 bp, Homo sapiens
gaaataaatggaaca

SEQ ID NO: 1439841 - DNA, 15 bp, Homo sapiens
aaataaatggaacat

SEQ ID NO: 1439842 - DNA, 15 bp, Homo sapiens
aataaatggaacata

SEQ ID NO: 1439843 - DNA, 15 bp, Homo sapiens
ataaatggaacatat

SEQ ID NO: 1439844 - DNA, 15 bp, Homo sapiens
taaatggaacatatt

SEQ ID NO: 1439845 - DNA, 15 bp, Homo sapiens
aaatggaacatattt

SEQ ID NO: 1439846 - DNA, 15 bp, Homo sapiens
aatggaacatatttt

SEQ ID NO: 1439847 - DNA, 15 bp, Homo sapiens
atggaacatattttt

SEQ ID NO: 1439848 - DNA, 15 bp, Homo sapiens
tggaacatatttttc

SEQ ID NO: 1439849 - DNA, 15 bp, Homo sapiens
ggaacatatttttct

SEQ ID NO: 1439850 - DNA, 15 bp, Homo sapiens
gaacatatttttcta

SEQ ID NO: 1439851 - DNA, 15 bp, Homo sapiens
aacatatttttctat

SEQ ID NO: 1439852 - DNA, 15 bp, Homo sapiens
acatatttttctatc

SEQ ID NO: 1439853 - DNA, 15 bp, Homo sapiens
catatttttctatct

SEQ ID NO: 1439854 - DNA, 15 bp, Homo sapiens
atatttttctatctt

SEQ ID NO: 1439855 - DNA, 15 bp, Homo sapiens
tatttttctatctta

SEQ ID NO: 1439856 - DNA, 15 bp, Homo sapiens
atttttctatcttat

SEQ ID NO: 1439857 - DNA, 15 bp, Homo sapiens
tttttctatcttatg

SEQ ID NO: 1439858 - DNA, 15 bp, Homo sapiens
ttttctatcttatgc

SEQ ID NO: 1439859 - DNA, 15 bp, Homo sapiens
tttctatcttatgcc

SEQ ID NO: 1439860 - DNA, 15 bp, Homo sapiens
ttctatcttatgcca

SEQ ID NO: 1439861 - DNA, 15 bp, Homo sapiens
tctatcttatgccaa

SEQ ID NO: 1439862 - DNA, 15 bp, Homo sapiens
ctatcttatgccaaa

SEQ ID NO: 1439863 - DNA, 15 bp, Homo sapiens
tatcttatgccaaac

SEQ ID NO: 1439864 - DNA, 15 bp, Homo sapiens
atcttatgccaaaca

SEQ ID NO: 1439865 - DNA, 15 bp, Homo sapiens
tcttatgccaaacat

SEQ ID NO: 1439866 - DNA, 15 bp, Homo sapiens
cttatgccaaacatg

SEQ ID NO: 1439867 - DNA, 15 bp, Homo sapiens
ttatgccaaacatga

SEQ ID NO: 1439868 - DNA, 15 bp, Homo sapiens
tatgccaaacatgag

SEQ ID NO: 1439869 - DNA, 15 bp, Homo sapiens
atgccaaacatgagg

SEQ ID NO: 1439870 - DNA, 15 bp, Homo sapiens
tgccaaacatgaggg

SEQ ID NO: 1439871 - DNA, 15 bp, Homo sapiens
gccaaacatgaggga

SEQ ID NO: 1439872 - DNA, 15 bp, Homo sapiens
ccaaacatgagggac

SEQ ID NO: 1439873 - DNA, 15 bp, Homo sapiens
caaacatgagggacc

SEQ ID NO: 1439874 - DNA, 15 bp, Homo sapiens
aaacatgagggaccc

SEQ ID NO: 1439875 - DNA, 15 bp, Homo sapiens
aacatgagggaccct

SEQ ID NO: 1439876 - DNA, 15 bp, Homo sapiens
acatgagggaccctt

SEQ ID NO: 1439877 - DNA, 15 bp, Homo sapiens
catgagggacccttt

SEQ ID NO: 1439878 - DNA, 15 bp, Homo sapiens
atgagggaccctttc

SEQ ID NO: 1439879 - DNA, 15 bp, Homo sapiens
tgagggaccctttct

SEQ ID NO: 1439880 - DNA, 15 bp, Homo sapiens
gagggaccctttctc

SEQ ID NO: 1439881 - DNA, 15 bp, Homo sapiens
agggaccctttctcc

SEQ ID NO: 1439882 - DNA, 15 bp, Homo sapiens
gggaccctttctccc

SEQ ID NO: 1439883 - DNA, 15 bp, Homo sapiens
ggaccctttctcccc

SEQ ID NO: 1439884 - DNA, 15 bp, Homo sapiens
gaccctttctccccg

SEQ ID NO: 1439885 - DNA, 15 bp, Homo sapiens
accctttctccccgg

SEQ ID NO: 1439886 - DNA, 15 bp, Homo sapiens
ccctttctccccggt

SEQ ID NO: 1439887 - DNA, 15 bp, Homo sapiens
cctttctccccggtg

SEQ ID NO: 1439888 - DNA, 15 bp, Homo sapiens
ctttctccccggtgc

SEQ ID NO: 1439889 - DNA, 15 bp, Homo sapiens
tttctccccggtgcc

SEQ ID NO: 1439890 - DNA, 15 bp, Homo sapiens
ttctccccggtgcct

SEQ ID NO: 1439891 - DNA, 15 bp, Homo sapiens
tctccccggtgcctc

SEQ ID NO: 1439892 - DNA, 15 bp, Homo sapiens
ctccccggtgcctct

SEQ ID NO: 1439893 - DNA, 15 bp, Homo sapiens
tccccggtgcctctc

SEQ ID NO: 1439894 - DNA, 15 bp, Homo sapiens
ccccggtgcctctcc

SEQ ID NO: 1439895 - DNA, 15 bp, Homo sapiens
cccggtgcctctccc

SEQ ID NO: 1439896 - DNA, 15 bp, Homo sapiens
ccggtgcctctccca

SEQ ID NO: 1439897 - DNA, 15 bp, Homo sapiens
cggtgcctctcccaa

SEQ ID NO: 1439898 - DNA, 15 bp, Homo sapiens
ggtgcctctcccaag

SEQ ID NO: 1439899 - DNA, 15 bp, Homo sapiens
gtgcctctcccaagg

SEQ ID NO: 1439900 - DNA, 15 bp, Homo sapiens
tgcctctcccaaggt

SEQ ID NO: 1439901 - DNA, 15 bp, Homo sapiens
gcctctcccaaggta

SEQ ID NO: 1439902 - DNA, 15 bp, Homo sapiens
cctctcccaaggtag

SEQ ID NO: 1439903 - DNA, 15 bp, Homo sapiens
ctctcccaaggtagt

SEQ ID NO: 1439904 - DNA, 15 bp, Homo sapiens
tctcccaaggtagtc

SEQ ID NO: 1439905 - DNA, 15 bp, Homo sapiens
ctcccaaggtagtct

SEQ ID NO: 1439906 - DNA, 15 bp, Homo sapiens
tcccaaggtagtcta

SEQ ID NO: 1439907 - DNA, 15 bp, Homo sapiens
cccaaggtagtctac

SEQ ID NO: 1439908 - DNA, 15 bp, Homo sapiens
ccaaggtagtctaca

SEQ ID NO: 1439909 - DNA, 15 bp, Homo sapiens
caaggtagtctacaa

SEQ ID NO: 1439910 - DNA, 15 bp, Homo sapiens
aaggtagtctacaat

SEQ ID NO: 1439911 - DNA, 15 bp, Homo sapiens
aggtagtctacaata

SEQ ID NO: 1439912 - DNA, 15 bp, Homo sapiens
ggtagtctacaatat

SEQ ID NO: 1439913 - DNA, 15 bp, Homo sapiens
gtagtctacaatatt

SEQ ID NO: 1439914 - DNA, 15 bp, Homo sapiens
tagtctacaatattt

SEQ ID NO: 1439915 - DNA, 15 bp, Homo sapiens
agtctacaatatttc

SEQ ID NO: 1439916 - DNA, 15 bp, Homo sapiens
gtctacaatatttca

SEQ ID NO: 1439917 - DNA, 15 bp, Homo sapiens
tctacaatatttcaa

SEQ ID NO: 1439918 - DNA, 15 bp, Homo sapiens
ctacaatatttcaac

SEQ ID NO: 1439919 - DNA, 15 bp, Homo sapiens
tacaatatttcaact

SEQ ID NO: 1439920 - DNA, 15 bp, Homo sapiens
acaatatttcaactc

SEQ ID NO: 1439921 - DNA, 15 bp, Homo sapiens
caatatttcaactct

SEQ ID NO: 1439922 - DNA, 15 bp, Homo sapiens
aatatttcaactcta

SEQ ID NO: 1439923 - DNA, 15 bp, Homo sapiens
atatttcaactctag

SEQ ID NO: 1439924 - DNA, 15 bp, Homo sapiens
tatttcaactctagc

SEQ ID NO: 1439925 - DNA, 15 bp, Homo sapiens
atttcaactctagca

SEQ ID NO: 1439926 - DNA, 15 bp, Homo sapiens
tttcaactctagcag

SEQ ID NO: 1439927 - DNA, 15 bp, Homo sapiens
ttcaactctagcagt

SEQ ID NO: 1439928 - DNA, 15 bp, Homo sapiens
tcaactctagcagtc

SEQ ID NO: 1439929 - DNA, 15 bp, Homo sapiens
caactctagcagtct

SEQ ID NO: 1439930 - DNA, 15 bp, Homo sapiens
aactctagcagtctg

SEQ ID NO: 1439931 - DNA, 15 bp, Homo sapiens
actctagcagtctgc

SEQ ID NO: 1439932 - DNA, 15 bp, Homo sapiens
ctctagcagtctgct

SEQ ID NO: 1439933 - DNA, 15 bp, Homo sapiens
tctagcagtctgctt

SEQ ID NO: 1439934 - DNA, 15 bp, Homo sapiens
ctagcagtctgctta

SEQ ID NO: 1439935 - DNA, 15 bp, Homo sapiens
tagcagtctgcttag

SEQ ID NO: 1439936 - DNA, 15 bp, Homo sapiens
agcagtctgcttagt

SEQ ID NO: 1439937 - DNA, 15 bp, Homo sapiens
gcagtctgcttagtg

SEQ ID NO: 1439938 - DNA, 15 bp, Homo sapiens
cagtctgcttagtgc

SEQ ID NO: 1439939 - DNA, 15 bp, Homo sapiens
agtctgcttagtgca

SEQ ID NO: 1439940 - DNA, 15 bp, Homo sapiens
gtctgcttagtgcat

SEQ ID NO: 1439941 - DNA, 15 bp, Homo sapiens
tctgcttagtgcata

SEQ ID NO: 1439942 - DNA, 15 bp, Homo sapiens
ctgcttagtgcatag

SEQ ID NO: 1439943 - DNA, 15 bp, Homo sapiens
tgcttagtgcataga

SEQ ID NO: 1439944 - DNA, 15 bp, Homo sapiens
gcttagtgcatagaa

SEQ ID NO: 1439945 - DNA, 15 bp, Homo sapiens
cttagtgcatagaac

SEQ ID NO: 1439946 - DNA, 15 bp, Homo sapiens
ttagtgcatagaaca

SEQ ID NO: 1439947 - DNA, 15 bp, Homo sapiens
tagtgcatagaacat

SEQ ID NO: 1439948 - DNA, 15 bp, Homo sapiens
agtgcatagaacatg

SEQ ID NO: 1439949 - DNA, 15 bp, Homo sapiens
gtgcatagaacatga

SEQ ID NO: 1439950 - DNA, 15 bp, Homo sapiens
tgcatagaacatgag

SEQ ID NO: 1439951 - DNA, 15 bp, Homo sapiens
gcatagaacatgagg

SEQ ID NO: 1439952 - DNA, 15 bp, Homo sapiens
catagaacatgaggc

SEQ ID NO: 1439953 - DNA, 15 bp, Homo sapiens
atagaacatgaggct

SEQ ID NO: 1439954 - DNA, 15 bp, Homo sapiens
tagaacatgaggctg

SEQ ID NO: 1439955 - DNA, 15 bp, Homo sapiens
agaacatgaggctgt

SEQ ID NO: 1439956 - DNA, 15 bp, Homo sapiens
gaacatgaggctgtg

SEQ ID NO: 1439957 - DNA, 15 bp, Homo sapiens
aacatgaggctgtgt

SEQ ID NO: 1439958 - DNA, 15 bp, Homo sapiens
acatgaggctgtgtg

SEQ ID NO: 1439959 - DNA, 15 bp, Homo sapiens
catgaggctgtgtgt

SEQ ID NO: 1439960 - DNA, 15 bp, Homo sapiens
atgaggctgtgtgtc

SEQ ID NO: 1439961 - DNA, 15 bp, Homo sapiens
tgaggctgtgtgtcc

SEQ ID NO: 1439962 - DNA, 15 bp, Homo sapiens
gaggctgtgtgtccc

SEQ ID NO: 1439963 - DNA, 15 bp, Homo sapiens
aggctgtgtgtccct

SEQ ID NO: 1439964 - DNA, 15 bp, Homo sapiens
ggctgtgtgtccctg

SEQ ID NO: 1439965 - DNA, 15 bp, Homo sapiens
gctgtgtgtccctgg

SEQ ID NO: 1439966 - DNA, 15 bp, Homo sapiens
ctgtgtgtccctggg

SEQ ID NO: 1439967 - DNA, 15 bp, Homo sapiens
tgtgtgtccctgggc

SEQ ID NO: 1439968 - DNA, 15 bp, Homo sapiens
gtgtgtccctgggca

SEQ ID NO: 1439969 - DNA, 15 bp, Homo sapiens
tgtgtccctgggcaa

SEQ ID NO: 1439970 - DNA, 15 bp, Homo sapiens
gtgtccctgggcaaa

SEQ ID NO: 1439971 - DNA, 15 bp, Homo sapiens
tgtccctgggcaaat

SEQ ID NO: 1439972 - DNA, 15 bp, Homo sapiens
gtccctgggcaaatt

SEQ ID NO: 1439973 - DNA, 15 bp, Homo sapiens
tccctgggcaaatta

SEQ ID NO: 1439974 - DNA, 15 bp, Homo sapiens
ccctgggcaaattac

SEQ ID NO: 1439975 - DNA, 15 bp, Homo sapiens
cctgggcaaattact

SEQ ID NO: 1439976 - DNA, 15 bp, Homo sapiens
ctgggcaaattacta

SEQ ID NO: 1439977 - DNA, 15 bp, Homo sapiens
tgggcaaattactag

SEQ ID NO: 1439978 - DNA, 15 bp, Homo sapiens
gggcaaattactaga

SEQ ID NO: 1439979 - DNA, 15 bp, Homo sapiens
ggcaaattactagac

SEQ ID NO: 1439980 - DNA, 15 bp, Homo sapiens
gcaaattactagact

SEQ ID NO: 1439981 - DNA, 15 bp, Homo sapiens
caaattactagactt

SEQ ID NO: 1439982 - DNA, 15 bp, Homo sapiens
aaattactagacttc

SEQ ID NO: 1439983 - DNA, 15 bp, Homo sapiens
aattactagacttct

SEQ ID NO: 1439984 - DNA, 15 bp, Homo sapiens
attactagacttctg

SEQ ID NO: 1439985 - DNA, 15 bp, Homo sapiens
ttactagacttctgt

SEQ ID NO: 1439986 - DNA, 15 bp, Homo sapiens
tactagacttctgtg

SEQ ID NO: 1439987 - DNA, 15 bp, Homo sapiens
actagacttctgtgt

SEQ ID NO: 1439988 - DNA, 15 bp, Homo sapiens
ctagacttctgtgtg

SEQ ID NO: 1439989 - DNA, 15 bp, Homo sapiens
tagacttctgtgtgc

SEQ ID NO: 1439990 - DNA, 15 bp, Homo sapiens
agacttctgtgtgct

SEQ ID NO: 1439991 - DNA, 15 bp, Homo sapiens
gacttctgtgtgctt

SEQ ID NO: 1439992 - DNA, 15 bp, Homo sapiens
acttctgtgtgcttc

SEQ ID NO: 1439993 - DNA, 15 bp, Homo sapiens
cttctgtgtgcttca

SEQ ID NO: 1439994 - DNA, 15 bp, Homo sapiens
ttctgtgtgcttcac

SEQ ID NO: 1439995 - DNA, 15 bp, Homo sapiens
tctgtgtgcttcact

SEQ ID NO: 1439996 - DNA, 15 bp, Homo sapiens
ctgtgtgcttcactt

SEQ ID NO: 1439997 - DNA, 15 bp, Homo sapiens
tgtgtgcttcacttt

SEQ ID NO: 1439998 - DNA, 15 bp, Homo sapiens
gtgtgcttcactttc

SEQ ID NO: 1439999 - DNA, 15 bp, Homo sapiens
tgtgcttcactttcc

SEQ ID NO: 1440000 - DNA, 15 bp, Homo sapiens
gtgcttcactttccc

SEQ ID NO: 1440001 - DNA, 15 bp, Homo sapiens
tgcttcactttccct

SEQ ID NO: 1440002 - DNA, 15 bp, Homo sapiens
gcttcactttccctg

SEQ ID NO: 1440003 - DNA, 15 bp, Homo sapiens
cttcactttccctgt

SEQ ID NO: 1440004 - DNA, 15 bp, Homo sapiens
ttcactttccctgta

SEQ ID NO: 1440005 - DNA, 15 bp, Homo sapiens
tcactttccctgtag

SEQ ID NO: 1440006 - DNA, 15 bp, Homo sapiens
cactttccctgtagg

SEQ ID NO: 1440007 - DNA, 15 bp, Homo sapiens
actttccctgtagga

SEQ ID NO: 1440008 - DNA, 15 bp, Homo sapiens
ctttccctgtaggat

SEQ ID NO: 1440009 - DNA, 15 bp, Homo sapiens
tttccctgtaggatt

SEQ ID NO: 1440010 - DNA, 15 bp, Homo sapiens
ttccctgtaggatta

SEQ ID NO: 1440011 - DNA, 15 bp, Homo sapiens
tccctgtaggattat

SEQ ID NO: 1440012 - DNA, 15 bp, Homo sapiens
ccctgtaggattata

SEQ ID NO: 1440013 - DNA, 15 bp, Homo sapiens
cctgtaggattataa

SEQ ID NO: 1440014 - DNA, 15 bp, Homo sapiens
ctgtaggattataat

SEQ ID NO: 1440015 - DNA, 15 bp, Homo sapiens
tgtaggattataatc

SEQ ID NO: 1440016 - DNA, 15 bp, Homo sapiens
gtaggattataatct

SEQ ID NO: 1440017 - DNA, 15 bp, Homo sapiens
taggattataatcta

SEQ ID NO: 1440018 - DNA, 15 bp, Homo sapiens
aggattataatctac

SEQ ID NO: 1440019 - DNA, 15 bp, Homo sapiens
ggattataatctact

SEQ ID NO: 1440020 - DNA, 15 bp, Homo sapiens
gattataatctactg

SEQ ID NO: 1440021 - DNA, 15 bp, Homo sapiens
attataatctactga

SEQ ID NO: 1440022 - DNA, 15 bp, Homo sapiens
ttataatctactgag

SEQ ID NO: 1440023 - DNA, 15 bp, Homo sapiens
tataatctactgagc

SEQ ID NO: 1440024 - DNA, 15 bp, Homo sapiens
ataatctactgagca

SEQ ID NO: 1440025 - DNA, 15 bp, Homo sapiens
taatctactgagcaa

SEQ ID NO: 1440026 - DNA, 15 bp, Homo sapiens
aatctactgagcaag

SEQ ID NO: 1440027 - DNA, 15 bp, Homo sapiens
atctactgagcaagc

SEQ ID NO: 1440028 - DNA, 15 bp, Homo sapiens
tctactgagcaagct

SEQ ID NO: 1440029 - DNA, 15 bp, Homo sapiens
ctactgagcaagctt

SEQ ID NO: 1440030 - DNA, 15 bp, Homo sapiens
tactgagcaagctta

SEQ ID NO: 1440031 - DNA, 15 bp, Homo sapiens
actgagcaagcttat

SEQ ID NO: 1440032 - DNA, 15 bp, Homo sapiens
ctgagcaagcttatt

SEQ ID NO: 1440033 - DNA, 15 bp, Homo sapiens
tgagcaagcttattg

SEQ ID NO: 1440034 - DNA, 15 bp, Homo sapiens
gagcaagcttattgt

SEQ ID NO: 1440035 - DNA, 15 bp, Homo sapiens
agcaagcttattgta

SEQ ID NO: 1440036 - DNA, 15 bp, Homo sapiens
gcaagcttattgtaa

SEQ ID NO: 1440037 - DNA, 15 bp, Homo sapiens
caagcttattgtaag

SEQ ID NO: 1440038 - DNA, 15 bp, Homo sapiens
aagcttattgtaagg

SEQ ID NO: 1440039 - DNA, 15 bp, Homo sapiens
agcttattgtaaggg

SEQ ID NO: 1440040 - DNA, 15 bp, Homo sapiens
gcttattgtaagggt

SEQ ID NO: 1440041 - DNA, 15 bp, Homo sapiens
cttattgtaagggtc

SEQ ID NO: 1440042 - DNA, 15 bp, Homo sapiens
ttattgtaagggtca

SEQ ID NO: 1440043 - DNA, 15 bp, Homo sapiens
tattgtaagggtcag

SEQ ID NO: 1440044 - DNA, 15 bp, Homo sapiens
attgtaagggtcaga

SEQ ID NO: 1440045 - DNA, 15 bp, Homo sapiens
ttgtaagggtcagat

SEQ ID NO: 1440046 - DNA, 15 bp, Homo sapiens
tgtaagggtcagatt

SEQ ID NO: 1440047 - DNA, 15 bp, Homo sapiens
gtaagggtcagatta

SEQ ID NO: 1440048 - DNA, 15 bp, Homo sapiens
taagggtcagattag

SEQ ID NO: 1440049 - DNA, 15 bp, Homo sapiens
aagggtcagattagc

SEQ ID NO: 1440050 - DNA, 15 bp, Homo sapiens
agggtcagattagca

SEQ ID NO: 1440051 - DNA, 15 bp, Homo sapiens
gggtcagattagcaa

SEQ ID NO: 1440052 - DNA, 15 bp, Homo sapiens
ggtcagattagcaac

SEQ ID NO: 1440053 - DNA, 15 bp, Homo sapiens
gtcagattagcaaca

SEQ ID NO: 1440054 - DNA, 15 bp, Homo sapiens
tcagattagcaacag

SEQ ID NO: 1440055 - DNA, 15 bp, Homo sapiens
cagattagcaacagt

SEQ ID NO: 1440056 - DNA, 15 bp, Homo sapiens
agattagcaacagtg

SEQ ID NO: 1440057 - DNA, 15 bp, Homo sapiens
gattagcaacagtgt

SEQ ID NO: 1440058 - DNA, 15 bp, Homo sapiens
attagcaacagtgta

SEQ ID NO: 1440059 - DNA, 15 bp, Homo sapiens
ttagcaacagtgtat

SEQ ID NO: 1440060 - DNA, 15 bp, Homo sapiens
tagcaacagtgtatg

SEQ ID NO: 1440061 - DNA, 15 bp, Homo sapiens
agcaacagtgtatga

SEQ ID NO: 1440062 - DNA, 15 bp, Homo sapiens
gcaacagtgtatgaa

SEQ ID NO: 1440063 - DNA, 15 bp, Homo sapiens
caacagtgtatgaaa

SEQ ID NO: 1440064 - DNA, 15 bp, Homo sapiens
aacagtgtatgaaaa

SEQ ID NO: 1440065 - DNA, 15 bp, Homo sapiens
acagtgtatgaaaat

SEQ ID NO: 1440066 - DNA, 15 bp, Homo sapiens
cagtgtatgaaaatg

SEQ ID NO: 1440067 - DNA, 15 bp, Homo sapiens
agtgtatgaaaatga

SEQ ID NO: 1440068 - DNA, 15 bp, Homo sapiens
gtgtatgaaaatgat

SEQ ID NO: 1440069 - DNA, 15 bp, Homo sapiens
tgtatgaaaatgatt

SEQ ID NO: 1440070 - DNA, 15 bp, Homo sapiens
gtatgaaaatgattt

SEQ ID NO: 1440071 - DNA, 15 bp, Homo sapiens
tatgaaaatgatttg

SEQ ID NO: 1440072 - DNA, 15 bp, Homo sapiens
atgaaaatgatttga

SEQ ID NO: 1440073 - DNA, 15 bp, Homo sapiens
tgaaaatgatttgag

SEQ ID NO: 1440074 - DNA, 15 bp, Homo sapiens
gaaaatgatttgaga

SEQ ID NO: 1440075 - DNA, 15 bp, Homo sapiens
aaaatgatttgagac

SEQ ID NO: 1440076 - DNA, 15 bp, Homo sapiens
aaatgatttgagacc

SEQ ID NO: 1440077 - DNA, 15 bp, Homo sapiens
aatgatttgagacca

SEQ ID NO: 1440078 - DNA, 15 bp, Homo sapiens
atgatttgagaccat

SEQ ID NO: 1440079 - DNA, 15 bp, Homo sapiens
tgatttgagaccatt

SEQ ID NO: 1440080 - DNA, 15 bp, Homo sapiens
gatttgagaccattg

SEQ ID NO: 1440081 - DNA, 15 bp, Homo sapiens
atttgagaccattgc

SEQ ID NO: 1440082 - DNA, 15 bp, Homo sapiens
tttgagaccattgcc

SEQ ID NO: 1440083 - DNA, 15 bp, Homo sapiens
ttgagaccattgcct

SEQ ID NO: 1440084 - DNA, 15 bp, Homo sapiens
tgagaccattgcctg

SEQ ID NO: 1440085 - DNA, 15 bp, Homo sapiens
gagaccattgcctgc

SEQ ID NO: 1440086 - DNA, 15 bp, Homo sapiens
agaccattgcctgca

SEQ ID NO: 1440087 - DNA, 15 bp, Homo sapiens
gaccattgcctgcac

SEQ ID NO: 1440088 - DNA, 15 bp, Homo sapiens
accattgcctgcaca

SEQ ID NO: 1440089 - DNA, 15 bp, Homo sapiens
ccattgcctgcacaa

SEQ ID NO: 1440090 - DNA, 15 bp, Homo sapiens
cattgcctgcacaaa

SEQ ID NO: 1440091 - DNA, 15 bp, Homo sapiens
attgcctgcacaaat

SEQ ID NO: 1440092 - DNA, 15 bp, Homo sapiens
ttgcctgcacaaatt

SEQ ID NO: 1440093 - DNA, 15 bp, Homo sapiens
tgcctgcacaaattc

SEQ ID NO: 1440094 - DNA, 15 bp, Homo sapiens
gcctgcacaaattca

SEQ ID NO: 1440095 - DNA, 15 bp, Homo sapiens
cctgcacaaattcaa

SEQ ID NO: 1440096 - DNA, 15 bp, Homo sapiens
ctgcacaaattcaac

SEQ ID NO: 1440097 - DNA, 15 bp, Homo sapiens
tgcacaaattcaact

SEQ ID NO: 1440098 - DNA, 15 bp, Homo sapiens
gcacaaattcaacta

SEQ ID NO: 1440099 - DNA, 15 bp, Homo sapiens
cacaaattcaactat

SEQ ID NO: 1440100 - DNA, 15 bp, Homo sapiens
acaaattcaactatt

SEQ ID NO: 1440101 - DNA, 15 bp, Homo sapiens
caaattcaactattt

SEQ ID NO: 1440102 - DNA, 15 bp, Homo sapiens
aaattcaactatttt

SEQ ID NO: 1440103 - DNA, 15 bp, Homo sapiens
aattcaactattttt

SEQ ID NO: 1440104 - DNA, 15 bp, Homo sapiens
attcaactatttttt

SEQ ID NO: 1440105 - DNA, 15 bp, Homo sapiens
ttcaactattttttt

SEQ ID NO: 1440106 - DNA, 15 bp, Homo sapiens
tcaactatttttttt

SEQ ID NO: 1440107 - DNA, 15 bp, Homo sapiens
caactattttttttt

SEQ ID NO: 1440108 - DNA, 15 bp, Homo sapiens
aactattttttttta

SEQ ID NO: 1440109 - DNA, 15 bp, Homo sapiens
actatttttttttat

SEQ ID NO: 1440110 - DNA, 15 bp, Homo sapiens
ctatttttttttatc

SEQ ID NO: 1440111 - DNA, 15 bp, Homo sapiens
tatttttttttatct

SEQ ID NO: 1440112 - DNA, 15 bp, Homo sapiens
atttttttttatctc

SEQ ID NO: 1440113 - DNA, 15 bp, Homo sapiens
tttttttttatctca

SEQ ID NO: 1440114 - DNA, 15 bp, Homo sapiens
ttttttttatctcac

SEQ ID NO: 1440115 - DNA, 15 bp, Homo sapiens
tttttttatctcact

SEQ ID NO: 1440116 - DNA, 15 bp, Homo sapiens
ttttttatctcacta

SEQ ID NO: 1440117 - DNA, 15 bp, Homo sapiens
tttttatctcactac

SEQ ID NO: 1440118 - DNA, 15 bp, Homo sapiens
ttttatctcactact

SEQ ID NO: 1440119 - DNA, 15 bp, Homo sapiens
tttatctcactactc

SEQ ID NO: 1440120 - DNA, 15 bp, Homo sapiens
ttatctcactactct

SEQ ID NO: 1440121 - DNA, 15 bp, Homo sapiens
tatctcactactcta

SEQ ID NO: 1440122 - DNA, 15 bp, Homo sapiens
atctcactactctac

SEQ ID NO: 1440123 - DNA, 15 bp, Homo sapiens
tctcactactctaca

SEQ ID NO: 1440124 - DNA, 15 bp, Homo sapiens
ctcactactctacag

SEQ ID NO: 1440125 - DNA, 15 bp, Homo sapiens
tcactactctacaga

SEQ ID NO: 1440126 - DNA, 15 bp, Homo sapiens
cactactctacagaa

SEQ ID NO: 1440127 - DNA, 15 bp, Homo sapiens
actactctacagaag

SEQ ID NO: 1440128 - DNA, 15 bp, Homo sapiens
ctactctacagaagt

SEQ ID NO: 1440129 - DNA, 15 bp, Homo sapiens
tactctacagaagta

SEQ ID NO: 1440130 - DNA, 15 bp, Homo sapiens
actctacagaagtag

SEQ ID NO: 1440131 - DNA, 15 bp, Homo sapiens
ctctacagaagtagg

SEQ ID NO: 1440132 - DNA, 15 bp, Homo sapiens
tctacagaagtaggt

SEQ ID NO: 1440133 - DNA, 15 bp, Homo sapiens
ctacagaagtaggta

SEQ ID NO: 1440134 - DNA, 15 bp, Homo sapiens
tacagaagtaggtag

SEQ ID NO: 1440135 - DNA, 15 bp, Homo sapiens
acagaagtaggtagg

SEQ ID NO: 1440136 - DNA, 15 bp, Homo sapiens
cagaagtaggtaggg

SEQ ID NO: 1440137 - DNA, 15 bp, Homo sapiens
agaagtaggtagggt

SEQ ID NO: 1440138 - DNA, 15 bp, Homo sapiens
gaagtaggtagggtg

SEQ ID NO: 1440139 - DNA, 15 bp, Homo sapiens
aagtaggtagggtgg

SEQ ID NO: 1440140 - DNA, 15 bp, Homo sapiens
agtaggtagggtggg

SEQ ID NO: 1440141 - DNA, 15 bp, Homo sapiens
gtaggtagggtggga

SEQ ID NO: 1440142 - DNA, 15 bp, Homo sapiens
taggtagggtgggag

SEQ ID NO: 1440143 - DNA, 15 bp, Homo sapiens
aggtagggtgggaga

SEQ ID NO: 1440144 - DNA, 15 bp, Homo sapiens
ggtagggtgggagac

SEQ ID NO: 1440145 - DNA, 15 bp, Homo sapiens
gtagggtgggagaca

SEQ ID NO: 1440146 - DNA, 15 bp, Homo sapiens
tagggtgggagacag

SEQ ID NO: 1440147 - DNA, 15 bp, Homo sapiens
agggtgggagacaga

SEQ ID NO: 1440148 - DNA, 15 bp, Homo sapiens
gggtgggagacagag

SEQ ID NO: 1440149 - DNA, 15 bp, Homo sapiens
ggtgggagacagagt

SEQ ID NO: 1440150 - DNA, 15 bp, Homo sapiens
gtgggagacagagtc

SEQ ID NO: 1440151 - DNA, 15 bp, Homo sapiens
tgggagacagagtct

SEQ ID NO: 1440152 - DNA, 15 bp, Homo sapiens
gggagacagagtctg

SEQ ID NO: 1440153 - DNA, 15 bp, Homo sapiens
ggagacagagtctga

SEQ ID NO: 1440154 - DNA, 15 bp, Homo sapiens
gagacagagtctgat

SEQ ID NO: 1440155 - DNA, 15 bp, Homo sapiens
agacagagtctgatg

SEQ ID NO: 1440156 - DNA, 15 bp, Homo sapiens
gacagagtctgatga

SEQ ID NO: 1440157 - DNA, 15 bp, Homo sapiens
acagagtctgatgag

SEQ ID NO: 1440158 - DNA, 15 bp, Homo sapiens
cagagtctgatgaga

SEQ ID NO: 1440159 - DNA, 15 bp, Homo sapiens
agagtctgatgagag

SEQ ID NO: 1440160 - DNA, 15 bp, Homo sapiens
gagtctgatgagagg

SEQ ID NO: 1440161 - DNA, 15 bp, Homo sapiens
agtctgatgagaggc

SEQ ID NO: 1440162 - DNA, 15 bp, Homo sapiens
gtctgatgagaggct

SEQ ID NO: 1440163 - DNA, 15 bp, Homo sapiens
tctgatgagaggctc

SEQ ID NO: 1440164 - DNA, 15 bp, Homo sapiens
ctgatgagaggctca

SEQ ID NO: 1440165 - DNA, 15 bp, Homo sapiens
tgatgagaggctcag

SEQ ID NO: 1440166 - DNA, 15 bp, Homo sapiens
gatgagaggctcaga

SEQ ID NO: 1440167 - DNA, 15 bp, Homo sapiens
atgagaggctcagaa

SEQ ID NO: 1440168 - DNA, 15 bp, Homo sapiens
tgagaggctcagaat

SEQ ID NO: 1440169 - DNA, 15 bp, Homo sapiens
gagaggctcagaatg

SEQ ID NO: 1440170 - DNA, 15 bp, Homo sapiens
agaggctcagaatgt

SEQ ID NO: 1440171 - DNA, 15 bp, Homo sapiens
gaggctcagaatgtg

SEQ ID NO: 1440172 - DNA, 15 bp, Homo sapiens
aggctcagaatgtga

SEQ ID NO: 1440173 - DNA, 15 bp, Homo sapiens
ggctcagaatgtgaa

SEQ ID NO: 1440174 - DNA, 15 bp, Homo sapiens
gctcagaatgtgaaa

SEQ ID NO: 1440175 - DNA, 15 bp, Homo sapiens
ctcagaatgtgaaag

SEQ ID NO: 1440176 - DNA, 15 bp, Homo sapiens
tcagaatgtgaaaga

SEQ ID NO: 1440177 - DNA, 15 bp, Homo sapiens
cagaatgtgaaagaa

SEQ ID NO: 1440178 - DNA, 15 bp, Homo sapiens
agaatgtgaaagaaa

SEQ ID NO: 1440179 - DNA, 15 bp, Homo sapiens
gaatgtgaaagaaag

SEQ ID NO: 1440180 - DNA, 15 bp, Homo sapiens
aatgtgaaagaaagt

SEQ ID NO: 1440181 - DNA, 15 bp, Homo sapiens
atgtgaaagaaagtg

SEQ ID NO: 1440182 - DNA, 15 bp, Homo sapiens
tgtgaaagaaagtga

SEQ ID NO: 1440183 - DNA, 15 bp, Homo sapiens
gtgaaagaaagtgag

SEQ ID NO: 1440184 - DNA, 15 bp, Homo sapiens
tgaaagaaagtgagg

SEQ ID NO: 1440185 - DNA, 15 bp, Homo sapiens
gaaagaaagtgaggc

SEQ ID NO: 1440186 - DNA, 15 bp, Homo sapiens
aaagaaagtgaggcg

SEQ ID NO: 1440187 - DNA, 15 bp, Homo sapiens
aagaaagtgaggcga

SEQ ID NO: 1440188 - DNA, 15 bp, Homo sapiens
agaaagtgaggcgag

SEQ ID NO: 1440189 - DNA, 15 bp, Homo sapiens
gaaagtgaggcgagt

SEQ ID NO: 1440190 - DNA, 15 bp, Homo sapiens
aaagtgaggcgagtg

SEQ ID NO: 1440191 - DNA, 15 bp, Homo sapiens
aagtgaggcgagtga

SEQ ID NO: 1440192 - DNA, 15 bp, Homo sapiens
agtgaggcgagtgag

SEQ ID NO: 1440193 - DNA, 15 bp, Homo sapiens
gtgaggcgagtgagc

SEQ ID NO: 1440194 - DNA, 15 bp, Homo sapiens
tgaggcgagtgagca

SEQ ID NO: 1440195 - DNA, 15 bp, Homo sapiens
gaggcgagtgagcat

SEQ ID NO: 1440196 - DNA, 15 bp, Homo sapiens
aggcgagtgagcatg

SEQ ID NO: 1440197 - DNA, 15 bp, Homo sapiens
ggcgagtgagcatga

SEQ ID NO: 1440198 - DNA, 15 bp, Homo sapiens
gcgagtgagcatgat

SEQ ID NO: 1440199 - DNA, 15 bp, Homo sapiens
cgagtgagcatgata

SEQ ID NO: 1440200 - DNA, 15 bp, Homo sapiens
gagtgagcatgatat

SEQ ID NO: 1440201 - DNA, 15 bp, Homo sapiens
agtgagcatgatatt

SEQ ID NO: 1440202 - DNA, 15 bp, Homo sapiens
gtgagcatgatattt

SEQ ID NO: 1440203 - DNA, 15 bp, Homo sapiens
tgagcatgatattta

SEQ ID NO: 1440204 - DNA, 15 bp, Homo sapiens
gagcatgatatttaa

SEQ ID NO: 1440205 - DNA, 15 bp, Homo sapiens
agcatgatatttaat

SEQ ID NO: 1440206 - DNA, 15 bp, Homo sapiens
gcatgatatttaata

SEQ ID NO: 1440207 - DNA, 15 bp, Homo sapiens
catgatatttaatat

SEQ ID NO: 1440208 - DNA, 15 bp, Homo sapiens
atgatatttaatata

SEQ ID NO: 1440209 - DNA, 15 bp, Homo sapiens
tgatatttaatataa

SEQ ID NO: 1440210 - DNA, 15 bp, Homo sapiens
gatatttaatataaa

SEQ ID NO: 1440211 - DNA, 15 bp, Homo sapiens
atatttaatataaac

SEQ ID NO: 1440212 - DNA, 15 bp, Homo sapiens
tatttaatataaaca

SEQ ID NO: 1440213 - DNA, 15 bp, Homo sapiens
atttaatataaacac

SEQ ID NO: 1440214 - DNA, 15 bp, Homo sapiens
tttaatataaacaca

SEQ ID NO: 1440215 - DNA, 15 bp, Homo sapiens
ttaatataaacacaa

SEQ ID NO: 1440216 - DNA, 15 bp, Homo sapiens
taatataaacacaaa

SEQ ID NO: 1440217 - DNA, 15 bp, Homo sapiens
aatataaacacaaag

SEQ ID NO: 1440218 - DNA, 15 bp, Homo sapiens
atataaacacaaaga

SEQ ID NO: 1440219 - DNA, 15 bp, Homo sapiens
tataaacacaaagat

SEQ ID NO: 1440220 - DNA, 15 bp, Homo sapiens
ataaacacaaagata

SEQ ID NO: 1440221 - DNA, 15 bp, Homo sapiens
taaacacaaagatat

SEQ ID NO: 1440222 - DNA, 15 bp, Homo sapiens
aaacacaaagatatt

SEQ ID NO: 1440223 - DNA, 15 bp, Homo sapiens
aacacaaagatattc

SEQ ID NO: 1440224 - DNA, 15 bp, Homo sapiens
acacaaagatattct

SEQ ID NO: 1440225 - DNA, 15 bp, Homo sapiens
cacaaagatattctg

SEQ ID NO: 1440226 - DNA, 15 bp, Homo sapiens
acaaagatattctga

SEQ ID NO: 1440227 - DNA, 15 bp, Homo sapiens
caaagatattctgag

SEQ ID NO: 1440228 - DNA, 15 bp, Homo sapiens
aaagatattctgaga

SEQ ID NO: 1440229 - DNA, 15 bp, Homo sapiens
aagatattctgagaa

SEQ ID NO: 1440230 - DNA, 15 bp, Homo sapiens
agatattctgagaag

SEQ ID NO: 1440231 - DNA, 15 bp, Homo sapiens
gatattctgagaaga

SEQ ID NO: 1440232 - DNA, 15 bp, Homo sapiens
atattctgagaagag

SEQ ID NO: 1440233 - DNA, 15 bp, Homo sapiens
tattctgagaagagc

SEQ ID NO: 1440234 - DNA, 15 bp, Homo sapiens
attctgagaagagct

SEQ ID NO: 1440235 - DNA, 15 bp, Homo sapiens
ttctgagaagagctg

SEQ ID NO: 1440236 - DNA, 15 bp, Homo sapiens
tctgagaagagctgc

SEQ ID NO: 1440237 - DNA, 15 bp, Homo sapiens
ctgagaagagctgct

SEQ ID NO: 1440238 - DNA, 15 bp, Homo sapiens
tgagaagagctgctc

SEQ ID NO: 1440239 - DNA, 15 bp, Homo sapiens
gagaagagctgctca

SEQ ID NO: 1440240 - DNA, 15 bp, Homo sapiens
agaagagctgctcac

SEQ ID NO: 1440241 - DNA, 15 bp, Homo sapiens
gaagagctgctcact

SEQ ID NO: 1440242 - DNA, 15 bp, Homo sapiens
aagagctgctcactg

SEQ ID NO: 1440243 - DNA, 15 bp, Homo sapiens
agagctgctcactgc

SEQ ID NO: 1440244 - DNA, 15 bp, Homo sapiens
gagctgctcactgcc

SEQ ID NO: 1440245 - DNA, 15 bp, Homo sapiens
agctgctcactgccc

SEQ ID NO: 1440246 - DNA, 15 bp, Homo sapiens
gctgctcactgcccc

SEQ ID NO: 1440247 - DNA, 15 bp, Homo sapiens
ctgctcactgccccc

SEQ ID NO: 1440248 - DNA, 15 bp, Homo sapiens
tgctcactgccccct

SEQ ID NO: 1440249 - DNA, 15 bp, Homo sapiens
gctcactgccccctc

SEQ ID NO: 1440250 - DNA, 15 bp, Homo sapiens
ctcactgccccctcc

SEQ ID NO: 1440251 - DNA, 15 bp, Homo sapiens
tcactgccccctccc

SEQ ID NO: 1440252 - DNA, 15 bp, Homo sapiens
actgccccctccccc

SEQ ID NO: 1440253 - DNA, 15 bp, Homo sapiens
ctgccccctccccca

SEQ ID NO: 1440254 - DNA, 15 bp, Homo sapiens
tgccccctcccccaa

SEQ ID NO: 1440255 - DNA, 15 bp, Homo sapiens
gccccctcccccaat

SEQ ID NO: 1440256 - DNA, 15 bp, Homo sapiens
ccccctcccccaata

SEQ ID NO: 1440257 - DNA, 15 bp, Homo sapiens
cccctcccccaatac

SEQ ID NO: 1440258 - DNA, 15 bp, Homo sapiens
ccctcccccaataca

SEQ ID NO: 1440259 - DNA, 15 bp, Homo sapiens
cctcccccaatacat

SEQ ID NO: 1440260 - DNA, 15 bp, Homo sapiens
ctcccccaatacatg

SEQ ID NO: 1440261 - DNA, 15 bp, Homo sapiens
tcccccaatacatgt

SEQ ID NO: 1440262 - DNA, 15 bp, Homo sapiens
cccccaatacatgtt

SEQ ID NO: 1440263 - DNA, 15 bp, Homo sapiens
ccccaatacatgttg

SEQ ID NO: 1440264 - DNA, 15 bp, Homo sapiens
cccaatacatgttga

SEQ ID NO: 1440265 - DNA, 15 bp, Homo sapiens
ccaatacatgttgat

SEQ ID NO: 1440266 - DNA, 15 bp, Homo sapiens
caatacatgttgata

SEQ ID NO: 1440267 - DNA, 15 bp, Homo sapiens
aatacatgttgatag

SEQ ID NO: 1440268 - DNA, 15 bp, Homo sapiens
atacatgttgatagg

SEQ ID NO: 1440269 - DNA, 15 bp, Homo sapiens
tacatgttgatagga

SEQ ID NO: 1440270 - DNA, 15 bp, Homo sapiens
acatgttgataggaa

SEQ ID NO: 1440271 - DNA, 15 bp, Homo sapiens
catgttgataggaaa

SEQ ID NO: 1440272 - DNA, 15 bp, Homo sapiens
atgttgataggaaaa

SEQ ID NO: 1440273 - DNA, 15 bp, Homo sapiens
tgttgataggaaaat

SEQ ID NO: 1440274 - DNA, 15 bp, Homo sapiens
gttgataggaaaatg

SEQ ID NO: 1440275 - DNA, 15 bp, Homo sapiens
ttgataggaaaatgc

SEQ ID NO: 1440276 - DNA, 15 bp, Homo sapiens
tgataggaaaatgcc

SEQ ID NO: 1440277 - DNA, 15 bp, Homo sapiens
gataggaaaatgcca

SEQ ID NO: 1440278 - DNA, 15 bp, Homo sapiens
ataggaaaatgccac

SEQ ID NO: 1440279 - DNA, 15 bp, Homo sapiens
taggaaaatgccacg

SEQ ID NO: 1440280 - DNA, 15 bp, Homo sapiens
aggaaaatgccacgt

SEQ ID NO: 1440281 - DNA, 15 bp, Homo sapiens
ggaaaatgccacgta

SEQ ID NO: 1440282 - DNA, 15 bp, Homo sapiens
gaaaatgccacgtac

SEQ ID NO: 1440283 - DNA, 15 bp, Homo sapiens
aaaatgccacgtact

SEQ ID NO: 1440284 - DNA, 15 bp, Homo sapiens
aaatgccacgtactt

SEQ ID NO: 1440285 - DNA, 15 bp, Homo sapiens
aatgccacgtacttc

SEQ ID NO: 1440286 - DNA, 15 bp, Homo sapiens
atgccacgtacttca

SEQ ID NO: 1440287 - DNA, 15 bp, Homo sapiens
tgccacgtacttcag

SEQ ID NO: 1440288 - DNA, 15 bp, Homo sapiens
gccacgtacttcagc

SEQ ID NO: 1440289 - DNA, 15 bp, Homo sapiens
ccacgtacttcagca

SEQ ID NO: 1440290 - DNA, 15 bp, Homo sapiens
cacgtacttcagcaa

SEQ ID NO: 1440291 - DNA, 15 bp, Homo sapiens
acgtacttcagcaaa

SEQ ID NO: 1440292 - DNA, 15 bp, Homo sapiens
cgtacttcagcaaaa

SEQ ID NO: 1440293 - DNA, 15 bp, Homo sapiens
gtacttcagcaaaaa

SEQ ID NO: 1440294 - DNA, 15 bp, Homo sapiens
tacttcagcaaaaac

SEQ ID NO: 1440295 - DNA, 15 bp, Homo sapiens
acttcagcaaaaaca

SEQ ID NO: 1440296 - DNA, 15 bp, Homo sapiens
cttcagcaaaaacaa

SEQ ID NO: 1440297 - DNA, 15 bp, Homo sapiens
ttcagcaaaaacaac

SEQ ID NO: 1440298 - DNA, 15 bp, Homo sapiens
tcagcaaaaacaact

SEQ ID NO: 1440299 - DNA, 15 bp, Homo sapiens
cagcaaaaacaactg

SEQ ID NO: 1440300 - DNA, 15 bp, Homo sapiens
agcaaaaacaactga

SEQ ID NO: 1440301 - DNA, 15 bp, Homo sapiens
gcaaaaacaactgaa

SEQ ID NO: 1440302 - DNA, 15 bp, Homo sapiens
caaaaacaactgaaa

SEQ ID NO: 1440303 - DNA, 15 bp, Homo sapiens
aaaaacaactgaaaa

SEQ ID NO: 1440304 - DNA, 15 bp, Homo sapiens
aaaacaactgaaaaa

SEQ ID NO: 1440305 - DNA, 15 bp, Homo sapiens
aaacaactgaaaaat

SEQ ID NO: 1440306 - DNA, 15 bp, Homo sapiens
aacaactgaaaaatt

SEQ ID NO: 1440307 - DNA, 15 bp, Homo sapiens
acaactgaaaaatta

SEQ ID NO: 1440308 - DNA, 15 bp, Homo sapiens
caactgaaaaattag

SEQ ID NO: 1440309 - DNA, 15 bp, Homo sapiens
aactgaaaaattaga

SEQ ID NO: 1440310 - DNA, 15 bp, Homo sapiens
actgaaaaattagat

SEQ ID NO: 1440311 - DNA, 15 bp, Homo sapiens
ctgaaaaattagata

SEQ ID NO: 1440312 - DNA, 15 bp, Homo sapiens
tgaaaaattagatag

SEQ ID NO: 1440313 - DNA, 15 bp, Homo sapiens
gaaaaattagataga

SEQ ID NO: 1440314 - DNA, 15 bp, Homo sapiens
aaaaattagatagaa

SEQ ID NO: 1440315 - DNA, 15 bp, Homo sapiens
aaaattagatagaaa

SEQ ID NO: 1440316 - DNA, 15 bp, Homo sapiens
aaattagatagaaaa

SEQ ID NO: 1440317 - DNA, 15 bp, Homo sapiens
aattagatagaaaag

SEQ ID NO: 1440318 - DNA, 15 bp, Homo sapiens
attagatagaaaagt

SEQ ID NO: 1440319 - DNA, 15 bp, Homo sapiens
ttagatagaaaagtc

SEQ ID NO: 1440320 - DNA, 15 bp, Homo sapiens
tagatagaaaagtca

SEQ ID NO: 1440321 - DNA, 15 bp, Homo sapiens
agatagaaaagtcaa

SEQ ID NO: 1440322 - DNA, 15 bp, Homo sapiens
gatagaaaagtcaat

SEQ ID NO: 1440323 - DNA, 15 bp, Homo sapiens
atagaaaagtcaatc

SEQ ID NO: 1440324 - DNA, 15 bp, Homo sapiens
tagaaaagtcaatca

SEQ ID NO: 1440325 - DNA, 15 bp, Homo sapiens
agaaaagtcaatcaa

SEQ ID NO: 1440326 - DNA, 15 bp, Homo sapiens
gaaaagtcaatcaat

SEQ ID NO: 1440327 - DNA, 15 bp, Homo sapiens
aaaagtcaatcaata

SEQ ID NO: 1440328 - DNA, 15 bp, Homo sapiens
aaagtcaatcaatag

SEQ ID NO: 1440329 - DNA, 15 bp, Homo sapiens
aagtcaatcaatagg

SEQ ID NO: 1440330 - DNA, 15 bp, Homo sapiens
agtcaatcaatagga

SEQ ID NO: 1440331 - DNA, 15 bp, Homo sapiens
gtcaatcaataggaa

SEQ ID NO: 1440332 - DNA, 15 bp, Homo sapiens
tcaatcaataggaaa

SEQ ID NO: 1440333 - DNA, 15 bp, Homo sapiens
caatcaataggaaaa

SEQ ID NO: 1440334 - DNA, 15 bp, Homo sapiens
aatcaataggaaaag

SEQ ID NO: 1440335 - DNA, 15 bp, Homo sapiens
atcaataggaaaaga

SEQ ID NO: 1440336 - DNA, 15 bp, Homo sapiens
tcaataggaaaagat

SEQ ID NO: 1440337 - DNA, 15 bp, Homo sapiens
caataggaaaagata

SEQ ID NO: 1440338 - DNA, 15 bp, Homo sapiens
aataggaaaagataa

SEQ ID NO: 1440339 - DNA, 15 bp, Homo sapiens
ataggaaaagataat

SEQ ID NO: 1440340 - DNA, 15 bp, Homo sapiens
taggaaaagataatc

SEQ ID NO: 1440341 - DNA, 15 bp, Homo sapiens
aggaaaagataatcc

SEQ ID NO: 1440342 - DNA, 15 bp, Homo sapiens
ggaaaagataatcca

SEQ ID NO: 1440343 - DNA, 15 bp, Homo sapiens
gaaaagataatccag

SEQ ID NO: 1440344 - DNA, 15 bp, Homo sapiens
aaaagataatccagg

SEQ ID NO: 1440345 - DNA, 15 bp, Homo sapiens
aaagataatccagga

SEQ ID NO: 1440346 - DNA, 15 bp, Homo sapiens
aagataatccaggac

SEQ ID NO: 1440347 - DNA, 15 bp, Homo sapiens
agataatccaggacg

SEQ ID NO: 1440348 - DNA, 15 bp, Homo sapiens
gataatccaggacgg

SEQ ID NO: 1440349 - DNA, 15 bp, Homo sapiens
ataatccaggacggt

SEQ ID NO: 1440350 - DNA, 15 bp, Homo sapiens
taatccaggacggtg

SEQ ID NO: 1440351 - DNA, 15 bp, Homo sapiens
aatccaggacggtgt

SEQ ID NO: 1440352 - DNA, 15 bp, Homo sapiens
atccaggacggtgtt

SEQ ID NO: 1440353 - DNA, 15 bp, Homo sapiens
tccaggacggtgttg

SEQ ID NO: 1440354 - DNA, 15 bp, Homo sapiens
ccaggacggtgttgt

SEQ ID NO: 1440355 - DNA, 15 bp, Homo sapiens
caggacggtgttgtg

SEQ ID NO: 1440356 - DNA, 15 bp, Homo sapiens
aggacggtgttgtga

SEQ ID NO: 1440357 - DNA, 15 bp, Homo sapiens
ggacggtgttgtgaa

SEQ ID NO: 1440358 - DNA, 15 bp, Homo sapiens
gacggtgttgtgaac

SEQ ID NO: 1440359 - DNA, 15 bp, Homo sapiens
acggtgttgtgaaca

SEQ ID NO: 1440360 - DNA, 15 bp, Homo sapiens
cggtgttgtgaacag

SEQ ID NO: 1440361 - DNA, 15 bp, Homo sapiens
ggtgttgtgaacaga

SEQ ID NO: 1440362 - DNA, 15 bp, Homo sapiens
gtgttgtgaacagaa

SEQ ID NO: 1440363 - DNA, 15 bp, Homo sapiens
tgttgtgaacagaaa

SEQ ID NO: 1440364 - DNA, 15 bp, Homo sapiens
gttgtgaacagaaag

SEQ ID NO: 1440365 - DNA, 15 bp, Homo sapiens
ttgtgaacagaaaga

SEQ ID NO: 1440366 - DNA, 15 bp, Homo sapiens
tgtgaacagaaagag

SEQ ID NO: 1440367 - DNA, 15 bp, Homo sapiens
gtgaacagaaagagg

SEQ ID NO: 1440368 - DNA, 15 bp, Homo sapiens
tgaacagaaagaggg

SEQ ID NO: 1440369 - DNA, 15 bp, Homo sapiens
gaacagaaagagggg

SEQ ID NO: 1440370 - DNA, 15 bp, Homo sapiens
aacagaaagaggggg

SEQ ID NO: 1440371 - DNA, 15 bp, Homo sapiens
acagaaagaggggga

SEQ ID NO: 1440372 - DNA, 15 bp, Homo sapiens
cagaaagagggggaa

SEQ ID NO: 1440373 - DNA, 15 bp, Homo sapiens
agaaagagggggaaa

SEQ ID NO: 1440374 - DNA, 15 bp, Homo sapiens
gaaagagggggaaaa

SEQ ID NO: 1440375 - DNA, 15 bp, Homo sapiens
aaagagggggaaaaa

SEQ ID NO: 1440376 - DNA, 15 bp, Homo sapiens
aagagggggaaaaaa

SEQ ID NO: 1440377 - DNA, 15 bp, Homo sapiens
agagggggaaaaaac

SEQ ID NO: 1440378 - DNA, 15 bp, Homo sapiens
gagggggaaaaaact

SEQ ID NO: 1440379 - DNA, 15 bp, Homo sapiens
agggggaaaaaactt

SEQ ID NO: 1440380 - DNA, 15 bp, Homo sapiens
gggggaaaaaacttt

SEQ ID NO: 1440381 - DNA, 15 bp, Homo sapiens
ggggaaaaaacttta

SEQ ID NO: 1440382 - DNA, 15 bp, Homo sapiens
gggaaaaaactttag

SEQ ID NO: 1440383 - DNA, 15 bp, Homo sapiens
ggaaaaaactttaga

SEQ ID NO: 1440384 - DNA, 15 bp, Homo sapiens
gaaaaaactttagaa

SEQ ID NO: 1440385 - DNA, 15 bp, Homo sapiens
aaaaaactttagaaa

SEQ ID NO: 1440386 - DNA, 15 bp, Homo sapiens
aaaaactttagaaaa

SEQ ID NO: 1440387 - DNA, 15 bp, Homo sapiens
aaaactttagaaaat

SEQ ID NO: 1440388 - DNA, 15 bp, Homo sapiens
aaactttagaaaatg

SEQ ID NO: 1440389 - DNA, 15 bp, Homo sapiens
aactttagaaaatga

SEQ ID NO: 1440390 - DNA, 15 bp, Homo sapiens
actttagaaaatgat

SEQ ID NO: 1440391 - DNA, 15 bp, Homo sapiens
ctttagaaaatgatg

SEQ ID NO: 1440392 - DNA, 15 bp, Homo sapiens
tttagaaaatgatgg

SEQ ID NO: 1440393 - DNA, 15 bp, Homo sapiens
ttagaaaatgatggg

SEQ ID NO: 1440394 - DNA, 15 bp, Homo sapiens
tagaaaatgatgggg

SEQ ID NO: 1440395 - DNA, 15 bp, Homo sapiens
agaaaatgatgggga

SEQ ID NO: 1440396 - DNA, 15 bp, Homo sapiens
gaaaatgatggggat

SEQ ID NO: 1440397 - DNA, 15 bp, Homo sapiens
aaaatgatggggatg

SEQ ID NO: 1440398 - DNA, 15 bp, Homo sapiens
aaatgatggggatgc

SEQ ID NO: 1440399 - DNA, 15 bp, Homo sapiens
aatgatggggatgct

SEQ ID NO: 1440400 - DNA, 15 bp, Homo sapiens
atgatggggatgctc

SEQ ID NO: 1440401 - DNA, 15 bp, Homo sapiens
tgatggggatgctct

SEQ ID NO: 1440402 - DNA, 15 bp, Homo sapiens
gatggggatgctctt

SEQ ID NO: 1440403 - DNA, 15 bp, Homo sapiens
atggggatgctctta

SEQ ID NO: 1440404 - DNA, 15 bp, Homo sapiens
tggggatgctcttac

SEQ ID NO: 1440405 - DNA, 15 bp, Homo sapiens
ggggatgctcttact

SEQ ID NO: 1440406 - DNA, 15 bp, Homo sapiens
gggatgctcttactg

SEQ ID NO: 1440407 - DNA, 15 bp, Homo sapiens
ggatgctcttactgg

SEQ ID NO: 1440408 - DNA, 15 bp, Homo sapiens
gatgctcttactggg

SEQ ID NO: 1440409 - DNA, 15 bp, Homo sapiens
atgctcttactgggg

SEQ ID NO: 1440410 - DNA, 15 bp, Homo sapiens
tgctcttactggggt

SEQ ID NO: 1440411 - DNA, 15 bp, Homo sapiens
gctcttactggggta

SEQ ID NO: 1440412 - DNA, 15 bp, Homo sapiens
ctcttactggggtac

SEQ ID NO: 1440413 - DNA, 15 bp, Homo sapiens
tcttactggggtacg

SEQ ID NO: 1440414 - DNA, 15 bp, Homo sapiens
cttactggggtacga

SEQ ID NO: 1440415 - DNA, 15 bp, Homo sapiens
ttactggggtacgag

SEQ ID NO: 1440416 - DNA, 15 bp, Homo sapiens
tactggggtacgagt

SEQ ID NO: 1440417 - DNA, 15 bp, Homo sapiens
actggggtacgagtc

SEQ ID NO: 1440418 - DNA, 15 bp, Homo sapiens
ctggggtacgagtcc

SEQ ID NO: 1440419 - DNA, 15 bp, Homo sapiens
tggggtacgagtcct

SEQ ID NO: 1440420 - DNA, 15 bp, Homo sapiens
ggggtacgagtcctc

SEQ ID NO: 1440421 - DNA, 15 bp, Homo sapiens
gggtacgagtcctca

SEQ ID NO: 1440422 - DNA, 15 bp, Homo sapiens
ggtacgagtcctcag

SEQ ID NO: 1440423 - DNA, 15 bp, Homo sapiens
gtacgagtcctcagg

SEQ ID NO: 1440424 - DNA, 15 bp, Homo sapiens
tacgagtcctcaggt

SEQ ID NO: 1440425 - DNA, 15 bp, Homo sapiens
acgagtcctcaggta

SEQ ID NO: 1440426 - DNA, 15 bp, Homo sapiens
cgagtcctcaggtat

SEQ ID NO: 1440427 - DNA, 15 bp, Homo sapiens
gagtcctcaggtatt

SEQ ID NO: 1440428 - DNA, 15 bp, Homo sapiens
agtcctcaggtattg

SEQ ID NO: 1440429 - DNA, 15 bp, Homo sapiens
gtcctcaggtattga

SEQ ID NO: 1440430 - DNA, 15 bp, Homo sapiens
tcctcaggtattgaa

SEQ ID NO: 1440431 - DNA, 15 bp, Homo sapiens
cctcaggtattgaac

SEQ ID NO: 1440432 - DNA, 15 bp, Homo sapiens
ctcaggtattgaact

SEQ ID NO: 1440433 - DNA, 15 bp, Homo sapiens
tcaggtattgaactg

SEQ ID NO: 1440434 - DNA, 15 bp, Homo sapiens
caggtattgaactgg

SEQ ID NO: 1440435 - DNA, 15 bp, Homo sapiens
aggtattgaactggc

SEQ ID NO: 1440436 - DNA, 15 bp, Homo sapiens
ggtattgaactggct

SEQ ID NO: 1440437 - DNA, 15 bp, Homo sapiens
gtattgaactggctt

SEQ ID NO: 1440438 - DNA, 15 bp, Homo sapiens
tattgaactggcttt

SEQ ID NO: 1440439 - DNA, 15 bp, Homo sapiens
attgaactggctttc

SEQ ID NO: 1440440 - DNA, 15 bp, Homo sapiens
ttgaactggctttca

SEQ ID NO: 1440441 - DNA, 15 bp, Homo sapiens
tgaactggctttcag

SEQ ID NO: 1440442 - DNA, 15 bp, Homo sapiens
gaactggctttcagt

SEQ ID NO: 1440443 - DNA, 15 bp, Homo sapiens
aactggctttcagta

SEQ ID NO: 1440444 - DNA, 15 bp, Homo sapiens
actggctttcagtaa

SEQ ID NO: 1440445 - DNA, 15 bp, Homo sapiens
ctggctttcagtaaa

SEQ ID NO: 1440446 - DNA, 15 bp, Homo sapiens
tggctttcagtaaaa

SEQ ID NO: 1440447 - DNA, 15 bp, Homo sapiens
ggctttcagtaaaag

SEQ ID NO: 1440448 - DNA, 15 bp, Homo sapiens
gctttcagtaaaagc

SEQ ID NO: 1440449 - DNA, 15 bp, Homo sapiens
ctttcagtaaaagct

SEQ ID NO: 1440450 - DNA, 15 bp, Homo sapiens
tttcagtaaaagcta

SEQ ID NO: 1440451 - DNA, 15 bp, Homo sapiens
ttcagtaaaagctag

SEQ ID NO: 1440452 - DNA, 15 bp, Homo sapiens
tcagtaaaagctaga

SEQ ID NO: 1440453 - DNA, 15 bp, Homo sapiens
cagtaaaagctagat

SEQ ID NO: 1440454 - DNA, 15 bp, Homo sapiens
agtaaaagctagatt

SEQ ID NO: 1440455 - DNA, 15 bp, Homo sapiens
gtaaaagctagatta

SEQ ID NO: 1440456 - DNA, 15 bp, Homo sapiens
taaaagctagattag

SEQ ID NO: 1440457 - DNA, 15 bp, Homo sapiens
aaaagctagattagt

SEQ ID NO: 1440458 - DNA, 15 bp, Homo sapiens
aaagctagattagtg

SEQ ID NO: 1440459 - DNA, 15 bp, Homo sapiens
aagctagattagtgg

SEQ ID NO: 1440460 - DNA, 15 bp, Homo sapiens
agctagattagtggg

SEQ ID NO: 1440461 - DNA, 15 bp, Homo sapiens
gctagattagtgggt

SEQ ID NO: 1440462 - DNA, 15 bp, Homo sapiens
ctagattagtgggtt

SEQ ID NO: 1440463 - DNA, 15 bp, Homo sapiens
tagattagtgggttc

SEQ ID NO: 1440464 - DNA, 15 bp, Homo sapiens
agattagtgggttcc

SEQ ID NO: 1440465 - DNA, 15 bp, Homo sapiens
gattagtgggttcct

SEQ ID NO: 1440466 - DNA, 15 bp, Homo sapiens
attagtgggttcctg

SEQ ID NO: 1440467 - DNA, 15 bp, Homo sapiens
ttagtgggttcctgc

SEQ ID NO: 1440468 - DNA, 15 bp, Homo sapiens
tagtgggttcctgcc

SEQ ID NO: 1440469 - DNA, 15 bp, Homo sapiens
agtgggttcctgcca

SEQ ID NO: 1440470 - DNA, 15 bp, Homo sapiens
gtgggttcctgccat

SEQ ID NO: 1440471 - DNA, 15 bp, Homo sapiens
tgggttcctgccatt

SEQ ID NO: 1440472 - DNA, 15 bp, Homo sapiens
gggttcctgccattt

SEQ ID NO: 1440473 - DNA, 15 bp, Homo sapiens
ggttcctgccattta

SEQ ID NO: 1440474 - DNA, 15 bp, Homo sapiens
gttcctgccatttac

SEQ ID NO: 1440475 - DNA, 15 bp, Homo sapiens
ttcctgccatttaca

SEQ ID NO: 1440476 - DNA, 15 bp, Homo sapiens
tcctgccatttacaa

SEQ ID NO: 1440477 - DNA, 15 bp, Homo sapiens
cctgccatttacaag

SEQ ID NO: 1440478 - DNA, 15 bp, Homo sapiens
ctgccatttacaagc

SEQ ID NO: 1440479 - DNA, 15 bp, Homo sapiens
tgccatttacaagct

SEQ ID NO: 1440480 - DNA, 15 bp, Homo sapiens
gccatttacaagctg

SEQ ID NO: 1440481 - DNA, 15 bp, Homo sapiens
ccatttacaagctgt

SEQ ID NO: 1440482 - DNA, 15 bp, Homo sapiens
catttacaagctgtt

SEQ ID NO: 1440483 - DNA, 15 bp, Homo sapiens
atttacaagctgttt

SEQ ID NO: 1440484 - DNA, 15 bp, Homo sapiens
tttacaagctgtttt

SEQ ID NO: 1440485 - DNA, 15 bp, Homo sapiens
ttacaagctgtttta

SEQ ID NO: 1440486 - DNA, 15 bp, Homo sapiens
tacaagctgttttat

SEQ ID NO: 1440487 - DNA, 15 bp, Homo sapiens
acaagctgttttatg

SEQ ID NO: 1440488 - DNA, 15 bp, Homo sapiens
caagctgttttatga

SEQ ID NO: 1440489 - DNA, 15 bp, Homo sapiens
aagctgttttatgac

SEQ ID NO: 1440490 - DNA, 15 bp, Homo sapiens
agctgttttatgaca

SEQ ID NO: 1440491 - DNA, 15 bp, Homo sapiens
gctgttttatgacaa

SEQ ID NO: 1440492 - DNA, 15 bp, Homo sapiens
ctgttttatgacaac

SEQ ID NO: 1440493 - DNA, 15 bp, Homo sapiens
tgttttatgacaact

SEQ ID NO: 1440494 - DNA, 15 bp, Homo sapiens
gttttatgacaactt

SEQ ID NO: 1440495 - DNA, 15 bp, Homo sapiens
ttttatgacaactta

SEQ ID NO: 1440496 - DNA, 15 bp, Homo sapiens
tttatgacaacttac

SEQ ID NO: 1440497 - DNA, 15 bp, Homo sapiens
ttatgacaacttact

SEQ ID NO: 1440498 - DNA, 15 bp, Homo sapiens
tatgacaacttactt

SEQ ID NO: 1440499 - DNA, 15 bp, Homo sapiens
atgacaacttacttg

SEQ ID NO: 1440500 - DNA, 15 bp, Homo sapiens
tgacaacttacttgt

SEQ ID NO: 1440501 - DNA, 15 bp, Homo sapiens
gacaacttacttgtt

SEQ ID NO: 1440502 - DNA, 15 bp, Homo sapiens
acaacttacttgttg

SEQ ID NO: 1440503 - DNA, 15 bp, Homo sapiens
caacttacttgttgg

SEQ ID NO: 1440504 - DNA, 15 bp, Homo sapiens
aacttacttgttggg

SEQ ID NO: 1440505 - DNA, 15 bp, Homo sapiens
acttacttgttgggt

SEQ ID NO: 1440506 - DNA, 15 bp, Homo sapiens
cttacttgttgggtg

SEQ ID NO: 1440507 - DNA, 15 bp, Homo sapiens
ttacttgttgggtgg

SEQ ID NO: 1440508 - DNA, 15 bp, Homo sapiens
tacttgttgggtggc

SEQ ID NO: 1440509 - DNA, 15 bp, Homo sapiens
acttgttgggtggcc

SEQ ID NO: 1440510 - DNA, 15 bp, Homo sapiens
cttgttgggtggcct

SEQ ID NO: 1440511 - DNA, 15 bp, Homo sapiens
ttgttgggtggccta

SEQ ID NO: 1440512 - DNA, 15 bp, Homo sapiens
tgttgggtggcctac

SEQ ID NO: 1440513 - DNA, 15 bp, Homo sapiens
gttgggtggcctaca

SEQ ID NO: 1440514 - DNA, 15 bp, Homo sapiens
ttgggtggcctacag

SEQ ID NO: 1440515 - DNA, 15 bp, Homo sapiens
tgggtggcctacagt

SEQ ID NO: 1440516 - DNA, 15 bp, Homo sapiens
gggtggcctacagta

SEQ ID NO: 1440517 - DNA, 15 bp, Homo sapiens
ggtggcctacagtaa

SEQ ID NO: 1440518 - DNA, 15 bp, Homo sapiens
gtggcctacagtaac

SEQ ID NO: 1440519 - DNA, 15 bp, Homo sapiens
tggcctacagtaact

SEQ ID NO: 1440520 - DNA, 15 bp, Homo sapiens
ggcctacagtaactc

SEQ ID NO: 1440521 - DNA, 15 bp, Homo sapiens
gcctacagtaactca

SEQ ID NO: 1440522 - DNA, 15 bp, Homo sapiens
cctacagtaactcac

SEQ ID NO: 1440523 - DNA, 15 bp, Homo sapiens
ctacagtaactcacc

SEQ ID NO: 1440524 - DNA, 15 bp, Homo sapiens
tacagtaactcacct

SEQ ID NO: 1440525 - DNA, 15 bp, Homo sapiens
acagtaactcaccta

SEQ ID NO: 1440526 - DNA, 15 bp, Homo sapiens
cagtaactcacctaa

SEQ ID NO: 1440527 - DNA, 15 bp, Homo sapiens
agtaactcacctaac

SEQ ID NO: 1440528 - DNA, 15 bp, Homo sapiens
gtaactcacctaact

SEQ ID NO: 1440529 - DNA, 15 bp, Homo sapiens
taactcacctaactg

SEQ ID NO: 1440530 - DNA, 15 bp, Homo sapiens
aactcacctaactgc

SEQ ID NO: 1440531 - DNA, 15 bp, Homo sapiens
actcacctaactgca

SEQ ID NO: 1440532 - DNA, 15 bp, Homo sapiens
ctcacctaactgcac

SEQ ID NO: 1440533 - DNA, 15 bp, Homo sapiens
tcacctaactgcact

SEQ ID NO: 1440534 - DNA, 15 bp, Homo sapiens
cacctaactgcactg

SEQ ID NO: 1440535 - DNA, 15 bp, Homo sapiens
acctaactgcactga

SEQ ID NO: 1440536 - DNA, 15 bp, Homo sapiens
cctaactgcactgag

SEQ ID NO: 1440537 - DNA, 15 bp, Homo sapiens
ctaactgcactgagt

SEQ ID NO: 1440538 - DNA, 15 bp, Homo sapiens
taactgcactgagtc

SEQ ID NO: 1440539 - DNA, 15 bp, Homo sapiens
aactgcactgagtct

SEQ ID NO: 1440540 - DNA, 15 bp, Homo sapiens
actgcactgagtctg

SEQ ID NO: 1440541 - DNA, 15 bp, Homo sapiens
ctgcactgagtctgt

SEQ ID NO: 1440542 - DNA, 15 bp, Homo sapiens
tgcactgagtctgtt

SEQ ID NO: 1440543 - DNA, 15 bp, Homo sapiens
gcactgagtctgttt

SEQ ID NO: 1440544 - DNA, 15 bp, Homo sapiens
cactgagtctgtttc

SEQ ID NO: 1440545 - DNA, 15 bp, Homo sapiens
actgagtctgtttcc

SEQ ID NO: 1440546 - DNA, 15 bp, Homo sapiens
ctgagtctgtttcct

SEQ ID NO: 1440547 - DNA, 15 bp, Homo sapiens
tgagtctgtttcctc

SEQ ID NO: 1440548 - DNA, 15 bp, Homo sapiens
gagtctgtttcctca

SEQ ID NO: 1440549 - DNA, 15 bp, Homo sapiens
agtctgtttcctcat

SEQ ID NO: 1440550 - DNA, 15 bp, Homo sapiens
gtctgtttcctcatc

SEQ ID NO: 1440551 - DNA, 15 bp, Homo sapiens
tctgtttcctcatct

SEQ ID NO: 1440552 - DNA, 15 bp, Homo sapiens
tgtttcctcatctgt

SEQ ID NO: 1440553 - DNA, 15 bp, Homo sapiens
tttcctcatctgtaa

SEQ ID NO: 1440554 - DNA, 15 bp, Homo sapiens
ttcctcatctgtaaa

SEQ ID NO: 1440555 - DNA, 15 bp, Homo sapiens
tcctcatctgtaaat

SEQ ID NO: 1440556 - DNA, 15 bp, Homo sapiens
cctcatctgtaaatt

SEQ ID NO: 1440557 - DNA, 15 bp, Homo sapiens
ctcatctgtaaattg

SEQ ID NO: 1440558 - DNA, 15 bp, Homo sapiens
tcatctgtaaattgg

SEQ ID NO: 1440559 - DNA, 15 bp, Homo sapiens
catctgtaaattggg

SEQ ID NO: 1440560 - DNA, 15 bp, Homo sapiens
atctgtaaattgggg

SEQ ID NO: 1440561 - DNA, 15 bp, Homo sapiens
tctgtaaattgggga

SEQ ID NO: 1440562 - DNA, 15 bp, Homo sapiens
ctgtaaattggggat

SEQ ID NO: 1440563 - DNA, 15 bp, Homo sapiens
tgtaaattggggatt

SEQ ID NO: 1440564 - DNA, 15 bp, Homo sapiens
gtaaattggggattt

SEQ ID NO: 1440565 - DNA, 15 bp, Homo sapiens
taaattggggatttt

SEQ ID NO: 1440566 - DNA, 15 bp, Homo sapiens
aaattggggattttt

SEQ ID NO: 1440567 - DNA, 15 bp, Homo sapiens
aattggggatttttt

SEQ ID NO: 1440568 - DNA, 15 bp, Homo sapiens
attggggattttttt

SEQ ID NO: 1440569 - DNA, 15 bp, Homo sapiens
ttggggatttttttt

SEQ ID NO: 1440570 - DNA, 15 bp, Homo sapiens
tggggattttttttt

SEQ ID NO: 1440571 - DNA, 15 bp, Homo sapiens
ggggattttttttta

SEQ ID NO: 1440572 - DNA, 15 bp, Homo sapiens
gggatttttttttaa

SEQ ID NO: 1440573 - DNA, 15 bp, Homo sapiens
ggatttttttttaaa

SEQ ID NO: 1440574 - DNA, 15 bp, Homo sapiens
gatttttttttaaat

SEQ ID NO: 1440575 - DNA, 15 bp, Homo sapiens
atttttttttaaata

SEQ ID NO: 1440576 - DNA, 15 bp, Homo sapiens
tttttttttaaatac

SEQ ID NO: 1440577 - DNA, 15 bp, Homo sapiens
ttttttttaaatacc

SEQ ID NO: 1440578 - DNA, 15 bp, Homo sapiens
tttttttaaatacct

SEQ ID NO: 1440579 - DNA, 15 bp, Homo sapiens
ttttttaaatacctg

SEQ ID NO: 1440580 - DNA, 15 bp, Homo sapiens
tttttaaatacctgg

SEQ ID NO: 1440581 - DNA, 15 bp, Homo sapiens
ttttaaatacctggc

SEQ ID NO: 1440582 - DNA, 15 bp, Homo sapiens
tttaaatacctggca

SEQ ID NO: 1440583 - DNA, 15 bp, Homo sapiens
ttaaatacctggcat

SEQ ID NO: 1440584 - DNA, 15 bp, Homo sapiens
taaatacctggcatg

SEQ ID NO: 1440585 - DNA, 15 bp, Homo sapiens
aaatacctggcatgc

SEQ ID NO: 1440586 - DNA, 15 bp, Homo sapiens
aatacctggcatgcc

SEQ ID NO: 1440587 - DNA, 15 bp, Homo sapiens
atacctggcatgcct

SEQ ID NO: 1440588 - DNA, 15 bp, Homo sapiens
tacctggcatgccta

SEQ ID NO: 1440589 - DNA, 15 bp, Homo sapiens
acctggcatgcctaa

SEQ ID NO: 1440590 - DNA, 15 bp, Homo sapiens
cctggcatgcctaac

SEQ ID NO: 1440591 - DNA, 15 bp, Homo sapiens
ctggcatgcctaact

SEQ ID NO: 1440592 - DNA, 15 bp, Homo sapiens
tggcatgcctaactc

SEQ ID NO: 1440593 - DNA, 15 bp, Homo sapiens
ggcatgcctaactca

SEQ ID NO: 1440594 - DNA, 15 bp, Homo sapiens
gcatgcctaactcat

SEQ ID NO: 1440595 - DNA, 15 bp, Homo sapiens
catgcctaactcata

SEQ ID NO: 1440596 - DNA, 15 bp, Homo sapiens
atgcctaactcataa

SEQ ID NO: 1440597 - DNA, 15 bp, Homo sapiens
tgcctaactcataaa

SEQ ID NO: 1440598 - DNA, 15 bp, Homo sapiens
gcctaactcataaag

SEQ ID NO: 1440599 - DNA, 15 bp, Homo sapiens
cctaactcataaagt

SEQ ID NO: 1440600 - DNA, 15 bp, Homo sapiens
ctaactcataaagtt

SEQ ID NO: 1440601 - DNA, 15 bp, Homo sapiens
taactcataaagttg

SEQ ID NO: 1440602 - DNA, 15 bp, Homo sapiens
aactcataaagttgt

SEQ ID NO: 1440603 - DNA, 15 bp, Homo sapiens
actcataaagttgtt

SEQ ID NO: 1440604 - DNA, 15 bp, Homo sapiens
ctcataaagttgttc

SEQ ID NO: 1440605 - DNA, 15 bp, Homo sapiens
tcataaagttgttct

SEQ ID NO: 1440606 - DNA, 15 bp, Homo sapiens
cataaagttgttctg

SEQ ID NO: 1440607 - DNA, 15 bp, Homo sapiens
ataaagttgttctga

SEQ ID NO: 1440608 - DNA, 15 bp, Homo sapiens
taaagttgttctgaa

SEQ ID NO: 1440609 - DNA, 15 bp, Homo sapiens
aaagttgttctgaaa

SEQ ID NO: 1440610 - DNA, 15 bp, Homo sapiens
aagttgttctgaaac

SEQ ID NO: 1440611 - DNA, 15 bp, Homo sapiens
agttgttctgaaact

SEQ ID NO: 1440612 - DNA, 15 bp, Homo sapiens
gttgttctgaaactg

SEQ ID NO: 1440613 - DNA, 15 bp, Homo sapiens
ttgttctgaaactga

SEQ ID NO: 1440614 - DNA, 15 bp, Homo sapiens
tgttctgaaactgaa

SEQ ID NO: 1440615 - DNA, 15 bp, Homo sapiens
gttctgaaactgaaa

SEQ ID NO: 1440616 - DNA, 15 bp, Homo sapiens
ttctgaaactgaaat

SEQ ID NO: 1440617 - DNA, 15 bp, Homo sapiens
tctgaaactgaaata

SEQ ID NO: 1440618 - DNA, 15 bp, Homo sapiens
ctgaaactgaaataa

SEQ ID NO: 1440619 - DNA, 15 bp, Homo sapiens
tgaaactgaaataaa

SEQ ID NO: 1440620 - DNA, 15 bp, Homo sapiens
gaaactgaaataaaa

SEQ ID NO: 1440621 - DNA, 15 bp, Homo sapiens
aaactgaaataaaac

SEQ ID NO: 1440622 - DNA, 15 bp, Homo sapiens
aactgaaataaaaca

SEQ ID NO: 1440623 - DNA, 15 bp, Homo sapiens
actgaaataaaacat

SEQ ID NO: 1440624 - DNA, 15 bp, Homo sapiens
ctgaaataaaacata

SEQ ID NO: 1440625 - DNA, 15 bp, Homo sapiens
tgaaataaaacatac

SEQ ID NO: 1440626 - DNA, 15 bp, Homo sapiens
gaaataaaacatacg

SEQ ID NO: 1440627 - DNA, 15 bp, Homo sapiens
aaataaaacatacgt

SEQ ID NO: 1440628 - DNA, 15 bp, Homo sapiens
aataaaacatacgtg

SEQ ID NO: 1440629 - DNA, 15 bp, Homo sapiens
ataaaacatacgtga

SEQ ID NO: 1440630 - DNA, 15 bp, Homo sapiens
taaaacatacgtgaa

SEQ ID NO: 1440631 - DNA, 15 bp, Homo sapiens
aaaacatacgtgaac

SEQ ID NO: 1440632 - DNA, 15 bp, Homo sapiens
aaacatacgtgaaca

SEQ ID NO: 1440633 - DNA, 15 bp, Homo sapiens
aacatacgtgaacag

SEQ ID NO: 1440634 - DNA, 15 bp, Homo sapiens
acatacgtgaacagg

SEQ ID NO: 1440635 - DNA, 15 bp, Homo sapiens
catacgtgaacaggc

SEQ ID NO: 1440636 - DNA, 15 bp, Homo sapiens
atacgtgaacaggca

SEQ ID NO: 1440637 - DNA, 15 bp, Homo sapiens
tacgtgaacaggcat

SEQ ID NO: 1440638 - DNA, 15 bp, Homo sapiens
acgtgaacaggcatt

SEQ ID NO: 1440639 - DNA, 15 bp, Homo sapiens
cgtgaacaggcattg

SEQ ID NO: 1440640 - DNA, 15 bp, Homo sapiens
gtgaacaggcattgt

SEQ ID NO: 1440641 - DNA, 15 bp, Homo sapiens
tgaacaggcattgta

SEQ ID NO: 1440642 - DNA, 15 bp, Homo sapiens
gaacaggcattgtaa

SEQ ID NO: 1440643 - DNA, 15 bp, Homo sapiens
acaggcattgtaaac

SEQ ID NO: 1440644 - DNA, 15 bp, Homo sapiens
caggcattgtaaact

SEQ ID NO: 1440645 - DNA, 15 bp, Homo sapiens
aggcattgtaaactg

SEQ ID NO: 1440646 - DNA, 15 bp, Homo sapiens
ggcattgtaaactgt

SEQ ID NO: 1440647 - DNA, 15 bp, Homo sapiens
gcattgtaaactgta

SEQ ID NO: 1440648 - DNA, 15 bp, Homo sapiens
cattgtaaactgtaa

SEQ ID NO: 1440649 - DNA, 15 bp, Homo sapiens
attgtaaactgtaag

SEQ ID NO: 1440650 - DNA, 15 bp, Homo sapiens
ttgtaaactgtaagt

SEQ ID NO: 1440651 - DNA, 15 bp, Homo sapiens
tgtaaactgtaagtt

SEQ ID NO: 1440652 - DNA, 15 bp, Homo sapiens
gtaaactgtaagtta

SEQ ID NO: 1440653 - DNA, 15 bp, Homo sapiens
taaactgtaagttac

SEQ ID NO: 1440654 - DNA, 15 bp, Homo sapiens
aaactgtaagttacg

SEQ ID NO: 1440655 - DNA, 15 bp, Homo sapiens
aactgtaagttacgg

SEQ ID NO: 1440656 - DNA, 15 bp, Homo sapiens
actgtaagttacgga

SEQ ID NO: 1440657 - DNA, 15 bp, Homo sapiens
ctgtaagttacggaa

SEQ ID NO: 1440658 - DNA, 15 bp, Homo sapiens
tgtaagttacggaaa

SEQ ID NO: 1440659 - DNA, 15 bp, Homo sapiens
gtaagttacggaaaa

SEQ ID NO: 1440660 - DNA, 15 bp, Homo sapiens
taagttacggaaaaa

SEQ ID NO: 1440661 - DNA, 15 bp, Homo sapiens
aagttacggaaaaag

SEQ ID NO: 1440662 - DNA, 15 bp, Homo sapiens
agttacggaaaaagc

SEQ ID NO: 1440663 - DNA, 15 bp, Homo sapiens
gttacggaaaaagct

SEQ ID NO: 1440664 - DNA, 15 bp, Homo sapiens
ttacggaaaaagctg

SEQ ID NO: 1440665 - DNA, 15 bp, Homo sapiens
tacggaaaaagctgg

SEQ ID NO: 1440666 - DNA, 15 bp, Homo sapiens
acggaaaaagctggc

SEQ ID NO: 1440667 - DNA, 15 bp, Homo sapiens
cggaaaaagctggct

SEQ ID NO: 1440668 - DNA, 15 bp, Homo sapiens
ggaaaaagctggctg

SEQ ID NO: 1440669 - DNA, 15 bp, Homo sapiens
gaaaaagctggctgt

SEQ ID NO: 1440670 - DNA, 15 bp, Homo sapiens
aaaaagctggctgtt

SEQ ID NO: 1440671 - DNA, 15 bp, Homo sapiens
aaaagctggctgttg

SEQ ID NO: 1440672 - DNA, 15 bp, Homo sapiens
aaagctggctgttgt

SEQ ID NO: 1440673 - DNA, 15 bp, Homo sapiens
aagctggctgttgtt

SEQ ID NO: 1440674 - DNA, 15 bp, Homo sapiens
agctggctgttgttg

SEQ ID NO: 1440675 - DNA, 15 bp, Homo sapiens
gctggctgttgttgt

SEQ ID NO: 1440676 - DNA, 15 bp, Homo sapiens
ctggctgttgttgtg

SEQ ID NO: 1440677 - DNA, 15 bp, Homo sapiens
tggctgttgttgtgt

SEQ ID NO: 1440678 - DNA, 15 bp, Homo sapiens
ggctgttgttgtgtc

SEQ ID NO: 1440679 - DNA, 15 bp, Homo sapiens
gctgttgttgtgtct

SEQ ID NO: 1440680 - DNA, 15 bp, Homo sapiens
ctgttgttgtgtctt

SEQ ID NO: 1440681 - DNA, 15 bp, Homo sapiens
tgttgttgtgtcttt

SEQ ID NO: 1440682 - DNA, 15 bp, Homo sapiens
gttgttgtgtcttta

SEQ ID NO: 1440683 - DNA, 15 bp, Homo sapiens
ttgttgtgtctttaa

SEQ ID NO: 1440684 - DNA, 15 bp, Homo sapiens
tgttgtgtctttaaa

SEQ ID NO: 1440685 - DNA, 15 bp, Homo sapiens
gttgtgtctttaaag

SEQ ID NO: 1440686 - DNA, 15 bp, Homo sapiens
ttgtgtctttaaagt

SEQ ID NO: 1440687 - DNA, 15 bp, Homo sapiens
tgtgtctttaaagtt

SEQ ID NO: 1440688 - DNA, 15 bp, Homo sapiens
gtgtctttaaagttt

SEQ ID NO: 1440689 - DNA, 15 bp, Homo sapiens
tgtctttaaagtttc

SEQ ID NO: 1440690 - DNA, 15 bp, Homo sapiens
gtctttaaagtttca

SEQ ID NO: 1440691 - DNA, 15 bp, Homo sapiens
tctttaaagtttcac

SEQ ID NO: 1440692 - DNA, 15 bp, Homo sapiens
ctttaaagtttcacc

SEQ ID NO: 1440693 - DNA, 15 bp, Homo sapiens
tttaaagtttcacct

SEQ ID NO: 1440694 - DNA, 15 bp, Homo sapiens
ttaaagtttcacctg

SEQ ID NO: 1440695 - DNA, 15 bp, Homo sapiens
taaagtttcacctgg

SEQ ID NO: 1440696 - DNA, 15 bp, Homo sapiens
aaagtttcacctggg

SEQ ID NO: 1440697 - DNA, 15 bp, Homo sapiens
caaaaatatacagtg

SEQ ID NO: 1440698 - DNA, 15 bp, Homo sapiens
aaaaatatacagtga

SEQ ID NO: 1440699 - DNA, 15 bp, Homo sapiens
aaaatatacagtgag

SEQ ID NO: 1440700 - DNA, 15 bp, Homo sapiens
aaatatacagtgagt

SEQ ID NO: 1440701 - DNA, 15 bp, Homo sapiens
aatatacagtgagtt

SEQ ID NO: 1440702 - DNA, 15 bp, Homo sapiens
atatacagtgagtta

SEQ ID NO: 1440703 - DNA, 15 bp, Homo sapiens
tatacagtgagttat

SEQ ID NO: 1440704 - DNA, 15 bp, Homo sapiens
atacagtgagttatt

SEQ ID NO: 1440705 - DNA, 15 bp, Homo sapiens
tacagtgagttattg

SEQ ID NO: 1440706 - DNA, 15 bp, Homo sapiens
acagtgagttattga

SEQ ID NO: 1440707 - DNA, 15 bp, Homo sapiens
cagtgagttattgaa

SEQ ID NO: 1440708 - DNA, 15 bp, Homo sapiens
agtgagttattgaac

SEQ ID NO: 1440709 - DNA, 15 bp, Homo sapiens
gtgagttattgaact

SEQ ID NO: 1440710 - DNA, 15 bp, Homo sapiens
tgagttattgaacta

SEQ ID NO: 1440711 - DNA, 15 bp, Homo sapiens
gagttattgaactag

SEQ ID NO: 1440712 - DNA, 15 bp, Homo sapiens
agttattgaactaga

SEQ ID NO: 1440713 - DNA, 15 bp, Homo sapiens
gttattgaactagaa

SEQ ID NO: 1440714 - DNA, 15 bp, Homo sapiens
ttattgaactagaac

SEQ ID NO: 1440715 - DNA, 15 bp, Homo sapiens
tattgaactagaacc

SEQ ID NO: 1440716 - DNA, 15 bp, Homo sapiens
attgaactagaacct

SEQ ID NO: 1440717 - DNA, 15 bp, Homo sapiens
ttgaactagaacctg

SEQ ID NO: 1440718 - DNA, 15 bp, Homo sapiens
tgaactagaacctga

SEQ ID NO: 1440719 - DNA, 15 bp, Homo sapiens
gaactagaacctgag

SEQ ID NO: 1440720 - DNA, 15 bp, Homo sapiens
aactagaacctgagt

SEQ ID NO: 1440721 - DNA, 15 bp, Homo sapiens
actagaacctgagtt

SEQ ID NO: 1440722 - DNA, 15 bp, Homo sapiens
ctagaacctgagtta

SEQ ID NO: 1440723 - DNA, 15 bp, Homo sapiens
tagaacctgagttaa

SEQ ID NO: 1440724 - DNA, 15 bp, Homo sapiens
agaacctgagttaaa

SEQ ID NO: 1440725 - DNA, 15 bp, Homo sapiens
gaacctgagttaaat

SEQ ID NO: 1440726 - DNA, 15 bp, Homo sapiens
aacctgagttaaatt

SEQ ID NO: 1440727 - DNA, 15 bp, Homo sapiens
acctgagttaaattt

SEQ ID NO: 1440728 - DNA, 15 bp, Homo sapiens
cctgagttaaatttc

SEQ ID NO: 1440729 - DNA, 15 bp, Homo sapiens
ctgagttaaatttcc

SEQ ID NO: 1440730 - DNA, 15 bp, Homo sapiens
tgagttaaatttcct

SEQ ID NO: 1440731 - DNA, 15 bp, Homo sapiens
gagttaaatttcctg

SEQ ID NO: 1440732 - DNA, 15 bp, Homo sapiens
agttaaatttcctga

SEQ ID NO: 1440733 - DNA, 15 bp, Homo sapiens
gttaaatttcctgac

SEQ ID NO: 1440734 - DNA, 15 bp, Homo sapiens
ttaaatttcctgact

SEQ ID NO: 1440735 - DNA, 15 bp, Homo sapiens
taaatttcctgactc

SEQ ID NO: 1440736 - DNA, 15 bp, Homo sapiens
aaatttcctgactca

SEQ ID NO: 1440737 - DNA, 15 bp, Homo sapiens
aatttcctgactcac

SEQ ID NO: 1440738 - DNA, 15 bp, Homo sapiens
atttcctgactcaca

SEQ ID NO: 1440739 - DNA, 15 bp, Homo sapiens
tttcctgactcacac

SEQ ID NO: 1440740 - DNA, 15 bp, Homo sapiens
ttcctgactcacact

SEQ ID NO: 1440741 - DNA, 15 bp, Homo sapiens
tcctgactcacactt

SEQ ID NO: 1440742 - DNA, 15 bp, Homo sapiens
cctgactcacactta

SEQ ID NO: 1440743 - DNA, 15 bp, Homo sapiens
ctgactcacacttag

SEQ ID NO: 1440744 - DNA, 15 bp, Homo sapiens
tgactcacacttagg

SEQ ID NO: 1440745 - DNA, 15 bp, Homo sapiens
gactcacacttaggt

SEQ ID NO: 1440746 - DNA, 15 bp, Homo sapiens
actcacacttaggta

SEQ ID NO: 1440747 - DNA, 15 bp, Homo sapiens
ctcacacttaggtac

SEQ ID NO: 1440748 - DNA, 15 bp, Homo sapiens
tcacacttaggtaca

SEQ ID NO: 1440749 - DNA, 15 bp, Homo sapiens
cacacttaggtacag

SEQ ID NO: 1440750 - DNA, 15 bp, Homo sapiens
acacttaggtacaga

SEQ ID NO: 1440751 - DNA, 15 bp, Homo sapiens
cacttaggtacagac

SEQ ID NO: 1440752 - DNA, 15 bp, Homo sapiens
acttaggtacagacg

SEQ ID NO: 1440753 - DNA, 15 bp, Homo sapiens
cttaggtacagacga

SEQ ID NO: 1440754 - DNA, 15 bp, Homo sapiens
ttaggtacagacgac

SEQ ID NO: 1440755 - DNA, 15 bp, Homo sapiens
taggtacagacgaca

SEQ ID NO: 1440756 - DNA, 15 bp, Homo sapiens
aggtacagacgacaa

SEQ ID NO: 1440757 - DNA, 15 bp, Homo sapiens
ggtacagacgacaat

SEQ ID NO: 1440758 - DNA, 15 bp, Homo sapiens
gtacagacgacaatg

SEQ ID NO: 1440759 - DNA, 15 bp, Homo sapiens
tacagacgacaatgc

SEQ ID NO: 1440760 - DNA, 15 bp, Homo sapiens
acagacgacaatgca

SEQ ID NO: 1440761 - DNA, 15 bp, Homo sapiens
cagacgacaatgcat

SEQ ID NO: 1440762 - DNA, 15 bp, Homo sapiens
agacgacaatgcata

SEQ ID NO: 1440763 - DNA, 15 bp, Homo sapiens
gacgacaatgcataa

SEQ ID NO: 1440764 - DNA, 15 bp, Homo sapiens
acgacaatgcataaa

SEQ ID NO: 1440765 - DNA, 15 bp, Homo sapiens
cgacaatgcataaaa

SEQ ID NO: 1440766 - DNA, 15 bp, Homo sapiens
gacaatgcataaaaa

SEQ ID NO: 1440767 - DNA, 15 bp, Homo sapiens
acaatgcataaaaac

SEQ ID NO: 1440768 - DNA, 15 bp, Homo sapiens
caatgcataaaaact

SEQ ID NO: 1440769 - DNA, 15 bp, Homo sapiens
aatgcataaaaactt

SEQ ID NO: 1440770 - DNA, 15 bp, Homo sapiens
atgcataaaaactta

SEQ ID NO: 1440771 - DNA, 15 bp, Homo sapiens
tgcataaaaacttag

SEQ ID NO: 1440772 - DNA, 15 bp, Homo sapiens
gcataaaaacttagt

SEQ ID NO: 1440773 - DNA, 15 bp, Homo sapiens
cataaaaacttagtt

SEQ ID NO: 1440774 - DNA, 15 bp, Homo sapiens
ataaaaacttagttg

SEQ ID NO: 1440775 - DNA, 15 bp, Homo sapiens
taaaaacttagttga

SEQ ID NO: 1440776 - DNA, 15 bp, Homo sapiens
aaaaacttagttgac

SEQ ID NO: 1440777 - DNA, 15 bp, Homo sapiens
aaaacttagttgact

SEQ ID NO: 1440778 - DNA, 15 bp, Homo sapiens
aaacttagttgactt

SEQ ID NO: 1440779 - DNA, 15 bp, Homo sapiens
aacttagttgacttg

SEQ ID NO: 1440780 - DNA, 15 bp, Homo sapiens
acttagttgacttgt

SEQ ID NO: 1440781 - DNA, 15 bp, Homo sapiens
cttagttgacttgtt

SEQ ID NO: 1440782 - DNA, 15 bp, Homo sapiens
ttagttgacttgttc

SEQ ID NO: 1440783 - DNA, 15 bp, Homo sapiens
tagttgacttgttca

SEQ ID NO: 1440784 - DNA, 15 bp, Homo sapiens
agttgacttgttcaa

SEQ ID NO: 1440785 - DNA, 15 bp, Homo sapiens
gttgacttgttcaag

SEQ ID NO: 1440786 - DNA, 15 bp, Homo sapiens
ttgacttgttcaagc

SEQ ID NO: 1440787 - DNA, 15 bp, Homo sapiens
tgacttgttcaagcc

SEQ ID NO: 1440788 - DNA, 15 bp, Homo sapiens
gacttgttcaagcca

SEQ ID NO: 1440789 - DNA, 15 bp, Homo sapiens
acttgttcaagccag

SEQ ID NO: 1440790 - DNA, 15 bp, Homo sapiens
cttgttcaagccaga

SEQ ID NO: 1440791 - DNA, 15 bp, Homo sapiens
ttgttcaagccagag

SEQ ID NO: 1440792 - DNA, 15 bp, Homo sapiens
tgttcaagccagagc

SEQ ID NO: 1440793 - DNA, 15 bp, Homo sapiens
gttcaagccagagct

SEQ ID NO: 1440794 - DNA, 15 bp, Homo sapiens
ttcaagccagagctg

SEQ ID NO: 1440795 - DNA, 15 bp, Homo sapiens
tcaagccagagctga

SEQ ID NO: 1440796 - DNA, 15 bp, Homo sapiens
caagccagagctgac

SEQ ID NO: 1440797 - DNA, 15 bp, Homo sapiens
aagccagagctgact

SEQ ID NO: 1440798 - DNA, 15 bp, Homo sapiens
agccagagctgactt

SEQ ID NO: 1440799 - DNA, 15 bp, Homo sapiens
gccagagctgacttg

SEQ ID NO: 1440800 - DNA, 15 bp, Homo sapiens
ccagagctgacttgt

SEQ ID NO: 1440801 - DNA, 15 bp, Homo sapiens
cagagctgacttgtt

SEQ ID NO: 1440802 - DNA, 15 bp, Homo sapiens
agagctgacttgttc

SEQ ID NO: 1440803 - DNA, 15 bp, Homo sapiens
gagctgacttgttca

SEQ ID NO: 1440804 - DNA, 15 bp, Homo sapiens
agctgacttgttcac

SEQ ID NO: 1440805 - DNA, 15 bp, Homo sapiens
gctgacttgttcact

SEQ ID NO: 1440806 - DNA, 15 bp, Homo sapiens
ctgacttgttcactg

SEQ ID NO: 1440807 - DNA, 15 bp, Homo sapiens
tgacttgttcactgc

SEQ ID NO: 1440808 - DNA, 15 bp, Homo sapiens
gacttgttcactgct

SEQ ID NO: 1440809 - DNA, 15 bp, Homo sapiens
acttgttcactgctg

SEQ ID NO: 1440810 - DNA, 15 bp, Homo sapiens
cttgttcactgctgt

SEQ ID NO: 1440811 - DNA, 15 bp, Homo sapiens
ttgttcactgctgta

SEQ ID NO: 1440812 - DNA, 15 bp, Homo sapiens
tgttcactgctgtat

SEQ ID NO: 1440813 - DNA, 15 bp, Homo sapiens
gttcactgctgtatc

SEQ ID NO: 1440814 - DNA, 15 bp, Homo sapiens
ttcactgctgtatcc

SEQ ID NO: 1440815 - DNA, 15 bp, Homo sapiens
tcactgctgtatccc

SEQ ID NO: 1440816 - DNA, 15 bp, Homo sapiens
cactgctgtatcccc

SEQ ID NO: 1440817 - DNA, 15 bp, Homo sapiens
actgctgtatcccca

SEQ ID NO: 1440818 - DNA, 15 bp, Homo sapiens
ctgctgtatccccag

SEQ ID NO: 1440819 - DNA, 15 bp, Homo sapiens
tgctgtatccccagt

SEQ ID NO: 1440820 - DNA, 15 bp, Homo sapiens
gctgtatccccagtg

SEQ ID NO: 1440821 - DNA, 15 bp, Homo sapiens
ctgtatccccagtgc

SEQ ID NO: 1440822 - DNA, 15 bp, Homo sapiens
tgtatccccagtgcc

SEQ ID NO: 1440823 - DNA, 15 bp, Homo sapiens
gtatccccagtgcct

SEQ ID NO: 1440824 - DNA, 15 bp, Homo sapiens
tatccccagtgccta

SEQ ID NO: 1440825 - DNA, 15 bp, Homo sapiens
atccccagtgcctag

SEQ ID NO: 1440826 - DNA, 15 bp, Homo sapiens
tccccagtgcctagc

SEQ ID NO: 1440827 - DNA, 15 bp, Homo sapiens
ccccagtgcctagca

SEQ ID NO: 1440828 - DNA, 15 bp, Homo sapiens
cccagtgcctagcac

SEQ ID NO: 1440829 - DNA, 15 bp, Homo sapiens
ccagtgcctagcaca

SEQ ID NO: 1440830 - DNA, 15 bp, Homo sapiens
cagtgcctagcacag

SEQ ID NO: 1440831 - DNA, 15 bp, Homo sapiens
agtgcctagcacagg

SEQ ID NO: 1440832 - DNA, 15 bp, Homo sapiens
gtgcctagcacagga

SEQ ID NO: 1440833 - DNA, 15 bp, Homo sapiens
tgcctagcacaggaa

SEQ ID NO: 1440834 - DNA, 15 bp, Homo sapiens
gcctagcacaggaaa

SEQ ID NO: 1440835 - DNA, 15 bp, Homo sapiens
cctagcacaggaaac

SEQ ID NO: 1440836 - DNA, 15 bp, Homo sapiens
ctagcacaggaaaca

SEQ ID NO: 1440837 - DNA, 15 bp, Homo sapiens
tagcacaggaaacag

SEQ ID NO: 1440838 - DNA, 15 bp, Homo sapiens
agcacaggaaacagg

SEQ ID NO: 1440839 - DNA, 15 bp, Homo sapiens
gcacaggaaacagga

SEQ ID NO: 1440840 - DNA, 15 bp, Homo sapiens
cacaggaaacaggat

SEQ ID NO: 1440841 - DNA, 15 bp, Homo sapiens
acaggaaacaggata

SEQ ID NO: 1440842 - DNA, 15 bp, Homo sapiens
caggaaacaggataa

SEQ ID NO: 1440843 - DNA, 15 bp, Homo sapiens
aggaaacaggataaa

SEQ ID NO: 1440844 - DNA, 15 bp, Homo sapiens
ggaaacaggataaaa

SEQ ID NO: 1440845 - DNA, 15 bp, Homo sapiens
gaaacaggataaaaa

SEQ ID NO: 1440846 - DNA, 15 bp, Homo sapiens
aaacaggataaaaaa

SEQ ID NO: 1440847 - DNA, 15 bp, Homo sapiens
aacaggataaaaaat

SEQ ID NO: 1440848 - DNA, 15 bp, Homo sapiens
acaggataaaaaata

SEQ ID NO: 1440849 - DNA, 15 bp, Homo sapiens
caggataaaaaatac

SEQ ID NO: 1440850 - DNA, 15 bp, Homo sapiens
aggataaaaaatact

SEQ ID NO: 1440851 - DNA, 15 bp, Homo sapiens
ggataaaaaatactg

SEQ ID NO: 1440852 - DNA, 15 bp, Homo sapiens
gataaaaaatactgt

SEQ ID NO: 1440853 - DNA, 15 bp, Homo sapiens
ataaaaaatactgtt

SEQ ID NO: 1440854 - DNA, 15 bp, Homo sapiens
taaaaaatactgtta

SEQ ID NO: 1440855 - DNA, 15 bp, Homo sapiens
aaaaaatactgttag

SEQ ID NO: 1440856 - DNA, 15 bp, Homo sapiens
aaaaatactgttaga

SEQ ID NO: 1440857 - DNA, 15 bp, Homo sapiens
aaaatactgttagaa

SEQ ID NO: 1440858 - DNA, 15 bp, Homo sapiens
aaatactgttagaat

SEQ ID NO: 1440859 - DNA, 15 bp, Homo sapiens
aatactgttagaatg

SEQ ID NO: 1440860 - DNA, 15 bp, Homo sapiens
atactgttagaatga

SEQ ID NO: 1440861 - DNA, 15 bp, Homo sapiens
tactgttagaatgag

SEQ ID NO: 1440862 - DNA, 15 bp, Homo sapiens
actgttagaatgagt

SEQ ID NO: 1440863 - DNA, 15 bp, Homo sapiens
ctgttagaatgagtt

SEQ ID NO: 1440864 - DNA, 15 bp, Homo sapiens
tgttagaatgagtta

SEQ ID NO: 1440865 - DNA, 15 bp, Homo sapiens
gttagaatgagttaa

SEQ ID NO: 1440866 - DNA, 15 bp, Homo sapiens
ttagaatgagttaaa

SEQ ID NO: 1440867 - DNA, 15 bp, Homo sapiens
tagaatgagttaaag

SEQ ID NO: 1440868 - DNA, 15 bp, Homo sapiens
agaatgagttaaaga

SEQ ID NO: 1440869 - DNA, 15 bp, Homo sapiens
gaatgagttaaagaa

SEQ ID NO: 1440870 - DNA, 15 bp, Homo sapiens
aatgagttaaagaat

SEQ ID NO: 1440871 - DNA, 15 bp, Homo sapiens
atgagttaaagaata

SEQ ID NO: 1440872 - DNA, 15 bp, Homo sapiens
tgagttaaagaataa

SEQ ID NO: 1440873 - DNA, 15 bp, Homo sapiens
gagttaaagaataaa

SEQ ID NO: 1440874 - DNA, 15 bp, Homo sapiens
agttaaagaataaaa

SEQ ID NO: 1440875 - DNA, 15 bp, Homo sapiens
gttaaagaataaaat

SEQ ID NO: 1440876 - DNA, 15 bp, Homo sapiens
ttaaagaataaaatt

SEQ ID NO: 1440877 - DNA, 15 bp, Homo sapiens
taaagaataaaattt

SEQ ID NO: 1440878 - DNA, 15 bp, Homo sapiens
aaagaataaaattta

SEQ ID NO: 1440879 - DNA, 15 bp, Homo sapiens
aagaataaaatttag

SEQ ID NO: 1440880 - DNA, 15 bp, Homo sapiens
agaataaaatttagg

SEQ ID NO: 1440881 - DNA, 15 bp, Homo sapiens
gaataaaatttaggt

SEQ ID NO: 1440882 - DNA, 15 bp, Homo sapiens
aataaaatttaggta

SEQ ID NO: 1440883 - DNA, 15 bp, Homo sapiens
ataaaatttaggtaa

SEQ ID NO: 1440884 - DNA, 15 bp, Homo sapiens
taaaatttaggtaag

SEQ ID NO: 1440885 - DNA, 15 bp, Homo sapiens
aaaatttaggtaaga

SEQ ID NO: 1440886 - DNA, 15 bp, Homo sapiens
aaatttaggtaagat

SEQ ID NO: 1440887 - DNA, 15 bp, Homo sapiens
aatttaggtaagatt

SEQ ID NO: 1440888 - DNA, 15 bp, Homo sapiens
atttaggtaagattt

SEQ ID NO: 1440889 - DNA, 15 bp, Homo sapiens
tttaggtaagatttt

SEQ ID NO: 1440890 - DNA, 15 bp, Homo sapiens
ttaggtaagattttg

SEQ ID NO: 1440891 - DNA, 15 bp, Homo sapiens
taggtaagattttgc

SEQ ID NO: 1440892 - DNA, 15 bp, Homo sapiens
aggtaagattttgct

SEQ ID NO: 1440893 - DNA, 15 bp, Homo sapiens
ggtaagattttgctt

SEQ ID NO: 1440894 - DNA, 15 bp, Homo sapiens
gtaagattttgcttt

SEQ ID NO: 1440895 - DNA, 15 bp, Homo sapiens
taagattttgctttt

SEQ ID NO: 1440896 - DNA, 15 bp, Homo sapiens
aagattttgctttta

SEQ ID NO: 1440897 - DNA, 15 bp, Homo sapiens
agattttgcttttag

SEQ ID NO: 1440898 - DNA, 15 bp, Homo sapiens
gattttgcttttagt

SEQ ID NO: 1440899 - DNA, 15 bp, Homo sapiens
attttgcttttagtt

SEQ ID NO: 1440900 - DNA, 15 bp, Homo sapiens
ttttgcttttagtta

SEQ ID NO: 1440901 - DNA, 15 bp, Homo sapiens
tttgcttttagttac

SEQ ID NO: 1440902 - DNA, 15 bp, Homo sapiens
ttgcttttagttaca

SEQ ID NO: 1440903 - DNA, 15 bp, Homo sapiens
tgcttttagttacaa

SEQ ID NO: 1440904 - DNA, 15 bp, Homo sapiens
gcttttagttacaat

SEQ ID NO: 1440905 - DNA, 15 bp, Homo sapiens
cttttagttacaatt

SEQ ID NO: 1440906 - DNA, 15 bp, Homo sapiens
ttttagttacaattg

SEQ ID NO: 1440907 - DNA, 15 bp, Homo sapiens
tttagttacaattgt

SEQ ID NO: 1440908 - DNA, 15 bp, Homo sapiens
ttagttacaattgtc

SEQ ID NO: 1440909 - DNA, 15 bp, Homo sapiens
tagttacaattgtca

SEQ ID NO: 1440910 - DNA, 15 bp, Homo sapiens
agttacaattgtcac

SEQ ID NO: 1440911 - DNA, 15 bp, Homo sapiens
gttacaattgtcact

SEQ ID NO: 1440912 - DNA, 15 bp, Homo sapiens
ttacaattgtcactg

SEQ ID NO: 1440913 - DNA, 15 bp, Homo sapiens
tacaattgtcactga

SEQ ID NO: 1440914 - DNA, 15 bp, Homo sapiens
acaattgtcactgag

SEQ ID NO: 1440915 - DNA, 15 bp, Homo sapiens
caattgtcactgaga

SEQ ID NO: 1440916 - DNA, 15 bp, Homo sapiens
aattgtcactgagat

SEQ ID NO: 1440917 - DNA, 15 bp, Homo sapiens
attgtcactgagatc

SEQ ID NO: 1440918 - DNA, 15 bp, Homo sapiens
ttgtcactgagatct

SEQ ID NO: 1440919 - DNA, 15 bp, Homo sapiens
tgtcactgagatcta

SEQ ID NO: 1440920 - DNA, 15 bp, Homo sapiens
gtcactgagatctag

SEQ ID NO: 1440921 - DNA, 15 bp, Homo sapiens
tcactgagatctagg

SEQ ID NO: 1440922 - DNA, 15 bp, Homo sapiens
cactgagatctaggt

SEQ ID NO: 1440923 - DNA, 15 bp, Homo sapiens
actgagatctaggtt

SEQ ID NO: 1440924 - DNA, 15 bp, Homo sapiens
ctgagatctaggtta

SEQ ID NO: 1440925 - DNA, 15 bp, Homo sapiens
tgagatctaggttac

SEQ ID NO: 1440926 - DNA, 15 bp, Homo sapiens
gagatctaggttaca

SEQ ID NO: 1440927 - DNA, 15 bp, Homo sapiens
agatctaggttacaa

SEQ ID NO: 1440928 - DNA, 15 bp, Homo sapiens
gatctaggttacaat

SEQ ID NO: 1440929 - DNA, 15 bp, Homo sapiens
atctaggttacaatc

SEQ ID NO: 1440930 - DNA, 15 bp, Homo sapiens
tctaggttacaatct

SEQ ID NO: 1440931 - DNA, 15 bp, Homo sapiens
ctaggttacaatctt

SEQ ID NO: 1440932 - DNA, 15 bp, Homo sapiens
taggttacaatctta

SEQ ID NO: 1440933 - DNA, 15 bp, Homo sapiens
aggttacaatcttag

SEQ ID NO: 1440934 - DNA, 15 bp, Homo sapiens
ggttacaatcttagc

SEQ ID NO: 1440935 - DNA, 15 bp, Homo sapiens
gttacaatcttagct

SEQ ID NO: 1440936 - DNA, 15 bp, Homo sapiens
ttacaatcttagctt

SEQ ID NO: 1440937 - DNA, 15 bp, Homo sapiens
tacaatcttagcttc

SEQ ID NO: 1440938 - DNA, 15 bp, Homo sapiens
acaatcttagcttca

SEQ ID NO: 1440939 - DNA, 15 bp, Homo sapiens
caatcttagcttcat

SEQ ID NO: 1440940 - DNA, 15 bp, Homo sapiens
aatcttagcttcatc

SEQ ID NO: 1440941 - DNA, 15 bp, Homo sapiens
atcttagcttcatca

SEQ ID NO: 1440942 - DNA, 15 bp, Homo sapiens
tcttagcttcatcaa

SEQ ID NO: 1440943 - DNA, 15 bp, Homo sapiens
cttagcttcatcaat

SEQ ID NO: 1440944 - DNA, 15 bp, Homo sapiens
ttagcttcatcaatt

SEQ ID NO: 1440945 - DNA, 15 bp, Homo sapiens
tagcttcatcaatta

SEQ ID NO: 1440946 - DNA, 15 bp, Homo sapiens
agcttcatcaattat

SEQ ID NO: 1440947 - DNA, 15 bp, Homo sapiens
gcttcatcaattatt

SEQ ID NO: 1440948 - DNA, 15 bp, Homo sapiens
cttcatcaattatta

SEQ ID NO: 1440949 - DNA, 15 bp, Homo sapiens
ttcatcaattattac

SEQ ID NO: 1440950 - DNA, 15 bp, Homo sapiens
tcatcaattattact

SEQ ID NO: 1440951 - DNA, 15 bp, Homo sapiens
catcaattattactt

SEQ ID NO: 1440952 - DNA, 15 bp, Homo sapiens
atcaattattactta

SEQ ID NO: 1440953 - DNA, 15 bp, Homo sapiens
tcaattattacttaa

SEQ ID NO: 1440954 - DNA, 15 bp, Homo sapiens
caattattacttaac

SEQ ID NO: 1440955 - DNA, 15 bp, Homo sapiens
aattattacttaact

SEQ ID NO: 1440956 - DNA, 15 bp, Homo sapiens
attattacttaactt

SEQ ID NO: 1440957 - DNA, 15 bp, Homo sapiens
ttattacttaacttc

SEQ ID NO: 1440958 - DNA, 15 bp, Homo sapiens
tattacttaacttct

SEQ ID NO: 1440959 - DNA, 15 bp, Homo sapiens
attacttaacttcta

SEQ ID NO: 1440960 - DNA, 15 bp, Homo sapiens
ttacttaacttctat

SEQ ID NO: 1440961 - DNA, 15 bp, Homo sapiens
tacttaacttctatg

SEQ ID NO: 1440962 - DNA, 15 bp, Homo sapiens
acttaacttctatga

SEQ ID NO: 1440963 - DNA, 15 bp, Homo sapiens
cttaacttctatgaa

SEQ ID NO: 1440964 - DNA, 15 bp, Homo sapiens
ttaacttctatgaac

SEQ ID NO: 1440965 - DNA, 15 bp, Homo sapiens
taacttctatgaact

SEQ ID NO: 1440966 - DNA, 15 bp, Homo sapiens
aacttctatgaactt

SEQ ID NO: 1440967 - DNA, 15 bp, Homo sapiens
acttctatgaacttg

SEQ ID NO: 1440968 - DNA, 15 bp, Homo sapiens
cttctatgaacttgt

SEQ ID NO: 1440969 - DNA, 15 bp, Homo sapiens
ttctatgaacttgtt

SEQ ID NO: 1440970 - DNA, 15 bp, Homo sapiens
tctatgaacttgttc

SEQ ID NO: 1440971 - DNA, 15 bp, Homo sapiens
ctatgaacttgttct

SEQ ID NO: 1440972 - DNA, 15 bp, Homo sapiens
tatgaacttgttctc

SEQ ID NO: 1440973 - DNA, 15 bp, Homo sapiens
atgaacttgttctca

SEQ ID NO: 1440974 - DNA, 15 bp, Homo sapiens
tgaacttgttctcac

SEQ ID NO: 1440975 - DNA, 15 bp, Homo sapiens
gaacttgttctcact

SEQ ID NO: 1440976 - DNA, 15 bp, Homo sapiens
aacttgttctcactt

SEQ ID NO: 1440977 - DNA, 15 bp, Homo sapiens
acttgttctcacttc

SEQ ID NO: 1440978 - DNA, 15 bp, Homo sapiens
cttgttctcacttct

SEQ ID NO: 1440979 - DNA, 15 bp, Homo sapiens
ttgttctcacttctg

SEQ ID NO: 1440980 - DNA, 15 bp, Homo sapiens
tgttctcacttctga

SEQ ID NO: 1440981 - DNA, 15 bp, Homo sapiens
gttctcacttctgaa

SEQ ID NO: 1440982 - DNA, 15 bp, Homo sapiens
ttctcacttctgaaa

SEQ ID NO: 1440983 - DNA, 15 bp, Homo sapiens
tctcacttctgaaaa

SEQ ID NO: 1440984 - DNA, 15 bp, Homo sapiens
ctcacttctgaaaaa

SEQ ID NO: 1440985 - DNA, 15 bp, Homo sapiens
tcacttctgaaaaat

SEQ ID NO: 1440986 - DNA, 15 bp, Homo sapiens
cacttctgaaaaatt

SEQ ID NO: 1440987 - DNA, 15 bp, Homo sapiens
acttctgaaaaatta

SEQ ID NO: 1440988 - DNA, 15 bp, Homo sapiens
cttctgaaaaattag

SEQ ID NO: 1440989 - DNA, 15 bp, Homo sapiens
ttctgaaaaattaga

SEQ ID NO: 1440990 - DNA, 15 bp, Homo sapiens
tctgaaaaattagaa

SEQ ID NO: 1440991 - DNA, 15 bp, Homo sapiens
ctgaaaaattagaat

SEQ ID NO: 1440992 - DNA, 15 bp, Homo sapiens
tgaaaaattagaata

SEQ ID NO: 1440993 - DNA, 15 bp, Homo sapiens
gaaaaattagaataa

SEQ ID NO: 1440994 - DNA, 15 bp, Homo sapiens
aaaaattagaataaa

SEQ ID NO: 1440995 - DNA, 15 bp, Homo sapiens
aaaattagaataaaa

SEQ ID NO: 1440996 - DNA, 15 bp, Homo sapiens
aaattagaataaaat

SEQ ID NO: 1440997 - DNA, 15 bp, Homo sapiens
aattagaataaaatt

SEQ ID NO: 1440998 - DNA, 15 bp, Homo sapiens
attagaataaaattt

SEQ ID NO: 1440999 - DNA, 15 bp, Homo sapiens
ttagaataaaattta

SEQ ID NO: 1441000 - DNA, 15 bp, Homo sapiens
tagaataaaatttac

SEQ ID NO: 1441001 - DNA, 15 bp, Homo sapiens
agaataaaatttacc

SEQ ID NO: 1441002 - DNA, 15 bp, Homo sapiens
gaataaaatttacca

SEQ ID NO: 1441003 - DNA, 15 bp, Homo sapiens
aataaaatttaccat

SEQ ID NO: 1441004 - DNA, 15 bp, Homo sapiens
ataaaatttaccatt

SEQ ID NO: 1441005 - DNA, 15 bp, Homo sapiens
taaaatttaccatta

SEQ ID NO: 1441006 - DNA, 15 bp, Homo sapiens
aaaatttaccattag

SEQ ID NO: 1441007 - DNA, 15 bp, Homo sapiens
aaatttaccattaga

SEQ ID NO: 1441008 - DNA, 15 bp, Homo sapiens
aatttaccattagag

SEQ ID NO: 1441009 - DNA, 15 bp, Homo sapiens
atttaccattagaga

SEQ ID NO: 1441010 - DNA, 15 bp, Homo sapiens
tttaccattagagac

SEQ ID NO: 1441011 - DNA, 15 bp, Homo sapiens
ttaccattagagacc

SEQ ID NO: 1441012 - DNA, 15 bp, Homo sapiens
taccattagagacca

SEQ ID NO: 1441013 - DNA, 15 bp, Homo sapiens
accattagagaccag

SEQ ID NO: 1441014 - DNA, 15 bp, Homo sapiens
ccattagagaccagg

SEQ ID NO: 1441015 - DNA, 15 bp, Homo sapiens
cattagagaccaggc

SEQ ID NO: 1441016 - DNA, 15 bp, Homo sapiens
attagagaccaggca

SEQ ID NO: 1441017 - DNA, 15 bp, Homo sapiens
ttagagaccaggcac

SEQ ID NO: 1441018 - DNA, 15 bp, Homo sapiens
tagagaccaggcacc

SEQ ID NO: 1441019 - DNA, 15 bp, Homo sapiens
agagaccaggcacct

SEQ ID NO: 1441020 - DNA, 15 bp, Homo sapiens
gagaccaggcacctt

SEQ ID NO: 1441021 - DNA, 15 bp, Homo sapiens
agaccaggcaccttg

SEQ ID NO: 1441022 - DNA, 15 bp, Homo sapiens
gaccaggcaccttga

SEQ ID NO: 1441023 - DNA, 15 bp, Homo sapiens
accaggcaccttgag

SEQ ID NO: 1441024 - DNA, 15 bp, Homo sapiens
ccaggcaccttgagt

SEQ ID NO: 1441025 - DNA, 15 bp, Homo sapiens
caggcaccttgagtt

SEQ ID NO: 1441026 - DNA, 15 bp, Homo sapiens
aggcaccttgagttt

SEQ ID NO: 1441027 - DNA, 15 bp, Homo sapiens
ggcaccttgagttta

SEQ ID NO: 1441028 - DNA, 15 bp, Homo sapiens
gcaccttgagtttat

SEQ ID NO: 1441029 - DNA, 15 bp, Homo sapiens
caccttgagtttatg

SEQ ID NO: 1441030 - DNA, 15 bp, Homo sapiens
accttgagtttatga

SEQ ID NO: 1441031 - DNA, 15 bp, Homo sapiens
ccttgagtttatgaa

SEQ ID NO: 1441032 - DNA, 15 bp, Homo sapiens
cttgagtttatgaat

SEQ ID NO: 1441033 - DNA, 15 bp, Homo sapiens
ttgagtttatgaatg

SEQ ID NO: 1441034 - DNA, 15 bp, Homo sapiens
tgagtttatgaatgt

SEQ ID NO: 1441035 - DNA, 15 bp, Homo sapiens
gagtttatgaatgtg

SEQ ID NO: 1441036 - DNA, 15 bp, Homo sapiens
agtttatgaatgtga

SEQ ID NO: 1441037 - DNA, 15 bp, Homo sapiens
gtttatgaatgtgag

SEQ ID NO: 1441038 - DNA, 15 bp, Homo sapiens
tttatgaatgtgagc

SEQ ID NO: 1441039 - DNA, 15 bp, Homo sapiens
ttatgaatgtgagca

SEQ ID NO: 1441040 - DNA, 15 bp, Homo sapiens
tatgaatgtgagcaa

SEQ ID NO: 1441041 - DNA, 15 bp, Homo sapiens
atgaatgtgagcaag

SEQ ID NO: 1441042 - DNA, 15 bp, Homo sapiens
tgaatgtgagcaaga

SEQ ID NO: 1441043 - DNA, 15 bp, Homo sapiens
gaatgtgagcaagag

SEQ ID NO: 1441044 - DNA, 15 bp, Homo sapiens
aatgtgagcaagagg

SEQ ID NO: 1441045 - DNA, 15 bp, Homo sapiens
atgtgagcaagaggg

SEQ ID NO: 1441046 - DNA, 15 bp, Homo sapiens
tgtgagcaagagggt

SEQ ID NO: 1441047 - DNA, 15 bp, Homo sapiens
gtgagcaagagggtg

SEQ ID NO: 1441048 - DNA, 15 bp, Homo sapiens
tgagcaagagggtgg

SEQ ID NO: 1441049 - DNA, 15 bp, Homo sapiens
gagcaagagggtggt

SEQ ID NO: 1441050 - DNA, 15 bp, Homo sapiens
agcaagagggtggtg

SEQ ID NO: 1441051 - DNA, 15 bp, Homo sapiens
gcaagagggtggtgg

SEQ ID NO: 1441052 - DNA, 15 bp, Homo sapiens
caagagggtggtggc

SEQ ID NO: 1441053 - DNA, 15 bp, Homo sapiens
aagagggtggtggca

SEQ ID NO: 1441054 - DNA, 15 bp, Homo sapiens
agagggtggtggcag

SEQ ID NO: 1441055 - DNA, 15 bp, Homo sapiens
gagggtggtggcaga

SEQ ID NO: 1441056 - DNA, 15 bp, Homo sapiens
agggtggtggcagaa

SEQ ID NO: 1441057 - DNA, 15 bp, Homo sapiens
gggtggtggcagaag

SEQ ID NO: 1441058 - DNA, 15 bp, Homo sapiens
ggtggtggcagaagg

SEQ ID NO: 1441059 - DNA, 15 bp, Homo sapiens
gtggtggcagaaggg

SEQ ID NO: 1441060 - DNA, 15 bp, Homo sapiens
tggtggcagaagggt

SEQ ID NO: 1441061 - DNA, 15 bp, Homo sapiens
ggtggcagaagggta

SEQ ID NO: 1441062 - DNA, 15 bp, Homo sapiens
gtggcagaagggtag

SEQ ID NO: 1441063 - DNA, 15 bp, Homo sapiens
tggcagaagggtaga

SEQ ID NO: 1441064 - DNA, 15 bp, Homo sapiens
ggcagaagggtagaa

SEQ ID NO: 1441065 - DNA, 15 bp, Homo sapiens
gcagaagggtagaaa

SEQ ID NO: 1441066 - DNA, 15 bp, Homo sapiens
cagaagggtagaaaa

SEQ ID NO: 1441067 - DNA, 15 bp, Homo sapiens
agaagggtagaaaag

SEQ ID NO: 1441068 - DNA, 15 bp, Homo sapiens
gaagggtagaaaaga

SEQ ID NO: 1441069 - DNA, 15 bp, Homo sapiens
aagggtagaaaagag

SEQ ID NO: 1441070 - DNA, 15 bp, Homo sapiens
agggtagaaaagagt

SEQ ID NO: 1441071 - DNA, 15 bp, Homo sapiens
gggtagaaaagagta

SEQ ID NO: 1441072 - DNA, 15 bp, Homo sapiens
ggtagaaaagagtaa

SEQ ID NO: 1441073 - DNA, 15 bp, Homo sapiens
gtagaaaagagtaat

SEQ ID NO: 1441074 - DNA, 15 bp, Homo sapiens
tagaaaagagtaata

SEQ ID NO: 1441075 - DNA, 15 bp, Homo sapiens
agaaaagagtaatac

SEQ ID NO: 1441076 - DNA, 15 bp, Homo sapiens
gaaaagagtaataca

SEQ ID NO: 1441077 - DNA, 15 bp, Homo sapiens
aaaagagtaatacag

SEQ ID NO: 1441078 - DNA, 15 bp, Homo sapiens
aaagagtaatacaga

SEQ ID NO: 1441079 - DNA, 15 bp, Homo sapiens
aagagtaatacagac

SEQ ID NO: 1441080 - DNA, 15 bp, Homo sapiens
agagtaatacagaca

SEQ ID NO: 1441081 - DNA, 15 bp, Homo sapiens
gagtaatacagacaa

SEQ ID NO: 1441082 - DNA, 15 bp, Homo sapiens
agtaatacagacaaa

SEQ ID NO: 1441083 - DNA, 15 bp, Homo sapiens
gtaatacagacaaac

SEQ ID NO: 1441084 - DNA, 15 bp, Homo sapiens
taatacagacaaacg

SEQ ID NO: 1441085 - DNA, 15 bp, Homo sapiens
aatacagacaaacga

SEQ ID NO: 1441086 - DNA, 15 bp, Homo sapiens
atacagacaaacgaa

SEQ ID NO: 1441087 - DNA, 15 bp, Homo sapiens
tacagacaaacgaaa

SEQ ID NO: 1441088 - DNA, 15 bp, Homo sapiens
acagacaaacgaaac

SEQ ID NO: 1441089 - DNA, 15 bp, Homo sapiens
cagacaaacgaaact

SEQ ID NO: 1441090 - DNA, 15 bp, Homo sapiens
agacaaacgaaactt

SEQ ID NO: 1441091 - DNA, 15 bp, Homo sapiens
gacaaacgaaacttg

SEQ ID NO: 1441092 - DNA, 15 bp, Homo sapiens
acaaacgaaacttgt

SEQ ID NO: 1441093 - DNA, 15 bp, Homo sapiens
caaacgaaacttgta

SEQ ID NO: 1441094 - DNA, 15 bp, Homo sapiens
aaacgaaacttgtaa

SEQ ID NO: 1441095 - DNA, 15 bp, Homo sapiens
aacgaaacttgtaag

SEQ ID NO: 1441096 - DNA, 15 bp, Homo sapiens
acgaaacttgtaagt

SEQ ID NO: 1441097 - DNA, 15 bp, Homo sapiens
cgaaacttgtaagtg

SEQ ID NO: 1441098 - DNA, 15 bp, Homo sapiens
gaaacttgtaagtga

SEQ ID NO: 1441099 - DNA, 15 bp, Homo sapiens
aaacttgtaagtgaa

SEQ ID NO: 1441100 - DNA, 15 bp, Homo sapiens
aacttgtaagtgaat

SEQ ID NO: 1441101 - DNA, 15 bp, Homo sapiens
acttgtaagtgaata

SEQ ID NO: 1441102 - DNA, 15 bp, Homo sapiens
cttgtaagtgaatac

SEQ ID NO: 1441103 - DNA, 15 bp, Homo sapiens
ttgtaagtgaataca

SEQ ID NO: 1441104 - DNA, 15 bp, Homo sapiens
tgtaagtgaatacat

SEQ ID NO: 1441105 - DNA, 15 bp, Homo sapiens
gtaagtgaatacata

SEQ ID NO: 1441106 - DNA, 15 bp, Homo sapiens
taagtgaatacataa

SEQ ID NO: 1441107 - DNA, 15 bp, Homo sapiens
aagtgaatacataaa

SEQ ID NO: 1441108 - DNA, 15 bp, Homo sapiens
agtgaatacataaaa

SEQ ID NO: 1441109 - DNA, 15 bp, Homo sapiens
gtgaatacataaaaa

SEQ ID NO: 1441110 - DNA, 15 bp, Homo sapiens
tgaatacataaaaat

SEQ ID NO: 1441111 - DNA, 15 bp, Homo sapiens
gaatacataaaaata

SEQ ID NO: 1441112 - DNA, 15 bp, Homo sapiens
aatacataaaaataa

SEQ ID NO: 1441113 - DNA, 15 bp, Homo sapiens
atacataaaaataag

SEQ ID NO: 1441114 - DNA, 15 bp, Homo sapiens
tacataaaaataagt

SEQ ID NO: 1441115 - DNA, 15 bp, Homo sapiens
acataaaaataagtt

SEQ ID NO: 1441116 - DNA, 15 bp, Homo sapiens
cataaaaataagtta

SEQ ID NO: 1441117 - DNA, 15 bp, Homo sapiens
ataaaaataagttat

SEQ ID NO: 1441118 - DNA, 15 bp, Homo sapiens
taaaaataagttata

SEQ ID NO: 1441119 - DNA, 15 bp, Homo sapiens
aaaaataagttataa

SEQ ID NO: 1441120 - DNA, 15 bp, Homo sapiens
aaaataagttataac

SEQ ID NO: 1441121 - DNA, 15 bp, Homo sapiens
aaataagttataacg

SEQ ID NO: 1441122 - DNA, 15 bp, Homo sapiens
aataagttataacga

SEQ ID NO: 1441123 - DNA, 15 bp, Homo sapiens
ataagttataacgaa

SEQ ID NO: 1441124 - DNA, 15 bp, Homo sapiens
taagttataacgaat

SEQ ID NO: 1441125 - DNA, 15 bp, Homo sapiens
aagttataacgaatg

SEQ ID NO: 1441126 - DNA, 15 bp, Homo sapiens
agttataacgaatga

SEQ ID NO: 1441127 - DNA, 15 bp, Homo sapiens
gttataacgaatgaa

SEQ ID NO: 1441128 - DNA, 15 bp, Homo sapiens
ttataacgaatgaaa

SEQ ID NO: 1441129 - DNA, 15 bp, Homo sapiens
tataacgaatgaaaa

SEQ ID NO: 1441130 - DNA, 15 bp, Homo sapiens
ataacgaatgaaaaa

SEQ ID NO: 1441131 - DNA, 15 bp, Homo sapiens
taacgaatgaaaaaa

SEQ ID NO: 1441132 - DNA, 15 bp, Homo sapiens
aacgaatgaaaaaaa

SEQ ID NO: 1441133 - DNA, 15 bp, Homo sapiens
acgaatgaaaaaaaa

SEQ ID NO: 1441134 - DNA, 15 bp, Homo sapiens
cgaatgaaaaaaaaa

SEQ ID NO: 1441135 - DNA, 15 bp, Homo sapiens
gaatgaaaaaaaaaa

SEQ ID NO: 1441136 - DNA, 15 bp, Homo sapiens
aatgaaaaaaaaaac

SEQ ID NO: 1441137 - DNA, 15 bp, Homo sapiens
atgaaaaaaaaaaca

SEQ ID NO: 1441138 - DNA, 15 bp, Homo sapiens
tgaaaaaaaaaacag

SEQ ID NO: 1441139 - DNA, 15 bp, Homo sapiens
gaaaaaaaaaacaga

SEQ ID NO: 1441140 - DNA, 15 bp, Homo sapiens
aaaaaaaaaacagaa

SEQ ID NO: 1441141 - DNA, 15 bp, Homo sapiens
aaaaaaaaacagaag

SEQ ID NO: 1441142 - DNA, 15 bp, Homo sapiens
aaaaaaaacagaaga

SEQ ID NO: 1441143 - DNA, 15 bp, Homo sapiens
aaaaaaacagaagaa

SEQ ID NO: 1441144 - DNA, 15 bp, Homo sapiens
aaaaaacagaagaaa

SEQ ID NO: 1441145 - DNA, 15 bp, Homo sapiens
aaaaacagaagaaaa

SEQ ID NO: 1441146 - DNA, 15 bp, Homo sapiens
aaaacagaagaaaag

SEQ ID NO: 1441147 - DNA, 15 bp, Homo sapiens
aaacagaagaaaagg

SEQ ID NO: 1441148 - DNA, 15 bp, Homo sapiens
aacagaagaaaaggt

SEQ ID NO: 1441149 - DNA, 15 bp, Homo sapiens
acagaagaaaaggtg

SEQ ID NO: 1441150 - DNA, 15 bp, Homo sapiens
cagaagaaaaggtgt

SEQ ID NO: 1441151 - DNA, 15 bp, Homo sapiens
agaagaaaaggtgtt

SEQ ID NO: 1441152 - DNA, 15 bp, Homo sapiens
gaagaaaaggtgtta

SEQ ID NO: 1441153 - DNA, 15 bp, Homo sapiens
aagaaaaggtgttag

SEQ ID NO: 1441154 - DNA, 15 bp, Homo sapiens
agaaaaggtgttaga

SEQ ID NO: 1441155 - DNA, 15 bp, Homo sapiens
gaaaaggtgttagag

SEQ ID NO: 1441156 - DNA, 15 bp, Homo sapiens
aaaaggtgttagaga

SEQ ID NO: 1441157 - DNA, 15 bp, Homo sapiens
aaaggtgttagagaa

SEQ ID NO: 1441158 - DNA, 15 bp, Homo sapiens
aaggtgttagagaaa

SEQ ID NO: 1441159 - DNA, 15 bp, Homo sapiens
aggtgttagagaaaa

SEQ ID NO: 1441160 - DNA, 15 bp, Homo sapiens
ggtgttagagaaaac

SEQ ID NO: 1441161 - DNA, 15 bp, Homo sapiens
gtgttagagaaaaca

SEQ ID NO: 1441162 - DNA, 15 bp, Homo sapiens
tgttagagaaaacag

SEQ ID NO: 1441163 - DNA, 15 bp, Homo sapiens
gttagagaaaacaga

SEQ ID NO: 1441164 - DNA, 15 bp, Homo sapiens
ttagagaaaacagac

SEQ ID NO: 1441165 - DNA, 15 bp, Homo sapiens
tagagaaaacagact

SEQ ID NO: 1441166 - DNA, 15 bp, Homo sapiens
agagaaaacagactt

SEQ ID NO: 1441167 - DNA, 15 bp, Homo sapiens
gagaaaacagacttc

SEQ ID NO: 1441168 - DNA, 15 bp, Homo sapiens
agaaaacagacttct

SEQ ID NO: 1441169 - DNA, 15 bp, Homo sapiens
gaaaacagacttcta

SEQ ID NO: 1441170 - DNA, 15 bp, Homo sapiens
aaaacagacttctat

SEQ ID NO: 1441171 - DNA, 15 bp, Homo sapiens
aaacagacttctatt

SEQ ID NO: 1441172 - DNA, 15 bp, Homo sapiens
aacagacttctatta

SEQ ID NO: 1441173 - DNA, 15 bp, Homo sapiens
acagacttctattat

SEQ ID NO: 1441174 - DNA, 15 bp, Homo sapiens
cagacttctattatg

SEQ ID NO: 1441175 - DNA, 15 bp, Homo sapiens
agacttctattatga

SEQ ID NO: 1441176 - DNA, 15 bp, Homo sapiens
gacttctattatgaa

SEQ ID NO: 1441177 - DNA, 15 bp, Homo sapiens
acttctattatgaaa

SEQ ID NO: 1441178 - DNA, 15 bp, Homo sapiens
cttctattatgaaaa

SEQ ID NO: 1441179 - DNA, 15 bp, Homo sapiens
ttctattatgaaaac

SEQ ID NO: 1441180 - DNA, 15 bp, Homo sapiens
tctattatgaaaaca

SEQ ID NO: 1441181 - DNA, 15 bp, Homo sapiens
ctattatgaaaacaa

SEQ ID NO: 1441182 - DNA, 15 bp, Homo sapiens
tattatgaaaacaaa

SEQ ID NO: 1441183 - DNA, 15 bp, Homo sapiens
attatgaaaacaaac

SEQ ID NO: 1441184 - DNA, 15 bp, Homo sapiens
ttatgaaaacaaaca

SEQ ID NO: 1441185 - DNA, 15 bp, Homo sapiens
tatgaaaacaaacac

SEQ ID NO: 1441186 - DNA, 15 bp, Homo sapiens
atgaaaacaaacacg

SEQ ID NO: 1441187 - DNA, 15 bp, Homo sapiens
tgaaaacaaacacgc

SEQ ID NO: 1441188 - DNA, 15 bp, Homo sapiens
gaaaacaaacacgca

SEQ ID NO: 1441189 - DNA, 15 bp, Homo sapiens
aaaacaaacacgcag

SEQ ID NO: 1441190 - DNA, 15 bp, Homo sapiens
aaacaaacacgcagt

SEQ ID NO: 1441191 - DNA, 15 bp, Homo sapiens
aacaaacacgcagta

SEQ ID NO: 1441192 - DNA, 15 bp, Homo sapiens
acaaacacgcagtag

SEQ ID NO: 1441193 - DNA, 15 bp, Homo sapiens
caaacacgcagtagt

SEQ ID NO: 1441194 - DNA, 15 bp, Homo sapiens
aaacacgcagtagtc

SEQ ID NO: 1441195 - DNA, 15 bp, Homo sapiens
aacacgcagtagtca

SEQ ID NO: 1441196 - DNA, 15 bp, Homo sapiens
acacgcagtagtcag

SEQ ID NO: 1441197 - DNA, 15 bp, Homo sapiens
cacgcagtagtcagc

SEQ ID NO: 1441198 - DNA, 15 bp, Homo sapiens
acgcagtagtcagca

SEQ ID NO: 1441199 - DNA, 15 bp, Homo sapiens
cgcagtagtcagcat

SEQ ID NO: 1441200 - DNA, 15 bp, Homo sapiens
gcagtagtcagcata

SEQ ID NO: 1441201 - DNA, 15 bp, Homo sapiens
cagtagtcagcatag

SEQ ID NO: 1441202 - DNA, 15 bp, Homo sapiens
agtagtcagcatagt

SEQ ID NO: 1441203 - DNA, 15 bp, Homo sapiens
gtagtcagcatagtg

SEQ ID NO: 1441204 - DNA, 15 bp, Homo sapiens
tagtcagcatagtgt

SEQ ID NO: 1441205 - DNA, 15 bp, Homo sapiens
agtcagcatagtgta

SEQ ID NO: 1441206 - DNA, 15 bp, Homo sapiens
gtcagcatagtgtat

SEQ ID NO: 1441207 - DNA, 15 bp, Homo sapiens
tcagcatagtgtatg

SEQ ID NO: 1441208 - DNA, 15 bp, Homo sapiens
cagcatagtgtatga

SEQ ID NO: 1441209 - DNA, 15 bp, Homo sapiens
agcatagtgtatgac

SEQ ID NO: 1441210 - DNA, 15 bp, Homo sapiens
gcatagtgtatgaca

SEQ ID NO: 1441211 - DNA, 15 bp, Homo sapiens
catagtgtatgacat

SEQ ID NO: 1441212 - DNA, 15 bp, Homo sapiens
atagtgtatgacata

SEQ ID NO: 1441213 - DNA, 15 bp, Homo sapiens
tagtgtatgacataa

SEQ ID NO: 1441214 - DNA, 15 bp, Homo sapiens
agtgtatgacataac

SEQ ID NO: 1441215 - DNA, 15 bp, Homo sapiens
gtgtatgacataaca

SEQ ID NO: 1441216 - DNA, 15 bp, Homo sapiens
tgtatgacataacat

SEQ ID NO: 1441217 - DNA, 15 bp, Homo sapiens
gtatgacataacatg

SEQ ID NO: 1441218 - DNA, 15 bp, Homo sapiens
tatgacataacatgt

SEQ ID NO: 1441219 - DNA, 15 bp, Homo sapiens
atgacataacatgtg

SEQ ID NO: 1441220 - DNA, 15 bp, Homo sapiens
tgacataacatgtgc

SEQ ID NO: 1441221 - DNA, 15 bp, Homo sapiens
gacataacatgtgct

SEQ ID NO: 1441222 - DNA, 15 bp, Homo sapiens
acataacatgtgctc

SEQ ID NO: 1441223 - DNA, 15 bp, Homo sapiens
cataacatgtgctca

SEQ ID NO: 1441224 - DNA, 15 bp, Homo sapiens
ataacatgtgctcag

SEQ ID NO: 1441225 - DNA, 15 bp, Homo sapiens
taacatgtgctcagt

SEQ ID NO: 1441226 - DNA, 15 bp, Homo sapiens
aacatgtgctcagta

SEQ ID NO: 1441227 - DNA, 15 bp, Homo sapiens
acatgtgctcagtaa

SEQ ID NO: 1441228 - DNA, 15 bp, Homo sapiens
catgtgctcagtaac

SEQ ID NO: 1441229 - DNA, 15 bp, Homo sapiens
atgtgctcagtaact

SEQ ID NO: 1441230 - DNA, 15 bp, Homo sapiens
tgtgctcagtaacta

SEQ ID NO: 1441231 - DNA, 15 bp, Homo sapiens
gtgctcagtaactat

SEQ ID NO: 1441232 - DNA, 15 bp, Homo sapiens
tgctcagtaactatt

SEQ ID NO: 1441233 - DNA, 15 bp, Homo sapiens
gctcagtaactatta

SEQ ID NO: 1441234 - DNA, 15 bp, Homo sapiens
ctcagtaactattaa

SEQ ID NO: 1441235 - DNA, 15 bp, Homo sapiens
tcagtaactattaaa

SEQ ID NO: 1441236 - DNA, 15 bp, Homo sapiens
cagtaactattaaat

SEQ ID NO: 1441237 - DNA, 15 bp, Homo sapiens
agtaactattaaatt

SEQ ID NO: 1441238 - DNA, 15 bp, Homo sapiens
gtaactattaaattt

SEQ ID NO: 1441239 - DNA, 15 bp, Homo sapiens
taactattaaatttc

SEQ ID NO: 1441240 - DNA, 15 bp, Homo sapiens
aactattaaatttca

SEQ ID NO: 1441241 - DNA, 15 bp, Homo sapiens
actattaaatttcat

SEQ ID NO: 1441242 - DNA, 15 bp, Homo sapiens
ctattaaatttcatt

SEQ ID NO: 1441243 - DNA, 15 bp, Homo sapiens
tattaaatttcattc

SEQ ID NO: 1441244 - DNA, 15 bp, Homo sapiens
attaaatttcattcc

SEQ ID NO: 1441245 - DNA, 15 bp, Homo sapiens
ttaaatttcattcct

SEQ ID NO: 1441246 - DNA, 15 bp, Homo sapiens
taaatttcattccta

SEQ ID NO: 1441247 - DNA, 15 bp, Homo sapiens
aaatttcattcctac

SEQ ID NO: 1441248 - DNA, 15 bp, Homo sapiens
aatttcattcctacc

SEQ ID NO: 1441249 - DNA, 15 bp, Homo sapiens
atttcattcctacca

SEQ ID NO: 1441250 - DNA, 15 bp, Homo sapiens
tttcattcctaccat

SEQ ID NO: 1441251 - DNA, 15 bp, Homo sapiens
ttcattcctaccatt

SEQ ID NO: 1441252 - DNA, 15 bp, Homo sapiens
tcattcctaccattg

SEQ ID NO: 1441253 - DNA, 15 bp, Homo sapiens
cattcctaccattgt

SEQ ID NO: 1441254 - DNA, 15 bp, Homo sapiens
attcctaccattgtc

SEQ ID NO: 1441255 - DNA, 15 bp, Homo sapiens
ttcctaccattgtca

SEQ ID NO: 1441256 - DNA, 15 bp, Homo sapiens
tcctaccattgtcag

SEQ ID NO: 1441257 - DNA, 15 bp, Homo sapiens
cctaccattgtcaga

SEQ ID NO: 1441258 - DNA, 15 bp, Homo sapiens
ctaccattgtcagag

SEQ ID NO: 1441259 - DNA, 15 bp, Homo sapiens
taccattgtcagagg

SEQ ID NO: 1441260 - DNA, 15 bp, Homo sapiens
accattgtcagaggt

SEQ ID NO: 1441261 - DNA, 15 bp, Homo sapiens
ccattgtcagaggta

SEQ ID NO: 1441262 - DNA, 15 bp, Homo sapiens
cattgtcagaggtat

SEQ ID NO: 1441263 - DNA, 15 bp, Homo sapiens
attgtcagaggtatt

SEQ ID NO: 1441264 - DNA, 15 bp, Homo sapiens
ttgtcagaggtattt

SEQ ID NO: 1441265 - DNA, 15 bp, Homo sapiens
tgtcagaggtatttg

SEQ ID NO: 1441266 - DNA, 15 bp, Homo sapiens
gtcagaggtatttga

SEQ ID NO: 1441267 - DNA, 15 bp, Homo sapiens
tcagaggtatttgaa

SEQ ID NO: 1441268 - DNA, 15 bp, Homo sapiens
cagaggtatttgaat

SEQ ID NO: 1441269 - DNA, 15 bp, Homo sapiens
agaggtatttgaatc

SEQ ID NO: 1441270 - DNA, 15 bp, Homo sapiens
gaggtatttgaatca

SEQ ID NO: 1441271 - DNA, 15 bp, Homo sapiens
aggtatttgaatcac

SEQ ID NO: 1441272 - DNA, 15 bp, Homo sapiens
ggtatttgaatcaca

SEQ ID NO: 1441273 - DNA, 15 bp, Homo sapiens
gtatttgaatcacaa

SEQ ID NO: 1441274 - DNA, 15 bp, Homo sapiens
tatttgaatcacaac

SEQ ID NO: 1441275 - DNA, 15 bp, Homo sapiens
atttgaatcacaaca

SEQ ID NO: 1441276 - DNA, 15 bp, Homo sapiens
tttgaatcacaacaa

SEQ ID NO: 1441277 - DNA, 15 bp, Homo sapiens
ttgaatcacaacaac

SEQ ID NO: 1441278 - DNA, 15 bp, Homo sapiens
tgaatcacaacaact

SEQ ID NO: 1441279 - DNA, 15 bp, Homo sapiens
gaatcacaacaactc

SEQ ID NO: 1441280 - DNA, 15 bp, Homo sapiens
aatcacaacaactcc

SEQ ID NO: 1441281 - DNA, 15 bp, Homo sapiens
atcacaacaactcca

SEQ ID NO: 1441282 - DNA, 15 bp, Homo sapiens
tcacaacaactccat

SEQ ID NO: 1441283 - DNA, 15 bp, Homo sapiens
cacaacaactccatc

SEQ ID NO: 1441284 - DNA, 15 bp, Homo sapiens
acaacaactccatct

SEQ ID NO: 1441285 - DNA, 15 bp, Homo sapiens
caacaactccatctt

SEQ ID NO: 1441286 - DNA, 15 bp, Homo sapiens
aacaactccatcttg

SEQ ID NO: 1441287 - DNA, 15 bp, Homo sapiens
acaactccatcttga

SEQ ID NO: 1441288 - DNA, 15 bp, Homo sapiens
caactccatcttgaa

SEQ ID NO: 1441289 - DNA, 15 bp, Homo sapiens
aactccatcttgaat

SEQ ID NO: 1441290 - DNA, 15 bp, Homo sapiens
actccatcttgaata

SEQ ID NO: 1441291 - DNA, 15 bp, Homo sapiens
ctccatcttgaatag

SEQ ID NO: 1441292 - DNA, 15 bp, Homo sapiens
tccatcttgaatagg

SEQ ID NO: 1441293 - DNA, 15 bp, Homo sapiens
ccatcttgaataggg

SEQ ID NO: 1441294 - DNA, 15 bp, Homo sapiens
catcttgaatagggg

SEQ ID NO: 1441295 - DNA, 15 bp, Homo sapiens
atcttgaataggggc

SEQ ID NO: 1441296 - DNA, 15 bp, Homo sapiens
tcttgaataggggct

SEQ ID NO: 1441297 - DNA, 15 bp, Homo sapiens
cttgaataggggctg

SEQ ID NO: 1441298 - DNA, 15 bp, Homo sapiens
ttgaataggggctgg

SEQ ID NO: 1441299 - DNA, 15 bp, Homo sapiens
tgaataggggctggg

SEQ ID NO: 1441300 - DNA, 15 bp, Homo sapiens
gaataggggctgggt

SEQ ID NO: 1441301 - DNA, 15 bp, Homo sapiens
aataggggctgggta

SEQ ID NO: 1441302 - DNA, 15 bp, Homo sapiens
ataggggctgggtaa

SEQ ID NO: 1441303 - DNA, 15 bp, Homo sapiens
taggggctgggtaaa

SEQ ID NO: 1441304 - DNA, 15 bp, Homo sapiens
aggggctgggtaaaa

SEQ ID NO: 1441305 - DNA, 15 bp, Homo sapiens
ggggctgggtaaaat

SEQ ID NO: 1441306 - DNA, 15 bp, Homo sapiens
gggctgggtaaaata

SEQ ID NO: 1441307 - DNA, 15 bp, Homo sapiens
ggctgggtaaaataa

SEQ ID NO: 1441308 - DNA, 15 bp, Homo sapiens
gctgggtaaaataag

SEQ ID NO: 1441309 - DNA, 15 bp, Homo sapiens
ctgggtaaaataagg

SEQ ID NO: 1441310 - DNA, 15 bp, Homo sapiens
tgggtaaaataaggg

SEQ ID NO: 1441311 - DNA, 15 bp, Homo sapiens
gggtaaaataagggt

SEQ ID NO: 1441312 - DNA, 15 bp, Homo sapiens
ggtaaaataagggtg

SEQ ID NO: 1441313 - DNA, 15 bp, Homo sapiens
gtaaaataagggtga

SEQ ID NO: 1441314 - DNA, 15 bp, Homo sapiens
taaaataagggtgag

SEQ ID NO: 1441315 - DNA, 15 bp, Homo sapiens
aaaataagggtgaga

SEQ ID NO: 1441316 - DNA, 15 bp, Homo sapiens
aaataagggtgagac

SEQ ID NO: 1441317 - DNA, 15 bp, Homo sapiens
aataagggtgagacc

SEQ ID NO: 1441318 - DNA, 15 bp, Homo sapiens
ataagggtgagacct

SEQ ID NO: 1441319 - DNA, 15 bp, Homo sapiens
taagggtgagaccta

SEQ ID NO: 1441320 - DNA, 15 bp, Homo sapiens
aagggtgagacctac

SEQ ID NO: 1441321 - DNA, 15 bp, Homo sapiens
agggtgagacctact

SEQ ID NO: 1441322 - DNA, 15 bp, Homo sapiens
gggtgagacctactg

SEQ ID NO: 1441323 - DNA, 15 bp, Homo sapiens
ggtgagacctactgg

SEQ ID NO: 1441324 - DNA, 15 bp, Homo sapiens
gtgagacctactggg

SEQ ID NO: 1441325 - DNA, 15 bp, Homo sapiens
tgagacctactgggc

SEQ ID NO: 1441326 - DNA, 15 bp, Homo sapiens
gagacctactgggct

SEQ ID NO: 1441327 - DNA, 15 bp, Homo sapiens
agacctactgggctg

SEQ ID NO: 1441328 - DNA, 15 bp, Homo sapiens
gacctactgggctgc

SEQ ID NO: 1441329 - DNA, 15 bp, Homo sapiens
acctactgggctgca

SEQ ID NO: 1441330 - DNA, 15 bp, Homo sapiens
cctactgggctgcat

SEQ ID NO: 1441331 - DNA, 15 bp, Homo sapiens
ctactgggctgcatt

SEQ ID NO: 1441332 - DNA, 15 bp, Homo sapiens
tactgggctgcattc

SEQ ID NO: 1441333 - DNA, 15 bp, Homo sapiens
actgggctgcattct

SEQ ID NO: 1441334 - DNA, 15 bp, Homo sapiens
ctgggctgcattctc

SEQ ID NO: 1441335 - DNA, 15 bp, Homo sapiens
tgggctgcattctca

SEQ ID NO: 1441336 - DNA, 15 bp, Homo sapiens
gggctgcattctcag

SEQ ID NO: 1441337 - DNA, 15 bp, Homo sapiens
ggctgcattctcagg

SEQ ID NO: 1441338 - DNA, 15 bp, Homo sapiens
gctgcattctcagga

SEQ ID NO: 1441339 - DNA, 15 bp, Homo sapiens
ctgcattctcaggat

SEQ ID NO: 1441340 - DNA, 15 bp, Homo sapiens
tgcattctcaggatg

SEQ ID NO: 1441341 - DNA, 15 bp, Homo sapiens
gcattctcaggatgt

SEQ ID NO: 1441342 - DNA, 15 bp, Homo sapiens
cattctcaggatgtc

SEQ ID NO: 1441343 - DNA, 15 bp, Homo sapiens
attctcaggatgtct

SEQ ID NO: 1441344 - DNA, 15 bp, Homo sapiens
tctcaggatgtctgt

SEQ ID NO: 1441345 - DNA, 15 bp, Homo sapiens
ctcaggatgtctgtc

SEQ ID NO: 1441346 - DNA, 15 bp, Homo sapiens
tcaggatgtctgtca

SEQ ID NO: 1441347 - DNA, 15 bp, Homo sapiens
caggatgtctgtcag

SEQ ID NO: 1441348 - DNA, 15 bp, Homo sapiens
aggatgtctgtcagt

SEQ ID NO: 1441349 - DNA, 15 bp, Homo sapiens
ggatgtctgtcagtc

SEQ ID NO: 1441350 - DNA, 15 bp, Homo sapiens
gatgtctgtcagtca

SEQ ID NO: 1441351 - DNA, 15 bp, Homo sapiens
atgtctgtcagtcat

SEQ ID NO: 1441352 - DNA, 15 bp, Homo sapiens
tgtctgtcagtcatt

SEQ ID NO: 1441353 - DNA, 15 bp, Homo sapiens
gtctgtcagtcattc

SEQ ID NO: 1441354 - DNA, 15 bp, Homo sapiens
tctgtcagtcattct

SEQ ID NO: 1441355 - DNA, 15 bp, Homo sapiens
ctgtcagtcattcta

SEQ ID NO: 1441356 - DNA, 15 bp, Homo sapiens
tgtcagtcattctaa

SEQ ID NO: 1441357 - DNA, 15 bp, Homo sapiens
gtcagtcattctaag

SEQ ID NO: 1441358 - DNA, 15 bp, Homo sapiens
tcagtcattctaagt

SEQ ID NO: 1441359 - DNA, 15 bp, Homo sapiens
cagtcattctaagtc

SEQ ID NO: 1441360 - DNA, 15 bp, Homo sapiens
agtcattctaagtca

SEQ ID NO: 1441361 - DNA, 15 bp, Homo sapiens
gtcattctaagtcac

SEQ ID NO: 1441362 - DNA, 15 bp, Homo sapiens
tcattctaagtcaca

SEQ ID NO: 1441363 - DNA, 15 bp, Homo sapiens
cattctaagtcacag

SEQ ID NO: 1441364 - DNA, 15 bp, Homo sapiens
attctaagtcacagg

SEQ ID NO: 1441365 - DNA, 15 bp, Homo sapiens
ttctaagtcacagga

SEQ ID NO: 1441366 - DNA, 15 bp, Homo sapiens
tctaagtcacaggat

SEQ ID NO: 1441367 - DNA, 15 bp, Homo sapiens
ctaagtcacaggatg

SEQ ID NO: 1441368 - DNA, 15 bp, Homo sapiens
taagtcacaggatga

SEQ ID NO: 1441369 - DNA, 15 bp, Homo sapiens
aagtcacaggatgag

SEQ ID NO: 1441370 - DNA, 15 bp, Homo sapiens
agtcacaggatgaga

SEQ ID NO: 1441371 - DNA, 15 bp, Homo sapiens
gtcacaggatgagat

SEQ ID NO: 1441372 - DNA, 15 bp, Homo sapiens
tcacaggatgagata

SEQ ID NO: 1441373 - DNA, 15 bp, Homo sapiens
cacaggatgagatag

SEQ ID NO: 1441374 - DNA, 15 bp, Homo sapiens
acaggatgagatagg

SEQ ID NO: 1441375 - DNA, 15 bp, Homo sapiens
caggatgagatagga

SEQ ID NO: 1441376 - DNA, 15 bp, Homo sapiens
aggatgagataggag

SEQ ID NO: 1441377 - DNA, 15 bp, Homo sapiens
ggatgagataggagg

SEQ ID NO: 1441378 - DNA, 15 bp, Homo sapiens
gatgagataggaggt

SEQ ID NO: 1441379 - DNA, 15 bp, Homo sapiens
atgagataggaggtg

SEQ ID NO: 1441380 - DNA, 15 bp, Homo sapiens
tgagataggaggtgg

SEQ ID NO: 1441381 - DNA, 15 bp, Homo sapiens
gagataggaggtggg

SEQ ID NO: 1441382 - DNA, 15 bp, Homo sapiens
agataggaggtgggc

SEQ ID NO: 1441383 - DNA, 15 bp, Homo sapiens
gataggaggtgggca

SEQ ID NO: 1441384 - DNA, 15 bp, Homo sapiens
ataggaggtgggcac

SEQ ID NO: 1441385 - DNA, 15 bp, Homo sapiens
taggaggtgggcaca

SEQ ID NO: 1441386 - DNA, 15 bp, Homo sapiens
aggaggtgggcacaa

SEQ ID NO: 1441387 - DNA, 15 bp, Homo sapiens
ggaggtgggcacaag

SEQ ID NO: 1441388 - DNA, 15 bp, Homo sapiens
gaggtgggcacaaga

SEQ ID NO: 1441389 - DNA, 15 bp, Homo sapiens
aggtgggcacaagat

SEQ ID NO: 1441390 - DNA, 15 bp, Homo sapiens
ggtgggcacaagata

SEQ ID NO: 1441391 - DNA, 15 bp, Homo sapiens
gtgggcacaagatac

SEQ ID NO: 1441392 - DNA, 15 bp, Homo sapiens
tgggcacaagatact

SEQ ID NO: 1441393 - DNA, 15 bp, Homo sapiens
gggcacaagatactg

SEQ ID NO: 1441394 - DNA, 15 bp, Homo sapiens
ggcacaagatactga

SEQ ID NO: 1441395 - DNA, 15 bp, Homo sapiens
gcacaagatactgat

SEQ ID NO: 1441396 - DNA, 15 bp, Homo sapiens
cacaagatactgatc

SEQ ID NO: 1441397 - DNA, 15 bp, Homo sapiens
acaagatactgatca

SEQ ID NO: 1441398 - DNA, 15 bp, Homo sapiens
caagatactgatcat

SEQ ID NO: 1441399 - DNA, 15 bp, Homo sapiens
aagatactgatcata

SEQ ID NO: 1441400 - DNA, 15 bp, Homo sapiens
agatactgatcataa

SEQ ID NO: 1441401 - DNA, 15 bp, Homo sapiens
gatactgatcataaa

SEQ ID NO: 1441402 - DNA, 15 bp, Homo sapiens
atactgatcataaag

SEQ ID NO: 1441403 - DNA, 15 bp, Homo sapiens
tactgatcataaaga

SEQ ID NO: 1441404 - DNA, 15 bp, Homo sapiens
actgatcataaagac

SEQ ID NO: 1441405 - DNA, 15 bp, Homo sapiens
ctgatcataaagact

SEQ ID NO: 1441406 - DNA, 15 bp, Homo sapiens
tgatcataaagactt

SEQ ID NO: 1441407 - DNA, 15 bp, Homo sapiens
gatcataaagacttt

SEQ ID NO: 1441408 - DNA, 15 bp, Homo sapiens
atcataaagactttg

SEQ ID NO: 1441409 - DNA, 15 bp, Homo sapiens
tcataaagactttgc

SEQ ID NO: 1441410 - DNA, 15 bp, Homo sapiens
cataaagactttgct

SEQ ID NO: 1441411 - DNA, 15 bp, Homo sapiens
ataaagactttgctg

SEQ ID NO: 1441412 - DNA, 15 bp, Homo sapiens
taaagactttgctga

SEQ ID NO: 1441413 - DNA, 15 bp, Homo sapiens
aaagactttgctgat

SEQ ID NO: 1441414 - DNA, 15 bp, Homo sapiens
aagactttgctgata

SEQ ID NO: 1441415 - DNA, 15 bp, Homo sapiens
agactttgctgataa

SEQ ID NO: 1441416 - DNA, 15 bp, Homo sapiens
gactttgctgataaa

SEQ ID NO: 1441417 - DNA, 15 bp, Homo sapiens
actttgctgataaaa

SEQ ID NO: 1441418 - DNA, 15 bp, Homo sapiens
ctttgctgataaaac

SEQ ID NO: 1441419 - DNA, 15 bp, Homo sapiens
tttgctgataaaaca

SEQ ID NO: 1441420 - DNA, 15 bp, Homo sapiens
ttgctgataaaacag

SEQ ID NO: 1441421 - DNA, 15 bp, Homo sapiens
tgctgataaaacagc

SEQ ID NO: 1441422 - DNA, 15 bp, Homo sapiens
gctgataaaacagca

SEQ ID NO: 1441423 - DNA, 15 bp, Homo sapiens
ctgataaaacagcat

SEQ ID NO: 1441424 - DNA, 15 bp, Homo sapiens
tgataaaacagcatg

SEQ ID NO: 1441425 - DNA, 15 bp, Homo sapiens
gataaaacagcatgc

SEQ ID NO: 1441426 - DNA, 15 bp, Homo sapiens
ataaaacagcatgca

SEQ ID NO: 1441427 - DNA, 15 bp, Homo sapiens
taaaacagcatgcag

SEQ ID NO: 1441428 - DNA, 15 bp, Homo sapiens
aaaacagcatgcagt

SEQ ID NO: 1441429 - DNA, 15 bp, Homo sapiens
aaacagcatgcagta

SEQ ID NO: 1441430 - DNA, 15 bp, Homo sapiens
aacagcatgcagtaa

SEQ ID NO: 1441431 - DNA, 15 bp, Homo sapiens
acagcatgcagtaaa

SEQ ID NO: 1441432 - DNA, 15 bp, Homo sapiens
cagcatgcagtaaag

SEQ ID NO: 1441433 - DNA, 15 bp, Homo sapiens
agcatgcagtaaaga

SEQ ID NO: 1441434 - DNA, 15 bp, Homo sapiens
gcatgcagtaaagaa

SEQ ID NO: 1441435 - DNA, 15 bp, Homo sapiens
catgcagtaaagaag

SEQ ID NO: 1441436 - DNA, 15 bp, Homo sapiens
atgcagtaaagaagc

SEQ ID NO: 1441437 - DNA, 15 bp, Homo sapiens
tgcagtaaagaagcc

SEQ ID NO: 1441438 - DNA, 15 bp, Homo sapiens
gcagtaaagaagcca

SEQ ID NO: 1441439 - DNA, 15 bp, Homo sapiens
cagtaaagaagccag

SEQ ID NO: 1441440 - DNA, 15 bp, Homo sapiens
agtaaagaagccagc

SEQ ID NO: 1441441 - DNA, 15 bp, Homo sapiens
gtaaagaagccagcc

SEQ ID NO: 1441442 - DNA, 15 bp, Homo sapiens
taaagaagccagcca

SEQ ID NO: 1441443 - DNA, 15 bp, Homo sapiens
aaagaagccagccaa

SEQ ID NO: 1441444 - DNA, 15 bp, Homo sapiens
aagaagccagccaaa

SEQ ID NO: 1441445 - DNA, 15 bp, Homo sapiens
agaagccagccaaat

SEQ ID NO: 1441446 - DNA, 15 bp, Homo sapiens
gaagccagccaaatc

SEQ ID NO: 1441447 - DNA, 15 bp, Homo sapiens
aagccagccaaatcc

SEQ ID NO: 1441448 - DNA, 15 bp, Homo sapiens
agccagccaaatccc

SEQ ID NO: 1441449 - DNA, 15 bp, Homo sapiens
gccagccaaatccca

SEQ ID NO: 1441450 - DNA, 15 bp, Homo sapiens
ccagccaaatcccac

SEQ ID NO: 1441451 - DNA, 15 bp, Homo sapiens
cagccaaatcccacc

SEQ ID NO: 1441452 - DNA, 15 bp, Homo sapiens
agccaaatcccacca

SEQ ID NO: 1441453 - DNA, 15 bp, Homo sapiens
gccaaatcccaccaa

SEQ ID NO: 1441454 - DNA, 15 bp, Homo sapiens
ccaaatcccaccaaa

SEQ ID NO: 1441455 - DNA, 15 bp, Homo sapiens
caaatcccaccaaat

SEQ ID NO: 1441456 - DNA, 15 bp, Homo sapiens
aaatcccaccaaatc

SEQ ID NO: 1441457 - DNA, 15 bp, Homo sapiens
aatcccaccaaatcc

SEQ ID NO: 1441458 - DNA, 15 bp, Homo sapiens
atcccaccaaatcca

SEQ ID NO: 1441459 - DNA, 15 bp, Homo sapiens
tcccaccaaatccaa

SEQ ID NO: 1441460 - DNA, 15 bp, Homo sapiens
cccaccaaatccaag

SEQ ID NO: 1441461 - DNA, 15 bp, Homo sapiens
ccaccaaatccaaga

SEQ ID NO: 1441462 - DNA, 15 bp, Homo sapiens
caccaaatccaagat

SEQ ID NO: 1441463 - DNA, 15 bp, Homo sapiens
accaaatccaagatg

SEQ ID NO: 1441464 - DNA, 15 bp, Homo sapiens
ccaaatccaagatgg

SEQ ID NO: 1441465 - DNA, 15 bp, Homo sapiens
caaatccaagatggc

SEQ ID NO: 1441466 - DNA, 15 bp, Homo sapiens
aaatccaagatggcg

SEQ ID NO: 1441467 - DNA, 15 bp, Homo sapiens
aatccaagatggcga

SEQ ID NO: 1441468 - DNA, 15 bp, Homo sapiens
atccaagatggcgag

SEQ ID NO: 1441469 - DNA, 15 bp, Homo sapiens
tccaagatggcgaga

SEQ ID NO: 1441470 - DNA, 15 bp, Homo sapiens
ccaagatggcgagaa

SEQ ID NO: 1441471 - DNA, 15 bp, Homo sapiens
caagatggcgagaaa

SEQ ID NO: 1441472 - DNA, 15 bp, Homo sapiens
aagatggcgagaaag

SEQ ID NO: 1441473 - DNA, 15 bp, Homo sapiens
agatggcgagaaagg

SEQ ID NO: 1441474 - DNA, 15 bp, Homo sapiens
gatggcgagaaaggt

SEQ ID NO: 1441475 - DNA, 15 bp, Homo sapiens
atggcgagaaaggtg

SEQ ID NO: 1441476 - DNA, 15 bp, Homo sapiens
tggcgagaaaggtgg

SEQ ID NO: 1441477 - DNA, 15 bp, Homo sapiens
ggcgagaaaggtggg

SEQ ID NO: 1441478 - DNA, 15 bp, Homo sapiens
gcgagaaaggtggga

SEQ ID NO: 1441479 - DNA, 15 bp, Homo sapiens
cgagaaaggtgggac

SEQ ID NO: 1441480 - DNA, 15 bp, Homo sapiens
gagaaaggtgggacg

SEQ ID NO: 1441481 - DNA, 15 bp, Homo sapiens
agaaaggtgggacgt

SEQ ID NO: 1441482 - DNA, 15 bp, Homo sapiens
gaaaggtgggacgtc

SEQ ID NO: 1441483 - DNA, 15 bp, Homo sapiens
aaaggtgggacgtct

SEQ ID NO: 1441484 - DNA, 15 bp, Homo sapiens
aaggtgggacgtctg

SEQ ID NO: 1441485 - DNA, 15 bp, Homo sapiens
aggtgggacgtctgc

SEQ ID NO: 1441486 - DNA, 15 bp, Homo sapiens
ggtgggacgtctgct

SEQ ID NO: 1441487 - DNA, 15 bp, Homo sapiens
gtgggacgtctgctc

SEQ ID NO: 1441488 - DNA, 15 bp, Homo sapiens
tgggacgtctgctcg

SEQ ID NO: 1441489 - DNA, 15 bp, Homo sapiens
gggacgtctgctcgt

SEQ ID NO: 1441490 - DNA, 15 bp, Homo sapiens
ggacgtctgctcgtt

SEQ ID NO: 1441491 - DNA, 15 bp, Homo sapiens
gacgtctgctcgttc

SEQ ID NO: 1441492 - DNA, 15 bp, Homo sapiens
acgtctgctcgttct

SEQ ID NO: 1441493 - DNA, 15 bp, Homo sapiens
cgtctgctcgttctc

SEQ ID NO: 1441494 - DNA, 15 bp, Homo sapiens
gtctgctcgttctca

SEQ ID NO: 1441495 - DNA, 15 bp, Homo sapiens
tctgctcgttctcac

SEQ ID NO: 1441496 - DNA, 15 bp, Homo sapiens
ctgctcgttctcact

SEQ ID NO: 1441497 - DNA, 15 bp, Homo sapiens
tgctcgttctcactg

SEQ ID NO: 1441498 - DNA, 15 bp, Homo sapiens
gctcgttctcactgc

SEQ ID NO: 1441499 - DNA, 15 bp, Homo sapiens
ctcgttctcactgct

SEQ ID NO: 1441500 - DNA, 15 bp, Homo sapiens
tcgttctcactgctc

SEQ ID NO: 1441501 - DNA, 15 bp, Homo sapiens
cgttctcactgctca

SEQ ID NO: 1441502 - DNA, 15 bp, Homo sapiens
gttctcactgctcat

SEQ ID NO: 1441503 - DNA, 15 bp, Homo sapiens
ttctcactgctcatt

SEQ ID NO: 1441504 - DNA, 15 bp, Homo sapiens
tctcactgctcatta

SEQ ID NO: 1441505 - DNA, 15 bp, Homo sapiens
ctcactgctcattat

SEQ ID NO: 1441506 - DNA, 15 bp, Homo sapiens
tcactgctcattata

SEQ ID NO: 1441507 - DNA, 15 bp, Homo sapiens
cactgctcattatac

SEQ ID NO: 1441508 - DNA, 15 bp, Homo sapiens
actgctcattataca

SEQ ID NO: 1441509 - DNA, 15 bp, Homo sapiens
ctgctcattatacac

SEQ ID NO: 1441510 - DNA, 15 bp, Homo sapiens
tgctcattatacact

SEQ ID NO: 1441511 - DNA, 15 bp, Homo sapiens
gctcattatacacta

SEQ ID NO: 1441512 - DNA, 15 bp, Homo sapiens
ctcattatacactaa

SEQ ID NO: 1441513 - DNA, 15 bp, Homo sapiens
tcattatacactaat

SEQ ID NO: 1441514 - DNA, 15 bp, Homo sapiens
cattatacactaatt

SEQ ID NO: 1441515 - DNA, 15 bp, Homo sapiens
attatacactaatta

SEQ ID NO: 1441516 - DNA, 15 bp, Homo sapiens
ttatacactaattat

SEQ ID NO: 1441517 - DNA, 15 bp, Homo sapiens
tatacactaattata

SEQ ID NO: 1441518 - DNA, 15 bp, Homo sapiens
atacactaattataa

SEQ ID NO: 1441519 - DNA, 15 bp, Homo sapiens
tacactaattataat

SEQ ID NO: 1441520 - DNA, 15 bp, Homo sapiens
acactaattataatg

SEQ ID NO: 1441521 - DNA, 15 bp, Homo sapiens
cactaattataatgc

SEQ ID NO: 1441522 - DNA, 15 bp, Homo sapiens
actaattataatgca

SEQ ID NO: 1441523 - DNA, 15 bp, Homo sapiens
ctaattataatgcat

SEQ ID NO: 1441524 - DNA, 15 bp, Homo sapiens
attataatgcattag

SEQ ID NO: 1441525 - DNA, 15 bp, Homo sapiens
ttataatgcattagc

SEQ ID NO: 1441526 - DNA, 15 bp, Homo sapiens
tataatgcattagca

SEQ ID NO: 1441527 - DNA, 15 bp, Homo sapiens
ataatgcattagcat

SEQ ID NO: 1441528 - DNA, 15 bp, Homo sapiens
taatgcattagcatc

SEQ ID NO: 1441529 - DNA, 15 bp, Homo sapiens
aatgcattagcatcc

SEQ ID NO: 1441530 - DNA, 15 bp, Homo sapiens
atgcattagcatcct

SEQ ID NO: 1441531 - DNA, 15 bp, Homo sapiens
tgcattagcatccta

SEQ ID NO: 1441532 - DNA, 15 bp, Homo sapiens
gcattagcatcctaa

SEQ ID NO: 1441533 - DNA, 15 bp, Homo sapiens
cattagcatcctaaa

SEQ ID NO: 1441534 - DNA, 15 bp, Homo sapiens
attagcatcctaaaa

SEQ ID NO: 1441535 - DNA, 15 bp, Homo sapiens
ttagcatcctaaaag

SEQ ID NO: 1441536 - DNA, 15 bp, Homo sapiens
tagcatcctaaaaga

SEQ ID NO: 1441537 - DNA, 15 bp, Homo sapiens
agcatcctaaaagac

SEQ ID NO: 1441538 - DNA, 15 bp, Homo sapiens
gcatcctaaaagaca

SEQ ID NO: 1441539 - DNA, 15 bp, Homo sapiens
catcctaaaagacac

SEQ ID NO: 1441540 - DNA, 15 bp, Homo sapiens
atcctaaaagacact

SEQ ID NO: 1441541 - DNA, 15 bp, Homo sapiens
tcctaaaagacactc

SEQ ID NO: 1441542 - DNA, 15 bp, Homo sapiens
cctaaaagacactcc

SEQ ID NO: 1441543 - DNA, 15 bp, Homo sapiens
ctaaaagacactccc

SEQ ID NO: 1441544 - DNA, 15 bp, Homo sapiens
taaaagacactccca

SEQ ID NO: 1441545 - DNA, 15 bp, Homo sapiens
aaaagacactcccac

SEQ ID NO: 1441546 - DNA, 15 bp, Homo sapiens
aaagacactcccacc

SEQ ID NO: 1441547 - DNA, 15 bp, Homo sapiens
aagacactcccacca

SEQ ID NO: 1441548 - DNA, 15 bp, Homo sapiens
agacactcccaccag

SEQ ID NO: 1441549 - DNA, 15 bp, Homo sapiens
gacactcccaccagt

SEQ ID NO: 1441550 - DNA, 15 bp, Homo sapiens
acactcccaccagtg

SEQ ID NO: 1441551 - DNA, 15 bp, Homo sapiens
cactcccaccagtgc

SEQ ID NO: 1441552 - DNA, 15 bp, Homo sapiens
actcccaccagtgct

SEQ ID NO: 1441553 - DNA, 15 bp, Homo sapiens
ctcccaccagtgcta

SEQ ID NO: 1441554 - DNA, 15 bp, Homo sapiens
tcccaccagtgctat

SEQ ID NO: 1441555 - DNA, 15 bp, Homo sapiens
cccaccagtgctatg

SEQ ID NO: 1441556 - DNA, 15 bp, Homo sapiens
ccaccagtgctatga

SEQ ID NO: 1441557 - DNA, 15 bp, Homo sapiens
caccagtgctatgac

SEQ ID NO: 1441558 - DNA, 15 bp, Homo sapiens
accagtgctatgaca

SEQ ID NO: 1441559 - DNA, 15 bp, Homo sapiens
ccagtgctatgacag

SEQ ID NO: 1441560 - DNA, 15 bp, Homo sapiens
cagtgctatgacagt

SEQ ID NO: 1441561 - DNA, 15 bp, Homo sapiens
agtgctatgacagtt

SEQ ID NO: 1441562 - DNA, 15 bp, Homo sapiens
gtgctatgacagttt

SEQ ID NO: 1441563 - DNA, 15 bp, Homo sapiens
tgctatgacagttta

SEQ ID NO: 1441564 - DNA, 15 bp, Homo sapiens
gctatgacagtttac

SEQ ID NO: 1441565 - DNA, 15 bp, Homo sapiens
ctatgacagtttaca

SEQ ID NO: 1441566 - DNA, 15 bp, Homo sapiens
tatgacagtttacag

SEQ ID NO: 1441567 - DNA, 15 bp, Homo sapiens
atgacagtttacaga

SEQ ID NO: 1441568 - DNA, 15 bp, Homo sapiens
tgacagtttacagat

SEQ ID NO: 1441569 - DNA, 15 bp, Homo sapiens
gacagtttacagatg

SEQ ID NO: 1441570 - DNA, 15 bp, Homo sapiens
acagtttacagatgc

SEQ ID NO: 1441571 - DNA, 15 bp, Homo sapiens
cagtttacagatgcc

SEQ ID NO: 1441572 - DNA, 15 bp, Homo sapiens
agtttacagatgcca

SEQ ID NO: 1441573 - DNA, 15 bp, Homo sapiens
gtttacagatgccat

SEQ ID NO: 1441574 - DNA, 15 bp, Homo sapiens
tttacagatgccatg

SEQ ID NO: 1441575 - DNA, 15 bp, Homo sapiens
ttacagatgccatgg

SEQ ID NO: 1441576 - DNA, 15 bp, Homo sapiens
tacagatgccatggc

SEQ ID NO: 1441577 - DNA, 15 bp, Homo sapiens
acagatgccatggca

SEQ ID NO: 1441578 - DNA, 15 bp, Homo sapiens
cagatgccatggcaa

SEQ ID NO: 1441579 - DNA, 15 bp, Homo sapiens
agatgccatggcaat

SEQ ID NO: 1441580 - DNA, 15 bp, Homo sapiens
gatgccatggcaatg

SEQ ID NO: 1441581 - DNA, 15 bp, Homo sapiens
atgccatggcaatgt

SEQ ID NO: 1441582 - DNA, 15 bp, Homo sapiens
tgccatggcaatgtg

SEQ ID NO: 1441583 - DNA, 15 bp, Homo sapiens
gccatggcaatgtga

SEQ ID NO: 1441584 - DNA, 15 bp, Homo sapiens
ccatggcaatgtgaa

SEQ ID NO: 1441585 - DNA, 15 bp, Homo sapiens
catggcaatgtgaag

SEQ ID NO: 1441586 - DNA, 15 bp, Homo sapiens
atggcaatgtgaaga

SEQ ID NO: 1441587 - DNA, 15 bp, Homo sapiens
tggcaatgtgaagaa

SEQ ID NO: 1441588 - DNA, 15 bp, Homo sapiens
ggcaatgtgaagaag

SEQ ID NO: 1441589 - DNA, 15 bp, Homo sapiens
gcaatgtgaagaagt

SEQ ID NO: 1441590 - DNA, 15 bp, Homo sapiens
caatgtgaagaagtt

SEQ ID NO: 1441591 - DNA, 15 bp, Homo sapiens
aatgtgaagaagtta

SEQ ID NO: 1441592 - DNA, 15 bp, Homo sapiens
atgtgaagaagttac

SEQ ID NO: 1441593 - DNA, 15 bp, Homo sapiens
tgtgaagaagttact

SEQ ID NO: 1441594 - DNA, 15 bp, Homo sapiens
gtgaagaagttactc

SEQ ID NO: 1441595 - DNA, 15 bp, Homo sapiens
tgaagaagttactct

SEQ ID NO: 1441596 - DNA, 15 bp, Homo sapiens
gaagaagttactcta

SEQ ID NO: 1441597 - DNA, 15 bp, Homo sapiens
aagaagttactctat

SEQ ID NO: 1441598 - DNA, 15 bp, Homo sapiens
agaagttactctata

SEQ ID NO: 1441599 - DNA, 15 bp, Homo sapiens
gaagttactctatat

SEQ ID NO: 1441600 - DNA, 15 bp, Homo sapiens
aagttactctatata

SEQ ID NO: 1441601 - DNA, 15 bp, Homo sapiens
agttactctatatag

SEQ ID NO: 1441602 - DNA, 15 bp, Homo sapiens
gttactctatatagt

SEQ ID NO: 1441603 - DNA, 15 bp, Homo sapiens
ttactctatatagtc

SEQ ID NO: 1441604 - DNA, 15 bp, Homo sapiens
tactctatatagtct

SEQ ID NO: 1441605 - DNA, 15 bp, Homo sapiens
actctatatagtcta

SEQ ID NO: 1441606 - DNA, 15 bp, Homo sapiens
ctctatatagtctaa

SEQ ID NO: 1441607 - DNA, 15 bp, Homo sapiens
tctatatagtctaaa

SEQ ID NO: 1441608 - DNA, 15 bp, Homo sapiens
ctatatagtctaaaa

SEQ ID NO: 1441609 - DNA, 15 bp, Homo sapiens
tatatagtctaaaaa

SEQ ID NO: 1441610 - DNA, 15 bp, Homo sapiens
atatagtctaaaaag

SEQ ID NO: 1441611 - DNA, 15 bp, Homo sapiens
tatagtctaaaaagg

SEQ ID NO: 1441612 - DNA, 15 bp, Homo sapiens
atagtctaaaaaggg

SEQ ID NO: 1441613 - DNA, 15 bp, Homo sapiens
tagtctaaaaagggg

SEQ ID NO: 1441614 - DNA, 15 bp, Homo sapiens
agtctaaaaagggga

SEQ ID NO: 1441615 - DNA, 15 bp, Homo sapiens
gtctaaaaaggggag

SEQ ID NO: 1441616 - DNA, 15 bp, Homo sapiens
tctaaaaaggggagg

SEQ ID NO: 1441617 - DNA, 15 bp, Homo sapiens
ctaaaaaggggagga

SEQ ID NO: 1441618 - DNA, 15 bp, Homo sapiens
taaaaaggggaggaa

SEQ ID NO: 1441619 - DNA, 15 bp, Homo sapiens
aaaaaggggaggaac

SEQ ID NO: 1441620 - DNA, 15 bp, Homo sapiens
aaaaggggaggaaca

SEQ ID NO: 1441621 - DNA, 15 bp, Homo sapiens
aaaggggaggaacac

SEQ ID NO: 1441622 - DNA, 15 bp, Homo sapiens
aaggggaggaacact

SEQ ID NO: 1441623 - DNA, 15 bp, Homo sapiens
aggggaggaacactc

SEQ ID NO: 1441624 - DNA, 15 bp, Homo sapiens
ggggaggaacactca

SEQ ID NO: 1441625 - DNA, 15 bp, Homo sapiens
gggaggaacactcag

SEQ ID NO: 1441626 - DNA, 15 bp, Homo sapiens
ggaggaacactcaga

SEQ ID NO: 1441627 - DNA, 15 bp, Homo sapiens
gaggaacactcagat

SEQ ID NO: 1441628 - DNA, 15 bp, Homo sapiens
aggaacactcagatc

SEQ ID NO: 1441629 - DNA, 15 bp, Homo sapiens
ggaacactcagatct

SEQ ID NO: 1441630 - DNA, 15 bp, Homo sapiens
gaacactcagatcta

SEQ ID NO: 1441631 - DNA, 15 bp, Homo sapiens
aacactcagatctag

SEQ ID NO: 1441632 - DNA, 15 bp, Homo sapiens
acactcagatctagg

SEQ ID NO: 1441633 - DNA, 15 bp, Homo sapiens
cactcagatctagga

SEQ ID NO: 1441634 - DNA, 15 bp, Homo sapiens
actcagatctaggaa

SEQ ID NO: 1441635 - DNA, 15 bp, Homo sapiens
ctcagatctaggaat

SEQ ID NO: 1441636 - DNA, 15 bp, Homo sapiens
tcagatctaggaatg

SEQ ID NO: 1441637 - DNA, 15 bp, Homo sapiens
cagatctaggaatgg

SEQ ID NO: 1441638 - DNA, 15 bp, Homo sapiens
agatctaggaatggc

SEQ ID NO: 1441639 - DNA, 15 bp, Homo sapiens
gatctaggaatggcc

SEQ ID NO: 1441640 - DNA, 15 bp, Homo sapiens
atctaggaatggcct

SEQ ID NO: 1441641 - DNA, 15 bp, Homo sapiens
tctaggaatggccta

SEQ ID NO: 1441642 - DNA, 15 bp, Homo sapiens
ctaggaatggcctac

SEQ ID NO: 1441643 - DNA, 15 bp, Homo sapiens
taggaatggcctacc

SEQ ID NO: 1441644 - DNA, 15 bp, Homo sapiens
aggaatggcctaccc

SEQ ID NO: 1441645 - DNA, 15 bp, Homo sapiens
ggaatggcctaccct

SEQ ID NO: 1441646 - DNA, 15 bp, Homo sapiens
gaatggcctaccctc

SEQ ID NO: 1441647 - DNA, 15 bp, Homo sapiens
aatggcctaccctct

SEQ ID NO: 1441648 - DNA, 15 bp, Homo sapiens
atggcctaccctctt

SEQ ID NO: 1441649 - DNA, 15 bp, Homo sapiens
tggcctaccctcttc

SEQ ID NO: 1441650 - DNA, 15 bp, Homo sapiens
ggcctaccctcttcc

SEQ ID NO: 1441651 - DNA, 15 bp, Homo sapiens
gcctaccctcttccc

SEQ ID NO: 1441652 - DNA, 15 bp, Homo sapiens
cctaccctcttccca

SEQ ID NO: 1441653 - DNA, 15 bp, Homo sapiens
ctaccctcttcccag

SEQ ID NO: 1441654 - DNA, 15 bp, Homo sapiens
taccctcttcccaga

SEQ ID NO: 1441655 - DNA, 15 bp, Homo sapiens
accctcttcccagaa

SEQ ID NO: 1441656 - DNA, 15 bp, Homo sapiens
ccctcttcccagaaa

SEQ ID NO: 1441657 - DNA, 15 bp, Homo sapiens
cctcttcccagaaaa

SEQ ID NO: 1441658 - DNA, 15 bp, Homo sapiens
ctcttcccagaaaac

SEQ ID NO: 1441659 - DNA, 15 bp, Homo sapiens
tcttcccagaaaact

SEQ ID NO: 1441660 - DNA, 15 bp, Homo sapiens
cttcccagaaaactc

SEQ ID NO: 1441661 - DNA, 15 bp, Homo sapiens
ttcccagaaaactca

SEQ ID NO: 1441662 - DNA, 15 bp, Homo sapiens
tcccagaaaactcat

SEQ ID NO: 1441663 - DNA, 15 bp, Homo sapiens
cccagaaaactcatg

SEQ ID NO: 1441664 - DNA, 15 bp, Homo sapiens
ccagaaaactcatga

SEQ ID NO: 1441665 - DNA, 15 bp, Homo sapiens
cagaaaactcatgaa

SEQ ID NO: 1441666 - DNA, 15 bp, Homo sapiens
agaaaactcatgaat

SEQ ID NO: 1441667 - DNA, 15 bp, Homo sapiens
gaaaactcatgaata

SEQ ID NO: 1441668 - DNA, 15 bp, Homo sapiens
aaaactcatgaataa

SEQ ID NO: 1441669 - DNA, 15 bp, Homo sapiens
aaactcatgaataac

SEQ ID NO: 1441670 - DNA, 15 bp, Homo sapiens
aactcatgaataacc

SEQ ID NO: 1441671 - DNA, 15 bp, Homo sapiens
actcatgaataaccc

SEQ ID NO: 1441672 - DNA, 15 bp, Homo sapiens
ctcatgaataaccca

SEQ ID NO: 1441673 - DNA, 15 bp, Homo sapiens
tcatgaataacccac

SEQ ID NO: 1441674 - DNA, 15 bp, Homo sapiens
catgaataacccacc

SEQ ID NO: 1441675 - DNA, 15 bp, Homo sapiens
atgaataacccaccc

SEQ ID NO: 1441676 - DNA, 15 bp, Homo sapiens
tgaataacccacccc

SEQ ID NO: 1441677 - DNA, 15 bp, Homo sapiens
gaataacccacccct

SEQ ID NO: 1441678 - DNA, 15 bp, Homo sapiens
aataacccacccctt

SEQ ID NO: 1441679 - DNA, 15 bp, Homo sapiens
ataacccaccccttg

SEQ ID NO: 1441680 - DNA, 15 bp, Homo sapiens
taacccaccccttgt

SEQ ID NO: 1441681 - DNA, 15 bp, Homo sapiens
aacccaccccttgtt

SEQ ID NO: 1441682 - DNA, 15 bp, Homo sapiens
acccaccccttgttt

SEQ ID NO: 1441683 - DNA, 15 bp, Homo sapiens
cccaccccttgttta

SEQ ID NO: 1441684 - DNA, 15 bp, Homo sapiens
ccaccccttgtttag

SEQ ID NO: 1441685 - DNA, 15 bp, Homo sapiens
caccccttgtttagc

SEQ ID NO: 1441686 - DNA, 15 bp, Homo sapiens
accccttgtttagca

SEQ ID NO: 1441687 - DNA, 15 bp, Homo sapiens
ccccttgtttagcat

SEQ ID NO: 1441688 - DNA, 15 bp, Homo sapiens
cccttgtttagcata

SEQ ID NO: 1441689 - DNA, 15 bp, Homo sapiens
ccttgtttagcatat

SEQ ID NO: 1441690 - DNA, 15 bp, Homo sapiens
cttgtttagcatata

SEQ ID NO: 1441691 - DNA, 15 bp, Homo sapiens
ttgtttagcatataa

SEQ ID NO: 1441692 - DNA, 15 bp, Homo sapiens
tgtttagcatataat

SEQ ID NO: 1441693 - DNA, 15 bp, Homo sapiens
gtttagcatataatc

SEQ ID NO: 1441694 - DNA, 15 bp, Homo sapiens
tttagcatataatca

SEQ ID NO: 1441695 - DNA, 15 bp, Homo sapiens
ttagcatataatcaa

SEQ ID NO: 1441696 - DNA, 15 bp, Homo sapiens
tagcatataatcaag

SEQ ID NO: 1441697 - DNA, 15 bp, Homo sapiens
agcatataatcaaga

SEQ ID NO: 1441698 - DNA, 15 bp, Homo sapiens
gcatataatcaagaa

SEQ ID NO: 1441699 - DNA, 15 bp, Homo sapiens
catataatcaagaaa

SEQ ID NO: 1441700 - DNA, 15 bp, Homo sapiens
atataatcaagaaat

SEQ ID NO: 1441701 - DNA, 15 bp, Homo sapiens
tataatcaagaaata

SEQ ID NO: 1441702 - DNA, 15 bp, Homo sapiens
ataatcaagaaataa

SEQ ID NO: 1441703 - DNA, 15 bp, Homo sapiens
taatcaagaaataac

SEQ ID NO: 1441704 - DNA, 15 bp, Homo sapiens
aatcaagaaataact

SEQ ID NO: 1441705 - DNA, 15 bp, Homo sapiens
atcaagaaataacta

SEQ ID NO: 1441706 - DNA, 15 bp, Homo sapiens
tcaagaaataactat

SEQ ID NO: 1441707 - DNA, 15 bp, Homo sapiens
caagaaataactata

SEQ ID NO: 1441708 - DNA, 15 bp, Homo sapiens
aagaaataactataa

SEQ ID NO: 1441709 - DNA, 15 bp, Homo sapiens
agaaataactataac

SEQ ID NO: 1441710 - DNA, 15 bp, Homo sapiens
gaaataactataaca

SEQ ID NO: 1441711 - DNA, 15 bp, Homo sapiens
aaataactataacaa

SEQ ID NO: 1441712 - DNA, 15 bp, Homo sapiens
aataactataacaat

SEQ ID NO: 1441713 - DNA, 15 bp, Homo sapiens
ataactataacaatc

SEQ ID NO: 1441714 - DNA, 15 bp, Homo sapiens
taactataacaatcc

SEQ ID NO: 1441715 - DNA, 15 bp, Homo sapiens
aactataacaatcct

SEQ ID NO: 1441716 - DNA, 15 bp, Homo sapiens
actataacaatcctt

SEQ ID NO: 1441717 - DNA, 15 bp, Homo sapiens
ctataacaatcctta

SEQ ID NO: 1441718 - DNA, 15 bp, Homo sapiens
tataacaatccttag

SEQ ID NO: 1441719 - DNA, 15 bp, Homo sapiens
ataacaatccttagt

SEQ ID NO: 1441720 - DNA, 15 bp, Homo sapiens
taacaatccttagtc

SEQ ID NO: 1441721 - DNA, 15 bp, Homo sapiens
aacaatccttagtct

SEQ ID NO: 1441722 - DNA, 15 bp, Homo sapiens
acaatccttagtcta

SEQ ID NO: 1441723 - DNA, 15 bp, Homo sapiens
caatccttagtctac

SEQ ID NO: 1441724 - DNA, 15 bp, Homo sapiens
aatccttagtctacc

SEQ ID NO: 1441725 - DNA, 15 bp, Homo sapiens
atccttagtctacca

SEQ ID NO: 1441726 - DNA, 15 bp, Homo sapiens
tccttagtctaccac

SEQ ID NO: 1441727 - DNA, 15 bp, Homo sapiens
ccttagtctaccacc

SEQ ID NO: 1441728 - DNA, 15 bp, Homo sapiens
cttagtctaccacct

SEQ ID NO: 1441729 - DNA, 15 bp, Homo sapiens
ttagtctaccacctc

SEQ ID NO: 1441730 - DNA, 15 bp, Homo sapiens
tagtctaccacctcc

SEQ ID NO: 1441731 - DNA, 15 bp, Homo sapiens
agtctaccacctcca

SEQ ID NO: 1441732 - DNA, 15 bp, Homo sapiens
gtctaccacctccaa

SEQ ID NO: 1441733 - DNA, 15 bp, Homo sapiens
tctaccacctccaat

SEQ ID NO: 1441734 - DNA, 15 bp, Homo sapiens
ctaccacctccaatg

SEQ ID NO: 1441735 - DNA, 15 bp, Homo sapiens
taccacctccaatgg

SEQ ID NO: 1441736 - DNA, 15 bp, Homo sapiens
accacctccaatggg

SEQ ID NO: 1441737 - DNA, 15 bp, Homo sapiens
ccacctccaatgggg

SEQ ID NO: 1441738 - DNA, 15 bp, Homo sapiens
cacctccaatggggg

SEQ ID NO: 1441739 - DNA, 15 bp, Homo sapiens
acctccaatgggggt

SEQ ID NO: 1441740 - DNA, 15 bp, Homo sapiens
cctccaatgggggtg

SEQ ID NO: 1441741 - DNA, 15 bp, Homo sapiens
ctccaatgggggtgt

SEQ ID NO: 1441742 - DNA, 15 bp, Homo sapiens
tccaatgggggtgta

SEQ ID NO: 1441743 - DNA, 15 bp, Homo sapiens
ccaatgggggtgtat

SEQ ID NO: 1441744 - DNA, 15 bp, Homo sapiens
caatgggggtgtatg

SEQ ID NO: 1441745 - DNA, 15 bp, Homo sapiens
aatgggggtgtatgc

SEQ ID NO: 1441746 - DNA, 15 bp, Homo sapiens
atgggggtgtatgca

SEQ ID NO: 1441747 - DNA, 15 bp, Homo sapiens
tgggggtgtatgcac

SEQ ID NO: 1441748 - DNA, 15 bp, Homo sapiens
gggggtgtatgcacc

SEQ ID NO: 1441749 - DNA, 15 bp, Homo sapiens
ggggtgtatgcacct

SEQ ID NO: 1441750 - DNA, 15 bp, Homo sapiens
gggtgtatgcacctc

SEQ ID NO: 1441751 - DNA, 15 bp, Homo sapiens
ggtgtatgcacctcc

SEQ ID NO: 1441752 - DNA, 15 bp, Homo sapiens
gtgtatgcacctcca

SEQ ID NO: 1441753 - DNA, 15 bp, Homo sapiens
tgtatgcacctccaa

SEQ ID NO: 1441754 - DNA, 15 bp, Homo sapiens
gtatgcacctccaat

SEQ ID NO: 1441755 - DNA, 15 bp, Homo sapiens
tatgcacctccaatt

SEQ ID NO: 1441756 - DNA, 15 bp, Homo sapiens
atgcacctccaattc

SEQ ID NO: 1441757 - DNA, 15 bp, Homo sapiens
tgcacctccaattct

SEQ ID NO: 1441758 - DNA, 15 bp, Homo sapiens
gcacctccaattctt

SEQ ID NO: 1441759 - DNA, 15 bp, Homo sapiens
cacctccaattcttt

SEQ ID NO: 1441760 - DNA, 15 bp, Homo sapiens
acctccaattctttc

SEQ ID NO: 1441761 - DNA, 15 bp, Homo sapiens
cctccaattctttct

SEQ ID NO: 1441762 - DNA, 15 bp, Homo sapiens
ctccaattctttctt

SEQ ID NO: 1441763 - DNA, 15 bp, Homo sapiens
tccaattctttcttg

SEQ ID NO: 1441764 - DNA, 15 bp, Homo sapiens
ccaattctttcttgg

SEQ ID NO: 1441765 - DNA, 15 bp, Homo sapiens
caattctttcttggc

SEQ ID NO: 1441766 - DNA, 15 bp, Homo sapiens
aattctttcttggcg

SEQ ID NO: 1441767 - DNA, 15 bp, Homo sapiens
attctttcttggcga

SEQ ID NO: 1441768 - DNA, 15 bp, Homo sapiens
ttctttcttggcgag

SEQ ID NO: 1441769 - DNA, 15 bp, Homo sapiens
tctttcttggcgaga

SEQ ID NO: 1441770 - DNA, 15 bp, Homo sapiens
ctttcttggcgagat

SEQ ID NO: 1441771 - DNA, 15 bp, Homo sapiens
tttcttggcgagatc

SEQ ID NO: 1441772 - DNA, 15 bp, Homo sapiens
ttcttggcgagatcc

SEQ ID NO: 1441773 - DNA, 15 bp, Homo sapiens
tcttggcgagatcca

SEQ ID NO: 1441774 - DNA, 15 bp, Homo sapiens
cttggcgagatccag

SEQ ID NO: 1441775 - DNA, 15 bp, Homo sapiens
ttggcgagatccagg

SEQ ID NO: 1441776 - DNA, 15 bp, Homo sapiens
tggcgagatccagga

SEQ ID NO: 1441777 - DNA, 15 bp, Homo sapiens
ggcgagatccaggag

SEQ ID NO: 1441778 - DNA, 15 bp, Homo sapiens
gcgagatccaggagc

SEQ ID NO: 1441779 - DNA, 15 bp, Homo sapiens
cgagatccaggagcc

SEQ ID NO: 1441780 - DNA, 15 bp, Homo sapiens
gagatccaggagccc

SEQ ID NO: 1441781 - DNA, 15 bp, Homo sapiens
agatccaggagccct

SEQ ID NO: 1441782 - DNA, 15 bp, Homo sapiens
gatccaggagccctc

SEQ ID NO: 1441783 - DNA, 15 bp, Homo sapiens
atccaggagccctct

SEQ ID NO: 1441784 - DNA, 15 bp, Homo sapiens
tccaggagccctctc

SEQ ID NO: 1441785 - DNA, 15 bp, Homo sapiens
ccaggagccctctcc

SEQ ID NO: 1441786 - DNA, 15 bp, Homo sapiens
caggagccctctcct

SEQ ID NO: 1441787 - DNA, 15 bp, Homo sapiens
aggagccctctcctg

SEQ ID NO: 1441788 - DNA, 15 bp, Homo sapiens
ggagccctctcctgg

SEQ ID NO: 1441789 - DNA, 15 bp, Homo sapiens
gagccctctcctggg

SEQ ID NO: 1441790 - DNA, 15 bp, Homo sapiens
agccctctcctgggg

SEQ ID NO: 1441791 - DNA, 15 bp, Homo sapiens
gccctctcctggggt

SEQ ID NO: 1441792 - DNA, 15 bp, Homo sapiens
ccctctcctggggtc

SEQ ID NO: 1441793 - DNA, 15 bp, Homo sapiens
cctctcctggggtcc

SEQ ID NO: 1441794 - DNA, 15 bp, Homo sapiens
ctctcctggggtcca

SEQ ID NO: 1441795 - DNA, 15 bp, Homo sapiens
tctcctggggtccag

SEQ ID NO: 1441796 - DNA, 15 bp, Homo sapiens
ctcctggggtccaga

SEQ ID NO: 1441797 - DNA, 15 bp, Homo sapiens
tcctggggtccagat

SEQ ID NO: 1441798 - DNA, 15 bp, Homo sapiens
cctggggtccagatc

SEQ ID NO: 1441799 - DNA, 15 bp, Homo sapiens
ctggggtccagatca

SEQ ID NO: 1441800 - DNA, 15 bp, Homo sapiens
tggggtccagatcag

SEQ ID NO: 1441801 - DNA, 15 bp, Homo sapiens
ggggtccagatcaga

SEQ ID NO: 1441802 - DNA, 15 bp, Homo sapiens
gggtccagatcagaa

SEQ ID NO: 1441803 - DNA, 15 bp, Homo sapiens
ggtccagatcagaac

SEQ ID NO: 1441804 - DNA, 15 bp, Homo sapiens
gtccagatcagaaca

SEQ ID NO: 1441805 - DNA, 15 bp, Homo sapiens
tccagatcagaacac

SEQ ID NO: 1441806 - DNA, 15 bp, Homo sapiens
ccagatcagaacacc

SEQ ID NO: 1441807 - DNA, 15 bp, Homo sapiens
cagatcagaacacct

SEQ ID NO: 1441808 - DNA, 15 bp, Homo sapiens
agatcagaacacctt

SEQ ID NO: 1441809 - DNA, 15 bp, Homo sapiens
gatcagaacaccttt

SEQ ID NO: 1441810 - DNA, 15 bp, Homo sapiens
atcagaacacctttc

SEQ ID NO: 1441811 - DNA, 15 bp, Homo sapiens
tcagaacacctttcc

SEQ ID NO: 1441812 - DNA, 15 bp, Homo sapiens
cagaacacctttcca

SEQ ID NO: 1441813 - DNA, 15 bp, Homo sapiens
agaacacctttccag

SEQ ID NO: 1441814 - DNA, 15 bp, Homo sapiens
gaacacctttccaga

SEQ ID NO: 1441815 - DNA, 15 bp, Homo sapiens
aacacctttccagaa

SEQ ID NO: 1441816 - DNA, 15 bp, Homo sapiens
acacctttccagaaa

SEQ ID NO: 1441817 - DNA, 15 bp, Homo sapiens
cacctttccagaaac

SEQ ID NO: 1441818 - DNA, 15 bp, Homo sapiens
acctttccagaaaca

SEQ ID NO: 1441819 - DNA, 15 bp, Homo sapiens
cctttccagaaacac

SEQ ID NO: 1441820 - DNA, 15 bp, Homo sapiens
ctttccagaaacacc

SEQ ID NO: 1441821 - DNA, 15 bp, Homo sapiens
tttccagaaacacca

SEQ ID NO: 1441822 - DNA, 15 bp, Homo sapiens
ttccagaaacaccat

SEQ ID NO: 1441823 - DNA, 15 bp, Homo sapiens
tccagaaacaccatc

SEQ ID NO: 1441824 - DNA, 15 bp, Homo sapiens
ccagaaacaccatcc

SEQ ID NO: 1441825 - DNA, 15 bp, Homo sapiens
cagaaacaccatccc

SEQ ID NO: 1441826 - DNA, 15 bp, Homo sapiens
agaaacaccatccca

SEQ ID NO: 1441827 - DNA, 15 bp, Homo sapiens
gaaacaccatcccat

SEQ ID NO: 1441828 - DNA, 15 bp, Homo sapiens
aaacaccatcccatg

SEQ ID NO: 1441829 - DNA, 15 bp, Homo sapiens
aacaccatcccatgt

SEQ ID NO: 1441830 - DNA, 15 bp, Homo sapiens
acaccatcccatgtt

SEQ ID NO: 1441831 - DNA, 15 bp, Homo sapiens
caccatcccatgtta

SEQ ID NO: 1441832 - DNA, 15 bp, Homo sapiens
accatcccatgttaa

SEQ ID NO: 1441833 - DNA, 15 bp, Homo sapiens
ccatcccatgttaaa

SEQ ID NO: 1441834 - DNA, 15 bp, Homo sapiens
catcccatgttaaat

SEQ ID NO: 1441835 - DNA, 15 bp, Homo sapiens
atcccatgttaaatt

SEQ ID NO: 1441836 - DNA, 15 bp, Homo sapiens
tcccatgttaaatta

SEQ ID NO: 1441837 - DNA, 15 bp, Homo sapiens
cccatgttaaattat

SEQ ID NO: 1441838 - DNA, 15 bp, Homo sapiens
ccatgttaaattatg

SEQ ID NO: 1441839 - DNA, 15 bp, Homo sapiens
catgttaaattatga

SEQ ID NO: 1441840 - DNA, 15 bp, Homo sapiens
atgttaaattatgaa

SEQ ID NO: 1441841 - DNA, 15 bp, Homo sapiens
tgttaaattatgaat

SEQ ID NO: 1441842 - DNA, 15 bp, Homo sapiens
gttaaattatgaatt

SEQ ID NO: 1441843 - DNA, 15 bp, Homo sapiens
ttaaattatgaatta

SEQ ID NO: 1441844 - DNA, 15 bp, Homo sapiens
taaattatgaattaa

SEQ ID NO: 1441845 - DNA, 15 bp, Homo sapiens
aaattatgaattaag

SEQ ID NO: 1441846 - DNA, 15 bp, Homo sapiens
aattatgaattaaga

SEQ ID NO: 1441847 - DNA, 15 bp, Homo sapiens
attatgaattaagaa

SEQ ID NO: 1441848 - DNA, 15 bp, Homo sapiens
ttatgaattaagaac

SEQ ID NO: 1441849 - DNA, 15 bp, Homo sapiens
tatgaattaagaaca

SEQ ID NO: 1441850 - DNA, 15 bp, Homo sapiens
atgaattaagaacac

SEQ ID NO: 1441851 - DNA, 15 bp, Homo sapiens
tgaattaagaacact

SEQ ID NO: 1441852 - DNA, 15 bp, Homo sapiens
gaattaagaacactg

SEQ ID NO: 1441853 - DNA, 15 bp, Homo sapiens
aattaagaacactga

SEQ ID NO: 1441854 - DNA, 15 bp, Homo sapiens
attaagaacactgaa

SEQ ID NO: 1441855 - DNA, 15 bp, Homo sapiens
ttaagaacactgaac

SEQ ID NO: 1441856 - DNA, 15 bp, Homo sapiens
taagaacactgaaca

SEQ ID NO: 1441857 - DNA, 15 bp, Homo sapiens
aagaacactgaacat

SEQ ID NO: 1441858 - DNA, 15 bp, Homo sapiens
agaacactgaacatg

SEQ ID NO: 1441859 - DNA, 15 bp, Homo sapiens
gaacactgaacatga

SEQ ID NO: 1441860 - DNA, 15 bp, Homo sapiens
aacactgaacatgaa

SEQ ID NO: 1441861 - DNA, 15 bp, Homo sapiens
acactgaacatgaag

SEQ ID NO: 1441862 - DNA, 15 bp, Homo sapiens
cactgaacatgaaga

SEQ ID NO: 1441863 - DNA, 15 bp, Homo sapiens
actgaacatgaagaa

SEQ ID NO: 1441864 - DNA, 15 bp, Homo sapiens
ctgaacatgaagaat

SEQ ID NO: 1441865 - DNA, 15 bp, Homo sapiens
tgaacatgaagaatg

SEQ ID NO: 1441866 - DNA, 15 bp, Homo sapiens
gaacatgaagaatgt

SEQ ID NO: 1441867 - DNA, 15 bp, Homo sapiens
aacatgaagaatgtt

SEQ ID NO: 1441868 - DNA, 15 bp, Homo sapiens
acatgaagaatgttt

SEQ ID NO: 1441869 - DNA, 15 bp, Homo sapiens
catgaagaatgttta

SEQ ID NO: 1441870 - DNA, 15 bp, Homo sapiens
atgaagaatgtttaa

SEQ ID NO: 1441871 - DNA, 15 bp, Homo sapiens
tgaagaatgtttaat

SEQ ID NO: 1441872 - DNA, 15 bp, Homo sapiens
gaagaatgtttaatt

SEQ ID NO: 1441873 - DNA, 15 bp, Homo sapiens
aagaatgtttaattc

SEQ ID NO: 1441874 - DNA, 15 bp, Homo sapiens
agaatgtttaattca

SEQ ID NO: 1441875 - DNA, 15 bp, Homo sapiens
gaatgtttaattcaa

SEQ ID NO: 1441876 - DNA, 15 bp, Homo sapiens
aatgtttaattcaaa

SEQ ID NO: 1441877 - DNA, 15 bp, Homo sapiens
atgtttaattcaaat

SEQ ID NO: 1441878 - DNA, 15 bp, Homo sapiens
tgtttaattcaaatt

SEQ ID NO: 1441879 - DNA, 15 bp, Homo sapiens
gtttaattcaaatta

SEQ ID NO: 1441880 - DNA, 15 bp, Homo sapiens
tttaattcaaattat

SEQ ID NO: 1441881 - DNA, 15 bp, Homo sapiens
ttaattcaaattatt

SEQ ID NO: 1441882 - DNA, 15 bp, Homo sapiens
taattcaaattattg

SEQ ID NO: 1441883 - DNA, 15 bp, Homo sapiens
aattcaaattattga

SEQ ID NO: 1441884 - DNA, 15 bp, Homo sapiens
attcaaattattgag

SEQ ID NO: 1441885 - DNA, 15 bp, Homo sapiens
ttcaaattattgagt

SEQ ID NO: 1441886 - DNA, 15 bp, Homo sapiens
tcaaattattgagta

SEQ ID NO: 1441887 - DNA, 15 bp, Homo sapiens
caaattattgagtaa

SEQ ID NO: 1441888 - DNA, 15 bp, Homo sapiens
aaattattgagtaaa

SEQ ID NO: 1441889 - DNA, 15 bp, Homo sapiens
aattattgagtaaac

SEQ ID NO: 1441890 - DNA, 15 bp, Homo sapiens
attattgagtaaaca

SEQ ID NO: 1441891 - DNA, 15 bp, Homo sapiens
ttattgagtaaacac

SEQ ID NO: 1441892 - DNA, 15 bp, Homo sapiens
tattgagtaaacact

SEQ ID NO: 1441893 - DNA, 15 bp, Homo sapiens
attgagtaaacactt

SEQ ID NO: 1441894 - DNA, 15 bp, Homo sapiens
ttgagtaaacactta

SEQ ID NO: 1441895 - DNA, 15 bp, Homo sapiens
tgagtaaacacttac

SEQ ID NO: 1441896 - DNA, 15 bp, Homo sapiens
gagtaaacacttaca

SEQ ID NO: 1441897 - DNA, 15 bp, Homo sapiens
agtaaacacttacaa

SEQ ID NO: 1441898 - DNA, 15 bp, Homo sapiens
gtaaacacttacaaa

SEQ ID NO: 1441899 - DNA, 15 bp, Homo sapiens
taaacacttacaaaa

SEQ ID NO: 1441900 - DNA, 15 bp, Homo sapiens
aaacacttacaaaat

SEQ ID NO: 1441901 - DNA, 15 bp, Homo sapiens
aacacttacaaaatt

SEQ ID NO: 1441902 - DNA, 15 bp, Homo sapiens
acacttacaaaatta

SEQ ID NO: 1441903 - DNA, 15 bp, Homo sapiens
cacttacaaaattaa

SEQ ID NO: 1441904 - DNA, 15 bp, Homo sapiens
acttacaaaattaaa

SEQ ID NO: 1441905 - DNA, 15 bp, Homo sapiens
cttacaaaattaaaa

SEQ ID NO: 1441906 - DNA, 15 bp, Homo sapiens
ttacaaaattaaaat

SEQ ID NO: 1441907 - DNA, 15 bp, Homo sapiens
tacaaaattaaaata

SEQ ID NO: 1441908 - DNA, 15 bp, Homo sapiens
acaaaattaaaatat

SEQ ID NO: 1441909 - DNA, 15 bp, Homo sapiens
caaaattaaaatata

SEQ ID NO: 1441910 - DNA, 15 bp, Homo sapiens
aaattaaaatataac

SEQ ID NO: 1441911 - DNA, 15 bp, Homo sapiens
aattaaaatataaca

SEQ ID NO: 1441912 - DNA, 15 bp, Homo sapiens
attaaaatataacat

SEQ ID NO: 1441913 - DNA, 15 bp, Homo sapiens
ttaaaatataacatt

SEQ ID NO: 1441914 - DNA, 15 bp, Homo sapiens
taaaatataacattt

SEQ ID NO: 1441915 - DNA, 15 bp, Homo sapiens
aaaatataacattta

SEQ ID NO: 1441916 - DNA, 15 bp, Homo sapiens
aaatataacatttaa

SEQ ID NO: 1441917 - DNA, 15 bp, Homo sapiens
aatataacatttaat

SEQ ID NO: 1441918 - DNA, 15 bp, Homo sapiens
atataacatttaata

SEQ ID NO: 1441919 - DNA, 15 bp, Homo sapiens
tataacatttaataa

SEQ ID NO: 1441920 - DNA, 15 bp, Homo sapiens
ataacatttaataaa

SEQ ID NO: 1441921 - DNA, 15 bp, Homo sapiens
taacatttaataaaa

SEQ ID NO: 1441922 - DNA, 15 bp, Homo sapiens
aacatttaataaaaa

SEQ ID NO: 1441923 - DNA, 15 bp, Homo sapiens
acatttaataaaaat

SEQ ID NO: 1441924 - DNA, 15 bp, Homo sapiens
catttaataaaaata

SEQ ID NO: 1441925 - DNA, 15 bp, Homo sapiens
atttaataaaaatag

SEQ ID NO: 1441926 - DNA, 15 bp, Homo sapiens
tttaataaaaatagc

SEQ ID NO: 1441927 - DNA, 15 bp, Homo sapiens
ttaataaaaatagca

SEQ ID NO: 1441928 - DNA, 15 bp, Homo sapiens
taataaaaatagcaa

SEQ ID NO: 1441929 - DNA, 15 bp, Homo sapiens
aataaaaatagcaag

SEQ ID NO: 1441930 - DNA, 15 bp, Homo sapiens
ataaaaatagcaaga

SEQ ID NO: 1441931 - DNA, 15 bp, Homo sapiens
taaaaatagcaagat

SEQ ID NO: 1441932 - DNA, 15 bp, Homo sapiens
aaaaatagcaagatt

SEQ ID NO: 1441933 - DNA, 15 bp, Homo sapiens
aaaatagcaagattg

SEQ ID NO: 1441934 - DNA, 15 bp, Homo sapiens
aaatagcaagattga

SEQ ID NO: 1441935 - DNA, 15 bp, Homo sapiens
aatagcaagattgag

SEQ ID NO: 1441936 - DNA, 15 bp, Homo sapiens
atagcaagattgagg

SEQ ID NO: 1441937 - DNA, 15 bp, Homo sapiens
tagcaagattgagga

SEQ ID NO: 1441938 - DNA, 15 bp, Homo sapiens
agcaagattgaggaa

SEQ ID NO: 1441939 - DNA, 15 bp, Homo sapiens
gcaagattgaggaac

SEQ ID NO: 1441940 - DNA, 15 bp, Homo sapiens
caagattgaggaaca

SEQ ID NO: 1441941 - DNA, 15 bp, Homo sapiens
aagattgaggaacaa

SEQ ID NO: 1441942 - DNA, 15 bp, Homo sapiens
agattgaggaacaag

SEQ ID NO: 1441943 - DNA, 15 bp, Homo sapiens
gattgaggaacaagc

SEQ ID NO: 1441944 - DNA, 15 bp, Homo sapiens
attgaggaacaagca

SEQ ID NO: 1441945 - DNA, 15 bp, Homo sapiens
ttgaggaacaagcac

SEQ ID NO: 1441946 - DNA, 15 bp, Homo sapiens
tgaggaacaagcact

SEQ ID NO: 1441947 - DNA, 15 bp, Homo sapiens
gaggaacaagcactt

SEQ ID NO: 1441948 - DNA, 15 bp, Homo sapiens
aggaacaagcacttc

SEQ ID NO: 1441949 - DNA, 15 bp, Homo sapiens
ggaacaagcacttca

SEQ ID NO: 1441950 - DNA, 15 bp, Homo sapiens
gaacaagcacttcac

SEQ ID NO: 1441951 - DNA, 15 bp, Homo sapiens
aacaagcacttcaca

SEQ ID NO: 1441952 - DNA, 15 bp, Homo sapiens
acaagcacttcacaa

SEQ ID NO: 1441953 - DNA, 15 bp, Homo sapiens
caagcacttcacaaa

SEQ ID NO: 1441954 - DNA, 15 bp, Homo sapiens
aagcacttcacaaat

SEQ ID NO: 1441955 - DNA, 15 bp, Homo sapiens
agcacttcacaaata

SEQ ID NO: 1441956 - DNA, 15 bp, Homo sapiens
gcacttcacaaatat

SEQ ID NO: 1441957 - DNA, 15 bp, Homo sapiens
cacttcacaaatatt

SEQ ID NO: 1441958 - DNA, 15 bp, Homo sapiens
acttcacaaatattg

SEQ ID NO: 1441959 - DNA, 15 bp, Homo sapiens
cttcacaaatattgg

SEQ ID NO: 1441960 - DNA, 15 bp, Homo sapiens
ttcacaaatattggt

SEQ ID NO: 1441961 - DNA, 15 bp, Homo sapiens
tcacaaatattggtt

SEQ ID NO: 1441962 - DNA, 15 bp, Homo sapiens
cacaaatattggttt

SEQ ID NO: 1441963 - DNA, 15 bp, Homo sapiens
acaaatattggtttc

SEQ ID NO: 1441964 - DNA, 15 bp, Homo sapiens
caaatattggtttcc

SEQ ID NO: 1441965 - DNA, 15 bp, Homo sapiens
aaatattggtttccc

SEQ ID NO: 1441966 - DNA, 15 bp, Homo sapiens
aatattggtttccca

SEQ ID NO: 1441967 - DNA, 15 bp, Homo sapiens
atattggtttcccag

SEQ ID NO: 1441968 - DNA, 15 bp, Homo sapiens
tattggtttcccaga

SEQ ID NO: 1441969 - DNA, 15 bp, Homo sapiens
attggtttcccagaa

SEQ ID NO: 1441970 - DNA, 15 bp, Homo sapiens
ttggtttcccagaat

SEQ ID NO: 1441971 - DNA, 15 bp, Homo sapiens
tggtttcccagaatg

SEQ ID NO: 1441972 - DNA, 15 bp, Homo sapiens
ggtttcccagaatgt

SEQ ID NO: 1441973 - DNA, 15 bp, Homo sapiens
gtttcccagaatgtc

SEQ ID NO: 1441974 - DNA, 15 bp, Homo sapiens
tttcccagaatgtct

SEQ ID NO: 1441975 - DNA, 15 bp, Homo sapiens
ttcccagaatgtctg

SEQ ID NO: 1441976 - DNA, 15 bp, Homo sapiens
tcccagaatgtctga

SEQ ID NO: 1441977 - DNA, 15 bp, Homo sapiens
cccagaatgtctgag

SEQ ID NO: 1441978 - DNA, 15 bp, Homo sapiens
ccagaatgtctgagg

SEQ ID NO: 1441979 - DNA, 15 bp, Homo sapiens
cagaatgtctgagga

SEQ ID NO: 1441980 - DNA, 15 bp, Homo sapiens
agaatgtctgaggag

SEQ ID NO: 1441981 - DNA, 15 bp, Homo sapiens
gaatgtctgaggagg

SEQ ID NO: 1441982 - DNA, 15 bp, Homo sapiens
aatgtctgaggaggt

SEQ ID NO: 1441983 - DNA, 15 bp, Homo sapiens
atgtctgaggaggtg

SEQ ID NO: 1441984 - DNA, 15 bp, Homo sapiens
tgtctgaggaggtgt

SEQ ID NO: 1441985 - DNA, 15 bp, Homo sapiens
gtctgaggaggtgta

SEQ ID NO: 1441986 - DNA, 15 bp, Homo sapiens
tctgaggaggtgtat

SEQ ID NO: 1441987 - DNA, 15 bp, Homo sapiens
ctgaggaggtgtata

SEQ ID NO: 1441988 - DNA, 15 bp, Homo sapiens
tgaggaggtgtatag

SEQ ID NO: 1441989 - DNA, 15 bp, Homo sapiens
gaggaggtgtataga

SEQ ID NO: 1441990 - DNA, 15 bp, Homo sapiens
aggaggtgtatagaa

SEQ ID NO: 1441991 - DNA, 15 bp, Homo sapiens
ggaggtgtatagaag

SEQ ID NO: 1441992 - DNA, 15 bp, Homo sapiens
gaggtgtatagaagt

SEQ ID NO: 1441993 - DNA, 15 bp, Homo sapiens
aggtgtatagaagtt

SEQ ID NO: 1441994 - DNA, 15 bp, Homo sapiens
ggtgtatagaagtta

SEQ ID NO: 1441995 - DNA, 15 bp, Homo sapiens
gtgtatagaagttaa

SEQ ID NO: 1441996 - DNA, 15 bp, Homo sapiens
tgtatagaagttaag

SEQ ID NO: 1441997 - DNA, 15 bp, Homo sapiens
gtatagaagttaaga

SEQ ID NO: 1441998 - DNA, 15 bp, Homo sapiens
tatagaagttaagaa

SEQ ID NO: 1441999 - DNA, 15 bp, Homo sapiens
atagaagttaagaat

SEQ ID NO: 1442000 - DNA, 15 bp, Homo sapiens
tagaagttaagaata

SEQ ID NO: 1442001 - DNA, 15 bp, Homo sapiens
agaagttaagaatat

SEQ ID NO: 1442002 - DNA, 15 bp, Homo sapiens
gaagttaagaatatg

SEQ ID NO: 1442003 - DNA, 15 bp, Homo sapiens
aagttaagaatatgt

SEQ ID NO: 1442004 - DNA, 15 bp, Homo sapiens
agttaagaatatgtc

SEQ ID NO: 1442005 - DNA, 15 bp, Homo sapiens
gttaagaatatgtcc

SEQ ID NO: 1442006 - DNA, 15 bp, Homo sapiens
ttaagaatatgtcct

SEQ ID NO: 1442007 - DNA, 15 bp, Homo sapiens
taagaatatgtcctc

SEQ ID NO: 1442008 - DNA, 15 bp, Homo sapiens
aagaatatgtcctcc

SEQ ID NO: 1442009 - DNA, 15 bp, Homo sapiens
agaatatgtcctcca

SEQ ID NO: 1442010 - DNA, 15 bp, Homo sapiens
gaatatgtcctccag

SEQ ID NO: 1442011 - DNA, 15 bp, Homo sapiens
aatatgtcctccagc

SEQ ID NO: 1442012 - DNA, 15 bp, Homo sapiens
atatgtcctccagcc

SEQ ID NO: 1442013 - DNA, 15 bp, Homo sapiens
tatgtcctccagcca

SEQ ID NO: 1442014 - DNA, 15 bp, Homo sapiens
atgtcctccagccag

SEQ ID NO: 1442015 - DNA, 15 bp, Homo sapiens
tgtcctccagccaga

SEQ ID NO: 1442016 - DNA, 15 bp, Homo sapiens
gtcctccagccagag

SEQ ID NO: 1442017 - DNA, 15 bp, Homo sapiens
tcctccagccagaga

SEQ ID NO: 1442018 - DNA, 15 bp, Homo sapiens
cctccagccagagag

SEQ ID NO: 1442019 - DNA, 15 bp, Homo sapiens
ctccagccagagaga

SEQ ID NO: 1442020 - DNA, 15 bp, Homo sapiens
tccagccagagagat

SEQ ID NO: 1442021 - DNA, 15 bp, Homo sapiens
ccagccagagagatc

SEQ ID NO: 1442022 - DNA, 15 bp, Homo sapiens
cagccagagagatct

SEQ ID NO: 1442023 - DNA, 15 bp, Homo sapiens
agccagagagatctg

SEQ ID NO: 1442024 - DNA, 15 bp, Homo sapiens
gccagagagatctgt

SEQ ID NO: 1442025 - DNA, 15 bp, Homo sapiens
ccagagagatctgtg

SEQ ID NO: 1442026 - DNA, 15 bp, Homo sapiens
cagagagatctgtgt

SEQ ID NO: 1442027 - DNA, 15 bp, Homo sapiens
agagagatctgtgtt

SEQ ID NO: 1442028 - DNA, 15 bp, Homo sapiens
gagagatctgtgttc

SEQ ID NO: 1442029 - DNA, 15 bp, Homo sapiens
agagatctgtgttca

SEQ ID NO: 1442030 - DNA, 15 bp, Homo sapiens
gagatctgtgttcaa

SEQ ID NO: 1442031 - DNA, 15 bp, Homo sapiens
agatctgtgttcaat

SEQ ID NO: 1442032 - DNA, 15 bp, Homo sapiens
gatctgtgttcaatc

SEQ ID NO: 1442033 - DNA, 15 bp, Homo sapiens
atctgtgttcaatca

SEQ ID NO: 1442034 - DNA, 15 bp, Homo sapiens
tctgtgttcaatcac

SEQ ID NO: 1442035 - DNA, 15 bp, Homo sapiens
ctgtgttcaatcaca

SEQ ID NO: 1442036 - DNA, 15 bp, Homo sapiens
tgtgttcaatcacac

SEQ ID NO: 1442037 - DNA, 15 bp, Homo sapiens
gtgttcaatcacact

SEQ ID NO: 1442038 - DNA, 15 bp, Homo sapiens
tgttcaatcacacta

SEQ ID NO: 1442039 - DNA, 15 bp, Homo sapiens
gttcaatcacactat

SEQ ID NO: 1442040 - DNA, 15 bp, Homo sapiens
ttcaatcacactatt

SEQ ID NO: 1442041 - DNA, 15 bp, Homo sapiens
tcaatcacactattt

SEQ ID NO: 1442042 - DNA, 15 bp, Homo sapiens
caatcacactattta

SEQ ID NO: 1442043 - DNA, 15 bp, Homo sapiens
aatcacactatttaa

SEQ ID NO: 1442044 - DNA, 15 bp, Homo sapiens
atcacactatttaag

SEQ ID NO: 1442045 - DNA, 15 bp, Homo sapiens
tcacactatttaagt

SEQ ID NO: 1442046 - DNA, 15 bp, Homo sapiens
cacactatttaagtt

SEQ ID NO: 1442047 - DNA, 15 bp, Homo sapiens
acactatttaagtta

SEQ ID NO: 1442048 - DNA, 15 bp, Homo sapiens
cactatttaagttac

SEQ ID NO: 1442049 - DNA, 15 bp, Homo sapiens
actatttaagttact

SEQ ID NO: 1442050 - DNA, 15 bp, Homo sapiens
ctatttaagttactt

SEQ ID NO: 1442051 - DNA, 15 bp, Homo sapiens
tatttaagttactta

SEQ ID NO: 1442052 - DNA, 15 bp, Homo sapiens
atttaagttacttag

SEQ ID NO: 1442053 - DNA, 15 bp, Homo sapiens
tttaagttacttagc

SEQ ID NO: 1442054 - DNA, 15 bp, Homo sapiens
ttaagttacttagct

SEQ ID NO: 1442055 - DNA, 15 bp, Homo sapiens
taagttacttagctt

SEQ ID NO: 1442056 - DNA, 15 bp, Homo sapiens
aagttacttagcttc

SEQ ID NO: 1442057 - DNA, 15 bp, Homo sapiens
agttacttagcttct

SEQ ID NO: 1442058 - DNA, 15 bp, Homo sapiens
gttacttagcttctc

SEQ ID NO: 1442059 - DNA, 15 bp, Homo sapiens
ttacttagcttctcc
